United States Patent Application Publication US 2009/0191541 A1 - sequence listing, part 2

SEQ ID NO: 6361 - DNA, 392 bp, Glycine max
tattactgcctctagggaccactagatctattacatcatcaagctgagacatagtataattagtgacaaatcattgtaaaacaactaatttgaggatcttatttttactagtgatatccaaccttaagtaggtcaggaatctcatctctcgaagtcacaagcccaataagtttgtcaccaacagtatctggcatcactgaagtaatgacctacaataaaagaagaaatacagatgagagaaaatatgtgtaagtgaattaatgacaaagaaacaacagtcaattcagatccagaataatgtcataaaacaacaatctcaactaaaataaatagatattagatagtactaaccttgtgtaagattgcatgtgatcgtccggcttcctttccac

SEQ ID NO: 6362 - DNA, 365 bp, Glycine max
  unsure at all n locations
atgaagactctcccactatctagatgttaatctgggatctctatcagagactatgctagaatgaataccgtgtagtctaactatctcattgacatacaagctagtcaacctctctaacgagtatctaatgttaattacgatgaagtgagcagatatggtcaacctgtctacaataacctaaatggaatctaaacctttgggggtcctaggtaaccccaccatgaaatccatggagatactatcccacttccacttaggtatctctaaaggttgcaacttccctgaaggcttctggtgttctatcttagctntctgacacactgngcacacaaggacaaactcattaacttctttcttcataccct

SEQ ID NO: 6363 - DNA, 363 bp, Glycine max
  unsure at all n locations
agctngcttctatgtccctttcattgctntaatngttgaataatccttgaaaaattgtcttgttaaaactccattggtttagctntcattntcatttttntgtctttgtttattgcttgtctctttgtttcgttgtttgtgagttgccatatagggaattgcaaaggtggattggtgccatcctcatgcaagctccattggagcttgtaggcctaggatcttcttcatcaatggattcctttgcttcttggaagataaatggcagcggaatggagaacgaagagagagaggagatgccacttcaacgagaagatgagtctataagaagctcaccaccatatgaggccatggataatagctggg

SEQ ID NO: 6364 - DNA, 453 bp, Glycine max
  unsure at all n locations
gcttaagaaacatggcgtcagcaaacttcttatttccagaaggaatttctatctgtatacctccaatctttaatggagagggttaccactactggaaaactcgaatgcacatttttattgaggcaatagacttaagtatttgggaagccatagaaatagggccttatatacccaccacagtagaaagaattacaatagatggaagcacatcaagtgaaagcataacaatagaaaaacctagagatagatggtctgaagaggatagaagacgagtacaatacaatttaaaagccaaaaacataataacatctgccctgngaatggatgaatgtttcagggtttcaaattgtaagagtgctaaggaaatgtgggacactctacaattaacacatgaaggaactacagatgttaaaagatctatgataaacacactaactcatgaatatgaactat

SEQ ID NO: 6365 - DNA, 428 bp, Glycine max
  unsure at all n locations
aatataccttcttctgtatttgcatcanacttgcctaagttntctttcccgttgtttaacacaaagcatttacatccaaaaacatgaagatgagaaatgtttggttttcttcctctntacaattcatatggtgttttctttaagataggtgtaattaatgctctattcattatatagcatgcaatgttaatagcttcaacccanaaatacttaggaagatttgtatcattaagcaaacttctggctaattcttctaatgatctatttttcctctcaactactccattntttaaggagttctaggtgcagaaaagttatgttcaatgccattttcatcacanaataattcanaatatttattntcaaattcttcttcatgatcactcctaatggatgaaatattgagattttttgtatttaaatgattt

SEQ ID NO: 6366 - DNA, 435 bp, Glycine max
  unsure at all n locations
agtcacctgccgcatgcaagcttctgcttattagtgcacaactccttcaagaatttatcatatcttnggaatttctatattgcatccaacagaggtatgtttacctctacttttctaaatgtttccaagatctgatggtgagggcaactggcacatagttttttaaatctctcccaatattcatataggttctccccactgagttgtctaatacctgaaatatcctttctgatggttgtggtcctggaagaagggaaaattttttctaagaatactctcttgaggtcatcccagctcgtgatggaccttggagcaaggtaatatagccagtcctttgccactccctctaaagaatgaggaaaggccttcagaaatatatgatcctcctggacatctggtggtttcatggtgaagcagacaatatgaaattctttc

SEQ ID NO: 6367 - DNA, 497 bp, Glycine max
  unsure at all n locations
atctctaagtcacctgcggctgcaagcttaagaataagataagatcaagactcaagaatcattagaagacttaatcaagataagtatgagaaggagttttcaaaaactgagtagcacatgtaattttcacaaaacatgtttaccaaagagttnttactctttggtaattgattaccagattgctgtaatcgattaccagtagcaaaattgttgtgaaaaagttntcaaattgaatttacaacgttccaattaatttcaaaaagctataatcgattacaatgttttggtaatcgattaccagtacctctgaacgttgaaattcanattcaaatgtgaagagtcacatcctttcacantaaaagcttgtgtaatcgattacactgatttggtaatcgattaccagtgatggcttatgaataaatcanaaaatgtaactcttcanaaggttttgactnttcacnatggtttaagttttctaaaagtataactcttataat

SEQ ID NO: 6368 - DNA, 368 bp, Glycine max
  unsure at all n locations
gcttgtagaacaccaaagatgtaagacanaattttgtatgtaagtgtaaatttgaaacaataagagctaatatacaatcagatacctgaaagtgataatttatgttgctatgatccctaacaatgtataattagtccctgttagattacatttatctttacatgatcttgtatatattattacacaaaaacttatgattctgattgatatgtaattacctaataatcagtaattgattgatatgtaatcaatattgattctgatttctccattataaataaagatgagatgtggtcatctaagacacaaaattacagtacaactaatacactgctatatggtatcaaagcttaagttattcttgacag

SEQ ID NO: 6369 - DNA, 440 bp, Glycine max
  unsure at all n locations
ggccgaagtggagaaacaatgtggaaagcatattaagattatgagatccgatagaggtggagagtacaacggtagatacacgaagaatgaacaagcacctggtccatttgtgaaatttcttcaagaacataggattgttgtccattacactgtgcctttagatcaaaatgatgcggtaaaaagaagaaactaaactntaatggacatggtgaaaagtataaggagtaatagaaaacttcctcaattcttgtggattaaatctctaaaggcggttgtgtatatattaaatcgagtatcaaccaatgttgtctcaaagacanccttttgagctattcaaaggttggaaaccgagttngcgacatatatgcatttggngatgcccgtctgaagtgagaacttataacccacaagaaaagaaactagacccaatgactattagt

SEQ ID NO: 6370 - DNA, 461 bp, Glycine max
  unsure at all n locations
gagtcatcgagtcacttttccattaagtatgaataaatgttatgttccttttgctntaatccattctgatgtatggtgtccatccccaaaatcttctatctctggttatcggtggtttgtgatatttgttgatgattgcactcgaatgacttggatttacttgttgaaacataaaaaaatgaagtggtacacatatttcaacaatttcataaaatgattcagactcaatattcaaagaagattaggatccttcgctctgataatggtggggagtttgtaaatcaccaattccatgagtatttcaaaaaacacggacttattcacgaaaccacgtgtccacaaactccacaacataatggtattgcagaacagaaaattccgcatatccttganactgctcgtgctcttttacatggagcacatgtgcctcaccaccattggactgatgttgttactacaac

SEQ ID NO: 6371 - DNA, 478 bp, Glycine max
  unsure at all n locations
agcttatctntcagagtctngaaagctgccaagcattcatcatcaagcttgaagactgcctctntattcagcangttgctcaatggtttgacgaatttagagaagtccttgatgaacctctgatagaagcctgcgtattcgaggaaactcccgatacccttggcatttattggtggaggtaaattctcaatgacnatcaatttggctttgtccaccttaatgcctcaggctgaaatcttgtggcccaatattattccttcttggaccatgaaatgacacttctccttattcagcaccagaattgcttcaactcatcttcgcaatacgagctctagattagtcaagaagtagtcaaaggaaagcccaaaaattgagaaattgtccatgaagacctttatgcactnttctaccatgtcntgcaaaatagctagcacgtacctctagaaaagtngtggtgcattacataacccgaatgaca

SEQ ID NO: 6372 - DNA, 389 bp, Glycine max
  unsure at all n locations
catttttattatagttataatttatatgttttaatgtaatgaaaaactgaatttntaagtcaaactctgtggatgaatatatttttattaaaagatgtatgaaattacacttaactcacggcgaagtaacaatatgcctcagactacatgtacaattaagctattagggagaaactatattattttatgaatntggacaataagttctttcattaagtatataatatgggtattcattgtaaaaaattattatagtaattcacatctataattgtataaaagtatacgtttgatgtatgatttatgataattttatgataaaatacttactaccaagaatattatttctgcacatatgggttataaagcttaccaatatatatatatat

SEQ ID NO: 6373 - DNA, 223 bp, Glycine max
ttatcgagacactcgaaattgaacaattcaagctctcgagaatttcatatggtcatatcctttcactgcgaggtccgatgcaggcgcataatataatgacgacgcatctaaattgaacaaccgaagctctcgagaaattcacatgtgcataaccattcacacggagggcatattaatgcgcataatatatcgatacgcatcatactgtacaacggtagctctg

SEQ ID NO: 6374 - DNA, 476 bp, Glycine max
  unsure at all n locations
atcctcagagtcacctgccgcatgcaagcttgaactatctgtgattccacaacttcaatgttttctcgtaaaatagttcatgtcattaataaatatagcaaaaacattgaatttcacccacaanaagggacttttcttcaacttanataggctntgtacatataaaagaaggatttatgagaaattgaatctaaccaccccccgaaatataaagtatcaacactgtaattatattctaattacccaaaatagttgaggacctcaattatttgatctgctaaatcttcagcagaaggaataggatcctcggcacaattggcagttgctcccaacttcaagaactcttgtggaagtttcagagggaaaactatatgaataataatattcagttctacatgcaatanaaaatacatncaaatcaaccaacttacanacctcatgtccaggaggactgatatgatatatgcanaagttgt

SEQ ID NO: 6375 - DNA, 349 bp, Glycine max
  unsure at all n locations
agcttccattgctcaatttcgagcatctcgatatattatgcgccttaataggacctccaagtgaaaatttatgacctattgaatngctcaagagcttccattgttcaatttcgagcgtctcgatatattatgcacctgaatcgtacctccgagttaaaggttaagaccatntgaaaatcttaagagcttccattgttcaatttcgagcgtcttgatatataatacgcctcaatcagacctccgagttaaaagttatgagcatttgaatttctagagagcttctgttgttcaatttcgagcgtctcgatatattatgtgcctgaatcggacatccgagtganaagttatg

SEQ ID NO: 6376 - DNA, 409 bp, Glycine max
  unsure at all n locations
caatcacatttagcaactcagtggatatgttgtggattgatagaacataagtaatgtaaagtaaatatagtactttactagaaggaaaatgattgttgaacatatgttggtgcttgaaatttgactttccaaaagtaatcatccttagtagaatcatatgttgttgaattaggccaatagtattattacttaccctattctttaatttaggatatatntatcattaattatctttagattaaattatccttaattaatcgttatgacaaataattacaagacagaaaaatgtattaataatgataggggtatttttaaaaaatacaaatgtaattattttgatacaaatttaagacaattatacttcacttgaatgaaactgtaaatcaacattatttncagcatgata

SEQ ID NO: 6377 - DNA, 410 bp, Glycine max
  unsure at all n locations
ggagcgtctcgatatattactgtactcaatcggacatccgaataaaaagttattgtcgtttgaattngcttagagcttctgttntcaatgtggagcgtctcgatatattacgggactcaatcagacatccaagttaaaagttaatgtcgtgtgaatattatacgaggttccaatttcaatttggagcatcgcgatatattacgggactctattggagatccgagaacaaagttattgtcgtttgaatntgatacgagcttccgttttcaatttggagcgtctcgatatattacgggactcaatcggacatccgaataaaaagatattgtcgttagaatttgcttacagcttctgtttcaagttggagcatttgattattacgggactaatcagacaccaagttaaaagtt

SEQ ID NO: 6378 - DNA, 433 bp, Glycine max
  unsure at all n locations
agcttgtaggcctnggatcttcttcatcaatggattcctttgcttcttgagggtctgatgcagcagaatggagaaggagaaagatgaatggagacgccacttcaagtagaagatgagtctagaaaaagctcaccaccataggatgccatggataagagcttgaaggtagaagaagatgaatgaagggacaggataagaagagcacgaaatttagtgcctctaaagaagtctgaactttgaagtttaattctcaaaatgatcaaagttcanaanaatgcacacacatgacctctatntatagcctaagtgtcacacaaaattagagggagaattgaatttctattcaaatttcacttaaatnntgtggagccaaatttggagccaaaatttcactaatttatgatagtgaattttagttatggttcagcccact

SEQ ID NO: 6379 - DNA, 498 bp, Glycine max
  unsure at all n locations
tctggactataacgcccttatgacggtaacgtatacacttatactaaatcactgtcatataaattgttagaatttgtgccaaagcagatactatctaacctaatactttatagtatattatttgccatattagtgttagattatactgtggagtacctttcacatataatacaaatatatattacgtattagacatgacctgacctgcatattcccaatacccggtacatcgaacaaattaatatgtgattgaaaggaggaaagtaatgtatgattgaaaggatctcaccaaaatgttaatatgtgaataattaatatctaatgcatctaattaagggttatcggaagagtaaaagggtgtccattaatatacacagtattcgagtatatgttattgtgcagtttcaataccaagtaactgctacgacaattacattaactactcattacctatgtttggtaannataatgaatcattatcaattgcatatatacaat

SEQ ID NO: 6380 - DNA, 413 bp, Glycine max
  unsure at all n locations
agcttcctcaccatggaccctanatctatggctggccaacctattagatctggcattcctgttagctctgtaatgactggaagctagtaatggagtgctaccagttctagagaatcggtacgatgaataccggccctgtgttttcttccagaatttggtgcttaaaaattcagcaccaggtagcaggcaacaagtattcttaggagcatcagatttagatatccttccacttgatacagccaaatcataagagatctcatccaatgctaactccaggccatgcacacgagtctctaaagtatgcattccattttcagagttcctcatgaatttctgcataanaatatatggtggatattgtcagacatgcccatcattcgagagttggcatactctacatatatgtgcacata

SEQ ID NO: 6381 - DNA, 290 bp, Glycine max
cttggccttttgccacaactctcgtaaatgggagagaaatgttcatctaaagcatacaagtccctaatattatcaaatcctaaaatttgagctcctagggagcaaaacaatgtgtgtctcctatagagggcatcagctaccacattcgtttttccctttttgtatttgataacatatgaaaattgctctaggaactctacccattttgcatgcctcttgtttaacttgctttgccctctaatgtacttaagtgattgatgatcactatgaatgacaaattccttggaaac

SEQ ID NO: 6382 - DNA, 420 bp, Glycine max
  unsure at all n locations
atctgactcacacgaggctggatagactactcgtatatgactctctagttcccatgtggcgtcttctcctaatgcacctccctagatcaacttgactaatggattctgcttctctcttacgtgctttgtacgcatatactccatcctcanaggcaatgtttgatatgtcaagttctccttcacttgtatgtcatccaatttgatcacatgagatggatcatggatatacttacgagttaagacacaagaaagacattgtgaagattataaagagaccgnggtaatgcaatttggtatgccatgggactgactctnttagagaatatggaacggaccacgaaaatgaggtgtgagtctttgagatttacatgctcgaccaacccaagtgcacggagtgactctagagaatacatgatcacc

SEQ ID NO: 6383 - DNA, 423 bp, Glycine max
  unsure at all n locations
actgaacatattctctaatgatatgatgatcaatgtcaatgtgcttggatcgttcatgatgagcagggtttgaagcaagacttatagcagatttattatcacaaaataacatcacagagggcacatcaacttcaaagtgaagaattaacttgcttaaccaaacaatntcactagtaacagaagacaagacacgatatttagcttcagtggatgatattgaaacagtggattgtttcttagaacgccaagaaagaagttattntccaaaaagacacataagtcagaagtggatcttctggtatcaacacaaccggcccaatcagcatctgcaaaggcagtgaggttgagagagttctgagcatggaaaaacatacctcgtccaagagcagaattgatatactgcantaaatgatgaacaacatg

SEQ ID NO: 6384 - DNA, 439 bp, Glycine max
  unsure at all n locations
tgactgaagacattgaagtctntngagatgtaaatgaagacattgatagtcttgacaaaagactctgatagtctttgaaatgtaaagaagactttcatagtcttgataaaagactctgatagtcttttaaatgtaaagaagactttgatagtcttgacaaaagactctgatagtcttggaaaaataaagaagactttgatagtcttgacaaaagacattgaagtctctgaaacgtaaagaagactttgatagtcttaacaaaagacattgaagtctttgaaatgtaaatgaggacattgtagtctttagaatgcataaagatagaggactntgagtcctatgaaagataaagacaaaggactttgattcctatgaaagataaacgcgaggactntgagtcctatgaaagatataagagatgagtgtataatctcaacat

SEQ ID NO: 6385 - DNA, 370 bp, Glycine max
  unsure at all n locations
cgacaataacatnttactcggatgtctgattgngtcccgttatatatcgagacgctccanatngagaacggaagctctgagcaaaatcaaaagacaacaactttttacttggatgtccgattgtgtcccgctgtatgtcgcgacnctcgaaatttagaacagaagctctgagcaaaatcgaatgataataagattttactcggatgtccgaatgaatcccgtaatatatcaagacgctcgtaattgaaaacggaagctctgagcaaattctaacaacaataacgtcttactcagatgtctgattcagtctcgtaatatatcgtgacgctcgaaatcgaaacaaaagctctgaataaatcaaaagacaata

SEQ ID NO: 6386 - DNA, 413 bp, Glycine max
  unsure at all n locations
agcttctcatttcaatttcaagcgtctagatatattactggacacaatcggacatccgagtaaaatgttattgtcgtttgaatatgctcagagcatctgttatcaatttcgagcgtctcgatatataacgggactcaatccgacatccgagataanagttattgtcgttggaatttgcccagagcttcatatttcaatttcgagcgtctcaaaatattagagcactcaatcggacatcnttagtaaaagttattgtcgtttgaatttgctacgagcttctatattcaagtacgagcatctcgatatactactggtcccaatcggacatccgagtaaaaagttattgtcgttaatatattctaagagcttatgtattcaatttcgagcgtcactatatattacgggacttaatc

SEQ ID NO: 6387 - DNA, 222 bp, Glycine max
  unsure at all n locations
cagctcgtccttatggttattaatgtatgaatcgttgcaattgcacctcttccttgtcaggcaatatatctgtttgcatttgggattccaattttcatcaacagtggttaccctactcctcacgtgaagtggaacttgtgggttatccacaagctgctgcttacccttgtttatggntccatactgtacatgtatcattctaggtggagagaaaggttacct

SEQ ID NO: 6388 - DNA, 453 bp, Glycine max
agactcttaatatatgaagagtattcttatggaaccttcacccgacgaagacactgacaaaaacttatcttctcctctttggacaaagtatggcaggctgctggcaagctaatattcttcccgtcagaccttggatgcaactgtgatcgtgtgctcatatcagctagatcttgacgggtatccaagccatccttcgtcttgcctagaatagtaagcagcgcaccaatcacactgtcgcaaacatttttctccacatgcataacatcaatacaatgtctaacgtcaagatcagactagtacggaagatcaaagaacatagacctcttctttcatatgcaactcttactcttatccttcttttgggtctttccacatacaatattcacgtgttgaacacgctcatatacctgctcaccagtcaacagtatcggcgcaatatcatgctcttgactt

SEQ ID NO: 6389 - DNA, 327 bp, Glycine max
atagagtagaagatagatcattgatccatcctccaccttgttgtgtataacacaacaatcatagagacttctcttgaatcctcgactggtgataaagctatcagacctcatgtaccattgccttggagattgtttcacaccatacaaggatctctgcagttgacaaacatacctttcttttccttgaacttcaaacccttcacgctggtttattagaatattctcttccaatctttcatggagaaaagaagtcttgacatcaagttgttcaagttccagatcttggtttgccactatagcaagcaaaatcctgatggatgcatgtct

SEQ ID NO: 6390 - DNA, 340 bp, Glycine max
  unsure at all n locations
agcttctagcanacaggttgagggtagtgctaccagttctaatagatganaggcagtcagccttcataaagaatatgcatatccttcatggaattctcattctcaatgaggtggtggatgaagctatttggaggaagaagcctgctatgatgtctaaagtggattttgaaaaagcctatgattcggtatcttggtctcttttggattatatgttgatgagattaggcttctgccttaaatggagaaaatggatttctacttgtctccaaacagctacaatttcagtcctagtaaatgggagccccacaaaggagttngttccttctagaggattgaggca

SEQ ID NO: 6391 - DNA, 252 bp, Glycine max
tcaatgatcatactacacatctagaggccttctaaagctaagcacactagaaggggttcgattaatcaaataaatcgcagatctcatagcctcactccatacatgagatgagacattaccatctatcataactgatcttgtcacctctaatatttgactatctttcctatcagccactccattatgttgtggcgaataaggacatgtggtttaatgcatgaatccattacagttcatgaactctattaattc

SEQ ID NO: 6392 - DNA, 382 bp, Glycine max
  unsure at all n locations
tgaagctctgataccactggttagatatgtgttctcatatatcataagaaggtgggntgaattaagatattccaaactacttccacaattaagaatctatttcactttntattcaagttataaattcccttaataatgaacttcttaaatattgattcacataacacaatttgaatatgaatataaagcagtaataaacaaaggagattaagggaagagaaagtgcaaactcagatttatactggttcggccacacccttgtgcctacgtacagtccccaagcaacccgcttgagagttccactatcttgtagattccttctacaagttctaaacacacaacgacaatccttcctttgtgtttagaagtcctttacaacaag

SEQ ID NO: 6393 - DNA, 474 bp, Glycine max
  unsure at all n locations
tataaaataaattagagggtaccaataccaaaactggctataatctgcaagaccaaccactgcagtaattntatcatgttgtgtcttagaaagtaaccttatggtcacatttctgccaccagcatcaaggattcctgatgccaaaattgctcccatcttgctcatggtatcctcatgcttgtccagaataattttctccaattgtcgcctagaacacaattattgtaagaaaacaacaaatatatagcctcactgtccaaaataaataggacagacttacctaaatgttcccacacgtgagtcactagcttcactgatctgaaccatgaccatagccattgctataagggcaccttgacgaacaaaatcaacaacatccgatgtcaaaggctccaataaagaaatagcctcactgagacctgtacccgcacangagatacccacagcaagaagctgctcatatcgaacatgtgg

SEQ ID NO: 6394 - DNA, 466 bp, Glycine max
  unsure at all n locations
tctanactntatacaagaatgaagctctgataccacttgttagactagtggtctcagatatcataagaaggggggttgaattaagatattccaaactacttccccaattaaaaatctatttcactttttattcaagttataaattcccttaataatgaacttcttaaatattgattcaaataaaacaatttgaatatgaatataaagcaataataaacaaaggagattaagggaagagaaagtgcaaactcagatntatactggttcggccacacccttgtgcctacgtncagtccccaagcaacccgcttgagagttccactatcttgtaaattccttttacaagttctaaacacacaaggacaatccttgctttgtgtttagaattcctttacaacaagagacccacggtctcttaatcccttagagaatgaggagaagaagaagaatgaatctctctagaaag

SEQ ID NO: 6395 - DNA, 388 bp, Glycine max
ctgcaacgtgaattctgttcaactgataagatatctttctaattcagccaactaactaactatttctgttaaagctgtttatactgctaagagcctccctcaagctgggaatggatattcatcattcccagcttgttacaaaggagctgacatgtggctggtggcaaagccttggtgaatatgtccgggagttgcatggaagatgagaccggaaggagctctacaagacccgcaatgactttgtggcggataatatggccatcgatctcgatatgcttagtgccgtcatggaaaaccggattcgtggctatctgaatggcagattgattgtcacaatataacgtggctggctgaataaatgctacaccaatgtcatggagaatatacg

SEQ ID NO: 6396 - DNA, 341 bp, Glycine max
  unsure at all n locations
tgtcatctacatagagtagaagatagatcattgatccatcctccatcttgntgtgataaacacaacaatcatagagacttctcttgaatcctcgactggtgataaagctatcaaacctcatgtaccattgccttggagaatgtttcaaaccatacaaggatctctgcagttgacaaacatacctttcttttccttgaacttcaaacccttcacgctgtttcattagaatattttcttccaatcttccatggagaaaagaagtcttgacatcaagttgttcaagttccagatcttggtttgccactatagcaagcaaaatcctgatggatgcatgtctaacc

SEQ ID NO: 6397 - DNA, 330 bp, Glycine max
  unsure at all n locations
agctngacangaatgaagatgagaagaagaagcattattagttgaaggagaagtntgacaacccctgcaaagtgatcaaggatgacaaatctatgaaggatcttattctgtttctgtttgagactgctcttctcacttctagtttcagccgtgaaggatccacataatgtttaagcttggactgagcatcaatgaagatgcacgtgaagttgttgctgacatgcccccactagaggaggccgaagccgatgctgatggcagcaagatggagaaggttaattaaacttaaatatgatgtgtttcttattagtagcttatctaatgcgtatg

SEQ ID NO: 6398 - DNA, 374 bp, Glycine max
  unsure at all n locations
ctgtcctaagcaaaggtcccaatgtcctattaacaacttttgtttgcccatcggtttgtgggtgacaagtggttgaaaataacaatctagtgcccaacttgccccacaaagtcctcccaaaatggcttaagaacttagagtccctatcactaacaatgcttcttgtgcaaccatggagtctcacaatctccttgaaaaacatatcagccacatgggaagcatcatcaactttttttacatggaataaaatgagccattntagataacctatcaacaaccacaaaaatggaatctctaccactgcttggtgttggcagccccaaagcaaaatccatggataaatcaatccaaagatactccggaattggaatgga

SEQ ID NO: 6399 - DNA, 415 bp, Glycine max
gcgtctcgatattttacggggctctatccgacatccgagttaaaagttattgtcgtttgattattctaagagcttcccttttcaattacgagaatctcgatatattacgggacacaatcggacacccaagttaaaagttattggtcgttgaattttctcaaagcttctattttcaattacgagcgtctcgatatattacgggactcaatcggacatccgagtaaaaagttattggcgtttgaattttctcagagcttctgttttcaattacgagcgtcccgatatattacaggactcaatcggacatccgagtcaaaagttattgtcgcttgaatctgctcagagcttctgttttcaattacgagcgtctcgatatattacgggactcaatcggacattcgagttaaaagttatt

SEQ ID NO: 6400 - DNA, 423 bp, Glycine max
gaaatcacatgtttgtcatcatctttttggggagaatgtgaatgtatgtatacatgattttgatgatgtcaaagaagaatctaacaaggctgcttcaaatgataagcatttgcttcaagaataattcaagattgcttcaacaaacaaagccttgtttcaagattcactaaagaccaagccttgccttaaaacaaagtgctttcaagacatgcaaggctctggtaatcgattaccaggaagtgtaatcgattaccagaagacagggttgagaaatagctgttgaaaaatgttctgaatttgaattctcaacatgtaatcgattaccatatgtctgtaatcgattaccagcaacgaaactttggaaattcaaattcaaaagtcataacccttcaaattataattgtgtaatcgattacacaaaca

SEQ ID NO: 6401 - DNA, 429 bp, Glycine max
  unsure at all n locations
caaatgatgcatatgattttgtagctacctcatgcactcctctaatgactatggcatcatttctggcgctaaactgctgggagttggaagccatcttcttaatcaagtttctagcttcagcaagagtcatgtctccaagggctccacccctggcagcatctatcatatttctcaccatattactgagtccttcataaaaatattggagaagaagctgctccgaaatttgatggtgagggcaactggcacatagttttttaaatctctcccagtattcatataggctctctccactgagttgtctaatacctgagatatccttcctgatggccgtggtcctggaagcaaggaaatnnttttctgagaatactctcttaaggtcatcccagctcgtgatggaccttggagcaaggtaatacagtcaatcat

SEQ ID NO: 6402 - DNA, 425 bp, Glycine max
  unsure at all n locations
ntgtgaagctcctgttntagctntacccgattttactcaaccatttgaagttgaatgtgatgctagtggagttggcattggggctgttttgatacaaaacaaaaggcctatagcttatttctcggagaaattgggaggagccagattgaactattgcacctatgacaaagagttctatgccattgtgagagctcttgatcattggaatcattatttgcgttctaatcactttatattgcattcagatcatgagtcattgaagtatatcaatgggcagcagaagttgagtccaaggcatgctaaatgggttgaatttcttcaatcttttaatttctcttcaaaatacaaggatggtaagagtaatgtggtggctgatgcactntcaaggaggtatgctttaatttcaattcttgaaactcgtttac

SEQ ID NO: 6403 - DNA, 427 bp, Glycine max
tacatgttttaacataaaacccaacaccctcacatgcttcactgttggcttcctttgtgtccacacttcttcacgcactttattctttagcttcttagttggactctgattcagcatatagactgcaagggacacaacttctcccaaaaattctgatggcaggtgtttctccttcagcatacatctacccattgtcattacagtcctattcctcctttcagccagcctattatactgaggagtatatggagcagtaacttcatgcattatgccatgttggatacagaaaaattcgaaatcctttgatgtatactcccctccaccatctagtctaataaccttgattgctttccactatgttttactcaacactataaactccttgatatagaaagccttactcttgctttatcagtacaccactcat

SEQ ID NO: 6404 - DNA, 403 bp, Glycine max
  unsure at all n locations
ttgtttgcattcgctgaacctttgatgtattatctgatatgttatcgaagattatcttgtttactaacttactctccctttatatctcaattatttatgtgtgcacgtgagctgatgagcatgccaatgactgattactactggtcgaattttacttgattgagatatatgaggtgaagatgtcgaccccggcaaagaagagactgatgagggattttaaaagattggcacaagatcctcctgctggcatcagaggggctccccaagacaataatattatgcttcggaatgctgntatctttgggtgtgtaagagtatatatatcatgaaattcttgttctcttaagagtgtgtttctctttactntgtgcgtttggatgatgtaaggtatgataacaatcta

SEQ ID NO: 6405 - DNA, 419 bp, Glycine max
atttcgagcgtctcgatattttacggagctctatccgacatccgagttaaaagttattgtcgtttgattattctaagagcttcccttttcaattacgagaatctcgatatattacgggacacaatcggacacccaagttaaaagttattgtcgtttgaattttctcagagcttctattttcaattacgagcgtctcgatatattacgggactcaatcggacatccgagtaaaaagttattgtcgtttgaattttctcagagcttctgttttcaattacgagcgtcctgatatattacgggactcaatcggacatccgagtcaaaagttattgtcgtttgatattgctcagagcttctgttttcaattacgagcgtctcgatatattacgggactcaatcggacattcgattaaaagtta

SEQ ID NO: 6406 - DNA, 448 bp, Glycine max
  unsure at all n locations
tagaaacatgaaacactggatgaatntgagcacattcaggcaaaaccaactcataagcgactagaccaatgacacaattaatgcaataaggtctgaaataacacttgcccaacttgaccgagccataacccctcatagatgtttgacgataaagttataaaaggccatactaatgtaatccttccaaggaggggacccatcaccagagctagctaggatacttcaggaagattgggtcagggatgcaggagaagaccctaggattctcatgagccttagggtagattttgtgcctacgggcgaagtataaacccacttatctttgtatgtattagattagggtttcattattttttgggccttgtatttagggctccatagtgtagggagggtgccccacaagtttagggtaccctagtgatctaggatttttcagcccttgtatttt

SEQ ID NO: 6407 - DNA, 431 bp, Glycine max
tgtaatcgagtacacacatactgtaatcgattaccagaggattatttcataaaacattctcaacagtcacatctttttgtgtgattcttgaatgactatcaaaggcctatatatatgtgacttgagacacgaatttgctaatagtttttcacaacaaaaaggtcttatcctcttataaagcaaaatagctttatcctcttacaaattccttggccaaaacacttgtgattcaataaggaattatttgagtgctcaaattgttcaatctatctcttttaagagaggtttcttcttttcttcttcttcattctgaaaagggattaagagaccgagggtctcttgttgtgaaagaattctaaacataaaggaaggggtgcccttgtgtgctagaacttgtaaaggaattacaagatagtggaactctcaagtgg

SEQ ID NO: 6408 - DNA, 434 bp, Glycine max
  unsure at all n locations
ccataatgttttccagaagtggctttagaacttagcatctctatctgacacaatggtcctaggcaaaccatggagtctcacaacttccctaaaaaagggttttgagatatgggaagcatcatccaccttatggcatggtataaagtgtgccatcttgctaaacctatccaccactacaaagatagagtctacacctctttgggttctagggagcccaaggacaaaatccatactaatgtctacccaaggtgcagatggaatgggtaagggtgtgtatagcccatgaggcatcaccctagacttggctngtacacaacccacacacctgatgcaatgctgatggacatctttcttcatatggngccaatagaacttctctttgagtaagacaaaggtcttgtctatcccanagttgcccatgagcccactctcat

SEQ ID NO: 6409 - DNA, 315 bp, Glycine max
  unsure at all n locations
tctagtctcaattttgagcgtctcgatatatttctcctgttcattcggacatccgagtaaaaagttattgtcgtttgaatntcctaccagcttccgttttcaatgtgcagcgtctcgatatattacaggactcaaccggacatccatgtataaaattattgtcaattcaattttctcagagcttcggatctaaatattgagcgtctcgatatattacgggactgaatcaaacatccgagtaaaaagtttttgtctattgaatttgatacgagcttccgttttcaatttggagcatctctcgataaattatgacaa

SEQ ID NO: 6410 - DNA, 410 bp, Glycine max
agtctcacgattgtcacgtgctcatgcaacaattgttagccgtggctatacgagacatctttccaaacaaagtcaggttagccataactcgcctgtgctttttcttccatgctatatgtagctaagtcattgatcctgtgaagtttgatgagctggaaaatgaggccgcaattatactgtgccagttggagatgtattttccccctgctttctttgacatcatgattcacttgattgtgcatctagtcagagaaatcaaatgttgtggtccagtttatctacggtggatgtacccggttgagcgatacatgaagatcttaaaagggtatacaaaaaatctatatcgtccagaagcatctattgttgagaggtacatagcggaagaagccattgaattttgttcagaatac

SEQ ID NO: 6411 - DNA, 305 bp, Glycine max
  unsure at all n locations
aaccaaatgctcatcactgctnatgatgaagcttcaagttgtttcatataaatctcctcctctaaatcaccattaagaaagattggtttcacatccatttgnttcaactgaaggtcaaaatgagaaactaatgccaacataatacaaagagaatattacttatatacaagagaaaaagtcttagtgaaatccattccttcttgggagaaaatcccttagcaacgagtcctgccttgattctttcaaagaagcctaatgaatccttcttggtcataaagatctatgtaatactcatcgaatgcatc

SEQ ID NO: 6412 - DNA, 446 bp, Glycine max
  unsure at all n locations
aatcgtttcagttggaaaaaatcccttgtgcatgaagatcaaaggatattatcacacaaagatacatcaccaaaaaaataaaataatgaaagatataaatttaaagcagatatcttttatctacattcacacaaacatctaaacaatattcactatctcaaattttaatttgacaatgaattacatttatcctctatttaataatgtcaaaataacaataaattgatatcttgacagaactataattataataagagtttaaaataattttacattatcatctactcatcaatcattgttgttatgatttttaaaataattnttatcaaagtcaacaaacttatatcataaatgatgattgaatgataatgtaattttacattatataatattntttctcttataataacctaagcaaaggataaatgcacacattgatccgatgc

SEQ ID NO: 6413 - DNA, 459 bp, Glycine max
tatgaaatggatttaagtgcaacaattaaataggtgttatcgtgttcaattttacttaaacacttactgcaccccgttgatcgagccaaatggctccggattcagtgggcaagatcgagagtgtatgttcttgaaaagtaaaagacacaacacaggaggttaagatgcaaatcatccatatttattagtgctacgatcatggtttgcaaaggattttaagactttggagatcccaatgagtccttggagaataatcatgtatttaaccttctagcttccctaggcgttatgcataatattgtttgacgatatcggaattcacgggtgaaggaaattcttcatcatccatactggcaagcaacaatgcccctcccgaaaatgccttcttcacaataaaaggtcctttataattcggagcccacttccccctatggtccttttgagcttgtgatactttct

SEQ ID NO: 6414 - DNA, 445 bp, Glycine max
catcagtataacccttcagtttcaattcagagtctccataaatgaggttttggtctttagttcttcttaagtacttaagtatggtcttaaccattttccaatgttcttcaccagggtttgcttgatattgactagttacacctaatgcataagcgacatcaagatgtgtacaagtcctggtgtacatgatagctcccactacactagcatatggtactctacttatgcgttttctttcttcaggagttgttggacaattctccttactaagagtaattccaacacctacaagcaaatagcctcgtttggaattatccatgttatatctctttaagatagtatcaatgtacatagattggaagagtccaagcaaccttttagatctatctctataaatctttatacctagaatataaattggttctcccaaatccttcatggagaa

SEQ ID NO: 6415 - DNA, 406 bp, Glycine max
actcttggagaaaggatgttcagtgaattcagttaaaggttctctagaaatccatggcaaagcaaagagattggtgatgaaagctccattggccaagaatagaaccttcaaggtaagcctaaacaccattgaatctaagtgtctttccgctgcaactttgtcagatgattcatggttatggcaccttagactaggccacttaaattttagagatatgagcctcttgagatccaaagaaatgttaattggtctccctccaattaaaattcctaagaagatatgtgacaattgcttaatcaacaaacaacccaggaattccttaagcaattttactacttctaaggctagtgaaatattgcatgttgtttactcagatatctgtggacctcttgacactccatcatta

SEQ ID NO: 6416 - DNA, 411 bp, Glycine max
  unsure at all n locations
agtctcacgattgctttgctcatgcacaattgtagccgtggctatacgagacatctttccaaacaaagtcaggttagccataactcgcctgtgctttttcttccatgctatatgtagctaagtcattgatcctgtgaagtttgatgagctggaaaatgaggccgcaattatactgtgccagttggagatgtattttccccctgctttctttgacatcatgattcacttgattgtgcatctagtcagagaaatcaaatgttgtggtccagtttatctacggtggatgtacccggttgagcgatacatgaagatcttaaaagggtatacaaaaaatctatatcgtccagaagcatctatagttgagaggtacatagcggaagaagccattgagtnntgttcagaatacattga

SEQ ID NO: 6417 - DNA, 453 bp, Glycine max
  unsure at all n locations
gcttaacatcagaccacttccaggtgctggaactacttcacatggatttgatggggcctatgcaagttgaaagccttggaggaaagaggtatgcctatgttgttgtggatgatttctccagatttacctgtgtcaactttatcagagagaaatcagacacctttgaagtattcaaagagttgagtctaagacttcaaagagaaaaagactgtgtcatcaagagaattatgagtgaccatggcagagagtttgaaaacagcaagtttactgaattctgcacatctgaaggcatcactcatgagttctctgcagccatcacaccacaacaaaatggcatagttgaaaggaaaaacaggactntgcaagaagctgctatggtcatgcttcatgccaaagaacttccctataatctctgggctgaagccatgaacacagcatgctatatccacaaca

SEQ ID NO: 6418 - DNA, 423 bp, Glycine max
  unsure at all n locations
ccaaaatatcttaactttaaggtagatataacatgtataaactgaattatactagcaaaggaatggtaagagatgttaaagttatatttatcaattatcaagactaagtacattatctcaaatcacaccttcttgcttattcttatagggaaatgatcattntatggcaacataagtaattgaagcccgaaaggatacacctctactgccaattcagtctgggaaagacctgaactaaataactttccttgccaatgtaggtcaccgccatacctagtcaaggggaacaaagttaggcaactcattaaagcctagttaaagggttagtcatctaagtttgtgtaatatatcattaatataatatatcacttattacattntagatgaactatatatgaccagtgtgacaagtaaacaatctca

SEQ ID NO: 6419 - DNA, 387 bp, Glycine max
  unsure at all n locations
aaggactcatggtcactatgaatgacaaattccttgggataaaggtagtctggccatgttttcaaagcccgtactaaggcatacaactccttatcatatagtgaatagttaagggtaggaccacttaacttttcactaaaataagcaattgaatggccttcttgcatcaacacagtcccaatcccaacatttgaagcatcacactcaatttcaaaagatttttgaaagtttggcaacgcaagtatgggagcattaattaggttttgcttaagaacattgaaagctntttcttgtttctctccccatttgaaaccaacatttttcttgagcacttcattgagaggtgctaccaatgtgctaaaatccttcataaatcgtctataaaaa

SEQ ID NO: 6420 - DNA, 443 bp, Glycine max
  unsure at all n locations
tgccttgccccttgatatatttgaaggactcatggtcactatgaatgacaaattccttgggataaaggtagtcttgccatgttttcaaagcccgtactaaggcatacaactccttatcataagttgaatagttaagggtaggaccacttaacttttcactaaaataagcaattgaatggccttcttgcatcaacacagccccaatcccaacatttgaagcatcacactcaatttcaaaagatttttgaaagtttggcaacgcaagtatgggagcattagttaggttttgcttaagaacattgaaagctttntcttgtttctctccccatttgaaaccaacatttttcttgagcacttcattgagaggtgctaccaatgtgctaaaatccttcataaatcgtctataaaaacttgctaagccatgaaaactcctcacctcggtc

SEQ ID NO: 6421 - DNA, 350 bp, Glycine max
gaatcaactgagaaagtctttccacacataatacaaaaaggtaactggatagaggatatctttgcctaagacccctcgaaagattgaaaacattactcttctccccattcaatagaacttggaaagatgtgaaaggcatacactcgtaaacaatactaaggaaatggtcatcaaaacccaaatccctcaaagtgtgaatgacaaaatctcactaaatgctatcatatgccttctctagaacaactttgatcgccataaacccttttctccctttagatcttctcgtcttatggaaaacttcttgagccatattaccattatccctcccttgtctccctagaataaagctg

SEQ ID NO: 6422 - DNA, 348 bp, Glycine max
cgggctcaatttcgagcgtctcgatatattattcgcctgaatctgacatccgtgtgataagttctgaccattataatttgtcgagagcttccgttgttcaatttcatacctctcgatatattatgcgcttgaatcggacctccgtgtgaaaagctatgacatattgaatatctcgcgatcttccattgttcaatttcgagcgtttcgatacatgatgcgcctaaatcggacatctcggagaaaacgtactaacatttgaattcctcgagagctttcgttgttcaatgtcgagcgtctagatatattatgctcctgaatcggactttcgagtgagaagttatgaccatt

SEQ ID NO: 6423 - DNA, 432 bp, Glycine max
  unsure at all n locations
cccacaaagtattctgtttcaactttcttggctagctaggctctcttaatttgaggcacataagtaaagcgcaaacatccaaatactttaaaaaatttcaagaagggtntataaccataccaagcctcagaaggagtcttctcatctactgctttggtgggaagtctatttaacaaaaatactgcagtgtttgtagctttcgcccaatatgccttaggtaactctttctcatgaaacatacatctgaccatttccaagattgtttgattctttctttcactaaccccatcttgtttagaggtgtaagaagcttgtaattgatgtcaatgtctgcttcctcacaaaacatgatgaggtatgctgaagtgtactccttaccattatcagacctcaaagcttgaatcatgcagccactttgctttttaatccact

SEQ ID NO: 6424 - DNA, 452 bp, Glycine max
  unsure at all n locations
nntctttgtagttaatggcatggcagcagggttctttgcttgcaagagggtgtgtgaggcaaggagatcccctctcccctcctcttttgattggcagaattagttctcagcagagggatatccaagttaattcagaatggtctcttacctcggaggtcaggaccaaggggctgtctcattcccagtcatgctttttttacagatgatcttatgattttttgccgtggccaaaagaaagggttgatgcatttgatgaccttgctttctcaatatggggaagcttcgggacagtggattagcctggaaaagtgcagatcagattttttcatggcgttctctctcgaaataggatcctctcttatggacatccttggtattggaaagggatctcttccttttcattaccttggtgttcctaatttccaaggtagaccacaggcaagttatcttat

SEQ ID NO: 6425 - DNA, 440 bp, Glycine max
tctcgatatattatgtgcctgaatcggacttctgtttgtattattattaccatttgaatttctcgagagctttggctgttcagtttcgagtgtctcgatatattatgcgcctgaatcggacttttgtgtgacaagttatgaacatttgaatttctcgagacctttcggttttcaatttaaatcgtctcgatatgtgatgcgccagaatcggacttccgcgtgacaagttatgaccattggaatttatcgagagctttcggtgttcaatttcgagggtctcgatatattatgtgcctgaatcggactttcgtgtgacaagttatgaacattggaatttctcgagaccatacgatgttcaatttcgagcgtctcgatatattatgcgcctgaatcggacttctgttagacatgttatgaccttttgaatttctcgagagctt

SEQ ID NO: 6426 - DNA, 423 bp, Glycine max
  unsure at all n locations
agcnttgtgacgaactatgtatggctttatctttatttttattattnagtatatacaaatgagcttgttgcaattcttctagacttggagtgataacatacaatcctcttgaacccttacctcccactctttcgccatgctaagactccggaacctcaacaagtatgagaaaaaacttagcttttcctttttggataaagtatgagaagctggaggcaagtatattttcttaccatcaaaccttggatgtaactggtctcgtatacccatctcaactagatcttggcgagtattcaaaccatcctttgtcttgccttgaatgttaagaagattgtcgatgacactatcacacacacttttctcaacatgcataacatcaatacaatgtatgacatctagatcgaaccagtatggaagatcaaa

SEQ ID NO: 6427 - DNA, 411 bp, Glycine max
  unsure at all n locations
agttgctccaacacttaagatacttagctcgctcttcttatccaatcttatgtcggctaaacggacttcatacttgacttgattgttcatcgtcccaaacttgaaccttagggattgctctaggattatttcatttgggctttctaggatgacaccagtcctactccctttntcattggatgaacccatctgcatacaaattccaccactcggattgtagttctgtagttgttgtcaattcgacgatgaagtctgctaagcattgagccttcgttagatcccttggtttgtacttgatcccaaactcgaacaactagaccgactaacatatcattcggtttgcaagttctggtttcatcatgactgttaagatatggtggttggtttaaactatgatttgatgactttgga

SEQ ID NO: 6428 - DNA, 405 bp, Glycine max
  unsure at all n locations
agcttgcttaagattatatattgtatttctttaattngcacactatgtgtttctttccttcaactaagaatcccattggttggtccatataaacattctcctctaattctccattaagaaaggcattttttgcattcatctgatgtagctccaagtcataatgggctactaatgctatgataatcctgaaagaatcctttagtgagaccgatgaaaacgtctctttataatcaatgccatctttcttagtaaatcccttagcaacaagtctagccttgtaacatttaaggttgtcatgagagtcacatttagtcttgaagacccacttacaaatcttacaactttggtaattctacaaggtcccaaacaccattatgttccatggaatctatctcttctttcatg

SEQ ID NO: 6429 - DNA, 423 bp, Glycine max
  unsure at all n locations
agctngcagatgagtttattggaagattcanatgttgttggtttaaaaanacnngnanctttgggtaaagatagtgaaaattttgtgaagtgtcaaaaactagacacaatctcgaaaagaaacaatataaattattgtattttcttggtggcttttcttattatttttgtttatttgaaaaaacatgattttaagtcattaattattgtttgtgccttaacattttttaaaatatcattgtcttacactacaaacacgacaaacaatagtgatttttatatcacaatttaactcttaaatcaattacgtttttttatttataaggttcaaacataaaattttacttaagaattgagtctaatgtggatgtttttataagtacatatgttataataatgtaattttttccccttaaatctaatt

SEQ ID NO: 6430 - DNA, 381 bp, Glycine max
  unsure at all n locations
agctttgagaatttgagaacatgacatttcatttgacagtaatatccaagatatacaaatgggtgttggtcaatgtaccacatttaatagtacaaactaaaagaacaagaaaaacagaccaatttctaggcgtctcagaaaaaactttagacaagacagttcacctaataaggttttggattagtagtaatcatatttgtgtaaataaatagcttaccagagttcattggactccatcgctggaaccgaaaaggagatggtatgttgagaacagaagcaccagaaacactgttatgcctggaaatgggaagatattgcctccggaaaaaccttggcatccaattgccaatacatgataaagcacanagaagaagaataaaa

SEQ ID NO: 6431 - DNA, 407 bp, Glycine max
  unsure at all n locations
agcttgaaggaaaactngangtcntgttaacctactaacccagcttgccatgattcataaatctacacctgtcgcaagagtctgtggtctatgttcttctgcagatcaccatacagatctttgtccttctttgcagcaatctggaatcaacgagccacctgaagcttatgcggcaaacatttataatagacatcctcagcagcaaaaccaacaacagctgaataattatgacctttgaagcaatacatacaatccatgttggaggaatcatccgaatctgcgatggacatgtcctccacaacaaaaataagccgtccctccttttcagaatgttgctggtccaagcaagccatatgttcctcctccagtacagcagcagcgatcacaactaacacaacaagcagatg

SEQ ID NO: 6432 - DNA, 420 bp, Glycine max
agctttgaggatatcagcatcagtgctatctcttattggaaagtcccaacaagccttgtagatagctaagtgtgccaagggtgctcctcctctggctaaaccagaagcaagtcccctataatttgcatttcctacaaagtaacctgctgctgtggaagctgtgtgagtgccatggccaatggcatctcttgccgagagatattcatcagagttgtttccttggaggagtttcttagtctgatcacttattcctttcatgaaccatctagcacctattatcttcttgttgcaattggtggagttgaagtgctttcccccttgacaaattcctttccaccttgatgggatttgtcccattgcttcatcattgaaacttggtgactctggccaaatgccttcaagaaatcatatttgtcattg

SEQ ID NO: 6433 - DNA, 407 bp, Glycine max
agcttaaatgatagaaatctattacttttttttataataatatcaaccaacatcataagtagcactttgatcttatcttatgaaaataaaatgaatatattttttttatcttatcaccatcttgactcttaagaaacaaaaaaaaaatagattatttaaaaaataatggaataataaaatatgacaaagccttagtaaagatgtatatgacttattgatatgtgcagatgagatgtaaataaacatctttatggaaaactatccttagtaaagttttaagttattattcaaattccttgtgtaatactcttactgtcactatttatttttatttgtataaattgaacataaattacatttgattggaatatgtaataggttgttcatgatagttcttactatgtaaa

SEQ ID NO: 6434 - DNA, 405 bp, Glycine max
  unsure at all n locations
ttttatgccataatatttgtgttcttccgcatctcttttgacntnttttatcaaacggcaaatgagcaactcacgggagtagtatgcctgtgcagaagaaaaggaaataggaaaaaaaacattgaatacctacataatctattgtgttgttcattactttgttttttaatctgaactctattttattgaactcaaagaccttatttacgtgtataatatatgttttttctttattaacaggtggaactgaaatttcaatatagagcacttctgtttttggcataccagagtttaagctttatgtttggtgacttgaccttatcccctctttatgtctatcaaagtatattntctggaagactgaaaaaggtccaaaatgaggatgcaatatttggcgcattttct

SEQ ID NO: 6435 - DNA, 395 bp, Glycine max
agcttgacagatttctagtatctcacttatggtttgtttaatggcctgacaccacccaatccaccttggataggaatttctctgatcactgccctatcttgctgaggtcaagattcattgactggggacctaaaccttttagggttctggattgctggtttcaggatagctcttttaaaagaattgttcatgactgctggacgtctacgcagattggagggtggggtggttatgtgcttaaagagaagataaaacgcctcaaaagaagattaaaggagtggaataaggagcactttggggacacttttaagaaggtcaagcagattcaagaggagcttagtaggctggaagagaattctattgatagacatctgtctcccttggaggtctcgtat

SEQ ID NO: 6436 - DNA, 425 bp, Glycine max
  unsure at all n locations
actaagcttatgctganacatctacaacagacctcctcaacctttcatcaaaatcagccacaacagaacaattatgacctctcctgcaacaggtacaatcccgggtggaggaatcatcccaaccttagatggtcgaatccttcacaacagcagcaacaacaacaacaaccttattttcaaaatgttgttggcccaagtagaccatacattcctccaccaatccagcagcaacaacagcaatagccccagaaacagcaaacagttgaggctcctccgtaaccttcccttgaagaacttgtgaggaaaatgacaatacaaaacatgcagtttcaacaagagactagagcctccattcagagcttaactaatcaaatgggacaattggctacacagttaaatcaacaacagtcccagaattctgacag

SEQ ID NO: 6437 - DNA, 419 bp, Glycine max
  unsure at all n locations
agcttatgagaatttcaagctttatattctatgtatttttaatnnatcatgataaaaagctttcaaaaaggaacttccagcctggtcaataggttttattatttagttatagattaagattgtttcctataagctgaaatccaagtggtctagaccattcatcatcaaagaagttatgccacatggaatggtgatattggaggatccagccaccaaaaggacatggaccgtgaatggtagcagaatcaaacactacttaggtggtgatttcgagaggctaacaactattgtccaactacaagaggcttgaaccacaacaaagacgtccaacttaaaagacattaaagaagtgctcctgggagacaacctagtatttctgaactttgcttttaattttctattttcctaattacatatat

SEQ ID NO: 6438 - DNA, 403 bp, Glycine max
  unsure at all n locations
agcttcaacatcagaccacttccatgtttntttttctacttcacatggacttgatggggcctatgcaagttgaaagccttggaggaaaaaggtatgcctatgtggttgtggatgatttctccagatttacctgggtcaactttatcagagagaaatcagacacctttgaagtattcaaggagttgagtctaagacttcaaagagaaaaagactgtgtcatcaagagaatcaggagtgaccatggcagagagtttgaaaacagcagagcatatagagtattcaattccagaaccagaactgtgatggaatccatcaatgtggtggttgatgatctaactccagcaagaaagaaggatgtcgaagaagatgtcataacatcgggagacaatgtagcagatacagc

SEQ ID NO: 6439 - DNA, 418 bp, Glycine max
tcttatccaaggcaattcttggtgggaatcttcttcttccttggcttattccctagtggatggtgcctcccctctccccttctcctttgccttccgctgcatctccatggtgtaaaatcaccattgaaggacctcattgaagctcaaagatccagcctccatagaagccccacaagcaagcttccatcaataggttttctaaaatggctcattttattccatgtaaaaaagttgatgatgcttcccatgtggctgatttgtttttcaaggagattgtgagactccatggtttgccaaggagcattgttagtgatagggactctaagttcctaagccatttttggaggactttgtggagcaagttgggcactaaattgttattttcaaccacttgtcacccacaaaccgatgggcaaat

SEQ ID NO: 6440 - DNA, 361 bp, Glycine max
tgaaagacagtaatgaccagaacaaaattgatccatctgacacaacagaacttataatgaacagttacatcatacttcaatagacacaaaccacaaaagcttatcataaagcttggagccatgtgcaggagccccaacggcattaatgaccagccaccaggggttcctctccgcgtagaacggcctgtaactcccctcggagtcaaggttggcgcggaaggggtggtgggcccacttggagtgttcggaggggaccacgtcggtgtgggagtagaggaggatggattctacggttgggtccgggccttcttatttagaaagaccagtggcttccctggaacgaactacatggtttgggatt

SEQ ID NO: 6441 - DNA, 414 bp, Glycine max
  unsure at all n locations
agcttgtncaagcctttgcattctatttttatcagtatgttntgattggtggaaaatgatggaatatatttttttttttggtttaaaacaaaggtgccaaatttgactagtttgtatgatattattaatttaagaatttaatgtgatattcacttataagataagttatttaatcataaatcattattgatatgattttaaagattgttattataaaagaataaatttatcatatcgtgatttatgatttgatgataatgtaaaattattttacattatcattatataatttttcttctctaactttacatcttaatgcacaaaatggacagaatataattattatcattttcaatttttcaaaacaattttttttttatcatttatatgtattagatgtataaattaagtaac

SEQ ID NO: 6442 - DNA, 396 bp, Glycine max
tctaaactttatacaagaatgaagctctgataccttttgttagacaattggcctcagatatcttaagaaggggggttgaattaagatattgcaaactattttcccaattaaaattctatttcaatttcaatgcaagttacaaattcccttaaaaatgaactcttaaataatgattcaaatcgaacaatctgaatataaatataaagcaataataaataaaagagtttaagggaagagaaagtgcaaactcggatttatattggttcggccacacccttgtgcctacgtccagtccccaagcaacccgcttgagaattccactatcttgtaaaatccttttacaagttctgaacacacaaggacagtccttcctttgtgttcagatttctttacaac

SEQ ID NO: 6443 - DNA, 431 bp, Glycine max
gatcttaagtcaccgcggctgcaagcttgcaattgacattttttctattcatagggacatcaagcgctaaccttttttcactcaactgtaacaatgcttgatgatgataatgcccaagccttttgtgccagatttctgtgtgattctctatgagagagaaaacaacttgctcctccttcaatggatttagagcaaaactttttcctttcatttttaccttgaagatttcttgaccagctacatctttaattaagcaatatttgtcttccaatacaactttaaatcctcgttcaatcaattggccgacacttaataagttttggtcaattttcagaatgaataggacatcagcaatacatcttgtgcctgcagaacttgtgattgcaactgtcccctttcctttgactaggatataatcaccattacaaatt

SEQ ID NO: 6444 - DNA, 408 bp, Glycine max
ttcttgacttcaggtttttggtttatatgatacttgtataaactagactccacatattcctctggtcttattgttaccacatatggcagggctatggctgaattacgggttcttaggctatttggaaatcctcttgagtttcttcctgaaattttgcccctccacaaacttcgacacctttctcttgcaaatattaggatcgtggcagatgaaaatttgagatcagtgaatgtgcaaatagaggtagcactttgtaaactagctagactaccttgctgacattattctttcgaaacatatcacatgctttttctggtcattgcagatggaaaacagttcttatttcggtgcatctaggcataaactcagtgccgtcttctctcttatattccgattttcttcttgtca

SEQ ID NO: 6445 - DNA, 393 bp, Glycine max
gctcagcaatcatatgatcatagtgcatgctaactgtgtttccttctttaattccaatccccactcggacttgcacaatagcagattttgaatatgatagaaagaacgatccacaaattaacatttaagttttatagttattccagaccaactggggaagtttatatacccataactagatcagcctgcttgtcttgcatatatgaccttgccgagtatatctccgaccttgggccgatgtacttatacatgaaaaatgggtaggaagaacctacagatatggagagcaacatcacctgataaaggtatgtgattgactcatcggaagatcttctcccatggtaacaaggatgtgccattcaacacgatactgacccacatttatttctgtaa

SEQ ID NO: 6446 - DNA, 408 bp, Glycine max
  unsure at all n locations
agcttgtgaaccactcgtaattataatatatcacttggttgtagctaaagcacctagtatatgtagtatatattaaaagataaagggtgagaggaataaatttaaaatataaatatgaataattaagattaaaggttatttaattattacataactactaaaaaaattacaccattttgtattttaattttaatcctttatgattatatatgtatgcgagtaaataattcatatactgatggagcataagatttttattctattattaaatcataaattattatgtataataattttgttaatttttataataattattttaaaaatcaaaattttcataattnttcattaattaacaatattattctatactaatgtgtgtaaaaattaatatctatttctatatat

SEQ ID NO: 6447 - DNA, 421 bp, Glycine max
  unsure at all n locations
nttcttccttcttatcttcgcaacaagagcagcagctgcgatctccaggttctagtggatcagatggcaccatatcccaatggtcaaatactaactgggggaaagcctttctcccagttttagcccttagtgattcattgaatttagatgactcaataacaggaaaatatgccttgacattgtaaagtggggtgccaggcctctggctttcctcaaacacatgccctcttttctggttaagaacactgtatacaccaccaagagcctgttcaggtgcctgtatttccaccagatacacaggttcaagaagtcttggttttgctgtcagcatggctgcatagcacgctcttctagcagttgaaatgatctgaccacctctctgtgaatggcatcagcatgaagaatcacatcacatatcttg

SEQ ID NO: 6448 - DNA, 415 bp, Glycine max
  unsure at all n locations
agcttagcaaacatgcttatctattatttgtttcnttttaatatgaacttgactaatttaatttagagtggtgtatttcaatgttcagtatattggttctgttcatatattttacattgtaatatttaaatagttatatgtttgttattgttaaattagacataagtggctgtacatttttgtgtacatatcatatcacgacttttgttattgatgtaccaaatgagttgttactttattgtgattttataattatgtgataatttttcaccagtggtaatgttccattctttataacatgatggagaaaaaattgatattttatgtgataaatgagagggtggctgacatgggtgagttagttattggcactgctgagttcagaatgggaacaaaaggcataatangtcttgct

SEQ ID NO: 6449 - DNA, 414 bp, Glycine max
ttattggcttaacttgagctttaactccttgtttgttccattgccaactatcttaacttctctcacctacctatctcttcaacacaataacctcttgggctctattcctaactcatggggtggtagcttgaaaaataacttctttcggttttgaaaaatgatcatagatcataacttgtcgagtggaagcattcctgcttctttgggtggcttgagtgaactcagagagatttatcttagtcataaccaatttagtggagttatcccaaatgaaataggaaacctttctagacttaaaactctagatttttctaacaacaccttgaatggaagcttgcatgccgctctctctaattttattcaataaatacagatagcaagtacaaaacaaacccatgctatactaccatatgt

SEQ ID NO: 6450 - DNA, 424 bp, Glycine max
agcttcttatccaaggctcatctgtgtgtgattctctttcttccaaggcttattccctagtggatggcgcctcctctctcctcttctcctttgtcttccgctgcatctccatggtggaaaatcaccattaaaggacctcattgaagctcaaagatccagcctccatagaagccccacaagcaagcttccatcaagtgtgtttcatatttcaataacaattgtggattatatggcacaacaaatcgattatcaagttcaataccatttttagcactgtacgcccatcatttcttctcctataaattggaaatccatcttggtcaacaattgttgatccatggaattttttagggaaatatctaatacacttcccattgaccatacacagtgatcttttatttgcaaacccacatggtccatgaat

SEQ ID NO: 6451 - DNA, 419 bp, Glycine max
agcttctaaacttaatacaagaatgttgctctgataccacttgttggacaagtggcctcagatatcttaagaagggggggttgaattaagatattacaacttatttccccaattaaaaattctatttaaccttctattcaagttataaattcccttaataatgaatttcttaaatattgattcaaaaagaacaatttgaatatgaatataaaacaataataaataaaggaatttaagggaagagaaaatgcaaactcagatttatactggttcggccacacccttgtgcctacgtccagtccccaagcaacccgcttgagagttccactatcttgtaaattccttttacaagttctaaacacacaaggacaacccttcctttgtgtttagaattctttcacaacaagagaccctcggtc

SEQ ID NO: 6452 - DNA, 412 bp, Glycine max
agcttattttataaaataaaattaattattgtggattacatagattatggtgcacaaaataaatgagaagtgaatatattttacaatatttaagctttctgtaattaaacgtggccttaattttcaccatacattttggctgtttttttacatgaaagaaaaatttgaatcaaagttgtatgaagaagggttatggcctcttagaacttttactttatcatagattcatagtaataatgcatttggtttattaggctaactcaaatctctaacaaatggccatgcattgaaactgtaggctgatgttgataacagtgggacaattgattacggcgagttccttgctgcaacattgcaccgcaacaaaattgaaagagaagataatctatttgcagccttttcttactttgat

SEQ ID NO: 6453 - DNA, 442 bp, Glycine max
agcttaaggctattacttgacctttatgcataaacactcctccatggttatcaaactctcgagttaactcgctaactcttacgagtttacaaattcaattgtcctctgcgagtcgactcttgagtaaactctttttttagtagactctaggcaaactctataaactctgagtaaactcgttaaactctcgagtttaccaccaagtcaatgagttagcaagttaaaaaaattagaccaaaatgtaagtcattttttattgttttctttctgtatagtattcagcataccttcatttagtgtaatattctcaaatacaaaattctcacctttaataatattaaacctttattctctaataacaacaaactctcgatgagaatgatctaccactactataatctctgcagttattatctagtagtgatatattattactagactt

SEQ ID NO: 6454 - DNA, 440 bp, Glycine max
tcaacctagaggagacggaccattccaagtgttggagaagatcaacgacaatgcctacaagattgacttgcctagtgagtataatgtaagtgccactttcaatgtgtctgatctatctctttttgatgcagatggaggagccttggatttgaggacaaatccttttcaagaaggagggagtgatgaggacataaccaaggaccatgaagcacttgaaggtcccatgaccagaggcagacttaaacaagcccaacacgtcatagagacaaggctggtcatttgtatagctgccattgatgatgattgaaggcccaagtgcataaagatgaaggcccagaggcagaggcactaccaagactactaattgttgctgaaggcccaaactaacttgaaggaccaagttaaatagagtcttagttataatttatctttattgtaat

SEQ ID NO: 6455 - DNA, 479 bp, Glycine max
  unsure at all n locations
taggaccttgaaactaagcttgaccctaaataagacccagaggaataccgaanaagtagtaacaagcaatattcacgtaagcaaccacagcctgccaccctgcgccaacagcaacacctgagagaacgggttgcacgttgttgatgacaatgcaaagggccaacatgggcgtgagctctaccacaatctttctcacttctgaatcatttgaaaacaagaaagggtactggttccggaagattatcagcaccatcgagagcatgacaccgatcagagttgaagtaatcacagcaacaagaagtgaaaactttgctgttcttgggtgacatgctcctagttcatttgacaccctcacactgcaaatgtaattnttggtcactgactgatttangtaaatcattcacagtttaatggttatgcacaataacgtacaacagtctatactattgttaactaataataaatcattgataatataa

SEQ ID NO: 6456 - DNA, 419 bp, Glycine max
agctttacattactcctcatgcttctcaccatgtctaataatgttcgatttcttcgttctgccacaccattctgatccggagaaccaggcatagtgtattgggcaacaatcccatgttcttgaagaaatttcgcaaatgaacctggtgcttgtccatcctctgtgtatctaccatagtactccccacctctatctgatctcacgatcttaatttgtgttccacattgtttctcaacttcagccttaaaaactttaaaggcatctaaagcttcattcttagaatgaagtaagtatagatacatatatcatgaataatcatctataaaggttatgaagtatttcggactattagcatccatgtctggacaacatatgttggtatgtatgagttctaataaaatagaacttctctttgcacc

SEQ ID NO: 6457 - DNA, 419 bp, Glycine max
agcttgctcgtcttgctgatatttatcatgcatacttttctgatgatgaccgaggaacaattagggatcaacttgaaacttatgtgcttcaagtgagaagaaatgcttctttttccacttgtgaagatgttcaaagtttggctatgaagatggttcaaactgagaaacatttggtatttccattggtttataaacttattgagctagctttgatattgccggtgtcgacagcatccgttgaaagagctttttcagcaatgaagattatcaagtctaaattgcgcaataagatcaacgatgtgtggttcaatgacttgatggtatgttacaccgagcgggagatattcaagtcacttgatgatatcgatattattcgaacattaaccgcaaagaagtctctgaacggacacttgtcttgt

SEQ ID NO: 6458 - DNA, 450 bp, Glycine max
  unsure at all n locations
ctntattttcagtagatgaagatgaatccgtggccacctcatggactcctctaaggacaatagcatcatttcttgcactgaattgttgggagttagaagccatcttctgaatcaaattcctagcctcagtaggggtcatatcaccaagagctccaccactggcagcattaatcatactcctctccaggttgctaagtccctcatagaaatattgaaaaaggagttgctcaaaaatctggtggtgagggtagctcgcacacaatttcttgaatctttcctagtactcatacaagttttctccactaagttgcctaatgcctgaaatgtcttttctgatggcagtggtcctagatgcagggaagaatttctccaagaacaccctcttaaggtcatcccagctgaaaatagacctgcgagcaaggtagtatagccaatcttttgccactccct

SEQ ID NO: 6459 - DNA, 435 bp, Glycine max
  unsure at all n locations
agcttcttcacatagtccgcctttgcttgatcttctttatgcttaaaaacagaaacattatgcttatgcaaaagatcaagaggagttagtgggttaaaaccataaacaacttcaaaaggagaacaattagtggtgctatgaacagctctattgtaagcaaactcaacatggggtaaacaagcttccctaagttttaagttcttcctcaaaactgtcctaagcaaagttcccaatgtcctattaacaactattttttgcccatcggtttatgggtgacaagtggttgaaaataaaaatttagtgttcaacttgccccacaaagtcctccaaaaatggcttatgaacttatagtccctatcactagcaatgctccttggcanaccatggagtctcataatcttctttgaaaacaaatcattcacatgggaagcatca

SEQ ID NO: 6460 - DNA, 433 bp, Glycine max
  unsure at all n locations
agcttaagctccttcaactgcacaatgctcttaatatttgaagagtatccttgtggaaccttcacccgacgaagacactgacaaaaacttatcttctcattcttggacaaagtatggcaggctgggggcaagtaaattttcttcccatcagaccttggatgcaactgtgattgtatacccatatcatctagatcttgacgggtattcaagccatccgtcgtcttgccttgaatgttaaggagcgtcccaatcacactcacaaacatttttctccacatgcataacatcaatacaatgtctaacgtcaagatcacaccagtacggaagatcaaagaanatggacctcttcttccatatgcaactctgacttttaatccttttttgggtcttcccaaatacagtattcaggtgttgaacccgctgatatacctac

SEQ ID NO: 6461 - DNA, 427 bp, Glycine max
agcttccgttattcaatttctagcgtctcgatatattatttcaccgaatcagacatccgagtgaaatgttatgaccattcgaatttgtcgagagcttcttttgtttaatttcgagcgtctagatgagttatgtcaccgaatcggacatctgtgtgaagagttatgaccattcgaatttctcgacatcttccgttgttcaatttcaagcgtctcgatatattatgtccccgaatctgtcttctttgtgaaaagtttggaccattcgaatttctggacaacttccgttgttcaatttcgagcgtctcgatatattatgtccccgaatcggacatttgtgtgaaaagttatgaccattgaaatttgttgagagcttccgttgttcaatttcaagcgtctcgatatattatgtcccctaatcagacatccg

SEQ ID NO: 6462 - DNA, 397 bp, Glycine max
agcttcaatggcttattgaggatggagaggtgcaagttatgaagcaagtagagttggatatttccattggaaagtacaatgataaggtgctttgtgatgttgatcctatggagcccacccacttactcttggggagaccatggcaatttgataagagagctaatcatgatggtttcaccaacaagatctctttcacatatcaaggcaaaaagatagtgctcataccattgagtccacaagaagtgtgtgaggatcaaagaaaaatgatagagaaaattcttcaagataagagagaaatagatttagagagcccaacacttgagagttcacaaagtaaggacaaaaagagggaaacacaagagaggaaaaagatgagtgaaacacttgaagtgaggga

SEQ ID NO: 6463 - DNA, 344 bp, Glycine max
  unsure at all n locations
actcagcttgaattgaacacggatgctctcgaganaatcaagtggtcttaccttgccacacagatgtacgagtcggggaaataatatatcgagacgcacgaaattgaacaacggatgctctcgagatatttgaatggtcataacatttcactctgatgttcgatccggggacataacttatcgagacgctcgaaattgaacaaccgaagctcatcacaaattagaatggtcgaaactttccacgcgaatgttcgattcggggacataactcatctagacgctcgaaattgaacaacggaagctctttataaattagaatggtcataagttctcacaccgatgtt

SEQ ID NO: 6464 - DNA, 383 bp, Glycine max
agcttgccgccacggagttttccgactatgctcttgtgtggtggaacaagctacaaaaggagagagcaagaaatgaagagccaatggttgatacatggacggagatgaaaaagatcatgaggaagcggtatgttccggctagttactcaagggacttgaaattcaagctccaaaaactaacccaaggcaacaagggggttgaggagtatttcaaggaaatggatgtgctcatgattcaagcaaatattgaagaagatgaggaggtaactatggctcgatttcttaatggtttgactaatgatatccgtgatattgttgagctgcaagagtttgttgaaatggatgatttgcttcacaaagcaatccatgtggagcaacaatta

SEQ ID NO: 6465 - DNA, 430 bp, Glycine max
agcttgactcttacgagtcagtttagttaaaggtaaagccaacttggagaaaccttctatgaatctccggtaatatcctgctaaacctacaaaactcttaatctcaaaaacagacttaggactctcccacttaagaacagcttctatcttagagggatccacagctatacccccttgagatatcacatgccctaggaaactaactttctctaaccagaactcacacttggacaacttagcatagagttgtcggtccttaagggtatgcaacacaatcctcaaatgttcttcatgctcctctctagtcttggagtataccaaaatatcatctataaatactaccacacaattatcaaggtaagggtaaaaaactctattcatgtagtccataaacactcctggagcattagtcacaccaaaaggcatgact

SEQ ID NO: 6466 - DNA, 452 bp, Glycine max
tctatagaaggttcgttcctaatttctctacaattgcatcacctctcaatgagttggcgaagaagaatgtggcatttacctgaggtgaaaaacaagagcaaacctttgctttgctcaaagaaaagcttactaaggcacctgttctagctcttcctaacttttctaaaacttttgagctagaatgtgatgcctctggagtgggagttggagctgtattgttacaaggtgggcaccctattgcttattttagtgaaaaacttcatagtgtcacccttaactaccccacctatgataaagagctttatgccttaatacgagccctccaaacttgggaatattaccttgtttccaaggaatttgtcattcatagtgatcatcaatcacttaagtacattacagggcaaagcaagttaaacaaaaggcatgcaaaatgggttgagtacctacagcaa

SEQ ID NO: 6467 - DNA, 435 bp, Glycine max
agcttcaagaaaaatggcctcagcaaacttcttatttccagaaggaaattcaatcaatagacctccaatctttaatggagagggttaccactaccggaaaacccaaatgcaaatttttattgaggcaatagacttaaatatttgggaagccatagaaatagggccttatatacccaccacagtagaaagaattgcaatagatggaagcacatcaagtgaaagcataacaatagaaaaacctagagatagatggtctgaagaggatagaagacgagtacaatacaattgaaaagccaaaaacataataacatctgccctgtgaatggatgaatatttcagggtttcaaattgtaatagtgctaaggaaatgtgggacactctacaattaacacatgaaggaactacagatgttataagatctaggataaacacatt

SEQ ID NO: 6468 - DNA, 429 bp, Glycine max
  unsure at all n locations
ntgagcanattcaaacgtcaataactntttactcggatgtctgattgagtcccgtaatatatcgagacgctcgaaatggaataccgaagctctgagaaaattcaaatgacaataactttttactcggatgtctgattcagtcccgtaatatatcgagacgctcgaaattgaataccgaagctctgaacaaattcaaacgacaatcacttttttactcggatgtctgatgatgtcccgtaatatatcgagacgatcgaaatggtatactgaatctctgagcaaattcaaacgacaataacattttactcggatgtctgattgagtcccggaatatgtcgagacgctcgaaattgaagaccgaagctctgagcaaattataacgacaataactttttactcggatgtctgactgactccggtaatatatcg

SEQ ID NO: 6469 - DNA, 416 bp, Glycine max
agcttctcgacatattacgggactcaatcagacatccgagtaaaaaagtgattgtcgtttgaatttgctcatagcttcaacattcaattttgagcgttttgatatattacgatactcaatcggacatccgagtaaaaagttattgtcgtttgaatttgctcagagcttcggcattcaagtccgagcctctcgatatactacgggactcaatcagacctccgagtaaagggttattgtcgtttgaatttgctcagagcttcgacattcaagtccgagcgtctcgatatattacgggactcaatcagacatccgagtaaaaagttattgtcgtttgaatttgttcagagcttcaacattcaatttcgagcgtctcgatatattacgggacccaatcagacattcgagttaaaagttat

SEQ ID NO: 6470 - DNA, 424 bp, Glycine max
  unsure at all n locations
tgccgccacggagtnttccgactatgctcttatgtggtggaacaagctacaaaaggagagagcaagaaatgaagagccaatggttgatacatggacggagatgaaaaagatcatgaggaagcggtatgtgccggctagttactcaagggacttgaaattcaagctccaaaaactaacccaaggcaacaagggggttgaggagtatttcaaggaaatggatgtgctcatgattcaagcaaatattgaagaagatgaggaggtaactatggctcgatttcttaatggtttgactaatgatatccgtgatattgttgagctgcaggagtttgttgaaatggatgatttgcttcacaaagcaatccaagtggagcaacaattaataaggaagggagtggctaagaggagttttaccaactttggttct

SEQ ID NO: 6471 - DNA, 352 bp, Glycine max
agcttctagatgagttatgtctgcgaatcggacatcctgtgaaaagttatgaccatttgaatttctcgagtgcttccgttgtttaatatcaagcgtctcgatattttatgtcctctaatcagacatcggagcgaaatgttatgaccattcgaatttgtcgagagcttccgttgttcaatttcgagcgtctagatgagttatgtcaccgaatcagacatctgagtgaaatgttatgaccattcgaatgtgtcgagagcttccgttgttcaatctcgagcgtctagatgagttaggtcaccgaatcggacatccgtgtaaaaagttatgaccattctgctctgtcgagagcttc

SEQ ID NO: 6472 - DNA, 447 bp, Glycine max
tcgatatcttgacttgagcgccaatatatttcttggagaatgcatgtcaattccttctttcctcgggacaatgacttccttgactcacctcgacctctctggtactggattcatggggaagattccatctcagatttggaatctctccaatttggtgtatcttcgcctgacgtatgccgccaatggaacaattccatctcagatttggaatctctccaatttggtgtatcttggccttggaggtgattctgttgtcaaacctctgcttgctgaaaatgtagaatggctatcaagtatgtggaagctcgaatatcttcatttgaggtatgcagacctatccaaagcatttcattggctacacactctccaatctcttccttctttgacccacctatctttgtcacaatgcacacttcctcactataatgaaccatccttgctcaactt

SEQ ID NO: 6473 - DNA, 423 bp, Glycine max
  unsure at all n locations
agcttataaagaaggttntagagggtggtgttagaaagtctcacatcgcctgcctcgatccttaaggtgtaggtttatatatctattggacaacttcacttaatattaattgattttaagttaaaatctaacatggtatgagagnttatagtccgtcttaattttcttaattgaccagatgggattggcttatcctgagagattagttcttgcttttagttttgttatccttctctttacttaccaaaaaacaaaagttctcttgctatcttttataacaagtattgaataaaaagtaaatacatgtaatgtcttgaaaatgtaaaacacattaattacttgtcataaaaagaataatagaacgatatatgtaatgtaagagacttttataagaggaaacaccttttttgttcttaaatataa

SEQ ID NO: 6474 - DNA, 426 bp, Glycine max
  unsure at all n locations
agcnttttcaaatttgttgcaggaacaattcgttttaaagctctccaagtgtacatttgcgcagcctcaggttgaatacctgngtcatgttgtatcagcacagggtgtggaaccagtcatggccaaggtccangctatacagcaatggctggaaccgcattcggggcgcgcactcaggagttttttgggtcttgctggtttttatagacgcttcattcgcggctatgcaaccatcgcagctcctttgaccaaattggtcacggcggaaccttttcagtggaccgacaaagctcgtgctgccttcactcacctcaagcaagtgttgacctccactcctgtcttgcggttgccggatatctctcttcccttcacggtggagacggatgcttctggaacaagcatgggagtcgtgttgacccaacaggg

SEQ ID NO: 6475 - DNA, 420 bp, Glycine max
  unsure at all n locations
agcnttgcgtctacaaatgtcatgtcctccccttggcctttttccatgtgggggatagatgtcataggtgccatcgaacccaaggctttgaacgatcatcgcttcattctcgtggcaatagattatttcaccaaatgggttgaagcggcttcctacaccaatgtcatgaggagtgtagtggtcagattcataaagagggagctgatttgtcggtatggactccctacgaagatcattactaacaatggcaccaatctgaataacaagatgacgtaggaaatgtgtgcggatttcaaaatccagcatcacaattccacgccctaccgaccaaagatgaacggagccatggaagcagccaataagaatattaagaaaattatttagaagatgacagtatcatacaaagatnggcatgagatg

SEQ ID NO: 6476 - DNA, 339 bp, Glycine max
  unsure at all n locations
tctggtttcaatttgagtgtctagatatattacgggtatcaatcggacatccgagcaaaaagttattgtcatttgaattttgtgagagcttctgtattcaattntgagcatgaagaattattaaatgactcaatcggacatccgagtaaaaagttattgtcgtttgaatttgctgacagcttcagtattcaatttcgagagtcttaaattattaaatgactcaatcggacatccgagtcataagttattgccgtttgaatttgcttaaagcttttattatgaatttcgagcgtcttgatatattattggacttaatcagacatccgagtaaaaagttat

SEQ ID NO: 6477 - DNA, 432 bp, Glycine max
  unsure at all n locations
agctntaagcaaattcaaatgacnaataactttgactcggatgtccgattgagtcatttaataattcttgacgctagaaattgaatacagaagctctcaccaaatttaaatgacaataactttttactcagaagtctgattgtgtcccgtaatatatctagatgctcaaaattgaaaacagaagctctgagcaaattcaaacgacaatagcttttgactcggatatccgattgagtcatttaataattcgagacgctcaaanatgaatacagaagctctaagcaaattcaaatgacnaataactttgactcgaatgtccgattgagtcattttataatttgagacgctcaaaattgaatgcaggagctctcaccaaatttacatgacnaataacttttactcagaagtctaattgtgttctgtaaatatcta

SEQ ID NO: 6478 - DNA, 352 bp, Glycine max
tagagctaattcaaacgacaataactttatactcggatgtctgattgagtcccgaaatatatcgaggcgctcgaaattgaatgttgaagctctgagcaaattcaaacgacgatatctttttacacggatgtctgatcgagtcccgtaatatatcgagacgctcgatattgaattctgaacctctgagctaattcaaacgacaataactttttactcggatgtttgattgagtcccgtaatatatcgagacactcgaaatggaatgttgaagctctgaggatcttcaaacgataataaccttttattcggatgtctgattgagtcccgcaatatatcgagactctcgaaattg

SEQ ID NO: 6479 - DNA, 345 bp, Glycine max
  unsure at all n locations
agcttcaacattgaatntagagcgtctcgatatattacctgactcaatcagacatacaagtaaaaagttattatcgtttgaaaatcctcagagcttctgtattcaatttcgagcgtctcgatatattacgggactcaatcagacatccgtgtaaaaagttattgtcgtttgaattagctctgacgttcagaattcaatttcgagcgtctcaatagattacgggactcaatcagacatccgagcaaaaagttattgtcgcttgaattagctcagagcttcacaattcaatttcgatcgtctcaatatattacatgactcaatcacacattcgagtaaaaacgttat

SEQ ID NO: 6480 - DNA, 442 bp, Glycine max
tattaggacctatgaaactcagcttgcatactattgtttgataaaacaaaaagaggatggtaagccttggtatttcgatatcaaacgatacatcaaggacaaggaatacccgcctgaggcctctaacaatgacaagaggacattacagaggttggcagccagtttcctcctgagtagggatgtcctatataaaagaaaccatgatatggtattgcttcggtgtgtgaatgcaaatgaggctgggcagatactaacagaggtgcatgaagggtcatttggcacccatgccaatggacatgccatggcccaaaagattatgagagttggatattactagatcaccatagagaatgattgttgtgttcacgtaaggaaatgccacaagtgccaaacctttgtggataatgttaatgctccacccgtaccggtgaatgtgttgtca

SEQ ID NO: 6481 - DNA, 419 bp, Glycine max
  unsure at all n locations
agcttggcggcttcttccaaaggtgatctcgtatggtgaaatgccggtggctaaatgggtagaagtgttgtatgaccattctgcccaaatcaagaaacaatcccatgtggatggtctctagtgtacaaaagctctcaagtattgctcgatgatgcgattcatggcttccgtcgggccgtcggacagaggatggtacgctgagctcatacagagcttggtgccgctcaatttaaataattcttgccaaaagtgactgataaacagtgggtccctgtttgagaccagacttcagggcatgctgtggagcttgctagaaatctccatgaataaccttgccatacttgaagctgtatgatgttgtggtagtgtacctangtggactccctttgaaaagcgatccacaatgactaanataactg

SEQ ID NO: 6482 - DNA, 441 bp, Glycine max
  unsure at all n locations
agctttaaagtgaattgtggtcatatcaaaacaatctcttcttaacattaatcattagaagaccggttgatgttattttaaataggtttaattgatataatgctcctaattaattatgcattgcgatgtttggttactttaatacttattgtacttggtagtcaatctcaatgttctttctttcttggtaatgcatcactattctattgcttacagaatctcntaatttttggcagcaacaatgtcaaaaattattaaagagatgttacccccagatgtacgtgttgcaagagatgcccaagatctattgattgagtgttgtgtaggtcagaattatgtttccattatatttgatatgttgccttaattgttatatttgaagctatatntatggtctaaattcaagtgtgcatcttagtcgtgcacaaaattgatgatttt

SEQ ID NO: 6483 - DNA, 414 bp, Glycine max
agcttctgtccctgagaaactggttcccagaatacaacagggagtgaagattgctgaaaaccctatccttgctacaagtcctagggaagtagacacggagatggacaagaaaatccgcagtattgtgagtagcatttagaaagacgcctctgttcctgatgctgagaaagatgttccaacatcctccaccccagatgttgttgtccctgaagctgatgaagatgtcccaacatcttccaccccgaatgtttctgtgcctgatgttgagaaagatgttccaacatcttccggcccaaatgctgaagtactctcttcccccagcaaagagagatcaacagaggaagatgatcaagccacagaggagactcctgcaccacgggcaccagaacctgctccaggtgacctcattgatct

SEQ ID NO: 6484 - DNA, 417 bp, Glycine max
tctatagaaggttcgttcctaatttctctacaattgcctcacctctcaatgagctggtgaagaagaatgaggcatttacttggggtgaaagacaagagcaagcctttgctttactcaaagaaaagcttactaaggcacctgttctagctcttcctgacttttctaaaactttcgagctagaatgtgatgcctctatagtgagaattggagctgtattgttacatggttggcaccctattgcttattttagtgaataacttcatggtgccaccctcaactacactacctatgataaagagttttatgccttaataagagccctccaaacttgggaaaattaacttgtctccaacgaatatgtcattcatagtgatcatgaatcaacttaagtacattagagggcaaaacaagttaaac

SEQ ID NO: 6485 - DNA, 473 bp, Glycine max
  unsure at all n locations
gacctataaaactcagcttctttaaaaacttattgaaataagctaaaaagaacttgtatgaaggtcataagtcatttatatatatccaaatcagcttcattgaagctctacccaaaccccccctagataattaatctaatttgtacagaggaatgaagtacctttgccctgtgttgtaaaagcaaacttgtttcaacactctcacacattccagaggtgctacttgtttccttctgccgtgagctaacctataaatagagatactacaaaaaccataaaatacaatgcaaacacttacattgttataccaatgttgcataaacttaaccataaatgatatggacaaacaaaatatagagttctttgatggagtaaaaacaagtgacagatttcaagcatacggagttctatgatctgaagaanacacatattccaattgataatatgattattatcaggttggctcatgacta

SEQ ID NO: 6486 - DNA, 436 bp, Glycine max
agcttctgccatggtatctaatcgagggggactagctggaagacgaggtcgccctcaatgttcttactgtaagagagtgagccacacacaaaacacttgttattgtattcacggattctccgaataatcggtgaatatttcaaagtctgaaacatctaagataaagttttcgaaggctaactatgaagagtatctccacccaaaagctgccaataaatctctaacatcatctactataagtggtcataactccactgcctgcatttcccaatctggtaataatcaaagtccatggataattgattcaggtgcttctgatcatattgctggtaatagttctttattttcattcctctctccttctaaaattcctcatttcattattttaaccgatggttctagagtgcagcaacaagaatcgccatgtatcactcac

SEQ ID NO: 6487 - DNA, 381 bp, Glycine max
  unsure at all n locations
ctttcttctggntgttctgctaagatttccaagcgttaaacagaacgagaagggattggaacctcacatttactatctttgtgcgagacaaatttctcttgttaaaaaattatttcacaaatcccaacgttatggatgtgggaaaatgtgttccacacttggtgatcaaatttctcgacgatccaacgattaatgattttaagatcataattttattggaacaggtttaggtgtatgaggttaaaagaaagctccgtgcgagggacatttctctccccacagacattatttcataaatcccaatggtagagatgtacgaaataagtttcaaacctagtgttcaaatttcacgataattcaacgattaacgagtccaagatc

SEQ ID NO: 6488 - DNA, 417 bp, Glycine max
agcttgtgataaaatctagagagatatcattctatacgacttctaggatcggaatatgttgcagcaaccccgctggagacaacacctggtacttgttatgttgataaacgtcacattggcggatgtactccattataatagctttcattctcttccaaaagaagctggaagacaaccgcttatacgtcttcgtgaatcccgaatggccacctgtaaccgtgtcgtgaaattcggccatcaaagtaggttaggcaacatcaaacagctcttgaagaataggaaaccatcgtgcagagtatagtgtggcagagaatcataatcagattgcaattgggagctcaacttgaccaactcaaggtcattttgcacttcgttcttgatagcagggaaatccacccaataaggactaatggagat

SEQ ID NO: 6489 - DNA, 432 bp, Glycine max
agcttgtaatcgattacacacatactgtaatcgattaccataggagattttcagaaaatattctcaacagtcacatctttttgtgtggttcttgaatggctatcaaaggcctatatatatgtgacttgagacacgaatttgacaagagtttttcagaacaaaaaggtcttatgctcttagaaagaaaaataattttatcctcttacaaattccttggccaaaactcttgtgattcaataaggaattatttgagtgctcaaattgttcaatctatctttttatagagagatttcttcttctcttcttcttcattctgaaaagggattaagagaccgagggtctcttgttatgaaaggattctaaacacaaaggaaggattgtccttgtgtgtttagaacttgtaaaacgaatttacaagatagtggaacactc

SEQ ID NO: 6490 - DNA, 455 bp, Glycine max
  unsure at all n locations
tgcttctacactgctggtatgttgccccagtgttcttgagcccaaaggacatcaccgtatagcagaaaggtgcccacagagtgatgaaggttgtantttccatatcctctagtgccatctttatctaattatagtctgaaaacccatccatgaaagaaaaacagggcaaaattggtcgtgttatctacgagcacatcgatgtgtggtaaaggaaagttatcctttggactgactcagtctaaatcctgatagtccacacacattcgtaccttcccatccgttttatggactggcacgatattggtgacccattccgagtactgagcaacggccaagaagccaacattgaattgcttcttcacctcttcttttattttcagcgacatctcgagcttcattctcctcatgctttgctttaccggggagcactcgggattcagaggtagtttgtgcta

SEQ ID NO: 6491 - DNA, 367 bp, Glycine max
tcaacattcaatatcgagcgtttcgatatattactggactgaatcatacatccgagtaaatagtctactgtagtttgaagttgctcagagcttcaacattcaatatcgagcgtttcgatatattacgggactgaatcagacatccgagtaagaagttattgtcgtctgaattatctcagagcttcggtattcccactcgagcgtctcgatatattacgggactcaatcagacatccgagtcaaaagttattggcagttgaatttgctcaaagcctcgacatgcaatagcgagcgtgttgaattactacgggactcaatcagacatccgacgcaaaggttatctgtcgttctgatttgctcagagctt

SEQ ID NO: 6492 - DNA, 371 bp, Glycine max
  unsure at all n locations
agctntgagcaacttcaaacaacaacaactttttactcggatgtctgattgagacccgtaatatatccagacgctcgaaattgaataccgaagctctgagaaaactcaaacgacaataactttttactcggatgtctaattgagtcccgtaatatgtcgagacgctcgaaattgaataccgaagctctgagcaaattcaaacgacaataacttcttactcggatgtctgactgagtcccgtaatatattgagacgctcgagattgattatcgaagctctaagcaagttaaaacgataataactatttactctgatgtctgattgaatcccgtaatatatcgagacgctcgaaatgcaataccgaagctcta

SEQ ID NO: 6493 - DNA, 365 bp, Glycine max
  unsure at all n locations
ttcaccctctaatgggtctcttcctagccttgtgtctttctctcgcacttgccatgattctctctttgtatggcacccaatatggggtgcanagtggtggttatgtgaaatctgacatgggttttgatgattaccctgtttccaagcttcaaaaccttgtgatggttgctgggcattccatttacactattagtagttgcggcaaaattgataaagaggattcttggtttttggagtcttatcagaagaatccaggccaagctgccacttttgtgacacacattcatgaggggattgagattgtggcaagggatgaatctgctttgctgctcttcaatgggggagagactccgagagatgctggc

SEQ ID NO: 6494 - DNA, 332 bp, Glycine max
  unsure at all n locations
agcttggctttatttnccttattattcatattntccttaattattttcctttccttaattattcatattttcctcacttagttttcttcccttaattaatcctgttttcctcaattagctctgttttccttaattagttcgctttcttgactttattttaatcactaagcatcataaattcattacttttaatattctctacacaaaacttaaatgatattaaagtgataattattttctccaaaaggaaaaattatgagaaaattttttcaaaattctatttaattaacccccacatttattctttattaacaggtatcatcacccctctt

SEQ ID NO: 6495 - DNA, 360 bp, Glycine max
  unsure at all n locations
tattttcattaatataatctnttatatttaatttaaaggataattataaacattaagaatttatatatgagaaatgatgactataaatatagataattagttgaacctaacaattttaaggatgctataaaaaaaagggagggatgtgtgtggagaaaagtaaccaagaagaattaaaaacaattgaaagaatcaaattcccaaaattataattggttaaataatcaattaatgaataagtaaccaacatgtgattagacacaaatgattaatatgttaaaattaaagttaaattatttgaataatatttaagtttgatatattctaaataaaaaaaaattattaggttttttatttgta

SEQ ID NO: 6496 - DNA, 366 bp, Glycine max
taagcggtgatcaaacttgctctttggaacaatctttatgaacatatcagcaggattgtgtagagtgctaatcttatgaactttgattcttctttctaaccgaatgaagtgatatctaacatctatatgcttggttctatcatgatgaacttgatccttggccaagcatatagcactaaggctgtcacagtagatgttagcatattcttgattaattccgagatcatttatcagacctctaagccaaattccttcctttgcagctttagtaagagccatatatttagcctcagtagttgagagagcaaccgaaggttgaagtgttaccttccaactcaccaagcagccaccaagggtgtaagcata

SEQ ID NO: 6497 - DNA, 363 bp, Glycine max
tgtatgaagagagagattcttctcatgaaactgaactcatttatctatgtctttaaaactgcacaggttagtatcaagttcaacccagctaagtgacacccgaatacttcaaccagttactttgatcttacttgtttccttttctcattttgcagcttacaatcacagctatcataacaatgacagtcttcatacgtactcagcggactgtggacttgataggtgcaaactatttattgggttcattgtactatactcttgtccgcctcatgactaatggagttgcagagttgatcatgactattactagactccctgttgttgataagcagaaggaattctatctctatccagcttgggctt

SEQ ID NO: 6498 - DNA, 368 bp, Glycine max
tgaaggtgtgtagcccaccatcttttcatagtttatttctggtaatgtgtctactatcattgtcatcatttttttctccgtcatggaggtgccacttgagctgccaggtctctccacctttgggcgtattcttttgaaagattcgtgccccctttttgcacatgttctgtagttgcatcctatccgaagacattatactgacactgcctaacgaaggcaaccactaggtccttccaagaatggactcgggaaggttccaagttagtgtaccaggtaacagctacccgagtaagactttcttggaaggaatgtatcagcaattcctcatcttttgcgtatgcccccatctttcgataatacatctttag

SEQ ID NO: 6499 - DNA, 267 bp, Glycine max
agcttgaaggcaaactggatgctttgttcaacttggtaacccagctggccttgaatcagaaatctgtacctgtcgcaagggtttgtggtttgtgctcctctgctgaccaccatacagacctttgcccttccatgcagcaacctggagcaattgagcagcctgaagcttatgctgcaaatatttacaatagacctcctcaacctcagcagcaaaatcaaccacagcagaacaaatatgaccttttcagcaacaaatacaaccctggat

SEQ ID NO: 6500 - DNA, 371 bp, Glycine max
agcttcgcacttgataatgcagttacttgaacagcgctaggcaatgacattcatggtgctccaagcaaaggtggagtatggaggattgccttgagagtccacacttaggcaatcatgaaactcaactccaaactcgaaagtgaaggacacatgaacaaccctaagcaagaacattcaaggggctccggaaaaggaccgagaatggaggattgccttgagggtcctctcttaggcaatcatggaacacaactccaaactcaaaagtggaggacacatgaacagccctaaacaataacattcatgtggcttcggaaaaggatgagaatggacgattgccttgagggtcctctcttatgcaatcatggaacaca

SEQ ID NO: 6501 - DNA, 366 bp, Glycine max
taagctccttcaactgcacaaggctcttaatatttgttgtttatccttgaggaaccttcactcgacgaagacactgacaaaaacttatcttctcattcttggacaaagtatggcaggctgggggcaagtaaattttcttcccatcagaccttggatgcaactgtgatcgtatacccatatcagctagatcttgacgggtattcaagccatccttcgtcttgccttgaatgttaaggagcgtcccaatcacactatcacaaacatttttctccacacgcataacatcaatacaatgtctaacgtcaagatcacaccagtacggaagatcaaagaaaatggaccagttcttccatatgcaactctgac

SEQ ID NO: 6502 - DNA, 366 bp, Glycine max
tcttagtttaagctgatgaagatgaattcgttgtttctttatgcactcctctaatgacaatagcatcatttctggcactaaattactgggagttggaagtcatcttctcaattaaattcttggcttcagcaggggtcatgtctccaagggctccaccactggcagcatctatcatacttctctccatgttactgagtccttcataaaaatattggagaagaagctgctcagaaatctggtggtgagggcaactggcgcatagttttttaaatctctctcaatattcatataggctctctccactgagttgcctaatgcctgaaatatcctttctgatggtcatggtcctggaggcagggaattttt

SEQ ID NO: 6503 - DNA, 369 bp, Glycine max
  unsure at all n locations
agcttagcagaggatagggaagttctccttagcagatgactggcggtagggctgtagccgaagcaggacccaatctcctacttgataatgcatctcgcgatgtttgtgatctggttgtttcttcatgaggtcctgngctttgagcagcttcttgtgaatagtttgaaaggttgcatctctgtcagtcaagaggctctcgacagcttcgatatttgatgtgctggagatatactcagggaaattgaatggtttccggccaaatgtcacctcgtagggagttgtacccgttcccgcgttccacgaggtgttgtgtgaccattctatccatggaaggaacttgccccacctattgggtcaccggtgaacaaa

SEQ ID NO: 6504 - DNA, 355 bp, Glycine max
tcagaattcaatttcgatcgtctcgatattttttatttctcaatcagacatctgaggaaaaaagttattgtcgtttgaatttgctgagagcttcaacattcaattttgagcgtctcgatgtattacaggacttaatcagacatccgagttaaaagttattgttgtttgaatttgctgagagcttcaacattcaatttcgagcgtctcgatattttacgggactcaatcagacatccgagttaaaagttattgttgtttgaatttgctgagagcttcaacattcaatttcgagcgtctcgatattttacgggactcaatcagacatccgagtaaaaagctattgtcgtttgaatta

SEQ ID NO: 6505 - DNA, 371 bp, Glycine max
agctttactatgcagagaatattttatgtaaataccttcatctgacttagcatcaaattttcctaagttatcttttccattattcaatacaaaacatttacaaccaaagatatgaagatgtgagatgtttggttttctgccattgaacaattcatatggagttttctttaaaatgggtcttattaaagccctatttaaaatgtagcatgcagtgttaacggcttcagcccaaaagtattttggaagaagagtatcatttaataaagttctagcaatctcttccaaagatctactttttctttcaacaacaccattttgttgaggggttcttggttgcaaaaaaatatgctcaatcccatgcttatcacaaa

SEQ ID NO: 6506 - DNA, 361 bp, Glycine max
ttgaggaaattcaaacgacaataacttttgattggttgtccgattgtgtcccgtagtatctcgagacgctccaaattcaaaacagaagctattagaaaaatctatggacgataactttttacacggatgtcccattgagtcccataatatatcgagacgctcataattgaaaacagaagcgctgaccaaattcaaacgacaataacttttgactcagatatccgattgtgtcccgtaatatatcgagacgctcgaaattcagaacagagctattagaaaaatcaaacgacgataactttttacacggatgtccgattgagtcccataatatgtcgagacgtttgaaattgagaactgaagc

SEQ ID NO: 6507 - DNA, 345 bp, Glycine max
agcttcggtagttcaattttgttcttctcgatatattatgcgcctgaatctgacatctgtgtaaaaagttatgaccattttagtttatcgggagcttccgtttttcaatttcgagcgtctctatatgtgatgagctcgaatcggacatccgagctaaaagttatgaccatttgaatttctcgagtgctttcggttttcaatcttgagcgtctcaatatattatgcgcttgaatctgacctccgtgggaaaagctatgaccatttgaatttctcgagagctttcgatgttcaatttattatgcatcggaatcggacattcgtgtgaaaagttatgaccatttgaat

SEQ ID NO: 6508 - DNA, 367 bp, Glycine max
tagctacacacacctatctaatagctaagctcaccttcgtagatgagaagctagagcttagatacacaccccctataatagctaagctcaccctcatgacaaaatacatgaaaatgcaaaaaagtccctactacaaagactactcaaaatgcctcgaaatacaagactaaaaccctatactactagaatggccaaaatacaaggaccaaacgaaggaaaaacctattctaatattttcaaagataagcgggctcatacttagcccatgggctcgaaatctaccttaaagctcatgagaaccctagggccttcccatggatctctggcccaatctagttggagtcttctatccaatgcccttgcgggg

SEQ ID NO: 6509 - DNA, 304 bp, Glycine max
agctttggataccccaaggatcttttttaaaattacttgggaaagagagccatgagggtggtctcatgggccactttgggatcgacaagaccttgtcttactcaaagaaaatttttattggccctatatgaagaaagatgtccataagcattgcactaagtgtgtggcttgtttacaagccaagtctagggtgatgcctcatgggctatacacacctttacccatcccatttgcaccttgggtagacattagtatggactttgtccttgggcttcctaaaaccccaagaggggtagactctatc

SEQ ID NO: 6510 - DNA, 290 bp, Glycine max
agcttctatagaaggttcattcttaatttctctacaattgcatcacttctcaatgagctggtgaagaagaatgtggcatttatctggggtgaaaaacaagagcaagcctttgctttgctcaaagaaaagcttactaaggcaccctattgcttattttaatgaaaaacttcacagtgccacccttaactaccccacctatgatacagagctttatgccttaataagagccctccaaacttgggaacattaccttgttttcaaggaatttgtcattcatagggatcatcaat

SEQ ID NO: 6511 - DNA, 300 bp, Glycine max
agctttgaaggacattgttttgttggccaacaacaacaacacttgctcctcataagagagtttatcatttgcattcaacaattgacctactagctgattgaacctgttgatgtggtcatggagatctcctcccatctccattttgagttgatacaactccatctttaaacaaaggtgattggttagcgactttgacgcatagatattatcgagcttctcctacaaggccttcggtgttgtctccttcaacacgttgcgttttatctcgggagcaaaggcttaccgaaatatgctcacaac

SEQ ID NO: 6512 - DNA, 313 bp, Glycine max
agcttagcacctggaattcagattctttatttaccaacctatcgatgttggggagagggtacacgtctttggggcatgccttgatcagataagtgtagtcagtccacactcgacattggccgttggttttttttaccatcacaacattgatgagcctggtggaaaacctgacctatttgatgaagttgcttatcgacttcttctttgaaggctttatgtcgctcttctcccatcttccttttcttctgtgatataggattggcctgggggcagatatccaatttgtggcaaattatgtcgagatggatcccca

SEQ ID NO: 6513 - DNA, 322 bp, Glycine max
  unsure at all n locations
agcttgccaattgggaagactgttcgttatctcttgngatgggattgaaccccaatgaatgccccattgagcaaagcaccaccacatgcaggggtaacaagaaccttgtcatggacatggctcagcactttgttccccaacaccatcaagttcccatctgcaacagatattcctgcccctacagccatctttgatgatttgatgaatcaaacacaagctcaaaaggaaattgcagcacacagagcaccacaacccctctattgttgtttgttccaaatcaaatacaaatgagttaatgcaacaagggaaggaaaaggaaagg

SEQ ID NO: 6514 - DNA, 290 bp, Glycine max
agcttaataattcaatctatggattgttacattcctcccaccagtggtatttaaaatttcatgaggtcatttcttcattcagctttgaagagaatgtcatggatcactgtatataccagaaggtcaatgggaataagagttggttccttgtattatacgtagatgatattctgcttgtgactaatgataagggtatgctatatgaggtgaaacaatttatctcaaaaaacatttatatgaacgatatgggaaaagcatcttatgttataggcattaagatccctaaaaaa

SEQ ID NO: 6515 - DNA, 341 bp, Glycine max
agcttagaagaaattcaaatggttatatcttttcactcggatgtatgattcaggtgtatcacatatcgagacgctcgaaatcgaacaacaagagctctcgagaaattcatattgtcagaacctttcacacggaggtccaattcagccgcatcacatatcgagacgctcgaaatttaacaacggaagctctgaaaaaattcaaatgctaataacttttcactcggatgtccgattcaggcgctttacatatcgagacgctcgaaattgaacaacagaagctctctagaaattcaaatggtcataaattttcacatggaggtgcaattcaggcgcattatata

SEQ ID NO: 6516 - DNA, 377 bp, Glycine max
ctatagaaactcagcttataatatattattacgctcaaaataatttttgattctctcgagaaattcaaatggtcataacttttcacccggatgtccgattatggcgaatcacatatcgagacgctcaaaattgaacaacggaagctcttgagaaattctaatggtcaaaacttttaactcggatgttcgattcaggcgcatcacatatagcggcgctcgaaaaggaacaacggaagctctcgagaaattcaaatggtcataacttttcacactgaggtccgatcctggattataatatatcaagacgctcgaaattaaacatcggaagctctcgagaaattcaattggtcatcacttttcacacggatgtccgattc

SEQ ID NO: 6517 - DNA, 307 bp, Glycine max
  unsure at all n locations
agcttcaacatcagaccacttctgtgtgctggaactacttcacatggacttgatggggcctatgcaagttgaaagccttggaggaaaaaggtatgcctatgttgttgtggatgatttctccagatttacctgngtcaactttatcagagagaaatcagacacctttgaagtattcaaagagttgagtctaagacttcaaaaagaaaaagactgtgtcatcaagagaatcaggagtgaccatggcagagagtttgaaaacagcaagtttactgaattctgcacatctgaaggcatcactcatgagttt

SEQ ID NO: 6518 - DNA, 363 bp, Glycine max
tgctcgtcttgctgatatttatcatgcattcttttttttgatgaccgacgaacaattagggatcaacttgaaacttatgtgcttcaagtgagaagaaatgcttctttttccacttgtgaagatgttcaaagtttggctatgaagatggttcaaactgagaaacatttggtatttccataggtttataaacttattgagctagctttgatattgccggtgtcgacagcatccgttgaaagagctttttcagcaatgaagattatcaagtctaaattgcgcaataagatcaacatgtgtggttcaatgacttgatggtatgttacaccgagcgggagatattcaagtcacttgatgatattgata

SEQ ID NO: 6519 - DNA, 371 bp, Glycine max
tgaagtgaggaagtgtggaagggtgagacttctatttttattcgttgaccacagagtagtacctagaatacagaagaagcaacaacaatcaatttaacaatattctttaaacatgcaagacacaattgattgcaacaaaataaataagataagggaagagagaatgcaaacacagttttatactggttcggccacaacccgtgcctacgtccagtactcaagcaacccacttgagatttccattatctttgtaaaatcctttacaaagtctgaaccacacagggacaacccatcccttgtgttcagatgctttacaacaagagactcacagtctcttaaccaatctcattgaataagaagaatggaagaag

SEQ ID NO: 6520 - DNA, 306 bp, Glycine max
  unsure at all n locations
agcttgctaacccatggtttcttctatatatctcccacactttttggggtgggctattcttggatggccttgattttttcagggtccacatggaccccatttctaccaactacaaaccctaagaaaactatattactaacacanaaggcacacttctctatatttgcgtagagggtatttttcctaaggactgaaagaacttgcctgagatgtcctacgtgatcatctaggctcctactgtacactaaaatatcatcaaaataaacaactacaaagctacctatgaaatcccttaagacatgatgc

SEQ ID NO: 6521 - DNA, 360 bp, Glycine max
  unsure at all n locations
tttggtatcaattacgagcgtcttatatacttcgggacataatcggacatccgggtaaaaagttattgttatttgaatttgctcataggttctgttttcaattacgatcgcctcaatatattatgggattcattcggacatccgagtaaaaatttattgccatttgaatttgctacgagcttccgatttcaattacgagcgtcttgatatacaacgaaaaacaatccgacatccgagtaaaaagttattgtcgttagaatatgcttagagcttctgttttcaattacgagcgtctcgatatattacgggactcaatccgacatccgagtaaaaagttattgtcatttgaatntgctcata

SEQ ID NO: 6522 - DNA, 367 bp, Glycine max
tgattttccatgcagtaatgactccaaagctttatctctcctcctcctcttatggcccaaaagagatcttctcccatcagtgttctgttcagtatcttcccattaacatttataatttgagcatcaattatattatcagaagctaagccgtattttctgaaaattgtaccaaacccacctccactcaaatgccctccaacaccaacagtggagcaacttccagctgggaaaccatgaacctcacttttcttttcaattgcataatagagttctccaagtgttgcacctgactcaacccatgcagtttcttcgtccatgttaatggttatggacctaaggttgaaaagatcaatgattatgaatggaa

SEQ ID NO: 6523 - DNA, 295 bp, Glycine max
agcttttgaagacaaaattggtgttctttagtttttttgaggactaaattagggattgctcaattatttttatttaaaagaaattgtgtttcctatgttttcattgctttctctttgatattatatatttggattttttatattcttcacgacaaaagtaaattatatatattccttgagcttatgtcaaaagggtcattggcaagtctctatcaaaagtatcggttaaacgattctcaagtttctgcatacacaaggcagattttatgtggcttggaggatcttcatgatcata

SEQ ID NO: 6524 - DNA, 371 bp, Glycine max
  unsure at all n locations
tagaattaatgtcattagccattacagcnggctaatttttttcctatagangnnaaaaaaacgtagaatagatttggatgaactgaccctagaaatggtttcagcaggaggagtaccaagaaggtcagttatgagatccaattggtgcactacattttttccaggaaacaatggcttcccactgagcatttctgcaaatatgcatccaatgctccaaatatcaattgcaggcgtatactgcaaaagacaaggatttgaaattacacactagtgcaatacttaaatatattcaacttcataaatcatacacaatcccggtagaggaggattgaagaggtaaccgatctagtgcgtaaaaggctttgcaaaag

SEQ ID NO: 6525 - DNA, 362 bp, Glycine max
tgtctctctttacttgaggtatgtaagattattatttgcagccaaatgtcttcagatttgttagctttggtttgtagtcgtgccatgcttcaaatggagtctttttctacaaagcttttgttggtaacctattcagcaaaaaaactgttgtgtgtgcagcctctgcccaaaattcctttggtagccctttgtcatgaagtaagcaccttgtcatctccataattgttcggtttttcctctcgacaataccattctgttgcggagtgtatggtgctgtcaattgatgttcaatgcctgcatctacacaaaacttgttaaaattttcagaggtatattcagttccattatcggacctgatcacc

SEQ ID NO: 6526 - DNA, 359 bp, Glycine max
tcaccgatctctctatgttgatgatatagtgatttcagggaatgatactactaagattgtccagctaaaagagcacttattcagccatttccaaaccaaagatctgggatatttgaagtatttcctcggtattgaggtggctcaatcaggagatagtgttgtgatctctcaaaggaagtatgctcttgatattctaaaagaaacaggtatgcaaaattgtagacctgttgatagccctatggatccaaatctgaagctcatggcagattagagtgaagtttatcatgacctcgagagatataggcgacttgtgggaaaactcatttatctcaccattataagacctgatatctcctttg

SEQ ID NO: 6527 - DNA, 320 bp, Glycine max
  unsure at all n locations
cccgggatccttaagtcacctgcaggctgcagctaacaaaggttgttattgggtggaattcctagagcaattcccttatgttatcaaacataaaaagggaaaaggtaatattgtagacgatgctttttctcggcgtcatgcattactttctatgcttgaaacanaattgattggtcttgaatgtttgaaaagcatgtatgaaaatgatgaaacttttggagaaatttttaaaaattgtgaaaaattttcaaaaaatgggttctttatacatgaaggctttcttttcaaaaaaaaaaaaatgggtatgccttaatgttctc

SEQ ID NO: 6528 - DNA, 363 bp, Glycine max
taagaccccagctcatatcctcacagtgtcttttatgtggaacaagtgcaccagtatcagttcctctcttagccttacaatcatagaagggaggagcatggaagcatggctccatcgacatggcacgttgacaaggaggatcaggagctgttccattctcgggcttgtacagtatccacggtttcaaccctccaagcccctgcgccacgtagccgaaagtagaccacgagctcgtgaccaacatatccatcaagctcaagaggtaaatttctgcccaagctttttggttgtgcatcttcttctctgtttgttgatacccttcatggcttggctggtaaatgccaacaacttctcctgtcacag

SEQ ID NO: 6529 - DNA, 365 bp, Glycine max
tctaaactttatacaagaatgaagctctgataccacttgttatacaagtggtctcagatatcttaagaaggggggggggttgaattaagatattccaaactacttccccaattaaaaatctatttgacttttttttaattgagttataaattcccttaacaatgaacttcttaaatattaattcaaataaaacaatttgaatatgaatataaagcaataataaataaaggagtttaagggaagagaaagtgcaaactcagatttatactggttgggccacacccttgtgcctatgtctagtccccaagcaacccgcttgagagttccactatcttgtaaattccttttacaagttctaaacacac

SEQ ID NO: 6530 - DNA, 307 bp, Glycine max
agcttagtaaagctaagcactatcaatctccttctttggcaaattttgtctaaaacatacttagacacttcctgagcaggtacgagcagttatgcaagtgggatcagcaactttcattatcagagtaatcaagcacagcggaaattctgcaagttgcaagtcgtttccaggatgtcaagacatctcacatgacatcagctttcttcttctgctccccctgtctccatgctcttactgcagcatcttctatcaactactaatctttttcaggatggcaaaacatctcatgtgacatcagcttttcctt

SEQ ID NO: 6531 - DNA, 372 bp, Glycine max
agcttggctaaaatggacacaatttatcaaaaatgattttttaatcagttttttttttcattttagatcaattttctttgaggatataaatttagttgatataaaaattcgatatactttttataagagttggatattaagaaagtgaactttctggattacttgtgactacaacaaatataaaaagtttattaaaaagaaacatgcatcaccccaactacaattctcatttctttcttgatgtacaatacaatccaatacaaaaactaaaattatagaaccaataattttactataacatataatacatatgagaaaaatgcaatataatgcattaccattaattaataactaaaaataactacaatctat

SEQ ID NO: 6532 - DNA, 287 bp, Glycine max
agcttctatagaaggttctttcttattttctctacaattgcatcacctttcaatgagctggtgaagaagaatgtggcatttacctggggtgaaaaacaagagcaagcctttgctttgctcaaagaaaagcttactaaggcacttgttctagctcttcctgacttttctaaaacttttgagctataatgtgatgcctctggagtgggagttgaagctgtattgttacaaggtgggcaccctattgcttattttatggaaaaactttattatggctcccccaactaccc

SEQ ID NO: 6533 - DNA, 363 bp, Glycine max
ttgaacagaaacattactttgtctggagacatgaaaatagacacaaggaaaagatcaaaaactatatttcgaacacaagtaatatacaaagtaaaatttagccaacctgtcattaactccttcaagcatcacatactcaaatagaactttgtagttctttttgaagcaaagctcctctcgaagtgtctgaagaagcaactccagcttgtactttcgatttataggcatgatccagtttcttacctgacattagatttaaatatgagcaatcctccctttcttcccatccttacattttcatgtctaatttcaagggtgatataccaacaaataacagtaaagtaataagaaatttacctcatc

SEQ ID NO: 6534 - DNA, 367 bp, Glycine max
tatgctgcaaacatttataatagaccccttcttctgaaaaaccaacaacagcagaataattatgatctttcaagcaacagatacaatccaggttggataaatcatccaaatctgagatgggtaagtcctccacaacaacaacagcctgtccctcccttccagaatgttgctggtccaagcaagccatatgttcctcctccaatatagcagcaacaacaacaaagacaacaagcaactgaggctcctcctcaaccttccttagaagagttagtgagtcaaatgaccatccagaatatgaaatttcagtaagagacaagagcctccattcagagtctgacaaatcagataaggcagaaggctactcagt

SEQ ID NO: 6535 - DNA, 283 bp, Glycine max
  unsure at all n locations
agcttattnctatgttaaaacctttttatcactgccaaaaccgcatgggtgttcgacatagatgagactacactctctaatctcccttactatgctgaccatggatttgggtatgactttcttttgtttgtctatgttattgctagttatttacttacagtaaattacataaactttcttagatttaaagaaattatacctgtacgtctttcttccttttttgacacacctacacacttttctttaattttaaaacatacacaaactttcttaaatattattc

SEQ ID NO: 6536 - DNA, 402 bp, Glycine max
  unsure at all n locations
ggatgcatnggtcaacttggtaacccagctggccttgaatcagaaatctgtacctgtctcaagggtttgaggtttgtgctcctaagatgaataaatacagacctttgcccttcaatgcaacaacctggagcaattgagcagcctgaagcttatgctccaaataatgacaatagaccttctcaacctcagcagcgaaatcaaccacaacagaacaagtgtgagctctccagcaacagagacaacccaggacggaggaatcaaccctacctcagatggaacagccctcagcaacaacaacagcagactgctccatcctgacgagatgctattggcccaagccgaccatacatacctccaccgatacaacaacagcaacaaccccagaaacagccaacagatgag

SEQ ID NO: 6537 - DNA, 455 bp, Glycine max
  unsure at all n locations
agctaggaggaattgactacctctactgaggatgttccaggcaaatattgagggatgctcgagggaggcttaccataagttacttcatatggagtcatctgggtggtatagtggcacgttgtattataacaccactcagtcaagcttagaaatttgccccattgagatagttggttataaatgaatgctcttaaatactgctggagcacttggttcagaactttagttcggccattgctctgaggatgataagttgtgctcatgcgcaacttggtcccattgagcttgaagagctcttgccagaagcgactcatgaagattggatctctgttggaaattatacttttaggaaagccatgaagcttgcataccatgttgatgaanagttaagtaacacggtgggttgtgaaattggtgggtagcatgccgaaatgagcttcctttgagaagttgta

SEQ ID NO: 6538 - DNA, 445 bp, Glycine max
  unsure at all n locations
cttgaagagttggaaactgtaatgcatacataaatttcatttatatcatatcttgatctcagattatctaggactccaggaacatgctagtattcaagctttgtcatatcatccactccacttggtgggacttctgtatctctatgataaatactggaagctntaacaacaacctgcaaatctcaagacaaacaagagcaatgcaaaaattcacaaatcgtaaacattagaaagtttcaaatatgaagttaacttaaaaatgtatttatagtataccaaatacaccaaataaaagtacagacatcgtgcaaaacaagaacaagtattttcaaactttcaataagacacatatctttattatgatatgcttcaaaggttcccaccggtcattcatgtncaagatatcaatgtactcgaagtaaaccagtcagattgaaagaacatg

SEQ ID NO: 6539 - DNA, 430 bp, Glycine max
  unsure at all n locations
ggatgcaagcttcattgatttatgtatttaagttatcaagtgcatctatttatcattattgagatttagggagaagggagattatgatttaggagggtgtatatatagtattactcaaataaaagacatgaatttaaaatgtggaatttcttgcctgagcaaaagcatatggtaaagcagaatacattccagctgctctttccctataaaagactattcgctcagcagcaaccactggctgcactgaataagcattcttaatgccaataaggaggacagcaacatacatggagcccaaggcgtttaaaagatcttgttgcttttcactgcaataattgacgtgaaagcttcctgttagatcaaatagtagcaacaaaacanatgagattaaaaataacatttgcaagcttcttgttngatcttacatttt

SEQ ID NO: 6540 - DNA, 451 bp, Glycine max
  unsure at all n locations
ggatgcaagcttctagaaaaacaacttctagtaaaaggaaagcatcctccacaactgctagtgaaaaggtaattttagttttaaaatatatttttgacttaaatttgtgttttagtttctcaaatttaggcacttttagttttggtctccttgatagaaatatgttctttttaatcactcaaattcaagaaatgataattttggtccctcagagactcaaagaacagatttttaattgaaggataaaaaaaaatattttaaatttaaagaactaaaaacatatttaaatcttatatttcattaaattttattttataaatcttaaccaaccttttataaatattatcttttatttgtttttactctttcaaacatccaacattagtgaaaagaaagaggtctagacaagcattacaatacaaatcagttntgtttctctcttatttgacac

SEQ ID NO: 6541 - DNA, 456 bp, Glycine max
agcttatgctacaacatctacaacagacctcctcaacctcagcagcatattcaaccacaacagaacaattatgacctctcaagcaacacgtacaatcccgggtggaggaatcatcccaaccttagatggtcaaatccttcacaacagcagcaacaccaaccttattttcaaaatgctactggcccaagcagaccatacgttcctccaccaatccagcagcaacaacaacaacagccccagaaacaacaaacagttgaggctcctccacaaccttcccttgaagaacttgtgaggcaaatgacaatgcaaaacatgcagtttcaacaagagaccagagtctctattcagagcttaattaatcagatgggacaattggctacatagttaaatcaacaacagtcccagaattctgacagattaccttctcaatctgtccagaatcccaagaatgtgagt

SEQ ID NO: 6542 - DNA, 450 bp, Glycine max
  unsure at all n locations
ggatgcaagcttagccacacagttggcaagtgtatcagctgcttcctgtgtggatgcctcagcatacacacgaacaacatcttcagtgccagatggtcgcacaaagcatcgaccttgggggtccttagctgtaaatgcagaagaggaaagagtatcaagctgcaatattagtaaactgaaattctgcactttaatctttcacactaaaaggctttcatggatggatgaaactgacaaatatctcgcagtcagtgaaattttgccaagccacttggacttgataacagtaatagtataatcccataaacaagacaccaacttttcagaaatataacattcaattntggtattatttaggcctccttgcctccctcactctgcccattcttggtggtttcacaaataanagcaagcaagcaatgataaaaccaaaaaacaatgttgtctttg

SEQ ID NO: 6543 - DNA, 382 bp, Glycine max
  unsure at all n locations
agctntgagaaattgagaacatgacaaaaacttgtgacagtaatatccaagatatacaaatgggtgttggtcaatgtaccacatttaatagtacaaactanaagaacaagaaaaacagaccaatttctaggcgtctcagaaaaaactttaaacaagacagttcacctaataagtttttggattagtagtaatcatatttgtgtaaataaatagcttaccagagttcattggactccatcgctggaaccgaaaaggagatggtatgttgagaacagaagcaccagaaacactgttatgcctggaaatgggaagatattgcctccgganaaaccttggcatccaattgccaatacatgataaagcacanagaagaagaataaaa

SEQ ID NO: 6544 - DNA, 232 bp, Glycine max
tgcagctagcaagtcttctctcaattgtgggactttgtaagtgtattgatttatgtccatagtttggtatgtgctaatttatgttacatcacatgcttatgtattgtgattggtcttgctgcatatttcagattctagttttgttccaccactagtttatgctgttcttggaagctcaaaagaccttgcagttggacctgattcaattgctttttctgtgatgggattcatg

SEQ ID NO: 6545 - DNA, 400 bp, Glycine max
  unsure at all n locations
agcttgaaattaaacaacggaagctctcgagatattcaaattgtcataacttttaactcggaggtccgattcaggcgcgtaatatatcgagacgctcgaaattgaacaatggaagctattgagcaattcaaatggtcataacttttcacttggaggtctgtttcaggcacataatatatcgagactctcgaaattgaacaacggaagctctcgagaaattcaaattggcataactnttcactcggaggtcagatacaggcgcataatatatcgagacgctcgaaattgaacaacggaagctctcaagaaaatcaaatggtcaaaacttttcacacggaggtcagattaggcgcataatatatcgagacgcttgaaattgaacattggaagatctcgtgaa

SEQ ID NO: 6546 - DNA, 413 bp, Glycine max
  unsure at all n locations
cttgatggtgtcgagaagaaatcacatgtttgtcatcatcaattatggggagaatgtgaatgtatgtatacatgattttgatgatgccaaatattaatcaaacaagggtgcttcaaatgataagcatttgcttcaagaataattcaagagtgcttcaacaaacaaagccttgtttcaagattcactaaagaccaagccttgccttaaaacaaagtgctttcaagacatgccaggctctggtaatcaattaccaggaagtgtnatcgattaccagaagacatcggtgagaaatagctgatgaaaaacgttttgaatttgaattttcaacatgttatcgattaccatatgtctgtaatcgattaccagcaacgaaacttcgtgaaatcaaattcaaaagtcntaacccttcaaat

SEQ ID NO: 6547 - DNA, 446 bp, Glycine max
tcaagctttaaaaacttcgatgtcttgtatacactgtcttcttcctatgctttaattggaggtaacttgtgtctttctcacatataggacatgcgtggtggcctttgacgctatatctactcaaattcccatatgtcggaaagtcgttaatggtgcaaaaaatcattacacgcaacctgaatgtctcctgagcattcctgtcatacacatcaaccccttctacccacaatttcctgaggtcttcaatcaatggagcaagatacacatgaatgtcatttcctggctgtctgggaccggctatcatcatacacatcattatgtacttccgtttgatgcacaaccaaggaggaaggttgtaaatcatcagcaaaataggccaggaactgtgtgtgcagctcaagttcccaaaaggattcattccatcggaggcgagaccaacccttatg

SEQ ID NO: 6548 - DNA, 436 bp, Glycine max
  unsure at all n locations
ggatgcaagcttaagctccttcttctgcacaatgctctttatatttgaagagtatccttgtggaaccttcacccgacgaagagactgacaaaaacttattttctcctttttggacaaagtatggcaggctgggggcaagtaaattttcttcccatcagaccttggatgcaactgtgatcgtatgcccatatcagctagatgttgacgggtattcaagccatccttcgtcttgccttgaatgttaaggagcgtcccaatcacactgtcacaaacatttttctccacatgcataacatcaatacaatgtctaacgtcaggatcagaccagtacggaagatcaaagaatatagacctcttcttcatatgcaactcttacttttatccttctttgggcttnccaaatatagtatttaggtgtgaacccgctcatatacct

SEQ ID NO: 6549 - DNA, 420 bp, Glycine max
  unsure at all n locations
tcttattttcagcagatgaagatgaatccgtggccacatcatggagtcctctaatgacaatagcatcatttcttgcactgaattgtttttatttggaaaccatcttctcaatcagattcctagcctcaacaagagtcatatcaccaagagctccaccactggcagcatcaatcatactcctctctaggttgctaagtccctcatagaaatattgcagaaggagttgctcagaaatttggtggtgaggacaacttgcacacaatatcttgaatctttcctagtactcatacaagctctctcaactaagttgcctgatgcctgaaatgtctttcttgatggcagtggtcctagatgcaatgaagaanttctccaagaacaccctcttaatgtcatcccagctggtaatggacctgggagcaa

SEQ ID NO: 6550 - DNA, 213 bp, Glycine max
tatatctactcaaattcccatatgtcggaaagtcgttaatggggcataaaatcattacacccaacctgaatgttctctgaacattcctgtcatacacatcaaccccttctacccacaatttcctgaagtcttcaatcaatggcgcaagatacacatgaaccgcacttcctggctgtttgggaccggctatcatcatacacatcattatgtact

SEQ ID NO: 6551 - DNA, 434 bp, Glycine max
  unsure at all n locations
tgtcaagcccnccagcctggacaggtgttgtttgggttgctgctgtaaagttgtccaaggaggacattgatgcaatcctacccccaagggctttggatagaagactccaaaaagattgggccagagatgcaagagaagaccctagggttctcatgagccttagggtagatttcagacccatgggctaaatatgagcccacttatctntgtacatattagattaaggttttattatttttgggccttgtatttagggcttcatagtgtagggagggtaccctagtaatgtaggattntttaacccttgtattttagttcacttagactagttnttgtatagggtagttttaataattcacatacatcaaataatattatatctgtatatttataattaggaatatgattgttaacgtgtngaaatcatagaattc

SEQ ID NO: 6552 - DNA, 404 bp, Glycine max
cctcatcaaactacttgtttcccgagggatattctataaacagacctcccatctttaatggagtgggttaccactactggaaaacccgcatgcttaatattatagaggcaatagatttaaatatttgggaagccatagaacaaggaccttatgttccctctataatagccggaagtgcaacaatagaaaaacctagagcagattggactgaggaagaaagaagattagtacaatataatttaaaggccaaaaatattattacatccgccttaggaatagatgaacactttacggcttcaaattgtaaaagtgctaaggatatgtgggatacaatacaagtaacacatgaaggcacaacagatgttaaaagatctaggataacactcctactcgtgaatatgaac

SEQ ID NO: 6553 - DNA, 452 bp, Glycine max
  unsure at all n locations
ggatgcaagcttgtaaatntttgttatcaaagcagcttccatatggtggatggngagagagttacttgtcgagccaaaacaaggtacatttcattcttttagctttgaatatatatccccaaactatgaagataaaataaatgaaataaagattatacatgagaattatgctcacgtgctttaccctgtcaaataggtttatacaaacttagaaggcaaccgtgcaaacttagttcagacttcatgggctttgttgtcccttattgatgcaggacaggttagtaataaagctctatgttttgaatttttaccatatcataaatttaaacctcctaactccttaggccctatggaaaaaccctgcaaagtgcaatggtcctctagttagtaaagtgcattgtaccccttgtcaaagatgggactattacttgaacaacttaanaaatatttta

SEQ ID NO: 6554 - DNA, 436 bp, Glycine max
  unsure at all n locations
tgcaagcttaataagtccatctatggattgaaacaagcctcccgccaatggtatttaaaatttcatgaggtcatttcttcatttagctttgaagagaatgtcatggatcactgtatataccacaaggtcagtgggagcactacaagaaaaataacctatacctatagacaaaaactgtcactataaataaaaaatccgtaggtaaatgtatgatagactttgtcctacagacatttcttctgtcaactttaagggggcgtataatgacggttaattgtctgtcactatagattctacctactatgtatagcgtgtaggtaaaagtcattaacttctacttacattatctaactgcaggtaaaagtctttaatatgaacatcacttgagactgcaagaaccttcttttccattaaccgatgccacanaactgtacta

SEQ ID NO: 6555 - DNA, 414 bp, Glycine max
gcttgggatactttctttaagaccaaatccccttcgttgaacttacatgggcgtaccttcttggtgaaagcgttcttcacccggctttgatataaccatccttggctcatggcggccaatctcttatcttctataatattcagctgatcaaagcgtgcctgggtccattccgactctttcagccctaactcaaccagaattctcaaagagggaacctccacttcaaatggaagcacaacctccatcccgtacactaatgagaatggagttgccccagttgatatgcacaccgaggttcgataaccatgcagtgtgaaagggaaaatctcgtgccaatccttgtatgacacggtcattttttgaactatcttcttgatgttcttattagcaacctcaacttcccccattcattgt

SEQ ID NO: 6556 - DNA, 134 bp, Glycine max
ggaatgggacctcggtgtgaaaagttatgaccatttgaatttctcgagagcattccgtatacaatttcgaacgtctatatttgtgatgctactgaatcggacatctgtgtgaaaagttatgaccaattgaattt

SEQ ID NO: 6557 - DNA, 396 bp, Glycine max
  unsure at all n locations
agcttataatatatcgatacgctaganattattcgtcggaaactctcgggaaattcaaatggtcataacgtttcacacggatgtccgattcgggcacataatatgtcgagaggctcgaaattgaacaacggaagctcttgagaaattcaaatggtcataacttataactcggatgtctaattcaggcgcatcacatatagaggcactcaaaaatgaacaacggaagctctcgagaaatncaaatggttataactattcacactgaggttcgattcatgattataatatatcaagacactcgaaactaaacatcggaagctctcgataaattcaattggtcataacttttcacacgaatgtccgattcgtgcgcataatatgtcgacacgctctgat

SEQ ID NO: 6558 - DNA, 449 bp, Glycine max
cttgaaggtgttaaagacatgagccattgtggtgtagaacccaatgaaatcaccatggtgaatgctttaatacctgcgctcgtagtagagactttgatactggacaatgggtgcaccagcacattcgtaaggctggttatgatcccttcatgtccacatctaatagtaacatcattcttgcaactgcaattcttgaaatgtatgccaaatgtggcagcttcaagatagcaagagacctgttcaacaaaatgcctcagagaaacattgtttcttggaacagtatgattaatgcatacaatcaatatgagagacataaggaggcactagatctcttttttgatatgtggactagtggcatttatcctgataaggctacctttctgagtgtgttgagtgtttgtgcccatttgtgtgctctggcattgggacaaactgatcatgcttatctg

SEQ ID NO: 6559 - DNA, 420 bp, Glycine max
  unsure at all n locations
ggatgcaagcttctgttttcaattacgagcgtctccatatattacgggcctcaatccgacatcggagtaaaaagctattgtcgttagaatttgctcagagcttctgttctgaattttgagagtcttgatatactacggaacacaatcggacatctcagtaaacagttattgtcgattgaatctgctcagagcttctgttcttaattacgagagtctcgatatattacgggattcattcggacatccaagtaaaaagttattgccgcttgaatttgctcaaagcattcgttgtcaattacgagcgtctagatatattacgggattcattcggacatccgagtaaaaagttattgtctttntatttngctcagagcttctgttttcaattcccagcatctcgatatattacaggactctatc

SEQ ID NO: 6560 - DNA, 406 bp, Glycine max
ggatgcaagcttaacataaggcatgcgaagtgggtggaattcctagagcaattcccttatgttatcaaacataataagggaaaaggtaatattgtagccgatgctctctctcggcgtcatgcattactttctatgcttgaaacaaaattgattggtcttgaatgtttgaaaagcatgtatgaaaatgatgaaacttttggagaaatttttaaaaattgtgaaaaatcttcagaaaatggtttctttagacatgaaggctttcttttcaaagaaaacaaattgtgtgtgcctaaatgttctactaaaaatttgcttgcttgtgaagcacatgaacgaggtttaatggggcattttgtggtccaaaagactctatacacattacaagaacacttttattggcctcata

SEQ ID NO: 6561 - DNA, 318 bp, Glycine max
agcttctatagaatgtttgttcctaatggctctacaatggtctcacctctcaatgagctggtgaagaagaatgtggcatttacttggggagaaagacaagagcaagcctttgctttactcagagaaaagcttactaagacacctgttctagctcttcttgactattctaaaacttttaagctagaatgtgatgcctctagagtgggagttggagatgtaatgttacaaagagggcaccctattgcttaatttagtgaaaaacttgatggacccaccctcaactaccccacctatgataaagagctttatgtcttaata

SEQ ID NO: 6562 - DNA, 254 bp, Glycine max
tcagttttcaattacgagcgtctcgatatattacgggactctttcagacatccgagtcaaaatttattgtcgtatgaattttctcagagctttagttttcaattatgagcgtctcgatatattacgagactcaatcggacatccgagttaaaaattattgtcatttgatttttgtcagagcttacgttttcaattacgagcgtctcgatatactccgggacacaatcggacatccgagtgaaaagttattgtcg

SEQ ID NO: 6563 - DNA, 243 bp, Glycine max
  unsure at all n locations
agcttgtgctattccaagttcatttaccatactattaaaccagattgcttccttcactccttcagctagggccatgtattctgcttcagtagttgaaagagtaacaactgattgttgtaccaaacanagtaaacacatatcctattaaaaatttccttgtgtctacatttcctgcaaaatctgcatctacatagcctgtgattgctgcctcatgtgctgtcttcttgaccttaatccagcttt

SEQ ID NO: 6564 - DNA, 451 bp, Glycine max
  unsure at all n locations
aagctaggcactaacaatctccctcgttggcaaatattgtctaaaacatacttagacacttcctgagcaggtacgagcagttatgcaagtgggatcagcaactttcattatcagagtaatcaagcacagcggaaattctgcaagttgcaagtcgtttccaggatgtcaagacatctcacatgacatcagctntctgcttctgctccccctgtctccatgctcttactgcagcatcttctatcagctactagtcttttccaggatgtcaagacatctcatgtgacatcagctntcccttgtctccatgctcttactgcagcatcttctatcagctactagtagcttacatcagtcatcatcagcagcagcagtctccccctcaaaatcatgtacatacaactccccctcaaaatcatgactcatgcatacatcgtatcctacttctctaaat

SEQ ID NO: 6565 - DNA, 448 bp, Glycine max
tgagcacgcttgcaagcctctccttactcacttgatcacgcaggatatgaaacttggtttcaatatgtttactcctgtcatgtgcctcacgatgcttagctaaatcaattgcttatttgttatccatcaacaacctcataggactgcaatttctcaagtttagttctcccattaaagcttccagccatagagcttgacaggccgccatagcagcagcaatatattcttcttcacatgttgacaaagcaactacactctgcttctttgagcaccaagagattggtgatgttccaaatttgaaaacatagccagtagtgcttttcctatcatccttatcaccacaccaatctgaatcactataaccaaacacttcttcttctatattcttttgactgtaaagacataaaattccaagatccaatgttccttgcacatacctcagaatcct

SEQ ID NO: 6566 - DNA, 285 bp, Glycine max
acttttcactcggaggtccgattcatgcgcataatatatgatgacgctcgaatttcacaacggaggctctcgagaaattcaaatggacataactttgaactcggatgtccgatttaggcgcatcacatatcgagactctcgatattgaacaatagaagctctcgagaaattcaaatggtcataacttttaactcagatgttcgattcaggcgcataatatatcgagacgctctaatttgaacaaaggaagctctcgagaaatgcaaatggtcataacatttaact

SEQ ID NO: 6567 - DNA, 433 bp, Glycine max
  unsure at all n locations
agcttagttacacatacctctctaatagctaagttcacctccttaagatgagaagctagagcttagctacacaccccctataatagctaagctcacccatatgccaaaaaacatgaaaatacaaaaaaagttcctactacaaagactactcaaaatgccccgaaatacaaggctaaaaccctatactactagaatgaccaaaatacaaggcccaaacgaaggaaaaacctattctaatatttacaaagataagcgggttcatacttagcccatgggctcaaaatctaccctaaggctcatgagaaccctatggccttcccttggatctctagcccaatctacttggagtcttctatccaatgcccttacggngtaggattgcatctatatcttcctttggatntgcaaagagtcgtcattattctataatgac

SEQ ID NO: 6568 - DNA, 422 bp, Glycine max
agcttacccttctggttttaagtgctaagtaactagcatttttgaaccatttgctaacctgcattttctaacacattagtaacagagtttgaacaggtcaagagctgactgacttgaataaagaccaaaagcaatgcaagtaacttgcagatggagatagtacaaaatttgctgtttaatacataatgtttaacaaaggtaacactactacaagacaaattcagaatttcagattaatgtagaaacaagatgcaactagagactgcaaggcataaccttttcaggatctagtcccaactctttcgaaagactgtccttcacagatcttggaggaagctcattctctgcaaaagcttggcgaagtttctggcatatttcatcaaaaaaaattaaaagacacaaattagtgcgtgtataattat

SEQ ID NO: 6569 - DNA, 414 bp, Glycine max
  unsure at all n locations
tataatgagttntgtttagaataggtcttataagtaccttgtttaaagtatagcaaatagtactcacacaatcaactcaaaagtactttggtagcgttgtttcatttagaagagttctagctccttcttcaagggatctatttttcctctccacaacaccattttgttgaggtgttctagggatggaaaagttgtggtgaattccattttcttcacaaaacatttcaaaatactcattttgaaattcacctccatggccacttctaattgaaacaatattaagacctttctgattttgaataactttggaacgtttgcgaaaagcatcaaaagcttcattttttgttttcaaaaacaaattccaagtgaaccttgaataatcatctattattaccaagcccaaactcatagttc

SEQ ID NO: 6570 - DNA, 270 bp, Glycine max
cacctcctgcatgcaagcttctctttgagacaagcaaaggcttgctctcgtttttcaccccatgtaaatgccacattcttcttcactacctcattgagaggtgatgcttttgtacagaaattaagaacgaaccttctatagaagctggctaaaccatggaagctcctaatatctcccacattttttggggtgggccattcttgcatggacttgatcttcttagggtccaattggacgccatttttaccagctacacaccctaagaaatac

SEQ ID NO: 6571 - DNA, 299 bp, Glycine max
atggtcatagcttgtcacacggaggaccgattcatgcgcgtaatatatccagatgttcgtgactgaacaacatatgctctcgagaaattcaaatggtcataacttttcactctgatgtccaattcatgcgcatcacatatctagatgctcgaaattcatcaaccgaagctctatcgaaatgcgaatggtcataagtattcactcggatgtcaaaatcacgcgcatcacatatcgagacgctctaaattgaacaacggatgctctcgagatattcaaatggtcataacttttcactctca

SEQ ID NO: 6572 - DNA, 428 bp, Glycine max
  unsure at all n locations
agcttaaaggaagtgaacgaattagcatgggcataaatgtctccgcattgattggtaaatctgttccccaaattcctgaaaaatgtaaagatccaggtacattcagcataccttgtattatagggaatagtaagttcgagaatgccatgctagatttacgagcttctgttagcgttatgcctctgtctagttataattctctatctctaggtcccttgcagtcaactgatgcggcaattcatttagctaatagaagtgttgcctatcctgttggtttcatagaagatgtcttagttagagttggtgaactgattctccctgttgattnttatattttgaatatggaagatggattgtctcaaggatcagttcccatcattctaggtagaccctttatgagaactgctagaactaagatagatgtttat

SEQ ID NO: 6573 - DNA, 366 bp, Glycine max
acattcgctcattgatttttagttttacaataaatgactttgacctcaccttctctctgtgcttcccttaaaaaaaaacaacttgatcttgaaatgcttagtcctgccatgaaaaacaggattatttgaaatggaaataactgtttgattatcaacaaagaatttgtgtaggctccttttgttccatatgtaaatcaacaagtatacgccttatccaaatagcttgattcacaactgcagtgactgccacatattctgcctcaactgtgctatgagccactatgtcttacttttttgaactcaaagaaaacatacccgaaccaaagttgaaacaataacctgttgtacttttcatatcatcaattg

SEQ ID NO: 6574 - DNA, 422 bp, Glycine max
  unsure at all n locations
tactcaagcttatgctgcanacatctacaacagacctccccaacctcagcagcaaaatcaaccacaacagaacaattatgacctctccagcaacaggtacaatcccaggtggaggaatcatcccaaccttagatggtcgaatccttcacaacagcagcaacaacaaccttattttcaaaatgctgctggcccaagcagaccatatgttcctccaccaatccagcagcaacaacaacaacagccccagaaacaacaaacaattgaggctcctccacaaccttcccttgaagaacttgtgaggcaaatgactatgcaaaacatgcaatttcatcaagagaccagagcctccattcagagcttaactaatcagatgggacaattggctacacagttaaatcaacaacagtcccagaattctgaca

SEQ ID NO: 6575 - DNA, 344 bp, Glycine max
aggatttccttttagtagggaatctatccttcctaagatggagccaaacccagtcaccctcattaagaactagctcttttcttcctctattgcctttagttgaatacacctttgtttggttctctatttggttcttaaccctctcatgcatcttctttacaaattctgacctagattccctttctttatgtataaaagaagtgtccagtgggaggggaatgaggtctaacggtgttaggggattgaacccatagacaacctcaaaaggggactgcttggtggttctatgaacccccctgttgtaggaaaattctacatgaggaagatactcatcccaagactta

SEQ ID NO: 6576 - DNA, 400 bp, Glycine max
tggtacatatagtctgaatctcggatcctgttaatgacttattctaaacacttgttggctgatcattagaaccaacgaactgagtgacaaacaattatttattgaagctgctctcgaataagatgacaaccaatctctatatgcctggtcctctcatggaagactcgggttgcggcaatatgaagagcagactgagtatcacaatacaacttcatttgcaaactcttcacaaaacttcaatacttgcagataatgtctgatccacatgagctcacatgtaaccatagccatagatcgacactcagcttctgcactagaccgagcaacaaccgttggtttcttgctttcccaagagaatacattttctccaatgaagacacaatcacttgatgagatcttc

SEQ ID NO: 6577 - DNA, 408 bp, Glycine max
cagtgcaagctgtggcatgcactcgtagcttctacataagcgtcacacaggattggaggagaagttgatattatattctaatgacacttggatttgaaacttgaatttgtgtgttcctatttatggagccacatctctacttatcatgattacagagtattagatatgggtgagccaacgcatccaatagcgagggctggattccacactaagtgtgcttaagctgcatgatgattgagaagaatgaaagacatgcactcagtgtgactatatgaagtggcaatagggtgaaccagcaaatgctcacccggccccctttaaagccactgattgtgctctcccagtacatcaattcatctccacacacgcgtaaataaacttaatgcatgagaagtaaaacctgcctgt

SEQ ID NO: 6578 - DNA, 426 bp, Glycine max
tatgttgcaaacatctacaatagacctcctcaacctcagcagcaaaatcaaccacaacagaacaattatgacctctccagcaacaggtacaatctctttatgaggaagtatcccaaccttagatggtcgagtcgttcacaacaccagcaacaacaacagccttattttcagaatgctgttggcccaagcagaccatacgttcctccaccaatccagcagcaacaacaacaacaacaaaaacaacagccccagaaacaacaaacagttgaggcccctccgcaaccttcccttgaagaacttgtgagacagatgactatgcaaaacatgtagtttcaacatgagaccagagcctccattcagagcttaactaatcagattggaccaatggctacacagttaaatcaacaacagtcctcgaattctgac

SEQ ID NO: 6579 - DNA, 377 bp, Glycine max
cgcttggtgacgatcgaagcttataggtcattatcgtgtggagtcacgaggttcagcttagtttatatggacaactagtctcgggaaaggtaattgcttctggtttggatgaagagcttgccaaggaagccaaaagagctggtatatacttgagtcgttgattatctctcctccatacaagcattttcagggcacaatgttctttgctaaagtgctattcacttatgccatttttgccagtttctgtctgaaaacataggttagcacaggaggtagcatccatgctacaattgagtgttgagattgataccggctcatctgagaggttagtttatttgtctccagtaattctcaccacaactaaaataaaatatctt

SEQ ID NO: 6580 - DNA, 430 bp, Glycine max
agcttaaacattcaatttcgagcgtctcgttatattacgggactcaatcagacatccgagtaattacttattgtcgtatgaattggctcaaagcttaaacattcaactttgagcgtctcgatatattacgggactcaatcagacatccgagtaaaaagttattgccgtttgaattggctcagaggttcaacattcaatctcgagcgtctcgatatattacgggactcaatcagacatccgagtaaaaagttattgtcgtttgagttggctcagaggttcaacattcaatttcgagcgtcccgatatattacgtgactgaatcggacatccgagtgaaaagttattgtcgtttgaattggctcagagcttcaacattcaatttcgagcgcctcgatatattacgggactcaatcagacatccgagtaaaaa

SEQ ID NO: 6581 - DNA, 360 bp, Glycine max
gagtgcctgaccgaattgataggtcctttaggtggcagcatgttggactccgaatccgagcacttcttgtcacgatgatctataataaggctcttaccctttcttgtcaatcaaagcaggaccacacttctggggaaataatcaatttcatgactgctgatgcggaaagagttggtgttgtcaggtggtctatccatgatttgcggatggtggctctgcaagaaacattagccctggtgatttggtataaaaaccttgggctggcttcaattgctgcttttgttgcaacagttgttattatgttggcaaacgctccattgcgatcatcgcaggagaagtttcacaagaagctgatggagt

SEQ ID NO: 6582 - DNA, 439 bp, Glycine max
  unsure at all n locations
agctntacttcaatattttccaaatcatcaagaatcttgttgaaatcaaccaattgttcagtggctgttcttgactctgtcatcttgaaggtgtacagttgttgcttcaagcatagccgatttgcaagggactttgtcatatacaatgactccagtttcagccacattgaggctgctgtcctttctcttgcaacttctcttaaagctttgtctccaaggcatagaatgattgcacttctagctttagcaatcatctctgatttctcctttgagcttagagattcagacatcttttcttctcctttaagagcatctgcatagccatgttgaatcaagattgcttccatcttgattctccataacccgaagtcattttcccctgaaaacttctctatatcatancttgttgttcccatctttcttgatcttgatcctgttc

SEQ ID NO: 6583 - DNA, 417 bp, Glycine max
  unsure at all n locations
agctcgtaaggcttcgggtggtacatgatagatagactcaacttggataccatccttgtgctacaacaattgcagcaagacccactatccataatgagagnaataattttgtttaaaaccttgcatcttgtatgaaagatgttttctttttgggtttgggttaggtcacaagattgactcccaatgagccatctctccattagaagatcaccttcttcgtaggggcaaacctcttcaatatgctcatcacccttggcttcaccctcacttccacctgaggaaggagaagaagtagccttctcttgactactgtagatgtcttgatcccacatgatcatggttttctttgtagtggcattgagaaagaatgtggcctttcccaatacattntaagcacttaatgttactagttctatc

SEQ ID NO: 6584 - DNA, 435 bp, Glycine max
  unsure at all n locations
agcttgagaaacattaatagaattatatttgactatatttcaagtacacatttaacatttttttctctaaaattaaacttaatgggcttctagagcaaaagagagtttttcaacttcaaccaaataaagaaacttcaaagcattgttctttgtttgtggtaactttaattacaaagcatacacatatataattaattntcaattaagaaaaatcaaattacctcttcaaacaatgtaacataaaagataaaacaaaccacaaaaaataatcatgaaaggaagagataaatttatttccaaccacacatatcaaatattcatttaatgaatgtgaaattacaaaactacccctaatacaaaaactagtctaggtgccctaaaatacaagggctgaaaaatcctacatttctagggtaccttacctatattatggat

SEQ ID NO: 6585 - DNA, 439 bp, Glycine max
caagcctcttatctttcctatgactagcattggcattcctgtaaaaagcagtcttctcccgctgattttcatcaaagattctacacatgttgatcaactgtgcaaagttatgaataccgtgataatttaccatcatttttacttctggtcgaaggccattgacaaatttcatgcatttggacctctccccagcttccccctaataatgaggaaaataccttacaaggttctcaaacctcgccgcatactctgccaccgtcatactttcctgtttcagctcaagaaactccatctccttcctattcttgacatcttccggaaaatacttctccagaaaagtttgtctgaaagtctcccattggacaacaacaccaccgtgtccctctaaacgtgggcgagtgttctcccaccagtactctgcctcatctgataacatgtg

SEQ ID NO: 6586 - DNA, 292 bp, Glycine max
agcttattctatgtgattgaccaagcacactatgatcacaaaattcaagtttatctagtttatcaccacctaacagattttgtttctcaagttcatgtattcctctttcactaacatgacctaatctcagatgccatatcttcgagttatcactcaatgtattactagctaccgatgcatgtccaatagctagcggaacctatcagaataaacaagccattacttttattcttgttacccttacctatgattaaagatccatttgaaatctcaacaacaccatatggaattc

SEQ ID NO: 6587 - DNA, 401 bp, Glycine max
  unsure at all n locations
gacctataaaactcaagcttgctaccccaagaaccatcaggaaattacttgtgaaggagagccatgagggtgggctcatgggccactttgggatagacaagaccctagtcttactcttagaaaagttctattggccccatatgaagaaagatgtccataagcattgcactaagtgtgtggcttgtttacaagccaagtctagggtgatgcctcatgggctatacacacccttacccattccatctgcaccttgggtagacattagtatggactttgtccttgggctccctagaacccaaagagttgtagactctatctttgtagtggtggataggtttagcaagatggcacactntataccatgccacaaggtggatgatgcttcccatatcttaaaactc

SEQ ID NO: 6588 - DNA, 441 bp, Glycine max
  unsure at all n locations
agctagcttctacactttgtgcatgtccttcatgctttacatgcctaatgacacctaagcactcttagtagagaatcttggacttgatcttggattagtggactgaaccatatctgaaattcactaattataattagtgaaattttggctccaaaatttggctccacaaattcaatttcaaattcaagtgaaatttgaatagaaattcaaattttcctccaattntatgtgacacttaggctataaatagaggctaagtgtatgcattttttcgaactttgatcatttgaaaatgaaacttcagattttagagctcttttagaacacaaaattttgtgctcttctcttcctctcccttcattcatctccttcttcctccaagctcttatccatggcctcctatggtggtgaacttcttctagactcatcttctccttgaag

SEQ ID NO: 6589 - DNA, 381 bp, Glycine max
tacggaccttcagtctcagctttgacccgctgtaaatgatatgttcatgatgcataagaatacgtaatgaccaatccaatgatgatcttataatgcgcctaacataagcgatcgctattttatatatgagagaagggaagagagaatgacaaaacctatttatactggttcgaccacttcccgtgcctacgtacagtcctcgagtaacccacttgagattatccactatctctataaatcctttatagactttgaacacaccttgggatccatctcccttgtgttcaagattctccaagagacaaccagtctcttgattacaattatcacaatctaagagacaatcagtctcttgattacaattaagtctatgagatgaat

SEQ ID NO: 6590 - DNA, 406 bp, Glycine max
  unsure at all n locations
agaccttatttattngataatcgatatttttatatatattcgcattaacattttaaagactgtcttgacttttttttatgacagtaaatactatatcttgacttgagaatttattttgaaaacttacttaaaagtaaggtcaattaaataaattaagactatctctatattattaataatcaactagattaattaacaattatataactcaaatatccaatgataaatttgatataataactacattattaatattattgggaaaaacaatacaaagtcaataagttcctcgcggaattgatcatgaattttactatcaacttattcttaaaagaaaaaactttgaaatataaatcatgtttcttcaaaaataactttaactgacattaattgtataaaatcaatt

SEQ ID NO: 6591 - DNA, 444 bp, Glycine max
  unsure at all n locations
tatcaaaccaaagcaacttctatctagaacaacttgaagagctatattagaagaaatttcaattgttgaaatgtatagtaagtcggtcatctagtgacagcataacaaagtcacaaatactagtactaagttgaagaacatattgcagtatcgagtgtttgctggttacatattttcaggttatatacctggaggagttccacaacacatattgcggtcatcaatatgctcaacttcaagaccaatgaaccatgcaccaagtgagacatcttcattagcatatttatgcaaaatcggcctgcaatcataattagactccacatgaaatttctatatgtaagagaatattctatgagaaacatggactgatccccgaactgagatttcctattatgaaaattntaagtttatgaaaaagaaagtttcttattgtaatcaaatctt

SEQ ID NO: 6592 - DNA, 418 bp, Glycine max
  unsure at all n locations
actcaagctagaatcggacatccgtgtgaaaagttatgaccattagaatctctcaagagcttccgctgttaaatttcgagcctctcgacatattatgcgcccgaatcggacatccgtgtgaaaacttatgatcatttgaatttctcgagagtttccgatgtttaatttcgagcgtatcaatatattataaccctgaatcggacctcagtgtgacaagttatgaccatttgaatttgacgagagcttccgctgttcaatttcgaatgtcactatatgtgaagcgcctaaattggacattcgagttaaatgttatgaccattaggatttctcaagagcttccgttgatcaattctgagcgtctcgatatgtgattcgcctgaatcggacatccgtgtganaagttatgaccatttgaatt

SEQ ID NO: 6593 - DNA, 293 bp, Glycine max
taacaaagagcatgcgaagagggtggaagtcctagagcaatttccttatgttatcaaacataaaaagggaaaaggcaatattgtagccgatgctctttctatgcgtcatgcattactttctatagcttgaaacaaaattgattggtcttgaatgtttgaaaagcatgtatgaaaacgatgaaacttttggagaaactttgaacaattgtgaacaaatttcagaaaatggattgattagacatgaaggctctctttccaaagaaaacagaatgtgtgtgcctcaatgttctact

SEQ ID NO: 6594 - DNA, 423 bp, Glycine max
  unsure at all n locations
ctcagctattaaacttggtcgtgtactccccaacagacatgcttccgtgtttcaaatcctgaaattccctcgccttccgcttcctcagatctcgtggaaagtaattttccagaaatttgtccttgaaggcattccaaggaatcacgcctcccgttgcaacaaatgaaggcttcacgaacttccaccaattctcggcctctccttggagcataaatgtcggataagggaccttatgctcctcgaggcaacccatcgccttgaaaatcttctccgtctcagctaaccacaacctagcaccttccggatcatagtctccactgaactttggctggtggttcttacggaaagccatgagcccncgatactccgccggctccacatcacgttcctgcaccagagtatctagcacagctgtgatgcagt

SEQ ID NO: 6595 - DNA, 437 bp, Glycine max
agctcgaaatggtttactatcattgatgagaggtatggggtggtgtttagtattccacagtttattatcaggattctgatatcctttggtttcacttttgtggcagcaagaaggtccttaattgccccaaacatcaccattgatacctcttgcctgccatcattcagtgagtttctgtaaccagtgcggaaaactccttttggcaggtacgtttcatcgcctatgccagatttcttaagaactcgttcttgaaactcaatggcggtttcattgaaattcctatattttttggccaactgaatgaactctgccttatagatctgcataaataccttattattgaatgcatgccaacattggaatataaaaaataaataggatcaccctctcacgcatatagccaaacaactaagagttcatgtatgcatatatgttat

SEQ ID NO: 6596 - DNA, 436 bp, Glycine max
actcagcttaacattcaatattgagcgtctcgtaatattacgggactcaatcagacatccgagtaaaaatatattgtcgtttggattggctcacagattcaacattcaatttcgagcgtctcaatatattacgggactcattcagacatccgagtaaaaagttattgtcgtttgaattagcttagagcttcaacaatcaatttcgagcgtctcgttatatcacgggactcaatcagacatccgagtaaaaagttattgtcgtttgaattggctcagagcttcaacattcaatttcgagcgtctcgatatatgacaggactcaatcagacatccgagaaaaaagttattgtcgtttgaatttgctcagaggttcaacattcaatttcgagcgtctcgatatattacaggactcaatcagacatccgagtaaaaagat

SEQ ID NO: 6597 - DNA, 406 bp, Glycine max
  unsure at all n locations
agctntgagccaattcanacgacaattactttttacatggatgtctgattgagtcctgtcatatatcgagacgctcgaaattgaatgttgaatctctgagccaatccaaacgacaataactttttactcggatgtctgattgtgtcccgtaatataacgagactctcaaaattgaatgttgaagctctgagctaattcaaacgacaataacttttaactcggatgtctgattgagtcctgtcatacatcgagacgctcgaaattgaatgttgaagctctgagccaattcanacgacaataancttttactcggatgtctgattgactctcgtcacatatcgagacgctcgaaattgaatgttgaagctctgagccaattaaacgacaataactgtntactcggatg

SEQ ID NO: 6598 - DNA, 462 bp, Glycine max
  unsure at all n locations
tctagcacactccagacatcttcgcacanatcccaacggtcagatcttggaaaggtgtcttttgaagttgcaaaccatatttcgagacgatccaacggttaaagaaggctgggcagcatttttaccgaggaagctccatgtagttttctctagaagcttcattaagaggcttctagcacactccagacatcttctcaaagatcccaacggtcagatcatggacaagtgtcttgtgaagttgcagagcaaagttcgagaagatccaacggttaatgaaggctgggcagtgtttttaccgaggcagcttcatgtagctttctctagaagcttcattaagaggcttcctctagaagcttcctcgtggcttcttcgagaagctgtctcaagaggcttctttgagaagctacatccttatctatccacncctctattaactaaattaacttccttcaaaattattac

SEQ ID NO: 6599 - DNA, 449 bp, Glycine max
  unsure at all n locations
ctcacgctgtggactgaggacaacttgtgccaaccgcgaaatagatgttgagatcagcggaaacacgaatgacacctttgttaaaatcaacatgtgtaaagatcaaaggctggccttggtaaccatcaactgctacaacatcaagagggcaatctgcacctgtgcttgtcatatcaaggccacctaaatccggggaagccggaacgatgtaataactcgaacgagctcgaactatctttcctgatgtgtccagcacttgctcaggtgcacgacctgctgcaccaataatagcctttgtgctcacagcaactataaggaccaatgttaccaatgtcatcttcattgttctagttttagttatgtgtttttgcaacttgtgatggatatggaagaagagggagattatatctacgttcngaattggtgtaatccatgtacccatgtgcaca

SEQ ID NO: 6600 - DNA, 486 bp, Glycine max
  unsure at all n locations
agcttggcctcagggcaattccctcctttcacgccaaattactttgctgatcctgaaatcaatgaaatgctattagaaattatatacaaaataaatcacagtttaatttttttataaactcataaatataatattttaatagtctacattcatcattccattccatgtgtacaaacaattaggctacattaaaattgtagtcccccctaattttaaaattgtaattntgatcccttatttttaaatcaaaatatttagtttttttattttaaaaaataaataattctaattntttttcattagttgataatttaaagtcaaatattaactntgatgtgacatattagtgatgttgaacttatataagcaattgacatgagactatgtgaaanaagaattaaataaagtgaataataaaaaaatattntaataggaattgaactcataactatttatttatagataaaataaaaattactaattcac

SEQ ID NO: 6601 - DNA, 429 bp, Glycine max
  unsure at all n locations
aagcaattaaactaactaaattaaatgctagaaaaatagaaataaaaagagacctgtgttgcctccccgtaagcgctcggttaatgtcattagcttgacgcatcgtcctgttatcctggattgaagcgtagaatactgttcaatctctcaatagctccaccatgatattgctttagcctttgtccgttcaccacccatatgacgatcacaaagnctcactgcttcatatgttcggactttcttgatggtaaatggtctagaccatttcgatttaagcttnccaggacacaatttaagtcttgaggtgaacagcaacacttgttgtccttgttgaaaatccctcttgagcagttctctatcatgatactctntacatttttctttgtacaactgtgaagattcataagcagttacatttatctcttcaac

SEQ ID NO: 6602 - DNA, 400 bp, Glycine max
gatgatatggtcttcaccgacgataggatcatattggtctataaagaggcaaatctgatcatcatgctttgatacatgccaaagaacaactagggcgaatgaagagggtgagaatgagggagaagcccatgttgtgactgccattcctatagagctagagtaatgcgttgcatgttgatttatactggttcgagcacttcccgtgcctacgtgcagatctcaagcaacccacttgagatattccactctctttgtgaaactccttttacaaagtctgaaccacacagggacaacccttcccttgtgttcacgaatcctctacaacaagagacccacggtctcttaatccctcttctgaagtaagaagaagagaagaagagatctctcttattagagatac

SEQ ID NO: 6603 - DNA, 454 bp, Glycine max
  unsure at all n locations
agcttctctcctagctacatggtgcgttngcaatgatagaagctaggcgatcctgcagaaaaccttggactatgcttgtggagctggtgctgaatataaccctctccgctaaaacgggtcttgtttccagcccaacaccgttagggcccactgtaactacgccgtgaacagctacttccaaaggaagggtcaagggtcctgcgactatgcgggaacagccactgttactgcatctgaccccagtaaatccttcaatctctcttttctttttctttgttttctctcttagcatttattccttggaacaataatcgtagctgacccttttatctgtttctctttntcttgatgagcaggctctggcggtacttgtgtttacacttctagcgtcaggtatgtatntgtatttgatccacccatcatcaagctttcttctggttaatatgctaatctt

SEQ ID NO: 6604 - DNA, 486 bp, Glycine max
  unsure at all n locations
nntgtctcaagtattcaaatctgactcttggaagtgccttgatcagaatgtcagcactttgattctctgttttgcagtacagtaacttcacttctccttccctttgaacttctcttagaagaaaaagctntatcttgaaatgcttagttntgccatgaaacactggatcattagcaatttagattgcagcctgggtgtccacaaaaatctgtgtgctttcttcttgtttcatatgcaaatctgtcataattttcctgatccaaagagcttgattcactgtagcaacaatagctacatactctgcttctgtagttgattgagctacaacttcttgctttntaaaacaccaagaaaagactccagaaccaaaggagaaacaataaccagaggtgcttctcatgtcatcaatacaacctgtccagtcactatcagaatatccatggagcttanattatgagaaagagagtacatataccatagtctaaa

SEQ ID NO: 6605 - DNA, 389 bp, Glycine max
  unsure at all n locations
agcttagttacacatacctctctaatagctaagttcacctccttaagatgagaagctagagcttagctacacaccccctataatagctaagctcacccatatgccaaaaaacatgaaaatacaaaaaaagttcctactacaaagactactcaaaatgccccgaaatacaaggctaaaaccctatactactagaatgaccaaaatacaaggcccaaacgaaggaaaaacctattctaatatttacaaagataagcgggttcatacttagcccatgggctcaaaatctaccctaaggctcatgagaaccctagggccttcccttggatctctagcccaatctacttggagtcttctatccaatgcccttacggggtaggatngcatctata

SEQ ID NO: 6606 - DNA, 383 bp, Glycine max
agcttgagggaaaacttgatgccttggtcaacctagtaactcaacttgccataaatcagaaatctgcatcttcacctattactgttgcaagagtctgtggtctatgttcttctgctgatcaccatacagatctctgtccttctttgcagcaatctggagtcaatgagcaacctgaagcctatgttgcaaacattcataatagacctcctcagcagcaaaaccaacaatagcagaataattatgatctttcaaacaacagatacaatccaggttagaggaatcatccaaatctgagatgggcaaatcctccacaacaacaacagcagcaacaataacagcctgtccctcccttccagaatgctactggtccaagcaagccatat

SEQ ID NO: 6607 - DNA, 424 bp, Glycine max
tatctgagtccactctttatgtgaaatataagggaaataactttctcatagtttctctctatgttgatgatcttttagaaactggagatgatgcaaggctagttgaggagttcaagcaagaaatgatgcaagctattgaaatgactcatcttggtctcatgacttattttcttggaattgagatcaagcaaagttaaaacaaagtgttaatctgtcaaaggaaatacacaaaagaaattttgaagaagtttcaaatggaggaatgcaaatctattagcacaccaatgaatcaaaaggagaagttcaacaaggaagatggtgctgataaaattgatgaaggatattataggagtttgattgaatgtctaatgtatctcactacaataaggtcagacattctatttgttgtaagtctcttgtctcg

SEQ ID NO: 6608 - DNA, 369 bp, Glycine max
  unsure at all n locations
caaacgacaataactctagactccgatgtgcgattgtgtcccgtaatatatcgagatactagaaattcacaacagaagctcttataaaaatcaaacgacgatgactttntacacggatgtccgattgggtcccataatatgtcgagacgcttgaaattgaaaacagaagccttcaccatattcaaaagacaataactttttactggaatgtccgagtgagccccataatatatcgagacgctcgtcattgaaaacacatgctcagaggaacattcaacgacaataacttttgactcaaatgtgcggttgagtcccgcactatatccagacgctcgtaatcgaagacagaagctctgaggaaattcaaac

SEQ ID NO: 6609 - DNA, 353 bp, Glycine max
  unsure at all n locations
agctntgcgggttataatgaatgatggctatggtctgcttgaaaatttgatgcacctgcctactttacaatattaattttataatgtaatttggatacatattcttttttcatgtgggtggttttgatgccactatgcaggcatatactgaaacttccggaaacctgaagggcttaccacaaggtataatacaagctacttcagatcttgagttaaggcatttatggtcgccaagtaatttgaggtcaaaggtcagcatcttttgcaatttatttattttacattatatagttctatttaaatcgatagatgatgaccgaatntgtaaactacaagcggcacgtcatcaatta

SEQ ID NO: 6610 - DNA, 359 bp, Glycine max
caagcttatcgacttctgtgtagattcatcatctggggacatcaattatgcagacttagtactttccccaatcgatgcccttatcgtttacatttggacttctatgataccatgtctttgtaacaatcacaatccaacaatgtctatgcttctgtatacacaattgatacaaaatgggtatcccccagatcattttactttcccatttgcactcaaagcatgtttgtgccattgctgatcaacattgtggaaaatgcattcattgctgcatagtgaaatctgggtttgaagctgatgcctatactgctactgggttactgcatatgtctgtgtcatgtgcacatctgaactcacgactc

SEQ ID NO: 6611 - DNA, 311 bp, Glycine max
  unsure at all n locations
ttaataagatatctcttgaagataatcttgctttggtgacaccttctggggaggaggagataaaggaatcggtttgggagtgtggtatcttgaaaagtccctagccggatggttataatctcaagtttatcaaaaacttttgagatttattgaaggtggatgtgaaacatgttttggatgaattccatttacatggaattattccaagagggtccaattcttcttttatatcccttatccccaaggtgaccaatcctctcaactcgggagagcttagaccaattntctttggtggattctatgtataaaat

SEQ ID NO: 6612 - DNA, 449 bp, Glycine max
  unsure at all n locations
ctccatgaatagcctccaatcaaaggctatgcttattatttcattntacttcattttcttccttatgattcccacatataatttaagtaaacatgcggaagacaggatgaacgcgtagctattagcagtcacagactcagaatattgtaaaaaccttcttgataatagcattgaaatgaggataaaataagtataaaagtgaagctcacaaaggaaaaataagaattaaccaaatatacctgaggatcaagaggatcagcctcgcgagaaacaaggttttgtaagctaataatcacattagtagctgccatcacagggtctatagaaagttggggaagagctgcatgacctccctttcctcttattattgcttcaaatacaccacttcctgccgataatggaccacacctagaggccactctcactactggaatgtcaggcgtcacatg

SEQ ID NO: 6613 - DNA, 399 bp, Glycine max
  unsure at all n locations
agcttgngcaatagtccccactaccatcacctagatatatcatcctctntttaccctcttccaaaattgaatcttggattctatctatgattaaaccctgaaatggttaaaaatttaataagattttataaccataataattggtcacaagattccaaatgatagaaacttcaaaattgatatgagtaaatgcatgtttggtttgactcttcagaattgattataattacataattaattttgaatatattttaatatgttttatttatcaagaagaattcagaattgattctaaattaaaataactttgaatagttgttacatttaatccaaaattctatattgacatttatttgtaacttgattctatataaagtatccaaacataatatacataat

SEQ ID NO: 6614 - DNA, 388 bp, Glycine max
  unsure at all n locations
tgtacaattaaacagctctcattagaagctgatccaaacttatcctaaaacttggattgggtagaacaaatcaacagtcatagaaacacacatgatgagttggcattctgcaaccacatcataacatgagatgagtcatgagttgcttctattggaatgttcacaacaagaagagcatataatttgagggacttgaagcctaagatngaccgaagaacgattacattaataatcaccttatcatatgccatgcgtgcatttgggtcagagagaatggaataagctttgtcgagtatgatggccatgtcatggccagcagggccagcaatgtcatggtggcagcgcttctgaagagagcgatacgccactttgacctgtgactgatcac

SEQ ID NO: 6615 - DNA, 457 bp, Glycine max
  unsure at all n locations
ctaagctaatagtcttctagtaaagaaatcactggtagcagtaaaattattaatcagctatatatcacgggtgatattaaataaactgcctaattataaattatttcatgcattgggctgataatagcagtaaaatatttatactcaaaaccgaggcgttcaagttcaatgaagttaactacttcagtacttcatatatgggacgcagtatatataaaatggatacttagccaaaaagattaattagtctaaatattttaaacattttatatttaaaatggatactttntaattaacaatatatatatactcatttcttcttttaaatggatactttctaattntatttgattacacttacttaacttcttttacagattttgaaaccagctttcacaataatagctgatcacgagatgaaatgccttntgttattgattcgtggcacacatagtac

SEQ ID NO: 6616 - DNA, 435 bp, Glycine max
  unsure at all n locations
agcttgcanactaagtgactactnttcttgctttcaaatcccattgctttatccatgtacacttcttcttcaagatccccatttaagaatgttgttttcacatccatttgatgtaattctagatcaaaatgagctactaaggccatgattatcctaaatgaatccttcttagagaaaggagaaaaggtttcatgataatgaatacccctttttgagtaaagcctctggctacaagtctagctttatatctttcaacattacctcttgagtctctcttggttntaaaaacccatttacactatagagactccttttcataattctattacgtcccacacttggattttagccatagattccatntcttcattcatggcttcataccataatntagaatcatctctactcatgacttgtgaaaactttaattgatca

SEQ ID NO: 6617 - DNA, 432 bp, Glycine max
agcttgtattccagagaagtggtaagaacactatatgatactaaaaacaagacatatgatagtaatagctttatgatttatcctttctctctgttaaccttaaaatatccacgagaggacatatctggctcagtatatttcttgaattttcagtcctacgttgcacaagaggaacttttcttgtgaactttaactgtaaaagagaccctcacatactcagcaaacatgaggctttcttctaaaatgaccaaagaagagatagacaaagtggtggaagaaaccatagtggaaatgggtctggaagattgtgcagatactacgattggaaattggcattgtaggggtattagtaatggtgaaaagaaaagactagcattggccttgagattctgacacaaccatatgtcctacttcttgatgaacctactactg

SEQ ID NO: 6618 - DNA, 408 bp, Glycine max
gagcttactcttctattagctagatgtaatgcactataaccatgtttgcatataaggatgatttgtgattgtcaacagcttttatgaataagatatgatatgtgcttcatatgtcacatatgatacatgtccaatacaatgatacaattgttctaaaaatatataagatatgatgcttgtgaaactcatagaacatgatgaatatataattgcaattctacaaatctagactaagaacatattcttgaacattactaaagttataaatcacttgctgtggtctataaataagaatagtacgaatcttgttcctttattgaaatcatctataaagggcacaacttgcccttttagttagtcaagctactatgcttctataatatagaacatagatactgttatatctca

SEQ ID NO: 6619 - DNA, 323 bp, Glycine max
tctttcgtctttattttctagcgtctcgatatattatgggactcaatcagacatccgagaagaaagttattgatgtttgaatgtgctgggagcttccatttcttttttcgagcgtcttgatatattaccggactcaatcggacatccgagtaaaaagttattgtcatttgaattttcctgggtcttccatttttaatttcgagcgtctcgatatattatgggactaaattggatatcctagtaaaaagttattgtcgcttgaattttctacgagcttccgattttaatttcgagcgtcatgatatattacaggactcaatcgg

SEQ ID NO: 6620 - DNA, 381 bp, Glycine max
  unsure at all n locations
tganattgaacaacggaagctctcgagacaatcgagtggtcttaaattntcacacagatgtccgattcggggaaataatatatcgagacgcacgacattgaacaacggaagctctcgagaaatttgaatggtcataacatatcactccgatgttccagccggcgacataaattatcgagacgctcgatatcgaacaaccgaagctctcgacaaatgataatggccgtaacgtttcacgcgaatgttctattcggggacataactcatctagacgctccatattgaacaacggaagctctcgagaaatttgaatggtcataagaattcacacggatgtccgattctggaacataatatatccagacgatcgaaattgaacaa

SEQ ID NO: 6621 - DNA, 372 bp, Glycine max
  unsure at all n locations
agctntgagcaacttcaaacaacaataactttttactcggatgtctgattgagtcccgtaaaatatcgagacgctcgaaattgaataccgaagctctgagcaaattcaaacgacaataacttttttactcggttgtctgattgagtgccgtaatatatcgagacgctcggacttgaatgccgaagctctgagcaaattcaaactacaataactctttactcagatgtctgattgagtcccgtattatatcgagacgctcggtattgaatgctgaagctttgagcaaattcaaacgacaataactttttactcggatgtttgatagagtcccgtaatatatcgagacgctcgaactggaataccgaagctctg

SEQ ID NO: 6622 - DNA, 401 bp, Glycine max
  unsure at all n locations
gaccttaaatctaagcttcgatcaacttgttctttnntcaatttttgatcaaggagaaagttggtgagtcccccataccattgtcttgatgcttgtttaagtccatagagagcttcttaagcttatacccatgagtaggagttttatgatcctcaaaactgggagattgagaaacatagacttcctcttcaatgtattcttttagaaaagcactcttcacatccatttggtacacgttaaaatccataatacaatcaaatgcaagcaataatctcacaacttctaatctagctattggagcataagtttcaccaaagtctatgtgctctcgttggttataacctctggctactagcctagatttattcctagatatcaagccatgttcatctagcatattt

SEQ ID NO: 6623 - DNA, 392 bp, Glycine max
  unsure at all n locations
cgaccataactttntactcggatgtttgattgatgctcgtaatatatcgagacgctcgaaattgaatgttgaagctctgagccaatataaacgacaatgactttttactcggatgtatgattgagtcccgtaacatatcgagacactcgaaattgaatgttgaacctctgagcttattcaaacgacaataactttttactccgatgtctgattgagtcccgtaacttatcgagacgctcgaaattgaacgttgaagctctgagcccattcaaacgactataactttttactcggatgtctgatcgaggcccgtaatatatcgagacgctcgaaattgaatgttgaacctctgagccaattcaaacgacaataacgtgtttctccgatgtctg

SEQ ID NO: 6624 - DNA, 411 bp, Glycine max
agcttcaacattcaatttcgagcgtctcgattattacgggactcaataagacatccgagagaaaagttattgtcgtttgaattggctcagagcttcaacattcaatttcgagcgtctcgatatattacgggactcaatcagacatccgaggaaaaagttattgtcgtttgaattggctcagagcttcaacattcaatttttagcgtctcgatatgttacgggactcaatcagacatccgagacaaaagttattgtcgtttgaattggctcagagcttcaacattcaatttcgagcgtctcgatatgttacgggactcaatcagacatccgagataaaagttattgtcgtttgaattagctcagagggtcaacattcaattccgagcgtctcaatatattacgggactcaat

SEQ ID NO: 6625 - DNA, 349 bp, Glycine max
  unsure at all n locations
agcttatgccatcaaatataaaatattcttattnggatgatagcaaaagttttccagtaattatatctgcctcccttgttgatgagcaagaggaggagctgttatctgttctcaagaagcattagaaggctataggctggaccctgatagacatttctggtattagctcatccacatgtatgcatcaaataaatttagaggatggggctaaaccagtaagatagccacagagaagactcaacccacagattcttgatgtagtgaagaaggaggtaaccaagctnttgcaagctggaatcatttatcttatctccgacagccaatgggtgagtcccgtccaggtagtccc

SEQ ID NO: 6626 - DNA, 320 bp, Glycine max
  unsure at all n locations
agctntctgtagatcaatgtctgaatgcacatgctgacgtggagtaaatgtcaaaggttccctatgccaatgcggctggttatttgatgtatgctatagtctgcactagactatatttggcacatgttgtaagccaagtctacaattttatgtctaacccacgatagcgacattgggaagtagtgaagtggatcttgaggtaccgaaatggtacaacaagtcatggtattatgtctggtagttagcaaggcgatcctttagttgcgagatatgtggattttgactatgttggtgatctggatgacatgaggtctacaaca

SEQ ID NO: 6627 - DNA, 290 bp, Glycine max
tttgcaagccagaatcttttatcctatctccgatagccaatgggtgagtcccgtccaggtagtcccgaagaagactggcctcacagtgatcagaaatgagaaggaggagctgattcctactcgggtgcagaacagttggaaagtctgcatcgactataagaggctgaaccaggttaccaaaaaggaccattttcccctgccattcattgaccagatgcttgaacgcctggcaggtaaatcccactactgtttccttgatggtttttctggttatatgcaaattactattg

SEQ ID NO: 6628 - DNA, 288 bp, Glycine max
ttaactcggatgtcttattcatgcgcataatatatcgagacacttgatattgaataacagaagctctcgagaaattcgaatggtcataacttttcacacggatgtccgattcgggcgcataatatgtcgagacgctcgaaattgaacaacggaagctctcgagaaattctaatggtcataacttttcactcggaggaccgattcaggcgcataatatatcgagacgctcgaaattgaaaaacggaagctcccgagaaattcaaatgggcataacttttaactcagagg

SEQ ID NO: 6629 - DNA, 275 bp, Glycine max
agcttgttctatccactgggaaccatcccctgagcaagcatacaaatggaaaaatatgagtcccaaagtaccaaaatccctgcggatatatgaagctcatgttggaattagtggttctgagccaaaaatatcctcattcaatgatttcacagacaaggtttcccccctcatttctttgggttggaatttgtaactaatcaattatacatatcttccatgtctatatattgtaatgggctccattgaatttttacttttattatatgcacaatgca

SEQ ID NO: 6630 - DNA, 304 bp, Glycine max
taatactcaagctttctatggttttttgtgtaggacaccctcatggtggttaaagccccgagaagacctcaccttatgacctgaagtggtacaacaaaccactgagaagctaaagttgatccaagaaaggatgaggactacccagagtaggaagaaaagttatcacgataagaggagaaaagacttggaattcaaggttggtgatcatgtattcttgagagtcactccatggactggggttggtcgagcattgaaatcctgaaaactaacacctcgctctatcagtcttgtccaaattcttaaa

SEQ ID NO: 6631 - DNA, 275 bp, Glycine max
  unsure at all n locations
agcntanctgatttgagcgcgactcggaagtaaaaatgggagaagatatcataccgcaagtttgtaagtttaaatatatgggatcaatactacaaaatgatgggaaaattaatgaggatgtcacacagagaatgcaagcaagatggctgaaatggagaaatgcatcaaggttatttgtgattgcaaagtacccaccaaacttaaaggctaattttatcgtattgctatacatccactatgctctatggtagtgaatgttaggctttaaagggaca

SEQ ID NO: 6632 - DNA, 283 bp, Glycine max
ttgatttcctttgtttctgtgactcttcttttctcatgtgcacccaaacccaatctccgggttcgaagacaaccttctttctccctttgttggcttgtttagcataacttttatttttcctctcaatttgatctttgactccctcatgaagcttcttcacatagtccgcctttgcttgaccttctttatgcttaaaaacagaaacattatgcataggcaaaagattaagtggagttagtgggttaaaaccacaaacaacttcaaaaggagaacaattagtggt

SEQ ID NO: 6633 - DNA, 287 bp, Glycine max
tatgctgcaaacatttattatagacctccacagcagcaaaaccaacaacaacagaataattatgacctttcaagcaatagatacaatccaggttggaggaatcatccaaatctgagatggacaagttgatgtgatcctgactaggagtggatcgcttgatacaggctacgaagattttggatgatgccacttccaatgaaggaagataagtcagggtagacgccacaaggattaccttgataagtctgagattggttcaacaaggaacccagagagaagctctcacc

SEQ ID NO: 6634 - DNA, 277 bp, Glycine max
agcttcttttttctggtccataaggtaatctattataggcaaagggtacttgttcttaatcgtcaccttattcaactggcggtagtctacacacaacctcatggtcctatctttcttctttactaacaacactggtgctcccattggagatacactgggtctcacaaactgcttctccaaaaactcctctaactttttcttaagctcggctaactctataggagacatcctataaggggctatggatataggtccagcaccaggtaccaggtctatg

SEQ ID NO: 6635 - DNA, 274 bp, Glycine max
agcttgctatttctggaagctcctaatatctcccacactttttggggtgggccattcttggatggccttgattttctcagggtccacttggaccccatttctaccaactacaaaacctaagaaaactatattatctacacaaaaggtacacttctctatatttgcatagagggtgtttttcctaaggactgaaagaacttgtctgagatgtcctaagtgaaaatctaggctcctactatacactaaaatatcatcaaaataaacaactacaaat

SEQ ID NO: 6636 - DNA, 275 bp, Glycine max
agctttagtattcccaataatattaatgaagctcataattttcttggttaagagtaaagaagccaaactaaccgtttcacgcagggcagatgggtttgaagaacttaaggcagtttgaaagtgttcattgggcacagccatggaattcaacacctcagcatcaattgtttcatcctctaagtcaatcacattcattttctcccggatacactgtagtgcagcctctgtgcaaagagcagcaagatctgatccaacataaccatgagtatctctgc

SEQ ID NO: 6637 - DNA, 289 bp, Glycine max
taacatcgatttttttattaactgatgttaagaaaagtgcggtggcattttcataaataagttgacttaattaacatcggttttttcaaaacccgatgttaacatcgacctcttaatattggttttgaaaaattgatgttaccatcaagtacccaacatcggttattgaaacaccgatgttaactttagaaagttaacatcggtttttaaaaaaaccgatgttaacattgacatgttaacattggttttgtttaagaaaccgattttgtctcattcataagttaaaacc

SEQ ID NO: 6638 - DNA, 285 bp, Glycine max
  unsure at all n locations
ttagctntgtccccttgcttcatgnagactcgtccaaaatcgtgaagtaaacctcggatccctgtcggatacaatactggaaggaattccatgcaaccttactacttccttgatgtacaactccactagcttctccattctatacttcatattcaccgaaataaaatgagcagatttggtgagtcgatctattatgacccacacaacatcatgtccacgactagtcttgggtaaactagatacaaaatccatagatatgctctcccatttccattccggaatttc

SEQ ID NO: 6639 - DNA, 271 bp, Glycine max
agcttctgatctaaatttcgagcatctcgatatactatgggacacaatcagacatccgagtaaaaagttattgtcgtttgattttgctcagagcttttgttctaaatttcgagcgcctcgatatactgtgggacacaatcggacatccgagtaaaaagttattgtcgtttgattttgctcagagcttctgttctgaatttcgggcgtctcgatatactacgggacacaatcggacatcagagtaaaaagttattgttgtttgattttgctc

SEQ ID NO: 6640 - DNA, 275 bp, Glycine max
agcttgtattctggcagcagaaaaacaagtggttgttaactaagaagaaggaaatggcttcctcaatgatctcctccccagctgttaccaccgtcaaccgtgccggtgccggcatggttgctccattcaccggcctcaaatccatggctggcttccccacgaggaagaccaacaatgacattacctccattgctagcaacggtggaagagtacaatgcatgcaggtaagacaactccacacatatatacacacaagaggcaccaaaaagtttaaa

SEQ ID NO: 6641 - DNA, 274 bp, Glycine max
agcttgtgtgtttgtgacgcatgaacgaaaacacaattcatggggctccgaaaaagggttgaggatggagaattgcactaagcaatcactacgcatggctccaagctcctgggtggaggacgcatgaacgaaaacgcaactcatggggctccgaaataggattgagaatggagaattgcactaagcacattacggcgcatggctccaaactcatgggtggaggacgcatgaacgaaaacgccattcatggggctccgaaaaagggttgaggatg

SEQ ID NO: 6642 - DNA, 348 bp, Glycine max
tgttgagtatgcagtgaaaaatggccctgactttgaagctatgatatgtgaaaaacaacgggataatccttcctatagcttcctctttggtggggaaggtcatggttactaccgttataagctttggttatcaactcgtcccccgggtggtccattcaacccgtcttttccatcatcttccatgcccatgatgcttcctccaaatccaatgatgaatctgtctcctgtaaatgtttctccgatgaaccctgcacgaattggttcttcaccttcgatgctaggtccacctcctttccaacagttctatgatcaacaacaccaccatcaacatcctcagtcttttggact

SEQ ID NO: 6643 - DNA, 266 bp, Glycine max
aatgagatgttgaagatttgaaagtgttgatggcagctcaccctctattttgttatgtcttaaatccaattcgtgaaagttgtttgattgaggaaagacatttgggatttgaccactgaggtggttagcttctagattcataaaagataaccgcggaagggttaatagtgaggatgggattgaaccgttgaggttgttaactgagaggtccacgaaagtgagatgtatgatgttgaagaaagaaggagggattgacccttggaaac

SEQ ID NO: 6644 - DNA, 397 bp, Glycine max
ttgagaaaattcatacgacaataactttttattcggatgtctgattgagtcccgtaatatatcgagtcgctcgaaattgaataccgaagcgctgagcaaattcaaacgacaataactttttactcggatgtctgattgagtcccgtaatatatcgaaaagctcgaaattgaatgttgaagctctaagcaaattcaaacgacaaaaactttttactcggatgtctgattgagtcccgtaatatatcgaaacgctcgaatgtgaatgtagaagctctgagcaaattcaaacaacaataactttttactcggatgtctgattgagtcccgtaatatatcgagatgctcgaaatggaataccgaagctctgagcaaattcaaacgacaataactttttact

SEQ ID NO: 6645 - DNA, 364 bp, Glycine max
tgcatcagcatatgacctttatttaacatcataatttcataaaagaggaataggtctatatttttatcttaagcacttaagtatgatcttaaacactttccactgtgcctcactatgggacgcttgatatcgactaattacacctagtgcataagcgacatcaagacatgtacaagacatggcgtacatgatcgttcccactacactagcatatggtacgctactcatgcgagctctttcttcacgagttgtaggacaattctccctactaagagtagattcaacacctacaggcaaatagcctcacttggaaatatccatgttatatctctttaagatagtatcaatgtacatagattgggag

SEQ ID NO: 6646 - DNA, 400 bp, Glycine max
tataatatatcgatacgctcaaaattaaacttctgataacttttcacacggatgttcgattcgggcgcataagatgtcgagaggctcgaaattgaaaaaccgaagctcatgagaatttcaaatggtcataacttttcacacgaatgtccgattcaggcttataatatatcgagatgctcgaaattgaataacggaagctcttgagaatttcaaatggtcataacttgtcacactcaggtccgattcaggcttataatatatcgagacgctcaaaattaaacatcggaagctctcgagaaattcaatcggtcataatttttcacacggatctccgattcgggcgcataatatgtcgagacgcgcgaaattgaacaacgaaagctctcgtgaaattcaaatg

SEQ ID NO: 6647 - DNA, 438 bp, Glycine max
tgagagcttccgttgttcaatttcgagtgcctgtatattgatgcgcctgaatcggacatccgagtgaaaagttatgaccatttgaatttctcgagagcttcctatgtttaattttgagcgtctcgatatattatacgcctgaatcgaacctcagtgtaaaaagttatgaccatttgaatttctttagagcatccgttgttcattttcgagcgtctctatatgtgatgaaccttaatcggacctccgcgtgaaaagttatgaccatttgaatttctcgagagcttccgttgttcaatttcgagcgtctggacatattatgcgcccgaatcggacatccgtgggaaaagctatgaccatttgaatctctcgagagcttccggtgttcaatttcgagcgtctcgacatattatgcgcccgaatcggacatccatgggaaaa

SEQ ID NO: 6648 - DNA, 409 bp, Glycine max
tctcgatatattatgctcctgaatcggactttcgtgtgaaatgttatgaccattggaatttctcgagagcttccgatgttctatttcgagcctctcgatatattatgctcctgaatcggacttccgtgtgacaagttatgaccatttgaattgctcgacaccatacgttgttcaattacgagcgtctcgatatattatgcgcctgaatcggacgtccgtgtgataagttatgaccatttgagtttctcgagagcttccgttgttcaatttcaagcttctcgatatattatgctcctgaatcggacatccgtgtgagaagttatgaccattggaatttctcgagagctttcgatgttctatatcgagcgtctctatatattatacacctgaattagacttccgtgtgaca

SEQ ID NO: 6649 - DNA, 416 bp, Glycine max
tgtgctattccaagttcaattaccatacctttgtgttcgacaagtggcctcagatatcttaagaaggggggttgaattaagatattccaaactacttccccaattaaaaatctatttcactttttattcaagttataaattcccttaacaatgaacttcttaaatattgattcaaataaaacaatttgaatatgaatataaagcaataataaacaaaggagattaagggaagagaaagtgcaaactcagatttatactggttcggccacacccttgtgcctacgtccagtccccaagcaacccgcttgcgagttccactatcttgtaaattccttttacaagttctaaacacacaaggacaatccttcctttgtgtttagaattcctttacaacaagagacccacggtctcttaat

SEQ ID NO: 6650 - DNA, 419 bp, Glycine max
  unsure at all n locations
tctaaactntgtacaagaatgaagctctgataccacttgttagacaagtggcctcagatatcttaagaagggggggttgaattaagatattccaaactgtttcccctaattaaaaatctatttcactttttactcaagttatgaattcccttaatgacaatcttcttaaatattaattcaaatgaagcaacttgaatatgaatataaagcaataataaataaaggagattaagggaagagaaaatgcaaactcagttttatactggttcggccacacccttgtgcctacgtccagtccccaagcaacccgcttgagagttccactatcttgtaaattccttttacaagttctaaacacacaaggacaatccttcctttgtgtttagagatcctttacaacaagagactcacagtctctt

SEQ ID NO: 6651 - DNA, 403 bp, Glycine max
  unsure at all n locations
tgcacaatggaactgatggtttctcaacaacaaacttgataggctctggaaattttagctctgtctacaaaggaactcttgagttagaagacaaagttgttgcaataaaggtcctaaaccttcaaaaaaaaggagcacgcaagagtttcattgctgaatgcaatgcccttaaaagtattaaacatcgaaatctggttcagattttaacgtgttgctccagcacagattacaaaggccaagaatttaaagctttgatatttgagtacctgaaaaatgggagcctagaacagtggctgcatccaaggacattaactcctgaaaagccaggaacattgaaccttgaccaaagattaaatatcatgattgatgttgcntttgcaatacattatcttcatcatgaatg

SEQ ID NO: 6652 - DNA, 327 bp, Glycine max
  unsure at all n locations
tgcctgngcgagctgtcatgaccctaaatgccttgttttgctataaatatgatgtagctccattggagcttgtaggcctaggatcttcttcatcaatggattcctttgcttctctaaagatgaatggcagtggaatggagaaggaagagagagaggagacgccacttcaaggagaagatgagtctagaagaagcttaccaccataggaggccatggataagagcttggaggaagaaggagatgaatgaagggagagcaagagaagagcacgaaattttgtgcacacacatgacctctatttatagcctaagtgtcacacaaaattgg

SEQ ID NO: 6653 - DNA, 386 bp, Glycine max
tgaacctttatcatagcagacaacttctctttttctgaaaagggagtgctaataggtttagaatcagccattccaaacctcacaagtatcttctgaatgtagtccttttgagacaaaaatagccttttctgagttctgtccctatagatcaccattcctaagattttctttgcagccgctagatctttcatatcaaattcaccactcaagaggatcttcagattttgtatatcacacatgctttttgctacaataagcatgtcatctacatagagtagaagatagatcattgatccatcctccaccttgttgtgataaacacaacagtcatagaaacttctcttgaatccttggctggtgataaagctgtcaaacctcatgtacca

SEQ ID NO: 6654 - DNA, 394 bp, Glycine max
ttgagccaattcatacgacaataactttttactcgaatgtctgattgagtcccataatatatcgagacgatcgaaattgaatgttgaatctctgagcaaattcaaacgacaatagctttttactcggacgtctgattgagtcccgtaacatatcgagacgctcgaaattgaatgttgaacctctgagacaattcaaacgacaataactttttactcggatgtctgattgattcccgtaatatatcgagaccctcgaaattgaatgttgaagccctgagccaattcaaatgacaataaatttttactcggatgtctgattgagtcccgtaatatatcgagacgctcgaaattgaatgttgaacctctgagccaattcaaacgacaataacttttt

SEQ ID NO: 6655 - DNA, 414 bp, Glycine max
tgttgagaaattgtgcaaacaagagggaattggtgagacatgctattactagattttccacttcttatctaaccttggaaaggctccacaaagagaaagctaatattagaaagatgtttatttctgatgaatggatcttaaacaagttatctaaggagcctaaggggaaagaagctgcaaaggtagtgctcatgccttctttttggaatagtgtggtttacactcttaaagtcatggctccacttgtcaaagtgcttcgtcttgtggatggtgaaaggaaaccagccatgggctatatttatgaagcaatggacaaggcaaaagaaacaattatcaagtctttcaacaacaacgaaagcaagtacaaagatgtgtttgcaatcattgataaaagatgaaattgtcaacttcata

SEQ ID NO: 6656 - DNA, 417 bp, Glycine max
tcaagagatcatccccttgacaacattcttggtgacatctcagcaggggtaacaactagacattctctcaaagatttatgcaataacatggcttttgtatctatgattgaacctcaaaatttaaatgaagccataatagatgaaaattggataatagctatgcaggaagaactaaaccaatttgaaagaaataatgttcgggagttagttgagaaaccttaaaactacccaatcattgggacaaaatgggtgtttagaaataaattagatgaaaatggcatagttataaggaataaggcgagattagtagccaaaggatataatcaagaagagggaatagattatgaggagacatacacttcagttgctagattagaagtcatcagaatgctattagcttatgcatccataatgaat

SEQ ID NO: 6657 - DNA, 380 bp, Glycine max
tcagtggcttagtgaagatgaagaggtaaaagtgactcaacaggttgaggtgtgtctcaccattgggagatataatgacaaggtgctgtgtgatgtggtcccaatggaagcgacccatgtgctgttaggaagatcgtggcagtatgataccaaggcagtgcatgatggcttcaccaacaacatctctttcaagcaagctgacaagaagattgttctcaaaccgttatctcctcaagaggtttgtgaggatcagataaaaatgagagaaaagaaaaagagtgagacacttgagaggaaaaagagtgagacacttgagaaggaaaagtgaggaaagaaaaagatgaaacattgagaggaaaagaagaaaacaatgagtgaaa

SEQ ID NO: 6658 - DNA, 336 bp, Glycine max
tccatgtttaatcacgagcgtctcgatatactacgggacactatcagacattcgagtccaaagctattgtcgtttgacttttcttacagctttcgttatcgatttcgagcgtctcgatatattatagggctcaatcggacatccgagttaaaagatattgtcggttgactattgttatagattccgttatcaatttcgagagtcgtcatatattacagggctcaatcgaacatccgagtaaaaagttattgtcgttagatctttctcagagcttccgttttcaattacgagcgtctcgatattcgacgcgacacaatcggacattcgagtcaaaag

SEQ ID NO: 6659 - DNA, 417 bp, Glycine max
tgaagaggcaattgatgtgttgcattctcaatcagtatccttcagcattttcggtgaaaaagtttcttcgcctgtggtttcgaaattgatacaggcttttgaatcaaaagtacaagaagatgagcatgagacagaaagtagggattccagtgatgttctgtcatcatcaaactcatttattatgttaactaaagagcaaattggagatttgaaaaaattgctttcaaagtggaagctgaatgttcagattgcaggtacattattcaatggggagcgagatgatcggaaaactggtgatgcaaagtacagtgatctcaaggaccagtttgaacaattgaagcaacattgctcagatttggaagcatccaacattgaacttgcagttcaatatgaaactgcaaagcaacttctgggtga

SEQ ID NO: 6660 - DNA, 433 bp, Glycine max
  unsure at all n locations
agcttgcacacaagattctccttgcctggcacttcanaaccttctggttgggtcatatatatgtcttcctctanatccccatgcaagaatgcagttntaacatctaactgctccaagtgaagattctctacagctactatactcagaataaatctgatggtagtcatctttacaactggagagaagatctttgtgaaatcaattccttgtttctactgaaaccctttcaccacaagtctcgccttgtatcttcttctaccttcagattctttctttagcctatagacccacctattctgtaacgctttctttccttctagcaatttagttaaagaccacgtcgtattcttctgaagggatgtcatctcatttttcatcgctagctcccactcaatagtgtcattcccctgtgtagcatcactgaaacattctg

SEQ ID NO: 6661 - DNA, 379 bp, Glycine max
  unsure at all n locations
tgtttttctttgctgaaaataattaattagttntgcatttttaatatcacttagttattattaatttatggtttagtgttaaattaattttggtaaattattattttgtgttttagaataatagtgtttagttattattaatttacagtttaggtagataaattattatacatgataaattaattttcttaaattattattttatgttttagaacaatagtgtttagttattattaatttaccgcttagttagataaattattatacatggaaaattaatttttttattaaattattattttatgttttagaataatagtgcttagttattattaatttacgaattagttacataaattattatacatgttaaattaat

SEQ ID NO: 6662 - DNA, 429 bp, Glycine max
  unsure at all n locations
agcttgaatcggacatccgtgtgaaaagttatgagcatttgaatgtctcaagagcttccattgttcaatttcgagcatctcgatatattataagcctgaatcggacattcgtgtgaaaagttatgaccatttgaatttctcaagaggttccgttgttcaatttcgagcctctcgacatcttatacgcccgaatcgaacatccgtgtgaaaagnnatgaccatntgaatttgcaagagtctccgaggtctaatttcgagcgtatcgatatattataagcctgaaacggacattcgtataaaaagttatgaccatttgaatttctcaagagcttgccgtgatcaatgtcgagcctctcgacatattatgcgcccgaatcggacatccgggtgaatagttatgaccatttgaatttcgcgagagtttccgat

SEQ ID NO: 6663 - DNA, 397 bp, Glycine max
taatgaagccacaagaaaagatcactacccgcttcccttcatggatcaaatgctcgagagacttacagggcaatctttctactgttttttggatggatactcgggttataatcagattgcagtagatccccaagaccaataaaagataactttcacatgtcacttcagtgtcttttcttatcgccgcatgccattcggtttatgtaatgcccctactactatccaaagatgtatgatggctatctttgctgacatggtagagaaaggcattgaagtctttatggatgatttttcagtctttggtgcatcttttgagaattgtttagcaaatctagagaaggtgttacagcggtgtgaagaatccaatctggtacttaacggggagaaatgtcatttt

SEQ ID NO: 6664 - DNA, 431 bp, Glycine max
agcttgagactgggcaatgaatagaaatcatcacttccattgatgcctttaagtaagacttcattggttgcctgtgatttgacaatgcacaagtgaggatagaactcaaaataaacttcattatctttagcaaacttactgacacaatagatttttagtgattgaaaaaacatgtaacaaattatgaagataaagaggaaaattaggattggtaggagacttaaaagaagaaaaaccaaaaccaagaattttcaaaccttcaatcaaagtgaccaagctgatgagtattttgtgtttctccagtcacatggaatgaagctcccgagtcaaggatccaagttgagttagtattttcctgggaagatgaattagctagcatggcactcagaataacttcaatgggagttgactgattctgacttttagtattt

SEQ ID NO: 6665 - DNA, 343 bp, Glycine max
  unsure at all n locations
tttaatctgattaaaagcccaaacaagaaatgcaaagggaagttctatgaaggtgactggtgtaactgcaatcattcatcaaattgaatgataaaagctaaaaacaaatttgcataaaccaggattataaaatgaaatttggcattaaacctatnntaaaataaatgaaagtccaaatcagaacataacaattatgcaaatcggagccaagttaatcttagcgaatactcacctccatccgataaccagcccttgatgcacacatagcatggaaataagtggaacacttgcaacattgtgtgcacgaaccatgaatttcttacaaaaacacaaatctgaaatc

SEQ ID NO: 6666 - DNA, 387 bp, Glycine max
agctttgcataccccaaggaaccatcaggaaattacttgtgaaggagagccatgagggtgggctcatgggccactttgggatagacaagaccctagtcttactcaaagaaaagttctattggccccatatgaagaaagatgtccataaacattgcactaggtgtgtggcttgtttacaagccaagtctagggtgatgcctcatgggctatacacacccttacccattccatctgcaccttgggtagacattagtatggactttgtccttgggctccctagaacccaaagagttgtagactctatctttgtagtggtggataggtttagcaagatggcacactttataccatgccacaaggtggatgatgcttcccatatcttaaaac

SEQ ID NO: 6667 - DNA, 425 bp, Glycine max
  unsure at all n locations
agcttcacaaaagtttatatggcttgaaacatgcaccgaggcagtggtacaagaagtttaatgagtttatgagcaactcaagattcaacagatgtgacatgggccattgctgctatgttaagaaatatactaatagttatgttgtccttgtcatgtatgttgatgacatgttgattgcaggatctagtatggcagaaattaacaagttgaancancagngggcagaaaactttgaaatgaaggatcttggtccagctaaacaaatccttggtatgagaattcttagaaacagatcagaaggaattttgaagctgtctcatgagaaatatatacacaagttgcttgacatgttttaccttgaagattctaagaccaggaatacccctntaggatctcatttgaagttttcaaagaagcaatctttg

SEQ ID NO: 6668 - DNA, 442 bp, Glycine max
  unsure at all n locations
agctntcaactattagctagttnttcaatctccaattagttnttcagttaattntgtcaaacgtaatctaaatataagttacattatcattaaagaaaaaaaaatacttttgaaaattttaagattggcataaattaaaggttaaattagtctgtaggatctcatattattacaaatttttttaattagatccttatattttattnttcttttaatgggtcctatattaattttaaatttgtaacctacgttaatttatcatgaggaatctgttagacttaatgaaatatttcatcatatatacacatatagatgcgaaccctaaaccaatacacttgaattgattataaatgtgtgaaccttaaactacgaattgttacatacgtgattaaggaagtgcgaacaacattacaaacaaaataaggattaatcacgcattatg

SEQ ID NO: 6669 - DNA, 387 bp, Glycine max
agctcgttccagaatccgcaatctacgccaagttgctcgaactcgagactcagatagattctgctttggccaggaagaaaattgatgtgcaggcgaaagttagaaaccctctctgcgttaagaaaacgcttagagtttatgtttataacactttttcaaatcaagtgaaagtggagactgggaagaatggtgtggaggagccttcttgggctctgaggataactggaagggtgttggaagatggtaatggaaaggattctgtggcggaaggaatcttgacgaatgaatatccaaaattctcggctttctttaagaagattaccatatacttggatcagggcttgtaccaggataaccatgttgttgtgtgggatagtgctcattcgg

SEQ ID NO: 6670 - DNA, 388 bp, Glycine max
tgttgttttttagctagacaactttttattactattttttattttctatatttttcttccatcttattcttttcttgctcgctctctttttgctcctttttttccatgagatattttgctacctaaacatacgtatatttttgtgaggtattttgctatatacatgcgtgtccaaggtatcttgctacctaaacatacatatatatgttttgtgagatatttttgctatatacatgcatatccaaggtatcttgctacctaaacatacatatatatattttgtgaagtatttttcctacatacatgcatatccaaggtatctttctacctaaacatacatatatattttgtgaggtatgactaccttccgagcttgtgcttgttttat

SEQ ID NO: 6671 - DNA, 393 bp, Glycine max
  unsure at all n locations
tctatagaaggttcgttcctaatttctctacaattgcatcacctctcaatgagctagtgaagaagaatgtggcatttacctgnggtgaaatacaagagcaagccttttctttgcttaaagaaaagcttactaaggcacctattctagctcttcctaactattctaaaacttttgagctagaatgtgatgcctctggagtgggagttggagctgtattgttacaaggtgggcaccctattgcctattttagtgaaaaacttcatagtgccaccctcaactaccccacctatgataaagagctttatgccttaataagagccctccaaacttgggaacattaccttgtttccaaggaatttgtcattcatagtgatcatcaatcacttaagtaca

SEQ ID NO: 6672 - DNA, 429 bp, Glycine max
agcttgcaaactaagtgctcacctttagtatatgagaatcctttaagttgtttcatgtaaacctcttcctctaaatgaccattaaggaattccattttcacatccatttgatgtaactcaaagtcaaaatgagctactaatgccataattactcggaaagaatctttcttagatacaggagaaaaagtctatgtgtaattaattccttctctttgagtgaaccctttggcaacaagtcttgccttatatctttcaatgttgccttatgagtctttcttggttttaaaaactcatctacattcaatggcttttacactactaggcaactatacgagatcccatacttggttaaatgccatagaatccatctcatctttcatggcattgtgccacaagtttgattctttagaactcatggcctgtgaaaac

SEQ ID NO: 6673 - DNA, 412 bp, Glycine max
agcttgccttgccccttgatatacttgtgggactcatggtcactatgaatgacaaattccttgggataaaggtagtgttggcatgttttcaaagcccgtactaaggcatacaaatccttatcataagttgaatagttaagggtaggaccacttaatcttttactaaaataagcaattggatggccttcttgcaacaacacaaccccaatcccaacatttgaagcatcacactcaatttcaaaagatttttgaaagtttggcaacgcaagtatgggggcattagttagcttttgcttaagaacattgaaagcttcttcttgtttctctccgcatttgagaccaacatttttcttgagcactttattgagaggtgctgccaatgtgctaaaacccttcacaaattggccataaa

SEQ ID NO: 6674 - DNA, 405 bp, Glycine max
tttatgatctgtgtgcacaataaattctctgcccaataaataatgtctccagtgctgaatacaaagcacaagggccatcaattccttctcatagacagattttgccagattcccatcagataaagctttactgaagaaagcaataggtcgtctctgctgcattagaacagcacctatacctctgccagccgcatcacactcaacttcaaaaggtaaatcaaaatttggaagaattagcacagggggggaagtcatgatccccttcatctcctcaaaggccttgacagcctctattccccaagaaaaattgtctttcttagtcaattcggtgagaggttttgctattttaccataatcctggataaactttctataataccctgcgagactcaaaaaaccacgtac

SEQ ID NO: 6675 - DNA, 406 bp, Glycine max
tgttcgtgtgtagagaaacttaagctttctgtgtcttctttaaataaagatccggtggtagagaccccaactagtggttctgtgttaacttctaatatgtgatttatattgtcctatggaaatttctagtagaacattcttgattgatctgatttgtttgcctttgatccaaattgatgttattttgggtatggactggttatcttccaaccatgtcttgtaaaactattttgataaaactgtggtgtttgatgattttggagtgagtaaggataggatatttatatctaccaaccaagttgtgatatctttaaaagaagatgcttaagtgcacatgatcttgtttaactttgaagtagagacaaatgtttccatgggtgacctccctgttgttagagtgtttcct

SEQ ID NO: 6676 - DNA, 406 bp, Glycine max
cttgatttcctttgttccggaaacctttcttttctcatgtgcacccaaacccaatctccgggttcgaagacaaccttctttctccctttgttggcttgtttattataacttttatttttcctctcaatttgatctttgactctctcatgaagcttcttcacatagtccgcctttgcttgaccttctttatgattaaaaacagaaacattaggcataggcaaaagatcaagaggagttagtggattaaaaccataaaatacttcaaaaggagaacaattagtggtgccatgaatagctctattgtaagcaaattcaacatggggtaaacaagcttcccaagtttttaagttattcctcaaaactgtcctaaacaaagttcccaaagtcctattaacaacttccgttt

SEQ ID NO: 6677 - DNA, 410 bp, Glycine max
tcttaagttcttagagaaagcctcatagaacttgttgtaatcctccttgttctctgcaatttcaaagaaaagctcaagtggatcctcgtgtacaaagtcttctttatatatctttaaatgacaaggtaataataggatctaaaatgtaaggatccaaatccatatttatcatagattacattattacaatatacttctatctaatattgaaaaaaaattgatacgtgtgtgcgcacatatatgtatatatgtacgtatgcctcatattaaaaaagtcaacttttgaatgtattatgatatcataattgaattcagaagtagaatttaactgtccaggtggacaaatcatctagaaaaatgtgacatacatggtgttaacaaacgatgcaaaatataacaaaagtatacat

SEQ ID NO: 6678 - DNA, 390 bp, Glycine max
tgaacatatacacatactataacatatgttgatgtacttaattttggggtattcatatgcagataataactggttaggaaatagttaatcacattaaaggggaagaggaaatatatcttgttgcgtgagtttatacataaaaagtgttttagttattagtttaatttactaatctatgagaaataaagtggaggtggtggatgattatgtattgtgttgttaatggtactggaataattagttatagaaatatgggtgttctgctaattggtttttgttttttgtctttgtacgtttcaaatttgtctgaaataacattaattttaagtaacgaataataatatatattacaaaatttagttatgcaatatttcacaagtattaggtgaa

SEQ ID NO: 6679 - DNA, 376 bp, Glycine max
  unsure at all n locations
tcaagaaaaagatggcctcagcaaattccttatttccagaagggaattctatcaatagacctccaatctttaatggagagggttaccactactggaaaacccgaatgcaaatttttattgaggcaatagatctaaatatttgggaagccatagaaatagggccttatatacccaccacagtagaaagagttacaatagatggtagttcatcaagtgaaagcataactatagaaaaacctaaagatagatggtctgaagaggatagaaaacgagtacaatacaacttaaaagccaaaaacataataacatctgccctgngaatggatgaatatttcagggtttcaaattgtaagagtgctaaggaaatgtgggacac

SEQ ID NO: 6680 - DNA, 406 bp, Glycine max
tggctctggccattagaaccatttcattcttaagttccttaacctttaaatagacattctggtcaagtaagtgcttttctgcatcaaacagatcaaacttgatcttctaatcatctatgcccatttctagtttatcctttcccatatccaccacacaaccggcggttaacataaagggatggcccaaaatcaaggggattttagcgtcctcttcaatatccatcacaacaaaatctgcagggaaactaaactgcttcaccttaaccagaacatcttcaattatgctataaggtcttgtaatagaccgatctacaagttgtagtgtcattctagttggcataatctccaactctctaattctcctacacatggagagaggcatcaaatttatactggcccccaaatc

SEQ ID NO: 6681 - DNA, 409 bp, Glycine max
tctatttattttcagtagatgaagatgaatctgtggccaccaaatggacttttctaaggaaaatagcatcatttctcgcactgaattgttgggagttggaagctttcttcccaatcaaattcctagcctcggcaggagtcatatcactgagagctccaccactggcagcatcaatcatactcctctccatgttgctaagttcctcatagaaatattgaagaaggagttgctctggaaactggtggtgaggacagcttgcacacaatttcttgaatctttcccaatactcatacaagctctctccactaagttgcctgatgccttaaatgtcttttttgatggcagtggtcctagatgcggggaagaatttctccaagaacaccctcttaaggtcatcccagctgaaaat

SEQ ID NO: 6682 - DNA, 382 bp, Glycine max
tgttcgtgtgtagagaaacttaagctttctgtgtcttctttaaataaagatccggtggtagagaccccaactagtggttctgtgttaacttctaatatgtgtttgaattgtcctatggaaatttctagtagaacattcttgattgatctgatttgtttgcctttgatccaaattgatgttattttgggtatggactggttatcttccaaccatgtcttgtaaaactattttgataaaactgtggtgtttgatgattttggagtgagtaaggataggatatttatatctaccaaccaagttgtgatatctttaaaagaagatgcttaagtgcacatgatcttgtttaactttgaagtagagacaaatgtttccatgggtgacc

SEQ ID NO: 6683 - DNA, 394 bp, Glycine max
tgacggagtttggtgcatcggggaataatttcactttataagtgggtcccaattggattcccaattttcaacttacctatttggaagagatatcatggccgttaggtcccagctttccattgtggattcagtcacaaaacaaacttgaatatgttggactatctaacacggggattttcgattctatttccacacagatgtgggaagcactttctcaggttttgtatttaaacctctctcgtaatcatatccatggtgagattgggactacattaaagaatccaatatctatcccaactattgatctaagctcaaatcacttgtgtggtaaattaccctatctttcaagtaatgtgcttcagttggatctttcaagcaattcattctccgaatc

SEQ ID NO: 6684 - DNA, 339 bp, Glycine max
tgttgatgctaggcaggggatatgcatctttggaacacgtcatgtacaggttggtgtagtctgtgcacaatttatgtatttgaattctctgatgaactgggatttaagcagcttgtcaatctctccactggctactttgtgtagttcttctcccatcttccttttcttttgtgagactggtttggcctgagggaagatagccattttgtggcatataatgttagggtggatgcctggcatgtcagatggttgtcaagcaaataaatctgcgacttcagctataggtctgtgctcgtggctaatgaggtctttgttgagctgtgtgcattgcccaaactt

SEQ ID NO: 6685 - DNA, 364 bp, Glycine max
agcttctatagaaagttcgttcctaatttctctacaattgcatcacctctcaatgagctggtgaagaagaatgtggcatttacctgcggtgaaaaacaagagcaagcctttgctttgctcaaagaaaagcttactagggcacctgttctagctcttcctgacttttctaaaactattgagctagaatgtgatgcctctggagtgggagttagagctgtattgttacaaggtgggcaccctattgcttattttagtgaaaaacttcatagtgccaccctcaactaccccacctatgataaagagctctatgccttaataagagccctccaaacttgggaacattaccttgtttccaagagattgt

SEQ ID NO: 6686 - DNA, 375 bp, Glycine max
tggacttcttgtgttctgggaacctctccttcctcatgtgtaccaaacccaatcacctgggtcaagcacgactttctttctgcttttgttggcttgccttgcatagctcacatttttcttttcaatttgagccttcacttgctcatgcagcttcttcacatacttagctttagcctgtgcgtccttatgcttaaacatagcaatgtgtggcataggccacaaatcaagaggagtcaaaggattaaatccatacactatctcaaatggtgaacaattagttgtgctatggacaacccgattataagcaaactcaacatgaggcaaacatgcttcccaagatttttctttaaaacagtcctaagcagtgtgcctaaa

SEQ ID NO: 6687 - DNA, 391 bp, Glycine max
  unsure at all n locations
tctgttttaaattacgagcgtttcgatatatttcgggactcaatcggacatccgagagaaaatttattttcccttaaattcgctcagagtttcatttttctattatgagcgncncgatgtattaggggtctcaatcggacatccgagttaaaaattattgtcgtttgatttttctcaaagctttcgttttcaattacgagcgtctcgaaatcctacgggacacaattggacatccgagtgaaaagttattgtcgtttgaatttgtttagagcttatgttttcaattacgagcgttttgatatcccacgggacacaatcggaaatccgagttaaaagttattgtcgctagaattttgtcatagcttccgttatcaattatcagcgtctcgat

SEQ ID NO: 6688 - DNA, 428 bp, Glycine max
  unsure at all n locations
agctntgagcaaattcaaacgacaataactntagactcggatgtccgattgtgtcccgtaatatatcgagatactagaaattcagaacagaagctattagaataatcaaacgacgatgactttttacacggatgntccgatgggtcccataatatgtctagacgcttgaaattgaaaacagaagctttcagcatattcaaaagacaataactttctactcgaatgttcgagtgagtcccataatatatcgagacgctcgtaattgaaaacagaagctcagaggaaattcaaacgacaataacttttgactcaaatgtccgcttgagtcccgcactatatcgagacgctcgtaattganaacagaagctctgaggaaattcaaacgacagtaactttttactctgatgaccgattgagtcccataatat

SEQ ID NO: 6689 - DNA, 429 bp, Glycine max
  unsure at all n locations
agcttacattattgttggcaagtctatatatattattttttagaacaaaaatattccttgtctctaactgaaaaataaataaaaacagggattcgactttttttatgcgaacaagagtataataagtgatttgactcattaataaataaaaaactcgacaattgatatttgaatgtattcataattctggtaactcgttatgcatgtgcacataatataaatctattaaaaggagttgaagccaaaggattcatanatatctttttattnttaacataaagaagaacattacgattctctataaccaaataaaagcattcaagattatagattataacatatcctacggattggtatttataaaaatacttatcatgaccagaaaagcaagaatatgcaatatccgaatatctactacttgattaagtt

SEQ ID NO: 6690 - DNA, 438 bp, Glycine max
agcttcgaaatctaaagatctaattcatggtaaatgtttcataaatggaattcccttacttctgttgattgattccggtgcaacctattcttctatatcctattcatgtgtcgggaaacttaagcttcatatgtcttctttaaataaaaatctgattgtagaaaccccaactagtggttttgtgttaacttctaatgtgtgtttgagttctcttgtggatacttctggtaggacatttgtggttgatctgatttgtttgcccttgagccaaattgatgttattctgggaatggactagttatcttccaaccatgtcttgtagaactgctttgataaaactgcggtgttctatggttctggagtgagtgatgatatgatgttcatctttaccaaccaagctgtgacatctttaaaagaagatgctcaagtgtacatgat

SEQ ID NO: 6691 - DNA, 406 bp, Glycine max
tcttgccctcaaattccttgagctgaccaacagcatattcatcaatggcatcaaccatataaagaacctcgtatcccttcttcttcaacttctctaagaatgtagagttctcaacagccttcttgctttcacctgtgatgtagtagatgtcactctgaccttccttcatcctggtcacataatccttgaggcttgtcatttcatcaccactcttggtggagtggtacctgagcaattcagcaatctttcccttgttctgtgaatcctcatggatacctagcttcaagttcttggagaaagcctcatagaacttgttgtaatcctccttgttctctgcaatttcaaagaagagctcaaggcacttcttaaccaagttctttctgatgaccttcaagatcttgttctg

SEQ ID NO: 6692 - DNA, 388 bp, Glycine max
tctaaactttatacaagaatgaagctctgataccacttgttggacaagtggcctcaggtatcttaagaagggggggggggttgaaccaatatattacaacttatttccccaattaaaaattctatttcactttctatccaagttataaattcccttaataatgaatttcttaaatattgattcaaatagaacaatttgaatatgaatataatacaataataaataaaggagtttaagggaagagaaaatgcaaactcagatttatactggttcggccacacccttgtgcctacgtccagtccccaagcaacccgcttgagagttccactatcttgtaaattccttttacaagttctaaacacacaaggacaacccttcctttgtgttt

SEQ ID NO: 6693 - DNA, 427 bp, Glycine max
agcttaagctccttcaactgcacaaggctcttaatatttgaagagtatccttgtggaaccttcacccgacgaagacactaacaaaaacttatcttctacttcttggacaaagtatggcaggctgggggcaagtaaattttcttcccatcagaccttggatgcaattgtgatcgtatacccatattagctagatcttgacgggtattcaagccatccttcgtcttgccttgaatgttaaggagcgtcccaatcacactatcacataaatttttctccacatgcataacatcaatacaatgtctaacgttaagatcacaccagtacggaagatcaaagaaaatggacctcttcttccatatgcaactctgacttttatccttcttttgggtcttcccaaatacagtattcaggtgttcaacccgctgat

SEQ ID NO: 6694 - DNA, 391 bp, Glycine max
gaaattcaaacgacaatactctttgactcggatgtcggattgagtcacgtaatatctcgagacgcttgaaattgaataccgaatttctgagcaaattcaaacgacaataactttttactcggatgtcggattgagtcacgtaatatgtcaagacgctcgaaatagaataccgaagctctgagcaaattcaaacgacaatacctattgactcggatgtcggattgagtcacgtaatatctcgagacgctcgaaattgaataccgaagctctgagcgaattcaaacgacaataactttgtactcggatgtgcgattgagtcccataatatgacgagacactcggaattgaataccgaagttatgagcaaattcaaacgacaataaatttttac

SEQ ID NO: 6695 - DNA, 415 bp, Glycine max
  unsure at all n locations
agcttcaacattcaattacgagcgtctcgattataacgagactcaatcagacatccgagtaaaaagttattgtcgtctgactntgctcataactttatcattcaatttcgagtgtctntatatattacgggactcaatcagaaatccgagtaaaaatttattgtcgtttgaagttgctctgagcttcaacattcaatttcgagcgtcttgatagattacactgactcaatccgacatccgagtcaaaagttattgtcgttcgacttggctcagaactttaacattcaatttcaagcgtctttatatattgctgggactcaatcatacatccgagtaaaaagttattgccgtaaacttttctcagagcatcataattcaattggagcgtctcgtatattaccggactcaatcagac

SEQ ID NO: 6696 - DNA, 435 bp, Glycine max
  unsure at all n locations
agctngccaacaagaatagaagactatgagatgtttcctgatagtgcaatagatgatgatggtgaattggttcatctagcaccgatgggagaagcagaacctgtcaccttccaataagcaattaaaaaagaagtatggttacaaactatgagagaagagttgaaagccatagagaggaacaagacatgggagctggctagtctaccaaatggcaaaacaactataaaggtcaaatgggttttcaagaacaagctcaaaccagatgggagtattgctaaacacaaagccaggctagtggcaaagggctttatgcagaaagaaggctatgattacaaagaagtctttgcaccaatggctaggtttgagactatgaggttgatagatgctttggcaagttggaaagggtggaaactatggtaaatggatgtaaagtct

SEQ ID NO: 6697 - DNA, 438 bp, Glycine max
agcttctcctcttgatgcttctagggctctttttcccatataggcactgtggtgtgctctggaatctgtgccctttcttctgcctacaatttgtctaaaagtttgtaaaagtgtgtgtcaaagtgtgtgtaccctaattctgcacaagataggctttaaataggctctaaattcacgacgttgcgcttagcgccaccctatctgatgcaagctccattagagcttgtaggcctaggatcttcttcatcaatggattcctttgcttcttggaagatgaatggcagcggaatgaagaaaggaagagagagaggagacgccacttcaaggagaagatgagtctataagaagctcaccaccataggaggccatggataacagcttggaggaagaaggagatgaatgaatggagagggagagaagagcacgaaactttgtgct

SEQ ID NO: 6698 - DNA, 438 bp, Glycine max
  unsure at all n locations
agcttgtaatcgattaccagaggacattntcagaaaattatttccaagagtcacaacttttcaaatggcttttacatggccatcaaaggtctatttatatgtgacttggaacacaaatttgctcaaaatttttcagaacaaaaaggttttatcctctcaaaaagcaaaatcttcttatcctcttaagattccttggccaatacacttgcaattcaataaggatttatttgagtgctcaaattgttcaatctatctctttcaagagagatttcttcttctcttcactctaattctcaaaaagggattaagagaccgagggtctcttgttgtaaagaaatctgaacacaaaggaaggattgtccttgtgtggttcagaacttgtaaagggattctacaagatagtggaactctcaagcgggttgcttgtggactggacgt

SEQ ID NO: 6699 - DNA, 407 bp, Glycine max
tcttcacatagtccgcctttgcttgaccttctttatgcttaaaaacagaaacattaggcataggcaaaagatcaagaagagttagtgggttaaaaccataaacaacttcaaaaggagaacaattagtggtgctatgaacagctctattgtaagcaaattcaacatggggtaaacaagcttcccaagtttttaagttattcctcaaaactgtcctaagcaaagttccaaaagtcctattaacaacttccgtttgcccatcggtttgtgggtgacaagtggttgaaaataacaatttagtgcccaacttgctccacaaagtcctccaaaaatgcaaatcatcaagcctaggtataggatgcctatatttaatggtgatgttattaagggctctacaatcagaacacatg

SEQ ID NO: 6700 - DNA, 394 bp, Glycine max
tggctaatccaaaatcagcaactttatgattgaaattgctgtccaatagaatatttcctggtttgatgtcataatggattattctttgtttgcaatcttcgtgcaagtatgcgatgcctctggctatcccaactgcaatctcataaagcttttcatatcctaaggtcttcttttcatggaacaaatacctgtcaagagagccattctccatgtactcataaaccagtgctcttagatctctttcgaagcaaaatccaatcaactgaactagattgaaatgatgaacttttccaattgtacccacttctgccataaattgttcctcaattctcttatctgagttaccacgtagaaccttcacagccacagtgattccatcactcaaatttccttt

SEQ ID NO: 6701 - DNA, 302 bp, Glycine max
agctagcttaagaccgtatattgatttctttaatttgcacaccatgtggtcctttccttcaactgagaatcccattggtggagccatataaacattctcctcttaaattcccattagaaaagcagttttcacattcatctgatggaactcttaatcaataaagggtactggtgtgcatgtaatcctcaaagaatccttttggagatcggggaaatgtctctttataatcaatgtcatctttctgagtaaatcccttaacaaagccttgttacgttcaaagttgtcatgagagtcacgtttag

SEQ ID NO: 6702 - DNA, 311 bp, Glycine max
tgtcaaaaaggaaagcaagttaaaaactcgtttcaaagcaaatacattgtttctacttcaaaactccttgaactacttgacattgatttatttggtccctctagaactatgagtttaggtggaaattactatggcttggtaagtgttgatgattactcaaggtttacttggaccttgtttttgaaaaccaaaaataaagcttttgatgcttttcgcaaacttgccaaggtgattcaaaatgaaaaaggtccaaacatttttcaattagaagtgatcatggaggtgaatttcaaaatgagtcttttgaaact

SEQ ID NO: 6703 - DNA, 442 bp, Glycine max
agcttatcaatcttttgagcaaggagaacccccaatgcataattggatgcatcacacattagctcaaaaggggatgtccaatcaggtgcctgaataataggggtggtagtcaccgcacgcttgaggcaatcaaaagcctctttgcatcggtcatcaaaataaaactccaagtccttttgcagcaaattggatagtggaagggccactttgctaaaatccttgataaagcgcctataaaaccctgcatgaccaagaaaagaacgaacctctcgaacgcaagaggggtaaggcaattgtgaaataacatttatttttgcagggtctacctctatgcccctactggaaatgatatgccctaaaactataccttgttctaccatgaagtgacatttttcaaaattcagcacaaggttagtttcaatgcatctattaagaactctat

SEQ ID NO: 6704 - DNA, 412 bp, Glycine max
  unsure at all n locations
agcttccatcattcttctccttcctcaagaggaagtgagggtgaagccaagggtgatgagcatattgaagaggtttacccctatgaagaaagtaatcttctaatggtgagaaggcttcttgggagtcaaccttgtgacctaactcaatcccaaagagagaacatctttcatacaagatacaaggttttaaacaaaaattgttctcttattgaggatagtgggtcttgctgcaattgttgtagcacaaggttggtacctaagttgagtctcactatcatttgccacccaaacccttacaagcttcaatggctcaatgatcaaggggaaatgatagtcaataaacaagtacaaatatcattntctataggagactactgtgatgaagttttatgttatataatccctatggaag

SEQ ID NO: 6705 - DNA, 378 bp, Glycine max
tataagcaacaacacccacacgatcaaccacttgaaagggaccaatgtatgtaggactaagcttagcattggccctttgtgcaacagaaacttgtctgtaagaatgaagcttaacaaaaacaaggtcaccaatggcaaagtgtcttttagatccatgcttatcagcaagttgcttcatacaattctgagcttgctgtaaatgaaacttcagaactctaagcatttcctccctcttgctaaggcttcgatccaccaaagcaaccttggattcaccaggaaggtaaggcaatgaaatgggaggaggccagttgatatagctccaagtggagcttgtaggccttggatcttcttcatcaatgcaaaaaagatgattggaga

SEQ ID NO: 6706 - DNA, 407 bp, Glycine max
  unsure at all n locations
gatgtaacatntggagaggttaatgaaacaacgagatgatgcgctccatgagaggttggatcaaatggagaatagagaccatatgaattgctcaagagcttccattgtttattttctagcgtctagatatataatgcgcctcaatcggacctccgagttaaaagttatgaccatttgaaatgctcaagagcttccattgttcaatttcgagcgtcacgatatattatgcacctgaatcggacctgcgagtgacaacttatgaccatttgaattgctcaagagcttccattgttcaattttgagcgtcacgatatattatgcacctgaatcggacctgcgagtgacaacttatgaccatttgaattgctcaagagcttccattggtcaatatcgagcgtctcgatata

SEQ ID NO: 6707 - DNA, 395 bp, Glycine max
tctgcacttccaggagagaaaacccaagaaggaaaagccaactcatgcagttgaaaagcatcacaagcaagcatctcgaacgttgcaccctcaactcgacttggagtcttattttagcacttttcaatcacttctgatgaaagacccaaagcttcaaaaatctgagcacctttgtatgatgccaaagttgatattcccatcttggcaagaaccttcatcattccatagttgcttgctttgaaatacttcttgaccaactcatcttttgagtggaattcaccacttgcttttggtggtatctttccatcaacctgcaggcgccaaattgcatctattgccaaatatgggcatatagcatcagcaccaaaaccaacaagggtgcagaaatgatgcac

SEQ ID NO: 6708 - DNA, 428 bp, Glycine max
tcttgttttccttgtacttgccactgatggagaggatctacgagagggtttactgctacgaaatggtgatggagatgcagatcataatggagattgcggccacggcgttagtcactggaggcatggtgtacaaaggagggttttctgagatgagggaagaagctgagagggtttttgacaagggatccactttttactggttgacggttgtgtcaagtgtggtgacatggcagtgttgctacatgggaactgcagggttggtctttctcacatcttcagtaactggaggggtttctgctaatgctttgttgtccctgaatgtgttggcagggtggtttgtgtaccatgatgccttcaatggttttaagattgtggccactgttttgtgcatttggggcttctgctcttatgtctattgcatgtacttt

SEQ ID NO: 6709 - DNA, 410 bp, Glycine max
  unsure at all n locations
tgaaggtgtgcagcccaccattttccatagtagaatactagtaatgtgtctactatcattgtcatcattttttcgtcattgaggtgccacttgagctgccaggtctctccacctttgggtgtattctttgaaagatctgtgcccctttttgcacatgttctgttgttgcatcctatccggaaccatatcaaacttgtactgatactgcctaatgaaggcaaccattangtccttccaagagtggactcgagaaggttctaggttagtgtaccaggtaacagctaccccagtaagattttcttggaaggaatgtatcagcagttcctcatcttttgcgcatgcccccatcttccgataatacatctttagatggttcttggggcaagtagtccccttgtacttgtcaaagt

SEQ ID NO: 6710 - DNA, 357 bp, Glycine max
tattactatgtccgctacgaagtcttcatcggagtgccccgtactcaagaaccgcgaaagcatatcaacagattcaagcgattgtttctccttcagctcctttttcttctctctcactatgtacctggcgaactcgtgcacttccttcaccgctcttcttagacgcctttcggaacctatgtgaagtaatctctttattttccagactaacggcaacggctcgcggaaccggttgctgctgatctccggtggttattcgaaggcttgtgcgaacttgctccgttcagctgacagcgtcaggtattcggtgtcgaagccaaacgcgattttgcagatgttgtcaaacgcgaaacgttg

SEQ ID NO: 6711 - DNA, 353 bp, Glycine max
tgtaatcgattacacacatactataatcgattaccagaggagatggttagataatattctcaacaatcacatcttttcattgggtcttgtatttcatcaaaggcctatatatatgtgacttgagacacgaatttgctaagagttttcagaacaaaaaggtcttatcctcttaaaaagcaaaatcgttgtatcctcttaaaaattccttggccaaacacttgtgattcaataaggaattatttgagtgctcaaattgttcaatctatctctttcaagagagattcattcttcttctctttctaattcactaacggattaagagaccgacgatctcttgttgaaaagaatctaaa

SEQ ID NO: 6712 - DNA, 412 bp, Glycine max
tctattgctcttattcatctttactcgcgttatctcagaccttttatttctgttgcctaagattttgcatacacctccttcaaagtgaagtatgtagcctctctccatcatttggccaatgcttagaagattttcttttatgctgggaactagtaagacatcatggatgagtcgcgtacctttatctgtctccaccatgacagtgcctttgccttttgattcaaccacactttcatttcccagtcgaactttgactttgacagactcatcaatacttttgaaaatagtctcatccttggccatgtgattgctacatccactatccaagtaccagtttcctcccttttcttttattgagtcttaagtggcgtagaacgtacattgttcttgatcatgatcctctgcgatattg

SEQ ID NO: 6713 - DNA, 429 bp, Glycine max
  unsure at all n locations
taactcgaattgcaacgttccaattgatnttttaatggtgttatcgattacaatatattggtaatcgattaccagtgtatctgaacgttgaaattcaaattcaattattaagagtcacatcttttcataaaatgctttgtgtaatcgattacatggttttagtaatcgattaccagtgacaagttttgaataaaaaagtcaagagatgtaactcttccaatggttttcaggtttttctcaaggttataactcttccaatggttttcttgaccagacatgaagagtctataaaagcaagaccttaacttgcatttgaacaactttttacaactctttagaacaacttttgagaaacctttgctacttattcttcttcttcttcctttgccaaaagctttctaagttttctggtttccaaaccttgctctt

SEQ ID NO: 6714 - DNA, 361 bp, Glycine max
  unsure at all n locations
aagagatcatccnctcgacaacattattggtgatatctcaaaaggggtaacaactagacattctcttaaagatttatgcaataatatggcttttgtatctatgattgatcctaaaaatataaaagaagctntagtagatgataactagatcattgccatgcaagaagaacttgaaccaattgaaagaaacaatgtgtggaaattagtagaaaaacctgaaaattatcctgttatagggacaaaatgggtttttagaaataaattagatgaacatggtataattattagaaataaagccaggttagtagcaaaagggtgtaatcaagaagaaggaatagactatgaagaaacatatgctcct

SEQ ID NO: 6715 - DNA, 399 bp, Glycine max
tcgcatatcctttgataaaccttcgatagtaaccagtgaggcctaacaaacctctcagctgcttgatattgagtcgtgtaggccactctagatctgtctgcaccttaatagcatccatagcaactccttcacctgaaactatatgtcccaagtactctatctccaatacaccaaaagagcatttagacaacttagcaaacaaaacattttctttcaacactgtcaatacaacctctagatggcataagtgttcatgccatgtggaactatataccaatatatcatcaaaaaactataacacatatttccttaaagcatgttggaaaatatggttcatcaaacactgaaaagaagtcgtagcattggtcaaaccaaatggaattaccaaccactcataat

SEQ ID NO: 6716 - DNA, 448 bp, Glycine max
  unsure at all n locations
tactcaagcttcaacatcagaccacttccgggtgctggaactacttcacatggatttgatggggcctatgcaggttgaaagccttggaggaaagaggtatgcctatgttgntgtggattatttctccagatttacctgggtcaactttatcagagagaaatcagaaacctttgaagtattcaaagagttgagtctaagacttcaaagagagaaagactgtgtcatcaagagaatcaggagtgaccatggcagagagtttgaaaacagcaggttcactgaattctgcacatctgaaggcatcgctcatgagttctctgcagccattacaccacaacagaatggcatagttgagaggaaaaacaggactntgcaagaggctgctagggtcatgcttcatgccaaagaacttccctataatctctgggctgaagccatgaacacagcatgc

SEQ ID NO: 6717 - DNA, 398 bp, Glycine max
  unsure at all n locations
tcaaccaaggtgagatggaccatttcaagtgctaganagaatcaatgacaatgcttacaaagttgagctgcccggtgagtataatgttagttccatcttcaatgtctctgatttatctctttttgatgcagaaggagaatccgatttgaggacaaatccttctcaagagggagagaatgatgaggacatgaccaagagcaagggcaaggatccacttgaaggacttggaggacctatgacaagggctagagcaaggaaatccaaggaagctcttcaacaagtgctgtccatactgtttgaatacaagcccaagtttcaaggagaaaagtccaaggttgtgagttgtatcatggcccacatggaggaggactaaatgacaccactntatttcaaattta

SEQ ID NO: 6718 - DNA, 401 bp, Glycine max
cttttgtgtcttctttaaataaagatctagtggtagagatcctaactagtggttctatgttaacatctaatgtgtgtttgaattgtcctgtggattatttaggtagaacatttgtgattgatctgatttgtttgcctttgagccaaattgatgttattctgggtatggactggttatcttccaaccatgtcttgttaaactattttgataaaactatggtgtttgatggttttggagtgagtaaggatatgatatttatctctgccaaccaagttatgacatctttaaaagaagatgctgaggtgtacatgatcttgtctaacttggaaatagagacaaaggtttccatgtgtgacctccctattgtcagagagtttcctgaagtgttccctaaggatata

SEQ ID NO: 6719 - DNA, 412 bp, Glycine max
  unsure at all n locations
ggggtaatttataattntctatcactgtgtctggcatgggttggtggtcctggagctgttgtaataagtttgagtggtcgagttctgtaaccatcattntgtctgatgaacttgtgctttcctcctataccgctggatgggtgggtttgtatctgattcatatgtttggattaaaagcttttgtgccggaaaatagttatatatcccttgaacgttctatgtagtgttttttaattacctatttttttgtcacttaaagtactaggatgatgcatttgccacacaatatggaagatttattttttatagattattggaaaatgacctagacatcctggagatgccaatggatttagtagagacttctaacatggtggcatgacattatatcacaanttacgttcatctctca

SEQ ID NO: 6720 - DNA, 418 bp, Glycine max
  unsure at all n locations
tcaagaaaaagatggcctcagcaaactccttatttccagaagggaattctatcaatagaccttccatctttaatggagagggttacccttactggaaaacccgaatgcaaaattttattgaggccataaacctaaatatttgggaagccatagaaataaggccctatatacccaccacagtagaaagaattacatagatggcagttcatcaagtgaaagtataactatagaaaaacctggagatagatggtctgaagaggatataaaacgagtacaatacaatttaaaagccaaaaacataataacatctgccctgagaatggatgaatatttcanggtttcanattgtaagagtgctaaggaaatgtgggacactcttcgattaacacatgaaggaactacagatgttaaaagatct

SEQ ID NO: 6721 - DNA, 249 bp, Glycine max
atcttttgtaatggagaattgcactaagcaatcactacgcatagcttcaaactcgaaggtggaggacacatgaacgaaaacgcaattcatgggtctccgaaaagattgagaatggagaattgcactaagcaatcactacgcatagctccaaactcgatggtggaggacacatgaatgaaaacgcaattcatggggctccgaaaagatggagaatggagaattgcactaagcaatcactacgcatagctc

SEQ ID NO: 6722 - DNA, 238 bp, Glycine max
atttttttgtaaaaagcgctggattttaggccttagattcttatctgtggtgggagttcgtttccaagggaatgggactatgctaggttcagacagggtgctgataagtgtggggcagtgttgatgtgtgatttggctcatatcagtggtcttgtagcggctaaggtgatttgattttactgtcttttctcttgtttctgtttgaattatgttatcgattttatggttgtttatgcat

SEQ ID NO: 6723 - DNA, 253 bp, Glycine max
agcttttatttattcaattcaaaagccttttgtgcttgttcattccacccaaacgcacccttcttcaaacattcggtcataggacttgctatagtgctaaaattctggataaagcgtcgataaaatgatgcaagaccaaggaaagatctcacctccgaaactgttgtagggctcggccaagtcttgatagcatccacttttgtttgatcaacggatactccatctttagacaccacatatccaagaaacacca

SEQ ID NO: 6724 - DNA, 247 bp, Glycine max
ttatctttttcccatatgctatacgcgtcatcttggttccaaagaaggacggaactcgaagaatgtagatagattgtagagccatcaacaacatcgctgtaaggtatagacatcttatccctagactttatgacttgttagatgagttgcatggttctagttatttctccaaaattgatttgaaaagtatttaccaacaaattagaatgagaaaaggtgatgagtggaaaaccgcttttaaaactaa

SEQ ID NO: 6725 - DNA, 250 bp, Glycine max
agctttttttaatttaaaattgtcataacttttcactcggatgtccgattcaagcacatcagatatctagacgctcgaaattgaacaatggaagctctcgagaatttaaaattgtcataacttttcactcggatgtccgattcaggaacatcatatatctagacgctcgaaattaaacaacggaacctctcgagaaattcaattggtcataacttttcactcggatgtccgattcaggcgcataatatat

SEQ ID NO: 6726 - DNA, 247 bp, Glycine max
  unsure at all n locations
ttttatanctcttcaccctattgtgcctttcaatgttccccatgtctctatcaaagacacaatagttggaaactacctaatcccaaagggtagtcacatattgttaagtagacaagaaattgggcgaaaccaaaaagtttggggttaacgaagctcacaagttcaagccagaacgtcacctgataatgaataagagtgaggttgttgttttgacggagccagatttgaagtttattttgttcagcac

SEQ ID NO: 6727 - DNA, 247 bp, Glycine max
  unsure at all n locations
atttatttttttttgnacaagaatgaagctctgattccacgtgttacacaagtggcctcatatatcttaagaagggggggttgaattaagatattccaaactgtttcccctaattaaaaatctatttcactttttactcaagttatgaattcccttaatgacaatcttcttaaatattaattcaaatgaagcaacttgaatatgaatataaagcaataataactaaaggagattaagggaacagaaa

SEQ ID NO: 6728 - DNA, 250 bp, Glycine max
agcttttattatctcattatggtctcaagcaggcccccaggcaatggtttgaaaggcttcagactaccttacttcagtttgggtttgtggcaagtaaatgtgatctctctctgttcatttacaagaccaagtctcacactgtatatctccttgtgtatgttgatgatattataattactggaagttctattcctttaattcaacatcttacctctcagttgaactcaaaattctctctcaaacagcttgg

SEQ ID NO: 6729 - DNA, 203 bp, Glycine max
atctctataaatactatgctagaggccaccatgaacctgacacctcacttattacaagtggtcaacttttaaggaaaatctgatattaataggaatgaagtgagcagacttagtcaatctatcaacaattacccaaatagaatctaaacctctatgggttctaggtagtcctaccacaaaatccatggaaatactgtcccact

SEQ ID NO: 6730 - DNA, 360 bp, Glycine max
  unsure at all n locations
agctagagcttatctacacatacctctctaatagctaagctcacctccttgagatgagaagctagagcttaagtacacacccnctataatagctaagctcacccccatgacaaaaaaacatganaatactaaaaaattctttactacaaagactactcaaaatgccccgaaatacaaggctaaaaccctatactactagaatggccaaaatacaaggtccagacgaaggaaatacctattctaatatttacaaagataagcgggctcatacttagcccatggactcgaaatctaccctaaggctcatgagaaccctagggccttcccttggatctctagccaatctacttggagtcttct

SEQ ID NO: 6731 - DNA, 344 bp, Glycine max
attcctaatatctctacaattgcctacctctcaatgagctggtaaagaagcatgtggcatttacctgtggtgaataacaagagcaagcctttgctttgctcaaagaatagcttactaatgcacctgttctagctcttcctgactattctaaaacttttgagctagaatgtgatgcctccggagtgggagttggagctgtcttgttactagggtgatgcctcatgggctatacacatccctacccattccatctgcaccgtgggtagacattagtatggactttgttgtggcatccctaaattaatgactagtttaaatgtataaattaaatagcataaccatgg

SEQ ID NO: 6732 - DNA, 174 bp, Glycine max
  unsure at all n locations
caacatcagaccacttnatggtgctggaactacttcacatgtacttgatggggcctatgcaagttgaaagccttggatgaaagaggtatgcctatgtagttgtggatgatatctccaaatttacctgngtcaactttatcagagagatatcagacacctctgaagtattctaag

SEQ ID NO: 6733 - DNA, 454 bp, Glycine max
agcttggttatctccttctttatccctgagaaccaccgggttgagtcttctctgtggctgtcttactggtttagctccatcctctaaatttattcgatgcatacatgtggatgggctaataccaggaatgtccgccagggtccatcctatagccttcttatgcttcttgagaactgacaacaacttctcctcttgctcatcagcaagggaggcagatataatcactggaaaactcttgctatcatccaagtaagcgtaatttaaatttgatggcagaggcttcaattctggcgtggtcggctggacagtggtagaatgagatggtttctcagccttgacctcataaagaaagtcagaggtatgtgccatctcttgaacatggttagtcctatctgactctataaaatcatctcatgaggtaaacaccaccatcagcatgcaatcaatatcactc

SEQ ID NO: 6734 - DNA, 294 bp, Glycine max
gtgcaagctttaatttatacttgagaagtattgagtgatatttatagctaactaaccattaattaattccttttatcttttcttgtttatattttatttaattggttgtcatataaatattatgtcaatagtttatatgattatcacgtcaatactaatatgtcatgttaactagcgagcaatcttgactttggacggtgaaccaatgaaaagattaaaattatttattttacaacataaaagaattaacatcacatatttaatatataaagaatcaagattgaatttaacaaa

SEQ ID NO: 6735 - DNA, 297 bp, Glycine max
  unsure at all n locations
gcttcaatacctctcacagaggagaagacaaagtaaataaggtgtgtctccaaactctaatatgtgagtttgaatccttacatatgaaagagtcagagtccatttctgattatttntcaagaattctcactatttcaaatcaactaaaaagaaatggtgagaaagtagatgatgtaaaattatggagaagatactatgcttactagattccaaattgagcacattgtgtgacaatcgagggaaccaagatttagaaccatgatgatagaacaacttcaggatcactacagtttatga

SEQ ID NO: 6736 - DNA, 471 bp, Glycine max
  unsure at all n locations
ttttttatgcatcgcttgattctctgttntaatgtttgtgcctagtccaattttttttattattgtcttttattaaactcatttcatgatatnttgnnaagtgatgcatatcaagctattggctactaaaattttcttacctcatgatttattcaagtcaatagtgaaatagcaatgggtgcaaccatttccccaatttctgcataccgaaactcccagttcaatattagtgtacttatctggaaggtataatcccaagaatcttcctagtgattaatctgcaaatggaaaccagcctttaagcatcttgggtctcatctcattattcttccgactaggtgtatggcatgcggaccactataatgtctcaagtgtttggattcttcaaaacccctatcatctaacaagcatntgtatgaaacaagacatgtggagatccaagcctatgtatgctaattcatagctaatatg

SEQ ID NO: 6737 - DNA, 384 bp, Glycine max
  unsure at all n locations
gaaccatgtacattgtggagattgtgtgactacatggctacctcttgagcatagtgccaaatagagacctttngtttacctctaggttntgggagagtttacaagaagccatatagactaaagtggaacttagttcatcctatcaccctcaaatagatagttaaaccgagagaactatctaatccttagaagaccttcttatagcttgtgcgattgaacaaaaaagtagttggaacgagtgttaacccttgtagagttacctataataataatatccatgccagtacanggatggcaccatntgaagccctgtttgggcagaagtgtaaaacacccttgtgtttgtatgagatagatgaacctctcttgtaggtctagcgtgtt

SEQ ID NO: 6738 - DNA, 358 bp, Glycine max
  unsure at all n locations
agctctgaccatttgaattgctcanaagattccgttgtttcaatttcgaacatctcgatatcttatgcgcctgaatcggacatcctagagaaaagttatgatcattcgaattgctcaagagcttccattgctccatttcgaacgtctcgatatattatgcgcctgaatcggacatccgagtgaaaagcttgaccattngaactgctcagacgatcccttgttcatntcgaacatttcatatcttatgcgctcgatcggacatctgatgaaaagcttgaccattgaattgctcaaagctcccttgtcaatttcagcatctcgatatttatcgcctgatcggactccagttaaagtttga

SEQ ID NO: 6739 - DNA, 398 bp, Glycine max
  unsure at all n locations
agcttctactataagtttgttcctaatttctctacaccgnctcacctctcaatgagctggtgaataagaatgtggcattcacttggggtgaaagataagagcaagcctttgctttgcttaaagaaatgttcacaaagacatttgttttagctcttcctgacttttctaaaacttttgagctcgaatgtgatgcctctagagtgggtgtgggagctgtatttgtgcaaggtgggcaccctatnttcttttttagtgaaaaaattcatggtgccaccctcaactaccgcacctatgataaagagctttataccttaataagagccctccaaactnangaacattaccttgtttccaanggaattgtcattcgtagtgatcatgatattcttatgtacatt

SEQ ID NO: 6740 - DNA, 433 bp, Glycine max
  unsure at all n locations
ntatctgaagaactcgccaagcgcacttactgcactaagcaagttcatcttttgaggatgaacactcatcctcttgctgaactacctgtggctaagcgaggctgaatcgctaagcccaggtaacttaaccatnnttttttgtgatagccacatgttagacaagtggcctcagatatcttaagaaggggggttgaattaagatatcccatactacttccccaattaaaaatctatntatctttttattcaaattataaattcccttaacaatgaacttcttaaatattgattcaaataaaacaagttgaatatgaatataaagcaataataaataaaggagtttaagggaagagatagtgcaaactcatatttatactggttctgccacacccttgagcctacgtacagtcctcaagcaacccgcttgagagtt

SEQ ID NO: 6741 - DNA, 360 bp, Glycine max
  unsure at all n locations
ntagatgcctntaangtttttatggctgaagttgagaaaaatgttgaaaacaaattaagatcgtgagataagatagaggtggtgagtactatggtagatacatagaggatggacaaacaccaggttcatttgcgaaatttcttcaagaacatgagattgttgcccaatacactatgcctggttctccggatctgaatggtgtgacagaacaaagaaatcgaaccttattagacatggtgagaagcatcaggagtaatgtaaagcttcctcaattcttatggattgatgctcttaagacggttatgtatatattaaaccgagttccaaccaagggtgtctcaaagacatcttttgatgtat

SEQ ID NO: 6742 - DNA, 380 bp, Glycine max
atgcactcctctaatgtttatggcatcatttctggcactaaactgctgggagttggaggccatcttctcaattaaatttctggcttcaacaggagtcatgtctccaagggctccaccactggcagcatctatcatacttctctccatattactgagtccttcataaaaatattggagaagaagctgttctgaaatctgatggtgggggcaactggcacatagtttcttaaatctctcccagtactcatacaggctctctccactgagttgtctaatacctgagatatccttcctgatggctgtggtcctggaagcagggaaaatattttctaagaatactctcttaaagtcatcccagctcgtgatggaccttggagcaa

SEQ ID NO: 6743 - DNA, 247 bp, Glycine max
  unsure at all n locations
tgcttcaacaccgttaagggtaaagactctttcctttgtaagctccattggagcttgtaggcctaggatcttcttcattaatggatccctttgcttcttggaagatgaatggcagcggaatggagaaagaagagagagagaggagatgccacttcaaggagaagatgagtctagannaagctcaccaccataggaggccatggataagagcttggaggaagaaggagatgaatgaagggagaggaag

SEQ ID NO: 6744 - DNA, 199 bp, Glycine max
  unsure at all n locations
agctatagtcttcatgttgatgatgctgtgccccctatttaacaggttgngaaaggttctattatttgaactcaaccaacccatacatatgattaaatntattattatatatgaattaattataaatataaaacaccattaaatttagctcacatcacttattaaaatattaaattaaatcactcatgctcttccttca

SEQ ID NO: 6745 - DNA, 350 bp, Glycine max
attgagatgctagatattgagaaatggaagttctcgtaaattcaattggtcataacttttcactcggatgtcagattcaagagcaaaatatacagagacgctcgaaattgaacaacggatgctctctagaaatataaatggtaaaattttttcacatggatgttatattcagacacataatatatcgagacgttcgagattcaagaattcaaaaattaaagttctcaagatatatagagatgaaaaattatgaccatgggtgtacgattgagacccatgatatatcgatatgctcaaaattcataaattggtccaattcataaattcaaagagcccttacttttgacatg

SEQ ID NO: 6746 - DNA, 379 bp, Glycine max
  unsure at all n locations
gagaggatatatataagctatgctaaccaagccatctagggagaaagaaggttgtcttcgaacccggagattgcgtttgggtgcacatgagaaaagaaaggtttccgaaacanagganatcacagcttcaaccaaggggagatggaccatttcaagtgcttganagaatcaatgacaatgcttacaaagttgagctgcccggtgagtataatgttagttccaccttcaatggtctctgattatctctttttgatgcagatggagaattcgatttgaggacaaatccttctcatgagggagagaatgatgaggacatgaccaagagcaagggcanggatccacttgaaggacttgangacctatgacanggctagagcag

SEQ ID NO: 6747 - DNA, 305 bp, Glycine max
  unsure at all n locations
tctgtccctgagaaacggttcccagaagacaacagggagtgattattgctgaanaccctagccttgcaacaagtcctatggaagtagacacggagatggacaagaaaatccgcagtattgtgagtagcatnttgaaagacgcctctgttcctgatgctgagaaagatgttccaacatcctccaccccagatgttgttgtccctgaagctgatgaagatgtcccaacatcttccaccccgaatgtttctgtgcctgatgttgagaaagaatgttcaacatttttcggcccacatgctgaagtactc

SEQ ID NO: 6748 - DNA, 369 bp, Glycine max
  unsure at all n locations
tctgcatcatatttctgcatccatcaagattagtagttgagtgttccaccatgtattctgcccaatgctgagactacattatctgtcaagttccagtaaccaatgaggtttacattgacaagtctagcctaacaattatgcaaaaggtggagaagaccaacatcatttatggcatagagtttagtcagattaagatgctgaagtcaaggacacaatttgaacaattatgacttggctagcattgataaaaccaagtcacntttgaattactaaaggtcgaagagactcgcaaggagaaagcatatacacttccatatcgatatctttgactcccatgcacttcacaagggaaagagangaactttattt

SEQ ID NO: 6749 - DNA, 455 bp, Glycine max
cgtcccggatccttaagcaccgcggctgcagcttatgcaagattttgtgattcttcaaataaaggaaagagagacagtgaatgcatatttttcttgtagtctaaccataaccaacaaaatgaaggctcatggtggagtgaaacagtcattattgcaaagattttgagatcaatggtctcaaaatttgattatgtggtatgctcaattgaagaatccaacaacttagacatgatgagtattgaggagttgcaaagtagtctttttgttcatgagaagaggatgagaagttgtggagaagaagagcaggttttaaagatctcccacgaagaaaaagcaggtagaggtagaggcagaggaagcggaagacaatcattcaataaagttgctattgaatttttcaaatgtcacaagttaggacactatcaatatgaatgtcttgattgtgagaaagatgc

SEQ ID NO: 6750 - DNA, 353 bp, Glycine max
tgatgagaaaagttacatgaattggcaccagcaagttaatgctgtccttcgagctcatcaattagaaaaatatgtcgtcaatcctgttgttcctctcaagtacctctccgaagaagatcgtgcagctgggacaatcaatccagaatttacgaattgggatcgtcaagatgctctaatcatgtcttggcttctttctacgctttctgattcaattctcagtcgtgttgtgacttgttgtcattcattccaagtctggaatgccatttgctcccattttcatggtcttacgcgtgcaagaactacgcaattacgcttggaactgcgaaccatcaagaaaggcaacaaatcttgca

SEQ ID NO: 6751 - DNA, 420 bp, Glycine max
agctataggcaaattctaacgacaatatctttctactcggatgtctgattgagtcccgtaatatatcaagacgctcgatattgaatgttgaacctatgagccaattcaaacgacaataactatttaatcggatgtctgattgagtcccgtaatatatcgagacgctcgaaattgaatgttgaagctttaggcaaattcaaacgacaataactatttactcggatgtctaattgagtcccgtaatatatcgagacgctcgaaattgaatgttgaacctatgagccaattcaaacgacaataactttttactcggatgtctgattgagtcccataatatatcgagacgctcgaaattgaatgttgaacctctgagccaattcagacgacaataactttgtactcggatgtgcgattcagtgg

SEQ ID NO: 6752 - DNA, 247 bp, Glycine max
aaacttgaattaacctgtaactagctatttttgtattcattgtaactaacggagaaactaaatttccacttaatatgagaagatgtaccttttatgagaccttattgctactaccatttagcatctctggcgccatccatagaagatttccacgaacaccaccacacaccaacgtatttcgcttaatctttgataagccataatcaccatcctggtgaaaagcaagtttcttagctgtatcacaatg

SEQ ID NO: 6753 - DNA, 330 bp, Glycine max
  unsure at all n locations
taataagtccatctatggattgaaacaagcctcctgctagtggtatttaaaatttcatgaggttatttcttcattcagctttgaagagaatgtcatggatcactgtatatactagaaggtcagtgggagtaagatttgtttccttgtattatacatagatgatattctacttgcgactaatgataagggtatgctatatgaggngaaacaatttctctcaaagaactttgatatgaaggatatgggagaggcatcttatgtcataggcataaagatccataaagaaagatctcgaggcattttaggcttgtctcaagaaacctatatcaa

SEQ ID NO: 6754 - DNA, 286 bp, Glycine max
ttcaattgggttctggaatggccatcaaaggcctatttatttgtaactggaaacacgaatttgctaaaagtttttaaaccaaaaaggtcttatcttttaaaaagcaaaatcgtgttatcctcttacaaagttccttggccaaaacacttgtgattcaataaggaattatttgagtgctcaaattgttcaatctatctctttcaagagagatttcatcttctcttcttctgtattctgaaaaaggataaagagaccgagggtctcttgttgtaagaaaatctgaaca

SEQ ID NO: 6755 - DNA, 347 bp, Glycine max
tggatttccttttagtagggaatctatccttcctaagatggagccaaacccagtcaccctcattaagaactagctcttttcttcctctattgcctttagttgaatacacctttgtttgattctctatttggttcttaaccctctcatgcatcttctttacaaattctgacctagattccccttctttatgtataaaagaagtgtccagtgggaggggaatgaggtctaacggtgttaggggattgaacccatagacaacctcaaaaggggactgcttggtggttctatgaacccccctgttgtaggcaaattctacatgaggaagatactcatcccaagacttatgg

SEQ ID NO: 6756 - DNA, 418 bp, Glycine max
  unsure at all n locations
agcttgtgaaagatgtcttcttaggaagcaacacacataatcatntttaactgaaaaagcatggaaagctaaaggcttgttggagtaaattcacactgacatctatggaacaatgaggacatagtcgctcaacaacaataggtacttcatccttttcattgatgacttctctagaatgacatgggtttactttcttaaagaaaaatcagaagtctttggaatattcaagaagatcaaagcctttgtcaagaaacaaagtgggaagcatataaaagtactcagaagcgattgaggcaaggaatacaactttcatgagtttgataagttttgagaagatgaaggcattgagtgtcagcttacagtggcatattcttcacaacaaaatggtgtgcctaagagaaagaattgaacagtcatg

SEQ ID NO: 6757 - DNA, 425 bp, Glycine max
  unsure at all n locations
agctntgtgcagcatggatgatctgcatagtattattgatcatatgttgaatacaagattgcatacaaagtgctctatatccagcttaacaaacttagtaactgattctactctaactaattgctaactaatctaactatcctctaactgaaaataactaactctattttctgcatagagctttaatacccctctcaagttggagagtaaatgttaatgagtcccaacttgcggataaaggaagagaaagctagaagcattaagggctttgtgaagatatcaacaacttgatgttgggatttcacatgagcaagcttaaggttgttggactgcactaactcacaaatgaagtgataatcaatatcaatgtgtttggatcgttcatggtgagttggattagaagctagatcaattgcagatttgct

SEQ ID NO: 6758 - DNA, 345 bp, Glycine max
tcccaagaaaccttggacctgcttatcggtacatggctcgggcatctcgaggattgcttttaccttgtctggatccacctctattcctttctggctaacgacaaagtcgagcaatttttttgattttacctcgaacgtgcactttgcgggatttacccttaacctgtatttatgcagtcgcccgaacaacattcgcaaattgactaggtgttcctactccgtccttgatttggcgatcatgtcatccacgtagacctcgatctctttatggatcatgtcatggaataacgccaccattgcctgctggtatgttgccccaacgttctttagcccaaatgacatcac

SEQ ID NO: 6759 - DNA, 308 bp, Glycine max
tcagttttaaatgtcgagcgtctcgatatattactcgactcaatccgactttcgagtgaaaagttattgtcgttagaatttgctacgatcttcgattttaaatttcgagcgtctcaacaagttactggactcaatctaacttccgagtgaaaatttttgtcgttcgaatttgctacgagcttcgattttaaatttcgagcgtctcgatatatttcaggactcaatcggacttccgagcgaaaagctatagtcgttcgaatttgctgcgagcttccgttttcaaattagagcgtctcgagatattaccg

SEQ ID NO: 6760 - DNA, 428 bp, Glycine max
agcttgcagcaaattctaacgacaataacttttcactctgtagtgcgattgagtcccgtaatatatcgacacgctcgaaatttaaaaccgaagctcatagcaaattcgaacgacaataacttttcattcggaagtctgaatgagtcccataacatatcgagatgcttaaaatagaaaaccgaagcttgtgcaaattcgaacgacaataactgtttactcggatgtgcgattgagccccgtaatatatagagacgctcgaaatttaaaaccgaagctcgcagcatattctaacgacaataacttttcactcggaagtccgatggagttctgtcaactatcgagacgctcgaaacttaaaaccgaagctcgtagcaaatacgaacgacaataacttttaattcggaagtccgattgagtcccgtaacata

SEQ ID NO: 6761 - DNA, 344 bp, Glycine max
tgtgcatccaataccctgatgaggatgtcccatatgttcttaaaactggactgattcatttgcttccaaagtttcatggccttgcaggtgaagacccgcacaaacatttgaaagaatttcacattgtctgctccaccatgaaacccctagatgtccaagaggatcacatatttctgaaggcttttcctcattcattagagggagtggcaaaggactggctgtattaccttgctccaaggtccatcacgagctgggatgaccttaagagagtattcttagaaaaagttttccctgcttccaggaccacaaccatcaggaaggatatctcaggtattagacaactc

SEQ ID NO: 6762 - DNA, 357 bp, Glycine max
ttcttgtgttgcttatgtagagcactgcaatgctattttacaatcaccggcagcacaccccgaattcataattgtcaacaatctcattcttcaccagaagcgcatttggctaccacgggatttccagatgatccccaccttgctcaccgagtttcacttgactccgacagggggtcacatgggcatagccaagacccttgcccagatatcagagaactttagttggccaggtctccataatgatgtgagaaaattcattgcccaatgcgttgattgtcaacacaccaagtataaaactaagaaaagtgtcgggttgttgtgcccgttgccagtgccgcatcgggcatgggaagaact

SEQ ID NO: 6763 - DNA, 420 bp, Glycine max
  unsure at all n locations
agctnttgccacaaaacacattgtttccaacatccaaggctctggttattgattaccaggcagtgtaatcgattaccagaagacaattttgaagcaaagggttntgaatttcaattttgaatcatgtaatcgattaccagatgtttgtaatcgattaccagcaatggcactttagaaaacactttgaaaagacacgacccttcaaaatataactgtgtaattgattactagaaacctttaatcgattaccagtgaagaatttcagaaaaaagtttttgaaaagacacatatcttcaaacctttttgaaaaggcaccaagggcctatatatatgtgtgtctcacttagaaaagcaggagagagatattctaagagaacttaatttccaaatgctctctcaacaactcttgggcaaacactt

SEQ ID NO: 6764 - DNA, 425 bp, Glycine max
agctttgatgcaacagttggagaggttattggaagaaggagatgatgcgctccatgagaggttggatcaaatggagaatatagatcataatgaagaagaaaggaggagaagagggaatgatgatgttcctagacaaaaccgaattgatggtattaaactcaacattcctctctttaaaggaaagaatgatccaaaggcctacttggaatgggagatgaaaatagagcatgttttctcatgcaaaaactatgaggaggaccaaaaggtcacgcttgccgccacggagttttccgactatgctcttgtgtggtggaacaagctacaaaaggagagaacaagaaatgaagagtcaatggttgatacatgggcggagatgaaaaggatcatgaggaagcggtatgtgccggctagttactcaagggact

SEQ ID NO: 6765 - DNA, 341 bp, Glycine max
  unsure at all n locations
tgaaggtaaactagatgccttggntaacctggtaacccaactgaccatgaatcanaaatctgcacctgccgccagactctgtggtttatgctcctctgccgaccaccacacagacctttacccttctgtgcaacaatctgaagcaattgaacaacctgaagcttatgctgcaaacatctacaacagacctcctcaacctcaacagcaaaatcagccacaacagaataattaagacctctccagcaacaggtacaatcctggatggaggagtcatcccaaccttagatggtcgaatccttcacaacaacaggagcaccaacaaacaactttttttcaaatgc

SEQ ID NO: 6766 - DNA, 342 bp, Glycine max
tgaaggcaaactggatgcattggttaacttggtaacccagctggccttgaaccataaatctgtacctgttgcaagggtttgtggtttgtgctcctctgctgaccaccatacagacctttgcccttccatgcagcaacctggagcaattgagcagcccgaagcttatgctgcaaatatttacaatagacatcctcaacctcagcatcaaaatcaaccacagcaaaacaattatgacctctccagcaacagatacaaccctggatggaggaatcaccctaatctcagatggtctagccctcagcaacaacaacagcagcctgctccttcctttcaaaatgctgc

SEQ ID NO: 6767 - DNA, 426 bp, Glycine max
  unsure at all n locations
agcttgcaatctatttaagtacctgcgtggttattaaaaaattatatcatactattctctaattttattattttgaattacctatattatttttatgttttaaacaaactaaattttttcttaaaaataaacacgttggcaattcgggttggcagggtctgaattctgaacggttttgttgcaaatattcttgaaaataacaatgtaaatttcgatcttctaacccgaatttacactttgaatagtaaacttgtatgtttgtgtaaataatgagaaaatatgtatgtttgaatatataatttttttataaatgtatgtttctcaaaaaatttctattcttgcaaaataaattataaccataatttaatataactctttatacaatatacttatgttttacgataacattaaaatntggaaattatt

SEQ ID NO: 6768 - DNA, 366 bp, Glycine max
agcttgtacagtgtgggaagaggatttgattgttcaataagaagaatctacttcaaccgatatgcccttaggcacggcattacataacatataaatgactctcggatagggaggacacttatctatagcatcaggtgctgtatcgaatctcattgcacaacaggggaaatggtccacgatacaactaccttttggggaggtcgcgttgatttccgaaaactgctcggccacagtcggacaagtgggaaatgttgtattaagccaaaaaaatttatgtagatccggatctaaatgtaggatatgtaagcgtactgtattaagaggagtagttatgatacccctagaccatgcccatgggggtggtga

SEQ ID NO: 6769 - DNA, 397 bp, Glycine max
ctaacaagagttttcattgcccacaaagtttatcctctcaaaagattaagagtttttctgaactgaactgtcttatcctctcaaaaagattccttggtcaaccacttgcatattcaataaggaattttgattggtcttcattgtacaatctatcccttttaagagagatttcttcttctcttcttcttacttctgaaaagggattaagagaccgtgggtctcttgttgtaggggattcttgaacacaagggaagggttgtccctatgtgcattgttaatccgaaaagagagagtgaaagtttaattgcggaataatattcgtatcttaattcaatcccctcttcttctcaaggtaaccgaggccatttgtccaacatcctattcttgacaactcgct

SEQ ID NO: 6770 - DNA, 455 bp, Glycine max
gatcttaagtcacctgcggcatgcaagcttgcaaaccaaatgctcaccactattagaggagaaatctttaagttgtttcatataaacctcctcctctaaatcaccattaagaaaagttgttttcacatccatctgttgcaactcaaggtcaaaatgagaaactaatgccaagataatacgaagagaatctttcttagatactggagaaaatgtctttgtgtaatctattccttccttttgagtaaatccctcaacaacaagtcttgccttgtatctctcaatgttgcctaatgaatcccttttggtcttaaatacccatttacatctaatggcctttgccccattaggcatctttacaaggttccaaactttgttactctgcatggaattcatctcatccttcatggcatcataccataaatttgactctttacaactcgtggcttgatcaaaag

SEQ ID NO: 6771 - DNA, 436 bp, Glycine max
agcttgtggattatgggtagtgatggaagggtgagaaaggatggtagggtcaataatgttaagagaaagcagttctcataaaaaatgacattttgagacacttcaatggttcgtgtatgaagattgtacacaatgtaacctttcttgtgggatttaaatcccaaaaacacacaaggtaaggctctaggatccaacttttttctgttagcattgagagtgctaatgtaacatagacaaccaaaaactcaaagtaaattaacatcatataatgcagaatagagtttttgatatggggactcatttttcagaaaatttgtaggaatgatatttatcaaagtagcaacatgaagtaaagcataggaccaaaaaatgtttggaaggttaaattgaaacaaaagggcccgagttacattaagtaaatattgatgttttcttt

SEQ ID NO: 6772 - DNA, 339 bp, Glycine max
ttgggaggaacatggacaaggatgctatccgaccatttagtttctagacttcttggacgttggtcgggatctacatctccagtatggcagtgcatttgttagggttggcttcaatcccccggtgagtgatcatgaaaccaaggaacttgccttcacctaccctaaaagtacatttttcaaggttgaagtgcatgtcatatttgcggaattccccgaagacttcttctaggtttgccacatgttgagttatgctttgaaacttgatgaccatgccatccacatataccttgacatttagtccaatctactgtcataacttgcgaatgatgatgggagcct

SEQ ID NO: 6773 - DNA, 259 bp, Glycine max
ttgcatccccctaagatccattaggaaattacttgtgaaagagagccatgagggtgggctcatgggccactttgtgatagacaatacccttgtcttactcaaagaaaagctctattggccccatatgaagaaagatgttcataagcattgcactacgtgtgtggcttgtttacaagccacctctatggcgatgcctcatgggctattcacacccttacccatcccatctgcaccttgggtagacattattatggacatt

SEQ ID NO: 6774 - DNA, 331 bp, Glycine max
tgtttaagaagagcgagtcctaattccacaatatgtttgtgtttcctttccactacaccattttggtgatgagtgtgtggacagatcaatctaagagtgataccttggcttgctaaaaaattagtgagaggtctgaactctcctcctcaatctgtgtgaacactcttaattttggagtcaaactgaagttcattagcttgaactgttgaaaaatggtgaaggtttctgacttatgtttaagcaaatagatccaggtgaacctagactaggcatcaacaaaggttatgtaatagtaaaaaccatttttggaaagaatgtggacaggacccca

SEQ ID NO: 6775 - DNA, 422 bp, Glycine max
agcttaacaaaaggcatgcgaagtgggtggaattcctagagcaattcccttatgttatcaaacataaaaagggaaaaggtaatattgtagccgatgctctttctcggcgtcatgcattactttctatgcttgaaacaaaattgattggtcttgaatgtttgaaaagcatgtatgaaaatgatgaaacttttgcagaaatttttaaaaattgtgaaaaattttcagaaaatggtttctttagacatgaaggctttcttttcaaagaaaacaaattgtgtgtgcctaaatgttctactagaaatttgcttgtttgtgaagcacatgaaggaggtttaatggggcattttggggtccaaaagactctagatacattacaagaacatttttattggcctcatatgaaaaaggatgtgcagaaattt

SEQ ID NO: 6776 - DNA, 352 bp, Glycine max
tgaaggtaaactagatgccttggtaaacctggtaacccaactggccatgaatcaaaaatctacacctgtcgccagactctatggtttatgctcctctgccgaccaccacacagacctttgcccttctgtgcaacaatctgaagcaattgaacagcctaaagcttatgctacaaacatctacaacagacctccttaacctcagcagcaaaatcagccacaacagaataattatgacctctccagcaacaggtacaatcccgagtggagaatcatcccaaccttagatggtcgaatccttcacaacaacagcagcaacaacaacaaccttattttcaaaatgctgctggcccaa

SEQ ID NO: 6777 - DNA, 326 bp, Glycine max
tgatttccctaccaagcctcttacattatcacctcgcacagaaacatcagtcattaatggaacttataggggatttatggaaattatactgcagaacaatgatactaagatgcatacctatcacatgagtggatatgcattttttgttgtcgggtactggctaactcctcttttatgatgccattccatgtttctggaaccaataacacaacttgatttagtaggctgcacgatagattttggtgattggtcttagaatagcaagggtacatataacaagtgggatggaatagctcgcactacagcccaagtatatatatatttat

SEQ ID NO: 6778 - DNA, 416 bp, Glycine max
agctttaatgtgttttcccttgtataactactaactgcagtaacagattctcctgaaatctgttgagtcccacatcgagtagaagtggaaaggttgagcaccatataagtgaggagaagacccataaatctgagccttaaggttttgggttagagtgtgatgtcagatctccttatgtggtggctcgtggtccacaggtgtacccctcgaatctccccaacaattggtatctgagctgatggttcaagttggtgaccggctcagacgagtatgcaagtactgcaggtggccaaaatggctagcggcacagcgtgccccgcaggtggagcggagtggccagaatggctagcgggcaaggcaagtaccgcaggtggccatggctatacttgtggatgataaagacttccgctagaggg

SEQ ID NO: 6779 - DNA, 349 bp, Glycine max
tcttcttgactcatcttttccttgaagtggcgtctccaatcatctttcttccttcttcattatgctgccattaaacttcaagaagaaaaggactccattgatgaagaagatgcaaggcctacacgttccacaaggagctacataataattacatattaaaagctcagagaaaccgcccacattcctttataaacaccttagatcaaggtaacagtctatctccactatctttacaatctttcaaaaatcttcaagatttctcttagaaaaagatcacaaaaaccctaattatcttcacaaaatcactatgacatgctacagcaaaaacactaatcctgccatgtccatc

SEQ ID NO: 6780 - DNA, 409 bp, Glycine max
  unsure at all n locations
agctttctccaccaagttgcctgatgcctgaaatgtcttntttgatggtagtggtcctagatgcagggaagaatttctccaagaacaccctcttaaggtcatcccagctgaaaatagacctgagagcaaggtagtataaccaatcttttgccactccctccagagaatgaggaaaagccttttgaaagatatgatcttcttggacatcagggggcttgatggtgaaacaaacaatatggaactccttaagatgcttataaggatcttcacctgcaagaccatgaaacttgggcagcaaatgtattagtccagtcttgagaacatatggaacacccttatcaggatattgaatgcataagctntcataagtgaaatcaagtgcagccatctccctaagagtcctatcacg

SEQ ID NO: 6781 - DNA, 246 bp, Glycine max
taatatatcgagacgataaaatttttcaacggtttctctcgtgagattaaaatggtcataagttttaactcggatgtccgattcaggagcttcacatatcgagatgcacgaaattgaacactggaagctctagagaaattctaatggtcataaattttcacacagaggacctattcacgcgcttaatatattcagacgctcgaaattgaacaatggaagctctcgagatattactatggtcataac

SEQ ID NO: 6782 - DNA, 410 bp, Glycine max
ctcaagcttgaagaatttacataaaattggttatggggatgattctgcaccgaagttatcttatcgagaaccccaaaaggcacctaatgggcatgctgttatgcatgttaaggatatactgcctcgaggccttatcaactctgggaatctatgttttcttaatgcaaccatgcacgctctcttgtcatgctcacctttcgttcatcttttacagcaattaagaactcgcaaccttcctaaggttagtttttctgctgctgcatgtcaactattaaccaattaactaatactgccatgtacaggttttagcttaacttatagatgagataataacattaaaggaataaagacctaaaagatgtattatgcattcagatttcccttatgctagaaaattattgaactgatat

SEQ ID NO: 6783 - DNA, 336 bp, Glycine max
tttgggtcgtacttccattgctaagttcaagtctttaaaatctctcgatcaattgcaattctttcaccatcataacgaacatatgcaaggacttcttgctcaaagcattcgccacaatgttagccttgctgggatggtatgacaactcaaagtcataatcctttagaaactccatccatctcctctgtctcatgtttagctctttttggtcaaacaggtacttcaagcttttgcgatcattaaataatttgaatattgcccgaaagagataatgcatccatatctttaaccataaaccattgttgccagctctaagtcatgggtaggatagttcac

SEQ ID NO: 6784 - DNA, 250 bp, Glycine max
tttaatttcgagctcttggatattatcttgactcaatcggacatttgtttgaaaagttattgtaattcgaatgcgctcatggctacagtattgcatttcgagcgtctcgatatattacgggactcaatcggacattcgagtaaaaagttattgttgcttgaatttgctcagagcttcggccttccatttcgagcatgtcgatatattacgggactcactctgacgtccgagtaaaaagttattgtcgttt

SEQ ID NO: 6785 - DNA, 406 bp, Glycine max
tctcgacatatgatgcgcccgaatcggacatctctgtgaaatgttatgaccatttaaatttcgcgagagttttcgatgtttaatttcgagcgtatcgatatattataagcctgagtcgtacatccgtgtgaaatgttatgaccatttgaatttctcaagagcttctgttgttcaatttcgagcctctcgacatatgatgcgcccgaatcggacatccgtgtgaaaagttatggccatttgaatttctcgagagcttccgatgtttaatttcgagcgtatcgatatattataagcctgaatcggacatccgtgtgaaaagttatgaccatttgaatttcacgagagattccgttgttcaatttcgagcgtctctatatgtgatgcgcctgaattggacattcaagtg

SEQ ID NO: 6786 - DNA, 269 bp, Glycine max
ttgaattggatgggctatcgattaagatgcttcctgaacaaaacacattgcccaaaaatcacttcgaggcgaagaagaatttatgtcctgtgggaatggaatacccaaagatccatgcatgcactaatgattgcatattatacagaaatcaagttgcagaaatgcataagtgccccacatgtggggtatcatggtacaaagtccaagataacaaatttgttgatggtgcaagcaaaagcaatagtcatttagcaaaggtgtgctggtat

SEQ ID NO: 6787 - DNA, 252 bp, Glycine max
tctacatcagacttctttcaggtgctggaactatttcacatggacttgatggggcctatgcaagttgaaagccttggaggaaagaagtatgcctatgttggtgtggatgatttctccagatttacctgggtcaactttatcagagaaaaatcagacacctttgaggtattcaaggagttgagtctaagacttcaaagagaaaaggacagtgtcatcaagagaatcaggagtgatcatggcagagagttgaaa

SEQ ID NO: 6788 - DNA, 248 bp, Glycine max
tgcgagaaattcaaatggtcataactttgaactcggatgtcctattcaggtgcataatatatcgagacgtttgaaattgaacaatggaagctcttgagcagttcaaatggtcataacttttcactaggatgtccgattcaggcacataatatatcgagaagctcgaaattgaacaacggaagctctcgagaaattcaaatgatcataacttttcacacggatgtccgattcacgcacataatatatcg

SEQ ID NO: 6789 - DNA, 246 bp, Glycine max
tgggagcttccaagtgccaattcgtcttcttctttagtccagtcttcttctggcttcaattcttcagtgggctttccttctgtgtccagcatcttgggatgttcccagcctttgatgacagctttccaggttctgctatccagtgatttgaggaaggccaccattcttgctttccaatattcatagttgcttccatcaagaattggtggtctgttcactggtccgccttctttctccatgttcatc

SEQ ID NO: 6790 - DNA, 303 bp, Glycine max
ctcaagctggagtccatgcgtcacgttttggaccttttgatttacatgttacaagctgttaatcccggtgatcatgcagtaagttaaactgtactgcttggctttcttgaatcctccgtgctactaagtaaaataattaaatgtttggtttttatgctttgtaggctgtaaaagacgaagttattattgatcttgttgaccgctgtcgcacaaaccagaaaaaattgatgcagatgctaacaactactgggttagttccactcagctattccatctggcacacacccaaatgtactgtgtgtt

SEQ ID NO: 6791 - DNA, 300 bp, Glycine max
  unsure at all n locations
tatgctgcaaatatttacaatagacctcctcaacctcagcagttaaatcaaccatcgcagagcaattatgacctttccagcaatagatacaaccctggatggtggaatcaccctaacctcagatggtccagccctcagcaacaacaacagcagcctgctccttccttccgaaatgctgctggcccaagcagaccatacattcctccaccaatccaacaacagcaacaaccccagagacaaccaacagttgaggcccctccacaaccttccctcanagaacttgtgaggcaaatgactatg

SEQ ID NO: 6792 - DNA, 397 bp, Glycine max
tctgaacaatttttcaggcaactgcagggattttcaatacacctcttatgtcagaaactttgatcacttaaaaggaaaaaacttagataaaaagagcatgttttaaaaacaagaacattgatagtcatctcaccggatgccatgattcatcattttcagcatgaccatgatgttggtgatgagtcctatgactgattctcctgtataaaatatcagtttcaaacatgaattcaaaactaaaaaaaagagtaaaatgtgtttttatccctacaaatatctcaaaatttgattttagtctttacaaaaaataatatatttttagtctctacatttatcaaaattaatgtggttttagtcattcatcaagactaaaaaatcttattgttaaaatgtagag

SEQ ID NO: 6793 - DNA, 400 bp, Glycine max
gcctattctatgtgatttaccaagcacaccatgatcttttaattcaagttcatctagtttatcaccacctaacagaatttgtatctcaagtgctgggagcctttttcactaacatgaactaatctcaaatgccagagttttgctttatcaatcaacgtactactagctaccgatgcatgtccaataatagtggaaccttcaagaataaacaagccattacttttattcttgttacccttagctatgagtaaagatacatttgaaatcttaagaacaccatttggaattctagttgcatatcctagatcatcaaacatgtctatggaaataagattcctcttgagctttggaatgtaccttacatttttcagtagatactctctgttatcacacatcttca

SEQ ID NO: 6794 - DNA, 323 bp, Glycine max
taaacattctctttcgagcctccgtattattattggactcaatctaacatccgtgaaaaaagttactgtcgttagaatttgctcacaggttcaacattcaatttcgagcgtctcgatatattactggagtcaatcagatatccgagtaaaacgttattgtcgtttgaattggctcacaagttcaacattcaatttcgagcgtctcgatatgttatgggactcaatcagacatcccagtacaaagctattggcgcttgaatttggtcagagattcaacattcaatttcgaacgtctcgatatcttacgggactcaatcacacat

SEQ ID NO: 6795 - DNA, 276 bp, Glycine max
  unsure at all n locations
tgtcacatgttcatgcaacaattgttatccgtggctatacgagacatcttgctttacaaattcggttatccataactcgcttgtgctnnttcttccatgccatatgtagcaaagtcgttgatcctgtgaaagttgatgagctggaaaatgatgccgcaattatactgtgctagttggagatgtatttccccttgctttctttgacatcatgattcacttgattgtgcatctggttagagaaatcaaatgttgttggcctgttatttgcggtggatg

SEQ ID NO: 6796 - DNA, 317 bp, Glycine max
  unsure at all n locations
gccagaatcagacatgcgagtgtatatgttatgaccattngaatttctcaggagctttcgttgttcaatttcgaatttctcgatatatgatgcgcttcactcagacatccaagtgacaagttatgaccatttgaatttcacgacaggttatgttgttcaatttcgagcgtctcgatatatcatggggcttagttatacacccgagtcaaatgttatggctgcttgaattgcctagagctaccgtattcaagttgagcgtctaatatattatgccctaaatcggtattcgattgaaggtatgacctttgaatcctcga

SEQ ID NO: 6797 - DNA, 320 bp, Glycine max
gcaacaattgttagccgtggctattctatacatgtagccaatttatgtcaggataacgataactcgcctgtgctctttctcccgtgctatatggagcatagacattgatccagtcatgtttgatgagttggaaaatgaggccacaattatactgtgccagttggagatgtattttccccctgctctctttgacatcatgtatcacttgattgtgcatctgggcagagatatcaaatgttgtgcgcctgtttatctacgatggatgtacccggttgagcgatacatgaagatcttaaaaggggatacaaagaatctatatc

SEQ ID NO: 6798 - DNA, 441 bp, Glycine max
  unsure at all n locations
ncgatccaattcatacgancaataactttgaatcggatgtccgattgtgtcccatangatatcgagacgctcgttattgaaaacggaagctctaacaaaagtcaaacgacaataacttntaacttggatgtccgattgcgccctgtaatatatcgagacgctcgaaattgaaaactgaagctctaagaaaagtcaaacgacaatatactttaactcggatgtccgattgagtcctgtaatatatcgagacgctcgtaattgaaaactgaatctctgagcaaatacaaacgacaataacttttgactcggatgtccgattgtgtcctgtaggatatcgagacgctcgtaattgaaaaccgaagctcggagaaaaatctaacgacagtaactttaactcggatgcctattgagccctgaatatatcagacgctctaaatgaaa

SEQ ID NO: 6799 - DNA, 370 bp, Glycine max
  unsure at all n locations
cttggccatgctggactcgtttgttattgatttccttggcaatttgatgcttagagacatcaatatctatctctccatcagtaggtctgcccagatatttgttgatcacagcaggngagaatctaacacactttcctctgacaaacacttttggaaaatcatcacttttcctgttggatatgccaaagggatggtggacaatgaattccctgactaggccttcataacagcctcccaactgggggactgtcttcagtagtccagcagccttagaagagtgtccatggtctctttgcaatccaaggcatctcttcacagttctctttcacccgcaagtctgcggtgatacacatatttccacttctcaaca

SEQ ID NO: 6800 - DNA, 433 bp, Glycine max
  unsure at all n locations
aaacgtntacatataggataagatctttaaaaccagtgcaagaccagacaatttatttcatgttaatattattgccaaaaaaagttattgtttatttgaaaagtatattgtatgtgaattaaaagaatcttgattgttggagaaagcaactttagattgaggagaaattttatcaagctacagacatatactccaaatataacaaattagaataatgataagcaaagtaaactaagtaaaaaaaaaacaccttcttttccttcgcaatctttgagagctcttcaattatgtaaccttttgctcgagcatcttcacagagagaattgaagtccatggatataccattntcttgggcccaatgttcaagtgcttgcttaactgggttaacaacagccacaaggataggcctcaaactgtttcataaacccatatc

SEQ ID NO: 6801 - DNA, 406 bp, Glycine max
  unsure at all n locations
cttctatctttttagcatatctnttcaaatattnttcaatatttttgcatntttaagttgtgttgtgacattatntctttaatatgatttgaacatctaaatttttttatcatcatcatatcggtgtaaagtattcactgactctatatataattaatctccactaaaaaccaacctaataacactaattgattcaaatntacactatattcaaattaagaaatgctgcagagttattttaaaattatttaattatatataatagtggtagtgaaaagtacacaattattaagaagaatttccttacaaaaattgaataaaaaatacatttaaaatataatctcttttgcataataagagtatatatatatatatatatatatatatatataattatatatatatc

SEQ ID NO: 6802 - DNA, 294 bp, Glycine max
  unsure at all n locations
ttgtcgcatgcaagcttatagaaatgaaatggcataacttctaactctgatgtccgatgcagacacacaacatatcgagacgctcagaagtgaacaacagaagctctctagaaattccaatagtcataactgctcacacagatgcccgatgctgggacataatatatcgagacgctcgaaatagaacattgaaagctctcgagaaatccaaacaggcctaactnttcgctcggacgtccgactcaggagcataacatctggagacactcaaaattgaacagcggaagctcataa

SEQ ID NO: 6803 - DNA, 398 bp, Glycine max
  unsure at all n locations
cctctaaatgagctacaggtgtataagttnctntgtagtctatnccttcttgttgtgagtattctttagcaactaaccttgctttgtttttcacaacctttcaaatttcattcagtttggtttgaaagactcattactctccaatagctttctttctttttggaaattcgactgactttcaaacatcattcctctgaaactgatcaagctacttttgcattgctgtaacccaattgtcatcctgcattacatcatcaatgtcgttgggtctcatttcagaaatcaatgcaatatgctcttatgttctgagtgatgatcctgtataacatgatcaactagatcaccaataattgactttttggatgattctttatgatgcattcaggggtcctcttacc

SEQ ID NO: 6804 - DNA, 432 bp, Glycine max
  unsure at all n locations
agcttattgtatatgagtgcatgtccaatggatgtttcttatgatgacctatactctagtgataagaaaaaggaaccactaacatggaaacagaggctaaagatctgcacaaaagcagcacatgaccacactactntgacacatgtgtcattaggccgatgttaaaactgctttttgtagtagtgttggatatatgatctctaagaaaatgatgtcttatctctatatgtttgggtctagaatgcatgataggaattttagatagattgataacacttgtgttgtcacatttcaagggaatatgatcaaggactaatatcttgcacacaagcaaacactaagcataatatttggtcaactgtagttaagtaaagaagtgaccaattatacctctataccttgactcataaaatgatttacatttctcatcta

SEQ ID NO: 6805 - DNA, 361 bp, Glycine max
cacaacagggagtgaagattgctgaaaaccctagccttgcaacaagtcctatggaagtagacacggagatggacaagataatccgcagtattgtgagtagcattttaaaagacgcctctgttcctgaagctgatgaagatgttccaacatcttccaccccgaatggttctgtgcctgatgttgagaaagatgttccaacatcttccggcccaaatgctgaagtactctcttcccccagcaaagagagatcaacagaggaagatgatcaagcgacaaaggagacccctgcaccaaaggcaccagaacctgctccaggtgacctcattgacctggaagaagtagaatctgatgaggaacccat

SEQ ID NO: 6806 - DNA, 472 bp, Glycine max
  unsure at all n locations
tatagcctcggcagcttcatcctcagatccctcttgttggactaggcttatattaaacaacattataatcacaacttatttaaaaactaaaaatcttgcaatctatccctagcaatgcaattatctagccttgctctatcaagttctaaggaaacagtacacttcccagttcctaacagtacacaccaatgggtgatcagaccataagcatgcaacagtaaagcatcgatagaagcaatgaaaacatgaaacacactngctagtgtttagctctactgagctttaaaagattggctaagattttggtaaaacataagcacttatacaatgaaggaaagctggagttgctgcacatgatgtccaacgttatgtcaaggaataagatctggctgacaacgtacaaagcaagataaaatggcanatgaagaatcgaagttgcaggatccacgatgtcggatacaatgtcctgaca

SEQ ID NO: 6807 - DNA, 417 bp, Glycine max
  unsure at all n locations
acccaccatcgacatagggcttaagctcatctatacattgtcctgtngttccatcattattttgcataggtacaagagccacgattatgcacttgaataaatatttgatggatgttgattgattgcaccattctatgttgaggtaatcttgatatttcaataataagtttggattgtatggcactacatatctattgtctagggctatgtgatttttctcaatatattttccatcattacgcctttcataaactcaatatccatcttggtcaacaacagtttcaggttgccaattttttgaaaaaaaatctagaacacttgccatctttcatgcatggcaactttctgttagcattaccacatatgccatgcatcatatgtgatgtagctccatgtggagcttgtaggccttggatc

SEQ ID NO: 6808 - DNA, 328 bp, Glycine max
  unsure at all n locations
agctatagcatccaataccctgatgatgatgtcctatatgttcttaagactggactgattcatttgcttccaaagtttcatggccttgcaggtgaagacccgcacaaacatttgaaagaatttcacattgtctgctctaccatgaaacccccagatgtccaagaggatcacatatttctgaaagcttttcctcattcattagagggagtggcaaaggactggctgtattaccttgctccaaggtccatcacgagctgngatgaccttaagagagtattcttagaaaatatttccctgcttccaggaccacagtcatcaggaatgatat

SEQ ID NO: 6809 - DNA, 352 bp, Glycine max
  unsure at all n locations
agctatgctganacattataatagacctcctcagtatcaaaaccaacaacagtagaataattatgaccttccaagcaacagatacaatccaggttggaggaatcatccanatctgagatggacaagtcctccacaacaacatcagtctgtcctttctttccagaatggtgctggtccaagcaagccttatgttcctcctccaatgcagcaacaacaaagacaacaagcagttgaggccccttttcaaccttccttagaggagttagtcaggcaaataaccatccagaatatgcaatttcagcaagagacaagagcctccattcagagtctgacatattagatggtgcagatg

SEQ ID NO: 6810 - DNA, 330 bp, Glycine max
tgagggaaaacttgatgccttggttattctagtaactcagcttgccataaatcataactcagcttgccataaatcagaaattctgctgatcaccatacagatctctgtccttctttgcagctatctggagtcaatgagcaacttgaagcccatgctgcaaacatttataatagactccctcagcaacaaaaccaacaacaacagaataattatgatctttcaaacaatagatacaatccaggttggaggaatcatccaaatctgagatgggaaaatcctccacaacaacaacagcagcaacaacaacagtctgtccctcccttccagaat

SEQ ID NO: 6811 - DNA, 343 bp, Glycine max
tgcacttgaggccaacaagggagattgaccattctttttgcctgaaagaaccaacgacaatgcttacaaagtcgagctgcccggcgagtataatggtaattccaccttcaatggccctgatccatccctcttttgatgcacatggagaatccgaatcgaggacaaaccccttctcaagaaggagagaatgatgaggacatgttcaagagcaagggccaggatccactcgaaggaattggaggacccatgacaagggctacagcacggaaagccaaggaaagcctccaacaagtggctgccatactatttgaatacaagcccacagctcaaggagaaaagccca

SEQ ID NO: 6812 - DNA, 238 bp, Glycine max
agcttttatttaaggttcgttcctaatttatctacaattgcatcacctctcaatgagctggtgaagaagaatgtggcatttaccttcggtgaaaaacaagagcaagcctttgctttgctcaaggaaaagcttactaaggcacctgttctagctctttctgacttttctaaaacttttgagctagaatgtgatgcctctggagtgggagttggagctgtattgttacaaggtgggcacc

SEQ ID NO: 6813 - DNA, 341 bp, Glycine max
tttaaaacacaaactatgttcaaacctataaggagtatacttgaaataagtttatttgagtcttacctatatagttgatttattttaaaactcgaacttgactatatataaattataacattatatatttatatttagaagctcctaaaaaatcttactaaatataatctataaggtgtgataccaatcttttaatatcaaacctataaggtttgaacatatttcaagtatacatttaaacttatttaattattaaaacaaaaacttgaacaaatatttattgatttgaacttaataattatgaatgactcagttcatttccactttttgacaccatcatc

SEQ ID NO: 6814 - DNA, 235 bp, Glycine max
agctttttggttcaattacgagcgtctctatatattatgtgcctgaaacggacatccgaatgaaaagttatgagcatttgaatttctagagaacttccatttttcaattttgagcgtctcgatatatcatcggcctcgttcgtacatccatgtcacaagatatggccgtcttaattggacaagagcttccgtgttgaatttcgagcgtctcgataaattatgtgcctgaatcgga

SEQ ID NO: 6815 - DNA, 235 bp, Glycine max
agctttttgaatgtatatattttaatttgcacacgcaattatgaatcagtgaatacaaggaagagaatcaagcatacatactgatgaaatttgatgtcctccaagtcaattgattttcccttggtcgttctaccttgtgcctctaataatactctatcatttaacccaagtttacactcaggcataccactgcattgtacaaaccatggattgaataatactctagcacagaatt

SEQ ID NO: 6816 - DNA, 343 bp, Glycine max
tgggatgaaacaagtgtgattcatcataaattttatctctgctgagaagaaatttcttttcggatagtgaccagatcctatagcctttcaccccatcaccataacccatgaacagaccctttcttgatctaggtatcagttttccttcattgacatgataataagcattgcagccaaatactcctaggtttgagtagtttgctgtttttccattccagatttcaataggagttttaagtcctatagcagtagagggtgttctattgattagaaaacaagttgtattgatagcttctccctaaaaacttctgttgagaccaacattggatagcaagcatcttgt

SEQ ID NO: 6817 - DNA, 330 bp, Glycine max
tttgttgttcaatttcgagcgtttcgttatattatgtccgcgaatcggatatcctatgaaaagttatgaccatttgaatttctcgagtgcttccgttgttcaatttcgagcgtctcgatattttatgtcctcgaatcagacatcggagtgaaatgttatgagcatttcaatttgtcgagagcttccgttgttcaatttcgagcgtatcgatatattatgtctccgagtcggtcttcattgtgaaaagttatgaccatttgaatttctggacagcttttgttgatcaatttcgagcgcctagatatattatgtccgcgaattagacatccg

SEQ ID NO: 6818 - DNA, 315 bp, Glycine max
  unsure at all n locations
tgaaattgaacaacgaaagcgcncattaatttatttggtcataacatgtcacacggaagtctgcttcaagcgcataatataccgcgacgcttgatattgaacaacggaggctctcgagaaagtcaaatggtcttaacttgtcacacggaagtcgagattcacgcgcgtaatatatacgcgaagcttgaaattgaacaacggaagctctcctaacatatgaatggtcattacatgttacagggaagtagaattctagcgcataatatagggacactctcgaaattgaacaacggaagctctcgagagatttaaatg

SEQ ID NO: 6819 - DNA, 237 bp, Glycine max
agcttttcgttatattatgcaccttaatcggacttccgtttgaaaagttttgaccatttgaatttctcaagagctttcgttggtcaatttcgagggtcttgaaatattatgcgcctgaatcggacttccgtgtgataagttatgaccatttgaatttctcgagagcttccgttgtttaatttcaagcttctcgatatattatgcaccttaatcggacttccgtgtgataagttatga

SEQ ID NO: 6820 - DNA, 238 bp, Glycine max
agcttttcatttattcaaatggtcataacttttcactcggaggtccgattcaggcgcataagatatcgagaggctcgaaattgaacaacggaaggtcgcgagaaattcaaatgctcataacctttcacatggaggtccaattcaggcgcataatatatcgagacgctcaaaattgaacaatggaagctcttgagcaattcaaatggtcataaccttacactcggaggtccgattcagg

SEQ ID NO: 6821 - DNA, 350 bp, Glycine max
  unsure at all n locations
tagctacacacactcatctattaacttagcttaccttcnngacaaaatacatgaaaatacaaaaaaaaaagtccctactacaaagactacccaaaatgccctcaaatacaaggctaaaaccctatactacaagaatggccaaaatacaaggcccaaaagaaggaaaaacctattctaatatttacaaagataagcgggctcgtacttagcccatgggctcgaaatctatcctaaggctcatgagaatcctagggccttcccttggatctctagcccaatctacttggagtcttctacccaatgcccttgcggggtaggattgcatcaatcttgatacatataaagcaagc

SEQ ID NO: 6822 - DNA, 349 bp, Glycine max
  unsure at all n locations
ctcaagcttggagataccatcattttcatattattctaaagttntttcccgaatacttccaaaaaatgcgagttgtatactcactaaataatatcaaagttttgaggaaaagaagaaaagaatataatgtcaaactaaatggaaaatgagattgtccaaaatcctaacaatgattgatctccaatatcaaatttaaggtaaagacaaatgctagcgctaattttatgtaattctcattaaataaagagtgaagtaattaaattatttaataaaaattacattttatctaataatataaaaattgtgctgttaactttttttagaaaaactaagcatttttaaatattat

SEQ ID NO: 6823 - DNA, 350 bp, Glycine max
tactcaagcttcaaggataatggtctcatcataatatttatttcctgaatggaattcaataaataggcctcctattttcaatggagtgggttaccattactggaaaacccgtatgcaaatttttatagaggcaatagatttaaatatttgggatgcaatagaagtagggccctatattcccactatggtggcaggaagtaaaaccatagaaaagcctagggaagaatggagtgaagaagaagagagattagtgcaatacaacttaaaagccaaaaatataattacatctgccttaggaatggatgagtactttagggtatcaaattgtaaaagtgcaaaagaaatgtggg

SEQ ID NO: 6824 - DNA, 336 bp, Glycine max
ttcgagaaattcaaatggtcataacttttcactcgcatgtccgattcaggcgcataacttatcgagacgctcgaaattgaacaacggaagctctcgagaaattcaaatggtcataacttttcactcgcatgtccgattcgaggacatattatatctagacgctagaaattgaacaacggaagctctcaagaaattcaaatggtcataacttttaactcgcatgtccgattcaggcgcataacatatcgagacgctcgaaattgaacaacggatgttctcgagagattcaaatggtcataacttttcactcgcatgtccgattcacgcgcataacat

SEQ ID NO: 6825 - DNA, 230 bp, Glycine max
tagctttctttgttgaatatctagtgtctcgatacgcgatgcacctgaatcggacatgcgagtgaaaagttatgaccatttgaatttctcgagagcttccgttgtaaaatttctagcgtctcgatacgctatacgctgaattggacatgcgagtgaaaagttatgaccatttgaatttctcgagaacatccgttgttcaatttcgagcgtctcgatatgttatgcgcctg

SEQ ID NO: 6826 - DNA, 344 bp, Glycine max
tgtaacaccccgacgaattacaccaaattgagtaggatctggagtctgtgtatgtatgagattgtatagttaagaataacttaaaagaattaattgatactacctataccaacaaaatacatctcttttttggtagccctcacttaagaacttcatagttaagtgtgatttccttgaagtagttatgggatgagtgaccttctgagaaattttctagaatatgtgagtgatgacaaaatatgttgaaaagtctcgtgttggtttgtggagttagttatttatcttgaaagcagacatggttgaatttcaaggttttggaaagggctacctacaaaggattctga

SEQ ID NO: 6827 - DNA, 231 bp, Glycine max
  unsure at all n locations
agctcaattctttatnntgagcgtctcgatatattacccgattcaatcggacatccgagtaaaaagttattgtcttttgaatttcctacaagcttccgttttcaatttgcaacgtctcgatatattacaggactcaatcggacatccgtgtataaagttattgtcaattcaattttctcagaacttcggatctaaattttcagcgtctcgatatattacgggactcaatca

SEQ ID NO: 6828 - DNA, 351 bp, Glycine max
tcagaattggttaagcatggcttatttggtgatcgatcatctttgtaatgagtttgagggcacgtacaggttcaccgattgggacaccattcttttctccacttttcttgtatgaaccctctgttctggagatcccgggtcctggtttacaagcggagtacatgcaatcttggacataaaaagccgtgtagtaattgacgccaatgaaatccaatcctctcttgagtttctctttttcgtagctggaaaatttgggcaagaggcttccaagaacgttctccatctctgtagggtactttccgaatatgattgggtccaagaacctgcattataataaagtgttactctggg

SEQ ID NO: 6829 - DNA, 238 bp, Glycine max
agcttttattttttatacaagaatgaagctctgataccacttgttggacaagtggcctcagatatcttaagaagggggggttgaattaagatatcacaaattatttccccaattaaaaattctatttaactttctattcaagttataaattcccttaataatgaatttcttaaatattgattcaaatagaacaatttgaatatgaatataaaacaataataaataaaggagtttaagg

SEQ ID NO: 6830 - DNA, 238 bp, Glycine max
agcttttatttttggttcattcctaatttctctacaattgcatcacctcccaatgagctggtgaagaagaatgtggcatttacctgggtgaaaaacaagagcaagcgttagttttgctcaaagaaaagcttactaaggcacctgttctagctcttcctgacttttctaaaacttttgagctagaatgtgatgcctctagagtgggagttggagctgtattgttacaaggtgggcaccc

SEQ ID NO: 6831 - DNA, 342 bp, Glycine max
tgaagaccataagcatactgttcaatttttgtacggtccaagcagtcaatgcagttggtacggagaactccactctgaaaatgtggtgcatcactaccaaaattatcttttttattctgatggttcatgtcagtctctttgtcttgattaaccacagaatttagcatttcattactgttcccaatcctcacaagatccccagaactagctctcagatctctcactgaagtatccctataaaaatacacaatgagttgaaaataaaaatagaacttcctttctctaaatcttgcacttttacaattataaaatagaactgcaataatattaagcaaaaaaaag

SEQ ID NO: 6832 - DNA, 235 bp, Glycine max
agctttatgaaattttgcaacatcgttttggatatttaacaagaacattctatttcttgacattggtaccttggtaattagattatttctcccatctctgatggaaagactagaatctttcatgtgaatatcatagccttttttgagtaattgtcccaaactcaaaatattgttcttcatatttgggacgtagtagacatttgatatgaattcatgtcttgcatccttcaaatgg

SEQ ID NO: 6833 - DNA, 238 bp, Glycine max
agcttgttttttgatacattgatcattcgtttgtgttgaagctgctcgacctttttgactcagaagaccaaagagagagggattacctgaagactatcctccaccgtatttatggaaagttcatggtgcatcggccattcattagaaaagccatcaacaatatcttttacaggttcatatttgagacagagaaacacagtgggattgcagagttgcttgaaatattgggcagcataat

SEQ ID NO: 6834 - DNA, 349 bp, Glycine max
tatgctgcaaacatctacaatagaccttctcatcctcagcagcaaaatcagccacaacagaacaattatgacctctccagcaataggtacaatcccgggtggaggaatcatcccaaccttagatggttgaatccttcacaatagcagcaacaattttagaatgttgctggcctaagcagaccatacgttcctccaccaatccagcaacaacaacaacaacaacaactaccccagaaacaacaaacaattgaggcccctccgcaaccttcccttgaagaacttgtgaggcaaatgactatgcaaaacatgcagtttcaacaagagacgaaagaaaagaatccagtaattg

SEQ ID NO: 6835 - DNA, 344 bp, Glycine max
tcaagttcaggaggagagcgaagaagtgtgttttaccagcaagttagaggaactagatctctctctgatatttatcaaagatgtaatgttgctgtaatggagcctgtagactacaatgaagctgcaactgattcgaagtgggtaagtgcaatgaaggaggagcttgatatgattgaaaaacatcaaacatgggagctcacggagaaacctaaagataaaaatgtcattggagtgaaatgggtttatagaaccaagcttaatgttgatggttctgtaaacaaacataaggcgaggcttgttgtgaagggatatgcgcagatgttcggggtagacttctcagaaac

SEQ ID NO: 6836 - DNA, 336 bp, Glycine max
tgccgccacggagttttccgactatgttcttgtgtggtggaagtgattatgcaagttgaagtggacgtttccattgggaaatacaatgataaggtactttgtgatgttgttcctatggaggccagtcacttacttttggggagaccatggcaatttgataaaagagccaatcatgacggttacaccaacaagatctctttcattacttttggtgttgcataaaaaatgtacaatgtaggtcggctaggtttttttgtgcgagctcaaccgacattttgtttcggccgaaactggcatgttcccatttattttggccaggaaaacattaacccacct

SEQ ID NO: 6837 - DNA, 234 bp, Glycine max
atttttctgtaaattcgaatggccataacttttctcacggatgtctgattttgggacataatatatcgagaagctcaaaattgaacaacggaaactctcgagaaattcaaatggtcatgactttttattcggaagtccgattcagggacataactcatctagacgctcaaaattaaccaacaaaagctctcgagaaattccaatggttatcactttttactcgattcggggaca

SEQ ID NO: 6838 - DNA, 345 bp, Glycine max
ttaggcctagttagttacctttggtgtgcttaaatggataatctggtgggaagtgaatggtcaccaggaatacaccaccagcataaggactgtcagttggacccataattgtagcttgccaatgaaacatgtcatcaccaacagggcctactcaagaatggaatacataagattcatgataagcttcccatagatacataactacaaggtaatattcaatattacatattgttttccatttttatatgtaactaaacaaaccctacttagttgttgggcctacatgaaccgtttatcaaaacatcataacctatctacatatagcttctgctactctcaaccaag

SEQ ID NO: 6839 - DNA, 235 bp, Glycine max
atttttttccttaggttgttccatgttgctcatgttgttgctctccttatctctaattgatagaactctcaaacctagggggttgttccacatagacttcttccttaataattccattaaggaatgcactttttatgtccatttgatacaacatcatgtcataatagcattaaagaatagtaaaatgcgtagccttcctgttgtgaataacctttggccataagcctagccttgt

SEQ ID NO: 6840 - DNA, 338 bp, Glycine max
tgaaatcattgagttccaacatttactatctttttcgaacattcctctgaagaattcgtaagcaatatccagtcttccacattttgcatacatatatgtgatggcagatcccacatcaactttgctctccaatcctttctttagaatatcacaatgcaacacctttagaaatacaaggttgacctggcagttggaaaagagtgaaaggagaagggaagaaagagaggtcacggttttgaatcctccaactgacatttctaataaaaactaacaaattaacatttgttgataaaaaataacaaaaaacaatgcaactccttccctaatttcagagcagc

SEQ ID NO: 6841 - DNA, 342 bp, Glycine max
tgtcaaaaagggaagcaagttataaactcttttcaaagcaagaactttgtttctacctcgaaaccccttgagctacttcacattgatttatttggtccctctacaacttttagttttggtggtaattactatggcttagtaatagtggatgattactcaaggttcacatggaatttttttttgaaaaccaaaaatcaagcttttgattcttttcgcaaacttgccaaggtgattcaaaatgaaaaggtctcaacatcgtttcacttagaagtgaacatggaggtgaatttaaaaatgagtcttttgaaaatttttgtgaagaaaatggaattcaccacaaga

SEQ ID NO: 6842 - DNA, 348 bp, Glycine max
ttatccccttcaatgaatttgtacaaataatattatattaaatccagatcgattatcgatactggtggaatttcatgtgaagaagcatcgatggcagaatatcttaatcttgttatatatgtttacgtatttttaaaagtacattttagttaaaaaaatatatttaataaactataatagctatataagaaatttcaaaattaaatagttttaatagtttttagaagctaaaagaaactttaaaaaattcttaaaacaatataatttaaaatattttgagttaaactttataaagatttgatgttcattttaaatataactttcccagaaacttatataaatatttgg

SEQ ID NO: 6843 - DNA, 361 bp, Glycine max
ttataagcgcgggtctgggagacaattgtcattcgttcgcgatatgcgatatcaagcgatatgtcgtaagcaaagaatacccgccagagattgccgacaacgataaaaggacattgaggaggttggcagccggtttcttcatgagcggaagcatactgtataaaagaaatcacgacatgacactcctgcggtgtgtggatgccaaagaggcaaatcacatgatcgaagaagtccatgagggctcgtttggaatgcacgccaacggacatgctatggccaggaagatcctaagagcaggttattactggcttaccatggaaagtgattgttgtgtccatgtgaggaaatgccacaaatgtca

SEQ ID NO: 6844 - DNA, 236 bp, Glycine max
agctttttttgggacatcttgacttgctttccaatctgacattcaccacagattctgccttcttctattttcagattgggaatgcctctaacagcacctttgtcaatgattttcttcatgcctcttaagtgcagatgtccaaatttttgatgccatatttttacttcatcttctttggaggatagacatgtggaggagtaactggtttcttgaggtgtccataggtaacagttgtc

SEQ ID NO: 6845 - DNA, 238 bp, Glycine max
ttttgttaagctatatactaaaggatgcaactagtacagagtcctgcatcgtacaacccctattccaacaccaaaatcctcacattcaatttcaaaagctttatcaaaattacgcaaacaaagcaaaggtgcattggttagcttatctttcaataaattaaaagctttcttatgcacattagtccacttgaacaccacattctttttgacaagttcatttaaaggtgcaacaagtgaa

SEQ ID NO: 6846 - DNA, 337 bp, Glycine max
tttgcaagttggaatcatttattctatctccggcagccaatgggtgagtcccgtctaggtagtcccgaagaagaccggcctcacaatgataaaaaatgagaaggaggaactgattcctactcgggtgcagaaccgttggagagtctgcattgactataggaggctgaaccaggttaccaaaaaggaccattttcccctgccattcattgatcagatgcttgaacgcctggcaggtaaatctcactactgtttccttgatggtttttctggttatatgcaaattactattgctcttgaggatcaggaaaagaccacattcacctgccccttcgacact

SEQ ID NO: 6847 - DNA, 239 bp, Glycine max
agcttgtgttacaattcactgtgacagtcaaagtgccattcacttagcaaatcaccaaatgtaccatgagaggacaaagcacatatatgtgaaactacacttcattagatatgtgattgaatctgagaaggtgaaggtggagaaggtttcaacagaagaaaactcagctgatatgttcacaaagtccctctctagtgtcaagttcaagcactgtctggacttgataaattttgaagatg

SEQ ID NO: 6848 - DNA, 339 bp, Glycine max
ttgaggattttcaaacgacattaactttgtactcggatgtctgattaagtcccgtaatatatcgagacgctctaaattgaatgttgaagctctgaccaaattcaaacgacgataaatttttactcggatgtctgattgagtcctgtaatatatcgagactctcgaaattaaatgttgaagatctaagcaaattcaaacgacaataactttttactcggatgtctgattgagtcccgtaatatatcgagacgctctaaattgaatgttgaagctctgaccaaattcaaacgacgataactttttactcggatgtctgattgagtcccgtaatacatcgag

SEQ ID NO: 6849 - DNA, 235 bp, Glycine max
  unsure at all n locations
atttttaacattcaattncgagggtctcgatatattacgggactcaatcggacatccgagaaaaaagttattgtcatttgtatttgctcagagcatcaacattcaatttcgagcgtgtcgatatattacgggactcaatcggacatccgagtaaaaagttattgtcgtttgaatttgctcagagcttccgtattcaatttcaagcgtctcgatatattacaggactcaatcagac

SEQ ID NO: 6850 - DNA, 338 bp, Glycine max
tttgaactagtctactacattttccctttttattcaaaatgctacaacacctaaagctttccttagcttctcaaatctttcaatctttgctgccttagtcatcacatctattactcgtgattcagtaggacaatagacaactttgatcacacttttgttcacttgttcctttagaaagtgaaattttgtctcaatatgcttgctcctttcatgggagactggattcttggccaagtcaattgcaaatttattatctacaaacaattttataggcttcttcaacttgatcctcaattctgttagtaatgaatcaagccaaatagcctgacaagcaacaa

SEQ ID NO: 6851 - DNA, 333 bp, Glycine max
tcaaccaaggggagatggaccatttttgtgcttgaaagaatcaatgacaatgcttacaaagttgagctgcccggtgagtataatgttagttccaccttcaatgtctctgatttatctcttttttgatgcagatggagaatccgatttgaggacaaatccttctcaagagggagagaatgatgaggacatgttcaagagcaagggcaaggatccacttgaaggacttggaggacctatgacaagggctagagcatggaaagccaaggaagctcttcaacaagtgctgtccatactatttgaatacaagcccaagtttcaaggagaaaagtccaa

SEQ ID NO: 6852 - DNA, 393 bp, Glycine max
agcttctatagaaggttcgttcctaatttctctacaattgcctcacctctcaatgagcgggtgaagaagaatgtggcattttcctgggttgaaaaactagagcaagcctttgctttactcaaagaaaaccttactatggcaactgttctagctcttcctgacttttctaaaacttttcagctaaaatgtgatgcctctggagtgcgagttggagctgtattgttacaaggtggacaccctattgcttattttagtgaaaaacttcatggtgtcaccctcaactaccccacctatgataaagagctttatgccttaataagagccctctaaacttgggagcattaccttatttccaaggaatttgtcattcatagtgatcatcaatcacttatg

SEQ ID NO: 6853 - DNA, 378 bp, Glycine max
  unsure at all n locations
tgtgcctcttcacgtctggaatatgaatgtagcatatagattcaaagacctttaggtgctttgctgatggcttcttgccgttccaagcttcaattggagtcttgtcttttatagacttagttggacatctgttgagtatgtaaacagcagtgtagactgcttcagcccagaatgtgttaggtagtcccttttccttgagcatcgatctagccatctccataattgtgcggatctttctctcggacactccattttgttgaggagaatatgcgactgtaagttgtctctcaatgccttcatcctcacaaaatctttcaaactcgcgagaggtgtactctntgtcgcgatcacttcttagtacttttatcccgtttccac

SEQ ID NO: 6854 - DNA, 392 bp, Glycine max
  unsure at all n locations
agctnttgaacaatctctggattgtttatccccctacttctgactctcacattgaaagccacagctgcacctctttcatatttgatttttggaccatagatttggacaagacttgctttttcacacccatcagaagcacgcaacttcagttgcagtaatgaggtaacaagccaatttatcaaaaaccgaagtctaagtgcagttttattgagaccaagcatattgacatgatcgatatgtcgacatattatctctggttccttcctgccccagtcctgtccatcaccatattctccatcacttgtcacctcttcatcatcaaagctagttgcagacatgtcccctggctctagggtctggcttaggtactctttatgattatcttccatgct

SEQ ID NO: 6855 - DNA, 387 bp, Glycine max
  unsure at all n locations
ntcaaacctactaattaatgattacctgccagccttgagctttaaattataattaaaggatttacaatatggtatgaggagaacaatgaagtcataaatcagtccaaaacgaataaaaaaacacaatatcattcaaacaaaatgtacaaagactcatataacattatataaataaaacattaaaaagaacaaatgagtataaatcttttctgcatagccaaagaaaatcttaaagtacatttggggatttaaccaaacacgtagctttcaacccacaaagtagtacaaaataaaatcaaataaatatttatctatttctccataacccatcaataaagccacaccaaaatcaatggaacancananactaataatatcatatgaatg

SEQ ID NO: 6856 - DNA, 394 bp, Glycine max
agcttcaacatcagaccacttcctctgtgctggatctacttcacatggacttgatggggcctatgcaagttgaaagccttggaggaaagaggtatgcctatgttgttgtggatgatttctccagatttacctgggtcaactttatcagagaaaaatcagacacctttgaagtattcaaggagctgagtctaagacttcaaagagaaaaagactgtgtcatcaagagaatcaggagtgaccatggcagagagtttgaaaacaacaagtttactgaattctgcacatctgaaggcatcactcatgagttctctgcagctattacaccacaacaaaatggcatagttgaaaggaaaaacaggactttgcaagaggctgctagggtcatgcttcatgc

SEQ ID NO: 6857 - DNA, 409 bp, Glycine max
  unsure at all n locations
tgccttgccccttgatatattagaaggactcattttcactatgaatgacaaattccttgggataaaggtagtgttgccatgttttcaaagcccgtactaaggcatacaactccttatcataagttgaatagttaagggtaggaccacttaacttttcactaaaataagcaattggatggccttcttgcatcaacacagccccaatcccaacatttgaagcatcacactcaatttcaaaagatttttgaaagtttggcaacgcaagtatgggtgcattagatagcttttccttaagaacattgaaagcttcttcttgtttctctccccatttgaaaccagcatttttcttgagcacttcattgagaggtgctgccaatgtgctaaaatccttcacanaaagtctataaaa

SEQ ID NO: 6858 - DNA, 336 bp, Glycine max
  unsure at all n locations
tgccttgccccttgatatatttgagggactcatgttcactattaatgacaaattccttgggataaaggtagtgttgccatgttttcaaagcccgtactaaggcatacaactccttatcataagttgaatagttaagggtaggaccacttaacttttcactaaaataagcaattggatggccttcttgcatcaacacagccccaatcccaacatttgaagcatcacactcaatttcaaaagatttttgaaagtttggcaacgcaagtatgggggcattagttagcttttgcttaagaacattganagcttcttcttgtttctctccccatttgaaac

SEQ ID NO: 6859 - DNA, 391 bp, Glycine max
agcttgccttgccccttgatatatttgatgtactcatggtcactatgaatgacaaattccttgggataaaggtagtgttgccatgttttcaaagcccgtactaaggcatacaactccttatcataagttgaatagttaagggtaggaccacttaacttttcactaaaataagcaattggatggccttcttgcatcaacacagccccaatcccaacatttgaagcatcacactcaatttcaaaagatttttgaaagtttggcaacgcaagtatggggacattaattagcttttgcttaagaacattgaaagcttcttcttgtttctctccccatttgaaaccaacatttttcttgagcacttcattgagaggtgctgccaatgtgctaaaat

SEQ ID NO: 6860 - DNA, 403 bp, Glycine max
  unsure at all n locations
tcatgagagagtcaaagatcaaattgttaggattattaaaagctatgctaaacaagccaacaaagggagaaagatagttgtcttcgaacccggagattgagtttgggtgcacatgagaaaagaaaggtttccggaacaaaggaaatcaaagcttcaaccaaggggagatggaccatttcaagtgcttgaaagaatcaatgacaatgcttacaaagttgagctgcccggtgagtataatgttagttccaccttcaatgtctctgatttatctctttttgatgcagatggagaatccgatttgaggacaaatccttctcaagagggagagaatgatgaggacatgaccaagagcaagggcaaggatccacttgaaggacttggaggacctatngatgangacatg

SEQ ID NO: 6861 - DNA, 387 bp, Glycine max
  unsure at all n locations
agcnttggagaaattctaatggctacattttttcactcgaatgtccaattcatgtgcatcatatattcagatccttgaaattgaccacggaagctctcggcaaattcaaacggccataacgtttgactcgaatgtatgatcgatgcccatgatatatcgagacgctcaaaattgaacaaaagaagctctcgagaaattcaaatggctataacttttctctcggatgtctgattcacgtgcatcatatatcgagacccttgaaattgaccattgaagctctcgacaaattcaaacggccataactttttactcgaatgtatgatcgacgcccatgatatatcgagaccctcaaaattgaacaacgaaagctctcaaaaaattctaatg

SEQ ID NO: 6862 - DNA, 397 bp, Glycine max
  unsure at all n locations
ttataaaatctaactaacaaaggatcttaatgtttcatagttaataggacaaggatggagtttgtgaatgtccacctcacctacgaagcagaaaatctttcacgaatgacaacacttgattgagttctccaataaaattcgaaaccaaattctcttgctgctactagaaaagccctttcgtcagttagctgattcaaccagttaccattcctaagggaaaaaccaaatccctttagagcaggctttcgaactaataaaagatatcaatataaggacagtacatgatataatccatctttnctttctattgtgcttctttttgaaggagatctggtagaaattctgcatgactttgctgtcatgtccagtgaaaatgaccactccatagacatgatca

SEQ ID NO: 6863 - DNA, 239 bp, Glycine max
tgccatttaaaaaggcattgttaatatcaatttgtttaagatcccaatgagaggaagtgactgaagtcagaatagttctgattcttataggtttcacaactagggaaaatgtttctttgatatcaaaaccaggttgttgatggaagccttctgctacaagacgtgccttgtacttactgacagacccatctgaattatgcttgactctaaaatcccgcttgcaaccaattggttgccta

SEQ ID NO: 6864 - DNA, 396 bp, Glycine max
  unsure at all n locations
atggacctgagtgttgcccagctacattatatcttctgtaatacttatcacctctatcatatctaataattttcacatttatgtctaattgccattttacttcattgtagtaaatctttaaggcatccattgcctaagaaatctcgggcagtaagtagacataaccataacgtgaataatcatcaataatggtgataaagtatctttccttttcgaagagctaacatcaaaaggtccacaaatatcagtatgcacaatttcaagaagcagagtgcttcttgtagctcctttctttgtatgntttgattattgtcccttaatacaacccacacaaatatttagatccgtaaagtctagataagagagactttcattctttattaatctttccatcct

SEQ ID NO: 6865 - DNA, 394 bp, Glycine max
  unsure at all n locations
agcttttaactgaatttgcaacattccaattgtttttcaaatggtgtaatcgattacaatatattggtaatcgattaccaatgtatctgaacattgaaattcaaattcaattgtgaagagtcacatcttttcataaaatgctttgtgtaatcgattacatggttttggtaatcgattatcagtgacaagttttgaataaaaatcaagagatgtaactcttccaatggttttctcaagattttctcaaggttataactcttccaatggttttcttgaccaaacatgaagagtctataaaagcaagaccttgacttgcatttcaacaattcttacaatctttntgaacatctttttgaacttcttcttcttcttcctttgccaaaagctttctaag

SEQ ID NO: 6866 - DNA, 429 bp, Glycine max
  unsure at all n locations
gacctataaaactcagctgngtacaattctctcatcctatcctccaactcttatgtagaatcaccctcatcggttccccactgcaccttcaccaacgcgatctcctttcctctcaacgacttcatccttcggtcagtgatcttctgaggttgtgctctataggtgaggttatccttcacctgtacctcgtccactgcaagtatatgtgatggatctgggttgtaccgtctcagttgagagacatgaaacacaggatgcaaattcgataaactcggaggtaaggcgatatgataagctacaggcccaatcttcttcanaatctgatatggacctagatactngggtgtcaacttcctagccttaagagctcttccgactccagttacgggagaaaccttcaaaaacacatgttctccttnctgaaaatct

SEQ ID NO: 6867 - DNA, 365 bp, Glycine max
agcttcagaattcaatttctatcgtctcgatatattacaggtctcaatcagacatctgaggaaaaaagttattgtcgtttgaatttgctgagagcttcaacattcaattttgagcgtctcgatgtattacaggacttaatcagacatccgagttaaaagttattggaggttgaatttgctgagagcttcaacattcaatttcgagcgtctcgatattttacgggactcaatcagacatccgagtaaaaagttattgttgtttgaatttgctgagagcttcaacattcaatttcgagcgtctcgatattttacgggactcaatcagacatccgagcaaaaagttatcgtcgtttgaattagctgag

SEQ ID NO: 6868 - DNA, 345 bp, Glycine max
aaagaaataaaattcgacaaaaatataagagttcgagataaaatttgtcaaataaataatattatgatcttattaaaatgtttaatggtgcttaattttaaaaattttctaaggtttctaccataagagctctttttttcaccccatccatgttgtcacatgtgggtgaaaagaggaaagagagggatgggatttctcttgctttaagcataacgggccaaagtgggaggcccacacgaagggttattagctcagtagtaaagtgtgtccttgataattgtgtcggcttggagtggagtgagacatgtcatcgaatatcaaagagatatccacttcgttatgaaa

SEQ ID NO: 6869 - DNA, 404 bp, Glycine max
tcgaatggtcatcgcttcattcttgtgtgcatatattacttcaccaaatgggtcgaagcgggttcttatgctaatgtcacgagatgcgtgagtcttagcactcatcaagacggagctgatttgtcgatacggactccctacgaagatcattattgacgatggcactaatctgaacaacaaaatgatgcaagaaatgtgcgaggatttcacgatctatcatcatagctccagcccttaccggccaaaaatgaatggggctgtagaggctgccaataaaaatattaagcaaattgttcagaagatgacagtgtcatacaaagattggcatgagatgctgcctttcgccctgcacagatatagaacctccgtacgaacttctactggggcaacgccgcattccttag

SEQ ID NO: 6870 - DNA, 381 bp, Glycine max
agcttgaatcggacatctgtgtgtttagttatgaccatttgaatttcacaagagcttccgttgttcaatttctagcctctcgacatattatgcgcacgaatcggacatccgtgtgaaaagttatgaccatttgaatttctcgagagtttccgttgcttaatatcgtgcgtatcgatatattataagcccggatcggaactcactgtgaacagctatgaccatttgaatttcacgagagcttccgttgtctatttacgagcgtctctatatgtgatacgccagaatcggacctctgggtgaaaggttatgaccattcgaatttctcgagagcttccgaagttcattttccagcgtttcgacatgtgattctcctgaatcgga

SEQ ID NO: 6871 - DNA, 429 bp, Glycine max
  unsure at all n locations
ntattgagataactgcctcgagaatcttctttgtaaaaacttccttgggaagctagagcttagctacacacacccctttcataactaagctcacatccttgagaagattactaaagaagctagagcttagctacacacacctttctaatagctaagctcacctccttgagatgagaagctagagcttagctacacaccccctataatagctaagctcacccccatgacaaaatacatgaaactacaaaaaaaatccctactacaaagactactcaaaatgcctcgaaatacaaggctaaatccctatactactagaatggccaaaatacaaggcccaaacgaagganaaacctattctaatatttacaaagataagcgggctcatacttagcccatgggctcaaaatctactctaaggctcatgagaat

SEQ ID NO: 6872 - DNA, 388 bp, Glycine max
agcttaagcatttcttttgatctatcaatagacctaatcttgtcaggaatcctcgccataaaattacatagacttgccaattctaaaagaaaaatgtaataaatccaaaaccatgcaaatgctatttaaagaatgattgtcaatttagaatagaaaataatgctaacaaaaaatagaatagcaacacagactcaaatgagacatgcaataacatttcaatgaatgacaaaataccataaaaactatgatactattcattgaactactaagtcaatacatgcaacaacctgaaccaaaaaagaaaagccaaatcagcaaatagaagataagcagaaacaaaaattatatctctgaacaaataatattgcaaccatcaacaaacaaatag

SEQ ID NO: 6873 - DNA, 212 bp, Glycine max
gcgcctgaatctgatcgtcttgtgattttttgtgaccattcgaatccctagagagctaccgttgttcaatttagagcgtctacatatatcatgcgcctgacttgggcgtacgagcgaaaagtcatgaccaactcaatttctcgagagctaccgttgttctatttctaaggactagatatgttatgcgccgaagtcggacatgcgtactaaaa

SEQ ID NO: 6874 - DNA, 418 bp, Glycine max
agaccttagaaactcagcttcttcacatagtctgcctttgcttgaccttctttatgcttttttacagaaacattaagcataggcaaaagatcaagaggagttagtgggttaaaaccatataccacttgacaaggagaacaattactggtgctatgaacagctctattgtaagcaaattcaacatggggttaacaagctcccccagtttttaagttcttcctcaaaactgtcctaagcaaagctcccaaagtcctattaacaacttacgattgcccatcggcttgtgggcgacaagtggttgaaaataacaatttattgcccaacttgctccacaaagtcctccataaatggcttacgaacttagagtccctatcactaagaatgctgcttggccaccatggagtctcacaatctcctt

SEQ ID NO: 6875 - DNA, 396 bp, Glycine max
  unsure at all n locations
agctttgtgcaaggaattttctagttctatttaggaagaattngagatgtctataatgggagaactaactttctttcttgaacttcaagttaaggaaatgaagcatggaacatttcttttccaaacaaagtactgtgcggaattgattaagaaattcaatatgaaaaagtgcaaagaagcattgacacctatgacaacatccacttattttgacttggatgaaaaaggtaaattagtagatgagtcaaagtacaaaggtatgattggttctgtcctttattagactacaagccgacgacccactattatgcttagtgtttggttatgtgcaatatatcatgcaaatcccaaggaatcccatttaactactgtaaaaaggattatcaagtatcttag

SEQ ID NO: 6876 - DNA, 397 bp, Glycine max
actcagcttaacattcaatttcgagcgtctcgatatattactagactctatcagacatcagagaaaaacgttattgtcgtttgaatttgctcagagcttcaacattcaatttcgagcatctcgatatgttacgggactcaatccgacatccgagaaaaaagttattgtcgtttgaattagctcagaagttcaacattcaatttcgagcgtctcgatatgttacgggactcaatcatacattcgagaaaaaagttattgtcgtttgaatttgctcagaggttcaacattcaatttcgagcgtctcgatatgttacggtactcaatcagacatgcgagtaaacaatgatcgtccgatgaattagctcaaagattcaacattcaatttcgagcgtctcga

SEQ ID NO: 6877 - DNA, 392 bp, Glycine max
agcttggagccaatacaaacgactttttactttttactcggatgtttgattgaggctcgtaatatatcgagacgctcgaaattgaatgttgaagctctgagccaatataaacgacaatgaccttttactcggatgtttgattgagtcccgtaacatatcgagacactcgaaattgaatgttgaacctctgtgcatattcaaacgacaataaatttttactcagatgtctgattgagtcccgtaacttatcgagacgctcgaaattgaacgttgaagctctgagccaatacaaacgaccataactttttactcggatgtctgattgaggctcgtaatatatcgagacgctcgaaattgaatgttgaacctctgagccaattcaaacgacaata

SEQ ID NO: 6878 - DNA, 390 bp, Glycine max
agcttctcgatatattatgcactttatatcggacttccgtttgaaaagttatgaccatttgaaattctcgagagcgtccgttgttcaatttcgatcgtctccatatattatgcgcctgaatcggacttccgtgtgaatagttatgaccatttgaatttctcggtagctttcgttgttcaacttcgaccgtctccatatattatgcgcctggatcggacttccgtgtgacaagtgatgaccatttgaatttctcgagagcttccgttgttcaatttcaagcttctcgatatattatgcccctgaatcggacttccatgtgaaaagttatgaccatttgaatttctcaagaccattcgttggtcaatttccagcgtgtcggtatattatgcg

SEQ ID NO: 6879 - DNA, 422 bp, Glycine max
  unsure at all n locations
gcttatagaatatataatagaagaacaatgtcaattgtttgattctatacatgtttcctttgatgagtctaatgccattcttccaagagactatgaagaaacatatgctccagttgcaagattagaagccattagaatgctcttagcatatgcatccataatgaattttaagctctatcaaatgaatgttaaaagtgcttttctaaatggtttaattcaagaagaactatatgttgaacaacccccaggttttgaaatcccggataaatcaaatgatgtttataaattgcaaaaggctctntatgggttgaaacaagcccctagggcgtggtatgaacgtttaagtaattttctcctacaaaaagaatgtctagaggaaagtggatccacattgtcatacagagaagctaatgatattttgt

SEQ ID NO: 6880 - DNA, 386 bp, Glycine max
agcttaataaatcaatctatggcttgaagcaagcctcctgccaatggtatttgaagtttcatgatgtcgtcacttcatttggctttgaaaagaacatcatggatcaatgtatataccaaaaggtcagtgggagtaagatttttttcttgtgttatacgtggatgacattttgcttgcaactaatgataagggtttgctatatgaggtgaaataatttctctcaaagaactttgatatgaaggatatgggaaatgcattttatgtcattggcattaagatccatagggaaagatctcgaggaattttgggtttgtctcaagagacttatattaacaaatttttagagagatttaacatgaaagattgttcaccaagtgtagctccca

SEQ ID NO: 6881 - DNA, 404 bp, Glycine max
  unsure at all n locations
tctccaagtgttgaattccagagggttctgcttttagttgggagaggttttctaaaagaatttcttccacagaacacagtgctcctctgtcgataaagatgcacttcaattgatgaaaatatccgaggtgcagtcgctttagtttctgaaaccctccacattgaaaatgcaaagtttcaccttcataagcattgccacttaaattgaggaacaacaaccttgacatattttttagtgatttcaatgcatcattagtcaaactggagccgtccaaacgcagttgcacaagatttgggaactgtgaaatccaatttggcaaccttgtaaacgtcccacatatgacaagcttcctaagtgtagacatangtgacgtaatgtacaagtcaattacttcactcctatca

SEQ ID NO: 6882 - DNA, 390 bp, Glycine max
  unsure at all n locations
agcttgaccaggaattatttgtatgggttggatgttgaattctggttgttcctggtgcggagatgatggtacagagggtgaaccaggagctgaagtttcttttggtgcggtagccatggaaaagcagagcgtttggaatgatttcgtaaatttctgagagctgttagggaatgcagaaaacgagattaacacgaaaatataagtttgaatgaggaatgtagagggacgtgtgaagcaacggtcgaatttgctttggttcagtagtgaacgtgctattaatgttaagtgattcgtttgggcacgttcagatatcagtagttgctacaattcctctagcagacaaatgcccagcttgcccctcagttnttcaaactgttttgcatccaatgc

SEQ ID NO: 6883 - DNA, 334 bp, Glycine max
  unsure at all n locations
tgtaaaagagggaagcatatatgatctttnatctaagacaaaacgcgatttctacttcaaaagaccttgaactacttcacattgattaatatggtacctctatatctatgagtttcggaggtaattactatggctgagttatagtggatgattacttaatgttcacatggactttgcttttgaataccaaaaatgatgaaggtcttatcattgtttctcttagaattgatcatggaggtgaatttcaaaatgagtcttttgaaatcttttgtgaagaacatggaatacaccacaatgtttgtcgctcaagaacacctcaacgtaatggtgttat

SEQ ID NO: 6884 - DNA, 391 bp, Glycine max
agcttatacaacataggtgcttattagttttatatggaaaatcacattcgttgtacattccaatgatcgaaagtctctatatgttaaataagatccttctagatcttaagaaaaggattaagaagtacttggtccttaagtaccatgccttagtgttattgaaacactaatgtatcttactatgcgtaaacgatttgatatatcatttcccgctaattcattagcaaaatctaattcttcaccaatatgaagaaatttaaatatttacttcattattttagaggttatatattagatcctcataaaatgatattacatgaggtgatacaacaatttcatgacaatatgtgaaataagccaaaataggcacatcagctaatcatgtagaaat

SEQ ID NO: 6885 - DNA, 383 bp, Glycine max
  unsure at all n locations
agcttgtgcattcaatatcctgatgagggtgttccatatgttctcaagactggactaatacatttgctgcccaagtttcatggtcttgcaagtgaagatcctcttaagcatcttaaggagttccatattgtttgttccaccatgaagccccctgatgtccaggaagatcatatctttctaaaggcttttcctcattctctggagggagtggcaaaagattggctatactactttactcccaagtccatttttagctgggatgaccttaagagggtgttcttggagaaattcttccctgcatctaggaccactgccatcagaaaagacatttcaggcatcatgcaacttagtggagaaagctcgtataagtactgngaaagatt

SEQ ID NO: 6886 - DNA, 410 bp, Glycine max
  unsure at all n locations
tgaagganaactggatgcattggttaacttggtttcccagctggccttgaatcagaaatctgtacctatcgcaagggtttgtggtttgtcctcctctgctgaccaccatacagacctttgcccttccatgcagcaacctggagcaattgagcagcctgaagcttatgctgcaaatatttacaatagacctcctcaacctcagcagcaaaatcaaccacaacagaacaattatgacctctccagcaacagatacaaccctggatggaggaatcaccctaatcttagatggtccagccctcagcaacaacaacaacagtctgctccttccttccaaaatgttgctagcccaagcagaccatacattcctccaccaatccaacaacagcaacaaccccagaaacagccaacag

SEQ ID NO: 6887 - DNA, 391 bp, Glycine max
agctttattacaagtcatagagtttgtagataaatctatattctattctataactttttttacttgcagttcaggagttagtccttgccttgtttagtttagaaaaaagaatacataaatcgaataagaaattgaaagaattcactatcaattcaaatgaagaaaaaaaaattgtttcaaaaggatatcaattgttaagattcaaagaaaaattattactttttatcaatacaccaaggaacacttcaggttaggaatataataatcggattttgaaatcaaataacgcctcaactataaaaaattgaaatattttgaaaaaaaaattattttttttttcaaaatatttcaaaaggtacacaaaacaaataggacaattctaaagcttttt

SEQ ID NO: 6888 - DNA, 405 bp, Glycine max
  unsure at all n locations
ngatagacgactccaaagagcctccatcgttgtcacacgcaaagtattgaccaattgttgagagagcatagagtttctctctcacaccatcttcattggtgcgaatggagcaattgagaagaaagtaacttgccaacacaggcaatatgcgttcaagcctattagccaattgacggtgtggatttggaagcagcaaagaagcaatttccgaggctgacaaagatgaactctctgccttggctatgatatcaaacaaattcatatcaacagcagcgttcaagattgcacggaaaattcagctgaagcatagtgtcaaagctgagagagaagtgtcatccccctttgcttcctctgtgggaagaacctgattttgtttccaattgcaaatataggaattcatgattc

SEQ ID NO: 6889 - DNA, 380 bp, Glycine max
  unsure at all n locations
agcttgtgcatccaataccctgatgaggatgtcccatatgttcttaaaactggactgattcatttgcttccaaagtttcatggccttgcaggtgaagacccgcacaaacatttgaaagaatttcacattgtctgctccaccatgaaacccccagatgtccaagagaatcacatatttctgaaggcttttcctcattcattagagggagtggcaaaggactggctgtattaccttgctccaaggtccatcacgagctgggatgaccttaagagagtattcttagaaacatttttccctgcttccaggaccacagtcatcaggaaggatatctcangtattagacaactcagtggagagagcctgtatgagtactgggagag

SEQ ID NO: 6890 - DNA, 378 bp, Glycine max
agcttccttgagaagctagagcttatctacacacacccctctaatagctacgctcacccccatgccaaaatacattaaaatacaaaaaagtctctactacaaagattacacaaaatgctataaaatacaaggctaaaaccctatactactagaatggccaaaatacaaggcccaaaagaaggaaaacctattctaatatttacaaagaaaaatgggttcatacttaacccatgagaccaaaatctaccctaaggctcatgagaaccctagggccttctcttgcatctctgacccaatcttcttggagttttctatccaatgcccttggagggtagtattgcatcaatatatagaaaaagaccatggtcttcttagctg

SEQ ID NO: 6891 - DNA, 369 bp, Glycine max
  unsure at all n locations
agctttagatgcctttaaagtttttaaggctgaagttgataaacaatgtggaaaacaaattaagatcgtgagatcagatagaggtggggagtactatggtagatacatagaggatggacaagcaccaggttcatttgcgaaatttcttcaagaacttgggattgttgcccaatacactatgcctagttctccggatcagaatggtgtggcagaacgaagaaatcgaaccttattcgacatggtgagaagcatgaggagtaatgtaaaacttcctcaatttttgtagattgatgctcttaagacggctgcgtatatattaaaccgagttccaaccaaggctgtctcaaagacancctttgagttattcaa

SEQ ID NO: 6892 - DNA, 418 bp, Glycine max
tcaagcttgtcatttcatccacctcaaactccttgtttaatttctcatcagcagcgtccagtacttttccttcgacgtacaattgccacatccaattcacaagaggcacaagaaattccccatctttgtaagtcctccttccgcatgcaatttcaggagccaaaaccccgaaactataaatgtatgattcttgctagccctacctctatggatatattctggggaaagataccgataaatccccactactcctgtcctttgagtccttaaccttggatccaccaactttgccatctcaaaatcaccaagcttagtgctaaaatctgtgtccaacaacacattagccaacttaatatccctatgaagaacactttgctctgcatcctcatgaagataacgaagtgccaaagccacgctt

SEQ ID NO: 6893 - DNA, 374 bp, Glycine max
agctttaacttaatcaattcaaaagccttttgtgcttgttcattccacccaaacgcacccttcttcaaacattcggtcataggacttgctatagtgctaaaattctggataaagcgtcgataaaatgatgcaagaccaaggaaagatctcacctccgaaactgttgtagggctcggccaagtcttgatagcatccacttttgtttgatcaacggatactccatctttagacaccacatatccaagaaacaccaccctttcaaccaagaaatcacacttttccctcttcccatagagtttttgtgctcttagggtctcaaatatttgtttcaaatgagtgaaatgctcctctatagatttgctatacaccaatat

SEQ ID NO: 6894 - DNA, 402 bp, Glycine max
tccactggtaggtagcatgcttttatgtacaccatttgaaacagggagaggacaatggatgttttgaaggctgttgtatatgctcataaacaattatcaagctttgtagcccaatctttccttgaagtagctacggtcttttctagtatccttttgatctccctatttgaaactttaactcatccatttgtttgtggatgatagggtggtgctactttgtgtcgaatatcgtagtgttggaggacctttgaaagtcttggcactctaaacctagcaaagatgtttctctttaaggacttaatcattatttttgcatcattagttgcactagcaattgcttccagccacttgttcgcttccggcaagtgcaccagatcgcacaagtagtataaaacggtaaga

SEQ ID NO: 6895 - DNA, 364 bp, Glycine max
agcttaagctccttcaactgcacatggctcttaatgtttgaagagtatccttgtggaaccttcacccgacgaagacactgacaaaaacttatcttctcctttttggacaaggtatggcaagctaggggcaagtaaattttcttcccattagaccttggatgcaactgtgatcgtatgcccatatcagctagatcttgacaggtattgaagccatccttcatcttgccttgaatgttaaggagagtcccaatcacactatcacaaacatttttctccacatgcataacatcaatacaatgtctaacatcaagatcagatcagtacgaaagatcaaagaaaatggacctcttcttccatatgcaac

SEQ ID NO: 6896 - DNA, 366 bp, Glycine max
agcttctcaagggggtgagcttagttattagagggtgtatgtagctaagctctagcttctcaaggaagttttctcaaagaagcttctcaaggaagttttctcaagaaagcttctcaaggaagctacctagtccataaatagaaccatgagcaagaggctccaagaagattgggctagagctgctgaagaaggccctaaggttctcatgcaccttagggtagatttctgagcccatgggccaaggttgggtccaattatctttgtacgtattagactaggatgtcattatatttggtccttgtatttagggctccatattgtaggtagggtaccctagaaatataggatttttcagcccttgtattt

SEQ ID NO: 6897 - DNA, 255 bp, Glycine max
aaaccgagcagttctaataagatttgttatatgaatacccttacgctttgcagatatataaggtgacattttaggattccattttctagtaccgtggccaaaatgaactcctgcttccatcatctcttccaagattatgttccaatatctttttgtcatttatatttatccccacacttttctttcatttcaaaatcgaaattctataaattttttgaaatgaaagaaagagacccggtatactgaaatagaaat

SEQ ID NO: 6898 - DNA, 372 bp, Glycine max
agcttcttacaaagcatacggctttctggatgtagatgatgatatctatacagatggatcttatatatctatatatctatagatagatatatagatatagatatatagatatagatcatacaatgaagtaccgcacgagtgggtatataggaatccaaatctgccgaatcactcatgttatgatcttctacatcctaggtcttcccgttccttcatctggcttatgttcttcatgtagcattcagactgaatgactctatgaaattacgtcgctacttccacatggtacgggtaacgtaggagacatctctatttttcccggggggaatccttagaattaccacagcttagctttcaattcgcctctgacca

SEQ ID NO: 6899 - DNA, 417 bp, Glycine max
ctcaagcttatttagaataagagttgcaagtgcatcactttccacatcctcggcaataatcaataaaggtctttgtctctggagatatgtaggtgtcagcaaatatcaattattttaaaagtcaaatgcaaaagtgaatggcactgctcaccttcaaagccaactctaagactttaactatagcatttatactagagattttcttctcatgaattagaataaggggatcttcaagttcctatagacaacaagacatggcaagtgtaagtacgtacgaaacaaaagaagggtttgtgaacaagtgacttcatacaatccttctacatatattttaatgttgtgaagtagagagaagagataagtagataacatacacatttctggttcttatcgtttgtaatgaaataaggagatatg

SEQ ID NO: 6900 - DNA, 354 bp, Glycine max
  unsure at all n locations
agctntggcaactccttgacaacatagtcatacatgcgccaattcttccatttctcttgtgtagcattgagataaaatcctgcacctgttccagaatgtatatgaaaatcagatatgctaaattgccaatatttaccaattatggagaaatattcagaaaagtaaaatatgccaatatccactaacccagcaataatgttcaagacagtccacatctgatttaggtgggaaagagaaacagaaagaaagagaaagagaggcgaaaggggaagaacagaatagcgaggatagagagaaagaggagagaaacagagggatcaaagaaactgtgaactgcacatcagtcataatata

SEQ ID NO: 6901 - DNA, 366 bp, Glycine max
attccttattttcagaacggaattctatctatagacctcccatctttaatggagagggttaccactactggaaaacccgaatgcacatttttatcgaggcaataaatctaaatatctgtgaagccatagaaatagggccttatatacccaccacagtcaatagagtttcaatagatggtagttcgtcaagtgaaagcataaccatagaaaaacctagagatagatggtctgaaaatgatagaaaacgagtacaatacatcctataagccaaaaacataataacatctgccctatgaatggatgaatatttcagagtttcaaattgtaagagtgctaaggaaatgtgggacactcttcgattaacac

SEQ ID NO: 6902 - DNA, 353 bp, Glycine max
agcttatagtatatcgagatgctcgaaattaaacatcggaagcgctcgagaaattcaatgggtcataatttttcacacggatgtccgattcgggcgcataacatatagaggcgctcaaaattgaacaacagaagctctcgtgaaattcaaatggtcataacttgtgactcggatgtccgattcaggcgcatcacatatagagacgtatgaaattgaataacggaagctctcgagaaattcaaatggtcatagcttttcacaccgaggtccgattcaggcttataacatattgatatgttcgaaattgaacataggaagctctcgtgaaattcagatgggcataacttttcaca

SEQ ID NO: 6903 - DNA, 373 bp, Glycine max
agcttgcctgcattgtgttgttatcaaggtccagcatccagaacccaatagtaaatacaagaacaacccttgttcatgtccctttaaatgctctacaattttagacatatgaatttcattaatgtatgactaaggtcatcatatctgtgaaatttaaaagtcaaagaaataaaatgagtaagaaaagaactagaggatgagaacagaaacctgcaatgctcatgtgtatcacctaatacatatccagtgtctgtagaaaatccaattaatatcacctaaattataagacttgacatagcacatatgtaatgtagtataaaaaaacaaaatcaaagtaagcaattaatgtcacaaatgcttacagctagacata

SEQ ID NO: 6904 - DNA, 404 bp, Glycine max
  unsure at all n locations
ntaagccaattcatacgacaataactttttactcggatgtctgattgagtcccgtaatatatcgagacgcacaaagttgaatgtttaagctttaagccaattcatacgacaataactttttactcggatgtctgattgagtcccgtaatataacgaaacgctcgaaattgaatgttgaagctttgagccaattctaacgataataactttttactcggatgtccgattgagtctcgtaatatatcgacacgctcgaaattgaatgttgaagctctaagcctattcaaacaacaataacgttttactcggatgtccgattgagtgacgtaatatatcgggacgctcgaaattgaatgttgaacctctgagccaactcaaacgacaataactttntactcggatgt

SEQ ID NO: 6905 - DNA, 362 bp, Glycine max
agcttaaacattcaatttcgagcgtctcgttatattacgggactcaatcagacatccgagtaaaaagttattgtcgtttgaattggctcacagctttaacattcaatttcgagcgtctcgatatatttcgggactcaatcagacatccgagtaaaaagttattgtcgtttgaattggctcagaggttcaacattcaatttcgagcgtcccgatatattacgtcactgaatcggacatccgagtaaaaagttattgtcgtttgaattggctcatagcttcaacattcaatttcgagcgtgtcgatatattacgggactcaatcggacatcccagtaaaaagttattgtcgttagaattggctc

SEQ ID NO: 6906 - DNA, 361 bp, Glycine max
agcttagaattatacaataacactttttgcccgaccatgaagttctttttaattatcatgctatcatggaacttcttggtcttttttttgtataactcggcattctcataggcttctaagcggatctcatctaactcactcagttgcaactttctttcctcaccaacttgatccatacagaagttgtaggtcttcactgcctagtatgctttgcgctcaatctccactggaagatgacatgcctttccatagacaacccgataaggagacattcctatgggtgctttgtaggcagtcctatgtgcccaaagagcatcatcaagcctggtactccaatctttcttgcttggctgcacagtct

SEQ ID NO: 6907 - DNA, 383 bp, Glycine max
  unsure at all n locations
ntcctgctcggngatcttttttggcttcacctctgactcgccatacaaggtcaccaggttgaaagactcatggttaaaccttcgtattgcatcttcttgatgctcgaagcatggtagcatcttctttgattatggccatctcttggacttcatccgttgtctcgagttctacccttatgttttcttcattttgttgtttctggaacaatattctccttgtcgacggttccccaactttgatgaggatcatggcgtctgtgccatatgtaagttggaaaggagtttcattggtggttgtctagggtgaacaatgataggcccagagtatactgtggagtttctccttccatagacccttagacatatcgagtctagtgtgcatg

SEQ ID NO: 6908 - DNA, 355 bp, Glycine max
tcatggcatacctacctctatagtgttagatagggatcctaaattgacctctagattttggagggcattccaacaagcttttggggtccaagctaagttttaacactacttatcatcctcaaatggatggttagtcagagaggaccatatagacccttgaaaacatacttaaagcatgtgttcttgatgaaggtggaacttgggataagtttttaccctttataaagtttgtgtataacaatagttatcacactagcataggaatgacaccttacgaagccctttatgggaggaagtgtagatcccctttatgttggtgtgaggtgggtgagaagaccttgatagggccaaacat

SEQ ID NO: 6909 - DNA, 365 bp, Glycine max
  unsure at all n locations
ttgagccaattcaaacgacaataagcttttactctgatgtctgattgagtcccgccatatatcgagacgctcgaaattgaatgttgaagctctgagccaattcaagcgacaatatctttttactcggatgtctgattgagtcctgtaatataacgagacgctcgaaattgaatgttgaacctctgagcaaattcaaacgacaataactttntactcggatgtctgattgagtcctgtcatatatcgagacgctcgaaattgaatgttgaagctctgagccaattcaaacgacaataactttttactcggatgtctgattgagtcctgtcatatatcgagacgctcgaaatagaatgttgaagctc

SEQ ID NO: 6910 - DNA, 395 bp, Glycine max
cggacttcctgtgttttgggaacctctccttcctcatgtgtacccaaaccctatcacttggttcaagcacgactttctttctgcttttgttggcttgccttgcatagctcgcatttttcttttcaatttgaaccttcacttgctcatgcaacttcttcatatactcagctttagcctgtgcatccttatgcttaaacatagcaatgttaggcataggcaacaaatcaagaggagtcaaaggattaaatccatacactatctcaaatggtgaacaattagttgtgctatggacagcccgattataagcaaactcaacatgaggcaaacaggcttcccaagatttaagatttttctttaaaacagtcctaagcagtgtgcctaaagtcctattgact

SEQ ID NO: 6911 - DNA, 374 bp, Glycine max
agcttctatattgcatgtcctagttggccctgacttctccgttttttttttaattgtggattacagaatttggatagggcaattgaccacaaggcattgcatgataccttttctacatttggaaatatcctttcgtgcaaggtagctacggattcatctgggcaatcaaaaggctatggctttgttcaatttgataatgaggaatctgcccaaaaagctatagagaagctgaatggtatgctgttgaatgataaacaagtgtacgtgggacccttccttcgcaagcaagagagagaaagtgctgctgacaaggcaaaattcaacaatgtttttgtgaagaatctatcagaatcaaccaccgatgatgagttgaa

SEQ ID NO: 6912 - DNA, 429 bp, Glycine max
gtgactgtatacatactcaagcttatatatcaaagatctgataatttagaagttgtctgctactcaaactcggattttgctggttgcgttgactctcgcatgtcaacatctggatacatcttcatgatggctatcaaagcaatatcttggagaagtgcaaaacaatcattagttgctacttaccatggaggctgagtttatttcattatttgaagcgacatcacaaggtatttggttaaaaagtttcatggtcgatctacaagtgattgattatgttcctagaccattaaagatatattgtgataattcagctgctgtttttttgactaaaaaaaataaaagtggaagttgaagcaaacacgtcgacattaagtatttagtcttgaaggaacatgtcaaagcaaattaaatcatcattgaaaacatcag

SEQ ID NO: 6913 - DNA, 376 bp, Glycine max
agcttgtaatgtctcttggtgatggtattgagatgcccgatctttttagtgttggccagtttggagagcaagtctactctagtgttgttctcccttggtatgtggaacaactcaaagcaatcaaagtcatcaatgagggtttttgcaacatgatagtacttgaaccttggcttgatatttgtttgcaacttgcccttaaacaaggtatgagtcagtgtaacaccttatctttttggctttaacttcttttgctagctttaggcatgttataagtgcctcatatttagcttgattgtttgatgctttgaaattgagcttgagagcttgctctaaagtaacattgtcgagcccttcaaggatgatgcttgtccctact

SEQ ID NO: 6914 - DNA, 374 bp, Glycine max
tctccatgcaaacttcattagagaggtcaggttttgtacttggcttgccaatgccgtcatggtcaaaaaggccaacggcaaatggcgaatgtgcaccgactacactaatctgaacagggcataccccaaagacgtgtaccctctccccagcatcaataggttggtcgatgaagcgtccgaattccaggtgctaaccttcttggatgcctacttcggatacaactagattagaatgcatcctctagatgaggagaaaatgaaattcataactaaaaatgtcaacttttgttacaaggtcataccattcggcctaaaaaatgcaagcgcgacattccaatgaccaatggaccgagtcttcaaacaacagatcggac

SEQ ID NO: 6915 - DNA, 378 bp, Glycine max
agcttcaaccaagaggggatggtccatttcaagtacttgaaaagataaatgacaatgcgaacaagattggattgcctagtgagtataatgtgagtactacatctaatgtgtttgacttaactctttttgatgtagatggagaagccgatttgagaacaaatccttttgaagagggagagagtgataaggacaaggcaaggaataagggcaaggaacctttagaaggacttggaggacctatggcaagggctagaacaaagaaggccaaggaagctcttcaacaagtgttaaccatgctatttgaatttaggcccaagttacaagtggagaaacttcggattgttaattgcaccatgttccaagaagaatagaggatgc

SEQ ID NO: 6916 - DNA, 410 bp, Glycine max
tgtgcctcttcacgtctggaatatgaatgtagcatatagatccaaagacccttaggtgctttactgatggctttttcccgttccaagcttcaattggagtcttgtcttttatagacttagttggacatctgttgagtatgtaaatagcagtgtagactgcttcagcccagaatgtgttaggtagtcccttctccttgagcatcgatctagccatttccataattgtgcgattctttctctcagacactccattttgttgaggagaatatgcgactgtaagtttacgctcaatgccttcatcctcacaaaatctttcaaactcgcgagaggtgtactctttgccgcgatcacttcttagtacttttatccattttccactttgattttcaacaagggccttgaactttttg

SEQ ID NO: 6917 - DNA, 246 bp, Glycine max
agcttgccgccacggagttttcctactatgctcttgtgtggtggaacaagctacaaaaggagagagcaagaaatgaagagccaatggttgatacatggacggagatgaaaaagatcatgaggaagcggtatgttccggctagttactcaagggacttgaaattcaagctccaaaaactaacccaaggcaacaagggggttgaggagtatttcaaggaaatggatgtgctcatgattcaagcaaata

SEQ ID NO: 6918 - DNA, 391 bp, Glycine max
ttgcagcagatgtcactctactataaacccttgttagatatgtatgcaaggaagcataaatatattcgccaagatagcatcatagtggatggaaaatgctgtgttgtgatccagaatatccttccacccaagcataaagatattgggagtgtaactattccttgttcaattggacaagtcaatgtgggaaatgctcttattgacctgtgagccagtatcaatttgatgccactcttcatgtacagaagattgagagagttggaaataatgctcactcgaatgactttacaattagttgatcgcaccattaccaggccatatggagtaattgaggatgtgttggtcatagtaaaacattttatcttcctggaagactgtgtggtaatggata

SEQ ID NO: 6919 - DNA, 366 bp, Glycine max
agcttctgttgttcaatttccatcgtctcgatatattatgcgcctgaatcgaacatccgagtgaaaagttatgaccatttgaatttctcaagagcttccgttgttcaatttcaagcgtctcgatatattgtgtgcctgaaatggacatccgagtcataagttatgaccatttgaattgctcaagagcttccattgttaaattttgggcgtctcgatagattatgcgcctgaatcagacctccgagttaaaagttatgaccatttgaatttctcgagagcttccgttgttcaatttcgagcgtctcgatatattatgcgcctgaatctgacatccgagtgaaaagttatgaccatttgaatttcacg

SEQ ID NO: 6920 - DNA, 360 bp, Glycine max
tcggcttattagtgcacagctccttcaagaatttatcatatcttgggatttgctatattgcatccactagaggtatgtttacctctacttttctaaatgtttccaagatctccttctttggctcttccatttttttgttggaaattgctctcggagggaatggaagaaggatatgttgcttctctttagattcacctgcatacaaattggtaggtatcttactctctaaatttttgtcatcatctttttctggagtagagtgaagctgggcaggttcatttgcagatgacgaagatgttgcttgttgaggttcttgacactgctttctccacctcaatgcaatggcactcacatattttg

SEQ ID NO: 6921 - DNA, 375 bp, Glycine max
ttagacatgcacattttaagaggaagcttgtgttgtgaataattacgagccaacaagaataaggtgaagatgatgcttagatatacagattaaattcattagagcataaaccaagtcatacggtttgtggatcaacaacaaaaacaagatgtacttgatcaaagtgcttccaagctttgccattagatggatgacataacatttaaaaacttcttctgttttggtggttccatgtcatttgtcctgcagtttgcattgatgcaaacattctgtgtagctaaggaattataggcaaatagaacattgccttaactagaacttgttttttgttacttgatccagtgttgcagtcatgatacattgacttttaacaaa

SEQ ID NO: 6922 - DNA, 374 bp, Glycine max
tgaatcggacctgagtgtgaaaaggtatgaccatttgaatttctccaaagcgttcgttgttcaatgtcgagcatctcgacatattatgcgctcgaatcgaacatccgagtgaaaagatatgaccatttgagtttctcgagagcttccgtggttcaattccgagcatcgcgacatattatgtgcccgaatctgaccttcgtgtgaaaagttatgaccatttgaatttctcgagagcttccgatgtttaatttcgagcgtctcaatatattgtaagcctgaatcggagctccgtgtgaaaagttatgaccatttgtatttctcgaaagctttcttggttcaatttcgagcatctcgacatattatgcgcccgaatc

SEQ ID NO: 6923 - DNA, 366 bp, Glycine max
  unsure at all n locations
gtcccatatgttcttaanactggatctaattcattgcttccaaagtttcatggccttgcaggtgaagacccgcacaaacatntgaaggaatntcatattgtctgctccaccatgaaacccccagatgtccaagaggatcacatatttctgaaggctnttcctcattcattagagggagtggcaaaggactggctgtattaccttgctccaaggtccatcacgagctgggatgaccttaagagagtattcttagagaaaattttccctgcttccaggaccacagccatcaggaaggatatctcangtattagacaactcagtggagagagcctgtatgagtactgtgagagatntaagaaactatgt

SEQ ID NO: 6924 - DNA, 354 bp, Glycine max
  unsure at all n locations
tgtgagaggtgctaataccttccttaacgtaaatacaactcccgaatctggaaaattcttcatgactggtttccttcggttntttccgacgttntcaagaaataaacgttggtggcgactccgtgcatttacctcctttggaagatgcacctgtgagcctcgtttcgctcgcccgcanaagggtaggttgcaacagttggcgactccgctggggactggttntgtgagttaggcctattttangannatgtgtgttagtgcttagctttactgagctntaaaagaatggctaannatttgttaaacataaacacttanacaatggangaaagctggagttgctgacatgatgtc

SEQ ID NO: 6925 - DNA, 401 bp, Glycine max
  unsure at all n locations
gactggactaatacattctgtgcccaagtntcatggtcttgcaaggaagatcctcataagcatcttaaggcgttccatattgtttgttccaccatgaagccccttgatgtccaagaagatcatatctttctaaaggctnttcctcattctctagagggagtggcaaaagaatggctctactaccttgctcccaggtccattntcagcanggatgaccttaagagggtgttcttggagaaattcttccctgcatctaggaccactgccattagaaaagacactctangcatcanganacttagtggagaaagcttgcatgagtattgcgaaagaatcaagaaaatgtgtgcangctatcctcaccaccataattctgagcaacttcttcttcaatatttcta

SEQ ID NO: 6926 - DNA, 402 bp, Glycine max
  unsure at all n locations
agcttgatgtaacagagaagaagagagcgcgagagaatacacggagaagtaatgatcgttatcaaaatanggtgcgtcanatataatntanaatgtaatttcaacatcggttntcaataaaaaaactgatgttaacaaattgatgttaaatgatcatacgttaacatcggttttctacaaaactgatgttaacggatacacattatttacaattatgccaccgcgtgtatgttaacatcgattntgtcaaaaaccaatgttaatctgtcgatgttaaaattgctttttgtagtagtcgacggtcgcacgaagaacacaaaacaagaaaacgacgtanggaatgatcgtggttgcaattcggtagcgcctcggcttcgttccctctctttctctcttctctta

SEQ ID NO: 6927 - DNA, 420 bp, Glycine max
  unsure at all n locations
atgagacttactccttatttaatagacaacatcttatcattttgtgtttccaatanattttaaatacagtgtaataaatagagagtgtgttgcaacactactcctctntaatctttgcatcatttacttagtcttaccgaagtgtattgtgttcgtatttgattaacttanaacatgaaattgttaaatgtaaggatattcgctctttaaaatgtgagatgttacataaattatttataaaagataacaaatttacaattagtttatgaatatgtacnaaatgtgataaattaatcatacagacaacttaatgacatacttactcttanatttataaattatatcanattgatctttaaaaatataattatttcaaattatcatgacgataacactatcatattctcttgtatatatatc

SEQ ID NO: 6928 - DNA, 334 bp, Glycine max
  unsure at all n locations
ctcacatatggcggtgagctgcgatatgaatctggcaatataattcaagcgtcccaggaaacctcagacttgcctctctgtacggngttctggcatctcaaggatagccttcaccttttcggngtctacctctatccctttctggcttacaatgaaaccaagcaatttccctgatttgaccccaaaggtacacttagcggngttcaaccttaatngatatttcttaagcctttcgaacaacttccgcaggttgacaaggtgttcttcctcggatttagatttagcaattatgtcgtccacgtagacctcgatctctngatgcatcatatcatgg

SEQ ID NO: 6929 - DNA, 320 bp, Glycine max
  unsure at all n locations
attcatggctatggcattgaagatctggtcacttcaacactcaagctntatgctgctgcctcaaaataatatgatgagagatctaccatgcctatatgactataatgaatcttgtgaaggatgtcttcttaaaaagcaacaaaattaccattttcaactaacaaagcatgtagagctaaagactcgtcagagttaatccacactaacatttgtggaccaatgacgacatctgcactaaacaacaacaggtatctcatcctctctattgatgacttttctagaatgactcggtctacttctctatagaacaatcaaaggtc

SEQ ID NO: 6930 - DNA, 320 bp, Glycine max
  unsure at all n locations
tctcatgtgcacccaaactcaatctccgggttcgaagacaaccttctntctcccgttggtggctggtgtagcatagctattatttttgctctcaatttgatctttgactctctcatgaagcttcttcacatagtccgcctttgcttgaccttcttaatgcttaaaaacagaaacattaggcataggcaaaagatcaagatgagttagtgagttaaaaccatacacaacttcaaaaggagaacagttagtggtgctatgaacagctctattgtaagaaaattcaacatggagtaaacaagcttcccaagcttttaagttct

SEQ ID NO: 6931 - DNA, 310 bp, Glycine max
  unsure at all n locations
atccgagangagaattattgtcctttaaatatgctgagacttcacttntcaattacgagcgtctcgatgtattacgggtctcaatcggacttccgagttaaaaattattgtcgtttgatttctctcagagctnttgtgttcaattacgagcgtctcgatatcctacggtacactattggacatccgagtgaaaagttattgtcgttcgaattttgttagagcttatgttttcaattacgagccgtttgatatcccacgggacacaatcggagattcgagttaaaagctattgtcgttagaatattctcat

SEQ ID NO: 6932 - DNA, 468 bp, Glycine max
  unsure at all n locations
aagtatgtatggcanaacttcattactgttgttcaagacatacaagtgagcttgtaacanatgttctacacttggagtgatcacatgcagtcctcttgaacccttaccacccactctgtcatcatgccgagactcaggaaggccaacaggtttagccttctcaatgtattctgaacaaaattcaatggcttcttctgcaatgtacctctcaacaatagatgcttctggatgatatagattctttgtataccctnttaagatcttcatgtatcgctcaactgtgtacatccaccgtagataaacaggaccacaacatttgatttctctgaccagatgcacaatcaagtgaatcatgatgtcaaagaatgcatgcggaaaatacatctgcaactggcacaatataatngcagcctcattttccagctcatcanacttgacangatcaatgactntgctacatatagcatg

SEQ ID NO: 6933 - DNA, 152 bp, Glycine max
agttcacactgatgtgtgatgctagtgtctatgctataggtgcagttctgggacaacaacgagacaagatattccatgccatatactatgccagcatggtcctgaatgacgaacagttaaattatgtgaccactgaaaaggaaatgatgggc

SEQ ID NO: 6934 - DNA, 322 bp, Glycine max
  unsure at all n locations
tagacatgtggcctcagatatcttaagaaggggggtgtgaattaagatatccacacagtctccgctaattaanaatctattgcactctcttcttactcaagttatgaattcccttaatgacaatcttctagatattaattcacacagagcaactcgaatatgaatataacgcactaataaataacggagattaagggaagagaatatgcnttctcagttntatactgggtcggccacagcctagtgcctacgtccagtccccaagcaacccgcttgagagatccactatcttgtaaattccttctacacgatctaaacacac

SEQ ID NO: 6935 - DNA, 277 bp, Glycine max
  unsure at all n locations
atagataccaatccaggtggaggaatcatctaaatctgagatggacaagtcctccacaacaacaacagcctgtccctcctttccagaatgttgctggtccaagcaagccatatgttccttctccaatgtagcaatagcagcagtagtcacaacaaagacaacaagcaactgaggctcttcctcaaccttccttataagagttagtgaggcaaatgatcatccagaatatgcaatgtcagcaagagacaagagcctncattcagattctgacaaatca

SEQ ID NO: 6936 - DNA, 404 bp, Glycine max
  unsure at all n locations
gctcgactcttctgactcatgatgtagatccatgtcattctngagtagtcatcaattatggacagaatatatcttccaccacccagagaaggtactcttgcaggccctcaacagtcagcatgaatgtaatcaagagttcctttggtggtgtgaattgctttangaaatntaatcctatgttgcttgctgaaaacacagtgctcacaaaatntcagttcatctagtttctgatttcctaacagctgttggtttttgaagtatcatcatacctttntcactcatatgacctatcctcatgtgccacaattgagttaagtcaggtatgctcttattggatcttgatgcaacagctactagaccatcctcaacacatgttgtaccttgaagtatatagagattacccc

SEQ ID NO: 6937 - DNA, 410 bp, Glycine max
  unsure at all n locations
ctaactcttgattctttggtatcaccataacattcatggaagccattgcttccacacttagaagctcaattctaggattngataatatttgggacttgtatgctttagatgaacatttctctcccagttagagagttgtgggaaataggcccaagatggatgtcttttggctgaggggtatttagtcaaagagggaaaactntgcataccccaaggatccattagganattacttgtgaaagagatccataatggtgggctcatggtccactttgggatagacaagaccctcgtctactcanagaanagttntattggccctatatgaagaaagatgtccataagcattgcactatgtgtgtggctcgttacaagccaagtctatggtgatgccttatgagctatacaca

SEQ ID NO: 6938 - DNA, 395 bp, Glycine max
  unsure at all n locations
ctaatacattngctgcccaagtttcatggtcttgcaaggaagatcctcataagcatcttaaggagttccatattgtttgttccaccatgaagcccnctgatgtccaagaagatcatgtctttctaaaggcttttcttcattctctagagggagtggcaaaagaatggctatactaccttgctcctaggtccatttttagctgggatgaccttaagaaggtgttcttggagaaattcttccctgcaactaggaccactgccatcagaaaagacatttcangcatcangcaacttagtggagaaagcttgtatgagtactgngaaagattcaagaaattgtgtgcaagctgtcctcaccaattgagttctgaacatcttcttcttcaatatttctat

SEQ ID NO: 6939 - DNA, 282 bp, Glycine max
  unsure at all n locations
acatcaatactatatnntgaaacaccaagaagaagttgaatagtaaaacctgcatatgcaagaagaggtcaatattctttgattnnttgtattggtccaaccttgatgttagacattgtattgatgttatgcatgttgagaanaaatgtgtgtgataatgtcattgacacgcttcttaacatttaaggaaagacaaatgatggtttaaatactcgtcaagatctaactcagatgggtatacgtgactagttacatccaaggtctgatggtaagaaaatatac

SEQ ID NO: 6940 - DNA, 313 bp, Glycine max
  unsure at all n locations
gtgagctnngaacaaatcttctacacttcgagtgatcacatgaagcctcttgaacccttaccacccactctgtcatcatgccgagaatcaggaagcccaacaggtttagccttctctaagtattctgaacaaaattcaatggcttcttctgcaatgtacctctcaacaatngatacttctggatgatatagattctttgtataccattttaagatcttcatgtatcgctcaaccgggtacatccaccgtagataaacaggaccacatcattngatttctctgaccagatgcacaatcaagtgaatcatgatgt

SEQ ID NO: 6941 - DNA, 340 bp, Glycine max
  unsure at all n locations
gctctcgagaaatctagtggcataaatnntatacatatgtccgattcggngaaataatatatcgagacgcacgagatagaacaacggaagctctcgagaaattagaatggtcataacaattcactcggatgttcgatccggagacataatttatcgagacgctcgatattgaacaaccgaagctctcgacacaatagaatggtcgtaacttctcacgcgaatgttcgatacggtgacataactcatctagacgctcgatattgaacaacggaagctctcgagacatatgaatggtcataaggtttcacacggatgtccgattctgggacataatatatca

SEQ ID NO: 6942 - DNA, 408 bp, Glycine max
  unsure at all n locations
ctcttcttcctctntcgccccattagtgctaccacgtgatgttaacattggttntntacanaaactgatgttaatagaatttttcttaacatcganttttgaaaaatcgatgttaatgtggtgatattaacatcggtttttgaaaaatctgtttttcaaaaatcaattaacattgattntgtaaaaatctgatgttaacaccgccacgttaacaccggttnttntaaaaatggatgttaacaaaatcaatttatttacaaaaatgccattngccttttgttaacatcggtttaacananaaccaatgttaaagaagtgatattgaanacattctttctagtagtgaataatcttgattatggtgtggttaanggtgctttggggctttctttgatctgatttggttct

SEQ ID NO: 6943 - DNA, 337 bp, Glycine max
  unsure at all n locations
tgaagntatatagggtttggtctcattcacaatcctcatttttggtgatgagttcttggaaaagggaagcattgataagattgtaagagatgatgaacaagcaatatcatttgattgagatcccaggaataatgccattaaaggtgcagcaaatgctttatcttatatgcatcatgactgttcacctccaattgttcatcgagatatatcaagcaagaatattgcttaggatttggagtatgtggctcatgtctcagatattggagcagccaggcttcttaatcctaattcaaccaattggacctcattctgtggcactgttggatatgctgctcca

SEQ ID NO: 6944 - DNA, 354 bp, Glycine max
  unsure at all n locations
gcttccgtcagtggtaccttaagnttcatgggataatttcttcattngcgtttgangaacaccccatggatcaatgcatataccacaaggcagtgtgagtaataatatgttttcttgttctatatgtagatgatattntacttgcaaccaacgatcggggtttgctacatgaggtgaaacaatttctctctaagaattttgacatgaaggatatgggtgatgcatcttatgtcatcggcattaagattcatagagatagatctcaaggtattctgggtctatcacaggaaacctatattaacaaaattctagagagatttctgatgaaagattgttcaccaagtgttgctccca

SEQ ID NO: 6945 - DNA, 326 bp, Glycine max
  unsure at all n locations
tctatcctttctatgatggagccaatctcagtcacnctcattaagaactagctctnttcttcctctattgcctttagttgaatacaccctcttgttggttctctatttggttcttaaccctctcatgcatcttctttacaaattctgacctagattccccttctttatgtataaaagaagtgtccagtgggaggggaatgaggtctaacggtgttaggggattaaacccatagacaacctcataaggggactgcttggtggttctatgaacccctctgttgtaggcaaattctacatgaggaagatactcatcccaagactttatg

SEQ ID NO: 6946 - DNA, 359 bp, Glycine max
  unsure at all n locations
acacaatgataatactatgtatttattaaccatacttaatagagaatcttataacactacgaaataaccataaattgggagagtttgatacaatttatacaagcttnatacacaaaagatagtcatttntaccgactaacacctacccgcaagggcattggataaagaagacttcaagtagattacgccaaggatccaagggaaggccctatggttctcatgagccttagggtagatttcgggcatatgggttaagtatgagcctgctaatctgttaaatatacaataagtattccttcttttggcccttgattctggccttctatagcatagggtttagccttgtatttaagatattt

SEQ ID NO: 6947 - DNA, 320 bp, Glycine max
  unsure at all n locations
tcggatccctgtcagatacaatactagaaggaattccatgcaaccttactacttcctcgatgtacaactccactagctnttccattctatacttcatattcaccggaacanaatgagcagatttggtgagtcgatctactatgacccacacggcatcatgcncacgactagtcttgngtaaactagatacannatccatagatatgctctcccatttccattccggaatctccaatggcttcaattctcccgatggtcgttggtgctcaaccttagccttttacatgtanacatcttgctcatattcgctacatctttct

SEQ ID NO: 6948 - DNA, 312 bp, Glycine max
  unsure at all n locations
aagctccttaactgcacaatgctctttaatattgaagagtatacttgtggaaccttcacctgacgaagacactgacaagaacttatcttctccttcttggacaaagtatggcaagctggaggcaacgtaaatttcttcccatcagaccttggatgcaactatgctcttatacccatatcagctagatcttgaccggtattcaagccatccttcgtcttgccttgaatgttaaggagcatcccaatcacactgtcacaaacattnttcttcacatgcataacatcaatataatgtctaacgtcaagatcacac

SEQ ID NO: 6949 - DNA, 232 bp, Glycine max
  unsure at all n locations
ccacctgagagcatgcaagcttggatanctattgctttggaaacctttcctttctcatgtgaacccaaacccaatctccgagttggaaaacaacctttttgtgcctcttgtttgcttgtatagcatagctcttattcctcttttcaatttaggccttgactctttcatggagctttttcacatagtcttctttggcttgtccttccttatgcctaaaaactgaaatacttgg

SEQ ID NO: 6950 - DNA, 190 bp, Glycine max
tctttttattttatgcacctgaatcagacttccgtttgaaaagttatgaccatttgaatttctcgacagattccgttgttcaatttcgagcgtctcggtatattatgcgccagaatcggacttccgtgtgacaagttacgaccatttgaatttctcgagagcttgcgttgttcaatttcaagcttctcga

SEQ ID NO: 6951 - DNA, 191 bp, Glycine max
ttcttctttttgattcatcttctccttgaagtggcgtctccaatcatttttcttccttctccattctgctgccatgatcttctagaagcaaaggactccattgatgaagaagatccaaggcctttaagctccacatggagctacgtcacattgtgtgcttggttgtgcgatcttagtggttcctcattatt

SEQ ID NO: 6952 - DNA, 196 bp, Glycine max
tgccttgccttttgatttattttagggactcatggtcactatgaatgacaaattccttgggataaaggtagtgttgccatgttttcaaagcccgtactaaggcatacaactccttatcataagttgaatagttaagggtaggaccacttaacttttcactaaaataagcaattggatggccttcttgcatcaacac

SEQ ID NO: 6953 - DNA, 214 bp, Glycine max
  unsure at all n locations
agcttggatnnctttttattagggaatctatccttcctaagatggatccaaacccagtcaccgtcattaagaactagcttttttcttcctctattgcctttagttgaatacacctttgtttggttctctatttggttcttaaccctctcatgcaaattctttacaacctatgacctagattgcccttctttatgtataaaagaagggtccagtg

SEQ ID NO: 6954 - DNA, 187 bp, Glycine max
  unsure at all n locations
ngatcttttttttttnnatctttaatctttaatccctgaacgaactattcaagtttgtaattcgaactttaattatcttttaattcgttcctaaagatagatcgccaaatctgttgctaacagcacattaatctgttaaagatataacagatttatgtgtccagtattttcgggcaagatgtcctgg

SEQ ID NO: 6955 - DNA, 208 bp, Glycine max
ttaagcttacagtaccttcttagcaacagtgtcattgcctttctccccttaaatattttatccatcaatttgtggagaaaatgtccaaagggcccagagtaggtgaaaccatagagctgcaaatcaatttgatttcaaaactgctcagtactcaaaaattttcactacaaacttcatttctgcttcatcttttgagaaaaggtgaaac

SEQ ID NO: 6956 - DNA, 191 bp, Glycine max
tggaacatattgtctgaattttgggtcctcttaaggacatagtcaaaatatccgctggctgatcattagaatcaataaactcagtgacaatctccttggacagaagcttctctcgaatgaaatgacaatcaatctctatgtgcttagtcctttcatgaaaaactgggtttgaggcaatatgaagagcagcc

SEQ ID NO: 6957 - DNA, 214 bp, Glycine max
agcttgtcatctttatagagtagaagatagatcattgatccatcctccaccttgttgtgataaacacaacaatcatagagacttctcttgaatccttggctggtgataaagctatcaaacctcatgtaccattgccttggagattgtttcaaaccatacaaggacctttgcagttgacaaacatacctttcttttacttgaacttcaaaccctt

SEQ ID NO: 6958 - DNA, 212 bp, Glycine max
agctttcattttttatttcgaccatctcgatatattaccggactcatccggacttccgtgtataaacttattgtcaattcaattttctcagagcttcggatcaaaattttgagcatcttgatatattacgggactcatttagacatccgagtaaaaatttattgtcgttagaatttgatacgagcttccgttttcaatttggagcatctcga

SEQ ID NO: 6959 - DNA, 192 bp, Glycine max
  unsure at all n locations
ccccttatggatgtccgaggcggggacaaaanataacgagacgcccgaaatcgaacaacggaagctcgcgagaaaaagcgaatggtcataacatgacactcggatgtgcgaagcggggacataatatatcgagacactcgaaatggaacaacggaagcccgcatgacattcgaatgctcagaacatatcaca

SEQ ID NO: 6960 - DNA, 194 bp, Glycine max
tactaaggcttctattctagctcttcgtgacttttctaaaacttttgagctagaatgtgatgcctctggagtgggagttggagctgtattgttacaaagtgggcaccctattgcttattttagtgaaatgcttcatagtgccaccctcaactaccccacctatgataaagagctttatgccttaataagagccc

SEQ ID NO: 6961 - DNA, 214 bp, Glycine max
tttcaaccttaccatcaaaggaagcgagggataggatcatgaaggggggaaaagatgagtggagggagagtgacaaaaggagcacgaaaatttgagccgcaaatgaggtctgaactttgaagagtaaacatcaagagatgaaagatccaaaaattaacgcacgcggactatagttatagtctaaacgtcacacaaaattgggaggaaacctgaa

SEQ ID NO: 6962 - DNA, 213 bp, Glycine max
agcttcaaccaattgggttggtccatttcaagtacttgaaaggataaatgacaatgcatacaagattgaattgaccggtgagtataatgtgagtactacatttaatgtgtctgacttaaatctttttgatgtaaatggagaagccgatttgaggacaaatccttttgaagagggagagagtgatgaggaaatgacaaggactaagggaaaggt

SEQ ID NO: 6963 - DNA, 206 bp, Glycine max
gctttggagtttccaagtgccaattcgtcttcttcttttgtccagtcttcttctggcttcaattcattagtgggctttccttctgtgtccagcatcttgggatgttcccagcctttgatgatagctttccaggttctgctatccagtgatttgaggaaggccaccatccttgctttccagtattcatagttggttccatccagaat

SEQ ID NO: 6964 - DNA, 210 bp, Glycine max
tttgcaagttgcttttgggggaggcaattgagcgagaagttgaccttggaagtacttgtcaatgcgactgtaccatgctctcagtgcttgttttagtccataaaaagccttctttagcttgagaactttgtcttcttctaatttcacctttaatcccaacggttgttcgatgtacacttcttccacgaggactccattcacgaaggtaga

SEQ ID NO: 6965 - DNA, 199 bp, Glycine max
tctgctttaataggacctcagtgtgaaaagttatgaccattttaattccccgagagcttccgttgtgcatttaccagcgtctctatatgcgatgcgccttaatctaacatccgcgtgaaaagttatgaccatttgaatttctcagaagcttccgttgttcaattttaagttgatggatatgtgatgtttcagaatctta

SEQ ID NO: 6966 - DNA, 214 bp, Glycine max
  unsure at all n locations
agcttgaccagtttttattttgatgggccggatgttgaattcaggttgntcctggtgcggagatgatggtactgtgggtgaaccaggagctgcagtttcttttggtgaggtagccatggaaaagcagagcgtttggaatgatttcgtaaatctcagaaaactattgggaaatgctggtaaaaacacgaatgccaagcagatataaatttgaatg

SEQ ID NO: 6967 - DNA, 210 bp, Glycine max
agcttaacaaaaggcatgcgaagtgggtggaattcctagagcaattcccttatgttatcaaacataaaaagggaaaaggtaatattgtagccgatgctctttctcggcgtcatgcattactttctatgcttgaaacaaaattgattggtcttgaatgtttgaaaagcatgtatgaaaatgatgaaacttttggagaaatttttaaaaatt

SEQ ID NO: 6968 - DNA, 204 bp, Glycine max
taagcttatagaaagaggagggaaaataaatcaatccaaaatcaatggtacctttcaaggaactaagaattctttttgcagcttttaaatgaggagaggaaagagcctccataaagcgacacacaactcccaccgcatatagaatatcgtgccttgtattggttaaataccttaaactccccacaagactcttgaagatcgtgg

SEQ ID NO: 6969 - DNA, 390 bp, Glycine max
  unsure at all n locations
nagcttgcattgtgtagaagagtacatctttcttttatgtttagacgaagagaaatatcttcatatataaacaaacttatacaaataattgattcccagatttctaaagatgtagaaaaaagtattaaataaaacagacagcattgtttagattntataacgtgtacattattatatatatcattagtttaaaaaatattatacttgcattatctgggtcatctgtttgcattaaataggtaaaaaattctactcatgtaaaacacagactatcgtaagtcttgttatttgaaataaagaaatatattgcgtcccatatcgcattgaatgtctgtctcttggatattgcactttaaaaaaaaatcatcggttttttgataattacttgac

SEQ ID NO: 6970 - DNA, 402 bp, Glycine max
tctatgtttcggatgaattggttgttttgaacgtaataaaagcgatgatgggggcaatctataaatcaaacggtgatagtggagacctataaatacttcataaatatgtgaaagatgaattgaccggaaagaagtctcttctcgttctggatgacgtctggaatgatgatcgacaccaacggaaagctttgaaaactcctcttaaatatggggctcagggaagctaaattcttgtcacgacacgcagtaacaatgttgcttctaccatgcagtcaaataaagtctgccaactaaagacattacaagaagatcacagctggcaagtttttgctaaaaatgcattccaagatgatagtcttcacttgaatgttgagctgaaggagataggttcatagatcggtg

SEQ ID NO: 6971 - DNA, 393 bp, Glycine max
  unsure at all n locations
agctttgagcaaattcaaacgacaataatcntttntgtcggatgtctgattgagtcccgtaatatatcgagatgctcgaaatggaataccgaagccctgagcaaattcaaactacaataactttttactcggatgtctgattgagtcccgtaatatatcgagatgctcgaaatggaataccgaagctctgagcaaattcaaacaacaataactttttactcggatgtccgattgagtcccgtaatatatcggaacgctcgaaattgaatgttgtagctctgagcaaattcaaacgacattaactttttactcggatgtctgattgagtcccgtaatatatcgagacgctcgaaatggaataccgaagctctgagcatattcaacgacaataac

SEQ ID NO: 6972 - DNA, 429 bp, Glycine max
aagcctatagcttatcaagttcaccagcctgaaattgcaacaatctcataaaacaaattaagattaaactctacacactttcagaatgaatcatgcaaaatatgatatatcatcgcatacataagcattagcatattattgtaccatgaagcacacatgagaaatgcatatgaaaattagagacttgtcaacaccggatgcattatcagataccatcacctctaacgtacagtattacttgttttgcaactacttggaaatgatatttttgtttctaatcggcatttaaatactaattaatctcagaaactctgcatattattccaatggaatgatataaacccccttctgaaaccaactaaaatgcacatcagtgagatgaggacatataaacaaagattacatattatattataaaatatataatat

SEQ ID NO: 6973 - DNA, 424 bp, Glycine max
  unsure at all n locations
agctntttattcaaatttagaaattcatttagatgttctaatgtctgaaatctatgggattaagatggtcactgaccaatccctattttatgatttaacaaaattgcctagtgaaggtgtgccttttgagggtgcactgattgatgaatggaaattcgatttctctgtgcatgatgcccgccggttggtttgcaccaaccaagcggatatgaccggaaggcttcttgccggttcattggcttttgaaagccgcatcctccattatcttatagttcgcgttttgcttcctagatcttcaaaccttgcccaggtttctgaagaagacctcattgtcatgtgggcctttcataaaggtctacaaattgattgggcacatcttgttagatatcgcatgcataaggcattgcgaatgaatgccccatta

SEQ ID NO: 6974 - DNA, 430 bp, Glycine max
  unsure at all n locations
ttaagcacctgagctgcagcttgtttgaaaccattaactttttgactnttctatctttaggcctttcaaccagctcccatgttttgtttttgtgtatcatagacatctcctcctccattgcaattgtgcttcctcacagctagcatgttcataaattgctacattacatctttgatagatgtcggacaacagcctttttcctctgattggaaggtcatcttctaattcactctgcataagctctgttgtttgctctccaggatgattgtctccactattgaggaaaaacctagttgtttgtgaattgttccaatcccatttctcaccttcgttgaagtgcacatctctagtgattgtcatctttttagtttgaggatgatagactttgtagggctttgaaactgaattgtagcccacaaagatgcccgga

SEQ ID NO: 6975 - DNA, 418 bp, Glycine max
  unsure at all n locations
agctnggttatctccttcttcactacatgtagattcaccgggttgagtcttctctatggttgtcttactggtttagctccatcctctaaatttattcgatgcatacatgtggatgggctaataccaagaatgtccgccagggtccagcctatagccttcttatgcttcttgagaactgacaacaacttctcctcttgctcatcagcaagggaggcagatataatcactggaaaattcttgctatcatccaagtaagcgtattttaaatttgatggcagaggcttcaattctggtgtgggcggctagacagtggtagaatgagatggtatctcagcctttacctcataaagaaagtcagaggaatgtgtagctcctgaaacatggttagtcctatctgactctatgaaatcaatctcga

SEQ ID NO: 6976 - DNA, 434 bp, Glycine max
  unsure at all n locations
agcttaacaatatttactttgtttttgtttataacaaattggttactttgaatatgtccatgcgtcacgggaaggtaggagattccatactctggtggagtataatgtgagaacatgacaggttagattgttagaaagaagtcaataaatattgatcaaattataattaacaaccacattaatttgtataaaaccaataagtattattttttatttacacccttatcatttagatgttaatttacagattcgtttgagtgaagggtttagtgaaatacaatttaaactgattataatgctacaagttgagttagctagggttagtttgtgtaattntgtgattaaacttatactgaacaaactcgatcaataattaataatggaatggtttgactcggattcattgagtaaatttaattaaaatcattttattt

SEQ ID NO: 6977 - DNA, 436 bp, Glycine max
  unsure at all n locations
agcttgtacctttgaaacacatcanatattcacttattagctacattggattgngcttctaccaattcaattaaatttattttcaaccacacacatcaaatattcacttagtgcatgtgaaattacaaaactacccctaatacaaaaaactagtctaggtgccctaaaatacaagggctgaaaaatcctatatttctaaggtactctacctacattatggagccctaaatacaaagcccaaaaataatgaaaccttaatctaatatttacaaagataagtgggctcatacttagcccatgggcccaaaatctatcctaagactcataagaaccctagggccttctcttgcatctcttgcccaatctacttggagtcttctatccaatacccttgcggggtaggattgcatcaaaaggttacagagaacttacattg

SEQ ID NO: 6978 - DNA, 430 bp, Glycine max
  unsure at all n locations
agcttaacaaaaggcatgcgaagagggtgtaatttctagagcaattcccttatgttatcaaacataaaaagggaaaaggtaatattgtagccgatgctctttctcggcgtcatgcattactttctatgcttgaaacaaaattgattggtcttgaatgtttgaaaagcatgtatgaaaatgatgaaacttttggagaaatttttaaaaattgtgaaaaattttcagaaaatggtttctttagacatgaaggctttcttttcaaagaaaacaaattgtgtgtgcctaaatgttctactagaaatttgcttgtttgtgaagcacttgaaggaggtttaatggggcattttggggtccaaaagactctagaaacattacaagaacattnttattggcctcgtatgaaaaaggatgtgcagaaattttgtgaaca

SEQ ID NO: 6979 - DNA, 388 bp, Glycine max
agcttccttaagaagattcctaaagaatctagatcttagctacacatacctctctaatagctaagctcacctccttgagatgagaagctagagcttagctacacaccccctataatagctaagctcacccccatgacaaaaaacatgaaaataaaaaaaaagtccttattacaaagacaactcaaaatgccccgaaatacaaggctaaaaccctatactactagaatggccaaaatacaaggcctagacgaaggaaaaacctattctaatatttacaaagataagcgggctcatacttagcccatgggctcgaaatctaccctaaggctcatgagaaccctagggcctttccttggatctctagcccaatctagttggagtcttctag

SEQ ID NO: 6980 - DNA, 363 bp, Glycine max
  unsure at all n locations
ctgcagcttttggttgaattataatcacatttctctttatgtttgtcatatccggngttgccaccgataacagagcggtaacttctctcacattactccctctgcttaaatttgtacatactagtattatcttatgagatttgggcgcctcattgataaagtttattaaaccagagacaataccaattcatactttatttattaactaaattacactcaatctggtaggactcaatgaaaaatgttacatgtacgctcctttattttagacactcatttgacacatttattcaaaggggttagatcatctgttatcaagctgataaatgatgtggagagtgtgcacaggggcattcttgagtg

SEQ ID NO: 6981 - DNA, 399 bp, Glycine max
  unsure at all n locations
agcttgtaatatgcaggaaactggttgtgatttgggtgatggtgtggacattgtgcaatgggtgagaaaaatgacagactcaaacaaggaatgagttctaaaagttcttgatcctagacttccctcagttccacttcataaggtgattcatgttttttatgtagccatgctatgtgttgaggaacaggcggtggagcggccaactatgtgcaaagttgttcaaattctgaccgagcttccaaaaccaccaagctcaaaacaaggagacttaacaatcatagaatcctctttgtcattatcaaacagtttagagtctccaaccacggcatcaaaggaacccaaagatcaacatcatcctcaattgccaccaaccgatctacttancattttgaatttgaa

SEQ ID NO: 6982 - DNA, 424 bp, Glycine max
  unsure at all n locations
agctntcagccaattcacccgacaatatctttttactcggatgtctgattgagtcccgtaatataacgagacgctcgaaattgattgttgaagctctgagccaattcaaacgacaataactttttactcggatgtctgattgagtcccgtaatataacgagacgctcgaaattgattgttgaagctctgagccatttcaaacgacaataactttttactcggatgtctgattgagtcccgtaatatatcaagacgctcgaaattgaatgttgaacctctgagcctattcaaacgacaataacttttttctcggatgtttgattgagtcccgtaatatatcgagacgctcgaaattgaatgttgaagctctgagccaattcaaacgacaataactttttactcggatgtctgattgagtcccgta

SEQ ID NO: 6983 - DNA, 330 bp, Glycine max
  unsure at all n locations
agcttgtttcatcctcttagtcttggactttgtcatangctggttgcacctccatcattccctccctctttgaaaggattcatccttgaatctgattcattacctacatcaaagaaagatagatcaaccacattaaaggtagtacttatgttaccatattctcttggcaagtccaactagtaagcattgtcatttatcttttctagaacttgaaaaagcccatctcctcttggttgcaacttggattttcttttagcagtgaacctttccttcctcatatgaaccgaaacccaatctgctggtttaaaaataactttgatgcgaccctta

SEQ ID NO: 6984 - DNA, 433 bp, Glycine max
agcttgatagcagaggggcttaggtccttcatttacaatgatcaatggtcacggtagggaccaagaagggttgctattctgacttctgagtgatattgaaagggtagtctagacataacatatgaacaattaatatcactattataatgtttatttgcaaatattattgtcattattatatgttaacattatatgggtcaatcgctaattgaaatattcgtttggtttgtggaatgacagacagacaaggcatccatgctagatgagatcatcgattacgtgaagttcctgcagctccaagtcaaggtgcgcatcccgcgtttttctcttgtactagcatttctttatttgaatttgttcctcatcagcatcaattaatagcatattttaattaccccagttgattatttaattagagactctaactaagtat

SEQ ID NO: 6985 - DNA, 216 bp, Glycine max
  unsure at all n locations
ctaccaactacanaccctaagataactatattatctacacaataagtacacttctctatattngcatagagggtgttnttcctaaggactgacagaacttgcctgagatgtcctaagtgatcatctangctcctactgtacanctaatatatcatcaaataaacaactacaaatctacctatgatatcccttatgacatgatgcataagcctcata

SEQ ID NO: 6986 - DNA, 291 bp, Glycine max
tgatgcaacaatcgaaaggggtggctatatgagacatcttgccgaacataggcaggtgagccataactcgctagagcgttttcttgcatgccatatgtaacaaagtcgttgatcctatgaagtttgatgagttggaaaatgaggccgcgagtatactgagccagttggaaatgtattttcccgctgctttatttgacatcatgattcacttgattgtgcatctggccagaaaaatgcaatggtggggtcctgtatattcgtggtggatgtacccggttgagcggatcatga

SEQ ID NO: 6987 - DNA, 378 bp, Glycine max
  unsure at all n locations
agcttatatataaatatcatggataaatgattacttaaattngcatacacaaaataatttctcaataattaacatattgaaagataagaaataaagaataaataataatttataacaacaaatttatattaacttgttcaataaattatttagggttaaatatattttttattcctaataaatactcaattttagtgttntctccctaataaatctttgctttgcgttgagtccctaataaaataacacttttattttatatccttgatattgtgttntagtccctaataaattagaaaattttgtgtttgcttcctaataaattaacaaattgtatttgagtntctattaagaaatgggaaatatttatcatggagc

SEQ ID NO: 6988 - DNA, 457 bp, Glycine max
gatccttaagcacctgcggctgcagcttttattgaacctgaaatcattactcactttgatttctgaggtttttgggataaaaatggtcattgaccaatcccttttccataacttaacccaattgtccagtgacggtgtaccatttgaaggtacactgaatgacgattggaaatttgatttctctgcatatgatgcccgccagttggtttgcaccaaccatgcggatatgactggacgccttcttgccggttcattggcttttgaaagccgcatccttcattatctcattgtgcgtattttgcttccacgatcttccaaccttgcccaggtttctgaggaagaatcttgtatcatgtgggcctttcataccgggcgtcaacttgattgggcacacttagtcagatatcgcatgcataaggcattgcgattaaatgctccattgccatatctacacctt

SEQ ID NO: 6989 - DNA, 440 bp, Glycine max
agcttctctcttcacatttttcactacctgcttctttggtgcattcttaatctccttgcactccttatccaacattaccaagaaatcacgtactatcataaacaatctcaacccttcatccttccctgagtccccatgaaagtaatcaccagtgttcttcactagggccatgatttgcttctcttcttctagcaaactcgtgacatcaacctcagctttctccacaaaactcttcactgtctcatgaaagcctttgtcatcatctatgtcacttaggtctttgtttacaaaatctcttgtttttatgagtccatggcctagtctagaggttgttcctatcaatgcatcagcatctaacgctgctgctttcttcacattctcgagttcactgctcaaacgtgaaaccacttgaaggccaagttcgcggattggtcttctga

SEQ ID NO: 6990 - DNA, 427 bp, Glycine max
  unsure at all n locations
agcttggaacatatagattgaatcctatttcctctttggacttagtcaaaatatctgttggctgatcattagaactaataaactcagtggtaatctccttggacaataatttctctctaatgaaatgacaatcaatctctatgtgcttagtccgctcatgaaagactggatttgaggcaatgtgaagagttgcctgattatcacaatataactttatttgcaccacttcacagaacctcaactcttggagaaattgcttaatccacataagtttgcaagtaaccatagccatagatcaatattcagcttctgcactggatcgagcaactacattntgtntcttgcttttccaagaaataatatntcccctaataaaaacacaatatcctgaggtagatctcctatccatggaacaaccagtccaatc

SEQ ID NO: 6991 - DNA, 417 bp, Glycine max
  unsure at all n locations
agcttataatatattgatatgctcgaaattatacattgtaagctctcgagaaattcaaatggtcataacttttcacacggatgtccgattcgggcaaataacatatcgagacgctcataactaaacaacggaagctatagagaaattctaatggtcaaaacttttcacacggatgtccgattcaggcgaattacatatcgagaggctcaaaattgaacaacagaagctctcgagaaattcaaatggtcataacatttaactcgaatgtccaatttaggcgcatcacatatagtgacactcgaaattgaacaacggaagctctcgtgaaattcaaatggtcantaactttcacactgaggtccgattcaggcttataatatatcgatatgctcgaaattaaacatctgaaactctcgc

SEQ ID NO: 6992 - DNA, 441 bp, Glycine max
  unsure at all n locations
agctnttggaaggatcaaaaagtgccttatgaatcctcccgtgcttatgccaccagtacctggaaggcctctcattttgtacatgacaatcttggacgagtcaatggggtgtatgctggggcaacatgacgaatccgggaagaaagagcgcgctgtttactacctaagtaagaagttcacgacctgtgagatgaattactccttgctcgaaagaacgtgttgtgctttagtatggtcatcccatcgcctaaggcagtacatgctgagccatactacctggttgatatccaaaatggacccggttaagtacatctttgaaaagccagctctcacgggacgaatcgcccggtggcaagtcctgctatctgagtttgatatagtctatgtcacccaaaaggcgataaaaggaagcgccttagcagattatntggctcaacagcc

SEQ ID NO: 6993 - DNA, 477 bp, Glycine max
  unsure at all n locations
tcttgggcaatcctcattccagcgatcagttggttnttgcgtaagagcttgaacaacggctcacaaatggcggtgagctgcgatatgaatctggcaatataattcaagcgtcccaggaaacctcggacttggctctctgtacggggttctggcatctcaaggatagccttcaccttttcggggtctacctctatccctttctggcttacaatgaaaccaagcaatttccctgatttgaccccaaaggtacacttagcggggttcaaccttaattgatatttcttaagcctttcgaacaacttccgcaggttgactaggtgttcttcctcggatttagatttagcaattatgtcgtccacgtagacctcgatctcttgatgcatcatatcatggaacaaagctnaccatggcccgtgataagtngccccggcattcttgagtccaaaggacatcaccttgtaacagaacgtnccccac

SEQ ID NO: 6994 - DNA, 332 bp, Glycine max
  unsure at all n locations
agtatggaatctatccttcctaagatggagctcaacctagtcgccctcattaagaattagctnttttcttcctctattgcctttagtggaatacacctttgtttggttctctatttggttcttaaccctctcatgcaacttctttacaaactctaacctagattccccttctttatgtataaaagaagtgtccagtggaaggggaatgangtctaacggtgttaggggattgaacccatagacaacttcaaaaggggattgcttggtggttctatgaacccccctattgtaggcaaattctacatgaggaagatacttatcccaagacttat

SEQ ID NO: 6995 - DNA, 427 bp, Glycine max
agctgtacaacaaatgccactctactcctagtttttaaaggatatgttaacaaggaaacacaagtatattcaccaggaaaacattgttgtggaaggaaattgtagtgctgtgattcaaaagatccttccacctaagcataaagaccctgggagcgtaaccattccttgatcaattggagaagtcattgtgggaaaggctcttattgatttgggagagttggagatcatgcacactaagatgactttacaacttgctgaccgctccattaccagaccatatggagtaattgaagatgtgttggtcagagtaaaacattctatcttcctggcatactttgtggtaatggatatctgtcaagataatgacattcttgtaatattgggaaagctgcatagtttatatggggagaaagaagttggagttggg

SEQ ID NO: 6996 - DNA, 403 bp, Glycine max
  unsure at all n locations
agctataacaccattaagggtaaagactcttcccgtggcctttggatgtccagtttgaccattcgggcctccaccatttcgctctttcttgggtcgtgaacaatctctttgagtgtgtcccttttgtccataattaaaacatgttgcgcctatatcaagacaattcgaggagatgtgccctggcttaccacatctgtaacaaatgatatgagtggagaaagtattgggcttgctaccactaccacctgcaaatcccctagcaacagtcctctgattgtcatggcggttaccatattgcttagggggtttcgaatatggttttcctcaatgttgaggcccattctttttgttcctcattggacctgtactccaataataggccgccctatctcgngagtcttca

SEQ ID NO: 6997 - DNA, 448 bp, Glycine max
  unsure at all n locations
aagatgaaaacagtataatgaaatatgcaaggaacatgactcacgctntaataggcctgaacttcttagtgctatgattcggcatagatccattcaagttatccagtcttggcaatctctttgatataaatgcagcttcctctctttttcccccttcctctaaagcagctatcagatcatctagacatgtcaatttctgatgtaaaccgttctccactaattcatagcataaactaaatgcttctgaaaccttgttaattntacaaagattcaaaatagttgcattacacaaatcaatatcaacattctggtgattntccaaactaaaaagcaacaatttgcatgcttctgacagctttcctcttttaagggagaaatgagccacttcttctatttaacatagtacccatcttataaagcanataataatctcaaatgctctttcatg

SEQ ID NO: 6998 - DNA, 442 bp, Glycine max
  unsure at all n locations
agcttagaaaaagttaatttaatgtatattaataaatttatcttaaattcataatttttttcaaaactatcattataattaatattcctctcttctaattatttaccaatgcattctttcctttaaattatagtttaaaaattattaattcaagaaacattatagagtgaatcttataaaaatgaacaaacataattttaaacttaattttataaataagaacaaaagaagtaaataataaaaatattatttaggtcattaacagtttatttgtaaaaaaaaaaaggtcattaatggtttatattaagcaattttgtatagagcaaattacaacaaccttcctttaggtatactctaattacacatgcattccttcctttntttttcaccctacacaaaactgcctaacttttgcatcctcattgaacaagtctcccctata

SEQ ID NO: 6999 - DNA, 467 bp, Glycine max
  unsure at all n locations
cgctgagctctnccaattgactngngattgaaccagagattgagttctgatacaagtacaggttctgcaactcactgcacttccctatctcttctgggatagggcctgaaagaagagttgtgtaaatggctatggtttgaattcttttcagcttccctattgaagaaggaagactcccagaaatgctggtttctgcaaggcctaacaccaccaagttggtgcagtttccaatgtcccatggcacctcacccttaaggtttgtgttccctcctgctctcaacacttggagcgcagttaatgagccaatactctntggaatttcaccactcagtttgttgtcatagagtgtcaagttcacaagacttgataaacttcctatgttggatggaatgtttccttcaagaaagttggcatgcagagctaaagtctgcagtttgctcagcctgcaaatttcctgtgggaattca

SEQ ID NO: 7000 - DNA, 468 bp, Glycine max
  unsure at all n locations
ctgcccgcaanaattactaannaaccatttaaggtccaacgccttatacggtcctctntgctttttatcggttaacatggaccgttcaaaagcataaaatcaacatgtaactttactgcttttgcaagaactacgtaggtctgatttcctcatgacaattgaggatacgtaggagcaaaagccccgcttttgtcgaccaccccaagagatcgttaatggtccaacgccttaacgtttctctcctttcaaaaaccaagagatctttaatggtccaacgccttaatgtttctctcctttcaaaaccaagagatcgttaatggtccaatgccttaacttttctctcctttccaaaaatcaaaagatcgtttaatggtccaacgccttaaatgacttttgttcagttaaaatcgatcttttggaagaggatcaaaacaacttaaccaatgtttagttttgaaagaactacat

SEQ ID NO: 7001 - DNA, 427 bp, Glycine max
  unsure at all n locations
ctgatggtgtcgagaagaaatcacatgtntgtcatcatcatanatgtggagaatgtgaatgtatgtatacatgattntgatgatgccaaagaataatcaaacaaggttgcttcaaatgataagcatttgcttcaagaataattcaagagtgcttcaacaaacaaagccttgtttcaagattcactaaagaccaagccttgccttataacaaagtgctttcaagacatgcaatgctctggtaatcaattaccaggaagtgtaatcgattaccagaagacatggttgagaaatagctgttgaaaaaggttttgaatttgattttcaacatgttatcgattaccatatgtctgtaatcgattaccagcaacgaaactttggaaattcanattcaaaagtcataacccttcaaattataactgtgttatcg

SEQ ID NO: 7002 - DNA, 444 bp, Glycine max
ctgcaagcatgcaagctatcactcggaggtccgtattatgtcttcataaatatcgagacgctcgaaattgaacaatggaagctcttgagcaattcaaatggtcataacttttcactctgaggtcggattcaagcgcattgtatattgagaagctcgatattgaacaatggaacctcttgagcaattcaaatggtcataacttttcactaggaggtccgattcaggcgcataatatatcgagacgctcgaaattgaacaatggaacctcttgagcaatttaaatggtcataacttttcactcggaggtccgatccatgcgaatcatatatcgagacactcgacagtgaacagaggaagctcttgagcaattcaaatggtcataacttctcactctgaggtccgattcacgcgcataatatatcgagacgctcgaaatcgaacaac

SEQ ID NO: 7003 - DNA, 465 bp, Glycine max
  unsure at all n locations
atgtaccaagaagtcaaaattaatccgtatgcacgtacactaaaaaaataatacgaatatattggatcgacactaacttactattattattcaaacaaacagaaaatgtactataaaaaactcataaattatgtgcagctttcaattcaagatgtttttcaatttcaaaatatatagctataataacgttaacttaataatctttttcttattaaaatgaactaatcacataaacgctattctntttaggtgcataaaaataatatattattgagaatagtgacatattcggaaagaagaagaaaaatagggaaaatggagtagagaataaataaacaacaaataggcggcttacagttaggattaggcgttaagttgtgtagttgaacagtaagctaaaactaatctntatanttttaattttcttatcatggtatgggtaagaagttcgctctatcggaagca

SEQ ID NO: 7004 - DNA, 345 bp, Glycine max
aaaactggcctcaccgtgataaaaaatgagaaggaggagctgattcctactcgggtgcagaacagttggagagtctgcatcgactataggaggctgaaccaggttaccaaaaaggaccattttcccctgccattcattgaccagatgcttgaacgcctggaaggtaaatctcactactgtttccttgatggtttttctggttatatgcaaatcactattgctcttgaggatcaggaaaagaccacattcacctgcaccttcgacacttttgcctataggaggatgcctttcggcctgtgcaatgcccctggtaccttccagcggtgcatgatcagtatttttagt

SEQ ID NO: 7005 - DNA, 433 bp, Glycine max
  unsure at all n locations
tctttctccatttncctctccttcttgctgctaaacctggcccacttcaaccgctgcttttccaactcaaacgcctgtatttgataactcacctgctgctcctccaactgcacaaccctcttcttcatccactgttttttctcccaagcactcttccctccgtcttgcaacacaccactcacttcaccactcaattgctgcatcatctgtgatgatgaaacaccaaaccctcccttattccttgctctcctcctaatcacatcattttcatcctcctccataccccttgatcctccttctcctgattcctcttcatcctcatcagaaaactcctccgaatcatcgtcctcatcctcatcctctttcaacattctcagactccccaccccgttctctgatgagtgcaaacactgctgctgttgatgttgatgtg

SEQ ID NO: 7006 - DNA, 434 bp, Glycine max
  unsure at all n locations
agctntaagcgctgtctattgatgatctatttcttctcanagntctcctctctagggtccaccaattctactgctccttgaggtctgacttctttgattatgaacggccctgaccacttggactttagcttacctgggaatagccttagccttgagttaaagagtaataactattgccctggctggaattctttcctttttagcttattgtcatgatacaccttcatctttttctagtagattctggatgactcgtaggcgtttagtctcatctcttctagttctagcaactgtagcttcctcttttctctgcatgtgttgttatcaaagttgagcaacttgagagcccaatatgctntgttctccagctccactggtaaatgacatgccttcctatacactagctgaaatggtgataagccgatgagagtctt

SEQ ID NO: 7007 - DNA, 459 bp, Glycine max
  unsure at all n locations
tatcaagctcccaatgtacgaatcggccgcggaactctatcgagattcgctctcagacgccataatcgcaagtgaaccagaatagggtttgggttttggggcctcttgtttgaagcctctaatctaatcagatgtttggttttgagacttgagagggagataatctagtccaaggctggtctttgattcaataatataaaggttaaattattatttagaatttnttaatatatttctaatgtttaattaggtattttaattattgagtgatttaattagatcatctaattatttaaaataattttattggatcatttaagtgttaacattattaactggtcacttagataggattctaccatatacaatgacaaaagattcaactaatgacttattaacaacttagatgactcgttaacgacattaacacanataactcaattgaatcattttaaataa

SEQ ID NO: 7008 - DNA, 435 bp, Glycine max
agcttccacgttcaatttcgagcgtctttatatgttacgggacttaatcagacatccgagaaaaaagttagtatcgtttgagttggctcagagattcaacattcaatttcgagcgtctcgatatattacgggactcaatcagacatccgagtaaaaagttattgtcgtttgaattggctcagaggttcaacattcaatttcgagcgcctcgatatgttacgggactcaataagacatccgagtaaaaagttattgtcgtttgaattggctcagaggttcaacattcaatttcgagcgcctcgatatgttacgggactcaataagacatccgagtaaaaagtttttgtcgtttgaatttgctcagaggttcaagattcaatttcgagagtctcgatatgttacgggactcaatcagacatccgagtaaaaagttat

SEQ ID NO: 7009 - DNA, 469 bp, Glycine max
  unsure at all n locations
ngaggatagagacttctcaaactatttatcttctctctcaaagaggctctctaactttctagctntctcactctaagaagtgaattcactctcgtctcggatggttaagaatgaaggctcctacccttatttatactactcctcctccacaatgaatggtggagattacttgtatcctatggtggagattaattctctagaatgctccacacattctaggagtctctacactcttctactcccttccatatccttccatactcttccataaggttccacacatatccagaatattctataggtttccacaaacttccacaagcttctagagagttctacactactctagagttctntaggacgttctagataattctacactnttctagatagctctagagatttctagaacctcttcaattaatgacggatcccaacacaatgatacaaaataagagtgttaattttt

SEQ ID NO: 7010 - DNA, 430 bp, Glycine max
  unsure at all n locations
agcttcatgatgatgaatttagtagttttgatgatgacaaaaagcccaaaagaatgattcatgaaaagacatcatgaagaatcaagattcaagagaagatgaattcaagattcaagagaagaaatcaagaagcaacaagtcaagacttaacaagggaagtattgaaaaggatttttctaaaaccaaacatagcacaattttgttntacaaaagagttttctcaaatttttctaagttaccagagtatttactctctggtaatcgattaccagtttcctgtaattgattaccaatgataaaatttgatttcaaaaagtctttaactaaatttgcaacgttccaaatgatttttaaatggtgtatttgattacaatatattggtaatcgattacgagtgtatctgaacattgaaattcaaattcaattgtga

SEQ ID NO: 7011 - DNA, 426 bp, Glycine max
agctggaaattgtacaacttaagctctttataaaatcgagtggtcataaattttcacacagatgtccgattcggggaaataatatatcgagacgcacgaaattgaacaacggaagctctcgagaaatttgaatggtcataacatttcactcggatgttcgatccggggacataatttatcgagacgctcgaaattgaacaaccgaagctctcgacaaattagaatggtcgtaacttttcacgcgaatgttcgattcggggacataactcatctagacgctcgaaattgaacaacggaagctctcgagaaatttgaatggtcataagttttcacacggatgtccgattcgggaacataatatatcaagacaatcgaaattgaacaacggaagctctcgagagaatcgaatggtcataactgttcaca

SEQ ID NO: 7012 - DNA, 409 bp, Glycine max
agctcctagtactccaccatatcctgatttaaattattaataattgagaggtgaccacagaataacaaaacaatatcaggtcgaacatatattattaaactaacgtttccaatttctcatatatgaggaggacagaaacaaaaaacaattctgagtcttctgatcactgaattaatagagaaattaacaaactgaacaaacaaaactagcaggttttttcggaaaacttaatttattctggtgtggacggcagacagacttatatttcttggtttcaataggacttctttagcatttttctatctactattatctacaaataatcaagttattaatgaccggacaaaatcaagaaataacctcttgcgtcaatattatagaagtcgttcgaatctcgcattacactact

SEQ ID NO: 7013 - DNA, 466 bp, Glycine max
  unsure at all n locations
tgcgaagtgggtggaattcctagagcaattcccttatgttatcaaacataaaaagggaaaaggtaatattgtagccgatgctctntctcggcgtcatgcattactttctatgcttgaaacaaaattgattggtcttgaatgtttgaaaagcatgtatgaaaatgatgaaacttttggagaaatttttaaaaattgtgaaaaattttcagaaaatggtttctttagacatgaaggctttcttttcaaagaaaacaaattgtgtgtgcctaaatgttctactagaaanttgcttgtttgtgaagcacatgaggaggtttaatggggcattttggggtccaaaagactctagaaacattacaagaaccattttattggcctcatatgaaaaaggatgtgcagaaatnttgtgaacattgcattgtatgtaaaaaggcaaagtctaaggtaaagcctcatggattgatac

SEQ ID NO: 7014 - DNA, 432 bp, Glycine max
agctttgatttcctttgttccggaaacctttcttttctcatgtgcacccaaacccaatctccgggttcgaagacaaccttctttctccctttgttggcttgtttagcatagcttttatttttcctctcaatttgatctttgactctctcatgaagcttcttcacatagtccgcctttgcttgaccttctttatgcttaaaaacagaaacattaggcataggcaaaagatcaagaggagttagtgggttaaaaccataaacaacttcaaaaggagaacaattagtggtgctatgaacagctctattgtaagcaaattcaacatggggtaaacaagcttcccaagtttttaagttcttcctcaaaactgtcctaagcaaagttcccaaagtcctattaacaacttccgtttgcccatcggtttgtgggtgacaa

SEQ ID NO: 7015 - DNA, 450 bp, Glycine max
  unsure at all n locations
ntattcaagacanagaaattaaagatattcaagatggatgatcaagacagtttttagagtcttagaaagggtatattaaataggaagggaattccaattgaagtagcaaaaggtttggccaagaattctaagttaaaaagtctttttcaacaaatttactctctggtaatcaattaccagatgatgtaatcgattaccaatggccaaaactgatttacaacagctattaaaatttgaattcaaaatttgcactgtgtaatcgattacacatatatggtagtcgattaccagcagttattgaacattttaattcaaattntaaagcttgtaatcgattacacaaataatgtaatcgattactagagcacatttttagaaaatattctcgacagacacatctttntgtgtggttcttgaatggctatcatangcctatatatatgtgacttg

SEQ ID NO: 7016 - DNA, 474 bp, Glycine max
  unsure at all n locations
cttgagacgcatgtganaactttggcatcatcaaaacattcagcttgatccttngtctacacatgtcacaaggtggatgatgcttcccacatctcanaactctcttacagggaagttgtgagactccatggtttgcctaggaccattgtgtcagatagagatgctaagttcattagccacttctggaaaaccttatgggctaagctaggaactaaacttcttttctctaccacttgtcatccacaaactgatgggcaaacagagttagtgaataggtctttatccacccttttaaaggctcttctgaaaggcaaccataagtcttgggatgagtatcttcctcatgtagaatttgcctacaataaggggggtcatagaaccaccaagcggtccccttttgaggttgtctatgggttcaatcccctaacactgttagaactcattcccctcccactggacactttatttatacat

SEQ ID NO: 7017 - DNA, 417 bp, Glycine max
  unsure at all n locations
tcggttgttcaatttcgagcatctcgatatgtgatgttcctgtatctgacctccgtgtcataacttatgaccattttaatttctcgagagcttccgttgttcaatttcgagcgtctcgatatattatgcgcctgaatcggacatccgtgtgaagggttatgaccatttcaatttcacgagagcttccgttgttcaatttcgagcgtctcgatatgtgatgttcctgaatcggacctccgtgtgataacttatgaccattttgaattctcgagagcttccgttgatcaatttcgaacgtctcaatatgtgatgtgcctgaatcggacctncgtgtgataacttatgaccatttagaattctcgagagcttccgttgttcaatattgagcatctcaatatatgatgtgcctgaatcgga

SEQ ID NO: 7018 - DNA, 436 bp, Glycine max
  unsure at all n locations
agctagatattgaacaacggttgctctctagaaattcaaatgctcataacatttcacacggatgtccgattcagatgcataacgtatctagatgctcaaaattgaaaaacagaagctctcgagaaattcaaatggtcataacttttaacatggatgtctgattccgaagcataacatatcgtgacgctcaaaattgaataagagaagctctcgagaaattcaaattgtcataaattttcacacggatgttcgattcggggataaaatatgttgagatgcttgaaattgagagataaaagctctcgtgaaattccaatggtcataacttttcactcggatttccgattcaagacacttgaaattgaccaacggaagctttntagaaattcgaatggtcgtaacttttcacacggatgtccgattcggcgaaataata

SEQ ID NO: 7019 - DNA, 442 bp, Glycine max
  unsure at all n locations
agctnggcatattctaacgtatagtatgcaatttacaaagaaaaaaaatacccatattaaaattcactactttgataaaatattatttttcatgaatcatttatttttattctataatcacaattctgaaagatattttaagatgttttttgaattaaatattattaaataaattatttaatctatgtatttgataattagatttagttatatttaggttcagatggaatatgttttaaaataacataaaaaaatttaaaattttatcaaaatcagcgcaaatcaaatataataaaaccatttagtaatataatatttttaaccttaattaagtatccacatgattacatcgatgtaaaagccctgaaaaccaatcactgataactttgaagttagaccagcaccatatgcatgattagtttagaaaacttaggaggaaaga

SEQ ID NO: 7020 - DNA, 446 bp, Glycine max
  unsure at all n locations
agctnttctttgagcaaagcaaaggcttgctcttgtttttcaccctaggtaaatgccacattcttcttcaccagctcattgagaggtgatgcaattgtagagaaattaggaatgaaccttctatagaagcttgctaacccatggaagctcctaatatctcccacactttttggggtgggccattctttgatggccttgattttctcaaggtccacttggaccccatttctaccaactacaaaacctaagaaaactatattatctacacaaaaggtacacttctctatatttgcatagagggtgtttttcctaaggactgaaagaacttgtctgagatgtcctaagtgatcatctaggctcctactatacactaaaatatcatcaaaataaacaactacaaatctacctatgaaatcccttaagacatgatgcataagcctcataaa

SEQ ID NO: 7021 - DNA, 430 bp, Glycine max
agcttatggtgatttatgattatatattatgacattgtaaaattattttatattgtcaatgcatctacgatcataaactcatccaaaaatgaatcacttcatgttaaattctcacacgacttcatcaaatgaaaatttcatgtctatttctctttttgaaggtatatttacaaaggtctctcatggctctaagaaattttattttttattttggatttattgcctggatacagtgattttattgaggagtgggtcaaaattggcttgcctgcaaaggcaaaggtgaagacacaacatggggatgcaccttctgctgagttgtgctcacactgtgagaaggtatgagacacattagtacaagctacatgctagctaaatagtattttctaatatttttcacaagactcagacttaacttcaacacatcttc

SEQ ID NO: 7022 - DNA, 207 bp, Glycine max
tagcctctcgacatattatgcgctccactcggacatccgcgtgagaagctatgaccatatgaatatctcgagagcttccgacgctgaatttcgagcgtatcgatatattatacgcctggatcggacctccgcgtgagaaggtatgaccatatgaatatcgcgagagcttccgctgtgcattttcgagcgtcgctatatgtgatgcgc

SEQ ID NO: 7023 - DNA, 421 bp, Glycine max
  unsure at all n locations
agcttgaatcggatatccgtgtgaaatgttatgaccatttgaatttctgaagagcttccgtagttcaatttcgagcttctcgacatattatacgcccgaatcggacattcgtgtgaaaagttatgaccatttgaatatctcgagagcttcctatgtttaatttcgagcgtatcgatatattataagcctgaatcggacattcgtgtgaaaagttcttaccatttgaatttgcgagagttttttatgtttaatttcgagcgtatcgatatattatacgcctgcatcggacatccgtgtgaaaagttatgaccatttgaatttctcaagagcttcggttgttcaatttctagactctcgacatattatgcgcccgaatcggacatccgtgtgaaaagntatgaccatttgaacttctcgagag

SEQ ID NO: 7024 - DNA, 385 bp, Glycine max
gggcgcgaaacatgtagaggaatctaactgccttggctcgtgtctgctgcagttagagatttatagcatgaacaagtatttccattaaacaaagggatgcatggacttgctacaccacttgtggaatacagacttgctgatggaactgaatttgaaatggaagcgataccaatgggggtcaatagtcgggacatctctaacacgtttaggattgcctctccatttgtagttgatgaaactatgcttgaaaaagcgcttggggtaattgataatgatatgtcataatgccgtgttacaaatttttttaatatattacatgtgaatgaataggctcggctctgatgtcatcatgaatgatttttcttaagcaaatcttgaaggaaaa

SEQ ID NO: 7025 - DNA, 463 bp, Glycine max
ctaagcttattaatgatgccttcaagcattgtataatctgtaactccaatctttccatgaagaagccacataagccaatccgcttggtgcaacaacagagcatgtttttggtttgaaccaacatgattccaccacgagacgagtttacacagagtggatgatccggtgcaaaccgtatgatttggaggagcaatagatttcaccgttgccaaagcatcagggcaactctcattgtaaagtaaaggtctccacaacggttcttccgagtcactgcaacaccagattcatattcctacttcagaattcaaatacacgataatcttaatctttaattaacagaaagattaaaatttaaaacaaaaagtcgatccacctatcgacaatgatagtagttgcagaagtcccatcaacagaaatggagacaacgtgtttgcgaatgtgaagtgtgacatcatgaagcata

SEQ ID NO: 7026 - DNA, 431 bp, Glycine max
  unsure at all n locations
agcttgngaatgtgatcaaggagaaattgttgggtctcctaagtttcccttataaacctatgatatgaaagtttacatttcacttatctaatagctaacttgattatttattttgttgatcctttcagaaaatcgactgtattcacaacaatgcagttatggagttgatgagaggtgttagaaatcagttaactgaactcatatctggtctagctgttcaagacatggccccaatgagtttgggtttatctcacagcttatccagatacaaattgaagtttagtgcagagaaggtgtattttccgttgactttatggttataaggaattgatgttatcattgtactcttattctaagtatattgaccacactgtagattnttattatgttgaggtctatatcctactctgctattcaccaaagaaatactc

SEQ ID NO: 7027 - DNA, 463 bp, Glycine max
  unsure at all n locations
ctgatggtgtcgagaagaaaatcacatgttgtcatcatcaaaaaggtggagaatgtgaatgtatgtatacatgattntgatgatgtcaaaaaagaatctaacaaggctgcttcaaatgataagcatttgcttcaagaataattcaagattgcttcaacaaacaaagccttgtttcaagattcactaaagaccaagccttgccttaaaacaaagtgatttcaagacatgcaaggctctggtaatcgattaccaggaagtgtaatcgattaccagaagacggtgttgagaaatagctgttgaaaaagggtttgaatttgaattttcaacatgtaatcgattaccatatgtctgtaatcgattaccagcaacgaaactttggaaactcaaattcaaaagtcataaccctgtcaattataactgtgtaatcgattacgcaaacattgtaatcgattactagtggaaa

SEQ ID NO: 7028 - DNA, 426 bp, Glycine max
aaatgttcgacaccgaaacctagtgaaggttatcacttcttgctccagtcttgattataagggagaggaattcaaggcccttgttatgcaactcatgcccaatggtaacttggacgtgagtctataccccgaagatgttgagtcaggatcctctctaccttgttgcaaagattgaacattttcattgatgttgcctctgctatggactacttgcaccatgactgtaatccacccgtagtgcattgtgatatgaaacctgtcaatgtccttctagatgaaaatatggtagcccatgttgcatattttggattggaaggtttctatctcaaagtacatctgagatgcagagtagcactctgggactgaaaggatcaatatgctatattgcccctggtacacattaatgtttctcttcctattaatact

SEQ ID NO: 7029 - DNA, 448 bp, Glycine max
  unsure at all n locations
cttgatctaccaccatcgctgccaccatcatctaagttttctattatttttaatattactagtactntgttttctagtcgtgtatttggctatattatgacattttggataatttagtatttctttatttgcatggtttgattgaacaattatgaattatgttatatgactatgtggtttttatatttgatctattcatgtttcttgcttcatgattggtttatattcttcaatgtatgtcttgtgaatgattaatagtatatgattgtcatatacttgttacgcacttgggctctttgttgatgccaaagggggagagaaataggaattaaatcaagaactcacataagtaattaacttaatttcaagtgaagcataaattaaaaaacacagggggagaatggaaaattaagtgagtgatcgactacganaaagtgtgtgtatgtgt

SEQ ID NO: 7030 - DNA, 433 bp, Glycine max
agcttcaagaataatggcctcagcaaacttcttattcccagaaggaaattcaataaataggcctccaatttttaatggaaagggttaccactactggaaaacccaaatgcaaattttcattgaggcaatagacttaaacatttgggaagccatagaagttggaccttatgtacccaccatggtggctggaaatgcaacaatagagaaacctagagaagagtggactgaagatgaaagaagattagtgcagtacaatttaaaggctaaaaacatcattacttctaccctaggaatggatgaatattttagggtttcaaattgtaagagtgctaaggatatgtgggacactctacaagttacacatgagggaacaactgatgtcaaacgatctaggataaatactttaactcatgagtatgaattatttaggatg

SEQ ID NO: 7031 - DNA, 426 bp, Glycine max
  unsure at all n locations
tatgctgcanatatntacaatagacctcctcaacctcagcagcataatcaaccacagcagaacaattatgacctctccagcaacagatataaccctagatggaggaatcaccctaacctcagattgtccagccctcagcaacaacaacaacaacctgctccttccttccaaaatgttgctggcccaagcagaccatacattcctccaccaatccaacaacagcaacaaccccagatacagccaacagttgaggcccctccacaaccttcccttgaagaacttgtgaggcaaatgactatgcagaacatgcagtttcagcaagagaccagagcctccattcagagcttaaccaattagatgggacaatnggctacacaattgaatcaacaacagtcccagaaatttgacaagctaccttctcaagct

SEQ ID NO: 7032 - DNA, 393 bp, Glycine max
  unsure at all n locations
gcttgaagatccaaggatcaatgttactgctagcgtgtggcaaattgtaagcanaagaccaaganagcacgtcatgcgattccccaggtatgtcgagtcccgtggcagcagagaaccctatcctcacccactcgggaagagaagtcttcaaatcgaccacatcggagaggatattgctggttctctgtgaagggtagaccacagaagcaaccaagaagctggtggaggcatcataggtaatgagaaccttggctactttattgttggccaaatcccaagacgtcgttttgatggatctgatagaattgacgttaattccgatgtgtggatttggtggatcccaagagttccggaaagtgtcaaactcaacagcgacgactngatcaccagact

SEQ ID NO: 7033 - DNA, 472 bp, Glycine max
  unsure at all n locations
tgtaccannagttgaaaagtaactaagcctatgtttgcatgtacgaatgatagctcctaattctgtatgaactatagctgtacatacccctctaatatcatatataacagcttcacaatctaattcaataataatccagactcaagcttttaattttttttagttaaagtcagattatatatattaaaaaaaagcttattaagttttatagactaacctatttagtaataattaatatttttttaataaaaatattgttttaatatgaaatataatattataattattttagtaatttggatatttgaatcattttaatgtttgaaataagttaattaatgtaaacatagatgaataatagaaataaggattattttcttttgttgggacataaaagaatttgatatcctatcacatgtaatgggttatagataaatttgatcaaatcttattatcttaaaatggtttatta

SEQ ID NO: 7034 - DNA, 423 bp, Glycine max
tcaacctagaggagacgaaccattccaagtgttggagaagatcaacgacaatgcctacaagattgacttgcctagtgagtataatgtaagtgccactttcaatgtgtctgatctatctctttttgatgcagatggaggagccttggatttgaggacaaatccttttcaaggagggagtgatgaggacataaccaagggcaaggaccatgaagcacttgaaggtcccatgaccagaggcagacttaaacaagcccaacacatcatagagacaaggctggtcatttgtatagctgtcattgatgatgattgaaggcccaagtggagaaagatgaaggcccagaggcagatgcactaccaagactactaattgttgctgaaggcccaaactaacttgaaggcccaagttaaataagtttttagtta

SEQ ID NO: 7035 - DNA, 427 bp, Glycine max
  unsure at all n locations
gcctctcgttagtggtaccttaagtttcatgggataatttcttcatttggttgtgatgaaaaccccatggatcaatgcatatacctcaaggtcaatgggagtaaaatatgttttcttgttttatatgtagatgatattttacttgcagccaatgatcgaggtttgctacatgaggtgaaacaatttctctctaagaattttgatatgaaggatatgggtgatgcatcttatgtcatcggcattaagattcatagagatagacctcggggtattttaggtttatcataggaaacctatattaacaaaattttagagagatttcaaatgaaagattgttcactaagtgtcgctccccttgtgaagggtgatatgtttaattngaaacaatgcccatagaatgactatgagagggaaaaaatgaataaca

SEQ ID NO: 7036 - DNA, 448 bp, Glycine max
  unsure at all n locations
agctngttntaaaccatatatagatttattaagcttgcaaaccaaatgctcaccactatcagaggagaaacctttaggttgtttcatataaacctcctcctctaaatcaccattaagaaaagttgttttaacatcaatttgttgcaactcaaggtcaaaatgagcaactaatgccaagattatacgaagagaatctttcttagatactggagaaaaagtctctttgtaatctattccttccttttgagtaaatcctttagcaacaagtcttgccttgtatctctcgatgttgcctaatgaatcccttttggtcttaaaggcccatttatatccaatgacctttgccccattaggcaactctacaaggttccaaactttgttactctgcatagaattcatctcatccttcatggcatcataccataaatntgactctttacaactcatg

SEQ ID NO: 7037 - DNA, 434 bp, Glycine max
  unsure at all n locations
cttggagtntccaagtgccaattcgtcttcttctntagtccagtcttcttctggcttcaattcatcagtgggctttccttctgtgtccagcatcttgggatgttcccagcctttgatgacagctttccaggttctgctatccagtgatttgagaaaggccaccatccttgctttccagtattcatagttggtcccatccagaattggtggtctgttcactggtcctccttctttctccatgttcatcagaatttatctccctagatctcactcagtgatttcgagtgcctgctctgataccaattgaaattctgatactgtggacagatgtcgtacaggatgtcacgacatcatgcttcagaacatgctgattatatttgagcgtatgaacaggttaaacaagtaaataacacaagagaattgtatacccagtc

SEQ ID NO: 7038 - DNA, 463 bp, Glycine max
  unsure at all n locations
ngctttccattgtgcgtccatagtattggctttgcagtttcatcagtatgcatattgactatgtttcaacctatctttgtaattttatagatttgctgtgttttcatttgtcttatcagacctcaattttcgtcatgttttttgttacaaattggctcaattctaccttgtcttgtatcaaaatcgacttcattntaactcatccaaatatgtagnttggtgttatgtttgattctatatgtaatttgtctccgcctcttattcacaaatatagttcggcctcatctttaagccagatatgatgttgacttcatgctttccattatgtgttttaattttagtttgtttctcttgatatgtttaattttaacaagctataccagagtgatagaatatcacaagtgtgtacatcataatactatctaatattattatatcttattatatatagcgtttaagtatc

SEQ ID NO: 7039 - DNA, 441 bp, Glycine max
  unsure at all n locations
ntanacggtatataattatttatgttttagtgtttntatgccaaatgttattgactaatgaggggttagggttacttcactctgtangatttatggttacgtgactaattaggatttagttttacttgaccatctatggtttatggttactngattaatggcgaatttatgctaccttactaagtagggattatgattgcttaactaattanggtttaaggttagcttactagtcaaggttcactaattgtggtttagtgttacataacaaattacgatggtttcactaattagtgccattaaaggtttaacatgataatatcaattggtgattaatttataatacacatacaacatacatgataataattaaaaatcttatcaaataacattaaataataaacattngttaatgatattgcatacataattcatattaaa

SEQ ID NO: 7040 - DNA, 316 bp, Glycine max
  unsure at all n locations
atcggaacactcgggtgcttacacaaggtgcaaagactccaactttaaacacttggaaacccccaaaagncccacatcgctaacctgaaccttctctaaatgaatctcaaccaacccggaattcaactttccaacactttccagagtcacatcccaatcccctgaacaccgaatcaacttgagcgtttcaagcttcttcgagttaattattaacggcgcgaaactgtggcctgtaacgagctccttgaggcaaatcgatttcaacgaagaagaggaagtaacggaaagaggcaccgattccgcgccgccaccgtta

SEQ ID NO: 7041 - DNA, 431 bp, Glycine max
  unsure at all n locations
tgtaagacaagaaagtgcaactgagatatgatatgccctaccactgtttggttatcctgaagatggcacatttgtggagcaagatttcgttattaaaggacaattatgtcttgccatacaatagatttgacccagcaggcctgtttgaaattatttaacttactgcaatgaatcctagcttggtaaataattcttcaccgactcatcccagatggagaaaagtagcttatggtggtatgcaacctggttatgatgacaatcatacagatgaatctttccttgaaggaatggtcatgaatgccagtgttgtaaaacgggacatgctaaaggtgatgctgganctcggttccatttctgaaatattatgtattggtgctcttgatgcttggtctggacctgtacacttgcatcaactattgatgaaaattctc

SEQ ID NO: 7042 - DNA, 381 bp, Glycine max
agctataactgtctggtaatctatgaacatatgatgactggatctccagtgggcagatacgtgatagaacagctataaaaatttgaattcgaaattttaaaagctgtaatcgattacacaattgtggtaatcgattaccagcagttagtaaacgttttaattcaaattttaaaagctgtaatcgattacacaattgctgtaatcgattaccagacaggaatttcagaaaaataatttcaagagtcacaacttttcaaaggctttactcatgaccaccaatggtctatatatatgtgacttaaacatgaaattgctcagagattttcagaacaacaaagtgtttatcctctcaaaaagcaatttcattttatcctcttaaag

SEQ ID NO: 7043 - DNA, 467 bp, Glycine max
  unsure at all n locations
tccccttattcacttccctacttaaaccccacatgtttctttactatttcatttaaggaagagctagtgtgctaaagtctttgataaagcacctatagaaactagctaacacatggaaaatcctcgcctcacccacattcttaggggtaggccaatctctaaatagctttcactttatcctcatcgacttgcatgcccttagagctcacaacanattctaggaacactacttgattagtgcaaaatgtgcattagccttatttgcattcaagctctctcttttaagcacttccaaaacactcctaatatggtccaagtggtcatcaaatgtcaaactatagatcgagatatcaccaaagtacacaaccacaaatttaataatgaagtgtttcaaaatatgggtcattaatctcatgaaagtggttggtgcattggttacgccaaaaggcatgaccaaccactcatat

SEQ ID NO: 7044 - DNA, 459 bp, Glycine max
  unsure at all n locations
cttctatttaaatntcgagcatctcgatatattacgggactcaatttcacatccgagtaaaaggttattgtcgtttgaatntgctcagagcttcannatttcaattgcagtgtctcaatatgttacgggactcaatcggacatccgagtaagatgttattgtcgtttggaattgctcaaagtttcttttttaaatttcgagcgtctcgatatattatgggactcaattggacatcggagtaaaaagttattgtcgtttgaatttgcttagagcttctattttaaattctgagcgtttcgatatattacaggactcaataggacatctgagaaaaatgttaatgccgtttgaatntgctcggagcttctatttttcaatttgagtgtcccgatattntaaaggactcaatcggacatccgagtaaaatggtattggtcgtagaagttgctcagagcttct

SEQ ID NO: 7045 - DNA, 438 bp, Glycine max
agcttgttgagtatgcagtgaaaaatggccctgactttgaagctatgatatgtgaaaaacaacgggataatccttcctatagcttcctctttggtggggaaggtcatggttactaccgttataagctttggttatcaactcgtcccccgggtggtccattcaacccgtcttttccatcatcttccatgcccatgatgcttcctccaaatccaatgatgaatctgtctcctgtaaatgtttctccgatgaaccctgcaggaattggttcttcaccttcgatgctaggtccacctcctttccaacagttctatgatcaacaacaccaccatcaacatcctcagtcttttggacttcctggtcggcctgagtatgatccgtcatccaagtctttcaaagggatctctgggccacttccatctgatgttgcaatggagctca

SEQ ID NO: 7046 - DNA, 358 bp, Glycine max
  unsure at all n locations
gcctcacgtcagtggtaccttaagtntcatgggataatntcttcattnggttntgatgaanaccacatggatcaatgcatataccacaaggtcagtgggagtaaaatatgttntcttgttntatatgtagatgatattntacttgcaaccaatgatcaaggtttgctacatgaggtgaaacaatttctctctaagaatntggacatgaaggatatgggtgatgcatcttatgtcatcggcattaagattcatagagatagacctcgaggtattttaggtctatcataggagacctatattaacaaaantttattagtgatttggatgaaaattgttcaccaagtgttgctcccatcgt

SEQ ID NO: 7047 - DNA, 227 bp, Glycine max
tagctttagatttggatccataggactatcaacaggtctacaattctgcatacctgtctcctccaaaatatcaagagcatacttcctctgtgagatcacgacatcatcttctgattgagcaacctcaataccaagaaaatacttcagatatcccaaatctttggtctggaagtgactaaacaagtgttctttaagttgggcaatcttagtagtatcatttcctgtta

SEQ ID NO: 7048 - DNA, 432 bp, Glycine max
  unsure at all n locations
ggtatgtatataacattgtatagggttatgggtgatgagaggtgcacagtgcctgagtgggtagcatgaacatgatgaccattatggagcttcactgtaactgggttaatgcgttcatatgaatggagattattcatggaacaagatacgtgatctgtagctcctgaatctagtatccaggagctagtaaaaggttgagacatacctgcgttggaacggttatcaatggtgcaggatgagaatgacgcaactcgtttggtttgctccgatgccgcgtttacggccgatggccgctggattaaagcaagtanggccttgtacttctcacgcgagaatcgcacgagatctgngactcatgatgctgagtttgatcatncagcggtttattatccaccgtcatcacgtcatttactgtaggtcttcttccattat

SEQ ID NO: 7049 - DNA, 449 bp, Glycine max
  unsure at all n locations
gcagccattgagagagctcgagtgccactgtcactagacaccatataattcaataatggcccatataagcacacaagaatatactgaacatttggcagactttagctagcatcggatataacatggtttgagcttctcttccctaattaaaaattgaagtttctacatggatatacaacatattattaattacccggatagagaagatgataaaagagagaaagatgtacatgtgatgataagtaatatatatatgatttgtttcttgctaccataagtatgatatcatatgataaaatgaacaggtcaatgaaaagacataagagtatcattgtgagtgttacattatgcatatatgtccaacaattataactctanacttttagacagctctattgtttgtatagatatatcatgataagacactagctactttataagaactatat

SEQ ID NO: 7050 - DNA, 229 bp, Glycine max
agcttgccgccacggagttttccgactatgctcttgtgtggtggaacaagctacaaaaggagagagcaagaaatgaagagccaatggttgatacatggacagagatgaaaaagatcatgaggaagcggtatgtgccggctagttactcaagggacttgaaatttaagctccaaaaactaacccaaggcaacaagggggttgaggagtatttcaaggaaatggatgtgct

SEQ ID NO: 7051 - DNA, 504 bp, Glycine max
  unsure at all n locations
gctgtcacctctgtntctctacctntcatcacanaccctggtggttgagtgacanaaacttcttcttctagtgagccattaagaaatgcagaatttacatccatttggtgtacttcccagcaattgaagctagccattgctattacaagtttcactgtttccaacctagcaacaggggcaaatacttcatcataaaccagaccttgcttttgcaaaaatcccttngcaaccagtctggctttgaactntgttacttctcctctaggattcaacttagttntgtagacccattntactgctatggctttctttcctattagtagctttgtgagactccatgtcttgtttctctcaatagacctcaactcttcttccattgcttcaacccaatgtgagtgcttcanagcttcttccacgccaataggttccatctcagcaagtaaggccatatggacaaagtcaccatcaactgtaatcgaggaatctgggaatatctcatagtca

SEQ ID NO: 7052 - DNA, 359 bp, Glycine max
  unsure at all n locations
ttctatactatctccgatccgaccagacacatgtaagaattgttgctntagattatcagcttctttctgttatgacaatgtaatattgttttatttcttatttacaaagggtattgtggttcaaagatctgacttaactgggcttataatgcggcgaaatgaactagcaagtgatcttcttaaggcattaactntgcaacaactgcctccaatgttacaggtatgggcttttccataatttatataatgtatttttaacaacttcattggattgccattacgagccttcattntctgattgtagagtcctagcatttgcaaaggttgtcgccatcttaatgtgtgtagcatttatcata

SEQ ID NO: 7053 - DNA, 352 bp, Glycine max
  unsure at all n locations
gcttagctaaacacacctctctaatagctaagctcacctccttgagatgagaagctagagcttatctacacacccnctataatagctaactcatccccatgacaaaatacatgaaaataaaaaaaattctctactacaaagactactcagaatgtctcgaaatacaaggctaanaccttatactactagaatgaccaaaatacaacgcccaaacgaagcagaaacctattctaatatttacaaagataagcgggctcatacttagcccatgggctcgaaatctatcataaggctcatgagaaccctagggccttcccttggatctctggtccaatctacttggattcttcta

SEQ ID NO: 7054 - DNA, 227 bp, Glycine max
ttgcttggtatctcagcaaaagttcgtttcatcagttagatttcttgttagttagttagaattagttctcgagtgtaactgattaaaaactaccagcgctttctctttcttctgctactctgcaaagatataaatacgtaataaatgcatcagtaaaaaggcatgcagtatttggtcactttgcacatgatttacgcttatctttctctctctatggcacaatacct

SEQ ID NO: 7055 - DNA, 397 bp, Glycine max
  unsure at all n locations
atgcattctatcagaagcatngcattgcattcaaatatgtcttntatgcgttcaacagcatccaaaggatagacctacaatgtcaactgttgttgtgatgttgattagtgagagtgccattccccaacctaaggaacccgctttccttatggacaataacgttntttgtgatgcaggttcttcttccatgcatcagttttcaaccaattgactaagtactaccatgttagagcctcagtagtggatcatttacctgcattggatcttttaagatgggtaaaacttcagcctcggtgagtcggtttgtattcactatactgtatacatatttcttcacatgtgttggttaagcctagtgcatttcctttaccattgcattgagcctattcaaattcac

SEQ ID NO: 7056 - DNA, 390 bp, Glycine max
  unsure at all n locations
tagaagatctatctatgggctaaaacaagcatgccgccaatggtatatatagtttcataatgtggtctccanatatggattggaggaaaatgttgtaagccaatgcatgtatcttatagtgtgtgggagtaagtatattttcttagtcctatatgtatatgatattatacttgcaagtagtgacttgcgtcttctgcatgataccaaaaatttcctctcacaaaactttgatatgaacgatatgggtgaagccttctatgtcattagaatagacattcatagagatagatctctaagaacatcgagattatctcaaaaggcttacatagaacaagttgtgataagatataatatgcacaattgtcatcaattgctacaactatagttaaa

SEQ ID NO: 7057 - DNA, 439 bp, Glycine max
  unsure at all n locations
gctggaactacttcacatggacttgatggngcctatgctagttgaaagccttggaggaaagaggtatgcctatgttgttgtggatgatttctccagatntacctgngtcaactntatcagagagaaatcagacacctttgaagtattcaaggagttgagtctaagacttcaaagagaaaaagactgtgtcatcaagagaatcangagtgaccatggcagagagtttgaaaacagcaagtttactgaattctgcacatctgaaggcatcactcatgagttctctgcagccattacaccataacaaaatggcatagttgaaaggaanaacaggactntgcaagaagctgctagggtcatgcttcatgccanagaacttccctataatctctgggctgaagccatgaacacagcatgctacatccacaacagagtcacactt

SEQ ID NO: 7058 - DNA, 361 bp, Glycine max
  unsure at all n locations
gttcttcctcanaactgtcctaagcaaagttcccttattcctattaacaacttccgtttgcccatcggtttgtgggtgacaagtggttgaaaataacaatntagtgcccaacttgctccacaaagtcctccaaaaatggcttaagaacttagagtccctatcactaacaatgctccttggcaaaccatggagtctcacaatctcctttgaaaacanatcagccacatgggaagcatcatcaactnttttacatggaataaaatgagccattttagaaaacctatcaacaaccacaaaaatggaatctctaccattgctttgttttggcagccccaaaacanaatccatggataaatcaatc

SEQ ID NO: 7059 - DNA, 232 bp, Glycine max
agcttttgttttcaattacgagcgtctccatatattacgggcctcaatccgacatcggagtaaaaagttattgtcgttagaatttgctcagagcttctgttctgaattttgagagtctcgatatactacggaacacaatcggacatctcagtaaaaagttattgtcgtttgaatttgctcagagcttctgttcttaattacgagagtctcgatatattacgggattcattcg

SEQ ID NO: 7060 - DNA, 423 bp, Glycine max
  unsure at all n locations
atcctgtctggatagaggcaatgaatgcanatattaatgctttatatcttaatgatactnngcgtttgactgatctgcctcaacataagaatgttgttaattggaaatgggtgtataagataaagaacaaatcatatgggtcagtggaaatacataaggcaaggttagtggcctacgactacacttaagtggaagggcaagattacttacacatcctttctacagtggccaagctaaccacaataagagttttattggccttagtctgtatcgatcagtggtatcttaagtgattagatgctaatgatgttttcttacatggtgatttgaatgaagaggtgtacattatgcttcctcaaggtatgtaggtagctaagcctaggcaagtctacaagctgcagaggtccctatatggactgaaac

SEQ ID NO: 7061 - DNA, 226 bp, Glycine max
tttcttattttcgacagggtgagctttctcaattttaaaccaaccatctactatgttgttgtactcagcacgtttaacagcgggtccttcaggtaaaccatccacaataccccaatcaccagtaaaagggatacaagacggcataactggaaaaaaaccgaacgaaatgctcaaaggatggccttcggcgataacaacgactcgtaatggggatgaaataattgtt

SEQ ID NO: 7062 - DNA, 222 bp, Glycine max
agcttaagctccttcaactgcacaaggctcttaatatttgaagagtatccttgtggaaccttcacccgacaaagacactgacaaaaacttatcttctcctttttggacaaagtatggcaaactgggggcaagtaaattttcttcccatcagaccttggatgcaactgtgatcgtatgcccatatcagctagatcttgacgggtattcaagccatccttcgtc

SEQ ID NO: 7063 - DNA, 290 bp, Glycine max
  unsure at all n locations
cgatgctctntctcggcgtcatgcattactttctatgcttgaaacaaaattgattggtcttgaatgttngaaaagcatgtatganaatgatgaaactgttggagaaacttttaaaaatcgtgaaaaattntcagaacatggtttctttagacatgaaagcttttcttttaaagaaaacaaattgtgtgtgcctaaatgttctactagaaatttgcttgtttgtgaagcacatgaaggaggtttaatggnngcatttggggtccaaaagactctataaacattacaagaac

SEQ ID NO: 7064 - DNA, 241 bp, Glycine max
tgaaggcatgcaagcttggacttcctgtgttttgggaccctctccttcctcaggtgtacccaaacccaatcacctggttcaagcacgactttctttctgcttttgttggcttgccttgcatagctcgcatttttcttttcaatttgaaccttcacttgctcatgcaacttcttcacatactcagctttagcctgtgcatccttatgcttaaacatagcaatgttaggcataggcaacaaat

SEQ ID NO: 7065 - DNA, 435 bp, Glycine max
  unsure at all n locations
gcctcccatggaagcacctgatctgagtgattctgaagcaaccaaggttnttcanaagtccctagatgagtaccttactgctaagtgcattatcttggcatcaatgagttcaaaactccaaaggtaacatcaagacatggacccatatgagatcgtcaaacatcttaagaagatgcatggtggtcaaagcaggacgaactagatttagttatctaagaccctgtttagatcctcacttgctacaaatganaaggttggaccccatgttcttaagatgattgatctcatagaacaacttgagaaagttgggtgcactcttgggaaagagctntctcaagaattgattctacaatcactttctgattcattntcataatttattgtgaatntcaacatgaataagatgagttgtgactngcatgagatgcttaatct

SEQ ID NO: 7066 - DNA, 227 bp, Glycine max
  unsure at all n locations
tagcttttatatattaangaataaaattatcgatgcatgtgccatgttatttttgccctctcacacgcagttctgaacctccttagggttttgactaatgtccactttgttcttctttttaaattcctatacaaaatgggtcaccattctgttttcaaagtcatgtccaccttaagtgagtgtttccagcaatagccttatcttggaatagcttatccttgatcgtt

SEQ ID NO: 7067 - DNA, 262 bp, Glycine max
  unsure at all n locations
ataacatttaacacacaagtctgattctggcgcatcacatatagagaagctcagaactgaataacgacagctatcgatatattcaacggtcataactattaactcgaaagtctgagntaggcgcatcacatatagagactctcaaaatggaacaacaaaagctctcgagaaataagaatagtcgtatcttntaactcggacgtccaattcatgcgcataatacatcgagacgctcgaaattgaacaacgaaagctctggaga

SEQ ID NO: 7068 - DNA, 225 bp, Glycine max
ttgcttttatctataaatgaataaaataatctatgcatgtgccatgtcatctttgccctctgacacacacttttgaacctccttagggttttgactaatgtccactttgatcttctttttaaattcctatacaaaatgggtcaccattctgttttcaaagtcatgtccaccttaaatgagtgtttccagcaatagccttatcttggaatagcttatccttgatcg

SEQ ID NO: 7069 - DNA, 384 bp, Glycine max
  unsure at all n locations
cactatntagccacctttctagtgacaaactaaatcactacttcatctattnttctcaccacctgtaatgcaagtttgaataaaatgaaattgaataccatgaattcaatgaaaatttaaatacaaaggtataaaaatatttaaacatgaaagttaatgtaataaggcataactatntcatttaattgtgactggctcctgccaaanacctaagcaatggaacatcttatctaaaggaaaaaataaaatcatggatgttttgctcagacaatcaaagcatatttcgaaggatcttcaatcaactntgttgtgtactaccttagcataccttaatcttaagtttcatcccgttataatacaatctctgtacctattgatgcaatc

SEQ ID NO: 7070 - DNA, 388 bp, Glycine max
  unsure at all n locations
tatcttccttgggtataactatatctctattggctaccgngtctacaacttgcaaactaaganactcgtcatcagtcgagatgttgaagttgatgagtacacttcttggaattgggatgaagaanaagtggagaagaacattcttatactcgcccaactacctcaagaagaagctgaggaagaagatccaggtgaaccaccttcatctccaccacaacaacaagatcatgaactatcatcatcagagtctactccaagacgagtaagatctttggtggacatatatgaaacctgtaacttggccatacttgaacctggaagctntgaagaagcgtcaaagcaggaagtatgggtcaaggcaatggaagaagagatacagatgatcgag

SEQ ID NO: 7071 - DNA, 436 bp, Glycine max
  unsure at all n locations
cagcttcatcagccttgaaacaaaggtaaaagaaactatggttgaaactatccaaataaacactaaaagaggtgtgaaagataaggtaaaaaaactaattggtaaaatgcaagctatctangcggttntaccttatctactagaatggccaaaatacaaggcctagacgaaggaaaaacctattctaatatttacaaagataagcgagctcatacttagcccatgggctcgaaatctaccctaaggctcatgagaaccctagggcctttccttggatctctagcccaatctactnggagtcttctagccaatgcccttgcggngtaggattgcatcattccctccaccttggaaaggaattgacctcaaatcccgaggttcttcatactctgngctccttccctcaacacctgtaaaaagaacaacaacacatgta

SEQ ID NO: 7072 - DNA, 431 bp, Glycine max
  unsure at all n locations
gcttagttactacttaagtagtgcacgatctgcttctagaggaaaacactttgcctattagttactatcangccaagaagatactgtgcccgatgggtatggagtatcagaagattcatgcttgccctaatgattgcatacaatacatgcatgaatttaaagaaatgtccaaatgccttaagtgtggngtatcacggtagaaagtgaaggatgatgaggactgcagttctaatgaaaactcatagaacggccctccagagaaggtgttctggtatcttccaatcattccaaggtgtaagtgtctttntgctaatgcagatgatgcanaagaccttacctgacatgcaaatgggagaaactctgatggaatggtccatcatccgactgactgctcccagtggaagaagatngatcgttngtatctggatttc

SEQ ID NO: 7073 - DNA, 396 bp, Glycine max
  unsure at all n locations
aagatgagcaataagagaggtgatttcaaaagaagaagagttggtgaagattatatcatcaacatacaccaacacataggttntagaggtaggtgtaaatcacatgaaaagagaagtatcactcttggctgaattaaatcccaaggacctcatagtcaaactgagtntgtgaaaccaagacctgnaggcctgtttcaagccataaagagctttgagcagtttgcatactttgtgtttgtcggatgaaacanagcttggtggttgagtcatatatacagtttcttgaaggtctccatgcanaaaggcattgttgatatccacttgatgaataggccaatgtngagaaaccacaaaggacagaaacagttctaatcgtgctggcttaatcactggact

SEQ ID NO: 7074 - DNA, 233 bp, Glycine max
agcttgatagcatacatcaacagtcactttctcaggcagcaatcgatcgtttctgtcacccaatcccaagtttccatatcggccccagccccatccatacaaattcccatctttagtgattgctacactatgttcagcaccagcagcaaccattttgataggtatttcctgcaaaaatacaaagttcatgtctccaagtagttaagggaataataatctgtttgatacatata

SEQ ID NO: 7075 - DNA, 435 bp, Glycine max
  unsure at all n locations
ggtgtacccttgatcatagttgtctatagagacctttgttntacctctaggttntgggagagtttacaagaagccatatagactaaagtggaacttagttcatcctatcaccctcaaatagatagttaaaccgagagaactatctaatccttagaagaccttcttagagcttgtgcgatggaacanaaaggtagttggaacgagtgtntagcccttgtagagtttacctataataataatttccatgccagtacagggatggcaccatttgaagccctgtttgggcagaagtgtaaaacactctttgtgttgtatgagatagatgaacctcttctgttaggtctcagcgtgttgtgaaagcacactaagcaagtggaaaccattagaganaagatcagggtggcatangatacgccananagttactatgacaag

SEQ ID NO: 7076 - DNA, 320 bp, Glycine max
  unsure at all n locations
gaattacctgaatacacatntcaatattcatcagagtaaatcttttaatgcatcaacaatgttatgcagaacttcaattccttattgtatctagtgtgacatgtggtgtacctcggcctcagataaaggcagcatgtagtcatcctctggtacttcttcaacaggcaaacgataaagccactaaaaccaagaatcacatgattaaaattgtgaaagccatactgtgcacataattcattaacgttattttagtagaatacaaccttctgttcaaaaaatactacaggaattggatctcgtatgcaagatagcaataaccc

SEQ ID NO: 7077 - DNA, 227 bp, Glycine max
ttgcttccattagttgaagaggcagttgacaacatctccggtgttaattttgcccgaccttaagaggccatttgaagtgtattgcgatgcaagcgggcaaggcttggggtgtgtgttaatgcaagagggaagagtagtggcttatgcttcacgccaattgcatcctcatgaagttaactatccgacccatgatttggaactggcagctgtggtctttgccttaaaga

SEQ ID NO: 7078 - DNA, 406 bp, Glycine max
gtcagcatcagaagtatagtgctacctcacctgtatgattgctgcaacctcttcctattccggaacaggtctgggaggatgtatcagttgattctatcacagggttgccttgttcgagaggctatgaagctattctggttgttgtggacaggctgaccaaatatagccattttgttgcattgaaacacccttatactgccaagggaattgttgagatcttcgtaaaggaagtagtgaggctacatggagttccaaaatctctcgtgagtgatagagatcctttatttatgagattgttttggaaggaattctttaagttacaggggacaatgctcaagatgagtacaacttaccttccgcagacggatggacagaccatagtcacaaataggtgtcttgaaaccta

SEQ ID NO: 7079 - DNA, 496 bp, Glycine max
  unsure at all n locations
tatcctgatgagggtgttccatatgttctcaagactgtactaatacatttgctgcccaagtttcatggtcttgcatgtgaagatcctcataagcatcttaaggagttccatattgtttgttccaccatgnaatcccctgatgtccaagaagatcatatctttctaaaggcttttccttattctctggagggagtggcaaaaaattggctctactaccttgctcgcangtcccatttcagctgggatgaccttaagagggtgttcttggagaaattcttccctgcatctaggaccactgccatcagaaaagacatttcangcatcangcaacttagtggagagagcttgtatgagtactgngaaagattcaaaaatgtgtgcaacttcctcaccccagattctgacaactcttcttaatattttatganggactacaacatgagaggagatgattgatctgcagtggtggatttgatgagagatactttcactccac

SEQ ID NO: 7080 - DNA, 226 bp, Glycine max
agcttgtagggttaaagtctcacgattgtcacgtgctcatgcaacaattgttagccgtggctatacgagacatcatgccaaacaaattcaggttagcaataactcgcatgtgctttttcttccatgctatatgtagcaaagtcattgatccagtcaagtttgatgagttggaaaatgaggccgcaattattctgtgccagttagagatgtattttccccctgcttt

SEQ ID NO: 7081 - DNA, 335 bp, Glycine max
  unsure at all n locations
accgagttngagctngtagcgaatgttgctagaaatngcaatntatgggcaagcctataatataatatactgcaagcagggaattttgcttttttgtctagtttgcttcaactcgattntaggtgtggtgcattttccgtttgaactatacatatcgcanataaattgaccaagactcattattgtaaaggttntttcacaataattatggtggagaaaatgccaattcanatagaatgtccatgattntgactatngctaacaagtttgacagggaatcaagtcctgttattgtaatgaaatgaacttgcagaaatttgaacctctcaacagat

SEQ ID NO: 7082 - DNA, 266 bp, Glycine max
  unsure at all n locations
acttcttcaatgtctatcactacgaaatcagctggaaagatcaaatgtttaaccctaaccaaaacgtcttcgaccactccatatagtcttgtgatggagcgatcagccaactggagggtcatacgtgtgggcattatctctatctctcncagtcgccagcacatggagagaggcattaaatagatactacgctcccagtcaatgagagctntacccacaacaacctcgccaatggaacacggtatagtgacactctcaggatcttt

SEQ ID NO: 7083 - DNA, 431 bp, Glycine max
  unsure at all n locations
tgtgaagaagatgtgggatcttctggatgatgaggaactcttcattattggcatacatggaatgtggggagttggaaaaacattcatggcagctcatttcacgaatgagattataagataggcgactntcaaggatgtcttctgtgtcactgtttcccatgatctcaccatattcaaattgcaacatcacattgcagaaacaatgcaggttaagctctacggacatgagatgaccagagcaacaattntgacgtcagagatggagaacagacagaaaacactgcttatnttggatgatgtctgggaatatattgatctgcataatgtggggagtcctcttacagtgaatggcattaaattgatcatcacaactcgcttgtaacatgtgtggctacagatggattgcctaccacataatacaataacaatat

SEQ ID NO: 7084 - DNA, 160 bp, Glycine max
  unsure at all n locations
ctcgagagtttccgacgtctaattncgagcgtctcgatatattatcagcctgaataggacctccgtgcgaatagttatgaccatatgaatctctcgagagcttccggtgttcaatttcgagcgtctctatatgtgatgcgcctcaatcggacatccgagt

SEQ ID NO: 7085 - DNA, 357 bp, Glycine max
  unsure at all n locations
tatgaatctccggtaatatcctgctaagcccagaaaactcctaatctcanaaagaaatntaggactctcccactcaaaaacggcttctatcttanagggatctatagctataaccccttgagatatcacatgccctangaaactaactttctctaaccaaaactcacacttggacagcttagcatanactggtcggtccctaagggtatgcagcataatcctcatgtgttcttcatgttcttctctaatcttggagtataccaaaatatcatctatgaatactactacaaaactatcaagggtaaggtgaaagactctattcatgtagtccataaacacacctggagcatattcaca

SEQ ID NO: 7086 - DNA, 394 bp, Glycine max
  unsure at all n locations
catacgatgacatttcatntaattatgntgttgatcataatntntcatntatcanaatcctttgtagaatagttattttaagacatcaataatcgattctaactctaacaccatatgattactctcatgaataatgantattcctgcacattaacacacattttnttaatatatnntgtcttcactactcaggttgttttacaattcttaaatgatactacctctaccttatgatgttcangtcagtacattaacagtaaatctaaataatagctatcaacaaataatatatgtgtagtataataatatcacttaattttaatgacataatatattataaacatattacttgatatcttaaagtcttctatctatatggatcgtgaacgtacat

SEQ ID NO: 7087 - DNA, 249 bp, Glycine max
  unsure at all n locations
ctctgatgttctatcttagccttctggcaaagtaaacatgcatacacaaactcactaacctctctcttcatgttgngccaccanaacatcaccttcanatcctgatacatcttggtagcaccagaatgtatgcttaagttattcctatgtccttcctctaggatcatcttcctaagctcgggcacattgtgaacacaaatcctatctttaagtctcaagactccatccgatccaacatttgaactacta

SEQ ID NO: 7088 - DNA, 430 bp, Glycine max
  unsure at all n locations
tcttctaacctctntgaccaggccgctgttgagagtcaaagcttcataataatctntactntccatcagaagtgctgcaagccttgcctcaactcgctgcctcagaaaggtacgctnttcagcacgagtccattgcatcatttctttgcatagtgtaatttgtagatcagaagtccctggtattttgcaacagtatcaattatgcccctcactatcnttgcagtttttgcctttaagaatcaaggaaaagataggcctcaactgtgtaagaaagctgtgcaaatcctctgccctattctgttccctgagatgctcagtgaggttngtgatggcctgctctttcatgcgcagagcatctggagaagaagaaagatcatcaagtacctgantaagaatggagatggactcagacgggtctttggcctcactg

SEQ ID NO: 7089 - DNA, 415 bp, Glycine max
  unsure at all n locations
cttcatctcgctctctgttctctccattgaaccacattttctcagcactttttgagaggtgctgccaatgtgctaaaatccttcacanatcgtctataagaactngctaagccatgaaaactcctcacctcggtcacagacttaggtgtaggccattcttgaatagccctaaccttctcctcatcaacttgcactccttttgaactcacaacaaaaccaagaaacacaacatgtgtagtacaaaagatgccattttcaagaatggcatacaattgttcttttctaagcacagtcaagacagatttanatgatcaatatgcaaatcaagtgaagtgctatagataagaatatcatcaaagtacaccacaacanactntcctatgaactctctcaagatatggttcattaatctcat

SEQ ID NO: 7090 - DNA, 369 bp, Glycine max
  unsure at all n locations
tactggtaatgtgtctactatcattatcatntnttcttcgtcattgaggtgccacttgagttgccaggtctctccacctttgggcgtattctttgaaagagctgtgccccttattgcgcatgttctattgatgcatcctatccggaaccatatcanacatgtactgatagtgcctaatgaaggcaaccattatgtcctttcaagaatggactcgagaaggttccacgtaagtgtaccaggtaacagctaccncagtaagaatttcttagaacgaatgtatcatgagttcctcatcttttgcgcatgcccccatctttcgctaatacatctttagatggatcttgggcaagtagtcaccttgtacttgtc

SEQ ID NO: 7091 - DNA, 339 bp, Glycine max
  unsure at all n locations
tgatcttcttcatcaatggattccttgcttctntgaatatgaatgacagtggaatggagaaggaagagagagaggagatgccacttcaaggagaagatgagtctataagaagctcaccaccatatgaggccatggataagagcttggaggaagaaggagatgaatgaagggagaggaagagaagagcacanaattntgtactctataagcgctatgaaatctgatgtttaattttcanatgatcaaagttgaaaaaatgcacacacaagacttctatttatagcctaagtgtcacacanaattggaaggannattgaatntctatttcaaatttacttg

SEQ ID NO: 7092 - DNA, 241 bp, Glycine max
  unsure at all n locations
tttgttcacattcacattactcattnttggtgtgtgagtntctggagatgggcgacgtcaagaatattntgaaggatgatgaacaagcaattgcgtttgattggaataaaagggtggatgttgttaatggtgtagcaaatgctatatgctatatgcatcatgattgctcacctncaatcgttcatcgtgatatatcaagcaagaatgttcttttggattccgaatatgtagctcatgtctc

SEQ ID NO: 7093 - DNA, 248 bp, Glycine max
  unsure at all n locations
tatcatctgcaaaagccacatgagatagtngaatacctgcacacgtgggatgaaaattannaatggcatcatccttgaggctgctcatatctntggaaaagtactccaaacaaagcacaaacaaataaagggagagaggatccccttgtctaagaccccactgtccttttgaagtgccataaatggatccattgactgccacactaaaggaagtggaagaaacacattccatgatccangtacaaaac

SEQ ID NO: 7094 - DNA, 331 bp, Glycine max
ttctccttgatatgcatcctgctgattcaaacattttgggattaagtccactaatattttaatgctcaatcagtatttttgcaactatatcgaaaaaactaacatagaaagtattaaaatataaatatgtcctcatcattacataaattatataagataaaaataacggaaaaataaactaatctcatattttaaactaataaaccaaaagcaaataaactatatattttttaaaatatcaatgaggtatggaattttatgcgaaaaaaatattcattatactaaaacaatggagtaagaaatttaaatatactaactacaagttaatatt

SEQ ID NO: 7095 - DNA, 357 bp, Glycine max
agcttcaagaattatggcctcatcaaactacttgtttcccgagggaaattctataaatagacctcccatctttaatggagtgggttaccactactggaaaacccgcatgcaaatctttatagaggcaatagatttaaatatttgggaagccatagaacaaggaccttatgttccctctataatagccggaagtccaacaatagaaaaacctagagcagattggactgaggaagaaagaagattagtacaatataatttaaaggccaaaaatattattacatctgccttaggaatagatgaatactttagggtttcaaattgtaaaagtgctaaggatatgtgggatacactacaagt

SEQ ID NO: 7096 - DNA, 410 bp, Glycine max
  unsure at all n locations
gcttggcacttcanaaccttctggttgtgtcatataaatgtctttctctaaatccccatgctagaatgaaattttaacatctaattgctccaagtgaagattctctgtagctgcaatactcagaataactctgatggtagttatctttacaactagagagaagatctctatgaaatcaattccttgtttctgctaaaaccctttcaccacaagtctcgccttgtatcttcttctatcgttagattcttcctttagcctatagacccacttattctgtanagctttctttccttcttgcaatttaattaaagaccacgtattattcttctgaagggatgtcatctcatctttcattgctagctcccactcaatagagtcattcccctgcatagcctcactgaaacattctg

SEQ ID NO: 7097 - DNA, 404 bp, Glycine max
gatctgcctctatatcctcaacaatcccatcctccctccagataatgagtttctggtggagaatagatggcacagccccaactccatggatccattcccttcctaatagcaagttaaaattagccttggactgtatcaccaggaataaagttggtcgaactatactgcctacagcaacatctacttgaatggctcccaaagaatagccagttttgccctcataattagagagcacaatgttgtgggcagatagatcagtgtcatgtttcccgatcttgtagagcatagatcgaggcattaagttgacagccgctcctccatctatgagcactttgttgattccaacattctcaacttttgccctgatgaaaagaggtttaagatgacttttcatctgaaaatct

SEQ ID NO: 7098 - DNA, 498 bp, Glycine max
  unsure at all n locations
actaagcttgcttctcaatctccnnccttttgatgatgataaacctgaaatcaagaaacgcatacaagctctatcttttaatcaatcactcactcaattctccccctttatttttgagtttaagcttcacttgaagttaagttatttaattatatgagttcttgatttaatcccaattttctctccccttttggcatcaacaaaaagccaaagtgcgtatagagacataaaatcatacacaaactcataatcatccaagcattttaatccatacaacaagcaaggaggacattaattcatacataaactaagcaaggaagataataattcatccattaatcataataaaatgtcagataattagaaagtcatccaagataaccaaattaaaacaactaatttagaaagtaatatactaataagtgtatcanataagtcataagacatcaaaacataaaacaaatcatttggttaagtcactagaacagagtcaccttt

SEQ ID NO: 7099 - DNA, 347 bp, Glycine max
agcttatgctgcaaatatttacaatagacctcctcaacctcagcagcaaaatcaaccactgtagaacaattatgatctctccagcaacagatacaaccctggatggaagaatcaccctaatctcagatggtctagccctcaaaagcaacaacaacagcctgctccttccttccaaaatgttgttggcccaagcagaccatacattcctccaccaatccaacaacagcaacagcccctgaaacagccaacagttgaggctcctccgcaaccttccctcgaagaacttgtgaggcaaatgaccatgcagaacatgcagtttcaacaagagaccagagcctccatttaga

SEQ ID NO: 7100 - DNA, 353 bp, Glycine max
  unsure at all n locations
gcttaacatcagaccacttccgggtgctggaactacttcacatggacttgatggggcctatgcaagttgaaagccttggaggaaaaaggtatgcctatgttgttgtggatgatttctccagatttacctgngtcaactttatcagagagaaatcggacacctttgaagtattcaaggagttgagtctaagacttcaaagagaaaaagactgtgtcatcaagagaatcaggagtgaccatggcagagagtttgaaaacagcaagtttactgaattctgcacatctgaaggcatcactcatgagttctctgcagccattacaccacaacaaaatggcatagttgaaaggaaaaat

SEQ ID NO: 7101 - DNA, 340 bp, Glycine max
agcttttgagaaattcaaatggtctgaacttttcactcggagctctgattcaggcacatcacatatagagacgctcaaaattgaacaacggaagctctcgagatattcaaatggtcataacttttaactcggaggtccgattcaggcgcataatatatcgagacgctcgtaattgaacaacggaagctctcgagaaattcaaatggtcataacttttcactcggaggtccgattcagacgcataatatatctagacgctcgaaattgagcaacgaaagctctcgagaaattcaaatggtcataacttgtcactcggaggtccgattcaggtgcataatat

SEQ ID NO: 7102 - DNA, 204 bp, Glycine max
  unsure at all n locations
nttcaccactttctcaattccatccttgatcctcttgagactcttatgagtcctcttccaacttttctagtggttcttccagtttatgggtggccctgatagaatccaatacccactatgatgtagaactcgatcaacttcattcaaataaatcccctctgccaatcaccatttcaaaaccagaaacaaaattagtcatacaca

SEQ ID NO: 7103 - DNA, 335 bp, Glycine max
agcttccatgcaactccaaagtattggtggtgaattgtgaaagtataaaacagtaattatgagaaaaacatgagaaggttaggcagtgattttctacttcaatcaaaagatcaaaataactagagaaagaaacagatttgaggattacgaaccaagaaagaggtgaagacggcaaagaaagcaccaaaaccaagaatgacagagtaaccaacaccctgattaagcactggtttgccttcaaagaaactggtctgcctcacacacacacctccattttcagacacatgatagtacttgctagaaaattcaaatggtggacactctactaatgcaga

SEQ ID NO: 7104 - DNA, 317 bp, Glycine max
cggcgatgttggtcttgcaaggacttactagcatggaattaatcttcagacaacgaatgttgtgggaacactagggtacatggcccctgagctcacaaagactgggaaagcaagaacaagcacagatgtatatgggtacggcatactcattctggaggtagcatgtggaaagaagccaatagagccacagaaaaatcccgaggaactggtattggtagactgggttagagaactacatcaccaagggaaaatcatcagggctattgaccccaagatagatgagtatgacaaagatgaagctcggcttgtgcttagtc

SEQ ID NO: 7105 - DNA, 353 bp, Glycine max
agcttaataagtccatctatggattgaaacaagcttcccgccaatggtatttaaaatttcatgaggtcatttcttcattcagctttgaagagaatgtcatggatcactgtatataccagaaggtcagtgggagtaagatttgtttccttgtattatacgtagatgatattctgcttgcgactaatgataagggtatgctatatgaggtgaaacaatttctctcaaagaactttgatatgaaggatatgggagaggcatcttatgtcataggcataaagatccatagagaaagatctcgaggcattttaggcttgtctcaagaaacctatatcaacaaagttttagagagattt

SEQ ID NO: 7106 - DNA, 446 bp, Glycine max
  unsure at all n locations
tccatcaactatggagtagttaacatcggttntggaaaaaccgatgttagtatcttgttgttaacatcggttntggaaaaaccgatgttatcgaattgatgttaacataggttttaagaaaaccaatgttacctagttgatgttaacatcggttattcttaanaaaccgatgttgttatcattatatattaaaaatatgaaattgcacaacccacgcgcttgaaccctgtcgttcttcttctttctccttctgcctgagttcgtctttgttgcaaacaggcctgtgcttccgtgactgcaaccacattgtggagttcgtctctgtcacttatcgattgaggtacgtcctttcattttaacattaggcattcctcgttttaacatctgctcattntcgtangtcgaagaanacaaggaaagaaaagtgtcccggaaagggtgggagt

SEQ ID NO: 7107 - DNA, 346 bp, Glycine max
agcttgtggatggtgaccaatcccagaggacttttgtgtatattaaggatgctattgaagttgtcttattgatgattgtaggttcccatatccaatctttttatacaactttatatattttaagttctgattttctgattgtagaatttcatctttaaactattactcttgttggatggttcaactaaatgtgaacgataatttttaacaggaaaatcccgccagggccaatggacatatttttaatgtgggaaacccaaacaatgaggttatagttaggcagcttgctgaaatgatgactcaggttagaggattaagtttgattgtttgatcctattagaatttc

SEQ ID NO: 7108 - DNA, 347 bp, Glycine max
agcttggatttccttttagtagggaatctatccttcctaagatggagccaaacccagtcaccctcattaagaactagctcttttcttcctctattgcctttagttgaatatacctttgtttggttctctatttggttcttaaccctctcatgcaacttctttacaaatcctgacctagattccccttctttatgtataaaagaagtgtctagtgggaggggaatgaggtctaatggtgttaggggattgaacccatagacaacctcaaaaggggactgcttggtggttctgtgaacccctctgttgtaggcaaattctacatgaggaagatactcatcccaagactt

SEQ ID NO: 7109 - DNA, 414 bp, Glycine max
taaacattcaatttcgagcgtctcgttatattacgggactcaatcatacatccgagtaaaaagttattgtcgtttgaattggctcgtaggttcaacattcaatttcaagcgtctcgatatattaccggactcaatcagacatctgagtaaaaagttattatcgtttgaattggctcataggttcaacattcaacttcgaacgtctcgatatattacgggactcaatcagacatccgagtaaaaagttattgtcgtttgaattggctcatagggtcaacattcaatttcgagcgtctcgatatattacgggactcaatcagacatccgagtaaaaagttattgtcgtttgaattggctctgagcttcaacattcaatttcgagcgtctcgatatattacgggactcaatcagaca

SEQ ID NO: 7110 - DNA, 338 bp, Glycine max
agctttaagccaattcatacgacaataactttttactcggatgtctgattgagtcccgtaatatatcgagacgcacaaagttgaatgtttaagctttaagccaattcatacgacaataactttttactcggatgtctgattgagtcccgtaatataacgaaacgctcgaaattgaatgttgaacctttgagccaattctaacgataataactttttactcggatgtccgattgagtctcgtaatatatcgacacgctcgaaattgaatgttgaagctctaagcctattcaaacgacaataactttttactcggatgtccgattgagtgacgtaatata

SEQ ID NO: 7111 - DNA, 361 bp, Glycine max
  unsure at all n locations
ctataatantgttatattaatatacatatatgtgatttctaattattcatattctttcaacattatagagagtaatatcccaaaaaatgctatgcctttaggtttatatacgaagaaccttcatattagttatatttatgtcaaaacatattcaaggtacatattatgttgatcaatgttttatttntctattaaaatttatactatngttttactaatttataaaaatggaaaataaaaaatatacatttaatattttaaaatacaaaaatactntaatagtagtaccttttatttagtaaatataaaattaattganaaattaagagtattctcctaatnttatgatatactatatggg

SEQ ID NO: 7112 - DNA, 353 bp, Glycine max
agcttatgctacaaacatctacaatagacctcctcaacctcagcaataaaatcagccacaacaaaacaattacgacctctgcagcaacaggtataatcccaggtggaggaatcgtcccaaccttagatggtcgaatccttcacaatagcagcaacaaccttattttcagaatgctgctggcccaagcagatcatatgttcctccaccaatccaacaacaacagcaacagccccagaaactgaaaacagttgaggctcctccgcaagcttcccttgaagaacttgtgagacaaatgactatgcaaaacatgcagtttcaacaagagaccagagcctccattcatagcttaacta

SEQ ID NO: 7113 - DNA, 401 bp, Glycine max
  unsure at all n locations
ggcattgaagcattcaacctcagccttgttgaatgtctgtcttccccttcctctgcctctaaaagaccctatacttctccctcttcctttacctcttccacttttctcatcagccaccatctgcatgacctgctcctcttctgctggaaacatcattctctgctcgtgaaccaatagactactttgcagttcgtctgttgtcatagtatccctgttgttggattcttcaatggagcacaccatgtagttaaacttcgtcttcatagatcgcataatttttgcagttatgacactctcttgcatattttctccatatgctttcatacttttggcaattntcaacgtccgagcaaagtatgaatccactgactcttcctccttcatttgcagcatctcaaagt

SEQ ID NO: 7114 - DNA, 340 bp, Glycine max
agcttttcaggtaagcttgccccacccgtttccactgagcattctacatttgtttaatcttaaggtaccaagattttctagaaatccaatggattttggcaattccctgatatttccattgaccatgttcagtgtagtaagaaatgctaggtatccagtagattctagtaaatattcaagatttatgcaattcatcatctcaattttcctcaataatttcgtctctccaatctcatttggcaaatttgtgatggttgttccatctaactgaattcaatgttttaattgaattttccaatttgctgatccaactgataactccctcatgtaatataaagaa

SEQ ID NO: 7115 - DNA, 343 bp, Glycine max
agcttgcataataagaaatcctgagacaatctcaaaccctgatggatcagtttcagatccatggagccaatgcacagtggaacaggttgagtcactgaaatctatgctcagaatccttcctatgtggtccactggcatctttatgattactgcctcccaaacctcattctctatcatccaagctaatacaatggaccgaaggttatttggcaatttcgagatgcctgcaggatcctttagtcttatcagtgtaatcaccctaacaataatcattcccacatatgagcgcgtaatggtacctctactagcaaaatacacaggcttgcctagaggattcagttgc

SEQ ID NO: 7116 - DNA, 343 bp, Glycine max
agcttttatttgccatgtatttataaacatggattctctcttgacctttactgcaacatccaagaagtcgaaccagattcttgtgatgaacattacttataagcttgacttcactttcaaattgttcatccatcttcccggattggcctaagattaattttttgactgcaactaatttcccatttttcaaagtggcctggtccaacaaatggggcttaagaatataccaattttaaaaagtggtttatctttgtctcaagaagaatagctcaattaaatttggcccgggcttaccttaacctggttcaaattatggttggtttttaacctggacttccattaa

SEQ ID NO: 7117 - DNA, 346 bp, Glycine max
agcttttacctctcattttaacccttagaactttttggtcagcaatgtcatagataaggcagtgttgatatgcaaaggacaatttaaatcccttttcaagcaactgacctacacttagcaagttttggtcaatttcaggtacataaagaacatctgagataagttttgcacctgaaattgttgcaatcaatatagttccttttccttttgcttgaatataatcaccattcccaatcttgatatttaagacatcaataggcttcaaatccttgaaagcagacttgtcatatgtcatgcgatttgtacaaccgctatcaatcaaccaacactctgaactactcctcat

SEQ ID NO: 7118 - DNA, 335 bp, Glycine max
agcttcaaccaaggggagatggaccatttcaagtgcttgaaagaatcaatgacaatgcttacaaagttgagctgcccggtgagtataatgttagttccaccttcaatgtctcagacttatctctttttgatgcagatggagaatccgatttgaggacaaatccttctcaagagggagagaatgatgaggacatgaccaagaacaagggcaaggatccacttgaaggacttggaggacctatgacaagggctagaacaaggaaagccaaggaagctcttcaacaagtgttgtccatactatttgaatacaaacccaagtttcaaggagaaaagtcc

SEQ ID NO: 7119 - DNA, 367 bp, Glycine max
  unsure at all n locations
tgtccataananatagggttttgaagtttgtcatttcaatttctcactaagtaaaatggatcatttttaaggtccaacaccttaaaatgatcaccacttaagtaaaaaagaatcatttgataagcaagaactacgtaggtctgatttcctcatcgcaattgaggatacgtaggagcaaaagccccgcttttgtcgaccaccccaagagatcgttaatggtccaatgccttaacgtttctctcctttcaaaaacaagagatcgttaatggtccaatgccttaacgtttctctcctttcaaaaacaagagatcgttaatggtccaatgccttaacgtttctctcctttcanaaacaagagatctttaat

SEQ ID NO: 7120 - DNA, 334 bp, Glycine max
  unsure at all n locations
agcttggaggaagtaaggaaatgaattaagggggaggaagagaanagcacgaaattttgtgctctaaaagagctctgaaatctaaagtttaattttcaaatgatcaaagttgaaaaaatgcacacacatgacctctatttatagcctaagtgtcacacaaaatttcacatgaatttgaaattgaatttgtggagccaaaatttggagccaaaatttcactaattatgattagtgaatttcagttatggttcataccactaatccaagatcaattccaagattctccactaagtgtgcttaggtgtcatgagacatgtaaagcatgaaggacatg

SEQ ID NO: 7121 - DNA, 367 bp, Glycine max
  unsure at all n locations
ggagtnttccgactatgctcttgtgtggtggaacaagctacaaaaggagagagcaagaaatgaagagccaatggttgatacatgggtggagatgaaaaggatcatgacaaagcggtatgtgccggctagttactcaagggatttgaaattcaagcgccaaaaactaacccaaggcaacaagggggttgaggagtatttcaaggaaatggtgtgctcatgattcaagcaaagattgaagaagatgaggaggtaactatggctcgatttcttaatggtttgactaatgatatccgtgatattgttgagctgcacgagtttgttgaaatggatgatttgcttcacaaagcaatccaagtagagcaacaat

SEQ ID NO: 7122 - DNA, 307 bp, Glycine max
tcaacctagaggagacggaccattccaagtgttggagaagatcaacgacaatgcctacaagaatgacttgcctagtgagtataatgtaagtgccactttcaatgtgtctgagctatctctttttgatgcagatggaggggccttggatttaggacaaatccttttcaagaagaagggagtgatgaggacataaccaagggcaaggaccatgaagcacttgaagggcccagaccagatgcagacttaaacaagcccaacacgtcatagagacaaggctggtcatttgtatagctgccattgatgatga

SEQ ID NO: 7123 - DNA, 352 bp, Glycine max
  unsure at all n locations
tcttatactaatgtcacgaggaatgtggtagttagattcataaataatgagtngatttgtcgatacggactccccaggaagatcattactgacaatggcaccaatctgaacaataagatgatgcatgagatgtgcgaaggcttcaagatccagcatcacaactctaccccttatcggccaaagatgaatggngctgtagaggctgtgaataagaatattaagaagattgttcaaaaaatgacagtgtcatacaaagattggcatgagatgttgcctttcgccctgcacggatatagaacctcggtacgaacttctactggggcaacaccgtattccttagtttatgggatgg

SEQ ID NO: 7124 - DNA, 334 bp, Glycine max
agctttgatttcctttgttccggaaacctttcttttctcatgtgcacccaaacccaatctccgggttcgaagacaaccttctttctccctttgttggcttgtttagcatagcttttatttttcctcttaatttgatctttgactctctcatgaagcttcttcacatagtccgcctttgcttgaccttctttatgcttaaaaacagaaacattaggcataggcaaaagatcaagaggagttagtgggttaaaaccataaacagcttcaaaaggagaacaattagtggtgctatgaacagctctattgtaagcaaattcaacatggggtaaacaag

SEQ ID NO: 7125 - DNA, 428 bp, Glycine max
  unsure at all n locations
ngaccacgatcagttggaggctcatgtcagacgcccccagggtgacgagcactctgctcatacattactctgagtgcacctgatcagtagttctgttggcccggtcaatagaactttcagagttcaatatcagtataaacccctagccccataaagacacaattcatggaagacattctggtagaatttgttgggaatgaccaaaccaccacagactggtggaacctttatgttgacggcgcgtccaacatgaagggaagtagggtatgaatcatcctcgaaggacttgataatgtaaccctagagcaggccatcaagctcaacttcaaagcctcaaacaatcaggctaagtacgaggggctcattgcaagtctaaaactagcaagagaagtcggngccaagaagctatgatgctacatagactcgta

SEQ ID NO: 7126 - DNA, 320 bp, Glycine max
agcttccaagattcataatctctagcagaaattaagtgatttggagaatcaagcttctcatagacttctatctgatagtgaagttataaccaagagagctttgcaacaagagctgtgggatatttcaaatgcttatgaatccttgttgaggcaaaaatctagggctaagtggatcaaggagggtgacagaaatacagcttacttccacagggtgataaatttcagaagaagctcaaatgcagttcatggtattctcattgatggtacttgggtccagcagcctgaccttgttaagaatgcagtggttaatttctttcttg

SEQ ID NO: 7127 - DNA, 345 bp, Glycine max
agcttggagccatgcattgtgattgcttagtgcaattcgccatcctcaaccctttttcggagccccatgaatggcgttttcgttcatgcgtccttcacccacgagtttggagccatgcatagtgattgcttagtgcaattctccatcctcaacccttttttggagccccatgaattgcattttcgttcatgcgtcctccacccaggagcttggagccatgcgtagtgattgcttagtgcaattctccatcctcaaccctttttcggagccccatgaatggcgttttcgttcatgcgtccttcacccacgagtttggagccgtttgtagtgattgcttagtgcaat

SEQ ID NO: 7128 - DNA, 344 bp, Glycine max
agcttaagctccttcaactgcacaaggctcttaatatttgaagagtatccttgtggaacctttacccgatgaagacactgacaaaaacttatcttctccttcttggacaaagtatggcaggctgggggcaagtaaattttcttcccattagaccttggatgcaattgtgatcgtatacccatatcagctagatcttgacgggtattcaagccatccttcgtcttgccttaaatgttaaggagcgtcccaatcacactatcacaaacatttttctccacatgcataacatcaatacaatgtctaacgtcaagatcagaccagtacgaaagatcaaagaaaatgga

SEQ ID NO: 7129 - DNA, 268 bp, Glycine max
cgtcaaacctgaagatttcttcctacatgtggaacccgggaacactgacaacccaaataatgcacaacttactcctgtgtctgttgatcaacttccagggcttaacacgcttggcatatctttggctcgcatagattctgcaccaaagggtataaacccttcccacactcacccttgagcctcggaaatccttatagtccttgacggtactctctatgttggatttgtcactcccaatcaagacggaaatcgtctctttaccaaagtg

SEQ ID NO: 7130 - DNA, 291 bp, Glycine max
agcttcatgagagagtcaaattttaaattgttaggaaaaatattagctatgctaaacaagccaacaaagggagaaagaaggttgtcttcgaacccagagattgggtttgggtgcacatgagaaaagaaaggtttccagaacaaaggaaatcaaagcttcaaccaaggggagatggaccatttcaagtgcttgaaagaatcaatgacaatgcttacaaagttgagctgcccggtgagtataatgttagttccaccttcaatgtctctgatttatctcttttttgatgcagat

SEQ ID NO: 7131 - DNA, 348 bp, Glycine max
agctttgatattggtaagtatttgcctcaaattttctattatatttcctgtttctgaagtacgttttttctcactaacatctctttttataacattaatctctttaatcctctcatttgtactaattactttatcttacatttttcttccttttctattaaaaaagttgcccgattttgatatataaatgcaatttctcttttcattttaccaaactttatataaagatattttatttgattcaccaggacatatttgctgctggaactgatacttcagcatcaacactagagtgggctatggcagaaatgatgagaaatccaagagtgagggagaaagcacaagctg

SEQ ID NO: 7132 - DNA, 246 bp, Glycine max
  unsure at all n locations
gagctgcatgcatgcaagctngagcttttataggattttggacttaccatcaacatcaagaccaaccatcaaaattcgcatttccttcttcgcgaaaagtcggctgaaaagctttgtgaatgtcagccccatttctccttcaactagtggatccctaatttcacaattcaaacaacttttcaattaaaaaaaatctccaaaacgaaatagagcttcttataaaattacttgtgcaaatgaggcttg

SEQ ID NO: 7133 - DNA, 323 bp, Glycine max
agcttcaagaattatggcctctacaaactacttttttcccgagggaaattctataaatagacctcccatctttaatggagtgggttaccactactggaaaacccgcatgcaaatctttatagaggcaatagatttaaatatttgggaagccatagaacaaggaccttatgttccctctataatagccggaagtgcaacaatagaaaaacctagagcagattggactgaggaagaaagaagattagtacaatataatttaaaggccaaaaatattattacatctgccttatgaatagatgaatactttaagggtttcaaattgt

SEQ ID NO: 7134 - DNA, 202 bp, Glycine max
  unsure at all n locations
agctnaaaatttagtctagtttttgnnaaaacataagcacttagacaatgaaggaaagctggagttgctgcacatgatgtccaacgttatgtcaaagaataagatcgggctgcacaatgcacaaggcaagatgaaatgtcaaatgaagaattgaagctgtacgattcacgatgttcgatacaatgtccaggacattcctctt

SEQ ID NO: 7135 - DNA, 353 bp, Glycine max
  unsure at all n locations
agctttatgtctctttgnatatccctttttacttttgggatctttccaatatcttctagcatcaagtcaagacaatgtgcagcacatggagtccaaaatatttttggtctcgtgacttgtaaaattttacctaaaaagatcaaaatcaataaacttgtatgagtagtgtaacaattaaaagttataactataaaaaaaaaacttcattaagcatgattgaattctcatccgccaacacataattacttccattgtccgtcaccacttgaataacattcttttctccaatctcctcaacaaagctatccataagctcagagatctttcgaccagtcttcatgtgttcaaaagca

SEQ ID NO: 7136 - DNA, 355 bp, Glycine max
agcttgccaacccatggaagttcctactatctcccacactttttgggatgggccattcttggatggccttgattatctcaaggaccacttggaccccatttatgccaactacaaaccctacaaaaactatattatctacacaaaaagtacacttctctatatttgcatagatggtgttgttcctaaagactgaaagaacttgcctgagatgttctaagagataatctatgctcctactgtacactaaaatatcatcaaaataaacaactacaaatctactctcgtaactccgtaatacattatgcatacacctcataaaggtgcttgggcattagtgaacccaaaatgcatcact

SEQ ID NO: 7137 - DNA, 367 bp, Glycine max
agcttgccaacccatggaagtttctaatatctcccacactttttgggatgggccattcttggatggccttgattttctcagggtccacttggaccccatttctgccaactacaaaccctaagaaaactatattatctacacaaaaagtacacttctctatatttgcatagagggtgtttttcctaaggactgaaagaacttgcctgagatgtcctaagtgataatctaggctcctactgtacactaaaatatcatcaaaataaacaactacaaatctacctatgaaatcccttaagacattatgcataagcctcataaaggtgcttggtgcattagtgagcccaaaaggcatcactagccattcata

SEQ ID NO: 7138 - DNA, 358 bp, Glycine max
agctttttctctgtacaccttctttcctatacttgaaaaactttttctgtatacacacacattaaaaactctttctctttatatcaacatggtctatataaaacctctattccttttcaaagatttcttcttcctttttcaacatacactcattgtttatacaaaaattttctttatatacactcattgctcacacacaagaatttcttttcacacattatttatacacacaaaatcttttcatacactttttatatacaaaaactcttttcttttcttcatatacagatatgacattttgttcacaacgcctcttttttttctaatcttggaatatcaagaggttgtcattttattt

SEQ ID NO: 7139 - DNA, 285 bp, Glycine max
agcttttgattacaggttatctctggcatcgcacttcctgttggatccgacaaactttattctggcagcactgatgggacagttaggatatgggactgccatactggtcaatgtgctaaagtcatcaatcttggtgctgaggctacctctttgatcagtgaggggtcatggatttttgttggtctgcaaaatgctgtcaaggtaagctcttatctgtcattgctttgttttgatgtatgataatgtctaatcataggagtagtacatgcaaactgattatgtggc

SEQ ID NO: 7140 - DNA, 389 bp, Glycine max
ctatctctgatctcgttatgctactcatggagtactgcaaacgctgattatattatatattaaatattaaggatgttcttaatatttgaaatcagtatatcatatagttatttatcatatgcaatagggtcaaattagatagtctatgaatagtgttaataacaacttacagtactgctgacttaatatatattttaataatttatatcatgcttaccttattgttatctaatgcattctcatgtatgtcatatagcatatctcatgcgaataaaggtatatgacttttgacattctaagactggaggtagatatccatgattaattacatttttatttacttcattatattcaaaataaatagatacatttaggccatttttaattta

SEQ ID NO: 7141 - DNA, 369 bp, Glycine max
agcttagatatagagatcaaatgttactgaatttctggcatatatagaacattctttaagaatagaaattgagaaaattacgttgtgcctgcatgagttgtagtgactgtatggccagtgggaagcttaacaactatgggatttatcttcttacaagaagaaaataagtgaagaaaagttgtgacatgaccagtggctcctgaatcgagtatccattcatctggacgtgccttgcttacactacaagtgatggataagacattacctctgtgtgcactgctggaactagtgattgtactaatttaaatcacatgtgaattgttgggacttgagctctagtgctgtagctgggcccttaaagccttatat

SEQ ID NO: 7142 - DNA, 369 bp, Glycine max
agcttagatatagagatcaaattgaactgaaagctaggtatatatagaacatcctttaagaatagaaattgagaaaattacgttgtgcctgcatgagttgtagtgactgtatggccagtgggaagcttaacaactatgggatttatcttcttacaagaagaaaataagtgaagaaaagttgtgacatgaccagtggctcctgaatcgagtatccattcatctggacgtgccttgcttacactacaagtgatggataagacattacctctgtgtgcactgctggaactagtgattgtactaatttaaatcacatgtgaattgttgtgacttgagctctgttgctgtagctgggcccttaaagccttatat

SEQ ID NO: 7143 - DNA, 318 bp, Glycine max
  unsure at all n locations
agcttctatagaaggttngtttctgatttctctacaatngcatcacctctcaatgagctggtgaagaagaatgtggcatttacctggggtgaaaaacaagagcaagcctttgctttgctcaaagaaaagcttactaaggcacctgttctagctcttcctgacttttctaaaacttttgagctagaatgtgatgcctctggagtgggagttggagctgtattgttacaaggtgggcaccctatttcttattttagtgaaaaacttcatagtgccaccctcaactaccccacctatgataaagagctttatgccttaata

SEQ ID NO: 7144 - DNA, 205 bp, Glycine max
agcttgatatgttttgtgcatgtgctgctattgttggaggcactagaatttggttgccagacctcagggtgatggcactcacatttttcagattttgcacagtttgtgaaggcaatatgtcagaattttgggactgagcttggttgaactgagtagccatctgccccatctgattggtcagactctaaatggaggctcttgtctc

SEQ ID NO: 7145 - DNA, 354 bp, Glycine max
agcttctattcttatacatgtatgaagctctgataccacttgacagaccagtggccttacacatcccaagaacggggtagaattaagagatagcgaactattcccccacctgaattctatatcactcatctatgcacctcacacattaccttaacaatgaacctttacatactgaatcagatacaacaatgctgatctaaagatgacgcaataagtaatacaagagtgcagaggaaacaacagtgcacactcggatttatactggatcggccacacccttgtgcctacgtccaggccccaagcagcccgcttgagagttccactatcttggaaaatccttttacaagttctaaa

SEQ ID NO: 7146 - DNA, 358 bp, Glycine max
agctttgagcaatcaaattcattacttttaactcggaggtccgattcatgcgcataatatatcgagacgctcgatattgaacattggaagcttttgagcaattcaaatggtcataacttttcactcggaggtccgattcaggcgcataatatatcgagacgcttgaaattgaacaacggaagctctcgtgaaattcaaatggtcataactttcaactcggaggtccgattcaggcgcataatatatcgagatgcacgaaattgaacaacggaagttctcgagaaattcaaatgatcataacttttctcacgtaggttagatttaagcgcataatatatcgagacgcttgaaattgaac

SEQ ID NO: 7147 - DNA, 360 bp, Glycine max
  unsure at all n locations
agcttgaaggtaaactagatgtcttggttaatttgttaacccaactggccatgaatcagaaatctgcacctgtcgccagactctgtggtttatgctcctctgccgaccaccacacagacctttgcccttctgtgcaacaatctgaaacaattgaacagcttgaagcttatgctgcaaacatctacaacagacctcctcaacctcagcagcaaaatcagccacaacaaaataactatgacctttcctgcaacaggtacaatcctggatggaggaatcatcccaaccttagatggtcgaatccttcacaacatcaacaacaaccttantttcaaaatgttgctggcccaagcagaccatacg

SEQ ID NO: 7148 - DNA, 252 bp, Glycine max
  unsure at all n locations
ttagcttcaactttcaatnntgatcgtctcgatatatgacgagactacatcatacatccgagtaaaaagttatagtcgtttgaatttgctcacagcttcaacattcaatttcgagcatctcgctatattacgggactcaatcagacatccgagtaaaaagtttgttgtttgaattggctgagagcctcaacattcaatttcgagcgtcgcgatatattaagggactcaatcaaacatcccgagaaaaagtta

SEQ ID NO: 7149 - DNA, 286 bp, Glycine max
  unsure at all n locations
agcttgtggatggtggncaatttcctacgacttttgtgcatattaaggatgctattgaagccgtcttattgctgattgaaggctcccatatgaaactttatatattttaagtactgatctgattgtaaaagttcatcttttgactattactcttgtatcatggttcaactaaatgtgaacgataatttttaacaggaaaatcctgccagggccaatggacatatttttaatgttggaaacccaaacaatgaggttacagttaggcatcttgctgaaatgatgacac

SEQ ID NO: 7150 - DNA, 335 bp, Glycine max
  unsure at all n locations
agctttnttttttcaagtcttgtttatttagtaaaaaatctctagaatttttttggtttttttttacgtatggggtcctaacttaaaccaatcaataaatggtgattcatattatgtcatctctgtggataattattctaaatatgtatggctatttcctatcaaattcaaacctaacgttactaccattgtcctaatttttaaaacattatttgaaaagaaattcacatgttggatcagaaccctctatagcgacaatggaggtgaaattattaaatgctgaacctctttccaatcactaggctgtttgacctaaccaccattcctatacacct

SEQ ID NO: 7151 - DNA, 144 bp, Glycine max
tgcttgaaattgaacaacggaagctctcgagaaattcaaatggtcttaacttttcactcggatgtccgagtcaggctatgtcgagacgctcaaaattcgacaatggaagctctcgataagtgatatggtcttggcttatcactt

SEQ ID NO: 7152 - DNA, 168 bp, Glycine max
ttcttctttgcacttttccattttgaatttcttaattagttttgtacattactttgtttgacataggaagttgccatgtttcatttgcttgacttgaagtccaaggaagaaggacaattctcccatcatagacatctcaaattctttttgcataaagttggaaaattc

SEQ ID NO: 7153 - DNA, 182 bp, Glycine max
agcttgtgcctctttatgtctgggatatgaatgtagcatatagatccaaagacccttaggtgctttgctgatggcttcttcccattccaagcttcaattggagtcttgtcttttacagacttagttggacatctgttgagtatgtaaacaacagcgtagactgcttcagcccagaatgtgtt

SEQ ID NO: 7154 - DNA, 175 bp, Glycine max
ttcttttgcccaattcgcttttgatctcgataaagctgctcaaaatcaattagcaagaggtcaatgattgcgcgagttgcttaaacaatcccaatcagctcctcttaccgtggaagaacagataataaggatttatactggaataaatggttatcttgattcattagaaattgga

SEQ ID NO: 7155 - DNA, 173 bp, Glycine max
tgtcttcccaatatcagcatttccatgcacattacatccagcaaggagcgctccccaaacagtcaatggcacctcttccccaagcccctcaatgatattggaagcttctttcagccttcctgcacgaccacaaagatcaaccaaacatgcatagtgatcttctctgagttgta

SEQ ID NO: 7156 - DNA, 175 bp, Glycine max
agcttccattgttcaattttgagcgtatcgatatattatgcgcctgaatcggacctccatgctaaaagttatgaccatttgaatttcccgagagcttccgttgttcaatttcgagcgtgtctatatattatgcacctgaatctgacgtccgacttaaaagttatgaccatttgaa

SEQ ID NO: 7157 - DNA, 170 bp, Glycine max
ttctttgtgcaacttaagcatggaaagaagatagtctacactaggcatcaaatatttctcaaagaatatcacccatatcgattgtaaaaagcttttaatggaagtccaaagtctggattttccctgatacccttatcgagaaatgaactttatgagcaggtgaaggacat

SEQ ID NO: 7158 - DNA, 175 bp, Glycine max
ttctttcattaagttatgaccatttgaatttctcgagatcttccgtggctcaattccgggcgtctccatatgtcatgtgcctgaatcggacctgcgtatgaaaatgttatgaccatttgaacttctctagagcttccgttgggtcatttcaagcgttcttgtatctgatgtgcct

SEQ ID NO: 7159 - DNA, 176 bp, Glycine max
ttcttgaatcttccttggtcgggtacatgagcatatgcaatgctcccaaatactctcaagtgatcaactcttggcttcactccactccatgcttcttgtggtgtttgatctttgacattctttgttggggagcgattggacaaataaacggcacatgcaacagcttcggcccaaaa

SEQ ID NO: 7160 - DNA, 453 bp, Glycine max
  unsure at all n locations
ctcagctttacccctccaatgttgaaatactaaacatcagaagtgtaaatcttaaagttaaaaagctatccacgaagcaggctggcataaccaatcagattgattaatctattcttccacaatcatgcaaaaatataatttggtgtttcatcatataaccacgagttgctgctttgaaatgctcattttgtaaatcttgatctgtataggctgagagcaacatatcccaccgtcacaattctgccatcaaagaatcgtccgtgcaaactatgtgctgccgaacaacatgcttcagctcttccatactcaacaagaacagaacctggtttaaatacatgaccataaatatcctcttccgtgtcaatgctcttttggggactaaccaattctgcactgatatcccattcagaaaagccttnctgaaatgcacaaactgtgtctttagattcatat

SEQ ID NO: 7161 - DNA, 266 bp, Glycine max
cctttagtacggaatctatccttcctaagatggtgccttacccagtcaccctcgttaagaactagctcttttcttcctctattgcctttagttgaatacacctttgtttggttctctatttggttcttaaccctctcatgcaacttctttacaaactctgacctagattccccttctttatgtataaaagaagtgtctagtgggaagggaatgaggtctaacggtgttaggggattgaacccatagacaacctcaaaaggggagtg

SEQ ID NO: 7162 - DNA, 205 bp, Glycine max
  unsure at all n locations
aacaacggaagctctcgaaaaatcagtttcatatattntcacacagaggtccgattcggtgtaataatatatctgagactcacnaaatcgaacaaccgaagctctcgagaaatttgaatggacataacatctcactctgatgttcgagcccgggacataatataacgagactctctaaattgaacaaccgaatctctctacaaat

SEQ ID NO: 7163 - DNA, 341 bp, Glycine max
tgaatcggacatccgtgtgaaaagatatgaccattttatatttctcaagagcttccgttgatcaatttcgatcctctcgacatattatgcacccgaatcggacatctgtgtgaaaagtcatgaccatttgaatttctcgagagtttccgatgtttaatctcgagcgcatcgatatattataaccctgaatcggacctcagtctgaaaagttatgaccatttgatattgacgagagcttccgtcgtcaatttcgaatatcactgtatgtgatgcgcctaaattggcattcgagttaattgtttgaccacttgattttccaaaagcttctgtctgtcaattct

SEQ ID NO: 7164 - DNA, 446 bp, Glycine max
  unsure at all n locations
tgcttaatctatctagatagaagggaatgatgagtggttatgcatggaagttaggaaaacgattcaaagatttttactatgaagtatatatggatataattgcaggaatcaattgatttattaagaaagaaagtaaattattaaaggtgatgaaaaatgaactgagtgaaatacctaaaaaacaaacgtgatttattaagaaagaaagtaaattattaaaggtgataaaatttaatatataggaatagggtttaatatacgattcagaaaacttgtcaaagttacaaacagttagcaatttatttattttttgatagtcacatctagaaaattaatctctatgctttntatgtaagtttttaattttaagttgctgaaactgtgaagtgagcaaattaagctctgtcgggttttaattaattaattattagtccattcactgtttt

SEQ ID NO: 7165 - DNA, 442 bp, Glycine max
  unsure at all n locations
tgcaccagggaacaatttcactttaatagtngattccaattggcttcctagttttcagcttacctatttggatgtgggatcatggcagttaggtcccagctttccatcgtggattcagtcacaaaaaaaacttaaatatttaggcatgtctaacacagggattattgattctattcctacacagatgtgggaagcacaatctcaggttttgtatttaaaccactctcataatcatatccatggtgagcttgtgactacattaaaaaatccaatatctatcccaactgttgatctaagcacaaatcacttatgtggtagaataccctatctttcaaatgatgtgtatgggttagacctttcaaccaattcattctctgtatccatgcaagaatttttatgtaacaatcaggacaagccaatgcaattagaaattctcacatct

SEQ ID NO: 7166 - DNA, 307 bp, Glycine max
tctatccttcctaagatggagccaaacccagtcaccctcattaagaactagctcttttcttcctctattgcctttagttgaatacacctttgttaggatctctatttggatcttaaccctttcatgcatcttctttacaaattctgacctagattccctttctttatgtataaaagaagtgtccactgggaggggaatgaggtctaaccgtgttaggggattgaacccatatacaacctcaaaaggggactgcttggtggttctatgaaccctcctgttgtaggaaaattctacatgaggaagatac

SEQ ID NO: 7167 - DNA, 433 bp, Glycine max
  unsure at all n locations
gtatgaaaatgcatcgacactgttaactggttagcaagttcttgagcgggttgaggacatcaatacgatgtttggaaaaacctcaaataatgaaaaaagtaaaacttgcatatggaagaagaggtcaatattgttttatcttccatattggtccgatctagatgtcatacattgtattgatgtcatgaatgtggagaaaacaatgtgtgatagtgtcatcaacatgcttcttaacaatcaaggtaagacaaaagatggttcgaatactcgtcaagatctagttgagatgggtatatgacactaattacatcctaagtccgatgttaagaaaatacacttgcctccagcttgtcatacttttgtccaaaaggagaagataagtttctgtcagtatctgcaccgcgtcatagtgtcatanggatactcttcaata

SEQ ID NO: 7168 - DNA, 328 bp, Glycine max
cttctctgacttagcatcacattttcctaagttatcttttccattattcaataccaaacatttacaaccaaagatatgaaaatgtgagatgtttggttatctgccattgaacaattcatatggagttttctttaagatgggtcttattaaagccctatttaaaatgtagcatgcagtgttaacaggttcagcccaaaaatatgttggaagacgtgtatcatttaataaagtgctagcaatctcttccaaagatctattcttgctttcaacaacaccattttgttgaggagctcttggcgcagaataattatgctcaatcccatgctta

SEQ ID NO: 7169 - DNA, 401 bp, Glycine max
taagctccttcactacgcaagactcttaatatttgaagagtatccttgtggaaccttcacccaatgaagacactgacaacaacttatcttctcctttttggataatgtatgacaagttgggggcaagtaaattttcttcccatcagtccttggatgcaactgtgatcgtatccccatctcagctagatcttgacgggtattcaagccatccttcgtcttgacttgaatgttaaggagcattccaatcacactgtcacatacatttttctccacatgcataacatcaatacaatgtctaacgtctagattacaccagtatggaagataaaagaaaatggacctcttctttcgtatgcaagtcttacttttatccttcttttgggtatttccaagtacattat

SEQ ID NO: 7170 - DNA, 362 bp, Glycine max
tgctagtgatacactctattcagagtttgaatatgtattacaaggaatggattttgagagaggttggggtgatatagctgagcgggtattggaaatgatgcatatgctcctagtccctaaatattcttcacgctcctgatcataatacactacagacttttcttgggagagagccaatggtattcaatgttgatatattatctcctcatggctactttggacaagccaatgtcttgggtttgcctgacattggtgggcaagttgtttatatactacgtcaagtgcgtgcccttgaaaatgagatgctccttcacatcaagatacaaggacttgatctcactcctaaaattctaattggtacc

SEQ ID NO: 7171 - DNA, 446 bp, Glycine max
  unsure at all n locations
tctggtgggacatcttgacttgctttccaatctgacattcaccacagattctgccttcttctattttcagattgggaatgcctctaacagcaccttggtcaatgattttcttcatgcctcttaagtgcagatgtccaaatctttgatgccatattttgacttcatcttctttggaggatagacatgtggaggagtaactggtttcttgaggtgtccataggtaacagttgtcctttgatctgctgcccttcattagaacttcactcttctcatttgtcaccaagcattctgactttgtgaagtttacattgaatccttcatcacacaactgactgatgctgatcagggttgcagtcagtcccttcaccagcagtactttgttcagactangaagtccatcatggactagctntcccattccaatgatctttcctttagagccatct

SEQ ID NO: 7172 - DNA, 426 bp, Glycine max
  unsure at all n locations
gtaactnttattaagatntcatataataataaaataaaataactgagaaatatgcaaataatagaatccaaaaatcaacatttgaatatttaacacaattgagctaatgagtttttatagcaatagtttgtatatcttagaccaaaccaagaaactttaaatccttactacctaaaatagtaattacaaaacataccaaaataagggcaaaagtatattttggatgaactataagattgagatgtcatacacaaattctaagagcaaagaagaaacatgtgtaaaaaaaagattcctatattaatattattaatatataatgtacaaataataaataatattataatttaattggtttttttcttattatcaatcaatntgtttaaatttaatgtatntatctaaattacttctggttaaaacaca

SEQ ID NO: 7173 - DNA, 446 bp, Glycine max
ctgataaaatccaatgaacacaaatcactatgtgcttaatgcaaaaattgtaagggaaagaataaacaaaaataaatattaacggaacagaaacaagtaaatattggtacccaagtcacaaggctttgctgtcctcgtggcagtgtatgatccactggtttacgccccgttaagagttccagcagtataactccaaagctataaacatcactttctgaagtgagttgtccagtcattgcatatctgtcataaaaaaatcaagcccaataaattataaaaaaaccacaacttgtgtaaagagagttaataattggccctaaagtggattgaagttcagtacatcactgtccaaagatatttctaatttacaattaatcagtttcatgtttactcaattgtgattttcatattctcttattccaagtttttcatctttcaacttaagc

SEQ ID NO: 7174 - DNA, 355 bp, Glycine max
  unsure at all n locations
taatatcatcctcttggacaaacccttatatnatttctgtccaggagaccacattatggacttgcatctgggaagaccgtctatcaacatcactcatacatgcaaattttgcatatgaatcaacaatagcagactccacaaagacatctgttgcaccacattagattgcccacccatgaactcctctcccaatatgcaaatctttaagcacacaacatgctcgcagattgctcggaaacgcatagctatccggcattagagatgcatggtacattccacgaaacagattctaagcaacccagcgtcctccactataaactgccaacgatacaatagcattccaacatgccacgtt

SEQ ID NO: 7175 - DNA, 398 bp, Glycine max
  unsure at all n locations
ttctatgtcatctntaaataaagatctggtggtaaagaccccaactagtggttntgtgttaacttgtaatgtgtatttaaattgtcttgtggaaatttttagtagaacattcttgattgatctgatttgtttgcctttgaaccaaattgatgttattctgggaatggactagttatcttccaaccatgtcttgttaaattggtttaataaaaatgcagtgtttgatgattctggagtgagtaaggataggatgtttatctttgccaaccaagttgtgacatctttaaaagaagatgcttaagtctacatgatcatgtctaacctanaagtagagacaaaggtttccatgggtgacctccctattgtcagagagtttcctgaagtgttccctaatgata

SEQ ID NO: 7176 - DNA, 413 bp, Glycine max
ttaacaacacagaccattgttgtaaaatttatagtcatttggttgcctgttaactcaagataatagatacacaacccacatgtttcaaggagctgagtgattttctcatgcaactgcaaagataattgaaagaatatcatctgactgaatttctaaaagcatacaaatgcttttcccctcacaaggaaaggtaaacaaggaaatcagtcagttaaatatgccatacttgggtcctgcagacattgtccgacaattctcaggagtacagaactctgtaagggtaccataaagcagattcacctgattgaagaaatcaacagctgtaatgcatgaagaagaaaaaaagaagtcagtttactgcatttcagaattgtatgaattatgaatatatagttgaggaaactagagaataa

SEQ ID NO: 7177 - DNA, 439 bp, Glycine max
  unsure at all n locations
aacctttgctnnttttgctagactagaagctataagaatcatgctttcctttgctactcataaaaatataaagttatttcaaatggacgttaaaagtgctttcttaaatggctttattgaagaggaaatatatgtcaaacaacctcttgggtttgaagatcatactcttccagaccatgctttcaaacttaaaaaagctttgtatggtctaaaacaggaaccacatgcttggtgtgacagactgagttcatttctcttagaaatggttttattaaagtcaaagtggatacaactctttctaaatgagaagttggcaaagatttcattatagtccaaatgtatgttgatgatagtattttcgaagctactaatgaatctctttccaagactatntttgatctgatgaagagtgaattccgaatgagcatgatgggagaac

SEQ ID NO: 7178 - DNA, 379 bp, Glycine max
tctcagatccggtcatggaaagacttggcaactgccttaattatgcagtaccaatacaacacggatatggctcctgatcgaaaccaacttcagagcatgaccaagcgggaacatgagtccattaaagaatatgctcataggtggagagacctagcagcccaagtcgtcccgcccatgactgaaagggagatgatcacgattatggtagatacgttgcctacgctctactacgagaagatgataggatatatgtcggctaactttgtagacctcatcttcgctgaagaaagaatcgtgtccggactaaaaaaaggcaagtttgaatatgctttcaacgttgcccccaacaacaatagaagaacctcagtggtggacacac

SEQ ID NO: 7179 - DNA, 361 bp, Glycine max
  unsure at all n locations
gcgcataacacgncgagaagcccgaaannaaacaacgaaagcccgngagaaanncaaangggcataaccnccgacacggacggccgaancaggcaaancacanancgagacgcccaaaanngaacaacggaagctcctgagaaattcaaatgcttataacatatagtgacactcgaaatgtccgattcaagcttataatatatcgatacgctcgaaataaaacatcgaaagctctcgcgaaatttaaatgggcataactcttcacacggatgtccgattcggacgcataatatgtccagagggctcgaattgaacaacggaagccctcgtgaaattcaaatgggcataacttttacactga

SEQ ID NO: 7180 - DNA, 359 bp, Glycine max
  unsure at all n locations
ttgagccaattcaaacgacaacaacggtgtttctcgaaatantttattgaggcccataatatatcgagacggtttatattgaatgttgaatctctgagcaaattcaaacgacaatagctttatactcggacgtctgattgagtgccgtaacatatcgagacgctcgaaattgaatgttgaacctcttgagacaattcaaacgacaataacttcttactcggatgtctgattgattcccgcaatatatcgagaccctcgtaattgaatgttgaagccctgagccaattcaaatgacaatagatttttactcggatgtctgattgagtccccgtataatttcaggacgctccaaattgaat

SEQ ID NO: 7181 - DNA, 429 bp, Glycine max
  unsure at all n locations
ntgagcaaattcaaacgataataactnttgactcggatgttcgattgtgtcccgtaggatatcgagacgctcgtaattgaaaacggaagctttgagaaaattctaacgacaataacttttcactcgaatgttcaattgagtcccgtaggatatcgagacgctcgtaattgaaaacggaagctctgagaaaaatcaaacgacaataacttttaactcgaaagtcctattgagccctgtaatatatcaagacgctcgaagttgaaaacggaagctctaataaaagtcaaacgacaataacttttgactcggatgtccgattgagtctcgtaatatatcgagacgctcgtaattggaaacgaaagctctgagtataatccaaccgacataacttttaactcggatgtgctagatgaatcccgtatatatcga

SEQ ID NO: 7182 - DNA, 448 bp, Glycine max
  unsure at all n locations
agatactaagctatgttaaaggataaataaggaaaataaaaattttttattaaaatngaactcataatcatttattcataaaataggcaataaatcactaactcacttgtttaccttaattaacaactttaacattattttttatgtattattagtctagtgttattaattttttttcaaattatcaaattttataaattaaaaatatttaatatataaatctttttaattttactttatatcattttacatttttttattttgaatagtctacatatttttatttttactttaccaattttaattaaatctcataaattaatatgtaattatttacatgatttttttaattcattttaatatacaaattattcttactctaattattaacataaaattattcatggacaagacaataaaacacctgttttgttctgtagctatatta

SEQ ID NO: 7183 - DNA, 381 bp, Glycine max
  unsure at all n locations
tattctntatctagagtagttgagcacaacaacttactactgacatatattcgactttagtagcggacaatgtagttgagccttgcatcttgcatattcatgttactaaggtagcaccgataaagtaatagcttccactagtgctttttctttcaactttatcaccgacatagtcaacatcataatagcttgtaagtctgaaactttctcttctttggaacataagaccaagattagaagttccaattaaatatctacaagatatgtttaatattagttaggtgaacttccctttgttcttattgaaatcttgcacatagatgaacattgaacataatatcataaatggatgcagggagatagaccagtgagttgcatcca

SEQ ID NO: 7184 - DNA, 392 bp, Glycine max
  unsure at all n locations
tataaagaaaaatgatggcatgattttaacccaatcacactatgttgaaaatctgttgaagaagtttaattattttgatgtgaaacctgtttctactccttatgactcatccatcaagctaaagaaaaatttgggtaaaggaatttcttcacataaatatcctcaaattatcggttctttgttgcatttgacaaacttctccaggcctgacattgcatatgcagttggtagattaagaaggtatactaataatcctgatcattctcattggattgcattacaaagagttcttagatacttaaaaggaaccatcaattatgacattcattatacatcgtttcctgcagtaattgaggcgtttagtgatgcanattggatttctgattctgatg

SEQ ID NO: 7185 - DNA, 440 bp, Glycine max
  unsure at all n locations
tgccaaatgctctattggctgatgagttggtccatcctctctaagtccaatcgaatcatgagtcatcacataaataactccaacttcacacagtgcagaaatccttatggcagctctcatgtagtcagtgaagacaaagggcatttagattttgctgaaacaaatttcttgtagcatctgtagggctttctggagcgtatgtctgaaagttgaaatttaattagaagggtagtcaataatccagaaacaaatgatggaagtcaagttttatttatcttaaaagtttgaaggctatacatgcatgaagcaaaaagatagatgatgagtgaagatgcaatgtacttaatatgaattntaactgtaattaggaaagttaatgattataacaaaccatggaaacgaatcaccactattcagtannaatgggatacacatcattc

SEQ ID NO: 7186 - DNA, 410 bp, Glycine max
agcttgctcgtcttgctgatatttatcatgttgacttttctgatgatgaccgaggaacaattagggatcaacttgaaacttatgtgcttcaagtgagaagaaatgcttctttttccacttgtgaagatgttcaaagtttggctatgaagatggttcaaactgagaaacatttggtatttccattggtttataaacttattgagctagctttgatattgccggtgtcgacagcatccgttgaaagagctttttcagtaatgaagattatcaagtctaaattgcgcaataagatcaacgatgtgtggttcaatgacttgatggtgtgttacaccgagcgggagatattcaagtcacttgatgatattgatattattcgaacatttaccgcaaagaagtctcggaaaggacac

SEQ ID NO: 7187 - DNA, 429 bp, Glycine max
  unsure at all n locations
ctaataaagagcatttaaagaaaataattttataatctctattgatatgaaatgacaaatgacagcaataatatatgcttttgttttccattgtctaacaatgacttgtagtttaaatatgaaaatatatattaaatttcattttctcttaatgtatttaaaataaattcatttttgtttcacaagaagatttgaacatgggagagatgggagattaataagaaaaaaaatcctcattttccttccattatccttattattattgttaatatagagatcataaatattttttttatcaaaaatcatcctgcaataaaaatattagttaaattaaaacaattttatacccattgatgatggtcagtcaatccattctccttatcataaatctttcaaaagatattagnaacatttttccttctttgatac

SEQ ID NO: 7188 - DNA, 442 bp, Glycine max
  unsure at all n locations
agcttccatcttanaccaaataatgttaacttataaatttcatggtagtgagcaatgcaagaacaaatgataatgagtctcaactcttactacacaccaggctaaaaacaacaagacagccttattttatcaacacttgttcagccaacacctattatatgtccatttttaaaattaactctagaaaaataacttattttactataaagacctagagtaaacccctattaatgaaacacaactattggcagaaaaaaccgttttaaggacaaaaacctgattaacagcttcaccaaaagccacaaatgcaaactccccaccaggagcaagaagtagaccaactctgatggcagaaatgagtgaaatcccaaacattctacctatcaaacaaaccaagatagtcttgccacatattaagagtcctagtgtgcccgtaatgact

SEQ ID NO: 7189 - DNA, 259 bp, Glycine max
  unsure at all n locations
tatatatcgatacgctcgaaataaacattgtacactttcgaganaggcaaanggccggaacttttcacacggatgtccgagtcgggcgcataataatgggagaggctcggaattgaacaacgaaagctcttgagaaattcaaatggacataacttttcacactgatgtccgattcatgattatactatatcgatacgctcgaaattaaacatcggaagctctcgagaaattcaaatgcgcataactgttcacacggatg

SEQ ID NO: 7190 - DNA, 413 bp, Glycine max
tatcagaaggggaatggtaaaataccacctctttctgatattatgaaggtggcaaagtgtttcttttgcaagaagaagggacacatgaaaaagaattgccccggattccagaaatggcttgagaagaaaggtaaatcaatctcattagtatgttatgaatctaatatggttagtgttaatattaacacctggtggattgattctggatctactattcatattgcaaattctttacagggtatggaaaacctaatgaaaccagtgggaagtgagcaaagcattttatcaagcaataagctaggctcacatgtggaggccattggaacttgcattctgactataagtagtggctctattttaaaattagaaaggactttttatgtaccaagtttttcccgaaacttgatttctat

SEQ ID NO: 7191 - DNA, 421 bp, Glycine max
tagctagatagaatgtcaaagatggaagatactttaacattgtttatgcaagtatccatcgcaaaccaaaagaacattgatgcttctgttaaaaatctagaagttcgagttggacaactggctaaagagctatctgaacttggaagtggatctttctcagcaaccacacaggtcaacccaaaggaacattgtaatttaattacaacaaggtgggggattatggttggtttgaaggataatgatgagaaaaagaataaagaaggagttgaaaaagaaaatgaggaaaaagatgaagtggtaactagtgaaaaagtggtaagtgaagaagagaaaaagaaatcaaatgaacaaaccactgataaaggtaaagttatagtaaaccatccaccaattgagcatcttccttatctgcatgctccat

SEQ ID NO: 7192 - DNA, 438 bp, Glycine max
  unsure at all n locations
cctcctcaactcatctgtcaacttcctaatatgactattcatgtattatattngtttacattnttgtatatatagtaacaagtctggtttgttttggccttcgattatttcaatttttccattgttggttcctgcaccttgtgtctataattatttgtttgcttatttggggttcaggctgatgccaagaccgatgaagtgtactcgcaaatgaccttgcaacctctgaatcttgtacgataagtgataacactgtcttaacttttcattgataactagtgttattgcttttgtagttatttaggttttaactaagaccgtgtttgtggtaagaccaaaaggaggcatactatccagcagagctggtcaccccaagtaaacaaccaacaaactatttctacaaaactttgacaatcagtggcgcaagcactcatgggg

SEQ ID NO: 7193 - DNA, 432 bp, Glycine max
  unsure at all n locations
ttctggcggacatcttgacttgctgtccaatctgacatttttcacagtttctgccttcttctattttcagattgggaatgcctctaacagcacctttgtcaatgattttcttcatgcctcttaagtgcagatgtccaaatctttgatgccatattttgacttcatcttctttggaggatagacatgtggaggagtaactggtttcttgaggtgtccataggtaacagttgtcctttgatctgctgcccttcattagaacttcactcttctcatttgtcaccaagcattctgactttgtgaagtttacattgaatccttcatcacacaactgactgatgctgatcaagtttgcagtcagtcccttcaccagcagtactttgttcagactangaagtccatcatggactagctttcccattccagtgatctttc

SEQ ID NO: 7194 - DNA, 314 bp, Glycine max
gtagatgaatatgaagccgtgtccaccttttggactcctctaagaacaataacatcatttcttgcactgaattgttgggagttggaagccatcttctcaatcaaattcctagcctcagcaggggtcatatcaccaagagttccaccactggcagcatcaatcatactcctctccatgttgctaagtccctcatagaaatattgaagaaggagttgctcataaatctggtggtgaggacagcttgcacacaatttcttgaatctttcccagtactcatacaagctttctccactaagttgcctgatgcctgaaat

SEQ ID NO: 7195 - DNA, 432 bp, Glycine max
  unsure at all n locations
agctgggntcttcgggtttctattgtcgcttcaccatnnnacacaggaacattgattaaaagatgtatggacaagaattccaacattagaacctaccctgatataggtgaacttgcatttggaaagacaggaaggctaatagtatcagtgtccatgtacaccgagctctacttagtttcgatagggttcttgattctggaaggtgataacttacctttttccgtttcaaactcagatacataacaaaattaggaatgtattgtatggcctactattttatttcttcaagactattgcattgcttattgcttataaaaggtagggaagggttgctgttagtcttttcatttaaataccaatatgatgcacatcattttaactatgcaacggtgcctggatagataattgagtcatttggtactgtataaaaaa

SEQ ID NO: 7196 - DNA, 300 bp, Glycine max
  unsure at all n locations
tcgacatcagaccacttccattgtgctggttctacttcttatggatttgatggggcctatgcaggttgaaagtcttggaggaaagaggtatgcctatgttgttgtggatgatttctccagatttacctgngttaattttatcagagagaaatcagaaacctttgaagtattcaaagagttgagtctaagacttcaaagagagaaagactgtgtcatcaagagaatcaggagtgaccatggcagagaatttgaaaacagcaggttcactgaattctgcacatctgaaggcatcactcatga

SEQ ID NO: 7197 - DNA, 417 bp, Glycine max
agcttcaaggatgaggactacccttgtttctctgacatagcaaactttaagggcacaggacaaccaccagaaggtatgcaatttcacgagagaaaaaggttcttctgagaagccaccaggtatgtttgggatgaccttattctttttcgtattggtgattgcaatttgttaaggtgatgtgtaacatagggagaacaaactaacatactttggcattgccatgactcaccatataaaagccacttcaacgaagaaagaacaactgcaaagatccttcaagcctgattctattggcccatactcttcaaagatgctcataagcatgcacgatcatgagacaactgtcaacaaactggaaacatatccacacggcatgaaatgccattacagaacgtgtaggaggtaaaagtctttgat

SEQ ID NO: 7198 - DNA, 413 bp, Glycine max
  unsure at all n locations
agctntacaaaagaggagagtntattngactaaggttatctcaatngaacaaagaaaaatcacaaattttccccctttatacattntttccccaacaatcatggggtttcaaaaaagttgaagcacaaataaaatgaataaatgaacttacatcgagtataaacaaaagtgccataattggaggagctgcatatccaagcccttccaaaatggcatctaacgatagatggaaaccacccagagagtcaattcccgtgattgaacatataaaactccccgcaacagccatggcaccatatatccctgaaacaaagcaattccatcgcaaagttcaactcacagtaaacaaaatcaagattcccattttcccaagtggaaaattcattgatttgattgaagagagtaagtttttt

SEQ ID NO: 7199 - DNA, 390 bp, Glycine max
  unsure at all n locations
aaccagaataattggcattccatactttgtcaggtctaataaaaaacaagatataaacttctcattattcttaggctgttgaagatagttaaaaattgaacccttaagccagtgagtggaagcattataagcatttaggaaacttaccgctgtttctacccatcaacttgacaacacctatgccattttctacactttcagcttcaacatgtgctgcatttatagctcgttgagcctcctcaacagcagtgtcaaagccaaaagacttatcaataacctattaagcaagagacagcagaagaaattaccaattaatgatgctaatggngtttaaattatgagtttaaagccacaatgtagaaggaaaanaaaaacttactggaatatcat

SEQ ID NO: 7200 - DNA, 439 bp, Glycine max
  unsure at all n locations
aaagttgaaactgtgtgacagngncctcctacctacctgtcaccggaaagggacagagacgacgcagatgcactctccacgtcaaaaaacgacgccgtcgaatacgaatgaacataacccttaaactccccatctcccccgccaccttctttcttcccatcccccacctccggcggcgccacctccctctccatgtacctcaccacctgcctcatactgggcctctcttccggcgcctccgcggaacacaacaaccccaccttcaccaccaacaaagcctccacctcatcaaacaccccacccaacctacggtccaccaccgccaacacgttccccacgcgccaccgttcccacacccactccaccagcacaagctcctccggctgcgccttcacctcaatcggtctcctcccacacaccacctacaacaccaacgccc

SEQ ID NO: 7201 - DNA, 389 bp, Glycine max
  unsure at all n locations
gataaatctgccatatattcagccggtattaggcctcatgagctntctcatattcagcaacttactggatttagcttgggtgacttcccttttagatacttgggtgttccccttttatcatctagattaaatgtatgtcattatgttcccttgctttccaagattactagcctgattcagggatggagcaagaagtctttatcttatgcaggtaagttagagttgatcagagcagttattcaaggaattgtgaagttttggatgaggattttttctttgccgcaatctgttctggaccagatcaaaacttcgtgccgtaattttctgtggggcanagcggatattggcaaaaacaagtccttggntgcttggtcagtagtttgttctcc

SEQ ID NO: 7202 - DNA, 383 bp, Glycine max
  unsure at all n locations
ggaattcatttagatgtttccttatatgatcaagtacaagaatggtaaggaaaacatagtggttgatgctttatctagaaggtatgtttttcttacttctttgcaaactaaattgcttggttttgagtttatgaaggacttgtatgctaatgattctgaatttggcaaagtatgggattcttgctctaaacatgtttttaggaactattatagatgttcatgtttcaaaaaaaaaagttgtgtgtgtctgtgttccttgcatgaaatgttagtttgagaaatcatggtggtggaatgatgggacattctggtgtgaaaaagactntataaattctggataagcatttttattagcctagcatgaagcatgatgtgcaacctat

SEQ ID NO: 7203 - DNA, 433 bp, Glycine max
  unsure at all n locations
ttatgaggagaagcataagatgaagcangagatcaccatgtgactcttcatgttgcaactgaaggagaaggaagaaagtcaaggaaatgaaagaagtcattgaggccgaggtagaggttgaggtcacggtcgaggataggttggaggtggcaatagtgtacgaggttcaaatttcatcaacaatagttacgagaaatgaaaaagctcaagagaatgtggaaaaggctatacaagcacaaggtatgataaatctcaaactcgatgttataaatgtcaaaagattggccactatgcttcaaaatgtagattcgccaagaatagagttgaggaggagactaactatgtggagcaaaaggatgagaagtttcaaatagtgctcctagagtgtggaagtaatgaaggtagccaagaaaacacatggtaccttgacact

SEQ ID NO: 7204 - DNA, 344 bp, Glycine max
agcttgaaggtaaactagatgccttggttatcctgttaacctaactggccatgaataaaaaatctgcacttgtcgctagactctgtggtttatgttcctctgccgaccaccacacagacctttgcccttctgtgcaacaatctgaagcaattgaacagcttgaagcttatgctgcaaacatctacaacagacctcctcaaccttaacagcaaaatcagccacaacagaataattaagacctctccagcaacaggtacaatcccggatggaggaatcatcccaaccttagatggtcgaatccttcacaacagcagcagcaacaacaacagacttattttcaaaat

SEQ ID NO: 7205 - DNA, 434 bp, Glycine max
  unsure at all n locations
aagcttnttccattaatatgaatttatacttcataaaatcataagcatgcgtgaattgtatgctaccagcttaacatttacggccagaaaattgattgcagtagtgaacattgttgaaatcaggaactggacactatttccaaaaggaaaatgcttcaatttcaaatttacaatttttttttaaacctcattgctaccttaaatttttttggtgccattaacaagttgatttcattatgtttataccattacagttgtgatcataaatgaaagttttacctctgtggatcaacttcaggttttcccatttggttcttttcctctaaaaacctatcttcctgatggagatatcgacttgacagctcttagtcatgaagatgaagaggaggatttggtacgagcagtatgcaatatacttaanagtgaagatgact

SEQ ID NO: 7206 - DNA, 436 bp, Glycine max
  unsure at all n locations
cattgccattacagccgcggataccccgattctccacactcattccggaatgagtnngtacccaaacaagaatggtcaggctcacaagttctcccaaagagaatgcaaaatatgcagcgttgaagtaggtagagagcttctttaattgcttggggttgtcttggtcgaattggtcgcctccgtaagcaaccatgtttggcttgacacaaccactacctaatgccaccaagtacagggctacgaagaatatcatggtcttcatgccctttgcttctgagcactgttctcctaaatcgttgatattgcatgggggtggcttcaactgaggaacatgagcttggacagaaagcaatatgaaaccctgtaaacataatattatttgtatatatatgtgtgaaggctgtctaaatagtgaataaaaagtaatagaatgagt

SEQ ID NO: 7207 - DNA, 391 bp, Glycine max
  unsure at all n locations
acacttctccatgaaagtgtatttatctaattgtccatgttgatgacatagttattacagggaatgatgttgctacaatttgtctgctgaaaaagcacttattcatccactttcataccaaagaccttgggtgtgtaaaatactttcttggtattgaggtgactcaatcaaacgaaagcattgttatttctcaaagaaagtatgctttggataggtttttttccagcaatacactccatctcccctatttgctcaaaatacacctctttgtatactaatacccaaaatacaactttttctcacctttgagaagttgagactggccaccccgacttctgtacgacgcgccctttttaaatttaatttttaaatttattttaaatntatgttt

SEQ ID NO: 7208 - DNA, 435 bp, Glycine max
  unsure at all n locations
ctttcttggccaatgctggacttgtttggcagtgatttccttggcaatttgatgctcagaaacagcaagatccaccactccttcagttggtctgcccaggtatttgttgatcacagcaggggagaatctaacacattttcctctgacaaacactttctgataatcatcactttttctgtttgttatgtcagagggaatgctgacaatgaattcccttactagactttcatagcaatcgcccaacttggtgacagttttcatcagtccagcagccttgatgaggtccatgatctccttgcagtccaaggcatttcttcccagttctctttctaaagcaagccttcgttgatatacaaatttccacctttcaacattgccaatggagtggaatgagatgttgtccaatggtgcatcanggacattttcaggcacctt

SEQ ID NO: 7209 - DNA, 444 bp, Glycine max
  unsure at all n locations
agcttcgtcgatctctttatgggttgaaactatctcctctagcatggntnnggtaaattagtcatgttgttcanatgtttggactaaaacgaagtgaagctgatcactctgtattntactatcatacatctcctggaaaatgtgtctatctaatggtctatgttgatgatatagtgattacagggaatgatactactaagattgtccagctgaaagagcacttattcagtcatttccagaccaaagatctgggatctttgaagtatttccttggtattgaagtggctcaatcaggagatggtattgtgatttctcagaggaagtatgctctggatattntagaagaaacaggtatgcagaactgtagacctgttgaaagccctatggatcctaatttgaagctcatggcagatcanagtgaagcttatcctgaccccgagagat

SEQ ID NO: 7210 - DNA, 416 bp, Glycine max
  unsure at all n locations
gcttctacaaagtgaaggttgtattccccatgaaaaactcttatccattggtactttntttatcatgttcatctccagcccaatcattatcactgtaacctacaagcttatagtttttacttgttgagaaccataaccaaagatgattgttcctttgatatagcaaagaattcgttttgcagccttgtggtgagtagtggttggagtctccatgtatcgactaatgagtccagtagcatataggatgtctggtctcatgcacgtcaaatatcgcaaactacccaacaaactctttaaatntgtagcatccaccttttttgctttgtctaactttgataacttcattttgcactccaccaatgttccaatgggcttgcagttatccatcttgaatttcttgagcatctcctttgcgt

SEQ ID NO: 7211 - DNA, 375 bp, Glycine max
acgcacaaaaacagcaggatccaccattacgtcacccggcctgcccaggtatttgttgatcacagcaggggagaatctaacacattttcctctgacaaacactttctgaaaatcatcacttattctgtttgttatgtaacatggaatgctgacaatgaatccccttactagacattcattgcaatcgaccgacacggtgacagtactcatcagtccagcagccttgatgaggtccatgatctccttgcagtccaaggcatttcttcccagttctctatctaaagcaagccttcaatgatatacatatttgcacctttcaacattgcctctggagtggaacgatatgtcgtccgatggggcttcacgcacattctc

SEQ ID NO: 7212 - DNA, 417 bp, Glycine max
tgatgcagctgaattggtttctaccttatgcactcctctaacgactatagcatcatttctggtgctaaactgctgggagtcggaagccatcttatcaattaaatatctggcttcaccaagagtcatgtctccaagggctccaccactggcagcatctatcatacttctctccatattactgagtacttcataaaaatatcggagaagcagctgctctgaaacctgatggagacggcaactggcacatagttctttaaatctatcccagtattcatacaggctctctccactgagttgtctaatacctgagatatacttcctgatgactgtgatcctggaagcagggaaaatgttttctaagaatactctcttcaggtcatcccagctcgtgatggaccttgggcaaggtaatacaac

SEQ ID NO: 7213 - DNA, 440 bp, Glycine max
  unsure at all n locations
agcttctggtgggacatcttgacttgctttctaatctgacattcaccacagattctgccttcttctattttcagattgggaatgcctctaacagcacctttgtcaatgattttcttcatgcctcttaagtgcagatgtccaaatctttgatgccatattttgacttcatcttctttggaggatagacatgtggaggagtaactggtttcttgaggtgtccataggtaacagttgtcctttgatctgctgcccttcattagaacttcactcttctcatttgtcaccaagcattctgactntgtgaagtttacattgaatccttcatcacacaactgactgatgctgatcaagtttgcagttagtcccttcaccagcagtactttgttcagactangaagtccatcatggactagctntcccattccagtgatctttccttt

SEQ ID NO: 7214 - DNA, 424 bp, Glycine max
  unsure at all n locations
agcttcaagaataatggcctcattttttcttttattcttagaaggaaattcaataaataggcctcctatttttaatggagagggttaccactactggaaaacccgaatgcaaattttcattgaggcaatagacctaaacatttgggaagccatagaagttggaccttatgtacccaccatggtagctggaaatacaacaatagagaaacctagagaagagtggtctgaagaagaaagaagattagtgcagtacaatttaaaggctaaaaatatcattacttctgccctaggaatggatgaatattctagggtgtcaaattgtaagagtgctaaggatatgtgggacactcaacaagttacacgtgagggagcaactgatgtcaaaagatctangataaatactctaactcatgagtatgaatta

SEQ ID NO: 7215 - DNA, 433 bp, Glycine max
  unsure at all n locations
agcttcaaccaaaggatggtttttctttgtcttgaaaggataaatgacaatgcatacaagattgaattgcccggtgagtataatgtgagtactacatttaatgtgtctaacttagctctttttgatgcagatggagaagtcaatttgaggaaaaatccttttgaagagggagagagtgatgaggacatggcaaggactaagggcaaggaacctttagaaggacttggaggacctatgacaagggttggaacaaagaaggccaaggaagctcttcaacacgtgttaaccatgctatttgaatttaggcccaagttacaagtggagaagtttcggattgtcaattgcaccatgttccaagaagagtagagggtgccacctttgttgagtgtttttattagcattntgttagttgaaataaaggcccaaacttgtg

SEQ ID NO: 7216 - DNA, 303 bp, Glycine max
  unsure at all n locations
accttgagcaattcaaacgacaattacgtttttaagtatgttcgatngagtcccgtaatgtatcgaaacgttcgaaattgaatgctgatgctctcagcaaattcaaaagacaataacttttatctcgggtgtgtgattgagtcccgtgatatatcgacatgctcgaaattgaatgttgatgctctgagcaaattcaaactacaataactttttactcggatgtctgattgattcccgtaatatatcgagacgctcgaaattgaataccggaactctaagaaaattccaaccgaccataccttt

SEQ ID NO: 7217 - DNA, 425 bp, Glycine max
agcttcagaattcaatttttcgcgtctcaatatattacgggactcaatcagacatccaagcaaaacattattgtcgtttgaattagctcagagcttcagaattcaatttcgatggtctcgatatattacgggtctcaatcagacatctgagtaaaaaagttattatcgtttgaatttgctgagagcttcaacattcaatttcgagcgtctcgatgtattacgggacttaatcagacatccgagtaaaaagttatcgtcgtttgaatttggtcagagcttcaacattcagtttagagcgtctcgatatattacgggactcaatcagacatccgagtaaaaagttattgtcgtttgaaaatcctcagagcttcggtattcaatttcgagcgtcttgatatattacgggactcaatcagacatccgag

SEQ ID NO: 7218 - DNA, 439 bp, Glycine max
  unsure at all n locations
agctntgccgccacggaatttccgactatgttcttgtgtggtggaacaagctacaaaaggagagagcaagaaatgaagagccaatggttgatacatggacggagatgaaaaagatcatgaggaagcgatatgtgccggctagttactcaagggacttgaaattcaagctccaaaaactaacccaaggcaacaagggggttgaggagtatttcaaggaaatggatgtgctcatgattcaagcaaatattgaagaagatgaggaggtaactatggctcaatttcttaatggtttgactaatgatatccgtgatattgttgagctgcaggagtttgttgaaatggatgaattgcttcacaaagcaatccaagtagagcaacaattaanaaggaaaggagtggctaagaggagttttaccaactttggttcttctagttggaa

SEQ ID NO: 7219 - DNA, 336 bp, Glycine max
  unsure at all n locations
tcacctctcaatgagctggtgaagaaaatgtggcatttacctggggtgaaaaacaagagcaagcctttgctttgctcaaagaaaagcttactaaggcacctgttctagctcttcctgacttttctaaaacttttaagctagaatgtgatgcctctggagtgggagttagagttgtattgttacaaggtgggcaccctattgcttattttagtgaaaaacttcatagtgccaccctcaactaccccacctatgataaagagctntatgccttaataagagcccctcanacttgggaacatttccttgtttgcaggaatttgtcttcatagtgatcac

SEQ ID NO: 7220 - DNA, 458 bp, Glycine max
ccgggaccttaagcacctgcagctgcagcttgatgttggttaatgtctaaattatttataccaaaagcaagaaattaggtgcatatagagatacaaacgccttggaattgatgcatacagacatttgtgggccatttcatacacctttatggaatggtcaacaatattttatatcattcataaacgattactccagatatgcatacatgtttcttatacatgaaaagtcacaatctctggatgtgttcaaaacatttaatgttgaagttgaaaatcatctcaacaaaagaattaagagtgttagatctgactgtggtggtgaatactatggtagatatgacggttcaggtgaacaacattcggggccttttgctatgcacctagaggaatgtggaatcattccatagtacaccattccagggtcacctagcgtgaatgatgtggctaaaagatgaaat

SEQ ID NO: 7221 - DNA, 436 bp, Glycine max
tcatagttattattataacacagctacccatattaaacatacttcatctaatacttttttttggggggaatcaatgagaatgagaaacatccacacaactttgcagggacataagcatgaaagcattgtgacaaaaatactcaattagaagagaagaaaatgagagttaattgacaaagctcgctcaataataatcaatattcattataagaatatttcccagcaatgtttcatcaaattctgctttacacaaaaaaaaaaaaaatcaccaaactttgcttgaggcttcaagcaatcccctaacaaattccaaacacaaacttttgtgtatcactctgaaaaatataaacgaatactatatagatcataacagtcatgatctctccctagaaaaacctaagcttgttcaagacagttctcctttgctggagaaaga

SEQ ID NO: 7222 - DNA, 331 bp, Glycine max
  unsure at all n locations
tagtttgttacaactggggtaattatcagtttaatttgttagttatgnggaccaacttatcaacaaatctccaccttggttacataactaaacaaggatcaaagtggttgctcccttttttgacatcagactagctgacattacttcaaatttataaggtccaggcagtagaaaaacttgatgcttggtagaactttagtgatcatatgagagggattatgcttagtggagactttctagacaaacacaactccttcataaataatctctctcacaaagtgtagcttcacatctacatgttatgtcctttcgtgataaacttggttctttg

SEQ ID NO: 7223 - DNA, 434 bp, Glycine max
  unsure at all n locations
agctnttgtcactccaccttaatcttgtctttatgttaaccaaagctagcacagctgataacatagtaaagcttttgcatccaacatacaatggcgtatgcgcatctgtttgaagagcatcgtaaatatctgcatgacattcccgaaagccctcttgcccaagatcacgtatcatgtcttccatgagatctccgctttgtagatcaaccggatgaggtggacatgttgctgtatgaccaaccaactcaccatgccatatccactttgtgtacgtcgggctaaagccatcacatatcagatgcgatctaatgtcatccaacgaatgacgcctcccgttgacacatttaacacaagggcagaaaaagttgccatctgtggttgctgaatgtatnttggcanatgacaaanactcttcaactccatgttgataagct

SEQ ID NO: 7224 - DNA, 430 bp, Glycine max
agcttatcaacatcaaacttggagtatgagttcttggggtcaagacatgagaagcaatcaagtataatgttacttccttcactaaagcggtgatccatctccacacatattttatcaatagcaacataaaaaatctctgcacggtaatgatgaagattagtgatagtcctcccttctgctcttgaacgaccccgaactggtatttcgtcatccatatttggtaccagaatacttttagcaacacaaaatccttggacatcggcaaaaaaattattccagccactctctctcattgtgcccaaccgagctttgacaacatcaactaattccatgacattcacaatattaagatcttttctttgcaatatatttgaaaagctcattgtttcctatgacctggatcacgcacaatctcattggggttaaactc

SEQ ID NO: 7225 - DNA, 439 bp, Glycine max
  unsure at all n locations
tcgagaagaaatcacatgtttgtcatcatcataaagggtttataatgtgaatgtatgtatacatgattttgatgatgtcaaagaagaatctaacaaggctgcttcaaatgataagcatttgcttcaagaataattcaagattgcttcaacaaacaaagccttgtttcaagattcactaaagaccaagccttgccttaaaacattgtgctttcaagacatgcaaggctctggtaatcgattaccaggaagtgtaatcgattaccagaagacagggttgagaaatagctgttgaaaaaggttttgaatttgaattttcaacatgtaatcgattaccatatgtctgtaatcgattaccagcaacgaaactntggaaattcaaattcaaaagtcataacccttcaaattataactgtgtaatcgattacacaaacattgtaat

SEQ ID NO: 7226 - DNA, 291 bp, Glycine max
  unsure at all n locations
ggcttctacaaagtgaagggtgtattccctttgaaaaactctaatccatngggactttatttatcatgttcatcttcagcccaatcattatcactgtaacctacaagcttatagttgttacttggtgagaaccataaccaaagatgattgttcctttgatatagcaaagagatcattatgcagccttgtggtgagtaatggttggagtctacatgtatcgactaatgagtccagcatcatatatgatgtctgggctcatgcacgtcaaatatcgcaaactacccaacaaac

SEQ ID NO: 7227 - DNA, 348 bp, Glycine max
tctggtgggacatcttgacttgctttccaatctgacattttccacaaattctgccttcttctattttcagattgggaatgcctctaacagcacctttgtcaatgattttcttcatgcctcttaagtgcagatgtccaaatctttgatgccatattctgacttcatcttctttggaggatagacatgtggaggagtaactggtttcttgaggtgtccataggtagcagttgtcctttgatctgctgcccttcattagaacttcactcttctcatttgtcaccaagcattctgactttgtgaagattacattgaatccttcttcacacagctgactgatgctgatcaagt

SEQ ID NO: 7228 - DNA, 424 bp, Glycine max
  unsure at all n locations
agcttctaatcgattacacacatactgtaatctattaccagaggagtttttcagaaaacattctcaacagtcacatttttttatctgtttcttaaatggtcatcaaaggcttatatatatgtgacttgagacacgaatttaacaagagttttcaagagcaaaaaggtcttatcctcttaaaaagcaaaatagttttatcctcttacaaattccttggccaatacacttgtgattcaataaggaattatttgagtgctcaaattgttcaatctatctctttcaagagagatttcttcctctcttgaaaagggattaagagaccgagggtctcttgttgtgaaagaattctaaacacaaaggaaggattgtccttgtgtgtttagaacttgtaaaaggaatntaanagatagtggaactctcaagc

SEQ ID NO: 7229 - DNA, 342 bp, Glycine max
gcctcacctcccaatgagctagtgaaaaaaaatggggcatttacctggggtgaaaaacaagaacaagcctttggtttgctcaaagaaaagcttactaaggcaccctgtctagctcttcctgacttttctaaaacttttgagctagaatgtgatgcctctggagtgggaagtggagctgttttgttgcaaggtgggcaccctattgcttattttagggaaaaacttcatggtgccacccttaactaccccacctatgataaagagctttatgccttaataagagcactccgaacttgggaacaatacctgggttccaaggaattttcattcatagtgatcatc

SEQ ID NO: 7230 - DNA, 427 bp, Glycine max
tcccctactcccaaaacatagaaaaacaaccgaagaatctgtctgctcatccagccattttaatatcctatcatgttgggcttgatccaaattttggttaggttgacccttcagattaatcaatggaccaacagcatagatagggggtgtttgaatttgaccatcacataatgcatcaatagcatactgctccaactctgaaaaagagttaacaatgatccctttggagtccttgaacctctgagcaagtttataataagtggcatatccaccttgtttgttaaaaaaagcatcatgcaaaacactagaaggaactggatcagggagacccggttccaaccactgaggatcagaatcattgaatgcatcaccaactttacgtttctgaatggaaaacatgatattcacaaacccatcatttgaaggc

SEQ ID NO: 7231 - DNA, 519 bp, Glycine max
ttaagaattatgggctcatcaaactacttgtttcccgagggaaattctataaatagacctcccatctttaatggagtgggttaccactactggaaaacctgcatgcaaatctttatagaggcaatagatttaaatatttgggaagccatagaacaaggaccttatgttccctctatagtggccggaagtgcaacaatagaaaaacctagagcagattggactgaggaagaaagaagattagtacaatataatttaaaggccaaaaatattatttacatctgctctaggaatagatgaatactttatggtttcaaattgtaaaagtgctaaagatatgtgggatacactacaagtaatacatgaaggcacaacagatgttaaaagatctatgataaatacatttacccatgaatattaactgtttaggatgaatgtaaatgaaagttttcaagacatgcaaaaaaggttcacacacatagttaatcatcttgcatctctaggaaaaactttttcaaatga

SEQ ID NO: 7232 - DNA, 587 bp, Glycine max
ttagctttgtccccaaggcttcatgtagacttgtccattatctctaagtgaacctcggatccctgtcggatacaatactggaaggaattccatgcaaccttaccacttccttgatgtacaactctactagcttctccattctatacttcatattcactgggataaaatgagcagatttggtgagtcgatctactatgacccacacagcatcatgtccacgactagtcttgggtaaactagatacaaaatccatagatatgctctcccatttccattccggaatttccaatggcttcaattctcctgatggtcactggtgctcagccttagccttttggcatgtcaaacaccttgctacatattcagctacatctttcttcatgccctgccaccaaaaacttatcttcaaatcttggtacatcttagtcattcctggatggaaactaacacgacttttatgcgcttcttccaagatcttaactttcaaatcatctcaagatggcacacatattcctccccttgaaactaattaacccggttgtgtccttttcaaaccctacatccttaatccccatttacatccatta

SEQ ID NO: 7233 - DNA, 447 bp, Glycine max
ttgaaactaagcttgcagactagtgctaccaacctagatagaatccctctgttgtttcatgtaaacctcttcttttagatcaccattcatgaacgccattttcacatccatttgatgcaactcaagatcaaaatgagctactaatgccaaaattactcgaagagagtctttcttagatacaggggaaaaggtctctctgtaatcgattccttctctttgagtgaatcctttagcaacaagtcttgccttatgtctctcaatgttgccttctaagtctttctttgtttcgaagacccatctgcatccgatggcttttacaccaacagacaactcaacgagatcccaaacttggttagatgccatagaatccatctcatccctcatagcattgtaccacaaatttgattgcttagaactcatggcttgtgaaaacgtgtcaagatcatt

SEQ ID NO: 7234 - DNA, 219 bp, Glycine max
gctttaactttgtttaagaaaaagattgtattttttgtataaaacctacggaaggttctcttttgaccacttttccagctattggcaatatcgggtgcattaaaaaattcccatcagttcatgggtatgtagagaaaagaggcttcaatgcctttgatgtacgcattacaaatgcattacttgatttggatgcccagtgtggatgcatagctagtgtga

SEQ ID NO: 7235 - DNA, 452 bp, Glycine max
  unsure at all n locations
ggagaaagagacaccttttggttgcaaacaatgtatttttttaagtgtgacacctaaattccaagcatgcaaaggttcaacatagaaataacaaaactaagataaataaataaagggggggaagagttgaatttaatgaatggattacaattaccaatggtgggggaaagatcttcaacagaacttgaaataaagctgacaagtaggctactttttcccaccccggaatctccaatcaacaagatcttgaaagagagatcatagccactgctctgacctgaggatgaactcattctctcttcctctgatgaatgtcttangtgtgtgtgtcaaaaagtacagtgaaagaaacgtatgcaagggtgagagagagaaagaagcttatggtgttgggctagggaaggctaaactgtaaagaagtgcaatggtgcaagccctttcttttatttggg

SEQ ID NO: 7236 - DNA, 455 bp, Glycine max
ttaatgtaaaccttactctcagattcaatgcactttatcttctaacaacgcttcaatctcctcttaccttttgcctttggtgtctgataaaaataaattttagaaaagtgtggcacacaccatcaccccaccaagcacaaacaacatgcctccaaatgttattgcctctaaaacactaaggaatgtcatggacacaatcccacttatcaaacggttcacaaaaatggccaagttggaaccttgggccattagccttagagggaaaatcttagaagagtagacccaagttgtcagcccacgcccaatacaaaagcatgatactgcaacatagacagcaaccacccacaaagcaatgacccattgatccttgttatcaccacataacttaagcaaggtacattccaagcccatcacaaacaatgagattgccatgctacatgagcctaacaacaaca

SEQ ID NO: 7237 - DNA, 454 bp, Glycine max
tagctgtagcctccagttgcatgacttgttaagcatcttgaatgatccccacttcctaatgttttgtttttttctctctcatattcttatcatatgtgttagatttcatcttaaaaccaattaacattaagtgaagttgtccaacagatctataagttgcactctaagacagccgatgtcggacttccaatgcacccccttcacgcccaacacttattaagcttggtgcgtgaacaacaaatggtgggtgctcatcggaggcgagagcgatgtcgcaggtcaaagcatgctttgatatcatgttagatttcatcttaaaatcaattgacattaagtgaagttgtcaaatatatgtatataagcggtactccaaaacaaataatatgagacttggatatttttcaataatatggaaacaatttgtgatacccgggcatcataaattgatggtttt

SEQ ID NO: 7238 - DNA, 535 bp, Glycine max
cttcttggctgttgccttgaaggacaagaagaattacttttttttttatacgtggctaatggcagccttaactccttcatatttggtatgcaataaatgaagaatgcttaaattaggttcacttgtgttctttcttttctttgagttatacttagcagcttattaatcttgaatatctaatattgaacaatactttttaactccttcagatcaaataaaaagtaaattattggattggccacgacgcttcaacataatacttggaattgcaaggggactattgtatcttcatcaagattctcgattaaggattattcatagagatctcaaagcaagtaatgttctactagatgaaaagttaaatccaaaaatatcagattttggaatggcaagagcttttggaggagaccaaaccgagggaaacacaaatagagtatttgggacttactgagtgtctgtctaattataatatacaccacatttactatttatctattcatttatatttgggttaatgtgaattgattgctctaat

SEQ ID NO: 7239 - DNA, 373 bp, Glycine max
aacaagacaacaaaggaagaaagaaggttgtcttctaacccggagattgggtttgggtgcacatgagaaaagaaaggtttccggaacaaaggaaatcaaagcttcaacaaaggggagatggaccatttcaagtgtttgaaagaatcaatgacaatgcttacaaagttgagcttcccggtgagtataatgttagttccaccttcaatgtctctgatttatctctttttgatgcagatggagaattcgatttgaggacaaatccttctcaagagggagagaatgatgaggacatgaccaagagcaagggcaaggatccacttgaaggacttggagggcctaagacaagggcttgagcaaggaaagccaatgaagc

SEQ ID NO: 7240 - DNA, 541 bp, Glycine max
gggaatttttttatatggtatctttataatttcctctattcatgaaacattgtcatgtgtgtgtagggcacatactgaatccagcaagacatttgaggtcttgaaatctcggtatatcacttttgtttcagcactgtgaagaaatgcaagccctttggcagcgcctagagcaactttcaaacgtagaccccaagaaagaggttgaaagtatgaccctcctgttacagcaattaatcatgtaaatgttatgcacacacttctcaagttcaacaatgtgaaaagatgggagatgaaaaactcactcatgaacaagtgattctccaagctaccacgaggcataaattcatagaccagaagtcggtctttatcttcaaagcaatacccaattaatttcactagatgaggatgagaaagctggcctaaatagttcacttcagcctaaaatagaaaagaaattaaaacaatgtaaggcaaacccatataatggtagcacttaaactcttctctgtttccaaatattcataacattattaattatgaa

SEQ ID NO: 7241 - DNA, 385 bp, Glycine max
ttttttactctctcgagctctaactctgagtggaacgcgcactgtggaggttccctatccctcgaacctaggttcaccatcactgagtttcccttttcagcttgtctacgatcccactctaatgcagccttctgcttggacctaagcaaacagaaattttgcaacttttctggcattgatcatgcaccttccaccatcttgcgtgagccacattacttgcaaactcctgcagatgtcacgttccagttgcagtcgtagtctcggagcaaagccatggcttattacccagtaatggatgacataaggattggggatcactcaaagaacgagttttattgctttctctcttctcatcacttcccaaaggcttaagaaaacatgtgtt

SEQ ID NO: 7242 - DNA, 497 bp, Glycine max
agcttgccttgccctttgataatatttgatgtgattcatggccactatgaatgacaaattccttgggataaaggtagtgctgccatgttttcaaagcccgtactgagacatacaactccttatcataagttgaatagttaagggtaggaccacttaaattttcactaaaataagcaattggatgaccttcttgcaacaacacagccccaatcccaacatttgaagcatcacactcaatttcaaaagatttttgaaagtttggcaatgcaagtatgggggcattagttagcttttgcttaagaacattgaaatcttcttcttgtttctctccccatttgaaaccaacatttttcttgagcacttcattgagaggtgctgccaatgtgctaaaatccttcacaaatcgtctataaaaacttgtaagccatgaaaactcctcaccttagtcatagacttaggtgtaggccattcttgaatagccctaaccttttcctcat

SEQ ID NO: 7243 - DNA, 489 bp, Glycine max
tacggaccttaatctaactgtgaacaaagccgcttggttttaaggtggattttgaaaaggcctatgactcaatcttatgggcatttttggattatatgctgcaaagaatgggtttttgtcccaaatggagacactggatttctgcctgtcttaattcagcaagcatttcaattcttgtgaatggcagtcctacaaaggaatttactcctactagaggcttgaggcaaggggaccctttagctcccttactctttaatatagttggagaaggcatcacaggattgatgagggaagcagttcataagaacttatatagaagctatatggctggaaagaaaaaggaacccattaatattttgcagtatgcagatgacacagtatttgtgggagaggctgcttgggagaatgttgttgttttgaatgctatgctcacgggatctgaattggcctcaggtctgaagattaattatgcaaaaatccaatttggga

SEQ ID NO: 7244 - DNA, 358 bp, Glycine max
cattaaataacttggtattatatttatgaatatgtatggcaaaattcacataaataagatattcgctgatggattatttactaatagacattaacctatattttattatagatatatactaagatttaatcattttatttattagtacaatgcggcaactaattactaaaatgtttgtgtaaaaatattatatattaacacatgaatttaaattaaataaattttattatgtcgttttttttaaagatcggcgcgtattattattgttattaaaaaatattgggcaacaacaatacattaaattgttaaagtgacgagacgacctgattaggaactcctcaatccacactctcatgga

SEQ ID NO: 7245 - DNA, 599 bp, Glycine max
cgaaggcgaactggatgcattggttaacttggtaacccattatgcttttaatcaaaaatctgtacctgtcgcaagggtttgtggtttgtgctcctctgctgaccaccatacagacctttgccctttcatgcagccacctggagcaattgagcagcttgaagcttatgctgcaaatatttacaatagacctcctcaacctcagcagcaaaatcaaccacagcagagcaattatgacctttccaacaacagatacaaccctggatggaggaatcaccctaacctcagatggtgcagccctcagcaacaacaacagcagcctggtcctttcttccaaaatgctgctggcccaagcagaccatacatttctccaccaatccaacaacagcaacaaccccagaaacaaccaacagtttaggccccttcacaacctttcctctgagaacttgtgaggcaaatgactattcagaacatgcacgtttagcaagagaccagagccttcattcagagcttaaccaaattaatgggacaataggctacccaattgtatcaacaacagtcccagaattctgacaagctgccttcttaagctattccaaaat

SEQ ID NO: 7246 - DNA, 543 bp, Glycine max
agcttggtaaatttcggtttaccaattattctttatgaaaactcatttattgaccattataaatatagtacaaggttatctagcaataacttcaaaagctccatttaaacaattatatggacaacaaaacacaaaacgaacaagctgtaacacaatcataattgctatttgttaatcacacttaaacaaaagaatagctaggcaaactaaaatcaccaacaatcacggacaactaacacctaccatttggtaaacaataaataatcttgcatttttattcaataaataaacacttaaaattttttcctgaatttgaataaataaattcactaaggtaatgttgtcatatttatatcgggcatcgactcgattaagatactaagttactaaatcatgcatcaacccaatgaatcactaattgactcccatgattcaacctatattaaaaaattctaaataatttcataacctgcaaacatgtatacttaaagtttatcaaaattcatgacaagttttgaattgtttaaaattttgacaacatat

SEQ ID NO: 7247 - DNA, 432 bp, Glycine max
tgcatgttagctcttttttatttatttgcatgtagcttttcttatcctccctccgatattatttagaagacccaaatttgaaatgatatttttttttttataagaatcaatttataatatttcttatattaattatttttagactagaaatgtctctaattaaaattgaaagaatgtattgacaaacaattaaaagtgaaaagagtattaatgacaagaatagttttggaaaaattataaatttaagataaatttattgttatgaactaaaataatcatttttcttaattgtgataaattaggtacttgggtcttatatataagatcagatggattatttgaaaaatattgttgattctctcatgatatcaaaggtaaggtgggatttttatcattttgttacccatctcttctgaataactagcataatgg

SEQ ID NO: 7248 - DNA, 474 bp, Glycine max
  unsure at all n locations
tgctacgaccctaaatgggccttcctagttgggtccaagctttcccttagggatcttttctggcttcacctcagactcgcgacactaggttgccagattgaaaggctccaagttgaacctttgtattgtatctccttgatgctcggagcttggtttcctcttctttgattttggaaatctcttggacgtcatccttggtctctagttccaccctcatgttctctttgttgtgttgttcttggaacaacaacctccttgtcgacagttccccaactttgatggggattatggcatctctgttgtatgtgagtcaaaaagtagtttcgttggttgttgtctggggtgaacagtgataggccaagagtatactatggagtccctccttccatagacccttggactttgtgagtcttntgcgcacggcgttaatgataaccctattatctgccttcgcctgaccaataattttggggg

SEQ ID NO: 7249 - DNA, 521 bp, Glycine max
  unsure at all n locations
aagataatcctcaggcttggccaatgcagactgtttattggaaacggattggactctatcatttattatcagagcctgtgacatggataacaaaggagagaaatttttcacaatctatagattcctcagaccaaaataaaaaatacaattatgacgttgagtactcagtttaagaggatatatctttcagagaggaagggagggaaagagaaatacagggccaagtttcatttttgaaacaatagttgttgtcatgtaatataatcactttattagaagtgcataacacagcatactcacatggcccttgtatttgtgagctcggaggaaatcaagcaagggctgcaaggaatctttgttgcgaaacattattgatgaaaggtggcgattaagaaattggacaccattgccaatggatgctgagcgggttgggcgaggaaacgtggcattaaatggctcaaaatcaagctccaatacaaaattctcattaattcttaagcacaatacanaacagaaacaga

SEQ ID NO: 7250 - DNA, 525 bp, Glycine max
gctttgagaaaacttccttgagaagctagagcttatcttctctcacccctctcataactaggctcacctccttgagaagcttccttaggaagattcctaaagaaggttgagcttagctacagatacatctctaatagctaagctcacctccttgagatgagaagctagagcttagctacacaccccctataatagctaagctcacccccatgacaaaaaacatgaaaatacaaaaaaaattccttactacaaagactactcaaaataccccgaaatacaaggctaaaaccctatactactagaatggccaaaatacaaggcccagacgaaggaaatacctattataatatttacaaagataagcgggctcatacttagcccatgggctcgaaatctaccctaaggctcatgagaaccctagggccttcccttggatctctagcccaatctacttggagtcttctacccaatgcccttgcggggtaggattgcatcaagtgccttcttggatttcaagatttgaat

SEQ ID NO: 7251 - DNA, 499 bp, Glycine max
  unsure at all n locations
agcttgtggtgcaaaagattacatctattcttaagaatttttgatggggcagcctccaagactccattaagattccttgggtgaggtgggacatagtctgcctacctaaaagtaaaggtgggttatggatcaaagatttgattaaattcaacgaggctttgcttgctaaatgggggtgggagttggcaaataatcagaatcagttgtgggccacaattctattgtgtagatatggtggttggagggatttgatttctcataggaactgcagtttagactctccttggtggaaagacctcaagggtatcttcaagcagcagcaaaagcaacacaatttgtaaaaatagctttatttatgccataggtaaggacggtccatggaatacanaccaagtacttattggttgaccacaaacaaaacactcattggaatatatatgtttaacaattaacataaactcgctgacaggaatggagaaatatacatattaaatttttc

SEQ ID NO: 7252 - DNA, 400 bp, Glycine max
agcttataatattgcagcaatattatattccatcagcccgagaactatcacgcttagttggagtctgcaaagccccaatcattcaacactttgctgaaacaatttctggtacttcaactattagaagctttgatcagcagtcaagatttcaggaaacaaatatgaaactgactgatggatattctcggccaaagatcaatattgctggtgccatggaatggttgtgtttccgcttggatatgttgtcttctatcacatttgccttttccttaatattcttaatatctattccacagggattcatagatccacgtgagttattcctatctgttacaaatcaaaatttaatctgctattctaatatggaattgaacataattgtttctcttttataactttt

SEQ ID NO: 7253 - DNA, 595 bp, Glycine max
  unsure at all n locations
ntaatgtgttctcccttatagaactactaactgtagtaacatttgcagcccagctatccggtagtgatgacaatagaatcaatgccttcacctcatcctcaaatttaatctgcactgactccaattgggcaagaatagtattaaattcattaatatgattagttacagagataccttctcccatcttgaggttgaacaatcgacacatcaagtataccatgttggctgcagacgacttctcgtacatagctgataatgccttcattaagtctgcagtagtcttctcatttaccgtattgaatgtgatattcttggctaatgtcaatctgatcacgccaagagcctgtcaatctagcaagttccatttttattgccttatgttgtctggcttatcccctgacgagagagaataatgagaagagaaaggaataatgagaagagagagaagacacaaagtttttacatggttcaacacacaatgtatgacctacgtccatggctaccttagaaaaatttcttgttgttgcacattttaaagcttacaagtgttctattattatacactaatgagacacaagtttacaaaccaagcgat

SEQ ID NO: 7254 - DNA, 460 bp, Glycine max
ttagataccctgagactaggctcaggccctttgatttactctatattacaggtgagcgagcctattagcagtgacccctttgttctaataattattatttgtgttgttgctcatgaagcactatctagtatgaattttaattggttgcaataggatttcaatgtaaaggtgaattttttggagaataattttcctttgatcttacttcgtctgctgaattcctaaggataattgttggtctgggtttctatataagcctaaggaatcaatcctgggaaaccctatgatccggattcccatcggatctagggtgaaccaatttggcgttcctgctttgcacatgataaagaatgttggcttgatagttacgttcatggttgagataatggatcacaacacaaattgcatttctcatagaatacatgcatacagtttttgttacatgttcaaatattatttg

SEQ ID NO: 7255 - DNA, 463 bp, Glycine max
tggaactaagcttattttctctaccacttgtcattcttttactgatgggcaaacaaaggtagtgaataggtctttatctacgtttttaagggctcttctgaagggcagccataagtcttgggatgagtatcttcctcatgtagaattagcctacaacaggggggttcatagaaccgccaagcaatccccttctgaagttgtctatgggttcaatcccctaacacccttagacctcattcccctcccacttgacacttcttttatacataaagaaggggaatataggtcagagtttgtaaagaagttgtttgagagggtttagcgcctaatagagaaccaaacaaaggtgtattaaactaaacgcaattaaggaagaaatgagctatttcttaatgaacgggactgggtttggctcatcttacagaggatagattccatactaaaaggaaatccaagctaaccc

SEQ ID NO: 7256 - DNA, 401 bp, Glycine max
cagctttggagtttccaagtgcccattctttttcttctttagaccaatcttcttctggcttcaattcatcagagggctttccttctgtgtccagcatcttgggatgttcccaacctttgaagacagctttccaggttctgctatccagtgatttgaggaaagccaccatccttgctttccagtattcatagttggttccatctaagattgggggtctggtcactggtcctccttctttctccatgttcataagaatttatctccctagatctcactcagtgatttcgagtgcccgctctgataccaattgaaattctgatactggggacagatgtcgcacaagattgtacgacatcacgctgcagattgtgtttgactgtgtgaacacattaaaccagctc

SEQ ID NO: 7257 - DNA, 508 bp, Glycine max
agcttctctagaagcacttttacgaaatgtatttgtgaagaaaaaataaaataaatttttttataagttgaaattaattctccattaattaatttgtagaaattttcacataatttctttgaaagatgaaaggatatttgtaaattagttaatggtgagctaattttatcttatgaagaaatacatttcatttttatttatttatttctctcctaaaaatactttcttaagaaatttatccaaacaggtatttatcagattaaattttgaaagccctaaacctttttggtcttgaactcattattctagttcaaaggaggtcctttaaaatttccttaaatgtaatgagtcctatacaactatgacatggggccataaagtatctccccaaaatcttagttattaatagattcaagatcaattatgcgtgtacggtttttgccaaccaatttgatgtagtctatcacttggcaccgatgttttattttttaattttgttttcagtggc

SEQ ID NO: 7258 - DNA, 393 bp, Glycine max
gcctttactctgatttgctctgacaggatttttcttcttaaaaaaaaagggaagagattaaagtctgcattttatattgtcttcgatcgattcccttttctcttttgatgaatattatttctcaaatcccaatggtgaagtagtgtgaaattaaatttctaaccaaggggctaaatttcatgatgatccaacggttattaagtccgagatcatagctttataggacaggttttgaatctctatgggaaaagaaaaagttacaatgcgaaagttttttatctctaacattgtttcacaatttacaacagcgagaatgctaaaaatgcgtctcaaacctagtgttaaaatatcacgatgatcaaaccgttaacaagtctgagattggtcgtttac

SEQ ID NO: 7259 - DNA, 538 bp, Glycine max
ttagtttcaacacaagcaggttgcccaagtatacaaatttttatgtatggctctctttattttaataaaatctttgtagttttcttaattttaataacaaatttttcaaaagctcccatcaggaactgtccctccaagaagttgacgcactattgatgatgaatgtttactataggcagattagaaattcaaatattcaaattcaacttttaaacaatgtgtatgaacaccaaaagcagtaaaagggttaaacacatacagaattttttagctgtgcaccagacccaaagcttaaatctcctgctggaattggcaaaaccttcgaattcacaatagggtctgatatatgatcagtccggatctcaagggccgactcccgaagaagagcattgaacatggcaacatctagtctagctatgcattgttccatgacctggtaaaggaatttaatctactttaatctgaccaaaagaaagggaagttatttacacttgcagaatggaacgatatcattaataataaaaaaggcccccatttt

SEQ ID NO: 7260 - DNA, 468 bp, Glycine max
tctggtaggacatcttgacttgctttccaatctgacatttaccacagattctgccttcttctattttcagattgggaatgcctctaacagcacctttgtcaatgattttcttcatgcctcttaagtgcagatgtccaaatctttgatgccatattttgacttcatcttctttggaggatagacatgtggaggagtaactggtttcttgaggtgtccataggtaacagttgtcctttgatctgctgcccttcattagaacttcactcttctcatttgtcaccaagcattctgactttgtgaagtttacattgaatccttcatcacacaactgactgatgctgatcaagtttgcagtcagtccctttcccagcagtactttgttcagactatgaagtccatcatggactagcttttccattccagtgatcatttctttagagccatctccaaatgtcacatacctagtgg

SEQ ID NO: 7261 - DNA, 575 bp, Glycine max
tcaagctgctcaattgctccaggttgctgcatggaagggcatatgtctgtatggtggtcagcagaggagcacaaaccacaaacccttgcgacaggtacaaatttctgattcaaggctaactgggttaccaagttgaccaacgcatccagtttgccttcaagcttcttagtttcagatgatgcagatgggtttgtagctacctcatgcactcctctaatgactatggcatcatttcaggcgctaaactgctgggagttggaggccatcttctcaattaaatttctggcttcagcaggagtcatgtctccaagggctccaccactggcagcatctatcatacttctctccatattactgagtccttcataaaaatattggagaagaagctgttctgaaatctgatggtgggggcaactggcacatagtttcttaaatctctcctagtactcatacaggctctctccactgagttgtctaatacctgagatatccttcctgatggctgtggtccttgaaagccaggaaatttttttctaagaatactctcttaaagtcatcccacctcgtgatggacc

SEQ ID NO: 7262 - DNA, 473 bp, Glycine max
ttgcttctcaagactcttgcacaggagtagatttctatattatggcaagctgagttactaggttgaccaaggcatcaagttttccctcaagctttttattttcagcagatgaagatgaatccgtggccacctcatggactcctctaaggactgttgcatcaagtggcctcagaataattaagaagggggggttgaattaatcattcctaaacctttactaattaaaaaattactcttctaaggcttttactatgttgttaagtaaataaagagtagaaaagaaacttaaccaaaactaaaagcaggaattaaaatgcacagcgaaaattaaaagtgtagggaagaaggagacaaacacacaagagtttttgtactggctcgacaacaacccatccctacatccagtcctcaagcgacctatggtccttgagatttcttttccaaccttgtaaaaatccttttacaaacaaaag

SEQ ID NO: 7263 - DNA, 343 bp, Glycine max
aaaataacgcgattccccttttgtaaacacaaaaaggccatagtctagaattaacaaagaaacagaaaaattcacaaatgatattcaaaatcaaaacatgcggtactgttttagcaatccaatgtggtagtgaaaagacagataaagcataaaagaagtaaatcgaacaagacagtaaataccaccacagtgaagctgctttgagttaatgaagtctaggcacttcgtaatcttgctagtttcgaacttcacaaaatgaagccttccaccaagaataggatagcttctcctgttaccatggggcggaaatcccagtcgattattcacatttatcatcctttta

SEQ ID NO: 7264 - DNA, 420 bp, Glycine max
agcttaacacattgtttgcttctgtctattattgatggtagccctaggtacttgcgtcttcccaattgattagtgacccccaaagatgagatgttttgcttgagagcttgagaggtgttggtgctatagaatatttttgatatacaaaggttaatcgtttgccctaatgctttctcataagtgttaaaaatatctctcaaataatcatcaacaaataaaaggtgtgagaggcttggaatccctctatacaccttgacaccatgaatctatccctcactttttgctctccttaagcgtgtggaaagcctctctttacaaataatgaacaaatatagtgatacttggtgaccttatctaagacctctcccatgaaaaatatttctcataggattcccatttattatgatagaatagtgaact

SEQ ID NO: 7265 - DNA, 502 bp, Glycine max
tgccttgaattatattaatagttgaattacttagaaattttctttgctttattataattttagtatttttttaatttattggtctaatagttttaaagtaattacttagaaattattatttattatttatcatcttttcattttcataaaatattgaaactttttctatacctatgtaaatataatttaattatatattgatatctatatgtaaatttaccagtataaaaattatgtataaataaaactcaagagataaacatctttttatgaaatcaaatcagattttttttatccgtaatcaaataggaaaatttaactttaacttaagagaatgaatattttctacaaaatttttatatttaaacttatttgtcaattatattaatgaaaataaattcttatatataataattaattatactacccgtgcattgacaatttgttgctcatataattgaaagttatttgcatagaaaatgctaattcttatagttaatat

SEQ ID NO: 7266 - DNA, 594 bp, Glycine max
agcttctcatcaagtaacattcctgagatcctctccccaggccttcttgacttcccttcccttgctcttagccctgtcacacaatttaatgatgacccatttgacaagtcctctccttcattggggaactcatcagaggaggataaacccatagctgaaagggcttctacttgcatccctctcccatctttaatccaagagactcagaaccatagctcttgcctcttttcccagttactcacctagagtctcatcggaatcaccttcttgaggacattggagaatagattgtgttcctgagttatggatgatttaaatagagagagaatggttggtggttaattacatcatgggtatcttttttatttgaatggttcatggtttcctccatcaacaagaactattgtagtggtactactggtggtgacagtggaacaagaagcagtagtggggaattaaggctttgtgaaagacaggtagcctttcattttctttattatggatttttgtttgggagagtaaagtgcataaccttcttttggtacttgatttgaagaataattgatactgtctaatactaaagaacacattttc

SEQ ID NO: 7267 - DNA, 134 bp, Glycine max
ctgtgcagcaacttttacgatggaccttctctagctcagcagcagtatcacctcgggctaaagattgtgacctcttcagctacagatacaaccctggatggaggaataaccctatccttatatggttcaaacct

SEQ ID NO: 7268 - DNA, 385 bp, Glycine max
tgccacttcgtcctctttggtatatcaccctacttgagggttccattcatcactggactttccttgtgtgtccatcctcttgggatgttcccaacctttgatgaacaggacctcagggtctgctatccagcgattcgacgaaggccaccattcttgcttctcagatttcatagccgcttccatcaaaaagaggtggtctgttcactggaccttcttcattctccatgctcatcacaatttatctccccagatctcactctgcgatttcgagtgttggctctgataccaattgaaattctgagtccggggacagatgtctgacacgatgtcacgacatgacgcttcataacatgcacatagtgtgtggccgtatgaacatattaaa

SEQ ID NO: 7269 - DNA, 616 bp, Glycine max
tgtaactagatgctattgtcctacaacagatgttgcgtcttagggcattgaaagccggactgcagcaatcccaaataaagatttttggtctacctgtccgaccttcctttgttaagcctgtccggccaaaggtatgcaatattcttatagccatgaattattcgcaaatttatttacaattcttggaatacaacatgctgtgctatatatattattcccaaataaatgtaagtggattgtttgaaatggtgtaataggataataggaatgatccagcctcaattaggagaagtaatttattttacgtttctcaagttatttttagagaaattatagccacttgcatgttccatgccaatagtgctcacttgagctaatagtaatgggtgcctgtaaacaattatttcttcccttgtcagcatatgaataagtgaatgatggcgtttaagccataatcaaatacgaaatagcaaataagttaatgctaaaattaatagctttggtgttgttccgtgttccgattctatgactgcaagctgtagtgcaggattggaaccttttggtcgcgtatgtcattacagttcctcaaagctttaaactacctgatgcatattca

SEQ ID NO: 7270 - DNA, 613 bp, Glycine max
agcttaaacaaacacgctaagatctcttttaatattttatatatatatgtaactaaacaaatgatcaatcttaatcaacacattttttttggaaactcttactcaacatatttaaagaatttaacttcaaatttatcatttaaggatgtatacttaattagcacgttcaagagttgaagatttagataaatttgcctcaaatattaatttaacttaaaaatgacaaaaggaaggtcaaatgtcttgcttaggttaagtttctttgaaaagttctaccattagagaaaatagtattttctagtgtagtgtctctctagtgtagtgttttactttctactatttaatgttataatttattatattatcaagtatgtgaattaattggtgtgaaattattttaatttaattagaagtctcagatttgagtgattgcttttggtggagaatatctatggtttaagccaaaaaaataatattatattttattatactaaatactactaataagaatgatgtagtggcataggaaaaaaagaatgagagagaatgtgggttcaaaattctccactaacaaaaattaataatactaattattaatatttatcgataaaaa

SEQ ID NO: 7271 - DNA, 482 bp, Glycine max
  unsure at all n locations
atccaacgctcatgttggtggtgaagcaacttcatccatggctgattccctagtgcatggtgctgcctcttacgcatggtcgattgtctgccactgcatctccatagtggataatgacgattactggaccgcattgactctcacctatacggccttcatacactctccactgacaatcatacatcaggcgatgcgtcggatctctggcccaatgtacttaggagtctaaaagcaaactgctagattggcctaagcgtttcaacattatctgcggaattgctcgaggtcttctttatcttcatcaagattctagattgaggataattcatagagacctcaaagcaagtaatgttttgctcgatgaccagatgatccctaaaatatcaaagttttgcattgctagattatttggaggagagccgacagaaggaaatacaaatcgagttgttggaacttantaagtattatcttaatatcaatct

SEQ ID NO: 7272 - DNA, 593 bp, Glycine max
agcttaaacaaacacgctgagaacgcttttttatatttatatataaaggcaactaaacaaatgatcaatcttaatcaacacattttttttggaaactcttactcaacatatttaaagaatttaacttccaatttatcatttaaggatgtatacttaattagcacgttcaagagttgaaaatttagataaatctgcctcaaatattaatttaacttaaaaatgacaaaaggaaggtcaaatgtcttgcttaagctaagtttctttgacaacttctacccttaaagaagataataatttctattgtaatgtctatccattggacagcttactttctactcattaatgctataattaattatattatcaagaatgtgaatttattggtgtgaaattatttttattttaattacaagtctcatacttgagtgattgctttttgtggagaatatctatggttcaagccaaaaaattaaatttataattcattatcctacatactactaatacaattgatgcattgctctatgaaaaataaaatgataaaaatgtgggtttcaattcttcccctaacaaaaataatcatacttaactat

SEQ ID NO: 7273 - DNA, 408 bp, Glycine max
ttatgaacatatcagcaggattgtgtagagtgctaatcttatgaactttgattcttctttctaaccgaatgaagtgatatctaacatctatatgcttggttctatcatgatgaacttgatccttggccaagcatatagcactaaagctgtcacagtagatgttagcatattcttgattaattccgagatcatttatcagacctctaagccaaattccttcctttgcagctttagtaagagccatatatttagcctcagtagttgagagagcaaccgaaggttgaagtgttaccttacaactcaccaagccgccaccaaaggtgtaagcataccctgttatgaccttctcttgaccagatcagcagcgaaatctgcatcagaatagccagtgaggcagcaatctgggtg

SEQ ID NO: 7274 - DNA, 352 bp, Glycine max
cagaacttgcttaggaacttagcatctttatctagaccactggtcctaagcaaaccatggagtcacacagcttccctccaataaagatttgagatatgggaaacgtcctccaccttgtggcatggcctaaagtgtgccatcttgctaaacctatccaccactacaaagatagagactacacctctatgggttctagggagcccaatgacaaagtccatactgatgtctacccaaagtgcaaatggaatgggtcaagagtgtgatagcccatgaggcatcaccctaaactcaggctgttaactagccacacacctactgccatgcttatagacatttttcttcatatgggggc

SEQ ID NO: 7275 - DNA, 418 bp, Glycine max
agctctgatcgagtgctataaagcaaaatttgtgaaccattggtgcttcatcccaaataattagacttggctgatttaacaattctgctaatagactcccttgatgtatgttgcatgttgagttttcaaaacttggtacaggaatcttaaatttggaatgtgcagtcctacctcttggcaacaatagagaagctatgccgctagaagcaaccacagtaacaatttgattctttgctctcaatgaactcgtcaatgttctccatatgaatgtttttcctgttccttcaaatccatataggaaaaacatgccgccctcgatgttgttgacagcttgcataattcgggtgtgaattgatctttgtccatctacaattatggatcagttaacgttatatacaaatgaacaataattaatttt

SEQ ID NO: 7276 - DNA, 538 bp, Glycine max
atgagtggagggaaaaaatgactggagggagaaggagcccaaaagaggtctgaactttgaagtgtaattctcaaatgatcaaagttagaaaaatgcccacacatggtctctatttatagcctaagtgccacacaaaaattggaggaaaatttgaatttctattcaaatttcacttgaatttgaaattgaatttgtggagccaaattttggaaccaaaatttcactaattatgattagtgaattttagctatggttcaaccccctaatccaagatcaaaccccaaattctccactaagtgtgcttacgtgtcatgagacattgtaagcatgaaagacattcccaaagtgttactatatgatgtgaccattggggtgtagcatgcaaatgctcacctccccctctataattcaattggattggacttctcccaattcaatttaatttatttcccaccacccacattcaatattcacttaacgcctaatgaaatttaagcctacccataatacaaaaactagtcttagggccctaaaatac

SEQ ID NO: 7277 - DNA, 629 bp, Glycine max
agcttgtaattgattaaaccgatacgagacacttttttgcaagattaaaccaacttgtgtaatcaattaatgtaagggtgtgatcgattaaaatagaaagttttaccttctaaagaaaattttgtaactttagaaattttctacttactcctacatgatgatgcatgatgcatatatgaaatgatagagactaagatgcaacacacaatacaacaatcaataaaaatgccactaaagagtgttgggatgtgaaagaaaaaacttcttcaagctcttctttaagcttcaaggttaagtcttcatgttgctcccctatctctaacacaaataacaaccatcatattaagattaaaaataatagatgattgagattcacatatttaaatttcaaattaaaattgaatatatcatcaaatctttgaaagattaaccagaaaacaaaccaatctattaagatcttagttatcacattctaagatatctgaattaaccatcaccctgattataacaccctgagatattataagttataaatcgacatttaattttatttattgtgtggttgactatatgatagacttgaatgagtcgaattatgtggagtcttttttagctaagttgaaattatg

SEQ ID NO: 7278 - DNA, 428 bp, Glycine max
ttggcttgcaagctggttgctttggatgcaaatcctatgcaaacacaccctaaattgagtaagtgctttaattagcattgagtctctggtaagggtcaaagggtaagattggagctttgtcctcattccagacctcatcaatgtattgcactataattgcagattcacaaatgggcttgccattatggatcagaactggaattttcttgagaattgagttcatttgcgaagcacaggactcttgttcctaagaatctcttccttgacaccctgttcagctaatgcaatcctaaccctcattccaaacatgctagcccatgtatcctacagaacaacctcgtctgccatcgttgcaaaggatcaccaaaacaccaactcatgttatgaacttgccaaacagtgtagatatgttgtggactaacacgaca

SEQ ID NO: 7279 - DNA, 588 bp, Glycine max
  unsure at all n locations
agcttttagactcaggcgtgaaccctacctcaccaatattgagagacaatttttacaattaaattaagaagtaccattcatataatatctcacattaagtacaataatgcaaaaagaagaaattgaaaatgggaacaaagccaagatgaacctgtatcgaaaagagcaacaattatgtcactatttgatttcaatcttctcttagcaattgtaggtaacccaatgaagttccatgatcttgttgtgtgcagctggcagtactggttttgaaacaccaagagcacttcatccatggatacacatgcaaaaagggttaataacataatatatagtatttcaaagaaagatgaaagagctagagaaaattgaaaactatctataccagataactnttttgcttcatcctctaacagttttgcagcaaatgcatttaaggtatttgtgtaactatataccatgaattcttttgcttcaaggaagctaagtaagcacaaaccanaatccaaatgatttaagccaaaaggataaaaatagagaattcaaaaaaatgcttctcacatggtttaagagggtggttttactttttta

SEQ ID NO: 7280 - DNA, 548 bp, Glycine max
agcttttagactcaggcgtgaaccctactttaccaatattgagagacaatctttacaattaaattaagaagtaccattcatataatatctcacattaagtacaataatgcaaaaagaagaaattgaaaatgggaacaaagccaagatgaacctgtatcgaaaagaacaacaattatgtcactatttgatttcaatcttctcttaacaattgtaggtaacccaatgaagttccatgatcttgttgtgtgcagctggcagtactggttttgaaacaccaagagcacttcatccatggatacacatgcaaaaaggggtaataacataatatatagtatttcaaagaaagatgaaagagctagagaaaattgaaaactatctataccagataaactttttggcttaatctctaacagttttgcagcaaatgcatttaaagtatttgtgtaactatataccatggaatctttttgcttcaggaagctaagtaagcacaaaccaaaatccaatgatttagcccaagggataaaatggagaattcaaaaaatgct

SEQ ID NO: 7281 - DNA, 527 bp, Glycine max
tggcgataaactttgttgtgagagctaaaagtaacagtgacaaatacttgtaacttttgtgaaattagtgaaacttgattgctaaccaaaaactgaacttagtctgaatggtagagacaaaccaatataaatatgggtcttactttctttttagttatcttttgtcttaaactgacatagtatttgaatttgatcttgtttgaaaaacatattctattttttaaaatatgtttccatcgtctaaacttgtttttgcgcaaatttgttatctcgttttattaagttatacttcaaatgataactttaattttcacgaaaaaagacttaagaaaattctaaaattacaatttaaccccttatgatatttctaattgtagttactttttttaagactttacttttgatcacttaataacattgaaattcatagtctattaaatttattattaaataacctaattattgcacagagtttttgtggagacgactctatttatcgctattgctacctgaaggatttaatactc

SEQ ID NO: 7282 - DNA, 490 bp, Glycine max
agcttcttagtttcagatgatgcagatgggtttgtagctacctcatgcactcctctaatgactatggcatcatttctagcactaaactgctgggagttggaggccatcttctcaattaaatttctggcttcagcaggagtcatgtctccaagggctccaccactggcagcatctatcatacttctctccatattactgagtccttcataaaagtattggagaagaagctgttctgaaatctgatggtgggggcaactggcacatagtttcttaaatctctcccagtactcatacaggctctctccactgagttgtctaatacctgagatatccttccttatggctgtggtcctggaagcagggaaatttttttctaagaatactctcttaaggtcatcccagctcgtgatggaccctggagcaaggtaatacagccagtcctttgccactccctctaatgagtgaggaaaagccttcagaaatatgtgat

SEQ ID NO: 7283 - DNA, 502 bp, Glycine max
agcttcacgagttgtcttctccagataatctctagcaatgtgcattttctcatcagtaatatacctagcaatagcaacatcctccattctatccaacaggggattaggtatcatttccacaaaatttgtagtgcaaacaaaaagaacctgcaccgagaaaaacaatacgttcaagaattacttgaccatcctaagaactacctatcaacaatgaacacaactaataaccaaacaaaaatgttgactatatcacaacctcactattaaggctccaaattatcaaataaatacctttgatagatcaatggtgacatcaagatagtggtccagaaaaatagcattctaatctggatccagaagctctaacaaagcacttgctggatcactaacatgtgctctgcccaactacaattgaataaaaagataatagcgctaaaatcataattttttccttgatatttacaagattataacccatgggtaaattaatgaaactgaaatg

SEQ ID NO: 7284 - DNA, 486 bp, Glycine max
agcaggcatccatgtcgctgcgttgatgagcgagtgttttctaacttgaattcaatgaaacaaaatcctgatagctgccgatgaatactctgcatagctgatattaaaccttgtgggacacttgtatttccctttacaccagagaattttcctattgactgctatatgatacctatagaactaacacttgttgtcatttaaatgacagattacccggtcattacaaatatgtcgactgtcaatgatcaatatctaacagtaatgagaattcaatttctgcagaggaagaggataacatcatagtttcagcccatgcaatccatggaaacaaatgggcaataattgctaagcttcttccaggtagaacacactatgcaatcaagaatcactggaattctacactgacgcgcaagcgtatggaaaagggaaaatatgtcccagcacatgctgatgtgatcgaaaaaggtactggtaacttttaaaaaa

SEQ ID NO: 7285 - DNA, 385 bp, Glycine max
agcttggcaaactattgttgacacagaagggatatcttctctagatagaagcataatatcatctgcaaaagccaaatgagatagctgaatacctgcacagttgggatgaaatttaaaattggcatcatccttgaggctgctcatatctctggaaaagtactccaaacagagcataaacagataaggggagagaggatccccttgtctaagaccccgctaccctttgaagtgaccataaatggatctattgactgccacactaaaagaagtggaagaaacacattccatgatccaagttcagaactgggttaggaaagccatggacttaagcattcaatccaagaattcccggaaatggaatcattagctttatgcaagtcaattt

SEQ ID NO: 7286 - DNA, 480 bp, Glycine max
agcttctgagttaaaagttattgcagtttttatttgctacaagcttccgctttcaactacgagcgtctcgatatattactggactcaatcgatcatcagagcaaaaagttattgtcgttagaatttgttcagtgcttccgttttcaatttggagcgtctcgatatattacgggactcaatcggacatccgagtaaaaagttattggtgttagattttgctcatagcttctatttgaatttgctacgagcttgcgttttcaatttggagcgtctcaatatattacgggactcaatcggacatccgagtaaaaagttattgtcggttgaattcgctcagagcttctattctcaattttgagtgtctcgatatattacaggactcaatcggacatcggagtaaaaagttattgtcgttagattttttcagagctcccgtttcaatttggatcgattcgatatattacgggactcaatctgaca

SEQ ID NO: 7287 - DNA, 501 bp, Glycine max
agctttgatgcaacatttggagaggttaatgaaacaactagatgatgcgctccatgagaggttggatcaaatggtgaatagagatcataatgaataagaaaggacgagaaaagggaatgatggtgttcctatacaaaaccgaattgatggtattaaactcaacattcctccatttaaaggaaagaatgatccggaggcctacttggagtgggagatgaaaatagagcatgttttctcatgctacaactatgaggaggaccagaaggtgaagcttgccgccacggagttttccgactatgctcttgtgtggtggaacaagctacataaggagagagcaagaaatgaatagccaatggttgatacatggacagagatgaagaagatcatgacgaatcggtatgtgccggctagttactcaaaggacttgaaattcaagctccaaaaactaacccacagcaacaatggggttgaggagtatttcaaggaaatgattgtctcatg

SEQ ID NO: 7288 - DNA, 519 bp, Glycine max
  unsure at all n locations
tgtaatagaagaaggaagtccctggaaaattcacatggtcataattttttgctcggatgtccaattgaggcccataatatatcgagatgcaggaaattaagaattgcagccccaagaatttagacggccataacttttgactcagatgtccaattgaagcacataatatatcgagacactcgaaagtcaacaagaaagccccgggcaattccaaacaaccacaacattttatttagaagtccgattggacccataatatatcaagacactaagaaatgaacaaaagcctcctggaaaattcaaacgggcataacttttaactcaaatttccgattgaggcccataatatattgagacactcaaaatttaacaaggaagcatttggaaaattcaaaacggccataaatttttactcagatgtccgattgaagcccataatatatcgagatgctcaaatttgaaaatgaaagtgatgcaatcctacctccntagggcattggatacaagactctatgaaga

SEQ ID NO: 7289 - DNA, 525 bp, Glycine max
tcaagaatcaagatcaagattcaagactcaagattcaataatcaagataagtatgaaaaggttttttcaaaaactgagtagcacatggatttttctcaaaacatgtttaccaaagagtttttactctttggtaatcgattaccagatggttgtaatcgattaccaatagcaaaatggatttgaaaaagttttcaaatgaatttacaacgttccaattgatttcaaaaagctgtaatcgattacaatattttggtgatcgattaccagtgcctttgaacgttgaaattcaaattcaaaagtgaagagtcacatcctttcacataaaagctttgtgtaatcgattacactgatttggcaatcgattaccagtgattgtttctgaataaatcaaacgatgtaacttttcaaatggtttttgactttttcgaataggatctaagttttataaaagttataactcttctacatggtgctcttgaccagacatgaagagtctatacaagcaacgctttgtttgcatttcta

SEQ ID NO: 7290 - DNA, 525 bp, Glycine max
agcttctaaactttgtacaagaatgaagctctgataccacttgttagacaagtggcctcagatatcttaagaaggggggggttgaattaacatattcgaaactttttcccctaattaaaaatctatcttactttttacttaaattatgaattcccttaatgacaatcttcttaaatattaattcaaatgaagcaacttgaatatgaatataaagcaataataaataaaggagattaagggaagagaaaatgcaaactcagttttatactggttcggccacacccttgtgcctacgtccagtccccaagcaacccgcttgagagttccactaacttgtaaattccttttacaagttctaaacacacaaggacaaccctttctttgtgtttagagattctttacaacaagagactcacagtctcttaatcccttagagaatgagatgaagaagaggaacacatctctcttgagagagatggatgttacagattgagcactcaattaattccttaatgaattgcaatt

SEQ ID NO: 7291 - DNA, 438 bp, Glycine max
  unsure at all n locations
agctntattggtacaatttctttaaatctggtattataaacaatttttataattgggtgaaatctttttccgtcaacgaatttaggagtaaccttggccacaagctttatttgtacaatttctttaaatcgtttttcataaacaatttttagaattgggtaaaatctttttttcaattccaaatatttgattttatactcttatttttattccatagctttattgtcactataattctgaaatatgttattttttatcattaaatatgttatattgaatctaattaagtgatctaactctggttttagtatttaaccagcaaaattgcatgttaatactataccgtaaatatgttagatcatctgacattcacatatcaatcaacatgatatctatgcaagtatgtaactggtcacacgtgacaagtgttgcatgcat

SEQ ID NO: 7292 - DNA, 352 bp, Glycine max
ccgaacaccttgtttttctcatgtgcacgcaaacccaatcttcgggttcgaagacaaccttctttctccctttgatggcctgtctagcatagctgttatttctcctcatcaaaagacttttgactctctcatgaagcgacttcacatagtccggcttggcattaccttctttgtgcttaaaaacagacacattatgcatatgcaaatgatcaagacgagttagtgggttaaaaccataaacaacttcaaaaggagaacaattagtggtgctatgagcaactctatcggtagcacactcaacatgggggaaacaagctttccatgtttttaagttctttctcaaaactgtcct

SEQ ID NO: 7293 - DNA, 422 bp, Glycine max
tccatcacttgataggttagatccttcatcttcttcgaatggacataggtatatcttggttgctgctgagtatttcaccaagtgggtggaagaaattcctttgaatgttgatcaaggggatataataaacttcatagaacaaaatattatttttcgatttagtatcccataaacacttataacaggtcaaggcaccatttttattgatcgaaaagtggttcaatatgtcaattctcaaaatattaagttagtaacttataccccttattatgctcaagcaaatggtcaagttgaagccataaacaagattttggtaaggttaattaagaaacatggccaaaaacctagaagttagcatgaaagtttagaccaaattctttaggcttatcaaaattcaccaaaagggggcccactattgtact

SEQ ID NO: 7294 - DNA, 380 bp, Glycine max
  unsure at all n locations
anggacctttatacatagaccctttcctcanatgatattgttttattatcatgtncaccgaccaattgacgctcacaaacgtgcacacttggcttatgtcatgggcaaagaacccttgttattttattattacacaaaaactactgaaatacctcctggcccatgcagctgttaagtgaacaatatacaaatatttatattatgataactcctaatatatttataatgagaaactattttaaacatatatttacatatatctcttgtgctcatatatgtgtgtatgtatggatatgcttgcaacgataacattaaaactaacaataaagtaaattaaaaacatacagatttataacatatttttatattaaaacacatac

SEQ ID NO: 7295 - DNA, 274 bp, Glycine max
gactgctctagcacagctcatgacatgaaatacagtcgcgtctgaccttccttatcgaggagcagaacggtggtattggctctctcccatatgagctcatcgtcagtgagtaccgaagtatcacttgtgttttctttcatacgattgacgatcttattggcatttagagagatgctcatgctcatgacatggcaactaacgctcaagacctaaataaaaaatataccatttactgtacataatcatttgtattgcgcaatttgttgtgtaaacc

SEQ ID NO: 7296 - DNA, 453 bp, Glycine max
  unsure at all n locations
tagaaacttaagccttatagaaggttcgttcctaatttctctacaattgcatctcttctcaatgatctggtgaagaagaatgtggcatttacctgnggtgaaaaacaagagcaagcctttgctttgctcaaagaaaagcttactaaggcacctgttctagctcttcctgacttttctaaaacttttgagctagaatgtgatgcctctggagtgcgagttggagctgtattgttacaaggtgggcaccctattgcttattttagtgaaaaacttcatagtgccaccctcaactaccccacctatgataaagagctttatgccttaataagagccctccaaacttaggaacattaccttgtttccaaggaatttttcattcatagtgatcatcaatcacttaagtacattagagggcaaagcaagttaaacaaaaggcatgcaaaatgggtagag

SEQ ID NO: 7297 - DNA, 441 bp, Glycine max
  unsure at all n locations
agcttgtggtgcatgtgttgatgctgctgtttgtcaggttgaccttgttgaagtgaatgctctagcagagctaatgacatggaagacagttgtagcggacattccttatggaggagcaaagggtggtattggctgcaacccaaaggagctcagcgtcagtgagttaggaagtctcacttgtgttttcttccaaaagattgatgatcttattggcatttagagagatgttcatgcccctgacatgggaactaatgcacaagttctaatttaattatattccatttccttacataattttttgtttggggcaatttcttatgtaaaccaacatctagaacttttatttattattctatcattttcatttgtttactatttcactgacaaaggcttgcattcttgatgagtattcanagtgctntatagnttatattatcaata

SEQ ID NO: 7298 - DNA, 445 bp, Glycine max
tgcaagctactgctctcaagcaagcactacatgtgtatttagttcctttatacttctatggtctgtgagtataatgaattggtggcccagtaaatactggcgccacttcttcacggctgaggttatggcggcgagctcacgaacgtaggtcgaagtgtggagcaatttcgggcaaaaagctttattgaaaaaggcaatggggtgattctgttgagaaagaatagcccccattcctattcccaatgcgtccatttccaccacgaatggcagggaaaagtccggcaaccgcaagactacggcgctacagatgacttccttgagcttgacaaaagctgctagggctttcggcgaccagcataacttgtctctggccaggagctgagttagaggtgctgcaattgaagcataccccttaatgaatcttcgatagaaacctaataaaccg

SEQ ID NO: 7299 - DNA, 453 bp, Glycine max
  unsure at all n locations
tgcaagcttcaggaaatattgttgggtatatctgatgacaaatacatgagtttgcaagagggagttaagcaagcgcagagacattttgtggtgaataatcccccaaagaggtatgatgtattccatatgattattcattccatatggctaaggaggttgaatgtgcgtgtgaaataagtcatcaactctattatgttctctctctattcatacttttgctaatggttttaaagtttaattgtttgaccttcaatattttgatacttaaaagataatagattcgagtataattttatcttatatgactaataattnttaatcaagagtcatctcttttgtgacttaatataaatataacaataagagagatgactctacgaaatatgaatatttttttgtttgaagtgtcgttgcgtcaaacatatttttanaatcaacacattgagacacttg

SEQ ID NO: 7300 - DNA, 431 bp, Glycine max
  unsure at all n locations
gctgctatcaattactttctccatgattctgttgctctatcatatacagngagcttgcatccatccgggcaacctaatgcatatagttgtccattcagagagatacaatctttatcccatccattgaccattccattagcaactacggtccaagtatcagtttcaggtgaataggcttcacacatggaattaccactcccaattgcatttcccttgaaaaaccatgttccattgtgaacaacaccaaataaaggcaccatggatgtgctcatctctgatattaaattccacctgttttggctggggtcataaacttcagcagatcgagtcatttgaattccttcaagttccccaccagacacataaagacaattatttatcacacaagaacgaaacagattacgtttctgcagcatatcgggtgccctatg

SEQ ID NO: 7301 - DNA, 438 bp, Glycine max
  unsure at all n locations
aataaatcactcatagtgtataaaactcacacaggcatgtgttttatcctattcccaaaccataactgcaccatgactttattttgcacacgacttcctatcgaatcaaaaataaaacgtacgatcacggaccaataggattttctcgagggtagtggttttttggagaggaagttgggtgtttatgtcttttcctctttgttcaggtggggtgggatatcgccagtcgagaacgaccttgaatggcaatctgaagggaagagacaccaaaaatgggttttcctttgtcggcagtcacctaccttgccgaaaatttatctggcttgaagaatttctgtcctctttctttcattgatcgagaattgcttcgtttcccttttcacttcctttcgatctttgatcgggaatccttccttttctttcttttgtttntttctt

SEQ ID NO: 7302 - DNA, 449 bp, Glycine max
  unsure at all n locations
aagctttaatgttaaatctctatttattattataaaggaatnatgattatcnntttatatactcactgngggaaaagaataaccctctgtgacttcttcaagtatcctcctcctttcatgtatttcataataaggttaaagaaaggtaagaaaatgttatccaagtggcttcaataaatttaagaggggagtaaattgattttataaatattttctttgttaatataatctaattcatttttctatgataaatataataatatattaaaactttgattaaaaagagaaaaatatgcaattaagatctctaccaatataaatgaatatagtaaatttacaaaaaaaagtaaagagataatgtaagagagaattggaaattcgatttatactgatctggttatgtctatgcaggttcagtccccaagcaatccgcttaagagnttcattat

SEQ ID NO: 7303 - DNA, 341 bp, Glycine max
agcttgtgcctctttacgtctggaatatgtatgtagcatatagatccaaagacccttaagtgctttgctgatggcttcttcccgttccaaggcttaattggagtcttgtcttttacagacttatatggacgtctgtggagtatgtaaacagcagtgtagactgcttcatcccaaaatgtgctatgtagtccctctttcttgagcatcgatctagccatctccatagctgtgcgattctttctttcagacactacattatgttgaggagaatatgcgactggtaggagtctctcagtgccttcatcctcacaaaatcttgtcaactcgcgagaggtgtactc

SEQ ID NO: 7304 - DNA, 431 bp, Glycine max
  unsure at all n locations
ctttatgccctctcgggtcatctggccttataaacacttcttctatttggccgngtttttcatcagaacatggtcatcctcatcgacggaggaagcacgcaaaatttcatgcaggaacgactggttcgttccctcggtctcaaggcacagctcacgcatctgcttcgggtcgtggtgggaaatggcaacgagttagcttgtcatcaactttgctccggtgtcatgattagcattcagggccaaacgttctcggttgaccttcatgtccttcccctttgcggagtggacttggttctcggtgttcagtggctgaaatcccttggccctgttcttaccgactataaggatcttacattgaaaatcattcatgatgganaaataatagaattaanagggaatatggacgatgctcttcaccccgtcactccaac

SEQ ID NO: 7305 - DNA, 425 bp, Glycine max
  unsure at all n locations
tgctatctacccctaggccaaactagtatcatagaagatttataagatgggagaagtgcggtgtaaaaccgttaaaaaataagtcaacaagttattgcatgcaaactttatcagagaggtccgattctctacttggcttgccaacatcatcataatcaaaaaggccaacgccaaatggcaaatattcatcgactacactgatttgaatagggcatgccctanagacgcataccctttgcccaacattcatagactagtcgatgggacatccgagttccaggtgcttagcttcctagatgcttactatggatacaaccaattcaaaatgcatcctctagacaaggagaaaatgacattcatcactaaagatgccaactntaactgcaaggtcaagccaactntagtggtgttgggtatgttagagt

SEQ ID NO: 7306 - DNA, 347 bp, Glycine max
agcttatcccatgtctccgtagcagatgttttatcaaaaatcttttctaatgcatcatcatctaatgcttgatagatgacgaagaaagctttcttgtgtctctttcttgaattcctaaaagtctcattttgtgcttaggacagcgaaatctccttttgcaactccttatagccttcttcaaccatatcccaaacatcatgtgctacaagacaggcctccattttggtgctcaaattatcatggtgctcccctttagaagtggaactaggaaggatgccactccattgctcgccatgactatagagggatttcttatcagaacctaagctctaataccactttgttgg

SEQ ID NO: 7307 - DNA, 398 bp, Glycine max
  unsure at all n locations
tccatcacttgataggttagatccttctaccttcttcgtatggacataggtatatcttggttgctgctgagtatttcaccaagtgggtggaagaaattcctttgaatgttgatcaaggngatataataaacttcatagaacaaaatattatttttcgatttagtatcccataaacacttataacaggtcaaggcaccatttttattgatcgaaaagtggttcaatatgtcaattctcaaaatattaagttagtaacttataccccttattatgctcaagcaaatggtcaagttgaagccataaacaagattttggtaaggttaattaagaaacatggccaanaacctagaagttagcatgaaagtttagaccaaattctttangcttatcaaaattca

SEQ ID NO: 7308 - DNA, 328 bp, Glycine max
caagtgaccttagatatcttaagaagggttggttaattattatatcacagactattcttttatttaaaaaattctactgttaatggaaccctacaacccaggatttcttttaaacaagaactcctacataataatgaaaattaatcttactaaatagaaataataagcaataagcaataaaggagtttaagggaagagaaaatgcagactcagatttatacgggttcggccacacccttgtgcctacgtccagtccccaagcaacccgcttgagagtttcactatcttgtaaaatccattgacaagttctgaaccacacaaggacaac

SEQ ID NO: 7309 - DNA, 445 bp, Glycine max
  unsure at all n locations
agcttctcactccctcgacatttataggagttggtagcatctcgattcttcaatcttagctatgtctacttcaatccccctcatggagattttgcggcccaacacaattccttcttgcaccataaaatgacattttccccaattaagcaccaagtttgcctctttacaccgctgcaacactcgctctagatttgctagacaataatcaaaagatgagctgaagatggagaagtcatccataaacacttcgatacatttctccaccatgtcagcaaagattgccatcatacatctctgaaaagttgcaggagcattgcaaagaccaaatggcatttgcctataggaaaacacaccacaagggcaggtaaatgttgtcttncttggtcatttggatccacaacaatctgattgtagccaaagtatacatctaagaagcaatagaatg

SEQ ID NO: 7310 - DNA, 445 bp, Glycine max
ggaccaggaattatttgtatgggttggatgttgaattctgtttgttcctggtgttgagatgatggtacagcgggtgaaccagaagctgaagtttcttttggtgaggtagccatggaaaagcagagcgtttgaaatgatttcgtaaatctcagaaaactattgggaaatgctggtgaaaacacgaatgtcacgaaaatataaatttgaataaggaatgtagagggccgtgtgaagcaacggtcgaatttgccttggttcagtagtgaacgtgctattaatgttaagtgattcgtttgggcacgttcagatatcagtagttgctacaattcctctagcagacaaatgcccagcttgcccctcagtttttcaaactgatttgcatccaaagcctttgtgaaaatatctgctatttgttcctcagtgtcaacatgcttcagtgtgatca

SEQ ID NO: 7311 - DNA, 392 bp, Glycine max
  unsure at all n locations
tgtgcattcaatatcctgatgaaggtgttccatatgttctaatactggactaatacatttgctgcccaagtttcatggtcttgcacgtgaagatcctcataagcatcttaaggagttccatattgtttgttccaccatgaagccccctgatgcctaagcagatcatatctttcttaaggcttttcctcattctctagagagagtggcaaaagattggttgtactaccttgctcccagattcatctctagctgggatgaccttaagagagtgttcttggagaaattcttccctgcatctangaccactgccatccgaaaagacatttcaggcatcaggcaacttaatggagagagcttgtatgagtatttggaaagattcaagaaaatgtgtg

SEQ ID NO: 7312 - DNA, 436 bp, Glycine max
  unsure at all n locations
ntannaattgaattaaaaacgttcagtttctgctggtaatttattaccatatatgtgtaatcgattacacagtgcaaattttgaattcaataacttagacaaaagtaaagcataaataaaaagtgcacaacggaaaaataaagagggtagggaagaagaaagcaaacacaagatttatactagttcggccacaacccgtgcctacgtccagtccccaagcaaccaccggttcttgagatttccaataaccttgtaaaatcctttacaagcaaagatccacaagggatgtaccctcccttgctctctttgaacaaccaagtggatgtacgctccacttgaactgatccacaagagatgtatcctctcttgttcttagtattacaacccaagtagatgtacgctctacttgtaccacaaatgatatnatgctcaatat

SEQ ID NO: 7313 - DNA, 283 bp, Glycine max
tgaaagtttactggatgcgttggtcaacttggtaacccttctggccttgaatcagaaatctgtacctgtcgcaagggtttgtggtctgtgctcctctactgaccaccatacaaacctttgcccttccatgcagcaacctgaagcaattgagcaacctgaagcttatgctgcacatatttacaatagacctcctcaacctcagcagcgaaatcaaccacaacagaacaattatgacctttccagcaatagatacaaccgctgatagaggaatcaccctaacctc

SEQ ID NO: 7314 - DNA, 447 bp, Glycine max
  unsure at all n locations
tgtgcattcaataccctgacgaggatgtcccatatgttcttttactggactgtccacttgttgcccaagtttcatggtcttgcaggtgaagaccctcataaacatctgaaagaattccatattgtctgctccaccatgaaacctccagatgtccaagaagatcacatctttctgaaggcctttcctcattctttagagggagtggcaaaggactggctatattaccttgctccaaggtccatcacgagctgggatgacctcaagagagtattcttagaaaatttttccctgcttccaggaccatggccatcagaaaggatatttcaggcattaggcaactcagtggagagagcctaaatgaatactgngagagatttcaaaaactatgcgccagttgccctcaccaccagatgtctgagcaacttcttctccaatatttttatgaag

SEQ ID NO: 7315 - DNA, 444 bp, Glycine max
  unsure at all n locations
gaccttagatactcagctgagtttaataaatggatgataatttttccccaatatacatataataatattgccaaatccctatcctttgatgttgtcgaactattcttgaagaagattctatatagacgtagatcaatatatagagtgtggttacattaattagggatcaaataatggtatatcaaaatcttgaagaaagaagaatttcaaatgctactacgtaccattgtggcataaagatgacactagcagaaagattgttaattaaacaacaggaagaatataagcaaagattcttgaagcaatacattgatgcctctcatctcanatgacaaagagattcaatacaacaaagcaacgattgtttctgaaggtagaaaataacttactataatgttttggattgccgtttcatttgaattgatgtactaaaaaacaacattc

SEQ ID NO: 7316 - DNA, 429 bp, Glycine max
  unsure at all n locations
gatggaccatttcaagtgcttgaaagattcaatgacaatgtttacaaagttgagctttccggtgagtataatgttagttccaccttcaatgtctctgatttatctcttttttgatgcagatggagaatccgatttgaggacaaatccttctcaagagggagagaatgatgaggacatgttcaagagcaagggcaaggatccacttgaaggacttggaggacctatgacaagggctagagcatggaaagccaaggaagctcttcaacaagtgctgtccatactatttgaatacaagcccaagtttcaaggagaaaagtccaaggttgtgagttgtatcatggcccanatggaggaggactaaatgacaccactttgtctcaattntagagtgtttagtttgtctaaataatggcccaatccttgtaaagt

SEQ ID NO: 7317 - DNA, 444 bp, Glycine max
gcagctattcaaatgaaagaattcaaattttagtttgagatattaccacggaagagaatttcaaaatgactctgaattgttttgtgaacaaaatggcattaatcgtaacttttccgctccaagaacaccacaacaaaatgggattgtggggaggaaaaaaaagtcccttgaggaacttgttagtgtttagctctactgagctttaaaagattggctaagattttgttaaaacataagcacttagacaatgaaggaaagctggagttgctgcacatgatgtccaacgctatgtcaaggaataagatcgggctgcacaatgcacaaggcaagataaaatgtcaaatgaagaattgaagttgcaggatccacgatgtcggatacaatgtcctgacatcctgcccgagaatactggagttgctgtacaatgcaagataaaagtcaagt

SEQ ID NO: 7318 - DNA, 308 bp, Glycine max
tctagtctcaattgtgagcgtgtcgatatatcacctaattattcggacatccgagtaaaaagttatagtcgcttgaaaaagctacgagcttccattatcaacttggagcaggctcatatattacgggactcaatcggacagccgcgtataaagttatggacaattgaatttgctaagagcttccgttatcaatctggagcgtctcgatatattacaggacccaatcggacatccgagcataaagattttgtcgatgaatgagctacgagcatgcgtagaaacctggagcatctcgaatattaccggac

SEQ ID NO: 7319 - DNA, 313 bp, Glycine max
  unsure at all n locations
agcttcttcacattttccgccgaagcangatcttctntattcttaanaacagaaacattacgcttacgcaaaagatcaagaagagtgagtggattaaaaccatatacaaccttcgaaggagaacaacttgtggtgctctgaacagctctatagtaagcaaatgcaacatgggcgtaaacaagcttcccaagatcgtaagttattcctcctaactgctctaaccggagagcccaaagacctattaacaacttccgattgcccatcggtttgagggtgacatgtggatgaaaatcacaatctagtgcccaacttg

SEQ ID NO: 7320 - DNA, 359 bp, Glycine max
  unsure at all n locations
agcttcaaacttgttactaggagtcgagttggtaaaaaagattcgtcttcaaactcttagaggtgactttgagcgtttgtttatggaggagtccgagtcaatttctgattatttttctcgagtattggccgtagtcaatcaacttaaaagaaatggtgaagatgttgatgaggtgaaggtcatggaaaaaatacttcgaactttaaatccaagttttgacttcattgttaccaacattgaagaaaacaaggatttaaagactatgactattgagcaactcatgggttccttacaagcgtacgaagaanaacaaaagagaaaaatttaacaaaaggaggctactgagcaactactacaac

SEQ ID NO: 7321 - DNA, 446 bp, Glycine max
  unsure at all n locations
agcttctgtgtgtgaactccatgcagaaacctatgagaggatntgttttttgaatgtctgccctcatgaagtcatccacagcctcttctacaataagtacaacgactcacttattacggtattcgttaatgctcatgagatattcaactctttcaaatgcagatccaaaaacattgagtgattgcattctgtgtctatccattcaaatcctcctctttgatcgatgtttaaaacttattttgcttacatgatttttcatttatgttcttagatacattcggaggggcaagccggatgccgggttttctcttttccagtctgaatgtttgaaatggtctggatatgtagagtttgataatctaaaaaaaaatgtcctaacttacttagcagaaaataagtaccttcctcngtctcttatctttctattccacctctactgttaatct

SEQ ID NO: 7322 - DNA, 402 bp, Glycine max
  unsure at all n locations
tataatatattattacactcgaaattttacaacagaagctttcgagaaattcaaatggtcataacttttcacccggatgtccgattatggcgaatcacatatcgagacgctcaaaattgaacaacggaagctcgtgagaaattctaatggtcataacttttaactcggatgtccgattcaggcgcataacatatagaggcgctcgaaaaggaacaacggaagctctcgagaaattcaaatggtcataactntccacactgaggtccgattcaggaatataatatatcaagacgctcgaaattaaacatcggaagctctcgagaaattcaattggtcatcacatttcacacggatgtccgattcgggcgcataatatgtcgacacgctcgaaattgaacaacg

SEQ ID NO: 7323 - DNA, 322 bp, Glycine max
  unsure at all n locations
agcttgaatcggatttcaatgtgaaaagtttttactattttaatttcccgagagcttccgntgttcattttcgagcgtctctatacgcgatgcgccctaatctaacatccgagcgaaaagttgagaccattatgacatccgcaagagcatccgctgttcaatattgagcgtatcgatatcagatttggctgatatgtacatacccgagaaaggctaggaccatataatactggatagagctcacgcctgtatatagctagcctctggaataatcatgcgcaacaatgaagaatacttgtaactagtgatgaccattggaact

SEQ ID NO: 7324 - DNA, 426 bp, Glycine max
tctagatgagttatgtctgcgaatcgtacatcctgtgaatagttatgaccatttgaatttctcgagtgcttccgttgtttaatttcaagcgtctcgatattttatgtcctcaaatcagacatcggagcgaaatgttatgaccattcgaatttgtcgagagcttccgtttttcaatttcgagcgtctagatgagttatgtcaccgaatcagacatctgagtgaaatgttatgaccattcgaatttgtcgagagcttccgttgttcaatttcgagcgtctagatgagttatgtcaccgaatcggacatccgtgtaaaaagttatgaccattcggctttgtcgagagcttccgttgttcaatttcgagcgtctcgatatattatgtccccgaatcggacatccgtgtgaaaagttatgaccattggact

SEQ ID NO: 7325 - DNA, 456 bp, Glycine max
  unsure at all n locations
ngctaacccatggaagctcctaatatctcccacactttttgnggtgggccattcttggatggccttgattttctcagggtcgaattggaccccatttctaccaactacaaatcctaagaaaactatactatctacacaaaaggtacacttctctatatttgcatagagggtgtttttaataaggactgaaagaacttgcctaagatgtcctaagtgatcatctaggctcttactgtacactaaaatatcatcaaaataaacaactacaaatctacctagtaaatcccttaagacataatgcataagcctcataaaggtgcttggtgcattagtgagcccaaaaggcattactagccattcatacaaaccaaacttggtcttgaaagcggttntccactcatcaccctttttcatcctgatttggtgatggccacttttaacaatcaattttgaaaa

SEQ ID NO: 7326 - DNA, 294 bp, Glycine max
tgagtcctttcatatatcgagacgctcgaaatggaataccgaagctctgagcaaattcaaacgacaataactttttactcggatgtctgattgagtcccgtaatatatcgagacgctcgaaattgaataccgaagctctgagccaatgcaaacgacaattaatttttactcggatgtctgattgagtcccgcaatatatcgagacgctcgaaattgaattccgcagctctgagcaaattcaaacgagaatcacattttactcggatgtctgattgagtcccgttatatatcgag

SEQ ID NO: 7327 - DNA, 288 bp, Glycine max
  unsure at all n locations
agctagtagaagcaagaatttctttctggtctttaacgaggacnccgaaaaggcctatgactcattctcatggtcttttttggattatatgctgcaaagaatgggcttctgtccccaatggagacaatggattcctgtctgtctcaactcaccaaccatatcaattcttgttaatggcagccctacaaaggagtttgctcctactatagggttgaagcaaggggatcctttagcccctcttgcttttagcatatttggagaaaacatcacaggattgatgagggaagc

SEQ ID NO: 7328 - DNA, 434 bp, Glycine max
  unsure at all n locations
taccccctgctttgattgcattcaaaggtcatgntctcccgannggcccctctnggcacatgcttggcttgggttatcataacaaaactgacattgagagtgtgaggaaggctgctgttattcatttcaatggccagtcaaaaccgtggttgcaaattggctttgatcatcttaggccattttggaacaagtatgtcaattatacaaatgattttgttaggaactgtcacatcttggattcatagtctgccatgagatgcactatggtttgaaacaacagtgcatgcatactacgaaagggacgagtaaatacatgtttcatctaaatttctgcggattgagaaggcaatataaaattggttgagggcaaagtgtgggtggataatttgcttgcaccccgtaacatttttccacacacagttactatcctggca

SEQ ID NO: 7329 - DNA, 296 bp, Glycine max
  unsure at all n locations
agcntagaatcattatcttatctccgacatccattgggtgagtcctgtcccggtagtcccgaagaagaccggccctacagngataaaaaatgagaaggaggagctaattcctactcgggtgcagaacagttggagagtctgcattgactataagaggctgaaccangttaccaaaaaggaccattttcccctgccattcattgactagatgctcgaacgactggcatgttaatcctcactactgttttcttgatggtttcttctgctatcatgtaatatctattgctctttacgat

SEQ ID NO: 7330 - DNA, 444 bp, Glycine max
  unsure at all n locations
tgatgcaacatatggagaggttaatgaaacaacgagattangcgctccatgttatgttggatcaaatggagaacagagatcataatgaagaagaaaggaggagaagagggaatgatggtgttcctagacaaaaccgaattgatggtattaaactcaacattcctccctttaaaggaaagaatgatccggaggcctacttggagtgggagatgaaaatagagcatgttttctcatgcaacaactatgaggaggaccaaaaggtgaagcttgccgccacagagttttccgactatgctcttgtgtggtggaacaagctacagaaggagagagcaagaaatgaagagccaatggttgatacatggacggagatgaaaaagatcatgangaagcggtatgtgccggctatgtactcaagggacttgaaattcaagctccaaaaactaa

SEQ ID NO: 7331 - DNA, 450 bp, Glycine max
  unsure at all n locations
gacactatgatactaagcttgagaatatatataaaagatctatgactatngaagaatcattcatgtgnccttngatgagactaatgctatttctccaagaaaggatattttagatgatgtagcagaatctttagaacaaatgcatattcatggacaatattctaaaggaaaagggaaaggaagcaatgaagatcctccagaagaagccaaatcaaatgatgaacttccaaaagaatggaaagcttcaaaagatcatccccttgacaatattattggtgatatctcaaaaggggtaacaactagacattctcttaaagacttatgcaataatatggcttttgtgtctatggttgaacctaaaaatataaatgaagccataatagatgatcattggatagttgttatgcaagaagaactaaatcaatttgaaagaaaaaatgtgtgggaact

SEQ ID NO: 7332 - DNA, 435 bp, Glycine max
  unsure at all n locations
ntgaagaagcatcaaagcaggatgtatgggtcaaggcatttgttagaagagatacagatgatcgagaaaaacaacacatgggagttagtaaatcgtccccatggaaaagatatcattggggttaaatgggtctataagacaaagctcaacctgatggcaccatacagaaacacaaggcgaggctaatagctaagggttactcacagcaacccggaattgactacaatgagacatttgcactagtagctcgtcttgataccataagagctctaatagctcttgcgtcacaaaaaggatggagtatccatcaactagatgtcaaatccgccttccataatagcgtacttgaagaagagatctatgtggagcagccacaaggattcgtgtctgaaggcaaagaaagaaaagtgttaagactaagaaaagcactctacg

SEQ ID NO: 7333 - DNA, 453 bp, Glycine max
  unsure at all n locations
tgtcctgaacttgtacaaaatggggttcgctcgctgtcgtaacttacccttcggcgggagggcgacgcgagactcacgggtgcgtcttccaagaaaggaaaatgcatggagtcgccaccaacgtttatttggggaaaacatccgaaaaaccgaaaaagacgtggtctacaaactttaagtgtgaggttcgagagttgtatttacgcacggngaaggtattagcacctgttagacaagtggcctcagatatcttaagaagggggggttgaattaagatattccaaactgtttcccctaattaaaaatctattttattttttactcaagttataaattcccttaatgacaatcttcttaaatattaattcaaatgaagcaacttgaatatgaatataaagcaataataaataaaggagattaagggaagagaaaatgcanactcagttttatact

SEQ ID NO: 7334 - DNA, 442 bp, Glycine max
  unsure at all n locations
tctattcaatntagctctgatgggaaccacatgccatcnctttcagatttgcaccaataggaatacccatgtagataaatgagaaagataatattctacaattcaagaatgatgaataacgttcaatatcttccctatccaccccaatacccctaaatctacttttgtgaaaattgactttcaatctagatacaagttcaaagcacctcaacacactttttacaacaaccacattgtccatgttgaactctccaacaaaaattgtgtcgtccacatattgcaacaagttcacctccacctccttagccttcactttgaaccctctatatatgtattttcttattgccccccttattagcccacttaacccttccgctataatagaataaagaaaatgtgctagaggatcaccgtgtcaaagccctcttgcatcatgaattct

SEQ ID NO: 7335 - DNA, 454 bp, Glycine max
  unsure at all n locations
ctcagctaaacattcaatttcgaggctctcgatatatacgggattatatcaagcatcctttanaaaatttattggcgtttgaatttgctcagagattcaacattcaatttcgagcgtctcgatatattacgggactcaatcagacatccgagtaaaaagttattgtcgtttgaattggctccgagcttcaacattcaatttcgagcgtctcgatatgttacgagactcaatcagacatccgagtaaaaagctattgtcgtttgaatttgctcagagattcaacattgaatttcgagggtctcgatatcttacgggactcaatcagacatccgagtgaatagttattgtcgtttgaattggctcagagcttcaacatttaatttcgagggtctcgatatattacgggactcaatcagacatccgagtaaaaagttattggcgtttgaattggctc

SEQ ID NO: 7336 - DNA, 422 bp, Glycine max
  unsure at all n locations
agctataacatcagaccacttccagggtgttgtaactacttacatggatntgatggggcctatgcaagnngaaagccttggaggaaagaggtatgcctatgttgttgtggatgatttctccagatttacctgggtaaactttatcagagagaaatcataaacctttgaagtattcaaagagttgagtctaagacttcaaagagagaaagactgtgtcatcaatagaatcaggagtgaccatggcagagaatatgaaaacagcaggttcactgaattctgcacatctgaaggcatcactcatgagttctctgcagccattacaccacaacagaatgggatagttgagaggaaaaacaggaccttgcaagaggctgctcgggtcatgcttcatgccaaagaacttccctataatctctgggctg

SEQ ID NO: 7337 - DNA, 400 bp, Glycine max
  unsure at all n locations
agcttctattacctatctacagttttttctatagngctattattacaagaccaactcttaaaattaaatattatgatttgccctcatactcgccccattttcccaaatactttcagggggtgcattccatgttggacggctgtccaggaaaaacatgggaacctaacgagaagaggataaacaagcttgtcttcattggaaggaatttggatgaaactgcccttaaaaaaggcttcaaaggttgtttagtatagcattaaagatctgttaccagtcaagttcccaagcagcagcccttgtgtgtcttattttataaattccagcaagcaagtatatgtacatggtagcaccaatcgaataaacgttggttgttcgtgctatatactgaatatacagactc

SEQ ID NO: 7338 - DNA, 379 bp, Glycine max
  unsure at all n locations
agctagttggttnatgaaactngatctgctgtatggttatcaccaaatccacatgcattcttcggacattgctaaaacgacctttcgcacgcatcacggtcactatgaattcaaggttatgcccttcgggctatgcaatgctccctccacttttcaggcgacgatgaacatgcttttccggccattccttcgccggtttctcattatcttctttgatgacattttaatctatagcatcacctttaatgatcatgttcttcatttacaacaagcttttcaggttctgttggacaatcaattcgtcctgaagttgtccaaatgtacctttgctcagccacaggtggagtacctcggccatgtggtctcctagcgaggagtg

SEQ ID NO: 7339 - DNA, 454 bp, Glycine max
  unsure at all n locations
ntattcaagacaagaatccaagaaagtcaagatatatgatctagtttgatctcttagaatctttaggaagaagtttccaaattgaaacaaacaaaaggtttgaccaaggaattctatcctttcaaattgagatttgctctctggtaatcgattaccagcagtttgaaaatgttttaattcaaatttttaaaacctgtaatcgattacataagtcttgtaattgattaccagaggggattttcagaaaataatttccaagagacatatctattcaaatgttttatgaacggccattcaaatgttttaaagagagttttcattgcccaaacagctttatcctctcgaaagatcaagagtttttctgaactgaaatgtcttatcctctcaaaaagattccttggtcaaccacttgcttattcaataaggaattnttgattgatcttcattntacaat

SEQ ID NO: 7340 - DNA, 388 bp, Glycine max
  unsure at all n locations
agctacttagtctcagattatgcnagctgtttttgtagctacctcatgcactcctctaatgactatggcatcatttctggcgctaaactgctgggagttggaagccatcttctcaattaaatttctggcttcagcaggagtcatgtctccaagggctctaccactggcagcatctatcatacttctctccatattactgagtccttcataaaaatattggagaagaagctgctccgaaatcttatggtgagggcaactggcacatagttttttaaatctctcccagtactcatacaggctctctccactgagttgtctaatacctgagatatccttcctgatggttgtggtcttagaagcaaggaattttttttctaagaatactctc

SEQ ID NO: 7341 - DNA, 442 bp, Glycine max
  unsure at all n locations
gttgagccaattcaaacgacaataactgtttactcggaggttgtattgagtcccgtaatatatcgagaccgtcgaaattgaatgttgaagctctaagccaattcaaacgacaataacgttttactcggatgtctgattgagtcccgtcatataccgagacgctcgaaatngaatgttgaatctctgagccaattcaaacaacaataactttttactcggatgtctgattgagtcccgcaatatatcgagaccctcgaaattgaatgttgaagctctgagccaattcaaacgacaataactttttactcggatgtctgattgagtcccgtaatatatcgagacgctcgaaattgaatgttgaacctctgagccaattcaaacgacaataactgtntactcggatgtctgattgagtcccgacatatatcgagacgctcgaaat

SEQ ID NO: 7342 - DNA, 378 bp, Glycine max
agcttaaacattcaatttcgagcctctctttatatcacgtttattcaattaaacatccgagaaaaaagttattgtcgtttcaatttgctcagaggctcaacattcaatttcgagcgtctcgatatattacgggactcaatcagacatccgaggaaaatgttattgtcgtttgaattggctcagaggttcaacattcaatttcgagcgtctcgatatgttacgggactcaatcatacatccgagtaaaaagttattatcgtttgaattggctcagatcttcaacattgaaattcgaacgtctcgatatatgacgggactcaatcagacattcgagtaaaacgttattgtcgtttgaattggctcagagcgtcaacattc

SEQ ID NO: 7343 - DNA, 416 bp, Glycine max
  unsure at all n locations
tgatgcaacattcggagaggttaatgaaacaacgagaatangctctccatgagaggttggatcaaatggagaatagagatcataatgaagaagaaaggaggagaagagggaatgatggtgttcctagacaaaaccgaattgatggtattaaactcaacattcctccatttaaaggaaagaatgatccggaggcctacttggagtgggagatgaaaatagagcatgttttctcatgcaacaactatgaggaggaccagaaggtgaagcttgccgccacggagttttccgactatgctcttgtgtggtggaacaagctacaaaaggagagagcaaganatgaagagccaatgtgatgtgaatcttacggngcgcggatcgcttgatacaggctgtagaagttttggatgacgccactt

SEQ ID NO: 7344 - DNA, 431 bp, Glycine max
agctatcactctaatgtcagattcaggaactaattatatattgacactcgaaattgaacacggaagctctggtccaaatcatatggcctaaacttttgacatggctgtacgattgaggcccatgatatatcgagatgctagaaattgagaaatggaagttctcgaaaaattcaaatggtcataagttttcactcgaatgtcagatttaggaacaaaatatacagagacgctcgaaattgaacaacggatgctctctagaaatttaaatggtaaaaaattttcacacgtatgttagattcaggcacataatatatcgagacgttcgaaatagaacaccgaagctctggtccaattcaaacgtccataacttttgtcatgggtgtatgattgacgcccatgatgtatcgagatgctagaaattgaataacgga

SEQ ID NO: 7345 - DNA, 387 bp, Glycine max
  unsure at all n locations
agctcgcgnccatnatcatttattagagttacctcccctatgtcaacaancntgctggaganatggatgcccatcttcaccataccgaaatcccttttttgatatgatgaaaaaaaacctctatgaggagtaacatggaaggatgctctatagtctattatccatatacaatcattagatgcaatatttaaataattttcattattgataagaaaaacattctcatcatctgatgccacggcaatagtggcttcaccttagtctttttcattgagtcaatttgattagcatggacagttccagccttctgatctctcttcaagaatttgcactcagacttcttatggtcttaactttcgcagtagcagcaacccacgccttgggatg

SEQ ID NO: 7346 - DNA, 385 bp, Glycine max
  unsure at all n locations
agtttaattatctattgttatagctntgtttcttgcaggcgctagatactaaaatcaattgacaaagagaactaagacgggctataggctttgatacagattttatcttataaccaattagtattaagtaaagttgtccaacagatatataagttgcaccccaaaaactgagataggtgatgtgggactttctaacggctagaacacattgtcagttttctaacgagtgaaggtcgcaacaaaatggctcgatcgaaagattttgagaatactccagatcttttatgagtagaaaactagcttataatctctaacagaaacactggcgaattaagtttggcgtactcgatagataacagatagattatgatcagaacacataact

SEQ ID NO: 7347 - DNA, 465 bp, Glycine max
gacacttaaaactcagcttccagaatcaagatcaagattcaagactcaagattcaataatcaagagaagacttaatcaagataagtatgaaaaggttttttaaaaaattgagtagcacatggatttttctcaaaacatgtttatcaaagagtttttactctctggtaatcgattactagattgttctaatcgattaccagtagcaaaatgtttttgaaaaagttttcaactgaatttacaacgttccaattgatttcaaaaagctcttatatgttttggtaatcgattaccactgtctttgaacgttgaaattcaaattcaaatgtgaagagtcacatcctttcgcataaaagctttgtgtaattgattacactgatttggtaatcgattaccagtgattgtttctgaataaatgaaaagatgtaactctttcaatagtttttgatctttcaaattggtttaatt

SEQ ID NO: 7348 - DNA, 212 bp, Glycine max
  unsure at all n locations
tgcactcaaancggacattcgagtgaaaagatatgaccatttgaatttctcaagagcttctgttgctgaatttctagcatgtcgatatattatgtccccgaatcggacattcgagagaaaagttgtgacaatttgaatttctatagagctctcgttgttcaatatcaagtgtctcgatatattatgcgccagaatatgacattcgagtgaaa

SEQ ID NO: 7349 - DNA, 417 bp, Glycine max
  unsure at all n locations
gcatgcgaagtgggtggaattcctagagcattttctttatgttatcaaacataaaaagggaaaatgtaatattgtagccgatgctctttctcggcgtcatgcattactttctatgcttgaaacaaaattgattggtcttgaatgtttgaaaagcatgtatgaaaatgatgaaacttttggagaaatttttaaaaattgtgaaaaattttcagaaaatggtttctttagacatgaaggctttcttttcaaagaaaacaaattgtgtgtgcctaaatgttctactagaaatttgcttgtttgtgaagcacatgaaggaggtttaatggggcattttggggtccaaaagactctagaaacattacaagaacatntttattggcctcatatganaaaggatgtgcacgaaatttgtgaaca

SEQ ID NO: 7350 - DNA, 455 bp, Glycine max
  unsure at all n locations
ngagaactctttccatgcagaagttagaatactaagcaatattcctcataccttcattgtgagattgatgtgttgtatctctaatgaggattctatgctctttgtgtatgagtatctggaaaatcacaacctagataagtgactgcaccagaagcttaagtcaggttcagtaagtaaagtggtccttgattagccaaagaggttgaaaataaccattggaattgctcaaggtttaagctatatgcaccatgattgttcaccatttgtggttcatagagatataaaaacaagcaacatccttctagatactcaattcaatgcaaaagttgttgattttggacttgctaagatgttaatcaagccaagggaatctttttgtttcctgactaacaaatatattgctcttgcttagctatattttgtgtgtgccttatgagtaaactatnnttttagtc

SEQ ID NO: 7351 - DNA, 412 bp, Glycine max
ggctgcaagctacgtccacctatttgcagaaatgaaagaagggtgtaataaataacatttggctggaaggaaacaagagacaaatacctcccccgtccaaaaaaaataaaagaaaagaagttacctttccccatatatatccccttgtattcttctgcccctcttcttggtaggaaccatcctcattgacccaaaaatgtgggttgccagcacactgaactcctgccaactgcacacaacaaccaaaacaggattctttcaaaaattctgtttcacaataaacaagatatggttattaagagagagcctctcaatatgaattgtcgacctgcaacatacgaagctccactttagttatttcccgaccattgatgaaaacctgagtggttccattgctagcatccggttggat

SEQ ID NO: 7352 - DNA, 454 bp, Glycine max
  unsure at all n locations
tactcaagcttaagaacggagttccaaccacagtgagtcacaatccctcctgaggcagggtggtccaatatcagcaactggggcgcccagttccatatgatataacccttcttgctttctttcatcctttgcccaaaatcttgcaggaaactctctccatcctcatctccatctccataccttttccgaataacccagatgaaatcatgaccagaattttcaagcccgtgagcgatttcaacaagctgagcatgagggagcctgattcggcttccaaaacttacataaagaactgactcattntgcttagagttaagccagtttagccactcttattcttgcacaagctcctccttgtgtcccctattggccttttcttcatcgcactgattaattaacccaagctgacaccggtcctacactccaacacttgaccccctttgtgctctgataa

SEQ ID NO: 7353 - DNA, 415 bp, Glycine max
  unsure at all n locations
agctattgtagtagtagtcttcattacattttaaatcactatgttcaatgacatgaaaacactgcagctaacttagcaaatattcagtaactttggtcatacctttaactagttgcaggaagaaacacccttattagtgagttctttgtaaccttttttctacaggtagggcatttagcctgtgcagatatagcagccctgatgcaattcttgcaaaaaatatgaccacaccttgttgacatttcttcaaccaaaggggacatacatattgggcaattaaaaacaggctccttatgagcttcaggctccttgggaggttcaggtgtcttcttagcattttcactctgcaaaaggaaaaagtgtcagcaatttgaactcatacaaatgtctgcaatcaactgcaagtctntatatg

SEQ ID NO: 7354 - DNA, 347 bp, Glycine max
agcttaagctctttcaactgcacaaggctcttaatatttgaagagtatccttgtggaaccttcacccgatgaagacactgacaaaaacttatcttctcctttttggacaaagtatgacaagttgggggcaagtaaattttctttccatcagaccttggatgccactgtgatcggatccacatctctgctagattttgacgagtattcaagccatccttcgtcttgccctaaatgttaaagagcgtcccaatcacactgtcacatacatttttctcgacatgcataacatcaatacaatgtctaacatctagatcagaccactacggaagatcaaagaaagttgacct

SEQ ID NO: 7355 - DNA, 569 bp, Glycine max
agcttggacttcctgtgttgtgggaacctctccttcctcaggtgtacccaaacccaatcacctggttcaagcacgactttctttctgcttttgttggcttgccttgcatagctcgcatttttcttttcaatttgagccttcacttgctcatgcagcttcttcacatactcagctttagcctgtgcgtccttatgcttaaacatagcaatgttaggcataggcaacaaatcaagaggagtcaaaggattaaatccatacactatctcaaatggtgaacaattatttgtgctatggatgatacgaaatcagagtgtggtaacggaagcaaacaaccaataacgaaagtactaggtaccacccttattagtcgaattcctttaagtatttttggtatttgtgtgtttgggtttttacgaaaatcagcaaggaaaaataagcgatattaaactacaccaatagcttaatacgagattagcactcaccaccaattgagctaatcggactattttcaagacgacgctggcaaataatcgggcgaaaaatgtaacacaatttctaattggactgaa

SEQ ID NO: 7356 - DNA, 385 bp, Glycine max
tactttcttgattcatgaaagatccaagccatctagttgtatcaaaaagggtgctaaaatacattcaaggcactttgaactatggaatcaaatatgacaagaaggtggaagcaaatgtaattggcttttgtgacagtgattgggcaagctgtatggatgaaatataaagtactttcggatatgttttctcactgggtttaggagaattttcatggtgctcaaagaaacaacaaaccgttgcccaatcttttgcaaaagctgaatatatttcagctggcttagctacccaacaagcaatatggttgaagagaatatttgaagactttggtgaaaagcaagggacaatgactatccattgtgataacaaatttgctattgctatcac

SEQ ID NO: 7357 - DNA, 412 bp, Glycine max
agcttttgacggactataccaagctctatgaaccagggacggagaaagatctatatataggcttgctaagggtagagagaggaagactagagatttggatcaagtaaagtgtgttaaggatgaagaaggcaaagtcttagtgcatgaaaaagatatcaaggaaaggtggaaggcgtatttccacaacttatttaatgatggatatggatatgactctagcagtctagacacaagagaagaggaccggaactataagtattatcgtcggattcagaaacaggaagtaaaggaagcgttgaaaagaatgagtaatggtaaggcggtggggccagacaacatacctattgaagtgtggaaaactcttggagatagaggtcttgagtggctcaccgaactctttaacgaaattatg

SEQ ID NO: 7358 - DNA, 128 bp, Glycine max
tgcttttcccaaagagaggcaccactggttttatcacctgatcgccaaccggatgcccccaagcgtctttgacttttttgaagcggtcgatatccataataacgacgcactaaagcggattctgggct

SEQ ID NO: 7359 - DNA, 353 bp, Glycine max
atatactgtaatcgattaccagagcttattttcagaaaatattctcaacaatcacatctttttgtgtggttcttgaatggctatcaaaggcctatatatatatgtgtgacttgcgacacgaatttgctaagagttttaaagaacaaaaaggtcttatcctcttaacaagaaaaattgttttatcctcttacaaattccttggccaaaacacttgtgattcaataaggaattatctgagtgctcaaaatgttcaatctatctctgtcaagagagatatcttcttttctacttcttcattctgaaaagggattaagagaccgagggtctcttgttgtgaaagaattctttacaca

SEQ ID NO: 7360 - DNA, 471 bp, Glycine max
  unsure at all n locations
agcttttgtgtgggatacccaatgtgagcttattttccagacccttaaggaaagattaacaaccactccagtgttagttttgcctaacccgagagaaccctttgaggtgtattgtgatgcatcaaagatgggattaggaggagtgttgatgcaaaatggctaagtagtggcctatgcttctagacaactcaagactcatgagaggaattacatcactcatgacctggagttagctactgtagtttttgcccttaagatgtggaggcattacctgtttcgctccaagtttgaggtgtttagtgatcataagagccttaagtacttgtttagtcagaaagagttgaacatgtgtaaaaggagatggttagagttttttaaagattatgattttgagcttagctaccatcccggcaaagccaatgtagtggctgacgccttgagtangaaatccctacatatatcggcattgat

SEQ ID NO: 7361 - DNA, 521 bp, Glycine max
  unsure at all n locations
agcttcacaaaagaaaagtggataatccacatattacaaaaggttgacttccacattaccatcccccacaaggaaacttgcaaacaagtttttctcaatagtttccctctcaccatctcacacaatccttctaataacaatagtaaacaagaaaagtgtcaatggatcaccttgtcttaaaattttttgagcgaaaaattcataagtatttcagcaacatcaaatggtacttgatgtcaaacatcccttaatccaatgaatccacttctcatcaaaacccaacctcttcatatagaacaagaaattccaattaatcaaataataggtttttcataatctaacttaaagataagactttttctttttccttttttctttatcaatggtatcattcaccgccaacacactatgaagtaggaattttcctcccaagaaagcactttgcttatgatcaatcacacttaanagtaccttcttcaacctattagctaacaccttacaaaatattttatacatacatc

SEQ ID NO: 7362 - DNA, 456 bp, Glycine max
  unsure at all n locations
ttggaacccagatgctccatcgactagcctgtttattttgggcagaaggtatgcgtctttaaagcatgccttgttcagattagtgtaattggtgcacatttgtcaattgttgttgaaccttttgaccatgatgatgttggcgagccacgtggaaaacctgacttctctaatgaagtttgcattgaggagtttatccacttcttctttgacagctttacgccattcttctcccatcttccttttattctgtgatattgttttggcctaggaacatataacaagtttgtagtagattatgctaggatggattcctggcatgttagacggctgccaagtaaataaattcccgttttcatgtagcacgtcggcaatgcgttggtgctcatgactagtgaggtcgctactaagccacatgcactacccanngttaggttcgagttgcaacttgacatgctc

SEQ ID NO: 7363 - DNA, 498 bp, Glycine max
  unsure at all n locations
gtggtccataatgctttcaaccgagcttcagcatttattttatcaaccccaatcaaatcttctggaggtatttgaatcatcatgtacaccgtaaagctgtgtgctagttttagtatttttcaaccagcctcttaaacacttggttttgattttgttcacccaactcttgctaagattcagagattccttggatgataagtctaaggctaatctagtgcaaattaaaggacgattttcagtgacatcagaaaatttagatctggtgaaggtatgctttttagttttttcttattaatcaaatggtccctatcgacaacttcaactgacttcatcatatggaataggatattcctgtaagttcagtttcacgccgatcttcacaggttggttgatgatctaattgattattggctatatatntatgttttcttcttatcacctcatttgatggtctctttccttttacgttaaatatatggatcaccaatgagggaaatc

SEQ ID NO: 7364 - DNA, 451 bp, Glycine max
ccctatgactcggattcttggggattcctaaactatatgattatgatgatgggattttgctaaagatggagaaaatggatccatggatgcctttctagtgcaactacatcaattttgatcaaaggccacactactagagaatttgtgcctgaaaggggactgatgcaaggagatccccttgcacctttcctatttaatataacagctgatggactcactggggtgatgaagacagctgtctccaaaaacctttttagcatctataaagtggggaggcaaaaggaggagattaacatcttgaagtatgcacatgatacactgttttttggaactgcgactacagctaatgttagagacatgaaatctatcctcataattttcgagatggtttcaggactcaagattaactatgctaaaagccaaattgagtgcttgcgtaaatctttggact

SEQ ID NO: 7365 - DNA, 518 bp, Glycine max
agcttcgtaatttgaggagcatgaatggttgctttacacaaacaatgcatgtgaaggtgcatgtgccattttgaattctataacaatattacccatttgatgatgatccttcccatctttgaatttccgaccacatgcacttatcttaattagtcaataaattatttaaataacatctgacaattagcaaattcgaccattagtaatctaagatcacctcttacatttctatgaacttcttttagaatgggcacgaggtaatcatgtttaaatcataaaattattattggtaagaaaaaatcttttcaaatatttaacacatttatatatagaatttgaagactaaataattgatcagatgaaataatctcacatcaattaatttatgcactcatgatttacatttccatggacttaactgtgaagttctaattaaaacaactacataatattttaaaaagatgttagaaaatttataaaagtaaatgaatatttctctaaataaactgaatgaaatg

SEQ ID NO: 7366 - DNA, 324 bp, Glycine max
agcttcatccactttcttgcaagggatgaagtgtgccatcttaggaaacttgtcaacaacaacaaacacagaatcctttccattcttggttttgggcagccccaaaacaaagtccatagatatgtcagtccaaggatatttaggaacaggcaaaggagtatacaatccatgaggtttaaccttagatttagcttgtttacacacaatgcaatgaccacaaaacttatgcacatcacgcctcatatgaggccaaaagaaatgatcttgcagaatttccagggtcttttgaaccccaaagtgtcccatcaacccccccctattgtg

SEQ ID NO: 7367 - DNA, 473 bp, Glycine max
agcttccaagaatcaagatcaagattcttgactcaagattcaagaatcaagagaagacttaatcaagataagtatgaaaaggttttttcaaaaactgagtagcacatggattttttctcaaaacatgtttaccaaagagtttttactctctagtaatcgcttaccagattattgtaatcgattaccagtagcaaaatggatttgaaaaagttttcaaatgaatttacaacattccaattgatttcaaaaaaggtgtaatcgattacaatgttttggtaatcgattaccagtgcctttgaacgttgaaattcaaattcaaatgtgaagagtcacatcctttcacataaaagctttgtgtaatcgattacactgatttggtgatcgattaccagtgattgtttctgaataaattaaaagatgtaactcttcaaaaagtttttgactttctcaaattgattttaaagttttctaaa

SEQ ID NO: 7368 - DNA, 463 bp, Glycine max
ttatagcaaatgccactctactccaagtttttaaaggatatgttaacaaggaaacacaagtatattcaccaggaaaacattgttgtggaaggaaattgtaatgctgtgattcaaaaaatccttccacccaagcataaagaccctgggagtgtaaccattccttgtttaattggagaagtcattgtgggaaaggttcttattgatttgggagccaatattaacttaatgccactctccatgtgcagaaggttgggagagttggagatcatgcccactatgatgactttacaactcgctgaccgctccattaccagaccatatggagtaattgaagatgtgctggtcagagtaaaacattttatcttcatgacagactttatggtaatggatatctgtgaagataatgacattcctataatattagaaaggcgattcatgttaattgcgagctgcatagttgata

SEQ ID NO: 7369 - DNA, 489 bp, Glycine max
  unsure at all n locations
aaatctatatatggtttaaaacaagcttcccgttatttgtaccttaagtttcatgggataatttcttcatttggttttgatgaaaaccccatggatcaatgcatataccacaaggtcagtgggagtaaaatatgttttcttgttttatatgtagatgatattttacttgcagccaacgatcggggtttgctacatgaggtgaaacaatttccctctaagaattttgacatgaaggatatgggtgatgcatcttatgtcatcgacattaagattcatagagatagatctcgaggtattttgggtctatcacaggaaacctatattaacaaaattctagagagatttcggatgaaagatagttcacccagtgttgctcccattgtgaagggtgatagggttaatttgaatcactgtccaaagaatgactttgagagggaacaaatgaanaacattctttatgcttcagttgttggaagcctcatgtatgct

SEQ ID NO: 7370 - DNA, 554 bp, Glycine max
tataggattctacatgtgctaaatgactacactccatcttttaatctaccaatgtcactgcttccccaaacattcccaacttgcaacaactacttagaagagagttatgaataatttccgagggagagattcccccttccctcatatgatggtacaaactgaaagctacattcaagcgtcccactttgcacagtccattaataagcttgctgtaagtgttaagattaggcacacagccacattcttccattttctcaaagagcacagttgtgattccaaaatcaattttactccatatatctgtattatcaacagagatatttgttaaacttacatcaagccccatgggattgcttccttccttcttatgtttttcaatcactagatgcttcattatgatggagtatgttagataagaaggctcatcaccagtaccaaacatgcgcctgagaacaccacatgcactatcaagtagtcccatacatccatatgctttaattaataaattatatataaaggaatcgagcaatacgccttcatttttaatcttgaga

SEQ ID NO: 7371 - DNA, 479 bp, Glycine max
agcttacttcttttatattgtcgtgattattaaatataataaattattttttctaataaactatttatatatatatatccaaactcaatgaataaatccttaaatgatatcacaaactttgaatttcaattttcatatatagcaaagagctttttttcaacttaaataaattattcctcaaaaaggacacgtataataaaaaaatacacgaattcgtagtaatatttgaaataaaaacattatattcttactgaaatttaattttacgttgaactgtattttttactcctaatggttaaataattgataaattatatctcccaacattaattacacattttatcctaaactttaaagaaactcgtggcttttattctctatcattttatttctaatataactgtattttttaccccacttattattctttggcaaattataccttcaatttttgtgcttactaatgaaaaagtgattga

SEQ ID NO: 7372 - DNA, 500 bp, Glycine max
tctcctattgccaatcacccaacaagccttggctttttttgtagcaatgaatgtgttgatgaactactaaatggatctgtgaggatcttggatatctgtagtacaattaaagattgcctactgcaacacaaggaaagagtgcatgaacttgagtcagctattcgcaggagaagagatgccgaggccggattcacagtttcgagtggaaaatacttggcatctaggaagcaggtgaaaaaagcaattcggaaggccttatgaaatttgaaaggattcaagaatgaactcatatttgcttcctcaaacaaagacaacgagacattgtgcatgcttagcttcttaaaagaatcagaactagtcaccgtgagctcattaaaagccctcttgttgtttatcacttgctcaaagggacaatccaaacacaacaggtgggtcataatctccaagttgatccaaccaatagagtgggatgtgactctcaagagccgattcaaatgaat

SEQ ID NO: 7373 - DNA, 508 bp, Glycine max
agcttaggaacaagccttctctcacctaattggcctaagaagaaagctaacactatatagagccttcagtggcctcacacaaacacactacactgtttctcacagtccctctcatcaggagcaagatattgagagccaacccatcatagtgaaccgtgacggctctgaaaataagtacgaaactacgttccttatgacctcagaagaaggtggagaatacgagttggtgtacttcaagaggctcgatgatgaattcaacaaagtggacaagttttacaagtcaaaagtggaggaagtgatgaaggaagctgcaatgctcaacaagcaaatggatgctttgatagctttcaggatcaaggttgagaagccaagtttgttgttatttgatcattctgtggagatgactcgtcttgcttctgatgttgcttcttcatctgcagtgtgggcagtttccacacccaaaggggccaaattggacagtaattaattttcaccttcacctcatttt

SEQ ID NO: 7374 - DNA, 133 bp, Glycine max
agcttgttattttattaccttttttggtttctaagttatgaatcatctctcaggctgcagtcattccaaattgtcgcattctcgctgcagttggccagaaaatggcccgcactcccggcgctagtgcctccct

SEQ ID NO: 7375 - DNA, 469 bp, Glycine max
  unsure at all n locations
tctaacccacatgatgaatatgaaaaattttgccctgttgacattctccaaaaataaatctaaaatcttttaagggcacataagagtgaaaaacaaaagtacaaagagtactattctgagagaccaaattctcccattcccatgtagaccagcagaatctgtctgaatcatgattttgaacttgcaatctccagttgaaagatctttgtcagtgacaacagaaagaccggggaatttgcatgcactgtcaatctggtcattcacttggaagtaactattgaatgcataagaaagattaccacgagcatctaaaccaccacatgaagtttgatatccaagacttgtgcaatctgcattttgacaagcataagacacactcggtgccacttgatcactattgagggttgctgaggttttcaaaatgcaccactttnttngtagatatgccaccccagtagcagctactaag

SEQ ID NO: 7376 - DNA, 483 bp, Glycine max
agcttttgcaagctggaatcatttatcctatctccaacagccaatgggtgagtcccgtccaggtagtcccgaagaagaccggcctcacagtgataaaaaatgagaaggaggagctgattcctactcgggtgcagaacagttggagagtctgcattgactataggaggctgaaccaagttaccaaaaaggaccattttcccctgccattcattgaccagatgcttgagcgcctggcaggtaaatctcactactgttttcttgatagtttttctggttatatgcaaattactattgctcctgaggatcaggaaaagaccacattcacctaccccttcggcactttttcctataggaggatgtctttcggcctgtgcaatgcccctggtaccttccagcggtgcatgattagtattttcagtgacttcttagaaaattgcatagaggtgttcatggatgatttcactgtgtatggatcctctttga

SEQ ID NO: 7377 - DNA, 480 bp, Glycine max
agcttaccatcttcaattgaaagccttttttacctcagattgctttgtttggagagatgtactttatatgacaacttatccatcatagggaagctgaaaaaattaagaattctcagcttttctggatctcgaattgaaaatttgccagctgagttaaagaacttggataaactacaattactagacatcagcaattgttcagtagtcaagaggattccgcctcagcttatgtcaaggttgacttcgttggaagagttgtatgtaagaaattgcttcatggaagtgtcggaggaaggagagagaaaccaatgtcaaatttcatttatttctgaactaaaacatttgcatcaattgcaagtggtggacttaagcattccatgtgctgaagtttttcccaaggaattgttctttgcaacttatgtgattacaagattgagaatgggaacttctaaatgctttcacctggagatttcagaatgc

SEQ ID NO: 7378 - DNA, 571 bp, Glycine max
tttagagattctcactgggccggttgtcgtgacacacgtttctctattacaggcttcttcatctttcttgggaattctctcatatcatggcactccaagaaacaatccactgtctcacgaaggtcatctgaagcagaatatcgcgctttagctaccaccacatgtgaacttcaatggcttacataccttcttcaagattttcgcattccattcactcagccagctaacctattttgtgataatcaatctgctattcaaatttcttccaatcaggttttccataagcgcacaaaacatatcgaattagattgctatatcgatcgcgaaaaatcactaaatggccttctcaagcttcttccagatagatcctccatgcagcttgctgatatttttaccaagcctttatctcctactcaattcaagacactaatctccaagctgggaatgataaacatctattcccagcttgagggggggctcttaccactatgagagaattcgcgttgctgctactgcataagtgccgctactgcagagttgctgctattgcatttcattacatttcatttac

SEQ ID NO: 7379 - DNA, 503 bp, Glycine max
tagcttatacgcaaaacaagagaggtgttatttttaaaaaaaaaacgcaaacaaaataggtcgcgtatgatataatttaaaatgtaagtccaacatcggttttcaataaaaataaaaaaaaaatcgatgttaacaaaatgatgttaactttaacatcgattttcttcaagaaaccgatgttaacttatcatacgttaacatcgattttatgaaaatccgatgttaacggatacatattatttacaattatgccaccgtgtttatcttaacatcgattttatcaaaaaccgatgttaatctgacgatgttaaatctgttttttgtagtagtgtataaataatacttggattattaacatgtagagactagtgtaaaacctactttgggttgagctactaatggcttgagacaataatatttatatctttgagaaaaatagaaaaacttgatggtttattaacaatttaatgtaatcctcagtgtttgagaaaaattattataaa

SEQ ID NO: 7380 - DNA, 406 bp, Glycine max
ttggaattcaatgtgaaaagttatgactattttaattttccgagagcttccgctggtcattttcgagcgtctctatatgtgatgcgccttaatctaacatccgtgcgaaaagttatgaccatttgaatttctcaagagcttccgttgttcaattttgagcatctcgatatgtgatttccctgaatcgtacatccgtgtgaaaagttatgaccatttgaatttctcaagagcttccgttgttcaatttcgagcctctcgaaatattatgcgcccgaatcggacatccgtgtgaaaagttatgaccatttgaatttctcgagagtttccgatgtttaatttcaagcgtatcgatatattataagcctcaaccggacatccgcgtgaaaagttatgaccatttgaattt

SEQ ID NO: 7381 - DNA, 608 bp, Glycine max
agctttattcaagacaaagaaattttttatattcaagatggatgatcaagactgtctatagagtcttataaagggtatattaaataggaagggaattccaattgaagtagcaaaaggtttggccaagaattttaagttaaaaagtcttttacaagaaatttactctctggtaatcgattaccagtggccaaaactgatttacaaacagctattaaaatttgaattcaaaatttgccctgtgtaatcgattacacatatatggtaatcgattaccagtagtttctgaatgttttaattcaaattttaaagcttgaaatcgatttcacatatactgtaatcgattaccatagcagaatttcagaaaatattatcaatagtcacatctttctatgtggttcttgaatgggctattcaaagcctatatatatgtgactcaagacacaattttcttaaaattcttaaaacaaaaaggcttaccttttaaaagtaaaataattttattctcttacaaattcttgggcaaatactttgggattcaataagaaatatttaaaatcttaaatggttaaattatctttttcaaaaaaattcattttttttttttttat

SEQ ID NO: 7382 - DNA, 521 bp, Glycine max
  unsure at all n locations
agcttccatcactgctgttgttgttgctgagggctggaccatctgaggttagggtgattcttctatccagggttgtatctgttgctggagaggtcataattgttctgctgtggttgattttgcttctgaggttgaggaggtctattgtaaatatttgcagcataagcttcaggctgctcaatcgctccaggttgctgcatggaagggcaaaggtctgtatggtggtcagcagaggagcacaaaccacaaacccttgtaacaggtacaaatttctgattcaaggccagctgggttaccaagttaaccaatgcatccagtttgccttcaagcttcttagtctcagatgatgcagctgagtttgtagctacctcatgcactcctctaatgactatggcatcatttctggcactaaactgctgagaggtggaagccatcttctcaataaatttctgcttcagcangagtcatgtcttcaagggctcaccactggcagcatctattatacttctctccatattact

SEQ ID NO: 7383 - DNA, 437 bp, Glycine max
agcttctggtgggacatcttgacttgctttccaatctgacattcaccacagattctgccttcttctattttcagattgggaatgcctctaacagcacctttgtcaatgattttcttcatgcctcttaagtgcagatgtccaaatctttgatgccatattctgacttcatcttctttggaggatagacatgtggaggagtagctgatttcttggggtgtccatatgtaacaattgtcctttgatctgctgcccttcattagaacttcactcttctcatttgtcaccaagcattctgactttgtgaaggttacattgaatccttcatcacacagctgactgatgctgatcaagtttgcagtcagtcccttcaccaacagtactttgtccagactaggaagtccatcatgaactaccctttccatttcaatgatcttttc

SEQ ID NO: 7384 - DNA, 468 bp, Glycine max
tatccccgttttttctttgtatcaacgtgctgtcaatgtgggctctccgcataaattttgttgctgtgctgcttcgttactctaatactatttcttttttccttttaataatgaacaagagtatcactatttttctttttcgtacaaatttggtagtatttgttatgtcattattattattagttttaatttcatttgttatctataaatcctgttccttttaattattctttttcaacgaaaaacaaacttggttagagtgagtttcttcgtgcattgaaattgaagttacattgcgtgaatgtttagcagatttcgtcgtttagagagagcaagtcagatgatcggcgtttctatatatttacagcaacgaagaccctccatctgagaactgattcaaggaaagatcgcgtggcgtggatacaagcctggttttaacacgtgccctgatcctcttcaccactcatg

SEQ ID NO: 7385 - DNA, 511 bp, Glycine max
agctttacattactcctcatgcttcttaccatgtctaataaggttcgatttcttcgttctgccacaccattctgatccggagaaccaggcatagtgtattgggcaacaatcccatgttcttgaagaaatttcgcaaatgaacttggggcttgtccatcctctgtgtatctaccatggtactccccacctctatctgatctcacgatcttaatttgttttccacattgtttctcaacttcagccttaaaaactttaaaggcatctaaagcttcattcttataatgaagtaagtagcgatacatatatcgtgaataatcatctataaaggctatgaagtatttctgactatttgcatccatgtctggacaacatatgtctgtatgtatgatttctaataaattagaactcctctctgcccccttttaagactgttagtttgcttacccttaatgcattctacacaagtttcaaaatcagcggaaatccaaggactaagtacttcttctttact

SEQ ID NO: 7386 - DNA, 447 bp, Glycine max
ttaaatagaaaagaatatgtaaatattgatttaaagcacatgttgtttgctttgctgattttttgtatttcatttatattaatattttttatatgccaatttctttttataaatctataataaaatcagtgaaatcaaatcaaataccaagtacttgagcattctattcaaaactctctcctatgcccatagctactgttcatgttacgcgaatagcaaacattattaatacatatttagcattaagtcaattatatatttaatttagttttttaaatgagtgagtgttacgtataatttaagaattaattcaaatatacagattgtgtaaatatttttatgtgactatttaatcataaattagtatttttttgtgattatcttaaatttagagttaggtttttttcattaatcaacggtataaaaaatgtaacacttattgcagat

SEQ ID NO: 7387 - DNA, 454 bp, Glycine max
agcttgtgaatgttcacattaatcatatggacatgtctctctatctggcttttgattatgcagaacacgacctttttgtgagtatatataatcgtgaaactgttgacatggcactctacttaggcactagagttcaagttgaaattaaagttgtttgctttcgtagttcatcaaaatgtttcccgagataatgtgtactttctgatatctgaatatccaaggtgtttttagtttaatgttgccttttgacattcctagctagtgagataaggcttggttgttgcatcttgtattagacacattatggtctttgcaatggactttatgctattgtataagttttgcttccgtgtcttataaaatgttggtgaattttctctaggaagagatatacgtaggtagcaaggaattgcttgttctgattaattgagtgtaaagattgccattttgaatg

SEQ ID NO: 7388 - DNA, 536 bp, Glycine max
taactaaagataacatttgctgaatgggattaatgtttgttttgttgtgttgaaatgtgcagacaacgcagtgatcaatggggattttgaagagggtccatggatgttcaagaacacttcactgggtgtgttgcttcccacaaatttggatgaagaagcgtcctcactacccggttggatagtcgaatccaaccgtgccgtccggtacattgattctgatcattactctgttccacaaggcaggagagccattgagttgctctcaggaaaggaaggaatcatatctcaaatggttgagaccaaaccagacaagctctacagcttgaccttctcattgggtcatgctgatgacaagtgcaaggagcctcttgctgttatggcctttgctggtgaccaggctcagaacattcactacactcccaatttcaattccaccttccaaactgctaacgtcaatttcactgccaaggctgagaggactagaattgcattctatagcatatactacaacaccagaagtgatgatatgagttctc

SEQ ID NO: 7389 - DNA, 477 bp, Glycine max
  unsure at all n locations
tcatgatgaatcaagattgattcaaagagttttgatgattactaagatgatgacaaaaagctcaagagtcaagaacacttcatgataacaaagatgatgatctcaagaatcaaaggatgagttcaagattgaatcaagaacacttcaaggttcaaaaggaaatttgatttcaagaatcaagtttcaagattcaagaatcaagagaagactcaatcaagataagtattaaaaaaaattttcaaaaactgagtagcacatgaatttttctcaaaaaccttttaccaaagagtttttactctctgttaatcgattaccagattattgttatcgattaccagtagcaaaatgattttcaaaaagctttcaactgaatttacaacgttccaattgatttcaaaatgttgtaattgattacactaatttggtaatcgattaccagtgtgtttgaacattgaaattcanattcaaatgtgaagt

SEQ ID NO: 7390 - DNA, 535 bp, Glycine max
agcttgcttctacagagtgaaatatgattttagatgaaggaaaacaggaaaaagaaaaacaaaaagaaaaagagaaggttgatgaggagaaaaagaagagcaagagtgaggttttaagagagaaaaagaacgagattacttcagctgaaggaaaggaagtaccatatccattggtaccttccaagaaggataaagagcgacacttagccagatttcttgacatcttcaagaagctggagatcactttgccttttggagaagttctccaatagatgtcactctatgccaaatttttaaaagacatgctaacaaagaagaaccagtatatccacaatgaaacaatagttgtggaaggaaattgtagtgctgtcattcaacgcatccttccctcgaagcacaaagatcctggaagtgtcactataccgttttccattggcgaggttgttgtgggtaaagctctcataaacttgggagctagtatcaaattaatgcgtctctccatgtgccggcgacttggagagatagagataatgcc

SEQ ID NO: 7391 - DNA, 372 bp, Glycine max
tattctatgatattgggaataatgtctgttaatttataaatgttggcagtttaacataaataatgataaggatgggctcttttgtttattaattttatgtacaccctgccgttctctttttccatttaaaacaacaccaccttttctagttattaattaaatatttctcaacttgcaagcactaaatcgtttgatttcccctctttgatcttgtgtgcgtgtgtgtgttttgtgccatgtacttttgctatttctggttcacaactgatatagtctcttaagagaatcctactctttgttggcttgaaatgtccctgacttacgggatgtccataaaatacaattttgccacttactgacactttacttcat

SEQ ID NO: 7392 - DNA, 451 bp, Glycine max
agcatgtagtataataggtatgctcctttattataaatccaaaaggcataagttagaaagaaaatggaatcttgttttaaatatgaaccgcaaggaaatgtatttattaaagtactatccatcataatattatgtgaactctctatttaataataaattagaatgaatacatttcaatatcttttatattaatattttctttggatcattcgatattttcatatatttaagttgatttgatatgacataacaaaaattttaaacatgacaaaaaaataaaagacttaaatatgtttttcatatatataatattttttttttcatattgggatctatttttgctttccacctaatctttacagaattttgtctttgatacatgctgttaatatttatctattaagtaataacgtgatattacattattactgaaacatcattgtaatagtag

SEQ ID NO: 7393 - DNA, 433 bp, Glycine max
agctttcttcaatcgctgatacgggtgatatggtttgagaaatcttcggcgcctagtatatattgtcttctttccatgtttcatttggatgaagctcatgtttctctcacaaatagggcatgcatgatgccctttgacactatatccacttaaatttccatatgttagaaagtcattaatagtacaaaacaccattgatcgtaacctgaaggtctgttggagattcccatcctacacatcaaccctatcattccccgactgccttggacccgctatcatcatacacaggataatgtatttttgcttgatgcacaaccaaagagggaggttgtaaatcatcaccaaaataggccatgacctgtggtttgtgcttaagttaccaaaagaattcattccacccagagcaagaccaagccttaggtttcttggctca

SEQ ID NO: 7394 - DNA, 460 bp, Glycine max
  unsure at all n locations
agcttatcaaaggggaatggaccttttttgtcaacaattggcttcaccttcccactttctaagtaagggtttagtttcctcagaacttctccattggaagtaactacaaatctgaagccaggtggtgtaacagcacctgtgagtgccaccacactgccatcttctttcacagccttcactgccctgtcacattgccctgcaagtcaccagcaaggaatgaaacactatcaacaacatgagtagtataaattagtattgggggaagtgggattttgggaagaaaattttgtgattttcccttatagagtatattgttaacagggtgtgagcgttgtaaacactctagtaccgtgttcaattgctacagataaaaaaatagagtatattgtttcattgaatttcagaanattaagtatgatatacatgataacaaattttcttttccatctacctgtgcgga

SEQ ID NO: 7395 - DNA, 425 bp, Glycine max
tggttcctaacgctctgttcaggctatcccaaaatctattgttaccctaggatctctatcagacactatactagatggcacaccatgtaatctaacaatctcactaatatacagggaggtcaacttctccaaggaaaatctaatattaatgggaatgaagtgagcagacttggtcagtctatcaacaataacccagatagaatctaaacctctggggttctaggtagtcctacaacaatatccatggaaatactgtcccacttccactatggtatctccaagggttgtaacttccctgaaggtctctgactaaacatgcacacacaaactcactaacctctctcttcatgttaggccaataaaacatcatcttcaaatcctgatacatcttggtagcaccaggatggatgctaaagtttctccta

SEQ ID NO: 7396 - DNA, 390 bp, Glycine max
  unsure at all n locations
agcttcactctgatctgccatgttctttaaattaggatccatagggctttcaacaggtctacagttctgcatacctgtttcttctaaaatatcaagagcatacttcctctgagaaatcacaataccatctcctgattgagccacttcaataccaaggaaatacttcaaagatcccagatctttggtatggaaatgactgaataagtgctctttcagctggacaatcttagtagtatcattccctgtaatcactatatcatcaacatagaccattagatagacacattttccaggagatgtatgatagtaaaatacagagtgatcagcttcacttcattttagtccaaacatttgaacaacatgactaaatttaccanaccatgctcgagg

SEQ ID NO: 7397 - DNA, 411 bp, Glycine max
  unsure at all n locations
agcttgacatactaggcttaactttttttaccacctttccctcagaagcaacactacttcacttggntttctaatcttgcaatactcattgatgacgacgacccgatacgctttcacatctggcttcatcccatgactaaccatttccctcaaatgctaaacagcctcatcagacttccccacaatgcaaaaccccttcaacaagctagtgtttgtggcaacgtcttctttcaaaccattcaactgaatcctactcatcatcttcctggcctcgcccgcttcaccgctcaaacaaagaccttcaatcaaagcattgtaggtcacaacattcggggaacaccttccataatctctttcaagcactcaagcgcatctcggaaatcacctctctttgaataccctgcaatcaaa

SEQ ID NO: 7398 - DNA, 350 bp, Glycine max
agcttatgacaatttgaaattctttagttttttcgaagattaatttcgagcgtcgcgatatattataagcatgaatcggacctacgtgtgaaaatttatgaccatttgaattatttgagagcttccgctgttcaatttcgagcgtctcgacatattatgcgcctgaatttgacttgcctgtgaaggctatgaccatttgaatttctcaaagagcttccgatattcaacttccagcttctctatatgtgatccgcctaaatcatgacatccgagctaaaagctatgacaatttgaatttctcaaaagcttgcggagttcaatttcgagcatgtgcgtatactatgcgcccg

SEQ ID NO: 7399 - DNA, 559 bp, Glycine max
tgagttggtgaccattcacttttaagactttggtggttattttatttttaatctcaattgcaccatgaggaaaaaacattagtaataacaaaaggatcatcccatctagatcaaagtttgttggaaataagcttgagacaagagttaaacaagagcactttttagtcaatatggaactccttcctaaggatcctagagtcgtgaaatctcttcactttctccttgtaaatcttggatttctcataggcttctaagcggatctcctcaagttcttggaattaaagcttccttttcatacctacttcatcaaatgccatgttacaacccttcacttcccaataagcacggtgctcaatctccaccgaaaggtggcatgccttaccaaaacccactctatagggagacatcctcaaaggtaattagtaagcgatcctgtgggcccatatagcattctcaaagttcttgctccaatccttcctaatgggttgcactaccttcttgaaaacttgcttgatctttttattaaaaaacctccgcatgcccattagttcggggatga

SEQ ID NO: 7400 - DNA, 439 bp, Glycine max
agcttacaaatctatttttaagtcctttctctataaacgaaataaaataaaatctggacaagataagataagattggatgaaataaaatatggacgaaataaaatgtagatggaataaaatctagacgaaataaaatctagatggaataaaatctggataagataagatttgataaaataaaattgtctgctctcttcaagttgaagcccaatttcggattcaagcccaattgcttataattctcctgaaattaaattaaaaacacaaaattagtcaagtagggccaaatgataaaactgcataattaatttgacaattaaggctaatcagtaattaaaatggtgagaaaaagggttaaaaaataggagaaaataatgacacatcatcaagctaggttaatcttttgcctagttactcagctggacatgaatgtcggag

SEQ ID NO: 7401 - DNA, 109 bp, Glycine max
  unsure at all n locations
ctgatactggggacagatgtcgtacaggatgtcacgacatcacgcttcagaacatgccagatgtctttgactgtatgaacaaattaagcaagtanataacacaagagaa

SEQ ID NO: 7402 - DNA, 211 bp, Glycine max
  unsure at all n locations
gaagagaatgccatgtatcactgtatataccagacagtcagtgagagtaggaaattgttccttgtattatacgtagatcatantttgcttgcgactaatgataagggtatgctatatgaggtgaatcaatttctctcanagaaccttgatatgaaggatatgggagaggcatcttatgtcatangcataaagatccatagagaaagatctc

SEQ ID NO: 7403 - DNA, 250 bp, Glycine max
ccctatgctgggagggatgatcattccacaataacctcagtctgcgatctccgacactaatggaacgcctactaggtctttaaacatctgcacttccgacctcaagacaaataagactgtgccttccccagagttaagagtgaccatggactagatgatcggatcagcctatatactctatgctgcccatacgatggctgaactcatgtaccctctgcagccctcacagcacaacagaatggcatgattg

SEQ ID NO: 7404 - DNA, 407 bp, Glycine max
  unsure at all n locations
agcttattatataagataatntaattctattttatatcgtaaaaattatagttactatatatttaattaagtttgttattcatataagatttttattatctctttttattacataattcatattataacatttttttactattaaacatgtagatcaactaaggattatatctacttaacaaagtattgccaaattttaattttaaatatataattatgttaaattttcggtcaagataaaaaaaatatatattttctcatgaatataaagaactttgtaacttctcaatgaaaatgggccctgcttctttagttcactcaattcaaattaacttctttcttttcttactttntatctatctttnttaactgaaaaataaagtaatgtttttttatttctaatcaaa

SEQ ID NO: 7405 - DNA, 389 bp, Glycine max
taaacattcaacttcgagcgtctcgatatattactggacttattcaaacatccgagtaaaaatttattgcggtttgaattagctcagagatacaattatcaatttcgagcgtatcgatatattacgggactcaatcggacatccgagtaaagagttattgtcgtttgaactagttcagagattcaacattcaatttcgagcgtctcgatatattacgggactcaatcagacatccgagtaaaaggttattgtcgttttaactagatcagagattcaacattcaattccgagcgtctcgttatattaccggactcaatcgaacatccgagtacaaagtgatcgtcgtgtgaattggcacagaggttcaacattcaatttcgagcgtgtcg

SEQ ID NO: 7406 - DNA, 416 bp, Glycine max
  unsure at all n locations
agctttgagccaactcanacgatattttctttntactcggatgtctgattgaggcccgtaacatatcgagacgctcgaaattgaatgttgaacctctgagccaattcaaacgacaataacttttttcacggatgtctgattgagtcccgtaacatattgagacgctcgacattgaatgttgaacctctgagccaattcaaatgacaataactttttactcggatgtctgattgagtcccgtaacatatcgagacgctcgaaattgaatgttgaagctctgagccaatacaaacgaccataactttttactcggatgtctgattgagtccctgaacatatcgagacgctcgaaattgaatgttgaagctctgagccaatacaaacgaccataactatntactcggatgtctgattga

SEQ ID NO: 7407 - DNA, 420 bp, Glycine max
agcttgtattatagtctatattgttatgttacgaagaaagtaaagttagtactttttttgaagaggagtaaagtcagtcctaaatttcaataattgtgaactagttcagttttaaaataaggacacaagtgtaccctaaaattaagaatcaataatcgacagataagaaagcatacgaataattcagtataaaaaaagaaggtataggaataaattacttttgttaatgtttcaaattgtttgactcctaataaaattaaggattaaattttttattttttaatctgaagaataaaactaatcaatcacatcaatcttgaaaaataaattggcattcaatatattgtaaaatttacatcataaataaagattttatttcttttctcttgcaaagtaaacttgtattccatgtttaattta

SEQ ID NO: 7408 - DNA, 414 bp, Glycine max
  unsure at all n locations
agcttggaacatatagactgtttttgggttctcttanggacttaaacaaaatatccgctggctggtcattaaaaccaaggaactcactgacgatctccttggacagaagcttctctcgaatgagatgacaaccactctctatatgctcagccctttcatgaaagactgggtttgaggccatatgaacagcagcctgactatcacaatacaccttcatttgcaactcttcacatgacctcaattcttgcagaaatggttgaatccacatgagttcacaagtaaccatagccatcgatcgatattcatcttctgcactagaccgagctacaaccgactgtttgttgcttttacaagagacaagagatactccaatgaagacacagtagcgtgatgtagacctcctatccatgggac

SEQ ID NO: 7409 - DNA, 451 bp, Glycine max
  unsure at all n locations
ctcgtttccatattcaaatcaaataagtgtttcgttagttgttcttttatcaagtccatgaaaaaatatctaagttcatttggtttttgagaaagtccttcattgtttttcattctcaaatgttttcaaaagaaatccttttgttgtgttctgatccaaaaataagtttcacaaatactggttcatgattctttccaaaacatgttatgttcaagacnaaatttctatttaattcctaaaaaagagttataatttataactatactaacagaatatcaaagcacgcacaaattagtcaaaataaacttgcgtaactttctcaaaaaattaaaaacaataaataaggtaataaagtattgaaatttaatacaaagcgataagtaaacacatagacaagttcacgaatatttgaagatcatggctaaggagctcagtctctttgacgatcatg

SEQ ID NO: 7410 - DNA, 468 bp, Glycine max
gctaatggagctcatcatattagtctccctggccctctttttctctaatgtaagatgaatgggtttggattatgaaaaatgggagtgaaaaaataaaattcaatttcatccatattaaatatgtggaaattcatctaatgttttttttaattatttattcatatactttaaataaattataaattaagttattaattatagtttaattctatgtatgtaatgtatattttcataatgaataataaataacttatatatttagttaaatgtataaattttaattttgttataattagtattatgattataatattatttatttaactattaaaataattattctatatctttatgattataaaaaaagtaaaatataaaaataattagataattatataattaaaaattacatgtaaatatatacaaaaataattatagatagacttatagttatatttattaataata

SEQ ID NO: 7411 - DNA, 454 bp, Glycine max
  unsure at all n locations
cctaagggaggacctttcagtttggagattatcttatctttgcctataggttggacctcccagaagagtatggagtcagcaccacttttaacatttctgatttaactccttttgcaggtggagctgatattgaggaggaggaactaacagatttgaggtcaaatcctcttcaaggggaaggggatgatgcaatcctccctaggaagggaccaatcactagaaccatgagcaagaggctccaagaagattgggctagagctgctgaagaaggcctaaggttctcatgaaccttanggtagatttctgagcccatgggccaaggttgggtccaattatctttgtacatattagactaggatgtcattatatttggtccttgtatatagggctccatattgtaggtagggtaccctagaaatataggatttttcagcccttgtatttttgggcacct

SEQ ID NO: 7412 - DNA, 430 bp, Glycine max
  unsure at all n locations
catgcatctgcatccctaanaatcatgttaactgcatttattntctacatctaatatccagtcgtgtcgatttgggatgactgaccctctcgatgagtcgatctcttgctttctcataagggtgaacccttgggtactagtaccctcacctccagaggactacatgtcctcgccttcagagggccacacgccctcgccttcaaaggacttcacgtcctcaccttcagaggactacacgtcctcgccttcaaagggtcatgtacctttaacttcagaggactacacgtcctcgccatcaaagggtcatgtaccttcacctttgtagggcaacacgccctcaccttcagaggactacacgtcctcgcctttagagggccgcacaccctcgccttcagaggactacacgtcctcaccttcagaggactacacg

SEQ ID NO: 7413 - DNA, 417 bp, Glycine max
  unsure at all n locations
agcttcccgcatccacattnggaatgatcttanttctgccttcattaggtaatatcagtacaacaccgatatggctcccaaccgaacccagctgcataacatgagtaagcgagagcatgagtctttcaaagagtatgctcaacgttggagagatctagcagcacaagtggcccctcccatggtcgagagggaaatgattacaatgatagtggataccctaccgtgttctactgtgagaagttagtgggttacatgccctccagcttcgcggacttggtattcgctggagaaaaggatcaaagtgggtttgaagagggggaaatttgattacgtctcccccgccggtacgagcaataggaggactagagtagctggagcaaagaagaaggagggagatgcccacgccatcacttcaac

SEQ ID NO: 7414 - DNA, 323 bp, Glycine max
gattaatacctcccaaacatcaatggtaagaagtggctgcaagaaattaagataaaatcacatcagaatttaccagggaaatgaactcattagacccaactatcattcatatttcaagataagtaaggaacaataatattattactacttacataatagcctccccaaacaagggggttcacagcattgggactcttgagcaccactagcttgttggcctcatctggtgaaggaggatttgctgcattttccccatcaaatttgcttgctctatctatatttcatcaacaaaaaagtgaatgaacaagaaggatatgtaactc

SEQ ID NO: 7415 - DNA, 357 bp, Glycine max
  unsure at all n locations
tgccttgccccttgatatattngagggacttatggttattatgaatgacaaattccttgggataaaggtagtgttgccatgttttcaaagcccgtactaaggcatacaactccttatcataagttgaatagttaagggtaggaccacttaacttttcactaaaataagcaattggatggccttcttgcatcaacacagccccaatcccaacatttgaagcatcacactgaatttcaaaatatttttgaaagtttggcaacgcaagtatggggcattagttagctttagcttaagaacatngaaagcttcttcttgtttctctccccatttgaaaccagcatttttcttgagcacttc

SEQ ID NO: 7416 - DNA, 375 bp, Glycine max
  unsure at all n locations
agctntgaccaaattcattctatgtttttctttttactcggatgtctgagtgagtcccgtagtatatcgagacgctctaaattgaatgctgaagctctgaccaaattcaaacgatgataactttttactcggatgtctgattgagtcccgtaatatatcgagacgctcgaaattgaatgttgaagctctcagcagattcagacgataataaattggtactcggatgtccgagtaagtcccgtaatacatcgagacgctcgaaaatgaatgctgaagctctcatcaaattcctacgacaatgattctgctagtcagatgtctgatcgagacccgtactttatcgagacgatcgacactgattctgaagctctgagc

SEQ ID NO: 7417 - DNA, 439 bp, Glycine max
  unsure at all n locations
gatccttaagcacctgcggctgcagctatgactcgnttcttgggtattttttctatatgatgatgaggatgggattttgtgaaagatggagaaaatggatccatggatgcctttctagtgcaactatatcaattttgatcaatgacagccctactagagaatttgtgcttgagaggggactgaggcaaggagatccccttgcacctttcctatttaatatagcagctgagggactcactggtttgatgaggacagttgtctccaaaaaccttttcagcagctataaagtcgggaggcaaaaggaggagattaacatcttgcagtatgcagatgatacactgttttttggaactgcaactatagctaatgttagagtcatgaaatctatcctcagaattttcgagttggtttcaggactcaagattaactatgctaaaag

SEQ ID NO: 7418 - DNA, 414 bp, Glycine max
agcttataggatgtgatcggactattatgatcacttctgtcgccgcatagataggtaaatgggcttctctaattgctgagatgtgcaatgatccaggatcattcagcataccttgtatcatagggaatagcaagcttgacaatgccatgctagatctaagagcttctgttagtggtatgcctctgtctatttttaattctctatctttaggtccgttgcagacaactgatgtggtaattcatttagctaacagaagtgtcgcctatgctgttggtttcatagaagatgtcttaactagagttggtgaactaactttccctgttgataattatatcttgaatatggaagatggattttctcagagatcagctcccatcattctaggcagaccctttatgacaactgctagaacta

SEQ ID NO: 7419 - DNA, 382 bp, Glycine max
  unsure at all n locations
agctatgaggaaatncaaattaaattctttttaactcgnatattcgattgagtcccgtaacatatcgagacactcgaaatagaatacagaagctgtgagcaaattctaacgtcaataactttttacaataatgtccgattgagtcacgtaatatatcgagacgctcgaaattcaatgcagaagctctgagcaaattctaacgacaataattttttacttagatgaccaattgagtcatgtaatatttcgagacactcgaaattgagtacagaagctctgaggaaattcaaatgaaaatacatttttactcggatatccgattaagtcctgtaatatatcgagaaactcgaaataaatacagacgctgtgagcaaattctaac

SEQ ID NO: 7420 - DNA, 426 bp, Glycine max
  unsure at all n locations
agcttccctgttnntgctttaacagttgatgtctttattcatatgagaatatgccttttctttntattgtaaagatgaaatctcatacaattgtctaatttccatcagaaggcaatgaagatgccaatcactgtggaaggaaatgagctgagtagatttagtgacccgccaggagatgcctacttggatgatttatttcatccattggataaacaacctgnggaggttgtagcagaggcgtccacttctacatccacttcacatatgactaaaggtaatgcatctgcaattgatggtgtgaaaaatgacttggctaaagagttgagagctacaattgctcgaaagcaatgggagaaggaaagtgaaattggacaggcaaacaatggcgggaatcttttgcaccgagtgatgataggcgttctaaaa

SEQ ID NO: 7421 - DNA, 419 bp, Glycine max
  unsure at all n locations
agctnggatttcctttagtagggaatctattcttttattatggagccaaaccaagtcaccctcattaagaactagctcttttcttcctctatngcctttagttgaatacacctttgtttggttctctatttggttcttaaccctctcatgcatcttctttacaaattctgacctagattccccttctttatgtataaaaaaagtgtccagtgggaggggaatgaggtctaacggtgttaggggattgaacccatagacaacctcaaaaggggactgcttggtggttctatgaacccccctgttgtaggcaaattctacatgagaaagatactcatcccaagacttatggttgcctttcagaagagcccttanaagggtggataaagacctattcactacctctgtttgcccatcagttt

SEQ ID NO: 7422 - DNA, 468 bp, Glycine max
  unsure at all n locations
ctaagctagctaacacacctctctaatagctaagttcacctcctttaaatatatgctagagcttagctacataccccctataatagctaagctcacccgcatgacaaanaaacatgaaaataccaaaaaaaaagtccttactacaaagaatactcaaaatgccccgaaatacaaggctaaaaccctatactactagaatggccaaaatacaaggcccaaacgaaggaaaaacctattctaatatttacaaagaagagtagatccaaccttgacccatgggctcaaaaatctaccctaaggttcatgagaatcctagggccttctttagtagctctagcccaagtctcttggagtcttctatccaatacccttggggggtaggattgcatcagcagctataggcaggatttatatccattacttgaaacaccacattgcaagtgtgggggcctatctgaatgggaatgt

SEQ ID NO: 7423 - DNA, 422 bp, Glycine max
agcttgctgatacaattattaggggattgtttagtactggcctataacaaatagtccaaaggaggttatgttcctgggtgagttggaagaagtcttggaagcaactcaacccccagaatttcagcgttgtatggtgccattgtttcgtcgcattgcacgttgtttgaatagccctcattttcaggtttgaatttttcaatactttcctctggctccttttctgtttctcctcttatttcatgatgaaaatacacctgaatttcaaattaattctctctggcaacttccttcatactgattacctgaatcctatatctcaattcacttcctctagttgataagttgttttaattagcaagaaaaggactaacctttttgcatcatcctatagctaaatgcatattgtcttatggttttgaagt

SEQ ID NO: 7424 - DNA, 422 bp, Glycine max
  unsure at all n locations
agcttagaattatacaataacactttttgtttctccatgaagtccttcttaattatcatgctatcatggaacttcttggtcttttctttgtagaacttggcattctcatacgcttctaggcggatctcatctaactcactcagttgcaactttctttcctcaccagcttgatccatagagaagttgcaagtcttcactgcccagtatgctttgtgatgtaatcctaccccccaagggcattggatagaagactccaagaagattggaccaaagatgcaagagaaggccctagggttctcatgagccttagggtagattttgggcccatgggttaagtatgtgcccacttatctttgtacatattagattaaggtttcattaattntgggtcttgtatttagggctccataatgtaggtaggg

SEQ ID NO: 7425 - DNA, 457 bp, Glycine max
  unsure at all n locations
taccctgatgaggatgtcccatatgttctatttctggactgattcatttgcttccaaagtttcatggccttgcaggtgaagacccgcacaaacatttgaaagaatttcacattgtctgctccaccatgaaacccccagatgtccaagaggatcacatatttctgaaggcttttcctcattcattagagggagtggcaaaggactggctgtattaccttgctccaaggtccatcacgagctgggatgaccttaagagagtattcttagaaaaaattttccctgcttccaggaccacagccatcaggaaggatatctcaagtattagacaactcagtggagagagcttgtatgagtactgngagagatntaagacactatgtgccagttgcccccaccatcagatttcagaacagcttcttctccaatatctttatgaaggactcagtaatatggagag

SEQ ID NO: 7426 - DNA, 450 bp, Glycine max
  unsure at all n locations
actgcaacattataatgacccnctcgttcatttttttaacagcagaataattatgatatttcaagcaacagatataatcccagttggaagaatcatccaactctgagatgggcaagtcctccacaacaacaacaatctgtccctcctttccagaatattgctgatccaagcaggccatatgttcctcctccaatgcagcaacaacaacagcaatcacaacaaagacaacaagcaattgaggctcctcctcaaccttccgtagaagagttagtgaggcaaatgaccatccaagatatgcaatttcagcaagagacaagagactccattcagagtctgacaaatcagatggggcagatggctactcagttgaatcaagctcagtcccaaaattctgacaaatggccttcacaaactgtggaaaatctgaataatgtgagtgtcatcaccttg

SEQ ID NO: 7427 - DNA, 476 bp, Glycine max
tccttgagaagattcctaaagaagctagagcttagctacttacacttttctaatagctaagctcacctccataagatgagaagccagagcttagctacacacccccaataaaagctaagctcaccctcatgacaaaatacatgaaaaaacaaaaaaagttcctactacaaagactactcaaaatgcctcgaaatacaaggctaaaaccctatactactagaatggccaaaatacaaggcccaaacgaagaaaaaacctattctaatatttacaaagataagtgggctcatacttaccccatgagctcgaaatctaccctaaggctcatgagaatcctagggccttcccttggatctctggcccaacctacttggagtcttttatccaatgcccttgcgggataagattgcatcaatatggaagccttaagttgtcacaactcaacctcccaatttcaaaatgtatgactaacacag

SEQ ID NO: 7428 - DNA, 454 bp, Glycine max
aacaacagaagctcttgagaaatcaaatggtatatttttcacacggaagtccgattcaggtgcataatatatcgagaccctcgaaattgcacaacggaagccctcaagaaagacaaatggtgataacttttcaaacggaagtccgattcaggtgcataatatatcgagaagcttgaaattgaacaatggaagctctcgagaaattcaaatggtcataacttatcacacggaagtccgattcaagcgcataatataccgagacgctcgaaattgcacaacggaagccctcaagaaattcaagtggtgataacttatcacacggaagtccgattaaggtgcataatatatcgagacgctcgaaattgaacaacggaaggtgtcgagaaattcaaatggtcataacttatgacacagaagtccgattcaagcgcataatatatcgagacactcgaaa

SEQ ID NO: 7429 - DNA, 420 bp, Glycine max
agcttgaaattgaacaacggaagctctcgataaactttatggtcataacttatcacacgaacgtccgattcaggcgcataatatatcgagacactccaaattgaacaacgtagggtcttgagaaattcaaatgttcataacttgtcacacgaaagtccaattcaggcacataatacatcgagaagctcaaaattgagcaacgaatgctctcgtgaaattcaaatggtcataacttgtcacacggaagtctgattcaggcgcataatatatcgagacgctcgaaattgaacaaccaaagctctcgagaaattcaaatggtcataacgttttacacggaggtccgattctggcacataatatatcgagaagctggaaattgaacaaagaaagctctcgagaaactaaaatggtcataactta

SEQ ID NO: 7430 - DNA, 409 bp, Glycine max
  unsure at all n locations
cccgacagnngggtattattgaagcttcttccttatcgacaaagctcagtgaagagtgctcaagcagtgactggtaaattgtccaagcgcttctatggaccgtctcagatcatagaacgcgtgggtaaggtagcctatcgtttgaagcttcctgatggggctcgtatccatccggtatttcactgttcccttttgaagccattccacggagaccccattcttgattcacccaattcactgccgacacgctttattaacggtcaaccgatgcttacaccgcttgccattcttgattatctgcgacataaagagagggacacgtgggaagtattggtccantggcatggacttttcactgatgaatcctcttgggaggactgggaacagcttaagcaggatcatcaccttg

SEQ ID NO: 7431 - DNA, 458 bp, Glycine max
cgcttggagtttccaagtgccaactcgtcttcttctttattctagtcttcttctggcttcaattcttcagtgggctttccttctgtgtccagcatcttgggatgttcccagcctttgatgacagctttccaggttctgctatccagtgatttgaggaaggccaccattcttgctttccaatattcatagttgcttccatcgagaattggtggtctgttcactggtccgccttctttctccatgttcatcagaatttatctccctagatctcactctgtgatttcgagtgttggctctgataccaattgaaattctgataccaggggacagatgtcgtaccggatgtcacgacatcacgcttcagaacatgcagaatgtatgtgtccgtatgaacagattaaacaagtaaataacacaagagaattgtttacccagttcggtgcaacctcacctacatc

SEQ ID NO: 7432 - DNA, 411 bp, Glycine max
  unsure at all n locations
agctntgaganaaatataacgacttatactttttctcggatgtctgatcgagcccagtaatatatcaagacgctcgaaattgaaaatggaagcactaagaaaagtcaaacgacaataacttttgactcggatgtacaattgtgtcccgtaggatatcgtgacgctcgtaattgaaaacggaagctctgagaaaaatcgaacgataataacttttaactcggatgtccgattgagccctgtaatatatcgagacgctcgaaagtgaaaacggaagctctaagaaaagtcaaccgacaataacttttaactaggatgtccgattgagccctataatatatcgagacgctcgaaatggaaaacggaagctctaagaaaagtcaaacgacaataacttttgactcggatgtccga

SEQ ID NO: 7433 - DNA, 418 bp, Glycine max
  unsure at all n locations
agctntagatagatttatcagtatataagtttactttttgtatgtttaaatgtattgcctgtaatatttttacatttctctagttgtattccctgtagaatatggactaggttagtacgtctcatcttatgaatgttatcccactttctctttcttctcatgtagtttttgcttaatttttttggcttttgctttaggttgttgctcacatgatgcctgaccttcctaatgttggtgttgaaagggacatggaaagtttccgggagttttttgagagccccatgtttagagcagatgggcttaaaatatatcctacacttgtaattcgtggaactgggctttatgagctctggaaaactggcaggtatatatcanatgttttcttattattggactgctttttcctcaaacatctcaa

SEQ ID NO: 7434 - DNA, 379 bp, Glycine max
  unsure at all n locations
atcatatcttccgnaatacttatcacctctatcatatctaataattttcacatttatgtctaattgtcattttacttcattgtagtaaatttctaaggaatccatttcctaagaaatctcgggcaataaatagacataaccgtaacgtgaataatcatcaataatggtgataaagtatcattcctttttgaaagaactaacaccaaaaggtccacaaatatcagtatgcacaatttcaagaagttgagtgcttcttgtagctcttttctttgtatgttttgcttggttttcccttaatacaacccacacaaatatttagatccgtaaaatctagataaggaagaatttcattctttattaatctttccatcctttctct

SEQ ID NO: 7435 - DNA, 417 bp, Glycine max
  unsure at all n locations
aacaaaataaagggactgagttgaatatttaaaatatacacatcaaaatcaatcaataatgaagttaccatgtaataatttataaatgatccccctttctgtataaaccttgcaactgaaaatgccaagtcttcagcaggtcgatgaggaacaggacctccaaactctgtaaacctgcaagcataaaagaggaatagaggcaatgaataatcacttgatatctctagcttgaatgattcttattcttatggaaaccaaagaaataagaaacaaggcatcaataccagccagtccaagcttctgtccacatctttggcttgtaagccttatttggagagaaataatcacaatagaagccattgcaagtgttaatctgtgaaacattntattacatttgaaattagaagtngaatactt

SEQ ID NO: 7436 - DNA, 414 bp, Glycine max
  unsure at all n locations
cgctgcagctatatattactgngattctattancttagtcaattgntccttggatatagcgaagaattcattttgcagccttgagatgagtagtggttggagtttccatgtatcgactgatgagtccagtagcatatagaatgtctagtcttgtgcacatcaaatatcacaaactatgtaccaaactcttgaaatttgtagcatccaccttttttgcttcgtcgaactttgataacttcatttagcactccacttgtgtaccaactggcttggagctatccatcttgaattttttgagcatctcctttgcatatttttgttgtgaaatgaagatttcatctttcttctgctttacctcaatgtcgacatagtatgacattagtctaatagtggtcatctcgaactctttgatca

SEQ ID NO: 7437 - DNA, 404 bp, Glycine max
  unsure at all n locations
tgtcccacanacctctctaacatctggtccatgttgggtttattataatggtcttttcttgtggctttgttggccttgcggtagtcgatgtacattcttcagccaatgaaaatccttgttgggattaggtcattcttttcaatccgaatgactgccatgccccctttctttggtaccacctggactaggcttacccaaacactgttggaaatggggtagataagcccagcctctagaagcttgagcacctctttccgcacctcttccttcattgatgggttgatccttctctggggttgtcttactggtctatagtcttcttccatgattatcttgtgcatacagtaagcagggttgattccttttagaattgatatgtgccaccctatttgcctcttgtgtct

SEQ ID NO: 7438 - DNA, 441 bp, Glycine max
cccatgtgaattgcttacatagatctgttatatcccactaattgttctccttttgaagttgtttatggttttaacccactaactcctcttgatcttttgcctatgcctaatgtttctgtttttaagcataaagaaggtcaagcaaaggcggactatgtgaagaagcttcatgagagagtcaaagatcaaattgagaggaaaaataaaagctatgctaaacaagccaacaaagggagaaagaaggctgtcttcgaacccggagattgggtttgggtgcacctgagaaaagaaaggtttccggaacaaaggaaatcaaagcttcaaccaaggggagatggaccatttcaagtgcttgaaagaatcaatgacaatgcttacaaagttgagctgcccggtgagtataatgttagttccaccttcaatgtctctgaattatctctt

SEQ ID NO: 7439 - DNA, 390 bp, Glycine max
  unsure at all n locations
cccgactgcgataaggtttagacacatgtttggtttttttctacctccttcaacatgagcttatgccctatgttggtcataaaagtgatgtcaccaatgcctactagttttcttgtgacacaatttcccatttttaccgtaccaaagtcacccattttgataggttgagaaaaatcctccatgtgggctaacgtggaaagatgcacccgagtcaacaatccatgaacaatcatcacatgcatcattaagatagttgtcttctccaatgaggaatacatcatcatctagatctgctgcaatgaccatagtgctcttatcctcctttntcttagaatcaatttggtctggcttaacaatgccgattttttgtctctcttgagatgtcgacat

SEQ ID NO: 7440 - DNA, 404 bp, Glycine max
  unsure at all n locations
agcttgacgttaatctcattttgttttttatgaccttgngagaggtttaccaaggatgtcatacaaagatgaaacaaattaaaacctctttttcaagcaaaaactttgtttcctcaagaccacttgaactattacatattgatctgtttggctacaatgaatgactacattagatggacatgggtaatgttccttgctcataagaatgagtcctttgaggtattctttaaattttataaaagagcttaaaatgaaaaaaaagtatgcgttacttcaattagaagtgatcatggtggagagtttgaaaatgagaactttcgtctattctatgaagaaaatggaacttttcataatttcttcatgtcataccctaatttcattcggggacgaatgtttgtcaacat

SEQ ID NO: 7441 - DNA, 420 bp, Glycine max
  unsure at all n locations
cgacaataactntctactcggatgtttattttgttcccgaatatatcgaaaagctcgaaattgaatgttgaagctctaagcaaattcaaacgacaaaaactttntactcggatgtctgattgagtcccgtaatatatcgaaaagctcgaatgtgaatgtagaagctctgagcatattcaaacgacaataactttttactcggatgtctgattgagtcccgtaatatatcgagatgctcgaaatggaataccgaagctcggagcaaattcaaacaataataactttttactcggatgtccgattgagtcccgtaatatatcggaacgctcgaaattgaatgttgaagctctgagcaaattcaaacgacaataacattttactcggatgtctgattgagtcccgtaatatatctagacgctc

SEQ ID NO: 7442 - DNA, 220 bp, Glycine max
tttgtactcaatcagacatccgagtcaaaagttattgtagtttgaatctgctcagggcttccgtattccatttcgagcgtctcgatatattacgggactccatcggacatccgagacaaaagttcttgtcgtttgaaatttctccgaactctcagaattccatctcgagcgcctcgatatattacgggactcaatcacacattccaataaaaagttattg

SEQ ID NO: 7443 - DNA, 353 bp, Glycine max
  unsure at all n locations
actcagcttttatccaggctcatcttggtggtgaagctccttcttctatggcttattccctagaggatggcgcctcctctcacctcttctcctttgtcttccgctgcatttccatggcggaaaatcatcattaaaggacctcattgaagctcaaagatccagccttcatagaagccccacaagcaagcttccatcactgctgttgctgttgctgagggctggaccatctgaggatagggtgattcttctatccacggttgtatctgttgctggagaggtcataattgttctgctgtggttgattntgcttctgaggttgaggaggtctattgtaaatatttgcagcataagct

SEQ ID NO: 7444 - DNA, 416 bp, Glycine max
agcttctcgatatattacgagactcaatcgttcatttgatgaaaaagttattgtcatttgaatttgttcgaagcttctattttcaatttcaagcatcatgatatatgacgggactcaatcggacatccgagtaaaaactaattgtcgtttgaatttcctcagagtttctattttcaattttgtgagtctcgatatactacacgattcaatcggactttccagtaaaaatgtattatcgtttgaattttctcagagcttctattttcaatttcgagcacctagaattattaagggactcaattggacatccgagtcaaaagttattgtcctttgaatttcctcagagcttctattttcaattctgagcgtctcgaattattaaaggactcaatccgacatctgtgtcaaaagttaat

SEQ ID NO: 7445 - DNA, 411 bp, Glycine max
  unsure at all n locations
agcttgtcaaaaagggatgtctgttttaatctctnttcaaagtaaaaacgttgtttctacttcaaaaccctttgaactacttcacatagacttatttggtgcctctagaactatgagtttgggtggtaattactatggcttagttatagtagatgattactcaagattcacatggactttgtttttgaaaaccaaagatgaagcttttgatggtttttgcaaacttgccaaggtcattcaaaatgaaaaaaggtcttaacattgtttcacttagaagttatcatggaggtgaatttcaaaatgagtctcttgaaatgttttgtgaagaaaatggaattcaccacaacttttctaccctaagaacacctcaacagaatggtgtcatggagaggaaaaatagatcccttgaag

SEQ ID NO: 7446 - DNA, 401 bp, Glycine max
  unsure at all n locations
tganatggaacaacggaagctctcaagaaattcttatggcttatatcttttcactcggatgtccaattcatgcgcatcacatatcgagatgctcgacatagaacaacggaagctctcgagatattccaatggtcataacttttcactcggatgtccaattcaggcgcatcacatatcgagatgctcgaaattcaacaacggaagctctcgagacattcaaatggtcataacttttcacacggaggtgcgattcaagcgcacaatatatcgagacgctccaaattgaacaacagaagctctcaagatattcgaatggtcgtaactattcactcggatgtccgattcangcgcatcacatatcgagacgctcgtaattaacactgggagctctcgacatattc

SEQ ID NO: 7447 - DNA, 388 bp, Glycine max
agcttctattttcaatttctagcgtctcttatattatgcgcctgaatcggacctctgtgtgaaaagttatgaccatttgaatatctcgagagcttccactgttcaatttcgagtgtctcgatatgtgatgctcctgaatcggacatccaagtgcaaagttatgacccttttaatttctcgagagcttccgttgttcaatttcaagcatctcgatatattaatcgcctgaattggacatccgactgaaaagttatgaccatttgaaattttggagagcttccgttgttcaatttcgagcgtctcgatatgtgaagcgcctgaattgacctccgtggaaacgtttgaccattgaattctcgagggcttccgttgtcaattacaacgtctc

SEQ ID NO: 7448 - DNA, 555 bp, Glycine max
  unsure at all n locations
tgcttctacaagattcagattcaatgcataaggagtgataagtatgcagatctgataaaaatggatggttcctaccatgaagaacaaaatcaaaatcaaacatataatcatcaacaatctgatcaattatctcaacacgaaaaatagaatgatcctcagatggatgtttcatggcatcaagaatgttaaaatgaacaacaatatcaccaaattccatagacaatgtgccagcataaacatctatcttggttcgggctgttctcataaatggcctgcctaaaataattggaactgaaccatgggaaaatccctcttccatattaagaacataattaatcaacaggaaaaataagctcaccaacccgaaccagcacatcctctatgaaaccttcggggtaagcaacacttctatttgccaaatggatcacaacatctgtagattgcaaaggtccaagagataaagaattgaaaatggacaaaggcatgacactaactgatgctcctagatctagcatggtattctcaaantactgttcccaataatgcaaggtatac

SEQ ID NO: 7449 - DNA, 487 bp, Glycine max
ttcagccatttcaaacgatcataactttttactcggatatcatattgagtcccgtgatataacgagacgctcgaaattgaatattgaagctctgaactaattcaaatgacaataactttttactcggatgtctgattgaggcccgtaatatatcgagacgctcgaaattgaatgttgaagctgtgagccaatttaaacgacaataactgtttactcggatgtctgattaagtcccgtcatatatcgagacgctcgaaattgattgttgaacctctgagcgaattcaaaccacaataactttttactcggatgtgtgattgaggcccgtaatatatcgagacgctcgaaattgaatggttaagcttttagccaattcacacgacaataactatttactcggatgtctgattgagtcccgtaatataacgagacgctcgaaaatgaatgttgaagctctgaaccatttcaacgaccataactttttcct

SEQ ID NO: 7450 - DNA, 387 bp, Glycine max
agcttcaacattcaatttcgagcgtctcgatatgttacgggactcaatcagacatccgagaaaaaagttattgtcgtttgaattagctaagaggatcaacattcaattttgagcgtctcaatatgttacgggactcaatcagacatccgagaaaaaagttattgtcgtttgaattagctcagaagttcaacattcaatttcgagcgtctcgatatgttacgggactcaatcagacatccgattaaaaagtcattgtcgtttgaattggctcagagcttcaacattcaatttcgagcgtctcgatatattacgggactcaatcagacatccgagtaaaaagttattgtcgtttgaatttgctcaaaggttcaacattcaatttcgagc

SEQ ID NO: 7451 - DNA, 375 bp, Glycine max
atgctgcctacatctacaacacagcttctataccttcgctggcaaatcagccacgacagaatgattatctacctcttcggcgatatgtacggtcccagatggacgaatcatgcctaccttatatggtcacatccttcaccataacagcagcaccaacaacaaccttattttcgaaaagtagctggcccacgcagaccatacgttcctacaacaatccagcaacggcaataacaatatccccacaaacaacacacagttcaggctcctccgcaagcttaccttgaagaacttgtgaaggtcctctgtaaacctcacaatctctcaaaatctcatccaaagctaacaaaaatagattgctatgcgagctcaactata

SEQ ID NO: 7452 - DNA, 531 bp, Glycine max
tgccatcttatcaaagcaacattcttaatctatatgcaacagcgagaaaagaaagcacaaagaggaaattcacaaaaccaaatgagataaacatcaatccacatttggtttctggagaatataagagaaaacacccgcttcactcaggcagaggaaaacctctcaaaggcgcataattctcatgcaggcaattgtttcatcacaattccaataagtgatatgtcataaatcaatttttgcaagtcatttaccatcaaatcaaagataaattgcataatcatcatggatcattagggcttttacgatttggactaactttgaaagacatattggtttttctggatattcaaaaacaccttgagaataggaaagcaacataaaaacaaactgacaatttaaaataaatcattgcttcctatcccttcccattttaaccaaattatgactacttactataccaaaatcttcacttataataattaccaacatctgtatacagtttataacaatgcagacatttatctacttcca

SEQ ID NO: 7453 - DNA, 616 bp, Glycine max
taaacacaattatgcaacaaaaaatagaagtttccataagatataataaatttaaaatgtgctttctaagttgatacctaacatcataataacataagctgattgcaatttcaaagttctttatactcttagaaaaaaggtccatacactcttaatttctccttttctttcaaatctcatgattaagagaacacattctcaaatcaagaaaacaaaatcatatgattgaattgaatacttatcttctaatgatgtttctctgttcacaaataaaaccaaatggttgaacttagttacgtaataatcatatcatgaaatagcagaaaaaggtcagccatcataaattgaattaatcatttttacaccctaagtagtaatcataacaatcatgtctaatagagctgctaaatatttagctcacctctctgccatctatggaattcagtagttgaacttagatactcgtcctattaatggctccaaagatagtcttctatctttataaatcaataggaagtacgaagacaaaaaatcaatagaaaatagcataggtacagactatccatgataataaaaatacactctctagagaacaaaaacaagaataacagaattt

SEQ ID NO: 7454 - DNA, 513 bp, Glycine max
  unsure at all n locations
agcttcaaaattgcaacaaaggagttgttcttgtaaaaaatattcgtcttcaaactcttagaggtgactttgagcgtttgtttatggaggagtccgagtcaatttctgattatttttctcgagtattggccgtagtcaatcaacttaaaagaaatggtgaagatgttgatgaggtgaaggtcatggaaaaaatacttcgaactttaaatccaagttttgacttcattgttaccaacattgaagaaaacaaggatttaaagaccatgacaattgagcaactcatgggttccttactagcatacgaagaaaaacaaaagagaaaaattaaacaaaaggaggctacggagcaactactacaactcaacgtaaaggaagcaaactatgcatattacaagagccaaagaggacgaagtcncggccaagatcgtggacgttgacgatgacatggatgagaacgaagaggtggttacaacaaccactccaacaaattcacaatggagaaagaatttgaat

SEQ ID NO: 7455 - DNA, 457 bp, Glycine max
atactcagcttgtgcatccaataccctgatgaggatgtcccatatgttcttaaagcaggactgatacatttgcttccaaagtttcatggccttgcaggtgaagacccgcacaaacatctgaaagaattccctattgtctactccaccatgaaatccccagatgttcaggaggatcacatatttctgaaggcttttcctcattctttataaggagtgacaaaggactggctatattaccttactccaaggtctatcacgagctgggatgacctcaagagagtattcttagataaaattttccttgcttctatgaccacgaccattataaaggatatttcaggcattatgcaactcattggagagagcctatatgaaatattgggagagatttaaaaaactatgtgccacgagccctcactacccggatttctgaacagcttctccttccatattttta

SEQ ID NO: 7456 - DNA, 506 bp, Glycine max
tctatagaagggtcgttcctaatttctctacaattgcatcacctctcaatgagctagtgaagaagaatgtggcatttacctggggtgaaaagcaagagcaagcctttgctttgctcaaagaaaagcttactaaggcacctgttctagctcttcctgacttttctaaaacttttgagctagactgtgatgcctctggagtgggagttggagctgttttgttgcaaggtgggcaccctattgcttattttattgaaaaacttcatggtgcgacccttaactaccccacctatgataaagagctttatgccttaataagagcactccgaacttgggaacattaccttgtttccacggaatttgtcattcatagtgatcatcaatcacttaaagtcattagagggcaaagcaagttaaacaaaaggcatgcaaaatgggtagaagacctaaagcaatttccatatgttatcacatacaaaaagggtaaaacaaatgtggtagctgatgcc

SEQ ID NO: 7457 - DNA, 372 bp, Glycine max
agcttttgtttggaataataacctatctcctcgggattgggacaccgaaatgggaaaatcctttgccaatgctattcatggtgtggaaaaagaggagtttgctacttatatggccctcgcatagcacttcacggtcttgcatcggcgagtaaaacttacgctatttgagctgccgttcacagcaccattagatttctactggcaacactgaaagacgatggtgggcggggagaaagctatctttcatgcccaagaacaagttagacattgaatgctcaacggaaacaggatactctccggcctatcaaactgcattcaatacgcgagaacgtatgactttcacctcttatgatgcggatgactttagcacat

SEQ ID NO: 7458 - DNA, 531 bp, Glycine max
agctttttggcaaaggaagaacaagaagagagatgagtagaaaggaattcttagaagttctaaaaaattgttaaagagttgtaaaagttctattgaatgcaagtcaaggtcttacataaactcttcatgtcgggtcaagaaaagcattggaagagttataaccttgagaaaatcaagtcaagagttacaacttttgactttttattcaaaagttatcactggtaatcgattaccataatcatgtaatcgattacacaatgcattttatgaaaagttgtgactcttcacaatcagatttgaattccaacgttcagatacactggtatggtaatcgattacattatttgaaaaatattttggaacgttgcaaatcagttaaaaacattttgaaatcaaatatgggcacaggtaatcgattacatgaaactggtaatcgattaccaaagagtaattactctggtaacttgaaaattttagaaaactcttttgaaaacaaaatgtgcttgtttggatttttttgaaaaaaacttc

SEQ ID NO: 7459 - DNA, 451 bp, Glycine max
tcagaattcaatttcgagcgtctcgatgtattacgagactcaatcagacatccgagtaaaaagttattgtcggttgaattagctgagagcttcaacattcaatttcgagcgtctcgatgtattacgggacttaatcagacatccgagtaaaaagttattgtcgtttgaatttgctgagagcttcaacattcaatttcgagcgtgtcgatgtattacgggactcaatcagacatccgagaaaatagttattgtcggttgaatttgctctgagcttcagaattcaatttcgaacatctcgatatattaccggactcaatcagacatttgagtagaaaagttatggtcgttcgaattagctgagaggtgcaacatccaatttcgagcgtctccatgtgttccgggactcaatcagacatccgagtaaaaagttattgtcgtttgaattagcctc

SEQ ID NO: 7460 - DNA, 327 bp, Glycine max
  unsure at all n locations
agctntgagctaatttaaacgacaataatgttttgctcggatggctgattgaaacccggaatacattgaagacgctccaaattggatggtgaaactctcaagcaattcaaaccaccaatacctttttactccggatgtctgattgggtccccgcaatacatcgagacgctcgaaattgaatgttgaagctctcagcaaattccaacgacaataacttttttactcagatgtctgattgagtcccgcaatatatcgagataatcgaaattgaattttgaagctctaagctaattcaaacgacaataactttttgctcggatgtctgat

SEQ ID NO: 7461 - DNA, 403 bp, Glycine max
agctttgagcaaattcaaacgacgataactctttactcggatgtctgattgagtcctgtaatatatcgagacgctcgaaatggaataccgaagctctgagcaaatttaaacgacaataacctttttactcggatgtcagatcgagtcccggaatatatcaagatgctagaaattgaatgggaacactctgatcaaattcgaacaacaataacttttaactcggatggccgatcgagtctcggtatatatccagacgctcgaaatggaatatctaagctctgagcaaattcaaacactaataactttttactcggatgtccgatagagtcccgtaatatatctgaacgcttgaaattgaatgctgaaagcttgagcagattcaaaccacaataaatttttactc

SEQ ID NO: 7462 - DNA, 479 bp, Glycine max
tgcatcgtagaatgacggttgattttgtagctccaacatttgtgaatggtaaagctaaaattacgattgatgaatctgatgtatctggggaacttgaattttgggaaaattctattattctctttgcactaggtgagtctctttctatgaatgctgtgaagaagtttatggagaagacctggaatttcatttcagaaccagaattatcttacaatgatgatggttactttattgtgaaatgcaagaatagggaagacatggagctggttatggaacaaggtccctatttcatttacggtaaatcattattcctccgcaagtggacatctgattttgagatgaaggaagatctattgcgagttcttccaatctggataactctacctcaatttcctctgcatctgtggggagaaaggagtatttcgaaaattgctagtatggttggtaaacctataacaacagatgaatgttctgcgaag

SEQ ID NO: 7463 - DNA, 495 bp, Glycine max
agcttccttaagaagattcctaaagaagctagagcttatctacacacacctctctaatagctaagctcacctccttgagatgagaagctagagcttagctacacaccccctataatagctaagttcacccccatgacaaaatacatgaaaatacaaaaaattccctactacaaagactactcaaaatgccttgaaatacaaggctaaaaccctatactactagaatggcaaaaaatacaaggcccaaacaaaggaaaaacctattctaatatttacaaagataagcggtctcatacttagctcatgggctcgaaatctaccctaaggctcatgagaaccctagggtcttcccttggatctctagcccaatctacttggagtcttctatcgaatgcccttgcggggtaggattgcatcaacatgccttatgacacttaagcacacttagtggagaatcttggacttgatctttgattagtgggctgaactttatgt

SEQ ID NO: 7464 - DNA, 481 bp, Glycine max
ccaaaaaactcagcttgtcagatccatgctcttctctggtgttggtatgtcatcaattcgttatgaattagatcacataaattctgtaggacaacaccatgtgacatattgtatgaccttatgctccataagtcctctgactcttatcttatacactaattgttgaagtagccaacaatttggtacatatcctttcatctatatatattgatggctgcaagaacttaggaccgaatcgtccatgtcttgagatatttgaaattcaaacactttcatgttatatttgcttagattttttattatctgtcttggttcagcgctgcgagtcatcttaacttgtaccaaaataaaagactaaccaatttaaactaaaagatatacaatatgtttagacctcgtacttatggtgaaacttggttttagtcctccaaccttaacatataagctctgatggaaaggagaaatactccccaaaatatta

SEQ ID NO: 7465 - DNA, 537 bp, Glycine max
  unsure at all n locations
ttctcttttgtgcgactatctcatcctctttttcagatgtagaatgaagcttgacaggttcaagtgtaggtgctgctattattggaggcacttgaatttggttgccacacctcaaggtgatggcactcatatttttcggattatgcacagtttgtgaaggcaatttttcagaattttgggactgagcttggttcaactgagtagccatctgccccatctgatttgtcagactctgaatggaggctcttgtctcttgctgaaattgcatattttggatggtcattttcctcactaactcttctaacgaagattaaagaggagcctcagctgcttgttgtctttgttgttgttgctgctgtattggaggaagaacatatggcttgcttggaccancatcattctggaaagaaaggacaagcctgtgttgtttggaggacttgctcatctcanattttgatgattactccaaactggattgtatctgttgcttgaaaggccataatattatgctattgttggatttggtgttgaaggggc

SEQ ID NO: 7466 - DNA, 419 bp, Glycine max
tgtagttgagcccttttgaccctggttgaaccttgaaatttttgcttcattgaatcccatatatttattgtcatgtccctcttgaggattgtttcaaggacttcacgatctattgcctggaaaaggtaattctttacctttaagtccttcaacttctgctcctcgatcaatttgcattgtgcctccgtacgctctattccatctgccaccatcaatatcccattctcaatgagatcccaatattctttggagcagaaaagattctccatcaacattgcccaatgatcataatgaccattaaaccttggaattgcaggctgcacgaaactgctactcccaccttctgccattcttctcaactcgttctactcgaaagagagaaaaactgcagtttctttcttgaatacactcactgtttt

SEQ ID NO: 7467 - DNA, 445 bp, Glycine max
agcttgcaaaatggaagcaaatatatctctctatgggtggcagaataaccctcattaattatgttttaacagccttacgcatttacttgctgtcttttttcagaatccttaaaaaagtggttcacaagatagtctccattcagagaaactttctttggggaggtggcaatgaggcaacaaagatcccttgggtcaagtgggatacagtctgtctatttatgaataaaggggggttaaggattaaagacttgaacaagtttaatgaggccttggttggcaaatggggctgggagttggtgaataaccagaaccagctatgggctaaaatcttgatgtctaagtatggtggatggaatgctttattctatggcagaaacaatacagactcctcttcttggtggaaggatttaaaatctgttttccaacaacaacataataatagtct

SEQ ID NO: 7468 - DNA, 529 bp, Glycine max
agcttttaagggtatttgactatttaggttttatgtgtacccaacttatcaaggtttagtgttacttgaccaaatagggtttatggatatttgacaaaataaggttgcttgactaattgagattacgggtatttgacaaataagggtttatgggtatttcactaattagggttatgtctacttgatagttaaggtttactgttcgttgaccaattagggtttatgattattttaaaaagttggggtttacaggtatttgacaacttattgtttacggttcacgggtattggactaatgatggtttatgtgtagttgagtaattagaatttaatgttacttgaccaattagggtttaagattattcgacaaattaagggtacttgactaataatgatttaggggtattttacaaatttggttttattgctacttgacaaattaaggtcaagcggtatttgactaattaggtttatgggtactttagtaattgaggttatgggtatttgacaaattagatttatggttact

SEQ ID NO: 7469 - DNA, 516 bp, Glycine max
tcttcacaatagtttctttcagacttcacaccgatttgtttcaaacatgaaatttatttttacctaaaagagtcatcggttcatataaatgttccttttctttgcttgcttatgattttgggagtttatacacctgtttggttatatatatatattttaataacaaaaatccttctcctgtaattttttttcttttttatgatgaaatgcactagcttgttgatttgttgtgtttcattttttggggtcattttttgttcttattttggttgatgtttcctaaaacatttaaatatttctttttatttaggtttaacaaaatgtcacgtggtattataatgctcagtttagtggcatatgatatacctaatactaagttttgagctttgtttctatttcatccttttgatttatattcttattcggtgtcattattaataagaatatgaaccttcttttcagaattaggattaacatatgtggaaattaaaataaacaagtgagctaatattactt

SEQ ID NO: 7470 - DNA, 402 bp, Glycine max
ttgagcaacttcaaacgacaataactttttactcggatgtctgattgagtcccgtaatatatcgagacgctcgaacttgaataccgaagctctgagataattcaaacgacaataactttttactcggatgtctgattgagacccgtaatatatccagacgctcgaaattgaataccgaagctctgagcaaattcaaaagacaataagtttttactcgtatattcgattgagtcccgtaatatatcgaaaggctcgaaattgaatatcgaagctctgagcaaattcaaaagacaataacgttttactcggatgtctgactgagtcccgtaacatatcgagacgctcgaaattgaatatcggagctctgagcaaattcaaacgacaataacttgttactcggat

SEQ ID NO: 7471 - DNA, 361 bp, Glycine max
agcttcaacattcaattttgagcgttttgatatattacgatactcaatcggacatccgagtaaaacgttattgtcgtttgaatttgctcagagcttcggcattccatttcgagcatctcgatatattacgggacttaatcagacatccaagtaaaaagttattgtcgtttgaatttgctcaaagcttcgataatcaatttcgagcgtcttgatatattactagactcagtcagacatccgagtaaaatgttattgtcgtttgaatttgctaagagcttcgataatcaatttcgaccgtctccatatattacgggactcagtcagacaaccgagtgaaaagttatttgcggtttgaatttgc

SEQ ID NO: 7472 - DNA, 485 bp, Glycine max
ttgaatgctctattcaatggagttgacaagaatatcttcatactgatcaacacatgcacagtggccaaggatgcatgggagatcctgaaaaccactcatgaaggaacctcccaagtgaagatgtccagattgcaactattggccacaaaattcgaaaatctgaatatgaaagaggaagagtgtattcatgacttccacatgaacattcttgaaattgccaatgcttgcactgccttgggagaaagaatgacagatgaaaagctggtgagaaagatcctcagatctttgcctaagagatttgacatgaaagtcactgcaatagaggaggcccaagacatttgcaacatgagagtagatgaactcattggttcccttcaaacctttgagctaagactctctgataggactgaaaagaaaagcaagaatctggcgttcgtgtccaatgatgaatgagaagaagatgagtatgaccctgatactgataa

SEQ ID NO: 7473 - DNA, 656 bp, Glycine max
tgttgcctttccgattttctttatgcatggacgacaaggtttattacttataagtcatagcacatggctcgacttcaaagtcgtaacagtggccacgactttagtactttatgtaggatgggagtggcattctacttcaggagtcgtgggttatggcacaactttaaaatcgtgacatttggcacgactttaaagttgtgtttattattattttttaaaataatatgtcatatgttaatattattttacggttttagttaattaaaaattttatatgttataagtaaatattttgttagggctttagttagataaaaatgttatatgttataagttaatattattttaggggtttagttatttaaaaatttatatgttataagttaatattttgttagggtttaattaataaaaatattatatgttataaggtaatattattttatgattttactcattaaaaaaagtactatgttttcaggtaatatttctgtaggggtttaagtaattaataatggctatgttataagttatattattttaaggcgttacttatttaaaaaggcttttgtgataaactaatattattttaggatttcactattaatattattattttcccaaaatgttttaatattatttatttaatgaaaaac

SEQ ID NO: 7474 - DNA, 380 bp, Glycine max
agcttgcatacaagattctccttgcctggcacttcaaaaccttctggttgggtcatatagatgtcttcctctaaatccccatgcaagaatgcagttttaacatctaactactccaagtgaagattctctgcagctactatgctcataataactttgatggtagtcatctttacaactggattgaagatctctgtgaaatcaattccttgtttctgctgaaaccctttcaccacaagtctcgccttgtatcttcttctaccgttagattcttccttgagcctatatacccacctattctggaacgctttctttccttctggcaatttagttaaagaccacgtcttattcttctgaagggatgtcatctcatctttcatcgc

SEQ ID NO: 7475 - DNA, 391 bp, Glycine max
tggcatcaatcaccttgctgaccaaacaaatgatgaatttgtggcttcccataatggatacaaacacaaggcatcacattcacaaacaccattcaagtttgaaaacgttactggtgttcctaatgcagtggattggagggaaaatggagctgtcacagcagtcaaggaccaaggccaatgtggtaattaagtaacagaatttcttttatcagtaagaatcgaaggcaggacaacagggagtttacaacaactcacatgttctgctcaattaactgagctagactccctcggttaacacagaaaattaaccataaattaaagtgatactatgttctgttctatatatcactgttatgatggcataaataataatggttaatctgtaaataac

SEQ ID NO: 7476 - DNA, 445 bp, Glycine max
agcttaacatcaatcaccttgctgaccaaacaaatgaggaatttgtggctttccataatggatacaaacacaagggatcacattcacaaacaccattcaagtatgaaaacgtcactggtgttccgaatgcagtggattggagggaaaatggagctgtcacaacagtcaaggaccaaagccaatgtggtaattaaataacaaaaatttttttatcttatgaatcgaaggcacataacatggagtttaccactacttatgtgttcttcttaaccaactgagcttgactccctcggttatacagaaaataaccataaatgaaagcgatccattttctttttcatatattactgtgatgaggggcttaaataatatttgggtaatttgtaaattaaccaggatctggttgggattttcaacagttgccggaacaaaaaggattctacca

SEQ ID NO: 7477 - DNA, 507 bp, Glycine max
agcttagtaaagctaggcactaacaatctccccctttggcaaattttgtctaaaacatacttagacacttcctgagcaggtacgagcagttatgcaagtgggatcaacaactttcattatcagagtaatcaagcacagcggaaattctgcaagttgcaagtcgtttccaggatgtcaagacatctcacatgacatcagctttctgcttttgctccccctgtctccatgctcttactccagcatcttctatcagctactaatctttttcaggatgtcaagacatctcatgtgacatcagctttcccttgtctccatgctcttactgcagcattttctatcagctactagtagcttacatcagtaatcatcagcagcagcagtctccccctaaaaacatgtacatacaacttcccctcaaaatcatgaataatgcttacatcgtatcctacttctctaaatcataggtaatgctttatactactactgcgtacaccaaaccatccatat

SEQ ID NO: 7478 - DNA, 373 bp, Glycine max
tcaacgttcattttcgagcgtctcgataagttacgggactcaatcagacatccgagaaaaaagttattgtcgtttgaattagctcaaaagttcaacattcaatttcgagcgtctcgatatgttacgggactcaatcagacatccgagtaaaaagtcattgtcgtttgtattggctcagagcttcaacattcaatttcgagcgtctcgatatattacgagcctcaatcaaacatccgagtaaaaaattatggtcgtttgtattggctccgagcttcaacgttcattttcgagcggctcgataagttacgggactcaatcagacatccgagaaaaaagttattgtcgtttgaattagctcataagttcaacattc

SEQ ID NO: 7479 - DNA, 506 bp, Glycine max
agctttcagccaattcacccgacaataactttttactcggatgtctgattgagtcccgtaatataacgagacgctcgaaattgaatgttgaagctctgaactagttcaaacgacaataactttttactcggatgtctgattgagtcccgtaatatatggatacgctcgaaattgaatgttgaatctcagagccaattcaaacgacaataactttttactcggatgtctgattgagtcccgtaatatatcgagacgctcgaaattgattgttgaagctctgagccatttcaaacgacaataactatttactcggatgtctgattgagtcccgtaatatatcgagacgctcgaaattgaatgttgaagctctgagccaattcaaacgacaataactttttactcggatgtctgattgagtcccgtaaaatatcgagacgctcgaaattgaatgttgaacctctgagccaattcaacgacaataacttttactcggatggtgtgattga

SEQ ID NO: 7480 - DNA, 504 bp, Glycine max
agcttcaacattcaacttcgagcgtctcgttatattataggactcaattagacatccgagtaaaaagttattgtcgtttgaatttgctcagagcttcaacattcaatttcgagcgtctccatatattacgggactcaatcagacatccgagtaaaacgttattgttgtttgaatttgctcaaagcttcaacattcaatttcgagcgtctagatatattacaggactcaatcaaacatccgagtaaaatgttactgtcgtttaaatttgcttagctctccagctttaaatttcgagcgtctcgatatatgacgggactatatcagacatccgagtaaaaagttattgtcatttgaatttgcttagagattcaacattcatcttcgagtgtctcgttatattacgggactcaattatacattcgagtaaaaagttattgtcgtttgaattttctcagagcttcaacaatcaatttcgagcgtctcgatatattactggactcaatc

SEQ ID NO: 7481 - DNA, 447 bp, Glycine max
ttgatgcaacatttggagaggttaatgaaacaacatcattatgcgctccatgagaggttgggtcgaatggagaatttagatcataatgaagaacaatggaggataagagggaatgatggcgttcctagacaaaaccgaattgatggtattaaactcaacattccttcatttaaaggaaagaatgatccggaggcctacttggagtgggagatgaaaatagagcatgttttctcatgccacaactattatgaggaccacaatgtgaagcttgccgcccccgagttttccgactatgctcttgtgtggtggaacaagctacataaggagagagcaagaaatgaatagcccatggttgatacatggaccgagatgaaaaagatcatgaggaagcggtatgtgcccgcttgttactcaaaggacatgagatttcaacctccaaaaactaac

SEQ ID NO: 7482 - DNA, 603 bp, Glycine max
ctcaagcttgttgatctcttcaggatgatcaacacaatattgcatttgctgcttcaattttgggctgcagatttcataagcaatgcatttagtatgtttacttggtaggtttaaattttcaataaaagtaattaatttttttagaatataattttttatgcaaggtcaatgtgagttcttgttacacaaatgtaattcattttattaccatattacccaattcattaatatgatgcagtgaatttgcattaaaaaaatatacttgtaattatatataatatagaagttttagcatttagcagctcactctttaacacatttttatataagaaattttattatacgttaaaatttattaacaaatataatagaaaaaagactcacttaaattatgatcttttattaattttaaacaatcttacctaatgcattcaaaagattgatttagaaaggatctttgttaatatttttataattatgaaggaagttattaaactattatgattgaactgaatataataattaaatgacagtcatttaaaactaaaagtttatacgttactatttatacaatatatatgttagtgaagataaatgggatac

SEQ ID NO: 7483 - DNA, 423 bp, Glycine max
agcttagagctctagaaagattatttatggaaatccgacaaactactttacaaagattcagtttcactaatcctttaaagaattctatatattaagggaattattttttaaaaatctcaacctaatccaaaataatcattatttaattttaaattattgctttaacagtgccactaattatttatggtatttgatctaaatatttaactaatttatagggattttaatttcgactctattaataatgaaaaacattgttcgatcgggaactcatggagtacttacaccagttcatgagctaatgattatgataagtttagagaactatacaacaaatccactaaggtaaattttcattatcatcatttatagagagagagacaattttgacctataattttctatcccccacaattgctaata

SEQ ID NO: 7484 - DNA, 357 bp, Glycine max
taagcttgtagaactaccacaaggaaagaaagtaatgggtgtttataaactatatggatgaggcaggtaaggttgtcataaacaatacaagattggttgccaagggttactcacaacaaaaaggtgtagactatacaaaaacctttgctcttgttgcttgtctagaggcaatatacattttactcttatttgcatgtcatacaaaaatgagactatatcaaatggacgtaaaaaatgcattcctcaatggagtaatataagaagaagtctatgtagaacaacccactgggtttgaaagtaacacttttccacacatgtgtttcaactctataaaacattgtgtggacttaacaaagc

SEQ ID NO: 7485 - DNA, 434 bp, Glycine max
agcttctaaactttgtacaagaatgaagctcttataccacttgttagacaagtggcctcagatatcttaagaagggggggggttgaattaacatagtccaaactgtttcccctaattaaaaaaatctatttcactttttactcaagttatgaattcccttaatgacaatcttcttaaatattaattcaaatgaagcaacttgaatatgaatataaagcaataataaataaaggagattaagggaagagaaaatgcaaactcagttttatactggttcggccacacccttgtgcctacgtccagtccccaaacaacccgcttgagagttccactatcttgtaaattccttttacaagttctaaacacacaaggacaatccttcctttgtgtttagagatcctttaccacaagagactcacagactcttaatccct

SEQ ID NO: 7486 - DNA, 440 bp, Glycine max
ttgtccgcaaaaatcactaaaaaccgttttaaggtcctactccttgaatggtactctttgattttatcggataacatggaccgttcaaaagcataaaatcaacatgtaactttattgctttagctagaactacgtaggtctaatttcctcatcgtaattgaggatacgtaggagcaaaagtcctgcttttgttgaccaccccaagagatcgttaatggtccaacgccttaatgtttctctcctttcaaaaacaagagatcgttaatgctccaacgccttaacgtttctcttctttcaaaatcaaaagatcgtttaatggtccaacgctttaaatgacctttgttcggttaaaattgatctttgcagaaaaagatcaaaacaacttatccaacgtttagttctaaaagaactacgtaagtctgatttcctcatcgcaattg

SEQ ID NO: 7487 - DNA, 420 bp, Glycine max
ttgagaaaattcaaacgacagtaactttttactcggttgtttgactgagtcccgaaatatatcgagacgctcgaaattgaataccgaaacgctgatcaaattctaacgacaaaaactttttactcggatgtctgagtgagtcccgtaatatatcgaaaagctcgaaagtgaatgtagaagctctgagcgaattcaaacgacaagtaactttttactcggatgtctgaatgagtcccggaatatatcgagacgctcgtaatggaataccgaagcttggagcaaattcaaaccacaataactttttactgggatgtccgattgagtcctcctatatatacgaacgctcgagatggaatgttgaagctctgagcaaattcaaaccgacaatgactttttactcggatggccgaatgagtcccg

SEQ ID NO: 7488 - DNA, 322 bp, Glycine max
agcttctacattcaatttcgagcttttctatatattacgggactcaatcggacatccgagtaaaaagatattgtggtttgaatatgctcagggcttcggtattccatttcgagcgtctcgatatattacgggactcaatcggacatcagagtaaaaagttattgttgtttgaatatgctcataacttcggtattccatttcgagcatctcgatatattacgggactcaatcagacatcggagtaaaaagttattgcagtttcaatttgctcagggcttcagtatttcatttcgagcgtctcgatgtattacgggactcaatc

SEQ ID NO: 7489 - DNA, 527 bp, Glycine max
agcttgtaaaaaatgcaaaactttaatatctattaactcaaatgtccgattgagtcctgtattatatcgagacactcaaaattgaaaacagaggctctgaggaaattcaaacaacaataactttttacttggatgtcagattgaagcaattaataattcgagacgctcgaaattgaatacagaagcgctcatcaaatccaaacaacaataaattttgactcggatgtccaatttactcccataatagttcaagatctcaaaattgaaaacagaagctctcaaaaaattcaaacgataataactttttacttgaaagtccgattgagtcttacagtatatcgagacgcacgaaatttgaaaacagatgctttgtgcaaaattaaacgacaataactttttacttggatgtccgaatgatttccgtattttatcaacacgctcaaaattgaataacagaacctctgagcaaatttagacaacaataacttttgactccaatgtgccatttgagtcctttaataatttta

SEQ ID NO: 7490 - DNA, 444 bp, Glycine max
tgaaattgaataacggatgctccctagaaattcaaatggtcataacttttcactcgaatgccagatttaggaacaaaatatatagagacgctcgaaattgaacaacagatgctctctagaaatttaaatggtaaaaatttttcactcggatgttagattcaggcacataatatatcgagacgtttgaaattgaacactaaagctctggtccaattcaaacggccataacttttaacatgggtgtatgattgaggcccatgatgtatcgagatgatagaaattgaataacggatgctctcatgaaattcaaatggtcacaagttttcactcgtatgttagattcaggaacaaaatatatagagacactcgaaattgaacacggaagctctggtccaaatcatatggcctaaacttttgacatgcttgaccgattgaggcccatga

SEQ ID NO: 7491 - DNA, 352 bp, Glycine max
agcttcatgagagagtcaaagatcaaattgagaggaaaaataaaaactatgctaaacaagccaacaaagggagaaagaaggttgtcttcgaacccggagattgggtttgggtgcacatgagaaaagaaaggtttccggaacaaaggaaatcaaagcttcaaccaaggggagatggaccatttcaagtgcttgaaagaatcaatgacaatgcttacaaagttgagctgcccggtgagtataatgttagttccaccttcaatgtctctgatttacctctttttgatgcagatggagaattcgatttgaggacaaatccttctcttgagggagagaatgatgaggacttgaccaa

SEQ ID NO: 7492 - DNA, 353 bp, Glycine max
tgtaacattatttgtggagtttaatgacatacatactgtttattaacttgaaataaccactatattttatggctcttgattgcgatgaatgataatataaataagttgagtctttgtttaccaatggtttacaaagttggtgcaccccagcatcattgtagcaaacatgggccttggcaagctgccacatccaattactagtatcatcaacaggaggagtaaccactcgctttgaccgggaattatgtccaacatgaaggaggctaagttctatagccacatgcttgagagtgccacgaggtgtctataaaaagacggagcgtgtggcatatgactatctaccatctaaggca

SEQ ID NO: 7493 - DNA, 544 bp, Glycine max
tcatgcagataagattttattgcatttagccacaaattttattataaatagcaacagttctctgatgcaatatacatgattatttaacttggtctaatgataaattgtattaattatgtctctaaagtatgaaaataaagctcattcagtagccaatccacagctccacacaagttcatgacaaccctttcaaagcttcaacttgatagcagtttgaacatccttatcacctcggccactgaagttaaccacaaccttggctccattaggaagggttggacacactttctctagatatgccaatgcatgagatgattccagagctggaattatgccttcaagtcgtgaaactctcttaaaagctacacatacaaaaaatccaaaaataagatacacgggcaatatctgataccatagaaacatttacttcttaccacaaagaagaggataatataaccattttctttaaatgcaatatgatggaaaatggcaagatgtggtggatacaatggaattatgtgttagcacttttttactaccccat

SEQ ID NO: 7494 - DNA, 407 bp, Glycine max
agcttataagtgaagccttgggagaggatttgtccaaaccctccaacaccagtacttgtagtaataaagctgacactactactactaaggcaaggataagatgcagcatcgaccaaagctttctgaaaaacaaatctgtaaagggtaccacggaacttcttgaacagcatgtgtggaggccccagagagggttgccacaacgtgcaatggcaattcttaaagcctggttatttgagcatttgcttcatccgtatgtatgcctctatctatgtctcttattaataaatgtctagctccgcgactctcttttctgcattctaaaaagacatttggattgaattgtggcctttttttgctgttgatgaatatttttttagttaccctacagacactgataaacacatgct

SEQ ID NO: 7495 - DNA, 416 bp, Glycine max
ttgaaggctgatttcatttgcgaagtgaattacaccaattggttagccaatgtggtcatggtaaagaaagcaactggaaaatggaagatgtgcatggattacaccaacctcaacaaagtgtgtcccaatgatgcctaccctttgcttagcattgacagactatttgatggggcatgtgggttcagggtgctcacttttttagatgcctactcaggctatattcaaatcaagatgtatctacccaaccaagaaaagacaacatttgtcattgatagggctaattttttctataaggtaatgactttttgatgcaatcctccctatgaagggactagtcaccagagccatgagcaagaggctccaaaaggattgagctagagttgctgaagaagttcctagggttctcatcaatctca

SEQ ID NO: 7496 - DNA, 610 bp, Glycine max
tgaaggcaaactggatgcattggttaacttggtaacccatctggccttgaatcacaaatctgtaccattcgcaagggtttgtggtttgagctcctctactgaccaccatacagacctttgcccttccatgcagcaacctgaagcaattgagcagcctgaagcttatgctgtaaatatttacaatagacctcctcaacctcaacagcaaaatcaaccacagcagaacaattatgacctctccagcaacagatataaccctggatggaggaatcaccctaacctcagatggtccagccctcagcaacaacaacagcaacctgctccttcgttccaaaatgctgctggcccaagcagaccatacattcctccaccaatccaacaacagcaacaaccctagaaacaaccaacagttgaggcccctccacaaccttccctcgaataacttgtgaggcaaatgactatacagaacatgcaggttcagcaagagaccacagcctccattcagagcttaaccaattaaatgggacaattggctacccaattgaatcaacaacaagtccagaaatatgacaagctgccttctaagttgttcaaaattccaaaaatgtca

SEQ ID NO: 7497 - DNA, 517 bp, Glycine max
  unsure at all n locations
tgaaattgaataacggatgctccctagaaattcaaatggtcataacttttcactcgaatgccagatttaggaacaaaatatatagagacgctcgaaattgaacaacagatgctctctagaaatttaaatggtaaaaatttttcactcggatgttagattcaggcacataatatatcgagacgtttgaaattgaacactaaagctctggtccaattcaaacggccataacttttaacatgggtgtatgattgaggcccatgatgtatcgagatgatagaaattgaataacggatgctctcatgaaattcaaatggtcacaagttttcactcgtatgtcagattcaggaacaaaatatatagagacactctaaattgaacacggaagctctggtgcaaatcatatggcctaaacttttgacatgctngtacgattgaggcccatgatatatcgagatgcttcaaattgagaaatggaagttttcgagaaattcaaatgggcataacttttcactcgaat

SEQ ID NO: 7498 - DNA, 422 bp, Glycine max
agcttcatgagagagtcaaagatcaaattgagaggaaaaataaaaactatgctaaacaagccaacaaagggagaaagaaggttgtcttcgaacccggagattgggtttgggtgcacatgagaaaagaaaggtttccggaacaaaggaaatcaaagcttcaaccaaggggagatggaccatttcaagtgcttgaaagaatcaatgacaatgcttacaaagttgagctgcccggtgagtataatgttagttccaccttcaatgtctctgatttacctctttttgatgcagatggagaattcgatttgaggacaaatccttctcatgagggagagaatgatgaggacatgaccaagagcaagggcaaggatccactttgaagacttggaggacctatgacaagggctagagcaagaaaagccaag

SEQ ID NO: 7499 - DNA, 426 bp, Glycine max
  unsure at all n locations
agcttagctacacatacctctctaatagctaagctcacctccttgagatgagaagctagagcttagctacacaccccctataatagctaagctcacccccatgagaaaaaacatgaaaataacaaaaaaaagtccttattacaaagacaactcaaaatgccccgaaatacaaggctaaaaccctatactattagaatggccaaaatacaaggcctagacgaaggaaaaacctattctaatatttacaaagataagcgggctcatacttagcccatgggctcgaaatctaccctaaggctcatgagaaccctangggccttccttggatctctagccaaatctacttggagtcttttancaatgcccttgcggggtgggattgcatcattccctccacctgggaaaggatttgacctcaaatcccga

SEQ ID NO: 7500 - DNA, 545 bp, Glycine max
taccaagctttgtgccaaccagaataatggggacaccaggagcataatgcttcaactccggaatccactgaaaatgaaaccacacatgcaatttatcatcgactttttttataaatgaattattttcttaacatataacatgatccatacatccttcattacaggccatacagaaaccttataattatcaaaataaataagaagaaatacacccaaaacactatgaccacaataaattgccacgaagtacctttttagagacattttcataactggccttgcttatgagagagaaagccagtatgaaaacatcggcaccacggtaactcaaaggtcttaatctgttataatcctcttgtcctgttccacaagtaacacaataaatccagagataacttccaagctccaacatcacagaaacaataatcacgcagcattaccagcagtatcccacaaacccagattcacaatgctcccattgacaaccacaattgcgctgagattgtcaaaaacagtcggcacataatcctgtttttaaaatacaa

SEQ ID NO: 7501 - DNA, 418 bp, Glycine max
agcttgtcaaagagagaagcaagttaaaaactcctttcaaagcaaaaacgttgtttctacttcaaaaccccttgaactacttcacattgatttatttaatccctctagaactatgagtttaggtgtaaattactatggcttagcaatagtggatgattactcaaggttcacatggactttgtttttgaaaacaaaaaatgaagcttttgaggcttttcgcaaacttgccaagatgattcaaaatgaaaaaggtcttaacattgtttcacttggaagtgatcatggaggtgaatttcaaaatgagtccttttaaaacttttgtgaagaaaatggaattcaccacaatttttctgcccaagaacacctcaacagaatggtgttctggagaggaaaaataaatcgctagaagaaggtgcaa

SEQ ID NO: 7502 - DNA, 386 bp, Glycine max
  unsure at all n locations
tactcgagcttgtagcatattcaaacgaccataactnttaactcggatgtctgattgaggcccgttatatatcgagacactcgaaattgaaaacagaagctctgaggaaattcaaacgactataactttttactcggatgtctgattgtgtcccgtagtatatcgtgacgctcgaaattgaaaacataaggtctgagcaaattcaaacgacaataactttttactcagatgtccgattgagtcccgtaatatatcgagatgcttcaaattgaaaatagtagctcctagcaaattcaaaacataataactttttactcggatgtccgattgagtcccgtagtgtatcgagacactcgnaattaaaacagaagctctgacaaattaaa

SEQ ID NO: 7503 - DNA, 419 bp, Glycine max
  unsure at all n locations
nagcttctgttttcaattntgagaatctcgatatattacgggattcattaggacatccgggtaaaaagttattgtcgtttgaatttgctcagagcttctaatttcaattttgagcgtctcgatatattacgggacttaattggacatccgagtgaaaagttattgtggtttgcatctgctacgaactttcgttttcaatttcgagcatctcgatatattgcgggactcaatcggacatccgattaaaaagttattgtcgtttgaatttgtcaccagcttttgttttcaattttgagtgtctcgatatattacaggacttaatcggaaatccgagttaaaagttattgttgtttggatattgtacgagactttgttttcattntcgagcatctcgatatattacgggacttaatcggaca

SEQ ID NO: 7504 - DNA, 406 bp, Glycine max
  unsure at all n locations
tgtgcgtaatanaacttatttgacatcaaagatagtattatgataacaacttctgtgaaataacaaattcgtgtctcttaatctgtattagaacttgcagttggtgatacttagaaggctcatatggtgggaacctgatttctttgttaatttggttgtatagctagtttcttgggaagaaggagggtatctgacatcagataaaccaatgccaaggggagagattgtagttggaggatttagtgtgacagctggttactttaagaatcaagaaaaaactaacgaagtgttcaaggtaatttcccaagttacagttgtatgcatgacatntttcctttttaatttcctttaactgctcttannatctgttttgcatattactaaagccactcgtacatnntttttt

SEQ ID NO: 7505 - DNA, 364 bp, Glycine max
tgtagatgtcacttaagaacataggtgcaacggtatgctcggagaacttggctggtaatgttttgaagtgagtatactttgtcaaacaatctacaatcacctaggtaattgacttcccctgtgacactggtaagtgtgtaataaaatccatagagaagtctttccagacctaattgggaataggtaaaggctataaaaggccatgctatttgtgattgggagacttatgcttttgacaaatctcacaggtttgcacatactccttgacatcccgacacatgtgtggccatgaaaaggaagctgccaaacatataagcatgcctttaacacttgagtgtcctcctgcaagggtggcatggcaatc

SEQ ID NO: 7506 - DNA, 345 bp, Glycine max
tgagttgcttgttgacaaggatctcaagactaactatgacaggattgagcttgaggaaatagttcaagtggcactcttgtgcacacaatatcttccgggccacaggcccaaaatgtctgatgttgtacgcatgcttgaaggtgatgggcttgcagagaaatgggaagcctcacaaagtgctgacactaccaagtgcaaaccacaagaactctcttcatcagataggtattctgacctcattgatgactcttctttgttagtccaagccatggaactctcaagccctatgatgtgaaccttacggggcggatcgcttgatacaggctacgaatatttggatgacgc

SEQ ID NO: 7507 - DNA, 315 bp, Glycine max
  unsure at all n locations
gctaataatatgtcaaaactgccaacgacacagggctatgggtctgatgaggagtgaattctgaaaactcaatgttcttctggctcggatatatnttgttntgtttttttgataagcaaatgttttatactttgttngaacttatgtcacttttttcagcttggaattcttttgaattccttgaagagaatgctcgacagcttgcgccctaggattgaatcccagttcaagacatggngttcttgcttgccacatgttggaaacacgacacctgggtgagcgactagtgaggtgacagtgatgctgagagcaaag

SEQ ID NO: 7508 - DNA, 363 bp, Glycine max
  unsure at all n locations
agcttgctaaatggaagcaaaaaagtctatcaatggggggtagaataaccctcattaattcagtcttaacagctntacccatctatttgctgtccttcttcaggatccttaaacatgtggtgcaaaagattgtctctattcaaagaaactttttatggggaagtcatcacgaggccaacaagatcccttgggtgaggtgggacacagtttgcctccctaagagtaaaggggggttagggattaaagatttgactaaattcaatgaggctttgcttggcaaatgggggtgggagctggcatataatcagaatcaaccatgggccaagaatttattgtctaaatatggtggatggaaggatttga

SEQ ID NO: 7509 - DNA, 380 bp, Glycine max
  unsure at all n locations
agcttctggtgggacatcttgacttgctttccaatctgacattcaccacagattctgccttcttctattttcagattgggaatgcctctaacagcacctttgtcaatgattntcttcatgcctcttaagtgcagatgtccaaatctttgatgccatatattgacttcatcttctttggagactagacatgtggaggagtaactggtttcttgaggtgtccataggtaacagttgtcctttgatctgctgcccttcattaggacttcactcttctcatttgtcaccaagcattctgactntgtgaagttacattgagtccttcatcacacaactgactgatgctgatcaagttcgcagtcagtcccttcaccagcagtact

SEQ ID NO: 7510 - DNA, 269 bp, Glycine max
tacacagggatcaactgcattaaccgcataaccatatgagagcaatgactgtgacgcgaacattgataatactattggacggaaaagcttgttccaaaccataggaggaatcatttagtttgcaaaccataggactttgaaacacttaagacaaagtgtatctggaagcatcacatgaagtagcttcttcaatgtcaccatttagaaaaacaggcttaacatccatctgatgtagctctaaatcacaaggagctacaagtggcattatt

SEQ ID NO: 7511 - DNA, 317 bp, Glycine max
  unsure at all n locations
tctaaactntgtacaagaatgaagctctgataccacttgttttcaagtggcctcagatatcttaagaaggtggggttgaattaagatattccaaacttttctcctaattaaaaatctatcttactctttacttaagttatgaattcccttaatgacacatcttcttaaatattaattcaaatgaagcaacttgaattatgaatattaagcaataatcaataaaggagattaagggaagagaaaatgctaactcagttttatactggttcggccacacccttgtgcctacgtccagtccccaagcaacccgcttgaga

SEQ ID NO: 7512 - DNA, 242 bp, Glycine max
  unsure at all n locations
atatcgttgctagcaagcagtatatcatcgacatataacaccaagaatgagtatttactcccgctaaacttgtggtatacacaatcatcaactgcattttccgcanaaccatatgaggtaatgacttgatggaacttgtaatactattgacggaaagcttgtttcaaaccatagatggatttattagtttgcaaaccataatttgagtcacttaatacaaagttttctggttgcatcatatg

SEQ ID NO: 7513 - DNA, 416 bp, Glycine max
agctttctgcagggaagctaagtgtgaagtatgcaatcctgcataggattggcactgccaactgggtacccaccaatcatacttccactgttgccacaggtttgggtaaatttctgtatgctgttggaaccaagtccaaatttaattttggaaactataattttgatcaaactattaagcattcagaatcttttgctgtcaaattacccattgccttcccaactgtattgtgtggcattatgttgagtcaacatcccaatattttaaacaacattgactctgtgaagaagagagaatctcctctatccctgcattacaaactgtttgaggggacacatgtcccagacattgtctcgacatcaaggaaagctgctgcttcacgtgctgtatccaaggatgatttgattgctgaactc

SEQ ID NO: 7514 - DNA, 356 bp, Glycine max
  unsure at all n locations
ntgaggaaattcaaacgaacaatacctttgactcggatgtcggattgagtcacgtaatatctcgagacgcttgaaattgaataccgaagctctgagcaaattcaaacgacaataactctttactcggatgtcggattgagtcacgtaatatgtcaagacgctcgaaatagaataccgaagctctgagcaaattcaaacgacaatacctattgactcggatgtcggattgagtcacgtaatatctcgagacgctcgaaattgaataccgaagctctgagcgaattcaaacgacaataactttttactcggatgtgcgattgagtcccataatatgacgagacactcggaattgaata

SEQ ID NO: 7515 - DNA, 320 bp, Glycine max
agcttgattatactgtagcggcacctaggtctctaggcgtgatcccggttatatgtgtaccctgcgtgaaagtggcatgcgctaagtcttgcacacagactacaagccgtagacaacacttgcaaaacctgtggtgccgacagagtgaaccttctcccattagaggcgtggcgctctctgaccactatacaagacggagacctcgtttgccaactgcattaacgaatccgtcaacacgaacaccttgctgacgtaccgcccgatgctctgggatgctgctagacccattattgtcaagtggatgtcttgcacgcgcttat

SEQ ID NO: 7516 - DNA, 347 bp, Glycine max
tgtctctcaacactacaaagctattcacctttaatccttttgtaaagatatcttccagctgcatttcagtgctgcaatacctcaaatccagctgcttcttgctcaccttttccctcagaaaatgaaatctagtctcaatatgttttgatcttccatgtgctactggattcatggccaaactgatagtagatttgttgtctacatacaatctaactggcctctgaatttccaccttcaattattcaagcaagaagtccaacccacaaggcttgacatgtagcatagcaagatgctatgtactctgcctcacatgaggataaagccaccacttgttgtttcttggaaca

SEQ ID NO: 7517 - DNA, 389 bp, Glycine max
  unsure at all n locations
ntagcaactctttctttntgtttagtcaaaacctctaatgctcttaatctctcctcatctaaatcaaccaactcatctaacatcattttccaataatggtcgattggaatgtccatttgtttttgtaccctggctgattgcaaatgtatttcgaccggaagtacagcatcatgcccataagtcagtcgaaatggggtagtattagttgattccttangagaatttctacatgcccatagaacttgatctaacgttttattccaatttcttggcttttgggcaatgtgttttttaatcaagttaattacaatcttattggctgcttcgaacctgaccattgcttgcgcgtaatatggtgttgaggttaataatcgaaagccagttttttg

SEQ ID NO: 7518 - DNA, 415 bp, Glycine max
agcttgtcttaaagaaaatgatagaccaatatttgtatcttggaattggctaattaaaaacaagtggagtggttcaaaatttcaggtaaagttatcttattattttgaacataattttttaatagttttatgcttataatataaaatcatttatactttgatgtaagaaagaagtttgacaaacaaagctaatcgaagcaagtaagaaataaaatcaattattggcacaaaatcaatcatgccaaaggcatttgaaatggtaacatcttttaatattttatattcatttttttacaagttatataataataactctttttttattttgcgaattttttatatgatatatgaaaggttggtgaaatttatataaaggcatcatgccttacattatatatggtttatattaattaaa

SEQ ID NO: 7519 - DNA, 400 bp, Glycine max
agcttcttatctgattctctctgaaaatatattttcagatttgttttcattcttatgtgaccaaagcacagcttcaaatttggccactttagatttatcacgcaatcaaataaaggggcaactgccagattgttggaaatcagtaaagcaattactgttccttgatttaagcagcaacaaattgtcagggaagattcctatgtccatgggcgcccttgttaatatggaagccttggttttacgaaacaatggtttaatgggtgagttgccttcttctttgaagaattgcagcactttatttatgctggacctgagtgaaaatatgttgtcgggtccaataccatcatggattggagaaagtatgcagcaattgataatcttgaacatgcgaggaaatcac

SEQ ID NO: 7520 - DNA, 417 bp, Glycine max
  unsure at all n locations
tatagttattggagggagaataaaacaatccaaaatcaattgtacccttcaagtaacgaagaattctttttgcggctcttagatgaggagaggtaggagccttcgtaaagcgacacacaactcccaccgcatatagaatatcgagccttgtattggttagataccttaaacttcccacaagactcttagagaccatggagtctaccttctctccttcatcaaactttgataacttcaagccaccttccataggtgtgttcacgggattgcaatcaagcatattaaatttcttcaacacttcttttttgtagctgtcttgtgagacaaagataccattctccgtttgcttcacttncattcccaagtaatatgacatgagtcccatatttgtcatatcanattcacgagacatgaact

SEQ ID NO: 7521 - DNA, 358 bp, Glycine max
  unsure at all n locations
tactaagctgcttacgtatcttgttaatcaattctgcaacctcttcttctctgatgagactaagtgactgcacccttttggggctcagaagctcaaggacacatatttttcttttgtgtttccagctntctccataggatgcaaaaccaatgtcattacatccatacagcaaggtttttgctgctgtggttttgggtcggtttgagaaagttatgtcgtgagttttcatgatttccctgaccgcgtctggagatgaaaccaccaaggctcgagtctgccccaactgcaacaacatcagagaaccatgcttttgtgagagggttctaagagaatggtatggcaatttgcttagttgatg

SEQ ID NO: 7522 - DNA, 308 bp, Glycine max
cgcttgagccaattcaaatgacaataactgtttactcgaatgtctaattgagtcccgtaatatatcgagacgctcgaaattgcataccgaagctcttagtaaattcaaacgacaacaactttttactctgatgtccgattgagtcccgtaagatatcaaaacgctcaaaatggaatgtggaagctctgagcaaattcaaacgataataacttttaactcggatgtctgattgagtcctgtgatgtatcgagacgctcgaaattgaataccgaagctctgagccaagttcaacgacaataactttttac

SEQ ID NO: 7523 - DNA, 347 bp, Glycine max
agcttctgtattgaatttcgagcgtttgttcatataacaggagtcaatcatacatccgagttaaaagtaattgtcgttcgaatattctcagagcttccgaattcaatttcgagcctctcgatatattacaagacttcattataaatccgagtaaaaaagttattgtcggctgaatttgctcaaagctacggtattgaatttcgagcgtcttgatattattaaaggactccatgagacatccgagtaaaaaatttattgtctgtagaatttgctcaaagcttcaacattacatttcgagcgttgcgatatattaccggactcaatccgacagtcgataaaaaattact

SEQ ID NO: 7524 - DNA, 337 bp, Glycine max
gggatccttgagtcacctgcggcatgaagcttcttacatagtccgcctttgctttatcttctttatgcttaaaaacagaaacattaggcataggcaaaagatcaagaggagttagtgggttaaaaccataaacagcttcaaaaggagaacaattagtggtgctatgaacagctctattgtaagcaaattcaacatggggtaaacaagcttcccaagtttttaagttcttcctcaaaactgtcctaagcaaagttcccaaagtcctattaacaacttccgtttgtccatcgggttgtgggtgacaagtgtgtgaaaataacaatttagtgcccaactt

SEQ ID NO: 7525 - DNA, 403 bp, Glycine max
  unsure at all n locations
agctntgcataccccgaggatccattatgaaattacttgtgaaagagagccatgagggtgggctcatgggccactttgggatagacaagacccttgtcttactcaaagaaaagttttattggccccatatgaagaaagatgtccataagcattgcactaggtgtgtggcttatttacaagccaagtctagggtgatgcctcatgggctatacacaccattacccatctgcacccgtggtagacattagtatggactttgtccttgggcttcctataatccgaagaggtgtagactctatctttgtggtggtggataggtttagaatgataaaagtggtggataggaactaaacttcttttctctaccacttgtcatccacaaactgatgggcaaacaaaggta

SEQ ID NO: 7526 - DNA, 338 bp, Glycine max
  unsure at all n locations
agcttagaggtttgtctagttctcatcttggatgattcttccgagagttgagggatttcanggatggtcgtaaactattaatcttacttaataattcaatgttgctatcacctatctcctccctaggggatttttgtttcctaagctctctaaatttttgtttggctttttcgctaacctttagagtgcgtttggataaagaattttaactgaggaaagtaatttattagagaatttgaacttctgtaatttagaattcattgtttggatgctttttatgaaanattaaaattttggattttaaacagaatttaaacactanaatctggaattcaatt

SEQ ID NO: 7527 - DNA, 406 bp, Glycine max
agcttccttgagaagctagaggggtgggggacacacacccctccaatagctaagctcacccctttgccaaaatacttgaaaatacaagaaagtctctattacaaagactacttaaaatgccctaaaatataaggctaaaatcctatactactaaggtacccttaacttgtagggcagggtgcccttaatttgtagggtaccctacaaacctaaaaatgccaaaatacaaggcccaaaagaaggaaaacctattctattatttacaaagataagtggctcatacttagtccatgagcctaaaatttaccctaaggcacatgagaaccctaaggctttctcctgcatctttggctcaatcttcttgtagtcttctatccaatgcccttaaggtaggattgcatcatcc

SEQ ID NO: 7528 - DNA, 380 bp, Glycine max
  unsure at all n locations
tatgctacaaacattataatagacctcctcagcaacttatccaacaacaacagaataattatgacttttcaagcaatagatacaatccaggttggaggaatcatccaaatctgagatggacaagtcctccacaacaacaacagcttgtccctccttaccagaatgttgctggtccaagcaagccatatgttcctcctccacaaaaaatacaaccaacaactgaggctcctcctcaaccttccttagaagagttagtgaggcaaatgaccatccaaaatatgcaatttcagcaagagacaagagcctncattcagagtctgacaaatcagatggggcagatggctactcagatgaatcaagcttagtcccaaaattatgac

SEQ ID NO: 7529 - DNA, 396 bp, Glycine max
tgtaagggcttgggtggcaaatgatagtgagactcaacttggataccaaccttgtgctacaacaattgcaacaagacccaccatccacaatatgagaacaatttttgtttaaaaccttgtatcttgtatgaaagatgttctctctttgggtttgggttaggtcacaggattgactcccaaggagccttctcaccattagaagatcaccttcttcaatattctcatcacccttggtttcaccctcacttccacttgaggaaggagaagaagtttcctcctcttggctactatagatgtcttgacccctcatgatcatggttttctttgtggggcattgagaagcaatttggcctttcccaatacatttgaagcacttgatgttactagttctatctt

SEQ ID NO: 7530 - DNA, 386 bp, Glycine max
  unsure at all n locations
ntaagaaaagtcaaacgacaataacttttaactcggatttccgattgagtcccgtaatatacgagacgcttgtaattgaaaatagaagctctgaacaaattcaatcgacattaacttttgactcggatgtccgattgtgttccgtaggatatcgagacgctcgaaattaaaacggaagctctgagacaaatcaaacgacaataacttttactcggatgtctgatcgagccctgtaatatattaagacgctcaaaattgaaacggaggctctatgaaaagacaaacgacaataactttcgactcggatgtctgattaagtcccgtacgatatcgagacgctcggaattggaaacggaagctctgagacaaatcaacgacaatacttt

SEQ ID NO: 7531 - DNA, 385 bp, Glycine max
  unsure at all n locations
agcttgttagcttgatgacttgtcagaatcaatttgttgactagcatcaaatcagagaattaaacctggacatcttttagaaatgcttgctgaattaagacaggcagaaatctagtgtctccatttgggacaaaaacccattctttgcagcatataatccaaaaaaacccatgagactgagtcataggccttttcaaaatccaccttgaaaaccatagctggccttttgcttctacaagcttnctcaatcacctcattaagaactagtatgccatgcaggatgtgtctgttttttatgaaagctgtctgcctctcatcaataagaccaaatatcacttgtctcaatctatttgctaataacttagctatcaccttgtacatacat

SEQ ID NO: 7532 - DNA, 202 bp, Glycine max
tccattgctcaatttcgagcatctcgatatattatgcgccttaataggacctccaagtgaaaatttatgaccatttgaattgctcaagagcttccattgttcaatttcgagcgtctcgatatattatgcacctgaatcgtacctccgagttaaaggttaagaccatttgaaaatcttagagcttccattgttcaatttcgag

SEQ ID NO: 7533 - DNA, 371 bp, Glycine max
atatttcaatttttattaaattattgcaataagaaggaaatgttttgtaaaaataaatactactaaaaattctattattaatataattaatattgatgttatgaagatcaattttctcctatatttaataccattaattaataattaatttataggatgaaatatttacaatgttatctaattatttattttatttttttaaatacataactcacattaaattaaaattatgacagtaaaaaggtgttctcttattgcttttagaattttaggtttgaaattatatcgacttaataaaaatataacaaatttaatatattgctgaaactaatttcccgtattccttacacactttggtatagaaactttta

SEQ ID NO: 7534 - DNA, 365 bp, Glycine max
ttatcaaatggatttaaaaagtgcattcttaaatggctttattcaagaggaagtatatgtagatcaaccccctagatttgaaaactcgggcaagcctaatcatgtttttagattaaaaaaggcgttatgtggcttaaagaaagcccctagggcttggtatgagcgtctgagtaagtttcttttagaaaaggatttcttagaggcaaagtagaactactcttttcataaagagaaaattacatgatattttattggtcaatttatgttgatactattatttttggatctactaatgaattattggcaaggaattctctcatgacatgcaaaatgagtttgaaatgtcaatgatgtgagaacttaat

SEQ ID NO: 7535 - DNA, 241 bp, Glycine max
ggggcacgaaatttatgcctcaaatgatgtatgaactttgaagtgtaatttctcaaatgatcgaatttgaaaaattgcacacacaagacctttatttatagcctaagtgtcacacaaaattggaggaaaatttgaatttacttgaatttgaatttgatttgtggagccaaatttggaaccaaaatttcactattatgatagtgaatttcagctatggtttagcccactaatccagatcaag

SEQ ID NO: 7536 - DNA, 312 bp, Glycine max
ttatcatagattggcatgttattttctttcatttgtgagccctaaagtttggggtatgtgaattttgtgaatttggttggtcaaggccctcaggtcattgttgtaggacctactgattctggaaagagtaccttgtcgaggatgcttcttagtagggcagttaaacaagggtggaagcctacctttggtgatctggatattggccaagggtctataacaattcctaaatgcattgccgccactccaattgaaatgtcaatcgatcttgtggaaggcattccacttgaaaagcctcttgtttactattatggg

SEQ ID NO: 7537 - DNA, 322 bp, Glycine max
ttcccccatcgcccacgaagtcacgcacctcttctgggtttcctttcaaattcacgcagacgaagaatacaatgcaactgtcaacaaaaccatgctactcaaccttctaactgccctgaaatctttcacgacatcccggttggcccatgtaacggtccaaaccggaaccaaacactacatgggcccagttttcgacccggttacttcacgcaacttatctggcaccacccaccctttgacgaaaacatgccacggctcccttaacaaacttctactacgcgctcgaggacctggatgcttcttagcgccctcgctgacgtac

SEQ ID NO: 7538 - DNA, 452 bp, Glycine max
actcagcttgatgatttctatggcatatgaacaaccttcaaaacatccattggcatcttttcgtttcaaatggtgtacaaaaacgtgtgctatctaccaatggagttagaactaaaaactcattatgtgaggattgatgtgccattattttctcctatttcttaaccctttttgcaccattttaattactgatttgtcttaattggtatattaattatgcatttttatcatttgggtctactggattaattttgtgttttaattaatttcacgagaattataagcaattgggcttgaatccaaaattgggcttagacttgaagaaagcagactattttattctaccaaattttatcttatcttgattttatcttatctaaatattatttaaaattgatctcatctagatattatttcatctaaatctatcttaactaaaattatttatttat

SEQ ID NO: 7539 - DNA, 475 bp, Glycine max
agctttctatctcttctttaataaagatttggtggtagagaccccaactagtggttctgtgttaacttctaatgtgtgtttggattgtcctgtggaagtttctggtaaaataattatgattgatctgatttgtttgcctttgagccaaattgatgttattctaggaatggactggttatcttccaaccatgtcttgttaaactattttgataaaactatggtgtttgatggttttggagtgagtaaagatatgatgttcatctctaccaaccaagttgtgtgatgaggacatgaccaagagcaagggcaaggatccacttgaaggacttggaggacctatgacaagggctagagcaaggaaatccaaaaaagctcttcaacaagtgttgtccatactatttgaatacaagcccaagtttcaaagagaaaagtccaaggttgtgagttgatgagaatcctgaaactggccaaatac

SEQ ID NO: 7540 - DNA, 608 bp, Glycine max
taaatgacggcggcgcacctcccgacatccgattttttctcattgacgctatgctagatacccagacatcgtcattaacctcccacccctctcacaacacttcagcagcgcgtaaagcttatcagctaccctaatctcattagtagaagaatcttaggtctgggactgatgttgagactgcttggaaagatggaaaagggtgaaggatatctgttataattgttataggtggaaaaaaatgctaaaattaatagaatttatgtgcaatcagctttttttttcaaaggatacatattgtccagtcaggtatattatctactctactgtgctcatctttatcaaacagaacatgaaactgcaattttaagtgagaaaggccacgaatatatttcctaacacatgggcaaacattgtatatatttcataaaaattatcgcgtataaaaatgattgtcattagagtggtcgtaaataacaggaattctgatccgctgatattatgtataatatctatgaacaatacaagtgtttaaaaaaatattaatgatgctagtattaaaatttaaaaatattactgtcttttatcatttgattaatgattttcaatcc

SEQ ID NO: 7541 - DNA, 543 bp, Glycine max
agctagacttaccgctgatgatgctgctatgatttcagcctcaacaggggattgtgctacaatctcttgcttctatgtgcaccatgagaaaacccctaagcctaggctgaaacagtatcctaaagtgctcttcatgtcatcaacagatacaacccaatcactatcagagaatccatacaacttgaattcttaacacttcttaaatttgacaccataatctacaatgcatttcacttgcacagtgcacaaaacgagacaagagacttacaacaaatagagtgtctggccttgttgcagtgagatacattagacatccaatcaagctcctataatatccttcatcaattttatcagcaccatcttgcttgctgaacttctccttttgattcataggggagctaacagatttgcattactcccatttgaaaacttctttaaaatttcttttgcatatttctttgacagaaaaacactttgttctaactttgcttgatctcaaatttcagaaaataagtcatgagaaccagatcagtcttttaaaag

SEQ ID NO: 7542 - DNA, 432 bp, Glycine max
ttaaagatattcaagatggattttcattacagtctataaagtcttagaaaggatatatttaataggaagggaattcccattgaagtaacaaaaggtttggccaagaaaaataagttaaaaagtcttttacaagaaatttactctcttgtgatcgattaccaaaggatgtagtcgattaccagtggccacaacttgatttacacagctattaaaatttgaattcaaaatttgccttgtgttatcgattacacatatatggtaatcgattcccaccgtttctgaacgttttatttcaatttttaagcttgtaatcgattacacatatactggaatcgattaccaaaacagagtttcagagaatattctcaacagtcacatctttttatgtggttcttgaatggctatcaaaagcctatatatatgtgacttgag

SEQ ID NO: 7543 - DNA, 468 bp, Glycine max
agcttttattatgttttgtgaatgatctatgacattatgttatttatttattctttgaacattagttatgttttaagtatttggtacttagttaattatgactgatcttggtgtctttattttgcacttagatgcttatgttttatacttagacttggttattttgtgatatatgactaagtggtttgcatctcaatttggttttattaaaattatgctttatgtatgtttttagaatcttttatgtttgttttacaaattatgctttgtgtatgattaaattattcatgttttacgcactttggcctatttgatgttgccaaagggggagagaaaatgggtattttagaaatcaagatattatattttcaaagctttaaaattaagcataaattcaaaaagaaagggggagaaagagattagtgaactgtataacaaaacttgtatgtattctcttgatttcaggat

SEQ ID NO: 7544 - DNA, 525 bp, Glycine max
agcttttaattaaagaataattccatgctcatgggtgatgacatgaatgcaaccatagtaatcagcaacttgaatgtcatggattgagcaaatgttacaatgagtaccattgttggtatgattttttttttcaaccatttttctatactttactattgctatttaataagcaaatgcatgtttttcttttcatttgtacagcatgttctaataatattatggttggctttgtaggtggggatggggatgtttatagtccaagatatttgcttccaaaacgggtaggcccacgtagaaattgcaagtagtagctctctacttatgcatagatatatccatcataaaccgttgtggcattctgggttaacaagacattctttattccaatggaagagacaaatttattgagactcctttatcaacaataccactgattttatctttgaaacgtatttgttgtgtttcaaaattatctttggagatgtagttgttgttttaatgggactttttaagtcgccatggtaa

SEQ ID NO: 7545 - DNA, 484 bp, Glycine max
tcacgatatactacgggacacaatcggacatccgagtttttattattgtcattttaattttctcagagcttccgttttcaattacgagcggctcgatatattacggggttgaatcagacatccgaggaaaacgtttttgtcgttagaatttgctcagagcttttgttttcaatatcaagcgtctcgttatattacgggacttaatcgaacctctgagttaaaatttaatggggtttgaatttgctacgagcttctgtttccaattacgagcgcctcgatatactacgggacacaatcggacatccaagatataagttatttttttttgcgtttgctcagagcttatgttttcaattctgagcatctcgatatattacgagacacaatcgtacatccgagtaaaaagttattgttgttagagtttgaaaagagcttatgttttcaattacgagtgtctcaatatattacgggtcacaatcggaca

SEQ ID NO: 7546 - DNA, 479 bp, Glycine max
tctggtgggacatcttgacttgctgtccaatctgacattcaccacagattctgccttcttctatttccagattgtaggacctcggttgttgtcttatctccaccataatggccgccacatggtgagtagggacaatgccataatatgttcttggcctcctcctttgtcacacatcttctgagaagattgtcagctcctatcttgaacaagtatggatcatcccatatgtaagatcgagcatcatgaaagaatttattcctttgctggcaagtcaggtacttccgaatgattcccgctgctttgaagttggccaaatcaccaaaccaaggtctttcattcaccatgaacatggattcatcaaggaattcatctgtgatttatgcttcttttgaagtgacttactcaataaccaatcatgataagtggcacgctacaacatattcaaaatcctttttatctccgataaccaaatcaaattc

SEQ ID NO: 7547 - DNA, 437 bp, Glycine max
agcttatatataacaactaaaatataactaaaaatttaattaaaatatctgtcgatttttttttgattaaaatatattgatagtgtaaagttgttttttaaaattattttaaaagttgtattttttggtacatagcatgaaacttaaagttatatttagaataatttttgaagcgataaaaaatgattatttttctttatagaaaatgagtcggctcacataaatatttataaaatttgacagttgcactgtgatattgcatatagtagctttttaacccagtttaattatttagatttggatgtggtcctctgatttccaagacccactgtattgtttccctttgtactcttctcccttataacctgcctgcctttttatttttaattccaaccatttattattaaatagcgctccccctccccattttttttttc

SEQ ID NO: 7548 - DNA, 443 bp, Glycine max
aattattagtgtgggttggatgttgaattctggttgtacctggtgcggagatgatggtacagcgggtgaaccataagctgaagtttcttttggtgaggtagccctggaaaagcagagcgtttggaatgatttcgtaaatctcagagaactattgggaaatgctggtgaaaacacgaatgtcacgaaaatataaatttgaataacgaatgtacagggccgtgtgaagcaacggtcgaatatgccttggttcagtagtgaacgcgctattaatgataagtgattcgtttgggcacgttcagatatcactagctgctacaattactctagcatacaaatgcccagcttgcccctcatattttcaaactgatttgcatccacagcctttgtgaaaatatctgctatttgatcctcagtggcaacatgcttcagtgcgatcactttat

SEQ ID NO: 7549 - DNA, 555 bp, Glycine max
agcttgtcaggttcagtttcaattaagctcttggggcatcctatggactgagcgaaaaggctcgggtcatcaaatactgcacatcttttaaagcacaaaacgaggatcggaacctcaaccctacgttctttttaaaagactgcaatgagaaaattacagaggacaggaatccctaggggaaaccaagaagaacacacaaaaataaaaacatgcagcgacttcctcaattgccccagatcttaagcatattatcgcttgacaacgtcggagttcacgggtgaaggtagctcctcgtcatccatgttggcgagcaccagggcccctccggagaaagccctttttacaatgaaaggcccttcatagttcggggcccactttcctctgttgtctttcagagcttgggaaactttcttcagcaccaagtccccttcgctgaacctgcgcgagcatacctcttgtcaaaagcgttcttcactcattttttatataaacgcccgtggctcatggtggccaaacgcttgccttctatgagattaagctgatcgaaacgtgcct

SEQ ID NO: 7550 - DNA, 458 bp, Glycine max
agcttcaaaggtctctatatggcctgatttttgctaatagagcatggtttgcaagattatcatcttttctgatttcccatggatacaagcaatgtacttctgaccattcttttttcattaagcatggttgcaacacaattgttattttgctggtttatgttggtgacattgtcttgacaggcaatgatttgtctaaaattcaaagaattacaaatctacttgacaatgctttcaaaattaaggacttaggagactttaagtactttctggggtttgaggtagctagaagctctattggtataaatctatatcaaagaaagtatgcactggacattctcaataatgttgacatgcttggttctaagccacgttctacaccttgtgattacacccaccaacatcaacactcatggtcacctattttagcagaagatgtttcctcttataggagattaata

SEQ ID NO: 7551 - DNA, 370 bp, Glycine max
tgaatcttctaccccatttctgacagacaatgggtgtgttcaccttaagtggttcctaagaagacatgcctcacagtgattaagaatgagaagaatgagcttatccccacaagagtgcagaacagctggcgagtctgcattggttatatgaggctgaaccatgtgaccacaaaatatcattttcccctgccattcattgatcaaatgcttgagcgctcggcaagttagtctcattactattttcttgaagggttttgtggttgtttaccaagtcatattgctcctgaggatccagaaaagagcatattctcctggtcctttaacgcttttttctattagaggatgccctttgggccatgcgacgcccctg

SEQ ID NO: 7552 - DNA, 354 bp, Glycine max
catataaaacccaagacccttaagggctttgctgataacttcttcccggtccaagcttcaattggaggcttggcttttacaaacttaattggacatttggtgaatatggaaataacaggggaaactggttcaacccaaaatggggtaaggaatcccttttccttgagcatcgatctagccatctccataactgggcgaatctttcttttggacacttcattttggtgaagagaatatgccactggaagttggctcttaatggcttcatccttaccaaatctttcaaactcgcgagagggggactctttgccgctatcacttcttaatacttttatccattttccactttgattt

SEQ ID NO: 7553 - DNA, 458 bp, Glycine max
agcttgttggtggcaaagtcaaaatctaattgaaggtaaacttgaatcaacctgtagctagctatttttgtattcattgtaactaacggagattctaaatttccacttaatatgtgaagttgtaccttttctgagaccttattgctactaccatttagtagctctggtgccatccaaggtagagttccacgaacaccaccagacaccaaggtatttcgcttaatctttgataggccaaaatcaccaacctggtgaaaagcaagtttcttagctttatcacaatgaagacaatgtaatagaatgaataatccacagcttgaaaagataccttgcatattggccgcataggatccttcaagttcacgagcaaattgtcacattttaagtcaaaatgcacaatatttttcgagtgtgaatattccattccaaaagcagcatccatggcaattatcagtctc

SEQ ID NO: 7554 - DNA, 558 bp, Glycine max
tttaaagaattaagtgttaagggtcaacctcaatatgttgtcttaacttaatgaacttaatgagtagattgatactttaaagacaaccttagccaaatttgttggagaaacggaaaatcttaacaaattggaacgatatggaagatgtcccatagacaaatctggtcatgggtatgagggacaaatgcatgtgaagtttgtcaaaacagaaaacaagttaaaagttccttttctagcaaaaatattttttcctcctcaagacctttagaattattacatcctgatctgtttggcccaactagaacaacctcagtaagtggaaaaaggtatagactagttgcagtggataattactctagatggacctagattttgttcctagcccacaaggatgagtccttcaatgtcttctttaaattttgtaaaagagttcaaaatgaaaaaagaatgtgcattacttcaattagaaaggacaatggaaaagaatttgaaaatgaaaatttttcactattataggaggatttctatgtgtcttgaaattatgagctactcactcat

SEQ ID NO: 7555 - DNA, 621 bp, Glycine max
  unsure at all n locations
agttgaagatactccttttgcttctcccattttatgatcgcatgccaagtacttacccattcccattcccttctttacactcaactcatgtaaaaacaattgaggtgtttcgattaaagagaacttcagatttctgaaaattaatggattggcctaggcgttgccattcttcattgtttgctctaaagaaaaggatagagtcatgtaaaacaaaatcttcaaggatgctcttcagctttagacattcttcatcatttgctttaaagaaaaggaaacagtcatctctgaagagtagatgatagatactaagggcacttatgtagatttttaccccatgaatacaacctctaacttctagtgatttgattaatgtcaataagcccttattgcaaaggatgacgaggtagggggacaaagggttcccctatctcaacccgtgacctatgacgataggcctaaccttctcactattaactatgagtgagtagctcataaattcaagacacatcagaaatcctcctataatagttgaaaattttcattntcaaattcttttccattgtcccttctaattgaaggaatgcacattcttttttcattgtgaactctttacaaaattaa

SEQ ID NO: 7556 - DNA, 509 bp, Glycine max
  unsure at all n locations
agcttctctctgtgtattacctttctctttacgattggtttcttctaaatcgattctttctttctctccttggtcatggctatcattgatgattctaacccctcaattcttcattcatccaataatcctagcattgctctagtttcacacctcacaagtgaaaactacaattcttggaagaaagcaatgcgcatggcacnttacgggaagaacaaatatgagtttgtcgatggttcaattcctgaacctactttgggtcactccacccatgctttatggcatcgcaatgataacattgtctcatcctggctccttaattcgttatcaaaggagatgcaagtgagtatcttacactgttcttttgccaaagcaatttgtgatgatctcacagaacgtttcgaacaacgtaatgggcatttgattttcaacttaagcctgaattgatcactttgcaacaagggtccatgtctggttcttccttttactccaagcttcgttctctctgggag

SEQ ID NO: 7557 - DNA, 497 bp, Glycine max
gctttttaacaaaattttcagttttgttttttctacgttcactatatttatttattggattaggttttcacaacacgtgtcaaattggactgatttgccattctgagagactgcagcgctggaagtcaagaatgagcttgatttcaagaataaggcattatttacccaatgtatagacaacctcttcattcgacagtagtgtaacttaaaatcatcaaggaggtccggggctttactgatttaggtttgaaggaggcaaaggatttagtggaaaaagctccttccgttataaagaaaggcgtttcaaaggaagaagcagagcaataatagagaaaatgaaaattcttggtgcaaaagttgttatggaatgaagtgatatattttgtttcttcccgctttcaatattttagttggtagaaaaatttggattggtgacccaggatactactttgctagtgctgtgttaaatttttttttacacgaactggaatttgatt

SEQ ID NO: 7558 - DNA, 514 bp, Glycine max
agctttagctttgtccccaaggcttcatgtagacttgtccaaaatcgcgaagtgaacctcggatccctgtcagatacaatactagaaggaattccatgcaacctcactacttccttgatgtacaactccactagcttctccattctatacttcatattcaccggaataaaatgagcagatttggtgagtcgatctactatgacccacacagcatcatgtccacgactagtcttgggtaaactagatacaaaatccatagatatgctctcccatttccattccggaatttccaatggcttcaattctcctgatggtcgctggtgctcaaccttagctttttgacatgtcaaacatcttgctacatattcagctacatctttcttcatgccatgccaccaaaaacttctcttcaaatcttggtacatcttagtcattcttggatggaaactaagacgacttttatgcgcttcttccaagatcttaactttcaaatcatctaaatatggcacatata

SEQ ID NO: 7559 - DNA, 493 bp, Glycine max
tatgaatatttcaagaaagacattaaaactctattccttgtatttgttcttatgcttttatatgttgagatttgatagtgttggatcatgaaaacttgtggtgtgaaaagtctcatgatgtgtagataaactatgtgagagttcatgtgattggtgataatgatatgaatagtgaattgatgaagaattgagcaagatgtgagtgatgaattggtgataagttgaatgagatgtatgacgttgatgtcgtgttattatcatataattaactttgttttacaaactaatataaaataattatatgttatgttgagtaactctatgtacatgaagaagacccataaatgctaatttgtgaagtgatgatacatgtatataattattgtggtaagagatgctcataattatgtttattgatggatgtcttacattgtgtttattgatttctcgatgatgatatgagatgtggctgagatgattttgttttattatt

SEQ ID NO: 7560 - DNA, 315 bp, Glycine max
atatcctgatgaaggtgtccatatgttctttttactggactaatacatttgctacccaagtttcatggtcttgcaggtgaaaatcctcataagcatcttaaggagttccatattgtttgtttcaccatgaagccccctgatgtccaagaagatcatatctttctaaaggcttttcctcattctttggagggagtggcaaaagattggctatactatcttgctcctaggtccattttcagctgggatgaccttaagagggtgttcttgggcaaattcttccctgcatctatgaccactgccatcagaaaagacatt

SEQ ID NO: 7561 - DNA, 442 bp, Glycine max
tatagttattggagggagaataaagcaatccaaaatcatttgaacctttcaagtaacgaagaattctttttgcggcttttagatgaggacaggtaggagcctccataaagcgacacacaactcccaccgcatatagaatatcgggcctcgtattggttagataccttaaactccccacaagactcttgaagaccgcggagtctaccttctctccttcatcaaactttgataacttcaagccaccttccataggtgtgttcacgggattgcaatcaagcatattaaatttcttcaacacttcttttgtgtagcttccttgtgagacaaagatcccattctccgtttgcttcacttgcattcccaagtaatatgacatgagtcccatatctgtcatatcaaattcacgagacatggactccttgaagtctgtcaacaaatttgg

SEQ ID NO: 7562 - DNA, 515 bp, Glycine max
agcttgtagggttaaagtctcacgattgttacgtgctcatgcaacaattgttagccgtggctatacgagacatctttccaaacaaagtcaggttagcgataactcgcctgtgctttttcttccatgctatatttagcaaagtcattgatccagtcatgtttgttgagttggaaaatgaggccacaattatactgtgccagttggagatgtattttccccctgctttctttgacatcatgattcacttgattgtgcatctggtcagagaaatcaaatgttgtggtcctgtttatctacagtggatgtacccggttgagcgatacatgaagatcttaaaagggtatacaaagaatctatatcgtccataagcatctattgttgagaggtacattgcagaagaagccattgaattttgttcagaatacttagagaaggctaaacctgttgggcttcctgagtctcggcatgatgacagaagggggggtaagggttcaagaagactgcatgtgatcact

SEQ ID NO: 7563 - DNA, 304 bp, Glycine max
ctcagcttcacaaggagaaatatacctaccatcgagataatgcttattcttatcaatagactgctcagttgtttcatcgtcattctgggcaggtacaaaagccgtggttatgcgatcataaccttttttaatgtgcttgaataaatatttgatggacattgattgattgcaccattctatgttgaggtgagcctgatatttcaacaataagattggattgtatggtaccacgtatctattgtctaggggtattccatttttatctatattttactatcattatgccttctataataggatattc

SEQ ID NO: 7564 - DNA, 598 bp, Glycine max
tgagatgaggaagtgttgaagggtgaaacttcctgcttttattgttgaccacagagtggtacctggagatatgtctcgggggtcaagagaccttggggacgtcaggtggggtgctattgcccaaaaccaagcttgaccaatcccgacccaacccgggcatagtcggtcagtgagaacctgtgatgtacctaagcaggcgagctcctggcagtcaacagatgaaaggaaaacgagaccactaagcaaggaggcttgtggtggctggccagctgtgaattctgtgtaatatgtggattgtggcctctggtaatcgattaccaagggtgggtaatcgattacaaggcttataaatgaagacaggaggctaagatggtctctggtaatccataaccactgggcgtgaaactgaagaaagagcgcgaacttcggtcttagctgaaagaatacacacagtaggttgcttttttgattttcatgaaattacaacctctcctagaaacacacatgaaccagatgttcacctgcatgtgtctaaacatcctccccaatcagcatttgcatatgcagataatttgaaggagtttcttgctggaaaata

SEQ ID NO: 7565 - DNA, 514 bp, Glycine max
tagtaactaactctgctctaactaattgccaactaatctaactagcctctaactgaaaataactaactccatctttttcatacagctgtaatacccccctcaagttggagagtaaatgttaatgagtcccaacttacgggtaaaagaagagaaagccagaagcattaagggctttgtgaagatatctgcaacttgatgttggtatttcacatgaacaagcttaagggtgtttgactgcactaactcacaaatgaagtgataatcaatatcaatgtgtttggatcgttcatggtgagctggattagatgctagactaattgcaaatttgctatcacagaaaagcatggtagatttgatggaaatctcaaagtgcaggagtaatcgtcttatccaaattacttcacttgaaactgaggaaagagctcgatattctgtccttgctgaatatttagacacagtggtttgcttttttgatttccatgatattaaaacatctcctagaaacacacatgaa

SEQ ID NO: 7566 - DNA, 530 bp, Glycine max
tttgtcactccacccataccctggtggatataaaggcttctttgaatcagtttgtaatgtattatacataagggcatgtgcttgctgaaaagactcttgtccgaggtcaccaatcatatgctccaagtgatctcccatttctacatcaaatggttcagattgggacccattctgcatgtctatcaattcaccatgccatatccacgctgtataattcttcttaatcccatcacacaacagatgctctcggttgtcatgcaatatttatcgtatcccattcaaacaatttatacaaggacacaaaaattttccatcctaatccagatgacttctttcgaaggcaaattgcaagaactcttcgacgccttccttatatgcaaggctcatgcgacttttgttcatccaacttcgatccatctaaataataactctgtgatactcacaaaagtattcgatgcatgaaaatatcgctattttattataagtgtggccctatcccattgatgaagacatttttttatggtagcttc

SEQ ID NO: 7567 - DNA, 586 bp, Glycine max
tcatgtttatcaaatttgaaagctttttggcttttgacagaagttggaacatgcagaacaaaagggtgccagcatgttagtaaactttggaggtctttataagaatggtcaattagtttttttttttcactttctttgtcttccttattttgaattattttcaaaagatacaagaccccgataaaatttagaaaaaataaagaatcgaggtaaatagaaaaaaataagaacccaaaaggtcatttggccttttttggttaactttcataattaaaagttagcttttataagacaacaatatgtaattttaacaaaatagtaacttttgtcatttgaacataaggtaattatattctataactatctaccttgtaatatggtttacactaaacatttgatatgattaaaacttatcatattcttatgatatcaaatttttatcttcttctcatatcctattatactttatccaccaaatgagttattagagtaaatgttgtatacaaacgcctaataagattgtatcattatattatcaaataggtttgacaatataaatctttaagccaaatgcattactttttga

SEQ ID NO: 7568 - DNA, 576 bp, Glycine max
  unsure at all n locations
agcttcgtagaatgctttttagaaaaaataacttgctctaaaataatctactattggtagatttaatctattataagttcatagcctatttttttctattctaattcatattttaatatatattgtgataaatataaatttataaaaaaaattcttggatgccttaattgctttaatttatggcatacaaataaagaaatttcttcaattacttaaatataattataaattttggtttttcgatgaaatgtgaatattctcacaaactttggcccaaatcacttatcgggctattttatgatccatgtcatacttaaagttttttttacctcttaatatattacataggattaaattaaaattcttttatggccctaatatatgagagtactgatacttaatcctaatagacaaatacaactaccgaggtaaatganagagagagaaatgaggggccaattaagaatacaccccaaaagaaatttgcattatgaagaaacaaaactaaagaagaagcaaacaatacttaaatgaatgctagacatgcaagtttccttgtccaaacatcaagtaaac

SEQ ID NO: 7569 - DNA, 467 bp, Glycine max
tgtgctattccaagttcattaatcatacctttaagctatattgcttccttcactccttcagctagggccatgtactctgcttcagttgttgctctatcaaaaactgattgttgatttgttttccaattgattgctgtaccaaacaaagtaaacacatatcctgttaaagatttccttgtgtttacatttcctgcaaaatctgcatctacatagcctgtgattgctgcctcatgtgttgtcttcttgtaccttaatccaactttcaaagatccatttagataccttagtgtccacttcacagcttcctagtgtgcactgccaggatctcccatgaatctgcttataatacttacaacatgagccaagtcaggtttgctgcaaaccattccatacattatgcttcccacaccactggcatatggtgtttgatccattttacaccttttttcagctggttttggtgcttg

SEQ ID NO: 7570 - DNA, 389 bp, Glycine max
tgaagaaacgaatgaaaatgggaacattcatgttatattttctcaggaagaagcatctggaactcgccttctaataaatggaaggacttgcttgcttcatgtgaaatgagtacatttgtaccttacctatgttcattcttccaagaaaagatgtcttttgacttgtaagtaactgggcgtcttctactatgatctttgaattaaaaggaagtgaaggaaatttcatgaccctatattatatatataattgctgctcagaatcttatatcactatatgtttgaaactttttatgtttggaaaacagcacaatgactagtttacacaatcttgcaccttaacatgtatttgcacaatctgaacttgttgagatataatgggaattttattt

SEQ ID NO: 7571 - DNA, 406 bp, Glycine max
ttttagtttcagatgatgcagatgggtttgtagctacctcatgcactcctctaatgactatggcatcatttctggcgctaaactgttgggagttggaagccatcttctcaattaaatttctggcttcagcaggagttatgtctccaagggctccaccactggcagcatctatcatacttctctccatattactgagtccttcataaaaatattggagaagaagttgttctgaaatctgatggtgggggcaactggcacatagtttcttaaatctctcccagtactcatacaggctctctccactgagttgtctaatacctgagatatccttcctgatggctgtggtcctggaagcacggaaaaaattttctaagaatactctcttaaggtcatccccactcgtgat

SEQ ID NO: 7572 - DNA, 457 bp, Glycine max
agcttgaaggtttgtacatgaccaaatctttatttaatcgtctttacctaaagcagtctttgtattcgtttaaaatgcatgaagatagatcagtaggagaacaattggatttgtttaataaactgattctagatcttgaaaatattgatgtcactatcgatgatgaggatcaagctttattattgttgtgctctttgcctaagagttactctcatttcaaagagactttattgtttggaagagattctgtttctcttgatgaagtgcaggctgctctgaattcaaaagaattgaatgaaagaaaggaaaagaagtcatctacaagtggtgaagggctgacagcaagaggcaagaccttcaagaaagatagtaaatttgataagaagaagaaaagccagaaaatcagaagaatggtgaacgaaacatcttcaaaatcagatgttattactgtaaaaag

SEQ ID NO: 7573 - DNA, 429 bp, Glycine max
  unsure at all n locations
tcaacattcaatnttgagcgtctcgatatatgacgagactttttcagacatccgagtaaaaagttattgtcggtttaatttggctcagaaggttcaacaatttcaatttctagcggctcgctatattacgggactcaatcagacatccgagtaaaaagttattgtcgttttaattggctcaaaggttcaacatttaatttcgagcgtctcgctatattacgggactcaatcaaacatccgagtaaaaagttattgtcgtttgaattggctcagagcttcaacattcaattttgagcgtctcgatatattacgagactcaatcagacatccgagtaaaaagttattgtcgtttgaatttgctcacaggttcaacatttaatttcgagcgtcttgatatattacgggactcaatcagacatccgagtaaaa

SEQ ID NO: 7574 - DNA, 468 bp, Glycine max
agcttcaacatcagaccacttccagggtgttggaactacttcacatggatttgatggggcctatgcaagttgaaagccttggaggaaagaggtatgcctatgttgttgtggatgatttctccagatttacctgggtaaactttatcagagagaaatcagaaacctttgaagtattcaaagagttgagtctaagacttcaaagagagaaagactgtgtcatcaagagaatcaggagtgaccatggcagagaatttgaaaacagcaggttcactgaattctgcacatctgaaggcatcactcatgagttctctgcagccattacaccacaacagaatgggatagttgagaggaaaaacaggaccttgcaagaggctgctcgggtcatgcttcatgccaaagaacttccctataatctctgggctgaagccatgaacacagcatgttacatccacaacagagtcacactga

SEQ ID NO: 7575 - DNA, 484 bp, Glycine max
  unsure at all n locations
ttcactctaaagtctcatgacatgagaagagtatattaccttgtaccttttattattgactttacttttggcattaactattaaattcattcattcaacctgcatttagtaacttccttgtggatggagccattcttttccaactcattttaccatgtatgaatgaacagtatggaaaggattatgaatatgaagctccagtcaagcttttggataaactgctgcattcgatgccacaatcaccggatgaacaacttgttgtggtctctcaggtatgctttctctcgggctttctttctgttgtttctcctaaggaccttatgatgtctgattaactttttgacacattaaaggtgctggtggctgatatcaacattggatatgaagatattgntaacacccaaggtggtaatgggtatgttccatcttttttgcttttccttgctgacagctatattggcttaactgctcaagtttttactgg

SEQ ID NO: 7576 - DNA, 440 bp, Glycine max
tggaacaaatatttttaattcttggtccccttagagactttgtaaagatgtctgctaattaatcattagaactaacaaattcactaataacattcttaaaaaggactttctcccgaacaaaatgacaatcaatctcaatatgtttagttctctcatggaatactagattagaagctatatgtatggcttcctgattatcacaacatagcttcatttgttgagtatttccaaacctcaattcttgaagatgtttaatccaaatgagctcacatgtggctacaaccatagctctatattcagcctctgcactagaccttgcaacaacattttgcttcttactcttccgtgagacaagatttccttccaaagacacacaatatcctgaagtggaacgcctatcaatgggtgatcctgccccatctgcatcacaaatccaacta

SEQ ID NO: 7577 - DNA, 298 bp, Glycine max
agcttatgaccatacgaactcctttttagtttccgttggtcaatttccagcgtggagatgaggtatgatcccgaatcggacatccgtgcgaaaagttatgaccactcgattttctcgagagcttccgtagctcaatttccagcgtctcgaaatatcatgaccccgaatcggacatccgggtgaaaacatatgaccacttcgagctatcgagagctcccgttggtcaatgccgagcgtctagaagagttatgcccccgaatagaacattcgagtgaaaacctatgaccattcgaattcc

SEQ ID NO: 7578 - DNA, 510 bp, Glycine max
agctttgatggtgttgagaagaaatcacatgtttgtcatcatcaaaaagggggagaatgtgaatgtatgtatacatgattttgatgatgccaaagaagaatctaacaaggctgcttcaaatgataagcatttgcttcaaaaataattcaagattgcttcaacaaacaaagccttgtttcaagattcactaaagaccaagccttgccttaaaacaatgtgctttcaagacatgcaaggctctggtaatcgattaccaggaagtgtaatcgattaccagaagacagggttgagaaatagctgttgaaaaaggttttgaatttgaattttcaacatgtaatcgattaccatatgtctgtaatcgattaccagcaacgaaactttggaaattcaaattcaaaagtcataacccttcaaattataactgtgtaatcgattacacaaacattgtaatcgattaccagtggaaagtttcagaaaatctgccaacagtcacatcttttcattagattt

SEQ ID NO: 7579 - DNA, 567 bp, Glycine max
  unsure at all n locations
tcccgccaatggtatttaaaatttcatggactttattaatttgtttccttgtattatacgtagatgatattttgcttgtggctaatgataagggcatgctatatgaggtaaaataatttctctcaaagaactttgatatgagggatatgggagagacatcttatgtcataggcataaagatccatagagaaagatctcgaggcattttaggcttgcctcaagaaacctatatcaacaaagttttagagagatttaatatgaaagattgttcaccaagtgtagctcccattgtgaagggtgacaaacttgctttgaatcaatgccccaaaaatgattttgagcgggaacacatgaaaaatattctatatgcttcagcagttggaagccttatgtatgctcaggtttgcactacacctgatattgcattcgctgttggagtcttgggaagatatcaaagtaatccacgtattgaccactggaaagctacaaagaaagtgatgagatatcttctaggaacanaggattacatgctcatgtacagacaaacttgatgtctggaagtgattg

SEQ ID NO: 7580 - DNA, 397 bp, Glycine max
ttgagccaattcaaacgacaataactttttactcggatgtctgattcagtcccgtaatatatcgagacgctcgaagttgaatgttgaacctctagtcaaatgcaaacgacaataattttttcttggatgtctttttgagtcccgtaatatatcgagatgctcgaaattgaatgttgaagctctgagcaaattcaaacgacaataactttttactcggatgtctgattgagtgctgtaatatatcgagacgctcgaaattgaatgttgaacctctgagcaaatgcaaacgacaataatttttttctcggatgtctttttgagtccccgaatataacgagacgctcaaaattgaatggtgaatctctgagcccattcaaacgacaataactttttactt

SEQ ID NO: 7581 - DNA, 408 bp, Glycine max
agcttgtatcaaattcaaacgacaataatgttttactcggatgtttgattgcgtctcgtaatatatcgagacgctcgaaattgaaaacggatgctcgtagcaaatgcaaaccgcaataacttttaactcggatgtatgattgagtaccataatagatcgagacgctcgaaattgaaaaaagaagttctgagcaaattcaaacgactataactttttactcggatgtctgattgagtcccgtaatatattgaggagctcgaaattgagaacagaagctctgaccataatcaaaccacaataactttatattcggatttgcgattgagtcccgtaatatatgaagacgctccaaattgaaaaacagaagctctgaacaaattcaaacgacaataaccttttactcggatg

SEQ ID NO: 7582 - DNA, 308 bp, Glycine max
gacactatataaactcaactttataggctcgagctcggactgaggtgaatactttatatttgatcttggctcattacctgacataggatctctttattttataaggctcaggatggctcatataaaaaaccggcttataccacgaacctatttaaaagtctgcttacagacgtatttgattaatcaatatatttcaaaacctagtgaaatactgactgaaaaaacaaacttacttaattctctataagaaaacgacagatgcaaaaaacattgatgaactaaatgatattgaatacaaatcggtaaag

SEQ ID NO: 7583 - DNA, 562 bp, Glycine max
ttagctagtgtaataaagataccaattatcgatacaaaaactccatatggttgatttatttaaaaaaaaaaaagtcaaaaacaacatgtatggaatagagatatttgaaccaccaaagtaaagaactgttacaaataaggaagaaatgaataggtttaaataggaagcaacataaaataaaccaaatttgagtggtttaaccctatatgctacactcgtttgctacctactattattggttacctgtgatgacagttaattcaaaatgtaatttataatattaatatcttatttttgatttttttaatttgtggttggttgaatactttggtgcatttgtcaagtgattacgattctttgtgttaaaaggtattatcgatcaacttctttatttctaactacaaagttttacatggactgtttatagaaatattttgttatgtattacatttaaaacatattggataagagtgttctcgttagtgacaatttgtcattaattgagtgttaatacatgtcataactatcgataggagtagttgttcttttgcattgcataact

SEQ ID NO: 7584 - DNA, 382 bp, Glycine max
ttgatgcaacatatggagaggttaatgaaacaacgagatgatgcgctccatgagaggttggatcaaatggagaatagagatcataatgaagaagaaaggaggagaagagggaatgatggtgttcctagacaaaaccgaattgatggtattaaactcaacattcctccatttaaaggaaagaatgatccggaggcctacttggagtgggagatgaaaatagagcatgttttctcatgccacaactatgaggaggaccagaaggtgaagcttgccgccacggagttttccgactatgctcttgtgtggtggaacaagctacaaaaggagagagcaagaaatgaagagcccatggttgatacatggacggagatgaaaaagatca

SEQ ID NO: 7585 - DNA, 499 bp, Glycine max
  unsure at all n locations
tcttagtttcagatgatgcagatgggtttgtagctacctcatgcactcctctaatgactatggcatcatttctggcgctaaactgctgggagttggaagccatcttctcaattaaatttctggcttcagcaggagtcatgtctccaagggctccaccactggcagcatctatcatacttctctccatattactgagtccttcataaaaatattggagaagaagctgttctgaaatctgatggtgggggcaactggcacatagtttcttaaatctctcccagtactcatacaggctctctccactgagttgtctaatacctgagatatccttcctgatggctgtggtcctggaagcacggaaatttttttctaagaatactctnttaaggtcatcccagctcgtgatggaccttggagcaaggtaatacagncagtcctttgccactccctctaatgaatgaggaaaagccttcagaaatatgtgatcctcttggacatc

SEQ ID NO: 7586 - DNA, 600 bp, Glycine max
agcttcatattacatgatatagtcttgagtttattttctaacctataaacttgacatactaatatcatcatattcaaacatattttgacccctaagaaaattcttacctcaagaaagaattattaatctcatcctcttcataggttagacactgatagaatttaaaaaatattgtacacttgtttgatctaatttgaggtaactttgaataaatttagttttgtaaccatttcaatgtattagttgaatcaattcaccaatggaaaaggtcccttgagtcttttactgtatattaacagttattactatagtgtaacatatagtaataactggtaaacttgggtatgattccttgacactttctaaactttaaacttgggtatgaatttggaacatattacaagctaattaataagatgaatgaagaagacttctttttgtattgaagaaacattacatatatgatcattattttaccatagcccattggagattaattcccagagaatacattactagacacctcctttttaatggggatggcttgttctctcctagggaaaatatacagaaaatggtaaaaaaaaggggctattggtg

SEQ ID NO: 7587 - DNA, 522 bp, Glycine max
agcttcgcacttgataagggagaacacatgaacagcgctaggcaatgacattcatggtgctctgaacaaatgtggagtatggaggattgccttgatggtcctcacttaagcaatcatgaagttgagctccaaactcgaaagtggaggacacatgaacagccctaaacaagacattcatgtggctctggaaaaggacgagaatggaggattaccttgaggttcctctcttaggaaatcatggaatacagctccaatactcgaaaatggagaacacatgaacagccctaagcaataacattcatgtggcttcggaaaaggacgcgaatggaggattgccttgaggttcctctcttatgcaatcatggaatacagctccagactcgaaaatggaggacacgtgaatgacaacgcaattcactcacgcggcttccggaaaaagatgaataatggaggattgccttgacgggcccctcttatgcaatcatggaacacaactccaaaactcaaaatggaggacacgtg

SEQ ID NO: 7588 - DNA, 520 bp, Glycine max
agctttaagtgcgattcctttccttttcttgttattttcctcatgttgatttagcctcatgagttccatttcgtgttcctgaagctttccaaaaaaagttgcaagagacatgttagtaagatctcttgattctgtaatagtcgttacctttggttgtcattccctgcttaaacatcttagaactttgttaataagatcttcattgggaaatatctttcctaatgatgcaagatgatttacaatatgtgttaatctcttttgcatatcctgcatagttttattttgattcattctaaataattcatattcttgggttagggtatttattctaaacccttttgcatatgttgttccttcatgggttacttgtaaggtatcccacatttcttttgcattcttgcagttggatactctaaaataatcattcatgcctaatgcagatgtaattatatttttggcttttaaattatattggaccatttcctttcttcttcattccattggttcctaaggttttcta

SEQ ID NO: 7589 - DNA, 505 bp, Glycine max
ttatacaactgaaacatggtagaaaaatagtgttttctcatgcatcgacgttttctaaaaccttatcacccttatagacaattgaaaaaacttttaatggaagtcaagagcacgaaattgcactgataccgttgattggtgagcaggttttccagcgagttgaacacctgaatactatatttggaaagacccaaaagaaggataaaagtaagatttgcatatggaagaagaggtccattttctttgatcttccgtattggtctgatctagatgttagacgttgtatcgatgttatgcatgtggagaaaaatttatgtgacagtgtcattgggacgcttcttaacattcaaggcaagatgaaagatggtctgaatacctgtcaagatctagttgacatgggcatatgatcgcagttgcatccaacgtctgatgggaaaaaaatatacttgcctccagcttgtcatactttgtctaaaaaggagaagataagtttttgttagtgtct

SEQ ID NO: 7590 - DNA, 551 bp, Glycine max
  unsure at all n locations
agcttcaccagatttggatgctgcaaagcatatatcattccaatttcattgacaaattcacggttcccttgtttcgatttggaggagagctgcttaacagcaatcacatgaccatctgacaacacaccctgtgattaaaccatggcatcggcattatgtttttataaaagtattgtgggataagtggcataccccgatgctttgaaatcatattcggattatatctgatgattaagtttgtttaccttgtatacaggcccaaatcctccttcacctatcttatttgcagggtctaagttattagtagctgctttaatttgtcttaagctgaaataacccgttttcaattctagaagttctgcagcagggaagatttgtaaataaaatcactattctattataaaatcaacaaataagaggggtggggggaggaganaggagacacacccagagaaaatattgagaaagcaacaaatatttgcaacgaccacgaacctaaatccacatttttttttaaatttgtcatcattttggaacttcaaagtaaaatt

SEQ ID NO: 7591 - DNA, 582 bp, Glycine max
  unsure at all n locations
tgttcgtacatcgttcgcgtgtatgatatccacttgacaaggtttgaagtagaggagaccttcaatcctataacgcaacgtggcggacaaaaatgggcagttaacttgaatggccattattgtcaatgcggaaggtattctgcgcttcactatccatgttcacacattattgcagcttgtggttacgtgagcatgaactactaccaatatatagatgttgtttacaccaatgagcacatcttaaaagcatactccgcacagtggtggcctcttgggaatgaagcggcaattcctccttctgatgaggcatggacactaatccctgacccaactacaattcgtgcgaaaggtcggccaaaatcaacaaggataaggaatgagatggattgtgtcgaaccatctgaccaccgacaaaaatgtagtagatgtggagctgaagggcacaataggcgccgatgtccaatgcaatctgaccgtgggagtaatntatttaattgatttatgtatgttacatgcctgacttgtattgctttaggttttgttcaatgtaattacttcgttggtcttcaataaaatcgtcag

SEQ ID NO: 7592 - DNA, 555 bp, Glycine max
ttgcttctacagataggcctatgggtgttttgaatgcagtcctgtaggcccataatgcatcatccaacttacttgactagtcttttcacgaggaagccacagttttctccaagattttctttagttccctgttggaaactttagcttggccatttttttgtgggtggtaaggtgaggctactatgtgcgtgacatgatagttacctaacaccttctgcagttggctgttacaaaaatgagagccccacatcacttattaagactctaggcactccaaagcgagcaaaaatattcttcttcaaaaacttcaccataattttagcatcactcttcggagttgccactgcttcaacccacttagagacgcaatccatagctacgagaatatattcatttcccaaagatggaggaagaggacctatgaaatcaatcccccaacaatcaaagattcccacttccattatgttttgcaagggaatttcatttctcctagagattcctcccatcctttgacattgatcacaatgaatggcatgttcatgaacatctttgaaa

SEQ ID NO: 7593 - DNA, 588 bp, Glycine max
tgtaaattattgatttaaacattatttagtttattttttcttttaaacataatatacatttatgtaaagtttactttcaccatttagtttgtcaaattatatcaaattcaagttagacaacattattttcaatatttgactcattgtattaagttgaatatgacaattctattattatttgtatctaaagataattattataaaattcaataaatttacattacattccctaaaaaaattataatacataatattttataacattttataatttgatgacaataataatgataaaatgcattaggctagttaactcaactgaaaccttttcaatgaaatttatgtctttaaaatataatatcatattaaatatgaataattctactctcatgtaagtatgatataatatggacttaactcataaaattgtgacttttacattactcaagccttattaaaattttcttgtccaatttgttatattttgttgttggcattgagtcaactcaacttgaacttgataatatatttgtccctctagataattataacattattgtataacattagtgtataacatatattttt

SEQ ID NO: 7594 - DNA, 508 bp, Glycine max
tctaggatgcctattctagatacaaccaaatcaggatgcacactccaaacgaggagaaaacaacatttatcactaaatatgccaacttttgctatagggtcatgcccatcagcctccaaattgcaggcgctacatactagagattgatggatcgaattttcaaacaacagaccggagtctatgttgaccacatggtcgctaaatcttagagcattgcccaacatgtggtagacctggaagaggtgttcggagagctctacaaatatgatatgcgcctcaacccaaaaaaatgtactttcgaggtctgtgaaagaaaattcttgggctttatgatcatgcatcggggaatagaagccaaccccgacaaatgcactgctattttggagatgtgtagtcttactaacgtccaggaaatccaaaagctgaatggaagactaccatccctgtccaggtttcttccaaagcttgctgaaaagtgaagtcgttctacgaattgctcaagaaaaat

SEQ ID NO: 7595 - DNA, 439 bp, Glycine max
agcttcaacatcagaccactttcaggtgctggaactacttcacatggacttgatggggcccatgcaagttgaaagccttggaggaaagaggtatgcctatgttgttgtggatgatttctccagatttacctgggtcaactttttcagagagaaatcagacacctttgaagtattcaaagagttgagtctaagacttcaaagagaaaaagactgtgtcatcaagagaattaggagtgaccatggcagagagtttgaaaacagcaagtttactgaattctgcacatctgaaggcatcactcatgagttctttgcagccattacaccacaacaaaatggcatagttgaaaggaaaaacaggactttgcaggaagctgctagggtcatgcttcatgccaaagaacttccctattatctctgggctgaagccatgaacacaaca

SEQ ID NO: 7596 - DNA, 367 bp, Glycine max
  unsure at all n locations
actcctttaatgacaatagcatcatttcttgcactgaattgttgggagttggaagccatcttatcaatcagattcctagcctcaacaggagtcatatcaccaagagctccaccattggcagcatcaatcatactcctcttcatgttgctaagtccctcatagaaatattgcagaaggagttgctcagaaatctggtggtgaggacagcttgcacacaatttcttgaatctttcccagtactcatacaagctctctccactaagttatctgatgcctgaaatgtcttttctgatggtagtggtcctagatgcanggaagaatttctccaagaacaccctcttaagtcatcccanctggtaatggacct

SEQ ID NO: 7597 - DNA, 381 bp, Glycine max
  unsure at all n locations
gtgccaattcgncttcttctttagttttgtcttcttctggcttcaattcttcagtgggctttccttctgtgtccagcatcttgggatgttcccagcctttgatgacagctttccaggttctgctatccagtgatttgaggaaggccaccattcttgctttccaatattcatagttgcttccatcgagaattggtggtctgttcactggtccgccttctttctccatgttcatcagaatttatctccctagatctcactctgtgatttcgagtgttggctctgataccaattgaaattctgataccaggggacagatgtcgtacaggatgtcacgacatcacgcttcagaacatgcagattatatgtgtccgtatgaacaga

SEQ ID NO: 7598 - DNA, 255 bp, Glycine max
  unsure at all n locations
atctcaaagcttcngtattccaagtcgagcgtctcgatatattacgggactcaatcagacatccgagtgaaaaggtatattcgtttgaatttgctcagaggttcaacattcaatatcgagcgtttcgatatatgaccagactgaattagacatccgagtaaaaagttactgtagtttgaagttgctcagagcttccacattcaatatcgagcgtttcgatatattacgggactgaatcagacatctgagaaaaaa

SEQ ID NO: 7599 - DNA, 265 bp, Glycine max
  unsure at all n locations
ttactcggatgtctgattgagacccgtaatatatcgagacgctcgaaattgaataccgaagctctgagcaaattcaaacgacaataagtttttactcgtatgttcgattgaatcccgtaatatatcgaaacgctcgaaattgaagaccgaagatctgagcgaattcaaacgacaataactttttactcggatgtctgattgagtcccgtagtatatcgagacgctcacactngaatgccgaagctctgagcaaattcaaacgaca

SEQ ID NO: 7600 - DNA, 363 bp, Glycine max
  unsure at all n locations
aacataagcacttagacaatgaaggaaagctggagttgctgcacatgatgtccaacgttatgtcaaagaataaaatcgggctgcacaatgcacaaggcaagataaagtgtcaaatgaagaattgaagctgcaggattcacgatgtctgatacaatgtccaggacatcctgcccgaaaatactggagttgctgaaagcattgaagttgcaggatccacgatgtcggatacaatgtccaggacatcctgcccgaaaatactggagttgctgaaagcattgaagttgcaggatccgcgatgtcggatactatgtccacgacatctggcccgaanattctggacatataaatctgttatatctttaa

SEQ ID NO: 7601 - DNA, 325 bp, Glycine max
  unsure at all n locations
agctttgaatgctctattcaatggagttgttatgaatatcttcagacttatcaacacatgcacagtggccaaggatgcatgggagatcctgaaaaccactcatgaaggaacctccaaagtgaagatgtccagattgcaactattggctacaaaattcgaaaatctgaagatgaaggaggaagaatgtattcatgacttccacatgaacattcttgaaattgccaatgcttgcactgccttgggagaaaggatgacagacganaagctggtgagaaagatcctcagatccttgcctaagagaattgacatgaaagtcactgcaata

SEQ ID NO: 7602 - DNA, 296 bp, Glycine max
  unsure at all n locations
agctatcgagaatataaaattgtcataacttttcactcggatgtccgattcangcacatcaaatatctagacgctcgaaattgaacaacggaagctctcgagaatttaaaattgtcataacttttcactcggatgtccgattcaggaacatcacatatctagacgctcgaaattaaacaacggaacctctcgagaaattcaagtggtcataacttttcactcgtatgtccgattcacgcgcataatatattgagacgctcgaaattgaacaacggaagctctcgagaaatttaaat

SEQ ID NO: 7603 - DNA, 429 bp, Glycine max
  unsure at all n locations
tccttctccattcataatttcagcaatatatattatactgtttttaggctngnnagtgggtntggactaatagaaaactgaaaaatacaatacaactaacaaattaactacaacggagtttcactttgagggtgattcattggctaattgcatatcccgggttaaggaaattgccaagtgcctcaaaaaagacacagtattagcgaaacctagaaattgaaacattaaattggggtgagaaaagaaacacgaaaagattagctcaccgcattttgctctactgcggtagtattaggtttatagaattgacttatataccagtgtcaaccaataccaatatccatagtaagtatgctctgatttagatttattagaatttacttntttacctcattntattcattaaaaatgagtngattttctatggat

SEQ ID NO: 7604 - DNA, 384 bp, Glycine max
  unsure at all n locations
ggagctnttcgactatgctcttgtgtggttgaacaagttactaaaggagagagcaagaaatgaagagccaatggttgatacatgggcggagatgaaaaggatcatgaggaagcagtatgtgccgactagttactcaagggacttgaaattcaagctccaaaaactaacccaaggcaaaaaaggggttgaggagtacttcaaggaaatggatgtgcttatgattcaagcaaagatcgaagaagatgaggaggtaactatggctcgatttcttaatggtttgactaataatatccgtgatattgttgagttgcaggaatttgttgaaatggataatttgcttcacaaagaaatccaagtagagcaacaattaaaaaggaaaggagt

SEQ ID NO: 7605 - DNA, 306 bp, Glycine max
  unsure at all n locations
tcatcttatagatgaaagacaaatggcttttatgaaggggaggcacattcttcatggtgttntgattgccaatgaggttatagctgaggctaaggctaaaaataaaccttgcatggtcttcaaagcggattttgaaaaggcgtatgattcggtttcttggggttttcttgactacatgttgatgaggatgggcttttgtgaaagatggaggaaatggattaatggttgcctgtccactgcaaccatatccattttaattaatggaagtctgttttttggagatgccacttagcataatgttagaac

SEQ ID NO: 7606 - DNA, 423 bp, Glycine max
  unsure at all n locations
tatcctatgggattaccatgcacacaacgatcacaaatttaagtctatttagtntatcacttcctaatagattttgtttctcaagttcatgtaatcctctttcactaacatgacctaatctcaaatgccaaagttttgttttatcaatcaatgtattactagctaccgatgcatgtccaacaatagtggaaccttcaagaataaacaagccattacttttattcttgttacccttagctatgattaaagatccatttgaaatcttacgaacgccatttaaaattctagttgaatatcctagatcatcaaacatgtttatggaaataagatttcttttgagttctggaatgtaccttacatttttcagtagatactctctatcatcaaacattttcaatctcacagttccaatgccttgtacct

SEQ ID NO: 7607 - DNA, 337 bp, Glycine max
agctttatgtaaactagatgccttggttttcctggtaacccaactggccatgaataaaaaatctgcacctgtcgccagactctatggtttatgctcctctaccgaccaccacacagacctttgcccttatgtgcaacaatctgaagcaattgaacaacctgaagcttatgctgcaaacatcaacaacagacctcctcaacctcaacagcaaaatcagccacaacagaataattatgacctctccagcaacaggtacaatcccagatggaggaatcatcccaaccttagatggtcgaatccttcacaacaacaacaacaacagacttatttttcaaat

SEQ ID NO: 7608 - DNA, 424 bp, Glycine max
  unsure at all n locations
actacgcttctacaactaanacatggtagaaaattattgtacactatgcatcggcaatttctaaaacctcatcacccttacagacgattgaaaaaagcttttaatggaagtcaagagcatgaaactgcaccgataccattgactggtgagcaggtcttccagcgggttgaacacctgaatactgtatttggaaagacctaaaagaaggataaaagtaagacttgcataaggaataagaggtccattttctttgatcttccgtattggtctgatctagatgttagccattgtatcaatgttatgcatgtagagaaaaatgtatgtcacagtgtcattgggacgctccttaacattcaaggcaagatgaaagatggtctgaatacccatgaagatctatctgacatgggtatatgattgcagttgc

SEQ ID NO: 7609 - DNA, 387 bp, Glycine max
agctttttgtaagaatggaggagaggattataaatagaatagcacaagtttttgcccaatgaaattttcttgacaaagcaagtgttgaacaaaaactcttagaaagatgttgagaattagtgttaataagttttctgaaattcgtgccatggtcacatatttatagtcatttgatgactcttgaagaaccatgttaaaagttgtgacagttggcaaaaactagtcactttaaaagttgtgactctttggaaatttatttttcaaaaccaatcactggtaatcgattaccattatggtgtaatcgattacatagtttattttatcaaaggttgtgactcttctggtgaagttttgaagtcaacgttcagaactactggtaatcgatta

SEQ ID NO: 7610 - DNA, 319 bp, Glycine max
  unsure at all n locations
agcttgaagganaactgaatgcattggtttattnggtaacccagctggccttgaattagaaatttgttcctgtcgcaagggtttgtggtttgtgctcctctgctgaccaccatacagacctttgcccttccatgcagcaacctggagtaattgagcagcctggagcttatgctgcaaacatttacaatagacctcctcaacctcagcagcaaaatcaaccacaacagaacaattatgacctctccagcaacagatacaaccctggatggaggaatcaccctaatctcagttggtctagccctcaacaacaacaacagca

SEQ ID NO: 7611 - DNA, 385 bp, Glycine max
  unsure at all n locations
agcttatgctgcacacatctacaatagactcttctccacctcagtagcaaaatcagccacaacagaacaattatgacctctctagcaacaggtacaatcccgagtggaggaatcatcccaaccttagatggtttaatccttcaaaacagccgcagcaaatacaacagccttattttcagaatgctgctggcccaagcagaccatacattactccaccaatccaacaacagcaacagccccagaaacagaagacagttgaggctcctccgcaaccctcccttgaagaactngtgaggcanatgactatgcaaaacatgcagtttcaacaagagaccagagcctccattcagagcttaactaatcagatgagacaatnggctacaca

SEQ ID NO: 7612 - DNA, 305 bp, Glycine max
agcttatgaccattcgaatttctcaagagtttttgttgttcaatttcgagcgtgtagatgagttatgtccccgaatcggacatctgtgtgaaaagttatgaccattcgattttctcgagagcttgcgttgttcaatttcgagcgtctcgatatattatgaccccgaatcggacatctgtgtgaaaacgtatgaccattcgattttctcgagagcttccgttgttcaatttccagcgtttagatgagttatgtccccgaatcgaacattcgtgtgaaaacttatgaccattcgaatttctcgagag

SEQ ID NO: 7613 - DNA, 358 bp, Glycine max
  unsure at all n locations
tgaattggacctcggtgtgaaaagttatgaccatnngttantttcgagagcttccgctattcaatttcgcacgtctctatatgtgacgctactgaatcggacatctgtgtgaaaagttatgaccatttgaatttctcgagagcttctgttgcttaaattcgagcgtctcgacatattatgctcccgaatcgggcctccgcttgaaaaattaagacccattgaatttctcgagcgcttccgatgtttaatttcgagcatctcgatatattatcagcctgaatcggacctccgtgtgagaacgtatgaccatttgaatttctcgagagcttccgctgttcaatttcgagcgtgtgaacat

SEQ ID NO: 7614 - DNA, 431 bp, Glycine max
gatcaaaacaattatctaatcattccaatccactcattatatacaattgcttattcaaatcattctcaaacattcatttcatgcaaaacaatccactgcatatcattttcaatcaattcactattcaaacacgctttaggtacaagcaaacaactcaaagtgctgaaatttaaataactgaaattaaaataactgaaatatgacaacgaaatcagctggaaatataaggtgtttaaccttcaccaaaacatcttcaatgactccatatggccttgtgatggagcggtcaactaactggagggtcatgcgtgtgggcattatctctatctctccaagtcgctggcacatggaaagaggcattaaatcgatactagctcccaagtctatgagaagcttgcctacaacaacctcaccaatataacacggtatcg

SEQ ID NO: 7615 - DNA, 410 bp, Glycine max
  unsure at all n locations
gcttgccaacccatggaagctcctaatatctcccacacnttttggggtgggtttattttggaaggccttgattntctcagggtccacttgtaccccatttctaccaactacaaaccctaagaaaactatattatctacacaaaaagtacacttctctatatttgcatagagggtgtttttcctaaggactgaaagaacttgcctgagatgtcctaagtgatcatttaggctcctactgtacactaaaatgtcatcaaaataaaaaactacaaatctacctatgaaatcccttaagacatgatgcataagcctcataaaggtgcttggtgcattagtgagcccaaaaggcatcactagccattcatacaaaccaaacttggtcttgaaagcntgtttccactcatcaccct

SEQ ID NO: 7616 - DNA, 391 bp, Glycine max
  unsure at all n locations
ntgatctaacaaataggttttgagtttattgtccaatgtaaagagaagtcttactttataaaagctttaatatgaaataacctattcccacccataatgggtataggtaatccatgatctcaaaccaaccgaaattgacccaattagtttggttcaaatttttttagcttaggtcaaacccaacacaacccaatcctgcctgttcaatttacaagccaagtaagatgttttgtttttttaactcgtgacccaacccgtaacatataattaaattcattatatatataattaaattattaaacacaaaacactataacttttttctaacataatttattaaattaaatcaattatacttttttctttttcagntggtctttatatttttatc

SEQ ID NO: 7617 - DNA, 395 bp, Glycine max
  unsure at all n locations
tgtgactctnggcaatttctttaaaactagttacttattaagttgtgacttttgaaagaatcttcacaaacaagtcacttagagaattgtgacttttggaaatgtatttttcgaaatcagtcactggtaatcgattaccattaaggtgtaatcgattacacatcaacagatgtgactcttcattttgaattttgaatatcaaaacatttacaagctttggtaatcgattacacaatgtaatgattacaagtattgtgtaatcgattacacaagtttaaaatactttaaaactgtttaaacataagttgtaactattcgaaattgaaatcttaacattttaaaacactagtaatcgattactaccttctggtgatcgattactagagagtaaaact

SEQ ID NO: 7618 - DNA, 439 bp, Glycine max
  unsure at all n locations
ctcactcttcttagtttcagatgatgcagatgggtttgtagctacctcatgcactcctctattgactatggcatcatttctggcgctaaactgctgggagtcggaggccatcttctcaattaaatttctggcttcagcaggagtcatgtctccaagggctccaccactggcagcatctatcatacttctctccatattactgagtccttcataaaaatgttggagaagaagctgttctgaaatctgatggtgagggcaactggcacatattttcttaaatcgctcccagtactcatacaggctctctccactgagttgtctaatacctgagatatctttcctgatggctgtggtcctggaagcanggaaaaaattttctaagaatactctcttaaggtcatcccagctcgtgatggaccttggagcaaggtaatacaac

SEQ ID NO: 7619 - DNA, 359 bp, Glycine max
agcttatgattccatttcctgggaattcttgtattggatgtttaagtccattttctttcccagcccagatctgtacttggatcatggagtgtgtttcttccacttcctttagtgtggcagtcaatggatccatttatggtcacttcaaaggacagcggggtcttaaacaagaggatcctctctccccttatctgtttgtgctctgtttggagtacttttccagagatatgagcagcctcaaggatgatgccaattttaaatttcatcccaactatgcaggtattcagctatctcatttggctgttgcagatgatattatgcttctatctagatgagatatccattctgtgttaactatg

SEQ ID NO: 7620 - DNA, 399 bp, Glycine max
ggacactatgaaactccgcttatggacatcttgatttcgcctatctagtaagcttttctgttctaagaggaatctgtggaggggtgttaggaagttccacattgcttgtctcaatttttaaggtgcaacttatatatctatttgacaacttcactactaatgtcaattggttttaagctaaaatctagtagctttgtttgttttcagacatctgtagaggggagtgttcggaagtctcagatcacttgccttagttccccagatacaacttatatatatgttggacaatttcaattagtgttattggttttaagctaaaatctagcaattgacatgtatgagacacatggaagagaattgatgaagaggtagcctgcttaaattaaagcacataaatgc

SEQ ID NO: 7621 - DNA, 429 bp, Glycine max
  unsure at all n locations
ctcacgcttgttgatcatgactactttagactcttctcctttgtcattcatagacaacatttccgatgacatgcggagatgcccaacggttatccgcacttttgtcaactagaggcaagcgagcctgttgaccaagactattttagtctcacacctttgtcatctacagtcggcaagtcagatgacatgcggagatacccaagggttatccacacctttgtcaactacgggcaagcaagcctgttgaacaccgagactttnttagtctcacacacaaaaattgaagaactacgtaggtctgatttcctcatcacaaattgagaatacttaggagcaaaagccctacttttatcgaccaccccacacttttgttaccgtgactcaagagtctggtggcatacgaagacacccgatggttatccgcacaca

SEQ ID NO: 7622 - DNA, 410 bp, Glycine max
  unsure at all n locations
tctaaactntattcaagaatgaatctctgataccactttttagacaagtggccttagatatcttaagaaggggggttgaattaagatattacaaattatttccccaattaaaattctatcaagttataaattcccttaataatgaacttcttaaatattgattcaaatagaacaatttgaatatgaatataaaacaataataaataaaggagtttaagggaagagaaagtgcaaactcagattgatgtgccatcattttcttctattttctaaaccctttntgcaccattttaattattgattggtcttaattgtcaattaattacgcagttttattatttgggcccattcagactaattgatgtttntaatctaatttcaggaattaatgaagcattgggcttgaatct

SEQ ID NO: 7623 - DNA, 406 bp, Glycine max
  unsure at all n locations
tgctaacccatggaagctcctaatatctcccacactttttgtggtgggccattcttggatggccttgattttctcagggtccacttggaccccatttctaccaactacaaaacctaagaaaactatattatctacacaaaaggtacacttctctatatttgcatagagggtgtttttcctaaggactgaaagaacttgtctgagatgtcctaagtgatcatctaggctcctactatacactaaaatatcatcaaaataaacaactacaaatctacctatgaaatcccttaagacatgatgcataagcctcataaaggtgcttggtgcattagtgagcccaaaaggcatcactagccattcatacaaaccaaacttggtcttgaaagcagttntccactcatcaccc

SEQ ID NO: 7624 - DNA, 381 bp, Glycine max
  unsure at all n locations
acgcttncttaagaagagtccgaaggaagcttgttcttagcttttcatacctctctaatagctaagctcacctccttgagatgagaagctagagcttagctacacaccccctataatagctaagctcaccccatgacaaaaaaacatgaaaatacaaaaaaaaggccttactacaaagactactcaaaatgccccgaaatacaaggctaaaaccctatactactagaatggccaaaatacaaggcccagatgaaggaaatacctattctaatattgacagagataaccgggctcatacttagcccatgggctcgaaatctaccctaaggctcatgagaaccctaaggccttcccttggatctctagcccaatctacttgga

SEQ ID NO: 7625 - DNA, 421 bp, Glycine max
gcttctgctcattctggaacttcaagcttctttgatcagtcctaattaaaattttgtttcctagcagataatgcctccatttcttcactgctaacaccactaccatcagttccctctcatatattgacttgacttgagccctgtctgacagagccttgctccaaaaagctaaaggtttctcttcctacaataaaactgcccctagcccagttcctaatgcatcagtttccatgataaaatttttagagaaatctggtagtgccagaataagaagcctcctcattgctgccttaagctcttcaaaggcatgagtagcttctacgaggtatttataaaccaagttagagatagttacaatccaggtatttataaacctctatacagcagaactaactataactaactctaacaaaaagcttac

SEQ ID NO: 7626 - DNA, 435 bp, Glycine max
agcttcacatcagaccacttccagggtgctggaactactttcatggacttgttggggcctatgcaagttgaaagccttggaggaaagaggtatgcctatgttgttgtggatgatttctccagatttacctgggtcaactttatcagagaaaaatcagacacctttgaagtattcaaggagttgagtctaagacttcaaagagaaaaagactgtgtcatcaagagaatcaggagtgaccatggcagagagtttgaaaacagcaggtttactgaattctgcacatctgaaggcatcactcatgagttctctgcagccattacaccacaacagaatggcatagttgagaggaaaaacaggactttgcaagaggctgctagggtcatgcttcatgccaaagaacttccctataatctctgggctgaagccatgaacaca

SEQ ID NO: 7627 - DNA, 397 bp, Glycine max
  unsure at all n locations
nttatccatggcttcatatggtggtgagcttcttctatactcatcttctacttaaagtgacgtctccattcatctttctccttctccattcctctgcaatcagacctcaagaagcaaaggaatccatggatgaagaagatccaaggcctacaagctccaatggagctacatcatgtggtatcaagagcatcttcgtctaggtgatgttcttttgcttcctctatctttttgttctgtcaactcactataattcgttggtcttcatcttattctccatgtatatcgtccattgtcttgtggtttggttctgcttagagtagattcaattaaatcttagatctacacttgttcttgcatttctatggtacacattttatagatctactcttgaatcatg

SEQ ID NO: 7628 - DNA, 337 bp, Glycine max
agctttggagtttccaagtgccaattcgtcttcttcttttgtccagtcttcttttggcttcaattcattagtgggctttccttctgtgtccaacatcttgggatgttcccagcctttgatgacagctttccaggttctgctatccagtgatttgaggaaggccaccatccttgctttccagtattcatagttggttccatccaaaattggtggtctgttcactggtcctccttctttctccatgttcatcagaatttatctccctagatctcactcagtgatttcgagtgccggctctgataccaattgaaattctgataccaatgccagatgtcgt

SEQ ID NO: 7629 - DNA, 239 bp, Glycine max
  unsure at all n locations
atctggaacatgtgcatatgctatacancccaaaactntaagatgnnttgataatggtcgccttccactctanngcttctttggcatcttgtcatgaacactcttagtcgggcacctattcaaagtgtagacaatggtagcaactacttctgcccagaacttcttaggcattttcttggccttcaacatgtacctcactatatccatgagtgttctattcttcctttcagttacttcat

SEQ ID NO: 7630 - DNA, 303 bp, Glycine max
  unsure at all n locations
taccaccggatatggtactttcacaccttcattcacaactnttcctctnttcttctctctagctttgtcacttctactcctctcttcattctatttgttcatcttttcattntatcatttctctttcttntctacttcttttctgggcattaattctttttcttaaccattattgtattcttttcctgatgcttcacttctcacatatcttcatttatcagacctttctttcacagcctcttctggatacacactatctcatcctcactcacaacctctactcttgcatacagcttcattctc

SEQ ID NO: 7631 - DNA, 232 bp, Glycine max
  unsure at all n locations
tcttctacacttggagtgatcacatgcaatcctcttgaacccttaccacccactctgtcatcatgccgagactcangaagcccaacaggtntagccttctctaagtattctgaacaaaattcaatggcttcttctgcaatgtacctctcaacaatagatgcttctggacgatatagattctntgtattaccctttaagatcttcatgtatcgctcaaccgagtacatccacc

SEQ ID NO: 7632 - DNA, 235 bp, Glycine max
  unsure at all n locations
gatatcaagtgaatattcattgcctctattcctctnttatgcttgcggtntaccgagtntggaggtcctgttcctcatcgacctgctgaagacttggcattttcagttgcaanggttatacagaaagggggatcatntataaattattacatggtaacttcattatngattgattntgatgtngtatatttaaatattcaactcagtccctttattttgttcctttcagtatcat

SEQ ID NO: 7633 - DNA, 161 bp, Glycine max
  unsure at all n locations
gtacttacattngaattcctcgagagctgtccgttgtcaatgtcgagcgtctggatatattatgctcctgaatcggactttcgtgtgannaagtatgaccagttgacattctcgagagcgtntggtgttcaatntccagcgtctcgatatgtgatgtgcct

SEQ ID NO: 7634 - DNA, 218 bp, Glycine max
  unsure at all n locations
tgtgtcatggtcaagaaggtcaatggcaaatagcgaatgtgcaccaactacattgatctanatanggtgtgccctaaagatgcataccctntgtccaacatcgactggctagttgatggagcgtncgggttccaggtgctaagcttctcggacgcctacttcgaatacaaccagatcaaaatgcattctctagacgaggagaanatgacatntatcac

SEQ ID NO: 7635 - DNA, 431 bp, Glycine max
  unsure at all n locations
ctgcagctgtatgtggttaatgtctaaataaaattttatgtttatgttattgaagaaatctatcagtgaaataaatattttgatatgaatttgtagtatttttaatagatangtgatgtaagattattatgtgtaataaggatgaacgttcacttcatttaaaaattgagacatttatttgaaaatatttgagtcacattatttatataagtgagatntttagtagatacgtcttttttgtggaaaattgaaacgtgagtggaatgtaatgagatgtttgtgttatgatcatattaattaatcatcgagaatgtgaatactattcatttgagtatatgtaaaaaatatttctctattcgtatgatattatctgggaaatagatttgattgtattttttagtggccctgaatatctgagcatatttttaata

SEQ ID NO: 7636 - DNA, 174 bp, Glycine max
  unsure at all n locations
atgcaatttaacatctaactgctccaagtaaagattctttgcagctataatactcagaataactctaatggtagtcatctntacaactggagagaagaatctctgtgaaataattcctttgttctgctgaaaccctntcaccacaagtctcgcctgatatcttcttctatcatc

SEQ ID NO: 7637 - DNA, 430 bp, Glycine max
  unsure at all n locations
agcttaagctccttcaactgcacaaggctcttaatatttgaagagtatccttgtggaaccttcacccgacgaagacactgacagaaacttatcttctccttcttggacaaagtatggcaggctgggggcaagtaaattttcttcccatcagaccttggatgcaactgtgatcgtatgcccatatcagctagatcttgacgggtattcaagccatccttcgtcttgccttgaatgttaaggagcgtcccaatcacactgtcacaaacatttttctccacatgcataacatcaatacaatgtctaacgtcaagatcagaccagtttggaagatcaaagaaaatggacctctttttccacatgcaactcttacttttatccttcttttaggtcttcccaaaacaatattcaggtgtngaacccgctgatatac

SEQ ID NO: 7638 - DNA, 465 bp, Glycine max
agcttattagaagggccataggtattttattgatttgtacagaaaattaaacagttgcataaaatttcttggaaaatatttttaatagtatagttaatattctaagtaaaaataaagcttctatacagtttttgcaattatattttggccaaaaatgcaattctagttagtttgatgatacttttttggggctccatccagtctagaaaattatttaaaaatcgtattaagatagtacttgactttcctttatattttaaaataattttttatggctgaaatataatttttgttcaactatttttatcaatcctcaatttaggtattcctagtttagaaatgagacttttaatcctcttattttacaaaattagtagttttggtcctccatccatatcaatgatttgactgttaaaaatacatggactgttataatttaattttttaatgaagtgaatatattta

SEQ ID NO: 7639 - DNA, 462 bp, Glycine max
  unsure at all n locations
agcttagcactagatcggatggacctttttatgtctcggagaggatcaataacaattcctataggtcagacctcctagggggaggggatgatgcaatcctccctaggaagggccagtcactatagtcatgagcaagaggctccaagaggattgggctagagttgctaaagaagaccctagggttctcatgaacctcaggatagatttttgagcccatgggccaaggttgggtccacttatctttgtacatattagactaggttttcattatttttgggccttgtatttagggctccataatgtaggtaaggtactggcgcttcatgacttancctctttttcacctgaaattgcacagatttcatcattaaatccaatggaaatattctagagacaactttaacaatagaacaagatttatttacagaatcactacaaaataaccataaatttggggaacta

SEQ ID NO: 7640 - DNA, 569 bp, Glycine max
cagcttataagccattttcactatgagtttattattacatttattaatcccaaagaaccctgaaacttcatttatatacaaaggcattggatacttattaccccccccatcgaagagaatgaatacaaaaatgttgaggttccatccaatcatttaactgcttcaaggagaaccaaaactagctagggagaaaccatagaagtttttttttccaaagaatttgattccttccaaacaatcgaggagtatactttagaaagtaaaatataaagttaaaatatataatcagttaaaaaattaacagtcgaaattatgataaatacatgcacacacatatataacaaattatataattgtttaaattaggttataataagatacatgcgtatataaaacaaatcataaatataattgtgtatacatttatcttatgaatttagtggtaaaatggttaaaattttttacatactatgatagaaaaagcaacaaatttattatatatttatttgtaaatgaataataaataataaatcgcgggtgtatttatatatatatatatatatatatat

SEQ ID NO: 7641 - DNA, 534 bp, Glycine max
aaatcacaatattctataacccaaatggtcaggctagtttgcataaggttattgaagcaaacactattaccatttgttggcgcatgttctaaaaaaacaaaactaagcatataatgagtagctcactctatgattagttaaggctcgaattctcacaaaaggaaacgtatctgatcttctcttaaaagacattgtatctataagataatatttgtgaaaacaatacattaactagtattttaaccgtgaaatttatatccatttaaaggtgaactaaaaatatgtaaatccatgataaccaaattattgatacatgttaattaattaataataaaattgtataaatttaatttaaatcttgaaagtacatttttagttttattaatttcagtaataaaataatattttaataattttataagataaaatggaccctaattcttatagggattaattttaaataataagtaaaaaaatctcaattttggaaattcgaaatcttaaaccctaaatttcctaccctttgacaatggg

SEQ ID NO: 7642 - DNA, 351 bp, Glycine max
agcttaatatatcgagacgatcaaaattgttcaacggaagctctcgtgaaattaaaatggtcataagttttaactcggatgtccgattcaggagcttcacatatcgagatgcacgaaattgaacaatggaagctctagagaaattctaatggtcataaattttcacacggaggtcctattcaggcgcttaatatatccagacgctcgaaattgaacaatggaagctctcgagatattcaaatggtcataacttttcactcggatgtgcgattcaggtgtatcacatattcagacgcttggaattgataacggaagctctagagaaattaaaatggcattactttttacacg

SEQ ID NO: 7643 - DNA, 298 bp, Glycine max
agcttggcaccaagtaaacctcttttcttgaattatgtccaaagtatatttacgttggcataagaatatcccacttggattccttgcaacttctacaccaagaaaatacttcagggtccccaaatctttcatgtgaaagcacttgctgagatatactttaaatttttggattgtagtggagtcattcccacacacgatcaaatcatccacatacaccaaaactaccagttgcactccatgattaagaagagtaaagagcgagtggtcagaggatgattgttgaaacccaaaaatcgtg

SEQ ID NO: 7644 - DNA, 368 bp, Glycine max
agcttgaaggcaaactggatgcgttggtcaacttggtaacccagctggccttgaatcaaaaatctgtacctgtcgcaagggtttggggtttgtgctcctctgctgaccaccatacagacctttgcccttccatgcagcaacctggagcaattgagcagcctgaagcttatgcagcaaatatatacaatagacctcctcaacctcagcagcaaaatcaaccacagcagagcaattatgacctttccagcaacagatacaaccctggatggaggaatcaccctaacctcagatggtccagccctcagcaacaacaacagcagcctgctcctttctttcaaaatgcttttggcccaagcagaccatacatt

SEQ ID NO: 7645 - DNA, 405 bp, Glycine max
agcttccttaagaagattcctaaagaagcttgagcttagctacacatacctttctaatagctaagctcacctccttgagatgagaagctagagcttagctacacaccccctataatagctaagctcacccccatgacaaaaaacatgaaaataaaaaaaaaagtccttattacaaagacaactcaaaatgccctgaaatacaaggctaaaaccctatactactagaatggccaaaatacaaggcctatacgaaggaaaaacctattctaatatttacaaagataagcgggctcatacttagcccatgggctcgaaatctaccctaaggctcatgagaaccctagggcctttccttggatctctagcctaatctacttggagtcttctaaccaatgcccttgcggg

SEQ ID NO: 7646 - DNA, 488 bp, Glycine max
  unsure at all n locations
agcttttaactgaatttgcaacgttccttttgatntttaaatggtgtaatcgattacaatatattggtaatcgattactagtgtatcttaacgttgaaattcaaatttaagtgtgaagagtcacatcttttcataaaaggcattgtgtaatcgattacatgattatggtaatcgattaccagtgacaagttttgaataaaaagtcaagagatgtaactcttgacatgattttctcaaaattataactcttctaatggttttcttgaccagacatgaagagtctataaaagcaagaccttgacttgcattcaaatatcttttgagaacttttgaacttctttgacaacttttgagaaatcttaaacctttcctactcatcattcttcttcttcttctttctttggcacaaaagctttcttaagtttctgtttttcaaaccttgttcttctacagaaaacaaaaggggccaaatcttttcaatctcttct

SEQ ID NO: 7647 - DNA, 418 bp, Glycine max
gctattaagcccaatcaaaaccctgtctgttccaaacccacacacaatcgcggcccacggtttcacaacggcacagcccgatgtaatggcagcgaacccgccaagcaggccgttacacacgtcaatcacgttccagtggccagccaataaccgcttgctgaacaacgtcgtcagagccgcagtgctcccagccaatgtcgtcgtgacagctgtcctccctatagcgctccattgaccataataccctccacttccataccccttggctattgtcagaaacgaaccagggttgaagccgtaccagccgaaccataacaaaaacgaaccaagcccaactaaagacgcgctgtggccacgtaaagcaaccgaccggccgaacggtcgaaccgggcgattctcgggcctttaattaaagccc

SEQ ID NO: 7648 - DNA, 350 bp, Glycine max
ttttccacactttttggggtgggccattcttggaatgccttgaatttctcaaggtccacttggaccccatttctaccaactaccaaaccctagaaaactattttatctacacaaaaggtacacttctctatatttgcatagagggtgtttttcctaaagactgaaagaacatgtccgagatgtcctaagtgatcatctaggctcctactatacactaaaatatcatcaaaataaacaactacaaatctacctatgaaatcccttaagacatgatgcataagcctcataaaggtgcttggtgcattagtgagcccaaaaggcatcactatccattcatacaaaccaaactt

SEQ ID NO: 7649 - DNA, 327 bp, Glycine max
caacaacagaataattatgacatttcaagccatagataccatccacgctgaaggaatcatccgaatctgagatggacaagtcctccacaacaacaacagcctatccctccttttcagaatgctgctgatccaagcaagccatatgtttcttctccaatgcagctacagcaacagcagttacaacaaagacaacaagtaactgacgctcctcctcaaccttccttataagagttatgggagcaaatgaccatccagaatatgcacattcaacaagagacaagagctttcattcagagtctgacaattagatggtgcagatagctactc

SEQ ID NO: 7650 - DNA, 451 bp, Glycine max
ctcagctatgttgcaacattataatagactccctcagcagcataaccaacaacaacagaataattatgacatttcaagcaatagatacaatccaggttgaaggaatcatccgaatctgagatggacaagtcctccacaacaacaacagcctatccctccttttcagaatgctgctgatccaagcaagccatatgttcctcctccaatgcagcaacagcaacagcagtcacaacaaagacaacaagtaactgaggctcctcctcaaccttccttaaaagagttagtgaggcaaatgaccatccagaatatgcaatttcagcaagagacaagagcttccattcagagtctgacaaattagatggggcagatagctactcagatgaaccaagctccgtcccagaattctgatagattaccttctcaatctatccagaatcccaaaaatgtgagt

SEQ ID NO: 7651 - DNA, 431 bp, Glycine max
gatggtgtcgagaagaaataacatgtttgtcatcatttaaaagggggagaatgtgaatgtatgtatacatgattttgatgatgtcaaagaagaatctaacaaggctacttcaaatgataagcatttgcttcaagaataattcaagattgcttcaacaaacaaatccttgtttcaagattcactaaagaccaagccttgccttataacaaagtgctttcaagacatgcaaggctctggtaatcgattaccacgaagtgtaatcgattacccgaagacagggttgagaaatagctgttgaaaaaggttttgaatttgaattttcaacatgtaatcgattaccatatgtctgtaatcgattaccagcaacgaaactttggagattcaaattcaaaagtcataacccttcagattataactgtgtgatcgataca

SEQ ID NO: 7652 - DNA, 467 bp, Glycine max
  unsure at all n locations
tcacgtgctntagccacgatgcattcttgatgattntcttgatggcgggaacgagtacctgcttcagatgggaatggcttctgggcaccgcaccttccatatgggttccatgagtgcacctctctattgctcttcattctggttgcagtcgccgatgccgtttcaggtttctacaagacaaagattttgcttaagtcatgtgatctctaatcacattttttatttaacaattaataaaattaattntttttacaacattcaaaaactgtcacaaacttataattaaatacaatatttatcaaatgttggcataacttatgttaaagcctttntgtaatatttttaaattttaataacatgaactatatataacatttaataaaatatcacaaaaataaattaatcatatctatctataattngataatatctttntaatgtgatcaaagattttaacaatatgttta

SEQ ID NO: 7653 - DNA, 362 bp, Glycine max
  unsure at all n locations
tgtgcctcttcacgtctagaatatgaatgtagcatatattattctaagacccttaggtgctttgctgatggcttcttcctgttccaagcttcaattggagtcttgtcttttacagacttatttggacatctgttgagtatgtaaacagcagtgtagactgcttcagcccagaatgtgttaagtagtcccttttccttgagcatcgatctagccatctccataactgtgtgattctttctctcgggcactccattntgttgaggagaatatgcaattgtaagttgtctctcaatgccttcattctcacaaaatctttcatactcgcgagaggtgtactctttgccgcgatcacttcgtactac

SEQ ID NO: 7654 - DNA, 439 bp, Glycine max
  unsure at all n locations
cgtgacatttgtcagcatcagaagtatagtgctacctcttctggaggattgctgcaacctcttcctattccggaacaggtctgggaggatgtatcagttgattttatcacagggttgccttgttcgagaggctatgaagctattctggttgttgtggacaggctgaccaaatatagccattttgttccattgaaacacccttatactgccaagggaattgttgagattttcgtaagggaagtagtgaggctacatggagttccaaaatctctcgtgagtgatagagatcctttatttatgagtttgttttggaaggaattttttaagttacaggggacaatgctcaagatgagtacaacttaccttccgcanacggatggacagaccanagtcacaaataggtgtcttgaaacctatatgcgttgtntcattactgacc

SEQ ID NO: 7655 - DNA, 364 bp, Glycine max
  unsure at all n locations
agatactaagctttacctttcattntaacccttagaactttctggccaatattgtcatagataaagcaatgttgatgttcaaaggacactttaaatccctttttaatcaactgacctacacttagcaagttttggtcaatgttaggtacataaagaacatctgatattaatttggtacctgaacacgttgaaattgcaacagttccttttccttttactggaatatagccaccattcccaattctgacctttgagacattagttggcttcaaatccttgaataaagtcttatcatatgtcaggtggttcgtacaaccactatcaatcaaccaacttccacttgattcactactcaagaagcatg

SEQ ID NO: 7656 - DNA, 380 bp, Glycine max
  unsure at all n locations
agcttctggtgggacatcttgacttgctttccaatctgacattcaccacagattctgccttcttctattttcagattgggaatgcctctaacagcacttttgtcaaggattttcttcatgcctcttaagtgcagatgtccaaacctttgatgccatattctgacttcatcttctttggaggatagacatgtagaggagtagctggtttcttggggtgtccataggtaacaattgtcctttgatctgctgcccttcattagaacttcactcttctcatttgtcaccaagcattctgactntgtgaagtttacattgaatccttcatcacacagctgactgatgctaatcaagtttgcagtcagtcccttcaccagcagtac

SEQ ID NO: 7657 - DNA, 435 bp, Glycine max
  unsure at all n locations
atcttgccttcaagttcaccatatctaacaacctcagtaaccgtgtgaaggttgtgcatcccagatacaatggcttcttagaatcagtttctaatttttcataataaggtgcatgcgcttgcgtaaaatcctctttcccaagatcgcgtaacatgtcttttatacgatctctcacttgtacatgaactgcctcagtccaagggattggtgacatttgtggtaactcaccatgccatatccattttgtataagtagaactgataccgtcacatatatgatgtgctctaatgtcatttaatggctgttgtctcccattcagacatttaacacatggactaagatattttccacccatttctactgcattatgtngcacaaatagcaagaattcttcaactctattctcatactcgtcacttattcatgctgctctca

SEQ ID NO: 7658 - DNA, 409 bp, Glycine max
  unsure at all n locations
agcttgtaaaacttgcattctaccctcgtattctttaacatacttactgctttctctaatattgtttacagcatgaccggttactttcaacccctcttgaacaataaggtttaaaatgtgagcacaacatcgtatatgaaaaatacaccaccacttactaaacaatgcatgcaaaaaaagtctttacctcaaatagtcttgcattttatcattcgaagaaacaatatctagagttaatgaaaatattttctgctcaatcccccattcttccaaaaaaaccatatataactttagtcatctcacgccccaagtgtggaggaggaaaatgagaaaaattaagcattntactattcaactttcaatttgcatcaacataatgtgcagttattgaaatataaccctcagaagt

SEQ ID NO: 7659 - DNA, 428 bp, Glycine max
  unsure at all n locations
ngtctaccaggtgtgcttgtattcccaatatcagctgactttggcaaaacaaaatcaaaataagaatgtctcttgctcttcacgcatggtagcaatatcaccattcctatcattaataatggagtgtgggtccttaacagtatggacaacctcagtgatggaacccatagctttcttcttatgactagctggtaaatgaaattaaatgattatatgtgaatgcagaatctcacacactactaaaaatggctcaacatattaccatcataacaaagtaatgatttacgtaatccattcggtcgtaatgccttttcattcatgccttctgtgtacttgctcacctcaacctgcattctgtagtaataactgtattaagcattaaacaaatttaatactgtacaacctttctccatgagagcacatatcta

SEQ ID NO: 7660 - DNA, 434 bp, Glycine max
  unsure at all n locations
agcttcgcgcagatccctctnggaagactatgcctagactaaacaacattattataactgaaattctgataccaatgccagatgtcgtacaggatgtcacgacatcacgcttcagaacatgcagattatctgtgagtgtatgaacagattaaacaagtaaataacacaagagaattggtaacccagttcggtgcaacctcacctacatctgggggctaccaagccagggaggaaatccactaaaatagtgttagttcaaggtctaacagccactgtttacaaccttctcacctaaccactacccgtgcgacctctacctaagagccactcttagatatgagaacccctctcactccctctcaaacactctcccgtgtttacaattaaatcaaggacactccagagaatgctctctgaacaaaagagatcaactc

SEQ ID NO: 7661 - DNA, 430 bp, Glycine max
  unsure at all n locations
agctgccaatcttgtgcagaagcttctcttgttactgcttcttgagaattttaagatatcttattggaactactaatcatggcctacggctcgagataagggtctgagtttaatcttgaacgctattgtgatgttcattggtatggtgataaagtactaaggaacatcactagctgtgcttgattgtccttgtacaatcactaatatcttggtcatctaagaaacaaagcacaattgcaccgtcaacctcaaaagctgagtatgtctcagcagctgtttgttgctgtcaaatcatcttgatcaagcaacaaatgttagattattcactagaataggctaaaatatgcatttggtgtgacaacacgagtgccataaaaccatcgaagaatccaatccaacattcaaggtccaagcacattgacatnaaaca

SEQ ID NO: 7662 - DNA, 436 bp, Glycine max
  unsure at all n locations
ngatccttgaatctggattctggattctaganatcaactttcctcttgaatcttgaagtgttcttcaactttcctcttgaatcttgaagtgttcttgattctatcttgaacatcttgaactcattctttgattgaactttgagctttttgtcatcacctttgtcatcatctttgttatcatcaaaacatctttgaaccaatcttgattcatcatgaagctttgcttctacaccaagggcattggatagaagactccaagaagattgggccagagatgaaagagaaggccctaggattctcatgagccttanggtagattttgggcccatggactaagtatgaacctacttatctttgtacatatcagattaagggttcactatttctgggcttgtacttanggctccatagtgtaaggagggtaccctagtaatgt

SEQ ID NO: 7663 - DNA, 433 bp, Glycine max
  unsure at all n locations
agctntcaatcttgtccaaaagtttctcatgttactgcttctaaaagaattttaagatatcttattggaactactaatcatggcctacggtttgagaaaagggtctgagtttaatcttgaaggctattgtgatgttcatttttatggtgataaagtagaaaggaagagcaccagttgtgcttgttaatttcttggaaaatcactagtttcttggtcatctaagaaacaaagcacaattgccccgtcaacctcaaaagctgagtatgtctcagcagctgtttgttgctgtcaaatcatcttgatcaagcaacaaatgttagattattcactagaataggctaaaatatgcatttggtgtgacaacacgagtgccataaaaccatcgaagaatccaatccaacattcaaggtccaagcacattgacatataacac

SEQ ID NO: 7664 - DNA, 424 bp, Glycine max
  unsure at all n locations
agctntacatgtaacacttgtcactatgttattataagaaactgccttttccttctagcatctctcatgcatctcatgtttttgatttacttcatatggacatatggggcccgtgttcaaaaccatctatgcatggtcacaaatacttcttaacaattgtcgataatcattcacgatttacatgggtacatctcatgcataataaagctgaaacacgacccattatcatgaatttcattacgtccattgaaacccaatatgatagcaaagttaaaataataagaagtgacaatgggcctgagttcatgatgcatggcttctatgcttcaaagggaatagtgcatcaaaccatgtgtgtagaaacgcctgaacaaaacggcatagctgaacgaaaacatcaacacttacttaacgtcacacgtgc

SEQ ID NO: 7665 - DNA, 358 bp, Glycine max
gtatcagttagatctttaagtgcagattttcaggataatgatagatctcatccagcgcaagttgttgcagcccagatacgcacactgctatttaaacatgaaggctgcacgagttttctaccaagtccgagattgaagagttattttgtgagttttgggacttgagtgttttgtgagccaccttgatgttactctaacatcaagtgttggacctgagtgtgtagagttgatctcttttgttcagagagcaatctctggtgtgtatttgaattaattgtaaacacggcagtgtgtttgagagggagtgagaggggattctcatatctaagagtggctcttatgtagaggttgcacgggt

SEQ ID NO: 7666 - DNA, 380 bp, Glycine max
ttctagcatctcttatgcatctgatgtttatgatgtacataatatggacatatggggcccgagtacaaaaccatctatgcatggtcacaaatacttcttaacaactgtcgataatcattcacgatctacatgggtacatctcatgcatagtaaagctgaaacacgacccattatcatgaatttcattacgtccattgaaaccctatatgatagcacagctaaaataataagaggtgacaatgggcctgagttcatgatgcatggcttctatgcttcagagggaatagtgcatcaaaccatgtgtgtagaaacgcctgaacaaaacggtatagctgaacgagaacatcaacacttacttaacgtcacacgtgcacttttgt

SEQ ID NO: 7667 - DNA, 367 bp, Glycine max
agcttcatgcttaagtatgtatggcaaatcttcattactggggatcaacacatacaagtgagcttgtaacacatgttctagacttggagttatcacatgcagtcctcttgaacccttaccacccaccctgtcatcatgccgagactcacgaaggccaacaagtttagccttctcaatgtattctgaacaaaattcaatggcttcttctgcaatgtacctctcaacaatagatgcttctggacgatatagattctttgtatacccttttaagatcttcatgtagataaacaggaccacaacatttgatttctctgaacagatgcacaatcaagtgaatcatggtgtcaaagaaagtaggggaaaaata

SEQ ID NO: 7668 - DNA, 360 bp, Glycine max
agtctcacgattgtcacgtgctcatgcatcaattgttagccgtggctatacgagacatctttccaaacaaagtcaggttagcgataactcgcctgtgctttttcttccatgctatatttagcaaagtcattgatccagtcatgtttgttgagttggaaaatgaggccacaattatactgtgccagttggagatgtattttccccctgctttctttgacatcatgattcacttgattgtgcatctggtcagagaaatcaaatgttgtggtcctgtttatctacagtggatgtacccggttgagcgatacatgacatatctacaacggtatacaacgaatctatatcgtaccatatcatcta

SEQ ID NO: 7669 - DNA, 353 bp, Glycine max
agcttatatattaaatgtttctgagtatttataagttaaattacataaattaatatataaatcatttacataaatcattttatgttatttatacacattgcgtaaatttatactaatatataaattatctaaaataattaaatattgaaatggtattaattttctaagtattataaaataatttacatattaaaaatttttaagtaatttttattaactaccttcaataatttatataaataatttacatattaaattatgtgactatattgattaatataattagaataaaaactattttttaaatgaggttttatagtttaaggttatgttagcttcttaaaagtaatatt

SEQ ID NO: 7670 - DNA, 435 bp, Glycine max
agctttgagtgtggttgataacgagaatattttatttatttcgatagccaattttgactaaaaatgattacaatttcttcattctattgttaattctaatgaaataatgaagaaattaatatctttgtaattttttatcaacagaagttgaaagaagaagattccaaatgttttggaggaaaattgatgcaaaaactggaatgtagctctttcttattatctatttaatgcaatcttgtttctatttctctttatgtgcctaatggtttgatatggtctggtcatttatatagcatgtaggggattatgcaataaaaaatagttattttctaaagaactgaaaaatggtatctaaatgaaatcattcctagaaatacattgatattcatttaacgcatttcatgcatctatattcgtaacgcgatttattatttt

SEQ ID NO: 7671 - DNA, 485 bp, Glycine max
ctcagcttataaggccttgtatggtctgaaacatgctcccagagcttgtaacaagagaatagacacctttctcttgcaaattggattcatgagatgcactactgaatatggtgtgtatgttaaaggagaaagtctttcagataccctcatagtatgtttatatgtggatgatttactgataacaggaaaggattgcagtgctatctcgacattcaggcaagtgatgaagtctgagttcgaaatgtcagatcttggagaattatcatattttctgggcatagagttcaagaggacaaaggctggaatttttatgcaccaaagcaaatacacaattgatgtcctaaagaggtttcagatgcttgactgcaactcagtttcaactcctgttgaaactagtgctgtgctggatcaatctgagcttgataaattggtggataagactatcgtcacacaaatgggtggctgtttgatgtatatatgcaata

SEQ ID NO: 7672 - DNA, 425 bp, Glycine max
agctatgagagatatactgccccatgtatttcatcaacagtgggaataagaaagccatctttgattgtgatggcattcaaggccctgtaatctgtgcaaaatctccaagtgccatccttcttcttgacaagaatgattggagatgaaaatgggctcgtgctaggggcaataatcccttccttgagcatgtcagctatcattacttcaatctgatccttccggctgtgaggatacctatatggcttgacttttactgagccaacaccttcaaccaatgggattgaatgattgcgaattttgctagggggtaatcctgatggcacatcaaatactgttctataagtgtaaagtatcatggccagttctagttccatatcaaccgggatatctaataattgatcctgaggaccatccaaccttgagta

SEQ ID NO: 7673 - DNA, 415 bp, Glycine max
  unsure at all n locations
taagaatattntcctttattatatagattttatgaattttcatttatataattntaattaagttaacttcaaaagataagattgagaatctccttaattagttntgaaattagataagatttataaaagatgtaaattggtttagtagataaaattctagatttttgtaagtgccttattaataattaataattgattatctaatcgataataaatgaatttatcactgtatgtgggcaatcaattacaacaaaaagaattttaattgattattttgtgggataatcaattagtggagttggcaattgattgttcattctatattatcccaaaactagttntccataaatattatcaaagagcacttaatcaatcctaattgtacattntataaatagatntatcaatgtttaac

SEQ ID NO: 7674 - DNA, 420 bp, Glycine max
  unsure at all n locations
taatcagttcanaactaagatattgttgaactggtaatcttttaacaggtcctgtaattgattactagagagaaaatgaacatggccttttgaaattntgaactggtggaataacaacacanatttatttgaattatgatatgtgtaatcgatgaccagaatactataatcgattaccagcaaagacattttagaaaaactctgagaagtcatgactctttagaaatataactatgtaatcgataaccaaaatcctgtaattgattatcagtgaaaaagtttcaaaaaatgttttgaaaagacacatctcttctaactgtttttcaacaggcacaatgagcctatatatatgtgtgtctttacttcgaanaagagagagagagagagattntctaagagaacttaattgtcaaattctct

SEQ ID NO: 7675 - DNA, 399 bp, Glycine max
tgcatgctgctgcttgcaacaccacaccttattgtgtaccattttcacaccacgtgcatagctctaacgcctgatctctattcctattagttgcacgagtgatctctgtagtcttattaacccgggggtgtgggcgatgcatctttctaggactctttccaagttgttgaggcatgacatgaacgaatctccaaatatagaaaaatcatcaataaatacctctatgcatgttaataccatgtcaaaaaaagatggcattcatacacctttggaatgtggatggtgcattgaaaagtccaaggggaattctccgataggaaaaagactccgaatgggcaagtgaaggttgttttctcttgatcctctcgattaataagaatttgattataccctgagtat

SEQ ID NO: 7676 - DNA, 404 bp, Glycine max
  unsure at all n locations
tattacgtgttgatgattatatgtatatcaattgttaatataaattagaaattaatagttcanataagaaaattaaattgaaggaaattaatatattaagattcaacgataaatactttcaatgcacttttagtttaattatttattaactctctttaattgaaaataatatagttcgatttaatatgtacatgttttgtgccatgtaaatattaatattgtgtgatgtttatatgattcatgagatgtgataacatgtttcattgagattataacattgtgattgaaaataaatataaatgtttgattaatacttgatgtgatattacttgtgttgtgacttatgaattgtgaattatacaataattcgactggtgtttactttgagaaaaatgtttatgtgc

SEQ ID NO: 7677 - DNA, 400 bp, Glycine max
agcttctggtgggacatcttgacttgctctcaatctgacattcaccacagattctgccttcttctattatcagattgcgaatgcctctaacagcaccttggtcaatgattatcttcatgcctcttaagtgcacatgtcctaatctttgatgccatattctgactttatcttctttggaggatagacatgtggaggagatactggtttcttgacgtgctcataggtaacagctgtactttgatctgctgcccttcattacaacttgactgttctcatttgctccaagcattctgactttgcgatgttacattcgtattcttcataagacatctgactgatgctgacctagttcacataacttcacctcttcctcattcactattcactttttaattatcaa

SEQ ID NO: 7678 - DNA, 451 bp, Glycine max
  unsure at all n locations
tggtatctaatgagagtatgcaagtttcatcctaagctcttcttgaaaaggatcgtaatgttgagattgtgatagataagatgatatcttctcttgcaacagttgttactcgagagcaagtattggatgattctattagtgggaaaatagtttatattgaggaaggcactatccatttaattgaaaagtataatcagattctttctgaaatttatcaacttgggcaatctttctctgaggtaggcttggatactaacgagcatgaatacgggaacatactcgctgatgctcgtggtgggttactggagctcaaaaaaaaggaaacagaattggttgaaaaactggctcatttataagatgagaatcagaaaatgggtgatgagcttgacaagggataggtgatgataaggacattaaatactgaacttggaaatctganaatagaactcga

SEQ ID NO: 7679 - DNA, 419 bp, Glycine max
  unsure at all n locations
actttcgagcctcacgatatattacgggactctttcaaacatccgagaaaaaagttattatcgtttgaatntgctcagaggttcaacattcaatttcgagcgtctcgatatgttatgggactcaatcagatatccgagtaaaaagttattgtcgtctgaattggctcagagcttcaacattcaatttcgagcgtctcgatatatgacgggactcaatcagacatccgagtaaaaagttattgtcgtttcaattggctcagaggttcaacattcaatttcgagcgtctcgctatattacgggactcaatcagacatacgagtaaaaagatattgtcgcttgaataggctcanagcttcaacattcaattttgagggtctcgatatattacgggactcaatcagacatccgagtaaaacgt

SEQ ID NO: 7680 - DNA, 454 bp, Glycine max
  unsure at all n locations
aaagacaatctggacatttttctttgaaccagaaaagggaatgtggttggattggagtgcatgtangagagtaagggatgctgggtgaccatatcgttggtgccataatttgatggatgaattggaacaaatgaaggaggcagatgggttgggtgcagttgggttaaacttgtacacattgtcttcattcaatccttgcagaagaagctccctcgttcataggtcctttaccttcattcaatccttgcagaagaagctccctcgttcataggtcctttacctcaaaatgcctaaganaaaattcaatggaaactatgttagtttggcacagatgatagacggatattcatatttgggtgacatttggaacataaagaatatttganagccttaaaggagaaccattagtgggaatattggtggagccaatataagtaatangaagttgattacc

SEQ ID NO: 7681 - DNA, 230 bp, Glycine max
  unsure at all n locations
ccgtgtcagagacgccagtggcttcagtaatgagaaagcctccgctggaagttctctgggagtattagaggatggcatggngttgtgggacgttgtcgtaagacctctgtctggtcagcggtgccataacaactctgcaagcaaaattaatcagcaattgaaatctatggaaataggaaggaaaaaaagagatagagatacctatgggacagatagaatgtgcccatctt

SEQ ID NO: 7682 - DNA, 254 bp, Glycine max
  unsure at all n locations
gctctcgatatattcanatggtcttaatctttcacatgaatgtccgattcnggcgcataatatgtcgagaagctcgaaattgaacaacggaagctcttgagaanatcanatggtcataacttttcacacggatgtccgattcaggcttataatatatcgatacgctcgaaattaaacatcagaaactctcgcgaaatttacatggtcataactnttcacacggatgtccaattcaggcgcataatatgtcgaga

SEQ ID NO: 7683 - DNA, 278 bp, Glycine max
  unsure at all n locations
gctgtacctgagctctatttcaattttgggggcatctggaggtcttattttanggtcactgacccattctaccactacaaacctaagaaactatatatctacacanaaggacacttctctatatttgcatagagggtgtnttcctaaggactaanagaactngcctgagatgtcctaagtgatcatctangctcctaatgtacactanaatatcatcaaaatanacaactacaaatctacctatganatcccttaagaacatgatgcataagcctcat

SEQ ID NO: 7684 - DNA, 344 bp, Glycine max
  unsure at all n locations
aaatatttttattatggagaaatagaaatctattaactaatatgattatttattgactttattatcaaacttagtatagttctacattacaatattatttaatattacacatattttttattgttcattatacacgcatttaatcatttattctatatttggataagtctcaaacgaatanagtcattgttaaaacaaacaatagtgtaattaaactaatggacaaaaaattaatagactaattatttttgtttgagagatttttgcggagtattttattatttgagtgctttcattagtcttaatattttatatttaaaagcactatataaattttggtaata

SEQ ID NO: 7685 - DNA, 218 bp, Glycine max
  unsure at all n locations
gtctaaaccattaaagtatgtgttcttggagggtgacaccanacctatagtaatcagtaatgcactaacatangaagaagagaataggttggtggacatcctgaggaagcataaggaagcaatcagatggcatatatctgacttgaagggaatcagtccttcgtactgcatgcataagataatgatagaggacgaatacaagcctattcgacaacctc

SEQ ID NO: 7686 - DNA, 243 bp, Glycine max
  unsure at all n locations
atgataagagcaaagaaataatannattgganatctcttttgttagctcactanaaggtgatacttanaagcaaacactnttcaagtntcanaactgtatataaagaatgtatacttacagtattctntgtcaatacattaagtgaatcctcatgaaaccacaatcgactgcgcttcccaggtttctttgttgaactttcacgaattatctctcttcccatgtctcgtagtaatggatgcatt

SEQ ID NO: 7687 - DNA, 248 bp, Glycine max
  unsure at all n locations
actttcatattcttcaccaatccagccaatgtatgatatatgccctcaatntcaggatgtgacanacaaccaacaagatattcatgtacagctccatccacaataatccaactacttnctggttgcttcttgacccccttctctttcatttccagccgcagctccgagacatcactccattgattatcagatgcaagtgcattagccaacataacatagcctgcagaattatctgggtctacttcaac

SEQ ID NO: 7688 - DNA, 321 bp, Glycine max
  unsure at all n locations
tctgaattctgttctatgctcagaatcagaggttcatcgtgcttctgaggatgtgtnggtccagaaaaccaggcagccagggacaaagagacaagtcgaagttgatntagatttcacaagttttgtcgagaaaaaaatatccgatatcttttctcctcccaggaatcccanatcattacagctacctgagaatataccacctagcattacanaacttccagaggactgccactatgaaccagaggatcttgtcaatntatnntctttgccttatgtaaagggtatttattanagtatagaaatttagttcanatatctcta

SEQ ID NO: 7689 - DNA, 254 bp, Glycine max
  unsure at all n locations
tctgtacctgtagcaaggggtttgtggttgtgctcctctgctgaccaccatacagaccttggcccttccatgcagcaacctggagcaatngagcagcctgaagcttatgctgcanatatttacaatagacctcctcaacctcangcagcaaatcaaccacagcagaacaattatgacctttccagcaacagatacaaccctggatggaggaatcaccctaacctcagatggtccagccctcagcaacaacaata

SEQ ID NO: 7690 - DNA, 365 bp, Glycine max
agctttaacaaccatatgatgaaacactttgttatcttgtactggtttggttgtgtttggcactccttaaattatgacaaatgatgtagttccatgtagagcttgtaggccttggaccttcttcattaatggagtccttttcttctagaagatcaatggcagtggaatggagaaggaggaaaggtcattgaagatgccacttcaaggagaagatgagtcaagaacaagttcaccaccataggaaaccatggataagagcttgaaggtaggagaagatgagtagagggagagggagagagggggccacaaaatttatgcctcatatgaggtctgaaaattgaaggataatttcctcaatgatcaaa

SEQ ID NO: 7691 - DNA, 482 bp, Glycine max
  unsure at all n locations
gaatgcactattcaatggagttgacaagaacatcttcttacttatcaacacttgcacagtggccaaagatgcatgggagatcctgaaaatcactcatgaaggaacctccaaagtgaagatttccagattgcaactcttggctacaaaattcgaaaatctgaagatgaaggaggaagagtgtattcatgacttccacatgaacattcttgagattgccaatgcctgcactgccttgggagagaggataacagatgaaaagctggtgagaaagatcctcagatccttgcctaagagatttgacatgaaagtcactgcaatagaggaggcccaagacatttgcaacatgagagtagatgaactcattggttctcttcaaacctttgagctangactctcggttagggctgacaagaagagcaagaatatggctttcgtgtccaatgatgaatgagaagaagatgagtatgacctgtatactgatg

SEQ ID NO: 7692 - DNA, 391 bp, Glycine max
agcttaaaaattcacttacgagcctctcttatattacgggactcaatcaaacatccgagaaaaaagttattgtcgtttgaattttctcagaggttcaacattcaatttcgatcgtctcgatatattacgggactcaatcagatatctgagtaaaacgttattgtcgtttgaattggctcataggttcaacattcaatttcgagcgtctcgctatattacgggactcaatcagacatccgagtaaaaagttattgccaattgaattgactcagggcttctacatttaatttcgagggtctcgatatattacgggaatcaatcagacatccgcgtaaaaagttattgtcgtttgaggtggctcacaagttcaacattcaatttccagcgtgtt

SEQ ID NO: 7693 - DNA, 294 bp, Glycine max
tctctagaggaagtatggacacttcattattcagaaagtttgggaaaggagatctgttgattgtacaaatatatgtagaagacataatctttggcgctaccataaaaatgatgtgcaagggtttttctcagctaaataaaagtgcatatgaaatgagcttgtacggagagctaaagttctttctgggagcttataatcatgctaaaagaggatgtcatattctttcattaagagaaatatacaaagccccttcttaagaggtttcgaatggatgaagctaaacatatggctact

SEQ ID NO: 7694 - DNA, 565 bp, Glycine max
ctgcagctttacttccaggaatttctcttgttaattccttcatctgacttagcatcaaactttcctaagttttcttttccattgtttaatacaaagcatttgcaaccaaaaacatgaaggtgtgaaatgttatgttttctaccattaaacagttcatatggagttttctttaaaatgggtcttattaaagccctattcatgatataacatgtagtattaacagcttcagcccaaaaatattttggaagaggagtgtcatttaataaggttctagcaatttcttccaaagatctatttttcctttcaacaactccattttgttgaggggttctaggtgcaaaaaagttatgttcaatgtcatgcttatcacaaaatagttcaaattctttattttcaaattcaccccatgatcactcttaatagatataattttgagatttttcttgttgtgaatcattttttcaagattcctaaatgcttcaaaagcatcattcttatgagtgataaatagtgtccaagtgtatctagaatattccatcactataacaagggcgtagtaactttc

SEQ ID NO: 7695 - DNA, 446 bp, Glycine max
agctgtacctatctttttactatcttttttttatatccctaaaaaagtggtgcaaaagattgtattcattcagagaaatttcctttggggaggtcatcatgaggccaacaagattccttgggtgaagtgggacacagtttgcctttctaaaaataaagggggccttgggattaaagatttgtctaaatttaatgaggctctacttgacaaatgggggcgggagctggctaataattataaccaactttgggcaagaatcttaatctccaaatatggtggctggaaggagttgatctctggtggaaagagcaaattttcctctcataggtggcaagacctaaaggttgtctttcagcagcagcctcaagtggaggggggctgtggtcccaaaattaattttggaggataagggctgggggataattaactctccagccaaaattcta

SEQ ID NO: 7696 - DNA, 366 bp, Glycine max
agcttcttcagaaacgtggcatttgtgctcaatacacaatgtccggtacaccacaacaaaatggtgtattagaaaggcgtaatagaactttaatggatatgattaggagtatgttaatcaatttgactttacctgtatctttgtggatgtatgccttgaaaactgccatgtatttgttgaatagggttcctagtaaggcagttccaaagacacctttgaactttggacaaataggacacctagtataaggcacctgcatgtttggggttgtcaagcaaaaataaagatttataatccgcaagaaagaaaattggatgcaagaacaatcagtggatatttcattggtgtcgcaacatgcccttttgc

SEQ ID NO: 7697 - DNA, 498 bp, Glycine max
tactcacgcttctgaataggacctccgtgagaaaggttatgaccatttttttttctcgagagctttcgttgttcaatttcgtgcagctcgatatgtgatacaccagaatcggacattcgagtgaaaagttatgaccatatgaatttcttcatagcttccgttgttcaatttcgtgcatgtcgatatgtgaagcacctgaatcggacatccgagttaaaacttatgaccatattaatttcccgagagcctccgttgttcaatttctagcgtctcgatatattaagcgcctgaataggacctccgtgtgaaaagttatgaccatttgaatttctcaagagcttccgttgttcgatttcgagcatctcgatatgtgatacaccagaatcggacatccgagtgaaaacgtatgaccatctgtatatcttcatagcttccgttgtgaatttcgtgcatctcgatatgagaagcgcctgaattggacatccgagtgaaaagtta

SEQ ID NO: 7698 - DNA, 503 bp, Glycine max
  unsure at all n locations
agcttgtatgttagacctcgatcggtatttttcngttcgacgccgactgtcatttttttcgatcaatatcggtgaataatatttttttgccgaggtgggctaatgttttcctggccgaataaatgggaacatgccagtttcggccgaaacgaaacatcggttgagctcgcacgaaaaaacctagccgacttacattgtaagttttttatgcaacaccgaaaaaaacaaaatttcccctgccgtaagaaaaaacattatcggccagcgagcgcgggacttgaaattcaagctccaaaaactaacccaaggcaacaagggggttgaggagtatttcaaggaaatggatgtgctcatgattcaagcaaatattgaagaagatgaggaggtaactatggctcgatttcttaatgggttgactaatgatatccgtgatattgttgagctgcacgagtttgttggaatggatgatttgcttcacaaagcaatccaagttgagcaacaat

SEQ ID NO: 7699 - DNA, 446 bp, Glycine max
tcgattacacacatacagttatcgattaccagtatttctttttcaaaaaatattctcaacagtcacatctttttatgtggttcttgaatggctatcaaaggcctatatatatatgtgacttgagacacgaattttataagagtttttggagaacaaaaaggtcttatcctattaaaaagcaaatcgtgttatcctcttacaaattccttggccgaattacatgtgattcaataaggaattatttgagtgctcaaattgttcagactatctctttcaagagagatttcttcttttcttcttcttcattctgaaaagggattaagagaccgaaggtctcctgttgcgaaagaattcttcacacaaaggaagggttgtccttgtgtgtttggaacttggaaaaggaatttacatgatagtggaacttttaatcgggatgcttggggact

SEQ ID NO: 7700 - DNA, 220 bp, Glycine max
tgagtgactaaggggggtccacggatggcggagttcctacttgatccaacgatggcaaaaatgatggtggcttcagaaaattacaagcgctcatatgatattatttctatggctgctatgatctactgttggaaactcaatattttactgcccaaaagatgaacatgtacatgccgactacgcatggatgctttttcacactggaaatgttcgagaccat

SEQ ID NO: 7701 - DNA, 504 bp, Glycine max
agctttgatctgcctctatattttcaatcttttcatcctccctccagataatgagtttctggtggagagtagatggcacagccccaactccatggatccattcccttcctaatagcaagttaaaattagccttggactgtatcaccaggaatagagttggtcgaactatactgcctacaacaacatctacttgaatggctcccaaagaatagccagttttgccctcataattcgaaagcacaatgttgtgggcagatagatcagtgtcatgtttcccaatcttgtagagcatagatcgaggcattaagttaacagccgctcctccatctatgagcactttgttgattccaacattctcaacttttgccctgatgaaaagagggttgagatgacttttcattcgaaaatctggcttttcgaaaaggctaattgtcttccacacagcattggtctaacatagagcatactggctttgggtaagcatataaaatgatcaacctccct

SEQ ID NO: 7702 - DNA, 435 bp, Glycine max
agcttgctgaccattgacagattacttttattgaagcattcaagtggacatcagaggcagagacaacatttgttccattgcagaaagtcatgacttcagcccccgtgttagctcttcctaatttcgagctgcccttcattctggaaactgatgcttccgacactggtattggagcagtattacctcaaaatggccacccaatagcatttttctccaagaaacttgcacctagagtgcaaaagaaatctgcctactttagagagatgttagcaattgctgaagctatagctaagtttagacactacttgctgggacacaaatttattatcagaactgatcaaaaaagcttgagatcattgatggaaccacccctacagacacctgaacaacaagagtggttacacaggtttttgggatatgatttgtgattgatac

SEQ ID NO: 7703 - DNA, 389 bp, Glycine max
agcttcaggctattcaattgcttcagtttgctttttcttaatggcaaaggtctgtgtggtggtcggcagaagagcacaagaaaatgataatcttcccaaagaatggaaaacttcaagaaatcatcctcttgacaatatcatcggtgatatctcaaaaggggtaacaactagacactctctcaaagatttatgcaataatatggcatttgtttcattaatagaacctaaaaactttaaggaagctattatagatgaccattggatagtagctatgcaagaagaattaaatcaatttgaaagaaatgatgtatgggaattaatagaaaaacctttagattatccaatcataggaactaagtgggtttttagaaataaaattggatgaaaat

SEQ ID NO: 7704 - DNA, 552 bp, Glycine max
agcttgatgcctgtacaatcttatacttttatttctaggccttgttcagtttgatgctgtgaggacactggacaccaattttcttgtatgtttcttagggcctgtttagtttaaggaaatgattttgttttcattagtaattaattacaaaaaacaggaaataaagtgaaaataaagtgacacttgtagttatttgtgaaaacagaaaatgagataaaaacatttcctgagaccaaacaggcccttagaataagcatacatcttaaactagattatcttgtcttacatgaattaatatggtcttgcaggttttacattattccttggattcctaattgatcgtacccaccattatcttcaaaagcttattaatttaaggagtaatgcgggagcttcaaaagaagaattggaaaaccttaaaaaagaaactgtccaacttaaagaaaaggatgagaaagcatccaaggagattaaacagctaaaggaagaactttcacatctgtccaaaagtttggaaaagataaaattgggatctgaagagaaagataagaa

SEQ ID NO: 7705 - DNA, 460 bp, Glycine max
tagttggacatctgttgagtatgtgaacagcagtgtagactgcttcagcccagaatgtgttaggtagccccttctccttgagcatcgatctagccatttccataattgcgcaattctttctctctgacacttcattttgttgaggaaaatatgtgactataagttgtcgctcaatgccttcatcctcacaaaatctttcaaactcgcgagaggtgtactctttgccgagatcacttcttaatacttttatccgttatccactttgatcttccgcagggccttgaactttttgaatactccaaagacctctaatttttcttttatagaatatacccctgtcattctacagaactcatcaatgaagagtatgaagtccctgttgttctcatgcgatggcatactcattgggccataaacggacgtatgtatcagcttcaatagatctttcgctcttcatgct

SEQ ID NO: 7706 - DNA, 325 bp, Glycine max
atactcacgctctactatgcagagaatatccaaggaaaataccttcatctttcttatcatcaaattttcctaagttatcttttccattattcaatacaaaacatttacaaccaaagatatgaagatgtgagatatttggttttctgccattgaacaattcatatggagttttctttaagatgggtcttattaaagccctatttaaaatgtagcatgcagtgttaacggcttcagcccaaaaatattttggaagaggtgtatcatttaataaagttctagcaatctcttccaaagatctatttttcctttcaacaacaccattttg

SEQ ID NO: 7707 - DNA, 299 bp, Glycine max
ttttttttccattacccttctaaaaaggtggggaaccaaccccccaaggagaaataagtgcaagggaagagtaatagaccagaccaacccacacaaatgaaatgggccctccgcaacaagtcatccataatatcaaataaatcatcttcatcattggggaatttaccaagagccataggcatagggagtcttctattcaactacttcaaccatttcccaacacctcaacattttcatagttgctcaagtttcccaaaaaaggctccatactcaatgcctggataggaaaataagaaatt

SEQ ID NO: 7708 - DNA, 344 bp, Glycine max
tgccgcaaatgcaaacggcaataacgttttactcggatgttcttttgagtcacgtaatacatcgaaacgctcgaaattgaaaacagaagctctgtgcaaattcaaacgacaatacattttaactcggatgtccgattgagtcccgtaatatatcaagacactcgaaattgagaataaaagctctgaacaaattcaaacgacaataactttttactcggatgtccgattgggtcccgtaaaattatctagacactcgaatttgagaatggaagagctgatgcaaattcaaacgacaattactttttactcggaatgaccgatggagtcccgagcgcttgatatat

SEQ ID NO: 7709 - DNA, 413 bp, Glycine max
agctttaactcggatgtccgattcggtttcttttatatctagacacttgatattgaataacagaagctctcgagaaattccaatggtcataacttttcacacggatgtccgattcgggcgcataatatgtcgagacgctcgaaattgaacaacggaagctctcgagaaattccaatggtcataacttttgactcggaggaccgattcatgcgcataatatatcgagacgctcgaaattgaacaacggaggctcccgagaaattcaaatggtcataacttttaaactcagaggtccgattcaggcgcataatatatcgagacgctcgaaattgaacaacgcaagctctctaaaaattcaaatggtcataacttttcacttggaggcgccattcaagcgcatcttatatcgagac

SEQ ID NO: 7710 - DNA, 423 bp, Glycine max
tgaagaaaaaatggttaaaagccaaacttcaatgcttttattttcctatttcctttctaaattggtgttgaaccaaccccccaaggagaaataggtgcaagggaagagtaatagaccagaccaacccacaaaaatgaaatggtccctccgcaacaagtcatccataatatcaaataaatcattttcatcattggtaaatttaccaagagctatagtcatagtgattcttctattcaactacttcaaccatttcccaacacctcaacattttcatagttgctcaggtttctcatagatagcttctatactttaatgcttgtataggaaagtaagatattgaagtttttgggctttatgtggaatactctgtcatgggttatggaagctgctgctatcatggccataggcatgacacatggcaca

SEQ ID NO: 7711 - DNA, 328 bp, Glycine max
gacactatataatactcccgcttttagaaaatgtcgatgccgagtgtgtactatattttttttttgtagcagttgtacgaaacctgtgtcgcactcaaattcccgtatgctggaaagtcatttatggtacaaaatagcattgcgcgcaacttgaatgtttcatttcgatacccatcaaacatgaaaacccccttgtacaacaacttgctcgagtctttaatcaagggactgagataagcatcgatgtcatttcctgggtgtcttgggcttgatatcatgatatacaacattatgtattttcgcttcatgcacaatcaaagatgcaagt

SEQ ID NO: 7712 - DNA, 415 bp, Glycine max
  unsure at all n locations
gacccgcacgcatgcaagcttattgaaatctagaggaacttcttaatgnngttgtcaacaaacacttcaaaaagtgcctggattacctgggaaagagtatgctcacccaaagaaaaaggtggccttgggattaaaaatctctacctttttaatataagcctcttatctaaatggaggcggagatttctccaataccactttgtagataggtcccctcttattacattcagatatggttgttctttctctgatctatcccatctggcccacaaaattggtttgcttctaacatgattcgcaatgtcggcgatggctcccaaatgaaattctggtatgctctttgggttggtgactcatgcttctcacacttggtctctcgattgtctcagagagtgacacggctttcttgtacagt

SEQ ID NO: 7713 - DNA, 293 bp, Glycine max
cggattgatacagacccactaatggtggatctcttcctaatacaactcgaaaggggtcattaccaaaccttccttaacaaaagggacgaaccaaaaatgagcccaacgaagcattcaaacccaattttgtggatggccaaatacaacacaccttcaatacatgtgtaatggcttattaagatactcagactgcccatccgatagcggatgagaagaagacctcatggacaatattgtgccctgagatacaaataaatgatgaaaaaatgaactaatgaggactctgtatatat

SEQ ID NO: 7714 - DNA, 422 bp, Glycine max
gtatgactattgatgccgattctgtttttttttgcagtgcatcagacaacaatcccattctagcatccatgccttactttggagtgattgaacaaatctgggagcttgattatattgaatttagagtgcctatgtttaagtgtaagtgggtcaatgccaatacgggtgtacgccaagatgaattgggatttaccttagtagacctcaataaggtggcttacatggatgaacctttcattatggcccaacaagcaagacaggtgttttacatcgaagatccttgcgattcatgatattcgttggttctacaaggaagaccaagtggtttaatgacacacatgatggttccatgcttgacatttgtgagacaccacctttttcaacaagaatgccttatattaatgagttacactttgttgatg

SEQ ID NO: 7715 - DNA, 534 bp, Glycine max
  unsure at all n locations
ttcctctcccaggaagacaatttgtgnttgtctgacattcctacttggggcttatggtattactacccttctatgcagttgttgggacacatttttatatgaagttgacaaaattaagaatgaatgagttgaataatttcaggggcttgatctgcatatttctgaaattgagcaattgtgcgcaaaattcccatcaacaattgtattgcttgatcacttgggatttcctcatgaacttttatatcaaggaagcaaagcatgcataaaattttcattaattacatttttgctatacagctgattcttttttttaatcagacagcaaacataaaattcacagatttgtaactcttgtacatgcttattctttttttactgtaaagaagccatgcatcttattagcaatgagatctctttgcctttatcagatntagagtggatcatggggaggacagctacacaactctttcaaaaccaattgactccggtcaagagttgagagccgggatgctgtttgattgtattaaaagtttt

SEQ ID NO: 7716 - DNA, 643 bp, Glycine max
  unsure at all n locations
agctntgagccaaaatcctgacttacctattaccttgacccagcgtgagaatgtcaatccttaccctcggaagcaaaaaagaaaagaaggaaaatttccaatcaaagagaaagcaaaaagaaaagaaggaaaatttccaatcaaagagaaagcaaaaagaaaagaaagaaaattcccgatcaaagaatgggagaaagtaaaaaaaggaagaagaagaaggaaagaaagctcctgatcaaggatcgaaagaaaacagaagaaatgtgcagaaaggtctttggaccggacaatatctgaacaatacagaattgtcaccaaatgaacgaaaaaaaggaaaggaaaccatgacctaaagtggttttctccctttaattgccaaccaagatattgtgtgctagcgacttttttgccccgcactanaccaaaacagaaaaggaaaaaagccagaaaaagggccaaaaaaagaagaggtcaaaagccaaaaaacccaccaaaagaacccgtttccaagggaagtcctattgatccatgatcacgcatgtaatctttgatttgataggaaatgatttgcaaatccagtcatgacatatctatgggtcggaatttggaaacaacactaacctgggcgagatttgtacccttt

SEQ ID NO: 7717 - DNA, 539 bp, Glycine max
  unsure at all n locations
cgccgcatgcaagcttgttcccaccagtactaagatagtcattataatcattngcccaccctttgtgtccagttttcttcttaattgatccggaacatgcttgaagcacaagcatccaaacacccttaggtgcttgagacaaggcttacttccactccaagtttcttcaggtgtcacattctctagcctctttgttgaacatctgttgagcagataggctgctgttgacactgcctcaccccaaaactcctttggcaagtgaaaattccttagcatacacctggtcatgttgactatggttctattgagtatctcaaatacaccattgtggtgtggtgcatatggaggtgtgatcttatgaatattaccctcatcctcatanaatttcttgaatacatgtgatgtgtattcactaccaccatctgatctgagtctttgaatcctatttctactttgtgtgactcccatcaccttgaatcttttggaggagagaaacacttcactcttcctgcttaacaagtagatccacacccttcttg

SEQ ID NO: 7718 - DNA, 550 bp, Glycine max
agcttcttagtttcagatgatgcagattgtttttatctacctcatgcactcctctaatgactatggcatcatttctggcactaaactgctgggagttggaggccatcttctcaattaaatttttggcttcagcaggagtcatgtctccaagggctccaccactggcagcatctatcatacttctctccatattactgagtccttcataaaaatattggagaagaagctgttctgaaatctgatggtgggggcaactggcacatagtttcttaaatctctcccagtactcatacaggctctctccactgagttgtctaatacctgagatatccttcctgatggctgtggtcctggaagcagggaaaattttttctaagaatactctcttaaggtcatcccagctcgtgatggaccttggagcaaggtaatacagccagtcctttgccactccctctaatgaatgaggaaaagccttcagaaatatgtgatcctcttggacatctggggatttcatggtagagcagacaatgtgaaattctttcaaatgttt

SEQ ID NO: 7719 - DNA, 421 bp, Glycine max
atgtgttgagcccacagagtcatgtcttctttttactggtcgacttgggtaaagtccaatgacttgatgacacatatgttagggtatcaatatacaactaccaattatttcgtcaggtggatgagcctggttggaaaagtgaagaggtgatttggggaatgttagtagcaaaggcaatggagaaggggattgctcaaaattaagaggacaattagagagaccacattgttgtgagaaagagcccactattattaatcttatgccccccccttacaacatgcagtctgcaaattgctataaaggaggggtattaacatccgttacacaagacaaatcaaatgcaatgccaccttccaaatgacttatgattcaactagcaccaacaccaccaattttagcatgcctgtaaatttcacgtttg

SEQ ID NO: 7720 - DNA, 460 bp, Glycine max
cgacctttaatactacctttcattctttggaagttcatatttgattggctcttcttttgaccttcattgcttcctttcctttttcctttagaatcttgtccataaatatgcatttgttataaagattctgcaatatcatctagaatatcctttcttggaggaatagcattagactcatcaaaggaaacatgaatagattcttcaatagtcatagttctcttatatattctataagctttactatgcaaggaataaccaaggaaaattcattcatctgacttagcatcaaactttcctaagttttcttttccattgtttaatacaaagcatttgcaggcaaaaacatgaaggtgtgaaatgttaggttttctaccattaaatagttcatatggagttttctttaaaatgggtcttgtttaagccctattcatgatatagcatgcagtattaacggcttcaa

SEQ ID NO: 7721 - DNA, 540 bp, Glycine max
  unsure at all n locations
agcttattgttagacattatttttttttatgaaatncatttttaaacattgatttcttattttattattaaaatgggttaatcctttgactttacagatagttgaattctcatgtaattgtattcaattatcatatatatcaaataagaaagaaagatgtgtaagatttcctttatatcttcaatatggaaaagatatataaatatgggttcattatgagtacataagcatatttaagaattattaaattaataattaaaatatattaaagtgggagagtcatcaaaccatctgcataaagctgtatcaccaaaagattttcttctaacggattttgatctattttgttgtctcttttctgctaaaaatggttcctctttcatatttctaccctaaacattntatatcacaccatccctcaattttctaatgctatggagtaaaaattatcctgtggttttttagagagaaaacanaattatcanatagatgtaaattttaatagaattcaattccagggggggagctgctcgagcacta

SEQ ID NO: 7722 - DNA, 559 bp, Glycine max
atgagaaaaacttaatgcattttatattcttattttcttcttctataaatacttattaagaagtttataaaaaaatagtctttaactaatttatatttgtgatattcgaaagatgcttatactttcttgctttattactacatgtaattaattcgttaaatttggtcgatgaactaacccataatatatatttgtcgtctcatttttaattaatttcacattaattttgtttttgtatgagataaataaataaaagtgtgtgacatactcataattgtaaatcagatggatctatcaaactaaacaaagttattttgagctttaatcgaattaagttcgagctaaaaattaagtaagatgcatatcaaactcaagtcgatctttcaaccaaatcaattcttatatagttgacttggactcatttctaccatcaacattaatctagaatgtagcatttaatcattttattattcttggggaattaatttattttatatccttatttttttaaaaaatataataattcataacaaataacttttaaatatttacaaataaa

SEQ ID NO: 7723 - DNA, 437 bp, Glycine max
gcatgcctttagaaactaaattggcgagatatgtttttttgtcggggattggaaaaacggtggaaactgtcatttggaaacactaccggagcttggatcttcattggtgcctaatgacaactggtcacaattaaaaatagccaatgctatcttatctgctgcacacacaaatatttctgaaacaaacaagttcatggtgttaaatgtaacccagatgaccgctcagagaaaagatgggcattcatctatctattatctcggtcgtagtgcgggccatgtgcatcatcatcgccaagattgcagccattggtgtctacctggtgtacctgatacgtggaatgagctgctttatgcactgttgcttaaacatgaaactgctcacagaggggaactgtaacacgcatcaatatgatttgctgagaaattgttaaattctg

SEQ ID NO: 7724 - DNA, 610 bp, Glycine max
  unsure at all n locations
tttgcggatttagttttcacggacgaacggatcttatatttatgaaaagaggcaaatttaatcatcttgcttggacgaatgagaaaactggggcaaatgaagagggtgagaatgagggagagacccatgttgtgactgccattcctatacggccaagtttcccagtagcccaacaatgtcattactcagccaataacaacccttctccttacctaccacccagttatccacaaaggtcatccctaagtcaaccacaaaacccaccttccacacaaccaatgctaaacaccacctttagcacgaaccaaagcaccaaccaaggaaggaattttgcagcaaaaagcctgtagaattcaccctgttggaccttgtggcctcaataatcttaagagggatatgcttagaatgcagaagaagcaacaataatcaatttaataatgttctataaacatgcaaggcaaaattgattgcaataacataaatgagataagggaagagagaatgcaaacacaantttatactgggtcggccactttccgtgcctacatccagtactcaagcaacccacttgagatttcactatctttgtaaatccatacaaagtctgaac

SEQ ID NO: 7725 - DNA, 408 bp, Glycine max
  unsure at all n locations
tagctttcgagaatntaaaattgtcataacttttcactcggatgtcttattcaagcacatcatatatggagacgcccgaaattgaacaacggaagctcttgagaaattgaaattgtcataacttttcactcggatgtccgattcaggcacatcacatatcgagacgctcaaaattgaacaacggaagctctcgagaaattcaaatggtcataacttatcactcggatgtccgattcaggcgcatcatatatcgagacgctcgaaattgaacaacggaagctcctaagaaatttaaatggtcataaattttcactcggatgtccgattcaggcgcattatatatcgagacgctcaaaaatgaaccatggaagctctcgagaaattaaattgtcataacttttcactcgg

SEQ ID NO: 7726 - DNA, 407 bp, Glycine max
agcttcccccatcaacgttaggccctatatgtatccccattaccataaaacagagattgaaaggcaaatttcggccatgctcgaggcaaatctcatacaacccagccacagcccattttcctccccaattcttctcgtcaagaacaaagatggctcatggaggtgttgtgtggactatcgcgccttgaatgctgtcacggtcaaggaccgtttccccatgccgacaatcgatgaacttttggacgatctggggcaggcgtcgtgcttctccaagctcgatttgcgttagagatttcatcaaatccgcatggccgacgaagatattcataaaacggctttttgaactcatctgggccattatgagttccgagtcatgccgtttggactcagtaacgtgtcgtcgacat

SEQ ID NO: 7727 - DNA, 354 bp, Glycine max
  unsure at all n locations
agcttcagttatccatttcgagcgactttttatatacaggactcaatcagacatgcgagtaaaaatttactgtcgtttgaatttgctcagagctacaacattcaatttcaagcgttccgatatattacgggacttaatcagacatccgagtaaaaagttattgttgtttgaatttgctcagagcttcgatattccatttcgagcatctcgatatattacgggactcaatcagacatccgagtaaaaagntattgtagtttgaatttgctcaacgcttcngtattccatttcgagcgtctcgatatattacgggactcaatcagacatccgagtaaaagttattgtcgttgaatt

SEQ ID NO: 7728 - DNA, 380 bp, Glycine max
  unsure at all n locations
tttcatgcaagctntgacttatccaatggcatggacactttaaaagactaaactctattttcaaaattgtactaactggtttctctgtctcaaggagttatgccagggaccaaaggtacaggtggcttcggtttctttattttatccaccaaaataacttgagtagttagaatgacaccagcaacagaaactgcactttgaagagcacatcttgcaacacgactaggatccgctactccagcattcaaaagatcttcatacgtgcctgtcattgcattatatccagttctccaatcatgtgttctagtcttccggacaacaatgtctccatcaactccggcattagttgcaatngattttcaggttcaaggagtgcctgc

SEQ ID NO: 7729 - DNA, 362 bp, Glycine max
  unsure at all n locations
tgtgatgaaagcttttataacttcttggtaggaatatgaactctatcatgcaaaattgcgtggtcactggcagccatattttcaattaagtccatggcttcttcaggtgtcttcatggaatgaagaaattgcagcttttccttctgcagttttagactctgggaaatatttttttagaaacttctcaacaacctcatcccaggtctttaaactattgcccttgaatgaatgcaaccatctcttggcctcccctgataaagaaaatgaaaacaggctgagcctaatagcatcttcaggtacaccgacaagcttaacagtattacaaatctcaatatacgtngccaagtgtgagtatggatctt

SEQ ID NO: 7730 - DNA, 330 bp, Glycine max
tagcagaagaacttcaatataccaatcattatgtggactaccgaccccaaagaatggacatcacctgaaattggaaggtcttggatctgaacaaatgactatctttcacattttgatttaaaaaagaaaatcagaaacagaaagaaacttgtccttggatcacaagttgataattactgtttcttgcagtgtgcgatagcacctatcaaatgtgaactgtacttcatcagcaatgaggaagtgatcaaacccactagcatatggcgttgcaatgatcaatatacccctagtaacacaaagggggtgataactatggctttttcattgtag

SEQ ID NO: 7731 - DNA, 348 bp, Glycine max
accatagaactctcaagctttacgcggacaagaacagaagggaagtcttctatgaaatcaatgattgggtattggtcaaacttcgaccttatcgacagtccacggtgagaggatctccggcgagctccggtaagctgaccaaacgctactttggtccctttagagtcattgaacgaattgggatggctgcgtatcgccttgaactacccgagggagctaagatacattctgtcttccactgctccttgcttaagccttttcgaggatccccgacacagcctgactctacttctctacctccacaattcattgatggacatcctagcactactcctcttgctatcctca

SEQ ID NO: 7732 - DNA, 326 bp, Glycine max
ttgtatggataggaagctctgctgttagttaaaagagttgacatcccttccaaattggaaggggtaaattagttgagtaaggacagggatgaattattacaggaactttggaacaatctgctaaaggctcaggatcagatgaaaagatctgcaaacaagtataggagggagctagtcctgcaggaaggagattgactctttttgaaactacaaccttatagaatgaagtctccagcaagaaagccgaaggagaagctgagtccacaattttatggaccctacaaggtgatacaacgaattggagaggtcacttataaactggaact

SEQ ID NO: 7733 - DNA, 324 bp, Glycine max
ttgatgtttgtgttgaatgcattaaaggttaacagaccaaaagcaagaaattaggtgcatatagagctacaaatgtcttggaattgatacatacaaacatttgtgggccatttcatacaccttcatggaatggtcaacaatattttatatcattcatagacgattactccatatatgcatacttgtttcttatacatgaaaagtcataatctctagatgtgttcaaaacatttaaagttgaagttaaaaatcaactcaacaaaagaataaagtgtgtcagatctgaccgtggtggtgaatactatggcagatatgacgatttag

SEQ ID NO: 7734 - DNA, 322 bp, Glycine max
tctattctgaatttcgagtcgtctcgatatactataagacacaatcagacatccgagtaaaaagttattgtcgtttcattttgcttagagtttctgttctgaatgtcgagcatctcgatatactacgggacacaatcagacatccgagtaaaaagttattgtcatttgaatatgctcagaggttccgttttcaaatacgagcgtctcgatatattacgggattcattcggacatccgtgtaaaaagttattgtcgtttgattttgctcagagcttccgttatcaaattcgagcgtgacgatatattgcgggattcattcgga

SEQ ID NO: 7735 - DNA, 275 bp, Glycine max
ggtgacaagtggttgaaaataacaatttagtgcccaacttgctccacaaagtcctccaaaaatggcttaggaacttagagtccctatcactaacaatgctccttggcaaaccatggagtctcacaatctccttgaaaaacaaatcaggcacatgggaagcatcatcaacttttttacgtggaataaaatgagccattttagaaaacctatcaacaaccaaaaaaatggaatctctaccattgcttgtttttggcagccccaaaacaaaatccatg

SEQ ID NO: 7736 - DNA, 333 bp, Glycine max
tctacagaaggttcgttcctaatttctctacaattgcatcacctttcaatgagctggtgaagaagaatgtggcatttacctagggtgaaaaacaagagcaagcctttgctttgctcaaagaaaagcttactaaggcacctgttctagctcttcctgacttttctaaaacttttgagctagaatgtgatgcctctggagtgggagttggagctgtattgttacaaggtgggcaccctattgcttattttagtgaaaaacttcatagtgccaccctcaactaccccacctatgataaagagctttatgccttaataagagccctccaaacttggg

SEQ ID NO: 7737 - DNA, 319 bp, Glycine max
tgtatttgatagatattgtgttatgtgtttaaatctgtcatattccaggatgaagacataaaaaatgcaattgaagatgctgggtttgaagcagacatattacctgaatccagtacagttgcacatgaaaccctggtgggacagttcacaattggaggtatgacatgtgcagcatgtgtaaattctgttgaaggtattttaagaaatcttacaggggtcaaaagggctgttgtagctttggctacttcatcaggtgaagttgaatatgatcccagtgtaattagtaaagatgatatattcaacgcaattgaagattctg

SEQ ID NO: 7738 - DNA, 376 bp, Glycine max
  unsure at all n locations
agctttgaacatttcaatgaaattcgnntttaaaaataccctcctttctcgcttcatttgatgaagcacctcttccagggaccgaaaatcgagggaagaggcgtggctttcaatgagggaatagaaagacaaatcgcccaatttgtaagaacccatttgggtacctgatttgaagatttcatatgaagggtggggtttgtgggaagaggaagaataagaggggagtgtaattagggtttgggagaaatagcgatggagagttgttcgaagaacgtttgtgggaaatgatgagtgctttggcatgacatggatcattcgggaaaaaaaaaaagtggggttntgaggtaatgggcagtgtcactgactcagtgagttg

SEQ ID NO: 7739 - DNA, 322 bp, Glycine max
tagcactcttcaagtccccatgcttgactaaatcccttctatcatcacttggcaaatctatccaaaactccccgtcatttcttcccccacctggcaaatttgagccggctgcatcaatggtctctcccgtggacacgccctttcggtacaacaaggccccattattgaaaaaccaatcaacagaagaaggcaagtaagcttcctcgggatgaaagaaaacagtaggcccatagtgctctataagtgcatgtatttggtggaggcgtggcattgctggtagcacaggatttaggttcttcaagcacacaacaggtagctcttc

SEQ ID NO: 7740 - DNA, 319 bp, Glycine max
tctcgatatattacgggactcaatcggtcatccgagttaaaaataattgtcgtttgatttttgtcagagcttccattttcaattacgagcgtctcgatatcctccaggacataattggacatccgagtgaaaagttattgtcatttgaatttgctcagagcttctgttttcaattacgagtgtctcgatttattacaggactcaatcggacatccgagttaaaagttattgtcgtttgatttttctcagagcttccgttttcaattactagcgtctcgatatcctacgggacacaatcggacatccgagtcaaaattta

SEQ ID NO: 7741 - DNA, 393 bp, Glycine max
  unsure at all n locations
agctttaagcattttcaaacgacaataatttttaactcggatgtccgattgagccctataatatatcgagacgctcaaaattgaaaacggaagctctgagcaaatttaaaggacaataaatnttcactcggatgtccgattgtgtcctgtangatatcgagacgctcgtaattgaaaacggaagctctgagaaaaatcaaacgacaataacttttaactcggatgtccaattgagccctttaatatatcgagacgcttgaaattgaaaacggaagctctatgaaatgtcaaacgacaataacttttaattcggatgtctaattgagtcccgtaatatatcgagacgctcgtaattaaaaattgaagctctgagcaaattcaaacgacaataac

SEQ ID NO: 7742 - DNA, 321 bp, Glycine max
tctagatgagttatgtcttcgaatcggtctatcctgtgaaaagttatgaccatttgaatttctcgagtgcttccgttgtttaatttcaagcgtctcgatattttatgtcctcaaatcagacatcggagcgaaatgttatgaccattcgaatttgtcgagagcttccgtttttcaatttcgagcgtctagatgagttatgtcaccgaatcagacatctgagtgaaatgttatgaccattcgaatttgtcgagagcttccgttgttcaatttcgagcgtctagatgagttatgtcaccgaatcggacatccgggtgaaaagtt

SEQ ID NO: 7743 - DNA, 367 bp, Glycine max
agcttgcacattgctgcttgatagaagattagcaagacggtaaatcatggtactttgacatcaagcggtacgtagagtataaggagtatccacagggggcttctgacaatgacaagaggacattgtgaaggttggcaactagtttctttttaagcggaggtatcctatacaaatgaaatcatgatatggttttgctctgatgtgtagacactaaagaagccgagcgaatgctcatggaggtacatgaagggtcctttgggatgcatgctaatgtgcatgtcatggctaggatgattctaagggcagactatcactggctcaccatggaaaatgactgttgcatccatgtgaggaaatgccacaagtg

SEQ ID NO: 7744 - DNA, 388 bp, Glycine max
actagaatgcctggtttacctggtaacccaactggccatgaataaaaaattttcacctgtcgccagactctatggtttatgctcctctattgaccaccacacagacctttgcccttctgtgcaacaatctgaagcaattgaacaacctgaagcttatgctgcaaacatctacaatagacctcctcaacctcagcagcaaaatcagccacaacaaaacaattatgacctctccagcaacaggtacaatcccgggtggaggaatcatcccaaccttagatggtcgaatccttcacaacaacagcaacaacaacaatagccttattttcaaaatgctgctggcccaagcagacatacgttcctccaccaatccagcagcaacaacaacaac

SEQ ID NO: 7745 - DNA, 331 bp, Glycine max
tgtcagaaagggaagcaagttaaaaactctctttcaaagcaaaaacattgtttctacttcaaaaccccttgaactacttcacattgatttatttggtccctcaagaactatgagtttaggtggaaattactatgttttagtaatagtagaggattactcaagattcacttggactttgtttttgaaaaccaaaaatgaagcttttgatgcttttcacaaacttgccaaggtgattcaaaatgaaaaaaggtctcaacattgtttcaattggaagtgatcatggaggtgaatttcaaaatgagttttttgaaaacttttgtgaagaaaatgg

SEQ ID NO: 7746 - DNA, 329 bp, Glycine max
tcggaattccatttcgagcaactcgatatattacgagactcaatcagacatccgagtaaaaagttattgtcgtttgaatttgctcagagcttcagtattcgatttcgagaaactcgatatattacaggactaaatcagacatccgagtaaaaaattattgtcgtttgaatttgctcagagcttcggaattccatttcgagaaactcgatatattacaggactaaatcagacatccgagtaaaaaattattgtcgtttgaatttgctcagagcttcagaattccatttcaagcaactcgatatattacgggactcaatcagacatccgag

SEQ ID NO: 7747 - DNA, 402 bp, Glycine max
agctttgagcaaattcaaacgacaataacgttttactcggatgtctgattgagtcccgtaatatatcgagacgctcgaaatggaataccaaagctctgagcaaattcaaacgacaataactttttattaggatgtctgattgagtcccgtaatatatcggaacgctcgaaattgaatgttgcagctctgagaaaattcaaacgacaattactttttactcggatgtctgattgagtcccgtaatatatcgagacgctcgaaatggaatatcgaagctctgagcaaattcaaacgacaataactttttactcggatgtctgactgagtcccgtaatatatcgagacgctcgaaattgaatatcgaagctctgagcaaattcaaacgacaataactgtttactc

SEQ ID NO: 7748 - DNA, 320 bp, Glycine max
tttctttgtgggttgatgggttctgtctcgtagaatggcatgatcactggctgacatgttctcaattagctcagttgcttctttcggggtcttcaattttatctttccccctgcagaagcatctaacagttgcttggtttgtggtctcagcccatctataaacatattcaattggattggctcggaaaacccatgagtaggagttcttctcaacaagcctctgaatctctccaatgcttcactcagagattcatcaagaaactgatgaaatgaagagattgcagctttcccttctgcagtcttggactctggaaagtatt

SEQ ID NO: 7749 - DNA, 322 bp, Glycine max
ttctaatgaatttacaatgttccaattgttttcaaaatattgtaattgattacaatgatttggtaattgattaccagtgtgtttgaacgttgtaattcaaattaaattgtgaagagtcacatcatttcacaaaaaagctttgtgtaatcgattacactgatttggtaatcaattaccagtgatagtttctgaacaaaatcaaaagatgtaactcttccaatagttttcaagtttttctaaaagttataacttttccaatggttttcagattttctaatagttataacttttccaatagttttcagattttctaaaggttata

SEQ ID NO: 7750 - DNA, 304 bp, Glycine max
tcaactagatgccttggttaatttggtaaccctactggccatgaataaaaaatttgcacttgtcgccagactctgtggtttatgctcctctgccgaccaccacacagacctttgcccttctgtgcaacattctgaagcaattgaacagcctgcagctaatgctgcaaacatctacaacagaccttctcaacctcaacaacaaaatctgccacaacagaataactatgacctttccagctacaggggcaattccggatggaggaatcatcccaaccttagatggtcaaatccgtcacaacaacaa

SEQ ID NO: 7751 - DNA, 339 bp, Glycine max
  unsure at all n locations
agctcttacggacttgaagagattctgagtttgtccatcacatttttgatggagngctgtgtatactaacaatttaacaccatgtgaccgcattatacctgtcccaaaagagattaagatgctgtatctctgtctaaaatgatttgctctggccatacatgcaatctcacaactgtgttcatgaataattttgcaacttttgctgcactgaatggatgtcctaaagctatgaaatgggcctatttagtacatatatctaccactactaatatgacactgatacgatgagacgacggcaaacctgtgatgaaatccatagagattgactctcatgctcta

SEQ ID NO: 7752 - DNA, 324 bp, Glycine max
ctcaagcttgctaaatggaagcagcgatgtctttctatggggggcaggataaccctcttcaattctgtcccaacagccctccctatctaccttctctcttttttcagaattcctaaaaaagtgatacataaggtagtttctattcagaggaactttttgtgggggggtggttctgaaacagctaagataccatgggtgatctgggatattgtttgtcttcccaagactaaaggagggttggggatcaaagatttgtctaagtttaatgaggccttgattggtaaatggggatgggatctggctaataaccagaatcagctttgg

SEQ ID NO: 7753 - DNA, 296 bp, Glycine max
tgatgatcggagtgagaaacatgtgtttattggctatgatgcaagttcaaaaggctacaaattgttcaatccaaacaatggaaggacaattgtgagccgaaatgtcgagttctatgaaaaaggcacatggaattgggaggagaaagaagacacttatgattttttcccgtactttgaagaaatagatgaagaagccttgactccaaatgattcaactccaacactttcaccaactccttcaaccaatgaagcctcatcatctttcgaaaggagttcaagtgaaaggccaagaagaa

SEQ ID NO: 7754 - DNA, 369 bp, Glycine max
  unsure at all n locations
agcttgtgtgtntagcaagatataccttatgtcanngtaccatcttattcgagtgaagtctgacgatattccgaagactacttttaggacccgttatggtcactacgagtatctagtcatgccctttggtgtgactaatgctccaggtgtgtttatggactacatgaataaagtctttcacccttactttgatagttttgtggtagtattcatagatgatattttggtatattcaaagactagagaggaacatgaagagcacttgaggattatgctgcttacccttaggaatcgacaactttatgctaagttgtccaagtgtgagtttttggttagagaaagttagtttcctagggcatgtgatatctc

SEQ ID NO: 7755 - DNA, 329 bp, Glycine max
tcaagcttttagaaaatgtcgatgccgagtgtatactatttttcttccatgtttcagttgtacgtatcctgtgtccactcaaattcccgtatgctggaaagtcatttatggtacaaaatagcattgcgcgcaacttgaatgtttcatttcgatacccatcaaacatgaaaacccccttgttcaacaacttgctcaagtcttcaatcaagggactgagataagcatcgatgtcatttcctgggtgtcttgggcttgatatcatcatagacaacattatgtattttcgcttcatgcacaatcaaggatgcaagttgtaaattactaacaaa

SEQ ID NO: 7756 - DNA, 332 bp, Glycine max
tgtggcaaagttgaacaattaaactaaataaaattgtattttgattacattagtatttcatagtatataatgcatctatatgtataaaagagaaggtgcaacaatgttgctcaccaatgtccctttaacctgagttgaaacatggcctttctcactgtctgagacaagcttagacaaaccaaaatctgcaacctttgctgtcaaattttcatccagcaagatattagtggacttcacgtctctgtggattatgggagggttggcaagctcatgtaagtatgcaagtcctctggatgaaccaagagcaacacggagtctcctcttccagtcaa

SEQ ID NO: 7757 - DNA, 318 bp, Glycine max
ttcacttaaagttcgtataccacgtctttttccggtttttccgacgttttcctcaaataaacgttggtggcgactccgcgcgtattcctttcttggaacacgcactcgcgagtcacgcgtcgccctcccgccgaagggtaggttgcgacaaccgtgacccaagagtccggtggcatacggagccacacgaccgtgggatccccaaattcgtatgttccatcatttatcatttgtatgttatcttatttttatgacttgagggactaacgtttgttttgctttttcgatcgccttttgttttgtgcatacatattgttt

SEQ ID NO: 7758 - DNA, 404 bp, Glycine max
  unsure at all n locations
agcttgtacccaccagtactatgatagcctagcataatcatttgtttcacccttttgtccagttttcttcttaattgatttggaacatgcttgaagcacaagcatccaaacacccttaggtgcttgagacaaggcttacttccactccaagtttcttcaggtgtcacattctctagcctctttgttgaacatctgttgagcagataagctgctgttgacactgcctcaccccaaaactcctttggcaagtgaaaattccttagcatacacctggtcatgttgactatggttctattgagtatctcanatacaccattgtggtgtggtgcatatggaggtgtgatcttatgaatattaccctcatcctcatagaaattctttgattcatgtgatgtgtattcact

SEQ ID NO: 7759 - DNA, 328 bp, Glycine max
tatcgaaggagtcataaataaactattttcataagctccttagaagctattatcattaactgtgaagcattcaagcttaagcaataatacaattggagaattctcatgttccataaaacagagtttgatttcaatcaccgtacgtatctatctatcatagaatcaacaattctaatcataacatgaaagcaagtacccgcaactgctccaacagcgccaaaagcaccagattttccgtctataacactggcatcgcactccacgccaccgtcttcggtcagattggagcctctgccggcgtttgtgcagggatcgtcctccagcactt

SEQ ID NO: 7760 - DNA, 321 bp, Glycine max
tctacattcaatttcgagtcttttcgatatattacgggactcaatcggacatccgagtaaaaagttattgtagtttgaatttgctcagggcttcggtattccatttcgagcgtctcgatatattacgggactcaatctgacatccgagtaaaaagttattgttgtttgaatttgctcagagcttcggtattccatttcgagcatctcgatatattacgggactcaatcagacatccgagtaaaaagttattgtagtttgaatttgctcagggcttctgcattccatttcgagcgtctcgatgtattacgggactcaatcag

SEQ ID NO: 7761 - DNA, 341 bp, Glycine max
  unsure at all n locations
ncaagcttgagcaattttaaacgacaataattttntactcggatgtctgattgagtcccgtaatatatcgagacgctcgaaatggaataccgaagctctgagcaaattcaaacgacaataactttttactcggatgtcagattgagtcccgtaatatatcgagacgctcgaaatggaataccgaagctctgaacaaattcaaacgacaataaatttttactcggatgtctgattgagtcccgtaatatatcgagacgctcgaaattgaataccgaagccctgagcaaattcaaacgacaatcactttntactcggatgtctgattgaatcccgtaatatat

SEQ ID NO: 7762 - DNA, 304 bp, Glycine max
tcatggttgcccagcttcaataacaagttacagggacccgatttttgtcagtcaattctggaaggacttcatggcttatcaagggattcaagtttagttttctactgcttaccatcctcagacagatgggcagatagaggtagtgaacatgtgtattaagacatatctgagatgtatgtgctcagatgatcctaaacaatggtccaaatggcttcccttggctgagtggtggtataactctacatatcacagcactattaaggccagtccctatgaaatcatgtatggacaagcaccaccagct

SEQ ID NO: 7763 - DNA, 365 bp, Glycine max
  unsure at all n locations
agcttttgagatactcanatggtcattatttttcactcggaggtccgattcangcgcatcacatgtcgagacgctcgaaattgaaaaatggaagctcttgagcaattcaaatggtcataatatttcactcgtacgtccaatacaggcgcataatatatcgagaggctcgaaattgaacaacggaagctctcgagaaattcaaatggtcataacttttcactcggaggtccgattcaggtttataacatatcgagacgcttgaaattgaacaacggaagctctcgagaattcaaatggtcttacttttcacttggaggtccgattcaggcgcatcacatatagagacgctcgacattgaataacgg

SEQ ID NO: 7764 - DNA, 386 bp, Glycine max
  unsure at all n locations
ncaagcttggcactggtattcatgtttcatttatgccttttgagtatgtgcattttgatttatggggaccatctagagtgaaaactcatggtggaagctcaaactttctcaccatcatagatgatttctcaagaagagtatggttgtatgttttgaaaaaaaaatcataagcttttcaaaagttcagagagtggcatactcttattggaaatcaacttggtacaaaactaaaagttttaaggactgaaaatggcctggagtttgtttcagagcaattcaatgagttttgcaggaaagtaggtatcaaaaggcacaaaacagtccctcacacaccacaacagaatggattagcagaaagaatgaataggaccatttttgaaaaagtg

SEQ ID NO: 7765 - DNA, 373 bp, Glycine max
  unsure at all n locations
agcttatgatgtgatttaccaagaggatctcatcaaacgccttgagtccgagatctctggtgactttgaggtaccataagaacattattcacataattttgccaactatttcatcatgtagcatttttttggtacattgtgatgactataaattaatgacgggactagtgttggcctagtggaggattgagatagtgtgcatgagatcttaggttcaaatcttagtacgactattgtataaaaaaaaaattaatgatggtgtgtatgtatgcaaatcagagagctatgtaccggtggatgttgcagcctgcggatcgtgatgctgttttggtgaatgtggcaatcaagaatggcaccanagactaccatgtga

SEQ ID NO: 7766 - DNA, 381 bp, Glycine max
  unsure at all n locations
agcttattattggactntgcaaagngggtctctngaatgtagccttcagtttgtaccatcatatgagggaagggggaatctctccctctgaaattattcataattctcttctaagtagttgttgcaagttgggaatgtttggggaagcactgacattggtagattctatgatggagtgtagtcatttagcacatctagaatcctataagcttcttatttgtggtctgtttgaacaaatgaacaaagagaaggctgaagctgttttttgtagtttactacgatgtgggtataattatgatgaagtggcttggaaagttctgattgatggcttaactaaggctggatatgttgatcaatgctcagaatngctgaatctaatgg

SEQ ID NO: 7767 - DNA, 369 bp, Glycine max
  unsure at all n locations
tttcatgcaagcttacatgtattgacaagctgttattttttaactgccatggaattccttaagagtatacaaaagaagccattcttacctgcaattttcttacatattcttcttggaacctgaatgtgacaatttcctgtccaaggattgtagttggttgcggaagttctggttttcctcaagtaagcgatcatactcaagaaggaacccctcagattgttttctcagagcagctatattggcttcagcaccatctacgtcttttgtttttgactgtagttcagattcaaggcggctaagttcagctctcaatctggctctttcttcctccacagacttaatntcttctgaattngcaactttcccatc

SEQ ID NO: 7768 - DNA, 226 bp, Glycine max
tacttcacatggatcctatggtgcctatgcagggtgaaagtcttggaagaaagaggtatgcctatggttgtggggatgatttctccagatttacctgagtaaatgttatcagagagaaatcagaaacctttgaagtattcaaagtagtgagtctaatacttcatagagaagaagactgtgtcatcaagaagaatctggagtgaccatggcagagaatttgaaaaca

SEQ ID NO: 7769 - DNA, 311 bp, Glycine max
tcggacctcagtgtgaaaagttatggccataatttatctcagagctttcttgttcatcttcgagcgtctctatatgtgatgcgccttaatctaacttccgtgtgaaaagatatgaccatttgaatttctcaagagctttctctgttcaattttgagcgtctcgatatgtgatttgcctgaatcggacatccgtgtcaaatgttatgaccatttgaattctccagagctttcgctgtacaattcgagcctctcgacatattatgcgccctcatcggacatccgtgggaaaagctttggacatttgaattttt

SEQ ID NO: 7770 - DNA, 455 bp, Glycine max
  unsure at all n locations
tataaaactcagcttgacataatcgcggacaatatcttttactcagtatgtacgaatgaatcccgtaatatattgagacactcgtaattgagaacggaagctcgtagcaaattcaaatgacaataacttttaactcggatgttcgattgagtcttgtaatatatcgagacgcttgaaattgaaaacggaagctctgagcaaattctaacgagaataacttttactcggatgttcgattaagtcccgtaatatattgagaggctcgtaattgaaaacagaacctcgtagcaaattctaaagacaataactttttacttgaatgcgattgagtcccgtaatatatcgagacactcgaaatttaaaatggaagctcgtagcngatgcatacgacaatgactgtctactcagatgtccgattcaatcccgtaatatatgaatacgctcgtaattgaata

SEQ ID NO: 7771 - DNA, 300 bp, Glycine max
gcaagctaggttacctccttcttcactacatcaataatcaccgagttgagtcttctctggggctgtcttactggaatagccccatcctctaaatttatccgatgcatacatatggatgggctaataccaggaatgtccaccagggtccagcctatagcctatttatgcttcttgagaacatataacagcttctcctcttgctcatcagctagggaggcagatataattactgtaaatcctttgctatcatccaagtaagcatattttaaatctgatggcagagacttcaattctggtgtg

SEQ ID NO: 7772 - DNA, 435 bp, Glycine max
  unsure at all n locations
tgctcattgtttggtatgtttctctctacagcncacttcctattgataagctcataaagaactacaccatagctccacacatcactcttagcagttagcttaccagtctgaacatactcaggtgcagcataacctatggtgccgacaacctttgagaagagataagtcatttattttgcatgacagcaaaatatcaggaacaaaacgaagattcagacttcagattatcattgtaactttntataaattagattcattcacattgaatatggtaaaatatagttaatttactcaatataagctgccagaaggcacactattctgatgtactactatgatgcaatattgtcaatataatgagttttctcaagagtatagacaaattcttactgctggtgaaacatagccagacccttctgatggtccttgccgagc

SEQ ID NO: 7773 - DNA, 448 bp, Glycine max
  unsure at all n locations
tgaagttggtgcanaaatggtgtgttcccgtgggtcttgtggagcctttggtgagttttgaagaaaatgggggaagatggggtgaaatttggcttcccctctccccccccccccgttttatttttttcatcagaccatgctcgcccaggcgagttgaatttgcaaaattctattgcaaagtttttgttatatatatttcccttttaaaccttattaattatgtataagcttaggtgaattcatgagataattcaagaaaataaataagtatgaaacatgatgttagtgcttagctttactgagttttaaaagattggctaaaattttgttaaaacataagcgcttagacaatgaaggaaagctggagttgctgcacatgatgtccaacgttatgtcaaggaatcagattgggctgcacaatgcacaaggcaagataaaatgtcaaatg

SEQ ID NO: 7774 - DNA, 448 bp, Glycine max
  unsure at all n locations
ngaaggcaaactggatgcgttggtcaacttggtaacttagctggccttgaatcagaaatctgtacctgtcgcaagggtttgtggtctgtgctcctctactgaccaccatacagacctttgcccttccatgcagcaacctgtagcaattgagcagcctgaagcttatgctgcaaatatttacaatagacctcctcaacctcagcagcaaaatcaaccacaacagaacaattatgacctttccagcaatagatacaaccctggatagaggaatcaccctaacctcagatggtccagccctcagcaacaacaacagcagcctgctccttccttccaaaatgctgctggcccaagcagaccatacattcctccaccaatccaacaatagcaacaaccccagaaacagccaacagttgaggcccctccacaaccttccctcgaagaacttgtg

SEQ ID NO: 7775 - DNA, 440 bp, Glycine max
  unsure at all n locations
caatggctcaatgagcaaggcgagatgatagtcaatttacaagtaaacataccctnttctataggagactactatgatgacgttttatatgatataatccttatggatgcagggaacattttgttgggtagaccatggcaatttaacaagaaagacatccacaatggtctcaccaatgaaataaccctcacccatgtaagcaaaaagctcaaacttgttcccttgacaccttcacaagtggttggggatcaagtacaaataaaactcaaatgggatgaggaaaataataaaaaaaagaaaagaagaacaacctttaatggttaatgaggagtgtaaggaggtaggtgtctcctccaataggttagctaagaagaaaagtcattttgctataaagacaaacattaaagacacttcccttcttagacaacctccacatattc

SEQ ID NO: 7776 - DNA, 377 bp, Glycine max
  unsure at all n locations
ctgcagctcaagattgattccatttctttgtacaaaattcatcttcctggtgtccncttaaggtaatggagaattgataggtagcttgtaagtggacttctcttggacagtgcataaattggctcaccaaactaacaacaaaagtaatattaagccttgtgtgagacaagtcaatcaagtttccaactagacgttgatgcatctccttatccacttatgcattgtcatcttaattagccaatttaatgtttgaatccatgagagtacttagagaagctatcatacatgtctccttcagcagatttgtgacatatttntggccggaatatgaaaatacccttcttggagtgagacacttcaattcccaaaaaatattt

SEQ ID NO: 7777 - DNA, 463 bp, Glycine max
  unsure at all n locations
tgtgacatgaggccattaagtgcctctgccacaatgttatatagaagaggtgatagatggtctccttgccttagtcctttctgaggtaggaactcagctgagggactaccattcaccanaaatgaaacagatgctgattntagacacccctcaatccattgaattcatttgctgcaaaagcccatcctacccatcatataagtgagaaactcccaagacacaaaatcatatgccttttcataatcaaccttgaagacaatgcaaggcttttggcatcttttggcctcttcaactacctcatttgtagtcaccacgctgtgtagcatatgtcttccttctataaatgctgattgcctctcatgaataataaaaggcatgaccttcttcaatctattggccaatattttagccactatcttgtatgtgcatcctatcaatgatatanngttgaagtcattcaaca

SEQ ID NO: 7778 - DNA, 453 bp, Glycine max
  unsure at all n locations
atgtaaatgatcaaacttattcttgtattgagatattatntgcttcattgttattctnccacctcatcatttacactaaaaacatccttatatcacatgttttcacataaaaagtaaaaattaaatactatcaagatacatgatgaaaccaatttgaagatataactagtattcaaatatataaataaattgaatataattgatctaattatatactaacattcatatgtcaccacatttcatctacattgtctttactaatatcactccaaccattaacttgtaaaggagctttctggcaaatacatacttgtgtctcatacttgaaatattttacactattaggtagagacttcttcactagtttctcaagagagtggtgtatggatgaatgattatttgctcttttagaatcaatatcaatgaatttaccatctatcagttacaacggat

SEQ ID NO: 7779 - DNA, 269 bp, Glycine max
  unsure at all n locations
tgagaatggaggatntccttgatggtcctctctnatgttatcttgtaacacagctccaaactcaaaaatggaggacacatgaatgacaacgcaattcattcatggggctccgaaaaagggtaagaatggaggattttcttgagggtcttctcttatgcaatcatggaacacatctccaaactcaaaaatggaggacacatgaatgacaacgcacttcatgcattgggctccgaaaaagggtgagaatggaagatcgcctgatggtcctt

SEQ ID NO: 7780 - DNA, 432 bp, Glycine max
taaatattcaatttcgagcctctccatatattacggtttctcaatcaaacatccgagaaaaacgttattgtcgtatgaatttgctcagaggttcaacattcaatttcgagcgtctctatatattacgggactcaatcagacatccgagtaaaacgttattgtcgtttgaattggctcagaggttcaacattcaatttcgagcgtctcgatatattacgggactcaatcagacatccgagtaaaaagttattgtcgtttgaattggctctgagcttcaacattcaatttcgagcgtctcgatatatgacgggactcaatcagacatccgagtaaaaagttattgtcgtttgaattggctcagaggttcaacattcaatttcgagcgtctcgatatattacgggactcaatcacacatccgagtaaaaagttat

SEQ ID NO: 7781 - DNA, 456 bp, Glycine max
  unsure at all n locations
tgatgtcattcaaaacacactatgtagacctaaatgtttactaaacatgcattgccaactcaaacgacaataactttgtactcggatgtctgattgagtcccgtcatatatcgagacgcttgaaattgaatgtcgaagctctgagccaactcaaacgacaataactttttactcggatgtctgattgactcccgtaacatatcgagacgctcgaaattgaatgttgaagctctcagccaattcaaacgacaataactttttacacggatgcctgattgagtcccgtcatatatcgagacgctcgaaattgaatgtagaagctctgagccaactcanacgacaataactntntactcggatgtctgattgagtcccgtcatatatcgagacgctcgaaatngaatgtcgaagctctgagccaactcaaacgacaataactttttactcggatgtctg

SEQ ID NO: 7782 - DNA, 429 bp, Glycine max
  unsure at all n locations
agcttcaacattcaacttcgagcgtctcgncttattatacgactcaattagacatccgagtaaaaagttattgtcgtttgaatatgctcagagcttcaacattcaatttcgggcgtctcgatatatgacgggactcaatcggacatccgagtacaacgatattatcgtcttaattggctcagagcttctacattcaattttgagcgtctcgatatgttacgggactcaatcaggcatccgagtaaaaagttactgtcgcttgaattggctgagagcttcacattcaatttcgagcgtctcgatatggtacgggactcaatcagacatccgagtaanaagttattgccgnttgagttggctcagagcttcaacattcatttcaagcgtcttgatatttgacggactcaatcaggcatccgggcaaaaagt

SEQ ID NO: 7783 - DNA, 453 bp, Glycine max
  unsure at all n locations
agaggaagaagcatgatggaaatctgctggtcattgttgaaaatntcatgcacgcatccaagaaatatganaaggtcaggttattagttaaaacttactagttaattcattatacttgattataatgaatatttttaaagaaagatgtccttctgaatgcaacttaaataggtgcataacagaataaacttcttcattgatattgtaggctgtaaaatacattgagtttgatcactcattcagtgaagatgagaagtgtcgtgctaataccttacatttatcctgtaatttgaacaatgctgcctgtaaacttaaattgngggagtacattgaagcttcaagactatgcacaaaggtactctctgatcctaatttaagtanttttctctttctccctgtctctctatcacctgatgagacaagaaaacattgcataaggtagtgcatgttctt

SEQ ID NO: 7784 - DNA, 408 bp, Glycine max
  unsure at all n locations
cctcttcacgtctggagtatgtatgtagcatatagatccaaagacccttaggtgctntgctgatggcttcttcccgttccaagcttcaattggagtctgtcttttatagactcagttggacatctgttgagtatgtaaacagtagtgtagactgcttcagcccaaaatgagttaagtagtccctcttccttgagcatcgatctagccatctctataactgtgggattctttctcttggacactccactttggtgaggagaatatgcgactgtaagttgtcgctcaatgccttcatcctctcaaaaatcttcaaactcgcgagaggtgactctntgccgcaatcacttcttagaactttatccatcttccactttgatttcagcaatggccttgaacttgtgaatactc

SEQ ID NO: 7785 - DNA, 451 bp, Glycine max
  unsure at all n locations
tgtaatcgattacacttatactgtaatcgattaccattacagagtgtcagaaaatattctcaacagtcacatctttgtatgtggttcttgaatggctatcaaaggcctatatatatgtgacttgagacacgaatttactaaaagtttttcagaacaaaaaggtcttatcttcttataaagcaaaatcgttttatcctcttacaaattccttggccaaattacttgtgattcaataaggaattatttgagtgctcaaattgttcaatctatctctttcaagagagatttcttcttttcttcttcttcattttgaaaagggattaagagaccgagggtctcttgttgtgaaagaattctaaacacaaaggaaggcgtgtcctttgtgtgttagaacttgttaaaggaatntacaagatagtggaactctcaagcgggttgcttgtggactgga

SEQ ID NO: 7786 - DNA, 459 bp, Glycine max
  unsure at all n locations
gctatcactcttactggtgattgaaaaaagctnttaatgtttactcaagagcatgtattgtgccgataccgttaactggtgaacaggttcttgagcgggttgacgacattaatactgtatttggaaagacttcattattggtctgatctagatgtcagacattgtattgatgttatccatgtcaagaaaaatgattgtgatagtgtcatcgacacgcttcttaagatttaatgcaagtcaaaggatggtttgaataatcactaagatctagttgagatgggtatacgagaccagttacatccaaggtctgatggtaacaaaatatacttgcttctagcttgtcatactttgtctagaaaggaaaagataactttttgtcagtgtttgtgccatgtcaaagtgccacagggataatcttcaaatgttaacagccttgtgcagttgaaggatctcaagcta

SEQ ID NO: 7787 - DNA, 345 bp, Glycine max
ctgacattcaccacagattctgccttcttctattttcagatagagaatgcctctaacagcacctttgtcaatgatattcttcatgcctcttaagagcagatgtccaaatctttgatgccatattttgacttcatcttctttggaggatggacatgtggatgagtaactggtttctagaggtgtccataagtaacagttgtcctttgatctgctggccttcattagaacttcattcttctcatttgtcaccaagcattctgactttgtgaaggttacattgaatccttcatcacacaactgactgatgctgatcaagtttgcagtcagtccctttaccagcagtac

SEQ ID NO: 7788 - DNA, 458 bp, Glycine max
  unsure at all n locations
tctntgaganaacttccttgttatagctagagcttagctacacacacccctctcataactaagctcacctccttgagaagcttctttaagaagattcctaaagaagctagagcttagctacacatacctctctaatagctaagctcacctccttgagatgagaagctagagcttagctacacacccctataatagctaagctcacccccatgacaaaaaaaacatgaaaatacaaaaaaaagtccttactacaaagactactcaaaatgccccgaaatacaaggctaaaaccctatactattagaatggccaaaatacaaggcccaaacaaagaanaaacctattctaatatttacaaagataagcgggtcatgcttagcccatgggctcgaaatctaccctaaggctcatgagaaccttagggccttcccttggatctctagcccaatctacttgga

SEQ ID NO: 7789 - DNA, 337 bp, Glycine max
ttatgtgctcttcattgctgtttttgttgaataatccctaaaattctttcttgataaaactctattgatgtagctctcatttcattttttgggactctccgaattgcttgtctcttggcctgcttattggtgagttgccatatagggaattgtaaaggatgattgtggacatcccttgataatattgagtcaagaagttaggggaaaaccaccttaagagcttttggactaagaaacacttcaaattgagtgaatcacctatgagagaacactctccataaattcacgaccttcttttagtggttttaatagagaattacttaccttcattgtttca

SEQ ID NO: 7790 - DNA, 308 bp, Glycine max
  unsure at all n locations
gcttatatcatgttgtatatataggntatttatgcatgntctcttttgtattgtagatgatcaatgagaggagcctccttgtgtatgttaactctagcatgaggtagttcggaaatttctactttgtgctttgagtgtaccggtgcccaaatactataaaaaaaaaacgactcttatgcctaataataaacatgatggcgagccctgttgcagcggtaaagttgtgccttggtgacttgttggtcatgggttcgaatccagaaacaacctctttgcatatgcaagggtaaggctgctgacaacatccc

SEQ ID NO: 7791 - DNA, 430 bp, Glycine max
atgaacatatcagcaggattgtgtagagggctaattttatgaacattgagttttctttctaaccgaatgaagtgatatctaacatctatatgcttggttctatcatgatgaacttgatccttggccaagcatatagcactaacgctgtcacagtagatgttagcatattcttgattaattccgagatcatttatcagacctctaagccaaattccttcctttgcagctttagtaagagccatatatttagcctcagtagttgagagagcaaccgaaggttgaagtgttaccttccaactcaccaagcagccaccaagggtgtaagcataccctgttaatgaccttctcttgaccagatcagcagcaaaatctgcatcagaatagccagtgaggcagcaatctgggtgagatccatagatcaaacctacat

SEQ ID NO: 7792 - DNA, 455 bp, Glycine max
  unsure at all n locations
ggccaacaaatccgtatttctttagagacattntcatattattattccatttgtcattttaattagaatattgcttttacattccgcaattcaattaaaaactattgtaagtataactttaaaatatttattataaaatttaacaattttattatacaaatgagagtctttgattgaatgacaactatattcacattaaattcttttatttttattatttgaagcatttaattaaactttgaacattacagctcttagtatgtttaaaacttagtttatttatttaactttccaatagacaatgatttctttgatgatagaaaaaccacacaaaaaaagctatttaattgaagaaaaatcaaattaaaagaaaaataaaataaagattttctttataaaaactaattntatctctnttatatcttcttattnttaattaaaattcacaaactaat

SEQ ID NO: 7793 - DNA, 453 bp, Glycine max
  unsure at all n locations
acagattattntattatgtaagtgtaaatggttatattaacctctatgttgttattttttttattattaaaatcataaatttatttacttttttaaatgttaggaatgttgatatatataaaaaagtcaaacttataagtttattgaaggataaagttatgtttattttaaagtctgattgcaaaatgaatttttaaataagttatcattcaccttatattagaccttaaagataagcttataaaacataagttagactcaatttttataaaaggttcatttgtttaagttgtttttttaaaaaaatataataacaaaataattaagcatcttttcatgtgtttgtctaaattatctttttgctaagaaaacnagaaaatgatttttnttaataaacaaactttatctacttttagaaaaaacatttanaaacattgcttaaaaaaataattt

SEQ ID NO: 7794 - DNA, 343 bp, Glycine max
tgccgcatgcaagcttctaaactttatacaagaatgaagctctttaccacttgttagacaagttggcctagatatcttaagaagggggggttgaattaagatactacgaattatatccccaattaaaaattctatttatctttctattcaagggatagattcccttcataatgaatgtcttaaataatgattcaaaagaacaatgtgaatatgaatatgaaacaataataaataaaggagtttaagggaatagaaagtgcaaactcagatttatactggttcggccacacccttgtgcctacgtccagtccccaagcaacccgcttgagagttccactatctt

SEQ ID NO: 7795 - DNA, 430 bp, Glycine max
ggcacaaatgtcaggattcttactattcctcggaatagtctaatcaaccaatcccaaacaagggcatattccatcgactgttttggtcatttaaggcatgcattgatgcgtttgcattttatgaacccattgtgtgaatctatggaacatggctatatggaagatacaaagggacattgttagttgcaatttcacaatatggcgctaacaacatatttccattggcatttgccattgtcgagggtgagacagtagatgggtggcactttattttgcagaacttgagaacatgtgtgacaccacaacatggtatatgcttaatctctgacagatacgagtcaatcaaaagtgcatacagatgaccgaacagtgtgtagacagcagacaactcatcacatgtgttctgtattcggcacatatgtcaaaacta

SEQ ID NO: 7796 - DNA, 409 bp, Glycine max
cgtaatactcaccacctctatcagatctaataattttcacctttctatctaattgtctttctacttcattcaagtaaatttctaaggcatccactgcacgagggcagtaagtagacataaccgtaacgtgaatagtcatcaataaaggtgataaagtatctttccttttcaaaagaattaacatcaaaagattcacaaatatcagtatgcacaatttcaagaagctgagtgcttcttgtagctcctttctttgttttcccttaatacaatccacacaaatatttagattcgtaaaatctaaatcaggaagaatttcattctttattactctttccatcctttctctaagaatgtgacgtaaacatttatgccacaagaaagccgatcgttcatcactaaatatacgtta

SEQ ID NO: 7797 - DNA, 449 bp, Glycine max
  unsure at all n locations
nttgtgtgggatacctaatgtgagcacagtttctagtctccttaaggaaagattcatgaccgctccagtgctagttttgcctaacccgagagaaccatttgaggtgtattgtgatgcatcaaagatgggtttaggcggagtgttgatgcagaatggccaagtggtggcctatgcttctagacagcttaagactcatgagaggaattatcctacccatgatctagagttggctactgtagttttttcccttaagatgtggaggcattatctttttggctctaagttcgaggtgtttagtgatcataagagccttaagttattgtttagtcagaaggagctgaacatgagacaaaggagatggttattgtttcttaaggattatgattntgagcttagttaccatcctggtaaagccaatgtagtggctgatgctttgagtangaaatctc

SEQ ID NO: 7798 - DNA, 453 bp, Glycine max
tggtctaaactattcacacggattgccgattcgggcgtataatttatcgagacactcgaaattgaacaatgcaagctctcgagaaattcaaatggtcataacttttcaatcggaggaccgattcatgcgcataatatatcgagacactcgaaattgaacaacggaagctctctagaatttcaacatggtcataacttttcacatcggaggtccgattcatgcgcataatatatcgagacgctcgaaatcgaacaacggaagctctcgagaaattcaaatggacataacttttcactcggaggttcgattcaggcgcataatatatcgagacgcacgatattgaacaacggaagctctcgagaaattcaaactgtcataactcttcactcagaggtccgattcaggcgcataatatatcgagacgctcgaatatgaacaacggaagctctcgag

SEQ ID NO: 7799 - DNA, 386 bp, Glycine max
gccttgagaagattcctaaagtagctagagcttagctttacgctcctctctaatagctaagctcacctgcttgagatgagaagctagaacttagctacacaccccctataatagctgagctcacccctatgacaaaatacatgaaaatacagaaaaaaagttcctacttcaaagactactcaaaatgcctcgaaatacaagggtaaaaccctatactactagaatagccaaaatacaaggcctaaatgaaggaaaaaacctattctaatatttaaaaagataagcgggctcatacttagcccatgggctgaaaatataccctaaggctcatgagaaccctatggccttcccttagatctctggcccaatctacttggagtcttcta

SEQ ID NO: 7800 - DNA, 336 bp, Glycine max
cgctcgaaattcaacactggcagctccgcaccaattcagatgggcatacctttacactcggaggttcgattcacgcgcataatatatcgaggcgctcgaaattgagaaccgagagctctcgagaaaatcaaatggtcataactctccactcagaggtccgattcatgcgcctaatatatcgagacgctcgaaatcgaacaacggaagctctcgagaaatacaaatggtgataacttttcactcagagatccgattcagtgcataatatatcgagacgctagaaatttaacaacgaaagctctcgagatattcaaatggtcctaactttaactcgga

SEQ ID NO: 7801 - DNA, 441 bp, Glycine max
  unsure at all n locations
agcttcaagaataatggcctcagcaaacttcttatttctagaaggattattaatcaatagacctccaatctttaatggagagggttaccactactggaaaagccgaatgcaaatttttattgaggcaatagacttaaacatttgggaagccatagaaatagggccttatatacccaccacagtagaaagaaccacaatagatggaagcacaacaagtggaagcacaacaatagaaaaacctagagatagatggtctgaagaggatagaagacgagtacaatataatttaaaagccaaaaacatataattacatctgccctgggaatggatgaatatttcagggtttcaaattgtaagagtgctaaggaaatgtgggacactctacaagtaacacatgaaggcacaacanatgttaaaagatctaggataaacacattaact

SEQ ID NO: 7802 - DNA, 411 bp, Glycine max
  unsure at all n locations
agcttctacattcaattcgagctttcgttatattactgtactcaancggacatccgagtaaaaagttattgtagtttgaatttgctcagggcttcggtattccatttcgagcgtctcgatatattacgggactcaatcggacatcagagtaaaaagttattgttgtttgaatcttctcagagcttcggtattccatttcgagcatctcgatatattacgggactcaatcagacatccgagcaaaaagccattgtcgtttcaatgtgctcagggcttctgtattccattacgagcgtctcgatgtattacaggactcaatcagacatccgagtcaagagatatagtcgcttgaatttgctcagagctactacattcaatttcgagcttttcgatatattacgggactcaatc

SEQ ID NO: 7803 - DNA, 434 bp, Glycine max
acctgcggcatgcaagcttcagcctgatcgctaagcgtcatactttttcgtggctaagcttgacctattatcgccaagcgcaattccttacggccataagagtccctctcatctaagcgaatgtgatgcaatcctaccccccaagggcattggataaaaaactcgaagcagattggaccaaagatgcaagagaaggcccaagggttctcatgagccttagggtagatttcgggtccatgggctaagtatgagcccacttatctttgttgatattagattaaggtttcattaattttgggccgtgtatttagggctccataatgtaggcagggtaccctagaaatataggatttttcagcccttggtatttagggcacctagaactagttttgtattaggggtagttttgtaatttcacatgcactaagtgaata

SEQ ID NO: 7804 - DNA, 353 bp, Glycine max
tcatatctaatcattttcacatttatgtctaactgcccttttacttcattgtagtaaatatgtaaggcatccattgcctaagaaatctcaggcagtaagtagacataaccataacgtgaataatcatcaataatggtgatgaagtatcattcctttctgacagaactaacatcaaaaggtccacaaatatcagcatccacaatttcaagaagctgagtgcttcttggagctcttttctttgtatgttatggttgttttcccttaatacaacccacacaaatatttagatccataaaatctagataaggaagaatttcattctttattaatctttccatcctttctctagaaat

SEQ ID NO: 7805 - DNA, 385 bp, Glycine max
atctaagagacttctctgttaagctagatctttatcatacacacccctctattaactaaattaaccttcttataaataattacggatgaaaataacgcaacaaataatcaaacatcaaacataattactaataatatatagatatatatatcatggtgttacaggtatggagtatcaaaagattcatgcttgcccgaatgattgcatattgtacaaacatgaatttcaaaaaatgccaaaatgccctaagtgtggggtatcacagtacaaagtgaaggatgatgaggagtgtattaatgatgaaaactcataaggcccgccagcgaatgtgttatggtatcttgccatcattccaaggtgtaagcatctgtttactaatggagac

SEQ ID NO: 7806 - DNA, 402 bp, Glycine max
  unsure at all n locations
agctctcttgagaagattcctagagaagttttagttatctacacttacccctnnaaagctaagctcatctcttccttgagatgataagatagagcttagctacacacacaccctataatagttaagctctcccccatgccaaaatacataaaaatacaaaaaagtccctactacaaagactactcaaaatgccttgaaatataagactaaaaccatatactactagaatgaccaaaatacaaggtccaaaagaaggaaaaacctattctaatatttacaaagaagagtggacccaatcttggcccatgggtcagaaatctaccttgaggttcatgagaaccctagggccttctttaacagctctagcctaatcctctttgagtcttctatccaatacccttg

SEQ ID NO: 7807 - DNA, 388 bp, Glycine max
tgtagggttaaagtctcacgaaagcacttgctcatgcttcatttgttagccgcggctatacgagacatcttgccaaacaaagacaggttagcgataactcgcctgtgctttttcttccatgctatatgtagcaaagtcattgatccagtcatgtttgatgagttagaaaatgaggccgcaattatactgtgccagttggagatgtattctccccctgctttctttgacatcatgattcacttgattgtgcatctggtcagagaaatcaaatgttgtggtcctgtttatctacggcggatgtactcggttgagcaatacatgaagatcataaaatggtatacaaagaatctatatcgtccagaagcatctattgttgagaggtacattg

SEQ ID NO: 7808 - DNA, 271 bp, Glycine max
  unsure at all n locations
agctagccnngtttcttgttatatnngatttactcanggncactatgaacgacaaataccttgggataaagggagngccgccatgttttcaaagcccggactaaagcatacaactccttatcataagttgaatagctaagggtaggaccacttaacttttcactaatatacgcaattggatggcctttttgatcaacacagccccaatcccaacatgtgaagcatcacactcaatttcaaaagatttttgaaagtttggcaacgcaagtat

SEQ ID NO: 7809 - DNA, 340 bp, Glycine max
  unsure at all n locations
ctcttatgcaaaacttttatctcatagaanactttttcttagagacaaaaggagaagatttgtagaagcagagcaaattgttgaagaccgactntattcataaagcagaataaatcacttggttagccaatgtggttatggtgaagaaatcaactagaaaatagaggatgtatgtggattatagcgacctcaacaaagtaaggatgcttaccatttgcctaacatcgacaaattagttgatagggcatgcaggtttagattactatattttctagatgcctacacgggctataatcaaatcaagatgtgatacaatcctaccccccaagggcattggata

SEQ ID NO: 7810 - DNA, 438 bp, Glycine max
  unsure at all n locations
tctcgatatgttatacgcctaaatcggatttctgagtgtttagntatgaccatnngaanttctcgagaccttccgttgttcaatttcgagcctgtcgatatattatgctcctgaattggacctacgagtgaaaagttaagaccatatgaattgctcaagagctaccattgtttaatttcgagcgtctcgacatgtgatgcgcctgaatcggacctccgagttaaaagttataaccatatgaatatgtcgagagcttacgttgttcaattccgagcgtctctatatgtgatgcgcctgaatcagacctccatgtgaaaagtaacgaccatttgaatcgctccagagcttctattgttcaacttcgagcgtctcgacatgtgatgcgcttgaattcgaccttcgagttacaagttatgaccatatgaacatgtcaagagc

SEQ ID NO: 7811 - DNA, 369 bp, Glycine max
  unsure at all n locations
agcttgcttctttnggngcatagatagctttgctaaaaattttttaagngncatgaatctctgacataagcttcaaccaattaacattgtttgtatgacaactgttgtagttggacagcaatcacacagtttgtccaccatggtatgctttatgttcctattggttatagttttagtatgctttatgttcctattggttatagctttggtgctggaatgttcaatttggagtccacaaaaggaggaactccatatggtgttggagtttttgctggagatggtacaagacaagcaagtgaaatggagctggagctcgcagagtatcatggcaagtatatatgaaattagcccataaaagctagaatggat

SEQ ID NO: 7812 - DNA, 407 bp, Glycine max
  unsure at all n locations
agcttgtcaatgtattcttgtatccaacttactatacaagaggcatcacttccagtcctgctccaatgaataaatctttataagtaaaacatgtatgtttattctaactcaccccatcttggagcttgtcctctacagcagtggcaccaagaagaattaggttcttctcaatcttatctgatacttcctcaatcattatatcctgatcagcactgactacattcttggccctagagaatttactatcaaactccttgtattcttctgcatcaagttcacgataggccagtataagggttctcagacccgcatcagcatactcatgcacatgctccatggttntctcttcaaactcccttctattcttggcngcctttcaaacatggtgctgcatgaaaacatcactc

SEQ ID NO: 7813 - DNA, 374 bp, Glycine max
  unsure at all n locations
aaaggaaaatcctagtatttaatacttatactaataaaaaaactatacattacaaataccataaatgggaaagttgggacaattatacaagtttatacacaaagttagtcgttctcaccgactaacactggcgtagtatatagcatgaaataaaattcccttcctttgcccaagcactgcacctacgacgtaatcacttgcattacacatcagctcaaattcttgtccccaatctagtgctgtaattactggagcaaacactaatctggttttcaaatcattaaatgcatccatacactcttcattaaacacaaatgcaacatctttattcaacagattgctaagtggtttggtgactntngagaaatctttta

SEQ ID NO: 7814 - DNA, 291 bp, Glycine max
  unsure at all n locations
agacaagnggcctcagatatcttaagaaggggggggttgaattaagatattcgaaactttttcttctaattaaaaatctatcttactttttacttaagttatgaattcccttaatgataatcttcttaaatattaattcaaatgaagcaacttgaatatgaatataaagcaataataaataaaggagattaagggaagagaaaatgccaactcagttttatactggttcggccacacccttgtgcctacgtccagtccccaagcaacccgcttgagagagccactaacttg

SEQ ID NO: 7815 - DNA, 370 bp, Glycine max
accgagaggattggaaacataaaattcctcttcaatgtatccatttaggaaaacacttttgacatccatttggtataacttgaaatcgataacataagcataagctaataacaatcttaatgcctctcatcttgctaccggtgcataggtttcaccaaagcctataccctcttgttggttatagccctcggctactagccattctttatttctagtgatcaaaccatgttcattcaatttatttttaaacacccattttagtgccaatgatgttcatgttttttgaataaaggactaattcccatacatcatttcttttaaatcagttcaactcctcatgcatggatattatccaaaactcatctttgag

SEQ ID NO: 7816 - DNA, 402 bp, Glycine max
  unsure at all n locations
actaagcttctagtctacctatgaattcggctacttatgcatttcctctattgacatgacatcacttctggcacttaaatgcttagaagttggaaccctcctctcaaataaaattttggctttaaccaggggcatgtcttccaaggcttcaacccttacaacaactaatatacttctcttcattggtgtgagtccctcataaaaaatatggagaaaaaactgctctgaaatctggtggtgaaggcaactagcacaataattnttaaatctctcccaatattcatatangctctctccattgagttgtctaatacctgaaatatcctttctgatggccatggtcctggaagtanggaaaattttttctaagaatactctcttgaggtcatcccaactcgtgat

SEQ ID NO: 7817 - DNA, 440 bp, Glycine max
  unsure at all n locations
atgtctcttatggccatgactatcatttgntgtatcaagttgtggcaancangagactntaagcctactaatttaagatctttcaactgcacttggctcttaatatttgaagagtatccttgtgggactttgacctggcgtagacactgaaaaaaactgatcttctcctttctgggcaaagtatgacaagctggaggcaagtatattttttaccatcagaccttagatgtaactgcgatcgtatatccatctcagctagatcttgacaagtattcaaatcatctttcgtcttgccttgaatgttaagaggcgtcccaatgacactatcacatatatttttcttcacatgcataacattaatacaatgtctaacatctagatcataccagtacgcaagatcaaacaaaatcgacctttttttccatatgcaaggcttactt

SEQ ID NO: 7818 - DNA, 305 bp, Glycine max
gatgcccatactagagcacagcacgttctttacagaagggagtagttcatgtcacacgcgcgtgaactatttactcaagtagtagacggcgcgctctcttttcccagactcgacatgttgccccagcatacaccccattgacttgtccaaaatcgtcatatacaagatgagaggtgttccgggcaccggcggccgaagcactagagggattatgaggcactgattgatcctgccatacgcctctagacagtccttgatgcaacggatggattggctcttgcataacagcttgaacaacggctcac

SEQ ID NO: 7819 - DNA, 382 bp, Glycine max
  unsure at all n locations
agcttctcctctngaagctnctattgcncttttttcccaaataggcactgnggngngctctggaatctgtgccctttcttctgcctacaatttgtctaaaagtttgtaaaagtgtgtgtcaaagtgtgtgtaccctaattctgcacaagataggctttaaataagctctaaattcacgacgttgcgcttagcgccaccctatctgatgcaagctccattagagcttgtaggcctaggatcttcttcatcaatggattcctttgcttcttggaagatgaatggcagcggaatgaagaaaggaagagagagaggagacgccacttcaaggagaagatgagtctagaagaagctcaccaccataggaggccatggataagagctt

SEQ ID NO: 7820 - DNA, 466 bp, Glycine max
  unsure at all n locations
tatgctgcanacatctacaatagatctcctcaacctcatttagttaatcagccacaacagaacaattatgacctctccagcagcaggtacaatcccgggtggaggaatcatcccaaccttagatggtcgagtccttcacaacaacagcaacaacaacagccttattttcagaatgttgttggcccaagcagaccatacgttcctccaccaatccagcagcaacaacaacaacaacaacaacaacaatagccccagaaacaacaaacagttgaggccactccacaaccttcccttgaagaacttgtgaggcaaatgactatgcaaaacatgtagtttcaacaagagaccagagcctccattcagagcttaactaatcaaatgggacaattggctacacagntaaatcaacaacagtcccagaattctgatagattaccttctcaatctgtccataaatcccaaaatg

SEQ ID NO: 7821 - DNA, 435 bp, Glycine max
tcaagtgtatccttattatgccattgagattctgaatttcctgtacgaacgttccaagctaaggttttattggagatattccttattgcttaggtttgcatatcatatcccaaaaaataataaatttatgattaaataatataaacatattaaagtacaaagaaatagacatcatatttatatatcatctctatatattatcatctttccattctttacagctatctttcaatatttttaatactcattgatatattgagaaatgttttaaaaagtaaaatattattatatttgggttaaattcttattttaagcatattacattggttgtgtggaaatggatcactggacaaatcaatatgacaaaagaaatgttcatggaagtatgctaattgataagcaataacctgatggcattgatgggataggttggta

SEQ ID NO: 7822 - DNA, 384 bp, Glycine max
ttccagaaccattctccccgaagcgtttcaaggtgccaaagatgacttcaccatgcagcttgcattggtgtggaaccaaatcaaagcgccactgattgtcccgttgctgagactagcagtgtttctgtgcttgatcatgtcggtgatgatgttcattgagagagtctacatgggcattgtcatcactctggtgaagttgtttgggagaaagccagagaaacgttacaagtgggagccaatgaatgacgacattgagttgggaaactcttgttacccaatggttcttgttcaagtccccatgtacaacgaaagagaggtactattaccaataaggcaataacttagttttttttcctcatcatcacttctaacacttatactata

SEQ ID NO: 7823 - DNA, 351 bp, Glycine max
  unsure at all n locations
agactcaagcttcttggggttggctggctattatagaattttcatcgaaggtttttctaaattggcatngcccctaactaagttgactcgtaagaatgagaagtttgtttggaatgagaagtgtgagcaaagtttccaagagttgaagaggcggttgacgacagctccagtgttaattttgcccgaccctaagagaacatttgaagtgtattgcgatgcaagcgggcaaggcttggggtgtgtgttgacgcaagagggaagagtaatggcttatgcttcacgtcaattacgtcctcatgaagttaactacccgacccatgacttggaactagcagcggtggtctttgcctt

SEQ ID NO: 7824 - DNA, 352 bp, Glycine max
tcatgcttaagtatgtatggcaaaacttcattactgttgttttagacatacaagtgagcttgtaacaaatcttctagacttggagtgatcacatgcagtcctcttgaacccttgccacccactctatcatcatgccgagacttagaaaggccaacaggtttagccttctcaatatattcttctgcaatgtacctctcaacaatagatgcttctggatgatatagattctttgtatacccttttaagatcttcatgtaccgatcaaccgggtacatccaccgcaaataaacaggaccacaacatttgatttctctgactagatgcacaatcaagtgaaccataatgtcaaaga

SEQ ID NO: 7825 - DNA, 326 bp, Glycine max
tgaagctcaagaaaaattttgaagatgttttataagaagttgtggcttttagatgttattagcagcttcaactaccccattcatcttgggcctgtatggcgtggaattatggtgttggatcctgaaatcctcacacatttccttcatcattttgttgttcagattggtggcattatttgtgataatcttcttgggcaacccataccggcagattatctctttcttaatgaacttgaccaccacactccttgtcacactggcatatgaagcagcttcaacccatttggtgaagtagtcgatcgcaaccaaaatgaagcgacgtctat

SEQ ID NO: 7826 - DNA, 356 bp, Glycine max
ctacatattactcacagctttatcctcttaaaagattaagagtttttctttactaaaatgttttatcctttcaaaaagattccttggtcaaccacttgcatattcaataaggaattttgattggtcttcattttacaatctacctcttttaagagagacctcttcttctcttcttcttatttctgaaaagggattaagagaccgtgggtctcttgttgtaggggattcttgaacacaagggaagggttatctctgtgtgtattgttaatccaaagagagagtgaaagtttaattggggaatagtctttgtttctaaattcaaccccccctttttctgaggccatttgtccaacatc

SEQ ID NO: 7827 - DNA, 409 bp, Glycine max
  unsure at all n locations
agctttgggttcgatggcccctatgacatctatcccccacatggaaaaaggccaaggggcggacatgacattcaaaggatgtggcggaacattgacattgtctgcgtacgcttgacatttatggcatttccttacatgggtgcagcaatcgctttccatagtgagccagtaataacctgctctaaggatcttcctggccatagcatgcccattggcatgtgtcccaaatgaacccccatggacttcctcaatcatgtaattcgcctctttggcatctacgcagcgtaagagggtcatggttttgtttgtacaggacggtaccactcacaaagaaaccagtagccaatctccttaacgttatnttgtcattgtcggaaatccctggtggatattctttgttctcgacata

SEQ ID NO: 7828 - DNA, 327 bp, Glycine max
tctggtgtgtacatcttgacttgctttcctatctgacattcaccacagattctgccttcttctattttcagattgggaatgcctctaacagcacctttgtcaatgattttcttcatgcctcttaagtgcagatgtccaaatctttgatgccatattctgacttcatcttctttggagaatagacatgtggaggagcaactggtttcttgaggtgtccataggtgacaggtgtcctttgatctgctgcccttcattagaactttactcttctcatttgtcaccaagcattcggactttgtgaagattccatggaatactatcatcaca

SEQ ID NO: 7829 - DNA, 403 bp, Glycine max
ttcttgaccaggaattatttgtgtgggttggatgttgaattctggttgttcctggtgcggagatgatggtacagagggtgaaccaggagctgaagtttcttttggtgaggtagccatggaaaagcagagcgtttggaatgatttcgtaaatttctgagagctgttggggaatgcagacaatgagattaacacgaaaatataagtttgaatgaggaatgtagagggacgtgtgaatcaacgcgcgaatttgctttggttcagtagtgaacgtgctattaatgttaagtgattcgtttgggcacgttcagatatcagtagttgctacaattcctctagcagacaaatgcccagcttgcccctcagtatttcaaactgttttgcaatcaatgcctttgtgaaaata

SEQ ID NO: 7830 - DNA, 415 bp, Glycine max
  unsure at all n locations
agctttacgcagtttccttggattggtgggattctatagaatatttattcgaggttacatgaagattgcagctcccctttcatagttgctgggcaatggtcccttccggtggacggagatggcgactgaggcgttcaacacactgaaaaaagcagtatccacagcaccagttcttgcattacccaattttgatgtcccattcgtggtggagaccgatgcgtcgggtaccggcgtcggggcagttctttcttaggtgggccaccctatagcattcttcagtaaggagttctgccccaaactccgagcttcgtctacatatatccgtgagcttgcagctatcacgatggccgttaagaaatggcgccactacttgctgggtcantcctttgtgatcctcactgatcatcaaaagttg

SEQ ID NO: 7831 - DNA, 355 bp, Glycine max
  unsure at all n locations
ctcacgcttaacatccccagactggccttcaacgggttttctctctnngttgtctgcgctatngacaagttacagtctaacaatactaactctgaggaatattcctctttcattccgaatcttccgcatcctatcacgttaaacgcaacaccaccgaagatattgaccgagttcatgaagccactgctggaaacagagctcaaaagctacggcttaatcgtcaacgactttgcggaactcggaggagaagagtacatcgagcactatgagcaaaccacgggtcacaaggcgtggcatattgggccagcgtctcttatgtgcaaaagaagccttgaagagaaagcggagaggggac

SEQ ID NO: 7832 - DNA, 359 bp, Glycine max
aactcaagcttatacaatatataataaaagaacaatgacttttgaagagtcttttcatgtttccttcgatgagtctaatgccattcttccaaggaaggattttttagatgatatttcagattccttagaagatacacatattcatggaaatcattctaaagaaaaagacgaaggaagaaatgaggattctcaagataatggggctagaggaaataatgaacttccaagagaatggaaagcctcaagagatcatcccctcgacaacattattggtgatatatcaaaaggggtaacaactagacactctcttaaagatttatgcaataatatggcttttgtatctataattgaacctaaaa

SEQ ID NO: 7833 - DNA, 371 bp, Glycine max
agcttgaccaggaattatttgtatgggttgaatgttgaattctggttgttcctggtgcggagatgatggtacagcgggtgaaccagaagctgcagtttcttttggtgaggtagccatggaaaaacagagcgtttggaacgatttcgtaaatctcggaaaactattgggaaatgctggtaaaaacacgaatgccaagcagatataaatttgaatgaagaatgtagagaggcgtgtgaagcaacggtcgaatttgctttgtggtgaacgtgctattaatgttaagtgattcgtttgggcacgttcagattgcagtagctgctataattcctctagcagacaaatgcccagcttgcccctcagtttttcaaact

SEQ ID NO: 7834 - DNA, 355 bp, Glycine max
tggatatctggcagcagaaaaacaagtagttgagaactaagtaaaaggaaatggcttcctcaatgatctcctccccagctgttaccaccgtcaaccgtgccggtgccggcatggttgctccattcaccggcctcaaatccatggctggcttccccacgaggaagaccaacaatgacattacctccattgctagcaacggtggaagagtacaatgcatgcaggtaagacaactccacacatatatacacacaagaggcaccaaaaagtttaaaattcatcttacacatttatatatgctccaaaatgttacttaatttaacatgttagtcataggttacttaaattaacatgttaa

SEQ ID NO: 7835 - DNA, 418 bp, Glycine max
  unsure at all n locations
agcttgtaggccttggatcttcttcatcaatggagtcctatgcttcttgaattttaatcacaggggaatggagaagaagaagagttgagaggagacaccacttcaaggagaagatgagtcaagaagaagctcaccaccatagaaagccatggataagagcttgaaggtagaagaagatgaatggagggagagggagagaaggagcacgaaattttatgcctcaaaagaggtctgaactttgaagtttaattctcaaatgatcaaagttgaaaaaattcacacacatggcctctatttatagcctaagtgtcacacaaaattggagggaaatttgaatttctattcanatttcacttgaattttgaaatgaatttgtgaagccaaattttggagcccaaatttcactaattatgattag

SEQ ID NO: 7836 - DNA, 337 bp, Glycine max
  unsure at all n locations
tccgttttcaatttcgagtcgtctnngatatttacagggctcgatcagatatccgagttaaaagttattgtcgtttgacttttcttagagcttccgttttcaatttcgagcgtcttaatatattacagggctcgatcagacatccgagttacaagttattgtcgtttgacttttcttagagcttccgttttcaatttcgagcgtctcgatatattacagggctcaatcagacatccgagataaaagttatagtcgtttgacttttcttagagcttccgttttcaatttcgagcgtctcgatatattacagggctcgatcagacatccgagttaaaag

SEQ ID NO: 7837 - DNA, 350 bp, Glycine max
atgcttgagaaaattctaacgtcaataacttttaactcggatgtctgatcgagcccagtaatatatcaagacgctcgaaattgaaaatggaagctctaagaaaagtcaaacgacaataacttttgactcggatgtccgattgtgtcccctacgatataaagacgctcgtaattgaaaacggaagctctgagaaaaatcaaacgacaataacttttaactcggatgtccgattgagccctgtaatatatcgagacgctcgaaattgaaaacggaagctctaagataagtcaaacgacaataacttttgactcggatgtccgattgagccctgtaagatatcgagacgctcg

SEQ ID NO: 7838 - DNA, 404 bp, Glycine max
agcttgtttttctagtagtgttagatgtcttgcatatatatcaaaaactatttattttatttcgttcataacttaatcaaataaattttaaaatatgaaaatcatttctcaatttttatttgaatcttaatagttgaaaattttaaaagataatgaattgagagaaaattgattatattttgtaaaactaatttaaaagctacctgaaagctggaaaactaattgaaaaatgaaaaattagcagcttgtaaccaaaagttgaaaacttttaaattaacttattaaatcacaagtgtttgataaaactatatgttgaagtagttgaaaaatgtaaaatgacaagaatagaaacatttatatgatattttatataaattttaattttattttatgggataaatatt

SEQ ID NO: 7839 - DNA, 343 bp, Glycine max
gaacactcaagctttagatgaatatacttaatgtacataatttatatttttataacatgaatacactacaaaagtttaaaaaaatcgcatcatatattcttataccctagccatgaaattttattttatattaattcattttctattgcatcaacatctttttttacacaaataagaatatgaatataataatattaattttcagaagttactgatttgtttggttaaggacttgggcaaagaaaagataattaaataaaaaaatttactcaatgtgataccgtgcaagtgaaaacaacaccaggacacctaggagtacgtaacaggacatgccacataatgg

SEQ ID NO: 7840 - DNA, 406 bp, Glycine max
  unsure at all n locations
agcttacaaaggggctcatcaactccttgagtgaaagtagcaatcactggcttctttngattgatcttggattaagggaaaaatctattcaagaaattgtcacaaagcccatcccaagtcaaaggaaagctaggaggaatagcttggtaccaatgctcagccttgtcagcaagtgaaaatgagaaaagactaatacaaatgaaatcatcatccacttgatgaatcttcactgtattgcaaatatgcacaaaggtagtcaagtgggcataatgatcttcataatcaaagccatgtaacttgttttgttggaccaatccaatgagagatgcccttatttccacattgtgagccaccacttcatgttggaaaacaagtgaattgggctctagtctagctagcctctcta

SEQ ID NO: 7841 - DNA, 407 bp, Glycine max
agcttcttccccatgagcagcctcatcacctatctccatatcctcttcagacattctcaacggaacaaaaattctaatgaagaggcaaatcaaacttgtgctgataacattgacaaagataacaaagataatcccaaggatttggacccccatttgcctgaacccggtactgaccttcttcgaacctaaaccataaaagaaaccaacgtattgaccatcagttccatagaacaatttgttaagtcttggatcagcaaagagtccagtgaggagtcctcctagggttcctgcaatggcatgagtgtggaacactgccattgtatcatcaaccttctgcagtagctttgatctcttatggaccaccatcatggtgaaccatggaattgagccagataacactcccatta

SEQ ID NO: 7842 - DNA, 382 bp, Glycine max
  unsure at all n locations
agctttccctcttcatagaacaataggggcctaaagaaccattgccctgatgagattatgactatgtcaaagttttcaaccaggcttgtccatgcttcatctgcctcatccacatacagcttcatgatgctgttgtaggtgtggcctctggggtctgcatcactggatctcacaaaatatggagaccacaggtttccaagtgtgaaattgtaatcatgatagaaataacgtttgaagtataccacatctgaagagtatttgtgagaaacatcctcaggctcagacacctaaaaaaagtaaaaccacataagcatgttttaggattgttatcttcatgagtaggactnttttaacatgaccaaggtttaaaaaacagttcacg

SEQ ID NO: 7843 - DNA, 353 bp, Glycine max
  unsure at all n locations
atagaacctcaagctnatacagaaatacatattttccagcaacattttgatggcactacaacaatacaacatacatcacatggaaatattagattacagccagacacaatgcatagatgctactgtgttgggtgctttgctacattgccacatgattttctggtacaggaactgtttggaggggatcaaattcaataaagaatgtccgaatctccatcggagcaagttcaaccaccaacttcgtaggatcaacaggtcctcctctcaccaccttcggttcttcagtggagccttctaccttccaatctagcttcctcttttccatttgagctctttcttgattagcagacaaa

SEQ ID NO: 7844 - DNA, 370 bp, Glycine max
agcttgagcttattttagatgaccaattttaaaaaacaaacttgagtttaaagaaaatgttgtcattggccaaaatagattatttagtgaggattaacctatctagtaccaacttctagaataatatctgaatatgcccaaatatttttatgttcgaaaagttaatgagatatttttctttatgattcaacttaaagatagaacaatttaagtaaaatatttggaatcaataaaatgttgttggctgaaattaattatacgattaatttgttttagataaattgtatgattgattctttaccattattatttactagtcggtaacccgtacatacgcacgggtggttccgccaattgatttttgatgaat

SEQ ID NO: 7845 - DNA, 354 bp, Glycine max
tacgagcgactcgatatataatgcacatggatcggacctgtgtttgaaaaggtttgaccatttgaatttctcgagagcgtcccttgttcaatttcgagcgtctcgatatattatgcgcctgagtcggacctccgagtgaaaaggtatgaccattggaatttctctagagcttccgttgttcaatttcgagcgtctcgatatattatgcgcatgagtcggacctctgagtgaaaagttatgaccattggaatttctcgagagcttccgttgatcaatttcgagcgtctctatatattatgcgcctgaatcggacctccgagtgaaaaggtatgaccatgcgaatatctcaagagc

SEQ ID NO: 7846 - DNA, 360 bp, Glycine max
  unsure at all n locations
agctntggagaaccaagccaatcagaatgctagacgaaatattatgggaatagaggtaacaatggcggtaatgacggaccgaggcagaaccgggttgagggagtaaagctcaatgttcctcccttcaaaggtagaagtgatccagatgcctacctggactgggaaatgaagactgagcacgtatttgcctgcaatgactacactgatgcgcagaaagtcaagctagcagcagctgaattctccgactatgcccttgtttggtggcataaataccaaagagaaatgttgagagaggaacggcgagaggtagatacatggactgagatgaatagggtgatgagaaaaaggtatgtgcccact

SEQ ID NO: 7847 - DNA, 345 bp, Glycine max
tgcctgaaacttcctgggatccctttgtcgttgtcttccggttagggtgaagcttaaggagaacccaatctcctatctggtagttcacttcgcgatgtttcccatcaacttggcttttcatagcagcttaagccttgagaagcttatttcgaatagcttggaaagtgttatccctatcagtcaacatctcttcaatggcctcaatgttcgaagaccctgtaatatattctggaaagttaaagggtttttggcaaaaggcgacttcataaggagtggctccagttcccgtgttccatgaagtattgtgggaccattcgacccacgggaggagcttcccccacaagc

SEQ ID NO: 7848 - DNA, 365 bp, Glycine max
  unsure at all n locations
aaactcaagcttnggaaaatgatttctatacaaaagttagttttataaagngttttacagtggtcgacaaaagcggggcttttgctcctacgtatccttaatttgtgataaggaactcagacctacgtagttcttgcaagcggtgtgagactaaaatagtctcggtgttctttcactaaaatgcgaacatgctttagtaaagaaacaaaacctctaactaattagagcaacatattaattttggagaaaaacaatgtgtctattggagaaggagagtatgttgataaaaattttcttgtaaccacaaatgagattttggatgttagcgttttgtttctaaacaaccatttagaggaaacactggg

SEQ ID NO: 7849 - DNA, 368 bp, Glycine max
ctctaagtcacctgcggctgcactctacttatcaaatgaactctgatacccttgtgacatgcctctgattctaagaagaggggggggttgaattaagatatcacaacttatttccccaattaaaattctatttcactttctattcaagttataaattcccttaataatgaatttcttaaatattgattcaaatacaacaatttgaatatgaatataaaacaataataaataaaggagtttaagggaagagaaaatgcaaactcacatttatactggttcggccacacccttgtgcctacgtccagtccccaagcaactcgcatgagagttccactatcttataaattccttttacaagttctaaacac

SEQ ID NO: 7850 - DNA, 353 bp, Glycine max
gcttgagaatggaggatttccttgagggtcctttcttaggcaattttggaactttactccaaactcaaaaatggaggacacatgaatgacaacgccattcattcatggggctccgaaaaagggtaagaatggaggatttgcttgagggtcctctcttaggcaatcatggaacacaactccatactctaaagtggaggacccacgaacaggcctaagcaatagcattcatgtggctccgaaaaaggatgagaatggaggattgccttgagggtcctcttttaggcaatcatggaacacagcttcaaactcgaaaatggaagacacatgaatgacaacgcaattcattcatgggg

SEQ ID NO: 7851 - DNA, 385 bp, Glycine max
tgcaagcttgaatcggacctcagtgtgaaaagttatgaccatttgtatttctcgagagcttgcgttgtttagtttcgagcctctcgacatattatgcgcccgaatcggacatccgtgtgaaaagttatgaccattagaatttctctagagcttccgatgtttaatttcgagcgtatcaatataatataagcctgaatcggacctcagtgtgaaaagttatgaccattttaatttcacaagagcttctgttgttcattttcgagcgtctctatatgtgatgcgccttaatccgacatccgtgtgaaaacttatgaccatttgaatttcttcagagctctcgttggttaattacgagccttctcacatattatgcgcccgaatcgga

SEQ ID NO: 7852 - DNA, 342 bp, Glycine max
tgtaagatttgcaagatcatcttccttgattactccttgaaaattattgccatcaatccaaagagatgacaatttagagagtgatccaagactttcaaatggatttccactgaatttattaatagagagatcgagaaatgttaaatctatctcccttgagttgcggagatttcccaaaaaagtcggaattgttccttcaagttgattatatgacaaataaagtgcaacaagagaagtcaaatttcccaaagaagttggaatggttccttcaagttgattagctgataaatcaagttcaacaagagaagtcaaatttcccagggcatcagaaatagtcccatg

SEQ ID NO: 7853 - DNA, 373 bp, Glycine max
atcttcttccggaagttagttttttaaaaaaaatatattttattttgtaataatttacttttaattggataaaataatttataaaataattaatactattatacataaataattaaataattagtgaacgtaattatgactaatatttataatttgttttctacgcgcatgtcaaatattaattgtgtgacaatttagtataatttaaatcattaaaattaattaatgcgtacattttattaaaaaatataaatatttattatgataacattaattttttattacaaaagttatattttcttaacaaaatgatatttttttgttaccaaatggagaataaaagaattttcatttttattattaggtaaaataa

SEQ ID NO: 7854 - DNA, 350 bp, Glycine max
  unsure at all n locations
atctttacagcagatgccactctactccaaattcttgaaggatatgttaacaaggaaacataagtacattcaccaggaaaacattatagtggaaggaaattgtagcgctatgattcaaaagatcgttccacataggcataaagaccctgngagtgtaactattccttgttcaattggagaagtcactgtgggaaatgctcttatcgacttaggagccagtataaatttaatgccactctccatgtgtagaaggttgggggagttggagatcatgcccactaaaatgactntacaactgactgaccgctctattaccataccatatggagtaattgaagatatgctggtca

SEQ ID NO: 7855 - DNA, 343 bp, Glycine max
tcaagaattatggcctcatcaaactacttgtttcccgagggtaattctattaatagacctcccatctttaatggagtgggttaccactattggaaaacccgcatgcaaatctttatagaggcaatagatttaaatatttgggaagccatagaacaaggaccttatgttccctctatagtggccggaagtgcaacaatagaaaaacctagagcagattggactgaggaagaaagaagattagtacaatataacttaaaggccaaaaatattattacatctgccctaggaatagatgaatactttagggtttcaaattgtaaaagtgctaaggatatgtgggata

SEQ ID NO: 7856 - DNA, 350 bp, Glycine max
tgtagcaaatgcaaacggcaataacgtttttctcggatgttttattgagtcacgtaatacatcgaaacgctcgaaattgaaaacagaagctctgtgcaaattcaaacgacaatacattttaactcggatgtccgattgagtcccgtaatatatcaagacactcgaaattgagaataaaagctctgaacaaattcaaacgacaataactttttactcggatgtccgattgagtccagtaatatatctagacactcgaaattgagaatagaagagctgagcaaattcaaacgacaataactttttactcggatgtccgatggagtcccgagcgtctcgatatattatgcgcc

SEQ ID NO: 7857 - DNA, 236 bp, Glycine max
agcttaactcggatgtccgagccgcgctcataaataatcgagacactcgatattgaataacagacgctctcgagaaattcaaatggtcataacttttcacacggatgttcgattcgggcgcataatatgtcgagacgctcgaaattgaacaacggaagctctcgagaaattccaatggtcataacttttcactcggaggaccgattcaggcgcataatatatcgagacgctcgaaa

SEQ ID NO: 7858 - DNA, 340 bp, Glycine max
tatgaatgcatatgctactagcattcctgaggcttctaatctagcaactggagcatatgtctcctcataatctattccctcttcttgattatatcctttggtgactaatctagccttattccttataactatgccattttcatctaatttatttctaaatacccattttgttccaatgattgggtagttttagggtttctcgactaactcccaaacattatttctttcaaattggtttagttcttcctgcatagctattatccaattttcatttattatggcttcatttaaatttttaggttcaatcatagatacaaaatcatgttattgcataaatctt

SEQ ID NO: 7859 - DNA, 347 bp, Glycine max
  unsure at all n locations
agcttatgctgcattcatttataatagaccccctcagtagcaaaaccaacaacagcagaataattatgatctttcaagaaacagatacaatccaggttgcaggaatcatccaaatctgagatgggcaagtcctccacaacaacaacagtctatccctcctttctagaatgctgctggtccaagcaagccatatgttcctcctccaatgaagcaacagcagcaacaacaacaaagacaacaagcaattgaggcccctcctcaaacttccttagaagagttagtgaggcaaatgaccatccagaatatgcaatntcagcaagagacatgagcctncattcagagtctga

SEQ ID NO: 7860 - DNA, 334 bp, Glycine max
  unsure at all n locations
taataatattcctgaaactttagttttttttagaaccgngatggatgacgtcttgtgatctatgtatccgatctcacctattgggataaaagcttagttgttgtttcaattatcatattcagtttttatttgacgatttctcatttttatgcctttggtattcaattttattccatgtgcctaaccaaagtatcttggtatgtatttaaattttgttttcaaggcaaggttcctctattatctgtggaggcactgcatcaccttcatacatttatttttgtcctaacttgggcccatgtcacattttgtgttctcactgttggttttggagggc

SEQ ID NO: 7861 - DNA, 334 bp, Glycine max
  unsure at all n locations
agctttgatttcctttgttccggaaacctttgttttctcatgtgcacccaaacccaatctccgggttcgaagacaaccttctttctccctttgttggcttgtttagcatagcttttacttttcctctcaatttgatctttgactctctcatgatgcttcttcacatagtccgcctttgcttgaccttctttatgcttaaaaacagaaacattaggcataggcaaaagatcaagaggagttagtgggttaaaaccataaacaacttcaaaaggaaaacaattagtggtgctatgaacagctctattgtnagcaaattcaacatggggtaaacaag

SEQ ID NO: 7862 - DNA, 336 bp, Glycine max
tgctaacttatggaagctcctaatatctttcacactttttggggtgggccattcttggatggccttgattttctcagggtccacttggaccccatttctaccaactacaaaacctaagaaaactatattatctacacaaaaggtacacttctctatatttgcatagagggtgtttttcctaaggactgaaagaacttgtctgagatgtcctaagtgatcatctagcctcctactatacactaaaatatcatcaaaataaacaactacaaatctacctatgaaatcccttaagacatgatgcataagcctcataaaggtgcttggtgcattagtgag

SEQ ID NO: 7863 - DNA, 307 bp, Glycine max
agcttgttcatgatataaaaagaggtgattagagtgatgctagctaggaaacctatgtatttactaatgcctcatgattattgtttatcttttattgctagttctttgcctataggtgcgaaagaattattgaaggagtttggggatgtctttcccaaagacacccctcatgggttacctcctttgagagggatagagcaccaaattgatctcatgccgagagtttccataccaaatagaccaacatatagaagtaatccaaaagaaacaaaagagagccaaagacaagtggaaagcttgatggaaa

SEQ ID NO: 7864 - DNA, 300 bp, Glycine max
cttaagctagaacggccatggtgattgggaagaagataatttcatttgttgtatgtaaactatgtttctaatgttctttccaaaaatgatctttgcttcaataacatgatttgtaagtcttgtgactattaatctagttccattgcagaggcctttagattgatctagattcctcaacaacattattggagttccatttttaatttgattctatgattacgaacccccaatatctctaattctttcacaaacttcacaacaactacctctacccaggtgttatcaattgcatcatacatg

SEQ ID NO: 7865 - DNA, 267 bp, Glycine max
tttttatatcaaaataagcttgatcgatacataagcttatttatgtaacttatttttcataaactacttcaattagtttattttggtaattcacttaaagtaatttatggaaattaataagttagttgttactatttttttcttaaccttactcatattagtttattaaattcaattttaccattttatttaattaaagacactcattttacccttttattcgatttagaaacactcattctttttgctttgtaactaaaaaaaccc

SEQ ID NO: 7866 - DNA, 348 bp, Glycine max
  unsure at all n locations
agcttatagtcattatttgntgtgaaccataagccanagctgattattcccttgagataagcagtggttggagtctccatgtatcgactgatgagtctagtagcatatagaatgtttggtcttatgcacatcaaatatcataaactagtcaccaaactcttgaaatttgtagcatccaccttttttgcttcgtcgaaatttgataacttcattttgcacaccatccgtgttccaattggcttccaactatccatcttgaatttcttgagcatctctttatcatagttttgntgngaaatgaaaattccatcttccttctgctttacctcaatgccaagatagtatgac

SEQ ID NO: 7867 - DNA, 296 bp, Glycine max
  unsure at all n locations
agcttgaaattgaacaacggaagttctctagaaacanaaatggncataacttatcacacggacgtgcgattcacgcgcataaaatatcgagacgctcggaatcgaacatcgggagctctcgacaaaagacaacggacaataactatcacacggaaccccgattctagcgcatcacgtatcgagatactctgaagtgaaaaccggaagctctcaagaaactcaaacggccataacctgtcacacggaagacccaatcaggcgcataatatatcaagacgctcgaaattgaacaacga

SEQ ID NO: 7868 - DNA, 292 bp, Glycine max
gttctcaatgctctgttcaagctctcccatttcctagaggtttatctaggatctctatcagatactatgctagatggcacaccatgtaacctgacaacctcacttatatacaaggtagtcaacttttccaaggaaaatctgatactaatgggaatgaagtgagcagacttagtcaatctatcgacaataacccatatagaatctaaacctctacgggtcctacgtagtcctaccacaaaatccatggaaatactgtcccacttccactggggtatctctaagggttgtaact

SEQ ID NO: 7869 - DNA, 345 bp, Glycine max
  unsure at all n locations
agcttgcattttaaagcataatttccccactctatangctgataatctaaccaacattccctcactaccttctgaaattgcttgttcattagccatccatcataaaccttaaaaggtttagggccccaatcactgcatttagaatgcatgataatacgacagtgatcagaataattcctctcaaggttaaattgggagctatcaggccatttggacaaccatccatcagagacacacactctgtccagtttgcttttgcaggaaccattacgcctaacccaagtaaagggtttacccacacaaggaatatcatcaacctccattgcagcaagccaatcattgaaa

SEQ ID NO: 7870 - DNA, 290 bp, Glycine max
  unsure at all n locations
ctcctgttctagctntacccgattttactcaaccttttgaagctgaatgcgacgctagtggagttggcattggggctgttttgatacaaaacaaaaggcctatagcttatttctcggagaaattgggaggagccagattgaactatcgcacctatgacaaagagttctatgccattgtgagagctcttgatcattggaatcattatttgcgttctaatcactttatatcgcattcatatcatgagtcattgaaatatatcaatgggcctcacaagttgagtccaaggcct

SEQ ID NO: 7871 - DNA, 321 bp, Glycine max
agctttgaacaaattcaaatgattataactttttattcgcaggtccgattgagtcccgtaatatatcgagacgctcggaatggaataccgaagctctgagcaaattcaaacgacaataactttggactcggatgtctgattgagtcccgtaatatatcgagacgctcgaaatggaataccgaagctctcagcagattcaaacgacaataactttttactgggatgtttgatcgagcgtcgtaatatatcgagacgctccaaattgaataccgaagcttttagcaaattcaaacgacaacaactttttattcggatgtctga

SEQ ID NO: 7872 - DNA, 320 bp, Glycine max
  unsure at all n locations
tgggatgattctcattctcatcttagtagtaggcgtttgcatngnatggactcatcgttggcattatactntcttcacgtgctggccaatccagagctgattagtataaaatttcctgtttgctgcgcacagaaccatgaattggatggtgaatgtcgccggggactaagtcatgtcaagagtgtaactttgtgatgctctgcatccgtcttatgataaaattgaggttatctctgaaataaagtgcctcaaacgacttattttccattcattggatctaatttgagtcccaactacattagagatctctgtaataaaac

SEQ ID NO: 7873 - DNA, 268 bp, Glycine max
caaaacgcactagagcgtgttcttggatatctaaatcaaatcccatcatacggacatcgagaagttctgatcttataattcgctctcagtacatgtgatcctggtgatctcatggaaaccatccagaaatgcaaaaagagtaaaataaggtgctcagtcattggtcttgcagctgaaatgtttgtgtgcaaacatctctgcgaggaaactggagggacttattctgttgcactacatgaggttagcttgttgattttgatgatcccct

SEQ ID NO: 7874 - DNA, 363 bp, Glycine max
  unsure at all n locations
tgaaggacatgcacaaagtgtgactatatgatgtggcaatggggtgtagcaagcaaatgctcaccttccccttaggctggaccaaactttaattgggttgggcttctcccaattcaattaaatttatctcccaacacacatcaaatagggcacttaatgcatgtgaaattacaaaactacccctaatccanaaactantctaggggccctataatacaagagctaaaaaatcctacattactagggtaccctccctacactatggagccctaaatacaagtcccaaaaataatgaaatcctaatctaatatgtaccaagataagtggtctcatacttagcccatggacccaatcttcttggag

SEQ ID NO: 7875 - DNA, 319 bp, Glycine max
  unsure at all n locations
accactcccagggtgctggaatttcttcacattgtctcgatgggtgcctatgcatgttgaaagccttggaggaaagaggtatgcctatgttgttgtggatgatttctccagatttacctgcgtcaactttatcagagagaaatcacacacctttgaagtattcaaagagttgagtctaatacttcaaacacaaaaacactgtntcatcnnnanaattnnnantcaccattgccnanactttnaaaatagccagtttactgaattctgcgcgtctgaaggcatcacctatgagttctctgcagcccttacaccacaacaa

SEQ ID NO: 7876 - DNA, 353 bp, Glycine max
agcttgcttctcttgaatatcttattcattttgggaaaaaatggacaaattaggtttaattagtagggcactaactgaaattaaattgaatttgaatttgggaatgtaagcaacattatgcaagactaagatgttggtaaagcaaactgaaccaatggcaataatgggtataatgtcactattaggcagagttacatttttatcaaaaacaagctggtaggatctaaaatgatgaagagagcaagtaatatgaatgcttgcaccaaaatctaaaagccaacaatcatgaagaaaattggaagtagaaataagcatactacttgaggaatgacaacattggtagcatgactttc

SEQ ID NO: 7877 - DNA, 337 bp, Glycine max
agcttgttattcgagtattctttcccgagaacgggggcgttgacgacgccagttgaaatgttgacactgttacctaatgcattcacgtttagtggaagccttgcagggtcttttccagccactgtctgcacagggttgcttaaagaatcaaagtttgagctcgacacaaactcgggcaataagtggaactgcacaagttcgattttctggccttcgtttaaggagttgaggaagccagctttgaggttggaaaaggcaaaatcatctggtgcaaggatggttatgccaccactcttggctgttatgagctgtgagatgatgttgctcatgatttctg

SEQ ID NO: 7878 - DNA, 285 bp, Glycine max
aagatttttgttctaagatccttacaactaacgaattcagtaataacttccttagaaaggactttctctcggaccaaatgacaatcaatttcaacatgcccagctccctcatggaatatcggatcagaacctatatataggactgcctgattatcacaacatagcttcattcggtgagtatttccaaaacttcaactcttgaagttgtcaatccaaatgagaccacctgtgactacaaccataactctatattcacccctctgcactaaaccttgcaacaacatt

SEQ ID NO: 7879 - DNA, 374 bp, Glycine max
tagctctgaagactcaagaaatattaaaactccatttgaatctatgcaagaacccactggtgctcaagtcataaagtcaagtctgagacttagtggaaactgtactgaactattgaaagatggatatattattgctctgtatgcaagagactgttctgcacttcatgtctcaaggcaaagggttaaaggtggaggttggatcatggattccatgtcaaatgtgtcaaaaagagaccctgctgcacagttcctcatcatcttcagaagcaaggttcgtctcaaaggaactttgcattatccaaggcacttaatattattatatgccagcatgtgcttcaaaatagtagtttagaatggtgtaacatgtattttta

SEQ ID NO: 7880 - DNA, 254 bp, Glycine max
agcttttccaccaacacttgtctgaaattcccatcatcaggaatccaagttctccacatggaatcattaaagggggtaactttaacacccccaacagtgaccctgtgaacaacttcaagagcctgttggttcaaaccctcaaatttctctaatttcgacgaactcaaatactgtgctgtgtcagggacaaggtccttgggcgcggaaataacctcaatggcgttgacgaacgccaatttggagcctttgttggg

SEQ ID NO: 7881 - DNA, 376 bp, Glycine max
  unsure at all n locations
gctttagatgcctttaaagttttttatgccgaagtttataaacaatgaggagagcaaattaagatcgtgagattcgatagaggtggagagtactatggtagatacacagagaatggacaaacacccagtttatttatgaagtttcttcgaaaacatggaattgttgcccagtacattatgtctggttctcttgatcagaatggtgtggcanaaagaagaaatcaaactttaatggacatggtaaggagtatgaagagtaatagaaaacttcctcaattcttgtggattgaagtactaaagacaattgtgtatatattaaatngagttccaacaaaggttgtctcaaaaacaccttttgagttattcaaaggttgaa

SEQ ID NO: 7882 - DNA, 347 bp, Glycine max
agcttggaacaaatattttgaattctttgtccccttagagattttgtaaagatgtttgctagttgatcattagaactaacgaattcagtaataacttccttagaaaggactttctctcggacaaaatgacaatcaatttcaatatgtttagttctctcatggaatattggattagaagctatatataggactgtctgattatcacaacatagtttcatttgttgagtatttccaaacttcaactcttgaagttgtttaatccaaatgagatcacatgtgactacaaccataactctatattcagcctctgcactagaccttgcaacaacattgtgcttcttactctt

SEQ ID NO: 7883 - DNA, 327 bp, Glycine max
  unsure at all n locations
agcttgaaatgatttcggaatctgtttattatncaaagggcataacttaataacacggaaagatcggattcaggcgcataatatattgagacgctcgtgattgcacaacggaagctctcgagaaattcaaatggtcataacttttcaaacggcagtccgattaacgtgcataatatatcgagaagattgaaattgaacaacggaagctgttgagaaatttaaatggtcataacttatcacacagaagtccgattcacgcgcataatatattgagactctcgaaattgaacaacggaagctctcgagaaattctaaaggtcataactt

SEQ ID NO: 7884 - DNA, 269 bp, Glycine max
  unsure at all n locations
agcttgaaggactcttgctgacttctgatatggnctttataactcaggttagacttcatttattcccattgttgagtgatntaatttggaaatggtggtcgtcttatgtcttgttgctgatttttgtatttttttctctttatgtttcggagtactggacatcttttgcgagctctttttgagattgtcttgaaatatggatgggcacaattggctaataaggctttgaacttatgcaaaatggtgaccaagaggatgtaaagtgtcta

SEQ ID NO: 7885 - DNA, 387 bp, Glycine max
  unsure at all n locations
tgccttatgacttcctgcgatccctttgtcgttttcttccggcgagggtgaagcttaaggagaacccaatctcctatctggtagttcacttcgcgatgtttcccatcaacttggcttttcatagcagcttaagccttgagaagcttatttcgaatagcttggaaagggggatccctatcagtcaacatctcttcaatggcctcaatgttcgaagaccctnnnncatattctggaaagttaaagggtttttggcaaaaggcgacttcataaggagtggctccagttcccgtgttccatgaannattgtgggaccattcgacccacgggaggagcttcccccacaagcctggcctgcgatggacgaaagcttgcatatattgctcaatt

SEQ ID NO: 7886 - DNA, 379 bp, Glycine max
aaatagatgcattggttaacttgtgttatcccagcttttcttgaatcataaatctgtacctgtcgcaagagtctgtggtttatgctcctctgttgaccaccatacagacctttgcccttccatgcagcaacctggagcaattgagcaagctggagcaattgagcaacctgaagcttatgctgcaaacatttacaatagacctcctcaacctcagcaacaaaatcaaccacaacagaacaattatgacctctccagcaacagatacaaccctggatggaggaatcaccctaacctcagatggtctagccctcaacaacaacaacaaaaacaacctgctccttccttccaaaatgctgctggcccaagcagaccatatatt

SEQ ID NO: 7887 - DNA, 356 bp, Glycine max
  unsure at all n locations
agcttgaaggaaaannggatgctttggntatttnnggaacccagctggccttgaaccagaaatctgtacctgtcgcaagggtttgtggtttgtgctcctctgctgaccaccatacagacctttgcccttccatgcagcaacctggagcaattgagcaacccgaagcttatgctgcaaacatttacaatagacctcctcaacctcagcagcaaaatcaaccacaacaaaacaattatgacctctccagcaacagatacaaccctggatggaggaatcaccttaatctcagatggtctagccctcagcaacaacaacatcagcctgctccttccttccaaaatgctgctggcccaagc

SEQ ID NO: 7888 - DNA, 324 bp, Glycine max
atgaatgaacggagaggaagagaagagcacgaaattttatgctctaaaagagctctgaaatctgaagtttaatattcaaatgatcaaagttcaaaaaatgcacacacatgacctctatttatagcctaagtgtcacagaaaattggaaggaaatttaatttcacttgaatttgaaattgaatttgtggagccaaaatttcactaattatgatcaatgaattttagttatggttcagcccactaatccaagatcaattctaagatttccactaagtgtgcttaggtgtcatgaggcatgtaaagcatgaaggacatgcacaaagt

SEQ ID NO: 7889 - DNA, 222 bp, Glycine max
  unsure at all n locations
agcttgggagggctttcctccctatttgagacaaaccnagcgagcattggccactggaaaccggataggatcccaagatcaataatatgaacgggttctgcctttgccgctgctttgataatcattgtatttgcaaagaaaagtataaacttcttgaaagggctggaggaagagaaaacctgctatgccttgagataattagcaacagtgacgctcctagag

SEQ ID NO: 7890 - DNA, 240 bp, Glycine max
  unsure at all n locations
agcttccggagtctttttcgatcttcttgacacgngacgcgcctgaatatgacctcgttgtgaaaagttctgaccatttgaatttctcagagctcctgttgttcacataccagcgcgtctatatgtgaagcacctgaatagcacatccgagtgaaaagttatgaccatttcaatttctcgagaattttcgtcgttcaatatcgagcatctctatatataaagagcctgacctggacctcc

SEQ ID NO: 7891 - DNA, 347 bp, Glycine max
ttatcaaagatttgataatctttaagatgatttttactcagacttggattttgctggttgtgttgactctcgcaggttgacatctggatacatcttcataatgactaatggagcaatatcttggagaagtgcaaaacaatcattagttgctacttctatcatggaggctaagtttatttcattatttgaaacaacatcacaaggtatttggttaaaaagtttcataagtggtctaccagtgattgattccattcctagactgttaaagatatattttgataattcagttgctctttttttggctaaaaacaataaaagtggaagttgaatcaagcacattgacatta

SEQ ID NO: 7892 - DNA, 343 bp, Glycine max
agcttctcgatatattatgcacttgaatcggacctccgagtgacaagttatggccatttgaatttttcgagagcttccgctgctcaatttcgagcgtctcgatatattatactcctgaatcggacctccgagtgaaaagttaagaccatttgaatttctcgagagcttccgttgttcaattttgagcgtctcgatatattatgcgcctgagtcggacctccgagtggcaagttatgaacatttgaatttctcgagagcttccgttgctcaatttcgaccgtttcgatatattatactcctgaatcggacctccgagtgaaaagttatgaccatttgaatttct

SEQ ID NO: 7893 - DNA, 355 bp, Glycine max
  unsure at all n locations
agcttctaaactttatacaagattgaagcctgataccactngntagacaagtggcctcagatatattaagaagggggggttgaattaagatatcccaaactatttccccaattaaaaaattatttcactttcttttcaagttatagattcccttaacaatgaacttcttaaatattaattcaaatcaaacaatttgaatatgaatgtaaagcgataataaacaaaggagattaagggaagagaaagtgcaaactcagatttatactggttcggccacacccttgtgcctacgtccagtccccaagcaacccgcttgagagttccactatcttgtaaattccttttacaagttcta

SEQ ID NO: 7894 - DNA, 364 bp, Glycine max
aaggataacctattgctcatagatgagagaaattttgtggtcatcaactactggcttggcttgaatgagtttgctgatttgagccaccgagagttcaataacaagtatctggggctgaaagtggactactctacaaggagagagtcccctgaagaattcacttacaaagcatgtgagttgcctaagtcagtggattggacaaagaaatgcgctgcaaccccattcaacaaccaacgttcatgtggtaagcatatttttatttattacctaataatactgaattaatccaacatgatctcattcttattataacatgtattagctagtattatttcaatattgaacgaaccacacatactacaaa

SEQ ID NO: 7895 - DNA, 369 bp, Glycine max
  unsure at all n locations
tgtaattcaaaagtgctagacttggaaattgttttgatngttagatccgtgcatgactgatgaatgaaattgtgtggctttagcagcaacatcacgttcatacagatgaggacggttctgaaggtggttgataactcgggggagaaaaaagtaacctgcattcaagcattgaaagggaagaaagtgacacaatcatcccctcacttaaggaggcacatgcaaaaggggagggtgtgatggaaatgaggtcaagtttgatgacaagcaaggccaacccattgggactagagtgtttgggccagtgcctcatgaactcangccnaacaaccatgtcaagattcttacttttgccggccatattgcttaatt

SEQ ID NO: 7896 - DNA, 390 bp, Glycine max
aatactcaagcttctaaactttatacaagaatgaagctctgatttttcttgttagacaagtggcctcagatatcttaaaaagggggggttgaattaagatattccaaactacttccccaatttaaaaatttatttcactttcttttcaagttatagattcccttaacaatgaacttcttaaatattaatttaaataaaacacattgaatatgaatgtaaagcaataataaacaaaggagattaagggaagagaaagtgcaaactcagatttatactggttcggccacacccttgtgcctacgtccaagtcccaagcaacccgcttgagagttccactatcttgtaaattcttttacaagttctaaacacacaaagacaatccttcctttt

SEQ ID NO: 7897 - DNA, 343 bp, Glycine max
agctttggtttcgatggtccctatgacatctatcccccacatggaaaaaggccaaggggcggacatgacattcagaggatgtggcggaacattgacattgtctgcgtacgcttgacatttatggcatttccttacatgggtgcagcaatcgctttccatagtgagccagtaataacctgctctaaggatcttcctggccatagcatgcccattggcatgtgtcccaaatgaacccccatggacttcctcaatcatgtaattcgcctctttggcatctacgcagcgtaggagggtcatggttttgtttgtacaggacggtaccactcacaaagaaaccagtagc

SEQ ID NO: 7898 - DNA, 336 bp, Glycine max
  unsure at all n locations
tgtggactgccaacatgccatatatgaaatttaagggtagttgggggactctgtccattgtcagttcctcatcgcccttgggaggatccgtcactggatttcatcaccggcttacctctattccgaagtaacaccacaattctggtggtcgtcgatcgcttctccaaaggcatccatttgggcattttgccaacgnctnactcctccctcactgctgcaacactattcattgaaatccttggaaagatacaccaaatgcctcaaagcttggtgtccgacagggatccacttttcctgaagatgagcttcccttatcaccctcacagtgatggccca

SEQ ID NO: 7899 - DNA, 402 bp, Glycine max
tttaagaaggcaatttccaatcatgctatcttatgcaatgacaattaacaagtctcaaggccaatcactttctatggttggactttatttgccaaaaccagtctttcgccatggacaattatacgttgcattatcaagggtcaattcaaggcaaggattaaaagttcttattcatgataaagaccaaaaaaatatgacttatactaccaatgtagtcttcaaagaggttttcaaaaatcttacaaggtaactctaaattttgaaacaacaaattgtactatttattggcaacaattcctaactgttatcttactcatatacattctaacatacagcccaagatgatatcatatattacaatcttaaaatttacattgtcatgtatgtaatcttaattaccac

SEQ ID NO: 7900 - DNA, 349 bp, Glycine max
agctatgctgcaaacatttataatataccccctcagcagcaaaaccaacaacaacagaataattatgatctttcaagcaacagatacaatccaggttggaggaatcatccaaatctgagatggacaagtcctctacaacaacaacagcctatccctaccttccagaatgttgctggtccaagcaagccatatgttcctccaatgcagcaacaacaacaacaacaacaaagacaacaagcaactgaggcacctcctcaaccttccttagaagagttagtgaggcaaatgacaatccaaaatatgcaatttcagcaagagacaagagccttcattcagagtctgacaaatc

SEQ ID NO: 7901 - DNA, 391 bp, Glycine max
taccaccataggaggccatggataagagcctggatgaagaatgagatgaatgaacggagaggaagagaagagcacgaaattttatgctctaaaagagctctgaaatctgaagtttaatattcaaatgatcaaagttcaaaaaatgcacacacatgacctctatttatagcctaagtgtcacagaaaattggaaggaaatttaatttcacttgaatttgaaattgaatttgtggagccaaaatttcactaattatgatcaatgaattttagttatggttcagcccactaatccaagatcaattctaagatttccactaagtgtgcttaggtgtcatgaggcatgtaaagcatgaaggacatgcacaaagtgtgactatatgatgtggcaatg

SEQ ID NO: 7902 - DNA, 256 bp, Glycine max
gtgcctgtatattgatgcgcctgaatcagacatacgagtgaaaagctatgaccattagaattatttgagagcttcctatgattaatttcgagcgtgccgatataatatacacctgaatcaaacctcagtggaagaacgtatgaccatttgaatttcttgcgagcttccgacgttcattgtttagcgagcttatttgtgaggcacacgaatcagacctccgcgtgaaaagaaaggaccatttgaatttctcgagagc

SEQ ID NO: 7903 - DNA, 363 bp, Glycine max
gcttctaaactttatacattaatgatgctctgataccacttgttggacaagtggcctcagatatcttaagaagggggggttgaattaagatattaaaacttatttccccaattaaaattctatttcactttctattcaagttataaattcccttaataatgaatttcttaaatattgattcaaataaaacaatttgaatatgaatataaaacaataataaataaatgagtttaagagaagagaaaatgcaaactcagatttatactggttcggccacacccttgtgcctatgtccagtcctcaagcaacccgcttgagagttccactatcttgtaaattccttttacaagttctaaacacaca

SEQ ID NO: 7904 - DNA, 379 bp, Glycine max
  unsure at all n locations
gcttcaagaaaaagatggtctcatctaactccttatttccagaagggaattctatcaatagacctccaatctttaatggagagggttaccactactggaaaacccgaatgcaaatttttatcgaggcaatagatctaaatatctgggaagccatagaaatagggccttatatacccaccacagtagaaagagtttcaatagatggtagttcatcaagtgaaagcataaccatagaaaaacctagagatagatggtctgaagaagatagaaaacgagtacaatacaacctaaaagccaaaaacataataacatctgccctangaatggatgaatatgtcaaagttcaaattgcaagaatgcttaggaaatgtgggacact

SEQ ID NO: 7905 - DNA, 373 bp, Glycine max
agcttgaacaaatcttctacagttgtgagtgataacatgcagtcttcttgaacccttaccgcccactttgtcgtcatgccgagactcgagaagcccatcaggtttagccttttcaatgtactctgaacaaaatccaatggcttcttctgcaatgtacctttcaacaatagatgcttcgggacgatgtagattcttcgtatacccttttaagatcttcatgtatcgctcgaccgggtacatccatcgcaaataaacaggaccacaacatttgatttctctgaccagatgaacaattaagtgaaccatgatgtcaaaggaagcaggaggaaaatacatctccaactaacacagtataattgcaggctcgttttct

SEQ ID NO: 7906 - DNA, 384 bp, Glycine max
  unsure at all n locations
agcttncacttgataatggagacacttgaacttcgctaggcaacgacattcatggcgctccgaacaaaggtggagtatggaggattgccttgagggtccgcacttangcaatcatgaaactaagctccaaactcgaaagtggaggacacatgaacaaccctaagcaataatattcatgtggctccgaaaaaggatgagaatggaggattgccttgagggtcctctcttangcaatcatggaacacagctccaaactcgaaaacggaggacacatgaatgaaaccgcaattcattcacgtggctccggaacaagatgagaatggaggattgccttgagggtcctctcttangcaatcatggaacacagctccaatcatggaacac

SEQ ID NO: 7907 - DNA, 342 bp, Glycine max
  unsure at all n locations
tctcgaganattcgaatggttataacttttcccacatatgtccgattcggggacataactcatctagacgctcgaaattgaacaacgcaagctctcgagaaattcgaatggtcataacatttcgcacaaatgtccaattctgggacataatatatcaagacgctcgaaattgaatagcggaagctctcgggaaattcaaatggtcataacttttcacatggatgtccgatttgggaaaataatatatcgagatgctccaaattgaacaacgaaagctatcgagaaattcgaatggtccgaacttttcgcacggatgtccgattccgggacataactcatcta

SEQ ID NO: 7908 - DNA, 410 bp, Glycine max
taataaatctatatatggtttaaaacaagcctcccgttagtggaaccttaagtttcatgagataattttttcatttggttttaatgaaaatcccatgaatcaatggatataccacaaggtcaataggagtaaaatatgttttcttgttttatatgtagatgatattttacttgtagccaatgatcagggtttgctatatgaggtgaaacaatttctctctacaaaatttgacatgaaggatatggatgatgcatcttatgtcattggcattaagattcataaaatgatagacctcgaggtattttaggtctatcacaagaaacctatattaacaaaattttagagagatttcggatgaaatattattcaccaagtgttgctcccattgtgaagggtgataggtttaattt

SEQ ID NO: 7909 - DNA, 364 bp, Glycine max
gcttggtccccaacgctttgttcatgctctcccaaaatctagaggtaaacctaggatctctatcagacactatgctagaaggcataccatgtaatctaacaatctcactgatatacagggaggtcaacttttccaaggaaaatttgatattaatgggaataaagtgagcagacttggtcaacctgtcaacaataacccagatagaatcaaaacctttgggggttctaggtagtcctatgacaaaatccatggaaatactgtcccatttccactagggtatctccaagggttgtaacttcccgaaagatctttggtgttctatcttagccttctgacagactaaacatgcatacacaaactcact

SEQ ID NO: 7910 - DNA, 361 bp, Glycine max
tgtaatcgattacacatatactgtaatcgattacttgagcagattttcagaaaatattctcaacagtcacatctttttatgtggttcttaaatggctatcaaaggcctatatatatgtgactggagacacgaatttgctaagagtttttcagaacaaaaaagtcttatcctcttataaagcaaaattgttttatcctcttacaaattccttgtccaaattacttgtgattcaataaggaatttttgagtgctcaaattgttcaatctatctctttcaagagagatttcttcttttcttcttcttcattctgaaaagggattaagagaccgagggtctcttgttgtgaaagaattctaaaca

SEQ ID NO: 7911 - DNA, 377 bp, Glycine max
cgcatgaagctttatatggacgaaagtgtcaaaactcctatttgttggtatgatgatggagaagcagtacttcttggacctgaaatgctacaacagattaactaacaagtgaagttgattcgagggaagataaaagcatctcatgataggcagaagagctattatgattgaaggaggaagccactatattttcaggaaggagaacatgtgtttttgaaggtttctcccgtaaccggagttggaagagctctcaaggctaggaagttgacacccaagtatctaggtccgtatcagattttgaagaagattgggcctatagcttatcatatcgccttacctcccgatttatcgaatttgcatcccgtgtttcatgtctt

SEQ ID NO: 7912 - DNA, 366 bp, Glycine max
tgacatgctattgaacaagcagttatatactctgcttcacaagtagagagtgcaacaacatcctgtttcttagagcaccaggagatgggagcacctccaaacaataaaacatgccccattatgctttttctgtcaagaacatctccaccacagtctgagtctgaataagccacaagttgtggctcaaccttctctttctaatgtggaaatagaacaccaaagtctagtgtgctctcaagtatctcagtatccttttagctaccatcatatgtgaatgtcttggatcactcataaacctactgataactcccacattgaaagtgatttctggtctggaatgacaaatgaatctgagactcccaacaa

SEQ ID NO: 7913 - DNA, 403 bp, Glycine max
ttgagagagaatcgggtatttgaccaaccaacttgttttgatgcagcataagttcagttagttcttttaattcagagagcttatcaggtattggaccttctaatacatttgcatatagagagagcccctgaaggtgagaaagtttggacagttctggaggaatttgacctgaaaacctattttctgaaagggataaagtgacgagttgattcaagtttccaatctctggtggaattggtcctatgaaagaatttgcattcagctgcaggcgtatgagtttagacaggttctggatacctgattttatcaatccactgaagttgttcattgccaaacttagagtgctaagatttgagcagttatagaggtcatctgggatttccccagtcattttgttggatgt

SEQ ID NO: 7914 - DNA, 376 bp, Glycine max
tgtgcatccaataccatgatgaggatgtcccttatgttcttaaaactggactgatccatttgcttccaaagtttcatggctttgcaggtgaagacccacacaagcatctgaaagaattccatattgtctactccaccatgaaaccacaagatgtccaggaggatcacatatttctgaaggtctttcctcattctttagagggagtggcaaaggactggctatattaccttgctccaaggtccatcacgagctgggatgaccttaagagagtattcttagaaaatattttccctgcttccaggaccacgaccatcagaaaggatatttcaggtattagacaactcagtggagagagcctatatgaatactgggagag

SEQ ID NO: 7915 - DNA, 383 bp, Glycine max
ttgtgaagctcctgttttagctttacccgatgtttctcatccatttgaagttgaatgtgatgctagtggagttggcattggggctgttttgatacaaaacaaaaggcctatagcttatttctcggagaaattgggaggagccagattgaactattgcacctatgacaaagagttctatgccattgtgagagctcttgatcattggaatcattatttgcgttctaatcactttatattgcattcagatcatgagtcattgaagtatatcaatgggcagcagaagttgagtccaaggcatgctaaatgggttgaatttcttcaatcttttaatttctcttcataatacaaggatggtaagagtaatgtggtggctgatgcacttt

SEQ ID NO: 7916 - DNA, 364 bp, Glycine max
agcttgaacaaattcaaatgacaattactttttactcgcatgtccgattgagtcccgtaatatatcgagacgctcggaatggaataccgaagctctgagcaaattcaaacgacaataactttttactcggatgtctgattgagtcccgtaatatatcgagacgctcgaaatggaataccgaagctctaagcaaattcaaacgacaataactttttactgggatgtctgattgagtgccgtaatatatcgagacgctcgaaattgaataccgaagctcttaacaaattcaaacgacaataactttttactcggatgtctgattgagtcccgtaatgtatcggaaccctcgaaatgaatgttgagc

SEQ ID NO: 7917 - DNA, 401 bp, Glycine max
tctccactaatctagtgcttgcaacattggtataacttccaccatcaatgattagagaacaaacctttccattcaccaaacatctagaatgaaaaatgttttcattttgtgtatcatctctatctttgcacaagcttcccatgagtctccttaccatcaaaagatatccctcttccggtggaagaaaaccatcatcctccgcttcactagaggaactatgagaactcttagatcactatccacctctccattcttcaacacaatcatgttccttttgttagaatattgggatgaaatatgattatttcccaaacacttaaagcatttaatggaactagttttattggaagggggttgagtagcagaagtaggattacctcttgaagacttccttttaagat

SEQ ID NO: 7918 - DNA, 384 bp, Glycine max
agcttatgtgcaaatatttacaatatacctcctcaacctcagcagcaaaatcaaccacagcagagcaattatgacctctccagcaacagatacaatcctggatggaggaatcaccctaacctcagatggtccagccctcagcaacaacaacagcagcctgctccttccttccaaaatgctgttggcccaagcagaccatacattcctccaccaatccaacaacagcaacaaccccagaaacaaccaacagttgaggcccctccacaaccttccctcgaagaacttgtgaggcaaatgactatgcagaacatgtagtttcaacaagagaccagagcctccattcagagcttaaccaatcagatgggacaattggctacccaattg

SEQ ID NO: 7919 - DNA, 387 bp, Glycine max
  unsure at all n locations
ttagttgttggtgctgatgttagtatgattggaccgtttggtgtggggttctactctacatatcttattgtcgaaaaggtcattgttaccaccaagcacaatgatgatgagcaatacatttgggagtcccaagctagaggttcattgatttttacctgcttccatgtgctactcgtgccaaccatattctctatctccctctacttttccttacctctcacatgattcattataatgttatgaatcttgttatctcaattggattccttgattttcattttaatagtcgagaactaactctgttgtatttgtatagatggatattntgagtatttgtgctttataataactattctttcttcattacacaactctagcatatcctgg

SEQ ID NO: 7920 - DNA, 363 bp, Glycine max
  unsure at all n locations
tcaaacttacaacaaaggagttgagcaggtaaaatagattcgtcttcaaactcttagaggtgactttgagtgtttgtttatggaggagtccgagtcaatttatgattatttttctcgagtattggccgtagtcaatcaacttaaaagaaatggtgaagatgttgatgaggtgaaggttatggaaaaaatacttcgaactttaaatccaagttttgacttcattgttaccaacattgaagaaaacaaggatttaaagaccatgactattgagcaactcatgggttccttacaagcacacgaagaanaacaaaagagaaaaattaaacaaaaggaggctacggagcaactactacaactcaacgt

SEQ ID NO: 7921 - DNA, 309 bp, Glycine max
agcttctgttatgaatttcgagtgtctcgatatactacgggacacaatcggacatccgagtaaaaagttattgacatttgaatttgctcatagcattcgttgtcaattacgagcgtctagatatattaaaggattcattcggacatccgagtaaaaagttattatctttttattttgctcagagcttctgttttcaatttcgagcatctcgatatattacaggactcaatcggatatccgagtcaaaagttattgtcgtttggatatgctacgagctttccgtttcaattacgagcgtctaatatgcta

SEQ ID NO: 7922 - DNA, 377 bp, Glycine max
agctgctaacccatggaagctcctatatatctcccacactttttggggtgggccattcttggatggccttgattttctcagggtccacttggaccccatttctaccaactacaaaacctaagaaaactatattatctacacaaaaggtacacttctctatatttgcatagagggtgtttttcctaaggactgaaagaacttgtctgagatgtcctaagtgatcatctaggctcctactatacactaaaatatcatcaaaataaacaactacaaatctacctatgaaatcccttaagacatgatgcataagcctcataaaggtgcttggtgcattagtgagcccaaaaggcatcactagccattcatacaaaccaaac

SEQ ID NO: 7923 - DNA, 370 bp, Glycine max
agctctggtgggacatcttgacttgctttccaatctgacattcaccacagattctgccttcttctattttcagattgggaatgcctctaacagcacctttgtcaatgattttcttcatgcctcttaagtgcagatgtccaaatctttgatgccatatattgacttcatcttctttggagactagacatgtggaggagtaactggtttcttgaggtgtccataggtaacagttgtcctttgatctgctgcccttcattaagacttcactcttctcatttgtcaccaagcattctgactttgtgaagtttacattgagtccttcatcacacaactgactgatgctgatcaagttcgcagtcagtccctttac

SEQ ID NO: 7924 - DNA, 391 bp, Glycine max
tcatgagagagtcaaagatcaaattgagaggaaaagtaattgcttgctaaacaagccaacaaagggagaaagaaggttgtcttcgaacccggagattgggtttgggtgcacatgagaaaacaaaggtttccggaacaaaggaaatcaaagctttatccaaggggagacggaccatttcaagtgcttgaaagaatcaatgacaatgcttacaaagttgagctgcccggtgagtataatgttagttccaccttcaatgtctctgatttatctctttttgatgcagatggagaatccgatttgaggacaaatccttctcaagagggagagaatgatgaggacatgaccaagagcaagggcaaggatccacttgaaggacttggaggacctatga

SEQ ID NO: 7925 - DNA, 373 bp, Glycine max
  unsure at all n locations
agcttaaaagattggctaagattttgttaaaacataagcacttagacaatgaaggaaagctggagttgctgcacatgatgtccaatgttatgtcaaagaataagatcgggctgcacaatgcacaaggcaagataaagtgtcaaatgaagaattgaagctgcaggattcacgatgtcggatataatgtccaggacatcctgcctgaaaatactggaattgctaaaagcattgaagctgcaggatccacgatgtctgatacaatgtccaggacatcctgcccgaaaatactggagctgctaaaagcattgaagttgcaggatccacgatgtcggatacgatgtccacgacatcttgcccganaatactggacata

SEQ ID NO: 7926 - DNA, 401 bp, Glycine max
tatgcgaaatacttggaaaattaaactcttatctttacaataatttattttcacctcaaccaataatgtttttgttatattgatgagaccacttataataagtataaatatataattaattatggaaatgagtactatggttattaacgaaatatgaagtaataggattacatattaaaatttaattatgtttttgttatattgattatgcattaattatactatttattaaacataataaatatttaagttttaaagatttatgaaagtttacctctttattattgcatatcatgaatatgagatatgtacgcattaaatgtatgacagagatacatgttaaaaaatctaatatttgatagagttatattatatttattaatggaataaatatcacattc

SEQ ID NO: 7927 - DNA, 404 bp, Glycine max
  unsure at all n locations
ntagccaaactgtaaaacttggcaataacactagaatggctgttgtgggaaaaggtatcattcatatgcaagtgaatggatttacttaggaaattgcaggtgtctattatgttcttgaacttaagaataatctattgagcatagggcaacttcaagaaaaaggcttgactattttgattcaacatgggaagtgtagggtatatcaccctgagaaaggattaattatgcagacatatatgagtggaaatagaatgttttctttgttggctaccatgataccaaaatctttttcatgtttccaaattgtatcagaaaatgaatctcatctttggcattgtcggtttggtcacttaggctacaatggattgaggacactttttgataagaagatggtaaatgggctg

SEQ ID NO: 7928 - DNA, 331 bp, Glycine max
tgcaagcttgtaatctattacacatatactgttatcgattaccagagcagattttcagaaaatattctcaacagtcacatctttttatgtgggtcttgaatggctatcaaaggcctatatatatgtgacttgagacacgaatttgctaagagtttttcagaacaaaaaggtcttattctcttataaagaaaaatcgttttatcctcttacaaattccttggccaaattacttgtgattcaataaagaattatttgagtgctcaaattgttcaatctatctctttcaagagagaaatcttcttctcttcttcttcattctgaaaagggatta

SEQ ID NO: 7929 - DNA, 382 bp, Glycine max
tctattttcaatttcaagcgtctcgatatattactttacttaatcggacatccgtgttaaaagttattgtggtttacaattgctatgagcttctgttttcaatttcaagcatctcgatatattacgggttttatttagacatccgagttaaaagttattgtcgttggaatttgctcagagcttttagattcaattttcagcgtctcgatatattacgggacttaatcggacatccgaggtaatagttattgtggtttgcaattgctatgagcttctgttttcaatttcgagaatctcgatatattacgggattcattcagccatctgagtaaaaagtaattggtcgttgaatttcctcagagcttctattttaaattcgagc

SEQ ID NO: 7930 - DNA, 365 bp, Glycine max
  unsure at all n locations
gcttcaacatcagaccacttccagtttgctggaactactccacatggatttgatggggcctatgcaggttgaaagccttggaggaaagaggtatgcctatgttgttgtggatgatttctccagatttacctgngtcaactttatcagagagaaatcagaaacctttgaagtattcaaagagttgagtctaagacttcaaagagaaaaagactgtgtcatcaagagaatcaggagtgaccatggcagagaatttgaaaacagcaggttcactgaattctgcacatctgaaggcatcactcatgagttctctgcagccattacaccacaacagaatgggatagttgagaggaaaaacangactttgc

SEQ ID NO: 7931 - DNA, 392 bp, Glycine max
taagaggtatggcagtgctaagggatgtttcccttgataggataaggtagaaagattgtttaagaaggagtgctattttaatatcaccttttcttgcaaaatgattttccttcttaacaatcttcttggaggaatccttttcctccttttccttccccttggactttgaagacaaggccttactatccttctttttcttttgtttttctagtttttcttcctcatccctcttatctttcatagttagttgatctttggccacctgtgaaggtgtttgaggatgcaacacaaatttagtgccaagatgggtgagggtaatctcattagttaggccattgtaaatgatcttcctatcaaattgccaccgtcttcctaaaagaatatgtcctacc

SEQ ID NO: 7932 - DNA, 351 bp, Glycine max
agcttgtatcttttcccattattaataagacgagttcttttcctttttctcttgttcatactgatgtatggggtcctgctaatgtccttaatatctcatgtgctaaatggtttttaaccttcatagatgattgtactcgagcaacttatgtcttcttattaaaataaaaatctgaagtcagctttgtttttattcactttgtgtcaatgattaaaaaccaatttggagtcaatattaagagaattaggtttgacaatgccagggactactttaattttgtgctaaaatctttttgtcaaaaggaaagaataatccatgagtctttaagtgttaacacacaccaaacaaaat

SEQ ID NO: 7933 - DNA, 345 bp, Glycine max
ttggctcagagcttcaacatttcaatttcgaccgtctcgatatgttaagggactcaatcagacatccgagtaaaaagttatggtcctttgtattggctcagagcttcaacattcaatttcgagcgtctcgatatgttacgggactcaatcagacatccgagaaaaaagttatcgtcgtttgagttggctcagagcttcaacattcaatttcgagcgtctcgatatgttacgggactcaatcagacatccgagtaaaaagttatggtcctttgtattggctcagagcttcaacattcaatttcgagcgtctcgatatgttacgggactcaatcagacatccgagaa

SEQ ID NO: 7934 - DNA, 394 bp, Glycine max
agcttcagtggcttagtgaagatgaagatgttaaagtgactcaacaggttgaggtgtgtctcaccattgggagatataatgacaaggtgctgtgtgatgtggtcccaatggaagcgacccatgtgctgttaggaagatcgtggcagtatgataccaaggcagtgcatgatggcttcaccaacaacatctctttcaagcaagctgacaagaagattgttctcaaaccgttatctcctcaagaggtttgtgaggatcagataaaaatgagagaaaagaaaaagagtgagacacttgagaggaaaaagagtgagacacttgagaaggaaaagtgaggaaagaaaaagagtgaaacactcgagagggaaaagagagaaaacaaaaagagtgaaacact

SEQ ID NO: 7935 - DNA, 435 bp, Glycine max
  unsure at all n locations
cgacaatacttttctcgaggttcttatattccttaatatatcgagacactcccaattgaaattggaagctcggatcaaattcaaacgacattaacttttgacttggatgtccgattgagtcccgtaatatatcgcgacgctccaaattgaaaacagaagctctaagacaattcaaacgacaataactttttattcggatgtccgattgagtcccgtaatatatcgagacgctccaaattgaaaacggaagctcgtatcaaattcaaacgacaataacttttttctcggatgtccgatagagtcccgtaatatatcgcgacgctccaaattgaaattggaacctcgtatcaaattcaaacgacaataacttttaactcggatgtccgattgagtcccgtaatatatcgagacgctccaanatgaaaacggaagctc

SEQ ID NO: 7936 - DNA, 357 bp, Glycine max
  unsure at all n locations
ctatngggcatccgagtaaaaagttattgtcgtttgaatttgatacgagcttccaatttcaatttggagcgtcgcgatatattacgggactctattggagatccgagaaaaaagttattgtcgtttgaatttgatacgagcttncgttttcaatttggagcatctcgatatattacgggactaaatcagacattcgagttaaaagttattacggcttgaatttgctacgagcattcgttgtcaattttgagcgtctcgatatattatgggactcaatcggacatccgagataaaagttaatgtcgctttaatttgatacgaacttccattttacaattggagcgctctcgaatatta

SEQ ID NO: 7937 - DNA, 433 bp, Glycine max
  unsure at all n locations
caattcttggtggtgaagctccttcnttcntgtttattccctagaggatggtgcctcccctctccccttctcctttgccttccgctgcatctccatggtgaaaaatcaccattgaaggacctcattgaagctcanagatccagcctccatagaagctccactagcaagcttccatcaattatcatcacaacatattcagaaaaccaaaaccccacaatctgatgtaagctccattggagcttgtacgcctaggatcttcttcatcaatggattcctttgctccttggaagatgaatggcagcggaatggagaacgaagagagagaggagacgccacttcaacgagaagatgagtttagaacaagcttaccaccataggaggccatggataaaagcttggaggaagaacgagatgaatgaacggagacggagag

SEQ ID NO: 7938 - DNA, 413 bp, Glycine max
  unsure at all n locations
ctttcctctgnatgctctgatagggtttccatgtattatatagaatgagaanggattgaagcctccattccactatctacgtgcgatgagtatttctcccgccacagacattattttgcaaatcccaacagtgaagatgtgcgaaatgaattgcaaaccacatatcaaaatttcatgacaatctaacggttaacgaatctgggatcatagttttacggagacagttttggatttttacgggaaaaaaagctacgatacaaaagatatttctctcaactccaacatgttttcataattcccaatggtgagaatattcagaaatgagttctgaacctggtgctcaaatttcacgatgatctaacggtgaatgagtctgagagggttttggtggtatgcgggaaaagagatcgtca

SEQ ID NO: 7939 - DNA, 392 bp, Glycine max
  unsure at all n locations
attccatttcgagcgacncgagatattactagtttcaatcggacatccgagtaaaaatttattgtcgtttgaatttgatcagagcttcaacattcaatttcgagcatctcgatatattacgggactcaatcagacatccgagtaaaaagttattgtcgttcgaatttgctcagagcttctacattcaatttcgagcgttccgatatattacgggactcaatcggacatccgagtaaaaagttattgtcgtttgaatatgctcagagcttcggtattccagttcgagcgtctcgatatattacgggactcaatcagacatccgagtaacaagttattgtcgcttgaatttgctcacagcttccgtattccatctcgagcgtctcgatatatta

SEQ ID NO: 7940 - DNA, 373 bp, Glycine max
  unsure at all n locations
agctntgagcaaatncaaacgtatttnattttttttgtcggangncngancgacccccgcaatatatcaagatgctcgaaatggaataccgaaaccctgagcaaatccaaactacaataactttttactccgatgtctgatagagtcccgtaatatatcgagatgctcgaaatggaataccgaagctctgagcaaattcaaacaacaataactttttactcggatgtccgattgagtcccgtaatatatcgaaacgcttgaaattgaatgctgtagctctgagcaaattcaaacgacattaactatttactcggatggccgactgagtccggcaatatatcgagacgctcgaaatggaataccgaatctctga

SEQ ID NO: 7941 - DNA, 404 bp, Glycine max
  unsure at all n locations
agctttnggaggctgtgttcattttttcttgctctgatagcgcnngggaaagaacagtacaggtggttccttaaaaaggcggaatgacagtggtacgaaatgagatgaatgacttgataccaacactaactgccactggttggtggatgtgtatcgactatcgcacgttgaatgaagccacacataatgaccatttccccttaccttttatggatcacatgctggaaaggcttgcagggcacgcatactactgcttntggatggatattcatgatacaaccatatcgcggtataccccacagatcaggagaagacggcctttacatgcccctntcgcgtctttgcttacataaagatcgcattcgggttatgtatcccactaccttcttcagaggtgcatgcta

SEQ ID NO: 7942 - DNA, 450 bp, Glycine max
tccataaaagccaaactaagcaataaagtactctcgtatttttccctctgcctccggttgtcgggcaatcccttctacagcttgccctgcagcagtgccttgaccaaccccaggtccaatagaagcaagccctacggccaacccagcagcaataacagaagcagcagaaataattggattcatgataatttcctcgtaacctaaatataaaataaagaaatagttaatgatataatcaaccaataaattatgacttaatttttcaattatcaagatttattcggtttaaagtaattaataagaattccgaattgaaaataataatagttattgaactctacgaattacttcgagatttattttttcgtctctacctacatacatagcttttttttgtgaatatgtagaacctctggtcttatcctaccttcaatttggaatcattctttg

SEQ ID NO: 7943 - DNA, 387 bp, Glycine max
  unsure at all n locations
tgcatgcacaaagtgccagtggaggacgacagtatctnnggttcatattgtccagagaagcggccagcaagactaacccacataccttattggctgacaaattctcaagttggaggttatggaaaacctgcccctgaagatcttactgctgattatggacactggaaacgtatagtgtccaagtcttcatttaatgggataagaattaattggtccaatatgccgaatgtcatggatatgagatcactctatggagggtgagtgaaatctgttcgttcccatgttactctgaattatattaaccggccattttgacatacttcactagctctttcggctacaggttngctgctgtcttgatagattagaatatttgggtcatgaatg

SEQ ID NO: 7944 - DNA, 327 bp, Glycine max
agcttcgaagcgcggggctgtcttcgttattggactcatcagcatcatgttcgtttctgcgcgcatcaacaaagccttgttcggtgtctaaccatctccggcgaatttcacggcgacgcccttgccgaggatcccgcggtcgaagttgcggtacacgtggacgccggtgtcgttcaccataaaactattatccagagcgcctacggttagggtttggaccccgccattcgcgggctcttcgaattcctccattaaatcgtttctccgccgcgacggcgacggcgaaggagacggttctccggagactgcgttctcccacacagaatc

SEQ ID NO: 7945 - DNA, 428 bp, Glycine max
  unsure at all n locations
ctacttcacatggatttgatgttgcctatgcaagttgaaagccttggaggaaagaggtatgcctatgttgttgtggatgatttctccagatttacctgngtaaactttatcagagagaaatcagaaacctttgaagtattcaaagagttgagtctaagacttcaaagagagaaagactgtgtcatcaagagaatcaggagtgaccatggcagagaatttgaaaacagcaggttcactgaattctgcacatctgaaggcatcactcatgagttctctgcagccattacaccacaacagaatgggatagttgagaggaaaaacaggaccttgcaagaggctgctcgggtcatgcttcatgccaaagaacttccctataatctctgggctgaagccatgaacacagcatgctacatccacaacagagtcac

SEQ ID NO: 7946 - DNA, 232 bp, Glycine max
  unsure at all n locations
gcctgaatcggacctccgaagaaaaatatgaccatttgactttttaagcttcgttgtgaatttcgagctcctcgatatctgacgtgcctgaatccgacattcgagtgaacagtcgggacaacttccatttctccagagcttccgctgttcaattctgagcgtctcgatatgtgatgctcctgaatcggaccctcctgtgataacttatgaccattngaattgctctagatct

SEQ ID NO: 7947 - DNA, 419 bp, Glycine max
  unsure at all n locations
agcttagtgaattatttatacaatctaattgtcttatctggaccaatcccagcttccataggctacttggtccatttggactccttgttccttgatagaaatgaactctctgggtccattcctttcatcattggaaatttgtcaaagcttagtgaattatttatatactctaatgaactcactggatcaattccttccactattggaaatttatcaaatggcagggcattactattttttggaaatcaacttggtggcaagattccaatagaaatgaacatgcttactgctctggaaaatttgcagctagctgacaataattntataggccatttacctcaaaacatctgcattggtggaacgttgaaatatntttccgctgaaaataacaacttcataggcccaattccagtgagttg

SEQ ID NO: 7948 - DNA, 408 bp, Glycine max
  unsure at all n locations
tgtagagatcctcattgtgctaatccgtaagtttgacttccccangcagnttaaagacttcagacctatcaatttatgtactatgcatcataaactgatttccaaggttcttgtccaccattttcgcccttctttagaagagatcataagccttcttcaacgaagtttcatgccttggaagggaacctttgataatgccattgtagctcaagaggttgttcattacatgcatcattagaaagctaagaaggggatcatggcttttcaaattggcctagaaaaggcctatgacatggttagataggatttcttggagatgtctctcatcatattcaacttctcgtgaatcattattgacctgatcatatggggtattcgatatacttctttgtcccgtatgtggaatgg

SEQ ID NO: 7949 - DNA, 443 bp, Glycine max
  unsure at all n locations
agaaactcacgctngcgctgagctcttttgaccctagaagaactcttgaaattttttcttcancgaancccatatatttcttgtcttgtccctcttgaggatcgcntcaaggacttcacgatctattgtttggaaaaggtaattatttacctttaagtccttcaacttctgctcctcgatcaatatgcattgcgtctccgtaggctctattccatctgccaccatcaatatcccattctcaatgagatcctaatattctttggagcggagaaaattctccatcaacattgcccaatgatcataatgaccattaaaccttggaattgcacgctgcacgaaactgctactcccaccttctgccattcttctcaactcgttctactcgaaagaaagaaaaactgcagtttctttcttgactcacactcactgtttttctcacatgc

SEQ ID NO: 7950 - DNA, 423 bp, Glycine max
  unsure at all n locations
tgtagagatcctcattgggctaattcgtaagcttgattctccaggcagnttaaagacttcagacctatcaatttatgtactatgcatcataaactgatttccaaggttcttgtccaccattttcgcccttctttagaagagatcataagccttcttcaacgaagtttcatgccttggaagggaacctttgataatgccattgtagctcaagaggttgttcattacatgcatcattagaaagctaagaaggggatcatggcttttcaaattggcctagaaaaggcctatgacatggttagataggatttcttggagatgtctctcatcatattcaacttctcgtgaatcattattgacctgatcatatggngtattcgatatacttctttgtccgttatgtggaaatggtcgcgtttgagtagc

SEQ ID NO: 7951 - DNA, 424 bp, Glycine max
agcttttcatagtagaacgtgggtaactgattctacctattattgtgatcatctccctctccgtcatgggcggtacaacttgggctgcaagatctctccatctctgggcatattccttaatggactcatgctctcgtttagtcataccctgaagctggttccgatcgggagccatgtccgtattgtactggtactgcctaatgaaggcagttgccaactccttccatgatcggatctgggaagcttccagattggtataacacgctacagctgccccggccaagctatcttgaaagaaatggaccaacaacttttcgtctgcagaatacgcccccatctttcggcaatacatccggagatgcccctttggacatgtcatccctttgtacttatcaaagtctggtactttgaacttgggagggat

SEQ ID NO: 7952 - DNA, 422 bp, Glycine max
  unsure at all n locations
tgaccctcaatctttcaatgattatagatccatcttccttatatggtgtgtctataaaatcgtggctaaagttctggccaagaggctggcccttgtgttacctcatcttatagatgaaagacaaacggattttatgaaggggaggcacattcttcatggtgttttgattgccaatgaggttatagctgaggctaaggctagaaataaaccttgcatggtcttcaaagaggattttgaaaaggcgtatgattcggtttcttgtggttttcttgactacatgttgatgaggatgggcttttgtgaaagatggaggaaatggattaatggtttcctgtccactgcaaccatatccattttaattaatggaagtctgtttttggagatgccactcaacataatgttagaaccttanaatgtatttg

SEQ ID NO: 7953 - DNA, 411 bp, Glycine max
  unsure at all n locations
agcttagccctagaggggatttttttttatgttttggagaggatcaataacaatgcctataggttggacctcccagaagagtatggagtcagcaccacttttaacatttctgatttaactccttttgcaggtggagctgatattgaggaggaggaactaacagatttgaggtcaaatcctcttcaaggggaaggggatgatgcaatcctccctaggaagggaccaatcacaagaaccatgagcaagaggctccaagaagattgtgctagagctgctgaagaaggccctagggttctcatgaaccttanggtagatttctgagcccatgggccaaggttgggtccaattatctttgtacatattagactaggatgtcattatatttggtccttgtatatagggctccatatt

SEQ ID NO: 7954 - DNA, 403 bp, Glycine max
agcttcacaagtagaatcagaaacttgtcttccatgtgtctttatcagaaaaggttcacgaccctttagaaatgtggcggtacataatctaaaaatctccagaaggattgtctgtgatctatgaaattagaatatcaattcagttttgcttgataaggctagaacacatattgctattaacctattaaatattaaataatttttttcctaattttattgttataattttaatggttacaattaatatgtaacttgattacgtaattagtaacttggaattcatttagttggttaagtcattatataaacaataagaactattggtccaaaataatttattagatgaattgtgtataatttagatgtagttcaaataacgctcatttttggctcttgacttggg

SEQ ID NO: 7955 - DNA, 453 bp, Glycine max
  unsure at all n locations
ttgcagtacctgatcgtcctcgagagattcggatggaattagcttattttttacagcagctttgtcagtcaaggtctggaatgtatcttatttgttattgttatttttacctggattctgtattttgaaaataaagcatagaattgattgttattacttgatgcagttctttgacattacaaatgtttatagcttgccgcggaatacctgttttagtgggatttcttgaagctgattatgccaagtacaggttagttgttgtttgtgaattgtgcttaatacagaagtactaacattttcactagatagtttgcaatgcaatgccaatatttgaacttctctggccctgttctacctaaaaatttcagaacattataaacatgtgctttcaccctgcttgaggcctganggcctttgtgtgagggtctttcttacatgtaaaatccattccct

SEQ ID NO: 7956 - DNA, 331 bp, Glycine max
tggaaaagatcaactcctcccatgtgccatgggacgctcgactaaattaattgctgacatgttatcaatcaacaaccggataggactacaatcccgtaagtccagttcttccattaaagctctcacacatagagcgtgacaagctgccatagcagcaacagtatattatgctctacatgttgacgaaacaactacactctgcttctttgagcaccaacagattaatgttgctccaaatttgaaaacatatccagcagtgcttatactatcatccttatcactacaccaatctgaatcattataaccaaacacttcttctgtatattcttac

SEQ ID NO: 7957 - DNA, 407 bp, Glycine max
  unsure at all n locations
gtgcatccaataccctgatgaggagggccttttgtncttattactggacnganacattcgcttncaaagtttcatggccttgcacgcgaacacccgcacaaacatttgaaagaatttcacattgtctgctccaccatgaaacccccacatgtccaagaggatcacatatttatgaaggcttcttctcattcattacacggagcggcatacgactggttgtattaccttgctccaaggtccatcacgagctgggatgaccttaagagagtattcttagaaaaaattttccctgtttccaggaccacagccatcaggacggatatcttaggtattagacaactcagtggagagagcctgtatgagtactgggagagatttaacagactatgtgccagcttgccccacca

SEQ ID NO: 7958 - DNA, 359 bp, Glycine max
agcttatgactcggatcttggtttcttattctatatgacgatgaggatgggattttgtgaaagatggagaaaatggatctatggatgtctatctagcgcaactatatcaatcctaatcaatggcagccctactagagagtttgtgcctgagaggggactaatgcagggagacccccttgcacctttcctattagacataatagctgagggccttactggtttgatgaggacaactgtctctaaaaacatcttcagccgttatcaagtggggaggcaaaaggaagagattaatatactgcaatatgcagatgataccattgtgctttggaactgcgactacaactaatggtagagtcatg

SEQ ID NO: 7959 - DNA, 423 bp, Glycine max
  unsure at all n locations
agcttgtgacatgaggccattaagtgcctctgccactatgttatatagaagaggngatagagggtctccttgccttagtcctttctgaggtaggaactcagctgagggactaccattcaccaaaaatgaaacagatgctgattttagacacccctcaatccattgaattcatttgctgcaaaagcccatcctacccatcatataagtgagaaactcccaagacacaaaatcatatgccttttcataatcaaccttgaagacaatgcaaggcttttggcatcttttggcctcttcaactacctcatttgtagtcaccacgctgtgtagcatatgtcttccttctataaatgctgattgcctctcatgaataataaaaggcatgaccttcttcaatctattggccaatattttagccactatctt

SEQ ID NO: 7960 - DNA, 426 bp, Glycine max
  unsure at all n locations
actcaagctganggnaaagtctcacgacgcacgtgttcatgtttttttgccagcngcggctatacgagacatcttgccaaacaaagtcaggttcacgataactcgtctgtgctttttcttccatgctatatgtagcaaagtgattgatccacgaatgttngatgagttggaaaatgacgccgcaattatactgcgccacttggagatgaattttccccctgctttctttgacatcatgattcacttgattgtgcatctggtcagagaaatcaaatgctgtggtcctgtttatctaccatggatgtacccggctgagcgatacatgaagatcttaaaagggtatacaaagaatctatatcgttcggaagcactattgttgactgtacattgcgtaaaagccattgaattttgttcatactacttaca

SEQ ID NO: 7961 - DNA, 241 bp, Glycine max
  unsure at all n locations
agcttatgctcaataggggatctttanctagctatactaggcccttgccgctagtgttaggccatagatggccttttttagaagataaactttatcttcttcactttgcttcatgaatccttctggttgctctacatatatttcttcttgtagctctctgtttaaaaaagctgatttaacatttgtggaagccatgccttcccagattattttgatgatggccaagaatcaagagtctagc

SEQ ID NO: 7962 - DNA, 435 bp, Glycine max
  unsure at all n locations
tattcctgaaactntagttcttanaataactgtgttggatgacgtcgcgngatctatgtagccgatctcacctagtgggataaaagcttagttggtgtttcaattatcatattcagttcttatttgacgacttctcatttttatgcctttggtattcaattntattccatgtgcctaaccaaagtatcttggtatgtatttaaattttgttttcagggcaagggtcctctattatctgtggaggcactgcatcaccttcatacatttatttttgtcctagctgtggcccatgtcacatcttgtgttctcactgttgttcttggagggctaaaagtgagtgcataatatgctntattataagatgtgcttgatgaaacgctcttttttgagtcctaataattaactctgattaacagatacctgagtggaaacact

SEQ ID NO: 7963 - DNA, 449 bp, Glycine max
ggtaggccttggatcttcttcatattggagtcttttgtcttttgaagatcaatgacaacataatggagaaggaagaaagatgattggagaagccacttcaaggagaagatgagtcaagaagaagctcaccaccataggaaaccatggataagagcttgaaggtagaagaagatgagtggagggagagaaagagcacgaatttttgtacttaaatgaggtatgaaatttgaagtgtaattctcaaatgatcaaagttgaaaaaaatgcacacacatgacctctatttatagcctaagtgtcacacaaaattggagggaaatttgaatttctattcgtatttcacttgaatttgaaattgaatttgtggagtcaaactatggagccaaaatttcactaattatgattagtgaatcttagaatatggttagcccactaatccaagatcaatt

SEQ ID NO: 7964 - DNA, 381 bp, Glycine max
agcttctacaagctggtttcatttatcctttcttcgacagccaaagggtgagtcccgtccaggtagtttcgaagaaaaccagcctcaccgtgatcaagaatgaaaaggatgagcttatccccacaagagtgcagaacaactggcaagtctgcattgattataggaggatgaactaggtaatcataaaagatcattttcccatgccattcattgatcaaatgcttgatcgcttggcaggtaaatatcattattgttttcttgatggatttttttggttatttataaattcatattgctcctgaggatcaagaaaaaaccaaattcacctgttcctttggcacttttgcctataggagaatgccctttggtctatgcaacgcc

SEQ ID NO: 7965 - DNA, 360 bp, Glycine max
  unsure at all n locations
tagactaagttcagcctaccaccctcagactgttgaccaaactgaacggaccattcagtcactggaggaccttttgagggcatgtgtcttagagcaaaaggggagttgggagagttttctgtcgttgatagagttcacttataacaatagtttccactataccattggcaaggctccctatgaagctttgtatggtagaaggtgtataacacccttatgatggttagagcccggagaaaacctcaccttaggatctaaagtggtacaacaaaccaccgagaaggtaaagttgatctaagaaaggatgaggactgcacagagtangcaataaagttatcagtataagaggagaaaagacct

SEQ ID NO: 7966 - DNA, 371 bp, Glycine max
taccccagtatctagctggaacttcgacgatttatgccgtggaagaatgcttaaccaatcgcgatcaagttttcgctagtttagcaagaaaattgaacaaggcttaacaacgaatgaaggaactcgcagatcagaagcgtcgcgaagtgagttttgaagttggagacatactgctggtcaagttacgtcctcgacggcagataacagctaccaacagttgctactcgaagttggcaaagcgaatttatggtccctttcaagtgacccaatgtatatgcgaagttgcttataagctagacttaccagcaacctcgaagattcacccagtattccattgctccttattaaagccatttcgtttagacacgaca

SEQ ID NO: 7967 - DNA, 370 bp, Glycine max
tgtacggttaacgtctcacgattgtcacgcgtttatgcaacaattgttagccgtggctatactagacatcttgccaaacaaagtcaggttaaccataactgacccgtgttattattccatgccatatctagcaaagtcattgatcttatcaagtttgatgagctgaaaaatgaggccgcaattatactgtgccagttggagatgtatatcccccctgctatgtttgacatcatgattcacttgattgtgcatctggtcagagaaatcaaatgttgtggtcctgtttatttgcaatggatgtacccggatgggcgatacatgaagatcttaaaagagtatacaaagaatctatatcatccataagcatcta

SEQ ID NO: 7968 - DNA, 330 bp, Glycine max
agcttggtgacttggtgacttggtgaatatttgattatttgcatcaggtcaggtacctagattcttatctcagatggagtgatctgattcgtcctgagcagaacatccaggatgggaaaggtcaagagactgaagcttctgctttcagaaatgcagatatttgtgacaataaacttgtataggggaaaagttgttatggaatagcttttgggagccaaaaacatcttccttctcgggtgatgaaaaatgttgttcaagtggagcaagatccagaaggaaaggaaaagtattggttttttgaaacacgtattccattatatttgataaaag

SEQ ID NO: 7969 - DNA, 349 bp, Glycine max
tataatatatcgatacgctcgaaatttaacatcggaaactctcacgaaattcaaatagtcataacttttcacacggatgtccgattcgggcgcataatatgtcgagaaggtcgaaattgaacaacggaagatcttgagaaattcaaatggtcataacttttctcacggatgtccgactcacgcttataatatatcgagacgctcgaaattaaacatcggaaactctcgagaaattcaaatggtcagaacttttcacacggatgtccgatacgggcgcataatatgtcgagaggctcgaaattgaacaacggaagctcttgagatattcaaatggtcataacttttcaca

SEQ ID NO: 7970 - DNA, 291 bp, Glycine max
tgctttcaagaaattcaaatggtcataacttttcagatgaaagtccgattcagccgcataatatatctagacgcttgaaattgaacgcccgatgatgatgacaaatttaaatggtcataacttatcacgcggatgtctgattcacgccaattatatatcgagatgctcgaaattgaacaatggagctctcgagaacattcaatggtcataacttttcaattggatgttcgattcaggcgcatcacatatcgaggctctcgaaatcgaacaacgaaagctcttgagaaattc

SEQ ID NO: 7971 - DNA, 343 bp, Glycine max
agctttgcttctacacttaggtgttataaggcatgcaaagcatgtaagacatacacaaagtatgactatatgatgtgacaatggggtgtcacaagcaaatgctcacctgcccctctaaaatttaatgggattgggcttatcccaattcaatcaaatttatttcccaacacacatcaaatattcacttaatgcatgtgaaattacaaaattacccctaatacaaaaagtagtctatgtgccctaaaatacaagggctgaaaaatcctacatttctagaataccctacctacattatggagccctaaatacaaagcccaaaaagtgtagaaatcttaatctaatg

SEQ ID NO: 7972 - DNA, 366 bp, Glycine max
tattataaaagacccaacaacatcggtttttatataaaaccgatgttgttcacgcaatccacaatatcggtttttaaaaactgatgctaattatgaactaataacatcgcttttttttttggaaaatcaatattaactattaattaacaacatcaatttttgaaaaatcgatgttaacattatgctagcaatattgattttcgaaaaccgatgttaaagatattcttttatttagggaaatgtcactgcaaatagtttaacatccattttttcttgtaaccaatgttaaactaactatgttgaatgtactagtgataccaagtgcattgataaattgtccccattctttaccaagaaatcaaagtg

SEQ ID NO: 7973 - DNA, 340 bp, Glycine max
  unsure at all n locations
agcttgtaggcctatgatctttttcatcaatggattcatttacttcttggatgatgaatgacagcgaaatggagaaaggaaaagagagaggagacgccacttcaaggagaagatgagtctaaaagaagctcaccaccataggaggccatggataagagcttggangaagaaagagatgaatgaatggagtgggagagaagagcacgaaattttgtgctctaaatgagctttgaaatctgaagtttaatactcaaatgatcaaagtttgaaaaaatgcacacacatgacctctatttatagcctaagtgtcacaaaaatgggagggaaatttgaaatttca

SEQ ID NO: 7974 - DNA, 363 bp, Glycine max
tctacttttcttctccttagtctcctcttcagtcttcccagtcatgtgttagacaagtggcctcagatatcttaagaaggggggggttgaattaagatattcgatactttttcttctaattaaaaatctatcttactttttacttaagttatgaattcccttaatgacaatcttcttaaatattaattcaaatgaagcaacttgaatatgaatataaagcaataataaataaaggagattaagggaagagaaaatgcaaactcagttttatactggttcggccacacccttgtgcctacgtccagtccccaagcaacccgcttgagagttccactaacttgtaaattccttttacaagttcta

SEQ ID NO: 7975 - DNA, 285 bp, Glycine max
agcttcaaggatggatgaacctcgatatcacgcatgaatattctatcttcaatatctagattgctcacatccacaacaatttttgaaggaatgtgctcagatggacagaaaaattttagactaggtctgatcttattcaaaattcctcctgcaatggcataaaagtttcaaccatattagcattagaacagaacattagaaccacaaaaaaattccccatgatattatattaaattgaatttgcaacatttggcacccgccccccctccaaaaataatgatattc

SEQ ID NO: 7976 - DNA, 340 bp, Glycine max
agcttctaaactttgtacaagaatgaagctctgataccacttgttagacaagtggcctcagatatcttaagaagggggggttgaattaagatattccaaactgtttcccctaattaaaaatctatttcactttttactcaagttatgaattcccttaatgacaatcttcttaaatattaattcaaatgaagcaacttgaatatgaatataaagcaattataaataaaggagattaaggaaagagaaaatgaaaactcagttttatactggttcggccacacccttgtgcctacgtccagtccccaagcaacccgcttgagaagtccactatcttgtaaat

SEQ ID NO: 7977 - DNA, 374 bp, Glycine max
tgtccaaaagggaagcaagttaaaaactctttttatagtaaaagcgctgtttctacttcaaaaccctttgaactacttcacatagacttatttggtgcctctagaactatgagtttgggtggtaattactatggcttagttatagtagatgattactcaagattcacatggactttgtttttgaaaaccaaagatgaagcttttgatggtttttgcaaacttgccaaggtcattcaaaatgaaaaaaggtcttaacattgtttcacttataagttatcatggaggtgaatttcaaaatgagtctcttgaaatgttttgtgaagaagatggaattcaccacaacttttttaccctaagaacacctcaacagaatg

SEQ ID NO: 7978 - DNA, 360 bp, Glycine max
tagactaagttcagcctaccaccctcagactgattaccttactgaacggaccattcagtcactggaggaccttttgagggcatgtgtcttagagcaaaaggggagttgggagagttttctgtcattgatagagttcacttataacaatagtttccactataccattggcaaggctccctatgaagctttgtatggtagaaggtgtagaacacccttatgatggttagagcccggggaagacctcaccttatgatctaaagtggtacaacaaaccaccgagaaggtaaagttgatctaggaaaggatgaggactgcacagagtatgcaaaaaagttatcagtgtaagacgagaaaagacct

SEQ ID NO: 7979 - DNA, 339 bp, Glycine max
agcttttaactcggatgtccgattgagtcccttaatatgtcgagatgctccaaattgaaaacggaagctcgtagcaaatgcaaactgcaataacttttaactcggatgtccgattgagtcgcatgatatatcgagacgctccaaattgaaaacggaagtaacaaattcaaacgacaataactttgtacttggatatccgattgagtcccgtaatatatcgagacgctcgaaattgataacagaagctctgagcaaattcaaacgataattactttattctcggatgtccgattgagtcccgtaatatatcgtgacgctccaaatctaaaatagaatttt

SEQ ID NO: 7980 - DNA, 358 bp, Glycine max
tgtccctgtgcctcctcctgagatattgggggtggtctattttaatgataacatcctcaccagatactcgtgtgccctatttcataataataatgtctggttaaaactcttggggacagacaacgaaaaagcataaattcaaatatgcttactggaggggcaagaccatcatcatccagcttatcataagaaccatgtctcattccctgaaaaatgaaacttggtaagagaccaccaacaccaaaccaatattcttttccaaataaaaattgcaatgcatgaatagttgcttgctaccaaagccaaaattctcaccatggtgttagctctatctggacggccaaaatcttctttcact

SEQ ID NO: 7981 - DNA, 367 bp, Glycine max
tgtacctcacttggggcaattcagtttggtactcaggtgcattgccttgttgtcaaatgtgggtttggctgtgaactgtttgtgggtagtaatttgactgatatgtattcaaagtgcggggagttgtctgatgcatgtaaagcttttgaggaaatgccttgtaaggatgcagtgttgtggacgtcaatgattgatggctttgtgaaaaatggagattttaagaaagctttaacggcttatatgaaaatggtcactgatgatgtttttattgatcagcatgtgctttgtagtactttgagtgcttgcagtgcacttaaagcttctagttttgggaagtcccttcatgcaaccattttgaagcttggat

SEQ ID NO: 7982 - DNA, 359 bp, Glycine max
agcttgcatcctgaagacaaacttctatgatatatagacttgttgcttatgagtacatggctaatggttcattggataaatggatattcaacaagaacaaagaggaatttcagttggattgggatacaaggtataacatagcacttggaatagcaaaaggacttgcttatctacatgaagattgtgactcaaacattattcattgtgacattaaaccagaaaacgtgctcctagatgataatttcagggttaaggtttctaattttggtttggctaagctcatgaaacgtgaacaaagacatgttttcacaacacttagaggcactagagggtatcttgcacctgagtggatcacaaac

SEQ ID NO: 7983 - DNA, 364 bp, Glycine max
tgcataaaagccagactaaacaataaaggaccttttattttccctctgcctgccgaagtcgggcaatcccttctacagcttgccctgcaacagtgccttgaccaaccccaagtccaatagaagcaagccctacagtcaacccatcatcaataacagaaccagaagaaataaatggattcatgataatttactcgtaacctaaatataaaataaagaaatagttaatgatataatcacccaataaaatatgacctaagttttcaattatcaagatttattcgggctaaagtaattaataagaatttcgaattgaatataatcatagttattgaactctaccaattacttcgagatttattttctc

SEQ ID NO: 7984 - DNA, 369 bp, Glycine max
ttctaaagttttctggttttctaaaccttgaattcttgtgttattcatcttttcattctcttatccctttgccaaaaagaattctccaaggactaaccgtctgaattctttttgtgtctctcttctcccttttccaaaagaacaaaggactaattgttagacaagtggcctcagatatcttaaaaggggggggttgaattaagatattcgaaactgtttcccctaattaaaaatctatttcactttttactcaagttatgaattcccttaatgacaatcttcttaaatattaattcaaatgaagcaacttgaatatgaatataaagcaatactaaataaaggagattaagggaagagaaaatgcaaact

SEQ ID NO: 7985 - DNA, 332 bp, Glycine max
agcttcctccattataaataaatttgacagcagaagttttctctttgaagttttgtataatattcctttcatacaaaatttcatactttggaaaaacataattaatgctaaaaacatactattgaaacatgtaattgaaaatacatgtaatagaaattaaaattcctaaatttcataattagggtttatacataattgagagaaattaaatcattcctaaatttcataattacgattcataggagaaatcaaatcattcttggagaatcataaatttcataacacatgttctgataccacatgtaaaacattaaggggttccctaaactatc

SEQ ID NO: 7986 - DNA, 354 bp, Glycine max
tatcccatgcctccttagcttgaaagatgatgtataaagctttcttgcttctctatcttgaatcctttaaagtcttcttttgtgcttacgaaagtgaagtctcatcttgtcactccgtatagcctttttcaaccatttcctaaacatcatgtgtgatgcaatccgaccccccaagggcattggatagaagactccaagaagattacgctagagatgtaagagaaggtcctagggttctcatgagccttatggtagatttcaggcccacgggttaagtatgagtccacttatctttgtacatattagattaaggtttcattatttttgggccttgtatttagggctccataatgt

SEQ ID NO: 7987 - DNA, 348 bp, Glycine max
  unsure at all n locations
agcttgtgtcacactttcaattgtcgaagctgaatacatagctgcaagaagttgttgtgctcaaagtctttggatgaagcaacaatgatgtaagctccattggagcttgtaggcctaggatcttcttcatcaatggattcctttgcttcttggaagatgaatggcagcggaatggagaaaggaagagagagaggagacgccacttcaaggagaagatgagtctaaaagaaactcaccaccataggaggccatggataagagcttggaggaagaaggagatgaatgaagggagagggagagaagagcacgaaattttgtgctctanatgagctttgagatctgaagttt

SEQ ID NO: 7988 - DNA, 347 bp, Glycine max
agcttggaacgaaaaaactgatttagtggttgagacaggcttttggtgaagatgtcggcgagttgaagataggaaggaacaaattgagtaatgagctttttggagagaactatctcgcgaacaaagtggtaatcaatatcaatatgcttcgcacgcttgtgagcaaccggattatgggaaagaaatatagcacttttgttatcacaaggaagagtagggggagtagagtaaacatgcatatcgcgccgcaaatgagtgaaccacattagctcagctgctgcatttgccatagcccgatattcagattcacagctggaacgagcaacaatgggctactttttagcact

SEQ ID NO: 7989 - DNA, 366 bp, Glycine max
ttcattttttaaatggtaactcaattatttatttcttaaaactaacgaaatttattttattttggaaaataagtagttatattgattaattaaaaattaattaccaatttgatagatggataaatacatagataatcaaagtataagatttcaaatcttaagctctattttactattttttaatcccttttcccctagtttctttcctatacaattcattattaatgtcgtgatatatgtgtaatactttttatacttttcggaactaaattttgcatttcatatgtcaagggacacatttcccagtagagtgagaagaagaaatgtaaaataaatattatgccaaatatttggctgttgctaggt

SEQ ID NO: 7990 - DNA, 345 bp, Glycine max
tgttgatcttggacaaggcggcatcactaacatgttcttcttggacggacatgtgtcatcagtgggagacattgtgaccaatggaaaaagaaaagggcacgccttttgcgagcatgcagaaaaggatgcaagagacactgctgattattctgccgcaaagcattgtcgtatggaggcgctcatgctgcataggtataagcgtggatcctcaagtcttcttcatccggattcactcacatacattataactctccttttaaatcctgagagataatactgctcaatcggctttcgaacatacaaagagaacacacgaggctctaattgagatggggaccaaacata

SEQ ID NO: 7991 - DNA, 379 bp, Glycine max
tccattttcaatttcgagcgtctcgatgtatttcggggcttaatcggacatccgagtaaagtattactgtcatttgaatttgctacgagtattcatttttaatttcgagcatttttatatattataggactcagagggaaatcggagtaaaatattattggggcttgaattttctcaaaggttctgttttcagtttcaagcgtctcaaaatattaaggaactcaatcaaacatctgaatgaaaagttatcgtcgtttgaatttgctcaaagctattgttttcaatttcgagtgtctcgatatattatgggtctcaatcgggcatccaagtaaaaagttataatcgtttgaatttgctcagagtttcttctttcaatttc

SEQ ID NO: 7992 - DNA, 354 bp, Glycine max
tcttagtctcagatgatgcagctgagtttgtttctacctcatgcactcctctaatgactatggcatcatttatggcgctaaactgctgagagttggaagccatcttctcaattaaatttctggcttcagcaggagtcatgtctccaagggctccaccactggcagcatctatcatacttctctccatattactgagtccttcataaaaatattggagaagaagttgttctgaaatctgatggtgggggcaactggcacatagtttcttaaatctctcccagtactcatacaggctctctccactgagttgtctaatacctgagatatccttcctgatggcttgggtcctggaag

SEQ ID NO: 7993 - DNA, 357 bp, Glycine max
agcttgaaattgataaacggaagatgtcgataaattcaaatggtcataacttatcacaccgaagtccgattcaggcacataatatatcgagacgctcgaaattgaacaacggaagctctcgagaaattcaaatggtcataacttttcaaatggaagtccgattcaggtgcataatatatcgagaagcttgaaattgaacaaaggaagctctcgagaaattcaaatggtcataacttatcacacggaagtccgattcaagagcatactatgtgaagatgctcgaaattgaacaacgaaagctctcgagaaattcaaatggtcataacttgccacacggaagtccgattcagacgcata

SEQ ID NO: 7994 - DNA, 366 bp, Glycine max
  unsure at all n locations
ttgtgggacttagctcctaaacctttctctcacttgtcaataggaaccaagtgggtgtttcaaaataaacttgacgaatctggcatcatagtaagaaataaagcaagattgattgccaaaggttacaaccaagaagaaggaatcgactatgatgaaacctacgctccagttgcatggttagaagccataagactgcaacttgaatttgcatgtatcatggatttcagactttttcaaatggatatgaagagtgtcttcctcaatagtctcattgaagaagaagtgtatgtatatcaaccatcaggttntgtggactacaaacatcctaaccatgtctatagagtgaaaaagactttgtatggtttg

SEQ ID NO: 7995 - DNA, 274 bp, Glycine max
atcttgtgctgaagtaagtaagacatgtgcctgagatgcatttaaaccttatctcaacaggaaagctaggtgaagctagaatgataaaccatttcggggtcggtagatgaaagcttgatacaagaagcatggttgttgctcgaagtaagaaagaaggctccttgtacatcatgcagggaaagatatgaaaaagggagatgaatgttgcttaagatgcaactcaagaattgtggcacgagagattgtgacacatgaatgagaaaggtttggagtt

SEQ ID NO: 7996 - DNA, 363 bp, Glycine max
tcttttggactcgatccccctttatctccatgctcaaaatatttttagcagctcccatgtccttcatataaaactactaagtagtgacttcagcttctgaattggcaacaaattttcagatgctatgagtatgtcatccacatagtgtagtatatagatgtaggaaccatcctccaccttactattataaacacattagtcatagggacttctaatgtacacatgagagacaatgaactcatcaaatctcttgtaccactgccttagtgattgcttcaacccataaagagacctcttcaatatatagagaaaattttcttttacttccacctcaaaacctctagattgatgcatcagaatatc

SEQ ID NO: 7997 - DNA, 331 bp, Glycine max
  unsure at all n locations
agcttgctaacccatggaagctcctaatatctcccacactttttagggggagccattcttggatggccctgattttctcaggtccacttggaccttatttctaccaactacaaaacctaaaaaaactatattatctacacaaaaggtacacttctctatattttcatagagggtgtttttcctaaagactgaaagaacttgcctgagatgtcctaagtgatcatctaggctcctactgtacactanaatatcatcaaaataaacaactacaaatctacctatgaaatcccttaagacatgatgcataagcctcataaaggtgcttggtgca

SEQ ID NO: 7998 - DNA, 369 bp, Glycine max
tctatagaaggttcgttcctaatttctctacatttgcatcacctctcaatgagatggtgaagaagaatgtggcatttacctggggtgaaaaacaagagcaagcctttgctttgctcaaagaaaagcttactaaggcacttgttctagctcttcctgacttttctaaaacttttgagctagaatgtgatgcctctgaagtgggagttagagctgtattgttacaaggtgggcaccctatttcttattttatggaaaaacttcatagggccacccttaactaccccacctatgataaagagctttatgccttaataagagccctctaaacttgggaacattacctatgttacaaagaatttgtcattcata

SEQ ID NO: 7999 - DNA, 297 bp, Glycine max
ataacaagctcctaccttgcaaagccagcgcggactatcaacagcaaactgcataccaagtgcaacaagaatacctgggatgctagcaatatacaacattgtcctccacctgaaatatgtatctggtggtgccaaataagcattatttggaaaacaattttctgtttttaaagactataaacacataattggtggaagaatcgctgtgaatttataagtgaaggcttgatttcagtgagccatagagaagtatgctccttttacattaagttcaaaacatatcacaatgagtctatc

SEQ ID NO: 8000 - DNA, 316 bp, Glycine max
agcttggttgcatttgcaaacttctatgtagtgcttaatgatctagatgtgtcaaagtgtgcaatcaccaatgttggtatcacagttctctcaagggtcagtctacctagcttgcaagtgttttccttgtctggttgttctaatgtatcaaacaaaagtgcacctttcttgatgaaattgggccataccttactgggattgaatcttcaaagctgcaattcaattggcaccaacacaatagagttgttagtggaaaagttgtggagatgtcatattctggcttaatcatgttagaaactagaagtaaataaaattg

SEQ ID NO: 8001 - DNA, 358 bp, Glycine max
ctgggatgagggctatgaatgaagcattggtttctttgttgaaggagccattgatgtaaaattcatccatgaacctgatgaaatctggtttcaaaatctcccaaaaatggttaatgaaattgaaatttaatccatccggggcaggacttttgtccccccccccccccaccacaatcccaaactgttgatttgatctccaattcagaaaatctagacacaaggctgtctttatctcttaagtcaagagaagaaaattggacaccatccaaggttggtctactacaacattcctcggaaaatctgtccttgaaatagaagatagctgcatttttaacactgcaaggttcatgcacccaca

SEQ ID NO: 8002 - DNA, 352 bp, Glycine max
agcttctaaactttatacaagattgaagctctgataccacttgttggacaagtggcctcagatatcttaagaagggggggttgaattaagatattccaaactacttgccctaattaaaaatctatttcactttttattcaagttatgaattcccttaatgacaatcttcttaaatattaattcaaataacacaatttgaatatgaatataaagcaataataaataaaggagattaagggaagagaaaatgcaaactcagttttatactggttcggccacacccttgtgcctacgtccagtccccaagcaacccgcttgagagttccactatcttgtaaattccttttacaag

SEQ ID NO: 8003 - DNA, 291 bp, Glycine max
  unsure at all n locations
agcttctaaactntatacaagaatgaagctctgataccacttgttagacaagtggcctcaaatataataagaaaggggggttgaattaagatattccaaactacttccccaattaaaaatttatttcactttcttttcaagttatagattcccttaacaatgaacttcttaaatattaattcaaataaaacaatttgaatatgaatgtaaaccaataataaacaaaggagattaagggaagagaaagtgtaaactcagaattatactggttcggccacacccttgtgccta

SEQ ID NO: 8004 - DNA, 348 bp, Glycine max
agcttgtgcatcctataccctgatgaggatgtcccatatgttcttaagactggactgattcatttgcttccaaagtttcatggccttgcaggtgaagacccacacaaacatttgaaagaatttcacattgtctgctccaccatgaaacccccagatgtccaagaggatcacatatttctgaaggcttttcctcattcattaaagggagtggcaaaggactggctgtattaccttgctccaaggtccatcacgagctgggatgaccttaagagagtattcttagaaaaaattttccctgcttccaggaccacagccatcaggaaagatatctcaggtattagacaactc

SEQ ID NO: 8005 - DNA, 334 bp, Glycine max
agcttcaacatcataccacttctcaggtgctggaactacttcacatggatttgatggggcctatgcacgttgaaagccttggaggaaagaggtatgcctatgttgttgcggatgatttctccagatttacctgcgtcaactctatcagagagaaatcagaaacctttgaagtattcaaagagttgagtctaagacttcaaagagagaaagactgtgtcatcaatagaatcatgagtgaccatggcaaatagtttgaaaacagcaggttcactgaattctgcacatctgaaggcatcgctcatgagttctctgcagccattacaccacaacagaa

SEQ ID NO: 8006 - DNA, 384 bp, Glycine max
  unsure at all n locations
tgaaggcaaactggatgcgctggtcaacttggttacccatctggccttgaatcagaaatttgtacctgtcgcaagggtttgtggtttgtgctcctctgctgactaccatacagacctttgcccttccatgcagcaacctggagcaattgagcagcctgaagcttatgctgcaaatatttacaatagacctcctcaacctcagcagcaaaatcaaccacagcagagcaattatgacctttccagcaacagatacaaccctggatggaggaatcaccctaacctcagatggtccaacccttagcaacaacaacagcagcctgctccttactttcaaaatgttgctggcccaagcagaccatacattcctncaccaatccaacaaca

SEQ ID NO: 8007 - DNA, 267 bp, Glycine max
tgaaattaaacaacggaagctctcgatatatttttattgtcataactattaactcggaggtccgattcaggcgcgtaatatatcgagacgctcgaaattgaacaatggaagcttttgagcatatcaaagtggtcatactttttcacttggaggtccgtttcaggcacaatatatatcgtgactctcgatattgaacaccggaagctctcgagaaattcaaatggccatatcttttaactcggaggtacagaccaggcccataattta

SEQ ID NO: 8008 - DNA, 389 bp, Glycine max
  unsure at all n locations
agcttaacatctgtttntttaaattttgatgttaatatttacatataacatcatgttctactaacaaccaatgttgtttattggaattttttaatgtgctgtctattttttttaataacccaaaattaatctacaatattaaaaaacataaccacgacaaataattttcattctatcttcaaacaatttttagtagaaatctcataaaaattgaatatttactatgaattaaaagaatatttaatgtgcatataacatgaattgtaaatattgtaaattaactaaactacaattccaaaattacttaaacactaattatttcatttntaactttcaaatagtagtttgtccactggatgcaaagcaccttcaatctctttagtttcaat

SEQ ID NO: 8009 - DNA, 416 bp, Glycine max
catgtgacctatgaaactaagctatgctgcaacatttacaacagacctcctcaactctcatcagcaaaatcaaccacagcagaacaattatgacctctccagcaacagatacaatcccggatggaggaatcaccctaatctcagatggtctagccctcaacaacaacaacagcagcctgctccttcctttcaaaatgatgctggcctaagcaagccatacattcctccaccaatccaacaacagcaacagccccagaaacaacaaacagttgaggctcctccgcaaccttccctcgaagaacttgtgaggcaaatgactatgcagaacatgtagtttcaacaagagaacagagcctccattcagagcttaactcgccagatgggacaattggctacacaattaaatcaacatcagt

SEQ ID NO: 8010 - DNA, 384 bp, Glycine max
  unsure at all n locations
tcttagtctcagatgatgcagctgagtttgtagctaccttatgcactcctctaatgactatggcatcatttatggcgctaaactgctgagagttggaagccatcttctcaattaaatttctggcttcagcaggagtcatgtctccaagggctccaccactggcagcatctatcatacttctctccatattactgagtccttcataaaaatattggagaagaagttgttctgaaatctgatggtgggggcaactggcacatagtttcttaaatctctcccagtactcatacaggctctctccactgagttgtctaatacctgagatatcctacctgatggctgtggtcctggaagcagggaaacttntttctaagaatactctct

SEQ ID NO: 8011 - DNA, 384 bp, Glycine max
tgcagacagacgacacctttatttttgactagagaccaccagcacgacacgtggcctcagatatcttaagaagggggggttgtaataccatattacaaattattttcccagttaaaaattctatttaacattctatccaagttataaatttccttaataatgaatttcttaaatgttgattcaaatagaacaatttgaatatgaatataaaacaataattaataaaggagtttaagggaagagaaagtgcaaactcatatttatactggttcggccacacccttgtgcctacgtccagtccccaagcaacccgcttgagagttccactatctttgtaattcctttacaagttctaaacacacaaggacaatcccttctttgtgt

SEQ ID NO: 8012 - DNA, 394 bp, Glycine max
  unsure at all n locations
tcacaaattcaattgattattgtcaatctatttttcagaatagttacaaattaaaatttaaatacaaagcaaatttgagcaaaattgagttacattaattttacctcactttcaaaatggttttacatcaatttttttaaaaaggcaatttcaagacgtcttcgattgtgtttttgtttttttaatctattttttacaataatttttaaaatagagatgttttgatttttttagttttttagtcaccatagcattgcattagtataaaatattaatcaattttactaatgactaattttttataaagacatatatttattaatactaaataagttatttatactaatacaactcagttttaattattaatattatcttatntatatatactaat

SEQ ID NO: 8013 - DNA, 391 bp, Glycine max
  unsure at all n locations
agcttctagcnattcaaccatatttctntgtactcggatgtccgattgagttccgtantatatcgagacgctcgaaattgaaaacagaagctctgagcatattcaaacgaacattacttttttctcggatgtaccattgtgtcccttaatatatctagacgctcgcaattgaaaacggaagcctcgtagcaaattcaaacgaacaataactttaactcagatgtctgactgagtcccgtagtatatcgagacgctcgaaattgaaacataaggtctgagcaaattcaaacgacaataactttttactcggatgtccgattgagtcccgtaatatatcgagacgctccaaattaaaatagtagctcctacaaattcaaaccatataactttt

SEQ ID NO: 8014 - DNA, 281 bp, Glycine max
agcttctcgatatattatgtccccgtatcagacatctgtgggaagagttatgaccatttgtatttctcgagagctaccttatgttcaatttcgagtatctcgatatactattttcccaaatcggatatccttgtaataacttatgaccaatcgaatttctcgagagcttctgttgttaaatatcaagcgtgtcggtatattatggcctataatccgaccatccagtgaaatagtatgactagtcgactttctcgagagcttcctttgttcaatttcgagcg

SEQ ID NO: 8015 - DNA, 350 bp, Glycine max
agcttcattcctttatcactcatatttccaagtcttttatgccacaaggctgaattattgacagcctcagtaactgctaccatatcctcatatgtaatcatgtaaagagatcctcgcttctttccacgagccacaatgagattgccttttgttaccttccaagctccatctccaaaagtggtgtgatgtcccttatcatccaactgccctatagatattaaatttctctttaaggcaggaatatgtctgacattgtgcaatgtccatagggatccactggaggtcttgatgtgatatcacctcttccgacaatgtcaagagattttccatctgcaaaggaaacttttcca

SEQ ID NO: 8016 - DNA, 390 bp, Glycine max
ttgaacatgaattgtttgaccgtttctcaaacatttattggggacccaatttcagggttagggttttagttgtaacaacagcaactttagtaactaattaacagtaacttttacaagtaatttatcaaacaatattaattcaaccaactagcttataattattcagtttttcaacttctaatttattaggttataattaattcaattaagtttttcatcataactttaaacactcaattaattgtttttattgtttttctctatctctttttgttatatcacattatatattatgtttatcactatttctcttgaaagttgttagtcgaagctgagtaaaggtgttaaataaatttattgaatttaatgtattatagcaaatttgatata

SEQ ID NO: 8017 - DNA, 296 bp, Glycine max
agcttaatgaatatgtttggtattatttccatacaggggttttgttcaagaggaagaactgctaacattagatgtgcaacctggatggtcgattggagcatggattacatttgtaggaacaggatttgatagacctttagcgtacagagatgatatagtatttatcatctccagaagatggctccaattatttagaagagaaggggatgatatggaattgagtgtataaattcccttagtaaaggcacttactgagtgtacaatattattcccactattgagtcgagagcacatga

SEQ ID NO: 8018 - DNA, 365 bp, Glycine max
tcaagtggactaacttcaatcttgaagagcaagtctctggtgataattgctccacggagcaacaatgagatggatgcatccaaactgaataacgagatccctgagcttctttccatcaaggaatcactgatcaagtatgtctttgagccaaacaagaaaactgcttaaaagtattgagcggtttcatgttttagaaatcaaagattatgcatttctgttgcgggctacatagaacactttttatttcattgttatttcgctgggttttgataataaccttactataaaagctagccatgtggttctcgttctcatagctacaagtgatttcaggtttattattatgttcatcatgttactgtgtt

SEQ ID NO: 8019 - DNA, 363 bp, Glycine max
  unsure at all n locations
agcttcaatcatgtggttgaaaaatgtgttcctagttgatttggttcatgacaaagaaagaggtagaattttgaaattggatagcattatttctggggaccagtggaaagaagtggatgttttgattntcaacacctaccattggtggactcacactggacagtctcaagggtaatgaagctttttgaatttttaaccactttttttggcgtttatgagaggtgctagccatgtggctaatgacatcattttaatgttttattgtaggtgggattactttcaagtgggcaatgaattaagaaaggaaatggatcacatggaagctttcaagattgggctgagtacttgggctaaatgggttga

SEQ ID NO: 8020 - DNA, 393 bp, Glycine max
tgaaacaacagaaatgttgcactgcatcaagcatttattatgagctgactaatttcaagaacagtagcacataccacaaacgtattggctctaacaacatcaagcatagtgactcccaaaagtctcttgggatcgtaagtaccagctcttttgaaaacttcggctgcaattctggactgtggagttaactggattgcttatcacattgacaatggctttaggacagcactttgcaattgcttcacacaatgttttaacaattccagcatttatattgaagagatcatctcttgtcatttccaggtttctaggaacaccagcagggatgatcaccaagtccatgcctataagtgcatccctaagctgttgctgtcccaaaaattctcgaaccta

SEQ ID NO: 8021 - DNA, 400 bp, Glycine max
  unsure at all n locations
agcttgcagaatgcgctcggnctgtttaatatttaagatttatgacatggatgaatttaagcaatttttttttcaagttgagaaaaaaataatgaaaataagctgcaaataatttttaaattaggttaatactgtgtactttctatagaattgaaaaacgataaagacaaaagaataattaatatatagtatgaaaaaagtattgtgatattgaagatgctatacggacacaattttttatgatattaaataatcaatgtactgaattactataataatatatataaagttaaatgttattatatgagaaatattatcaatatatttttaacattntttattattgaccacaatttattaaaaataacatattgttggttttacttcttatttaatgatt

SEQ ID NO: 8022 - DNA, 392 bp, Glycine max
  unsure at all n locations
tgcttaggacatagggatcatgccccccacccacaaatattttttaatataatgagaatatcgtttttatatgaaagtaataagaaaaataagtattaatcattaaatcttatcatgaatgctcatttgaattttttaatagtcccattaatttcttatgccactctcatataaaaataattcttccactagatttgtctcctataacattatgaaatattctntaaaattatttatttctcaattattaatgattttaagtcattgacagagcttatagaattttaatttgcaaacttttagttgctgaaagagcataaacaatgtaatattcattcatcttctttattatggttatattttatagacaatttatgttaatattgcattta

SEQ ID NO: 8023 - DNA, 405 bp, Glycine max
agcttgtcttcctccacaagagatgttccaactgaataaccctgagccttgtaaaaggtaaagatcattcctccaccaagcaagagaacattaactttctccaacaaggattcaataactccaatcttggaagacaccttcgatccaccgacaatagcagcaaatggtctcttggggtttgacacagccccaactagataatcaagctcctgaaacaattaaaaatacatcagatcaatcaactgtataaattacataattacccaatatatatataatgaagctaacaattacttcctacaaaccttctgcattaggaatcctgcaacagagggcttcaagtatttggcaactccttctgtagaagcatgagctctgtgggcagtgccaaatgcatcattcaca

SEQ ID NO: 8024 - DNA, 394 bp, Glycine max
tgtgcattcaatatcctgatgagggtgttccatatgttctcaagactggactaatacatttgctgcccaagtttcatggtcttgcaggtgaagatccttataagcatcttaaggagttccatattgtttgttccaccatgaaaccccctaatgtccaagaaggtcatatctttctaaaggcttttcctcattctttggagggagtggcaaaagattggctacactaccttgctcccaagtccattttcagcagggatgaccttaagagggtgttcttggagaaattctttcttgcatctaggaccactaccatcataaaagacatttcacgcatttggcaacttattggagaaagcttatatgaatactgtgtgagaattcagaaactatgtgc

SEQ ID NO: 8025 - DNA, 390 bp, Glycine max
agcttcctttcgtaagatttagaatttaatatgataactctactccttttttaattgagaaacaaatatagttggcaatatgataatttcaccgatacaaaataaaaataaaatacaattggatcgcaaccaaaataacaaaataagaattacaagttatatataatataaatataatatttgaagactaattaaattttgatactgttacattatattccccattaaaaaatgtcatattgttatatttacaaataaaaataactatgaaggagtttgctaatttatctatcagtatatttacatgatatttcctaaatttaaatgaatattaatgtttcatattccaaaagatgaaatatttaaaattaatgatacaaataagattat

SEQ ID NO: 8026 - DNA, 318 bp, Glycine max
tatgctgcaaatatttgcaatagacctcctcaactctcagcagcgaaatcaaccacagcagagcaattatgacctttccagcaacagatacaaccctggatggaggaatcaccctaacctcagatggtccagccctcagcaacaacaacagcagcctgcttcttcctttcaaaatgctgctggcccaagcagaccatacattcctccaccaattcaacaacagcaacaacccctgatacagccaacagttgaggcccctccacaaccttccctcgaagaacttgtgaggcaaatgactatgcataacatgcagttttt

SEQ ID NO: 8027 - DNA, 388 bp, Glycine max
agcttcatgcttaactatgtatggtaaaacttcattactggtgttcaagacatacaagtgagcttgttacaaatcttctacactcggagagatcacatgcagtcctcttgaacccttaccacccactctgtcatgatgccgagactcaggaagcccaacaggtttagctctctcttagtcttctgaacaaaatacaatggcttcttgtgcaatgtacctctcaacaatagatgctcttggacgatataaattctccgtatacccttttaagatacttatgtatcgctcaaccgggttcatccaccgtagataaacaagaccacaacatttgatttctctgaccagatgcacaatcaagtgaatcatgatgttaaagaaagcgggggga

SEQ ID NO: 8028 - DNA, 379 bp, Glycine max
tcttattttcagcagatgaagatgaatttgtggccacatcatggactcctctaaggacaatagcatcatttcttgcaatgaattgttgggagttggaagccatcttctcaatcagattcctagcctcaacaggagtcatatcaccaagagctcaaccactggcagcatcaatcatactcctctccatgttactaagtccctcatagaaatattgcaaaaggagttgctcagaaatctggtggtgaggacaacttgcacacaatttcttgaatctttcccagtactcatacaagctctcttcactaagttgcctgatgtcggaaatgtcttttctgatggcagtggtcctagatgcaaggaagaatgtcttcaagaacac

SEQ ID NO: 8029 - DNA, 403 bp, Glycine max
  unsure at all n locations
agcttgtccttacaaaatatcattatacaaanttgattgtcttaagactttaatgttatcatatgcaaccacaacaaaagaaaatgcatgccaaattcacaagtcctgtgttgcaactgcttcgagcataattattggtttgcaatgatcacctacaataaattgacctttccaaggtgcatgataattttttcattcctagtgcatacaatcaactgaatccaacatacccggaatgccacatgtctcctccatttgtagtaggtggcggaaacattagaacaaatagaggattttgagaatttttggtagaagaaggtacacaattttgtatataattgtatgtggagttgtttggtggtggtggaaacataaggaaaaatggatggaaacatttgtcaag

SEQ ID NO: 8030 - DNA, 391 bp, Glycine max
  unsure at all n locations
ntgagcaaattcgaacgacaattacttttaacttggatgtctgattgagtcccgtaatatatcgagacgctcgaaattgaatgttgatggtcgttgcaaattgaaacgacaataactttttactctgatgtctgattgagtcccgtaatatatcgagacgctcgaaattgaatcttgatgctctgagcaaattcaaacgacaataactttttactcggatgtctgattgagtcctgtaatatatcgagacgctcgaaatttaatacgaaagctatgagcaaattcaaacgacaataattttttactcggatgtctgattgagtctcgtaatatatcgacacgctcgaaattgaatgttgatgctctggtcgatttcaaacgacaataattt

SEQ ID NO: 8031 - DNA, 399 bp, Glycine max
agcttcagaattcaatttcgcgcgtctcaatattttacgggactcaatcagacatccaagcaaaacattattgtcgtttgaattagctcagagcttcagaattcaatttcgatggtctcgatatattacgggtctcaatcagacatctgagtaaaaaagttattatcgtttgaatttgctgagagcttcaacattcaatttcgagcgtctcgatgtattacgggacttaatcagacatccgagtaaaaagttatcgtcgtttgaatttggtcagagcttcaacattcagtttagagcgtctcgatatattacgggactcaatcagacatccgagtaaaaagttattgtcgtttgaaaatcctcagagcttcggtattcaatttcgagcgtcttgatata

SEQ ID NO: 8032 - DNA, 377 bp, Glycine max
tgcttaaagacatatttggttaattaattattttaaaacctagtgaaatattaactaaaaaaagaaacttataaaattttatataagtaatgtagaaatccaaaaataattgataaacaaaatcatattgaattcaagtcgttaaagcacaaagtatatcaaacgaatataaaaagagcataatattaaaaaatgtatggattatagatggtttacactaataaagccaaacaaaaattattattagttaaattaacaatttttaatccaatttttgaatatataattatattaaatattcttatagagaatatatctacaataatttcattttagtctactcaagtcatatcttatatactattgatcgaggtcgt

SEQ ID NO: 8033 - DNA, 381 bp, Glycine max
ttgaatgcactattcaatggagttgacaagaacttcttttgactgatcaacacttgcacagtggccaaagatgcatgggagatcctgaaaatcactcatgaaggaacctccaaagtgaagatgtccagattgcaactcttggctacaaaattcgaaaatctgaagatgaaggaggaagagtgtattcatgacttccacatgaacattcttgaaattgccaatgcttgcactgccttgggagagaggataacagatgaaaagctggtgagaaagatcctcacatccttgcctaagaaatttgacatgaaagtcactgcaatagaggaggcccaagacatttgaacatgagaggtgatgaactcatcggttctcttcaaacct

SEQ ID NO: 8034 - DNA, 366 bp, Glycine max
tcagtccctgataaactggttcccagaagacaatagggagtgaatattgctgaaaaccctagccttgcaacaagtcctagggaagtagacacggagatggacaagaaaatccgcagtatagtgagtagcattttgaaagaagcttctgtgcctgatgttgagaaagatgttccaacatctttcggcccaaatgctgaagccctcccttcacccagtgaagaggaatcaacagaagaagaggatcaagcctcaaaggagactcctgcaccacgggcaccagaacctgctccaggtgacctcattgacctggaagaagttgattctgatgaataacccattgccaacaggttggcacctggcattgct

SEQ ID NO: 8035 - DNA, 383 bp, Glycine max
acgccaccggcatgcatgcaagcttttctatgagggttgatgggttctgtcgtttagaatggcatgagcactggctgacatattgtcaattatctcaattgcttctttcgaggtcttcagctttattttcccccctgtagaaacatctaccagttgcttggtttgcggtctcagcccatctataaacatattcaattgaattggctcgtaaaacccatgggtgggagttcttcttaataaacctctgaacctctccaatgcttcactcagagattcatcagggaactgatgaaatgaagagattacagctttcccttctgcagactaggactctgggaaatatttctttagaaacttttcaacgacttcttccatggttttca

SEQ ID NO: 8036 - DNA, 385 bp, Glycine max
ttattcaagacaattcaagacaaagcaattaattatatccaagatggatgatcaagacagtctatagagtcttagaaagggtatattaaataggaagggaattccaattgaagtagcaaaaggtttggccaagaaaattaagttaaaaagtcttttacaagaaatttactctctggtaatcgattaccagaggatgtaatcgattaccagtggccaaaactgatttacaacagctattaaaatttgaattcaaaatttgccctgtgtaatcgattacacatatatggtaatcgattaccagcagtttctgaacgttttaattcaaaattttaaagcttgtaatcgattacacatatactgtaatcgattaccagagcagattttc

SEQ ID NO: 8037 - DNA, 368 bp, Glycine max
agcgtggactagagattttctctgtatccatttggggctacagctatcatgctgagaactaaagccagtgaaatttagtgaactcttgggagatctttggcccagcttattggcagcaatgtggcgctgcacccattccactcaggttcacactctttacgttgctccggaatctcaacttgttaatgatcattgattgtatggatggggtagacataataagcttcagtttgacacaaggatggcaaaatctctatggatcacttcgtgttgaaaaggaagtctttgacaattctgaatagatacgaattaccttctgcttgcgcgcgccttatggaatcctgcggggggagcttaatgaacaatgc

SEQ ID NO: 8038 - DNA, 384 bp, Glycine max
tgaggatagagacttcccaagctatttatcttctctctcaaagaggctctctaactttctagctttctcactctaagaagtggattcactcttgtcttggatggttaagaatgaaggctcctacccttatttatactactccacctccacaatgaatggtggagattaattctctagaatgctccacacattctaggagtctctacactcttctactcccttccatatcctttcatactcttccagaaggttcaagaaggtttcacatatctctagaatattctagaggtttccacagtctttcacaagcttctagagagttctaccctactctagagttctacaggacgttctagaaaattctacacttttctagagagctct

SEQ ID NO: 8039 - DNA, 371 bp, Glycine max
agctttcactcggatgtccgattcatgcgcatcatatatcgagacgctcgatattgaacaacggaagctctcgagaaattgaaatgatcataacttttcactcagatttccgagtcacacgcataatatatcgagacgctcgaaattgaactacggaagctctccagaaatctatatgattataaatatctcactcggatgtccaattgaggaacatcagatatcgagacgctcgaaattaaacaacggtacctctcaggaaattcaaatggtcataacttttctaacggagatccgattcaagcacatcacatatggagacgtccgaaattgaaccacggaagatctcgagaaaatcaaatggctctaac

SEQ ID NO: 8040 - DNA, 400 bp, Glycine max
agcttgaagacaagactatacgaggtatcttccttgggtatagcaatatctctaagggctaccgtgtctacaacttgcaaactaagaaactcgtcattagtcgagatgttgaagttgatgaatatgcttcatggaattgggatgaagaaaaagtggagaagaacgttcttatacccgctcaactacctcaagaagaagatgaggaagaaaacccaggtgaaccaccttcacctccatcacaacaacaagatcaagaactatcatcaccagagtctactccaagacgagtaagatctttggtggacatatatgaaacctgtaacttggccatacttgaacctggaagctttgaagaagcgtcaaagcacgaaatatgggtcaaggcaatggaagaagagat

SEQ ID NO: 8041 - DNA, 396 bp, Glycine max
  unsure at all n locations
ntgagccaattcaaacgacaataactttttactttgatgtctgattgactctcgtcacatatcgagacactcgaaattgaatgttgaagctctgagccaattcaaacgacaatatacttttactcggatgtctgattgaggcccgtaatatatcgaaacgctcgaaattgaatgttgaatctcttagcaaattcaaacgccaatatctctttactcggatgtctgattgaggcccgttatatatcgagacgctcgaaattgaatgttgaacctctgtgcgaattcaaacgacaataactatttactcagatgtctgatatagtctcgtaatattatcgagacgctccaaattgaatgttgaagctctgagctaatttaaacgacaacaacttttta

SEQ ID NO: 8042 - DNA, 393 bp, Glycine max
tcttattttctgcagatgaagatgaatttgtggccacatcatggactcctctaaggacaatagcattatttcttgcaatgaattgtagggagttggaagccatcttctcaatcagattcctagcctcaacaggagtcatattacctagagctcaaccactggcagcatcaatcatactcctctccatgttactaagtccctcatagaaatattgcaaaaggagttgctcaaaaatctggtggtgaggacaacttgcacacaatttcttgaatctttcccagtacttatacaagctctctccactaagttgcctgatgtccgaaatgtcttttctgaaggcagtggtcctatatgcatggaagaatgtctccaataacactcttttatgtcatc

SEQ ID NO: 8043 - DNA, 357 bp, Glycine max
gtgaactatgaaactcagcttatagggctcacgatattttgttaaatataagttcaacatcggtttttttaaaaacaccgatgttaacaacatgatgttaaggctaacattggttttctggaaaaaaccgatgttaacttatcaaacgttaacatcggttttctcaaaacccgatgttaataaacttatgttgacatcggttatttggaaaccgatgttaactaatcaatgttaacatcattttttccaataaccgatgttaatgcacttcgctaacatcggttttgtgaaaaaccgatgttaacagatacatagtatttacaattatgccaccacgcttaccttgacatctatttt

SEQ ID NO: 8044 - DNA, 350 bp, Glycine max
agcttgaaatttaacaacataagcttttgagaaactcaaatggtcataacttgtcacacggaagtccgattcatgcgcataatatattgacatgctcgaaattgaacaacgaatgctctcgtgaaattcaaatgggcatgacttgtcacacagaagtccgattcaagtgcataatatatcgagacactcgtaattgaacatccaaagctctcgagaaatacaaatggtcataacttatcatacggaagtctgatccatccacattaatatatcgagaagcttgacattgaacaacggaagcttctcgaaaacaaaaatggtcgttccttatcacacggacgtccgattca

SEQ ID NO: 8045 - DNA, 392 bp, Glycine max
  unsure at all n locations
tctaaactntatacaagaatgaagctcttatactacttgttagacaagtggcctcaaatatcttaagaagggggggggttgaattaagatattccaaactacttccccaattaaaatctatttcactttcttttcaagttataaattcccttaacaatgaacttcttaaatattaattcaaataaaacaatctgaatatgaatataaagcatttataaacaaataatattaatggaagagaaactgcaaactcagatttatactgtttcggccacacccttgtgcctacatccagtcccccagtaacccgcttgagagtttcactatcttgtaaatttcttttacaatttctaaacacacaaggacaatcctatctttgtgtttagaattcc

SEQ ID NO: 8046 - DNA, 403 bp, Glycine max
aagctccttcaactgcacatggctcttaatatttgaatggtatccctgtggaaccttcacccgatgaagacaccgacgaagacttatattctcatttctggacaaagtatggcaagctgggggcaagtaaattttcttcccatcataccttggatgcaactgtgatcgtatccccatatcagctagatcttgacgggtattcaagtcatacttcgtcttgccttgaatgttgagaagcgtcccaatcacactatcacaaacatttttctccacatgcataacatcgatacaatgtctaatgtctagatcagaccaatactgaagatcaaagaaaatggacctcttctttcatatgaaactcttacttttatccatcttttgggtatgtctaaatacattattc

SEQ ID NO: 8047 - DNA, 360 bp, Glycine max
tttacgtaaaaaccaaactgatcgctggaatgaggattgtcaagaggcctatggaaggatcaagaagtgtcttatgaatccccctgtgcttatgccaccagtacctggaaggcctctcatcttgtacatgacaatcttagacgagtcaatggggtgtatgctggggcaacatgacgaatccggaaagaaagagcgcgctgtttactacctaagtaagaagttcacgacctgtgaaatgaattactccttgctcgaaagaacgtgttgtgctttagtatgggcatcccatcgcctaaggcagtacatgctgagccatactacctggttgatatacaagatggacccggttaagtacatctt

SEQ ID NO: 8048 - DNA, 300 bp, Glycine max
aacactactactcctctaacaagtcatgacacccttgagtttcctgaatggatgagtgacggtgatcaagagttgctcagagccaagccacactgtgtgcgtgcggatgcggttgtggctttggatgggagaggtcattatcgctctatcactgatgctgttaatgcggctcccagttatagtcaaaggaagtatgttatttacgtgaaaaaggggctttacaaggagaatgtggacatgaagaggaagatgaccaacatcatgcttgtgggtgatggtattggccaaacaattatcact

SEQ ID NO: 8049 - DNA, 394 bp, Glycine max
  unsure at all n locations
tgagcattccaacgacgacgttaacgtgggcttcccttttatcaactcttttggcgatttagggcacgccattgttggccctcttggcaagctattcgttgatgtcatgatcgtgttttctcattgcggtttctgcgtcagctaccttattttcatttccaccacgttggcctatctcgccggtgatgatgacacctcatcagcatcatggtcctccttgttttggggtttcgccacgccaaaggtgttgtttctgtggggatgttttccctttcaattagggctgaatgctatcccaacattgacccatttggctcctttgagcatttttgctgattntgttgacattgtanccaaaagtgtggtgatggtggatgatgtctttgtgttcatg

SEQ ID NO: 8050 - DNA, 418 bp, Glycine max
  unsure at all n locations
agcttgtcgggtactgnttcaattaagttcttggggcatcccatggactaagcgaaaaggctctagttattaaatactgcacatcttttaaggcataaagcgaggatcggaacctcaatcctacgttctttttaaaggactgtgatgagagaatttacaaaggacaggaatccctgggggaaaccaagaagaacacaaaaaataaaaacatgcagcgactccctcaattgccccagatcctaagcgtaatatcgcttgacaacgtcgaagttcacgggtgagggtagctcctcgtcatccatgttggcgagcaccagggcccctccagagaaagccctttttacaacaaaaggcccttcgtagttcggggcccactctcctctgttatcttgtagagctngggagactttcttcagca

SEQ ID NO: 8051 - DNA, 436 bp, Glycine max
  unsure at all n locations
agggaataattctacctatattattggaatcactcatgctataganatannggagntatatgaagagttacggttacattaataacttaagtggttaagattgattagattttattttaaagtcaaactttcattatagacttaaaaaactgataatcctaaatgatttgataaatgtgtaatgcacatgttaacttttactattatttttaatttaggcacatcatatgataaaaatttgtattcatgttgtgaataaggtggttagtcctctaataaacaaggttatccttntatcattagtgattaacttttatccctctaatattattactcaaaagtcacatgtgaacatgaatatatatgtcttatgcatcaaaaattgaacttatataagaaagtatgtgtcatgctatctcagaatttatcatacatg

SEQ ID NO: 8052 - DNA, 378 bp, Glycine max
  unsure at all n locations
ctgccatggaagcacttgatctgagtgacttcgtttcaaccaaggattgtcagaaggacctatatgagtgccttactgctaagcgcattatcttggcatcaatgagttcagaactccagaggcaacaccaagacatggacccatatgagatcatcgaacatcttaagaagatgtacggtggtcaaagcaagacggctagatttcaggtatctaaggccctgagtagatcctcacttgttgcaaatgaaaaagttagacctcatgttcttaagatgattgatctcatagaacaacttgagaaggtggggtgcactctcgggaaagagctttctcaagacttgagtttgcaatcactttctgagtcantttcataattta

SEQ ID NO: 8053 - DNA, 408 bp, Glycine max
agcttcattggttgtatgagtaggagatagtgctggagttgaatcatttggagtcaaggcttcttcatctatttcttcaaagtacgagaaaaatcataagtgtcttctttctcctcccaattccatgtgccttcttcatagaactcggcatctcggctcacaattgtctttccattgtttggattatacaatttgtagccttttgaacttgcatcatagccaatgaacgcatgtttctcactccgatcatcaagcttgaatcttccttggtcgggtacatgagcatatgcaatgctcccaaatactctcaagtgatcaactcttggcttcactccactccatgcttcttggggaggttgatctttgacattctttgttggggagcgattggacaaataaacggcacac

SEQ ID NO: 8054 - DNA, 316 bp, Glycine max
tttcacttctccctatataaccctccgctcccaaactcaaaccctaaccttaaccttcaatcaaaactcaaaacttctcttttctttcattctctctcttttattcttatcatcacaatgccttcaattcccgaagagcccctcctggctccgaacccggatcgcttctgcatgttcccaatccaatacccgcaaatctgggaaatgtacaagaaagccgaagcctcgttctggacggcggaggaggtggacctctcccaagacctccgccactgtgactccctcaccgacggcgagcgccactttgtcacccacg

SEQ ID NO: 8055 - DNA, 384 bp, Glycine max
agcttgtgcattcaatattctgatgagtatgttccatatgttctcaagattggactaatacatttgttgcccacgtttcatgctcttgcaggtgaagatccttataagcatcttaaggagttccatattgtctgttccaccatgaaacccgctgatgtcctggaagatcatatctttctaaaagtttttcctcattctcgggagggagttgccaaagattggttgtactaccatgctcccaggtccatcaccagctaggatgaccataagagggtgttcttggagaaatacctcccagcatctaagaccactaccatcagaaaagacatttcaggcatcaggcaacttattggagagagcttgtatgagtactgtgaaagattc

SEQ ID NO: 8056 - DNA, 395 bp, Glycine max
agcttctaccaagtaccttcaacaagtttgattttattatgacataactaacagcatgcaagatcttgtatgtataaaacctcgattatgatgtgattttcaactttgttctttcatgagagaaaataacatggcaaacttgttacttctgtgaagtggtatgaaacattctattcttgtctcatagaagcaaagtggagcaaaacgggacaaacaccatcattagataactacctcaaatatggcatgatctccattgctgttcatacattggtgcttccagcctcatggtttcttaaacatagcttatcaaatcagaaactgagaccagcccaatagaaagccattaccaatctacgtatgggtatttgtagtaacatattaatgaacttgac

SEQ ID NO: 8057 - DNA, 388 bp, Glycine max
tcttagtttcagatgatgcttatggagccatcttctctatttaatttttggcttcagcaggagtcatgtctccaagggctccaccactagcagcatctatcatacttctctccatattactgagtccttcataaaaatattggagaagaagttgttctgaaatctgatggtgggggcaactggcacatagtttcttaaatctctcccgagactcatacaggctctctccactgagttgtctaatacctgagatatccttcctgatggctgtggtcctggaagcagggaaaaatttctctaagaatactctcttaaggtcatcccagctcgtgatggaccttggagcaaggtaatacaaccagtcctttgccactccctctaatgaatg

SEQ ID NO: 8058 - DNA, 340 bp, Glycine max
  unsure at all n locations
gattcttaagtcacctgcggcatcaagtcttgatggactttcttattatgtctccattgactacttcaccaaatgggtcaaagcggcttcgtatgccagtgtgactaggagtgtggtggttaggttcatcaacaaagagataatttgtctgtataggttgcccangaagattatcaccgataatgcaaccaatctgaacaataagatgatgaaggaaatgtgtgaggatttcaagatccaacaccataattctacgccttacaagcccaagatgaatggggcagttgagactgctaataagaatatcaagaagatagttcacaagatgatcgtgtcatac

SEQ ID NO: 8059 - DNA, 378 bp, Glycine max
  unsure at all n locations
cacaaacagctcaggagacctctggagattttgaagaggcaagtgagaaagatgctacaaagactgcagtaacagatggaactgtccatcctctaacaagctatgtaattaactatgtgaagtttttatttggtaagttcagctatgttgtcatctgatcccaattttgtagccgcatcaattatttctagcattttttgctgtgttcactgatgacaaaaatgttagacattattgctattgttatattgttttttaaaatttattttacagttctgcgggtttctgctcatggactttttaatgcatttcttattaaatatgcagagagattggcatgctatgccacatanatcaatctctagtttctacgtgttc

SEQ ID NO: 8060 - DNA, 403 bp, Glycine max
  unsure at all n locations
gattcctaagtcacctgcggcagcaagcttgtaattttgttatcaagcatcctctaaaggaggaggggagagagttacttgtcgagccaaaacaaggtacatttcattcttttagctntgaatatatatccccaaactatgaagataaaataaatgaaataaagattatacatgagaattatgctcacgtgctttaccctgtcaaatangtttatacaaacttagaaggcaaccgtgcaaacttagttcagacttcatgggctttgttgtcccttattgatgcaggacaggttaataataaagctctatgttttgaatttttaccatatcataaatttaaacctcctaactccttaagccctatggaaaaaccctgcanagtgcaatggtcctctaattagta

SEQ ID NO: 8061 - DNA, 400 bp, Glycine max
  unsure at all n locations
gcaagcttgccaatccactggggtcgatgctttctgaatatccttttgcaccatgcatctaggagacacattnttcctaccataccctctcaccagctcctgagcaagtaatatgttatcctggatattcctaccaggaataaaagctgattgagtgtcttccaccacactatttatcacatcactcagtctgctagtcaaaatcttcgatatcaccttataaattgtgctacaacatgatattggtctcatgtctttgatggtttttgcctccggggacttagggataagtgagacaatagagcagttgacaactttgtacaacttactagaattaaaaaattccaggatagtattctgcacatcatttttacaataggccaggcggctntgaaaaatg

SEQ ID NO: 8062 - DNA, 430 bp, Glycine max
acatttctgacaacaaggtgatcttgacggaaggtattgatggtgttgttcctccgaagtattttgaaaggatagaatcatggccgagcagacagcccatttctttttaaagttattttacaattttgcttttaggatcacaatacgttgaggattatttaaataaaataatatgaaaaagatataatatattttaaataataaaacatttcaaaaatatataacatattaaataaaaacataaaaaatatacaacatattaaataaaattgataataagtaaaattaaaattatttatttaataattaattaaataaatatttttagcaatttaaaaaaaattgaaaacaaaacaaaacaaaataaaaaatgtctaaaaaattcttaatattataaaataatatataatatcataaaataaaataaaaa

SEQ ID NO: 8063 - DNA, 385 bp, Glycine max
  unsure at all n locations
caagttttcaatatcaaatngaaatggatagctgatcgtgaaaaagatggttgtgtatacaatatcccaaatgttcctgaagttgttgcacttattgttggtgattttgacccaagctcaaaaagagatattattgttgaaactcaaaatggacaactacaaagaatccatgaattacactctagctatctggctctatagtaccctctactctttccttatggtaaagatggatatagaactaacatacttcaccactctaaatcatcatgcaaaaaaaggaagagaaatcgtctgacaacgagacagtggttcgcttatatgcttcagtccaggccaaatgaagcacaaactttattgctttctatgaaactatttcaacaac

SEQ ID NO: 8064 - DNA, 348 bp, Glycine max
  unsure at all n locations
gcaggcatgcaagctntgagcaaattcaaacgacaatatttttgtacatgtatgagcggangagacccgtattatattgagacgctcgaaattgaatgttgaagctttgagcaaatacatacgacaataaccttttactcggatgtctgattgagttccgtaatatatcgagacgctcaaaattgaatgttgaacctctgatccaatacaaaggacaataagcttttactcggatgtctgattgagtcccgtaatatatcgagacgctcgaaattgaatgttgaacctatgagccaattcaaacgacaataactttttactctgaagaatgattgagtccctaatttt

SEQ ID NO: 8065 - DNA, 364 bp, Glycine max
actagtgagcttccaattatatgacatgtaccacttgtaattttcctatctaatttgcatcttccaaaatcagagtctgaaaaaccttttaagtttaaggaagttcctttggaataccacaaacctacattggttgtgcccttaagatacttaatgatcctcttaacagtagttaagtgagattcctttggattggactgatatattgcacataatcaaacacttagcatgatatccggtctacttgcagttaggtagagaagtgatccaatcatacctatgtatcttgattcatccactgatttacctttctcatctaagtcaaggtaggttaatgttgtaacgcctttaaattcaataactg

SEQ ID NO: 8066 - DNA, 428 bp, Glycine max
  unsure at all n locations
atgcagcttaagataaagccctcactaagtggttttncgttttcgactcgcgaccatcatcgtgaacaggaagaacggttgcctggtcgtctgctagtttgagtcactcatgcacaaattcattttgattttaattctttttttctttttcggcctccccaatatttttggtggagtagtccaaaaaaatgtcaatttttttctttattttttttgtgataaaaaattaatgttgaaagagagagagaaaaaagaaagcactctgcccatgtggatgtgaagtgtgggctttctagtcagccttattatttgtataattgatcttccatatatcagtcattaattcccctaccttcaaaatctgctaagtatcacattaatgaaaacgtttatntatactgttacttatttatttctcctatcatatg

SEQ ID NO: 8067 - DNA, 448 bp, Glycine max
  unsure at all n locations
tggcagtcaatagcatgatagttcgcagatactattaactggtctatagtttcttgatcgggttgacgacatcaatattgtatttggaaagacccaaaagaaagaaaaaaagtaaaactttcatatgtaagaagaggtcgatattgtttgatcttacatactggtctaatctagatgtcagacattgtattgatgttatgcatgtcgtgaaaaatgtatgtgatagcatcatcgacacgcttcttaacattcaaggaaagacaaaggatggtttgaatactcgccaagatctagttgagatgggtatatgagagcagttacatccaaggtctgatggtaagaaaatataatngcctctagcttgtcatactttgtccagaaatgaaatggtaagtttatgttagtgtctgcaccgtctcatagtgccacagggatactattcaaatat

SEQ ID NO: 8068 - DNA, 440 bp, Glycine max
  unsure at all n locations
cctgcggcatgcaagctttaggtcactgaagctctaattataggccattttttaggaattctttggaatgcagttatacaaactctccctatgatacgagaaatcattaggtagttcaggactaccacttgttcatgttcctcaccaatatctatgtgacacatttaagtttttcaatgtatgagacaaagttaataacactcaactaggtgtcctataaaaattaataggaatcatatagtcttggaccattagtaatttctcatacgatacacaccacccacctagtactgtgcttggaattcaaaatggaaaactgattatctaaaataatgcatatggcataatatcataagaagcttgatgatgccttacgaccattttgccattcatgtcaccatagaaaattatgcaattatatnattagttgccttaaatga

SEQ ID NO: 8069 - DNA, 407 bp, Glycine max
  unsure at all n locations
taagtcacctgcagcatgcaagctnggcatntttatcctgatgatttgttccatatgttctcaagactggactaatacanttgctgcccaagtttcatggtcttgcaagtgaagatcctcataagcatcttaaggagttccatattgtctgttccaccatgaagccccctgatgtccaagaagatcatgtctttctaaaggcttttcttcattctctagagggagtggcaaaagattggctatactaccttgctcctaggtccatttttagctgggatgaccttaagaaggtgttcttggagaaattcttccctgcaactaggaccactgccatcagaaaagacatttcaggcatcaggcaacttagtggagaaagcttgtatgagtactgtgaaagattcaagaaa

SEQ ID NO: 8070 - DNA, 330 bp, Glycine max
  unsure at all n locations
agtttagcaccagacctcttcacggttttgggtctgcttccaggggctggtgggggccgttgcaacttaagagcctggaaggaaagacgtatgcctatgtatgttgggatgatttctccacactgacatggggcaactttatcagagagaaatttgacacctttgaagatcctaagagtcgagtctaagacttctacgacagaaagactgcgctatccagagaatcangagtgaccatggcagagagtgtgaaaacagcacgttttccgcattctgcccgtttgaaggcacctctcatgagttctctgcagccattacaccacaacaaaa

SEQ ID NO: 8071 - DNA, 396 bp, Glycine max
atgcattggttaacttggtaacctatctggcctcttatcagaaatctgtacctgtcgcaagggtttgtggtttgtgctcctctactgaccaccatacagacctttgcccttccatgcagcaacctggagcaattgagcagcctgaagcttatgctgcaaatatttacaatagacctcctcaacctcagcagcaaaatcaaccacagcagaacaattatgacctctccagcaacagatataaccctggatggaggaatcaccctaacctcagatggtccagccctcagcaacaacagcagcctgctccttccttccaaaatgctgctggcccaagcagaccatacattcctccaccaatccaacaacaacaacaaccccagaaacagccaacagttg

SEQ ID NO: 8072 - DNA, 433 bp, Glycine max
  unsure at all n locations
accttaggcatgcaccttagaaacctacacagcgatnattttatatnnnaatttttattattnatnagcgaccgaatgcatttctttataaatgtattttaataatagtttaattactaatttagtccttatagtttcatcatttgtacatttttgtccttataattttaaagtgttttttttagtccctatagtttacattttaattcccttttagtccatctagtttaaaactggtttttttagtatttataatttgagttttaattcccttttagtccctacagtttgaaagtggtttcttttatttcttatactttatacgttaatttctttatagtccttaccatcaaaagatcagtaataatatcaattacaattaactacagatatataagcaaataattcgtaactaattgttcccaaataattt

SEQ ID NO: 8073 - DNA, 322 bp, Glycine max
  unsure at all n locations
agtcacctgcggcatgcaagctggttnttttataataggactgcttgatgccctttccactgtatccacttaaatttccatatgctagaaaatcattaatagtacaaaacaccattgtgcgtaacctgaatgtctactgcacatttgcatcccacacatctaccccttcttcccacaattgtttcaagtcttcgattaatggcgtaagatacacatcaatatcattccctggctgccttggacccgcgatcatcatacacaggataatgtatttacgcaaaatgcacaaccatgggggaaggttgtaaatcatcagtaaaac

SEQ ID NO: 8074 - DNA, 300 bp, Glycine max
agctttgtaatgatgtatccgaggtgttcacgaagcagagatcggggtcgacgcccacggtgatgaagaatgttccgaggacagatgaggcgagtttggcgacgccgtttggaggctgggggcgaggaagtattggaattacatggagccggcttctgggggcgcgtggcatgcgcatattcacaataggcgcacggtgaaaactatgttgatgaatgtggagagggattcgggtgtgtgcgagatcatgatccatgcgatgggccttggattcagtttctggagctgggaacgggggca

SEQ ID NO: 8075 - DNA, 442 bp, Glycine max
  unsure at all n locations
ctatcttaaggtcgatgcatgaaaacatnnnnnnncattataagtnttctccaaatatcagctgatgtcccaaacatgattatttttcagacaattttctttctttctctcaaaaacaaatttcagctgtcccaaacaccccaagggctgcagtaataacataccactatcctgaagaatatatctcttggatatatctttcatggtatcataagcagtgagatcaatggcagcataaggaatcatgccaagcagagatggaacaagccctctgtagaaagctcgaggtccctcttgaacccatatattcattgtaagtgttcccagcttatgaacctttccaccttcagagggacaagtctgtaacctaagtttaatgagatccattggatagatagcagcctgtgcaattgcaccagccgtaccaactgcaacaagccta

SEQ ID NO: 8076 - DNA, 316 bp, Glycine max
gagcgttctcgtatattatcggcctgaatcagacatccgaatcaaaagttatggctgtttgaatatgccatgtgcttcgatgtttaattctgagcatctcgatatattatgcacctgaatcgggcatctgagtgaaaagttatgccatatgagttagccgagagcttcgttgttcgatttctagcgtctcgacatattattggcctgaatcggacatccgagtcaaaagttatggcgggttaaactttgcatgtgcttccgtgtttaattatgagcatctcgatatattatgcacctgaatcggacatctgagtga

SEQ ID NO: 8077 - DNA, 413 bp, Glycine max
  unsure at all n locations
gactcatggtctctatgaatgacttattcctttggataaaggnagtgttgccatattttctttattccatactaaggcatacaactccttatcatangttgaatagttaagggtaggaccactataaatttcactaaaataagcaattggatgaccttcttgcatcaacacagccccaatcccaacatttgaagcatcacactcaatttcacaagatttttgaaagtttggcaacgcaagtatgggggcattagttagcttttgcttaagaacattgaaagcttcttcttgtttctctccccatttgaaaccaacatatttcttgagcacttcattgagaggtgctgccaatgtgctaaaatccttcacaaatcatctataaaaacttgctaagccatgaaaactcctcacct

SEQ ID NO: 8078 - DNA, 313 bp, Glycine max
  unsure at all n locations
agctttgatatggatattatttngaaatcataagatggcacgtataagacatcatttaatgtaatgaatgcagaaagttgtattgtgcctgagtgggtagcatagacaagatgaccatttggtagtttaactgtgatgggattaatttgatgatatgagtgaaaatttgttagagaggaggaaacatgatcagtggctcctgaatctaagatccaggaggtagaattggctttttcgcaagatagaattatacctgttgcatcgttattggaacaagatgaaataaaggcgacctatggcttgatgggtgctg

SEQ ID NO: 8079 - DNA, 416 bp, Glycine max
  unsure at all n locations
agctagtgtttttctcaaatataagacatgcatgatgccctttcccactgtatccacttaaatttccatatgctagaaaatcattaatagtacaaaacaccattgtgcgtaacctgaatgtctactgcacatttgcatcccacacatctaccccttcttcccacaattgtttcaagtcttcgattaatggcgtaagatacacatcaatatcattccctggctgccttggacccgcgatcatcatacacaggataatgtatttacgcaaaatgcacaaccatgggggaaggttgtaaatcatcagtaaaacaggccaggaactgtggttgctgcttaagctaccataaggattcattccatcagaagcaagagcaagccttaggttccttggctcatccncaaactcttgatacaaa

SEQ ID NO: 8080 - DNA, 364 bp, Glycine max
  unsure at all n locations
aagctccttcaactgcacaaggctcttaatatttgatatgtatccttgggaaccttcacccgacgaagacactgacaaaaacttatcttctccttcttggacaaagtatggcaggctgggggcaagtaaattttcttcccatcagaccttgaatgcaactgtgatcgtatacccatatcagctagatcttgacgggtattcaagtcatccttcgtcttgccttgaatgttaaggagcgtcccaatcacactgtcacaaacatttttctccacatgcataacatcaatacaatgtctaacatcaagatcacaccagtacggaagatcaagaanatgacctcttcttcatatcaactctgacttta

SEQ ID NO: 8081 - DNA, 288 bp, Glycine max
agctttccgaactagacttttcctcattattcgaaccttcaagcaccacagagtaaaaaaaattaagcaagatgaaactggtcaggaattttacaagtgtatcctaaatgagagattcagatgtaaagtgtaagaatatgcgtgctgccctatctacttactatgcggctctcttgaagaatttcacgtgacacattgagtggaagtcatttgagtaacaacacctttgacaagcttagtatcggggaactggttagcagtaaaacatagtgaggataaatatcagac

SEQ ID NO: 8082 - DNA, 357 bp, Glycine max
  unsure at all n locations
agcaaggataatgtntntttttgttttttcctcggctnttttgccccttcaatacaacataaaaaaaaaactacagtacgaaatttagcatgaaaaaatctatattgcttttgtcaatattttcatgcttaaaatttggtaacttaattttaattaaaaatttaattacatccatcaattattaaaatattcaataagatcttcaaataatttaaaaaatactataatcatatcatttgttaactctattagaatgataaaaattatataaataaacgtttttatatcaattgcataagtaatgtaaaaatatttattcacatcaataacatattttaagaagtaactaatttttta

SEQ ID NO: 8083 - DNA, 350 bp, Glycine max
tgaatcatttatcctatatccgacagttaatttgtgagtcccgtccaggtagtcccgaagaaaaccggcctcatcatgataaaaaatgagaaggaggagctgattcctattcgggtgcagaacagttagagagtctgcattgactataggaggttgaaccaggtcaccaaaaaggaccattttcccctgccattcattgaccagatgcttgaatgcctggcaggtaaatctcactactgtttccttgatggtttttctggttatatgcaaatcactattactcctgaggatcaggaaaacaccacattcaccagccccttcggaacttttgcctatagaaggatgccttt

SEQ ID NO: 8084 - DNA, 362 bp, Glycine max
tgtaaaaaaaggaagcaagttaaaaactctttttatagttttaaacattatttctagttcaaaaccccttgaactacttcacattgatttatttggtccctctagaactatgagtgtaggtggaaattactatggcttggtaatagtggatgattactcaaggtttacttggaccttgtacttgaaaaccaaaaatgaagcttttgatgctttttgcaaacttgccaaggtgattcaaaatgaaaaaggtctgaacattgtttcaattagaagtaatcatataggtgaatctcaaaataagtatcttgaaatcatttgtgaagaaaatggaattcaccacaatttttcaacccaagaatacc

SEQ ID NO: 8085 - DNA, 327 bp, Glycine max
tgcttggaaactatgtcttctgtgttatactctatctcatttgaagcagcgccccaatatctatcctatggattttcatggataaagtgcttgttcttttggggcaagaacatgctatttcactagtaactggaaactactgcatttggctcattcctgcactctttggttatgtggtacttcaagctttggttcgttattttcagactcagagcttgatctttccaatgcttgtaacctcagctgctgtcttaatttcgcatatacctatttgttgggtactaatgcttgaactgggacttggacaaaatgcatcggccttattca

SEQ ID NO: 8086 - DNA, 362 bp, Glycine max
tgaaggcaaactggatgcgttggtcaacttgttaacccagctggccttgaatcagaaatctgtacctgtcgcaagggtttgtggtttgtgctcctctgctgaccaccatacagacctttgcccttccatgcagcaacctggagcaattgagcaacctgaagcttatgctgcaaatatttacaatagacctcctcaacctcagcagcaaaatcaaccacagcagagcaattatgacctttccagcaacagatacaaccctggatgaaggaatcaccctaacctcagatggtccagccctcagcaacaacaacagcagcctgctccttccttccaaaatgctgctggcccaagcagaccataca

SEQ ID NO: 8087 - DNA, 333 bp, Glycine max
agcttgaatcggacattcgtgtgtttagctatgaccattagaatttctcaagagcttccgtagtataatttctagcctctcgacatattatgcgcccgaatcggacattcgtgtgaaaagtcatgatcatttgaatttgtcgagagtttacgatgtttaatttcgagcgtgtcgatatattataaccctgaatcgtacctcagtagtgacagctatgaccatttgaatttgacgagagcttccgttgttcaatttctaatactcactatatgtgatgcgcctaaattggacatttgtgtgaaaacgtatgaccatttgaatttctcatgagct

SEQ ID NO: 8088 - DNA, 360 bp, Glycine max
taatacaccaattattaatttttttttaatagattgtatgtattttatatgaaagataatcttatttaaactggataaataagataattataagtgataaaactctgtctccaaatatttaacgtaattatatatgtaagactaattaatctaaaataactttgcatgattaacatactcagtgctataacactaatagtttggtaataactaattcattgataaatattataaaatcatcaatatttgagagtattagaataaattttacttcgtattagaataaaattaattagatgcaaacctattaacgaaatgctttaacttcaccaaatatgtgattatgaaagcaaagggtag

SEQ ID NO: 8089 - DNA, 362 bp, Glycine max
agcttaagggaagagaggattgcttacttgatttatactggttcggccacttcccgtgcctacgtccagtcctcaagcagcccacttgagattttccactctctttgtaaaactccttttacaaagtctgaaccacacaaggacaacccttcccttgtgttcaagaatcctctacaacaagagacccacggtctcttaatcccttttcaaaaataagaagaagagaagaagaaatctctcttaaaagagataaattgtacaatgaagatcaatcaaaattccttattgaatatgcaagggtttgaccaagacatttcagttcagaaaaactcttaatctttcgagaggataaaactttttgg

SEQ ID NO: 8090 - DNA, 351 bp, Glycine max
agcttcaagagtcatctatgttgttgtcctctgcagccacaccatcttcaaattctgtagctttgtcgtctaactctagggttgtttttaattctggtgatgcaaataaattttcaaaggtttctttgacccctagttctcacactctgtggcatactaggctgggtcatcctaatgctcatgttcttaaactttctcttaatcattgtaatattgctccatccaataaaaatgtctctgagctttgctcttcttgttgtgtaggaaagtcacaccaactcccttcatctagttctcaaactatatactctactccattggaattaattattactgatttgtggggaccct

SEQ ID NO: 8091 - DNA, 341 bp, Glycine max
  unsure at all n locations
agcttggnctatntaatttaatatactntnaaaaaagctggagtctatgcttttaattaaataagccagttcaagccagactntatgtatgtcaggccgtatgcccctgtaggctggtctggcctattctcatccctacttgttatcattaccattgttgtcacatctatcattactaacacctttatcatcgccataacattgttatcatcacttgttaaagttgttatcactattatcattatactcattattgttattgtcgntactataaccctcactaacaccctgtgtgtaatagntgtgatgaccataattataataatgataataatgaaaaa

SEQ ID NO: 8092 - DNA, 344 bp, Glycine max
agcttgaaggaaaactggatgctttggttaacttggtaacccaactggccttgaatcagaaatctatacctgttgcaaggtttgtggtttgtgctcctctgctgaccaccatacagacctttgcccttccatgcagcaacctggagcgattgagcagcctgaagcttatgctgcaaatatttacaatagacctcctcaacctcagcagcaaaatcaaccacagcagaaaaattatgacctctccagcaacagatacaaccctggatggaggaatcaccctaacctcagatggtccagccctcagcaacaacaacagcagcctgctccttccttccaaaatgctg

SEQ ID NO: 8093 - DNA, 361 bp, Glycine max
  unsure at all n locations
agctttactatgcaaggaataacctatgaaaattccttcatctgacttagcatcaaattttcccaagttatcctttccattgtttaatacaaagcatttgcaaccaaaaacatgtagatgtgagatatttggtttcctaccattaaacaatttgtatggagttttctttaagataggtcttattaaagccctattcatgatataacatgcagtattaacggcttcagcccaaaaatattttggaagaggagtatcattcaatacggttctagcaatttcttccaaaaacctatttttcctttcaacaactccattttgttgaggggttctaggtgcagaanaattatgttcaataccatgc

SEQ ID NO: 8094 - DNA, 351 bp, Glycine max
  unsure at all n locations
ttggagtttccaagtgccaattcgtcttcttctttagtccagncttcttctggcttcaattcatcagtgggctttccttctgtgtccagcatcttgggatgttcccagcctttgatgacagctttccaggttctgctatccagtgatttgaggaaggccaccatccttgctttccagtattcatagttggttccatccagaattggtggtctgttcactggtcctccttctttctccatgttcatcagaatttatctccctagatctcactcagtgatttcgagtgcctgctctgataccaattgaaattctgatcctggggacagatgtcgtacaggatgtcacgacatc

SEQ ID NO: 8095 - DNA, 353 bp, Glycine max
tcaaaaggctttaataaaattgaaattaaagccttccgaacccgggctcttagtacttccacactcctaaactgcctccttaacttccccttcctcaaatttagccaagagaaaaacattgtcttcaagagagataaatttgaaatggacaccatctagctttggtctacaacccccttgttctttgaatctagtttcaaaaaactacttcacttcctcctttacacaatgtggctcttccaccccccccccctccaccctcaagcctctcaacatatttttcttccttctccaatgaccacatgaattaaaatattttgaatttctatcaccttccacgacccaccttgctc

SEQ ID NO: 8096 - DNA, 298 bp, Glycine max
agcttaccaccgtaagaggccattgataagagcttggaagaagaaggagatgaatgtagggagaggatgagaatagcacgaaattttgtactctaaaagagttctgaaatctgaagtttaattttcaaattatcaaagttgaaaaaaatgcacacacaaggcctctatttatagcctaagtgccacacaaaaatggaggaacatttaaatttctattcaaatttcacttgaatttgaaattgaatttgtggagccaaactttggagccaaaatttcactttttatgattagtgaattt

SEQ ID NO: 8097 - DNA, 352 bp, Glycine max
agcttgtaactcttggcaatttttttaaaactagccacttaaaaagttatgacttttgaaagaatcttcagaaacaagtcacttgaagaattgtgacttttggaaatgtatttttcaaaatcagtcactggtaatcgattaccattaaggtgtaatcgattacacatcaacagatgtgacttcattttgaattttgaaaatcttaacattttaaaacactggtaatcgattacatgattatggtaactgattacagctttgtaaatcagtttgaaaaaaatgctggctactggtaatcgattactaccttctggtaatccattacccgagagttaaacactttggtaaaaaa

SEQ ID NO: 8098 - DNA, 333 bp, Glycine max
agctttttcggagccccgtgaattatgttttcgttcatgtgtccatcatcttcgagtttgttgccatgcgtagtgattgcttaaggcaattctccattctcaaccctttttcggaaccccatgaattgcgtactcgttcatgtgcctttcaacttcgagtatggagccttgcgcagagatttgcttatgcaattctccattctcaaccctttttttggatcaccaagaatggtcgtttttgttcatgtgtgctccatcttctattttggagacatgcgtcgtgattgcttagtgcatatcctcattcttaatctctttttgggagccccaaga

SEQ ID NO: 8099 - DNA, 348 bp, Glycine max
tgctagcccaaggaagcggaggccatttcctttacttttacaagagggccattcttggatggccttgatctcagggtccacttggacaccatttctaccaactacaaatcctaagaaaactatattatctacacaaaaggtacacttctctatattgacatatagagtgtttttcctaagaactgaaagaacttgccttaaatgtcctaagtgatcatctaggctccaactgttcactaaaatatcatcaaaataaacaactacaaatctatctatgaaatcccttaacatatgatgcataagcctcataaacgtgcttggtgcattatcgatcccaaaggcatcact

SEQ ID NO: 8100 - DNA, 347 bp, Glycine max
ttcttagtatcctccacaaggtgttggtcttgacttgtcgagctccaaagctgccaagttttgtcttgaaacaccttaatgttcctagatttccagataagccaagatgtaattgcaaagaacatgatgcaatcctaccctccaagggcattggatagaagactccaagaagattggaccagagatgcagaaaaaggccctaggattctcataagccttatggtagattttgggcttatgggcatagtatgagcccacttatcattgcacatattagattaaggtttcattttttttgggccttgtatttagggctccatactgtaaggaggttaccctaataatgt

SEQ ID NO: 8101 - DNA, 341 bp, Glycine max
agcttggaggaagaatgagattattgagggagaggaagagaagagcctgaaattttgtgctctaaaagagctctaaaatctgaagtttaattttcaaatgatcaaagttgaaaaaatgcacacacatgacctctatttatagccttagtgtcacacaaaattggagggaaatttgaatttcacttgaaattgaaattgaatttgtggacccaaactttggagccaaaatttcactaataatgattagtgaattttagttatgggtcaggccactaatccaagatcaattccaagattctccactaaatgtgcttaagtgtcatgaggcattgtaagcatga

SEQ ID NO: 8102 - DNA, 361 bp, Glycine max
ttagcctaaggctgtacaccatgttgctcatgttgctctccctatatttaacaatttccacctcaagacccctagttttattaaatcttgatatatttggtctaaccaaaaccctcttatttagtggttcacgggtaaaaggtatggtctatttgtggtggacgactactctagatgaacatggattatttttcttacccacaaaaatgagtattttagagtcgtctttaaattttacaaaagaattcaaagtgaaaaaggagtatacattacttcaattacaaatgatcatggtggacaattctaaaatgaaattttttttcattatttgaactaaaatggtattctttgcattttctca

SEQ ID NO: 8103 - DNA, 348 bp, Glycine max
agcttgcacacaagttggttgttgttgttattggtttgattacatgaaaacctctcatttgtgtttagcttgtattattggtttagatgaaatcccttcgctacaagtcaaacaattatacttggtgatagtgccattagggtttttcttcaccctaaacacctatttacaaccaattggatccctatatggaggcagttcagtaagagtccatgtaccattttttatcaaagcatcatgctcaatcctccttgttgcaaaccaagtaggattggaaagagcaatttatgttaacttgtgctcacaattagctagaagaagagtacgatgaagtcttggattgacaac

SEQ ID NO: 8104 - DNA, 358 bp, Glycine max
ttccttgaatattcttctgtggtataacaaattggaattcctgcctgtcctgataggcaagcgttaaattgggcaacttaaaatcctctcgataattgtttgcaagattgcggatggctgtgaaagcaacaccaaatgctttgagaacacaaatatgatatgctgcattccaagaaagattacactgttgacagaaaagtaaacttcaagctaacggattataaaaccttcactggtttcacaaaatgctcttcgtgaaatatccaagaggccatcaattccatccttaacagcaaagcattgtttgagtgcaagcaacaaaaagaacgcgtgcatgaaatacatcttcatcaataac

SEQ ID NO: 8105 - DNA, 352 bp, Glycine max
ttagaattgtcctatttgttttgtgttccttttgaaatattttgaaaaaaaaaataatttttttttcaaaatatttcaattttttatagttgaggcgttatttgatttcaaaatccgattattatattcctaacctgaagtgttccttggtgtattgataaaaagtaataatttttctttgaatcttaacaattgatatccttttgaaacaatttttttttcttcatttgaattgatagtgaattctttcaatttcttattcgatttatgtattcttttttctaaactaaacaaggcaaggactaactcctgaactgcaagtaaaaaaagttatagaatagaatatagattt

SEQ ID NO: 8106 - DNA, 355 bp, Glycine max
agcttgtaccaattggtccattgttgacaagtcatgatgatacaattgcaactacaaaatcaattggacaatattgggaagaagatctctcttgcatgagttggctcgatcaacaacctcgtgattctgtgttgtatgttgcctttggtagtttcactcattttgatcaaaaccaattcaacgaactagctcttggattggacctcaccaatagaccttttctttgggttgtgcgtcaagacaataagagggtataccctaatgaattcttgggaagtaaaggtaagattgttggttgggctcctcaacaaaagggtgtaagccaccctgctgtaacatgttttgtcacccattg

SEQ ID NO: 8107 - DNA, 351 bp, Glycine max
tgccatgaatagtttcatgtgtactagtaaataggctggcataatcctgtcataaaacacaaccataaactaaaataagcatatgtgatcagtgtcaaaataaaatgcaaccatttacaaaaccaatcaagaaaataagaatagattattacagctaaccaatcaacaagcctttcaggtagccatgcttgagattgcttgtccacataaaatatttcaattaactcccacgcagctttcaaagatgtaggctcttcacctctctatattatgtgtaatgtgttaaaaagcaagtgattaacttctcggtatcataattcccacaaagcagatctcagctcagctaaacac

SEQ ID NO: 8108 - DNA, 349 bp, Glycine max
tgtaatcgattacacatctactgtaatcgattaccagagcagattttcagaaaatattctcaacagtcacatctttttatgtggttcttgaatggctatcaaaggcctatatatatgtgacttgagacacgaatttgctaagagtttttcagaacaaaaaggtcttatcctcttataaagcaaaatcgttttatcctcttacaaattccttggccaaattacttgtgattcaataaagaattatttgagtgctcaaattgttcaatctatctctttcaagaaagatttcttcttttcttcttcttcattctgaaaagggattaagagaccgagggtctcttgttgtgaa

SEQ ID NO: 8109 - DNA, 351 bp, Glycine max
agcttctcagcaaacttgtttcctcactagcagttgctagtgctatcatctcaaattccatagtggactgagctaagatagtctatttcttttacttccaagaaatagccccaccagctatgctaaatatatagctgttggttgctttggaatcatctgaaagagtgttccaatctgcatcgctgtatccttcaagtacaacgggaaaccttttataatgtaatccaaggcttatggttcttttaaggtacctcattaccctttcaatagcgtgctagtgctccatactaggtctactgataaacctgcataataatcccacaactaggctatgttggatctagtacaatc

SEQ ID NO: 8110 - DNA, 359 bp, Glycine max
tgtcttgccccttgatatatttgatgttactcttggtcactatgaatgacaaattccttgggataaaggtagtgttgccatgttttcaaagcctgtactaaggcatacaactccttatcataagttgaatagttaagggtaggaccacttaacttttcactaaaataagcaattggatggccttcttgcatcaacacagccccaatcccaacatttgaagcatcacactcaatttcaaaagatttttgaaagtttggcaacacaagtatgggggcattagttagcttttgcttaagaacattgaaagcttcttcttgtttctctccccatttgaaaccaacatttttcttgagcacttc

SEQ ID NO: 8111 - DNA, 304 bp, Glycine max
agcttcaacattcaatttctagcgtctcgatgtatcacgggactcaatcagacatccgagtaaaaagttatcgtcggatgaatttgctcagagcttcagaattcaatttcgatcgtctcgatatattacgggactcaatcagacatctgagtaaaaaagttattgtcgtttgaatttgctgagagcttcaacattcaatttcgagcgtctcgatgtatgacgggactcaatcagacatccgaataaaaagctattgtcgttcgaattagctccgagcttcagaattcaatggcgagcgtctcaa

SEQ ID NO: 8112 - DNA, 346 bp, Glycine max
tttcactcggatgtccgattcaggcgcataatatatcgagacgttcgaaattgaacaatggaagctcttgagcaattcaaatgatcataacttttcactaggatgtccgattcaggcgcataagatatcgagatgttcgaaattgaacaacggaatcttttgagcaattcatatggtcaaagcttttcactcggatgtccgattcaggcgcataatatatcgagaagttcgaaattgaacaatggaagctcttgagcaattcaaatgatcataacttttaactcggatgtccgattcaggcgcataatatatcgagacattcgaaattgaacaatggaagctcttg

SEQ ID NO: 8113 - DNA, 318 bp, Glycine max
agcttccattgttcaatttcgttcgtctcgatatcttatgcgcctgaatctgacctccgtgtgaaaagttatgaccatctgaatttctcgagagcttccgttgttcaattttgagcgtcttgatatattatacgcctgaatcggacctccgagtgaaacattatgaccatttaaatttctcgagagcttccgctgttcaatttcgagcgtctctatatgtgatgcgcctaaatctgacctccgtgtgaaaagttatgaccatttgaatttctcgagagccttcgctgttcatttcgagcggcttcatatattatgcgc

SEQ ID NO: 8114 - DNA, 351 bp, Glycine max
tgtaccaattaaccgtgcatatgccatgcattatcgcatctcataacacaatgatatttttaaacaaatatgagaggattaatggagaaaaatagtactaactagttcttacattttgatattgctgttgctgatcttgcatcgaatccgataataagggtaagcatgggcacaaagatgccacccccaccaacacctcccacagtcccatatgctgatcctatgaatccaatcatgctgcccactattattttccacccaaatttcatctcctacaaccaaaaacagaagcattaattacaaggtaattaatcccaattcaatgtccttaattaatatacaaacactaat

SEQ ID NO: 8115 - DNA, 357 bp, Glycine max
ttggagtttccaagtgccaactcgttttcttctttattccagtcttcttctggcttcaattcttcagtgggctttccttctgtgtccagcatcttgggatgttcccagcctttgatgacagctttccaggttctgctatccagtgatttgaggaaggccaccattcttgctttccaatattcatagttgcttccatcgagaattggtggtctgttcactggtccgccttctttctccatgttcatcagaatttatctccctagatctcactctgtgatttcgagtgttggctctgataccaattgaaattctgataccaggggacagatgtcgtaccggatgtcacgacatcacgct

SEQ ID NO: 8116 - DNA, 356 bp, Glycine max
agcttgtggagaccgtcctagattttaaagcacccccattgagtatgctgcattctgctgatgaatttgcagtaataacaaacatcacttcattgtgcattaagatttactttgaactttccttcttgacctattatgtgtgcaactatatataatgatttatgatctgtaatatttacgttgatttggagcataatcaatatcgcactttccaaggcttgacttgcctgatgcaaatctcaacaaggactgaagattttattgttgacactttgaaacttcacagttctattgggccctatatgagggaagtcttcaaggacctttccaatagaaaagttagtggcacatgattg

SEQ ID NO: 8117 - DNA, 357 bp, Glycine max
tccatcaataactcatctagacgctctatatgtgaacaacggaagctctcgagaaatttgaatggtcataaaatttcactcaaatgtacgattcggggacataatatatcgagacgctcgaaattgaacaacggaagctatctagaaattcgaatagtcctaacttttcacacagaagacagattcggggacataatatatcgagacactcgaaattgaacaacggaacctctcgagaaattcgaatggtcatatctcttcacacagatgtccgattcagggacataatatatcgagaagttcgaaattgaacaacggaagctctcgacaaattcgaatggtcataacatttcactc

SEQ ID NO: 8118 - DNA, 295 bp, Glycine max
tgcttctagagttgttttgttctttaatcggccatctgggtgaaaagttatgaccagtcgaatttgttgagagcttctcttgtttaattgggagcatctcgataaactattttgcccaatcggacatccgcgtgaaaatttatgaccattcgaatttttctagaggcttcgttgtttaatttcgagcatctcgatttattatgtactcgaatagaacatcttagtgaaatggtatggccattctaatttcttgatagttttcggtcatcaatttcgagcgtttagaagagttatg

SEQ ID NO: 8119 - DNA, 345 bp, Glycine max
tctgttctgaatttcgagcatctccatatactacgggaaacaatcggacatccgagtaaaaaggttttgttgtttgaattttctaagaggttatgatttcaattttgagcgtctcgatatattacgagactcaatcaggcatccgagtaaaaagttattgtcgttagatttttcttagagcttctatttccgattatgagcgtctcgatatattacgagattcattcggacatccgagtaaaaagttattgtcgtttgattttgctcaaagcttctgttatgaatttcgagtgtctcgatatactacgggacacaatcggacatccgagtaaaaagttattgaca

SEQ ID NO: 8120 - DNA, 414 bp, Glycine max
  unsure at all n locations
gcaactatncgnccctggcacaattgtcagaattattctaaacctgcanggttctttaagctaaccaattccaaacaaggtcatattccatcgacttttttggttattcaaggcatgcattgatgcattcgcattttgtaaacccattgtgcaaatcgatggaacatggctttatggacaatacaaagggacactgttaattgcagttgcacaagatggggctaacaacatatttccattagcatttgccattgtcgagggtgagacagcagatggttgacactttttgttgcaaaacttgaaaacccacgtcacaccataacatggtatatgcttaatctctggtagacatgagtcaatccaaaatgcatacagacgacttgacagtgggtggacaacaaacaactcattaca

SEQ ID NO: 8121 - DNA, 310 bp, Glycine max
  unsure at all n locations
tctcactcccttgacatttattggaggaggaagnntcttatttacatcaatctttgccttggccacctctattccccttactaaaatcttatgccccagcattattccttcctgaaccatgaaatggcatttctcccaattgagaactagattggactcttcacatctctgtaatactctntcaaggtttgatatgcacccctcaaaagatggcccaaaaatagagaaatcatccatgaaaacttcaatgcattnttccacctaatcagaaaaaattgcaatcatacactgctgaaatgtaactggggca

SEQ ID NO: 8122 - DNA, 406 bp, Glycine max
tcttagttttagctgatgaagacgaagtgtggctacttcatgcactcctctaatgactatagcatcatttatggcactaaactgttgggagttggaagccatcttctcaattaaatttctggcttcagcaggggtcatgtctccaagggctccaccactggcagcatctatcatacttctctccatgttactgagtccttcataaaaatattggagaagaagctgctcagaaatctggtggtgagggcaactggcacatagttttttaaatctctcccattattcatataggctctctccactgagttgcataatgcctgaaatatcctttctgatggtcgtggtcctggaagcagggaaatttttttctaagaatactctcttgaggtcatcccagctaatgatg

SEQ ID NO: 8123 - DNA, 307 bp, Glycine max
cctctaccactagtcttaatctttggcatgctaggttatgacatcctaatgatcatgtaatgaaaattgttctcaaacagtgtaatatttctcaactgaataaaaacatcaccgagttttgttcttcttgttggatgggtaaagctcataggttaccctctcacagctcaacaggcttcccactccctctctcaagtttgttgttccttttgttcctttgattaataaagagtctgattatcattttcttaaaactgttacgtgtgcctgttttcctttactaaagccatatcatacacacaagctc

SEQ ID NO: 8124 - DNA, 353 bp, Glycine max
  unsure at all n locations
tacgaactagcctctgggcaaagcattaactngaattagtctaaaannnnctattgtataaatgtgccatcaaatgtacaaaatactattactaatattatgggtgcagaatgtctatgcatggggaagtatcttggaattccatcgttagttggtccaagtaaaagggcggtgtttgggcacgtaaaggacaaggtttggaagcgtattcaatcatgggagggccattggctctctagtgcaggaaatgaggttatgatcaaggctgtccttcaggctattccaacatattatatatccatctatttgcttcctgatagcctcgcagatgagatacatatattgctaaattg

SEQ ID NO: 8125 - DNA, 372 bp, Glycine max
cctaacgccttgttcaaactctcctataacctttatgtgaatctaggatctctatcagacactatggttgacgacacatcatgtcatctgacaatctcactaatgtataacgaggtcaacttctctaaggaaaacctaatattgatggggataaagtgtgcagatttattgaatctgtcaacaataacccaaatagaatcaaaacctttacgggtcctaagtagtcctacaacgaaatccatggagatattgttccacttctacacgggtatctctaacggttgtaacttacctaaaggtctctgatgttctatcttagccttctagtagactaaacacgcatacataaacttattaacctctgtcttcatg

SEQ ID NO: 8126 - DNA, 383 bp, Glycine max
agcttctgtccctgagaaactggttcccttattacaattgggagtgaagattgctgaaaaccctagccttgcaacaagtcctagggaagtagacacggagatggacaagaaaatccgcagtatggtgagtagcattttgaaagaagcctctgtgcctgaagctgatgaagatgttccaacatcttccaccccgaatgtttctatgcctgatgttgagaaagatgttccaacatcttccggcccaaatgatgaagtactctcttcccccagcaaagagagatcaacagaggaagatgatcaagccgcagaggagacccctgcaccaagggcaccaaaacctgctccaggtgacctcattgacttagaagaagtcgaatctgatg

SEQ ID NO: 8127 - DNA, 398 bp, Glycine max
  unsure at all n locations
agctagaaggtgngtagcttaccatctattcttattatagaaccggtagtgtgtctactatcattgtcgtcatttttttttcgtcattgaggtgccacttgagctgccacgtctctccacctttgggcgtattcttttgaaagatttgtgccccctttttgcacatgttctgtagttgcatcctatccgaagacattatactgacactgcctaatgaaggcaatcactaggtccttccaagaatcgactcgggaaggttccaagttagtgtaccaggtaacaactaccccagttagactttcttggaaggaatgtatcaacaattcctcatcttttgtgatgcccccatcttccgacaatacatctttagatggctcttggggcaagtaatccccttg

SEQ ID NO: 8128 - DNA, 332 bp, Glycine max
acctgttagacaaatggcctcagttatcttaagatggggggttgaattaagatacaaagactattcctcaattaaaatttcgctctctctttttagattaacattgcacccttaacatgaattactcaaaagacaattcagaataaacttctttaaagcaaaagataaatggcaataattaaaagaagtttaagggaagagagaaatgcaaactgatttatactggttcggccacttcccgtgcctacgtccagtcctcaagcaacccacttgagatatttcactctctttgtaaaactccttttacaaagtttgaaccacacagggacaac

SEQ ID NO: 8129 - DNA, 355 bp, Glycine max
  unsure at all n locations
agcttcaacatcagaccacttccagggtgttggaacttttttcatggactngatggggcctatgcaagttgaaagccttggaggaaagaggtatgcctatgttgttgtggatgatttctccagatttacctgngtcaactttatcagagagaaatcagacacctttgaagtattcaaagagttgagtctcatacttcaaagagaaaaagactgtgtcatcaagagaattaggagtgaccatggcagagagtttgaaaacagcaagtttactgaattctgcacatctgaaggcatcactcatgagttctctgcagccatcacaccacaacaaaatggcataattgaaaggaaaaac

SEQ ID NO: 8130 - DNA, 331 bp, Glycine max
  unsure at all n locations
ctcaagcatggaaagaagacagnatataccttacaccgaagattncttttagctnttttatcttatcgacaatggaaaaaagcttttaatggaagtcaggagaatgaaggccccccggaagcattaactggaaaccaagttcatgatcgcgtaaaggacattgtaaccgtgtttggcaagtcccagaagaagacatcatctcccaaaaacatgtggaagaaacgctcaatattctttgatctttcatactggtctgatctatatgtgcgtcactgtctagatgttatgcatgtggagaaaaaagtgtgtgatagtttaattggtactcttc

SEQ ID NO: 8131 - DNA, 275 bp, Glycine max
  unsure at all n locations
agcttgataagaattntgtttgtaatacttgtcattattctaaacataaaagacttccatttcccaccagtaactcacatgcatcgaatagtttttaacttttacatatagatatatggggaccttgttcaaaggtttcaatgctaggacattgatactttctaaccatagtagatgattattcacgttttacttggatatttctaatgcatgtcaaagctgaaacacgagaacatatcaaagcctttatagctcttgttgaaactcaatttgac

SEQ ID NO: 8132 - DNA, 397 bp, Glycine max
  unsure at all n locations
tctccttccatggcgtattctctagtggatggcgccttttcttagctctagtcctttatcttttgctgcaactccatggttgaaaatcaccattaaaggaccttattgaagctcaaagatccaacctccatagaagcttctcaagcaagcttccatcaagattctactattcgcattgcatggttatcgaactttggtgcgtacttctactggggcaaccctattctctntggtgtatgagatggaagttgtgctcccttttaaggtagagattccttctttgagaattctagcagaatcagggttgggagaagcagaatgggccagacatgttttgactagttgaatcttatcgagggaaaaagaatggctgccatgagtcatgggtggctatatc

SEQ ID NO: 8133 - DNA, 359 bp, Glycine max
tctaaactttgtacaagaatgaagctctttttccacttgttatacaagaggcctcagatatcgtcagaagggggggttgaattaatatatcccaaactgtttcccctaattaaaaatctatttcactttttactcaagttattaattcccttaatgacaatcttcttaaatattaattcaaatgaagcaacttgaatatgaatataaagcactaatcaataaaggagattaacggaagagaaaatgcaaactcagttttatactggttcggccacacccttgtgcctacgttcagtccccaagcaacccgcttgagagttccactatcttgtaaattccttttacaagttctaaacaca

SEQ ID NO: 8134 - DNA, 392 bp, Glycine max
agcttccttaagattattcctaattaagctagagcttagctacacatacctctctaatagctaagctcacctccttgagatgagaagctagagcttagctacacaccccctataatagctaagctcacccccatgacaaaaaacatgaaaataataaaaaaaaagtccttattacaaagacaactcaaaatgccccgaaatacaaggctaaaaccctatactactagaatggccaaaatacaaggcctagacgaaggaaaaacctattctaatatttacaaagataagcgggctcatacttagcccatgggctcgaaatctaccctaaggctcatgagaaccctagggcctttccttggatctctagcccaatctacttggagtcttctagc

SEQ ID NO: 8135 - DNA, 253 bp, Glycine max
aacttctgcggggacatcttgacttgcttttcaatctgtcatttaccacaaaatctgccttcttttattttcagattgggaatgcctattacagcacctttgtcaatgattttcttcatgcctcttacgagcagatgtccaaatcgttgatgccatattctgacttcattttctttggacgacatacatgtggaggagtaactggtttctttaggtgtccatacgtaacactggatctttgatctgctgccct

SEQ ID NO: 8136 - DNA, 227 bp, Glycine max
  unsure at all n locations
agctgtggagtttccaagcgccaatacgttttcatctttattccagncaacagatggcttgaatccatcagcgggctttccttctgagtccagcatcttgggatgtacccagcctttgaagacaggtttccaagttctgctatccagtgatttgaggagggccaccatccttgctttgcagtatgtctagtaggttccatccagaattggaggcctgttcactggtc

SEQ ID NO: 8137 - DNA, 421 bp, Glycine max
tataaaactcaagcttttgtgaaaggaagaagatgatgaaagatgagtatgataataattgtaaaggcttaaaggtttctcaaaagttgttcaagaagttgttaaaaatgcaagtcaaggtcttgcttttatagactcttcatgtctggtcaagaaaaccattggaagagttataaccttgagaaaatcatgtcaagagttacatctcttgaccttttattcaaaacttgtcactggtaattgattaccataatcatgtaatcgattacacaatgcattttaagaaaagatgtgactcttcacaattgaatctgaatttcaacattcagatacactggtaatcgattaccaatatattgtaatcgattacaccatttaaaaatcatttgaatgttgcaaattcaattaaaagctttttgaa

SEQ ID NO: 8138 - DNA, 382 bp, Glycine max
  unsure at all n locations
cttggagtttccaagtgccaattcgtcttcttctttagttcagtcttcttctggcttcaattcatcagtgggctttccttctgtgtccagcatcttgggatgttcccagcctttgatgacagctttccaggttctgctatccagtgatttgaggaaggccaccatccttgctttccagtattcatagttggttccatctangattggtggtctgttcactggtcctccttctttctccatgttcatcagaatttatctccctagatctcactctgtgatttcgagtgttggctctgataccaattganattctgataccaggggacagatgtcgtaccggatgtcacgacatcacgcctcagaacatgcagattatatgtgt

SEQ ID NO: 8139 - DNA, 368 bp, Glycine max
ccttgcaagctccaaacaccccatttgaaaatctttctggattaaacttttgatcatcaggcccccagagttgagggtcttgttgcagcactgagattggaatctgaatattcattccttttggaattaggatgccttttaaattaacaccttggagagctgttctaacaacaaaggctgctggcgaataaagcctcaaagtctcttgaatcaccatggtcaactgcaagtgtaacatttttatatatggccttcacagatcagtaagaatgctcatgaaactgggaaatgatcaactataattacaataaaatttgaggcacacaaaaatcagaaaaagcttgttgttaaatgtaccttacatgctg

SEQ ID NO: 8140 - DNA, 408 bp, Glycine max
  unsure at all n locations
agctccttcactccttgactcaaaacgcattgaatgaataatttcacactccacaggctcagaatactaatgcccactcagacttcactattcacaacaacaccatcctgcagcaaggcaaaatttggctgtccttgggtcatgaatncatacccacattatgggaagaatctcataaaacttctgtagggggccatacatgagttgctaagacacttcaccacttgcaagataatctacaatggtcttatatgcgccacgatgtacgccagtatgtggcacactatgacatctatccacatacaaaggaagagactcatagaccaactggcttactgcaacctttccctattccaataacaatgtgggaaaatctctctttatactgcattactggcgtaccacctt

SEQ ID NO: 8141 - DNA, 315 bp, Glycine max
agctggtacctccttcttactacattttaatactggtttgagtcttctctgtggctatcttacaggtttagccccatcctctaaatttatccgatgcatacatgttgatgggctaataccaggaatgtcggccagggtccagcctatagccttcttatgcttcttgagaactgataacaacttctcctcttgctcatcagcaagggaggcagatataattactggaaaacttttactatcatccaagtaagcatattttaaatttgatggcagaggcttcaaatctggtgtgggcggctggataatggtagaaag

SEQ ID NO: 8142 - DNA, 342 bp, Glycine max
  unsure at all n locations
taagcacctgccgcatgcagcggcaacaaagttttcctnacttgagagaagcccgcggctgantcatataaacctcctcctctagatcaccattaagaaaagttgccttcacatccatttgttgcaactcaaggattgaatgaccaactaatgccaaaataataaaaagagaatctttcttagatactggagaaaaagtcggtatgtagtccaatccttttttttgagtaaataccttatccacaagtcttgccttgtatctcacaatgatgcctaatgaatcccttttggtcttaaagacccatctatagtcaatggcctttgccccattaagcaacttta

SEQ ID NO: 8143 - DNA, 408 bp, Glycine max
  unsure at all n locations
tatagttattggagggagtataaaacaatccacaatcttttgtacccttcaagtaacgaagaattctttttgcggcttttagatgacgagaggtaggagcctccgtaaagcgacacacaacttccaccgcatatagaatatcgggccttgtattggttagataccttaaactccccacaagactcttgaagaccatggagtctaccttctctccttcatcaaactttgataacttcaagccaccttccatacgtgtgttcacgggattgcaatctagcatactaaatttcttcaacacttcttttgtgtaacttccttgtgagacaaagataccattctccattngcttcacttccattcccagtaatatgacatgagtcccatatctatcatatcaaattcacgaga

SEQ ID NO: 8144 - DNA, 207 bp, Glycine max
agctgtacaaatgaacaattctcggagattcatgcctctaccgccgcacaaaacagctatcggatgtcgctggatatataagatcaaatatcgagccgatgggtccatataaagatacaaggcacgcctgtgtgccaagggttacactcaaacggaggggttggactaccttgacaccttttcttcggtagcaaaactcacctccgt

SEQ ID NO: 8145 - DNA, 386 bp, Glycine max
  unsure at all n locations
agctntagatactgaactgtaacccacatagatatcgggttcaactttcttggctagcttgtctctcttaatttgaggcacataagtaaagcgcaaacatccaaatactttaaaaaatttcaagaagggtttataaccataccaagcctcaaaaggagtcttctcatctactgctttggtgggaagtctatttatcaaaaatactgcagtgtttgtagctttcgcccaatatgccttaggtaactctttctcatgaaacatacatctgaccatttccaagattgtttgattctttctttcactaaccccatnttgtttaaaggtgtaagaagctgttaattgatgttcaatgtctgcttcctcacaaaacatgatgagttatgctg

SEQ ID NO: 8146 - DNA, 331 bp, Glycine max
cgcctgaatcagacatacgagtgaaaagttatgaccatgtgaattgtttgagagctttctacggataaatttgagcgactcgatgtattatacgcctgaatggaagctcatcgtaaaaagttatgaccatttgaatgtcttgagagcatccgttgttcattttttagcacctctatatgtgatgaaccttaatcggacctacgtgtgaaaagctatgaccatttgaagttctcgagagcttccatcgttgaacttagagcgtctctatatattatacgcccgaatcggacatccgcgggaaacgctatgactatctgaatctctcgagagc

SEQ ID NO: 8147 - DNA, 397 bp, Glycine max
agtgcctgtatattgatgcgcctgaatccgacatccgagtgaaaagttatgaccatttgaatttctcgagagcttcctatgtttaattttgagcgtctcgatatattatacgcctgaatcggacctcagtgtgaaaagttatgaccatttgaatttcttgagagcatccgatgatcattttcgagcgtctctatatgtgatgaaccttaatcggacctccgtgtgaaaagttatgaccatttgaatttctcgagagcttccgttgttcaatttcgagcgtctcgacatattatgcgcccgaatcggacatccatgggaaaagctatgaccatttgaatttctcgagagcttccagtgttcaatttcgagcgtctcgacatatgatgcgcccgaatcg

SEQ ID NO: 8148 - DNA, 383 bp, Glycine max
tgacaggcaggtgcacatgtctgcaatgtatttggcttttcaagtggacagtgctactactttttgcttcttggaactctaggatatgggagaccctaacaacaggtgaacttatcccacgatgctccttttgtctactagatcaccacacctgtcagaatcatagtaggctacaaggtgtaggctatcatctcccttagtatgatgaggaaacaaaatgccatattcgagtgtccctctcagatacctcatgattcttttagctacaatcaagtgtgggtgtcttggatcactcataaatctgctgaccaagccaacactgaaagccacttctggcctactgtgacagataaactcaggctaccaacaatctacctaaacat

SEQ ID NO: 8149 - DNA, 410 bp, Glycine max
  unsure at all n locations
agcttgttcttaagcccttttaccactccttctctccttaactcattcttcatgtgcttgaagagaattcaacaactcccccaccttcattgaatcaaagatccttggattctttgattgccacaataatgtgattaaaagaggagtcaatgttctcaacaccttgccaacaatttgttggtctaacaacacttcattgcaggctttcattgaattgattaatgtttggatttagttgaaataattaacaatggactcttgatcactcattgacaataattcatattgtcttcaaagatcttgaagcttcacctttntggttttggttgcacctccataagctttgttcaagatgtcccaagcttcttttattatcatagcctttgaagtttttccaaaatttgcaacat

SEQ ID NO: 8150 - DNA, 325 bp, Glycine max
  unsure at all n locations
agcttgtagggttaaagtcttacgatngtacgtgctcatgcaacaattgttagccggggctatacaagacatcttgccaaacaaagtcaggttcaccataactcgcctatgctttttcttccatgctatatgtagcaaagtgattgatccattaatgtttgatgagttggaaaatgaggccgcaattatactgtgccaggtggagatgtattttccccctgctttctttgacatcatgattcacttgattgtgcatctggtcagagaaatcaaatgctgtggtcctggttatctacggtggatgtacccgggtgagcgatacatg

SEQ ID NO: 8151 - DNA, 401 bp, Glycine max
  unsure at all n locations
ncaagcttgagcaaatttaaacgactttaatttttgactcggatgtccgattgtgtcctgtaatatatcgagacactcgtaatcggaaacagaagctctgagcaaattcaaacgacaataacttcttactcggatgtccgattgaatcccgtaatatatcgagacgctcttaattgaaaatagcagctctgagcaaattcaaacggcaataacttttaactcgggtgtccgattgtgtcccgtaatatatggatacgctcggaattgaaaacagaagctctgagcaaattcaaacgacaataacttcttactcgaatgtccgattgagtcccacaacatatcgagacgctcgtaattgaaagcaaagctttatcaaaatcaaacgacataacttttgactc

SEQ ID NO: 8152 - DNA, 404 bp, Glycine max
ttagcttcagatgatgcagatgggtttgtagctacctcatgcactcctctaatgtttatggcatcatttctggcgctaaactgctgggagttggaagccatcttctcaattaaatttctggcttgagcaggagtcatgtctccaagggctccaccactggcagcatctatcatacttctctccatattactgagtccttcataaaaatattggagaagaagttgctctgaaatctgatggtgggggcaactggcacatagtttcttaaatctctctcagtactcatataggctctctccactgagttttctaatacctgagatatccttcctgatggctgtggtcctagaagcagggaaatttttttctaagaatactctcttaaagtcatcccagctcgtgat

SEQ ID NO: 8153 - DNA, 333 bp, Glycine max
  unsure at all n locations
agcttggaacaattgattactgtgtgtattttntcctcgncagataacttgagcttataagcaacaggaccaattctttcaataacttggaatgggccatagaatcgtttggcaagtttggcggaagctgatgaagttcccttggtagaagactgtcgatagggtcgtaaccggagaagaacccaatcgcccacctgataattcacctcctgacgcttgtgatcagcttgcttcttcatctggtcttgtgcctttagtaatttcttgcgaatggtttgaaaagtagcgtctctatcagttaacaagtcctcaacagcttcaatgtttgacgtg

SEQ ID NO: 8154 - DNA, 367 bp, Glycine max
  unsure at all n locations
ntccctctttgaacaaatacccctcagccaaatagaattcatcttgggcctttttcccaaaactctcgtaaatgggagagaaatgttcatctaaagcatacaagtccctaatgttaccaaatcctaaagtttgagctcctagggagcaaaacaatgtgtgtctcctagagagggcatcaactaccatattttcttttccctttttgtatttgataacatatggaaattgctctatgtactctacccattttgcatgccttttgtttaacttgctttgccctctaatgtacataagtgagtgatgatcactatgaatgacaaattccttggaaacaaggtaatgttcccaagttcggagggctcttat

SEQ ID NO: 8155 - DNA, 400 bp, Glycine max
aagctccttcaactgcacaaggctcttaatatttgattatttccttgtggaaccttcacccgtcgaagacactgacaaaaacttatcttctcctttttggaaaaagtatgacaagctgggggcaagtaaattttcttcccatcagaccttggatgcaactgtgatcgtatccccatctcagctagatcttgacgggtattcaagccattcttcaccttgccttgaatgttaaagagcattccaatcacactgtcacatacatttttctccacatgcataacatcaatacaatgtctaatgtctatatcagaccagtacaaaagatcaaagaaaatggacctcttcttccatatgcaagtcttacttttatcctttgtttggggttttccaaatacagtat

SEQ ID NO: 8156 - DNA, 379 bp, Glycine max
agctataaacagacattgcttcatcttagtcgccattgactacttcaccaaatgggtcgaagcagcttcatacgctagtgtgactgggagcatggagattagattcatcagaaatgagataattttccgatatgggttgcccaggaaaattatcaccgataatgccaccaatctgaacaataagatgatgaagaagatgtgtgaggattacaaaatccaacaccataattctatgccttataggcctaagatgaatgggttagttaaggctgctaataaaaatatcaagaagatagttcagaagatgactgtgtcatacaaggattagcacgagatgctccccttttcattgcatggttatcgaacttcggtgcacatg

SEQ ID NO: 8157 - DNA, 301 bp, Glycine max
  unsure at all n locations
tggatatgcgagacatcttgccgaacaaagtcgggttagtcataactcgcctgtgctttttcttccatgctatatgtagcaaagtcattgatcctatcaagtttgatgagctggaaaataatgtcacaattatactatgccagttcgagatgtattttcccnctgctttctttgacatcatgattcacttgattgtgcatgtggtaagagaaatcaaatgttgtggtactgtctatctaccgtggatgtacctggttgagccatacatgaagatcttaaaacggtgtacaaagaatctata

SEQ ID NO: 8158 - DNA, 410 bp, Glycine max
agctttttattttcagtagatgaagatgtatctgtggccacctcatggactcctctaagaacaataacatcatttcttgcactgaattgttgggagttggaagccatcttctcaatcaaattcctagcttcagcaggggtcatatcaccaagagctccaccactggcagcatcaatcatactcctctccatgttgctaagtccctcatagaaatattgaagaaggagttgctcagaaatctggttgtgaggacagcttgcacacaatttcttgaatctttcccagtactcatacaagctctctccactaagttgcctgatgcttgaaatgtcttttctgatggcagtggtcctagatgcaaggaagaatttctccaagaacaccctcttaaggtcatcccaactggtaat

SEQ ID NO: 8159 - DNA, 357 bp, Glycine max
  unsure at all n locations
tctaaactntgtacaagaatgaagctctgataccacttgttagacaagtggcctcagatatcttaagaagggggggttgaattaagatatcccaaactgtttcccctaattaaaaatctatttcactttttactcaagttatgaattcccttaatgacaatcttcttaaatattaattcaaatgaagcaacttgaatatgaatataaagcaataataaataaaggagattaaaggaagagaaaatgcaaactcagttttatactggttcggccacacccttgtgcctacgtncagtccccaagcaacccgcttgagagttccactatcttgtaaatccttttacagttctaacacac

SEQ ID NO: 8160 - DNA, 330 bp, Glycine max
agctttaggcgaccaactttgatatcagttttgtaaattaagtcacatacgttaactaaaagatcccacaaatcactattttctttaaagtagaaaatcctttctcaatttacgttttaagcttcattgtatgttaggctgacattgaattggtgctcatagaatattaattagaatattttaaaaaaattattatataaatcacgagacattataaaaaaaattatgattaacatagattttcatctttcaataaaaatatttagactctaatttttttaatcgatatccttaaaataataatggtgagttgtattttaataaaaagat

SEQ ID NO: 8161 - DNA, 415 bp, Glycine max
  unsure at all n locations
tagccctagaaggggatggaccttttatgttttggagatgatcaataacaatgcctataggttggacctcccagaagagtatggagtcagcaccacttttaacatttctgatttaattccttttgcaggtggagctgatattgaggaggaggaactaacagatttgaggtcaaatcctcttcaaggggaaggggatgatgcaatcctccctaggaagggaccagtcactagagccatgagtaagaggctccaagaggcttgggctagagctgctgaagaaggccctanggttctcatgaacctcangatagatttctgagcccatgggccaaggttgggtccaattatctttgtacatattagactagaatgtcattatatttggtccttgtatttanggctccataatgtatct

SEQ ID NO: 8162 - DNA, 406 bp, Glycine max
  unsure at all n locations
ntacaacaaatagttgagaaaaaccttaaaaccccattttttccaactatgcaactaanacattcaaagctttacaaagtccatactaatgtctacctaaggtgtagatgggatgggtaagggtgtgtatagcccatgaggcatcaccctaaacttggcttgtaaacaagccacacacatagtgcaatgcttatggacactnttcttcatatggggccaataaaacttttctttgagtaagacaagggtcttgtctatcccaaagtggcccatgagcccacccttatggctctctntcacaagtaatttcctaatggatccttgnggtatgcaaagctttccctctctgaacaaatacccctcagccaaatagaatccatctcgggcctttttcccacaactctcg

SEQ ID NO: 8163 - DNA, 392 bp, Glycine max
  unsure at all n locations
ttgcatgctanagcgccacttgacgcggtgcgccaaattcaaacgctgttgcctgttgtggccggctatatgaatatgctatgccgtcacgactcaaaaccaccgccaatttatgtacttgcttatccttcaatcactctataaccatgataacaaaaattaaaggttattgagctgtttaaagatattgattaagaaatttaaattacaaatatttaatttaaatatgttgcttatactttgaaaatatattatttttaaattattattttaaatttattcttgattatcttaaattttggttatatcttaacttagcagtttattgtcaacgtaataatctaattattaacattctgcactattctttaatatttaaattatttaaaaat

SEQ ID NO: 8164 - DNA, 394 bp, Glycine max
  unsure at all n locations
agcttgttacagtctgatgatatatctattctgacctctntgaatgcagggaattggaagtttttagatactacaaatggttctaccggatttccagacatcagaaaaataaatggaaattctgtaattgaattagttagtatgcccacaaagataactggtgtacattatgtgcaggtgagttgttgaactatatgactagtttcagaagaaagtcagctttcacatttgatacagtttcttatttgttctcttatattttaaaataacaccagcttctaatgaagtagcttctaagttctctaccttttggtatttaaatactatctacttacaaagggccctttaagttagtgaacttccagctctgtcctcttgatatgccgaagaatta

SEQ ID NO: 8165 - DNA, 427 bp, Glycine max
  unsure at all n locations
agctngtagggttaaagtctcacgattgttacgtgcttatgcaacaattgttagccgtggctatacgagacatcttgccaaacaaagtcaggttcacgataacttgcctgtgctttttcttccatgctatgtgtagcaaagtgattgatccagtaatgtttgatgagttggaaaacgagaccgcaattatactatgccagttggagatgtattttccccctgctttctttgacatcatgattcacttgattgtgcatctggtcagagaaatcaaatgtcgtggtcctgtttatctacggtggatgtacccggttgagcgatacatgaagatcttaaaagagtatacaaagaatctatatcatccgaaagcatctattgttgagaggtacattgcagaagaagccattgaattttgttcagaatactt

SEQ ID NO: 8166 - DNA, 431 bp, Glycine max
agcttcttcctcgaaccaactcgccgacatcttcaccttttgcttgtctccagtagtttttcaaggtctctgcaacaagctgggaatgatgaatatacattcccagcttgcggggggctcttagcagcatcacaagagttagttagaatagttagttagttagctagtatggctaggtttctgttgtaaccaactatcaagcatattccatcttgtataaattctctgctatcattcaataaagcttcgagatgttattctgatcatatgatacattcacgttgctcatttctgctatatggctgaatttacttctaatatataattaaaattaatactcccattaattgattaaaataatcatcaattacagattgtcgagtttaggtaaagattattaaaaatatggcagttgttaccaaattatcaat

SEQ ID NO: 8167 - DNA, 428 bp, Glycine max
ccttggggaagcattaggcctgcatcatctccatgtgttatgatgatgccaccaacaaaacgtgtactaattgcccatgatgtctgccaaacatattcccttaacccattatcgtctgtgaactgcacaagcacacattttgagcaactgcatcctcatcaaaaggattatattaatatttaaaaatatatatatataaaaaaaacagtacatcagacctgtgttccaaaggcacgggcaaagttttgcccaaggttatgactggttcctgcttgtaatgctttcttgtcacccatcatagcctcaattgtataggtcttacaagcaccagcaaatgtttccactttagatattcgacctgtaacaacaggtattgcagcttgctcataagcaaatctggtatagatgtcaatcatctgtatagcctg

SEQ ID NO: 8168 - DNA, 383 bp, Glycine max
  unsure at all n locations
tgtntaccccatgttgagattgcttacaatagagctgtttatagcaccactaattgttctccttttgaagttgtttatggttntaacccactaactcctcttgatcttttgcctatgcctaatgtttctgtttttaagcataaagaatgtcaagcaaaggcggactatgtgaagaagcttcatgagagagtcaaagatcaaattgagaggaaaaataaaagctatgctaaacaagccaacaaagggagaaagaaggttgtcttctaacccggagattgtgtttgggtgcacatgaganaagaaagggtttcggaacaaaggaaatcanagctcaacccaggggagatggaccatttaagtgcttgaaagaataatgacaatgc

SEQ ID NO: 8169 - DNA, 372 bp, Glycine max
agcttctagatgagttatgtctgcgaatctgacatcctgtgaaaagttatgaccatgtgaatttctcgagcgcttccgttgtttaatttcaagcgtctcgatattttatgtcctcaaatcagacatcggagcgaaatgatatgaccattcgaatttgtcgagagcttccgtttttcaatttcgagcgtctagatgagttatgtcaccgaatcagacatctgagtgaaatgttatgaccattcgaatttgtcgagagcttccgatgctcaatttcgagcgtttagatgagtaaggtcaccgaatcggacatcctgtgaaaaagatatgaccattctgttttgtcgagagcttccgttgtcaatttcgagcgtc

SEQ ID NO: 8170 - DNA, 432 bp, Glycine max
taactaatcaaatgggacaatgggctacgtatttaaattaacaacagtcccagaattgtgaccgattaccttctcaatctgtccaaaatcccaaaaatgtgagtgtgattgcattgaggtcgggaaagcagtgtcaaagacctcaaccagtagcatcttgctcatccgcaaatgaacctgcccaacttcactctactccagaaaaagatgatgacaaaaatttaacgagtaagttacctaacaatttatatgcaggtgaatctttcactggtaattctgatttacagaagcagcatatccctctttcattccctccaagagcaattttcaacaaaaaaatggaagaggcagagaaggagatcttggaaacatttagaaaagtagagggtaacatacctctgctggatgcaataaagcatattccagatatgc

SEQ ID NO: 8171 - DNA, 358 bp, Glycine max
  unsure at all n locations
tgtacgactgtgtctcgtgtatatctagacgctggaaatagattacagagggtttgatcaaattcacaagacaatcgctattgactcggaggtccgattgagacccgtcatatatctagacgctcgttatagataacagaggctctgatcagactcaaacgacaataactnttgactcgggtgtccgattgagtcccgtaatatatcgagacgctcgtaattgaaaacagaggcactgagccaattctaacgacaataactttttactcggaggtccgattgagagctgtaatatatagagacgctcgtcattgaatacagaagctctcagtcaattctaacgacaataactttttac

SEQ ID NO: 8172 - DNA, 280 bp, Glycine max
agctttgagcaaattcaattgacaataatttttgactcggatgtccgattgagtcctgtaatatatcgagacactcgtaattggaaacagaagctctgagcaaattccaacgacaataacttcttactcggatgtccgattgaatcccgtaatatatcgagacgctattaatggaagatagcagctctgagcaaattcaaacggcgataacttttaactcgggtgtccgattgagtcccgtaatatatggatacgctcgtaattgaagacagaagctctg

SEQ ID NO: 8173 - DNA, 444 bp, Glycine max
  unsure at all n locations
tatcatcacttattagccttattagagatatttgattgttggaccatatgaaacaatgttttttgtgtatttaattttccaacaaattttctaactgagtcaagatggtattttatattccaaatttcaagtaaaataaaaatatttgagcttccaaggatatatgatggctcatggctgccacaaatatttcatgcttaacatctttatacatgaaaatattggtagcacataatggcttgagatctgttaggaacaaccaccgtgagctcatagcagttgtttatctttaagtaaacattgtacttcatgctcttaccttngctacacagtcaaggagtggactgagcttgaacaccctaacctttttcttcttgttgcttttattatggcacaactggtagttgtaatgaagtaaagttctctttctaatattggtactct

SEQ ID NO: 8174 - DNA, 364 bp, Glycine max
  unsure at all n locations
agctnggacccgaaaatttaaagaatttatactcattaagaagactcagctcagccacaacgttgcaagattcagatttgcccttcctactccttcttcagtattaggccttcctgttggaaaaaacatacttgctaggtttaatttggaaaagattttcctgatgttgctctaatactatatttaacttatcccgttgaataaaacaccataaactttaaatacaagaattataataataaagaaaaagagatgtaaaactattttatattaactgttaagcagggggaaagatagccaaggagaggaagttatgagatcatatactccaatcacgttggattcagatattggctacttcgag

SEQ ID NO: 8175 - DNA, 381 bp, Glycine max
agcttatcctctagggatccctacatatgttcattttaatctccaagcgtgagtaactcatcccttacctctaagtgacctcgcgtgtgcagtttggcagtgatagcaacgtctctagctaagattcctcaagtttttcctctggttgttctgcttggttttccaagcattagagtgaacgagaatgaattacaacttcaatttcactgtctccttgcgaggggaatttctctttctactaatattatttcgaaaattccaattgagtgaatatgcgaaaatgagttccgaaggtggtatccaaatttcaggataatccaacggttaaggagtctaggatcgtagttttactacaatgggtttggatgtatatgtgaaaag

SEQ ID NO: 8176 - DNA, 418 bp, Glycine max
agcttgcatgatttacatctccctctttctcaagcaaattcttcttgatatcatcaaaatcttcatgatttacattctccccttttttgatgatgacaaccacctataggttaggagcaacaacaaagaaaatatctatttgcatatagtttactcccccttggttttacattgattgcttatatgagacaattgaagatttcatatttttcatatataaaaagttatctcataaaacaatagatattttgcaataaactctcttcaagagaagaatattacaataaagatcatgtaggaatccttatagattttgcaagtgtttggccaaggatttcttttgagagagcatttgacaatgaagttcttttggaatctctctcattgtcttttgagaggataagacacttttgtcaag

SEQ ID NO: 8177 - DNA, 323 bp, Glycine max
tcagttgcccattggcgtaaatgaggatgttaccgtcttttatgactctgtggagaggcaggcagaggatgtaggaaagctcgttgagcgcgtctttgagaaccacagagatgtcaggctccataaaaccgttggggtgggagtgacaaacgatggatatatgtgatctcttggccatgaatcacatgcctccccacaggcaacgatacagtgtgaaggaacaatgtgctctgaggatgttggggtaggaaccgagggatggggatatgacctctctacggacatagtctaattcaggcccagagccgttcactttgatggat

SEQ ID NO: 8178 - DNA, 343 bp, Glycine max
  unsure at all n locations
ntgacaagacagtacacactgctgactgcttcaacatgtatcaatatggaaatctactctaaagatacatctgataagacccataattataacactccccctcaagctggagcatatnaattatatgcaccaagcttggaacatataaactgaattctaggcccccttaaggacttangcaaaatatatgctggctgagcatcggaattcatgaattcagagacagtctctttatacagtaacttcttccgaataaagtgacagccaatctctatgtgcttggttctctcatggaagaccggatntgaagcaatatgcagagcagccagattatcacaataca

SEQ ID NO: 8179 - DNA, 298 bp, Glycine max
agcttctcagatctggtcatggaaagacttgtcaactgccttcattaggaagtaccaatacaacacggatatggctcctgatcggaaccaacttcagagcatgaccaaacgggaacatgagtccattaaagaatatgctcaaaggtggagagacctagctgtccaagtcatcccacctatgacggacagggaaatgatcacaattatgataaatacgttgcctacgttctactacgagaagctgataggatatatgccggctaactttgcaaacctcgtctttgccggagaaagaatc

SEQ ID NO: 8180 - DNA, 443 bp, Glycine max
  unsure at all n locations
tgagcacctttttcctcacttcttccttcattgatgggttgagccttctctacggttgtatgattggtctatagtctccttccatcattttcttgtgcatgtagttggcagggctgattcctttaagatctaatatgtgccacccaattgcttccatgtgtcccttgaggacctttaccaacctattctcttcctctgctgttagctcactgtgatcaccacaggcttggtctcgctctcctccaagaacacatacttcaggtggttgggtaggatcttcaactccaccttggtcttctcggatggactcccactttntaattcttcaaagctggtcccccttgcacgaatgttttcttcatgatctaagtctttcaagaaagtgctcagatcctttttctcttcaatatgtagatgatccacaacatngatcaaaactttct

SEQ ID NO: 8181 - DNA, 449 bp, Glycine max
  unsure at all n locations
tatctgagtaatgatgatgagacattagcttttatattgttgcattgaatgttgcttctcttacgatcctccttttttcttctttggccataactatagcctgctctttgtcaccgctctgcactctccacttcacacactctgtttccttacaaacactttgcatcctatcaattatatcgcttttaaaatatattgaataaaaaatatgcttaattttgttctaaaatataataacagatacatcccttttcatgatataagaagatttatatgaaattntatttaaaagtttaatctctgtaaaaaacattatatcattaatcaatcatgaatcttaattgtcagcataacttataaaataattattataaaacttaataatttgttttcagtgtatttattataaaaaataataaatgtatcatatatgataaatttatgattaa

SEQ ID NO: 8182 - DNA, 314 bp, Glycine max
tagtcctttcatgaaaaactgggtttgaggcaatatgaagagcagtctgattatcacaatacaactttattggcgactcttcacaaaaccttcaattcctacaaaaactgttaattcacatgagctcacaagtaaccatacacatagatcgatattcagcttctgcattggaccgagcgaccatagtctgtttcttgcgttttccaagaaaaagatttccttcaatgaagacaccatatcctgatgtagaccttctatccatgggacaaccaccccaatcagcatcacaatattccgatagttgtgtattaccc

SEQ ID NO: 8183 - DNA, 391 bp, Glycine max
  unsure at all n locations
nggtgacctttcacactatatccactcaaattcccattatctggaaagtcattaatggtgcaaaatatcatcgcatgcaacctaaaagtctcaccctgatttgcatcatacacatcaaccccgtctacctaaaacttacgcatgtcttcaatcaaaggagtaaggtacatatcaatatcgtttactggctgtcttggacgtgatatcatcatagacaacataatgtatttgcgcttcatgcataacgaaggaggaaggttgtaaatcattagcaacacacgccatgaaatgtgattagtggacaagttaccaaatggattcatgccatccgaagaaagaccaagtcgaaggtttcttggttcggctccaaattcaagatacaagtgatcaa

SEQ ID NO: 8184 - DNA, 463 bp, Glycine max
  unsure at all n locations
ggtcgcanatntaattacagaagcaggtgcaaatcgtgtacttgcttgtgacctccattctgggcagtccatgggctattttgatattccagttgatcatgtgtatggacaggtaacagatgattatgccatattgtcattacaatataatagcatggaagaaaaaaaacatttaatctattaaactcaaacaaacaaacatgccttggatatgttgtatatttgtaattgatagttactccaataatttgttaattcattgtattgatgcatctctagtttgaattgaaatgaagtgacaaccttctagtgacatgccaattttactgttagtaggtatataattatttaaatttccaatttctgttgtaaagaaacttcaaatctagtattgtttagatgtgctaaaatcttctattgttnttttttcctggttcagtcactcgtggactctaatgttttg

SEQ ID NO: 8185 - DNA, 345 bp, Glycine max
atgtgctattccaagttcattaatcataccttttagccagattgattccttcactccttcaactagggccatgtattctgctttagttggggacaagaccacaacctaattgttgatttgctttcaaactgattgttgtaccaaacaaagtaaacacatatcctgttaaggacttccttgtgtctacatttactacaaaatctgcatctacataacctgtgactgctgccttgtgtgctgtcttcttgtaccttaaaccagctttcaaagatccatttagataccttaatggccacttcacagccttctaatgtgcgctgtccggatcttccatgaatctactta

SEQ ID NO: 8186 - DNA, 359 bp, Glycine max
  unsure at all n locations
agcttatcctctagggatccctttatatgttcattttaatctccaagcgtgagtaactcatcccttacctctaagtgacctcgcgtgtgcagtttggcagtgatagcaacgtctctagctaagattcctcaagtttttcctctggttgttctgcttggttttccaagcattagagtgaaggagaatgaattanaacttcaatttcactgtctccttgcgaggggaatttctctttctactaatattatttcgaaaattccaattgagtgaatatgcgaaaatgagttccgaaggtggtatccaaatttcaggataatccaacggttaaggagtctatgatcgtagttttactacaatgg

SEQ ID NO: 8187 - DNA, 346 bp, Glycine max
gctgaaatgaacacgaagctctcaaaaaatctagtgggcctaaattttcacacaaatgtcccatatcgggaaataatatatcgagacccccgaaattgaacaaccggaacctctcgagaaatttgaatgggcataacatttcactcggatgttcgatccggggacataaattatcgagaccctccaaattgaacaaccgaaactctcgacaaattagaatggtcctaacttttcacgcgaatgtcgattcggggacataactcatctagagctcaaattgaacaaccgaagctttcgagaaatttgatggtcataagtttcacacggatgtccgattcgggaacat

SEQ ID NO: 8188 - DNA, 353 bp, Glycine max
agctgggatgtctactagttttgtcaggaatatatatatatatatatatatatatagcatgttgagagacaaatgtggggaaaagttatgctggttcttgaagaatccatgccatatggatgctacagagtgaaagggacttgttttagtgtagagagatgaagaaagttctacgttaatttggaatatgatttggtgtttggaaggagaaccgtaaaagagggtgcaagagttttccaacgtgttccagaggcttcatgtgttactttgtcaacatattggtcatattcatcggactacagcttttctctttaagtaatgttttgggcaatttcacactaagttgggattaa

SEQ ID NO: 8189 - DNA, 318 bp, Glycine max
tcagagatggttttgaagtttcttctgccatcttttgccacggtgacattaggtgtgggtttctcatttggaccgattaactcagcaaggccggcccaaacaggaactggaccaacccatgcaagaatggagcctgcagcccaaaaaagaactgggccaggaacaacaccaggagcaagagcagcacctgcagtattaggagaaacaccaggagcagaagcaacacctgtagtagtaggagcaacaccaggagcagaagcagaaccaaaagaagaagaaccagaaccaaatatagacccaaaaccagcaccaacagca

SEQ ID NO: 8190 - DNA, 332 bp, Glycine max
tctcgatatatgattcgcctgaatcgaactttcgtttcaaaatttatgaccatatgaatttctcgagactattcgttatacaaattcgagcgtctcgatttattatgtgcctcaatcggacctccgtgtaataagttatgaccatttgagtttctcgagaagcttcgctgttcaatttcaatcttctcgatatactatgcgcctgaatcggactcttgtgggaacagttatgaccatatgaatttctcgagagcattcggtggtcaattaaaagcgtctcgatattttatgcgccctaatcagaccttcgtgtcacaagttatgaccatttg

SEQ ID NO: 8191 - DNA, 350 bp, Glycine max
agcttctcgttatattatgtgtttgaatcggacttccgtttgaaaaattattaccatttgaatttctcgagagctttggctgttcagtttcgagtgtctcgatatattatgcgcctgaatcggacttttgtgtgacaagttatgaacatttgaatttctcgagacctttcggttttcaattaagatcgtctcgatatgtgatgcgccagaatcggacttccgtgtgacaagttttgaccattggaatttattcgagaccttccgatcttcaatttcgagggtctcgatatattatgtgcctgaatcggactttcgtgtgacaagttatgaacattggattttctcgagac

SEQ ID NO: 8192 - DNA, 384 bp, Glycine max
tcttagtttcagatgatgcagatgggtttgtatctacctcatgcactcctctaatgactatggcatcatttctggcgctaaactgctgggaattggaagccatcttctcaattaaatttctggcttcagcaagagtcatgtctccaaaggctccaccactggcagcatctatcatacttctctccatattactgagtccttcataaaaatgttggagaagaagctgttctgaaatctgatggtgagggcaactggcacatagtttcttaaatcgctcccagtactcatacaagctctctccactgagttgtctaatacctgagatatctttcctgatggctgtggtcctggaagcagggaaaaaattttctaagaatactctct

SEQ ID NO: 8193 - DNA, 342 bp, Glycine max
agcttaacattgtaccactttttggtgctggaactacttcacatggacttgatggggcctatgcaagttgaaagccttggaggaaaaaggtatgcctatgttgttgtggatgatttctccagatttacctgggtcaactttatcagagagaaatcagacacctttgaagtattcaaggagttgagtctaagacttcaaagagaaaaagactgtgtcatcaaaagaattaggaatgaccatggctgagagtttgaaaacagcagtttactgaattctgcacatttgaaagcattactcatgagttttttgcatccatttaaccacaataaaatgtgttttttg

SEQ ID NO: 8194 - DNA, 348 bp, Glycine max
agctttctggtgtacctgaagatgctattaggctcagcctgttttcattttctttatttggggaggccaagagatggttgcattcattcaagggcaacggtttaaagacttgggatgaagttgttgagaagtttctaaaaaaatatttcctatagtctaaaactgcatagcgaaaagctataatttcttcattccatcagtttcccgatgaatctttgagtgaggcattagaaagattttgtagcttgctgcggaaaactcccactcatggtttttcagagcctataaagctgaacatcttcattgatgggttatggccgcagtcaaagtatttactcgatgcttctg

SEQ ID NO: 8195 - DNA, 389 bp, Glycine max
ttggagtttccaagtgccaattcgtcttcttctttagtcctttcctcttctggcttcaattcatcagtgggctttccttctgtgtccagcatcttgggatgttcccagcctttgatgacagctttccaggttctgctatccagtgatttgaggaaggccaccatccttgctttccagtattcatagttggttccatccagaattggtggtctgttcactggtcctccttctttctccatgttcatcaaaatttatctccctaggtctcactcagtgatttcgagtgcccgctctgataccaattgaaattctgataccaatgccagatgtcgtacaggatgtcacgacatcacgcttcagaacatgcagaatatctctgagtgtatgaa

SEQ ID NO: 8196 - DNA, 366 bp, Glycine max
tctacagaaggtttgttcctaatttctctactcttgcctcacctcatcctactaagaggaaatgcaagcttagtcccagaggtgatggacctttttaggtcttggagatgatcaataacaatacatataggttggacctctcagaagagcttggagtcaacaccacttttaacatttctgatataatttccttttgtatgtggagctgatactaacgaggaggaaccaacagatttgaagtcaaatcctcttcaagggggaggcgatgatgcaattctacctacgaaaggaccaatcactaaagcaatgatctaaacgatctaaaatgattgggctaaactgctgaagagggccctaggtctcatg

SEQ ID NO: 8197 - DNA, 379 bp, Glycine max
  unsure at all n locations
ttacaaaaatagtttgagaaaaaccttaaaattccattttttccaacatgcaactaaaacattcaaagctttacaaagtccatactaatgtctacctaaggtgtaaatgggatgggtaaaggtgtgtatagcccatgaggcatcaccctaaacttggcttgtaaacaagccacacacatagtgcaatgcttatggacacttttcttcatatggggccaataaaacttttctttgagtaagacaagggtcttgtctatcccaaagtggcccatgagcccacccttatggctctctntcacaagtaatttcctaatggatcctttgggtatgcaaaactttccctctttgaacaaatacccctcagccaaataaaatcatc

SEQ ID NO: 8198 - DNA, 270 bp, Glycine max
tgcaatatatttgcaaccttttcgatgccatttaacgttatcaatggaccggaaacaacatcgcgtgttactaaattcctcatgtaaggccctgcatgatcccacaaatatcgcgcttcttatatccctctcctcttaaaaaatgaacctgctgacaaaaaaaatatttaagtatttttacccctttaatactatccttcccattggatagtaccagaaatctttattgaactcacgcaatttgacacaaaaagacactgtcattctcat

SEQ ID NO: 8199 - DNA, 343 bp, Glycine max
tgcatgatttacatctccccctttctcaagcttattcttcttgatatcatcaaaatcttcatgatcccgactcgttggtggaggatgcatgaatgacaatcaattcatggggctccgaataaaagtggataatggaggatatgcgaagagcgctaggcaatcaattcgcggttctcccgactcgttggtggaggatgaatgaatgacaatcaactcctggggctccgaataaaagtggaaaatggaggatacgagaatagcgctaggcaatcaattcgcggggctgcagactcgatggtggaggatgcaagaatgacaatcaacttatagggctacgaataaa

SEQ ID NO: 8200 - DNA, 360 bp, Glycine max
tgtcatttcatctccgctctttgtttagtggtatctgagcaaatcagccaacttggacctgttctgactatcctcgtggatacccaacttcaaattcttcgaaaaagcatcataaaacttgttgtaatcttccttgttctccgcaatttcattgaacatctcaatgcacttcttcacgagattcttcctgatcaccttcaggatcttgttttggtgcagcatctcacgaaagatgttgagcggcaagtcatcggagtcaacaacacctttcacaaatccaaggtactcaggaatgagctcctcacaattgtccattataaacacccttctgacataaagcttgatgttgatcatcttctt

SEQ ID NO: 8201 - DNA, 349 bp, Glycine max
cctgctagcatgcaagctctggagttttcaagtgccatattcgtcctcttctttagaccagtcttcttctggcttcaattcatcagtgggctttccttctgtgtccagcatcttgggatgttcccagcctttgatgacagctttccaggttctgctatccagtgatttgaggaaggccaccattcttgctttccagtattcatagttgcttccatcaaaaattggtggtctgttcactgagcctccttctttctccatgttcatcagaatttatctccccagatcttactctgtgatttcgagtgttggctctgataccaattgaaattctgataccaggggacagatg

SEQ ID NO: 8202 - DNA, 173 bp, Glycine max
  unsure at all n locations
ttcacacggaggtctgattcangcacatcatatatcgagactctcaaaattgaacaatggaagctctcgatatattaaaaattgtcataaactttcactcgaatggccccattcagggcccatcagatatcgagacgctcgaatttgaacaacggaacccctcgagaaattca

SEQ ID NO: 8203 - DNA, 297 bp, Glycine max
tcagctgatcattccctctttctctgtttcaatgataagtcatttactgcacttttggtgtatgttgatgatataattctaacagggaatgatataatggctatcaatcgtattaccatatttatggaccaaaccttcaagattaaagatcttggcactttaaaatttttccttggcatggaggttgctcgttcccagcaggcatccatctatgtcaaagaaatatggtctagatattctctctgattctggaatgcttgcttgccgtccagcttaacacctatggattggactact

SEQ ID NO: 8204 - DNA, 361 bp, Glycine max
tatacccatgagtattatttttatgatcctcataactgggagattgagaaacatagacttcctcttcaatgtattcttttaaaaaagcactcttcacatccatttggtacagtttaaaatccataatacaatcaaatgcaagcaataatctcacaacttctaatctagctattggagcataagtttcaccaaaatctatgtgctcttgttggttataaccttttgctactagccttgatttattcctagttatcaagccatgttcatctagcatatttttgaaaacccattttataccctataatatttggcttactaggcataaagtagtagttcccaaacttcatttcttttaaattga

SEQ ID NO: 8205 - DNA, 274 bp, Glycine max
  unsure at all n locations
ntgaactttcgtatccttctggactttagctttcattccaatcagtttattttggaaaatattcatttatttttaattaatttctaacatttttagatattacttattntaattaaaacttcctagttaagttcttggaaatgtatattacaagtgtatgtaaatcaataaattgatgacattatttcacctaatcattcatttcacattccaatttatatatgtaactgcatttgaatattaaaaactaataatttaatgatttataataatt

SEQ ID NO: 8206 - DNA, 355 bp, Glycine max
agctttgaatctccatacatggtttgcacatgtcgtgtgatgcaatcctaccacgcaagggcattggatagaagactccaagtagattgggctagagatgcaagagaaggccctaaggttctcatgagccttagggcagatttcgggcctatgggctaagtatgagcccacttatcttagtacatattagattaaggtttcattattttttgggccttgtatttagggctccataatgtaggtaaggtaccctagaaatgtaggatttttcaaccattgtattttagggcacctagactagtttttgtattaggggtagttttataatttcatatgcattaagtgaatatttgat

SEQ ID NO: 8207 - DNA, 286 bp, Glycine max
tcaacatcagaccactttcagtgtgctggaactacatcacatggatttgatggggcctatgcaggttgaaagccttggaggaaagaggtatgcctatgttggtgtggatgatttctccagatatacctgggtcaactttatcagagagaaatcagacacctctgctactgtcaagcacttccacatctttggaagtccatgttacattttggcagatagagagcaaaggagaaagaaggatcccaagagtgatgcacgaatattcatgggatactcttcaaacagc

SEQ ID NO: 8208 - DNA, 351 bp, Glycine max
agctttgagcttattcaaccgactataaccttttactcggatgtctgattgagtcccgtaatatatagagaagctcgaaattgaatgttgaacctctgatccaattcaaaggacaataactttttactcggatgtctgattgagttccgtcatatatcgagacgctcgaacttgaatgttgaagctctgagcaaattcaaacgacaataaatttttactcggatgtccgattcagtgacgtaatatatcgagacgctcaaaattgaatgttgaacctatgagccaattcaaacgacaataactttttactcggatgtctgattgagttccgtcatatatcgagacgctcga

SEQ ID NO: 8209 - DNA, 364 bp, Glycine max
  unsure at all n locations
ctaagctggttggttaaccaaactttagcaatataaaaagtttatgttacacgggactgaagtgtcccaaattgcaaactgataaaagacaagaaattttgtttgcaggtacttactccttcgtactccctccaaggaagcttccccatgaacatttctataattgtacaacccaaactccaaatatcaacaacaaaagcaaggtcaaagctgttatctttttgcacaaccgcttgaaaaagctacatgtatgtggaataagtgtttatagagaatgcatgagacatcatgaagtaaaatagagttataaacttagggtgctcanggttttggtgaagccaatttttggtgtctgtgccaacta

SEQ ID NO: 8210 - DNA, 350 bp, Glycine max
agcttgtgtggctctatccatatttgaagcagagtatatcgctgctggtggttgttgtgctcatatcttttggatgaaacaacaactagaagattttggtatcttccttgatcacattcctttgatatgtgacaacacaagtgcaataaacttgaccaaaaatcttgtcatgcattctagaactaagcctataaaaataagacatcatttcattagatatcatgtgcttaaaggagattgtgttatagtatttgtagatacaaccaaccaactagttgacatctttacaaaacccttgtctagggatagatttataaaataggacatcatttcattatatatcatgtgct

SEQ ID NO: 8211 - DNA, 344 bp, Glycine max
  unsure at all n locations
ttggagtttccaagtgccaattcgtcttcttctttagtccagtcttcttctggcttcaattcatcagtgggctttccttctgtgtccagcatcttgggatgttcccagcctttgatgacagctntccaggttctgctatccagtgatttgaggaaggccaccatccttgctttccagtattcatagttggttccatctaagattggtggtctgttcactggtcctccttctttctccatgttcatcagaatttatctccctagatctcactctgtgatttcgaatgttggctctgataccaaatgaaattctgataccaggggacagatgtcgtacccgatgtc

SEQ ID NO: 8212 - DNA, 286 bp, Glycine max
tgagcacctcttttcttacctcttccttcattgttgggtttatccgcctctgaggttgtcggactggcctgtaatcgtcttccatcattatcctgtgcatgcagtaagcagggctgattcccttgagattcgatatgttccatccaattacttccttgtgtttcttcagaatgtctaccaacttgttctcttcttctctcgcaagtgcatggctgattactacagttttagtgtcatcttcctctaggaacacatacttcagatgattgggcaatatcttcaactc

SEQ ID NO: 8213 - DNA, 355 bp, Glycine max
agcttcttgttgttactatgatttttcaatatttcttccctccctctttcatctggtaatccaacagtgacctattggaacaattacaaattgtcatgtcttataattttgttgaatttttagtaactactaactagcttaaaagtcatacctaccaactgattgatcgatcgtgcaaaaagttttatactactagcatattataataaaattcattgtcttatacgttaaaatttgtttatttttatagtaattactttaaaagctatatttataataaattctgatgggttaatgatttacaatagcaatgcatggaaattaaactgataaataataattatataggcattaa

SEQ ID NO: 8214 - DNA, 356 bp, Glycine max
agcttgtccaatgctttcccatattaacctttctgatgtcgcacataagacggagtcaccccgtaaaaaaccggccaaaccaagcgacccttcttcattatgcactcaaggatcatgacaagctcttcaagacagtaagttgaggaagcatagttttcagagaaaacaacaatggcaattcttgactgctgaattgccttgaaaagagcatgtctaatctcttcccctcttctgagcccctcatcatccatgaaggtgtggattccctggtcacaaagagacttgtaaaggcttccagtgaaaccacttcgagtatcatcgcctctgaaactgaggaacacatcataagtccactc

SEQ ID NO: 8215 - DNA, 350 bp, Glycine max
agcttgtgtttttctcacagatttgacatgcatgatgccctttcacactgtatccacttaaatttccatatgctggaaaatcattaatagtacaaaacaccattgtgcgtaacctgaacgtctgctgcacatttgcatcccacacatctaccccttcttcccacaattgtttcaagtcttcgattaatggcgtaagatacacatcaatatcattccctggctgccttggacccgcgatcatcatacacaagataatgtatttacgcaaaatgcacaaccatgggggaaggttgtaaatcatcagtaaaacaggccacgaactgtggttgctgcttaagctaccataagga

SEQ ID NO: 8216 - DNA, 321 bp, Glycine max
tcttagtttcagatgatgcagatgggtttgtttctacctcatgcactcctctaatgactatggcatcatttctggcgctaaactgctgggagttggaagccatcttctcaattaaatttctggcttcagcaagagtcatgtctccaagggctccaccactggcagcatctatcatacttctctccatattacagagtccttcataaaaatattggagaagaagctattctgaaatctgatggtgggggcaactggcacatagtctcttaaatctctcccagtactcatacaagctctcttcactaagttgtctaatacctg

SEQ ID NO: 8217 - DNA, 361 bp, Glycine max
agcttgcatagatgttttcatttgtttggcaccttccatcttgaacttctttagaagttctttagtatattttggttgttgattatatacacctatgttgtcttacttgatctaaaaccccataaagaacttaagttctcctatcatgctcatttcaaactcacttttcattagttaagagaaatccttgctcatagattcattagtagctccaaagataatatcatctacacaaatttgaactatgatgaaattctttccaacttctctcttaaaaagagttatattcatgaggtgcctattcagaccatacataacctttttcagtttaaaaacatggtctagaagggtgtgtcttcaa

SEQ ID NO: 8218 - DNA, 355 bp, Glycine max
  unsure at all n locations
tgccttgccccttgatatatttgagggactcatggtcactatgaatgacaaattccttgggataaaggtagtgttgccatgttttcaaagcccgtactaaggcatacaactccttatcataagttgaatagttaagggtaagaccacttaacttttcactaaaataagcaattggatggccttcttgcatcaacacagccccaatcccaacatttgaagcatcacactcaatttcaaaagatttttgaaagtttggcaacgcaagtatgggggcattagttagcttttgcttaagaacattganagcttcttcttgtttctctccccatttgaaaccaacatttttcttgagcac

SEQ ID NO: 8219 - DNA, 270 bp, Glycine max
agctttatgcaagtcaattttatgtggcatctcagagaggatctttttcgggcatatttgcgcaaaatctcttgaactaggaagatgctgtccatcatctttctgttcttaatgaaagcagtttgagtttccccaataatagtctcaagcaactggggctatgcggttggccagaattttagacacaatcttgtataacaaattacaacaagatatgggtctaaaatggttaacctaggaggtctgatcatgcttaagaataagcgccat

SEQ ID NO: 8220 - DNA, 263 bp, Glycine max
agtatggagatacttgcactatatagggctccaatatgaatttctgactgcaagatgaaaatgggatgttataatttgcaccttttcatttaatcattttactttttgcagattatcgcagagagcttatctgaagaagaaatagctggcttaaaagaaatgttcaagatgatagatgcagacaacagtggtcaaatcactttagaagaactttaaactgtgttgaaaagagtggctgcttatcttaaggagtctgaaatttt

SEQ ID NO: 8221 - DNA, 224 bp, Glycine max
  unsure at all n locations
cctgcatgcatgcaagcttatgtccgcagagggatacttcntatagaagcagctgaatcattttcttcctacaactcgtcaaaacttgatgtttttaagcaacatttcctgttactggaaaagatttcaaggataggtatcttcgaaaaccttatgtattcgtggaagagagacagaaagtccactgtctaaatactcttttttctaacggttgccttttcttt

SEQ ID NO: 8222 - DNA, 366 bp, Glycine max
  unsure at all n locations
agcttctctatatgngangcttattttcggncatccgaganaaaanggaggaccatttgattttctcaagcggtttcttttctcaatttcgagcgtctcgatatattatgcacctgaatctgacctccgagagaaaagttatgaccattcgaattgctcaagagcttccattgttcaatttcgagcgtggcgatatattatgcgcctgaatcggacctccgagttaaaagttatgaccttcgaatttctcgatagcttccggttttaaatttcgatcgtctcgacatattatgcgcccgaatcggccatccgtgagaaaaggtatgaccatttgaatttctcgaggcctctcggtattcaatttcg

SEQ ID NO: 8223 - DNA, 369 bp, Glycine max
  unsure at all n locations
agcttgtaacaaatctttacacttggtttgatacatgcagnccttctggacccttacccgccacttcggcgtcatggggagactcaagaagcccaacaggtttaaccttttgaatgtagtctgaacaaaattcaatggcttattctgcaatgtacctttcaacaatagatgcttccggacgatgtaaattctttgtatacccttttaagatcttcatgtatcgctcaaccgggtacatccaccacaaataaacaggaccacaacatttgatttctctgaccagatgaacaattaagtgaatcatgatgtcaaagaaagcaggaggaaaatacatctccaaatggcatagtataattgcggcctcatttt

SEQ ID NO: 8224 - DNA, 218 bp, Glycine max
  unsure at all n locations
tccggcgcaaaaggnatgaccatatgaatttctccaccggattccgggggacaaggtatgaccatttgaatttctcggtagcaaccgttgttcaaaatccagcggctcgacaaaatatgcgcccgaagcggaccaccgggggacaaggtatgaccatttgaagttgtcgagagcatccggccgtagatttcgagccgctcgatatattatgcgccccg

SEQ ID NO: 8225 - DNA, 266 bp, Glycine max
agcttcccgccaatggtattttaagtttatatgataccattgtttcctttggatttaaggaaaatactgttgatcagtgcatatatccgaagattagtgggagtaaggttatttttctaatcctgtatgtttatgatatattgctgcaattaatgatcttggtcttctccatgagactaagaaatttctctctagcaactttgaggtgaaagatatgggagaggtaagctatgcgatagggatagaaatattctgtaatagatcac

SEQ ID NO: 8226 - DNA, 320 bp, Glycine max
agcttataatatattgatatttctaatattaaacattggaagctctcgagaaattcaaatggtcataacttttcacacggatgtccgattcgggcaaataacatatcgagacgctcataactaaacaacggaagctatagagaaattctaatggtcaaaacttttcacacggatggccgattcaagcgaattacatatcgagaggctcaaaattgaacaacagaagctttcgagaaattcaaatggtcataacatttaactcgaatgtccaatttaggcgcattacatatagtgacactcgaaattgacaacggaagctc

SEQ ID NO: 8227 - DNA, 370 bp, Glycine max
  unsure at all n locations
agcttgaaggcaaactggattttttgttaacttnggaaccaagctggccttgaatcagaaatttgtacctgtcgcaagggtttggggtttgtgcttctctgctgaccaccatacagacctttgcccttccatgcagcaacctggagcaattgagcagcctgaagcttatgctgcaaatatttacaatagacctcctcaacctcagcagcaaaatcaaccacaacaaaacaattatgacctctccagcaacagatacaaccctggatggaggaatcaccctaatctcagatggtccagccctcagcaacaacaacagcagcctactccttccttccaaaatgttgttggcccaagcagaccatacattcct

SEQ ID NO: 8228 - DNA, 398 bp, Glycine max
  unsure at all n locations
acgccgggatcttaagcacctgcagcatgcaagcttgagcaaatcaactagtaactttatatncggatgggcgaaagagncccggaatatatcgagaggctccaaattgaaaacggaagctcatatcaaattcaaaggacaataactttttactcggatgtccaatagagtcccgtaatatatcgaaacactccaaattgaaaatggaagctcgtatcaaattcaaacgacaataactttttactcagatctccaatagagtcccgtaatatatcacgacgctccaaattgaaattggaagctcgtatcaaattcaaacgacatttacttttaacttggatgtcccgatgagacccgtaatatatcgccacgctccaaattgaaagcagaagctctaa

SEQ ID NO: 8229 - DNA, 340 bp, Glycine max
  unsure at all n locations
agcttcacataggcaagngntnncttcttaattccaaatcatagatatgtcataaattgattttgcaggtcatttcccatcaaatcaaggataatatgcataatcatcatggatcaataagactttctaaagtcagacttcgtaggaaattggttttggttgctctggcctttcccctctctcttaccctttgttttgtgaagaataggagagtacacccaaagatttggttagtaacttaaatgggcgatcacttcctatcccttcatgtcttaaccaagttactattacccccctcctttttctccttttgacaactctgtacatggaacaccccttg

SEQ ID NO: 8230 - DNA, 367 bp, Glycine max
  unsure at all n locations
agctagaagcgattcacattattgtaatcgannaccagagcagaggngcagaaaatattatcaanagccacatctttttatgtgggtcttgaatggctatcaaaagcctatataaatgtgactcgagacacgaatttgctaagagttctttagaacaaaaaggtcttatcctcttaaaaagtaaaatcattttatcctcttacaaattccttggccaaattacttgtgattcaataaggaattatttaaattctcaaattgttcaatctatctctttcaagagagatttcttcttttcttcttcttcattctgaaaagggattaagagaccgatggtctcttattgtgaaagaattctaaacacaaa

SEQ ID NO: 8231 - DNA, 358 bp, Glycine max
  unsure at all n locations
agcttgaatccctctataagtacttatttgggagcttgntgagaaaccaactgatcaaaagattgttggttgcaagtggaaattcaagaagaaagatggtgatttgaagttgaagacaacctttctccatggtggtttggaggaaagaatttatatgcaacaatcagaggcgtttgatgtaccaggaaaataagaccatgtgcgtctataaaagaagtctttgtatggcttgaagtagtcacctaggcaatggtataaacgatttgacttgtttacgattgatattgggtattaagaagtgagtatgatagttgtgtttataataagaaattgccccaagattcttatatttacttgc

SEQ ID NO: 8232 - DNA, 365 bp, Glycine max
agcttcaagaataatggccttggcttacttcttattcccataaggaaattcaataaataggcctcctatttttaatggagaaggttaccactactgggaaacccgaatgcaaatcttcattgaggcaatagacttaaacatttgggaagccataaaagtaggaccttatgtacccaccatggtggctggaaatgcaacaatagaaaaacctagagaagagtggactaaagatgaaagaatattagtgcagtacaatttaaaggctaaaaacatcattacttctaccctaggaatggatgaatactttagggtttcacattgtaagaatgataaggatatgtgggacactctacaagttacacatg

SEQ ID NO: 8233 - DNA, 366 bp, Glycine max
  unsure at all n locations
agcttgttatcgattacacacattttattatctattaccagaggagattttcagaaaatattgtcaacagtcacatcttttcatttggntcttgaatggccatcaaaggcctatatatatgtgacttgagacacgaatttgctaagagttttcataacaaaaaaggtcttatcttcttaaaaagcaaaatcgttttatcctcttacaaattccttgtccaaaacacttgtgattcaataaggaattatttgagtgcttaaattgttcaatctatctctttcaagagatatttcttcttctcttcttctttattctgaaaagggattaagagactgagggtctcttgttgtaaataaatcttaacac

SEQ ID NO: 8234 - DNA, 370 bp, Glycine max
  unsure at all n locations
tagcttgtgaaatcaanggaattcatgattccgnnngacacaagncgntcaattctattcttagaaatgtgacctaagcgtttgtgccataatgctcctgagtttgtattatcaattctacccttagtaccacgcaattctgcattaaaggattcaccataggagaatacagtatcaagtaaatatagattatcattaaccaagagtgaaccggttccaacaatatctgaattaaaagacaacctgaacacattgtttccaaatgaatacaaataacccaatttatccaaataagaaactgaaaccaaatttcgtctaaatgacggtacaataaaagtgtctttcaaatccaaataaaaaccagtactaa

SEQ ID NO: 8235 - DNA, 373 bp, Glycine max
  unsure at all n locations
agcttcaagaataatggcctttcttatcttttatttccagaaagaaattcaatcaatagacctccaatctttaatggagagggttaccactactggaaaacccgaatgcaaatttttattgaggcaatagacttaaatatttgggaagccatagaaatagggccttatatacccaccacagtagaaagaaccacaatagatgggagcacaacaagtggaagcacaacaatagaaaaacctagagatagatggtctaaagaggatagaagacgtgtacaatataatttaaaagccaaaaacataattacatctgccctgngaatggatgaatatttcagggtttcaaattgtaagagtgctacggaaatgtggg

SEQ ID NO: 8236 - DNA, 358 bp, Glycine max
  unsure at all n locations
agcttgtaattgattacactaagtctgtaatcgattaccagagcagattttcagaaaatattctcaacagtcacatctttttatgtggntcttgaatggctatcaaaggcctatatatatgtgacttgagacacgaatttgctaagagtttttcagaacaaaaaggtcttatcctcttataaagcaaaatcgttttatcctcttacaaattccttggccaaattacttgtgattcaataaggaattatttgagtgctcaaattgttcaatctatctctttcaagagagatttcttcttttcttcttcttcattctgaaaagggattaagagaccgagggtctcttgttgtgaaagaat

SEQ ID NO: 8237 - DNA, 296 bp, Glycine max
  unsure at all n locations
aggatttccttttagtagggaatctatccttcctaagatggcgccaaacccagtcaccctcgttaagaactagctcttttcttcctctattgcctttagtttaatacacctttgtttggttctctatttggctcttaaccctcttatgcaacttctttacaaactcttacctagattccccttncttatgtataaaaaaagttgtctatgggaaaggaattaagtcttaccgtggttggggattgtacccatttacaacctcaaaaggggagtgtttggtggatttttaaaccccc

SEQ ID NO: 8238 - DNA, 372 bp, Glycine max
agcttactgggcagtgaagacttgcttcttctctatggatcaagctggtgaggaaagaaagttgcaactgagtgagttagatgaaatccgcctagaagcctacgagaacgccaagttctacaaagaaaagaccaagaagttccatgatagcatgatagttaaaaaagacttcgtggttgggcaaaaagtgttattgtataattctaggcttggactcatgagtggtaagttgagggctaagtggattggtccttttgttgttactaatgtttttccttatggggacagtgagatcaaaagcgactccacaaacaagagcttcaaggtcaacagacatcgacttaagccattcctcacgaacccttctttagt

SEQ ID NO: 8239 - DNA, 258 bp, Glycine max
tctccacgattcttgagtacgcgttctcgtgccgcttttcgttcgctgcgatggtcccgcataggcgcgccagcactggatccccgccctccttcgcgagccgagccgtgttcccgtgcgccacaaatgttgctcgctcttggaatgacgtgtacacaaaccccaaatatgggttgttgtctgcccaagggtcctccccaatttagtctaaccaaaatccattattccaattccattttaaaagaaaaaaatcttctt

SEQ ID NO: 8240 - DNA, 306 bp, Glycine max
  unsure at all n locations
gcttcatgtccaaaagatattatattttagggtctgaanattccctgtttttcttcgcacttacaatctcaagtaaaatcactccatagctaaagacatctgatttcacagagaattgcccactcacagcatacccaggaggcatataaccactgaagaaattttatagtaagataatcaaaagttgaaagagtaatataaaaaaatcaaaattggatagaaactaactaagttccggccactgtatttgtgtttgcctcaacttgatctcccaagaaagatcgagcaaggccaaagtctgatatt

SEQ ID NO: 8241 - DNA, 253 bp, Glycine max
tgtgtggaggaacacgctacataatgagagagccagacatgaacagcccatggttgatacatggactgagatgaaaaagatcatgacgaagcggcatgtgccggctagctactcaatggacttgaaattcaagctccaaaaactaacccacagcaacaagggggctgaggagtatttcaaggaaatggatgtgctcatgattcaagctaatattgaataagatgaggaggtgactatggctcgagttcttaat

SEQ ID NO: 8242 - DNA, 329 bp, Glycine max
ttctccactaagttgcctgatgcctgaattttcttttctgatggtattggtcctagatgcagggtagaatttctccaagaacaccattttaaggtcatcccatctgacaatggacctgtgagcaatattatatccaatcttgtgccactccctccaaagaatgaggaaaagcctttaaaaagatatgatcttcttggacatgagggggctttatggtggaacaaacaatatggaactccttaagatgcttatgaggatcttcacctgctaaaccatgaaactggggcaacaaatgttttagttcagtcttgagaacatatggaacaccc

SEQ ID NO: 8243 - DNA, 405 bp, Glycine max
  unsure at all n locations
gcttcaacattcaacttcgagcgtctcttatattatacgactcaattagacatccgagtataaagttattgtcgggtgaattntctcagaacttcaacattcaatttcgagcgtctcaatatatgacgggactcaatcagacatccgagtaaaaagatattgtcgtcttaattggctcagagcttctacattcaatttcgagcgtctcgatatatgacgggactcaatcacgcatccgagtaaaaagttattgtcgtttgagttggctcagagcttcaacattcaatttcgagcgtctcgatatatgacgggactcaatcaggcatccgagtaaaaagttattgtccgttgaattggctgagagcttcaacattcaatttcgagcgtctcgatatatgacgggac

SEQ ID NO: 8244 - DNA, 229 bp, Glycine max
agcttaagctccttcaactgcacaaggctcttaatatttgaagagtatccttgcggaaccttcacccgatgaagacactgacaaaaacttatctttgccttcttggacaaacgatggcaggctgcgggcaatgaaatctttttcccatcaaaccttggatgcaactgcgatcgtatacccatatcagctagatcttgatgggtattcaagccatccttcgtcttgcctt

SEQ ID NO: 8245 - DNA, 344 bp, Glycine max
acactctcgaacactcaagcttcgcaagccagcttccatcaaatctcaactcatctaatatcctatacaaagggtccgtaggagtagaaccctcaccattaacactagatgaagaacgaagactcatgttggttcttaagttgtggttctttcttgttgggggtttgaaaacaaaaggtaaaagaaactacggttgaaactagccaaaataaacactaaaagaggtgtgaaagataaggtaaaaactaattggtaaaaagcaagttatctaggtggtttgacaatggaagataaaggaaatttaaagcaagctagatagtttcctatgtgaaggcttagatgac

SEQ ID NO: 8246 - DNA, 234 bp, Glycine max
  unsure at all n locations
tgtaaggttaaagtctcacgattgtcacgttctgatgcaacaattgttagtcgtggctatacgagacatcttgccaaacaaagtcaggttagcgataactcgcctgtgctttttcttccatgctatatgtagcaaagtcattgatcctgtcaagtttgatgagtnggaaaatgaggccacaattttactgtgctagttggagatgtattttccccctgcttttttgacatcatg

SEQ ID NO: 8247 - DNA, 388 bp, Glycine max
  unsure at all n locations
gcttgttacttcactagcttcttaccatctttcttaagcttgaacacccacttattcttcaaggcttttctgccttcggaaactttcacaagcttataagtatcattcttctggaaggaatctatcttttcttacatcactttccttcaatagaatttatccttatgaatttcaacttttgcaaaacttcctggctttccttcattgatgatgaagatgtactccaaaccatggtaccttctagatgactggtgctctctatttgatcttctgaacagcaactggctttcttgctcaacaccttcatcatcaccatactttatagctagctcatcatcaaccctaaagtcattatcaagatctaccncttctatggcaattcttctag

SEQ ID NO: 8248 - DNA, 299 bp, Glycine max
  unsure at all n locations
atacctctctaatagcttaacttaccccatgacgaaaaacatgaaaattccaaaaaaaaagtccttactacaaagactactcaatagaatggccaaaatacaatgcccagacgaaagacaaacctattctaatatttacaaagataatcgggctcatacttaacccatgggcttgaaaactaccctaaggctcatgagaaccctcaggccttcccttggatctctagcccaatctacttggagtcttctacccaatgcccttgcggggtatgatngcatcacaagtgaaatgttatgac

SEQ ID NO: 8249 - DNA, 304 bp, Glycine max
ggactagatggggcctatgcaagttgaaagccttggaagaaacatgtatgcctatgttgctgtggatgatttctctagatctacctgggtcaactttatcagagaaaaatcagacacctttgaagtattcaaggaggtgagtctaagacttcaaagagaaaaagactgtgtcatcaagagaatcatgagtgaccatggcagagaatttgaaaacagcaggttcactgaattctgcacatctgaaggcatcactcatgagttctctgcagcattacaccacaacagaatggcatagttgagagga

SEQ ID NO: 8250 - DNA, 335 bp, Glycine max
agaagatcaacgacaatgcctacaagattgacttgcctagtgagtataatgtaagtgccactttcaatgtgtctgatctatctctttttgatgcagatggaggagccttggatttgaggacaaatccttttcaagaaggagggagtgatgatgacataaccaagggcaaggaccatgaagcacttgaaggtcccatgaccagaggcagacttaaacaagcccaacacgtcatagagacaaggctggtcatttgtatagctgccattgatgatgattgaaggcccaagtggagaaagatgaaggcccagaggcagaggcactaccaagactactaa

SEQ ID NO: 8251 - DNA, 329 bp, Glycine max
  unsure at all n locations
agcttgaatcggacatccgtgtgttaagttatgaccatncgaatttctcaagagcttccgtagttcaatttcgagcttctcgacatattatgcgcccgaatcggacatccgtgtgaaaagttatgaccatttgaatatctcgagagccttcgatgtttaatttccagctgatcgatatattataagcctgaattgcacatccgtgtgaaaaggtatgaccatttgaatttgcgagaggttccgatgtttaatttcgagcgtatcgatatattatacgcctgaatcggacatccgtgtgaaaagctatgaccaattgaatttctcaagag

SEQ ID NO: 8252 - DNA, 382 bp, Glycine max
agcttaagctccttcaactgcatattgttcttaatattttatgagtatccccgtggaaccttcacccgacaaagacactgacaaaaacttatcttttcctttttggacaaagtatgacaagctgggggcaagtaaattttcttcccatcagaccttggatgcaactgtgatcatatccctatctcagctagatcttgacgggtattcaagccatcattcgtcttgccttgaatgtaaaggagcgtcccaatcacactgtcacatacatttttctccacatgcataacatcaatacaatgtctaacgtctagatcagaccacgacacaagaacaaagaaaatggacctctttttcatatgcaagcttactttatccttctttg

SEQ ID NO: 8253 - DNA, 194 bp, Glycine max
ttctcgagagctgactatgtgtaatttggagcgtctcgatatattatacgcctgaatcgaacctcagtgtaagaagttatgaccatttgaatttctccagagcgtgcgttggtcatattcgagcgtctctatatgtgatgcacctggatcggacctgcgcgtgaaaagatatgaccatttgaatatctcgagag

SEQ ID NO: 8254 - DNA, 374 bp, Glycine max
agcttattataaaaagaaagttatgttagggaagacaaggaagataaaagcactacttgaaccattgtgtcattaaatacgacacttcctgaggatgtttctgatagaatctttctcttgaaagtttcatctttggtgaaggcataaatggcaagaggttttggctttgcattgataaactcaatactttcctgaattttatccaactgcacagattgcaagtgcaacaagagttgaatgagacaatgcacaatatatgtgagaattgaaaacataaaatgggactgttgattctcactgtgattataggaagcagtgggccgaatatctcttctgccattatctcagaatctagtggaggatctaacaaaatt

SEQ ID NO: 8255 - DNA, 383 bp, Glycine max
  unsure at all n locations
agcttttgcactgtgaaaaataatttatctacttaaaactttgacaacaaaaacaaatcataattagacagaaagaaatgggaaaaaaatatataaaaatggaacctttaataattaaatgttaatgttaattaattgacaatgattacgacaaaaataaatacaaaatttaagctgatttgaataatatggtaaaattgatagtgtaatatttggaaaaaaaccctttccattaataggtacttgccaattaatatttgcccattatatttttccaataaaaaataataaactctccaatctttcttttctcactttaatccacgngtaanttcattaattattattttattttgctcaatgcttacaccttcctcacatgc

SEQ ID NO: 8256 - DNA, 353 bp, Glycine max
agctattacctcagtgtgttccagctccagtggtccgatcgttaccaccagtgactcgacggccaacaaaaacctgtccaaagccacctttgcccagtttcctctctactttgtagacaggtgatcctcctacttgaaccttttattaacatatcaacaataagcaccttgacaatatcaacaaaagaattgagtaataattaaaagaaaagaataccctctccggaaaaggagctgcgttggtgtcatcttcttgagcaacgcccttgtttgcactcaagccaccactctcgtcggccatggcggcagcgtcgtctttcttagtgtgatcggatattattataaggggattc

SEQ ID NO: 8257 - DNA, 363 bp, Glycine max
  unsure at all n locations
agctttttagggcatgctatgttctacaggtggtttataaaagacttctcaaagatttccaaaccattcaacaatttgctcaacaaggacgcggtatttttattcgatgaagagtgtttgaaggcattcaacaccttaaagaccagtttagtgtccgctgccgtaattatagagccagattgaggtcgagaatttgagttgatgtgtgatgcaagtgattatgctatgggtgctgtattgggccaaaggaaaagcagagtcttccatgctatttactatgccaacaaagttntaaatgatgctcagattaattatgctaccacagagaaggaaatgcttgcgattgtctatttactagaaaaa

SEQ ID NO: 8258 - DNA, 237 bp, Glycine max
  unsure at all n locations
tatgaggtcatttcttcattcagctntgaagagaatgtcatagatcactgtatataccacaaggtcagtgggagtaagaatttgttccttgtattatgcgtagatgatattctgcttgtgactaatgataaaggtatgctatatgaggtgaaacaatttctctcaaagaactttgatataaaggatatgggagaggcatcatatgtcatacgcataaagatccatagagaaagatct

SEQ ID NO: 8259 - DNA, 339 bp, Glycine max
  unsure at all n locations
agctttcaagatattctttggccataactcttctcacggatgtctgattttgggacataatatatcgagaagctcaaaattgaacaacggaaactctcgagaaattcaaatggtcatgactttttattcggaagtccgattcagggacataactcatctagacgctcaaaattaaccaacaaaagctctcgagaaattccaatggttatcactttntactcgattcggggacataatatatcgagacgcttcgaaatgaacaacagaatctctctaaaaattcctatggtcataacttttcacacggatgtctgatttgtggacataatatatcgagac

SEQ ID NO: 8260 - DNA, 376 bp, Glycine max
  unsure at all n locations
ctttgactcggatgtccgattgagtcatttttataattgagacgctcaacattgaatgcaggagctcttaccaaattcaaatgccaataacttnttactcggatgtccgatngagtcccgtaatatatctagatgctcaaaattgataacagaagctctgagcaaattcaaacgaacatagctnttgactctgatatcctgatgagtcatttaataattcgagacgctcaaaattgaatacagaagctcttagcanattcaaatgacaataactttngactcgaatggtccgatgagtcatgttataatttgagacgcttcaaattgaatgcagaagctctaagcaattcaactacaataactttgactcgatgtc

SEQ ID NO: 8261 - DNA, 377 bp, Glycine max
agcttgaaggtgtgtattccgctatttttcataatagaacactggtaatgtgtctattatcattcttatcatttctttctctgtcattgagggaaccacttgagctgccaggtctctccacctttgggcgtattctttgaaagatttgtgcccctttttgcacatgttctgtagttgcatcctatccggagccatatcaaaattgtactgatactgcctaacgaaggcaaccattaggtccttccaagaatgaactcgggaaggttccaagttagcataccaggtaatagctaccccaatgagactttcttggaagacatgtatcagcagttccttatcttttgcgtatgcccccatcttccgacaatacatcttta

SEQ ID NO: 8262 - DNA, 307 bp, Glycine max
  unsure at all n locations
acctcctcctctaaataaccattaagaaagactggtttcacatccatttgttgcaactcaaggtcaaaataagcaactaatgccaagataatacaaagagaatctttcatagatacaggagaaaaagtctntgtgtagtcgattccttctttntgagtaaatccctttgcaacgagtcttgcctggtatctctcaatgttggctaatggaatccctttggtcttaaaaacccatttacagccaagggccttngccctattatgaaactcgacaggggtccaaactccgtactctgcatgggacttca

SEQ ID NO: 8263 - DNA, 378 bp, Glycine max
agctttgatgcaacatttggagatgtttatgaaacaacgagatgatgcgctccatgagaggttggatcaaatggagaatagagatcataatgaaaaagaaaggaggagaagagggaatgatggtgttcctaaaaaaaatcgaattgatggtattaaactcaacattcctccctttaaaggaaagaatgatccagaggcctacttggagtgggagatgaaaatagagcatgttttctcatgcaacaactatgaggaggaccaaaatgtgaagcttgccaccacggagtttttcgactatgctcttgtgtggtggaacaagctacaaaaagagagagcatgaaatgaagagccaatggttgatacatgggcggagatgaa

SEQ ID NO: 8264 - DNA, 396 bp, Glycine max
  unsure at all n locations
actcggatgaactgatgagtctcgtcatatatcgagacgctcgannatgaatgttgatgctctgagcaaattcaaacgacaataactatttactcggatgtntgattgagtcccgtaatatatcgagacgctcgaaattgaatgttgatgctctgagcaaattcaaacgacaataactntntactcggatgtctgattgagtcccgtcacatatcgagatgctcgaaattgaatgttgaagctctcagccacttcaaacgacaacaacattttactcggatgtctgattgagtcccgtaacatatcgagacgctcgaaattgaatgttgaagctctcagccaattcangcgacaatacacttttactcggatgcctgattgagtcccgtcatatat

SEQ ID NO: 8265 - DNA, 383 bp, Glycine max
agcttagtaaagctaggcactaactatctccctctttggcaaattttgtctaaaacatacttagacacttcctgagcaggtacgagcagttatgcaagtgggatcagcaactttcattatcagagtaatcaagcacagcggaaattctgcaagttgcaagtcgtttccaggatgtcaagacatctcacatgacatcagctttctgcttctgctccccctgtctccatgctcttactgcagcatcttctatcagctactagtcttttccaggatgtcaagacatctcatgtgacatcagctttcccttgtctccatgctcttactgcagcatcttctatcagctactagtagcttacatcagtcatcatcagcagcagcagtct

SEQ ID NO: 8266 - DNA, 289 bp, Glycine max
  unsure at all n locations
ccgctccagtgctagtnttgcctaacccgagagaaccctttgaggtgtattgtgatgcatcanagatggttntaggaggagtgttgatgcanaatggccaagtagtggccaatgcttctagacaactcaagactcatgagaggaactatcccaccaatgatttggagtaggttggtgtagtttttgcctttaagatgtggagacagtacctgtttggctccaagtttgaggtgtttagtgatcataagagccttaagtacttgtttagtcagaaagagctgaacatgca

SEQ ID NO: 8267 - DNA, 335 bp, Glycine max
  unsure at all n locations
agcttgtttcttgcaattccaagactctagagagcttcctaataggtggcatgtcccacttgtgctttttctatctaatttgcatcctgcaaaatcaaaatctaaaaagcctgttaaatttaaggaggtacctttgggatacctcaaacccacattggttgtgcccttaaaatacttaatgatcatattaacgaanattaagtgagattccttaggaatggactgacatcttgcacataagcaaacacttaacatgatatctagtctacttgtagtcaggtagagaagtgatccaatcatagctctacatcttgattcatcaacaaatttacctt

SEQ ID NO: 8268 - DNA, 281 bp, Glycine max
  unsure at all n locations
ctactctctaacactagctaaccaactaactgtgtttagttaacataactagctagtgggtaagtacaatctgtatatgctaagaatccccctcaagttgaggaatgaatgtcaatcattcccagcttggaatgaagaanatggaatgcacctggagaaaaagctttggtgatgatgtctgttaatgggttggcagaagaaatangaagcaacttgataagaccagagagtaacttttcgcagacaatatgacaatcaatctcaatatattttattctttc

SEQ ID NO: 8269 - DNA, 253 bp, Glycine max
cacgagagcttccgttgttcattttcgaacgtctctatatgtgatgcgccttaatctaacatccgtgtgaaaagatatgaccatctgaatttctcaagagcttacgtaggtcaattatgagcctctcgacatattatgcgcccgaatcggacatccgtttaataagttgagaccatttgtatgtgtcgaaagctatcttgggtcaattccgagcgtctcgacatattatttgcccgaatctgaccttcgtgtg

SEQ ID NO: 8270 - DNA, 362 bp, Glycine max
  unsure at all n locations
accttctcttccattggtnngttcttcatttttctccatgtatcttctcacatgtcttgtgataaatgtatntaacatggttctttagagtttccaccgattaaacatccgagtaaaaagttattgtcgttntgaattgctcagagcttctattntcaattntgagcttttcgatatattacgggactgaatcagacatccgtgtaaaatgttattgtcgtttcaatttcataggagccttctatttaaatttcgagcgtctcgatatattacagtacttaatcggacaaccaagtataaagttattgtncgtttgaattgatacgagctttcgttttcaatntggagcgtctcgatatatt

SEQ ID NO: 8271 - DNA, 374 bp, Glycine max
agcttctaaactttatacaagaatgaagctctgataccacttgttagacaagtggcctcagatatcttaagaagggggggttgaattaagatattccaaactacttacccaattaaaaatctatttcactttttattcaagttataaaatcccttaacaatgaacttcttaaatattaattcaaataaaaaaattttgaatatgaatataaagcaataataaacaaaggagtttaagagaagagaaagtgcaaactcagatttatactggttcggccacacccttaatgaattgagcactcaaataattccttaatgaattgcaattgaattggccaaggaattcttaagaggataaaatgattttgctctttg

SEQ ID NO: 8272 - DNA, 243 bp, Glycine max
  unsure at all n locations
gtcttctcttcttagagttgtgattaaagagaatataaagagctgggaagaatgtatgtctcatgttgagnttgcatacaatannggtgtacataacactacataacactctccatttgaagtagtgtatggttttaatcccttgactcctctntatttgttaccattgcctaacatttctaattntaagcataaggatgcacaggctaaagtngagtatgtgaaaaggttgcatgaacaagt

SEQ ID NO: 8273 - DNA, 400 bp, Glycine max
  unsure at all n locations
ctcggacactccatngactagtctatcgatgttgggcataaggtatgcatctttggggcacgccctattcagaccagtataattgattcacannttgccattttcattnagccttttgaccatgacgacattggcgagctaggtagaatatctggcttctctgatgaagttggcattgaggagctngtccacctcttctctaaccgatttgtatcattcttctcccatcttcctcttatatggtgataccagtttggcctggggacagatgatgagctngtggcagataatggtggggtggattccctacatgtcagaaggctatcaagcaaacaggtccgtgttcctgtgtaggacatcaactatgtgtctgtgcttatgggtggtgaggtccctactg

SEQ ID NO: 8274 - DNA, 300 bp, Glycine max
  unsure at all n locations
aaaacgttgtttttacttcaaaaccccttgaactacttcacattgacttatttggtccctcgaaaactatgggttttggtggtaattactatgtcctagttataatagatgattactcaaggttcacatggactttatttttgaaaaccaaaagtgaagcttttgatgcttttcgcaaacttgccaaggtgattcaaaatgaaaaaggtctcaacattgtttcacttataagtgatcatggaggtgaatntcaaaatgagtatttgaaaacttttgtgaaaaaaatgaaattcaccataa

SEQ ID NO: 8275 - DNA, 323 bp, Glycine max
agcttgaaggcaaactggatgcattggttaacttggtaacccagctggccttgaaccagaaatttgtacctgttgcaagggtctgtggtttgtgctcctctactgaccaccatacagacctttgcccttccatgcagcaacttgaagcaattgagcaacccgaagcttatgctgcaaatatttacaatagacctcctcaacctcagcagaaaaatcaaccacaacagaacaattatgacctctccagcaacagatacaaccctggatggaggaatcaccctaatctcagatggtccagccctcagcaacaacaacaacagcct

SEQ ID NO: 8276 - DNA, 365 bp, Glycine max
  unsure at all n locations
agcttgtaatcgattacacatatactgtaatttattaccagaggagtttttcagaaaccattctcaacagtcacatctttctgtgtggttcttgaatggctatcataagcctatatatatgtgacttgagacacgaatttgctaagagtttttcaaaacaaaatggtcttatcctcttaaaaagcaaatcgttttatcctcttacaaattccttggccaaattacttgtgattcaataaagaattatttgagtgctcaaatngttcaatctatctctttcaagagagaattcttcttttcttcttcttcattctgaaaagggattaagagaccgagggtctctttgtgtgaaagaattctaaaca

SEQ ID NO: 8277 - DNA, 367 bp, Glycine max
agcttgtaatttattacacaaggcttgtaatcaattatcagaagttttaaacgttttataatagccttcagaaatttgaatttaaattttaaagcctgtaatcgattacaacttgtgtataatcgattaccagaaatgaaaattcaaatttcaattctgaagagtcacaactcttcagaatctaactgtgtaatcgattacaacagttatgtaattgattaccagtaaggaattttcgaaaataactcccaagagtcacaactgttcaacaagtttttgaatgaccatcaaaggcctatagataggtgacttgggttacaaaattccttagagtttttctgaacaaattgtcttatcctctcaatac

SEQ ID NO: 8278 - DNA, 281 bp, Glycine max
tgtgcatatagagctacagatgtcttgcaattgatacatacagacatttgtgggccatttcatacaccttcatggaatggtcaacaatattttatatcattcatagacgattactccagatatacatacttgtttcttatacatgaaaattcacaatctctagatgtgttcaaaacatttaaagttgaagttgaaaatcaactcaacaaaagaatcaagagtgtcaaatctgacagtggtggtgaatactatggtagatacgacggttcaggtgaacaacg

SEQ ID NO: 8279 - DNA, 182 bp, Glycine max
agcttgccattgaacaagttcgagattctattttatcaccgagccgtgcactcgcattggtaccaccttgagaggtttgggtttggtgtgttaaaaggtgacaagagaaatgagtcaaaattctcaagttggattcacctaagggtgtgtcttgaaggtgcttatcatgtcctggatgagtc

SEQ ID NO: 8280 - DNA, 394 bp, Glycine max
  unsure at all n locations
tccgtatgagtagaaccctcaccattaacactagatgaagaacgaagactcatgttggttcttaaagtgtggttctttctttgttggggttngaaaacaaaaggtaaaagaaactacggttgaaactagccaaaataaacactaaaagaggtgtgaaagataatgtaaaaactaattggtaaaaagcaagttatctangtggttngacaatggaagataaagganatttaaagcaagctagatagtttcctatgtgaaggcttagatgaacccttggaggtcccaactggctcttcgcttagtctacacnggttacactaagctattacacacaaatagaggtttgggtggtctcttggagactctcaatacacncctgaagaatgtcaaatac

SEQ ID NO: 8281 - DNA, 333 bp, Glycine max
  unsure at all n locations
tggaagctcctaatatctcccacactntgtggggtgngccattcttggatggtcttgattntctcagggtccacttggaccccatttctaccaactaanaatcctagganaactatattatctacacaaaaagttcacttctctatatttgcatagaccaacaacactgggataacacatgggcttaggctctcttagacccagcccttctccaaacaatcttaacctgagtctctatctccttagtctcctgagagggttagtcctataggctatcctattaggaaggcttactcctgggaactaaatctattggtgttctattctccttaa

SEQ ID NO: 8282 - DNA, 396 bp, Glycine max
gcttgaaattgagcaacaaaagctctcgagatattttatatggtcataacttttaactcggaggtccgattcaggcgcatcacatatagagacgctcgaaattgaacaacataagctctcgacatattcatatagttataacttttaactcggaggtccgattcaggcacatcatatgtcgagacactcgaaattgaacaatggaagctcttgagcaattcaaatggtcttaacttttcactcagaggtccgattcaggcgtataatatatcgagacgcttggaattgtgcaacggaagctctcgtgaatttcaaatggtcataacttttcacttggaggtccgattcaagcgcatcacatatagagacgctcgaaattgaacaacgtaagctctc

SEQ ID NO: 8283 - DNA, 365 bp, Glycine max
agctttaacttaatcaatgcaatttccttttgtgcttgttcattccacccaaacgcacccttcttcaaacattcggtcataggacttgctatagtgctaaaattctggataaagcgtcgataaaatgatgcaagaccaaggaaagatctcacctccgaaactgttgtagggctcggccaagtcttgatagcatccacttttgtttgatcaacggatactccatctttagacaccacatatccaagaaacaccacactttcaaccaagaaatcacacttttccctcttcccatagagattttgtgctcttagggtctcaaatatttgcttcaaatgagtgaaatgctcctctatagatttgctata

SEQ ID NO: 8284 - DNA, 400 bp, Glycine max
tcttatccaaggctcatcttggtggtgaagctctcttctttcatggcttattccctagtggatggtgcctcctctcacctcttttcctttttcttccgctgcatccccatggtggaaaatcaccattaaaggacctcattgaagctcaaagatccagcctccatagaagccccacaagcaagcttccatcagaatgttcgaatgcggcccataataaattgaaacactcaaaattgaacacgaatgctccaagaaaattcaaatggccatgacttctaacttcgtatccgattgcaacccataatatatttagacgctcaaaattgaacatgaaaggttcgagcaaattcaaatgaccataactcttactttcgtatccgattgcagactattaaatatc

SEQ ID NO: 8285 - DNA, 398 bp, Glycine max
tgtcaccgttcgcaacccttttgggtttatgcctttggttatgggaaagagaagcaacggtgttattgttttcgcttctaaaacttgcttaacctaattgaagcgatttatgagagggaggtggttgtgccgcctgagaatttctacgacgacgtcgaagctcgcaagtacacctctttttctcatattgttcaaattcaggtttttccctttttattcttctcattccctattcaattttctttcgttgtgaaattcattcattcattaatttctctatgccaaataagtggcactatcaaagagagctctcgaactacttgctttgcctgatgaccacgttcctaaattactccttgatatcagtaattttaatttaattcaatttaattaatatc

SEQ ID NO: 8286 - DNA, 394 bp, Glycine max
tctagataaagtaactcgtcttctctctattttttgtttgagggcacacgtaacacaagctgaacttcattgtcagttccatgcactgtgggctggggtgattgaggaggttcgagttcaaagggataaatgttttggatttgtcagatacaacactcatgacgaagctgcactggccattcacatggctaatggaagacttgttcgtgggaagaatatgaaggtgagaattctttcacttgatgcttatctggtcaactaattaattgctattctttgttgaggctgatggttgccccatataataatgcctattgcctagtaaggatggtgatctctcttttttttcttcttgccaatggctgatcacgttactcgcatgtagagactcatg

SEQ ID NO: 8287 - DNA, 397 bp, Glycine max
tagctacacaccccctataatagctaatcttattccctcgacaaaaaacatgaaaatacaaaaaaaagtccttactacaaagactactcaaaatgccccgaaatacaaggctaaaaccctatactactagaatggccaaaatacaaggcccagacgaaggaaatacctattcaaatatttacaaagataagcgggctcatacttagcccatgggctcgaaatctaccctaaggctcatgagaaccctagggccttcccttggatctctagcccaatctacttggagttttctacccaatgcccttgcggggtaggattgcatcacatagcatgcccgttggcgtgcgttccaaacgagtcctcatggacttcctcgatcatgtggtccgctcatgaa

SEQ ID NO: 8288 - DNA, 396 bp, Glycine max
tctatagaaggttcgttcctaatttctctacaatttcatcacctctcaatgagctggtgaagaagaatgtggcatttacctggggtgaaaaacaagagcaagcctttgctttgctcaaagaaaagcttactaaggcacctgttctagctcttcctgacttttctaaaacttttgagctagaatgtgatgcctctggagtgggagttggagctgtattgttacaaggtgggcaccctattgcttattttagtgaaaaacttcatagtgccaccctcaactaccccacctatgataaagagctttatgccttaataagagccctccaaacttgggaacattaccttgtttccaaggaatttgtcattcatagtgatcatcaatcacttaagtacatta

SEQ ID NO: 8289 - DNA, 362 bp, Glycine max
agcttccattttcaatttggagcctctcgatatattacgggactctattggacatccgagaaaaaagttattgtcgtttgaatttggttcgagcttccgttttcaatttggagcatctcgatatattacgagactcaatcggatatccgagttaaaagttaatctcgtctgaatttgatacgagcttccatttttaatttggagcctcttgatatattacgggactctattggacatccgtgtaaaaagttattgtcgtttgaatctgatacgagctttcgttttcaatttggagcatctcgatatattacgggactcaatcggatatccgagttaaaagtaaaatctcgtctgaatttgat

SEQ ID NO: 8290 - DNA, 423 bp, Glycine max
actcttataatactcacgctctaaccgcctgagatctttgccttaacacattggatggttcatcctttgtggtataagtagagggtacatctacttgggtttgactgagaacaagagagggtacatctcttgtggatcagttctagtggagggtacatccactagggtttcgaagagaacaagggagggtacatcccttgtggatctttgcttgtaaaaggatttttacaaggttgaaagaaatctcaaggaccgcaggtctcttggggattggatgtaagcatgggttgttgccgaaccagtataaaaactcttgtgtgtttgtctccttcttccctactcttttaatttttgctgtgcatttaatttccgcttttactttctgttaagtttctcttatactccttattctcttaacaactt

SEQ ID NO: 8291 - DNA, 358 bp, Glycine max
agcttttgaggaatttttcaacttctttgtccataaattgtgttttgtagtccgagatcaaagtattaggaattccaaattggcataaaatgttcttcaaaatgaactttcgaacattggttgtcgagatggtggcgatgggctcggcttctatccacttggtgaagtgatcaatgcccactaggaggtattttacttgtccctttgctaggggaaaaggtttgagtatgtctactcaccaaatggcaaggggctttggtgttactatgttgtgtagctctttgatagacatggaagagatgttgttgaatttttgggattcttcccatttcttcacattctatataatcttttctca

SEQ ID NO: 8292 - DNA, 365 bp, Glycine max
agcttaataaatctatatatggtttaaaacaaacctttcgtcagtggtaccttaagtttcatgggataatttcttcatttggttttgatgaaaaccccatggatgaatgcatataccacaaggtcagtgggggtaaaatattctttcttgttatatatgtagatgatattttacttgcagccaatgatcggggtttgctacatgaggtgaaacaatttctctctaagaattttgacatgaaagatatgggtaatgcatcttatgtcatcaacattaagattcatagagatagacctcaaggtattttgagtctatcacaggaaacctatattaacaaaattctagagagatttcggatgaaaagt

SEQ ID NO: 8293 - DNA, 399 bp, Glycine max
gctattgggattgagaaagctttaatggattgtttatttgatagtgcaccgataccggtaactggttaataggatcttgagaggattgagggcatcaatattgtatttggaaagaccctaaagaaggaaaaaagtaaaacttccatatggaagaagaggtttatattgtttggtcttccatactggtcaaatttagatgtcaaacattgtattgatgttatgcatgttgagaaaaatgtttgtgatagtctcatcgacatgcttcttaacattcaaggcaagagaaatgatggtttgaatactcgccaagatctagttgagatggatatatgagatcagttacatccaaggtctgatggtaacagaatatacttgcctccagcttgtcatgctttgttg

SEQ ID NO: 8294 - DNA, 357 bp, Glycine max
agctttggctaagttcaaacactacctattttgccataaattcattattcatactgatcagcaaagcttgaaggaattattatagcaaaggttacaaactcctgagcaacagtagtggttacccaaatttttgggatatgattttgttattcagtacaagccgggtaaggagaatattcctacggatgaattgtccaaaagtttttctatggcatggtctgaagcagtaggagtatggatgactcaagtagcaacattaatgaaggaggatgctattttggctgcactttataaacaatgtatagagggaactgtgtcaggaactaaatatacagtgaatgatggattgttgttttg

SEQ ID NO: 8295 - DNA, 387 bp, Glycine max
tgtccttcgtttgattccaaatggtttatttcttaatgttcactgttgtacaagctcaagtgcacacatttttcatcaagcaaggtgccacaatggtacgttccataggaccacatttccaagtcccaccagcatcgctccaaggcctagttggagtcacaatactctttgctgtgccattctatgaccgtgtctttgtgccactagcaaggaaaatcacagggaaacccactgggataacagtgctacaaagaattggggtaggacttttcttgtcaatccttaacatggttgtgtcagcacttgtggaggccaaaagggttggtgttgcaaaagagagtggcctaattgatgacccaaaagcagtgttaccaatcagcatttggt

SEQ ID NO: 8296 - DNA, 350 bp, Glycine max
agcttctaaacaatggttttgtttttctccactaccctattcaccattggttaagggtgttccttagtcattctactagtgtatgtagatgacatcatcctgtcaggaccaaattttgcctctatgcaagctattcagacccaattgcaatctatgtttcaattgaagatccttggcactttgaaatattttcttggcttagaaatagctaaatccaacagtggtatctcactctcccagagaaaatacactctatctcttttagaagatgcatgtttcttggcatgcaaacctttcaatgaatcccaacctgaagctcaatcttcatgatagagacttactacctgatc

SEQ ID NO: 8297 - DNA, 402 bp, Glycine max
agcttctacattcaatttcaagcttttcgatatatttctggactcaatcggacatccgagtaaaaagttattgtagtttgaatttgctcagggcttcggtattccatttcgagcgtctcgatatattacgggactcaatcggacatcagagtaaaaagttattgttgtttgaatttgctcagagcttcggtattccatttcgagcatctcgatatattacgggactcaatcagacatccgagtaaaaagttattgtagtttcaatttgctcagggcttcggtattccatttcgagcgtctcgatgtattacgggactcaatcagacatccgagtaaaaagttattgtcgtttgaatttgctcagagcttctacattcaatttcgagcttttcgatatattac

SEQ ID NO: 8298 - DNA, 362 bp, Glycine max
agctttgagcaaattcaaacgactataactctttactcggatgtctgattgagtcctgtaatatatcgagacgctcgaaatggaataccgaagctcagagcaaatttaaacgacaataacctttttactcggatgtctgattgagtcccgtaatatatcgagatgctcgaaattgaatgttgaagctctgatcaaattgaaacgacaataaatttttactcggatgactgattgagtcccgtaatatatcgagacgctcgaaattgaataccgaagccctgagcaaattcaaacgagaataactttttactcggatgtctgattgagtcccgtaatatatcgagacgctcgaaattgaatac

SEQ ID NO: 8299 - DNA, 391 bp, Glycine max
ttccaggtttggtttatgatgacgggcttcttttttgggtacacgtggcaggatttccgagctggatacagaaaaaggtggaggaggcacagttagtgtacgcggaggttgggaaggaactacggttatgtagcagggattctccgtaccttggaaacacgaatgttgccacgtgtcacgagctgaacacgtatctgcacctcgttgatggcttcgtcagctccacgtgtcccttcagagcctccgcgaagaggttcctccagcgttgacagccaccgtagtgtggtgctctaacccaaaccattaacagaaaagataagttttcatgggaaaatgtaattattagctgtagttgtctaaattgttgcacaaccatcgtcattgtagttag

SEQ ID NO: 8300 - DNA, 395 bp, Glycine max
  unsure at all n locations
tgaccaggaattatttgtattggttggatgttgaattctggttgttcctggtgcggagatgatggtacagcgggtgaaccaggagcggcagtttcttttggtgaggaagccatggaaaaacagagcgtttggaatgatttcgtaaatctcagaaaactattgggaaatgctggagaaaacacgaatgccaagcagatataaatttgaatgaagaatgtagaggggcgtgtgaagcaacggtcgaatttgctttgtggtgaacgtgctattaatgttaagtgattcgtttgggcacgttcagattgcagtagctgctataattcctctagcagacaaatgcccagcttgcccctcagttnttcaaactgatttgcatccaaagcctttgtgaaaat

SEQ ID NO: 8301 - DNA, 371 bp, Glycine max
agcttgcttctacaccacttattgagaagatgagtcaagaagaagctcgccaccataggaagccatggataagagcttgaaggtaggagaagatgagtggagggagagggagagaagaagcacagaattttgtgcctcaaatgaggtctgaactttgaagtgtaattctcaaatgatcaaagttgaaaaaatgcacacacatggcctctatttatagcctaagtgtcacacaaaattggagggaaatttgaatttcaaatttcacttgaatttgtggagccaaattttggagccaaaatttcactaattatgattagtcaattttatctatggttcagcccactaatccaagatcaactccaagattctcc

SEQ ID NO: 8302 - DNA, 355 bp, Glycine max
agctttgggttcgatggcccctttgacatctattccccacatggaaaaaggacaaggggcagacatgacattcaaaggatgtggcggaacattgacattgtccgtgtatgcttgacatttatggcatttccttacatgggcgcagcaatcgctttccatagtgagccagtaataacctgctctaaggatcttcctggccatagcatgcctattggcatgtgtcccaaatgaacccccgtggatttcctcaatcatgtagtttgcctctttggcatctatgcatcgcaggagggtcatgtcgtggtttcgtttgtacaggatggtaccactcacaaagaaaccagtagccaatctc

SEQ ID NO: 8303 - DNA, 392 bp, Glycine max
tgcaactctttcggcatggcatcataaatctgtcaccacctcctgtgagccgagtcactcgcgaaaacatggcgatcctgcatgtcccagttacaatcataatccctataacacatccacggcttcagacccaggtagtgtacggcgtacacgtcatcagggagctcgtgcatcccatggccactactaggaaaagtcttgagctgattcaccttggccggcaaacggtgccaccacgtgaagatttcgttgagaaagccttggtcgccgccgttgtaagaacgcaccttggaagtcacgttcatcattttccggaacatgcattgcgacggctcgattaccatcaagcccgagttgaacagcgttttctcgttaggtgcggctgataactg

SEQ ID NO: 8304 - DNA, 355 bp, Glycine max
agctttttctccctttcctttgttcttctcctctccttgcgttcttcttcttcacgtttttccttttcttcttcttcaagaagcttcatctgtagacaaaatcatgcaattgggatttagaagtgcattttaaaaatagaaacaagagctttttttcctgtccccaacagcttttttcctaaaagcaaaaaactaagacctgcttttccaacgtaatgatttctttgcatgctacatgcactcgatcctccagcagttttagtgcaagacaaacgaatatgctatgtgcattttggcgtgctgtcccttctctgaaagccttttcaacctgaaaggatagtacacagtcagtggt

SEQ ID NO: 8305 - DNA, 398 bp, Glycine max
tgtgttgacaaggcccagttgatagaatttttttctccctgaagttggcatattactggtatggaacctgacacctgagtgttcatgttttcattgttgaactgctgtatgtttctgtgttttgtgtttacagcaccataacttaacaaatcaccaatctgcaattacctggttgtgataatgacagggttgttgtttgaagctcaatctttgcataaggaggcctttgtttccttctcagtctcgttgtcaatagaaccggattacattcccagtattatttcaacagcaaaattgttacttaaacttggaatgcaatcacttccaatagcaagaagctttttaatgaatgctttgagattagaccccacaaaccatgatgcatggtttaaccttgg

SEQ ID NO: 8306 - DNA, 349 bp, Glycine max
  unsure at all n locations
agcttgtgcctctttacgtctgttatattaatgnancatccaaagacccttatgtgctttgctgatggcttcttcccgttccaagcttcaattggagtcttgtcttttacagacttaattggacatctgttgattatgtaaacagcagcgtagactgcttcagcccataatgtgttaggtagacccttctccttgagcattgatctaaccatttccataactgtgcgattctttctctcgaacactccattttgttgaggagaatatgcgactgtaagttgtcactcaatgcctttatcctcacaaaaactttcaaactcgcgagaagtgtactctttgccgcgatcac

SEQ ID NO: 8307 - DNA, 394 bp, Glycine max
ttgaggtagtttggttcctttaaatatttgcatctatgattgtttgctattgtttatatcttgaattgtaggtattgatttaaacatctttaatttctgtgcagtatggttgttactgaacttcctccaaatgatgctaagagagctcttgaggcattatgcataccagtcataactcctttacaggttagtgtccaatctgcagagatatttttagttatacattttcttttgatgtttttgctttctataatttgcttcatcaggaagctatcaatcaaggtccagaaagcttgagtaaaagaccttctcgtcagttaacagttcatattgatcgatttgcctacatctttaggtgtgttccataattaatattgtcatgtctatgcaccct

SEQ ID NO: 8308 - DNA, 394 bp, Glycine max
tagcattagcatgtgttgacactggatcactttttttgggtacgtgtttgttactttagtggatcctatcaaagaacctccgcttataactacaaacatagttctgtctgtttttgttgtgtattgtcatgtggacaaagttccatgccatgtttgagacatctaagattggcgtcttgcctttgcccagtattattttttgcaacatcttcctttcttaaccttgtcattacctcgaaattttaatatggcaacttactcttgtggaaaataatttttaagaattaatataacactttaaaattaaatttagaatattaaaaaaatataaaacatagatataattctttaggtgttattgatacttttctcctgttagaattaaaatcgtact

SEQ ID NO: 8309 - DNA, 360 bp, Glycine max
agcttgaagaatgtatatacaattggcagtggggatgattctgcaccaaagttacctgatcgagagccccaaaaggcacctaatgggcatgctgttatgcatgttaaggatatactgcctcgaggccttatcaactctgggaatctatgttttcttaatgcaaccatgcaggctctcttgtcatgctcacccttcgttcatcttttacagcaattaagaacttgcaaccttcctaaggttagtttttctgctgctgcatttcaactattaactaatactgccatctactggttttagcttaacttatatatggcttaataacattaaaggaataaagacctaatagctgtattatgcatt

SEQ ID NO: 8310 - DNA, 354 bp, Glycine max
  unsure at all n locations
agcttatcctccaagccagaaagttccaaaacctcccaccaggtccaccctctctcgccataatcggcaacctccactgcgccccctccatcgcaccttcaaagccctctccaacaagtacggccacgtcatctccctatggttcagctcccgcctcgtcgtcgtcatctcctcccaaaccctattccaagaatgcttcaccaaaaatgacgtcgtcctcgccaaccgccctcgcttcctctccggaaaacacatcttctacaactacacaaccttagggtcctccccctatggcaagcactagcgcgtgagggggaggaggacngagggtggcgaaggaggagggaaaagggg

SEQ ID NO: 8311 - DNA, 399 bp, Glycine max
tccaaccacagaaatttcacccaaattagagttacttttattctaaaaagaactacagagattatatactaatactaaacccacaaatcaaactaatgttttgcaggattacaacgcaaaaatttcagattttggcttggcgaaattagggccttcgggtggagattcacacgtgagtacgaggatcatgggaacatatggctatgctgctccagaatacgttgcaacaggtgatcatctcatcttatctaaacacataaatagagagatggtttgtgaatatgctagttgaagttgaaactaattgttttatgattcaacaggacacctttacgtgaagagtgatgtttatggttttggtgtggtgctgcttgaaatgctgacagggatgagggcaat

SEQ ID NO: 8312 - DNA, 356 bp, Glycine max
agcttccatcacaaacactttatggttagaaggttggtagaaataatatcccattgtttcttcaggataaccaatgaatctacacttatcagaccttgcctcaagtttatctgtttgcaatcttttaacataatcagggcaaccccataccttgatgtgtttaagacttggtttctttcctttccatatctcatatggagttgtagagactgcctttgtaggaactttatttagcaagttggttgttgcttctaaagcatatccccataagtttaatggaagatcggtgaaccccatcatggatcttaccatatctagtaaggttcgatttcttctttcagatacaccattgtgtt

SEQ ID NO: 8313 - DNA, 395 bp, Glycine max
tctggtaagggctgcaaagggtccatatgttttatgtcaaaaactttcaaaagatataattaaaatagtgagaggcaataaaaaatgctaaatgatctgataagcacatgcataagactaataagtttgctgaagttcaaggctgaaaaacatggaccacaataagtgaataaaccaattggaaacataagaggagagcacctgctattgggatcataatagaatccactgatagagccatcgctgcaagagaaacaaatgtagtaaaatccggctatggttaatccacagtcggttccaacattcacaaagtactgctccttccacctctgcaacaaagaaataagtgcgatttgtaaaggttctcatttcagataaatactttttttttcaac

SEQ ID NO: 8314 - DNA, 351 bp, Glycine max
  unsure at all n locations
agcttagactgagttcagcctactcatcctcagactgatggccaanctgnncgaaccattcagtcattggaggaccttttaagagcatgtgtcttacagcagaagggaagcttggagagttttcttccattgatagagttcacttataataacagttttcactctaccattggcatgactccctatgaagctttgtatggtagaaggtgtaggacacccctatgttggttagagcccggagaaggcctcaccttatgaccagaagtggtacagcaaaccactaagaaagttaagttaatttaggaaaggatgagaactgctcagagtaggcaganaagttttcatgataag

SEQ ID NO: 8315 - DNA, 357 bp, Glycine max
agcttgtgtcgcactttcaactgctgaagctaaatatatagttgcagtaagttgttgtgctcaaagtctctggatgaagcaataacttgaagactttggagtacatcttgatcacattcctatacaatgtgacaacacaagtgttatcaacctaataaaaaactatgtcaagcattctaggactaaacacatagaaataaggcatcattttcttagagatcatgtgcctaaaggtgactactacattgagttcattgatagtgagcatcaactagcagaaattttcactaaacctcttgatagagataggttctttttcataaaaaatgaactaggcatattgaattcatctagcat

SEQ ID NO: 8316 - DNA, 350 bp, Glycine max
  unsure at all n locations
agcttccgagctgatgctctcttataaaaattnttcttatnngntttcattcttatgtgaccaaagcacagcttcaaatttgggcactttagatgtgtcacacaatcaaataaaggggcaactgccagattgttggaaatcagtaaagcaattactgttccttgatttaagcatcaatatattgtcagggaagattcctatgtccatgggcgcccttgttaatatggaagccttggttttacgaaacaatggtttaatgggtgagttgccttcttctttgaagaattgcagcagtttatttatgctggacctgagtgaaaatatgttgtcgggtccaataccttcatgga

SEQ ID NO: 8317 - DNA, 398 bp, Glycine max
taatacccaaaatcacatctacaggaccaaggtttcttcatatcaaaatttctagacaagaaagacttcacatcatttatgaattgcatattactaccaaatatcaatatgtcatccacatacaaacataaaatgacacatccattatcatcaaattgtttcacatacacacatttatcagtattattgatttgaaaaccatacgaaagaacaacttgatcaaatttttcatgccattgttttggagcttgtttcaaaccatataaagatttaacaagtttgcaaactttcttttccttcccctgttctacaaagccttcaagttggctcatataaatttcttcttctaattcaccatttaaaaaggcagtttttacattcatttgatgaatttctaa

SEQ ID NO: 8318 - DNA, 353 bp, Glycine max
  unsure at all n locations
agcttcaatggcttantaaggatggagaggtgcaagtaaggaagcaaatggagttggatatttccattggaaattacaatgataaggtgctttgtgatgttgttcctatagaggccagccacttactcttggggagaccatggcaatttgataagagggctaatcatgatggtttcaccaacaagatctctttcacgcatcaaggcaaaaaagatagtgctcaaaccattgagtccacaagaagtgtgtgaggatcaaagaaaaatgagagagaaaattcttcaagaaaagagagaaaaagaaaaagagagccaaacacttgagagttcaaaaagtgaggacaaaaagaggga

SEQ ID NO: 8319 - DNA, 359 bp, Glycine max
agcttattctataactaccaatttccacaggtaatcgattacaacctattgtaatcgattacaatggccttgttctacggtaatccattatagtgagtggtaatcgattaccagaccctaaaatatgagtttcaagtctaaaaatcaggacaaatatgtgattataagcaatcaatatacaattaaacaatcaaaaacatttatgagtatgaaaaattacaaaaaacaaccatcaaatgcaattattataaacattcaaagtaatcaatcatcataaacaagcaaaataaccattaaaaacagtcattataaacaatcaaaacattataagcaaacaaagtggctaggaatctaagtta

SEQ ID NO: 8320 - DNA, 423 bp, Glycine max
gagagcttcgcggcgctatttacgagtgcctgtatagtggtgcgcctgaatccgacatcccagtgtaaagttatgaccatgtgaatctctcgagaggtgcctatgtttaattttgagcgagaggatatattatacgcctgaatcggacctcagtgttaaaagctatgaccatttgaatttcttgagagcatccgacgatcattttcgagcggcgctatatgtgatgaaccttaatcggacctccgtgtgaaaagttatgaccatttgaatttctcgagagcttccgtcgttcaatttcgagcgtctcgacatattatgcgcccgaatcggacatccatgggaaaagctatgaccatttgaatttctcgagagcttccagcgttcaatttcgagcgtctctacatatgatgcgcccgaatcgga

SEQ ID NO: 8321 - DNA, 395 bp, Glycine max
ttgaatgctctattcaatggagttgacaagattatcttcagacttatcaacacatgcacagtggccaaggatgcatgggagatcctgaaaaccactcatgaaggaacctccaaagtgaagatgtccagattgcaactattggctacaaaattcgaaaatctgaagatgaaggaggaagagtgtattcatgacttccacatgaacattcttgaaattgccaatgcttgcactgccttgggagaaaggatgacaaacgaaaagctggtaagaaagatcctcagatctttgcctaagagatttgacatgaaagtcactgcaatagaggaggcccaagacatttgcaacatgagagtagatgaactcattggttcccttcaaacctttgagctaggact

SEQ ID NO: 8322 - DNA, 349 bp, Glycine max
agcttgtacggacagccactcttacatcttattcatgaaaggagagggaagaggatccatccttgttaccttgttaagatttttataataaaatgctgcattctccaatcggttattgttgatgagcgaaacaaatgatttttctcattcttaacaatagtcatgccacccttgttcacaaccacttgcactctactgacccatgcactattcaaaattgagtatgctattctaccttcgataagaataagatgctatctacttacccgttcctgtatcacaagactcaatctcctttacgattgaaccactagtttaaagtcttgattcatcataatttacgcatgca

SEQ ID NO: 8323 - DNA, 357 bp, Glycine max
agcttgtgtcgcactttcaactgctgaagctgaatatatagttgcaggaagttgatgtgctcaaagtctttggatgaagcaacaactagaagactttggagtatctcttgatcacattcttctaaaatgtgacaacacaagtgctattaatctaaccaagaaccctaccatgcattctagaactaagcacatagaaataagacatcattttatgagagatcaagtgtctaaaggtgacaacttcattgagttcatagatagtaagcatcaaatagtagacattttcactaaacctcttgctagagataggttctttttcattagaaatgaactaggcatattggatgcatctagcat

SEQ ID NO: 8324 - DNA, 426 bp, Glycine max
  unsure at all n locations
tttcttccatcataactcttgatcaatgtacatgcatacactatcaaatctcaaagatatttcattattctcagaaaaagcaacatcacttgtaactttcctcacactatttgtttcttatatcatgtctttgagtgagaaaaatgataaaaagaaatttcttcaaatgcccatccaaatcgattgagtaacacaattattaaaatagaagaaaatttaaaataattttgttcactcttaatttatataatctgcactaataaaaatagaattatataatatgcatgtaatcctaaagaaacgggactattaaaagaatatttaaaaaaaaaacatntaaaatcatgataagaatgtattagtaatattatttaagaaaatattaagtactttggaaaaaatgtaaaataattatatctttatgaa

SEQ ID NO: 8325 - DNA, 582 bp, Glycine max
  unsure at all n locations
tgtagcaaattcaaacaggaataactttttacttggatgtccttttgtgtcttgtagtatatcgagacgctcgttattgaaaacagaagctcgtagtaaattcaaatgacaataactatttactcggatgtccgattgtgtcccgtaatatatctagacgcttgtaattgaaaatggaagcttgtagcaaattcaaacaggaataactttttactcggatgtccgattgtgtctcgtagtatatcgagacgctcgttattgaaaacagatgctcatagcaaattcaaacgacaataaatttttactcaaatgttcgaatgtgtcccgtaatatatcgagacgctcaaaattgaaaacgaaagctcgtagcaaatgcaaaccacaataacttttaactcggatttccgattaagtccagtaatatatcgtgacgctcgaaattgaaaacataagctcttagaaaattttaacgacaataactntttactcggatgtccgattggaacccgtaatatatcgagactctccaaatngaaaacagaagctcctangaaattcaactacaataactttttactcgat

SEQ ID NO: 8326 - DNA, 616 bp, Glycine max
  unsure at all n locations
atcctctaagcacctgcggctgcagcttcattttaattacaagcgtctagatatatttttggacacaatcggacatccgagtaaatagttattgtcatttgaatttactacgagcttctgttttcaataacgagcgtctcgatatactacaagacacaatcggacatccaagtaaaaagttattcctgtttgaatttgctacaagcttccattttcaatttcaagcgtctagatatattacgggacacaatcggacatccgagtaaaaagttattgtcgtttgaatttgctcagatcatctgttttcaatttcgagcgtctcgatatataacgggagtcgatccgacatccgagataaaagttattgtcgttggaatttgcccagagcttcaattttcaatttcgagcgtctcaaaatattagagcactcaatcggacatcttagttaaaagttattgtcgtttgaatntgctacgagcttctattttcaagtacgagcatctcgatatactacgggtcccaatctgacatccgagtaaaaagttattgtcgnntaaaatntctaagagcttatgttntcaatttcgagcgtcacgatatattacgggacttaatc

SEQ ID NO: 8327 - DNA, 337 bp, Glycine max
tcttaaaactcactaaagaagtcttgatgttcctaccaaaatgctattgctaaaatatgaggaaatttttttgaaatattattctatgattccaaaaaggtacaagttctaacaagaatatattggttaatcataataactttaagaataaaggagatatgtagatttgtgctaactatagtggtataaaactctcaggtaacaccatgaaattatggaaaaaggtgattgagcataaattaatagaagggatgaggattatcgggaattaatttggttttataccaggaaaaggtttgcaacagtagcttacatacagtattattgacttggaaaa

SEQ ID NO: 8328 - DNA, 455 bp, Glycine max
  unsure at all n locations
cacctgangcatcaagcttctatagaaggtttgttcctaatcgctctacgattgcttcattctctctatgaggacgagaaaaagaatgcggcatttacctgaggtgaaaaactagaacaagcgtttgctatgctcaaagaaaagcgtactaaggcacctgaactagctcttgctgactttagtaaaacttctgagctacaatgtgacgcctgtggagtgggagtgatagctgtattgttacgaggtaagcaccctatttctcatattagtgatgaccttcgtagtgccgcccttaactaccccacctatgataaacagctctatgccttaatgagagcactccttacttgagaacattaccttgctatcaacgaattcgccattcatacagatcatcaagcacttacttacattggagggcaaagcaaggaagacatgatgcgtgcataatgggt

SEQ ID NO: 8329 - DNA, 479 bp, Glycine max
  unsure at all n locations
aaggggctatccagtcgggttcgtggatgattgtgtgttgtttcaatgctcttttgaggcaatcaaaagcctctttgcatttatcattaaagtcaaactccacctccttttgcaaaaagttggaaaatggaagggctactttgctaaaatctcttataaagcgcctatagaatcctgcatgaccaagaaaagatcgcacctctcgcatgcaagatgggtaaggcaattgtgaaataacataaatttttgcaggatctacttcaatgcccttattggaaataatgtggcctaaaattataccttgctcaaccataaaatgacatttttcaaaatttataacaaggttagtttcagtgcatctattcaaaaccttntccagactatccaaaaaaatatcaaaagaggatccatatacagtgaaatcatccataaacacctctattcaatnntctaanaaatcactaaaaatactgatcatg

SEQ ID NO: 8330 - DNA, 703 bp, Glycine max
  unsure at all n locations
aaagacaatacttcattcataacatcaaataaactagatagtcatccacaatattcaaataaaacatatatgaataattaaaaaaaataaaacacaataccaaatgtaagtacataccactagtcatatatcattaaagtaattaagtttaagacacataatcataaacaaccaagagcaagtcaatataatcataatgttcagtcatactaagcaagtattaaaagaaatactaagtattcaaatgtcataaaaacatagtcaaatacaaggcttaaaaacaaaatataattataatctaaatatattatcagagaatcaaaacttaattctaagtaacaaaaattagttatgaacacatacatggtaactcattacttatctcgattaattaaccactagattttaagtatcaaataacaatcatcaacacatatcatagtaattatttacttaattcaattattctaacatgtcaaaacattntttattttttaacagaatctaataatcttagaaacaaaacataagcaattcaagcattaatcagatcagacaaaattcaattaatcatacatatttcaaattaaaactaaatatnagtatttaaacatttgtaacacaatcaaacaattttcaacaattattttctattagccacaaaaacaacttaactaagaatactaatcattccttaattcat

SEQ ID NO: 8331 - DNA, 485 bp, Glycine max
  unsure at all n locations
cttgaatgctctattcaatggagttgacaagaatatctttttattggtcaacacatgcacagtggccaaggatgcatgggagatcctgaaaaccactcatgaaggaacctccaaagtgaagatgtccagattgcaactattggccacaaaattcgaaaatttgaagatggaggaggaagagtgtattcatgacttccacatgaacattcttgaaattgccaatgcttgcactgccttgggagaaagaatgacagatgaaaagctggtgagaaagatcctcagatccttgcctaagagatttgacatgaaagtcactgcaatagaggaggcccaagacatttgcaacatgagagtagatgaactcattggttcccttcaaacctttgagctangactctcggataggactgaaaggaagagcaagaatctggcgttcgtgttccatgatgaaggagaagaagatgagtatgacctggatacagatg

SEQ ID NO: 8332 - DNA, 426 bp, Glycine max
  unsure at all n locations
agcttttagtttgaatataagttttaacacatcggttttttttatttaaaaaaaccgatgttaacatagaatcgttaacatcggttgttaaaaaaaccgatgttaacatagaatcgttaacatcgattttaacaaaaccgatgttaacatagaatcgttaacatcaattttaacaaaaccgatgttacatacgtcatgttaacatcggttttcacaaaaccaatgttaacgattctatgttaacatcagttttttaaaaaaccaatgttaataaactggttttatttacaagtatgccactgtgtttgtgttaacatcggttttgtagaaaactgatgttaacctagtgatgttaaatgtatattntttagtagtctatatttgaaaacaaaaacacaaaaatggttaattaaattaaaatttttt

SEQ ID NO: 8333 - DNA, 581 bp, Glycine max
acctgccgcatgcaagcttcatcctcctctttgtgacaatcacttgctttttctcatcattgttttcagcatcatttcccaaagggtactcttcatgagtgacacgacttgtagtactagactttgttgtttgtttttcgaataaattctcggattgaggcacaatattgatattgttctttggtgcaacacttgttgtgccaatggacttgtttctcacacttgtcatgcttctcaaccttcctttccctaagtgatgctcgcaaagagagtaacccaccaaggtttgttggcaacacctccatcctctcccatttacacgactgcaccttgaaccttccattagtgcaccaccccttaccctcttcttaccaacgttttcttgttcgggttttgttgctcttgttgccacctcttcctcgatctctcttacctcttcttcctcttctttttctttgctgtcgtcttgcctcgaacatttctgcgttatctttgccttcattctcttccgctttgtttcaaatctttgttgcgctgtcatcattgtcataataattgtatcatcttccggtgcattctcg

SEQ ID NO: 8334 - DNA, 561 bp, Glycine max
  unsure at all n locations
tttagctagacaactntntattactatgttttattttctatatttttcttccatcttattcttttcttgctcgctctctttttgctcctttttttccatgagatattttgctacctaaacatacgtatatttttgtgaggtattttgctatatacatgcgtgtccaaggtatcttgctacctaaacatacatatatatgttttgtgagatatttttgctatatacatgcatatccaaggtatcttgctacctaaacatacatatatatattttgtgaagtatttttcctacatacatgcatatccaaggtatctttctacctaaacatacatatatattttgtgaggtatgactaccttccgagcttgtgcttgttttatttaaattcctaggatcatgagcaactaggtgtgtcctgctatgacttgagaaacaaaggtgatcaaataacaagcagagatttaaaaggtactaggttgcctcctagtagcgcttctttaacgtcttgagctggacgcctgatggcttgtcggtcacgaacctagcactttgcatactttt

SEQ ID NO: 8335 - DNA, 361 bp, Glycine max
tagagcttagctacacatacctctctaatagctaagctcacctccttgagatgagaagctagagcttagctacacaccccctataatagctaagctcacccccatgacaaaaaacatgaaaataataaaaaaaaagtccttattacaaagacaactcaaaatgccccgaaatacaaggctaaaaccctatactactagaatggccaaaatacaaggcctagacgaaggaaaaacctattctaatatttacaaagataagcgggctcatacttagcccatgggctcgaaatctaccctaaggctcatgagaaccctagggcctttccttggatctctagcccaatctacttggagtcttcta

SEQ ID NO: 8336 - DNA, 519 bp, Glycine max
agcttccacacatcatttttctggttttgcttctgaatagccatttagcacctactgctttctttccttgaggttctagagttgtaaactctataggccttagatattttaaagtatccaagtattattccattatcacacttagagtcaaactttcccaagttgtctttaatatttagaatgaaacattgacatctgaaaggatggaaatatgaaatgttgggctttcatcctttccacagttgatgtggagtccttctcaaaataggccttatataaattatgttttgtaaataacatggagtattcacggctttagcttgtaagtgtaaggtcattaagcatggttctggccatttcttgcaatgatatattctttctctcaatcacaccattttgttgaggtgttctatgattagagacaatatgaagaattccattttctttacagaatagatgaaagtattcattctcaaactctcgatcatgatcacttctaggtgaagtaatgcatactat

SEQ ID NO: 8337 - DNA, 497 bp, Glycine max
  unsure at all n locations
agcttcaatggatcttacatcatgtggtatcagagcttctattaaataaaattaaattgaatttctagaagcccaatccaattaaattttagagggggaggtgagcatttggttactacacctcattgccacattatatggtcacacgttgtgcatgtccttcatgctttacatgcctcatgccacctaagcacacttagtggagaatcttggaattgatcttggattagtgggctgaaccataactaaaattcactaatcataattagtgaaattttgtctccaaagtttgggtccacaaattcaatttcaaattcaagtgaaatttgaattgaaattcaaatttccctccaattttgtgtgacacttaggctataaatagaggtcatgtgtgtgcattttttcaactttgatcatttgaaaaataaactntagaattcaaagctctcttagagcacaaaatttcgggctcttctctccctctcccttcattcata

SEQ ID NO: 8338 - DNA, 489 bp, Glycine max
  unsure at all n locations
agcttagtgctcctcataaaaatcaaaantagntatttgaaattacttctattttaataacaatattggtaaatatatagggtaatatgtgatcaaatatttggcgagacatgaaatttataatacatcaataattttgaaataaaaaaggattaaaacattaataatttcgaagaggaatgagtacttagattagaaaaagggacattatttaagtttaaaaataattcttatattttgtcaaaaataaagttctattacgtatacatgaatggagacattttaatttgtaaatgactaattattgccccgattctttcgcttggatttcatcatcctttggtctaattaacttataaaactaagcagttgcaatcatatcctataattacgccagcctgatgatcataccattattgtttcttaggtactaggtaccaaaaaaaatatattgacagttttgagttctactcaaatataattctacta

SEQ ID NO: 8339 - DNA, 507 bp, Glycine max
  unsure at all n locations
cccatgttgaatttgcttacaatagagctgttcatagcacttcttattgntctccttttgaagttgtttatggttttaacccactaactcctcttgatcttttgcctatgcctaatgtttctgtttttaagcataaagaaggtcaagcaaaggcggactatgtgaagaagcttcatgagagagtcaaagatcaaattgagaggaaaaataaaagctatgctaaacaagccaacaaagggagaaagaaggttgtcttcgaacccggagattgggtttgggtgcacatgagaaaagaaaggtttccgaaacaaaggaaatcaaagcttcaaccaaggggagatggaccatttcaagtgcttgaaagaatcaatgacaatgcttacaaagttgagctgcccaatgagtataatgttagttccaccttcaatgtctctaatttatctctttttgatgcaaatggagaaatcgatttgaggacaaatccttctcaagaaggagagaatgatg

SEQ ID NO: 8340 - DNA, 491 bp, Glycine max
  unsure at all n locations
atgttagactattgacaagtgtattaatatcgttacttttacagattttaagaagagatagtctccagagagacttgagttattcaattcctctagataaaaataatcagtttaatagttatgtacaaatttaatgaaatatcatggatttgtctaactaacgaaagaaaactaaagcaacggaataacaaaaatgacgaaatttagtgtgtcagaaatacgtaaaattaagaaaacaataataacaaatttaattaattcaagaaaaaattaggattggatttcatcgttcataccctcaatatcctaataatattaacatatatgaatcattttctaacattattgatgcacacattaaattaccctgaatcgacccctcgcactcgagaatcctaagaatatntaccgaatatcgatccctcatatatgaaataaatatctcaacattacaatcataatctcgtgctacttgcaatcaaaatgttatg

SEQ ID NO: 8341 - DNA, 383 bp, Glycine max
agcttgtcaaggattaataaacaacctttattattcatatctatgtaaatgaaagactagaaagtcatttggttgtcaatgccattattatattatctttaaaatgagaataacaaattgcaaaagaaaacattatcaaaagaataaaataaatgatattatgatattttatttaaaacgaggaaaaatataattatcttctcagtagctatgaaaaaggaaataaaatatttcatcagaattaagaaaaatataaatagcactgaaatattatttattatctctaaaaatcaaaccttatcaataaaataaaagcaattactatagtattataaaatataattttatactaaaaaaatatttgaaaaaaccaggggtaacct

SEQ ID NO: 8342 - DNA, 491 bp, Glycine max
  unsure at all n locations
agcttaagctccttcaactgcacaaggctcttaatatttgaagagtatccttgtggaaccttcacccgacgaagacactgacaaaaacttatcttctccttcttggacaaagtatggcaggctgggggcaagtaaattttcttcccatcagaccttggatgcaactgtgatcttatacccatatcagctagatcttgacgggtattcaagccatccttcgtcttgccttgaatgttaaggagcgtcccaatcacactgtcacaaacatttttctccacatgcataacatcaatacaatgtctaacgtcaagatcactctattacggaagatcaaagaanagtggacctcttcttccatatgcaactctgactattatccttcttttgggtcttccaaatacagtgttcaggtgttgaacctgctgatatacctgctcaccagagaatggtatccgcacaatatcatgctcttgacttcattaaaagctttc

SEQ ID NO: 8343 - DNA, 418 bp, Glycine max
ttcgagcgtctcgatatgttaccgggacgcaatgattacatcccagtaaaaagttattgtcggttgaattggctgagatcttcaacaattaatttccagcgtctcgatatgttacggtactcaatcagacatccgagtaaaaagttattgtcgtttgaattaactcaaagcttcaacattcaatttcgagcgtctcgatatattacgagcctcaatcagacatccgagtaaaaagttattgtcgtttgaactagctcagagattcaacattgaatttcgagcctctcgatatattacgagactcaatcagacatcccagtaaaaagttattggcgtttgattggctgagatcctcaacaataaatttccagcgtctcgatatgttacgggactcaatcagacatccgagtaaaaaagt

SEQ ID NO: 8344 - DNA, 557 bp, Glycine max
gcttgtattaagaaaatataatacaaatactaaataactgggtaatttctgttatgacattgaaataaaacaataaattttgatgatgaagatatgaggattttgtaaagaaggttgatggttatttatgtaaaatcttgaaaattagagttggtttggtagtgaatataaaattattgtagatttaattataatcctttaagcaaatgtataaacaaagtaacaactctttaaagaatacacatatatcacagataattacaaattattaatgctaagtaaataggtttaaattaaatcttgaatttatttgtttcattaagcacataaactcatgtgttaaattaaaataatttatgaatagctgatctcttttatactgctacgtactactcataacaaaaaatactgctacgtactacagccattcatatttacactttatattctttacttttttttagcttgaattaatttattatgaataaatatactggtaagttaatatttgtgagaatattctgtgtaaaaaaaatatcgaaaagtaagttttgatt

SEQ ID NO: 8345 - DNA, 489 bp, Glycine max
gctcgcccggtccttgcattgtgctgagtgggtaacatccctatgtgctttccctttgaaaacctgtcgacgacgacgaagatacacgtgttgcctttgtaagaaagtaatcccacgataaagtccatggataaatctttccatggctgtaccggtatcggtagaggactcaacaacccaactggttttctgttatcgtatttggtacactggcacgttaagcatcctgctatgaaggcacgagtatcatctctaatggaatcccatgtaaagttttcttgtaagcgatgaagtgttttttgaatccccatgtgaccacctgtcggagattggtggaattcttctagtaacaacttagtgaaggaggaattcgagggaatccaaattcgacctctgtgtaagatgaaatcattagttaacgtgtactctgggtgtgcttcggggtcatctttaatcttacgatataactccatgaaagctgggtgagat

SEQ ID NO: 8346 - DNA, 507 bp, Glycine max
ccgccctcaaaagaaaacaaagcaaaaggagaaaattcccgatctatttataggaagaaagaaaaaggagaaaattcccaattaaagagtgggagaaagcaaaaaagaaagaaaattcccgatcaaggatcggaagaaaacaaaagaaatatgcagaaaattctctggaccagacaatatctgaacaatacagaattgtcaccaagtaaacaagaaaagaaaggaaaccacgaactaaagtggtcctctccctttgattgccaaccaaaatcctgtgcgtcagtgacttgttcgcctcacactaaacaaaaacagaaaaggaaaaggccaaaaacactcaaagccaaatttcccaacaaaaaaaacccattccgaagaagaagtcctattgatccatgatcacgcatgtaatctttgatttgataggagatgatttgcaaaatcaagtcatgacatatctatggttcggaattaggacgaaacactacttcgagtgatttatttcta

SEQ ID NO: 8347 - DNA, 536 bp, Glycine max
agcttttggcacaaaaaagaagaagaagttcaaagagtattctatgtcttgtttaggatcgcgccagattgattggaaaagtatattgaaaagtaaaccaaagccttgcttttatagactcttcatgtctggccaagaggaccatttagaagagttataacttttagaaaaacttaaaaccaatttgaaaaagtcaaaaaaccatttgaagagttacatcttttgtgtgattcagaaacaataactaataatcgattaccaaatcagtgtaatcgattacacaaagcttttatgtgaaaggatgtgactcttcacatttgaatttgaatttcaacgttcaaaggcactggtaatcgagtaccaaaacattgtaatcgattacagctgtttgaaatcaattgaaacgttgtcaattcatttgaaaactttgtcaaatccattttgctattggtaatcgattacaacaatctggtaatcgattaccagagagtaataactctttggtaaacatgttttgagaaaaatccatgtgctac

SEQ ID NO: 8348 - DNA, 470 bp, Glycine max
  unsure at all n locations
ntagctgtgaccccaaggcttcatgtagactggtccattttctctaagtgaacctcggatccctgtcagatacaatactagaaggaattccatgcaaccttattacttccttgatgtacaactccactagcttctccattctatacttcatattcactgggataaaatgagcagatttggtgagtcgatctactataacccacacagcatcatgtccacgactagtcttgggtaaactagatacaaaatccatagatatgctctcccatttccattctggaatttccaatggcttcaattctcttgatggtcgctggtgctcaaccttagccttttgacatgtcaaacatcttgctacatattcagctacatctttcttcatgccatgccacccaaaaactttcttcaaatttggtacatcttaatcattcctggatggaaactaagacgaactttatgcgcatcagata

SEQ ID NO: 8349 - DNA, 467 bp, Glycine max
gactctatttaatactcaagccttgatgcaacatttggagaggttaatgaaacaacgatattattttctccatgagaggttggatcaaatggagaatagagatcataatgaagaacaaaggaggagaagagggaatgatggtgttcctagacaaaaccgaattgatggtattaaactcaacattcctccatttaaaggaaagaatgatccggaggcctacttggagtgggagatgaaaatagagcatgttttctcatgcaacaactatgaggaggaccagaaggtgaagcttgccgccacggagttttccgactatgctcttgtgtggtggaacaagctacaaaaggagagagcaagaaatgaagagccaatggttgatacatggacggagatgaaaaagatcatgaggaagcggtatgtgccggctagttactcaagggacttgaaattcaagcttccaaaactaa

SEQ ID NO: 8350 - DNA, 566 bp, Glycine max
  unsure at all n locations
tctttgagaaaacttccttgagaagctagagcatattttctctcacctctctcataactaagctcacctccttgagaagcttccttaagaagattcctaaagaagctagagcttagctacacatacctctctaatagctaagctcacctccttgagatgagaaggtagaacttagctacacaccccctataattgctaagctcacccccatgacaaaaaacatgaaaatacaaaaaaaagttcttactacaaagactactcaaaatgccccaaaatacaaggcgaaaaccctatactactagaatggccaaaatacaaggcgaaaacgaaggaaaaacctattctaatatttacaaagataagcgggcttatacttagcccatgggctcgaaatctaccctaaggctcatgagaaccctanggccttcccttggatctctagcccaatctacttggagtcttctacccaatgcccttgcgggataggattgcatcanactttacatgactggatcatgtagcagtcagggcaatccatacaaatattaaataatcaaattttatga

SEQ ID NO: 8351 - DNA, 505 bp, Glycine max
gcttcgccttctaattcacaaaaacatggtttcatgcattgtaccaatatttctgagattaatcacaaaatttaagaattatcatatctgtaaaacacaattcggcaaaattcatcattggtgaaaaggggaaattgttacgaacatcataacaaaaaatttgtcccttcaaaataaaattaaacttatttggaatttttcaacccgttcaaatcaaggaaaaattatacaatagaaggaagagagagagctcactccccttcactcgaaaatatgattcccaaaggcaagacactgttgaagttgctacaaatttctagaatattcttaaatataatatgtatgaatatggtagaacaatctacaactatagtgtatatgaatatggtagaacaatctagaactataatgtgtatgaatatggtagaacaatctagaatcataagtgtatgtataagatagaagagtctagaattatcatgatactaatctatcatgaaaactc

SEQ ID NO: 8352 - DNA, 515 bp, Glycine max
  unsure at all n locations
agcttcttagtttcagatgatgcagatgggtttgtttcnacctcatgcactcctctaatgactatggcatcatttctggcgctaaactgctgggagttggaggccatcttctcaattaaatttctggcttcagcaggggtcatgtctccaagggctcaaccactggcagcatctatcatacttctctccatattactgagtccttcataaaaatattggagaagaagctgttctgaaatctgatggtgggggcaactggcacatagtttcttaaatctctcccagtactcatacaggctctctccactgagttgtctaatacctgagatatccttcctaatggctgtggtcctggaagcagggaaaaatttttctaagaatactctcttaaggtcatcccagctcatgatggaccttggagcanggtaatacagccagtcctttgccactccctctaatgaatgaggaaaagccttcagaaatatgtgatcctcttggacatctgggggtttcat

SEQ ID NO: 8353 - DNA, 500 bp, Glycine max
tccaagttcattaatcatacctttaagccagattgtttctttcactccttcagctagggccatgtactctgcttcagttgttgaaagagcaacaactgattgttgatttgctttccaactgattgttgtaccaaacaaagtaaacacatatcctgttaaagatttccttgtgtctacatttcctgcaaaatctgcatctacataacctgtgattgctgcctcatatgctgtcttcttgtaccttaatccaactttcgaagatccatttagataccttagtgtccacttcacaacttcccaatgtgcactgccaggatctcccatgaatctgcttataatacttacagcatgagctaagtcaggtctgctacaaaccattccatacattatgcttccaacaccactggcatagggtgtttgatccattttagacctttcttcagttatttccagtgtttgaataacagataactttgtatgatggccaagtggtgtgtaac

SEQ ID NO: 8354 - DNA, 542 bp, Glycine max
  unsure at all n locations
agctntgatggtgtcgagaagaaatcacatgtttgttattttatttaaggggtagaatgtgaatgtatgtatacatgattttgttagtgcttagctttactgagctttaaaagattggctaaaattttgttaaaacataagcacttagacaatgaaggaaagctggagttgctgcacatgatgtccaacgttatgtcaaggaatcagatcgggctgcacaatgcacaaagcaagatataatgtcaaatgaagaattgaagctgcacgatccacgatgtcggatacaatgtccaggacatcctgcccgaaaatactggacacataaatctgttatatctttaacagattaatgtgcacttagcaacagatttaagcgatctatctttatgaacgaattaaaagataattaaagttcgaattacaaacttgaatagttcgttcagggattagagattaaagataaaaactgaaagatcaaacttgatcttttatatctttaagtgcagattttcaggagaatgatagatctcatccagcgcaag

SEQ ID NO: 8355 - DNA, 498 bp, Glycine max
  unsure at all n locations
attttggcgatatcagggtacatatgcttgatgactttagtgagaacaccaaccttccacgccttctttaagtcatgtggtttcttgtaaggtggagggccttgatctttaggtagaccaatttgaggccaccattcttcattcccagttggccaccatggtggaggaacacccttctctagtgggaacctcctctgaggaggatcacagtgctgcataagtgctgacaagagagaacccaaggttgtgtcctgtaactcttgcaaggtgtgtggtgtaggaccaatggaattgcatccatcattctttccaggaattgcattatcggcttgatacttggctatggcagcaggaccatttcgatcaaacctgaccttatccttccaccattcgcgaagattatctgatgctccggtcactggctttcccttcttaagatttatcctatanacaaacccttgtgccttgcanacctncattatcttcagcatgtacttc

SEQ ID NO: 8356 - DNA, 413 bp, Glycine max
agaagaaatcaaaaagcaacaagtcaaaacttcatatatgatatttatttaaagattttttcaaaaaccaaatagcaccattttgttttacaaaagaattttctcaaattttctaaagttaccagagtgattactctttggtaatcgattaccagttggcagtaatcgattaccagtgaccagattggtttttaaaatgttttcaaatgatttgtaacgttccaaaattattttcaaatagtataatcgattacactatattagtaatcgattacaagtgaatctaaatgttggaattcaaatccaattgtgaagtcacaacttgtcataaaatacattatgtaatcgattacaccattggggtaatcgattaccagtgaatagttttgaagaaaagttaagagttataactc

SEQ ID NO: 8357 - DNA, 500 bp, Glycine max
  unsure at all n locations
agcttgcttcaaccctgaataggccttcccagttgttttctttctttctcgctcagggatttttccttgcttcacctcggactcgccatactaagttgccaggttgaaaggctcgaggttgaacctttgtattatatctccttgatgctcggagcttgttggcttcttccttgattttggacatcttttggacttcgtcttttgtctctagttccaccagcatgttttcttcgttttgttgttcctagaacaacggtctccttgtcgacggttccctaattttaatggggatcatggcgcttgtgtcttatgtgagttggaaaggatttttgntggtatttatttgggggtgaatagtgataagcccacagtatacttgggagttcctccttccatagacctttggacttgttgtgcgcttatcaattttttgacatttattgtttaatcgattaccccatgatatagtctagtaacatttattgcgtctatggttttat

SEQ ID NO: 8358 - DNA, 579 bp, Glycine max
  unsure at all n locations
tgagtaatttgttcttatttcttaccacatagatattggtatgggtggagtatggaataggagtgtcaaactaatgaattggataatttttttgaattgaaatggatagccaatccatttatgatccattaataatgtattgcaaaaatctaatttatccataacttatttcatagaaaaaggtccatccattatattttatttttttcaaaacaatatttttctaaaacaaagtttaatatttgtacacattcttacactgaaataccatagaatccaatatttgtctcataaagacctatgtccaagtaatgaacttggaactacttgattcactggattgcaaaatatgttggatggttcattatctatccaataccaaatggtaatccaattcaaataatgtattaagttttatttttataattgaatagattgattggttgatttatacttgatggattggactgttagtggataaaaagattgaattgccacatatngtaatgaatactaatttgccataggttatggaaaacatanactgtaattgtttttgtactttaggtaaaactatat

SEQ ID NO: 8359 - DNA, 631 bp, Glycine max
  unsure at all n locations
tcctcggggccattcctgcgaaggcaaacatttggttaagttatttcacaagaaatataacaatcattacaaacaagggccaaacaacacttctcatggcacgagtgtcaacatgcactttataaaataatcatattggggtcatgctattttatgacacatacgtatttgcacacataaaaattttgtatgaagcattttacgacacctatccatgtacatattttttttgacaaaccttttcatgctacatcctatatatatacacacattttttggaaggcttcttttgttacctactcacaaatacacctattttgaaaaacacttttacgctacccatccaacactttgtaaggcacttcatgctatatatattcatattatgcaaggcattttcatgctatatatatccatattatgcaaggcattttatgtaactctcttgcacgcattttattcaacattttgcaaggcatttccatgctatatatatttacatatatacataccgttgaaagtatttttcatgctacctangtgcaaggtattcctcatggggcagccaaatttaaattctaataacacctctcaacatgtncaatattcatgccttttttcattcaaacca

SEQ ID NO: 8360 - DNA, 587 bp, Glycine max
agctttagatgcctttaaagtttttaatgctgaagtttagaaacaatgcggaaaacaaattaagatcgtgagatcagatagaggtggggagtactatggtagatacacagaggatggaccagcaccaagttcatttgtgaaatttcttcaagaacatgagattgttgcccaatacactatgcctggttcttcggatcagaatggtgtggcagaacgaagaaatcgaaccttattagacatggtgagaagcataaagagtaatgtaaagcttcctcaatttttgtggattgatgctcttaagacggctgcgtatatattaaactgagttccaaccaaggctgtctcaaagacaccttttgagttattcaagggttggaaaccaagtttgcgacatatacgcgtttggggatgcccgtctgaagtaagaatttataatccacaagagaagacactagaccctaagactattattgggtatttcattggatatgctcgaaggtctaaagggtataagttctattgtccatcccaccacactatgattgtggaatcaacgaatgcaatatttcttgaaaatgacttgatca

SEQ ID NO: 8361 - DNA, 391 bp, Glycine max
gcttgagccaacaacctctctaacactgagagacttttcaatattttctcacaaggagagggatgcagccggctttaccaaccattttcttcatgtctgtggaactgcaagcgcagcatatcgcagccgcaactgcttgctgagcacctaatgatccggactataacacatgagtcagactggggatcaaaccgagggaaaccaaggattcctaagggactaatacaaccagtttctcaatgctccaaccacagattcctgaggaagtggaccatcaagataagccagaagactcctaacaccaccttgtgatatgacacatattcttacatactcattgcttgcagcgaggttctgcaagcactctgcagcatgctctttggaacctaac

SEQ ID NO: 8362 - DNA, 314 bp, Glycine max
tggactagccagtgatggaatgaatccaaaggcgttttaatttctctacacagttcatggccaggtctagaaatttatagtttgcttccttggctgaaaatacatgatgttgtctatgatgatataaggcccaagacagccaggaaatgacattgatgtttatctaagtccgctgattgaagaccctaacaaagttgtgggacaagggggttttagtgtttgatgggttttgaaataagacttttcaaatgcgtgcaatgcttttttgtaccattaatgactttccagcatatgggaatttgagcggttaccgt

SEQ ID NO: 8363 - DNA, 443 bp, Glycine max
  unsure at all n locations
tatgctgcatgaattaggccaaataaatcttcataaatgatagatagtgtgatcattctaccagtgcattaaaggcccatcccaatttatcactctgcactacttgttacatgtgttaagttttcgtttaatgagcgtactataggcaaaggtgctgaaaggcgtgcctaagccactgaggcatggtgcatgaagctttttttttcttttttttaatcattttatgcctgctatcttttcaatgagttgtgtctatcaagttaatagtgtgttgaacttatttatttatgcttggtattgtcgngcattacagccttcggacattattttcttactttcaggttttgtctgtgacattggatgaatggtcaagtgatggaatagatgcaatgatttgaaatggacgaaattcttctgctaattcaatatatgacgcttatttt

SEQ ID NO: 8364 - DNA, 362 bp, Glycine max
gcatgcaagcttcaacatcagaccacttcctgtgtgctggaactttttcacatggacttgatggggcctatgcaagccgaaagccttggaggaaagaggtatgcctatgttgctgtggatgatttctccagattcacctgggtcaactttatcagagaaaaatcagacgcctttgaagtattcaaggagttgagtctaatacttcaaagagaaaaagactgtgtgatcaagagaatcaggagtgaccatggcagagagtttgaaaacagcaagcttactgaatactgcacatctgagggcatcactcatgagttctctgcagccattacaccacagcgaaatggcatatttgaaaggaaaaa

SEQ ID NO: 8365 - DNA, 285 bp, Glycine max
  unsure at all n locations
tcaacatcagaccacttcagggggcttttactacttctcatggacttgatggggcctatgcaagtagaaagccttggnngaaagaggtatgcctatgttgttgtggatgatttctccagatttacctgggtcaactttttcagagagaaatcagacacctttgaagtattcaaagagttgagtctaagacttcaaagagaaaaaaactgtgtcatcaagagaattaggagtgaccatggcagagagtttgaaaacggcaagtttactgaattctgcccatctgaa

SEQ ID NO: 8366 - DNA, 353 bp, Glycine max
agctttgaatgctctattcaatgtgttttgacaagaatatcttcagactgatcaacacttgcacagtggccaaggatgcgtgggagatcctgaaaaccactcatgaaggaacctccaaggtaaagatgtccagactgcaactattggctacaaaattcgaaaatctgaagatgaaggaggaagaatgtattcatgacttccacatgaacattcttgaaattgccaatgcttgcactgccttgggagagaagatgacagatgaaaagctggtgagaaagatcctcagatccttgcctaagagatttgacatgaaagtcactgcaatagaggaggcccaagacatttgcaacatg

SEQ ID NO: 8367 - DNA, 233 bp, Glycine max
atcccctacttttgatgattgtcaagaattactaatcgtgctttgaatagatctacacttccatcaattttatgctttattttgtacacccacttgaagccaagtgctttctttcttagaggcaattgtgtgactgttcaagttccattggtttcaggggcatgtatctaactttacactgtatctctccatcggctatctttcaccgcgtcagtataagtgacaaacttttt

SEQ ID NO: 8368 - DNA, 345 bp, Glycine max
agcttgtgtttcttcacgtctagtttatgaatgtagcatatagatccaaagacccttaggtgctttgctgatggcttcttcctgttccaagcttcaattggagtcttgtcttttacagacttagttggacatctgttgagtatgtaaacagcagtgtagactgcttcagcccagaatgtgttaggtagtcccttttccttgagcatcgatctagccatctccataactgtgtgattctttctctcgggcactccattttgttgaggagaatatgcaattgtaagttgtctctcaatgccttcatcctcacaaaatctttcaaactcgcgagaggtgtactctttg

SEQ ID NO: 8369 - DNA, 345 bp, Glycine max
agctttactaggcttgagctcggtttgagttgaatatgcaaggcttgagcttgactcattacctatcataggcttttttaaaggctcgacttggcttacataaaagcctggcttggcctacgagcctatttaaaagcttgcttaaagatgtttttgatcaattaattattttaaacctagtgaaatactaactaaaaaaacttataaaatttcatataagtaatgtacaaatccaaaaataattgataaataaaatcatattgaattcaagtcgttaaaatacaaagtatatcaaaagaaaatgaaaaaacagagcataatattaaaaaatgtatggattataga

SEQ ID NO: 8370 - DNA, 310 bp, Glycine max
tgtaccggttgacaatggtttcagagttagatggtgtgggattgaacaagcaacaattcaccacaagaatccaatgtctttggcttcaacaccggttttctccaagagctcgtcgacggccccgaagagcaccgtgtccgtctccttccttgcctcctccaacgttagtctgggagggatctccaggagaccctccgggacatacgtccacggtcccaacccggaccggtcaagaatcttgttcacaagcttgtagttctcgtcggagaggaaaccgacgcgtttcgcccggtcgagcaacatttccttg

SEQ ID NO: 8371 - DNA, 346 bp, Glycine max
agcttgcaaacccatggaagctcttaatatctcccacactttttggggtgggccattcttggatggccttgattttctcaaggtccacttggaccccatttctaccaactataaaccctaacaaaactatattatctatacaaaaggtacacttctctatatttgcatagagggtgtttttcctaaggactgaaagaacttgcctgagatgtcctaagtgatcatctacgctcctactgtacactaaaatatcattaaaataaacaactacaaatatacctatgaaatcccttaagacatgatgcataagcctcataaaggtgtttggtgcattagtgagcccaaa

SEQ ID NO: 8372 - DNA, 334 bp, Glycine max
agcttcgtggaatgctttttagataaaataactcgctctaaaataatctactattggtagatttaatctattataagtacataccctatttttctctattctactgacttatttaatatatattgcgataacatataaatgtataaaaaaatattcttggatgccttaattgctttaatttatgtcatacaaataaataaatttcttcaattacttaaatataattataaatttggtttttcgatgaaatgtgaatattctcacaaacgtttggcccatatcacttatcgggttaatttatgatctgtgtcatacttaaagttttttacctctt

SEQ ID NO: 8373 - DNA, 304 bp, Glycine max
  unsure at all n locations
ttgaaggttctgaggattatgaatgctgttaatacacttccaaggcatgcaacacctactgtgagcnnatggaataattcatgaggtaacgacaccttatacaacacaacataatggcttggcagaacgaagaaatagaactatccttggcatggcaatgagcatgttgaagtagaagaagctacctcattcattctggggaaaagttgtgagcacaacaacttatctggtgaatagatgtcctactaagagattgaaagagaaagtcccaaaaaaggtttggtctggaagaaagccattggtt

SEQ ID NO: 8374 - DNA, 355 bp, Glycine max
agcttatagccccgagagcatttgtgttagccaacaatttagccgctaattgttcttgaatccatatttctttcatgcggcctataaggttatgcctcagtcggacaaccccaaatatgcaagtgtttaatgctgggctttttgtcagtccaaagttcataaggggttttgttaactgctttacttggcaccctattaaggatgtaagttgtggtctttaaggctcctctccaaagcgactctggcaaagaagaatgactaaccatacttctcaccatatccttaagagtttggtttcatcgttctgctacaccattcatgctaagtattcctgacatactgtattgtggaacaa

SEQ ID NO: 8375 - DNA, 317 bp, Glycine max
  unsure at all n locations
taagctccttcaactgcacaaagctctttatgtttttagagtatccttgtggaaccttcacccgacgaagactctgncaaaacttatcttctcctttttggacaaggtatggcaagctaggggcaagtaaattttcttcccattagaccttggatgcaactgtgatcgtatgcccatatcagctagatcttgacaggtattgaagccatccttcatcttgccttgaatgttaaggagagtcccaatcacactatcacaaacatttttctccacatgcataacatcaatacaatgtctaacatcaagatcagatcagt

SEQ ID NO: 8376 - DNA, 368 bp, Glycine max
agctttgagcaaattcaaacgagattaaattttgactcggatgtccgattgagccctgtaatatatcgagacgctcgtaattgaaaactgaagctttgagcaaattcaaacgagaataaattttgactcggatgtccgattgagccgtaatatatcgaaacgctcgtaatagaaaacgaaagcacgtagcaaattcaaaccacaataaattttaactcggatgttcgattgagttctataatatatcgagacacttgaaattgaaaacagaagctctgagcaaattcaaacgacaataactttttactcggaggtccgaatgaatcccgtaatatatctagaatctcgtaattgaaaaaggaagctct

SEQ ID NO: 8377 - DNA, 349 bp, Glycine max
agcttgatcaaaacaattatctattcattccaatccactcaaatcatacaattgcttattcaaatcattctcaaacattcatttcatgcaaaacaatccactgcatatcattttcaatcaattcactattcaaacacgctttaggtacaagcaaacaactcaaagtgctgaaatttaaataactgaaattaaaataactgaaatatgacaacgaaatcagctggaaatataaggtgtttaaccttcaccaaaacatcttcaatgactccatatggccttgtgatggagcggtcaactaactggagggtcatgcgtgtgggcattatctctatctctccaagtcgctggc

SEQ ID NO: 8378 - DNA, 309 bp, Glycine max
tcaatggctcaatgagcattgggaaatttttgtcaatcaacaagtaaagatacccttttctataagagactctgtgatgaagttttatgtgatataatccctatggaagtagagcacattttgttgggtagaccgtggcaatttgacaagaaagcaatccacaatggtctcaccaatgaaataaccctcacccatggaagcaaaaagtttaaacttgtttccttgacaccttcacaagtggttgtggatcaagtacgaataaaaatcaaatgggatgaggaaaagaatagaaaaataaaagaagaacat

SEQ ID NO: 8379 - DNA, 312 bp, Glycine max
ttcgagtaatacaaatggttataacttttcacactgagctccgattcaggcttacaatatattgagacgctcaaattaaacatcggaagctctcgagaaattcaaatggtcataacatttcacccggatgtcctatccaggcgcatcacatatagagacgtacaaaattatacaacggaagctttcaagaaattcaattggtcataacttttcaaactgaggtccgattcaggcttataatatatctgggcgctcgaaattcaacagcgaaagctcttgagaaattcaaatggtcataacttttaactcaga

SEQ ID NO: 8380 - DNA, 331 bp, Glycine max
  unsure at all n locations
agcttttcaccagcagtggcagatccttcaagatcctcagaggagagggtatatgaggtggtgttgaaacaagccgcactggtcaaggagaagaataagggcaccaagaaagcactgaatttacacaaaccaacaggtgaaggtgatttaacccatggggatctgttgagtgctgcttatgatangtgtggtgaagtctgtgctgaatatgccaagacattntatcttggtactctctctctgtcctgttttaggccttattgtttttcttaatcattttcccttgatccaatgagtttttgcgcattcttttaaagctcattataatatc

SEQ ID NO: 8381 - DNA, 356 bp, Glycine max
agctttatgcacctttgagcggttttcctctactcagttgtatccagtgtttcttctaatgctcattaagaaacgaaatgcaaaatgtcttaatctcattattggttaagagaaattctatctttgtgctttcattcctcattcttcccattatttttttggaaaaaatgtgtgttgttctgatcggtttggggctttgtttctttaccatgcgtgcttgcattttagtgaaagttttcagaaacttcaaggtcttcagtcttttacattcacaagaattcaatgtcttctgccttttacatttcaaatacttaaatgtcttttatcttatacatttacaagacttcaatgtcttt

SEQ ID NO: 8382 - DNA, 358 bp, Glycine max
agcttttggggaggaatttagggtttcaaatcctacattagagactgacacggttatggaagttatttgctggttttgaaatgcttgatatctataatgggtattttatgattaaatttgatatgtaggaagacggaacaaaagtgatgaaggagggcctctggatggtctttgatcactatctcacggtcaaaacatggaatccagactttagctccccggcggaaaaaactaacaaaaccctggtatggatacgttatcatgaaccttgtttattatgacgaaagtattcttttggcattggcatcagcagtaggacaccctatcaaagttgataacaatatgaaagattttcgga

SEQ ID NO: 8383 - DNA, 312 bp, Glycine max
  unsure at all n locations
gtcagcttctagatatattatgcgccttttcattcttccgtttcaaaagttatggccatatgaatttctcgagagcntcgttgctcaatttcgagcgtctcgatatagtctgcgcgttaatcggacttccgtgtgacaagttatgaccatttgaatttctcgagggcttccgtttttcaatttcaagcttctcgatatattatgcgcctgaatcagactttcggttacaaaagttttgaccatatgaatttctagagagcctgccttgttcaatttcaagcgtcctgatatatcatgcgcctgaatcggact

SEQ ID NO: 8384 - DNA, 333 bp, Glycine max
agcttcttgtatatattatgcgcctgaatcggacttccgtgtgaaaagttatgaccattgtaatttctcgagagctgtcgatgtttagtttcgagcatctggatatattatgtgcctgaatcggacatccgtttgacaagttatgaccatttgaatttatcgacaccatacgttgttcaatttcgagcgtctcgatatattatgcgcctgaatcggacttccgtgtgaaatgttatgaccattttagtttctcgtcagcttccgttgttcaatttcaagcttctcgatatattatgtggctgaatcggacttccgtttgaaatgttatgacca

SEQ ID NO: 8385 - DNA, 312 bp, Glycine max
tctggtgggacatcttgacttgctttcctatctgacattcaccacagattctgccttcttctattttcagatgggaatgcctctaacagcacctttgtcaatgattttcttcatgcctcttaagtgcagatgtccaaatctttgatgccatattttgacttcatcttctttggagaatagacatgtggaggagtaactggtttcttgaggtgtccataggtaacagatgtcctttgatctgctgcccttcattaggacttcactcttctcatttgtcaccaagcattctgactttgtgaagtttacattgaa

SEQ ID NO: 8386 - DNA, 304 bp, Glycine max
ttgagcaaattcgaactacaattacttttaacttggatgtctgattgagtcccgtaatatatcgagacttcgaaattgaatgttgatggtcgttgcaaattgaaacgacaataactttttactctgatgtctgattgagtcccgtaatatatcgagacgctcgaaattgaatcttgatgctctgagcaaattcaaacgacaataactttttactcggatgtctgattgagtcctgtaatatatcgagacgctcgaaatttaatacgaaagctatgagcaaattcaaacgacaataattttttac

SEQ ID NO: 8387 - DNA, 328 bp, Glycine max
agcttcataattcaatttcgcgcgtctcaatagattacgggactcaatcagacatccaagcaaaacattattgtcgtttgaattagctcagagcttcagaattcaatttcgatggtctcgatatattacgggtctcaatcagacatctgagtaaaaaagttattatcgtttgaatttgctgagagcttcaacattcaatttcgagcgtctcgatgtattacgggacttaatcagacatccgagtaaaaagttatcgtcgtttgaatttggtcagagcttcaacattcagtttagagcgtctcgatatattacgggactcaatcagaca

SEQ ID NO: 8388 - DNA, 310 bp, Glycine max
tatgctgcaaacatttacattagaccttctcaacctcagcagcaaaatcaaccacaacagaacaattatgactctctagcaacagatacaaccctggatggaggaatcaccctaatctcagatggtctagcccttagcaacaacaacagcagcctgctccttccttccaaaatgctgctggcctaagcagaccatacattcctcctccaatccaacaatagcaacagccccagaaacgaccaacagttgaggctcctccgcaaccttccctcgaagaacttgtgaggcaaatgaccatgcagaacatgca

SEQ ID NO: 8389 - DNA, 354 bp, Glycine max
agctttaggttcaatggctccgatcacatctatgccctatatagaaaacaaccaaggtgctaccaagacgttcaaaggtatgggtggagcattaacattattagcgaaggcttggcacttatggcatttcttcacatggatgcaacaatcactctccatagtgagccagtaataccttgctctcagaatttttcgggccatggcatgtacattatcatgcgttccaaaggatccctcatgtacctccaccagcatttgctcagcctctctggcatccacacatcgaagcagtaccatgtcatggttcctcttgtataggatattcccactcaagaagaaaccggccgccaactt

SEQ ID NO: 8390 - DNA, 360 bp, Glycine max
agcttgcttgcctctagttgacatttgtgcggataactattaggtatcttcgcatgccacctgactcacgggttggggtgacagaactgtggggtggttgacaaaagcgggacttttgctcctacatatcttcaattgcgagactacatagttcttcaatttttgtgtgagactacaaatagtctcaatgttattttactaaaatgcgaacatgctaacatgctttagcaaagaaacaaaccttcaactgatcaaggcaacatatatttttttgaataaaaacaatgcgtctattggagaaggaaagtatgctaataaaattttctcataaccacaaatgagattttggatgttagcatt

SEQ ID NO: 8391 - DNA, 309 bp, Glycine max
ttttagtttataaaaaaatatagaaaatttcttaaatgatatgctaaacatagtcaatatttaatgaaaaatatgaagtatatgatatatttgaaggaaagcaaagtgataataaacaaatgtttgaacattaaataattattggaacaactcatttaattttaggttatgtgaatgtaccgaataataaacatgaagatagaaattgtgacctcatatattgggattgaaactcatattttaagatgatatcatatctcatcctagtaattattgttaggtctattgtgttgtctattgtcgggttat

SEQ ID NO: 8392 - DNA, 311 bp, Glycine max
tattgagagtgtaacaatctattctaatagcatctgcccaaagggatttttgtaggtttgtcccattcacaaagttctagcgccttcttcaagagatctatttttcctttccacaacatcattttgttgaggtgttctcggggcagaaaaattgtggtgaattccattttcttcacaaaacttttcaaaatactcattttgaaattcacctccatgatcacttctaattgaaataatactaagacctttctcattttgaataactttggcaagtttgtgaaaagcatcaaaagcatcatttttggttctca

SEQ ID NO: 8393 - DNA, 340 bp, Glycine max
  unsure at all n locations
agcttctgttctaaatttcgagcttctcgatatactatgggacacaatcagacatccgagtaaaaagttattgtcgtttgattttgctcagagcttttgttctaaatttcgagcgcctcgatatactgtgggacacaatcggacatccgagtaaaaagttattgtcgtttgattttgctcagagcttctgttctgaatttcgggcgtctcgatatactacgggacacaatcggacatcagagtaaaaagntattgttgtttgattttgctcagagcttctgttctaaattttgagcgtctcgacatactacgggacacaatcggacatccgagtaaaaag

SEQ ID NO: 8394 - DNA, 309 bp, Glycine max
  unsure at all n locations
tgcacagagaggccacttaatctccttcatagtccccaaaagaacactaaccaaactacaacacctnaacttcaccctcacctcatcacctttgtccccatcactgttcctcgagttgatggtcttcctcaagatgctgaaaccacttcagacatacccttctctttgttcccacttctcgccacggctttggaccgcaccgagaaagacatcgaacttctcctaagggaactgaaaccacaatttgttttcttcgatttccaacattggctgcccaacctgactcgaagcctaggcatcaagagtgtc

SEQ ID NO: 8395 - DNA, 261 bp, Glycine max
  unsure at all n locations
aacaaaacttacctttcncccttttattgaagatataaaaaacaccacctatatcccaaaaaataatcatctgaaaaataatgaagtttgaaataaatgaaaaatcactaatttccttagaaataaagaacaaattcatatcaagaaaactggaaattgcaaccaacagtaaccccaatgaacctaagaagtagaaatggcccaaaagatgtgcttgctctttgaacctccatcatagagtatatgactacattgtgtgag

SEQ ID NO: 8396 - DNA, 362 bp, Glycine max
agcttcttacaaagcatacggctttctggatgtagatgatgatatctatacagatggatcttatatatctatatatctatagatagatatatagatatagatatatagatatagatcatacaatgaagtaccgcacgagtgggtatataggaatccaaatctgccgaatcactcatgttatgatcttctacatcctaggtcttcccgttccttcatctggcttatgttcttcatgtagcattcagactgaatgactctatgaaattacgtcgctacttccacatggtacgggtaacgtaggagacatctctatttttcccggggggaatccttagaattaccacagcttagctttcaattcg

SEQ ID NO: 8397 - DNA, 364 bp, Glycine max
agcttaatatacatattaatatattaaaatatttcaattttaatatagaaagagtgatagtaaaatacaaatatagacacaaagacacacaaacatgatagtacttgtatttcccctagttaattaataaaagtaaaagagaacaaatgaattagttacatgaacataatttgagagtggtttacacatgagcaattgagggcaagaagaatagttggtattttactaattatttaggggcaaaatcagtcaaataaagcatacaccatatgagtaatttccattattaatagttatagataattgaatttaaaataattttgaaacactgatttcacgattaatagtgtgggtgttgttacac

SEQ ID NO: 8398 - DNA, 310 bp, Glycine max
ttattggcttaacttgatctttaactccttgtttggcccaatgccaactagcttaacttctctcacctactatctcttcaacacaataacctcttgggctctattcctaactcatggggtggtagcttgaaaaataacttctttcggttttgaaaaatgatcatagatcataacttgtcgagtggaagcattcctgcttctttgggtggcttgagtgaactcagagagatttatcttagtcataaccaatttagaggagttatcccaaatgaaataggaaacctttctagacttaaaactctagattttt

SEQ ID NO: 8399 - DNA, 340 bp, Glycine max
agcttccatcaagtgtgtttcatatttcaataacaattgtggattatatggcacaacaaatcgattatcaagttcaataccatttttagcactgtacgcccatcatttcttctcctataaattggaaatccatcttggtcaacaattgttgatccatggaattttttaaggaaatatctaatacacttcccattgaccatacacagtgatcttttatttgcaaacccacatggtccatgaatcatatggctggagactatttcaaataattcgggatggctgtgtttgtttggtatttctgctaaaatgatgcgatcaatatcctctggatttggatatt

SEQ ID NO: 8400 - DNA, 310 bp, Glycine max
  unsure at all n locations
gcaagttattagtttgagttaaaaattaaaagggtggaaacttaccttncatatcaatgtcatctttatataaagatagaggtagggacaaaatataaaaaatgggcaaatataactagtaactaggataagataagaanntaaataagtatttattcctttaanttattttntagaattaattttgacttttaaaattaaattataagaacatcatatttatcacaatttaaaattggtacttaaaatgatttanattatcataaaatatatattnttttaaaataattaatattaaaaattagatgac

SEQ ID NO: 8401 - DNA, 268 bp, Glycine max
  unsure at all n locations
agtgcaattattttcttagtggtatatgtagatgacatatttactaattggaaatgacataccaacattgcaaggcacaaagaatgggctatcataacaattcttcatgaaggatntgngagaagcagtctatattctatgtataaagaattatagagatagatataaaanggtgctttggactctccaatctatgtacattgatactatcttaaagagatataacatggataatccaatgagctatttctgtngtgtggaatactct

SEQ ID NO: 8402 - DNA, 285 bp, Glycine max
  unsure at all n locations
tcttagcacctgcggctgcagcttggtcttgtgaactgcatgtctgcttgncatttgctacaagtcttcagggaaggtgtggagngcctaactgtggctgttctgggctatgctgttgtggattggggaggaatgcatggtctgcttggccatcaacattttggaaggaatgagcatgctgctgttgttgctgctgagggctgcaccatctgagattagggtgattcctccatccagggttgtatctgttgctggagaggtcataattgttctgctgtaggtgat

SEQ ID NO: 8403 - DNA, 315 bp, Glycine max
  unsure at all n locations
atagaagactccaagaagattgngccagagaagcaagagaagaccctangattctcatgagtcttanggtagatttcgggcccatgggctaagtatgagcccacttatctttgtacatattagaataatgtttcattanttttgggactnttatttanggctccataatgtaggtagggtaccctagaaatgtangatttttcggcccttgtattttanggaacctagactagttttttgtattatgggtagttntgtaatttcacatgcattaagtgaatatttgatgtgtgtgtnggggaaataaattaatta

SEQ ID NO: 8404 - DNA, 397 bp, Glycine max
  unsure at all n locations
ctgctggctgatcattagaactaatgaactcagtgacaatctncttggacagaagcttctcctaaatgaaatgacaatcaacctctatgtgcttagtcctttcatgaaagactangtttgaggcaatatgaagaacaacctaattatcacagtacaacttcatttgcaactcttcacagaaccctcattcttgcagaaattgttaatccagatgagttcacaagaaccatagcatagatcgatattaacttctgattggactgacaacaacatttgttcttgctttcaaagataagattcctcaatgaaacacataactgatgcgatctctatcatggacagtcagccatcacatacatatctcatagtgcgtataccctngcttcatacacatctt

SEQ ID NO: 8405 - DNA, 234 bp, Glycine max
  unsure at all n locations
agtctattctgcaaatactagttntgaatctctgctggagtcactacttgcctgtgctaagccttctccacagtctggtggcattgctaacaagctctgcattcgatagctcagtgtgttgctgttctatgcctngctgcttgtgatcagaagtgtcatctacagtgcaatgctcactgacattctcaaggatgacagcagttctaacttcgtaagctttctcttcagtatttc

SEQ ID NO: 8406 - DNA, 347 bp, Glycine max
  unsure at all n locations
tcttcaggttcgaagacaaccttctttcttccttttgtggcttggttagcataactnttatntctcctctncaattgatttttcactctctcatgaaacttcttcacatagtccgcctttgcttgagcttctttatacttaanaacagaaacattatgcataggcaaaagatcaagaaggagtagtggggtaaaaccattaacaacttcaaaaggagaaacaatagtggtgctatgaacaactctattgtaagcaaaatcaacatggaggtaaacaaccttcccaagttttaagttcttcttanaactggccctaagcaaagtcccaatgtccctataacaacttcc

SEQ ID NO: 8407 - DNA, 139 bp, Glycine max
gatgcatgggagatcctgacaaccactcatgaaggaacctccaaagtgaagatgtccagaatgcaactattggctacaaaattcgaaaatctgaagatgaaggaggaagagtgtattcatgacttccacatgaacattc

SEQ ID NO: 8408 - DNA, 253 bp, Glycine max
tatcacatgatcgagaagaacaacacatgggagttagtaaatcgtcctcatggaacagatatcataggtgttaagtgggtctataagacacaactcaaccctgatggcaccatacagaaacacaaggcgaggctagtatctaacggttactcacagccacccagaatagactacaatgagacattggcaccaatagctcatcttgataccataagagctctaatagctcttgcgtcacaaagaggatggagta

SEQ ID NO: 8409 - DNA, 306 bp, Glycine max
  unsure at all n locations
agtttctgactatgctcttgtgatgtgtaacatgcttcannaagagagagcaagaaatgaagagccaatggttaatacatgggcagagatgaaaaggattatgaggaagcggtatatgccaactagttactcaagggaattgaaattcaagctccanaaactaacccaaggcaacaagggggttgaggagtatttcaaggaaatggatgtgctcatgattcaagcaaagattgaagaagatgaagaggtaactatggctcgattcttaatggttgactaatgatgttngtgaatattgtgagctac

SEQ ID NO: 8410 - DNA, 450 bp, Glycine max
  unsure at all n locations
gaaaaaaaaatgggcatttacctggggtgaaaagcaagagcaagcctttgctttgctcaaagaaaagcttactaaggcacctgttctaactcttcctgacttttctaaaacttttgagctagaatgtgatgcctctggagtgggagttaaagctgtattgttacaaggtgggcaccctattgcttattttagtgaaaaacatcatagtgccaccctcaactaccccacctatgataaagagctttatgccttaataagagccctccaaacttgggaacattacctaatttccaaggaatttgtcattcctagtgatcatcaatcacttaagtacattagatggcaaagcaagttaaacaagaggcatgcataatgggtagagtacctagaccaatttccatatgttatcaaatacaaaaaagganaaacacatgtggtagttgatgccct

SEQ ID NO: 8411 - DNA, 327 bp, Glycine max
  unsure at all n locations
tcatgaggaaatgagaaccttanaaactactttagcatttctttttattggaactaataatcttaatagacttttaggatagtgtagaagttcctttgacaaatctagaaatggatattgttagtgcttagctctactgagttttaaaagattggctaagattttgttaaaacataagcacttagacaatgaaagaaagctggagttgctgcacatgatgtccaacgttatgtcaaggaataagatcgggctgcacaatgcacaaggcaagataaaatgtcaaatgaagaattgaagctgcagaatccacgatgtcggatacaatgt

SEQ ID NO: 8412 - DNA, 361 bp, Glycine max
  unsure at all n locations
tgccttgccccttgatatatttgagggactcatgtgtcatttatgaatgacaanatttccttgggataaaggtagtgttgccatgttttcaaagcacgtactaaggcatacaactccttatcataagttgaatagttaagggtaggaccacttaacttttcactaaaataagcaattggatggccttcttgcatcaacacagccccaatcccaacatttgaagcatcacactcaatttcaaaagatttttgaaagtttggcaatgcaagtatgggggcattagttagcttttgcttaagaacattgaaagcttcttcttgtttctctccccatttgaaaaccaacatttttcttgagcact

SEQ ID NO: 8413 - DNA, 438 bp, Glycine max
  unsure at all n locations
aatactcagctcgcatacaagattctacttgcctggcacttcaaaaccttcagtgtgtgtcatatagangnctacctgtaaatccccatgcaagaatgcagttgtaacatctaactgctccaagggaagattctctgcagctactatgctcagaataactctgatggtactcatctttacaactggagagaagatctctgtgaaatcaattccttgtttctgctgaaaccctttcaccacaagtgtcgccttgcatcttcttcttccgtcacattcttcctttagcctatagacccacctattctgtaatgccttctttccttctggccattaagtgcaagaccacgtcttattcttctgaaggaagtcatcttattcttcattgctagcttccacctcaatagtgtcattcccctgtgtagcctccatgaaacattc

SEQ ID NO: 8414 - DNA, 337 bp, Glycine max
  unsure at all n locations
gtcacctgccgcatgcagcttgacgttaatctcaaaatggcaaagacatgaccttgngtttgtttaccaaggatgtcatacaaagatgaaacaaattaaaacctctttttcaagcaaaaactttgtttcctcaagaccacttgaactattacatattgatctgtttggctacaatgaatgactacattagatggacatgggtaatgttccttgctcataagaatgagttctttgaggtattctttataatttataaaagagcttaaaatgaaaaaaaagtctgcgttacttcaattagaagtgatcatggtggagagttttgaaatgagaacttttt

SEQ ID NO: 8415 - DNA, 480 bp, Glycine max
tccttgagaaaattcctaaagaagctagagcttttcttttcacacctctctaatagctaagctcacctccttgagatgagaagctagagcttagctacacaccccctataatagctaagctcacccccatgacaaaatacatgaaaatacaaaaaagtccctactacaaagactactcaaaatgcctcgaaatacaaggctaaaaccctatactactagaatggccgaaatacaaggcctaaacaaaggtaaaatctattctaatatttacaaagataagcaggctcatacttagcccatgggctcgaaatctaccttaaggctcatgagaaccctagggccttcccttggatctctggccaatctacttggagtcttctatccaatgcccttgcgggatatgattggatcattcctcccttcttctcattctctctatttgggtcacgcttttttttgtcccagcaggatgatcgaatt

SEQ ID NO: 8416 - DNA, 402 bp, Glycine max
  unsure at all n locations
ctattaaactaagcttatcatctttgataaggatgcccccatgcgtattgtttttntacacattagctcaaatggggtgtccaataggtgcctgaatgataaggtggtagtcaccgcacgcttgaggcaatcaaaagcctctttgcaccggtcatcaaaatcaaactccacctcctgttgcacagattggacagtggaaaggccactttgctaaaatctttgataaagcacctataaaaccctgcatgaccaagaaaagaacgaacttcttgcatgccaaaggggtaaagcaattgtgaaataacatctatttttgcagggtctacctctatgtccctactggaaatgatatgcactaaaactattcctttgtctaccatgaagtgacatttttcaaaattc

SEQ ID NO: 8417 - DNA, 274 bp, Glycine max
cagatataatccacggtggagtaatcatccaaatgtaagaaggacaagtcctccacaacaacaacagcctgtgccttcctttcaaaatgctggtggtccaagcaagccattgttcctccttcaatacagcagcaggaacaacaacaacagtcacaacaaagacaacaagccactgaggcttctcctacaccttccttaaaagagttagtgaggcaaatgaccatccagaatatgcaatttcagcaagagaccagagccttcattcagagtctca

SEQ ID NO: 8418 - DNA, 431 bp, Glycine max
tgaccaggaattacttgtatgggttggatgttgaattctgtttgttcctggtgcggagatgatggtacagcgggtgaaccagaagcggaaatttcttttggtgaggtagccatggaaaagcagagcgtttggaatgatttcgtaaatctcagaaggctattgggaaatgctggtaaaaacacgaatgccaagcagatataaatttgaatgaagaatgtagaggggcgtgtgaagcaacggtcgaattcgttttggcttaatagtgaacgtgctattaatgttaagtgattcgtttgggcacgttcaaattgctgtagttgctataattcctctagcaaacaaatgcccagcttgcccctcagtttttcaaactgatttgcatgcaaagcctttgtgaaaatatctgctatttgttcctcaatgtcaacatg

SEQ ID NO: 8419 - DNA, 240 bp, Glycine max
  unsure at all n locations
cttaactcggatgtccgatcaggcgcattttatttgagtattttganaanngaaaacagaagcgctcgagaaaatcgaagggccataactcttcacacggatgtcccgatcgggcgcataatatgtcgagacgctcgaaaatgaacaacagaagctctcgagaaagtccaatggtcataactttccactcggaggaccgaatcaggcgcataatatatctatacgctcgaaattgaacaa

SEQ ID NO: 8420 - DNA, 264 bp, Glycine max
agaaactagaacttatctaccccgcccctataataactaagctcacccctatgccaaaaaaaacatgaaaatacaaaaaaaaagtccttactacaaagattactcaaaatgccccgaaatacaaggctaaaaacctatactactagaatggccaaaatacaaagcctaaacgaaggaaaaacctattctaatatttacaaagagaagtgggctcatacttagcccatgggctcgaaatctaccctaaggctcatgagaacccta

SEQ ID NO: 8421 - DNA, 281 bp, Glycine max
acgacaataactttctactccgatgtctgactgagtcccataatacatcgagacgctcgaaattgaatgttgaagctctcagcaaatttaaacgacaataactcttttactcatatgtcggattgagtcccgtaatatatctagatgatcgaaattgaattctgaagctctaagcgaatccaaacgacaataactttttgctcggatgtccgatcgagtcccgtaatctaatgagacgctcaaaataggaatctgaacctgcgagctaattcagacgacaa

SEQ ID NO: 8422 - DNA, 252 bp, Glycine max
agcttctgtccctgagaaactggttcccagatgacatagtggagttgaagatgctgaaaaccctagccttgcaacaagtcctagggaagtagacacggagatggacaagaaaatccgcagtattgtgagtagcattttaaaagacgcctctgtttctgaagctgatgaagatgttccaacatcttccaccccgaatgtttgtgtgcccgatgctaaaaaatatggggcaacatcttaccgcccaagtgctga

SEQ ID NO: 8423 - DNA, 267 bp, Glycine max
tgaatggttcgttcagtctgaccatctgtttgaggatgataagctgaactaagcttcagctttgtccccaaggcttcatgtagactcgtccaaaatcgcgaagtgaacctcggatccctgtcagatacaatactagaaggaattccatgcaaccttactacttccttgatgtacaactccacgagtttctccattctatacttcatattcactgggataaaatgagcagatttggtgagtcgatctactatgacccacacagcatca

SEQ ID NO: 8424 - DNA, 364 bp, Glycine max
  unsure at all n locations
tgagccttttgtaaatggcgacataaagtagcatgttaattgttttgtgnaaccaacaagtcatcaactacttctgcctgaaaggtaccctanaggtactggggtattgacgatgggagcttcccataagtggcttcggatattgaaataccagtgctcaaatgaaccaaagtattgtatgaccactccgtaataggaagatacttgaaccactatgatggtcgatcatggacaaacgaatggaagtattgctctaaaacatggttgaggacctccatctgtctatcgatttggggatgataggcagtgctcatccatagcttcgtcccacataagcgaaagagtttccgccaaaaggcactta

SEQ ID NO: 8425 - DNA, 351 bp, Glycine max
  unsure at all n locations
agcttttgacggactataccaagctcnatgactcgttattgagaaagatctatatataggcttgctaaggatagagagaggaagactacagatttggatcaagtaaagtgtgttaaggatgaagaaagcaaagtcttagtgcatgaaaaagatattaaggaaaggtggaaggcgtatttccacaacttatttaatgatggatatggatatgactctagtagtctagacacaagagaagaggaccggaactataagtactatcgtcggattcagaaacaggaagtgaaggaagcgttgaaaagaatgagtaatggtaaggcggtggtgccagacaacatacctattgaagtg

SEQ ID NO: 8426 - DNA, 291 bp, Glycine max
agcttgcaaatctatttttaatccatgcccataaataaaataaaatctagataagataagataagataagatctagatgaaatcaaatctagataagataagataagataagatctagatgaaataatatctagatgagatcaaatctagataagataagatctaaatgaaataatatctagatgagatcaaatctaaataatatataaatgagataaaatctagataagataagatttggtagaataaaatagtctactctctccaagtccaagcccaattctggattca

SEQ ID NO: 8427 - DNA, 282 bp, Glycine max
agctttcaactaaatttacaatgttctaatcaatttcaaaatggtgtaatcgattacaatatattggtaatcgattaccagtgtgtttgaacgttgaaattcaaattcaaatgtgaagaatcacatcctttcacaaaaatgctttgtgtaatcgattacaatgatttggtaatcgattaccaatgataagttttgaacaaaaatcaaaagatgtaaatcttccaaaggttttcaagtttttttaaaggttataactcttctaatggttttcttgactagaca

SEQ ID NO: 8428 - DNA, 361 bp, Glycine max
  unsure at all n locations
ttgatctaccaccaccaccgccaccatcatcttagttttctattatttttaatattactagtactttgttttctagtcgtgtatttagctatattatgacatttggataatttagtatttctttatttgcatggtttgattgaacaattatgaattatgttatatgactatgtgatttttatatatttgatctattcatgtttcttgcttcatgattggtttatattcttcaatgtatgtcttgtgaatgattaatagtatatggttgtcttatacttgttacgcactttggctttntgttgatgccaaagggggagagaaataggaattaaatcaagaactcacataagtaatcaactta

SEQ ID NO: 8429 - DNA, 344 bp, Glycine max
cttgatgcaacatttggagaggttaatgaaacaacgagatgatgcgctccatgagaggttggatcaaatggagaatagagatcataatgaagaagaaaggaggagaagatggaatgatggtgttcctagacaaaaccgaattgatggtattaaactcaacattcctccatttaaaggaaagaatgatccggaggcctacttggagtgggagatgaaaataaagcttgttttctcatgcaacaactatgaggaggaccagaaggtgaagcttgctgccacggagttttccgactatgctcttgtgtggtggaacaagcttccaaaagagagagccagaaatgaag

SEQ ID NO: 8430 - DNA, 285 bp, Glycine max
agcttccctttctttggccaatgctggactcgtttggcagtgatttccttggcaatttgatgctcagaaacatcaatatctatcactccatcagtaggtctgcccagatatttgttaatcacagcaggggagaatttaacacactttcctctgacaaacaccttttgatactcatcactttttctgttagatatgtcagagggaatgttgacaatgaattccctgactaagccttcatagcaatctcccaacttgctgacagtcttcagcagtccagcagccttg

SEQ ID NO: 8431 - DNA, 281 bp, Glycine max
agcttattacgtgttgatgattataacacatatattgtatatgaattgttaaaataaattaggaattaatagttcaaataataaaattaaaattgaaggaaattaatatatcaagattcaacgataaattctttcaatgcatttttagtttaattatttattaactctttttaattgaaaataatatagttcgatttaatatatacatgttttgtgccatgtaaatattaatactgtgtgatgtttatatgatttatgaggtgtgataacatgttaagttg

SEQ ID NO: 8432 - DNA, 326 bp, Glycine max
  unsure at all n locations
tatgcattcaatatcctgatgagggtgtttcatatgttcttaagactggactaatacatttgctgcccaagtttcatggtcttgcaggtgaagatcctcataagcatcttaaggagttccatattgtttgttccaccatgaagctccctgatgtccaagaagatcatatctttctaaaggcttttcctcattctctggagggagtggcaaaagattggctatactaccttgctcccaggtccattttcaactggtatgaccttaagaggatattcttggagaaattcttccctgcatctangaccactgccatcagaaaagacatt

SEQ ID NO: 8433 - DNA, 289 bp, Glycine max
agcttatttcaggttgactaattgttgagttctgcaaagcccccactacaaaccgatagagagtaggatcaaaaaagatatcagccctagacttagacagtttacagttagtaaccataggagaatatatgagttgtgcctctgccatgtgagttttctgtaagagatttctgatatatgtactctgagtaagtactaaggagttatcagaaagagtcttgacctcaataccgaaaaaatagtcaaactttcctagctgttttaaagagaaagtggagttaagtttggc

SEQ ID NO: 8434 - DNA, 363 bp, Glycine max
tgaaggaaaactggatgcattggttaacttggtaacccagctggccttgaatcaaaaatctgtacctgtcgcaagggtttgtggtttgtgctcctctgctgaccaccatacagacctttgcccttccatgcagcaacctggagcaattgagcagcctgaagcttatgttgcaaatatttacaatagacctcctcaacctcagcagcaaaatcaaccacagcagagcaattatgacctttccagcaacagatacaaccctggatggaggaatcaccctaacctcagatggtccagccctcagcaacaacaacagcagcctgctccttccttccaaaatgctgctggcccaagcagaccatacat

SEQ ID NO: 8435 - DNA, 368 bp, Glycine max
tctcaggaagtttctcaagggagctacctatgctataaatacgagcatgtgtaacacttgttgtaactgtgatgaatgagagtcttgtgagacacacttcaaagttcaacttctctgcctctttttgatgtagctccatgtggagcttgtaagccttggatcttcttcatcaatggattcctttgcttcttgaggtttgattgcgatctaatatagaacgagaaagatgaatggagacttcacatcaagtataagatgggtatacaagaagctcaccaccataggaagccatggataaaagcttaaaggtagaagaagatgaatgaatggagaggaagagaagagcatgaaatttactgcctctaaag

SEQ ID NO: 8436 - DNA, 282 bp, Glycine max
agcttgatatttacctctaagttcttctccaaagccttcacttgttccacacttagtcgacgcttcttctcagattgatgccccggttcttcaacacacccttcctcgtcgagtccgtccaacatcgatcggaactccctgccatacatgtggtggctgttcctcggactatgttcctctaaaccaatgcaaattaaatcagacatcatcattattagtataaccaacataaaacatggatcttggatctgtgtctgaattttaaaaaacaaaaaccaatat

SEQ ID NO: 8437 - DNA, 288 bp, Glycine max
agcttgccaccacgaagttttccgactatgctcttgtgtggtggaacaagctacaaaaagagagagcaagaaatgaagagccaattgttgatacatgggcggagatgaaaaggatcatgaggaagcggtatgtgccggctagttactcaagggatttgaaattcaagctccaaaaactaacccaaggcaacaagggggttgaggagtatttcaaggaaatggatgtgctcatgattcaagcaaagattgaaaaagatgaggaggtaactatggctcaatttcttaatg

SEQ ID NO: 8438 - DNA, 285 bp, Glycine max
agcttctacaattggtttttcctaattcctttacactttcctcacctctcaatgagccagtgaaaaagaatgtggcattcacttgagatgaaagacaagagcaggcctttactttgctcaaagaaaagctcaccaaggcacctgctctagctctttttaacttttctaaaacttttgagctagaatgtgatgcctctagagtgggagtgggagttgtattgttacaagatggacaccctatttattattttaatgaaaaacttcatggtgccaccctcaactacc

SEQ ID NO: 8439 - DNA, 282 bp, Glycine max
agcttgttctttacctctctatcatccccctcagcaagaatcttgagcacctcctctgcgagcttctggcagtgctgtggatcaatctgctgctcaaaagcctgagagattttcctctgaagccaataagcatcaatatcctgcacattcaaacccatcccttcattaccctcttccatatcctcatcatcaattccacccatctgcatagccccagaactgttcggctctgtgacatcctcatcctcttcctcctcatcctgcacaatatccaaatcactc

SEQ ID NO: 8440 - DNA, 353 bp, Glycine max
tcaacatctcaatttcgagcgtctcgatatatgacgggactcaatcagacatccgagtaaaaagttattgtcgtttgaattggctcagagcttcaacattcaatttcgagggtctcgatatattgcggtactcaatcagacatccgagtaaaaagttattgtcgtttgaattggctcagagcttcaacattcaatttcgagcgtctcgatatatgacgggactcaatcagacatccgagtaaaaagttattgtcgtttgaattggctcagagcttcaacattcaaattccagggtctcgatatattacgggactcaatcagacatcccaataaaaagtattggtcgttggaat

SEQ ID NO: 8441 - DNA, 282 bp, Glycine max
agctttgagccaattcatacgactttaactttttactccgatgtctgattgagtcccttcatatatcgagacgctcgaaattgaatgttgaagctctgagccaattcaaacgacaataactttttactcggatgtctgattgagtcccgtaatatatcgagacgctcgaaattgaatgttgaagctctgagccaattcaaacgacaatacctttttacttggatgtctgattgagtcccgtcatatatcgagacgctcgaaattgaatgttgaacctctgag

SEQ ID NO: 8442 - DNA, 288 bp, Glycine max
agcttttctttgagcaaagcaaaggcttgctcttgtttttcaccccaggtaaatgccacattcttcttcactagctcattgagaagtgatgcaattgtagagaaattaggaacgaaccttctatagaagcttgctaacccatggaagctcctaatatctcccacactttttggggtgggccattcttggatggccttgattttctcagggtccatttggaccccatttctaccaactacaaacccaaagaaaactatattatctacacaaaaagtacacttctctata

SEQ ID NO: 8443 - DNA, 371 bp, Glycine max
tgccgccacggagttttccgactatgctcttgtgtggtggaacaagctacaaaaggagagagcacgaaatgaagagccaatggttgatacatggacggagatgaaaaagatcatgaggaagcggtatgtgccggctagttactcaagggacttgaaattcaagctccaaaaactaacccaaggcaacaagggggttgaggagtatttcaaggaaatggatgtgctcatgattcaagcaaatattgaagaagatgaggaggtaactatggctcgatttcttaatggtttgactaatgatatccgtgatattgttgagttgcaagagtttgttgaaatggatgatttgcttcacaaagcaatccaagtggagc

SEQ ID NO: 8444 - DNA, 280 bp, Glycine max
agcttcggtagttcaatttcgagcatctcgatatattatgcgcctgaatctgacatctgtgtaaaaagttatgaccattttagtttatcgggagcttccgtttttcaatttcgagcgtctctatatgtgatgagctcgaatcggacatccgagttaaaagttatgaccatttgaatttctcgagtgctttcgtttttcaatcttgagcgtctcaatatattatgcgcttgaatctgacctccgtgggaaaagttatgaccatttgaatttctcgagagct

SEQ ID NO: 8445 - DNA, 280 bp, Glycine max
agcttgtagagttgagtctcgtatcagtttcatcgattaccgatatctcgtaatcgattgcactattgtttgtgatgtaagctaaattggagcttgtaggcctatgatcttcttcaccaatggatttctttgattcttggaagatgaatgacaatggaatggagaaggaagagagagaggagaccccactttaaggagaagatgagtcaagaagaagctcaccatcataggaggctatggataaaagcttggaggaagaaggagatgaatgaagggagag

SEQ ID NO: 8446 - DNA, 288 bp, Glycine max
agcttgtaagaagacaatttccaattatgctcccttatgcaatgacgattaataagtctcaaggccagtcattatctactgttggactatacttacctaacccattgtttagtcatggaattataaatcaaagaatggattaaaagttttaatacatgataaagacaaaacaagcttgacctctaccaccaatgtagttttcaaagaggctttcaaaagcctgttaaggtatatatataatatctatatactgaccattttccttaagcattataatgtattcactac

SEQ ID NO: 8447 - DNA, 281 bp, Glycine max
agctttgaaaaaattcatatgctaataacttttcactcggttgtccgattcaagagtatcacatattgagacgctcgaaattgaacaacggaagctctcgagaaattgaaatggtcataacttttcactcggatgtcccattcaggtgcatcacatatcgagacgctcgaaattgaacaacgggagctctcgagaaattcaaatggtcataacttttcacacggaggtcaaattcaggcgcatcacatatcgagacgctcgaaattgaacaacggaagctc

SEQ ID NO: 8448 - DNA, 306 bp, Glycine max
actcagctttcagaaattaaattgtcataacttctttctcggaggttcgattcatgcgcataatatatcgacacccccgaaattgaacaatggaagctctcgagaaattcaaattgtcataacttttcactcagaggacccattcatgcggataatatatcaagacgctcgaaattgaacaacggaagctctcgataaattcaaatggtcattacttttcaactggagtttcgattcatgcgcatcacatatagagacgctcggaattgaacaacggaagctctcgagaaattcaaatggtcattg

SEQ ID NO: 8449 - DNA, 272 bp, Glycine max
agcttccattgttcaatttctagcgtactcgatatattatgcgcctgaatcggtccttttagttaaaagttatgaccttttgaatttgtcgagagctttcggtgttcaatttcgagcgtctggatatattatgcgcctggatcggacctccgagtgaatagttatgaccatttgaattatgtcgagagcttccgttgttcaattttgagcgtctggatatattatgcgcctgaattggaccttcgagtgaattagtatgaccaattgtattg

SEQ ID NO: 8450 - DNA, 358 bp, Glycine max
tctacattcaatttcaagtcttttcgatatattacgggactcaatcggacatccgagtaaaaagttattgtagtttgaatttgctcaaggcttcggtattccatttccagcgtctcgatatattacgggactcaatcggacatcagagtaaaaagttattgttgtttgaatttgctcagagcttccgtattccatttcgagcatctcgatatattacgggactcaatcagacatccgagtaaaaagttattgtagtttcaatttgctcaaggcttcggtattccatttcgagcgtctcgatgtattacgggactcaatcagacatccgagtaaaaagttattggcgtttgaatttgct

SEQ ID NO: 8451 - DNA, 279 bp, Glycine max
agctttgagaaaattcatacgacaataactttttactcggatgtctgattgagtcccgtaatatatcgagtcgctcgaaattgaataccgaagcgctgagcaaattcaaacgacaattactttttactcggatgtctgattgagccccgtaatatatcgaaaagctcgaaattgaatgttgaagctctgagcaaattcaaacgacaaaaactttttactcggatgtctgattgagtcccgtaatatatcgaaaagctcgaatgtgaatgtagaagctct

SEQ ID NO: 8452 - DNA, 273 bp, Glycine max
agctttatctccttcaactgcacaaggctcttaatatttgaagagtatccttgtggaaccttcacccgacgaagacactgacaaaaacttatcttctccttcttggacaaagtatggcacgctgggggcaagtaaattttcttcccatcagaccttggatgcaactgtgatcttatacccatatcagctagatcttgacgggtattcaagccatccttcgccttgccttgaatgttaaggagcatcccaatcacactgtcacaaacatttttc

SEQ ID NO: 8453 - DNA, 283 bp, Glycine max
  unsure at all n locations
agcttgacaggttcaggttcatgtgctgntattagtggaggcactccaatttgcttgccagacctcaaggtgatggcactcacattttttggattttgcatagtttgtgaaggcaatttgtcagaattttgggactgagcttggttcaattgagtagccatctgccccctctgatttgtcagactctgaatgaaggctcttatttcttgctgaaattgcatattctggatggtcatttgtctcactaactcctctaaggaaggttgagaaggggcctcatttg

SEQ ID NO: 8454 - DNA, 242 bp, Glycine max
  unsure at all n locations
tctacattcaatntcaagcttttcgatatattacgggactcaatcggacatccgagtaaaaagttattgtagtttgaatttgctcagggcttcggtattccatttcgagcgtctcgatatattacgggactcaatcggacatcagagtaaaaagttattgttgtttgaatttgctcagagcttcggtattccatttcgagcatctcgatatattacgggactcaatcagacatccgagtaaa

SEQ ID NO: 8455 - DNA, 284 bp, Glycine max
agctttgagaaaattcatacgacaataactttttactcggatgtctgattgagtcccgtaatatatcgagtcgctcgaaattgaataccgaagcgctgagcaaattcaaacgacaataactttttactcggatgtctgattgagtcccgtaatatatcgaaaagctcgaaattgaatgttgaagctctaagcaaattcaaacgacaaaaactttttactcggatgtctgattgagtcccgtaatatatcgaaaagctcgaatgtgaatgcagaagctctgagca

SEQ ID NO: 8456 - DNA, 357 bp, Glycine max
tcattcttagaatgaagttagtagagatatatatatcgtgaataatcatctataaaggttatgaagtatttcagactatttgcatccatgtctggacaacatatgtctgtatgtatgatttctaataaattaaaactcctctttgcaccctttttagacttgttagtttgcttacccttaatgcaatctacacaagtctcaaaatcagcgaaatccaaagtactaagtactccttcatttactaatcgcttgattctctcaataaaaatatgtcctaatctctggtgtcacaatatagaggttcttcattcacaatacatcgttttaacccaacagaaacgtgcatagaagtagcgt

SEQ ID NO: 8457 - DNA, 280 bp, Glycine max
agcttgccaaatgctctattggctgatgagttggtccatcctctcgaagtccaatcgtatcatgagtcatcacataaataacttcagcttcacacagtgcataaatccttatggcagctctcatgtagtcagtgaagacaaagggcatttatattttgctgaaacagatttcttgtagcatatgcagggctttctggagtgtatgtctgaatgttgaaatttaattagaagggtagtcaataatccagaaacaaatgatggaagtcaagttttatttatc

SEQ ID NO: 8458 - DNA, 338 bp, Glycine max
tctacctcgccaggggcatgaattcggtgtccacattcacgctaaccgcttcaactaaatgtctgggattggcatcacaatgttttgctcgagctaattcttcgatcgctaatgtctcctttagttcaatagcaatctcactcatgattggcctttcgctgggattttgagaaacacaagccattgctatttctaaggctttccaagctgagttaatgtcataatctccttctaaccttgagtcaactatggccctgatatcccctttctcaatcaaggacctaacccttccacttatgtgacccttttcttgattcctttccattactggttgggtt

SEQ ID NO: 8459 - DNA, 301 bp, Glycine max
  unsure at all n locations
agctttncgtcaatggtattacaagttctatcaagtcattaccttgtatggttttgaggaaaatgcagctgatgattgtgtatatcacacgttcaatgggagtaaatacttattcttggtattatatgtcgattatatactgcttgataggagtaatataggcttcttataggagactaaaaaaatttatgaccaaaaattttgaaatgaaaaatcttggggaagcctcttttgtgttaggtattaagatactaagagatcactcccaaggtatcctaagactgttagaagagagttatat

SEQ ID NO: 8460 - DNA, 308 bp, Glycine max
tgctaacccatggatgctcctaatatctcccacactttttcgggtgggccattcttggatggccttgattttctcaaggtcaacttggaccccatttttaccaactacaaatcctaagaaaactatactatgtacacaaaaggtacacttctctatatttgcatagagggtgtttttcctaacgactgaaagaacttgcctaagatgtcctaagtgatcatctaagctcttactgtacactaaaatatcatcaaaataaacaactacaaatctacctattaaatcccttaagacataatgaataagcc

SEQ ID NO: 8461 - DNA, 294 bp, Glycine max
agcttggctctggccattataaccatttcattcttaagttccttaacctttaaatagacattctggtcaagtaagtgcttttctgcatcaaacagatcaaacttgatcttctaatcatctatgcccatttctagtttatcctttcccatatccaccacacaaccggcggttaacataaagggatggcccaaaatcaaggggattttagcgtcctcttcaatatccatcacaacaaaatctgcagggaaactaaactgcttcaccttaaccagaacatcttcaattatgctataa

SEQ ID NO: 8462 - DNA, 288 bp, Glycine max
tctcgatatattatgcgcctgaatcatactttcgtttcaaaagttatgacgatatgaatttctccactgtattccgtgtgacaagttatgaccatttgaatttctcgatagcattcgttgttcaatttcgagcgtctcgatatattatgcgcctgaatcggacttccgtgtgacaagttatgaccatttgaatttctcgagggcttccgttgctcaatttcgagcttctctatatattatgcgcctgaatcagacttccgtttgaaaagttatgaccatatgaatttc

SEQ ID NO: 8463 - DNA, 290 bp, Glycine max
tttagcttgctaagatacatggcccaataatgagcctaaagctgggacaaataaccactgttgttatgtcttcagcacaaatgcccaaataggtgcttctaaccaatggccaattcttgtcaaaccgaaccattccccaatctgtgccagttctaaactatgaacaatacaaccttgctttcatgcccatttcacctctttggagggaactcagaaaaatatgcaacacttagttatttgcccataagtctcttatgctagccaagacgttaggcgtaagatagtgcaat

SEQ ID NO: 8464 - DNA, 284 bp, Glycine max
agcttgtgaaacaacaatttatcttttccaatacgaaagatcccaaaagatacttctttttgcccaattatgccactccccatgtccttctattggtttaacaccattttttgtaactcttggcaaattccttactctatgctacacttgattaggtgtcaacctaggtggtagctcatcatattcttcttccccttttctaaaggttttttgttagtcctaaatggatgaatgctgggtaagaacctacgatgcgagtcaaataaacaatttttcctctcata

SEQ ID NO: 8465 - DNA, 301 bp, Glycine max
agcttcactcaaagattcatcggaaaattgatggaatgaagaaattgtagcttttccctctgttgtcttggactcaagaaaatatttcttcaaaaacttttccacaactttatcccaagtccttaagctattacctttgaatgaatgcagccacctcttggcttctctagataatgaaaatgaaaataagctgagccgaatagcatcttctggcacaccgacaatcttgacaatgttgcatatctcaatatatgttgccaagtgtgcatatgggtcttcattgggtagaccatggaacaaa

SEQ ID NO: 8466 - DNA, 313 bp, Glycine max
tgtttcaatccatatatagatcgttgctacttgcaaacttcattacaaccagccaataatgtgaatccttcaggttgtgtcatgtatacttcctctttcaactcaccattaaggaaagtttttttcacatccacttgtcatatctcataatcatagtatgctgctatggcaagtagaatccgaattgacttgagcattgccacaggagaaaatgtttcgtcataatctattccttcctgttgacgatatcctttagcaacaaggcgagctttataggtctcgacctttccatctgcttcaatcttttttcttg

SEQ ID NO: 8467 - DNA, 295 bp, Glycine max
agcttgtaatctttggtttcttgaagatatcttaacactttctttgcagctgtctagtgctctattcctgaattactttgatatctcccaagcattccaaccacaaatgcaatgtcaggtcttgtacacacctgcgcatacataaggcttcctacaatggaagcatatggaatgtttctcatttgttccctttgaagcttatttttaggacattgattcaaattgaatctatcacctttcacaataggtgtcatgttgggtgaacaatcttcatccgaaatatttctagaacttt

SEQ ID NO: 8468 - DNA, 292 bp, Glycine max
agcttaagcagtgatcaaacttgctctttggaactggctttgtaaacatattaacaggattgtgcagagtgataatcttatgaactttgattcttctttctgaccgaatgaagtgatatctaacatctatatgcttggttctatcatgatgaacctaatccttggccaagcatatagcactaaggctgtcacagtagatgttagcatattcttgattaatttcgagatcatttatcagacctctcagccaaattccttcctttgcagcttcaataagagccatatatttagc

SEQ ID NO: 8469 - DNA, 310 bp, Glycine max
tgaaggcaaactagatgccttgtttaactctggtaacctaactggccatgaataaaaaatctgcacctgtcaccagactatgtggtttatgctcctgtgccaaccaccacacagacctttgcccttctatgcaacattatgaagaaattgaacagcctgaagcttattctgcaaacatctacaataggcctcctcaacctcagtagcaaaatcagccacaacagaacaattatgacctctccagcaacaggtacaatcccgggtggaggaatcatcccaaccttagatggtcgaatacttcacaacaaca

SEQ ID NO: 8470 - DNA, 311 bp, Glycine max
tctattttcaattacgagcgtctcgatttattacgggactcaatcggacaaccgagtaaaaagttattgtcgtttgaatttgcttagtgcttctgttttcaatttcgagcgtctcgatatactacgggacacaatcggacacccgagttaaaagttattgtcgtttgaatttgctcagagcttctattttcaattacgagcgtctcgatatattacgggactcaatcggacatccgagtaaaaagttattgtcgtttgaatttgcttagagcttctgttttcaattacgagcgtctcgatatactacggga

SEQ ID NO: 8471 - DNA, 304 bp, Glycine max
tattgggccttaaaatttctgatcttttatgaagccgcatctagagagtaaaggaggctacaactattggagttagaagaaatgagattgactgcatatgaatcttcaaggctgtataaagagagggttaaaacttaccatgataaaaatcttctaaagaagaattttcaaccaggacaacaggtgctactattcaattcaaggctgaaattgttccctgggaagctcaaatctaaatggtctagaccatttaccatcaacaaagtcaagccatatggagcagtagagctttgtgatcctcaac

SEQ ID NO: 8472 - DNA, 303 bp, Glycine max
agcttatgctgcaaatatttacaatatacctcctcaacctcagcagcaaaatcaaccacagcataacaattatgacctctccagcaacagatacaaccctagatggaggaatcaccctaaattcagatggtccagccctcagcaacaacaacaacagcctgctccttccttccaaaatgctgctggcccaagcagaccatacattcctccaccaatccaacaacagcaacaaccccagaaacagccaacagttgaggcccctccacaaccttccctcgaagaacttgtgaggcaaatgactat

SEQ ID NO: 8473 - DNA, 303 bp, Glycine max
tgaaattgaacaacggaagctctcgagtaattcaaatggtcataacttatcacacggaagtccgattcagatggataatatatcgagacgctcgaaattgaacaacgaatattctcgaaaaattaaaatggtcataacttgtcacacggaagtccaattcaggtgcataatatatcgagaagctcgaaattgaaccacgaaagctctcgagaaattcaaatggtcataacttatcaaacggaagtctgattcaggtgcgtaatatatcgagaagcttgaaattgaaccacggaagctctcgag

SEQ ID NO: 8474 - DNA, 272 bp, Glycine max
agcttctggatatattatgcacccgaatcagacttccatttgaaaagttatgaccatttgaatttctcgagagcttccgttgttcaattttgagcgtctcggtatattatgcgcctgaatcgaacttccgtgtgacaagttatgaccattttaatttctcgatagcattcgttgttcaatttcgagtgtctcgatatattatgcgcctgaatcggacttccgtgtgaaaggtattaccattctgatttgtcgagaaccttccttggttcaat

SEQ ID NO: 8475 - DNA, 302 bp, Glycine max
agcttcaacatcagacctcttccagggtgctggaactacttcacatggacttgatggggcctatgcaagttgaaagccttggaggaaagaggtatgcctatgttgttgtggatgatttctccagatttacctgggtcaactttatcagagagaaatcagacacctttgaagtattcaaagagttgagtctaagacttcaaagagaaaaagactgtgttatcaagagaatcaggagtgaccatggcagagagtttgaaaacagcaagtttactgaattctgcacatctgaaggcatcactcat

SEQ ID NO: 8476 - DNA, 310 bp, Glycine max
tgtccaatgaggtgacaatgaaaatacctagtgttactacctgatatacagtttttgctgctcgttttattgtcaattccaactgcatcaatgcatctttaacaagcataccacgaaccagagcagcaaccaagttgaccttctttggactctaaaataccatagaaaacaaggtatgtaaaatgtgcaactagtcagatattaatcagatccttcttaaaccataaattaaggcattttccacagcaaaccagggaaggcatttcaatggctaaaaaattagatgccaacttttctgcaaaataacatg

SEQ ID NO: 8477 - DNA, 306 bp, Glycine max
ttaccaagggcattggttgctggctttgttaatactgacaaagaatttcagagcagaggtgtgaactttagcttttattcttgtgtttttttggggataaaatattgggagggtcgaaatacagaactggaggatctggaatttaatttttttctcttcgtattactgattatataagtcctcatctggttttgtccaggagaaacttcgggaaccacagctacattcgtaatagtggataggtggactgtgactgttgcatctgttggagattcccgttgtatactagatacccagggtggtgct

SEQ ID NO: 8478 - DNA, 301 bp, Glycine max
agcttgaatgacaatcatttcatggggctccgaataaaagtggagaatggaggataggcgaacagcgctaggcaatcaattcgcgggtctcccgactcgttggtggaggatgcatgaatgacaatcaactcatggggctccgaataaaagtggagaatggaggataggcgaacagcgctaggcaatcaattcgcggggctgcatactcgatggtggaggatgcatgaatgacaatcaattcatggggctccgaataaaagtggagaatggaggataggcgaacagcgctaggcaatcaatt

SEQ ID NO: 8479 - DNA, 309 bp, Glycine max
tcacaaagaaaatcatattgatatgacttctttggaagtcctcttacgaggctatgctttttaagctttgagattaaccttaagctagcatgaccaagcttcttatgccatatgcaatgactctctttgactgagagtaagcacgacaccttttgactagacagatcaccaagtttaatcttatagaaatttccttgtctcttagcatagaataatgaagatttgttcttattatggacgatacacatatccttgttaaaggtgacattttatccactgtcacataattgacttatgctcagcagatta

SEQ ID NO: 8480 - DNA, 297 bp, Glycine max
agcttgaatcggaccttttgtgaaaagttatgaccatttgaatttctcgagagctttcgttgttcaatgtcgagcatctcgacatattatgcgctcgaatcgaacatccgtgtgaaaagttatgaccatttgagtttctcgagagcttccgtggttcaattccgagtatctagacctattatgtgcccgaatctgaccttcgtgtgaaaagttatgaccatttgaatttctcgagagcttccgatgtttaatttccagcgtctcaatatattgtacgcctgaatcggacctcagtgt

SEQ ID NO: 8481 - DNA, 311 bp, Glycine max
tatgctgcaaatatttacaatagaccttcccaacctcagcagcaaaatcaaccacaacagaacaattatgacctctccagcaacagatacaaccctagatggaagaatcaccctaacctcagatggtccagccctcagcaacaacaacagcctgctccttccttctgaaatgctgctggcccaagcagaccatacattcctccaccaatccaacaacagcaacaaccccagaaacagccaacagttgaggcccctccacaaccttccctcgaagaacttgtgaggcaaatgactatgcagaacatgcagtt

SEQ ID NO: 8482 - DNA, 295 bp, Glycine max
agcttctaaactttgtttaagaatgaagctctgataccacttgttagacaagtggcctcagatatcttaagaagggggggttgaattaagatattccaaacttttctcctaattaaaaatctatcttactttttacttaagttatgaattcccttaatgacaatcttcttaaatattaattcaaatgaagcaacttgaattatgaatataaagcaataataaataaaggagattaagggaagagaaaatgcaaactcagttttatactggttcggccacacccttgtgcctacgt

SEQ ID NO: 8483 - DNA, 304 bp, Glycine max
taataaatcaatctatggcttgtaacatgcttcccgccaatggtatctaaagtttcatgatgtcatcacttcatttggctttgaagagaacatcatggatcaatgtatataccaaaaggtcagtgggagtaagattttttttcttgtgttatatgtggatgacattttgcttgcaactaatgataagggtttgctatatgaggtgaaacaatttctctcgatgaacttttatatgaaggatatgggagaggaatcttatgtcattgacattaagatccatagggaaagatctcgaggcattttg

SEQ ID NO: 8484 - DNA, 288 bp, Glycine max
agctttactctatagcctgttgcttgagtgctccggcatcttggaaaaacaagaagcgttctacaagcataaatctttgtgctggtacagtttattcaactaatgtatggcatcaacgaggcgggatgatctaatataaatagccccataatatgaatcgcctgcaacataaagaagcttggctgtttgatgacatgtggatcaaatacagcttatttcaacatgtgtttggcttaaaaaaagtgaatcctgaatagtacctcgtctattgtgagcccatccaaacta

SEQ ID NO: 8485 - DNA, 353 bp, Glycine max
tgtcatggcaatcctttggcaggaaaaattctaaaacaaaatcagcggaggcactccggagtggaatgcccagaacagcatgcaagccaaacatgttatcatgatgtgccacaggatactccgccttgctgaaagaagtaatgtcatttgcaaaacaaagtttggtggttgtgaaagctgtcccaactactccttgcccccccaaaaggtggcacttagagcaggctttcaggaaacccattagctctacatccgccacaaaactagcagcatacacagtcgacacataattcatctcatcgtttgaatgcccacatccactctttcctgcttgttggatgcagggagcccat

SEQ ID NO: 8486 - DNA, 358 bp, Glycine max
  unsure at all n locations
atggatgccactaacaacattaacatataattggtataaaaaaacaatgacacaaaatgtttaattttcaagaaatttcttatttaatttatcttatattttaagatgttagatatattgattttttttgtatattattttctttataaagtattacaagataagattaatatgattaagccaacttatttgtagttatttttattttaatggttnttatttnttaatcttgatagctctcatgataaaagtttaaaactttatatcaaatatcaaaatataggttatccaaatgaaacttcaattctgataagagaatagtatacaaaatatttacgtaactacatatgagttttac

SEQ ID NO: 8487 - DNA, 638 bp, Glycine max
ttgtatggtagaaggtgtaggacacccctatgttggctagaatccatagaggacctcaccttaggacctgaagtggtacaacaaaccattgagaaggtcaagttgatccaagagaggatgagaactacttagagtaggcaaaaaagttatcaggacaagaggaggaaagacttggaatttgaggttggtgatcatgtattcttgagagtcactccgtggactggggttggtcaagcattgaaatcccaaaaactcacacctcgttttattggttcttccaaattctcaaaagtgtcggtcctgtggcataccaaattgcattacccctgtctctttctaatcttcacaatgtctttcatgtgtctcatccatgacccatcttatgtgatcgaattggatgacgtacaagtgaaggagaacttgacatatgaaacattgcctttgaggatcgaggataggcatacaaagcacctaaaagggaatgagattccattggtcaaggtgatatggggaagtgcatcaaaaaaaatgccacgtgggaactagagagtcagatgcaatgagcctatccagccttgtttgagtcaggtaaatttcaggaacaaaacttctatacggtgggagagttgtacaccctg

SEQ ID NO: 8488 - DNA, 510 bp, Glycine max
  unsure at all n locations
aaattnaataggggagtcataaatgtgtcaagaaaataattaataggacagagaaaatattagtaagtcattcaagaaatatgtattttgtatcgacttatctatattaaatatacaagatgatcatcaagtgtatagggcgaacattctgctcgaaaaaacaaaaagcatagaataatcattggagtgatacctcctatatttttaggtgataaaaaccacttattttaataaatattctattgactaatccgttatagtaattgaatttagctttaacccactctagtgaataaaagatttgttgcatggtttgaatatatatttttttaaagatctttcaactataatctgagcactaaatattcaatttatcaaatggggttgggtcaaggataagcactagccttctgtaatatgttcaattaagggtggatctctaatgagagatatgcatattttagtttttcattgtgtctggaattccaggatactcgtcaagatgaaaag

SEQ ID NO: 8489 - DNA, 439 bp, Glycine max
  unsure at all n locations
gggggtgaattaagatacaaaaattattcccaattacaatttaacttccttttggaattactcaaaagacaattcaaaaataaacttctttaaagcaaaagataaataacaataaataaaagaagtttaagggaagagagaatacaaactcaaattttatactggttcgaccacccctctgcctacgtccagtccccaagcagcccgcttgagatttccactatctttaaaaagctttttacaaactctgaaccacacaggaacatccttcccttgtgttcagatatccttacaacttaaaagaccatcggtctcttaaacagatctctttgaataagaagaataattttctctcattaagaaaaagatattacaattgaagatcgatcaagattccttattgaatttgcagtgtnttgccaaggaatattttgagagt

SEQ ID NO: 8490 - DNA, 448 bp, Glycine max
agcttccattgttcaatttcgagggtctcgatttattatgtttttgaatgagacctccgaaataaaagttatgaccatttgaattgctcaagagcttccattgctcaatttcgagcgtctcgatatattatgcgcctgaatccgacctccgagtgaaaaggtatgaccatttgaattgctcaagagcttccgttgttcaatttcgagcgtgtcgatatactatgcgcctgaatccgacctccgagagaaaagatatgaccatttgaattgctcaagagcttccattgttcaatttcgagcgtctcgatatattatgcgcctgaatcggacctccgagtgaaaagttatgaacatttgaattgctcaagagctttctttggtcaatttccagccgtttgatgtattatgcgccctaatccgacctccgagtgagaagttttgaacattt

SEQ ID NO: 8491 - DNA, 346 bp, Glycine max
  unsure at all n locations
tgtatcagtataaccccttcagtttcaattcagagtctccatattcgattaattggtgtttagttcttcttaagtacttaagtatggccttaaccattttccaatgttcctcactgcactagcatatggtactctactcatgcgttctctttcttcaggagttgttggacaattctccctaccaagagtaattccaacacctacaggcaaatagcctcgtttggaattatccatgatatatctctntaagatagtatcaatgtacatagattgggagagtccaagcaaccttttagatctatctctataaatctttatacttagaatatagactgcttctcccaaa

SEQ ID NO: 8492 - DNA, 490 bp, Glycine max
  unsure at all n locations
agcttccattattaattttgaggggctttatattttatgggactgaattgtctcacctgagtaaaaagttattgccattggaatttgctcgggtcttcttttctaatttggagcatctcaatatatttcgggactaaatcggacatccgaaaaaaaaattattttcgtttaaattttctctgatcttccgtttttaatttcgagtgtctcgatatattacaggactcaatctgacattcgagttaaaagttattgtcttttgaatttgctcgtagcttccgattttaatttcgagcgtctcgatatactatgggacttctgagtaaatagttattgccgttataatctgctgggagtttctgtttttaatttcaagcatctcgatatattaggggactcaatnggacattcgagttaaaaagttatggtctttgaatttgctcggaactttcgcttttaatttcgagcatcttgatataattacaggact

SEQ ID NO: 8493 - DNA, 443 bp, Glycine max
agcttgaagacaagactatacgaggtgtttgtcttttttatagcaatatctctaagggctaccgtgtctacaacttgcaaactaagaaactcgtcatcaatcgagatgttgaagttgatgaatatgcttcatggaattgggatgaagaaaaagtggagaagaacgttcttatacccgctcaactacctcaagaagaagatgaggaagaagacccaggtgaagcaccttctccttcatcacaacaacaagatcaagaactatcatcaccagagtctactccaagacgagtaagatctttggtggacatatatgaaacctgtaacttggccatacttgaacctggaagctttgaagaagcgtcaaagcacgaagtatgggtcaaggccatggaagaagagatacagatgattgagaacagccacacatgggagttagtaaatcgt

SEQ ID NO: 8494 - DNA, 435 bp, Glycine max
  unsure at all n locations
agcttcacaaaagtttgtatggcttgattcnatcttctatacagnggtacaagaagtttaatgagtttatgagcaactcacgattcaaaagatgtgacatggaccattggtgctatgttaaaaaatatactaatagttatgttatccttgttgggtatgttgatgacatgttgattgtaggatctagtacggcagaaattaacaggttgaagcagtagttggcagaaaactttgaaatgaaggatcttggtccagctaaacaaatccttggtatgagaattcttagaaacagatcagaaggaattttgaagctgtctcaggagaaatatatacacaagttgcttgacaggttttaccttggagattctaagaccaggaatacccctttgggatctcatttgaagttntcaaagaagtaatctttgcagacagatg

SEQ ID NO: 8495 - DNA, 410 bp, Glycine max
agcttactaaggataggagtctctatatttttctttgacgactaacataagcgtcgtgtgatttgctctcaaagtccctaccctgcctatatacattggccagcccccatcattgcaaaagctacttgttctctcaaacatggttcattcatcataaaaaacaatgaattttacctcccgtgcccatagatcttcatatgtcgaggctatcagctttgagctgatgccaaccagctgaagctccctcctatgcacagccttcacagatgagaatcgatcgacagagttcaaggtggaatatagagatgtcggatgagctcaaactgcctgtgctcgtctatcaaccagccccagagatagaactcatctgggcattaatatctggctgcgaacccatgtacacatgcaca

SEQ ID NO: 8496 - DNA, 541 bp, Glycine max
  unsure at all n locations
tattaagatactaagattatgaacgatgaaatccaatcctatgttcctcattattatncaagncgntattattttcataatttacgtatttccgacgcactaaatttcgttatttttgtatttcccgtatttctgttatttctgtcatttccattatttttgtaaatccgttatttttacttttcttttactttaaagttgtctttagttaatcaaaccaaaaccaatgacatttgattaaatttgtacataactattaaactgataacctgtatccaaatgaattaagtaaactcaagttcttgtggagacgaactcgtttataaatgtgaaacctacaatgtcaattggtacgcttgtcaaaagtcttaacaagttcatggcgctgttgccaaggacttgagccatccacttagttctttcggaataaactttcaggttgataggctattttactctggaaattacttttaatttgtattaaattcatcttttatttcttctcacccttgacttattatttacatttgataaatttctc

SEQ ID NO: 8497 - DNA, 557 bp, Glycine max
agctttttagtaaaaaaataaatatttaaatatttatagagcaaataataggctgagtaccctaggtataaatagttatattaagtcagctgcctccttttggcctcattttcgtttttccccttctcctctcaaaaccctttctttttcccgcagcccaccaaaccagtctcagaaaaatgacgatcttgaacccgttcaccgttggatcgtcgtgaaatttgagtatcatgttcgcaacagaattccgagcattctcaccgttgggaatttcgatatcatgtctgaactgagagaaacacccttcgcattgtagcctttttctttcccgcagaaacccagagctgtcttggtaaaactatgatcccggtttcgttaaccgttggattattgtgaaatttggatatgttgttcgaaattcaattccgcacgcttccaccgttgggatttgcgagataatattcgtggagggagaaaaaggaatcgcatgaagacagtataagtggagggttcaatctcttctccgtctctctgacgtttgggaattctatcggagc

SEQ ID NO: 8498 - DNA, 486 bp, Glycine max
agcttctatagaaggtttgttcctaatttctctattattgcgtcacctctcaatgagctagtgaagaagaatgtggcatttacctggggtgaaaaacaagagcaagcctttgttttgctaaaagaaaagcttactaaggcacctgttctagctcttcctgacttttctaaaacttttgagctagaatgtgatgcctctggagtgggagttggagctgtattgttacaaggtgggcaccctattgcttattttagtgaaaaacttcatagtgccaccctcaactaccccacatatgataaagagctttatgccttaataagagccctccaaacttgggaacattaccttgtttccaaggaatttgtcattcatagtgatcatcaatcacttaagtacattagagggaaaagcaagttaaacaagaggcatgcaaaatgggtagagtacctagattcaattccatatgttatcaaatataaaaaggga

SEQ ID NO: 8499 - DNA, 507 bp, Glycine max
agcttgcagtagtggggacgcacggagagttgtttatattgtttgagacgaacatataccaaatcgcctagctggaaatggacgtcccgacggtggcgatcagcatggttcttcatagtcatttgtgctttcaataggcaattttgcagtttggtgtgcagagcttgtcaggtggtaaaaatggagtctgcagcctcgacgggagatgtgccggtagtatacggggccaatgttagaggtggtttgccatacgtgatctcgtatggagaaatgccggcagcagagtgggttgacgtgttgtaactccactcaatcaatgaaagagaagagtgccacagggcaagcctgtcatggacgaacgagcggaggtgttgctcgagagttcgattaaaaaccttggtttgtccgtctgactcagggtggtacgctgtgctataccggagtttggtgccactaatgcagaataattcgcgccagaatgagctgagaaagatggggtcttgattg

SEQ ID NO: 8500 - DNA, 634 bp, Glycine max
  unsure at all n locations
agcttccatgagtcaggcaaaggagatgtgtttgtttctgtcctttgagatggtcatgatggttccatcgttcaagattgctatgatgagaaccatgaagggagagaagtcgaacttccagatcagagcaacgagcatgaagccaaacacgatacggattgtgatagaaacagcataaattgtgtagttcttcatcctctggaagatagccctgcttgtcaacacagcactcacaatcacactgagtccgggctccgtcaagacaatgtcagaggcactccttgctgcgtcggttgcatcatccactgcaatgccaatgtctgctttcttcaatgctggtgcatcgttcacaccatctccggtcattccaacaatgtgatttctatcctgcaacctcttcacaatctcatacttatgctctgcacatgtagaaaatctcatcagtttttcttattaaccttattcatttctctcttaatttgtggcatcaaggttttacattgtcaattaattttgataggatcatactattgttaattaattagaaatcttagtcaaatactataaaagtcaataattttatcatatatgacaatctatgatcagatgacagntgagatatcaatgtttttaa

SEQ ID NO: 8501 - DNA, 434 bp, Glycine max
cccaactggccatgaagaaaaaatctgcacttgtgggcaaactctgtggtttaagcttctctggcgaccaccacacaaaactttgtccttctgtgcgacaatctgaagcaattgaacaacctgaagcttatgctcgaaacatgtacaacaggaccttctcaaccttaacaacaaaatcagccacaacagaatgactgtgacctcttcagcaacaggtacgatcccggatggaggaatcatcccaaccttagatggtagaattcgtcacaacaacaaccttattttcaaaatgttgttggcccaaacagaccatatgttcctccaccattgcagcaacaacaacaacaacaacatccccatagacagaaacagttgatgccactgcgcaccttccttgaagaacttggaggcaaatgactatgcaaaacatgcag

SEQ ID NO: 8502 - DNA, 343 bp, Glycine max
  unsure at all n locations
agctntaagcaaattcaaacgacaatcacgttttactcggatgtccgaangagncccggaatatatcgagacgctcgtaattgaaaacagaagctctgagcaaattcaaacgaccataacgttttactcggatgtccgattgagtcccgtaatctatcgagacgctcgtaattgaaaacagaagctctgagcaaattgaaacgacaataactttttactcggatgtccgattgtgtcccgtagtatatcgagacgctcgtaattgaaaacagaagctctgagaaaaatcaaacgacaataactttttactcggatgtccgattgagtcccgatatatatcgag

SEQ ID NO: 8503 - DNA, 620 bp, Glycine max
  unsure at all n locations
agcttgtaatcgattacatcatttatgtaatctattaccagacacaaaaaattcaaatttcaagtctgaagagtcacaactcttcagaaactaactgtgtaatcgattaccacatttatgtaattgattaccagtaaggaattttcaaaaataactcctaagagtcacaactgttcaagaagtttttgaatggccatcaaaggcctataaataggtgacttgggatatgaaattccttagagtttttttgaacaacatagtcttatcctctcaaaaccaaattgtcttatcactctcaaaatattccttggtcaaaatacttgcaaattcaataaggaatcttgatcgatcttcaattgtaatatccttctcttaaatagagaaaattcttcttcttcttattcaaagagatctgtttaagagatcgagggtctcttaagttgtaaggatatctgaacacaagggaagggtgtccctgtgtggttcanagtttngtaaaagaattctacaagatagttgatatctcaagtgggttgcttggggactgaatgtangcatangacgtggccgaactagtataaaatctgagtttgcattncttaaatccctatctatcttct

SEQ ID NO: 8504 - DNA, 354 bp, Glycine max
atccttttcctgtggtccttgttcacaagtttcttactaagtctttagctaccggtgatattgatggccaatgtgaatgatcaaagctaggatttgctcttaagacagatcggaaaattcctgattccgtgcgtgcgcagaatggtctacttccacataacaatatgtatgagataaccccaatactccataagtctccttcaacactatgagatctatggagcacttcaagtgccacatagtaagcactgccaacaatatcattgaggcgttgatctgcatgtttattagaagtcagagctggtagtgaaaaaaccaacaagaggatatcaccgattacaagagaatgaatga

SEQ ID NO: 8505 - DNA, 488 bp, Glycine max
tgctaacaaaaatattcatgtaggtggaccttcttcttcttatcatgactcacagcagcctcctatccctcttccattcccacctagagcaatttcaaacaaaaagatggaagaagcagaaaaagagatcttggagaccttcagaaaaagtagaggtgaacatacctctactagatgccatcaagcagattccaagatatgctaagtttctaaacgagctgtgcacccacaaaaggaagttcaagggcaatgaaaggattagcatgggcagaaacgtgtcagcattgataggtaaatctgttcctcatattcctgagaaatgtaaggacccaagtactttctgtataacttgcattattgggaacagtaaatttgagaatgccatgctagatcttggagcatcagttagtgtcatgcctctgtccattttcaattctttatttcttggacctttggaatctacagatgtggtgattcatttggcaaat

SEQ ID NO: 8506 - DNA, 435 bp, Glycine max
  unsure at all n locations
gcaagcttcttagtctcagatgatgcaccttttntttagctacctcatgcactcctctaatgactatggcattatttctggcactaaactgctgagagttggaagccatcttctcaaataaatttctggcttcaacaagagtcatgtctccaagggctccaccactggtagcatctatcatacttctctccatattactgagtccttcataaaaatattggagaagaagttgttctgaaatctgatggtgggggcaactggcacataatttcttaaatctctcccagtactcatacaggctctctccactgagttgtctaatacctgagatatccttcctgatggctgtggtcctggaagcacggaaaattttttctaagaatactctcttaaggtcatcccaactcgtgatggaccttggagcaaggtaataca

SEQ ID NO: 8507 - DNA, 517 bp, Glycine max
  unsure at all n locations
ttgaacaatatatttgtccttcatttaactgtctnttttcacggctgccacgctcaacaaagtattttcgacacctactgtacgttgatttgaccaacgctgttatgggaatgttgcgacaatccttcaaaaccttattgatacattctgagaggttggttgtcatgtggccataccgacgtccttctctatcataagccatcgtccatttttcttttgaaatgcgatcaatccatgttgctatggctggactcagttcacgaaatttttctagattttgatcaaaaatgtgctcgcaaggagtataggctgcatcaaattagttatgaataagaattttaagtatatatcaaagttaaataaacttgaccatgaaatatgaaatcttacccaatttctttaacatttcttnttgtttggcattattgaatttccgattgaaagtgctcgctatgtgtcgcacgcagtagacatgatagccgtggggaggttaccaaccaagtgcttcgttagcgac

SEQ ID NO: 8508 - DNA, 570 bp, Glycine max
  unsure at all n locations
agcttggttcccaacgctctgttaagctctctaatttttataggtaaatctaggatctttgtcagatactatgctagatggcacaccatgtaacttgacaacctcacttatatacaaggtggtcaacttctccaaggaaaatctgatattaatgggaatgaagcgagtacacttagtcaatctgtcaacaataacccagatagaatctaaacctctaggggttctaggttgtcttaccacaaaatccatggaaatactgtcccacttccactggggtatctctaagggttagaacttcccttaaggactctgatgttctatcttagccttctgacagactaggcatgcatacacaaactcactaacgtgtctctgtatgttgggccaccaaaacatcatctttaaatcttgatacatcttggtagcaccaggatggatgctcaaattactgctatgtccttcctctaagatcatcttnctaagttcaagcacattgagaacacaaatcttatcttgaagtctcgaaacttcatctgatccaacattgaaactagtgtcccttcctgactc

SEQ ID NO: 8509 - DNA, 635 bp, Glycine max
  unsure at all n locations
agcttttaactcataatataccagaattatattattttctattagttaatagttgaagatgaactttataaaatatccatagaggaattacaaccaccatgtatccaaatatgacttttttaaaatgcatagagtttgataatagttaataaaacaaatgaaaaggtaaaagtagaaccgaacaggacatgaagagaaaaataaggttactgataattaagacatttgtattactttttttatctgcgtttataagtattatttattaatatagaataaatacataaacagaataacttttctagcattaactaattggatgagtgcaactaaacgttgttggttggttgcgcgcaacttaagtaaactttacttacaatagaaagtttaaatcttctaaatctaaagattagtctcataattatatagaaacattcggttaaaatcttgctataaccccactccgtttaattattagggtaccacggaaaataacaatccaagagttgggcaaagtttaatggatagaanaggaagaaaaaaaaatatatagacatgatgtaacctggaccaaaaagtcttacataagataatatcannttgtatcttattcttcagtgatcataagtccttat

SEQ ID NO: 8510 - DNA, 490 bp, Glycine max
  unsure at all n locations
ttcaacccttttctttcgtagtttctctgaggtaaccttaacttcttcgcctttcccctagttagtttaagcttctcttagtatctcatantttttgcgtaccttaataggatgtttttagacttcacttgaaaacccttaaaactgagatngttgcaaaagttaccttttataaaattgatgttgttttcgtgaccttcattgaaccccagccacattggcgtaatcagaatttcaaaatgacgtctccttgaagtagaaaccaaaaacaccattttcgtcccttttaaaactgaatgggtatttgacccaaatgttaatatcaaccttgcccttgaaatatatatgttagtgcttagctntactgagttttaaaagattggctaanattttgttaaaacataagcacttagacaatgaaggaaagcttgagttactgcacatgatgtctaacattatgtcaaggaatcagattgggctgcacaatgca

SEQ ID NO: 8511 - DNA, 618 bp, Glycine max
agcttaagctccttcaactgcacaaggctcttaatatttttagagatccttgtggaaccttcacccgacgaagacactgacaaaaaattatcttctccttcttggacaaagtatggcatgctgggggcaagtaaattttcttcccatcagaccttggatgcaactgtgatcttatacccatatcagctagatcttgacgggtattcaagccatccttcgtcttgccttgaatgttaaggagcgtcccaatcacactgtcacaaacatttttctccacatgcataacatcaatacaatgcctaacgtcaagatcacaccagtacggaagatcaaagaaaatggacctcttcttccatatgcaactctgacttttatccttcttttgggtcttcctaaatacagtgttcaggtgttgaacctgctaatatacctgctcaccagtgaacggtatcggtgcaatatcatgctcttgacttccattaaaagcttttctcagtcgtttgtaaagatgattgggtgttagaaagcggcgatgcctactgtagactgtttttcttccatgtttcagtggtatgtaacttgtattttcttcacagatggggcatgcatgatgaccct

SEQ ID NO: 8512 - DNA, 577 bp, Glycine max
  unsure at all n locations
ccttgtattaatcttgaaacaatacttaacttttgaatgtttgttgaagtaatcttgaaagcaacattgttggattattctttggcatcatcaaaatcatgtattcatacattcacaacaatattaggaaaaatcctttgaaatgactttcttttaataatcattggtttatttattttaagaaaccctcaaatattaatatttaaacttaatatatacaacttttatatataaatggtgtttatatttctttttatataaaaacattcttcatttattttaatttaaaagtataaaaattatatttttaaataataatatgttttatttatgttggtgccatccatatttatattcacctgtcaaatacagtgattggacaaatcatttgaaatgattttctttntataattattgattttttatcttanaagactcttagatatttaaatttaaattaatatatataactttatatgaaaggtgttaaattcattttatatcaaatattttatttttatttgataaagatatttcttaacattttgaatcttttatgcacaataacatattatat

SEQ ID NO: 8513 - DNA, 545 bp, Glycine max
agctttcttgagaaaacttccttgagattcttttttgagaaaacttccttgagaagctagagcttagctacacacacccctctcataactaagctcacctccttgagaagcttccttaagatgattcctaaagaagctagagcttagctacacatacctctttaatagctaagctcagctccttgagatgagaagctagagcttagctacacaccccctataatagctaagctcacccccatgagaaaatacatgaaaatacaaaaaaaatccctactacaaagactactcaaaatgccttgaaatacaaggctaaaaccctatactactagaatagccaaaatacaaggctcaaacgaaggaaaaacctattctaatatttacaaagattagcgggctcatacttagcccatgggctcgaaatctatcctaaggctcatgagaaccctagggccttcccttggatctctggcccaatctactaggagtcttctatccaatgcccttgcggagtaggattgcatcaagcagtgtcatccacgtct

SEQ ID NO: 8514 - DNA, 515 bp, Glycine max
agcttctcgcctcttccacctacattcgggaacttgcagccatcacaatggccgttaagaagtggcgccattatttgttaggccacccctttgtgattctcactgatcaccagagcttaagggacctaatgactcaggcagtgcagacaccggagcagcactagtatctcattcggttattgggattcgaatatagtatccagtatcggccaagacgcgagaatggggtagcagacgtgttatcgagggttgccggagaagaagctaaggcctccttgtacctactttcagtacctcaattctcctttattggtgaccttaagcatgagctagccacacacccagaatttttgacgttgctggagaaaatctgctaagacttagcagtagtctctgagtataaaattgagaatggattaattcttcacaagcagtgcatttggctttccatgggatctttcatcattcgcgtactcatggaggaatttcacagcacaccaacacgaggtcattat

SEQ ID NO: 8515 - DNA, 455 bp, Glycine max
  unsure at all n locations
agcttgtgagattttatcattggtttttcnttantacaccagaatagatagttggaatcatcaagcttttctgaaatcgaaggaaaagattgatgtgaatgatgagaggaagcggacacagcaaaattgttttctgccattgatgaatccttctaagagattggacattatatcctccaggttctgagtctgtacgaaatgctgttggagttcttcaagagattggggcattgtcagttgatgaacaactcactcagctagggcagaagcttggctgtcttcctattcatccatcaacaggcagaatgcttattttttccatattgatgatatgtcttgatccagctttaactcttgcttgtgcattcgagtttaatgatccatttgtgcatcccattttacctgatgaaaagaagagagcttcagctgctagatctgagcttggttcttgtatg

SEQ ID NO: 8516 - DNA, 517 bp, Glycine max
  unsure at all n locations
agcttgtgcattcaatatcctgatgaggatgttcatatgttctcaagactggactaatacatttgttgcccaagtttcatgatcttgcaggtgaagatcctcataagcattttaaggagttccatattgttttttccaccatgaaaccccccgatgtccaggaagatcatatctttctaaaggcttttcctcattctttggagggagtggcgaaagattgactgtactaccttgctcccaggtccattaccagctgggatgaccttaagagggtgttcttggagaaattcttccctgcatctaggaccattgtcatcagaaaagatatttcacgcatcangcaagtggagagagcttgtatgagtactgggaaaaattcaagaaattgtgtgcaagttgtcctcaccaccagatttctgagtaactccttctacaatatttctatgagggacttagcaacatggagaagagtatgattgatgctgncagtggtggagctcttggtgatatgactctt

SEQ ID NO: 8517 - DNA, 560 bp, Glycine max
  unsure at all n locations
tcaagagatcatcccctcgacaatattattggtgatatctaatatgggtgacaactagacattctcttaaagatttatgcaataatatggcttttgtatctatgattgaacctaaaaatataaaagaagccataatagatgataactggatcattgccatgcaagaagaactgaatcaatttgaaagaaacaatgtgtagaaattagtagaaaaacctgaaaattatcctgtcataggaacaaaatgggtttttagaaataaattagatgaacatggtataattattggaaataaagctatgttagtagcaaaaaggtataatcaagaaaaggaatagactatgaagaaacatatgctcttgttgcaagattagaagccattagaatgctcttagcatatgcatccataatggattttaaactttatcaaatggatgttaagagtgctttttctaaatggcttaattcaagaagaggtatatgttgaacaacccnctggttttgaaattccggatacaccaaatcatgtttattaattacaaaatggctcttatggtttg

SEQ ID NO: 8518 - DNA, 597 bp, Glycine max
agcttcatacatcagacccacttccaggtttgcgtgattctacttcacatggatttgatggggcctatgcatgttgaaagccttggaggaaagaggtttgcctatgttgttgtggatgatttctccagatttacctgggtcaactttatcagagagaaatcagaaacctttgaagtattcaaagagttgagtctaagacttcaaagagaaaaggattgtgtcatcaagagaatcaggagtgaccatggcagagaatttgaaaacagcaggttcactgaattctgcacatctgaaggcatcactcatgagttctctgcagccattacaccacaacagaatggcatagttgaaaggaaaaacaggactctgcaagaggctgctagggtcatgcttcatgccaaagaacttccctataatctctgggctgaagccatgaacacagcatgctacatccacaatagagtcacacttagaagaggcactccaaccatactgtatgaaatctggaaagggaggaagccaactgtcaagcactttcacatttttggaagtcatgttacatcttggcagatagagagcaaaggagaaagatggatc

SEQ ID NO: 8519 - DNA, 267 bp, Glycine max
ttgaagagaatccttgtggaaccttcacccgacaaagacactgacaaaaacttatcttatcctttttggacaaagaatggcaagctgggggcaagttaatttttttcccatcacaccttggatgcaactgtgatcgtatgcccatatcaacttgatcttgacggggattctagccatccttcgccgtgccttgaatgttaaagagccgcccaatgacactgtcaccaacatttgtctgcacatgcataacatcaatacaatgtctaa

SEQ ID NO: 8520 - DNA, 498 bp, Glycine max
cctttaatctaagctagttggtaaaggtagacacccttgagggtgtatccctgatgacctaaccttaggacctgaagtggtacaacaaaccattgagaaggtcaagttgatccaagagaggatgagaactacttagagtaggcaaaaaagttatcatgacaagaggaggaaagacttggaatttgaggttggtgatcatgtattcttgagagtcactccgtggactggggttggtcaagcattgaaatcccaaaaactcacacctcgttttattggttcttcctaattctcaaaagtgtcggtcctgtggcataccatattgcattacccctgtctctttctaatcttcacaatgtctttcatgtgattgatccatgacccatcttatgttatcgatttagtgacgtacaattgaaggataacttgacatatgaaaactttgcctttgatgatcgatgattggcaaacaatagctccttaaagggaaggagatttcat

SEQ ID NO: 8521 - DNA, 315 bp, Glycine max
agctttggggtcgatggccccaatgacattttttcttttcatggaaaaaggccaaggggtggacatgactttcaaaagatgtggcggaacattgacattgtccgtgtacgcttgacatttatggcatttccttacatgggcgcagcaatcgctttccatagtgatcttcctggccatagcatgcccattggcatgtgtcccaaatgaacccccggggacttcctcaatcatgtagtttgcctccttggcatctacgcatcgcaagaaggtcatgttcgggtttcgttggtacaggaaggtaccactcacaaagaa

SEQ ID NO: 8522 - DNA, 403 bp, Glycine max
aacattaaatagcaccgttcacctaactgagaccaaaaacaaaattcgacccgttggcttcaccacggtccctactacatatccgtcatgtcaaacttaataattttcggggggacatccttcaattttcagcagtaccaccatacagcctctcagaagatttaacgaagatcattgcaaacggctttgggttctccatggctaacctcaccaacaagaaaccttcagcttcctggctcacccctctgtactcatctatctccatcatccaccaaaagcaccatcaaaccaaggaacgacctgagatcaatatccagcccatacagatgattcctggtcaagaccctgttcctgaaaaactggatcccaaacgaacaccgggtgggaaagaccctgaaaaccc

SEQ ID NO: 8523 - DNA, 438 bp, Glycine max
ctaatacgtttcaaaatttttttatttaacacacaagaagatccgactccagtgtatacaaaataatcttattaaactaaagtattacctgttgagaattgcagatgatttggcccagagaaaatgaatgacaatgaggaagaggagaacattaggaacaagagacagaagagtataaccagatctttcaaacacaacccaaacagctagtgtgaccaacaatatccccacagtaaggttctttcgcctccacagtattaaatctgcaactgcgttgaagcatggcattgattcagcatagattcaaagatcatgatcaattaccaattcattattttcttctgagtctgacccatttcccattggtactaaatgcaaataaataactaaaacaaacaagcacaggcgcagcccatatagctatttcacagttaaaaa

SEQ ID NO: 8524 - DNA, 467 bp, Glycine max
  unsure at all n locations
agcttgagatgaggaagtgtgaaagggttatcagtttgaaaaactgaggggcaagctgggcatttgtctgctagaagaattatagcagctactggtatctgaacgtgctcaaacgtctcacttaacattaatagcacgttcactactgagccaaaacaaattcgaccgttgcttcacacgttcctctacattcctcattcaaacttatattttcgtggtaatctcattttcagcataccccaacagctctcagagatttacgaaatcattccaaacgctctgcttctccatggctacctcaccaaaagaaacttcagctcctggttcaccctctgtaccatcatctncatcatccaccaaagcaccatcaaaccaggaacgacctgaattcaatatccagcccatacagatgattcctggtcaagcccctgttcctgaaaaactggttcccaaacgacaacagggag

SEQ ID NO: 8525 - DNA, 406 bp, Glycine max
agtattacctggtgagaaatgcagatgatttgggccagagaaaaagaatgatcgtggggaggaggagaacattggaaacaagagacagaagagtataaccagatcttttaaacacaagccaaacagttagtgtgaccaacaatatccccacagtaaggttcttccgcctccacagtattaaatctgcaactgcgttgaagcatggcattgattcaacatagattcaaagatcatgatcaattaccaattcattattttcttctgattctgaccccatttccattggtactaaatgcaacataataactaaaacaaacaagcacaggcgcagcccatatagctattccacagttaaaaacaggtcccaaatggacataaacaacacaccaagggaaataaaagaaaa

SEQ ID NO: 8526 - DNA, 246 bp, Glycine max
  unsure at all n locations
agcttgagaatggaggattgccttgaggtttttcttttttgcaagcaaggaacacaacgccaaactcaaaaatggaggaacacaagaaagacaacgccactnaatcatggggctccgaaaaaaggtaagaatggaggaattgcttgacggtccactcttatgccgccatggaacgccggggccatactcaaaagtggaggaccccacgaacacgcctaagcaatagcactcacgcggccccaaaaa

SEQ ID NO: 8527 - DNA, 329 bp, Glycine max
aacgctggttctacctcaaaaccccttgaactacttcacattgaattatttaatccctctagaactatgaatttaagcgtaaattactatggcttagcaatagtggatgattactcaaggttcacatggactttgtttttgaaaacaaaaaatgaagcttttgaggcttttcgcaaacttgccaagatgattcaaaatgaaaaaggtcttaacattgtttcacttggaagtgatcatggaggtgaatttcaaaatgagtccttttaaaacttttgagaagaaaatggaattcaccacaatttttctgcccaagaacacctcaacagaat

SEQ ID NO: 8528 - DNA, 434 bp, Glycine max
agcttttgcaagctggaatcatttattctattttcgatagccaatgggtgagtcctgtccaggtagttctgaaaaaaaccggcctcaccgtcatcaaaaatgagaaggaagagttgattcctaatcgggtgcagaacagttggagagtctgcatcgactataggaggctgaaccaggttaccaaaaaggaccattttcccctgccattcattgaccagatgcttgaacgcctggcaggtaaatctcactactatttccttgatggtttttctggttatatgcaaatcattattgcttctgaggatcaggaaaagaccacattcacctgccccttcggcacttttacctataggaggatgcctttcggcctgtgcaatgcccctggtacctttcagcagtgcatgatcaatatttttagtgattttttaaaaaaa

SEQ ID NO: 8529 - DNA, 534 bp, Glycine max
agcttaataaaaatgttagtaggttgatgttttttttaccccaatttcttataaacagagtaaggcatcaaattaatgttagcacctaagttataaaatgctctatcaaaggacaagttgccaatggcataatctcctttaaaaatttggcatacttcggcatttcagcaattgcctcaacaaaaggaatgttaacatgcaatttcttaaacatttcaacaaacttatcatcctatttagacctctgatcatgatactgaaggcttatgcaaatgttttgattttgattttaattttgcaggtgatgagacttgtacacattttggttctgactctaaccttgcctttgatctctttgctttttccaagagaagtttaggtaatgtctcgacccttggttgtaggtattaaagtagggctataaataatacttcttccaccaacatagttaacttccctagggccctgatgtattggcagcctacaaatcacattttcttattccccacacttcctaaaaaacaaaagggtggg

SEQ ID NO: 8530 - DNA, 451 bp, Glycine max
agcttgttcacataggtaaaagaataggttttttctacatgttgaataatgaacatgcatcatttcatgaacttagttgcttggtaagtaagattgatgattcttggttatgacatcgtagggttgcacaataaacatgcatcatcttaatcatctagttaaaaaggacttagtaattggtattttgaaactcaagtttgagaaaaataaattgtgtgaagcatgtcaaaaagggaaacaagttaaaaattattttcaaagtaaaaacgttgtttctacttcaaaaccccttgaactacttcatatagatttatttggaccttcaagaactataagttcaagtggcaactactatggtttagtaattatagatgattattcaaggttcacttggactttgtttttgaaacccaaaaatgaagctttggatgcttttcgaaaacttgccaaa

SEQ ID NO: 8531 - DNA, 464 bp, Glycine max
agcttcacgcacaaatcataaaagctggtcttaaccaacacgaacccatccccaacactctcttaaacgcatacggcaaatgcggtcttatccaagacgcactccaactgttcgacgcattgccccgccgagaccccgtcgcatgggcctccctcctcaccgcctgcaacctctccaaccgccctcaccgcgccctctccatctcccgctcccttctctccaccggcttccaccccgaccacttcgtcttcgcctccctcgtcaaggcttgtgctaacttgggtgttcttcacgtcaaacaagggaaacaagtccatgctcgcttcttcctatcacccttctccgatgacgacgttgtcaagtcttctttgattgatatgtacgcgaaattcgggttgcccgaataccgacgtgccgttttcgactccttttcttccttgaatttaatttcttggactaccatg

SEQ ID NO: 8532 - DNA, 388 bp, Glycine max
  unsure at all n locations
agcttttgcttctgttcaatatataattactgaatcnttactttggnnggggaatccgagccgttcattgatggtcggcaagtatgatggtcttaatgaagatcctacacgtatttcgggtgtatctcacaggcggttttaaaaaacctcgcgaattaacttggggtacgggtgtagttttggctgtattgactgcatcttttggtgtaaccgggtattccttaccttgggatcaaaatggctatggggcaggtttaattgtagcagacgatcccgactctaagtttgtcctctgatgctattggcctttgctctactttatgatctttcaactgggtaaccccaattttttgatggggagcttttgaaaaaatgtgttattttcccc

SEQ ID NO: 8533 - DNA, 487 bp, Glycine max
agcttccttgagaaactaccttgcgaaatttctttttttatctgccttgagaagctagagcttagctacgcacacgcctgtaataattaagctcacctgcttgagtagcttccttgaaaagcttccttgagaatattcctagagaagctagagcttagctacacacacttctctagtatctaaacacacctccttgagatgaaaactagaacttagctacacacaccccctataatagctaagctcacccccatgccaaaatacatgaaaatacaaaaaagtccctactacaaagactactcaaaatgccctgaaatacaaggctaaaaccctatactactagtatggccaaaatacaaggcccaaaagaaggaaaaacctattctaatatttacaaagaagagtggacccaaccttggccgatggtcgcagaaatctaccctgagcttcatgagaatcctagggccttttttagtagctctagctc

SEQ ID NO: 8534 - DNA, 305 bp, Glycine max
cttctggggggacatcttgacttgctttcctaactgacattcaccacagattctggcttcttctattttcagattgggaatgcctctaacagcacctttgtcaatgattttcttcatgcctcttaagtgcaaatgtccaaatctttgatgccatattgtgacttcatcttctttggaggatagacatgtggaggagtaactggattcttgaagtgtccataggtaacagctgaactttgataagctgccctttcttagaacttcggtccttccatttgtcacctagcattctgaatttggaagtt

SEQ ID NO: 8535 - DNA, 407 bp, Glycine max
agcttgtgtcacgattcactgttttattttttagcgccactcacttaacgaatcaccgaatgtaccatgagaggacaaagcacatagatgcgaaactacactctatgaaagatgtgattgaatctgagaaggtgaaggtcgataatgtttcaacagaagaaaacccggctgatatgtttacaaaatccctctctagtgtcaagttcaagcactgcttggacttgataaattttgaggatgcctaaagcagattggtagaagtgcatccctgaatcgcaagataagcacttgttgatttggagtcaaggtggagatttgtggtgtgtgactcaaaatcacaaatggcacaagtgggaagactttaagaggtgctattctaactaaattcagttatgataaccgaattg

SEQ ID NO: 8536 - DNA, 399 bp, Glycine max
agcttagtaaagctaagcactatcaatctccccctttggcaaattttgtctaaaacatacttagacacttcctgagcaggtacgagcagttatgccagtgggatcagcaactttcattatcaaagcaaacaaccacaacgggatgtgtaagggcgacaggaaaattctgcaagttgcaagtcggtttccggatgtcaagacatctcacgtgacatcagctttttgctccccctgactccatgctcttactgctgtgaagcaggtcactgcagcatcttctatcagctactagtcttttccaggatgtcaagacatctcatgtgacatcagctttttgcttcccctgtcttcatgctcgtactggattttctatcagctactagtttcaatagcttacat

SEQ ID NO: 8537 - DNA, 284 bp, Glycine max
ttgagcaaattcaaacgacaataactttttacacggatttctgattgagtcccgtaatatatcgagacgcttgaaattgaataccgaagctctgaggattttcaaacgacaataactttttactcgaatgtctgattgagtcccgtaatatatcgagacgctcgaaattgaatgttgaagctctcagcaaattcaaacgacaataactttatactcgaatgtctgattaagtcccgtaatacatcgagacgctcaaaattgaatgttgaagctctcagcaaatt

SEQ ID NO: 8538 - DNA, 323 bp, Glycine max
agagcgtctctgtatattacctgactcaatcagacatacaagtaaaaagttattatcgtttgaaaatcctcagaacttcggtattcaatttcgagcgtctcgatatattacgggactcaatcagacatccgagtaaaaagttattgtcgtttgaattagctctgaggttcagaattcaatttcgagcgtctcaatagattacgggactcaatcagacatccgagcaaaaagttattgtcgtttgaattagctcagagcttcagaattcaatttcgatcgtctcaatatattacaggactcaatcagacatctgagtaaaaacg

SEQ ID NO: 8539 - DNA, 275 bp, Glycine max
tagcattctcatcaatggctttatacttgaattcttcacgctaaacgcccacttgcatgacccacatcgagtgaaacgcctcaacaaccatgcccatagtttttatcaaccttggcccctgtctattgatggagtgacccttctgcaccatactgtcaaacaactttacaccgttgctcaactccatgaccagaagcacggccgagaaatcctcgttcttcacttacatgcagacaatgttggcgagatccgacaaagagcgcattatatgaatc

SEQ ID NO: 8540 - DNA, 286 bp, Glycine max
ttgaatgctctattcaatggagttgacaagaatatcttcagactgatcaacacatgcacagtggccaaggatgcatgggagatcctgaaaaccactcatgaaggaacctccaaagtgaagatgtccagattgcaactattggccacaaaattcgaaaatctgaagatgaaggaggaagagtgtattcatgacttccacatgaacattcttgaaattgccaatgcttgcactgccttgggagaaagaatgacagatgaaaagctggtgagaaagatcctcagatctt

SEQ ID NO: 8541 - DNA, 284 bp, Glycine max
tgtgccttttcacgtcttttatatgaatgtagcatatagatccaaagacccttaggtgctttgttgatggcttcttcccgatccaagcttcaattggagtcttgtcttttacagacttagttggacatctgttgagtatgtaaacagcagtgtagactgcttcagcccagaatgtgttaggtagtcccttctccttgagcatcgatctagccatctccataactgtgcgattctttctctcggacactccattatgttgagaagaatatgcgactgtaagttgt

SEQ ID NO: 8542 - DNA, 331 bp, Glycine max
  unsure at all n locations
actttgattatccttctgatacaatgctgtcaagaatgaagattggatgaaacctcaaaagaaatcttattattcaccttacagcttggaagaatgctgattatccatttttgtttttttnttttttcttgaagcagtagttctaggtcgtctcacttttttcaaaatgtttttcattattaagaaaaggtaacgaagatcaaattcgagcttgttttatagtccaggagacttcacttggggtattattctgcacccttatcctgagatctatataatgaagggaaccaaaaagtaccacagagttggaccatggaatggtttgtgtttc

SEQ ID NO: 8543 - DNA, 281 bp, Glycine max
tgtaatcgattacacacatactgttatcgattatcagaggagtttttccagaaaacattctcaacagtcacatctttttatctgtttcttaaatggccatcaaaggcttatatatatgtgacttgagacacaaattgaacaagattttttcagaacaaaaaggtcttatcctcttaaaaagcaaaattgtttcatcctcttaaaaattccttggccaaaacacttgtgattcaataaggaattatttgagtgcgcaaattgttcaatctatctctttcaag

SEQ ID NO: 8544 - DNA, 362 bp, Glycine max
agctttggaaatgatttctatacaaaagttagtcgtataaagcgactaacaaatcttcagtaatatcccgccaaacccagaaaactcctaatctcaaacacagacttaagactctcccacttaagtacaacttctatcttagaaggatctatatctatactgccttaggatatcacatgtcctagaaaactaactttatctaaccagaactcacacttggacaacttagcataaagttgtcggttcctaagggtttgcaacacaatcctcaagtgctcttcatgctcctttctagtctttgagtataccaaaatatcatctatgaaaactaccacaaaactatcaagataggggtgaaagat

SEQ ID NO: 8545 - DNA, 361 bp, Glycine max
agcttcccaggatctttcatttttgaaatttttaggtagaaaatcttctgggtctcctgtaagaagcctatatctctgttagcaagcagtatatcatcggcatataatactaagaatatgtatttactcccactgaacttatgatatacataatcatcaactacatttgcctcgaaaccatatgaggtaatgacttgatggaacttgtaataccattgacggaaagcctgtttgagaccatagatggatttctttagtttgcataccatggactttgagtcacctaacacaaagttttctggttgcaccatataaatcgtttcttcaatgtcaccatttagaaacgcaatcttgacatcca

SEQ ID NO: 8546 - DNA, 282 bp, Glycine max
tcgaacctctgttggagttgtcggttgttgccactccataaccgactccaccttgttcggatccaccgcaaccccgtccttagaaatcacgtgccctaagaactgcactttctccaaccaaaagtcacatttcgacaatttggcgaacaacttcctgtccctcaggatatgcaatacaatcctcaagtgcttctcatgctcctccttattccttgaatacactaggatatcatcaataaacacaaccacaaactggtccaagtaatcatggaatatacggtt

SEQ ID NO: 8547 - DNA, 349 bp, Glycine max
agctttttattctaattcagttttccatgagagtaccctaatgtctgaagtttatgggattaagaaggtcattgaccaatccttattttatgatttaacaaaattacctagtgaaggtgtgccttttgagggtgcactaattgatgattggaaattcgatttttctgtgcatgatgcccgccggttggttttcaacaaccaagcggatatgaccgaaaggcttcttgccggatcattggcttttgaaagccacatcctccattaccttattgttcgcatcttactccctagatcttcaaaccttgctcaggtttctaaagaagatctcattgtcatgtggacctttcat

SEQ ID NO: 8548 - DNA, 285 bp, Glycine max
ttgagtttctttgagcagatgttgaattatggttgcattccaaattcaaatacatgggagattctttctgagggccacattgcagataagaggatttctgaagccatgtcctgcttgaaagaagcttttatggctgctggtggttcaaagagttggagaccaaagccctcatacttgtctgcattccttgagctttgtcaagagcaagatgacatggaaagtgctgaggttttaattggacttctgaggcagtcaaaatttaataaaagtaaagtttatgcatct

SEQ ID NO: 8549 - DNA, 331 bp, Glycine max
agcttgtcgatatgatcgcattttgagcataacccaatcacctggggggtactctacttctcttcttttagcatctgcgatggtcttcattttctcctgagctttgagaagctttttcctaattgtttgaaatattccctccctgtctgtcagcatttcatcaacgacattgagtttggatgatcctgcgagatattccgaaaaattgaatggcttgcggccaaatgtgatttcatatggagtcatccctcttcctgcgttccatgaggtgttgtgagaccactccacccagagaaggaattttccccattgtttaggtctgccatggacg

SEQ ID NO: 8550 - DNA, 350 bp, Glycine max
aactagatgcatgggttacttgggaacccagctggccttgaatcaaaaatctgtacctatcgcaaaggtttgtggtttgtgctcctttgctgaccaccatacagacctttgcccttccatgcagcaacctggagcaattgagcagcctgaagcttatgctgcaaatatttacaatagacctcctcaacctcagcagcaaaatcaaccatagcagaacaattatgacctctccagcaacagatataaccctggatggaggaatcaccctaacctcagatggtccagccctcagcaagagaccagagcctccattcagagcttaaccaatcagatgggacaattggctaccc

SEQ ID NO: 8551 - DNA, 289 bp, Glycine max
tccgttgttcaattttgaggtactcgatatattatgcgccagaatcgaacatccgagtgaaaagttatgaccatttgaatttctcgagagcttccgttgttcaatttcgagcgtctcgatatattgtgcgcctgaatctgacctccgagttaaaagttatgaatatttgaatttcacgagagcttccgttgttcaatttcgagcgtctcgatatattatgcgcttgaatctgaccaccgagtgaaaagttatgaccatttgaaattctcgagagcttccgttgttcaat

SEQ ID NO: 8552 - DNA, 280 bp, Glycine max
taggagaggatgtaaccgaagtcacaaaaggagatgtggttgttccaattttcttacctgattgtggggagtgtatagattgcaaatcaagcaagagcaacctttgttcaaagtttccttttgaggtgtctccttggatgcctagacatgccacctctagattcacggatttaaaaggagatatcatacaccatttcttgtttgtgtctagttttagcgagtataccgtggttgacattgctcatctaaccaagattgatccagcaataccacccaacag

SEQ ID NO: 8553 - DNA, 285 bp, Glycine max
tccatcatgggctaagtttgatttatgtagggctgctgtctattggaaaaccatgaatggcctccctccttcttcagtaagtataaaagtattgagttaactcctagcttgttacttaatcaattaccttttagtaaaaaaatttacaaattttggcagggagaaaagctaaaacttttctataatccagctgcaactcaacttgtccctaatgaagaatttggaattgcttttaatggtaatttttgcaatgtcacttggttgcccaaaaatgtcattttccat

SEQ ID NO: 8554 - DNA, 348 bp, Glycine max
agcttggcccatttgctccaaccaattatgcattggaaggatcagttgctatcgccggagctgcagtgcagtggcttaaaaacagccttggcatcatttctagtgcttcagaaatagaagagatggcattacaggttgaatccactgttggggtttggattgtttgctccatggtggcgtgaggatgctcgcggggtttgtattggaataacaaggtttacaagcaaagctcacattgctcgagctgtgctcgagagcatgtgtttccaagtgaaagatgtcttggattcaatgcataaagattcacgagaaagtgaatcccaaaagaagtttgtgcttagagtggat

SEQ ID NO: 8555 - DNA, 349 bp, Glycine max
agcttattgatttttgtatctaacattttagtctttaaaggcttatccatccttcccttgacctctgggaagtgtttgagtcttaagcagctaccaaaacaaaggtattcgagagatgacaaatagattgtcggcacaaaactttggagttgagtgcagtttttagcacttacgacaacaaggttagtgagatgcccaacttatttatgaatgctaaccagattctcgcatccattaagtgccaattctcttaaattcatggcactagacacataaggaaatttagtaaccatacgacaataagataaattcatgtaagtcaaacttttgcaatgatgtataaagaaaa

SEQ ID NO: 8556 - DNA, 280 bp, Glycine max
tgtgcattcaatatccttatgagggtgttccatatgttctcaagactggactaatagattttctgcccaagtttcatggtcttgcaggtgaagatcctcataagcatcttaaggagttccatattatttgttccaccatgaagccttctgatgtccaagaagatcatatctttctaaaggcttttcctcattctttggagggagtggcaaaagattggctatactaccttgctcccaggtccattttcagttgggatgaccttaagagggtgttcttgga

SEQ ID NO: 8557 - DNA, 286 bp, Glycine max
tgaatcggacatccgtgtgaaaagttatgaccatttgaatttgtcaagagctaccgttggtcaatttcgagcctctcgacatattatgcacctgaatcggacatccgggtgaaaagttatgagcatttgaatgtctcgagagttttcgatgattaatttccagcgtatagatatattataagcttgaatcggacatccgtgtgaaaaggtatgaccatgtggatttcacaagagctttcgctgttcaatttcgagcgtttcaacataagatgcgcccgaatcggac

SEQ ID NO: 8558 - DNA, 306 bp, Glycine max
agcttataatatatcgatacgctcgaaatttaacatccgaaactctcgggaaattcaaatagtcataacttttcacatggatgtccgattcgggcgaataatatgtcgagaggctcgaaattgaataacgcaagctcttgagaaattagacaggtcttacttttcacaccgaagctctcgtgaaagtcatatggtcataacttttcacactgaggtccgattcaggtttataatatatcgatacgcgcgaaatttaacatacgcaactctctataaattcaaatggacataacgtttcacacggat

SEQ ID NO: 8559 - DNA, 290 bp, Glycine max
tcaacattcaattacgagcgtctcgatatataacgagactcaatcagacatccgagtaaaaagttattgtcggttgactttgctcataactttatcattcaatttcgagcgtctttatatattacgggactcaatcagaaatccgagtaaaaatttattgtcgtttgaagttgctctgagcttcaacattcaatttcgagcgtcttgatagattacatgactcaatccgacatccgagtcaaaagttattgtcgtttgacttggctcagaactttaacattcaatttcaa

SEQ ID NO: 8560 - DNA, 344 bp, Glycine max
agctttgaggaaattcaaacgtctataccttttgacacggatgtcggattgagtcacgtaatatctcgagacgcttgaaattgaataccgaaactctgagcaaattcaaacgacaataactttttactcggatgtcggattgagtcacgtaatatgtcaagacgctcgaaatagaataccgaagctctgagcaaattcaaacgacaatacctattgactcggatgtcggattgagtcacgtaatatctcgagacgctcgaaattgaataccgaagctctgagcgaattcaaacgacaataactttttactcggatgtgcgattgagtcccataatatgacgaga

SEQ ID NO: 8561 - DNA, 284 bp, Glycine max
tgaaaaaatagtgggcatcatgcaagatggtctacttaagaagtttaaactcacatcctctattagcacaaacaacatgcatctatttgacacagaagggaaaattaagaaatatgagaatccagaacaaagtacaacctttatcatgttaagttttgaataagatcaattaacaataatgtttcacacgctcactattttatgtgatttcttatgcagttcttgaagagttcttcctccttcggctgaagtattatgagagaaggaaggtgagttttgtgttt

SEQ ID NO: 8562 - DNA, 281 bp, Glycine max
tggagaatcgtctcttcaacaatatgatttgaagacaattgaagtaattcaaagaaaactctttctcatgaaattgagattaattcattttatttgttgtgtttttgtgcaggaaaaccactttcttggaacactcggcttaaaatggctatcagtgcagctcggggattagctttcttacacagctccaacaaccatgtcatattcagagatttcaagcccttaaatatactacttgatgaggttagttattttttgttagttgatttctcacgatggaa

SEQ ID NO: 8563 - DNA, 289 bp, Glycine max
ccttgagagaggtcctatagagcctcccttgtcgtcggaggcaaagtattgaccaattggtgagagagcatagagtctctctctcacaccatcttcagtggtgcgaatggagcaattgagaagagagtaacttgccaacaccggcaatatgcgttcaagcctattagccaattgagggtgtggatttggaagcaaagaagcaatctcagaggctgacaaagtcgaactctctgccttgtctatgatatcaaacaaattcagatcaacagcagcgttcaagattgccgga

SEQ ID NO: 8564 - DNA, 290 bp, Glycine max
taacaatcagtgtcatactattgatcaaaacatagcaggtataaatatgcaatactagactcaaaatatgcaacaaacactagacctaaatcagtgtcacagaaattggaagaaaatattttatccaagcacaaacttcaagccttattccatgtattggggggaagttatggctggccatatgggtagaggtgtcatagaggagcaggtatggaggaagggaccttggactgctgaagaggacaagttgcttgttgagtatgtcaggttgcatggtgaaggcagatgga

SEQ ID NO: 8565 - DNA, 283 bp, Glycine max
ttgagccaattcaaacgacaataactttttacttggatgtctgattgactctcgtcacatatcgagacgctcgaaattgaatgttgaagctctgagcaaattcaaacgacaataactttttactcagatgtctgatatagtctcgtaatatatcgagacgctcgaaattgaatgttgaagctctgagctaattcaaacgacaacaactttttacacggatgtctgattgagtcctgtcatatatcgagacgctcgaaattgaatgttgaagctctgagccaat

SEQ ID NO: 8566 - DNA, 340 bp, Glycine max
agcttcaacattcaattttgatcgtctcgtaatattacgggactcaatcagacatccgagtaaaaatttattgtcgtttggattggctcagagattcaacattcaatttcgagcgtctcaatatattacgggactcattcagacatccgagtaaaaagttattgtcgtttgaattagcttagagcttcaacaatcaatttcgagcgtctcgatatatcacgggactcaatcagacatccgagtaaaaagttattgtcgtttgaattggctcagagcttcaacattcaatttcgagcgtctcgatatatgacaggactcaatcagacatccgagaaaaaag

SEQ ID NO: 8567 - DNA, 280 bp, Glycine max
tgcatcaatataaccctttaattttaactcagaatctctccataagtgaggaactcgtctttagttcttctcaagtacttaagaatggtctgaagtacttttcaatgttcctcaccgaggtttactggatattgactagctgcacttagtgaataagcaacattaggacgtgtacaaatcatgatatacatgatagctcccactgcgctggcatatggtactctagtcatgcattctttctcttcatgagtttaatataattttgtaagatgacccttgt

SEQ ID NO: 8568 - DNA, 330 bp, Glycine max
agcttttcgtttggcataactatatcagccaaatctatttcaggtgtattgtttggagcacaaaagttatattaaacatttgtgtacaaaagctgacaagcaagatgtcacagtagttatatgtccactttgtgccaaaggagttcgcctagttcctgatcaagatccaaacataacttgggagaatcatgtcaacaccgagtgcgacccatcgaattacgagaaagtcacaaagaagaaaaaatgccctgtccctggatgcagagaaatattagtattctcaaacacaattaagtgcaaggactgcacagtagagcattgtttaaagca

SEQ ID NO: 8569 - DNA, 346 bp, Glycine max
agcttgctaacccatggaagctcctaatatctcccacactttttggggtgggccattcttggatggccttgattttctcaaggtccacttggaccccatttctaccaactacaaaacctaagaaaactatattatctacacaaaaggtacacttctctatatttgcatagagggtgtttttcctaaggactgaaagaacttgtctgagatgtcctaagtgatcatctaggctcctactatacactaaaatatcatcaaaataaacaactacaaatctacctatgaaatcccttaagacatgatgcataagcctcataaaggtgcttggtgcattagtgagcccaaa

SEQ ID NO: 8570 - DNA, 343 bp, Glycine max
agcttatcaccctgaccccatattgcataaacttcttcaccatgagcagcctcatcacctatctccatatcctctttaaaaattctcaatggaaaaaagatccgaatgaaggtgacaaagataacaaagataatcccaaggatttggactcccatttgcctgaagccggtgctgagcttgttggaaccgaaaccataaaagaaaacaacgtattgagcatcatgtccatagaacaaccggttgagtcttggatcagcaaagagcccagtgaggagtcctcctatggtttctgcaatggcatgagtatggaacactgccataatatcatcaaccttctgcagta

SEQ ID NO: 8571 - DNA, 339 bp, Glycine max
agctttgcttctacatagaggtttaagaataatcttctgatcatggtgctggaaagaaatcttgttggtgaatcatgcactgctttggtgtaatactgttatggtcttcccaacaatatatgagtcacctccattggaactacatcacacatcaccctatcattgtatcttccaatggtgaaacacacctcaacctgctaagtcacttttacctcatcatcttcactaagccactgaagtttgtatggcctaggatgtggcttaatatccaaattcagtttgacattaacctggaatttgcaacattggtacaacttcctctatcaacaattaaagaac

SEQ ID NO: 8572 - DNA, 367 bp, Glycine max
  unsure at all n locations
atactcggatgtccgatagagtctcgttatttatccagacgctccanattgaaagcagaagctcctagcaaactcatatgacaataacttattctcaaatgtccgattgagtcccgtaatatatcaagactctcgaaattgagaacagaagctntgagcaatttcaaaccacaataactntatagtcgaatgtcctattgagtcccgtaatatatcgagatgctccaaatngataatggaagctcgtacaaaattcanacgacaataacattatacacggatgtctgactgagtcccgtaatatatcgagacgctccanannttgaaatggaagctcgtaccaattcaaacgacaatnaacttttac

SEQ ID NO: 8573 - DNA, 337 bp, Glycine max
  unsure at all n locations
ctgcagctggattcctttagtagggaatctatccttcctaagatggagccaaacccagtcaccctcattaagaaactagctctttcttcctctattgcctntagttgaatacacctttgtttggttctctattaggttcttaaccctctcatgcaacttctttacaaattctgacctagattccccttctttatgtataaaagaagtgtccaatgggaggggaatgaggtctaacagtgttaggggattgaacccatagacaatctcaaanagggactgcttggtggttctatgaacccnncttgtgtangcanattctacatgaagaatatactca

SEQ ID NO: 8574 - DNA, 286 bp, Glycine max
  unsure at all n locations
tggagaagagagtgattgtcgagtcacaacgtcaggtagacgtcatctctatcctccaggaaggatcatgcatatagtccctactgcacatttgtctganaatattcctaattcacatcacaatgtgtctgatgagaaacatgtctacctatatgaaacgcctagagatctgtatggaaagctcagactntctagagggatgatacttgatcatatgacgaaccagtatctgaagatgttacaacaattaatcaatcaactagagaaagacagcttcaaatatcgt

SEQ ID NO: 8575 - DNA, 280 bp, Glycine max
  unsure at all n locations
actcggatgtcggattcaagttcataatatatcgagacgctcganattgaataatggaagctattgagcaattccaatggtcataacttttaacttcggaagtccgatgaggcacataatatatngagacgctcgaaattgaacaacggaagctctcgagaaattcaaatggtcataacttttaactcggaggtcggatcgagacgcataatatatcgagacgctcgaaattgaacaatggaagctcttgagcaattccaatggtcataactnttaactc

SEQ ID NO: 8576 - DNA, 264 bp, Glycine max
  unsure at all n locations
tttgatatagcgaagaattcgtgttacggccttaagatgagtagtggttggagtctncatgtattggcttatgagtccagtagcatatagaatgtcaggtcttgtgcacgtcanatatcacaaactacccaccanacgcttgaaatttgtagcatccaccttgatgctttgtcaaacttcaataacttcattttgcactccaccggtgttccaattggcttatagctatccatcttgagtttcttgagcatcttcttcacatag

SEQ ID NO: 8577 - DNA, 269 bp, Glycine max
  unsure at all n locations
tcagactgatggccaaactgaacggaccattctgtcgttggaggaacctttgagggcgtgtgtcttagagcanaatangagttgggagagntttctgccattgatagagttcacttataaaaatagttntcactctaccattggcatggctccctatgaagctctgtatggtagaaagtgtaggacacctctatgttggctagagcccggagaagacctcaccttatgatctgaagtggtacaacaaaccaccgagaaggtaaagtgat

SEQ ID NO: 8578 - DNA, 311 bp, Glycine max
  unsure at all n locations
gcggaagtatatgtaaatcacacccctagatttgaanactcagacaagcctaatcatgnttttagaattaaaaaggctntatatggcttanagcaagcccctaaggcttggtatgagcattngagtaagttccttttagaaaaggatttctcaagaggcaaagtagatactactatnttcataaagagaanattacatgatanntttattggtcaacattatgttgatgaataatatttnggatctanctaatgaatatcgtgcaaggaattctctcatgacatgcanagtgagtttgaaatgtcaatgat

SEQ ID NO: 8579 - DNA, 328 bp, Glycine max
  unsure at all n locations
agtatccttgtggaaccttcacccgatgaagacactgacananacttatctntgccttcttggacaaagtatggcaggctgggggcaagtaatatttcttcccatcaaaccttggatgcaactgtgatcgtatacccatatcagctagatcttgatgggtattcaagccatccttcgtcttgccttgaatgttaaggagcgtcccaatcacactgtcacaaacatctttctncacatgcatatcatcgatacaatgtctaactgtgagatcacgccagtacggaagatcaaagaaaatggacctcttcttccatatgcaacgctgact

SEQ ID NO: 8580 - DNA, 364 bp, Glycine max
  unsure at all n locations
agaagctagagcttagctacacatacctctcttatatctatctcacctccttgagatgagaagctagaacttagctacacacccnctataatagctaagctcacccncatgacananaacatganaatacaaaaaaaaaaatccttactacaaagactactcaaaatgccccgaaatacaaggctaaaaccctatactactagaatggccaaaatacaaggcccaaacgaaggaaaaacctattctatatattacaaagataagcgtgctcatacttagcccatgggctcgaaatctaccctaaggctcatgagaaccctanggccttccctnggatctctagcccaatctacttggagtcttc

SEQ ID NO: 8581 - DNA, 171 bp, Glycine max
  unsure at all n locations
cactcggatgcgatcaggtgcataacatatcgagacgctcgaaattgaacaacagaagctctcgagaaattcanatggtcatatactttcacatggatatccgattctgtggtataatatatctagacggtctaaattgaacaactactcgatatattaaatggcataact

SEQ ID NO: 8582 - DNA, 302 bp, Glycine max
acttctttcttcgacttatattccttaaatttgtgtttagatcttaagaatgagtcttttattctctggtatatcacaaatgaattctgtatcttaattatattgtccacattctcgagatggacacatacagataccatggccactccatgtctgatcctggcagcacataccgtacacgtgatgagaattctggtgtaagacaggtgtattactataatcatagataaatgtcctatgtgttaattaatattgaggagtatactctatctctgttataatctcctgtccaatctgattat

SEQ ID NO: 8583 - DNA, 234 bp, Glycine max
  unsure at all n locations
ttgagcgtctcgatatattatgcngcctaatcggacctccgagtgaanagttatgaccatcttaataactcaagagcttccattgttcaatttcgagcgtctcgatatcttatgtgcctgaatctgacctccgtgtganaagttatgaccatctgaatntctcgagagctctcgttgntcaatttcgagcgtcttgatatcttatgcgcctgaatcggacctccgagtgaaaag

SEQ ID NO: 8584 - DNA, 409 bp, Glycine max
  unsure at all n locations
gctatgctganatatntacaatagaacccctcaacctcagtagcantatcnaccacagcagaacaattatgacctctccagcaacagatacaaccctggatagaggaatcaccctaacctcagatggtccagccctcagcaacaacaacagcagcctgctccttccttncaaaatgctgctggcccaagcagaccatacattcctccaccaatccaacaacagcaacaaccncagaaacagccaacagttgaggcccctccacnaaccttcctcgaagaacttgtgaggcaaatgactatgcagaacatgcagtttcagcaagagaccagagcctncattcagagaataaccaatcagatgggacaatnggctacccaattgaatcaacaacagtcccagaattctgac

SEQ ID NO: 8585 - DNA, 306 bp, Glycine max
  unsure at all n locations
gcgtctcgatatatgacgggatctaatcatacatccgagtnaaaagatatggtcgntngaataggctcagagcttctacattcaatttcgagcgtctcgatatgttactggactcaatcagacatccgagtaaaaagttattgctgtttgagttggctcacagcttcgacattcaatntcaagcgtctcgatatatgacgggactcaatcagacatccgagtaacaagatattgtcgtcttaattggctcagagcttcgacattcaatttcaagcgtctcgatatatgacgggactcaatcacaca

SEQ ID NO: 8586 - DNA, 397 bp, Glycine max
  unsure at all n locations
acatgatagagagactcatcttggataccaaccttgtgctacaacaattgcagcaagacccactatccataatgagagaataatctttggttaacaccttgcatcttgtatgaaagatgttttctctttgggtttgggttaggtcacaagaatgactcccaatgagccatctctccattagaagatcaccttcttcgtaggggcaaacctcttcaatatgctcatcacccttggcttcaccctcacttccacctgaggaaggagaagaagtagccttctcttgactactgtagatgtcttgatcccacatgatcatggttntctttgtagtggcattgagaaagaatgtggccttctccaatacattntaagcacttaatggtactagttctatctt

SEQ ID NO: 8587 - DNA, 463 bp, Glycine max
  unsure at all n locations
tttcttataattgttntttcccttattacatctgtcaagtgccaattaggaaagtttctatatataccaagtgtgctataaagatattttagtaactattatatatatattcctagaaaaaatgtcaaacaaacacatantttaattanttttaggcgtatgaaaaatatttttggctatttttaatagttaatcaaacacatttgtataatgatattttcatatcttattcccaaaaataatattcttgagaactaataacattttctgtganacanattcntccttanaattcttaatttataaaaactatntaaaaattaaattatatgtntatatcatgtatagtacgagtatttgacttataacaataatttcataaaaactgctgatatcttggagatttcctcatcacataataatatatttgaaacatatataatataatatctgattttatcca

SEQ ID NO: 8588 - DNA, 358 bp, Glycine max
  unsure at all n locations
tgctaactatgtatggcanaacttattactggtgtcaagacatacaagtgatctngtatanatcttctacactgggagtgatcacctgcagtcctcttgaacccttaccacccactctgtcatcatgccgagactcangaagcccaacaggtttagccttctctaagtattctgaacaaaattcaatggcttcttctgcaatgtacctctcaacaatagatgctcttggacgatatagattctntgtatacccntttaagatcttcatgtatggctcaaccgggtacatncaccgtagataaacaggaccacaacatttgatttctctgaccagatgcacaatcaagtgaatcatgat

SEQ ID NO: 8589 - DNA, 486 bp, Glycine max
  unsure at all n locations
tgcttatattcatcgntatcgcagcaattctgattattgntatgtacgctgtctgtcccctttctncaatttatagtttcttcccattttcttgtantagacctttgtggtcctttatgaccacccaacaataatagaatggacaatcaaagcagaaacgtaactattatatataaaaattctcttaaacaataattttcttattaaatataatgcaattattataaaaattattattatgtgtgtattcattacaattcccatcattggttagaanaataattngtannacatagnaaanatcaatatccanatgatgaaatcttagtttaatacattaatacttgtgctaatcattagtatactattgattatattataataataataagagtataaacactttaatttaaataaattgatgcgtcaatagaaaatactgttgaatgaacaaatcgatataagacttattaacataccttatat

SEQ ID NO: 8590 - DNA, 408 bp, Glycine max
  unsure at all n locations
gcgatctctgagtcacctgcggcatgcaagctngagaatatcaatgcgtcanagtcgctaaccaatcaccttngtttgaagatggagttgtatcaactcanaatggagatgggaggagatctccatgaccacatcaacaagttcaatcggctagtaagttaactgttgaatgtggatgataaattctctaatgaggagcnaagcgctcttgtgttggtctcactaccaaagtcttccaaagctttggttcanacgttgcttgtgggaagatcaactttgaatntggatgaagtgactgtcgctcttagagaanatgatgagaatngaaaatgtngatgatgaacacaatgcaatagctgtgatggaatctgagcgagggaggaatcattcaaggagacatgatggtct

SEQ ID NO: 8591 - DNA, 323 bp, Glycine max
  unsure at all n locations
atgtgacattcacttggggtgaaagataaagcaagcctttgctttgatcaaagaaaagctcaccaaggcacctgttctagctcttcctgactnttctaanactnttgatctacaatgtgatgcctctagagtgggtgtggaagctttattgntgcaaggtgggcaccctattgcttatnntagtgaanaaattcatgggtccaccctcaactaccccacctatgataaagatatttatgccttaataagagtcctccanacttgngaacattatcttgttncaanggaattgcattcatagtgatcatgaatacttaaataca

SEQ ID NO: 8592 - DNA, 251 bp, Glycine max
  unsure at all n locations
gtacctgtngcaaggggttgtggtttgtgctcctctgctgaccaccatacagacctttgcccttccatgcagcaacctggagcaattgagcagcctgaagcttatgctgcaaatatntacaatagacctactcaacctcagcagcaaaatcaaccacagcagaacaattatgacctctncagcaacagatacaaccctggatggaggaatcaccctaacctcagatggtccagcccttagcaacaacaaca

SEQ ID NO: 8593 - DNA, 305 bp, Glycine max
  unsure at all n locations
tgcattaccaaaatttcattntccctctaatctatataactccactntcaaccctgcaagaaaaatcttttgaatccatggcacccatagagacaagaattttcttaagctctggaatgtgataaacttcaatcaattntctaacaacaccatcatgcattctgatttgtatagaacccataccgataaacatacaaggagcttcgttacccatgaggacgttaccaccagacttcttctcacatgtcatanaccaatgcctgtgtcgacacatatggtaagaacaactngagtccaatacccat

SEQ ID NO: 8594 - DNA, 290 bp, Glycine max
ctcctctgctgactaccatacagacctccgcccttccatgcagcaacctgtagcaattgagcagcctgaagcttatgctgcacatatttacaatagacctactcaacctcagcagcataatcaaccacagcagaacaattatgacctctccagcaacagatacaaccctggatggaggaatcaccctaacctcagatggtccagccctcagcaacaacaacagcagcctgctccttccttgcaatatgatgctggcccaagcagaccatacattccttcaccaatcccac

SEQ ID NO: 8595 - DNA, 350 bp, Glycine max
  unsure at all n locations
tgtccggttaaagtctcacgattgtcacgtgttcatgctacaattgttagacgtggctatacgagacatcttgccaaacaaagtcaggttaacgataactcgcatgtgctttttcttccattctatatgtagcaaagtcattgatccagtcatgtttgatgagttggaaaatgaggccgcaattatactgtgccagttggagatgtattttccccctgctttctttgacatcatgattcacttgattgtgcatctggtcaaagaaatcaaatgttgtggtcctgtttatctacggtggatgtactcnggtgagcgatacatgaagatcttaaaagggtatacagagaatc

SEQ ID NO: 8596 - DNA, 414 bp, Glycine max
cccatttcctgaactcatgttttctggtggggttttttgtcttataagaatgaaagaggagttggtggtgcaagaagggtaccttttcaaaaaaagagacgaagctcacagtgctcaaaacatccctcttcttcaacagtgatggcttcgatgtctacgattgcaagggcaaactcatcttccgctttgactcctatggtccccccgcacgtgacaaggacgagcttgttctcatggatccccatgggcgatctcttttcaccctccgtcgaaaggtacaatttctttccctctcttttggtaacaaacccctattcagcatgaagagatcgtcgatcatcggaaagtctatgacgaccgtggccattgatgtgtacgatagccccattgtggaatacctctttgaaggtgctt

SEQ ID NO: 8597 - DNA, 448 bp, Glycine max
aaaacaatttttttttttgtttcccttagatatagatatggctatgtattggtacattattgttattgcaattacaatataaaatgctatggtagtaacgctgattatttgtgtcttttaactaacaactctagctgggaatgggtactgcattgtctacactttgtggacaagcatatggtgcaaaagaatatggcatgatgggagtgtatattcaaagatcatggatagttttgtccttaactgcactttgtcttcttcccctgttgatcttcgcaatcccaattttgactctcttagaccaggatgagaccatagcacaagtggcaggaaccatttccctttggacaattcctgtcttgatctcttttattggctcattcactacccagacattcctacaatctcaaagcaagaacattatcattgcattcttggcggctttttc

SEQ ID NO: 8598 - DNA, 456 bp, Glycine max
  unsure at all n locations
tcaagctgattctatttccaattatatcggagattgaacatttacttatgaaagcatctatttggtgcagcattccgttttctgttgatgacatatcgaaatcaatggagcagatagatatcgcagatatagagcccccgcctctaattcgtgaaaactctggctttagctttttgttgccacgcccagattgatagcttttggtgcagatttgatccaccggtattcttacccacctccatggtattaccaagtcacaacaagtcagtgcttgaaattgttgactttggttgtgtcaaaaacaagtcagtgtattaaacataccaaatttacatctcagtgatggatgacanaaggtagatagatcatcacgtcgtgcaagtagatttttgggctgacagtaaaagggagtaatattgttatatgggccttttctatgaagtttcactcattttt

SEQ ID NO: 8599 - DNA, 473 bp, Glycine max
  unsure at all n locations
ttactatgcaaggaataaacaaggaaaattccttcatctgtcttttcttaaattttcctaggttttctttaccattgtttaatacaaaacatttgcatccaaaaacatgaagatgtgaaatgttgagttttctaccattaaacagttcatatggagttttctttaaaatgggtcttattaaagccctattcatgatataacatgcaatattaatggctttagcccaaaaatattttggaagaggagtgtcattcaataaagttctagcaatctcttccaaagacctatttttcctttcaacaacacaattttgttgaggggttctaggtgcagaaaaattatgttcattgccaagttnttcacaaaataaattcaaatcttttattttcaaattcacccccatgatcacctctaatagatattaatttgagattttcctatttgaataacctttgcaagttcctaaatgcttg

SEQ ID NO: 8600 - DNA, 311 bp, Glycine max
  unsure at all n locations
ttgaggattttcaaacgacaataactttttactctgatgtcttantgtagtcccgaatatatcgagacgctcgaaattgaatgttgaagctctgaccaaatgcaaacgacgataactttttactcagacgtctgattgagtcctgtaatatatcgagacgcttgaaattgaaagttgaagctctcagcaaattcaaacgacaataacttttttactcagatgtttgattgagacccgcatattattgagacgatcgaaattgaatttggaagctctgagctaattcaaacgacaataactttttgctcgga

SEQ ID NO: 8601 - DNA, 396 bp, Glycine max
  unsure at all n locations
agcttggaacgataaagacattcatggtttctgtcngcaatnnggnatcgcgaaccacttgatccaatcagtggtgagaagattggaaaagtaaggccaattgcaccagaagactcgatcaatatagccggcctctcccaagtacctgacggtgtagcttcgtggcacgttgctgttagcaagtttacagattcgccgttgctttctgcagcattgccagtttgggattcttctaataaaagcattgaggcagttgtgggtgtcacaactgcactttacagtgtggtgcagctcatgaaagagctagttgagacgcatagtgggcacatgtatttgacctcccaaaaggttacttacttgcaacttccacanatgctcctttactattaaattcta

SEQ ID NO: 8602 - DNA, 459 bp, Glycine max
tgtcaaggagtgtgaaacaatgctggaccaccttttccctgtttttatcctgctccagtttccactgagacaactccccaagctgaaagttttgatccttcaacttcaaccactaccaagagtgatggtttggtgattccgaaggaattagctgagatcgagtacatggagagcctttatatgaagagtactgtatcagcctttgcatgttttgcaggaaaattagaagtggaagctcaacagttagcattgttcattgccaccggtgaagataagtggttcagataaaaaacatggaaaaaaatccttgtctggaacaagcaccaagtacctgctgggttacgtgctgataatgtagaggatagcttttcccatctattttcttctttaaatcgacgcctttgtttgcacccttaaatctacacgatgtagaagctaatgaaaaatgggttaatttat

SEQ ID NO: 8603 - DNA, 346 bp, Glycine max
tataatatatcgatacgctcgaaattaaacatcggattctgttgatattattcaaatggccataacttttcacacggatgtctgattcgatcgcataagatgtcgagaggctcgaaattggacaacagaagctcttgagaaattcaaatggtcataacttttcacacggatgttcgattcgggcgcataatatgtcgagacgctcaaaattaaacaacggaagctcttgaaaattcaaatgggcataacctttcacaccggtggtccaataaggcgcatcacatattgagacgcttgaaaatgaaccaccgaagctctttggaaattaaaatgggcctaacttttt

SEQ ID NO: 8604 - DNA, 432 bp, Glycine max
tctgcttatgagtgcacaactctttcaagaatttttcatatcttggaatttgctttattgcatccagcagaggtatgtttacctctacttttctaaatttttccaatatctccttctctgtctcttccatttttttgttggaaattgctcttggagggaatggaagagggatatgctacttctgtaaatcagaattaccagtggaagattcacctgcatagaacttgttaggtaactttttaaatttttgtcatcatctttttttggagtagagtgagattgggcaggttcatttgcggatgaagaagatgttgctggttgaggttcttgacactgctttcccaaccttaatgtaatggcactcacatttttgggattctggacagattgagaaagaatctgtcagaattctgcgactgttgttgattaact

SEQ ID NO: 8605 - DNA, 383 bp, Glycine max
  unsure at all n locations
agctttctggtgggacatcttgacttgcttcnctattctgacattcaccacagattctgccttcttctattttcagattgggaatgcctctaacagcacctttgtcaatgattttcttcatgcctcttaagtgcagatgtccaaatctttgatgccatattttgacttcatcttctttggagaatagacatgtggaggagtgactggattcttgaggtgtccataggtaacagttgtcctttgatctgctgcccttcattagaacttcactcttctcatttgtcaccaggcattctgactttgtgaagtttacattgaatccttcatcacacaactgactgatgctgatcaagttcgcagtcagtcccttcaccagcagtact

SEQ ID NO: 8606 - DNA, 389 bp, Glycine max
  unsure at all n locations
ttgaatgctctattcaatggagttgacaagaatatcttcagacttgatcaacacatgcacagnggccaaggatgcatgggagatcctgaaaaccactcatgaaggaacctccaaagtgaagatgtccagattgcaactattggccacaaaattcgaaaatctgaagatgaacgaggaagaatgtattcatgacttccacatgaacattcttgaaattgccaatgcttgcactgccttgggagagaggatgacagatgaaaagctggtgagaaagatcctcagatccttgcctaagagatttgacatgaaagtcactacaatagaggaggcccaagacatttgcaacttgagagtggatgaactcattggttccttcaaacctttgagct

SEQ ID NO: 8607 - DNA, 493 bp, Glycine max
  unsure at all n locations
ctacagcaaatgccactctactccaagtttttaaaggatatgtttatcaaggaaacacaagtatattcaccaggaaaatattgttgtggaaggaaattgtagtgatgtgattcaaaagatccttccacccaagcataaagaccctgggagtgtaaccattccttgttcaattggagaagtcattgtgcgaaaggctcttattgacctgngagccaatattaacttaatgccaatctccatgtgcagaaggttgggagagttggagatcatgcccactaggatgactntacagcttgttgaccgctccattaccagaccatatggagtaattgaagatatgttggtcaaagtaaaacattttatcttcccggaaaactttgtggtaatggctatctgtgaagatataacattcatgtaattttgggaagacccattcatgtaactgcaagctgcatagtggatatggggagaaagaagctggaactgggctttg

SEQ ID NO: 8608 - DNA, 423 bp, Glycine max
tcaagaataatggccttagcaaaaattttattcccagaagattatctctataaataggcctcctatttttaatggagagggttactactactggaaaatccgaatgcaaattttcattgaggcaatagacttaaacatttggtaagccatagaagttggaccttatgtacccaccatggtggctggtaatacaacaatagagaaacctagagaagagtggtctgaagaagaaagaagattagtgcagtacaatttaaaggctaaaaacatcattacttctgccctaggaatggatgaatattttagggtgtcaaattgtaagagtgctaaagatatgtgggacactctacaagttacacatgagggaacaactgatgtcaaaagatctaggataaatactctaactcatgagtatgaatattt

SEQ ID NO: 8609 - DNA, 467 bp, Glycine max
  unsure at all n locations
tgacattaatagtttgaatatatttattacctaaaaagttngttttttatttattacatttacttgacaaattataattttgtttattattatctaagatataccatttaccgaatttcaattttaaatgggtgactacaagttgtataaaattcaccatttccatcatcaaagatttcattttaaatcttgagtaatctttatgaatataaaattatgttttattacttatttacttcactttctagcttcaaagtatctatcagaaaaataatcaagccataaacaaataaacgaatcaagcccaagcttcatatattttaaccaactcaagttgaagttttaaatttgttcagtttaaataaacgagtgaagcttgagtaacccattttcttcacaaggcaaacctaaactttagctcagctaaacttgtttacaccagtgaatgcgggtggagaaaaatcatg

SEQ ID NO: 8610 - DNA, 590 bp, Glycine max
  unsure at all n locations
tgaactcttgcacctccttgaagttcaaccatgctttctttttactttggcttcataaaccttcttttgcccaccatcttttgcctccaaagtgatggtgtacaaggtaccagaaaccacttgctgttttgcacttactaccttttcaaactccaaaagggcattctgcataaccattaacaattcaataaaaataaaatagaagtcatatttaaattcccttaccacaaaatgaaaagataatagaaacccactagtgtttctataactacaaagaataaaaaattaacttcattattgaaattggcgccaccaacctatttattccttgacataatgaacatgcaaatntgtcgcaacaatcaattgattttttttggctaacaaaanattatggggaggagggaatggcccagtacacaacagaaaaaagcctctaggctcaaagaacatntatacanaaacttacatataccccactccanataaacaaatganggttcaaacctgcnnatctatagatgcaagattntgtcttactctactcaatgaatcctttgatgttccacaatcaatatattagtgcttaa

SEQ ID NO: 8611 - DNA, 353 bp, Glycine max
  unsure at all n locations
agcttagaagttaccttcattaaccaactttatgctgnatttgccncannnncgaagagcgcacaaccaaaaaatacagncttcccatgactattcatacccacaaaaatcccaaatggcatttcataagaattgaccttgtatggagtatcaaatacaacaacatcaccatatttttggtaccaatcagagcaggaagtatgagaccaaaaaatatgctctaaccttctctcttcataagtgtatatgcatcctgaaatttagagccacttttttttgcatccttacagaccttgaaaagaactttgcatcatttttttcaacttttttttttggtttcacaaaaagattac

SEQ ID NO: 8612 - DNA, 484 bp, Glycine max
tggagaaggtggatttggaactgtgtacaaggggctattggattattatgaggtagctgtgaagagagtctctaagaactcacgccaagggaagcaagaatttgtggcagaagtgacaacaattggaagccttcaccataggaatttggtgaaactcacaggttggtgctatgagaaaagagagcttctccttgtgtatgagttcatgcctaagggaagcctagacaagtacctctttggtgacaaaacttttggtaacaacacccttgaagaggggtgttcttcaacactgacttgggaaacaaggcacagtgtgattcatggcgtggctcaagcattagactatctccacaatgggtgtgagaagagggttcttcacagagacatcaaggccagcaacataatgttggactcagactacaatgccaagttgggagactttgggatgtgcagaaccattcagcagagaaatgaaacacaccac

SEQ ID NO: 8613 - DNA, 446 bp, Glycine max
  unsure at all n locations
acctaatcacaacctcatctatgaaggttttttttatttttcaggaccaattactttatttcaagggtcgtctattcaatacctgatcatagcttcaagtctagaaacattaacaagggtttatgtgaaatctatgtctttctggtgggtaaaagccttgagctactaacatagctttgntccttactaccttatcttgttcatccaatttatntctaaatgcccatcttgttcccaagatgctnttgttctcaggcttgggaacaagcatcttgacatcatttccagtgaactagtggagttcttcttccattgcaataatccaaatattatatgtgattatttcatttatcatcttaaggtctatttcaaacatgaaagcataagacataagatcttaaaatgatgatctggntttgactccttcagtctgatcttaataatct

SEQ ID NO: 8614 - DNA, 603 bp, Glycine max
  unsure at all n locations
agccttcaccttcaattggctgtttaattantttaatgctatgnnnaatnngaacatattgactaatattttacgatgtataagaataaggcttactgtattatatatattccaagtaaacaaacaagtaaaataacacacatgtcattgcaatgttcgtgatgataaaggttttctttttaaattttgttctgattttaatttctattagatattcaagtgtgttactaggatatgttggcgtttggtgccaaactgtgcactttctctctctctcgctatatttcttttaaattctaaaatttagtaatttcacttaaattttcatggatttgagaaattaatttttgcctctagtagtttaaaaagaattaagaaaagatttcactcactttttcaacaaaaattggcaaatagtttgacttccaaaaaggaaagaaagtgtaaaaaattaaaacattagactttaaacttgtgccatacacattggttgggctaaaacaaagtttcaaatagaaccttttccctgacaaacaaatgggaccctttttttaactaataaaaatttaataaaatttttcatattttatttaaaattatttt

SEQ ID NO: 8615 - DNA, 507 bp, Glycine max
  unsure at all n locations
tgtgctattccaagttcattaatcatacctttaagctagatttcttccttcactccttcagctagggccatgtactctgcttcagttgttgctctatcaaaaactgattgttgatttgttttccaattgattgctgtaccaaacaaagtaaacacatatcctgttaaagatttccttgtgtttacatttcctgcaaaatctgcatctacatagcctgtgattgctgcctcatgtgttgtcttcttgtaccttaatccaactttcaaagatccatttagataccttagtgtccacttcacagcttcctagtgtgcactgccaggatctcccatgaatctgcttataatacttacaacatgagccaagtcaggtctgctgcaaaccattccatacattatgcttccaacaccactggcatatnggtgttgatccattttagacctttcttcagcttgtttttgtgcttgaataacagatagttttgtatgatgaccaagtggtgtgcta

SEQ ID NO: 8616 - DNA, 330 bp, Glycine max
  unsure at all n locations
agcttccacctatgtcagggagctctttttatcaccgccgnagttaagaaatggcggcaatacttgttaggccactctttcatcatattgacggatcacaagagtttgaaggagctaatgaattaggctgttcanactccagaacagcataaatatctcgcacgattactgngttttgattatgtaatccagtatcgagcagggaagagcaatatcgttgcagacgcattgtcccggtcaacacctgcctcattattcattatctcagtccctcacttcgtcttcctcgacgagctgcgaagggagttgcaggcaaatccagcgttcatg

SEQ ID NO: 8617 - DNA, 593 bp, Glycine max
gaaacacccatttggttccaattggcttgtgagaggcagattgaaggactaaatcccactcttcattccttttaaactgatttagttctttatgcatagccaacaagcaatgttcgtcatgcaatgcttcatctatgtttctaggttcaatttgaggaacaaattccatgttattgcataaaattctaagtctagatcaagtggatactctcttagatatttcacctatgatgttgtccaaggggaggtctcattgagttcctcattcctttgggaggtctttatgaggtgtggttgtgatttccttattttgttcaagatccttaaccttggtttcatcttcaagtgcaatgttcttatcctgaagacctatatcttcatcttccaaagcattttctttgaatagagagttatgttcatcacacacaacatgtatagattcttccacacataatgttcttctattaaacgctctatataccaccttgccttccaatgaataaccaagacaaaatgcctcatcagcttttgatcaaaatttcctagagattcttttccattgtttaaaacaaagcatttacattccaaaagcc

SEQ ID NO: 8618 - DNA, 551 bp, Glycine max
tgtgtcgcactttcaactgccgaggctgaatatataattgtttgaagtttatgtactcaaagtctttggatgacgcaacaacttaaagactttggagttatcctcaatcacattcctcttaaatgtgacaacacaagtgctattaatctaacgaagaacccaattatgcattctagaaccaagcacacagaaattaggcatcatttcctaagagatcatgtgtctaaaggtgactgttgcattgagttcattgatagtgaacatcaattagtagacatcattgatagtgaactaggcatattcgatgcatctagcatagaatgacatcttatttgcataagggtatgtttcactttgtcattcatatcattagtctttgtttggtatgtgttttagcttagtgattcatgtgcattcttagtttggttgaatatcacatgtttttcttagtcattttgtaatttcttgctggtataattgattacctggtcatttcaatcgaatactatatgatttctggttggtaagttgttcaaaactttttgttttaa

SEQ ID NO: 8619 - DNA, 452 bp, Glycine max
agcttagcagattatcagcatctttgttattgaaatttccttgttggggctcagtccaataccacttcaactcattttcaaacacagcccagttaaaatgcttcacaacgaagttaacaaagtcctcattgtcaatgttcattctactgatgcatgttccaattgggaaatcattctgtgtttgtataacttttaccgaggtgttagcatagctgccagagtccagtccagagaatttcaggataacatcacgtttacgaatctgcagtgcagcaagtacgtataaattaaaatatatataaaaataatgcaaatcatctcatattctatcaatgaaaaatggatcatgtaatattaagaataggcacagaagtcttgaacatacttaacttcatgcaacattatttactggcatgaaaaatttgttttgtcacaaaaaaaaatatgccttt

SEQ ID NO: 8620 - DNA, 404 bp, Glycine max
agctttgagcaaattgaaatgacaataactttatacacggatgtctggttgagtcccgtaatatatcgagacgctccaaattgaaaacggaaactcttaaaaaattcaaacgacaataactttttactcggatgcccgacaaagtgtcgtcatttatcgagggatgctccaaattgaaaacggaagctcgtatcaaattcaaatgacaataactttttactcggatgtctgattgagtcccgtaatatatcgagacgctcaaaatttagatccgaagttctgagaaaattgaattgacaataactttatacacggatgtcaaggtggagtctgtaatatatcgagacgatgcaaatttgaaaacggaagctcggaagaaaattcaaaagaaaataactttttac

SEQ ID NO: 8621 - DNA, 384 bp, Glycine max
agcttcatgcttaactatgtatggcaaattttcattactattggtcaagacatacaagtgagcttgtaacaaatcttctatacttggagtgatcacctgcagtcctcttgaacccttaccacccactctgtcatcatgccgaaactcaggaagcccaacaggtttagccttctctaagtattctgaacaaaattcaatggcttcttctgcaatgtacctctcaacaatagatgcttctggacgatatagattctttgtatacccttttaagatcttcatgtattgctcaaccgggtacatccaccgtagataaacagaaccacaacatttgatttctctgaccagatgcacaatcaagtgaatcatgatgtcaaaaaaataggg

SEQ ID NO: 8622 - DNA, 384 bp, Glycine max
agcttcttagtctcagatgatgcagctgagtttgtatctacctcatgcactcctctaatgactatggcatcatttctggcgctaaactgctgagagttggaattcatcttctcaattaaatttctagcttcagcaggagtcatgtctccaagggctccaccactggcagcatctatcatacttctctccatattactgagtccttcataaaaatattggagaagaagctgctctgaaatctgatggtgagggcaactggcgcataattttttaaatcgctcccagtactcatacaggctctctccactgagttgtctaatacctgaaaaatccttcatgatggctggggtcctggaagcagggaaaaattttttctaaaaatac

SEQ ID NO: 8623 - DNA, 521 bp, Glycine max
  unsure at all n locations
tctcgttctatatnntaatntnatatttcttcactgtattctaatatggtattcatttntctggtactcttagacataaatatgagttgtgagttttctgttatttatatttttaactacttcaatgattaatttatcagacactntataattaataatagttgttcaattattagcttcangacttcagttactaattagttgtatcgaacatantcctaaatgctaatattgtctgtactaggaatgctagcaacatttctttaacnatatctgtgtaattgatggannattntaaattaagaaagaatcataaatgaggagaatgacccatcaaaatagatatttctctataatacatntaatcaatacgaacaagagaagtttganagatgaaaagagtcataatccaatataatacttatttaaagtacatatatctcatctactaataatgtgatgttaatttaattcttaaataatgtcatcctatatattaaaatggtactagtatacattag

SEQ ID NO: 8624 - DNA, 377 bp, Glycine max
  unsure at all n locations
agcttatctctcaattggtgacccaagataacattttttttatctaaccccccatctattggtgagattaaaaatgtagttttcattatgagtagctctagttcccctatccctgatggtttcagaggccacttctaccacaggtactaggaaattatctcaaaggttgtctataattttgtccttcaacttttttcaaaagaattggcttctccttggatttaaatcaaacattttttgcctttattcctaaatttccataagaggatagaatagagaacttcagacccactgctctgggtaatttccaatttaagattatctctaaaatcgtcacaagtagattggcctanattactcctaagctgattttaata

SEQ ID NO: 8625 - DNA, 328 bp, Glycine max
agcttgcctccatcgcgcgaggggaattatcgtatcaccctcttgccatccacagctgcggtgaacgtacgtccataccggtaccctcattttcagaaggctaaaatcgaaaaaaaattgcagaattgctctccgcgggcttcatacggccaagcacgagtccatactcgtctctggtccttttggtgaagaagaaggatggaacctggcacctatgtgtcgattacaggtccctcaacgccgttacagtctgagataggttcccgatacccactatcgacaaactattggaccagctgggtcacgcttcttggttcactaaactcaa

SEQ ID NO: 8626 - DNA, 493 bp, Glycine max
gcttgaggccttggatcttcttcatttatgaaatcatttgcttcttgaagatcatggaagtggaatggagaaggaagaaagatgattggagacgccacttcaaggagaagataagtgtagaagctcaccaccataggaagccatagataagagcttgaaggttgcagaagatgaattgatggagagggagacaaggagcatgaaattttgtgcctcaaaagaggtttgaactttgaggtttaattctcaaatgatcaaagttgaaaaaatgcacacacatgacctctatttatagcgtaagtgtcaaacaaaattagaggggaatttgaatttctattcaaatttcacttgaatttgaaattgaatttgtggagccaaaatttcactaattatgattagtggaatttagctatggttcaacccactaatccaagatcaagtccaagaatcttcactaagtgtgcttaagtgttatgaagcatgtaaaacatga

SEQ ID NO: 8627 - DNA, 308 bp, Glycine max
agcttgaatcggacctcagtgtgaaaagttatgaccattttaatttcctaagagcttccgctgttcattatcgagtgtctctatatgtgatgcgtcttaatctaacatccgcgggaaaagttatgaccatttgaatttctcaagagcttccgttgttcaattccgagcctctcgacatattatgcgcctgaatcggacatccgtgtgaaaaggtatggccatttgaatttgtcaagagcttccgatgtttaatggcgagcgtatcaatatattataaccctgaatcggatatccgtgggaaaagcttt

SEQ ID NO: 8628 - DNA, 271 bp, Glycine max
  unsure at all n locations
ctcagctggccatgaatcatatatcagcacctgttgcaagagtctgtggtctaagttcttctgtagatcaccatacagatctatgtccttctntgcagcaacctggagtcaatgagtaacctgaagcttatgctgcanacatttataatagacctncttagcagcaaaaccaatagcagcagaataattatgacctttcaagagacagatacaatccatgttggaggaatcatccaaatccgagatggacangttctccacaacaacaaca

SEQ ID NO: 8629 - DNA, 419 bp, Glycine max
  unsure at all n locations
agcttgtaatggtccttgttgtagagcacatgttttatatcaccgtanaatggatgaatgtcgtcaagccgggggaactcgtcgattatggtggagagcttgtcgtgaaaattctgctgagtatacttcactttgcgcatgtagaattggcgcagccgtgaaatcgcatatcctttgtgcacaacggttggtgtctgacgctgggtgcgagagaggataatgtcgaccacatgcttcccatttggcaccacggtaatcttcttaaaattgtactgaaccatcgtgctctatcaaccttgttgccacagaaaattaagaaaaagggactataagagtaaaacatgataaagtccgcggagctacataatttgagatcccaattgaaagctgagagaaaataaaaagcgattatgtgaatg

SEQ ID NO: 8630 - DNA, 657 bp, Glycine max
agcttgtgactctttgagcaaattgatttaacaagcaatttattgtttctttattaaagctagacaatgaaagacacgtgggtgatcatgaccattttaattagagtgggaaggagggtgtttaaaaccattctaaacaactaaaactaaaaatataaaataatcattttttaattgttctttaattaaattttcagtttctatatattattaaatcagaatccagccacactaaaccaaacccttattatatttgtaatattgatttgtaatacttatgtagtagtagtgttttaaactttttataatagtagcttatatgtaattttatgtgttgaacgtttaagttatattaaagaaaaaatgatttatttgggttttatcttatttttttttgggttatcttcattctttatctattaaaaagcttaaattaattatttattctatttttatattaagtttagtcctttacctttaaaaaatttattttggctaattaatttgtgtttctttcaaatttttcgctatttccctctacttcaattttaacaatttttttaatgattaacaatatcaatcttaaatcagccacccaaatatccaaattctacccaaaattatttaaatctaagaaccttaaggggttgcttttgt

SEQ ID NO: 8631 - DNA, 415 bp, Glycine max
agcttgaaggtaaactagaagccttggtttacctgggaacccaactggccatgaataaaaaatctggccctgtcgccaaactctggggttatgctcctctaccgatcaccacacagacctttttccttctatgcaacaatctaaagccattgaacaacctgaagcttatgctgcgaacatctacaacagaccttctcaacctcagcagcaaaatcagccacaacaaaataattatgacctctccagcaacatgtacaatcccggatggaggaatcatcccaaccttagatggtcgaatccttcacaacagcaggcaacaacaacaacaaccttattttcaaaatgctgctggcccaacaaaccatacgttccttcaccaatccaacagcaacagccccagaaacaacaaacaatt

SEQ ID NO: 8632 - DNA, 295 bp, Glycine max
tatcaatacatttgtagaggtcatccaccacttcattatcactgtcaatgtttggattggtgtaaaagaactttggatttagataataacccgctgcatgcaaagggtggtgaagttggcaatcccatcttttatcaatgattgcaaggatatccttatacttcccttcattgttattgaaagctctttgaattgcttctttggccctatccattgcttcataaatgaaacccattgcaggtttttttttcattatccaccaaccttaacacacttacaagaggccccatttgat

SEQ ID NO: 8633 - DNA, 284 bp, Glycine max
agcttcctccttgtgcagtttcccgggctcagacgtatcactttccgaaggttaaagatgccgacattgtatgcagactagaaaaaatttgcgccgaagaaggtcttgaatttgaacaggatgctttggacttcattgctgcgaaatcctgtggttctgttagggatgcagaaatgatgcttgatcagatgagcttgcttggaaaaaagatcaatatttctttagcttatgagctggtaagactagtgcttttgtaccatacatgtatatactccaaactacag

SEQ ID NO: 8634 - DNA, 295 bp, Glycine max
tactaacccatggaagctcctaatatctcctatactatcaggggggggccattcttggatgaccttgattttttaagggtccacttggaccccatttctaccaactacaaatcctaagaaaactatattatctacacaaaaaggtacaacttctctatattggcataaagagtgtttttcctaagaactgaaagaacttgccttagatgtcctaagtggtcatctaggctcctactatacactaaaatatcatcaaaataaacaactacaaatttacctatgaaatcccttaaga

SEQ ID NO: 8635 - DNA, 286 bp, Glycine max
gcgagctgattgtcgttcgaatttgctcttagcatttgtcttcaaattcgagcgtctcgacatattacgggactcaatcagacatccgagtaaaaaagtgattgtcgtttgaatttgctcatagcttcaacattcaattttgagccgttttgatatattacgatactcaatccgacatccgagtaaaaagttattggcgtttgaatttgcttaaagcttcggcattcaagtccgaccctctcgatatactacgggactcaatcagacatccgagtaaaaagttatt

SEQ ID NO: 8636 - DNA, 284 bp, Glycine max
agctttgagctttattcatatgacaataactttttactcggatgtctaattcagtcccgtaatatatcgagacgcttcaaattgattatcgaagctctgaggaaattcgaacgacaataactgtttactcggatgtctgattgagtcccgtaatatataaaaaggcttggaattgaataccgaagctctgagcaaatttaaacgataataactttatactcagatgtctgattcagtcccgcaatatatcgagatgctcggaaatgaatgccgaagctctgagc

SEQ ID NO: 8637 - DNA, 284 bp, Glycine max
agcttttggattgatcattaagtgctttatgaatcctcccgtgcttatgccaccagtgcctggaaggcctctcattttgtacatgacaatcttggacgagtcaatggggtgtatgctggggcaacatgacgaatccgggaagaaatagcgcgttgtttactacctaagtaagaagttcacgacctgtgagatgattactccttgctcgaaagaacgtgttgtgctttagtatgggcatcccatcgcctaaggcagtacatgctgagccatactacctggttgat

SEQ ID NO: 8638 - DNA, 284 bp, Glycine max
agcttgaaggttaactatatgccttggttaacttggtaacccagctggccttgaatcataaatctgtacttgttgcaagagtctatggtttattctcctctgctgaccaccatacaatcctttgcccttctatgcagcaacctggagcaattgagcagcctaaagcttatgttgcaaacatttacaatagacctcctcaacctcagcagaaaatcaaccacaacagaacaattatgacctctccagcaacatatacaatcccggatggaggaatcatcctaatc

SEQ ID NO: 8639 - DNA, 284 bp, Glycine max
agcttgacacattccttttataatgtaacaacacaagtgctatcaatttgtctaaaaaccatgtcatgcattctaaaaccaaacatatagagataagacatcattttcttagagatcatatatcaaagggtgattgttgcattgagtttattggtagtgaacatcaactagctgacatctttactaaacctctagccaaagataggttcttcttcattaggaatgaactgggtatcttagatggatctagtattgaatgatgttatgcttagaacatgtagctt

SEQ ID NO: 8640 - DNA, 287 bp, Glycine max
agcttgcataataagaattttcttggtatagccataatctggacagcattatagccaagccttttaattcgaggcaatacatcatctctaaaattgacatatgtgttgatttttggctcctgcaccacatggttcacaaaattgttaatagtagaagtagaaaaagaactgatactatacataggaactttcttgaacatcatagatttaatctctaatactaaacaaaatattctattattcaaattcaattaacattgactgtacaaatgagaccaatgccttca

SEQ ID NO: 8641 - DNA, 317 bp, Glycine max
ctatccaatactcaagcttgaaggcaaactggatgcattggttattttggttacccagtttgccttgaatcacaaatctgtacctgtcgcaagggtttgtggtttgtgctcctctgctgaccaccatacacacctttgcccttccatgcagcaacctggaacgattgagcagcctgaatcttatgctgcaaatatttacaatataccttctcaaccttaacatataaatctaccacagcataacaattatgacctttccatcgacagatacaaccctggatggaggaatcaccctaacctcagatgggacatccctg

SEQ ID NO: 8642 - DNA, 300 bp, Glycine max
tgtagggttaaagtctcacgattgtcatttgctcatgcaacaattgttagccgtggctatacgagacatcttgctaaacaaagtcaagttagccataactcgcctgtgctttttcttccatgctatatgtagcaaagtcattgatcctgtcaagtttgatgagttggaaaatgaggctgttggatcgaatggcctcagaataattaagaagggggggtgaattaattattcctaaaccattactaattaaaaatttctcttctaaggattttactaaattgttaagagaatgaggggtag

SEQ ID NO: 8643 - DNA, 284 bp, Glycine max
agcttctcatgctcaacctcattagttttattggttaaatcaacactcttttgctcctcttcaatggaagcaaccctcaaaggggcactcactttcagcccccaattcctctccctgaggttgcacctcaaaggttgaaacttatgacctgccactaccttgtttgtgtccaaaaattcaacccttgacgtgctggacaaagcacccccaattctatgtctaggaattactggaacaagaggcttcaaaccacattctgataatatccaagttgccattggact

SEQ ID NO: 8644 - DNA, 289 bp, Glycine max
agctttaagcaaattcatttgacatttacttttgactcggatgtccgattgagtcatttaataattcttgacgctagaaattgaatacagaagctctcaccaaatttaaatgacaataactttttactcagaagtctgattgtgtcccgtaatatatctagatgctcaaaattgaaaacagaagctctgagcaaattcaaacgacaatagcttttgactcggatatccgattgagtcatttaataattcgagacgctcaaaattgaatacagaagctctaagcaaattc

SEQ ID NO: 8645 - DNA, 254 bp, Glycine max
tctcgatatattatgcgcctttttcggacttccgtgtgacaagtcatgaccatctgaatttcttgacaccatccgttgtttaatttcgagcgtctcgatatgttatgcgcctgaatcggaaggccgtgtgacaagttatgaccattttgaggatctcgagagcttccgttgatcaattcccagcttctcgatatattatgcgcctgaatcagacttgcgtgtgacaagttatgacctttggaaattctcgagag

SEQ ID NO: 8646 - DNA, 282 bp, Glycine max
agcttctcgatttattatttgcctatttgggactttcgtttgaaaagttatgaccatttgaatttgtccagagctttggttgtccaatttcgagcgtctcggtatattatgcacctgaatcggacatccgtgtgacaagttatgaccattggaatttctcgagagcattcgttgttcaatttggagcttctcgatctattatgcgtctgaatcggactttcgtgtgacaagttatgaacatttgaatttctcgagaccatacgttgttcaatttcgagcgtc

SEQ ID NO: 8647 - DNA, 288 bp, Glycine max
  unsure at all n locations
agcttgtgggatnnngtttagtgtttttgccggagatgttgatgatagaaaaagtactaccggatttgtattttttatgggtgattgtgtttttacatggagttctaagaagcaaggcattgtgacactttctacttgtgaagccgagtatgtagctgcaacttcttgcacatgtcatgccatttggctaagaagattgttggaggaacttcagttgttgcaaaaggaaagcacaaagatctatgttgataatagatctgcacaagagcttgccaagaatccggtgtt

SEQ ID NO: 8648 - DNA, 291 bp, Glycine max
agcttctaaactttgtacaagaatgtatctctgataccacttgttagacaagtggcctcagatatcttaagaacggggggttgaattaagatattccaaactgtttcccctaattaaaaatctatttcactttttactcaagttatgaattcccttaatgacaatcttcttaaatattaattcaaatgaagcaacttgaatatgaatataaagcaataataaataaaggagattaagggaagagaaaatgcaaactcagttttatactggtttggccacacccttgtgcct

SEQ ID NO: 8649 - DNA, 295 bp, Glycine max
tggatttccttttaggagggtatctattcttcctaagaaggagccaaacccagtcaccctcattaagaactagctcttttctccctctattacctttagttgaatacacctttgtttggttctctatttggttcttaaccctctcatgcaacttctttacaaactctgacctagattccccttctttatgtataaaagaagtgtcccgtgggaaggtaatgaggtctaacggtgttaggggattgaacccatagacaacctcaaacggggactacttggtggttctatgaactcc

SEQ ID NO: 8650 - DNA, 293 bp, Glycine max
ttatacaagttttctacaatcacaatttccaaatgcaatgcagttcacagaatgtgtttcttccccatttagtaatatgtcaagtgaaatcattcacaatgaaatgaatcattttcagtttattctaatatatctggaaatgcaatgttgaacatacagactttatagatgctaatggatgttgacatgtgtttatttcaatttcaaagttcccagataagttcaaactatacagcctcaagctaaccaaacaaataaaaaattgcttaccagttgtacgaccacttgcatac

SEQ ID NO: 8651 - DNA, 301 bp, Glycine max
tccattttcaattacaagcgtctagatttattattggacacaatcggacatccgagtaaatagttattggcattagaatttactacgagcttctgttttcaataacgagcgtctcgatatactacgagacacaatcggacatccaagtaaaaagttattcctgtttgaatttgctacaagcttccattttcaatttcaagcgtctagatatattacgggacacaatcggacatccgagtaaaaagttattgacgataaaattttctaagagcttatgtattcaatctcgagcgccacgata

SEQ ID NO: 8652 - DNA, 274 bp, Glycine max
ttgagcaaatttaaacgacaattactttttactcggatgtatgattgagtcccgtaatatatcgagacgctcgacagtgaattttgaagatctgagcaaattcaaacgataataacgttttactcggatgtctgattgaggcccgtaatatatcgagacgctcgaaattgaatgttgaagctctgagcaaattcaaacgacaataactttttacccggatgtctgactgagtcctgtaatataacgagacgctcaaagttgaatgttgaagctc

SEQ ID NO: 8653 - DNA, 284 bp, Glycine max
agcttcaacatttaacttctagcgtctcgttatattatatgactcaattagacatccgagtaaaaagttattgtcgtttgaatttgctcagagcttcaacattcaatttcgagcgtctcgatatatgacgggactcaatcaggcatccgagtaaaaagttattgtcgtttgaattggctcaaagcttcaacattcaatgtcgagcgtctcgatatgttacgggactcaatcacacatccgagtaaaaagttattgtcgtttgaattggctcagagcttcaacat

SEQ ID NO: 8654 - DNA, 294 bp, Glycine max
ttgggaagaagcagcaacagggctactttgaagatggtggtcttccaaaagatgtgccaaaagggcactttgcagtgtatgttggtgaaaacaggacaagatacattgtcccaatttcatggttggctcatacacaatttcgaagcttgctccaaagagctgaggaggagtttggcttcaatcatgacatgggccttacaatcccatgtgatgaagttgtttttgagtttcttacctcaatgattagatgagaattaagggaaagttgatagaagtacacttattggcattttg

SEQ ID NO: 8655 - DNA, 324 bp, Glycine max
agcttgcatgatttacattctccccctttctcaagcttattcttatattttcttgacatcatcaaaatcttcatcatcaataatcttaagaaggataggcttaaaatacagaagaagccacaacaatcaatttaacaatgttctttaaacatgcaagacacaattgattgcaaaaaattaaataagataagggaagagaagaatgcaacacagttttatactggttcggccacatcccgtgcctacgtccagtactcaagcaacccacttgagatttccactatctttgtaaaatccattacaaagtctgaaccacacagggac

SEQ ID NO: 8656 - DNA, 497 bp, Glycine max
  unsure at all n locations
tgggtacaattctctcatcctatcctccaactcccatgtataatcaccctcatcggttccccaccgcaccttcaccaacgcgatctcctttcctctcaacgacttcattcttcggtcagtgatcttctgaggttgtgctttataagtgaggttatccttcacctgtacctcgtcctctgcaagaatatgtgatggatccgggttgtaccgtctcagttgagagacatggaacacagggtgcaaattcgataaactcggaggtaaggcgatatgataagctacaggcccaatcttcttcaaaatctgatatagacctagatacttgggtgtcaacttcctagccttgagagctcttccgaccccggttatgggagaaaccttcaaaaacacatgctccccttcctggaaatctagtggcttcctccttctatcataatagctcttctgcctatcctgagatgnctttatcttctctcgaatcaacttcacttgttcgt

SEQ ID NO: 8657 - DNA, 324 bp, Glycine max
agctttcacatggatgtccgattcggggacataatatatcgagattctcgaaatcgaacaacggaagctctcgataaattcgaatgggcataacatttcactcggatgtccgattcggggacataatatatcgagacactcgaaattgaacaacggaagctctcatgatattcgaatgctcataacatttcacacggatgtccgattcggggacataactcatctagacgctcgaaattgaacaacggaagctctcgagaaattcgaatggtcataagatttcacacgaatgttcgattcggggacataatatatcgatacgct

SEQ ID NO: 8658 - DNA, 352 bp, Glycine max
tatagtcattacttgttaagaaccataatctagagtctattgttcctttgataaagtgaagaatttgttttgcagccttgaaatgagtagtggttagagtctcgatgtattggctgatgagtactccagtagcatatataatgtttggtcttgtgtgtcaaatatcataaactacccaccaaactcttgaaatctatagcatccagttttcttgcttcgtcgaactttgataacttcattttgcactccatcagtgttccaattggcttgcatctatccatcttgaatttattaagcatcttctttgcgtagctttgcagtgaaatgaagatttcatcttctttctgcttta

SEQ ID NO: 8659 - DNA, 480 bp, Glycine max
  unsure at all n locations
tcagatttgtgtttaagtagaaataaccatgngaatcttgagcagtcatctaccaatgtaagggaagatctctgcccctcatatgtagggtgggcatagggaccccatatatcacattagagtaaatcaaaaggtaaataagataaattgttagagttaggaaaggataatcttctaagtttagcaagtggaaaaatagaacaattagaagaaaagaaattaggagagaattgtaaactaattttattattcaaatgattgaaaactttgtcttatatatgaccaaacctagaatgccaaatatgagcatttttacaaagagtggaatttacgtgtgaattcataacagaaaaagtaaatttgcaatcatgagtgtccttgaggtctaggacataaacgccttagatgagataccctttaccaatcctcttgcaagcttgcttctcttgaatatcaaattcattttgggaaaaaatggac

SEQ ID NO: 8660 - DNA, 484 bp, Glycine max
tctaatctggatttcttggattttgagaagtatctttttcaattaagattgtcaaataatagacagaaaaggttgtgttatcaactgaatataaagaagtcagttaaaatgaaaaaggttgttcagtagaatatgaaactaactgcgccataattcttaaataatataatattgagacttgagagaattcccagtgtggagaacgtataatggcttaatataaataaggttaagatgataacccaaattttgagaagtatgccagtggttcatcacgagcaggaccagcataaacaagtgaaccctctgttagcaagatgatgtcatcaaatttactatacactgaacctcttggctgatgtatcgaacaaattacagtatgaccatcttgtgcaagttgtttgagagtttccatgactttctcagcctggaaggcatcaagttcttggaaacacagaaaacaactttcatgacaaaaatatgt

SEQ ID NO: 8661 - DNA, 178 bp, Glycine max
agcttagaaggaacctatccaggtttgtaacggtcttttttgcagtgagagcagagaatccatagtgagcattgactttcagtatccattccactgcctcacgacgaagctgagaaagacaagagtccaaaagcgcattattgttattattattgctatcattgctattatcatcact

SEQ ID NO: 8662 - DNA, 401 bp, Glycine max
ctaagcttatggaacaagtgagaggtgggagagcaaaatttgactcctaaagatttgttttcactgcaggtgcaactgcagccaacgaactcttaaccttcatcctcgctaacccaggagatgctttactcgttccaaccccttactatcctgggtaagtaattaacaacaagctctttcatttaattagaaatactaactgacactttcaatattgattggaatttatcggaaatcaccattttttttagattctggtgctcctcatctaataattctcacttcttatatatattaaatgagaaatgaaatctattagaattgatttttaataaatcataaaaagtgtgagagagaaagtgtcatcttcatttactttatagtaaaaataaaatgacatt

SEQ ID NO: 8663 - DNA, 321 bp, Glycine max
  unsure at all n locations
agcttgcatccggtgcttgttgtcagggtgaagntttctatcctttttatcctgcncnnancttganttcccatttgcaccgtaccaaagtcaccgctttggtaggatgagaagaaacttccatgtgcagtaacatggaaggaggcaccagaattgacaatccaagaactatcatcacaagcaatgtttaggatattaccttcaccaacgagacataacaaatcttcttttgaaactatgacaggaggattcttctcttcttgcttctttgatgggttgacttggtctggcttaacgttactggccttttgatctctcttg

SEQ ID NO: 8664 - DNA, 517 bp, Glycine max
  unsure at all n locations
ttgactctttctttgtagagttttgaagattcataagttgtcagttttagttcttccaactccaacagttgaatattcctgtgttccctggatgccttctcatcaaaattcagaaattttaaagcccaatatgctttgtgttccatttcaactggtaaatgacatgattttccatacaccagttgaaaaggagataagccaattggggtcttgtatgaagttctgtaagcccacagtgcatcttccaatttggttgaccaatcttttctagttgacgccactgttttctctaatatcttctttaattntctattggacactttggcttgcccattagtttgagggtgatagggggatgccaccttatgattcacatgatattgactcaacaccttttgaagctgagcattacaaaaatgtgaaccaccgtcactgatcaagatccgaggcaccccanattgagcaaaaatattcttctttataaaaattaccacagtcttagcatcatttcttggag

SEQ ID NO: 8665 - DNA, 662 bp, Glycine max
  unsure at all n locations
ctcagcttatcattttttgaaggattggagaatttatatngtcgnattttttaaanacnnnngatttatattaaaataattaacgatatctttattttgatatcatatattttttccttataatgattttaaaataaaataatagaggagtgtatactatatatatatataacataacaactttagggatgtgttgatgattgaggttcgtcggaaaaccatgaatactaataatgacgtgttgtctctgaatctaagcatcatgaatcattaatccccaccgtcccggccccgagggctgaattggatccacataacacattcatttcccaccgtccgaaaagtgtgagacgattccctgaaataatgataaattaatcttataaataatttgataaattagtatggtagataatttagttattgaatataaaaaaaatatgataaattagtcttgtagataatttagtaataaattggtcactaaatattacaaattaataacaaattgatcataaaaaatataatatattatctaattgatcattaaatattacttttctctgatctcaaatttaagattaaaaaattgacacactagaaagtagtttatcatgttaattggcttaaatttagttaaaaatatttttgtctcaactact

SEQ ID NO: 8666 - DNA, 422 bp, Glycine max
  unsure at all n locations
tgacaagaaagcagaacctggaatttntttgtgtatatctcaacttcaaaggcctacagaatctacctaccatagagcaacaaagtaatcatcagcagggatgtcaaatttctggagtcagatagttgggactggaaaaatgataagaggtccgagtttcaggaggagaatgaagatgttgatgaagaacccataagaggaaccagatcactttcagacatctgccaaaggtgtaatgttgctgtgatggagcctgacggatatgaagaagctacagctgatcagaaatggataaatgcaatgaaagaggagcttacaatgattgaaaaaaataaaacatgggagctggtggacagacctaaccacaagaaagcgattggtgtcaagtgggtttatagaaccaagctcaatccggatggttc

SEQ ID NO: 8667 - DNA, 428 bp, Glycine max
  unsure at all n locations
tttgtagtcctctttgatcaaaggttcatttataacatttctcaggccataatagggatgatagaaatagatctaaaccaaacagtctccctaatttatatttcacctaattacactatgaatcttagtgatttcatacaaaacataaacctagaagtccaaacaataggttttggaagaaactttgagggacataatttatacttggatattaacttcattggtagaataagtgatcaaatatcccctagatacaggataaacactaatccattagtgacaaccttatcatctgatggaatccaatttttgccacccaaaatatttgattcctccagaaaccaaaacaatcaatggcaaacacatattgaggctggatcctctaggagtgcaataaccactcccgggatcactatnnatacaaacaa

SEQ ID NO: 8668 - DNA, 380 bp, Glycine max
actcagcttgagaaaactacgacaattttttaactcggattctaatcgagccctgtaatatatcgagacgctcgtaattgaaaacggaagctctaagaaaagtcaaacgacaataacttttaactcggatgtctgatcgagccctataatatatcaagacgctctaaattgaaaacggaagctctaagaaaagtcaaacgacaataacttttaactcggatgtcctattgagccctgtaatatatcgagacgctcgaaattgaaaacggaagctctaagaaaagtcaaacgacaataacttttaactcggatgtccgatcgagccctgtaatatatcgagacgctcgtaattgaaaccgaagctctagaaaagtcaaacg

SEQ ID NO: 8669 - DNA, 290 bp, Glycine max
agcttcaggtttcaatttcgtgcgtctcgatatacttctggacacaatcggacacccgagttaaaagttattgtcgtttgaatttgatcagtgtttttggtttcaatttcgagcgtctcgatattttacgcggctctatccgacatccgagttaaaagttattgtcggtagatttttctaagggctttccttttcaattccgagcgtcttgatatattaacggacacaatcggacacccgagttaaaacttattgtcgtttgaattttcttagagcttgtgttttcaatt

SEQ ID NO: 8670 - DNA, 322 bp, Glycine max
  unsure at all n locations
agcttgccgccacggagttnttcgactatgctcttgtgtggtggttctagctacaaaaggagagagcaagaaatgaagagccaatggttgatacatggacggagatgaaaaagatcatgaggaagcggtatgtgccggctagttactcaagggacttgaaattcaagctccaaaaactaacccaaggcaacaagggggttgaggagtatttcaaggaaatggatgtgctcatgattcaagaaaagattgaagaagatgaggaggtaactatggctcgatttcttaatggtttgactaatgatatccgtgatattgttgagct

SEQ ID NO: 8671 - DNA, 323 bp, Glycine max
agctttactagtgaggtcgtgcttatttttaaaccttttgctaaatctcgataggtgatcctttgtgataaaggaagctgacaaaattcatcatcatttaattgaacactcttcactccacaattttttttcctatgagacacatcacctatcttgattctttgcctccaaatgcattcaatcacactaatggaaactgaatatgttgaagcaactaattctttggtattttctttcaatttcctattagaattgtgctaatataggaaattagctatggccatacggtcttcattgcttaaaaacttatgttgaccatttat

SEQ ID NO: 8672 - DNA, 357 bp, Glycine max
tcggtattctatttcgagcgttccgatatttttgggtttcaataagacatccgagtaaaaagttattgtcgtttgaatttgctcagagctttggtattccatttcgagcttctcgatatattacgagactcaatcggacatccgagtaaaaatttattgtcgtttgaatttgcttaaagcttcaacattcaattacgagcgtgcggatatattacggtactcaatcagacatccgagtaaaaagttattggcgtttgaattggctcagagcttcgggagtccatttcgagcttctcgatatattacgggactcaatcagacatccgagtaaaaaggtattgtcgtttgaatttgctc

SEQ ID NO: 8673 - DNA, 473 bp, Glycine max
  unsure at all n locations
tgatccttgaatcttgattcttgattcttgttatcattttttcttttgaatcntgaagggttcttgattctatcttgaacatcttgaactcattctttcttgattctatcttgaacatcttgaactcattctttgattaacctttgagctttttgtcatcacctttgttatcatcaaaacatctttgaatcaatattgattcatcatgaagctttgcttctacacatgaccctccagttagctgatcgctccatcgcaagaccatatggagtgattgaagatgttttggtgaaggtgaaacaccttatattcccagctgattttgttgtgatagacatagaagaggacactgatattcctctcattcttggtcgcccattcatgtctactgcaagctgtgtagtaaatatgggaaagaaagatgtgcaaatgggcatagaagatcaggaaatcagctttgatttatttcatga

SEQ ID NO: 8674 - DNA, 317 bp, Glycine max
agcttagagtagaactcatcatcccaattatgttaacaccatgagaactaaaaaccagcctaagtatgattaaagaaacagaaaaaacaatcacagaggacataaagataaaacagtcaagaaaaacataaattggataaatcaaaatttattattatgatataatatacatacaacaatttataaataatttttgtgtgtatttttctctatatcattatgacatgtaataaataatgtgtagaagagaagtagacacaaaataactattgtatgaatattattgagcaaataatatttctttcaaaattatatat

SEQ ID NO: 8675 - DNA, 405 bp, Glycine max
  unsure at all n locations
tgtcctatgaaacatttatgctttacaatttgttaactttgatattatcaaattgtgaatttcttattcagttgccacgaccgataggaaatctggttaatttacgccacctggacatcagttacactaattttccagagatggcaacacaaatctgtagactacaatatcttcgtactttgacagtttttattgttggcaaacaagatggattaagtatcagagatttaagaaaatttccttatttgttgggcaagctttccattctgaacctgcaaaatgttgtcaatcctgtggatgcatttcgggccaacttanagaacaaagagcaaattgaggagcttatgctggagtggggaagcaatccacaagatccacagatcgaaaaaaatgtacttaacaact

SEQ ID NO: 8676 - DNA, 312 bp, Glycine max
agcttccgcttgaggggaaggctacgatgtgtaatatactcacactggagggggagatgtgttgagtacaagtgtgaggtaaagtcccacatcgggtaaaagtggaaaggttgagcaccatataagtgaggagaagacccataaacatgagccttaaggttttgggttagagtgtggtgtcaggcctccttatgtggtggctcgtggtccagaggtgtacccctcgaatctccccaacatcagagccatatgaatcatgtccaaagtattgggcgatggtgacacctattcttgtagcacaaacacaacaag

SEQ ID NO: 8677 - DNA, 507 bp, Glycine max
  unsure at all n locations
ttggagtttccaagtgccaattcgncgtcttctttagttcagtcttcctctggcttcaattcttcagtgggctttccttctgtgtccagcatcttgggatgttcccagcctttgatgacagctttccaggttctgctatccagtgatttgaggaaggccaccattcttgctttccaatattcatagttgcttccatcaagaattggtggtctgttcactggtccgccttctttctccatgttcatcagaatttatctccctagatctcactctgtgatttcgagtgttggctctgataccaattgaaattctgataccaggggacagatgtcgtaccggatgtcacgacatcacgcttcagaacatgcagattatatgtgtccgtatgaacagattaaacaagtaaataacacaagagaattgtttacccagttcggtgcaacctcacctacatcttggggctaccaagcccaggaggaaatccactctcaatagtgttagttcaag

SEQ ID NO: 8678 - DNA, 314 bp, Glycine max
agcttagatgtcttttctaacttttaagtgattattttttataacaaagcattgcaaaaattattacctcacatggagctacatgccctgatacattcaggatttctgatctcttggaatttaaagacgaccagtgtataattgagtaactcgaaacaagatatgcatcatgctttgatgttgcccaaaccaagtttcttaactgcaaatgaaaaaatagaggtataacattaattttagttaactcattgatcatggcatactctgaatttttagaaggtaatagtaggataatttaattctattatatgcaa

SEQ ID NO: 8679 - DNA, 507 bp, Glycine max
  unsure at all n locations
tcaagctttctccactaagtttcctaatgccggaaatggcnntattgatggctttggtcttagatgcagggaagaatttctccaagaacaccctcttaaggtcatcccagctaaaaatggacctgggagcaaggtagtagagccaatcttttgccactccctccagagaatgaggaaaagcctttagaaagatatgatcttcttggacatcagggggcttcatggtggaacaaacaatatggaactctttaatatgcttatgaggatcttcacctgcaagaccatgaaacttgggcagcaaatgtattagtccagtcttgagaacatatggaacaccctcaccaggatattgaatgcacaagctttcataagtgaaatcatgtgcaaccatctccctaagagtcctctcacgaagtggaggttgagccatgttctcactatgaaaattagtagtgaaatgctcaaaaacagaatattcagaacacccttcacagaatgctcaaaatg

SEQ ID NO: 8680 - DNA, 325 bp, Glycine max
agcttaacagtttttttttttccttagtgcaaacttttcaaaatttttatcaaaataatcttcaaatgattcatattttagtgtattttaaatttttttgaatttttatctacatatgaattagttatcaaataattttttattaatgcaaaatttgataaatatgatatgcatgaaaggaactttcaatctaatatgaattttaaaataaaattattcaattaaaagttattaaaagttattaaatgatgtaatatttaatgcattacattcatgtcatttgatctctcctatatatttattaatttttatatattaataagat

SEQ ID NO: 8681 - DNA, 325 bp, Glycine max
  unsure at all n locations
agctntacaacaaatgccactttactccaagttntatattgatatgttaacaaggacacacaagtatattcaccaggaaaacattgttgtggaaggaaattgtagtgttgtgattcaaaagatccttccacccaagcataaagaccctgggagtgtaaccattccttgttcaattggagaagtcactatggaaaggcacttattgatctgggagctagtattaccataatgccactctccatgtgcagaaggttgggagagttggagatcatgcccactaggatgactttacaacttgttgaccgctctattaccagaccatatg

SEQ ID NO: 8682 - DNA, 471 bp, Glycine max
tgaaggcaaactggatgcattggttaacttgtaacctatctggccttgaatcagaaatttgtacctgtcgcaagggtttgtggtttgtgctcctctgctgaccaccatacagacctttgcccttccatgcagcaacctggagcaattgaacagcctgaagcttatgctgcaaatatttacaatagacctcctcaacctcagcagcaaaatcaaccacagcagaacaattatgacctttccagcaacagatacaaccctggatggaggaatcaccctaacctcagatggtccagccctcagcaacaacaacagcagcctgctccttccttccaaaatgctgctggcccaagcagaccatacattcctccaccaatccaacaacagcaacaaccctagaaacagccaacagttgaggcccctccacaaccttccctcgaagaacttgtgaggcaaatgactatgcagaacatg

SEQ ID NO: 8683 - DNA, 499 bp, Glycine max
tctaagctttcgtgttaatttcgagcgtctcatataattgcttttgaatcgacctccggggaaaagttatgaccatttgaatttctcgagagctttcattgttcaatttcgagtgtctcgatatattatgcgcttgaatcgaacctccatgtgaaaagataagaccatttgaatttctcgagagcttccgttgttcaatttcatacgtctcgatatattatgcgcctaaatctgacttccgagtgaaatgttatgacagtttgaatttctcgagagctttcgttgatcaatttctagcgcctcgaatattatgcgcccgaatcggacctccgagtgaaaagttatgaccatttgaatttctcgagagctatgcttggtcaatttcgagcgcctcgatatatcatgcgcctgaattggacctccatgtgaaaagtatgaccatttgaatttctcgagaactttcagttgtccaatttcaagcgcccaatatattatgcgc

SEQ ID NO: 8684 - DNA, 593 bp, Glycine max
tcaagatgaatcaagattgattcaaagatttttgatgtttacaaagatgatgacaaaaagcaaagctcaaaagtcaagaacacttcatgataacaaagatgatgatctcaagaatcaaagaatgagttcaagattgaatcaagaacacttcaaggttcaagaggaaatttgatttcaagaatcaagtttcaagattcaagttccaagaatcaagatcaagattcaagactaaagattcaagaatcaagagaagactcaatcaagataagtattaaaaagtttttttaaaaaactgagtggcacatgaatttttctcaaaaaccttttaccaaagagtttttactctctggtaatcgattaccagattattgtaatcgattaccaatagcaaaatgtttttcaaaaagctttcaactgaatatacaacgttccaattgatttcaaaatgttgtaatcgattacaatgatttggtaatcgattaccagtatgtttgaacgttggaatttcaaattagatgtgaagagtcacatcctttcacaaaaagctttgtgtaatcgattacactgatttggtaatctattaccagtgatag

SEQ ID NO: 8685 - DNA, 314 bp, Glycine max
agcttggtccccaacgctctcttcaatctctcccaaaatctagaggtaaacctaggatctctattagatactatgctagatggcacaccatgtaatctgacaatcccacttatatacagggagctcaacttctccaaggaaaatatgatattaatggcaatgaagtgagtagacttagtcagtctatcaacaataacccagatagaatctaaacctctaggggttctaggtagtcctaccacaaaatccatggaaatactatccctcttccactagggtatctctaagggttgtaacttccctgaaggtctctg

SEQ ID NO: 8686 - DNA, 320 bp, Glycine max
agcttgacaagcacccaatcgcccttctgaaagttgacttcgtgtctattgctatccgtgaagtgcttcataaattgttgtgccttaataattttcttcccaaggcttctaaatatttcttcgtgattgactaggaaatcaactgcttcgatgttggatgttccagccaaatactgtggcatattgggtggtttcttgctaaaagtggcttcatatagtgaaatccagttccaacgtgcactgaagtattataagaccatccggtccacatcaagaaatagccccatgtcgatggatgatgatggacaaaatcctcaagt

SEQ ID NO: 8687 - DNA, 549 bp, Glycine max
taactgttttgttaaatgacatatctaatctaaatcatttttgtgataacaagatttgtcttaaaccagttcaatcatatgcatcaaagtataaaaactttcataaaacaaaaaaatggttttgtggatgaaaagctggaaataacattctgagtacaacattatgacaaaaaacattcttagtattgcatttgcataacataaactgagattttcataataacaatattctgataaatttttttatttaaataatgaacatcaaaacataagaaaatgtgcattgacattaggttctcataatcatatcaaacatttcataatgagttttgtgactaaccaagtagagagtttagttatctaagtgtttgaacctctatgttaagactttttgcataccaaaataatcttgagtaaaagttcaaaaaaggtaaagtttcaagaaaggttaacaaagtcacaataacccctcattcttgtgatgttttaatcacttcaaccataaccaccaccagtgtcgtcgcaaccaccaccaccaacaacaccaca

SEQ ID NO: 8688 - DNA, 438 bp, Glycine max
tctaaactttatgcaagaatgaagctctaataccactttgttgaaaagtggcctcagttatcttaagaagggagggttgaattaagatacaaaaattattccccaattaaaaatttcactctctctttttggattaacaatgcatccttaatatgaattactcaaaagacaatcctaaataaacttctttaaagcaaaagatgaatagcaataaataaaagaagtttaagggaagagagaatgcaaactcagtttttatactggtttggccacgccctgtgcctacgtccagttcctaagcaacccgcttgagatttcgactatcttgtaaaatgccttttacaaagtctgaaccacacaaggacaatccttcccttgtgtcaaaaatccttacatcttaagagaccctcagtatcttaaccaaaatttcttttgaat

SEQ ID NO: 8689 - DNA, 447 bp, Glycine max
cggagatgatggtacagcgggtgaaccacaagcggaagtttcgtttggtgagggagccatggaaaaacagagcgtttggaatgatttcgtaaatctcagaaaactattgggaaatgctggtgaaaacacgaatgccaagcagatataaatttgaatgaagaatgtagaggggcgtgtgaagcaacggtcgaatttgctttgtggtgaacgtgctattaatgttaagtgattcgtttgggcacgttcagattgcagtagctgctataattcctctagcagacaaatgcccagcttgcccctcaatttttcaaactgatttgcatccaaagcctttgtgaaaatatctgctatttgttcctcagtgtcaacatgcttcagtgtgatcactttatcatcaacaagatctctgatatagcgatgtctaatgtcaatgtgcttggttctgct

SEQ ID NO: 8690 - DNA, 586 bp, Glycine max
  unsure at all n locations
ttgatatcgaaataagattgaatgtgaaagtgggtatttttagaacattgtgtaaggctatgttgggcgagagctgaattgttcctgaatgagtggcatgaacatattggccggtcggaagttttactgtgattgggttgattcgtctatgggagtgaaggttatgcaaggagctagtcacatgatctgtagcccctgaatctagtatccaggaggtggaaagcgcactggtagaaggtgacatacctaggtttattggagtattgacggtgcatgaagaaattgatgcaacctgtttgggttgattgggtgtcgtgttctcggcggatggctcctggattaaggcgagtagtgccttgtactgctcaggggagaagcgaacgaactcatgggactcatgatgctgagctngatcatcagtggctttgctttctactgtcactacgttgttcatggtggtcctttcatcgtaaggcttgtatcccggcgggtacccatgtttccgatagcagacatccactgtatgtcctaacttgccgagtgggtgcacgtttttccttccttgttactctaatttttccattgg

SEQ ID NO: 8691 - DNA, 240 bp, Glycine max
tgccaacccatggaagctcctaatatctaccacactttttggggcgggccatccttggatggactcgagcttctcagggtccacttggaccccatttctaccaactacaaactctaagaaaactatattatctacacacaaagtacacttatctatatttgcatagaaggagattttcctaaagactgaaagagctagcctgagatgtacctaaggatcatctaggctcctactgtacac

SEQ ID NO: 8692 - DNA, 325 bp, Glycine max
agcttaacaaaaggcatgcgaagtgggtggaattcctatagcaatttccttatgttatcaaacataaaaagggaaaaagtaatattgtagccgatgctctttctcggcgtcatgcattactttctatgcttgaaaaaaaattgattggtcttgaatgtttgaaaagcatgtatgaaaatgatgaaacttttggaaaaatttttaaaaattgggaaaaaatttcagaaaatggtttctttagacattaaggctttcttttcaaagaaaacaaattgggggtgcctaaatgttctactaaaaatttgcttgtttgtgaagcacatga

SEQ ID NO: 8693 - DNA, 508 bp, Glycine max
tgaaatgctacaaaaaatggccaaatgcccaaggagttttacaacttgctaacttttatttaaatgataactgataggcttgtaagtaggggcaaattattcctagattattacattttcaattggcttctacatataatgcaactcatgtttttggtagttttggagcattggtagtattgttatgaatatatgatattctatattagttgttaaatctaatttcgatttctcatatttgtgtgtatttataggttaattcatttattgtctattttgctattcatcaacttgcttttgtatttgacttgtttatgtaaataggtacggacttagagctcttaactttgagtatgcttcagtgtgtctacaaggtagatcattaaattaacctcttgttatgaacttatgatattctatattaaattgtaaatctaaatacggtttctcgtatttgagtgtatttataagttaattcatttattggctattttctattcatcaactt

SEQ ID NO: 8694 - DNA, 313 bp, Glycine max
tgccaacccatggaagctcctaatatctcccacactttatggggcgggccattctcggatgggctcgatcttctcacggtccacttggaccccatttctaccaactacaaactctaagaaaactatattatctacacacaaagtacactttctctatatttgcatagaggagcgtgtttctaaagactgaaagaacttgcctgagatgtcctaagtgatcatctaggctcctactgtacactacaatatcatcaaaataaacaactaccaatccacctatgaaatcccttaagacatgatgcataagcctcat

SEQ ID NO: 8695 - DNA, 314 bp, Glycine max
agctttgagaaatttctaacaacaataactttttactcggatgtccgaataagtctcgtaatatattgagacgcttgaaattgaaaacaaaagctctcagcaaattcaaacgacaataaccttttactcagatgtccgattgtgtcccgtaatatatcgagatgctcgaaattcagaatagaagctctgagcaaaatcaaacgacaataacgttttactcggatgtccgaatgagtctcgtaatatattgagacgctcataattgataacagaagctctgagaaaattctaacgacaataaccttttacgcaga

SEQ ID NO: 8696 - DNA, 649 bp, Glycine max
  unsure at all n locations
tcctttccaaagactcgtaagggaaatcgctcaggacttcaataccaatctctacttccacagcagcgccgtctccactctccaagaagccgtagaggcctacctcgttgtgctcttcgaggacaccaacctctgcaccattcacccaaaagagttaccattatgccaaaggactgaggcctaccttgttgggctcttgtttattttcattgaatattgaaattttaatttttaaataaatatttaaaaatgaaaatttgaattttattgaaattgaatcactttgtccaaataagaaaattaaaatacaagaatttgaattacctcatccaaacaaaatatttacaaaaggaaaggaattaaaatcaaggcaatcaaaatgttatgaatttaaatttcttagaaatttttaaattcctcatccaaacacatggttagggtcatttntgtagagggaaaagaaatataatgnaaacaaattaagataaattcttaaattaaagtacaacgtaaaagtgtgaatatcacatcattataggatttatttaggtttttttggtccgtttctttgcattgaccgatgttatgagaaagagagaaaatnaanatatatatatatatatatatatatatatatatatatatatat

SEQ ID NO: 8697 - DNA, 574 bp, Glycine max
  unsure at all n locations
tttaagatgtgctcatttgtgtaaacattttctatattttggtagtagntcatgctcacgtaaccacaagctgcaataatgtgtgaacatggatagtgaagcgcagaataccttctgcattgacaatgatgaccatttaagttaactgcccacttttgtccgccgcgttgcgttatagggttgaaggtctcctctacttcaaaccttgtggagtggatatcatacacgcaaatgatgtgcgtacaagcttgttcttgatttttcctaagttctttaacaagcttcgaacaatatacttgtccttcatttaaaagtctttgggcttggtggccacgctcaacaaaatactttcgacacctacagtatattgatttgaccaatgttgttatgggaatgttgcgacaatcctttaaaaccttattgatacattctgagaggttggttgtcatgtggccatatcgacgtccttctctatcataagccatcgtccatttttcttttgaaatgcgatcaatccatgttgctatgggttgactcaattgacgaaatttgtctaaatttgatcaaaatgtgc

SEQ ID NO: 8698 - DNA, 316 bp, Glycine max
  unsure at all n locations
tctgacattcaccacatattctttcttcttctatnttcagatagggaatgcctctaacagcacctttgtcaatgatattcttcatgcctcttaagtgcagatgtccaaatctatgatgccatattctgacttcatcttccttggatgatagacatgtggaggagtcactggtctcaagaagtgtccatatggaacagatgccctttgatctgctgcccttgattggaacttcactctcttcatttgtaccaagcattctgaccttgngaagtatacattgaatccttcatcacacaactgactgatgctgatctat

SEQ ID NO: 8699 - DNA, 349 bp, Glycine max
agcttaataaatctatatatggtttaaaacatgactcccgtcagtggtaccttaagtttcatgggataatttcttcatttggttttgatgaaaatcccatggatcaatgcatataccacaaggttagtgagagtaaaatatgttttcttgttttatatgcaaatgatattttaattacatgaggtgaaacaatttctttttaagaattttgacatgaaggatatgggtgatgcatcttatgtcatcggcattaagattcatagagatagacctcgaggtattttaggtctatcacaggaaacctatattaacaaaattttgagagattttggatgaaagattatctacc

SEQ ID NO: 8700 - DNA, 265 bp, Glycine max
agcttcgtccatgtcgccagtcaactggcttttgtggtcaatactccaagttagcaaaaaggttctacgacccatttcaaattgttcaaaggatcggacctgtagcatataaacttgacttaccttcaacctctagaatccaccctgtcttgcattggtccttactcaagccttatcactctttactgaccacaacagaaacacccatccccttgcccaatgctgatgaagatttctaacccttcctccacccctctcactgtat

SEQ ID NO: 8701 - DNA, 255 bp, Glycine max
atacagaatacagatcccttctgcataatgggcaagaaccatgtctgaagagccacttatctatgcaagggaggtgaaacatgtgatggcaatgaggcaaacttcttactgtctctccaagcataaagtcctatatattgcacaaatgcacaaatttcatatatcacaatacacaatcttagaaaacatatagttcaagggatacacatctagtggtattgacgatgtaaagtgtaaaactaacctgcagcaaac

SEQ ID NO: 8702 - DNA, 314 bp, Glycine max
  unsure at all n locations
agcttcaaaccacaacaacacaaattctaggtatcccaaacccctcaatttgatggattttcatggtttgagaagtgaaattgagaatgaggtaaatttgaagcaaactctcacctcacacaagtctataagtactaacgtaacaactcaaacgatatgtatgcacaaaacaaaagtcaatcaaaacgaaacaaacgttagcccctcagttaaacaaaaataaaatgatatgtaacagataaaagaggaaacataanaagagaatatggatctagggatctcccaatcatgtggctccgcatgccacccggact

SEQ ID NO: 8703 - DNA, 320 bp, Glycine max
  unsure at all n locations
ttggagttcaaaagactctgtacatttctcttggcaaaaaatgaaacatgatgttatcaagtntntttctaattgcattgtgtgtcataaggcaaagttcaaagtcatgcatcatggtttgcatactccattgtcaattcctacctccccttggacctacatttccatagattntgtgcttgctcttccaaggtccaagagggacaaggattccgatttcttggttgtgataagtttccaagatggcacacttcattccatgtcataaggtggatgatgnctgtcatgtagcggatctgttcttcacagaagtaatgtgt

SEQ ID NO: 8704 - DNA, 221 bp, Glycine max
agcttctatttataggttcactcctattttctctacaattgcatcacctttcaatgagctggtgaagaagaatgtggcatttacctggggtgaaaaacaagatcaagcctttgctttgctcaaagaaaagcttactaaggcacctgttctagctcttcctgacttttctaaaacttttgagctagaatgtgatgcccctggagtgggagttggaacttgat

SEQ ID NO: 8705 - DNA, 274 bp, Glycine max
  unsure at all n locations
tgtgcttcaatgttcaattntgagcatctcgatatattatgcacctgaatcgggcatctgagtgaaaagttatgtcatatgagttagccgagagcttcgttgttcgatttcgagcgtctcgacatattattggcctgaatcggacatccgagtcacaagttatggcgggttaaactctccatgtgcttccatgtgtaattttgagcatctcgatatattatgcaccttaatcggacatctgagtgagaagatatgccatatgagatagccgaga

SEQ ID NO: 8706 - DNA, 293 bp, Glycine max
ttgatctaccaccaccgccgccaccattatctttgttttctattattattagtactttgatttctagctgtgtatttggctatattattatgaaatttgaacaatttagtatttcttttatttgcatggtgtgattgaaaaattatgaattatgtcatatgactatgtggtttttatatatttgatctattcatgtttcttgcttcatgattggtttatactctttaatgaatgtcttgtgtatgattagtagtgtatgtatgtttttttcttgttacgcactttggcttttt

SEQ ID NO: 8707 - DNA, 465 bp, Glycine max
gttatcaaacataaaaagggaaaaggtaatattgtagccgatgctctttctcggcgtcatgccttactttctatgcttgaaacaaaattgattggtcttgaatgtttgaaaagcatgtatgaaaatgatgaaacttttggagaaatttttaaaaattgtgaaaatttttcagaaaatggtttctttagacatgaaggctttcttttcaaagaaaacaaattgtgtgtgcctaaatgttctactagaaatttgcttttttgtgaagcacatgaaggaggtttaatggggcattttggggtccaaaagactctagaaacattacaagaacatttttattggcctcatatgaaaaaggatgtgcagagattttgtgaacattgcattgtatgtaaaaaggcaaagtctaaggtaaagcctcatggatcgtatactccattgacaattccggagtatccttggattgat

SEQ ID NO: 8708 - DNA, 286 bp, Glycine max
tcaacatcagaccacttccagggtgctggaactacttcacatggacttgatggggcccatgcatgttgaaagccttggaggaaagaggtctgcctatgttgttagggatgatttctccagatttacctgcgtcaactttttcagagagaaatcagacacctttgaagtattcaaagagttgagtctaagacttcaaagagaaaaagactgtgtcatcaagataattacgagtgaccatggcggagagtttgaaaacagcaagtttactgaattgtgcacatctgaa

SEQ ID NO: 8709 - DNA, 448 bp, Glycine max
tcgattaccaatagcaaagtttgttttcaaaaagctttcaaactgaatttacaacgttccaattattttcaaaatggtgcaatcgattacaagattttggtaatcaattaccagtgtgtttgaacgttgaaatgcaaattcaattgtgaagagtcacatcctttcacaaaaatgctttgtgtaatcgattacaattgaaattctgatactggggacagatgtcgtacaggatgtcacgacatcacgcttcagaacatgcagattgtctttgactgtatgaacaaattaagcaagtaaataacacaagagaattgtaacccagttcggtgcaacctcacctacatctgggggctaccaagccagggaggaaatccactaaaatagtgttagttcaaggtctaacagccactgtttacaaccttctcacctaaccactacccgtgcaatc

SEQ ID NO: 8710 - DNA, 399 bp, Glycine max
caccctcaagcgggacgtcgtcgcgccgcacgccggtggagatgttacccgccttctgggagtccaccagattcaaggtctttggaggcagcgttagggtttgcttttcccgcctaagagtcgagaaattggcgctctggggccgccgcgccacgaagggggacgagtggcgggggatcgataacctttttctgggaatggggatggaatctgtcgtgggtttctgtttgaagggagggtcaatgttgtccccaggggctctggggtttattgttggaaattggtaatgttgtgttggataaatattgattgtggtttattttggatcaatgagtgcatgattatgaaatgctgatgtttgattcagtctatacagtgccttgtgtatatacatttaac

SEQ ID NO: 8711 - DNA, 283 bp, Glycine max
taattggagcttggatgcctatgatcttcttcatcaatggattcctttgcttctaggaagattaatggcagcggtgtggatattggaacagagagaggagacgccgcttaagggataacatgagtctagaagaagcttaccaccataggaggccatggataaaagcttggatgacgatggatatgaatgaacggagagggatataacagcccgaccttttgtgctctaaaggcgctctgagatctgacatttaatcttcaaatgatcatagcttagacaattg

SEQ ID NO: 8712 - DNA, 294 bp, Glycine max
tgctggcctcaggcgctgtggcaagagttgtctccttctttggacgaattatcttcgcccagacttgaagagagggctcctcacagaggcagaggagcaacttgttattgatctccatgcccgtcttggcaacaggttttttgttcttcgcaagcttagctacatgcattgccttctttttgtgaacaattctttcatgaacacagtttttataagtatgaaaaactgattttttttgttatttattattttagtacatcttggacttgtaagtgtccgtgcctgctgtagacc

SEQ ID NO: 8713 - DNA, 458 bp, Glycine max
  unsure at all n locations
gggagagataactgaccaaatcttttcatggctattcttccagaagaacgctcccctgatgtagtttcgtttatagcttggaccatctcatttttgctgacatatccatccttgttcttgtctaagaatacaaatgtatcaaccaaagtctcaaatgtgccctccagctttggcatcccaattcgtgatttctagggaagtcatggaaaaaaattcgaagatgtagcaaaacatggaaattcaaggtttattgttatcaatgcaagcatgatgaaattctaggctgccctgaagaaatgcatgaaatgtccataaaataaaataaaaaaggaatgaacatatagaatngaattgttcataaagtacaaacatcttctgaatatagaaatgatggcgcataagctgcaaaagacagaatccgattcaatctcaaaagtaatgttacaacccaactaatc

SEQ ID NO: 8714 - DNA, 290 bp, Glycine max
tgcatacaagattctccttgtctggctcttcataaccttctggttgggtcatatagatgtcttcctctaaatccgcatgcaagaatgcagttttaacatctaactgctccaagtgaagattctctgcagctactatgctcagaataactctgatggtagtcatctttacaaatggagagaagatctctgtgaaatcaattccttgtttctgctgaaaccctttcaccacaagtctcgccttgtatcttcttctaccgttagattcttcctttaacctatagacccaccta

SEQ ID NO: 8715 - DNA, 362 bp, Glycine max
aacacagcagctttcggtgaaccaaccccataatacacagaaatcactaactaatactagagctccctctactcttacagatggagatgccccatcatgctcaacttcaccatctactaataactgccagatatctccgaatctgatgaaaagaaatcaacaagtatcagccacattaggaggaccttcggtagttgaacccaccaatcatctgatgcaggagcttcatagcaagtctgagatgcagatcaaacatgaattgcccagtgtaagaggaactgatcagctgaagttcacagggactgttgctgatcagatggaagcttcttctggaacatcttactgtattgatcctaataata

SEQ ID NO: 8716 - DNA, 297 bp, Glycine max
ttgactacccttcagatacaatactttcaggcatgaagttgggattgaacctcagaactggtattgaatggagaatgacatcttggaagaatcccaatgatccatccccaggagacttttattggggtcttttgctttataattatcctgagttttatctgatgatgggaacagaaaagtttgtgagagttggaccatggaatggcctgcatttcagtggcataccagatcaaaagcctaacccgatttatgctttcaactacatatccaacaaggatgagaagtactacacttata

SEQ ID NO: 8717 - DNA, 295 bp, Glycine max
tctacttatgttaaagaattggccgctatcactgccgccgtgaagaaatggagacaatacctccttggccatcactttacaattcttacagaccatcgaagcctcaaggagttaattactcaggttatgcaaacccctgaacaacaattatatttagccagactcattgggtatgattattctatccaatttctttccgggaacactaatgtcatcactgatgccctatcatgaattcccacaacttagactagtgcctttctcttattatcaatgcctaattttgtgttcctgg

SEQ ID NO: 8718 - DNA, 295 bp, Glycine max
tgaggacacatgaacgaaaatgcaatttatggtgctccgaaaaagggatgagaatggagaattgcactaagcaatcactacgcatggctccaaactcgaaggtggaggacacatgaatgaaaatgcaattcatggggctccgaaaaagggtgagaatggagaattgcactaagtgttagtgtttggctctactgagctttaaaagattggctaagattttgttaaaacataagcacttagacaatgaaggaaaactggagttgctgcacatgatgtccaacgttatgtcaaggaa

SEQ ID NO: 8719 - DNA, 287 bp, Glycine max
tgaatcggacatccgtgtgttaagttttgaccatttgaatggcacgagagcttccgttgttcaatttcgagtgtcactatatgtgatgcgccaaaattggacattcgagttaagtgttatgaccatttgaatttctcaagagcttccggtgttcaattctgagcgtctcgttatgtgatttgcctgaatcggacatccgtgtgaaaagttatgaccatttgcatttctcaagagctatcgatgttcaatttcaagcctctcgacatattatgcgcccgaatcggaca

SEQ ID NO: 8720 - DNA, 336 bp, Glycine max
cacggatgtccgattcgggcgcataatatgtcgagaggctcgaaattgaacaacggaagctcttgagaaattcaaatggtcataacttttcacacggatgtccgattcaggagcatcacatatagagacgcacgaaattaaaatggtcataactttgcacactgctgtccgatataagcttatactctgttgttccactcgagattatacatcgtacactctctagaaattgaactggccgataacttttcacacatatgatcgattcgagcgcatactatgacgagaggctctggcttgaataacggaagcacttgagaaattcaacaggggata

SEQ ID NO: 8721 - DNA, 297 bp, Glycine max
ttgagcaaattgaaatgacaataactttatactctgatgtccggttgagtcccgtgatatatcgagacgctcaaaatttagatccgaagctctgagaaaattgaattgacaataactttatacacggatgtccggttgagtcccgtaatatatcgagacgctccaaattgaaaacggaaactcttagaaaattcaaacgacaataactttttactcggatgcccgacagagtgtcgtaatttatcgagggatgctccaaattgaaaacgaaagctcgtatcatattcaaacgacaat

SEQ ID NO: 8722 - DNA, 346 bp, Glycine max
cgagtaaaaagttattgtccgttgaattggctcgtaggttcaacattcaatttcaagcgtctcgatatattaccggactcaatcagacatgtgagtaaaaagttattatcgtttgaattggctcataggttcaacattcaacttcgagcgtctcgatatattacgggactcaatcagacatccgagtaaaaagttattgccgtttaaattagctcataggttcaacattcaatttcgagcgtctcaatatatttcgggactcaatcagacatccgagttacaaagttattgtcctttgagtaggctcagaggttcaacattcaatgtcgagcgacccgatatatta

SEQ ID NO: 8723 - DNA, 482 bp, Glycine max
aatccgatccttggttaatggatatttgaagatgtcagcaatttgatccacagaagaatacatgacagatttggagcaatttggattcaacaagctcatgaatgaaatggaaatccaaagcaatatgtttggacctagtgtgtataacaggattcttggtcagaaaaatggcgctgacattatcacataacaataatggaggacgtctaataggaacacaaagatcttgaagcagttgtttgatccacaacagctcaccagcagtgtatgcgagtgaacaatacttaacttcggtgctagatcttgcaacaactcgttgttttcgagaagtccacctgataagattggatccatgaaagatggcatatccatactaagacctgctatcttcagtgtctaaaaagccaccatcattctgaataagcgagaagagattgagctcttgtaggtgtgaaatgaatgcagcgatgtgaggttccttt

SEQ ID NO: 8724 - DNA, 397 bp, Glycine max
tccaggtaaccaaaaaagatcattttcccctgccattcattgatcaaatgcttgagcgcttggcaagtatgtctcattacaatttttttatggttcttatggttatttacaaattcatattgctcctgaggatcaagaaaacaccacattcacctatccctttggcatttttgcctataggaggatgccctttggcctatgcaacgcctctggtaccttccaacggtgtatgcttagcattttcaatgattttttacagagttgcatagatgtgtttatggatgattatactgtttatggatcctcttttgatgcatgtttggatagtctacatagagttcttaataaatgcattgaaactaaccctgtgctgaatttctgaaaatgtcacttcatg

SEQ ID NO: 8725 - DNA, 418 bp, Glycine max
  unsure at all n locations
gaataagaatgaaaattagaaacgggaaagaaaagctgggttgcctcccagtaagcgctcttttaatgtcactagcttgacacatcatcctgttatctaggatccaatagagttcctacttcaaggaccttcttctcaagtctcctttcctccatcacatacactttaaaatagacattttggccaggtggatctttgtcctcatggaacaaatcaaagctgatcttctatgcccatctgcagcatcttctttcccatgtccgccatgcagtttgcagtatatatgaatgggcggccaagaatgagaggaatgccaacatcctcttctatgtctatgacaatgaaatcagctggaaatataaggtgtttaaccttcaccanaacatcttcaatgactccatatggccttgtgatggaa

SEQ ID NO: 8726 - DNA, 293 bp, Glycine max
tggatttccttttagtagggaatttattcttcctaagatggagccaaacccagtcaccctcattaagaactagctcttttcttcctctattgcctttagttgaatacacctttgtttgattctctatttggttcttaaccctctcatgcatcttctttacaaattctgacctagattccccttctttatgtataaaagaagtgtccagtgggaggggaatgaggtctaacggtgttaggggattgaacccatagacaacctcaaaaggggactgcttggtggttctatgaacc

SEQ ID NO: 8727 - DNA, 265 bp, Glycine max
ggcgcataatatatcgaaacgctcgaaattgaacatcggaagctctcgagaaattcaaatggtcataacttttaactcggatgtctgatttaggcgcataatatatcgagacgctcgaaattgaacatcggaagctctcgagatattcaaatggtcatatctattcactcgggggtgcgatttaggcgcataatatatcgagacgctcgaaattgaacatcggaaacctccagaaactctaacgggcataaattttcacttcggg

SEQ ID NO: 8728 - DNA, 288 bp, Glycine max
tcaacatcagaccacttccatggtgctggaactacttcacatggacttgatggggcctatgcaagttgaaagccttggaggaaagaggtatgcctatgttgttgtggatgatttctccagatttacctgggtcaactttatcagagaaaaatcagacacctttgaagtattcaaggagttgagtctaagacttcaaagagaaaaagactgtgtcatcaagagaatcatgagtgaccatggcagagagtttgaaaatagcaggtttactgaattctgcacatctgaagg

SEQ ID NO: 8729 - DNA, 287 bp, Glycine max
tgtgcaccaatgcacactccacgagactatccgagtaaaaagtggagcctgggatgacaatggcatttttatttacacaacattaaatcatataaaatattgcctccccaatggagatagtgggataattaaaacattggatgtcccaatttatattacaaaggttgttggaaacaccatcttctgcttgggtcgggatgggaaaaacaaagctataactgttgatgcaacagaatatatctttaagctttccttgttgaagaaaaaatatgatcatgtaatgaaca

SEQ ID NO: 8730 - DNA, 469 bp, Glycine max
attttgacatatcatttaaataatagcactgtacatccatgaccataactctaagctgaatgcagagcaagaaaatccaaacataccttcaggtcactaaatgtttcagttgctataaaacgaactgaaatggggaagaatgctgatggttcggcttgtggaacaacaaattccattgacccactggcaaatatatttagtcaggcaaaacaagttcaaaaataccatgacaataatactgcacatgttagctcttaaaagcatcacactatcaccccaaatttagcatacctgcggtttgaattatcaatcagaaggacagaccactccaaaaaggaattccttgagtcatacctgcaaagccaaattataggagattattaagagagacagaccgaaatgtgaaataaaatgatctcaaaatatatatgataaacgtcatcacatgatgattctgggagtggagggg

SEQ ID NO: 8731 - DNA, 465 bp, Glycine max
  unsure at all n locations
ctcctataatgactatggcatcatttctggcgctaaactgctgggagttggaggccatcttctcaattaaatttctggcttcagcaggagtcatgtctccaagggctccaccactggcagcatctatcatacttctctccatattactgagtccttcataaaaatattggagaagaagctgttctgaaatctgatggtgagggcaactggcacatagtttcttaaatcgctcccagtactcatacaggctctctccactgagttgtctaatacctgagatatctttcctgatggctgtggtcctggaagcagggaaaattctgtctaagaatactctcttaaggtcatcccagctcgtgatggaccttggagcaaggtaatacaaccagtcctttgccactccctctaatgaatgaggaaaagccttcagaaatatgtgatcctcttggacatcntgggggttca

SEQ ID NO: 8732 - DNA, 292 bp, Glycine max
tatgctgcaaacatttataatagaccctctcagtagcaaaaccaacaacagcagaataattatgacctttcaagcaatagatacaatccaagttggaggaatcatccaaatctgagatgggcaagtcctccacaacaacaacagcctatccctcccttccagaatgctgctgctccaagcaggccatatattcctcctccaatgcagcagcagcagcaacaacaacaacaaagacaacaagcagctgaggcccctcctcaaccttcagaatatgcaatttcagcaagagaca

SEQ ID NO: 8733 - DNA, 425 bp, Glycine max
gattgattcctttcttgattcgaaatacagtattatttggaaagagtatgagcaggttctagcaaaggaggaagttcattggtatacaaaatctaaggctaaatggcttcatttgggggatcgcaaccccaagtcctttcatggtgtgactattatccgtcgaaggaggaataggtatgatatgattaaagatggtgatggtaattgggtggtggattccgagaagttggaggagatggctactaagttctataaggacttgtatacaaaggatttcatatatcttcctttggtgacatctcatgcgtttccaaaattaagggatgaggccagagaggagttaaggaggattccatcactaagagaaatctattataccatcaaacaaatggggagtctcaaggcttcttgccctgatggattct

SEQ ID NO: 8734 - DNA, 472 bp, Glycine max
gaaatcaagagacacatacacattctttttgaaattctgatactggggacagatgtcgtacaggatgtcacgacatcacgcttcagaacatgcagatcgtatgtgtccgtatgaacagatttaaacaagtaaataacacaagagaattgttaacccagttcggtgcaacctcacctacatctgggggctaccaagccagggaggaaatccactaaaatagtgttagttcaaggtctaacagcccctgtttacaaccttctcacctaaccactacccgtgcgatctctacctaagagccactcttagatatgagaacctgcgctcactccctctcaaccacactcccgtgtttacaaattaatcaaagacacaccagagatcaactctgaacaaaagagatcaactctacacactagagatcaactctacacactagagatcaactctacacacaagagatcaactctacaca

SEQ ID NO: 8735 - DNA, 288 bp, Glycine max
tgaaaccggcatattcacagtttttgtctcgttatcaaagaattgaccaagcagtggacatgaagcagagttcaatgattcaatactaaaaacatttaactcgaatgacacgttgatgtccttggcgtattggatcaaattctctctagtgaaattgagctcaacctcatcacaagtggagggtgacacaatggcagtgaccttgagtgaaggtgccccactactcctcaaggcaagctcttgcataaaagatgaccactgtactccaaacccaatatcaaaatcaat

SEQ ID NO: 8736 - DNA, 419 bp, Glycine max
tcaccatggccactacgaattctgtgtgatgccattcggcttgtgtaatgctctatcgtccttccaagccactatgaacaacatctttggaccatacctacacaagttcattattgccttctttgatgatatattgatttatagtaagacctttccagagcatattgatcacctcacaaaagcttttgcagtttttctcgaaggaagcttcttcctcaagctcactaaatgtacctttgcccaacaacaagtgtggggcatattgtatcccgacagggcatagaacctgttcccaccaaagttgaggcaattcaggcatggctagttccgcggtcaacgcgcggattatggggtttcctggactttcagtgttctatcagcacttcaccaagggctatgcatccatcatagctcctttg

SEQ ID NO: 8737 - DNA, 431 bp, Glycine max
taactaagttgttattatgtgccaacatttttgtgtttcaagcccattacaagacacactagatcctatccctattacagaacctataacttgcactcaatggtccattacttgcaatgttaccaatctgattctgatataataatgaagacttgaatagtgatgatgattcttgtatcaccccagcttttacttggaaatcctcgaaagtcatttccacaagtgtttgctaccttttgagtagtggctcattcccgacaaggctattattagcttcattgtagtgtggttggcttttgtggatctgagaccaaatttcatccacagttttcttgcaaattgggggagggacagataatggttgggaaatagtggtgggttctgttgctactacacttttaccctttgcagcttcatcaagggtgggtagt

SEQ ID NO: 8738 - DNA, 284 bp, Glycine max
tctatagaagggtcgttcctaatttctctacaattgcatcacctctcaatgagctagtgaagaagaatgtggcatttaactggggtgaaaaacaagagcaagcctttgctttgcttaaagaaaagcttactaaggcacctgttctagctcttcctaacttttctaaaacttttgagctagaatgtgatgcctctggagtgggagttggagctgttttgttgcaaggtgggcaccctattgcttattttagtgaaaaacttcatggtgcgacccttaactacccc

SEQ ID NO: 8739 - DNA, 383 bp, Glycine max
tttctcgagagctttcgttgttcaatgtcgagaatctcgacatattatgccgctcgaagtcgaacatccgtgtgaaaagttatgaccgtttgagtttctcgagagctttcgtcgttcaattccgagcatctcgacatattatgtgcccgaatctgaccttcgtgtgaaaagttatgaccatttgaatttctcgagagcttccgatgtttaatttcgagcgtctcagtatattgctagcctgaatcggagctcagtgtgaaaaggtatgaccattttgatttctcgagagcttccttggttcaattccgagcgtctctacatattatgtgcccgaatctgaccttcgtgtgaaaagtaatgaccatttgaatttctcgagagct

SEQ ID NO: 8740 - DNA, 447 bp, Glycine max
tctgtggctgtcttactggtttagccccatcctctaaatttatccgatgcatacatgtggatgggctaataccaggaatgttcgctagggtccagcctatagccttcttgtgcttcttgagaactgataatagcttctcctcttgctcatcagcaagggaggtagatgtaattactggaaaacttttgctatcatccaagtaagcatattttaaatttgatggcagaggcttcaattctggtgtgggcggctggataatggtagaaagagatggtttctcagcctgtacctcaaaaataaagtcagaggtatgtgtatttcctgaaacatggttagttctatctgactctagaaaatcaatctcaagaggtaaaacatcaccagacatgtaatcaatatcaatttcagattcactctcagcatccaattcatccatatgatcaacta

SEQ ID NO: 8741 - DNA, 293 bp, Glycine max
ttgaatgctctattcaatggagttgactagaatatcttgagactgaccaacacttgcacagtggccaaagatgcatgggagatcctgaaaatcactcatgaaggaacctccaaagtgaagatgtccagattgcaactgttggccacaaaattctaaaatctgaagatgaaggaggaagaatgcattcatgacttccacatgaacattcttgaaattgccaatgcttgcactgccttgggagagaagatgacagatgaaaagctggtgagaaagatcctcagatccttgcctaa

SEQ ID NO: 8742 - DNA, 286 bp, Glycine max
tcgattcaggcgcataatatatcgaggctctcgaaattgagcaacggaagctctcgagaaatttaaatggtcatagcttttcactcagatgtccgattcatgtgcataatatatcgagacgctcgaaattcaacaatggaagctctggagcaattcaaatggtcgtaacttttcactcggagatccgattcaggcgcataatatatcgagacgctcgaaattcatcaacggaagctctcgagaaattcaaatggccataacttttaactcggaggtgcgattcacg

SEQ ID NO: 8743 - DNA, 428 bp, Glycine max
agaggtttagaaatattaaaaaaagagacaacatcatttttatttaaaaaccaatgttatctacacatttgacaacatcagttttcaaaaaccaatgtactagcaacatcttaaaaactgatgttaagtttctgctagtaacatcagttttttgaaaattgatgttaggaagttccatttaattacaaaaatgccaccacaaataatttcacattagtttttcttgtaaccaatattaaattggtgatgttgattgcatattttgtagttgtgatatcatgtatcataactgaaaacaagtgctcaaagctaagaaacaactgatttgggaggacattatggtatttccactaaacaatctacgttatagtaattcaatgtatttagcttgcattatgttttcattcactaactgttacataccattt

SEQ ID NO: 8744 - DNA, 369 bp, Glycine max
gctcacccccatgccaaaatacatgaaaatacataaaaagtctctactcaaagactactcaaaatgcccttaaatacaagtctaaaatcgtatactactagaatgaccaaaatacaagacccaaaagaacgaaaaacctattctaatatttacaaagaagagtggacccaaccttggcccatgggctcagaaatttaccctgaggtccatgagaaccctatgaccttctttagcagctctagcccaatcttcttggagtcttctatccaatacccttgtgggtaggattgcacttgatgacccttctctcttctctaactaaattctcaaatggcgttgttgggttggttagttttcccccctcggacc

SEQ ID NO: 8745 - DNA, 410 bp, Glycine max
tgaaggataacttgatgccttggtcaacctagtaactcagcttgccatgaatcagaaatctacacctgttgcaagagtttgtggtctatgttcttctgcggatcaccatacagatctttgtccttctttgcagcaatctggagtcaataagcaacctgaagcttatgttgcaaacatttataatagacctcctcagcagcaaaaccaacaatagcagaataattatgacctttcaagcaacaaatacaatccaggttggaggaatcatccaaatctgagatggacaagtcctccacaacaacaacagtctgtccctcctttctagaatgttgttggtccaagcaagccatatgttcctcctccaatgcagcaacaacagcagcagtcacaacaaagacaaccagcaactg

SEQ ID NO: 8746 - DNA, 365 bp, Glycine max
aatccatcttgggcctttttcccacaactctcataaatgggagagaatgttcatctaaagcatacaagtccctaatattatcaaatcctaaaatttgagctcctagggagtaaaacaatgtgtgtctcctagagagggcatcagctaccacatttgtttctccctttttgtatttgataacatatggaaattgctctaggtactctacccattttgcatgcctcttgtttaacttgctttgccctctaatgtacttaagtgattgatgatcactatgaatgacaaattccttggaaacaaggtaatgttcccaagtttggagggctcttattaaggcataaagctctttatcataagtggggtag

SEQ ID NO: 8747 - DNA, 400 bp, Glycine max
  unsure at all n locations
agctntaatatgcaaagaataccaagaaangttnctcatctgacttagcatcaaactttcctaagttttcatttccattgtttaaacgaaacacttgcaaccaaaaacatgaagatgcgagatgtttggtttcctatcaatgaacagttcatatggagttttctttaaaatgggtcttattaaagccctattcatgatatagcatgtagtattaacggatttagcccaaaaatattttggaagaggagtatcatttaataaggttctagcaatttcttccaaagacctatttttcctttcaacaactctattttgttgaggggttctaggtgcagaaaagttatgttcaatgccatgcttatcaccaaataaatcaaattctttattttcaaactcaccc

SEQ ID NO: 8748 - DNA, 399 bp, Glycine max
  unsure at all n locations
agcttcctcaaccacctcattagaatttaanncctgaagaatatgtctgtctttaatgaaagctgtttgtctttcatcaattaagcaggtataacctgtctcaacctgcttgctagaagcttagctatcactttgtacatgcagcctatcaaggatattggtctataatcatttagggactgaggatggttaactttggggataagagccaagaaagaggcattgctgcctctagggaaacaaccgttgacatggaactcatccacaaatcttctgaactctggttttagcacactccagaattccttaataaaattgaaattaaaaccgtccggcccagggcacttatctccaccacaactccacactgcttccttaagctcctggtctgagaaaggt

SEQ ID NO: 8749 - DNA, 245 bp, Glycine max
  unsure at all n locations
gctgcagcgaaggcaagaaagttcantncttcactcggatgccggatacaagcgcataatatatcaagacgctcgaaatgaataatggaagctctcgagcagttccaatggtcttaacatttaactcagagggccgattgaagcacatagtatattgagactctccacaatgagcagcggaggctctcaaggaaaggaaataggcataacatgtaactcggaggtcgaattgagacgcataatat

SEQ ID NO: 8750 - DNA, 407 bp, Glycine max
tcaacattcaaattcgagcgtctcgttatattatatgactcagtcagacattcgagaaaaaagttattgacgtttgaatttgctcagagcttcaacattcaatttcgagcgtgtcgctatattacgggactatatcagacatccgagtaaaaagttattgtcgtttgaatttgctcagagcttcaacattcaatttcgagcgtgtcgatatattacgggactcaatcagacatccgagtaaaatgttattgtcgtttgaatttgctcagagcttcaacattcaagttcgagcgtctcgttatattatacgactcaattagacatccgagtaaaaagttattgtcatttgaatttgctctgagcttcaacattcaatttcgagcgtgtcgatatattacgggactcaa

SEQ ID NO: 8751 - DNA, 386 bp, Glycine max
  unsure at all n locations
agctntgagncaaagaaacatcantttcttttactcagatgtctgattgcgtcccgtaatatatcgagacgctcgaaatgaatgttgaagctctgagccaattcacacgacaataactttttactcggatgattgattgagtcccgtaatataacaagacgctcaaaattgaatgttgaagctatgagccaattcaaatgacaataactttttactcggatgtctgattgagtcccgaaatatatcgagacgctcgaaattgaatgttgaacctctgagccaattcaaacgacaataactttttactcggatgtctgattgagtcccgtaatatatcgagacgctcgaaattgaatgttgaagctttaggcaaattcaaacgacaa

SEQ ID NO: 8752 - DNA, 339 bp, Glycine max
tgaatcggacatccgtgtgaaaatttatgactcatttttatttctcaagagcttccgttgttcaatttcgagcttctcgatatgtgatttgcctgaatcggacatacgtgtgaaaagttataccaattgaatttctaaagagcttccgttgttcaattttgagcgtttcgatatgttatttgcctgaattcgacattcgtgtgaaaagctattaccattggaatttttctagagctgccgttggtttatttcgagcctctctatatattatgcgaccgaattggatcttcgtgtgaatagatctggtctttagaattttgtgagagtttcctttgttta

SEQ ID NO: 8753 - DNA, 406 bp, Glycine max
  unsure at all n locations
tctggtgggacatcttgacttgctttccaatctgacattcaccacagattctgccttcttctattttcagattgggaatgcctctaacagcacctttgtcaatgatnttcttcatgcctcttaagtgcagatgtccaaatctttgatgccatattttgacttcatcttctttggagaatagacatgtggaggagtaactggtttcttgaggtgtccataggtaacagttgtcctttgatctgctgcccttcattaggacttcactcttctcatttgtcaccaagcattctgactttgtgaagtttacattgaatccttcatcacacaactgactgatgctgatcaagttcgcagtcagtcccttcaccagcagtactatgttcagactaggaagtccatcatggac

SEQ ID NO: 8754 - DNA, 398 bp, Glycine max
tcaagaataatggcctcagcaaacttcttattcccataaggaaattcaataaataggcttcctatttttaatagagagggttaccactattggaaaatccaaatgcaaatcttcattgaggcaatagacttaaacatttgggaagccatagaagtaggaccttatgtacccaccatggtggctggaaatgcaacaatagaaaaacctagagaagagtggactgaagatgaaagaagattagtgcagtacaatttaaaggctaaaaacatcattacttctgccctaggaatggatgaatattttagggtttcaaattgtaagagtgctaaggatatgtaggacactctacaagttacacatgagggaaaaactgatgtaaaacgatctaggataaatac

SEQ ID NO: 8755 - DNA, 378 bp, Glycine max
  unsure at all n locations
tgtagggttaaagtctcatgattgtcacgtgctcattctacaatagttagccgnggctatacgagacatcttgccaaacaaagtcaggttagccataactcgcctgtgctttttcttacatgctatatgttgcaaagtcattgatcctgtcaagtatgatgagctggaaaatgaggccgcaattatattgtgccagtaggagatgtattttccccctgctttctttgacatcatgaatcacttgattgtgcatttggtcagagaaatcaaatgctgttgtactgattatctacggtggatgtacctggtagagcgatacatgaagatctttaaagggtatactgagaatctatatcatccagaagcatctattattga

SEQ ID NO: 8756 - DNA, 415 bp, Glycine max
taagggtcttgcaacattctccatggacagccaaactcatgatcattgaattccaagagcacaagtttctcaagctgccaatctcattgaacaccttccaagcaacatcaatcttaccacattttgcatacatctccaacacagcattgctcacatataaattcttaaagaacccattcttccttgcgtatgcttcaaccctctgcccaatctccagtgctccaagatttgcaaaagctggaaaaatgcttgccaaggttactgcattgggcatcatccctttctcctgctccatcctcaggaacaaccccaaagcctccccgtactttttgctccgcgagtaacctgatatcatggtggtccatgacaccacattcctagaaggcatcaatctaaacaattccaaagctacatc

SEQ ID NO: 8757 - DNA, 395 bp, Glycine max
  unsure at all n locations
tgaaggaaaacttgttgtcttggtcaacctagtaactcagcttgccatgaatcagaaatctacacctgttgcaagagtctatggtctatgttcttctgcagatcaccatatagatctttgtccttctttgcagcaatctagagtcaatgagcaacctgaagcttatgctgcaaacatttataatagacctcctcagcagcaaaaccaacaatagcagaataattatgaccctntcagcaatagatacaatccaggttggaggaatcatccaaatctgagatggacaagtcctccacaacaacaacaacctgtccctcctttccagaatgttgctggtccaagcaagccatatgttcctcctccaatacagcagtagcaacaatagcaacaacaaa

SEQ ID NO: 8758 - DNA, 393 bp, Glycine max
  unsure at all n locations
agcttcaagattatggcctnatcatctatcttgtttcccgagggaaattctataaatagacctcccatttttaatgagtgggttaccactactggaaaacccgcatgcaaatctttatagaggcaatagatttaaatatttgggaagccatagaacaaggaccttatgttccctctatagtggctggaagtgcaacaatagaaaaacctagagcagattggactgaggaagaaagaagattagtacaatatatttaaaggccaaaaatattattacatctgccctaggaatagatgaatactttagggtttcaaattgtaaaagtgctaaggatatatgggatacactacaagtaacacatgaaggcacaacagatgttaaaagatctaggat

SEQ ID NO: 8759 - DNA, 370 bp, Glycine max
  unsure at all n locations
agcttgtaggctacattacaaccattcttggctttgaacaccatgaggaaattcacacaaaaaactgaattagagacatgagttacaagatttgctaccactttcttaactttgcaaagattgcataagcaaaaggccaatcttanaaggatgtttaattcagatgaatggttgaagtctaaggcagctaaagagcccaaggggaagcaagcaacagatgttgttcttatgccatcattttggaatgatgttgtttatgctttaaaggctatggggcctcttgtaagtgtgttgaggttggtggataatgaacaaaaacctacaatgggtttcgtttatgaagcattggatagggccaaagaagcaattc

SEQ ID NO: 8760 - DNA, 413 bp, Glycine max
  unsure at all n locations
agcttcttattttcagatgatcaaatttttttgtactacctcatgcactttcctctaattgactatgggcattcattttcttggcgcttaaactgctgagaggtgggaggcccatctttctcaaataaaatttctggcttcagcangagtcatgtctccaagggctccaccactggcagcatctatcatacttctctccatattactgagtccttcataaaaatattggagaagaagctgttctgaaatctgatggtgggggcaactggcacatagtttcttaaatctctcccagtactcatacaggctctctccactgagttgtctaatacctgagatatccttcctgatggctgtggtcctggaagcagggaaatttttttctaagaatactctcttaaggtcatcccagc

SEQ ID NO: 8761 - DNA, 402 bp, Glycine max
tggagtttccaagtgccaattcatcttcttctttagtccagtcttcttctggcttcaattcatcagtgggctttccttctgtgtccagcatcttgggatgttcccagcctttgatgacagctttccaggttctgctatccagtgatttgaggaaggccaccatccttgctttccagtattcatagttggttccatctaggattggtggtctgttcactggtcctccttctttctccatgttcatcagaatttatctccctagatctcactctgtgatttcgagtgttagctctgataccaattgaaattctgataccaggggacagatgtcgtaccggatgtcacgacatcacgcttcagaacatgcagattagatgcgtccgtatgaacagattaaacaag

SEQ ID NO: 8762 - DNA, 414 bp, Glycine max
  unsure at all n locations
gctttgtgaccttctctattaagatatacatttcttatcatattctgcaaatcctcatcagaggacacagaaaccaaagcatcaagatcttccccaggaagctgatacttgattgcatgaacctgattatatatttgtaatgctttctgcatgagctcctgccaagatatgtcctttcttattcgaagaatgcgtgtttggcctccaacataccttagctttccatcacatggtcgtggcaatattctaccaccaaagctgcaaagaaacttcatcatcattgatctatcataaactccaaaagagccatagccaggcacanattgtctattgtcctgattcaatgaagttcttggcattgatcgaatcgacccatagttgcttctgtctncaggtaatgatgtattcattcta

SEQ ID NO: 8763 - DNA, 393 bp, Glycine max
agcttgcaaagccctgatggattgtattatctataagagcttggtatgaaagactaagtttattcttactctagatagtactctagagaaatagtggacacttcactattcagaaaggcttagaaaaaggatctgctgattatacatatatatgtgaatgacatcattttttatgtaacctctgaaaggatgagcaaggagttttctgagctaatgaaaagagaatgtaaaatgagcttgatgggtaagttgaagttctttataggacttcaaatcattcaaaaagattatggaattttcatgcataaagagaaatacatcaaggacctattgaaaaggttcataatggatgaagcgacacaaatggctaccggtgcatccttccactatcat

SEQ ID NO: 8764 - DNA, 376 bp, Glycine max
  unsure at all n locations
agcttgntgtttttagctngacactttttattactattttttattttctatatttttcttccatcttattctttcttgctcgctctctttttgctcctttttttccatgagatattttgctacctaaacatacgtatatttttgtgaggtattttgctatatacatgcgtgtccaaggtatcttgctacctaaacatacatatatatgttttgtgagatatttttgctatatacatgcatatccaaggtatcttgctacctaaacatacatatatatattttgtgaagtatttttcctacatacatgcatatccaaggtatctttctacctaaacatacatatatattttgtgaggtatgactaccttccgagctt

SEQ ID NO: 8765 - DNA, 386 bp, Glycine max
  unsure at all n locations
agcttagctcagacactgcttaatttttttggattcagacactgttgactgaactcaaagttccccttctgcactcccatgtcttctgtgataactacagtgcagttgtcattgcccacaacccagttcttcatgcaagaacaaagcatatgaaaattgatgttttttttgttcgggagaaggttttgaccaagcagctcattgttcatcatgttcctgctcttgatgaatggcagatgcactcaccaagccactctatccaccaagatttatttttccaagagccaaactcaatgtgcttgaggcttcatcaaagtctcaaccaccttgagtttgagggggggtattanagcattgtcagagcggtgcagcttaactacactctt

SEQ ID NO: 8766 - DNA, 402 bp, Glycine max
ttatgatactgatgaaattcggtcttatggtttacaaaaatcatagttgttgttaggcggttatcgttatcaaaattctagaatgctttgtaaagatgttcatcaggtccaagtctgtgcctatgcattgtagtcgaaatgaattcaagatagtcaattgacccatttccgtcaacatcagcctgaggaaaaaatatacatgtcttgcaaattgaaacaattaggaacaaagcaaaaatgcatgacaacaaaaaaaagtataaagatataggaaatatcatagtttaatcacaacattaaaaaaggctttagctagagcctacataataataattataataataataataataacaacgaagcatacatgcattacaacaaaacaaaattaagaaataataa

SEQ ID NO: 8767 - DNA, 358 bp, Glycine max
cgtaatctctataaggcctcaaacaatctccaaggcgtggtttgacaggctaacaatagttgtcaagcaagatggttttgctcaatgccaaacaaaccatactatgtttgttaagcattctctggatggaaagatagctttgtttattgtttatgtagatgatatcataattctaggagacgattatgatcaaataaatcatctgaagaatcttctagccgaggaatttgaagtcaaggatctatgccagctcaagtattttctagggatggaaattgctcggataaagaatggtatttttgtttctcaaagaaagtacactctagatttacttcaagaaacggggatgcttggatgc

SEQ ID NO: 8768 - DNA, 332 bp, Glycine max
  unsure at all n locations
tatgggaaggcccatttgcctgagaaagctgtggacttgtttcacagaatgtggggtgagtntcagtgcaaacaaaccgtgaaatcattcaattctgttctcaatgtgattgttcaagagggtcttttcaatcgtgcattggagttttacaatcatgttgttgcatccaagagtttgaacattcaccctaatgcactcacttttaatttggtcattaaggccatgtgtacgcttggtttggttgataaagcaattgaggtttttagagagattccactcacgaattgtgctccggataattatacctattcgacattgatgcatgggttgtg

SEQ ID NO: 8769 - DNA, 360 bp, Glycine max
tttctctaactactcatgttataaaataagttccaataaatctgtaaatcacctgttccaaatatatcattggaacccgtgctttaattaacaaggaaatccaagtttgacaaaagtcgtttcaaatatatttaataacagaaaaatcataaactatataaatattatacgcgtgaatatcatattataataactatcatattgtacgaataaaaaacatggtaggttgttgaaaaaacaaacatcagatacatatttaaatattttctatcaatatcaatcacgagacaaatctcatccgttaaacatatcatataaaatacttaaccacacattgaacaattatgtttatatacatca

SEQ ID NO: 8770 - DNA, 443 bp, Glycine max
acactataaaactcagcttttatccaggcaattcttggtggtgaagctccttcttccttggcttattccctagtggatggtgcctcccctatcctcttctcctttgcctttcgctgcatctccatggtgaaaaatcaccattgaaggacctcattgaagctcaaagatccagcctccatagaagctccacaagcaagcttccatcaagttatgctcgagatcttccgtggttcaatttcgggcgtctccatatgtgatgtgcttgaatcggacctccgtgtgaaaagatatgaccatttgaatttctcgagatcttccgtggttcaatttcgggcgcctccatatgtgatgtgcttgaatcggacatctgagtgaaaagtaatgacaatctcaattactcgagagcttctgtggttcaatcttcaagcgctcgatatattatg

SEQ ID NO: 8771 - DNA, 344 bp, Glycine max
  unsure at all n locations
acattcaccacaaattctgccttcttctattttcagattgggaatgcctctaacagcacctttgtcaatgattttcttcatgcctcttaagtgcagatgtccaaatctttgatgccatattctgacttcatcttctctggagaatagacatgtggaggagtaactggtttcttgaggtgtccataggtaacagttgtcctttgatctgctgcccttcattaggacttcactcttctcattcgtcaccaagcattctgaccttgtgaagcttacattgaatccttcatcacacagntgactgatgctgatcaagtttgcagtcagtcccttcaccagcagtactt

SEQ ID NO: 8772 - DNA, 429 bp, Glycine max
  unsure at all n locations
tgttgttctcgctaagtctatgcctcgcgctaagtgcttgagacgtgctaagcacgccccttcatcaaatttccaatgtgctcttttgggctttactttactcattaaacatcataaattcatcaacttttaatattttagacacaaaaacttaaatgatgttaaaataatagttatttgcaccaaaaggaagaaatatgagaaaaaaaattaccaatatctatataatttaatcacagaacatacctataaatagtcgttacagttacaagtattaaattaattgtttataccaatacatttttatgtataaagtatccttaacagatacataaacttattatatacctcaatcaatatcatataatacaaaggtacaaataagaaaatcctaacatatgtacaanaaagggatgaaaaattaaattt

SEQ ID NO: 8773 - DNA, 324 bp, Glycine max
tataatttaatttaagacaaaaactaattacatgctatttgttaagtattttgtggattgtcgtgagtaccaattttctcttgtaataaaattcagtataacttaacaaaaagaaactgtcattttaattataaaaacaataagaaaaatattaccataattttaaaagtcccgtcatttaaatttactaacatacaaagtagcatgggaataacaatttttcgttactatatttattagtaatttattgattcttaataatcttaaaagaactttatttggatttttagattattttatactttatggtaaataagaaaaata

SEQ ID NO: 8774 - DNA, 444 bp, Glycine max
  unsure at all n locations
ntgtcgattgtgagagagtctgagaatccacttccgaatccaaaccctaaactacaacagccccaggttttgcaagtcagcataaaaatggaaggataaatcataaatggaaacaaaaaatagtttacatggaaacataaagtataaatcaaatatgcaaataacaaaatacatgttaagtaaacactattagaaaatacactttcaacatcggttatttagaacattctacattggttctaaaattgatgttgaaagtgacgatgttgaatgtatgaatgttaacatcggttttggagaaccgatgttaacatacatatgacaacatcggttccctaaataaccgatgttaaacacaatgaacaacagcaaanaaagtgtacgaatgatgaacgttgacatcagttttccactaaanaccgatgtaatatgttagtttaacat

SEQ ID NO: 8775 - DNA, 354 bp, Glycine max
ttggttagagctcggagaaggcctcaccttagcaccataagtggtacaacaaaccactgagaaagttaagttaattcaggaaaggatgagagctgctcagagtaggcagaaaagttatcatgataagaggaggaaagatttggaattcgaggttggtgatcacgtattcttgagagtcactccatggactgggttggtcgagcattgaaatcccgaaaactcacatctcgctttattggtcctttccaaattcttaaaaaagttggccctgtggcataccaaattgcactacccccgtcttttttaatcttcacaatgtctttctgtgtctcaacttcgtaagtatattcatga

SEQ ID NO: 8776 - DNA, 401 bp, Glycine max
  unsure at all n locations
cgtgggagtttgtgatagtgattntgccacagatgttgatgatagaaaaagtactaccggatttgtattttttatgggtgattgtgtttttacatggagttctaagaagcaaggcattgtgacactttctacttgtgaagccgagtatgtagctacaacttcttgcacatgtcatgccatttggctaagaagattgttggaggaacttctgttgttgcaaaaggaaagcacaaagatctatgttgataatagatctgtacaagagcatgcctagaatccggtgttccatgaacaaagtaagcatatagatacaaggtatcatttcattagagagtgcattaccaagaaagaagtagaattgactcatgtgaaaactcaagatcaagttacggatattttca

SEQ ID NO: 8777 - DNA, 368 bp, Glycine max
taagtgccttcttggcagggaaatagaaaaaacgaaaagagaacaacaactacatcatcattctttaaaattaaacccgtgttgtttatagagctgctcttgcaaaggcctcacatgattgtggtaaacatgtgcatccccaataacatggataagatcacttggaatgagatctgacaagaaaaacacatagtataaaaattgattattttatgtttaaattgtttttaatgatgtattttctctagtcatattatcaaaatcaacacacttttgaaccctgaatctacctagactagaacttaaattaaaaacttattcataaacttctgaaaacaactctaccaaaaaatctataaaaataattg

SEQ ID NO: 8778 - DNA, 451 bp, Glycine max
  unsure at all n locations
ggaaggtgtgtaccccaccatttnttcatagtaaaacactggtaatgtgtctactattattgtgatcatctccttctccgtcattggaggtaacacttgagctgccaggtctctccacctttgggtgtattctttgaaagatttgtgcccttttttacccatgttttatagttgcatcctatccggagccatatgagaattgtattgatactgcctaacaaaggcaaccattaggttcttccaagaatggaatcgggaaggttccaagttagtgtaccaggtgacagctaccccagtaagactttcttggaagaaatgtatcagtagtttctcattntttgcatatgcttccgacaatacatctttagatggttcttggggcaagtagtcctcttgtacttgtcaaagtctggcaccttgaacttgggaggggtgacgatattgcgtacta

SEQ ID NO: 8779 - DNA, 319 bp, Glycine max
  unsure at all n locations
tgtatggntgctggctagcttgatatactcggcatatcacacggccattgactatatactcccactcagctcgtgggttcacaatcgtgcactgcatttgaccagaaccatatgatgtgcgacttggcgaacccgtgatccattgacagcgatgctagtttctcaccatagatggacttatttaccttacaaaccatagactttgtatcacctgcagcaaagttttctggctgcatcatataaatagtttcttctgtgtcgccagatagacattgacgtttaagattcatttgatgtaactatacaatataatgagcta

SEQ ID NO: 8780 - DNA, 243 bp, Glycine max
atccactgttaacagcgatgccctacgctttggttatggcatcatcacctcagaatttcccatcattgaatttgaaagtgaagttgttgacgtgtatcttttgcatggacctatccacttagagtgcacgtacttgtgcttcctccatggtcccatgtgcattttgttttccttcatgcacctttatgcttccatgcacaacaccttgatgatgttgcttaatctctctattgtccccacata

SEQ ID NO: 8781 - DNA, 441 bp, Glycine max
tgcaaaaaccacccagcacacaggacacgacagtgtaagtgaaacacaaaggaagcgtaaaactggaaggcgtagtaaatttaaagaaaaacaagataggggcaaaattgtcattaaaattttatgaaaaccgaagcttgcattaaatatttttttaattcggattattattataaaatttaatgcatatttaattcacgttgttataaaataaataatatttatttaatattattaaattttttaatacaaataaaatgttgtcataaaaaatattttttatttttaaaaaaatatacagattacataagtaaatatttattattcaaatttacatgcgcattaaatatgtattagaaatgttagtgataattatgtataataataatttatgtatactaatattatttattttataatataattgattcattagtttag

SEQ ID NO: 8782 - DNA, 342 bp, Glycine max
  unsure at all n locations
tcttctagactcattttctccttgaagtggcgtctccaatcatctttcttccttctccattctgctgccatgatcttcaagaagcaaaagacttcattgatgaagaagatccatgacctacaagctccacatggagctacatcatttttccccctttctataaaggttttgtctaatgtcacttgttacctggaagaagttacatttggattgtaggattcttttggcatgttcaaaaggggaaaaaaattattttgattntgatgtttctagtgagttctatggtaatggagccctaaatcttatctttgtggcgagggggtggagctggattgttgaata

SEQ ID NO: 8783 - DNA, 450 bp, Glycine max
  unsure at all n locations
tccccgacttcaccccaaaggtgcatttggttgggtttacttttaattggtatttccgcaaccttccaaacagcttacgcagattgacaaggtgttcagcctcaatccgagacttggcaatcatgtcatctacgtagacctctatttccatttttcccaacacacacttatggttcacacaaaagtttcttcatatacactcgttactcacacacacaagaattcctttccacgcatcatttacacacataaaaaccttctatacacattttccttttacatacatgtataaataaaaacctttttcttttctttatgaacatgacttttattcacaacgcttctttctttttattaggatttttggttcattntatttttaggacgacgttcctaaatgaaaaactctacacgggtccggaatttcaacaaacactattgacaacaatg

SEQ ID NO: 8784 - DNA, 355 bp, Glycine max
tcacgcttagttggagtctgcaaagccccaatcattcaacactttgctgaaacaatttctggtactacaactattagaagctttgatcagcagtcaagatttcaggaaacaaatatgaaactgactgatggatattctcggccaatgttcaatattgctggtgccgtggaatggttgtgtttccgtttggatatgttgtcttctatcacatttgccttttccttaatattcttaatatctattccacagggattcatagatccaggtgagttattcctatctgttacaaatcaaaatttaattcttttatggtatatggaattaaacataataagttctcttttataactttttt

SEQ ID NO: 8785 - DNA, 335 bp, Glycine max
  unsure at all n locations
ntatgaacatatcagcaggattgtgtagagtgctaatcttatgaactctgattcttctttctaaccgaatgaagtgatatctaacatctatatgcttggttctatcatgatgaacttgatccttggccaagcatatagcactaaggctgtcacagtagatgttagcatattcttgattaattccgagatcatttatcagacctctaagccaaattccttcctttgcagctttagtaagagccatatatttagcctcagtagttgagagagcaaccgaaggttgaagtgttaccttccaactcaccaagcagccaccaagggtgtaagcataccct

SEQ ID NO: 8786 - DNA, 359 bp, Glycine max
tgtataccccatgttgcatttgcttacaatagagttgctcatagcaccactaattgttctcctttcgaactcggttatcgctttaacccactaactactcttgatcatttgactatgcctaatgtttctgtttttaagcttaaagaatgtcaagcaaaggcggactatgttaaaaaactctatgagagagtcacagatcaaattgatacgaataataaaagctatgctacactagccaccagagggagaaagaaagttgactttgaacccagacattgagattgggtgcacatgagaaaagaaaggttctcttaacaaacgaaattaaagcttctaccaaggggagatggaccatttta

SEQ ID NO: 8787 - DNA, 213 bp, Glycine max
taacaaaaggcatgcgaagtgggtggaattcctagagcaattcccttatgttatcaaacataaaaagggaaaaggtaatattgtagccgatgctctttctcggcgtcatgcattactttctatgcttgaaacaaaattgattggtcttgaatgtttgaaaagcatgtatgaaaatgatgaaacttttggagaaatcttaaaaaatggtgaaaa

SEQ ID NO: 8788 - DNA, 346 bp, Glycine max
gactcaatcggacatccgagtaaaaagttattgttgtttgaatttgttcagagcttcaacattcaatttcgagattttcgatatattacgggactcaatcagacatccgagtaaaaagttattctcgtttgaatttgctcagggcttcggtattcaatttcgagcgtctcgatatattacgggactcgatcagacatccgagtaaaaaattattgtcggttgaatttgctcaaagcttcaacattcaatttcaagcggttcgatatattacgggactcattcggacattcgagtaaaaagctattgttgtttgaatttggtcagagctttggtattccatttcgag

SEQ ID NO: 8789 - DNA, 345 bp, Glycine max
catgcactcctctaatgacaatagcatcatgtttggcactaaattgctaggagttggaagccatcttctcaattaaattcctggcttcaacaagggtcatgtctccaagggctccaccactagcaacatctatcatgcttctctccatgttactgagtccttcataaaaatattggagaagaaactgctccaaaatctggtggtgagggcaactggcacataattttttaaatctctcccaatattcatataggctctctccactgagtttcctaatgcttgacatatcctttttgatggtcgcggtcctggaagcagggaaaacattttctaagaatactctct

SEQ ID NO: 8790 - DNA, 363 bp, Glycine max
caactttgccaagagccagctgggagcaattggtcaatctgatcagtggatcagatctgctgctgatctcctaaattgtggtcccctgcagcttcctttctgctacctagggctgcctataggtgtcaatccgagaaggaagatggtgtgggaacctatcatcaacaaatttgaggctagactgaacaaatggaggcagagaagcatatccatggctggtagaatcaccctaattaatgctgtcctaacagctctgccattgttttacatgtcttttttcaggactccttcaacagtgatcaacaaactcatctccattcaaagaaaagttctttggggtgataatcaagaaaggaggaagat

SEQ ID NO: 8791 - DNA, 448 bp, Glycine max
aatctcagcttcacatcagaccacttccagggtgctggaactacttcacatggacttgatggggcctatgcaagttgaaagccttggaggaaagaggtatgcctatgttgttgtggatgatttctccagatttacctgtgtcaactttatcagagagaaatcagacacctttgaagtattcaaggagttgagtctaacacttcaaagagaaaaagactgtgtcatcaagagaatcacgagtgaccatggcagagatgttgaaaacagcaagtttactgaattctgcacatctgaaggcatcactcatgagttctctgcagccatcacaccacaacaaaatggcatatttgaaaggaataacaggactttgcaagaagctgctagggtcatgctccatgccaaagaactctcctataatctttgggctgaagccatgaacacagcatgc

SEQ ID NO: 8792 - DNA, 454 bp, Glycine max
  unsure at all n locations
ntacaacaaatgccactntactccaagttttaaaaggatatgttaacaaggacacacaagtatattcaccaggaaaacattgttgtggaaggaaattgtagtgttgtgattcaaaagatccttccacccaagcataaagaccctgtgagtgtaaccattccttgttcaattggagaagtcactatggaaaggcacttattgatctgggagctagtattaccataatgccactctccatgtgcagaaggttgggagagttggagatcatgcccactaggatgactntacaacttgttgaccgctctattaccagaccatatggagtaactgaagatgtgctggtcagagtaaaatattttatcttcctggcagactttgtggtaatggatatctgtgaagataatgacattcatgtaatattgggaaggccattcatgttaactgcaagctgcat

SEQ ID NO: 8793 - DNA, 347 bp, Glycine max
cactggctgacatgttctcaattagctcagttgcttctttcggggtcttcaattttatctttccccctgcagaagcatctaacagttgcttggtttgtggtctcagcccatctataaacatattcaattggattggctcggaaaacccatgagtaggagttcttctcaacaagcctctgaatctctccaatgcttcactcagagattcatcaggaaactgatgaaatgaagagattgcagctttcccttctgcagtcttggactctggaaagtatttctttaggaacttttcaacaacttcttcccaggtttttagactattgcccttgaatgagtggagccacccc

SEQ ID NO: 8794 - DNA, 340 bp, Glycine max
aagtggcctcatatatcttaagaaggaggggttgaattacaaactatttccccaattaaaaattctactttgattttaatgcaagttccaatttcccttaaaaatgaatttctaaatgatgattcaaattaaacaatctgaatgtaaatgttaagcaacaataaataatatagtttaagggaagagaaagtgcaaacacagtttttatactggttcgacaaagtccgttgactatgtccagtccccaagaaacccgcttgggagtttcactatctcacaaatcctttacaccttctaaaacacacaaggaaaacccttcctttatgttcaaatgctttac

SEQ ID NO: 8795 - DNA, 318 bp, Glycine max
gcatcagtcccgctaactgttgcagcatctgagtgccacgcttcgggaaacgcctcatcagcttgtgtacccatccaaacagccagcattagctcccccttcgctttgtcaccctttctgtcttccagcctataccactgcggtgccaaaggactgtccggtggaacacgcttcgggatctcattgaggtcaaacaagacacgaccaatgaagtcatccttcacgacatccttgtccttcacagtgacttccagtatggaagcctgaatgcggtctttggagaaagcaaaaacctgattccattcaggattacacttc

SEQ ID NO: 8796 - DNA, 312 bp, Glycine max
tcattcacttaccaaatcatcaaatgtaccatgagagttcatagcatatagatgtgaaactacacttcatcagagatgtgattgaatctgacaaggtgaacgtggagaaagttctaacagaaaaaaaccccgctgatatgttcataaagtccctctctagtgtcaagttcaagcactgcctggacttgataaattttgaaggtgtctaaagcagattggtagaagagcagcccaaaaacacaaagtagacactcgcttatttaaattcaaggcggagatttgtggtgtgtgaactcaaatcacaattgacac

SEQ ID NO: 8797 - DNA, 359 bp, Glycine max
gttcaacacctatcataaataattgacttaactattattggattgtgaaaaagcttggataaatatcaaattaaaatattttttaatgaattgaattttaaaattattatatataatcttaacacgtccttgtttcaatttaactttaaattttgatacaccatatgaataaagattatgtgtcccaatttaaatattttttttatagttttctcctcatgtttaaaagtattatcgtaaatttatttatatctactaaaataaaatactcaccattaaccaggaaaatatctaatattacgaagtcttatttttaaaaattatatatgtgtgtaattttacacaattaattattgata

SEQ ID NO: 8798 - DNA, 341 bp, Glycine max
  unsure at all n locations
aaacctttgctaattcaattaggaattcccttcctaatattctagtgatcatcttgatgttgtgacttgtaatcttgaagtattgtcttgaattttaatcttgaaaagcccatttgcatcaattgcaacacatcatcatgatcatcatcaaaacatcaaagccaattgcatctacacatgtgtcctccaccttcgagattggagctatgtttcacgattgcctaagtgcggaccctcaaagcaatccgccattcttcctttttttttcggagacccatgaatgtatngcctaacgctattcatgtgccctccaccttcaaggttggagctatgtttcatga

SEQ ID NO: 8799 - DNA, 423 bp, Glycine max
  unsure at all n locations
gcttctaagaaaaacttcttgagaagctntcttaagaaaacttgcttgagatgctagagctaagctacacacacncatctaataactaagctcacctccttgagaagcttncttgagaagctagagcttagctacacacacccatctaataactaagctcacctctntgacaaaatacatgaaaatacaaaataaaagtctcgactacaaagactactcanaatgccctgaaatacaatgctaanaccctatgctactagaatggcacaaatacaaggcccaaacgaaggagaaacctattctaatatttacaaagataagcaggctcatatntagcccatgggctcgagatctaccctaaggctcatgagaaccctanggtcttnccttggatctctgacccaatctacttggagtcttcta

SEQ ID NO: 8800 - DNA, 316 bp, Glycine max
  unsure at all n locations
tctgacattcaccacagattctgccttcttctattttcagatngngaatgcctctaacagaacctttgtcaatgattntcttcatgcctcttaagtgcagatgtccaaatctttgatggccatatttgacttcatcttctttggagaatagacatgtggaggagtgactggtttcttgaggtgtccatangtaacagttgtcctttgatctgctgcccttcattagaacttcactcttctcatttgtcaccaagcattctgactntgtgaagttacattgaatccttcatcacacaactgactgatgctgatcaag

SEQ ID NO: 8801 - DNA, 322 bp, Glycine max
  unsure at all n locations
cgagacgctnganattgaacaacggaagctctcgagaaattcanatggtcattaactttcacatggatgtccaattcaagtgcataatatttngagatgctctaaatntaacatggaagcacaagggaaattaanacggccataacctttaacaaggatgtccgattcaggccaataatatattgagacgctcgatattgaacacttatgctctcaagagaatcanattgtcatacattntcactcggatgtccgattcagacgcataatataccaacatgctcgaaataaacatacagcgcaagcanattcaacggtatac

SEQ ID NO: 8802 - DNA, 453 bp, Glycine max
  unsure at all n locations
tgacatctatccccacatggaanaaggccaatgtgcggacatgacattcagaggatgtggcggaacattgacattgtccgcgtatgctngacatntatggcatntccttacatgggcgcagcaatcgctntccatagtgagccagtaataacctgctctaaggatcttcctggccatagcatgcccattggcatgtgtcctcaatgaacccccgtggattccctcaatcatgtagttcgcctctttggcatctacgcatcgcatgaaggtcatgtcgtggtttcgtttgtacaggatggtaccactcacanagataccagtagccaatcttccttaacgttctttctcattgtcganaatccctggtggatattctgtgttctcgatgtactatntgatatcgaaataccacggtntcccatctcgcttntcctctntcacacaacaatgtgt

SEQ ID NO: 8803 - DNA, 282 bp, Glycine max
  unsure at all n locations
tcaatcctataccattcaggagccaatggactattatgtggaacacgtctaggaacatcatggagatcaaacttcacagtgccaataacttcatcaagtaacatattcttgtctttgaccacaacttcaagcaaagttgactgctgattntcccttgcataggcaaacactngattccattcaagatcttgtgttttctcagagtgtatggtaattcctctgaaattgcaacctttacctccacatatggatcaatgctcccagtcaaacgagctcttacaa

SEQ ID NO: 8804 - DNA, 365 bp, Glycine max
  unsure at all n locations
taagagctagagctagctaccatacctctctaatagctaatctcacctgcttgagatgagaaactagagcttagctacacancccctataatagctaagctcaccctcatgaaaaaatacatgagaatacaaaatagaaatccctactacaaagactactcataatgcctggagatacaaggctaaaaccctatactactagaatggccaaaatacaaagctcaaacgaatgaataatctattctaatatgtatatagataagcgggctcatacttagcccatgggctcganatctaccctaaggctcatgagaactctangaccttcctttggatctctggccagatctacgtggagtcttcta

SEQ ID NO: 8805 - DNA, 300 bp, Glycine max
  unsure at all n locations
acatagacttcttgcttaataagtccattgaggaacacacattctacatccatttgatacaacatcataccatgatgggcagcanaggatattaaaatgtgcattgcttctagacgagcaacatgagcaatagtttcagtcgaatctataccttcttgttgtgaataacccattgccacaagcctagcattgtccactcacaaccttacatatttcatcgagcttgtntctgaacacccactntgctccatagcatatatgccattgggaagatctacaagcttctagacatcattcttc

SEQ ID NO: 8806 - DNA, 356 bp, Glycine max
  unsure at all n locations
tgagaatgtcttatccttacnctcggaagcaaagaaaaaaggagagaaggataatntccaatcaaaggaaacaaggagaggaaagggaaatcccaatcaaagagtgcgagaaagcaaaaagataagatagaacattcccaatcaaagaatgcgagaaagataaagagaaggagaagaaggaaggaaagctcctgatcaatgatcgaaagaaaacagaagaaatgtgcagaggggatctctggaccagacaatatctaaacaaatacagaattgtcaccaaatgaacaaaagaaagaaaagganaccataacctataagtggtcttcttcctttgataccaaccaanatcctgtgcg

SEQ ID NO: 8807 - DNA, 469 bp, Glycine max
gtcacctgcggcatgcaagcttatttaacatgccccatatatatttgcaagcgcttactgttaaaaaacaacttatatatatagtttcatgttgtgattgatgaccatgatttgggttacaatctaaaaaaataaatgatcttagaatcaatcatgcataaatataattatgaattaaaattattacatgatatgcacattaacaaaaccatacataatatgattatagtgatcttattcagttcaaggatatgaagaatatatgtgatttaaacaaaacataaaaataaaaccatatgtaaaaagaaaagaaaacttttttgactgcaaaaaaatgatcctcaacacattcagaccgaataagagaaagcactttgtaacatacaataacaaaagaacgtctgcactaccagtaaaaaataactatctattctggttgttataatattaaataatgtatgacataaca

SEQ ID NO: 8808 - DNA, 398 bp, Glycine max
  unsure at all n locations
aaaattccttcatctgacttagcatcaaattttcctatgttttcttttccattgtttaatacaaaacacttgcaaccaaagacatgaagatgtgagatgtatggtttcctaccattgaacaattcatatggagttttctttaagatgggccttattaaagccctattcatgatgtaacatgcagtattaacggcttcagcccaaaaatattttggaagaggaatatcattcattaaggttctagcaatttcttccgaagacctatttttcctttcaacaactctattttgtagaggggttctaggtgcannaaaattatgtgcaatgccatgctattcacaaaataaatcanattctttattttcaaactcaccctcctgatcactcctaatagatat

SEQ ID NO: 8809 - DNA, 451 bp, Glycine max
  unsure at all n locations
agcttgtgctcacttccncggccggtaggtgccgtaattgctatttagctatttttcccttaacaatcacaaccacaaccatgtgagtgcgtactttgattgattgaatatgtgggtgtgcagtgaggctgagatatacctgtttggaggtttcattacttcttggaaagttcccagtggtaaggacctcctctttgttcgccccgacgctgttttcaatgggaacaaaccgataagggtagcttcttctcttctctttacttcatatctttaatctttaattactcttttaagtctctccacctatgctgttttcatccactatgcaaaccaattcttttttacgttgtaatttattaattctggatcctccagacactgattcantttatatatttgggcagtggtggtgttccgcattgttttccacagtttggtcctggtccaattc

SEQ ID NO: 8810 - DNA, 236 bp, Glycine max
agctggagttgctgcacatgatgtccaacgttatgtcaaagaataagatcgggctgcacaatgcacaacgcaagataaagtgtcaaatgaagaattgaagctgcaggattcacgatgtcggatacaatgtccaggacatcctgcctgaaaatactggaattgctaaaagcattgaagctgcaagatccacgatgtcggatacaatgttcaggacatcctgcccgaaaatactggag

SEQ ID NO: 8811 - DNA, 287 bp, Glycine max
gagcaaattcaaacgacaataacttttgactcggatgtccgattgtgtcctgtaatatatcgagacactcgtaattggaaacagaagctctgagcaaattcaaacgacaataactttttactcggatgtccgattgaatcccgtaatatatcgagacgctattaattgaaaatagaagctctgagcaaattcagacggcaataacttttaactcgggtgtgcgattgtgtctcgtagtatatcgagacgctcggaattgaaaactgaagctctgagagaaatcaaac

SEQ ID NO: 8812 - DNA, 329 bp, Glycine max
ccttacttgaatcttatgccccaacactatttcttcttgaaccatgaaatggcatttcttccaattgagaactagattggactcttcacatctctttaatactctttcaatatttgataagcacccttcaaaagatggcccaaaaatagagaaatcgtccatgaaaacttcaatgcatttttccaccatatcagaaaaaatagccatcatacacctctgaaatgtagctggggcattgcatagaccaaaaggcatgcactgatatgcgaatacaccaaaagggtaggtgaaagctgtcttctcttgatctttgggatctacaacaatct

SEQ ID NO: 8813 - DNA, 481 bp, Glycine max
  unsure at all n locations
agtcacctgcaagcatgcaagcttcttaaatatgagagataatgtttatcttcaaatatatagataaaaagataaaattattttaaatcaaacctctcattttttgtttgaaaagatctaaattcatatctctttaacattataattacaaacatccacatccgaataaagaagatcagacacaaatgataaaaaagttcaagacttatttctaaacttgaaaagtaaaaaaatgttttattctttagaattacactcatcataaaattgatagttgatacacaaatattaatgtggatctataaaattttcacattattaaaagaaaatttttgttggtttaagaacgcacgtgcatttggatatacaaattnttttgtatntataatgtttgcagcatattttaaatggagattataattttgtattgaaaggatccgaaacactcttatttaactatcatccttcgcatataattcat

SEQ ID NO: 8814 - DNA, 433 bp, Glycine max
  unsure at all n locations
agtcacctgcagcatgcaagcttcacttgcctaattnttcttcatcccagctcctaactgcggtggcagtcttcattgcaatgcctagtttgtggatcacagacctttcttccatatctttcctttcaagtgttggcattctcatgtctctactcattttcctgtgtgtagcagccactgcactcttaggacatgtccaatctaatcattccatacctgtcctccacctccataatattccatcagtatctggcctctacgttttcggctatggaggacatattgtcttccctgaattatatacagccatgagagacccctcccaatntacaaaggtacccaacttcatgaaattttataaactgaattatatgcttaatcaaaactntcaataaatataaattgatccggacagcacatcatatttatgttt

SEQ ID NO: 8815 - DNA, 309 bp, Glycine max
agcttggcacttgttgcatttcctcatgtgaacacaacaatcattctccattgtgatccaataatacccagctctcagaacctttcggcccatggtatgcccattgacataggttccagaggatccttcatgaaccttcgctagtatctactcgggctcggctgcattcacacacctgagcaataccatatcatggttccttttatataggacatcctcgatcagaaggaaactggtcaccaacctgcgtaatctcctctcatcattgtcagaggccccaggcgggtattccttgtccttgatgtatcg

SEQ ID NO: 8816 - DNA, 185 bp, Glycine max
gcgaagagggtggaattcctagagcaattcccttatgttatcaaacataaaaagggaaaaggtaatattgtagccgatgctctttctcggcgtcatgcattactttctatgctcgaaacaaaattgattggtcttgaatgtttgaaagcatgtatgaaaatgatgaaacttttggagaaattttt

SEQ ID NO: 8817 - DNA, 408 bp, Glycine max
  unsure at all n locations
agtcacctgaagctgaagcttctaactntgacaagactgaagctctgataccacttgttgaacaagtggcctcaaatatcttaagaaggaggggggttgaattaagatatcacaaactattccccaattaaaaattctactttgatggtaacccaagacccaagattccttttaaaattaattcctatataataattcaaattaaacttactgaatataaacaatgagcaacaattaacaaaagagtttaatggaagagaaagtgcacacacagtatctatactggttcggcaaagtgcgttgcctacgtccaatgcccaaaaaatacgcttgagagttgcactatctcacaaatcctttacaccttatgatacacacaaggacaacctttcctttgtgctcatatgc

SEQ ID NO: 8818 - DNA, 361 bp, Glycine max
agcttgacaaaaaggaagcaagttgtttaaaacaaaaacgttgtttctacttcaaaaccccttgaactacttcacattgatttatttggtccctctagaattatgagtttaggcggaaattactatggcttggtaattgtggatgattttcaaaataaaaaacgaagcttttgatgcttttccgaaacttgccaaggtgattcaaaatgaaaaaggtctcaacattgtttcaattagaagtgatcatggaggtgaatttcaaaatgagtcttttgaacacttttgtgaagaaaatgtaattcaccataatttttcagccccaagaacacctcagtatgatggtattgtggagaggaaaaat

SEQ ID NO: 8819 - DNA, 325 bp, Glycine max
tttctctacaatcgcatcacgctctctttgagctggtgaagaagaatgcggcatttacctggggtgaataacaagagcaagcctttgctttgctcaaaaaaaagcttactaaggcacctgttctagctcttcctgacttttctaaaacttttgagctataatgtgatgcctttggagtgggagttggagctgtattgctacaaggtgggcaccctattgcttagtttagtgaaaaacttcatagtgccgccaccctcaactaccccacctatgataaagagctttatgccttaataagagccctccaaacttgggaacattacct

SEQ ID NO: 8820 - DNA, 463 bp, Glycine max
actaagctttattaagagatgctttatttacagctaatatttattattaatttattaaaaaacttgttataacctacctatttatttcaaattaataatcaacatatcaatattataataaataataatacgttagacatgtacaaataattaaaacccattttagtaattacattggtcaaaattaattttgattaaatgtattcaatcatcattccattaaacaatcaatttttgaaaaggattgaagagttcaatttccgcccatctgaataaatgaataattgttatcatcatttaccataacgatctcctattacctttattcaagaaaaaaaattaaaaatatttaattataacgagttctagaattctaaatatattcttctaagaaaattctatatatattattataagggcagtgcatataatattaacataacataaattcaccaacacattt

SEQ ID NO: 8821 - DNA, 420 bp, Glycine max
aatgtgaagcatgtattcaagcattacaacctagaatggattttagtacatgtattgaaagagaaattaacttgcttgaattggttcatagtgatatatgtgatagtaatgatgtgctaacacatggtggtaagggatactttattactttcattgatgatttctccaaatattactatgtgtatttagataatcacaaaagtgagttgttttataagttcatagtgtataaaacagaagtagaaaatgaattagaaagaaaaattaaaattttacgctctgatagagatggagaatacacatctttgaatatgagtaatttttgtgaaatgcatggtattattcatgaagtgacacctgcatatgctcctgaatctaatggtattgtggaaaaaaaagaatcataccttgcttgatatg

SEQ ID NO: 8822 - DNA, 370 bp, Glycine max
  unsure at all n locations
tcactgattgctttggacctttgccattgtccaccaaaaaggccatctttagcccccatgttgtgtgtacctccaagtggcagtgcatgaaccaaactcctatcaaacacatacccaacatatattttagtactgggatgagtttgttacactcttaaaaacaaaggcttctaagtgtgaaagactttntatattgtgatctaattatgtatagtaatatatgataaatntgttgactctaaaaataaattntgatggttgatattttaagaatttttacatttgaccatacatcacaattaagctttaagttntagggataattatatncaatttctttgatgtgtgaataattactcagaatttactt

SEQ ID NO: 8823 - DNA, 329 bp, Glycine max
gggtgataatagatccccttgcctaagtccccctttgggggagaactcagccatggggctaccattcaccaaaaccgaaatagacgcagattttaaacaccctcaatccatttggaactgaaatctgttatttccaacatgtacaacagaaaataccaggagaccgagtgccttctcataatctactttgaatacaaggaatgatttgctgctctttttggcctcttcaatcacctcatttgcaatgagagcacaatgtaatagatgtcttccctcaatgaatgcatattgggtctcatctacgatatatgccatcaccttcttcattc

SEQ ID NO: 8824 - DNA, 401 bp, Glycine max
agcttatagaactatcccaaggaaacaaggcaataggtgctaaatgggtgtttagaaacaagctagacaaggcaagtaaagttgtgagaaacaaggcaaggttagtttccaaaggctactcacaatagaaaggtataaattatacagaaacttatgcccttgttgcttgtttggaggctatatgcattttaccatcatttgttgctcatactaaaatgggactatataaattggatttaaaaagtgcactcctcaattgatttatacaaaaggaagtctatgtagaaaacccccctaggtttgggagtaacacttttccacaacatgtttttaaactcagtaaagctctatatgagctaaagcaagctccttgagcttgctatgaacgtcttcgttcattc

SEQ ID NO: 8825 - DNA, 435 bp, Glycine max
  unsure at all n locations
agcttngtattttctcacagataggacatgcatgatgtcctttgacactatatcaactcaaatttccatatgctagaaagtcattaatggtacaaaaaaccatagcacgtaaattgaatgtctcttgaagattcccatcccacacatcaaccccgtcttcccacaattttctcaagttttcgatcaatggagtgagatacacatcaatgtgatttcctggttgccttggactggcaatcatcatgcaaagcattatgtacttttgcttgatgcacaaccaatgagggagtttgtaaatcatcagcaaaacaggccatgaactatgattgatggttaagttaccaaaaggattcattccgtcggaagcaagaccaagcctaaggtttattgtgttgtctgcaaaattaagatacaaatgatcaattgtcttccatt

SEQ ID NO: 8826 - DNA, 399 bp, Glycine max
  unsure at all n locations
agctaacaaaaggcatgcgaagtgggtggaattcctagagcaatttccttatgttatcaaacataaaaaaggaaaaggtgatattgtagccgatgctctttctcggcgtcatgcattactttctatgcttgaaacaaaattgattggtcttgaatgtttgaaaagcatgtatgaaaatgatgaaacttttggagaaatttttaacaattgtgaaaatttttcagaaaatgggttctttagacatgaaggctttcttttcatagaaaacaaattgtgtgtgcctaaatgttctactagaaatttgcttatttgtgaagcacatgaaggaggtttaatggggcattttggggtccaaaacactctaganacattacaagaacattnttattggcctcatat

SEQ ID NO: 8827 - DNA, 328 bp, Glycine max
  unsure at all n locations
agcttcaaccaagaggggatggtccatttcaagtacttgaaaggataaatgacaatgcgtacgagattgaattgcccggtgagtataatgtgagtactacatttaatgtgtctgacttaactctttttgatgtagatggagaagccgatttgaggacaaatccttttgaagagggagagagtaccaaggaagctcttcaacaagtgttaaccatgctatttgaatttacgcccaagttacaagtggagaagcttcggattgttaattgcaccatgttccaagaagagtagagggtgccacttttgttgagtggttntattagcatttt

SEQ ID NO: 8828 - DNA, 508 bp, Glycine max
  unsure at all n locations
agtcacctgaggctgcagcttcaagcaccctttgcactgagaatctattggattgcgaacttggtggtttcgtgcttgtttgccacttcggccattgttcgattgataactgtcgatgtagtgaaattggagctaagtttgagagtggatgacatattctcgttggttaatcttccactgtccgccttccttttcctagtagcaatgaaaggatcaacggngattcaagtgattagaatttctgatgtagtgacaacatatcagtccctttacactgacagaactntgagcccttatgcctattcttcgttcttctccaaaacagtgtggctttggatgaaccctttgctgaacaaagggtacaaaacatccctcaagcttgaagatgtgccttctcttcctattgatttcagagcagaaaagatgtcagagcttttccatagcaattggccaaagcctgaggaaaacagcacgcactcggttgtactcaccttgttgagatgcttct

SEQ ID NO: 8829 - DNA, 384 bp, Glycine max
aggcatctcggagaggatcttttctcggtcatatttgcgcaaaatctcttgaactaggaagatgttgtccatcgtctttctgttcttaatgaaagcagtttgagtttccccaataatagtctcaagcactggggctatgcggttagccagaattttagatacaatcttgtataacaaattacagcaagatatgggtctaaaatggttaacctgggaggcctggtcatgcttatgaataagcgcaataatatcatggttgagctgctttataatttttccagctgcaaagatatcatcaccaatgatatgtcaagccttcttgaagaataaaacattgaaaccatctggcccaggagctctattattatccatcacagaaataac

SEQ ID NO: 8830 - DNA, 450 bp, Glycine max
agcttagagtgcagaagaagaagcagcaatcaatttaataatgttctttaaacatgcaaggcaaaattgattgtaataacataaatgagataagggaagagagaatgcaaacacagttttatactggttcggcaaattttgtgcctacgtccaatactcaagcaacccacttgagatttccactatctttgtaaaatcctttacaacttctgaaccacacagggacaacccatcccttgtgttcaggaatccttataactcaagagaccctcaatcccttaatcaatcttactgaatgagaagaaagaaagaagaattatttcttgaagagaaggatattacaatgaagatccatggatgaactcttaatgggattgcaagtgtttgcccacgagttcttgagagagcatttggcaatgaagttctcttggaatctctcttattttcttt

SEQ ID NO: 8831 - DNA, 333 bp, Glycine max
  unsure at all n locations
agctntacacaaatgccactatactccaagttttaaaaggatatgttaacaaggacacacaagtatattcaccaggaaaacattgttgtggaaggaaattgtagtgttgtgattcaaaagatccttgcacccaagcataaagaccctgtgagtgtaaccattccttgttcaattggagaagtcactatggaaaggcacttattgatctgggagctagtattaccattgtgccactctccatgtgcagaatgttgagagacgtggagatcatgcccactaggatgactttacaactgttgaccgctctatgaccagaccatatggagtaactga

SEQ ID NO: 8832 - DNA, 534 bp, Glycine max
  unsure at all n locations
agctntaactcaatacaatttcatccaactacaggatctcaatatgtaatagacatctctatagattaaaataattntaaatgtttaatgtgtatccaattaattatatggatgtgtatctcaatatgtggtaaacattagaatgaattttaatataatacataagttatttttatttgtcaaacctatctgtcatataatgaaaaagacaaaaaaaaatgtacaataacaaattaaattttatttattttctataaattctctatatcttttctatatatagaatatagaattcctatatatagaatatagaattcttttattctttaaccttctttagttaataaggttaaagaataaaagacaaaaaaaatagaagcgtccattgtctaatggataggacagaggtcttctaaaccttaaagtataggtcanatcctaatggacgcaaattgtttgatatnattgatatatatgcaactattgcattgaaaaatgatttcattgataatgaccatgcataaaaatgacaca

SEQ ID NO: 8833 - DNA, 318 bp, Glycine max
tgatggcccgagttatgttggggaactgttactaacccggaatgggtttaggcaaagacaacagcggcattgttatacaagaggcctcacatatcttaagaagggggggttgaattaagatattccacactgtttccctaattaaaaaccatttcctttttactcaagttatgaattcccttaatgacaatcttcttaaatattaattcaaatgaagcaactcgaatatgaatattatgcacttataaataaacgagattaagggaagagaaaatgcaaactcagttttatactggttcggccacactccttgtgcct

SEQ ID NO: 8834 - DNA, 366 bp, Glycine max
  unsure at all n locations
agcttcggtagttcaatttcgagcctctcgatatattatgcgcctgtatctgacatctgngtaaaaaggtatgaccattttagtttatcgggagccttcgtttttcaatttcgagcgtctctatatgtgatgagctcgaatcgacatccgagtgaaagttatgaccatctgaatttctcgagtgctttcgttcttcaatcttgagcgcctcaatatattatgcgcttggatctcgacctccgcgggaaaagtattgaccatttgaatttctcgagagctntcgttgttcaatttataatgcatcggaatcggacattcgtgtgaacagtatgacccattgattttttgagagcttccgacgtttaa

SEQ ID NO: 8835 - DNA, 358 bp, Glycine max
  unsure at all n locations
agcttcttttttccaccacattntatcctcagaccgatggtcaaacttatcataaggatgcacaagctaaagttgagtatgtgaaaagattgcataagcaagtgaaggctcaaattgcaaagaagaatgaaagctacgccaagcaagccaacaagaacaagaagaaagtggtacttgaaccatgtgattaggtttgggtacacatgaggatggagaggttctctatacaaaggaagttgaaactcaacctagaggagacgaacctttccaagtactagagaggatcaatgacattgcttacaagattgatatttcaagtgagtatggagtacgtctcttatttaatgctgctgacttg

SEQ ID NO: 8836 - DNA, 432 bp, Glycine max
  unsure at all n locations
atatgaatgtcttagttcatttcttttaaacaatgactntgaaagaggaaaagtggatacaaatttgttctgcaagaactatgactcccaatttatattagttcaaatttatgttgacgacattatatgtggtgttatttttgaacctctttgtgaggatttttctaggctaatgcaaaatgaattcaaatgagtatgatgcgaaagctgaacttcttcttaggactacagataaaacaaaccaacattgtcatatatctgctagaagacggacttgttccctcgactcaatcaccaactgatatatctctggcttcttggtctcccactgataccactacacaatgcaaacatcttgataccctgtcacttcctcaacctataccttgcatgacgnagcaatgatcgagccttactatatctaattcatcc

SEQ ID NO: 8837 - DNA, 331 bp, Glycine max
agcttcttacaagagactaagaaatttctgtctttattttttaagatgaaagatcttgggaagctctctttgtattatgaatcaccatactaagagatcgctttcaaggtattctaaggttgtcacaagagagttatatcaataaggtccttaattgattcgacatgaaagatagtaaactatgagatacccctattgcttaaggagacaaatttagtctcaaacaatgccccaataatgaccttgaaagaatcgagatgcaaaagattccttatgcatcagcaattagaagtctaatatacgctacagttgcactcgtcctgatatacac

SEQ ID NO: 8838 - DNA, 342 bp, Glycine max
  unsure at all n locations
tggttntcaattacgagtgtcgcgatatcctacgggacacaataggacatccgaatcaaaagttattacgtttgacttttcctagagctcccggtttcaatttctagcgtctcgatatattaaagggctcaatcggacatccgagtcaaaagttattatcggttaactattcttagagctatacgtttgaattacgagcgtctccatatattatggcactcaatcggacatccgagttaaaagttattggcgtttgacttttcttacaactatcgttatcaatttatagcgcctcgatatattacagggctcagatagacatccgagttaagagttattgtc

SEQ ID NO: 8839 - DNA, 294 bp, Glycine max
agctttataagaccgtggaattagccattgttgtgtggcctggatcttctgttggactagtttgacccctttgcttgacaccatgtggcccatgtactccacctgggtttgggcgaaggaacatttcgagagcttaatgaagaactggccctgcaacaaaaccttgaaagccaattccaaatgaagttaatggtcattgaaggagctactataaactagaatgtcgggatgtggacatcaaagcccaagcccatgacataccaccagcctcaggcccatgacttgatggaagcc

SEQ ID NO: 8840 - DNA, 437 bp, Glycine max
  unsure at all n locations
tctacatcctgtattccattgatcccagcatcttttgcaattgacttgtccccaataatgtaactgaaggaagtgtgtattgcaggtaactaagaaattcaaaagattgacaaaaatctaagaatagtatgcatgcaacttgcaaaacttagaacctgctgaggtcatctgaatttggagggaagtagtaaagcagcctctgaatcaaagaggtagcagctttcctgttgcgtgcaattagaacagcatttggccccgcatcaaatgtataagctacctgcaagtcaaaattattaaatatttaaatagaaatatagagatttatacacatttgtttgtttacatgagcccgtgtaattatcacaactaanaaagatgtatatatacacattattcaaatggnggttataccgaaagttgatgtggtgcacgggcat

SEQ ID NO: 8841 - DNA, 412 bp, Glycine max
gagtatgcagtgaacaatggccctgactttgaagctatgatatgtgaaaaacaacgggataatccttcctatagcttcctctttggtggggaaggtcatggttactaccgttataagctttggttatcaactcgtcccccgggtggtccattcaacccgtcttttccatcatcttccatgcccatgatgcttcctccaaatccaatgatgaatctgtctcctgtaaatgtttctccgatgaaccctgcaggaattggttcttcaccttcgatgctaggtccacctcctttccaacagttctatgatcaacaacaccaccatcaacatcctcagtcttttggacttcctggtcggcctgagtatgatcccgcatccaagtctttcacagggatctctgggccactctcatctg

SEQ ID NO: 8842 - DNA, 300 bp, Glycine max
agctaatgctgtaaacatttattataggccttctcagtagcaaaaccaacaatagcagaataattatgatctttcaagttacagatgcaatgtaagttggaggaatcatccaaatctgagatgggcaagttcttcacaacaacaacaggctgtgcttctctttccagaatgttgtatgtccaagtatgccacatgtttctcctccaatgtagcaacagcagcagcatcaacagtcacaataaagacaacaagcagctgatgcttcttctcagcctttctagaagagtttgtatgcaaatg

SEQ ID NO: 8843 - DNA, 420 bp, Glycine max
  unsure at all n locations
acactatgaaactaagcttaatggaggaaaagaatgatagagaggtggaaggagcacaaaattntgtgcctcanatgaggtctgagatttgaagtgtaattctaaaatgaacaaatttgaaaaaatgcacacacaatgcctttatatatagccgaagtgtcacacaaaattggagtggaaattgaatttctattcaaatttcacttgaatttngaattgaatttgtggagccaaatttggagccaaaatttcactaattatgattagtgaattttagctatggttcagcccactaatccaaaatcaagtccaagattctccactaagtgcgcttaggtgttatgagacatgtaaaacatgaaggacatgtacaaagtgtgactatatgatgtagcaatgagatgtagcaagcaaatgttc

SEQ ID NO: 8844 - DNA, 420 bp, Glycine max
  unsure at all n locations
gggctaatctttcctgtaactnttccttgtcataatctgaagtgctattttcaattgctgatctaatctgcttgttaaaattcatcacaagaaacaagtaaaaaacatcaataagtatcagtacatgaaacagaatacaccaacaatggtagaataaaaattaataatagtggaagattcaaacagacctgctcacttctttcttcaattgctttcttatcaccagctccatcaaggatgacagtgtcatccttagaaattgttatctaaaacatacagaaccttattcagttttctaaatcatttaaccttgaaaatagtatgggcatagaatagagaaatttaatgacactttctttaaaaagcttaaacacaagtagntgctccaggagaanagtcagcatcctataccaaaactat

SEQ ID NO: 8845 - DNA, 422 bp, Glycine max
  unsure at all n locations
ntggagtttccaagtgccaattcgtcttcttctttagtccagtcttcttctggcttcaattcttcagtgggctttccttctgtgtccagcatcttgggatgttcccagcctttgatgacagctttccaggttctgctatccagtgatttgaggaaggccaccattcttgctttccagtattcatagttggttccatctaggattggtggtctgttcactggtcctccttctttctccatgttcatcagaatttatctccctagatctcactctgtgatttcgagtgttggctctgataccaattgaaattctgataccaggggacagatgtcgtaccggatgtcacgacatcacgcttcaaaacatgcagattatatgtgtccgtatgaacagattaaacaagtaaataacacaagagaatt

SEQ ID NO: 8846 - DNA, 281 bp, Glycine max
tagttcctagcttagcccataatgttttccagaagtgactaatgaacttagcatctctatctggcacaatggtcctaggaaaaccatgaagtctcacaactggcctaaaaacgagttttgagatgtgggaagcatcatccacctttgggcatggtataaagtgtgcccatcttgctaacctatccaccaccacaaagatagagtctacacctctttgggttctagggagcccaaggacaaagtccatactaatgtctacccaaggtgcacatggaatgggt

SEQ ID NO: 8847 - DNA, 371 bp, Glycine max
  unsure at all n locations
tctatctttgttctttattntcttaacattatagtaaaagcctaagaagggtaattcttaattagtaaaggtctagtaataattaatttaacccccccttcttaattattatgaggccacttgatccaacacatcagaggagctattataccctcctgcttggccttctgaagtccatgacccatttgctctgacctttagaaacaaagttgagctagtatcctgaaaaccaccaaaactaaagctcctcaacacccaacaaaatgacctctcctcatttagcccataaactgaagccacacaatcacaatctgacaagcatgcactcccacatnttgacacnatagaaatatcactatattagctattac

SEQ ID NO: 8848 - DNA, 436 bp, Glycine max
tttgacagttgtgacatctcagtttcctcttgtcaaacttccattccttgcttccattggagctatcattttgcttttgtgattaatcacttttctttcctttagaggattcactacttgcattagatccttgatcctggtgtttttgattggtgcatgacttatttcctttccatggtcctttgccttttcctttgtaagtggattgtgcctgaagtgcctgttcttgattggatcttctctcattgatccttatttcatgtgcctcaatagagcgctgcaattcttcaatctccatgatgtctaagttccttgactcttcaattgcaacaaccacatgatcaaatcatggtggcaaagtcctcaagatcttgtctaccacttgttcatcagagatcttgtctttacatgacttcatgacattgaccagttcttg

SEQ ID NO: 8849 - DNA, 321 bp, Glycine max
tctacatttctctccacacccattgcatgtcaaactctaattcttctccttctttggggggactgctggcaccatctttcaatctaaatggccaatgaatctgcattttatacattagagcctctgtgtctgttactacacatatcaaaccacatgcaaaaatagatgccatttaagcataatagaagctcattaccaagttaagatcaacgtaatcaagttggagttcttgaagggtattgttgatagcaggtctaaccctttcagggatcaagtctgtgcacccacctcatgcaataatttacacacacacacacacac

SEQ ID NO: 8850 - DNA, 439 bp, Glycine max
  unsure at all n locations
cgcttattgngagccatgccaatggtagattgaaaactattgttataagcgaactctatcaacggaagagaactctcccaactccctttttgctctacgacacacgccctcaaaaggtcctccagcgactgaatggtccattcagtttggccatcagtttgagaatggtaggcagaacttagtctatgcttggttcccaatgctctatttaggctctcccaaaatctagaggtaaacctaggatctctattagacactatgctagatggaacaccatgtaatctgacaatctcactaatatacagggaggtcaacttcttcaaggacaatatgatattaataggaataaagtgagcatacttggtcagtctgtcaacaataacccagatagaatctaaacctctgggggttctagatagtcctacaacaaaatccatgg

SEQ ID NO: 8851 - DNA, 324 bp, Glycine max
  unsure at all n locations
agctttgagaggagtnttgggacttaccgtgtactatagaagattcatgtgcaactatggacaaatagctcgacccctagctgatttattgaagaaggaaaatatcaagtggactattaaaagtattgaggactctacccagttgcagcaggctgtcaccacagcttctgtactatcaatgccaaatctttcaaaaaaatattccatagaatgtgatgcatcgggaaagggagtaggggctgtgttaactcaagataaaaggcctatcgcttaattcagcaatgctttggcagattcaacactcactttattaatttatgaaaa

SEQ ID NO: 8852 - DNA, 426 bp, Glycine max
  unsure at all n locations
tgctgagggtctccgtcaaggccagtagcttgttntgggtcagcattgcatcttgggctgtgagctccagaaggcttctctttgttggtgtgtatgctcaatcatgaaggatggtgtgatcacaggccgccatgttctctataagctctattgcctcctctggtgtcttcaacttgatttttccccttgcggatgcgtcaaggagttgttttgactgttgtcacaagccatctatgaagatgtttagttgcaccagctcgctgtacccatgtgtaggcatctttctgagtagtccgtgaaaacggtcgagcgcctcacagagtgattcattgtggaattggaggaatgaggatatttccatcttccccttgataagttttgactatgggaagtatttcttcaagaacttttcaacatctttctcct

SEQ ID NO: 8853 - DNA, 323 bp, Glycine max
tccccaggccatggaagttgcctctaatagggaacctgcatcaactggcaggggcaggcacacttccacaccacacccttcaaaatctatcacgcaaatatgggcctctgatgcaccttcaacttggtgaaatttctgcagtggttgtgtcatcctctgacatggccaaggagataatgaagactcatgatcttaattttgtgcagaggccagaactcctttgtcctaaaatcatggcctatgattcaacggatattgcctttgctccatacggtgattactggagacagatgaggaaaatatgtacgctagagcttctcagt

SEQ ID NO: 8854 - DNA, 361 bp, Glycine max
  unsure at all n locations
tcttggggttggctggctattataggaaattcattgagggattntccaaattggcattgcccctaactaagttgactcgtaagaacgagaagtttgtctggaatgagaagtgtgatcaaagtttccaagagttgaagaggcggttgacgacagctccggtgttaattttacccgaccctaagagaccatttgaagtgtattgcgatgcaagtgggcaaggcctgtggtgtgtgttgatgcaagagggaagagtggtggcttatgcttcacgtcaattacgtcctcatgaagttaactacccgacccatgacttggaactagcagcggtggtctttgccttaaagatttggaggcattattt

SEQ ID NO: 8855 - DNA, 400 bp, Glycine max
ccgcggcatgcaagcttgttgacttgtgtaaagtttttatttgttagagtatgagaaacctttatgaaagataatcttacttgaaccaataagattaccatgagtgataaaactatcattctaaatatttaatgcagtacatacctgatataagtttaaatctattagcctacctatttctataatgattattaaataatttcaataaaacttatttcttttaaaaaaaatccacccttatatcatatttgaatccttaatcttgaaagtaaaataatttcaataaatactcttcttcctcacgtgtctttaagctataaataaataatatttatatactaattattcattcaaagaaaatagtggtataaattggagaaattgcattgaaaattgacac

SEQ ID NO: 8856 - DNA, 450 bp, Glycine max
gacactatataatactaagctgtctgacaacttggcgatgattgatttccaagtctccaacctccacggaattgtatcaatggcgatccccaagtacacacaaggaggagatacacttacacagttaaggaattttgcagatttctctacaacatccctagccactccaaagcctccaaatttactcttctgaaaatccactttcgagcaggatacaagttcaaaagatcccatcatacttttgaagactatcacattataaacactaaattttcccacaacaattatatcatccacatattgcaatagattcatctcttgctctttaacaccccacttttagtcctctatagagaattttagcaaccgcttccctcatcaaaccggttagccccttctttacaatagtgaatagaataggaacacacgagtcttcttgtctaaccttat

SEQ ID NO: 8857 - DNA, 409 bp, Glycine max
  unsure at all n locations
gttttaagttcttcctcaaaactgtcctaagcatagttcccaatgtcctattaacaactgtcgattgcccatcggtttgtgggtgacaagtggttgaaaataacaatttagtgcccaacttgccccacaaagtcctccaaaaatggcttaggaacttagagtccttatcactaacaatgctccttggtaaaccatggagtctcacaatctccttgaaaaacaaatcagccacatgggaagcatcatcaacttttttacatggaataaaatgagtcattntagaagacctatcaacgaccacaaaaatggagtctctaccactgcttcgttttggcagccctaaaacacaatccatggataaatcaatccaaggatactccggaaatggcaatggaatatacaatccatg

SEQ ID NO: 8858 - DNA, 441 bp, Glycine max
tgtagaacggatggacatgatatatgtcagggtgttgggctggttcagggataaaagggaatgtccaccattatttccatgacacaaatgcaataatgatgatttggaaattttatgcaaaactagtcatgcatgcacctatgtggacacaaatgtccaccattatttccatgaggtattttgctacctaaacatatgtatatttttgtgaggtattttgctatatacatgcgtgtccaaggtatcttgctacctaaacatacatatatatgttttgtgagatatttttgctatatacatgcatatccaaggtatcttgctacctgaacatacacatatatattttgtgaggtatctttgctacatacatgcatatccaaggtatctttctacctaaacatacatatatatattttgtgaagtatttttttggttacatac

SEQ ID NO: 8859 - DNA, 335 bp, Glycine max
  unsure at all n locations
acccagagncacctgctgcatgcaagctatgctgaaacatttacaatagaccttctcaacctcagtagcaaaatcaaccacagctgaagaatgatgacctctccagcaacagatacaaccctggatggaggaatcaccctaatctcatatggtctagccctcatcaaatacaacagcagcctgctccttccatacataatgctgctggcccaagcagactcgtcatttcttcacctatccaacaacagcaacagtccgcgaaattagcaaacttgttgaggctgctccacaaccttcccttgaagaacttgtgaagcaaatgactattcacaaca

SEQ ID NO: 8860 - DNA, 425 bp, Glycine max
agcttgctgcaccattgacagatttacttaaaaaagaagcattcaagtggacaccagaggcagagacaacatttgttcaattgcagaaagtcatgacttcagctccagtgttagctcttcctaatttccagctgcccttcattctggaaactaatgcttccaacactggtattggagcggtattacatcagaatggccatccaatagcattttttttccaagaaacttgcacctagagtgcaaaagaaatctgactaatttagagagatgttagcaattgttcaagctatagctaagttcagacactacttgctgggacacacaattattatcaaaactgatcaaaaaagcttgagatcattgatggaacaacccctacagacacctgaacaacagcagtggttacacaggtttttgggatatga

SEQ ID NO: 8861 - DNA, 328 bp, Glycine max
actaatataatctcagttgtttaacatcaaaatgatatgtaaatggtttagactcatcttccatgtgatcagagagatatgaaaggcatttaaaaacaagctctagatgcaagtgtgaattggcttctacaaagaaaggaaggatcttctggttaatctcaattcaactacaccctggattcttttttaatacaagctctttcatctttgatctcaccacactgtacttcatcccacttatgtgcagaagcatacatatttgacaagagaatatacgtcgatgaattacacgatccttacaaaatcgttcttgaatttcagttccaat

SEQ ID NO: 8862 - DNA, 394 bp, Glycine max
cacctgatgagtgctcgttgagtgcggttgatgcatgtcttgctgcgaaactcctgctcgtgattcagagtggttgcaatcctataatgaaacaacagtctgctgagctatagaagctgtgtagtttaaattattcagacactatctttatttccaagtgcaagcttaccataaccattcaatgatcatggactacatccatctggtggcgccaacaatttgaaatttgtggtgcaagagtagctaagaagatcagttgcatctcaagaccaccgaactctaataaacgccaagacaatgatcatggggttgaggtgcaagtctctccttgatatataccttatattttgattcccacaatcgatttgaatgaagaataattttaatgtggaca

SEQ ID NO: 8863 - DNA, 406 bp, Glycine max
  unsure at all n locations
tcaagaaagtcctctccaagagtgactaatgttgctgttcagaaggctgtgagtgcttattttctgtagttttctgttcaactgcttaattcagttgagcaagatttgttaggaaatttattgtcttgttcactgttattgatgacatcttttattctcttctcaggctgctgcattgaagggttctgatcatcgtcgtgccacaaatgtcagtgctagattggatgctcaacaaaagaagttcaaccttccaatcctcccaaccaccacaattggatccttccctcagactgttgaactgaggagggtgcgtcgtgaatacaaggctaacaagtaagatatgccttgagttgataggttggcttgttttcttgaccattttggctnttactgacccctttgattt

SEQ ID NO: 8864 - DNA, 398 bp, Glycine max
tctggtgggacatcttgacttgctttccaatctgacattcaccacagattctgccttcttctattttcagattgggaatgcctctaacagcacctttgtcaatgattttcttcatgcctcttaagtgcagatgtccaaatctttgatgccatattttgacttcatcttctttggaggatagacatgtggaggagtaactggtttcttgaggtgtccataggtaacagttgtcctttgatctgctgcccttcattagaacttcactcttctcatttgtcaccaagcattctgactttgtgaagtttacattgaatccttcatcacacaactgactgatgctgatcaagtttgcagtcagtcccttcaccagcagtactttgttcagactaggaagtcca

SEQ ID NO: 8865 - DNA, 412 bp, Glycine max
  unsure at all n locations
ntagccttaggttgtccaccatgttgctccctctatatctctaacaagaagaacttaattagttgatcaaaaatgatgtttggacacttgttctgaagccaaaaaataagcgcatcattagaactagaacaagatgggtcttcagaaacaagttggatgaataaggaaaagtagtacacaacaaagcaaggctaatagctcaaggctataataagcaagaaggcatagatttcgttgaaactttttctcctatagttaggcttgaagttataagaatcatgcttgcctttgttgctcacaaaaacattaagctttttcaaatgaatgttaaaagttcctttttaaacagtttcattgaagaggaagtttatgtcaatcaacctcttggtttgaggatcaaactttctcatat

SEQ ID NO: 8866 - DNA, 393 bp, Glycine max
  unsure at all n locations
ttaaaatttgaatttgaaattctgataccaatgacagatgtcgtaccggatatcaaagacacaccagagattactctctgaacaatagagatcaactctacacattcaggtccaacacttgatgttagggtaacatcaaggtggctcacaaaacactcaagtcccaaaactcacaaaataactcttcaatctcggacttggtagaaaactcgtgcagccttcattgtttatatagcagtgtgcgtatctgggctgcaacaacttgcgctggataagatctatcattctcctgaaaatctgcacttaaagatctaaaagataaagtttgatcttttagttnttatctttaatctttaatccctgaacgaaactattcaagttgtaattcgaact

SEQ ID NO: 8867 - DNA, 403 bp, Glycine max
tcaattctgaatttcgagtgtctcgatatactatgggtcacaatcggacgtctgagtaagaagttattgtcgtttgaatttgcatagagcttttgttttcaattttgagcgtctcgatatattacgagaggtaatcggacctccgagtaaaaagttgttgttgttagaatttgctcaaaacttcttttctgactttcgagcgtctcaatatactacgggacacaatcgcaaatcagagtaaaaagttattgtcatttgattttgctcaaagcttttgttctgaatttcgtgcgtctagatatactacgggacacaatcggacatgcgagtaaaaagttattgtcgttagatattgctcagagcttcaattttgaatttcgagcgtctcgatatattgcgggat

SEQ ID NO: 8868 - DNA, 391 bp, Glycine max
  unsure at all n locations
ttgacgtttgtgttgaatgcattaaaggtaaacagactaaaagcaagatattaggtgcatatagagttacagacatcttggaattgatacatacagacatttgtgggccatttcctacaccttcatggaatggtcaacaatattttatatcattcatagacgattactctagatatgcatacttgtttcttatacatgaaaagtcgcaatctttggatgtgttcaaaacatttaaagttgaagttgaaaatcaactcaacaaaagaataaagtgtgtcaaatctgaccgtggtggtgaatactatggcatatatgacggttcaggtgaccaacgtctggggccttttgccangtacctagaggaatatggaattgtcccacagtacaccat

SEQ ID NO: 8869 - DNA, 406 bp, Glycine max
tgtccaaaatcgtgaagtaaacctcgggtccctgtctgatacaatactggaaggaattccatgtgaccttactacttctttgatatacaactctactaacttctccattttatatttcatatttaccgggataaaatgagcagatttggtgagtcaatctactatgacccacacagcattgtgtccacgactcatcttgggtaaactagatacaaaatccatagatatactctcccatttccattttggaatttccagtggctttaattctcctgatggtcgctggtgctcagccttggccttttgacatgtcaaacattttgctacatattcagctacatccttcttcatgccatgccaccaaaaacttctcttcaaatcttggtacatcttagtcattcctggg

SEQ ID NO: 8870 - DNA, 173 bp, Glycine max
tcaaccaagaagggatggtccatttcaagtacttgaatggatttatgacaatgcgtacaagattgaattgcccggtgagtataatgtgagtactacatttaatgtgtctgacttaactctttttgatgtaaatggagaagccgatttgaggacacacccttccgaagagggac

SEQ ID NO: 8871 - DNA, 401 bp, Glycine max
tgtagttgctggaaatccttctggaagattagtggatatcactgatgggtggaacacagcttctgttgtgggaacattctcagggcctaagcatcgcttggccacagcagcaactgtgaaggacgggaaggtgtatctgaaccatatggttggaattggatacccaaaaaagaagcatgcaattgttgaggcagttttttaacgcatactttctagaaatctaaacattggggaactgggaatgtggggatcatacatttacaggacgtttagttgaaatttggtgtacctttgcttatttatgtttggttttgttgcattacttggcctcagacctcaatgcttttcccttgaatctcaacctaacataagatgctcgatcgagtaagttaattaccctt

SEQ ID NO: 8872 - DNA, 407 bp, Glycine max
tatcaaaattgaaaatgatggttcctaatctcaagaatcttagagtcttagattgtgagtcttgccaactaggaaaacatgttaggtcatcatttcctcaaactgtacaaagatgtaactctgctttctctaccattcactctgatatttggggaccaagtagggttacatcttttgattttcggtattttgtaaccttcattgatgaatttttcagatgtacttgggtttatttaatgaaagacagatctgaacttttgcctatattcatgttgttctttaatgagattgagaatcaatttggcaaatcaattaagattttcaaaagtgataatgctaaagagtatttctctcatgatctctcttcctttttatcttcaaaaggtattttgcatcagtctacatgt

SEQ ID NO: 8873 - DNA, 409 bp, Glycine max
  unsure at all n locations
tggaaggtagtcatacctcacaaaatatatatatgtatgtttaggtaggaagataccatagatatgcatgtatgtaaacaaaaaaatacttcacaaaatatatatatatgtatgtttaggtagtgaaaataccttagatatgcatgtatgtaaacaaaaaaatacttcacaaaatatatatatgtatgtttaggtagtgaaaataccttagatatgcatgtatgtaaacaaaaaaatacttcacaaaatatatatatgtatgtttaggtagtgaaaataccttagatatgcatgtatgtaaacaaaaaatatacttcacaaaatatatatatatgtatctttaagtaggaagataccttagatatgcatgtatgtaaacaaaaaaaatacttcacanaatatatatata

SEQ ID NO: 8874 - DNA, 401 bp, Glycine max
  unsure at all n locations
tgtaggccttggatcttcttcatcaatggagtcttttgcttcttaaagtttgatagcagcgtaatggagaaggagaagggtgattggagatgccacttcaaggagaagatgagtctagaagaagctcaccaccataggaagccatggataagagcttgaaggtaagagaagatgaatggagggagagggagaaagggagcatgaaatttagtgcctctaaagaagtttgaactttgaagtttaattctcaaatgatcaaagttgaaaaaatgcacacacatagcctctatttatagcctaagtgtcacacaaaattggagggaaatttgaatttctattcaaattttactagaatttgaaattgaaattgtggagcccaaanttcactaattatgattagt

SEQ ID NO: 8875 - DNA, 411 bp, Glycine max
  unsure at all n locations
ntgcttgcatttttcctttgcagttaaggaaataaagcccaatcaatacacatttggtagtgtgttaaatgttattgctgctgctgaggatatatcattgaaccatgggcaacgttgccattctcacttgcaaacttggtttaagcactgatccaattgtttcaagggctctgcttgacatgtatggcaagcggggagacataattgaatctcaaagagtgttcaataagacacttgaacgaacccagtttgcttggacaaccataatattttcctatgcccaccatggagactttgagtaagtgatgagtttgcatacagaaatggaaaggtaaggaatcaatctagactccatcactttcctttttattttggttgcatgatgtagaaagggcatggttgatgtctttg

SEQ ID NO: 8876 - DNA, 411 bp, Glycine max
tcaacatcagactacttccagggtgctggaactgcttcacatggacttgatggggcctatgcaagttgaaagccttggaggaaaaaggtatgcctatgttgttgtggatgatttctccagatttacctgggtcaactttatcagagagaaatcagacacctttgaagtattcaaggagttgagtctaagacttcaaagagaaaaagactgtgtcatcaagagaatcaggagtgaccatggcagagagtttgaaaacagcaggttcactgaattctgcacatctgaaggcatcactcatgagttctctgcagccattacaccacaacaaaatggcatagttgaaaggaaaaacaggactttgcaagaagctgctagggtcatgcttcatgccaaagaacttccctataatct

SEQ ID NO: 8877 - DNA, 405 bp, Glycine max
  unsure at all n locations
ttgtaaataagcagataacatgaatggctataaaattcataccgccttggcttccttgtactcattcactgccttgtgggaagcataactgaaattcacatcaggtcccaactcggggacaataaagtggctggatcaatgcacataaatcaatcaggtcagtcatggcatcaccagtaattccttcgtttttaattataaaactccttttagaaatttatttatttccttttatatttttttttaatttttaaatatattatttatttattttcactatatatctttacttaattattttttttcgaaacattaataagaaacaattaagtggacagagagataagaaaaaaatgtaattntggcatgatagtataaataattgacagatttaatataattaac

SEQ ID NO: 8878 - DNA, 390 bp, Glycine max
tcttcccacaaggaaagaatacattgagagccaaatgtttctcattttcctttctttgatatattgatcaaattcttcctctgcctctgtgatctttatctctatagtttctttggctttcttctgtgtcaggcatttgggaagaactagtgcatcttctatgaaggctgagccaccctgtgcaatgaatgggcatgtggcatgcattgcgtcaccaacaattttcactgtacctttcttgaatttgttaaagaccaagtccaatggtgccctatacttcaactcagtaaaatgtaagaagctcaacatgcaatttcgtattatctccactatcccatttgggaaacctttcattgattctattaatgactgtctaataagaattgggtc

SEQ ID NO: 8879 - DNA, 515 bp, Glycine max
agcttgtacatattgccaaattgataaaaaaatttttggaattttataaaatctcttacctttctatgggatacatttgttgatatgaacaagacctctaagctttaccttttccacgagatgaacaaccaaatgaaacatgacagtgaagaataaaggaggaaatatcatttccatgtggtataaagtgagaacaacttgattttgtaattagtctaaatccttaactttcaataatttaaccacatatttttttaaagaatgagcataactcaattaatactgttgaaacctcatctgacaatgtagatcacatggctaatggtagcaattgccataccaatatgtgacaattgtgactcttcaacgttccagtcaactttagattttctgagtcgatacaccaagaaatgttgcttgaataaccatctgacacaatgatattctttaaggtgttaaaaatgttctattacctttactatccaaagtaaagatagttggagaatatcttccat

SEQ ID NO: 8880 - DNA, 654 bp, Glycine max
agcttccaatacaatcttgatagtcttcattcagctgacacttcctctcaatgcatattgcaagctgaataacaaagcaaaaaaaacataaattttatcactgtgtacttcataacatataaagaccaaaacatccaagctcactgaaatatttctagtttttcttgtaataacttgtctagaggtataacaatagcaacaacaaaagttttatcccaccaagtgagatcagttacatgaatcgcacaacaccaacttctttcgatgttcttctagtctccctatcctccttttcatggggcaaaaaaccatgcaatatgctctcctcactgattattccttggtatagaggtagctcaatccaaggaaggaattatcctctcacagaggaaatatgctttggatattttggaagagataggcatgattaattgtagacccattgatagtcccatggatccaaatcaaaatttaattggtgaaactaggtgaaccatattcagatccagaaagatatagaagattagttgggaaactcatccatcttactataaccagacctgacatttcctttgcagttgggtcgatagtaagttatgcaatctccttatgttgatcactaaaaggctgttcttcgcattctcaggtatatta

SEQ ID NO: 8881 - DNA, 528 bp, Glycine max
agcttttgatgcaacctcaccctcatggggatggttatggagataaaagtgtgtgtgttattcccatagtgggtcttggaggcatggggaagactacacttgcaaagttggtgttcaatgataagaggattgatgaacttttccaattaaagatgtgggtgtgtgtctctgatgactttgacattaggcagataattattaaaatcatcaactgtgcttcagcttctacctcagctccatcaattgctcttgctcaccatgaaagcattaacaacttatatattgagcagctacaaagtcagcttagacacaagctttctggtctgacgtatttactggtcttggatgacatatggaatgatgatcgtgcaaaatggatagaactaaatgatttaataaaagttggtgcagtgggaagcaaaattttattgacaacacggagtgactcaatttgcttaatggtgggcactgtcccctcttatgttttacaatgcttgtctgtgtagaattctttgtcctattttcatt

SEQ ID NO: 8882 - DNA, 313 bp, Glycine max
ctgagaaagtctttccacacataatacaaaaaggtaactggatagaggatatctttgcctaagacccctcgaaggattgaaagcattactcttctccccattcaatagaacttggaaagatgtgaaaggcatacactcgtaaacaatactaaggaaatggtcatcaaaacccaaatccctcaaagtgtgaatgacaaaatctcactaaatgctatcatatgccttctctagaacaactttgatcgccataaacccttttctccctttagatcttctcgtcttatggaaaacttcttgagccatattaccatta

SEQ ID NO: 8883 - DNA, 412 bp, Glycine max
  unsure at all n locations
tcagaattcaatttcgcgcgtctcaatagattacgggactcaatcagacatcctattttaacattattgtcgntngaattagctcagagcttcagaattcaatntcgatggtctcgatatattacgggtctcaatcagacatctgagntaaaaaagttattatcgtttgaagttgctgagagcttcaacattcaatttcgagcgtctcgatgtattacgggacttaatcagacatccgagtaaaaagttatcgtcgtttgaattttggtcagagcttcaacattcagtctagagcggttcgatatattaccgggactcaatcagacatccgagtaaaaagttattgtccgttgaaaatcctcagagcttcggtattcaatttcgagcgtcttgatatattaccggactcaat

SEQ ID NO: 8884 - DNA, 450 bp, Glycine max
agctttgagcaaattcgaacgacaatttcttttatcttggatgtctgattgagtcccgtaatatatcgagacgctcgaaattgaatgatgatggtcgttgcaaattgaaacgacaataactatttactctgatgtctgactgagtcccgtaatatatcgagacgctcgaaattgaatcttgatgctctgagcaaattcaaacgacaataactttttacttggatgtctgattgagtcctgtgatatatcgagacgctcgaaatttaatacgaaagctatgagcaaattcaaacgacaataattttttactcggatgtctgattgaatctcgcaatatatcgacacgctctaaattgaatgttgatgctctggtcgtatttaaacgacaataatttttccggcagcattgcacaattatttacaatccctggtcgatattatttatttatg

SEQ ID NO: 8885 - DNA, 595 bp, Glycine max
agcttgcttaagcaaggaagttgcgataggcctatgtccatatccgaatataaaagacccgaggtgcaatagaagaggtattttggtgctattcagacaacaacattattcccaaggctcttagttttgatttattacatgtttgtatgcttgatcgtgagaattgtaatcaagctctgagtagtgaatcttttcatttgtcggggttggataggctaaacttaatttcgtgtaatactcttttttaatatagttattcatatttattactcttcttcttctcttaatgcttgttttagattgatcacatgttatttaatattacgaattgatagtttagttggtagacactcgtttgattcttgaactgagaataatacctaatgggattgattctagacatagttcaattttaattagactcccttaattcttaaacattaatgttagttatttagattgattttctaagacattaggaattaatctaaataacttagacttttcacctaaggcattatggttggaatataactgtgaattatggataaattgcgtgaattactagattgatcaggatttttgtattgaaaaa

SEQ ID NO: 8886 - DNA, 558 bp, Glycine max
agcttgaaggtgtgtagcccaccatcttttctatagtttaatactggtaatgtgtctactatcattgtcatcattttttttcgtcattgaggtgccacttaagctgccaggtctctccacctttgggcgtattctttgaaagatctgtgcccctttttgcacatgttctgttgttgcatcctatccggaaccatatccaaattgtgctaatactgcctaacgaaggcaaacattatgtccttccaagagtggactcgagaaggttccaggttggtgtaccaggtaatagctaccccagtaagattttcttggaaggaatgtatcagcaattcctcatcttttgcgtatgcccccatcttccgataatacatctttagatggttcttggggcaagtagtccccttgtacttgtcaaagttcagttccttgaacttgggagggatgacgatattgggttctagggacaactcttctaggttagcaatggccttaatttttacattcttcaatggccctggacctttcctctagatgatccaactttcctatttctgtcat

SEQ ID NO: 8887 - DNA, 623 bp, Glycine max
agcttgaggttaatctcaaagctatataaacataaccatgtaagagaattaccaagtatgccatacaaggatgatttactttgtgtggcatgtccaaagggaaaacaaatcaaaaactccttttcaagtaaaaacattatttccacctcaacacatctaaacttgttacatcttgatatgtttggtctagctagaacaacatccataagtggaaagaagtatgaacttgtcatagtggacgactactctagatgttgaattagagtgtttgaagatttgaagactagtcttaggatcttttgattttaataattttgcattgccaaacatatttctaaagttatggaatttttattggatgttcttagacttggcatgttgagtgttttaggctttttggttatcaaacatgagaagatataaaaagtttctaagaggcaataagttcaacactgtgtaatagattactgagtttaagtaatcaattacaaagtattagaacaagaaacaaaacttacctctcttgaaatattggcaagttttatcgaaataactgattactaaattttgtaatcaattaccacttattgaataaattaaatgcatctataacttatgagctc

SEQ ID NO: 8888 - DNA, 626 bp, Glycine max
agcttaggtgtaacaaatatccatgctttattttgtttcaaatatccattgaagtaaagtgcaattaggtgtaacagatatccatgcaagaaattgtagtgtggggtacaaaccactgtatatttatcatatgattattaatgtgtactcttctaaattaactaatacagctaggataagtaccaacttggttactggaaatatattatttcgttattttatggagcacttattagtggcttgtacagggtacaacttttattttatatgtcacttgaaattgttatttgcatgtaactttacaaataaaactgaaattggttggataatgtagtgacatgactactgttgaagattatgataaggggagatgacttcccttcaaaatttgactgggttgatgttccatatatgtcttatctgttgactcgctctaaatctggacaaatattactcttcagtaactggagagaaacagggtgaatgatcttatatggttgatttgttctataattgaatctccaatttataattaaaattgagtcaagctctacagcatgattattcatctactcttaaaatatgtaattactggtgaccatacaatcaatattgaattttatttt

SEQ ID NO: 8889 - DNA, 339 bp, Glycine max
  unsure at all n locations
atgaagctctgataccacttgttagacaagtgggctctgatatcttaagaaggcgggttgaattaagatattacaaactatttccccaataaaaattctatttcactttctattcaagttacaaattcccttaacaatgaattccttaaataatgattcanatagaacaatttgaatataaatataaaaaaataatagataaaagaggttaagggaagagaaagtgaanactcagaattatactggctcggncacacncttgtgcctacgtccagtccccaagcaacccgctggagaagtccactatcttgtaaaatccttctacacgtgctgaacaca

SEQ ID NO: 8890 - DNA, 563 bp, Glycine max
  unsure at all n locations
agcttgaaggtgtgtaacccaccatcttctcttagtagaacaccagtaacatgtctactatcatttttatcatctccctttttgtcattgggggtgccacttgggctgccagatccctccacctttgggcgtattctttgaaagattcgtgccctttcttgcacatgctctatagttgcatcctatctggagccatatcagaattgtactgatactgcctaacgaaggcaaccattaggtccttccaagaatggactcgggaaggttccaagttagtataccaggtgatagctaccccagtaagactttcttggaagaaatgcatcaacattttctcatcttttgcgtacgcccccatcttccgacaatacatttttaggtgattcttgggacaagtagtccccttgtacttgtcanagtccggcaccttgaacttgggagggatgatgacgttgggtactaggaacaactcttttaggctagcacaggcatagtctttgcccccttcaatggccctgagcctttcctctagatggtccatcctttcctttttccgtatacca

SEQ ID NO: 8891 - DNA, 537 bp, Glycine max
agcttgccgccacggagttttccgactatgctcttgtgttgtggaacaagctacaaaaggagagagcaagaaatgaagagccaatggttgatacatggacggagatgaaaaagatcatgaggaagcgatatgtgccagctagttactcaagggacttgaaattcaagctctaaaaactaacccaaggcaacaagggggttgaggagtatttcaaggaaatggatgtgctcatgattcaagcaaatattgaagaagatgaggaggtaactatggctcgatttcttaatggattgactaatgatatccgggatattgatgagctgcaggagtttgtagaaatggatgatttgcttcacaaagcaatccaagtagaaaaacaattaataaggaggggagtggctaaaaggagttttaccaactttggttcttttaattggaaagacaaaggtaagaaagatggggctgctacttctaatagatccacacctaccccatacaaaattcgtttcaagtgcctaaagggaccctttaaaagga

SEQ ID NO: 8892 - DNA, 231 bp, Glycine max
ctagtatgtcatgcaggatgtgtctgtttttattgatagtgtctgcctctcatcaataagaccagatatcacttgtctcaatctatttgctcataacttagctatcagcttgtacatacatcccatcaaggagaatggtctgtagtcatcaaatgactggcgatgtttagttttgggaattagagctatgaaagaagcataactgcttctaggtagctgtcatgcacatgg

SEQ ID NO: 8893 - DNA, 593 bp, Glycine max
  unsure at all n locations
aaaaaaaatcaatactaagactaaccatcagcatatttagcattaaactnttcataaatttagtatcttcattcaaccatcaaacgtattagagaaaagaagaatgatattttacctccaccttttccattttcataccggaaaagttagaacttttagataccttaggaatgacatcattagagtcttcaatgtattctccctcttcccaacatatcaagtcatataaaacctcaacttccgcagtgattgttgtatatcaccttggagatcctttgctaattaacaacccctgtaagctcagagggttgcacttaattctaattgagtgacctttataccctgagaatattagtaattggaaggatattttatatcatatctcctctattatattaaaattaagacagatgattaattatatctattattgaacanatctcctctttaaaatattaaagttattgagcattctatgacacctttctttatttaatttatcactattgttttaaagtattaagaatatatatatttagtgagatatctttatttaataaatataatattatgatatatagtattaacattat

SEQ ID NO: 8894 - DNA, 577 bp, Glycine max
agcttaatctcctccaactgcacaaggttcttattatttgaagagtatccttgtggaaccttcacccgaagaagacactgacaaaaacttatcttctcctttttggacaaagtatggcaagctgggggcaagtaaattttcttcccatcagaccttggatgcaactgtgatcgtatgcccatataagctagatcttgacgagtattcaagccatccttcgtcttgccttgaatgttaaggagcgtcccaatcacactgtcacaaacatttttctccatatgcataacatcaatacaatgtctaacgtcaagatcagaccagtacggaagatcaaagaaaatgaacctcttcttccataagcaaatcttacttttatccttcttttgggtctttccaaatacagtattcaggtgttgaacccgctgatataccttctcaccagtcaatggtatcggcacaatatcgtgctcttgacttccattaaaagccttttttagtcgtctgtaaggatgattgggtgttagaaaacggtgatgcctactatagactattattcttccatgttatagttgtatgt

SEQ ID NO: 8895 - DNA, 511 bp, Glycine max
agctttgaccaaaatcaaacgacaacaactttttactcggatgtcggaatgaatactgtattatatcgagacgctcgaaattgacaatatatcgagacgctcgtaattgaaaccaaatgctcgaagcaaattcaaacgacaataactttttactcggatgttcgaatgaatcccataatatatcaagacgctcgtatttgaaaacataagctctaagcatattctaatgataataactttttactcggatgtcggattgagtcccgtaatatatcgagacgcccgtaattgaaaacggatgctcgtagcaaattcaaatgacaatatcgagatgctcgaaattgagcaatggaagctcttgagcaattcaaatggtcataacttttatttcggaggtccgattgaggcgcataatatatcgagacgctcgaaattgaacaatggaagctcttgagcaaatcaaatggtcataacttttcactcggatgtccgattcagggcacataatata

SEQ ID NO: 8896 - DNA, 510 bp, Glycine max
agcttggagtcgctccaacaatttatatacttatctcctacctccttagccaatcttaggtgggctaaaagggtttcatactcaactttattattcgtcatctcaaactcgaaccttagggattgctctatgattacttcacctatgctttctaggatgactccagccctactcccttttttcattggatgaaccatctacgtatagcttccacctctcagattatggttctgtagtggttgtcattttggctatgaagtttgctaggcactacgccttcattggacctattggctcatatttaagcctaaacttggacaacttgatcgatcaggctatcattcgactcgtgagttctggtttcttcataactgttcagatagggtggtcagttcaaaccacaatctaatgactttggtaagaaagatgggcttagtctccctacaattgtgactagagcccaaggctaacttttcattatttgatatcatggctctgcattttttagga

SEQ ID NO: 8897 - DNA, 367 bp, Glycine max
agcttttagaggtatttgactaattagggtttattgtacctgacatattagggattagtgttacttgacaaattagggtttagggttacttgacaaattcgggtttaagggtatttgactaatgagggtttatgtgtagttgattaattagggtttagtgttacttggctagttagggtttgggttatttgaaaaaatagggttgcttgactaattgggtttaggggtatttgacaaataagggtttaaggttacttgacaaattcaggtttaagggtatttgactaatgagggtttgtgggtagttgactaattatagtttattgttatttgataaattggggtttatgacacttttattaatctt

SEQ ID NO: 8898 - DNA, 324 bp, Glycine max
atccttccagccgacccgcaggcatgcaagctttttagcaattcaaatggtcatttcgctacactcggatgtcggattcaagcgcataatatattgagacgctcgaaattgaacaatggaagctcttgagcaattacaatgggcataacttttaactcggagggccgcttcacgcgcataatattttgagacgttctaacttgaacaaaggaatctcttgaacaattcaaattgtcataactttttactcggaggttggattcaggcacataatatctctagacgcttgaaagtgaacaaaggaagctcttgagcaacacaaat

SEQ ID NO: 8899 - DNA, 366 bp, Glycine max
ataaaagctaaaactaggaactaggatgtttgattttgtgacacaaaaaaataaggcgctcgaaaatgaacagcggaagctcccgagaaacacgaatggtcaaaacatttcactcggatgactgattagaggacacaacataacgaagacgcataaaaatgaacagcggaagcttccgagaaaatagaatggacatacacttacacacggaagtccgacacggcgatagaatatatcgagactctcgaaatagaacaatggaagcgcttgagaaaaacgaatggccataacatttaaaacggatgactgaaccgtggacataataaacagagacgctcgaaattgaacagcggaagctcacgagaa

SEQ ID NO: 8900 - DNA, 458 bp, Glycine max
tgcaagcttataagtagctggcccaatttgatctattatctcattgggcccataatatttcttgttaagcttaaaggatcccctttgttggcctataatagaggactgtctctgaggctgaagtcgcaccatgaccaaatctcctatgtcaaaatggacatctctacacttcctgtcaggtgtgtgattcattgccagatgggccttctgaagcttcttctttatttcagcacaaatagattctctatctgataagaactcatccactgcctccactttcgacgagcctgtaatataccatgacaagattggtggtttcctcccaaaagtaattttgaatggtgaaacacctaagcctgagtgttgcgacgtgtttgtagaccattttacctatttaagaagcttgccccaagaagaatgtttcttttggacgacggcatgcatgtattgttcgatca

SEQ ID NO: 8901 - DNA, 380 bp, Glycine max
cctagtaactcagcttgccaagaatcataaatctgcacctgttgcaagaagttgtggtctatagtcttctgcatatcaccatatagatctctatccttctttgcagcaatctggagtcaatgagcaacctgaagcttatgctgccaatatttataatagacctcctcagcagcaaaaccaacaacagcagaataattatgaccttctcagcaacagatacaatccacgttggaggaatcatccaaatctaagatggacaagtcctttacaacaacctcagcctgtcccttctttccagaatgttgctagttcaagcaagccttatgttcctcctacaatgcagcaactacagcagtcacaacatagacaacaagcaactg

SEQ ID NO: 8902 - DNA, 531 bp, Glycine max
agcttcccaagtttttaagttattcctcaattctttttatgcaaagttccaaaagtcctattaacaacttccgtttgcccatcggtttgtgggtgacaagtggttgaaaataacaatttagtgcccaacttgctccacaaagtcctccaaaaatgcaaatcatcaagcctaggtataggatgcctatatttaatggtgatgttattaagggctctactatcagaacacatgcgccatgtcccatcctttttagggaccaaaatcactgggacagcacaaggactcatactatctcttacccaacctttgctaatgagttcatccacttgtctttgaatctctttggtttcttgagaattacttctataggctggcctattgggcaaagaagctcccggaatgagatcaatttgatgctcaattcccctcagaggtggtagtccacttggcacatttggatcctgcaaaagagttttaacactagaaggcacttcaaaatcatcaaaagtgttagtggtcaaatctgatttt

SEQ ID NO: 8903 - DNA, 604 bp, Glycine max
agctttacatgcctcatgacacctaagcacacttattggagaatcttggacttgatcttggattagtgggctgaaccataactgaaattcgctgatcataattagtaaaattttggctccacaaaattcaatttcaaatttatgtgaaatttgaatagaaattcaaatttccctccaattttgtgtgacacttaggctataaatagaggccatgtgtgtgcattttttgaactttgataatttgagaattacacttcaaatttcagacctcatttgaggcacaaaattttgtgctccttctcccttccctcatcttttcctctttcaagctcttatccatggctttctacggtggtgagcttgtgcttgactcatcttcttcttgaagtggcatctccaattatctttcttccatatccattccactgccatgatctttaagaatcaaaggactccattgatgaagaagatccaaggcctaccagctccacatggagctacatcatgtgatatcaagagcattttcatctaggtgatgttcttttgcttcctctatccttttggtcagtcaattcactttaattccttggtcttaatcttattc

SEQ ID NO: 8904 - DNA, 613 bp, Glycine max
agcttgtaggcactttgaacgcaatattctttttattttttatcctccaaatgactattttgtttttgtaccttgcataataggcactcgaagaatggtattcacatcccttagattgaatatttgattaatcacacccacgtttcaaactttcatggtgaagtcatccataatatcttgttacgtttgaagattctttcatctccatttgattataagagattcaatagtgagattttacttcattctcaactagggttcgttccaaatacctatattagtaccatttcccaactttcatttatatcctttctttatgaccattttagaagagaacatacttcaccatgtaaatgatgggttgtgccttactaaagcttccatacactcttcccttaagaaatatttagccttgatgactcttgacagcaaaacatttagcatagaaaagatcctccattattgctttcctaaccatggaaagttgaaagcaaatatatttctaaaacctaaccctaatttctctttataacacataaccctgtccaacaccatccaatttaacccctttcctacctctttttctctaatccccaccaatctgaatttatca

SEQ ID NO: 8905 - DNA, 549 bp, Glycine max
cttatttcttttccatcgattgttttcttttaccattaatagattagcaaatgatagcaagatcacagcaaacaacacattaagaaggaagtgtaaatgagatgcataaatatgaaagatgagtataaatcatagcatagagagcagtgggtcaataatagcaatcacggctaaaacctgcattatttcatgaagggataagttctgcagttcttacattacatcaagccaatgatataacatgacagcataccttgagacctgcaaaaatatatagccagatataattaataaaaagaaaatatagtatgatgaaccttaactaaaaataccatagaagtaagattcaatcaattgagacaaagaaacttctaacaaagaattatgaagcttcaatttttataacccgacatacatggtataaagtacaattaatattaaaatgaacagatacttcaatgataatgaaaagatacttgctgtataatcaaatttgcaacgagcagaaaacaaagaaggtataggaaaaaagtcccgtctttgcttggg

SEQ ID NO: 8906 - DNA, 373 bp, Glycine max
  unsure at all n locations
aagttttcttgacattgcttgttgcttttaggatggagattgaaagaggttgaacatatacttcgtgatgggtatgatgactgcatgaaacatcatatttgggtgttggttggaaaatctctaatacaggttagtgggtgggatgatgtagttaacatgcatgactttgttcangacatgggcaagcgaatagaccaagattcctcataagatccagggaagcgaacgagattgtggttaacaaaagatataattgaagttttataaagcaactcggtaagtgagaggatggcttcttatcttgattgttttttctatcttatctttacatcatagacaaagctttgtatgataattcggaatttttttaaca

SEQ ID NO: 8907 - DNA, 588 bp, Glycine max
agcttggacttcctgtgttttgggaacctctcttttctcttttgtacccaaacccaatcacctggttcaagcacgactttctttatgcttttgttggcttgccttgcatagctcgcatttttcttttcaatttgaaccttcacttgctcatgcaactttttcacatactcagctatagcctgtgcatccttatgcttaaacatagcaatgttaggcataggcaacaaatcaagaggagtcaaaggattaaatccatacactatctcaaatggtgaacaattatttgtgctatggacagcccgattataagcaaactcaacatgaggcaaacaggcttcccaagatttaagatttttttttaaaacagtcctaagcagtgtgcctaaagtcctattgactacctcagcttgaccatcagtttgtgggtgacaagctgtagaaaacaacatttattaccaatcttaccccacacggtccttcacaagtgactaaggaatttggatccctatcacatgcaatgctccttggtaatccaagaagccgccctatttttttgaaaaactgatcagccacatgacaagcgtcatc

SEQ ID NO: 8908 - DNA, 432 bp, Glycine max
  unsure at all n locations
cttctatggaatgttccacaagaatatgccaaatgaatattccaagaatatgccaaagaaatattccaagaatatgccaaaggggaggaaaactacacacatctcttcaatagctaagctcacacccatgtcaaaatacacgaaaatacaaaagaaagtccctactacaaagactactcaaaatgccctgaaatacaaggctaaaaccctatactactagaatgaccaaaatacaaagcccaaaagaaggaaaacctattctaatatttacaaataagagtggacccaaccttggcccatgggctcagaaatctaccctgaggttcatgagaatcttagggccttctttagcaactctagctcaatcctctggagtcttctatccaatacccttggnggataggattgcatcatcccctcccccttgaaaag

SEQ ID NO: 8909 - DNA, 392 bp, Glycine max
  unsure at all n locations
acttgatgccttggtcattctagtaacttatctngccatgaataaaaaatctgcacatgttacaagagtttgtggtctatgttcttctgcagatcatcatacagatctttgtccttctttgcatcaatctggagtcaatgagaaacctgaagcttatgctgcaaacatttataatagacctcctcagcagcaaaaccaacaacagcaaaataattatgacttttcaagcaatagatacaatccagattggaggaatcatccaaatctgaaatggacaagtgtcataccctaatttcgtccggngaccattgtttgatggcatgcaacctttggttgaccgcttcgaggtacttggcaccctttgctgcacaatacttgaagtttcgagacat

SEQ ID NO: 8910 - DNA, 448 bp, Glycine max
  unsure at all n locations
nggctatctgattatgcagtgcctcctagttgactagaggaacagttgttggtcgcccatgagcacactgcacagaaaattcccattttgtcaaaaatgctgcctttcctctcaatagattcacaaacatgaaaacgtatatcttacttggaaacaaagtgatgtatgttttagctcttcaactataagggaacattctgatggtagcaatgaatccccaaacataattgcaccttcaataaaagagcattatgattaaattaaaggaatactaccaaacataattgcaccttcaataaaagagcattatgattaaattaaaggaatactaccgatgactgcaatatgccctcccaaaataaggaaatctgacaggatcgggctgccaacagatgggggtttcatgcatagtattganggaaaacaaaggtaatatcatatgtttctg

SEQ ID NO: 8911 - DNA, 408 bp, Glycine max
  unsure at all n locations
agcttgttgtttgcgacgccaacggagactactcaacaccatcggattcatattcatgatcttgatcttgatcctcgtacgctgttgatgaggagcgggttgagtggccagtagttttgaaacggtgtagtgtggggccagtggagtgcactgttgaagaattaccaatggggcttccatccatgattcgtgcactcgactttcctagcgtcactgctcctccctgcttcttcttcgcagccatgtgccatttcttcagagccttgtttgtttgctcgtcaaatattgctgntttcatccttgaacccatctgcgtgtatgtatgtgtgtgtttacagtgatacattgtcgtcaattagaccaattcaaacgtttatagcttgcaaaagtaaatcgtgtaatattaca

SEQ ID NO: 8912 - DNA, 388 bp, Glycine max
attatgcgcttgaatcggacttccgtgtgtaaagttatgaccattggaatttctcgagagcttccaatgttcaatttcgagcgtctcgatatattatgcacctgaatcggacttccgtgtgacaagttatgaccatttgaatttctcgacaccatacggtgttcaatttcgagcgtctcgatatattatgcgcctgaatcggacgtccgtgtgacaagttatgaccatttgattttctcgagagcttccgttgttcaatttcgagcttctcgatatattatgcgcctgaatcggactttcgtgtgacaagttatgaccatttgaatttctcgagagcgttcgatgttcaatttcgagcgtcttgatatattatgcgcctgaatcggac

SEQ ID NO: 8913 - DNA, 339 bp, Glycine max
agcttctagatatattatgcgccggaatcagacttccgtttcaaaagttatggccatatgaatttctcgagagcattcgttgctcaatttcgagcgtctcgatatagtctgcgcgttaatcggacttccgtgtgacaagttatgaccatttgaattactcgagggcttccgttgttcaatttcaagcttctcgatatattatgcgcctgaattagacttccgttacataggtatgaccatatgaattgctcgagagccttcgttgatcaatttcgagcgtcttgatattatatgcgcctgaatcagactttctggtgatatgttatgaccactttaatt

SEQ ID NO: 8914 - DNA, 419 bp, Glycine max
acctgctcatatactagaccttctacattaatgttgctctcaagaggcttgaaggttgcagaaccttggcagaaggaaccaaggcaatcatcaacttgggtctcgaaaaggttcctgtccctggagagtctggctttccatttccgggccttttccctcttcctcaatcacacaaggaagcaggtgaatcctgtcatcactattctttcatcttgattttcttatgagcagatgcataattaagcttagttcaatcatatatatagtcaatatgttagtagttagctttagatttaattactcatttagtccttacagctacacaaactttacctttttagtttttatacttaagaattatccatattggtccctacccatacaatttttaatccggtgatataatttttatccctttt

SEQ ID NO: 8915 - DNA, 355 bp, Glycine max
agcttgtaaggttaaagtctcacgattgtcacgtgctcatgcaacaattgttagccgtggctatacgagacatctttccaaacaaagtcaggttagccataactcgcctgtgctttttcttccatgctatatgtagctaagtcattgatcctgtgaagtttgatgagctggaaaatgaggccgcaattatactgtgccagttggagatgtattttccccctgctttctttgacatcatgattcacttgattgtgcatctagtcagagaaatcaaatgttgtggtccagtttatctacggtggatgtacccggttgagcgatacatgaagatcttaaagggtatacaaaaaatcta

SEQ ID NO: 8916 - DNA, 426 bp, Glycine max
atgatgcaactgaggtaggagctattttcatgcactctctctaatgattatggcatcatatctggcgctaaactgctgagagttggaagccatcttctcaattaaatttctggcttcagcaagagtcatgtttccaaaggctccaccactggcagcatctatcatacttctctccatattactgagttcttcataaaaatattggagaagaagctgctccgaaatctgatggtgagggcaactggcacacagttttttaaatcgctcccagtactcatacaggctctctccactgagttgtctaatacctgagatatctttcctaatggcttgggtcctggaagcagggaaaattttttctaagaatactctcttaaggtcatcccagctcgtgatggacctttgagcaaggtaatacagccagtc

SEQ ID NO: 8917 - DNA, 413 bp, Glycine max
  unsure at all n locations
agctttgaatgcactattcaatggagttgacaagaacatcttcagactgatcaacacttgcacagtggccaaagatgcatgggagatcctgaaaatcactcatgaaggaacctccaaagtgaagatttccagattgcaactcttggctacaaaattcgaaaatctgaagatgaaggaggaagagtgtattcatgacttccacatgaacattcttgaaattgccaatgcctgcactgccttgggagagaggataacagatgaaaagctggtgagaaagatcctcagatccttgcctaagagatttgacatgaaagtcactgcaatagaggaggcccaagacattngcaacatgagagtagatgaactcattggttctcttcaaacctttgagctatgactctcggatagggctg

SEQ ID NO: 8918 - DNA, 339 bp, Glycine max
agctggttaaaattgacttaaaatcatctctgtgcactagtgatagataccataatttcattttgttccttaacctttgaattgttggtgaattttatctcttcaaattaaagtgacatattttacatccaactttaaaaaacttgtgaattttatccctagttaattatccattaaaagcttgtcataaaaaagttaggagtaaattttaccaaaataaataaaaaacaatgggggtaaaaaaatgaggagtttagaataaaaagtgcaattatgtctaaagtataaaaacaagggattaaatttgcataattcttaaaattcatgggtaaaatcttc

SEQ ID NO: 8919 - DNA, 376 bp, Glycine max
  unsure at all n locations
ggagaattgactaagaaatcactacgcanagcttcaaactcgaaggtggaggacacatgaacgaaaacgcaattcatgggctcctaaaaagggtggagaatggagaattgcactaagcaatcactacgcatggctccaaactcgaaggtggaggacacatgaaccaaaacgcaattcatggggctgcgaaaaaggggttgagaatggagaattgaactaagcaatcactacgcatggctccatactcgaaggtggaggacgcatgaacgaaaactcaatccatggtgctccgaaaaaggtgagaatggagaatngcactaagaaatcactacgcaaagcttcaaactcgaaggtggaggtcacatgaacgaaaatt

SEQ ID NO: 8920 - DNA, 376 bp, Glycine max
tgagaatggagaattgcactaagcaatcactacgcatatctccaaactcgaaggtggaggacacatgaacgaaaacacaattcatggggctccgaaaaaggggttgagaatggagaattacactaagcaatcactacgcatagctccaaactcgaaggtggaggacacatgaacgataacgcaattcatggggctccgaaaagattgagaatggagaattgcactacgcaatcactacgcatagctccaaacgcgaaggtggaggacacatgaatgaaaacgcaattcatggggctccgaaaagattgagaatggagaattgcactaagcaatcactacgcatagctccaaactcgaaggtggaggacacatgaat

SEQ ID NO: 8921 - DNA, 419 bp, Glycine max
  unsure at all n locations
gatacaggggtgcccagtgaggctgttaagcgggttgagtagtccatgggagttgaggcgggtcgagaagcaaacatgcctgagtcagacaatatatccaagacatattttcattgagataagtgaatgcctttgttattgcgagcaacttcaaggccgagaaagaactttaaggtgctaaggtccttaatgctgaaagctgtatcaagaaggtttgtgatatgtgtgatggtgtcgagattgttacctgctaggattatatcatcaacgtatacgagaacagcagtgatatcatggttatggaagtggagaaagagggaatgatctgttgtagattgacggaagtcgtgggagatgaggaaagaagagagtcgtgtgaaccattgacgactggcttgtttcanaccatataatgaaca

SEQ ID NO: 8922 - DNA, 429 bp, Glycine max
agcttatggcggcaaagggtaagctatcatgcctcaagcatgttgatgttggtgcttgtgaacattgtatccttggaaagcagaaaaaggtcagtttctcaagggcagggaagactctgaaagctgaaaagctagaattggtgcacacagatgtttgggggccagccccagtgaaatctgttggaaactcacgctattatgtcacctttatcgacgactctaccagaaaggtatgagtttattttcttaaaaataaatctgatgtgttttctgtgtttaaaaggtggaagacagaagttgaaaatcagacaggtctaaaggttaaaagtctgaaatctgacaatggtggggagtatgatagtcaggaagttaaagacttctgttcagaacatgggatcagaatgatcaagacaataccaagaacacctg

SEQ ID NO: 8923 - DNA, 420 bp, Glycine max
agcttaccacctctcccatcatgcaacctccgatttgagagcttccatttgagatcatgtgtgatgcctctaattatgcacttggggttgtttttgtcgtagagagtttatagactatcacacatcattgcttatgtatcacgcactctagatgtagcctaagtcaactacacgaccaccacaaaggagcttttagctattgtttttgcatgagataaattaagatcttatttgctttgctcccatattactgtctatactggccatgcagccttgaggtacctattgaagaagcttgatgctaaattcagattgatcagatggatgcttcttctttaggagtttgatattgagagcagagacaagaatggagcagaaaactcggtggctggtcatttgagcatgattgagggacgtgac

SEQ ID NO: 8924 - DNA, 417 bp, Glycine max
  unsure at all n locations
tgaacaacggaagctctcgatttaatcgagtgtgtcataaattttcacacagatgtccgattcggggaaataatatatcgagacgcacgaaattgaacaacggaagctctcgagaaanttgaatggtcataacatttcactcggatgttcgatccggggacataatttatcgagacgctcgaaattgaacaaccgaagctctcgacaaattagaatggtcgtaacttttcacgcgaatgttcgattcggggacataactcatctagacgctcgaaattgaacaacggaagctctcgagaaatttgaatggtcataagttttcacacggatgtccgattcgggaacataatatatcgagacgatcgaaattgaacaacggaagctctcgagaaaatcgaatggtcataacgtttcaca

SEQ ID NO: 8925 - DNA, 229 bp, Glycine max
cccatttataactacgatgcgaaacagatttatgtcctatgggtatgaagaactggaatatacatgcatgccctaatgattgcattcattacataaattagatttttgaagatgtcacatgccccacacgcggtgtatcacatttcaaagtgaaagatgataaatgtagtgatgaggcaacctcatgcaacaaccatccaacaaaggtgtgctggtatctttcaattat

SEQ ID NO: 8926 - DNA, 365 bp, Glycine max
tgtagacatgcaagcttcacacaatttatttttcccaaacttgagttttggaagatcaattactaagtctttcctaactagatgattgagatgatgcatgtttatgtgtgcagttctacgatgccacaaccatgaatcatttatcttacttaccaaacagatcaactcatgaaatgatgcatgttcaatgtttaacatatagatattacctattctcttgccaatatggacaacatcacagagcatagcttcactagtaagacaaaaattcttgttgaattcaattttgaagcctttgtcacatagttgactaatgctcaggaggttatgctttagttcatcaacatatagaacattctctattt

SEQ ID NO: 8927 - DNA, 414 bp, Glycine max
cttcatgcttaagtatgtatggcaaaacttcattactgttgatcaagacatacaagtgagcttgtaacaaatgttctacacttggagtgatcacatgcagtcctcttgaacccttaccacccactctgtcatcatgccaagactcaggaaggccaacaggtttagccttctctaagtattttgaacaaaattcaatggcttcttctgcaatgtacctctcaacaatagacgcttctggacgatatagattctttgtatacccttttaagatcttcatgtatcgctcaaccgggtacatccaccgtagataaacaggaccacaacatttgatttctctgaccaaatgcacaatcatgtgaatcatgatgtcaaagaaagcaaggggaaaatacatctccaactggcacagtataa

SEQ ID NO: 8928 - DNA, 361 bp, Glycine max
tagagcacctcctttcttacctcttccttcatcggtggattcaaccgcctctaggtttgtcggactggcttgtagtcttcttccatcattatcctgtgcatgcagtaagcagggttgattcctttgagatccgatatgtgccatccaattgctttcttgtgtttcttcagaatgtctaccaacctgttttcttcttctgttgtgagtgcattactgatcactataggcttatcttcctccaagaacatatacttcagatgattgggcaatatcttcaactctaccttcttcttctcggacgaaacttccttctttagtgtctcaaaatcggcttctccctcaggaatactgtcttgatgat

SEQ ID NO: 8929 - DNA, 404 bp, Glycine max
agcttaacaaagttattcaacatagaaaataagattatgaagtagtaactaaatggtagtaattagttgatttcaaacaaaatgtgaggataaagaaaatattgtagacaaccttccaatgatgcaacaatgcccctgaaattttttgccccaagcttgtgtagatcctcagcaacctagattggatatatgcaaacatttatccctagaaccacaacagcgcccaatgcaatgagaaaaatctatcaacagctgtttcaacaaactctcctgtatgataccctgataaataatatagcaataggtgatcaagaacacacgaaaaccatattcacaagctttcattggtggatattgttttgcatatgtggcacaaaatcctaccactcacacgtcataatcct

SEQ ID NO: 8930 - DNA, 400 bp, Glycine max
tcgctcgaaggcaaactggatgcattggttaacttggtaacccagctggccttgaatcagaaatctgtacctgtcgcaagggtttgtggtttgtgctcctctgctgaccaccatacagacctttgcccttccatgcagcaacctggagcaattgagcagcctgaagcttatgctacaaatatttacaatagacctcctcaacctcagcagcaaaatcaaccacagcagaacaattatgacctctccagcaacagatacaaccctggatggaggaatcaccctaacctcagatggtccatccctcagcaacaacaacaacaacctgctccttcctttcaaaatgttgctggcccaagcagaccatacattcctccaccaatccaacaacagcaacaacccc

SEQ ID NO: 8931 - DNA, 416 bp, Glycine max
  unsure at all n locations
agctntgaatgctctattcaatgagagttacaagaatatcttcagactgatcaacacttgcacagtggccaaggatgcgtgggagatcctgaaaaccactcatgaaggaacctccaaggtaaagatgtccagactgcaactattggctacaaaattcgaaaatctgaagatgaaggaggaagaatgcattcatgacttccacatgaacattcttgaaattgccaatgcttgcactgccttgggagagaagatgacacatgaaaagctggtgagaaagatcctcagatccttgcctaagagatatgacatgaaagtcactgcaatagaggaggcccaagacatttgcaacatgagagtggatgaactcattggttcccttcatacctttgagctaggactctcggatagggctgaaa

SEQ ID NO: 8932 - DNA, 419 bp, Glycine max
  unsure at all n locations
cagaccaagcttggaaagattatcaccatcatttagtatacatcgttcataatggtccaccacttgaaagagggcttgcaccagcgtagattttccattccctgtcctgtctactataccaattttcttttgtcctgagaagatacaagtaacatctttgaggaccataggagcagcagggtcattctgtatatgaaggttatgaagttcaacttttccctcctttggccactctggttcaggcctgcaatcttgaatggtagaccttggcaaagtaacgaagatggctcaagaacaaaatacaagaccatattgaagaggaaatngattctgacagacaaccattccaagctgccaaaattgtaaaaggccacctgagaataatcatcaattagagccttaactttgatcaagaatag

SEQ ID NO: 8933 - DNA, 446 bp, Glycine max
acctgtggcatgcaagcttctaaacaaatttattcaagcaaatgaaatttgagaaatccagaacacatcaaaagatgaaacaagaagaatatagggttgtttggataaacaactataaaagggcttattgaataagtatttatcatgtaagcacttgtatagtttttataatcaaaaaagaaataggcttaaactattttcatataagttgtaaggttgttttcataatattttggagaggttactgaaataagctaaaaataacttatgaagataacattagttattttcataagctttctaaaacacttacacaagtgcttatatagttatatcataagataagtccaaataagtagtaaataaggtcttccaagcatacccttaagttattgaatttgagagaattaaattaacaaaataaaatagtcaaaggacaataaaat

SEQ ID NO: 8934 - DNA, 375 bp, Glycine max
gtaccttgtcattatgtgttacatggaatatcactaatatgagattatcgtatggtggctacctagctaagggagaaatttctgagtcaatctgtaatgaagtcaattcaattgtagttcttgttcttttgtcatgtgtctgatccatttatgaagataggcattcctttagctctggcaatatttggcttatgtctggtcttttcagctgcagttggtaaaatgcaagacaaggcaatctctacagctttccatgcagaattgacattgaatgcttcctttaacttcggatcaacaatgttatgaatatctcctctttcaactatgggaataacccattcaaggatgtgaatattttttcaggcgtccttgata

SEQ ID NO: 8935 - DNA, 439 bp, Glycine max
  unsure at all n locations
tgctaacccatggaagctcctaatatctcccacactttttgtggtgggccattcttggatggccttgattntctcagggtccacttggaccccatttctaccaactacaaaacctaagaaaactatattatctacacaaaaggtacacttctctatatttgcatagagggtgtttttcctaaggactgaaagaacttgtctgagatgtcctaagtgatcatctagcctcctactatacactaaaatatcatcaaaataaacaactacaaatctacctatgaaatcccttaagacatgatgcataagcctcataaaggtgcttggtgcattagtgagcccaaaaggcatcactagccattcatacaaaccaaacttggtcttgagaagcagtttccactcatcaccctttttcatcctgatttggtgataaccactttta

SEQ ID NO: 8936 - DNA, 384 bp, Glycine max
agcttgcacagtttttattaggtattaattgttctgcatatctaacaatcgtggttttaaattgctgttgtcgttgcgatccttgacattgcgtgaaaatgtgtttgtcatgatttggttgcagagaatcgtaaaatctttatgttgcggtcgcaattgtggttatatatggatcatgatttaaaaccatactaacaattttgcgctttgtgtttatcaatcgattaattgatgattgaatgtgaaaattaatagaagtttttggcaatgtagggcaatgagaggctccaacaactcaagaaggggcttatcaaaccaatacgatggtccatgcaaggcgacaaaccccattgacaaatgttggagatgtgaccccaattggga

SEQ ID NO: 8937 - DNA, 413 bp, Glycine max
agcttgttactactattagatagctactaatactattgcaaactgtaattgtttttttaacttaattatattacacttgtttatgtatgtgtttttctcttgacttaaatataattttggtcattttattttactcaatacgtaattttggtctctctattttaaaattaaaatatttgatactcctatttttaaaaatctacaattttggtctctctattttaaaatacaaacattttgtccctatattttaaaaaattcataatcttgattctcatattatagaaaattcacaattttggtttaatatataatttttcctatgtattatttcttttattttttactttgcagttaattaaatcatttcttgatgatatcttaaatgaatatgtagatctacgatttaatta

SEQ ID NO: 8938 - DNA, 292 bp, Glycine max
ttactctgatgtctgattgtgtgccgcaatatatccagacgctctagagtggaataccaaagctctgagcaaattcaaacgacaatatacttttactcggatgtcagattgagtcccgtcatatatctagacgctcgaaatggaatactgaagctctgagcaaattcaaacgacaatgactatttactctgatgtccgaatgagtcccgcaatatatcggaacgcttgaaatggtatgtggaagctctgagcaaaatcaaacgacaataaatttttactcggatgtctgatt

SEQ ID NO: 8939 - DNA, 387 bp, Glycine max
atattacggtactcaatcagacatccgagttataagttattgttgttcgaatttgctcagggcttcggtatgctatttcgaacatcgtccaatactaccggactcaatcggacatccgagtaaaaagatattgttgctcgaatttgctcagagcttctgcattccatttctagcgtttcgatcatttacgggactcaatcttacatccgaataaaaagatattgtagtttgaatatgctcaaagcttcggtattccatttcgagctcctctaagtattacgggactcaatcatacatccgagtaaaaagttattgtcgtttgaatatgctcagagcctttacattcacattcgagcgtgtcgatatattaccggactcaatcagaca

SEQ ID NO: 8940 - DNA, 304 bp, Glycine max
ccaccacacagacctttgcccttctgtgcaacaatctaaagcaattgaacagcctgaagcttatgctgcaaacatctacaatagacctcctcaacctcaacagcaaaatcagccacaacagaataattatgacctctctccagcaacaggtacaatcccggatggaggaatcatcccaatcttagatggtcgaatccttcacaacagcaacaacaacaacaacatacttattttcaaaatgttgttggcccaagtagatcatacattcctccaccaatctagtagcaacaacagcaacagcccc

SEQ ID NO: 8941 - DNA, 387 bp, Glycine max
  unsure at all n locations
tgagaagctagagcttagctacacacacccatcttataactaagctcacctccgtgagaagctntcttgagaagctagagcttagctacacacccctataatagctaagctcacccccatgataaaaaaacatgaaaatacaaaacaaatcctactacaaagactactcaaaatgccctgaaatacaaggctaaaaccctatactactagaatggccaaaatacaaggcccaaaataagaaaacaacctattctactatttacaaagaagagtggacccaaccttggcccatgggctcaaaaatctaccctaaggttcatgagaatcctaaggccttctttatcaactctagcccaatcctcttggagcctcttgctcatggctctg

SEQ ID NO: 8942 - DNA, 281 bp, Glycine max
  unsure at all n locations
ctaganattcgaatggtcataagtnttcacacggatgtccgattctggaaaataatatatcgagaccctcgatattgaacaacggaagccttcgagaaattcgaatggttataagtttgcacacggatgttcgattcggggacataatatatcgagacgctcaaaattgaacaacggaagctctttagaaattcgaatggtcattacatttcactcggatgttcgattcggggacataactcaactagacgctcgaaattgaacaacggaagctttcgaca

SEQ ID NO: 8943 - DNA, 352 bp, Glycine max
agcttgcaatagtgttgatgttggatctcttcgcgatccccagccggatgcagatagagtcaatgacccagaatggctcattgttattggggtttgtacacatttgggttgcattccattgccaaatgctggtgactctgggggatggttttgtccatgccatggatcacattatgatatttctggctgaattaggaagggaccagcaccatacaatctggagggtcctacgtacactctcttggaagaaacaagttgatgaatggttgaaaataaaagtggttctgcattcaagtgggatgagttaacaattattatttaaaaatttatttgacaattgttcaatgctctt

SEQ ID NO: 8944 - DNA, 236 bp, Glycine max
aaacgataatatcttattactcgtatgtccgattgagtcccgtagtatatcgagacgctcgaaattcaaaacagaagctcttagaaaaatcaatcgacaataactttttactcggttgtccgattgagtcccgtagtatatcgagacgcttgaaattcataatagatgctctgagcaaaatctaaccataataactttttacacggatgtccgaatgtgacccgagatatatcgag

SEQ ID NO: 8945 - DNA, 373 bp, Glycine max
taacaactagttttacttttcatttgttggtatatactatttttagtactgtgtacttttcattgtcacataggtaaatttattgacttgtatttcattttgtacagttaaacatggaaagagacgcaggaagggtttttaacggtttcaaagaggggagggttgtttttgctcccacttacaagtattcacataattcagactcttatgctggtgagactgtcaagtcaaagaaaaaacgccgaacgccagcatggtatgcaagtcacttgactcttattatataagtcactcaattaaatgactagtgctagctagatggcttttcagtttttaataaagataggtaaataaaaaattgttgacaacactt

SEQ ID NO: 8946 - DNA, 439 bp, Glycine max
tcgcttcttcacatagtccgcctatgctagaccttctttatgtttaaaaacagaaacattaggcataggcaaaagatcaagaggagttagtgggttaaaaccataaacaacttcaaaaggagaacaattagtggtgctatgaacagctctattgtaagcaaattcaacatggggtaaacaagcttcccaagtttttaagatcttcctcaaaactgtcctaagcaaagttcccaaagtcctattaacaacttccgtttgcccatcggtttgtgggtgacaagtggttgaaaataacaatatagtgcccaacttgctccacaaagtcctccaaaaatggcttatgaacttatagtccctatcactaacaatgctccttgtgcaaccatggagtcttacaatcttcttgaataacaaatcaaccacattgggagcatcatca

SEQ ID NO: 8947 - DNA, 343 bp, Glycine max
agcttggatgcaacatcttggtcaaagatattgcatgttaagaccttcttaagttttcgacaggtcatgtaagggaagcgaattaaacgggcaagtcgtgtacccaagacttctcttctctcttctagattcgggtactgtgttcgaacccacttcaacacaaagtcatataccgcatcctctgatgcaacctgaagttcgtcactagacaatattgcttctattccagctagaggcaagcccataacctcttcctggaacctggtcatggtcatatgtgaaacttattagcgttcaaaaggaagaaaacttgttttgagattactaaaatatagaacccaga

SEQ ID NO: 8948 - DNA, 361 bp, Glycine max
  unsure at all n locations
aatgagaagcaaatgtttcaagatttctcanaagtagttcaagaaattctaaaagttgtaagaattatattaaaaagatattgaaatgcaagtcaaggtcttgcttttatagacccttcatgtctggtcaagaaaaccattagaagagttataactttgagaaaaacttgaaaaccattggaagagttacatctcttgactttntcttcaaaacttgtcactggtaattgattaccaaaaccatgtaatcgattacacaaagcattttatgaaaagatgtgactcttcacaatngaatttgaatttcaacattcagatacactggtaatttgataccaatatagtgtaatcgattacacca

SEQ ID NO: 8949 - DNA, 214 bp, Glycine max
agctttgtgaagctcctgttttagctttacccgattttactcaaccatttgaagttgaatgtgatgctagtggagttggcattggggctgttttgatacaaaacaaaaggcctatagcttatttctcggagaaattgggaggagccagattgaactattgcacctatgacaaagagttctatgccattgtgagagctcttgatcattggaatca

SEQ ID NO: 8950 - DNA, 433 bp, Glycine max
ctaagcttctcaggaagtttctcaacgaagatacctatgctattattacaagcatgtgtaacactagttgtagctttactgaatgagagtcttatgaaacacacttcaaagttcaacttctctccctcttacctccttcaatctcttgctccccccctgatgcaagctccattggagcttgtaggcctaggatcttcttcatcaatggatacctttgcttcttggaagatgaatggcagcggaatggagaatgaagagagagacgagacgcctcttcaaggagaatatgagtctagaacaagctcaccaccataggaggccatggataacagcttggaggaagaatgagatgaatgactggagagggagagaagagcacgaaattatgtgctccagatgagctttgaaatctgaattctaatattcgaatgat

SEQ ID NO: 8951 - DNA, 411 bp, Glycine max
agcttttgacggactataccaagctctaggaaccagggacggagaaagatctatatataggcttgctaagggtagagagaggaagactagagatttggatcacgtaaagtgtgttaaggatgaagaaggcaaagtcttagtgcatgaaaaagatatcaaggaaaggtggaaggtgtatttccacaacttatttaatgatggatatggatatgactctagcagtctagacacaagagaagaggaccggaactataagtattatcgtcggattcagaaacaggaagtaaaggaagcgttgaaaagaatgagtaacggtaaggcggtggggccagacaacatacctattgaagtgtggaaaactcttggagatagaggtcttgagtggctcaccaaactctttaatgaaattat

SEQ ID NO: 8952 - DNA, 397 bp, Glycine max
atgcaagcttctccacttgtaacttgggcctaaattcaaatagcatggataacacttgttgaagaacttccttggccttctttgatctagcccttgccataggtcctccaagtccttctaaaggttccttgtccttattccttgccttatcctcatcactctctccctcttcaaaaggatatgtcctcaaatcggcttcttcatctacatcaaaaagatttacgtcagacacattaaatgtagcactcacattatactcactgggcaattcaatcttgtacgcattgtcatttatcctttcgagtacttgaaatggaccatccactcttggttgaagcttggattttctttgctccgaacacctctcctttctcatgtgaacccaaacccaatctct

SEQ ID NO: 8953 - DNA, 424 bp, Glycine max
  unsure at all n locations
agctnttgttaatatgggtgttgtacttaataaagccatgactggtttggaaacagagaaggttccttttggtttctttgctcggaatggcaagtatgtggaatgcctgctttctgtgagtaagaaattggacgtagagggcctagttactggggtcttctgcttcttacagctagctagcccagagctccaacaagcattacatattcagcgcctatccgagcaaactgccttgaagagattaaatgcattaagttacatgaaaaggcaaatcatgaatcctttgtgtggaattatattttcccggaaaatgttggagggtactgccttgggaacagagcaganacaacttctacgcactagtgctcagtgccagcagcagcttagtaaaattcttgatgactcagatcttgatagtatcata

SEQ ID NO: 8954 - DNA, 377 bp, Glycine max
agcttgttaatccatggaagctcctaatatctcccacactatttggggtgggtcattcttggatggcctcgattttctcaagttccacttggaacccatttctaccaactacaaaacctaataaaactatattatctacacaaaaggtacacttctctatatttgcatagagggtgtttttcctaaggattgaaagaacttgcctgagatgtcctaagtgatcatctacgctcctactgtacactaaaatatcatcaaaataaacaactacaaatctacctatgaaatcccttaagacataatgcataagcctcataaaggtgcttggtgcattagtgagctcaaaaggcatcactagccattcatacacaacaaac

SEQ ID NO: 8955 - DNA, 454 bp, Glycine max
  unsure at all n locations
actcagctatgctganatatttacatagacctcctcaacctcagcagcaaaatcaaccacagcagagaaattatgacctttccagcaacagatacaaccctggatggaggaatcaccctaacctctgatggtccagccctcagcaacaacaacagtagcctgctccttccttccaaaatgctgctggcccaagcagaccatacattcctccaccaatccaacaacagcaacaaccccagaaacagccaacagttgaggcccctccacaaccttccctcgaagaacttgtgaggcaaatgactttgcagaacatgcagtttcagcaagagaccagagcctccattcagagcttaaccaatcagatgggacaattagctacccaattgaatcaacaacagtcccagaattctgacaagctgccttctcaagctgtccaaaatcccaaaaatgtcag

SEQ ID NO: 8956 - DNA, 380 bp, Glycine max
agcttctatagaagggtcgttcctaatttctctacaatcgcatcacctctcaatgagctggtgaagaagaatgtggcatttacctgaggtgaaaaacaagagaaagctcttgctttgctcaaagaaaagcttactaaggcacctgttctagctcttcctgacttttctaaaacttttgagctaaaatgtgatgcctctggagtgggagttggagctgtattgttacaaggtgggcaccctattgcttattttagtgaaaaaattcatagtgccacccttaactaccccacctatgataaagagatttatgccttaataagagccctccaaacttgggaacattaccttgtacccaatgaatttgtcattcctagtgatca

SEQ ID NO: 8957 - DNA, 458 bp, Glycine max
tctttgagaaaacttccttgagaagctagagattatctacacacacccctctcataactaagctcacctctttgagaagcttccttaagagattcctaaagaagctagagcttagctacacatacctctctaataggtaagctcacctccttgagatgagaagctagaacttagctacacaccccctataataactaagctcacccccatgacaaaaaacatgaaaatacaaaaaaaagtccttactacaaagactactcaaaatgccccgaaatacaagactaaaaccctatactactagaatggccaaaatacaagcccaaacgaaggaaaaacctattctaatatttacaaagacaagcgggctcatacttagcccatgggctcgaaatctaccctaaggctcatgagaacccttgggccttccctcggatctctagcccaatctacttggagtc

SEQ ID NO: 8958 - DNA, 350 bp, Glycine max
agctttgaaagattggctaagactttgttataacattttcacttaaacaatgaaggaaagctggagttgctgcacatgatgtccaacggtatgtcaaataataagatcgggctgcacactgcacaaggcaagataaagtgtctaatgaagaatagaagctgcacgattcacgatgtcagatataatgtccatgacatcctgcctgataatactggaattgctaaaagcattgaatcagcaggatccacgatggcggatacaatgtccatgacatcctgcccgaaaatactggagttgctaaaagcattgacgttgcaagatgtccgatgaccgatactatgtccaggaca

SEQ ID NO: 8959 - DNA, 423 bp, Glycine max
  unsure at all n locations
tcacctagnttcatcttccgtacgttgaacagtgatcaatataatacacgtcatcacgtaattacacaactggtcttcagaactgggaattaagttgctagcttttatatgtaggggtgcttataagtggtttttgtaggtggaaatgtaccatcatcaccaacaccaaggaaaaaacattcattcttctttcagaatgccaatcccctctgagaggcacatgttccttcaagcaggaaatggttctggtgattctggactagtgctctcaactgatgctaagcctatattgaaatggacaccagatcttcatgcaagggttatagaagcagtcaaccagttagggggagctgacagtgagtactcacattagcttttggatcatcagatgtggaagaacatagaaattgagttcactaatgc

SEQ ID NO: 8960 - DNA, 394 bp, Glycine max
agcttgagacattctcgcaaaggtttatgctgggtcagaaaggttgaagagagtcaacatgcaaaccttgaagcaacaattcgagctactacagatgaatgagaaagaatgtataacaaaatacctaaatcgtgtgctgggcctgtcaaatcatatgatggcttgtggtgaaaacatgaaggattaagatcttgtagaaaaggttttaagaaccttgagctcaagatctgattatgtggttgctgcaatagaagaatctaaggatttcatagaaatgaaattgaatgagcttcaatgctctcttgaagcacatgagcaaagaatcaaagaaaaggaaacagataggtcatctgaacatgccttactcactcagagtggtagaagatacaaattg

SEQ ID NO: 8961 - DNA, 450 bp, Glycine max
  unsure at all n locations
tgagacacctanaaagaaattgacaaaaactaatatagcatactgaaagctaaaatgaagttaatcatttagtatcaaccttataatggtaaacaagaataaactttgatacccatcaaaatgctcaaccaagtacatacttcttatactcattgttagaagcaagtattatgtcaaggtgcattgtaaattcttaggttcaaatagttactacttgtgatgtacatgacatattgagttagaaacatcattttaaagaaaatcttatatattcatactgattatagttatgatttataagtttgcatattcaaatacaattttttattaataaaatatattntttatattaagtattttagaataattataatttctctaaaatatttatcgatgataatttagatattaatgttatatcatgtaagatatntaatctctgtaatatac

SEQ ID NO: 8962 - DNA, 363 bp, Glycine max
gtaacagcaattaccttcttttatcttatcattctcttcgtgtggattcaatctcaacagttgcatttcgtgttcctgtgaccttatgtttccattctctgcttaaacatctcaatgctgtatttaccagatcttcatttggaaaaattttccctaaagatgcatgatgatttactatgtgtgtgaacctcttttgcatgtcttatatactttcatttgcattcatcctagataggtcatattcatgagttaatgtgtatattctagatcttttaacatctggtgtgccttcatgtgttacttgtagggtatcccacatatcttttgcactatgacaattcgatagcctaaagtactcataca

SEQ ID NO: 8963 - DNA, 316 bp, Glycine max
ggcattggatagaagactccacgacgattgagtcagagatgcaagagaaggacctatggttctcatgagccttagggtagatttcaggaccatgggctaagtatgagcccacttatctttgtacatattagattaaggtttcattatttttgggccttgtatttagggctctagaatgtaggtagggtaccctagaaatgtaaaatttttcagcccttgtattttagggaacctagactagtttttgtattaggggtagttatataatttcacatgcattaagtgaatatttgatgtgtgtgttgggaaataaatt

SEQ ID NO: 8964 - DNA, 455 bp, Glycine max
tcctgatcatgagggagctaacaaaaattttcatgcaggtggaccttcttctagtagttctgacttgcagcagcctcctatccatcttccattttcacctagagcaattccaaacaaaaaaatggaagaagtggaaaaggagatcctggagactttcaggaaagtagagatgaacatacctctgcttgatgccatcaagcagattccaagatatgccaagtttctaaaggagttgtgcacccacaaaaggaagctcaaaggcaatgaaaggattagcatgggcagaaatgtgtcagcattgataggtaaatctgttcctcacattcctgagaaatgtaaggacctatgtactttctgtataccttgcattattgggaacaacaaatttgagaatgccatactagatctaggagcatcagttaatgtcatgcctctgtccatgtttaattctttat

SEQ ID NO: 8965 - DNA, 448 bp, Glycine max
  unsure at all n locations
tctntanaaggatatagacttgtgcttaaccagccttgtttagaggcatttgaggagttgaggaggaggcttaccacttctctcatcatgcaaccactagattgngagctttcctttgagttcatgtgtgatgcctcaaactatgcacttggggttatgttgataaattatcacatgtcattgcttatgccttacgcgctntagatgcaacccaagttaactacaccactatctagaaggagctttcaaccattgtttttgctttagataaattcatatcttatttgctttgctcccatattactgtctttactgaccatatagctttgaggtacatgttgaagaagcctgatgctaaacctagattgatcaggtggatgcttcttctttaggagtttcatattgagattaaagacatgagcggtgtagaaaacttgngttgtgatca

SEQ ID NO: 8966 - DNA, 411 bp, Glycine max
  unsure at all n locations
tgtcgagatggaaggctcccacgtggtgcanaacatgtacgactctcttgatgtgcatgtangggaatgtttttctgtgcttgttacagcggacaaggaaccaaaggattactacatggtggcttccacacgtttcaccaagactgttctaatangtaaaggtatcattcgttacacaaatggtaagggtccttgctcacccgacatncccccggctccagtgggtttgggcttggtctcttaaccaattccataccttccgttggaatctcaccgctagtgcccgcaggcccaaccctcagggttcctacaaatatggtcaaatcaacattactcgtactatcaagctcgttaactcaattagtaagtctaacggaagcttcgttatgcccttaatggtgtctcacatgt

SEQ ID NO: 8967 - DNA, 446 bp, Glycine max
tgtaaggctttgggtgggaaatgatagtgagacttaacttatataccaaccttatgctacaacaattgcagcatgacccactatctacaatgagataacaatttttgtttaaaaccttgcatcttgtatgaaagatgttctctctttgggtttggtttacgtcacaagattgaatcccatggaaccttctcaccattagaagatcaccttcttcataagggtaaacctcttcaatatgctcatcacccttggcttcaccctcacttccacttgaggaaggagaagaggtagcctcctcttggctactatagatgccttgacccctcatcatcatggttttctatgtggggcattaagaagcaatgtggcctttcctaatacatttgaagcacttactgctactagttctatcttgtgaactagcctttggagtgatttcctctata

SEQ ID NO: 8968 - DNA, 394 bp, Glycine max
agcttgcttctacattaaatggacctagtatgacacaactcaaaaacatataaggtttagtcaaacacatttctggaggaagattgtacgggataacaatgattgaccaataagaataaggtaaagatgatgcttgaatatacagattaaatccatctgtgcataaaccgagtcacacatttcatggatcatcaacaaaatctgcatgtacccgatcaaagtgcttccatgcttcaccatcaaatggatggcgtaacatgcaagaagatcttctattctcataacaccatgacatttggcttgcagtttgtattcatgtaaatagtctctgcaaccttggtattataggaaaataaaacatcgcctttactagaaattgatttttgttgcttgt

SEQ ID NO: 8969 - DNA, 401 bp, Glycine max
  unsure at all n locations
acacggatatctgattgagtcatgtaatatttcgagacgctcgaaattgaattcggaagctctgagcaaattcaaacgacaataacttnttactcggatgtcttattgaatcccataatatatcgacaagctcgaatagaatcttgatgctctgagcaaattcaaacgacaataactttttactcggatgtctgattgagtcctgtaatatatccacacgcttcaaattgaataccggagctctgagcaaaatccaaagagacaaacactttaactcggatgtcggatggagtccgtgaatatatggacacgctcaaaattgaatcccgaagctctgagcaaattcaaacgacaataactttntactcggatgtctgatggaatctccgaatatatccaca

SEQ ID NO: 8970 - DNA, 414 bp, Glycine max
agcttaacaaaaggcatgcgaagtgggtggaattcctagagcaattcccttatgttatcaaacataaaaagggaaaaggtaatattgtagccgatgctctttctcggcgtcatgcattactttctatgcttgaaacaaaattgattggtcttgaatgtttgaaaagcatgtatgaaaatgatgaaacttttggagaaatttttaaaaattgtgaaaaattttcagaaaatggtttctttagacatgaaggctttcttttcaaagaaaacaaattgtgtgtgcctaaatgttctactagaaattttcttgtttgtgaagcacatgaaggaggtttaatggggcattttggggtccaaaagactctagaaacattacaagaacatttttattggcctcatatgaaaaaggatgtgc

SEQ ID NO: 8971 - DNA, 390 bp, Glycine max
agcttccatcaagaaccctagggccttatcttgcatctctggcccaatcttcttggagtcttctatctaatgaccttggggggtaggattgcatcaccatatgcccacctacaagaatgtgggtcaaaattcttcgcgataagaggatttgagaagttgagatagcgatcaaatcggtgataactttctccacaagtttctatagcactatttacgttgcctttcaaatcaattgaccatagatgagtcagacccttctgcgcaacaatatcatcatccaaaaacagcactttgttgagctttggaaagatctatggcaaatagaactggaggtggttcaagatagacaaatactttggatacatattatgatactcagtatacatgaga

SEQ ID NO: 8972 - DNA, 397 bp, Glycine max
agcttgaagatgtgtagcccaccatcttttttaggaaaatactggtaatgtgtctactatcattgtcatcatttctttctccgtcattgaggagccacttaagctgccaggtctctccacctttgggcatattctttagaaagattcgtgccccccttttgcacatgttctgtacttgcatcctatccgaagacattatactgacactgcctaacgaaggcaaccactatgtccttccaagaatggactcgggaaggttccaagttagtgtaccatgtaacagctaccccagtaagactttcttggaacgaatgtatcagcaattcctcatcttttgcgtatgcccacatcttccgataatacatcattagatggctcctggggcaggtagtcccct

SEQ ID NO: 8973 - DNA, 287 bp, Glycine max
caatgatattcttcatgcctcttaagtgcagatgtccaaatctttgatgccatattttgactatatcttctatggagaatatacactgtgtgaggagtaactggctttcttgagcgtgtccataagtaacagttgtcctttgatctgctgcccttcattacgacttcactcttctcatttgtcaccaagcattctgactttgtgaagtttacattgaatacttcatcacacaactgactgatgctgatcaagttcgcagtcagtcccttcaccagcagtactttgtt

SEQ ID NO: 8974 - DNA, 453 bp, Glycine max
  unsure at all n locations
tcccgccaatggtatntgaggtttaatgatactattgtttccttcggatttaaggaaaatactgttgatcaatgtatatatctgaaggtcaatgggagtaagattatttttccaattatgtgtattgatgatatcttgcttgcaactaacgatcttggtcttcttcatgagactaagaaatttctctctagaaactctgaagtgaaagatatgggtgaggtaagctatgtgatagggatagaaatattctgtaatagatcacaaggattgttaggcttacctcagaaagcatatatcaataaaatactagtgaaattcaagatggaaaggtgtttaacatcacctgttctaatttagaagggagacaaatttagtctcacacaatgtcatagaaatgatatggaacgaaaacaaatggaagctattttgtatgcatcagttgttgttgcatct

SEQ ID NO: 8975 - DNA, 434 bp, Glycine max
  unsure at all n locations
ggctaacccatggaagctcctaatatctcccacactntntggggtgggccattcttggatggccttgattttctcaggttccacttggaccccatttctaccaactacaaaacctaagaaaactatattatctacacaaaaggtacacttctctatatttgcatagagggtgtttttcctaaggactgaaagaacttgtctgagatgtcctaagtgatcatctaggctcctactatacactaaaatatcatcaaaataaacaactacaaatctacctatgaaatcccttaagacatgatgcataagcctcataaaggtgcttggtgcattagtgagcccaaaaggcatcactagctattcatacaaaccaaacttggtcttgaaagcagttntccactcatcaccctttttcatcctgatttggtgataaccac

SEQ ID NO: 8976 - DNA, 410 bp, Glycine max
  unsure at all n locations
agcttcaagaaaaagatggcctcagcaaattccttatttccagaagggaattctatcaatagacctccaatctttaatggagagggttaccactactggaaaacccgaatgcaaatttttattgaggcaatagatctaaatatttgggaagccatagaaatagggccttatatacccaccacagtagaaagagttacaatagatggtagttcatcaagtgaaagcataactatagaaaaacctatagatagatggtctgaagaggatagaaaacgagtacaatacaacttaaaagccaaaaacataataacatctgccctgngaatggatgaatatttcagggtttcaaattgtaagagtgctaaggaaatgtgggacactcttcgataacacatgaaggaactacaaat

SEQ ID NO: 8977 - DNA, 439 bp, Glycine max
  unsure at all n locations
tgtgttntaaagtttacaacttacaagcgcgactatattaatctcttaaaaaatttagttgctaaataaatttcccaaaaacttaaaagggcatcacaataattttacaaacaatttcttaataattaaaataccatcaaattcatccttgatgcaagctccattggagcttgtaggcctaggatcttcttcatcaatggattcctttgcttcttggaagataaatggcagtggaatggagaaggaagagagagaggagacgccacttcaaggagaagatgagtctagaagaagctcaccaccatangaggccatggataagagcttggaggaagaaggagatgaatgaatggagagggagagaagagcacgatattttgtgctcaaaaagagctctgaaatctgaagttaatattcaaatgaatcaaagtgaaaaaaa

SEQ ID NO: 8978 - DNA, 417 bp, Glycine max
agcttgaactaaagattataagatggtactgaaacctatcttagcgattgttgttgggcttattgagtcaatcgccatcgggttgttattgaaccactagtagatgtcaagtcatgcaaacttcatacttgaaatgcccaatcctcaatgtgtaggggtgtattgaagatcccacattgattaggaatatggccaaattaaagtatatatgtcagggaaaccttcaccttacatgctagttttgtgggatttagttaggcttgaatctaaaatctaagatgttattagaacttatcatatcaatgttaagcctattaggccatctaatatcgggttgttatcaaaccacttgtagatgtccaatcccataaacttgggctcaagatatccaatcctacgtccgtgggggtatgttgg

SEQ ID NO: 8979 - DNA, 454 bp, Glycine max
  unsure at all n locations
tcttacatagtccgcctntgcttgaccttctttatgcttaataacagaaacattaggcataggcaaaagatcaagaggagttagtgggttaaaaccataaacaacttcaaaaggagaacaattagtggtgctatgaacagctctattgtaagcaaattcaacatggggtaaacaagcttcccaagtgtttaagttcttcctcaaaactgtcctaagcaaagttcccaaagtcctattaacaacttccgtttgcccatcggtttgtgggtgacaagtggttgaaaataacaatttagtgcccaacttgctccacaaagtcctccaaaaatggcttangaacttagagtccctatcactaacaatgctccttggcaaaccatggagtctcacaatctccttgaaaaacaaatcagccacatgggaagcatcatcaactntcttacatggaataaaa

SEQ ID NO: 8980 - DNA, 451 bp, Glycine max
ctggtgtggctggcacagcctcacctagactcaatattgaccagctctagggttgggaaagacaggtgggttgaaggttggtagtgaaaaacaggtgagcatcttttaacatagaataatttgctttctatttttttgcctgctcagttccattttaaaattattggttgagccttgaccctagatattattattgcagaggttataacattaacagaatttcaccctacacattgtaatacgttggcatatagcagttcaaagggttcaattcatctagttgacttggaacaatcagcattatgtgattctcatgctaaactgtaagtacattcttttgttgtaatcttgttggttcctgacaaataagtatcccattcctcccataaggctttcagaatttaacaaatgtttaaacagttgacagaatttctggataggtcatctgttt

SEQ ID NO: 8981 - DNA, 407 bp, Glycine max
agcttctgttcctgagaaactggttcccataagacaacagggagtgaagattgctgaaaaccctagccttgcaacaagtcctagggaagtagacacggagatggacaagaaaatccgcagtattgtgagtagcattctgaaagatgcttctgtgcctgatgctgagaaagatgttccaacatcgtccaccccgaatgtttctgtgcctgatgttgagaaagatgttccaacatcttccggtccaaatgctgaagtactctcttcccccagcaaagagagatcaacagaggaagatgatcaagcgacaaaggagacccctgcaccaagggcaccagaaactgttccaggtgacctcattgacctggaagtagtagaaattgatgaagaacccattgccacagttggca

SEQ ID NO: 8982 - DNA, 415 bp, Glycine max
agcttcaaccctttcccaaaactcggcaagggacgcgaaatgttattcccactcagatccaacaatgtcaaagatttcaaactagtccaattactcggtatcgtaccactaatatcattacctcccaaccttatctcaacaagagaatctaacttggcaacagaaggactcaaagtcccactaagattaaacttttccaaaataatcatgtccacctttccgtccccattgcaccttatccccaaccatggcccgtgacaagggtcatttccactccaagaatcaaccaaaatccaaggataccccaaccctccaagaaactccaacaacaccatcacttcaaaagcacacataaccccggcctttgcctcacaaaattcattgttctcataactcactttactcgctgcaaatt

SEQ ID NO: 8983 - DNA, 420 bp, Glycine max
  unsure at all n locations
agcttatcaataattaaataatcttatcacatgagtaataaatatacatgtgttagtcaacattaatgaaatacatacacaatcaaagtttgaaattggtcatagattaaaatcactggatttttaaatatgagagataaaatatttcaattaaaaaataagagactaaaattacatattntagaaaatagagaaacaaaaattacattttaaccttttaaaaatcacaatctactaaatatctaatcaactatctgtaatggataataataattaatagctaaaaatgtaaactttacattatttggttaaaataaatcaattttttaacagtaaataatctctaacgcaaatgttaagaaaaaattacatatataagatatttatganaattcacaaataatgttcacatgtgcatga

SEQ ID NO: 8984 - DNA, 449 bp, Glycine max
  unsure at all n locations
ataccacctgtcatttgcatctgcatctctgtggatcagataatggaacttcatcttcagtcagctaaacccctgagtccatagggatccccttcttcgagtacataacctcaatccctaaaaagtacttcaaggcccccaagtctctactctgaaactgagtttgaagaatactcttcaagttgtcagtacctttattatcacttcttgtaatcacaatatcatcaacatacaccacaagtaagatgctgccaaggttagtatttctataaaatacagtatgatcactttgactcagcttcaatccatatgcaatgaccacaccactaaatctcccagaccaagatctangtgattgcatcaagccatataacaacttccttaagcggcataccatgccaaactgccncatagcaacaaacacaggtgattggtatatatacacctct

SEQ ID NO: 8985 - DNA, 364 bp, Glycine max
taaaccatatatattggagacacgcctatacgggttttgaaagcagtactgtcagcccatattgcatcatccatcttgcttgacacaatccttccgagtggaggccataattatctccacgaacttctttagttccctgttggagacaatcagcattgaccgattagcttgggggtgatattttgaggctactttgtgtgtgacatgacaatggcctaacaccttttgcaaataactgttgcaaaagtgagagcctcatcactgattacgctactttgtgtgtgacatgataatggcctaccaccttctacatatgactattgacaaagtgagagccctatcattgaatatgacccttggcacc

SEQ ID NO: 8986 - DNA, 374 bp, Glycine max
gagcccttacaactttattcttaacatctatggaaatcttcttattgcttatttgtcgtctataaaattatggagactgcatctgctattcctaatacgtgtgtgtatttgactagatgaaaccaaaaggaagttgctatattggcgaaaacgtttccacattatcagtggcattacttgaggacatctttatcttcatcaagactctatgttaaggattattcacagagatctaaaaactagcaatattttactagatgccaatttggatcccaatatatcaaactttggcctggctcgatcattcttccgagatcatgtggctggaacatagttagcttctatctaattatgactctttgatattgctgtat

SEQ ID NO: 8987 - DNA, 432 bp, Glycine max
  unsure at all n locations
ctgtagggaattcaaacgacaataactntntactcggatgtccgattgaatcgggtaatatatcgagacgctcaataatgagactagaagctctgagcaaatttaaatgacaataactntatacacggatgtccggttgagtcccgtaatatatcgagacgctccaaattgaaaacggaagactctagaaaattcaaacgacaataactttttactcggatgcgcgacagagtgtcgtaatttatcgagagatgctccaaattgaaaacggaagctcgtatcaaattcaaacgacaataactntttactcggatgtctgattgagtcccgtaatatatcgagacgctcaaaatttagatccaaagctctgagaaaattgaattgacaataactttatacacggatgctcggtagagtcctgttatatatcga

SEQ ID NO: 8988 - DNA, 419 bp, Glycine max
agcttctagtctcaattgtgagcgtctcgatatattacccgattcaatcggacatccgagtaaaaagttattgtcgtttgaattccctacgagcttcccttttcaatttggagcgtcttgatctattacaggactcaaccggacatccgtgtaaaaagttattgtcaattcaattttctcagagcttcggatctaaattttgagcgtctcgatatattacgggactctatcagacatccgggtaaaaagttaatgtcgtttgaatttgatacgagcttccgtattcaatttggagcatctctcgataaattacaacactctgtcgggcatccaagtaaaaacttattgtcgtgtgaattttctaagagtttccgttttcaatgtggagcgtctcgatatattacgggactcaaccgaac

SEQ ID NO: 8989 - DNA, 384 bp, Glycine max
cgaatcggacatccgtgtgaaaagttatgaccatgtgaatttctcaagagcttccgctggtcaagttcgatcctctcgacatattatgcacccgaatcggacatctgtgtgaaaagtcatgatcatatgaatctctcgagagtttccgatgttaaatttcgagcgtatcgatatatgataaccctgaatcggacctcagtctgaaaagttatgaccatttgaatttgacgagagctttcgctgatcaacttcgagtgtcactgtatgtgatgcgccaaaattggacatccgagttaaatgttatgaccattagaatttctcaagagctatccttgttgaattgtgagcgtttctatatgagatttgcctgaatcggacatccgt

SEQ ID NO: 8990 - DNA, 420 bp, Glycine max
agcttcagtagtagcaccaaaaattatgtcatcaacataaatttacacaagcaacaacttattgtttgatatcttgataaacaatgttttaacaacttgacctgttacaaaagattgtctaattaggaaattgctcaatctttcataccaagatcttggtacttgttttaaaccatacagtgcctttttcaacttataaacatgattaggatgttcgaagtctaaagtccttttcaactagatgattaagattatgcatgtttacatgtgcagttgtatgatgccatagccaagaatcattaatcttacttaccaagtaaggctaatgaaatgatgcatgttcaatattcaacatataaatattacctattcttttacctatgtgaacaacctcactagtttttgcttcataaatgaaac

SEQ ID NO: 8991 - DNA, 410 bp, Glycine max
agcttgagacattcattcataggggactgttaagagatgggatgttcacattcaaggttggatgatgaagaggcagttcggctttgtaaagacagaaagaagtttatcagacaagctgttgaacaaagaactcaatttgccacgggacacatagcatacatagaatctcttaaaagggtgtcagctgcacttcgcaattacattgaaggcgatgagcctcgcgagttctcattagacacagtcatcaccccacctttcacgcctgtgaagaggaaaactggctcatgattcattcccatatcagcaaaaccctttgctacaacaggagcaattgagtttgggatcggaccacactctactttgaaagtgaattaccttaggcctggtggtaacccaacaatttcagttga

SEQ ID NO: 8992 - DNA, 444 bp, Glycine max
  unsure at all n locations
tactttaagtatatctagaatttccttcttggcaattcttttatattgcttgatggcagattcccattcttgtatactttctccaaccaagtgggaacctattacttccaacgcccatggaagaccagaagcataagttactacgcgatgcaagacctccacgtaagttggatcagctntttcttttttaaaagcttgccatgtaagcaactgaagagcatggttctcatccaattccttcatttcatatgttttattaacttcatgagatgctagcaattgtttgtcccgagttgtgatgatgattttgctgccgcgaccaaaccaatcaggtcttccagcaattgcttgcaattggtcgtgtgtgtcaacatcatctataatcaagagaaccttctttcccttgagcctacactgtatgaatgaaattcctgttgcttactt

SEQ ID NO: 8993 - DNA, 415 bp, Glycine max
agcttgcccaaaataaacagttttgccactagagagcaagtataattggtcaaatagctcaaacacttcactgcttggctgatgaatagaggctatcacggttcttccatcccttgccaaggcacgtagtgtctgcgtcacaaagaaagctgaagcactgccacaaaagacaaaaatccaaaaaaaatcaagacatatgttcagcaaaaagagatgttcctactttacaaatatgaacaactggggacataacaaacattctccaacaaaaatactattatttatagaatattgtaatctccctttagaaggtgcacacaaattgatgttgtgactatgtagaacaacaaaaagacgaagacataacttccaaattcattttatgaaatcgtatttggttgtacaatttttttat

SEQ ID NO: 8994 - DNA, 418 bp, Glycine max
agcttgtttcaatccatagatggacttattaagcttgcagactaagtgctcaccaacactagataagaatccctcaggttgtttcatgtaaacctcttcttctagatcaccattcaggaacgccattttcacatccatttgatgcaactcaagatcaaaatgagctactaatgccaaaattactcgaagagagtctttcttagatacaggggaaaaggtctctctgtaatcgattccttctctttgagtgaatcctttagcaacaagtcttgccttatgtctctcaatgttgccttctaagtctttctttgtttcgaagacccatctgcatccgatggcttttacaccaacagacaactcaacgagatcccaaacttggttagatgccatagaatccatctcatccctcatagcattg

SEQ ID NO: 8995 - DNA, 449 bp, Glycine max
tatgagatatccatgaagcttgcacaccatatcaatgaataactgagctaccttatgtgctctgaaatgggtagaaagcatgccgaaatgggactcccttgagaatcgatccacaactaataaaaccacagtagctccttggaagttaggcaaccctgtaatgaaatccaaggccacgtcctcccacagaatagatagagggggaattggttgaagaatccttgaatgttatttagggatatactttgtaagttgacaatcagaacaccttagtgatgtagcttctatggagcttgtaagccttggatcttcttcatcaatgaagtcatttgcttcttgaagtttgatggtagcggaatggagaaggagaaatatgattggagacgccacttcaagaagaagatgagtctagaagaagctcaccaccataggaagccatggataagagc

SEQ ID NO: 8996 - DNA, 435 bp, Glycine max
  unsure at all n locations
taacaagtggaatcagaggaaagtctctatggcaggcagaattactttaattaattctgttttgacagccttgcctttattttatctgtctttcttcaaagctccttcagcagtgttagtgaggctgacttcaatccaaaggaattttttgtggggaggaggtgctgaagggaaaaagatcgcttggatggcttgggatcatatatgtactcctagaaatcaaggaggtttgggtatcaaagctatcaaggatcttaatagagcccttcttattaaatggaagtggctgatgttccaccaatcagaccaattgtggtgcagaatcctcatctcanaatacaaaggatggagagggttggaagagaattcccacaggcagtctcattccttttggtggtcggaattgaaggctgttttactccatagcagcatgga

SEQ ID NO: 8997 - DNA, 341 bp, Glycine max
agcttgtaatcgattacacagtaaggaatttttcaaaataactcccaagagtcacaactgttcaggaagtttttgaatggccatcaaaggcctttaaagacttgggatacgaaattccttagaggttttctgaataacattttcttatcctctcaaaaccaaattgtcttatcattctcaaaatattccttggtcaaaacacttgcaaattcaataaggaatcttgatcgatcttcaattgtaatatccttctcttaaagagagaaaattcttcttcttcttattcaaacagatctgtataagagaccgaaagtctcttcagttgtaaaggatatttaaca

SEQ ID NO: 8998 - DNA, 427 bp, Glycine max
taacataaggcatgcgaagagggtggaattcctatagcaattcccttatgttatcaaacataaaaagggaaaaggtaatattgtagccgatgctctttctcggcgtcatgcattactttctatgcttgaaacaaaattgattggtcttgaatgtttgaaaagcatgtatgaaaatgatgaaacttttggagaaatttttaaaaattgtgaaaaattttcagaagatggtttctttagacatgaaggctttcttttcaaagaaaacaaattgtgtgtgcctaaatgttctactagaaatttgcttgtttgtgaagcacttgaaggaggtttaatggggcattttggggtccaaaagactctagaaacattacaagaacatttttattggcctcgtatgaaaaaggatgtgcagaaatcttgtaacatt

SEQ ID NO: 8999 - DNA, 384 bp, Glycine max
  unsure at all n locations
ctngagcaattcacatggtaataacttttcactcggatatccgattcaggcacataatatatcgagacgctcgacactgaaaatccgaagctattgagcaattcaaatggtcataactattaactctgaggtccgattgacgtgcataatatatcgatacgctcgaaattgaataatggaagctctatgatcaattcagatggtcataactattcactcggatgttccaataccgtgcataatatatcgagacgctcgaaattgaacaacggaagctcttgatcaatacaaatggtcataactttatactcggatgtcggacttatgcgcataatatatgcatactctctatatgtacaacggaacctcttgatcaattcaaat

SEQ ID NO: 9000 - DNA, 289 bp, Glycine max
  unsure at all n locations
agctttgatgtaacatttggagaggttaatgtaacaacgagatgatgcgctccatgagaggttggatcaaatggagaatatagaccatatgaattgctcaagagcttccattgttcagttgcgagcgactagatatataatgcgcctcaatcggacctccgagttaaaagttatgaccatttgaaatgctcagagcttccattgttcacatttgagcgcttcgatatattatgcacctgaatcggatctgcgagtgacgacttatgaccatntgaattgctcaagagct

SEQ ID NO: 9001 - DNA, 399 bp, Glycine max
agcttttgagcaattcattatggtcatatttagtcactgggaggtccgattcatgcacataatttatcgagacgctctaaattgaacaacggaagctctcagaaaatttaaatgctcataacttttaactcggaggtccgattcaggcggataatatatcgagacgctccaaattgaacaatggaagctgttgagcaattcaaatggtcataaatagtcactcggaggtccgattcaggcacataatatatcgagacgctcgaaattgaacaacggaagctctcaagaaattcaaatggtcataacttttaactcggaggtccgattcaggcgcataatatatcgagacgatcgaaattgaacaacggaatatctcaagcaattcaaatggtcataact

SEQ ID NO: 9002 - DNA, 399 bp, Glycine max
agcttcggtattcaatttcgagcgtctctatatattaagagacttaatcagacatccgagtaaaaagttattgtcgtttgaatttgctgagagcttcagcattcaatttcgagtgtttcgatatattctgggactcaatcggacatccgagtaaaaagatattgtcgtttgaatttgctcagagcttcagtattcaatttcaagcgtgtcgatatattacgcgactcaatcaaacatccgagttaaaagttattgtcgtttgaatttgctcagagcatcaacattcaatttcgagcgtgtcgatatattatggggctcaatcagacatccgagttaaaagttattgtcgtttgaatttgctcagagcctcagcattcaattttcagcgtctcgatatat

SEQ ID NO: 9003 - DNA, 386 bp, Glycine max
  unsure at all n locations
agctntaacactcaactttcatggaatagtcgtttaaagataacagagaaagtaaagcttcaaggtaataataagataaagataaaatccagaacccctcacttgcccttctgttaactccaaaagttgtggcaacaactcttcatccctcattctctcaattcgtttcgatattgaatcaacagaatatatagccactgttaagcgtgaatgcagatccttcacaactgaccgggtcttgtcaatcacatgagtgccttgatctttagcaaattgatgcctaagctggtgacattttcggccatagtccttccttatggattcactagcctacagatagccgaacaggaggtcaaaatgatcgatgattgataacacaaaatttg

SEQ ID NO: 9004 - DNA, 406 bp, Glycine max
acagctgattaactacaaccaatattggtgatttatctaagcaactaaaagaagaactatcgtggggatgctctatatgcaaccgttgatggatagtttgaggacttgagaggaggagacactgccttgctttcttgacccccaagctctctgtcaagcaacttagctgcccttggatctgttagtagtgtcttctggaaggactgtgagaagccagttgcaatgatagtcacatgaatctccccattgtagcgatcatcaacaacggcaccaaatataatattggcagaagggtcggctaaacttgtcaccacctacagcagttatgaagttttgaaaacaggatacaaatgttcacaacaaattcataagatcaaaagaatgctgaaatgttccttctgacaat

SEQ ID NO: 9005 - DNA, 444 bp, Glycine max
  unsure at all n locations
cgtgacctatgaaactcagcttcntgagagaacttccttgagaagctagagattatctacacacacccctctcataactaagctcacctctntgagaagcttccttaagagattcctaaagaagctagagcttagctacacatacctctctaataggtaagctcacctccttgagatgagaagctagaacttagctacacaccccctataataactaagctcacccccatgacaaaaaacatgaaaatacaaaaaaaagtccttactacaaagactactcaaaatgccccgaaatacaagactaaaaccctatactactagaatggccaaaatacaagcccaaacgaaggaaaaacctattctaatatttacaaagacaagcgggctcatacttagcccatgggctcgaaatctaccctaaggctcatgagaacccttgggcct

SEQ ID NO: 9006 - DNA, 412 bp, Glycine max
  unsure at all n locations
agctntaaaagattggctaagattntgttaaaacataagcacttagacaatgaaggaaagctggagttgctgcacatgatgtccaacgttatgtcaaagaataagatcgggctgcacaatgcacaaggcaagataaagtgtcaaatgaagaattgaagctgcaggattcacgatgtcggatataatgtccaggacatcctgcctgaaaatactggaattgctaaaagcattgaagctgcaggatccacgatgtcggatacaatgtccaggacatcctgcccgaaaatactggagttgctaaaagcattgaagttgcaggatccacgatgtcggatacgatgtccaggacatcttgcccgaaaatactggacatataaatctgttatatctttaacagattattgtgcagtta

SEQ ID NO: 9007 - DNA, 439 bp, Glycine max
gtgacactatcaatctcagctttgcaagctggaatcatttatcctatctccgacagccaatgggtgagtcccatccaggtagtcctgaagaaaaccggcctcactgtgataaaaaatgagaaagaggagctgattcctactcgggtgcagaacagttggagagtttgcatcgactataggaggctgaaccaggttaccaaaaaggaccattttcccttgccattcattgaccagatgcttgaacgcctggcaggtaaatctcactactatttccttagactttttctaaacaacattgtctgatcctctcaaaaccaaattgtcttatcactctcaaaatattccttggccaaaacacttgcaaattaaataaggaatcttgatcgatcttcaattgtaatatccttctcttaaagagagaaaaatcttctttttctta

SEQ ID NO: 9008 - DNA, 406 bp, Glycine max
  unsure at all n locations
tctaaactntatacaagaatgaagctctgataccacttgttggacaagtggccttagatatcttaagaaggggggggggttgaattaagatattacaaactatttccccaattaaaaattctatttaactttctattcaagttataaattcccttaataatgaatttcttaaataatgattcaaatagaacaatctgaatgtgaatataaaacaataataaataaaggagttcaagggaagagaaagtgcaaactcagatttatactggttcggccacacccttgtgcctacgtccagtccccaatcagcccgcttgagagttccactatcttgtaaattccttttacaagttctaaacacacaaggacaatccttcctttgtgtttagaattctttcacaacaag

SEQ ID NO: 9009 - DNA, 411 bp, Glycine max
cgttacaaatataatcaacacgagatcccttgagagatttagtgaataagtccgcgatcattggagcggacaaaatcggtggtgacttttcctgagagcactttctctctcacaaagtgacaatcgatctctatgtgcttagtccgttcatggaataccagattagatgcaatgtaaagagcagcttgattgtcacaaataaacttagtgtcctaagtgtctccaaattgtaactgttggagaagttgcctaagcccaataatctcacatgtaactactgccatagcacggtattcagcttcggcactggatctggctactacattttgttttttgcttctccatgagatcaaatttcctccaataaaaacacaataaccaataatggaccttctgtctgacaatgagcct

SEQ ID NO: 9010 - DNA, 409 bp, Glycine max
tatgtaaaagcacttataagagaaggaaataagaagataaaaaatgaaataaacttttcataagctacaattagcttatgcataagttaaaaatcatatttttaaaaaaattatatgaaagaacttttacaaattatcttgtgcataagttgatttaatatttatttacgagaaaaaaaaaatcctatcttcaagtctcaagcatcacaaacggcatgataagtctcaatgagaatatttattaatttaaaaaataggcatttgattatgcctatctgaattgaaatttgattatatacaaattgaatgtagatacatatatatgaaatagttagaagtgtcatattcacacaataagtgaatgaaacaagatagattgatttctttgaccattacaggggaatcatgt

SEQ ID NO: 9011 - DNA, 415 bp, Glycine max
agcttagagatcttcaaaaactcttatccaagattcatgtatgaattccacgctttcggtatgtatgctcataaaaagctttcatgctcatcaatcataagagatataatgtgcatattttgcattgtaatgctttccttttactttcatctttatcatatatctgtatgttatgttctttttcttgttagtgatgctactaaagtgaaaaatggtgccataatctgttttagatatttgccaaacaaaagcaacagacagatgtggagattggagaaagagataaactcaaagatatcaaagctcataaaacaacgccaggaggaaactcatgagcatgatctattacaaatgatacttgagggcgcaaagaattgcgagggcagtgatggcctattatcacactccatctcat

SEQ ID NO: 9012 - DNA, 414 bp, Glycine max
tcacatgttttctcttattctcaaaggtgaagtaaaataatggttgaagcgtgcacaaactgacttggttgccacatgggccttgtgttgacaagccttattggatagattcttccctccctcaaggactaaagagttaagaaactagatcaccaacttccaacaagaagatggtgagtcaatatatgaggcgtgggagtgatacaagggttacttgtaagaatgccctcaacatgggttaagcaaatcattgacgattcaattcttctttgaaggactgaaccaccaaagcgtgtcaaccttagactccagagttggcaaatcattcatgagcaagccaatcaatgaatgcaagactatccttgaggttgtagctttaaaatatggtcaatgggaaaagaaaagtgataatcg

SEQ ID NO: 9013 - DNA, 400 bp, Glycine max
agcttgttagaaaaatgtaggtaaaaatattattgagcagataatgagggctggaagaattaccgaatacggtgttgatggggttcatggcgacctggttcttagtggcatcttcgatgagtctttcggtattgatgaaggcgacataaaagggtgtggtacggttgccctgatcgttggtgatgatttcaacgcagtcgtgctgccagactccaacgtaggagagaacctgtggattttagagaaaatgagtttagaaacctagggcgattcaaatcaagttcaaaacgtgttcaaacttgtgagaaacctatgagaaccactttgaatctatgagaatgacagagatgcaaagtgaatgagagctacaacggtgttgaaggagaatgaagtgtgcaac

SEQ ID NO: 9014 - DNA, 389 bp, Glycine max
agcttcatgcttaactatgtatggcaaaacttcattattgttgttcaagacatacaagtgagcttgtaacaaatcttctacacttggagtgatcacctgcagtcctcttgaacccttaccacccactctgtcatcatgccgacactcaggaagcccaataggtttagccttctctaagtattctgaaaaaaattcaatggcttcttctgcaatgtacctctcaacaatagatgcttctggacgatatagattctttgtataccctattaagatcttcatgtatcgctcaaccgggtacatccaccgtagataaacaggaccacaacatttgatgtctctgaccagatgcacaatcaagtgaatcatgatgtcaaagaaagcaaggggaa

SEQ ID NO: 9015 - DNA, 399 bp, Glycine max
  unsure at all n locations
agctnttcctctagttgctctattaggatttccaagcgttagagtgaaagagaagggattgaaccctcattttactatctctgtgcgagggaaatttctctctctatagacatcatatagaaaatcccaacggtggaggtgtgctaacatgaactacaaacctggcctataaatatcacaatgatccaatggttaacgagtacaagagcgtagttttacttaaacaagtttgggtgtatgcgagaaaaagaaagctacgatgcgaatgacatttctctcacctcagacatttttttcgcatattccaacggtaaggatgtcccaaaattagttctagacttggttttcaaatttgacgatgatctaatggtgaacgagtttgggattgtcattttactg

SEQ ID NO: 9016 - DNA, 418 bp, Glycine max
tctttgagaaaacttccttgagaagctagagcttagctacacacacttttctataataactaagctcacctccttgagaagcttccttaagaagattcctaaagaagctagagcttagctacacatacctctctaatagctaagctcacctccttgagatgagaagctaggacttagctacacaccccctataatagctaagctcacccccatgacaaaaaacatgagaatacaaaaaaaagtccttactacaaagactactcaaaataccccgaaatacaaggctaaaaccctatactactagaatggccaaaatacaaggcccaaacgaaggaaaaacctattctaatatttacaaagataagcgggctcatacttagcccatgggctcgaaatctaccctaaggctcatgagaac

SEQ ID NO: 9017 - DNA, 417 bp, Glycine max
  unsure at all n locations
agcttagcaaatggacctgngtgttgcctagtttcatcatatcttccataatactcatcacctctatcatatctaataattttcacatttatgtctaattgcccttttatttcattgtagtaaatttctaaggcatccattgcctaagaaatctcgggcagtaagtagacataaccgtaacgtgaataatcatcaataatggtgataaagtatctttcctttctgaaagaactaacatcaaaaggtccacaaatatcagtatgcacaatttcaagaagttgagtgcttcttgtagctcctttctttgtatgttttgcttgttttcccttaatacaacccacacaaatatttagatccgtaaaatctagataaggaagaatttcattctttattaatcttttcatcctttctctagaa

SEQ ID NO: 9018 - DNA, 426 bp, Glycine max
ggaccacgatcagttggaggctcatgtcagacgcccccagggtgactagcactctgctcatacattactctgagtgcacctgatcagtagttctgttggcccggtcaatagaactttcagagttcaatatcagtataaacccctagccccataaagacacaattcatggaagacattctggtagaatttgttgggaatgaccaaaccaccacagactggtggaacctttatgttgacggcgcgtccaacatgaagggaagtagggtatgaatcatcctcgaaggacttgataatgtaaccctagagcaggccatcaagctcaacttcaaagcctcaaacaatcaggctaagtacgaggggctcattgcaagtctaaaactagcaagagaagtcggggccaagaagctatgatgctacatagactcg

SEQ ID NO: 9019 - DNA, 405 bp, Glycine max
  unsure at all n locations
agctnttaactcaatttaagctgaggattcttattcaatgattattgttaattgcttttggtcccaaatctttgaggttgttttttccaataaacgttggttatatttctctttatgttatttgtaaagttgataattaacaatgatgaaattagtacattagttttttttaaatccaataaaaccatcttatttacctacttttattagtttgtgtaattatgttaaaaatgctttgtaataaaaaagaccagatgaagtagtaaatataaatacatttttaagcaaaaattcaaaccttagtttgtttttatcgtaatattcgaaaattaaccgtacattagattcaactctcctaggttacaattagtttttttttggcatttttgtggcctagattttttt

SEQ ID NO: 9020 - DNA, 390 bp, Glycine max
ctcagctatgctgcaacatttataatagaccctctcagtagctaaaccaacaacaatataataattatgatctttcaagcaacagatataatccaggttggaagaatcatccaaatctgagatgggcaagtcttccacaacaacaacagcctgtccctcctttccagaatgctgctggttcaagcaggccatatgttcctcctccaatgcagcagcaacaacaacaacaaagacaacaagcagctgaggccccttctcaaccttccttagaggagttagtgaggcaaatgatcatccagaatatgcaattttagtaagagacaagagcctccattcagactctgacaaattagatagggcagatggctacttagttgaaccaagctcagt

SEQ ID NO: 9021 - DNA, 329 bp, Glycine max
tgctaacccatggaagctcctaatatctcccacactttctggggtgggccattcttggatggcctcgattttctcacgtgccactcggaccccatatctaccaactacaaaacctaagaaaactatcttatctacacaaaaggtccacttctctatatttgcatagagggtgtttttcctaaggactgaaagaacttgtctgagatgtcctaagcgatcatatgggctcctactatacacttatatatcatcaaaataaacagctacatatctacctatgaaatccctttagacatgatgcgtaagcctcataaacgtgcttggtgcat

SEQ ID NO: 9022 - DNA, 397 bp, Glycine max
agcttcaagagaaagatggcctcagcatattccttatttccagaagggaattctatcaatagacctccaatctttaatggagagggttaccactactggaaaacccgaatgcaaatttttattgaggcaatacatctaaatatttgggaagccatagaaatagggccttatatacccaccacagtagaaagagttacaatagatggtggttcatcaagtgaaagcataactatagaaaaacctagagatagatggtctgaagaggatagaaaacgagtaccatacaacttaaaagccaaaaacataataacatctgccctgcgaatggatgaatatttcacggtttcaaattgtgagagtgctaaggaaatgtgggacactcttcgattaacacatg

SEQ ID NO: 9023 - DNA, 285 bp, Glycine max
agaatcggacctcagtgttaaaagttatgaccatatggatatctcgagagctatcgcgggacagcttccagcatctagacgtaagatgcgccataatctgacttccgtgtgaaaagatatgaccatatgaatatctcgagagctttcgctgtagaacttcgagcgtctaaatatatggtaagccagaatcgagactccggggtgaaagttatgaccagttggatttgaccattgcgatcttggttcaactcccagcgtctagtcatatgctgtccccgaatctaa

SEQ ID NO: 9024 - DNA, 410 bp, Glycine max
tctagacaatgcatcagaagggatatttccctacctggtttatattgtatggagaaatcataaccaaggaatttgtgtaaccattggtgttgttccagagtctgcaatgtttgctccaacaactccttaaggcttttctgatcagttctaataatgaacttatggcctaacaaataatgcctgaatttggccatggctgtgatagcatagaattccctagtataagtagattgcttctgcattctaggggacaacttcttaaagaaataagcaataggatgttgagattgactcaataatgctccaatacccgaaccagaagcatcagtctcaagtacaaatggttctctaaaattaggaattactaacattggagttgaagtcatagctttcttgagttgcaaaaatgc

SEQ ID NO: 9025 - DNA, 417 bp, Glycine max
agcttgttcagttcatcaaacaatctctcttttcttagtttgaagagtaacaggttgaagggtccatttccactttcaatccctagtgtcatcaccctaactgaaattgacatgtcatgcaatcaaatatcagggagattgcaagatttaactgatttgagtagcttggaacaactagatttaagggaaaacaggttagactctaaactacctgcaatgccaaaagggttgataagtcttttcctcagcagaaactctttctcaggtgaaattcccgagcactatggtcaactagataggcttcagaagcttgatgtttccttcaattcactcacaggcactgctcctgctgaacttttttctttgcctaacattagttacttgaatttggcatccaacatgttgaatggaccactc

SEQ ID NO: 9026 - DNA, 416 bp, Glycine max
  unsure at all n locations
gtgtataggcaagaacccnctctgttaattaaaggagttgacatttcttcaaggatggaagagataaatcagttgagtagagaaagggatgaattattgtaggagttgaggagtaacctacttaaggctcaggatcagatgagataatatgcaaataaccatagaagagaactgatatttcatgagggagattgggtttttttgaaattgcaaccttatagaatgaggtccttagcaaggaagccaaatgagaaactgagtccaagattttatggaccctacaaggtgatacagaaaataggggaggttgcttataggttggaacttccagaatgaaagcaagatacatccggttttccatgtatctntgctcaaaaaggcagttcaacccacttgtttccctcagacattaccta

SEQ ID NO: 9027 - DNA, 385 bp, Glycine max
agcttagcaaccaatttcaccatcaagtattatgatcatctttgggcttcaagtacaaagtgtaatcaatatccaacttctaaggcttcgaggatagggaaaataacttacaatttgtagcatcatcctcattcattcccagaaataaagcagtgtctttaatgcttatcgtagaataagcagagagaagcagctgaaacatctcctttgtgtaaagttctggaaaaagtttattggtattaaaatttttgctgaactaaacatctttgaataaaataaaggtgcacaagacttgtgaactcaagctatatggagaagcaatccaaaaccaagaatcatatttaataaaccaattgcagaagttaccatggaagtagtacattac

SEQ ID NO: 9028 - DNA, 425 bp, Glycine max
  unsure at all n locations
ctattgngccataaaatntctgaactntgatgaagccgcatctagagaccaaaggatgatacaactattggagttggaagaaatgagattgattgcatatgaatcttcaaggttgtattaagagaaggttaaaacttaccatgataaaaagttgctaaagaagaattttcaaccaggacaacaggtgctactattcaattcaaggctgaaattgttccctgcgaagatcaaatctaaatggtccgaaccatttaccatcaacaaagtcagaccatatggagcagtagagctttgtgatcctcaatccaaggatccagacagaacttgggtagtgaatggacaaaggttaaagttgtaccatggtggaactattgaaagattaaccactgttctatccttccaagaataacaatgaactatgcgtc

SEQ ID NO: 9029 - DNA, 414 bp, Glycine max
  unsure at all n locations
agcttgaagganaactggatgcattggttaacttggtaacccagctggccttgaatcagaaatctgtacctgtcgcaagggtttgtggtttgtgctcctctgctgaccaccatacagacctttgccctaccatgtagcaacctggagcaattgagcagcccgaagcttatgctgcaaacatttacaatagacctcctcaacctcagcagcaaaatcaaccacagcagaacaattatgacctctccagcaacaaatacaaccctggatggaggaatcaccctaatctcagatggtctagccctcaacagcaacaacagcagcctgctccttccttccaaaatgctgctggcccaagcagaccatacattcctccaccaatccaacaacaacaacagccccagaaacagccaacag

SEQ ID NO: 9030 - DNA, 419 bp, Glycine max
  unsure at all n locations
ntgagcaaattcaaacgacaattactttntactcggatgtctgaatgaatcccgtaatatatcgagatgctcgaaattgaaaacagaagctcatagcaattgcaaaccacaataactattaactcggatgtccgattaagtcccgtaatatatcgagacgctcgaaattcaaaacagaagctctgagcaaattcaaacgacaattactttttactcggatgtcggaatgaatcccgtaatatatcgagatgctcgaaattgaaaacagaagctcatagcaattgcaaaccacaataactattaactcggatgtccgattaagtcccgtaatatatcgagacgctcaaaattgaaaacataagctctgaggaaattcaaacgacaattactttntactcggatgtctgaatgaatcccgt

SEQ ID NO: 9031 - DNA, 398 bp, Glycine max
agcttgagcaaattcatacgataataacttttaactcggatgtccaaatgaaacccataatatatcgagatgctcgaaattgaaaaccgaagctcgtagcaaatgcaaaccacaataactttttactccgacattcgactgagtcccttattatatcgagacgcttgaaattgaaaacagaagctcgtagcaaatgcaaaccacaagaacttttaactccaaaattcgattgagtcccgtaatatatcgagatgctcaaaattgaaaacagaagctctgagcaaattcaaacgacgaataaatttttctcggatgtccgattgtgtcccgtattatatcgagacgctcgtaattgaaaacggaagctcgtagcaaactcaaacaacaataaattttta

SEQ ID NO: 9032 - DNA, 401 bp, Glycine max
  unsure at all n locations
cttgagcaattcanatggtaataacttttcactcggatatccgattcaggcacataatatatcgagacgctcgaaattgaacatcggaagctcttgagcaattcaaatggtcataacttctaactcggaggtccgattgaggtgcataatatatcgagacgctcgaaattgaagaatggaagctcttgagcaattcaaatggtcataacttttcactcggaggtccgattcaggcgcataatatatcgagacgctcgaaattgaacaatggaagctcatgagcaattcaaatggtcataacttttcactcggaggtcggattcaggcgcataatatatcgagacgctcgaaattgaacaatggaagctcttgagcaattcaaatggtcataacttttcact

SEQ ID NO: 9033 - DNA, 383 bp, Glycine max
  unsure at all n locations
agctntgatgtaacatttggagaggttatatgaaacaacgagatgatgcgctccatgagaggttggatcaaatggagaatagagaccatatgaattgctcaagagcttccattgttcaatttcgagcgtctagatatataatgcgcctcaatcggacctccgagttaaaagttatgaccatttgaaatgctcaagagcttccattgttcaatttcgagcgtcacgatatattatgcacctgaatcggacctgcgagtgacaacttatgaccatttgaattgctcaagagcttccattgttcaattttgagcgtcacgatatattatgcacctgaatcggacctgcgagtgacaacttatgaccatttgaattgctcaagagct

SEQ ID NO: 9034 - DNA, 397 bp, Glycine max
tttccacctttcattagcatctgcatctctgtggatcagagaatggaacttcatcttcagtcagctaaacccctgagtccatagggatccccttcttcgagtacataacctcaatccctaagaagtacttcaaggcccccaagtctttagtctgaaactgagtttgaagaaaactcttcaagttgtcagtacctttattatcacttcttgtaatcacaatatcatcaacatacaccacaagtaagatgctgccaaggttagtatttttataaaatacagtatgatcactttgactcagcttcaatccaaatgcaaggaccacaccactaaatcttccaaaccaagatctaagtgattgcatcaagccatataacaactttcttaagcgggataccat

SEQ ID NO: 9035 - DNA, 410 bp, Glycine max
tgtaattgattacatcatttgtgtaaccgattaccatatagaaaaattcaaatttcaagtctgaatgtcataactcttaataaactaatcgtgtaatcaattaccacatttatgtaatcgattactagtaaggaattttcaaaaataactcccaagagtcacaactgttcaagaagtttttgaatgaccatcaaaggcctataaataggtgatttgggacacgaaattgctcagagtttttctgaacaacattgtcttatcctctcaaaaccaaattgtcttatcactctcaaaatattccttggccaaaatacttgcaaattcaataaggaatcttgatcaatcttcaattgtaatattcttctcttaaagagagaaaactcttcttcttattcaaagagatctattta

SEQ ID NO: 9036 - DNA, 316 bp, Glycine max
agcttatcccatgcttctttggccgtctttgcattagatatcttctcaaatgtatcttcatccaccgattgataaatgagaaagagagctttcttgtctctctttcttgactccttcaacgtctcctttacaccttgacttagcgaggcttcatcttgctcctcgaagccattctctacgatatcccacacatcttgagctcctagtagcgccttcatcttgttactccaattatcatagttgttctttgtgagcatcggcatttggaaaggaaaacctccattcgccatcttttgaggatcttgaagctctgata

SEQ ID NO: 9037 - DNA, 460 bp, Glycine max
ctctgcagggcatgcacagcttgttataaaaaaaagcgtctttctaactctatatttgctatatctttacacgtcaatgcttattgaatcagtttgatatagtgctcgagttagctgatataagtaatgtgcctttatattaagactatttacacccaacaatacccgttgtattattacatagacgagatgtatataaataaatacaacatgatatacgattttcctgattactcacctttgcttggcatactgaactttggcactagactgaacttagacataatgatacacgtttcgaatacaagtcataattgatattctgataatataatgatttacttggaacagtcatatcaaaaggctttacaagtggatccttcttacaaagcatctgctgagtgcctagccattgttttaacggatattggtaccaacataaagcttgctggaaacactc

SEQ ID NO: 9038 - DNA, 400 bp, Glycine max
  unsure at all n locations
agcttgttacatatagtttcaacctgatgtcctttaaagacttagtaaaaatatcagccaagtgctacgagatctatctttatgtgtttagtatgttcatggaagactaaattagatgcaatgtgaagagagcaacttgattttcacaaataagcttagtgtcttgagtgtctccaaactttaattgttggagaagttgcctaagccatgtaatttcgcatgcaacttctgtcatggtatagtattcaacttcagcgctggatctcgcaactatattntgcttcttgcttctccatgagatcaaattccctccaagcagaacacaatagcctgaggtagaactcctgtccaatcagcactatgagtaacaaacaatttgacattgtcttcgtcttcatat

SEQ ID NO: 9039 - DNA, 404 bp, Glycine max
tgtcaaagccttgtatggattgaaataagctataagagcttggtatgaaagactaagtttattcttactctagatagttactctagagaaatagtggacacttcactattcagaaaggcttagaaaaaggatctgctgattatacatatatatgtgaatgacatcattttttatgtaacctctgaaaggatgagcaaggagttttctgagctaatgaaaagagaatgtaaaatgagcttgatgggtaagttgaagttctttataggacttcaaatcattcaaaaagattatggaattttcatgcataaagagaaatacatcaaggacctattgaaaaggttcataatggatgaagcgacacaaatggctaccggtgcatccttccactatcattgactatgatg

SEQ ID NO: 9040 - DNA, 429 bp, Glycine max
  unsure at all n locations
cttgatttcctntgtttcggaaacctctcttttctcatgtgcacccaaacccaatctccgggttcgaagacaaccttctttctccctttgttggcttgtttagcatagcttttatttttcctctcaatttgatctttgactctctcatgaagcttcttcacatagtccgcctttgcttgaccttctttatgcttaaaaacagaaacattatgcataggcaaaagatcaagaggagttagtgggttaaaaccataaacaacttcaaaaggagaacaattagtggtgctatgaacagctctattgtaagcaaattcaacatggggtaaacaagcttcccaagtttttaagttattcctcaaaactgtcctaagcaaagtgtcaaaagtcctattaacaacttccgcttgcccatcggtttgtgggtgacaa

SEQ ID NO: 9041 - DNA, 415 bp, Glycine max
agcttagacgcagaacaagacaggttatacggagaagaataaagtgcgggcaaaataggtcacgcctgatataatttaaaatgtaagtccaacatcgattttcaataaaaaaaaaaaaacctatgttaacaaaatgatgttaacgttaacatcggttttcttcaagaaaccgatgttaacttatcatacgttaacatcggttttcagaaaaccaatgttaacctcggttttcttcaaaaccgatgttaaagaacttacgttaacatctgttcttctaaaaccaatgttaactaattaatgttaacatcgattttccaagaaccgatgttaacgtcactttgttaacatcggattttcaaaaaatcgatgttaaaggatacacattatttacaattatgccaccgcatttatcata

SEQ ID NO: 9042 - DNA, 412 bp, Glycine max
agcttctgttcctgagaaactggttcccataagacaacagggagtgaagattgctgaaaaccctagccttgcaacaagtcctagggaagtagacacggagatggacaagaaaatccgcagtattgtgagtagcattctgaaagatgcttctgtgcctgatgctgagaaagatgttccaacatcgtccaccccgaatgtttctgtgcctgatgttgagaaagatgttccaacatcttccggtccaaatgctgaagtactctcttcccccagcaaagagagatcaacagaggaagatgatcaagcgacaaaggagacccctgcaccaagggcaccagaaactgttccaggtgacctcattgacctggaagtagtagaatctgatgaagaacccattgccaacaggttggcacct

SEQ ID NO: 9043 - DNA, 397 bp, Glycine max
  unsure at all n locations
agctttgagattaacctcaagctagcatgtccaagcttcttatgccataccagtgatgctccttgacaaagagtaaacacaataccttttgactgtacaaatcaccgagtttaatctccttgtctcttagcagaaaagagtgaagagttatccttgttatggaaaatacatatatccttgtaaaaggtgacattgtatccactatcacataattgacttatgcttagcagattgtgcttcaatcctttaacaagtaaaacattatctttaagaggataaggagaaatgcatactttacctaccccagttatcagtccttttttattccctctgaaaatgatcaccccactagatatagggcttaaggattggagcatagactnttcgcctgtcatgt

SEQ ID NO: 9044 - DNA, 400 bp, Glycine max
ttcactcggaggcccgattcaagcgcataatatatctagacgctcgaaattgaacaacggaagctatcgagaaattcaaatggtcaatacttcgaactcggaggtcctattaaggtgcataatatatctagacgctcaaaattttacaatggaagctctttggctatacaaatggtcataacttttcactcgaaggtccgattaaggcgcataatatatcgagacgctcaaaattgaacaatggaagctcttgagcaattcaaatggtcataacttgtcactcggaggtccgattcaggtgcataatatatcgtgacgctcgaaattgaacaatggaagctctcgagcaattcaaatggtcataacttgtcactcggaggtcggattcacgcgcataata

SEQ ID NO: 9045 - DNA, 386 bp, Glycine max
  unsure at all n locations
agctntgatgtaacatttggagaggttaatgaaacaacgagatgatgcgctccatgagaggttggatcaaatggagaatagagaccatatgaattgctcaagagcttccattgttcaatttcgagcgtctagatatataatgcgcctcaatcggacctccgagttaaaagttatgaccatttgaaatgctcaagagcttccattgttcaatttcgagcgtcacgatatattatgcacctgaatcggacctgcgagtgacaacttatgaccatttgaattgctcaagagcttccattgttcaattttgagcgtcacgatatattatgcacctgaatcggacctgcgagtgacaacttatgaccatttgaattgctcaagagcttcca

SEQ ID NO: 9046 - DNA, 417 bp, Glycine max
  unsure at all n locations
tgaaagaaaattagtaattaacataagtaaagctagtaattaagtagagataattaaggttgacttatggtgatctagattttatagaattagaaaagggataattaagtcatattagtttaaagtggagggcattttcataaatgacaatataactagtttaaaatagaatttttagtttaattagttggtgattaattaaagtgtttagttacatgatgtagaataattaaaataagttagagttgtaacaccatgaaaaattacaactcatactgacagaggaagtgtngtgtcatctatacatgtatgaatttaattccaatagtatatgttttttatcatagaantttgtgttatatataagtgacaccctctaccgaaacatacatataaaaataaaaataaaattattaa

SEQ ID NO: 9047 - DNA, 449 bp, Glycine max
  unsure at all n locations
atccttacagtcacctgcggcatgcaagcnttggcatgtactcaacgaagtacttgtgtgcctctaaaataaaaggaataataatatatcagttagcagttacataggcaatngtaggaatccaacattccttgcaacatcaaagtttgcattgcaacaataaaaaaaaataaacaactgaaacaccttcaacctggatctgggttnttatctggatggtattgaatagaaagtcgcctatactttttctttatttcagactctgccgctccaggctctaatcctagaatattaaacggatcaaaaatttccatctgcattaaaattaaaagaaaaatttcagaacgtgcaccagtggaagtctcagccaattagtaaaatgttaaacacaaatacaagatccctcaatactaatttcaaatctcaagaagtggaatagctgaattcat

SEQ ID NO: 9048 - DNA, 285 bp, Glycine max
  unsure at all n locations
accatacaaaccttntgccttccatgtagcaacctggagcaattgagcagcctgaagcttatgctgcaaatatttacaatagacctnctcaacctcagcagcaaaatcaaccacagcagaacaattatgacctctccagcaacagatacaaccctggatggaggaatcaccctcacctcagatggtncagccctcagcaacaacaacagcagcctgctccttcctttcaaaatgctgcttggccaagcagaccatacattcctncaccaatccaacaacagcaac

SEQ ID NO: 9049 - DNA, 189 bp, Glycine max
tatattatgcgcctgaattggaactccgtgtcataagttatgatcattttcattttctcgagagctgtcgtgcttcaatttcaagcttctcgatatattatgcacctgaatcagactttcgtttgacaagttatgaccatcttgatttctcgagagctttcgcggttcaatttcaagcgtctcgatata

SEQ ID NO: 9050 - DNA, 436 bp, Glycine max
  unsure at all n locations
atcctctcagtcacctgcggcatgcaagctntgatggtgtcgagaagaaatcacatgtttgtcatcatcaaaaagggggttaatgtgaatgtatgtatacatgattntgatgatgtcaaaaaagaatctaacaaggctgcttcaaatgataagcatttgcttcaagaataattcaagattgcttcaacaaacaaagccttgtttcaagattcactaaagaccaagccttgccttataacanagtgatttcaagacatgcaaggctctggttatcgattaccaggaagtgtaatcgattaccagaagacggggttgagaaatagctgttgaaaaagggtnntgaatttgaatttcaacatgtaatcgattaccatatgtctggtatcgattaccacgcacgaaactttggaaactcanattcaaaagtcataaccct

SEQ ID NO: 9051 - DNA, 293 bp, Glycine max
ctttttactcggatgtctgattgagttccgtcatatatcgagacgctcgaaattgaatgttgaagctctgagccaattcaggcgacaatatctttttactcggatgtctgattgagtcccttaatatatcgagacgctcgaaattgaatggtgaacctctgagccaattcaaacgaacattaactttttctcggatgtctgattgagtcctgtcatatatcgagacgctcgaaattgaatgttgaagctctgagccaattcaaacgaacaataacttttactcggatgtctga

SEQ ID NO: 9052 - DNA, 357 bp, Glycine max
tgctagcatgcaagcttaagccataactaatagtgcctgccaagtatatgagactccattgtattgctgtccaatgctgttcagcgcgatctgacataaattgacagacctttgtggccaagaaactaacttcagatctggtgatggttgcatactgcaaagcacccacaacacatctgtatatagtgggatcagaacaagactcacaccctgatctggttaacatgcatccaccaaccattggagaggagatggacatagcttcatccatctcggttgtagacaacaaatctctcgtatacttgcactgatgtagaataagagcacattacgctgatgtctgacttcaatacccat

SEQ ID NO: 9053 - DNA, 409 bp, Glycine max
  unsure at all n locations
gcttctttcgtagttctttacacatataanatagtgacaatcttgtcttctcgaacagtgtttcaaagtcggctgctatatgccgctatccatgattgataatagggagaaccacactgcaaaaggtagttgttgtagttgaagttagagagccctagcacctatacacatcataccaaaattccatattttcaaatatcgggttgagtttcataccttgcagttggattctaaaatttcaccattatttgcatccctagcgcccatgtgggcactggctgtgcactaattcccttactagtcttggatcaactctgcaattctactgatgtcccactcatgccgcttgtttgcaactaagagatatattgaaaagatttgacaccaattgagaagaacatctagagaa

SEQ ID NO: 9054 - DNA, 293 bp, Glycine max
tcggacctcagtgtgaaaagttatggccattatattatctctagagctaccgctgttcattttcgagcgtctctatatgtgatgcgccttaatctaacttccgtgtgaaaagctatgaccattagaatttctcaagagctttctttgttcaattttgagcgtctcgatatgtgattcgcctgaatcggacatccgggttaaatcgtatgaccatttgaatttctcaagagcttccgctgatgaattcgaggctctcgacatattatgcgccccaatcggacatccgtgggaaa

SEQ ID NO: 9055 - DNA, 387 bp, Glycine max
agcttggagaaattcaaatggtcataacttttcacacggatctccaattcatacgcatcgcatatcgagacgcttgaaattgaacagcggaagctcttgagaaatttaaatggtcataacttttaactcggatgtctgattcaggcgattcacatatagagacgctcgaaaatcaacaacggaagttgttgagaaattcaaatggtcataacttttcacactaaggtccgattcaggcttataatatatcgagatgctcaaaattgaacaacggaagctctgcagaaattcaaatggtcataacttttcacacggatgtccaattcaggcttatagtatatcgagacgctcaaaattgaacaacagaagcttttcagaaattcaaat

SEQ ID NO: 9056 - DNA, 290 bp, Glycine max
tctagcattgttatgtccacgaatcggccatctgtgttttaagttatgaccagtcgaatttgttgagagcttgcattgttcaattgggagcatctcgataaattattttcccaaatcggacatccgtgtgaaaatttatgaccattctaatttatcgagagcttccgtggtttaatttcgagcatctcgatatattatgtccccgaatcgaacatctaagtgaaatgttatggccattcgaatttctcgatagcttccgttgttcaatttcgagcggctagatgagttat

SEQ ID NO: 9057 - DNA, 389 bp, Glycine max
  unsure at all n locations
agcttcttatccaaggctcatcttggtggtgaagctccttcttccatggcttattccctagtggatggcgcctcctctcacctcttctcctttgtcttccgctgcatttccatggtggaaaatcaccattaaaggacctcattgaagctcaaagatccagcctccatagaagccccacaagcaagcttccatcaataacttttcacacggatatgcgattcgcggacataacgcgtctagactctcaaaattgaacaacggaagtcctcgataattcgaataatcataacatttcactcggatgtctgattcgaggacataanatatcgagacgctcgaaattgaacaacggaagcactcgagaaaattgaattgtcataacttttcac

SEQ ID NO: 9058 - DNA, 369 bp, Glycine max
aacatttgcatttctcgagagcttccgttgttcatatttgaccttctcgatatcttatgcgccttaatcggacatctgagtgaaaagttatgaccatttaaatttctcgagagcttccgttgttcaattttgagcatctcgatatgttaggctcctgaatcgaacatccgagtgaaaagttatgaccatttgaattacttaagagcttaggttgttctatttcgagcgtgacaatatattatgcgcctgaatcggacatctgagtgaaaagttatgaccatttgaatttctcgagaggttccgttgatccatattgagcgtctggatatattatgcaccagaatcggacaaccgagtgaaatattatga

SEQ ID NO: 9059 - DNA, 361 bp, Glycine max
agctttggagaaccaagccaatcagaatgctatacgaaatatagatgggaatagaggtaacaatggcggtaatgacggaccgaggcagaaccgggttgagggagtaaagctcaatgttcctcccttcaaaggtagaagtgatccagatgcctacctggactgggaaatgaagactaagcacttatttgcctgcaatgactacactgatgggcagaaagtcaagctagcagcagctgaattctccgactatgcccttgtttggtggcataaataccaaagagaaatgttgagagaggaacgacgagaggtagatacatggactgagatgaaaagggtgatgagaaaaaggtatgtgcccact

SEQ ID NO: 9060 - DNA, 402 bp, Glycine max
accgatatcatataatattatgaagatgggtgaagaacaacacatagttgtcagagaagaagtggacaaactcctcaatgccaacgttatcagagaagttagatattccacctggctcgccgatgtcatcatagtaaaaaaggctaacgacaaatagcaaatatgcattgactatactgatatgagtagggcgtgccctaaagatgcataccctttgcccaacgttgacaggctagttgatggagcatttggattctaggtgctaagcttcctagatgcttactccgaatacaactagattaggatgcatgctctagatgaggagaaaatgacattcttcactgagatgcaacttttgctaaagggcatgccctttgcctaaaaaatgcagtgctacatact

SEQ ID NO: 9061 - DNA, 443 bp, Glycine max
  unsure at all n locations
agcttgtccagctagccgctccaaaatctgctccatgaacgatagagggaaatgatcattccttgtggtgtcattaagtttgtgatagtctatacacattctccactcagtgaatgcccgtgtaagggtgagatcattcttttcattatggatcaccatcatactacttttcttgggcaccacttggactggactcacccaagcactgtcaaagatcggaaagataagtcctgcttcaagcaacttgaggacttccttttgcacttcctccttcatggatgggttgagtctcctctgcggntgtctcaccggtctataatcaacttccataatgaatttttgcacacaataagatgggctaatcccttcaagatcaaagatgtgccatcttattgttgccttatacnttttgatgaccttcactaactatgcttcctctactg

SEQ ID NO: 9062 - DNA, 448 bp, Glycine max
agcttcatgatgatgaatcatgtagttttgatgatgacaaaaagcccaaaagaatgattcaagaaaagacatcaagaagaatcaagattcaagagaagatgaattcaagattcaagagaagaaatcaagaagcaacaagtcaagacttaacaagggaagtattgaaaaggatttttctaaaaccaaacatagcacaattttgttttacaaaagagttttctcaaatttttctaagttaccagagtatttactctctggtaatcgattaccagtttcctgtaattgattaccaatgataaaatttgatttcaaaaagtttttaactaaatttgcaacgttccaaatgatttttaaatggtgtatttgattacaatatattggtaatcgattacgagtgtatctgaacattgaaattcaaattcaattgtgaagagtcacatcttttcat

SEQ ID NO: 9063 - DNA, 432 bp, Glycine max
  unsure at all n locations
agcttgccatctgtccccaagctaaaaccattatcacagaagaagaggaagatggnggaataacgacgcanaatggtcagagaggaagtggacaagctcctcaaagccaatttcattagagaagtcaggtactctacctagctcaccaacgtcgtcatggtaaaaaagttcaatgacaaatgacggatgtacaatgattacaccaatcccaacagggcatgacccaaggatgaatatcctttactcagcatcgacaagctagtcgatgaagcatctgggttccaagtactaagcttcctggatgcctactttggatacaatcaaattcgaatgcacaccccagacgaagagaagacgacattcctcactaaagatgtcaacatttgttacagggtcatgccctntggccaaaaatgcangcgctatatacca

SEQ ID NO: 9064 - DNA, 434 bp, Glycine max
  unsure at all n locations
agcttgtgcattcaataccctgatgaggatgtcccatatgttcttaaaactagactgatacacttgttgtccaagtttcatggttttgcaggtgaagaccctcataagcatctaaaagaattccatattgtctgctccaccatgaaacctccagacgtccaagaaggtcacatctttctgaaagcctttcctcattctttagagggagtggcaaaggactggctatattaccttgctctaaggtccatcacgagctgggatgacctcaaaagagtattcttagaataaattttccctgcctccaggaccacgaccatcagaaaggatatttcaggcattaggcaacttagtggagagagcttatatgaatactgngagagatttaaaaaactatgcgccagttgccctcaccaccagatttctgagcagcttct

SEQ ID NO: 9065 - DNA, 453 bp, Glycine max
  unsure at all n locations
agctntttattaatatatcagttntttccctatgcaaatttaaaatatgtttttcaatcaatggttttataaagattttgtttatattaaccagtgttaatattaagttgcctttctattctaagaagcttttacttttataagtgagttgtatcttgactatcttatagttttatgtagtatttttttttcaaaaattctgtttataccagttgaacgagttattattaagatttgtccatttacattgaattaataacaaaaaaatttatcatttttttatttatttcaatacttactagtaaaattttaaaaccataaaaattaaacctaaccaaatcacaaaagaataatttagtttgatttgaatttcataattcattttaaattaaccactatactggcacttaattntttttatttggattagagntatttaaagcataaatcaca

SEQ ID NO: 9066 - DNA, 410 bp, Glycine max
tcttggccaaaattgtaagataatataaaattttataattaataattcatgaaatctatgctttcataaatttccctactttatttcataagaaaatgttcaccccatgttagattaaataacatattaaaaaacttacatgttagtaagcaagagagtttctatgtatattaagagtataataacaataaattaagaaaaataagctaactttaataagttaaccattaatgtagtttaggtaaattgttcattcttgatttaataaaaaatgtttattccaagagtttgattttatacattatatatataatataatttatatattaataacatatatgacatcaacacgatggtgaattttaaaattattataacaacgaattaaagaaatttaactccactctaat

SEQ ID NO: 9067 - DNA, 439 bp, Glycine max
  unsure at all n locations
agctntgagggatttcaaatgacaataactttatactcggatgtccgattgagttccgtaatatatcgagacgctccagattgaaaatagaagctctaagcaaattcaaacgacaataactttttactcggatgtccgattgagtctcgtaatttattgtgatgctcctaattgaaaacgaaagtttgtagcaaattcaaaggataataaatttttactcgaatgtccgattgagtggcgtaatatatcgagacgcttgaaattgagaacagaagatctaagcaatttcaaacgacaataaatttatagtcgggatgttcgactgagttctgtaattatcgagatgctccggattgaaaacggaagctcgtagcaaattcaaatgacaataactttntattcggatgaacgacagagtcccgtcatatatcgagatact

SEQ ID NO: 9068 - DNA, 372 bp, Glycine max
agatgaggatcatcccacacttcggaatgtgcatcatggaaaaacttctttcgatgatgccacacacggtcatcatggataatcccagctttcttagaagaagcaatgtctacaaaccaagaccgctcactaacagatagtagggattcatctggaaactcatcacatatctctttctccccatgagtaacatcctcattaactaacctagacaaggggtcagcaaccaaattctcacatcccttcttatctttgatttcaatgtcgaactcctagagcagcagcacccatcttatcagcttgtgcttggcatcaacctttgtcagtaagtatttaatcgtcgcatgatctgtgagaatgatgaccttggag

SEQ ID NO: 9069 - DNA, 388 bp, Glycine max
  unsure at all n locations
ntatacaccttcgagtggttntcctctattcgggtgaatatagtgtctcttctaatgctcttttagaaatgaaatgtgaaatgtcttaatctcattattggttatgagaaattctatctttgtgctttcattcctgtttcgtcatattatttttgaaagactgtgtgttgctgtaccatcgatttggggtttgatttctttgccaagcatgctcgcagtataactagagtgttcataaatttcaatgtcttcagtgttgtagacctcaaagacttcagtggcttctatattttacgcgacttcaatgtctcttgtcttgtatatctcagagacttcaatgtcttcagtcttcatatgttcaagactctaatgtctttaatcctttaca

SEQ ID NO: 9070 - DNA, 419 bp, Glycine max
  unsure at all n locations
agcttggcctttatgttgctcaccatgttgttccccctatctctaacaatctctcccttnttggctttgatgatgccaaacttgaatatgacattgagtgcatttggagggtctgagtgatgtaagctccattggagctngtaagcctaggatcttcttcatcaatagattcctttgcttcttggaagatgaagggcagtggaatggagaaggaagagagagagtagatgccacttcaaggagaagatgagtctagaagaagctcaccaccataggaggccatggataagagcttggaggaagaaggagatgaatgaagggagacggagagaagagcacgaaattntgtgctctaaaagatctctgaaatatgaagtttaatattcaaatgatncaaattaaacaaatgcacacacatg

SEQ ID NO: 9071 - DNA, 356 bp, Glycine max
tagggttaaagtctcacgattgtcacgtgctcatgcttcaattgttagccgtggctatacgagacatcttgccaaacaaagtcaggttcacgataactcgcctgtgctttttcttccatgctatatgtagcaaagtcattgatccaataatgtttgatgagttggaaaatgaggccacaattatactgtgccagttggaaatgtattttccccctgctttctttgacatcatgattcacttgattgtgcatctggtcagagaaatcaaatgttgtggtcctttatatctacggtggatgtacccggttgagcgatacatgaagatcttaaaagggtatacaaagaatctatatcgt

SEQ ID NO: 9072 - DNA, 445 bp, Glycine max
  unsure at all n locations
agctnggttggatggaatggatcattcctattcccatgtttggttaagtcaagagacccaaggtgttcatcaatggcgaagttcaagaatcttgctttgatcgtgttgaccagaaagaagtgaggttgtcatgattggataattcatatctctttggtctacaaaagataagttttgttgataaattgtttcaagtgccttttgaattggaatggaaccatgtggaggttacatatgaaagtgcgttatatatccttcttaatttcttttggcatgactatacaacttctttaattatagaagccattaatggctaatgaatttcctcaagtgatggtggggcaaagttgcgcattgcttactangtacccaaacataccctatgttatatttgcaattgaggcatatatgcacgtaagttaaatatacaataaatgttttatgt

SEQ ID NO: 9073 - DNA, 451 bp, Glycine max
  unsure at all n locations
agcttgtgcttaatcattgtaatatacccatggttaataaaactatgtttgaactctatgcagcttgttgtgttggtaagtcacatatcccaaactgtatattctgctccccttgagctcatatacagtgatttgtgggaactctctcatgtttcatcttcaaatgacttctcttactatataagctttgttgatgcctactaggttcacttggatctattttcttaaaaataaatcagaaacttttcctatttttcagcagtttaaaaccatggctgaacttcaatttgatactaaaataaagagtgttcatacagattgnggagggttcattttcaaactcatggaattattcataaactgatttgccctcacacacaccaacaaaatggctgtgtggagagaaaacacaggcatatagttgagttaggtctcaccctactcaaacaag

SEQ ID NO: 9074 - DNA, 368 bp, Glycine max
  unsure at all n locations
agctttcactgacgcatatgtagaacttgtacctgctttgtctgatctgaatgttcttgttgagacctactttgctgacatccctgctgaggcgtacaagaccctcacatctctgaatggcgtcactgcatatgggtttgatttggtccgtggaacccatactcttgatttgatcaagggtggatttcccagtggaaaatacctctttgctggagtggttgatggaaggaacatctgggccaatgaccttgctgcttctctcactacattgcanggtcttgagggcattgtgggcaaaggtattttattaaacatgcatttcatagcaaatnttgggagactattacctataatatagctatctgatg

SEQ ID NO: 9075 - DNA, 431 bp, Glycine max
  unsure at all n locations
agcttgttgcaaatgcaaactgcaataacattntactcggatgttcgattgagtcacgtaatacatcgagacactcgaaattgagaatatatgctctaagcaaattcaaacgacaataagtttttactcggatgtccgattgagtcccgtaatatatcgagacactcgaaattgagaatagaagctttgagcaaattcaaacgacaataacattttacttggatgcccgattgagtcccgtaatatattgagacgctccacattgaaaacggaagctcgtgacaataattttttactcggatttccgattgagtcccgtaatatatcgagacgctcaaaattgaaaacggaagctcgtactaaaagcaaacgacaataactttntactcgaatgtccgatggagtcccgttatatatcaagatgctcgaaa

SEQ ID NO: 9076 - DNA, 447 bp, Glycine max
  unsure at all n locations
agcttgaagtagttgtttgacaagtggcatcaataacttaagaggggggtgaattaagtttcaaaatttcccactaacaaacttttaacccccttctaaatgataggctcaaaatgcagaagaagaaacaatcaatttaataatgttctttaaacatacaagacaaaattgattgcaataacataaatgagataagggaagagagaaatgcaaactcgattatactggtttggccacttcccgtgcctacgtccagtcctcaagcaacccacttgagattttccacaatctcggtaaatcctttacagactntgaacacaccttangatccctcacccttgagttcaaagattctccaagagacaaccagtctcttgattacaattctcacaatccaagagacaaccagtctcttgatacaactgactttctgagatgaacagaaag

SEQ ID NO: 9077 - DNA, 429 bp, Glycine max
  unsure at all n locations
agctntgatggtgtcgagaagaaatcacatgtttgtcatcatcaaaaagggggagaatgtgaatgtatgtatacatgattttgatgatgtcaaagaagaatctaacaaggctacttcaaatgataagcatttgcttcaagaataattcaagattgcttcaacaaacaaagccttgtttcaagattcactaaagaccaagccttgccttaaaacaaagtgctttcaagacatgcaaggctctggtaatcgattaccaggaagtgtaatcgattacccgaagcagggttgagaaatagctgttgaaaaagggttttgaattgaattntcaacatgtaatcgattaccatatgtctgtaatcgattaccagcaacgaaactttggaaattcaaattcaaaagtcataacccttcaaattataactgtgtaat

SEQ ID NO: 9078 - DNA, 392 bp, Glycine max
  unsure at all n locations
cttatctcccaaacagttntgccagctaccaaacgtccttttccctgatgacttccctgaataccccacaaagtttcagttcataagctaccttgaaagctatgccaagcacttcagcatagccccacagttcaatgaaacagtgcagtctgcaaagtacgatgagacctttggcctgtggaggatcaagaccatcaggaagatcaagaaattaggaggactctcttcaggtggttgtgctgagtgtgaggttgagtacatttgcaggtcgcttgtggtcgccaccggggaaaactcggagaaagtggtgcctgagtttgaagggttgggagagnttggtggccatgttatgcatgcctgtgattataaatctggggaaggttatggtggac

SEQ ID NO: 9079 - DNA, 421 bp, Glycine max
  unsure at all n locations
agctntatacaagaatgaatctctgatactacttgttggacaagtggcctcagatatcttaagaaggggggggggttgaattaagatattacacactatttccccaattaaaattctatttcactttctattcaagttacaaattcccttaataatgaacttcttaaatattgattcaaatagaacaatttgaatataaagatgaaacaataataaataaaggagtttaagggaagagaaagtgcaaactcagatttatactggttcggtcacacccttgtgcttacatccagtccccaagcaacccgcttgaaagttccactatcttgtaaaatccttttacaagttctaaacacacaaggacaatccttcctttgtgttagtattctttacaacaagaaccctcggtctcttatccctt

SEQ ID NO: 9080 - DNA, 353 bp, Glycine max
  unsure at all n locations
agcttccgttttcaatttgttagcatctatctataaatngcgacactctgtcgggcatccgagtaaaaagttattgttgtttgaattttctaagagtttccgttttgtatttgaagcgtctcgatatattacgggactcaaccggacatccgtgtataaagttatggtcattacaatttgctcagagcttgtagtctcaattttgagcgtctcgatatattacccgatttaatcggacatccgagtaaaaagttactgtcgtttgaatttgatacctgcttctgttttcaatttggagcatctcgatatattacgagacctcttcgaacatccgagtaaaaagttattcatcg

SEQ ID NO: 9081 - DNA, 428 bp, Glycine max
  unsure at all n locations
agcttgtagggttaaagtctcacgattgtcacgtgctcatgcaacaattgttagtcgtggctatatgagacatcttgccaaacaaagtcaggttcaccataactcgcctgtgctttttcttccatgctatatgtagcaaagtgattgatccagtaatgtttgatgagttggaaaatgaggccgcaattatactgtgccagttggagatgtattttccccctgctttctttgacatcatgattcacttgattgtgcatctggtcagagaaatcaaatgttgtggtcctatttatctacggtggatgtacccggttgagcgatacatgaagatcttaaaagggtatacaaagaatctatatcgtccggaagcatctattngtgagaggtacattgcagaagaagccattgaattttgttcagaatactta

SEQ ID NO: 9082 - DNA, 438 bp, Glycine max
  unsure at all n locations
atccactttaaacaccaagcacaatttctttagcctcttatcctcctcaacaacctcattagcaatcaagactccatgcaacaactgtctacccttaacaaatgctgactgtctttcatcaacaaggtgattcaataccttactaagcctattagataggactttagcaataattttgtagacacaacctatgagggatatgggtctgaaatcacttatatgtcgaggatccttgagcttacggataagagcaatgaatgatgaattgaggcccttaggaaaagcagcattcacatgaaattctgccaaaaaccttaagaactcaagtttcagctcattccataaatgcttaataaatatgaaattaaacccatctgaccctgngcttttgtcattgccacaagcccacactgcagaagatatctcctcctctttaaa

SEQ ID NO: 9083 - DNA, 441 bp, Glycine max
  unsure at all n locations
agcttcaagttgcttggatagcaacttgttttggaccaacaaagcgtcctgtgatgaaagctccaacaggcttcttttggttgggatgtgtgctctatctcgcaagattgcatggtcactagcagtcatattctcaatcaattccatggcttcttcaggggtcttcaattttatttttccccctgtagaagcatctaaaagttgctaggattgtggccttaacccgtcaatgaaaatatggagctggattggttttgaaaatccatgagtaggcgtctttcttagtaacccacgaaatctttccaaagcctcactcaaggactcgtctagaaattgatgaaaggatgagatgacagctnttccttcagcagtcttggactctgggaagtatntcttcaagaatntttcaaccacttcatcccaagacttaagactattatc

SEQ ID NO: 9084 - DNA, 450 bp, Glycine max
  unsure at all n locations
agcttgtaagggcttgggtggaaaatgatagtgagactcaacttggatatcaaccttgtgctacaacaattgcaacaagacccactatccacaatgagagaacaatttttgtttaaaaccttacatcttgtatgaaagatgttctctctttgagttagggttaggttacaagattgactcccaaggagccttctcaccattagaagattaccttcttcataggtgtaaacctcattaatatgctcatcacccttggcttcacccttacttccatttgaggagggagaagaagtagcctcctcttggctactatagatgtcttgactcctcatgatcgtggttttctttgtggggcattgagaagcaatgtggcctttcccaatacatttgaagcacttgatgttactagttctatcttgtgaactagcctttggagtganttcctctatg

SEQ ID NO: 9085 - DNA, 409 bp, Glycine max
cactctaagcaccgggcgcataactctttagccttctatccggctcatcttccgcattcgtatacaaaactccgtgcaacaactgtctacccttaacacatgctgactgcctttcattaacacgtgattcgctacctgactaagcctattacataggactttatcaactcttaggtagacacaacctatgagggatatgggtctgaaatcacttatatgacgaggatccacgagcttatggataagagcattgaatgatgaattgaggcccttaagaaaagcagcattcacatgaaattctgccataaaccttacaaactcaagtttcagctcattccatagctgctgactaaatatgaaagtaaacccatctgaccctgtgcttttgtcattgccacaagcccacact

SEQ ID NO: 9086 - DNA, 430 bp, Glycine max
  unsure at all n locations
ggtnntttttcaatatatgtttttatgtcactaggtctttgaatgacattagatgctttgatgtttgtgatgcaatcctactccgcaagggcattggatagaagactccaagaagattgggccggagatgcaagagaaggccctagggttttcatgagccttagggtagatttcgggcccatgggctaagtatgagcccgcttatctttgtacatattagattaaggtttcattatttttgggccttgtatttagggctccataatataggtaaggtaccttagaaatgtaggatttttcagcccttgtattttagggcacctagactagtgtttgtattaggggtagatttgtaatttcacatgcattgagcgaatatttgatgtgtgtggctagaaataaaattaattgaattgagagaagtgttgga

SEQ ID NO: 9087 - DNA, 454 bp, Glycine max
ctttccttgagaggatgttcaccatgttgctcatgttgttgcccttatctctaacacctagctcatatcatctaagagtctattaatagtggaacttggaagccattttattttggaagagttaacagagtggaagtttcacaccttttctttgtcgatgatattattttagtggctaaagcctccactaagcaagcaaatgagattaaaagagttatgaatttgttctactctgcttcgggtcaataaataattttggataattctagtcttttcatctctaagaatgtgtataggtaaagggcaggagccattgctaataagctaaatgtcccttttgtggacaagttagaatcttatttgggctatcccattcttaataaaaggaaaacaacatctattataagctctctagatggaagtctagaaccttattgctagctggaacgattac

SEQ ID NO: 9088 - DNA, 224 bp, Glycine max
  unsure at all n locations
agagcttacgttggtcaatgccgagcttctcgatatgcgattcgcctgaatcagacatacatgtgataagctatactactcgaaattgtcaagagcttgcgatgttcaattttgaacatctcgatatgttactcgcctgaatcggacattcgtctgacaacatattccaatagagtttctcatatgcttgccttggatgaanggcgccgtcttatatgttatgt

SEQ ID NO: 9089 - DNA, 444 bp, Glycine max
agcttataatatattgatatgctcgaaatttaacattgtaagctctcgagaaattcaaatggtcataacttttcacacggatgtccgattcgggcaaatcacatatcgagacgctcataactaaacaacggaagctatagagaaattctaatggtcaaaacttttcacacggatgtccgattcaggcgaattacatatcgagacgctcaaaattgaacaacagaagctctcgagaaattcaaatggtcataacatttaactcgaatgtccaatttaggcgcatcacatatagtgacactcgaaattgaacaacggaagctctcgtgaaattcaaatggtcataacttttcacactgaggtccgattcaggcttataatatatcgatatgctcgaaattaaacatcggaaactctcgcaaaatcaaatggcataacttttacacg

SEQ ID NO: 9090 - DNA, 392 bp, Glycine max
  unsure at all n locations
agctntgcgtgaccgagcaccctaccctgctaatcatgttgttggccatctcagtgggagctttgcttttatagttnttgacaaatctacttctaccctctttgtggcatctgtaagtaatcataatcctacctaccaaatgtcatgatccaccaccatataagctntcatttatttctcattttttgcatgtattgttcttgacaggatcaatatggtaaggtacctctgtattggggaataactgctgatggctacgtagcatttgctgatgatgcagaattgcttaatggtgcttgtggcaagtcacttgcttctttccctcaaggtgggttaacttctattatgttaatgtgnttattatattacataatatgtgctgcaggttatgt

SEQ ID NO: 9091 - DNA, 451 bp, Glycine max
  unsure at all n locations
agcttccttcgggagcaagtgttacacccctccaatagctaagctcacccctccaaaatacatgaaaatacaaaaaaaagtccctaccacaaagactacttaaaatgtcttgaaatacaaggctaaaaccctatactactagggtacccctaacttgtagggtaggttgcccttaatttgtagggtaccttacaaacttaaaatgaccaaaatacaaggcccaaaagaaagacaatatattctaatatttacaaagaaaagtgggtttatacttagcccatgggcccaaaatctaccttaaggctcatgagaaccctanggccttctcctacatctctagctcaatcttcctagagtcttctatccaacgcccttngggggtaggattgcatcaagttggacataagccaccgcatgtgctatactgagactcaagaaaatcagttatgat

SEQ ID NO: 9092 - DNA, 458 bp, Glycine max
  unsure at all n locations
agcttgtaatcgattacacacatattgtaatcgattaccagagcatattttcagaanatattctccacagtcacatctttttatttggttcttgaatggctatcaaaggcctatatatatgtgacttgagacacgaatttgccaagagtttttcagaacaaaaaggttttatcctgttaaaaagcaaaatcgttttatcctcttacaaattccttggccaaaacacttgtgattcaataaggaattatttgagtgctcaaattgttcaatctatctcttttaagagagatttcttcttctcttcttctttattctgaaaaaggattaagagaccgagggtctcttgttgtgaaaggattctaaacacaaaggaaggatngtccttgtgtgtttagaacttgtaaaaggaaattacaagatagtggaactctcaagcgggtttcttggngactggacgt

SEQ ID NO: 9093 - DNA, 448 bp, Glycine max
  unsure at all n locations
agctggccagtttaagatgttagtagtaatattaactnttaagagttcatgttaacaatcttgctaaaacgtatctttaatgatgtgttactactaatttataagttttatattttatatagcaatgattaacacagttgaagttattaatttgaagtcaataaataattaatcagcatggtaaaatacagaattgatcatgaaggttaataatatgacgtgtactaatgattgtgtgtcgaaattttccatatgatgtgtgctagtgattgtgtgttggaacttttcatgtgtattaagggtctcagttaataataaacaaaattaatttcttgtataacagatattgtgaaagtttttttaagaagtctttcttatatatacgaataagaaagaacctaattaatatatctattaattgtgtcagagctccctaatagtagtagta

SEQ ID NO: 9094 - DNA, 388 bp, Glycine max
gctatcctgtgacacttaaatctccgctttttcagtcgtctgtaagatgattgagtgttataaattatgcaagcctactgtatactatttgtttcccatgttttagctgatagggcttgagtgtgcttcacagatggggcatgcatgatgacccttaacattggaaccgttggaacccccctatgctggaaactcattcatggtacaatgaagccttgcacacatttcatacgtctgcttgcgaaacgcatcgaacactacaacccgctagtgccacaattgtcttatatctgtcgccaatggacttagattaacatcaatttcatttgctagctgtcttgagcccgatatcatcatatacaacatcatgtattttcgctttatgcac

SEQ ID NO: 9095 - DNA, 343 bp, Glycine max
  unsure at all n locations
agctntgagcaaattgaaatgataataactttatacacggatgtccggttgagtcccgtaatacatcgagacgctccaagttgaaaacggagactcttaaaaaattcatacgacaatatctttttactcggatgcccgacagatcgtcgtaatttatcgagagatgctccaaattgaaaacagaagctcgtatcaaattcaaacgacaataagcttttactcggatgcccgacagattgtcgtaatatatcgagagatgctccaaattgaaaacagaagctcgtatcagatacaaacgacaataactctgtactcggatgtctgattgagtcccataatattt

SEQ ID NO: 9096 - DNA, 316 bp, Glycine max
taacaattatgacctctccgacaacagattcaactctggatggaggaatcaccataacctcagatgggacagacccttaacaacagcgacaggagcctgctcctttcttccaaaacgcgagctggcccaagcagaccatacattggtacaccaagtctacatccgcacctaccccataaacaggcaacaggtgacgccccttcacaacctaccctcgaagaagttgagaagcaaatgactatgctgaacatgcagtttatgaagagaccagagccttcattcacagcctaaccaatcatatgggacaattggctat

SEQ ID NO: 9097 - DNA, 433 bp, Glycine max
  unsure at all n locations
ttctntctactctatatgcctctaaaatgaatgacatgatttggatgaagtgaatatatatttctttagagacaaaacatgtgtagttagtgagaatatgtacctaattaaaaatttatatgaaatataaattgaaggattgtgcttaccataatgtgttacatatgcacatatttgtttgatctaccttgtttatatttttaattataacatagaatcttctattaattgttataattgaattgtttgcatgcaatagttcttctctttgagttttgtgtgaaatcatatttctagatattgaattgtgcaatgtgcaaatatgtttaaatctatagatgatatatgtatgttgctttaatgatcattgaattacataaatgtaaatatggttgtgcatcccgtcataaatgagtatgttatactttttatt

SEQ ID NO: 9098 - DNA, 268 bp, Glycine max
tctcgatatattatgcacatgagatcggaccttcgagtgataagatatggccatttgaatattgcgagagcttccgctgctcaatttcgcgcgtctcgatatattatactcctgaatcggacctcctagtgaaaggtgcagaccatctgaacttctcgagagctcacgttgctcaatggtgagcgcctagatatatgatgcgcctgactcagagcttcgaggggcacgtgatgaccatccgaatttcacgggaggtgggagcgctcaa

SEQ ID NO: 9099 - DNA, 432 bp, Glycine max
  unsure at all n locations
agcttatgttgcanacatttataatagaccttatcagcaggataaccaacaatagcagaataattatgatctttcaagcaacagatataatccaggttggagaaatcatccaaatctgagatgggcaagtcctccacaacaacaacagcctgtccctcctttccagaatgctgctggtccaagcaagccatatgttcctcctctaataccgcagcagcaacaacatcaatcacaacaaatacaacaagcaactaaggctcctcctcaaccttccttagaagagttagtgaggaaaatgaccatctagaatatgcaatttcagcaagagacaagagcctccattcaaagtttgacaaatcagatggggcagatggctactcagttgaaccaagctcagtcccaaaattctaaaaaatggccttcacaaactct

SEQ ID NO: 9100 - DNA, 427 bp, Glycine max
  unsure at all n locations
ngactctaccggagatactttcacaaacatgagagtnttggcattaccccctagtgaatcactcatcaacatagttagcttgtgatttctgtaaggtatgtgttgaccaccagaagacaaagcactaataacatctcctagtgctgataatgatttgttgatactttgagcttctttaagttgactacctgaagagcccgacntgtttactctntctgagccagcaagatccacaaaacttaactgtatgacaaatgacatatccagcataaaaaagttaaaaaaactgcaatgcctcgaggtcataaaatacttgtgtttcacattgccacaaaatataggaagaatatggtatattaacattcatactgatattcaaaggtaaaattgaagtaatgtacaccaataccttttcccttgcagttga

SEQ ID NO: 9101 - DNA, 350 bp, Glycine max
tggatttccttgtagtttgaaatctatcgttcctaagatggagcccaacccaatcaccctcattaagaactagcttgtttcttcctctattgcctttagctgaatacacctttgtttgggtctctatttggttcttaactctctcatgaaacttcttcacaaactctgacctagattccccttctttatgtataaaagaagtgtccagtgggaggggaatgaggtcaaacggtgttaggggattaaacccatagacaacctcaaaaggggactacatgaggaagatactcatcccaagacttatggttgcctttcagaagagctcttaaaaaagtggataaagacctatt

SEQ ID NO: 9102 - DNA, 369 bp, Glycine max
  unsure at all n locations
tgtgcattcaatatcctgatgagggtgttccatatgttctcaagactagactaatacatttgctgcccaagtttcatggtcttgcaggtgaagaaccttataagcatcttaaggagttccatattatttgtttcaccatgaagccccctgatgtccaagaagatcatatctttttaaaggcttttcctcattctctggagggagtggaaaaagattggctatactaccttgctctcaggtctattttcagctgggatgaccttaaaagggtgttcntggagaaattcttccctgcatctaggaccactgccatcagaaaagacatttcaggcatcaagaaacttggtggagaaagcttgtatgagtact

SEQ ID NO: 9103 - DNA, 427 bp, Glycine max
ggaaaacttcacttgttaccatttaaaccctcttcctctcatgctaaagaacctttagatttgattcatagtgatgtatggggtccagccccaatcttgtctccatctaatttcaagtactacgttcactttattgatgatttcagcagattcacttggatttttcccttgaaacaaaaatcagaaacaataacggcttttattcaattcaaaaacatggttgaaaatcagttcaacaggaaaataaaagttcttcaatgtgatggtggaggtgagtataaacctgtccagaaaatagccatagagtcaggaatccaatttagaatgtcttgcccatatacctcccaacagaatggtagagcagaaagaaaacatagacatgtagctgaactagggctcacactactagcacaggcaaaaatgcctt

SEQ ID NO: 9104 - DNA, 406 bp, Glycine max
  unsure at all n locations
ntntattttcagtagatggagatgaatctatggtcacctcatggaatcctctaagaacaatagcatcatttcttgcactaaattgttgggagttggaagccatcttctcaatcaaattcctagcttcagcaggggtcatatcaccaagagatccaccactggcagcatcaatcatactcctctccatgttgctaagtccctcatagaaatattaaagaaggagttgctcggaaatctggtggtgagggcagcttgcacacaatttgttgaatctttcccagtactcatacaagctttctccactaagttgcctgatgcctgaaatgtcttttctgatggctgtggtcctagatgcagggaaaaatttctccaagaacaccctattaaggtcatctcagttgaaaat

SEQ ID NO: 9105 - DNA, 280 bp, Glycine max
tcctctccaaaaacactaccctcgagaaaatcctatttgatccatgatcgcgcgtgcaatcttttggtttgataggaaatcatgtgcaaaataaagtcagggtacaactatggtttggaattggggtaaaacacttacctgtgtgagtttttatacaccatgagtgattttattcccaatttcgatttgacccgacgtttcccctgaatgttcatttaaaagctaaacgttgacatcctacctttcattttcggttacaaggaaaactatttttggcata

SEQ ID NO: 9106 - DNA, 455 bp, Glycine max
  unsure at all n locations
agctngccctttcattcaatttagactaaccaataataaattgtttttgtctccatctttttttcgttnttgcattaacattggttatcctccgcctaacattgttgcattacccaaacccacatgtaagcaccattaatctgcctcttcaatgctccacaccaccaaaaacatgacaacatcactactcctttaccatacgaccaatacctataaacctagatctgacacccaaaactcaacacattcctccaaccaccctcaccaaaaaccccattggcacacaaaccaccatcaccttagcatcgtgacacaccaccattatagccctgccaacccatgattcaccataaccganaactaccaccaccaccatctccttctaaatcattaacctcgattcanaacatgtttcgattacccacanagcacggttctagaagcanaccataacg

SEQ ID NO: 9107 - DNA, 427 bp, Glycine max
  unsure at all n locations
ttcttgagaggcttctttgagaagctaacactntaactactaacaccctnttaataactaaactcacatccttgaaaataattacggataaaataacataacaaatataatcaaacatcaaacataattactaataatatatagatatatatcaaggtgttacaactctcccaccctttntgaaatttcgtcctcaaaatttacctgactcaaacaaggatggatgagcttctcgtatctgactctctaattcccacgtggcatcttctcctgatgcacctccccagatcaccttgaccaacagaatctttttccctcttaggtgttttgttcacctatcctcaatcctcaaaggcaatgtttcatatgtcaaattctccttcacttgtacatcatccaattcaatcacatgggatggatcacggat

SEQ ID NO: 9108 - DNA, 448 bp, Glycine max
  unsure at all n locations
agctgttaatgcattatagtatagttttctcatatattagaaatattaaatatctaatttcatatttgtcggttaattgatcgactaattttattataattaaacactctcaattaatttataagttttcagttagctttcaactnttcaatagtttataaatttttaactatcttataagttttcaagctagattataaactaattttatcaaacatattcaaaataagctactttgaagtaatttgtggaaaataaattactaaaataagttcatgtaccaaataatcttaattttcttataagaacttacaagctcatcagaagtctcaagagtgtatttaacaagacatttcagttagttattaatttatttactaactaanaaaaacttatttaaatgtttagtacaataattgagtgtcaaataagaagtctcataactttg

SEQ ID NO: 9109 - DNA, 458 bp, Glycine max
agctttctccactaagttgcctgatgcctgaaatgtcttttctgatggcagtggtcctagatgcagggaagattttctccaagaacaccctcttaaggtcatcccagctgataacggacctgtgagcaaggtagtatagccaatcttttgtcactccctccagagaatgaggaaaagcctttagaaagatatgatcttcttggacatcagggggcttcatggtggaacaaaaaatatggaactccttaagatgcttatgaggatcttcacctgcaagaccatgaaactctggcagcaaatgtattagtccagtcttgagaacatatgaaacaccctcatcaggatattgaatgcacaagctttcataagtgaaatcaggtgtagccattctcctaagagtcctcttacgaaggtggaggtgagccatgttctcagtatgaaaattagtagcggaatgt

SEQ ID NO: 9110 - DNA, 319 bp, Glycine max
gcttgtaatcgattacacatatactgtaatcgattaccagagcagaattttagaaaatattctcaacagtcacatctttttatgtggttcttgaatggctatcaaaggcctatatatatgtgacttgagacacgaatttgctaagagtttttcagaacaaaaaggtcttatcctcttaaaaagaaaaatcgttttatcctcttacaaattccttggccaaaacacttgtgattcaataaggaattatttgagtggctcaaatgttcaatctatctctttcaagagagaattcttctttttttcttcttcattctgaaaa

SEQ ID NO: 9111 - DNA, 433 bp, Glycine max
  unsure at all n locations
tccatcatcacgataccgtgttctattggtgaggttgatgtaggcaaagctcttagacttgggagctagtatcaatttaatgcctctctccatgtgctggcgactttgagagatagagataatgcccacacgcatgaccctccagttagctgaccgctccatcacaaggccatatggagtcattgaagatgttttggtgaaggttaaaccccttatatttccagatgatttcattgtcatagatatagaagaagatgctgacattcctctcattcttggctgcccattcatgtctactgcaagttgcgtggtagacatggggaagaagatgctgcagatgggcataaaagaccagaagatcagctntgatttgttccatgaggacaaagacccacctagccaaaatgtctgtcttaaagtgcatgtgatggag

SEQ ID NO: 9112 - DNA, 404 bp, Glycine max
  unsure at all n locations
ttgtccgcaaaagttacttaaaaccgttttgaggtccaacgccttanacggttctctntgcttttatcggttaacatggaccgttcaaaagcataaaatcaacacataactttactgcttttgcaaaaactacttaagtttgatttcctcatcgcaattgaggatacgtaggagcaaaagccccgcttttgtcgaccaccccaagagatcgttaatggtccaatgccttaacgtttctctcctttcaaaaaccaagagatcgtttatggtccaatagcttaatgtttctctccttttcaaaaccaagagatcgtttatggtccaatagcttaatgtttctctcctttcaaaaccaagagatcgttaatggtccaacgccttaatgtttctctccttttcaaaaa

SEQ ID NO: 9113 - DNA, 401 bp, Glycine max
tgcaatcatttggtataaaattcacccagtcttgtggctctacacaagggtgtctgcaaccttctaaaatagtatctccttcatcctattaaaatcaaaatgacaatgttaaatgctattcggaaaaagatccctccaaccaaaacaagggataaacagagaacgaaggtaaatgcgagaagaaaagaatgtagtaattgtgaaaacaacaaattaagtaccaatgaagtgatgtcacgccttgtgtagggagtatgacaactagaagccaaatcagcaaatctcaactatagattcctatccatgtacattctttaacataaattcatggatagtggcgttctactaaatgttgtcatgacaagagtatattcattagacatcaaaatggacgttatagt

SEQ ID NO: 9114 - DNA, 473 bp, Glycine max
  unsure at all n locations
agcttgtcagtttattcccaaaaacctgcctagtcgaagaatatggctttcaattgaatgacaatagtctctaaatcaattcattggcgtatcagttcactcacttgaattacaacatgatagatacttaactgataaataatatatatgtgatatgagtaattaattaaaactatatatatataggacaaagatatattattgattaaatttttaaaaaacaaaatattgttagtgattatttttttaaatgaatatatgtaacataattagaattgacagtaaactgtatggtaaaaaacacagttataatattaagaaaaaaatttaatcaaatctcctattntaaatataactatgcttattataataaaatattaaaataacataattgtatgtggatgtcctaatacaactgtcactaatcctttntaaaagaaactttatactcannattgataaagtttatcaat

SEQ ID NO: 9115 - DNA, 309 bp, Glycine max
  unsure at all n locations
tgtaatcgattacacaaatactgtaatcgattaccagatgagtttttcagaaaatattctcaacagtcacatctttttatttggttcttgaatggctatcanaggcctatatatatgtgacttgagacacngaatttacaagagtttttcagaacaaaaaggtcttatcctcttaaaaagaaaaatcgttttatcctcttaaaaattccttggccaaaacacttgtgattcaataaggaattatttgagtgttcaaattgttcaatctatctctttcaagagagattacttcttttcttcttctttatt

SEQ ID NO: 9116 - DNA, 431 bp, Glycine max
  unsure at all n locations
tcaagcttgccgttgaacacagttgagatccgtttggatcaccgggcagtgcactcgcattggtacaaccttgagaggtttggctttggtgtgttggagggtgacaagaggaatgagacaaaattctcaagtaggattcacctaagggtgtgtcttgagggtgcttatcatgtgcttgatgagtccacaatgtatattagtgacacaaggcctactgctagacaactttggaaacaaccaattgggattcttgaagtggggatattgagtgcccaagggctccaatctatgaagaaaaacaatgctaaagggtcaacagatgcttattgtgtggccaagtatggtcagaaatgggtgagaactangactatcactgagaagcttaatccaaaatggaatgagcaatatacatgggaagtgtatgatccttg

SEQ ID NO: 9117 - DNA, 408 bp, Glycine max
tagactaagttcattctaccattctcagattgatggccaaactgaatggaccattttgtcgctggaggaccctttgagggtgtgtgtcttagagcaaaaggggagttggagagttttcttctattgctagagttcacttataataatagttttcaatctaccattgacatgactccctatgaagctttgtatgatagaaggtgtaggacacccctatgttggttggagcccggagaagacctcaccttaggacttgaagttgtacaacaaaccaccgagaaggtaaagttgatccaagaaaggatgaggagtgctcagagtaggcataaaagttatcaggataaaaggagaaaatgatgcaatcctacccccaagggtattggatagaagactccaagaagattggac

SEQ ID NO: 9118 - DNA, 474 bp, Glycine max
  unsure at all n locations
agctnggtagctngagaatgngccacacagatactcctaccaagagctcaagaaaacaacaaaagggttcaaggacaaagagctacttggacaagggtggattggtagtgtttacaaaggaacattgccaaattccaatacccaagttgctgttaaaaagaatttcacatgactccaaacaaggccttaggaaanttgtgtcagaaatagccagcataggcccgcttcaccactggaatttggttcggttgcttgggtggtgtctccgccgtggtgacctcctccttgtgtatgatttcatggaaaatgggagcttagataagcacttgtttgatgagccagaaacaatcttaagttgggagcaaaggtttaaggtcatcaaggatgttgcttcagcccttttgtatcttcacgagggctatgagccggtggtgatacatagagatgtgaaggctaacaatgtgcttctagatg

SEQ ID NO: 9119 - DNA, 460 bp, Glycine max
  unsure at all n locations
agcaagaatatcagaatactcatgtcaatacttgataaacttgctcaacgtctttaaagtcatcactttaataaccggatcatcactcacaacatattcatgcagaaaacattcaatttcccatacttgcataaagtagcgattagatgttggataagataagcccaaaatcaaattagtcatgacataaaaggggcttcaaaaactcacattntttcagcctttccatttatcatttgatggacattgaacatagtttctatcacaaatagccaaacaaccaaaagcacattggtacttaattgcactttcaagcataacataggtggaattccattaagtggctacatccattctcaaacccaccttagtaccaataccactcacttgaagaacacactctntgaatgcaatctttcttgcctccaatggctttcacatatttatactatttcttata

SEQ ID NO: 9120 - DNA, 429 bp, Glycine max
  unsure at all n locations
atgaatattntattnttttttatgataatactaattntagttntacttnctttataattttaattnttctttgtgtttcttcaatatattaatatatcagagttgaaaatttaatcaatatgaatctatgattataaaactttaggaaaattaattaaaggggtgacattttgtaataacatatcatatttttttatttgtaggaatcaaagacaatgtcaaggggtttacaacaacttacacacccttagtcaaccaactgagctagacccccttggcacatgtcacattntaatttgaataaaaaatgagacataaaacaaatagaacttcaatttatttataaaanaatatattacaaaactntaattntttttaataattntgggcctttnttagttgtgggcccaatactatcgcacctctgga

SEQ ID NO: 9121 - DNA, 410 bp, Glycine max
taacaaaaggcatgcgaagtgggtggaattcctagagcaattcccttatgttatcaaacataaaaagggaaaaggtaatattgtagccgatgctctttctcagcgtcatgcattactttctatgcttgaaacaaaattgattggtcttgaatgtttgaaaagaatgtatgaaaatgatgaaacatttggagaaatttttaaaaattgtgaaaatgtttcagaaaatggtttctttagacatgaaggctttcttttcaaagaaaacaaattgtgtgtacctaaatgttctactagaaatttgcttgtttgtgaagcacatgaaggaggtttaatggggcattatggggtccaaaagactctagagacattagaagaacattcttattggcctcatatgaaaaaagatgtgc

SEQ ID NO: 9122 - DNA, 371 bp, Glycine max
  unsure at all n locations
agctntcaatgttcttaagcaaaagctaactaatgcccccatacttgcgttgccaaactttcaaaaatcttttgaaattgagtgtgatgcttcaaatgttgggattggggctgtgttgatgcaagaaggtcatccaattgcttattttagtgaaaagttaagtggtcctacccttaactattcaacttatgataaggatttgtatgccttagtacgggctttgaaaacgtggcaacactacctttatcccaaggaatttatcattcttagtgaccatgagtccctcaaatatatcaaggggcaaggcaagcttaacaaaaggcatgcgagtgggtggaattcctagagcaattcccttatgttatcaaaca

SEQ ID NO: 9123 - DNA, 404 bp, Glycine max
  unsure at all n locations
tctggtgggacatcttgacttgctttccaatctgacattcaccacagattctgccttcttctattttcagatnggggatgcctntaacagcacctttgtcaatgattttcttcatgcctcttaagtgcagatgtccaaatctttgatgccatattctgacttcatcttctttggaggatagacatgtggaggagtagctggtttcttggggtgtccataggtaacaattgtcctttgatctgctgcccttcattagaacttcactcttctcatttgtcaccaagcattctgactttgtgaagtttacattgaacccttcatcacacagctgactgatgctgatcaagtttgcagtcagtcccttcaccagcagtactttgttcagactangaagtccatcatga

SEQ ID NO: 9124 - DNA, 429 bp, Glycine max
agcttcaccttcctctcaggttcaagcttgttttcaacctcaaagttcttctccaaagccttcacttgatccacacttagacgacgcttcttctcagattgataccccggttcttcaacacacccttcctcgtcgagtccgtccaacatcgattggaactccctaccatacatgtgttggctgttcctcggactatgttcctctaaaccaatacaaatcagacataatcgttagtataaataaccaacctaaaacatggatcttggatctgtgtctgaatttaaaaaaacaaagcaaaacaaaaatcaatattatagaagtgtgatttaattaattaattaagcacctgttgatggacaaattgtcatgagggcactggaagaatctgagctgctaagtctcttcatgagtgggaaagatgtgatctta

SEQ ID NO: 9125 - DNA, 440 bp, Glycine max
agcttgtcaacttatatatcagtgaagtgattaatttacataggatacccactagtagacactcgttttacttctagattttgggtaagcttgcaagaagccctaggtaaaaagttgaagcttagttcagcttatcaccctcaaacagatggtcaaactgagagaaccattcagtctttataagaccttatgagagcttgtgtaataggacaaaagggtatttgggatgagtatttacctctagtggagtttacccacaacaatacttttcatgctagtatacatatggctccatttgaagccttatatgggaggaagtgtagaacaccattatgttggtatgagactggtgagtctcttttgatagtgttgagtttggttgcatccaagtcacattggactgtaccaaacaaagttaaatcctgaggttttgatgtaac

SEQ ID NO: 9126 - DNA, 418 bp, Glycine max
  unsure at all n locations
taagaaacagttagaggagctcttagggaaacaatttatgaggcctagtgcatcaccctgnggagcgacagtgttgttagttaagatgggaccatgaggctatgtgtagactattatcagctgaacaaggtgacgattaataataggtaccctttgcctatgatagatgacatgatggaccaaatagtgggggcttgtgtgttcagtaagatagatctcaggtcaggtaccaccatattagagtgaagtctaaggatattccgaagacttcctttaggacccattacgaccattatgagtacttggttatgccttttggtgtgaccaacacccatggtgtgttcctggactagttgaataggatctttcatccctacctagatagttntctagtggtcttcatagatgataccttggt

SEQ ID NO: 9127 - DNA, 363 bp, Glycine max
  unsure at all n locations
agcntttgacatgactggtctangaaagatgagattctttcttggcattgaagttttgaagaaatcataacggattctcttgtgtcaaagaaaatatgccactgatatctggaagaagtttgcaatgtctaagagcatacttgtgaaaagtccaattgtttcaggctttaaaattattaaagatgctgatggcgcagctgtggatgacacttatttcaagcaaattggtggaagtttaatgtatcttacagctacaaggtcagatataatgtatagtgtgagcttaattagcagatatatgccaaaaccaacatagttgcatttacaagctgctaaaagaatataatgtatttaaaggaactc

SEQ ID NO: 9128 - DNA, 440 bp, Glycine max
  unsure at all n locations
atactaagcttatggatttctcataagcttaatatcagaaagggacccaatattcatgagtcaattctagcacgagcttttcaagttgtatgggactaagctgcgtatgagcactgcttaccatcctcaaagtgatggacaaactaaagtgcttgattgagttttggaacaatatttgtgggtgttagtgcatcataagccatcctaatgggataagtttttgtatcttgctgaatggtgctacaaccccactactcatttagccactaatttaacctcgtatgaaattgtttatggtaagcctcctcctagtatttccaattatcaagctggaacctttgccgtggaagcaattgaattttttctgactttgcgccaagaaacctttcacctacttaggaagaagcttgaaaaggcctangaacatatganaaagaatg

SEQ ID NO: 9129 - DNA, 480 bp, Glycine max
  unsure at all n locations
agcttatacggcctaggatgtggttntgtgactaaattcaatttaaacacaagtcttgcacttgccacattggtacaactccctccatcaatgatcaccatgcaaactttgtcattgatcaaacatctagtgtggaaatttttttctctttgactntcctccatagacttcaattgatggccaagtaaccgtctaatcatcaacaattctccctccagtgttttctccacttcctcttcatcatcctcactctcttctcccttttcaacttcggactcactaatatactctccatctctaagaatcatggctttcttgttagggcactcatatgcataatgtcccaagccttggtgtaacatcccattttttcgtatataaaattntagagaataatgatgttttataattaaataaataaagaacaatagttataataaaataatggtttgagagaaaataagaagagtattttattat

SEQ ID NO: 9130 - DNA, 472 bp, Glycine max
  unsure at all n locations
agcttcaacatcagaccacttccagggtgctggaactacttcgcatggacttgatggngcctatgcaagttgaaagccttggaggaaagaggtatgcctatgttgttgtggatgatttctccagatttacctgngtcaactttatcagagagaaatcagacacctttgaagtattcaaagagttgagtctaagacttcaaagagaaaaagactgtgtcatcaagagaattaggagtgaccatggcagagagtttgaaaacagcaagtttactgaattctgcacatctgaaggcatcactcatgagttctctgcagccatcacaccacaacaaaatggcatagttgaaaggaaaaacaggactttgcaagaagctgctagggtcatgcttcatgccaaagaacttccctataatntctgggctgaagccatgaacacagcatgctatatccacaacagagtcacacttagaag

SEQ ID NO: 9131 - DNA, 402 bp, Glycine max
  unsure at all n locations
ntgagcaaattcaaacgaagataactntatattcggatgtgcgattgagtcccggaatatatcgagaggctccaaattgaaaacggaagctcatatcaaattcaaaggacaataactntttactcggatgtccaatagagtcccgtaatatatcgaaacactccagattgaaaatggaagctcgtatcaaattcaaacgacaataactttttactcagatctccaatagagtcccgtaatatatcacgacgctccaaattgaaattggaagctcgtatcaaattcaaacgacatttacttttaacttggatgtccgattgagtcccgtaatatatcgcgacgctccaaattgaaagcagaagctctaagcatattcaaacaacaataacttnttattcggat

SEQ ID NO: 9132 - DNA, 411 bp, Glycine max
  unsure at all n locations
agctntgagccaattcaaacgacaataactntntactcggatgtctgattgagtcccgtaatatatcgagaccctcgaaattgactgttgaagctctgagccatatcgagacactcgaaattgaatgttgaagctctaagccaattcaaacgacaataactattttctcggatgtcctattgagtcccgtaatatatccagacgctcgaaattgaatgttgaagctctgacccaattcaaacgacaataactttttactcggatgtctgattgagtcctttaatataacgagacgctcgaaattgaatgtcgaagctctgagccaattcagacgacaataactttttactcggatgtttgattgagtcccgtaatatatctagaccctcgaaattgaatgttgaacctctg

SEQ ID NO: 9133 - DNA, 422 bp, Glycine max
tcaagaattatggcctcatcaaactacttgtttcccgagggaaattctataaatagacctcccatctttaatggagtgggttaccactattggaaaaattggaaaacccgcatgcaaatatttatagaggcaatagatttaaatatttgggaagccatagaacaaggaccttatgttccctctatagtggccggttgtgcaacaatagaaaaacctagagcagattggattgaggaagaaagaagattagtacaatataatttaaaggccataaatattattacatctgccctaggaatagatgaatactttagggtttcaaattgtaaaagtgctaaggatatgtgggataccctacaagtaacacatgaaggcacaacaaatgttaaaagatctacgataaacacattaactcgtgaata

SEQ ID NO: 9134 - DNA, 350 bp, Glycine max
  unsure at all n locations
tctaaactntgtacaagaatgaagctctgataccacttgttagacaagtggcctcagatatcttaagaaggggggggttgaattaagatattccaaactgtttcccctaattaaaaatctatttcactttttactcaagttatgaattcccttaatgacaatcttcttaaatattaattcaaacgaagcaacttgaatatgaatttaaagccataataaataaaggagattaacggaagagaaaatgcacactcagttttatactggtgcggccacacccttgtgcctacttcagttcccagcaacccgctgagagtccactatcttgtaaattctttacaagtctaaca

SEQ ID NO: 9135 - DNA, 372 bp, Glycine max
  unsure at all n locations
agcttctcgatatattatgcacatgaatcggacctccgagtgacaagttatggccatttgaattnttcgagagcttccgctgctcaatttcgagcgtctcgatatattatactcctgaatcggacctccgagtgaaaagttaagaccatttgaatttctcgagagcttccgttggtcaattttgagcgtctcgatatattatgcgcctgagtcggacctccgagtggcaagttatgaacatatgaatttctcgagagcttccgttgctcaatttcgagcgtgtagatatattatactcctgaatcggacctccgagtgaaaagttatgaccatttgaatctctctagagcttgcgttgttcaatttcgagcg

SEQ ID NO: 9136 - DNA, 419 bp, Glycine max
  unsure at all n locations
tggtaacctattggaggctcccaacacacttccaatgaaagacctttttgttacaaaacttgaacgcaatgaaggtaagtaaattgccaattacaaaattacaaaacggtcctcaattttggtggttgttctctctttggtgatttactcaatttggagtgattcttagtccaatagctcttaagttggttggccccttgcttcttgactcaaattcctcaagggatggcaccaatcctcctttctaattccctatatggcaactcacaaacaaggagacaaagagacaagcaataaccaaagaccaaaaaaaatgaaatgaaagctaaaccaatagagttttaacaagacaaattttcaaggattattcaacaattaaagcaatgaaaagcacataanagcaagctaggactcaaaga

SEQ ID NO: 9137 - DNA, 450 bp, Glycine max
  unsure at all n locations
gcctgatgcctgatatgttttttctgatggcagtggtcctagatgcagggaagaatttctccaagaacaccctcttaaggtcatcccagctgaaaatggacctgngagcaaggtagtacaaccaatcttttgctactccctccagagaatgaggaaaagcctttagaaagatatgatcttcctggacatcaaggggcttcgtggtggaacaaacaatatagaactccttaagatgtttataaggatcttcacctacaagaccatgaaacttgggcagcaaatgtattagtccagtcttgttaacatatggaacaccctcatcaggatattgaatgcacaagctttcataagtgaaatcaggtgcagccatctccctaagagtcctctcacgaggtggaggttgagccatgttctcagcaaaatcagaatattcagaatcgcccctcaaca

SEQ ID NO: 9138 - DNA, 405 bp, Glycine max
  unsure at all n locations
agctngaaggcaaactggatgcattggttaacttggtaacccagctggccttgaatcagaaatctgtacctgtcgcaagggtttgtggtttgtgctcctctgctgaccaccatacagacctttgcccttccatgcagcaacctggagcaattgagcagcctgaagcttatgctgcaaatatttacaatagacctcctcaacctcagcagcaaaatcaaccacggtagagcaattatgacctctccagcaacagatacaaccctggatggaggaatcaccctaacctcagatggtccagccctcagcaacaacagcagcagcctgctccttccttccaaaatgctactggcccaagcagaccatacattcctncaccaatccaacaacagcaacaacctcagaaac

SEQ ID NO: 9139 - DNA, 427 bp, Glycine max
  unsure at all n locations
tgtcagttgtgtcatgtgtattttttttaaagctatacactagtgaaatagtgatgactgatgagtcataatattctgtgatacaaatgtatataagtgcatatacaatatgcatatcataacttaaagaaaaaaataatatacatacatatatgtttaagaactaatatcacatttacactttatttgggctgattattagttntatttattttttaaataaaactagtttttagtttctaatttgaggattttttatttctggttttaaaagtttaatgtcaatcttacaattttcttaaaaaagataaaaaaaaaacatgtagggctctttacatgaagttgtgataaaaggatccagagcaagagtataataaaatagaatataaaatattttagtggcttttgtgagttaaactcatattgg

SEQ ID NO: 9140 - DNA, 372 bp, Glycine max
  unsure at all n locations
agcttgtctgcaataccatagggttattagttntaaaagcattctctgtttaagaaaagataagaagggtgattcaattgttcatgccttggttactgaataacttccgttgtgcttagcaattcttttgtggtggcatcccatgctctaatgtcacaacccaatcataaaggagcctacatatatgtatataccaaaaaaaatgtacttagtatgcanaatatnattttcctcaagcaattctttatatggaaatgtctaagcaacatgtgttaannattttggtacaagttaccttagctaatgcccatatgctgaaatgagcgcgatattcttcntgtgtcatgcctccatttccaacttctagcatgt

SEQ ID NO: 9141 - DNA, 286 bp, Glycine max
tattgggcattaaagtttttgaacttcgattcaaatgcatctagtgaacacaggaagctccaactccatgaattggaggaattgtggtttcaagcttatgagaattccaagctttataagcaaagagtaaaaatttatcatgacaaaaagttgtcaaaaagaaattttcagcttggtcaacacgtattgttatttaattatagattaagattgtttccaggtaatctgaaatccaagtggttcggaccattcatcatcaaagaagttatgccacatggagcagtga

SEQ ID NO: 9142 - DNA, 381 bp, Glycine max
tggaatatttcaagcaagagtttggagtgcacattgaagttacaaagatgtggagagccatgaaagaagcaaagcaattagtggaagggaatgagaggaaacaatatgccaaagtatttgattatgcacatgaattgttgaggagcaatcctggatcaacagttaagatcaacacagtgccaagtccagaaggtccaccacaatttcagaggctatatatttgtcttgctggctgtaagaaggggtttgttgctggatgtagaccattcataggtctagatggatgtttcctaaagagtgcatttggaggaaacttgctctctgctgttgggcttgatggcaataaccacatctatgttattgcttatgctgttgtggaca

SEQ ID NO: 9143 - DNA, 397 bp, Glycine max
  unsure at all n locations
agctngaaggcaaactggatgcgttggtcaacttggtaacccagctggccttgaatcagaaatctgtacctgtcgcaagggtttgtggtttgtgctcctctgctgaccaccatacagacctttgcccttccatgcagcaacctggagcaattgagcagcctgaagcttatgctgcaaatatttacaatagacctcctcaacctcagcagcaaaatcaaccatcgcagagcaattatgacctttccagcaatagatacaaccctggatggtggaatcaccctaacctcagatggtccagccctcagcaacaacaacagcagcctgcttcttcctttcgaaatgctgctggcccaagcagaccatacattncctcacnncatccacaacagcaacaacc

SEQ ID NO: 9144 - DNA, 293 bp, Glycine max
  unsure at all n locations
tctatagaaggttcgttcctaatttctctacaattgcatctcctctcaatgagctggtgaaaaagaacgtggcatttacctggggtgagaaacaagagcaagcctctgctttgctcttagaaaagcttacctaagcacctgttctagctcttcctgacttttctaaaacctttgagctagaatgtgatgcctctggagtgggaggtggagctgtattgntacaaggtgggcaccctattgcttattttagtgaaaaacttcatagtgccaccctcaactaccccacctatgat

SEQ ID NO: 9145 - DNA, 435 bp, Glycine max
  unsure at all n locations
agcttgtaatcgattacacacatactgtaatcgattaccagaggagattttcagaanatattctcaacaacaacatcttttcatttggttcttgaatggccatcaaaggcctatatatatctgacatgagacacgaatttgctaagagtttttcagaacaacaagtatttattctctcaaaaagaaaaatcgttttatcctcttaagaattccttgtccaattcaattgcaattgattaaggaatcatttgagtgctcatattgtaaaatctatctctttcaagagagattcattcttcttctctttctaattcactaagggattaagagaccgagggtctcttgttgtaaaagaattctaaacacanaggaaggattgtccttgtgtgtttagaacttgtaaaagggatttacaagatagtggaactctcaagc

SEQ ID NO: 9146 - DNA, 429 bp, Glycine max
  unsure at all n locations
tcttagtctcagatgatgcagctaagtttgtagctatctcatgcactcctctaatgactatggcatcatttctggcgctaaactgctgagagttggaagccatcttctcaattaaatttctagcttcagcaggagtcatgtctccaagggctccaccactggcagcatctatcatacttctctccatattactgagtccttcataaaaatattggagaagaagttgctctgaaatctgatggtgagggcaactcgcgcatagttttttaaatcgctcccagtactcatacagactctctccactaagttgtctaatacctgagatatccttcctgatgactgtggtcttggaagcagggaaaatnttttctaagaatactctcttaaggtcatcccagcttgtgatggaccttggagcaaggtaataca

SEQ ID NO: 9147 - DNA, 285 bp, Glycine max
  unsure at all n locations
agcttagccaataaatgatattctccaaagtaaagtagtaatagggtattaacaagtgatatattacccaattcttcataaccaagttactaatgttggattaaaataaatgcttgaacattggctagaaagaagacgagaatgatacttggtaagcacacgaccaccaatgctaaatgcagactcattaatgatagttggtattggaatgcttaacacatcacatgccaacctacaaagatatggatagcagtcttggcggtccttccaatagctcanaacatc

SEQ ID NO: 9148 - DNA, 370 bp, Glycine max
agctttgagcaaatttatacgacaatatctttctagtcggatgtcttattgagtcctgtaatatatagagacgctcaaaattgaatgacgaagctatgagcaaattccaacgacaataactttttactcggacgtctgattgagtcccgtaatatatcgagacactcgtaattgaatattgaagctctgagccaattccaacgacaataactttttactcggatgtctaattgagtcccgtaatatatcgagacgctcgaaagtgaatgttgaagctttgagccaattcaaacaacaataacgttttactcggatgtctgattgagtcctgttatatatcgagacgctcgagattgatgttgaagctctg

SEQ ID NO: 9149 - DNA, 293 bp, Glycine max
  unsure at all n locations
tctagtctcaattntgaacgtctcgatatattaccctattcaatcggacatccaagtaaaaagttattgtcgtttgaatttcctacgagcttccgttttcaatttggagcgtctcgatatattacaggactcaaccggacatccgtgtataaagttattgtcaattcaattttctcagagcttcggatctaaatatggagcgtctcgatatattacgggactcaatcagacatccaagttaaaagttattgtcgtttgaatatgatacgagcttccnattctaatttggagcc

SEQ ID NO: 9150 - DNA, 403 bp, Glycine max
tttggaaggatcaagaagtgccttatgaatcctcccgtgcttatgccaccagtacctgaaaggcctctcattttgtacatgacaatcttggacgagtcaatggggtgtatggtggggcaacatgacgaatccgggaagaaagagcgcgttgtttactacctaagtaagaagttcacgacctgtgaaatgaattactccttgctctaaagaacgtgttgtgctttatgatgggcatcccatcgcctaatgcagtgcatgctgagccatactacctggttgatatccaagatggacccggttaagttcatctctgaaaagccagctctcacgggacgaatcgccctgtggcaagacctgctatccgagtttgatatagtttacgtcatccaaaatgcgatataat

SEQ ID NO: 9151 - DNA, 360 bp, Glycine max
  unsure at all n locations
agcttcttaantcttatgatnnngagttacctcgtgcactcttctaatgactatagcatcatttctggtgctaaattgttgggagttggaagccatcttctcaattaaattcctggcttcagaaggggtcatgtctccaagggctccaccattggcagcatctatcatacttctctccatgttactgagtccttcataaaaatattggagaagaagctgctcagaaatctagtggtgagggcaactcgcgcgtaattttttaaatctctcccagtattcatataggctctctccactgagttgcctgatgcctaaaatatcctttctgatggtcgtggtcctgcaagcagggaaattttt

SEQ ID NO: 9152 - DNA, 425 bp, Glycine max
cgaaggtgtcgaaatcctacccctccaaattgtttttttattgataatttctcccaattgaaccaatggattccattctcttgattgttgttgctttcccaccaattattttctttagttcctcttgaagtgtagaagaaagaagaaaaacacccatgcaatatgatgatatagactgtgctagtgactttaaaaaaatttctttacctgctttagagatgaacttccttgaggaacccaaagatagctcttttccttctccctatgaccgatggtagccccagatattttcctattccaatggttgttgtcactcttaaaaaggatgagatgaattgcctattgttttgagatgtattggagctgaatagaatttttgattcctagaaattaattaattgtccaaatgtcatctcttacatgtc

SEQ ID NO: 9153 - DNA, 272 bp, Glycine max
aatctaagctgatctttagtgtgtatctgtatcttttttccttttgaactattcagtttgaatgcgaactttaattatcttttaattcgttcctaaagattgatcgccaaatctgttgctaactgcacaataatctgttcaagatataacagatttatgtgttcagtttttccggcacgatgtcctggacattgtttccgacatccgggatcctgcataatctgttaaagatataacagatgtatgtgtccagtattgtcgggcaggatgtc

SEQ ID NO: 9154 - DNA, 336 bp, Glycine max
agcttgaagacttgtacatcaccaaatctctggtaaattgtctctaccttatgcaagcatgtattcatttaagatgcaagaaaataaaacggtagaagaatagttagatgtctttaataaatcgattcttgatcttgaaaacattgatgttactattgaggatgaagatcacgcattagtgttattgtgtgttctacctaagacctttgctcatttcaaagaaacacttctctatggaagagattctctcactcttgttgaagtccaatcagccttgaactctaaggaattaaatgaaagaaatgaacaaaggccttctgtacatggggagggact

SEQ ID NO: 9155 - DNA, 341 bp, Glycine max
tcatgcaaacggcttaaaataaaagtattaccttcttatatttaaactttgccaattgatttttcccacttgtaatgcaatggtgcaagggagttctttcatgatagtcacacatgtttacatcagcaccaaattggagcaacaactcaaccatcagtgcactgccagaatgacatgccatatgtaattatgaccatccacggaaacacctatctgtctcagtagtctcttcaactctcagacaggcttcaggatcatgctgatgccctttggcatcatcagcatggtgagactcatcataatactttgcgtttatcagatttgatgttgatgtgacaata

SEQ ID NO: 9156 - DNA, 426 bp, Glycine max
taacattacaataaacgcataaaaaaagaaagcaagttttaattataataaacataataataagtataatattgattaataagcataatttgtcagttactctgaaatttctattgtgacaacattaggtagtggcaaaattaagttgaatctcattttttttaaggattaacttaatgattgtgtatttttttgtttgagtctcattttttggataagctactgtgacattagaaatttcagagcaataaatagattatgctcattaatcaatattattcttattattatgtttgttctaacttaggcttgttttttttaagtgtttattgtaatgttatgcttacaatgattaaaaaaagggagaagatgaagattaaattatatttttggtaaatagtcattttcatccttgaatgtatagag

SEQ ID NO: 9157 - DNA, 306 bp, Glycine max
  unsure at all n locations
tagaatattgcagcaatattatattccatcagttcgttaactatcacgcttagntggagtctgcaaagccccaatcattcaacactttgctgaaacaatttctggtactacaactattagaagctttgatcagcagtcaagatttcaggaaacaaatatgaaactgactgatggatattctcggccaatgttcaatattgctggtgccgtggaatggttgtgtttccgtttggatatgttgtcttctatcacatttgccttttccttaatattcttaatatctattccacacggattcatagatcc

SEQ ID NO: 9158 - DNA, 419 bp, Glycine max
  unsure at all n locations
ntcaggttttccactacgattggttcagtaccattgttgaacacaaacaagtgcgcttggttcatcactgctagctcaggatagacccgggacaaaatgtttgtcttccctcctgctccaaaactctccacaactgagtgatcaatcttccattcatttgaaaaaacaaagaatattaaataattatacattagtattttggagctcataaatgctatatattgttgttgaaatcctgatccatttgtggataaattagttagctttcattttttagaaaattagttaatttgttagtagtctgttgctgaaaaacagaaaatagtgtgttaagttgtaattctcagtttcatcttttcagccctttcacaatgatgtattaatacaattgatcattcaataagataagctgaatgagt

SEQ ID NO: 9159 - DNA, 407 bp, Glycine max
  unsure at all n locations
tccaaccatatgatcataaganagggaactagcagggcaattctcctgtggatccaaaaccatgactttaatggccatctgagaagcagcttgacatatcattcgaccaagttgccctcctcccagaaccccaacaaccacttcagttagtccatgaacaggtgactcatcattcctgcacacaccaataccaaattttgggcttttcatgagattttcaggttcagacacttctaatgaccagaaattttacatttatcttcctaagttgaagaaagctgagaaaagggtcaaaacccctacaactagaaaacaagcgccaaaaataaaaatgcaaaaaataaccttagagaaactgcatcatcctgtgttgttgcttgacaagcaagatggggttggtcacactg

SEQ ID NO: 9160 - DNA, 424 bp, Glycine max
cttggcatctaagatatggccatttgaatatgctatgtgctgaaattgctacactccaaagatacggtgcaggggctgcctaaaactggagagcttgagttgtgtgaaggttgcatttatgggaagcaatcaagaggatcatttccaacaggcaaagcatggagagcaagtgagtgccttgaacttcttcatgcagacttatgtggcccaatgaaaatagtctcactcgatggaagtaagtatttcttgctcatcacagatgattacagtagaatgagctgggtttatcttcttaaagcttagtctgaagcatttgaaagctttaagattttcaaggctatggttgaaaaacagtctggcttgtatgttatagctttgagaatagacagaggtggtgaattcttgtcaaatgaattcattactt

SEQ ID NO: 9161 - DNA, 266 bp, Glycine max
gtgagcaaatttaaacgacaataactttttactcggatgtccgattgagtcccgtaatatatcgagacgctcgtaattgaaaacagaagctctgagcaaattcaaacgacaataacttttgactcagatgtccgattgtgtcccgtagtacatcgagacgctcgtaattgaaaacggaagctctaagaaaatccaaccaccattaccttttacctcgagggcgggttgaggccctcaaaatatttagacccctcaaattggaaacc

SEQ ID NO: 9162 - DNA, 253 bp, Glycine max
ctcatctgtattgtcttcgtgcgattactttttctctctctatgaatattatctcgcaaattccaacgatgaaggtgtgaggaatagaatctcaaaccacatatcaaaatttcatgaaagtccaatggttaacgaaattgggatcatagttttactgggacggttttggatttttgccgaaaaagaaaatgttatgatgcgaattgtatgtcttcaagctccgatatcgtttcataatttccctacggtggga

SEQ ID NO: 9163 - DNA, 370 bp, Glycine max
  unsure at all n locations
agcttaagctccttcaactgcacaaggctcttaatatttgaagagtatccttgtggaaccttcacccgacgaagacactgacaaaaacttatcttctccttcttggacaaagtatggcaggctgggggcaagtaaattttcttcccatcagaccttggatgcaactgtgatcttatacccatatcagctagatcttgacgggtattcaagccatccttcgtcttgccttgaattttaaggagcgtcccaatcacactgtcacaaaaatttttctccacatgcataacatcaatacaatgtctaacgtcaagatcacaccagtatggaagatcaaagaanatggacctcttcttccatatgcaactctgac

SEQ ID NO: 9164 - DNA, 307 bp, Glycine max
agcttatcacccacatcgccaattgattaatagcttttaatgggagtcaggaaaatgaaagtgcgccgaaaccattaactggaaaaaaagtttatgcttggatcaaaggtatcctaactatttttgggtagaacccaaagaaagcatcatctgagactaacatatagaaaaaaaggtcaatgttctttgatctttcgtactggtccgatcttgatgttagacattgtataaacatgatgcatgcggagaaaaatgtttgtgatagtttaattggcacccttcttacattaaaggcaagacaaaggat

SEQ ID NO: 9165 - DNA, 415 bp, Glycine max
tgcaaacagatttcgcaagggtcaccctaccagcatttaaaatagttctagctttccacgtacttaaccgttgatggacttcgtccatgataagttggaatgttcctcgtgatacctttttatgaaaaataggtaccctaaggtattttccaaggtcatcagtacactgattacccatttcctcgcttgattacccatctcctcgctcgattgattcctatgtgacactcaaacatttttagagaaatgcatacgagatttctctaagctaatcttctgaccagaactcttgcaaaataaatttaaaatattatgaatcaagtggacttattctagagaagctcccgcaaacaaaagcaagtcatctgcataggtcaagtgcgatcaggaacaaaactagactacaacaatatta

SEQ ID NO: 9166 - DNA, 323 bp, Glycine max
  unsure at all n locations
agcttcggattgtaagtattggattggatagctcgtgcttccaagctacanaataaattgaacccaaatatgatactcctcgttttttatataaaattcaattacttaatttatcanattcaaaaaaaaattaattgatatcaataaatttattttacatttataactttnttttaaattttccttatcaataatatttcatctcttctaatagtttattaatatattttgtttcttattttaatgagagatgtttttagtataaaaataattaatacaaaaaatattataaattgagttttataaaaaaaaataaacatcaa

SEQ ID NO: 9167 - DNA, 339 bp, Glycine max
agcttctgcgagcaggcatgaacgtgtttcgcttcaacttctcccatgggtcccacgagtaccaccaggaaaccttgaacaacttccgggcggcattgagaacaccggtattctctgcgccgtcatgctcgacaccaaggcacgatacgaccaccagattcgattttcatattccatattctcccctttttgttcgatttggatttattttatttatttatattctcatcgccgattttgttttgatttacttttaaatcttgtgttttaattgctaatgtttatgattggattaggttatgtataagccggtgctattattattattatctaattcta

SEQ ID NO: 9168 - DNA, 418 bp, Glycine max
tggagttggagcattgattatgctgttgtgatgttattggttcatttgcttgacagatcaaagtgtctttagttatgatcttcttctgggtatctgttaagagtctatgaagctgtaccaaatttcctagtagcttttagtttgtttaattcagctgaagggttgtttattgttgtactgttgcttcttggtacgccttgtaccttgatacttttcttattaatgaaaagtattttgctttgttaaaaaaaattaacaatgttttaaacgagcatataaaattaaaaataaatgtttatttaattactcaataagtattttgatttgattttcttaatttatcatttaaataaaagatatttcaactttttatttaaataattaaatctctttgaatgatattaaatacaattaatta

SEQ ID NO: 9169 - DNA, 290 bp, Glycine max
agcttcaaccaaggggtgatggaccatttaagtgcttgaaagaatcaatgacaatgcttacaaagttgagctgcccggtgagtataatgttagttccaccttcaatgtctctgatttatctctttttgatgcagatggagaatccgatttgaggacaaatccttctcaagagggagagaatgatgagggcatgaccaagagcaagggcaaggatccacttgaaggacttggaggacctattgatgaggacatgaccaaaagcaagggccaggatccacttgaaggacttg

SEQ ID NO: 9170 - DNA, 423 bp, Glycine max
  unsure at all n locations
tgtttcanaccatagatggatttatttagtttgcaatctcatagactttgagtcacttaatacaaagttttctggttgcatcatatgaattgtttcttcaatgtcaccatttagaaaaacagtcttaacatccatctgatgtagctctaaatcacagtgagctaccagtgtcattattgttctaaaagaatcctttgaagatactggagaaaaaggtttctttatagtcaatgccttctttttgggtaaatcctttagtgactagacgagccttatatctctcgacatttccctttgaatcccttttgcttttaaatatctatttgcaaccaataggtttcacacttttaggcaatttgaggagatcccaaacgtcattgtcttgcatagatttcatctcatccttcatggcattgatccagt

SEQ ID NO: 9171 - DNA, 398 bp, Glycine max
  unsure at all n locations
tntggaaggatcaagaagtgccttatgaatcctcccttgcttatgccaccagtacctgaaaggcctctcattttgtacatgacaatcttggacgagtcaatggggtgtatggtggggcaacatgacgaatccgggaagaaagagcgcgttgtttactacctaagtaagaagttcacgacctgtgaaatgaattactccttgctcgaaagaacgtgttgtgctttagtatgggcatcccatcgcctaatgcagtacatgctgagccatactacctggttgatatccaagatggacccggttaagtacatctttgaaaagccagctctcacgggacgaatcgccccgtggcaattcctgctatctgagtttgatatagtctacgttaccctaaatgcgat

SEQ ID NO: 9172 - DNA, 240 bp, Glycine max
agcttcagcaaagggatcacaggtcattacgggtaaattggcgaagcggttttatggaccttttcaaattgaggaacgcattgggtctgttgcttatcgtctcaggttaccggcagaagctcgcatacaccctgttttccactgttcattataaaaaccattcaaagggtcactggaatcccgtccacaagtttactggccgaacacaattatccagcatcaacccttgatcatgccttt

SEQ ID NO: 9173 - DNA, 345 bp, Glycine max
  unsure at all n locations
nttcactcggagatctgattcaggcgcataatatattttgacgcttgaaaatgaacaacggaagctctcgagaaattccaatgctcattacctttaactcggaggtctgatttaggcgcctaatatatcaagacgctcgaaattgagcaacggatgctctctagaaatttaaatggtcataacttttcactcagaggtttgattcatgtgcatgatatatcgagacgctcgaaatttaacaatggaagctcttgagaaattcaaatggtcataaccttaaactcggaggtgtcatttaggcgcgtattatatcgagactctcgaattatatcaatggaagctctt

SEQ ID NO: 9174 - DNA, 342 bp, Glycine max
ctttgttcaaggactaaaaacttagttaatcctttcttttctccttagtctgatcctggtttggttgctggtgcacttgctactgtcatgggttcatgcttatgttttatatcctttttctaggaaatggaccatctgaagatggcagtggcaaagatagcttcacaccaaccaaacatcttgttggtggagaaatcattctcacgatatgcacaggaatatcttcttgcaaaggacatatctctggttctcaatgtcaagagaccatctttggagcgtgtagcacgttgcacaggcactcatatagttccttcaatagatcatctttcttcacaaaagttg

SEQ ID NO: 9175 - DNA, 302 bp, Glycine max
  unsure at all n locations
agcttgctcgtcttgctgatatttatcatgcagactnttctgatgatgaccgaggaacaattagggatcaacttgaaacttatgtgctttaagggaagaagaaatgcttctttttccacttgtgaaaatgttcaaagtttggctatgaagatggttcaaactgagaaacattnggtatttccattggtttataaacttattgagctagctttgatattgccggtgtcgacagcatccgttgaaagagctttttcagcaatgaagattatcaagtctaaattgcgcaataagatcaacgatgt

SEQ ID NO: 9176 - DNA, 306 bp, Glycine max
agcttgctatcccctctcttataaggatttatatttcctcatccgattctgatgatgatgtcgaactacatgtctcgacatctaagagggccaagaaatctggaagaaagtgcctggaaatgttcctgatgcaccattggacaacatctctttccactccattggcaatgttgaaaagtggaaatatgtgtatcaacgcatacttgcggttgaaagagaactgtgaagagatgccttggattgcaaggagatcatggacctcatcaaggctgctggactgctgaagactgtcagcaagttgggaga

SEQ ID NO: 9177 - DNA, 356 bp, Glycine max
agcttggtatattttgctccgcaaatattatgttgagactagcacttggctagaaggaatttacaaaatgaaagaaaaatgggctagttgctatatgaaagatgcttatagtataagaatgcaaagtactcaacttagtgaaagtttcaatgctagtgtgaaagattatgttagatcaagcttggatataatgcaaattttcaaacattttgagcgagctgtggatggcaagcaatacaatgaattagaggctgaatacaatagcaggaaaaaacttcatcggctaaggatagaacactcaccattattaaagcaggttaggcaactctacactccaaaaatattaaatttgttcc

SEQ ID NO: 9178 - DNA, 334 bp, Glycine max
tccgttattcaatttctagcgtctcgatatattattttaccgaatcagacatccgagtgaaatgttatgaccattcgaattcgtcgagagcttcttttgttcaatttcgagcgtctagatgagttatgtcaccgaatcggacatctgtatgaagagttatgaccattccaatttctcgacagcttccgttgttcaatttcaagcgtctcgatatattatgtccccgaatctgacttccttgtgaaaagattggaccattcaaatttctcgacagcttccgttgttcaatttctagcgtctcgatatagttatgtccccgaatcggacatttgtg

SEQ ID NO: 9179 - DNA, 340 bp, Glycine max
agcttcatgcagataagattttattgcttttagccacaaattttattataaatagcaacagttctctgatgcaatatacatgattatttaacttggtctaatgataaattgtattaattatgtctctaaagtatgaaaataaagctcattcagtagccaatccacagctccacacaagttcatgacaaccctttcaaagcttcaacttgatagcagtttgaacatccttatcacctcggccactgaagttaaccacaaccttggcttccttaggaagggttggacacactttctctagatatgccaatgcatgaaatgtttccagagctggaattatgcc

SEQ ID NO: 9180 - DNA, 495 bp, Glycine max
agcttgcttctacagccatagccaagatgcatcaatgtagcaaactttaagacattttgcaacatcattttggatattcaacaagaacatcctatttcttggcattggtaccttggtgattagattgtttctcccatctccgatggaaatactggaatctttcaagtgaatatcatagacttttttgagtaattttccgaaactcaaaatatagttcttcatatttaggacgtagtatacatttgatatgaatttatgtcttccatccttcaaacgaatcaagatcttaccttttccttttacaggaatcttggaattatcaccaaatgagacattgacacttattgattcatcaagatctatgaacatgctttttttttcttcacatatggttgcttgcaccagtgtcaaggtaccatgtgttttcttggctaccttcattacctccacgtgctaggagcactgtttcaaacttctcatctttttgctccacat

SEQ ID NO: 9181 - DNA, 674 bp, Glycine max
  unsure at all n locations
cttgctaccgcctgaacaattagacactgactcacatagcataatctgataacacatcagacacatcttttaatatttgtatttatttacatctaatcaaaattattaggagtcttgatttgttttaagacatagatgtatttttgatttaacaccatttctatacctctaaaacttctacacattgatttgtttgatccaactagaacaacctttgttagtgttaaaagatatggacttcttgttgatgatgattacactagatggacatgagttatgttcttaactcacaatgatgagtcactaaagatcttctataacttttgtaaacatgttcaaaatgaaaaaaggagtatgtattacttcaatggaaagtgaccatgaatgagagtttgaaaataaaatttttcataggtgttgtaatgagaatggaattttccccaacttgtctacaccatgaacactacaacaagatgatgtagttgagaaaaagaacatgtcattgaaagaaatgactagaaccatattaaatgattactaatctcttcaacactnttgggatgaggcagngaatattgcttgttatatttgcatccaataggaacttcatccaaaggacttattgtccaatggaaattatgtccatttgcattgcatttttgtgctttcatatg

SEQ ID NO: 9182 - DNA, 603 bp, Glycine max
agcttgctaacccatggaagttcctaatatcttccacactttttggggtgggccattcttggatggccttgattttctcagggtccacttggacctcatttctaccaactacaaaccctaagaaaactatattatctacactaaaagtacacttctctatatttgcatagagggtgtttttcctaagaactgaaagaacttgcctgttgtttagccttccatagtcatcacaaatagaagaacaaaaaaaattgcacaagagagagaagaacagagttgaagagatgaatacatacaaagaacaagtaagagaaaaagagagagaagagtttgatctaaaacttgcactagaagtttctaaaaatgggttttttttacaaaaatgactttaactaactaactaactaactaactctgaaaatatactaagtagaaaaatatatactctaactaagaagaagtaatgggtgggccctaattaagcccacttaatctctccaataagctaattacagaatgcaacgtcccaaaattcgcagcccaaaatccaagtgcagaggctctaactttcaagctcaaaatgaccctcaaaacagcataatt

SEQ ID NO: 9183 - DNA, 641 bp, Glycine max
  unsure at all n locations
ncaacaacaggtgctcggtgacgttctaatagtctcatataagagttttttctgattgcttttctaagaacacccacaatagactatcctttatctgaagttatccttttgattgatcattcttaccacaaaaacaaacatacaccccaatgcataagaacccccacgtaatagtacaaaaagtaaacgaacacaaccttacctccgcaagatgaataatgcatatgtatcttgattagtatcaatttataatagctttgtgtgtgtgttgatatatattaactattataaaatcaatatatttatcttaaaattattacattattaatgcataacctatttttttatattaaataatagaatagatactttttttataggaatagaatatatatactaataagttattagtatgagaataccatacacaatctctttaagcaaagtctgtgaataaaaaaacataattaaataaaaattccattacaaatgatcaaccaagttctctctgataaaaactaatcaacagtgagtactccctacaaataatatgactatcaaaaaaaataaaataacaaccgactgtactatgtttcaagactaaattcgttaactactctgttatggaattttataattca

SEQ ID NO: 9184 - DNA, 480 bp, Glycine max
agcttggagtggtgaaccacctgattatttttgttttatagtgtttggatcactggcctttgctcatgttaaacaaggaaagttggatgcaagggctgtaaagtgtgtgctcattggctatcctgaaggagttaaagggtacaagctatggaaattggaacctggtgagacaagatgcatcatcagcagggatgtaacctttgatgagagcagaatggcattgctaattaaggagcagaaagataacaacttaagtagtgagaataccaattttgaggtggagcattctgagaagctggagataatgaagagctggttactaagcatgacttgcccaattatcaattggctagagatagagaaaaaagggtgataaagccttcaaagaagtatggtcatgttgatattatatgctatgccctgagtgttgatgaagagattcaaaattcacaaaccatagacctggagggaagtaattga

SEQ ID NO: 9185 - DNA, 499 bp, Glycine max
agcttgtacagcgctaggcaatcaattcatgatatttcgaataagatttgagggtggaggatagacaaacagtgcttggcaatcaattcgtggggctacggataagattttagggtggaggaagcatgaatagcgctaggtgtcataccctaatttcgtccggggacctttgcttgatgacatgcgacctttgtttggtccctgtaaggtgcttggcacccatcattaggcaatttgtgaaattccaggacatgccgaaaaacaaaagaaaatattgatgcacaatccgtaaggttccgtgacacaccgaaaatcaaatggaagcatcgttgcataattagtgaggttccgtaacattccgtaagtcaaaaaggggatgattatgtaatccgcaaggttctgtaacattacggaaagaaaacaagtatccgtaccaaaattcgaagtttccgtaactttacgaaaaaaaagagtcacaaaaaaaaaagcagagggggtg

SEQ ID NO: 9186 - DNA, 496 bp, Glycine max
agcttgctatcccctccaagaaaaggaaagaattttcctcatccgattctgatgatgatgtcgaactagatgtctcgacatctaagagggccaagaaatctggaagaaaggtgcctggaaatgttcctgatgcaccattggacaacatctctttccactccattggcaatgttgaaaagtggaaatatgtgtatcaacgcagacttgcggttgaaagagaactgggaagagatgccttggattgcaaggagatcatggacctcatcaaggctgctggactgctgaagactgtcagcaagttgggagattgctatgaaggcttagtcagggaattcattgtcaacattccttctgacataactaacagaaaaagtgatgattatcaaagagtgtttgtcagaggaaaatgtgttagattctcccctgctgtgatcaacaaatatctgggcagacctactgatggagtgatagatattgatgtttttgagcatcaaat

SEQ ID NO: 9187 - DNA, 640 bp, Glycine max
gcaagcttattgataattagccatacaaatatgaatctcaatagcacagaagcacttcttgtgctttttgcatttgtcttcttggcatggggcaatgcacaaaatacccttgtgccagcaataataacatttggtgactcggctgtggatgttgggaacaatgattatctgcctacccttttcaaggctaactaccctccttatggaagggactttatcaaccatcaacccactgggaggttctgcaatgggaaactagctactgatattactggtgaggaaatatcatcaaaattgcaacttacttagcatggatagaaatagtgcacatatattattttcattcttgttgaaataatgtttccttttgcagctgaaacactgggttttaagagttatgcacctgcgtaccttaaccctcaggcatcatggaataatctttttattgcagcaaactatgcttcagctgcctctggttatgatgaaaaggctgctattctgaatgtaaagttggaataaacagtgcacacacatgcaaactcatcttggagaactaatcattattttaactgtgtttttttgcagcatgcgattccattggtcccacagttaaaatattacaaggaatactgaggcaagc

SEQ ID NO: 9188 - DNA, 492 bp, Glycine max
gcaagcttatcctgtggccgccaaagccttctgtttttctgttatagcctattataatcgagtagatgggccttgttctatggtaatcgattacagggagtagtaatcgattaccagatcctaaaatatggtatttcaagtgaaataatcacgaaaatcaattatttgtcacccgcaaaactacacatttattataaataatcaaaatagacaatcgtgaacaatcatcataaacaatcaaaatagacaatcatcataaataatcatgaacaataattagcaaacacaagcacttcactcaacaaaaaattaatcaatcatgaaagataactatcaaacacaatcatttttcttaatcaaaggaaacaatcatcataaacaagcataattaacagccattaaagccaatttattataaacaatcaaaattgttacgaatctaagttatttatgtctatgagtcctagtgctcttctaatatcaaagaaattt

SEQ ID NO: 9189 - DNA, 529 bp, Glycine max
tgaacccatctttgtataggtgaaccctcttaactctattttccaaaattctagttcaattgcatttaacacaaggacatatgatcccccatcattgtgtgataacaattttgttgactagctttgcaaacaaattcttcaacccccttaacaaaagactctttcaaacaacttctaccactataacatctatcgtacatccaacaatgattcaaaagaatatagctcatattttgtatatttaagaagaaaaaatatgaacattcatgaatcacatacataatcttaaagtgatctctattattagtcgcaacaattatgatcatgttttaggtgaaaaaaatcacatacatatggtttttgtctttctaaatgaacaaagcatggaatgtaaataatataaccacaatcacaaatatacttaacacatttagaatacaaaatttcgaacaactaaaataaaaaaaccacaactaacttgaacaatggaatgtacaacgatcacgtaatacaatctcacctataaact

SEQ ID NO: 9190 - DNA, 382 bp, Glycine max
  unsure at all n locations
gcaagcttngacagcgctaggcaatgaatgcatgagactccttttaagattcgagggcggaggatagacaaacagtgcttggcaatcaattcgtggggctacggataagattttagggtggaggaagcatgaatagcgctaggtgtcataccctaatttcgtccggggacctttgcttgatgacatgcgacctttgtttggtccctgtaaggtgcttggcacccatcattaagcaatttgtgaaattccaggacatgccgaaaaacaaaaaaaaatattgatgcacaatccgtaaggttccgtgacacaccgaaaatcaaatggaagcatcgttgcataattagtgaggttccgtaacattccgtaagtcacaaaggggatg

SEQ ID NO: 9191 - DNA, 564 bp, Glycine max
  unsure at all n locations
agcttcactactagaaaatgaacttttaacattttctattttttactttcaacatcggtttttaaccgatgttgaaaccaccgacgttaatattatcaacgttaacatcggttttcaaaaaaccgatgttaacttgcactacacgacatcggttatttacaaaaactaatgtcatataataagaaatataaaaaaaaaagcaaaaactaaaaaaacaacatcgtttttggttaaaaccgatgttgaattatgtattttaaagtgttttctacattggtttttttagaaccgatgcagaaagtgtctttacaacatcgattttaggccaaaaccgatgtaaaaagtgtctttaagacacactttttatatcggttatggcctaaaaccaatgttgcttttaaggaactttctacatcggntttagaacaaccgatgttgttttttgcaataaaaaaatgatattttatttgtttttacaatgaaccaaccaaaacctttcatgattttctccaaagagaattctttattcattagttaagcatagaaaaagatagaattgtgagt

SEQ ID NO: 9192 - DNA, 590 bp, Glycine max
  unsure at all n locations
ttgagccaactcaaacgataataactttttactcggatgtttgattgagtcccgtaacatatcgagacgctcgaaattgaatggtgaacctctgagccaattcaaacgacaatatactttttcacggatgtctgattgagtcccgtaacatattgagacgctcgaaattgaatgttgaacctctgagcaaattcaaatgacaataactttttactcggatgtctgattgagtcccgtaacatatcgagacgctcgaaattgaatgttgaagctctgagccaatacaaacgaccataactttttactcggatgtctgattgagtcccgtaacatatcgagacgcttgaaattgaaagttgaagctctgagccaattcaaacgaccataactttttactcggatgtctgattgagtcccgtaacatatcgagacgctcgaaattgaatgttgaagctctgagccaatacaaacgaccataactttnttctcggatgtctgattgagtcccctaacatatcgagacgctcgaaaatgaatggtgaagctctgagccaactcaaacgacaataactttttactcggatgtctga

SEQ ID NO: 9193 - DNA, 528 bp, Glycine max
agcttcaacattcaatttcgaccgtctttatatgttaagggactcaatcagacatccgagaaaaaagttattgtcgtttgagttggctcaaagcttcaacattcaatttcgaccgtctcgatatgttaagggactcaatcagacatccgagtaaaaagttatggtcctttgtattggctcagagcttcaacattcaatttcgagcgtctcgatatgttacgggactcaatcagatattcgagaaaaaagttatcgtcgtttgagttggctcagagcttcaacattcaatttcgagcgtctcgatatgttacgggactcaatcagacatccgagtaaaaagttatggtcctttgtattggctcagagcttcaacattcaatttcgagcgtctcgatatgttacgggactcaatcagacatccgagaagaaagatatcggcgtttgagttggctcagagattcaacattcaatttcgagcgtctcgatatattacgggactcaatcagacatccgagtcaaaagttattg

SEQ ID NO: 9194 - DNA, 560 bp, Glycine max
agcttcttattttcagtagatgaagatgattctgtggccacatcaaggactcctctaaggacaatagcatcatttcttgcactgaattgttgggagttggaagccatcttctcaatcagattcctagcctcaacaagagtcatatcactaagagctccaccactggcagcatcaatcatactcctctccatgttgctaagtccctcatagaaatattgcggaaggagttgctccgaaatctggtagtgaggacagctttcacacaatttcttgaatctttcccagtactcatacaagatctctccactaagtttcctgatgcctgaaatgtcttttctgatggcagtggtcctagatgcagggaagaatttatccaagaacaccttcttaaggtcatcccagctggtaatggacttgtgagcaaggtagtacagccaatccttcgccactccctctagagaatgaggaaaagcctttagaaagatatgatcttcttggacatcaaaggatttcatggtggaacagacaatatggaactccttaagatgcttatgaggatc

SEQ ID NO: 9195 - DNA, 629 bp, Glycine max
ttacatggagctatatcatgtggtatcaagagcattttcatctaggtgatgttcttttgattcctctatctttttgtttggtcaattcactttaattccttgttcttcatcttcttctccatgtatctcctcaattttcttgtagtttggtgttgtttagtgtagatcaaaaaaaataaaccgattaaatcttagatctacacttgctcttgcatttctatggttcaaattttatagataaactcttgaatcatgtttttgtgttgattttaggttctatcattttttagtcataatattcttgttttgaacctttagatctcaattttcttgcaaaatattgattagaaaagaaaacaaaaaaatccaagtgtaaatcacttcattcatgttgtcttagagtcatgtttagtcataataattgtcacattatgttctaagtttgaattcaattttgattttgttgattgaattataaatacatttgttcatgtattcttgcaattcttaccctatcatttaaatttgagtctaattcatgcatggtatttagttcataacatgttctaaatcaattcctagaagtagtcttgttgttgaacttttttttggtttctaaagttcctata

SEQ ID NO: 9196 - DNA, 605 bp, Glycine max
tgccccacccgttatcactgagcattctacatttgactaatcttatagtaccaagattctctagaaatccaatgcgatttggcaattccctgatatttccattgaccatgttcagtgtagtaagaaatgctaggtctccagtagattctagtaaatattcaagatttatgcaattcattatctcaattttcctcaataatttcggctctccaatctcatttggcaaatttgtgatggttgttccatctaactgaattcaatgttttaattgaattttccaatttgctgatccaactgataactccctcaggtaatataaagaaccaatgatagaagggagttctttaattgtggtgctatttaaaaaaagttgtgcccatgatatgagattgcctatagaatcaagaattacaatgagagattcacaccacatcaaattgagtctcttaaagggtattcaatgatcccattaagacagttaattcttgcaatgaacatagatgtcctgtagaactaggtacccctctcacatattggcaactttctaaaacaaagagcttcaagttttgtgatgcgaaaaaaatgactgtgggcactctactgct

SEQ ID NO: 9197 - DNA, 628 bp, Glycine max
  unsure at all n locations
caatagaccccctcaacctctttttcttaatcaaccatcgcagagcaattatgacctttccagcaatagatacaaccctggatggtggaatcaccctaacctcagatggtccagccctcagcaacaacaacagcagcctgctccttccttccgaaatgctgctggcccaagcagaccatacattcctccaccaatccaacaacagcaacaaccccagaaacaaccaacagttgaggcccctccacaaccttccctcaaagaacttgtgaggcaaatgactatgcagaacatgcaatttcagcaagagaccagagcctccattcagagcttaaccaatcagatgggacaattagctacccaattgaatcaacaacagtcccagaattctgacaagctgccttctcaagctgtccaaaatcccaaaaatgtcagtgccatttcattgaggtcgggaaagcagtgtcaaggacctcaacccgtagcaccttcctcatctgcaaatgaacctgccaaacttcactctattccagaanaaggtgatgacaaaaatctacctaacgatttctgtgcaggtgaatcttcttccacagggtaattctgatttgcagaagcagcacattcccccctc

SEQ ID NO: 9198 - DNA, 540 bp, Glycine max
tgccagctttgccagttagcaccccaattcttttttatggattcccaatcattcattcgggaccctttaacccaaactcgggaaatctctccagctccacctatgttgcttataagcaccaattcgaaatacactctcccattgatggtaaatctgatgcctccacttcttttgcacccaactctgcataatataaatgttactagctagcctaattgtttttaaaccacatgtatcctttacgagaaacaaaaaaaaaggtttatgacatatggcaattgacataacataaagatacttacttgctgtacaaaattggtacaatgccagctttgtacttggctattgtctgaaaggcaggttgagacatgtcaaagtgtggtctaggaggattacaccagccaccattgtcattatggagcgcgaagtttggtaggcacacaattgtggcatgtacaacaatggaagtgcccctgatgcaccattgtagcacttgccttgcgtcacaaactatcctatagcaaccaccacatgaatttc

SEQ ID NO: 9199 - DNA, 298 bp, Glycine max
acatactgaatcgataccatagttattttcaaaaatattcctaacagtcccatctttttgtgtggctcttgaatggctatcaaaaggcctatatatatgtgacttgagacacccaattttacaagagtttttcagaacaaaaaagccttatgctcttacaaagaaaaataattttatccctcttacaaattccttggccaaaactcttgtgattcataaggaatcatttgagtgctcaaattggttaatctatctttttatagagagatttcttcttctcttcttcttcattctgaaa

SEQ ID NO: 9200 - DNA, 604 bp, Glycine max
agcttaagctccttcaactgcacaaggctcttaatatttgaagagtatccttgtggaaccttcacccaacgaagacactgacaaaaacttatcttctcctttttggacaaagtatggcaagctgggggcaagtaaattttcttcccatcagaccttggatgcaactgtgattgaatccccatatcagctagatcttgacgggtattcaagccatccttcgtcttgccttgaatgttaaggagcgtcccaatgacactatcccatacatttttctccacatgcataacatcaatacaatgtctaacgtctagatcagatcagtacggaagatcaaagaaaatgaacctcttcttccatatgcaattggtacttttatccttcttttgggtcttccaaatacagtattgaggtgttgaacccgctcatatacctgttcaccagtcaatggtattggcgcaacattgtgctcttgactttcattaaaagctcttttcagtcgtctggaaggatgattggggtgtataaaacgaccatgcctaatatacactatttttcttccatgttttagttggatgtagcttgtgttttcttcacagatggggca

SEQ ID NO: 9201 - DNA, 459 bp, Glycine max
cgaaattgaacaacggaagctcttgagaaattcaaatggtcataacttttaactcggagttcaattcatgcgcatcacatatagagacgcttaaaaatgaacaacggaagctctccagaagttaaaatggtcataagttttcacactgatgtccgattcaggcttatattatatcgagacgctcaaaattgaacaacgaaagctcttgagaaattcaaatggtcataactttttacactgagggccgattcaggcttataatatatcaagtcgctcgaaattaaacatcggaagctctcgagaaattcaaatggtcataacttttcacacggatgtccgattcgggcgcatattatgtcgagaggctcgaaactcaacaaccgaagctatcgagaaattcaaatggtcataacttttcacaccgatgtccgattcaggcgcataatatgtcgagatgct

SEQ ID NO: 9202 - DNA, 422 bp, Glycine max
gctttcagcaaattcaaacgacaataacttttttcctctgatgtttgattgagacccgtaatatatcgagacgatcgaaattgaattctgaagctctgaactaattcaaacgaaaattatgatttgctcggatggctgattgagtccctgtatacatcgagacgctcgaaattgaatggtgaagctctcagctaattcaaacgacaataactttttactcggatgtctgaatgagtccccgtatacatcgagacgctcaaaattgaatgttgaagctctcagcagattcaaacgaccataacttttttcctcggatgtctgattgagacccgtaatatatcgagacgatcgaaattgaatcctgaagctttgagctaattcaaacgacaatactgatttgctcggatgtctgattgagcccc

SEQ ID NO: 9203 - DNA, 305 bp, Glycine max
ttataccttgatggggtggggcattattttgttcttgttcatagaaacatcaaacgtatcaattgctacctgcagttcattagtgcctgcaacaaccctcatggtgtaaaagtaggcgccaaaaacaaatgctatcaaaccctgaacgactaccaaattctttggcttaagaggaaggcttctatacaccataattctagccgtcttgatcaataggggaagaagggctagcacattctttaacatttacagttaccctctgtggaggcaagggctttaagcacaatatataatgagatcccttt

SEQ ID NO: 9204 - DNA, 575 bp, Glycine max
agctttagacctttgatggcatgttggcatcacctttattcttgttcttgtcaacttcaaacttatcaattgctacctgcagttcattagtgcctccaacaaccctcatggtgtaaaagtaggcaccaaagacaaaagctatcaaacccccaacaactaccaaattctttgccttaggtggaaggctcctatatcccaaaattctagccatcttgatcaataggggaagaagggttagcacaatttcacacaattacaattaccctttgttgatgcaagtgcaaaaagcacaaaagataaaaagataaataattctaaattgtgataatgaggagagtgaaagaaagtaaaaggtagacatttccacaaacagaataagggcaaggcagccccaacacaattgaaagaggagtaaaatgaaacgtagagaggtggtcaaattatttcatcaaacaaaaacagttttgatgggtattactcatattgctacaaagaaaacctttcaattaagtttctatgatgaaccagacagcattcacaaaatcaaaatttttagaaatgatgacttaatatga

SEQ ID NO: 9205 - DNA, 521 bp, Glycine max
agcttgaggataaagacttcccaagctatttatcttctctctcaaagaggctctctacttggatggttaggaatgaaggctcctacccttatttatactactccatctccacaatgaatggtggagattacttgtatcctaggatgaagattaattctctagaatgctccacacattctaggagtctctacactcttttattccctttcatactcttccataaggttccagcccacacatctccagaatattccagaggtttccacatccttccataagcttctagagagttctacactactctagagttctccaggatgttctagaaaattctacacttttctagagagctctacaattttctagaacctctccgatttgttatttaatttgatatttatttatttatttgagatgtttctttgctatcttaagtattgttttcaattgaacttatttaacaaatacataattttaattcaattacgtctatatgatacttttttatattttatttacca

SEQ ID NO: 9206 - DNA, 486 bp, Glycine max
  unsure at all n locations
ccctattttggcaatacctgatttttctaagggttgtatcttggaaactgatgcatcaggaattggactgggagcaatattattgcagaaagagaaacccttagcttttttggagcaaggctctctcaaactcgagtcagtgtatgagagggaattgatggcggtggtgttagcagtgaaaaaatggaggcactatctgttgggtaagaaatttataattagaactgatcaaaggagtttgaagttcttaaatgagcagaggcttatgagtgaggaacagttcaagtgggctactaaattgattggttatgattttgatattcagtataggccaggaaaggagaataaagtggctgatgcactatccacgcagttntcattttcagcaatttcaatggtgcaagaggaggaatacgctgattgggaggaagaaatacaagcaaaccctccattatatgaaatatatcaagggattctgactaaaac

SEQ ID NO: 9207 - DNA, 571 bp, Glycine max
agctttgatggtgtcgagaagaaatcacatgttttgtttcatcaaaaagggggagaatgtgaatgtatgtatacatgattttgatgatgtcaaaagaggaatcaaacaaagttgcttcaaaagataagcatggcttcaagattaatacaagattgcttcaacaaacaaagccttgcttcaagattaactcaagatcaagccttgccttaaagcaaagtgctttcaagacattcaaggctttggtaatcgattaccggaagatagggttgagaaatagttgttgaaaagagttttgaatttgaattttcaacatgtaatcgattaccatatgtctgtaatcgattaccagcaacgaaactcttgaaattcaaattcaaaagtcatgacccttcaaattataactgtgtaatcgattacacaaacattgtaatcgattaccagtgaagagtttttagaaaatatgccaacagtcaaatcttttctttggatttgtgaatggtcatcaaaggctataaataggtgacttgggaccaattttatgagagagttttgattgatcaaaatgtcttat

SEQ ID NO: 9208 - DNA, 567 bp, Glycine max
agcttaatcttcaaataaagcactattaatttttattattaatgatgaaaagaaatataatactagctatcattcttacttcttatctagcatgcatgctcatgttggccaccaccctcagcttcccatgcatgggactggcatccaatttcaaggaaattatcttattggatctttttatgtggttcccactggaagatacaatctagccttattttcatccacttgaattaaaaaaaagaagaagatcggtgtattaattaaatcaataaaaagattggtatcccactttttttagctttattttacattaactttgatatttagtaggtgaggtagaaaagattaaaggaaaaatgagtttttgatggttttaattggtgagagaaaattaccaatgaaacagattttgtttatttttagaaaaaatagaaaagctcacttatctttgttaaatcatgattctcagaataaacataataaaattatgtataattaaacattatttatatcaatgaggtcccctcactggttttggtcaaaccaattagtatcctatgcttttaa

SEQ ID NO: 9209 - DNA, 474 bp, Glycine max
tgcaaaacagatttcgcaagggtcaccctaccagcatataaaagagttctagctttccacgtacttaaccgttgatggacttcgtccatgataagttggaatgttcctcgtgatacctttttatgaaaaataggtaccctaaggtattttccaaggtcatcagtacactgattacccatttcctcgcttgattacccatctcctcgctcgattgattcctatgtgacactcaaacatttttagagaaatgcatacgagatttctctaagctaatcttctgaccagaactcttgcaaaataaatttaaaatattatgaatcaagtggacttattctagagaagcttccgcatacaaaagcaagtcatctgcaaaggtcaagtgcgatcaggaacaaaactagactacaacaatattatctccactttgttgatcaggaacaaaactatgttgacaaggcttaatccaatgagtca

SEQ ID NO: 9210 - DNA, 342 bp, Glycine max
ttttcggagaaacatgaatgtttttgtttagggctgttcatgtgtcctccattatcgagtttgtagctatgttccatgattgcctaagtgagcatcctcaaggcaatcctccattctcacccttttttggagccacatgaatgctattgcttaaagctgttcatgtgtccttcattttcgcgtttggagctgtgttccatgattgcctaaacgaggaccctcaaggcaatcctctattgtcacccttttccggagccacatgaatgtaattgcttaaggctgctcatgtgtcctacattttcaaggtgggagctgtgtaccatgattgcctaagagaagacc

SEQ ID NO: 9211 - DNA, 395 bp, Glycine max
  unsure at all n locations
atagcatcatttcttgccctgaattggtgggagttggaagccatcttctcaatcaaatttctaacctcaacaggggtcatatcaccaagggcttcaccactaatgaaggccgcttgcacacaatttcttgaatcttttcccgtacctatacaaactttcttcactaagttgcctgatgcctgaaatgtcttttctgatggcagtggacctagatgcacggaagaatttctccaagaacaccctcttaaggtcatcccagctaaaaatggacctgngagcaaggtagtatagccaatcttttgccactccctccagagaatgaggaaaagccttttaaaagacatgatcctctttgacgtcaggaggcttcatggggggacaaacaatatggaact

SEQ ID NO: 9212 - DNA, 499 bp, Glycine max
agcttgctaacatctacattaataatatgattcttaatgtgaacctcccgaggttcaataggaagaacagacaagggccttcagatcaagaggaaggaaaatcccaagagagaggatgatgcaatcctaccccgcaagggcattgaatagaagactccaagtagattggaccagagatgtaagagaaggccctaggattctcatgagccttagggtagattttgggcccatgggctaagtataagcccacttatctttgtacatattagattaaggtttcattattttggaccttttatttagggttccataatgtaggtagagtaccctagaaatgtaggatttttcagcccttgtattttacggtacctagactaatttttgtattaggggtagttttataatttcacatgcattaagtgaatatttgatgtgtgtgttggaaaataaattgaattgaattgggagaagcctaattcaattaaagtttagaggggga

SEQ ID NO: 9213 - DNA, 467 bp, Glycine max
caattacgagcgtctcgatatcctacgggacacttttctgacatctgagtcaaaagttattgttgtttgaatttgctcagagcttcagttttcaattacgagcgtctccatatattacgggactcaatcgaacatccgagttaaaagttattgtagtttgacttttcttagagcttccgttttcaatttcaagcgtctcgatatattacagggctcaataggacatccgagttaaaagttattgtcgtttgacttttcttagagcttccgttttcaatttcaagcgtctcgatatattacagggcgcaatcggacatccaagttaaaagttattgtcgtttgacttttcttagagctttcgttttcaattacgagcgtctcgatatcctatgggacacaatcggacatccgattcagaagttattgtcgtttgaattggctcaaagcttctattttcaattaccagc

SEQ ID NO: 9214 - DNA, 490 bp, Glycine max
agctttgaggaaattcaaacgacaataacttttttttcttatgtccgattgtgtcccggagtatctcgagacgctagaaattcaaaacagaagctattagaaaaatcaaacgacgataactttttacacggatgtcccattgagtcccataatatatcgagacactcgaaattgaaaacagaagcacttagcaaattcaaacgagaataagttttgactcggatgtccgattgtgtcccgtagtatatggagacgctcgaattgaaaacagaaactgtgagcaatttcaaacgacaataactttatactcggatgtccgattgagtcgcgtaatatatcgagtcgctcgtaaatgaaaaaagaagctttgaggaatatcaaacgacaataacttttgactcggatgtccgattgtgtcccgtagtatttcgagaagctctaaattcaaaacagaggctttatgaaaaatttatggcgatatcttttttca

SEQ ID NO: 9215 - DNA, 309 bp, Glycine max
agcttccactcttgggagatgaagctgcctttttattcatgggtggggttgaaacggagggcataggccaagatgtggaacttagagccgatggactcatggcagtcatgtcaagtccactagctgaatatgattgtgctgatggcatagacgagccagtggaagcatatacagggcgcaactcttgaggtttgtgggcagagaatctgacttttataacgcagccactctcatcgttgcaaatgcttgtacggtagtgggcaggatagcaatctggacttaaaaacaccatgagcattctcacaggaa

SEQ ID NO: 9216 - DNA, 368 bp, Glycine max
agcttgttctggatatgactagctcttatttctatgatgttaaaaaagaatgtgagaaacatttgcaaaagccttgctttattgccattggatctcctttccttaggactgtcttaaagatacatattgaacctgagctactgcataaggattctgtccttaaagtggaaagcagacaagatcttattttctataagggtgggaaactagttcttagtaatagtgctctggctaaattcatcagtggttacaagaaatatgggaggattggtgaactttcaaaacttttacttagtattcaaggggaactaaattcagtggcagggtccagtttgtgttctgatgtaattggtgcttgtattcagtta

SEQ ID NO: 9217 - DNA, 408 bp, Glycine max
agcttgtgtgtggtccaaaggatcatcttttttttcttcaaactcagcttccatgactcattataataatacttggcaagctcaagatttggatgcttatggtagaagaagtctgagatgggtgcaaaaatattacatgatttatagctactgcaaagattacaagcgatttcctcagggtcgacctcgtgaatgcaggctttctagattctcttagtgcgggataagtaaatttaaaattaatttgatgattttttcatttgtgtgtatttaaaattccactcgaatacggctgaatttgagcaagatcaatttgattttacttttgcttgcttgaaccgataatttcatctcttgttatttacctatttctcctactctttctaaacaatgtaaaattattaaaac

SEQ ID NO: 9218 - DNA, 242 bp, Glycine max
  unsure at all n locations
agctttggagtttccaagtgccaattcgtttttttctgtagtccagtcttcttctggcttcaattcatcagtgggctctccttctgtgtccagcatcttgggatgttcccagcctttgatgacagctttccaggttctgctatccagcgatttgaggaaggccaccattcttgctttccagtattcatagttgcttccatcaagaattggtggtctgatccctgatnntacttctttctcca

SEQ ID NO: 9219 - DNA, 483 bp, Glycine max
tggaactaaactttttttctctaccacttgctatccacaaactgatgggcaaacagaggtagtgaataagtctttatccacccttttaaggctcttctgaaaggcaaccataagtcttgggatgactatcttcctcatgtagaatctgcctacaacagggggggttcattgaaccaccaagcattccccttttgaagttgtctatgggttcaatcccctaacatcgctagacctcattcccctcccactggacacttcttttatacataaagaaggggaatcttggtgagagtttgtaaagaagttgcatgagagggttaagaaccacatagagaaccaaacaaacgtgttttcaactaaaggcaacagaggaagaaaaaaactatttcttaatgagggtgactgggtttggctccatcttacgaaggatagattccctactaaaaggaaatccaagcttagccctagaggggatggaccttt

SEQ ID NO: 9220 - DNA, 630 bp, Glycine max
agcttgagtcttataaatgaaaattcatggttgtattataaaatctcactaaaagtgtataaaatgttaataaaaagtattattaaataagaagtaactattatataatataaaatacattaaaagtttattaactataaatactgtgtccatctttatatataggaccctttcaactaatttcaacccttaaataattagttaatttagtcaatggtattaaatttatcaataatttgtgttgtttttccaaaattaaccttattattttaaaattaattatgtcctcttttcacttaattgtttctcatctagttactactctaggttcttctcgaatcctaataataaagaaaataagtttatctcattgtactcatccccttctaaaatggctgacgtttaagattttttcacacaaaataagaacaacaataaataagttagggatcaaaataattctactaaaatatatttcatctcattgctttaatttatgaggtgataaatggtggtagttgaaaaattgtaggacaggcattaaattcatgtatttattaagggctaaattgaaataaaaattttgatatctcaattaaaaataatagcattaatctatttaattttttg

SEQ ID NO: 9221 - DNA, 594 bp, Glycine max
ttggctttgaggacttgctccaatggctcatcatgtcttctattgaacctttcttcataggcttgaagagaacccatcaattggtctacagtcattgagtctaaatccttagactcttcaatagcacaaaccacataatcaaatttagcgattaaggagcgaatgatcttttccaccacacgaacatcttccatattttctccataacacttcatttggctcacaatagccaacaccttgttgccaaaatctgagatagattcggattccttcatatgtaatgattcaaactctctacgtagagtttgtaggcgcaccttttttaccttatcaacaccttcaagggaggttttcaaaatctcccatgcttctttggatgtgggtacatttgacaccaacactactagaagatgcatgatctacatcggtcacaatcaatgttctacaacggtgcatgaccgtttttgattataatgatgttgaaacttaaaaatttcaacatcagtccataagcgaacgttgtagtaagctgttttttttctacatcggggctatactaatgactgatgtagaaacattggttctgctttttga

SEQ ID NO: 9222 - DNA, 590 bp, Glycine max
  unsure at all n locations
cccatcaattgggctacagtcattgaggctaaatccttagactctttcatagcaccaaccacataatcaaatttagcgattaagggacgaatgatctttttcaccacacgaacatctttcatattttctccataacacttcatttggctcacaatagccaacaccttggtgccaaaatctgagatagattcggattccttcatatgtaatgattcaaactctctacgtagagtttgtaagcgcaccttttttaccttatcaacaccttcaagggaggttttcaaaatctcccatgcttctttggatgtggntacanttgacaccaacactactagaagatgcatgatctacatcggtcaccaatcatgttctacaacggtgcatgaccgtttttgattataatgatgttgaaacttaaaaatttcaacatcagtccataagcgaacggtgtaggaagctgttttttttctaaatcggcgctatactaatgactgatgtaaaaacattggttctgccttttgagggccgattttctacatccgttttaaattaagcaacgatgtggactcttattttctacctcggtttaa

SEQ ID NO: 9223 - DNA, 192 bp, Glycine max
aaatgttttctgatgcaccattgaacaacatttctttccacttcattggcgatgttgaaaagtggaaatatgtgtatcaacgcatacttgcgggtgaaaaagaactgggaagagatgccctggattgcaaggagatcatggacctcatcaaggcggctggactgctgaagactgtcaacaaattgggagata

SEQ ID NO: 9224 - DNA, 429 bp, Glycine max
tctgggggacatcttgacttgctttccaatctgacattcaccacagattctgccttcttctattttcagattgggaatgcctctaacagcacctttgtcaatgattttcttcatgcctcttaagtgcagatgtctaaatctttgatgccatattttgacttcatcttctttggagaatagacatgtggaggagtacctggtttcttgaggtgtccataggtagcagttgtcctttgatctgctgcccttcattagaacttcactcttctcatttgtcaccaagcattctgactttgtgaagtttacattgaatccttcatcacacagctgactgatgctgatcaagtttgcagtcagtcccttcaccagcagtactttgtccagactaggaagtccatcatggactagctttcccattccagtgatctt

SEQ ID NO: 9225 - DNA, 244 bp, Glycine max
  unsure at all n locations
ttttcaattacgagcgccttgatatattacgggagtcaatcagacatccgagtcaaaagttattgtcgtttgacttttcttagagcatccgcgttcaatttcgagcgtctcgatatattgcatggctcaatcggacattcgagttaaaagttattctcgtttgatttttctcagagcttncgttttccattacaagcgtctcgatatcctatggcacacaatccgacattcgagtcataagtta

SEQ ID NO: 9226 - DNA, 400 bp, Glycine max
  unsure at all n locations
acttgatgccttggtcaatctagtaactcttcttgccgtaaataaaaaatctgcaccttttactgttgcaagagtctgtggtctatgttcttctgctgatcaccatacagatctctgtccttctttgcagcaatctggagtcaatgaacaacttgaagcctatgctgcaaacatttataatagaccttcgcagtagcaaaaccaacaacaacagaataattatgatctttcaaacaatagatacaatccaggttggaggaatcatccaaatctgagatgggcaaatcctccacaacaacaacagcctgtcccttccttccagaatgttgctggtccaagcagaccatatgttcatcctncaatacagcagcnacaacaacaacaaagacaacaagtaact

SEQ ID NO: 9227 - DNA, 438 bp, Glycine max
  unsure at all n locations
tggaccaggaattattggatgggttggatgttgaatttttgttgttcctggcgcggagatgatggtactgcgggtgaaccacaagctgaaatttcttttggtgaggtagccatggaaaagcagagacgttggaatgatttcgtaaatctcagaaagctattgggaaatgctggagaaaacacgaatgccaagcagatataaatttgaataaagaatgtagaggggcgtgtgaagcaacggtcgaatttgctttgtagtgaacgtgctattaatgttaagtgattcgtttgggcacgttcagattgcagtagctgctataattcctctagcagacaaatgcccagcttgcctctcagttnttcacactgatgtgcattcaaagcctttgtgaaaatatctgctatttgttcctcagtgtcaacatgcttcagtgtgatc

SEQ ID NO: 9228 - DNA, 429 bp, Glycine max
tcaaaggcttagacaatggagtataagtgtttaagaatttttaaaacaaatggaactactccttttaagagctggacttatggaggaggaaagaacaagcatagctaggttccttagtgggcttaatatggaagtgagggacaaggttgaactccttccatatatggacctagatgagctagtccaactttgtataagagtggagcaacaacttaaaagaaagtcttctttaaaatcttaaggctttcactcttatccaaggaaggaccaagcccaaggaattttggaggctgcaccttgaaaacccaaggaagataagggtaagaccatagagaaatccacccctaagactagttcccaagaaaggactagcaacataaaatgtttcatatgtcttggcagaagtcacattgtctcttaatgccccac

SEQ ID NO: 9229 - DNA, 398 bp, Glycine max
ttgtaagacttaattcacccactctcttaagttattaaggtctcttgtccaacacactcaacccccaaacacttttgtgctgaagcaataaacactacttgttatttacaaaacagaatttatataagaccaatcttaaagaagactccctatgaattatggaagggacataagcccaacatttcttatttccacccatttggatgtcagtgtttcattctaaacaccaaagataaccttggaaagtttgactccaaatgtgattctggaatcttacttggatactttgaatcatccaagggatataaagtgtataactctagaaccttgactatggaagagtccattcatgtgagaattaatgacaacaaacctgacactacaatgtcggagctaga

SEQ ID NO: 9230 - DNA, 442 bp, Glycine max
  unsure at all n locations
tcagctaagagaaggtatctcctttctgaagaaactattggtgttagcgttttgacttctgcagngntggatatcattcacacttaaccattaattcagagtattattatatcatgattcttgactttctgtaatttgttgcacactactgctatttatattatgtgtctgcgctcttgagactaaggaatgttcactatagaattaataaatttaagttttatacaatcaaaacaattattttaaaatattctaacatctaaaatatcgttagttacaaatcttttacatcttttataaatttaagaattatcatttgagtttgctggtagaaaaattagtgaacatgtatataagtagaattctataaattcaatactatagcattcttaaagtggaatattctctacatgattaaaagctagtattcaccaatttatat

SEQ ID NO: 9231 - DNA, 446 bp, Glycine max
  unsure at all n locations
ntntggcaaaggaagaagaagaattatgagtaggaatgtatttttaaataatcgtaaaggttgtaaaggttaaaaggtttctcaaaagttgttcaagaagttgtttgaatgcaagtcaaggtcttgcttttatagactcttcatgtctggtccagaaaaccattggaagagttataaccttgagaaaatcttgagaaaaccattggaagagttacatctcttgaccttttattcaaaacttgtcactggtaatcgattaccataaccatctaatcgattacacaatgcattttatgaaaagatgtgactcttcacaattgaatttgaatttcaacgttcagatacactagtaaccgattaccaatatattgtaatcgattacaccatttaaaaattatttggaacattgcaaanttagtttaaagctttttgaatcacattttatc

SEQ ID NO: 9232 - DNA, 437 bp, Glycine max
  unsure at all n locations
taaatgcatgtgaaggagaaataaaagaagtggataacttattattattatacgtactatgatttgtgccttgatttcctgtgtagtcaacatcgggttattgttggcatctttgagtgagataaggatatcaaggaaatcctctccatgaattttggacccttcatcccattctttgattcgctgctcaatgatgggatcatgatacttgcccacagtttctatggccttcttcaccttgccctcatgaccatctaagtcaagtcccctcaagcaagggacatagtcagaaactctaaagtcataaatgtatntaagcattgtgaaaatggcatcaagatgttccacttcctcactaccaggccctccatccttcttaccctccccanagtacctcctactannagtcaatttcttcatcacattgcaacaatagt

SEQ ID NO: 9233 - DNA, 441 bp, Glycine max
  unsure at all n locations
ctcaagctntgaatgctctattcaatggagttgacaagaatatcttcttactgatcaacacatgcacagtggccaaagatgcatgggagatcctgaaaaccactcatgaaggaacctccaaagggaagatgtccagattgcaactattggctacaaaattcgaaaatctgaagatgaaggaggaagaatgtattcatgacttccacatgaacattcttgaaattgccaatgcttgcactgccttgggagagaggatgacagatgaaaagctggtaagaaagatcctcagatccttgcctaagagatttgacatgaaagtcactgcaatagaggaggcccaagacatttgcaacatgagagtagatgaactcattggttcccttcaaacctttgagctaggactctcggatagggctgaaaagaagagcaagaatctggctt

SEQ ID NO: 9234 - DNA, 396 bp, Glycine max
tgatggtgtcgagaagaaacacttgtgtgtcatcatttttaagggggagaatgtgaatgtatgtatacatgattttgatgatgtcaaagaagaatctaacaaggctgcttcaatcgataaacatttgcttcaagaataattcaagaatgcttcaacaaacaaagccttgtttgaagattcactaaagaccaagccttgccttaaaacaaagtgctttcaagacatgcaaggctctggtaatcgattaccaggaagtgtaatcgattaccagaagacagggttgagaaatagctgttgaaaaaggttctgaatttgaattctcaacatgtaatcgattaccgtatgtctgtaatcgattaccagcaacgaaactttgaaattcaattccaaagtcat

SEQ ID NO: 9235 - DNA, 390 bp, Glycine max
  unsure at all n locations
ntccctctttgaacaaatacccctcagccatatagaattcatcttgggcctttttcccaaaactctcgtaagtgggagagaaatgttcatctaaagcatacaagtccctaatattatcaaatcctaaaatttgagctcctagggagctaaacaatgtgtgtctcctagagagggcattagctaccacatttgtttttccctttttgtatttgataacatatggaaattgctttaggtactctacccattttgcatgcctcttgtttaacttgctttgccctctaatgtacttaagtgattgatgatcactatgaatgacaaattccttggaaacaaggtaatgttcccaagtttggagggctcttattaaggcataaagttctttatcat

SEQ ID NO: 9236 - DNA, 424 bp, Glycine max
ctttgaaaatacagggcatctttgccttatatagtcataggacaaaacataaaaaataacagaataaacttccatatggatttaggtcacaacccaacaattcaccaccttgaactaacatccatataggacacaaactgctccctctaagcacacaagaacttaaccccaacaatcaacattgagcaagcttaagcattgatcaaacatgctctttggaactggctttgtgaaaatatcagcaggattgtgcagagtgctgatcttatgaactttgattcttctttctgaccgaatgaagtgatatctaacatctatatgcttggttctatcatgatgaacctgatccttggccaagcatatagcactaaggctgtcacagtagatgttagcatattcttgattaattccgagatcatttatc

SEQ ID NO: 9237 - DNA, 434 bp, Glycine max
  unsure at all n locations
agcttagctacacatacctctctaatagctaagcttttctccttgagatgataagctagagcttagctacacaccccctataatagctaagctcacccccatgacaaaaaaacatgaaaatacaaaaaaaaagtccttactacaaagactactcaaaatgccctgaaatacaaggctaaaaccctatactactagaatggccaaaatacaaggcccggatgaaggaaatacttattctaatatttacaaagataagcgggctcatacttagcccatgggctcgaaatctaccctaaggctcatgagaaccctanggccttcccttggatctctagccctagcgctgttcgcctatcctccaccctcaactcttattcagagacccatgaattgattgcctaccgctgtttatgtgtccctcaccatcgagtctg

SEQ ID NO: 9238 - DNA, 412 bp, Glycine max
ctaagcttacacttgataatggagaacacatgaacagcgctaggtaatgacattcattgtactccgaacaaaggtggagtatggaggattgccttgagggtccgcacttaggcaatcatgaaactcagctccaaactcgaaagtggaggacacatgaacagccctaaacaagaacattcatgtggctccggaacaggatgagaatggaggattgccttgagggtcctctcttaggcaatcatggaacacagctccagactcgaaaatggaggaaacatgaacatccctaagcaataacattcatgtggctccggaaaaggatgagaatggaggaatgccttgagggtcctctcttatgcaatcatggaactcagctccagactcaaaagtggaggacacatgaacagcccta

SEQ ID NO: 9239 - DNA, 433 bp, Glycine max
  unsure at all n locations
ntactgaagaaagcaatatgtcgtctctgctgcattattacagcacctatacctctaccagccgcatcacactcaacttcaaaaggtaaatcaaaatttggaataattagcacagggggagaagtcatgatcctcttcatctcctcaaaggccttgacagcttctattccccaagaaaaaatgtctttcttagtcaattcggtgagaggttttgctattttaccataatcttggataaaatttctataataccctgtgaggcccaaaaaaccacgtacccccttcacattctntggtgtgggccatgcaagaatacagttcaccttttcagggtccattgccacaccttctccagaaatgatatggccaagataatcaatntgagcacacccaaacctacactttgcttgatttgcacanaacaatgctcaac

SEQ ID NO: 9240 - DNA, 452 bp, Glycine max
  unsure at all n locations
tcatgatgatgaatcaagttgattcaagtagttttgatgatgacaaaaagcctaagataagtttgatttcgagattcaagagaagatgaattcaagattcaagagaagaaatcaagaagacttcacaaggtaagtattgaaaagatttttcaaaaaacaaacatagcacaattttgtttttcaaaagagtttttctcaaaattttctaagttaccaaagtttttactctctggtaatcgattaccaattacctgtaatcgattaccagtggcaaagtttgatttcaaaagcttttaactgaatttgcaacattctaattgattttttaaatggtgtaatcgattacaatatattagtaatcgattacatggtggtggtaatcgattaccagtgacaagttttgaataanaatcaagagatgtaactcttccaatgggttataaggttttctc

SEQ ID NO: 9241 - DNA, 317 bp, Glycine max
ggcatccattgcacgcttcttgtctcataaaaaatataatataagctatgttatcatggtagcatagatgcatttagtgttaaccaatgaaataccttttttgttgcttgacaaattaggttgaacttgaaaaccagcttaagttggcaatgttggtaacttcaatgcaatagtggtataaagcaacttataattttctctgtttattctgtgttggtaatcagaatgcaccagattgttctttcttcttgcttcatacgtgtgcccacaacccaactggtgttgacaccactgaggagcaatggagagaaatatca

SEQ ID NO: 9242 - DNA, 335 bp, Glycine max
acaacccttcctttgtgttcagattgctttacaacaagagacccttggtctcttaatcccttttcagaaataagatgaagagaagaagaaatctctcttgaaagagatagattgaacaatggagcactcaaattattccttattgaattgcaagtgtattggccaacgaatttttaagaggataagacaattttggttttgagaagataagacctttttgttcttaaaaactctaagcaaatttgtgttccaaggcacatattaatagacccttgatggccattcaaaaaccatttgaacagatgtgactcttggaaattaatttttgaaaatct

SEQ ID NO: 9243 - DNA, 361 bp, Glycine max
  unsure at all n locations
tcaagaattatggcctcatcaaactacttgtttcccgagggaaattctataaatagacctcctatctttaatggagtgggttaccattactggaaaacccgcatgcaaatctttatagagacaatagatttaaatatttgggaagccatagaacaaggaccttatgttccctctataatagccggaagtgcaacaatagaaaaacctagagcagactggactcacgaagaaagaagaatagtacaatataatttaaaggcgaaaaatattattacatctgccctaggaatagatgaatactctagggtttcaaattgtanaagtgctaaggatatgtgggatacactacaagtaacacatg

SEQ ID NO: 9244 - DNA, 377 bp, Glycine max
agcttaagctccttcaactgcacaaggctcttaatatttgaagagtatccttgtggaaccttcacccgacaaagacactgacgaaaacttatcttctcctttttggaaaaagtatgacaagctgggtgcaagtaaattttattcccatcagaccttggatgcaactgtgatcgtatccccatatcagctagatcttgacgggtattcaagccatccttcgtctcaccttgaatcttaaggagtgtcccaatcacactatcacatacatttttctccacatgcataacatcaatacaatgtctaacgtctagatcagaccagtacggaagatcaaagaaaatggacctcttctttcatatgcaactggtacttttatc

SEQ ID NO: 9245 - DNA, 259 bp, Glycine max
  unsure at all n locations
tctcgatatattatgcgcctgaatcagacttccgtttcaatagttatgaccatatgaatntctccactgtattccgtgtgacaagttatgaccatttgaatttctcgatagcattcgatgttcaatttcgagcgtctcgatatattatgcgcctgaatcggacttccgtgtgacaagttatgaccatttgaatatgtcgagagcatccgatgttagatttcgagcgtctcgatatattatgcgcctgaatcagacatcc

SEQ ID NO: 9246 - DNA, 416 bp, Glycine max
agcttctcgatatattatgtgcctgaatcggacttccgtttgaaaaattattaccatttgaatttctcgagagctttggctgttcagtttcgagtgtctcgatatattatgcgcctgaatcggacttttgtgtgacaagttatgaacatttgaatttctcgagacctttcggttctcaattaagatcgtctcgatatgtgatgcgccagaatcggacttccgtgtgacaagttatgaccattggaatttatcgagaccttccgatcttcaatttcgagggtctcgatatattatgtgcctgaatcggactttcgtgggacaagttatgaacattggaatttctcgagaccattcgttgttcaatttcgagcgtctcgatatattatgcgcctgaatcggacttccgtagacaggta

SEQ ID NO: 9247 - DNA, 442 bp, Glycine max
ggagctcggggtctttctgaagttcctcagctgacttgtagtagaatgagacatattcttccacccaagacttgatagcatcccatatctctagcccatcagaagcataaggatagtcctcgatcaaaagtctaactccatggggagcagatggatccttaacagcaactcctctgaattaaaagcacccaaataacattgattagcacaagagttatatcaagcctgaagccctttttcttcttatgtcattgatgactctttatatgatgcattcatgtgttcccccattgtatgcactttgtgatttcttttgtctttttaatttactgtcaaacacaaaactagagctgaatcggaacaagaaactatttccaacacaaaagacttgagctgaatccaaacaacaaaaacaatatggcttgaaataaaaaaaataaaa

SEQ ID NO: 9248 - DNA, 349 bp, Glycine max
  unsure at all n locations
agcttcctcatggcnttcttgagaaactttctcaagaggcttctttgagaagctaacgctntaactactaacacccttctaataactaaactcacctccttgaaaataattacagataaaataacacaacaaatataatcaaacatcaaacataattactaataatatatagatatatatatcagggtgttacaactctcctacctttttaaaaatttcgtcctcaaaatttaccttactcaaacaaggatggatgagcttctcgcatttgactctctagttcccacgtggcatcttctcctgatgcacctccctagatcaccttgaccaacggaatctctttccctct

SEQ ID NO: 9249 - DNA, 321 bp, Glycine max
  unsure at all n locations
taggccatagatacaagagaatgccctaggattctcatgagccttagggtaaattntgggcccacagactaagtatgagcccacttatctttgtacatattagattaaagtttcattattttttgtccttgtatttaaggctccattgtgtagggagggtaccctattaatgtagaatttttcagcccttgtattttatggcacctacactaatatttgtattaagggtagttttgtaatttcacatgaattaagtgcactattttatgtgtgtgttgggagataaatttaattgaattgggaaaagcccaatccaatcca

SEQ ID NO: 9250 - DNA, 400 bp, Glycine max
  unsure at all n locations
gcccgcttgttgtccctgtacacggttccggtaatggtggcattgacggcaccggtggtcatgctcacttggctgccaccataagtggtgacattaagttgcagccttttagagtcatcaccggcttgggtctgaacggggttggtgagagtgtcgaagttggagattgagaggaaggaagaaagagtgtgaaattgtaaaagttcaaccttttgcctgtcgttgagtgagttgaggaatcctgcttttagctttgagaaggcagaatcaggtggggagaaaatggtcaatcccccagaacctgacgtgaggagttgagagttgagttggttgatcaactgggtcgtcttcagaagccgaatcagaacaganaatctcttggccttactcacgatttgag

SEQ ID NO: 9251 - DNA, 340 bp, Glycine max
agcttcacttgaaattaagtatttaattatatggttcttgatttaatcactattttctctccccctttggcatcaacaaaaagccaaactacgtaagaaatataaaacatacataaatgactaatcatacaagagaatataaaataattaaacaagataatttaactattcatcaaacttagaaaggtaagaaatataaaaatcatacataaatgacatacaaaataatagaaaacaatcaaacaagataacttaaccattcatcaatcttagaaagataatacttaatagaatgtcatataatccagaaagttattcatattaaccaaataaaactact

SEQ ID NO: 9252 - DNA, 323 bp, Glycine max
  unsure at all n locations
agctnggacttcctgtgttttgggaacctctccttcctcaggtgtacccaaacccaatcacctggttcaagcacgactttctttctgcttttgttggcttgccttgcatagctcgcatttttcttttcaatttgaaccttcacttgctcatgcaacttcttcacatactcagctatagcctgtgcatccttatgcttaaacatagcaatgttaggcataggcaacaaatcaagaggagtcaaaggattaaatccatacactatctcaaatggtgaacaattagttgtgctatggacagcccgattataagcaaactcaacatg

SEQ ID NO: 9253 - DNA, 377 bp, Glycine max
agcttgaatttccttttagtatggaatctatccttcctaagctggagccaaaccctgtcaccctcattaagaactagctcttttctttctctattgcctttagttgaatacacctttgtttggttctttatttagttcttaaccctctcatgcaacttctttacaaactctgacctagattccccttctttatgtataaaagaagtgcctagtgggattaaacccatagacaaccttaaaaggggactgcttggtggttctatgaacccccttgttgtaggaaaattctacatgaggaagatactcatcccaagacttatggttgcctttcagaagatcccttaaaagggtggataaagacctattcactacctcta

SEQ ID NO: 9254 - DNA, 438 bp, Glycine max
  unsure at all n locations
agcttatcccatgcctccttagcagatgttgcataagaaatcttctcgaatgcatcattttttaatgcttgatagatgaggaagagagctttattgtctctctttcttgagtcctttaatgtctccttttgtacttgggatagtgaagtctcatcttgtgactccttttagcatttttcaaccatttcccaaacatcatgtgctccaagaagggccttcattttgatgctccaattgtcataggtgctcccctttagaagtggaacttgaaaggataccgcttcattgcttgccataactatataggaatttcttatcagaacctaagctctgataccactntgttggaaagaataaggttataggaagtatttaagagacatggaggaggggagaatatctgaaagagagctagttttatgacttgagaaatgtttt

SEQ ID NO: 9255 - DNA, 309 bp, Glycine max
  unsure at all n locations
ngaaggcaaactggatgcattggttaactnggtaacccaactggccttgaatcaaaaatctgtacctgttgcaagggtttgtggtttgtgctcctctgctgaccaccatacagacctttgcccttccatgcagcaacctggagcaattgagcagcctgaagcttatgctacaaatatttacaatagacctcctcaacatcagcagcaaaatcaaccacagcagaacaattatgagctctccagcaacagatacaatcctggatggaggaatcaccctaacctcagatggtccagccctcagcaacaaca

SEQ ID NO: 9256 - DNA, 433 bp, Glycine max
  unsure at all n locations
ntatacaccttgtgcagttatcctctattcggttggacctattgtttcttctaatgttcttttagaaacaaaatgcaattgtcttaaatctcatttttggttatgggaaattccatctgcatgctttcattccccataagtcgcattgtttttttttaaaaatgtgtgttcttctgatcggtttatgggtttgtttctttactaagcgtgttcacattttagtgagagatttcaagactacaatgtcttttgttttacatttcaagacttcaatgtcttttgtctttatattttcaagacttcgatgtcctctatctttacatttcaagacttcaatgtctttttgtctgtacattttcaagacttcaatgtcttctgtctttacatttcaagacatcaatgtgttctgtctttacattctagagacttcaat

SEQ ID NO: 9257 - DNA, 337 bp, Glycine max
  unsure at all n locations
tttttgtaataggattaaatactctgtatcccttttggtttggagaatatccaacaaaaatgtacttttctgcccttgggtccagtttagaccgagatatggagggtgtatgcataaaaacaatacaaccaaacacttttaaaggcatttcagtatgtaatcgacatgctggaaaaattgttttgaaagtgtccaaaggtatgcggtaatttaacacacgagtgggcattctatatataangtaggttgctgttaggacggcatccccccacaaatattttggaacattactctcaaacatgatggcacaggctacttcaaggagatgtttattttt

SEQ ID NO: 9258 - DNA, 362 bp, Glycine max
  unsure at all n locations
tatcacgatacanagctgttgaagagagacttcaaaccaggacaacatgtattactttttaattcaagattgaaattatttcctggtaagttgaaatccaaatggtctgaacctttcatcatcaggaaagttcggccttatggtgcaatagagttgtatgatccacaatttcaggaccttgactgaacatggttggtgaatggccaaagattgaaactgtaccatggtggagagtttgaaaaggcaaacaccatcttaaatttgatataacccattgaggtatatgcgtcaggctaatgacgttaaaagagcgcttcctgtgaggcaacccaactctgatttctttcattttgtttttcatg

SEQ ID NO: 9259 - DNA, 438 bp, Glycine max
agctttcaactttcctattgaattagctataaacctttgcgtgaaattgatcttcccaatccgactttgaagctccttcctattctgaggtggccttgcttccaacaatgctttagctttatttttatctacctcaattcctctttgatggacaaggaaacccaaaaattttcctactaatactccaaaagcacatttctcatgattcattttaagcgtatgaaacctcatccttaacaaagaatcttttagatcgcccaagggctcctcaaaatcgattgactttgcaaccacatcattaatgtaaacctccaccaatttaccaaccaattcatggaaaatagcattcatagcccattgataaatggctcctatgttctttaaaccaaatgacattaccaaccattcatagatcccaagcgtttgtggacatcgaaa

SEQ ID NO: 9260 - DNA, 331 bp, Glycine max
  unsure at all n locations
atggtcataactnttctcacggatgtccgattcaggcttataatatatcgatacgctcgaaattaaacatcggaaactctcgcgaaattcaaatggtcataacttttcacacggatatcggattcgggtacataatatgtctagaagctcgaaattgaacaacggaagtgcttgagaattcaaatggtcataacttttcaccggatgtgcaattctggcgcataatatgttgagaggctcacaattgaacaacggaagctctcgagaaatataaatggggataactcttcacacggatgtgcgattcaggcgaatcacatatagagacact

SEQ ID NO: 9261 - DNA, 412 bp, Glycine max
  unsure at all n locations
agctntgagcaaattcaaacgaaaataacttttaactcagatgtctgatcgagtcccacaatgcatcgagaggcacgaaatataatacagaagctgtgagcaaattctatcgacaataactttgtaccctgatgtccaattgagtcgcgttatattcgagacgctcgaaattgaatacagaagctgtgagctaattctaacgacaataatattttactcggatgcccgactgagtcacgtaatatatcgaggcgctcgaaatagaatacagaatctgtgagcaaattctatcgaccataactttctacttggatgtccaattgagtcacgttatatctcgagacgctctaaattgaatacagaagtcttgtgcaaatctaacgacaatatttttactccgatgtctaatgag

SEQ ID NO: 9262 - DNA, 317 bp, Glycine max
tcaacattcaatatcgagcgtttcgatatattacaggactaaatcagacatccgagtaaaaagttattgtagtttgaagttgttcagagctaaggcattcaagtccgagcgtcttgatatactatgggactcaatcagacatccgagtaaaaagttattgccgtttgaatttgctcaaagcttcggtcttcaatttcgagcgattcaatatattgcgggactcaatcgaacatacgagtaaaaacgtattggcggttaaatttgctcagagcttcggtattcaatttcgagcgtctggatatattacgggtctcaat

SEQ ID NO: 9263 - DNA, 402 bp, Glycine max
  unsure at all n locations
agcttctactctnttggatgcttaaaaataactnttatccaacaaatttcagttgatgtcttaaacatgatgaaatttggttaaaagcttaaaaaataaagccaaaatggctaaagtttaactgttccaaactttattatcattttgtgtccaaaaaactttattattattttaatcagaataaatggttagaatgtgtttatttcaaggattaaaattttatcccagaaaatattttgtgaaacaaacgttccattgttattgttttcattatttataatatttttttgcaataattattactttaatctcttataacaaatatttattgatatcaatgatgcacttttatattataacttgctaacttgacgtgatcaaacagatatatagattataaaa

SEQ ID NO: 9264 - DNA, 401 bp, Glycine max
  unsure at all n locations
cagcttgagcaaattcaaacaacaataacttttgaatcggatgtccgattctgtcccgtaggatatcgagacactcgtaattntaaacggaagctctgagaaaaatcaaacgacaataacttttaactcggatgtccgactgagccctgtaatatagcgagacgctcgaaattgaaaacggaagctctatgaaaagtcaaacgacaataacttttgactcgaatgtccgattgtgtcccgtaggatatcgagacactggtaatttaaaacggaagctctgagaaaaattaaacgacaataacatttacctcggatgtccgattgagccctgtaatatatggagacgctcgaaattgagaacgggagatcttgaaaagtcaaacgacaataacttttaactc

SEQ ID NO: 9265 - DNA, 398 bp, Glycine max
agcttccgttttcaattacgagcgtctcgatatcctacgggacacaatcggacatccgagtcaaaagttattgtcgtttgaatttgctcacagcttcagttttcaattaccagagtcttgatatattacgggactcaatcagacatctgaattgaaaggtattgtcatttgacttttcatagagctaccgatttcaatttcgagcgtctcgatatattaaagggctcaatcggacatccgagttaaaagttattgtcgtttgattattctaagagacttaggtttcaattacgagcgtctcgatattatacgcgacacaatcggacatccgagtcaaaagtattgtcgtttgatatgcgcagagctttaattttaaatacgagcgtctcgatatatta

SEQ ID NO: 9266 - DNA, 331 bp, Glycine max
gcttaacatcagaccactttcgggtgctggaactacttcacatggacttgatggggcctatgcaagttgaaagccttggaggaaagaggtatgcctatgttgttgtggatgatttctccagatttacctgtgtcaactttatcagagagaaatcagacacctttgaagtattcaaagagttgagtctaagacttcaaagagaaaaagactgtgtcatcaagagaatcaggagtgatcatggcagagagtttgaaaacagcaagtttactgatttctgcacatctgaaggcatcactcatgagttctctgcagccattacaccccaacaaaa

SEQ ID NO: 9267 - DNA, 421 bp, Glycine max
  unsure at all n locations
agcttcttagtttcagatgatgcagctgagtttgtagctacctcatgcactcctctaatgactataacatcatttctggcgctaaactgctgggagttggaagccatcttctcaattaaatttctggcttcagcaggagtcatgtctccaagggctccaccactggcagcatctatcatacttctctccatattactgagtccttcataaaaatattggagaagcaactgctctgaaatctgatggtgagggaaactgacacatagttttttaaatctctcccagtattcatacaggatctctccactgagttgtctaatacctgagatatccttcctgatggctatggtcttggaagcaggngaaatnttttctaagaatactctcttcaagtcatcccagctcgtgatggaccttggag

SEQ ID NO: 9268 - DNA, 427 bp, Glycine max
agcttaagagagtccatcctttgtgatacacaaagtacttatgagagattagaacttaattgtaaattcactcattaagtgttataattaatatataattctatatcaaacttttgtttgtgaaaaccaatagtgactgatgcaatcctaccccgtagagaaggccttagggttctcatgagtcttagggtagatttcggtcccatgggctaagtttgagtccgcttatctttgtacatattagattaaggtttcattatttttgggccttgtatttagggctccataaaataggtaaggtaccctagaaatgtaggatttttcagctcttctattttagggcacatagactagtttttgtattaagggtagttttgtaatttcacatgcattaagtgaatattcgatgtgtgtgggtggaaataaa

SEQ ID NO: 9269 - DNA, 427 bp, Glycine max
  unsure at all n locations
cctccataagaaaattctttgtcttctccgcatcataaaagtntgattctctagttacacgctctacctcctataattgtccagttttagcagcggcctcaatgtacttgaagtgaatatcaggatcctcactttacaagacagaacaaaaaaaattacagtaattgaaaaaaaaaaagtcaagcagaccaactagtgaactgaggtcatgttcactctccaataaaaaagaaatacctggagctcaagtatgcacccaagaaaaagtatagtccttcataggatttgaattgctcaaagagtttaatgcatgcatcaacacccaactgctcagaatattccttagcagtctgcaaaccatgtactagtaagaatttcttatagatgaattgcggaattcaaaaaataaaatagaacatgactctta

SEQ ID NO: 9270 - DNA, 356 bp, Glycine max
  unsure at all n locations
agcttatgaccatnttaatttctcgggagtntccattgttcaataaccaatgtctcgatatattatgcacctgaatcggaaatccaagtgaaaagttatgaccattttaatttctcgagggatttcgttgttcaattttcagtgtctccatatatggtgtgcctgaatcggacctccgtgtgataacttatgaccatttgaatttcttgagagatttcgttgttcaatttcaagcgtctcgataaatgatgcgcctgaatcggacatccaagtgaaaagttctgaccatttgaatttctcgtcggctacctgtgtcaaattcgagcatctcgcatgtgatggcctgaatcgacctc

SEQ ID NO: 9271 - DNA, 284 bp, Glycine max
  unsure at all n locations
tctagaggctnggattatctaccccattttcgatagtacttgggtaagcccaatccaggtggtaccaaagaaagggggcatgacaatcattcagaatgaaaagaatgacctaatcccaacaaggactttcactgactggagaatatgcatcgattaccacaagctcaacgaagccacgaggaaagaccactttctttttcctttcatggaccaaatgttggataggcttgcgggacgggcttattactacttcttgtatggatactttggatataatcaaatta

SEQ ID NO: 9272 - DNA, 395 bp, Glycine max
  unsure at all n locations
ntatacgccttgtgcggttttcctctattcgattagacccagtgtttcttctaatgctcctttagaaatgaaatgcaagtgtcttaaatctcatttttggtcatgagaaattctatttgtatgctttcattcctccttcatcgcatttttttatataaaaaaatgtgtgattgatctgatcggtttgggggtttgtttctttaccaagcgtgttcgcattttagtattttagtgaaaacttttagagacttcaatgtcttcagtctttacattttcaagacttcaatgtctccagtctttacatttcaagacttcaatgtcttcagtctttacatttcaagacttcaatgccttctgtcttttacatttcaagacttcaatgtcttcagtcttta

SEQ ID NO: 9273 - DNA, 418 bp, Glycine max
agcttgtttgttagaaagacccaacgctttttacctatttgatgcaatcctaccccgcaagggcattgggtagaagactccaagtcgattgggctagagatccaagggaaggtcctagggttctcatgagccttagggtagatttcgagcccatgggctaagtatgagcccgcttatctttgtaaatattagaataggtttttccttcctctgggccttgtattttggccattctagtagtataatgttttagccttgtattttggggcattttgagtagtctttgtagtaaggactttttttttgtattttcatgttttttgtcatggaggtgagcttagctattatagggggtgtgtagctaagctctatcttctcatctcaaggaggtgagcttatctattagagaggtatgtgt

SEQ ID NO: 9274 - DNA, 380 bp, Glycine max
  unsure at all n locations
caaactggganaagaagtagccacaaacaaaaacatagctgaagaagagagtgattgtccaatcacaacatcaagtagacgtcgtctttatcctcccggaaggatcatgcatattattcctattgcacattcgtctgaaaatcctaattcaaaccacaatggttgtgatgagaaacatgtttccctatatgaaacgcctagagagctctatggaaagctcagactntcaagaaggatgatacttgatcataagtcaaacaagtatctgaaggtgttacaacaattaatcaatcaactagagaaagagagcttcatatatcatggaggatgagccaaggaatagcggatgaaanaataatnggtactaatttgatcatgga

SEQ ID NO: 9275 - DNA, 255 bp, Glycine max
  unsure at all n locations
agcttgtgctattccaagttgattaatcatacctttaagccagattgcttccttcactccttcagctatggccatgtattctgcttcagttgttgtaagagcaacaactgattgttgatttgctttccaactgattgttgtaccaaacanagtaaacacatatcctattaaggacttccttgtgtctacatttcctgcaaaatctgcatctacatagcctgtgactgctggctcgtgtgctgtcttcttgtacct

SEQ ID NO: 9276 - DNA, 373 bp, Glycine max
  unsure at all n locations
tctaactgaggcagccaacanaataaatgcaagataaagttctttcctgaagagacgaattttcttcgtcttcccagttttttttgacaattctagtttgcttagttcctcaatgcctgaatctgaggatgatctatgaagactattagatcgcattagaggctcagcttctttctcaaaggcaaccaaatcagtctcagacgatcttcccaacttttttgtaaccacccactcgtaagaacttccaaagcgaagtaatccagatatcatggcattaaatttagttaccgacatagtgttctcaaatagaaggtaaggaactataaacggaaatgaccgtggagctggtagaacacttatgagggacatgatt

SEQ ID NO: 9277 - DNA, 398 bp, Glycine max
  unsure at all n locations
agcttgtccataaaaataggtttttgaagttcatcatttcaatttctcattaagtaaaatggatcattttcaaggtccaacgccttaaaatgatcacctcttaagtaaaaaaaagagtcgcttgataagcaagaactacgtaggtctgatttcctcatcgcaattgaggatacgtangagcaaaagccccgcttttgtcgaccaccccaagagatcgttaatggtccaatgccttaacgtttctctcctttcaaaaacaagagatcgttaatggcccaacgccttaacgtttctcccctttcaaaatcaaaagaccgtgtaatgngtcaacaccttaaatgaccctttgttcaataaaaacatattttgcgaaaaagataaaacacctaaccaacact

SEQ ID NO: 9278 - DNA, 374 bp, Glycine max
agcttgtgtcacactctcaactgccgaagctaaatatattgccgcatgaagatgttgtgctcaaagtctctagatgaagcaacaactacaagactttagagtaaaccttgatcacattcctctaaaatgggacaacacacgtgttatcaatctaaccaaaaaccctgtcatgcattttatgactaagcacatagaaattaggcatattaaatgcatcaagcatagaataacattctgtttgtacaagtatgtgattcacattgctattcatatcattttttttgtttagtttgtgtcttacttattgatttatgtgcatactcattagtttgtttgaatatcacatgtttttcttagtaatttcgtgatttctc

SEQ ID NO: 9279 - DNA, 383 bp, Glycine max
agcttgaaggaaaacttgatgccttggtcattctattaacccagcttgccatgaataaaaaatctacacctgttgcaagagtttgtggtctatattattctacagatcaccattcagatctttgtccttttttgcagcaatttggagtcaatgagcaacttgaagcttatgctgcaaacatttataatagacctcaatagtagtgaaaccaacaacagcaaaataattatgaccttttaagcaatagatacaatccaggctggaggaatcatccaaatctaagatggacaagtcctccacaacaacaatagcctatctctccttttcagaatgctgctggtctaagcaagccatatgttcctcctccaatacaacaacagtag

SEQ ID NO: 9280 - DNA, 325 bp, Glycine max
tcatgcttaacatgtatggcaaaactttattattgttgttcaagacatacaagtgagcttgttacaaatcttctacacttggagtgatcacctgcagtcctcttgaacccttaccacccactctgtcatcatgccgacactcaagaagcccaataggtttagccttctctaagtattctgaaaaaaattcaatggcttcttctgcaatgtacctctcaacaatagatgcttctggacgatatagattctttgtatacccttttaagatcttcatgtatcgctcaaccgggtacattcaccgttgataaacacgaacacaacattt

SEQ ID NO: 9281 - DNA, 382 bp, Glycine max
agcttatgttcataactatggtatggttttctaatcttgaaacttacaaaacagttatgaataagtatgcagccatgcaggtacataatgaaacagtatcgatagcaatcactgcaaagggaagttgattgtaattaccctttagaagttttatcatgagtccaccagtggccagtgttgaagacgagaatatctgcatctttatattgagatgaagatttaccaaccaaatcgagacgaagtgtttccttctttgtcccattcttatcagtcatttccccttcttgaaccaagaatggagacacaaaaagctccacggagaagtgataatcctattgagataccaaaccagctctgtgaggtaaagaataataaatcaaag

SEQ ID NO: 9282 - DNA, 362 bp, Glycine max
cttgagcaattcaatggtcataactatacactcagtttttcgattcaggcgcataatatctcgagacgctcgaaattggacaatggaagctcttgagcaattcaaatggtcataactttcaactgggaggtgcgaatcatgcgcattatatattgacatgctcgaaattgaacaacggaagctcttgagaaattcaaatggtcataactttacactcggatgtccgattcaggcgcataatatttcgagacgctcgaatatgaacaatggaagctcttgagcaagtcaaatggtcataacttttaacttggatgtgcgattcatgcgcttaatatatcgagacgctcgaaattgtacaatgg

SEQ ID NO: 9283 - DNA, 371 bp, Glycine max
agcttcatgagagagtcaaagatcaaatttataggaaaagtaaaagctatgctaaacaagccaacaaagggagaaagaaagttgtcttctaacccggagattgggtttgggtgcacatgagaaaagaaaggtttccggaacagaggaaatcaaagcttcaaccaaggggagatggaccatttcaagtgcttgacagaatcaatgacaatgcttacaaagttgagctgcccggtgagtataatgttagttccaccttcaatgtctctgatttacctctttttgatgcagatggagaatccgatttgaggacaaatccttctcaagagggagagaatgatgaggacatgaccaatagcaagggcaaggatcca

SEQ ID NO: 9284 - DNA, 355 bp, Glycine max
agcttctcggtatattatgcacctgaatattacctccgggtgacaagttatgaccatttgaatttctcgagagcttccgttgttcaatttcgagcgtctcgatatcttatgcgcttgaatcggacctccgagtgaaaagttaagaccatttgaattgctcaatagcttccactattcaatttctagcgtctcgatatattatacgcctgaatcggacctccgagtgaaaagttgtgaccatttgaatttctcgagagcttccgttgttcaacttagagcgtctcgatattttatgcgcgttaatcagacctccgagttaaaagttatgaccatttgaatatctcgagagctttcg

SEQ ID NO: 9285 - DNA, 394 bp, Glycine max
  unsure at all n locations
tcttcttcaataaaccgtttaaaaaggcactcttatcatccttttgaaaaagcttaatgtttttgtgagcaacaaaggctaaaatgattcttataacttcaagtctagcaacatgaacaaaggtttcagagaaatctataactttntgttgattatatcctcaagctactaacctagctttgttgcatactacttttccttgttcatccaacttgtttctgaagattcatcttgttccaatggtgctcttngtttctggcattggaacaaatgtccagacatcatttttgttaaactgattcagtttttcttccattgtgattatttagtcatnttctatcaaagctttgtctatagttttaggtttgatttcaaacacatggtctttgaatga

SEQ ID NO: 9286 - DNA, 379 bp, Glycine max
  unsure at all n locations
gctttatagctnggttagttnctatggaggtgtgtaatgatttatctcctaggttgcacctcttaatgaaattgttaagaaaaatgtgggctttaaatgggggcgggcggggagagggacaataacatgcatttgctccactcaaagaaaaattgactcgtgcacctattcttgcattgcctaattatgcaaaatcttttgaaatcgaatgtgatgcatctaatgtggggatataggttggtttgattcaagatggacattccattgcttattttaaggaaatgataaatgggggttgtcttagttattcacatatgataatgagttgatgccttggttatagccttacaacttggcaacatttcttttcccaagagtt

SEQ ID NO: 9287 - DNA, 339 bp, Glycine max
  unsure at all n locations
tctatagaaggtcgttcctaatttctctacaattgcatcacctctcaatgagctggtgaagaagaatgtggcatttacctgnggtgaaaaacaagagcaagcctttgctttgctcaaagaaaagcttactaaggcacctgttctagctcttcctgacttttctaaaacttttgagctagaatgtgatacctctggagtgggagttggagctgtattgttacaaggtgggcaccctattgcttattttagtgaaaaacttcatagtgccaccctcaactaccccacctatgataaagagctttatgccttaataagagccctccaaacttgggaacatta

SEQ ID NO: 9288 - DNA, 313 bp, Glycine max
tacttggatgacctccaatttgtggactcttccatttattgtccatatggttttcttgaggatgatcttgtcaaggtgaataaatttatttttctggccaactttgtagtgatggacatggaaaaggactccaaagtgccacttaatttggaagacccttctagaacaccactaagattttggttaatgtgcatgatggtcaaacaaagcttagtgtcatttgatgaagagatcacattcaatgtgtttgagactatgaatcacctattagatgagaaatcttatcttctgatggatgttcttgatgatgctt

SEQ ID NO: 9289 - DNA, 369 bp, Glycine max
agctttgagcaaattctaaggacaataactttttactcggatgctcgattgagtcccgtaatatatcgagaggctcaaagttgaaagccgaagctcctagccaattcaaatgacaataactttcaactcggatgtccaattgagtcccgtaatatatcgagacacgcgaaattgtaaatagaagctctagtcaaattttaacgacaataactttttactcgaatgcccgatagagtcccgtaatatatcgagaggctcaaaattgaaaacagagtctcctagcaaattcaaaccacaataagttttgactcgtatgtccgattgagtgccgtaatatatcgagacgctcaaaatataaaattaaagctt

SEQ ID NO: 9290 - DNA, 378 bp, Glycine max
  unsure at all n locations
agcttccttaagaagattcttaaagtttttagagcttagctaaacacacctctctaatagctaagctcacctccttgagatgagaagctagagcttatctacacaccccctataatagctaactcatccccatgacaaaatacatgaaaataaaaaaaattctctactacaaagactactcaaaatgtctcgaaatacaaggctaaaaccttatactactagaatgaccaaaatacaaggcccaaacgaagcaaaaacctattctaatatttacaaagataagcgggctcatacttagcccatgggctcgaaatctatcataaggctcatgagaaccctanggccttcccttggatctctggtccaatctacttggat

SEQ ID NO: 9291 - DNA, 342 bp, Glycine max
agcttttaaaccttgagttttatgaatattattttattggaagtattcctcctgagctaggaaatttatttctgttggagactctgagggtctatcacaataatttgaattccaccattccatcttccattttccactagaaatcgctaacacatttaggactctcagagaatatattggaaggaacaatattctctgagattggatctctgaattccttacaggctctaaccctgcattcaaatgctttaactgggaagatcccttcatcaataacaaacttgacaaacttgacctatctgttaatgagccagaatattcttttaggtgaacttgctccaa

SEQ ID NO: 9292 - DNA, 396 bp, Glycine max
  unsure at all n locations
tctcacaattctncccaatcttctgggaataaccctacttaactgattaaaagacagattcacccctctaagcctccctacaaaaccgggaacagaaccattcaattcattaccagccaaatcaaaacctccaatctctcaagagacccaattgaactaggtatctctccaacaatcctattaaaccccagattcaaaaccctcaaattcttcaagccatcgactctcaagggaagatagccactaatcaaattcccttcttaatcgagaacctcgaggttctccatgccccaaatcgctttcgggatttcactctccaacgcgttgaaggggagagacaaaaccctaagctccgtgagctcggcgatcaaactcagagaagaaacattttcgaag

SEQ ID NO: 9293 - DNA, 407 bp, Glycine max
ggatccttgagtcacctgcggcatgcaagcttgaaaaacataagtagtttcagccttagttttaataggaaatatccaagtatatctggaaaaggcatcaataaaggatacataatacttgaaaacagaatagtaagttaaatgagatggtccccacagatctgtaaaaaaaagttctaggggagagtaaacagaagtagaagaatgagatggtagcctgtgagacattcccaagcaacaagaagcacaaaagtctgaaaaaaatttattatatgaagaaatattacactggttgaagactagcttcattacatgactattgggatggcctaacctagcatgccaaagactaacagtgctaggaggagaaataacagaactggaagctacactagaatttttattaa

SEQ ID NO: 9294 - DNA, 369 bp, Glycine max
agcttgtaatcgattacacacatactgtaatcgattaccagaggagattttcagaaaatattctcaacagtcacatcttttcatttggttcttgaatggtcatcaaaggcctatatatatgtgacttgagacacgaatttgctaagagtttttctgaacaacaagtgtttattctctcaaaaagcaaaatcgttttatcctcttaagaattccttggccaattcaattgcaattcattaaggaatcatttgagtgctcagattgtaaaatctatctcttcaagagagattcattcttcttctctttctaattcactaagggattaagagaccgagggtctcttgttgtaaaagaattctaaacacaaag

SEQ ID NO: 9295 - DNA, 362 bp, Glycine max
ctttcagcaaattcaaacgacaatacttttttcctcatatgtctgattgagacccgtaatatatcgagacgatcgaaattgaattctgaagctctgagctaattcaaacgacaataatgatttgctcggatgtctgattgagtcccgtaatacatcgagacgctcgaaattgaatgttgaagctctcagcaaattcaaacgacaataactttttactcggatgtctgattgagtcccgtaaaacatcgagacgctcgaaattgaatgttgaagctctcagcaaattcaaacgacaataacatttttcctcagatgtctgattgagacccgtaatatatcgagacgatcgaaattgaattttg

SEQ ID NO: 9296 - DNA, 396 bp, Glycine max
tcaacattcaactctagcgtctcgttatattatatgactcaattagacatccgattaataatatattgtcgttggaatttgctcagagcttcaacattcaatttcgagcgtgttgatatattacgggactcaatcagacatccgagtaaaaagttattgtcgcttgaatttgctcaaagcttcaacattcaacttcgagcgtctcgttatattataggactcaattagacatccgagtaaatagttattgtcggttgaatttgctcagagcttcaacattcaatttcgagcgtctccatatattacaggactcaatcagacatccgagtaaaacgttattggtggttgaatttgctcagagcttcaaaaatcacttttcgagcgtcttgatatatt

SEQ ID NO: 9297 - DNA, 364 bp, Glycine max
  unsure at all n locations
agcttcttatctttaaacaaagcaggggtcttcctattcaacatttaaatacagtaaggaaccaatcatacctttgtactccctttntggagaatcattacctttctcatcctcatcatctttctggattattagaagccctaggaagaactttagctcacccatcgtactcatttcaaattcatctttcattaggttaaaaatcttcttacacatcctttctaaggttgcaccaattattatgtcatttgcatagatctgaacaattagaaggtttcctttctatgcctttctaaatagtgtagtgttcactattcctttatgtcatctacatagatttgaacaatcaaaaggttttctttct

SEQ ID NO: 9298 - DNA, 349 bp, Glycine max
agctttgagctaattcaaacgacaataatgttttgttctgatgtctgattgagacccgtaatacatcgagacgctcgaaattgaatgttgaagctctcagcaaattcaaacgacaataactttttactcggatgtctgattgagtcccataatacatcgagacgctcgaaattgaatgttgaagctctcagcaaattcaaacgacaataacttttttactcatatgtctgattgagtcccgtaatatatcgagacgatcgaaattgaattctgaagctctaagctaattcaaacgacaataactttttgctcggatgtctgatggagtcccgtaatctattgagacgct

SEQ ID NO: 9299 - DNA, 380 bp, Glycine max
  unsure at all n locations
agcttcaaccaaggggagatggaccatttcaagtgtttgaaagaatcaatgacaatgcttacaaagttgagctgcccaatgagtataatgttagttccaccttcaatgtctctaatttatctctttttgatgcagatggagaatccgatttgaggacaaatccttctcaagaaggagagaatgatgaggacatgaccaanagcaagggcaaggatccacttgaaggacttggagggcctgtgacaagggctagagcaaggaaagccaaggaagctcttcgacaagtgttgtccatactatntgaatacaagcccaagtttcaaggagaaaagtccaaggttgtgagttgtatcatggcccaaaaggtggaggactaactg

SEQ ID NO: 9300 - DNA, 344 bp, Glycine max
  unsure at all n locations
ntngagaaattcaaatggtcaaactcttctcacggatgtccgattcatgcttataatatatcgatacgctcgaaattaaacatcggaaactctcgcgaaattcaaatggtcataacttttcacacggatatcggattcgggtacataatatgtctagaagctcgaaattgaacaacggaagtgcttgaaaattcaaatggtcataacttttcaccggatgtgctattcgggcgcatattatgtcgagaggctcacaatttaacaacgggagctcttgagaaatataaatgggcataactcttcacacggatgtgcgattcccgcgaataacatattgagacact

SEQ ID NO: 9301 - DNA, 350 bp, Glycine max
gacacctgaaactaagctttcatatgatggtggtagagagctaacagaatcatgtcaacatcttcatcctctatcttaacatctatatctcttaattccatcaaaatagaattcaattcatcaagatgatctttaagagatgtaccttctttcatgtgtaaaccaaatagactccttttcaagaagagtttgttgcagattgacttagtcatatacaacttttccaacttgagccataattcacttgcagtttcttcatttgcaacttcatataaaacttcatcagacaaggaaagcaggattagtgagtgagccttttcttcttgttctgcaagttcttcaatctttta

SEQ ID NO: 9302 - DNA, 342 bp, Glycine max
agcttatgaccattttaatttctcgggtttttccattgttcaataaccaatgtctcgatatattatgcacctgaatcggaaatccaagtgaaaagttatgaccatttgaatttctcgagggattttgttgttcaattttcagtgtctccatatatggtgtgcctgaatcggacctccgtgtgataacttatgaccatttgaatttcttgagagatttcgttgttcaatttcaagcgtctcgataaatgatgcgcctgaatcggacatccaagtgaaaagttatgaccatttgaatttctcgtcagcttccgttgttcaatttcgagcatctcgacatgtgat

SEQ ID NO: 9303 - DNA, 369 bp, Glycine max
  unsure at all n locations
agcttgaactngacttgttntataacttatttatttntctaactatgaatttagtgtttaataaaggaatttaatactagataataatcttcaaatagaaaaatatgtgttaagcatgtggtataatattatggaatccatataattttaatttttctataatacatatagtttgggctattagagttattcatgaactatatggatgtcgagcttgtaaaatttgatcttaatctacttaaataatcaagctcaatcttaaatttgagtttgtttatctacttaaacaaataaacttggtcaaacatttagtgaatcaaactcaaatgttcacaaataatttgatccatttacatctctaattgtccc

SEQ ID NO: 9304 - DNA, 366 bp, Glycine max
  unsure at all n locations
agcttggcctgctcggngtcctcgtccttaccactgccttcaccgtcctttggcttggtcttgggccttgaggccacagtcgcgtccctgttggaggccggactatggccaccatcatccagcacgacccaaatctcctcgcatagttttcgacattgtcttcctacacatcctgcttcatgtattctatcatttgctccttgaaattgctatacatctttttcttcctccaccgatggcatgtacgagaatcaaaattttgaactagggaaagggagaaaccttcgaggtgcatcacgatcgtgtgtgttggggaaagagggaggagaaggtgtggtcaatttcaaaatcctagttgttattgga

SEQ ID NO: 9305 - DNA, 378 bp, Glycine max
agcttcaaggatgaggaccattcttggttctcaaacatggaaaactttaaggccacaagacaaccactggaaggtatgaaattccactacagaaaaaggttcttccgagaaaccaccaagtatgtttgggatgaccctactctttttcgtattggtattgaaaatttgttaaggcaatgtgtaacaaaaggagaacaagcaagcatactttggcattgccacaactcattatatggagaccacttcaacgcacaaagaacaactgcaaagatccttcaagccaaattctattggcctacactctgccaggtgctcataaccatgcactatcatgcgatagttgtgaattagccaacaacatatctagacatgaaatgc

SEQ ID NO: 9306 - DNA, 396 bp, Glycine max
  unsure at all n locations
aaactcaagcttataccaaagtccaaaacattaatatatttcccctttttcaatttatgaaactacttattaaattattataattattttttggttttttatcgtaagaattaaagataatattaagatatttataacacttatgcaccatgttgaaccaactaaattatacctcatttctaattatttttgtttgatatcaattttttaatcttaaactatattttaattcttaaattgattattaaatatatcatatttataaaacaaatctccatacattgagtcaaattcttaaataataaaattttatctttcaatatattagtttctcaacctcaactaagataacatggtcacctantttttcttatataatataaaaaataattaata

SEQ ID NO: 9307 - DNA, 344 bp, Glycine max
  unsure at all n locations
taagcatttngtccatgagtattgcatatacaggtttcgcttcatataacattaaacacaaatattttaattactgtcattctgtcaatctatcaagtgtgacttgtgcagccaaaggaaattactacatagaatccccaccccgttaccccccaaaatgtgaacatgataatggttacctggcagaaagtggtgaaaaaaaccctggagtcctttcatttgaagcaataaacaaagttctttcaggtgggacccactttgctatcctacaaagcataaactctggccgagtgtctctatcaaagtgagggtgcaagctcctcactacaccaaatctatctttc

SEQ ID NO: 9308 - DNA, 271 bp, Glycine max
agcttctgtccctgagaatctggttcctataagacaacagggagtgaagattgctgaaaaccctaaccttgcaacaagttctagggaagtatacacggagatggacaagacaattcgcggtattgtgagtagcattttgaaagaagcttctgtgcctgatgctgagaaagatgttccaacatcttccaccccgaatgtttctgtgcctgatgttgagaaagatgttccaacatcttccggcccaaatgctgaagcactccctttacccatg

SEQ ID NO: 9309 - DNA, 294 bp, Glycine max
agcttgaatttccttttagtatggaatctatcctttctaagctggagccaaaccctgtcaccctcattaagaactagctcttttctttctctattgcctttagttgaatacacctttgtttggttctttatttagttcttaaccctctcatgcaacttctttacaaactctgacctagattccccttctttatgtataaaagaagtgcctagtgggattaaacccatagacaaccttaaaaggggactgcttggtggttctatgaacccccttgttgtaggaaaattctacatg

SEQ ID NO: 9310 - DNA, 373 bp, Glycine max
  unsure at all n locations
agctnttagaaaatgtcgatgctgagttatactatttttcttccatgtttcaattgtacatagcttatgtcttcttcacacatagtgcatgcaagatgaaccttaacactgtatccactcaaatttccgtatgctggaaagtcattgatgatacaaaacaactttgcacgcaacttgaatgtctcatttcgatacctgatgtagctccatgtggagcttgtangccttggatcttcttcatcaatggagtattttgcttcttgaagatcaatggcatctgaatggagaaggaggaaaggtgattcgagatgccacttcaaaaagaagatgagtcaagaacaagctcaccaccataggaagccatggataagag

SEQ ID NO: 9311 - DNA, 375 bp, Glycine max
agctttgcatatcctttgataaaccttctatagtaaccagtgaggcctaagaaacctcttagctgcttgatattgagtggtgtaggccactctagaactgcctgcaccttagtagcatccatagcaactccttcacctggaactatatgtcccaagtactctatctccaatacaccaaaagagcatttagacaacttagcaaacaaaacattttctttcaatactttgaatacaacctctagatgggataagtgttcatgccatgtggaactatataccaatatatcatcaaaaaacactaacacatatttccttaaagcatgttggaaaatatggttcatcaaacactgaaaagaagtcggagcattggttaaa

SEQ ID NO: 9312 - DNA, 273 bp, Glycine max
agcttgacacagaccatacgaagattttgtgagtttatcaaaccatgttgtcattcttgacaagataaccaagaggcatgtccatgtatactccctcaatcaaatcactattgagaaacacattatttaaatcaagctgaaacatgttccaatttctgtgaggtgcaatggaaagaaacactctcattgccgtatgcttggcaacaagtgagaaagcgtccaaaaaatcgatctctgcttgttgtttgttgcgtgtacccttttgcaacaaga

SEQ ID NO: 9313 - DNA, 383 bp, Glycine max
agcttagaggaaaaccattcgcattgttgtattttattttcccgtagaaacccaaaactatctcggtaaaactatgatcccagtttcgttaaccgttggattttcacgaagtttggatatgtttttcgaaattcaattgcgcacacttccaccgttgggatttgtgagataatattagtggagggagaaaaaggaatcgcatgaagacagtacaagtggaggtttcaatctcttctccgtctctctgacgtttgggaattctatcggagcagtcggaggaataactgaaggaatctcaaggaaccactagagatgttactatcactagctgaagacacgtgagtccgctcagagataagggatgagtttatcgcaattggggg

SEQ ID NO: 9314 - DNA, 342 bp, Glycine max
agcttgtgctattccaaattgaataatcatacctttaagccacattgcttccttcactccttcagctatggacatgtattctgcttcagtagttgaaagagcaacaactgattgttgaattgctttacaactgattgctgtaccaaacaaacgacacacatatcctattaaggacttccttgtgtctacatttcctgcaaaatctgcatctacatagcctgtgactgctgcctcgtgtgctgtctttttgtaccttatactagctttcaaagatccatttagataccttagtgtccacttcacagcttcccaatgtgcgctgccaggatatgccatgaatct

SEQ ID NO: 9315 - DNA, 325 bp, Glycine max
agcttgtagcatattgaaaccgcaatatatcgagaagctcgaaattgaaagaagaaactttgagcaaattcaaatgacaataaattttaactcggatgtctgattgagtcccttaatatttcgagacgctcgaaattgaaaaaaaaagctcaaagcaaattcaaacgataataactttttacttcgatgtccgattgagacccataatatatcgagacactcgaaattgaaaccaaaagctctaagcaaattcaactgacaataacttttcattcagatgtctgattgagtcccgtaatatatcgagacacacgaaattgaaaac

SEQ ID NO: 9316 - DNA, 381 bp, Glycine max
  unsure at all n locations
ntgatgcaacaatggagaggttaatgaaacaactttatgatgcgctccatgagaggttggatcaaatggagaatagagatcataataaagaagaaaggaggagaagagggaatgatggtgttcctagacaaaaccgaattgatggtattaaactcaacattcccccctttaaaggaaagaatgatccggaggcctacttggagtgggagatgaaaatagagcatgttttctcatgcaacaaatatgagagggaccaaaagatgaagcttgccgccatggagttttccgactatgctcttgtgtggtggaacaagcttcaaaaggagagagctagaaatgaagagcctttggttgatacatggacagagatgaaaaagatca

SEQ ID NO: 9317 - DNA, 376 bp, Glycine max
agcttcaagaaaaagatggcctcagcatactccttatttccagaagggaattctatcaataggcctccaatctttaatggagagggttaccattactggaaaacccgaatgcaaatttttattgaggcaataaacctaaatatttgggaagccatagaaatagggccttatatacccaccacagtagaaagaattacaatagatggcagttcatcaagtgaaagtataactatagaaaaacctagagatagatggtctgaagaggatagaaaacgagtaatatacaatttaaaagccaaaaacataataacatctgccctgcgaatggatgaatatttcagggtttcaaattgtaagagtgctaacgaaatgtggg

SEQ ID NO: 9318 - DNA, 422 bp, Glycine max
tcgaatttctcaagagtttccgttgttcaatttttattgtgtagatgagttatgtccccgaatcggacatctgtgtgaaaacttatgaccattcgattttctcgagagcttccgttgttcaatttcgagcgtctcgatgtattatgtccccgaatcggacatctgtgtgaaaacttatgaccattcgaatttctcgagagcttccgttgttcaatttcgagcgtctcgatgtattatgtccccgaatcggacattcgagtgaaaagttatgaccattcgaatttttcgagagcttccggtgttcaatttcgagcgtctcgatatattatgtccccgaatcggacatacgtgtgaaaacgtttgaccattccaatttttcgagagctttcgttgttcaatttcgagcgtgtcgatatgttatg

SEQ ID NO: 9319 - DNA, 571 bp, Glycine max
  unsure at all n locations
agcttcatgggagagtcaaagatcaaattgttaggaaaaataaaagctatgctaaacaagccaacaaaggaagaaagaaggttgtcttcgaacccggagattgggtttgggtgcacatgagaaaagaaaggtttccggaacagaggaaatcaaagcttcaacaatggggagatggaccatttcaagtgcttgaaagaatcaatgacaatgcttacaaagttgagctgcccggtgagtataatgttagttccaccttcaatgtctttgatttacctctttttgatgcagatgtagaatccgatttgaggacaaatccttctcaagagggagagaatgatgaggacatgaccaagagcaagggcaaggatccacttgaaggacttggaggacctatgacaagggctagagcaaggaaagccaaggaagctcttcaacaagtgctgtccatactatttgaatacaagcccaagtttcaaggagaaaagtccaaggttgtgagttgtatcatggcccanatggaggaggactaaatgacaccactttgtctcaatttttagagtgtttagtttgc

SEQ ID NO: 9320 - DNA, 556 bp, Glycine max
tgttcatcgattcaaaggcatccccaacaacaacacggactattttcacattcttccaatccaaaatacttccttgccaccctcaaaacctccctatcactatccacacccatgacctcaaaacccaattgatttctcaaaaaggtcatcaaagccccacctccaaccccaaggcacaaagccttcggcctaaaccccatccgaatccgcccctccacatattcactattcaacacaagaccagccaccataggccccaagtaagggtgcaccaaaaccttaagatcaggcacaaaccccacatcaccaccaatgcacacaccatcacaatctctctcaagaataatacaaatttcagtttgaatcaaattaggcattctcttaaacctcaacctcctcctaaactccctcccatgatcactctcattttcaattcaacatcctcaaacaacatttcaccaacatgacacccaacacattcatgaaccaccacactagaaaccaaactatcctcataactcacaaggggtatctcacgaatgccccttttgaaaaa

SEQ ID NO: 9321 - DNA, 562 bp, Glycine max
  unsure at all n locations
agcttcgccatcgaagacgttgttgatgtcagcaacgacgttgaaatgtatgctttttaggtcaggctgtaacggcaacgacgtagtaatatataatttcaacgacggtgcttacgtaagcaccatctttgaagttatatattactacgtcgttgcatccgcaaccaccgccgttgaattcatgttcaactacgtcgttatcgtaagcattgacgtagacaattttttttttactattaaaaatgttgattattatattacaaattaaaaataaacataattaatataagctcaaaatttataaattattattgtcaactaattaatatgataagtaaatataatttttgtgctataaattatggttttacttaatttaatattatataaataagcaacataatgataaatcattatcaaccagtatttcaaatgtaaccttatgagataaataaataacantaattaaacataatatantaccaataataaataaggtaaatctactaacactactacaaaagtgggattcacatcggtgtgttaacatgggtgtaaaaaa

SEQ ID NO: 9322 - DNA, 524 bp, Glycine max
gcatgcaagctttttacaatcgatatgggtgttattctttgagaaatatttgatgcctagtgtagactatcttctttccatgcttaagttgcacaaagcttgtttgattttcacaaattgagcatgcacaatgccctttaacactttatccactcaaattcccaaatgctgaaaagtcattaatggtacaaaataccattgcatgcaacttgaaggtctgttaacggtacccatcaaacacgtcaaccctgtcctcccacaactttcttaagtcttcaatcaaaggacttagataaacatcgatatcatttcctagttgttttggacccaaaatcatcatagacaacttaatgtattttcgcttcatgcacaaccaaggtggcaggttgtaaatcattagcaaaataggccatgaattgtagttagtgcttaagttactaaaggattcattccattggaagaaagtccaagcctaaggtttcttgcctactttccaaattgggaaacacaccattaattgtctt

SEQ ID NO: 9323 - DNA, 485 bp, Glycine max
  unsure at all n locations
atgcaagcttnacttagattacttttgttgttgtggtacacacataacaaatatagagagaggctagtagataagaccactctagaataatcaatattagagagcaattgcctaagattattcactatatgcttgctcctcacttttgcacgtccttaaacataatatattgatatatcaaaaatactattataataaataacaagaatatcttaatataggtaaaaaaaatactgtcatgaaatcacatatataaatatttgaaaaaatacaaggtgttttcattttgtgaaatcatcatttatataaacatatacattacatataaaacttgtattatattcttactgtatacaacaagtttgaaataacgtgatgaaaatacatatgatcataaaatgtatactatataaaatagaataaagcttgtatagcacacatatttcactatatgcgaaataaaagcgaagcttaatatgtacttc

SEQ ID NO: 9324 - DNA, 455 bp, Glycine max
agcttctccaaaaaaaatagtatcttctgcatattggagaatattaataggcactttattcttccccaccagaaagctttggaagcaattttttctgattgcttccctcatcaaacctgtcaaaccttcagcaaccaggtcaaaaaggagtggggacaaagggtccccttgtctcaagcctctttgaggcttaagctctgaggttgggcttccattaacaaggactgacacataagctgaagtaatgcaccccttgatccagctaatccatctctcattaaagcccattcttctcaacatatagaagaggaactgccatgacacagagtcataggccttttcaaagtcaactttaaagaccatacaagacctgttggtcctccttgcctcctccactacctcattaacaaccaaagccccatacaacagctttctatcctttacaaaggctgact

SEQ ID NO: 9325 - DNA, 506 bp, Glycine max
cgttcagttgtagatccaaaacttgaagtgatgatgagttttattgtattgtggaatggttcctgtcaacttgttgtgagacaagttcagaatctgaattgcacttgcattgcaaattgaggaagagaagtcaccggtgattgagttaaaactaagatcaaggtaaaggagttgttggttccacgagaattggtccaatgattgtgtcaatcggttatgagataggtccaatccatgtaaccacgggctcgtttctttcaaccaatttggcactctacctttaagtgtgttattggacaaatggagtgattccaaaaatgggacttttcccgataattttggaaattcagttaaacccatagaagataagtccaaactcaataaatgggataaactataattgacattggattctaaattcagtgataactgatcattccgtggaaggtgaaggtctcccaaatattgaagcttggagaaacgatgaaatttgacagatccactta

SEQ ID NO: 9326 - DNA, 469 bp, Glycine max
  unsure at all n locations
agcttctaaaattggtgtgtccaaacctttanagtaattctaacactcttcattagattcaacagttttcaaacatcgaattccagtacccttcatgttgatttgaaaaatactttttttgccaaatgagcctttagaatcaacctatgagaagaatcaaatatttccattgagtcatgtttcataatcaatgaaaagcctttcttaattagttttccaatactcaataaattgcatttctttcttggtacatatagtacattttctataagtgttgattttccattcttccctttaagcacaatattgcctataccttttgcactcaatgttctatcatctggaaattgaactttgcttgttcttgtggtatcaagatcactcaaccattctttgtggtttgtcatatggtttgagcattcaatttcaaggaaccaatacttagactgtgcaagattctcacaggtgg

SEQ ID NO: 9327 - DNA, 252 bp, Glycine max
ttgaggaaattcaaacgacaataacttttgactcggtggtttgtttgtgtcctgaaatatatcgagacgctcgtaattggaaacagaagctctgagcaaattcgaacgacaataaatttttactcggatgtccgaatggatcccgtggtataacgtgacgctgttaattgaaaatagaagctctgagcttattcaaacggctataacttttaactcgggtgtccgaacgagtctcgtagtatattgagacgc

SEQ ID NO: 9328 - DNA, 406 bp, Glycine max
agcttctgttttcaatttcgagcgtttcgttattttacggggctctatccgacatccgagttaaaagttattgtcgtttgattattctaagagcttcccttttcaattacgagaatctcgatatattacgggacacaatcggacacccgagtgaaaagttattgtcgcttgaattttctcagagcttctattttcaattacgagcgtctcgatatattacgggactcaatcggacattcgagtaaaaagttattgtcgtttgaattttctcagagcttctgttttcaattacgagcgtcctgatatattacgggactcaatcggacatccgaggcaaaagttattgtcggttgaatatgctctgagcttctgttttcaattacgagcgtctcgatatattacggga

SEQ ID NO: 9329 - DNA, 414 bp, Glycine max
  unsure at all n locations
agcttataatatatcgatacgctctaaatatttatcgacaacncncgggaaaggcagagagtcataacaatncacacggacgcccgacncgggcgcanaananggcgagaggagcgaaagcgaacaacggaagcccnggagaaacccaacggggagaacccaacacacggagggccgaaccaggcgggagacagaacgagacacacaaaagggaacagcggaagcccccgagaaacacaaaggggcataacacncaacccgaaagaccaagnnaggcgcatcacatatagtgacactcgaaattgaacaacggaagctctcgtgaaattcaaatggtcataacttttcacactgaggtccgattcaagtgtataatgcatcgatacactcggaagtaaacatcggaagcactcg

SEQ ID NO: 9330 - DNA, 499 bp, Glycine max
gcttcggttgctcattgacttcaaattgctgcagagaaggacatacatctgtatggtgatctgcagaagaacatagaccacagagtcttgcaacaggtgcagatttctgattcatggcaagctgagttactaggttgaccaaggcatcaagttttccctcaagatttttattttcagtagatgaagatgaatccattgccacctcatggactcctctaaggacaatagggatgcaatcctaccccgcaaaggcattggatagaagactccaagtagattgggccagagatccaagggaaggccctagggttctcatgagccttaggatagatttttgagcccatgggtcaaggtatgatccactcttctttgtaaaaattagaataggtttttccttcttttgggccttgtattttgacaattctagtagtatagggttttagccttgtatttcagggcattttgagtagtctttgtagtaaagacttcttttgtattt

SEQ ID NO: 9331 - DNA, 431 bp, Glycine max
agcttgtaatcgattacacagtaaggaatttttcaaaataactcccaagagtcacaactgttcaggaagtttttgaatggccatcaaaggcctttaaagacttgggatacgaaattccttagaggttttctgaataacattttcttatcctctcaaaaccaaattgtcttatcattctcaaaatattccttggtcaaaacacttgcaaattcaataaggaatcttgatcgatcttcaattgtaatatccttctcttaaagagagaaaattcttcttcttcttattcaaacagatctgtataagagaccgagagtctcttcagttgtaaggatatttgaacacaaggaaagggtgtccctgtgtggttcaaagtttgtaaaaagctttctacaagatagtggaaatctcaagcgggttgcttatggactgga

SEQ ID NO: 9332 - DNA, 500 bp, Glycine max
  unsure at all n locations
agcttgatgattgcctatgggcatttggtttcttccttcaaaacacccattggcatctccttgtttcaaatggtgtatggaaaagcttgtcacctaccagtggagttagaaataaaagctcattagaccatgaagttcctcaactttgactttacaacatccaaagagaagaggaaggtacaactacaggaacttgaagagattctcctcaatgcatatgaatcatccaagctctacaaagaaagaaccaagagataccatgacaaaaagatcctccatagagtattcaggcccgaacaacaagtattgctctacaactcaggattaaagttatttcatggaaaattaaaatatagatggagtggtccctatactgtcaaagacgttaagccttatggagctatagagatagaggatgtgacaccttctacccctcacatatatatntataaaggaataaaaatttcaatattaattaaaaggttttttaaaacattttt

SEQ ID NO: 9333 - DNA, 298 bp, Glycine max
  unsure at all n locations
tccattttcagttgcgaccatctcgagatattanttgatttatccggacatccatgtataaagttattgtcaatgtgaatatactcagggcttcagatcttaattttgagcgtctcgatatattacaggactcattcagacatccgagtgaaaagttattgactgttgaatttgatgctagctccctgctgcaattgggagcatctatcgcataattatgacactttgtcgggcaatccgagacaaagctatagtcggtagaatgatataagagcattcgtctacaatatggagcgtc

SEQ ID NO: 9334 - DNA, 448 bp, Glycine max
ttttactctcaatatattatatatcacttattactattctcttttataggtgttaaaatggaattgaattcaacttgaaattataatttacactctaattctttacacaattatattaaatttactattacaactacaattttaaattgaaattcctactcccattttaaatatttctaaaaaccagttttggtgaaatagtaaagtgactatttgcaacatagtcacatagtgctttatttaattctatctttgatctcatcaagaccctagaggcctagtgttggcacttaaaaaattattatgaatagctgatgcaaatgcgaagaagctaaaagttaatatattcaaatttatttttgaattatataattgtatcattatttaaagattatgatctaaagaaaacaggggtcatctgaagacagtgaacgattctcttataatg

SEQ ID NO: 9335 - DNA, 534 bp, Glycine max
agcttgcttctacaatctcccccattttgttgatgactacttctaaaatcaagaaacacacacacacacacacacacacacactttttctagtcgatgactcacataaatttccattctccccctttgttttttgaatttatgcttgtcttaaaattaagttgattactcatgtgagtccttgatttaatccctatttctctccccctttggcatcaacaaaaagccaaaatgcgtaacaagtttgaagcatacaaatacaactaagcatgcatacaacattcatggaagaatataaaccaaatcatgaagcaagaaccataaatagatcaaatatataaaaaccacattgtcaaataacataattaatatttgttcaaacataccatgcaaataaagaaatagtaaattgttcaaatatcataataatatagccaaatacacggttggaaatcaaattactaataatattaaaataatagaaaactaagatgatggtggcggcggtggtggtagatcaaagcttgaatgaata

SEQ ID NO: 9336 - DNA, 392 bp, Glycine max
  unsure at all n locations
ctgggcgtaccccaagggaccatcaggaaattacttgtgtgngtagccatgagggtgggctcatgggccacgtttgggatagacaagacccttgtcttactcgaagaaaagttctattggccccatatgaagaaagaggtccataagcattgcactatgtgtgtggcttgtttacaagccaagtctagggtgatgcctcatgggctatacacacccttacccattctatctgcaccttgggtagacattagtatggactttgtccttgggctgcctagaacccaaggaggtggagactctatctttgtagaggaggatatgtggagcaagatggcacactgtataccatgccacaaggaggatgatgcttcccatatctcaaaacatttttt

SEQ ID NO: 9337 - DNA, 442 bp, Glycine max
  unsure at all n locations
agctttccacattgaattcagcacctaatgttatantatatgggaattgggtatcttaacataagagatttccgatggactttaatcctaatcccacagccgacctttttacgagatctctacttaaccctttggttaaatgatcggccaaattatgctgagttctcacaaactccactgatatcacaccatgcatgattaactcccgaaccatgttgtgtctaacacccaagtgtctagacttcccattatacacttgactatatgccttagccaaagttgcctgactatcacacctgatagacatgggaggtataggtttgggccacaatggaatctcatagattagatttcttagccactcagcttctttaccagctgctgctaaagctacaaattcagattccattgctgaatatggatgcaggtctggttcttggat

SEQ ID NO: 9338 - DNA, 478 bp, Glycine max
tctaaactttatacaagaatgaagctctgataccacttgttgtacagtggcctcagatatcttaagaaggggggggttgaattaagatattacaaattattttcccaattaaaaattctatttaactttctattcaagttatatattcccttaataatgattttcttaaataatgattcaaaagaacaatttgaatatgaatataaaacaataataaataaaggagtttaagggaagagaaaatgcaaactcagatttatactggttcagcaacacccttgtgcctacgtccagtccccaagcaacccgcttgagagttccactatcttgtcaattccttttacaagttctaaacacacaaggacaatccttcctttgtgtttagaatcctttcacaacaagagaccatcggcctcttaatcccttttcagaataaagaagaagagaagaagaaatctctcttgaaagagatagattg

SEQ ID NO: 9339 - DNA, 571 bp, Glycine max
  unsure at all n locations
tgaatgttcagcaacaatccctgtcaacctatgagaaggttttactagctgtggtgtttgctgtacaaaagtggagcattacttattactcaagacgtttgtaatcaaaactgatcacagaagtctcaagtatattcttgaccagagactttccacaactttccaacaaaaatggtaggtaaaacttatgcagtttgatttcattattgaatataagcagggaagtaaaaaccaagctgctgatgcactttcaagagttgaatgtgctactatttccactcaccaacccgattctgatctactagagagaatcaaatcaaaacatcttggcaaggtgatgatgccttacaaaaactgattgttgaagttacgaaagatccttcttcacataaggatttctcttggttaggtggagaactaaggaggaaaggtgatgcaatcctaccccgcaagggcattggatagaagactccaagtagatggtgctagagatccaagggaaggccctagggttctcatgagccttanggtagattgagcccatgggctaagtatgagcccgcttatcttt

SEQ ID NO: 9340 - DNA, 617 bp, Glycine max
agcttccaacttccaagagcacatttattatctctcagatacatatctcacgtacaggcgtatcatcgatgtgaatctattcctaaattaactaactagtaaggtgatacgagtaatttttgttgccttttgtttctttctagttctaacacaacttctatcatgtcaaatttacgtagtattgattcacagtgtatttagaaacagtagaaaaagaagcactcatgtttaaaatgtaaaaattatagttgattattagcttcttaaaattatatttagatgtgaagccaaacatatactaaaaaaaatgtagatttgctttatattttagtgagacccacattcagatttttctaatttttttatccataaaaatcaatgatggatatcattagactaaaaagttgattaatattttcttaaaaaataaaaatttgaaacaatatttgagaaagaactagaactatagtccttaaagtaataaagtatattttttttttatcactacacctaagtacttattaaaatatttgggcaaaataccatattaatatagggtgtaagcgaaaatagtttaaatttaattttgttaaattaatttaatatatggataatta

SEQ ID NO: 9341 - DNA, 523 bp, Glycine max
agcttgataacccttcttgaagagtatattgatttctttgcgtggtcgcatcaagacatgcccggtctgtattctgacattatgcagcataagttgcctttgaatcctgggtcttctccggctaagcaaaagctacgaagaatgaaacccgatatgtctttaaaaattaaagaagaagtaaggaagcagtttgatgcaggattcttagctgtggcacggtacccggagtgggtggccaacattgtcccagtcccgaaaaaggacggcaaggttcgaatgtgtgtacactaccgggacttgaaccgagccagtcctaaagacaattttcccctgccacacattgatatattcgtagataatatatccaaagtcacccttttctcatttatggatggcttctcggggtataatcaaataaagatggcccccgaagatgtagagaagaccactctcgtcaccctatggcggacattgtgctatagagtgatggcccttgggctgaaaaatgttggggcacctaatc

SEQ ID NO: 9342 - DNA, 482 bp, Glycine max
acctctctaatagctagctcacctcctttttatgagaagctagagcttagctacacaccccctataatagctaagctcacccccatgacaaaaaacatgaaaataccaaaaaaaagtccttactacaaagactactcaaaatgcctcgaaatacaaggctaaaaccctatactactagaatagccaaaatacaaggcccaaacgaaggaaatacctattctaatatttacaaagataagcgggctcatacttagcccatgggctcgaaatctaccctaaggctcatgagaaccctagggccttcccttggatctctagccaatctacttggagtcttctacccaatgcccttgcggggtaggattgcatcacctcctctcatggggtagccaagttgtcttatggtgaggacatgattataattaatacaaacccttgttcacatcaagggaacatttggaaatccttcgcatgaggataga

SEQ ID NO: 9343 - DNA, 383 bp, Glycine max
  unsure at all n locations
tgcaagcttgcacattactgctttatagaagattgcttgtaggtaagccgcggnaccatgacatgatgcggtacatagagtgtaacgagtatccacaaggggcttctggcaacgacaagaggatgttgcagaggttggaaactagtttctttctaagtgggggtatcatgatgtagctccattggagcttgttggccttggatcttcttcatcaatggagtcctttgcttcttgaattttaatggcagcaaaatggacaagaagaagagttgagaggagacaccacttcaaggagaagatgagtctagaataagctcaccatcatacgaaggcatggataagagcttcaaggtacgagatgatgaatggaggaacagggagag

SEQ ID NO: 9344 - DNA, 699 bp, Glycine max
ttgcatctgacaaagatgatagcaaattccatttcaggattttgttttcactttaatggtggtgtagtaagttggaaaagttccaagcaagctacgataacatattcaactactgaagcataatatatagtgacaagtgaagccggtaaagaagctgtttggatgaaaaggttcatatttgaacttggtgtggttccttcaatagaagagtcggtcccattattgtgcgacaataatggggctattgctcaagcaaaggaaccaagatcacaccaaaagtccaaacatattttgcgaaagtatcacttgattagagagataaaagaacgtggtgacgttaagattgaaaaggtagatggaaaggagaatgtagcagatctcttcatcaaggcgcttggcataaaagagtttgacaagcacaaatgggagttatgattgaagttcatgaatgattggctctaggaaagtgggagatttgtgggaataaatttgtatgcctatgatccaagtcatcatgtgatcaattctaattttaataataaagtattattttattttcatggtcatatttcactatatgattaaatggtgcatttgataatgtccttggataaacatatagacttggtattataatagaaattatgataatgagaaacaagtttgttcttaatttaatctaaaccgttcttgatcata

SEQ ID NO: 9345 - DNA, 606 bp, Glycine max
  unsure at all n locations
gcatttaacacacttgtagtgtaatactttagtactttaacacacttctaatgtgttccaagcggttactaggatatcaacaaagtacacaattacaaatttttcaataaattaaattatctgaaaacacggttcatgagtctcatgaaagtgctaagcatattgattaagtcaaatcacattactaaccactcataatccaaatactgttttgtaaaacagtttgtttctatttctatacaagctaaacttcttaagcactttaacacatttctagtgtaatacttaaacacttcaacacacttctaatgtgtctcaggtgattatcaagatatcatcaaaatacacaacggtgagtttttcaataaattacctcaaaacatgattcatgagtctcatganagtgctaaatatattggttaaatcaaatcacattactaatcacgcgtaatccaaatactgtcttgtaaaacagtttttcactcatcactttctctaattcaaatttggtggtagtcacaaaagtgatgcatcaaatcgataaatacttatactcttacgggttgaaagttgaaagtttaatcaaatgttaactttttttttgga

SEQ ID NO: 9346 - DNA, 560 bp, Glycine max
  unsure at all n locations
agcttggntatcgccttcttcactttattagtatcaccgggctgagtcttctctgtggctgtcttactggattagctccatcctctaaatttattcgatgcatacatgtggatgggctaataccaggaatgtccgccagggtccagcctatagccttcttatgcttcttgagcactgacaacaacttctcctcttgctcatcagcaagggaggcagatataatcactggaaaactcttgctatcatccaagtaagcgtattttaaatttgatggcagaggcttcaattctggtgtggtcggctggacagtggtagaaggagatggtttctcagccttgacctcataaagaaagtcagaggtatgtgtacttcctgaaacatggttagtcctatctgactctataaatcaatctcaagaggtaaaacaccaccaccaggcatgcaatcaatatcactctcagattcactctcaacatcaaattcagacatatgatcaagttccattttcagactcaatgcattgaagagtgagaggcatgcagattataataaagatcagt

SEQ ID NO: 9347 - DNA, 599 bp, Glycine max
tctacccaatggaatttatgaaccgacatttgaaagttaattgttctgtaactaccaagagatggggtttctttctttatgcaatggcattttattgtggagaattcacacgtgctagtaatgaatgacaccatgtattttgagaaacagataaattctgacttacatattctcttatgttgctaaattgcaactgttttattgatttgtcgaactaaatttgagtcatatggtagaagtattgaaaaagttgcactacctcagttttatccttgataagaaatatccatgtcacatgagagcaatcatcaatgtaagaattaaaccataaataaaggcgggtccccacacactgcaatggacaagagggaaagtctcaacacctttattattactacttggaaaatttgtacctgataatggtccggagagagcaagaaaatgatgactaactgcctattatgcaatgttgaggggagggttgcatgaaagcttgtggaaggcgagattataatcctagggacccttacatttttgtttgtgcattttgtataaagattatatgcccatatattgtttgagatggggcttaatacttg

SEQ ID NO: 9348 - DNA, 428 bp, Glycine max
  unsure at all n locations
ctacaacattcaacttcgagcatctcgatatattacgagtcnttantagacatccgagtaaaaagttattgtcgtttgaattggctcagagcttcaacattcaatttcgagcgtctcgatatattacgggactcaatcagacatccgactaaaaagttgttgtcgtttgaattcactcagaggttcaacattcaatttcgagcgtctcgatatatgacgggactcaatcagacatccgagtaaaaagttattgtcgtttgaatttgctcagagcatcaacattgaatttcgagcgtctcgatatgtgacgggactgaattagacatctgagtaaaaagttattgtcgtttgaatttgctcagagcatcaacattcaatttcgagcgtctcgatatatgacgggactcaatcatacatcccagtaaaaa

SEQ ID NO: 9349 - DNA, 356 bp, Glycine max
  unsure at all n locations
agctttgagccaattaagacgacaatatctttttactcggatgactganngagncccgncatatatcgagacgctcgaaattgactgttgatgctctgagcaaattcaaacgacaataatattttactcggatgtttgattgagtcccgtaatatatcgagacgctcgaaattgaatgttgatgctctgagcaaattcaaacgacaataactttttactcggatgtctgattcagacccgtcacatattgagacgctcgaaaatgaatgttgaagctctcggccacttcaaacgacaacaacattttactcggatgtctgattgagtcccgtaacatatagagacgctcgaaattg

SEQ ID NO: 9350 - DNA, 506 bp, Glycine max
  unsure at all n locations
gaccgcggctgcagctatttgatgtcaccgaaaaagttggtatgtgncgggcgaaaaactncactaggtgtggtcagacaaaacagtcctagctaaaattatcaatagattatatgtttaaactattaaaaattgaacaatattgtttagttaatagtttaaaattagattgtgtttgttttctatgaagcctaatattgaagtttcatctatttaaaatataaaattgaaattttgcatatggagaaaattgaattgccttatccaaacaaagaatttaaaattgaagaaatttgaattgatttatccaaacaaagcatttgaaaaatgaaggaaattaaaatcaaagcaattcaaattctaagcatttgaaatttcctaaaactttaaaattcctgatccaaacacaaggtaaaagtattgccaaatgtcaaaatcttattgagtaggaggatttacgtgattatggaggatataacaactctcttccaaattttaattaagct

SEQ ID NO: 9351 - DNA, 511 bp, Glycine max
  unsure at all n locations
gccgatacagtagagctgaccgcatgcaatctacaagttgcatagcgcctttgaatttcgtgatttgccaacaaanccttaactcgcctctgctataatccttcgaatttgaacccggagttaagtgctatctgatacccgttgttggggaaccgaagcgggataaacatcaaagagatttacaccaatgggccatgagcaatcatataagtaaacttgacaccacaccttaacccaaaaccttaaggctcaagtttatgagttttttcttcacttatatggtgttcaaccttctcattcctacacaatgtgagacttcacctcacacttgtactccaacataccgacatatgcattcttataccaataacttgcactttagttaagtgtgccctcctaactaaaataattaccaacttaaaataggcacaactctgtaataataaattcagcttaaatattatttaaaacatcataaccagcacaacgaacaacaaattgaaattacggt

SEQ ID NO: 9352 - DNA, 380 bp, Glycine max
gctgcttgaaattgaacaacggatgctatccagaaactcaaagggttattacttatcacacggaggtccgagtgaggcgcataatatatcgagatgctcgaaattaaactacgaatactctctagaaattcaaatggtcgtaacttgtcacacggaagttcgattcaggcgcattatatatcgagacgctcgaaattgaaaatcggaagctgtcgagaaattcaaatggtcgtaacttttcaaacggaagtccgatttaggcgcataatatatcgagaaggttgaaattgaacgacgactgctctcgagaaatttaaaatggtcataactgttcaaacggaagtccgattcaggcgcttaatatatcgacacgcttgaag

SEQ ID NO: 9353 - DNA, 484 bp, Glycine max
  unsure at all n locations
agcttgtcgtcacggagatanccgactttgcttttgngnggnggaacaagccacgaaaggagagagcaagaaangaagagccaatggnngacacatggacagagatgaaaaagatcatgaggaagcggtatgtgccggctagttactcaagggacttgaaattcaagctccaaaaactaacccaaggcaacaagggggttgaggagtatttcaaggaaatggatgtgctcatgattcaagcaaatattgaagaagatgaggaggtaactatggctcgatttcttaatggtttgactaatgatatccgtgatattgttgagctgcaggagtttgttgaaatggatgatttgcttcccaaagcaatccaagtggagcaacaattaaaaaggaagggagtggctaagaagaagtttaccaactttggttcttctagttggaaagaaaaggtaagaaagatggggctgctacttctagaattccacac

SEQ ID NO: 9354 - DNA, 509 bp, Glycine max
cgacactataaatctcagctcttatccaggctcatcttggtggtgaagctcctttttcttggcttattccctagtggatggcgcctcccttctcctcttctcctttgccttccgctgcatctccatggtgaaaaatcaccattgaaggacctcattgaagctcaaagatccagcctccatagaagctccacaagcaagcttccatcagttatgaccatttgaatttttcgagagcttccgttgttcaatttcgagcgtcacgatatattatgaccccgaatcggacatccgtgtgaaaagttatgaccatttgaatgtctcgagagcctccgttgttcaatatagagcgcctcgatatattatgcgcctaaatcgcacatccgactcaaaggttatgaccatttgaatatctcgagggcatccaaattttaatttcgaaggtctcgatatattatgtctcaaaataggacatctatttgaaaacatacgcccctttaaatgtatcgaga

SEQ ID NO: 9355 - DNA, 459 bp, Glycine max
  unsure at all n locations
agcttgaaatataacaatggaagcttcgtgnattttcaaatggncctatcttctcaaacggatgtttgatttggacacataatatatcgagacgctagaaattgaacgattgaacctctcgagaaattcaattggtcataacgtttcacacggatgtccgattcgggcgcattatatatcgtgacgttcgaaattgaacaatggaacctcttgagatatttaaatggtcataactattcacacgaatgtccgattcagggacttaatatatcgagacgttcgaaattcaagaacggaacctctcgtgaaattcatatggtaataacttttcacatggatgtccgattcaggcggataatatattgtgacgctcgaaatataacaacggaacctttcgagaaattcaaatggtcctatcttctcgaatgtacaattctgggacataatatatcgagacgc

SEQ ID NO: 9356 - DNA, 284 bp, Glycine max
agcttgtagggttaaagtctcacgaatttcacgtgctgatgcaacaattgttagccgtggctatacgagacatcttgccaaacaaagtcaggttagcgataactcgcctgtgctttttcttccatgctatatgtagcaaagtcattgattcagtcaagtttgatgagttggaaaatgaggccacaattatactgtgccagttggagatgtattttccccctgctttctttgacatcatgattcacttgattatgcatctggtcagagaaatcaaatgttgtggt

SEQ ID NO: 9357 - DNA, 585 bp, Glycine max
tcaaccaaggggagatggaccatttcaagtgcttgtattatttataacaatgcttacaaaggtgagctgcccggtgagtataatgttagttccaccttcaatgtctctgatttatctctttttgatgcagatggagaattcgatttgaggacaaatccttctcaagagggagagaatgatgaggacatgttcaagagcaagggcaaggatccacttgaaggacttgtaggacctatgacaagggctagagcaaggaaagccaaggaagctctccaacaagtgctgtgcatactatttgaatacaagcccaagtttcaaggagaaaagtccaaggttgtgagttgtatcatggcccaaatggaggaggactaaatgacaccactttgtctcacttttagagtgattagtttgtctaaataatggcccaatccttgtaaagatggctaaccaaaaatatgttttgggttaatcaactaaaagggctttaattatgtttagttcaaagtgtaataagggcccaattggcaacctatgcatcagcctttttggagaccaaatggtggctgacttgttggatgttggggg

SEQ ID NO: 9358 - DNA, 586 bp, Glycine max
tcctagaatcaagatcaagattcaagaatcaagagattatttaatcaagataagtatgaaaaagttttttcaaaaactgagtagcacatggatttttctcaaaatctgtttaccaaagagtttttactctctggtaatcgattaccagattattgtaatcgattaccagtagcaaaatggttttcaaaaagctttcgactgaatttacaacgttccaattgatttcaaaaagttgtaatcgattacaatgttttggtaatcgattaccagtatgcttgaacgttgaaattcaaattcaattgtgaagagtcacattctttcacaaaaaaagctttgtgtaatcgattacactgatttggtaatcgattaccagtgaaagtttctgaacaaatcaaaagatgtaacccttcaaatagttttttgactcttttaaattggttttaagtttgtctaaaagtcataactcttctaatggttctcttgaccagacatgaaaaatctataaaagcaaggctttgttttgcatttcacatctatcccatcaatcaatctatacattttatcttttccaaatcattctttacac

SEQ ID NO: 9359 - DNA, 566 bp, Glycine max
ctccgcttgaaactgttaagaaggttcgctttcaaacctatgttgttgttcaacataaacttcctcttagattaagccatttagaaatgtgttttttacatccatttgatatagcttcatattgctataagcttcaaatgaaagtaagatgtgtattgcctctaaatgagctacaggtgcataagtttctttgtagtctattccttcttgttgtgagtattctttagcaactaaccttgctttgtttttcacaacctttcaattttcattcagtttggtttgaaagactcatttctctccaatagctttctttctttttggaaattcgactgactttcaaacatcattcctctgaaactgatcaagctacttttgcattgctttaacccaattgtcatcctgcattacatcatcaatgtgtttgggtttcattttagaaatcaatgcaataggtccttatgttctgagtgatgatcttgtttgaacatgatcaactatatcaccaataatttgacttttttggaggatttcttctcatgatgcatccagtgggttctcttacctct

SEQ ID NO: 9360 - DNA, 534 bp, Glycine max
tgccttgccccttgatatatttgagggactcatggtttttattaatgacaaattccttgggataaaggtagtgttgccatgttttcaaagcacgtactaaggcatacaactccttatcataagttgaatagttaagggtaggaccacttaacttttcactaaaataagcaattggatggccttcttgcatcaacacagccccaatcccaacatttgaagcatcacactcaatttcaaaagatttttgaaagtttggcaatgcaagtatgggggcattagttagcttttgcttaagaacattgaaagcttcttcttgtttctctccccatttgaaaccaacatttttcttgagcacttcattgagaggtgctgccaatgtgctaaaatccttcacaaatcgtctataaaaacttgctaagccatgaaaactcctcacctcggtcacagacttaggtgtaggccattcttgaataacactaaacctcttctcatccacttgcactccttttgaactcccaacaaaccctgaaacac

SEQ ID NO: 9361 - DNA, 371 bp, Glycine max
agcttaagctccttcaactgttaaggtgcttaatatttgaagagtatccttgcggaaccttcacccgacgaatacactgacaaaaacttatcttctcctttttggacaaagtatggcaagctaggggcaagtaaattttcttcccatcagacattggatgcaactgtgatcgtatccccatataagctagatcttgacgggtattcaagccatccttcgtcttgccttgaatgttaaggagcgtcccaatcacactgacacaaacatttttctacacatgcataacatcactaccatgtctaacgtctagatcaaaccagcacagaagaactacgaatatggacctcttcttccatatgcaagacttactt

SEQ ID NO: 9362 - DNA, 202 bp, Glycine max
cagcctatgccgcaaacaacttctactttttttctcaaactcaatagaaaaaacggccgccacaaaacgcttatgacctctccaacaacaggtacaaccccgggtagaggaaacatcccaaccttaaatgggtgagttcttcccaatagccacaacgaccccaggcctatttttataatgctgatggcccaagcagaccata

SEQ ID NO: 9363 - DNA, 449 bp, Glycine max
  unsure at all n locations
ngccttgcccctcgatattattgagggactcatggttactattaatgacaaattccttgggataaaggtagtgttgccatgttttcaaagcacgtactaaggcatacaactccttatcataagttgaatagttaagggtaggaccacttaacttttcactaaaataagcaattggatggccttcttgcatcaacacagccccaatcccaacatttgaagcatcacactcaatttcaaaagatttttgaaagtttggcaatgcaagtatgggggcattagttagcttttgcttaagaacattgaaagcttcttcttgtttctctccccatttgaaaccaacatttttcttgagcacttcattgagaggtgctgccaatgtgctaaaatccttcacaaatcgtctataaaaacttgctaagccatgaaaactcctcacctcggtcacagac

SEQ ID NO: 9364 - DNA, 295 bp, Glycine max
aaattattcaatcctaccccgcaagggcattggctagaagactccaagtagattgggctataaatccaaggaaaggccctaaggttctcatgagccttaaggtagatttcgagcccatgggctaagtatgagcccgcttatctttgtaaatattaaaataagttattccttcgtctaggccttgtattttggccattctagtagtataaggttttaaccttgtatttcggggcattttgaactgtgtttgaaataaagactctttttttgtattttcatgttttttgtcatgggg

SEQ ID NO: 9365 - DNA, 352 bp, Glycine max
  unsure at all n locations
tgggctttcactatgtgttgaaatgagtgagccaaacttgaattgagttgaacacataaggcttgagtttgactaattatctctaataggcttaactttggcatacataacagtctagcttggcgagtctaattaaaagcttgcttaaagacgtctttgatcaattaattattttaaaatctagtgaaatactaactaaaaaaaagaaacttattaaatttaatatgagtaatgtacaaatccaaaaataattgataaacaaaatcatattgaattcaagtcgtttaaataccaagaatataataaaaatgaaanaaagagagcatattattaaaaaatacttacaaagaca

SEQ ID NO: 9366 - DNA, 445 bp, Glycine max
  unsure at all n locations
ngacccttatgagtaagcttggccaaaggtaaagctatcttacaaaaaccttctatgaacctacgatagtaacctgttaaaccaaggaaactcctaatctcaaacacttacttaggactcttccaacttatcacttcctctaccttaaaaggatctactgatatccctcccttggatataacgtggcctagaaagctcacctcttctagccaaaaactcacatttggacaacttagcatacaattcgttgtccttgacaatttgcaacacaacccttagatgctcctcatgttcctccctagtcttggaatacaccaagatatcatccatgaagaccaccacaaaactatctaggtagggatgaaagatcctattcatgtagttcatgaacacactgacgatgttggtcacaccaaaaggcataaccaagtactcataatggtcg

SEQ ID NO: 9367 - DNA, 389 bp, Glycine max
ggcttctgcacaagggtcaatggtacttagacacatgatgctctacacacatgactggtcacaaagactggttcgtgtgtctagatgaaagaatgaaaagcaaagtgagatttgtaaatgacagcactatgcttgctgaaggaattggaaatgtcctgattcataggaaagatggtagagaaacttgcatagaggatgtactttatgttccaagcataagcagcaatcttctaagccttggtcagttacttcagaaaggctttaagataactatgaaggacatgatgatgctggtatatgacaaaaccagaaatctaatgataaaaacaccattgaccgaaaatagaactttcaaggttggaacgcaagcacttgagcatgaatgtctt

SEQ ID NO: 9368 - DNA, 389 bp, Glycine max
tcctccacatgagtttattgcccgaaggcttgaaattattcagatatcctcattttctgttttagaaggtgctgggagaaccctcaaaggtagggatcttatcaaagtgaggaatgttgtactcccaaaaattggtttcctcgaaacactataaaggggtctcttgagtagtgatgtatctttatggtaaaacataatcaattaatttttcatggtgaaggtaaaaacaaaaaatagttgcttctacttttttatggtatcacctaattttatgcgatagaattgattcttatgtgtcatccaaacatgatagtagctcttttacatttgggatgtataatagggtttgtagttagaggttatttaagaatggatgttgtgttcatatg

SEQ ID NO: 9369 - DNA, 370 bp, Glycine max
  unsure at all n locations
ctagtacgcgtaaagtctcacgattgtcacttgctcatgcaacaatttttagccttggctatacgagacatctngccaaacaaagttaggttagcgataactcgcatgtgctttttctatcatgctatatgtagcaaagtcattgatcctatcaagtatgatgaagtggaaaatgaggccgcaattatactgtgccagttggagatgtattttccccctgctttatttgacatcatgattcacttgattgtgtatctggccagagaaatcacatgctgtggtcctatttatctacggtggatgtacccggttgagcgatacatgaagatcttaaagggtatacaagaatctattagccagaagcattatt

SEQ ID NO: 9370 - DNA, 389 bp, Glycine max
  unsure at all n locations
agcttattttgagacccatgaatngattgtctaacgcatgtcatgcgtccttcaccatcgagtctaaagccccatggattgattgtctaacgttgttcgtctatcctccaccctcanatcttattcggagacccatgaattgattgcctagcgcagttcatgcgtcctcaaccatcaagtctggagccccacgaattgattgcctagcgttgttcatctatcctccaccctcaaatcttatttggagacccatgaattcattgccctgctcggtttatgcgtcctacaccatcgagtctggagccccacgaattgattgcctagcgttgtaccctatactccacctcaaatctaatctgagaccatgaattgatacctagcgctgttat

SEQ ID NO: 9371 - DNA, 331 bp, Glycine max
aacttagcatctctatctaacacaatggtcctaggcaaaccatgcggtctcacaacttccctaataaagagttttgagatgtgggaagcatcatccaccttgtggcatggtctaaagtgtgccatcttgataaacctatccaccaccacaaagatagagtctacacctctttgggatctaggaagcccaaggacaaagtccatactaatgtctacccaacgtgcataagggatgggtaagggtgtgtatagcccatgaggcatcaccctagacttggcttgtaaacaagccacacacctaatgcaatgcttatggacatctttctttatat

SEQ ID NO: 9372 - DNA, 357 bp, Glycine max
ttcttatccaaggctcatcttggtggcgaagctccttcttccatggcttattccctagtggatggcgcctcccttctcctcttctcctttgccttccgctgcatctccatggtgaaaaatcaccattgaaggacctcattgaagctcaaagatccagcctccatagaagctccacaagcaagcttccatcagttatgaccatttgaatttttcgagagcttccgttgttcaatttcgagcgtcacgatatattatgaccccgaatcggacatccgtgtgaaaagttatgaccatttgaatttctcgagagcctccgttgttcaatttagagcgcctcgatatattatgcgcctaaat

SEQ ID NO: 9373 - DNA, 379 bp, Glycine max
gctgcagcttgaaccaacatggaagctgcttaaattcaaatggccttcttctcgacggagtttgatttggacacataatatatcgagacgctagaaattgaacgattgaacctctcgagaaattcaattggtcataacgtttcacacggatgtccgattcgggcgcattatatatcgtgacgttcgaaattgaacaatggaacctctcgagatatttaaatggtcataactattcacacgaatgtccgattcagggacttaatatatcgagacgttcgaaattcaagaacggaacctctcgtgaaattcatatggtaataacttttcacatggatgtccgattcacgcggataatatatcgtgacgctcgaaatataac

SEQ ID NO: 9374 - DNA, 317 bp, Glycine max
  unsure at all n locations
ntaactcggatgtccgattcaggcgcataatatatttatacacttgatattgaataacagaagctctcgagaaattcaaatggtcataacttttcacacggatgtccgattcgggcgcataatatgtcgagacgctctaaattgaacaactgaagctctctagaaattctaatggtcattacttttcactcagaggaccgattcaggcgcataatatattcagacgctcgatattgaacaacggaagctcccgataaatttatatgggcttacttttaactcagaggtccgattcatgcgcataatatatctatacg

SEQ ID NO: 9375 - DNA, 441 bp, Glycine max
  unsure at all n locations
ntgtctntgttgttcacaatctagaagccatgtgtcttatggctctntgataattctttatggcatctgcggctgggccacatgagtgaaaaaggtttgcatattataaggtagcgaggttttcttggaaatcacaaggtggaagctcttcagctttgtgtggattgtgtctatgggaagtagcatcaaacgacgttcccaaaagttgtgcacacaacaaaagccatgttggattacgtccattctaactactgggggctttcaagagttccatcactatgaggagcaaggtatttcctttccatcatcgatgattactctaagatgaaatgagtattcatgatgaagcaaatatttgaagttttcaaacttttctaacattgaagattcttatgtagagtcagacaggttagacaataaagcatcttatgagtgacaatg

SEQ ID NO: 9376 - DNA, 425 bp, Glycine max
tatggatggtatgagttgtgatcacccccttgcaattaacaaaaagattgctaattgactggcagtttaaaaatattaaaatattgctccattttgttcttgttattctttgagttccacacaagatggagattaaggttgactgatgattgtgcttttccatctggagcttattaattaatgtattctcatctgcgtgtttttgtaggagatgttgaagttttgaaggaccctgagaagccagataactccctagccagaagattaactgcaattgaaggatatgaaatggtttctattgattaaaaggatgaaccctttattctgagaaggatcaatgctgggtagtgactgaaaatgaaaaatagaaaaccaacgtaaaatctgcttacctttggtatccctacggggatcattatgcactt

SEQ ID NO: 9377 - DNA, 441 bp, Glycine max
taataaggccatctatggtcttaaacatgcccctatatcctggtttgataaactcaaggtgcacttctgaagtttgaatgtaagtccagcaagtgtgatccctctttatttgtctactccaaggggtcctcaacaacctatatgcttgtttatgtagatgatatcatcataacagggaataatccttccttaatcaagcaactcatctctaagctaaatacttttttctttcttaaagatcttggttctctagactatttcttgggaattgaggtaaaacatcaatctgatggatctattgttctcactcaaggaagatacattatagacttgctggcctaaactaatatgacagaagcaaaacctatttcttcacctatggttactggatgtaagctaactaatagtggatctgatccactcactgatccatatatgttc

SEQ ID NO: 9378 - DNA, 377 bp, Glycine max
gcttggagttccaaggccattcgcttcttttatttcagtcttcttctggcttcaattcttcagtgggctttccttctgtgtccagcatcttgggatgttcccagcctttgatgacagcttttcaaggttcttgctatccaagtgatcttgaggaaggccaccaattcttgctttccagtattcataagtggttccatctaggaatggtggtctagtcactggtcctccttctttctccatgttcatcagacattatctccctagaactcactctgtgatttcgagtgttggctctgataccaatcgaaattctgataccaggggacagatgttctaccggatgttacgacattacccttcagatcatgcaaatatat

SEQ ID NO: 9379 - DNA, 284 bp, Glycine max
ctacattaagaatcaccgggttgagtcttctctgtggctgtcttactggcttaactccatcctctaaatttattcgatgcatacatgtggatgggctaataccaggaatgtccgccagggtccagcctatagcctttctatgcttcttgagaactgacaacaacttctcctcttgctcatcagcaagggaggccgatattatcactgaaaactcttgctatcattcaagtaagcatatcttaaatttgatggcagaagctttaattctggtgtggtccgctgga

SEQ ID NO: 9380 - DNA, 451 bp, Glycine max
tctctgagaaaacttccttgagaagctagagcttagctacacacacccctctcataactaagctcacctccttgagaagcttccttaagaagattcctaaagaagctagagcttagctacacaccccctataatagctaagctcacccccatgacaaaatatatgaaaatacaaaaaaaatctctactacaaagactactcaaaatgcctcgaaatacaaggctaaaaccctatactactagaatggccaaaatacaaggcccaaatgaaggaaaaacctattctaatatttacaaagataagcgggctcatacttagcccatgggctcaaaatctaccctaaggctcatgagaaccctagggccttcccttggatctctagcctaatctacttggagtcttctacccaatgcccttgcggggtaggattgcatcaagccacaactcagca

SEQ ID NO: 9381 - DNA, 402 bp, Glycine max
  unsure at all n locations
tcctccacatgagtntattgcccgaaggcttgaaaggagtcagatatcctcattttctgttttagaaggtgctgggagaaccctcaaaggtagggatcttagcaaagtgaggaatgttgtactcccaaaaattggtttcctcgaaacactataaaggggtctcttgagtagtgatgtatctttatggtaaaacataatcaattaatttttcatggtgaaggtaaaaacaaaaaatagttgcttctacttttttatggtatcacctaattntatgcgatagaattgattcttatgtgtcatccaaacatgatagtagctcttttacattngngatgtataatanggtttgtagttagaggttatttangaatggatgttgtgttcatatgcttggggtataaa

SEQ ID NO: 9382 - DNA, 447 bp, Glycine max
  unsure at all n locations
ntatgatgatgaaccaagcaatattggtgatgccgttagccctagtgattgattcaagacttcaagatcaagcatcatgaatgcaatccaatccaagattcaagattcaagaaaagaaatcaagaagcaacaagtcaagacttcatataggataagtattaaaagaattttttaaaaaccaaatagcataattttgttttacaaaagaattttgtcaaattttctaaagtgaccagagtgattactctttgttaatcgattaccagttagcagtagtcgattactagtaaccagattggttttcaaaatgttttcaaatgatgtgtaacattcaaaaatgattttcaaatagtgtaatcgattacactatattagtaatcgattacaagtgaatcttaacgttggaattcaaatccaatggtgaagagtcacaacttttcataaaat

SEQ ID NO: 9383 - DNA, 342 bp, Glycine max
tcttagtttcagatgatgcagatgggtttgtagctacctcatgcactcctctaatgactatggcatcatttctggcgctaaactgctgggagttggaggccatcttctcaattaaatttctggcttcagcaggagtcatgtctccaagggctccaccactggcagcatctatcatacttctctccatattactaagtccttcataaaaatattggagaagaagctgttctgaaatctgatggtgggggcaactggcacatagtttcttaaatctctcccagtactcatacaggctctctccactgagttatctaatacctgagatatccttcctgatggctg

SEQ ID NO: 9384 - DNA, 347 bp, Glycine max
  unsure at all n locations
tgaaattgaacaacggaagctctctatacattttaatggtcataacttntcacttggaggtacaattcacgcgcataatatatcgagacgctcaaaattgaacaacgaaagctctcgagacattcaaatgatcataacttttcacatggacgtcagattcaagcgcataatatatcgagatgctctatattgaacaatggaagctctcgacacattcaaatggtcataacttttcactcggaggtccgattcatgtgcataatatatcgagacgctcgaaattgtacaatggaagctcttgagcaattcaaatgggctataccttttcacttcggatgcccgattca

SEQ ID NO: 9385 - DNA, 388 bp, Glycine max
  unsure at all n locations
ntaaagaccaattaaaggaaataggagtgtggatgtgtattacaaacagatgaagatttccttgattagggctcaaattgaagagtctcatgaggccaccatggcaaggtttttgcatggtctctatagggagatccaagacattgtatagttgcaccactatgcctctttggaggatctcattcatcaagctatcaaggtggagcaacaattaaagaggaagcaaacatacaagaagtcctcctatggctttccaacttagaaagataaggagacattcaagaaggagggaagaccttcattcaaatctcatgaaaaaggtgttgcccttggtaaaaaaataattctaaccctactcccacttcttcaaaggcgagttctattaaat

SEQ ID NO: 9386 - DNA, 271 bp, Glycine max
gacctctatttatagcccacgcgtcacagaaaaatggagggaatattgaattttctatttaaacttcacttgaattaaaaattgaatttatggggccaaatttcggagccaaaatttcacttattatgattcgggaattttagctatggctcaacccactagtccaagatctagtccaagattctccactaagtgtgcttaggtgtcataagacatgtaaagcatgaagtttatgcacacagtgtgactatatgatgtggcaatggagtgt

SEQ ID NO: 9387 - DNA, 420 bp, Glycine max
tgtagggttaaagtctcacgattgtcacgtgctcatgcaacaattgttagccgtggctatacgagatatcttgccaaacaaagtcaggttagcgataactcgcctgtgctttttcttccatgctatatgtagcaaagtcattgatccagtcaagtttgatgagttggaaaatgaggccgcaattatactgtgtcagttggagatgtattttccccctgctttctttgacatcatgattcacttgattgtgcatctggtaagagaaatcaaatgtcgtggtcctgtctatctacggtggatgtacccgattgagcgatacatgaagatcttaaaaggggatacaaagaatctatattgtccagaagcatctattgttgagaggtacattgcagaagaagcctttgatttttgttaaatact

SEQ ID NO: 9388 - DNA, 448 bp, Glycine max
  unsure at all n locations
tatagaatatataataagagaactatgactattgaagaatctattcatgtttccttttatgagtctaatgctattcctccaagaaaggatattttagatgatattgcagaatctttagaacaaatgcatatttatggacaagattctaaaggaaaaggaagcaatgaagatcctccagtagaagccaaatcaaatgatgaacttctgagagaatggaaagcttcaagagatcatccccttgacaacattattggtgatatctcaaaaggggtaacacctagacattctcttaaagatntatgcaataatatggcttttgtgtgtatgattgaacctaaaaatntaagtgaagccataatagatgatcattggatagtttctatgcaagaagaactaaatcagtttgagagaaataatgtgtgtgaactagtagagaaacctgaaaact

SEQ ID NO: 9389 - DNA, 386 bp, Glycine max
tctcgatatattatgcgcctgaatcagacttccgtttcaaaagttatgaccatatgaatttctcgatatattatgcgccttaatcggactttcgtgtgacaagttatgtccatttgaatttctcgatagcattcgttgttcaatttcgagcgtctcgatatattatgcgcctgaatcggacttccgtgtgacaagttatgaccatttgaatttttcgagagcatccgttgttagatttcgagtttctcgatatattatgcgcctgaatcggacatccgtgtgacaagttatggccatatgaatctctccagagcatccgttgctcaatttcgagcgtctcgatataatctgcgcgttaatcgaacttccgtgtgacaagttatgac

SEQ ID NO: 9390 - DNA, 202 bp, Glycine max
agcttctctatatattatgtgcctgaatttgacttgcgtttgaaaaattattaccatttgaatttctccagagctttggctgttcatttcgagtgtctcgatatattatgcgcctgaatcggacttttgtgtgacaagttatgaacattcgaatttctcgagacctttctgttttcaagttagagcgctctaatatgtgatg

SEQ ID NO: 9391 - DNA, 383 bp, Glycine max
  unsure at all n locations
cgtttcctatcctatcgttccactgcactttcctttttctattatgtcttatctgatttccgtgcaattcctccttttcgcactggcaacaaagaattggaatcactctcatcttctctattgctatgatcttcaacctttctgccctctaaagaagccactgtcagagtcacagtcacagccataggcttgtttatgcagccattagtatccttggttgactttntagtatccatcaataataacaacactctttatgctctctctctctctctctggtacgttttccgtggcagaccgaagtagaaaaaacgaaaattcacggaaattaatgaactggaagaataccatttgacccattgacctgaaaatcacagcgcaag

SEQ ID NO: 9392 - DNA, 443 bp, Glycine max
  unsure at all n locations
tgtccttcacggcaaacatgatagcactggcatgttctgcagcattttctacaattggaagcaagatgacagaaataaaagccactgacatattcaatgactcagatgctccctgcaagagaccagaaacacaatgtcaatgaatgaacttatgatgcagaatttatggataataggaatattgtgaatgtatgaatacagagttttgatgatgtcaaagtaaaatcaaacaaggttgtttcaacaaacattattgctttaagattaattcaaggtcaaacaaataagatcaagaaaaagataaggtctcaaataatctcactggttgatngatttttgccttaaaacaaattgtttccaagagatcaaaggctctagtattcgattactaggcaatgtaatcgattaccaggagacaagtttaccaaatcaactttaaaaaa

SEQ ID NO: 9393 - DNA, 388 bp, Glycine max
agctttgatttcttggaactgctcctcactctcatcaacaagaccagcggagcagtatacgcttaacaccacttcaagtgtcagctcattaggttcacaatttgctttttccatttcaacataagattttacagcctcttcatactgaccttcttgcctaaaagctttgatcacaccattgaatgaatgcacatcccgttttaaaccagactcattcatcctggataaaattgcttctgcttctttgtacagtcccccccttgcaaatgcatgaatgaatgaattgtaggtctcaacagttgggttgcttccaacttcattcatagtgttaaacacaacaagagcctcttcatacagtgcagcctgccccaacgctcatcacccagta

SEQ ID NO: 9394 - DNA, 360 bp, Glycine max
tgacaggttcaggtgcaggtgctgctactggtggaggcacttgaatttggttgccagacctcaaggtgatggcactcacatttttcggattctgcacagtttgtgaaggcaatttgtcagaattctgggactgagcttggttcatctgagtagccatctgccccatctgatttgtcagactctgaatagaagctcttgtctcttgctgaaattgcatattctggatggtcatttgcctcactaactcttctaaggaaggttgaggaggggccttagttgcttgttgtctttgttgttgttgctactgctgctactgtaatggaggaagaacatatggcttgcttggaccagcaacatttt

SEQ ID NO: 9395 - DNA, 425 bp, Glycine max
gtgggaggtctggacttgacatccgaactgacattcatggctgattctgtctgcctcgagcttcagagtgggaatgccagcatcagcacttatgatgcggatgaattgggcgtctgagtgaagcggatggccatacgagtgatgccatatcttgactgcatcatctttggaggatagacatgtggtggagctgctggggacatggggtgtacataggttggaagtgtacattgatctggtgccctcaagtagaacttcactcttctcattatgtaccgcgcctgctgactacgtgaaggtgacatggtatgcttcatgacacagctgacagatgctgatgaagattgcagacagaccctataccaacagggcttggatcagactacgaagtccatcatgagcgtgctttgccattgcaatgacct

SEQ ID NO: 9396 - DNA, 371 bp, Glycine max
agctttccattttatagctacagaatgttaatgatgtcatggatgcaattcaagccaacctaaagaaaaaagaacagattgaggagcttgtcttggagtgggataatgacccacaagattcgcaaattgccaaagatgtacttcaaaacttgcaaccatcaacaaattaaagaaactcaacattagatcctatggcggcacaatctttccaaaatggttaagtgattcttcaaattccaatgttataacccttgtcatcactgattggaattattgttggtcactttcaccatttggtcaattaccttctcttaaggagcttgtcattatgaggatgcacatggtgaatggtataggtcatgaaatctact

SEQ ID NO: 9397 - DNA, 428 bp, Glycine max
  unsure at all n locations
nttaagaagacaatttccaatcatgctatcctatgcaatgactattaacaagtctcaaggccaatcactttctatagttgaactttaatggccaaaaccagtttttagccatggacaattatacgttgcattatcaagggtcaattcaaggcaaggattaaaagttcttattcatgataaagagcaaaaaaatatgacttctactactaatgtagtcttcaaagaggttttcaaaaatcttacaaggtaactctaaattttcaaacaacaaattgtactatctattgacaacaattcctaactgttatcttactcttatacattctaacatacagccaaagatgatatcatatattacaatgttaaattttacattgtcaggtatgtaatcttaatcaccacattaatatcatccatttataatttca

SEQ ID NO: 9398 - DNA, 342 bp, Glycine max
  unsure at all n locations
ngctcgtcttgctgatatttatcatgcacacttttcttatgatgacctacgaacaattagggatcaacttgaaacttatgtgcttcaagtgagaagaaatgcttctttttccacttgtgaagatgttcaaagtttggctatgaagatggttcagactgagaaacatttggtatttccattggtttataaacttattgagctagctntgatattgccggtgtcgacagcatccgttgaaagagctttttcatcaatgaagattatcaagtctaaattgcgcaataagatcaacgatgtgtggttcaatgacttgactggatgttacaccgagcggcacatatt

SEQ ID NO: 9399 - DNA, 435 bp, Glycine max
  unsure at all n locations
ggcttgtaagcatcgtcccataggaatggttcaatttttcttagtagcatgtaaaatggctttgccttttttgcgagcttcgggaggaacttggacaaagacgctagtctaccatttagctnttgaacttctctgatgttagtaaggctatgtatttctagtattgcagtacacttgtcaaggttagcttcgattccccagtaggtgatcatgaagcccaaaaaaattttgtcgctgatcccaaaggtgcacttctcaagattgagatgcatgtcatacttgctagtctctccgaacacttccttcaaatctgctacatgttaagctatgctgtgagacttgacaaccatgtcatccacatagactttgacatttctgcctattnttcatttgaagacccagtccatgagccttttgtatgtagctttctcattc

SEQ ID NO: 9400 - DNA, 229 bp, Glycine max
tctcttagatctttaagtgcagattttcaggaatatgattgatctcatccagcgcaagttgttgcagcccagatacgcacactgctatataaacatgaatgctgcacgagttttccaccaagtccgggattgaagagttattttgtgagttttgggacttgagtgttttgtgagccaccttgatgttaccctaacatcaagcgttggacctgagtgtgttgagttgatc

SEQ ID NO: 9401 - DNA, 342 bp, Glycine max
agcttcttagtttcagatgatgcagatgggtttgtagctacctcatgcactcctctaatgactatggcatcatttctggcgctaaactgctgggagttggaggccatcttctcaattaaatttctggcttcagcaggagtcatgtctccaagggctccaccactggcagcatctatcatacttctctccatattactgagtccttcataaaaatattggagaagaagctgttctgaaatctgatggtgggggcaactggcacatagtttcttaaatctctcccagtactcatacaggctctctccactgagttgtcaaatacctgagatatccttcctgatg

SEQ ID NO: 9402 - DNA, 435 bp, Glycine max
  unsure at all n locations
nttccattctgcagtagcagatctgtaaactttgaatttccctatgaatttagttactcgcataaagtctattgttattcctcaaccaaggttctccccacgcacagagattagcaccagacccagttgaccgtctcagctcttccttcaacaatatttgagaagcgtagatgctacaccacacataggatggaatgtgacctacaacaacgtccaaaaaatccctcctagggaaatatttatctttgaaaatcctagaaaccatagttttggtgttggatagaaacatccagccttggttccccaacattgccaaattaaagccacaaaagtctcaaaatctatgcccattctttcttaataacggttaatctttcccaagttggaataactgagaatctagaagggggttgaatagattcttttaaatgttta

SEQ ID NO: 9403 - DNA, 442 bp, Glycine max
  unsure at all n locations
ctaagctatgctgcnacattacaacaaacctcctccacctcatcatcaaaatcaaccacagcagaacaattatgacctctccagcaacagatacaatctcggatggaggaatcaccctaatctcagatggtctagccctcaacagcaacaacaacagcctgctccttccttccaaaatgttgttggtccaagtagaccatacgttcctcctccaatacaacaacaacaacaacaacaacagccccagaaacaacaaacagttgaggcccctccgcaaccttcccttgaagaacttgtgaggcaaatgactatgcaaaacatgcagtttcaacaagagaccagagccttcattcagagcttaactaatcagatgggacaatnggctacacagttaaatcaacaactgtcccagaattctgacagattaccttctcaatctgtc

SEQ ID NO: 9404 - DNA, 341 bp, Glycine max
agcttcccagatccgatcatggaagggcttggtttctgccttcattaggcagtaccagtacaatacggacatggctcccgatcggaaccagcttcagggtatgactaaacgagagcatgagtccattaaggaatatgcccagagatggagagatctcgcagcccaagtcgtaccgcccatgacggaaagggagatgatcacaattatggtagatacgttacccacgttctactatgaaaagctgataggctatatgccagctaactttgcggatctcgttttcgccggagaaaggattgattccgggctacgaaaaggcaagtttgattatgctgccctta

SEQ ID NO: 9405 - DNA, 418 bp, Glycine max
tgagatggaagacaacccttccttgtaattgtgtggtttattataatatttaataattttatcatactagaattaaaattttatattatagtaattatatttaaaaaaaattataatattttaaaattatttgatatatcatttttgtaaatcaaaataaatgtaatataaattttttaaatatataaaaatgagtttcattcaataatctttttaattttgttcaattcattaaaacttggcacaaataattaatctatataattataattcaatgttagatcaataaaataatattctatataaatttattaactataaaaaaagtaattattagtgtaatatactgtcttgtgttatgtagttaaaagaaagtataataataaagttgatttcttctcatttatcgcagaaagag

SEQ ID NO: 9406 - DNA, 320 bp, Glycine max
  unsure at all n locations
agcttgatttcctttggtccggaaacctttcttttctcatgtgcacccaaacccaatctccgggttcgaagacaaccttctntctccctttgttggcttggttagcatagnctttattcttcctctcaatttgatctttgactctctcatgaagcttcttcacatagtccgcctttgcttgaccttctttatgcttaaaaacagaaacattatgcataggcaaaagatcaagaggagttagtgggttaaaaccataaacaacttcaaaaggagaacaattagtggtgctatgaacagctctattgtaagcanattcaaca

SEQ ID NO: 9407 - DNA, 368 bp, Glycine max
  unsure at all n locations
agctttgaatgcactattcaatggagttgacaagtacatcttcagactgatcaacacttgcacagtggccaaagatgcatgggagatcctgaaaatcactcatgaaggaacctccaaagtgaagatttccagattgcaactcttggctacaaaattcgaaaatctgaagatgaaggaggaagagtgtattcatgacttccacatgaacattcttgaaattgccaatgcctgcactgccttgggagagaggataacagatganaagctggtgagaaagatcctcagatccttgcctaagagaattgacatgaaagtcactgcaatagaggaggcccaagacatttgcaacatgagagtagatgaactca

SEQ ID NO: 9408 - DNA, 433 bp, Glycine max
tgcactaaagaatgctaatgtagatttgcaaaataatttaataactgacatagtgataggaaatcgaataaatagaatgagaatagaaatggatagaatagaagtgaggagtacacttagtaataaaggatgtgggattgaaacgtgggaaaaataagatgcataatgagatatttataatgtattattaattaaactaactagctaggcaatgataaaaaaagaaaatcacattgaagtataaacgatagagacaataaagaaatacaataaaataaagagctattcactaatatgtataattatttttatttttttatttctttttctttatttttctttgttttcttttttttgttttttgtttttgtttctttttggcttttttgtcaaagtcaaaggattgactctgacttaatcaacactgttagac

SEQ ID NO: 9409 - DNA, 428 bp, Glycine max
  unsure at all n locations
tgtaatcgattacacacaaactgtaatcgattaccatagcatattttcagaaaatattctcaacagtcacatctttttatttggttcttgaatggctatcaaaggcctatatatatgtgacttgagacacgaatttgaaaagagttttccagaacaaaaaggtcttatcctcttaaaaagcaaaatcgatttatcctcttacaaattccttggccaaaacacttgtgattcaataaggaattatttgagtgctcaaattgttcaatctatctctttcaagagagatttcttcttctcttcttctttattctgaaaagggataaagagatcgagggtctcttgttgtgaaagaattctaaacacaaacgaaggattgtccttgtgtgtttagaactngtaaaacgaatttacaagatagtggaactctc

SEQ ID NO: 9410 - DNA, 391 bp, Glycine max
  unsure at all n locations
agcttgaaatgttagccaacgaattgtatcaatataggtcttgagtcataagcgattcttggcaacttgttctgaactttgcacatttatgatgttcttcatgtgctttgactgattcaacaagtctttacaagccttcattgcattgttatgtggggagcaaggactatctccaatgtgattaagaaatgcacaatttttccagcattaacctttctacatgatctaaatccttgtctattaagacatttgatccaaaaatgatcactttgctttgtactgaatagatagcataacaaacaataaactctatcattagatggngaatactctagcccagaaagaaacatttaaaccaagtacattggaaaatgcctggatgtttctctta

SEQ ID NO: 9411 - DNA, 389 bp, Glycine max
  unsure at all n locations
agcttgtgcattcaatatcctgatgattgtgttccatatgttctcaagactggactaatacatttgctgcccaagtttcatggtcttgcaagtgaagatcctcatatgcatcttaaggagttccatattttttgttccaccatgaagccccctgatgtccaagaagatcatatatttctaaaggtttttcctcattctctggagggagtggcaaaagattggttgtactaccttgctcccaggtccattttcagttgggatgacattntaggcatcaggcaacttagtggagagagcttgtatgcgtactangaaagattcaagaaatngtgtgcaagctgtcctcaccaccagatttctgagcaaccccntcttcattatttctatga

SEQ ID NO: 9412 - DNA, 343 bp, Glycine max
agcttgtcgaccagtaatgttctcctataatagcacaccataagcatagacatcagtcttttcatctactataccatgcataaagaattcaggaggaaggtagctgctgtagcatccaaggttaatgcaaaagaaaaacataaaaaaaaaagtgtcaattaattggtgaaaagaaggaaagaaaaaaaaatgttaacatagaaagattgtgaagatgttaaatatacaaactccgaatgtgccttccactttggagacggtgtgatgagtccattggtcgggcaaccactttgcaagcccaaaatcagatatctggtgtaagattagcattaaacaaacttac

SEQ ID NO: 9413 - DNA, 363 bp, Glycine max
tatcattgaacaacgaaagctgtcaagaaattcaaatggtcataacttatcacacgggagtccgattcaggcgcaaaatataccgagacgctcgagattgcacaacggaagccctcaagaaattcaaatggtcataacttatcacacggaagtccgatgaacgtgcatagtatatcgagaagctcataattgagcaacgaaagctctcaagaaattcaaatagtcataacttatcacacggaagtccgatgtaggcgcataatatatcgagacgcttcgaattgaacaacgaaagctctcgagaaattcaagtggtcataacattgtcaacggaagttcgattcatgtgcataatatatcgag

SEQ ID NO: 9414 - DNA, 315 bp, Glycine max
agcttgaaattgaacaacggaagctctcgagaaattccaatggtcataacttatcacacggatgtccgattcaagcgcataatatatccagacgctcgaaattgaacatcgaaagctctcgagaaactcaaatggacataacttgtcacacggacgtccgattcaggcgcataatatatcgagacgctcgaaattgaacaacggatgctgtcgagaaattcaaatggtcataacttgtcacacggaagtccgatttaggcgcataatatatcgagacgctcgaaattgaacaacgaaagctctggagaaagtcaa

SEQ ID NO: 9415 - DNA, 407 bp, Glycine max
agcttatgaacaacaaaagaagtttgagtccttgagggttaggaagagatgactcatgtgaactaataataactaattggaagtaaagtactacatattttttcaaaaattgacttatttaaagtgaataaaaataaaataagtaattttggttgttcaaaagaaaatcaactaataatatttcaataaattcacaacttattatgtttgtgtatgtaatattgattattgattttttcaaactaagtatggatactttcaatatattgaaatttgaatcttcttttcaatgctttcaagttttgaatacggaaaagttaactaaaaggactggtcatgaacccttatttctgtcaatgaagattcaagcctttataaagatgatgcataccaagtctcataaaagt

SEQ ID NO: 9416 - DNA, 423 bp, Glycine max
tgtaattgagcaacggaagctttcgagaaatttaaattgtcatcacttttcactcggaagtccgattcaggcgcatcacatatagagacgctcgaaattgaacaacggaagctctcgagaaattcaaatggtcataacttgtcactcggaggtccgattcaggcgcataatatatcgagacgcttgaaattgagcaacagaagctttcgagaaattcaaatggacatcgcttttcactcggaagtccgattcaggcgcatcacatatagagacactccaaattgaacagtggaagctctcgagatattcaaatggtcataacttttaactcggaggtccgattcatgcacacaatatatcgagacgctcgaaattgaacaacggaagctcttgagaaattcaaacggtcattacttttcactc

SEQ ID NO: 9417 - DNA, 437 bp, Glycine max
  unsure at all n locations
agcttcaacatcagaccacttccagggtgctggaactacttcacatggacttgatggggcctatgcaagttgaaagccttggaggaaagaggtatgcctatgttgttgtggatgatttctccagatttacctgggtcaactttatcagagagaaatcagacacctttgaagtattcaaagaattgagtctaagacttcaaagagaaaaagactgtgtcatcaagagaatcaggagtgaccatggcagagagtttgaaaacagcaagtttactgaattttgcacatctgaaggcatcactcatgagttctctgcagccattacaccacaacaaaatggcatagttgtaagggaaaacaggactttgcaagaagctgctagggtcatgcttcatgccanagaacttccctataatctctgggctgaagccatgaacaca

SEQ ID NO: 9418 - DNA, 417 bp, Glycine max
  unsure at all n locations
tcaagaaaaagatggcctcagcaaactccttattttcataagggaattctatcaatagacctccaatctttaatggagagggttaccattactggaaaacccaaatgcaaatttgtattgaggcaatagacctaaatatttgggaagccatagaaatagggccttatatacccaccacagtggaaagaattacaatagatggcagttcatcaagtgaaagtataactttagaaaaacctagagatagatggtctgaagaggatagaaaacgagtacaatacaatttaaaagccaaaaacataataacatctgccctgngaatggatgaatatttcagggtttcaaattgtaagagtgctaaggaaatgtgggacactcttcgattaacacatgaaggaactacagatgttaaaagat

SEQ ID NO: 9419 - DNA, 430 bp, Glycine max
agctagtggagagatcttcctctcttcttgttgcacacgtgccgcgaaaaatgcttagtcaccattctactcaaactgaaaagattttcaactcattcaacaagtttgaagatgtatacaagggcaaggtcacactacattcctataagggcatttctccttatgctacaatgcacaatgatgtgtgctacttggcacttgaaaagagaacaacttttatcatcataccttttcataagcaatggatacttggagggacaactgagtcatcttttgcttttaagcagctcaataagaatgtcctagagaaagctccttgctcagttggtgtcctcattgatcgtggtaaccaaaagatgttttggtgtggcttcaaaaagggatcaatatatcaagtagctatgctcttctttggtggtgcagatgatcg

SEQ ID NO: 9420 - DNA, 412 bp, Glycine max
tgcgagctcggccggaatccgaaattgaggagatgttgcagaccttaggtgtggctttgctgtgtgtgaactcaagcccagatgacagaccgaccatgaaagatgtggtagcaatgatgaaggaaattaggcaggagagagaggaatgtgtgaaagttgacatgcttcttaatgcatcttctgcaaatgagcaacaagaaagaaatcatctcactgaagaaccaatgtcaatgataagcaccagcagcacaaatctgcatctgcattactctccccatcgccctcaaacaccaaagtaacttccaaatagttaaatattagcaatgtgtcttggcaactaagatttccttagcaagaatggtttctgtcctgttatcattaattaattcagcttcatatttttggtttcttt

SEQ ID NO: 9421 - DNA, 428 bp, Glycine max
agcttgccttgccccttgatatatttgagggactcatggtcactatgaatgacaaattccttgggataaaggtagtgttgccatgttttcaaagcccgtactaaggcatacaactccttatcataagttgaatagttaagggtaggaccacttaacttttcactaaaataagcaattggatggccttcttgcatcaacacagccccaatcccaacatttgaagcatcacactcaatttcaaaagatttttgaaagtttggcaacgcaagtatgggggcattagttagcttttgcttaagaacattgaaagcttcttcttgtttctctccccatttgaaaccaacatttttcttgagcacttcattgagaggtgctgccaatgtgctaaaatccttcacaaatcgtctataaaaacttgctaagccatg

SEQ ID NO: 9422 - DNA, 390 bp, Glycine max
tcacacagtttatcattctcaaacttgagttttggaagaccaattactaagtctttcctaactagatgatttaaatgattcatattattgtgtgcagtcctacaatgccacaaccatgaatcatctattttactcaccaagcaacttagctcatgaaaagatgcatgctcaacatttagcatatagatgttacctatccttttaccaatgtggacaactttaccagatatggcttcacttataagacaacaatttctattgaattcaatcttgaaacctttatcacaaatttgactaatgcctataagattatgctttattccatccacatataacacattctttatctaagttttgtgttgattccctatatttccttctcccattata

SEQ ID NO: 9423 - DNA, 375 bp, Glycine max
  unsure at all n locations
agctntgagaaaaatctaacgacaataacttttaactcggatgtctaatcgagccctgtaatatatcgagacgctcgtaattgaaaacggaagctctaagaaaagtcaaacgacaantaactttaactcggatgtctgatcgagccctataatatatcaagacgctcgaaattgaaaacggaagctctaagaaaagtcaaacgacaataacttgtaacttggatgtccgattgagccctgtaatatatcgagacgctcgatattgaaaacggaagctctaagaaaagtcaaacgacaataaactttaactcggatgtccgattgagcgccgtaatatatggagacgcttgtaattgaaaactgaggctctaagaa

SEQ ID NO: 9424 - DNA, 412 bp, Glycine max
  unsure at all n locations
ntgatggtgtcgagaagaaatcacatgtttgtcatcatcaaaaagggggagaatgtgaatgtatgtatacatgattttgatgatgtcaaagaagaatctaacaaggctgcttcaaatgataagcatttgcttcaagaataattcaagattgcttcaacaaacaaagccttgtttcaagattcactaaagaccaagccttgccttaaaacaaagtgctttcaagacatgcaaggctctggtaatcgattaccaggaagtgtaatcgattaccagaagacagggttgagaaatagctgttgaaaaatgttttgaatttgaatnttcaacatgtaatcgattaccatatgtctgtaatcgattaccagcaacgaaactttggaaatcaaattcaaaagtcatacccttcaaatat

SEQ ID NO: 9425 - DNA, 411 bp, Glycine max
  unsure at all n locations
agcttgaaattgaacaacggaagctctcgaganattcaaatgctcataacatttcacacggatgtccgattcagatgcataacgtatctagatgctcaaaattgaaaaacagaagctctcgagaaattcaaatggtcataacttttaacatggatgtctgattccgaagcataacatatcgcgacgctcaaaattgaataagagaagctctcgagaaattcaaattgtcataaattttcacacggatgttcgattcggggataaaatatgttgagatgcttgaaattgagagataaaagctctcgtgaaattccaatggtcataacttttcactcggatttccgattcatgacacttgaaattgaccaacggaagctantgtataaatcgaatggtcgtaacttttcacac

SEQ ID NO: 9426 - DNA, 430 bp, Glycine max
agcttcttagtttcagatgatgtagctgagtttgtagctacctcatgcactcctctaatgactatagcatcatttctggcgctaaactgttgggagttggaagccatcttctcaattaaatttctggcttcagcaggagtcatgtctccaagggctccaccactggcagcatctatcgtacttctctccatattactgagtccttcataaaatattggagaagcagctgctctgaaatctgatggtgagggcaactggcacatagttttttaaatctctcccagtattcatacaggctctctccactgagttgtctaatacctgagatatccttcctgatggttgtggtcctggaagcagggaaaattttttctaagaatactctcttcaggtcatcccagctcgtgatggaccttggagcaaggtaata

SEQ ID NO: 9427 - DNA, 381 bp, Glycine max
taagctccttcaattgcacaaggctcttaatatttgaagagtatccttgtggaaccttcacccaacgaagacactgacaaaaacttatcttctccttcttggacaaagtatggcaggctgggggcaagtaaattttcttcccattagtccttggatgcaactgtgattgtgtacccatatcagctagatcttgatgggtattcaagacatccttcattttgccttgaatgttaaggagcgtcccaatcacactgtcacaaacatttttctccacatgcataacatcaatacaatgcctaacgtgaagatcacaccagtacggaagatcaaagaaaatggaccttttcttccatatgcaactctgacttttatccttctttt

SEQ ID NO: 9428 - DNA, 413 bp, Glycine max
agcttcatgcttaactatgtatggcaaatcttcattattgttgttcaagacatacaagcgagcttgtaacaaatcttctacacttggagtgatcacatgcagtcctcttgaacccttaccacccattctgtcatcatgctaagactcaggaagcccaacagatttagctttctctaagtattctgaacaaaattcaatggcttcttctgcaatgtacctctcaacaatagatgcatctggacgatatagattctttgtatacccttttaagatcttcatgtatcgctcaaccgggtacatccaccgtagataaacaggaccacaacatttgatttctttgaccagatgcacaatcaagtgaatcatgatgtcaaagaaagcggggggagaatacatcttcaactggcacagta

SEQ ID NO: 9429 - DNA, 405 bp, Glycine max
tgaaggtgtgtagcctaccatcttttcatagtagaatattggtaatgtgtctactatcacggttatcatctccctttttgtcattgagggaactacttgggctgccaggtctctccacctttggacgtattctttgaaagattcatgcccctttttgcacatgttctgtagttgcatcctatccgaagccatatcagaattgtattgacactgcctaacgaaggcaaccattaggtccttccaagaatggactcgggaaggttccaagttagtgtaccaggtaacagctaccccagtatgactttcttggaagaaatgtattagcagttcctcatattttgtgtatgcccccatcttccgacaatacatctttagatggttcttcgggcaagtagtccccttgta

SEQ ID NO: 9430 - DNA, 423 bp, Glycine max
tgtcagatatatatatcggattaatttcaaacagtatcttatgcataataggtggttctagtaataagaaagttttagtggttgatgtaacgttaagaaatcgaatcttttaagtcatcacgtttttttttttcctatatgcaatgttttaaaaataggaccaaatcgatattactactagtccaatactgtgtttctccatgtaatagttgcaacattttttatataaaaataactactgccacatatataattatgtatttaacttatttgtattaaatataacttaaagagtttaatgataatgtattgataatatttttatattatcgtttaatcataattttttgttaatatgacttttaaagtaattattataaaagttataaatacaaatttattatacataatggattatgatcg

SEQ ID NO: 9431 - DNA, 395 bp, Glycine max
  unsure at all n locations
agcttagatggagaagaagacacagagtgccagcttcttagggctcaccatattttttaaaatataacttcaacatcggtttttaaaaaaacccgatgttaacaaaatgatgttaaggttaacatcggttttctggagaaaaccgatgttatcataacaaacgttaacatcggttttctaaaaacccgatgttaataaacatatgttaacatcggttatttaaaaaccgatgttactaataaatgttaacatcggttctccaataaccgatgttaatgaacttcgttaacatcggtttttcacaaaaccgatgttaacgtatacacagtatntacaattatgccaccgcgcatatgttaacatcgngttttttaacaaccgatgttaacacaccg

SEQ ID NO: 9432 - DNA, 423 bp, Glycine max
agcttggacaatggaaaggaaatcttgctaaaatcttagatgaatctcctgtaaatacctctactagagatcaaatgccctaagactataccttcatggacaataaaatgacatttttcaaagctaagaacaaggttagtctcaatgcattggtcaagaactctagagaggcatgcacatttggaaggtgccaagagcgttgcataggccaaaaggcatcccggtgtaggcaaatgtgtcgaatggacaggtgaatatggtctagtgctggtccttcgatgcaatataaatttgcatgtaacctgaaaaaccatcaagaaagcaataatgtgatttacctgccaacctttccagaacctagccaatgaatgagagagggaagtgattcttgcaagttgcctagttaaatctcctataatcaat

SEQ ID NO: 9433 - DNA, 352 bp, Glycine max
agcttatcattaaaataaatctaaatggttgatgatgccatgatctatatctttcaatttttgtatgattacttgtatgatatgtttaaaagtatttgattgattgctcatgtttttcaaaattattatattttgtttctaaagccttgtatttggctatatgtttatgaaatttgaacacttagtatgacttgaatatttatggattgtgatatatgactatgtggtttgcatttaaatctggttttattcaagatattatatttgcaaaaactttaatattaagcataaattcaaaaagaaaaggggtgaaagggatgagtgaacagtacaacaaaaattgtatgcattc

SEQ ID NO: 9434 - DNA, 417 bp, Glycine max
tgttaaaaagggaagaaagtcaaaaactcttttcaaattaaaaatgttgtttctacttcaaaaccccttgaactacttcacatggatttatttggtccctctagaactatgagtttgggtggtaattactatagcttacttatagtagatgattactcaatgttcacatggactttgtttttgaaaacaaaaaacgaagcttttgatgcttttcgcaaattgccaagatgattcaaaatgaaaaaggtctcaacattgtttcacttagaagtgatcatggaggcaatttcaaaatgagtcttttgaaagcttttgtcaagaaaatggaattcaccataattttctgccccaagaacacctcaacataatggtggtgtggagaggaaaaatagatcccttgaagaagctgcgagaacc

SEQ ID NO: 9435 - DNA, 355 bp, Glycine max
agcttagctacacatacctctctaatagctaagctcacctccttgagatgagaagctagagcttagctacacactccctataatagctaagctcacccctatgacaaaaaatatgaaaatacaaaaaaaaagtccttactacaaagactactcaaaatgccccgaaatacaaggctaaaaccctatactactagaatggccaaaatacaaggcctacgaaggaaatacctattctaatatttgcaaagataagcgggctcatacttagcccatgggctcgaaatctaccgtaaggctcatgagaaccctagggccttcccttggatctctagcccaatctacttggagttttcta

SEQ ID NO: 9436 - DNA, 415 bp, Glycine max
agcttaagctccttcaattgcacaaggctcttaatatttgaagagtatccttgtggaaccttcacccgatgaagacactgacaaaaacttatcttctcctttttggacaaagtatggcaggctgggggcaagtaaattttcttcccatcagaccttggatgcaactgtgatcgtatgcccatatcagctagatcttgacgggtattcaagccatccttcgtcttgccttgaatgttaaggagcgtcccaatcacactgtcacaaacatttttctccacatgaataaagagtttagtccccattgagcatttcaagaagagcatggagggagtgtgtcagaattcggtgaagcagaagccctttcttggacaataaaggtggaattacccagggtagtggtcttgactatggcaat

SEQ ID NO: 9437 - DNA, 412 bp, Glycine max
tgctaacccatggaagctcctaatatctcccacactttttggggtggaccattcttggattgctttgattttctcagggtccacttggaccccatttctaccaactacaaaccctaagaaaactatattatctacacaaaaggtacacttctctatatttgcaaagagggtgtttttcctaaggactgaaagaacttgcctgagatgtcctaagtgatcatctaggctcctactgtacactaaaatatcatcaaaataaacaactacaaatctacctatgaaatcccttaaggcatgattcataagcctcaaaaaggtgcttggtgcattagtaagcccaaaaggcatcactagccattcatacaaaccaaactttgtctttgaaagcggtttccactcatcaccctttttc

SEQ ID NO: 9438 - DNA, 437 bp, Glycine max
  unsure at all n locations
agcttagcctgcaaaaaataatgaatatagagttaacatgttggttccacaaaccaaatgctagcctaaacccaatgcttaggcattcactttaagactacacagtgtaacatgatagacacaaaacagaaaagatatttatggaactataagggcataaaagagttaccttattgcaagttgaagaaaaaacaagaacaactttatcaatgtattccaaagattttgagaagttgcccgaatcatagaaggactgagttgtttccaaagcactttgagcctgcagtagttgagagagcttattttctgtagctgaatctccaggttttaactccagagaanatgtacaagcgcacaattaactcaagcaattacaaactttatcataatcactagtncaaatatacagatagtattcaattgagaaaatagagaat

SEQ ID NO: 9439 - DNA, 426 bp, Glycine max
  unsure at all n locations
agctatgaaattgtggatgagccaaccatgaaattgggacaatgtatcttgtcctgttttcaccaacatacactgcaaagtgcccttttggcacatcttctggaagaccaccctcttcattgtagccctgttgctgcttcttcccaaagcttgaacaccttctcacaatttgctttatcacatctgcttggggtagcttattggattttttgatggccattgtgaaattgattgttagtactctttgcacaccttcaagttgttaactttgaaagggtctcttgagggtgctgaaagtgtgtgattcatggggcgagtttggagaggctntatttatcattgggacattggtatgtgtggaaaatagacaatgagttttagagaaaacagggtcacgtggatgtggtgacatgtagcagaccacac

SEQ ID NO: 9440 - DNA, 401 bp, Glycine max
tccttaagaagattcctaaagatgcttgagcttagctacacatacctctctaatagctaagctcacctccttgagatgagaagctagagcttagctacacaccccctataatagctaagctcacccctatgacaaaaaacatgaaaatacaaaaaaaaaaaagtccttactacaaagactactcaaaatgccccgaaatacaaggctaaaaccctatactactagaatggccaaaatacaaggcccagacgaaggaaataactattctaatatttacaaagataagcgggctcatacttagtccatgggctcgaaatctaccctaaggctcatgagaaccctagggccttcccttggatctctagcccaatctacttggagttttctacccaatgcccttg

SEQ ID NO: 9441 - DNA, 431 bp, Glycine max
  unsure at all n locations
agcttagagaagcactgagcaccacccaacacatgggaataggaaatctgtccttgatcgtgagggcgtttaaagctntgtaatcaacgtagaagcgccaggatccatcttgtttcttcaccaacaataccagcaaagaaaatggactggtacttggctgaatcaggaccttttggagcatggagtcgatctgcaattcaatctcgcgcttttggaagtgagggtacctatacggtctcatgttaactggagtggattgaggaagcacgtgaatgtggtggttggtgtccctagccggtggcatcgcatggtggggtcgaaataaggcaccaaatatggtgagcaatgttcggagtacgaagggcaagtcctccatgcgtgaaggagggatatcctctatgagtactgtgatgtggaagtaaagtccaggt

SEQ ID NO: 9442 - DNA, 400 bp, Glycine max
  unsure at all n locations
agcttaaatacaactcccgaacttagaattttcattntgaccagtttccttcggtttttccgatgttttccacaaataaacgttggtggcgactccgcgcatctttcctcctttggaaagcgcacccgttagcttcgccttcgctcgcccttaaaagggcacgttgcgacacctatcaacaacaacaaatatggaatccttaccattacttgttctaggcagccctaaaacaaagtccattgataaattaatccatggagaatccgaaattggtaaaggggtatacaaaccataaggcattacctttgacttggcctttntgcaaacaatacaacgctcacanaatttctgcacatccttcttcatgttaggccaataaaaatgctctttcaatgtatct

SEQ ID NO: 9443 - DNA, 412 bp, Glycine max
cgtaaagcttttggtgggaaatgatagtgagactcaactcggataccaaccttgcgctacaataattgcagcaagacccactatccacaatgggagaacaatttttgtttaaaaccttgcatcttatatgaaaaatgttctctctttcggtttaggctaggtcacaagattgactcccaaggagccttctcaccattagaagatcaccttcttcataggggtaaaccttttcaatatgctcatcacccttggcttcacccccacttccacttgaaaaaggagaagaagtagcctcctcttggctactatagatgtcttgatccctcatgatcatggttttctttgtggggcatcgagaagcaatgtggcctatcccaatacatttgaagcatttgatgttactagttctatc

SEQ ID NO: 9444 - DNA, 388 bp, Glycine max
tataattgaacaacgaaagctctcaagagatgcaaatggtcataacttatcacacggaagtccgattcaggcgcataatataccgagacgctcgaaattgcacaacggaagccctcaagaaattcaaatggtcataacttatcacacggaagtccgattaaggtgcatagtatatcgagaagctcataattgaacaacgaaagctctcaagaaattcaaattgtcataacttatcacacggaagtccgattcaggcgcataatatatcgagacgctcgaaattgaacaacgaaagctctcgagaaattcaagtggtcataactcttcacacggaagtccgattcatgtgcaaaatatatcgagacgcttgaaattgaacaacagatgc

SEQ ID NO: 9445 - DNA, 247 bp, Glycine max
agcttgaaattgaacaacggaagctctcgagaaattccaatggtcataacttatcacacggatgtccgatttacgctcattttttatccagatgctccaaatcgaacatcgaaagctctcgataaactcaaatggtcatgggttattacaccgacgtactattttggcgcataatatgtgggggcgctgaaattgagcaacgcaagctgtggagaaattcataaggtaataacttgggccactgatg

SEQ ID NO: 9446 - DNA, 444 bp, Glycine max
cgctatcaggaccttgaaactcagcttaacaaaggcatgcgaaatgggtggaattcctagagcaattcccttatgttatcaaacataaaaagggaaaaggtaatattgtagccgatgctctttctcggcgtcatgcattactttctatgcttgaaacaaaattgattggtcttgaatgtttgaaaagcatgtatgaaaatgatgaaacttttggagaaatttttaaaaattgtgaaaaattttcagaaaatggtttctttagacatgaaggctttcttttcaaagaaaacaaattgtgtgtgcctaaatgttctactagaaattttcttgtttgtgaagcacatgaaggaggtttaatggggcattttggggtccaaaagactctagaaacattacaagaacatttttattggcctcatatgaaaaaggatgtgcagaaatttt

SEQ ID NO: 9447 - DNA, 433 bp, Glycine max
  unsure at all n locations
agcttgtcaaattagtgtatggattgaaacaagctcaagagtttggtatgaaagaccaagttcatttttagttcaaaatttattctccaaaggaatagcggatattacaccattcataaagacttagaaaatggatctgttgatagtatagatctatgtagatgacagcatctttggtatttcctcaaaaaggatgtgcaaacaattttttgagctaatgaaaggaaaatttaaaataagcatgatgggagaactaaagttctttctaagggctttaaatcattcaaaagaggtttagaatggatgaaaccagaccagtggctaccctcatgcatccatccactgttagtgataaagcagaanagaaaagcaccaatagtgcataccaatttcatgggaaatcactagtgtcataatcttcaagaaacaacac

SEQ ID NO: 9448 - DNA, 405 bp, Glycine max
ttgagcaaattcaaacgacaataaatttttactctgatgtccgattgagtctcgtaatatatcgagaagctcgaaatggaataccaaagctctgagcaaattcaaacgacaataactttttactcggatgtcttattgagtcccataatttatcggaacgctcgaaatagaataccgaagctttgagcaaattcaaacgacaataacctttttactcggaagtcggattgagtcccgttatatatccagacgctcgaaattgaatgttgaagctctgagcaaattcaaacgacaataacctttttactgatatgtcggatagagtcccgtaatatattgagacgctcgatatggaataccgaatctgtgagcaaattcaaacgacaataactttttactcggatg

SEQ ID NO: 9449 - DNA, 355 bp, Glycine max
agcttcaacattcaatatcgagcatttcgatatattacgggactgaatcagacatccgagtaaaaagttactgtagtttgaagttgctcagagcttcaacattcaatatcgagcgtctcgatatattacgggactgaatcagacatccgagtaaaaagttaatgtcgtttgaattatctcagagcttctgtattccatttcgagcgtctcgatatattacgggactcagtcagacatccgagaaaaaagttactgtcgtttgaatttgctcagagcttcgataatcaatttcgagcgtctagatatattacgggactcactcagacatccgagtaagaagttattggcgtttgaa

SEQ ID NO: 9450 - DNA, 304 bp, Glycine max
tttaaatgttttcaatgttttagaaagcatgtaatcggttacacatggcttgtaatcgattaccagtggtttggaaaattttaaaacaaccataagaaatttgaatttaaatttcaaagttgtgtaatcgattacagtaagttggtaatcgattaccagtgtttaaaaattcaaatttcaaatgtgaagagtcataactcttcagaagtaattgtgtaatcaattacaccattatggtaatcgactaccagtgagtagttttgaaaaatattcccaacaatcacaacttttcatttgaattttg

SEQ ID NO: 9451 - DNA, 427 bp, Glycine max
  unsure at all n locations
agcttctggtgggacatcttgacttgctttccaatctgacattcaccacagattctgccttcttctattttcagattgggaatgcctctaacagcacctttgtcaatgattttcttcatgcctcttaagtgcagatgtccaaatctttgatgccatattttgacttcatcttctttggaggatagacatgtggaggagtaactggtttcttgaggtgtccataggtaacagttgtcctttgatctgctgcccttcattagaacttcactcttctcatttgtcaccaagcattctgactttgtgaagtttacattgaatccttcatcacacaactgactgatgctgatcaagtttgcagtcagtcccttcaccagcagtactttgttcagactaggaagtncatcatggactagctttcccattccag

SEQ ID NO: 9452 - DNA, 408 bp, Glycine max
tggatgtttaacacaatatatacagagattcagattattacttacagttttaaaagtcgagaattaaaatcaaagatacttgcttttaaggagctaaaataagaataccattaacccttatcttgaaatacttagttcacttctctagctactttctttgacattcatgtatatatgcactataaagattaaataatggagtactaaggacttatctagttatctaccacaataaatatatctctcaacttcaacccaatatatagtattataaacggctaaatattcccaaaacagaatatataaaaagatttattttgatgattatcaatataaaaatcgttctattaatcaattgaaaatcatcataactctactgctatatatggtaatattctaataaataat

SEQ ID NO: 9453 - DNA, 413 bp, Glycine max
tgatgtttgtgttgaatgcattaaaggtaaacagaccaaaagtaagaaattatgtgcatatagagctacagacgtcttggaattgatacatacagacatttgtgggtcatttcatataccttcatggaatggttaacaatattttatatcattcatagatgattactccagatatgcacacctgtatcttatacatgaaaagtcacaatccctggatgtgttcaaaacatttaaagttgtagttgaaaatcaactcaacaaaagaatcaagagagtcagatctgaccgtggtggtgaatactatggcagatatgacggttcaagtgaacaacgtcctgggccttttgccaggtacctagaggaatgtggaatcgtcccacagtacacgatgtcgaggtcacctagcatgaatg

SEQ ID NO: 9454 - DNA, 388 bp, Glycine max
gatttctccagatttacctgggtcaactttatcagagagaaatctgacacctttgaagtattcaaagagttgagtctaagacttcaaagagaaaaagactgtgtcatcaagagaattaggagtgaccatggttgaaagattggaaacggcaaggttactgaattctgcacatctggaggcatcactcatgagttctctgcagccatcacaccacaacaaaatggcatagttgaaaggaaaaacaggactttgcaagaagctgccagggtcatgcttcatgcccaagaacttccctataatctctgggctgaagccatgaacacagcatgctatattcacaacagagtcacacttagaaaagggactccaaccacactgtatgaaatct

SEQ ID NO: 9455 - DNA, 392 bp, Glycine max
  unsure at all n locations
tgatgatttcctataggcatatanaacagccttcaaaactcccattggcatctctttgtttcaaatggtgtacgaaaaagtgtgctacctaccaatggagttagaaattaaagctcattaggccatgatgttcctcaactttatctttatagcatccagagagaaaaggaaggtataactacaagaacttaaaaaaatatgccacaacgcatatgatttatccaagctctacaaacaaagaaccaataggaaccatgacaaaaagatcctctacagagaatttaggcccaaacttcaagtattgctctacaactcaagattaaagttgtttcttggaaaattaaaatcaagatggagtgggctttttactatcaaagacattaagccttatg

SEQ ID NO: 9456 - DNA, 399 bp, Glycine max
agctttgacgtttgtgttgaatgcattaaagataaacataccaaaagcaagaaattaggtgcatatagagttacagacatcttggaattgatacatacagacatttgtgggccatttcctacaccttcatggaatggtcaacaatattttatataattcatagacgattactctagatatgcatacttgtttcttatacatgaaaagtcacaatcattggatgtgttcaaaacatttaaagttgaagttgaaaatcaactcaacaaaagaataaagtgtgtcagatctgaccgtggtggtgaatactatggcagatatgacggttcaggtgaacaacgtctagggccttttgccaggtacctagaggaatatggcattgtcccacagtacaccatgccg

SEQ ID NO: 9457 - DNA, 431 bp, Glycine max
tgaatgcatgtaacccaccatcttctcatagtagaacactagtaacgtgtcttctatcattattatcatctccctatccatcattgggggcgctacttaagtttccagattcctccacctttgggtgtattctttgaaagattcatcctccttcttatacatgttttgtagctgcattttattcggagccatatcagatttgtactgatactgcctaatgaaggcaaccattacgtccttccaagaatggattcgggaaggttccagattagtataccaggtgacggctgccccagtaagactttcttggaagaaatgcatcaataatttttcatttttcgagtatacccccattttcctgttgtacatcttcaagtgattcttgtggcaagtagtccccttgtatttatcagaatccagcaccttgaact

SEQ ID NO: 9458 - DNA, 487 bp, Glycine max
taacaaaaggcatgcgaaatgggtggaattcctagagcaattcccttatgttatcaaacataaaaagggaaaaggtaatattgtagccgatgctctttctcggcgtcatgcattactttctatgcttgaaacaaaattgattggtcttgaatgtttgaaaagcatgtatgaaaatgatgaaacttttggagaaatttttaaaaattgtgaaaaattttcagaaaatggtttctttagacatgaaggctttcttttcaaagaaaacaaattgtgtgtgcctaaatgttctactagaaattttcttgtttgtgaagcacatgaaggaggtttaatggggcattttggggtccaaaagactctagaaacattacaagaacatttttattggcctcatatgaaaaaggatgtgcagaaattttgtgaacattgcattgtatgtaaaaaggcaaagtctaaggtaaagcctcatggattgtatactccattg

SEQ ID NO: 9459 - DNA, 469 bp, Glycine max
agcttgtcaaattagtgtatggattgaaacaagctcaagagtttggtatgaaagaccaagttcatttttagttcaaaatttattctccaaaggaatagcggatattacaccattcataaagacttagaaaatggatctgttgatagtatagatctatgtagatgacagcatctttggtatttcctcaaaaaggatgtgcaaacaattttttgagctaatgaaaggaaaatttaaaataagcatgatgggagaactaaagttctttctaagggctttaaatcattcaaaagaggtttagaatggatgaaaccagaccagtggctaccctcatgcatccatccactgttagtgataaagcagaaaagaaaagcaccaatagtgcataccaatttcatgggaaatcactagtgtcatagtcttcaaagaaacaacacaattgccatcaaacaccacttcattagagatcata

SEQ ID NO: 9460 - DNA, 368 bp, Glycine max
agcttaaatacaactcccgaacttataattttcattttgaccagtttccttcgggttttccgatgttttccacaaataaacgttggtggcgactccgcgcatctttcctcctttggaaagcgcacccgttagcttcgccttcgctcgcccttaaaagggcacgttgcgacacctatcaacaacaacaaatatggaatccttaccattacttgttctaggcggccctaaaacaaagtccattgataaattaatccatggagaatccgaaattggtaaaggggtatacaaaccataaggcattacctttgacttggcctttttgcaaacaatacaacgctcacaaaatttctgcacatccttcttcatgt

SEQ ID NO: 9461 - DNA, 362 bp, Glycine max
tatgctacaaacatctacaatagacctcctcaacctcagcaataaaatcagccacaacaaaacaattatgacctctccagcaacaggtacaatcccgggtgagggaatcatcccaaccttagatggtcgaatccttcacaacagcagcagcaacaacaacagccttattttcaaaatgctgctggcccaaccaaaccatactttcctccaccattccaacaccaccaccaccattaccaccagcctaaaaaccaccaaccagtgaaggttcttcacaaactttccttgaaaaacttgggaaggcaatgacttttccaaaaaatgcagtttcaccaaaaaacaaaaccctcattttaaacctt

SEQ ID NO: 9462 - DNA, 375 bp, Glycine max
tctaaactttatacaagaatgaaactctgatgccacttgttagacaagtggcctcagatatcttaagaagggggggttgaattaagatattccaaactacttccccaattaaaatctatttcactttcttttcaagttataaattcccttaacaatgaacttcttaaatattaattcaaataaaacaatttgaatatgaatataaagcaataataaacaaaggagattaagggaagagaaagtgcaaactcagatttatactggttcggccacacccttgtgcctacgtccaatccccaagcaacccgcttgagagttccactatcttgtaaattccttttacaagttctaaacacacaaggacaatccttcctt

SEQ ID NO: 9463 - DNA, 312 bp, Glycine max
tatacagcctacctgcatgcatgctagctaagtcgactgtgccagacagtgcttcttaatgcctctaactcttcgaacccactcccgctcgttctcactaagcattcgagctgattctaacttcgcctgataatttgggttgcgatcgcaaagcactgactgtcacaaacttatatgtatctttcacataataagtataccataccctctactatatcccaagcatgccaacgactgcaatcatgatgataatatgatccatgccgactactattttgcgatagtggaacatctgcatcttgtaccattgat

SEQ ID NO: 9464 - DNA, 460 bp, Glycine max
agcttctaaactttatacaagaatgaagctctgataccacttgttagacaagtggcctcagatatcttaagaaggggggttgaattaagatattacaaactatttccccaattaaaattctatttcactttctattcaagttacaaattcccttaacaatgaactcttaaataatgattcaaatagaacaatctaaatataaatataaaccaataataaataaaagagtttaagggaagagaaagtgcaaactcggatttatactggttcagccacacccttgtgcctacgtccagtccccaagcaacccgcttgagagttccactatcttgtaaaatccttttacaagttctaaacacacaaagacaatcctttctttgtgttcagaattcttttacaacaagagaaccctcgtcttcttatcccttaaagaattagaaagaagagaagaatgaatctc

SEQ ID NO: 9465 - DNA, 346 bp, Glycine max
agcttatcccatgcctccttagcagatgttgcataagaaatcttctcgaatgcatcattttttaatgcttgatagatgaggaatagagctttattgtctctctttcttgaatcctttaacgtctccttttgtacttgggatagcgaagtctcatcttgtgactccttttagcatttttcaaccatttcccaaacatcatgtgctccaagaagggccttcattttgatgctccaaatgacataggtgctcccctttagaagcggaacttgaaaggataccgcttcattgcttgccataactatataggaatttcttatcagaacctaatctctgataccactatgtt

SEQ ID NO: 9466 - DNA, 486 bp, Glycine max
tgttagtgtgtgtttaaatgtctaaaataaaagaaaaattatgtaataatgtttctttgaagaaaattttatcagtgaaaataaaatattttgaatatgaattttgtagtatttttttaattagattaggttggtgttaatgatttattagtgtgttaataattcatgaacgtttcaactttcatttaaaaaaattagtagatcatatttatttgaagaaagtattttgagtatgaaatttattttaatatgaagttgtagtatttttttaattagattaggttcatttttttgtgttaaaaattgataagcgttcaagttgaaagtgttatttgatgatgttttgttgtttcttgtatcatatttaatttaatatatttgtagtaattttgtaattacctattttcattttgaaagtattattgttaaaattaattatttttactactaacttcggtcatgaattattttattttgtggtaaaaa

SEQ ID NO: 9467 - DNA, 489 bp, Glycine max
tagcaaatggacttgggtgttgcccaatttcatcgtatcttttgtaatactcaccacctctattagatctaataattttcacttttttgtctaattgtctttctactttattcaagtaaatttctaaggcatccattgcccgagatttctcatgcagtaagtaaacataaccataacgtgaatagtcatcaataaaggtgataaagtatctttcctttccgaaagaactaacatcaaaaggtccacaaatatcagtatgcacaatttcaagaagctgagtgcttcttgtagctcctttctttgtatgttttgttgttttcccttgatacaatccacacaaatatttagatccgtaaaatctagatcatgaagaatttcattctttattaatcattccatcctttctctagaaatgtgacctaaacgtttatgccacaagaaagcagatcggtcattcactaaactacgtttagtgataacattatgatg

SEQ ID NO: 9468 - DNA, 465 bp, Glycine max
agcttatcaaaccaaagcaacttctatctagaacaacttgaagagctatattagaagaaatttcaattgttgaaatgtatagtaagtcggtcatctagtgacagcataacaaagtcacaaatactagtactaagttgaagaacatattgcagtatcgagtgtttgctggttacatattttcaggttatatacctggaggagttccacaacacatattgcggtcatcaatatgctcaacttcaagaccaatgaaccatgcaccaagtgagacatcttcattagcatatttatgcaaaatcggcctgcaatcataattagactccacatgaaatttctatatgtaagagaatattctatgagaaacatggactgatccccgaactgagatttcctattaggaaaactttaagtttatgaaaaaaaaagtttctttattttaatcaaatcttgcaaaatgagtatttt

SEQ ID NO: 9469 - DNA, 484 bp, Glycine max
  unsure at all n locations
tgtaggcactttgaacgcaatattctccattattttccatcctccaaatgactattttgtttttgtaccttgcataataggcacttgaagaatggtattcacatcccttanattgaatatttgattaatcacatccatgtttcaacttccatgtgaagtatccataatatttgttactttgagatttttcatcccattgattataagagtttcaatagtgagattttacttcattctcaactagggttcgttccaaataccaatattagtaccatttcccaactttcatttatatccttcctttatgaccattttagaagagaacatacttcaccatgtaaatgatgggttgtgccttactaaagcttccataaactctccccttaagaaatatttagctttgatgactcttgacagtaaaacatttagcatagaaaagatcctccattattgctttcctaacatggcaaagttgaaagcaaat

SEQ ID NO: 9470 - DNA, 383 bp, Glycine max
agcttttagggttaaagtctcacgattgtcacgtgctcatgcaacaattgttagtcgtggctatatgagacatcttgccaaacaaagtcaggttaacgataactcgcctgtgctttttcttccattctatatgtagcaaagtcattgatccaatcatgtttcatgagttggaaaatgaggccgcaattatactgtgccagttggagatgtattttccccctgctttctttgacatcatgattcacttgattgcgcatctggtcagagaaatcaaatgttgtggtcctgtttatctacggcggatgtaccggttgaccgatacatgaaaatcttaaaagggtatacaaagaatctatatcacccaccaacatctaattgtgaga

SEQ ID NO: 9471 - DNA, 493 bp, Glycine max
tatgtgagagactctataaattactctagctggaacacatgacctcgcaaaatgccctgacttcccacattaaagcaggtgctttgtacaccgacgccgtgggtgtgatcacgaccacccaatcacccttcttacattccgcattccctaccccttctacctacctccccacacctaaaactacctccacctgttcctgcaccgccaatgttgtccttcccgggggcgcagaacctcaccatgtgtccaaatgcgccacacctaatgcatgatccgactccatcagcacctgaaatggctacaatgccggcgtctcctggcacacaatctcttatgaggtggacgaacccctccgatttgaaacaacctccgccgatggagccttaaccgacaccagaaataccgctcctgttgcaatccctggttaggggtacaaacttgccaaactggtagcacgcggagccgcctccgacattgggcctggcgccgaaac

SEQ ID NO: 9472 - DNA, 439 bp, Glycine max
agcttcgaaattgtggatgagccaaccatgaaattgggacaatgaatcttgtcctgttttcaccaacatacactgcaaagtgcccttttggcacatcttctggaagaccaccctcttcattgaagccctgttgctgctttttcccaaagctcgaacaccttctcacaatttgctttatcacatctgctagggagagctgattggatttttagatggccattgtgaaattgattgacagtactctttgcacaccttgaagttgttaactttgaaagggtctcttgagggcgctgaaagtgtgtgattcatggggcgagtttggagaggctttatttatcgttgggacattgggatgggtggaaaatagaaacttgagttttaaaaaaaacacgggtcacgttgatgtggggacatgtatcataccacaccctaatgactc

SEQ ID NO: 9473 - DNA, 436 bp, Glycine max
  unsure at all n locations
tgtgggattttgtgatagtgattttgccggagatgttgatgatagaaaaagtactaccggatttgtattttttgtgggtgattgtgtttttacatggaattctaaaaaaaaaggcattgtgacactttctacttgtgaaaccgantatgtagctgcaacttcttgcacatgtcatgccatttggctaagaagattgttggaggaacttcagttgttgcaaaaggaaagcacaaagatctatgttgataatagatctgcacaagagcttgccaagaatccggtgttccatgaacgaagtaagcatatagatacaaggtatcatttcattagagagtgcattaccaagaaagaagtagaattgactcatgtgaaaactcaagatcaagttgcggatattttcaccaagcctctcaaatttgaaaattttcgaagattg

SEQ ID NO: 9474 - DNA, 492 bp, Glycine max
tgaacaattcatactcaaaatgattgttagtcttggcaagcttggttgctaggctctaccatcaaaaattgcatgggagcaacttcatgtttttgcactgcatgcatttttgttgccttttcctccaacaccttcattttctacttttccagctccttatgtctatgccgtttcttctccaatttttggtcaactgcaacttcaatgcttttctttaaaaacttcttcaatgtaaatggtatcttctacaatttttcttgtccaagaaaaactcaaaacaatggtgatgtggaaaggaaaaataaatccttacaagagatggctagaacactgattagtgagtatagcatacaaaactatttttgggaagaagttgttagtatagtctgctacattctgaatagagtttttatcagaaaggttttgagcaagactctttatgaacttgggaaaggaggaaaaccaagtgtatcttacttccacatttttggt

SEQ ID NO: 9475 - DNA, 429 bp, Glycine max
tgtaggcctaaaatcttcttcatcaatggattcctttgcttcttggaagataaatggcagcggaatggagaaggaagagagagaggagatgccactttaaggaaaagattagtctagaagaagctcaccaccataggaggccatggataagagcttggaggaagaaggagatgaatgaagggagaaggagagaagaacacgaaatttgtgctctaaaagagctctgaaatctgaagttaatattcaaatgatcaaagttcaaaaaaatgcaccacacatgacctctatttatagcctaagtgtcacacaaaattggagggaaatttgaatttcaattcaaatttcacttgaatttgaaattgaatttgtggagcccaactttggaacccaaatttcacttaattatggattagggaattttagttatgg

SEQ ID NO: 9476 - DNA, 504 bp, Glycine max
agcttcttatccaaggctcatcttggtggtgaagctccttcttccatgacttattccctagtggatggcacctcctctcacctcttctcctttgtcttccgctgcatctccatggtggaaaatcaccattaaaggacctcattgaagctcaaagatccagcctccatagaagccccacaagcaagcttccatcactgcctttgaggatcgaggatagacgaacaaagcacctaagaaggaaggaggttccattggtcaaggtgacctggggaggtacatcaggagaagatgccacgtgggaattagagagtcagatgcaagccgcctatccatccttgtttgagtcaagtaaatttcggggacgaaatttctaaaagggtaggagagttgttacaccctgagatattataagttattttcgatgtttaattgtatttatgtgttatttgactatatgatagacttgaatgagttaagtatgccttgacctaaatcatgtgtgaa

SEQ ID NO: 9477 - DNA, 452 bp, Glycine max
tatcccatgcttctttggctgtcgttgcgttggatatcttctcaaatgtatcttcatccaccgattgattaatgagaaaaagagctttcttgactctctttcttgactccttcaacgtctcctttacaccttggcttaccaaggcttcatcttgctcctcgaagccattctctacgatatcctacacatcttgagctccttgatactccaattatcatagctgttctttgagagcatcggcatttggaaaggaaaacctccattcgccatcttttgaggatcttgaagctctgataccactttgttggaaataaggctttttatgtttaggaaaagtgtttatgaatattggagactttgaatagaaccttgatagaaaggagaattctttatggaggagagaactttgtatttttgcttgataccaatgtgtaggattacatctctattta

SEQ ID NO: 9478 - DNA, 455 bp, Glycine max
ttgagaatttgagaacatgacaaaaacaagtgacagtaatatccaagatatacaaatgggtgttggtcaatgtaccacatttaatagtacaaactaaaagaacaagaaaaacagaccaatttctaggcgtctcagaaaaaactttaaacaagacagttcacctaataagtttttggattagtagtaatcatatttgtgtaaataaatagcttaccagagttcattggactccatcgctggaaccgaaaaggagatggtatgttgagaacagaagcaccagaaacactgttatgcctggaaatgggaagatattgcctccggaaaaaccttggcatccaattgccaatacatgataaagcacaaagaagaagaattaaagaaagcaacaaaaggggcacaagaacaagaggatttatcttcatctgaaaaagctccaagtcacgaagcccaaatct

SEQ ID NO: 9479 - DNA, 422 bp, Glycine max
  unsure at all n locations
agcttcaacatcagaccacttccagggtgctggaactacttcacatggacttgatggggcctatgcaagttgaaagccttggaggaaagaggtatgcctatgttgttgtggatgatttctccagatttacctgggtcaactttatcagagagaaatcagacacctttgaagtattcaaagagttgagtctaagacttcaaagagaaaaagactgtgtcatcaagagaattaggagtgaccatggcagagagtttgaaaacggcaagtttactgaattctgcacatctgaaggcatcactcatgagttctctgcagccatcacaccacaacaaaatggcatagttgaaagganaaacaggactttgcaagaagctgccagggtcatgcttcatgccaaagaactttcctataatctctgggct

SEQ ID NO: 9480 - DNA, 383 bp, Glycine max
agcttttaatggaagtcaagagcacgaaactgcgcggacaccgttaactggtgagcaggtcttccagcgggttgaacaccttaatactgtatttggaaagacccaaaagaaggataaaagtaagagttgcatatggaagaaaaggtccattttctttgatcttccgtactggtctgatctagatgttagacattgtattgatgttatgcatgtagagaaaaatgtatgtgacagtgtcattgggacactccttaacattcagggcaagacgaaagatggtctaaatacccgtcaagatctagctgacatgggcatacgatcgcagttgcatccaaggtctgatggtaaaaaaatatacttgcctccagctggtcatactttat

SEQ ID NO: 9481 - DNA, 424 bp, Glycine max
tcaacattcaatatcgagcgtttcgatttattactgggctgaatcagacaaccgagtaaaaagttattgtagtttgaagttgctcagagcttcaactttcaatatcgagcgtttcgatatattacgagactgaatcagacatcagactaaaaagttattgtcgtttgaattatgtcagagcttcggtattccagttcgagcgtctcgatatattacgggactcaatcagacatctgagtaaaaagttattgtcgcttgaatttgctcaaagcttcaacattcaataccgagcgtctcgatatactacgggactcaatcagacatccgagtaaaaagttattgacgtttgaatttgctcagagctttggaattcaagttcgagcgtctcaatatattacgggactcaatcagacatccgagtaaa

SEQ ID NO: 9482 - DNA, 337 bp, Glycine max
agctttgagcaacttcaaacaacaattactttttactcggatgtctgattgagacccgtaatatctccagacgctcgaaattgaataccgaagctctgagcaaattcaaacgacgataagtttttactcgtttgttcgattgagtcccgtaatatatcgaaacgctcgaaattgagaaccgaatctctgagcaaattcaaacgacaataactttttactcggatgtttcgattgagtcccgatatatccgaacgctcgaaattgaatggtgtacctttgagcaaattcaaacgacaataactttttactcggttgtctgactgacacgcgtaatatt

SEQ ID NO: 9483 - DNA, 493 bp, Glycine max
tcctcaagtgtcacattctctagcctctttgttgagcatctgttgagcagataggctgttgttgacactacttcaccccaaaactcctttggcaagtcaaaattccttagcatacacctggtcatgttgactatggttctattgagtctctcagatacaccattgtgttgtggtgtatatgaaggtgtgatctcatgaatgataccctcatcctcacaaaatttctcgaattcatgtgatgcgtattcaccaccaccatctgatctgagtctctgaatcctgtttccactttgtgtttttaccatcaccttgaatcttttgaaggtgaaaaacacttcactcttccttcttagcaagtagatccacacttttcttgagtaatcatctataaaggacacaaaatatgaactaccccctagagaaactttctcaaaagggccacacacatcagtatagaccaaattcaaaactgctgaaaacttagttggtactt

SEQ ID NO: 9484 - DNA, 485 bp, Glycine max
  unsure at all n locations
agcttaaaggaagtgaaagaattagtatgggcaaaaatgtctccgcattgattggtaaatctgttccccaaatccctgaaaaatgtaaagatccaggtacattcatcatcccttgtattatagggaacagtaagtttcacaatgccatgctagatttaggagcttctattagtgttatgcctctttctatttttaattctctatctcttggtcctttgcagtcaactgatgtggtaattcatttagctaatagaagtgttgcatatcctgctagtttcatagaggatgtcttagttagagttggtgaactgattttccctattgattttttatattttgaatatggaggagggattttctaagggatcagttcccattattttatgcagaccttttatgaaaactgcttgaacttngatagatatatatatgcacgcacactatctatggaggttgatgatataactgttcttttaatattcttg

SEQ ID NO: 9485 - DNA, 401 bp, Glycine max
agcttgaagacaagactatacgaggtatcttccttgggtatagcaatatctctaagggctaccgtgtctacaacttgcaaactaagaaactcgtcatcagtcgagatgttgaagttgatgaatatgcttcatggaattgggatgaagaaaaagtggagaagaacgttcttatactcgttcaactacctcaagaagaagatgaggaagaaaacccaggtgaaccaccttcacctccatcacaacaacaagaagagatggagtatccatacagaaaaatttgcaccagtagctcgtcttaataagacaaagctcaactctgatggcaccatacagaaacacaaggcgaggctagtagctaaaggttacttacagcaacccggaatcgactacaatgagacatt

SEQ ID NO: 9486 - DNA, 495 bp, Glycine max
tgataagaatggatcgaactcctctcctttaaaataacagaattaatggtaataaggagtgatatttgaaagaaagccacaacatttatttttcttacttatttaaaagttaatttacaaagtaaaaaacttggaacaattcgtttaatattaattagatcttgactttaatatcttcaaattaattcttttaaaaaaaatatcttcacattaatgtgcatgaaacaaaacaaaaataattcaattaaagaaacatctaccttataattttagagataattggcgattcccgatataaaatacaaagacagtcgacttttcaattttttggtagatggcaaatattggatttggtctttcatagaatttcaatgaactcaaagtattcctggtaaggtaagtatttttgtacattgaacatttttttatacatataagtttaaaaatatttaaaagaagattaatttaattgatataatgttaaaaaaaatgaat

SEQ ID NO: 9487 - DNA, 453 bp, Glycine max
agctttgcatacttccccgccgcgtttagaagatcacccgcggcgtccgccaactttgccttgtccaccttgtcgctctccctctttagggcggactgcgccgcctccgccaccagcttcgcgctcgcgatgagctcggtggtcgactgctcgctgggtggcttaatgttatgggattcttcggaagccattgatacaatgttacttgcttattgcagcttttgagagaactgttctgtgttatttatagatgtcactatgatattagtataaaagtgtatctttcaaataataataaactttatatttaattatttatttacttgctatagcctctaaatttatctttttttaatccttaaaagaaatttttaagtttacattttaaattattaaaaaatagaatatttggtgttaaaagtttaacaaatttaataatattaatccttttta

SEQ ID NO: 9488 - DNA, 493 bp, Glycine max
  unsure at all n locations
tttagcaacatttttatttaatgttattgaaaaaatattcctaaaagccacatgtgtagtagtgataaatcatgcatcttaatcgttattttgaatagaataagaaattttagcaaagagtaaagagaaatacaaacaagaaagtctacgcacaatgaagtgcagaaaaaaaaactaagaatgcaacaagaatgcccaatcccatttatcatagagcttagtgaatctaagattcacattggttccaaacactaaagaattaagtttagtaattttggaaatcattgagtactatttgttatatttatttgaatgcattgatgtgttaataatattattgaatgctttctttattgagaatattacatcaataaattgtggttgatcttttagaatttattttattcactgggattaatgttgaaagtgaggagacttgaacacttagttttcttttaattacatttgtttcagaatanagtgtacgatgtgg

SEQ ID NO: 9489 - DNA, 396 bp, Glycine max
agcttgtaggcattggatattctttattaatggagtcatttgcttcttgatgttcattggcagcagaatggagaaggaagaaagatgattggagacaccacttcaaggagaagatgagtcaaacacaggctcaccaccataggaagccatggataagagcttgaaggaggagaaaatgaggggaggtagaaggagagaaggagcacgaaattttgtatctcaaatgaggtctgaactttgaattataattttcaaatgatcaaagttgaaaaaacgcacacacctggcctctatttatagcgtaagtgtcacacaaaattggagggaaatttgaatttctattcaaatttcacttgaatttgaaattgaatttgtggagcccaaaatttcactaaa

SEQ ID NO: 9490 - DNA, 266 bp, Glycine max
tgctttgagaaaaatctaacgacattttcttttaactcggatgtctaatcgagccctgcaatatatcgagacgctcgtaattgaaaacggaagctctaagaaaagtcaaacgacaataacttttaacttggatgtctgatcgagccctataatatatcaagacgctcgaaattgaaaacggaagctctaagaaaagtcgaacgacaataacttttaactcggatgtcctattgagccctgtaatatatcgagacgctcgacattga

SEQ ID NO: 9491 - DNA, 377 bp, Glycine max
ttgatgcaacatttggagaggttaatgaaacaaccagatgatgcgctccatgagaggttggatcaaatggagaatagagatcataatgaagaacaaaggaggagaaaagggaatgattgtgttcctagacaaaaccgaattgatggtattaaactcaacattcctccatttaaaggaaagaatgatccggaggcctacgttgagtgggagatgaaaatagagcatgttttctcatgcaacaactttgaggaggaccagaaggtgaagcttgccgccacggagttttccgactatgctcttgtgtggtggaacaagctaccaaaggagagagccagaaatgaaaagccaatggttgattcatggacggagaagaaaaa

SEQ ID NO: 9492 - DNA, 326 bp, Glycine max
agcttatgaccattcgaatttctcatgtagtttccgctgttcaatttcgagcgtgtagatgagttatgtccccgaatcggacatctgtgcgaaaagttatgaccattcgattctctcgagagcttccgttgttcaatttcgagcgtctcgatatattatgaccccgaatcggacatctgagtgaaaacgtatgaccattccattttctcgagagcttccgttgctcaatttcgagccgtctagatgaaatatgtcccccaatccaatcatttctagtgaaaacttatgaccattcgaatttctcgagagctctctgttgttcattt

SEQ ID NO: 9493 - DNA, 388 bp, Glycine max
tttcatggggctctggataaatttttagggtggaggatacaccaacaatgctaggcaatcaattcgtggggctccagactcgatgctggaggatgcatgaatgataagcatttcatagggctccggataagatttgaaggtggaggatacacgaacaacgctaggcaaccaattcgtggggctccagactcgatggtggaggatgcgtaaatgacaaccaattcatggaattccgaaaaagatttaagggtggaggatagacgaacagcccctagaaatcaattcgtagcgctacagactcgatggtggatgatgcctgaatgatttgcattttaaggagatccggataaggattgatggtggaagaaaaaagaaaaccctctaggac

SEQ ID NO: 9494 - DNA, 282 bp, Glycine max
agcttggtccccaacactctgttcaagctctcccaaaatctagaggtaaatctaggatctctatcagatactatgctagatggcacaccatgtaacctgacaacctcacttatatacaaggtggtcaacttcttcaaggaaaatatgatattaatgggaacgaagtgagcagacttaatcaatctgtcaacaataacccagatagaatctaaacctctaggggtcctaagtagtcctaccacaaaatccatggaaatactgttccacttccactggggtatc

SEQ ID NO: 9495 - DNA, 490 bp, Glycine max
  unsure at all n locations
tttctnnttatgaaacatatngaaactgatttgctagtcttctatggccatttgtagtttcctcttccccatgtctaccacacagcttgtggtggatagaaaaggtcttccaagaattaagggaatgtcagcatcttcatcaatgtccatcactacaaaatcagctggaaagatcaaatgtttgaccttaaccaaaaggtcttcgatcactccatatggtcttgtgaatgagcgaccaaccatttggagggtcatgcgtgtggcaattatctctatctctccaagttgccggcacatggagagagggcattaattgatactagctcccaagtctatgagagctttacccacaaacaccctttgccaatggaacatgggatagtgacactttccggaatctttgtgcctttaggggaaagatgcgttgaatacccacactacaatttcctttcaatactaatcataccctggggatttcccggtttttttt

SEQ ID NO: 9496 - DNA, 610 bp, Glycine max
agcttgtaataaataaataaaaacaaagttctttacaagtctttacttaaaacggaacaaggaattaaagaatgaccaagcttgattacacacactccctaattgttttgtttgttgttgctataattagatcatgtcttacaaaaaggagatctaatttaagaacatttaaatacaaaagtgtcatctcttactttttatctctagtatgaattatataataacatcatatttacgtttaattatttgacattcgaattaataaactttaaatacaaagaaatttaaagtggtatggacgatcgcaccacagaaatatgtaatcctttaacttcaaattatgtagcatgaaaaaatctaaaataacaagaatggttagtttactgaaaagatcctattataattcgtaaagtgaactaatcaatatttataaatacgagtttttattttagaacatatctaatatattttaatcttgggaaaagtgtgactttatcattatttaatatattaaaaccttaaagctaatcaatttttttttacattattatctccccaaaaaattatcctaaatttttttatggaaaaaattttttaaaatttagctttt

SEQ ID NO: 9497 - DNA, 381 bp, Glycine max
tcacatgattgatagtggtgttagatttggtcaatttgaaggcaagatatgggaggagtgataaaattttcactgaattgcttgtgttgttgaagaagatgatccctaaagataacaagttgttgaatattcactatgaggtgaagaaaatactatgtcctattagtatggagtaccagaaaatacatgcatgccttaatgattggataccaaaaaatgagtttgcagaaatgcataagtgccctacatgtggggtatcgtgatacaaagtgaaggatgatgactacagtaatgatgaaagcacacaaaaaaaccatccaacaaaggtgtgttgctatcttccaataatttcaatgcttaagtgattctttgcttatggag

SEQ ID NO: 9498 - DNA, 457 bp, Glycine max
  unsure at all n locations
agctttagttgccccttattaccttaaataaacaaagcctgtggtaactatgaattcacaaaggtatcacaattaaagaaattcaaatacttcaaggattgcagacaatgtggtcacaactaaaaaattgcagagctaaaaacttctaactaaatgcttaggtgtaacataaatgggaaaatcaaaattttgatacttactgggtatagttcaaaatcaatatctggcccaatgtttaatatgttcagaacctcagcttttgccaagtcatcctatttaacacttgtcaagaactcattgatgctctctcttgtttgaacagaggcagcagtgtcaaccaaataatcataaacctgctagatatacaacacattcatctaccaaataaaacttacaagtattcctatttattagaaaaaccaaatctaaccttgtatncagactatgctactttggc

SEQ ID NO: 9499 - DNA, 490 bp, Glycine max
tgtaatcgattacacacaaactgtaattctattaccagagcatattttcagaaaatattctcaacagtcacatctttttatttggttcttgaatggctatcaaaggcctatatatatgtgacttgagacacgaatttgaaaagagttttccaaaacaaaaaggtcttatcctcttaaaaagcaaaatccatttatcctcttacaaattccttggccaaaacacttgtgattcaataaggaattatttgagtgctcaaattgttcaatctatctctttcaagagagatttcttcttgtcttcttctttattctgaaaagggataaagagatcgagggtctcttgttgtgaaagaattctaaacacaaaggaaggattgtccttgtgtgtttaaaacttgtaaaaggaatttacaagatagtggaactctcaagcgggttgcttggggactggacgtaggccccaaggtgtggccgaacccagataaatctg

SEQ ID NO: 9500 - DNA, 440 bp, Glycine max
agcttgaaatgttagccaacgaattgtattattataggccttgagtcataagcgattcttggcatcttgttctgaactttgcacatttatgatgttcttcatgtgctttgactgattcaacaagtctttacaagcctttattgcattgatatgtggcgagcaaggactatctccaatgtgattaacaaatgcacaattttttcagcattaacctttctacatgatctaaatccttgtatattaagacatttgatccaaaaatgatcactttgctttgtactgaatagatcgcataacagacagttaactttatcattaaatggggaatactttatcccaaaatgaaacattttaaaccaagtacattggaaatgccttggatcgttctctttaaaaaagggtaattttggaattttatttggtatggaccccctttgata

SEQ ID NO: 9501 - DNA, 313 bp, Glycine max
tataatatattgatacgctcgaaattaaacctcggaagctctccacaaattcaaatggtcataactattcacacggatgttcaattatggcgaatcacatatcgagacgctaaaaattgaacagcggaagctctcgagaaattcaaatggtcataacttttaacactgaattccgattcaggattataatatatacagacgctcgaaattaaacattggaaggtctggagaaattcaattggttataacttttcacacggatggccaattcgggcgtataatatgtcgacacgcttgaaattgaacaacggaa

SEQ ID NO: 9502 - DNA, 380 bp, Glycine max
ttgatgcaacatatggagaggttaatgaaacaacgagatgatgcgctccatgagaggttggatcaaatggagaatagagatcataatgaagaagaaaggaggagaagagggaatgatggtgttcctagacaaaaccgaattgatggtattaaactcaacattcctccatttaaaggaaagaatgatccggaggcctacttggagtgggagatgaaaatagagcatgttttctcatgccacaactatgaggaggaccagaaggtgaagcttgccgccacggagttttcccactatgctcttgggtggtggaaccagctacaaaaggagagaccaagaaatgaagagccaatggttgatacatggaccgagatgaaaaagat

SEQ ID NO: 9503 - DNA, 334 bp, Glycine max
agcttataatatattattacactcgaaattaaacatcagaagctctcgagaaattcaaatggtcataacttttcacccggatgtccgattatggcgaatcacatatcgagacgctcaaaattgaacaacggaagctcttgagaaattctaatggtcataacttttaactcggatgtccgattcaggcgcatcacatatagaggcgctcgaaaaggaacaacggtagctctcgagaaattctcatggtcataactttccacactgagggtcgattaaggattataatacctcacgacgctcgcaatttttcactcgtaagctctcaagaaattca

SEQ ID NO: 9504 - DNA, 381 bp, Glycine max
tctggtgggacatcttgacttgctttcctatctgacattcaccacagattctgccttcttctatttacagattgggaatgcctctaacaacacctttgacaatgatttttttcatacctcttaaatgccaatgtccaaatctttgatgccctattttgacttcatcttctttggagaatagacatgtggaggaataactggcttcttgaggtgtccataggtaacagatgtactttgatctgctgcccttcattataacttcactcttcttatttgtgaacaagcattctgactttgtgaagttcaaatggaatcctttatcacacagctgactgatgctgatcaagtttgcattcagtccctttaccaacaagactttgt

SEQ ID NO: 9505 - DNA, 403 bp, Glycine max
agcttgagaaactcatccaattccacagtatacaccatcagatgaaacccaatgaaaattttgaagcaactgagcgagccaaagatgaaccgaggccaaaccaagggccttcccaggacacactcttcttccagacccgaaaggtgccaacctcaaatcagaccccattatgctcacatcctcttccacaaaccgctcgggcctaaacttctcgggctcggcccacaccctctcgtcgtgggttatggcccacatgttcaccatcgcggtggtgcccttgagaatcacgtgcttgccgccaaccgtaacgtcgtgcacagcaaggcgagcccacgagagtagcgggcctggtgggtgcacacggagggtttcttttactatgcactgaagggagcgcaggttt

SEQ ID NO: 9506 - DNA, 432 bp, Glycine max
agcttaagctctttcaattgcacaatgctcttaatatttgaagagtatccttgtggaaccttcacccgacgaagacactgacaaaaacttatcttctccttcttggacaaagtatggcaggctgggggcaagtaaattttcttcccatcagaccttggatgcaactgtgatcttatacccatatcagctagatcttgacgggtattcaagccatccttcgtcttgccttgaatgttaaggagcgtcccaatcacactgtcacaaacatttttctccacatgcataacatcaatacaatgtctaacgtcaagatcacaccagtacggaagatcaaagaaaatggacctcttcttccatatgcaactctgaactttatccttcttttgggtcttcccaaatacagtgtttatgtgttgaacccgctgatatacc

SEQ ID NO: 9507 - DNA, 484 bp, Glycine max
tcaagaaaaagatggcctcagcaaactccttatttccataagggaattctatcaatagacctccaatctttaatggagagggttaccattactggaaaacccaaatgcaaatttgtattgaggcaataaacctaaatatttgggaagccataaaaatagggccttatatacccaccacagtggaaagaattacaatagatggcagttcatcaagtgaaagtataactttagaaaaacctatagatagatggtctgaagaggatagaaaacgagtacaatacaatttaaaagccaaaaacataataacatctgccctgggaatggatgaatatttcagggtttcaaattgtaagagtgctaaggaaatgtgggacactcttcgattaacacatgaaggaactacagatgtaaaaagatctaagataaatgccctaactcatgagtatgaattatttagaatgaatgcaaatgaaaatattcaaag

SEQ ID NO: 9508 - DNA, 399 bp, Glycine max
tgcacacaagattctccttgcctggcacttcaaaaccttttggttggggcatataaatgtcttccgctaaatccccatgcgagaatggagttctaacatctaactgctccaagtgaagattctttgtagctacaatactcagaataactctgatggtagtcatctttacaactaaagagaagatctgtgtgaaatcaattccttgttcttgctgaaaccctttcaacacacgtctcgccttgtatcttcttctaccgtcagattctttctttagcctatacacccacttattctgtaaagctttctttccttctggaaatgtaattaaaaaccatgtcttattcttctgaagggatgacatctcatgtttcattgctagctcccactaaatagagtcat

SEQ ID NO: 9509 - DNA, 420 bp, Glycine max
tcaacatcagaccacttccagggtgctggaactacttctcatggacttgatggggcctatgcaagttgaaagccttggaggaaagaggtatgcctatgttgttgcggatgatttctccagatttacctgggtcaactttatcagagagaaatcagacacctttgaagtattcaaagagttgagtctaagacttcaaagagaaaaagactgtgtcatcaagagaattaggagtgaccatggcagagagtttgaaaacggcaagtttactgaattctgcacatctgaaggcatcactcatgagttctctgcagccatcacaccacaacaaaatggcatagttgaaaggaaaaacaggactttgcaagaagctgccagggtcatgctttatgccaaaaaacttccctataatctctgggctga

SEQ ID NO: 9510 - DNA, 303 bp, Glycine max
acatctaactgcttcactagaggatactttgtagctgcaagtctcagaatagctctgatggtccatatcttgacaactacaaagaacatctatgtggaagagattcctcgttgttgctgaaaccctttcaccacaagtctcgccttgtatcttcttataccgacagattcttcctttagcctatagacccacttattctgtaaagctttcttttcttctggaaatttcaatataaaccatgtcttattcttctgaagggtggcatctatttttattgtagctccactaatagagtcattccct

SEQ ID NO: 9511 - DNA, 280 bp, Glycine max
tgaatcggacatccgtgtgaaaagtgatgatctttctatttactcaagagcttccattggacaatttcgaacatcgtgatatattataagcctgaatcggacgttcgcgtgaaaagcttagaccatctgtatttatcacgagcttacgttgttcaattactagccccttgacactttatgcgcctgaatcggatatccctgcgaaaagatatgaccatttgaatatctggacagcttttgatgtttaatggcagcgtttcaatttattattagcccgaat

SEQ ID NO: 9512 - DNA, 373 bp, Glycine max
tcaacattcaatttcgagtgtctcgatatattacgggtctcaatcagacatccgagtaaaacgttattgtcgtttgaattggctcaaagcttcaacattcaatttcgaggttctcgatatattgcgggactcaatcagacatccgagtaaaaagttattgtcgtttgaaatggctcggagcttcaacattcaatttcgagagtctcgatatatgatgggactcaatcagacatccgagtaaaatgttattgtcgtttgaattggctcagagcttcaacattcaatttcgagggtctcgatatttaccggactcaacagacatccagtaaaagttattgtcgttgaatggctcaagcttcaacatcaatttcag

SEQ ID NO: 9513 - DNA, 384 bp, Glycine max
  unsure at all n locations
tccatcaagttatgaccatttgaatttctcgagatctttcgtggntcaatttcgggcgtctccatatgtcatgtgcctgaatcggacctccgtaagaaaatttatgaccatttgaacttctctagagcttccgttgtttaatttcgagcttctcgatatctgatgtgcctgaatcggacatccgagtgaatagttgtgacaatttcaatttctccagagcttccgttgttcaattttgagcgtctcgatatgtgatgttcctgaatcggacctccgtgtgataacttatgaccatttgaactgctctagatcttcctgggatcaatttcgggcgtttccatatgtgatgtgcttgaatccgacctccgtgtgaaaagttatgac

SEQ ID NO: 9514 - DNA, 395 bp, Glycine max
ctaagctatgctgctacatttatatagacctcctcagcatttttctttcttctcagaataattatgacctttcgagcaatagatacaatccaggttggaggaatcatcaatatctgagatggacaagtcctccataacaacaataacctgtccctcctttccagaatgttgctggtccaagcaagccatatgttcctcctccaatacagccacatgttgtaggaagtacatatacttttgacttgctttatgaggtacaggctaaggaaccttcttcttctcctaccctgagtcctcccattggtcaaccaccacccacaccagagttgaagcccttaccagctaacctcaattatgcttacttggaggacaaggaaatagttccagtgatcatc

SEQ ID NO: 9515 - DNA, 378 bp, Glycine max
tgaaggtagaagacgatgaatggagggagaatgtgtcttacatggcctctatttatagcttaagtgtcacacatggcctctatttattcaaatttcacttgaatttgaaaatgaatttgtggagccaaattttggagtcaaaatctcactaattatgattactgaattttagctatggttcagctcactaatccaagatcaagtccaagattctccactaagtatggttaggtgtcatgaggcatgtaaaacataaaagacatgcacaaagtgtgactatatgatgtgacaatggggtgtagcaagcaaatgctcacctccccctctaaaattaaatggatgggcttctctcaattaattaaatttattccaaccaca

SEQ ID NO: 9516 - DNA, 375 bp, Glycine max
ttatacaactgaaacatggtagagaagtagtgtacactttgcatcgtcattctctaaaacctcatcacccttacagatgattgaaaaaaactcttaattgaagtcaaagcacgaaactgcgccgataccggtgactagtgagtaggtcttccagtgggttgaacacctgaatactgtattcggaaagacccaaaagaaggataacagtaagacttgcatatggaagaagaggtccattttctttgatctttcgtattggtctgatctaaatgttagacattgtatcgatgttatgcatgtagagaaaaatgtatgtgacagtgtcattggggcgctccttaacatttaaggcaagatgaaagatggtctgaatac

SEQ ID NO: 9517 - DNA, 414 bp, Glycine max
tctggtgggacatcttgacttgctatccaatctgacattcaccacatattctgccttcttctattttcagattgggaatgcctctaacagcacttttgtcaaggattttcttcatgcctcttaagtgcagatgtccaaacctttgatgccatattctgacttcatcttctttggaggatagacatgtagaggagtagctggtttcttggggtgtccataggtaacaattgtcctttgatctgctgcccttcattagaacttcactcttctcatttgtcaccaagcattctgactttgtgaagtttacattgaatccttcatcacacagctgactgatgctaatcaagtttgcagtcagtcccttcaccagcagtactttgttcagactaggaagttcatcatgaactagctttc

SEQ ID NO: 9518 - DNA, 384 bp, Glycine max
actaagcttaaccaagggagatggaccatttcaagttcttgatttaatcaatgacaatgcttacaaagttgagctgcccggtgagtataatgttagttccaccttcaatgtctctgatttatctctttttgatgcacatggagaatccgatttgaggacaaatccttctcaagagggagagaatgatgagggcatgaccaatagcaagggcaaggatccacttgaaggacttggaggacctattgatgaggacatgaccaacagcaagggcaaggatccacttgaaggacttggaggacctatgacaagggctagagcaaggaaagccaatgaagctcttaacaagtgctgtccatactatttgaatacagcccagtttcagga

SEQ ID NO: 9519 - DNA, 409 bp, Glycine max
  unsure at all n locations
ntatccaacttaaacatggaaagaagacaatatatatctggctctgaagatttctaaaaccttatcacccgtatcgacgattaaagaaagcttttaatgagagtcaggaaaatgaaagtgccccaaaaccattagctagaaaagaagtgtatgatcgggtcaaggacatagtaactatcattgggaaaacccaaaaaaagccatcatctgagacaaacatatggaagaaaaggtcaatattctttgatcttccatactgttctaatcttgatgttagacattgtatagatgtgatgcatgtggagaaaaatgtttgtgatagtttaattgacacccttcttaacattaaagggaagacaaaagatggtttgaacagtcatcaatacttggtgaaatgggatccgacatc

SEQ ID NO: 9520 - DNA, 388 bp, Glycine max
ttgatgtttgagttgaatgcattaaaggtaaacagactttatgttataaattatgtgcatatagagctacagacgtcttggaattgatacatacagacatttgtgggtcatttcatataccttcatggaatggttaacaatattttatatcattcatagatgattactccagatatgcacacctgtatcttatacatgaaaagacacaatccctggatgtgttcaaaacatttaaagttgttgttgaaaatcaactcatcaaaagaatcaatagagtcagatctgaccgtggtggtgaatactatgtgcgatatgaacggtcaagtgaacaacgtcctgtgccttttgccggaacctatagaatgtggaattttccatagttacacat

SEQ ID NO: 9521 - DNA, 329 bp, Glycine max
tctacacacacaatgatcctaccaagaccctttgcattatcatcagtggcagacattattggacttctgccactcttaaattcagccaagacccaatccctttcatcctggtttttatcaccatggatggatagtgctggccatccatacactctcatttgtctggtaacttgaacacatcccttttttgtctccataaatattaaaattcggctcccgtccatcacttcttttagcagcctgatttatctacattttcaagctaaagtgttaatttggaaagaaaaagcatcaaacactgtcggtctattattattgatgacgcaaac

SEQ ID NO: 9522 - DNA, 337 bp, Glycine max
acaaatgggtgttggtcaatgtaccacatttaatagcacacactaaaagaacaagaaaaacagaccaatttctaggcgtctcagaaaaaaacttagacaagacagttcacctaataagtttttggaatagtagtaaacatatttgtgtaaatacataacctaccagagttcattggactccatcgctggaaccgaaaaggagatggtatgttgagaacagaagcaccacaaacactgttatgcctggagatgggaagatattgccctcggaaaaaccctggcgtccaattgccgatacatgatagagcacaaagaagaagaatataagaaagcaaca

SEQ ID NO: 9523 - DNA, 402 bp, Glycine max
  unsure at all n locations
tcacatctttataaagacatactcgattgagagggatttacattttaaangnacggagaggatatgatgtatttaaggtatgaaaagtctttatacctaaaaaatgttttaaaaaaatatttcttaatttatcatgatatttgtgtaaaatatttattgataatgaattgttattaaataactagctgggactgttttttctctagttttacacaataactgataaaccaaaaggcctaatttgagaaatataagttatacaaacctaatgaacacttataatatattatgccaataaaatatatttaattgtatatatattagaaaatctccaaccaataaatccatcataggtttcttatttaaagagaattttatctaatacatcttagagtaaataac

SEQ ID NO: 9524 - DNA, 442 bp, Glycine max
  unsure at all n locations
tgtgtagcactatccactgcanaagcaaaatacattgttactggaagttgttgtgctcaaaatctctggatgaagcaacaactagaagactttggggtaactcttgattacattcctctaaaatatgataacaactgtataagaatcctgtcatgcattctagaactaaacatatagagattaagcatcatttctaagagatcatgtatctaaaggtgattgttgcattgaatttgttggtagtgaacatcaactagctaacatctttactaaacctcttgctagaaataggttcttctagtcaaggtgttctacacatgtggtagtgctgaccttgaaggtaatcttttctttactattaatggagtagacattgtcatagatgctgctgtgtgaaaggaagttattagtctggacattggtggagtccgcaagtttgatg

SEQ ID NO: 9525 - DNA, 349 bp, Glycine max
agcttgcatacaagattctccttgcctggcacttcaaaaccttcttgttgggtcatatagatgtcttcctctaaatccccatgcaagaatgcagttttaacatctaactgctccaagtgaagattctctgcagctactatgctcagaataactctgatggtagtcatctttacaactggagagaagatctctgtgaaatcaattccttgtttctgctgaaaccctttcaccacaagtctcgccttgtatcttcttctaccgtcagaattcttctttagcctatagacccacctattctgtaatgccttctttccttctggcaatttagttaaaagaccacgtcttattc

SEQ ID NO: 9526 - DNA, 342 bp, Glycine max
agcttgtattttgtttattttaatccctgtaacatactccattggcagaatctgcattggaaacatagataatagataaataagctcagacataaaatggaaaatatgtgcattactacatttggcataataagagccatgaaggttaaacctgtggtgtggtataatcccagtagattgtaggaactttcacataatccatgttcttaaagttacttgcaaacaattctgcattagcagcctccttggtgtaatcaatctcctgaaaattattaatccatgttgcagtaacaggatccgagaatgtattcgctgagaacacgtgcatacatcataccataa

SEQ ID NO: 9527 - DNA, 405 bp, Glycine max
agcttgcttctacaatgccttgtatttcattcaaatcgtagccttacaaagcaatatcatccacataaactaacagagcaatgatagtgttgaatccatgcttgagaaacaaagaatgatatgaagcacattgcttgtacccatgtgagattagaaagaaagacagcctggcataccactgcctgctggcttgtttcagtccatatagctaataacattcttatgctgaggcatataagttaaaaccttaatctttgcattcattgcctctatccatataggatccttagaagcttcattataggattgaggttcaagactttgtgtaatggataaaatgatattgtgataagaaggagacaatttgctatatgaaagaacaatattataggatagagacaagta

SEQ ID NO: 9528 - DNA, 331 bp, Glycine max
attatggtgtgtaagaatgataaatggatgccctaacttatattggcgccattttcagactgcagtggtgatggcatggagctctcggatatatgtggaggcgtgatgtaaccgggggcagaaaaacttgctaaaataagccaagggatggccctgttgcatgagaacaacccccatcgcgatacctgaagcatcagtcttaagtgtgaatggtaatgaaaaatcatggatggccaagactggggcctgggtcatggctcgcttgagtccctctaaagccgattgagcaccctcgtcccaatggaagttatccttttgtaacactgcggtt

SEQ ID NO: 9529 - DNA, 388 bp, Glycine max
agcttctgtacctgagttactggatcttttaagacaacagggagtgaagattgctgaaaaccctatccttgcaacaagtcctagggaagtagacacggagatggacaagaaaatccgcagtattgtgagtagcattttgaaagacgcctctgttcctgatgctgagaaagatgttccaacatcctccaccccagatgttgctgtccctgaagctgatgaagatgtcccaacatctttcaccccgaatgtttctgtgcctgatgttgagaaagatgttccaacatctttctggccaaatgctgaagaactctcttcccccagcaaagagagatcatcagaggaagatgatcaagcctcagaggagaatcctgcaccacgggcaccaaaa

SEQ ID NO: 9530 - DNA, 405 bp, Glycine max
  unsure at all n locations
ggcacatgtacagacccatgattgtctttaccagttgagcctcagcctgcagagccatggttttacttctttttcgtgccctactccggaccagttcanggcagaggtcgcatagcctggagattggcctgaggcccgggcaggagaggcaccagcagaggctcccgacgaggcagatgatgcccgcgaggacgaagagatggtcgatttacttgatttcttacgagggagcggagccacatgattgggagatccctgtgtccatatttctttttgtttccatttttcttgttatatatcatcttatttctgcttgactaacggactaacgtttgttttcttgatgtgttgattgacttttgtttttgacatacatatcatttgagttggtacgtccgtatatgt

SEQ ID NO: 9531 - DNA, 323 bp, Glycine max
agcttgttcacctcctttttcaccacatctagaatgatggggttgagtcgttgctgtggctgcctcactggcttagctccatcctctaaaagtatcctatgcatgcaggtagatgggctaatgccaggaatgttttctaaagtccatccaatggatttcttgtgcttcttgagcactagcagcaacttctcctcttgctcagtagcaagggaggcaaagatgatcactgtaaatttttccttgtcctcaaagtaagcatacttgaggtttactggtaaggacttcaactctggtgtgggtggtggctgaacagtgggaggaac

SEQ ID NO: 9532 - DNA, 434 bp, Glycine max
taagctccttcaactgcacaaggctcttaatgttcgaatagtatccttgtgtaaccttcacccgacgaagacactgacaaaaacttatcttctcctttttggacaaggtatggcaagctaggggcaagtaaattttcttcccattagaccttggatgcaactgtgatcgtatgcccatatcagctagatcttgacaggtattgaagccatccttcatcttgccttgaatgttaaggagagtcccaatcacactatcacaaacatttttctccacatgcataacatcaatacaatgtctaacatcaagatcagatcagtacgaaagatcaaagaaaatggacctcttcttccatatgcaactcttacttatatccttcttttgggtctttccaaatacattattcacgtgttcaacccgctgatatacttgctca

SEQ ID NO: 9533 - DNA, 445 bp, Glycine max
tgtaatcgattacacacatactgtaatcgattaccagatgatattttcagataatattctcaacagtcacatcttttcatttggttcttgaatggccatcaaaggcctatatatatgtgacttgagacacgaatttgctaagagttttcataacaaaaaggtcttatcctcttaaaaagtaaaatcgttttattctcttacaaattccttggccaaaacacttgtgattaaataaggaattatttgagtgctcaaattgttcaatctatctctttcaagatttcttcttctcttctttattctgaaaagggattaagagaccgatgatctcttgttgtaaagaaatctatacacaaaggaagggttgtccttgtgtgattcagatattgtaataaacctttacaagatagtggaactctcaacgagggtgcttggggactggacg

SEQ ID NO: 9534 - DNA, 428 bp, Glycine max
tattaagaatagaatcgaaagtttgcaagcaatatgttcaaaagcttgtgttttggaatatcattgttggaactaaagacaatatatattccatttccagaatatagcctaattacctttgcaactgactttgaagggtactctccctttagtctaacatcaacacactgcttcaccttatcttcactaagctttggtgttgcctgataaaatccaatgaacaaaatcagaatgtgtaaaatcaaaaaattgaaaggggaagaaaacacaaaaataattatcaacagaacagcatcaagtaaatattggtacccaagtcacaaagctttgctgtcctctgggtagtgtatgatcaaccggtttacgttcagttaagagtttcactaatataacttcgaagctatagacatcactctttgaagtgagtt

SEQ ID NO: 9535 - DNA, 365 bp, Glycine max
agcttctatagaggtttttgcggactgcttgtcttatcataccagcaataccttcacctacaatattgaaaagcaagggaactaggggatccccttgtctcaaaccccttgtaaggataaattccttagaaaggctaccattaatcaaaatagatatagttgctgagcggaggcaagctgatatccatgatctccattttgggcagaaacccaacctaaacagcatgtaatccaaaaaagaccaagacactgaatcataggctctttcaaaatccaccttgaagatcatcactggtttcttatttctccttgcttcctcaaccacctcattgaggatcaagataccatggagaatatgcctttct

SEQ ID NO: 9536 - DNA, 430 bp, Glycine max
tggggatgaacgtggacagggatgctagtctactattcattatctggacttcctggatgttagtaggactatgcatctccaatatagttgtgcatttgtcgggaatgtgtgagcataaagcctaggaacttgcctccaccaaccccaaaaatacatttttccgggttaaggcgcatgccgtatttgcagatctctccgaagacctcttccagttctatcatgtgttgggctatgctatgagacttgacaaccatgtcgtcgatgtagacctcaatgtttcattcgatctgctgtttgaaaattcgatccatcaatctctagtatgtagcgcctacatatttaaggccaaacggcatgaccctatagctaacagtgtcatcttcagtgatgaatgtctgtttcttcctatctatagtatgcatccaaatct

SEQ ID NO: 9537 - DNA, 442 bp, Glycine max
ctaagcttaagataaagatggcctcagcaaattccttatttccataatggaattctatcaatagacctccaatctttaatggagagggttaccactactggaaaacccgaatgcaaatttttatcgaggcaatagatctaaatatatgggaagccatagaaatagggccttatatacccaccacagtagaaagagtctcaatagatggtagttcatcaagtgaaagcataaccatagaaaaacctagagatagatggtctgaagaggatagaaaacgagtacaatacaacctaaaagccaaaaacataataacatctgccctaggaatggatgagtattccagagtttcaaatcgtaagagtgctaaagaaatgtgggacactcttcgatcaacacatgagagaactacagatgtctaaagacctatgagtaatgcactcac

SEQ ID NO: 9538 - DNA, 365 bp, Glycine max
tgaatgcaaactggatgcattgtttaatttggtgacttatctggccttgaatcagaaatctgtaccatgcgcaagggttagtggattgagctcctatactgaccaccatacagacctttgcgcttacatgcagcaacctggagcaatagaacagactgatacttatgctgtagatattcacaatagaccttctcaatctcaacagcaaaattaatcacagctgaacaattatgacctctccagcaacagatataaccctggatggaggaatcaccctaacctcagattgtgcatgccttagcaacaacaacagctacctgctccttcgttcctaaatgctgctggcccaagcagaccatacattc

SEQ ID NO: 9539 - DNA, 356 bp, Glycine max
tcatggatttctcataagcttaatatcttataggattcttattcatgagtcaattctagcacgagcttttcaagttgtatgggactaagctgcgtatgatcactgcttaccatcctcaaagtgatggacaaactacagtgcttgattgagtcttggaacaatatttgtgggtgttagtgcatcataagccatcctatcgggaaagtttctgcatcttgctgaatggcgctacaaccccactacttatttatccactaatttaacactcgatgaaattgcttatggtaagcctactctaagtctttacattatcaagctggaacctttgcctgggaacaattgatttttctgacttg

SEQ ID NO: 9540 - DNA, 407 bp, Glycine max
agcttataatatatcgataggctcgaaattaacatctttactctcgcgaaattcaaatgggcataaattttcacacggatgtccgattcgggcgcataatatgtcaagagtctcgaaattgaacaacggaagctcttgagaaattcaaatggttataaaatttcacacggatgaccgattcaggcaaatctcatatcgagacgatcagaattgaacaacggaagctcttgagaaattcaaatggtcataacatttatctcgaatgtgcaatttaggcgcatcacatatagtgatattcgaaattgaacaacagaagctcttgtgaaattcaaatggtcataacttttcacactgagggccgaatcacggctttaatatatcgatacgcctcaaattaacatcggaaa

SEQ ID NO: 9541 - DNA, 410 bp, Glycine max
  unsure at all n locations
tcgggaggaacctagacagggatgctagcctaccatttagttcntgaacttcttagtcggtgatcgagttgtgcatctccaatatggcagtgtatttatgggggttagcttcaatcccctggtaagtgatcatgaagccaaggaacttgcctccgcttaccccgaaagtacatttttcatggtggaggcgcatgtcatatttgtggagttccccaaagacttcttccagatccattatgtgttaggctatgctttgagacttgatgaccatgccgtccatatataactcgacgtttcatccaatctgtcgtctaaatacttggtccatcacccgtgggtatgtagcgcatgcatttttaggccaaatggcatgaccctgtatacacatggcaagtttgtggtagataatg

SEQ ID NO: 9542 - DNA, 371 bp, Glycine max
  unsure at all n locations
agcttgaataacggcttgcaggtagccttgagctgngatatgaacctggtgatgtagttcaagcgccccaagaaaccccagactttctttttagtgcatggcttctgcatttcgaggatggctttaactttttcggggtcaacctctatccctttttggcttacgatgaaacccaacagttttcccgatttgacctcgaaagtgcacttggctgggttcaaccttagctggtactttcgcaacctctcgaacaacttccgtaagttgattagatgctcttctttggttttggacttagaaatcatatcgtccacatacacttcgatttcttggtgcatcatatcggggaacaaagctaccatcgcttgctg

SEQ ID NO: 9543 - DNA, 360 bp, Glycine max
agcttgaaactatcatgtatcaattcctcttgaaactgtatgaaagacaagtattaaggttaaaattaaatcccaacagtaatccccacatgaacattatccttccttaaaatggagaacacaatttgaatccctcaatatgatatgacaaatgaaaactcctgatatatatatatttcatagcagaacaatctccacaaactcattcttaaacatccgaattggtgcacttgtttgagaagcaagtaatcccaatttctcactgtgataagcaagaccaacctcctttccctctctatccatgtcatgcaaataaaaattcatatcatgaacataaccaacttccttagttcttctacc

SEQ ID NO: 9544 - DNA, 369 bp, Glycine max
gagccaattaagacgacaatatctttttactcggatgactgattgagtctcgtcatatatcgagacgctcgaaattgaatgttgatgctctgagcaaattcaaacgacaataactttttactcggatgtctgattgagtcccgtcacatatcgagatgctcgaaattgaatgttgaagctctgagccaattgaaacgacaacaacattttactcggatgtctgattgagtcccgtaacatatcgagacgctcgaaattgaatgttgaagctctcagccaattcaagcgacaataactttttactcggatgtctgattgagtcccgtcatatatcgagacgctcgaaattgaatgttgaagctctgagcc

SEQ ID NO: 9545 - DNA, 426 bp, Glycine max
agcttagtaaagctaggcactaacaatctccccctttggcaaattttgtttaaaacatacttagacacttcctgagcaggtacgagcagttatgcaagtgggatcagcaactttcattatcagagtaatcaagcacagcggaaattctgcaagttgcaagtcgtttccaggatgtcaagacatctcacatgacatcagctttctgcttctgctccccctgtctccatgctcttactgcagcatcttctatcagctactagtcttttccaggatgtcaagacatctcatgtgacatcagctttcccttgtctccatgctcttactgcagcatcttctatcagctactagtagcttacatcagtcatcatcagcagcagcagtctccccctcaaaatcatgtacatacaactccccctcaaaatcatg

SEQ ID NO: 9546 - DNA, 337 bp, Glycine max
  unsure at all n locations
agcttcaacattcaattntgagcgtctctatatattacgggactcaatcagacatccgactaaaaagttatcatcgtttgaattacgtcagagcttcaacattgaatttcgagcgtctcgatttattacgggactcaatcagacatccgagtaaaaagttatcatcgtttgaatttggttacagcttcaacattgaatttagagcgtcttgatatattactggacacaatcagacatccgagttaatagttattgtcgtttgaaaatactcagagctttggtattcaatttctagcgtctcgatatattacggaactcattcaggcatccgagtaaa

SEQ ID NO: 9547 - DNA, 208 bp, Glycine max
agcttgtgaacaaggatgacatagaggatgtgagaagagaggttcaaatcatgcaccatctctcgggtcaacctaacattgtggaacttaagggtgcatatgaggacaaacaatcggtgcatttggtcatggaactttgtgcgggtggtgagctttttgatcgtataattgctaagggacattacactgaacgtgccgcgggtttttt

SEQ ID NO: 9548 - DNA, 283 bp, Glycine max
agcttatcaagtggaattataccaaagtttctatggcaggatagatcactttaattaattctgttttgacagccttgcctctgttttacctgtctttcttcaaagctccttcagcagtgtcaaagaggcttatttcgatccaaatgaattttctatggggtggaggcgctgaatggaaaaagactgcttgggtggcctgggatcatatctgtgctcctaaaaaacaaggagggttacgaatcatagccttcaaggactttaatagatccccttcttattaaat

SEQ ID NO: 9549 - DNA, 351 bp, Glycine max
caggcactggtattcatgtcttatctaggcctatagagtatgtgcatcttgaaatatagggaccatctagagtgaaaattcatggtggaagctcatactttctcaccatcatagatgatttctcaagaagagcatgtctgtatgtttcgaagaataaatcagaagctgttcaaatattcatagagtggaaaacacttattggaaatcaactttggtcaaaactaaaaatattaaggactgacaatggcctgtagttgtttcagagcaattcaatgagtgtcgcctgaaattaggtattaaaaggcacaaaacaatccgtcacacaccactacagaatggattatcagaaag

SEQ ID NO: 9550 - DNA, 377 bp, Glycine max
  unsure at all n locations
cagatgccactctactctaaattgttaaaggatattttaacaaggtatcacaagtgtattcactgggaaaacattgtcgtggaaggaaattgtactgctgtgattcaaaagatccttccacccaagcataaagaccctgggagtgtaaccattccttgttcaattggagaagtcactgtgggaaaggatcttattgacctgngagccagtattaacttaatgccactctccatgtgcagaaggttgggagagttggagatcatgcgcactatgatgactctacaacttgctgaccgctccatcatcagaccatattgagtaattgaagatgtgttggtcagagtaaatattttatcttccacgcaactttgcggtaa

SEQ ID NO: 9551 - DNA, 375 bp, Glycine max
tgtgtagcccaccatcttttcatagtagaatactgataatgtgtctactattattgtcatcatttttttctccgtcattgaggtgccacttgagctgccaggtctctccacctttgggagtattcttttgaaggattcgtgccccctttttgcacatgtttcgcacttgcatcctatccgaagccattatactgacactgtctaacgaaggcaaccattaggtccttccaagaatggactccggaaggttccaagtgagtgtaccaagtaacagctaccccagtaagactttcttggaaggaatgtatcagcaattcctcatcttttgcatatgcccccatcttctgataatacatctttagatgggtctcgggg

SEQ ID NO: 9552 - DNA, 378 bp, Glycine max
agcttaaacattcaatttcgagcgtctctatgtattacgggactcaatcaaacatacgagaaaaaagttattgtcgtttgaatttgctctgagcttcaacattcaattttgagcgtctggatatattacgggactcaatcaaacatccgagtaaaaggttattgtcgtttgaattggctcataggttcaatattcaatttcgagcgtctcgatatattatgggactcaatcagacttccgagtaaaaagttattgacgtttgagttggcacagagcttcaacattcaatttcgagcgtctcgatatatgacggaactcaatcagacatccgagtaaaacgttactgtcgtttgaatttgctcagaggttcaaaattca

SEQ ID NO: 9553 - DNA, 409 bp, Glycine max
  unsure at all n locations
cttgatctgcctctatattntaacaatcccatcctccctccagataatgagtttctggtggagagtagatggcacagccccaactccatggatccattcccttcctaatagcaagttaaaattggccttggactgtatcaccaggaatagagttggtcgaactatactgcctacagcaacatctacttgaatggctcccaaagaatagccagttttgccctcataattagagagcacaatgttgtgagcagatagatcagtgtcatgtctcccgatcttgtagagcatagatcgaggcattaagttaacagccgctcctccatctatgagcactttgttgattccaacattgtcaacttctgccctgatgaacagagggttgagatgactcttcatctgaaaatctggc

SEQ ID NO: 9554 - DNA, 379 bp, Glycine max
  unsure at all n locations
agctttggtgagacccatccactggttttctcccagagatgacttcaagcaagaatacgccaaaggcaaatacatcagtcttctcatccacaactccatgcaagtagtactcaggggctaaatgccttcaaaaaaacatgaaaaaagttcaatggacatccgagaccccttgaaacaccaaagagagtgaaatatataagtatggtagggtatatcatgtgataagaagagagagacaaagataaatgagagatgatagtggagtggttaaaataatgaaatatttgtgtatcatgacccanaaaatataacacttttcctttaaaaacgaagtttatactccaatatactactactaatgtgtttggaaactcggtga

SEQ ID NO: 9555 - DNA, 375 bp, Glycine max
agcttttgtcggctatcgcttcaatgcattggacacccgtatcatgcgtcttaaagacgacatgatcttcatccgacgttgttttgatcctcctacggattcttagacgttttcttctattataagttcctaattttctagacattttactattttttccttgcatttggctttagttatttagcactttggttaattttgtgttttgctttggatatttagcatttggtttatgctttgctttggatatttagcatttggttggtttatgttttgctttggatattttagattctgttttgcaatggatgattagttattgttattgattgtgatgcttgctctagctattttgtggttctttatacacctctg

SEQ ID NO: 9556 - DNA, 380 bp, Glycine max
  unsure at all n locations
agcttgtgtagatcctcagcaacctagattggatatatgcaaacatttatccctagaaccacaacagcgcccaatgcaatgagaaaaatctatcaacagctgtttcaacaaactctcctgtatgataccctgataaataatatagcaataggtgatcaagaacacacgaaaaccatattcacaagctttcattgttggatattgttttgcatatgtggcacaaaatcctaccactcacacgtcataatcctgtcagagaacaaggtatgagcaaaaaaacaaaatataaatgtcaaataaatctttgtcaacatgataagaaatagaagtgattcaaaatcctgacctgcagtgaanatgctaacaactataatggtttc

SEQ ID NO: 9557 - DNA, 390 bp, Glycine max
tagaccttgaatgaaaggttgagttcttaccaagatgaataacactctaactatccacaaatagtagatatttatcttgaacaaaaccaagctcctgcaagaatttcttcacccatagcaactccttgcatgcttcagtaatgacaatgaattttgcatctgtagtagacaaagctacacacctttgcagctcggactgccaagtcacagctccccctacaaatttaatcaaattgctcaaagtggacttcatagaatcaatgtctccagccatatctgagtctaagtaccccaccaaagtatgcttatcaccaccaaaacaaagcctcatatcaacagtaccatgaagatacctcaaaatccatttcacaacattccaatgctctctac

SEQ ID NO: 9558 - DNA, 428 bp, Glycine max
tctctcttttcttgattattatcatttgttttaagccttgtatttggctatattattatgatatttgaacatttagtatttctttttctatttgcttagtatgattgaacaattaggaattatgttatatgaccatgtggtttttatatatttgaactattcatgtttcttgcttcatgattggtttggatttttcaatgaatgtcttgcgtatgattagtcatttgtgtatgttttatatttgttacgcactttggctttttgttgatgccaaagggggagagaaaataatgattaaattaagaaactcacataataaaataacttaatttcaagtaaagcttaaactcaaaaacaaagggggagaatatggagaattaagtgagtgatcgacaaggaaaaactatgtgtatgtgtttcttaatttc

SEQ ID NO: 9559 - DNA, 282 bp, Glycine max
gaacgaatgaattatgctcgttgttggaccattcaggccccgggcgctcatactgttcttcccacttatcattgattcgtggcgttcttgccggtggagagcttaaatgaggcgtctcaagagcactgatggagcccctgtggaagtagaggtggtgaaacttgtgagaagatgctttagactaagcaatggagaggttcttgagccatggaatgaagtgagtgccatcacgattgggaaatttggtgttattacgggatgatgacccaacgcttgtattgt

SEQ ID NO: 9560 - DNA, 459 bp, Glycine max
tatatacaatataggatatatattgaattggtgttatcaatcacatgtacatattgactattgtttaagagaaaggtcagaaaaaaataacatagttgaatcaacatcattatcaatgtgattagaatgataaaaaaacctaacaaatgaaatccaagacatcacatgataattagaaaaatacaataacaataaagaatagtaatattaaaaattagatatacataaataaatattatgtacagagaaaaaaatgttcaaacaacaacatttttgttgatccggaaaataccgtaatttgtgcctaaatcgagaccaatctagatccaattgtgatttaaaaatcacaattcttaagaagaataaattattctgcattctaaaacatatttaatgatctagcatgaaaatacattgcaaccataaataaatattggtagctatcaacaataaaagctc

SEQ ID NO: 9561 - DNA, 430 bp, Glycine max
  unsure at all n locations
tctgtccctgaganactggttcccagaagacaactgggagtgaagattgctgaaaaccctagccttgcaacaagtcctagggaagtagacacggagatggacaagaaaatccgcggtattgtgagtagcattctgaaagatgcttctgtgcctgatgctgagaaagatgttccaacatcttccaccccaaatgtttctgtgcctgatgttgagaaagatgttccaacatcttccaccccaaatgtttctgtgcctgatgtcaacaaagatgttccaacatcttccggcccaaatgatgaagtactctcttcccccagcacagagagatcaacagaggaagatgatcaagccgcagaggagacccctgcaccaagggcaccagaacctgctccaggtgacctcattgacttagaagaagtcgaatctgatg

SEQ ID NO: 9562 - DNA, 448 bp, Glycine max
cttgatggtgtcgagaagaaatcacatgtttgtcatcatctaaaagggggagaatgtgaatgtatgtatacatgattttgatgatgtcaaagaagaatctaacaaggctgcttcaaatgataagcatttgcttcaagaataattcaagattgcttcaacaaacaaagccttgtttcaagattcactaaagaccaagtcttgccttaaaacaatgtgctttcaagacatgcaaggctctggtaatcgattaccaggaagtgttatcgattaccagaagacagggttgagaaatagctgttgaaaaaggttttgaatttgaattttcaacatgtaatcgattaccatatgtctgtgatcgattaccagcaacgaaactttggaaattcaaattcaaaagtcgtaacccttcaaattataactgtgtaatcgattacacaaacattgttat

SEQ ID NO: 9563 - DNA, 298 bp, Glycine max
tgtgctcatgccacaattgttagtcgcggctataccagacatcttgccaaacaaagtcagggtgatgataactcgcctgagctttttcttccatgctatatgtagcaaaactattgatccagttatgtctgatgaaatggaaaatgaggccgcaattatactatgccaattggagatgtattttccccctactttctttgacatcatgattcacttgaatgtgcatctagtctgagaaatccaatggtgtggtcctgtttatctaccgcggatgtacccggttgagcgatacatgaag

SEQ ID NO: 9564 - DNA, 386 bp, Glycine max
gcttatcaaatcagacaatggatatgagtttattacgaaacagttctatgatgatattggcattacacatcaatgttcttgtgttgaaactcccaacagaatgggattgttgaatgaaaacatcaaatatctattaaatgtcacttgatccttgttatttcagtctaatttaccatctatttttggtcttatgccttgattcattatgttttccttgttaattgtatgcctacttttttccttggtaatcaaactccttatgaaaaactatatgaaattgtatatgatattgagtctttaaggggtattcggtgtctatgttttctagtactttgacagctaacagaaagaaccttgacccaagagctgttacttcagtctttttg

SEQ ID NO: 9565 - DNA, 446 bp, Glycine max
  unsure at all n locations
tatctaatcgattcacaatacttgtgatcgattaccctagattctaaacattttaattttcaaaatttaaaatgaagagtcacatctgttgatgtgtaatcgattacaccttaatggtaatcgattaccggtgactaattttgaaaaataaatttccaaaagtcacaattcttcaagtgacttgtttctgaaatttttttttaaaagtcacaactttttaagtgactagttttttaaagagtcacaatttttgaagggtgactagttttaaaaaaatttccaagagtcacaaactttaacttgagtcatcaagagattataaacatgtgaccatggcatgaatntcagaacatcatctctcaacatctttcaaacaatcttttcaacgctttctacagaactttctaaatcatttctcaacaatctttctacacagtttataacat

SEQ ID NO: 9566 - DNA, 383 bp, Glycine max
  unsure at all n locations
agcttatgctgcaaacatctacaatagacctcctcaacctcagcagcaaaattagccacaatagaacaattatgacctctccagcaacaggtacaatcccgggtggaggaatcatcccaaccttagatggttgaatccttcacaacagcagcaacaacaacaacaaccttattttcagaatgctgctggcccaagcagaccatacgttcctccaccaatccagcagcaacaacaataacagcaacagccccagaaataacaaacagttgaggctcctccgcaaccttcccttgaagaacttgtgaggcaaatgactatgcaaaacatgcagtttcaacaagagaccatagcctncattcagagcttaactaatcaaatgggac

SEQ ID NO: 9567 - DNA, 488 bp, Glycine max
  unsure at all n locations
ctattacgtgacactatgaaactcagcttatgcctctntgataaccctttttacttttgggatctttccaatatcttctagcatcaagtcaagacaatgtgcagcacatggagtccaaaatatttttggtctcgtgacttgtaaaattttacctaagaagatcaaaatcaataaacttgtatgagtagtgtaacaattaaaagttataactataaaaaaaaaacttcattaagcatgattgaattctcatccgccaacacataattacttccattgtccgtcaccacttgaataacattcttttctccaatctcctcaacaaagctatccataagctcaaagatcttccgaccagtcttcatgtattcaaaagcatccacactcctcacaaactgtgttcccaatgaacaatctaccacaaagttaatcaaagttttatactctctatctgttcaaccatctgacataagccctttgtgtattccaac

SEQ ID NO: 9568 - DNA, 377 bp, Glycine max
agcttgaaactgtcatgtatcaatttcccttgaaattgtatcaaagacaagtattaagattaaaattaaatcctaacattaatccccacatgaacattatccttccttaaaatggagaaaacaatttgaatccctcaatatgatatgacaaatgaaaactcctgatacatatttcatagcagaacaatctccacaaactcattctttaacattcgaattggtgcacctgtttgagaagcaagtaatcccaaagcaacatccgatttcttactgtgataagcaagaccaacctcttttccctctgtatccatgtcatgcaacaaaaaattcatatctggaacataaccaacttccttagttcttcttacgatttcatc

SEQ ID NO: 9569 - DNA, 451 bp, Glycine max
ctcagcttgctttcaatctcccccttgttgatgatgacaacccttatatcaagaaacacatacacatactttttcctagtcgattattcacttaattctccatattctccccctttgtttttgagtttaagcttcactttaaattaagttatttaattatatgagttcttgatttaatccctattttctctccccctttggcatcaacaaaaagccaaagtgcataagaaatataaaacatacataaatgattataatatcactagacatatatcatcaaaataattaagtttaaaactcataacaattaagagtaagtaaatataatcatgttcagttatactaatcaaatattaaaagaaatactaagtattcaaatgtcataaaaatataaatcatttgggtaagtcactagcatcttgcagtcctaattctcttctaatggcgtaga

SEQ ID NO: 9570 - DNA, 411 bp, Glycine max
  unsure at all n locations
tatcctgtcatgttcattagttcaaaaattatccagaagatggagctaggttaggaacaggtacgattggatagagaaaatttccacctttcaggctttcaccttgctactacgcaattgttttgctccaccaccaccactaccacaattgttgctacgatgtaccagcattgttgccaccacaaccattgctactgttgccatcactactattgctgctgccatcactagcatgtatcatgattgcttctataattgttacctctactgacacaaccactatcactacatttgccaggatccgatggtctcaaaaatgataattgcttccagtcaacttgngtgttcagaggagataatcaccatcgctgctgttctttccgtccaggtgaatcttttgctgtagtcatg

SEQ ID NO: 9571 - DNA, 355 bp, Glycine max
tcttacaaagcatacggctttctggatgtagatgatgatatctatacagatggatcttatatatctatatatctatagatagatatatagatatagatatatagatatagatcatacaatgaagtaccgcacgagtgggtatataggaatccaaatctgccgaatcactcatgttatgatcttctacatcctaagtcttcccgttccttcatctggcttatgttcttcatgtagcattcacactgaatgactctatgaaattacgtcgctacttccacatggtacgggtaacgtatgagacatctctatttttcccggggggaatacttagaattaccacagcttagctttcaat

SEQ ID NO: 9572 - DNA, 414 bp, Glycine max
cttatgtaggggttaaattcgaattaagtatgatgggaaagtttaatttattccttggacttcaaatcaagcaagaatatgaaggcatatacatacatcaaaccaagtacttgaaagaacttttgaagaagtttaagatggatgatgcaaagcatatgaaaatgcctatgcatccaaccactatactttgactagatgaagaatcaaataatgttgaagaaaagacacatagaggaataatacaatctcttttgtatgtaactgcatccagacttgacattatgttcagcgtatgtctttgtgcacaattcctaaaggaaccaaaggaagttcatctatctgttgtcatgcatatatcgatgactaataggaactccgaaccttgggttatgctataagagagaaaagaaatac

SEQ ID NO: 9573 - DNA, 378 bp, Glycine max
agctttggagaaccaagccaatcattatgctagacgaaatatagatgggaatagaggtaacaatggcggtaatgacggaccgaggcagaaccgggttgagggagtaaagctcaatgttcctcccttcaaaggtagaagtgatccagatgcctacctggactgggaaatgaagactgagcacgtatttgcctgcaatgactacactgatgcgcagaaagtcaagctagcagcagctgaattctccgactatgcccttgtttggtggcataaataccaaagagaaatgttgagagaggaacggcgagaggtagatacatggactgagatgaaaagggtgatgagaaaaaggtatgtgcccactagctataacagaaccat

SEQ ID NO: 9574 - DNA, 462 bp, Glycine max
tatttagatcagattctatcattttaaatttattgaacgtgtcaccatactcttccttgttccatctcttcaccctcatttttagattcttaaatttttccttgagcacaaaacctccccatcctggttgcaattgagagttccagcattggtggacaactttcttaaaggatacatccgagagccagcagtccaaaactataaaaggttgagggccccaatcaacaacctttgatcgaagaagaataggacaatgatctgaaaagttcctggcaagtgtcatttggacacttgcaggccatctattcagccattccggggaaaccaagcacctgtccagcctactcctagaagccccattaggtatgatccatgtaaacttcctgcccagccaaggaacctcaagcaactccagttcgtgaatcctattattgaatttcaatatactgctgtcactaatac

SEQ ID NO: 9575 - DNA, 314 bp, Glycine max
gcaagcttccacttattagtgcacagctttttgatgcatccttcctaggaagggaccaatcactaaaaccatgagcaagaggctccaagaagattgggctagagcttgtgaaaaaagccctaaggttctcatgaaccttaaggtagatttctgagcccatgggccaaggttgggtccaattatctttgtacatattaaactaggatgtcattatatttggtccttgtatatagggctccatattgtagggagggtaccctagaaatataggatatttcagcccttgtattttttgggcacctagactagttttt

SEQ ID NO: 9576 - DNA, 287 bp, Glycine max
atgcaatcctccctaggaagggaccaatcactagaaccatgagcaagaggctccaagaagattgggctatagctgctgaagaaggccctacggttctcatgaaccttaaggtagatttctgagcccatgggccaaggttgggtccaattatctttgtacatattagactaggatgtcattatatttggtccttgtatatagggctccatattgtacgtagggtaccctacacatataggatttttcagcccttgtattttttgggcacctagactagtttttgtatt

SEQ ID NO: 9577 - DNA, 367 bp, Glycine max
  unsure at all n locations
agctttacagcagatgcccctttactccatgttcttgaaggatatgttaacaaggaaacataagtatattcaccaggaaaaaattgtagtggaaggaaattgtagtgttgtgattcaaaagatccttccacccaagcataaagaccttgggagtgtaactattccttgttcaattagagaagtcactgtgggaaaagctctgattgacttgggagccagcattaatttaatgtcattctccatgtgcagaaggttgggagagttggagaccatgcccactaagatgactntacaactggttgaccgctccattaccagaccatatggagtaattaaagatgtgctggtcagagtgaaacattttatc

SEQ ID NO: 9578 - DNA, 427 bp, Glycine max
tcagctccttcaactgcacaaggctcttaatgtttgaagagtatccttgtggaaccttcacccgacgaagacactgacaaaaacttatcttctcctttttggacaaggtatggcaagctaggggcaagtaaattttcttcccattagaccttggatgcaactgcgatcgtatgcccatatcatctagatcttgacaggtattgaagccatccttcatcttgccttgaatgttaatgagagtcccaatcacactattacaaacatttttctgcacatgcataacatcaatacaatgtctaacatcaagatcagatcagttcgaaagatcaaagaatatggacctcttcttccatatgcaactcttactcttatccttcttttgggtctttccaaatacattattcaggtgttcaacccgctgatatac

SEQ ID NO: 9579 - DNA, 418 bp, Glycine max
cctatggtttgtaagaatgataaatggatgccctaacatatattggcgccattttcagactgcagtggtgatggcatggagctctcggatatatgtggaggcgtgatgtaaccgggggcagaaaagcttgctaaaataagccaagggatggccctgttgcatgagaacaacccccatctcgatacctgaagcatcagtcttaagtgtgaatggttatgaaaaatcacggagggccaagacgggggcctgggtcatggcttgcttgagtccctcgaaagccgattgagcaccctcgtcccaatggaagttatccttttgtaacagtgtggttaaaggggaggcaatggaagcatagcctcttgataacttccgataaaaccctgttagacccaaaaatccacgtagagaatgggtattg

SEQ ID NO: 9580 - DNA, 212 bp, Glycine max
aatgcagaggttcgaaccatcgatgccatggtttgggttctctatctctcggagatagacatgtggaagagtcactggatgcttcgggtgcacagaagtaacaattgtcccttggtcagctggccttcaatggaactctacgtcctacatgaggaacctatcattgcgacaccttgacgtgcacatcgaatacatcatccacacaactgact

SEQ ID NO: 9581 - DNA, 471 bp, Glycine max
gggttacctccttcttcactacatcaagaatcaccgggttaagtcttctctgtggcagccttactagtttagcccaatcttctaaatttattcgatgcatacatgtggatgggctaataccaggaatgtccgccagggtccagcctatagccttcttatgcttcttgagaatagataacagcttctcctcttgctcatcagcaagggaggcagatataattactggaaaaattttgctatcatccaagtaagcatattttaaatttgatggtagaggcttcaattctggtgtgggcggctagatagtggtagaaagagatggtttctcagcctgtacctcataaagaaattcagaggtatgtgtacttcctgaaacatggttagttctatctgactctagaaaatcaatctcaagaggtaaaacatcactaggaatgtaatcaatataaatttcagattcactctcagcat

SEQ ID NO: 9582 - DNA, 475 bp, Glycine max
actcaagctgccaataatattagtttgagtttgagtacttcttattaaaaaaattagctctgatcctttgatcaaatatattatatatttaacaaactaacttatcatatgtataacgtatgcacttataccttatcaaaatcaaaataaaccattaactcacattattaattttcaaccctgtccatgtgcagatcaatttaacttattttctttaaataataattcatcttttagtttaattcttatatatttttaaggttctcactgctatatgttatttttaaaataatcattaaaaaatcaataattgtcaattatatgaaaattcataattaacataataacgttataccttaattaaatcgcttatttctattaatcatcttgaatatctttttttataataactaaacaattccatgtcgatacgagttattcgatttactctcacttcttttattatatctatact

SEQ ID NO: 9583 - DNA, 405 bp, Glycine max
  unsure at all n locations
acgccccgggatcctctgagtcacctgaggatgcagcttatcatttagtaaactttattaaaactttaaacattatggcatataagatgatttttgaatatcgttaatggaatacaatcttacttaaaatggataaaattattatagaagatatttataaattaatagggtattgggattcatgactaactatcagtattatttaggacgtatttcactctatggagtgaaaaaaattatgtaaaatgagaagtaattatggatgtgtctattattaatataaataaaatatcctataaacagaatccaattaaattaaaaaaaataaaataaatgcacctttcttttcactctgtacgcgcttctcaccttntacagcaaaatagaaaatctaaaattaattta

SEQ ID NO: 9584 - DNA, 431 bp, Glycine max
tggaattgtgagttatgactaagttctgttatgtttattgcaatatttttgtaggtatgacaaaggagcatacttgtttttgccatcgtatgttatgagagtacatggagcaaagcagcaacgtgaagcagttaagagggctcccaagagtcaacttgatcctgtttttgaggttgggatattcttttctaaaatgtatgtgcatttgtaagtctgtctgtggtctgcagttaatagttgttgaaattaattctggtattattgtgtaactaggcccttaatacccttggcaataccaaatggagggtaaacaaaagggtgctctgtgtgatagatcacatatgggctaatggaggacgccttgctgatttggtggatcgtgaaatgtgagtactaaacaaactttttgctaaatctatctgttgactcct

SEQ ID NO: 9585 - DNA, 376 bp, Glycine max
agcttgttgcactagcataaacaaggagttgagcaactgcttctggtcttgggtgtcatggcaatcctttggcaggaaaaattctaaaacaaaatcagcggaggcactccggagtggaatgcccagagcagcatgcaagccaaacatgttagcatgatgtgccagaggatactccgccttgctgaaggaagtaatgtcatttgcaaaacaaggtttggtggttgtgaaagctgtcccaactactccttgcccccccaaaaggtggcactcagagcaggcttccaggaaacccattagctctacatccgccacaaaactagcagcatacacagtcgacacataattcatctcatcgtttgaatgcccacatccactc

SEQ ID NO: 9586 - DNA, 359 bp, Glycine max
agcttctgtccctgagaaactggttcccagaagacaacagggagtgaagattgctgaaaaccctagccttgcaacaagtcctagggaagtagacacggagatggacaagaaaatccgcagtattgtgagtagcattttgaaagacgcctctgttcctgatgctgagaaagatgttccaacatcctccaccccagatgttgctgtccctgaagctgatgaagatgtcccaacatcttccaccccgaatgtttctgtgcctgatgttgagaaagatgttccaacatcttccggcccaaatgctgaagtactctcttcccccagcaaagagagatcaacagaggaagatgatcaagccacag

SEQ ID NO: 9587 - DNA, 439 bp, Glycine max
  unsure at all n locations
gcatagtataacccttcagtttcaattcagagtctccataaatgaggaattgttctttagatcttcttaagtacttaattatggtcttaaccactttccaatattcctcaccagggtttgcttgatatcgactagttacacctagtgcataagcgacatcaggatgtgtacaagtcatggtgtacatgatagctcctactacactagcatatggtactctactcatgcgttctctttcttcaggagttattgaacaattctccctactaagagtaattccaacacctataggcaaacagcctcgtttggaattattcatgttatatctctntaagatagtatcaatgtacatagattgggagagtccaagcaaccttntagatttatctctataaatctttatacctagaatatagactgtttctccaatccttcatgg

SEQ ID NO: 9588 - DNA, 450 bp, Glycine max
cgacatcgaccaacaacgtagactgacatgtgtatcactcgtctatttgatcttgatttcactttccccgtgatatcctattgtcaatattctggaagtgttatacatattttaagaggtcaaagattaaacttgtcaaagactcaaaaataaaataaaagtccattcaaagaaataaaatgatgttttagttatgcatactaattttttattattaatattcaaattagatattttttaccacaagtgcctttttatatttttcattttaattacttacatatcagtgcatcaccatgccgcgtttcatgttatggaaaaaataatttttaaacaatcttgagttgataaatgatgtaatataataagaaaaaagattaaaaaagattattaactgaatgcttattgtttttataaaatataatcactcttatatgttttaatccttca

SEQ ID NO: 9589 - DNA, 371 bp, Glycine max
  unsure at all n locations
agcttgtagtgattcactctgatgtgtatggcccatttgaaatcaaatatcatggaggtaacttgtattttgtctcttttatagatgactttacaaagaaaatttgggtttacctgttacaaagaaagagtgaagtatttgtaacatttaaatcattcaagttactagttgaaaagcagtctgattgttcaattaagatgcttagaactaatggtggaggaaagtacacttcacttgaatttgataatttttgcaaggaagaaggaataattcatgatgtaatggctccatacactcctcaacacaatggaactgctgggagaaggaananaacaatgctaaatatggttagatgcatgctgagagagaag

SEQ ID NO: 9590 - DNA, 405 bp, Glycine max
  unsure at all n locations
ntcgagagattcaaatggtcataacttttaactcggacgtctgattgaggcgcattttatatcaagacgctcgaaattgaacaatggaacctcgtgagcaatttaaatggtcataacttttcactcggaggtccgattcacgcgcataatatatcgagacgctcgaaattgaacaatggaagctcttgagcaattcaaatggtcataacttttcactcggaggtccgattcaggcgcataatatatcgagacgctcgaaattgaacaatggaagctctcgagcaattcaaatggtcataacttttcactccgaggtccgattgaggcgcattatatatcgagacgctcgaaattgaataatggaagctcttgagcaatttaaatggtcataacttttcactccga

SEQ ID NO: 9591 - DNA, 437 bp, Glycine max
tctaaactttgtacaagaatgaagctctgataccacttgatagacaagtggcctcagatatcttaagaaggggggggttgaattaagatattccaaacttttctcctaattaaaaatctatcttactttttacttaagttatgaattcccttaatgacaatcttcttaaatattaattcaaatgaagcaacttgaatatgaatataacgcaataataaataaaggagattaagggaagagaaaatgcaaactcagttttatactggttcggccacacccttgtgcctacgtccagtccccaagcaacccgcttgagagttccactaacttgtaaattccttttacaagttctaaacacacaaggacaacccttcctttgtgtttagagattctttacaacaagagactcacagtctcttaatcccttagagaatgag

SEQ ID NO: 9592 - DNA, 380 bp, Glycine max
agctttgaatgctctattcaatggagttgacaagaatatcttcagactaatcaacacttgcacagtggccaaggatgcgtgggagatcctgaaaaccactcatgaaggaacctccaaggtaaagatgtccagactacaactattggctacaaagttcgaaaatctgaagatgaaggaggaagagtgtattcatgacttccacatgaacattcttgaaattgccaatgcttgcactgccttgggagagaagatgacagatgaaaagctggtgagaaagatcctcagatccttgcctaagagatttgacatgaaagtcactgcaatagaggaggcccaagacatttgcaacatgagagtagatgaactcattggttcccttc

SEQ ID NO: 9593 - DNA, 344 bp, Glycine max
  unsure at all n locations
gctttcttttccattgtttaatactaaacacttgccaccaaaaacatgaagatgcgagatgtttggtttcctaccattgaatagttcatatggagttttctttaaaattggtattattaaagccctattcatgatatagcatgcagtattagcggcttcagcccaaaaatattttggaagaggagtatcatttaataaggatctagcaatttcttctaaagacctatttttcctttcaacaactccattttgttgaggggttctaggtgcagaaaagttatgttcaatgtcatgcttatcacaaaataaatcaaattctttattttcaaactcacccncatgat

SEQ ID NO: 9594 - DNA, 455 bp, Glycine max
  unsure at all n locations
ntccaagccatataaattatgtggaatttaaggaagattattagtagaaaagatgtaccatatggagctgatgcatcatacccaattagggtatattgactcattagtagtcccaggagaaatatgtagggtttgctcttgattccatcatcgtttttagtattgaaatgagtgaaatcaaacttgagaccagctctttccgttgcaacaattgaaatgagtatgataagaacaaaaacacctaaaagtttccccattcaaattagttgcataaacaattgctgatttcgatatttgtttgtaattgaaatttaccttttgtatgttcttttatgtcatgaatgtaattttctatataaacaattgttattcatgctgagtgaaccttagattcccgtttgagattgaatgcaatgattcttgcggatagtttgcattagtcattgtatttagtc

SEQ ID NO: 9595 - DNA, 457 bp, Glycine max
ttgcatctttttcatggcaagatttgccaagttagcttcatctctttccttggctgcatcaactggtgccatggatgatatcagctcaataagtacaaccccaaagctatacacatcactcttgtccttgagcctgtacaattggaaatattgagggtcaagataccctagagacccttgtggagctgtggagacatggcttacatcattggggagcaatcttgaaaacccaaaacctggtaccttaatcgaaacactaatgtcaagtaaaatgttgttggttttgacatcacggtagatgatattagaagtatggagataaagaacaaaactaatgatttgtgctccaaaactaacaaatctccgccaattgtttctacactcctactatttatgcaaatattttatggaaaagcatagataataaatagtgacattaaccatacatgagaagcat

SEQ ID NO: 9596 - DNA, 345 bp, Glycine max
gagcttctaaactttatacaagaatgaagctctgataccacttgttagacaagtggcctcagatatcttaaaaaggggggggggtgaattaagatattccgaactatttcccctaattaaaaatctatttcactttttactcaaggtatgaattcccttaatgacaatcttcttaaatattaattcaaatgaaacaatttgaatatgaatataaagaaatcataaactaaggagattaagggaagagaaaatgcaaactcagttgtatactggttcggtcacacccttgtgcctacgtacagtccccaagcaacccgcttgagagttccactatcttggatattc

SEQ ID NO: 9597 - DNA, 457 bp, Glycine max
  unsure at all n locations
tcatggatttctcataagcttaatatcagaaagggacccaatattcatgagtcaattctagcacgagcttttcaagttgtatgggactaagctgcgtatgagcactgcttaccatcctcaaagtgatggacaaactaaagtgcttgattgagttttggaacaatatttgtgggtgttagtgcatcataagccatcctaatgggataagtttttgtatcttgctgaatggtgctacaaccccactactcatttagccactaatttaacctcgtatgaaattgtttatggtaagcctcctcctagtatttccaattatcaagctggaacctttgccgtggaagcaattgaattttttctgactttgcgccaagaaacctttcacctacttatgaagaagcttgaaaggcctangaacatatgaaaaagaatgttgatactcatcgtcgagatgtcaatt

SEQ ID NO: 9598 - DNA, 361 bp, Glycine max
agcttgtctcaataagtgtactcgatttgatcaattgacattattggtctttatcaataataaaattttcagtaataccatcaacagattgcttgagcatcaagtgttgtaagaataaaatggtataataaacatacttgctgagtctttgagctgcactctatataatatgtagctcctaccagtttacgcaattcctcaccctgattatggacaaaacccaaaagtttcaataaacactgcttattgaactctttaggtggctaataaagtaaggcatagtacttgctcagaagtcacaagcgccagaccaggattatcagtcaaataaaaataaagttatttttatgatatgaattta

SEQ ID NO: 9599 - DNA, 354 bp, Glycine max
agcttctcaaggaagttacctagtctataaataaaagcatgtgtaacacttgttataactttgatgaatgagagtcttgtaagacacaactcaaagttcaacttctctccctttttcttcctgtaatttcgtgctccctcctctctttcttttagcagatgctcacccccccctctaaaatttaattggagtgggcttctcccaattcaattaaatttattttcaaccacacacatcaaatattcacttaatgcgtgccaaattagaaaactacccctaatacaaaaaactagtctaggtgccctaaaatacaagagatgaaaaatcttacatttctagggtaccttaactata

SEQ ID NO: 9600 - DNA, 343 bp, Glycine max
agcttcaacattcaattttgagcgtctcgtatattacgggactcaatcagacatccgagtaaaaatttattgtcgtttggattggctcagagattcaacattcaatttcgagcgtctcaatatattacgggactcattcagacatccgagtaaaaagttattgtcgtttgaattagcttagagcttcaacaatcaatttcgagcgtctcgatatatcacgggactcaatcagacatccgagtaaaaagttattgtcgtttgaattggctcagagcttccacattcaatttcgagcgtctcgatatattacgggcctcaatcagacatccgagtaaaaaagtat

SEQ ID NO: 9601 - DNA, 376 bp, Glycine max
agcttgttggagttcactgagagcttctttaggtttatgagctcaaaccctattgtgtctggcagcttgctcagcttgttgaagtttgcattcagctcttctaaagctctgctaggtcaaaattcatcacagcatgcaacatgcatgcatgttaagataatgaaccaagtaataatcaacatgaataaattctgatacacacaatcacaaacacaattaatcacccctatattaattacaatcaattaatcttatttgtttcttgcacgcttctgatcatgtcatgtcattttgatttgcaaggaataacaatgttgattttgtgatgtaagagctagaaatgctcaattaatgcatggcatgttgaaattagaat

SEQ ID NO: 9602 - DNA, 354 bp, Glycine max
agcttccacttattagtgcacagctcctgatgcaatcctccctaggaagggaccaatcactagaaccatgagcaagaggctccaagaagattgggctagagctgctgaagaaagccctatggttctcatgaaccttagggtagatttctgagcccatgggccaaggttgggtccaattatctttgtacatattagactaggatgtcattatatttggtccttgtatatagggctccatattgtaggtagggtaccctagaaatataggatttttcagcccttgtattttttgggcacctagactagtttttgtattaggggtagttttgtaatttcacatgcactaagtggata

SEQ ID NO: 9603 - DNA, 364 bp, Glycine max
tgtctctcaatactatgaatctgttcatcttcaagccttttgtgagaatatccgcaagttgcatttcaggactgcagtacttcaagtcaagttgttttttgctcaccttttcacgaagaaagtgaaatctcgtctctatgtgttttgatcttccgtgtactattggattcatggccaagctgatactggaattgctgtccacatacaattcgactggcctctaaatttctattttctattcttccagtaaagagtctagccatagtgcttggcatgcagcatagcatgctgcaatgtactcaacctcgcaagaagataatgctactacatgttggttctttgaacaccagcttattggtgcacc

SEQ ID NO: 9604 - DNA, 430 bp, Glycine max
tggaaggtagtcatacctcacaaaatatatatatgtatgtttaggtaggaagataccatagatatgcatgtatgtaaacaaaaaaatacttcacaaaatatatatatatgtatgtttaggtagtgaaaataccttagatatgcatgtatgtaaacaaaaaaatacttcacaaaatatatatatgtatgtttaggtagtgaaaataccttagatatgcatgtatgtaaacaaaaaaatacttcacaaaatatatatatgtatgtttaggtagtgaaaataccttagatatgcatgtatgtaaacaaaaaatatacttcacaaaatatatatatatgtatctttaagtaggaagataccttatatatgcatgtatgtaaacacaaaaaatacttcacaaaatatatatatatatatatatatatatatatat

SEQ ID NO: 9605 - DNA, 390 bp, Glycine max
tatttgtaaagaaaccctgaaccctactttgtcaaatacccattaaaactcaatcaatcaagtaatcctaaaccattatctttgaaatacccctaaaccataactagcaaagtaaccctaaagtctaatttgtcaaataaccataaatacccctaaaccataactagcaaagtaaccctaaagtctaatttgtcaaataaccataaaccctaattagttaagtaacacaaaaccctaattagtcaagtacacataaatctgaaatagtcaaacacacataaaccccaatttctcaagtaaccctaaacatctaattgttcaaatacccctaaatcctacttagtcaagtaacctaattagtcaagtacccctaaaccctatagtcaaata

SEQ ID NO: 9606 - DNA, 416 bp, Glycine max
tgtggaaacaaaaaagtgcaacacatttgatatagtttataggcttctgaagttggctttagtcttgccggtagcagctgcaagcgtggaatatgtttttttagctatgaagtttgtgaagagtatctatgtaacaaaataaatgattaatggttaaatgattctcttgtaacttttatagaaagagatgttctttgaacaatcaacaatgatgtgattttagctcatttttaaaaaatgggtaataaacgatttttattgtaaatacatatcattaaacaacattatttcttatttttaatatattttagtctataatttcttttatattttattcacactgatatttatttattgttagattcgtccctgcttgcctgccatattcaaattaaagctgtttaaatgatagaatt

SEQ ID NO: 9607 - DNA, 435 bp, Glycine max
  unsure at all n locations
taaaattcattatggatgcatacactaagagcattctaatggcttctaatctagcaactagagcatatgtttcttcataatctataccttcttcttgattatatccttttgcaactaatctagccttatttctaatgattatgccatgttcatctaacttattcccaaatacccattttgttcctatgatgggatagtttttaggtttctcaacaagttcccacacattgtttctttcaaattgatttagttcttcttgcatagcaattatccaattatcatctattatggcttcttttatatttttaggttcaatcatagatacaaaagccatattattgcataattctttaagagaatgtctagttgttaccccttttgagatatcaccaataatgttgtcgacgggatgatctnttgaggctttccattctt

SEQ ID NO: 9608 - DNA, 401 bp, Glycine max
  unsure at all n locations
tgtgttcctacaaatgctgaagaacaacccatttagtggtgctgctcatgaagatcctatacagcacctgagtgggactggttgtactcactacctgagaacaacattactacatggaaccagtgcataagtgccttcttaaggatatatttttctctcatgaagatggatcagtacatcaaggacattggaaacttcgtgcagaaggaacaagagactttacttgaagccttggaaaggctgcaagagataattagaagtttctcacatcatggcttttcacctcaaaggctagttcacattttctatggtggagtgtcctcacacaattggacaagtttggatgctacttgtgagggtaatctcattttanaaccccttactaatgacctcaagtgtag

SEQ ID NO: 9609 - DNA, 432 bp, Glycine max
tatcaaactctacaatttatgcacactgataagaatgtcatatttttgcatttaattcgtagaggagttatttcgtataaaaataataacaaaatatttataaataatatatcatttaaataattcaataatataataaagtaaaatagtaaataataaatttcacaatagttaaataatcaattttaataatacatcacacttttagataataacttaccgatattatagtggtagtatgttattagagaataatggtttgatgttattagatgtgataattttttatttgggaacaacacattaaattgaagtatgttgaatattagatagacaaaaaacaatccaaaatgatttatcttttagtctaattatttctaacttgctgactagttgactcgatagtaaactcgagagtctacttaagttact

SEQ ID NO: 9610 - DNA, 361 bp, Glycine max
  unsure at all n locations
tcagaaagaaattntggcactacagactgagaaagagtttgtaaggagcttgtatgaaaattcctatgaaaagcactgggaaattgaagaccagattacacaaatgcagaaaagggtttgcagcttgcaagatgagtttggaattaatacattcatagaagataacgatgcacgagctctgatggctgcaacagctctgaagtcatgcaaagagaccctggctaagttgcaagaggcacaggcacaatcatctgaagaggctaaagaatcataccaaatggttaaggaagctcacagcaagtttgaaacccttagagacctattcatttctaaacataagagtccacaagaccaagtaaca

SEQ ID NO: 9611 - DNA, 416 bp, Glycine max
tggaatcaaataaaaaaccacaattagtctcatattgtaaaaattgttcaaatcgtgtctcaatagaattaattgattgatctaatatgtataaaaaatactcattatgaaaagattcttcaggtgaatgtgtgatctcattactaatattttttttatcaaaatgaggctgtttatgaattttacgtttttcatgaaattttggctctatatccatttcgatagtcattttttctgtggattctaaagccaatgcaaacccgttttccctataatgttttaaataagtgataacaccttttaaatgatctatagcaacatctatatgcatatcttttgattgtagaatcttgctaacagaattgacagcaaacacaatatcataccaaatattattcctaataaatatcaaaatc

SEQ ID NO: 9612 - DNA, 422 bp, Glycine max
  unsure at all n locations
tgtaatcgattacacatatactgtaatcgagtaccagatcatattttcagaaaatattctcaacagtcacatctttctatgtggctcttgaatggctatcaaaggcctatatatatgtgacttgagacacgaatttgctaagagatctttggatcaaaaaggtcttatcctcttaaaaagcaaaatcgttttatcctcttacaaattccttggccaaattacttgtgattcaataaggaattatttgagtgctcaaattgttcaatctatctctttcaagagagatttcttcttttcttcttcttcattctgaanagggattaatagaccgacggtctcttgttgtgaaagaattctaaacacaaaggaagggttgtccttgtgtgttagaacctgaaaaagaattacacgatagtggaact

SEQ ID NO: 9613 - DNA, 414 bp, Glycine max
tgatatccttagcccctttcgatataccattgcagttagagccgacctaacatgcatacccaagatgtccaccccaagataccactgcctagtagtaaaggtctccacaagctttgccacaaagaatacccctgcaaggacatacccctcatgtgggaaaatctctttgccaaccaagtaatcaacaaagtaacttatcatgtacggaccgacatactagacaagagtagtgacaccagcaaatacggcattacaagctgcctccttccagaacgacttgagaagtgcccaagccaatgaaggctgctcggattggttttcagccttcaacctctcccaattagaattcaaaaccttataatttgtcttggatcggtctttcgccgcaacaaggggaatgttcttaagctcaag

SEQ ID NO: 9614 - DNA, 422 bp, Glycine max
  unsure at all n locations
nttaataatggtgatgtcttatttatttgtctttatgtggatgaccttatctttaccggcaataacccaaatttgtttgaagacttcaaggattccatgtctcatgaatttgagatgacagatatgggactcatgtcatattacttgggaatggaaatgaagcacatggagaatggtatctttgtctcacaagaaagctacacaaaagaagtgttgaagaaatttaatatgcttgattgcaatcccgtgaacacacctatggaaggtggcttgaagttatcaaagtttgatgaaggagagaaggtagaccccacggtcttcaagagtcatgtggggagtttgatgtatctaaccaatacaaggcccgatattctatatgcggtgggagttgtgtgttgctntatggaggctcctacctctac

SEQ ID NO: 9615 - DNA, 386 bp, Glycine max
tgtgcctcttcatgtctggaatatgaatgtagcatatatatccaaagacccttaagtgctttgctgatggcttcttcccgttccaagcttcaattggagtcttgtcttttacagacttagttggacatctgttgagtatgtaaacaacagtgtagactgcttcagcccagaatatgttaggtagtcccttttccttgagcatcgatctagccatctccataactgtgcgattctttctctcggacactccattttgttgaggagaatatgcgactgtaaggtgtctctcaatgccttcatcctcacaaaatctttcaaactcgcgagaggtgtactccttgctgcgatcacttcttagtacttttatcccgttttcactttgattt

SEQ ID NO: 9616 - DNA, 356 bp, Glycine max
tccgttgttcaatttcgtgcgtctcaatatgtgatgtgcctgtgtctgacctccgtgtgaaaagctatgaccatttgaatttctcgagatcttccgtggttaaatttcgggcgtctccatatgtgatatgcttgaatcggacctccgtgtgaaaagctatgaccatttgaatttctcgagagattgcgttgtttaattttgagcgtctcgatatctgatatgcctgaatcggacattccatttaaaagttatgactattttaatttctcgagaactttctttgttcaatttcgagcgtctctatatatgatgctcctgaatcggacttccgagtgaaaatttattatcatttaaat

SEQ ID NO: 9617 - DNA, 390 bp, Glycine max
atgaagaagcgttaaagcaggaagtatgggtcaaggctatggtataagagatacagatgatcgagaaaaacaacacatgggagttagtaaatcgtccccatcaaaaagatatcattggggctaagtgggtctataagacaaagctcaaccctgatggcaccatacagaaacacaaggcgaggctagtagctaagggttactcacagcaatccagaattgactacaatgagacatttgcaccagtagctcgtcttgataccatatgagctctaataactcttgcatcacaaaaaggatggagtatccatcaactagatgtcaaatccgcctttcttaacgccgtacttgaagaagagatctatgtggagcagccacaaggattcgtgtctg

SEQ ID NO: 9618 - DNA, 429 bp, Glycine max
  unsure at all n locations
ttagttaatttaattctactttntccaaaaataatataaatttttttatgttaaatgatataagtaaaatatctaaatctttacatttttcttataatacaaaattctaaaatattatcatatgatgtctttagatgataaattattagaaataaattcaaatgataaaaatattaaatgtgttatttcatgtaattntacatttatcaactagttttttggttaatcttaccaaactctttcaactagctttcgagtttttttaactcctaacttgtagcttataatctcccctttagtttgttagctttcatctatcttataagctaggtttatcaaacatagtctcaattattatactgtctacacatttatggattaaattcaaagttatgttttcagagattaaactgtcacccatatacacat

SEQ ID NO: 9619 - DNA, 387 bp, Glycine max
tgtcactctctggtaatcgatgaccagaacgctgtaatcgattgccagaagcccaacatttttgaaaagggatcttcagatgtgtaatagattaccatgactttgtgatcaattacgaaagcttatcaagttcaaaaatagatcgaaaaaccttgtaatggattacacaagacatgttatcgagcactactggctctgaatgtaggaaattcatattctaaatgaagagtcacaacttttcaagaaagataactgtgttatcgagtacaccaagattgtcatcgattgctagtgtcaagttatgagaaaatctggcaacagtcacatattttcattcgattgttaaatggtcatcacaggcctataaataaatgacttgatcacgaa

SEQ ID NO: 9620 - DNA, 409 bp, Glycine max
  unsure at all n locations
tgtgcattcaatatcctgatgaggatgttccatatgttctcaagactggactaatacatttgctgcccaagtttcatggtcttgtaggtgaagatcctcataagcatcttaaggagtttcatattgtttgttccaccatgaagcccccggatgtccaagaagatcatatatttctaaaggcttttcctcattctctggagggagtggcaaaagattggctatactatcttactcccaggtccattttcagctgggatgaccttaagagggtgttcttggagaaattcttccctgcatctaggaccactgccatcagaaaagacatttcaggcatcatgcaacttantggagaaaacttgtatgagtactgggaaagattcaagaaattgtgtgcaagtttccctcacca

SEQ ID NO: 9621 - DNA, 444 bp, Glycine max
tcttattccatacccaatgatgctctttgactgagagttagaatgacatcttttgactggacagatcaccaattcaagtcttatagagatttccttgtatcttagcaaagaagagtgaagagttgtccttattctagatgatacacatatccttattaaaggtgacattgtatccactgtcacataatttatttatactcaatatgcttcaatcctttaaccagtaaaacattatctatagtacgatagggagaaatgcatactttacctacaccagttatcaaacctttcttattccctcaaaaagtgaccaccccactagacatagggcttagggattggaacgcagacttttcacctgtcatgtgtcatgaacaaccactaatcaagtaccatgattggtgttctttcttgctataaaaaagatgtacaataggaattatt

SEQ ID NO: 9622 - DNA, 433 bp, Glycine max
tgttcttgactcatcttctccttgaagtggcatctccaatcatctttcttccatctccattttgctctcattgatcttcaagaagcaaaggactccattgatgaagaacattcaaggcctacaagctccacatggagctacattattttctctagtaacacaccttaagtatgtttttactcctctattgaccacctcaatttgcccatccgtttgagggttatatgttgaactaaatttcaatttaattccagcagatttgaataattccctccaaaattgactcagaaaatttttatccagataaaaaatgatggtgtttggaaacccatgtaatttcacaacctcccgaacaaatagatcaggtatgtcatttgcagtgaaggggtgactaatggggataaaatgagcatacttaagtcaatctgtctac

SEQ ID NO: 9623 - DNA, 430 bp, Glycine max
  unsure at all n locations
taaccatggaacggtatgagataattaaagatattgtgtcagggaactttggtgtggcaaagctggtcaaggaaaaatggagtggtgaattgtatgctatcaagttcattgagagaggcttcaaggttccattttcaaactccatgtatcttttctgttgtcataccttagtcttgtacatatgtactttggattgtcctttgttaatggggttctattgggttttgcagattgatgaacacgtgcaaagagagattataaatcataggtccttgaagcatcccaatatcattagatttaaagaggtaaggaattggagacatttttggtttcaatgagtatagtctcaaagtgtaattatttgccttctcggaagaaaatcattcccttcctttagctacttcttaccaactntgtgaaaatatatatg

SEQ ID NO: 9624 - DNA, 405 bp, Glycine max
tagcttgtgtcacaattcactgtgacagtcaaagtgtcattcacttatcaaatcaccaaatgtaccatgagaggacaaagcacatagatgtgaaactacacttcatcagagatgtgattcaatttgagaaggtgaaggtggagaaggttttaacagaagaaaacacgactgatatgttcacaaagtccctctctagtgtcaagttcaagcactgcctggacttgataaattttgaagatgcctaaagcaaattggtagaagtgcagccctgaatcgcaagatagacactcgttgatttggagtcaaggtggagatttgtggtgtatgactcaaaataaaaaatggcacaagtgagaaggctttaagaggtgctgtcataactgaattcagatataataactgaat

SEQ ID NO: 9625 - DNA, 358 bp, Glycine max
gagcaaattcaaacaacaataactttttactcagatgtctgattgcgtcctgtaatatatctagacgctcgaaattgaatgttgaagctctgagccaatcacacgacaataactttttactcggatgattgattgagtcccgtaatataacaagacgctcaaaattgaatgttgaagctatgagccaattcaaatgacaataactttttactcggatgtctgattgagtcccgaaatatatcgagacgctcgaaattgaatgttgaacctctgagccaattcaaacgacaataactttttactcggatgtctgattgagtcccgtaatatatcgagactgctcgaaatgaatgttgaa

SEQ ID NO: 9626 - DNA, 413 bp, Glycine max
  unsure at all n locations
agcttcaacattcaaattcgagcgtctcgttatattataggactcattcagacatccgagtaaaaagttattgacgtttgaatttgctcagagcttcaacattcaatttcgagcgtgtcgctatattacgggactatatcagacatccgagtaaaaagttattgtcgtttgaatttgctcagagcttcaacattcaatttcgagcgtctccatatattacgggactcaatcagacatccgagtaaaaagttattgtcgtttgaatttgctcaaagcttcaacattcaaattcgagcgtctcgttatattataggactcagtcagacatccgaganaaaagttattgacgtttgaatttgctcagagcttcaacattcaatttcgagcgtgtcgctatattacnggactatatc

SEQ ID NO: 9627 - DNA, 239 bp, Glycine max
agcttgaaattgaacaacggatgtctctctagaaattccaatgctcataacttttcacatggatgtccgattaaagagcataatatatcgagacgctcgaaatttaacaacggaagctctcgagaaatgcaaatggtcataactttttacacggaagtccgattcgggcgcataatatatcacgacgctcgaaattgaacaatggaacctttcgagaaattcaaatgagataacttttc

SEQ ID NO: 9628 - DNA, 259 bp, Glycine max
agcttgtgcctcttcacgtttggaatatgaatgtagcatatagatccaaagacccttaggtgctttgttgatggtttcttcccgttccaagcttcaattggagtcttgtcttttacagacttagttggacatctattgagtatgtaaatagcagtgtagactgcttcagcccaaaatgtgttaggtagtcccttctccttgagcatcgatctagccatttccataattgtgcgattctttctctcggacactccatttt

SEQ ID NO: 9629 - DNA, 173 bp, Glycine max
caataccccataaatctaacctctaagggttctaagtagtcctaccacaaaatccatagaagtagtgccccacttccactggggtatctctaaaggttgtaacttccccgaaaggttctgatgatctatcttagccttctgacagactatgcatgcatacacaaactcactaa

SEQ ID NO: 9630 - DNA, 197 bp, Glycine max
ttactatgcagataatatccaagaaaaataccttcatctgacttagcatcaaatcttcctaagttatctttgccttattcaatacaaaacatttacaaccaaagatatgaagatgtgagatgtttggttttcttccattgaacaattcatatggagtttctttcaaatgggtcttaattaagtcctatctaaaatct

SEQ ID NO: 9631 - DNA, 417 bp, Glycine max
  unsure at all n locations
aactaccataagggaaaagagcctagtgtgcttagcgcatgtttagaaacaagccagactaggcaagtaaagttgtgagaaacaagacaagattgttgccaaaggttactcacaatatgaaggtatagactatacataaacctttgctcatgttactcgtctaaggcaatacacattatactctcatttacagctcatacaaaaatgagactatatcaaatagacgtaaaaagtgcattcctcaatggagcaatacaagaagtagtccatgtagaacaaccccatgggtttgagggtaacactnttccacaccatgtatgtaaacttaataaagctttgtatggacttaagcaagctcttagagccttggatgaatgtatcaaatcatttctttaagcaatggatttgacagaggaa

SEQ ID NO: 9632 - DNA, 402 bp, Glycine max
  unsure at all n locations
agcttatagaatatataataaaagaacattgacaattgaagagtctattcatgtttcctttgatgagtctaatgccattcttccaaggaaggattttttagatgatatttcagattccttagaagatacacatattcatggaaatgactctaaagaaaaagatgaaggaagcaatgaggattctcaagataatggagttagaggaaataatgaacttccaagagaatggaaagcctcaagagatcaccccctcgacaacattattggtgatatatcaaaaggggtaacaactagacattctcttaaagatttatgcaataatatggcttttgtatctatgattaaacctaanaatataaaagaagccataataaatgataactggatcattgtcatgcaaga

SEQ ID NO: 9633 - DNA, 450 bp, Glycine max
tatgttgcaaacatttacaatagacctcctcaacctctttagaaaatcaaccacaacagaacaattatgacctctccagcaacatatacaatcccggatgaggaatcatcctaatctcaaatggtctagccctcaacaacaacaacagcagcctgctccttccttccaaaatgttgttggcccaagcagaccatacattcctccaccaatccaacaacagcaacagccccaaaaacaacaaacagttgaggttcctccgcaaccttccctcgaataacttgtgaggcaaatgactatgcaaaacatgcagtttcaataagagaccagagcctctattcagagcttaactaatcagatgggacaattggctacacagttaaatcaacaaccagtcccaaattctgacaagcttgcttctcaatctgtccagaatcccaaaattctacacat

SEQ ID NO: 9634 - DNA, 392 bp, Glycine max
  unsure at all n locations
agcttccttgaaaagattcctaaagaagctagagcttagctacacacacctctctaatagctaagctcacctccttgagatgagaagcttgaacttagctacacaccccctataatagctaagctcacccccatgacaaaatacatgaaaatacaaaaaaaagtctgtactacaaagactactcaaaatgcctcgaaatacaaggctaaaaccctatactactattatggccaaaatacaaggcctaaacgaaggaaaaaaaacctattctaatatttacaaagataagcgggctcatacttaacccatgggctcaaaatctaccctaaggctcatgagaaccctanggccttcccttggatctctggcccaatctacttggagtcttctat

SEQ ID NO: 9635 - DNA, 429 bp, Glycine max
agcttaaaaaccaactggtagttgaaacttaactaaaggttatgtttgacaaaactaattggaagcttaaaagcttaaaaactagctagtcaatattttatgtaacacttcaaattctttttccaaaaatttgcttcaaaaactatttaaataataaatattatgaaatgtgtcatttactcttaatttctatttctaagttggcaaagtatctcatcaattttctttttataaattagatgaaataaaataaagtaaaataagtgtgttgcttgaaaaatgcaagttttcacatcacaatattaaatttgtaaataaatgaacttaggtttataatatgatgcctttgccgcaaataaagcaaataaatagtctcacactagaagaaatttggatacaacccacagtgtaaaagtagttaaatgattg

SEQ ID NO: 9636 - DNA, 358 bp, Glycine max
  unsure at all n locations
agcttgtaggcctttgatcttcttcattattagagtcttttgcttcttgaagatcaatggaagtggaatagagaaggaggaaaggtgattggagatgccacttcaaggagaagatgagtcaagaacaagctcactaccataggaagccatggataagagcttgaaggtaggagaaaatgagtggagggagaggcagagaggggggaacaaaatttatgcctcaaatgaggtcagaactttgaagtctaatttctcaaatgatcaaagttgaaaaaattcacacacaaggcctctatttatagcctaagtgtcacacaaaattggagggaaattngaatttctattncaaattatcttg

SEQ ID NO: 9637 - DNA, 425 bp, Glycine max
  unsure at all n locations
ctatgctgcanatatntacaatagacctcctaacctatcttcgaaatcaacctcagcagaacatatttgacctctccagcaacagatacaaccctggatgaggaatcaccctaacctcagatggtccagccctcagcaacaacaacagcagcctgctccttccttccaaaatgctgctggcccaagcagaccatacattcctccaccaatccaacaacaacaacaaccccaaaaacagccaacagttgaagcccctccacaaacttccctcgaagaacttgtgaggcaaatgactatgcagaacatgcatgtttagcaagagaccagagtctcaatttagagcttaaccaatcagatgggacaattggctacccaattgaattaacaacagtcccagaattctgacaagttgtcttctcaagctg

SEQ ID NO: 9638 - DNA, 446 bp, Glycine max
  unsure at all n locations
tggttcatatcattattagattacatattattctcttatttatgattagatactatatagtgatttagtccttattactctttattaaattgagggcgaccctggtgcagcggtaaagttgtgccttggtgacttgttggtcatgggttcgaatccggaaacagcctctttgcatatatgcaagggtaaggctgcgtacaacatccctcccccataccttcgcatagcgaagagcctctgggcaatggggtacgaagttttttttttttactctttattaaattgatcctctataatcaatattaatcctatttgttcattataaataaagacttagtgtggtcatccaacacacacacaacattacagtaaaatacttttatatattaacatctttgagagaaatatcatatcatgtacacttaaanataacagcaatataatga

SEQ ID NO: 9639 - DNA, 357 bp, Glycine max
tggttcgaggtacttacccgtagaagatcgaagaacgatgatgaacgaatgattaacgtcgaataacggttaaaacctgttagtgcttatctctactgactttaaaagataggctaagattttgttaaaacataagcacttatacaatgaaggaaagctggagttgctgcacatgatgtccaacgttatgtcaaggaataagatcgggctgcacaatgcacaaggcaagataaaatgtcaaatgaagaattgaaagtgcaggatccacgatgtcggatacaatgtcctgacatcctgcccgagaatactggagttgctgtacaatgcaagataaaagtcaagtgcagaagtgaagct

SEQ ID NO: 9640 - DNA, 355 bp, Glycine max
  unsure at all n locations
tcaagatattatttgatgatgccaaagaatttcaaagatctttaaagatgaatttcaaggatgatgaaagcaagatgtcaagcaaagcaaagatctcaaataagaattaagatagactcttagaaaagtttctgaaaaacacaaatgataggccaagtgagtttctatcttaacaaaaacttttccaagcattttactctctggtaatcgattaccagaggttgtaattgattaccagtggccacaaagctttctggaaatgttttcaaagttattttcaaagttttcaaagttgtaatcgattaccaatgctttaaaacagttaaaaatgattntgtaaatatgtaatcgatta

SEQ ID NO: 9641 - DNA, 401 bp, Glycine max
agcttaaagtccattatggatgcataggctaataacattctgattgtttctaatctagcaactagagcacatgtttcctcataatctatcccctcttcttggttatatcctttggcgactaatctagccctatttctaataattattcctcttggaagatcataatttgttttgacttcatcaacttgagagtcttcattgtttatttctccttttcctttatgatattttccaagaatatgtatttcttcttatgattctgaaatatcatctagtatatcctttcttggcaaaatagcattagattcatcaaaagaaacatgaatggattcctcaataatcatagttctttggttatatattctatatgctttactctgcaatgaatatccaagaaagat

SEQ ID NO: 9642 - DNA, 319 bp, Glycine max
  unsure at all n locations
taacacaaggcatgcgaagtgggtggaattcctagagttattcccttatgttatcaaacataaaaagggaaaaggtaatattgtagccgatgctctttctggcgtcatgcattactttctatgcttgaaacaaaattgattggtcttgaatgtttgaaaagcatgtatgaaaatgatgaaacttttggagaaatttttaaaaattgtgaaaaattttcagaaaatggtttctttagacatgaaggctttcttttcaaagaaaacanaatgtgtgtgcctaaatgttctactagaaatttgctggtttgtgaagcacatg

SEQ ID NO: 9643 - DNA, 389 bp, Glycine max
  unsure at all n locations
tggcatttattcagctgcaaggtacaagatttaaccatagcataatatgtttctcaactctttaaatatttagctctatgcatatatgattggggtaatttgcaggtattttacttgtgcaaatgtgatgcctggttcacttggttatggagagcaagatgccaagactttcgcatcatgggtatataacactgcttctttcttaaatttgattattccttttgcttcactcaaacatatcagttgctatttaacaaacgggtattatcatcattgttttatctttcttagggtgttgattatcttaagtatgacattngtaacaatggtggaacacagcctattgataggtatgtaaaatagttatattttcacaacactgttatata

SEQ ID NO: 9644 - DNA, 332 bp, Glycine max
cacctatgtctgcaagtcatttgatgttgcaagcaaggtcgatagccagctgaaatagtgatttggcccatgttctcaagtcctcctattcatggtgcatccattgtggctgccattctcaatgaccggttatgagctcaacttctgctacacaaagaaggattagtagctgactatcttatgattctttccccactgctcttttttttctctgatgaatactagtcttgaatggcactgtcacatggtaaagaatatgatggtacttcgatatgtatagaggccattctccaatatatggttgatttaatgggagatcctaatgacattgc

SEQ ID NO: 9645 - DNA, 423 bp, Glycine max
  unsure at all n locations
agcttgctntntgtgcttttcattgctttaattgttgaataatccttggaaatttgtcttgttaaaactctattggtttagctttcatttcattttttttggtctttggttattgcttgtctctttgtttccttgcttgtgagttgccatatagggaattggaaatgaggattggtgccatatcttaaagaatttgagtcaagaagcaaggggccaaccaccttaagagctattggactaagaagcactccaaattgagtgaaacactaaagagagaatagccaccacaattgaggactnttttctttgtaattttgtaattggcaatttgctntgctttcaaattttgtaacaaaaaggcctttcattggaagtaagttgggagcctctgctangtcaccctactttcatttgtatgtaata

SEQ ID NO: 9646 - DNA, 379 bp, Glycine max
  unsure at all n locations
agcttactaaaacctttgatcttgttgatagacttggatctatgagaatcatgcttgcctttgttgctcataaaaacataaatcttttacaaaagggtgttaagagtgcctttttaaatggtttcattgaggaggaactctatgtttaagaacctcctggttttgaagatcacactnttctagatcatgtgtttaaacttaaaaatgctatgtatgatttgaaacaagcacctcgtgcatggtatgatagactgagctcttttcttttagaaaatggttgtttcggaggcaaaagtaatactactctttttagaagagaagtgggaatggtttcattatattttaattatgtagatgatatatatttggagtactaatg

SEQ ID NO: 9647 - DNA, 362 bp, Glycine max
  unsure at all n locations
cctctncacgtctggaatgtgaagagcatatatatccatagaccccttatgtttcttgactatcggcgacagttcaatccagactgatgaaaggtgatggagactccccttctaagagaagatgagttaagagcaagctcaccaccataagaagccatggataagagcctgaaggcaggagaagatgagtggagggagagggaaagaggggaacaaaattttgagagagataagagggagaatgaggtctaaagtttgaagtctaatttctcaaattatcaaagttgcaaaatgcatacacaaggcatttatttatagcctaagtgtcacccaaaattggagggaaattngaatttctattc

SEQ ID NO: 9648 - DNA, 307 bp, Glycine max
agcttttgcaagctggaatcatacatcctatgtttgacagccagtgggtgactgccgtacaggtagtcccgaaaaagaccatcctcacagtgataaagcatgagacggaggagctgattcctactcgggtgcacaataaatggagagtctgcattgactatacgaggctaaagcatgataccaaaaatgaccattatccgatgccatacagtgaccagatgcttgaatgcctggcagggaaatctcacatagctggtccttgatggtttttttggatatatgcttataactattgctcatgaggatc

SEQ ID NO: 9649 - DNA, 365 bp, Glycine max
  unsure at all n locations
agctntagtgtttagtgtcaagtcttatgttttactgtgtagggtctaatccttagggtttaggatttagggtgtaggggttatggtttagaatttagaggtaatggtttagggtcaagtcttagcgtttagggtttaggttttacggtttagggttgaaataaaattactccagactcatatgcatctaatgaaataaaattacatttagaagttgaaataaatggagtggatcaagccaggttgagtgactttagttatccataagtaaaccttaataaactgaataccatacattacgtgtgaaattcaaatgagaaatatacaacaaaatatttaaacggagacatgcaaatcattcattt

SEQ ID NO: 9650 - DNA, 389 bp, Glycine max
  unsure at all n locations
gcttgtgcctcttcacgtctggaatatgaatagcatatagatccaaagacccttatgtgctttgctgatggcttcttcccgttccaagcttcaattggagtctgtcttttacagacttagttggacatctgttgagtatgtaaacagcaatgtagactacttcagcccaaaatgtgttaggtagtcccttctccttgagcatcgatctagccatttccataactgtgcgattttttctctcagacactccattttgttgaggagaatatgcgactgtaagttttcgctcaatgccttcatcctcacaaaatctttcanacttgcgagaggtgtactcttttccgtgatcacttcttaatacttttattcattttccactttgatttttc

SEQ ID NO: 9651 - DNA, 379 bp, Glycine max
cctcttgcctgtctctatataaccttttgggcgggtcatatagatgtgtccctctaaatccccatgcaggaatgcaattttaacatctaattgctccaagtgaagattctctgcagctactatactcagaataactctgatggtagtcatctttacaactggagagaagatctctgtgaaatcaattccttgtttctgctgaaaccctttcaccataagtctcgccttgtatcttcttctaccgtcagattcttcctttagcctatagacccacctattctgtaacgttttctttccttttagcaatttagttagagaccacgtcttagtcttatgaagggatgtcatctcatctttcatcgctagctcccacttaata

SEQ ID NO: 9652 - DNA, 406 bp, Glycine max
  unsure at all n locations
agcttgccatttaaaaaggcattgttattatcaatttgctaaagatcccaatgaaaggaagtgactaaagtcagaatagttctgattcttataggtttcacaactagggaaaatgtttctttgaaatcaaaaccaggttgttgatggaagccttttgctacaagacgtgccttgtacttactgacagacccatctgaattatgcttgactctaaaatcccgcttgcaaccaattggttgcctattaggaggtttaggaaccagttcccatgtattgcttttgagtagtgcaaccatttcttcatccatagcatctttccacttanggatcttaagtgtngttnttgacagtttaggcacaacatgagttaaaagccagggtggttggagtctaggcttgacaattc

SEQ ID NO: 9653 - DNA, 297 bp, Glycine max
agcttgtgcatccaataccctgttgaggatgtcccatatgttcttaaaactggactgattcatttgcttccaaagtttcatggccttgcaggtgaagacccgcacaaacatttgaaagaatttcacattgtctgctccaccatgaaacccccagatgtccaagaggatcacatatttctgaaggcttttcctcactcattagagggagtggcaaaggactggctgtattaccttgctccaaggtccatcacgagctgggatgaccttaagagagtattcttagaaaaaattttccct

SEQ ID NO: 9654 - DNA, 319 bp, Glycine max
agcttcaacattcaatttcgagcgtctctatgtattacgggacttaatcagacatccgagcaaaaagttattgtcgtttgaattagctcagagcatcagaattcaatttcgatcgtctcaatatattacgggactcaatgagacatctgagtaaaaaagttattgccgtttgaatttgttgagagcttcaacattccatttcgagcgtttcgatattttacgggactcaatcagacatccgagtaaaaagttattgtccgttgaatttgctgagagctccaacattcaatttcgagcggtctgatgtttacgggactca

SEQ ID NO: 9655 - DNA, 382 bp, Glycine max
  unsure at all n locations
agcttctcactcncttgacattcatgggaggaggaagtttctcaatcacatcaatctttgccttgtccacctctattccccttactattccttcttgaaccatgaatgacatttctcccaattgagaactagattggactcttcacatctttgtaatactctttcaagatttgataagcaggcttcaaaagatggcccaaaattagagaaatcatccatganaacttcaatgcatttttccaccatatcagaaaaaatagccatcatacacctctgaaatgtagttagggcattgcatagaccaaaaggcatgcgccgatatacgaatacaccaaaaaggcaggtgaaagtagtactctcttgatcttgggatctacaaaat

SEQ ID NO: 9656 - DNA, 353 bp, Glycine max
  unsure at all n locations
agcttatgttgcactttcaacttctcgaagctaaatatgtagttgtaggaagttgttatgctcaaagtcttaggatgaagcaacaactagaagactttggagtaaaccttgatcacatttagggattaggcatatagaaataaggcatcattttcttagagatcatgtgttaaaaggttacaactacattgacttcattgatagtaagcatcaactagcagacattttcactaaaccgcttgctagagataggttctttttcattagaaaggaactaggcatattggatgcatctagcatagaataatattttgtttgcatagtgtgtgaatcatatngctattcatatcatt

SEQ ID NO: 9657 - DNA, 347 bp, Glycine max
agcttttgtttactttttttattaaattattattattgactcaaatgtggatttaatatttataaatatatttttatgaatctaattactgtaatatattgatatggtcaagattttacattatcatttacttttttatcgttatataagatgataaaattgtaattttgtaataaaaaaacttattattttaacaccatataactaatgtatagtataatttgttctacgctcataatatatcagaattaacatatactgttatttgatttagtcttctacatatttttattattttcttatccctcgattaagattattttttaacatcatgagaatatattttt

SEQ ID NO: 9658 - DNA, 383 bp, Glycine max
  unsure at all n locations
cggaccttaagcaccgcggctgcaagctttgtggtacataaaacggtgcttggatagcctgatcgctagctgccatgttctcaatgagttccatcacttcctcgggtgtctttaacttgatctttcctcccgtggatgcgtccagtaattgcttcgattgaggtcgtaatccatcaataaagatgtttaattgtactagctcgctatatccatgagtgggcgttttccttaacaatccgtggaaacgatctaaggcttcgctaagggattcatctagtaattgatggaaagatgagatttccaatttcccttcagctgtcttggattcanggaagtactttntcataaatntctctacaacttctttcccaagtcctaaaggt

SEQ ID NO: 9659 - DNA, 341 bp, Glycine max
  unsure at all n locations
tgcctataggttggacctcccagaagagtatggagtcagcaccacttttaacatttctgatttaactccttttgcaggtggagctgatattgaggaggaggaactaacagatttgaggtcaaatcctcttcaaggggaagaggatgatgcaatccccctatgaagggaccaatcactagaaccatgagcaagaggctccaagaagattgggctagagctgctgaagaaagccctatggttctcatgaaccttanggtagatttctgagcccatgggccaaggttgggtccaattatctttgtacatattagactaggatgtcattatatttggtcccttga

SEQ ID NO: 9660 - DNA, 447 bp, Glycine max
  unsure at all n locations
agctntgtggcatagaaagctttattntttgataagtttagatatcctgagaattctgctcatggtcaactcccaagaacagtggatgtaattgcagaagacgaccttgttgattcttgcaagcctggagatcgagtggcaattgtggggatatataaggctcttgcaaggaaaaggtagtgtgaatggagtatttaggtagctccagaaaatatactgacataactcctttgcacttgcttgctttcttgaacagaaacttgattgactgattttcatgtaggactgttctcatagccaacaatgtttctcttctcaacaaagaggataatgcaccaatctacagtgttgaagatgtcaaaaacattaaagagatagctacaagagatgatgcanttgatctgctaagtgattcacttgcaccttctatatatgggcattcttgga

SEQ ID NO: 9661 - DNA, 356 bp, Glycine max
  unsure at all n locations
ggaactacttcacatggtcattatggggcctatgcaagttgaaagccttggaggaaagaggtatgcctatgttgttgtggatgatttctccagatttacctgngtaaactttatcagagagaaatcagaaacctttgaagtattcaaagagttgagtctaagacttcaaagagagaaagactgtgtcatcaagagaatcaggagtgaccatggcagagaatttgaaaacagcaggttcactgaattctgcacatctgaaggcatcactcatgagttctctgcagccattacaccacaacagaatgggatagttgagaggaaaaacaggaccttgcaagaggctgctcgggtcatgc

SEQ ID NO: 9662 - DNA, 452 bp, Glycine max
agcttcaacattcaatttcgagcgtctcgttatattactggactcaatcagacatccgagtaaaaagttattgtcgattgaattggctcagagcttcaacattcaatttcgagggtctcgatatattgcgggactcaatcagacatccgagtaaaaagttattgtcgtttgaattggctcagagcttcaacattcaatttcgagcgtctcgatatatgacgggactcaatcagacatccgagtaaaaagttattgtcgtttgaattggctcagaggttcaacattcaatttcgagcgtctcgatatactacgggactcaatcagacatccgagtaaaacgttattgtcgtttgaattggctcagaggttcaacattcatattcgagcgtctcgatatattacgggactcaatcagacatccgagtaaaaattattgtcgtttgaattggctc

SEQ ID NO: 9663 - DNA, 427 bp, Glycine max
tgtagggttaaagtctcacgattgtcacgtgctcatgcaataattgttagccgtggctatacgagacatcttgccaaacaaagtcaggttagcgataactcgcctgtgctttttcttccatgctatatgtagcaaagtcattgatccagtcaagtttgatgagatggaaaatgaggccgcaattatattgtgccagttggagatgtattttccccctgctttttttgacatcatgattcacttgattgtgcatctggtcagagaaatcaaatgttgtggtcctatttatctatggtggatgtacccgattaagcgatgcatgaagatcttaaaagggtatacaaagaatatatatcgtccaaaagcatctattgttgagaggtacattgtagaagaagccatttgaatttgttcagaatacttagag

SEQ ID NO: 9664 - DNA, 389 bp, Glycine max
  unsure at all n locations
tgacactctgaaactaagctatccaatgggtcgccattattntcttcttagtcctttttctttgtatgagcatttctattttgtctcttgtaatggagtaagctagcttatgctattgaaattaatcatttgtcaccattattcttaattctctcttctcttcacaggtacaaggtagcattaggggtggctttggcccttcgttatcttcatgaggatgcggagcagagtgttcttcatagggatattaagtcagctaatgtgttgttggacacggattttagcaccaagcttggcgattntgggatggctaagttggtggatccaaggttgaggactcaaaggacagggctggtggggacttatgggtaccttgccccagaatatat

SEQ ID NO: 9665 - DNA, 457 bp, Glycine max
agcttagctacacacacctctctaatagctaagttttcctccttgagatgagaagctagagcttagctacacaccccctataatagctaagctcacccccatgacaaaaaacatgaaaataccaaaaaaaagtccttactacaaagaatactcaaaatgccccgaaatacaaggctaaaaccctatactactagaatggccaaaatacaaggcccaaacgaaggaaaaagctattctaatatttacaaagaagagtagatccaacctttacccatgggctcaaaaatctaccctaaggttcatgagaatcctagggccttctttagtagctctagcccaagcctcttggagtcttctatccaatacccttggggggtaggattgcatcatcccctccagcttggaaaggatttgacctcaaatcccgaggttcttcatactctaggctccttccctc

SEQ ID NO: 9666 - DNA, 389 bp, Glycine max
  unsure at all n locations
gagcacttnttggtcgatattgtatctcttcactttctccttgctagatcaatctaatatgcctagttcatttctaatgaaaaagaacctatctctagcaagtggtttagtgaaaagtctgcttgttgatgctcactatctatgaactcaatgcaacaatcaccttttaacacatgatctctaagaaaatgatgcattatttctatatgttcagtccaataatgcatgccagaatttttagttagattgatcacacttgtgttgtcacattttagaggaatgtgatcaaggtttactccaaagtcttcaacttgttgcttcatccagagattttgagcacaacaacttcctacaactatatattaagcttcggtagtagaagtgctaca

SEQ ID NO: 9667 - DNA, 427 bp, Glycine max
  unsure at all n locations
gacactataaaactcagctggaagcaacacagcttataagagccacctttttcctcgcttaagagttctacggggggggagttcacagtacccttataatcttgggtggagttaagcacctcaaattaatgtgagcaccatattaattatcaactggtgaattcaattaagttcttaattatattccaacaacaagatcgcagaaattaacctgaaagaaagaggtttgagagggatccagccctgtgttgccaggaggaacaacaacatcaataggtgcaaccaaccctacacgagcaggagctaccaactgtatagaaaatntggataacaacatccaaaagtgaatatataggaagctcacaacttaattaaaggtaactttctctcattcaacatatatatacactacactcaatcatagcat

SEQ ID NO: 9668 - DNA, 423 bp, Glycine max
  unsure at all n locations
gggatttcctttagtagggaatctatccttcctatgatgtatccaaaccaagtcaccctcattaagaactagctcttttcttcctctattgcctttagttgaatacacctttgtttggttctctatttggttcttaaccctctcatgcatcttctttacaaattctgacctagattccccttctttatgtataaaaaaagtgtccagtgggaggggaatgaggtctaacggtgttaggggattgaacccatagacaacctcaaaaggggactgcttggtggttctatgaacccccctgttgtaggcaaattctacatgagaaagatactcatcccaagacttatggttgcctttcagaagagcccttanaagggtggataaagacctattcactacctctgtttgcccatcagtttgtggatg

SEQ ID NO: 9669 - DNA, 457 bp, Glycine max
  unsure at all n locations
agcttgtgcattcaatatcctaatgagggtgttctttatgttttcaagactggactaatacatttgctgcccaagtttcatggtcttgcaagtgaagatcctcataagcatcttaaggagttccatattgtctgttccaccatgaagacccctgatgtccaggaagatcatatctttctaaaggcttttcctcattctctggaggaagtggcaaaagattggttgtactaccttgctcccaggtccattaccaactgggattacctgaagagggtgttcttggagaaattcttccctgcatctaggaccactgcaatcaaaaaatacattttatgcatcaggcaacttagtggagagagcttgtatgagtactgngaaagattcaagatattatgtgcaagctgtcctcaccaccaaatttctgagcagctccttctgcaatatttctatgagggac

SEQ ID NO: 9670 - DNA, 424 bp, Glycine max
tgaaattgaacaacggaagctcttgagaaactcaaatgtgttcatctcgtcacacggaagtccgattcaagcgcataatatatcgagatgctcgaaattgaacaacgaatgctctcgtgaaattcaaatggtcataacttgtcacacggaagtccgattcaggtgcataatatatcgagacactcgaaattgaacaaccaaagctctcgagaaattcaaatggtcataacttttcacacggaagtctgattcaggcacataatatatcgagacgctcgaaattgaacaacgtatggtgtcgagaaattcaaatgggcataacttgtcacacggatgtccgattcaagcacataatatatccagatgctcgaaattgaacatcggaagctctcgagaaattccaatggtcataacatttcacacg

SEQ ID NO: 9671 - DNA, 393 bp, Glycine max
  unsure at all n locations
agcttgaaattgaacaacggaagctgncgatatatttatatgttcataacttatgacacaaaagtccgattcaggcgcataatatatcgagacgctcgaaattgaacaacgaaagctctcgaggaattcaaatggtcatatcttgtcacacggaagtccgattcaggcgcataatatatcgagacgctcgaaattgaacaacggaagctctcgagaaattcaaatggtcgtaacttgtcacacggaagtccggttcaggcgcataatatatcgagacgctctaaattgaacatcggatgctctcgagaaatgcaaatggtcataacttgtcacacggaagcccgattctggcgcataatatatcgaaacgctggaaattgaacaacggaagct

SEQ ID NO: 9672 - DNA, 448 bp, Glycine max
  unsure at all n locations
agcttacttgtatgatggctactgttgaagatantggnacaatcgaggctttctataatgcaaatctgggaatcaccaaaaagcctgtgcctgacttcaggtaaattgcctatttgatatatccatcatattgacaaatgtatttcaatgatagtgttttgtggttctgatgtttatgtgttcatgcgttttggcatattgattgcagtttctatgatcgttcatctccaatctacacccaaccacgatatttgcctccctctaagatgcttgatgctgatgtcactgatagtgttattggtgaaggatgtgtgattaaggtaagcatttcagaaccttcacattctactgatctgctctgtacatgagaattatacaattcttaacaaagatgtcaaatataatgagattaatttatttataggaaactaaccttgtattccatact

SEQ ID NO: 9673 - DNA, 429 bp, Glycine max
agcttatctcatttcattttatatcaactattgtacacaaggaattacatgataaaatgctgagagagtagcataaaatggagccaccttgctaactcatgagacatcccatttgtttgtctcttgaccaaaacctattccaaaggttgaaaattgggccaaaacctgttagacaaatgacctcagataacttaagaaggggggttgaattaagatattgcaaactatttccccaattaaaattctattttaatttcaatgcaagttacaagttcccttaaaaatgaactcttaaataatgattcaaataaaacaatctgaatataaatgcaaagcaataagaaataaaatagtttaagggaagagaaagtgcaaactcagatttatactggttcggccacacccttgtgcctatgtccagtccccaag

SEQ ID NO: 9674 - DNA, 417 bp, Glycine max
tgacgttccaattgctggaacacagagctgccactctcctcttgattatgatgtagaatctacagccaacgacttagaataatggggtcattccgaaacatctcctgtagttcttcaagaaggtgagaaattagaagatttcagtgcaaatgaatctcatttgactgttgaacctgatcctccacagctcaattctggaatcaatcagagaccaaaaaggatcactatacctcctgaaagatacggatttgaagacatggctgcctatgcattacatgcagttgaagaaatagattcaaatgaaccaaccacttaccaagaagctatcaatcatcctgaagctgagaattggttgttagctatgaaagacgaaatggaatctttgtataagaatcagacctggaaacttgttgaact

SEQ ID NO: 9675 - DNA, 446 bp, Glycine max
  unsure at all n locations
agctntctctggtctacaagagctctttctttctcatacacttcttctgcaaatggaaacacgttctacaaactcccaggtggttgtctcaaaccaggagagaatggtaagatcttgcttatttttttctaaatataatagtctgaaaataacaactcatgattatcttaatgtacatttttgtgggcttgaagagaaagttgactagcaagcttggtgctaattcatcagcttttgtgcctaactggcaggtattattactttttattgttaaatttggcagttggtgtctatttgtgtctttattgttgtcatttgcatgtatccttggaaaactgcagataggtgagtatgtagaaatctggtgaaggctcttcttttattgaagtacactgctaagccacaatacaagtgatcgaggccgtacccgaatcatataaacatga

SEQ ID NO: 9676 - DNA, 453 bp, Glycine max
  unsure at all n locations
agctnttatccatggcctcctatggtggttagcttcttctagactcatcttctccttgaagtggcatctcgtctctctcttccttctccattccgctgccattcatcttccaggaagcaaaggaatccattgatgaagaagatcctaggcctacaagctcaaatggagcttacatcatgtggtatcaagagcatcttcatctaggtgatgttcatttgcttcctctatctttttgttcggtgaattctctttagttccttgttcttcatcttattctccatgtatatcctccattgtcttgtggtttggtgctgtttagagtatattcaaaaaaataaaccgattaaatcttagatctacatttgttcttgcatttctctggttcanattttgtagatctactcttgaatcttggttttgtgttgattttaggttctatcaattntcattcat

SEQ ID NO: 9677 - DNA, 388 bp, Glycine max
  unsure at all n locations
tgtaatcgattacacacatactgtaatcgattaccttactttgtttttagaanacattctcaacagtctcatctttttatctgtttcttaaatggccatcaaaggcttatatatatgtgacttgagacacaaatttgaaaagagttttcaagaacaaagaggtcttatcctcttaaaaagcaaaatagtttctatcctcttacaaattccttggccaatacacttgtgattcaataaggaattattngagtgctcaaattgttcaatctatctctttcaagagagatttcttctcctcttcttctttattctgaacagggattaagagaccgacggtctcttgttgtgaaaagaattctaaacaacaaggaatgattgtccttgtgtg

SEQ ID NO: 9678 - DNA, 406 bp, Glycine max
  unsure at all n locations
ngtctanaggtgtgtttgattcccatatcttctactttggcaaaacaaaatcaaaattgaacttctcttgttcttcaggcttggcagcagtatcaccattcctatcattaataattgattttgggtctttaacggtttggacaacctcagtgatagaacccaaagctttctccttttgacgagctggtaaatgatattaaatgattacttttaaagtcagaatatcacatattactaataatggcttaacatattaccatcataacgaattaatgacttangtaatccatttggtcgtaatgccttttcattcacgccttctgtatacttgctcacttcaacctgcattctgtagtaatagatgtattagcagtaagcatatttcagctgttacttaatactaaaa

SEQ ID NO: 9679 - DNA, 417 bp, Glycine max
agctctgagcaacttcaaacaacaataacgttttttctgatgtctgatagagacccgtaatatatccagacgctcgaaattgaataccgaagctctgagcaaattcaaacgacaataagtttttactcggatgttcgattgagtcccgtaatatatcgaaacgctcgaaattgaagaccgaatctctgagcaaattcaaacgacaataactttttactcggatgtctgattgagtcccgcaatatatcgaaacgctcgatattgaatgtcgtagctctgagcaaatacaaacgacaataactttctactccgatgtctgactgactcgcgtgatatattgagacactcaagattgattagcgaagctctgagacaattcagatgacaataacattttactcggatgtctgagtgaga

SEQ ID NO: 9680 - DNA, 371 bp, Glycine max
taagctccttcaactgtacaaggctcttaatatttgtagtttattcttgtggaaccttcacccgacaaagacactgacaaaaacttatcttctcctttttggacaaagtatgacaagctgggggcaaataaatattcttcccatctgaccttggatgcaactgtgatcatatccccatctcagctagatcatgacgggtattcaagccatccttcgtcttgccttgaatgttaaggagcgtaccaatgacactgtcacatacattattctccacatgcataacatcaatacaatgtctaacgtctagattagaccagtacggaagatcaaagaaaatggacttcttcttccatatgcaagtcttactttta

SEQ ID NO: 9681 - DNA, 454 bp, Glycine max
  unsure at all n locations
agcttgtcttcaacaaataaatcattatctttttgtgatcttcaaagcccaactccagcttctttctccccatatccactatgcagcttgcagttagcatgaatggccttcccaatattacaggaatgtcattatcttcacagatatccattaccacaaagtctgcctgttttactctgaccagcacatcttcaattactccatatggtctggtaatggagcggtcaacaagttgtaaagtcatcctagtgggcatgatctcctactctcccaaccttctgcacatggagagtggcattaagttaatactggctcccaggtcaataagagcctttcccacagtgacttctccaattgaataaggaatggttacactcccagggtctatacgctngggtggaaggaccttttgaatcacaacactacaatttccatccacaacaatgttttcctg

SEQ ID NO: 9682 - DNA, 363 bp, Glycine max
  unsure at all n locations
agcttaataagtccatctatgtattgaaactatcctcctgctagtggtatttaaaatttcatgaggttatttcttcattcagctttgaagagaatgtcatggatcactgtatatactagaaggtcagtgggagtaagatttgtttccttgtattatacatagatgatattctacttgcgactaatgataagggtatgctatatgaggtgaaacaatttctctcaaagaactttgatatgaaggatatgggagaggcatcttatgtcataggcataaagatccatagagaaagatctcgaggcattntaggcttgtctcaagaaacctatatcaacaaagttttagagagatttaacatgaaag

SEQ ID NO: 9683 - DNA, 451 bp, Glycine max
agctcaataaatctatgtatgatttaaaacttgccttacttcagtggtaccttaagtttcatgggataatttcttcatttggatttgatgaaaaccacatggatcaatgcatataccacaaggtcagtgggagtaaaatatgttatcttgttttatatgtagatgatattttacttgcaaccaatgatcaaggtttgctacatgaggtgaaacaatttctctctaagaatatggacatgaaggatatgggtgatgcatcttatgtcatcggcattaagattcatagagatagacctcgaggtattttaggtctatcataagagacctatattaacaaaactttatagtgaatttggatgaaaattgttcaccaagtgttgctcccatcgtgaagggtgatagatttaatttgaaccaatgcccataacatgacttttgaagggaacagatg

SEQ ID NO: 9684 - DNA, 442 bp, Glycine max
cctgcggcatgcaagcttgaaattgaacaacggaagctctcgagaatatataatggttataactcagcacacggacgtgcgattcaggcgcataaaatatcgagacgctcgaaatagaacaacgaatgctcttgagaaattcaaatggtcataacttgtcacacggatgtccgattcatctacataatatatccagacggtcgaaattgaacatcggaagctctcgacaaattgcaatggtcataacttttcacaaggaagcccgattctagcgcatcacgtatcgagatgctctgaattgaaaaccggaagctctcaagaaattgaaatggtcataacttgtcacacggaagtccgattcagacgcataatatatcaagatgctcgaaattgaacaacgaatgctctcgagaaattcatatggacataacttgtcacacgg

SEQ ID NO: 9685 - DNA, 416 bp, Glycine max
  unsure at all n locations
gcataaatgggacgttgattntgtcaagagacggagcnctcaatatgaagacgttggngttattagaatttagccttttcaaaccgcccagctaatgaatgatgatgatatcagttctcaagctgaaaacaacggggtaaagcaaacaaaaatgaatatatatatatagagagagagagagagagagagagagagattaataaaaatcaattatattttcaaaaacactttttttaccatattaaaatacaaatagacttgattaattataaaattagttgaaaatatttnttatattcttgaaaataattaagattatgtntgattaaattatttgttatgggaatatntattatagttgctaaaatatttttatcattaccttaaggatgttatntgtttttttatctttttat

SEQ ID NO: 9686 - DNA, 451 bp, Glycine max
  unsure at all n locations
ggatcttaagcaccgcggctgcagctgtgtagcgatattctgctgggataagatnttcgcacctattacccagatgtcggtgcagcttgataatagtttcctcctcttccttggtgtagtttcctcttttgaggtttggccttaggtaattcagccaccttagtctgcaactctttccacatctcgcaagacctaacaaattaataacaacaacaacaaagtaaaaccaattacaatggattcatatatgatttagctataagctgtgcatgtatataattaaatattgaatatatggttcctacaaattcatgtagaagttaaaccaaaccttgaaaacagagaagaagaaaaattgaaagccacattggcgactatattgatggtacatactctcacatacttaatttgtttctgaccaaactatttgataagttccattcccacctga

SEQ ID NO: 9687 - DNA, 372 bp, Glycine max
  unsure at all n locations
agcttaagctccttcaactgctcatggctcttaatatttgaagagtatccttgtggaaccttcacccgacgaagacactgacaaaaacttatcttcttctttttcgaccaagtatgacaagctgggggaaagtaaattttcttccgatcagaccttggatgcaattgtgatcgtatccccatctcagttagatcttgacgggtattcaagccatccttcgtcttgccttgaatgttaaggagcgtcccaatcacattgtcacatacatttttctccacatgcataacatcaatacaatgtctaacgtatagatcagaccagtacagaagatcanagaaaatggacctcttctccatatggcagtctacttta

SEQ ID NO: 9688 - DNA, 608 bp, Glycine max
agcttagtgtttttttttgtagaatgatgttcttgtgcttttcctttttgaatgcacgactttatctcttttctctactagttcgtcaattttcttcgattctttgatgccctgtttatagtaagaggtttataaatatggagagaatctttagtattgaaaatataaccattgttgatcttgattctttcttccctctattgacagttgttgtgtatttttgattgattctagataaatacattctaaaatagtccttcataactcaacatagccgttagacatatataaggaattctaaaatagacttgtagatacattccatttaatggtatcatttaatattgcataaactgatttattctagaaagtgcatatttaaatatgcatttggatggatttggcaagtacttctcatcaatcatgtttaacatatatttaatcaaatagttaacacaaatttatatatttattttcatcaaaatcttaagagatgtgtggatcatcctatgatggattggctagtttctaatagtgaacacatcactatggaaaatattgttaaaaagctcaaccaaaaagaatgaaaaatgttatatatgtacatg

SEQ ID NO: 9689 - DNA, 644 bp, Glycine max
agcttgcaaagttagaaatatcttgtgtgattccgatgttgtgaagtcaaggaaagatttttctattgccatgatgaggtcatctatagttttaggagcctctttgtgttgtaatgactgaatggcattaaagaagccaagatctaagacattaaaatcaagcaagtttgggggttgagaaaccaatcgaatgtcaaaaccgccttcactagcagcttaatggaagtcgttgtcatcttcatcaatgtgacatggagcattgtcttgttgtatgaaaatagtttctcctctatcccctattggccattttgctttgattgcagacaacacatgatgaataagaaaatgtttgcttacttgtttatttattgaagatattggttttgtttccatagtccctgtatctctgtttgcactccttctctttgccggttcctttgtaacaaatggaaaaataccaatcttgccatctaaagtctcattgccattagagttgaatctttgtctagccatgacaataagaacataaccttgcaaatgaaattcttgcttctacatgttcgatgtggctcctcctccccagcagccaagtaataattcatagagttcttggtcatataaaaccatctttcatcaatgaatac

SEQ ID NO: 9690 - DNA, 539 bp, Glycine max
  unsure at all n locations
ccttcaaacctcccacaaaggagaagacagagtaaagattgtgtgtctccaaactttactaggtgagtttgaatccttacatatgaaagagttagagtccattttcaattatttctcaagaattctcgttgtttcaaatcaactaaaaagaaatggtgagaagttagaagatgtaaaaattatggagaatatactacgcttgttagatcccaaatttgaacacattgttgtgacaatcgaggaaaccaaagatttagaaaccatgacgataaaacaacttcaaggaccactacaagcttatgaggagaagcataagaagatgcaagaagcataagaggaagcaagagatcactgagcaactcttgaagatgcaattgaaggagaatgaagaaagtcaaggaaatgaaagaagtcaacaaggtcgaggtagagctcnaagtcgcagtcgaggacaagttggatgtggcaacaatagacganggttcaaattcatcagcaacagttacaagaaagggaaaagctcaacangagaacgtgga

SEQ ID NO: 9691 - DNA, 595 bp, Glycine max
  unsure at all n locations
agcttaagcacctttttcctcatttcttccttcattgatgggttgagccttctctggggctgtctgactggtctatagtcttcttccatcattatcttgtgcatgtagtaggcagggttgattcctttaagatatgatatgtgccaccaaattgcttccctgtgtctcttgaggacctctaccaacccgttctcttcctctgccgttagcttactgttgatcaccacaggcttggtctcgttcttttccaagaacatatactttagatggttgggtaggatcttcagctctaccttggtcttctcgaatggactcaagcttttcaattcttcaaaacttgtcacccctgcaggaatgttttcctcatgatctaagtcttccaagaaagcccttagatcccttttcctcatcactggttagacaatctacaacattgataaaaactttctccaatgaattttgtgtgggagagcaccaacgtcttttttatcgacctcctccaccttgaagcaccttctatcttcccctangtatttaattgcttcgaaaggttgaagtttaccttttggtcgtcgacactcattttcagattacc

SEQ ID NO: 9692 - DNA, 493 bp, Glycine max
ttgatgcaacatttggagaggttaatgaaacaacgattatgatgttctccatgagaggttggatcaaatggagaatatagatctaatggagaaaaaagggagaaaaaaaggaatgatagtggtcctaagacaaaaccgaattgatggtattaaactcaacattcctccatttaaaggaaagaatgatccggaggcctacgttgagtgggagatgaaaatagagcatgttttctcatgcaacaactatgaggaggaccagaaggtgaagcttgccgccacggagttttccgactatgctcttgtgtggtggaacaagctacaaaaggagagagcaagaaatgaagagccaatggttgatacatggacggagatgaaaaagatcatgaggaagcggtatgttccggctagttactcaagggacttgaaattcaagctccaaaaactaacccaaggcaacaaggtggttgaggagtatttcaaggaaatggatgtg

SEQ ID NO: 9693 - DNA, 505 bp, Glycine max
agcttgttgtcccttaggattctcacttatgaatcttttagtactaaaaacaaactcaatttagaaggagacgacaatgcacctgtgaatagaggaaggtgccaagaattgcaatggcagcaccaagagcattgatgggctgaacaggcgtgtgaaagataaggatggaagagacaatgaccgaaatcctcttcattgtgtttccaatgctgaatgttaagggagaaatctgatcaagagacatgtatgagacttgattgtacaagtggtagaagacactctgggcagctacccacctgtaaacatcaaaatccattagttaacaacattttataaagggagacataaggttgggtgggtggttaaggaaaaatgaaaagaaaaaaagactgaatttactcctccctgttaatgaaaattaacaaaactaacatctcacatctgccaataataaaattcatatagaggatacactatagtaatttggccagcaccatgaaataaa

SEQ ID NO: 9694 - DNA, 537 bp, Glycine max
agcttaataaatctatgtttgatttaatacaagcctcacgtcagtggtaccttaagtttcatgggataatttcttcatttggttttgatgaaaaccacatggatcaatgcatataccacaaggtcagtgggagtaaaatatgttttcttgttttatatgtagatgatattttacttgcaaccaatgatcaaggtttgctacatgaggtgaaacaatttctctctaagaatttggacatgaaggatatgggtgatgcatcttatgtcatcggcattaagattcatagagatagacctcgaggtattttaggtctatcataggaaacctatattaacaaaattttatagtgattttggatgaaaattgttcaccaagtgttgctcccatcgtgaagggtgatagatttaatttgaaccaatgcccacaaaatgactttgaaagggaacagatgaaaaaaattccttatgcttcagttgttggaagcctcatgtatgctcaagtgtgcataaggcctaacattacttttgcagcttgaat

SEQ ID NO: 9695 - DNA, 559 bp, Glycine max
tatactctacttccatcataattttatgcattctatactagtggctaattcctttaaggtctaaaatatgccatccaatagcagccatgtgtttcttgagaacttcaaccaatcagaactcttcaccagaggataaggtattactaatcaccaccgactttgcttcattctcttccaagaatacatacttcaaatgcgctagcaggactttcaagtctaccttgggtttctctattgtgggattcttctttagctcttcaaagacacattcccctaaaggaattacctttagtttatctaggacctccaaataggccttaagatctctctcctcctcttttgtgagacaatcaatagcattcatcaatgccttctcaagtggagagtgagaggccatgttttgcacccccatattagcttttgctcaattgtttccactttgaaacacgccttgtgatcattgggatattttatttcttcacatgaattgaagggactttttgatcatcaacactcatttctaagttaccattgcccattgtaactacacacttaactg

SEQ ID NO: 9696 - DNA, 365 bp, Glycine max
tcgtttcgccaccatttgtcacccacaaatttagtgttctgtagaggtagtgaatagatatctatccaaattgttaagggctctcctaaaaggcaatcacaagtcttgggtgttggacaagtgacctcaataacttaagaaatgggatgaatttaagttaaaaaatttcttatttaatggactcttaaatcccttttaaatctattttattagaatattggagatgaagatgaaaattatatcaacagaatacttcaagtgtgcaagataaataaaatatgcaagataaagtaatcaagatagggaagagagaaatgtaaacttagtttatcctggtttgaccacttcctgtgcctacatccagt

SEQ ID NO: 9697 - DNA, 506 bp, Glycine max
agcttctgtccctgagaaactgggtttctgaagacttatggagtgaagattgctgaaaaccctagccttgcaacaagtcctagggaagtagacacggagatggacaagaaaatccgcggtattgtgagtagcattctgaaagatgcttctgtgcctgatgctgagaaagatgttccaacatcttccaccccagatgtttctgtgcctgatgtcaataaagatgttccaacatcctccgctccaaatgctgaagccctcccttcacccagtgaagaggaatcaacagaagaagaggatcaagcctcagaggagacccctgcaccaagggcaccagaacctgctccaggtaacctcattgacttggaagaagtcgaatctgatgaagaacccattgccaacaggttggcacctggcattgcaaaaaggttacaaagccgaaagggaaaaacccccatcaagaggtctggacgaatcaagactatgggccagaagaagagcactccagt

SEQ ID NO: 9698 - DNA, 534 bp, Glycine max
  unsure at all n locations
gtggagtgcctgacaaagaggcactggttctttatgttgcttcatgttggaatacgaatgcaagcactgcttgtgacaatcatatataataaagctttgaacctatcatgccaatcaaagcaaggacagaccacaggggaaataatcaacttcatgagtgttgatgcagaaagagttggtgagttcagttggcacctacatgatctgtggttagtagtcctacaggttttagtaggcttgttggttttatataaaaatcttgggcttgcttcaattgctggttttgttgcaattctcattgtaatgtgggcaaacattcccttgggttcaacccaagagaagtttcacaacaagttgatggagtcaagagatgaaagaatgaaagcgacatctgagattttgaggaacatgaggattctcaaactgcaaggatgggaaatgaagtttttgtctaagataactgaactcagaaagatcgaacaaggctgtntaaaaaaagttatatacactntagtcttgatcatatctatattt

SEQ ID NO: 9699 - DNA, 591 bp, Glycine max
  unsure at all n locations
tgcttctcccattttgtgagctaaatgctgatttcctgttttgtttaaaaagataaggcataatcccttcttttatttcatctatttaatgtttcaagaaattctttcataccttcaaaattgacgtattattttttttctaaatttaccggtatcaataaggggaaataaaagtatttcaagaaaggacaactcagttaaataaacttattgtttaattaggacaatttaataaaaaataataaattatttttaattcttaactaatgttcaagggatacaagattacaattaaaaaatttatatttttttaccgagaaaaaggcattatatttattaatccttctttcagttttatgaattgcttaaaaaaattccattcattaactaattcatccgttgcttaattataaattatntatttttaaaaaattacttttttagtaataaatgatagaagatatattattttaattatttcaataaaacaatatagtgaaataaacattttttttacttataatcaaatttatttaataattttaattagatcttataaaataaacctttaaaagaataataaaattgcat

SEQ ID NO: 9700 - DNA, 542 bp, Glycine max
  unsure at all n locations
agcttcttctagactcatcttctccttttagtggcgtatcctctctctcttccttctctattcgctgccattcatcttccaagaagcaaaggaattcattgatgaagaagatcttaggcctacaaactctaatggagctacaccaatactaatgccacctttctttctttgatgtctccccatttagtgttgcctaagtcttgggtgctgcccgaggtggatgtggtggatctcttgtcagaagatgaggtagaggacctagaggaggacacttcgtatgaataagacctcatcacaaagcccggcttatggaggaagattcttcaaaggattcatctgaggattctcgttagaagggctttctccatccaactntattgaattctttttgtggatacaattgactttgggcttgggtaaggatgactactctaagttttaggattttccccttatatgtattttgggacaagtagacctatgctcagaccttttgtaattattaatcatgactacttacattattggtttgggttggatat

SEQ ID NO: 9701 - DNA, 668 bp, Glycine max
  unsure at all n locations
agcttcatacaactttgtgcgattttttcctgttcgttcggacctattgtttcttctaatcctcctttagaaatgaaatgaaaatgtcttaaatctcattattggttatgagaaattctatctgtatgctttcattcctccttcgtcgcattattttttgagaaaaaaaaatgtgtgttgttctgatcgtattgggggtttgtttctttaccaagcacgttcgcattttagtgaaagctttaaggaacttcaatgtcttctgtcttttacttttcaagacttcaatgtctgaattctttacattttcaagacttcaatgtcttcagtctttacttttcaagacttcaatgtcttcatgtcttcagtctttacattttcaagacttcaatatctttagtctttacgtttcaagacttcaatgtcttcagtcttttatgttcctaaagacttaatgtctcctatttttgntatgcaagcctacaacatcttttgcttaatacttttgatacttccgtattgatatccttttgttctttttataaggttcacttccttggctttcgctaagttccaacccgatagcatgatcgcttgaatgaaactagtggccttatctttacttaccttttgattttcaataaaagataagtaaaaaaggggcactatca

SEQ ID NO: 9702 - DNA, 424 bp, Glycine max
  unsure at all n locations
aaaagnactaccggatcngtatgttattatgggtgattgagttcctacatggagtcctaagaagcaaggcattgtgacactttctacttgtgaagccgagtatgtagctgcaacttcttgcacatgtcatgccatttggctaataagattgttggaggaacttcagctgttgcaaaaggaaagcacaaagatctatgttgataatatatctacacaagagcttgccaagaatccggtgttccatgaacgaagtatgcatatagatacaaggtatctttccattatagagtgccttaccaagaaagaataaaaatcgactcatgtgaaaacccaagatcaagttgcggatattttcaccaagcctctcaaaattaagatcttttaaaattgccagcaaaacttggtgtgcagaaaaattttccaa

SEQ ID NO: 9703 - DNA, 588 bp, Glycine max
tcaagcttttagtcttcaagaacataatataaagaaagttcgttttttctattgaggcagaaaggaagatactggatcatagagtgaatgaactgcaggatagacaagaaaccgcagctgaattagaggagaaaatgagatctcaaactggtttactggctgccaaagatcaaggtgagctttgtctgattccttctcttttgagaagtgatcttgtaatattttttatggatgagaaacttacatttctggaacttaatggtttattgcagaaatcgaagcactaatgcatgcacttgatgaggaagaaacgcagatggaagaattaacaaataagattgtggatcttgaaacggtagttcaacaaaagaatcaagagattgagaaccttggatctttccgtggtaaggttatgaaaaagctttccataactgttagtaagtttgatgagcttcaccacctgtctgcaagtctcctttctgaggttgaaaagctccaatcccagttgctagaaagagatactgaaatttcttttttgaggcaagaagttactagatgcacctatgatgctcttcttgatcacaaatg

SEQ ID NO: 9704 - DNA, 573 bp, Glycine max
  unsure at all n locations
ttgagccaattcagacaacaataactttttactcgttgtcttatngagtcccgtaatatatcgagacgctcgaaattgaatgttgaacctctgagcaaactcaaacgacaataactttttactcggatgtctgattgagtcccgtcatatatcgagacgctcgaaattgaatgttgaacctcatagcgaattcaaaccacaataactttatactcggatgtctgattgagtcccgtaatatatcgagacgctcgaagttgaatgtttaagctttcagccatttcaaacgataataactttttactcggatatctgattgagtcccgtaatataacgagacgctcgaaattgaatgttgaagctctgaactagttcaagcgacaataactttttactccgatgtctgattgagtcccggaatatatcgatacgctcgaaattgaatgttgaatctctgagccaattcaaacgacaataaccttttactcggatgtctgattgagtcccgaaaatatcgaaaccctcgaaaatgaatgttgaatctttgaaccaattcaaacgaaccaaaacttt

SEQ ID NO: 9705 - DNA, 470 bp, Glycine max
gcttcacgttcattttcagcgtctttatagtttcgggactcaatcagacatccgagaaaaaagttattgtcgtttgaattagctcagaagttcaacattcaatttcgagcgtctcgatatgttacgggactcaatcagacatccgagtaaaaagtcattgtcgtttgaattggctcagagcttcaacattcaatttcgagcgtctcgatatattacgagcctcaatcaaacatccgagtaaaaatttatggtcgtttgtattggctccgagcttcaacgttcattttcgagcgtctcgatatgttacgggactcaatcagacatccgagaaaaaagttattgtcgtttgaattggctcagagattcaacattcaatttcgagcgtctcgatatgttacgggactcaatcagacctccgaataaaaaagtaattgtcgtttgaattggctcagaacctcaacattcaattt

SEQ ID NO: 9706 - DNA, 551 bp, Glycine max
tgtgggattttgtgatagtgattttgccggagatgctattatagaaaaagtactaccggatttgtattttttatgggtgattgtgtttttacatggagttctaagaagcaaggcattgtgacactttctacttgtgaagccgagtatgtagctgcaacttcttgcacatgtcatgccatttggctaagaagattgttggaggaacttcagttgttgcaaaaggaaagcacaaagatctatgttgataatagatctacacaagagcttgccaagaatccggtgttccatgaacgaagtaagcatatagatacaaggtattatttcattagagagtgcattacaaagaaagaagtagaattgactcatgtgaaaactcaagatcaagttgcggatattttcaccaagcctctcaaatttgaagattttcgaagattgcgagcaagacttggtgtgcagaagaattttccaattaagggaggatgttagatattaattagaccaatattaataacaagttttatgagccttaaattgtggaagatgaaagttgt

SEQ ID NO: 9707 - DNA, 583 bp, Glycine max
agcttggatttccttttagtagggaatctatcttttcttagatggagccaaacccagtcaccctcattaagaactagctcttttcttcctttattgcctttagttgaatacacctttgtttgattctctatttggttcttaacccactcatgcaacttctttacaaacattgacctagattccccttctttatgtataaaagaagtgtctagtgggagggggaatgaggtctaacggttttagcggattgaacccatagacaacctcaaaaggtgactgcttggtggttttatgaacccccctgttttagaaaaattctacatgaggaagatactcatcccaagacttatggttgccattcagaagagcccttaaaagggtggataaagacctattcactacctttgtttgcccatcaatttgtggttaagaagtggtagtgaaaagaaagttagttcctagcttatcccataaggttttccaaaagtggctaaggaacttggcatctctatctgacacaatggtccaaggcaaaccatggagtctcacaacttccctaaaaaaaagtttgagatgtgggaag

SEQ ID NO: 9708 - DNA, 559 bp, Glycine max
agcttgctactacaatctccccctttttgatgatgacaactctgaaatcaagaaacacatacacacactttttcctagtcgatcactcacttaattttccattctccccttttgtttttgagtttatgcttcacttgaaattaagttaattacttatgtgagttcttgatttaatccatatttctctccccctttggcatcaataaaaagccaaagtgcataacaagtataaaacatacatacactattaatcattcacaagacattcattgaagaatataaaaccaatcatgaagcaagaaacatgaatagatcaaatatataaaaaccacatagtcatataacataattcatgatttttcaaacataccatgcaaataaaagaaatactaaattgttcaaatgtcataataatatagcaaaatacatggctagaaaacaaagtgctagtaatattaaaaatattagaaaaactaaaatgatggtggcggtggtggtggtagatcaaagcttgtacgaatgtaagaaacatcttcttcaaccttggtgattcttgact

SEQ ID NO: 9709 - DNA, 434 bp, Glycine max
tgtaggccttagatcttcttcatcaatttttttcttgcttcttgaagatcaatggcagcggaatggagaaggaggaaaggtgattatagatgtcacttcaaggaaaaaatgagtcaaaatcaagttcaccaccataggaagccatggataagagctagaaagtacggaaagatgagtggagggagagggagaaagaagagggtaccttagtaatgtaggatttttcagcccttgtattttaggacacttatactagtttttgtattaagaataattttataatttcacatgcattaaatgtattatttgatgtgtgtatgttggtagataaattcaattgaattagaagaagcacaatgcacatgatgtagtaccatgtgagatgtgttgaaagtgaaaacaagatcatagagagaaggggttgacatcatgga

SEQ ID NO: 9710 - DNA, 546 bp, Glycine max
  unsure at all n locations
agctttacttcatttcttcaagtagtgtatgatttgcttccagattaaaacacgttgcctaaaagttactatcaggccaagaaaatactatgtccgatgggtatggagtatcaaaagattcatgcttgcccgaatgattgcatactatacaggcatgaattcaaagaaatgtccaaatgccctaggtgtgggtcgtcacggtacaaagtaaaggatgatgaggactacagttcggatgaaaactcaaagaagggcccttcaatgaaggtgttgtggtatcttcccatcattccaaggtttaagcgtctttttgctaatggagacgacgcaaaagaccttacctggcatgcaaatgggagaaactctgatggaatggtttgtcatccggctgactgctcccagnggaagaagattgatcgtttgtatccggattttagcaaagaggcaagaaatcttatgcttggactatccagtgatggaatgaatccatatgacaatntaagcactcaacacagttcatggccagttatgctagtaatttacaat

SEQ ID NO: 9711 - DNA, 518 bp, Glycine max
tgcctaattaacctgaaattgagagaaaatgattacctaacactcaaaatggaagtactaagtatttattacctatgcttagtagaaaatacttataacactacaaaataaccataaattggaagagtttgatacaatttacacaagttttatacacaaaagttagtcgtattcatcgactaacaccagtccccatgaaaagttagcaatttccagtgttgaaaccaaacataattttgcctcatcatccaacaccagtaccataaacataaaatgcttcaaatgcttaggcagaggacatattgcttttgattgtccaacctggaggaccgtgatcatgaaggcagatggagaaatcaccagtgaatctaaaatcaatgaagaagaagtggaagaatagcttgaggaggaagctatgtagggtgatatgctaatggtgagaaggctctggggaagtcagatgcagccactggacaacactcaaagagaaaatattttccacaccagatgcacaatta

SEQ ID NO: 9712 - DNA, 609 bp, Glycine max
agcttatggatggcgtgtctggcttccttttggtatttttcctgttctcctattcaaggtacaaccaaatcaggaagcaccctctagatgaagagaaaaccgccttcataactgaagacaccaatttttgttacagggtcatgccctccggactcaagaatgcaagagccacatacaaaaggatcatggaccgggtctttaaacaacaaataggccaaaatgtcaaattctatgtggatgacatggtcgtcaagtctcatagtgtagcccaacacttaatagatttggaggaagtgtttggagagattcacaagtataacatgtgcctcaatcctgaaaagtacacatttggggttggaagtggaaaattcttgggcttcatgatcacccacaagggaattaaagccaaccttgacaagtgtacgatgatactagaaatgcacaatcctaccaatgtcggagaagtggagaaactaaaaagtagactgacgtctttgtccacgtttctcccgaagcttgcagaaaaggcgaggccattctacaagttactcaaaaatactgagctgtccccaaacaaatgtgtccctgggcgaatctcaaaggctcgtc

SEQ ID NO: 9713 - DNA, 526 bp, Glycine max
agcttcaacattcaatttcgagcggctttatatattttggtactcaatcagaaatccgagtaaaaagttattgtcgttggaattggctcataggttcaacattcaatttcaagcgtctcgatatattacgggactcaatcagacatccgagtaaaaagttattgtcgtttgaattggctcagaggtttaacattcaatttcaagcgtctcgatatattacgggactcaatcagacatccgagtaaaaagttattgtcgtttgagttggctcagaggttcaacattcaatttcgagcgtcccgatatattacggcactgaatcggacatccgagtaaaaagttattgtcgtttgaattggcttagagcttcaacattcaatttcgagcgtgtcgatatattacgggactcaatcggacatccgagtaaaaagttattgtcgtttgaattggctcagaggttcaacattcaatttcgagcgtctcgatatattacgggactcaatcagacatccgagaaaaaagtatt

SEQ ID NO: 9714 - DNA, 447 bp, Glycine max
ttgagaatatggttgcagccattggtcaatatggtgttcatttgcccattcctagctatcatgacattagagttccactcttgaagaaggaagttgaatatactgaaaatttgatgaaaggtcatagggagcaatgggtcaagtatggttgtactattatgtctgatgcatggactgatcggaaacaaagatgcatcattaattttttgattaactctcaagctggttccatgtttttgaagtctgttgatggatctgattttgtaaagaaaggtgaaaagctttttgagttgcttgatgccattgtggtggaagttggagaagagaatgttgttcaagttgtaaccgataatgggagcaactatgttttatcacgtaagttgttagaggagaaaaagaaacatatttattggactccttgtgcagctcattgtattgatttgatgc

SEQ ID NO: 9715 - DNA, 602 bp, Glycine max
agcttctcgatatattatgcccctgatttggacccttttttgataacttatgaccatttgaatttctcaagagctttcgttgtacaatttcgagcgtctcgatatattaagcgcctaaatcggacctccgtgtgataagttatgaccatttgaatttcccgagagctttcgttgttcaatttcgagcttctcgatataatatgcgcctgaatcggacttccgtgcgaaaagttatgaccatgtgaatttgtcgagagcattcgttgttcaaattcgagcgtctcgatatactatgcgcctgaattggacctccgtgtaacaagttatgaccatttgagtttctcgagagcatttgttgttcattttcaagcgtatcgatatactatgcgccttaatcggactctatgtgacaaggtatgaccatatgaatttctcgagagcattcgttgttcaattaggagcagttcgaaatattattgcgctctaatcggacttccgtgtgacaaggtatgaccatttgagttttctcgtgagcttccggtgttcaatttcaagccttctcgatatattatgcgccggaacggatattccatttgaaattg

SEQ ID NO: 9716 - DNA, 571 bp, Glycine max
  unsure at all n locations
agcgcgcctccaatattgagctncgtttttattattttatcgggcttttctccctcctgaaatcaatccatcacatccaaattcagcaaaacaataataaagcaaaatccaaaaacagtagttcctatattttccaaagactgacaaacacaaatacacacaaaatactacatattgaaacattcaacttgatatattttttccattttcaccttgccccaaagtccagagtccttatcataccaatacctcccaggcttcaacttctgaggagggatagggcagcccagaatctcagccaactcctcttgtcttaactgcctgccattcacaacaagctgctccggccgaagctgattcgcaggacactccttttcagccctcattatctgattaatctccaaagaactacacactttcgacaacattctggaacactttcccaaagtcgacctcttcgactcatcaattggcttcccaatgcaactcacgcatttccttccctcaggcatagaccccatcgctttcagcacacaggtactgcaataccttgaataacacaccaaacacg

SEQ ID NO: 9717 - DNA, 460 bp, Glycine max
tcttagtttcagatgatgcagatgggcttgtagctttctcatgctctcctctaatgactatggcatcatttctggcgctaaactgttgggagttggaagccatcttctcaattaaatttctggcttcagcaggagtcatgtctccaagggctccaccactggcagcatctatcatacttctctccatattgctgagtccttcataaaaatattggagaagaagctgctctgaaatctgatggtgggggcaactggcacatagtttcttaaatctctcctagtactcatacaggctctctccactaagttgtctaatacctgagatatccttcctgatggctgtggtcctggaagcagggaaaattgtttctaagaatactctcttaaggtcatcccagctcgtgatggacctttgagcaaggtaatacaaccagtccttttgccactcctctaatgaatg

SEQ ID NO: 9718 - DNA, 580 bp, Glycine max
  unsure at all n locations
agcttatgctgcaaatatttacaatttatctcctcttcctcagcagcaaaatcaaccacagcagaacaattatgacctctccagcaacagatacaaccctggatggaggaatcaccctaaccacagatggtccggccctcagcaacaacaacagcagcctgctccttccttccaaaatgttgttggcccaagcagaccatacattcctccaccaatccaacaacagcaacaaccccagaaatagccaacagttgaggcccctccacaaccttccctcgaagagcttgtgaggcaaatgactatgcagaacatgcagtttcagcaagagaccagagcctccattcagagcttaaccaatcagatggggcaattggctacccaattgaataaacaacagtcccagaattctgacaagctgccttctcaagctgtccaaaatcccaaaaatgtcagtgccatttcattgaggtcgagaaagcagtgtcaaggacctcaacccgtagcaccttcctcatctgcaaatgaacctgccaaacttcactctactccagagaaaggtgatgacaaanatttacctaac

SEQ ID NO: 9719 - DNA, 536 bp, Glycine max
  unsure at all n locations
tatccccacaagagtgcagaatagttggttagtctgtattgattataggaggctgaaccaggcaaccagaaaagatcattttcccctgccattcattaatcaaatgcttgagcacttagcaggtaagtctcattactattttcttgatggtttttctggttatttacaaattcatattgctcccgaggatgaagaaaagaccacattcacctgtccctttggcacttttgcctataggaggatgccctttggcctatgcaacgcccctggtaccttccagcggtgtatgcttagcattttcagtgattttttagagagttgcatagaggtgtttatggatgattttactgtttatggatcctcttttgatacatgtttggatagtctggatagagttcttagtagatgcattgaaactaaccttgtgctgaattttgaaaaatgtcacttcatggaagaacaaggtatagttttagggaatatcatttccagtangggcatagaggtagaccctgcaaagatagctgttatttcac

SEQ ID NO: 9720 - DNA, 428 bp, Glycine max
tttgtactttcggaatttgcaaggtatatcttgttattttaggacagttttcaattttcttcggttccaaacatgatgtctcaagaagcaatacctgctccttccaacaataacaacctcagagactccacggttcaacttcatgaaccaaactcaaaccctaatcctaaccctaattcggttaagagaaaaagaagcctacccggaacaccaggcaagttattatttaattaaatccttctcttctgcatactatatatgtacttactgttctgattcttaattcagaaaaaatatatttgtaattaattacgggttaattatgtggttgtggttgcatggaccaagcagatccgaatgcagaagtgattgctctgtcgccaaagtcgctgatggctaccaaccgattcatctgcgaagtatgcaac

SEQ ID NO: 9721 - DNA, 446 bp, Glycine max
  unsure at all n locations
taggtttccttctagaatcttctaaactgcgtcccctgntgcctttgatctcttgagaaaaatgatttgtaggtactcttctagaaggttctctacagaacaagccttgagtaagttactacttggttcagttttttttttttgggggggggggggggtntntggntatttacanattcttattgctccctatgatgaagaaaataccacattcacctgtccctttggcacttttgcctataggaggatgccctttggcctatgcaacgcccctggtaccttccacctgtgtatgcttatcattttcaatgattttttagagagttgcatataggtgtttatggatgattttactgttaaggatcctcttttaatcatgtttggatagtctggataagttcttttaaatagcattgaacaaacctttggctgaaattttaaaaatg

SEQ ID NO: 9722 - DNA, 510 bp, Glycine max
agcttataatatatcgataggctcgttattaaacattgtaaactctcgcgaaattcaaatgggcataaattttcacacggatgtccgattcgggcgcataatatgtcaagaggctcgaaattgaacaacggaagctcttgagaaattcaaatgggtataaaatttcacacggatgtccgattcaggcaaatcacatatcgagacgatcagaattgaacaacggaagctcttgagaaattcaaatggtcataacatttatctcgaatgtccaatttaggcgcatcacatatagtgatattcgaaattgaacaacagaagctctcgtgaaattcaaatggtcataacttttcacactgaggtccgattcacggttataatatatcgatacgctcgaaattaaacatcggaaactctcgagaaattcaaaagatcatgacttttcacacggatgtccgattctggcgcataatatgtcgagaggctcggaattgaacaacggaagctcttgag

SEQ ID NO: 9723 - DNA, 305 bp, Glycine max
agctttgagcaaattctttcgacaatttcgttttactcggatgtccgattgagtcccgtaatatatcgagacgctcgtaattgaaaacagaagctctgagcaaattcaaacgacaataacgttttactcggatgtccgattgagtcccgcaatctatcgagacgctcgtaattgaaaacagaagctctgagcaaattgaaacgacattaactttttactcggatgtccgagtgagtcccgcaagaaaccgacacgctcgcagttgaaaggggaagctctcataaacatccctcgactataacttt

SEQ ID NO: 9724 - DNA, 583 bp, Glycine max
  unsure at all n locations
tggagtgacatgaaagttgattacaatgaactaaagtatttggcttgcttatgctcatctaaagcaggataagttggaaccaagggccttgaagtgtatcttcataggctatccacagggagtgaagagatacaaactgcggtgtttggaacctagacacaagaagtgcatcatcagaagagttgtaatgtttaatgaacttcaaatggaaaatttaatcctgccattcaagtctgctggaagttagagttcacaagttcaggtgaagtctgaagagattgtaaacgctcaataatagtaatggcaagagacaagtttgttcctgcatctagacaagcaaatgaagaagcatctcaagattattgtttagctagagatagggaaataaggacaatcaaacctcctgaaagatatggtcatgcagatctgatctcctatgctntaatagttggaaaggagaatgaagatcaggaggaacctcagtcctatgatgaggccataaagcagcaggacaactcanaatggattgaagctatggaagaagaaatgacttctctagaaaagaatcanacttggatacatg

SEQ ID NO: 9725 - DNA, 544 bp, Glycine max
  unsure at all n locations
tatccatgaacaccgatatataatcacggttttgattctacaaagataacaaaacagtcatagatatatttatctattgaacagaactgtcaaaaatactagtcactatataatgatctgaactacatctcacctgaaagtcaatgaagtaagcatgctgtataaaagtgaaacataattacaaagtcagcgaatttattatcaatgaaatgaaataatagttttaacagtctcaaatccactataacacaaagtaaacttgattagtacctcccagacatcaatggtaaggagtggctgcaagagataaaaatgaaatctcgtcagacattttaaccatgatgcttcagccttatcctagcattcatgtttcaaaacataaaatgaattatggatattatgtaatccttactacttacataatagtagtttcaaacaaaggggttcacagcattgggagtcttcaccacaactagcttcttgtcctcaccagattgaagaggattcagaacatntcccacgtcaagtctgctttctttatcta

SEQ ID NO: 9726 - DNA, 571 bp, Glycine max
  unsure at all n locations
agcttggagaggatgcttcaatggagttttaagatttattgagagaaagagagaggggggagcacgaaattgaaggaagaaaaagagagcgaagttgaactttgagttatgtctcacaagactctctttcatcaaagttacaacaagggttccacatgcttctatttatagactaggtagcttccttgagaagctttcttgagaaaacttccttgagaagcttctttgagaaaacttccttcagaagctagagcttagctacacatacccctctcataactaagctcacctccttgagaagcttccttaagaagattcctaaagaagctagagcttagctacacacacctctctaatagctaagttcacctccttgagatgagaagctagagcttagctacataccccctataatagctaaactcacccctatgccaaaaaacatgaaaatataaaaaaagtccctactacaaagactacttccaatgaaggtaagtaaattgcanattacaaaattacaaaatggtcctcaattntggtgggttttctctctttggtgattcactcaatt

SEQ ID NO: 9727 - DNA, 500 bp, Glycine max
tgacgacgatgatgagggatatgcaaattctgttctgtgacagaagtggaaagtaagcatgaggcatacgctggaccaaccaaacgcggtcttccggatggtgggatattgatgagtggatgtcacactgaccaaacttgtgcttatgcaagtactgcgggcaacgctgccagagcttatggggcttttagcaatgctatacaggctataattgaggagactgatggtgcaatcacaaaccaagaacttgttcaaagggcaagagagaagctgaagaactccggtttcacacaaaaacctggactctattgcagtgatcaccatgttgatgctccttttgtgtgttgatctcttctcatctgatgactgatgcatagaaagagagaataatgtgtgttgtttatagaatgctggtgtatagatgtatatgtttggacaatcatattgaagttatgtgtgtgatcatacaggttttctatgcatcactattatcaggtacg

SEQ ID NO: 9728 - DNA, 484 bp, Glycine max
  unsure at all n locations
agcttccatcactcatgtttgtcatgtttgaatgcaaaaactatttactgtagcaattcgtggtatctttcctgacaaagttagggttgccataactcgtctatgctttctttttaatgctatctatagcaaagtcattgaccctagaaaattggatgaattggagaatgtggcttccattgtcctttatcaaatggagatgtattttcctccatcattttttgacataatggttcacttaattgttcatctggcgagggagatccggttgtgtggtccttttttttacggtggatgtatctagttgagcgatatataaagttgttaaagggttataccaagaatcaataccgaccagaaattttgattgttgaaaggtatgttgctgaagaatgtatcaagttttgctcccaggacattgaaattggtaaatctgtcgtccttcctgaaactcatcatggccggacacggngggggggggggg

SEQ ID NO: 9729 - DNA, 373 bp, Glycine max
agcttattctccttcatttgcacaaggttcttaatatttgaagagtatccttgtggaaccttcacccaacaaagacactgacaaaaacttatcttctccttcttggacaaagtatggtaggctgggggcaagtaaattttcttcccatcagaccttggatgcaactgtgatcttatatccatatcagctagatcttgacgggtattcaagccatccttcgtcttgccttgaatgttaaggagcgtcccaatcacactgtcacaaacatttttctccacatgcataacatcaatacaatgtctaacgtcaagatcactccagtacggaagatcaaagaaaatggacctctttttccatatgcaactctgacttt

SEQ ID NO: 9730 - DNA, 569 bp, Glycine max
tctagtcaaatggacttaccttgaattaattcctttgttagcccctttgagcctatgctcccctttctttgttttgaagctcattacaagccttaagtgaaaaaccatgatatcaccttacccttaaggaattttggagctttggaattgttttgggaataagtgtgtgtgtgtgggggggggagggcatgcataccatacattcctccaccaatccaacaacagcaacaaccccagaaacaaccaacagttgaggcccctccacaaccttccctcgaagaacttgtgaggcaaatgactatgcagaacatgcagtttcagcaatagactagagcctccattcaaagcttaaccaatcagatgggacaattggctacccaattgaatcaacaacaatcccagaattctgacaagctaccttttcaagctgtccaaaatccctaaaatgtcagtgccatttattgaggtcggaaagcaattgtaaaagacctcaacccgttcacctttctcatttctaatgaacctgccaaacttactctatttcagaaaatgggatgacaaaatttacc

SEQ ID NO: 9731 - DNA, 519 bp, Glycine max
ctaagcttcacatatatcccgcaaatattcccaagtagcacccttagcctctattgcttcccattgaatcaacaattgagacatggtagcttctaaatgtttgacaactcgaacattcaacaccttccatgggcaaagtgttggtcccagttcactagaagtgagtggaaaaggaagatatggtggaggacttttgccatgaaatggtttcagaagagcaatatgaaatacaagatgtattttagcagactcgggtagttgtactttatatgcaacagtaccaattctttcaatcactggaaatagaccaaaatagtgcatgcctagcttccgatgcttcctcaaagccactgaatgttgcctataaggttgtagcttaactaaaaccaaatcaccaaccttaaattgcaaatctcttcttttcttatcatcttgcatcttcatatattgttgagcccttagtaaattacccttaagcttgctcaaagttgatcaacatagtgtaaaaattcctgagtg

SEQ ID NO: 9732 - DNA, 426 bp, Glycine max
agcttctataagaagattcctaaagattctagagcttagctacatttacctctctaatagctaagctcacctccttgagatgagaagctagagcttagctacacaccctctataatagctaagctcacccccatgacaaaaaaaaatatgaaaatacaaaaaaaaagtccttactacaaagactactcaaaatgccccgaaatacaaggctaaaaccctatactattagaatggccaaaatacaaggcccaaacaaagaaaaaacctattctaatatttacaaagataagcgggtcatgcttagctcatgggctcggaatctaccctaaggctcatgagaaccttagggccttcccttggatctctagcccaatctacttggagtcttctacccaatgccctcgcgggataggattgcatcattcc

SEQ ID NO: 9733 - DNA, 594 bp, Glycine max
cactactcaagcttcatgatgatgaatcaagctgattcaggaagggtggttgacatcttgagatgatgacaaaaagcccaatagagtgatttcaagattgagtcaacaattcaagaatcaagagtcaacacttcaagaatcaagaaaagataaattcaagtttcaagagaagaaatcaataagacttcacaagggaagtattgaaaagttttttcaaaaaacaaacatagtacagttttgttttccaaaagaaggagaatcaggattagctaagttaccagagctgttactctctggcaatagattaccagtttcctgtaattgagtaccagtggcaaagattgttttcaaaagctttcaactaaatttacaacgttccaattaatttcaaaatggtgtaattgattacaagatattggtaatcgattaccagtgtggttgaacattgaaattcaaattcaattgtgaagagtcacatctttgcacaaaaatgctttgtgtgatcgatgaccaagatttgataatagcattccaatgacaagttttgaacaaaaatcaaaagatggaactctttcaatggttttaaattttttt

SEQ ID NO: 9734 - DNA, 460 bp, Glycine max
tatgctgcaaatatttacaatagacctcctctaccttatctagcaaaatcaaccacagcagaacaattatgacctctccagcaacagatataaccctggatggaggaatcaccctaacctcagatggtccagccctcagcaacaacaacagcagcctgctccttccttccaaaatgctgctggcccaagcagaccatacattcctccaccaatccaacaacagcaacaaccccagaaacaaccaacagttgaggcccctccacaaccttccctcgaagaacttgtgaggcaaatgactatgcagaacatgcagtttcagcaatagactagagcctccattcaaagcttaaccaatcagatgggacaattggctacccaattgaatcaacaacaatcccagaattctgacaagctaccttctcaagctgtccaaaaatccaaaaatgtcagtgccatttca

SEQ ID NO: 9735 - DNA, 605 bp, Glycine max
agcttgcaagtgaaatctaattactctacttaagtacgcaacacaaagaatagtttacactagaataaaaaggtatggtcaaaagagtattctatataaaatatatctcgatacgagtcctcgaactatagagtatcaacattgctaagaacaagaaatcacgaacaaccatactatctatgcaattaaggcaaaacaccatactactaacatacccagaattataaggttcttataataagtatacaacgtacatataagaagtaagaatttaatagttaataaggatgtattaaagaatcacaaacttcaactactacattcacgactacacacaaaataaagtgagttaagtagtcatgcgtttacacatcaagaaaggcatactcatccaagacatatatatggttcaaaaggttttcacaacactaatccacacatcaagatagaaataagtttattaacaacatacaagcaagaagataagggcctcattaagcattatccatcagtatcaaagcttcttgcatcacctaacggcttaccataatgtcgaacccgacttcacaaattatagagatgggcagtctcataactcatgactc

SEQ ID NO: 9736 - DNA, 604 bp, Glycine max
  unsure at all n locations
agctttagtcaaacagaataatccgtttatgtcatagaattgggtgttgaaagagcataacaagactttctgtgattggtttaaagatacaatctttgtagatgagaatgctttagaaacattaagaaagctagcagatgggcctaaaagaaatgttataacctggcaaggatacgacataaacaagtattcattttacacaaaagcacaagatgacaaaagtacaatgcagaacagcggggtcaccctaagggctgaatctcaacactttgcaagtgtcaatgacgccaatccctgtgtagctttcatcccttactttgggttcattgatgaaatttgggagcttaattatttgaaatttacagtatgtgttttcaaatgtaaatgggttgacagcaacaccggtgtgcgcaccgatgatataggatttacgctggtagatctaaagaaacttggttaccacaatgaccctttcatcatggcagaacaagctagacaagtattttacgtgcaagacccttgtgatgaaaggtggtgtgtggttctgcanggcaaaatagttggtgttaatgtagaagatgaatattcatacatggacacctat

SEQ ID NO: 9737 - DNA, 376 bp, Glycine max
actccagctgcacagcagattttcgttatgacccactttcccactcattaaaaaccaccacgccataaacctagggaactatacaaaaacagatcggcccctggatggaggaatcgcggtaacctaaaatggcccacaccatcaaaccagccacacaccatttggtcttccataacgaaggcgcctaggccgcccataccgcccttatctccaccagatctacacctaactcaagcccatatacaagaccaacccgaagcccactcacgccatccaccttaacaacgagggggccaatgactatacaaaccatgcactttcagcaagagactaaaggctgccatccaagcctaacccatcagaggcgacattcggc

SEQ ID NO: 9738 - DNA, 644 bp, Glycine max
  unsure at all n locations
taaaaatttaagaaaaaaacattgtacataaaattctctcatttttcaaataataataatactaatatagacatattataaattattttttaatttctattctaaaatattaatttaaaatattataataaataaagcgttagtatttaatattattattattgaaattaatttttgatttagtatttgagatttgaataaatatgaacaaaaaagttactaaatagcatccttcattattggttttttttaaaaaaatttaatgattcccaaaagagttaaataatcaaattatcaattgttaacaattttggttaaaacaacccatagtgaaacagacaaaatattaataagaaataaacttattgaatttgaaggtcttaaaaggaaaaaatgcacatccgtcataaatttaagacaaagaacttttanaattctttaattaacattttaaccatttatatttgaacaactgtttcaaaaaaaaaattcttacagaatcatttatactatttaaccgtgctggaaaaaaaaaacccacaactcttgaattttattttaatgcacatttcttatttataaagaatagaaaggggttggtgcattttcttaattccttgccgatgggttaaaaaagaaaagaa

SEQ ID NO: 9739 - DNA, 333 bp, Glycine max
agcttttttatttgcttgatgccatttttgatgaagttggagaaaagaatgttgttcaagttgtaaccgataatgggagcaactatgttttagcgggtaagttgttggaggagaaaaggaaacatatttattggactccttgtgcagctcattgtattgatttgatgcttgaagatattgggaagcttcccttgataaggaagaccattagaagggcaattaatctacttgggttaatgtatgcccattctagtaccttaagtttgttgagagattttacaaacaagaaggaattggtgagacatgctattactagatttgccactttttatc

SEQ ID NO: 9740 - DNA, 596 bp, Glycine max
gagattacctgcaggcacgcaagcttcttatccaaggctcatcttggttgtgaagcttcttcttccgtggcttattccttaatggatggcgcctcctctcacctcctttcctttgtcttccgctgcatctccatggtggaaaatcaccattaaaggaccccattgaagctcaaagatccagcctccatagaagccccacaagcaagcttccatcacttaggctataaatagaggccatgtgtatgcattttttcaactttgatcatttgagaattacacttcaaagttcatacctcttttgaggcacaaaattttgagccccttctctgcctctgcctacactcatcttctcctaccttcaagctcttatccaaggcttcctatggtggtgagctgcttcttgactcatcatttccttgaagaggcatctccaatcatcattcttccttctttattctgctgtcattaaacttcatgcagcaaaggactccattgatgaagaagatccaaggcctacaaactgcaatggagctacatcatgtggtatcaagagcatcttcatctaggtgaagtgcttttgcttcctttatcttttt

SEQ ID NO: 9741 - DNA, 572 bp, Glycine max
agcttgagcttagctattcatacctctctaatagctaagctcacctccttgagatgagaagctagagcttagctacacaccccctataatagctaagctcacccccatgacaaaaaacatgaaaatacaaaaaaaagtccttactacaaagactactcaaaatgccccgaaatacaaggctaaaaccctatactactagaatggccaaaatacaaggcccagacgaaggaaatacctattctaatatttacaaagataagtgggctcatacttagcccatgggcttgaaatctaccctaaggctcatgagaaccctagggtcttcccttggatctctagccaatctacttggagtcttctacccaatgcccttgcggggtaggattgcatcagaaaggtcacccttcaaagacggtcctccaaccgatgtcggtattcaacgacactgtgttaccaccacacgtcataaccgatgtagaaatgtcattagagccgatgtagaaggcctttttttttaatattgaacttaagttccatcatcatgttattgttgcgagcagaacatatatata

SEQ ID NO: 9742 - DNA, 514 bp, Glycine max
agcttctggtgggacattttgacttgttttccaatctgacattcaccacagattctgccttcttctattttcagattggggatgcctctaacagcacctttgtcaatgattttcttcatgcctcttaagtgcagatgtccaaatctttgatgccatattctgacttcatcttctttggaggatagacatgtggaggagtagcttgtttcttgaggtgtccataggtaacagttgtcctttgatctgctgcccttcattagaacttcactcttctcatttgtcaccaagcattctgactttgtgaagtttacattgaatccttcatcacacagctgactgatgctgatcaagtttgcagtcagtcccttcaccagcagtactttgtccagactaagaagtccatcatgaactagccttcccattccaatgatctttcctttagagccatcttcaaatgtcacatagctagtggagcagggctcaatgttcaccaagaattctttaacttctgtca

SEQ ID NO: 9743 - DNA, 424 bp, Glycine max
tgtagggttaaagtctcacgataggcacttgctttttctcaattgtgagccgtggctatacgagacatcttgccaaacaaagtcaggttagccataactcgccagtgctttttcttccatgctatatgtagcaaagtcattgatcctgtcaagtttgatgatctggaaaatgaggctgcaattatattgtgccagttggagatgtattttccccctgcattctttgacatcatgattcacttgattgtgcatctggtcagagaaatcaaatgttgtgcgcctgtttatctacggaggatgtacccagttgagcgatacatgaagatcttaaaagggtatacgaagaatctatatcatccagaagcatctattgttgagagggacattgcagaataagccattgaattttgttcagaatacattg

SEQ ID NO: 9744 - DNA, 375 bp, Glycine max
aatctatagcaatgtgcttttctcttatgaatatacccagcaatagcaacaacctccattctatccaataggggattatgtatcatttcaacaacatttgtagtgcaaacaaaaagaacttgcaacgcataactgcttaagtaattatggtaaaaacaagcctactttgcctacagggaattgaatgaaagcaatacattcaagaactatttgaccatcctaagaactacctatcagcaataaacacaattaataaaccatgtacaaatgctaactatatcacaatctcactacaaaggctctagattataaattaatacctttgatagatcaatggtaacatcaagatagtggtcaagaaaattagcattctgc

SEQ ID NO: 9745 - DNA, 435 bp, Glycine max
tgcaagcttctagcgtacccgctattggtgtctataaaattcaaaaacaaatccctcttattactagctattttgaattctttagttcctgaatgtacaaccttcaaattgttgctcgttcccgtatttgttttttgcaaaaaagaaaattaatctgaaacaattcacgctgaatcgttatcgctattattactcgaaccatagggaataacagctcaacaagtaatttaaaatgtaacttttaaattatgtgggatttttttaattacaattttacttcaatatctaattttgttaatctacttaggtcgctttttaaatataaatatgaatgtaaaggtgatctactgataatataaagtacttgctaatcacaaattatgatacctatcattctacaatttaactgaattgtataaatattaataaatttat

SEQ ID NO: 9746 - DNA, 423 bp, Glycine max
  unsure at all n locations
agcttctcgatatattatgtggctgattctgacttccgtnngattagttatgaccatttgaatttctcgggagctctggctgttcaatttcgagcgtctcgatatattatgcccctgaatcggactttcgtgtgacaagttatgaccatttgaattccacgagagcattcgctgttcaatttcgagcatctcgatatattatgcgcctgaatcggacttccgtgtgacaagctatgaccatttgaatttctcgagagcttccggttttcaattcagagcatctcgatacgtgatgcgctagaatcggacttccttgtgaaaagctatgaccattggaatttgtcgagagctttcgatgttcaatttctaccgcctggatatattatgcaccttaatcggacatccgtgtgacagtcatgacca

SEQ ID NO: 9747 - DNA, 391 bp, Glycine max
  unsure at all n locations
agcttgtaagtgtaatatgggtcctatttctcgatttttattngcaagacacgggctccgaatgatttatattgtcgcttgattgcagctgcagatattttaccattttttatatagaaaatattcaacatacatttgtgaggaaaaagatatgcactctactcacaccagaaaactaatcttacttttaattttctacagtatatatactaattaacatttttaatttatgaatctctatatttactttctcttctatcgtactttaatcttatttctttcttctatatttctttccatctcattacataatacatctatcattattttttctattatttccgacagagtcagatcttatgttgtctgtcgatggctggttcctatttac

SEQ ID NO: 9748 - DNA, 367 bp, Glycine max
  unsure at all n locations
cttaagcaccgcggctgcagcttatgcagtcaatttagattcatctcggagaggatcttttccaggcatanttgtgcaaaatctcttgaactaggaagatgttgtccatcatctttctgtttttaatgaaggcagtttgagtttccccaataatagtctcaagcactggggctatgcggttggctagaattttagacacaatcttgtataacaaattatagcaagatatgggtctaaaatggttaacctgggaggcctgatcatgcttaggaataagcacaataatagcatggttgatttgctttaaaaattttccagttgtaaagaattcattaaccgccgcaaagatatcatcaccaatgatatt

SEQ ID NO: 9749 - DNA, 390 bp, Glycine max
ttcacttggatgtccgattcaggcgcatcatatatctatacgctcgaaattgaacaacggaagctctcgagaaattgaaatggtcataacttttcactcagatgtccgattcaggcgcatcatatatcgagacgctcgaaattgaacaatggaagctcccaagaaattcaaatggtcataagttatcacacgaaggtgcgttttaggagcatcacatatcgagacgctcgatattgaacaacggaagctctcgagaaattgaaatggtcataacctttcactcggatgtctgattcaggcgcatcatatatcgagacggtcaagattgaacaacggaagctctcgagaaatagaaatggtcataacttatcactcaaatgtctgattcac

SEQ ID NO: 9750 - DNA, 338 bp, Glycine max
agcttccagttctcaatttcgagcgtttttatatattatgcgccttaatcggacctccttgtgataatttatgaccatttgaatttctcgagagctcccattgttcaatttcgagcgtctcgatatatgatgcgcctgaatcggacctccgtgtgataatttatgaccatttgtatttctcgagagatttcgttgtttaatttcgagcgtctccatatataatgtgcttgaataggaccttcgtgtgaaaagttataactatttgaatttctcgagatcttccctggttaaatttccggcgttttcatatgtgatgtgcttgaatcggactctctgtg

SEQ ID NO: 9751 - DNA, 389 bp, Glycine max
agcttaagctccttcaactgcacaaggctcttaatatttgaagagtatccttgtggaaccttcacccgatgaagacactgacaaaaacttatcttctcctttttggaaaaagtatggcaagctgggggcaagtaaattttcttcccatcagaccttggatgcaactatgatcgtatccccatatcagctagattttgacgggtattcaagccatccttcgtcttgccatgaatgttaaggagcatcccaatcacactgtcacaaacatttttctccaaatgcataacatcaatacaatgtctaacgtctagatcagaccagtacggaagataaaagaaaatggacctcttcttccatatgcaactcttacttttataccttttttgggt

SEQ ID NO: 9752 - DNA, 418 bp, Glycine max
agcttgggctaagcaagtttgcccgctaagcccaaggcacttgtgattttttgtatgtcttgccatgcactaagcgtgccctgtcacgttaagcgcaatttactctttgtttctatagttgttggaattgggcttagcgagccttctcgctaaaccatttgatgcaatcctaccccgcaagggcattggatagaagactccaagtagattgggccagagatccaagggaaggccctagggttctcatgagccttagggtagattttaagcccatgggctaagtatgagcccacttatctttgtaaatattagaataggtttttccttcgtttgggccttatattttggccattctagtagtatagggttttagccttgtatttcggagcattttgagtagtctttgtagtaaggactt

SEQ ID NO: 9753 - DNA, 326 bp, Glycine max
  unsure at all n locations
agcttgtacattcaatttcgagcgtttcgatatattacgggactcaatcggacatccgagtaaaaagttattgttgtttgaatntgttcagagcttcaacattcaatttcgagcttttcgatatattacgggacacaatcagacatccgagtaaaaagttattctcgtttgaatttgctcagggcttcggtaatccatttcgagcgtctcgatatattacgggactcaatcagacatccgagtaaaaagttattgtcgtttgaatttgctcagagcttctacattcacattcgagcttttcgatatattacggactcaatcagaca

SEQ ID NO: 9754 - DNA, 397 bp, Glycine max
  unsure at all n locations
aatctcagcttaacatcagaccacttcaggtgctggaactactttacatgtgatntgatggggcctatgcaagttgaaagccttggaggaaagaggtatgcctatgttgttgtggatgatttctccagatttacctgggtaaactttatcagagagaaatcagaaacctttgaagtattcaaagagttgagtctaagacttcaaagagagaaagactgtgtcatcaagagaatcaggagtgaccatggcagagaatttgaaaacagcaggttcactgaattctgcacatctgaaggcatcactcatgagttctctgcagccattacaccacaacagaatgggatagttgagaggaaaaacaggaccttgcaagaggctgctcgggtcatgcttcatg

SEQ ID NO: 9755 - DNA, 381 bp, Glycine max
gcttcaacattcaagtttgagcgtctcgatatatgtcgagactttatcagacatccgagtaaaaagttattttcgttttaattggctcagaggttcaacattcaatttcgagcgtctcgctatattacgggactcaatctaacatccgagtaaaaagttattgtcgtttgaattggctcagggcttcaacattcaattttgagcgtctcgatatatgacgagactcaatcagacatccgcgtaaaaagttattgtcgtttgaattgtctcagaggttaaacattcaatttcgagcgtctcgatatgttacgggactcaatcagacatccgagtaaaaagctattgtcgtttgaattggctcagagattcaacattcaattt

SEQ ID NO: 9756 - DNA, 272 bp, Glycine max
  unsure at all n locations
agcttctcgatatattatgtggctgattcggacttccgttagattatttatgaccatttgaatttctcgggagctntggttgttcaattccgagcgtctcgatatattatgcccctgaatcggactttcgtgtgacaagtgatgaccatttgaatttcacgagagcattcgttgttcaattccgagcatctcgatatattatgcgcctgaatcggacttccgtgtgacaagttatgaccattcgaatttctccagagcttccggctttaaat

SEQ ID NO: 9757 - DNA, 412 bp, Glycine max
actaagcttccaaagaaagtggcaaaagaatattcaaaataattttctttcataccatagataaatagtaataaataaaagaagtttaagggaagagagaaatgcaaacttgatttatactggttcggccacttcccgtgcctacgtacagtcctaaagcaacccacttgagattttccactctcttgtaaaatccttttacaagttctgaacacacaaggacaatccttcctttgtatgcagaattcctttacaacaagagaccatcggactattaatcccttttcagaagtgagaagaagagaagaagaaatctctcttgaaagagatagattgtacaatgaagatcaatcacaattccttattgcatatgcaagtgtttgaccaacgaatcttcaagaggataagacat

SEQ ID NO: 9758 - DNA, 385 bp, Glycine max
cttggagtttccaagtgccaattcgtcttcttcttttgtccagtcttcttctggcttcaattcattagtgggctttccttctgtgtccagcatcttgggatgttcccagcctttgatgacaactttccaggttctgctatccagtgatttgaggaaggccaccatccttgctttccagtattcatagttggttccatccagaattggtggtctgttcactggtcctccttctttctccatgttcatcagaatttatctccctagatctcactcagtgatttagagtgcccgctctgataccaattgaaattctgataccaatgccagatgtcgtacaggatgtcacgacatcacgcttcagaacatgcagattatatttgagtgt

SEQ ID NO: 9759 - DNA, 421 bp, Glycine max
agcttgaatcggacatctttgtgaattgttatgaccatttgaatttctcaagagcttccgttgttcaatttcgatcctctcgacatattatgcacccgaatcggacatctgtgtgaaaagtcatgatcatttgaatttctcgagagtttccgatgtttaatttcgagcgtatcgatatattataaccctgaatcggacctcagtgtgaaaagttatgaccatttgaatttgacgagagcttccgttgttcaatttcgaatatcactgtatgtgatgcgcctaaatcggacattcgagttaaatgttatgaccatttgaatttctcaagagcttccgttgttcaattctgagcgtctcgatatgtgatttgcctgaatcggacatccgtgtgaaaagttatgaccatttgaatctctcaaga

SEQ ID NO: 9760 - DNA, 375 bp, Glycine max
tgttatggaagtcaagagcatgaaagtgttccaattttattaactggtcaatacgttctagagcaggttgatgacatcaatacgatatttggaaagacccataagaaggaaaaaaagtaaaacttgcatactgaagaagaggtcgatattgtttgatcttccatattggtccgatctagatgtcagacattgtattgatgttatgcatgtggagaaaaatgtgtatgatagtgtcatcgacatgtttcttaacattcaaggaaagacaaaggatgatttgaataatcgtcaagatctagatgagatgagtatatgagaccagttatgtacttggtctaatggtgagaaaatatacttggctccaacttgacttac

SEQ ID NO: 9761 - DNA, 413 bp, Glycine max
  unsure at all n locations
agcttgaaggcattctttattgaagtttaacaatttttatttgacaagtaaattattgaggggtttggcaatcttagagaaatgttgtatgagctttctatagaaaccagcatgccccaaatgtttttactcctttcatgtctcaaggtggtgggagcttttcaattacttctatcttggcttgatatacttcaataccacttgctgaaattttatgctcgagcactataccttcggttaccttgtagtgcaatttttgccaattaagcacaaggttcttttcaattcatctttctaggactctntccaagtttttgaggcatgacatgaacaatgatccgattatagagaaataatccataaatacctctactcattnttataccatgttagaacagatgacattcatacat

SEQ ID NO: 9762 - DNA, 387 bp, Glycine max
tgaaggtgtgtaaccccccatttttcacagtaaaatattggtaatgtgtctactattattgtgatcatctctttctccgtcattggaggtgccacttgagctgccaggtctctccacctttgggcgtattctttgaaagatttgtgcccctttttgcacatgttctatagttgcattctatccggagccatatcagaattgtattgatactgcccaacgaaggcaaccattaggtcttcccaagaatggactcgggaaggttccaagttagtgtaccaggtaacagctaccccagtaagactttcttggaagaaatgtatcagcagttcctcgtcttttgcgtatgcccccatcttccgacaatacatctttagatggttcttgggg

SEQ ID NO: 9763 - DNA, 370 bp, Glycine max
  unsure at all n locations
agcttaccgctgtgcatgtgctgctgttctaactggacatgctttattgcacactctctatggccaagctatgagacataatacccagttttttgtggaatattttgcattggatcttttaattaatagtgatggtaagttgttgcagaaaacatcttgctttcacttaatttgcaattaattaacctaatgaagtcttagccttcattggtcttgatgagtaaatttcccatgtgcttcacatcacttgttacaaatgtgttatctgtttcaatggtaatttctttattaaacaagcattcaatggtggaaattttntcttttgtcctggtgatgggaaagttaactaatttctttctatattggatat

SEQ ID NO: 9764 - DNA, 413 bp, Glycine max
  unsure at all n locations
agcttttaccaaagagtttttactctctagtaatcgattaccagtttattgtaattgattaccagtagcaaagattgttttcaaaaagctttcaactgaatttacaacgttccaattgatttcaaaatggtgtaattgattacaatgatttggtaatcgattaccagtgtgtttaaacgttgaaattcaaattcaaatgtgaagagtcacatcctttcacaaaaatgctttgtgtaattgattacaatgatttggtaatcgattaccagtgataagttttgaacaaaaatcaaaagatgtaactcttccaatggttttcaagtttttctaaaggttataactcttctaatggttttcttgaccagacatgaagagtttataaaagtaagaccttaacttgcattntacaacac

SEQ ID NO: 9765 - DNA, 426 bp, Glycine max
agcttgtccatccacgatgtctccaatataaaggtctacccctaaccatttgctcacacgaacatgaaattggacatcaccataatcaaatccatgtgtcccacactcaaagataagcttacaaaataattataattaaaacaatttaagaaacatcaattaactatgacataaactctatcatctttagatcatggtatttgaaagtaaataaaaccaataacatccagctcacataagccaaacatctcatattcaactatcatgaaacaattcaagaatcaacatcatgcatcaactatcaagcattatcaacatgagttcatcaatcatcatcaacatgaacaccaaacatcaacaccaacgacagactctactccatggatatttacaccacatgaggaattaaccaaagtacatccctta

SEQ ID NO: 9766 - DNA, 378 bp, Glycine max
  unsure at all n locations
tttgaanagacacatctcttcaaaccattttgattatgcacgaagggcctatatatatgtgtgtctgaattntaaaaaaaagatattccaagagaacttcaatgccaaattctctttcaaaagaaactcttgggcaaacacgtgcaaatccattaagagtttctccatggacttaaattgtaatatccttctcttcaagagagaattcttctttctttcttctcattcaaagagattgattaagggactgaggatctcttaagttgtaaggattactgaacacaagggatgggttgtccctgtgtggttcagactttgtaaacggatttttacaaagggagtggaaaatttcaagtgggttacttgagtactggacgc

SEQ ID NO: 9767 - DNA, 379 bp, Glycine max
  unsure at all n locations
agcttatatacagaggtgttgctctgtgtgggagaagaccattntctatggctgccactctatctgttacaataagtatgtagtcaagaaacatcacttcaaccattagacccattctagtgaagacaatagttaaggttctaagggtgctagacatcatggttgcatggtgtatgtaaacatctcactcatgtggatcttcaacacttgaccaatgttaggtggcattttaccacctggtatagtggcttctgttcgcaatgttacagtgtgcattacttgcatagctgttagtgtgaacattccatgagttgtttctccagacaacattattccatcagaaccttctcgaacaacaattagtatatctgatacctct

SEQ ID NO: 9768 - DNA, 204 bp, Glycine max
caccacttcttgttgaagatgagtctagaagaagcttaccaccataggaagccatggataacaccttgaaggtataacaagatgattgaagggtgaggaagagaaaaacatgaaatttagtgcctttaaagagaactgaattttgtagtgtaattttcaaatgatcgaagctgaaaaaatgcacactgttcacttccggcagtg

SEQ ID NO: 9769 - DNA, 450 bp, Glycine max
  unsure at all n locations
gagaccacctgcaggcacgcnagcttggaacgaataaactgaaaaagttttcgaggttagcttttggtgaagatgtcggcgagttgaagatgggaaggaacgaattgagtaatgagccttttggagagaactaactcgtgaacaaagtggtagtcaatatcaacatgattggcacgcttgtgagcaaccggattctgggaaagaaatgtagctcttttgttatcacaaagaagagtagggggagcagagcaaacatgcagattgcgcagcaaatgagtgaaccacattagcttatctgctgtatttgccatagcccaatattcagattcagagctggaacgagcaatagtaggctactttttagcactccaggacacaagattaccttccaagaatatcgagtagccataggtggagtgacgcgtctcaacacaatgagcccattcgaca

SEQ ID NO: 9770 - DNA, 222 bp, Glycine max
ctgattgtagtggaatggagaaggaaaaagatgaatggagacaccacttcaagtagaagatgagtctagaagaagcttaccaccataggaagccatggataagagcttgaaggtagaagaagatgaatgaagggagaggaagagaaaaacatgaaatttagtgcctctaaagagatctgaattttgtagtggtaattttcaatgaatcaagttgaaaaaatg

SEQ ID NO: 9771 - DNA, 385 bp, Glycine max
aaacattaaatttcgagagtctcgttatattacggtattcaatcagacatccgagtaaaaagttattgtcgtttgagtaggctcataggttcaacattcaatttctagcctcacgatatattaccggactgaatcggacatccgagtaaaaagttattgtcgtttgaattggctcataggttcaacattcaatttcgagcggctcgatatattacgggactcagtcagacaaccgagtaaaaagttattgtcgtttgaattggctcataggttcaacattcaatttcgagccgctcgatatattatgggactcaatcagacatccgagtaacaagttattgtccgttgaattggctcataggttcaacatttcattgccgagcgt

SEQ ID NO: 9772 - DNA, 411 bp, Glycine max
  unsure at all n locations
agctntaagccaattcatacgacaattactctttattctgatgtcnganngagtcccgtaatataacgaaacgctcgaaattgaatgtttaacctatgagccaattctaacgataataactttttactcggatgtccgattgagtctcgtaatatatcgacacgctcgaaattgaatggtgaagctctaagcctattcaaacaacaataacgttttactcggatgtccgattcaatgacgtaatatatcgggacgctcgaaattgaatgttgaacctgtgagccaattcaaacgacaataactttttactcggatgtctgattgagtcccgcaatatatcgagacgctcgaatatgaatggtgaacctctgagccattcaaacgaccataacttttactcggatgtcgatg

SEQ ID NO: 9773 - DNA, 272 bp, Glycine max
  unsure at all n locations
agcttgtcaagggaacatttatgcattatttcatagatgagagctttcttgcgtccttccaaacagaatcaaagaagtatgacaacattaacatgagaagttctactgatacactattagaaaatatgttntctacatcggttatttatgactttcaacatcggtttttcaaccgatgttgaaagtaccgacgttgatagtattatcgttaacatcggnttttgaanaaccgatgttaacgtaaaattaccaacatcggttatattaataac

SEQ ID NO: 9774 - DNA, 398 bp, Glycine max
  unsure at all n locations
cagcttccacgtatatgacctacatgatcacatgataactttttaatttctttacataagtaaaggggcatcatttccaatcatgatatactacagaaatggaatttttaccatcttcttgtaacctccagatgcatgtttcttcttcaagacttcaataaagtccatagcataaaggtatggcatgtttggcatccctacaaaatacaaatcaaataggaaatgactaagttataatgtctttatctaatatgaacatagttctggattgatcatttttacacccttagataattttgttttatacaactatgttcacatattaaactatacctccatgaaccacagaaagaaaaaagtctttaggatgataattnttattttttttacttaaagtc

SEQ ID NO: 9775 - DNA, 424 bp, Glycine max
  unsure at all n locations
agcttcaacatcagaccacttccagtgttctggatttatcttcacatggacttgatggggcctatgcaagttgaaagccttggaggaaagaggtatgcctatgttgttgtggatgatttctccagatttacctgngtcaactctatcagagagaaatcagacacctttgaagtattcaaagagttgagtctaagacttcaaagagaaaaagactgtgtcatcaagagaattaggagtgaccatggcagagagtttgaaaacagcaagtttactgaattctgcacatctgaaggcatcactcatgagttctctgcagccattacaccacaacaaaatggcatatgtgaaaggaaaaacaggactttgcaagaagctgctanggtcatgcttcatgccaaagaacttccctataatctctgggctg

SEQ ID NO: 9776 - DNA, 340 bp, Glycine max
  unsure at all n locations
nttctttgtgggttgatgggttctgtcgcgcacaatgtcatgttcactggctgacatactctcaattagctcagttgcttcttccggggtcttcagctttatttttccccttgcataagcatctatcagttgcttggcttggggtctcaacccatatatgaacatattcaattgaattggctcaagaaacccatgagtgtgagttcttctcaataaacctctgaacctctccaatgcttcactcagagattcatcacggaattgatgaaatgagaagatagcagctgttcctctcaaagtcttggactctgggaagtatttctttagaaactttttaaca

SEQ ID NO: 9777 - DNA, 386 bp, Glycine max
taccactatagtctatacaaagaaattattgtgatttttttacgctttactaaggtataaggggaagtaataattttaggattttgagataattatcattcccttatgtgatgagtgattctagaatgagaagtgtttattgggcttggctcttccaaagtgaataagggtaaagtaattaattttagtcattgatgaaaaaaattagcggttgatatttcaactcattcttgatttgttatgcaagtgcatgtaatatcgactattaattttctcattaatgattgagaatatttaatttactttctagagtgagttgctcacgaggagctaaatctttattgaaatgttttcttctgtttctgtgtctaacagcaactttctcg

SEQ ID NO: 9778 - DNA, 406 bp, Glycine max
  unsure at all n locations
agcttgtccttcacggcttacatgatttcactggcatgttctgcagcattgcctacaattggaagcaagatgacagaaataaaagccactgacatattcaatgactcagatgctccctgcaagagaccagaaacacaatatgtctatgaatgaacttatgacgcagtgtttatggacaagaacaagaataggaatattagaagctttagttgtacaataatagaaattaatgatcaagaaattctgaaaatgatatagctatacctgtatggcgtctacaaggtatccagacaatatagatacccatgctgtcaagatagcaagccagattattgcctcccattgagttaattcaagatcttcctccacatcagaattntcaccattctctcctccctacattatg

SEQ ID NO: 9779 - DNA, 389 bp, Glycine max
  unsure at all n locations
ntntgagctgtatcaatcaactctattgacaagtttgctctttgcatgaatgtaatgatgaaattttaatgataaatgacgcagttataaaatggtggttagaaaatatgtgatagaggaggagatggaatgcatgtttgttacttcaattgaatcataaatgaatgagaggcttacatcataaagcctaaacaattgatattcatcaattaagatcaaaatttaatccaataattaaacaatgttaacccacaaaattccaactagaacaagaaacttcagttattacctctatttggtcaccgacattaatcaggagagcatcagggattattggaactttaaaccactgatcatctttgaggacttggaggccttctacttctttg

SEQ ID NO: 9780 - DNA, 377 bp, Glycine max
tataatatatcgatacgctcgaaattaatcatcggatactctcatgaaatgtaaatgggcataagttttcacccggatgtccaattcgggcgcataatatgtcaagagtctcgaaattgaacaacggaagctcttgagaaataaaatggtgataactctttacaccgatgttcgatttatgcgaatcacgtatcgagacgctcagaattgaacaacggaagctcttgagaaaatcaaatggtcataaaatttcacaccgatgtccaaattagggcgcataaatatagtgcgctcgaaaatgacaacgggagctttcgtcaaattcaaatggtcataatttttcacactggagtccgattcaggctataatatatcaa

SEQ ID NO: 9781 - DNA, 352 bp, Glycine max
agcttgaatcggacattcgtgagaattgttatgactatttgaatttctcaagatcttccgttgttcaatttcgaccttctcgacatattatgcgcccgaatcggacatccgtgtgaaaagttatgactatttgaatttcctgagagtttccgatgtttaatttcgaacgtatcgatatattataagcttgaatcggacatccgcgtgaaaagttataaccatttgaatttctcaagagcttccgttgttcaatatcgaacttctcgatatgtgatttgcctgaatcggacatccgtgtgaaaagttataccacgtgaatttttcaagagcttccggtgttcaattttgagcg

SEQ ID NO: 9782 - DNA, 413 bp, Glycine max
gcttgaccaacggaatgcaaatgatttactcagttctattaggcaacactcttcagcttttggggatggactccagcgtttggctcattactttgccaatggccttgagacaaggttggctgctgggaccccatcatacatgcccctagaaggaacaacttccgctgatatgttgaaagcttacaaactatatgttacatcctctcctttgcagaggttgacaaattatttggcaacccatacaattgttagtcttgtggaaaatgagggcagtgttcatattattgattttggcatttgctatggttttcagtggccatgccttatcaagaagctctcagaaaggcatggtggtcctccgaggcttcgtataacaggaattgaacttcctcagccgggatttcggcctgcag

SEQ ID NO: 9783 - DNA, 438 bp, Glycine max
agcttataatatatcgaggcgctcgattttgaacatcggaagctcttgagaaattcaaatggtcataacttttaactcggagttcaattcatgcgcatcacatatagagacgctaaaaaatgaacaacggaagctctccagaagttaaaatggtcataagttttcacactgatgtccgattcaggcttatattatatcgagacgctcaaaattgaacaacgaaagctcttgagaaattcaaatggtcataactttttacactgaggtccgattcaggcttataatatatcaagtcgctcgaaattaaacatcggaagctctcgagaaattcaaatggtcataacttttcacacggatgtccgattcgggcgcatattatgtcgagaggctcgaaactcaacaacggaagctatcgagaaattcaaatggtcataactt

SEQ ID NO: 9784 - DNA, 401 bp, Glycine max
agctctgatcacattcatacgacaattacttattactcggatgtctgattcagtcccgtaatatatcgagacgctcgaaatggaattttgaagctctgagcaaattcaaacgacaatcactttttactcagatgtctgattgagtaccgcaatatgtcgagacgctcaatattgaatactgaagctctgagcaaattcaaacgacaataacttgtcacttagatgtctgattgagtcccgtaatatatcgagttgctcgaaattgaagaccgaagctctgagcaaattcaaacaacaataacgttttactcggatgtctgattgagtcttgtaatatatagagacgctcaatatggaataccgaagctctgagcaaattcaaacgacaataacttctttac

SEQ ID NO: 9785 - DNA, 392 bp, Glycine max
tgaaggaaaactggatgcattggttaacttggtaatttaactggccttgaatcagaaatctatacctgttgcaaggtttgtggtttgtgctcctctgctgaccaccatacagacctttgcccttccatgcagcaacctggagcgattgagcagcctgaagcttatgctgcaaatatttacaatagacctcctcaacctcagcagcaaaatcaaccacagcagaaaaattatgacctctccagcaacagatacaaccctggatggaggaatcaccctaacctcagatggtccagccctcagcaacaacaacagcagcctgcttcttccttccaaaatgctgctggcccaagcagaccatacattcctccaccaatccaacaacagcaacaacc

SEQ ID NO: 9786 - DNA, 395 bp, Glycine max
  unsure at all n locations
ntattccccatttaatgtcattttataattaagcattttacaatttgaattatcttaatgttctaaccgtgcttattatttacaaattttatcctcagatatttacactattgaattccaaaaaaagaggtttacctcatgctcacattcttttgttcttacatccttccaacaagtatccaactcctaaagatacagataaaattgtctcaactaagctaccagatcaaaatagagatccaattttacatgagtgcatcaagagtcatatgatacacggtccatgtagaccagctaatagacattcaccatgcaagaaagatggtaaatgttctaaatttttccataaaaggttccaataaaaaaacatttgttgaccaggacaattaccctat

SEQ ID NO: 9787 - DNA, 421 bp, Glycine max
agcttgtcttcatggggaatagagtgtaaactccagtggaagcagtcaagacttatcgtttaaaacttgacattagacatcatttagatttactgggaactttttatgttcctagtttatctaggaatttagtttcattatctaaacttgatgttactagatactcttttaattttggtaatggatgtttctgtttatttaagcataatcatctcattggtactggtgttctttgtgatggcttatataaattgaaatcagatggtttgtatgctgaaacctctttaactctgcatcataatcttggcactaaatgtagtttagtgaatgaacgatctactttcttgtggcataaacgtttaggtcacatttcaagagaaaggatggaaagattaataaagaatgaaattctcactgatct

SEQ ID NO: 9788 - DNA, 418 bp, Glycine max
  unsure at all n locations
agctntgttccaaacacttctttggttctgtttcttcctcgttttttatcacaagattgccactgtccaaaagcactactacaggattctgtgcttgtttgtgagagttgttggtgtaccagacaagatacgcattttgggtgagaacaagattgcctgtgttgttgagtgttatgatacccgaggaatcattgatggggttggccttattagcaacccaaacaactgtctggattgggatgttcttgtaccaaatacccacataacgtttatgggaataacctggtgatgtgccatcattttcttctattttctaaaccctttttgcaccattttaattattgattgatcttaattgtcaattaattaggcagttntattatttgggcccattaagctaatttgatgttnttaatct

SEQ ID NO: 9789 - DNA, 409 bp, Glycine max
gacaacagggagtgaagattgctgaaaaccctagccttgcaacatgtcctatggaagtagacacggagatggacaagaaaatccgcagtatggtgagtagcattttgaaagaagcctctgtgcctgaagctgatgaagatgttccaacatcttccaccccgaatgtttctatgcctgatgttgagaaagatgttccaacatcttccggcccatatgatgaagtactgtcttcccccagcaaagagagatcaacagaggaagatgatcaagccgcagaggagacccctgcaccaagggcaccagaacctgctccaggtgatctcattgacttagaagaagtcgaatctgatgaagaacccattgccaacaggttggcacctggcattgcggaaagacttcaaaacagaaa

SEQ ID NO: 9790 - DNA, 313 bp, Glycine max
tcacggtaaatatagacatcccattcctaggctagacgatatgttggatgaattgcatggagcctgtgttttctctaaaattgatttgaaaggtgggtaccatcaaattaggattagagagggggatgaatgaaaaacaactttcaaaactaagtatgggctgtatgaatcgcttgttatgccctttgtgctaaccaatgctcctaacactttcataagattaatgaaccatgtgttaagggaatttctaggaaaatttgttgtgggtattttgatgatatcttgatttacagcaaattccatgatgaacatc

SEQ ID NO: 9791 - DNA, 407 bp, Glycine max
gtgtcttatgaatccccctgtgcttatgccaccagtacctggaaggcctctcatcttatacatgacaatcttagatgagtcaatggggtgtatgctggggcaacatgacgaatctggaaagaaagagcgcgctgtttactacctgagtaagaagttcacgaactgtgaaatgaattactcattgctcgaaagaacgtgttgtgctttagtatgggcatcccatcgcctaaggcagtacatgctgagccatactacctggttgatatccaagatggacccggttaagtacatctttgaaaagccagctctcacgggacgaatcgcccggtggcaagtcctgctatccaagtttgatatagtttacgtcacccaaaaggcgataaaaggaagcgccttagcagattatt

SEQ ID NO: 9792 - DNA, 352 bp, Glycine max
tttccctccttcaaggaatcttcttgaagccctctcacatacgccacaccatacttggcattcatcagagggtcttcccctgcagtctcttgccctctcccccaccgtggatccctgaaaacgtttatgttcggagcccagaacgtcatccccgtcgcttgccccgcattgtacaccgccctcgcttccttcccaatagtcttcagcaacaatgcagtaacataacaccaacatgtcaataatgtaattcgataaagtcccacacccgagtaataaagagaagatgaagtgtatataaagctttgaggtgttggatgttagtgattatgcaactgaccttgctgatttggta

SEQ ID NO: 9793 - DNA, 548 bp, Glycine max
  unsure at all n locations
agcttgtgctaagaatgtcatgatccttttcatcatattttaagaaaattgaatgtcatgatccatcacttctctgcatatatatttagtattaagatgtgtaccaacaatcctaaaatgttctgtgcagatattttccattgaaagacactacacaagattagagactccgaaattaattttgttttatgccaattgctattatgctttgttgtgtcttgctaaatgcatatttaatttgaagcaacttcattatttttgtgttatctgttaatggtttaattggataatagtttacaagccaggtaatatataatttagatatatgtgcagagatgtaatattgtcatgtaaattttaatatttaattattgttatgttagagtatgtgcatgcaattgttttagagagggctggtgataagtgaagctagctcacaaacaattcaagatgcagttagctttataagctaggctcatgagtcatgattngagtctgatttgaatttttaccctgtttagtaaatgagctgagcttcagcttttaat

SEQ ID NO: 9794 - DNA, 350 bp, Glycine max
agcttaatctcatagaagggaagcgtttgttcaccatgagtcatgggcgtttatatcagaaaagagtgaagaacgcttttgacaagaaggtacatatgcgccggtttagcaaaggggacttggtgttgaagaaggtctcccaagctctgaaagacaacagagggaagtgggacccgaactacgaagggcctttcgctgtaaaagggctttctccggaggggctctggtgctcaccaacatggatggcgaggagctaccttcacccgtgaactccgatggtttcaagcgatactacgcttaggatctggggcaattgaggaagtcgctgcatgttcttttatttttgggtg

SEQ ID NO: 9795 - DNA, 650 bp, Glycine max
agcttatatatttatttatctctatttattaataaactaaaatagtaattacattgtatttttagtttttactattttttaatacaagtaacaaaatattctacaaattaagagaaaactattaaaaaaattagctaaatttattaaagtaaaaaggaaaatatacatataatgcaatttctattatttataaatagatataaatagtttttgttatcttttattgtttaatttctacgtttgaaagtaaaagcattaagttactgtttatttagttgattttttaattcttaactaataatatatttaactaattagacattgtacaaaaaaattgtgttcaaaataaaaattatttttcataattaatttttaagaaaatggtaaattttatatcaataaaatggagaataattatgaacaagtcatcgatctatttatagcacatatattgataatataaataatgaaaaataaacaaacattataaaatattcattatgattttaacataatccattttggtattatcctaattggaaattggtgaattttttaaggataatataatattttttaaatatttttttaatcaattatggataatttttaaatattcaaaaataattgggattcaattaataaaaaaa

SEQ ID NO: 9796 - DNA, 385 bp, Glycine max
  unsure at all n locations
gacttgatggggcctatgcacaatgcaaagccttgtaggaaagaggtatgcctatgttgatgtggatgatttctccagatttacctgggtcaactttatcagagagaaatcagacacctatgaagtattcacagagttgagtctaagacttcaaagagaaaaagactgtgtcatcatgagaattangagtgaccatggcacggagtttgaaaacagcaagtttactgaattctgcacatctgaaggcatcactcatgagttctctgcagccattacaccacaacaaaatggcatagttgaaaggaaaaacaggactntgcaagaagctgctanggtcatgcttcatgccaaagaacttccctataatctctgggctgaagccatg

SEQ ID NO: 9797 - DNA, 310 bp, Glycine max
cgcccttgacattaatggtttgaggaagtatctcaatcacatcgatctttgccttgcccacctctattccccttactgagatgttatgccccaacattattccttcttgaaccataaaatggcatttctcccaattgagaactatattggactcttcatatctctgtaatactctttcaagattggataagcacccttcaaaagatggcacacaaacagagaaatcttccatgaaaacttcaatgcatttttcccccatattagaaaaaataaccatcgtacacctctaaaatgatgtcggggcgttgca

SEQ ID NO: 9798 - DNA, 384 bp, Glycine max
acttcattactgttattcagtattacaaatgagcttgttgcaattcttctagacttagagtgataacatgtaatcctcttgaacccttacctcccactctctcatcatgccgagactccggaaccctaacaggttttgccttttccatgtacttgaaacaaaactcaatagcttctttctcaatgtacctttcaacaatagatgctttaggacggtgtagattatttgtataccattttaagatcttcatgcatcactcaaccgggtacatccaccgcaaataaacgggaccgcaacatttaatttccctcaccatatgaacaatttattgaaccatgatgtcaaaaatgaaagaggaaaatatatcttccactgacatatgat

SEQ ID NO: 9799 - DNA, 503 bp, Glycine max
agcttgttgttcctggatgcatctggtattggactcaacaattgctaagagaattgtctcaactttgtcaaatggagggagaactattttgatgaccatacctcaaccttcaagtaggatgtattgcatgtttcaaaaggtgtttatgctttcagaagggaaccttgtgtattttggaaaaggatctgaagctatggaatatttttctagatttggatatgccccaaccacggtcatgaacccctcagatttccttttgaatcttgcaaatggtatgttgtttgctctttattattttaaaaagtgtgaggtttcctttgttatttatgaaactttgtggacagaagttcaaaatctcatttatctattagtacctacatatatttggataaattcacttattctatttttcatgattgattaaatctataaattagattataagaattactagctttgtgacaagtcattcatttaagttcttttcatctcaatttttcatg

SEQ ID NO: 9800 - DNA, 430 bp, Glycine max
agctttgtatggtagaaggggtatgttctccctatgttggttagagcccggagaaggcctcaccttaggaccagaagtggtacagcaaaccactgagaaagttaagttaattcaggagaggatgagagctgttcagagtagccagaaaagttatcatgataagaggaggaaagatctggaattcaaggttggtgatcatgtattcttgagagtcactccgtggactggggttggtcgagcattgaaatctcgaaaactcacacctcgcttaattggtcctttccaaattcttaagagagttggccctgtggcataccaaattgcattacccctgtctctttctaatcttcacaatgtctttcatatgtctcaactccataagtatatctgggatccatcccatgtgatttgattggatgatggtcaaatg

SEQ ID NO: 9801 - DNA, 376 bp, Glycine max
tatgacgattcgaatttctctatagcttccgttgatcaatttcgagcttctcgatatgtgattagcctgaatcggacatccgtgtgaaaagttataccagttgaatttctcaagagcttccgttgttcagttttgagcgtctcgatatgtgatttgcctgaatctgacatccgtgtgaaaagttatgaccatttgaatttctcaagaccttacgttggtcaatttcgagcctctcgacatattatgcgaccgaatcggacatccgtgtgataagttatggccatttgaatttctcgagagtttccgatgtttaatttcgagcgtatcgatatattataagcatgaatcggacatacgtgtgaaaagctatgaccat

SEQ ID NO: 9802 - DNA, 449 bp, Glycine max
  unsure at all n locations
agcttgtagaattcaccccaattccaattgcatatgttgacttactcccctatctgctcgataatgcaatggaagttataagcccaacaaagatttctcaaccttcttttcctagaggatacaaccccaacgtgacatgtgcttatcatgggggagttccggggcattccattgagcattgtatgaccctgaaacataaggtgcaaagtctgattgatgcaggctggttgagattcgaggaggaaaatcactcgggagttttgatgtcgttgtgatgcaatcctaccccccaagggcattggataaaagactccaagaagattgggccaaagatgcaagagaaggccctagggttctcatgagccttanggtagatttcgggcccatgggctaagtatgagcccacttatctttgtacatattagattaagatttcattaaattgggcc

SEQ ID NO: 9803 - DNA, 402 bp, Glycine max
  unsure at all n locations
acttaccaccctcttattgatggccagactaaacactccattcagtcgctgaaggatcttttgagggcatgtgtcttagaacaaaagggaagttgggagagttttctgccattgatagagtttagctataacaatagttttcattctaccattggaatggctccctattaagccctgtatgatagaagatgtangacactcctgtgttggctagaacctggagacaacctcaccttaggacctaaagtggtacaacaaaccactaagaaggtcaagttaatccaagagaggataaggactactcagagtaggcagaagagttatcatgacaagaggaggaaagacctgaaattcgaggttggtgatcatgtattcttgggagtcacttcgtggactggggtt

SEQ ID NO: 9804 - DNA, 487 bp, Glycine max
agctttttatgaagtttgaatgttttttttaaaaagatgtaatcgattaccatctttatgtcatcgattactagtaacggaatttttgaaattcaaaatgaaaagacatgacttctcattaaataaatgtgtaatcgattaccaaaaatctgtaattgattaccaatgaggaaatttcaacgataactctgaaaagtcacatttcttcatgagttttttgaaaagccaccaaaggcctataaatatgtgacttggctttaaaaaatcttcagagtttttcggaacctcattgtcttattctctcaaaaacaaaaatttggccaaacacttgcgaatcaattaagggattcttattagttcttcaaattggattattcttctctaaaaagagagaaaaaattgtgtacattaaaaagtaaaactgttgttgagatgaagaagctgtgaaatctcttgatttgggagtttttttgaacacaaaggaaag

SEQ ID NO: 9805 - DNA, 432 bp, Glycine max
  unsure at all n locations
ntggccaattctgccaantnnaggtcaaattgagcttttatgttagaacctttgcacttgaataattggactgcgagtttgggcttttgttttctgtaattagtttaattaggtagttaggtaggtagttaggtagttagttagttatttactaacactctatatattagtgttagttagttagtgacttcacttgaacttcattttgtacaaaagtacttgtgtaagctgatgcaatcctccctaaagggaccagtcactaagtgaatatttgatgtgtgtgttgagaaataaatttaattgaattggtagaagccgtatccaattaaattttagagggggaggtgagcatttacttgctacaccccattgccacatcatatagtcacactntgtgcatgtccttcatgctttacatgcctcatgacacct

SEQ ID NO: 9806 - DNA, 402 bp, Glycine max
agcttcccgcatccgtacttggaaggatctgattattgctttcctaaggcaatatcagtataattccgatatggctcccgatcgcactcagctacaaaatatgttcaagaaggaagatgagacctttaaagaatacgcgcagcgatggagagacctggcagcacaagtggcacctcccatggtcgaaagggagatgatcaccatgatggtagacaccttgccagtatttgatgcaatcctaccccgtaagggcattggatagaaaactccaagtagattgggccaaagatgcaagagaaggccctagggttcttatgagccttagggtagatttcgggcccatgggctaagtacgagcccacttatctttgtaaatattaaattaaggtttcattatttttg

SEQ ID NO: 9807 - DNA, 459 bp, Glycine max
agcttgctcgtcttgctgatatttatcatgctgacttttctgatgatgaccgaggaacaattagggatcaacttgaaacttatgtgcttcaagtgagaagaaatgcttctttttccacttgtgaagatgttcaaagtttggctatgaagatggttcaaactgagaaacatttggtatttccattggtttataaacttattgagctagctttgatattgccggtgtcgacaacatccgttgaaagagctttttcagcaatgaagattatcaagtctaaattgcgcaataagatcaacgatgtgtggttcaatgacttgatggtatgttacaccgagcgggagatattcaagtcacttgatgatattgatattattcgaacatctaccgcaaagaagtctcggaaaagacacttgcctcgtaattttatttaaccccctattggaaggataatgttaatct

SEQ ID NO: 9808 - DNA, 321 bp, Glycine max
attgagaggaaaaatatatgttatgtctaacaagccaacaaagggagaaagaaggttgtcttcgaacccggagattgggtttgggtgcacatgagaaaagaaaggtttccggaacaaaggaaatcaaagcttcaaccaaggggagatggaccatttcaagtgcttgaaagaatcaatgacaatgcttacaaagttgagctgcccggtgagtataatgttagttccaccttcaatgtctctgatttatctctttttgatgcagatggagaatccgatttgaggacaaatccttctcaagagggagagaatgatgaggacatg

SEQ ID NO: 9809 - DNA, 411 bp, Glycine max
tgttccaaatgttttttaaatgtgtgtaattgattacaatatattggtaatcgattaccagtgtatctgaacgttgaaattcaaattcaattgtgaagagtcacatcttttcataaaatgctttgtgtaattgattacaaggttatggaaatcgattaccagtgacaagttctgaataaaaagtcaagagatgtaactcttccaatggttttctcaagattttctcaaggttataactcttctaatggttttcttgaccagacatgaagagtctataaaagcaagaccttgacttgcatttcaataatttttacaacttttgaacttctttgaacaacttttgagatatcttgaaaccttcgcttctaatctttcttcttcttcctttgccaaaaagctttctaagttttt

SEQ ID NO: 9810 - DNA, 427 bp, Glycine max
  unsure at all n locations
tcttagtctcagatnannnnatgagtttgtagctaccttatgcactcctctaatgactatggcatcatttctggcgctaaactgctaggagttggaagccatcttctcaattaaatttctaacttcagcaggagtcatgtctccaagggcttcaccactggcagcatctatcatacttatctccatattactgagtcctttataaaaatattggagaagaagctgctctgaaatctgatggtgagggcaactggcacataattttttaaatcgctcccagtactcatacaggctctctccactgagttgtctaatacctgagatatctttcctgatggctgtggtcctggaagcagggaaaattttttctaagaatactctcttaaggccatcccagctcgtgatggaccttggagcaaggtaatac

SEQ ID NO: 9811 - DNA, 420 bp, Glycine max
agcttggtatgaaaaactaagtttacttctcttaaaaaatggctttgagcgaggaaaggttgagaaaacacttttttgcaaaaactatgaatctcagtttttatcagtgcaagtatatatggacgacattatatttggtgctattaataaaatgctttgtgaagatttttctaagctaatgcaaacagagtttgaaatgagtatgatgggagaattgaaattctttcttggactacaaataaagcaaacacccaaaggtatctatattcaccaaaccaagtatgtgaaataattgttgaaaaaagtcaacatgaacaatgcaaaagaaacgaagactccaatgcatcctacaacatacctaggtggttgaaagcccacatgcaagatttggattggctcccaagtttgagaactactaaa

SEQ ID NO: 9812 - DNA, 377 bp, Glycine max
aacattccaattgatttcaaaatgtgtgtatcgattacaagatattggtaatcgattaccagtgtatctgaatgttgaaattcaaaatcaattgtgaatagtcatatcctttcataaaaagctttgtgtaatcgattacatggttttggtaatcgattaccagtgacaagttttgaataaaaatcaaaagatgtaactcttccaatggttttcaggttttctcgaggtcataactcttccaatggttttcttgaccagacatgaaaggtctataaaagcaagatcttgacttgcatttaacagaacaattacttacaacttttttatatactcttttacaacctttgaatctctttgaacatcttcttgaacttctt

SEQ ID NO: 9813 - DNA, 269 bp, Glycine max
ataaggcatgcgaagtgggtggaattcctagagtctttcccttatgttatcaaacataaaacgggaaaaggaaatattgtagccgatgctctttctcggcgtcatgcattactttctatgcttgaaacaaaattgattggtcttgaatgtttgaaaagcatgtatgaaaatgatgaaacttttggagaaattttaaaaatgtgaaaaatttcagaaatggttctttgacatgaagctttctttcaaagaaacaaattggtgtcctaatg

SEQ ID NO: 9814 - DNA, 320 bp, Glycine max
cagcatgcaagctccacactggagaatggagaacatattattagcgctaggcaaaaacactcagggggctccgaacaaaagtagaggatggacgaatgccaagaaggaccgcacttaggcaaacatgaaactcagctccaaactcgaaagtggaggacacaagaatgacaacgcggcacccgaaaaggatgagaaaggaggattgccgtgagggacctcacttaggcaatcatggaacacagatccaaactcgaaagtggaggacacacgaatgacaacgcaaaggatccacggggccccagaaaaggaagataatggag

SEQ ID NO: 9815 - DNA, 614 bp, Glycine max
  unsure at all n locations
agctttgaaggtgcgtagcccaccatttttcatagtagaatactggtaatgtgtctactatcattgtcatcgttttttcgtcattgaggtgccacttgagctgccaggttctccacctttgggcgtattcttagaaagatccgtgcccctttttcttttttttttttcacatgttttgtagttgcatcctatccgaagacattatactgacactgcctaacgaaggcaaccactaggtccttccaagaatggactcgggaaggttccaagttagtgtatcaggtaacagctaccccagtaagactttcttggaaggaatgtatcagcaattcctcatcttttgcgtatgcccccatcttccgacaatacatctttagatggttcttgtggcaagtattccccttgtacttgtcaaagtccgacaccttgaacttgggaggggtgatgatattgggttctaagaacaactctnttaagttagcaaaggcataatcttcacctccttcaatggccctgagtctttcctctatatgatccaactcttccatttctgccatagcacaaggttttttactttgtgtggaatgcaagaggtgtaacttggggtgatactg

SEQ ID NO: 9816 - DNA, 631 bp, Glycine max
agcttgtatgagtactggaaaatattttttaaattgtgtgcaagctgccctcaccaccagatttctgagcaacttcttcttcaatacttctatgagggacttaccaacatggagaggagtatgattgatgctgccaacaattcaattcaagaaatgatgttattgttcttagaggagtccatgaggtggccacagattcatcttcatctactgaaaataaaaagcttgaaggaaaacttgatgccttggtcaaactagtaactcagcttgccatgaatcagaaatctacacctgttgcaagagcctgtggtctatgttcttctgtagatcaccattcagatctttgtccttctttgcagcaatctggagtcaatgagcaacctaaagcttatgctgcaaacatttataatagacctccacagcagcaaaaccaacaacagcaaaataattatgacctttcaagcaacagatacaatccaggttggaggaatcatccaaatttgagatggacaagcccttcactacaacaatagtctatcccttcctttcagaataccgctagtccaagcatgccttatgttcctcctccaatgcggcaacaacaacggcagctacaacaaatacaacaagc

SEQ ID NO: 9817 - DNA, 499 bp, Glycine max
agcttgcctggttttattttgtgataattatgaagaatgattttatttatttttattttaaaacttagtacactacttataagttataatcatacactaaaaaattactatcaagcttggcattattttcaagaactttattgtttctttggtttgtcattttccatttaccattgtctgttttcaataagtaggcatgttattgaattgaattgaattcttaagaatctaggcattgtaatcgattaccagagacagaatacttagaggtttttcaaaaagaagtttgaaatttgaattttaaatactgtaatcgattaccatttaactgtaatcgattcccagtaacgaaaattttagaaatttgaaatgaaaagtcatgacccctcaatgtataactgtgtaatcgattaccagtgagggaattctaaaattgttctgaaaagtcacatctcttcaaaagttttgaaaaaccacaaagggcctatatatatgtgag

SEQ ID NO: 9818 - DNA, 565 bp, Glycine max
agcttaactacacttaaggttctttgctccttcaaaactatgtgttcaactaagcaatgcattaaagacatgttaatttaattgaataataaatgcgagtctttattaggaggtgtgattaattcatttaatataataaatgggcagattattcaaggagtagttgaagatttgatttattctagactattactttttgttggacaagtgacctcaataacttaagagggggtgaattaattaagttttaaaatttccccgctaacaaattttaacccctttttaaatgatacatgataaactcaaaatgcagaagaagaagaagaaacaatcaatttaataattttcttttaaatgcacaagacaaagtaaactgcaataaaataactgagataagggaagagagaattgcaaactcgatttatcctggtttggccactccccgtgcctatgtccagtccttaagcaacccacttgagattttccactatctttgtaaactctttacaacttctgaacacatcttgggattcttctctcttgtgttcaggattctcataagtca

SEQ ID NO: 9819 - DNA, 473 bp, Glycine max
agcttccatcacttttgacgactgttttttgagattccttagcattggcctgataccttgcacataagtaagcacttagcatgacatatggtctatttttagttaagtagaggagtgatccaatcatacctctatatcttaactcatccactgatttacctttctcatctaagtcaaggtaggttaaagttgccattggagtagatgcttctttgcatttttccatgccaaatttcttaattagttttgtacaatatttcgtttgatttaggaaggttccatgtttcatttgcttgacttggagtccaagaaagaagttcaactctcccgtcatagacatctcaaattccttttgcatacaactagaaatttccttacacaaaatttcatttgtagcaccaaatataatatcattaacatatattttaacaattagcaactcactgtttacttttcttaataaacaatgtttt

SEQ ID NO: 9820 - DNA, 254 bp, Glycine max
gcgtctcaatagattacgggactcattcagacatccgagcaaaacgttattgtcgtttggattagttcagagcttcagaattcaatttcgatcgtctcgatatattacgggactcaatcagacatctgaggaaaaaagttattgtcgtttgaatttgctgagagctcaacattcaattttgagcggctcgatgtattaccggacctaatcaaacctcccaggtaaaaagtattggtggttggatttgctgagaa

SEQ ID NO: 9821 - DNA, 324 bp, Glycine max
aataaccaaatgcacatttggccaaccctcaggcaagtacctgggacatgtgggttcttctcgcgggggcgaaacagtgctaaccaaggttcacgctatttaacagtggccggaacctctatcggggcatgcactcttaaactttttgggactcgcgggattctacaaaagattcattttcggctatgcgacaattgctgcaccttaacccaacttctaacactggaaccttttcaatgggcccaagaagctcgtgcaatttttgctgctcttaagcagatgctgacctcaacccctgttctccggttgtcggactttactctt

SEQ ID NO: 9822 - DNA, 410 bp, Glycine max
aacatagaattcccatgtatatgtagatagtttctgcattctaccagacaatttttttttagaaataagcaataggatgcttgttttggcttaacacaacaccaactcccctccctgaagcatcagtttctaatacaaaaagtttattgaaattaggaatagccaagacaggtgcagaagtcatggctatcttaagtttttggaaagcctgtgcagtagcttgaccccatttgaaagagtccttcttcaatagaacagtcagaggtgttgcaatggtagcataggtcttaacaaatcttctataataacctgtaagtcctaggaagccccttaatttctttagattcataggctctggccaattctgaattgcctctaatttgtttgcatccatagctatgcctgatcct

SEQ ID NO: 9823 - DNA, 558 bp, Glycine max
agcttgttcatcttgagataatttgtgttcatcctcatttgaagttgatggtgcaacatatttctttggcctaacaggaactccaatatttttacagcttttaatgttatgattggtttggccacaccttccacatgtaaactcaggcaatttcctctttagcttatgtcctgtgacattgtcctcatttacaggtctccttctatttttctttggccttcctctttggacccttttatgtggtggaacagggtgtgtatactgtgtctgggcccaatattgtggtccttggactggttcaataaaatgctagtatgtcttattataagcttctattgacagccactcatgacacatgtcctcaggcttccctcctttgtgagttattgttgcaatgacatgtccgcatggcatccctacatcaaagttgtaaaatcagcacacatgtaggttaggaatgaaaaaaaaactattaagaacacaacctgttagttgccatactccacaagtgcatgtccattcacctaaattgacctcaaccttatttccccacatgtg

SEQ ID NO: 9824 - DNA, 117 bp, Glycine max
agcttcaacatcagacgcctttctttgtgttggaactacttctcatggacttgatgggggctatgcaagtcgtgagccttggatgaataaggtctgcctatgatgaagcggatgatt

SEQ ID NO: 9825 - DNA, 442 bp, Glycine max
  unsure at all n locations
agctntctccactaagttgcctgatgcctgaaatgtcttttctgatggcagtggtcctagatgcagggaagattttctccaagaacaccctcttaaggtcatcccagctgaaaacggacctgggagcaaggtagtatagccaatcttttgtcactccctccagagaatgaggaaaagcctttagaaagatatgatcttcttggacatcagggggcttcatggtggaacaaaaaatatggaactccttaagatgcttatgaggatcttcacctgcaagaccatgaaactttggcagcaaatgtattagtccagtcttgagaacatatgaaacaccctcatcaggatattgaatgcacaagctctcataagtgaaatcaggtgtagccatctccctaagagtcctcttacgaggtggagggtgagccatgttctcagtatgaaa

SEQ ID NO: 9826 - DNA, 389 bp, Glycine max
tcataaggttatatatggcctcaaataagctcctaatgcttggtttgataaactaaatgagactctactaatgtttgaattcaaatccaacaagtttgatccttcactatttgtttattttaaggcttcatccataatctacattccggtatatgttgatgacatcataaaaacatgaaatgatattcctttattacatcaactcatttctaagctaaatatagtattttctctcaaagatcttggatcctcagattatttcttgggaatgaaagtaaagcatctatctgatggttccattgctttaacttaaaccaaatatattatagacttaatgggcaaaaccaacatgttagatgtcaaacctatatcttccccaatggtaactg

SEQ ID NO: 9827 - DNA, 430 bp, Glycine max
agcttcattcttagaatgaagtaagtagatatacatatatcgtgaataatcatctataaaggttatgaagtatttcggactatttgcatccatgtctggacaacatatgtctgtatgtatgatttccaataaattagaactcctctttgcaccctttttagacttgttagttttcttacccttaatgcaatctacacaagtctcaaaatcatcgaaatccaaagtactaagtactccttcatttactaattgcttgattctctcaatagagatatgtcctaatctctggtgccacaacatagaggattcttcattcacattacatcgttttaacccaatagaaacatgcatagaagtagcatcgtttttcaattcaatcgaataaagaccatcaaccaattgaccacaaccaataatttcagaattattt

SEQ ID NO: 9828 - DNA, 266 bp, Glycine max
  unsure at all n locations
gctctcgagaaactcaaatggtcataacttatcacacagacgtccgattcatgcgcataatatatcgagacgctcgaaattgaacaacgtatggtgtcgagaaattcaaatggtcataactngtcacacggaagtccgattcatgcgcataatatatcgagacgctcgaaattgaacatcgcaagctctcgagaaattccaatggtcataacttgtcacacggaagtccgattctggcgcataatatattgagaagcttgaaattg

SEQ ID NO: 9829 - DNA, 419 bp, Glycine max
agcttgaaattgaacaacagatgctctcgagaaattcaaatggtcataacttatcacacgtaggtccgattctggcggatagtatatcgagaagctcataattgaacaacgaaagctctcaagaaattcaaatggtcataacttatcacacggaagtccgattaaggcgcataatgtatcgagacgctcgaaattgaacaacggaagcactcgagaaattcaaatggtcataacttatcacacggaagtccgattaaggcgcatagtatatcgagaagctcataattgaacaacgaaagctctcaagaaattcaaattgtcataacttatcacacggaagtccgattcaggcacataatatatcgagacgctcgaaattgaacaacgaaagctctcgagaaattcaagtggtcataact

SEQ ID NO: 9830 - DNA, 423 bp, Glycine max
  unsure at all n locations
agctngaaggagtttcatgcaccatggaactatttcactctataagttgattccaattggcttcctagttttcagcttacctatttggatgtgggatcatggcagttaggtcccagctttccatcgtggattcagtcacaaaaaaaacttaaatatttaggcatgtctaacacagggattattgattctattcctacacagatgtgggaagcacaatctcaggttttgtatttaaaccactctcataatcatatccatggtgagcttgtgactacattaaaaaatccaatatctatcccaactgttgatctaagcacaaatcacttatgtggtaaattaccctatctttcaaatgatgtgtatgggttagacctttcaaccaattcattctctgaatccatgcacgattgtttatgtaacaat

SEQ ID NO: 9831 - DNA, 405 bp, Glycine max
actttaatagtcgttttatagattcggcgttgtcaagtggagaacgtaacttttccaagaattcatttttttatggatactgtctcattttctgcataaaaatttgtagagattctgataggtctagattaatctgataattcaaatcataccacttaaatgtattcgaatcttttttattcatatcagattcgaattaatctaattgaaaatcgatgttgatagactttaattattatatatagatagaatttttatgatttaatccattaatcatgtgttattttctataatttgctattatttagttggttctaagtcaataataacattcatatatatcgcttacattataatggtaagtatggcattattatttgtcaacaatggaataaaattatgtta

SEQ ID NO: 9832 - DNA, 431 bp, Glycine max
agctctcatagttcaatttctagcgtctcgatatattatgcgcctaatacggacatccgagttaaatgttatgaccatttgaatttctcgagagcttccgttgttcaattacgagcgtctctatatgtgatgcgcctaaatcggacatccgagttaaaagttatgtccatttgaatttctcgagagcttccgttgttaaattttgagcgtctctatatgtgatgggcctgaatcggacatccgagttaaaagttatgtcaatttgaatttctcgagagcttccgttgttgaatttcgagagtctcgatatattatgcgcctaaatcagacatccgagtgaaaagttatgaccatttgaatttctcgagagcttccgttggtcaatttcgagcgtctcgatatattatgcacctgaatcggacatccgaatg

SEQ ID NO: 9833 - DNA, 391 bp, Glycine max
  unsure at all n locations
tgtaaaaaaatgaagcaggttaaaactcttttcaaagaataaattttgtttgtattagaaaaccccttgaacaacttcacattgatttatttggtccctttagaactatgagtttgggtggaaattactatggcttagtaatagtagatgattactcaaggttcacttggacttagttnttgaaaaccaaaaatgaagcttttgatgcttttcgcaaacttacaaggtgattcaaaatgaaaaaggtctcaacattgtttcaattaaaagtgatcatggaggtgaatttcaaaatgagtcttttgaaaacttttgtgaagaaaatggaatttaccataatttttttgccccaagaacacctcaacataatggtgttgtagagaggaaaaat

SEQ ID NO: 9834 - DNA, 417 bp, Glycine max
  unsure at all n locations
tcttggtttcagctgctgaagatgaatccgtggctacttcatgcactcctctaatgactatagcatcatttctgccactaaactgttgggagttggaagccatcttctcaattaaatttctggctttagcaggggtcatgtctccaagggctctaccactggtagcatctatcatacttctgtccatgttactgagtccttcataaaaatattggagaagaagcagctctgaaatctgatggtgagggcaactggcacatagttttttaaatctctcccaatattcatacaggctctctccacagagttgtctaatacctgaaatatcttttctgatggccatggtcctggaagcagggaaattnttttataagaatactctcttgaggtcatcccagctcgtgatggaccttggag

SEQ ID NO: 9835 - DNA, 408 bp, Glycine max
  unsure at all n locations
taatgatgattcaacccctaagcacttatgggctgaagcagtgaatactacatgttatcttaaaaacataatttacataagacctatccttaaaaagactctatatgaattgtggaagggatgaaaatccaacatatcatattttcatccatttggatgcaaatattttattctcaccacacaggataacttgggaataattgattcaaaaagtgataatgggatatttcttggatactctaaaaattcaaaggcattcagagtttataactcaggaaccttggtagttgaagaaactattcatataagatttgacgaaaataagtctgacaaagatttattagagctacacgatttgcagatntaagactcgatggtgactctatagcacgtagcttgtaaagaaag

SEQ ID NO: 9836 - DNA, 469 bp, Glycine max
  unsure at all n locations
acctgcggcatgcaagcttatgtntcaaacatntataatagaccccctcagcagcaaaaccaacaacaacagaataattatgatctttcaagcaacaaatacaatccatgttggaggaatcatccaaacctgtgaaggacaagtcctccacaacaacaacaacttgtccctccttttcagaatgctgctggcccaagcaagccatatgttcctccccaatgcagcagtagcaacaacaacaaagacaacaagcaactgaggctcctcctcaaccttccttagaagagttagtgaggcaaataaccatccagaatatgcaatttcagcaagagacaagtgccttcattcagattctgacaaatcaaatggggtagatggctactcagatgaatcaagctcagtcccacaattatgacaaattgctttcacaaactgtgcagaatccgaanaatgtgagtgccatcacctt

SEQ ID NO: 9837 - DNA, 447 bp, Glycine max
  unsure at all n locations
agcttcaagaaaaagatggcctcagcaaactccttatttccagaagggaattctatcaatagacctccaatctttaatggagagggttaccattactggaaaacccgaatgcaaatttttattgaggcaatagatctaaatatttgggaagccatagaaatagggccttatatacccaccacagtggaaagagtttcaatagatggtagttcatcaagtgaaagaataactatagaaaaacctagagatagatggtctgaagaggatagaaaacgagtacaatacaacttaaaagccaaaaatataataacatctgccctgggaatggatgaatatttcagggtttcaaattgtaagagtgctaaggaaatgtggaacactcttcgattaacacatgaaggaactacngatgttaaaagatctatgataaatgcactaactcatgag

SEQ ID NO: 9838 - DNA, 424 bp, Glycine max
  unsure at all n locations
ntgaggaaattcatacgacaataccttttgacacggatgtcggattgagtcacgtaatatctcgagacgcttgaaattgaataccgaagctctgagcaaattcaaacgacaataactttttactcggatgtcggattgagtcacgtaatatgtcaagacgctcgaaatagaataccgaagctctgagcaaattcaaacgacaatacctattgactcggatgtcggattgagtcacgtaatatctcgagacgctcgaaattgaataccgaagctctgagcgaattcaaacgacaataacttattactcggatgtgcgattgagtcccataatatgacgagacactcggaattgaataccgaagttatgagcaaattcaatcgacaattaattttactcggatgtcggattgagtcacgtaatatg

SEQ ID NO: 9839 - DNA, 323 bp, Glycine max
  unsure at all n locations
agctntaacattcatttacgagcgtctctatatataacgggactcaatcagacatccgagtaaaaagtaattgtcgtttgaatttgctaagagctgcggcattcaatttcgagtgtctcgatatattacgggactctatcagacatccgagtaaaaacttattgtcgattgaatttgctctgagcttcaacattcaatttcgagcatcccgatatattacgggactctatcagacatccgagtaaaaagttattgtcatttgaatttgctctgagcgtcaacattcaatgtcgagcgtctngatatattacgggactcaatca

SEQ ID NO: 9840 - DNA, 438 bp, Glycine max
acatcgagtaaaaatgctattaaatttccctataatagatgattggtacaattcttttctgtacttcaagttggtaaaaaaaatttagttactccaatcatttagaatgaagttggtccaccccatttttactcgagcaagttagacaaattcgtatcataaatatactcacaaaactaatgtaaaatgtctattatgtaattatctgttgcatgttatatatcataagtttgttgagttcatctttagttttgttagctcacaccaatatttatgtcaatttacatattgttatatataataagtgtgtaagattttataataaatatctcaaaaattatttgtgagtgattaatagtgcaaaaaatttataacggtaatgcatgaaaattaaattcattaataaattcttgaatgaaaatacacaataaaatgaac

SEQ ID NO: 9841 - DNA, 389 bp, Glycine max
  unsure at all n locations
atnctgactccgatagatataagattcttgtgggataactcattctccctaccattactagacctgatatctcctctgctgcgggagtggctgccaatttatgcagaatcctcatttggaccattggaatgctgacatgcctattctgagggatgtatatacagctcctggactagggttgctgtatgaaaacaatggtattacgcaactatcatgatattgtgatgctgattgggctggatgtcccatggataggagaactacatcacgttatagggtcttcactggtggaaatctaaactcttgcaaagcaagaaacagactattgtctctcggtccaccgcacaagccgacgatcgatctatggctatcattacatgtgagctcat

SEQ ID NO: 9842 - DNA, 424 bp, Glycine max
agcttgtcgcattgtacgagtaccctgaagacttcttccaggtctgccaattgaagatgtcaactttcgctacaaggtcatgccattcggcctaaaaaatgcaggcacgacataccaacgactaatggactgagtcttcaaacaagagatcgaatgaaacgtcgaggtatatgtggatgacatggatgtcaagtctggaggatgcatactggtcttgttatatccagggtaggcatacaggaagcttaacacctggaacccagacgtcccatcgactaacctgttgatgttgggcagatggtatgtgtctttagagcatgctctagacatatcagagtagtcagtgcatattcgacatttgctattagcctatttgaccatgacgatgttggcgagccaggtagagaacctaacctctctgatg

SEQ ID NO: 9843 - DNA, 434 bp, Glycine max
  unsure at all n locations
agcttgttcatattcttgatcccatttgttctttntggtctttttcagtaagttcatgatcggcctagccttctcagctatccaaggtagaaatcttatcaaagaggctatgcgtcctgtgagtctttgtatctctttgaaagtcttcggactcctcatctcaatgacgactggacatttatctagattagcttgtatgcctctttgggaaagcataaaaccaaaaaattttcctcctccaatcccaagaacacatttttagaggttaagtcgtatgtatgtttttggatttgtgaaatgatctcggctaggtcctcaacatgggacttgactccattggatttgaccactatctcatcaacgtacacctctatatttctacgaattttatctttgaagatcttatccatgaggcattggtacatagctcccac

SEQ ID NO: 9844 - DNA, 379 bp, Glycine max
tcttatccaaggctcatcttggtggtgaagctccttctttcatggcttattccctagtggatggcgccgcctcttacctcttctcctttgtcttccgctgcatctccatggtggaaaatcaccattaaaggacctcattgaagctcaaagatccagcttccatagaagctccacaagcaagtttccatcatgaatgatgcaatcctaccccgcaagggcattggatagaagactccaagtagattgggctagagatgcaagagaaggccctagggttctcatgagccttaggatagatttcgggcccatgggctaagtatgagcccacttatctttgtacatattaaattaaggtttcattaattttgggtcttttatt

SEQ ID NO: 9845 - DNA, 436 bp, Glycine max
  unsure at all n locations
agctngccaccacggagttttccgactattctcttgtgtggtggaacaagctacaaaaggagagagcaagaaatgaagagccaatggttgatacatggacggagatgaaaaagatcatgaggaagcggtatgtgccggctagttactcaagggacttgaaattcaagctccaaaaactaacccaaggcaacaagggggttgaggagtatttcaaggaaatggatgtgctcatgattcaagcaaatattgaagaagatgaggaggtaactatggctcgatttcttaatggtttgactaatgatatccgtgatattgttgagctgcaggagtttgttgaaatggatgatttgcttcacaaagcaatccaagtggagcaacaattaaaaaggaagggagtggctaagaggagttttaccaactttggttcttctagttg

SEQ ID NO: 9846 - DNA, 453 bp, Glycine max
  unsure at all n locations
cttggttacatacatcatgcaaactaccctnttccccaagggtagttgtgatgatattgataaggcttgtaggaattntattttgggacatgattcgagtgaaaggaaaatccacctagtatcttggaacaccatttgttcagataaaaataatggtggtttgggcctgtgcaagaagaggtatgtaaatcangcctttatgttgagagctaattggcagttttgtcaaatggaagctcctatttgggcttctattttacgaaacaagtacagatgtggtgcagattcgttccctacagttgatagtaaaagggccggtagcaatatttggcgtgggatttgctttacgtgggattttttttttgtaagaatgtggtttggagggctggggatggtactacaatgaaattttggcgtgattgctggatccctagaagctttcctctgattgat

SEQ ID NO: 9847 - DNA, 445 bp, Glycine max
  unsure at all n locations
ngaagtggttaaactttctacaagatacctgctctgataccatttgttggatcaagtggcctcggaataattaagaaggggggttgaattaattattaatgaacctttactaattaaaaatttatccttcttaatgttactagattcaattaggcttttactataatgttaagaaagtaaataacagaaaaagaaacttaaccaaaagtaaaagcgataattaaagtgcacagcggaaattaaagagtgtagggaagaagaagacaaacacaagaatttatactggttcggcaacaacccgtgcctacatccagtccccaagcaaccaccggttcttgagatttctttcaaccttgtaaaatcctttacaagcaaagatccacaagggatgtacccttccttgttctctttgaacaaccaagtggatgtaccctccacttgaact

SEQ ID NO: 9848 - DNA, 422 bp, Glycine max
  unsure at all n locations
ntagattcatcacttaccccaagcaatacacactgcatgctcttgtcatccagctttgttcttttctgatcaggtacatggacatgagttaggcacccaaatactttaaagtaatctactttaggtttgattccactccacatctcttctggagttttatctttcactgtcaatgtaggactcctgttgagaacatgaactgtccattttgcagcttctggccaaaaaacctttggtacttgtttgtcacaaagcatgcaccggaccatattcataatggttcgatttttacactccgctacgccgttttgttgtggagtgtaagatgttgtgagttgcctgcttatgccattaattttacaaaattcattaaactcatttgaggtgaattcacccccccctatctgtgcgtaaacaacata

SEQ ID NO: 9849 - DNA, 388 bp, Glycine max
tccttaagaagattcctaaagaagcttgagcttagctacacatacctctctaatagctaagctcacctccttgagatgagaagctagagcttagctacacaccccctataatagctaagctcaccccatgacaaaaaatatgaaaatacaaaaaaatgtccttactacaaagactactcaaaatgccccaaaatacaaggctaaaaccctatactactagaatggccaaaatacaaggcccagacgaaggaaatacctattctaatatttacaaagataaacgggctcatacttagcccatgggctcgaaatctaccctaaggctcatgagaaccctagggccttcccttggatctctagccaatctacttggagtcttctacccaat

SEQ ID NO: 9850 - DNA, 387 bp, Glycine max
  unsure at all n locations
tgtgttntaatgtttcaatgctgattgcaccggttccccattctgttatagatgtaattttttcgtaattggtattctgaataactgattgaaatgattaaaacatcctgaaggcttacaatgactactatattttacacaggatactgtagttggatttttgttggctggagtgggaaatgttgacatacgtaggaagacaaattacctcattgtggattcaagtatgccactgaactatattttacttactattctgtagtctgagtatgtttggtattaatcccctaaaaactacaatgtttttcttgtgaaattgtacatcatgaagtgactccctgcctcttttatctaccatccaaattgtgatacccaataaacaatata

SEQ ID NO: 9851 - DNA, 443 bp, Glycine max
  unsure at all n locations
agctntaacaccattaagggtaaagactcttcccgtggcctttggatgtccagtttgaccattcgggcctccaccatttcgctctttcttgggtcgtgaacaatctctttgagtgtgtcccttttgtccataattaaaacatgttgcgcctatatcaggacaattcgaggagatgtgccctggcttaccacatctgtaacaaatgatatgagtggagaaagtattgggcttgctaccactaccacctgcaaatcccctagcaacagtcctctgattgtcatggcggttaccatattgcttagggggtttcgaatatggttttcctcaatgttgaggcccattctttntgttcctcattggacctgtactccaataataggccgccctatctcgggagtcttcatcccaaatccggcacatgttaaccaaaagtgggaactgac

SEQ ID NO: 9852 - DNA, 438 bp, Glycine max
catgcaagcttgtaggtaaactagatgccttagttatacctggtaacccaactggccatgaataaaaaatctgcacttgtcgccagactctgtggtttatgctcatttgtcgaccaccacacagacctttgcccttctatgcaacaatctgaagcaattgaacagcctgaagcttatgctgcaaacatctacaacagaccttctcaacctgagcagcaaaatcaaccacaatagaacaattatgacctctacagcaacaggtacaatcatgggtggaggaatcatcctaaccttagatggtcgaatccttcacaacagccgcaacaacaaccttattttcaaaatgttgctggcccaagcagaccatacgttcgtccaccaatccagcagcaacaacagcaacagccgcagaaacagcaaacagttgatgctcctccg

SEQ ID NO: 9853 - DNA, 429 bp, Glycine max
tgtgttatgaaatttatgattctccaagaataatttaatttctcccaattatgcatgaaccctacttatgaaatttagggataatttaatttctttcaattatgcatcaaccctgatcatgaaatttagggatttttttttcctgctgaaagtatgaaatcttatattgaaaagggtatcaattaagttggcctagaaggaaattttgaaattgctatttgcaaaccccattttgctattctcagtcccacttgcttttttttcccaaaaattattattaaacatgattaaaggattgaaagtttataccctgcaattaaattaatgtgaatgctttgaaattattggtagcaataaatatatatatatgctacatatttcttttgaaagtgttgaatgcaaatcacaactaaatgtgaatattattta

SEQ ID NO: 9854 - DNA, 424 bp, Glycine max
tataatgtcttgaaaaagattgattatccatatgaggtcagcgttatttctaaattctaattctatcaaataagccaattatcattatttattattgaatttataattgacattcctctcatatgcatctgaaacaaaccttgatcctagacattcttactctcatttctttacttttgtgttacgcattggaattcatttttatccaagatttacattcactcaaaattttattggttaaatacgtgtgtcaagaggggacataaatagaatttatttcacttaagatttctcacttatttgacattgtaatcataatttttttccagcacatattgcacagcatgaaagatcccagtattgctgcattttggttgactacatttcctcagattatgggtggatttacctatgacgatgatgt

SEQ ID NO: 9855 - DNA, 409 bp, Glycine max
agcttatttaaaagttctgcttaaagacgtttttgattaattaattattttaaaacctagtgaaatactaactaaaaaaagaaacttataaaattttgtataagtaatgtacaaatccaaaaataattgataaacaaaatcatattgaattcaagtcgttaaagcatagagtatattaaaagaaaataaaaaaaacataatagtaaaaaatgtatggattagagatgatttgcaaaaaatgaattctattctatgtgaacagtgtgcatggacagtaataaaaattggaatactaaaatcctagaattattctcctttccgaaaaaaaattccctaaactaaaaccttggtgcttgtatataagtacttggccccaaagcttacaaatctattttaagtccaagcccat

SEQ ID NO: 9856 - DNA, 368 bp, Glycine max
actaagcttatgctgaaatattacaatagacctcctcaacctcatcagcaaaatcaaccacagcagaacaattatgacctttccagcaacagataccaccctggatggaggaatcaccctaacctcagatggtccagccctcagcaacaatagcagcctgcttcttccttccaaaatgctgctggcccaagcagaccatacattcctccaccaatccaacaacagcaacaaccccagaaacagccaacaattgaggcccctccacaaccttccctcgaagaacttgtgaggcaaatgactatgcagaacatgcagtttcagcaagagaccagaagcctcattcagagcttaaccaatcagatgggaca

SEQ ID NO: 9857 - DNA, 413 bp, Glycine max
ttcattagattgaactgccttggatttattatttgtattcacagacttgtacaaatcaacttcaagctcacataaatcttcaacccaccagtcttttggcaccagtcgagttctgagtccattctggtttgactcaattccattttcctctggaagcttcttccggttataggtgtaggaccaatctactttggatacatcaacacatgccttatttgctatagattcaatgcaatggctgacaacctttatgtcctcaaccaagggtaacatatactttgaagtctgaagaaggatgattgaatccttccaactacggaaaatgctagagctaatgaaaacatcaatcttgtcaatgaggttccctttctcaatggcctcatgcattccaagatactctgctgcacatcgag

SEQ ID NO: 9858 - DNA, 421 bp, Glycine max
ttgttttcaatttcgaccatctcgatatattaccggactcatccggacttccgtgtataaacttattgtcaattcaattttctccgagctttggatcaaaattttgagcgtattgatatattacgggactcattcagacatccgagtaaaaaattattgtcgttagaatttgatacgagcttccgttttcaatttggagcatctctcgctaaattgcgacagtctgtcgggcatccaagaaaaaatttattgtcgtttcatatttctaagagtttccgttttcaatttggagtgtctcgatatattacgggactcaaccggacatccgtgtataaagttattgtcatttcaaattgctcagagcttctagtctcaatattgagcgtctcaatatattacccgattcaatcggacatgcgag

SEQ ID NO: 9859 - DNA, 441 bp, Glycine max
  unsure at all n locations
agctctgagcaaattgaaatgacaataactttatacacggatgttcggttgagtcccgtaatatatcgagacgctcaaaattgagatccgaagctctgagaaaattgaatcgacaataactttatacacggatgtccggttgagtcctgtaatatatcgagacgctccaaattgaaaacggaaactcttacgaaattcaaacgacaataactttttactcggatgcccgacagagtgtggtaatatatcgagggatgctccacattgataacgagcgctcggatgaaatacaaacgacaatatcttttcactcagatgtctgattgagtcccgttatatatcgagacgctcaaattttagatccgaagctctgagaanattgaatagacaataactttatacacggatgtcgggttgagtcctgatatatatcgagacact

SEQ ID NO: 9860 - DNA, 428 bp, Glycine max
tgccataactcggttgtgcttattcttcaatgccatatgtagcaaagtccttgatcctgtcaagttagatgagctgaaaaacgaggcttccattatattgtattagttggagatgtatttttctcttgctttctttgacatcatggttcacttaattattcatctagtcagaaaaatcaaatgttgtggtcctatttatttgccatggatgtacccggataagcaatacgtgaagatcttaaaagggtatacaaagaatccacaccgtctggaagcatctattgtggaaaggtacattacagaagaagctattgaattttattcagagtacattgaaaagacaaaatctgttgggcttcccgagtctcaacatgacgaaagagtgggaggtaagggttcaagaggactgtatgttatcactccaagta

SEQ ID NO: 9861 - DNA, 443 bp, Glycine max
agcttgtgcaatccactgggaaccatcctctgagcaagcatacaaatggaaaaatatgagtcccaaagtaccaaaatccctgcggatatatgaagctcatgttggaattagtggttctgagccaaaaatatcctcattcaatgatttcacagacaaggtttcccccctcatttctttgggttggaatttgtaactaatcaattatacatatcttccatgtctatatattgtaatgggctccattgaatttttacttttattatatgcacaatgcaggtgcttccttacattaaggaagctggatacaatgccatccagttgattggaattgttgaacacaaggattattttactgttggttacagagtaagttaaatgttgtaattcttaacttattttctcactgtaattatattgtgattgagattctttagaagttcttc

SEQ ID NO: 9862 - DNA, 404 bp, Glycine max
  unsure at all n locations
ngaggtaatctactcaaatgtgtatggaccatccaaattggatctcttggtgcaaatatgcattgtgtttccttcattgatgatttaactagaaaagtgtggatttatttgattaaatgaagagtgatgtgtttgatgtgttcaaaaagttcaaaaggttgatttagaaacaaaataacaaacagataaaagtgttaagaacaaacgaaggtggtgagtatgtattagatgtgtttcgaaacttctatgaggtagaagtgatagtgcatgaaataacattatcctatactccacaacacaaaggaactattgagagaaagtgtaacgacccgcctcgtcgctacgatatcacttactataaaatatgacatttcaatttagaagtaaaagcctcattaatttga

SEQ ID NO: 9863 - DNA, 439 bp, Glycine max
  unsure at all n locations
ntacataaaggcgaaagatatgaaacattaatacttgtatgaacaacatcttgtcttgttccctttggtatgactgaaagtatttgtctgaaagtattttattatatcccttaacgttctatcaacaacttcaaaacaatgtatgagtcatagcagcttcaccccaaattatgagtttaggcattgagattaactcagctaaaggagtaccttgttttatgttggaagtagaatcttaattgacatttattggaatatgaaatctcgaatgggatgcttttccgcctagaatcaacaaagcatccattccatcagatgccacagttaaaacaatttctcctttagatctaaatgtggcaaagaaaagctcttcaaagaagacttatgtgtccctccataaccataaagaataaacaatattgcattatttaaattttca

SEQ ID NO: 9864 - DNA, 281 bp, Glycine max
  unsure at all n locations
ngtcaaagctctatatggatngaaacaagctccaagagcttggtatgaaaggctaagctcattcctagttcataatggattcactagaggaataatggacactacactattcataaaggccgaaaaaggaaaacttcttattgttcaaatctatatagatgacataatctttggtgcaacctcaaaaaggatgtgcaaggatttttctgagctaatgaaaggtgaatttgaaatgagtatgatgggtgagctaaatttattccaaaggctttaaattattt

SEQ ID NO: 9865 - DNA, 245 bp, Glycine max
aactcaagcttgaatcggacctcagtgtgaaaagttgtgaccattttaatttctcgagagcttttgttcggcaatttcaggcgtgtatatatgtgagtcgcccgaatcggacatccgagttaaaagtgatgtgcatttaaatatgtcaagagctaccgtggctcaattgcgagcatctcgatatgcgatgcgtctgaattggagatccctgtaaaaagtattgaccatttgaattggtccagagc

SEQ ID NO: 9866 - DNA, 255 bp, Glycine max
agcttataatatatcaatacgctcgatattaaacaacggaaactctcgcgaaattcaaatagtcataactattcacacggatgtccggttcgggcgcttaatatgtcgagaggctcgaaattgaacaacggaagctcttgagaaattcaactggtataacttttcacacggatgtccgattcaggcgaatcacatattgagacgctcaaaaatgaacaacggaagctcctgagaaaatcaaaagggcataacttt

SEQ ID NO: 9867 - DNA, 345 bp, Glycine max
agcttgcttcatgaaaggaaggattgatatgatatattaatattctcatgtaaacatgacccacaataaggttttaaacttcttgaccatcttgggcttgagatggatcttcctgtcattagtcaattttctatccataatatatttaattttttagttatatgatatcaatgtaagcctttgatctcattgattgaaactccaagctctgacaagtcacactttacaatgttgctttgtgatgtctgtggatggggaagcaagcaaggtgatgaaaggtgttcaatatgaagcctgtgattatctctttaagcctataaggatgaaagaactaataaacatatg

SEQ ID NO: 9868 - DNA, 359 bp, Glycine max
agcttccacttattagtgcacaactccttcaagaatttagcatatcttggaatttgctttattgcatccagcagaggtatgtttacctctacttttctaaatgtttccaagatctccttctctgcctcttccatttttttgttggaaattgctcttggagggaatggaagaaggatatgctgcttctctttagattcacctgcatagaaattcttaggtaacttactctttaaatttttgtcatcatctttttctggagtagagagaaattgggcacgttcatttgtggatgaggaagatgttgctggttgaggtccttgacactgctttcccgacctcaatgtaatggcactcatatt

SEQ ID NO: 9869 - DNA, 369 bp, Glycine max
agcttacaaggtgtctctatatataacactaatgagacacaagtttttacaaaccaagtgaggtgggactaagactacaaaactctaacaatccaagcaatgtgggactaagaccacaaaattctaacaattctctcacttggggtctaagttctaaattctagcaactccttgtaagcgatgagttcatcgactctttacctagtgtagcgccttcatcttcaattatccttgaaggccaaatgaggcaatgcaaagcctcagcttatcagttgtaacagctttagtcaacatatctactggattctctgatcctaagatcttcaacaaagataagtctccatcatttatcaactccctgataaaatg

SEQ ID NO: 9870 - DNA, 381 bp, Glycine max
agcttcttcttgtttctctccccatttgaaaccaatatttttcttgagcacttcattgagaggtgctgccaatgtgctaaaatccttcacaaatcgtctataaaaacttgctaagccatgaaaactcctcacctcggtcacagacttaggtgtatgccattcttgaatagccctaaccttctcctgatcaacttgcactccttttgaactcacaacaaaaccaagaaacacaacatggttagtacaaaagatgcatttttcaagattggcatacaattgttcttttctaagcgcagtcaagacagattttaaatgatcaatatgcaaatcaagtgaagtgctcttgataataatatcatctaacgtcaccacaacaaactt

SEQ ID NO: 9871 - DNA, 379 bp, Glycine max
aaactccagcttcttcacatagtccgcctctgcttgttcgtttttattcttaaaaatagaaacattaggcatagccaaaagatcaagaggagttagtgggttaaaaccataaacaacttcaaaaggagaactattagtagtgctatgaacaactctattgtaagaaaactcaacatggggtaaacaagctttccaagtttttaagttcttcctcaaaactgtcctaagcaaagttcccaatgtcctattaacaacttttgtttgcccatcggattgtgggtgacaaatggttgaaaataacattttattgcccaacttgccccacaaagtccttcaaaaaaggcttatgaacttagagtcctatcactaacaatgatcc

SEQ ID NO: 9872 - DNA, 370 bp, Glycine max
agcttcacaaaagtttatatggcttgaaacaagcattgaggcagtggtacaagaagtttaatgagtttatgagcaactcatgattcaaaagatgtgacatagaccattgctgctatgttaagaaatatactaatagttatgttatccttgtcgtgtatgttgatgacatgttgattgcaggatctagtatggcagaaattaacaagttgaagcagcagttggcaaaaaactttgaaatgaaggatcttggtccagctaaacaaatccttggtatgagaattcttagaaacagatcaaaaggaatcttgaagctgtctcaggagaaatatatacacaaattgcttgacagggtttaccttggagattctaa

SEQ ID NO: 9873 - DNA, 287 bp, Glycine max
agcttgaaggtttatttctatgaattctaatataagcaacaattaccttgtatgatgtaaatatgagaaaatctaattaatttaatgatactattcttaaaacatccttcatttaattgcgattctatttttaatgactttttttttttcatgatatgaagattacataaaggaaagtttaggaaaataagattttttaattgagattattacaattaaattatgttaagtgactttcttaattagtacaaaattaattatttttacttatatttgaatctggaagg

SEQ ID NO: 9874 - DNA, 395 bp, Glycine max
ttgaagtggcttgacctttcaaataattattttcattgactgattcctcctacttttggaaatttattttatctcaaatatctagacttgtcttcaaacaagtttaaaggttcaattcctccaaaattgggtgctctaaggagcctcaaaacattgaacctttccaataacttgctggttggagagataccaaaggaacttcagggccttgagagtttacatgattttcaaatattcaacaatcacttgatggaagggtattggaccaatctaagagtttttgctgcttatgagaataatttcgatggaagggttccaagtaaacttggattcatttatgagcttaaaacacttaacctgcattcaaaccaccttgaaagccctataccgggaag

SEQ ID NO: 9875 - DNA, 329 bp, Glycine max
  unsure at all n locations
agcttcttccttatcataccgccggttaatcggtacacttatttacctgacaaacactcgtactgatataacctatgttggtcaacaactcatccaatatatggctcatcctacctcagctcactcccaagccgcctttcgtgtcttacgatacctcaaaagctctccatgtttcagaatatttcttgctgccaacggacctctacaactcaaagctttcaacgactcctactggncctgctgtcgggatacgacgcgttccatcacagggtacttcgaatatctcagaatcttccattatttcttgggcgtcgaaaaaacaacctact

SEQ ID NO: 9876 - DNA, 361 bp, Glycine max
  unsure at all n locations
tgtgggtggaggacgcatgaacgaaaacacaattctggtgctcctaanaagggttgaggatggagaattgcactaagcaatcactacgcacggctccaagctccagggtggaggacgcatgaacgaaaaagcaattcatggggctccgaaaaagggttgaggatggagaattgcactaagcaatcactacaaacggctccaaactcgtgggtgaaggacgcatgaacgaaaacgccattcatggggctccgaaaaagggttgaggatggagaattgcactaagcaatcactacgcatggctccaaactcctgggtggaagacgcatgaacgaaaatgcaattcatggggctcccaaaaaag

SEQ ID NO: 9877 - DNA, 376 bp, Glycine max
agcttgctcgtcttgctgatatttatcatgcagacttttctgatgatgaccgaggaacaattagggatcaacttgaaacttatgtgcttcaagtgagaagaaatgcttctttttccacttgtgaagatgttcaaagtttggctatgaagatggttcaaactgagaaacatttggtatttccattggtttataaacttattgagctagctttgatattgccggtgtcgacaacatccgttgaaagagctttttcagcaatgaagattatcaagtctaaattgcgcaataagatcaacgatgtgtggttcaatgacttgatggtatgttacaccgagcgggagatattcaagtcacttgatgatattgatattattcg

SEQ ID NO: 9878 - DNA, 384 bp, Glycine max
  unsure at all n locations
tgggcaaattctacgacaataacattttactcggttgtccgactgagtcacgtaatatattgagtcgctcgaaatagaatacagaagctgtgagcaaattctaacgtcaataactnttttctcggatgtccgattgagtcacgtaatatatcgagacgctcgaaattcaatacagaagctatgagcaaattcaaacgacaataacttttaactcagatgtctgatcgagtctcgtaatatatacagacgctcgaaattgaatacaaaagctttgagcaaattcaaacgacgataacttttaactcaaatgtccgatcgagtcccgcaatataacgagatgctagacatagaatacagaagttgggagctaattctaaagacaat

SEQ ID NO: 9879 - DNA, 361 bp, Glycine max
tagcttgccaccacggagttttccgactattgtcttgtgtgggggaacaagctacaaaaggagagagcaagaaatgaatagcccatggttgatacatggacggagatgaaaaatatcatgaggaaacggtatgtgccggctagttactcaattgacttgaaatttaagctccaaaaactaacccaaggcaacaagggggttgaggagtatttcaaggaaatggatgtgctcatgattcaagcaaatattgaagaagatgaggaggtaactatggctcgatttcttaatggtttgactaatgatatccgtgatattgttgagctgcacgagtttgttgaaatggatgatttgcttacaaagc

SEQ ID NO: 9880 - DNA, 388 bp, Glycine max
tctgttttcaatttcgagcgtctcgatatattccattactcaatccggcatccgagtaaaaagttattgtccttttgaattgctaggagcttctgttttcaatttcgagcgtatcgatatattaggggactcaatcggacatccgagtaaaaaattattgtcgtttgaatttgatatgggcttccgttttcaatttcgagcgtgtcgatatattacaagacataatcggagtaccgagtaagaagttattgttgtttgcattaggtacgagcttccgttttcaattttgagtatctcgatatattacgggaatcaatcagacatccgagaaagaagttattgttgtttgcattttgttcgagcttccgttttcaatttcgagcgtctc

SEQ ID NO: 9881 - DNA, 374 bp, Glycine max
agcttaacaaaaggcatgcgaagtgggtggaattcctagagcaattcccttatgttatcaaacataaaaagggaaaaggtaatattgtagccgatgctctttctcggcgtcatgcattactttctatgcttgaaacaaaattgattggtcttgaatgtttgaaaagcatgtatgaaaatgatgaaacttttggagaaatttttaaaaattgtgaaaaattttcagaaaatggtttctttagacatgaaggctttcttttcaaagaaaacaaattgtgtgtgcctaaatgttctactagaaatttgcttgtttgtgaagcacatgaaggaggtttaatggggcattttggggtccaaaagactctataaacatta

SEQ ID NO: 9882 - DNA, 340 bp, Glycine max
tccttaagaagattcctaaagaagctagagcttagctacacatacctctctaatagctaagctctcctccttgagatgagaagctagaacttagctacacaccccctataatagctaagctcacccccatgacaaaaaacatgaaaataccaaaaaaagtccttactacaaagactactcaaaatgccttgaaatacaaggctaaaaccctatactactagaatggccaaaatacaaggcccaaacgaaggaaaaacctattctaatatttacaaagataagcgggcttatacttagcccatgggctcaaaatctaccctaaggctcatgagaaccctac

SEQ ID NO: 9883 - DNA, 368 bp, Glycine max
tctaccccctgatatttttttgtcatttctccattctctcttcatgaacttttcacactgcaacagtgtgctccactagagagacactgaatttgggtccaacaccgcattaaaagtcatcgttgtgactcactgatgcaatcctacccccccaagggcattggatagaagactccaaaaatattggaccagagatgcaagagaaggccctaaggttctcatgagccttagggtagattttgggcccatgggctaagtatgagcccacttgtctttgtacatattagattaggatttcattatttttgggccttgtatataaggcttcataatgtatgtagggtacccctaaaatgaaagatttttct

SEQ ID NO: 9884 - DNA, 281 bp, Glycine max
tcagttcactgcttcatgtagtgcacaatatgctttcagagaaaacactctgccaaaaaagttactatcaagcgaaaaagatattatgtctgatgggtatggggaatcataagattcatgtttgccctaatgattgtatattgtacagacatgagtttgaagagatgaacaaatgccctcggtgtggggtatcacgctacaaaatgaaagatggagatgagtgtagtattgaccaaaactcaaagaaagttcccccagcataggtgatgtggtatcttctg

SEQ ID NO: 9885 - DNA, 382 bp, Glycine max
ttcagtataattcagataatatagaattctctattttgtatcagtttgcaggtgcagcacagtctcttggtgctggtgctatcttggttaacccatggaacatcacagaggttgctgcttctatcggttatgcgtaggaaatgccaccttatgaaagagaaaaaccacatcagtttaatttcaaacatgttgaaactcacacgtcacaggaatgggcagcaacttttgtgaagttttaatcctataacatagcttgcattctgcttctcttagatcaatgttcttccgcactttatttttcttgtgatatagaacatggcgccttacatgagcatattatatcgaccactaaagctagtttgaaatagagtcaatgggaaaa

SEQ ID NO: 9886 - DNA, 360 bp, Glycine max
agcttaacaaaatagaatatttatgcttttctggaaacaacctactgggccaattgccatcatcattgtttgggctaactcagcttagtgatttagattgttcatacaataaattagttggcccaatgccagacaaaattagtggactttctaatttatgttctctggatttgtcaactaactccatgaatggaacaattccccattggtgcttttctttgtcatcgttgatacaattatctcttcatgggaatcagcttacagggtcaattggtgaattctcttctttttccttgcattattgagatctctcttataacaagctacaaggtaatatccccaactcaatgtttcatctac

SEQ ID NO: 9887 - DNA, 213 bp, Glycine max
ttagtaaagagagagaacttccaattaatcagagcttcatatgcttttcggatgaaaaacaatgtgtgtaccggtgaatgggagtatgctgatgaaatcttctcataaccacaaatgagatattggatgttagcatttcgtttctataatgaccacttagaggaaacattgggtctcacctaaatacaagaaaatcacttcaagtgtattaat

SEQ ID NO: 9888 - DNA, 394 bp, Glycine max
taaaggagaagttggttttctgaactctaaactggataacatgacaaaatcaataaagatgctgaataaaggctcagatacgcttgatgaggtgctgcagcttggaaagaatgttggaaaccagagaggacttggattcaatcctaagtctgctggcagaacaaccatgacagaatttgttcctgccaaaaacagcactagagccacgatgtcacaacatcggtctcgacatcatggaacgcagcagaaaaggagcaaaagaaagaagtggaggtgtcactactgtggcaagtatggtcacataaagcccttttgctatcatctacatggccatccacatcatggaactcaaagtagcaacagcagaaagaagatgatgtgggttccaaaacac

SEQ ID NO: 9889 - DNA, 371 bp, Glycine max
agcttcctcgtggcttctttgagaagctttctcaagaggcttctttgagaagctagatccttatctatccacacccctctattaactaaattaacttccttaaaaataattacggatgaaaataacgcaacaaataatcaaacattaaacataattactaataatatatagatatatatatcagggtgttacaactctcctacccttttagaaatttcgtcctcgaaatttaccttactcaaacaaggatgggtgagcttctcgcatctgactttctaattcccacatggcatcttctcttgatgcacctccccagatcaccttgaccaacggaatctctttccctcttaggtggtttgttcgcctatcct

SEQ ID NO: 9890 - DNA, 387 bp, Glycine max
tcaagaattatggcctcatcaaactacttgtttccctagggaaattctataaatagacctcccatctttaatggagtgggttaccactactggaaaacccgcatgcaaatctttatagaggcaatagatttaaatatttgggaagccatagaacaaggaccttatgttccctctataatagccggaagtgcaacaatagaaaaacctagagcagattggactgaggaagaaagaagattagtacaatataatttaaaggccaaaaatattattacatctgccttaggaatagatgaatactttagggtttcaaattgtaaaagtgctaaggatatgtgggatacactacaagtaacacatgaaggcacaacagatgttaaaagatct

SEQ ID NO: 9891 - DNA, 365 bp, Glycine max
agctttgggatgacagtccataccttctgaaacagttacctggaattgggatggttacagcaaaggtaacatttattgattcgttgatgttattaacacataattgttactaatacatatgctctagcaatcagttgcctaatattctaattttgaagttctttccaggcactgcattcaatgggagttagatcgtttgaggaacttgctgatgctgatccgaggagaatagagctagtgactggtcgaaaatacccatttggtaaccatattaaagattctctactgtctctacctccaaaagttgatgtgacgcttgcagagattgaaagccatatacaaggaaattccaagctagtagtaac

SEQ ID NO: 9892 - DNA, 372 bp, Glycine max
  unsure at all n locations
tgttggttataacaaactttaaccaactaactactaactaataaaattaactaccatatgaattaactaatttcaacacttcctcttaattcatattggtacaagacattactcctagcctatctctcatttccttaaatntgatacacttcaaaggctntgtcaacatgtttgctagttgatcttaagatctacaaaactcaagctcaaacttctccttattcacatgatctctcaaaaagtgaaacttggtctcaatatgtttacttctcccatgtgtcactgggtgttgtgccaagtcaatagttaacctattattaattaacaatctcattggcttgaccatctttcaaataagttctttcatcacag

SEQ ID NO: 9893 - DNA, 332 bp, Glycine max
tgcttccttcatcgtagttatccacgagaccataataccaactctggtccaatggccaaaagattttaattctccggtttagtacccaatatgcatccacatcacctaaaaggatttcataaaaatggcgcctcttcctggagttactcttgtttttatattgtttcctaggcctcaaaactctgccagcagtatcagctgatgttgattctgaacctaacggagacttcaaactgtggttaacaatactttgactagaagattggaaaaaggacaaaccatttgaacctttcataaaaaatccagtacagcttggatcaaaccttgaagat

SEQ ID NO: 9894 - DNA, 410 bp, Glycine max
agcttctggcgggacatcttgacttgctttccaatctgacattcaccacttattctgccttcttctattttcagattgggaatgcctctaacagcacctttgtcaatgatttctttcatgcctcttatgggcagatgtccaaatctttgatgccatattctgacttcatcttctttggaggatagacatgcggaggagtgactgggttcttgaggtgtccataggtaacagttgtcctttgatctgctgcccttcattagaacttcactcttctcatttgtcaccaagcattctgactttgtgaagattacattgaatccttcatcacacaactgactgatgctgatcaagattgcagtcagacccttcaccagcagtactttgtccagactaggaagtccatcatgggc

SEQ ID NO: 9895 - DNA, 388 bp, Glycine max
tagcacttggaatactgacgctccattgaccagcctgttgatgctatgtaaatggtatgcatctttggggcatgtcctgttcagatcagtgtaatcggtgcacattctccatttgtcattggccttttttaccataacgacgttggcgagccaggtggaaagccgaacctctttgatgaagtttgcatggaggagctggtcgacttcttctttgacagctttaagctgctcttctcccatcttccttttcatttgttatataggtttggcctggggacagatagccaatttgtggcagattatgccaggatagatccctgacatgtcagatgattgcaaggcaaataaatccacatttctgcattgcaacgtggcaatgcaccggtgc

SEQ ID NO: 9896 - DNA, 378 bp, Glycine max
  unsure at all n locations
ttagctntgtccccaagagcttcatgtatactggtctaaaatcgcgaagtgaacctcggatccctgtcagatacaatactagaaggaattccatgcaaccttattacttccttgatgtacaactccactagcttatccattctatacttcatattcactgggataaaatgagcagatttggtgagtcgatctactataacccacacagcatcatgtccacgactagtcttgggtaaactagatacaaaatccatagatatgctctgccatttccattctggaatttccaatggcttcaattctcttgatggtcgctggtgctcaaccttatccttttgacatgtcacacaatangctacatattcagctacatctttc

SEQ ID NO: 9897 - DNA, 340 bp, Glycine max
tgtctaactcacttccccactcttccttatttcttgcacgaagaagataagccaactcattaagaactaatggaatgtccttggcataattgaccaccctttttgataagttgtcatactccctttgatcatcacattggttaaagaaattcaaattgaaaagttcaagtgcttgatttaaactgaattctctaagcgggtatacctcatcagctttgttagctttaagaacttgcatatctctagttgttacaatgattctactacctgatccaaaattaccaagaggtccaagtaattttttctagtgatttgaatcattcacatcatcaagaacaat

SEQ ID NO: 9898 - DNA, 342 bp, Glycine max
ttcactcggaggcccgattcaggcgcataatatatctagacgctcgatattgaacaacggaggctatcgagaaattcaaatggacaatactttgaactccgacgtcctattcaggtgcataatatatctatacgctcaaaattttacaatggaagctctttggctattcaaatggtcataactcttcactcgaacgtccgattaacgcgcataatatatcgacacgctccaaattgaacaatggaggctcttgagcaatccaaatggtcataacttgtgactcggagggccgattcaggcgcataatatatcgtgacgcatcgaattgaacaacggaagctc

SEQ ID NO: 9899 - DNA, 282 bp, Glycine max
agctttgatgtaacatttgtagaggttatatgaaacaacgagatgatgcgctccatgagaggttggatcaaatggagaatagagaccatatgaattgctcaagagcttccattgttcaatttcgagcgtctagatatataatgcgcctcaatcggacctccgagttaaaagttttgaccattggaaatgctcaagagcttccattgttcaatttcaagcgccacgatatattatgcacctgaatctgacctgctagtgacaacttatgaccatttgaattgc

SEQ ID NO: 9900 - DNA, 375 bp, Glycine max
  unsure at all n locations
tctccctgtggttctcgttcttcttcttccactcctcaactcatggatccttcaacttcttcttcttattatgactcacattggcccatttccattacgaaaggtattcgctctactcgtaatcctcatcctatttataatttcttaagttatcaccgtttgtctcctttgtatagatcctttgttttctcattggcctcccttactattccttccattgtccgtgaggcacttgatcatcctggctggagacaggctatggttgatgagatgcaggctcttgacgataatggtacttgagagctggtacctctatctcctcggaagaccactgtgggttgtagatgggtctacactngtaaagttgggcccaat

SEQ ID NO: 9901 - DNA, 381 bp, Glycine max
tcccaagtttttaagttattcctcattactgtcctattcaaagttcccaaagtcctattaacaacttccgtttgcccatcggtttgtgggtgacaagtggttgaaaataacaatttagtgcccaacttgctccacaaagtcctccaaaaatgcaaatcatcaagcctaggtataggatgcctatatttaatggtgatgttattaagggctctacaatcagaacacatgcgccatgtcccatcctttttagggaccaaaatcactgggacagcacaaggactcgtactatctcttacccaacctttgctaatgagttcatccacttgtctttgaatctctatgcgttcttgtgaattacttctataagctggcctattgggc

SEQ ID NO: 9902 - DNA, 352 bp, Glycine max
ttgagccaattcaaacgacaataactttttacattgttgtctgattgagtcctgtcatatatcgagacgctcgaaattgaatgttgaatctatgagccaattcaaacgacaataactttttactcggatgtctgattgagtcccgtaatataacgagactctcaaaattgaatgttgaagctctgagctaattcaaacgacgataactttctactcggatgtctgattgagtcctgtcatacatcgagacgctcgaaattgaatggtgaagctctgagccaattcatacgacaataactttttactcggatgtctgattgactctcgtcacatatcgagacgctcgaaaatg

SEQ ID NO: 9903 - DNA, 363 bp, Glycine max
agcttaaacattcaattttgagcgtttctatatattacgggactcaatcagacatccgagtaaaaagttattgtcgtttgaatttgctcagagcttcaacatttaatttcgagcgtctcgatatattacgagactatatcagacatctgagtaaaaagttattgtcgtttgaattcgctcagaggttcaacattcaatttcgagcgtctcgatatattacgggcctcaatcatacatccgagtaaaaagttattgtcgtttgaattggctcagagcttcaacattcaatttcgagcgtgtcgatatattacgggcgtcaatcatacattccgagtaaaaagttattgtcgtttgaattggctc

SEQ ID NO: 9904 - DNA, 310 bp, Glycine max
agcttagtcagggaattcattgtcattattccctctgacataacaaacagaaagagtgatgagtaccataaagtgtttgtcagaggaaaatgtgttagattctcccctgctgtaatcaacaaatacctgggcagaccaactgaaggagtggtggatattgatgtttctgagcatcagattgccaaggaaatcactgccaaacgagtccagcattggccaaagaaagggaagctttctgcacggaagctaagtgtgaagtatgcaatcctgcacaagattgttgctgcaaactgggtacccaccaatcaca

SEQ ID NO: 9905 - DNA, 370 bp, Glycine max
tggttacctccttcttcactacatcaagaattaccgtggttgagtcttctctgtggctgtcttactggtttagccccatcctctaaatttatccaatgcatgcatgtggatgggctaataccaggaatgtctgccagggtccagcctatagccttcttatgcttcttgagaactgataacaacttctcctcttgctcatcagtaaagaaggcagatataattactggaaaacttttgctctcatctaagtaaacatattttaaatttgatggcaaaggcttcaattgtggtgtggatggttggatagtggtagaaagagatggtttctcagcctgtacctcataaagaaagtcagaggtatgtgtacttt

SEQ ID NO: 9906 - DNA, 374 bp, Glycine max
agcttcctcaccgtggacggcgtcgttaccgatttccagctgctcgtccggcatcctcaagggtatgaacaattttatgacaaggagaataatggtggtggacaccaagttccatccaataacaaacatggccgccaccaattgcttgaagaactgcacaccaccacctccaccatataatgcaccccttgaatttgttactggcaatagaagtctacaaagggctggttctgctaatagacctgtgaggagaccacccaaaaggccagccacagcatgtgtgtgaaacacaccaagggtgtcatctacctgaacataatatttttcacaaaattatggtaagtacaaattatactaagtaaaaaatcaagagt

SEQ ID NO: 9907 - DNA, 332 bp, Glycine max
agctttgtaattatgtaaccgagggtgcgcatgaagcagagttcggtgtcgacgcccacggtgatgaaaaaggttcggaggacggaggaggcgagtttggacgacgccgtttggaggctgggggcgaggaggtagtggaagtagagggagccggcttcggggggcgcgtggcaggcgcatagccagaagaggcgcatggtgaagacgaggttgaagaaggtggagagggattcgggtgtgtgcgagtccatgatccatgcgatgggctcgggattcagtttctggagctgggaacgggggcaggtgctatcgtgcgccgtgggggagtggga

SEQ ID NO: 9908 - DNA, 344 bp, Glycine max
cgcttaacaaaaggcatgttaagtggttggaattcctagagcaattcccttatgttatcaaacataaaaagggaaaaggtaatattgtagccgatgctctttctcggcgtcatgcattactttctatgcttgaaacaaaattgattgggcttgaatgtttgaaaagcatgtatgaaaatgatgaaacttttggagaaatttttaaaaattgtgaaaaattttcaaaaaatggtttctttaaacatgaaggctttgttttttaaaaaaacaaaatgagtgggcctatatgttttattaaaaaaatgtttgtttttaaaccatcaaggacgtttaaggggcatttt

SEQ ID NO: 9909 - DNA, 385 bp, Glycine max
tccttttctcttctttgaaatccaattggggccaactatttgacattgcccttgggattgccagaggtcttgtttacttgcatgaggaatgttgcacccaaatcatccattgcgacataaagccacaaaatatacttttggatgatcaatataatgctagaatttcagattttgggttagcaaagctgttattgatcaatcaaagccgcactgaaactggaattagaggaacaaaagggtatgttgcaccagattggtttagaagtgcaccaatcactgctaaggttgacacttatagttttggtgtgttgttactagagatcatttgttgtagaaagaatgtagaaaaggagcttgttaatgaagaaaagggatattgactgat

SEQ ID NO: 9910 - DNA, 365 bp, Glycine max
  unsure at all n locations
ttgagccaatacaaacgacaatatcttttttctcggtatgtctgantgattcccgtaacatatcgagacgcttgaaattgaaagctgaagctctgagccaatacaaacgaccataactttttactccgatgtctgattgagtcccgtaacatatcgagacgctcgaaatcgaatgtagaaactgtgagccaattcaaacgataataacttttttcacggatgtctgattgagtcccgtaacatatcgagactctccaaattgaatgtcgaacctctgagcaaattcaaacgacaataactttttactcggatgtctgattgagtccccgaacatatcgagacgcttgaaattgaatgttgaatct

SEQ ID NO: 9911 - DNA, 396 bp, Glycine max
tcagctttcaattttaagcgtgtcgatatattactgttactcaatcagacattggaataaaaatcaattgtcgtttgaatttgctcagagcttctattttcaatttcgagcgtctcgatatattacgggacataatcggacatcggaataaaaagttattgtaatttgaatttgctcagagcttctgttttcaatttcgagcgtctcgatatattatgggactcaaccagacatccaagggaaaagttattatcatttgaattggcttagggcttgcgttttcaatttcgagcgtgtcgatatattatgggacttaaccggacatccaagtaaaaatttattatcgtttgaatttgctctgagcttcttttttcaatttcgagcgtctcgaaatat

SEQ ID NO: 9912 - DNA, 359 bp, Glycine max
agctcttaactgagattgcaacgttccaattgtttttttaatggtgtaatcgattacaatatattggtaatcaattaccagcgtatcattgaaatgcaaattaaattgtgaagagtcacatcttttcataaaatgctttgtgtaatcgattacatggctatggtaatcgattatcactgacaagttctgaataaaaagtcaagagatgtaactcttcaaatggttttctcaaagattttctcacggatataactcttccaatggttttcttgaccagatatgaaaagtctataaaagcaagaccttgacttgcatttcaataactctgttagaacaacttttagaatatcttgaacaac

SEQ ID NO: 9913 - DNA, 357 bp, Glycine max
agcttcttagtttcagatgatgcagatgggtttgtttctacctcatgcactcctctaatgactatggcatcatttctggcgctaaactgctgggagttggaggccatcttctcaattaaatttctggcttcagcaggagtcatgtctgcaagggctccaccactggcagcatctatcatacttctctccatattactgagtccttcataaaaatgttggagaagaagctgttctgaaatctgatggtgagggcaactggcacatagtttcttaaatcgctcccagtactcatacaggctctctccactgagttgtctaatacctgagatatctttcctgatggctgtggtcctggaa

SEQ ID NO: 9914 - DNA, 438 bp, Glycine max
  unsure at all n locations
ntaagattttcaaggctatggttgacaaatagtctggtttgtatgttagagctttgagaatagatagaggtggtgaattcttatcaaatgaattcattactttttgtgaggagcaagggataagaagagaattgattgctccatatactccaaagaaaaatggagtggccgagaggaaaaacagaattgtggttgagatggcaaggagtatgatcaaagctagaggtgtgccaaacagattctggtatgaagctgtagcaactgcagtgtacattttcaatgtttctcataccaaagctgtcatgaacatgacaccacttgaagcttggagaagaaagaaattgtctgtaagtcatttgagaatttttggttgtacaacatatgcattagttgatttatggactaagttggatgataaatctatcanatgtgtattta

SEQ ID NO: 9915 - DNA, 417 bp, Glycine max
agcttggttcccaacgcactattctttcttttctaaaatctacaggtaaacctaggatctctatcagatactatgctacatggcacaccatgtaatatgacaatctcacttatatacagggaggtcaactcaacttctccaaggaaaatatgatattaatgggaatgaagtgagcagacttagtcattctatcaacaataacccagatagaatctaaacctctacggtgtctatgtagtcctaccacacaatccatggaaatactatcccacttccactgcgtatctctagggttataacatcctgaaggtcttgatgttgatctatacttctgacagactacgcatgatagacaaaacactaacctctttctatgttggccaccaatcatcattttaaatctgatcctcttgaaca

SEQ ID NO: 9916 - DNA, 377 bp, Glycine max
  unsure at all n locations
tgtgcctcttcacgtctagaatatgtttgattcatattgatccaaagaccctcaggtgctttgctgatggcttcttctcgttgcaagcttcaattggagtcttgtcttttacagacttagttggacatctgttgagtatgtaaacaactgtgtagactgcttcagctaagaatgtgttagatagtctcttctctttgagcatcgatctagccattttcgtaactgtgcgattctttctctcggacactccattttgttgaggagaatatgcaactgtaagttgccgctcaatgccttcatccttacaaaatctttcanactcgcgagaggtgtactctttgccgcgattacttgttagtacttttattccgtttcca

SEQ ID NO: 9917 - DNA, 330 bp, Glycine max
  unsure at all n locations
agcttgaagttgagcacgtggtacctnggttgacttttgatttttctggcgcattgaagcccaaatatcacgagcagtttctttgttcaacgatagtctccaagattgtgcgatcaatggcttggaaaagatagttcttggctttaacatctttgagtttgctatcatcagctgctttactttgctcggcagtggaattggccggagctaccacgattccatcttcaataatgctccaatactccttagaacgaaggagattctccatcaacatggaccaatgatcataccgaccattcaaattgggaatagagggttgcagacaggatg

SEQ ID NO: 9918 - DNA, 334 bp, Glycine max
taataagaggcatgctaagcgggtagagtttttagattctttttcatatgtcatcaaacataaaaaggggaaagggaatgtagtggctgatgcactgtctaggagacatgctttacttgctatgcttgaaactaaactgtttggtctcgagtctttgaaagacatgtatgtgcatgatgtggactttgctgaaatttttgctgcatgtgaaaagttttctgaaaatggttactataggcataatggattcttgtttagagcaaataaattgtgtgtgcctaagtgttccattagagagttgcttgtgagtgaatcacatgaggggggggggggg

SEQ ID NO: 9919 - DNA, 388 bp, Glycine max
agcttcttagtctcagatgatgcagctgagtttgtttctacctcatgcactcctctaatgactatggcatcatttctggcgctaaactgctgggagttggaagccatcttctcaattaaattcctggcttcagcaggagtcatgtctccaacggctccaccactggcagcatctatcatacttctctccatattactgagtccttcataaaaatattggagaagaagctgctccgaaacctgatggtgagggcaactggcacatagtttcttaaatcgctcacagtactcatacaagctctctccattgagttgtctaatacctgagatatctttcctgatggctgtggtcctggaagcatggaaaattttttctaagaatattctct

SEQ ID NO: 9920 - DNA, 406 bp, Glycine max
tactcaagctgaggcaaactggatgcgttggtcaacttggtaacttatctggccttgaatcagaaatctgtacctgtcgcaagggtttgtggtttgtgctcctctgctgaccaccatacagacctttgcccttccatgtagcaacctggagcaattgagcagcctgaagcttatgctgcaaatatttacaatagacctcctcaacctcagcagcaaaatcaaccacagcagaacaattatgacctttccagcaacagatacaaccctggatggaggaatcaccctaacctcagatggtccagccctcagcaacaacagcagcctgctccttccttccaaaatgctgctggcccaagcagaccatacattcctccaccaatccaacaacagcaacaaccccagaaac

SEQ ID NO: 9921 - DNA, 365 bp, Glycine max
agcttctgggataaatcctcgagttttcagtttcaaaactcccagtgtttcattggaattaggtgtaacctacagcattgacaaattatctcataaatatatcacttcaaggttcgttgtttgtttctcacgaaacttattcaccattggaaacaaagaggatttacctttctccaactatgaccaagaaattcattcacagctatagcattctgtccatacatcagtggtgaggaccagtaaccccacagaaaccatttgtgcacattctctggcacatagaacaaaactatcataataaaggttcattacagtaaccaactttgaagttacatgtaccatttcttacctcgggaaatcacaaa

SEQ ID NO: 9922 - DNA, 436 bp, Glycine max
  unsure at all n locations
tccatcaataggattgcatcatccctcttcccccttttaatgatttgacctcaaatccagaggttcaagaaactttgggcttcttccctccacttgtaaaaagaataaaaacatatatattagtgttgttgggtatgttagagtagggtaaggtctgaaaatccctttcctgagcatcttcacatgagggaacatggttcctcaccaactcaatcagtggtgctgcaagtatagaaaaatatgggacaaaccttttgtaaaagtttgttaagtcatggaagcccctaatttcccttatacttggtggagtgggccactcaaaaatgatttttattctcttaggatccgtggaaaccccttgatcactatttaaaaaattaaggaaagtaatgcaataaaacatacattnttctgtattttcatgtntattactcct

SEQ ID NO: 9923 - DNA, 381 bp, Glycine max
  unsure at all n locations
agcttctggtgggacatcttgacttgctttttcttcttacattcaccacagattctgccttcttctattctcagattgnggatgcctctaacagctcctttgtcaatgattttcttcatgcctcttaagtgcagatgtccaaatctttgatgccatattctgacttcatcttctttggaggatagacatgtggaggagtagctggtttcttgaggtgtccataggtaacagctgtcctttgatctgctgcccttcattagaacttcacttttctcatttgtcactaagcattctgactttgtgaagtttacattgaatccttcatcacacagctgactgatgctgatcaagttagcagtcagtcccttcaccaacagtact

SEQ ID NO: 9924 - DNA, 436 bp, Glycine max
gaccttaaatctcagctttgcagctggaatattatcctatctccgatgttatgggtgggtcccgtccaggtagtcccgaagaagactggcctcacagtgatcagaaatgagaaggaggagttgattcctactcgagtgcagaacagttggagagtctgcattgactataggaggctgaaccaggttaccaaaaaggaccattttcccctgccattcattgaccagatgcttgaacgcctggcaggtaaatcccactactgtttccttgatggtttttctggttatatgcaaattactattgctcctgaggatcaggaaaagaccacattcacctgccccttcggcacttttgcttataggaggatgcctttcggcctgtgcaatgcccctggtatcttccagcagtgcatgattagtattttcagtggatttttag

SEQ ID NO: 9925 - DNA, 419 bp, Glycine max
tcaagaattatggcctcatcaaactacttgtttccctgggaaattctataaatagacctcccgtctttaatggagtgggttaccactactggaaaacccgcatgcaaatctttatagaggcaatagatttaaatatttgggaagccatagaacaaggaccttatgttccctctataatagccggaagtgcaacaatagaaaaacctagagcagattggactgaggaagaaagaagattagcacaatataatttaaaggccaaaaatattattacatctgccttaggaatagatgaatactttagggtttcaaattgtaaaagtgctaaggatatgtgggatacactacaagtaacacatgaaggcacaaaagatgttaatagatctaggataaacactttaactcgtgaatatgaactt

SEQ ID NO: 9926 - DNA, 385 bp, Glycine max
  unsure at all n locations
tcttagttntagatgatgcagatgatttttgtttctacctcatgcactcctctaatgactatggcatcatttctggcgctaaactgctgggagttggaagccatcttctcaatcaagtttctggcttcagcaggagtcatgtctccaagggctccaccactggcagcatctatcatacttctctccatattattgagtccttcattaaaatattggagaagaagctgctccgaaatctgatggtgagggcaactggcacatagttttttaaatctctcccagtattcatataggctctctccactgagttgtctaatacctgagatatccttcctgatggccgtggtcctggaagcanggaaaatgttttctaagaatactctct

SEQ ID NO: 9927 - DNA, 384 bp, Glycine max
agcttccttaagaagatcctaaagtagcttgagcttagctacacatacctctctaatagctaagctcacctccttgagatgagaagctagagcttagctacacacccctataatagctaagctcacccccatgacaaaaaacatgaaaatacaaaaaaatgtccttactacaaagactactcaaaatgccccaaaatacaaggctaaaaccctatactactagaatggccaaaatacaaggcccagacgaaggaaatacctattctaatatttacaaagataagcgggctcatacttagcccatgggctcgaaatctaccctaaggctcatgagaaccctagggccttcccttggatctctagccaatctacttggagtcttct

SEQ ID NO: 9928 - DNA, 438 bp, Glycine max
cgagaatggagaattgcactaagcaatcactacgcattgcttctaactcgaaggtggaggacacatgaacgaaaacacaattcatggggctccgaaaaaggggttgagaatggagaattacactaagcaatcactacgcatagctccaaactcgaaggtggaggacacatgaaagataacgcaattcatggggctccgaaaagattgagaatggagaattgcactacgcaatcactacgcatagctccaaacgcgaaggtggaggacacatgaatgaaaacgcaattcatggggctccgaaaagattgagaatggagaattgcactaagcaatcactacgcatagctccaaactcaaaggtggaggacacatgaacataacgcaattcatggggctcccgaaagattgagaatggagagtggcactaagcaatcacta

SEQ ID NO: 9929 - DNA, 439 bp, Glycine max
  unsure at all n locations
tccncataacccttatagaaagtctcttcaatgaaattaactgtatagtacatgatcgntcactcattaagcgagaagtacaaaataaatcacattgattttttgttcaaaagtaccaagtaaaattttcggcctttccttgttctctgtccttatctcgggtataaggttttattcaatagagaaccctttcttctgtgcctatacgaattgatattattccattccaatttctattggtaactcacaagaaaaaactcaaattgacaaattagagcgagctcatccatgcagtcatgcaaatcaagcatcttcggctataatggaaaactatctgccagaagagcccattacaaccaattgagttaacaaccaaaaaaataaaacttgagctaaaaaccaaataaacaatacactgcaagcagttaccgaaatcacc

SEQ ID NO: 9930 - DNA, 418 bp, Glycine max
aaactcagctatgaggtgcttgactcctagcctcgttggaagttttatattcccgagctttcacttgggtgtcgttcttggtgacaattgcatcagggaggccataccttcatatgaggtgttacgaggtaaacttcgccacctcgttggctatgatttctcatagtggtcttacctcaatctacttggtgaagtagttgatagcgactagtaaatatttgattgctcctagggcttttggctatagtcccattatgtccattccacacatggcaaagagccaaggggagcttaagctgtggagattgtcaggaagggtgcgtggaatgcttgtaaactcttagcatcgtctacatttctttgtgaaatcaagggtgtccatcctgagtgtcggccaatagtagctggcacacaccac

SEQ ID NO: 9931 - DNA, 421 bp, Glycine max
  unsure at all n locations
tctaatgtctctccaccaatgagaataggcccttctttctctattatattgaaattctgaccagccaccatatttagaggttaaaactctaacctatagctgatgctgatcagatgcaaaagcccataaccatctacccaacaaagctaagttgaatttggagatatcctttatccccagtcccccatcagacttaggcaaacaaatatcatcccatttcacccaagggatttttttatgatcaatgtctccaccccacagaaaattcctttgaagggatatcagcttattgacaaccttttgaggtattttaaagaaagaaaggagataaattgggagggcattgaggacagaatntatcagagtaatcttccccgccatggatatatttttctgagcccatntggctaatcttgatttg

SEQ ID NO: 9932 - DNA, 384 bp, Glycine max
ggatcttaagcaccgcggctgcagctgaagcaactagatgcattgtttatttggtaacccagttggccttgaatcagaaatctatacctgtcgcaagagtctgtggtttatgctcctctgctgaccaccatacagacctttgcccttccatgcagcaacctggagcaattaagcagcctaaagcttatgctgcaaacatttacaatagacctcctcaacctcagcaacaaaatcaaccacagcaaaacaattatgacctctccagcaacagatacaatcctggatggaggaatcaccctaatctcagatggtctagccctcaacaacaacaacagcagcctgctcctttcttttccaaatgtgttggcccaagcagaccataca

SEQ ID NO: 9933 - DNA, 458 bp, Glycine max
  unsure at all n locations
ccggatccttaagcacctgcggctgcagcttgatgcaacattgnagaggttattatcatcgagatgatgcgctccatgagaggttggatcaaatggagaatagagatcataatgaagaagaaaggaggagaagagggaatgatggtgttcctagacaaaaccgaattgatggtattaaactcaacattcctccatttaaaggaaagaatgatccggaggcctacttggagtgggagatgaaaatagagcatgttttctcatgcaacaactatgaggaggaccaaaaggtgaagcttgccgccacggagttttccgactatgctcttgtgtggtggaacaagctacaaaaggagagagcaagaaatgaagagccaatggttgatacatggacggagatgaaaaagatcatgaagaagcggtatgtgccggctaagtactcaagggacttgaaattcaag

SEQ ID NO: 9934 - DNA, 422 bp, Glycine max
tccctcatcatgaaattttctttcttgaaacatatttgttgtatcaccattccacaactttttcagatcatcaatcaaaggttgtaaataaacatcaataccaattgttggattaaatgggttaggtacgacacaactcacaaacatataagttttagtcatacatatttctagaggaagattgtatggggtaacaatgattggccaataagaataaggtgaagacgatgcttaaatatatgggttaaatccatttgtgcataaaccaagtcgcacattttgcgtatcaatagaaaaatctggatgtacccgttcaaagtgcttccagacttcatagttagagggatgacttaacatgcctgaagatcttctattctcatagtgctatgtcatttcgcttacagtttgcatgggtgcaaata

SEQ ID NO: 9935 - DNA, 381 bp, Glycine max
  unsure at all n locations
agcttctaaggttgatagggcaattgtgcttggnttcttggatgtccaagataccagtgattntccaaggaattgacaagcaccactggtgccttttctttctacttaaccaccagcaaaatcaatatcacaatatcctacaaaattaaactcagacccttttcttataggccatgattactagttccaatatgatatcttaaaattcttttaatttcagtaacatgacaaatttttggacaagattgaaatttttcacaaagacaaacaacaaacacaatatctggtctactggcaattaaatataataaggaaccaatcatacctctatacttatnttttgaagtatcattacctttctcatcctcatcaatgaccatg

SEQ ID NO: 9936 - DNA, 428 bp, Glycine max
  unsure at all n locations
taagctccttcaactgcacaaggctcttaatatttgtgagtatccttatggaaccttcacccgatgaagacactaacaaaaacttatcttctcctttttggacaaagtatgacaagttgggggcaagtaaattttcttcccatcagaccttggatgcaactgtgatcgtatccccatctcagctagatcttgacgagtattcaagccgtccttcatcttgtcttgaatgttaaggagcgtcccaatcacactgtcacatacatttttctccacatgcatagcatcaatacaatgtctaacgtctaaatcagaccaatagggaagatcaaagaaaatggacatcttcttccatatgcaagtcatacttttatccttcttttgggtctttccaaatacagtattaanggtgtgaacccactggtatacct

SEQ ID NO: 9937 - DNA, 436 bp, Glycine max
tgtcgggttcagttataattaagcgctcgcgttatcttatggactgagcgaaaaggctcacgtcatcaaatactacgcatcttttaaagcacacagcgaggatcggaacctcaaccctacgttcttttaaaagactgtgaggagaaaatcacagaggacaggaatccctgggggaaaccaagaggaacacacaaaaataagaacatgccgcaacttccttaattgccctagatcttaagcgtaatatcgcttgacaacgtcggagttcacgggtgaaggtagctcctcatcatccatgttggcgagcactacggcccctccggagaaagctctttttacgacgaaaggcccttcatagttcagggtccactttcccctattgtctttgagggcttgggagactatcttcggcaccaagtcaccttcgctgaacctg

SEQ ID NO: 9938 - DNA, 376 bp, Glycine max
  unsure at all n locations
agctgtcacatggatgnccganctttttcttattatatcgagacgctcgaaatcgaacaacggaagctctcgataaattcgaatggtcataacatttcactcggatgtccgattcggggacataatatatcgagacactcgaaattgaacaacggaagctctcatgatattcgaatgctcataacatttcacacggatgtccgattcggggacataactcatctagactctcgaaattgaacaacggatgctctcgagaaattcgaatggtcataagatttcacacgaatgttcgattcggggacataatatatcgatacgctcgacattgaacaaccgaagctctctagaaattcgaatggtcataacatttcac

SEQ ID NO: 9939 - DNA, 339 bp, Glycine max
agcttatcgtgacatctgaactcgatgtatgtcatgtctccatgtggggttagctgaaacatggatgctagggtggcaagcacattacccatctgattttcctctctaggaatgtggtggaaagagacctcatcaagaactcaatcagtttcttgatgtaggcctgatagggtatcaacttgtgatccctatgttcccattctcccctcagctggcgaattaccaaggctgagtctctgtacactttaagcaatttgacattaaagtcaattgccacttggattccgagggcacatgcctcatactcagccatattattcgtgcaatcgaagcccaatc

SEQ ID NO: 9940 - DNA, 441 bp, Glycine max
  unsure at all n locations
tctagaagttggaatcttcattttgatgaaattatattatattttggattcataaagaacgaagatgaaccttgtgtctacaagaaggttagggggagtaggggtgttcatggtgtggtttggttcggtttttaggcaaaaagtcatccaaacccaacataaaataaagatgtgttttggtttggctcagtttaaatataacatcaaatctaaacaaaaccaaaccaatcatatttcagttttgcggtttttttatttttgtaatctattatcctaatttaaatctgtcaactaaacttacataattattatatatgctatataattttaaaaatgaaatttatttttattaaattttgtttaaaatgttttaactaaaaattatcttcacttctatttagcattgatantaaaataatttaccaactctttntgtaacat

SEQ ID NO: 9941 - DNA, 422 bp, Glycine max
tgatgccaaatggcccatgctttacagcatcaacattgctttattgtgagcagaactcttcctcagcttctgaagcctttgtagtcttatttatttctgagtttgaacaccactctccttggaccaacccattagatgatcggttaagaatcaaatcatcaattttctccagaaccacatcaccttcgccaaatgggcgcgcaaatgcggctccagtttccagcattgtatcatagtgtgacatatcaagcaattgggattcagatggatcagtgtcccagaggataagccacattgctgaagaacattagtagttttcttggtaaattgtcccatcctctaacacattactccataaaggatcttgtaagaatcatccagggtgaacctaataaatgaaagacaagagaaactaataacta

SEQ ID NO: 9942 - DNA, 435 bp, Glycine max
ttttattgtaatcttgaaattcaggacaacactctgatttttgaaattttcgggataaaaatggtcattgaccagtcccttttccatgacttaaccaaattacctagtgacggtgtaccatttgaaggtacactgaatgacgactggaaatttgatttctctgcccatgatgcccgccagttggtttgcaccaacaatgcggatatgaccggacgtcttcttgccgggtcattggcttttgaaagccgcatccttcactatttaattgtgcgtattttgcttccacggtcttccaaccttgcccaggtttctgaggaagatctaattatcatgtgggcctttcatacagggcgtcaacttgactgggcacacttagtcagatatcgcatgcataaggcattgtgattacatgctccactaccatatccacagctt

SEQ ID NO: 9943 - DNA, 425 bp, Glycine max
  unsure at all n locations
agctntatcttttaagatctttatgtgcgattntcatgaaaatgatagatctcatccagcgcaagttgctgcagcccagatacgcacactgctatataaacatgaaggctgcacgagttctgtaccaagtccgggattgaagagttattttgtgagttttgggacttgagtgttttgtgagccaccttgatgtcaccctaacatcaagtgttggacctgagtgtgtagagttgatctctattgttcagagagcaatctctggtgtgtatttgatttaactgtaaacacgggagagtgattgatagggagtgagaggggttctcatatctaagagtggctcttaggtagaggttgcacgggtagtggttaggtgagaaggttgtaaacagtggcttgtagatcttctaactaacactattttagtg

SEQ ID NO: 9944 - DNA, 400 bp, Glycine max
  unsure at all n locations
agcttctatagaaggttcgttcctatttnctctacaattgcatcacctctcaatgagttggtgaagaagaatgtggcatttacctgnggtgaaaaacaagagcaagcccctgctttgcttaaagaaaagcttactaaggcacctattctagctcttcctgacttttctaaaacttttgagctagaatgtgatgcctctagagtgggagttggagctatattgttacaaggtgggcaccctattgcttattttagtgaaaaacttcatagtgccactctcaactaccccacttatgataaagagctntatgccttaataagagccctccaaacttgggaacattaccttgtttccattggaattgtcattcatagtgatcatcaatcacttaagtacatta

SEQ ID NO: 9945 - DNA, 344 bp, Glycine max
  unsure at all n locations
agcttcagattcggatccataggactatctttatgtctacaatnctgcatgcctgtctcctccaaaatgtcgagggcgtacttcctttgagagatcacaataccatctcctgactgagccacctcaataccaaggaagtacttcaaatatcctaagtctttggtctggaaatgactaaataagtgctcctttagctgaataatcttagaagcatcattccctgtaatcactatatcatcaacatatactatcaagtaaacacattttccaggggatgaatgacaataaataacagaatgatcagcctcactacgtttcaacccaaaaagttgaacaatatgact

SEQ ID NO: 9946 - DNA, 433 bp, Glycine max
  unsure at all n locations
agcttcaagaaaaatggctctagtttactctttatttccagaaggaaattctatcaatagacctccaatctttaatggagagggttaccactactggaaaacccgaatgcaaatttttattgaggcaatagacttaagtatttgggaagccatagaaatagggccatatatacccaccacagtagaaagaattacaatagatggtagcacatcaagtgaaagcataacaatagaaaaacctagagatagatggtctgaagaggatagaagacgagtacaatacaatctataagccaaaaacataataacatctgccctgngaatggatgaatatttcanggtttcaaattgtaagagtgctaatgaaatgtgggacactctancantaacacatgaaggaactacacatgttaaaagatctangataaacaca

SEQ ID NO: 9947 - DNA, 401 bp, Glycine max
agctcgcaatcatttggtataaaaatcaccttgtcttgtggctctacacaagggtgactgcaaccttctaaaatagtatctccttcatcctattaaaatcaaaatgacaatgttaaatgctattcgtaaaaagatccctccaaccaaaacaagggataaacagagaaggaaggtaaatgctagaagaaaagaatgtagtaattgtgaaaacaacaaattaagtaccaatgaagtgatgtcatgccttgtgtagggagtaggacaactagaagccaaatcaacaaatctcaactatagattcctatccatgtacattctctataaaacattcatggttagtgtggttctactaaattgtgcatgacaagagtatattcattagacatctaaatggaagttat

SEQ ID NO: 9948 - DNA, 338 bp, Glycine max
  unsure at all n locations
tccgttgctcaattacaagcgtctcganatattttgttcttgaataggacctccgagggacaaggtatgaccatgngaatttctcgagagcttccgatgttcaattgcgagcgtctccatatattatgcgctagtatcggacctccgagtgaaaagttaggaccatttgaattgctgaagaacttccattgtacagttcgagcgacacgatattttacgcgatcgaaacggacctctgtgtgacaagatatgaccatttgaatatctcgagagcttccgtggttcaatttcgagcggctcgatactttatgcggctgaatctgaccttcgagttaaaa

SEQ ID NO: 9949 - DNA, 328 bp, Glycine max
  unsure at all n locations
agcttgtaattgagcaacggaagctttcgagtantatttaaattgtcatcacttttcactcggaagtccgattcatgcgcatcacatatagagacgctcgaaattgaacaacggaagctctcgagaaattcaaatggtcataacttgtcactcggaggtccgattcaagcgcataatatatcgagacgcttgtaattgagcaacagacgctttctagaaattcacagggacatcgcttttcactcggatgtccgattcaggcgcatcacatatagagacactcgaaattgaacagcggaagctctcgagatattcaaatggtcataac

SEQ ID NO: 9950 - DNA, 422 bp, Glycine max
  unsure at all n locations
tgttagtgtgtgtttaaatgtctaatataaaaganattttatgtaataatgtttctttgaagaaaattttatcagtgaaaataaaatattttgaatatgaattttgtagtatttttttaattagattaggttggtgttaatgatttattagtgtgttaataattcatgaacgtttcaactttcatttaaaaaaattagtagatcatatttatttgaagaaagtattttgagtatgaaatttattttaatatgaagttgtagtatttttttaattagattaggttcatttttttgtgttaaaaattgataagcgttcaagttgaaagtgttatttgatgatgttttgttgtttcttgtatcatatttaatttaatatatttgtagtaattttgtaattacctatntttcatttgaagttatta

SEQ ID NO: 9951 - DNA, 456 bp, Glycine max
  unsure at all n locations
agcttcaagaaaaagatggcctcagcaaatttcttatttccagaagggaattctatcaatagacctccaatctttaatggagagggttaccactactggaaaacccgaatgcaaatttttatcgaggcaatagatctaaatatctgggaagccatagaaatagggccttatatacccaccacagtagaaagaatttcaatagatggtagttcatcaagtaaaagcataaccatagaaaaacctagagatagatggtctgaagaggatagaaaacgagtacaatacaacctanaagccaaaaacataataacatctgccctaggaatggatgaatattttagagtttcaaattgtaagagtgctaaggaaatgtgggacactcttcgattaacacatgaaggaactacagatgttaaaagatctaggataaatgcactaactcatgagtattgaata

SEQ ID NO: 9952 - DNA, 435 bp, Glycine max
  unsure at all n locations
tgataggtaaggactctatttgtgactcaaaattatttctagttcaaactagcttttgtatcttatacagcattttgtcatccaactgaatgcttattattaagcagggatttgatgaatccaatattggagaaagggcataacagagttcctgtctattatgagcagcctacaaatattattggacttgttctggtatgtaattatgcatacaatcacttatttttctttattccttcagtattgaacaatcattatctgctatgtgaaaacttataaaaaccacaaacagtatgagactattttctttaagcttcaacctgttaacttgctttccatcaagatgattngcacaagttaattatttttgtctgttcgaccaaaactatgttgctaggttctgataaaccctaagttaatattaattaataattt

SEQ ID NO: 9953 - DNA, 473 bp, Glycine max
tgacgtaagctccattggagcttgtaggcctaggatcttcttcatttatggattcctttgcttcttggaagatgaatggcagcggaatggagaaggaagagagagaggagacgccacttcaaggagaagatgagtctagaagaagctcacccccataggaggccatggataagagcttggaggaagaaggagatgaatgaagggagagggagagaaaagcatgaaattttgtgctctaagagagctctgaaatctgaagtttaattttcaaatgatcaaagttcaaaaaatgcacacatatggcctctatttatagcctaagtgtcacacaaaattggagggagatttgaatttctattcaaatttcacttaaatttgaaattgaatttgtggagccaaattttggagccaaaattcactaatataattaaggaattttaactatgggtcagcccactaattcaagatcaagt

SEQ ID NO: 9954 - DNA, 517 bp, Glycine max
  unsure at all n locations
tgacaattgagtggtattttgtttcacataacagggagaatgagcagctatccaagtatggtgacaccaaaactgctcgaagcattatgttgatagaactgaaaaaactcatagaggcaaatcctcttttccgtgataagcttatcttccctacccttaagtcatcaagactgcgaactttgatcaatcaaaggtatgtgtgattaatttctaccaactttatctatctattttgccatgctctttcattcacatagttgggctctgctttttgacccatatgtcgttatgggaaaaatgaaaagtaaatcatgttgatttctggacatgtagtatatntcatattttgtcagtggtaaatgataagaatttggaaggttttctggtccttttttaattcattcttgtaaatttgaatttttagcgtgctgtgccttgcctattttttaatcagtgaatttatctatgccccttaatcatgcagtctaaactggcagcatcagctctgcaaaaaccc

SEQ ID NO: 9955 - DNA, 450 bp, Glycine max
taacccatggaagctcctaatatctcccactctttttgtggtgggccattcttggatggccttgattttctcaaggtccacttggaccccatttctaccaactacaaaacctaagaaaactatattatctacacaaaaggtacacttctctatatttgcatagaaggtgtttttcctaaggactgaaagaacttgtctgagatgtcctaagtgatcatctagcctcctactatacactaaaatatcatcaaaataaacaactacaaatctacctatgaaatcccttaagacatgatgcataagcctcattaaggtgcttggtgcattagtgagcccaaaaggcatcactagccattcatacaaaccaaacttggtcttgaaagcaattatccactcatcaccctttttcatcctgatttggggataccacttttaaaaacaaattttgaa

SEQ ID NO: 9956 - DNA, 482 bp, Glycine max
tatagaatatataataaaagaactatgactattgaagaatctattcatgtttcctttgatgagtctaatgctatttctccaagaaaggatattttagatgatgttacagaatctttagaacaaatgcacattcatggacaagattctaaaggaagaagtcaaatcaaatgatgaacttccaaaagaatggaaagcttcaaaagatcatccccttgacaacattattggtgatatctcaaaaggggtaacaactagacattctcttaaatatttatgcaataatatggcttttgtgtctatgattgaacctaaaaatataaatgaagccataatagatgatcattggatagtagctatgcaagaagaactaaatcagtttgaaagaaacaatgtgtgggaattagtaaagaaacctgaaaactaccctatcataggaacaaaataggtatttaggaataagttagatgaacatggcataatca

SEQ ID NO: 9957 - DNA, 530 bp, Glycine max
agcttggaggatcaatatacaggatcatcttccttgtatttaagcaaataattttttaattaaagatctttgaatgttgttagaaattatcactatgagtgtaagtttttggtacctatcaattcattagtcttcaagttagaaatttattgatttccaccccttgcaaactcaacatttgttataaaaagtttaaaatttagagagaaagcgtttgtttttatttattattaaatttgcttcacaaccctttgcaaactcagtaggttgcaaaccaaaatgcagtgatatagtgccatccaacaacaacaacattccgtaaagttcaaaaagctaggcacaaccgttcaactttcaaactcaaaaccacaacatgaacagaaaaacgtgaaacataacaaaatgggttgcactaatagtaggaagcaactaagaaaatagtaaactaaaaagtgttttattaagccaacttgaagttgagcacactaagatgagaaagaaacttgagccagcaccccactcaaccccca

SEQ ID NO: 9958 - DNA, 436 bp, Glycine max
gcaagctggagccaattccaagtcactaggttgtcttgagccatccccgacaacagttcctgagccataaggggacccacctttgaccttctccatctcatacatgccatctccaaatgtgtacccaaccggaacaaaaatcattccatggtgaacaagctgagtgacagaggtcaacggggtctcttcttgtccacctccttgagaactagtgctagagaagaaccctgcaggttttcctgctagtgcctgtgtatgccacagccctatagtgccttctaaaaatgctttgaattgagaagccatggttccaaatgttgttggaaaaccgaacagaaagccatcggcatcggcaagctcacggggtttaataatatgaacatcatcactctttggaggtgctcccttcttcacaaggacttcttcagacagtgtt

SEQ ID NO: 9959 - DNA, 278 bp, Glycine max
tgcgaccatttgaataactcaagagcttccattgttcaattttgatcttctcgatatattatgcgccctaatcggacctccgagtgaaaagctatgaccatttgaataactcaagagcttccattgttcaatttctagcgtctcgatatcttatgcgcctgaatctgacctccgtgtgaaaagttatgaccacttgaatatctcgagagcttcccttggtgaattctagcgtctcgatatcttatgcgcctgaatccgaccttcggaggaaatgtttg

SEQ ID NO: 9960 - DNA, 479 bp, Glycine max
agctttgatgcaacatttggagaggtttatgatacaacgagatgatgcgctccatgagaggttggatcaaatggagaatagagatcataatgaagaagaaaggaggagaagagggaatgatggtgttcctagacaaaaccgaattgatggtattaaactcaacattcctccatttaaaggaaagaatgatccggaggcctacttggagtgggagatgaaaatagagcatttttctcatgcaacaactatgaggaggaccaaaaggtgaagcgtgccgccatggagttttccgactatgctcttgtgtggtggaacaagctacaaaaggagagagcaagaaatgaagagctggttgatacatggacggagatgaaaaagatcatgaggaagcgatatgtgccggctagttactcaagggacttgaaattccagctccaaaaacttaccccaagcaacaagggggttgaagagtatttcaa

SEQ ID NO: 9961 - DNA, 544 bp, Glycine max
  unsure at all n locations
tcaggctgctcaattgctccaggttgctgcatggaagggcaaaggtttgtatggtggtcagcagaggagcacaaaccacaaacccttgcgacaggtacaaatttctgattcaaggccagctgggttaccaagttaaccaatgcatccagttttccttcaagcttcttagtttcagatgatgcagatgggtttgtagctacctcatgcactcctctaatgactatggcatcatttctggcgctaaactgctgggagttggaggccatcttctcaattaaatttctggcttcagcaggagtcatgtctccaagggctccaccactggcagcatctatcatacttctctccatattactgagtccttcataaaaatattggagaagaagctgttctgaaatctgatggtgggggcaactggcacatagtttcttaaatctctcccagtactcatacaggctctctccactgagttgtctaatacctaagatacccttnctgatggttgtggtcctagaagcatggaaaaaattctctaagaatactc

SEQ ID NO: 9962 - DNA, 411 bp, Glycine max
agcttgtgtagcggtaattctaactgttaaaagattttcgcacctgttacctagatgtcggtgcagcttgataatagtttcctcctcttccttggtgtaatttcctcttttgaggtttggccttaggtaattcagccaccttaatctgcaactctttccacatctcgcaagacctgacaaattaataacaacaacaacaacaaagtaaaaccaattacaatggattcatatatgatttaggtataatctgtgcatgtgtataattaaacattgaatatatggttcctacatattgatgtagaagttaaaccaaaccttgaaaacagagaagaagaaaaattgaaagccacattggcgactatattgatggtacatgctctcacatactttattttgtttctgaccaaacta

SEQ ID NO: 9963 - DNA, 462 bp, Glycine max
cgttctatagaaggttcgttcctaatttctctacaattgcattacctctcaatgagctggtgaagaagaatgtggcatttacctggggtgaaaaacaagagcaagcctttgctttgctcaaagaaaagcttactaaggcacctattctagctcttcctgacttttctaaaacttttgagctagaatgtgatgcctctagagtgggagttggagttgtattgttacaaggtgggcaccctattgcttattctagtgaaaaacttcatagtgccacccttaacaggggggttcatagaactaccaagaagtccccttttgaggttgtctatgggttcaatccctaacaccgttagacctcattccccttcccctagacacttcttttatacattaagaagggggattctatggtcaaagtttgtaaagaaagttggcatgagaggggttaataacccaatttga

SEQ ID NO: 9964 - DNA, 374 bp, Glycine max
agcttcaacatcagaccacttcctttgttctggaactacttcacatggacttgatggggcctatgcaagttgaaagccttggaggaaagaggtatgcctatgttgttgtggatgatttctccagatttacctgggtcaactttatcagagagaaatcagacacctttgaagtattcaaggagttgagtctaagacttcaaagagaaaaggactgtgtcatcaatagaatcaggagtgaccatggcagagagtttgaaaacagcaggttcactgaattctgcacatctgaaggcatcactcatgagttctctgcagccattacaccacaacagaatggcatagttgaaaggaaaaataggactttgcaagacgct

SEQ ID NO: 9965 - DNA, 529 bp, Glycine max
gaatcggacatccgtgtgaaaagttatgagcatttgaattattttttagcttccattgttcaatttcgagcatctcgatatattataagcctgaatcggacattcgtgtgaaaagttatgaccatttgaatttctcaagagcttccgttgttcaatttcgagcctctcgacatattatgcgcttgaatcggatatccgtgtgaaaagttatgaccatttgaatatctcgacagcttctgatgtttaattcgagcggatcaatatattataagcctgaatcgaaccttagtgtgaaaaggtatgaccattttaatttcccgagaactttcggttttcattttcgagcgtctctatatgtgatgctccttaatataacatccgtgtgaaaagatatgaccatttgaatttctcaagagcctccggtgttcaatttgagcctctcgatatgtgattggccgaatcggacatccccgtgaaaaggtaataccttttaatttttaataaatttccttgttaaatttttagcttc

SEQ ID NO: 9966 - DNA, 337 bp, Glycine max
accttcaacctagaggagacggaccatttttgtgttggagaagatcaacgacaatgcctacaagattgacttgcctagtgagtataatgtaagtgccactttcaatgtgtctgatctatctctttttgatgcagatggaggagccttggatttgaggacaaatccttttcaagaaggagggagtgatgaggacataaccaagggcaaggaccatgaagcacttgaaggtcccatgaccagaggcagacttaaacaagcccaacacgtcatagagacaaggctggtcatttgtatagctgccattgatgatgattgaaggcccaagtggagaaagatg

SEQ ID NO: 9967 - DNA, 471 bp, Glycine max
  unsure at all n locations
ttgcagtctatataaagcttcaagatgtgatgtagctccttgtttatcttgtaggcctcggatcttcttcatcaatggagtcctttgcttcttgaagattaatggcagtggaatggagatggaagaatgatgattggagatgccacttcaaggagaagattagtcaagaagaagctcaccaccataggaagccattgataagagcttgaaagtaagagaaaaggagtggagggaaagggagagaaggagcacgaaattttatgcgtcaaaagtagtctgaactttgaagtttaattctcaaatgatcaaagttganaaaatgcacacacatgaccactatttatagcctaagtgtcacacanaattcgagggaaatttgaatttctattcaaattttacttgagtttgaaattgaatttgtgcaccaaattttggaaccaaatttcactattatgattagtaaattttagc

SEQ ID NO: 9968 - DNA, 555 bp, Glycine max
tttatccatggcttcctatggtggtgagctttttcttgactcaacttcttcttgaagtggcgtctccaatcatctttcttccttctccattccgctttcattcatcttgaaaaagcaaaggactccattgatgaagaagatcctagttctacaagctccacatggagctacatcacttagtaacgtaacataaagcgtaaaatcattcagttcatattctaagattactttccaatctcactgaaaatccaatttcatgacactagtgataaaatagaatcaagcattatgagtataatgaaattaccaaaaatgagtaaaacagattcatacatatataatacccaaagggatccatatgggtacaaagattacattcaatcctttagaaaaactaaccgatcattgcgtagagcacaagactaacaagagaaatggcgaataaagtgatccataatcacaactctgcagtgcctcggctgcactattacttttctccttctttgcatttttctctggaatttcttcaactcgattctcttttccttaacaatg

SEQ ID NO: 9969 - DNA, 349 bp, Glycine max
agcttcctcctcagctgctcaaatgcctctctacaaagttggtcaagcaaaaaattttcgtccttctgaagaagcttggacaatgctaggagaatctggctaaaatcctagatgaatctcttgtaaaaacatgcatgtccaagaaaagaacatacttcttgcacaaacatggggtaaggaaaagaaataataacatcgatcttcgccttatcgacctcaatacctatactagagacgaaatgccctaagactataccttcatggaccataaaatgacatttttctaagttaagaacaaggttagtctcaatgcatcgatcaaaaactctagagaggctacccaaacatg

SEQ ID NO: 9970 - DNA, 344 bp, Glycine max
tcatgagagagtcaaagatcaaattgagaggaaaaatattttctatgctaaacaagccaacaaagggagaaagaaggttgtcttcgaacccggagattgggtttgggtgcacatgagaaaagaaaggtttccggaacaaaggaaatcaaagcttcaaccaaggggagatggaccatttcaagtgcttgaaagaatcaatgacaatgcttacaaagttgagctgcccggtgagtataatgttagttccaccttcaatgtctctgatttatctctttttgatgcagatggagaatccgatttgaggacaaatccttctcaagagggagagaatgatgaggacatga

SEQ ID NO: 9971 - DNA, 472 bp, Glycine max
ccttatgctgcaaacatctataatagacctcctcaatctcatctgcaaaatcagccacaacaaaacaattatgacctctccagcaacaggtacaagcccaggtggaggaatcatcccaaccttaatggtcgaatccttcacaacagcagcaacaacaacaacaaccttattttcaaaatgctgctggcccaagcagaccttacgttcctccaccaatccagcaacaacaacaacaacaacaacaaccctagaaacaacaaacagttgaggctccttcgcaaccttcccttgaagaacttgtgaggcaaatgactatgcaaaacatacagtttcaacaagagaccagagccttcattcagagcttaactaatcagatgagacaattggctacacaattaaatctacaatagtcccagaattctgacagattaccttctcaatctgtccagaatccaaaaaagtgagggcatta

SEQ ID NO: 9972 - DNA, 445 bp, Glycine max
tccattgttcaatttcgagtgtctcgatatattatgcgtttgaatcggacctccgaatgaaaagttatgaccatttgaatttctcgagagctacctttgttcaatttcgtgcgtctcgatatattatgcgcctgaatcggacctccgagtgaaaagttatgaccatttgaatttctcgagagcttccgatgttcaatttcgagcgtcttgatatactatgcgactgaatctaacctccgtgtgaaaagttatgaccatttgaatttctcaagagcttccgttgttcaattttgagcgtctctatctgttatgcgcctgaatcagacctccgagttaaaagttatgaccatttgattttcttgagagcttccgttgttcaattttgagcgtctcgatataatatgcgcctgaatctgacctccgagttaaaaggtatgacccattg

SEQ ID NO: 9973 - DNA, 291 bp, Glycine max
agcttctatagaaggttcgttcctaatttctctacaattgcatcacctctcaatgagctggtgaagaagaatgtggcatttacctggggtgaaaaacaagagcaagcctttgctttgctcaaagaaaagcttactaaggcacctgttctagctcttcctgacttttctaaaacttttgagctaaaatgtgatgcctctggagtgggagttggagctgtattgttacaaagtgggcaccctattgcttattttagtgaaaaacttcatagtgccaccctcaactaccccacc

SEQ ID NO: 9974 - DNA, 555 bp, Glycine max
ttatagcagatgccactctactccaaattcttgaaggatatgtttttatggaaacataagtacattcaccaggaaaacattatagtggaaagaaattgtagcactgtgattcaaaagatccttccgcctaagcataaagaccctgtgagtgtaactattccttgttcaattagagaagtcactgtgggaaatactcttattgacttaggagccagtataaatttaatgccactctccatgtgtagaaggttgggagagctggagatcatgcccactaaaatgactttacaattggctgatcgctccattaccagaccatatggagtaattgaagatgtgctggtcagagtgaaacattttatcttcctggcagactttgtggtaattgatatctgtgaagatactgacattcttgtaatattgggaaggccattcatgttaactgcaagctgcatagttgacatgggtagaaagagaaatgggttttgaggatcagaaaattgattttgatttgtttgttgaaagcagcccgcttcagaacaaaatgtttgctta

SEQ ID NO: 9975 - DNA, 394 bp, Glycine max
gctatcaatctttgagcaggagaacttccaatgcataattggatgcatcacacattagctcaaaaggggatgtccaatcaggtgcctgaataataagggtggtagtcaccgcacgcttgaggcaatcaaaagcctctttgcatcggtcatcaaaataaaactccaagtccttttgcagcagattggatagtggaagggccactttgctaaaatccttgataaagcgcctataaaaccctgcatgaccaagaaaagaacgaacctctcgaacgcaagaggggtaaggcaattgtgaaataacatttatttttgcagggtctacctctatgcccctactggaaatgatatgcccctaaactataccttgttctaccatgaagtgacattttttaaa

SEQ ID NO: 9976 - DNA, 251 bp, Glycine max
agcttcaacatcagaccacttcccaggtgctgtgactacttcacatggacttgatggggcctatgcaagttgaaagccttggaggaaagaggtatgcctatgttgttgtggatgatttctccagatttacctgggtctactttatcagagaaaaatcagacacctttgaagtattcaaggagttgagtctaagacttcaaagagaaaaagactgtgtcatcaagagaatcatgagtgaccatggcagagag

SEQ ID NO: 9977 - DNA, 187 bp, Glycine max
tctggtgggacatcttgacttgctttccaatctgacattcaccttttattctgccctcttctattttcagattgggaatgcctctaacagcacctttgtcaatgattttcttcatgcctcttaagtgcaaatgtccaaatctttgatgccatattctgacttcatcttctttggaggatagacatgt

SEQ ID NO: 9978 - DNA, 347 bp, Glycine max
  unsure at all n locations
agctgggccactggagaaaaggtatcanatttatattgattcctttgggaagttccatataaacttcttcaaacaaatctctattcaaaaaagcattattaacatctaattggagaagacactagtttctagcagcaacaacacagagcaaaactctcacagtggtaagcttggccattggagaaaatgtatcagagaaattgattccagcttattgagtataccctttggcaaccaatcgagctttgtatctatccacaaagccatccattttatatttaaccttatacacccatctacaacccatacaatgcttatcaggtggtaagggaacaagtgtctagggg

SEQ ID NO: 9979 - DNA, 371 bp, Glycine max
agcttctcctctagaaagttccaaattcttccaccaggtccaccactctccccataatcagcaacctccaccatggcaccatctcaagcgccccctccattgcaccttcagagccctctccgacaagtacgacgacgtcatctccctatggttcggctcccgcctcgtcgtcgtctcctcccaaacactactccaagaatgtttcaccaaaaacgacgtcgtcctcaccaaccacccccactttctctctggaaaacacatatcttctacactatggtgagtactaacgcgttaaggggaggaagattgatggtggcacaagagaacgaggaggaaaaggtggaggcttctaagtatcagcgcgaaaaacc

SEQ ID NO: 9980 - DNA, 442 bp, Glycine max
tcgataatccatttcgagcgtctcgatatattacgggactcattctgacaaccgagtgaaaagttattgtcgtttgaatttatcagagcttcagtatgcaatattgagcgtctcgatatattacggcactcaatcgaacattcaattaaaaaggtattgtgcgttggatttgatcagagcttcaacattcaatttcgagggtttcgatatattacggggactctatccaacacttccgtaaaaaagttatggtcgtttgaatttgctccgggcttcaacattcaattttgagcgtttcgatatatgacgggattcaatcggacatctgagtaaaaagttattggcgtttgaatttgctcagagcttcggcattcaagtccgagcctctcgatatattacgggactcaatcagaccaccgagtaaaaagttattgtcgtttga

SEQ ID NO: 9981 - DNA, 285 bp, Glycine max
ttttactcggatgtctgattgagtcccgtaatatatcgagacgctcgaactggaataccgaagctctgagcaaattcaaacgacaataactttttactctgatgtctgattcagtcccgtaatatatcgaaacgctcgatattgaaagttgaagctgtgagcaacttcaaactacaataactttttactcggatgtctgattgagtcccataatatatcgaaacgctcaatattgaatgttgaagctttgagcaacttcaaacaacaataactttttactcggat

SEQ ID NO: 9982 - DNA, 473 bp, Glycine max
ttacatcccatattgtgataaaatcttttgtattttttgttatgttgaggttatgaaatgatgattcaaactatgagtatgtgataaattgaacatgtgacggatgatgaaatacatgtgtattgagatgagatgtgtgtattgagttgtgaactatgaactgtgcaatcacacaattgtaagaccctttaaggacgacgagtattgtgatgggatccactgtgggaacccgacgagttaaaatgattttgaaagcaattgagtaaatgtgtgtattgcatagttcatagataaagtgtatatgattcatgaggtgtgataacatgttaaattgagattataccattgtgattgggattaagtgtatgtgataaattgagtatgtatatgattgatatatatatatatgtgcattgaaatgttgtgtgcattgaattgtgaacctataatttgttaattacacgatcataagt

SEQ ID NO: 9983 - DNA, 377 bp, Glycine max
tggtccttctttgtataagagtaagaggtagactttttatattatgactttctctttaattggtgctctacccttatacaaaggtgaactagctcatataggtctctatatggaaggagttcaaccatgtctcttacttccatatttaaaccacttaggaacctagcaatgcttggtctttccttccccctatgtctagctctcaaaaagagtaattccatttgttgtctatattcttccacactcatactcctttatctaagcctttggagcttgtccataagctccctttcatagtaagagagaatgtgcctttttctaagggcactcttaagattattccaatactatattggaggatccccatgaatccttct

SEQ ID NO: 9984 - DNA, 320 bp, Glycine max
agcttcagtaagagatctgaaacattgatagaattctctataatgtcaatgcaggatcctatagattttcccattgataaggcctcagcaaccttccctcgagctgcttcatgcctccacaagaccaagaccgtgtttagcaaaggccatctaacatgagaatctgccttcttctgtgtgaagcctaggcccttgagcaataaatccaactgtctacaattaagaaaatcacaattagtaatggcaatgccatgtgagctttccaaatgttttcactaagtaagtaagtaaaaagttgcataaacctttcttatgtcatc

SEQ ID NO: 9985 - DNA, 319 bp, Glycine max
agctttgaatgctctattcaatggagttgacaagaatatcttcagactgatcaacacttgcacagtggccaaagatgcatgggagatcctgaaaatcactcatgaaggaacctccaaagtgaagatgtccagattgcaactgttggccacaaaattcgaaaatctgaagatgaaggaggaagaatgcattcatgacttccacatgaacattcttgaaattgccaatgcttgcactgccttgggagagaagatgacagatgaaaagctggtgagaaagatcctcagatccttgcctaagagatttgacatgaaagtcact

SEQ ID NO: 9986 - DNA, 522 bp, Glycine max
  unsure at all n locations
tcaagaaaaagatggccttagcaaattccttattttcagaagggttttctatcaatagacctccaatctttaatggagagggttaccactactggaaaacccgaatgcaaattttcatcgaggcaatagatctaaatatctgggaagccatagaaatagggccttatatacccaccacagtagaaagagtttcaatagatggtagttcatcaagtgaaagcataaccatagaaaaacctagagatagatggtctgaagaggatagaaaacgagtacaatacaacttaaaagccaaaaacataataacatctgccctaggaatggatgagtatttcagggtttcaaattgtaagagtgctaaggaaatgtgggacactcttcgattaacacatgaaggaactacagatgttaaaagatctaggataaatgcactaactcatgagtatgaattatntanaatgaatgcnaatganaatattcagagtatgcaaaagagatttacacatatagtaaatcatctag

SEQ ID NO: 9987 - DNA, 410 bp, Glycine max
gtttttaagttcttcctcattactgtcctaagcaaagttcccaaagtcctattaacaactttcgtttgcccatcggtttgtgggtgacaagtggttgaaaataacaatttagtgcccaacttgctccacaaagtcctccaaaaatgacttatgaacttagagtccctatcactaacaatgctccttggcaaaccatggaatctcacaatctccttgaaaaacaaatcagccaaatgggaagcatcatcaacttttttacatggaataaaatgagccattttagaaaacctatcaacaaccacaaaaatggaatctctaccattgcttgtttttggcagccccaaaacaaaatccatggataaatcaatccaaggatactcccgaattggcaatggagtatacaatccatg

SEQ ID NO: 9988 - DNA, 217 bp, Glycine max
agctttcacatggatgtgcgattcgtttcttaatatatcgagacgctcgaaatcgaacaacggaagctctcgataaattccaatggtcataacatttcactcggatgtccgattcggggacataatatatcgagacactcgaaattgacaaccgaagctctcatgatattcaatgctctaacattcacacggatgccgattcgggacataactattt

SEQ ID NO: 9989 - DNA, 433 bp, Glycine max
taactaatcaaatgggacaattggctacgcagttaaatttacaacagtcccagaattttgaccgattaccttctcaatctgtccaaaatcccaaaaatgtgagtgtcattgcattgaggtcgggaaagcagtgtcaaggacctcaaccagtagcatcttcctcatccgcaaatgaacctgcccaacttcactctactccagaaaaagatgatgacaaaaatttaacgagtaagttacctaacaatttatatgcaggtgaatctttcactggtaattctgatttacagaagcagcatatccctcttccattccctccaagagcaatttccaacaaaaaaatggaagaggcagagaaagagatcttggaaacatttagaaaagtagaggtaaacatacctctgctggatgcaataaagcaaattccaagatatgc

SEQ ID NO: 9990 - DNA, 376 bp, Glycine max
agcttctgggaaaaatcctcgagttttctttatcaaaactcccagtgtttcattggaattaggtgtaacctacagcattgacaaattatctcataaatatatcacttcaaggttcgttgtttgtttctcacgaaacttattcaccattggaaacaaagaggatttacctttctccaactatgaccaagaaattcattcacagctatagcattctgtccatacatcagtggtgaggaccagtaaccccacagaaaccatttgtgcacattctctggcacatagaacaaaactatcataataaaggttcattacagtaaccaactttgaagttacattaccattttcttacctcgggaaatcacaaatccctccaaaa

SEQ ID NO: 9991 - DNA, 295 bp, Glycine max
agcttctatagaaggttcgttcctattttctctacaattgcatcacctctcaatgagctggtgaagaagaatgtggaatttacctggggtgaaaaacaagagcaagcctttgctttgctcaaagaaaagcttactaaggcacctgttctagctcttcctgacttttctaaaacttttgagctagaatgtgatgcctctggagtgggagttggagctgtattgttacaaggtgggcaccctattgcttattttagtgaaaaacttcatagtgccaccctcaactaccccacctatg

SEQ ID NO: 9992 - DNA, 375 bp, Glycine max
cctcgaaggtaaactagatgccttggttaacctggtttcctttttggtcatgaatcaaaaatctgcacctgttgccagactctatggtttatgctcctctgccgaccaccacacagacctttgcccttctgtgcaacaatctgaagcaattgaacagcctgaagcttatgctgcaaacatctacaatagacctcctcaacttcagcagcaaaatcagccacaacagaacaattatgacctctccaacaacaggtacaacccctggtggaggaatcatcccaaccttagatggttgagtcctttacaacagcatcaacaacaacagccttatttccagaatgttgctggcccaagaagaccatacgttccttcacc

SEQ ID NO: 9993 - DNA, 258 bp, Glycine max
agcttcaagagatcatcccctcgatttctttattggtgatatctcaaaaggggtaacaactatacattctcttaaagatttatgcaataatatggcctttgtatctatgattgaacctaaaaatataaaagaagccatagtagatgataactggatcattgccatgcaagaagaactaaaccaatttgaaaaaaacaatgtgtggaaattaatagaaaaacctggaaattatcctggcatagggacaaaaagggtttt

SEQ ID NO: 9994 - DNA, 322 bp, Glycine max
gaattctcaagcttcaaacctgcaacaaaagagttgagcaggtaaaaaagattcctctttttactcttagaggggactttgagcgtctgtttatggaggagtctgactcaatctctgattatttttctcgagtattggcccgcctcaatcacacttaaaagaaatggtgaacatgttcttgatgtgaaggtcatggaaaaaatacttcgaactttaaatcctagttttgacttcattgttaccaacattgaagaagaccatgatttatagaccatgactattgagcaactcatgggttctttactagcgtactaagaaaaac

SEQ ID NO: 9995 - DNA, 365 bp, Glycine max
ccttaagctctcacaccatttgaaaaagactcttataaccatttcaattacactcttgtggagcatgtgcctccactattccccaccaacagtctaccatgacaccatcaacatgtactaatttcaacaccttcagctgctttagtagatcatccagatcaactagctcacatttaatattgatcacccctaactataaaacaatatacacagaatgttcctatataatggtagattcatatttaaagataatttcctaaagaaaattagagtgtttcctttcttatactaagaatatctctcaaactctaatttcattcgaggactatcattcactgatattgtgattctcattagtcaaatta

SEQ ID NO: 9996 - DNA, 297 bp, Glycine max
agcttgaaattgaacaacggaagctctttagaaactcaaatggtcataaattgtcacacggaagtccgattcaggcgcataatacatcgagacgctcgaaattgaacaacgaatgctctcgagaaattcaaatgatcataacttttcaaacggaagtctgattcaggtgcataatatatcgagacactctaaattaacaacgaaagctatcaagaaactcaaatggtcataaattgtcacacggaagtcctattcatgagcataataaatcgagacgctcgaaattgaacaacgaat

SEQ ID NO: 9997 - DNA, 501 bp, Glycine max
tgttaataattaaaaaacaccaaacctacaaatacattttcttttaaaaattaagaaaaataaacaacatggtaatgatagaaatgtgcataaatcaatgtcgattaatgaatatatcaaaaattaaaataaatttaataaagaacatctaatacttttgtttctctataaaattgaaaatataatacaattagaatatattaataaaaattaatgacacgtataataattaattgataatatctccttttaaaaaaaatctgaaagtagaataattcatcaatttctacatcaattatttattatataaacaaatataatgatcttgtatataaatagaacaaaaaaaaaatacaatgaaaaaaaattacttgttacgaataaaaataaaattaaagaaacaagtctcacgaaaaaagtgtatatgaatggaatgtgacaacaaaatatgcaacaaattgtattaaggcccaggtttttggaatgaaacaaaaaatgccc

SEQ ID NO: 9998 - DNA, 285 bp, Glycine max
tatgcagagaatatccaatgtatataccttcatctgacttaacatcaaatttttctaagttatcttttccattattcaatacaaaacatttacaaccaaagatatgaagatgtgagatgtttggttttctgccattgaacaattcatatggagttttctttaaaatgggtcttattaaagccctatttaaaatgtagcatgcagtgttaacggcttcagcccaaaagtattttggaagaggagtatcatgtttatgttcaatgacacacttttgagaataaatga

SEQ ID NO: 9999 - DNA, 505 bp, Glycine max
agcttatctttcagagtctgaaaagctttctagcattcatcatcaagcttgaagactgcctctttattcagcaagttgctcaatggtttgacgattttagagaagtccttgatgaacctctgatagaagcctgcgtattcgaggaaactcccgatacccttggcatttattggtggaggtaaattctcaatgacatcaattttggctttgtccaccttaatgcctcaggctgaaatcttgtggcccaatattattccttcttggaccatgaaatgacacttctccttattcagcaccagatttgcttcaactcatcttcgcaatacgagctctagattagtcaagaagtagtcaaaggaaagcccaaaaattgagaaattgtccatgaagacctttatgcacttttctaccatgttctgaaaaaatagctagcacgtacctcttaaaaggttgttgtgcattacataaccccgatgacatctttttgtatgcaaagaccccaaag

SEQ ID NO: 10000 - DNA, 351 bp, Glycine max
ctgggttcgatggccccaatgacatctatcccctacattttataaggccaaggggcggacataacattcagaggatgtggcggaacattgacattgtccgcgtatgcttgacatttatgacatttccttacatgggcgcagcaatcgctttccatagtgagccagtaataaccggccctaaggatcttcctggccatagcatgcccattggcatgtgtcccacatgaacccccgtggatttcctcaatcatgcagattgcctctttggcatctacgcatcgtatgagggtcatgttggggtttcgtttatacaggatggtaccacttacaaagaaaccaatatccaatctc

SEQ ID NO: 10001 - DNA, 361 bp, Glycine max
agcttgtgctattccaagttcattaattatacctttaagccagattgcttcgttcactccttcaactaaggccatgtattctgcttcagttgttgaaagggcaacaactgattgttgatttgcttttcaactgattgctgtaccaaacaaagtaaacacatatccagttaaggactttcttgtatctacgtttcctggaaaatctgcatctacatagcctgtgattgctgcttcatgtgttgtcttcttgtaccttaatccagctttcaaagatccatttagataccttagtgttcacttcacaactttccagtgtatgctgccaggatctcccatgaatatgcttataatacttacagca

SEQ ID NO: 10002 - DNA, 393 bp, Glycine max
ggcctaggatcttcttcatcaatgggatttcttttgtctcttggaagatgaatggcagcggaatggagaatgaatagagagaggagacgccacttctaggagaagatgagtttataaaaagctcaccaccataggaggtcatggataagagcctggaggaagaagatgaatgaagggagagggagagaagagcacgaaattttgtgctctaaaagagctctaaaatctgaagtttaatattcaaatgatcaaagttgaaaaaaatgaacacacatgacctttatttatagcctaagtgtcccacaaaattggagggaaatttgaatttcaattcaaatttcactagaatttgaaattgaatgtgtggatccaaaatttcactaagtatgatta

SEQ ID NO: 10003 - DNA, 457 bp, Glycine max
  unsure at all n locations
gcgatccttaacgcactgcggctgcagcttntgaaactggaatcatttatcctatctccatcagccaatgggtgagtcccgtccaggtagtcccgaagaagaccgacctcacagtgatcaaaaatgagaaggaggagctaattcctactcgggtgtagaacagttggagagtctgcattgactataggaggctgaaccaggttaccaaaaaggaccattttcccctgacattcattgaccagatgcttgaacgcttggcaggtaaatcccactactgtttccttgatggtttttctggttatatgcaaattactattgctcctgaggatcaggaaaagaccacattcatctgccccttcggcacttttgcttataggaggatgcctttcggcctgtgcaatgcccctggtaccttccagcggtgcatgattagtattttcaatgatattttagaaaa

SEQ ID NO: 10004 - DNA, 415 bp, Glycine max
  unsure at all n locations
agcttgccgccacggagnntttttactattctcttgtgnggnggaacaagctacaaaaggagagaacaagaaatgaagagccaatggttggtacatggatggagatgaaaaagatcatgaggaagcggtatgtgccggctagttactcaagggacttgaaattcaagctccaaaaactaacccaaggcaacaagggggttgaggagtatttcaaggaaatggatgtgctcatgattcaagcaaagattgaagaagatgaggtgatcaggatataaccaagggcaaggaccatgaagcacttgaagggcccatgaccagaggcagacttaaacaagcccaacacttcatagagacaaggctggtcatttgtatagctgccattgatgatgattgaaggcctaagtggagaaagatg

SEQ ID NO: 10005 - DNA, 431 bp, Glycine max
  unsure at all n locations
gcttccaagattattntgatgatgccatttattatttaatatccattcaaacaagattaaagaaatcaagaagattcaagagaagacttaagatatgtaagaacctcaagaaaagcatcaagataagtataaaaagaatttttcaaagaaaagattgaataacacaatttgtccaaaagaatttttcaaagaaaaatcttttaccagagtttttactctcttgtaatcgattaccataaggcagtaatcgattaccagaagcccaaaacagttttataactgttttacaaagtagtaatcgattaccaatgtttttgaacgttgaatttcaaatctcaagagtctcaacttgtgacaaaatattttcaaaacagtgtaatcgattacacaatatttgtaatcgattaccagtggtttttgaatgttggatt

SEQ ID NO: 10006 - DNA, 427 bp, Glycine max
  unsure at all n locations
agcttgaggcacaatggtagccacaaagctgattattctgcatagctgcngcatgggaagaagaggagaagaccaagtgttgtcttaggtaactcaaccttaatagtttcagtgcattgaataactattttcaataacttctgacacattttcaataaccttaattatcaatttgattctcaaatttttaaaaggttcaatttaatgctcaagtttttaaagatgaaatcaatttggtcttcaaattattttaaatattttaatttggtctttaagttcttaaaaatttgaaaatcatattgattcatttttaaaaatttgaaggttcaattgattcatttttaagaatttgaggactaaattaaaccttttaataatttgnggatcaaattaatttatttttaagaacttatgatcaaattgaacc

SEQ ID NO: 10007 - DNA, 406 bp, Glycine max
  unsure at all n locations
agcttgcattcgactaacccatattacaattctactagaaaatagtcttttaacatcggttgttttcgattttcaacatcgatgtttaaccgatgttgaaaccaccgacgttaacattatcaatgctaacattggttttcaaaaaaccgatgttaatatacactacacgacatcggtttttaagaaaaaaccgatgtcgtatagtacaaaatgtatgaaaaacaaatactacaataaacaacatcggttttagtcaaaatcgatgttgaattgcgtattctgaaacgcttactacatcggttatgaacaaaccgatgtagagagtacctttacaacatcgattattggaagaattgatgttaaatgtgcttatgatatcagntttagtacaaactgatgtagaaaa

SEQ ID NO: 10008 - DNA, 333 bp, Glycine max
  unsure at all n locations
agtctcacgatagtcacgtgcttttcttttangttagccgaggctatacgagacatacttgccaacaaagtcaggttaacgataactcacctatgctctttctttcattctatatgtagcaaagtcattgatccagtcatatttgatgagttggaaaatgaggccgcaattatactgtgccagttggagatgtatttcccccttgctttctttgacatcatgattcacttgattgttcatctggtcagagaagcagaagaagccattgaattttgttcagaatacttagagaaggctaaacctgttgggctttctgagtctcggcatgatgac

SEQ ID NO: 10009 - DNA, 368 bp, Glycine max
  unsure at all n locations
ttcccttattttcaggctaaactttcctctgtcctgaggacttatcgagatacactgactgctgatatgaagagtgctattaagactgctgttgctgagttgcttccggttcttgcttctcgaggttcagagtcagaattcttttctggagacagagctgtggatgcagatggtgagaatttcgctagcataaatgattatgtttgtctgtacgagaaaatatacttttaatatctttcttccatcgtggttttatgtgatctgttctactttcaactttctaatgctaaatagtaactcaggtggaggtgcatcacttgctancaagttgcggagcctatcatctgactgttttgcgcatcttctga

SEQ ID NO: 10010 - DNA, 411 bp, Glycine max
  unsure at all n locations
agcttggtggctagttcatggctttaattttccaatacttcaaaaagattgcccttaagctacttgcgcaaccttgttcatcttcttgttgtgaaaggaattggagtacatattcatttatccattctttaaagagaaacaagatggcaccacatagagctgaagatttagtatttgttcatagcaacctacgaattctctcaaggaatactccacaatatcatcaagaggaaactaaaatgtgagatgtaactggagatgattttgggtcacttgatgattgtggtattcttgaaattgctagtttgtctttagatgaaccagagttagagggtgtctttttcattgatgattgctagtttgtgaaattcgtgaagacttgaagttgttaattcatcatcttgctntata

SEQ ID NO: 10011 - DNA, 423 bp, Glycine max
  unsure at all n locations
agcttgactntctgaggatgacatacttatgtaagtttcttgttgtccctctccaccatgatagagtgtccaagcaaaaccatcaatttattattgacaaagttaatcaaaggttgagcaattggaaaacgtccaatttatccatagcatgtagagtaactttaacaaaagttgttattcaagccatgcatatctatgtgatacaaactactttattactgtcttcggtgtgtgaagaaattgaaaaaaatgttgtaattttgtttggggccacacaaatacctctagcaaaattcattggcgaaattgagattctctatgcattccaaaaagaaatggcgaccttggtctgaggaaaactagtgttatcaaccaagtttttttaatggaggtggggtggaaattatgtatgcgacctaatga

SEQ ID NO: 10012 - DNA, 421 bp, Glycine max
  unsure at all n locations
agctntntattttctgtagattaagatgattctgtggccacctcatggactcctctaagaacaatagcatcatttcttgcactgaattgttgggagttggaagccatcttctcaatcaaattcctagcctcagcatgagtcatatcaacaagggctccaccattggcagcatcaatcatactcctctccattttgctaagtccctcatagaaatattgaagaaggagttgctcagaaatctagtggtgagggaagcttgcacacaatttcttgaatctttcccaatactcatacaagctctctccactcagttgcctgatgcctaaaatgtcttttctgatggtagtggtcctagatgcagggaaaaatttctccaagaacacccttctaaggtcatcccagctgaaaatggacttgggag

SEQ ID NO: 10013 - DNA, 313 bp, Glycine max
  unsure at all n locations
gagtcccgtaatatatcgagacgctcgtaattgataacagaaactctgagcatattcgaacgacaataactcttgactcaaatgtccgcttgtgtcccttagtatatcgagacgctcgtaatagaaaagggaagctctaagaataatcaaacgacaataacttntaactcggatgttggatagagccccgtaaaatatcgagacgctcgaaattgaaaacagaagctctgagcaaattcaaacgacaataacttttgactcggatgtccgattgagtcccataatatatcgagacgctcgaaaatgaaaatag

SEQ ID NO: 10014 - DNA, 441 bp, Glycine max
  unsure at all n locations
cttgatgttgttagtcgntcattggatgtcgagagtgtcatcttgttggattctgagaagaagatcaataaaatcttggtcctctaattcagctccatcttcttttgcaattntgttcttttcttgatgctctctgatgatgttttccaggaccttgtcaacctgcttgtgcaacttcttcaatctggtcatctttccagttaggaaatataagaatggaattgaaggaaagacatcagcaaggtcgaatcctcccccggattctacgattnttcggatcaaagacacaacaaactcatcttgctccttgtatatgccaccgaatgctaccctggaaatagaggcacatatcaatgagaaaattctactggtgagattgataggcgaaccagcagattcgcgaatggagttgatanactntgctgcctcgtcttctctaat

SEQ ID NO: 10015 - DNA, 413 bp, Glycine max
agcttttcgagaaaatgaaataattatgtatgtgatctagagcaacttacttatttgaagttggtgatcaaagagacattcagggtacacccacctactcctttattgctccctagagaatgctctcaaccaaccatcattgatggctatgaaatacctgccaaaactaaagtcatggtaaatgcatacgcaatttgtaaggattcccaatattggattgatgctgataggtttgtccctgaaaggttcgagggtagttctatcgatttcaaagggaataactttaactatctcccttttgggggaggacgaagaatatgcccaggcatgacattgggtttagctagcattatgcttccactagctctactactgtatcacttcaactgggaactcccaaacaagatgaaacc

SEQ ID NO: 10016 - DNA, 303 bp, Glycine max
ctcagctgaacccattacgtaatctctcgggtgttgagggtactttttatggatttttcacgtatttcgtgaaagactactcttgctaacgaaatattatcgtgtagagcaccctgttgttgtaacatctcaatgatgtgccaagcaatagcttcttcctcacgatctggatccgatgcacgaataaggtgttctgctctgtcaaataacataaaatgaattaagcaggatacatgctgtcgaccacctatgatgcacgtatactttcaaaatggcagcatatacatactggacctgtgctac

SEQ ID NO: 10017 - DNA, 424 bp, Glycine max
  unsure at all n locations
agcttccagattggtataccatgccactgttgctcctgctaagctgnctngaaagaaatgcatcaacaacttttcgtccgtagaatatgcccccatctttcggcaatacatccgaagatgtccttttggacatgtcgtccctttgtatttatcaaaatctggtactttgaacttgggagggatgacgatgtcaggtaccaaacacagatccgccaaatctgagaacgggtagttgccgaggccttctagcgccctcagcctctcttcaagtaaatcaatctttcccttatcttttgcaaagggaacggattctttaacgggtgcgggtggagacgggacatggcggactatgtttggttggggcaattcatgggggggcggatccttgaggggcagtagagggcctagacgggcatcttcttca

SEQ ID NO: 10018 - DNA, 291 bp, Glycine max
  unsure at all n locations
tactagnggagcattagaactaacgaattccgtaataacttccttagaaaggactttctcccgaacaaaatgacaatcaatctcaatatgtttagttctctcatggaatactagattaaaagctatatgtagggttgcctgattatcacaacatagcttcgcttgttgagtatttccaaacttcaattcttaaagaaagtgtttaatccanatgagctcacaaggggctacaaccatagctctatattcagcctctgcactagacgttgcaacaacattttgcttcttact

SEQ ID NO: 10019 - DNA, 402 bp, Glycine max
  unsure at all n locations
agctcgacacagnncnnaccttataccaattgtaaatngcaagcactacaaaaaaaagcagaatgacttgccatgcaacttgggacattagcacaatgatagtcattaactagataagtgcaaacactagtccagctaatttgtatggtatgtctgtgtctacagtactttgatccgtttatggctataatcatcaacaaaagaatggttgaaatcttattaaagctgataataatcaaaagatagcagtaatctatcaaataaagaaataacagtgaaactgaccctactcgtaatttggcttgaaggtgtggtgtcaaaaaatgaaacatgtgcccttaanacaatccttcctagtatgaagatggtgccaccaaaagatagaagagcaaatgttcccat

SEQ ID NO: 10020 - DNA, 387 bp, Glycine max
  unsure at all n locations
tgtgggttggaagtccaagtagttatcgcttacattcntattttgattgcaaagnctgntattgaggctttgcctatctactctatggtgacaaataaaattccatggggaattatcaacaatattaagaaggatgagagatcttttatttgggaagatcaagtgggaagaaagaaaatgcatgctataggttggaacttgatggctcggcctaaagcttatggaggggtggctatgtgaaatctcaagcataagaattctgctagtttgatgaagttagggtggtttctcagaaatgatgtgaacaacttatggtgtcaggttcctaaagggaaatatgcgagacaagatttctctgcaacatgtttggtagccaagccacatgat

SEQ ID NO: 10021 - DNA, 414 bp, Glycine max
ctgcagctttctttttggcacatctattctttttttgtgtagaatgaagcttgacaggttcaggtgcaggtgatactactggtggaggcacttgaatttggttgtcagacctcaaggtgatggcactcacattttttggattctgcacagtttgtgaaggcaatttgtcagaattttgggactgagcttggttcatctgagtagccactgccctatctgatttgtcatactttgaatggaggctcttgtctcttgctgaaattgcatatcctggatgatcatttgcctcactaactcttctaaggaaggttgaggaggagcctcaactgcttgttgtctttgttgtgactactgctgttgttgctgctgtattggaggaggaacatatggcttgcttggaccaacaacattctg

SEQ ID NO: 10022 - DNA, 431 bp, Glycine max
agcttatgctgcaaacatttataatagacttctcttattatcataaccaacaacagcaaaataattatgacctttcaagcaatagatacaatccaggtttgaggaatcatccaaatctgagatggacaagtcctctataacaacaacagcatgtccctccttttcaaaatgttgttggtccaaacaagccatatgttcctcctccaatacagcagcagcaacagcaacagtcacaacaaagacaacaagcaactgaggctcctcctcaaccttccttagaagagttagtgaggcaaatgaccatccagaatatgcaatttcagcaagagacaagagcctccattaagagtctgacaaatcagatggggcagatggctactcagatgaaccaagctcagtcccaaaattctgacaaatttccttcacaaact

SEQ ID NO: 10023 - DNA, 367 bp, Glycine max
tgtctctcaatcaagttcctgtgaaaagaaagtttcttattggtgtgataaaaatactaagattatgttgaaagtgtgcatagaagaggtgaatgttggaaataaacctcacaaccacttcactaagcttggttgggcaaatattgcagaaaagttcaataagacaacaaatttgagatatgaatataagcaattcagaaataggttggattctttgaaaaaggaatggcaattatgggccaagcttattgggaaggacacaggtcttggctgggatggggagaagaaaaccattgcagctagtgatgaatggtgggaagccaaaattcaggtatgtgttattcaactgaaaccattgcagccttct

SEQ ID NO: 10024 - DNA, 424 bp, Glycine max
  unsure at all n locations
tcctcaagtccctccaccagtaggaaaatccctntttgtctcgttcttctggaactctgtccaacctccatatttggagttaatgattctagcccataaatgctgctgaccagaagctaaggcccatatccatttgcccaacaaagctacattgaatttagatatttatttaatccccagacccccttcagccttaggaaggcaaataaccttccattttacccacggaattttcttgtaatccttttctcccccctataaaaaattcctttgcaatgctaccaatctatgagctaccttttgaggaatcttgaagaaagataagaggtaaattggtaaagcattgaggacagaatttatcagagagacctttcctgccatggatatatntttttgtgcccacttggataatttagattcacat

SEQ ID NO: 10025 - DNA, 410 bp, Glycine max
  unsure at all n locations
agctttctctcatcattgctcattctntttgttatttcaacttgcacacgaaccaattgatcacccctcatattgtctttattcaggaagggaacacctttcttagccataacaagtgttgtgttcggttgtgtcccagcaggaattttcaaatcgaccgttccatctacagtaggaaccttaattgtagtccccaggattgcatcaatatacgaaaccttgcaggtgtataaaatgttggtgtcatcacgtttaaggatgggatctgggataacctcaataactacaaagaggtcaccaggggaaccacctttccttccagcattcccctcattccggacccttagacgactaccagagtccacaccagctggaaccttcagacttatccgttttgatttccttacccg

SEQ ID NO: 10026 - DNA, 440 bp, Glycine max
  unsure at all n locations
tcttggcaatcctcattccagcgatcagtntggtttttgcttaagagcttgaacagcggctcacaaatggcgatgagctgcgagatgaatctggcaatataattcaagcgtcccacgaaacctcggacttgcctctctgtacggagttctggcatctcaaggatagccttcacctttntggggtctacctctatccctttctggcttacaatgaaaccaagtaatttccctgatttgaccccaaaggtacacttagcggngttcaaccttaattgatatttcttaagcctttcgaacaacttccgcaggttgacaaggtgttcttcctcggatttagatntagcaattatgtcgtccacgtagacctcgatctcttgatgcatcatatcatggaaaaaagctaccatggcccgttgataagttgccccgacattcttgag

SEQ ID NO: 10027 - DNA, 418 bp, Glycine max
  unsure at all n locations
gtcttcgcttccatttgttttatggagaaacctgatgatggtattaatggacactggtagcnttcacaacatcatgcaaccaagattggccaaacatttgcaacttcccatttcaccgattaaaactttccctgttatgattggtgatggaaatcatttaatttgtaatggtcaatggactaacgtgcctcttttagtccaaaaccatttgtttactttaccattttatttgttacctatccagggagctgatttggtattgggtatggaacggttgagaactttgggccccattatttctgactntgtagtcccttgcacgactcttacttacaatgattgctccattactttaaaaggggaactattaaatcctcaatttaccacttttcagtaactctgccacctcatgcatact

SEQ ID NO: 10028 - DNA, 421 bp, Glycine max
agcttcttcaggtgttattccttccaatctctttatttggctcctattcaagatgaagacaactgtagacactacctctccccacaagtacttgggcagactcttgcctttcaacatgctccttaccatattcattatggttctattttttctttctgcagctccattatgttgaggtgtgtagggaggagtcacttcatgaattatgccttcttgatcacaaaattcttgaaattctacagaaacatattcaccaccaccatctgttctcaatatcttgatcaatgagccactttgcttttctgccatatttttgaacttctcaaagacttcaaagacatcactcttccttcttattaggtaaactcatactttcctagtcaattcatcaataaaggatatgaagtatctgtttccaccc

SEQ ID NO: 10029 - DNA, 403 bp, Glycine max
agcttatcctgaccccgagagttatatgtttcttgtgggaaaactcatttaccttaccattactagacctgatatctcctttgctgtgggagtggttagccaatttatgcagaatcctcatttggaccattggaatgctgttatgcgtattctgaggtatgttaagaaagctcctggacaagggttgttgtatgaagacaagggtagtacgcaactatcaggatattgtgatgctgattgggctggatgtcccatggataggagatctacatcacgttattgtgttttcattggaggaaatctaatctcttggaaaagcaagaaacaaactgttgtcgctcggtctagtgcagaagctgagtatcgatctatggctatggttacatgtgagctcatgtggatc

SEQ ID NO: 10030 - DNA, 288 bp, Glycine max
agcttttaactcggagggccgtattaagctcatattatatcgagacgctcgaaattaaccaacggaagctctcgagaaattcaaaggggcataacttttaactcggaggtccgatccaagctcataagatatcgagacgctcgacattgaacaacggaagctctcgagaaatacaaatgctcataactcttcacacggaggtctgaggcacgcgcataatatatctagaccctcaacattaaacagcgggagctctcgagaaattccaatgggcataacttttcactg

SEQ ID NO: 10031 - DNA, 452 bp, Glycine max
  unsure at all n locations
tctcattgacatacagtcgatgctttttgctgtcgatctccatgtcctccccatttctggtgcctatgtagtgttaagtgtccaatggcttaaatcattgggtccactactcacagattataacatcttgtgcatgcagttcttctatcagggacgcatggtggaactgaatggtgatcaggatgacactccgaacttcatcacactgtcacaattttggcgaatttcgcagacccaagctttaggactgtactaccacatcacacttctatcgaaggactcgcccaacccacaggaccttcacccagatattcagtccctcctgactaagttcgcacacttngttcaccaacccagcaccttgtcatcgaagtaggacaccgatcatcacattcatctcctccctcagttcactccggtcaacgtgagaccgtatcactacccacacttct

SEQ ID NO: 10032 - DNA, 428 bp, Glycine max
agcttctgctgcaaacatttataatagacttcctcatctcaaaaccaacaacaacagaataattatgacctttcaagcaaaagatacaatctaggttggaggaatcatccaaatctgagatggacaagtcctccacaacaacaacagcctgtccctcctttccagaatgttgttggttcaagcaagccatatgttcctcctccaatgcagcaacagcaataacagtcacaacaaagataacaagcaactgaggttcctcctcaaccttccttagaagagttagtgaggcaaatgaccatccagaatatgcaatttcagcagaagacaatagcctccattcagagtttgaaaaatcagatggggcagatggctactcaattgaaccaagctcagtcccaaaattttgacaaattgccttcacaaactgg

SEQ ID NO: 10033 - DNA, 327 bp, Glycine max
gccctgatgagactaatgaaggaggtatagatgttgaaattaagctaaaggagttagaacaaaagtcagctgaagtcagtaccgagtggagtattgtccctggacgtggagggcattccactctggtatttatttctgtctaattgaatttgtattctctttaacaaccgaggaatttttggcctgcccaattaatttgtttactttctatgttgactttgtgtaagcttcccttcagccaggtggcactggtagttttgaacatcggaatctgcaagggctgaatagatctattaacggttctataacaacaagcaacttcttgaa

SEQ ID NO: 10034 - DNA, 390 bp, Glycine max
  unsure at all n locations
aactaagctgctaatgaataatgacataccgcataagggttaggatagtctcatagcattgnggagtgaccaagctgaggccctgtggtcgacacacacggcaatgatcacgcattgaaagcttgccatgaaacacattaagccattgctcgtgtaatgagctggaaatgtcttgcttatgtctttctgaaaaacgtaatgatataataattctcttaaagaggaaaattaaactagttaagatagattgatgcttaattacttgaattatgaaccatgctgcccagacaagggtgctaagaattacgaccaaagggcctaggaacatgtttcctttgccagaagagctagttccttccaatttctcagcatatcttcagtgaatacttg

SEQ ID NO: 10035 - DNA, 407 bp, Glycine max
agcttctagaggctgggcttatttatcctatctctgacagcgcttggataagcccagtacaggtggtaccaaagaaagggggaatgatagtcatctggaacgagaagaacgacttgataccaacattgactgtcactggttggcgaatatacatcgacttcgactaccgcaagctaaatgaagccataaggaatgatcattttcctttacccttcatggatcagatgttggagaggcttgtaggtcaggcatatattgctttttggatggatattcaggttataaccagattgctgtggaccccaaagaccaagagaagacggccttcacatgcccttttggtttgcctatagacagatgtcatttgggttatgtaatgaatcagccacattccaaaggtgcatgct

SEQ ID NO: 10036 - DNA, 428 bp, Glycine max
  unsure at all n locations
tatgctgcanacatctacaacagacctcttcaacctcagctgcaatttcatccacaacaganaaattatgacctctccagcaacaggtacaatctcgggtggaggaatcatcccaaccttagatggtcgaatccttcacaacagcaacaacaacaacaatagccttattttcagaatgttgctggcccaagcagaccatacgttcctccactaatccagcagcaacaatagcaacagccccagaaacagcaaacagttgaggctccactgcaaccttcccctgaagaacttgtgaggcaaatgactatacaaaacatgtagtttctacaagagaccagagcctccattcaaagcttaactaatcagatgggacaattggctacacagttaaatcaacaacaatcctagaantttgacagaataccttc

SEQ ID NO: 10037 - DNA, 408 bp, Glycine max
agctttctccactaagttgcctgattcctgaaatgttttttcttatggcaatggtcctagatgcagggaagaatttctccaagaacaccctcttaaggtcatcccaattgaaaatagacctgtgagcaaggtagtatagccaatcttttgccactccctctagagaatgaggaaaaacctttagaaaaatatgatcttcttggacatcagggggcttcatggtggaacaaacaatatggaactccttaagatgcttatgaggatcttcacctgcaagaccatgaaacttgggcatcaaatgtattagtccaatgttgagaacatatggaacaccctcatcaggatattgattacacaagctttcataagtgaaatcaggtgcagccatctctctaagagtcctctcac

SEQ ID NO: 10038 - DNA, 561 bp, Glycine max
ccgcttcttagtttcagatgatgcagatgggtttgtagctattttatgcactcctctaatgactatggcatcatttctggcgctaaactgctgggagttggaggccatcttctcaattaaatttctggcttcagcaggagtcatgtctccaagggctccaccactggcagcatctatcatacttctctccatattactgagtccttcataaaaatattggagaagaagctgttctgaaatctgatggtgggggcaactggcacatagtttcttaaatctctcccagtactcatacaggctctctccactgagttgtctaatacctgagatatccttcctgatggctgtggtcctggaagcagggaaaaatttttctaagaatactctcttaaggtcatcccagctcgtgatggaccttggagcaaggtaatacagccagtcctttgccactccctctaatgaatgaggaaaagccttcagaaatatgtgatcctcttggacatctgggggtttcatggtggaacagaccatgtgaaattctttccaatgtttgtgcgggtc

SEQ ID NO: 10039 - DNA, 585 bp, Glycine max
ccgcttgtaggccttggatcttcttcatcaatggagtctttctcttcttaaagtttgatagcagcgtaatggagaaggagaagggtgattggagatgccacttcaaggagaagatgagtctagaagaagctcaccaccataggaagccatggataagagcttgaaggtaagagaagatgaatggagggagagggagaaagggagcatgaaatttagtgcctctaaagaagtttgaactttgaagtttaattctcaaatgatcaaagttgaaaaaatgcacacacatagcctctatttatagcctaagtgtcacacaaaattggagggaaatttgaatttctattcaaattttactagaatttgaaattgaaattgtggagccaaaatttcactaattatgattagtgaattttaactatggttcagcccactaatccaagatcaagttaaagattctccactaaatgtgcttaggtggcatgaggcatgtaaagcatgaaggacatgcacaaagtgtgactatatgatgtgacaatagggtgtagccagcaaatgctcacctcccctctaaaatttaattggatt

SEQ ID NO: 10040 - DNA, 521 bp, Glycine max
tcaaatggacatcacttcgtcttagtcgccatttgtttttcttcatcaaatgggtcaaagtagcttcatacgccaatgtgactaggagtgtggtgattagattcataaaaaaggagataatttgctgatatgggttgcccaggaaaattatcaccgattatgccaccaatttgaacaacaagatgatgaaggaaatgtgtgaggatttcaaaatccaacaccataattccacaccttacaggcctaagatgtatcgtgcagttgaggttgctaataaaaatatcaagaagatagtccagaagatgattgtgtcatactaggattggcatgagatgttcccctttgcgttgaatggttatcgaacttcgatgcgcacatctactgggcaacccctttttctttggtgtacgggatggaggctatgctcccgtttgaggtggaggttccttctttgagaatcctatccgagtcggggttggaaagattcgaatgggcccaagctcgctttttgatcagttgaa

SEQ ID NO: 10041 - DNA, 487 bp, Glycine max
ggaagccgaacagcggacgctctacgaaaactgcattttttataacttatcacacggaggtgcaattgaggcgcataatatgtccagacgctcgaaattaaacaacgaatactctcgagaaattcacatggccgtaacttatcgcacggaagtccgatttaggcgcataatacattgagacgctgaaaattgaaccacgaatgctctcaagaaattcaaatgggcatagctaatggaacgggaggccgatttatgcgcataatacattgagaagcttgaaattgaacatcggaagctatcaagaaactaaaatggttggaaactgttacacagaagtgcgactcaagcgcataatacatggagacgctcgaaattgaacaacgaattctctcgagaaattcgaatggtcataaaatttcaaacggaagtccgatttatgagcataatatagcgagaacgttgcaattgaaccacgaatgctctcgag

SEQ ID NO: 10042 - DNA, 469 bp, Glycine max
ttaaatactcagcttataattgcagcagccaatccttgaagtttcctgtttcttcctgtgaaataaaagaaaaaaagaaattaaacctaattttggtcaggtaaggaaaagtaggacaaacttacctaatgcaaaatggcaaggtaaaagtttgccaagtctcttcaatgtggtcatttcatcatctgttagtttaggattcacaccatatggaagaaagcgaaagggctttctataaccatgaataacagcaggcagaagatcagcatcaacaggcaaaggatcacctccccaccaatcagtaaatcgaggcccaagccctgttagcaaacagtctgtatcttctgcaaactctgcttcatctggcagttgaaatcgtactttattgtgagtaccaacacctattattaaagctggttttgctgtttcaccatttgaattttccacaccacatgcccctgaatttttt

SEQ ID NO: 10043 - DNA, 520 bp, Glycine max
tgttataaatgttgtcaacataagggcccttgagttatttagtgaacttgtttgcaagttggtcactaaagccgacaaagttggtgatgatttctcctgaaagcaccttctctctcacaaagtgacagtcaatctctatgtgtttagtccgttaatggaagagcgaatttgaagcaatgtgaatagcatattgattgtcacatattagtttagtatcttgagtgtctccaaattttagctgttggagaagtttcctaagccatgtaatctcacatccagctgctgccatagcacggtaatcagcttcagcactagatctaacaactgttttttgcttcttgctcctacaagggatcaagtttcctccaatgagaacacaatatcctaaagtggacttcctatttgatggtgatcctgcccaatcagcactagaatagcaaacgatgacagcatcacaatttgtatgacaacatttcaatgactatcacatgcaaatgtgatatctggtctagtgacaatg

SEQ ID NO: 10044 - DNA, 511 bp, Glycine max
tatcaggtataaactatttaaaatcgtaaggaatttctttttataagattgaactgaaaataaataaattttggtggataaaaatcgtaacaaattgtgaaatcgtaaactcaatgaacaaagagggactaaaagtaacttttcgaaaatttgagggactaataaaaataattttttttgagaactaaaaaatacttaccgaaatttgaaagattaaaaatatatttaagccttaaatcaatcttataaaatcagcttgtaagatgaaagatgtcccacacttatatacactaatttgactatatctctagacaatgtgatctcgaacacaacctctcatgtcaaagataggatatctcgtgcgtgaagtttgcaggattggaagtttatgggtagtgtgatagatgtccggtagagggtggcacaataggcctaacaatagattgctaggataaactttgatatcatcttaaaatgtgggtttgaacctaactcaaccttaaaaactagc

SEQ ID NO: 10045 - DNA, 579 bp, Glycine max
tttacctctcgttttaactctcagcatctcctgactttcaatgtcaaagataaggcaatgttgattttcaaaaaggatactttaaatcctttttctatcaactaacctacgctaagaaaattttggtcaatatcgagtacataaagaacatatgagattgtctttatacctgaacttgttgagattacgatggctccttttccttttgccgaaatataaccaccgttcccaattctgatttttgagactttagtaggcttcaaatccttgaagagtgttttgtcatatgtcatgtggtttgtacaaccactattaatcaaccagcattctgaactactccttgctgaaaaagatgttgccacaaacatttgatcttcttcatcttgctctatgacctgcgcattgacttcatgctgtagaaacttgcttttgcacataacaacttcatgtacaaactgattgcatttgctgcactttgcatctggacttctcccgcatttgaatggcgggttacccattttgccacaatggtgacaaagtgggtaattttttcttatacccttacctttactttgggca

SEQ ID NO: 10046 - DNA, 601 bp, Glycine max
  unsure at all n locations
tgagaatgtgcctatgaattggtttttagctatgtttataaaccagccctgagagaatatggcgagtgaaattccgaatgacagattctattagggcaccacaatgatcacggacatatttattaattgaaccaggatgaacatattccagataaatataaaaacggtgctcaacctgcaagcacatatgttaagggtttaatgctggtacagaataatgattattaatcttgagtagctaattatgaagtaggagattgcttactatttcactgccaaaatactgtacgatgtttgaatgttttagattnctaagaactttaatttcctggagaaaaagaataaactaataagaaggataaagaggatatacaaaataacatatcttcaaaactattacggaacgataaatatatataggcaagcagcccaagccattattaataaaaacaacctcatcaagtattcaactacagtggacactaaaaccaaatgannnacctcacttgcaaatatatgatatcggccaaggcctacaatatatatatatatatatagggaaattaatagactagttaatctgagctgaacatcttaactg

SEQ ID NO: 10047 - DNA, 613 bp, Glycine max
cgccaattttggtctagatctaaatagacaattaattttttttttatgatgttcctcaatttttatcaaatgctattttagtggatgtgagttatgttgctttttcgcagatttttaattgttttttgggggtaatttcccctccaattcacccaaaaaaatgttaattgttatggaactattaaatcaatgcaaaaatggcagaaaaattaatataaatagataaactaagaaagcataaatctaatatgaacaaaaaaatcaccaactaagtcgaaaatgctactcaaaagtgtgatgtgaacatgtgaattgcaacaccctgaaatggaataaaacaaagaacatctttcagcgttggatgttaaaagaacaaaataataagccaataaatgttgaaccatataatgataataaaaaaatgtttatgtctatgcactaatagtgtaaaataattttatattgttatccaatcacaaatcacccttttgaattactttaagataattactttaaaagtcaacaaatttcccatgcatggtgtcttatgacatgatgtctgggttaaacattttacattggcagtgtataaccctttttcttataaaaaaaa

SEQ ID NO: 10048 - DNA, 484 bp, Glycine max
tccttaagaagattcctaaagaagctagagcttatcttcacatacctctctaatagctaagcttacctccttgagatgagaagctagagcttagctacacacctcctataatagctaagctcaccccatgacaaaaaacatgaaaattcaaaaaaaaagtccttactacaaagactactcaatagaatggccaaaatacaaggcccagacgaaggaaaaacctattctaatatttacaaagataagcgggctcatacttagcccatgggcttgaaatctaccctaaggctcatgagaaccctcaggccttcccttggatctctagcccaatctacttggagtcttctacccaatgcccttgtggggtaggattgcatcattccctccaccttggaaaggatttgaccttaaatcccgaggttcttcatactctgggctccttccctcaacacctgtaaaaataacaaaaacatatgtattagtg

SEQ ID NO: 10049 - DNA, 619 bp, Glycine max
tcatgagagagtcaaagatcaaattgagaggaattttttaaactatgctaaacaagccaacaaagggagaaagaaggttgtcttcgaacccggagattgggtttgggtgcacatgagaaaagaaaggtttccggaacaaaggaaatcaaagcttcaaccaaggggagatggaccatttcaagtgcttgaaagaatcaatgacaatgcttacaaagttgagctgcccggtgagtataatgttagttccaccttcaatgtctctgatttacctctttttgatgcagatggagaattcgatttgaggacaaatccttctcatgagggagagaatgatgaggacatgaccaagagcaagggcaaggatccacttgaaggacttggaggacctatgacaagggctagagcaaggaaagccaaggaagctcttcaacaagtgctgtccatactatttgaatacaagcccaagtttcaaggagaaaagtccaaggttgtgagttgtatcatggcccaaatggaggaggactaaatgacaccactttgtttcaattttagagtggttagtttgtctaaataatggcccaatccttgtaaagttggctgacccaaaatatgttttggg

SEQ ID NO: 10050 - DNA, 595 bp, Glycine max
tctaagttctaatagggtgataaagagcagaattggtttatgtgaaccacaagtatagagttactataatacactaaagctccattaaaaactgaaccatgagtacataatatactacattgcaactgcattaaacatgttattgttattaaccaatttcaggacctagaggaccctttcccttatttgtgagaaaactagcttaatataatctagttctataattaactaaggagttaagagaagctatcccaaaaacgcaatatcaccttcttatgtttgttcacaaagttgaatttggaattaactaagtgataaggaagggattccacaaattcattcatcctctaaggtgcttcgacttttttgaattctcttttgtactacataatcaggacatagctttttcccatgatggattctgcacatttttcctttctgggggcttgaagcctgcattaattcttaatgggacttgtttttaaccaaatgggcatgtgcattcttactctactgctatctcatctatttttgggtatatttacgtaacgtaaactcatttaacttcaaaatttcatttcatggtggggaacat

SEQ ID NO: 10051 - DNA, 468 bp, Glycine max
ccttaagaagattcctaaagaagctagagcttatcttttttacctctctaatagctaagcttacctccttgagatgagaagctagagcttagctacacaccttctataatagctaagctcaccccatgacataaaacatgaaaattcaaaaaaaaagtccgttctacaaagactactcgatagaatggccaaaataccaggcccagacgaaggaaaaacctattctaatatttacaaagatgagcgggctcatacttagcccatgggcttgaaatctaccctaaggctcatgagaaccctcaggccttcccttggatctctagcccaatctacttggagtcttctacccaatgcccttgtgggggaggatggcatcattccctgcaccttggaaaggatttgaccctaaatcccgagggtcttcatactctgggggtctttcctctacacctgggaaaataacaaaaa

SEQ ID NO: 10052 - DNA, 589 bp, Glycine max
tcatgcttaactatgtatgtcaaaacttcattactgttgttcaagacatacaagtgagcttgtaacaaatcttctacacttggagtgatcatatgcagtcctcttgaacccttaccacccactctgtcatcatgccgagactcaggaagcccaacaggtttaggcttctctaagtattctgaacaaaattcaatggcttcttctgcaatgtacctctcaacaatagatgcttctggtcaatatagattctttgtatactcttttaagatcttcatgtatcgctcaaccgggtacatccaccgtagataaacaggaccacaacatttgatttctttgaccagatgcacaatcaagtgaatcatgatgtcaaagaaagcagggggaaatacatctccaactggcacagtataattgcggcctcattttccaactcatcaaacttgactggatcaatgactttgctacatatagcatggaagaaaaagcacaagtgagttatcgctaacctgactttgtttggcaagatgtctcgtatagccacggctaacaattgttgcatgagcacgtgacaatcgtgagactttaaccc

SEQ ID NO: 10053 - DNA, 463 bp, Glycine max
tataacaaatctaaaacacaaagtttgaaaccaatttgttgactaaaacctcgcctatcttttcctctttttaaaagaacaagaaaaatacagaggaagggaatccctggaggaaaccaggaagaacaaaaaactcagaattgaaagaacatgcaatggtcctcttgattgccccatatttcaagcgtaatatcgtttaactacatcggagttcacgggcgagggcaattcctcgccatccatgtgggtgagtatcaaagcacccccacaaaaggctcttttcaccatgaaaggtccttcataatttggggcccacttgcctcgtttatctttaacagcgcgggaaatcttttttaacacgatgtcccccttgttgaacttgcgcgggcgtacctttttgccgaatgcgggctttatcccttcgttgagacaaacgcccatggcttatggcagacaaaacgct

SEQ ID NO: 10054 - DNA, 563 bp, Glycine max
tttctttgtacacctacattcctatacacgataaactttctttgtatacacatgtatgaaaaactctttctctttatatcaacacggtctatataacaactctattcctgttcaaagacttctttttcgtttttcaacatacaaatcgtggtttatacaaaaacttctttatatacactcatggctcacacacaagaattttttttcacacattatttacacacacacaaaatctttccatacactttttacatataaaaaaatattttcttttctttatatatagacacgacatttgttcacaacccctctttctttttctctttttttttattcttggcgttatcatgattttttgttcgttatatttttaggacgacgttcctaaaggaaaactctacaaggtttaagaatttcaacaaacattatcaacaataacaaagtaagcattaacgcaacaggccaaacaaaatgtatgcacaaaacaaaagacaatcgaaaaaacaaaacaaacgttagtcccttcagtcatagaaacaagataacattccaatgataaatga

SEQ ID NO: 10055 - DNA, 517 bp, Glycine max
tcaagaaaaagatggcctcagcaaattccttatttctataaggaaattctatcaacagacctccaatctttaatggagagggttaccactactggaaaacccgaatgcaaatttttatcgaggcaatagatctaaatatctgggaagccatagaaatagggccttatatacccaccacagtagaaagagtttcaatagatggtagttcatcaagtgaaagcataaccatagaaaaacctagagatagatggtctgaagaggatagaaaacgagtacaatacaacctaaaagccaaaaacataataacatctgccctaggaatgggtgaatatttcagagtttcaaattgtaagagtgctaaggaaatgtgggacactcttcgattaacacatgaaggaactacagatgttaaaagatctaggataaatgcactaactcatgagtatgaattatttacaatgaatgcaaatgaaaatattcagagtatgcaaaagagatttacacatatagtaaatca

SEQ ID NO: 10056 - DNA, 530 bp, Glycine max
  unsure at all n locations
actctatagaacactcgcgcgttgagaaaaatcaaacgacaataacttttgactttttgtctgattgactcccgtaatatatcgagaccctcgtaattgaaaacagaagctctgagcaaattcaaacgacaataactttttactcggatgtccgattgagtcccgtaatatatggagacgctcgtaattgaaaacagaagctctgagnaaattcaaacgacaataactttttactcggatgtccgattgagtcccgtaatatatcgagacgctcgtaattgaaaatagaagctctgagcaaattcaaacgacaataacttttaactcgggtgtccgattgtgtctcgtagtatatcgagacgctcgtaattgaaaacagaagctctgagcaaattcaaacgacaataactttttactcggatgtccgattgagtcccgtaatatattgagacgctcgtaattgaaaacagaagctctgagcaaattcaaacgacaataactttttactcggatgtccgattgagtcccgt

SEQ ID NO: 10057 - DNA, 518 bp, Glycine max
cccttcacaaagagaatcatcttgatatgataactttttttgtcctctgacaaggctatgcttttgaagctttgagattaaccttaagctagcatgaccaagcttcttatgtcaaacccaataatgctctttgactgaaagtaggcatgaaacttttggactagacagatcaccaagtttaatcttatacagatttccttgtgtcttagcctagaagagtgaagagttttccttgttctcaatgatacacatatccttgttaaaagtgacattgtatccactatcacataatttacttatgctaagcaaattatgcttcaaccctttaacaagcaaaacattatctatagaaagataaggaggaatacatactttacctacaccaattatcagacctttctgattccgttcgaaagtgaccaccctactaaaaatagggcttagggattgaacatagacttttcacttatcatgtgtcgtgagcaacccctattcatgcaccacgactgatgtttctt

SEQ ID NO: 10058 - DNA, 510 bp, Glycine max
tcatgatgatgaaccatgcaattttgatgatgccaattgctctaactagttgattcaagattgattcaagacttcagaatacaatccaagattcaagattcaagagaagaaatcaagaaccaacaagtcaagacttcatataggataagtattaaaatattttttcaaaaaccaaatagcacagttttgttttacaaaagaattttctcaaattttctaagttaccagagtgattactctctggtaatcgattactagttggcagtaaagtttggttttcaaaatgttttcaaatggtttacaacgttccaaaatgattttcaaatagtgtaatcaattacactatattagtaatcgattacaagtgaatctgaacgttggaattcaaatccaattgtgaagaatcacaacttttcataaaatgaagtgtgtaattgattacacctttgtggtaatcgattaccagtgaacagttttgaagaagaagtgaagagttattactcttaacat

SEQ ID NO: 10059 - DNA, 633 bp, Glycine max
ccgcttcatgatgaatcaaaaatgattcaaaggtgttttgatgataacaatgatgacaacaaaagataatgacaaaggtgatgaacaaaaagctcaaaagatcaaagaacaactcaagtgaatcaaagaacatctcaagtgaatcaagaacaagtcaagagttcaagaatcaagaagaattcaagactcaagaagaaagcctacaatcaagattcaagattcaagatctcaagaatcaagatcaagattcaagactcaagattcaagaatgaataaaagactcaatcaagataagtattaaaaagttttttcaaaactttgaatagcacatgagtttttgataaaacctttaccaaagagtttttactctctggtaatcgattaccatattgttgtaatcgattaccactagcaaaatgagtttgaaaaagttttcaaactgaatttacaatgttccaaatattttcaaactgtaatcgattacaatgtttttggaatcgaataccagtgtccttgaacgttgaaattcaaatttaaatgtgaagaatcacattgtttcactcaaaagctttgtgtaatcgattacacttattttgtaatcgattaccagtgtttgtttctgaaaaatctaaa

SEQ ID NO: 10060 - DNA, 468 bp, Glycine max
caccttccatcaagtgcggaccctcaaggaaatccaccattttttccatttttcggagccccataaatgttattgcctagcgctattcatgtgtcctccaccttcgagtttggagctatgtttcatgattgcctaagtgcggaccctcaaggaaatcctccattctccccctttttcggagccccatgaatgttattgcctaacgctgttcatgtgtcctccaccttcgagtttggagctatgtttcatgattgcctaaaagcggaccctcaaggcaatcctccattctccccctttttcggagccccattaatgttattgcctaccgctgtccatgtgtcctccaccttcgagtttggagctattgttacatgattgcctaagtgtggaccctcaaggcaatcctacattctcccccttttttggagccccattaatgtgattgcctaccgttgtgcattggtcctc

SEQ ID NO: 10061 - DNA, 301 bp, Glycine max
tgagctgtcgagaagcataggccactacttgtccccgctgaataagcactccacccaaacgcatcttatatgcatcacagtacaccacaaagggttcacttgggttaggtaacactaaaactggtgcagtggccaacctttccttaagggtacggaaactattctcacattgggcatcccacacaaaaactagacccttacgagtaagcttagtcaaaggtgaggctagcgttaaaaagccctctatgaatatacggtagattcctgctataccacagaaactccttatctcaaacactga

SEQ ID NO: 10062 - DNA, 364 bp, Glycine max
ggtattgacaagcgtgctattgagaggtttgagaattaagctgctgagatgaacattatgtcattcaaatacgcctgggtgcttgacaagcttaaggctgagcgtgagagaggaattaccattgatattgcattatggaagtttgagaccaccaaatactactgcactgttattgatgctccacgacatcgtgatttcatcaagaacatgattactggaacttcccatgctgattgtgctgtccttatcattgattccacaactggtggttttgaagctggtatttccaaagatggacagactcgcgagcatgctctactttgccttacccttggtgtcaagcaaatgatctgttgctgtaaca

SEQ ID NO: 10063 - DNA, 391 bp, Glycine max
  unsure at all n locations
agcttgttaggagctgtcggtgaataaaggtcctcaccatccatttcaattttctccaactccctaccacatatggtaaaaataaacattaacttctatcaaagacacattgaaaatttaacataaaaatccacaataaaaataagccttcagacanttggccagtacctccggataccagctcggcgttcttctttagggagtggaaatagtacaccagagatggatgtaactttgtcaaagaaatcaaactctcttttaaatatgtcaagtgcctttggattaaaaccatcaattatacgctgccttaccgctggcagcaggtctagaaatgaaccattctgaaataaaaatacagagataaaatctataaagtatgatgtaaaaaaaa

SEQ ID NO: 10064 - DNA, 331 bp, Glycine max
tgtaccttggaaacacatcaaatattcacttattagctacattggattgggcttctaccaattcaattaaatttattttcaaccacacacatcaaatattcacttagtgcatgtgaaattacaaaactacccctaatacaaaaaactagtctaggtgccctaaaatacaagggctgaaaaatcctatatttctaaagtactctacctacattatggagccctaaatacaaggcccaaaaataatgaaaccttaatctaatatttacaaagataagtgggctcatacttagcccatgggcccaaaatctatcctaagactcataagaaccct

SEQ ID NO: 10065 - DNA, 376 bp, Glycine max
agctttggaatatttcaagcaagagtttggagtgcacattgaagttacaaagatgtggagagctatgaaagaagcaaagcaactagtggaagggaatgagaggaaacaatatgccaaagtatttgattatgcacatgaattattaaggagcaatcctggatcaacagttaagatcaacacagtgccaagtccagaaggtccaccacaattgcagaggctatatatttgtcttgctggctgtaagaaggggtttgttgctggatgtagaccattcataggtctagatggatgttttctaaagagtgcatttggaggaaactttctctctgatgttgggcttgatggaaataaccacatctttgttattgcttatgtt

SEQ ID NO: 10066 - DNA, 335 bp, Glycine max
aactttttactcggatgtccgatagattcccatcatatatcaacacgctcgaaattgaatgttgaagctctgagccaattcaaacgacaataactttttactcggatgtccgactgagtctcgtaatatatcgacacgctcgaaattgaatgtcgaagctctaagcctattcaaaccacaattaccttttactctgatgtctgattgagtgacgttatatatcgggacgctcgaaattgaatgttgaacctctgagccaactcaaacgacaataactttttactcggatgtctgattgagtcccgtaatatatcgagacgctcgaaattgaatgt

SEQ ID NO: 10067 - DNA, 380 bp, Glycine max
agcttaaacattcaatttcgagagtctcgttatattacgggactcaatcagacatccgagtaaaaagttattgtcgtatgaattggcttaaagcataaacattcaactttgagcctctcgatatattacgggactcaatcagacatccgagtaaaaagtcattgccgtttgaatttgctcagaggctcaaaattcaatttcgagcgtctcgatatattacgggactcaatcagacatccgagtaaaaagttattgtcttttgagttggctcagaggttcaacattcaatttcgagcgtcccgatatattacggcactgaatccgacatccgagtaaaaagttattgtcgtttgaaattgctctgatcttcaacattatat

SEQ ID NO: 10068 - DNA, 444 bp, Glycine max
gacgctgtaatgattatagcatgcacacacacacatatatatgtatatgaattgttttaataaattaggaattaatagttcaaataataaaattaaattgaaggaaattaatatattaagattcaatgataaatacttttaatgcatttttagtttaatcatttattaactctttttaatggaaaataatatagttcaatttaatatatgcatgttttgtgccatgtaaatattaatattgtgtgatgtgtatatgattcatgaggtgtgataacatgttgctttgggattataacattgcgattgaaattgaatgcatgtgataaattgagtatgtgttgaattgtaagatacatgtgtattgagatgttgtatgcattgagtagtgagttatgaattgtgcaatcacacaattgttagaccatttaacatgtagctttgggg

SEQ ID NO: 10069 - DNA, 371 bp, Glycine max
agcttgtcatcgattacacacatactgtaatcgattaccagtgtagattttcagaaaatattctcaattgtcacatcttttcatttggctctcgaatggctatcaaaggcctatatatatgtgacttgagacacgaatttgctaagagtttttcagaacaaaaaaaggtcttatcctcttaaaaagaaaaatcgttttatcctcttacaaattccttggccaaaacacttgtgattcaataaggaattatttgagtgctcaaattgttcaatctatctctttcaagagagattacttcttttcttcttctttattctgaaaaagaattaagagaccgagggtctcttgttgtaaagaaatctgaacacaaa

SEQ ID NO: 10070 - DNA, 371 bp, Glycine max
  unsure at all n locations
tcaagttttaagttctttctcaaactgtcctaagctaagttcccaaagtcctattaacaacttccgtttgcccatcggtttgtgggtgacaagcggttgaaaataacaatttagtgcccaacttgctccacaaagtcctccaaaaatgacttacgaacttagagtccctatcactaacaatgctccttggcaaaccatggagtctcacaatctccttgaaaaacaaatcagccacatgggaagcatcatcaacttttttacatggaataaaatgagccattntagaaaacctatcaacaaccacaaaaatggaatctctaccattgcttgtttttggcagccctcaaacaaaatccatggattaaataatt

SEQ ID NO: 10071 - DNA, 358 bp, Glycine max
agcttgaaattgaacaacggaagctctcgagaaaatcgagtggtcataaattttcacacagatgtccgattcggggaaataatatatcgagacgcacgaaattgaacaacggaagctctcgagaaatttgaatggtcataacatttcactcggatgttcgatccggggacataatttatcgagacgctcgaaattgaacaaccgaagctctcgacaaattataatggtcgtaactcttcacgcgaatgttcgattcggggacataactcatctagacgctcgaaattgaacaacggatgctctcgaaaaatttgaatggtcataagttttcacacggttgttcgattcgggaacataa

SEQ ID NO: 10072 - DNA, 336 bp, Glycine max
atttgagaagctagatccttatctatccacacccctctattaactaaaataactttcttaaaaataattacggatgaaaataacgcagcaaatattcaaacatcgacacataattactagtagcatataaatatatatatatcagggtgttacgactcttccagccttatagaaatttcgtcctcgaaatttaccttactcacacaaggatgggtgagcttctcacatctgactatgtaattcccatgtggcatcttctactgatgcacctccccagatcaccttgaccaacagaatctctttccctcttaggtgttatgttcgcctatcctcgat

SEQ ID NO: 10073 - DNA, 377 bp, Glycine max
  unsure at all n locations
ggccgccacggagttntccgactatgctcttgtgtggtgtaacaagctacaaaaggagagagcaagaaatgaagagccaatggttgatacatggacggagatgaaaaagatcatgacgaagcggtatgtgccggctagttactcaagggacttgaaattcaagctccaaaaactaacccaaggcaacaagggggttgaggagtatttcaaggaaatggatgtgctcatgattcaagcaaatattgaagaagatgaggaggtaactatggctcgatttcttaatggtttgactaatgatatccgtgatattgttgagttgcaagagtttgttgaaatggatgattcgcttcacaaaacaatccaagtggagcaacaat

SEQ ID NO: 10074 - DNA, 394 bp, Glycine max
agcttcggaattccatttcgagcaactcgatatattacgggactcaatcagacatttaagtgacaagttattgtcgtttgaatttgctcagagcttcagaattccatttcgagaaactcgatatattacaggactaaatcagacatccgagtaaaaaattattgtcgtttgaatttgctcagagcttcggaattccatttcgagcaactcgatatattacgggactcaatcagacatccgagtaaaaagttattgtcgtttgaatttgctcagagcttcggtattccatttcgagaaactcgatatattacaggactaaatcagacatccgagtaaaaaattattgtcgtttgaatttgctcagagcttcggaattccatttcgagaaactcga

SEQ ID NO: 10075 - DNA, 406 bp, Glycine max
ctacgtgataaaacctaaatgtaaataaaaataaaattatttttttataaaaaatctcatacattatatcattataattttttatggaaatcattatttttttttttgcaaaataaatattgaaacaaaattaagaaaatgaatgaaaaaatgtaaatttaataacacatactcaaacgattaaaagtcgatacaatattatacccatgttaatttgaagatgtcataaaagatttaattgaaattgagaatatttaaataattaaatccatatttactgactttcattgcttaaaataaataaattagtgtgagttaaatttggaatgaaaaaaaaaggtggacatcctttaactagcacggatactctcactcaacaactatcttttatataatatatgatctg

SEQ ID NO: 10076 - DNA, 395 bp, Glycine max
agcttcaccatcagatggatgacatatgatggtcaggtccctttgattctcactatgccatctcatgtgagatgtggtggccattgaagagtacaatctttgaagtcttggaattagaggaaaatatcacattttttaatcaaaattttcttttcaatccctttcattgtgatagtcatgtactgacccttttgatagacaaagcaatttgttatgcttttatctgggttttttttccagtagcatgtcacctacatattgagataccgttctgacatattataattagatttgaagcttatagcttccaaagtatctaacaattcttttttattctcacatccttcccatagaggtgtttgagaaacatcaagcatataaaagaattcttgagc

SEQ ID NO: 10077 - DNA, 391 bp, Glycine max
agcttccaagaatcaagatcaagatttaagaatcaagaaaagaattaatcaagatttgtatgaaaaagttttttcaaaaactgactagcacatggatttttctcaaaacatgtttaccaaagagtttttactctctagtaatcgattaccagattgttgtaatcgattaccagtagcaaaatggttttcaaaaagctttcaactgaatttacaacgttccaattgatttcaaaatgttgtaatcaattacaatgttttggtaatcgattaccagtgtgcttgaacgttgaaattcaaattcaaatgtgaagagtcacattctttcacaaaaaagctttgtgtaatcaattacactgatttggtaatcgattaccagtgatagtttctaaac

SEQ ID NO: 10078 - DNA, 453 bp, Glycine max
  unsure at all n locations
tccttaagaagattcctaaagaagctagagcttagctacacacacctctctaatagctaagctcacctcattgagatgagaagctagagcttagctacacaccccctataataactaagctcacccccatggcaaaatacatgaaaatacaaaaaaaaaatccctactacaaagactactcaaaatacctcgaaatacaatgctaaaaccctatactactagaatggccaaaatacaaggcccaaacaaaggaaaaacctattctaatatttacaaagataagcgggctcatacttagcccatggactcaaaatctaccctaaggctcatgagaaccctagggccttcccttggatctctggtccaatctacttggagtcttttatccaatgcccttgcggggtaggatngcatcattccctccaccttggaaaggatttgacctcaaatctt

SEQ ID NO: 10079 - DNA, 427 bp, Glycine max
  unsure at all n locations
ctgagccaattcaaacgacaataactttntactccgatgtctgattgagtcccttcatatatcgagacgctcgaaattgaatgttgaagctctgagccaattcaaacgacaataactttttactcggatgtctgattgagtcccgtaatatatcgagaccctcgaaattgaatgttgaagctctgagccaattcaaacgacaataacgttttactcggatgtctgattgagttccgcaatatatcgagaccctcgaaattgaatgttgaatctctgagccaattcaaacgacaataactttttactcggatgtctgattgagtcccgtaatatatcgagacgnctcgaaatgaatgttgaagctctgagccaattcaaacgacaataactatttactcggatgtctgattgagtcccgtaatatatc

SEQ ID NO: 10080 - DNA, 376 bp, Glycine max
agcttcaactttcaatttcgagcgtctcgatatatgacgggactcaatcagacattcgagtaaaaagttattgtcgtttgaattggctcagagcttcaacattcaatttcgagcgtctcgatatatgacgggactcaatcagacatccgagtaaaaagttattgtcgtttgaatcggctcacagcttcaacattcaatttcgagggtctcgatatattgcgggactcaatcagacatccgagtaaaaagttattgtcgatagaattggctcagagcttcaacattcaatttctagcgtcttgatatatgacgggactcaatcacacattcgagtcaaatgatattgtctgttgaatcggctcagagcttcaacatt

SEQ ID NO: 10081 - DNA, 333 bp, Glycine max
tgctgacccatggcagcttctactatctcccacactctgtgtggtggtccatactcgtatcgtcttgagcgtctcaagagccactgggaccccatttctaccaactacaaaacctgaaaaaactatattatctacacagcaaagtacacttctctatatttgcctatagggtgatgttcctaaggactgaaagaacttgactgagatgtactaactgatcatctaggctcctactatacactaaaatatcaccaaaatgtacttctaccaatctacctatgaaattccttaagacatgacccataagcctcataaaggagcttggtgcattac

SEQ ID NO: 10082 - DNA, 382 bp, Glycine max
agcttgacaagccggcttgtttaactaacaatattaataacaacaacaacaacaacaacaacaacaacaacaacaataataataataataataataataataataataataactttattttatcaaatcttatcttattcagattttattctatctagattttattttatcccaattttattccatctagattttatttcgtctcgattttatttcatccaatcttatcttatcttgtgcagattttattttatttcgtttatgatcttggacttaaaatagattagtgagctttgggactgatgacctatataacaacaccaaggttttagtttagggagtattttttcggagaggagaataattctaggattttagaatt

SEQ ID NO: 10083 - DNA, 423 bp, Glycine max
tgatcgtctcgatatattatgcgcctgaatcgcacatccgagttaaaagttatgaccttttgaatatctcgagagcttccattgttcaatttcgagcgtctcaatatattatgcgcctgaatctgacctccgtgtggaaagttatgaccatttgaatttctcgacagcttccattgttcaatttcgagcgtctcgatatattatgcgcctgaatcggacctccgagtgaaaagttatgaccatttgaatttctcgagagcttccgttgttcaatttcgagcgcctcgatatattatgcgcctgaatcggacatccgagtgaaaagttatgaccattttaattgctccagagctttcattgttcaattttgaacgtctcgatatattatgcgcctgaatctgaccttcgagtggaaagttatga

SEQ ID NO: 10084 - DNA, 370 bp, Glycine max
agcttttgagcaattcaaatggtcataacttttcactcggaggtccgattcaggcgcataatatatcgagacgcttgaaattgaacaacggaagctctcgagaaattcaaatggtcattacttttcactcggaggtccgattcaggcgcataatatatcgagacgcttgaaattgaacatacggaagctctcgagaaattcaaatggtcataactttcaactcggaggtccgattcaggcgcataatatatcgagacgcacgaaattgaacaacggaagctctcgagaaattcaaatggtcattacttttctcaccgaggtcagattcatgcgcataatatattgagacgctcgtatttaacaacggagc

SEQ ID NO: 10085 - DNA, 391 bp, Glycine max
agcttcaagaattatggcctcatcaaactacttgtttcccgagggaaattctataaacagacctcccatctttaatggagtgggttaccactactggaaaacctgcatgcaaatctttatagagacaatagatttaaatatttgggaagccatagaacaaggaccttatgttccctctataatagccggaagtgcaacaatagaaaaacctagagtagattggactaaggaagaaagaagattagtacaatataatttaaaggccaaaaatattattacatctgccttaggaataaatgaatactttagggtttcaaattgtaaaagtgctaaagatatgtgggatacactacaagtaacacatgaaggcacaacagatgttaatagatct

SEQ ID NO: 10086 - DNA, 456 bp, Glycine max
gctaataaattcatctatggattgaaacaagcctcttgctaatagtatctaaaatttcatgagatcatcaattcatttggtttttaaaagaacatcataaatcaatgtatataccaaaaggttagtgggagtaagatttgttttcttgtattatacgtgaatgatattttgcttgcaactaattataaggatttgctatatgaggtgaaacactttccttcatagaactttgatatgaaggatatgggagagacatcttatgtcaatggcattaagatccataggaaaagatctcgagacattttgggtttatctaagagacctatattaacaaagttttaaagagatttaacatgaaaaattgttcaccaagtgtagctcccattgtgaaaggtgacaaactcgatttgaattagtgcccgaaaaatgattgagtgagaacacatgaagaatatg

SEQ ID NO: 10087 - DNA, 424 bp, Glycine max
  unsure at all n locations
tctacattcaatttcgagcttttcgatatattacgggactcaatcggacatccgagtaaaaagttattgtagtttgaatttgctcagggcttcggtattccatttcgagcgtctcgatatattacgggactcaatcggacatccgagtaaaaagttattgttgtttgaatttgctcagagcttctgtattccatttcgagcatctcgatatattacgggactcaatcagacatccgagtaaaaagttattgtagattgaatttgctcagggcttcggaattccatttcgagcgtctcgatgtatgacgggactcaatcagacatccgagtaaaaagttattgtcgttagaatttgctcagagnctcaacattcaatttcgagcttttcgatatattacgggactcaatcagacatccgagtaaa

SEQ ID NO: 10088 - DNA, 381 bp, Glycine max
agcttgtatgttacagtgacaacgattgggctagagataaagatgatcggaaaagtaccaatggatttgtgtttttcatagggaacacaacgttcacttggatgtcaaaaaagtttccaatagtcactctttcgacttgtgaggcagaatacatagcagctgcttcatgtgttttccatgtagtttggctcaggaatttgttaaaagagttgggcatgtcacaagaagagacaaccaagatttttgtggataataagtcaaccattgctctagcaaagaatccagtgttccatgatcgaagcaaacatattgatacatgttaccactacataaggaagtgcatagcaagaaaggatgtacatatagaatatgtgaagtctc

SEQ ID NO: 10089 - DNA, 369 bp, Glycine max
agctttgaggggatttttgggcttaactggttactacaggaaatttgtgaaagattatgggaagattgctaaaccactcagtgatttgttgaagaaaggagcttttaattggagtgcagcggcaactgagtcctttaatgcacttaaggacgcattaacccactctccagttttgactttaccaaactttaaggaacctttttccattgaatgtgatgcttgcggaacagggatcggagctgtgttaacacaagggaaacgtccagttgcatatttcagcaaagggttagctacttcagttttaagtaaatctgtgtgggagaatgtggatgtgattcagaatctatttcctgaaattaaccttgagga

SEQ ID NO: 10090 - DNA, 403 bp, Glycine max
gagcaattcccttatgttatcaaacataaaaagggaaaaggtaatattgtagccgatgctctttctcggcgtcatgcattactttctatgcttgaaacaaaattgattggtcttgaatgtttgaaaagcatgtatgaaaatgatgaaacttttggagaaatttttaaaaattgtgaaaaattttcagaaaatggtttctttagacatgaaggctttcttttcaaagaaaacaaattgtgtgtgcctaaatgttctactagaaattttcttgtttgtgaagcacatgaaggaggtttaatggggcattttggggtccaaaagactctagaaacattacaagaacatttttattggcctcatatgaaaaaggatgtgtagaaattttgtgaacattgcattgtat

SEQ ID NO: 10091 - DNA, 395 bp, Glycine max
agcttgtcaaacattggtaaagcatctataattcattttaataaatcttactaaacttaactgagttttgtgccaacaactataagaaggaatgcaacttaaaaaagaaaaatgcagttcaatcattctttatccttgtgtttctttccgtccctcctaaaaacaccatatcacaaatgatgcaatcttaccccacaagggcattggatagaagactccaagaagattgggccagagatgcaagagaaggccctagggttctcatgagccttagggtagatttcagacccatggacaaagtatgagcccgcttatctttgtacatattagattaaggtttcattatttttttttccttgtatttagggctccataatataggtaaggtaccctag

SEQ ID NO: 10092 - DNA, 404 bp, Glycine max
  unsure at all n locations
ttttactcggatgtctgattgggtcccgtaanataacgaaacgctcgaaattgaatgtttaagctttgagccaattctaacgacaataactttttactcggatgtccgattgagtctagtaatatatcgacacgctcgaaattgaatgttgaagctctaagcctattcaaacaacaataacgttttactcggatgtccgattcagtgacgtaatatatcgggacgctcgaaattgaatgttgaacctctgagccaactcaaacgacaataacgttttactcggatgtctgattgagtcccgaaatatatcgagacgctcgaaattgaatgttgaagctctgagccaattcaaacgacaatatacttttactcggatgtctgattgagtcccgtgatatatcgag

SEQ ID NO: 10093 - DNA, 370 bp, Glycine max
agcttaaacattcaaatttgagcgtttcgttatattacaggtctcaatcagacatccgagtaaaaagttattgttctttgaattggctcagaggttcaacattcaattttgagcgtctcgatatattacgggactcaatcagacatccgagtaaaaagttattgatgttcgaattggctcacagcttcaacattcaatttcgagcgtcttaatatattacgggactcaatcagacatccgagtcaaaagctattgtcgtttgaattggctcacagggtcaacattcattttccagcgcctcgatatagtacgggactcaatccaacttccgattaaaaaggtattgtcgtttgattggctcaagctttat

SEQ ID NO: 10094 - DNA, 398 bp, Glycine max
agcttctaatgatgttgctatgttacatgatgtaaaaaagtgtccctctaataaatttgaaatgaaagatatggttgaggcatcctatgtgataggaatagaaatattccatgataggtcacaaggattgttgggattgtctcaaaaaggatataccaataaagtactaaagagattcaaattggaaaagtgctctacaaggattgttccaattcagaaaggggacaagtttagtcaaatgcaatgtcctagaaatgatttggaacgaaagaaaatggagtctatcccctatccatcagtggttgggagtttgatgtttgcccaaacgtgtacacgaccgaatattagttttgttgtaggaatgttgggtcgatatcaaagcaatcctggaatagaac

SEQ ID NO: 10095 - DNA, 425 bp, Glycine max
  unsure at all n locations
tcattcttagaatgaagtatgtagcgatacatatatcgtgaataatcatctataaagggtatgaagtatttcggactattngcatccatgtctggacaacatatgtctgtatgtatgatttctaataaattagaactcctctgtgcaccctctttagacttgttagtttgcttacccttaatgcaatctacacaagtcttaaaatcagcgaaatccaaagtactaagtactccttcatttactaatcgcttgattctttcaatagagatatgtcctaatctccggtgccacaacatagaggattctttattcacaatacatcgttttaacccaacagaaacgtgcatagaagtagcgtcatttttgcaattaatcgaataaagaccatcaaccaattgaccacaaccaattatttcagatttatt

SEQ ID NO: 10096 - DNA, 248 bp, Glycine max
  unsure at all n locations
tgcgcctgaatcagacttccgtttcttatgttatgaccatatgaatttctccactgtattccgggtgacaagtnatgaccatatgaatttctcgatagcattcattgttcaatttcgagcgtctcgatatattatgcgcctgaatcggacttccgtgtgacaagttatgaccatttgaatttctcgagggcttccgctgatcaatttcaagcttctcgatatattatgcgcctgaatcagacttccgt

SEQ ID NO: 10097 - DNA, 375 bp, Glycine max
catgcaagcttcttgatatattatgtgactgattcggacttccgttttataaagttataaccatttgaatctctcgacagctttggttgttcaatttcgagtgtctcgatatattatgcatcttaatcggacttccgcgtgacaagttatgaccatttttgttgctcgagagcttccgatgatcaatatccagcttctccatatattatgtgcctgaatcggacctccgtttgaaaagctatgactatttgaatttctcgagagcttaggttgttcaatttcgagcgtctcgatatattacgcacttgaatccgaaattagtgtgacaagttatgaccatttgattttctcgagaacattcggttgtaatttcca

SEQ ID NO: 10098 - DNA, 423 bp, Glycine max
  unsure at all n locations
ntctcaagagacttctttgagaagctagatccttatctatccacacccctctattaactaaattaatttccttaaaaataattacagatgaaaataacgcaacaaataatcaaacatcaaacataattactaataatatatagatatatatatatatcagggtgttacaattggaattgatcttggattagtgggctgaaccataactaaaattcactaatcataattactgaaattttggctccaaagtttggctccacaaattcaatttcaaattcaagtaaaatttgaattgaaattcaaatttccctctaattttgtgtgacacttaggctataaatagaggtcatatgtgcgcatttttttaactttgatcatttgaatattaaacttcagatttcaaagctcttntagagcacaaaa

SEQ ID NO: 10099 - DNA, 431 bp, Glycine max
gatccttaatgcaccgtggcatgcacgcttgaccagtaattactcgtatggtttgcacgttgaatccaggttgttcctggtgtggagatgatggtacagccggcgaaccacaagctgaaatttcttttggcgaggccgccatggaaaagcggagcgtttggaatgatttacctgatctcagagaattatcggaaaatgctgccgaaaacactaatgccatgctgatattaatttgaatgaagaatgtataggggcgtgtgaagcaaccgtcgaattcatcttggcttaacagtgaacgtgctattaatgttaactgattcgatagggcacggctcagattgcagtatctgctataattcctctagcaaacaaatgcccatcttgcccctcagttattcagactgatctgcatccaaagcctttgtgaaaat

SEQ ID NO: 10100 - DNA, 448 bp, Glycine max
  unsure at all n locations
gctggcttaaagatgtctctgattaattaattattttaaaactctagtgaaatactaactaaaaaaagaaacttataaaatttcatataaatattgtacaaatccaaaaataattgataaacaaaatcatattgaattcaagtcgttaaagcacaaagtataataaaagaaaataaaaagagcataatattaaaaaatgtatggattaggtcctcagcctcaaagcttacaaatctattttaagtctaagcccataaacgaaataaaataaaatctagacaaaataagataagattggatgaaataaaatctggatggaataaaatctggataaaataaaatctagatggaataagatatagataagataagatttgataaaataaagttattattattattagttaaacagaccgacttatncaagctcaacaaactttttttatag

SEQ ID NO: 10101 - DNA, 371 bp, Glycine max
agcttgctctgtgccaagctctggtcttgggccttcctcatttcaattctccctttgtcattaaaactgatgcttccgggattggtatgggggccatcctctcacagcatcatcatcctcttgccttttttcagcaaaccattttgctcgaaactgctccgcgcttctacttacgtctgagagattgctacaatcattgtcgcggttaagaaatggaggcagtacctcctagggcatcattttatgattctcacagatcatcagagcttaaaagagctcatggctcaagctgtgcaaactccagatcaacaaatttatttggcaggcttaatgggctttgattatacgattcaatatcgagccggaaaagc

SEQ ID NO: 10102 - DNA, 496 bp, Glycine max
  unsure at all n locations
cttctcgctgaccaaggagaattattntctgacccaagtagatattggagttaggcagatttctattctgatccaattgtaacaagaccaggcatcttttgttgtaagtgtggtcattagaatgcagatgtcagaattctgatatttcttagaggatcactagtaaaaggatggattagtgtttgagaacagagggcataaggagattattacctatacttaataggagatccacatatggatattgtgttctattaggagtgaatctctttcatggaaaacctcatgaagcaaaatgcggttgcaaagtccagagctgaagcagaatatcaagctatgactctcactacttgtgaactaatatgtctaaaaacaaataaatgactcattaaagagctaaaattntgtgaggtangaactgagactaatntgtgataatcatgcagctcttcatattacatctaacccagttttcgatgagcataccacacatata

SEQ ID NO: 10103 - DNA, 358 bp, Glycine max
  unsure at all n locations
agctntgaccattcgaattcgagagtgttcncttgttcaagntttatcgtctcgatattntatgtccacgaatcagacatccgagtgaaatgttatgaccattcgaatttgtcgagagcttccgttgttcaatttcgagcgtctcgatatattatgtccccgaatcgaacatctgagtgaaatgttattaccattcgaatttctcgatagcttctgttgttcaatttcgagcgtctagatgagttatgtacccgattcgaacatccgagtgaaatgttatgaccattcgaatttctcgagagcttccgttgttcaatttcgagcgcctagattattaatgtccccaaatcggacatct

SEQ ID NO: 10104 - DNA, 407 bp, Glycine max
  unsure at all n locations
agcttgaaagtggggttccccttangttcatctgttgtttggattgaactgcctattgtcatcttgccagatagaacatgaagaatgattactccaaatgtgtatatgtcacgtttctcagtaaagcatcttgtggtgatgtattcaggagctaagtatcccatggcaacactaacttttagagctaagaaaacaacttcatctgcaagaagcttaggtattctagcatctatgatcaataggttaaactatgctctaggagaacattttccactgaaatattctggtggactattgtaggtttactttcttatttgatatgaagatatccaatgcctggtcataaatgaataacaaataccaaacaaaaaaaagaagcagatattatctacaactattaatatttt

SEQ ID NO: 10105 - DNA, 360 bp, Glycine max
  unsure at all n locations
agctgagggtttaatttcacgatngtcacgtgctcatgcaacaattgttagtcgtggctatacgagacatcttgccaaacaaagtaaggttagcgataactcgcctgtgctttttttttccatgctatatgtagcaaagtcattgatcctgtcaagtttgatgagttggaaaatgaggccgcaattatactgtgccagttggagatgtattttccccctgctttctttgacatcatgattcacttgattgtgcatcacgtcagagaaatcaaatgttgtggtcctgtttatctacagtggatgtacccgattgagtgatacatgaagatcttaaaagggtatacaaagaatctatatcgt

SEQ ID NO: 10106 - DNA, 475 bp, Glycine max
  unsure at all n locations
ntgatgncaacattggagatgttaatgaaacaacgagattatgttctccatgagaggttggatcaaatggagaatagagatcataatgaagaagaaaggaggagaagagggaatgatggtgttcctagacaaaaccgaattgatggtattaaactcaacattcctccatttaaaggaaagaatgatccggaggcctacttggagtgggagatgaaaatagagcatgttttctcatgcaacaactatgaggaggaccaaaaggtgaagcttgccaccacggagttttccgactatgctcttgtgtggtggaacaagctacaaaaggagagagcaagaaatgaagagccaatggttgatacatggacggagatgaaaaagatcatgaggaagcggtatgtgccggctagttactcaagggactcgaaattcaagctccaaaaactaacccaaggcaacaagggggttgaggagtatt

SEQ ID NO: 10107 - DNA, 407 bp, Glycine max
  unsure at all n locations
gacactatgaaactcaagcttgaggatttcaaacgactttaactntntactcggnattctgatctagtcccgtaatatatcgagacgctctaaattgaatgttgaagctctgaccaaattcagacgacgataaattcttactcggatgtctgattgagtcctgtaatatatcgagactctcgaaattgaatgctgaagctctcagcaaattcaaacgacaataactttatactcggatgtctgaatgagtcccgtaatacatcgagacgctcgaaatttaatgtggaagctctcagcatattcaaacgacaattacattctactcctatgtctgatagaatcccgtaatacatcgagacgctcaaaattgaatgttgaagctctcagcaaattacaacgacaatagc

SEQ ID NO: 10108 - DNA, 403 bp, Glycine max
  unsure at all n locations
agcttcaacattcaatttcgaggttcntcgttatattacgggactcaancggacatccgagagaaaagnnataggcatncgcatccgctcagagcatcaacattcaatttcgagcgtgtcgatatattacgggactcaatccgacatccgagtaaaaagttattgtcgtttgaatttgctcagagcttccgcattcaatttcaagcgtctcgatatattacaggactcaatcagacatccgagtaaaaagttatggtcgtttgaatttgctcagagcatcaagattctatttcgagcgtgtcgatatattatgggactcaatcagacatccgagtaaaaagttattgtcgcttgaatatgctcagagcttccgtattcaaattcgagcgtctcgatatattac

SEQ ID NO: 10109 - DNA, 335 bp, Glycine max
  unsure at all n locations
ctgcagctngaatgttgctctttctatngttgtactgcatgttctgcatagtcatttgcctcacaagttcttcgagggaaggttgtggaggggcctcaactgttggttgtttctggggttgttgctgttgttggattggtggaggaatgtatggtctgcttgggccagcagcattttggaaggaaggagcangctgctgttgttgttgctgagggctggaccatctgaggttagggtgattcctccatccagggttatatctgttgctggagaggtcataattgttctgctgtggttgattttgctgctgaggttgaggaggtctattgtaaata

SEQ ID NO: 10110 - DNA, 455 bp, Glycine max
  unsure at all n locations
agcttgtaatcgattacacacatactgtattcgattttctgaagagttntttcagaaaacattctcaacagtcacatctttttgtgtggttcttgaatgagtatcataggcctataaatatgtgacttgagacacgaatttgataagagtttttcagaacaaaaaggtcttatcctcttataaagagaaatcgttttatcctcttacaaattccttggccaaattacttgtgattcaataaggaattatttgaatgctcaaattgttcaatctatctctttcaagagagatttcttcttctcttcttcttcattctgaaaagggattaagagaccgagggtctcttgttgtgaaagaattctaaacacaaaggaagggttgtctgtttttgtgtgtntagaaactcgaaaaggaattacaagatagtggaactctcaagcgggttgcttgggact

SEQ ID NO: 10111 - DNA, 430 bp, Glycine max
  unsure at all n locations
agcttccattttcaatttcgagcttctcgttatattacagttctgaataggacanccgagttaaaacttattgtcatttcattttactcagagcttccgttttcaattacgaacgtcacgataccgtacgggactcaatcggatatccgagtgaaaagttattgtcgtttgaatttactcagagcttctgttttcaattacgaacgacttgatatcctacgggacacaatcggacatccgagtcaaaaattattgtcgtttgacttttcttagagcttccgttttcaattttaagcgtctcgatatattagagagctcaatcggacatctgagttaaaagttattgtcgtttgacttttcttagaggttccgttttgaantcgagggtctcgatataatacagggctcaatccgacattccagntaaaag

SEQ ID NO: 10112 - DNA, 446 bp, Glycine max
  unsure at all n locations
tactcaagcttactacacttctgcgagtgtgattgagagctgtcataattcttattgatgcagntatgtgaatgtacagttagcaaagccgatacattctatcgtttgtttagttgagtgcattgatgtctatatcctaccatagctctgctttttatgacattcattatgatcatttgataggtttcttatgagattaacaaaagatgacagtgaggtcaacttagctaatggcgaagcagaacgtgaatgtgcataatggaaatgggcagaccctgaagaagttattgagcagagtgtgtggaaaaaaggagatttgaaataggtgtaatttttntccatttgaaagactaataatgaatgatgactgattacaggcagtggactacacgagaccaagctatgaagaagttatatgaaccttcaagccttactttcaagggagt

SEQ ID NO: 10113 - DNA, 465 bp, Glycine max
  unsure at all n locations
tcagggcttgaaactatgaaggaacagcctcttttgtgttataccagcatctctaggaaacattncttccctaataaatatcagctttggcaccaactntctcactggctggattcccagtgaattgggcaggctccatgatttgattgagcttgatctcagtctcaaccatctcaatgggactgttccacctgctatatacaacttatcttcccttgtcaactttgccttagcttcaaactctttctggggtgagattcctcangatgttggtcacaaacttccaaaactcatagttttctgtatctgcttcaattatttcacaggtagaattccagggtctttgcataacctcaccaacattcangtcattcgtatggcttccaaccatctggaaagatcagtgccacctggttttgggaaatctccatttctttgcacgtataacattcngtataactggat

SEQ ID NO: 10114 - DNA, 435 bp, Glycine max
  unsure at all n locations
agcttatggaatctagattaacatcngtgtaggcccaagtttgagaatgttctacaattagggctgctcaaaaaaactaattnttaaaaaataactataactagttataaaattataaccagttntatagttatttttatttcaaataactggtttttatttaaaaaaatacatatagttataaaactataactagttntatagaaatgattatttcaaataacttatttttattcattcatagccagttatgtaattgattttagatataaccggttataactagaattggaatgttgtgaagtagagaagaaggcactagaagcagagttccaaccagtacttgatcgaatatatgataaagagactgctngcaaggagacactangtaaaacacaggatgagtctgctagaatatctcanactatcagaaat

SEQ ID NO: 10115 - DNA, 488 bp, Glycine max
  unsure at all n locations
gcaattcttctagacttagagtgataacatgcagttctcttgatcccttatcttttactttctcgttatgccgagactccgaaaccacaacaagttttatcttttccatgtactcgaaacaaaactcagtagcttctttcgcaatgtacttttcaacaataaatgcttcaggacggtgtagattctttgtatacccttttaagatcttcatgtatcgctcaaccgggtacatccaccgcaaataaatgggaccacaacatttaatttccctcaccaaatgaacaattaagtgaaccgtgatgtcgaaaaatgaaggaggaaaatacatctccaactgacacaagataatagtagtctcattttccagctcatttaacttaagaggattaatgactntgctacatatggcattgaagaaaaaacacaggcaagttacggcatgcctgactntcttagaaaaaatgtctcttatcgccacaactaacaat

SEQ ID NO: 10116 - DNA, 479 bp, Glycine max
  unsure at all n locations
gaaaacggaacctctcaagacactcanatggngttatacttgtgacacggatgtctgattacggcgcataaaatatcgagacgctcttaattgaacaacgaatgctctcgagaaattcatatggtcataacttgtcacacaagagtccgattcatgcgcatagtatatcgagaagattgatattgaacaacggaagctctcgagacactcaaatggtcataacttattacacggaggtacgactgatgcacataataaatcgagacgctcgaatatgaataacgaatagtctccagacattcatatggtcataaatgttgaaacggaagttcgattcacgcgaatcatatatcgagaagcttgaaattgaataacggaagctctcgagacatgagatggtataacttgcacacggaagtccattcaggcgcatctatatcaagagctcgaaataacaatgaatgctctcagaattctat

SEQ ID NO: 10117 - DNA, 453 bp, Glycine max
tccatcacatggagtcctctatttaggtgcaacaatttgttggtctttgtgtgtcattggacttgatggtctctggatgacgatatggagactaaagtagtcttggtcgataggcattgagtcttcgacaaagagtgcagacgaccatgttggtctctatgatgtagctccattggagcttgtaggccatggatcttcttcatcaatggagtccattgcttcttgaattttaatggcagtggaatggagaagaagaagagttgagaggagacgcctcttcatgaagaagatgagtctagaagaacctcaccaccataggaagccatggataagagcttgaaagtatgagaagatgactggagggagagggagagaaggggcacgaaattttgtgcctcaaatgatgtctaaactttgaagtgtaattctcacatgatcaaagattgaaaaatg

SEQ ID NO: 10118 - DNA, 414 bp, Glycine max
  unsure at all n locations
agcttctntgagaaaacttccttgagaagttatagcttagctacacacacccctctcataactaagctcacctccttgagaagcttccttaagaagattcctaaagaagctagagcttagctacacacacctctctaatagctaagttcacccccatgaccaaaaaacatgaaaatacaaaaaaaaaagtccttactacaaagactattcaaaatgccctgaaatacaaggctaaaaccctatactactagaatggccaaaatacaaggcccagacgaaggaaaaacctattctaatatttacaaagataagcgggctcatacttagcccatgggctcgaaatctaccctaaggctcatgagaaccctagggccttcccttggatctctagcccaatctacttggagtcttcta

SEQ ID NO: 10119 - DNA, 386 bp, Glycine max
  unsure at all n locations
agcttgaaattgaacaacggaagctctctttaatttcttgtggcataaannntcacacagatgtccgattcggggaaataatatatcgagacgcacgaaattgaacaacggaagctctcgagaaattngaatggtcataacatttcactcggatgttcgatccggggacataatttatcgagacgctcgaaattgaacaaccgaagctctcgacaaattagaatggtcgtaacttttcacgcgaatgttcgattcggggacataactcatctagacgctcgaaattgaacaacggaagctctcgagaaattcgaatgggcataagttttcacacggatgtccgattcgggaacataatatatccagacgatcgaaattgaacaacg

SEQ ID NO: 10120 - DNA, 487 bp, Glycine max
  unsure at all n locations
tacagatctgttntaaatctaatcccataaataaaataatatctatataagataagatctagatgaaataatatctagatgagatcaaatctaaataatatctagataagataaaatntggtagaataaaatagtctgctctcttcaagtccaagcccaattgcttataattctcctgaaattaaattaaaaacacaaaattaatctagtaggcctaaatgataaaactgcataattaatttgataattaagactaatcagtaattaaaatggtgcaaaaagggttaagaaataggagaaaataatggcacatcagtgagacatgaaaaaagatcatggaactcacaaagcaagaagggggagaattagttctaaatcaaatcaaaccaaaaaatacgagtttgagaaactttctatccaaggatcgtatcacannattgtgctaanaagttctntaaacttcagcaaattgatcaagaatacaatg

SEQ ID NO: 10121 - DNA, 503 bp, Glycine max
  unsure at all n locations
gcttcatgcttaactatgtatggcaaaactccattactgttgttatgacatacaagtgagtttgtaacaaatcttctacacttggagtgatcacctgcagtcctcttgaacccttaccacccactctgtcatcatgccaagactcaggaagcccaacagctttagccttctctaagtattctgaacaaaattcaatggcttcttctgcaatgtacctctcaacaatagatgcttctggacgatatagattctttgtatacccttttaagatcttcatgtatcgctcaaccgggtacatccaccgtagataaacaggaccacaacatttgatttctctgaccagatgcacaaccaagtgaatcatgatgtcaaagaaagcagggggaaaatacatctccaactagcacagtataattgcggcctcatttcccaactcatcaaacatgactggattaatgactntgctacatatagaatggaagaaaaagcacaggcgagttatc

SEQ ID NO: 10122 - DNA, 407 bp, Glycine max
tatagaaactaagctgtcacaaaccaacaattatattgattcttcccgtttgcttttctcattctctatctcccttagctataatacatgttgatatttggggtccctgttcaaccacttctatacatggtcataaatattttcttactattgttgatgatcatactagatttgtttgggttataccaatgtcttctatagctgaaactcaatctcttttacaaggttttattaaatctgctgaaaggcaatttgatacaaaagttaaagttatttgctcaaataatggtgatgaatttatcattagtcatttctttcaagccactggtattattcatcaaacaacatgtgttgaatactcccaacaaaatgggattggcgacaaataacatcaacatctacttaat

SEQ ID NO: 10123 - DNA, 416 bp, Glycine max
  unsure at all n locations
agcttattntagtccatatattgttttctttattttacacactatattttcctctcctgtagaaacaaaccctttgagttgattcatataaacttcttcttctaagtcaccattcagaaaaggcggtctttagatccatttggtgaagctccaaatcaaatgagccactaaagccaacacaagccacaaagagtccttcttagaaacagaagagatagtctctttgtagttgatgcaatcctatcccgcaagggcattggatagaagactccaagtagattgggccagagatgtaagagaaggccctagggttctcatgagccttatgatagatttcggacccatgggctaagtatgtgcccacttatctttatacatatttgattaagatttcattatttttgggccttatattt

SEQ ID NO: 10124 - DNA, 454 bp, Glycine max
agcttaagaaaaagcgatgatttggggccttgacttatactactcttttcctaaatataaacaaaattaactaacttttatgctaattaagttagtaaatatcatctaattccactaattacatttaagaaacaaacttttttcctaaaatacccttcaatggaacctaatatcaaggacaaaaggagtcattggaaatagaatctgaattaattgaagggtatttttgagatagtatcattaaatagggtggaagtagttaggatttacttatatgtgtcaaaaaaggtttttttttttgttgcttaaaattgatccggagggagtaatacttattctaaggacttcatcattgtatttgaaaagaacaatataaagaatccctaccgtcggtggttctggtaatagatatcaagttgggtctggtaatagttatcaagttgataatagatat

SEQ ID NO: 10125 - DNA, 365 bp, Glycine max
  unsure at all n locations
ctgaggcgtgcaagcttaggagaacgatcttggaagagggccttaaatgntttatgagtatccacctgggagcgactaagatgtactacgaccttatgcagatgttttggtggccgggtatgaagagagaagttaatgagtttgtccttgcgtgcctaatgtgtcagacagctaagatagaacaccaaaagcctttagggtagctgcaacctttagagatacttgagtggaaatgggataacatcttcatggatttcatggcggggttgcctaggacccccaaaggtttagattccatttgggttattgtagacaggttgacgaaatctgcttacttcatcctaattaacatcatatattcctta

SEQ ID NO: 10126 - DNA, 332 bp, Glycine max
  unsure at all n locations
agctttcagaattcgaaggttttcgttttacacagatgnccaanncgggggcataatatatcgagacgctcgaaattgaacaacggaagctctcgagaaaatcgaatggtcataacttttcacacgaatgttcgattcggggacataactcatctagacgctcgacattgaacaatggatgctctcgagaaattcgaatggtcataagttttaacacggatgtccgattcgtggacgtattatatcgagacgctcgaaattgaacaacggaagctcccgagaaatttgaatggtcataacatttcactcggatgccccaattcggaacataa

SEQ ID NO: 10127 - DNA, 453 bp, Glycine max
  unsure at all n locations
acctgcggcatgcaagcttctcanagaagcctctcaaggaagcttctcatacttatctacctaaacctatttcggtaaaattgttctcccggattcgttaaccgttggatcatcttaaaatcttttctggaggttcctaggacaactgtccacagtttgactgttgcgatttgcaatataacatttggtgtgtgagatatgaattttttacggaagcaaaaaatttgagtgttgcaggctttaaattagtgagattgtcagattaaccgccttgtatatttatgagattgtcagattacatggtgtgccatctagcatagtgtctgatagagatcctaggtttacctctagattntgggagagcctgaacagagcattgggaaccaagcttagactacgttcaacttaccatcctcagattgatggccaaactgaacggaccattcagtcact

SEQ ID NO: 10128 - DNA, 399 bp, Glycine max
  unsure at all n locations
ntgngctcaatagctccaataacgtctattccctatatatattacggccaaggcactgccaagatgttcaaaggtacaagcgaagcattgacattatcaacgaaggcctggcacttgtggcactttctcacacaacaatcattttccatagtgagccagtaataccctgccctcangatcttccgggccatggcatgtccgttggcatgtgttccaaaggatcccttatgcacttccattagcatctgctcagcctccctggcatcaacacatcggagcaaaaccaaatcatggttcctcttgtacaggatatttccacttangaaaaagtcggctgccaacctctgcaacgttctcttgtcattgtcgttggcatgtgttccaaaggatcccttatgc

SEQ ID NO: 10129 - DNA, 403 bp, Glycine max
  unsure at all n locations
cttcaatcaatctttggctatctacattagtgcaactactcncatcaataaccaaagagcatatcttcctcatgatcatgcacctaggatgataaatgtcctccctctgagttgcgtctctatccttacacacactccccattaacctcctaaccatcaaaagatcaccttccaggggctgtacatcacattcactttcactctcactagaacaactagaagagctagaagaagatgcactagtgatatccccattacccaacacaaccatagtccttttgttaggaaattgggaggcaatatgaccctatcctaaatacttaaaacatctaatagaactcacctttaaagaagtgggagtaggggtagaattatntgtaccaagggcaatactgatttcatg

SEQ ID NO: 10130 - DNA, 224 bp, Glycine max
cacacacacaaacacacgcacacgcgcatactctcactgacgcacacacacatacacagtcacacagtgagacggacacactcacacacacggtggaagaagaatgatggtttcgatctggataccgagaaatgacctgcagatgtcagactgggactatgcagagatagaaggaatacacatggctctttaagcactcaacacagttcatgagccgttctact

SEQ ID NO: 10131 - DNA, 298 bp, Glycine max
ttacaaagcattcattgtagttcctacgtatattatttttatctttttggatattacactctaaattgatatagactgataaacaaattaaaaatagtatttatattatgagacctattcttaaatggatagattaaaaggtgcaatgtatatatacaactatgaagatgatatcaataatttaatcatatttatatgtaacattgatcatgtctatttgattcataattaattgaatatctcgaagaatggtcatgattagttgataactatagcgaggtaaccaatattattaaat

SEQ ID NO: 10132 - DNA, 429 bp, Glycine max
  unsure at all n locations
ntccttgccccttgatatatttgagggactcatggtcactatgaatgacaaattccttgggataaaggtagtgttgccatgttttcaaagcccgtactaaggcatacaactccttatcataagttgaatagttaagggtagggaccacttaacttttcactaaaataagcaatgggatggcttcttggattaacacagccccaatcccaacatttgaagcatcacactcaatttcaaaagatttttgaaagtttggcaacgcaagtatgggggcattagttagcttttgcttaagaacattgaaagcttcttcttgtttctctccccatttgaaaccaacattnttcttgagcacttcattgagaggtgctgccaatgtgctaaaatccttcacaaatcgtctataaaaacttgctaagccatgaaaac

SEQ ID NO: 10133 - DNA, 318 bp, Glycine max
agcttctgtttcaataacgagcgtcttttatattactggcctcaatccgacatcggagtaaaatgttattgtcgttagaatttgctcagagcttctgttctgtaatttgagagtctcgatatactacggaacacaatcggacatctcagtaaaaagttattgtcgtttgaatttgctcagagcttctgttcttaattacgagagtctcgatatattacgggattcattcggacatccaagtataaaagtattgccgtttgaattgctcaaagcattctttgtcaattacgagcgtttagatatattaccggattcatt

SEQ ID NO: 10134 - DNA, 481 bp, Glycine max
  unsure at all n locations
tacgcgacactatgaaactcagcttaaggcaatccttctctgctgatgtccactactgtatctgttccaaatgttgagtttcctacttcagctgctactgtcaataatacttctaatattgtttcaaattctaatgttaccttttctagtagtgttaatctttggcatgctaggttaggacatcctaatgatcatgtaatgaaaattgttctcaaatagtataatatttctcaactgaataaaaacatcacagagttttgttcctcttgttgtatgggtcaagctcataggttacccaaagaaatttgattataatttaattcgtggcgatcataagttgaaagttcatattcttcggtcattgataaacaatttgttggacaatattcaataccatgttacctcaactttngtttattcatctttagaactcattntcactaacctatggngaaccctccatgtacctcttatgttgcta

SEQ ID NO: 10135 - DNA, 326 bp, Glycine max
agcttgatattaaacaacggaagttgtctataaattctaacggtcataacttatgacacggaagtccgatttagtagcataatatatctaaacgctcgaaattgcacaacggaagctctcgacaaattaaaatggtcataacttggcacacggatgtccgattgtggcgcatgatataccgagacgctcgaaattgaacaacgaaggctgtcgagaaagttaaatggtcataacttgtcacacggaagtactatatcgacgcaaaacatactgagacacgtgcaatttaacaacggaaactggtcagaaattcaaatggccataac

SEQ ID NO: 10136 - DNA, 419 bp, Glycine max
  unsure at all n locations
agcttaacagcaataaaaagcatcaaagttattcaaagatttactcacattaactaccacaagcacgattgacagtgaaaaatcataagatttgatttaatgcctaattgcacacctgacatccagtagatcaactctaactcatgatgataagaaaggaaacatgcacaacaacaatttcattaccttcctctaatgaaagctgaattgatctcttctctaactcaacagcatgcttgctaagttcaactgaggacagggagcgaagcactgccaaaggatgagatatcagctatataanatatcaagaacttcataagaaagctttgagggattatttaagggtcctgacatactttgatatatcttcttgtctgattggcccaattctcaaaacatctgcaattgttggatcgctc

SEQ ID NO: 10137 - DNA, 445 bp, Glycine max
agcttcattctacacctgaaaaagaggtttagttatttgcacaaaagagaaagcttcctaacaaaaaatttcatgcagatggaccttcttctagtaattctgacttacaatagcctcatatccttcttccattcccacctagagcgattccaaacaaaaagatggaagaagtggaaaaggagatctttgagaccttcaggaaagtagaggtgaacatacctctattagatgccatcaagcagattccaagatatgccaagtttctaaaggagttgtgcacccacaaaaggaagctcaaaggcaatgaacagattagcatggacagaaatgtgttagcattgataggtaaatctgttcctcacattcctgagaaatgtaaggacccaggtactttttgtataccttgcattattgggaatagtaaatttgagaatgccatgctaga

SEQ ID NO: 10138 - DNA, 390 bp, Glycine max
tgagaatggagaattgcactaagcaatcactacgcatagcttcattctcgaaggtggaggacacatgaacgaaaacgcaattcatgggtctccgaaaagattgagaatggagaattgcactaagcaatcactacgcatagctccaaactcgatggtggaggacacatgaatgaaaacgcaattcatggggctccgaaaagatggagaatggagaattgcactaagcaatcactacgcatagctccaaactcgaaggtggaggacacatgaacgataacgcaattcatggggctccgaaaagatggagaatggagaatggcactaagcaatcactacgcatagctccaaactcgaatgtggaggacacatgaacgataacgcaattcatgg

SEQ ID NO: 10139 - DNA, 418 bp, Glycine max
gattatgccctgagctgtagacttgtgacactacattaatatttcataattaattaaaattatattttgaaaaattctataatgcgcttaagttcgatactgattacttaactttagaaaattaatctgataagacattctgacgtgcttttttttcacgagtcttataataactataatcttcagaactaatgtaagtcaagtataaaaataatagattatataaatatgatttagataaattatttatgattcaaaatcaattatttaactaccaattaatctaattaggtcaattttacaactctactcctaatggaccaatattaactatattatctataattaaccaatttctataaaatattatgtcttgatatctgaaccaatttattacaactcaaactaatattttaat

SEQ ID NO: 10140 - DNA, 416 bp, Glycine max
  unsure at all n locations
tgtgtcacactntcaattgtcgaagctgaatacatttcttcttgaagttgttgtgctcaaagtctttggatgaagcaacaatgatgtaagctccattggagcttgtaggcctatgatcttcttcatcaatggattcctttgcttcttggaagatgaatggcagcggaatggagaaaggaagagagagaggagacgccacttcaaggagaagatgagtctagaagaagctcaccaccataggaggccatggataagagcttggaggaagaaggagatgaatgaagggagagggagagaagagcacgannatttgtgctctaaatgagctctgagatctgaagtttaatattcaaatgatcaaagttgaaaaaaatgcacacacatgacctctattatagcctaagtgtcacacaaat

SEQ ID NO: 10141 - DNA, 432 bp, Glycine max
aagcttcttatttagatgatgctattgtttgtagctacctcatgcactcctctaatgactatggcatcatttctggcgctaaactgctgggagttggaggccatcttctcaattaaatttctggcttcagcaggagtcatgtctccaagggctccaccactggcagcatctatcatacttctctccatattactgagtccttcataaaaatgttggagaagaagctgttctgaaatctgatggtgagggcaactggcacatagtttcttaaatcgctcccagtactcatacaggctctctccactgagttgtctaatacctgagatatctttcctgatggctgtggtcctggaagcagggaaaaaattttctaagaatactctcttaaggtcatcccagctcgtgatggaccttggagcaaggtaatacaac

SEQ ID NO: 10142 - DNA, 299 bp, Glycine max
  unsure at all n locations
gatctctaagtcacgctgctgcagcttgccaaaaggttttgtttcttttctttnanagccaaagatgctgttgccacttctatgccctgagagcttctacaccttgacttgtttggaccaaccacaactgcatttttttctggacacacatattgtctggtcatattggacgattacaccaaatggacatgggtcaattttctaacctacaaggatgagtattttgataccttttataaattacgtaaaaatattgaacatgaaagaaataattgtattttttcaatcaaaagtgatca

SEQ ID NO: 10143 - DNA, 406 bp, Glycine max
  unsure at all n locations
actcaagcttagaatgcagaagaagcaacaacaatcaatttaanattgttctataaacatgcaaggcaaaaatgatggcaataacataaatgagataagggaagagagaatgcaaacacttatttatactggttcggccacttcccgtgcctacatccagtactcaagcaacccacttgagatatccactaacttgtaaattccttttacaagtactaaacacacaaggacaacccttcctttgtgtttagagattctttacaacatgagactcacagtctcttaatcccttagagaatgagaagaagaatatgaaccaatctctctacaagagatggatgtacatatgagcactcaattatttcttatgaattcaattgaatggccaacgaattttaaaggataa

SEQ ID NO: 10144 - DNA, 400 bp, Glycine max
  unsure at all n locations
cactatacgaaactcaagctntaggctctgcagtntatcttattaatagagngcctttatttgtgnnaatctttaagagacctcttgataccctttctcatcatttcacccttaattttgtcaatcatttaccaccctatattttttgttgtgccatatatgtgcatttgcatcctcaccagcggaaaaaattagaatctagagtaatgaaatgtgtttttgtgggatacaacaccactcaaaagaagtattaggccaatcatccatctacaaaaaaaaattgcatcaatggatgttacatttcatgagcatgaattgatttttcccttgaatacacttcattcttcaccataaagcgagggggatgggggtgaggtgttttcctaagaaaaatacaatg

SEQ ID NO: 10145 - DNA, 413 bp, Glycine max
  unsure at all n locations
ctttgtnntttggagtgtaagagggcatgaaaatgatagcttgttggtgaggttccctctttaggccaacatttggtgagggttgtaccatgttgattcttcgcacctagatgatgtgaaaatattgttcaccatgtatgtgtgtatatatatagcatgaaattgactgtcaagtgtgtatatatagcaaaaaaaatgccacccaaaatagagtaaatgtaggtagcaaaaataccttgccaatttgtatatgtgtttagataggtagcaaataccttataaatatgtatgtatgttgatataggtagcaaaatacctggaaaatatgcatgtgtgttgatatangtagtgaaaatgtcttgcanatatgtaggtatgttcataaaatgtttctcttcaagaaaaaaatgtgt

SEQ ID NO: 10146 - DNA, 442 bp, Glycine max
  unsure at all n locations
gctgaagttgtacatgaccaatctttagtaatcgctttactttttgcagtttttgtattcgnttaaaatgcatgaagatagatcagtaggagaacaattggatttgtttaataaactgattctagatcttgaaaatattgatgtcactattgatgatgaggatcaagctttgttattgttgtgctatttgcctaagagttactctcatttcaaagagactttattgtttggaagagattctgtttctcttgatgaagtgcagactgctctgaattcaaaggaattgaatgaaagaaaggaaaagaagtcctctgcaagtggtgaatggctgacagcaagaggcaagaccttcaagaaagatagtngaattgataagaagaagcanaagccagaanatcagaagaatggtgaatgaaacatcttcaaaatcagatgttatcac

SEQ ID NO: 10147 - DNA, 431 bp, Glycine max
  unsure at all n locations
agcttatgaactccnagaagttatatgttactaatgtaaaaaaagggatctaaatcgaagatgcttaacccattatgatttctgaatgtcatgctcatccacacctacacaatcccatgcaatcgcagcttaaaaatatatagtaactatgttgacttttaattctacgaaattctatttttttattagaaaacagtaccaaaagtacttaaggaaatgcatgtaagttatgtcttttatgaattttgattaaaaactctctttatttcaaagacattccttatttaccaattaattatatgacatccctagttgccatggccaatatgtcagcacttgaaaccttattctggcagcgaggtacactgtcaaccgcagcattggctttgatcacagtgtcaaacccatcaccagctagcaccacagaagca

SEQ ID NO: 10148 - DNA, 440 bp, Glycine max
agcttatagaatatataataaatttctttgacttttgaaaagtctatacatgtttcctttgatgagtctaatgtcattctttcaaggaaggattttttagataatatttcaaattccttagaagatacacatatttatggaaatgactctaaagaaaaagatgaaggaagcaatgaggattctcaagataatggggctagaggaaataatgaacttccaagagaatggaaagcctcaagagatcatcccctcgacaacattattggtgatatatcaaaaggggtaacaactagacattctcttaaagatttatgcaataatatgacttttgtatctatgattgaacctaaaaatataaaagaagccatagtagatgataactggataattgccatgcaagaagaactgaatcaatttgaaagaaataatgtgtggaaact

SEQ ID NO: 10149 - DNA, 445 bp, Glycine max
  unsure at all n locations
actcagctngacaaccggcttgtttaagtaataataataataatatattactattatctataccattnttatgacattatgaatgacttcatgaattgagataaagtgcttaaagaattcacttgcatgtgaaaaattttcaaaaagaaaaagactcaagttaaaaggataatgcaaccagattaatactttcaaagaaaaaaatgttttgtaaagacattttcagacaatttaaatatttttatttgactatattagtataaatcatctctaatccatgtattttttaatattatactctctttttcattttcttttgatatactntgtgtttaaataacttgaattcaatatgattntggttatcaattattnttgaattggatattacttatacgaaaatntataagtttcttttttaagtagtatttactaggtntataaa

SEQ ID NO: 10150 - DNA, 427 bp, Glycine max
gagctttcacctcctacattgagaacaactaccttctctttatagctgcttaatttagggaagaactccttcttatcagaaatcagataaataataatgctgccatcatcagtattactccatccaggcataacctcgcttacagaatcatttaagatgaagcaatcaagtgagtccaaactagcaattttttgaagaacacttgccttgtcatatggaaggccaacaccataagaaattccactatgcgttctggacaggaagagtgttcggatgagagactcagctactggccggagtaaagaaacagttttatcatcaccactttcagccaagagtactgattcatccaataacacccccctcactatacccatctgagagtggatgcagcactaccaaaacagagaatgagacagttatcatt

SEQ ID NO: 10151 - DNA, 444 bp, Glycine max
  unsure at all n locations
catgcaagctaattataacttacttgctgttaatatataacaattatcaaaatttaaatattactttaactatatgcacaaaaaattggtgaacaaaaatcattcaaaattattatatatgtacttgtcataattgagaaagaattgtaataaatgcatagaaagaaaaaagagcttttaatttcatttagacatagtttgcaagaaggcggaaaataaatgatgcaaacttaaggatattcatcatttagttactggcttttcatgtataaaatccaaccttggaatagaatatcatacattacacgcataggaatttaattaatacagcacaaaatgtacataacaacaaaagaaattgacatgctaacaagaaaactatgatnatattggtggcaacagtatataagtatgacatactacatataagaccttctattttat

SEQ ID NO: 10152 - DNA, 379 bp, Glycine max
  unsure at all n locations
agctttgaaaaacactttntattttaaatcacttggccaaacctttgctaattcaattaggaattcccttcctaatattctagtgatcatcttgatgttgtgacttgtaatcttgaagtattgtcttgaattttaatcttgaaaagcccatttgcatcaattgcaacacatcatcatgatcatcatcaaaacatcaaagccaattgcatctacacatgtgtcctccaccttcgagattggagctatgtttcacgattgcctaagtgcggaccctcaaggcaatccgccattctccctttttttttcggagacccatgaatgttattgcctagcgctattcatgtgccctccaccttcgaggttggagctatgtttcatg

SEQ ID NO: 10153 - DNA, 385 bp, Glycine max
gcttcatggcttactgaggatggagaagtgcaagtattgaattctgtggagttggatatttccattagaaagtataatgataaggtgttttatgatgttgttcctatggaggccagccacttactcttgaggggaccatggcaatttgataagagggttaatcatgatggtttcaccaacaagatctctttcacgtatcaaggcaaaaagatagtgctcaaaccattgagtccacaagaagtatgtaaggataaaaaaaaatgagagaaaattcttcaagaaaagagagaaaaataaaaagagagtcaaacacttgagatttaaaaagtgaagacaaaaagagggaaacacaagagagagaaaagatgagtgaaacactttgagt

SEQ ID NO: 10154 - DNA, 442 bp, Glycine max
  unsure at all n locations
ntntattgtaatcttgaaattcaggacaacactctgatttctgaaatttttgggataaaaatggtcattgatcattcccttctctctgactaaaccaaattacccagtgacggtgtaccatttgaaggtacactgaatgacgactggaaatttgatttctctgcccatgatgcccgccagttggtttgcaccaacaatgtggatatgaccggacgtcttcttgccgggtcattggcttttgaaagccgcatccttcactatttaattgtgcgtattttgcttccacggtcttccaaccttgcccaggtttctgaggaagatctaattatcatgtgggcctttcatacagggagtcaacttgactgggcacacttagtcaaatatcgcatgcatatggcattgcgaataaatgcttcattaccatatccacagcttgtcactc

SEQ ID NO: 10155 - DNA, 206 bp, Glycine max
  unsure at all n locations
tatgcagtgcactttctgagtatggtgttcttggatttgaattgcgctactccatggccaatcccagttcatcgatgatgtgcgaggctcagctaggtgattntgctaatggtgctcatggcatatttgacaatttcttggcttctggtgaggctaagtggctccgtcacactgggcgtgatgtgttacttcctcatgtgtatgat

SEQ ID NO: 10156 - DNA, 429 bp, Glycine max
atgaaaggaaaagactcttgcagttggttggaacatatatcgacaagtttattgtttgtcaaacgaacaagagtattactttcttgtaaatgtgtgagaaaatttttggaaagattcaaatgagcaagatatccaagttgcgaaatccagttaggtattggtccttcgatcccgttgtcagatagatcaagatatattaatatggactgatttatcaagaaactaggaattcgtctcaacttacaggaagccaacattatatgcgtcatatgaggaaagggtgacaggtcatgatcatccctaaagtttatatcaactgacaaattgttatgtgagaggcctagttcaattaaattactcagcttgcgaatcttgtccaattgtattgtgccattaaacttatttgacttaagctgaatgacacgaagt

SEQ ID NO: 10157 - DNA, 440 bp, Glycine max
agcttaggactcaatgaagtttattctttttctgattattatgatagtttatatactgtttttcccttttctcatagttttcacagcagcagaaacttcatccatcacacaatcccagtccctcagttacagaaagaccctagtttccccaagtggaatcttcgaactcggtttcttcaatcttggaaatccgaacaaaatctaccttggaatttggtacaagaatattccacttcaaaacatagtttgggttgcaaacggtggtagtccaatcaaggattcttcttccatcttgaaactagacagttctggcaatttggtccttacacacaacaacacagttgtttggagcacaagttctccagaaaaggcacagaatccggtggcagagctcttggattctggcaatcttgtgataagagatgagaatggaggaaatg

SEQ ID NO: 10158 - DNA, 359 bp, Glycine max
gacaagtggactcagatatcttaagaaggggggggcagaattaacatatcacaaactattccccaattaaaaattctacttttaatttaacccaacaacccaagattccttttaaacaagaactcctaaataataatgcaaattaatcttactaaataaaaataataagcactaaatactcaagaagtttaagggaagagaaaatgcacactcatatttatactggttcggccactcccttgagcccaaatccagtccccaagcaacccacttgagagttccactatcttgcaaaatccctttacaagttctgaaccacacaatgacgacccttcctttgtgttcaaattttgttacaa

SEQ ID NO: 10159 - DNA, 392 bp, Glycine max
  unsure at all n locations
tagtacttggaatttggactcactgtcgtttagcctgtttatgcaaaggcaaanggnatctatcttaggacacaccctattgagatttgtgtagttggtgcacattctccatttaccgttggcctttttgactatgacaacattggtgagccaaggagagtaactaacttctctgataagttgggccttgaggaacttgtccacctcctccttgactgccttgcgatgctcttctactatctatctcttcttctgtgacactggtttggcctacgggcagatggcatgcttatggcttataatgccagggtgaatactcgacatgttagatggctaccatgcacataggaatgcatttctgtgtgggacattagctatgcgtttatgcctat

SEQ ID NO: 10160 - DNA, 411 bp, Glycine max
agctattcttcaacaaacaaatcaaaatttattttctgatcttcaaaacctagctccagcttcctcttccccatatcaactatgcagcttgtggtcaacatgaatggttttcccaatattacagggatgtcagtatcttcagagatatccattaccataaagtctgtcgggaagataaaatgttttactctgaccaacacatcttcaattactccatatggccgggtaatggagcagtcagctaattgtcaagacattcgagtgggcattatttccaactctccgaatcttctgcacatggagagtggcatcaaattgatactagctcccaaggcaataagagcttttcccacattgactctgtcaattgaacaaggaatagttacactcctacgaactttatgcttgggt

SEQ ID NO: 10161 - DNA, 250 bp, Glycine max
  unsure at all n locations
tctcaattaagtaggagtgggagtgaccttangctttggtcncttcctcttcttctcgaagctaacacctctcgcctttgcctgaaaatcgcgaacatcgcgaaggtaaatcctgaccgcgcgtgcgccgaatgggttggtctccgggcggccgccgttcttctcgtaggcggcgccgaagcggtcgatgacggcgtcgaagctgccccaggcttggcggagcgggcagggacatggggcaagtgggttg

SEQ ID NO: 10162 - DNA, 417 bp, Glycine max
gcacctgcagcatgcagctagtgagagattaacgatttttttaattttatggcaagcgcactctgatttcactagagcaggctctttgggtatcaatcttcatgcagctaatcgagttggtatagttgatgggtcttggaatccaacatatgatcttcaggccatctatcgatcatggaggttagagcctgttactttatcccttaatcaaaataagttgccttctgatttaaaaattatctataaaacataaagtttagaatgcgatgcgactgtctcctttacggagaattcttcattgagcacgatcttagctcattgcctttttagaggggtttcccttatttctaacaataagacgtgatagttgagaccttcactccttattacgcgaccgccacattctctttattcttg

SEQ ID NO: 10163 - DNA, 364 bp, Glycine max
  unsure at all n locations
agaaactcagcttaacattcacttcgagcgtacgttatattatatgacttattagacatccgcgtaaaaagttattggcgnttgagttggctcagagcttcaacattcaatttcaagcgtctcgatatatgacgggactcaatcagacatccgagtaaaaagttattgtcatttgaattggctgagagcttcaacattcaatttcgagcgtctcgatatgtaacgggactcaatcagacatccgagtaaaaagatattgtcgtatgaaattgctcagagcatcaacattcaatttcgagcatctatatatgtgacgggactcaatcaggcatccgcgtaaaaagttattgtcatttgattggct

SEQ ID NO: 10164 - DNA, 372 bp, Glycine max
tgtgtgcattcaatatcctgatgagggtgttccatatgtttttatgactggactttacatctgttgcccaagtttcatggtcttgcaggtgaagatcctcataagcatcttaaggagttccatattttttgttccaccatgaagccccctgatgtccaagaaaatcatatctttctaaaggcttttcctcatttctggagggagtggcaaaagattggttgtactaccttgctcccagatccatctccagctgggatgaccttaagagagtgttcttggagaaattcttccctgcatctaggaccactaccatcagaatagacatttcaagcatcaagcaacttaatggagagagcttgtatgagtactggg

SEQ ID NO: 10165 - DNA, 350 bp, Glycine max
  unsure at all n locations
ctaagcttactgcacatanaatatataacttgatattagtcttgttttcattaaaactaaaaataaattaagcataatgtttgaatgtggctcaaatcaagatcggctaacactttactataactgaaatgtgaaagacaccgtaccctaccaaaaacgaagacacgttataaacatagaccctttcaaggaatacattttcacttgaagcacttggcatccaaaagagcctcgccctcaaaacgatcataatcttcaatcatctgattgacacgctccttttgagcttcatcatagatgtcaaccttagtccattcggatagctccatgtcatagcattcatcactcac

SEQ ID NO: 10166 - DNA, 350 bp, Glycine max
  unsure at all n locations
cacgaaattntatgcctcaagtgaggtctaaaatctgaagtgtggttctcaaatgatcaaagttgaatgacaagctcacacatgacctctatttatagcctcagggtgacacaaaataagaggggaatttgaatttctattctaatttcacttgaatttgaatttaaataggtggagccaaatttggagccacaatttcactacttatgattagtgaattttagctatgattcaacccactaattccagatcaagtccaagattcttcactaagtgtgcttatgtgtcatgaggcatgtgaaacatgacagatatgcacaaagtgtgactatatgatgttgtaatgggga

SEQ ID NO: 10167 - DNA, 371 bp, Glycine max
  unsure at all n locations
cttgatgaanagttggctcactcgttgttttctatagcaatatgtagaatctcaaatttaaagaaagcctttttgagttgagtagccatatggtagtaccttgtcatctgtggatccttgatatgatattctccattcaacttaccagtgataagcttggagtcgctccaacactttagatatttagctcctacttctttagctaatctcaggccagctaagagagctttgtgctcggcttggttattcttggtttcaaactcgaaccttagggactgctctaggattacttcatctgggttttttgagataaccgtagctcaactccctttttcattggatgaactatctacttacaacttccaccactc

SEQ ID NO: 10168 - DNA, 399 bp, Glycine max
  unsure at all n locations
tcagcattcaattntcagcgtctcgatatattactgtactctatcagacatgagagtaaanagttattgtcgtttgaatttgcaacgaccatcaacattcaatttttagcgtgttgatatattacgcgactcaatcagacatccgagtaaaaagttattgtgatttgaattggctgagagcttcaacattcaatttcgagtgtttcgatatattctgggactcaatcggacatccaagtaaatagttattgttgtttgaatttgcttagagctttggtattcaattntgaacgtctcgatatattacgggactcaatcaaacatccgagttaaaagttattgtcgtttgaatttgctcagagcatcaacattcaatttcgagcgtgtcgatatattacg

SEQ ID NO: 10169 - DNA, 435 bp, Glycine max
agcttctgttataattgcgagcgtctctatatattactggcctcaatccgacatcggagttaaaagttattgtcgctagaatttgctcacagcttctgttctgaattttgagagtctcgatatactacggaacacaatcggacatttcagtaaaaagttattgtcgattgaatttgctcagagcttctgttcttaattacgagagtctcgatatattacgggattcattcggacatccaagtgaaaagatattgccgtttgaatttgctcaaagcattcgttggcaattacgagcgtctagatatattacgggattcattcggacatccgagtaaaaaggtattgtctttttattgtgctcagagcttctgttttcaatttcgagcatctagatatattacaggactcaatcggacattcgagtcaaaagttatt

SEQ ID NO: 10170 - DNA, 380 bp, Glycine max
  unsure at all n locations
agcttactaaggcacctgttctttctctttctgacttttctaaaacttttgagctagaatgtgatgcctctggagtgggagttggagctgtattgttacaaggagggcaccctattgcttattttagtgaaaaacttcatagtgccaccctcaactaccccacctatgataaagagctttatgccttaataagagccctccaaacttgggaacattaccttgtttccaaggaatttgtcattcatagtgatcatcaatcacttaagtacattagagggcaaagaaagttaaacaagaggcatgcaaaatgggtagagtacctagagcaattttcatatgttatcaaatacacanagggaaaaacaaatgtggtagctgat

SEQ ID NO: 10171 - DNA, 433 bp, Glycine max
agcttattgtcgagtttgagacatatacgtataatagaaactctgcttcaggggttgaccgagtgggaattggtggagttgcaagaaatgtcttgaacttaaaaaacatcttttcacattgctcactcgattgaaaatgttttcgtttcttcagtacttgaagaaaagctttgctttttctgccatttttggtaaaaaaaaaatgggataaggatgctaacatgcctgttaacttttgcacctccttcaaattgtgtggactcctcatggcaactacgacctcacacttatctgggttagcttcaatacctctataggcgatcttgaaacctaatattttccctctcccttactccaaaagtgcatttctctgggttgagtcgcatgttgtgcttcctcagctatgcaaaaatagctaaatcttttggataat

SEQ ID NO: 10172 - DNA, 431 bp, Glycine max
  unsure at all n locations
agcttcagcaccgaaatttagttaggctacttggtttctgcttggaaggaaatgaaaggcttcttgtctatgaatatgttcctaataaaagccttgattatttcatatttggtacgtctctgaatcactgcatagttagactgcttctctatatttcactagtggttcaagacaaagcctaactattcacacaaaattaaaactgatggatgtatatgcagatccaaacatgaaggcacaattggattgggaaagtcgttacaaaatcattcgaggtataactcgaggccttctataccttcatgaagactctcgagtgcgtgttatacatcgtgatctcaaagcaagcaacattctcttagatgaagagatgaatccgaagatagcagattntggcatggcaagactgtttttggtggatcanactcatg

SEQ ID NO: 10173 - DNA, 363 bp, Glycine max
  unsure at all n locations
ttgaatgcactattcaatggagttgacaagaacatcttcagactgatcaacacttgcacagtggccaaagatgcatgggagatcctgaagatcactcatgaaggaacctccacagtgaagatgtccagattgcaactcttggctacaaaattcgaatatctgaagatgaaggaggaagagtgtattcatgacttccacatgaacattcttgaaattgccaatgcttgcactgccttgngagagaggataacagatgaaaagctggtgagaaagatcctcagatccttgcctaagagattngacatganagtcactgcaatagacgaggcccaagacacttgcaacatgagagttgatgaactc

SEQ ID NO: 10174 - DNA, 259 bp, Glycine max
atgatttcctttgttccggaaacctttcttttctcatgtgcacccaaacccaatctccgggttcgaagacaaccttctttctccctttgttggcttgtgtagcatagcttttatatttcctctcaattagatctttgactctctcatgaaacttcttcacatagtccgcctctgcttgaccttcttaatgcgtacaaacagaaacattttgcatatgcaaaagatcaaaacgagttagtgtgctaaaaccataaacaac

SEQ ID NO: 10175 - DNA, 339 bp, Glycine max
tgaaacctcaattcctctaatatatgaagttggagcttcctgtgttcaccagctgcatttagatcaaaattcaaaaacttcaatgcttaataagctttgtgtttcaactcaacaggtaagtgacaagatttgccatagaccaattagaagggagttcctcttataagagctctgtatgttgttctatatgcccacagagcttcatctaatatttgagaccaatccttccttaaatgagcaactgttttctttaggatcttcttgacttcattgttagaaattccagcttgcccattggtctgtggatggtaaggtgaggctaccttgtgtctaacacta

SEQ ID NO: 10176 - DNA, 414 bp, Glycine max
  unsure at all n locations
agcttgtcaagcagtctctctcctatttgtttantatatatgcattcgaacgatataaaaaaaagcaactgagggaaaaagcttctctcctcacatattcaaaacttcaagtattctgtttgttaatatttttaaaataataggttacctacataagtattgtaagtttaggttaattaagattaatacgcattgtaaggttaggttagttattattattaataaattaataagtatgctgttatttgttattaatttttatgtactaacagatatttgaagagtaggttaggttaggttacttagtataaaaatattatttagtttgtagtatatcattttagatttgtagtatatatttgaaggttaagttgtataacaataagtatgttgttattagtttgtagtatatat

SEQ ID NO: 10177 - DNA, 316 bp, Glycine max
  unsure at all n locations
taccaccataggaagccatggataagagcttgaatgtaggagaagatgagtggagggagagggagagaangagcacgaaattttgtgcctcaaatgaggtctgaactttgaagtgtaattctcaaatgatcaaagttccaaaaaaatgcacacacatgacctctatttagagcctaagtgtaaccncctgaaatattattagtaattatatttgatgttngattatatttgttgggtatttgtgtgctattacacttactcactattgtgttctatagctataaagtttgattgtgaatcatattgaattgttttc

SEQ ID NO: 10178 - DNA, 366 bp, Glycine max
gagatcgtccccttgacaacattatcggtgttatctcaaaaggtgtaacaactagacatgctcttaaagatttatgcaataatatgactttcgcgtctatgactgagcctataaatttatgatgaagccatgatagatgatcattggatagttgctatgcaagacgaactaaatcagtttgagagaaacaatgtgcgggaactagctgagacacctgaaaactaccccatcataagaacaaaatgggtatctaggaataagttagatgaacatggcatactcattaggaacaaggcatgattacttgctaaaggatataatccagaagagggaatcgattactaataaacatatgctccagttgca

SEQ ID NO: 10179 - DNA, 168 bp, Glycine max
  unsure at all n locations
agctgatgaccatttttatgtctcgagagtttntgctgttcaatttcgagcgtctagatgagatatgtacccgaatcggacatctgagtgaaaagctatgaccattcgaatttgcctagagctttcgttgttcaatttcaagagtctcgatatattatgtgcccaaat

SEQ ID NO: 10180 - DNA, 425 bp, Glycine max
  unsure at all n locations
agcttgtaaactntatacaagaatgaagctctgataccacttgttggagaagtggcctcagatatcttacgaaggggggttgaattaagatatcacaaactatttccccaattaaaattttattttactttctattcaagttataaattcccttaaaaatgaacttcttaaatattgattcaaatagagcaatttgaatatgaatataaaacaataataaataaaggagtttaagggaagagagattgcaaactcagatttatactggttcggtcacacccttgtgcctacgtccagtccccaagcaacccgcttgagagttccactatcttgtaaaagcctattacaagatctgaaccacacaaggacaacccttcctttgtgttagatttctttacaacaagagaccctcggtctcttaatcc

SEQ ID NO: 10181 - DNA, 434 bp, Glycine max
agcttttatccatggcctcctatggtggtgttcttcttctagactcatcttttccttgaagtggcgtctcctctctctcttccttctccattccgctgccattcatcttccaagaagcaaaggaatccattgatgaagaagatcttaggcctacaagctccaatggagcttacatcagcctctgactctggcttgctttggtgaagggccctcagagctgtataagtttgcatagaactctttcaccaaagccaaatctatgctcccatcaaccaaattggtgaggcgtttatggaaattacacctctccaacttagtcttaaaatcatccaactcggtgtggtagagctccaccttcctctctgacaagatgtttctcgccaggacattatccatgtactggttccaagcatctaaggagtgaaatctccttt

SEQ ID NO: 10182 - DNA, 280 bp, Glycine max
ggcatttttggacaaagtatgacaagcagggggcatgcaaattctcttcccatcaaaccttggatgcaactgagatcgtatccccatctcagctagatcttgacgggtattcaagccatccttcatcttgccttgaatgttaaggagcatcctaatcacattgtcacatacatttttctccacatgcataacatcaagacaatgtctaacgtctagatcagaccagtacgaaagatcaaagaaaatggaactcttcttccatatgcaagtcttactttta

SEQ ID NO: 10183 - DNA, 438 bp, Glycine max
  unsure at all n locations
agcttccaagagttgaagaggcgantgaattcagctccaatgttaattttgcccgaccctaagagaaccattgaagtgtattgcgatgcgagcgggcaagtcttaaggtgtgtattgatgcaagagggaagggtagtggcttatgcttcacgtcaattgcgtcctcatgaagttaactatccgacctatgatttggaactagcagcttgatggaagcttgcttgtggggcttctatgaaggctggatctttgagcttctatgaggtcctttaatggtgattttccaccatggagatgcagcggaagacaaatgagaataggtgagaggaggcgccatccactatggaataagccttggaagaaggagcatcaccaccaagatgagccttggataaaaagcttggagaggatgcttcaatggaagaaaagaaagaggga

SEQ ID NO: 10184 - DNA, 351 bp, Glycine max
  unsure at all n locations
tttgttgaaactaaattggaaaacaaaaaattctggcagacaaaaatggatggaaaaatttctccttataccttattttattttatattgttaattaattataatttatattgttaattataatgaagatcaaactttntatattattttaatttatgataaataaaaatttctttcacatcatttaagttcattatatttttataatagtaaataaagatcatactttttaaattattataattataattactatgacctaagtatctacaaaatcgtatgcctatttttagaatngaccatatttactatttgtaccaaatattaaagatgcattattatttttgaatt

SEQ ID NO: 10185 - DNA, 396 bp, Glycine max
gatgcctttaaagtttttaaggctgaagttgagaaacaatgtggtaaacaaattaagatcgtgagatcagatagaggtggggagtactatggtagatacacagaggatggacaacccccaggtcaatttgcgaaattttttcagaaccatggaatggtggccacatcccctatgcctggttctccggatcagaatggggtggcagaacgaagaaatcgaaccttattaaacatggtgagaagcatgaggagtaatgtaaagctccctcaatttttgtggattgatgctcttaagacggctgcgtatatattaaaccgagttccaaccaaggctgtctcaaagacaccttttgaattattcaagggttggaaaccaagtttgcgacatatacgcgtt

SEQ ID NO: 10186 - DNA, 395 bp, Glycine max
ctatcaggacctataaaactcagcttgttgagagattaatgagccttttaataagagggttaagtgcactctgatttcaactagagcaggctctttgggtattaatcttcatgcagctaatcgtgttgttatagttgatggttcttggaatccaacatatgatctccaggccatctatcgatcatggaggtaagatcctgttaatttttcccttaatcaagataagttttcttctgattaaaaaattatttataaaatataaagtttagaatttgatgtgactgtctcctttacggagaattctttcagtgagcagtatcttagctcattggtcttttagaggggtttcccttatatctaacaataagatgtgaaattgagacttacactcttat

SEQ ID NO: 10187 - DNA, 387 bp, Glycine max
  unsure at all n locations
agcttcccaatcaatcttcgatatctnttatgatcagaataaggctccccctgattgggtagcaattntttatttggatccatgggactatcaattggtctacaatctgacataacagtttctttaagtatgtctaatgcatacttcctttgtgagatgataatcccattttttgactgagcaacttcaattccaataaaatatttaagttttcccaaatccttaatctaaaaatgactaaataaatgttccttccgttgagcaattttttcttggtcatttcctatgatgactatatcatctactcgatgaggtatgacaataaaaaactgaatggtctgcttcactttgtttcatcccaaaagcctgaacatctgagctgaattt

SEQ ID NO: 10188 - DNA, 425 bp, Glycine max
agcttctcatcaatacttgaaagaaaacattataaaaaggtaaaatgaatcaaaattccccaaaaactagcttatgcaattcaactattttagaagttccctcgtttaacttctccaaaaactgaagtgtataagctaattttaactggtaggaaaagttttattcactttacctattcattttcttctataaaatgcttcttgaattttatttccaaactgaacctaaatttgtatatttattacctttccgggtccgagttcatagcttttcttcagacccttggttagaagagtctgcactgttgtttcccattgaacaggtgaggtaacctgccaaatgcataacaggtgcaattatttcccattcatgtcttcttgttagattgaaacaagtatcagtaacatacctggcatgccaatat

SEQ ID NO: 10189 - DNA, 416 bp, Glycine max
agcttcaacattgaatttagagcgtctcgttatattacctgacttattcagacatacaagtaaaaagttattatcgtttgaaaatcctcagagcttcggtattcaatttcgagcgtctcgatatattacgggactcaatcagacatccgtgtaaaaagttattgtcgtttgaattagctctgaggttcagaattcaatttcgagcgtctcaatagattacgggactcaatcagacatccgagcaaaaagttattgtcgtttgaattagctcagagcttcagaattcaatttcgatcgtctcaatatattacaggactcaatcagacatctgagtaaaaacgttattatcgttagaatttggtcagagcttcaacattcaatttcgagcgtgtcgatgtattacgggacttaatcag

SEQ ID NO: 10190 - DNA, 370 bp, Glycine max
  unsure at all n locations
tttactcgaggaggtgctctaggcccagttaatatagcctattctggtgtttatcagtggtggtatacaatcggtttacgtactaatggggatctttatactggagctctttttctattatttctttctactatatctttaatagcgggttggttacacttgcaaccaaaatggaaaccaagcgtttcgtggtttaaaaatgccgaatcccgcctcaatcatcattngtcaggattattcggagtcagttccttggcttggacaaggcatttagtccatgtcgctattccgggatccaggggggaatacgttcgatggaaataattaattagtatattgcctcaccccgaaagatagggccatttttcac

SEQ ID NO: 10191 - DNA, 430 bp, Glycine max
  unsure at all n locations
agcttatgctgcaaatatttacaatagaccttctcaacctcagcagcaaaatcaaccacagcagaaaaattatgacctctccagcaacagatacaaccctggatggaggaatcaccctaacctcagatggtccagccctcagcaacaacaacagcagcctgctccttccttccaaaatgctgctggcccaagcagaccatacattcctccaccaatccaacaacagcaacaaccccagaaacaaccaacagttgaggcccctccacaaccttcccttgaagaacttgtgaggcaaatgactatgcagaacatgcagtttcagcaagagaccagagcctccattcagagcttaaccaatcagatgggacaattggctacccaatngaatcaacaacagtcccagaattctgacaagctgccttctcaagct

SEQ ID NO: 10192 - DNA, 419 bp, Glycine max
agcttgtagggttaaagtctcacgattgttacgtgctcatgcttcagttgttagccatggctatacgagacatcttgccaaacaaagtcaggttagcgataactcacctgtgctttttcttccatgctatatgtagcaaagtcattgatcctgtcaagtttgatgagttggaaaatgaggccgcaattatactatgccagttggagatgtattttccccctgctttctttgacatcatgattcacttgattgtgcatctggtcagagaaatcaaatgttgtggtcctgtttatctatggtggatgtacccgattgagcgataaattgcaaaagaagccattgaatttttttcagaatacttagagaatgctaaacctgttggccttcctgagtctcggcatgatgacaaagtggggggt

SEQ ID NO: 10193 - DNA, 306 bp, Glycine max
tcggttttcaatttcgatcatctcgatacattatgttcccaaatcaaacatccgtgagaaaagttatgaccattcgaatttctcgacagcttccattgttcaatttcgagcgtctagatatattatgtcccaaaatcggacatcggtgtgaaatgttatgaccattcgaatttctcgagagcttctgttgttcaatttcgagcgtttcgatatattatgtccccaaatcggaatttcgtgcacaaagttctgaccattcaaatttctctagagcttgcgctgttcaatttccagcgtctcgatata

SEQ ID NO: 10194 - DNA, 355 bp, Glycine max
  unsure at all n locations
agctttntcttaagcttttgctacaacctttttctccccctnttgtgcaacatcaaaaaagctcaaaagaaaactcgggaannatcaaaccacccagttattaaacaatgggagtnagcaaagatataaagtatcaagagtattaaaatacaaataagccaaaactcataatcaataaaaataatcaaccagaagtcaaataacataaaatgtcaacaaccacaaaatatccaagactgaaacacaagaaaaataagcaaagtacttagcataataatgtagattctaagaaactaaaagccaaaatacacggcttataaaagataaataagcagaatctaaaatctaagaagac

SEQ ID NO: 10195 - DNA, 360 bp, Glycine max
  unsure at all n locations
tgaaggagtttattgcatcagggaacaatttcactttaaaagtgggttctaattggattcctaattttcaacttacctatttggatgtgacatcatggcagataggtcccaactttccatcgtggattcaatcacaaaacaaacttcaatatattggactgtctaacacggngattttagattctattcccacttggttctgggaaccacactctcaggttttgcatttaaacctctctcataatcatatccatggtgagcttgtgactacattacaaaatccaatatctatccaaactgttgatctaagcacaaatcacttatgtggtaaattaccctatctttcanatgatgtgtatg

SEQ ID NO: 10196 - DNA, 301 bp, Glycine max
atggaggctctggtctcttgttgaaactgcatgttctgcatagtcatttgcctcaaaagttcttcgagggaaagttgtggaggggtctcaactgtcggctgtttctacggcttgcgctgttgttggattggtggaagaatgtattgtctgcttgggccaacatcattttggatagaacgaacacgctgctgttgttgttgctgagggctagaccatctgagattacggtgactcctccatccatggttgtatctgctgctggagaggtcataactgttctgttgcggctgattatgctgct

SEQ ID NO: 10197 - DNA, 384 bp, Glycine max
agcttataatatattatacactcgaaattaaacatcagaagctctcgagaaattcaaatggtcataacttttcacccggatgtccgattatggcgaatcacatatcgagacgctcaaaattgaacaacggaagctcttgagaaattctaatggtcataacttttaactcggatgtccgactcaggcgcatcacatatagaggcgctcgaaaaggaacaacggaagctctcgagaaattcagatggtcataactttccacactgaggtccgattcaggattataatatatcaagacgctcgaaattaaacatcgaaagctctcaagaaattcaattggtcatcacttttcacacggatgtgcgattcgggcgcataatatgtcga

SEQ ID NO: 10198 - DNA, 407 bp, Glycine max
  unsure at all n locations
agctntagaaaaaaatgttaactaaaatattattgcctagtttcactcaccaattatgtaatagccctgatgctcatgcagatcctttaaaaaccaaattaccgttggatccgttcttcacttataatntatgntaatttatgaaatcttggaggtgagatgtatgattgaattttataagagtataataaatgaacacattattaaccatttttagactattataattaaaataatgtttccagtataaaaaaatatttctggctaccttactgcagaagattgttactgctaaatggaagactgctacagcagaagagaagaagccttatgaggggatataccatgcggngaaagaagcttatttgcaggtgattgcaaaggaaaaacgtgaaactgactcaatg

SEQ ID NO: 10199 - DNA, 410 bp, Glycine max
gcttgatacatgctgaggttgctccttatcttcaaaacaaggtggttgcttcacttatacttcttcattaatgaatccattcaaaaaagcactcttgacatccatctggtatatcttgatatctttgtgtgtagcataggccagaagtattctaatggcctttagtcttgctactgatgcaaaagtttttcattgtcgatcccttcatgttgattatatccttgagccactagtctttccttgttactaactactttatcttcattgagatttctcttaaagacccatttggttctgccataccctaattctgttcggggaccatcgtttgatggcatgcaacctttgcttgaccgcttcgaggtatctggcacccatctgtgcacaatacataaagttccataacgtgc

SEQ ID NO: 10200 - DNA, 384 bp, Glycine max
  unsure at all n locations
ctaagcttctatgaaggttcgttcctaatttctctacaattgcatcacctctcaataagctagtgaagaagaatgtggcatttacctgnggtgaaaaacaagagcaagcctttgctttgctcaaagaaaagcttactaaggcacctgctctagctcttcctgacttttctaaaacttttgagctagaatgtgatgcctctagagtgggagttggagctgtattgttacaaggtgggcaccctattgcttattttaatgaaaaacttcatagtgccaccctcaactaccccacctatgataaagagctttacgccttaataagagccctccaaactttggaccattaccttgtttcccaggaatttgtcattcatagtgatcatc

SEQ ID NO: 10201 - DNA, 435 bp, Glycine max
  unsure at all n locations
agcttgtatacatgctgaggtttctccttatcttcaaaacaatgtggtttcttcacacatacttcttcattaatgaatccattcaaaaaagcactcttgacatccatctggtatatcttgatatctttgngtggaacataagccaaaagtattctaatggcctttaatcttgctactgatgcaaaggtttttcattgtcgatcccttcatggtgattatatccttgaacccactagtctttccttgtttctaactactttatcttcattgagatttctcttaaagacccatttggttctgccataccctaattttgttcggggaccattgtttgatggcatgcaacctttgcttgaccgcttcgaggtatttggcacccattgttgcacaatacataaagttccataacgtgccagaagtcaaaagagagcattg

SEQ ID NO: 10202 - DNA, 403 bp, Glycine max
  unsure at all n locations
ntatactaggatgtttgattgagtcccgtaatatattgagacgctctaaattgaatgttgaagctttgagcaaattcaaacgacaacaactttttactcggatgtctgattgagtcccgtaatatatcgagacgctcgaaattgaatgttgaacctctgagccaattcaaacgacaatcactttttactcggatgtctgattgagtcccgcaatatattgagacgctataaattgaatgttgaagctttgagcaaattcaaacaacaataactttttactcagatgtctgattgcgtcccgtaatatatcgagacgctcgaaattgaatgttgaagctctgagccaattcacacgacaaataacttttactcggatgaatgattgagtcccggaatataacaa

SEQ ID NO: 10203 - DNA, 425 bp, Glycine max
agcttcaacattcaacttcgagcgtctcgttatattacaggattctattagacatccgagtaaaaagttattgttgtttgaatttgctcaaagcttcaacattcaatttcgagcgtctccatatattacgggactcaatcagacatccgagtaaaaagttattgtcgtttgaatttgctcaaagcttcaacattcaaattcgagcgtctcgttatattataggactcagtcagacatccgagtaaaaagttattgacgtttgaatttgctcagagcttcaacattcaatttcgagcgtgtcgctatattacgggactatatcagacatccgagtaaaaagttattgtccgttgaatatgctcagagcttcaacattcaatttcgagcgtcttcatatattacgggactcaatcagacatccgagt

SEQ ID NO: 10204 - DNA, 396 bp, Glycine max
  unsure at all n locations
agcttaaactattaatctcttaacagatatacttcatgtgtggctgtgatcgttccgagtggtgaaattacggttntgtccttttccttttctgatgcaggtacttcttgaacgtgattntcaacattcttaacaagaagatctacaattacttcccctatccatagtaagttatagcgattatgcgtattttcaactttgtgtggtgttagctcatgaatatcatgtcttgatgttaattgagattggatccgtgaaatgttatgcgcagacatgtgtctctgtcctttgttaacgtcggatggtaagtgaataaggtttttttttattttttattctgaattgtgaataaggttaattaaaggaaatatctcgattcgcgtttctggattatta

SEQ ID NO: 10205 - DNA, 400 bp, Glycine max
acacttaaactcaagcttgagcattcaatggcataatgcactctttgtccgattcatgcacataatttatcgagacgctctaaattgaacaacggaagctctcagaaaatttaaatgctcataacttttaactcggaggtccgattcaagcggataatatatcgagacgctccaaattgaacaatggaagctgttgagcaattcaaatggtcataaatagtcactcggaggtccgattcaggcacataatatatcgagacgctcgaaattgaacaacggaagctctcaagaaattcaaatggtcataacttttaactcggaggtccgattcacgcacataatatatcgagacgatcgaaattgaacaaccgaaactcttaagcaattcaaaagggcataa

SEQ ID NO: 10206 - DNA, 394 bp, Glycine max
cgctttaattgaagtgaaacactttagttaacgaggttctctttcttgtttatagctaccgtgaatttttattctgacaacaacaactaaaactaatcggccatgcatggggtagaaagaacgaagctcttgaaatttatactaatttggcccaagtacgaaataataataagaagataaaaacacttaccggaaaaagtaaatctaatgattccctggctgcatgtcgaacggctctagtgggatacattggaccaccaggagaagtaaagctatacaaacaagttttcaatctcgtactagtagtcattctcaattccaagcctgtgccgttaacataaacacaagaatggcatagttaagtcatgagatattaatagtccctgtccaaata

SEQ ID NO: 10207 - DNA, 336 bp, Glycine max
  unsure at all n locations
ttcaattggagcagtatgtgggctgtcatggccagttgacagatttatatttcaggttcttgatgactcaacaaatcaatccttaaaggtatccaattaatccagtaaagcttcattgcagattccatatgcatctgttgggtgcaaatttacagtaattaagtgttttcaaacatgcaagaatgtgtccaaatggagtgtcaaagatggatacaaaaaggcgtgaatgtcaaatatgaaacaaggacaaatcgcaatggttacaaggcaagtgccatgaaggacggtttggagaatgaatatngtcatgattgcgagaatgtaacaatatttgat

SEQ ID NO: 10208 - DNA, 256 bp, Glycine max
ttggtcaatttcagactgccatattttttgacatgttgtgtgcgattgaggcacatgatatatcaagacgctcggaattaataaacaaaggttctaaagaaattaaaacggtcataacattgcagttggatgtccgattcatgcacataatatattgagacgctcaatactgaacattaaagctctagtccaattagacggtcataactttttgacatgggagtgcgattgaggcacatgatatatacagacgctc

SEQ ID NO: 10209 - DNA, 394 bp, Glycine max
  unsure at all n locations
tacattatgtgcctgatttcttttccttcatttgatgataaaggaacaattaatgtgttatcatggcaaggtcccatttgctcgtctctctaaaaagtgttcacaggagatgcttaattataataatggtcaatgggtattaataatatctaataaatactgataaaaaaagtatctaataaatctttaaatatattaaaagataaacaacaaattttatattttaataaatacattctattaatgtatttggtttgttaactaacactctaaagaaaatggtcataatactctcttgaaaaanatatatttatgtttattggaattaatatatatcaactcatgtatttttctattagtagtataaagtgaaacacataagagtaaatcatac

SEQ ID NO: 10210 - DNA, 308 bp, Glycine max
  unsure at all n locations
ttatcaaatggatgttaaaagtgattttctaaagggcttaattataatgaagtatatgnngaacaaccaccaggttttgaaatattggataagccaaatcatgtttataaattgaaaaaggctttatatggcttgaaacaagcccctagggcttggtacgagcgtctaagtaagttccttttagaaaaggacttttctagaggaaaagtggatactattctttttataaagagaaaatcacatgatattttactagttcaaatttatgttgatgacattatttttggatccactaacaaattgttgtg

SEQ ID NO: 10211 - DNA, 402 bp, Glycine max
  unsure at all n locations
ntcaaattcttacctaccacgtaccttagaagttgttatagagtttgatttaccagaatgacggcatagcacatgggctcaagatttctctcacccatcctttttccatcaagctctccgctttcctttggatctcttttgtctcttccaaattgcttctatatgctggcttatttggtaaggaagctcctagaatgagatcaatttggtgctctatccctctcaaaaaatgtaacccatgagggttgtctttagggaagacatccccaaactccttcaataatccttccatacctataggcaaagcaatagaataaaaacaataatcatggggcattagtaaatacataggtagcctagctagtatcactctctccacctctttctctctcatgaacaagc

SEQ ID NO: 10212 - DNA, 359 bp, Glycine max
  unsure at all n locations
agcttagctacactttcctctctaatagtttatttcacctncttgagatgagaagctagagcttagctacacacccccttataatagctaagctcacccccatgacaaaatacatgaaaatacaaaaaaagtccctactacaaagactactcaaaatgcctcgaaatacaaggctaaaaccctatacaactagaatggccaaaatacaaggcctaaacgaaggaaaaaaaacctattctaatatttacaaagataagcgggctcatacttagcccatgggctcaaaatctatcctaaggctcatgagaaccctagggccttcccttggatctctggcccaatctacttggagtcttcta

SEQ ID NO: 10213 - DNA, 392 bp, Glycine max
tgtaaattaaattgagtctaatagaaaaaagaatttcgttttataaactataaataacatttttacactctcatacttgatgaaagattcaagtaaaaaaaatgcttattgtaaagcattatagttaaattagacccatgaataatatttaggaaaaattgcaattgcaatggcacttttaatttataaaaaacattcacctccttttgaatgatttttttaagattatgattttttaaatgacgagtcagtaaaaaataattgtgtatgatttttaaaaaatttaaaaatcaacaaacttttattataattcgtaatttgatatcattgcatatactaatagacatttatattttattatgaaaaatttattaaaaacaatcaaataaata

SEQ ID NO: 10214 - DNA, 408 bp, Glycine max
  unsure at all n locations
taagtcacctgcggcgtgcagctcaactttatacccttccattgttttgttctacttacatggacttgatggggcctatgcaagttgaaagccttggaggaaagaggtatgcctatgttgttgtggatgatttctccagatatacctgggtcaactttatcagagagaaatcagacacctttgaagtattcaaagagttgagtctaacacttcaaagagaaaaagactgtgtcatcaagagaattaggagtgaccatggcagagagtttgaaaacagcaggtttactgaattctgcacatctgaaggcatcactcatgagttctctgcaggcatcacaccacaacagaatggcatagttgacaggaaaaacaggactntgcangaagctgctatggtcatgcttcatg

SEQ ID NO: 10215 - DNA, 470 bp, Glycine max
  unsure at all n locations
gcaagcttagtcctagaagggacggaccttnttgtgtttagagaggatctataacaatgcctatagattggacctcccagaagagtatggagtcagcaccacttttcacatttctgatttaattccttttgcaggtggagctgatattgaggaggaggaacaaacagatttgaggtcaaatcctcttcaaggggaagggtatgatgctatcctccctaggaagggaccagtcactagagccatgagcaagaggctccaagaggctagagttgctgaataaggccctagggttctcatgaatctcaaggtagatttctgagcccatgggccaaggttgggtctgttagtgcttagctntactaagctntaaaagattggctaagaatttgttaaaacataagcacttanacaatgatggaaagctggagttgctgcacatgatgtccaacgttatgtcaaagaataagatc

SEQ ID NO: 10216 - DNA, 416 bp, Glycine max
  unsure at all n locations
tctcgggctctngcacacctattttaaagtccttcttatgcttttgacctttctctttaggggctacattttgttcaccaacttttttcttgaaacagaagaacactactaagagacctggaagaaacagcaatgtgacaccccccaaaactattgctattgttgctcccttgctcattttcctgtttgatagatcacttggtctttgagagactgttggtggagacaatgtggtcttaggggaaactgaataacattgtttcaaaggtgctccacataacatcaaattccctctatatgaggaggcaggaaacttatggagacctgaaggaatagatccattcaagtagttgaagctcanatccaaatccttaaggctaggaagggtaacatcaggaatacgtcctgtgagagag

SEQ ID NO: 10217 - DNA, 324 bp, Glycine max
  unsure at all n locations
ctcctcatcaaagagnttatcatccacattaaacaattggcttactagttgattgaacttgttgatgtggccatggagatctccttccatctctattttgagttgatacaactccatcttcaaacaaaggcaattggtaagcgactttgatgcatagatattctcgagcttctcccacaaagtcttcggtgttgtctccttcaacacattgtgttgtatctcgggagcaatgactaacggaatcgtgctcacaaccctcctttggatcttagtccactcagtttcatttatagaagccagcctatcatcttctaacgcctgatc

SEQ ID NO: 10218 - DNA, 422 bp, Glycine max
  unsure at all n locations
ccttatctttatcagtaacaagcacatttccattcacaggtttagcgacatcaacatcatcacttgagccctcactttcaatgtttccattatccagtaatatcatgcctcttttatttggacattgagaagcaatatgaccaactccttgatacctgaaacatttgatatcatgggatctagaagatgaattaatttccattttacctttaggtgcagcaaatgaatttttggacttagcttcatcttttgactttgtcatagattttttgttttgccaatttgacttccatgaataagtggaatcaaatttggaagtactcttagctntcaattgcctctccacttgaatagatntatgcagcaagtcctctatctccacataatgatgcaattctaccacattagttatctcctccttt

SEQ ID NO: 10219 - DNA, 447 bp, Glycine max
  unsure at all n locations
catgcaagcttccttaagaagattcctaaagaagctatatcttagctatacacttctctctaatagctaagctcacctcattgagatgagaagctagagcttagctacacacccnctataataactaagctcacccctatggcaaaatacatgaaaatacaaaaaaaatctctactacaaaagactactcaaaatacctcgaaatacaaggctaaaaccctatactactagaatggccaaaatacaaggcccaaacgaaggaaaaacctattctaatatttacaaagataagcgggctcatacttagcccatgggctcaaaatctaccctaaggctcatgagaaccctagggccttcccttggatctctggcccaatctacttggagtcttctatccaatgcccttgcggngtaggaatgcatcactaagtctccagcattggtttc

SEQ ID NO: 10220 - DNA, 491 bp, Glycine max
  unsure at all n locations
agtcacctgcggcatgcaagctctccctctntgaacaaatacccctcttccaaatagaatccttcttgtgcctttttcccacaactctcataaatgggagagaaatgttcatctaaagcatacaagtccctactattatcaaatcctaaaatttgagctcctagggagcaaaacaatgtgtgtctcctagagagggcatcagctaccacatttgtttttcccttnttgtatttgataacatatggaaattgctctaggtactctacccattttgcatgcctcttgtttaacttgctttgccctctaatgtacttaagtgattgatgatcactatgaatgacaaattccttggaaacaaggtaatgttcccaagtttggagggctcttattaaggcataaagctctntatcataggtggngtagttgagggtggcactatcaagtttttcactanaataagaaatagggtgcccaccttgtaacaatacagc

SEQ ID NO: 10221 - DNA, 267 bp, Glycine max
ctaagttaaactgaggttcatctgtagatccctcatgtaagactagactcagctcaagtagcttactaaagtttagcctaatttagcctaagcttcgtctgcgatggtgtaatttttacgaggaggtggctcgcggtggtggcggtggacagttctgatgatgagggtgaagaaactgacgaggaatgcatacacaacgagagtgccacgtgtctaaatgaagacctaacgactaacaatgatgcagcccagatatatggaccttta

SEQ ID NO: 10222 - DNA, 436 bp, Glycine max
  unsure at all n locations
agcttctntgcacttttttcatttgaatttcttaattagntntggacattactttgtttgacataggaagatgccatgtttcatttgcttgacttgaagtccaaggaagaaggacaattctcccatcatagacatctcaaattctttntgcataaagttggaaaattccttacacaaagcttcattaatagcaccaaagattatgtcttcaacataaatttgcacaatcaacaactcattatttgatctcttgataaacaatgttttgtcaacttgacctcttacaaaagatttcctaattaggaaattgctcaatctttcaaaccaagatgtaggttcttgttttaaacaataccgagccattttcagcttgtaacatgattagatgtgtgaagctacaaacctagaggtggctacatatatctttcttcatgat

SEQ ID NO: 10223 - DNA, 369 bp, Glycine max
tagactaagttcagcctaccatcctcagactgattttctactgaacagacaattcaatcgtcggaggaccttttgagggcatgtgtcttagaacaaaaggggagttgggagagttatttgtcgttgatagagttcacctataaagacctatatggtataaggtgtaggacacccctacgctagcttgagcccaaagagaacctcaccttagtgcctgaagtggtaccataaactactgagaaggttaagttaatccaagagaggatggtgactgctcagagtaggcagaaaagctatcagggcaagaggaggaaagtcctggaattcaaggttggtgatcatgtattcttaagagtcactctatggact

SEQ ID NO: 10224 - DNA, 380 bp, Glycine max
  unsure at all n locations
gaacttaaatctcagcttaacactcgtttgatgggtgcaccatcttgcttgttgggtgcgtgnaacaaagccccattatggaatggacatacatcaactaccatagaatggactgaacttagtttattgggaccgataataatagtcgcttacaacacttgtcgtaaacttgtaaaaacagatgtaatgaattttgtagggagataattacattatttcaaaaattaatatataagtatattttccttgaattatacattgtcgtatatgataaaactgttgattttaataataattatagtaaaatcatattgatgatatatcttattaatcaataatgcggataaaaatatatatttacttaacttacatttaaaaga

SEQ ID NO: 10225 - DNA, 343 bp, Glycine max
  unsure at all n locations
ttgagaaaattcaaacgacaatttctnntttctcgtttgtcngacngagtcccgtaatatatcgagacgctcgaaatggaataccgaagccctgagcaaattcaaacaacaataactttttactcggatgtctgattgagtcccgtaatatatcgagacgctcgaaatggaatgctgaagctctgagcaaattcaaacgacaataactgtttactcggatgtctgattgagtcccgtaatatatcgagatgctcgaaatggaatgcagaagctctgagcaaattcaaacgacaataactttttactcggatgtctgattgagtcccgtaatatatcgagacgc

SEQ ID NO: 10226 - DNA, 384 bp, Glycine max
  unsure at all n locations
accgagcagntctaataagaacgggaattttaatattcnttcgccnngcagacanataacgggacattttaggattccatttttttagtaccgcggccaaaatgaactcctgcttccatcatctcttccaagattatgtttcaatatctttttgtcatgtatatttattcccacacttttctttcatttcaaaatcgagattctatatattttttgaactgaaagaaagagaccccatataatgaaatggaaataagtgttccaaaggaacctcctctttaaatgatcgggccaagcatatgagcatgagtagtaggtaaaatatattacttctcattcgtataaaaattaacagataccgatatgtgtgaatcaataatattc

SEQ ID NO: 10227 - DNA, 392 bp, Glycine max
  unsure at all n locations
aactcaagcttcttagtttcagatgatgcagatgggtttggagctttctcatgcattctctctaatgactatggcatcatttctggcgctaaactgctgggagttggaggccatcttctcaattaaatttctggcttcagcaggagtcatgtctccaagggctccaccactggcagcatctatcatacttctctccatattactgagtccttcataaaaatattggagaagaaactgttctgaaatctgatggtgggggcaactggcacatagtttcttaaatctctcccagtactcatacaggctctctccactgagttgtctaatacctgagatatccttcctgatggctgtggtcctggaatcanggaaaattttttctaagaatactc

SEQ ID NO: 10228 - DNA, 394 bp, Glycine max
tcaagaaaaagatggcctcagcaaatttcttatttttttattggaattctatcaatagacctccaatctttaatggagagggttaccactactggaaaacccgaatgcaaatttttatcgaggcaatagatctaaatatctgggaagccattgaaatagggccttatatacccaccacagtagaaagagtttcaatagatggtagttcatcaagtgaaagcataaccatagaaaaacctagagatagatggtctgaagaggatagaaaacgagtacaatacaacctaaaagccaaaaacataataacatctgccctaggaatggatgaatatttcagagtttcaaattgcaagagtgctaaggaaatgtgggacactcttcgattaacacatga

SEQ ID NO: 10229 - DNA, 465 bp, Glycine max
  unsure at all n locations
gcttcctcaggagtcacaatcttcattcttcttgtaagacatctttttatcgcatatacattagtggatattgcctctccctagtagcaatgaggcaatcctattcctttcaacatacatcttgccatatcaagcaaagttttgtttctcctctctactaacccattgtgttgaggagtatatggggttgtcacttcatgttcaatgtcttttatcttacaaaactcatgaaaactccttagaattatattctccccctccatcagtccttagaatctttaattcatgaccactttgtctttcaaccagtgcacaaaaattcacaaatactgaaaacacttcactcttttcattaagcaagtacaaccacacctttctagttaattcatcaacanaggtngtgaaatacctgtttcccccaatgatggagtcttaattggaccacacacctatgaatgaaccact

SEQ ID NO: 10230 - DNA, 411 bp, Glycine max
acactcaagcttggttatctccttcttcactacaacaagaatcaccgggttgagtcttctttgtggctgtcttactggtttagctccatcctctaaatttatttgatgcatacatgtggatgggctaataccaggaatgtccgtcagggtccaacctatagccttcttatgcttcttgagaactgacaacaacttctcctcttgctcatcagcaagggaggcagatataatcactagaaaactcttgctatcatccaagtaagcgtattttaaatttgatggcagagacttcaattctggtgtggtcggctggacagtggtagaaggagatggtttctcagcctttacctcataaagaaagtcagaggtatgtgtacttcccgaaacatggttagtcctatctgactctat

SEQ ID NO: 10231 - DNA, 430 bp, Glycine max
  unsure at all n locations
agcttcttattcatattttgttggtacatattgcttnttattcacataacaccaatagtattccatttataagcagagattgacgattcaaattacatatttataagagaccaaccaaacacaaagcaaccacagcttataacacccgtaacaaatcctagaacatttgaatttgcaaaggcgggccatgaccactttattctaaaacttcaaacacaacacatacttattatttattgatacatgtattacagctatctctgcttgaaggttatgcatgttgatctcacttgcagctgcatgggtcgcaagtgcagtttgatccacagttgcagccaccgttctcagctgcaacacccatttcagcaccctcgaattgggccttcaccggcccaacacccaaaactagagtctcatttgtgatcttctc

SEQ ID NO: 10232 - DNA, 429 bp, Glycine max
  unsure at all n locations
agcttatgacaatttgaaattctcgagagttttctatgattaattntgagcgtctcgatatattataagtctgaatcggacctacgtgtgaaaagttatgaccatttgaattttttgagagattccgttgttcaatttcgagcgtctcgatatattatgcgcctgaatttgacttgcctgtgaaaggttatgaccatttgaatttctcaagagcatgcgttattcaatttcgagcttctctatatgtgatgcgcctaaatcagacatccgggttaaaagttatgaccatttgaatttctcaaaagcttcggtagttcaatttcgagcatctcgatatattatgcgcctgaatctgacatccgtgtaaaaagttatgaccactttagtttatcgggagctttccgttttcaattgctagcgtctctatat

SEQ ID NO: 10233 - DNA, 405 bp, Glycine max
cttacttagtcatatggagatcccaaatgcacaaggttgagacatccttatatacgccttcttccaaatcaatgccaactttggcatttccagatgcatgttctgcatacagagaagatatgatctccattgcattgaacccagcattctcagccaaagttctaggaatcatttgaaaacttttagcaaattttgctataacatattgatccaacctgcagggccattgaaaatgtttagtccatcccattcccgtgtcaaataccaaataagcattgaacaaaataaattaagtccaatgaatagagacaataagtatttccaaataatacacagtaatggtgccgggttaaaaagcatctagtgaatagagatagtaactatttccaaatattacacagtaat

SEQ ID NO: 10234 - DNA, 390 bp, Glycine max
tggaggacaaaacaaagtagtgtacaagttcttggttctatggcataccgtgctcctcagcatttgtctcggtgtctccctaagattgttcccaaattggctgaggtataacatgaagcaaacattatttttcacttctaaattccttttaagctatagattgcattaccttaacccatctcagtatttgaaggttttgactgatacacatcctaaagtccagtcagctgggcaaatggcccttcaacacgttagtcttgacttacgaactattctatccatttgattcctgcttgcttctgtgattaatgtttttaattttcatgttttttccaggtagggaatgtgatagagtccagaaatatctggtcttgtccctactctacttaa

SEQ ID NO: 10235 - DNA, 454 bp, Glycine max
  unsure at all n locations
tgcaagcttgaggcgtgaacccaccatttttagtattataacacctgttatgtgtctactatcattgtaatcatctccttctccaccatttgnggcactacttgagctgccaggtccttccacctctgggcgtattcctggaatgactcatgccccttcttgcacaagttctatagttgcactctatccggagccatattagaattatagtgatattgcctaacgaacgcaaccattaggtccttccaagaatggactcgagaaggttttatattagtataccaagtgacaaatgctgattcatggggcaagtagtccccttatacttatcaaagtccaagaccttaaacttcagaggaatgatgacatcaggcactagtcacaactccgcctccttcaatggccctcagcctntcctctatatgatgcaaatttccgctttctaccatagcaa

SEQ ID NO: 10236 - DNA, 454 bp, Glycine max
  unsure at all n locations
agtctcacgattgttttatgttgatgcaactatttgttagccgggctatacgagacatcttgccaaacaaagtcaggttagccataactcgcctgtgctttttcttccatgccatatgtagcaaagtcgttgatcctgtcaagtttaatgagctggaaaatgaggctgcaattatattgtgccagttggagatgtattttccccctgccttctttgacatcatgattcacttgattgtgcatctcgtcagagaaatcaaatgttgtggtcctatttatttgcagtggatgtacccagttgagtgatacatgaagatcttaaaagggtatacgaataatctatatcatccaaaagcatctattgttgagaggtacattgcagaagaagccattgaatcttgttcagaactacattgaaaggctaaancctgtggccttcctgagtcttgacatga

SEQ ID NO: 10237 - DNA, 446 bp, Glycine max
  unsure at all n locations
agctngacatctatatctataatttgttttatttatttaaaatttagtgttcaaatagtataaaaatggatttatatttctaatattaatagtttaattcgctttctcgtttatattttcatgttactattatccttgtatattgaattntaaaattgtattagaaaaaattatttaatatttcacattctaggtttatactaccatcaaataatgtttaatttactataatataatttatagtgattttaaataacagctagtgtacttaatgtttgaagtcccagtatatcaacattgttgtctcaacaactacatttcatatttgtttatgaatgtatctgatgaaagagtctgtcttatatatgtgagaacaagagaataactaatgactattaaattctattatcagtagttgagattagaaacaatctagctaaatgact

SEQ ID NO: 10238 - DNA, 343 bp, Glycine max
tcaagcttgctcgtcttgctgatatttatcatgcagacttttctgatgatgttcgatatcaattagggatcaacttgaaacttatgtgcttcaagtgagaagaaatgcttctttttccacttgtgaagatgttcaaagtttggctatgaagatggttcaaactgagaaacatttggtatttccattggtttataaacttattgagctagctttgatattgccggtgtcgacaacatccgttgaaagagctttttcagcaatgaagattatcaagtctaaattgcgcaataagatcaacgatgtgtggttcaatgacttgatggtatgctacaccgagcgggag

SEQ ID NO: 10239 - DNA, 353 bp, Glycine max
  unsure at all n locations
gagaattgcactaagcaatcactacgcatggctccaagctccacggtgaaggacgcatgaactaaatcgccattcatggggctcccgaaaagggttgaggatggcgaattgcactaagcaatcactatgcaatgctccaacctcctgcgtggaggacgcatgaactgaaacgcaattcatggcgctcccaaaaagggttgaggatggagaattgcactaagcaatcacttcgcatggctccaagctcgtgggtggaggacgcatgaacgaaaacgcaactcatggngctccgaaataggattgagaatggagaattgcactaagcacattacggcacatggctccaaactcat

SEQ ID NO: 10240 - DNA, 410 bp, Glycine max
  unsure at all n locations
ntccatgaagaagaagtttggaggtataggattntgtaatctctatggattcaacctagccatgttaggaaagcagggttggaatttgattaataacccacatactacaatttataaaattctcaaaaataaatattatccaaatgttggattcttagatgccaaactagggcataaaccaagctatacatcatatagtatttttgcttcacatatattggtcgaagaaagcaattagtgcagaaaaagtgatggtagctctataaacgtttggacccaaccttgggtgtgagcatcaacaagcccatatatcacttcatcaaccctgctcgatcttgatgatctcaaagtcagttcactcatcgacaaccaacaacgatgttggcgtcaagatgtgctacaacaaattt

SEQ ID NO: 10241 - DNA, 418 bp, Glycine max
  unsure at all n locations
gctcgccgccacggagttnttcgactatgttcttgtgtggnggttctatctacaaaaggagagagcaagaaatgaagagccaatggttgatacatgggtagagatgaaaaggatcatgaggaagcggtatgtgctggctagttactcaagggacttgaaattcaagctccaaaaactaacctaaggcaacaagggggttgaggagtatttcaaggaaatggatgtgcttatgattcaagcaaagattgaagaagatgaggaggtaactatggctcgatttcttaatggtttgactaatgatatctgtgatattgttgagttgcaggagtttgttgaaatgggtgatttgcttcacaaagcaatccaagtagagcaacaattaaaaaggaaaggagtggctaagaggagttctaccaac

SEQ ID NO: 10242 - DNA, 352 bp, Glycine max
  unsure at all n locations
aaactcacgcttagatgttctaaatttntttattatgtgatattatttcccattttctatactatgctagcaaacatgaatttaatgtattgtttaaaatataatatttatatttttgaaaaatctcaatgtacttatatttatattattttgatttagatgtttataatgtttatgtggaaaaccttttttttagagtatacattttcattgtaatttcatttgtaatcttgtttagtttctctgtaacagttagtttttcatttatgatttagtttcttgctgactcagcagttagacacttattttttttaaatatttatattattggatcagtaatttgaaacacaag

SEQ ID NO: 10243 - DNA, 410 bp, Glycine max
atctggtccctaaaaaggatgggacatggctgtataagcaagcttcatgatgatgaatcaagatcgagtcatggagttttgatgatgccaaagaatcaagagtcaagcaaattccaaagattcaagaatgaagctccaagaatcaagatcaagattcaagactcaagattcaataatcaagagaggactcaattaagataagtattaaaaagttttttcacaaactgagtagcacatgaatttttctcaaaaccttttaccaaagagtttttactctctggtaatcgattactagattattgcaatcgattaccagtagcaaaatggttttcaaaaagcttactaactgaatttataacgttccaattaatatcaaaatgctgtaatcgattacaagtattttgtaatcg

SEQ ID NO: 10244 - DNA, 246 bp, Glycine max
  unsure at all n locations
gcttctgggctgagctnggaatngacattgttattgaggtttattccccatttcttgacttatttcaaacacgatccaatattgtttacttattgaagagctcctaaaaagaacaatgagtgagattttgttcacggaaccggagtgtttgtggatggccctgtggctggcgaacacatccaagcacgtgctaaaaaggttatcatcactgctccagcaaagggtgctgatattccaacttatgtt

SEQ ID NO: 10245 - DNA, 417 bp, Glycine max
  unsure at all n locations
catacttcatatggatcaactttcacngttattgttttggatcgccaaaaaaaaaacaatttataatataatttattctaattcatgtataaataaaaataactatttttataatgtttaagagaattaattgaaataatttaattttgttaatctgaagtaaaatataaaattattcctaaaatgtcattatttgaaatttgatatcatgaataaaataaaaattttgaaaatacaattgtaattaaacaaagaatgttttaagaatcatattattaattatggacaaaattatttgagtccaacatacaaattaaaataactgttttgcttatatataaatgcaaaaaactacaaactaaattaaatcaaaccaaacaaattaaatataactattttggatttaattttattttt

SEQ ID NO: 10246 - DNA, 422 bp, Glycine max
  unsure at all n locations
ntatgcaagtcaattntcaggaggcatctcggagagaatctttntcggacttatntgcgcaaaatctcttgaactaggaagatgttgtccatcatctttctgttcttaatgaaagcagtttgagtttccccaataatagtctcaagcactggggctatgcggttggccagaattttagacacaatcttgtataacaaattacagcaagatatgggtctaaaatggttaacctgngaggcctgatcatgcttaggaataagcgcaataatagcatggttgagctactttagaatttttccagttgtaaagaattcattaaccgctgcaaagatatcatcaccaatgatattccaagccttcttgaagaataaaacattgaaaccatctggcccaggagctntattgttattcatcacagaaat

SEQ ID NO: 10247 - DNA, 419 bp, Glycine max
  unsure at all n locations
gcttatatatataaaaagatatatcctttacttatttaaaccaaanacaattttgatatgtgttggtttatgtaattttgaaataaaaatatatagaaagataaaacttgaaaggttatatatagaaagttcataaagtcgtaaaagatgaatatataaaaatgcgtcaaaagtacatgatgaagatagggtgaacagaagttgggttaagtgaatntttgacaacggaaaccaaaataataaaataaaaaaaaaaagaaaaaagctatggaaaacttgcgtgtccccaaagctatggtttgtagtctgatgcagagctgctgagataaggatcatcagatcgaatatcttcctccatactgccttcttctctgactatatggattccaattgctntaatgactgagctctctaactct

SEQ ID NO: 10248 - DNA, 401 bp, Glycine max
  unsure at all n locations
agcttgtgctaagaangctttatccatttcatcatattnnaagaaaattgaatgtcatgatccatcacttctctgcatatatatttagtattaagatgtgtaccaacaatcctaaaatgttctgtgcagatattttccattgaaagacactacacaagattagagactccgaaattaattttgttttatgccaattgctattatgctttgttgtgtcttgctaaatgcatatttaatttgaagcaacttcattatttttgtgttatctgttaatggtttaattggataatagtttacaagccacgtaatatataatttacatatatgtgcagagatgtaatattgtcatgtaaattttaatatttaattattgttatgttagagtatgtgcatgcaattgt

SEQ ID NO: 10249 - DNA, 457 bp, Glycine max
  unsure at all n locations
actcagctagcctagaattaacaaggaatgttatcatatattcaattttcattaagtaggaataatacttgcaaatgaaccacacctgcataactgatgaagagctgaggttcttaaaaggtaagcttttgaaagggttgggtttacttctatcgcagcatttagatcatcaagtgcctatatataatctttcacttttatgttctgtgatgcctgctcaaacaactcagcaacattatcaggttttcgatctaatcacatccaaaaaaacaaaacaaatacagttcaggcctcgaagaggcgtangaggtgcatgttgcangtgttgccctcgtaccacaccgaggagacgccaacctgcgacttggccatgttgtcctcggagagacccacaccatggagcatggcctgngaagtgccctangacttgnngctcgtgatgcggaagttgtacctg

SEQ ID NO: 10250 - DNA, 422 bp, Glycine max
  unsure at all n locations
tctaagtcacctgcggcatgcaagcttcaggcaatcctacnncagagaatttcacttttacatctattccaaangctgagntttctacttcaaatgctactgtcaataatacttctaatattgtttcaaattctgatgttacctcttccagtagtgctaatctttggcatgctaagttaggtcatcctaatgagcatgtaatgaaaattattctcgaatagtgtaatatttctcaactgaataaaaacatcacagagttttgttcctcttattgtatgggtaaagctcataggttaccctctcacggctcaacttctgtttattcacctttagaattcattntcactgacctatggngaccctgccatgttacctcttatgttggctatacatatgatgtttccttcattgatgctctctct

SEQ ID NO: 10251 - DNA, 418 bp, Glycine max
  unsure at all n locations
agcttgaccaataaagacagtatcatattatactgttgganatnaataggctctttctgttttcccaccaagtagcttttatacagatttttcgaaatggcctctctcatcaatccagtgagaccttcacccacaatattaaagagcaaaggggctagagggtccccttgtctcagacctcgagtaggggcaaattcattagtagggctaccattcactaaaatggaaatagttgctgattgaaggcatgcagcaatccattgcctctatttagtgcagaagcctaatcttgacagcatatagtccaagaaagaccaagatacagaatcatagcagatttacctgggttagtttactaaagggtaaatttcaagtgctatccttagtacagaatttcatagctnttgttgaaagacag

SEQ ID NO: 10252 - DNA, 412 bp, Glycine max
  unsure at all n locations
agctttntgctttacgctatatgaacattttttgcttccaacaatgagaaggtgaattcgtggttcttgcactttctcatgatttcgtggttctcgtgaaaggtaaggcacaagcaataaagggacaattagagtcttatacagggacggggtaatattaactgagaagtgttagaaatatattatttttaatagattaaaatttattgaaaaatataaattttttgtattattaaatatgactagttaagatacccatgtaatgtaaattttttgtattattaaattgaattatatgttttcaaaaaatagttaaatactattgaataaaagaaaattattaccgatgtaagagaaccattgtcaatgttaaactattaaacaaatgtaatataagaaatgttattctagt

SEQ ID NO: 10253 - DNA, 421 bp, Glycine max
  unsure at all n locations
agcttccgttgttcaatttcgagcatcttatatgtgtatacattagaancggaaatccgagtgaaaagttatgaccatttgaatttcttcatagcttccgttgttcaatttcgtacgtctcgatatgtgaagtgcctgaatcggacatccgagtgaaaagttatgaccatttgaatatctcgagagcttccattgataaatttcgagcatctcgatatgtgatacaccagaatcggacatccgagtgaaaagttatgaccatttgaatttcttcatagcttccgttgttcaatttcgtgcatctccatatgtgaagcgcctgaatcggacatctgagggaaaagttatgaccatttgaatatctcgagagcttccattgatcaatttcaagcgtctcgatatatgattcgcctgaatcgga

SEQ ID NO: 10254 - DNA, 481 bp, Glycine max
  unsure at all n locations
tcaattggagtcttgtcttttacagacttatttagacatctgtngagtatgtaaacagcagtgtagactgcttcagcccagaatgtgttaggtagtcccttatccttgagcatcgatctagccatttctataactgtgcgattctttctcttggacactccattttgttgaggagaatatgcgactgtaagttgtcgctcaataccttcatcctcacaaaatctttcaaactagcgagaggtgtactctntgccgcgatcacatcttagtacttttatccattttccactttgattttcagcaagggccttgaactttntgaatactccaaagacttctgatttttcttttagaaaatatacccatgtcattctagagaagtcatcaatgaagagtatgaagtacctgttgttctcatgtgatggcgtcctcaatggtccacacatgttcgtatgtatcagctctaatagaattttcgctc

SEQ ID NO: 10255 - DNA, 289 bp, Glycine max
accacattcaatgttcccatcaaaacactcactatcctacggaaagattgcctaacagtattacacacaaatggaagcttggtaacctattgtatgctctcaacacaatttcaatgaaaggcctttctggtacaaaacttgaaacctatgactgtacgtacatggctgattacaaaattacaaaacggtccttaatactggtggctcttctttctttggggactcactcaaacactagtgcttgtgactccaatatttcttgatgtggacggaccctttcttcttgact

SEQ ID NO: 10256 - DNA, 392 bp, Glycine max
cgcataaaatatcgagacgctcgaaattgaacaacgaatgctcttgagaaattcaaatggtcataacttgtcacacggatgtccgattcagctacataatatatccagacggtcgaaattgaacatcggaagctctcgacaaattccaatggtcataacttttcacaaggaagcccgattctagcgcatcacgtatcgagatgctctgaattgaaaaccggaagctctcaagaaattcaaatggtcataacttgtcacacggaagtccgattcagacgcataatatatcaagatgctcgaaattgaacaacgaatgctctcgagatatcaaatggtcataacttgtcacacggaagtccgattcatgtgcataacatatcgacacgctcgaa

SEQ ID NO: 10257 - DNA, 410 bp, Glycine max
  unsure at all n locations
agcttcccgcatgtattaagagacggagtaattggaattgncaagagaaagctctcggtaaccacactgccaaaagaaattagtagtatcatttatcagaaatgatcgtttgaaaacaattagatcatattagccttatttttatttaatgaaaaatataactattaatatagatattgtgaatttatacattaagattatgacatattatattaacaaacaatttagttaatataaaatattgatacattattaatatcaaatatttgtataatatgtcatattattaatgtaaatcttcatagtctatattacttattaattaatttaatttttcataggcataaaaatacaaataattaaagtaattctaacgtctgacaaatattaattatctattagtaaatcac

SEQ ID NO: 10258 - DNA, 329 bp, Glycine max
  unsure at all n locations
agcttgaaatttaacaacggaagccgngtgatatttttaggttataacnaancacacggaggtccgatactggcgtatagtatatcgagaagctcataattgaacaaggagagctctcaagaaattcaaatggtcataactcttcacacggaagttcgattcacgcgcataatatatggagaagcttgaaattgaacaacggaggctctcgagaaattaaatggtcataatttatcacacggaagatcgattcaggcgcataatataccgagacgctcgatattgaacaacggaagctctcgacaaaatcagatggacataacttatca

SEQ ID NO: 10259 - DNA, 399 bp, Glycine max
  unsure at all n locations
agcttaacagtagaattgtttatctggataatcaaaccatcagtcacaaggccgcatgccaaagtacagacattaggttggaaaccaactgaatcagtcacatcagtaaaacttaagccaactgacaatattctggtttcctcaacaaatgatagaaccagaaaagaatggtgtgaatccgtaactctcattcggaccgtccaagtaccagttaccccttgatatatagaagcagtcctatgtagattttccacattaataccatttcgaataatccttaatgacccctctggtgccacaccacagcaagcaaacatttgatcttgcttctcatcatgataatctacaacttccatatccaagaatggtgcaatgttttgaatanggtttatatagcac

SEQ ID NO: 10260 - DNA, 354 bp, Glycine max
gagcgagagctataccgagccaccctccttcaccacgaacttcgtcacgctggggtgaatatccatcgagtgcgccctaacgtcgccaaattagtcagtcttcgccacgaaccggaagaaggtaggggcctactccaatggcacatcggcgtcagagcggaaaggaaactccatcacacaactgaacacgtgcgggagtcactgaagcattttgccagcgatacccaacagtggctgaacatacgacaatggattgcccacgtcgccaccgaattggatatagattttgaatggtttaggaacaacgaggaacttatgatattgtgccaccatgggacgctacagagaaatgca

SEQ ID NO: 10261 - DNA, 410 bp, Glycine max
  unsure at all n locations
agcttcggccgcgttgattccggcaactttaacctgtatatattgagcnccagctagacgagcgagagctctaccgagccaccctccttcaccacgatcttcgtcacgctggggtgaatatccatcgtgtgcgccctcacgtcgccaatttcgtcagtctccgccacgaaccggaagaagttaggggcctcctccactgccacatcggcgtcggagcggaagggaagctccagcacacagctgaacacgtgcgggagtcactgaagcttcttcccagcgatccccagcagtgcctgagcatccgacattggattcctcccgtcgccaccgaattggatagagaatttgaattttcgaggaacaaggtggaccttcatgattntgttcccaccatggaacgctacagagaa

SEQ ID NO: 10262 - DNA, 368 bp, Glycine max
cccataaggggtctccaacatcgcaccaggccctaagaaggatgggaaggtgcgaatgtgcatagattatctggacctgaatcaagctagtcccaaggacaatattcctctgacacccatcgatatactcatggataatacggccaatttcgctgtgatatccttcatggatgggttctccggatacaatcagataaaaatggtgccagatgatatgcaaaagactacctttttcaccctgcgggggacgctctattataaagcgatgtcctttagactcaagactgccggtgcaacttatcaacgggctatgagagcttcgttcacgatatgatgcacccagaaatcgacgtctatgtggaccacat

SEQ ID NO: 10263 - DNA, 432 bp, Glycine max
ccaaccgagtacaatcttttgttatgttgcaattttatatattcttgattatgctaattcttaaaaaatatggtatttgacaaaacaagacaaacaacacaggataaaaaaacaacacaaaacatataagttacaagatagattttttatcttgtatatcgcttgataaataattgacaagtaaaataatataaaatctattaaaatacttcatattagttatcttaatataacttaagttatatttaaagtgtttactaaaatatttcttgtattttttcattcttaaaattagagatattaaaataaaaagaatctgatgttctttttaaataattacgttagttattaattttttggttataaagaaaataaaaatgatatcgcccccaattttttaaataaacataaaatattgcctatataatttta

SEQ ID NO: 10264 - DNA, 454 bp, Glycine max
  unsure at all n locations
ngagaacatccttgaaataaaagaagaggtaaagaaacaatttgacgctggttntttggctgtcactcggtacccagaatgggtcgccaacattgtaccagtccctaagaaggatgggaaggtgcgaatgtgcatagattatcgggacctgaatcaagctagtcccaaggacaattttcctctgccacccatcgatatcctcatggataatacggccaatttcgctttgttttccttcatggatgggttctccggttacaatcagataaaaatggtgccagaggatatggaaaagactacctttttcaccctgtgggggacgttctattataaggtgatgtcctttagactcaagactgccggngcaacttatcaacgggctatggtagctntgttccacgatatgatgcaccgagaaatcgaggtctatgtggacgacataatttccaagtct

SEQ ID NO: 10265 - DNA, 412 bp, Glycine max
  unsure at all n locations
agcttagagggaacataaagagcctcattttttgggtaatgggangcagngcangcctcatttcaattgatcttgctaaggaccttctccaagtccaccccaattcttatgcattggttgttagcaccgagaacatcactttgaattggtactctgggaatgacctatcgaagcttgtttccaattgtttgttccgtatgggaggggctgccattctgctttctaacaaaggctctgataggaggagatcaaaataccagctggttgacaccgttcgcactaataagggttctgatgacaagtgctatggctgcgttgtccaagaagaagaatccagtggcaagaatggtgttactttgtcaagagatttgatggcagttgctggtcatgctttgaaaaccaacatcaccac

SEQ ID NO: 10266 - DNA, 402 bp, Glycine max
agctggtacaattaaacagtttttattataatctgatccaaactaatcctaaaacttgaattgtgtagaacaaatcaacagtcatagaaacacaaatgatgagttggcattcggcaaccacatcataacatgagatgagtaatgagttgtttctattggaatgttcacaagaagaaaagcatagaatttgagggaattgaagcaaaagaaagaaagaagaaagattaaattaaaaataaccttatcataggcaaggcgtgcatttgggtcagagagaatggaataagcttcgttgagtatgatggccatgtcatggccagcagggccagcaatgtcagggtggcagcgcttctgaagagagcgatacgccactttgacctgtgactgatcacaagagctgtc

SEQ ID NO: 10267 - DNA, 370 bp, Glycine max
  unsure at all n locations
agctntaccctttatttacattaaccactttttataacaacagcacacactcctctgctagtgtccacaacagtctccttagtccaaaagaaatacataatactgttgtatctagttcttttaaactttggcatcaaagactaggccatcctaacaaggatgcactagcaattgtactanataaatgtaatataccctctatcaataaaactagcagtgatttttgtaattcttgctctatagccaaatctcacaaactaccctcttctccctctnttactgtttatactgcacctcttgaattagtattctttgatgtttggcggccctcttcagtagagacatcttgtggattcttgtattatctaac

SEQ ID NO: 10268 - DNA, 419 bp, Glycine max
agcttcctatataaattgaaatgaatattaattgtatggaacaatctagtggtaataaaagtaaaataaaggaatgctactctaacaaaaacgcgtggtttgaaagacattaagaaagaaaaagatatacctctcccaggtctgcgtccatgtcgcaattcaaaccgtgctgcctcttctagcttcttacaaggttcacaaatacgcacaggtgaatcaccttgtccgcgtaaaaccattctttgtcgagtacaactgccgcaaaagattcccccacacctcctacagtgatgctgaaaaataaaataaaattgcaaaaaaagtaaataaaaaaattttggacaaagaattcagtttgagttcaatcagattcattcttatactgtaaccaaaaaaaattcattcttataagcaaacgt

SEQ ID NO: 10269 - DNA, 304 bp, Glycine max
  unsure at all n locations
cagatagagcctctagagacactgataagacatcttccatggtaataattccaacggcttcttcttcttcagggagctttggaaggggacttccatctatctccaaaatatccgagtacatattttttgaccattttctgctccgagaacccctatttgatgacttgtttgtatttggaaagctnttccacttgtggagtggcatcttgggtttcaaagctttctctttgggaggcttttcaccatcaatatccaccttaacatctctcaccgagtctatttcagaggcgtgagacacggagca

SEQ ID NO: 10270 - DNA, 468 bp, Glycine max
  unsure at all n locations
agcacctctnttctcacctcttccttctattttgggttttgtcgtctctggngttgttagactggcctgttattgtcttccatcattatcctatgtatgcagtaagcagggctaattcctttgagattcaatatatgccatccaatcgcttccttatgtttcttcagaatgtctaccaacctattttcttcttcttttgttagtgcattactgatcactatagttntagcgtcatcttcctccaggaacacatacttcagatgattaggcaatatttttagctctaccttctttttttcggacggaggctccttctttagtgtctcaaaaccggcttctccctcaggaatactttcttgtcgatccaagtccctccaggcagtctagcgcatttaccatggctntntccagcgaagtctgtggtgtctcgagaatactgacgtcttctctatcaatctcctgcactct

SEQ ID NO: 10271 - DNA, 423 bp, Glycine max
  unsure at all n locations
ntacaacagatgccactctatgctaaatttctgaaagacattctaactaagaagaacaagtatatccacagtgacaccatagtcatggagggaaactacaacactgttattcaacgtatccttccactgaagcataaggatccgagcagtgtcactatactttgttctataggtgaagttttagtaggcaaggctcttattgatttaagagccagtattaatttgatgtcgctctccatgtgcaggagacttggagagctggagataatgcctactcggatgaccttacagttggctgatcactccgtcactagaccctatggagtgattgaatatgttctggttaaagtcaagcatcttatctttcttgcagatnntgtggttacggatatagaggaggatcctaaaattccccataatttt

SEQ ID NO: 10272 - DNA, 412 bp, Glycine max
  unsure at all n locations
agctngagcgatgtggaagatattgaaatgggttnaggtaactgatcgcgtggggggaaaatggattttggggtcttaagttatgaataagacaacatcggtttcttaaacaaaaccgatgttaactttacaatgttaacatcggttttttcaaaaaccgatgttaactttctacagttaacatcggtttttcaataaccgatgttaagatattaatgttaacatcgagttttggaaaaatcgatgttaacatcaacttgttaacattggttttttcaaaaccgatgttaattaagtcaacttatttaccaaaatgccaccgtgcttttatttacatcgcttttgcgaaaaactgatgttaagcttgcgatgttaaatcaataatttgtagtagtgatttaccacagtattt

SEQ ID NO: 10273 - DNA, 262 bp, Glycine max
agcttccacacatcatttttctggaattgcttctgaatagccatttagcacctactgctttctttccttgaggttctagagttgtaaactctataggccttagatattttaaagtatccaagtattattccattatcacacttagagtcaaactttcccaagttgtctttaatatttagaatgaaacattgacatctgaaaggatggaaatatgaaatgttgggctttcatcctttccacagttcatgtggagtccttttca

SEQ ID NO: 10274 - DNA, 261 bp, Glycine max
agcttgttcaataaagacagtatcatcagcatactgaaggatattaataggctctttctgttttcccaccaagtagcttttatacagatttttcgaaatggcctctctcatcaatccagtgagaccttcacccacaatattaaagagcaaaggggctagagggtccccttgtctcagacctcgagtaggggcaaattcattagtagggctaccattcactaaaatggaaatagttgctgattgaaggcatgcagcaatcca

SEQ ID NO: 10275 - DNA, 264 bp, Glycine max
agctttgtatgcactattcaatggagttgacaagaacatcttcagactgatcaacacttgcacagtggccaaagatgcatgggagatcctgaaaatcactcatgaaggaacctccaaagtgaagatttccagattgcaactcttggctacaaaattcgaaaatctgaagatgaaggaggaagagtgtattcatgacttccacatgaacattcttgaaattgccaatgcctgcactgccttgggagagaggataacagatgaaaa

SEQ ID NO: 10276 - DNA, 262 bp, Glycine max
agctttttactgaatttgcatcgttccaattgatttcaaaatggtgtaatcgattacaagatattggtaatcgattaccagtgtatctgaacattgaaattcaaaatcaattgtgaagagtcacatcctttcataaaatgctttgtgtaatcgattacatggttttggtaatcgattaccagtgacaagttttgaataaaaaagtcaagagatgtaacttttctaatggttttcaggtttttcttaagattataactcttcc

SEQ ID NO: 10277 - DNA, 263 bp, Glycine max
catgcaagctttttgtttcttgaataattcaaaccccttaaacagttacgacggctaatttgcttagctggtagctgcctggccgcacagataatgagaataagaactactggaacacccggatcaaaaggtgtcaaagggctgggttgccactttatcctccaaaagagagtttgcaagctttgcaagagagccaacatagccaaagctctggtggacttaatggtggcgaaaaaatgcatcctgatttcttgcagaaaaac

SEQ ID NO: 10278 - DNA, 259 bp, Glycine max
agcttttttatcaagttaccaaatgcatttcgaagcccgcgaggaagagcattcattatcttatccagctcagtttttgaatcataaacaatttttggaccccactctctcataaattgcaaccattgaggctctctgacaacatctcctagatactcggctgcaacaagctcgtattgaatgctagaatccacatacaaatgactacgagtagcatcattcctaatgccaatcccaagttttgaagacccttggagat

SEQ ID NO: 10279 - DNA, 260 bp, Glycine max
agctttgaactgatattcttattattcaatgcattcctcatcttgtaaacatagtcatccaaagcattcattgtattagccttcttcatgaacttcctatcatcaacctgataattctcagcttcatgaatcattcttataatctcctcagctgaaagccttttttggtcattggttatggtaatctcattcctataaccagtggttgtttcttccacagaaacagatagaaggtcgtttacatctatagtaaagctaca

SEQ ID NO: 10280 - DNA, 263 bp, Glycine max
agcttatttttttaggctccgtaaaaaaaggaaaatagcataaagagacaatggggtagagaatttttgaaatgcttagttacccttttggataatatgataagtatcttcagcagctgatcgcgtggctgcgacctgaaattggaagtgaaaaaaataaataaatagggcaattaattaaggaaagagaaagagaagagaaaataacttacagctccgatcttaaggaaaccatcaacagtgagattgagaaatggattacc

SEQ ID NO: 10281 - DNA, 348 bp, Glycine max
tggtctgaactgttcactcggatctctgatttaggcacatcacatatatagacgctcgaaattgaacaacggaagctctcgagatattcaaatggtcataactctaacttggaggactgagacaggcacataatatatcgcgacgccccgaattcaacaacagaagcacttgagataatcaaatggtcattacttttaactcagatgtacgtgtcccgcgcatcacgtgtcgatactctctaaattgaaccaccgacgctctcgagataatctaatgggcaaacttcccactctgggaccgaatcacgagcatcaacatcgagacgctcgtaattgaacaatggaagc

SEQ ID NO: 10282 - DNA, 367 bp, Glycine max
  unsure at all n locations
atgtctctnggtgatggtattgagatgcccgatctntttagtgttggccagtttggagagcaagtctactctagtgttgntctcccttggtatgtggaacaactcatagcaatcaaagtcatcaatgatggtttttgcaacatgatagtacttgaaccttggcttgatatntgtttgcaacttgcccttaaacaaggtatgagtcagtgtaacaccttatctttttggctttaacttcttttgctagctttaggcatgttataagtgcctcatatttagcttgattgtttgatgctttgaaattgagcttgagagcttgctctaaagtaacattgtcgagcccttcaaggatgatgctngtccctac

SEQ ID NO: 10283 - DNA, 435 bp, Glycine max
  unsure at all n locations
agcttctacattcaatntcgagctnttcgatatattacggtactcaatcggacatccgagtaaaaagttattgtagtttgaatttgctcagggcttcggtattccatttcgagcgtctcgatatattacgggactcaatcggacatcagagtaaaaagttattgttgtttgaatttgctcagagcttcagtattccatttcgagcatctcgatatattacgggactcaatcagacatcggagtaaaaagttattgtagtttgaatttgctcagggcttcggtattccatttcgagcgtctcgatgtattacgggactcaatcagacatccgagtaataaagtattgtcgtttgaatctgctcagagcttctacattcaatttcgagcttctcgatatattacgggactcaatcacacatccgagtaaaaagttat

SEQ ID NO: 10284 - DNA, 451 bp, Glycine max
agcttgaaccaggataacagtttatatctatatcaattagagtttatcgaagtagaagataccacaccatggcaagctaatgtaacttgctccaagggcaaagtttccaatccatccattttgttttaactagaaagaaatgtagaacttggtcaaatgatcaaaataagcaagagaaatagaaaatataaagaaaaaatcaggacaattaaaaaaaaactacctttaaaggaggcgcagaatatatataagacagtatggctccacccactgcaaggtaaaatactatagggaaatcatgccctgcctgtaaaagagaatacttttaccaatcaagcttctgataaaaaacgaccatgagactattgtgtattgtacccacccatatgtccaatataccagccagagaaagaccaccaagcagcaacacccatatttgagtgattacctg

SEQ ID NO: 10285 - DNA, 428 bp, Glycine max
  unsure at all n locations
agctntatctaanattntgcattntgtatgatagatgttctctctttggcattgagatagatcacaagattgacctccaaggagccttctaaccattaggaggtcaccttcttcatgggggtagacttcctcactagactctttcaccccttacttcatcttcacttccactagaggaagaggaagaagtagtctcctcttgactactataaatgtcttgacccctcataatcatggttttctttatggggcattgagaggcaatgtgacctctcccaagacatttgaagcatttaatgtttcttgttctttcttgggaactagtcttaggggtggatttctctattgtgttacccttatcttccttgggttntgaaagtgcagcccccaaaattccttggagtttgtccttccttggataagagtga

SEQ ID NO: 10286 - DNA, 455 bp, Glycine max
  unsure at all n locations
agctntaatcaagacaaagaaattaaagatattcaagatggatgatcaagacagtctctagagtcttaggaagggtatattaaataggaagagaattcctaactgaagtagcaaaaggtttggccaagtaatttaagttaaaaagtgtttttcaagagatttactctctggtaatcgattaccagaggatgtaatcgattaccagtgaccaaaaatgatttacaacagctattaaaatttgaattcaaaatttgcattgtgtaatcgattacacatatatgataatcgattaccagcagttattgaacgttntaattcaaattntaaagcttgtaatcgattacacacatactgtaatcgattaccagagaagattttcanaaaatattctcaacagtcacatcttttcattttgttcttgatggccatcacaggcttacatatatgtgatatga

SEQ ID NO: 10287 - DNA, 477 bp, Glycine max
agcttctcgatatgtgatgtgcctgaatcgaacatccgagttaaaagttatggcgatttgaatttcccgagagcttccggtatttaattttgagcatctcgacacatgatgcgcatgaataggacatccgtgtgaaaagttatgaccactataatttctcgagagcttcgttgttcaatttccagcgactcgatatgtaatgcgcctgaatcggacatccgagtgaaaagttatgaccatttgcatttctcgagagctctcgtcgttcaatttcaagcgtctcgatatattatgcgcctgaatctgaccagcgtgtgaaaagttatgacaatttgaatttctcgagaacttcgctttcaatttcgagcgtctcgatatgtgatgcgcctgaatcggacatctgagtgacaagtgatgaccatatcaatttctcgagagcttgctgtagtcaatatcgagcatctcgatatctaattc

SEQ ID NO: 10288 - DNA, 136 bp, Glycine max
tgaatcggacatccgtgtgaaaagttatgtccacttgaatttctcaagagcttccgtagttcaatttcgagcttctcgacatattatgcgcccgaataagacatccgtgtgaagagttatgaccattttaatatct

SEQ ID NO: 10289 - DNA, 405 bp, Glycine max
agcttataatatatcgatacgctctaaattaatctttggaaactctcgagaaattcagatgatcatgacttttcacacggatgtccgattcgggtgcataatatgtcgagaggctcgaaattgaacaacggaagctcttgagatattcaaatggtcataactattcacacgaatgtccgattcgatcccataatatgccgataggctcgagattgaacaacagaatctcttgagaaattcaaatggtcataacatttaactcggatgtccaatttaggcgcatcacatatagagatgctcgaaattgaacaacggaagctctcgtcagattcaaatgagcataactgttcacactgatgtccgattcacggttatcatatattgatacgctcgagatataacatc

SEQ ID NO: 10290 - DNA, 229 bp, Glycine max
  unsure at all n locations
tggagtntccaagtgccaattcgtcttcttctttagtccattcttcttctggcttcaattcatcaatgggctttccttctgtgtccagcatctcgagatgttcccagcctttgatgacagctttccaggttctgctatccaatgatttgaggaatgccaccatccttgctttccagtattctaatttggttccatccataatttgnggtctattcactggtcctccttc

SEQ ID NO: 10291 - DNA, 472 bp, Glycine max
  unsure at all n locations
agcttgagaaggttgattntcgtctcanagtctgtgatgaaattgtgatataattgtattaaagcatcaccagcctgaaaatttataggaagaaccgtttgtcaaacaaataaatntaaactataataagaatatgcacatcagagtatgaatattgtttcaatagaagtcaacanaagttctatcagaagcaaaagaaagtaacaatactcacaaattgtgcaacataatgaatggaatcaaacataataggtaattgttaagtagaagcattagaaaaataatgactaaaatacaataaagttacttatagtttctcaaactacgcatcttgatactgaagtcaattgatgacgtggattgatgcttcaccacattgaataataacaaagataacaaagactttccaagtgcaatttgatgcctcanatggcaaaagaatccttgtattaaatggatgatagaatattac

SEQ ID NO: 10292 - DNA, 251 bp, Glycine max
tatgtctggtcaagtataaatctgagcatacataatacttcctaacattccagttgcaagcaagatatcatcaacataaagaattagaaaaataaccttactcacactgacattcaaatatatacaccgatcaatattatttttcttaaatccaaagtaaacaatggtatcattaaacttcaaataccattggcgggaagcttgcttaatatcgtatattgatttctttaattgcacataatatattccta

SEQ ID NO: 10293 - DNA, 474 bp, Glycine max
  unsure at all n locations
agctngcttagccgatgtagcagattctatcttggcaaagttttgaggatccacacactggtgaataaggaaacgagccttacaattcattttcttggattctctgaacgtactcttttgtgcttcccctgcatctttctccaattcttgaagtccaatcgtgacaaactcaagaacatcctacattccaaagatgattttcatttgaatgcaccatgcatcgtagttctttccatcaaggattggaaaatgcgctggaaactcgttcccattcatctctacaacaatgaagcttcaaagatcccacactaaaaccaatcaagactctcccaacatcgatggaacctgaagctcgtgataccactgtcgaacccgattgctcgctgtacaagcaaaccagaaacttgacaaatttggatgaagttgagtcttgaatgatgaagacaagagagaaagatagttatgaagagaatg

SEQ ID NO: 10294 - DNA, 475 bp, Glycine max
  unsure at all n locations
agcttgatcatccactgcacaaggttcaagctgttgcgcatgaagatgacagtggaaacatcttgagtgtatattttcaggtggatttgtacacaaagattcccagcattcctcgcactggaagtgctgctaattgggctgatgcagntgctgaagtcaagggagaataattgatcactactaaaaaagtatgatcaaattcaaacttggtgtaaaaataactaaaaatgtcctagtaattctgtttgtagatgcatgtctaatgaagggaagaagtgagcactccccatttcatccccaagtaataaggttcagagttcaggcactgcaaaaaccttgtacttgaagttgtttggtagaaatgtatgttacttctatgttaaaaaggactttttcagcagaatcattcttgttgtaactntataagcaatactcgtttctttaattcttctccctctnnttcgttccataaatc

SEQ ID NO: 10295 - DNA, 383 bp, Glycine max
tgatgccaacattggagaggttaatgaaacaacgagatgatgcgctccatgagaggttggatcaaatggagaatagagatcataatgaagaataaaggaggagaagagggaatgatggtattcctagacaaaaccgaattgatggtattaaactcaacattcctccatttaaaggaaagaatgatccggaggcctacttggagtgggagatgaaaatagagcatgttttctcatgcaacaactatgaggaggaccaaaaggtgaagcttgccgccacggagttttccgactatgctcttgtgtggtggaacaagctacaaaaggagagagcaagatatgaagaggcaatggttgatacatggacggagatgaaaaagatcatg

SEQ ID NO: 10296 - DNA, 234 bp, Glycine max
tttccaacctctatacatattatgctcccgatatcaacatccttgttaatacctatgaccattaaaatatcaccatatttttcgacttataatttccatcgtatcattatattattatccccaatcgaaactccttattaaaacttatgaccattttaatttcaccatatctttctttgttacatcttcgatcgtctatttttatgattctccttattctatcatccgaattaa

SEQ ID NO: 10297 - DNA, 444 bp, Glycine max
  unsure at all n locations
agcttataatatattgataagctcgaaattaatcatcggaaactctcgagaaattcaaatggtcataacttttcacacggatgtccgattcgatcgcataggatgtcgagaggctcgaatttgaacaacggaaggtcttgagaaattcaaatggtcataacttttcacacagaggtccgatncnggctttatttatatcgatacgctcgaaattaaacatcggaaacactcaagaaattcaaatggtcataacttttcacacggatgtccgattcaggcttataatatatcgatacgctcgaaattaaacatgaaaaactctcgcgaaaatcaaatggtcataactnttcacacggatgtccgatccaggcgaatcacatatcgagacgctcagattgagcaacagaagctcttgagaaatatcaatggtcattacttttcaca

SEQ ID NO: 10298 - DNA, 478 bp, Glycine max
  unsure at all n locations
agcttatattctcgaccaatctcttttgttttcgtttgtccgggatttaatttattttgttcattcctattctttggattttttttttggtatagtatcatactgtacagcttgtacaggaatgatgtaaatccttctttaatatataaaatcttgtctttgtcttttttaaaaaattactctctttgcatttttttcccatttgacgcatgttttctctgataattttctgagttcaaattttatttaagacatgtttggataaattattttggaaggatttttaggaataaaaaataagaagacaaaaaaaaaccttttttattgactaaaattaatttatgcataaacaaatgtgtagaaattntatcatattaatatctctaaaaaatgatttttcatttatacataaattaattttaactcataaaaaattctttcactttttctttttattgtctcttttaggagtatatct

SEQ ID NO: 10299 - DNA, 429 bp, Glycine max
agctcgaatatcttcatttgagttatgcaaacctatccaaagcatttcattggctacacactctccaatctcttccttctttgacccacctagatttgtcaggatgcacactccctcactataatgaaccatccttgctcaacttctcatctctgcaaactctccatctttccttcactagtttttcccctgccatttcttttgtccccaagtggatattcaaattgaaaaaacttgtttctcttcaattatggggtaatgaaaaccaaggtccgattcctggcggtattcgaaacctcacacttcttcaaaatcttgacttgtctggaaattcattctcatcttctatacctgactgcttatatgggcttcatcgtctcaagttcctcaacctaagggacaaccacttgcatgggactatatctgatg

SEQ ID NO: 10300 - DNA, 367 bp, Glycine max
  unsure at all n locations
cttcttctgttcagataggtacccttttgagcttggactatgctcgaaatgcttttggtgatgatgatggaaacatggcctccttgttcatgtataactgtcttattagaggttatgcttcagcagggttgggtgaccaagcaatcttgctttacgttcagatgctggtgatgggcattgtgcctgacaagtacactttcccttttttgctgagtgcgtgttctaagattttggcgctttctgagggtgttcaagttcatggggcggttcttaagatgggtttggagggagatatatttgtcagcaactctttgatacatttctatgcggagtgcgggaaggttgacttgngacgaaagctgtttga

SEQ ID NO: 10301 - DNA, 456 bp, Glycine max
  unsure at all n locations
agctgtatctatctgcccagccttacaatgactcatcaattaaagctgtatatgtaacaacatttggcttggaaccttcaagcaacatcatctcaaatagtttatttgcatcaaacacctttcttgctttcaggtatgcatgaataagagaagtataagtcaccacatttggggtgcaattgtctcttaacatttcatcaaaccaattgcgagcctgttgaataaggccagctntgcaaaagctatcaattaaaatagtatatgtatacacactgngaacaatgccattctttttcatttcttcgaataacananaagccttctctaccttggaggcatcacaaagaaaaccaatcactttagaatacgtactatcatcgggaacaaaacccttgctcatcatttcgcatataatctcaaaggctntatcaaactttccagctccacagagacacc

SEQ ID NO: 10302 - DNA, 474 bp, Glycine max
  unsure at all n locations
agcttgtgagagcncctatggtgacctgtgactgaggcttgctggcgaggtctgagacgaaccatgaccaagtctccaattttaaattcaatatccctgcgccttttatctgctgagtgtttcataattacttgggccttcggaagcttcttctttaagtcttgaaaaatggactccctattagtcagaaactcgtcaacagcttccacttttgaggtacctgtaacatatgatggcaaatctggtggcctccggacaaaggtgacctcgaagggggagacaccagttcctgaatggtgggaggtattgtangaccattcggcccagggaaggaacttaccccacgaagaaggtttcttgtggacaaaagctcgaaggtactactcaagcacccggttcagcacctccgtttggccgtctgtttgggggtgataagctgagctcatcctcagttgtgtgccacttaaccgaaac

SEQ ID NO: 10303 - DNA, 386 bp, Glycine max
  unsure at all n locations
tcagcttgcatacaagattctccttgcctggcacttcanaaccttcttgttgggtcatatagatgtcttcctctaaatccccatgcaagaatgcagttttaacatctaactgctccaagtgaagattctctgcagctactatgctcagaataactctgatggtagtcatctttacaactggagagaagatctctgtgaaatcaattccttgtttctgctgaaaccctttcaccacaagtctcgccttgtatcttcttctaccgtcagattcttcctttagcctatagacccacctattctgtaatgccttctttccttctggcaatttagttaaagaccacgtcttattcttctgaagggatgtcatctcatctttcatcgctagc

SEQ ID NO: 10304 - DNA, 445 bp, Glycine max
  unsure at all n locations
agcttaacaatcaatttcgagcgtctcgttatatacgggactcaatcagacatccaagtaaaaagttatcatcgtttgaattggctcagagcttcaacattcaatttcgaacgactcgatatatgatgggactcaatcagacatccgagtaaaaagttattgtcctttgaaatggctcagagattccacattcaatttcgagcgtctcaatatattacgggactcaatcagacatccgagaaaaaaattattgtcgtttgcatatgctcaaaggttcaacattcaatttcgagcgtcttgatatattacgggactctatcagacttccgagntaaaagtattgtcgtttgaataggctcatagattcaacattcaatttcgagcgtctcgatatatgacgagactcaatcagacatccgagtaaaaagtgattgtcgtttgaata

SEQ ID NO: 10305 - DNA, 469 bp, Glycine max
  unsure at all n locations
agctngaatgaggaagtgtagaatggtagaatcagtnntgaaaactgaggggcaagctgggcatttgtctgctagaggaattatagcagctactgctatctgaacgtgctcaaacgtctcacttaacattaatagcacgttcactactgagccaaaacaaattcgaccgttgcttcacacgtccctctacattcctcattcaaacttatattttcgtggtaatctcgttttcagcataccccaacagctctcagagatttacgaaatcattccaaacgctctgcttctccatggctacctcaccaaaagaaacttcagctcctggttcaccctctgtaccatcatctccatcatccaccanagcaccatcaaaccaggaacgacctgaattcaatatccagcccatacagatgattcctggtcaagcccctgttcctgaanaactggttcccaaacgacaacagggagt

SEQ ID NO: 10306 - DNA, 434 bp, Glycine max
  unsure at all n locations
agcttgtgtcacactttcaactgccgaagctaaatatattgccgcatgaagttgttgtgctcaaagtctctagatgaagcaacaactacaagactttagagtaaaccttgatcacattcctctaaaatgggacaacacaagtgttatcaatctaaccaaaaaccctgtcatgcattttaggactaagcacatagaaattaggcatattaaatgcatcaagcatagaataacattctgtttgtacaagtatgtgattcacattgctattcatatcattttttttgtttagtttgtgtcttagttattgatttatgtgcatactcattagtttgtttgaatatcacatgtttttcttagtaatttcgtgatttctctttgttttaattgattatgcttggttntaatcaatttttgtatgatatctgtttggtaag

SEQ ID NO: 10307 - DNA, 472 bp, Glycine max
  unsure at all n locations
agcttgtgcatccaataccctgatgaggatgtcccatatgttcttaaaactggactgantccattgcttccaaagtttcatggccttgcaggtgaagatccgcacaaacatctgaaagaatttcatattgtctgctccaccatgaaacccccagatgtccaacaggatcacatatttctgaaggcttttcctcattctttagagggagtggcaaaagactggttgtattaccttgctccaaggtccatcatcagttgggatgaccttaagggagtattcttagaaaaaaaatttcctgcttccaggaccacgaccatcaggaaggatatctcangtattagacaactcagtggagagagcctatatgaatactgggagagattataaaattatgtgccagttgccctcaccatcagatttcggagcagcttcttctccaatatntttatgaaggactcagtaatatggagag

SEQ ID NO: 10308 - DNA, 177 bp, Glycine max
tctgtgaacacctttccttcattaccaccccaatctcccatacatcttctatctatcttccagccaccccttcatcaccaataaattgcctgcatatcatatgatccccaccacaaacactctcattcactcgatttgctccacacttagaaacaaaaactcctgacgaatcatatt

SEQ ID NO: 10309 - DNA, 459 bp, Glycine max
  unsure at all n locations
agctngatggtcagccagagttgttcattcacattatttctgacaagaccaacaacacattgtctatcattgacaatggtattggcatgactaaggctggtaaggttaaatatttggtaagtctttgtgagattatcgccaactgtgcttgttagttagtctattttctctaatgcttgtgcgtttgatgttccagatttggtcaataacctcggtactattgcctctcttataacaatttttcactggcatgcaccatctgaactgatcaaaaccaaaagataatatatatatatatatatatatatatatatatatatatatatatattacgaaaaaatagttcacatgacaatattatggacaatatatattttaactaggaaatcatctatcatgtgtgtcatgatatgcagcgagtaaattntcacaacctcatcaacctcaaaaccacaatcc

SEQ ID NO: 10310 - DNA, 469 bp, Glycine max
  unsure at all n locations
agctngaatgctcatttgagcttatatgcatgttatttacacacaaagggaaagggagagataactgaccaaatcttttcatggctattcttccagaagaacgctcccctgatgtagtttcgtttatagcttggaccatctcatttttgctgacatatccatccttgttcttgtctaagaatacaaatgtatcaaccaaagtctcaaatgtgccctccagctttggcatcccaattcgtgatttctagggaagtcatggaaaaaaatttgaagatgtagcaaaacatggaaattcaaggtttattgttatcaatgcaagcatgatgaaattctaggctgccctgaagaaatgcatgaaatgtccataaaataaaataaaaaaggaatgaacatatagaattgaattgttcataaagtacaaacatcttctgaattatagaaatgataggcgcataagctgcanaaagac

SEQ ID NO: 10311 - DNA, 474 bp, Glycine max
  unsure at all n locations
agctntacgatcaacaaagtntgtcaattcatctctaatcccttagacactcattgggtggcagttaaacgtattctaaggtacctcaaagggtccatttctcatggtcttcatctcaaacctacaatttcaggaagacctctctccattcgagctctctgttatgttgattgggtctttgatgttgatgatcatagatcaacatcacaagtggcaatttatttgggccctaatttggtgtcttggtggtccataaaacaagttgtgacaaggtcaagcactggagcagaataccgtagcttaactcaggctacacataaaactttatgaattcaaacacttctcacaaaactgggagttcctttcaccgtaccagtcattttttgtgatatccaaagtgttgtagcactaacatataatcctgttctttgtactcaaaccaagcacatatgagataatgttttctatgttcga

SEQ ID NO: 10312 - DNA, 265 bp, Glycine max
agcccaagaacttgagttgcaacctagacaggtagccgtattgttccaaaaccgtcgagccagatggaaaaccaaacaattggagagagattatggtgtactcaaagccaattatgatgctcttaagcttaactttgacaccctcgatcaggacaacgaatccttacgaaagcaggtagaataatactccttccaaaatataaacaaatttcgattatttatctgacttattaatgatattttctccaaattatattgtatttaa

SEQ ID NO: 10313 - DNA, 427 bp, Glycine max
  unsure at all n locations
agctntgaatnggtctctggtcttaagataaactacaataagagaaaanttgggtgtttgggcaaatccgaggactggtgtaaggaggcagcatcttctctcaattgtagtcaaatggatattccattgtcttaccttggaattcctgtaggggtcagctctaaaaataggtctgtgtggcagcccattattagcaaatgcgaggctaaacttacaaaatggaagcaaagaaatctatcaatggggggtagaataaccctcattaattcagtcttaacagccttacccatttatttgctatccttcttcaagattcctaagcttgtggtgcaaaagattacatctataccaaaggaattttgatggngcagcctccaagactccattaagattccttgngtgaggtgggacatagtctgcctaccta

SEQ ID NO: 10314 - DNA, 471 bp, Glycine max
  unsure at all n locations
agctnggacttcctgtgttgtgggaacctctccttcctcaggtgtacccaaacccaatcacctggttcaagcacgactttctttctgcttttgttggcttgccttgcatagctcgcatttttcttttcaatttgaaccttcacttgctcatgcaacttcttcacatactcagctttagcctgtgcatccttatgcttaaacatagcaatgttaggcataggcaacaaatcaagaggagtcaaaggattaaatccatacactatctcaaatggtgaacaattagttgtgctatggacagcccgattataagcaaactcaacatgaggcaaacaggcttcccaagatttaagatttttctttaaaacagtcctaagcagtgtgcctaaagtcctattgactacctcagtttgaccatcagttngtgggtgacaagtagtagaaaacaacaatntagtaccaatcttaccccac

SEQ ID NO: 10315 - DNA, 361 bp, Glycine max
atgaagcaatcaccaagtcaatggtacaagagacttaatgagttcattgtctctcacgggtacatcagaagtccctatgactcatgtgtttatcatagtaaggtgaaagacgattctcacatctatctattgctctatggggacgacatgctcaaagcatctcaaaatttgttggaaattcagaaggtgaagtcactactcaatagtgaatttgagatgaaagacttgggagttgttgaaaagattttgggcacggagatcaagagggataaagtccaaaagaagttctttatgcataagaaggaattcattcaaaaagtactaactcattctgggatggcatctgcaaagcaagtatgta

SEQ ID NO: 10316 - DNA, 327 bp, Glycine max
tatgctacatatatctacaacagacctcctcaagctcagcagctaaatcaacaacaatagaacaattatgacctctccagcaacaggtacaatcctgggtggaggaatcatcccaaccttagatggtcgaatccttcacaacagcagcaacaacaacaaccttattttcaaaatgctgctggcctaagcagaccatacgttcgtccaccaatccagcagcaacaacagctacagccccagaaatagaaaacagttgatgctcctccgcaaccttcccttgaagaacttgtgatgcaaatgactatgcaaaacatgcagtttcaacaa

SEQ ID NO: 10317 - DNA, 462 bp, Glycine max
  unsure at all n locations
agcttttggaaaaggaataagaagaagaagatgttcanaaagatgttcaaaaagttatgaaaaaagttattaaaattcaagtcaaggtcttgcttttatagactcttcatgtctggtcaagaaaaccattagaagagttataaccttgaaaaaaacctgaaaacaattggaagagttatatctcttgactttttattcaaaacttgtcattggtaatcaattaccaaaatcatgtaatcgattacacaaagcattttatgaaaagatatgactcttcacaattgaatttgaatttcaatattcagatacactggtaatcgattaccaatatattgtaatcgattacaccatttaaaaattaattggaacgttgcaaattcagttaanaacttttgaaatcaaactttgccactggtaatcgattacaggtaattggtaatcgattaccagagaataaaaact

SEQ ID NO: 10318 - DNA, 363 bp, Glycine max
tctgtccctgagatactggttcccagaagacaacatggagtgtagattgctgaataccctagccctgctacaattcctatggaagtatacacggagatggacaagataatccgcggtattgtgagtagcattctgaatgatgcttctgtgcctgatgctgagaaagatgttccaacatcttccaccccagatgtttctgtgcctgatgtcaataaagatgttccaacatcctccgctccaaatgctgaagccctcccttcacccagtgaagaggaatcaacagatgatgaggatcaagtctcagaggagacccctgcaccaatggcaccagaacctgctccatgtaacctcattgacttggaa

SEQ ID NO: 10319 - DNA, 467 bp, Glycine max
  unsure at all n locations
caagctttggcanaggaagaggagaggaagaagttcaaaanaatgttcaaagagattcaaaggttgtaaaagtatatatgaaaagttatatcaagtttttaaaatgcaagtcaaggtcttgcttttatagactcttcatgtcaggtcaagaaaaccattggaagagttataatcttgagaaaatcttgagaaaaccattggaagagttacatctcttgatttttattcaaaacttgtcactggtaatcgattaccagaaccatgtaatcgattacacaaagcattttatgaaaagatgtgactcttcacaattgaatttgaatttcaacgttcagatacaccggtaatcgattaccaatatattataatctattaaaccatttaaaaatcaattggaacattgcaaattcagttaaaagctttngaaatcaaactttgccacttggtaatcgatacaggaaactggt

SEQ ID NO: 10320 - DNA, 394 bp, Glycine max
ctcagcttaagaataatggcctcagcaaacttcttattcccagaaggaaactctataaataggcctcctatttttaatggggagggttaccactactggaaaactcgaatgcaaattttcattgaggcaatagacttaaacatttgagaagccatagaagttggaccttatgtacccaccatggtggctggtaatacaacaatagagaaacatagagaagagtggtctgaagaagaaagaagattagtacaatacaatttaaaggctaaaaacatcattacttctgccttaggaatggatgaatattttagggtgtcaaattgtaagagtgctaaggatatgtgggacactctacaagttacacatgagggaacaactgatgtcaaaagatcag

SEQ ID NO: 10321 - DNA, 480 bp, Glycine max
  unsure at all n locations
agcttgcctaattaacctanaattgagagagaatgattattaaacacataaaacgaaaatactaagtatttattacctttacttaacagaaaatacttataacattacaaaataaccataaattgggagagtttgatacaatttatacaagttttatacacaaaagttagtcgttttctccgactaacacttatggtatattcctagtactcaaaacttgggatgaatcataagaatgtgttaaggaggtgttgatgatgagttaccaacttttaattaaaaattgaaattttaactaatttaatagtttttttttttgctttaatcatatatgtttttatcttttttctttagttcattctatcaattttaaaaccattagaaattgtaatttaattntttaaatcaatactgaagaatttaaaaactatcataaatcatttntaaaaaaattcaaatgtcaccttgacacttaataga

SEQ ID NO: 10322 - DNA, 342 bp, Glycine max
gcttaacattcaatgtctatcgttccgatatattacgggactctatcgaacatccgagtaaaaatatattggttgttgaatttgctcagagattcggtcttcaatttcgagcgcttcgatatattactggactcaattgaacatacgagtaaaaacttattgtcgttgaatatttgctcagagcttcggtattcaatttcgagcgtctcgatatattacgggactgaatcagacattcgagtaaaaagttatcgtccgttgaatttgcacagaacttcggattccattctgagcaactcgagtatattacgtgactcaattagacattcgagtaacaagtta

SEQ ID NO: 10323 - DNA, 469 bp, Glycine max
agcttgtttaccccatgttgtaattgcttacaatagagctgttcatagcaccactaattgttctccttttgaagttgtttatggttttaacccactaactcctcttgatcttttgcctatgcctaatgtttctgtttttaagcataaagaaggtcaagcaaaggcggactatgtgaagaagcttcatgagagagtcaaagatcaaattgagaggaaaaataaaagctatgctaaacaagccaacaaagggagaaagaaggttgtcttcgaacccggagattgtgtttgggtgcacatgagaaaagaaaggtttccggaacaaaggaaatcaaagcttcaaccaaggtgagatggaccatttcaagtgcttgaaagaatcaatgacaatgcttacaaagttgagctgcccagtgagtataatgttagttccaccttcaatgtctctgatttatctctttttgatgcagat

SEQ ID NO: 10324 - DNA, 468 bp, Glycine max
  unsure at all n locations
agcttcaacatcagaccacttccagggtgctggaactacttcacatggacttgatggggcctatgcaagttgaaagccttggaggaaagaggtatgcctatgttgttgtggatgatttctccagatttacctgngtcaactttatcagagagaaatcagacacctttgaagtattcaaagagttgagtccaagacttcaaagagaaaaagactgtgtcatcaagagaattaggagtgaccatggcagagagtttgaaaacagcaagtttactgaattctgcacatctgaaggcatcactcatgagttctctgcagccatcacaccacaacaaaatggcatagttgaaaggaaaaacaggactttgcaagaagctgctagggtcatgcttcatgccaaagaacttccctataatttctgggctgaagccatgaacacagcatgctatatccacaacagagtcacactta

SEQ ID NO: 10325 - DNA, 338 bp, Glycine max
cacacctctctaatagctaagttcacctcatttagatgagaagctagagcttagctacacaccccctataatagctaagctcacccatatgccaaaaaacatgaaaatacaaaaaaagtccctactacaaagactactcaaaatgccccgaaatacaaggctaaaaccctatactactagaatggccaaaatacaaggccaaaacaaaggaaaaacctattctaatatttacaaagataagcgagctcatacttagcccatggactcgaaatctaccataaggctcatgagaaacctatggccttcccttggatctctagcccaatctacttggagtc

SEQ ID NO: 10326 - DNA, 263 bp, Glycine max
tcggatagccgagcaaaatgttattgacgtctgaatatgctcagagctgcggtattcaatttcgagcgtctcgatatattaagggactgaatcagacattcgagtaaaaagttatggtcgtttgaatttgctcagaacttgggtattccattatgagcaactcgatatattacgggagctcaatagacattcgagtaacaagttatcgtcctttgaatgtggtcagagcttctatgatcaatttcgagcgaattaatatatta

SEQ ID NO: 10327 - DNA, 351 bp, Glycine max
  unsure at all n locations
tagagcaattcccttatgttatcaaacataaaaagggaaaaggtaatattgtagccgatgctctttctcggcgtcatgcattactttctatgcttgaaacaaaattgattggtcttgaatgtttgaaaagcatgtatgaaaatgatgaaacttttggagaaattttaaaaaattgtgaaaaattttcagaaaatggtttctttagacatgaaggctntcttttcaaagaaaacaaattgtgtgtgcctaaatgttctactagaaatttgcttgtttctgaagcacatgaangatgtttaatggggcattttggggtccaaaagactctataaacattacaagaacattttt

SEQ ID NO: 10328 - DNA, 396 bp, Glycine max
  unsure at all n locations
agcttcttcaagccaaaacttgaatgattagaaatgaaactattatttccataactaagcanttgttgcaactgccaatctgtctgtatacccaacacaaatggttctgaacctgagttatcttgaaaatagaaaacatgcttctgatgccgctgaacccatatctttacactgcattcatcattttcgtgtagctcatgtgaagaattacgaactgtcctttccatgttacgcacatcatttcgagtgagaaaatcatcacggttttgggggccaccttgcttctgcatcccctctgcatggtgctggattatcttgtccaacgatattccaacataaagcatagacatcactttctggcgtaactcatccgaaattcgcggagcatacatagct

SEQ ID NO: 10329 - DNA, 334 bp, Glycine max
tgatgcctaaaatgtcttttcttatggcattggtcctagatgtgttgaataatttttccaagaacacccttttaaggtcatcccaactgaaaatggacctgggagcaaagtagtatagccaatcttttgccactccctccaaagaatgaagaaaagcctttagaaatatatgatcttcctggacatcaaggggcttcatgatggaacaaacaatatggaactccttaagatgcttataaggatcttcacctgcaagaccatggaacttgggcaacaaatgtattagtcttgttttgagaacatatggaacaccctcatcaggatattgaatgca

SEQ ID NO: 10330 - DNA, 369 bp, Glycine max
gctattacgtgaccttagaatactctcgcttctctgatgcctatgtgtggaccctcaagtgcaatcctccattctccacttttttcggaaccccatgaatgtcattgcctagcgctattcatgtgtcctccaccttcgagtctggagccccacgaatgtcattgcctagcactgttcgctaattctccattctccacttttattctgagccccatgaatgtcattgcctagcgctgttcatgtgtcctccaccttcaagtttggagctatgcttcattattgcctaagtgtggaccctctatagcaatcctccattctccacttttttctgagccccatgaatgtcattgcctaccgctgttcatgtgt

SEQ ID NO: 10331 - DNA, 274 bp, Glycine max
aagctggagttgctgcacatgatgtccaacgttatgtcaaggaataagatccggctgcacaatgtacaaggcaagataaaatggcaaatgaagaattgaagttgcaggatccacgatgtcggatacaatgtcctgacatcctgcccgagaatactggagttgctgtacaatgcaagataaaagtcaagtgcagaagtgaagctgcaagatccacgatgtcggacacgatgtcctgacatccggcccgataatactggacatataaatctggtat

SEQ ID NO: 10332 - DNA, 304 bp, Glycine max
  unsure at all n locations
cgcttaagaaaagagctntgagggttatgttctcaacaattatttaataatctcgaaactgtttatccatatatcttcattctgatttgtagtttattgactctgttctgatgactatcatgtgaacaggtgattggagagtttttgtctttaaaaaaagctgctggaataaaaaaaggattccagctaatggatacaagcaataaaggcaagactaacattgatgaactgcgagtaggggtgcataaactangtcaccanatatctgatggggatgttcaaatacttatggatgctgtgagta

SEQ ID NO: 10333 - DNA, 390 bp, Glycine max
  unsure at all n locations
ttgagccaattcaaacgacaataactttntacatggatgtctgattgagtcctgtcatatatcgagacgctcgaaattgaatgttgaatctctgagccaatccaaacgacaataacttattactcggatgtctgattgtgtcccgtaatataacgagactctcaaaattgaatgttgaaactctgagctaattcatacgacaataactttttactcggatgtttgattgagtcctgtcatacatcgagacgctccaaattgaatgttgaagctttgagccaattcaaacgacaataactntttactcggatgtctgaatgactctcgtcacatatcgagacgctcgaaattgaatgttgaagctctgagccaattcaacgacaataactt

SEQ ID NO: 10334 - DNA, 406 bp, Glycine max
agcttcaacattcaatctcgagcgtctctatatatgacaggactcaatcaaacatccgagaaaaaagttaatgtcgtttgaatttgctcagaggttcaacattcaatttcgagcgtctcgttatattacaggactcaatcagacatccgagtaaaaagatattgtcacctgaattggctcagagcttcaacattcaatttcgagcgtctcgatatatgacgggactcaatcagacatccgagtaaaaagttattgtcgtttgaatttgctcagagcttcaacattcaatttcgagcgtctcgatgtatgacgggactcaatcagacatccgagtaaaaagttattggcgtttgaatttgctcagagcttcaacatttaatttcgagcgtctcgatatattacgaga

SEQ ID NO: 10335 - DNA, 434 bp, Glycine max
agcttaactaatcaaatgggacaattggctacacagttaaatcaacagcagccccagaattctgacagattaccttctcaatctgtctagaatcccaaaaatgggagttccattacattgagatcgggaaagcaatgtcaaggacctcaaccagcaacatcttcctcatctgcaaatgaacctgcccaacctcactctactccagaaaaagatgatgacaaaaatttaaagagtaagttacctaacaatttctatgaaggtgaatcttccactggtaattctgatttacaaaagcagcatatccctcttccattccctccaagagcaatttccaacaaaaaaatggaagaggcggagaaggagatcttggaaacatttagaaaagtagaggtaaacatacctctgctggatgcaataaagcaaattccaagata

SEQ ID NO: 10336 - DNA, 430 bp, Glycine max
tcatctttgtcctcaaggcctcatgtatactcgtccaaatcgcgaagtgaaccttggatccctgtcagatacaatactagaaggaattccatgcaaccttactacttccttgatgtacaactccactagcttttccattctatacttcatattcaccggaataaaatgagcagatttggtgagtcgatctactatgacccacacggcatcatgcccacgactagtcttgggtaaactagatacaaaatccatagatatgctctcccatttccattccggaatctccaatggcttcaattctcccgatggtcgctggtgctcaaccttagccttttgacatgtcaaacatcttgctacatattcggctacatctttcttcatgccatgccaccaaaaacttctctcaaatcttggacatcttatcattcct

SEQ ID NO: 10337 - DNA, 373 bp, Glycine max
tactcggatgtctgattgagtcccgtaatataacgagacgctcgaaattgaatgtttaagctctgagccaattctaacgataataactatttactcggatgtccgattgagtctcgtaatatatcgacacgctcgaaattgaatgttgaagctctaagcctattcaaacgacaataacgttttactcggatgtccgaatcagtgacgtaatatatcgggacgctcgaaattgaatgttgaacctctgagccaactcaaacgacaataactttttactcggatgtctgattgagtcccgtattatatcgagacgctcgaaattgaatggtgaacctctgagccaattcaaacgacaataactttttactcggat

SEQ ID NO: 10338 - DNA, 411 bp, Glycine max
  unsure at all n locations
agcttgtaggccttgtatcttcttcatcaatggagtcctntgcttcttgaagatcaatggcagcaaaatgaaataggtggaaaggtgattggagacgccacttcaaggagaagatgagtcaagaacaagctcaccaccataggaagccatggataagagcttgaaggtaggaaaagatgagtggaaagagagggagagaggggaggcatgaaatttatgtctgaaataaggtctgaaatttgaagtgtaattctcaaatgatcaaagttgaaaaatacacacacaaggcctctatttatagcttaagtgtcacacaaaattggaggggaaattgaatttctattcaaatttcacttgaatntgaatttatggagccaaatgtggagccaaaatttcactaattatgattag

SEQ ID NO: 10339 - DNA, 412 bp, Glycine max
tagctttattaaaaatgataataaaaaattaaaaaataacatttaaaatgactaagtgaataaaattaatatcaatttattttttgctttatcttttacaactatttacattcatcttatcaaaaaaattatgttgtgcgacaagatctatttttttatgggagtaaaaaaatatttattctatatattcaattaaaaatatttagaacatgttatgaactaaataacatgtatgaattaaactcaaaattcaaaagataggttaagaatgacaataatacatgaacaaatatatctagaattcaatcaaaaaaataaaaattcaacacagacttagaacataatatgacaattattatgactaaacatgaactctagacaacatggattaagtgaattacacttagatttt

SEQ ID NO: 10340 - DNA, 412 bp, Glycine max
tggatccaacccgaatgttacctatgatagcaccatagtgcatgtcagcatatggctcctctccagtcaagagttcccacatcacaataccaaatgaaaacacatcaacctaaaatgacaaatatcaaaacaaaagcctcaaacttacatagtgacaaaatatcaaggtaccattaacacatcaacaattcagcagttccggagccatccatggtagagttcctctcaccaccagaaatcagcgtctgacattttcctttggacagacccaagtcgccaacctgatatcagatgcaaaagtgtaaaaggtaaagaaactactgaaggatcaactaatcaattgctccgtgctacaagtagagttgtgctgactagaaagcaagtattgatgatcaaaaatcatttagcagaa

SEQ ID NO: 10341 - DNA, 394 bp, Glycine max
agcttttgacctcccaaacagtgccctgtaattccacagatgaagaaatgttgttcatatttgttgagggtcactctcgcaggtggagtggtgaaagtggcaataggagaggctgagctgcaagcatcgaagttggcctttgtaacctcctctacgttgtgtgtatttgatgcgtagttgaacactgcaaaacacaccaatgatttagtccaattgatcccaagcttttaaacaattcaagtagtttattttgtacgatgtgagacttaccaaggacgtctccaaccctgaagtttttgccagaggcccaagctgtgtaaaaggaagcgttgccaggaacaatccagccagcggtttctccaacaatgaaagtagctggttcagaggatggacc

SEQ ID NO: 10342 - DNA, 426 bp, Glycine max
tcgtacccgggatccttagtggcaccttcggcatgcaagcttgttagagcctagtattctttgtcctaccaatccattgttggctttgtacatatcaaacaaaattgttgtttgtttgcacaatgactaactcataatcatcttacagacaaatatgtaattttatcacttagtcttttctctctgatgcaatcctaccccccaaggcattgataaaagactccaagaagattgggtcagagatgcaggagaaggccctagggttctgatgagccttaggatagattttgagctcatgggctaaatatgagcccacttatctttgtacatattatatttgagtttcattatttttgggccttgtatttagggctccatagtgtagggagtgtatcctagtaatgtagaatttttcagcccttgtat

SEQ ID NO: 10343 - DNA, 301 bp, Glycine max
  unsure at all n locations
taatattatggtcgntatcacttatccctggactggtgagtactttcagaagctattttagatgcataatttatagcgataaacttgcagtgcacaaaatcgccatgtttcattaacttggatatttttatgattttagtttactatgtgggaccaaatggatggaaaaaactgtctggtgatgatgttggggaacttcattaccattactacccagttaccccaagcaccgtggaacaagaaatggttgaggctactggtgcttgatgaagtaactcgtggatgtctttttaagttttct

SEQ ID NO: 10344 - DNA, 316 bp, Glycine max
  unsure at all n locations
tagcttgaatcggacctcagtgtgaaaatgtttgaccatttcaatttctcgagagctttcgttgttcaatgtcgagcatctcgacatgttatgcgctcgaatcggacatccgtgtgaaaagttatgaccatttgagtttctcgagagcttccgtggttcaatttcgagcatctcgtcatattatgtgcccgaatctgaccttcgtgtgaaaaagtatgaccatntgaatttctcgagagcttccgatgtttaatttcgagcgtctcaatatattgtaagcctgaatcggagctcagtgtgaaaaagtatgaccatt

SEQ ID NO: 10345 - DNA, 247 bp, Glycine max
actcgtgcgagtcctttacgacgaaactatggcgagtttggctccacgacacaatggggttggtgtgagggtactccaccatttcaaacgtcttcttcatgaacggaggggggcccacctcgtgcaaccctatcatcggtttgggcgaagtcgactactactatgaccacttagcggagccgtcatccatctgttctttcactgcgtgagccgtcgtcactcccgagtccttgctctcgctcaaaac

SEQ ID NO: 10346 - DNA, 425 bp, Glycine max
agcttgtaattgattacataagtcttgttatcaattaccagaggagattttcagattattatttccaagggtcacaacttttcaaatggtttttacatggccatcaaaggtatatttatatgtgacttggaacatgaatttgcttagagtttttcagaacaaaaagtcttatcctctcaaaaagcaaaatcattttatcctcttaagaattccttggccaatacacttgcaattcaataaggaattaattgagtgcttaaattgttcaatctatctctttcaagagagatttcttcttctctactttctatttctaaaaggggattaagagaccaagggtctctcgttgtaaagaaatctgaacacaaaaaaaggattgtccttgtgtggttcagaactgcaaggtagtggaactctcaagcggg

SEQ ID NO: 10347 - DNA, 423 bp, Glycine max
tccgcttattagtgcacagctccttcaagaatttagcatatcttggaatttgctttattgcatccagcagaggtatgtttacctctacttttttaaatgtttcctagatctctttctctgcctcttccatttttttgttgggaactgctcttggagggaatgcaagagggatatgttgcttctacaaatcaaaattaccagtggaagattcacctgcacggaaattgttaggtaacttactctttaaatttttgtcatcatctttttctggagtatagtgaagttgggcaagtgcatttgcggatgatgaaggtgctactggttgaggtccttgacactgctttcgcgacctcaatgaaatggcactcacatttttgggattctggacagattgagaaggcagcttgtcagaattctatgact

SEQ ID NO: 10348 - DNA, 407 bp, Glycine max
  unsure at all n locations
agctntaaccgtctgagatctttgccttatcacattggagggtacatcctttgtggtataagtagagggtacatctacttgggtttgactgagaacaagagagggtacatctcttgtggatcagttctagtggagggtacatccactagggtttcgaagagaacaagggagggtacatcccttgtggatctttgcttgtaaaaggatttttacaaggttgaaagaaatctcaaggaccgcangtctcttggggattggatgtaggcatgggttgttgccgaaccagtataaaaactcttgtgtgtttgtctccttcttccctactcttttaatttttgctgtgcatttaatttccgcttttactttctggtaagtttctcttatactccttattctcttaacaactt

SEQ ID NO: 10349 - DNA, 355 bp, Glycine max
  unsure at all n locations
tttgtaactacctcatgcactcctctaatgactatttcatcatttctggcactaaactgctgggagttggaggccatcttctcaattaaatntctggcttcaacaagagtcatgtctccaaaggctccaccactggcagcatctatcatacttctctccatattactgagtccttcataaaaatattggagaagaaactgttctgaaatctgatggtgggggcaactggcacatagtctcttaaatctctcccagtactcatacaggctctctacactgagttgtctaatacctgagatatacttcctgatggctgtggtccctgaagcanggaaaatattttctaataatactc

SEQ ID NO: 10350 - DNA, 405 bp, Glycine max
gcattgagaagaatattagctctttgtgatcttgacatggatgaagcccttaatgtctcagaactaaatgagtttcaggcttttgttgattttggattcttttaaatctccttttttttatttaatatgctgtgaatatttattgttttcaagtgtggcctatttattcaaaatgtgcaaatatatcaacaggttagatgcgttaatgcaccattgctatcctctgaaatagcatgagtcacaagggttgtacagcagaaagtacctgaaggattcaactcacatggtcttacttgttctggatttatttatgtccacaatatgttcctcaaaagaaggcgtccaaagacattatgggctgttctaagatactttggatatgataataatttgcaactcatggat

SEQ ID NO: 10351 - DNA, 382 bp, Glycine max
agcttgtagggttaaagtctcacgattgtcacatgctcatgcaacaattgttaaccgtggctataagagacatcttgccaaacaaagtcaagttagccataactcacctgtgctttttcttcaatgctatatgtagcaaagtcattgatcctgtcaagtttgatgagttggaaaatgaggccgcaattatactgtgccagttggagatgtattttccccctgctttctttgacatcatgattcacttgattgtgcatctagtcagagaaatcaaatgttgtggtcctatttatctacggtggatgtacccggttgagctatacatgaagatcttaaaagggtatacaaagaatctttatcgtccagaagcatctattgttga

SEQ ID NO: 10352 - DNA, 403 bp, Glycine max
tgctaccccatgcaagctcctaatatctcccacactttttatggtgggccattcttggatgtccttgattttctcagggcccacttggaccccatttctaccaactacaaaacctaagaaaactatattatctacacaaaaggtacacttctatatatttgcatagaaggtgtttttcttaaggactgaaagaactttcctgagatgtcctaagtgatcatctaggctcctactgtatactaaaatatcatcaaaataaacaacgacaaatctacctatgaaatcctttaagacatgatgcataagcctcataaaggtgcttggtgcattagtgagcccaaaaggcatcactagccattcatacaaaccaaacttggtcttgaaagcagttttccactcatca

SEQ ID NO: 10353 - DNA, 354 bp, Glycine max
tcacctcattgagaattacaattccatgaaggatgtgtctgtctttgatgaaggctggttgtctctcatcaataaggtcagatataacattcctcaatctatttgctaataacttagctatcaccttgtacatacacccaatcaaagagattggtctgtaatcatcaaaggtctgagggtgtttaactttgggaattagggccaagaaggaagcattactgcctctaaggaagcagccatgcacatgaaattcgtctataaatcttctaaagtcagttttcaacactccccaaaattctttaatgaaaatgaagttgaaaccatccggtccagggcatttgtcccaccacaact

SEQ ID NO: 10354 - DNA, 186 bp, Glycine max
tctctacaattgcatcacctctcaatgagctggtgaataagaatgaggcatttacctggggtgaaaaacaaaagcaagcctttgctttgctcaaagaaaagcttactaaagcacctggtctagctctatctgacttttctataacttttgagctagaatgtgatgcctctggagtgggagttggag

SEQ ID NO: 10355 - DNA, 305 bp, Glycine max
  unsure at all n locations
agcttccgttattcaatctctagcgtctctatatattatttcaccgaatcagacatccgagtgaaatgttatgaccattcgaatttgtcgagagcttccgttgtttaatttcgagcgtctagatgagttatgtcaccgaatccgacatctgtatgaagaggtatgaccattcgaatttctcgacatcttccgttggtcaatttcgagcgtctcgatatattatgtncccgaatctgacttctttgtgaaaagtttggaccattcgaatttctggacagcttccgttgatcaatttcgagcgtctc

SEQ ID NO: 10356 - DNA, 434 bp, Glycine max
tacgcttgaatgctctattcaatggagttgacaagaatatcttcagactaatcaacacatgtacagtggccaaggatgcttgggagatcctgaaaaccacacatgaaggaacctccaaagtgaagatgtccagattgcaactcttggccacaaaattcgaaaatctgaagatgaaggaggaagaatgtattcatgacttccacatgaacattcttgaaattgccaatgcttgcactgccttgggagagaggatgacagatgaaaagctggtgagaaagatcctcagatccttgcctaagagatttgacatgaaagtcactgcaatagaggaggcccaagacatttgcaacatgagagtagatgagctcattggttcccttcaaacctttgagctatgactctcggatagggctgaaaagagaagcagaacttgg

SEQ ID NO: 10357 - DNA, 343 bp, Glycine max
cctattaacacacccggccatgaatcacatatctgaacctgtcagcagtctctgtggtttatgcttctttggcgaccaccacagatacctttgcctctttgtgcggcgaattgaagcaatcgaacagctcgaagcttatgctgccaacatctacaatagacctcctcaaccgagcatggaaatcagtcacaacagaacagaacagtgatgacctctccagcaacaggtacaatctcgggtggaggaatcatcccgaacttagatggtcgaatccgttgccacagcaacaacaacaacaacatccttattttcacaatactaatggcccaagcataccatacgt

SEQ ID NO: 10358 - DNA, 401 bp, Glycine max
agcttgcgaaccataccactatccacgtatatgctagctccatcatatccttggcctctaactttttgaatgataagattatcatgagatagtattgaacaaactccttgcttaagagtagatgatgtacaatctatcacatgtgagatatctaaaaaatgttctaacatatcagcacttatcaacaaatctaatattaggagtaatttgttttcttctagattcatcatgagcttcacctacaattcaccagaattttgcattatcaatctctttttgaatttcattttgcaacttcctagcaaagacgtgtagaatttctttttgaataatgggtgaagtgtatcttgcattctaagggacattttccaagacaacttcatctatttgcttattataag

SEQ ID NO: 10359 - DNA, 311 bp, Glycine max
actccgagggccgaatctggcgaataatatagcgagacgctcgacagtgaacaactaaagctctcgagaaattcaaatggtcatgactcttcactcaggtatccgattcacgcgcataatatactaagacactcgaaattgaacaacagaagctctcgagaaattcatattgtgctgactcttcactcagatgtccgatccacgcgcataatatatcgggacgctcgacattgaacaatggaagctctcaagacactgaaatggtcataacgtttcacacagatgtctgattcctggaaataatatatcga

SEQ ID NO: 10360 - DNA, 329 bp, Glycine max
tcatccgtgggtcaagaatcttagcaattgaaagaatgacattatagtcactccaatacttgccaaacttttccatcatcaacactgccatattttgcaatactggatcatcacacttcagtgtttcccgcaacaaccattcaattttccatacttgcatgaagtattcattggaagttggataagatgtacctaaaaaaaattcaaataagataattaaactataaatataaatctgaaactatttattataattatgaaatttgaaaaaatatacctgaaatcaaattagtcatattataaaatggcttcaaaaattcacacaattt

SEQ ID NO: 10361 - DNA, 316 bp, Glycine max
taaacattcaatttcgagcctctcgatatattacgggactcaatcaaacatccgaaaaaaacgttattgtcgtttgaattcgcacagaggttcaacattcaatttcgagcgtctcgatatattacgggactcaatcagacatccgagtaaaacgttattgtcgtttgaattggctcagaggttcaacattcaatttcgagcgtctcgatataatacgggactcaatcagacatccgagtaaaaagtcattgtcgtttgaataggctctgaggttcaacattcaatttcgagcgtctcgatatattacgggactcaa

SEQ ID NO: 10362 - DNA, 406 bp, Glycine max
  unsure at all n locations
agcttccatcaggatgtcttattgagtcccgtaatatatctagacgctcgaaattgaatgttgaacctctgagcatattcaaacgacaataactgtttactcggatgtctgattgagtcccgtaatatatcgagacgctctaaattgaatgttgaacctcttagccaattcaaacgacaataactttntaatcggatgtctgattgagtcccgtaaatatatcgagaccctctaaattgaatgttgaagctctgagccaattcaaacgacaataactttttactcggatgtctgattgagtcccgtaatataacgagacgctcgaaattgatatgtgtaactctgagccaattcaaacgacaataactatttacttcgatgtctgagtgagtcccgccatatatcg

SEQ ID NO: 10363 - DNA, 432 bp, Glycine max
  unsure at all n locations
agctnggctttggccatcagaaccatctcattctctacttcatccatcttgcaacanatattccagtcaagtgagtgtttctctgcatcaaacaaatcanatgtgatcttccaatcatctattcccatttctagattacctttccccatatccaccacacaattggcagttagcatgaagggacgacccacaatcagagggatttcagcatcctcttcaatgtccatgatcacaaagtctgtagggaaagtgaactgtcgcaccttgaccaanacatcttcaaccacgccataaggtcttgtaatggaatgatctgccaacaacaatgtcattcttgttggcataatttccagctctccaattcttctgcacatggagagcgacatcaaattaatgctagctcccacataatgaaagctttccaactgacac

SEQ ID NO: 10364 - DNA, 332 bp, Glycine max
tcctttacaacaaagagaagtgatgtaagctccattggagcttgtaggcctaggatcttcttcattaatggattcctttacttcttggaagatgaatggcagcggaatggtgaaaggaagagagagaggaggcgccacttcaaggagaagatgagtctagaagaagctcaccaccataagaggccatggataagagcttggaggaagaaggagatgaatgaggggagagggagagaagagcacgaaattttgtgctctaaatgagctttcaaatctgaattttaatattctaatgatcaaagttgaaaaaaatgcacacacatgacctctat

SEQ ID NO: 10365 - DNA, 325 bp, Glycine max
  unsure at all n locations
agctggccttgaatcagaaanttgtaccagtcgcaagagtctgtggtttatgctcctctgctgaccaccatacagacctctgcccttccatgcaacaacctggagcaattgagcagcctgaagcttatgctgcatacatttacaatagacctcctcaacctcagcagcaaaatcaaccacagcacaacaattatgacctctctagcaacagatacaaccctggatggaggaatcaccctaatctcagatggtctagccctcaacaacaacaacagctactgtgccaagcagaccgtacatttcttcaccgatccaacaatagcaa

SEQ ID NO: 10366 - DNA, 325 bp, Glycine max
tatatgttttttagttgccttgtaccatgctcacctaatccaaaggtcggtattgatgtttatctagagcctttgattgatgatttggagaagttatggagtcgtgttttgacacatgatgtgtcaaggaagcaaaatttgatgaggactattaatgacttccctacttatggcatgttgtctggttgtggaactcatgataaatttttttgtccgcattgcatggagcataagaagttgtttacattacaatatgagaggaaaagttgttcatttgactcgcatcgtaggttcttacccagcattcattcatttaggactaaca

SEQ ID NO: 10367 - DNA, 330 bp, Glycine max
tatgctgcaaacatttataatagacctcctcagcagcaaaaccaacaacaacagaataattatgacctttcgagcaatagatacaatctaggttggaggaatcatccaaatatgagatggacaagtccttcacaacaacaatagtttgtccctcctttccagaatgttgctggtccaagcaagccgtatgttcctcctccaatacagcagcagcaacaacagtagtcacaacaaagacaacaagcaactaaggctcctcctcaaaattccttagaagagttagtgaggcaaatgaccatccagaatatgcaatttcagcaagagacaaga

SEQ ID NO: 10368 - DNA, 335 bp, Glycine max
  unsure at all n locations
agcctttcctcattctctggagggagtggcaaaagaatggctatactacctcgctcccatgtccattntcagttgggatgaccttaagagggtgttcttggagaaattattccctgcatctaggaccactgccatcagaaaagacatttcaggcatcacgcaacttattggagaaagcttgtatgagtactgtgaaagattcaagaaattgtgtgcaagctgtcctcaccaccagatttctgagcaactcattcttcaatatttctatgagggacttaacaacatggagaggagtatgattgatgctgctagtggtggagctctcggtgatatga

SEQ ID NO: 10369 - DNA, 340 bp, Glycine max
taataatctatggcttgaaacaagcctcccgccaatggtatctaaagtttcatgatgtcatcacttcatttgactttgaagagaacatcatggatcaatgtatataccaaaaggtcagtgagagtaagatttgctttctgtgttaaacgtggatgacattttgcttgcaactaatgataagggtttgctatatgaggtgaaacaatttctctcgaagaactttgatatgaaggatatgggagaggcatctcatgtaattggcattaagatccatagggcaagatctcgaggcattttgggtttgtctcaagagacttatattaacaaagttttagagaga

SEQ ID NO: 10370 - DNA, 327 bp, Glycine max
  unsure at all n locations
agctnntagatgccttanagttttaaggctgaagttgagaaacaatgtggaaaacaaattaagatcgtgagatcagatagaggtggggagtactatggtagatacacagaggatggacaagcaccacgttcatttgcaaattntnttcaagaacatgggattgttgcccaatacactatgtctggttctccggatcagaatggtgtggcagaacgaagaaatcaaaccttattagacgtggtgagaagcatgaggagtaatgtaaagctttctcaatttttgtggattgatgctcttaagacggctgcgtatatattaaaccgagtt

SEQ ID NO: 10371 - DNA, 333 bp, Glycine max
tgtagggttaaagtctcacgattgtcacgtgctcatgcaacaattgttagccgtggctatacgagacatctttccaaacaaagtcaggttagccataactcgcctgtgctttttcttccatgctatatgtagctaagtcattgatcctgtgaagtttgatgagctggaaaatgaggccgcaattatactgtgccagttggagatgtattttccccctgctttctttgacatcatgattcacttgattgtgcatctagtcagagaaatcaaatgttgtggtccagtttatctacggtggatgtacccggttgagcgatacatgaagatcttaaa

SEQ ID NO: 10372 - DNA, 336 bp, Glycine max
ttgagaaaattcaaacgacaataactttttactcggatgtctgattgagtcccgaaatatatcgagacgctcgaaattgaataccgaagcgctaagcaaattcaaacgacaaaaactttttactcggatgtctgattgagtcccgtaatatatcgaaaagctcgaatgtgaatgtagaagctctgagcaaattcaaacaacaataactttttactcggatgtctgattgagtcccgtaatatatcgagatgctcgaaatggaataccgaagctcggagcaaattcaaacaataataactttttactcggatgtccgattgagtcccgtaatatatc

SEQ ID NO: 10373 - DNA, 331 bp, Glycine max
tcaacctagaggagacgaaccattccaagtgttggagaagatcaacgacaatgcctacaagattgacttgcctagtgagtataatgtaagtgccactttcaatgtgtctgatctatctctttttgatgcagatggaggagccttggatttgaggacaaatccttttcaaggagggagtgatgaggacataaccaagggcaaggaccatgaagcacttgaaggtcccatgaccagaggcagacttaaacaagcccaacacatcatagagacaaggctggtcatttgtatagctgtcattgatgatgattgaaagcccaagtggagaaagatg

SEQ ID NO: 10374 - DNA, 331 bp, Glycine max
tctcagatccagtcatggaaagacttggcaactgccttcattaggcaataccaatacaacacggatatggctcctgatcgaaaccaacttcagagcatgaccaagcgggaacatgagtccattaaagaatatgctcaaaggtggagagacctagcggcccaagtcgtcccgtcgatgactgaaagggaaatgatcacgactatggtagatacgttgcctacgttctactatgagaagctgataggatatatgccggctaactttgcagacctcgtcttcgccggagaaagaatcgagtccggactgagaaaaggcaagtttgaatatgcct

SEQ ID NO: 10375 - DNA, 349 bp, Glycine max
  unsure at all n locations
agcttcttatccaaggagattctnggtggtgaagctccttcttccttggcttattccctagtggatggtgtctcccctctccacttctcctttaccttccgctgcatctccatggtgtaaaatcaccattgaaggacctcattgaagctcanagatccagcctncatagaagctccacaagcaagcttccatcattaaggtttcattatttttgggccttgtatttagggttcataatataggtaaggtatcctagaaatgtagaatttntaagcccttgtattntatggcacctagactagcttttgtattaggggtagtttcgaatttcacatgcattaagtgaata

SEQ ID NO: 10376 - DNA, 330 bp, Glycine max
tttcctttggttgctctgataagctttccaaacgttagagagaaggagaagagattgaagccttcattccactgtctgcatgaaatgagtatttctccctccctagacattattttccacatctcaacggttaaaatgtgcgggacttaatttcaaacctggtgtccaaatttcacaatgatccaacggttaatatgtccaggattgtagttttattgggacaagttttgggtctccgctggaaatggaaaagctatgacgtgaagggaaattctttcaaatcctagtgctcaaattccaaccctgagaatgttcagaaatgagttccaa

SEQ ID NO: 10377 - DNA, 305 bp, Glycine max
ttgagacaattcaaacgacaacaactttttactcggatatctgattgattcccgttatataacgagacgctcgaaattgaatgtttaagctttgatccaattcaaatgacaataaattttttctcagatgtctgattgagtccaataatataacgagacgctcgaaattgaatgttgaagctctaagccaattcaaacgacaataactttttactatgatgtctgattgcgtaccgtaacatatcgagacgctctaaattgaatgttgaagctctgagacaattgaaacgacaacaactttttac

SEQ ID NO: 10378 - DNA, 389 bp, Glycine max
  unsure at all n locations
agcttcaacattcaatgtcaagcgtctcgatatattatgggactcaatcacacatccgagtaaaaagttattgtcgtttgaattggctcggagcttcaacattctaattcgagggtctcgatatattactaggactcaatccgacatccgagataaaaattattgtcgttcgaattggctcagaggttcaacattcaattntgagcgtctcgatatgttaccggactctatcaacatccgagtaaaaagctattgtcgttttgaattgctcagagactcaacattcaatttctagggtctcgatatattacgggactcaatcatacatccgcagtaaaagttatcgtccgttgaatatgctcagaagatcaacattctatttcgagcgt

SEQ ID NO: 10379 - DNA, 338 bp, Glycine max
tcttgaagttggaatgatatatgccatttccgatagttcatgggtaagccctgtgcaagtagtccctaaaaagggtggaataacactgataaagaatgacaagaatgagctgattcccacaaggaccatgaccggttggagaatgtgtatcaattatcgccttctcaacaaggcaacaaggaaacaccattttcctctccccttcatagatcaaatacttgagaggttagccggccaagccttctatttctttcttgatagatactcaaggtataattaaattcttgttaatccgaaggatcaagagaaaacaaccttcaattgcccatttggagtct

SEQ ID NO: 10380 - DNA, 333 bp, Glycine max
tgtgttaagaggaagagtgatgtgattgatgtattcaagaaattcaaagtttcagtggagaaacagtgtggaaaaaatttagagatattaagaacggatggtgggggtgaatatgtatctgttgagtttgctgaattttgtgagaaagaaggcatcacacatgaagtaacacctccatacactcctcaacataatggagtagttgagaggaagaatagaactttgttgaacatggtgaggagcatgttaaagagcaagaaactaccaaaatatttgtggggagaagctgtgaacattgctgcatacatcttgagcagaagcccaactaggaaa

SEQ ID NO: 10381 - DNA, 333 bp, Glycine max
tctaaactttatacaagaatgaagctctgataccacttgttagacaagtggcctcagatatcttaagaagggggaggttgaattaagatattacaaactatttccccaattaaaattctatcaagttataaattcccttaataataaacttcttaaatattgactcaaatagaacaatttgaatatgaatataaaacaataataaataaaggagtttaagggaagagaaagtgcaaactcagatttatactggttcggccacacccttgtgcctacgtccagtccccaagcaacccgcttaagagttccaccatcttgtaaattccttttaca

SEQ ID NO: 10382 - DNA, 326 bp, Glycine max
tctagaattatggcctcatcaaactacttgtttcccgagggaaattctataaatagacctcccatctttaatggagtgggttaccattattggaaaacccgcatgcaaatttttatagaggcaatagatttaaatatttgggaagccatagaacaaggaccttatgttccctctataatggccggaagtgcaacaataggaaaacctagagcagattggactgaggaagaaagaagattagtacaatataatttaaaggccaaaaatattattacatctgccctaggaatagatgaatactttaaggtttcaaattgtaaaagtgc

SEQ ID NO: 10383 - DNA, 334 bp, Glycine max
  unsure at all n locations
agcttctcgattattatgcaccttaatctgacttccgtttganaagttatgacaacttgaatttctggagagcttccgttgtgcaatttcgagcgtcttgatatattatgcgcctgaattggacttctgtgtcataagttatgaccatntcaatttctcgagagcttccgttgttcaatttcaagcttctcgatatattatgcacctgaattggacttccgtgtgacaagttatgaccattctaatttcttgagagcattcggtgttcaatttcgagcgtctcgatatattatgcatctgaatcggacttgcgtgtgataagtatgaccatttg

SEQ ID NO: 10384 - DNA, 327 bp, Glycine max
tcaagagatcgtccccttgacaacattattggtgatatctcaaaaggggtaacaactagacattctcttaaagatttatgcaataatatgacttttgtgtctatgattgaacctaaaaatttagatgaagccataatagatgatcattggatagttgctatgcaagaagaactaaatcagtttgagagaaacaatgtgcgggaactagtagagaaacctgaaaactaccccatcataggaacaaaatgggtatttaggaataagttagatgaacatggcataatcattaggaacaaggcaagattacttgcaaaaggatataatcaa

SEQ ID NO: 10385 - DNA, 339 bp, Glycine max
ttaaaagattggctaagattttgttaaaacataagcacttagacaatgaaggaaagctggagttgctgcacatgatgtccaacgttatgtcaaggaataagatcgggctgcactatgcacaaggcaagataaaatgtcaaatgaagaattgaagctgcaggatccacgatgtcggatacaatgtccaggacatcctgcccgagaatactggagttgctgtacaatgcaagataaaagtcaagtagtgaagctgcaggatccacgatgtcggatacgatgtcctgacatctggcccgataatactggacatataattctgttatatctttaacagattat

SEQ ID NO: 10386 - DNA, 328 bp, Glycine max
tccagaaatcatcctcttaacgacattattggtgatatctctaaagggataacaactagacactctctcaaagatttatgcaataacatggaatttgtttctatgatagaacctaaaaacttaaaagaagccataatagatgatcaatggatagttgctatgcaagaagagttaaatcaatttgagagaaataatgtttgggaactagttgagaaatcacataactaccccattataggaagaaaatgagtatttaggaataagttagatgaacatggcatagtcattagaaataaggctaggttagttgcaaaaggatataatcaag

SEQ ID NO: 10387 - DNA, 454 bp, Glycine max
  unsure at all n locations
agcttctntgagaaaacttccttgagaagctagagcttatctacacacacccctctcataactaagctcacctccttgagaagcttccttaagaagattcctaaagaagcttgagcttagctacacatacctctctaatagctaagctcacctccttgagatgagaagctagagcttagctacacaccccctataatagctaagctcacccccatgacaaataacatgaaaatacaaaaaaagtccttactacaaagactactcaaaatgccncaaaatacaaggctaaaaccctatactactagaatggccataatacaaggcccagacgaaggaaatacctattctaatatctacanagataagcgggctcatacttagcccatgggcttgaaatctaccctaatgctcatgagaaccctanggccttcccttggatcgctagccaatctac

SEQ ID NO: 10388 - DNA, 332 bp, Glycine max
ttctgcagggaagctaagtgtgaagtatgcaatcttgcataggattggcactgccaactgggtacccaccaatcatacttccactgttgccacaggtttgggtaaatttctgtatgctgttggaaccaagtccaaatttaattttggaaactatatttttgatcaaactattaagcattcagaatcttttgctgtcaaattacccattgcctttccaactgtattgtgtggcattatgttgagtcaacatcccaatattttaaacaacattgactctgtgaagaagagagaatctcctctatccctgcattacaaactgtttgaggggacac

SEQ ID NO: 10389 - DNA, 492 bp, Glycine max
  unsure at all n locations
cacctgcggctgcagcttaagaaccaaaaataaaaatattatcttattagggagataacacactattaaaaatctattagaaaagaaagtacatctaaatatttattaaagagtaaaatatatttaaacctttaaaatattcttactaaaaagaacactcggctagtaatactcgagtaacaaagaaagttatgatatgggtatttagtaattataactatcttgtaaacattacttaaatnttttaataatttatatacaggactttaattgttgttgtcaaaataataacatttattttgtaaaacatattcatatgtataacatattatatgcttgttgaatataggatatacatttcttaaaaaaatatgtataaacaatgataatatactccaattgaaaatacttgtatatatatataactccttagaatacgtttagtcatctgcatcgcaatagagaagaaatcataatatgatttacttagta

SEQ ID NO: 10390 - DNA, 401 bp, Glycine max
agcttctatagaaagttcgttgctaatatctctacaattgcatcacctttcaatgagctggtgaagaagaatgtggcatctacctcgggtgaaaaacaagagcaagcctctgctttgctcatagaagagcttactaatgcacctgttctagctcttcctgacttttctaaaacttttgagctagaatgtgatgcctctggagtgggagttggagttgtattgttacaatgtgggcaccctattgcttattttagtgaaagagaattcatagtgccactctcaactactccacctatgataaagagctttatgtcataataagagccctccaaacttgggaacattacctcgtttccaaagaaattgtcattcatagtgatcatcaatcacttacgtacatt

SEQ ID NO: 10391 - DNA, 366 bp, Glycine max
  unsure at all n locations
agcttattaagaggcttcctccagaagcttcctcgtggcttctttgagaagctntctcaagaggcttctttgagaagctagatccttatctatccacacccctctattaactaaattaacttccttaaaaataattacggatgataataacgcaacanatattcaaacatcaaacataattactaatagtatatagatatatatatatcagggtgttacaactctcccacccttttagaaatttcgtcctcgaagattaccttactcaaacaaggatgggtgagcttctcacatctgactntctaattcccatgtggcatcttctcctgatgcacctncccagatcaccttgaccaacagaatctc

SEQ ID NO: 10392 - DNA, 319 bp, Glycine max
tgatgaatcatgtatcgtagttaggaacaaggctagattgattgctaaaggatacaaccaagaggaaggcattgactatgatgagacctatgcctttggtgcaaggttggaagctattaggctattgcttgcttttggttgtattatgaatttcaggttatatcaaatggatgtgaaaagtgcttttctcaatggatacattgaagaagagatatatatagaccagcctccaagttttgtagactttgaacatcctaatcatgtttacaagttgaaaaagacactgtgtggtttaaaaaaagcacctagattttggtat

SEQ ID NO: 10393 - DNA, 326 bp, Glycine max
tgtgaaaccttgcaagctccaaacaccccatttgaaaatctttctggattaaacttgtgagcatcaggcccccagagttgagggtcttgttgcagcactgagattggaatctgaatattcattccttttggaattaggatgccttttaaattaacaccttggagagctgttctaacaacaaaggctgctggcgaataaagcctcaaagtctcttgaatcaccatggtcaactgcaagtgtaacatttttatatatggccttcacagatcagtaagaatgctcatgaaacttggaaatgatcaactataattacaataaaatttgag

SEQ ID NO: 10394 - DNA, 497 bp, Glycine max
  unsure at all n locations
agcttcaagaataatggcctcaacatacttcttattcccagaaggaaattcaataaataggcaaagtaattaagatacattgtataatgaaacgtataataaagaataatggcctcaacaaacttctaatgctgatggttttctgtttggttntccaacaacatttggatccatggtttctcaatttaaagcatttntagaagacactataagcctgttgtggcttacacaggcactagcaggaaaacctgtagggttcttctctagcactagttctcaaggaggtggacaagaagagaccccatgagttatattaattattactgaattcttcaatattcatgattaaggtttccatcaattaatggttattttgtatatatccactcaacatgggagaagtcagagcanactattagtcactactttgtattattattactggtacgaagtatctaccaaccaatgagtcagcttgtcacgatgggatgatacat

SEQ ID NO: 10395 - DNA, 311 bp, Glycine max
caaatacctttcagaggcacatcaacttcaaagtgaagaggaacttgggtaacacacaattcactagtaacagaagacaagacacgatattcagcttcagtggatgattttgaaacagtgggttgtttcttagaacgccaagaaagaatgatatttcccataaagacacaaaagccagaagtggatcttctggtatcaacacagctggcccaatcagcatccgcaaaggcagggaggctgagagagttctgagcaaggaaaaacaaaccttgtctatgagcagatttgatatactacagaagatgatgaac

SEQ ID NO: 10396 - DNA, 261 bp, Glycine max
  unsure at all n locations
gaacatcacatatcgagacgctcaaaactgaacaacgaaagctctcaagaaacagaaatggtcataacctttcactcggatgtccgaatcaggcacataatatatcgagacgctcgagaatgaacaacggaagctctcgagaaattcaaatgaggataacatttcactcggatgttcgattcatgcgcatcatatatcgagacgctcgaaattaaacaattgaagctctcgagaaaattaaantgtcataactctttactc

SEQ ID NO: 10397 - DNA, 462 bp, Glycine max
  unsure at all n locations
tgcaagctcaagaatatggcctcatcaaactacttgnttctcgagggtatattctataaatagacctcctatctttaatggagtgggttgccactactggaaaacccgcatgcaaatctttatagaggcaatagatntaaatatttgggaagccatagaacaaggaccttatgttccctctataatggccggaagtgcaacaatagaaaaacctaaagcagattggactgaggaagaaagaagaatagtacaatataatttacaggccaaaaatattattacatctgccctatgaatagatgaatactctagggtttcaaatggtaaaagtgttaaggatatgtgggatacactacaagtaacacatgaaggcacaacagatgttaaaagatctaggatacacactttaactcgtaaatatgaactggttaggatgaatgtaaatgaaaatatacangacat

SEQ ID NO: 10398 - DNA, 375 bp, Glycine max
  unsure at all n locations
ctatggagaactnttcttaactgnaatttttacacacgttcacctatagtgggaattgatgaacaccttgataattcacagcttgcttcacctcaggtcgcaagccatttagaaacatcacacattntgagctttcaccatcccttccttggtaatgaggaanatacctcactagctcttcanacttggctgcgtattcagctacagtcgtgttcccttgcttgagttcaaggaattccatctccttcttgttcctaacatcttcagggaagtatttctccagaaataccctcttgaaggtttcccaagtcatagcttgaccttcagcctcccagcatnggtgagtgttctcccaccaatactcagtttcttcta

SEQ ID NO: 10399 - DNA, 398 bp, Glycine max
  unsure at all n locations
ttcttccttcaccagtaacccccaatccaaggtaaataaattgagtttaatttctatccacttttagtataattattatcttacactctccatttatactggtaatcaatcagaaatcatatatgaaaacaactcttaagtaactttatataaaagttaacaaacttattatatgtaccatacataaactgcttactcataaattactatttttnttaggaaatgttttagctttgttaattatctataagctatgtgtatctttcccagcattattctgctatactattagaatgttcaatatgttaaccaaactagtggttgttttgttaattattggacgatacttgaacagaagggaaaaacatgatacatatgaagaacaatggtgggttgaa

SEQ ID NO: 10400 - DNA, 382 bp, Glycine max
  unsure at all n locations
cagcagaacaattatgacctttccagcaacagatacaaccctggatggaggaatcaccctaaccttagatggtccagccctcagcaacaacaatagcagcctgcgtcttcctttcaaaatgctgttggcccaagcagaccatacattccttcaccaatccaacaacagcaacaaccccagaaacagccaacagttgaggcccctccacaaccttccctcgaagaacttgtgaggcaaatgactatgcagaacatgcagtntcagcaagagaccagagccttcattcagagcttaaccaatcagatgggacaattagctacccaattgaatcaacaacagtcccagaattctgacaagctggcttctcaagctgtccaaaatc

SEQ ID NO: 10401 - DNA, 310 bp, Glycine max
  unsure at all n locations
agtttcataatgtggtctccaaatatggattggaggaaaatgttgtaagccaatgcatgtatcttaaagtgtgtgggagtaagtttattttcttagtcctatatgtatatgatattttacttgcaagtagtgacttgggtcttttgcatgataccaaaaatttcctctcacaaaactttgatatgaaggatacgggtgaagccttctatgtcattagaatagaaattcatagagatagatctctaagaacatcgagattatctcanaaggcttacatagaanaagttttgaaaagatttaatatgcagaa

SEQ ID NO: 10402 - DNA, 368 bp, Glycine max
aacataaattataggccatcataatagatggatacaaggatgcaaaatctaaagtagcaattggtttttcataaaatccagcccttgcctccaatacctgcaagttgtaaagttcaaaatgcatgcatcaaaaggcaacacagcttgacaagtgaaacgtccaaaaggcaaatacaggaaaaggtgtagaacattaactccaataatattatgtagatctccatacataaagatacttgaaatttgagaattctttcaatttttcatttattaactgaagaacaagagggcatttaagattgagcttgattcaggcctaacatgctgttagagattcccaaacatcaatagttactaatcagagtaaa

SEQ ID NO: 10403 - DNA, 452 bp, Glycine max
  unsure at all n locations
cttcttcataagggtgnctctttgattcttacagatcaatggcagtggaatggagaaggaagaaagatgattggagatgccacttcaaggaaaagatgagtcaagaacaagcccaccaccataggaagccatggataataagttgaagatacgacaagatgattggagggagagggagagaatgagcacgacattttgtgcctcaaatgaggtctgaactttgaagtgaaattctcaaatgatcaaagttgaaaaaatgcacacacatggcctctatttatagcataagtgtcacacaacaatagagggaatattgaatttctattcaaatatcactcgaatttgnaatcgaattcgtggagccaaattgattagtgaattctagctactggtcaacccactaatccaagatcaagttcaagatgctccactaagtgtgcttacgtgtcatg

SEQ ID NO: 10404 - DNA, 517 bp, Glycine max
  unsure at all n locations
gccaaagcctctgtgattgattcaagacttcaagatcaagcatcaagaatccaatccaagattcaagattaaagagaagaaatcaagaagcaacaagtcaagacttcatatgggataagtattaaaagattttttcaaaaaaacaaatagcagagttntgttttacaaaagaattttctcanactttcaaagttaccagagtgattactctctggtaatcgattaccagttggctgtaatcaattaccagtgaccaatttggttttcaaaatgttttcaaatggtttgcaatgttccaaaatgattntcaaatagtgtaatcgattacactatattagtaattgattacaagtgaatctgaacgttggaattcanatccaattgtgaagagtcacaacttttcataanatgcattgtgtaatcgattacacctttgtgggaatcaattatcagtaaacagttttgaagaaaaagtaagagttatactcttacatggtctcaaatgcatactcttcat

SEQ ID NO: 10405 - DNA, 480 bp, Glycine max
  unsure at all n locations
tgatgcagctgagttttgttctacctcatgcactcctcattgactatggcatcatttctggcgctaaactgctgagagttggaagccatcttctcaattaaatttctggcttcagcaagagtcatgtctccaagggctccaccactggcagcatctatcatacttttctccatattactgagtccttcataaaaatattggagaagaagctgttttgaaatctgatggtgggggcaactggcacatagtttcttaaatctctcccagtactcatacaggctctctccactgagttgtctaatacctgagatatccttcctgatggctgtggtcctggaagcagggaaatatttttctaataatactctcttaaggtcatcccagctcgtgatggaccttggagcaaggaatacagccagtcctttgccactccctcttatgaatgangaaaagccttcagaaatatgtgatcctcttgga

SEQ ID NO: 10406 - DNA, 360 bp, Glycine max
  unsure at all n locations
tcaccaagttcttgtaagcttcccaaccaatcaggtattcttccactcaacccgttgttattcatcaacatgtgttccatnttcttggagtatgagagttgaggtggcacttctcctgttaaattgttgaatgataaatcaagacagttgagaacagtaaggtggccaaattcagaaggaatgctttctgtgagataattctctccaagtctgagacggctgangtttctagaattggttagagtggaagggatgggacctgagaagctgttgttagtcaccgccataaaggcatggaatttgaccagtgagaggaaagaactttcctgaacttgtggtgaaagtatgatttgagctttt

SEQ ID NO: 10407 - DNA, 511 bp, Glycine max
  unsure at all n locations
tgcaagcttcagtttgcccnctgcgtctaatcacatgccggttctgtggagatatggttcaagctgggaggtctgccatggacgtccgtgacagattaagaggattgtctgagcgttctgtgatgttgaaggacatggatattcaccagatttctgttcatcaaagtggctagttgatagcagtgtagcagcaacagcaacatcagagaaaacagggaaagtaaacaacaatgcaggagtacaattagcaaaagcaaagaggagagttaccaggccagcatatctcagagattatgcctgaaatgcaatgcaaatgatgaggagatgagctggcagtgcaggatttgctagcttctagttgtcccctgctaggatgcatccataaccaattctgttatgcaaatattcctagaagatatggataattcctttagcagtaggcattatatatgcatatgtaaataactagcanaatcaataagaaccaattacactcctctcattccttccc

SEQ ID NO: 10408 - DNA, 238 bp, Glycine max
atattctaaattgtaattagagtgactttaaaatttttaatattatgagaaacgatagattgggtaaatagtcactttggtccctgaaagtgtaactcgctgacaatttggtccctgaatcgagataaattgcaaaataatccctgaaacgtgcatctgttagtcactaccgtgaatggagtagttacctccgtcatttatctctgatgtggttcgtttaatgccacacacacatgat

SEQ ID NO: 10409 - DNA, 323 bp, Glycine max
ctgatgaagatgaatttgtggctacttcatgcactcctctaatgacaatagcatcacttctggcactaaattgctgggagtttgaagtcatcttctcaattaaatttatggcttcagcaggggtcatgtctccaagggctccaccactggcagcatctatcatacttctctccatgttactgagtccttcataaaaatattggaggagaagctgctcagaaatctagtggtgaggacaactggcacatagtttcttaaatctctcccagtattcatataagctctctccactgagttgcctaattcctgaaatatcttttctg

SEQ ID NO: 10410 - DNA, 461 bp, Glycine max
aagaaagagttatatggtaagccttggtacttctatcataaacttatgcataaaaacaaggaatacccgtaggaggcctctgacaacgacaacgaaggttggtggccagcttcttcctgagtgggaatatcctatacaagaggaaccatgacatggtactgcttcgatgtgtggatgccagagaggctaagcaaatgctggtagaggtgtatgaaggatcctttagcacgcatgccaatggacatgccttggcccgaaaaattctgagagtggggtattactggctcactatggagagcgattgttgcatccatgtgaggaaatgccataagttccaggccttcgctgataatgttaatgctccacccataccttttaacgtcttgtgtagcaccttggccattctctatgtgtggaatagacgtgatcagagccattgagcctaaagattcaaacggaca

SEQ ID NO: 10411 - DNA, 371 bp, Glycine max
  unsure at all n locations
aaggaaattngaatttctattcagatttcactcgaatttgaaattgaatttgtggagccaaaatttcattaattatcattagtgaattttagctatggtttagcccactaatccaagatcaagactaagattctccactaagtgtgcttaggtgtcatgactcatgaggcatgtaaaacatgaaagacatgcacaaagtatgactatatgatgtggcaatgaggtgtagcaagcaaatgctcacctccccctctaaaatttaattggattgggcttctcccaattcaattaaatttatttcccaacacacacatgtacaatgttcctattgaaaaataaaggtttaattgcacttcttactccctaacttt

SEQ ID NO: 10412 - DNA, 443 bp, Glycine max
  unsure at all n locations
aaggtgtaggacacccctatgttggttagagcccganatanttctcaccttatgaccaaaagtggtacaacataccactgagaaagttaagttaattgaagaaaggatgagaactgctcagagtaggcagaaaagttatcatgataagaggaggaaagatctggaattcgaggttggtgatcatgtattcttgagagtcactccgtggactggggctggtcgagcattgaaatcccgaaaactaacaccgcgctntattggtccttttcaaattcttaagagagttggccctctggcataccaaattgcattacccccgtctctttctaatcttcacaatgtctttcatgtgtctcaagtccgtaagtatatccgtgatccatcccatgtgattgaattggatgatgtacaagtgaacgagaatctgacatatgaaacattac

SEQ ID NO: 10413 - DNA, 125 bp, Glycine max
acacatgaatgacaacgccactcattcatggggctccgaaaaagggtaaaaatggaggatctgcctgaaggtcctctcttaagcaatcatggaacacaactccatactcgaaagtggaggaccca

SEQ ID NO: 10414 - DNA, 471 bp, Glycine max
  unsure at all n locations
tgccttggtaacttgttaacccagctggccttgaataagaaatctgtacctgtcgcaagagtctgtggtttatgctcctttgtcgaccaccatacagatcttttcccttttatgcagcaacttggagcaattgagcagcctgaagcttatgtctgcaaacattacaacaaacctcctccacctcagcagcaaaatcaaccacagcagaacaattatgacctctccagcaacagatacaatctcggatggaggaatcaccctaatctcagatggtctagccctcaacagcaacaacaacagcctgctccttccttccaaaatgttgttggtccaagtagaccatacgttcctcctccaatacaacaacaacaacaacaacaacagccccagaaacaacanacagntgaggccccnntcgcaccttccttgagaacttgtgagganatgactatgcaaacatgcagttcaaca

SEQ ID NO: 10415 - DNA, 346 bp, Glycine max
gcatgcaagcttgactttcgttcgctcagatagtattctttctggatctcattctatctccattagaaaagaggaggaactaagcaaaatgaagacatgggaagccacatccacttcaacatctaaatcaattggcactggcctatccttacttgaagatttatatatttgcttggaagatcttcttaatgtggcatcaacgcaaaaagtgatttctaaccatcaaggtgagaaatgcatggaagaatagcttgatggttcagcgggaattctggatatttgtggcattacaaggaacaccatgccacaagttaatggaaatgttcaagcacttcattctgctctt

SEQ ID NO: 10416 - DNA, 358 bp, Glycine max
  unsure at all n locations
actaagctatgctganatatttataatagacccctcagcagcaaaactctcaacttcagaantaatatgaactttcaagcaacaaatacaatccaggttggaggaatcatccaaatctgagatgggcaagtcctccataataacaacagcctgtccctcatttccagaatgctgctagtccaagcaagccatatgttcctcctccaatgcagtagcagcagcaacaacaacaacaaagacaacaagcaactgaggctccttttcaaccttccttagaggagttagtgaggcaaatgaccatccagaatatgcaatttcaacaatagacaagagcctncattcagagtctgacaaatca

SEQ ID NO: 10417 - DNA, 460 bp, Glycine max
  unsure at all n locations
tataatactcaagctntgaatgctctattcaatggagttgacaagaatatcttcagattgatcaacacatgctttgtggccaaagatgcatgggagatcctgaaaaccactcatgaaggaaccttcaaagtgaagatgtccagattgcaactattggctacaaaattcgaaaatctgaagatgaaggaggaagagtgtattcatgacttccacatgaacattcttgaaattgccaatgcttgcactgccttgggagaaagaatgacagatgataagctggtgagaaagatcctcagatcctcgcctaagagatttgacatgaaagtcactgcaatagaggaggcccaagacatttgcaacatgagagtggatgaactcattggttcccttcaaaccttngagctangactctcggatagggctgaaaagagagcaagaacttgcgttcgtgtcaatgatg

SEQ ID NO: 10418 - DNA, 392 bp, Glycine max
  unsure at all n locations
ctcagcatcataatcaaccacaacagaacaattatgacctctccagcaacagatacaaccctggatggaggaatcaccctaatctcagatggtctaaccctcagcaacaacaacagcagcctgctccttccttccaaaatggtgttggcccaagcagaccatacattcctccaccaatccaacaacagcaacagccccagaaacaaccaacagttgaggctcctccgcaaccttccctcaaagaacttgtgaggcaaatgaccatgcagaacatgcagtttcaacaagagaccagaccctncattcagagcttaaccaattagatgggacaatnggctacaccaataaatcaacaacagtcccagaattctgacaagctgccttctcaatct

SEQ ID NO: 10419 - DNA, 318 bp, Glycine max
  unsure at all n locations
gtcccgtaatatatcgagacgctcganattgaatgttgatggtcgntgcaaattgaaacgacaataactttttactctgatgtctgattgagtcccgtaatatatcgagacgcttcgaattgaatcttgatgctctgagcaaattcaaacgacaataacttnttactcggatgtctgattgagtcctgtaatatatcgagacgctctgaaattaatacgaaagctatgagcaaattcaaacgacaataatttttactcggatgtctgantgagtctcgtaatatatcgacacgctcgaaattgaatgttgatgctctg

SEQ ID NO: 10420 - DNA, 458 bp, Glycine max
  unsure at all n locations
aaagacacacgcctgtttaccatttcttttcctgattacactccagattatttttcaaattcagcaaaggtgatgtttcgagtagactaactggttgacccaaagcactgtatgcagcttcagaaattgcacaggcagaaatagccccaactgattcaccacctaaagcatactgctggaaacctttattgcatgaagagtcctcttcaatatcataagaaaactgaataagttgattaccatataaatttctcaccgttccatcatatgcatcatacaaatcacgcatgaagaacataagtctacgtgtcagtgtaccaggaaggtccgcatggtcactgaaagagctatcacgatttgtcactgaatgaacaaaacattcaagtggattcaacccagttaaataagaactntcaactacagcatatggaatgtatgactgaacagaaatcagggta

SEQ ID NO: 10421 - DNA, 378 bp, Glycine max
  unsure at all n locations
actcctaccatgtgccacaggatgcttagctaaatcaattgctgatttgttatccatcaacaaccttataggactgcaatttctcaagtttagttcttccattaaagcttccagccataaagcttgacaggctgccatagcaacaacaatatattctgcttcacatgttgacaaagcaactacactctgcttctttgagcaccaagagattggtgatgttccaaatttgaaaacatacccagcagtgtttntcctatcatctttatcaccacaccaatctaaatcactataaccaaacacttctccttctatanttctttgattgaaggatataaaatgccaagatccaatgttcctttcacatacctcagaatcctc

SEQ ID NO: 10422 - DNA, 274 bp, Glycine max
cgcttgatgtgacgacattttaatatgtgaatgtccattaatttgatgcatgactaacgagaaccacccttacaactacgtagactcataaccggagataggcttgaggtcaagatctaatctagttaattagttggtagatgttcacaccaagcttgaactttcattctaaaccctttatctgaccagtaatataattgatcggtatctagcagataagacatttccaaggttgtgaatgtaattggtcggcatcaatgtcttgctgatggca

SEQ ID NO: 10423 - DNA, 372 bp, Glycine max
  unsure at all n locations
ccaacaacactacaaagaacaagaatggcaccatcaaggacacgcaaagccctctcaacctcgatggtaaaatgaacgtgaccaggcgtgtcaataatgttaatctgcaacaacacatttcccaggatattaaacatataaatatatgaagacaaaattacttacaacacgataattaaccacaattcactcagataataaaaatagtaacagcagaagcattcaaatctcaattccccctttatatttcttgattcctattggttcaaaattcaattcaatttaaaatcaaccaacataacaaactcttcaactctgtccaatttatggcacttcaaaaacacatagcagtaatgattnttacatacactc

SEQ ID NO: 10424 - DNA, 451 bp, Glycine max
  unsure at all n locations
tgtaatcgattacacacatactgtaatcgattaccagagtgagttttcaganaacattctcaacagtcacatctttttctctgattcttaagtggccatcaaaggcttatatatatatgactagagacacaaatttaacaagagttttgaagaacaaaaaggtcttatcctcttaacaagcaaaattgttttatcctcttacaaattccttggccaaaacacttgtgattcaataaggaattatttgagtgctcaaattgttcaatctatctctttcaagagagatttcttcttctcttcttctttattctgaaaagggattaagaggccgatggtctcttggtgtgaaaggattctaaacacaaaggaaggattgtccttgtgtgtttagaacttgaaaaggaattgcaagatagtggaactctcaagcgggttgcttgggactggacgt

SEQ ID NO: 10425 - DNA, 394 bp, Glycine max
  unsure at all n locations
ntatgtgatgaacattggttaatggcaatgcatgaagagctgaatcagttaaagagaaatgatgtatgggatttagttcctaaaccaacctctcacaagccaatcgaaaacaaatgggtgttttgaaacaaacttgatgaatctggcatcatagtgaggaataaagaaagattggctgcnaaaggatataactaagaagaaggaattgaatatgatgaaacctatgctctagttgcaaggttagaagctataagattgctacttacatttgcttgtattatgaatttcagactttttcagatggatgtaaaaagtgtcttcctcaatggatgcattgaataagaagtgtatgtagaccaaccactangatttgtggatcatgaacatcctgact

SEQ ID NO: 10426 - DNA, 438 bp, Glycine max
tattcggagacccatgaattgattgcctagcgcagattatgcgtcctccaccatcgagtctaaagccccatggattgattgcctagcgttgttcgtctatcctccaccctcaaatcttattcggagacccatgaattgattgcctagcgcagttcatgcgtccccaaccatcaagtctggagccccacgaattgattgcctagcgttgttcatctatcctccaccctcaaatcttattcggagtcccatgacttcattgccttgctcggttcatgcgtcctacaccatcgagtctggagccccacgaattgattgcctagcgttgttcccctatactccaccctcaaatctaattcggagacccatgaattgattacctagcgctgttcatgcgtccacaaccattgagtctggagccctacgaattgattgcctagc

SEQ ID NO: 10427 - DNA, 456 bp, Glycine max
  unsure at all n locations
tactaatgctcctgttctagctcttcctgacttttctaaaacttttgagctaaaatgtgatgcctctggagtgggagttggagttgtattgttacaaggtgggcaccctattccttattttagtgaaaaacttcatagtgccaccctcaactaccccacctatgataaagagctttatgccttaataagagccctccaaacttgggaacattaccttgtttccaaggaatntgtcattcatagtgatcatcaatcacttaagtacatcagagggcaaagcaagttaaacaagaggcatgcaaaatgggtagagtacctagagcaatttccatatgttatcaaatacaaaaagggaaaaacaaatgtggtagatgatgccctttctaggagacacacatngttntgctccctangagcntcaaatttatgatttgataatattagggacttgtatgc

SEQ ID NO: 10428 - DNA, 435 bp, Glycine max
tgtaatcgattacacacatactgtaatcgattaccagatgagtttttcagaaaacattctcaacagtcacatctttttctctgattcttaagtggccatcaaaggcttatatatatatgactagagacacaaatttaacaagagttttgaagaacaaaaaggtcttatcctcttaacaagcaaaattgttttatcctcttacaaattccttggccaaaacacttgtgattcaataaggaattatttgagtgctcaaattgttcaatctatctctttcaagagagatttcttcttctcttcttctttattctgaaaagggattaagaggccgatggtctcttgttgtgaaaggattctaaacacaaaggaaggattgtccttgtgtgtttagaacttgtaaaaggaattgacaagatagtggaactctcaagcggg

SEQ ID NO: 10429 - DNA, 392 bp, Glycine max
  unsure at all n locations
agcttgcacctgctagcccacggaattagtgggtcgacccatataaaaaatttttattaaaaaattaaattttaaaacgtaaaagttggaaaccatttaagaactatgaaatatcaaataaaaaattatttgtccaaaataattacaataattacatctcaagtcacctaaaaaaagtattnttttcatatcatatntacttaatttgtaattctatattaaatcaaaattatcaccattcaccanaccattgaaaaatatataaagtacttacattctatatgttttttaaaagttatttttttcttaanttatgccccttatttattagtatcatatatgttatattannaatataaaagtctgtcagtaaaacttgtttaaacacgcag

SEQ ID NO: 10430 - DNA, 458 bp, Glycine max
  unsure at all n locations
tatgctgcacacatctacaacagacctcctcaacctcattatcaaatcagccacaatagaacaattatgacctctccaacaataggtacaatcctgggtggaggaatcatcccaaccttagatggtcaaatcctttacaacagcagcaacaacaaccttattttcaaaatgttgctggcccaagcagaccatacgttcctccaccaatccagcaacaacagcaacagccccagaaacaacaaacaattgagactcctctgcaaccttcccttgaagagcttgtgaggcaaatgactatgcaaaacatgcagtttcaacaagagaccagagccttcatttagagcttaactaatcagatgggacaattggctacacagttaaatcaacaacaatcccagaattgtgatagaataccttctcaatctgtccagaatcccnaaaatgtgagtgtcattaca

SEQ ID NO: 10431 - DNA, 467 bp, Glycine max
  unsure at all n locations
tgttggagataaaggtgntgtggaggcagccctcgctataggaagtgaagttagacatttgcaacgcgaaacttttgaaggggctcaaacattgatgtcaaattttactgaattcgccacggtggggaagcatatgacaatacttgcaggctcaccaaagcttgaagtgtatcaaactgactttgggtggggaaaacccaagaggagtgaagtagttcatgtagataattcaggaacaatctccctttctgactgtagagacaaagaaggtcgaattgaagttgggttagcactgcaaaagattcaaatgaatcaattcagtaccactttggaagagcacctcacagaaattggagttcttgactgaaaatctccactcacagaatatggttgcacaatgcacacttgcacagttcaactcctaccaaccgtacgcgtagaatgataatgatattaactgttacata

SEQ ID NO: 10432 - DNA, 402 bp, Glycine max
taagaggtctggcagtgctaatggatgtttcccttgattggagaaggtagaaatattgtctaagatggagtgctcttttgatatcaccttttgttgcagaacaatttttcttcttaacaatcttgttagaggaatcattttcctctttatccttccccttagactttgaagacaaggccttactatacttctttgtcttttgtgtttcttcctcatccctcttatctttcatagttagttgatcttttgccacctgtgaaggtgtttaaggatgcaacacaaattttgtgccaagatacgtgacggtaatctcattggttaggcaattgcaaacgatcttcctatcaaattgccatggccttcctaaaagaatatgtcctgcctgcacgggaactatatcac

SEQ ID NO: 10433 - DNA, 366 bp, Glycine max
  unsure at all n locations
tatgtgtgggatacctagtgtgagcatagtttccaaactcttaaggaaaagttgacgaccgctactatgttagttttgcctaacatgagagaaccctttcaggtgtattgtgatgcaccaaagatgggtttaggaggagtattgatgtaaaatggctaagtagtggcctacgcttctagacaactccagactcatgagaggaattatcccactcatgatctagagtaggctactgtagttttttcccttaagatatggaggcattacctctttggccccaagtttgaggtgtttagtgattataagagccttaagtacttgtttatgttggatcgagtggcctcagaataattaagaaggnggggg

SEQ ID NO: 10434 - DNA, 306 bp, Glycine max
  unsure at all n locations
agcttaagctccttcaactgcacaaggcttttaatatttgaagagtatncttgtggaaacctcacccgacnaaagaccactgacaacttatctttctctttctggacaaagtatggcagggctggggcaagtaaaatttctttccatcaaaccttggatgcaactgtgatcgtatgcccatataagctaaatcttgacgggtattcaagccatccttcgtcttgccttgaatgttaaagagcgttccaatcacactgtcacaaacatttttctccacatccataacatcaatacaatgtctaacgt

SEQ ID NO: 10435 - DNA, 422 bp, Glycine max
  unsure at all n locations
ttttagtagatgaagatgaatttgtggctacctcatggactcctctaaggacaatagcatgctttcttgcactgaattgttgggagttggaagccatcttctcaatcaaattcctagcttcagcaagggtcatatcaccaagatcttcaccattggtagtatcaatcatactcctctccatgttgctaagtccctcatagaaatattgaagaaggagttgcttagaaatctggtggtggggacaacttgcacacaatttcttgaatctttcccagtactcatacaagctttctccactaagttgcctgatgcctaaaatgtcttttctgatggcagtggtcctagatgcagggaagaatttctccaagaacaccctcttaaggtcatcccagctganaatggacctgngagcaaggtagtat

SEQ ID NO: 10436 - DNA, 467 bp, Glycine max
  unsure at all n locations
tgtcagcttcttctggcaatggttggaccagggtcatttttgaaaagncctttggtcgtgattcagattcttcagctgcattaactagatcactcaagcagtatctgacagaggatcaaattttcaggttttctaactaaaactgataatcttcaattcaactttaagattgtaaagtacattttataaaatgggaaatattatacaggattgaccactatcttgggaaagagcttgtggaaaatctttctgttctccgattctcaaatctcatctttgaaccattatggtcaaggcaatatataagaaatgtacagttgatattctcagaagattttggcactgaagggcgtggcgggtaacctttattccttaacagctttcacactttctgttcttataatggggattcttatacattttcatatctgtaccatgtgtaggtactctgaccattatggtatcat

SEQ ID NO: 10437 - DNA, 413 bp, Glycine max
  unsure at all n locations
tgaagganaacttgatgtcttgctcaacctagtaactcatcttgtcataaattagaaatctacacatgttgcaagagtctgtggtctatgttcttctgcagatcaccatacagatctatgtccttccttgcagcaatctagagtcaatgagcaacctgaagcttatgctacaaacatttataatagacctcctcagtagcaaaaccaacaacaacagaataattatgatctttcaagcaacaaatacaatccaggttggaggaatcatccaaatctgagatggacaagtcctccataacaacaacaacagattgtcccttcttttcagaatgctgctggtccgagcaagccatatgttcctcctctaatgcagcaacattagcagcagtttgaacaaagataaccagcaactg

SEQ ID NO: 10438 - DNA, 271 bp, Glycine max
  unsure at all n locations
agcttcaatggctcaatgagcaaggggatttgatagtcaatcaacaagtaaagatacctttttctataagagactatngcgatgaagtttatgttatatactccctanggaagcaaggcacattttgntgggtagagtatggcaatatgacaagaaagcaatccacaatggtctcaccaatgaaataaccttcacccatggaagcaaaanagtaaaacttgttcccttgacaccttcaaaagtggttggggatcaagtacaaataaaactc

SEQ ID NO: 10439 - DNA, 467 bp, Glycine max
ttatgcgggcatcgtataataacaccataacatgatgggtttggtttaatttcattttggaacacttgccgctatctttgctcttagatccttgcgcaagattttgcctgacggtgacttgggaattgcatcaatgaagaatactcggtttattcttttgtaaaacaccacctgcacaattccacaactcattacattccttattttgtggctaagaaaggtacagtacacatcataaacctgtaaaaaacgcatttatatctgaaagtgacccagacatttagaattaggtgggaagaagcggtgtgggtcagttataagaaaaaatgagaaattatattaatacggcatgaatgagattatttttaaaatgaatatatattagatcaagtgaaaattaatagcaaagtaattataacgtgttttatttatttattaagaaagtattaaataatagtgaatatatg

SEQ ID NO: 10440 - DNA, 458 bp, Glycine max
  unsure at all n locations
ntntattcacagaaggaaattcaataaataggcttcctattttaatggagaggggttaccactactggaaaacacaaatgcaaatcgtcattgaggcaattgacttaaacatttgggaagccatagaaataagaccttatgtacccactgtggtggctggaaatacaacaatagaaaagcctanggaaaattggagtgaggaagaaagaagacgagtacaatataacttcaaagccaaaaacataattacttcttggataaatactttaactcatgagtatgaattgtttaggatgaagacaaatganagtatataagatatgcagaanagattcacacatatagttaatcatcttgcatcattaggaagaatattcccaaacgaggatctcataaataaagtgttaagatgtctaagtagaaaatggcaaccaaaggtaacagccatcatagaatct

SEQ ID NO: 10441 - DNA, 265 bp, Glycine max
  unsure at all n locations
tctcgatatattatgtccncgaatcagacatctgggggtagagttatgaccatttgaatttctcgagagctaccgtagttcaatttcgagtatctcgatatactattttcccaaatcggatatgccttgcataagctatgacccattcaatgtctcgagatcttcggctgttcacattcaagcgtgtcgatatattatgtcctctaatcacacatccgagtgaaatagtatgagtagtcgattttctcgagagattccggtgttc

SEQ ID NO: 10442 - DNA, 408 bp, Glycine max
  unsure at all n locations
ntgagccaattcagacaacaataactttttactcggatgtcttattgagtcccgcaatatatcgagacgctcgaaattgaatgttgaacctctgagcaaactcaaacgacaataactttttactcggatgtctgattgagtcccgtcatatatcgagacgctcgaaattgaatgttgaacctcatagcgaattcaaaccacaataactttatactcggatgtctgattgagtcccgtaatatatcgagacgctcgaagttgaatgttgaagctctcagccatttcaaacgacaataactttttactcggatgtctgattgagtcccgtaatatatcgagacgctcgaaatcgaatgttgaagctctgaactaattcaaacgaacaataacttttactcggatgtctga

SEQ ID NO: 10443 - DNA, 226 bp, Glycine max
cgacaataccttgtgacacggatgtctgattgagtcacgctttatctcgagacgcttgaaattgaataccgaagctctgagcaggtacagacaacaataactttttactcggatgtcggattgagtcacgtaatatgtcgagacgctcgcaatagaataccgaagctctgatcagatccagacgacaatacctattgactcggatgtcggattgagtcacgtaata

SEQ ID NO: 10444 - DNA, 370 bp, Glycine max
tatgaggagaagcataagattaagcaagagatcaccattctactcttcaagttgcaactgaaggagaaggaagaaagtcaaggaaatgaaagaagtcattgatgccgaggtagaggttgaggtcacggtcgaggataggttggaggtggcaatagtgtacgaggttcaaatttcatcaacaatagttacgagaaatgaaaaagctcaagagaatgtggaaaaggctatacaagcacaaggtatgataaatctcaaactcgatgttataaatgtcaaaagattggccactatgcttcaaaatgtagattcgccaagaatagagttgaggaggagactaactatgtggagcaaaaggatgagaagttcaaat

SEQ ID NO: 10445 - DNA, 454 bp, Glycine max
  unsure at all n locations
caagctgtttaccccatgttgagtntgcttacaatatagctgttcatagcactactaattgttctccttttgaagttgtttatgtttttaacccactaacttctcttgatcttttgcctatgcctaatgtttctatttttaagcataaagaaggtcaagtaaaggcggtctatgtgaagaagcttcatgagagagtcaaagatcaaattgacaggaaaaataaaagctatgctaaacaagccaacaaagggagaaagaaggttgtcttcgaacctggagattgggtttgggtgcacatgagaaaagaaaggtttatggaacaaatgatatcaaagcttcaaccaaggggagatggaccattttaagtgcttgaaagaatcaatgacaatgcttacaaagttgagctacccagtgagtataatgttagttccaccttcaatgtctctgacttatc

SEQ ID NO: 10446 - DNA, 407 bp, Glycine max
tatacatgagtatgattttatgatcctatttctataatgttgagaaacatagacttcctcttcaatgtatccgtttagaaaagaactttcccatccatttggtacagatttaaatctataatgcaagcaaatgcaaccaacaatctcacaacttctaatctaactatcggagcataggtttcaccaaagtctatatcttgttgttggttataacccttgactactagcctcgctatgttactagttattaagccatgttcatctagcttattttttaaaacccattttgcacctataatgtttgtcttactaggcctaggtactagttcccaaaattcatttctcttagactaattaagttcatcatgcatagctataacccaatgttcataacaagtgcctattca

SEQ ID NO: 10447 - DNA, 326 bp, Glycine max
agcttgaaggtaaactagatgccttggtttacctggtaacccaactggccttgaatcagaaatttgtacctatcgtaagattctgtggtttatgctcctctaccgaccaccatacaaacctttgcccttctatgcagcaatctggagcaattgagcagcctgaagcttatgctgcaaaaatttacaatagacctcctcaaccttagcagcaaaatcaaccacagcagaacaattatgacctctctagtaacagatacaatcccggatggaggaatcaccctaatctcagatggtctagccctcaacaacaacaacaacaacaacct

SEQ ID NO: 10448 - DNA, 412 bp, Glycine max
tttgcagctggaatcatttatcctatctcctatagcttatgggtgagtcccgtccaggtagtcccgaagaagactagcctcacagtgatcagaaatgagaaggaggagctgattcctattcgggtgcagaacagttggagagtctgcattgactataggaggctgaaccaggttaccaaaaagaaccattttcccctgccattcattgaccagatgcttgaacgcctggcaggtaaatcccactactgtttccttgatggtttttctggttatatgcaaattactattgctcctgaggatcaggaaaagaccacattcacctgccccttcggcactttggcttataggaggatgcctttcggcctgtgcaatgcccctggtaccttccagcggtgcatgattatatatttca

SEQ ID NO: 10449 - DNA, 227 bp, Glycine max
attatttcctaataactgtcgttcttggtgtgatacatacgagataatattccattagcagaatatatgatcagacattgctatactgttcatttaaaccacgttgaaattgcatcgctctatcttcgagttttctttttgcaatgatagcaagagtagaacaggtacatcgcacagtacaagaacaaataggatctggcctaaaattctctatttcatcccataca

SEQ ID NO: 10450 - DNA, 393 bp, Glycine max
cgccttgaagttggactcggtccttcggttagagggtcattctatatgtaaatagtcccaaaaccagaaatggacgccttaagaggctcaacaattttcatagcagtcgggtgttcccccattatgttgttatggaaataaaagtggagctgggtgagtctttccacgggttttgtggatagagacataggacactcttttgtaaacacttcactatttgctggtaaggaacctgacatgataaccatgaaatgcaacgaaaaaaggagacacacaagtgaagccatatcggtacaatttttaggtatgttagccaacggttgcaaacagctatatatataggctaccagaagatataggtaccttgtggtggataactttattagctacttt

SEQ ID NO: 10451 - DNA, 420 bp, Glycine max
ggacacttgaaactcagctagtacatatagttgcaacctgaggtcctttatagacttattaaaaatatcagccaagtgctacgagatctatctttatgtgtttaggatgttcatggaagactaaattacatgcaacgtgaatagagcaactcgattgtcacatataagcttagtgtcttgagtgtttgcaaactttaattgctgtacaaggtgcctaagccatgtaatttctcatgcaacttctgttatggtatagcattcaactacagcgctggatctcgcagctatattttgcttattgcttctccatgagatcaaattccctacgagcagaacacaatagcctgaggtataactcctgtcgcatcagcactagactaacaaacaatattgacattgtcttcgccttcatatacaaat

SEQ ID NO: 10452 - DNA, 416 bp, Glycine max
  unsure at all n locations
tctaaactntgtacaagaatgaagctctgataccacttgttagacaagtggcctcagatatcttaagaagggggggttgaattaagatattccaaacttttctcctaattaaaaatctatcttactttttacttaaagttatgaattcccttaatgacaatcttcttaaatattaattcaaatgaagcaacttgaattatgaatataaagcaataataaataaaggagattaagggaagagaaaatgcaaactcagttttatactggttcggccacacccttgtgcctacgtccagtccccaagcaacccgcttgagagttccactaacttgtaaattccttttacaagttctaaacacacaaggacaacccttcctttgtgtttagagattctttacaacaagagactcacagtc

SEQ ID NO: 10453 - DNA, 386 bp, Glycine max
ctcagcttctcaagatttaagttcttcctaacactgtttattcttagtcccaagtcctataacaacttgcatttgcccatcgagtttgcgggtgacaagtggttgaaaataacaaattaatgcccaacttgctccacagagtcctccaaataaggcttaggaacttaaagtccctatcactaacaatgctccttggcaaaccatggagtctcacaatctccttgaaaaacaaatcagccacatgggaagcatcatcaatttttttacatggaataaaatgagccattttagagaacctatcaacaaccacagaaatggaatctctaccatagcttgtttttggcagccccataacaaaatccatggataaatcaatcctaggatac

SEQ ID NO: 10454 - DNA, 401 bp, Glycine max
tgtaggccttggatcttcttcatcaatggagtcctttgtttcttgaagatcaatgacagtggaatgcagaaggaggaaaggtgattggagatgccacttcaaggagaagagagtcaagaacaagttcaccaccatatgaagccatggataagagcttgaaggttggagaagatgagtggagggagagggagagaaggggcacgaaatttatgcctcgaatgaggtctaaaatttgaagtgtaatttctcaaatgatcaaagtagaaataatgcacacaaaaggcctctatttatagcctaagtgtcacatgaaattggagggaaatttgaattttattcaaatttcacttgaatttaaattcgtggagctaaatttggagcctaaagttcactaactatga

SEQ ID NO: 10455 - DNA, 410 bp, Glycine max
acccagctggccttgaatcagaaatctgtacctgtcgcaagggtttgcggtttgcgctcctctgctgaccaccatacagacctttgccataccatgcagcaacctggagcaattgagcagcctgaagcttatgctgcaaatagttacaatagacctcctcaacctcagcagcaaaatcaaccacagcagagcaattatgacctctccagcaacaaatacaaccctggatggaggaatcaccctaacctcagatggtccagccctcagcaacaacaacagcagcctgctccttccttccagaatgctactggtccaagcagaccatacattcctccaccaatccacaacagcaacaactccagatacagtcaacagttgaagtcctccacaaccttcctcgaagacatgtg

SEQ ID NO: 10456 - DNA, 390 bp, Glycine max
  unsure at all n locations
agctggtagggntaaagtctcatgattgtctcttgctcatgcaacaattgatagccgnggctatacgagacatcttgccaaacaaagtcaggttagcgataactcgcctgtgctntttattccatgctatatgtagcaaagtcattgatcctgtcaagtttgatgagttggaaaatgaggccgcaattatactgtgccagttggagatgtattttccccctgctttctttgacatcatgattcacttgattgtgcatctggtcagagaaatcaaatgttgtggtcctgtttatctacggtggatgtaccccggtgagcgagtcatgatgatcttaaaagggtatacaaagaatctatttcatccagaagcctctattggtgagagggaca

SEQ ID NO: 10457 - DNA, 420 bp, Glycine max
  unsure at all n locations
ctcacctattaggcttaaattctganatatacccccctccttacctctccctttgatgctntacatggagtacttgaaggaagtggaaggaaaaactgtgcatgattatcttgaggtaaagatgggtaaaatgacaaagccaataggtgtggaaggaccagtgatagtgggtgctggtccatcagggcttgctgcagcagcatgtcttaaacagaaaggcattccaagcctaatccttgaaagggatgattgcttggcttcaatgtggcagctcaagacttatgaccgactatgccttcatctacctaagcaattctgccaactccctctaatgcctttcccccaaaacttttcctcttatccaaccaaacaacaattcttggnctattttaaagcctatgctgaccattttgacataaa

SEQ ID NO: 10458 - DNA, 295 bp, Glycine max
cacatagaaatgagagcgatctaggtcctttatatcatattatcgttttaatcaatctatagtttttagaaattcttcacgagttctaataatagttataatatctacttaaacaacaattatgaaaaatctattttcatattttgtttcttcatgaaaatacatggacaaataggatcgattttatattcttcctttaggaaatactcactaagtgtatcatactacatgcgacttgattgatttagcctatatgaagtactcttcttgagaatatgtattatttggcaaatta

SEQ ID NO: 10459 - DNA, 417 bp, Glycine max
taagaaatctatatatggtttaaaacaagcctttcgttattggtgccttaagtttcatgggataatttcttcatttggttttgatgaaaaccccatggatcaatacatataccacagggtcagtgggagtaaaatatgttttcttgttttatatgtagatgatattttacttacagccaatgaccggggtttgctacatgaggtgaaataatttctttctaagaattttgacatgaaggatatgggtgatgcatcttatgtcattggcattaagattcataaagatagacttcaaggtattttatgtctatcacaggaagcctatattaataaaattatagagagatttcagatgacagattgttcaccaagtgtcgctctcattgtgaagggtgataggtttaatctgaatcaata

SEQ ID NO: 10460 - DNA, 382 bp, Glycine max
  unsure at all n locations
agctcaacacaaggcatgcgaagagggtggattttctanagcaattcccttatgttatcaaacataatatgggaaatggtaatattgcatccgatgctctttctcggcgccatgcattactttctatgctcgaaacaaaattgattggtcttgaatgttcgaaaagcatgtatgaaaatgatgaaactcttggagaaatttttaaaaattgcgaaaaactctcagaaaactggttctttatacatgaatgctttcttttaaaaaaaacaaactgtgcgtgcctaaatgttctactagaaatatgcttgtttgcgaagcacttgaaggaggtctaatggggcattttggtgttcacaagactctataaacatttcaagaacac

SEQ ID NO: 10461 - DNA, 433 bp, Glycine max
acggacactatgaaactaagcttgattcttaagaatgtccttatttatattatacacattgttttgctcatcatttacaacttgctcttgttgcttctgctaaagtagttgatgtacattttttttttcaaaacttgaatatgattgtaaatgttatgtgttcttgtaaacgcaatgatgagttacaagtttcttatgtaactaaaattgctcatttggttgcaaatgtggatattgagactagaaggagagctaatcaaattggcacactatagagacctagagatagtagatgaagttcttatttctattcaatttgtagtcttttacgcatgtataactatttcagttcttgaagatttagctgttaaaggatctacttttgctcaataaggtgatgctactatgcctcgaaagaattgatttcatttga

SEQ ID NO: 10462 - DNA, 411 bp, Glycine max
  unsure at all n locations
actaagctacacagaatcggatgtatattctgtgagcatattttactactctaactggaagaacccctttggtgctagttagagatatgaaatgtgcattggaaaaggaaaattttaaagcaatcttggacttttcatctggtgaatggccgctntttcaaaccgaacagctggcatatttagcattgaggtgttgtgaaaagacttggttgaaccggccagaccttgtgtcagaaatctggagtgttcttgaaccattcaaagctacttgcattgacacgtcatcacatttgatttctaagaagcttcgtcgtgttccttcccattntgtgtgccccattgtccaggtgaagatcttaatttttcacattcattctttttaaaaaaactggtctttattgtatggaaaat

SEQ ID NO: 10463 - DNA, 417 bp, Glycine max
  unsure at all n locations
ctcagcttttatccaggctcatcttggtggtgaagctctnttttccatggcttattccttaatggatggcgcctcctctcacctcttctcctttgtcttccgctgcatctccatggtgaaaaatcaccattgaaggacctcattgaagctcaaagatccagcctccatagaagctccacaagcaagcttccatcaaaatggctcgaagcggcttcctacaccaatgtcacgaggagtgtagtggtcagattcatcaagagggaactgatttgtcggtacggactccctaggaagatcattaccgacaatggtaccaatctgaataacaagatgatgtaggaaatgtgcgcggatttcaaaatccagcatcacaattccacgccctatcgaccaaagatgaacagagctgtggaagca

SEQ ID NO: 10464 - DNA, 419 bp, Glycine max
  unsure at all n locations
tgccaatgctctattggctaatgagtcggtccatcctctcgaattccaatcgaatcatgagtcatcacataaataactccagcttcacacagtgcagaaatccatatggcaactctcacgtagtcagtgaagacaaagggcatttagattttgctgaaacaaatttcttgtagcatctgcagggctttttggagtgtatgtatgaaagctgaaatttaattagaagggtagtcaataatccagaaaaaatgatggaagtcaagttttatttatcttaaaactttgaaggctatacatgcatgaagcaaaaagatggatgatgagtaaagatgcaatgtacttaatatgaattntaattgtaattaggaaagttaatgaatataacaaaccatggaaatgaatcaccatcattcagtaaa

SEQ ID NO: 10465 - DNA, 446 bp, Glycine max
ttaagcaccgcagctgcagctctcatccacagcattccatctgtgttcttattagtaaatctgatgcacttgccacaattactaatgattccaaattatcatgattcctcactagttcagatatcaattttacaatccgctgattgattctccacaacttctgacctagattgtcatctttggcaatccatggctgcaattccttctcggcctgacaagcaacaagtcatgggatgaaaaatgaaatattttaaaaaaatctacaaaatggaagctgatttggaacacaggttagatgagctcttctgcataagatatttaaactttctatacattaaaagctatgtctcatgtgggaatataatatggtaattcaaaaattctgtagcctcgcgcgataattcctaacaattcttgactaacaaaacacgtggcctacccatatt

SEQ ID NO: 10466 - DNA, 226 bp, Glycine max
gcattctgagagatgcttctgagcctgacgctgagagagatgttcaacatcttccccccagaagtttctgtggctgatggcataagaatgtccaacatcctccgctccaatgctgaagccctccctcacccagtgaagaggaatcaacggaagaagaggatcaagccgcataggagacccctgcaccaatggcaccagaacctgctccaggagacctcattgacct

SEQ ID NO: 10467 - DNA, 401 bp, Glycine max
  unsure at all n locations
tgcagctggattcctttagtagggaatctatccttcctaagatggagccaaacccagtcacccttattaagaactagctctnttcttcctctattgcctttagttaaatacaccttgtttggttctctatntggttcttaaccctctcatgcaacttctttacaaactctgacctagattccncttctttatgtataaaagaagtgtctagtgggaggggaatgaggtctaacgagttaggggattgaacccatagacatcctcaaaaggggactgcttggtggttctatgaacccncctgttgtaggcaaattctacatgaggaagatactcatcccaagacttatggtngcctttcagatgaacccttaaaagggtggataaagacctattcactacct

SEQ ID NO: 10468 - DNA, 378 bp, Glycine max
ttagcaactctatgcacaaccccatacttctggtgcaaggatgacaatgacctgttacaaaagtggctctcctagtcactgataatggctctaggcacaccaaacttgcaaaaaatgttcgatctcacaaaatccacaacaactttagaatcattagttatggtggccttagcttcaacccacctagaaacataatcaacaacaagcaagatatatgaaaaaccatgagaaataggaaaaagacctataaaatcaacactcgaaaccagcgaggctgacagttgctccaaaatagctttgtcgaccctctccatcatggtcaatagatccttgtcaaaatacttgaacttggtggggtcagactgctattagaacgag

SEQ ID NO: 10469 - DNA, 366 bp, Glycine max
tcttagtttcagatgatgcagttgagtttgtagctacctcatgcactcctctaatgactatagcatcatttttggcgctaaactgctgggagttggaagccatcttctcaattaaatttctggcttcggcaggagtcatgtctccaagggctccaccactggcagcatctatcatacttctctccatattactgagtccttcataaaaatattggagaagaagctgctccgaaatctgattgtgagggcaactggcacatatttttttaaatctctcccagtactcatacaggctctctccactgagttgtctaatacctgagatatccttcctgatggctgtggtcctagaagcagggaaatttt

SEQ ID NO: 10470 - DNA, 374 bp, Glycine max
cttcctattttcagctgatgaagattattttatggctactacatgcactcctctaatgacaatagcatcatttctggcactcaattgcttggacatagagacagtgtgggggacacaaacactggctgcagcaaaggtcatgtctccaagggctccaccactggcagcatctatcatgcttctctccatgttactgagtccttcataaaaatattggagaacaagctactccgaaatccgatggtgagggcaaccggcacatagctttctgaatctctcccagtattcatataggctctccccactgagttgcctaatgcctaaaatatcctttctgacggctgcggtcctggaagcaacgaaaattttttcta

SEQ ID NO: 10471 - DNA, 380 bp, Glycine max
taactccaataaaaatgatgagtctaagtgatatttataccaggcgcaattattgttttgtggaaccagaaaattttgaagaagcaattaagaaagatgcttgggggaaggcaatgcaagaggaaatagatgcacttgaaaagaacaagacatgagaaactggttgagaagccaaaagacaaagaagttattggagtgaaatgggtctacaaggtgaagcataatccagatggtttcagtccaaaagaacaaagaaaaacttgttgcaaagggctattctcaacagcccagtgttgattatgaaaaaggttgttgcaaacttgttgtccacatttgtaagagaatgtaatattttataataaatcatcaattaagtccat

SEQ ID NO: 10472 - DNA, 456 bp, Glycine max
  unsure at all n locations
cttcactacatcaagaatcaccttgttgagtcttctctgnggctgtcttactgggttagctccatcctctanatatattcgatgcatacatgtggatgggctaataccangaatgtccgccagggtccagcctatagccttcttattcttcttgagaacagacaacaacttctcctcttgctcatcagcgagggaggcagatataatcactggaaaacttntgctatcatccaagtaagcgtatttcaaatttgatggcagaggcttcaattctggtgtggtcggctggatagtggtagaaggagatggtttctcaccctgtacctcatatagaaagtcagaggtatgtgtacttccctaaatatggttagtcctatctgactctatnaaatcaatctcaagaggtaaaacaccaccaccagacatgcaatcaatatcacttctagaatcactctc

SEQ ID NO: 10473 - DNA, 291 bp, Glycine max
  unsure at all n locations
gcgtctccatatattactgtctctaatcctacatcgtagtaaaaagttattgtcgttagaatgtgctcagagcttctgttctgaatattgagagtctcgatatactacggaacacaatcggacatctcagtaaaaagttattgtcgtttgaatttgctcagagcttctgttcttaattacgagagtctcgatatattacgnggattcattcggacatccaagtaagaagttattgccgtttgaatatgctcaaagcattcgttgtcaattacgagcgtctagatatattac

SEQ ID NO: 10474 - DNA, 445 bp, Glycine max
  unsure at all n locations
ctgcagctaacnagacatgctgttctgcatatgaaggttatatgcagggcattctnnttggattatgatggaacagtattgccttccgttgttaaaactccgagtcctgatatcattgatgttctaaatattctttgcagtgaccctaagaacactgtgtttatagtaactggcaggggacaaccacgctgagtgaatggtatgatcagtgtgagactcttggtatagcagctgagcatggttattatctaaagtgagatattcctctcctcaattctgctgataatgataatgcacatcctctatttatattttacaagaatgagaaggaagggaaccatatgagggagaaggaatagatatgtaggttttcatacatcgacgatgcatatatttgcatcatatgtagtggattagttatctatacattctattggtaagttct

SEQ ID NO: 10475 - DNA, 439 bp, Glycine max
  unsure at all n locations
agcttncatcactaaccctcaggagactaaggagatagatctcatgttatagaattgttggagaagggctgngtccaagagagcctaagcccatgtgctatgccgatgtagttggtgctccaaaaggatggtacgtggagaatgtgtacagattgcatggccatcaacaacatcacgataaagtataggcaccccattcctagactagatgatttgctngatgagttgcatggtgccaatatctnttcataatatgatcttataagtggctatcaccaaatcaggatgaaatagggtgattgttagtgtttagctctactgagctttaagagattggctaagattntgttaatacataagcacttagacaatgaatgaaagctggagttgctgcacatgatgtccaacgttatgtcaaggaataagatctggctgcaca

SEQ ID NO: 10476 - DNA, 266 bp, Glycine max
  unsure at all n locations
tcggtcttcaatttcgagcgtctcgacttattnctgttctcaatcagacatccgagtaaaaagttattgtcatttgaatttgctcagagctaaggcattcaagtccgagggtctcgatatattacaggactcaatcagacattcgagtaaaaaacttattgccgcttgaatttgctcagagctttggtattcaatttcgaacttctggatatattacgggtctcaatcagacatccgagtaaaaaagttattgctgtttgaatttg

SEQ ID NO: 10477 - DNA, 326 bp, Glycine max
  unsure at all n locations
taatgtgtctactatcnattgtcatcgtntgtttgtcattgaggtgccacttgagctgacaggtctctccacctttgggcgtattctatgaaagatctgtgcccctttgtacacgttctattgttgcatcctatcccgaaccatatcanaattgtactgatactgcctaatgaaggcaaccattangtccttccaagagtggactcgagaatgttccatgttagtgtaccaggtaacagctaccccagtaagattntcttggaaggaatgtatcagcagttcctcatctttttcgcatgcncncatcttccgataatacatcttta

SEQ ID NO: 10478 - DNA, 371 bp, Glycine max
taaacattcaatttcgagcgtctcgatatattacaggactcttatcagacatccgagtaaaaagatattgtcgtttgaattggctcacaggctcaacattcaattttgagcgtctcaatatattacgagactcaatcagacatccgagtaaaaagttattgtcgtttgaattggctcagaactttaacattaaatttcgagcgtctcgatatattacgggactcaatcagacatccgagtaaaaagatattgtcttttgaattggctcagaggttcaacattcaatttcgagcgtctcaatatattatgggactcaatcagacatccgagtaaaaagttattgtcgcttgaattggctcataggttgaaca

SEQ ID NO: 10479 - DNA, 370 bp, Glycine max
  unsure at all n locations
gtctaatcgagtccattatatatcgagacgctcgaaactgaatgttgaaactctgagctgattcaaacgacaataactntatactcggatgtccgattgagtgacgtaatatatcgggtcgctcgtaattgaatgttgaacctctgagccaattcaaacgacaataactctttatctcggatgtctgagtgagttccgaaatatatcgagatggtcgaaattgaatgtcgaacctctgaggcaattcaaacgacaataactatttactcggatgtctgattgagtcccgtaatatatcgagacgctcaaaaatgaatgtagaacctctgagccaagtcaaacgacaataactctgtactcggatgtctga

SEQ ID NO: 10480 - DNA, 368 bp, Glycine max
tttactcggatgtccgattgagttctgttatatatcgagatgctccaaattgaaaatagtagctcctagcaaattcaaaccataataactttttactcggatgtccgattgtgtcccgtagtatatcgtgatgctcgaaattgaaaacataaggtctgagcaaattcaaacgacaataactttttactcagatgtccgattgagtcccgtaatatatcgagatgctccaaattgaaaatagaagctcctagcgaattcaaaacataataactttttactcggatgtccgattgagtcccgcagtatatctagacgcttgaaattgaaatagaagctctgagcacaatcaaacgacattaacttttttc

SEQ ID NO: 10481 - DNA, 450 bp, Glycine max
  unsure at all n locations
ttctctacaattgcatcacctctcaatgagctggtgaagaagaatgtggcatttacctgtggtgaaaaacaagagcaagtctttgctttgctcaaagaatagcttactaaagcacctgttctagctcttcctgactattctaaaacttttgagctagaatgtgatgcctctggagtgggagttggagctgtattgttacaaggtgggcaccctattgcttattttagtgaaaaacttcatagtgccaccctcaactaccccacctatgataaagagctntatgccttaataagagccctccatacttgngaacattaccttgtttccaaggaattngtcattcatagtgatcatcaatcacttaagtacattagagggcaaagcaagttaaacaagaggcatgcaaaatgtgtagagtacctatagcaatttccatatgntatcaaatac

SEQ ID NO: 10482 - DNA, 175 bp, Glycine max
  unsure at all n locations
aaataacaatttagtgcccaacttgctccacanagtcctccaaaaatggcttatgaacctagagtccctatcactaacaatgctccttggctaaccatggagtctcacaatctccttgaaaacatatcagccacatgggaagcatcatcaactcttttacatggaataaaatgag

SEQ ID NO: 10483 - DNA, 365 bp, Glycine max
  unsure at all n locations
taatccaattaaattntatatggggaggtgagcatttgcttatttcaccccattgtcacatcatatagtcacactttgtacatgtccttcatgctttatatgcctcatgacacctaagcacacttagtggagaattttggaattgatcttggattagtcggctgaaccataactaaaattcactaatcataattagtgaaattttgactccaaagtttggttccacaaattcaagtaaaatttgaattgaaattcaaatttccctccaatttttgtgacacttaggctataaatagaggtcatgtgtgtgcatttttttgaactttgatcatttgaatattgaactttagatttcagagctcttt

SEQ ID NO: 10484 - DNA, 375 bp, Glycine max
tgccgccacggagttttccgactatgctcttgtgtggtggaacaagctacaaaaggagagagcaagaaatgaagagccaatggttgatacatggacggagatgaaaaagatcatgaggaagcggtatgtgccggctagttactcaagggacttgaaattcaagctccaaaaactaacccaaggcaacaagggggttgaggagtatttcaaggaaatggatgtgctcatgattcaagcaaatattgaagaagatgaggaggtaactatggctcgatttcttaatggtttgactaatgatatctgtgatagctgcaggagtttgttgaaatggatgatttgcttcacaaagcaatccaagtggagcaacaattaaaa

SEQ ID NO: 10485 - DNA, 367 bp, Glycine max
ttgaatgctctattcaatggagttgtactttaatatcttcagactaatcaacacttgcacagtggccaaagatgcatgggagatcctgaaaaccactcatgaaggaacctccaaagttaagatgtccagattgcaactcttggctacaaaattcgaaaatctgaagatgaaggaggaagagtgtattcatgacttccacatgaacattcttgaaattgccaatgcttgcactgccttgggagagaggataacagatgaaaagctggtgagaaagatcctcagatccttgcctaagagatttgacatgaaagtcactgcaatagaggaggcccaagacatttgcaacatgagagtggatgaactcatt

SEQ ID NO: 10486 - DNA, 358 bp, Glycine max
  unsure at all n locations
tgctctganccggctnccttattcgattgttctatcattgggnntagtttcctattcaagtttcactattcttgaaagatggccagcacaatcaagatcgagaagttcacaaggaagaacaatttcaatcagtggcaaatcaagatgcgagctctgttgaaggaacagggcatctgggcaccactctccagcagatcctccaacctagaagcatcctttctggagcaacaagaagaaaaggctcactcgctgattcttctgtctctctcagatgaagttctctacgaggtggctgaagaacaaactgttgttgggttgtggctgaagctggagaaactctacatgacgaagtccatct

SEQ ID NO: 10487 - DNA, 331 bp, Glycine max
  unsure at all n locations
aaatctaagctggatcacattggggcaaggttttttttatttggctgcaaacaagtctgacatagttctgctatccacgatgaaatctatgatgtctggatgagtgggaaccactctcngacatgctcacatctattgctgaggcagatgtggttttcaccaacacagcatcagagaatccattgatcttgacggaggatgtaaaggaccttcctcctgccaccaatgaagttggtggccgccgcctgtacaccaagatttctgttcctagaaatgtcggatcatgtctctcacaccttgagtctgtgagagggtacattgttgatgacct

SEQ ID NO: 10488 - DNA, 349 bp, Glycine max
  unsure at all n locations
gcttatgctgcanatatgtacaatagaccttctcttctatcagcagaatcaaccacagcagagcaattatgaccgttccagcaacagatacaaccctggatggaggaatcaccctaacctcatatggtccagccctcatcaacaacaacaacagcctgctcctttcttccaatatgctgctggcccatattgaccatacattcctccaccaatccaacatcatcatctactccagatacaaccaacagatgatgcccctccacaaccttccctcgaagaacttgtgaggcgaatgactatgcagaacatgcagnntcagcaagagaccagagcctccattcagagctta

SEQ ID NO: 10489 - DNA, 369 bp, Glycine max
tctcgatatattatgtgcccgaatcggtctttcgtttgaaaaattattaccatttgaatttctcgagagctttggctgttcagtttccagtgtctcgatatattatgcgcctgaatcggacttttgtgtgacaagttatgaacatttgaatttctcgagacctttcggttttcaattaagatcgtctcgatatgtgatgcgccagaatcggacttccgtgtgacaagttatgaccattggaatttatcgagaccttccgatcttcaatttcgagggtctcgatatattatgtgcctgaatcggactttcgtgtgacaagttatgaacattggaatttctcgagaccatacgttgtcaatttcgagcgtc

SEQ ID NO: 10490 - DNA, 327 bp, Glycine max
  unsure at all n locations
agcttctagatatattatgcgccggaatcagacttccgtttcataagttatggccatatgaatntctcgagagcattcgntgctcaatttcgagcgtctcgatatagtctgcgcgtttatcggacttccgtgtgacaagttatgaccatctgagattctcgagggcttccgatcttcaatttcaagcttttcgatatattatgcgcctgaatcagactttctgtacacaagttatgaccatatgaatatctcgagagccttcgttgttcaatttcgagcgtctcgatataatatgcgcctgaatcggacttncgtgtgatagagtat

SEQ ID NO: 10491 - DNA, 166 bp, Glycine max
ttatcttttagatctttaagtgcagattttcatgtataatgatagatctcatccagcgcaagttgttgcagcccagatacgcacactgctatataaacatgaaagctgcacgagttttccaccaagtccgggattgaagagttattttgtgagttttgggacttga

SEQ ID NO: 10492 - DNA, 422 bp, Glycine max
agcttcctcgtggcttctttgagaagctttctcaagaggcttctttgagaagctagatccttatctatccacacccctctattaactaaattaacttccttaaaaataattacggatgaaaataacgcaacaaatattcaaacatcaaacataattactaatagtatatagatatatatatatcagggtgttacaactctcccacccttttagaaatttcgtcctcgaaatttaccttactcaaacaaggatgggtgagcttctcacatctgactttctaattcccatgtggcatcttctcctgatgcacctccccagatcaccttgaccaacagaatctctttccctcttaggtgttttgtttgcctatcctcgatcctcaaatgcaatgtttcatatgtcaaattctccttcacttgtac

SEQ ID NO: 10493 - DNA, 414 bp, Glycine max
agcttctatctttccatgacttttttgtcattcctgtaaaaagcaatcttctcccgctgatcttcatcaaagattctacacatgttggtcaactgtgcaaagttatgaataccgtgataatttaccatcatctttacttctggtcgaaggccattgacaaatttcacgcatttggacctctccccagcttccccctgataatgaggaaaataccttacaaggttctcaaacctcgccgcacactctgccaccgtcatactttcatgtttcagctcaagaaactccatctccttcctattcttcacatcttctggaaaatacttctccacaaaagtttgtctgaaagtctcccattggacaacaacaccacctgctccctctaaacgtgggcgagtgttctcccaccagtactcc

SEQ ID NO: 10494 - DNA, 409 bp, Glycine max
agctttgagccaattcaaacgacttatactttttactcggatatctgattgagtcccgtaatataatgagaccctcgaaattgaatgttgaagctcttagattcaaacgtcaataagtatttactccgatgtctgattttgtcccgtcatatatcgagacactcgaaattgaatgttgaagctctgatccaattcagacgacaataactttttactccgatgtctgattgagtcccgtaatatatcgagacgatcgaaattgaatgttgaatctctgaccaaattctaacgacaacatctttttactcggatgactgattgggtctcgtaacatatcgagacgctcgaaattgaatgttgaacctccgggccaattcaaacgacaataacattttactcggatgtctga

SEQ ID NO: 10495 - DNA, 418 bp, Glycine max
agctttgtacgttgacgtaggtgttattgaacaaatataacacatcccaaaacatgaggtggtaaataaaccctgtaaggaaggatacaatgaccagacaatacatctagaggccttctaaagttaagcacactagaaggggttcaattaatcaaataaactgcagatctcacagcctcaccccataaatgagatgggacattatcatctatcaaaagtgatcttgtcacctctaatatatgtctatttttcctctcagtcactccatttttttgtggtgaataaagacatgtggtttgatgcaagattccattagagatcataaactctattaattcagtcttaaaatattccccctcattatctgatctaatgaccttagtatatgtgttaaaatatatagctatcatctgatgaa

SEQ ID NO: 10496 - DNA, 352 bp, Glycine max
  unsure at all n locations
tcaacatcagaccacttccagggtgatggaacttcttcacatggacttgatggggcctatgcaagttgaaagccttggaggaaagaggtatgcctatgtggttgtggatgatttctccagatttacctgngtcaactttatcagagaaaaatcagacacctttgaagtatttaaggagttgagtctaagacttcaaagagaaaaagactgtgtgatcaagagaatcaggagtgaccatggcagagagtttgagaacagcaagtttactgaatactgcacatctgaaggcatcactcatgagttctctgcagccattacaccacaacaaaatggcatagttgaaaggaaaaac

SEQ ID NO: 10497 - DNA, 313 bp, Glycine max
tgagggtgtaacagatgcctggggtaacctggttacccatctgtccttgaatcagaagtctgtacctgtcgcaagactctgtggtttatgctcctctgccaaccaccacacaaacctttgcccttctatgcaacaatctgaagcaattgaatagcctgaagcttatgctgcaaacatctacaatagacctcctcaacctcagcagccaaatcagccacaacagaacaattatgacctctcccgccacaagaacaatcccgggtggaggaatcatcccaaccttaaatggtcgaatccttccaacagcaacaac

SEQ ID NO: 10498 - DNA, 391 bp, Glycine max
  unsure at all n locations
agcttntanaatttatatcaaattatctatgangattaaagaatctatccatgttgctttagatgagactaaccctataaggccaagaaaggaaacacttgatgatattataggttcattagaagacatgcacattgatgagaaagggctcaaaggcgcaggaaatggaaatgaagaagactgtcaaattgatgaaaataaaacaaatatagatcttccaagagagtggagaacttcaagacatcatcctcttgataatatcattggtgacatctcaaaaggggtaacaactcgacactctctcaaagatgcatgcaataatatggcttttgtttccttaattgaacctaaaaatttaaatgaaatcataattgatgaacattggattatt

SEQ ID NO: 10499 - DNA, 405 bp, Glycine max
agcttgagggaaaacttgatgccttggtcttcctagtaactcagcttgccatgaataggaaatctgctcctgttgcaagagtctgtggtctatgttcttctgtagatcaccataaagatctttgtccttctttgcagcaatttggagtcaatgagcaacctgaagcttatgctgcaaacatttataatagaccccctcagcagcaaaaccaacaacagtagaataattatgatctttcaagcaacagatacaatctaggttagagaaatcatccaaatctgagatgggcaagtcctccacaacaacaatagcatgtccctcttttccagaatgttgctggtccaagcaagccatatgttcctcctccaatacagcagcagtcacaacaaagacaacaagcaactg

SEQ ID NO: 10500 - DNA, 422 bp, Glycine max
agcttatcgttagtttaatggttttattttacatcttataaaattttggtttaccctgattttataagatctttaaagttatatatttttcctaatgtttggcaaagaacattatccaacttttgagattgagtaaggttatgtgaaaaagtaaactgtcatcgtgtctcatacagccttttatatcttatctcggtttatcatcttatccagccttttgtatattaatttaaatttaaatatgaattatttttaaatcaactaaaatactatactattttttgttgttagacttctcaaccttcatttatatgtgtaacaacctatattgaattaaggattaggatttttgttcatctggatatgatgatattgaatccattcttgtcctcgagataaaatatctagaattgatagttgtg

SEQ ID NO: 10501 - DNA, 355 bp, Glycine max
  unsure at all n locations
tgntgngtgtgtatgataatgtccctaatgtattcctctatgattgtttgcatgacaccaacaatagcaatgttgttgttcccttgtcatggaaacgaagactccacatctgcattggggtggctcgtgtactacatacactacatctattttggaaccaacatacctatcatactccatacagtgaaatcaagcaacattcttttggccctgaatttggtgcctagtggcagattttgagttttgcaagaagtccccaagggattcaatgccaaaaccaccaagagttgagttgagggagaacttaataacttttgggtggtgtaactgattctgaatcctaactttggtcctg

SEQ ID NO: 10502 - DNA, 368 bp, Glycine max
tttgagcaattcaaatggtcataacttttccttcggggtcagattcaggcgcataatatatcgagacgcaagaaattgaacaacggaagctctcgagaaattcaaatgctcataacttttaacacggaagtccgattcaggcgcataatatatcgagactcacgaaattgaataacggatgctctcgagaaattcaaatggtaataacctttcactcggatgtcagattcaggtgcataatatatcgagacgctcaaaatttaacaatggaagctatcgagcaattcaaatggtcataacttttcacttggaggtccgattctggcgcataatatatctagacgcacaaaatttaactacggaagcta

SEQ ID NO: 10503 - DNA, 425 bp, Glycine max
agcttaacaatcagtgtcatacttttgtttataacaaagcaggtataaatatgcaatactagactcaaaatatgcaacaaacactagacctaaatcagtgtcacagaaattggaagaaaatattttatccaagcacagacttcaagccttattccatgtattggggggaagttatggctggccatatgggtagaggtgtcatagaagagcaggtatggaggaagggaccttggactgctgaagaggacaggttgcttgttgagtatgtcaggttgcatggtgaaagcagatggaactctgttgctaggcttgcaagtaagaaacaccaaacttttttcactgttttgtttcttaatatatatgattggattttcacatttataagtgacaatatagcaaaaaaacaactgaaattgttttcaact

SEQ ID NO: 10504 - DNA, 415 bp, Glycine max
agcttagccctagaggggatggttcttttcatgttttggagaggatcaataacaatgcctataggttggacctcccagaagagtatggagtcagcaccacttttaacatttctgatttaactccttttgcaggtggagctgatattgaggaggaggaactaacagatttgaggtcaaatcctcttcaaggggaaggggatgatgcaatcctccctaggaagggaccaatcactagaaccatgagcaagaggctccaagaagattgggctagagctgctgaagaaggccctagggttctcatgaaccttagggtagatttctgagcccatgggccaaggttgggtccaattatctttgtacatattagactaagatgtcattatatttggtccttgtatatagggctccatattgt

SEQ ID NO: 10505 - DNA, 377 bp, Glycine max
aactaattgataacccgatgaagagcatttttggggccgttctcttcttacaggttcccatagacactttataactgatgttgccatgattacatttggcatacatatcaatcaaggcagtttccacaatgacctcagactcgagcttttgccttattgcccatgcatgcaggcacttgccatatttgaaataaaccaaactgccacatgctgatagaaaagaagctatgcttaccgaatcaggtttaactccttcacactgactcctacgaaaagcatcagatcacttctatcatccccattcaaaattatccattaatcaaagtagtccatgtaaccacatctttctcatccatcctcttcgctagcaaccatgc

SEQ ID NO: 10506 - DNA, 418 bp, Glycine max
agctttcgcctcccgatttttcttttatgagccccgcaagggcgccgacatcctcgtggaggcgctggagcggcagggcgtgacggacgtcttcgcctaccccggaggcgcctccatggagatccaccaggcgctcactcgctcatcctccatccgcaacgtcctccctcgccacgaacagggcggcgtcttcgccgccgagggctacgcccgctcttccggcctccccggcgtctgcatcgccacctccggccccggcgccaccaacctcgtctccggcctcgccgacgccttgcttgacagcgtccccctcgtcgccatcaccggccaggtcccccgccgcatgatcggcacagacgccttccaagaaacccccatcgtcgaggtaacacgttccatcactaagcataactatctc

SEQ ID NO: 10507 - DNA, 308 bp, Glycine max
tttgagcaattcaaatggtcataacttttcacttttaggtccgattcaggcgcataatatatcgagacgctcgaaattgaacaatggaagctcttgagcaattcaaatggtcataactttttactcagatgtcctattcaggcacataatatatcgagacgctcaaaattgaacaacagaagctctcgagaaattcaaatggtcataacttttaactcggaggtctgattgaggcgcattatatatcaagacgctcgaaattgaacaatggaagctcttgagcaattcaaatggtcataacttttcac

SEQ ID NO: 10508 - DNA, 414 bp, Glycine max
agcttccattgttcaatttcgaggttctcgatatattatgcgtttgaatgagacctccgagtgaaaagttatgaccatttgaattgctcaagagcttccattgttcaatttcgagcgtctcgatatattatgcgcctcaatcggacctccgagtcaaaagttatgaccatttgaatttctcgagagcttccgttgttcaatttcgagcgtctcgatatattatgcgcctcaatcggacctccaaaataaaagttatgaccatttgaattgctcaagagcttccattgctcaatatcgagcgtctcgatatattatgcgcctgaatcggacctccgagtgaaaagttatgactatttgaattgcttaagagcttccattgttcaatttcgagcgtctcgatatattatgcgcctg

SEQ ID NO: 10509 - DNA, 266 bp, Glycine max
tctacggttctgcatccagagagatgaatgaattttgatctatgagtacatgcctaacaagagcttaaacttctacctatttgtttggcttttggcttatcttctgtcaaaggaaaaatgtctacatgtagcatatttacagggccaccttactttgaaacagattcacctagaaagaatttgctagagtgagaaaaacagttgaacatcattggaggaattgctcaataacttctataccttccaagtattcaagactaaaagtg

SEQ ID NO: 10510 - DNA, 352 bp, Glycine max
taaatatcgagcgcactcgatatataacgagactattaggacttccgagtgaaatgttattgtcgttcgactttgctacgagcttaggttttaaaattcgagcgtcacgatatattacgggactcaatcagacttccgagtgaaatgttattgtcgttcgaatttgctacgagcttcggttttaaaattcgagcgtctcgatatattacgggactcaatcggacttccgagtgaaatgttattgtcgttcgactttgctacgagcttcggttttaaaattcgagcgccacgatatattacgggactcaatcagacttccgagtgaaatgttattgtcggtcagaattgctac

SEQ ID NO: 10511 - DNA, 308 bp, Glycine max
taagcctatagaaggcaagcatatggccttcttgatccacacgcgacaatatcagaaacgagtgaagaacacttttgacaagaaggtacgcccgtgccggttcatcgaatgggactcggcgctgaagaaagtctcccaagctttgaaagatatcagaagaaagtgtgccccaaactatgatgggcctttcattgtaaaaagggctttctcccgaggggccctggtgctcgccaacatggattactaggagctaccttttcccgtgaacttcgacgttgtcaatcgatactacgcttaacatctggggc

SEQ ID NO: 10512 - DNA, 415 bp, Glycine max
agcttgcatcctgagactttctttttgatatatacacatgttgcttatgagtacatggctaatggttcattggataaatggatattcaacaagaacaaagaggaatttcagggggattgggatacaaggtataacatagcacttggaatagcaaaaggactcgcttatctacatgaagattgtgactcaaacattattcattgtgacattaaaccagaaaacgtgctcctagatgataatttcagggttaaggtttctaattttggtttggctaagctcatgaaacgtgaacaaagacatgttttcacaacacttagacgcactatagggtatcttgcacctgagtggatcacaaactgtgccatatcagagaaaaatgatgttgatagctatggtatggtgttgctagagatca

SEQ ID NO: 10513 - DNA, 334 bp, Glycine max
tgttacatatgttctcaacaccaaaacgtttgttgtatctagtaagcatgtctgcaagttggtcaccggagttgacaaagtcaatgatgatttctcctgagagcaccttttctctcacaaagtgacaggcaatttctatttggttagtctgctcatggaagatcggatttgatgcaaccgggagagcaacttgattgtcgcataatatcttgagtgtctccaattttagctggtggagaatttgcctagccatgtaaccttggatgcaatagctgccatagcatgacacttagctttaacactggatatagcaaatggattctgcttgttactc

SEQ ID NO: 10514 - DNA, 419 bp, Glycine max
  unsure at all n locations
agcttagtgtctngagtgtttccttactttaattgntggagaagttgcctaagccatgtaatttcgcatgcaacttctgtcatggtatagtattcaacttcagcgctggatctcgcaactatattttgcttcttgcttctccatgagatcaaattccctccaagcagaacacaatagcctgaggtagaactcctgtccaatcagcactagagtaacaaacaattttgacattgtcttcgtcttcatatagaaatccgtggcctggtgcgttcttgatatatctgagaatgcgcatgacaacattccaatggctatcacaaggggcattgagcaattgacttaacactctgcaaaagtgatgtctggtctggtgacactgaggtaactgagtctgccaacaagtttgtgatatcttcttg

SEQ ID NO: 10515 - DNA, 355 bp, Glycine max
tttgcccaattcgctgttgatctcgataatgcttctcaaaatcaattagcaagaggtcaacgattgcgcgagttgcttaaacaatcccaatcagctcctcttaccggggaagaacagataataactatttatactggaacgaatggttatcttgattcattagaaattggacaggtaaggaaatttcttgttgagttacgtgcttacttaaacacgaataaacctcaattcaaagaaatcatatcttctaccaagacattcactggggaagcagaagtccttttgaaggaagctattcaagaacagatggaactctgtttactacaggaacaagtcgaaaaaaattgattaatca

SEQ ID NO: 10516 - DNA, 351 bp, Glycine max
gcgggggaacgctagctccgatagaaaagttatgaccatttggattgcccaatagctgtcatagaacaatttccagcgtttggaaatgatatgcgccttgatcggacctccgagggaaaagttttgaccacttgaattgctctagagccttcgttgatcaatttcgagcggcttgagatattatgcgcctgaattggacctcctaattaaagctttgaccatttgcaatgctcatgagcgttgatagtccaatcacccgcattttataagtgtatgcacctgaattggatccccgagtgagaagtttggaccattggaattgaagaaaaggaatcactgcttgatcttcga

SEQ ID NO: 10517 - DNA, 226 bp, Glycine max
ttgcctcacaagttctctcagggaaggttgcgcaggggtctcaactgctggttgttttcggggctgttgtcgttgctggattggcggaggaatgtatggtctgcttgggccatcacccatttggaaggaacgaccctgctactcgtgttgctgtcgagggctataccatctgagattagggtgattcctccccccaacgctgcttctattgctggagaggtgataa

SEQ ID NO: 10518 - DNA, 362 bp, Glycine max
ctggacttcctgtgttttgggaacctctccttcctcaggtgtacccaaacccaatcacctggttcaagcatgactttctttctgcttttggtggcttgccttgcatagctcgcatttttcttttcaatttgggccttcacttgctcatgcaacttcttcacatactcagctttagcctgggcatccttatgcttaaacatagcaatgttaggcataggcaacaaatcaagaggagtcaaaggattaaatccatacactatctcaaatggtgaacaattagttgtgctatggacagcccgattataagcaaactcaacatgaggcaaacaggcttcccaagatttaagatttttctttaaaac

SEQ ID NO: 10519 - DNA, 424 bp, Glycine max
agcttcaagaattatggcctcatttaactacttgtttctcgagggaaattctataaacagacctcccatctttaatggactgggttaccactactagaaaacccgcatgcaaatctttatagaggcaatagatttaaatatttgggaagccatagaacaaggaccttatgttccctctataatagccggaagtgcaacaatagaaaaacctagagcagattggactgaggaagaaagaagattagtacaatataatttaaaggccaaaaatattattacatctgccttaggaatagatgaatactttagggtttcaaattgtaaaagtgctaaggatatgtgggatacactacaagtaacacatgaaggcacaacagatgttaaaagatctaggataaacactttaattcgtgaatatgaactt

SEQ ID NO: 10520 - DNA, 413 bp, Glycine max
agctttgaatggaggctctggtcttttgcagaaactgcatgttctgcatagtcatttgcctcacaagttcttcgagggaaggttgtggaggggtctcaactgttggttgtttttggggctgttgttgttgttggattggtggaggaatgtatggtctgcttgggccagcagcattttggaaggaaggagcaggctactgttgttgctgttgagggctagaccatctgagattagggtgattcctccatccaaggttgtatctattgctggagaggtgataattgttttgctgaggttggttttgctgttgaggttgaggaggtctattgtaaatgtttgcagcataagcttcaggcttctcaattgctccaggttgctgcatggaagggcaaaggtctgtatggcggtcagca

SEQ ID NO: 10521 - DNA, 258 bp, Glycine max
tgtgcctcttcacgtctggaatatgaatgtattttatagatccaaagacccttaggtgctttgctgatggcttcctcccgttccaagcttcaattggagtcttgtcttttacagacttagttggacatcagttgagtatgtaaacagcagtgtaaactgctttagcccagaatgtgttatgtacttgagcatcgatctacccatctccataactgagcaattctttctctctgacactccattttgttgaggaggata

SEQ ID NO: 10522 - DNA, 344 bp, Glycine max
  unsure at all n locations
taacaaaaggcatgtgaagcgggtggaatttctagagcaattcccttatgttatcaaacataaaaagggaaaaggtaatattgtagccgatgctctttctcggcgtcatgcattactttctatgcttgaaacaaaattgattggtcttgaatgtttgaaaagcatgtatgaaaatgatgaaacttttggagaaatttttaaaaattgtgaaaaattttcagaaaatggtttctttagacatgaaggctttcttttcaaagaaaacaaattgtgtgtgcctaaatgttctactagaaatntgcttgtttgggaagcacatgaaggaggtttaatggggcattttg

SEQ ID NO: 10523 - DNA, 306 bp, Glycine max
tataccaaattcaaacgacaataactttatttttgatgtccgattgagtcccgtaatatatcgagacgctaaaaattggaaacggaagctcgtagacaattcaaacgacaataacattttactcgaatgtcctacagagtccacgaatatattgagacgctccaaattgaaaacagatgctcgtaccaaattcaaacgacaataactctttactcggatgtctgatagagtcccttaatatatagagatgctccaaattgaaaacagaggctcgtggcaaatttaatagacaataactttctactc

SEQ ID NO: 10524 - DNA, 482 bp, Glycine max
  unsure at all n locations
tagtgtagttaggaggtagccttccctcgaagtaaggctagttatcttcttcctctccctcgtgacctctgctcataacacactgagggatcaaaatgtcacaaaaatgattatcaacatgactattaaacagatgagaccaaaatgtcagaaagttttcattggactaatatcccaaattgtgtttcatttaaggggtaaaatataattaattttcatcttttccctttttttatggtttcacttattaactataaagactaaaagggataagtttggaaactatagagactaaatgagtaattaaacctttnttattgttacaagcataacattacaattaataaacattntaaaaaataggaaagcaagcttaagttagaacaaacataataataagcataatatngattaaaaaacataatttatttgttgctccagaaattctaatgtgacaatatntccaaaatatgatattcaac

SEQ ID NO: 10525 - DNA, 417 bp, Glycine max
  unsure at all n locations
ctaagcttatatgcaggacgcattgagtggtccctctatcataagaagctttctattttctcaaatccgctatgatcaacaccccagttctggcccttcccatattccatgaaccatatgtcgtcgagacagatgcttcacgcactgccatgggggctgngctctcttagcaagggcacccattagcgttcttcagcaagaacttcaaccctcgcctgcttaatgcgtcaacctatgtgagggaactccatgctatcacatncgcagtgcgcaaaaggaggcaatatctcctcggcagctcttcacgatccataccgatcacaagagtcttcgcgagcgtatgactcaggtgattcaaacgccagaacagcactatcaccctttcaaatagctagggcttgatacacaattcaatac

SEQ ID NO: 10526 - DNA, 436 bp, Glycine max
  unsure at all n locations
ngctaacccatggaagctcctaatatctcccactcttttttgggtgtgccattcttggatggccttgattntctcggggtccacttggaccccatttctactaattacaaaccctaagaaaactatattatcaacacaaaaggtacacttctctatatttgcatagagggtgtntttcctaaggactgaaagaagttgcctaagatgtcctaagtgattatctaggctcctactgtgctctaaaatatcatcaaaataaaaaactacaaatctacctatgaaatcccttaagacatgatgcataagcctcataaaggtgcttggtgcattagtaagcccaaaaggcataactacttctctatgcaaatatagagaagtgtaccttntgtgtagataactacttttcacactactnttcaatngaaacttcataact

SEQ ID NO: 10527 - DNA, 441 bp, Glycine max
  unsure at all n locations
agctntaatataaagaattatataaatataatttctcttatcatatgtattaattataaatcttcatattatttaatatatattatgctccatattatatgacacgttaaaaagttatataagtcaatagaaatatcttattgtgcggggaaatttgaacaaaataacattgtttttacttaaaaattgtcaaaatccttttctcttgtcttattttttttcttctatatctgtattgtggaaagtattatgaaaattgtacgcaaaaattaaagattataaaacttaaacttccaatacccgaaaaaaaagtctcgaacttccatcatattcataggaaaaaaaactagtaatatattctagcattaaaaaaaggaaaaatgaagccaaaaagaggaaagaatgtatatatattctagatcactttctatatgggatcca

SEQ ID NO: 10528 - DNA, 375 bp, Glycine max
  unsure at all n locations
ngccgccacagagntttctgactatgctcttgtgtggtgtaacatgtctcaaaaggagagagcaagaaatgaagagccaatggttgatacatgggcggagatgaaaaggatcatgatgaagcggtatgtgccagctagttactcaagggacttgaaattcaagctccaaaaactaacccaaggcaacaaaggggttgaggagtatttcaaggaaatggatgtgctcatgattcaagcaaagattgaagaagatgaggaggtaactagctcggtttcttaatggtttgactaatgatatccgtgatattgttgagttacaggagtntgttgaaatggatgatntgcttcacaaagcaatccaagtagagcaacaat

SEQ ID NO: 10529 - DNA, 396 bp, Glycine max
  unsure at all n locations
agctggtntgatcaatatcaagaaagttttcttatgtatttattattctgataatagttcatagcttagaagttattatattatatatataacttataaactcgtagcgtttttctttttcttccatttttacattagtagtgtgataaactctattttttaataattctgtgcattatcctttctaactgttttaatacacatccctactattattgaattttcataacatattcgatctttacaaatataaagagtttaaggttaatacaaaatctaaaactatagttgcctaagagtattnttttttatctactaacaaatagaatttatactaaaatttatataatgggcgaagcatatgccttgagtccatgctattatatctatattatt

SEQ ID NO: 10530 - DNA, 466 bp, Glycine max
  unsure at all n locations
agcttcatatgtttatgttttctggccattcacaccttattattactatgcagntaccgatcgtccagaaacagcanaagaagctaccaagttcttcattattctgaaacaatattccgtcaatgccgtgtgtgatattcttgtttaacaagctcttgtcttggttnttctttaataaaaaaggaaagtcttttgaactcttggaaactgaaaagcatattatcacatctccaaacactatgacttcaatcaaattgataaaataaatatttgattttgatttagttttttagttaattntaaaatctttccgtttntaatttataaatcaattctttttttagtcttaataatttttatactttttcgtattatatatgcattccagtgttagtcttatattatatcttcaaatatcttcaattatgtttaaaataaaatatgtgttcgtattatctctcataat

SEQ ID NO: 10531 - DNA, 402 bp, Glycine max
  unsure at all n locations
aagctgcaccgatgaaacacagggaccaccgagggggttccaaggagccgcatgaaggcgtgttcgangtccttgcctctnggatcctcgtccagctcgtgcacggttgggttcacacccatgccgcagaagagcctctggatggcgtggcacatgcagcacgtgctcacgctgaatatcaccaccgcgctctccgacgccagcctttctatgcgctccagcgggtcccccactaccgccgccgccgcgttccgaggggccggcacgtagctcccccaccacgccgccgccgctgcttggtaatgcattctcagaagaattntatgtgatgaaagaatgacacgcaaaatgtatgataatgagagtgagaatgtagtgggtttggcttggtttgtttgtgtg

SEQ ID NO: 10532 - DNA, 488 bp, Glycine max
  unsure at all n locations
agcttaaatataattataacagagaagagagactgattatcaataactaacttaactaactaatcataatggactaattaagctaaactaactatggtaataattctaactaaaactggttgtaatactccccctcaagttaggtacatagatgtctagaaggcctaacttggacaaaaaaaagagaatttacagtgaggcaataccttagtgaagatgtagcaagttgttgatgagtagataagtgtaccagcttgataaaaccagagtgcacatattgccttatgaaatgacaattagtatctatgtgcttagacctatcatttgaagttggattntcagtcaatgcaatagctgatttaaattntatcanaaataaaattaaaataaanatgtatttaagccttacaatttccaacaagttttgaactaaatatganagctatcctanattcattacttcctatattctattataagtgtcatat

SEQ ID NO: 10533 - DNA, 203 bp, Glycine max
  unsure at all n locations
agcttatatatatcgatacgctcgaaattaaacatcgtanactctcacgaaattcaaatagtcataactnttcacacggatgtccgattcgggcgcataatatgtcgagaggctcgtaattaaacaacgcaagctcttgagagattagactggtataacttttcacaccgaagctctcgtgaaagtcaaatggacataacttt

SEQ ID NO: 10534 - DNA, 337 bp, Glycine max
  unsure at all n locations
tccatttcaacttggagcgtctcgatatattactggtgtcaactgtacatccgtgtataaagttatgggcgtctcaatntgctcagagcttctgttctaaaatttgagcgtctctaaatattacgggactcaataagacatctgagtaaaaagttattgtagtttgaatntgctacgagctctcgttttcaacttggagcgtctcgatatataacgggactcaatcggacatccgtgtataaagttattgtcgtttgaatatgctacgagcttcagttttcaatttggagagtctcgatatattactggactcaatcagacatccgagtaaaaagtt

SEQ ID NO: 10535 - DNA, 384 bp, Glycine max
  unsure at all n locations
agcttgtagcaatatcaaacgagaataactttatacacggatgtccgaatgagtctcgtaatatatcgatacgctccaaattgaanacataagcccgtagacaattcaaaggacaataactttttactcggatgtccgatagagtctcgtaatataatgggacctccaaattgaaaatggaagctcctatcaaattcaaacgacaataactntntgctcggatgtccgattgagtcccgtaatatatcgagatgctcgaaattgaggacacaagctctgaacaatattgaacgacaataaatttattctcggatgttctattgagtcccgtaatatatcgtgctactccagattgaaaatggaagctcgtaggaaattcaaacg

SEQ ID NO: 10536 - DNA, 429 bp, Glycine max
  unsure at all n locations
agcttgaagaaaagactatatgaggtatcttccttgtgtatagcaatatctctaagggctactgtgtctacaacttgcaagctaagaaactcgtcatcagtcgagatgttgaagttgatgagtacgcttcttggaattgggatgaagaaaaagtggagaagaacgttcttatacccgctcaactacctcaagaagaagctgaggaagaagacccaggtgaaccacacaacaaaaagatcaagatctatcatcaccagagtctactccaagacgagtaagatctttggtgaacatatatgaaacttgtaacttggccatacttgaacctggaagctntgaagaagcgtcacagcatgaagtatgggtcaaggcaatggaagaagagatatagatgatcgagaacaacaacacatgggagttagtaaatcg

SEQ ID NO: 10537 - DNA, 444 bp, Glycine max
  unsure at all n locations
tactcagcttcacttntcgttgataaccttgatgactcatatgcattcaatctcatttcctccagctccaagagttgtaactntctttnttcccctgatatagcctcatcaaaattcagaaatttcaaagcccggtatgccttaagctctatttccaccggtaagtggcaggcttttccataaacaatttggaacagagacaggcctataggggtcttgaagacagttctgtaggcccatagtgcatcatccagtttgcttgaccagtccttccaagtggaagccacagttttctccaatattttcttcaattccctggtggaaacttcagctnnggccatttttttgtgggtgataaggtgaggccactntgtgtgtggcatgatagtggcctagcacctttngcagttatgctgggcaaaaataagaagccgcatcacttat

SEQ ID NO: 10538 - DNA, 397 bp, Glycine max
  unsure at all n locations
gaagaatagctctcanacttgtctccttgcaaaggaacttcctgttgggggtgatcaanggcataagaaaatcccttgggtcaaatgggaagtaatatgtctccctaaggaggatgggggtcttggggtcaaagatatctccaaattcaatacagctttgatgggtagatgggtatgggctctatcttctaatcataatcagctgtgggccaaaattttattgtcaaaatacgggggatggtctgatcttagtagtgggagggataaatcttggcattctcaatggtggagggaccttcgaaagatatatcaacaacctgagctcagtattattcaccagcaaatggtatggaaggtgggaggaggggaaaaaataaattctggacagatattggtt

SEQ ID NO: 10539 - DNA, 393 bp, Glycine max
tgacttgcccaatcttaagagagaattttttcaacaaggcgtaaagtttttgatgatacatgctctctcattgtagatagtggttcatgttgcaattgttgcagcacaagattagtctctaagttgagccttgctatcactccccatccaaagccttacaaacttcaatggctcgatgagcaaggtgagaggataatcaatcaacaagtgaaagtgcccttctccattggaagatataaggatgaagtgatttgcgatgtagttcctatggaggcaggacaccttctcttatgtaggccatgtcaatatgatatgaatatcatctataatggccgaaatatgagataccctcagcccctggaataaagttgtgtacatcctaacacttcacag

SEQ ID NO: 10540 - DNA, 278 bp, Glycine max
  unsure at all n locations
ctggaactatcttacatggacttgatggtgtctatgcaagtngaaagcctnggacgaaagaagtatgcctatgtgggtgtggatgatttctccagatttacctgngtcaactttatcagagagaaatcatacacctctgcaactgtcaagcactttcacatctttggaagtccatgttacattctggcngatagagagcaaatgagaaagatggatcccaagaacgatgcacgaatattcctgcgatactctacaaacagcagagcatatagagtatt

SEQ ID NO: 10541 - DNA, 399 bp, Glycine max
  unsure at all n locations
gcttgaacacanaattggagatgaaagatctatggtcatctaggaggatactcgggattgatattcatagggataaagcaaagggtgaactattcttgtcccaaagcaattacctcaaaaaagtggtggagaggtttaggatgcatcaaagcaaacctattagcacaccacttggtcatcatacaaagctatctgttattcaagcactagaaatagctgaagagaggtctaaaatgaatcacacaccctatgccagtggtgttggaagcataatgtatggaatggtttgcagcagacctgacttatctcatgctgtaagtattataagtagattcatgggagatcctggcagcgcacactaagaagctgtgaagtggacactaaggtatctaaatggat

SEQ ID NO: 10542 - DNA, 363 bp, Glycine max
  unsure at all n locations
tctngacaatgtgtcttgcatactngctntgagagaggaatatggtgtctttcatctgcttcactaggagtcccagaaaataagtcagctctccaacaagactcatctcaaattcagattgcatctgttggacaaaatgtcgaagcatctcattcgacatccctccaaacacaatgtcatcaacatatatctgtgctatcatcaagttttcagcatcttgcttgacaaagagagtcttgtcaattcctcccttcctatacccttgctgagtaaggaactctgttagcctttcataccaagctcttggagcttgcttcaatccatagagagccttcttgagcctgtatacatgatctggatgag

SEQ ID NO: 10543 - DNA, 398 bp, Glycine max
agcttaccttgtgtgtcaaggtggtttggaggttatgttcattgttttatggaacgcaatgatctctgggtttgctagacatgctcgtgcaccataggctatgatcttatttgagaaaatgcagcaaagaggctgttttcctgatgatgtaacatatgtgtgtgtactaaatgcatgtagtcatatgggtttgcatgaagaaggacagaaatattttgatctcatggtcagacagcacaatctttcaccgagtgtccttcactactcatgtatgattgatattcttggtcgagcacgacttgttcacaaggcttatgacttgatagaaagaatgccatttaatgcaactagttctatgtggcgttcacttctaggctcttgtaaaacttatggcaata

SEQ ID NO: 10544 - DNA, 487 bp, Glycine max
  unsure at all n locations
cgtacttgtacttgctatnggcagaatacatgcattacttcttcctttccaactcatcaacgtgagtgggcattntattctttttctataattacggggttaataagatgaaacaatagggtgatgaaacgaatagggtgtcctctcactgcttgaagcatccaatttttatttttatttttatggtagaacatattatcatatcttggaagcatcagctgtgactcggctaaaagctaccgcggtctttgagccagatgggcgccccaaatgcttgccgatgaactcaccggctaacatgagctttccgagatcaacgtnggttttcaccccaagtccattcagcatgtacacaacatcttctgtagctacatttcctgaagctcccttggcataaggacagccacctagaccagcaactgaagaatcaactgcactgatccccatctgtttagaaaagaaatcaataacgtccattaataacact

SEQ ID NO: 10545 - DNA, 464 bp, Glycine max
  unsure at all n locations
agcttaacatcagaccacttccagggtgctggaactacttcacatggacttgatggggcctatgcaagttgaaagccttggaggaaagaggtatgcctatgttgctgtggatgatttctccagatttacctgcgtcaactttatcagagagaaatcagacacctttgaatattcaaagagttgagtctaagacttcaaagagaagaagactgtgtcatcaagagaaatacgagtgaccatggcagagagtttgaaaacagcaagtttactgaattctgcacatctgaaggcattactcatgagttctctgcagccatcacaccacaacanaatggcatagttgaaaggaaaaataggactttgcaagaagctgctagggtcatgcttcatgccaaagaacttccctataatctctgggctgaagccatgaacacagcatgctatatccacaacagagtcacact

SEQ ID NO: 10546 - DNA, 407 bp, Glycine max
  unsure at all n locations
ctcgagatattcaaatggtcataactnttcacttgcatgtntgattctcgcgcatcgtgtatcgagacgctagaaatagaacaacggaagctctcgagaaattcaaatggttataacttttcactcgcatgtccgattcaagcgtatacaatattgagacgctcgaaattgaacaacgaaagctctcgagaaatctaaatggtcataacctttcactcggatttccgattcaggtgcataacatatcgagacgctaaaaattgaacaacggaagctctcgagatattcaaatggtcataactttttactcggatgtccgattcaggcgcacagcgtatcgagacgctagaaattaaacaatggaagctctcgaganatgcaaatggtcataacctttcactcgcatg

SEQ ID NO: 10547 - DNA, 369 bp, Glycine max
  unsure at all n locations
ctcaagagccaagagagaccagtctatggttgaaggcatgatattgttagacaagttgaagaattgtgtttggtaccagatgttgtcatccctccgaaattcaaggtaccatattttgatagatacaaggggactacttgccccaaaaatcacttgaaaatgtattgccggaaaatggggatgtattctagggacaagaagctattgatgcatttcttccaatatagtttggccagagcagtggtcatctggtataccaatctggaagcttctcgcatccactcatggaaagatntgattactgctttcattaggcagtactaatataacactgacatggctcccgatagaacccagctatagaatatg

SEQ ID NO: 10548 - DNA, 468 bp, Glycine max
  unsure at all n locations
taagcttaacatcagaccacttacagggtgctggaacttcttacatggacttgatggngcctatgcaagttgaaagccttggaggaaagaggtatgcctatgttgttgtggatgatttctccagatttacctgngtcaactttatcagagagaaatcagacacctttgaagtattcaaagagttgagtctaagacttcaaagagaaaaagactgtgtcatcaagagaattangagtgaccatggcagagagtttgaaaacggcaagtttactgaattctgcacatctgaaggcatcactcatgagttctctgcagccatcacaccacaacaaaatggcatagttgaaaggaaaaacaggactttgcaagaagctgccagggtcatgcttcatgccaaagaacttccctataatctctgggctgaagccatgaacacagcatgctatattcacaacagagtcacactta

SEQ ID NO: 10549 - DNA, 341 bp, Glycine max
  unsure at all n locations
ctgagcanatacaaacgacgcataacttttactctgatgtctaattgaggcgcgtaatatatcgagacgctcgacaatgaatgttgaagctctgagccaatacaaacgacaatcactttntactcggatgtctgattgagtcccgtaacatatcgagacgctcgaaattgaatgttgaagctctgagccaattcatacgacaatatacttttactcggatgtctgattgagtcccgtaacatatcgagacgctcgaaattgaatgttgaatctctgagccaactcaaacgaccataacttttttctcggatgtctgatngagtcccgtaacatatcgagac

SEQ ID NO: 10550 - DNA, 415 bp, Glycine max
  unsure at all n locations
actaagctcgaaggtaactagatgcctggtaacctggtaacccaactggccatgaatcanaaatctgcacctgtcgccagactctgtagtttatgctcctctaccgaccaccacacagaaccttgcccttttgtgcaacaatctgaagcaattgaacagcctaaagcttatgctgcaaacatctacaatagacctcctcaacctcagcagcaaaatcagccacaacagaacaattatgacctctcccgcaacaggtacaatcccaggtggaggaggaatcatcccagccttagatggtcgaatccttcacaacaacagcaataacaacaacagccttattttcagaatgctactggcccaagcagaccatacgttccttcaccaatccagcaacaacaacaacagcaacaaccct

SEQ ID NO: 10551 - DNA, 396 bp, Glycine max
agcttgttcttaatgagggtgattaggattgactccatcttatgaaggatagattccctactaaaaggaaatccaagcttatccctagaggggatggaccttttcaggttttggagaggatcaataacaatgcctataggttggatctcccagaagagtatggagtcagcaccacttttaacatttctgatttaattccttttgaatgtggagctgatattgaggaggaggaactaacagatttgaggtcatatcctcttcaagggggaggggatgatgatatcctccctaggaagggatcagtcactagagccttgagaaagaggctccaagaggattgggctagagctgctgaagaaggccctatggttctcatgaacctcaatgtatatttat

SEQ ID NO: 10552 - DNA, 392 bp, Glycine max
  unsure at all n locations
taacactgtatatngatttctttagttggcatactatgtgttcctttccctcaactgagaaccccattggttggtccatacaaacattctcctctaaatctccattaagaaaggcgattttcacatccatctgatgtagctctaagtcataatgggccactaatgccatgattatccngaaagaatnctttcgtgagaccgatgaaaacatctctntataatcaatgtcatctntttgagtaaatcccttagcaacaaatctagcctttgtacattcaaggtgccatgagagtcacggttggtcttgaagacccacttacaaccaactcttctacaatcctttggtaattctacaanggtccaaacaccattatgttccatggaatttatct

SEQ ID NO: 10553 - DNA, 264 bp, Glycine max
  unsure at all n locations
tgaaattcatcaaagcctcttggagctcactgaacgaagatgtcgaaagatttcttangaagcttcatgttaatggagtgttccctagaggtcgcaatgcatcaatcatcaccttgatacctaagattgaggatccacaaaatctgggggatcttaggtccatttcactggtaggatgtatgtataaaatccttgctaaattcttgcatgaatactaaaatgtgctttggtagtgtgattgacaaaaagcaaatcgccttcttg

SEQ ID NO: 10554 - DNA, 448 bp, Glycine max
  unsure at all n locations
tcagatgggacaattagctactcaatngaatcaacaacagtcccagaattctgacaagctgccttctcaagctgtccaaaacctcaaaaatgtcagtgccatttcattgaggtcgggaaagcagtgtcaaggacctcaacccgtagcaccttcctcatctgcaaatgaacctgccaaacttcactctattccagaaaaaggtgatgacaaaaatctacctaacaatttctgtgcaggtgaatcttcttccacaggtaattctgatttgcagaagcagcacattccccctcttccattccctccaagagcagtttccaacaaataaatggaagaggcagagaaagagatcttggaaacgtctagaatagtagagggtaacatacctctgttggatgcaataaagcaaattccaagatatgccaaattcttgaaggagctgtgcactaat

SEQ ID NO: 10555 - DNA, 439 bp, Glycine max
  unsure at all n locations
agcttctggaaagaactatttggaatgtagatttacattctatattaggtgcagaaagcaaatatagaggtgcaagaagcaattgcctgcataaaaacattatgtgtagcccactataccactctattcagcctatctaaggagagttatcccctggggaatactattcacccctacactaattgttgttgacccccaacatcattgggaaattacccttctaccccccaacttcaaaattccttatccctccctcttccctcttccttccccttcctagcacctctttccccttctccttctccatctttgtcccaaaccgacgcctcttacccttctctttctccttctcgtatcgatgccccttccttntttccttctccttctttctttctcctccccaacccaacctaaacgaacccttttccttcttctcttc

SEQ ID NO: 10556 - DNA, 502 bp, Glycine max
  unsure at all n locations
gtcacctgcggcatgcaagcttccaagagtngaagaggcggttgacaacagctccagtgttaattntgcccgaccctaagagaccatttgaagtgtattgcgatgcaagcgggcaaggcttgtggtgtgtgttaatgcaagagggaagagtagtggcttatgcttcacgccaattgcgtcctcatgaagttaactatccgacccatgatttggaactagcagctgtggtctttgccttgaagatttggaggcattatttatacggtactcgtnnttgaagttttagtgatcacaagagtctcaaatacttgttcgataagaaggaactcaacatgaggcaacgaagatggatggagttcatcaaggattatgattgtggtctttcctaccatccaggaaaggctaatgttgtagccgacgcgctaagccggaagtccttacatgtngcgaactatgatgagttggagcagagattgatagaggaatttcgagatctgaatct

SEQ ID NO: 10557 - DNA, 390 bp, Glycine max
  unsure at all n locations
taatcaagataagtatgataagggtttctcaaatattgaatagcacatgattnttctcaaaatatgtttaccaaagagtttttactctctggtaatcgattaccatattgttgtaatcgattaccagtagcaaaatggatttgaaaaagttgtcaaattgaatttacaacgttccaattattttcaaaaagctgtaatcgattacacatatttggtaatcgattactagtgcctttgaacattgaaattcaaattcaaatgtgaagagtcacatcttttcacataaaagctttgtgtaatcgaatacactgatttcgtaatcgattaccagtgactgtttctgaataaatcaaaagatgtaactcttcaaaagggttttgaacttttcaa

SEQ ID NO: 10558 - DNA, 475 bp, Glycine max
  unsure at all n locations
tatcgtcttatatggacgtatcatctaaaacacagacgctcatatacagatcatattctgataatacatatatagatacaacttttatcatttgtatttgtttgcatctaatacaaataattaggagtcattatttctctttaagacataaatgtattttgagttaacatttaccatttnttataagagaaaaatttaaaaattatcatccacaaatttaagataataagttattaacaataaatttaaaaatattaaatatattattntatgtcatttgaacaaaacacttcaagaactaaagcaaaattataaatatgataaaatgtgtctaaaataaactaacanaaaccaaaatatagaatttataagaactattaaaagtaataatttataagaccaaaatanaaacaataaatacaggttaaaatgttattaaactttatatattgcatgcatttaataagagaaaaaa

SEQ ID NO: 10559 - DNA, 458 bp, Glycine max
  unsure at all n locations
tcaagaaaatgatggcctcagcanattccttatttctggaagcatatccatagaanaacctagagatagatggtctgaagaggatagaaaacgagtacaatacaacttaaaagacaaaaacataataacatctgccctatgaatggatgaatatttcagggtttcaaattgtaagagtgctaaagaaatgtgggacactcttcgattaacacatgaaggaactacagatgttaaagatctatgataaatgcactaactcatgagtatgaattatntagaatgaatgcaaatgaaaatattcagagtatgcaaaagagatttacacatatagtaaatcatctagcagccttaggcaaagaatttcaaaatgaggatcttataaacaaggtgttaagatgtttaagtagagaatggcacccaaagtaactgctattctgaatcaagagattgtctacatg

SEQ ID NO: 10560 - DNA, 388 bp, Glycine max
agcttcgagctcagcaggagctacttggaattctctgtatttgaccaattcctgaaaccgatcaacaatgaagagttcattatcatcatcaatgaaaccaatatctcctgtgtgtaaccatacttctctgcctatagtactctctgtagcctctgcgtcatttagatatactgaccaaccagaaattgaacatatcaagaaactgtgatggtgtttgtttgtaacatattacctttgacaagacttacgctaattaaaattatgcttgcggagtcttacatttattcttgtataatcaattacacattctataacccattaataggcaggtgctcgctgatcagctacttcataaactgtctattttcatgctataatgatgtgactc

SEQ ID NO: 10561 - DNA, 417 bp, Glycine max
  unsure at all n locations
tataagaattccaaattctacaaggagaagaccaagaagttccatgatagtttgatagctaagaaggacttcgtggttggacaaaaagttttattgtacaactctatgctcgaactcatgagtggtaagttgaggtcaaagtggattggtccttttgtggtaactaatgtttttacttatggtacagntgagatcaaaagtgaatccacagataagggcttcaaggtcaatggacaccggctaagactattcctcacaaatccttccttatatgatgtangtggggaggagacctccttacttcaccctacttctctgtcgccatgacttnacggagtttctttntctgtctccttctttactattattgcactcgtccaaatttattgattgttttgaatggtcttaatcttatga

SEQ ID NO: 10562 - DNA, 419 bp, Glycine max
ctctatgtgtccttaatggaggaatctaatcactattagaaaatactctttcagcatcggttatttagaacattctacatcggttctaaaaccgactttgaaagtgccgatgttgaatgtatcaatgttaatatcggttttgtaaaactgatgttaacatatatatgacaacatcggttctctgaatacccgatgttaaacacaatgaacaaaaaaaaaaaaagtgtacgcatgatgaacgttgacatcggttttgcagtacaaccgatgttaatatgttatattaacatcggttgtttagaaaaaccgatgttaatgtaatatatcaagatcgggtctctacgataaccgatggtaatatattccattaacatcagttattcttaaaaaccgatgacaacggttatgatgcatacact

SEQ ID NO: 10563 - DNA, 466 bp, Glycine max
  unsure at all n locations
agcttaagctccttcaactgcacaaggctcttaatanttgaagagtatccttgtggaacctttactcgacgaagacactgacaaaaacttatcttctccttcttggacaaagtatggcaggttgggggcaagtaaattttcttcccatcagaccttggatgcaactgtgatcgtatacccatatcagctagatcttgacgggtattcaagccatccttcgtcttgccttgaatgttaaggagcgtcctaatcacactgtcacaaacatttttctccacatgcataacatcaatacaatgtctaatgtcaagatcacaccagtatggaagatcaaagaaaatggacctcttcttccatatgcaactctgactnttatccttctcttgggtcttcctaaatacagtattcaggtgctgaacctgctgatatacctactcactagtcaacggtatcggtgaatatcatg

SEQ ID NO: 10564 - DNA, 417 bp, Glycine max
  unsure at all n locations
tcaagaattatggcctcatcaaactacttgtttcccgaggaaattctataaatagacctcccatctntaatggagtgggttaccactattggaaaaattggaaaacccgcatgcaaatatttatagaggcaatagatttaaatatctgggaagccatagaacaaggaccttatgttccctctatagtggccggttgtgcaacaatagaaaaacctagagcagattggattgaggaagaaagaagattagtacaatataatttaaaggccataaatattattacatctgccctaggaatagatgaatactttagggtttcaaattgtaaaagtgctaaggatatgtgggataccctacaagtaacacatgaaggcacaacanatgttaaaagatctaggataaacacattaactcgtg

SEQ ID NO: 10565 - DNA, 307 bp, Glycine max
acagtgacaacgattgggctagagataaatatgatcggtaaagtaccaatggatttgtgtttttcataaggaacacaacgttcacttggatgtcaaaaaagtttccaatagtcactctttcgacttgtgaagcagaaaacataacagctgcttcatgtgttttccatgtagattggctcacgaatatgttaaaagagttgggcatgtcacaagaagagacaaccaagatttttgtggataataagtcaaccattgctctagcaaagaatccagtgttccatgatcgaagcaaacatattgatacatg

SEQ ID NO: 10566 - DNA, 295 bp, Glycine max
  unsure at all n locations
aagaaagcactttatgggttaaaaaaagcacctatggtttggtatgaaagattaagtaaattcctattagtaaaaaaattcactcgagggaaggtagatatcaccttattcataaagaagaaggataatgatatcttatcggtacaaatttatgttgatgatataatctttggatctactaatgaatctatgtgcaaggagttttctattgacatgcaaagttagtttgagatgtccatgatgggtgaagttaaatactttcttggactacanatcannacaacaaatgatggga

SEQ ID NO: 10567 - DNA, 438 bp, Glycine max
agctatatcaggaagttgatggaattctttgatgacatatcttttcatcacattctaagagaggaaaatcagatggctgacgcccttgccactctagcgtccatgttcaaagtaagcccgcacggagatttgtcgtacatcaaatttagatgccgtagtgagcctgcacattgcaatttgatagaagaagaggaggatggtaagccttggaacttcgatatcaaacgatacatcgaagacaaggaatacccgcttgaggcctctgacaacgacaaaaggacattacgaaggttggcggccggtttcctccttagtggaaatatcttgtacaagagaaaccatgacatggtgttgcttcggtgtgtcgatgtaagagaggccgaacaaatgctaatagaggtgcacgaaggggtcctttgtatgcatgccaatggacat

SEQ ID NO: 10568 - DNA, 380 bp, Glycine max
  unsure at all n locations
agcttgccaccatggagttntccgactatgctcttgtgtggtggaacaagctacaaaaggagagagcaagaaatgaagagccaatggttgatacatgggtggagatgaaaaggatcatgacaaagcggtatgtgccggctagttactcaagggatttgaaattcaagcgccaaaaactaacccaaggcaacaagggggttgaggagtatttcaaggaaatggtgtgctcatgattcaagcaaagattgaagaagatgaggaggtaactatggctcgatttcttaatggtttgactaatgatatccgtgatattgttgagctgcaggagtttgttgaaatggatgaattgcttcacaaagcaatccaagtagagcaacaat

SEQ ID NO: 10569 - DNA, 334 bp, Glycine max
  unsure at all n locations
gtaagccaattcatacgacaataactttntactcggatgtctgattgagtcccgtaatataacgaaacgctcgaaattcaatgtttaagctttgagccaattctaacgataataacttattactcggatgtccgattgagtctcgtaatatatcgacacgctcgaaattgaatgttgaagctctgagcctattcaaacaacaataacgttttactcggatgtccgattcagtgacgtaatatatcgggacgctcggaattgaatgttgaacctctgagccaactcacacgacaataacattttactcggatgtctgnatgagtcccgaaatata

SEQ ID NO: 10570 - DNA, 424 bp, Glycine max
  unsure at all n locations
agcttaaacattcaatttcgagcttctcgttatattacgggacacaatcagacatccgagtaaaaagttattgtcgtttgaattggctcgtaggttcaatattcaatttcaagcgtctcgatatattaccggactcaatcagacatctaagtaaaaagttattatcgtttgaattggctcataggttcaacattcaacttcgagcgtctcgatatattacgggactcaatcagacatccgagtaaaaagttattgccgtttgaattggctcatagggttcaacattcaattcgagcgtctcgatatattacaggactcaatcagacatccgagtaaaaagttattgtcgtttgagttggctcagaggttcaacattcaanttcgagcctcccgatatattacggcactgaatcggacatccgag

SEQ ID NO: 10571 - DNA, 386 bp, Glycine max
  unsure at all n locations
agcttcaaccaaggggagatggaccatttttagtgcttgaaagaatcaatgacaatgcttacaaagttgagctgcccggtgagtataatgttaattccaccttcaatgtctctgatttatctctttttgatgcagatggagaatccgattngaggacaaatccttctcaagagggagagaatgatgaggacatgttcaagagcaagggcaaggatccacttgaaggacttggaggacctatgacaagggctagagcaaggaaagccaaggaagctcttcaacaagtgctgtccatactatttgaatacaagcccaagtttcaaggagaaaagtccaaggctgtgagttgtatcatggcccanatggaggaggactaaatgacacca

SEQ ID NO: 10572 - DNA, 415 bp, Glycine max
  unsure at all n locations
tcccaagttnttaagttcttcctcanaactgtcctaagcaaagttcccaaagtcctattaacaacttccgtttgcccatcggtttgtgggtacaagtggttgaaaataacaatgtagtgcccaacttgctccacaaagtcctccaaaaatggcttaggaacttagagtccctatcactaacaatgctccttggcaaaccatggagtctcacaatctccttgaaaaacaaatcagccacatgggaagcatcatcaatttttttacatggaataaaatgagccattttagaaaacctatcaacaaccacaaaaatggaatctctaccattgcttggttttggcagccccaaaacaaaatccatggataaatcaatccaaggatactccgaaattggcaatggagtatacaatccatg

SEQ ID NO: 10573 - DNA, 447 bp, Glycine max
tgtagcatattcaaacgaccataacttttaactcggatgtctgattgaggcccgtaatatatcgagacactcgagattgacaacacaagctctgaggaaatgcaaacgactataactttttactcggatgtctgattgtgtcccgtagtatatcgtgacgctcgaaattgaaaacataaggtctgagcaaattcaaacgacaataactttttactcagatgtccgattgagtcccgtaatatatcgagatgcttcaaattgaaaatagtagctcctagcaaattcaaaacataataaatttttactcggatgtccgattgagtcccgtagtgtatcgagacactcgaaatcgaaaacagaagctctgagcaaattcaaacgacattaacttttttctcggatgtacgattgtgtcacttagtatatctagacgctcgcaactgaaaa

SEQ ID NO: 10574 - DNA, 404 bp, Glycine max
  unsure at all n locations
cgacctgtcggcatgcaagctttcattttcattataagcgtctctatatattacgggactcaatcggacattcgagaaaaatgttattatcgttagaatntgctcagagcttccgttttcaattacgagtgtctcgatatattatgggatttattcggacatccgagtaaaaagttattgtcgtttgattttggtcagagcttctgttctgaattttgagcgtgttgatatactatggatcacaatcggacattcgaataaaaagttatcatcgntctaatttgcttagagcttttgtgatgtgaacctgaggagaagcagatcgtttgatacatgctacggaggttttggtgatgccacttccaaagagggaagaatagtcagggtagacgccactttcaatg

SEQ ID NO: 10575 - DNA, 363 bp, Glycine max
  unsure at all n locations
agcttctatactntgtacaagaatgaagctctgataccacttgttagacaagtggcctcagatatcttaagaagggggggttgaattaagatattccaaacttttctcctaattaaaaatctatcttactttntacttaagttatgaattcccttaatgacaatcttcttaaatattaattcaaatgaagcaacttgaattatgaatataaagcaataataaataaaggagattaagggaagagaaaatgcaaactcagttttatactggttcggccacacccttgtgcctacgtccagtccccaagcaacccgcttgagagttccactaacttgtaaattccttttacaagttctaaacaca

SEQ ID NO: 10576 - DNA, 361 bp, Glycine max
tgtaatcgattacatcatttgtgtaatcgattactagtcacaaaaatttttatctcaagtttgaagagtcacaactcttcagaaactaactgtgtaatcgattaccacatctatgtaatcgattactattaagaaattttctaagataactctcaagagtcacaactgttcaagaagttgttgaatgaccattatagacctattactaggtgacttgggatacgaaagtccttagagtttttctgaataacattgacttatcctctcaaaaccaaattgtcttatcactctcacaatattccttgacccaaacacgtacgaattcgataacgaatctcgatcgatcttcatttgtatgtca

SEQ ID NO: 10577 - DNA, 341 bp, Glycine max
taataaatctatatatggtgtatagcaagcttcccgttagtggtaccttaagtgtcatgggataatttcttcatttggctctgatgataaccccatggatcaatgcatataccacaaggtcagtgggagtaaaatatgttttcttgttttatatgtagatgatattttacttgcagccaacgatcggagtttgctacatgaggtgaaacaatatttctctaagaattttgacatgaaggatatgggtgatgcatcttatgtcatcggcattaagattcatagagatagatctcgaggtattttgggtctatcataggaaacatatattaacaaaattctag

SEQ ID NO: 10578 - DNA, 322 bp, Glycine max
  unsure at all n locations
tctgataaggtaaagatgattaggtaaaagttgaaggtatcacaagatagacataaaagttactatgataaaaggagaaaactcgaatttcaagaagaagatgtgtttttgaaagttacattgataactgggttgcgggaacccttaagttccgaaaactctctcctaaattcattggtccctaccaaattcttaaaagagttgattccattgcatatcaaattgttntacctccaaatcttcacaatgtgttccacggttctcaacttttgaaatatgtntttgattcttcccgtgcgattgaacctgatgtagtacaatt

SEQ ID NO: 10579 - DNA, 142 bp, Glycine max
  unsure at all n locations
tctcgatatattatgcgcctgaatctganccccaattgaaaagttatgaccatttgaattgctcgtgagcttccgttgttcaatttcgagcgtctcgatatattatgcgcatgaatcggacctncaagtgaaagttatgacc

SEQ ID NO: 10580 - DNA, 361 bp, Glycine max
tgaatccgcggccacctcatggacttctctaacaacaataacatcatttactgcactgaattgttgggagttggaagccatcttcataatcaaattcctagcttcagcaacggttatatcaccaagagctccaccactggtagcatcaatcatactcctatccatgttgctaagtacctcatagaaatatcgaaaaacgagttgctcagaaatctggtgcgggggatagcttgcacacaatttcttgaatctttcccagtactcatacaagctttctccactaagttgcctgatgcttgaaatgtcatttctgatggcagtggtcctagatgcacggaagaatatctccaagaacaccctc

SEQ ID NO: 10581 - DNA, 449 bp, Glycine max
  unsure at all n locations
cgtgacactatattgtactcattctagtcacanaaggaaacaagttaaaaattattttcaaagtaaaaacgttgtttctacttcaaaactctttgaactacttcacatagacttatttggtccttccagaactatgagtttgggtggtaattactatggcttagtaattatagatgattattcaagactttgcttttgaaaaccaaaaatgaagcttttgatgcttttcgcaaacttgccaaggttattcaaaatgaaaaaggtcttaacattgtttcaattagaagtgatcatggagatgaatttcaaaatgagtcttttgaaaagttttatgaagaaaatggaattcaacacaattttttttccccaagaacacctcaacaaaatggtgttgtggagaggaaaaatagatcccttgaagaaggagttagaactcttctaaatgaaac

SEQ ID NO: 10582 - DNA, 381 bp, Glycine max
  unsure at all n locations
gcttgtgcatncatacctngatgaggatgtcccatatgttcttaaaactggactgattcatttgcttccaaagtctcatggccttgcaggtgaagacccgcacaaacatttgaaagaatttcacattgtctgctccaccatgaaagccccagatgtccaagaggatcacatatttctgaaggctnttcctcattcattatagggagtggcaaaggactggctgtattaccttgctccaaggtccatcacgagctgggatgaccttaagagagtattcttagaanaaattttccctgcttccaggaccacaaccatcaggaaggatatctcaggtattagacaactcagtggagagagcctgtatgagtactgggagagatt

SEQ ID NO: 10583 - DNA, 422 bp, Glycine max
  unsure at all n locations
ttcaaaagttttaagcattggatgattcttataaagaattagacggtnaagtgtcttaagtttaactatagcttggaattctgttctactgaattcaatgaattctatggagatgaaggcatagcgagacaacataatgtatgctatactccacaacaaaatggagaatatgaaggaatgaataagaccttgttggaaaggatgagatgcatgctatctaattcatgattgaatataagtttctaagttgaggcaatcaacacaacatgctatctcgtgaattggcaaccaacactaccacaaacttcaacacccctattgaggtatggtttagaaaattggttgaatactcaatgttgagggaactgattggacgagtcaaaaccattcgaagtagcctaaaaccacaacacccagaaagt

SEQ ID NO: 10584 - DNA, 401 bp, Glycine max
  unsure at all n locations
agcttctatactttatacaagaataaagctctggtaccgcttgttaaacaagtggcctcaattatcttaagaaagggggttgaattaaaatacaaaaactatccccttaattaaaaatttaacttttttatattaaaaatgcaacccttattatgagttactctaagaacaattcanaacaaacttctttaaagcgaaatataaacaataataaataaaagaagtttaagggaagagagaatacaaactcaatttttatactggttcagtcacgccctatgcctacgtccagtccccaagcaacatgcttgagatttccactatcttgtataaagccttttacaaagtttgaaccacacagtagcaacccttcccttgtgttcaaataaccttacaactta

SEQ ID NO: 10585 - DNA, 384 bp, Glycine max
  unsure at all n locations
tcttcaactcaccaatgtcatctggtaatctggacagacttacacaatctgagatgtcaagacagcttagcttgttaagccctttaacagaatctggcatctctaccaaatcagagcaagaacatagccttagcacttccaaattctccagcttcgcaatatcttgtggcaatgcagatagcctgtgacagttagtgatactaagcttcttcaatggggtgatgttactcagcccatcgggcaatttaaccagatcattacaatagtcaatgctcatctccacaagatttggcattgcatctgagatttggatagaacagntttcaaaagcctgcctcgtattacacatatgaagggacaattttcgcagattcttcaatatgc

SEQ ID NO: 10586 - DNA, 455 bp, Glycine max
tcgtacccgggttcctctcagtcacctgcggcatgcaagcttgataccttgcacacaagcaaacactaagcataatatctggttgacttgcagttaagtaaagaagtgaaccaatcatacctctatactttgactcatccattgatttaccgttttcatctaagtcaagataagtcgatgttgtcattggtgttgatgcttctttgcactttttcatgttgaatttcttaattagttatgtacaatattttgtttgacataggaaggttccatgtttcatttgcttgacttgaagtccaaggaagaagttcaattctcccatcatagacatctcaaattctttctgcattagtactggaaaattccatacacgaagtttcattagtagcaccaaagattatatcatcaacatacatttgcacaatgaacaactcatttgttaatctcttgataac

SEQ ID NO: 10587 - DNA, 379 bp, Glycine max
  unsure at all n locations
tgtgcattcaatatcctgataagggtgttccatatgttctcaagactggactaatacattngctgcccaagtttcatggtcttgcaggtgaagatcctcataagcatcttaaggagttccatattgtttgttccaccatgaagccgccggatgtccaagaatatcatatctttctaaaggctcttcctcattctctggagggagtggcaaaagattggctatactaccttgcccccaagtctattttcagttgggatgaccttaagagggtgttcttggagaaattattccctgcatctatgaccactgccatcagagaagacatttaggcatcangcaacttactggagaaaccatgtatgagtactgtgaaagattc

SEQ ID NO: 10588 - DNA, 326 bp, Glycine max
  unsure at all n locations
gcttgtgaccatttgaataactcaagagcttccattgttcaattntgagcgtcttgatatattatgcgccttaatcggacctgcgagtgaaaagttatgaccatttgaataactcaagagcttccattgttcaatttcgagcgtctcgatatattatgtgcctgaatctgacctccgtgtgaaaagttatgaccatttgaatttctcgagagcttccgttgttcaatttcgagcgtctcgatatcttatgcgcctgaatcggacctctgagtgaaaagttatgaccatttgaattactcaagagcttccattgatcaattacgagc

SEQ ID NO: 10589 - DNA, 355 bp, Glycine max
  unsure at all n locations
atgaatggagggagagggagaggtagagaanaagcactaaatttatgcctcanataaggtctgaactntgaagtgtaattctcaaatgatcaaagttgaaaaaatatatacacatgacctttatttatagcctaagtgtcacaaaaaattaaagggaaatttgaacacttgaatttgaaattgaatttgtggagccaaaatttcacaaattgttgtgtatcctacatttaaagatgcctgttttgcattgggctttcttcaagatgataaggaatatgttgaagcaatttaagaagcaaaaaattggggtacaggtcattactttataaaactttttgctacaatgctaatcaca

SEQ ID NO: 10590 - DNA, 436 bp, Glycine max
tgatgatcgatacaacagtcaacagctgataaagagaaagcataatagcactgcaacgattcaacatgcattgaaaagacacaagtttattttccaccgacgctggtagtcttcgaacacattgacattttgttgcacgtaacataccatgacgagattgcaaagcaaggccatatatataataacttgcatgggttggaagggtatcacactctaattaagggcacttgcgtctgccaccgtgggtggtgagactggcataacagggacacacttcttggttaccggaagttcccggtggcacgcagttgcagcgtctgcagcaagttccacatgctctgtgacacatgcgttgacgagatgctaaacggcacctcgcagcacatgcagcattacaatctgaaatcaattcatcattcaagttagtaattagttc

SEQ ID NO: 10591 - DNA, 364 bp, Glycine max
ctttaacccgcttctaaatgatatgttcggaatgcagtttaagaagcaattatcaatttaataatgttctttaaacatgcaagacaaaatttattgcaataataaatgagataaggaaagagagaaatgccaacttgatttatactggttcgaccacttcccgtgcctacgtccagtccttaagcaacccacttgagatttttcactctctttgtaaaaatcctattacaaagtctgaaccacacagggacaatccttcccttgtgttcagcaattcttacaacttaagagaccctcggtcctttaatcaatctctttgaaaagatgaagaagacaaactctctctttatgagaaagatattac

SEQ ID NO: 10592 - DNA, 428 bp, Glycine max
  unsure at all n locations
atgtgaagctcctgttntagctntacccgattatactcatccatttgaagttgaatgtgatgctagtggagttggcattggggctgttttgatacaaaacaaaaggcctatagcttatttctcggagaaattgggaggagccagattgaactattgcacctatgacaaagagttctatgccattgtgagagctcttgatcattggaatcattatttgcgttctaatcactttatattgcattcagatcatgagtcattgaagtatatcaatgggcagcagaagttgagtccaaggcatgctaaatgggttgaatttcttcaatcttttaatttctcttcaaaatacaaggatggtaagagtaatgtggtggctgatgcactttcaaggaggtatgctntaatttcaattcttgaaactcgtttacttg

SEQ ID NO: 10593 - DNA, 417 bp, Glycine max
  unsure at all n locations
ttngaatcagtggaaagaggtatggacttgtcgtggtcatccactctaaatggatatgtgtcatgttcctagctcacaaggatgagtcttagtgcctcctttaaattttgtaaaagatttcaaaatgataaaggagtatgcattacttcaatcagaagagatcaagggggagaatttgagaatgaaaattttcaactgttctatgatgaaaatgttattcttaataatttttcaactcctagaacatcaatagaatgaaatagttgaaagaaaaaacatatctttgcaagagatggccaacatcatgctcaatgataatttaacccctaagcacttctaggctaaagcaatgaataccacaacanaatttatataagggtaatacttaaaaagactccatatgaattatggaatgga

SEQ ID NO: 10594 - DNA, 338 bp, Glycine max
  unsure at all n locations
ntgggctaattcaaacgacaattatcctttgctcggtatgtctgattgagtcccgtaatatattgagacgctcgaaattgaattctgaaccttagagctaatgcaaacgacaataactttttactcggatgtctgattgagtcccgtaatctattgagacgctcgaaattgaattctgaaccttagagctaattcaaacgacaataactttttactcggatgtctgattgaatcccgtgatacatcgagacgctccaaattgaatgttgaagctcttagcatattcaaacgacaataactttttactccgatgtctgattggagtccgaatacatcga

SEQ ID NO: 10595 - DNA, 371 bp, Glycine max
  unsure at all n locations
agctgcatgattacatctccctctttctcaagaaaattcttttaatatcatcaaaatcttcatgatttacaaccctggatggaggaatcaccctaatctcagatggtccagccctcagcaacaacaacagcagcccgctccttcctttcaaaatgctgctggcccaagcagaccatacatttctncaccagtccaacaacaacaacaaccccagaaacagccaacagttgaggcccctccacaaccttccctcgaagaacttgtgaagcaaatgactattccaaacatggcagttcaacaagagaccaaagctttcattcagagcttgacttatcaaatgggacaattagctacacaattgaatcaacaac

SEQ ID NO: 10596 - DNA, 433 bp, Glycine max
ctattcccaatggcaaatcacataacaaatttttaagatactcagcctcactagtagcagtatctaaagcaataatttctgtttccatggtagaacgtggaataatagtttgtttagtagatttccatgatactgcaccaccagctaaagtaaaaacataaccacttgtcgattttgtttcatcagaataaaaaatccaatttgcatcattaaacccctcaattactgtaggaaaacatgtataatgaatgccataattaatggttccttttaaaatactctttctaatgcaatccaatgagaatgattaggaatattattataccttcctaatctaccaactgcatatacaatgccaggcctagagaagtttgtcaaatgcaaaaaagaaccaataatttgagaatatttatatgaagaagttcctttactc

SEQ ID NO: 10597 - DNA, 402 bp, Glycine max
  unsure at all n locations
tgttgtatttgctaagttctatgtcacaacattnttaatgttccttgcttaataagcttcttatttttagactttgttgttttttttttattattagaagtaatctatgtgtcatattagatggtttagaactaagtttcagttgtttatataaataatgattgtttatgagtaaaaaatattttcttattattcaaagagataatttaagagttatttaaaattatatcattaaaataaaatatatgagttgtttaattataatgtgatattgtagtaaccaattaatatacgataaaaaaactcagaataaattacttaaattatacccaatggaaatgctattggtggtattgcaatgatctttttaatcaaaatagagtaattatacaaattatttat

SEQ ID NO: 10598 - DNA, 408 bp, Glycine max
gcttctgaatgctctttcaagtactttttaagccaatcaaacgaaacctgcgtgcaccacaaattagataacgatatcaatccatcagctaataattctaaagaggatatatattttttcttgtgatgactttgaagttctaactatatgtacacttacttgattttctgccaaccccatttgaataactcctgagggattggctaattcagcataggggttctcatcataggctttccacccaccaaaataacgggaatcttccccgtgagtttcataaactgcaacttttgaaagctccacacagggttgctccatctcaatacccatagctagctagcttcctggcaaaagagttgattactcaattacagaaagcagacagctgctgtgagtaacacaaagata

SEQ ID NO: 10599 - DNA, 339 bp, Glycine max
agcttcgcaaaatttatttttctggaagaccaattactaagtctctcctaactagatgattgagatgatgcatgtttatgtgtgctgtcctacgatgccacaaccaagaatcatttatcttacttaccaaacaactcagctcatgaaatgatgcatgctcaatgtttaacatatagatattacctattctcttgccaatatggacaacctcactagacgtagattcaccaataagataacaattcttattgaattcaattttgaagcctttgtcacatagttgactaatgctcaggaggttatgttgtagtccatccacatatagaacattctatatct

SEQ ID NO: 10600 - DNA, 339 bp, Glycine max
agcttacaaaaaaagtccctacaacaaagactactcaaaatgccctgaaatacaaggctaaaatcctatactactagaatggccaaaacacaaggcccaaaagaaggaaaaacctattctgatatttacaaaaaagagtggatccaaccttgacccatgggctcaaaaatctaccttaaggttcatgagaaccctagggcattctttagtagctctagcccaatcctcttggagtcttctatccaatacccttggggggtaggattgcatcacaatcctcatctcctcctttctcggattgagttattaattgctcaaaatcaacatccgggtcctcag

SEQ ID NO: 10601 - DNA, 338 bp, Glycine max
  unsure at all n locations
atatatcatcatgtttatatncttattattgtaagaatgaccataatatctgtatgtaaattaaactagttntctaggtttctaaccataatatatgtatttttcaaaacttccatttcaaagaaaataatatntattattntaagttcaaaactcagagaggaaaaaatgcatgcaaacaaattcaaataataagtattggctaaaatagttttattatgaaattaaattctntaaggataaataatttcatttttcggaatatttgatattttgaattttatttgatccttannagtaacattgtaacaataaaataatatctttcaaagtttatg

SEQ ID NO: 10602 - DNA, 326 bp, Glycine max
agctttccagcaactcctctttgcacaagccactcatgcgcgacaagactgtgctggtaaccggcggagccggttacatcggcacccacaccgttcttcagctcttgctcggaggttgcagaaccgtcgtcgtcgacaatctcgacaattcctccgaggtttctatccaccgagtcagggagcttgccggcgaatttgggaacaacctctcctttcacaaggtgctcctcctccttctattgcctgtttcattcaattttgatttgttcggtgcctttttctcgtaaacaaagattatttcgcttcgtggcttgtgtttttcggga

SEQ ID NO: 10603 - DNA, 320 bp, Glycine max
agcttaataaatctatatatgctttaaaccaaacctcctgccagtggtaccttaattttcatgggataatttcttcatttggttttgatgaaaaccccatggatcattgcatataccataaggtcaataggagtaaaatatgttttcttgttttatatgtagatgatattttacttgctgccaatgatcaaggtttgctatataaggtgaaacaatttctctctaaattttttgacatgaaggatatggatgatgcatcttatgtcattggcattaagattcgtaaagtgatagaccttaaggtattttatgtctatcac

SEQ ID NO: 10604 - DNA, 300 bp, Glycine max
  unsure at all n locations
tatgcaggttgaaagcctttgaggaaagaggtatgcctatgtgggtgtggatgatttctccagatntacctgngtcaactntatcagagagaaatcagacacctttgcaactgtcaagcacttncacatctntggaagtccatgttacantttggcagatagagagcaaaggagaaagatggatcccaagagtgatgcaggaatattcctgngatactctacaaacagcagagcatatagagtattcaattccagaaccagaacagtgatggaatccatcaatgtggttgttgatgatct

SEQ ID NO: 10605 - DNA, 340 bp, Glycine max
agctttgagaaaaatcaaacgacaataatttttaactcggatgtccgattgagacccgtaatatatcgagacgctcctaattgaaaactgaagctctgagcaaatttaaaggacaataaattttcactctgatgtccgattgtgtcccgtaggatatcgagacgctcgtaattgaaaacggatgctctgagaaaaatcaaacgacaataacttttaactcggatgtccaattgagccgtgtaatatatcgagacgcctgaaattgaaaacggaagctctatgaaaagtcaaacgacaataacttttaattcggatgtctgattgagtcccgtaatatatc

SEQ ID NO: 10606 - DNA, 243 bp, Glycine max
  unsure at all n locations
gattttctactgccatgattaggtcatctgtagttntaggagcctctntgtgttgtaatgaccgaatgacattaaagaagccaagatctaagacgttaaaatctagcgagtttaggggttgagaaaccaatcgaatgtcaaaatcgccttcactagcagcttgatggaagtcgttgtcatcttcatcaatgtgacatggaacattgtcttgttgtatgaaaatattttctcctctatctccta

SEQ ID NO: 10607 - DNA, 338 bp, Glycine max
agctttagttcactgcttttatagtgcacgatatgcttccagaggaaaacacattgtctaaaagttactatcaggcaaagaagatactatgtccgatgggtatggagtatcagaagattcatgcttgcccgaatgattgcatattgtattagacatgaatttgaacaaatgtccaaatgccctaggcgtggggtatcacgatacaaagtcaaggatgatgaggagtgtagtattgatgaaaactcaaagaagggccccccagtgaaggtgttgtggtatctaccgatcgttccaaggtttaagcgtccttttgctaattgagacgacgctaaagacct

SEQ ID NO: 10608 - DNA, 332 bp, Glycine max
agcatccacaaactgctgttggcaattgactcacaaatcatagcacggccgagaatttggtcatgagaatcaacacgaagacgaggtggactaccaacactccagacaggttggatctcatgggctagagcatctatctgtaactgcccaccactccaggcagtcaccaaaatacaatctgtgctgactaaattgtaaagaaaactaacagcacgaccttcacattctgcactacgaccaactgaatcttcattcccatcctgacctactcttcgcagaggtccctacaaaatcaaaagacataaagtagagtcataatatgtaacactgcc

SEQ ID NO: 10609 - DNA, 330 bp, Glycine max
  unsure at all n locations
cttcagactgatctacactngcacagtggccaaagatgcatgggagatcctgataatcactcatgaaggaacctccaaagtgaagatgtccagattgcaactgttggctacaaaattcgaaaatctgaagatgaaggaggaagaatgtattcatgacttccacatgaacattcttgaaattgccaatgcttgcactgccttgggagagaagatgacagatgannagctggtgagaaagatcctcagatccttgcctaagagattngacatgaaagtcactacaatagaggaggcccaagacatttgcaacatgagagtagatgaactcat

SEQ ID NO: 10610 - DNA, 318 bp, Glycine max
  unsure at all n locations
tgcgtcnattaacanatccaatatcatagtcattgccttatcgcttaatccacacaaaacttttatatgatataatttgattataaattctaattntgtgtacttgcttccttcatacaatgtttggctcccgtcctttagaagctcataaaagccattatgatcttctcttggttcatcatttactatttcatcttcatttagtggttgtgatgcacctacattagggtcatgttgcctatattgttcanatgcgtcattgatcatcatttccattgggttntgaggttgaacaccactatcttganaacatcttca

SEQ ID NO: 10611 - DNA, 307 bp, Glycine max
  unsure at all n locations
tactcagcttcgacatgataatggagacacatgaacagcgctaggcaatgacattcatggtgctccgaacaaaggcggagtatggaggattggcttgatggtccacacttangcaattatgaaactcagctccaaactcgaaagtggaggacacacgaacaaccctaagcaagaacattcatgtggctccgaaaaaggacgagaatggaggattgccttgagggtcctctcttaggcaatcatgaaacacagctccaaactcanaagtggaggacacacgaacagccctaagcaagaacattcatgt

SEQ ID NO: 10612 - DNA, 305 bp, Glycine max
  unsure at all n locations
gagagccatgagggcggactcatgggccactntgngatagacaagacccttgtcttactcannagaaagttntattggccccatatgaagaaagatgtccataagcattgcactaagtgtgtggattggttacaagccaagtctagggtgatgcctcatgggctatacacacccttacccatccctttctcaccttgngtagacattagtatggactatgtccttgngcttcctagaacccanagaggtgtagactctatctttgtggtggtggataggtttagcaagatggcacactntatatc

SEQ ID NO: 10613 - DNA, 332 bp, Glycine max
agcttgcttctacagggtgacctattggaggctcccaacttacttccaatgaaaggccttcttgttacaaaatttgaaagcaatgaaggtaagtaaattgtcaattacaaaattataaaaaggtcctcaattttggtggttgttctttctttggtgattcactcaatttggagtgcttcttagcccaatagctcttaaggtggttgaccccttgcttcttgactcaaattcttcaagggatgacatcaatcctcctttccaattccctatatggcaactcacaaacaaggaaacaaagagacaagaaataaccaaagacaaaaaaaaaaatg

SEQ ID NO: 10614 - DNA, 278 bp, Glycine max
  unsure at all n locations
aagttattgtcgttttgaattgctgagagcttcaacattcaatttcgagcgtctcgatgtattacgggactcaatcagacatcggagtaaaaagttattgtcgtttgaattagctcagagattcagaattcaatttcgagcgtcccgatgtattacgggactcaatcagacatctgagcgaaaaagttattgcngtttgaatttgctgagagcttcaacattcaattctgagcgtctcgatgtattacgggactcaatcagacatccaagataaaagt

SEQ ID NO: 10615 - DNA, 340 bp, Glycine max
agcttagagctaattcaaacgacaataactttttactcggatgtctgattgagccccgtaatacatcgagacgctcgaaattgaatgttgaagctctcagcaaattcaaacgacaataactttttactcggatgtctgattgagtcccgtaaaatatcgagacgctcgaaattgaatgttgaagctctcagcaaattcaaacaacaataacttttaactcggatggctgaataagtcccgcaatacatcgagacgctcaaaattgaatgttgaagctctcagaaaattcaaacgacaataacttttttccttagatgtctgattgagacccgtaatatat

SEQ ID NO: 10616 - DNA, 434 bp, Glycine max
  unsure at all n locations
cgctgcatgtacacgtctatcttggctagaaagcanaggcatgtgaatgtgatgatgacagaggaagagagggcacactcccaacaaaggcaaagactcctttagccattcccgggttgtgctctctctcttctgtcaacatgagatatctcacatcactcatcacagtccattcccaaccaccaatagaacccttcaagacatgcatttctactcgtgatcaagatcaccctgtccattatgaacaataacaccatcatgcatgcatttggataagaccatacatatataataattatatggcangtggacctttcgtgtatcaaaacaagcatatttctaattctttanaattgctttttccctactctattcttgggctacatatgtatatttatattacccaataattaaatacataactacagtttatt

SEQ ID NO: 10617 - DNA, 336 bp, Glycine max
agcttggactgagcattgatgaagatgctggtgaagcagatgctgacatgcctcctcttgaggacgctgatgcagatgctgagggtagcaagatggaagaagttgattaaatctgacttaattgcctgttacgtttttagaaacaatgattggagaaacagtctttttactatgttttatgttttttgaattttcgaaattttggaacgttggctagttaggtgccgtatgtagtagtttctttatggtaaatttgtgtccgctccctggccaatgaatttgtgctttcttcgtataatcgtgtatgctgattgcggaagtttcagttcgggaatg

SEQ ID NO: 10618 - DNA, 337 bp, Glycine max
  unsure at all n locations
tacatctctgctgagaatatctctcttttccgagggtgactagatctctatagcctntcaccccatcaccataacccatgaatagaccctntcttgatctangtaccagctntccttcattgacatgataataagcattgcagccaaatactcttaggtttgagtagtttgttgttntgtcattccagatttcaatacgagttttaagttctatagtagtagaggatgttctattgatcagaaaacaggctgtattgatagcttctccccaaaaacttctgttgagaccagcattagacaatangcatcttgttctttncagaaagtgtttgttcat

SEQ ID NO: 10619 - DNA, 333 bp, Glycine max
agctttgaagataaagaatccagttatggttttcaaagtggatttcaaaaaggcctatgattctgtatcttggtcttttttggactacatgttgataaggttaggtttctatcctaaatggagaaaatggattgctgcttgcctccaatcagcaaccatttcaatcctagttaatggaagccctacaaaggaattggcccccactagaggtttgaggcaaggggaccctttagctcctttgctttttaatatagtgggtgaaggtctcactggtatgatgagagaggcccttcataaaaacctttatagaagctatccggttgggaagcaaaa

SEQ ID NO: 10620 - DNA, 317 bp, Glycine max
  unsure at all n locations
tatcctgatgaggatgttccatatgttctcaagactgtactaatacanttgctgcccaagtttcatgatcttgcangtgaagatcctcataagcatcttaaggagttccatattgtctgttccaccatganatcccttgatgtccaagaagatcatatctttctaaaggctnttcctcattctctagagggagtggcgaaggattggctgtactaccttgctcccaagtccattaccagctgggatgaccttaagaaggtgttcttggataaattcttccctgcatctangaccactgccatcagaaaagacatttc

SEQ ID NO: 10621 - DNA, 332 bp, Glycine max
agcttgtaatctattacacatatactgtaatcgattaccagagcagattttcagaaaatattctcaacagtcacatctttttatgtggttcttgaatggctatcaaaggcctatatatatgtgacttgagacacgaatttgctaagagtttttcagaacaaaaaggtcttatcctcttataaagaaaaatcgttttatcctcttacaaattccttggccaaattacttgtgattcaataaggaattatttgagtgctcaaattgttcaatctatctctttcaagagagatttcttcttctcttcttcttcattctgaaaagggattaagaga

SEQ ID NO: 10622 - DNA, 336 bp, Glycine max
  unsure at all n locations
ctcgcaggtagccatgagtngtgatatgaacctggcgatgtagttcaagtgccccaagaaaccncagacttgctgtntggtgcatggctctggcatttcgaggatggccttaactttntcggngtcaacctctatcccttttcggctcacgatgaaacccaatattnttcccgatttgaccccgagagtgcacttggtcgggttcaaccttagtcggtacttccgtgacctcttgaacaactttcgtaagatgacgagatgttcttcttcagttntgaacttggcaatcatatcgtccacgtacacttcgatatcttgatgcatcatatcatggaa

SEQ ID NO: 10623 - DNA, 340 bp, Glycine max
agcttaagctctttcaactgcacaaggctcttaatatttgaagagtatccttgtggaaccttcacccgatgaagacactgacaaaaacttatcttctcctttttggacaaagtatgacaagttgggggcaagtaaattttcttcccatcagaccttggatgcaactgtgatcgtatccacatctctgctagattttgacgagtattcaagccatccttcgtcttgccctaaatgttaaggagcgtcccaatcacactgtcacatacatttttctcgacatgcataacatcaatacaatgtctaacatctagatcagaccactacggaagatcaaagaaag

SEQ ID NO: 10624 - DNA, 338 bp, Glycine max
agcttatgctgcaaacatttataatagacctcctcagcagcaaaaccagcaacaacagaataattatgatctttcaagcaacagatacaatctaggttggaggaatcatccaaatctgagatggacaagtcctccataataacaacagcctttccctcttttccagaatgttgctggtccaagcaagccatatgttcctcctccaatgcagcagcagtcataacaaagacaacctacaactgaggctcctcctcaaccttccttagaagagttagtgaggcaaatgaccatccagaatatgcaatttcagcaagagacaagagcttccattcagagtc

SEQ ID NO: 10625 - DNA, 331 bp, Glycine max
agcttatgctgcaaatatttacaatagacctcctcaacctcagcagcaaaatcaaccacagcagagcaattatgacctttccagcaacagatacaaccctggatggaggaatcaccgtaacctcagatggtgcagccctcagcaacaacaacagcagcttgctccttccttccaaaatgttgttggcccaagcagaccatacattcctccaccaatccaacaacagcaacaaccccagaaacaaccaacagttgaggcccctccacaaccttccctcgaagaacttgtgaggcaaatgactatgcaaaacatgcagtttcagcaagagacc

SEQ ID NO: 10626 - DNA, 336 bp, Glycine max
agcttaagctccttcaactacacaagactcttaatatttgaagagtatccttgtggaaccttcacccgacgaagacactgacaaaaacttatcttctccttcttggacaaagtatggcaggctgggggcaagtaaattttcttcccatcagaccttggatgcaactgtgatcgtatacccatatgagctagatcttgacgggtattcaagccatccttcgtcttgccttgaatgttaaggagcgtcccaatcacactgtcacaaacatttttctccacatgcataacatcaatacaatgtctaacgtcaagatcacaccagtacggaagatcaaag

SEQ ID NO: 10627 - DNA, 311 bp, Glycine max
  unsure at all n locations
ctcagcttctcgatatattatgccctgaatcggacttccgtgntgaaagttattccatntgaatntctcgagagctttggttgttcaatttcgagtgtctcgatatattatgcacctgaatcggattgtcgagagacaagttatgaccatntgaatttctcgacagcttccggtgttcgatttctagcttctccatatattatgcgcctgaatctgacttccgtgtgacaaagcatgaccatnggaacttgtcgagggcttccgatgtgcgatatggagcatctcgatatactatgtgcttcaattggaca

SEQ ID NO: 10628 - DNA, 270 bp, Glycine max
agcttctcgatatattatgcgcctgaatcagacttccgttacaaaagttatgaccatatgaatttctcgatatattatgcgcctgaattggactttcgtgtggcaagttatgtccattcgaattcttcgagagcacccgttgctcgatcactagcgttcgtgatatattatgcgtccgaattggacgcgctactgaatgggtatgaccacttgaatttcttgagagccttttgtgaaaaatatgctgcgtcttgatcttgtatgggcctg

SEQ ID NO: 10629 - DNA, 325 bp, Glycine max
agcttgtaatcaattacacacatactgtaatcgattaccagaggagattttcagaaaatattctcaacaatcacatcttttcatttggttcttgaatggccatcaatggtctatatatatgtgacttgagacacgaatttgccaagagtttttcagaacaacaagtgtttattctctcaaaaaaagcaaaatcgttttatcctcttaagaattccttggccaattcaattgcaattcattaaggaatcatttgagcgctcagattgtaaaatctatctctttcaagatagattcattcttcttctctttctaattcactaaggga

SEQ ID NO: 10630 - DNA, 326 bp, Glycine max
  unsure at all n locations
tgacattcatggtgctccgaacaaaggtggagtatggaggattgccttgatggtccgcacttangcaatcatgaaactcagctccaaactcgaaagtggagaacacatgaacagccctaagcaataacattcacgtggctccggaacaggatgagaatggacgattgccttgagggtcctctcttaggcaatcatggaacacagctccagactcaaaagtggagaacacatgaacagctctaagcaataacattcatgtggcttcagacaatgatgagaatggacgattgcctngaacgtcctctcttaggcaatcatggaataca

SEQ ID NO: 10631 - DNA, 282 bp, Glycine max
cagaagctcacgagatactacaatggtcttaacatgtcacacggaagttctattcaggtgcataatatatcgagacgctcgaaatagaacatcggaagctctcgagaaattccaatggtcataacttttcacacggaagtccgattcaggcgcataatatatcgagaagctggaaattgaacaacgaaagctctcgagaaactcatatggtcataacttgtcacacggacatccgattcatgcgcataatatatcgagacgctcgacattgaacaacgtatg

SEQ ID NO: 10632 - DNA, 421 bp, Glycine max
agcttgaaattgaacaacggaagctctcgagaaattcaaatgtgtcataacttatcacacggaagtccgattcaggcgcataatatatccagacgctcgaaattgaacaacgaaagctctcgagaaattcaaatggtcataacttgtcacacggaagtccgatttcggcgcatattatatcgagacgctcgaaattgaacaacggaagatctggagaaattcaaatggtcataacttatcacacggaggtccgattccggcgcataatatatcgagacgctcataattgaacatcgaaagctctcgagaaattcatatggtcataacttgtcacacgaaagcccgattcaggcgcataatatatcgagacgctcgaaattgaacaacggaagctctcaagaaattcaatggtctaactttc

SEQ ID NO: 10633 - DNA, 282 bp, Glycine max
aaatgctctcattccttcttcattgaacacaaaagcaacatctttattcaacaaattgctcaacaggttggctactttggagaaatcttttatgaatcgcctgtagaaccctgcatgtcctaagaaacttcttatttccttgacattcaggggaggaggtagtttctcaattacattgtccacctctttccctcttacttgaaatttatgccccaacactatttcttcttgaaccatgaaatgacattttctccaattgagaactagattagattcttcaca

SEQ ID NO: 10634 - DNA, 395 bp, Glycine max
cttgattcttgaccactctctttgtgacttctccttcttggcaacgagtcctgctaaaacaacaatggcaagtggttaacccccacaaattttcacaatggatctacccagaggctctaaatcagacgggcattcttcccctctaaaaatcttctttgtgaagagttcccagctttcatcttcattgaggatgggaaggtagtatggagacgcagttccagcatagtgtgccacctctttgttgcgacttgttatgagaattctactacctgtttggtcatctggaaaggctcctttaacctcatcccatacttgggtttcccagatgtcatcaagcactaccagatacttcttccctttaaccattctgctaccttttcttagtttacctcact

SEQ ID NO: 10635 - DNA, 238 bp, Glycine max
  unsure at all n locations
catataaactgaatcctatgcacccttaaggacttattctaaatatcagctgactgatcattagagntaatgaactcagtggccatctctttggacaatagctttctccgaataaagtgatagtcaatctctatgtgcttggtcctctcatggaagactgggttttgagcacatgtgaagagcaaccttgattatcacaatataacttcatttgcatcactttgcagaatttcaactc

SEQ ID NO: 10636 - DNA, 255 bp, Glycine max
  unsure at all n locations
gagcacgctggacttcacagcgtacctaggagggccgtagttgaagagccccaccacaccgcgatagatcttgaacgacgggatgtggaagagccgtcattccagggtgtttcaccactgatgccttgtggctgtcgaacacgccctggagggagatccatggaggttttcgagagctccanggagttggttgttgattgtgttctacatcatacgcatttggttcatgaggaatcgttgatcgtgcaagatata

SEQ ID NO: 10637 - DNA, 303 bp, Glycine max
  unsure at all n locations
cgagctaacccttgcatttttttgaggtattttgctacctaaacatgtgtatatttttgtgagatatttttgctatatacatgcatatccgaggtatcttgctacctaaacatacatgtatatattgtgaggtattttgctatatacatgcatatccaaggtatcttgctacctaaacatacatatatatatnttgtgaggtatctttntgttatctaaattacatacatgcatatctaaggtattttcactacctaaacacacatgcatatattntgtgaggcatgactaccttccgagctt

SEQ ID NO: 10638 - DNA, 472 bp, Glycine max
  unsure at all n locations
agtcacctgcngcatgcaagcttcttcagaaacgtggcagttgtgtgcaatacataatgcctaaaacaccacaacaaaatggtgtatcagaaaggcgtaatagaactttaatggatatgattaggagtatgttaatcaattcaactttactcgtatttttgtggatgtatgccttgaaaactgccatgtatttgttgaatagggttcctagtaaggcagttccaaagacaccttttgaactgtggatgaataggacacctagtataaggcacatgcatgtttggggttgccagacagaaataaggatttataatccgcaagaaagataattggatgcaagaacaatcagtgaatatttcattggttatccaaaaaagtcatggggtatatgtntttttgtcctaatcatagtatgagaatngttgaaactggaaatgcatgtttactgaaaatggtgaaattagtgggagta

SEQ ID NO: 10639 - DNA, 341 bp, Glycine max
  unsure at all n locations
tgtaggcctaggatcttcttcatcaatggattcctttgcttcttgganaatgaatggcagcggaatggagaaggaagagagagagagagaggagacgccacttcaaggagaagatgagtctagaagaagctcaccaccataagaggccatggataagagcttgggggaagaaggagatgaatgaagggagagggagagaagagcacgaaattntgtgctccaaatgagctttgaaatctgaattntaatattcaaatgatcaaagttgaaaaaaatgcacacacatgacctctatntatagcctaagtgtcacacanaattggagggaaattcaaatttca

SEQ ID NO: 10640 - DNA, 390 bp, Glycine max
  unsure at all n locations
ngctaaggttaaaccatactcgtgctcttcattgcactccaaaggatattgatgcaagcacctcagctagtggacttgggtattgggtcattcgtctctgatccacgttctgaggtctacaataatatgaagaacgccatcttatagtgcatgttaataaccagtttgtcatgatttttctgggtttatcctcactgccttagagctttatatcctgtttgcatgaacttaacaaccttgaacctgaagtttgcagcaggaattcanaacacagagctaataacactaatatgctgctgtgggaaacttcagcgtttatcggaatatataccaacctaagtctcttttcatctatgttcgtatgctgttgaatatctataattgctatac

SEQ ID NO: 10641 - DNA, 371 bp, Glycine max
  unsure at all n locations
atgatgcagatgggtntgtagctacctcatgcactcctctaatgactatggcatcatttctggcgctaaactgctgggagttggaggccatcttctcatattaaattttggcttcagcaggagtcatgtctctaagggctccaccactggcagcatctatcatacttctctccatattactgagtccttcataaaaatattggagaagaagttgttctgaaatctgatggtggggcaactggcacatagtttcttaaatctctcccagtactcatacaggctctctccactgagttgtctaatacctgagatatccttcttgatggctgtggtcctggaagcanggaaaattttttctaagaatactctct

SEQ ID NO: 10642 - DNA, 338 bp, Glycine max
  unsure at all n locations
tatgctgcannatattaccaatagacctctaaccctagcagctaaatccaccatagcagaacaattatgacctctccagcaacagatataaccctggatggaggaatcaccctaacctcaaatggtccaacccttagcaagagaccagagcctncattcagagcttaaccaatcagatgggacaattggctacccaattgaatcaacaacagtcccaaaattctgacaagctgccttctcaagctgtccaaaatcccaaaaatgtcagtgccatctcattgaggtcgggaaagcaatgtcaaggacctcaacccgtagcaccttcctcatctacaaat

SEQ ID NO: 10643 - DNA, 436 bp, Glycine max
  unsure at all n locations
cggaagctctcgagatatcaaatggttatatctnttcacttggaggtccaattcacgcgcataatatatcgagacgctcaaaattgaacaaggaaagctatcgagaaattcaaatgatcataacttttcacatggaggtcagattcaggcgcataatatatcgagatgctcgaaattgaacaatggaagctctcgagaaattcaaatggtcataactntacactcggaggtccgattcaggagcataatatatcgagacgctcgaaattgaacaatggaagctcttgagcaattcaaatggtcttaacttttcactcggaggtccgattcaggcgcataatatatcgagacgctcgatattgaacaatggaagctcttgagcaattcaaatggtcataacttctcacttggatgtgcgattctggcgcataatata

SEQ ID NO: 10644 - DNA, 310 bp, Glycine max
gcctcttacgtctggtttatgaatgtagcatatagatccaaagacccttacgtagcttgctgatggcttcttcccgttccaagcttcaattggagtcttgtctcttacagacttagttggacatactgtgagtatgtaaacagcaatcgtaactgctacagcccagaatgtgttaggtagtaccttttccttgagcatcgaactaaccatcttcataactgtgtgactctttctctcagacacttcattttgttgaggagaatatgcgactgtaagttgtctcttatagccttcatgctcacaaaaactt

SEQ ID NO: 10645 - DNA, 337 bp, Glycine max
  unsure at all n locations
gggttgatgcgttctgtctcgtagaatggcattatcactagctgacatgttctcaattagctcaggtgcttcttctaggatcttcagttntatctttccccctgcagaagcatctaacagttgcttggtttatggtctcagcccatctataaacatattcaattgaattggctcagaaaacccatgggtgggagttcttctcaataaacctttgaacctctccaatgcttcactcagagattcatcanggaactgatgaaatgaaggcattgcagctttcccttctatagtctntgactntgggaagtatttctttangaacttttcaataactctt

SEQ ID NO: 10646 - DNA, 404 bp, Glycine max
  unsure at all n locations
agctnttcactcggatgtccgattccggagttattatatcgagacgctcgaaattgagcaacggaagctcttgagaaattcaaatggtcataactttccacatggatgtctgattaagacgcataatatatcaagatgttcgaaattgaacaacgaaagctctcgagaaattcaaatagtcataactttttactcggaggtccgattcatgcgcataatatatcaggacggtcgaaattgaacaacgaaagttcttgagaaattcaaatggtcataacttttaacccggataaccgatttagaaacatcacatatagagaagctcgaaattgaacaacggaagctctcgagaagtttaaatggttaatacttttcacggaggtccattcgggcgataatatatc

SEQ ID NO: 10647 - DNA, 457 bp, Glycine max
  unsure at all n locations
gctcgcacaatggaagcacagatgtctttctatgggaggcaggatatccctcatcaattctgtcttaacagccctccctatctaccttctctctttttttagaatccctaaaaaagtggtgcataaggtagtttctattcagaggaactttttgtggggaggaggttctgaggcagccaagataccgtgggtaaattgggatattgtttgtcttcccaagaataaaggagggctggggattaaagatatgtccaagtttaatgaggccttgattggtcaatggggatgggactatgctaataaccanaatcagctntgggctatagttttgatgtccaaatatggtgtgtggaatgctttatgctatggaagaaacagtgcagactgctccccttggtggaaggatcttagagctgttttccagccacagcatagtaacagtttcatcaataacatg

SEQ ID NO: 10648 - DNA, 354 bp, Glycine max
  unsure at all n locations
tctcgcgcacttctccgtgttctgcgaaatcgaagaaagttcgttagggtttgataaacaaacaggaaagtcgaaagggtttgctttatttgtttataagtctcccgagggtgctcaggccgcattgatagatcctgtgaagactgtggaagggaggcagttgagttgtaagttggcgattactgatgggaagcagggaaagcgggtagggccggactctgcccaggcccatcacgggaatgttcagcacgggcatggagatggagtgggggcgggaatggngatgcctcctaatgcggggtccgggcctgtgcagtatggtggacctggacagtatgggcccccggttgggat

SEQ ID NO: 10649 - DNA, 459 bp, Glycine max
  unsure at all n locations
agctngcattntgtggaagattaaactcttgttagggtatattagagcacctcactgtgctattaacatcaaaccaagtaaatattatacccttgcaaaggatagtttagtacaccctcggtgaaatagatccaactacaataccacaacattaaacaataataaagaatttaacttggaataagaaaacactcatgaaatgattagatcattatagcccagtaaagggccccaagatcaacggtttcaaaaaaactgtacacgatctcatccacaaaatatttttactcacaaaattttaaaaagaagatataaacaaaacaaactaaaaatagagagttagggggtatattgaattaagattntaaaaaactattttaacataaaaaaacttgtggagtttaaagaatatgtaggaatattatgacttatcagattntntacaagacttttatgata

SEQ ID NO: 10650 - DNA, 371 bp, Glycine max
agcttctacattcaattgcaagcttttcgatatattacgggactcaatcggacatccgagtaaaaagttattgtagtttgaatctgctcagggcttcgggattccatttcgagcgtctcgatatatcacgggactcgatcggacatcagagtaaaaagttattgtcgcttgaattagctcagagcttctgcaattcatttcgagcatctcgatatattacgggactcgatcagacatccgagtaaaaagtgattgccgtttcaatctgctcagggcttctgaatgacatttcgagcgtctcgatgtattacgggactcaatcagacatactgataaacagttattgtcggttgaatttgctcagagcttct

SEQ ID NO: 10651 - DNA, 443 bp, Glycine max
agcttcccagatccgctcatggaatgacttggcaactgccttcattaggcagtaccagtacaatacggacatggcccccgatcagaaccagctccagggtatgactaaacgagagcatgagtccattaaggagtatgcccagagatggagagatctcgcagcccaaaagggcatctccggatgtattgccggaagatgggggcgtattctgcggacgaaaagttgttggtccatttctttcaagacagcttggccggggcagctgtagcatggtataccaatctggaagcttcccagatccgctcatggaaggacttggcaactgccttcattatgcagtaccagtacaatacggacatggcccccgatcggaaccagctccagggtatgactaaacgagagcatgagtccattaatgagtatgcccagagatggagagatct

SEQ ID NO: 10652 - DNA, 466 bp, Glycine max
  unsure at all n locations
agcttcttatccaaggctcatcttggtggtgaagctctcttcttccatggcttattccctagaggatggcgcctcctctcacctcttctcctttgtcttccgctgcatctccatggtggaaaatcaccattaaaggacctcattgaagctcaaagatccagcctccatagaagctccacaagcaagcttccatcacaacccctaagcacttttgggccaaagcagtgaatactgcatgttatcttcaaaacaaaatttacataagacctatccctaaaatgaatttgtatgaagtatggaaggaatgaaaacccaacatataatattttcttccatttggatgcaaatgtttcattctcaacacaaaggataacctgngagaaattgactagaaaagtgataatgggatatttcttagatactctaaaacttctaggacattcaaagtttacaactcaagaacctt

SEQ ID NO: 10653 - DNA, 372 bp, Glycine max
  unsure at all n locations
agcttgataagccatcttctccaaaagctctttgtataataactttatatgaatcctgagatttaacacaacaatatgaaggatgaaactcaaagaaacagctattatctcgagtgaatttactaacactaagtaaatttttggtaagggagggaactagcaataaatttttaagggagagagtagtggttggaaaatagggggacctaaacagatttgagcctatggaagagattcttgtacctgtgccattagccattaggatatgttcatttcctgcagctgtactgctctgaaggagattatgtggatcattggttgcatggngtgaagcacctgaatctggaaaccaagcctgagaaatgttagcag

SEQ ID NO: 10654 - DNA, 339 bp, Glycine max
  unsure at all n locations
attcaaactcggaaattcaagaagattccttgatttctaaagtgtataagattaagatgatcatagaccattcccttttcttggatctcactcaattatcaagtgacggtgtaccatctaatggttcacttgatgatgagtggaagtttgatttctctgtgtctgatgccccccggatggtttgcaccaaccaagcagatatgatcggaaggcttcttgcctgttcattggcattngaatgtcgcatcatgcactacttgattatgcgcatcctactccctagatcttccaaccttgcacaagtgtctgaggaagaattgataatcatgtgggttttct

SEQ ID NO: 10655 - DNA, 412 bp, Glycine max
  unsure at all n locations
aaaataacttaatgccattaacctagggaattaaaaaaaaaacttaatggctgagtgtaactgaaattgtggcaaccaaaagtcacccccaacagccaacaagtcagccaccatttggtctcccaaaaggctgatgcctagtgatgcaatcctaccttgcaagggcattggatataaaacttgaagtagattgggccagagatgcaagagaaggccctagggttcttatgagccttagggtagatttcgggcccatgggctaagtacgagcccacttatctttgtaaatattagattaaggtttcaattattttgggcctcgtatttagggctccataatttaggtagggtaccctaganatataggactttcagcccttgtattttagggcacctagactatgttttgatt

SEQ ID NO: 10656 - DNA, 287 bp, Glycine max
  unsure at all n locations
cgccttaatctaacttccgtgtgagaagtatgaccatttgaatttctcaagagctttctttgttcaactttgaacgtctcgatttgtgattcgcccgaatcggacatccgtgtcaaatggtatgacccattggatntctaaagagctttcgttgttcaatttcgagcctctcgacatattatgcgcccgaatcgggcatccgtgtgaaaacttatggccatttgaatttctcaagaagttccgatgttaatttcgagcgtatcgatatatnataagcctgaatcgga

SEQ ID NO: 10657 - DNA, 457 bp, Glycine max
  unsure at all n locations
agcttatagaatatataataaaagaacaatgacaattgaagagtctatacatgtttcctttgatgagtctaatgccattcttccaaggaaggattttttagatgatatttcagattccttagaagatacacatattcatggaaataactctaaagaaaaagatgaaggaagcaatgaagattctcaagataatggggctagaggaaataatgaacttccaagagaatggaaagcctcaagagatcatcccctcgacaacattattggtgatatatcaaaaggggtaacaactagacattctcttaaagatttatgcaataatatggctcttgtatctatgattgaacctaaaaatataaaagaagccatagtagatgataactggataattaccatgcaagaagaactgaatcaatttgaaagatataatgtgtganaactagtagaacaacctgaa

SEQ ID NO: 10658 - DNA, 443 bp, Glycine max
  unsure at all n locations
agctcgcatcaagtcctgtctaagtggtcctgaatatttgtgtatgacagnggtcaagaatgatagagatgagctaattcctacaagaacagtcaccgggtggagaatgtgtatcgattacaagaaactcaatgaagccaccatgaaagatcattacccgcttccctaaatggatcaaatgcttgagagacttgcggggcaatctttctactatttcttggatggatactcgggctacaatcaaatcgcagtagatcctcaagaccaagaaaagacaattgtcacatgcctcttctgtgtattagcttatctgcacatgtcgattggtttatgtaatgccccagctactttccaaagatgtatgatggcaatgttcgctgacatggcatagaaatgtattgtagtctctatggatgattcttctgactttgcacatcttttgg

SEQ ID NO: 10659 - DNA, 380 bp, Glycine max
  unsure at all n locations
gctccttcaactgcacaaggctcttaatatttgaagagtattcttgtggaaccttcattctatgaagacactgacaaaaaattatcttctacttcttggacaaagtatggcaggctgggggcaagtaaattttcttcccatcagaccttggatgcaattgtgatcgtatacccatatcagctagatcttgacaggtattcaagccatccttcgtcttgccttgaatgttaaggagcgtcccaatcacactttcacaaacatttttctccacatgcataacatcaatacaatttctaacgtcaagatcacaccagtacggaagatcaaagaanatggatctcttcttccatatgcaactctgactnttatacttcttttgg

SEQ ID NO: 10660 - DNA, 459 bp, Glycine max
  unsure at all n locations
agcttgatctagtgtaaaattaactttacctataagataaagcaaacacaggtccagatgattaccgaanttgtaagaacaacaattaagtcatcttgaaagtactcaaacagataatagtgcactatagcttccctcagagacagaggccatgaaaccttcaccctttcttccaaaattcagtgaaaaatcagcattcaaaagtggtaaagggcattaaatgttttttttttttacttggtgcaggctggacaaacctcactagtgataattgttccccaatccgggtcttttgcaaacattcagctgataagattttgaaagtgggaatagtagactgaggccacctaaatgaaaattgtgaanagggtgtcaggtgcatttatcagatacatttttataatgatatattacttagtttcaaaaacattactaaggtatacaagtacaacaacattc

SEQ ID NO: 10661 - DNA, 454 bp, Glycine max
  unsure at all n locations
agcttgcanaatggaagcaaagatatctctctatgggtgaaagaataaccctcattaattcagttttaacagcattacccatttacttgctgtctttttttagaatccctaaaaaagtggtgcaaaagatagttactattcagagaaattttctatagggagggtgatttgaggccaacaagatcccttggtgaaatgggacacaatttgtcttcctaagaacaaaggggggttagggattaaagacttgatcaaatttaatgaggctctgcttggcaagtggggttgggagttggctaataattagaaccaactntgggcaagaattttattgtctaaatatagcggctggaatgaatagctctctggtagaaacagtagtgatttctctcattgatggaaagatctaaagattgtatttcagtagtaggacagcaatagcatcatcaataat

SEQ ID NO: 10662 - DNA, 394 bp, Glycine max
  unsure at all n locations
agcttgaatcggacatccgtgtganaagtnatgatcatttgaatttctcaagagcttccgtagttcaatttcgagcttctcgacatattatgcgcccgaatcggacatccgtgtgaaaagttatgaccatttgaatatctcgagagcttccgatgtttaatttcgagcgtatcgatatattataagcctgaattggacatccgtgtgaaaagttatgaccatttgaatttgcgagagttttcgatgtttaatttcgagcgtatcgatatattatacgcctgaatcggacatccgtgtgaaaagttatgaccatttgaatttctcaagagcttcgatgggtcaatttctagactctcgacatattatgcgcccgaatcggacatccgtgttaaaa

SEQ ID NO: 10663 - DNA, 423 bp, Glycine max
agcttatccatggcttcctatggaggtgagtcttttcttgattcatcttctccttgaagtagcgtctccaatcatcattcttccatctccattccactgccattaatcttcaagaagaaaaagaatccattgatgaagaagatccaaggcctactatcatactctaatttcgtccgggcaccgttgtttgtcagcatgcgaccttcgtttgaccacttcaaaatgtttaacacccatcgccgtgaaattcgtaaagttccgagatgtttcggagagaaatcggccaaaaacacgaaaatggaagtgtagttagcaaagtaggggtgtgtaaatagactgttacaccctaatttcatctggggactgttgttgatcgcttcgaaaggcttcacacccatcgtcatggaatccgtaaatttcgga

SEQ ID NO: 10664 - DNA, 404 bp, Glycine max
  unsure at all n locations
agctngatatatgtaaatggttggaaatcctttgacttgagtattcttcagaaataaattgagcagagctactccaactttgctccagactccagattcagaacaaagttctgtagttcagtcttggaattttaaacaaaaaatccaattcttgaagtttaagaaagaggaagcaatngcacttggggctcaagccctggatttgagattgccatttggtgaaattgaggttcttaaggaaaacttggacgtgatcaagagacagataggtctagaagatgtggaaattttatctgcagtagatgccgattccttggccagagctgaaccattagcttctntactaaatcaaaatcctccttcacctggaaagccaactgccatctttntaactcggtagctac

SEQ ID NO: 10665 - DNA, 331 bp, Glycine max
  unsure at all n locations
agctgtcaaacaaatcggtgatctcactcaccacaattattatatgaaagatctaagttagatgctgaaggttgaaaagaaatgatggaatctcataacctatgttattcaaatcgaggccctaatgatttacttgggtgatgttcgcaaaatattgagcaatggctccagtgaagctattatgagaaaaacacaatgaagtgagatgttgaggatttgaaagtgatgatggaatctcattgctganattgttccaacacaggtccaagtgttatacttgtgtgagattagataaaaacagaggaatatgtcctttgaagtcagatgaatg

SEQ ID NO: 10666 - DNA, 451 bp, Glycine max
  unsure at all n locations
gagcgatatatctaactcaattgatcaatctatgtaaattatcatagataatnggatatatagtctttgaatgtatagataaaaaaatgaaaacaatcaatttataaatcaggtatctttgttctctctaggaatttttacaaccaaacaattattgcacctacaattgcttgtgaggtttttatttatttatttaaacttttaattgaattctaagactctaaaaattaattatgtatacttgactcgaatntatactaataacaaagaaagacttaatatctctatttgtttataactaattaaaattgaatgtatctgaagttcaattctcatgtataaaaattctattaaacttctcatttgtctttatctctttctatcatactatatcaattatgctatcaattactcatctctcttttgttgcaatttctctcaagatgtatac

SEQ ID NO: 10667 - DNA, 461 bp, Glycine max
  unsure at all n locations
aattatagcctcanaacatgctacatattcatcttccatggtagatgcaacaacaactaatgcatatggaattgcttccatntgttttcattccaaatcatttaagacattgtgcaaggctaaatntgtctcctttctaaatggaacgggtgatgttgaacactttttcttcctaaatctctctagtactntattgatatatgctntatgagataagcttaacaatccaagtgatctattacggaatatatttatccctatcatatatcttacctcacccatatcttttacatcaaagttgctagagagaaacttcttagtctcatgaagaagaccaagactattagttgcaagtaagatatgatncaacatacagaatagaaaaataaccttactcccactgaccttcagatatatatacaccaatcaacaatattntccttaaattcaaaggaaacaat

SEQ ID NO: 10668 - DNA, 475 bp, Glycine max
  unsure at all n locations
ctggattctctgtctgtntatggtacataagcccnctacacgtacctcattttatctccataccttttaattntaaacattgcgtggactgtgttgtgactctcttgtggtattttctaccatagaagggctagtcacgatcaacaaangntatatcgtacatgtcgaatccaaaataaactagtacattctcatttaaaaaaacaaataatacttgtttggttaatattgaagaactaattttaaatcttaagttgattntagattacaacanatttgattaacttttacgttgaattaaaattttatctctatcttgattttataataaaaatatcgtcatataaatcagttaacattcatctaaacacaactntaatggaacatttcataccaggctattatgattcagattcatcaatgataatatgagagccaatannttggcttcaattcgaatcgactctcanatctc

SEQ ID NO: 10669 - DNA, 482 bp, Glycine max
  unsure at all n locations
cttgactctcanntttgtttatttactgtattatattttacgtatatttcacactgtatcccaagtgtagtacttatgtacaattcgattccgaggatattaaaaggctttntatttattattttacttttctgtacattaataactctaacatctcacactataattagtaaatatgattaattaattcaatatatactgacataattaatatcgaataagataatcaaatagttaagaaaatggggataaaaatagactaaagttatatgataattaaaatagttaaggaaatgtataaaaagataactcgctttagcatttaattntattggtcttaataatttacataaatttaaatattntacacaaaaattcactctaatattaagaatgttaaaatgagtgactannatttattttataggtcgtataatacttaaaaaatatattatttatacaataaatgttntaaacaatag

SEQ ID NO: 10670 - DNA, 321 bp, Glycine max
  unsure at all n locations
cacccgactaagacactaacaaaaacttatcttcttcttcttggacaaagtatggcaggctgggggcaagtaaattttcttcccatcagaccttgtatgcaactgtgatcgtatacccatatcagctagatcttgacgggtattaagccaatcttcgtctttgccttgaatgttaaggagcgtcccaatgactctatcacagacattnttctccacatgcataacatcaatacaatgtctaacgtcaagatcacaccaatacggaagatcaaagaanatggacctcttcttccatatgcaactatgacttttatccttctt

SEQ ID NO: 10671 - DNA, 382 bp, Glycine max
  unsure at all n locations
atagcttttttatgagatagtattnctaaaatttattatcaattggaattatagaatttgtgaaatgttaatattttaaattttttccctttgtggactcaaactttaaattttcaacaacacctacattaaaattggaagacattctcacattaattattgaaacttagaaatgtcaaataagttcttaaacttaatgatttagttttatttcggttcttaaacatatgctaatatttttaataatatgtctacattatcaccctatgtatattatcttgaatgttgcactaatgtcatcgttgattatatctttagagggttntgtttcttcgatttaataactatctgacaattcattccattttcaagatctaaagtg

SEQ ID NO: 10672 - DNA, 449 bp, Glycine max
  unsure at all n locations
tgactcanaaacttggaatccctatccgatacaatgctcctaggcaatccatgaagacgcactacctctttgaagaaaagatccatcacatgacaagcatcgtccaccttgtgacatggaatgaagtatgccatcttggaactatcaacaaccacaaaaattgaatccttgcccctcttggaccttggaagaccaagcacaaaatccatggaaatgttggtccaaggggaggtaggaattggcaatggagtatacaaaccatgatgcatgatnttggactntgccttatgacacacaatgcaattagaacaaaaataaaatttcatgcaaaatgttcaaagtcttttcaactccaaaatggtcccattaaccccctttatgaacttcataaatcacgagttcacgcattanactttgatgctacacaatctattatttttaacaagtat

SEQ ID NO: 10673 - DNA, 482 bp, Glycine max
  unsure at all n locations
ggttccaacactctgttcaagctctcccaaaatctatagggtaatctaggatctctatcagatactatgctagatggcacaccatgtaacctgacaacctcacttatatacaaggtggtcaacttctccaaggaaaatctgatattaatgggaatgaagtgagagacttagtcaatctgtcaacaataacccagatagaatctaaacctgtaggggttctaggtagtcctaccacaaaatccatggaaatactgtcccacttccactgaggtatctctaagggttgtgacttccctgaaggtctctgatgttctatcttagccttctgacagactaggcatgaattcacaaactcactaacctctctcttcatgttgggccaccaaaacatcgtctntaaatcatgatacatcttggtagctgatgtgccatcattntcttctattatctgaacccttttcgaccatttaattattattggc

SEQ ID NO: 10674 - DNA, 429 bp, Glycine max
  unsure at all n locations
tcataaaagtntatatggctagaaacaagtaccgaggcagtggttctagaagtttaatgagtttatgagcaactcacgattcaacagatgtgacatggaccattgtagctacgttgttgcaacctacccttctgcgggagggcgacacgtgaatagtgatgcgtattccacgaaagggatacgcgcggagtcgccaccaacgtttatttgaggaaaacgtcagatgaaccagatagacgcgatctacgaacttttaagtgaaaggctcgggagatgtatttatgcacggggaaggtattagcaccccacacgatcgtcacaagggacggcagcctttaatcgaatgtgcaaacatgactgtgattttacgttccgctttatgtccttatatccttataccctgtttacatttttctctcttgtggcgac

SEQ ID NO: 10675 - DNA, 464 bp, Glycine max
  unsure at all n locations
cagcaacactcatgttcatccatcttgcccttactgtaaaaaaactaatcacccacaaaacaagtgttggtggaggccagatgtaaggtgtcatatgtgtggtcagttatggcatgtaaaagaattgcaaatttaacacacaagaagaagtcaaggttgttgaggaccaatcacaagaggagcagttgttcgttgcatcatgcttggctttcagtagctctacaaaaagttggcttattgatagtggttgtacaaaccacatgacctatgatcgtgagctctttacagaacttgatgaagctattttttctaaagtcaagataggaaatgcaacatatattgaaataaaaggcaaaggaattgtgtcaatttaaggccacacgggtttgaaactaatttctgataactactaaatatgagttantttgataataaaaatatattgaanatatctctaaaaatat

SEQ ID NO: 10676 - DNA, 440 bp, Glycine max
  unsure at all n locations
ccctcagccttatagtatccatcttgtgcctttttcccacaactctngtaaatgggagagaaatgttcatctaaagcatacaagtccctaatgttatcaaatcctaaaatatgagctcctagggagcaaaacatgtgtgtctcctagagagggcatcagctaccacatttgtttttccctttttgtatttgataaaatatggaaattgctctaggtactctacccattttgcatgccttttgtttaacttgctttgccctctaatgaacttaagtgattgatgatcactatgaatgacaaattccttggaaacaaggtaatgttcccaagttcggagtgctcttattaaggcataaagctctttatcatangtggtgtagttaagggtggcaccatgaagtttctcactaaaataagcaatagggtgcccaccttgcaac

SEQ ID NO: 10677 - DNA, 446 bp, Glycine max
  unsure at all n locations
ngaggtacaaagaattattagctcacattcttntaattatttattatttctaagttctttntttataattagtgttagttaatattggtcttaataccactactacaatgtgatctttaacaatatttctctgtctaacacttagtaaaaatattgntaaggttttgacaacacttaaaatatgtcgctaaaaatgaataaatattattaatatatgtttntatgacactttatcaaatatagtgtataagtcatgttgttaaaacctttaatcacttatatttcatcaatcaattcaagcaatccatacacttagccaaatagccatttaatcacaacaacaaacgtaaaactcataaccctagaccgcttgaaaacaaaacagaatcatgccataattaaaattagacanagattttcaacatagaaactnnttacatagcagt

SEQ ID NO: 10678 - DNA, 498 bp, Glycine max
  unsure at all n locations
ctgttcatgacactgagattcctcatggccactagggtttgggagactcatagtaccccaattaacagcatgagttntactggttgttctgttctccctagataaaggccctttgtactttctgtatctcgtcttcttctaggtgtcttccttaagagaggaacccctaaatgtgccccaaagtcattgcctctgaatatccccgacactgccaccaaggatgttttggtatgcagactgacattttttgagaagtatatttgagtcttctccttgctcacttcttgacttgacatttcacaaaagaggttcattgtgtcttgaacacactgcatctgagagatnttagcttgactacaaaggagcaagtcatcagcaaacagatgagaaataggaggactattcctccccatactatgattatntacattataagatttaatgtgacaataaaacctaaaacgctggtccttatttatactaagaatcctaattaaa

SEQ ID NO: 10679 - DNA, 502 bp, Glycine max
  unsure at all n locations
gctaaacattcaacttcgagcgtctcgatatattacgagtctcaatcatacatccgaganaaaagttattgtcatttgaatntgctcagaggttcaacattcaatttcgagcgtctcgttatattacaggactcaatcagacattcgagtaaaaagttattgacgtttgaattagtcagagcgttccacattcaatttcgagcgtctcgatatattacgggcctcaatcagacatctcgagtaaacgttattgtcgtttggattggctcagagattcaacattcaatttcgagcgtctcgatatatgacgagactcaatcagacatccgagtaaaaagttattgtcgtttgaattggctcagagcttcaacattcaatntcgagcgtctcgatatattacaggactcaatcagacatccgagtaaaaagttattgtcgtttgaattggctcagagcttcaacattcaatttcgagcgtctcgatatatgacaggactcaatc

SEQ ID NO: 10680 - DNA, 395 bp, Glycine max
  unsure at all n locations
agtcttgaaccaattcaaacgacaataactntntactctgatgtctgattgaggcccgtaatatatcgagacgctcgtaattgaatgttgaagctctgagccaattcaaacgacaataactttttactcggatgtctgattgagtcctgtcatatatcgagacactcgaaattgaatgttgaagctctgagccaattcaaacgacaataactttttactcggatgtctgattgaggcccgtaatatatcgagacgctcgaaattgaatgttgaacctttgagccaattcaaacgacaataactttgtactcagatgtctgatagagtctcgtaatatatcgagacgctcgaaattgaatgttgaagctctgagctaattcaaacgacaataactt

SEQ ID NO: 10681 - DNA, 437 bp, Glycine max
  unsure at all n locations
tagagtggcatactcttattggaaatcaacttgttacaaaattaanagttntaaggactgacaatggcctgcagtttgattcagagcaatttaatgagttttgcaggaaagtatgtatcaaaaggcacaaaacagtttctacacaccaacaaaatggattagcagaaagaatgcataagaccattttggaaagagtgaggtgcatgctgcctattgcaggactgccaaagaccttttggggagaagctgcaaacacaacaacctatgtgattaatagatgtccatcatcagctttagacttcaagacaccaatggaagcttagagtggtgaaccacctgattactcaagattgaaggtgtttggatcactggcctttgctcatgttaaacaangaaatgtggatgcaaaggctgtanagtgtgtgttcattatctat

SEQ ID NO: 10682 - DNA, 464 bp, Glycine max
  unsure at all n locations
tcatgagagagtcaaagatcaaattgagaggagaaattaaagctatgctaaacaagccaacanaggaagaaagaaggttgtcttcgaacccggagattgggtttgggtgcacatgagaaaagaaaggtttcctgaacaaaggatatcaaagcttcaaccaaggggaatggaccatttgtgcttgaaagaatcaatgacaatgcttacaaagttgagctgcccggtgagtataatgttagttccaccttcaatgtctctgatttatctctttntgatgcagatggagaatccgatttgaggacaaatccttctcaagagggagagaatgatgaggacatgttcaagagcaagggcaaggatccacttgaatgacttggaggacctatgacaagggctagagcaaggaaagccaatgaagctcttcaacaagtgctgtccatactatntgaatacaagcccaagtt

SEQ ID NO: 10683 - DNA, 470 bp, Glycine max
  unsure at all n locations
cagctagaatgttaggacggtatcaaagtaatctatgaatggtacattcganaactacaaagaaggttctaagatacttacaaggaacaaaaagtttgatgcttacatataggaggtttgatcaccttcaggtgattgggtatttagactcgaacttgctcaatgtgcagatacaaggaaatccacccttggttatgtacttcttttagccaaaggagtaatatcatggaagagtgcaaagaaacctattgttgctacattcattatggaagctgaatttgtagcatgttttgagactacaattcaagctaattggcaacaatattgtcaagccgctaaaaatatattgtaataactccataacagtattnttctctaagaatgacaagtactctaaaggtgctaaatatatggaattaaagtaatttgtcctgaaagaagtacagaaacaaaaaatgtcaatagaaatt

SEQ ID NO: 10684 - DNA, 460 bp, Glycine max
  unsure at all n locations
tgagcanattcgaacgacaattacttttaactgggatgtctgattgtttcccgtaatatatcgagacgctcgaaattgaatgttgatggtcgttgcaaattgaaacgacaataactgtttactctgatgtctgattgagtcccgtaatatatcgagacgcttgaaatgaatcttgatgctctgagcaaattcaaacgacaataagcttttactcggatgtctgattgagtcctgtaatatatcgagacgctcgaaatttaatacgagagctatgagcaaattcgaacgactataattttttactcggatgtctgattgagtctcgaaatatatcgacacgctcgaaattgaatgttgatgctctggtcgattcaaacgacaatatattttctgccaacattgcagaatttntatacatacactggtctataatatctctttatggtagacgaagttttgt

SEQ ID NO: 10685 - DNA, 333 bp, Glycine max
agatagggcatgctcgatggcccttaacactgtattcattcaaataccaatatgcttggaagtcattattggtaccaaattacatcccacaacttgaatgttttatttcgatacccatgaaacactacaattctctattctacaactttgtcagtctttatctatggaccgagataaacatcaatatcatttcctggttcgcttgtggctgatatcatcattgacaacatcatgtattcttgtttcatgcacaaccaaggaggcaacgtgtatattactaacataacaggccacatactatgttgagtacttaaactatcatatggattcatt

SEQ ID NO: 10686 - DNA, 324 bp, Glycine max
  unsure at all n locations
tttgtgaagtgatttgccggatatgttgatgatagaanaagtactaccgganttgtattttttatgggtgattggtgttttacatggagttctaagaaacaaggcattgtgacactttctacttgtgaagcccaatatgtagctgcaacttcttgcacatgtcatgccatttggctaagaagaaatgtggaggaaccttcagtgttgccataagaaagcaccaagatctatgttgataatagatctgcataagagcttgccaagaatccggtgttccatgaacgaagtaagcatatagatacaaggtatcattttattagagag

SEQ ID NO: 10687 - DNA, 244 bp, Glycine max
atggagtagcccgaagcttatgctgcagacatttacaatagacctccttaacctcagcagcaaaatcaccacaacagaacaggtatgacctctctagcaaaagatacaaccctggatggaggaatcaccctaatctcagatggtctagccctcagcaacaacaacagcagcctgctccttccttacaaaatgctactggcccaagtagaccatacattcctccaccaagccaacaacaacaaca

SEQ ID NO: 10688 - DNA, 309 bp, Glycine max
  unsure at all n locations
agcatgggctcatgaacgcacacctttggctaattttatttgatggagagataaaccaatggctcttttcattgtgcaagcaagattggttggactaacccactttttcggagggtatatatttacttatgcagccttcttaattgcctcgacttcgggcaaatttgggtaatttcattaattctttattattatatctggcatatcatttccttttatggggaanggacgccaattatacatctaggatccgacttctatcattgatactaataggaaatgaaccactatggcaaggaaaagtgtgat

SEQ ID NO: 10689 - DNA, 436 bp, Glycine max
  unsure at all n locations
tggtggttgagtcatatatacagtttcttgaaggtctccatgcaaaaaggcattgttgatatccacttgatgaataggccaatgttgataaaccacaaaggacagaacagatctaatcgttgctggcttaatcactggactaaaggtttctttaaaatcaaacccctctctttgatgatacccttttgctaccagcttgtccttgtgcctttgaaaacgtccatcagcattaaacttgcttttaaaccgtcatgttcctctttcatagctttgagccattctggcttggccattgcttcctttatagtatgtggctcaacaatgtgatcatagcttccttccttgtaagaagcataagttttcgggttaaaaacaccagctttggctctggttgtcatgggatgagtattntgaggaacataactngcaatgggag

SEQ ID NO: 10690 - DNA, 372 bp, Glycine max
ccaagcttatgctgcaaacatttataatagatcccttcaatttaaaaaccaacaacaatagaataattatgatctttcaagcaataaatacaatccaggttggaggaatgatccaaatctgagatgggcaagtcctccacaacaacaacagcctatccctcctttccagaatgttgctagtccaagcaggccatatgttcctcctccaatgcagtagcaataacaacagtaacaacaaagacaacaagcaactgaggccccttctcaaccttccttagaggagttagtgaggcaaatgaccatccaaaatatgcaattttagcaagagacaagagcctccattcagagtctgacaaatcaaatggggcagat

SEQ ID NO: 10691 - DNA, 432 bp, Glycine max
gtatcaaattcaaacgacaataacgttttactcggatgtttgattgcgtctcgtaatatatcgagacgctcgaaattgaaaacggatgctcgtagcaaatgcaaaccgcaataacttttaactcggatgtatgattgagtaccataatagatcgagacgctcgaaattgaaaaaagaagttctgagcaaattcaaacgactataactttttactcggatgtctgattgagtcccgtaatatattgaggagcacgaaattgagaacagaagctctgaccataatcaaaccaaaataactttatattcggatgtgcgattgagtcccgtaatatatgaagacgctccaaattgaaaacagaagctctgaacaaattcaaacgacaataactttttactcggatgtccgattgagtcccgtaatatatcgagacg

SEQ ID NO: 10692 - DNA, 360 bp, Glycine max
  unsure at all n locations
agctntgagccaattcaaacgacaataactttttactcggatgtctgattgagtcccgtaatatatcgagaccctcgaaattgactgttgaagctctgagccatatcgagacactcgaaattgaatgttgaagctctaagccaattcaaacgacaataacttttctctcggatgtcctattgagtcccgtaatatatccagacgctcgaaattgaatgttgaagctctgacccaattcaaacgacaataactacttactcggatgtctgattgagttctttaatatatcgagacgctcgaaattgaatgttgaagctctgagccaattccaacgacaataactttttactcggatgtttg

SEQ ID NO: 10693 - DNA, 437 bp, Glycine max
  unsure at all n locations
tgttaaaatagtttgtttggttcaaatatttagagatcgttacaatactcagtttcaaaaatatgttaactaaattatttttttatctagaacactaaagtttagttcactaaattatttttatatagaacactaaagtttaatgactttatttgtctattgaaaaaatacagtggtaaattatactctctctttatattcttaattataaaattttttcaactaattcatacctcttaagaaaagtaattagtttttatttaatcacattaaatttgtcaattaattgttaaatcatttcaaaattactttttttttttagagaaaaaattacattcatcttatctttatccacttaattatttatanattaatattggagaaagacntaataagaaagggtatgtaagacaaatataattaatgcatctagaaat

SEQ ID NO: 10694 - DNA, 397 bp, Glycine max
agcttctttaggtgtgattcccttaagctctttgttggaattttgttcaaaatacagttagtagtagataccgcttccccaaaagtaataaggcatcttcttccctttcatcatgcttctgcccaagttccgaaatgtcatatttcttttctcagcaacaccattatgttgaggtgtgtaaggggctgccacttcatgagttttaccttcatcaccacaaaatttctaaaattcatgtgaattgtattctccatttgttctaagaaccttaattactttcccaccttgtttttcgacctgtagtttgaatttcttaaagatctcaaacgcttcactcttcttattgataagataaatccatattttctagtaaactcatcaacaaaagaaacaaagt

SEQ ID NO: 10695 - DNA, 439 bp, Glycine max
  unsure at all n locations
gctatttaagaaatgatgactaaattcgatcttgtantggttataattcaagtggagtggttcaaaatttcacgtaaagttattttattattttgaacataattttttaatagttttatacttataatataaaatcatttatactttgatgtaggaaagaagcttgacaaacaaagctaatagaagcaagcaagaaataaaatcaattattggcacaaaaatcaatcatgcaaaaggcatttgaaatggtaacatcttttaatattttatattcattttcttataagttatataataataactctttttttttgttattgtttttatatgatatatgaaagtttggtgaaatttatataaaagcatcatgcattagattatactgtttttatattatttaatttgtctnttactatatttaattttaataaaaagaaga

SEQ ID NO: 10696 - DNA, 389 bp, Glycine max
agctttttattttcagcatatgaagattaatctgtggccaccacatggactcctctaaggacaataacatcatttcttgcactgaattgatgggagttggaagccatcttctcaatcaaattcctatcctcaacaggagtcatatcaccaagggctccaccactggcagcatcaatcatactcctctccatgttgctaagtccctcatagaaatattgaagaaggagttgctcagaaatctggtggcgagggcaacttgcacacaatttcttgaatctttcccagtactcatacaagctctctccactaagttgcctgatgcctaaaatgtcttttctgatggcagtggtcctagatgcagggaataatttctccaagaacaccctctg

SEQ ID NO: 10697 - DNA, 435 bp, Glycine max
cgcctttgcctgatccagattatgaggtacatattgactatttttgggggtgtgaaggtcttaagaaaaccatttggaaacttatgaatggtgatgagaacagccccattgaggaagatctcaaatccagcaatgcacattgcatctcatacaaaataaaggatcttagtaaggtataaatcaacatgacatttaccattatattaatttacataatggctagctgggcgcactaagagataaatgataatcatgtgtattaaaattcaggcaaaaaaagttgatgagttgaggcagaagcttacgatgagaggtctacgttgtcatcctatgtactgcagggggtcatctagaatgcatgtgattcctcttcttgcatctagagcccaggcactcacgtaattaccacttcatccttaacttctaatttatatt

SEQ ID NO: 10698 - DNA, 417 bp, Glycine max
  unsure at all n locations
cttaccaccataggaagccatggataatagtttgaatgaaggaaaagatgagtggagggagagggagagaatgagcacaaaattttgtgcctcaaatgaggtatgaactttgaagtgtaattctaaaaagatcaaagttgaaaaaatgcacacacatgacctctatttatagcctaagtgtcatacaaaattggagggaaatttgaatttctattcaaattttacttgaatttgaaattgaatttgtggagccaaattttggagccaaaatttcactaattatggttagtggaatttagctatggttcatcccactaatccaagatcaagtccaagattctccactaagtgtgcttaggtgtcatgaggcatgtaaagcataaaggacatgcacanagagtgattatatgatgtgac

SEQ ID NO: 10699 - DNA, 394 bp, Glycine max
  unsure at all n locations
gaatgcactgttcaatggagtagacaagaacatcttttgactgatttacacttgcacagnggccaaagatgcatgggagatcctgaaaatcactcatgaaggaacctccaaagtgaagatttccagattgcaacatctggctacaaaattcgaaaatctgaagatgaaggaggaagagtgtattcatgacttccacatgaacattcttgaaattgccaatgcctgcactgccttgggagagaggataacagatgaaaagctggtgagaaagatcctcagatccttgcctaagagatttgacatgaacgtgactgcaatagaggaggcccaagacatttgcaacatgagagtagatgaactcattggttctcttcaaacctttgagctatgactc

SEQ ID NO: 10700 - DNA, 411 bp, Glycine max
gcttcttcattcaggtatccattcagatacgcgctcttcacatccatctggtacagcttgaatttgaggaagcaagctacaccaagtaacaatctgatggactcaagtctagcaacaggggcaaaagtttcatcaaagtctacaccttcaatctgagtgtagccttgagtaacaagtctggccttgtttctggttataacaccatcttcattggttttgttcttgaagatccacttggtgccaatcacattagttccctcgggtctaggaactagctcccaaacttcattccttttgaattgctccaattcttcttgcatagcattgatccagaactcatcagttagtgcctctttcacattcttgggctcaattatggagacaaagcatgaattggagacaatctcaatc

SEQ ID NO: 10701 - DNA, 398 bp, Glycine max
  unsure at all n locations
gcatgcaagctntttctataaatatttaacatagttgcatttcatgactcaacaatatataatttttcattacaaaataatgtattaactctatgtttaatagcttcatatacacaaattgctaatcatttgagtactaaattaactatggtaaattaaataaaaaatatatgacactataatcaaatatatgttttgtatataaatgaaatgttcaagttatatttatgttcatgtaaatgttcaagtaatgtttgacaattatgatacattcatgaagcatataagtgaaatgttgtatgtttagcactcactaagaccctgtctcattagtttagtgtgtatgttccttaggtaaagagatctagtccaagagcatacaagtgcaaagcataatt

SEQ ID NO: 10702 - DNA, 450 bp, Glycine max
tgaccctcgagcccatccatgcatctttattggcttgataccacatactcaaaggatatcttgtctatgaccttcactcccacaatattatagcatctcgcaacatcgtcttttatgaagaccatttttcgttatttcatgaaaaccaagcctcaaacaccacacatacctctctttccccaactccattttcgagcaaccccgaaaattttgactctcctatcacacccattgtcaacccgtcttcttcacatgctcacgaccctcacctacgacgatctacgagaccgaagcatgcacccacctacctccaagactaccatcgtgatctcacttctctcactgttaccacctcgcccaatgttcggtatcctcttaactccgtcttgtcttactctcgtctctctccttcgcttcgtcacttcgtcatgtccatttcggtatctactg

SEQ ID NO: 10703 - DNA, 374 bp, Glycine max
  unsure at all n locations
ccaagctntgggactgaggacctatataacattatcaaggttttagtttagggagttttttttcggagaggaaaataattctaggattttagaattccagtttttattactgttcatgcacactgttcacgtagaataaaatttattttttgcaaatcatctctaatccatacatcttttaatattatgctctttttattttcttttgatatactttgtgctttaacgacttgaattcaatatgattttgtttatcaattatttttggatttatacattacttatacaaaattttataagtntctttttttagttaatatttgactaggttttaaaataattaattaaagatgtctttaaacagacttttaaat

SEQ ID NO: 10704 - DNA, 448 bp, Glycine max
  unsure at all n locations
tgagcaaattcaaacgataataacttttaactcggatgtccaaatgtttcccgtaatatatcgagacgctcgaaattgaaaacaaaagctcgtagcaaatgcaaaccacaataacttttaactccgatatccgattgagtctcgtgatataccgagacgctcgaaatngaaaacaaaagcttgagcaaattcaaacgataataacttttaactcggatgtccaaatgaaacccattgtatatcgagatgctcgagattgaaaaccgaagctcgtagcaaatgcaaaccacaataactttntactccgatattcgagtgagtcccttattatatcgagacgcttgaaattgaagacagaagctcgtagcaaatgcaaaccacaagaacttttaactgggaggacgattgagtccggaatatatcgagatgctcaaaattgaaaacagaa

SEQ ID NO: 10705 - DNA, 428 bp, Glycine max
  unsure at all n locations
tcaagctagttntatccacatagtggatatcttcccattacaaacttgggagtttactcaataatcatccaaaaacactttttccaataatttagttttctcattgaatttcaatgcatttggttatatgaattaataaaggagaataaatgaaataagaaaaaaattattgtttgatttgtaaatgaaactgaaatgaaataaatgtttttaataagttttaatattgttttaagcaaaagtgtgggcaacaaaaggatatactttttagaataaaaaatacatttttttaatttgtcagtatatctttatgagcatttaatttgcaatattttgttctttaaggatatctaagttatttctattaaaaaaggatatctaagttatttaatgaacatacctcttctttttccttattcaactaaata

SEQ ID NO: 10706 - DNA, 378 bp, Glycine max
  unsure at all n locations
tcttacaagcatacggctntctggatgtagatgatgatatctatacagatggatcttatatatctatatatctatagatagatatatagatatagatatatagatatagatcatacaatgaagtaccgcacgagtgggtatataggaatccaaatctgccgaatcactcatgttatgatcttctacatcctaggtcttcccgttccttcatctggcttatgttcttcatgtagcattcagactgaatgactctatgaaattacgtcgctacttccacatggtacgggtaacgtaagagacatctctatttttcccggtgggaatccttagaattaccacagcttagctttcaattcgcctctgaccatcaaatgaaat

SEQ ID NO: 10707 - DNA, 414 bp, Glycine max
  unsure at all n locations
agcttgtgatttagttnttgatgcagcatgtgagggaaaacaattcttaattgttggtacaaaaaaaaaagcagcggattcagtagcacgggctgcaataagagctcggtgtcattatgttaataaaaagtggctcggcggtatgttaacgaattggtatactacagaaacacgacttcaaaagttcagggacttgagaatgcaacaaaagacggggagactcaatagttttccaaaaagagatgccgctatattgaagagacatttagctcatttggaaacatatcttggcggcattaaatatatgacggggttacctgatattgtaataatcgtcgatcaacaagaagaatatacggctcttcgagaatgtataactttggaaattccaacaatttgtttaatcgatacaaa

SEQ ID NO: 10708 - DNA, 404 bp, Glycine max
agcttggacttcctgtgttttgggaacctctccttcctcaggtgtacccaaacccaatcacctggttcaagcatgactttctttctgcttttgttggcttgccttgcatagctcgcatttttcttttcaatttgggccttcacttgctcatgcaacttcttcacatactcagctttagcctgtgcatccttatgcttaaacatagcaatgttaggcataggcaacaaatcaagaggagtcaaaggattaaatccatacactatctcaaatggtgaacaattagttgtgctatggacagcccgattataagcaaactcaacatgaggcaaacaggcttcccaagatttaagatttttctttaaaacagtcctaagcagtgtgcctaaagtcctattgactacctc

SEQ ID NO: 10709 - DNA, 363 bp, Glycine max
  unsure at all n locations
ngcacaatggaagcagagatgtctntctatttaggcatgataaccctcatcaattctgtcttaacagccctccctatctaccttctctctttttttagaatccctaaacaagtggtgcataaggtagtttctattcagaggaactttttgtggggaggaggttctgaggcagccaagataccgtgggtaaatcgggatattgtttgtcttcccaagaataaaggagggctggggattaaagatatgtccaagtttaatgaggccttgattggtaaatggggatgggacttggcaaataaccagaatcagctgtgggctacagttttgatgtccacatatggtgggtggaatgctttatgttat

SEQ ID NO: 10710 - DNA, 372 bp, Glycine max
  unsure at all n locations
agcttaataaatctatatatggtttaaaacaagcttctcattagtggtaccttaagtttcatgggataatttcttcatttggttttgatgaaaaccccatggatcaatgcatataccacaaggttagtgagagtaaaatatgttttcttgttttatatgtagatgatattttacttgcagccaacgatcggggtttgctacataaggtgaaacaatttctctctaagaattttgacatgaaggatatgggtgatgcattttatgtcatcggcattaagattcatagagatagatctcgaggtattttgggtctatcacangaaacctatattaacaaaattctagagagattttggatgaaagattgctcac

SEQ ID NO: 10711 - DNA, 384 bp, Glycine max
agcttagcaaatggacctgggtgttgcctagtttcatcatatcttccataatactcatcacctctatcatatctaataattttcacatttatctctaattgcccttttacttcattgtagtaaatttctaaagcatccattgcctaagaaatctcgggcagtaagtagacataactgtaacgtgaataatcatcaataatggtgataaagtatcattcctttccgaaagaactaacatcaaaaggtccacaaatatcagtatgcacaatttcaagaagctgagtgcttcttgtagctcctttctttgtatggtttgtttggtttcctttaatacaacccacacaaatatttagatcccgtaaatctagataaggaagaaattca

SEQ ID NO: 10712 - DNA, 449 bp, Glycine max
  unsure at all n locations
ctcaagcattgcataccccaaggatccattaggaaattacttgtgatagagagccattanggtgggctcatgggccactttgggatagaaaagacccttgtcttactcaaagaaaagttttattggccccatatgaagaaagatgtccataagcattgcactaggtgtgtggcttgtttacaagccaagtctagggtgatgcctcatgggctgtacacacccttacccatcccctctgcaccttgggtagacattagtatggactttgtctttgggcttcctagaacccaaagaggtgtagactctatctttgtgttggtggataggtttagcaagatggcacactttataccatgccacaaggtggatgatgcttcccacatctcanaactcttttttagggaagttgtgagactccatggtttgcctaggaccattgtatctgatag

SEQ ID NO: 10713 - DNA, 400 bp, Glycine max
agctttatatcataggattttaagtgattatgataattcctaataagcgagaacgtttagagtcagtgatcccagcctccctaatgaatggcacatataagttgggcttagtaaacgggtaacaggcacaatggaacattgatcactaatttttttcttttccattaatgctacaatcaacagtaacttatgcggcatatgacaaagagatccatacctgaatggctagaaatgcagccatgcaaatgcagttccctatcaagcacagaactccaagatgaaaatggtcaaaccaaagggtctgttaaccaccaattaatcattcacatggctctggctgacctttagcacttatttcatttgtgttacatgaatgaatttagcatattctatcaaagct

SEQ ID NO: 10714 - DNA, 391 bp, Glycine max
  unsure at all n locations
agctntagaactagcatgatatgccatgtattcttcatacacactttcaagatcaggagctctttcttcttcataattgaaattctgataccaggggacagatgtcgtaccggatgtcacgacatcacgcttcagaacatgcagattatatgtgtccgtatgaacagattaaacaagttaataacaccagagaattgtttacccagttcggtgcaacctcacctacatctgggggctaccaagccagggaggaaatccactctcaatagtgttagttcaaggtctaacagcccctgtttacaaccttctcacctaaccactacccgtgcgatctctacctaagagccactcttagatatgagaacctgcgctcactccctctcactcacac

SEQ ID NO: 10715 - DNA, 411 bp, Glycine max
agcttctgttttcaatttcgagcgtctttatatattacaggactcaatcggacctctgactcaaaagttattgtcgtttgaatttgctcagagcttctgttctaaattttgagtgtctcgatatgttacgtgactaaatcagacattcaagtgaaaagttatttcggtttaactttgcaacgagcttccgttttcacttacgagcgtctcaatttattacgggactaaatctgacatccgagtaaaaattaattgtcgttagaattttcttaaagcttcagttttcaattttgagcatctcgatttattacgggactcaatcagacgtccaagtaaaaagttattgttgtctgaatatgcactgagattctgttttcaattctgagaatctcgatatattacgagactcaa

SEQ ID NO: 10716 - DNA, 360 bp, Glycine max
agcttcaccggagagaatatcgcaaacctctacaggaactctgctcgtggattcgaggttattgacaacattaaatcagccgtggagaaagtgtgtccaggagttgtttcctgcgcagatatccttgccatcgctgccagagactctgttcagattgtaagtggtcaaacaaccaacaaaaacacattaaactaaatcattaaattgtacatatcaaaattaattaccaatttagtaccacacatgcaattaaagagaacattttgttgattttgatcaatatagcttggaggccctacatggaatgttaaacttggaagaagagacgctagaactgctagccaatctgctgctaacaat

SEQ ID NO: 10717 - DNA, 426 bp, Glycine max
tatagaatatataataaaagaacaatgacaattgaagagtctatacatgcttcctttgatgagtctaatgccattcttacaaggaaggattttttagatgatatttcagattccttagaagatacacatattcatggaaatgactctaaagaaaaagatgaaggaagcaatgaggattctcaagataatggggctagagcaaataatgaacttccaagagaatggaaagcctcaagagatcatcccctcgacaacattattggtgatatatctaaaggggtaacaactagacattctcttaaaggtttatgcaataatatggcttttgtatctatgattgaacctaaaaatataaaagaagccatagtagatgataaatggatcattgccatgcaagaagaactgaatcaatttgaagaaacaagt

SEQ ID NO: 10718 - DNA, 396 bp, Glycine max
tctgttttcaattacgagcgtctcgatctttacgagactcaatcggacatccgagtcaaaagttattgtcgtttgacttttctcagagcttccgttttcaatttcgatcgtctcgatatattacagggctcaatcggacatccgagtgaaaagttattgtcgtttgatttttctcagagcttccgttttcaattacgagcgtctcgatatcctacgggacacaatcggacatccgagtgaaaagttattatcgtttgaatttgctcagagcttcagttttaaattacgagcgtttcgatatattacgggactcaatcggacatccgagttaaaagttattgtccgttgacttttcttagagcttccgttttcaatttcgagcgtctcgatatatta

SEQ ID NO: 10719 - DNA, 343 bp, Glycine max
agctttgagaaaaatcaaactacaatatgttttaactcggatgtcctattaagccctgtaatatatcgagacgctcgaagttgaaaacggaagctctaagaaaagttcaacaacaataacttttaactcgaatgtccgattgagtcccgtaatatatcgaaacgctcgtaatttataacagaagctctgagcaaattcaaacgacaaaaacttttaactcggatgtccgattgagtcctataatatattgagacgctcgaaattgaaaacggaagctctaaaaaaagtcaaacgacaataactgttgactcggatgttcgattgtgtccccgttgatattaag

SEQ ID NO: 10720 - DNA, 415 bp, Glycine max
tgtagggccttgatcttcttcattaatagagtcttttgcttcttgaagatcaatggaagtggaatagagaaggaggaaaggtgattggagatgccacttcaaggagaagatgagtcaagaacaagctcactaccataggaagccatggataagagcttgaaggtaggagaaaatgagtggagggagaggcagagaggggggaacaaaatttatgcctcaaatgaggtcagaactttgaagtctaatttctcaaatgatcaaagttgaaaaaattcacacacaaggcctctatttatagcctaagtgtcacacaaaattggagggaaatttgaatttctattcaaatttatcttgaatttgaatttgaatttttggaagccaaattggagccaaaatttcactaattatgattagt

SEQ ID NO: 10721 - DNA, 321 bp, Glycine max
tctacattcaagttcgagcttttctatatattacgggatctctatcggacatccgagttaaaagttatagtagtttgaatttgctcacggcttccgtattccatttcgagcgtctcgatatattacgggactcaatcgtgcatccgaagaaaaagttattgccgtttgaatgtgctcacagcttcggcattccatttcgagcatctcgatatattacgggactcaatcatacatccgagcaaaaagttattgaaatttgaatctgctcacggccttggtattccatttcgagcgtctcgatgtattacgggactccatcag

SEQ ID NO: 10722 - DNA, 395 bp, Glycine max
  unsure at all n locations
tctatagaaggttcgttcctaatttctctacaattgcatcacctctcaatgagctggtgaagaagaatgtggcatttacctgnggtgaaaaacaagagcaagcctttactttgctcaaagaaaagcttactaaggcacctgttctagctcttcctgacttttctaaaacttttgagctagaatgtgatgcctctggagtgggagttggagctgtattgttacaaggtgggcaccctattgcttattttagtgaaaaacttcatagtgccaccctcaactaccccacctatgataaagagctgtacgccttaataagagccctccaaacttgggaacattaccttgtttccaagggaattgtcattcatagtgatcatcaatcacttangtacatt

SEQ ID NO: 10723 - DNA, 395 bp, Glycine max
  unsure at all n locations
cgcttattccatgcaactaatataatatgatagatttgacatatcaatatgataccaataaatatgcaaaataacaatatgatagcaatacatgatagatctgacataataatatgagtttgttagcacaaacacaggaataaagagaattctctcaaacaaaaagtaattggtacaaaaattcttatacatgtaacttccaaactaataaaggcttctctaatataatatgatagatttgacataacaaaatgataccaataaatctgcaaaacaacaatacgatacanatacatgatagatttgacataataatatgagtttgttagcacagacacaggaataaagaagaattctctaaacaaaaggtgattggcactgaaattcttatacat

SEQ ID NO: 10724 - DNA, 499 bp, Glycine max
ttgtatggtaggaggtgtaggacacctctatgttggttagagcccaaagaaggccttaccttagggccagaagtggtacaacaaaccaccgagaaagtcaagttaatccaggaaaggatgaggaccgctcagagtaggcaggaaatttatcatgataagaggaggaaagatctggaattcgaggttggtgatcatgtattcttgagagtcactccgtggactggggttggtcgagcattgaaatcccgaaaactcacaccttgctttattggtcctttccaaattcttaagagagttggccctgtggcataccaaattgcattgcccccgtctctttctaatcttcacaatgtctttcatgtgtctcaattccgtaagtatatccatgatccatcccatgtgattgaatgggatgatgtacaagtgaaggagaatttgacatatgaaacattgcctttgaggatcgaggataggcgaacaaaacacctatgagggaaag

SEQ ID NO: 10725 - DNA, 518 bp, Glycine max
agcttgctaggcttcaggaattctggtactttctgtccaggaaagccttcaagatgcaactttttcaatgttggaggcaaatcactgtaccttgtttcagacactccccatgatattttgagatgtttaagtgccgacaactctcccaagctttcaaactccccatctttgataacagcctcacttcctatatgtatgctgagtctccttagttctttcaaattctaaagatcagatattctgcagggagtctttctagaagtacttatgacaaatcccttgagaacttggagatttgtgagcttttcaatcccctttggcatgccctccaaaaagtaacactgggatacaatgagatgtgtgagatgtttcattgatgaaatataattaggcagtgtttccaagttgtggcaagctttgagatcaagaatttctatgctctcaagttgagcaatggacggtggaagctcagatattcttgatatcccacgaaggctaagataaaacaacgtctttag

SEQ ID NO: 10726 - DNA, 487 bp, Glycine max
tgccgccacggagttttccgactatgctcttgtgtggtggaacaagctacaaaaggagagagcaagaaatgaagagccaatggttgatacatggacagagatgaaaaagatcatgaggaagcggtatgtgccggctagttactcaagggacttgaaattcaagctccaaaaactaacccaaggcaacaagggggttgaggagtatttcaaggaaatggatgtgctcatgattcaagcaaatattgaagaagatgaggaggtaactatggctcgatttcttaatggtttgactaatgatatccgcgatattgttgagctgcaggagtttgttgaaatggatgatttgctttacaaagcaatccaagtggagcaacaattaaaaaggaaaggagtggcttacaggagttttaccaactttggttcttctagttggaaagacaaaggtaagaaagatgggggctggtacttctagtagtttcacacctta

SEQ ID NO: 10727 - DNA, 541 bp, Glycine max
  unsure at all n locations
agcttgccgccacggagtttccgactatgtttttgtggggnggaacaagctacaaaaggagagagcaagaaatgaagagccaatggttgatacatggacggagatgaaaaagatcatgaggaagcggtatgtgccggctagttactcaagggacttgaaattcaagctccaaaaactaacccaaggcaacaagggggttgaggagtatttcaaggaaatggatgtgctcatgattcaagcaaatattgaagaagatgaggaggtaactatggctcgatttcttaatggtttgactaatgatatccgtgatattgttgagctgcaggagtttgttgaaatggatgatttgcttcacaaagcaatccaagtggagcaacaattaaaaaggaagggagtggctaagaggagttttaccaactttggttcttctagttggaaagacaaaggtaagaaagatggggctgctacttctagtagttccacacctatcccatcaaaaactcgcttagagtcccaagaggaaccctttaaaagggggggg

SEQ ID NO: 10728 - DNA, 307 bp, Glycine max
tgtagggttaaagtctcacgattgtttcgtgctcatgccacaattgttagttgtggctatacgagacgtcttgccaaacaaagtcaggttaacgataactcgcctatgctttttcttccattctatatgtagcaaagtcattgatccagtcatgtttgatgagttggaaaatgaggcccaaattatactgtgccagttggagatgtattttccccctgctttttttgacatcatgattcacttgattgtgcatctgatcagagaaatcaaatgtttgtggtcctgtttatctaccgtggatgtacct

SEQ ID NO: 10729 - DNA, 524 bp, Glycine max
aagcttctggtgggacagtctagacttgcgttttctatctgacattcaccacagattctgccttcttctattttcagattgggaatgcctctaacagcacttttgtcaaggattttcttcatgcctcttaagtgcagatgtccaaacctttgatgccatattctgacttcatcttctatggtggatagacatgtggaggagtagctggtttcttggggtgtccataggtaacaattgtcctttgatctgctgcccttcattagaacttcactcttttcatttgtcaccaagcattctgactttgtgaagattacattgaaaccttcatacacagctgactgaagctatatatgtttgcagtctgttccctttaccagcactactttgttcatactatgaagtccatcctcaactagcttttccattccaatgaactttttctttatagccatctccaaatgtcacattactagtgtgaccgggctcaatgtttataaaggaatcttttgactccctgtctgtgt

SEQ ID NO: 10730 - DNA, 444 bp, Glycine max
agcttgaaggtaaactagaggccacggtttatctggtgagccaactggccatgaaacaaaaatctgcacctgacgccacactctgcggattatgcccctctgccaaccaccacacagatctttgcccatttgggcaacaatctgaaacaattgaacagcctgaagcttatgctgcaaacatctaaaacaaacctcctcaacctcagcaaccaaatcagccacaacacaacaataatgacctctccagcagcagggacaatcccggggggaggaatcatcccaaccttaaaagggcaaatccttcacaacaacagcgacaacaacaaccacaacaccaaccctattttcagaatgttgctggcgcccagcagaccatacgatcctccaccaaaccagcaacaacaacaaccacagcctcaaaaacagcaaacagctgagagctcc

SEQ ID NO: 10731 - DNA, 417 bp, Glycine max
ttcaaaaaacgtcgatgccaagtgtatactttttttcttccatgttttagttgtacatagcttgtgtcttcttcatagatagggcatgcacaatggcccttaacactgtatccactcaaattctcacatgctggaaagacattaatggtacaaaataacattgcacacaactcgaatgtcacattttaatacccatcaaacacagcaaccccctcgtcccacaactttgtcaagtctttaatcaagggactgagataaaaatcaatgacattttctggttgtcttgggcccgatatcatcatagacaacataatgtatttttgcttcatgcacaaccaaagaggtaagttgtaaattactaacaaaaaaagccccaaactgtgatgagtgtttaaactcccataccgattctttcca

SEQ ID NO: 10732 - DNA, 406 bp, Glycine max
tcggtatgcaattttgagagtctcgatattttacgggactcaatcagaaatccgagcagaaaagttactgtcatttgaatttactcagagcttcgataatcaatttcgagcctctcgatatattacaggactccatcagacacccaagtaaaaaagttattgtcgtttgaatttgctcagagcttcagtattcaatttcgagcgtctcgacatattacgggactcaatcaaacatccaattaaaaagtaatggtcattggaattggctaaaaccttgggccttaaattccaagcgtttcaataattaacggaattaatcctaccatccgagtaaaaacttattttcgtttgaatttgttcaaagcttcggtttttatttccaaagagttggatatattatggggct

SEQ ID NO: 10733 - DNA, 525 bp, Glycine max
agcttctttgagaaaacttccttgagtttctagagcttagctacacacacccctctcataactaagctcacctccttgagaagcttccttaagaagattcataaacaagttagagcttagctacacatacctgtctaatagctaagctcacctccttgagatgagaagctagagcttagctacacaccccctataatagctaagctcacccccatgacaaaaaacatgaaaatacaaaaaaaaagtccttactacaaagactactcaaaatgccccaaaatacaaggctaaaacattatactactagaatggccaaaatacaaggcccagaggaaggaaaaacctattctaatatttacaaagataagcgggctcatacttagcccatgggctcgaaatctaccctaaggctcatgagaaccctaggaccttcccttggatctctagcccaatcgacttggagtcttctacccaatgcccttgcggggtaggattgcatcaaataggtaaaaagcgttgggtctt

SEQ ID NO: 10734 - DNA, 260 bp, Glycine max
tcttacaaagcatacggctttctggatgtagatgatgtatatctatacagatggatcttatatatctatatatctatagatagatatatagatatagatatatagatatagatcatacaatgaagtaccgcacgagtgggtatataggaatccaaatctgccgaatcactcatgttatgatcttctacatcctaagtctttccgttccttcatctggcttatgttcttcatggagcattcaaacggaatgactctatgaa

SEQ ID NO: 10735 - DNA, 499 bp, Glycine max
agcttcaagagtatttaattataagattttgatcaataatttcattttttatttcactggtaagtaatttcatagttgattaaaaacattaagatttcataaagtatactaaattaaatattgaataatataagttgtgtacgtctaaaaccttagagttgttgtcacggctttgcacttaaaaaagataaagataatggatgcaagtaaggagatataggtacccaacaagtaaagaaatggaaattggagttattacgtgcaaaaattactggtcggatagttattttttctttccaaatgcgagtacaaaaataaatactatggtactttattcaaacctttttcatgttctatccagcttattttaggaattacaaatttgtgatcaattataaatagaagatcaatgtgaaccagacagaaataaatagaacatcatgaaaaaaatcgaaatctatagaggatcaatattttagagtaattttgattactagat

SEQ ID NO: 10736 - DNA, 317 bp, Glycine max
tcgtgaagcaagctccaatgatgcaagtttcgtgaatctaagtgagatgcttatgtccacatctaataatattgtgtggaagtgtgctcttggaaagaactttacaagaaaatggtacaacagtgtgaaaaatttagcgagggaggctatgattcatcttacagctttcacagtgagagattacttcccatggttgggttggattgatgttcttactggaaaaattcagaaatacaaggcccctgcttgagcaatggatgctttgtttgatacggcaattgcagaacatttggcttgaaaaaaggaaaggtcaacac

SEQ ID NO: 10737 - DNA, 455 bp, Glycine max
agccaaatctagatatacctcagaacaatatatttttgtcaccacgagatatattgacagcggcggatcatctgattggaacgaaattcggaaagggtatacttgacgatataaatcatttgaaaaataaacgtattcgttcggcaacaaatctattacaagatcaatttggattggccctggttcgtttagaaaatatggttagaggaactatatgtggagcaattagacataaattgataccgactcctcagaatttggtgactacaactccattaacaactacttatgaatctttttttggaatacatccattatctcaagttttggatcaaactaatccattgacccaaatagttcaatgggagaaaattgagttattcgggccccggaggaatgaccgggcgaaccgctagtttctggatacgaaatatccaccctaatcactatggacg

SEQ ID NO: 10738 - DNA, 519 bp, Glycine max
tgccttgccccttgatatattagttggactcttttttcactatgaatgacaaattccttgggataaaggtagtgttgccatgtttttaaaatccgtactaaggcataccaactccttatcataagttgaattagttaagggtaagaccacttaacttttcactaaaataagcaattggatggccttcttgcatcaacacagccccaatcccaacatttgaagcatcacactccatttcaaaagaatttttgaaagtttggcaacgcaagtatgggggcattaattagcttttgcttaaaaacattgaaagcttcttcttgtttctctccccatttgaaacccacatttttcttgagcacttcattgagaggtgctgccaatgtgcttaaaaccttcacaaaatctttataaaaactttcttaaccatgaaaaacttctcaccctcggtcacagactttaggtgtaagccattttttgaataagcccctaaccttcttcttattaaacttgcacttcctt

SEQ ID NO: 10739 - DNA, 492 bp, Glycine max
tcatgatgaatcaagattgattcaaagatgttttgatgataacaaagatgatgacaaaggtgatgaaaaaaagctcaaaggtcaatcaaagaatgagttcaagattcaagactcaagattcaagaatcaagagaagacttaatcaagataagtatgaaaaggttttttcaaaaactaagtagcacatggattttttctcaaaacatgtttaccaaagagtttttactctctggtaatcgattaccagattgttgtaatcgattaccagtagcaaaatcaatttgaaaaagttttcaaatgaatttacaacgttccaattgatttcaaaaaagttgtaatcgattacaatgttttggtaatcgattaccagtgtctttgaacgttgaaattcaaattcaaatgtgaagagtcacatcctttcacataaaagctttgtgtaatcgattacactgatttggtaatcgattaccaatgattgcttctgaataaatc

SEQ ID NO: 10740 - DNA, 509 bp, Glycine max
agcttttcatttgatccagcagaggaggtttatacaacctatttcactcaagtcacacccacggaactctggcacaagagacttggccattgccatcttgaaagaatgctaaacatgaaaaaaaaggaaatatgcgaaagaaaatttgaagaagtttcaaatggaggaatgcaaatctattatcacaccaatgaatcataaggagaagtttaccaaggaagaaggtgtttataacattgatgaggatattatgggagctcgattggatgtctaatgtatctcactacaacaaggccaaacattctattttctcaaaagaacaaaactagaatttttgttgacaatcaagtagccattgctattgcaaacaatcccgtgtgtcatgggaagactaaacatttcaatatcacggtctattatttgataaaaatgcaacaaagtggagaagggaacttaatttactgcaagtctaaagatcaactggctgacttgtttacaaagtcactacc

SEQ ID NO: 10741 - DNA, 269 bp, Glycine max
tgaatcggacctgagtgtgaaaagttatgtccatttgaatttctcgaaagctttcgttgttcaatgtcgagcatctcgacatattatgcgctcgaatcgaacatccgagtgaaaagatatgaccatttgagtttctcgagagcttccggggttcaattccgagcctttcgacatattatgtgcccgaatctgaccttcgtgtgaaaagttatgaccatttgaatttctcgagagcttccgatggttaatttcgagcgtctcaatatatt

SEQ ID NO: 10742 - DNA, 391 bp, Glycine max
ttgtaagggtaaagtctcaccaatgttacctgctcatgccacaattggtagccgggggtatacgaaacattttgcccaacaaagtcagggtagcgataactcgcctgtgctttttcttccatgctatatgtagcaaagtcattgatcctgtcaagtttgatgagttggaaaatgaagccgcaattatactgggccagttggatatgtattttccccctgctttctttgacatcatgattcacttgattgtgcctctggtcagagaaatcaaatgttgtgggcctgtttatctacgggggatgtacccggttgagcgatacataaagattttaaaagggtataccaagaatctatatcattcagaaacttttattgttgagaggtacatttg

SEQ ID NO: 10743 - DNA, 497 bp, Glycine max
agctttgcagtagatgccactctactctaaattttttaaagatatgttaacaaggaagcataaatatattcatcaggaaaacatcatagtggaaggaaactgcagtgttgtaatctagaagatccttccactcaagcataaagatcctgggagtgtaactattccttgttcaattggagaagttaatgtgggaaaatctcttattgacctcggagccagtatcaatttgatgccactctccatgtgcagaagattgggagagttggaaataatgcccactcgaatgactttacaattagctgaccgctccattaccaggccatatggagtaattgaagatgttttggtcagagtaaaacattttatcttcccggtagactttatggtaatggatatctctaaagatactgacatccctgtaatattgggaaggccattcatgttgaccgcaagttgcatatttgatatggggaaaaagaagctggatgtatgttttg

SEQ ID NO: 10744 - DNA, 374 bp, Glycine max
tcttatccaaggctcatcttggtggtgtattctccttcttccatggcttattccctagtggatggtgcctcctctcacctcttttcctttttcttccgctgcatccccatggtggaaaatcaccattaaaggacctcattgaagctcaaagatccagcctccatagaagccccacaagcaagcttccatcagaatgttcgaatgcggcccataataaattgaaacactcaaaattgaacacgaatgctccaagaaaattcaaatggccatgacttctaacttcgtatccgattgcaacccataatatatttagacgctcaaaattgaacatgaaaggttcgagcaaattcaaatgaccataactcttactttcg

SEQ ID NO: 10745 - DNA, 444 bp, Glycine max
agcttttcttttagcaaagcaaaggcttgctcttgtttttcaccccaggtaaatgccacattcttcttcactagctcattaagaggttatgcaattgtagagaaattatgaacgaaccttctatataagcttgctaacccatggaggctcctaatatctcccacactttttggggtgggccattcttggatggccttgattttctcaggatccacttggaccccatttctaccaactacaaaccctaagaaaactatattatctacacaaaaagtacatttctctatatatgcatagagggtgtttttcctaaggactgaaagaactttcctgagatgtccctagtgatcatctaagctcctactggacactaaaatatcatcaaaataaaacactacgaatctacctatgaaatcccttagacatgatgcataacccccataa

SEQ ID NO: 10746 - DNA, 508 bp, Glycine max
  unsure at all n locations
agctttgccgtagatgccactctacttttttttttttaaagatatgataacaaggaagcataattctattcatcaggaaaacatcatagtggaaggaaactgcagtgttgtaatctacaagatccttccactcaagcataaagatcctgggagtgtaactattccttgttcaattggagaagttaatgtgggaaaatctcttattgacctcggagccagtatcaatttgatgccactctccatgtgcagaagattgggagagttggaaataatgcccactcgaatgactttacaattagctgaccgctccattaccaggccatatggagnnattgaagatgttttggtcagagtaaaacattgtatcttcccggtagactttatgggaatggatatctctaaagataccgacatccctgtaatattgggaaggccattcattgtgaccgcaaggtgcataattgatatggggaaaaagaaactggatgtctgttttgaagaataaaaa

SEQ ID NO: 10747 - DNA, 379 bp, Glycine max
agcttcggttgttcaacttcgagaatttcaatatattatgtccctaaatcgaacatccgtctgaaaggttaagaccattcgaatttctcgagagcttccgttgttcaattttgagcgtctcgatatattatgtccccaattcggacatccgtgtgaaaaggtatgaccattcgaatttctcgaaagcttcatctgttcaattttgagcatctcgatatattatgtccatgaatcgggcttccgtgtgaaaagtcttgaccattcgagtgaaaagttatgaccatgggaatttctcgagagctttcattgttcaatttccaaccgtttgatttattattgttcctgaataggcattctacgcgaaatgttattaccattt

SEQ ID NO: 10748 - DNA, 470 bp, Glycine max
agcttgctaacccatggaagctcctttttttttccacactttatggggggggccattcttggatagccatgattttctagggcccacttggaccccatttctaccaactacacacacctaagaaaactatataatctacacagaaggtgcatttctctatattagcaaacagggtgtgttttcctaggactgaaagaacttgtctgagaatgcctaagtgatcatctaggctcctactatacactaaaatatcatcaaaattaacagactacaaatctacctatgacatcccttatgacatgatgcatacgcctcataaacgtgcttggtgcattagtgagcccaaaaggcatcactagccattcttacaaaccaaacttggtcttgacagcattttttcactcatcaacctgtttcatcctgagttgggcgataaccacttttaagaacagatttttgaaaagaaattg

SEQ ID NO: 10749 - DNA, 487 bp, Glycine max
agcttaatgtattttgtgagcatcaaatgtctaaatgattcttataacttcaagtctagcaacatgaacaaaggtttcagagaaatctataactttttgttgattatatcctcaagctactaacctagctttgttgcatactacttttccttgttcatccaacttgtttctgaagattcatcttgttccaatggtgctcttgttttctggcattggaacaaatgtccagacatcatttttgttaaactgattcagtttttcttccattgtgattatttagtcattttctatcaaagctttgtctatagttttaggtttgatttcaaacacatggtctttgaatgatgatctaaatttaactccttcagtctaatctcagatgatatgatcttatggatgaaatgaaccaaattccaaaccttcatttgaagtggttgatctgatgattcttaaatcaaaatgaaatattcttcagactatttgactt

SEQ ID NO: 10750 - DNA, 445 bp, Glycine max
taacaaaaggcatgcgaagtgggtggaattcctatagcaattcccttatgttatcaaacataaaaagggaaaaggtaatattgtagccgatgctctttctcggcgtcatgcattactttctatgcttgaaacaaaattgattggtcttgaatgtttgaaaagcatgtatgaaaatgatgaaacttttggagaaatttttaaaaattgtgaaaatttttcagaaaatggtttctttagacatgaaggctttcttttcaaagaaaacaaattgtgtgtgcctaaatgttctactagaaaattgcttgtttgtgaagcacatgaaagaggtttaatggggcattttggggtccaaaaaactctagaaacattacaagaacatttttattggcctcatatgaaaaaaaaagtgcaaaaaatttgtgaacattgcattggatgtaaaaag

SEQ ID NO: 10751 - DNA, 510 bp, Glycine max
tcagaaagctttttatggacttaaacaagctccaaagcaatggtgtaggacttagccacttccttcttgaacaaaatttcgagagaggacaagttgataaaatgttttccattaagaagtcctctcataacactctactcatgcaagtttatgtggatgacataatttttggttgcactaacaaatctctttgtcaagattttgtgcacaagatataaggagagtttgaaatctcaatgatgggaaagctaaattactttcttggtctttaagtgaaacaaatggaccgtggaacatttctccatcaagcaaatactgcaagtaacctctcaagaagtttgagatggaaaaaaaaaagcaaggaggctgcaactcctatggttactagttgttaccttagtgtggatgaaaaaggaaagccaatcaatcaaataaggtatagaggtatcattggctccctactttacttaactgcaagtagtttggacatcatgtttaatgtttgcatgt

SEQ ID NO: 10752 - DNA, 435 bp, Glycine max
agcttttaatggaagtcatgaaaattatggcccctcagaagcattaactggaaaccaagttcatgatcgcgtaaaggaaattgtaaccgtgtttggcaagtcccagaagaagacatcatctcccaacaacatgtggaagaaatgctcaatatttttgatcttccatactggtctgatctatatgtgcactgtctagatgttatgcatgtggagaaaaatgtgtgtgatagtttaattggtactcttcttaacattaaagggaagacaaaggatggtttgaaatttcgtcaagacttggttgacatgggaatacgagagcagttgcatcccatatcacaaggtcggcgaacatatttacccccagcatgccacacactgtcaacaacagagaagataagtttttgtccatgtctgtggaatctcaaagttccacaa

SEQ ID NO: 10753 - DNA, 415 bp, Glycine max
  unsure at all n locations
acgtgcctcatgcaacaattgatattcgtggctatacgaaacatcttgccaaacaaagtcaggttagcgataactcgcctgagctctttcgtccatgctatatgtagacagtcattggtccagtcgtgtttgatgaaatggaaaatgaggccgcaattatacaaagccagctggagatgtattctccccctactttctttgacatcatgattcacttgattgtgcatctggtcagagaaatcaaatgttgtggtcctgtttatctacgatggatgtacnccggtgatcgatacaataagatcttaaaagggtatacaaagaatctatatcgtccagaagcatctattggtgagaggtacattgcagaagaangccatggaatttgttcataatacttagagaaggctaaacatgt

SEQ ID NO: 10754 - DNA, 375 bp, Glycine max
  unsure at all n locations
agcttgtctctcaacactacanagctattcacctttaaatcctttgtaaaaatatctgccagctgcatttcagtgctgcaatacctcaaatccagctgcttcttgctcaccttttccctcagaaaatgaaatctagtctcaatatgttttgatcttccatgtgctactggattcatggccaaactgatagtagatttgttgtctacatacaatctaactggcctctgaatntccaccttcaattcttcaagcaaggagtccaaccacaaggcttgacatgcagcatagcaagctgctatgtactctgcctcacatgaggataaagccaccacttgctgtttctttgaacaccagcttattgatgtacccagaaac

SEQ ID NO: 10755 - DNA, 313 bp, Glycine max
ataactgaatcttagttctcttagacttattttttatcagctggctgatcattataattaatgaactcagtggcaatctctttggacagtagcttctctcgaataaagtgacagtcaatctctatgtgcttggtcctctcatggaagactgggtttgaagcaatgtgaagagcagcctgattatcacaatataacttcatttgcaccactttgcagaatttcaactcttccagaatttgtttaacccacataagttcacatgtaaccatagccatagatctgtatacagcctgtgctctagatctagcaacaa

SEQ ID NO: 10756 - DNA, 276 bp, Glycine max
tcattttctataggttactactgtgatgaacgtttatgttatataatccctatggaagcagggcacatttttgtgggtagaccatggctatttgacaagaaaagtatccaccatggtctccccatgaaatacccttacccatggaagcaaaaagttctaccttgttcccttgacaccttcacaagtggctagggatcaagtacaaataaaactcatataggatgaggtatagaatagaataaaaaagaagacctactctatggagaggaggagtgt

SEQ ID NO: 10757 - DNA, 367 bp, Glycine max
agcttgtttgcagacatagcctttttggtgtttatgccaccaccggagacatcatcggcagcggcagcggtagcggagagcaccatatccgggtggatggagccatccatggagaggctgtgttggtgtccaaccctagtaggcctttcattattattattattattcttattattattattattattattattagcaatgctgttgtgttgaggtggaggaggaagaggaagtggagaggaatcgagttgatcgaattgaaggtagatggaaagcaagtcgttgtcatcggggagatcaacgtcgaatgtgaggtcggctggtaaggttataatctccgaatgggcgcgcctgtgccctctgttct

SEQ ID NO: 10758 - DNA, 389 bp, Glycine max
  unsure at all n locations
ttaagtatgtatggcaaaactttattactggtgttcaagacatacaagtgagcttgtaacaaatgttctacacttggagtgatcacatgccagccttttgaacctttaccacgcactctatcatcatgccgagactcaggaagaccaacaggtttagtcttctctaagtattctgaacaaaattcaatggcttcttctgtaatgtacctctcaacaatagatgcttctggacgatatagattctntgtgtacccttttaagatcttcatgtatcgctcaatcgggtacatccaccgtagataaataagaccacaacatttgttttctctgaccagatgcacaatcaagtgaatcatgatgtcacagaaagcagggggataatacatcta

SEQ ID NO: 10759 - DNA, 426 bp, Glycine max
tatgctgcaaacatttacaatagaccttctcaacctcagtagcaaaatcaaccacaacagaactattacgacctctccagcaacagatacaaccctggatggaggaatcaccctaatctcagatggtctagccctcagcaacaacaatagaagcctgctccttccttccaaaatgctgctggcccaagcagaccatacattcctccaccaatccaacaacaacaatagccctagaaacagccaacagttgaaggtcctccacaaccttccctcgaagaacttgtgaggcaaatgactatgcagaacacgcagtttaaccaagagaccatagcctccattcagagcttaaccaatcagatgggaacaatggctacacaattgaatcaataacagtcccagaattctgacaagctgccttcccaagct

SEQ ID NO: 10760 - DNA, 414 bp, Glycine max
  unsure at all n locations
aagcaagaaattaggtgcatatagagttacatacgtcttggaattgatacatacggacatttgtgggtcatttcatacatcttcatggaatggtcatcaatattttatatcattcatagacgattactccaaatatgcatactntatttcttatacatgaaaagtcacaatctttggatgtgttcaaaacatttaaagttgaagttgaaaatcaactcaacaaaagaatcaagagtgttagatctgaccgtggtggtgaatactatggttgatatgatggttcangtgaacaacgtccggngccttttgccaagtacctagaggaatgtggaatcgtcccacagtacaccatgtcagggtcacctagcatgaatgatgtggctaaatgacgaaacaaaactcttaaggatatgg

SEQ ID NO: 10761 - DNA, 410 bp, Glycine max
agcttacttggaaatcattaggtggaacctcttaagttgtgtgagcactatgtctataggaagaaccatcagatgaaactcccaacagttgtgcacactataaaagccatattgggctatgtccattctgattactaggggccttcgagagttccatcactaggcagagcaaggcacttcttctccagcaacgatggttactccaggatgacatgtgtatttacgataaaacaaaaatctgaagctttcaaatgttttaagcattggacgattgttatgaagaatcaaacaggaatgacaatgaagtttcttaggatggacaatggcttggaattttgttctacaaaaatcaatgagttatgtaaagatgaaggcatggcaagataatgtatcgtatactatactccaca

SEQ ID NO: 10762 - DNA, 311 bp, Glycine max
agcttatagatgaactacatctgtatgactcttacggatgaagttcatccgtatgaagcatacagatgtagtacatccatatgcattggttttcttccagaatatttattaaattttgaaaacattagatgtaataacattattaatatgtttaattcttattacatatttttgaaattgtggataatttatctattacaaattatttatagtgtaagtaaaagattaaattatttaggtacaataattgaatttattttaactagtaaaatgtctaattacgtgttagttatagttttctatgttttttt

SEQ ID NO: 10763 - DNA, 409 bp, Glycine max
  unsure at all n locations
acttagttaaaatatctgttggctggtcanttataatgatgaactcagtgataatctccttggacaatagtttctctcgaatgaaatgacaatcaatctctatatgtttagtcctctcatggaagactgaatttgaggcaatgtgaagagctgcctgattatcacagtacaacttcatttgcaccacctcacaaaatctcaactcttggagaaagtgtttaatccacataagttcgcatgtaaccatagccatagatcgatattcagcctctgcactggatcgagcaacaacggtttgtttcttgctcttcctatagataacatttcccccaataaaaatacaatatcctgaggtagatctcctgtctatgggacaagcagcccaatctgcatcacaatatccagagac

SEQ ID NO: 10764 - DNA, 469 bp, Glycine max
  unsure at all n locations
ctcgacccggatctgtaacctcctgacgctgcagcttacaaggacccgaaatctttaaggagcctcagagtacaatcatgtattgaccccccctcctagctgctccaagtactaagcataatatcgtttgacaatatcaacgttcatgggtgaagtcaactcttcatcatccatgctggcaagcaccagtgctcctcctgagaatgctttctttacgatgaaaggccctttatagttnggagcccactttcccctattgtcctttagggcttgggatactttcttcagaacgaggtccccctagttgaatttgcataggcataccttcttgttgaaagcattcttcacccatctctggtacagatgcccgtggctcatagccgccagacgcttgccttctataagattgagctgattaaagcgtgcttgggctcactctgattcttccaacccggactcttgcagaatc

SEQ ID NO: 10765 - DNA, 426 bp, Glycine max
  unsure at all n locations
agcttgtttaccccatgtttgagttgcttacaatagagttgttcatagcaccactaattattctccttttgaagttatttatggttntaacccactaactcctcttgatcttttgcctatgcataatgtttctgtttttaaggataaagatggtcaagcaaaggcagactatgtgaagaagcttcatgagagagtcaaaaatcaaatttagaggagaaataaaagttatgctaaacaagccaacaaagggagaaagaaggttgtcttctaacctggagattgagtttgggtgcacatgagaaaagaaaggtttccagaacaaaagatatcaaagcttcaaccaaggggagatggaccatntcaagtgcttgaaagaatcaatgacaatgcttacaaagttgagctctccggtgagtataatgttag

SEQ ID NO: 10766 - DNA, 417 bp, Glycine max
  unsure at all n locations
agctttctcaagctggattctagattgtagcatagctgcattaagaaatagtaataaataagcaacatttagtattgttcccatggttccagtaggcagcctatatatgatattatatcaaattatacctcttcccaagcggaattttctagacggagatatatagttaatatgatacagcctggccttatatagctctctatctctgtgggactgtgggataaccagttaaggatctggtaatcaaagaaaaacataaataaaacaccattcaaaaaacagtgtagtgaaatagtttatagcaatttcaaggcagcaatgaagtacctgtgatcggagagcatggnggaaatcatttggagccttgccaaatagtttgaaaacaattcgatctgtacgactctgtaaacagaaagc

SEQ ID NO: 10767 - DNA, 438 bp, Glycine max
taagtctacctgcggcatgcaagcttctattttaattacgagcgtctcgatatattacgggactcaatcggacatccgagtaaaaagttattgtcgtttgaatttgcttagtgcttctgttttcaatttcgtgcgtctcgatatactacgggacacaatcggacacccgagttaaaagttattgtcgtttgaatttgctcagagcttctattttaaattacgagcgtctcgatatattacgggactcaatcggacaaccgagtaaaaagttattgtcgtttgaatttgcttagagcttctgttttcaatttcctgcgtctcgatatactacgggacacaatcggacacccgagttaaaagttattggtcgttgaatttgctcagagcttctgttttcaattacgagcgtctcgatatattacgggactcaatcggaca

SEQ ID NO: 10768 - DNA, 402 bp, Glycine max
tcaaccttgttgggatgggtggtgctgcttgttttacagctattgatcttgcgagagaccttctggatgcttatccaagaacttatgcacttggagtgagcacagaagcatgtagctcaacatggtacagtggccatgataatggcatgctgcttcccaatggcttgttcagaatgggagctgcaaccatcatgctctgaaactttcacctatatagatggtgcgccaagtatgaactcaaacacgcatttctcgatcgaatttgactcctctaaagtgaaatgagaaagcaattatatgtggactgtacttcctactccaatttaaaggaaaaaaacttatcagcagttctttgtgttggtattctctaattagaagaggagtgttatcttactaatctat

SEQ ID NO: 10769 - DNA, 397 bp, Glycine max
gcttagctctagaggggatggaccttttattgtttggagaggatcaataacaatgcctataggttggatctcccagaagagtttggagtcagcaccacttttaacatttctgatttaattccttttgtaggtggagctgatattgaggaggaggaactaacagatttgatgtaaaatccttttcaggggaaggggataatgcaatgctccctaggaaaggaccagtcactagagccatgagcaagaggctccaagaggattgggctagagctgctgaagaaggccctagggttgtcatgaacctcagggtagatttctgagcccatgggccaagtttgggtccaattctctttgtacatattagactaggatgtcattatatttgatcattgtattt

SEQ ID NO: 10770 - DNA, 385 bp, Glycine max
  unsure at all n locations
agcttgccaccacggagttntccgactatgctcttgtgtggtggaacaagctacaaaaggagagagcaagaaatgaagagccaatggttgatacatggacggagatgaaaaagatcatgaggaagcggtatgtgccggctagttactcaagggacttgaaattcaagctccaaaaactaacccaaggcaacaagggggttgaggagtatttcaaggaaatggatgtgctcatgattcaagcaaatattgaagaagatgaggaggtaactatggctcgatttcttaatggtttgactaatgatatccgtgatattgttgagctgcaggagtttgttgaaatggatgatttgcttcacaaagcaatccaagtggagcaacaattaaa

SEQ ID NO: 10771 - DNA, 287 bp, Glycine max
aatacaagattatttcaaccaacaaagtcttgattcaagatttcttcatgatcaagccttgccgcaaaatgaaaagaattcaagtcatccaaagcacatgtaatcgattaccaatacatgtaatcgattaccaaagaggattttcaaggaatatcgccaacagtcacatcttatcattcggattttaatggccatcaaaggcctatatatatgtgtgacttgggacgaaattacagagagtttgcttggcaaaatgtttatcctctctcaaagaaatgaagagattc

SEQ ID NO: 10772 - DNA, 395 bp, Glycine max
agtctcatgattgtctctgtgctcatgcaacaattgttagctgtggctatacgagacatcttgccaaacaaagtcaggttagcgataactcgcctgtgctttttcttccatgctatatgtagcaaagtcattgatccagtcatgtttgatgacttggaaaatgaggccgcaattatactgtgccagttggagatgtattttccccctgctttctttgacatcatgattcacttgattgtgcatctagtcagagaaatcaaatgttgtggtcctgtttatctacggtggatgtacccggttgagcgatacatgaagatcttaaaagggtatacaaagaatctatatcgtccagaagcatctattgttgagaggtacattgcagaagaagccattga

SEQ ID NO: 10773 - DNA, 474 bp, Glycine max
tatacaagaatgaagctccgataccactagttaaacatgtggccttagatatcttaagaatatggggttgaattaagatatcaaagactactcccctattaaaattgtaactatctatctgaattattaatgcacccttaatttgaattactaaaaagacaattcaaagtaaacttctttaatgcaaaagataaataacaataaatgaaagaagtttaatggaagagagaatgcaaacttagttcttatactagttcggccacgccctgtgcctacgtccagtctccgagcaacccgcttgagatctccactatcttataaaatgtcttttacaaagtctgaaccacacaggaataacccttcccttgagtatagaattccttagaacttaagagatcctcggtcccttaatcaatctcttgaatatgaagaagaagaagaagaagaattctctccttaagagaaagatattac

SEQ ID NO: 10774 - DNA, 448 bp, Glycine max
  unsure at all n locations
ttcagtactcctaacattcagaaagagaaacaatccttcactgttccaaacttataaattataatatttagctaacttataagataattttaccaatacatcctagattatttgtncttaatttttattaaacataagagaacccatatatatattgtcaaaaagactacatatatngacaaaaaatgcccaatatatatgactnttatctaaaataataataataatactgtttctttaaaattcactttaaatctcatatatttatcccacaattagatttcttcaaatctgatggaacttttgttaaacacagttgttggtttggttgtctcttaaaagatgaaaatgtagatataatatttaggtaatgaaacatagctacaactcactgtatctttattataaataaaagcaaaagttgagagtaagaatagtgggtctaaaa

SEQ ID NO: 10775 - DNA, 216 bp, Glycine max
cagcataaccatgtatgtcaagccttacatggttgtagttcagagtaacaatgtgtctgctgaccaaataggccttgcataaaaggttagctgcatttattcttcatgttggctatttttcagttcaattataggaaaccagtggattattattatctggaatgtagattgaaaagcatgagcttctaagataagacgtgttactactttatatta

SEQ ID NO: 10776 - DNA, 470 bp, Glycine max
  unsure at all n locations
ctaagcttccaagttttaagttcttcctcataactgtcctaagcaaagttctcaaagtcctattaacaacttccgtttgcccatcggtttgtgggtgacaagtggttgaaaataacaatttagtgcccaacttgctccacaaagtcctccaaaaatgacttaggaacttagagtccctatcactaataatgctccttggcaaaccatggagtctcacaatctccttgaaaaacaaattagctacatgggaagcattatcaactnttttacatggaataaaatgagccattttagaaaacctatcaacaaccacaaaaatggaatctctaccattgcttngttttggcagccccaaaacaaaatccatggataaatcaatccaaggatactccggaattgcaatggagtatacaatccatgaggttntaccttannacttgccttnttacatacaatgcaatgttcacaaa

SEQ ID NO: 10777 - DNA, 306 bp, Glycine max
  unsure at all n locations
caatttagcaacttccgaatatatatgaattggcaagtttaagagactcatatttacaaggatgaaaattgatgtgcaagcttcttggtaaacattgcatgtgatttgggccgcgttcagtgtaacattgcatgttacgttaaataaatataacaaattcatttgataataaattaaattttagatatatgatgagacttttatgattaaatatataaaaatcaataactttattaattaaaataatggtttgaaagaaaatacaaatgatctcttatntattcattagatacgaaataaaataga

SEQ ID NO: 10778 - DNA, 436 bp, Glycine max
gctccttcttccatggcttattccctagtgaatggtgcctcctctcacctcttctcctttgtcttccgctgcatctccatggtggagaaccacaattaaaggatctcattgaagctcaaagattcggcctccatagaagctccacaagcaagcttccataaaaaaggcaagctatctatgcggtttgacaatggaaggtaaaggaaataagctatgaaagtaagcaagaaatgtaaactatgcgaatcctaaaagtatttggatgaccacatttaaggttcccaacaaaacactcacaatcctaagggaaaattacctaaaattattacatataaatggaagtaggatgacctattggaggctcccaacttacttccaatgaaagacctttttgttacaaaattgaatgcaatgaaagtaagttaattctcaatta

SEQ ID NO: 10779 - DNA, 319 bp, Glycine max
  unsure at all n locations
cacactaatatataccttataatcaatcaaggaaacacatngacttcaccaacttggtctaagagaaaacaaaatatcacattttattctccttatattaattttctctagcattcaagcaggatggatgaaatggagaaaagcatctggggtgttatgtgatgcaaaggtaccgatcaagcataagggaaagatttatcggactgcggtaagaccggcgattatgtacggaacagaatgttgtgcggtcacaagccaacatgagaataaagtacgtgtagcggagatgaggatgttgctgtggatgtgtggaaagact

SEQ ID NO: 10780 - DNA, 234 bp, Glycine max
  unsure at all n locations
ttaaaaattattcnaatagtgaatattatttaatggtatttgtaacatattatttatctataaaacaaattctaacatatagtatgtgaatggttataangacgtttaataagagataagaaataaaaagtattaattcatattactaagaataaattttaattaaaattaatgctaacaataaagatgaaataaattaattatattagttaacatttgtcacaaaaattattt

SEQ ID NO: 10781 - DNA, 446 bp, Glycine max
  unsure at all n locations
tgcatcagacanagatgatagcaaatccatttcaggatatggtttcactttaaatggtggtgcagtaagttagaaaagttccaagcaagctacggtagcatattcaactactgaagcaaaatatatagtggcaagtgaagccgctaaagaagctgtttggatgaaaaagttcacctttgaacttggtgtggttccttcaatagaagagtcggtcccattattgtgcgacaataatggggctattgctcaagcaaaggaaccaagatcacaccagaagtccaaatatattttacgaaggtatcacttgattagagagataatagaacatggtgacgttaagaatgaaaaggtagatggaaaggagaatgcatcagatcccttcaccaaggcacttggcanaagagagttngacaagcacanataggaattatgaatgaagttcatga

SEQ ID NO: 10782 - DNA, 333 bp, Glycine max
  unsure at all n locations
gctatgttntaatgtcgagcttcacgatatactacgggacactatcggacatccgagtaataagttattgtcattataattttctcggagcttgcgttttcaattacgagtggctcgatatattacgggactgaatcaggcatccgaggaaaacgtgtttgtcgttagaatttgctcagagcttttgttttcaatatcaagcgtctcgttatattacgggacttaatcgtacatctgtgttaaaatttaatgcggtttgaatattctacgagcttctgtttccaattacaagcgcctcaatatactacgggacacaatcggacatacgatata

SEQ ID NO: 10783 - DNA, 301 bp, Glycine max
  unsure at all n locations
ctacaaaaggagagagcaagagatgaagagccaatggttgatacatggacggagatganacagatcatgatgaagcaatatgtgccggctagttactcaagggacttgatattcaagctccatagactaacccaaggcaacaagggggttgaggagtatctcaaggatatggatgtgctcatgattcaatcatagattgaagaagatgaggaggtaactatggctcgatttcttaatggtatgactaatgatattcgtgatattgttgagctacaggagtttattgatatggatgatttgc

SEQ ID NO: 10784 - DNA, 457 bp, Glycine max
  unsure at all n locations
atctctgagtcacctgcngcatgcaagcttctgggagacatctngacttgctntccaatctgacattcaccacagattctgccttcttctattttcagaatgggaatgcctctaacagcacctttgtcaatgattntcttcatgcctcttaagtgcagatgtccaaatctttgatngccatatttgacttcatcttctttggagaatagacatgtggaggagtaactggtttcttgaggtgtccataggtaacagttgtcctttgatctgctgcccttcattangacttcactcttctcatttgtcaccaagcattctgactntgtgaagttacattgaatccttcatcacacaatngactgatgctgatcaagttcgcagtcagtcccttcaccagcagtactttgntcagactangaagtccatcatggactatgctttccattccagtgatctt

SEQ ID NO: 10785 - DNA, 374 bp, Glycine max
  unsure at all n locations
gagcgattcctttcttcttatcattntcttcatgttgattcaatctcattaattccatttcatgttcctgtaactttccaaacaaagtggcaagagacatgttagatagatctcgtgattcagtaatgattgttaccttaggttgtcattccctgcttaagcatctcaaaactntatttataagatcttcatttggaaagaattttcctaaagatgtaagatgattaattatatgagtgaacctctttcgcatgtcttgtatggtttcacttggattcattctaaataattcatattcatgaatcattttatntatcctatatctttntacatctgttgtaccttcatgtgttacttgtagggtatcccacata

SEQ ID NO: 10786 - DNA, 428 bp, Glycine max
  unsure at all n locations
accgcgatctcaagtcaccgcggctgcagctgaggcaactgatgcatnggtaactgggtaacccagctggccttgaaccagaaatctgtacctgtcgcaagggtctggtggttgtgctcctctgctgaccaccatacaaacctttgcccttccatgcagcaacctggagcaattgagcagcccgaagcttatgctgcanatatttacaatagacctcctcaacctcagcagcaaaatcaaccacagcagaacaattatgacctctccagcaacagatacaaccctggatggaggaatcaccctaatctcaaatggtctagccctcagcaacaacaacaacagcctgctccttccttccaaaatgctgctagcccaagaagaccatacanttctncaccaatccaacaacagcaacaaccccagaaaca

SEQ ID NO: 10787 - DNA, 337 bp, Glycine max
ctgcagcttgatgcacatttgagaggtaatgtacaacgatatgatgcgctccatgagaggttggatcaaatggagaatagagatcatcatgaagaagaaaggacgagaagagggaatgatggtgttcctagacataaccgaattgatggtattaaactcaacattcctccatgtaaaggaaagaatgatccggaggcctacttggagtgggagatgaatatagagcatgttttctcatgcaacaactatgaggatgaccataaggtgaagctggctgccacggagttttccgactatgctctagtgtggtggaacaagctactaaaggagagagcaa

SEQ ID NO: 10788 - DNA, 450 bp, Glycine max
  unsure at all n locations
agcttatctcagatcagtttatgaacanaataaacctccttataaatacatgtttcactccaaccaaatgcatagatngcacattgttcagtccctcaagctcatgcaaagatgggaaattacaaatatttacattctttcaatttgcattcaaacaaacacaaacacacatatatattaggtggaacaatgtaatattaatttgaatattgattacatatatactattttccatgatgatataataacttgccttgtgacaatatataccaacaacccagttgtttaaatatttcatcanaaatgcttgcatggttccattcttttctctcttcacatactccaaataattcgtatgaattatccctataactagcctgaatntagtcttccatcttttcccatggtgataccatgtcaagtgctcgggctcctctagaacagcaatat

SEQ ID NO: 10789 - DNA, 207 bp, Glycine max
gcttcccctgtgtgcatttgtgtaatacattatcctgtgtatgatgatcacgggtccaaggcagccagggaatgatattgatgtgtatcttacaccattaatcgaagacttgaaaaaattgtgggaagaaggagtagatgtgtgggatgcaaatgtgcagcatacattcacattacacgcaatggtgttttgtactattaatgattt

SEQ ID NO: 10790 - DNA, 430 bp, Glycine max
  unsure at all n locations
tgaagcttccatatgttgagtggtgcaaccctctttagaatatcactcatgcacccaacatcttcatgatttgtgtacatagggactcattaagtaggtttgttcttaatttttgtttcaatacaaacttaagtgctcatatgggacaccttangtttgtcataatattttgtaggaataatcaacatgaaaataaagaanaaggtatgttntattcaattactttccttaactnttaaaataatgatcaagggcttcccatggaccctgagagaataatggtcattcctgagtggcctactccaccatgtataagggacatttgnngcttcaatgacttaacanacttttacaataggtttgtctcatatttttctatacttgtagcaccactcattgagtnggtaaagaactatgttctctcatggga

SEQ ID NO: 10791 - DNA, 248 bp, Glycine max
  unsure at all n locations
cacacatatgtcctattcggngacataactcatctagacgctcgaaattgaacaacgcaagctctcgagacattcgaatgtgcataacatttcgcacaaatgtccaattctgggacataatatatcaagacgctctaaattgcatagcggaagcactcaggaaattcatatggtcataattattcacatggatgtccgactcgggaaaataatatatcgtgatgctctaaattgaacaacgagagcta

SEQ ID NO: 10792 - DNA, 188 bp, Glycine max
  unsure at all n locations
gtatgttgctggattaatatctcgatgcacgatatgtggttcacactccttgtgcaaataagctaatccatgagctgcaccctgngcaatcttgagtcttacatcccattttagagctgaagttccatcctcactctcatgcagccaatagtcaaggctttcattctccaagtaggagtaaataaaca

SEQ ID NO: 10793 - DNA, 347 bp, Glycine max
tatgcgcacacttctgtacgaacgttcacttgcacatgacattattatatctaatatatatgcacccatatacaatcattgcaccttcgttacctataatattcacatgtacttccatggtgtatttgttatctacatcacacacatttcctttgctaaattcacatacatgcatactctaagcactgtggctatcaaaaattgcatacgtgcacatcttggtatttctcatacctatacatacacaaactatatgatgaatcttgactatctacacaataaggcgctacatttcatgctattctcaagtgtttgtactacctaaagccgcatgcaaattgaagtat

SEQ ID NO: 10794 - DNA, 366 bp, Glycine max
  unsure at all n locations
agcttcaacctagaggagacggaccattccaagtgttgtataagatcaacgacaatgcctacaagaatgacttgcctagtgagtataatgtaagtgccactctcaatgtgtctgatctatctctntntgatgcagatggaggagccttggatatgaggacaaatccttttcaagaacgatggagtgatgaggacataaccaaggaccatgaagcacttgaaggtcccatgaccagaggcagacttanacaagcccaacacgtcatagagacaaagctggtcatttgtatagctgccattgatgatgattgaaggcccaagtgcagaaagatgaaagcccanaggcagaggcactaccaagactact

SEQ ID NO: 10795 - DNA, 342 bp, Glycine max
  unsure at all n locations
acacatgttttntttcagctntaaagttatgcagtagtcccacagatatgaagcatttatagtagcatgtactatgtcggatctaccttcctttgggatgacgagaataattttcccgaaatcacctccaaacacaacaacttttccaccaaatgaaccactgtcagaattagacatgcacatgatgtcattcaatgttntatctaatgcttcataacaaacttatgagccataggagcctcatcctatantaatcaattgattgcctttaacaattcaacttgttctgtaccttggtggatattacatgtggagttgtccaatataggcaccatgaatagc

SEQ ID NO: 10796 - DNA, 360 bp, Glycine max
  unsure at all n locations
ttctgggggtgaagctccttcttccttggcttattccctagtggatggtgcctcccctatcctcttctcctttgccttccgctgcatctccatgantgaaaatcaccattgaaggacctcattgaagatcaaagatccagcctccatagaagctccacaagcaagcttccatcaagttatgaccatttgaatctctcgagatcttccgtgggtcaatntcgggcgtctccatatgtcatgtgcctgaatcggacctnncgtagaaaaattatgaccatntgaacttctctagagcttcgcggtgttaatttcgagcttctcgatatctgatgtgcctgaatcggacatncgagtgaaaag

SEQ ID NO: 10797 - DNA, 304 bp, Glycine max
  unsure at all n locations
cttcactcgcatgtgcgattcatgcgcgtagcgtattgttattctctatatctaacanaggaagctctcgagaagatctaatggacatcaactttcactcgcatgatccatgcaggcgcataacatattgagacgcttgaaaatgaacaactgagtttctcgagaaattcatatggtgataactcttaactcgcatgtccgattcatgcgcataacatattgagacgctcgaaattgaacaacggatgttctcgagaaatttagatggtcataacctttcactcttatgtgcgatacacgcgca

SEQ ID NO: 10798 - DNA, 373 bp, Glycine max
  unsure at all n locations
agctngtgcctcttcatgtctggaatatgaatgtagcatatagatccaaagacacttagatgctttgctgatggcttcttcccgttccaagcttcaattggagtcttgtctcttacagacttagttggacatatgttgagtatgtaaacagcagtgtagactgcttcagtccagaatgtgttaggtagtcccttctccttgagcatcgatctagctatttccataactgtgcgattctttctctcggacactccattctgttgaggagaatatgcgactataagttgtcgctctatgccttcatcctcacaaaatatttaaactcgcgagaggtgtactctttgccgcgagcacttcttaagtactttatcta

SEQ ID NO: 10799 - DNA, 403 bp, Glycine max
  unsure at all n locations
tcttagtttcagatgatgcagatgggtntgtagctacctcatgcactcctctaatgactatggcatcattattggcgctaaactgctgngagttggaggccatcttctcaattaaatttctggcttcagcaggagtcatgtctccaagggctccaccactggcagcatctatcatacttctctccatattactgagtccttcataaaaatattggagaagaagctgttctgaaatctgatggtgagggcaactggcacatagtttcttaaatcgctcccagtactcatacaggctctctccactgagctgtctaatacctgagatatctntcctgatggctgtggtcctggaagcanggaaaaaatttctaaaatactctcttaagtcatcccagctcgtgat

SEQ ID NO: 10800 - DNA, 232 bp, Glycine max
  unsure at all n locations
tcggacctcagtgtanaaagttatgaccatatgaatntctcgggagcttccgttgttcaatatcgagcgtctgtatatgtgatacgcctgaatcgaacatccgtgtgaaaagttatgaccatttgaatttctcgagagcttccttggttcaattccgagcatctcgacatattgtgtgcccgaatctgaccttcgtgtgaaaagttatgaccattagaatttctcgagagct

SEQ ID NO: 10801 - DNA, 407 bp, Glycine max
  unsure at all n locations
ggatganagtgcacaactcctacttgttgttatgatgatggagaagcagtacttcttggacctgaaatgctacaacagattaacgaacaagtgaagttgattcgagagaagataaaggcatctcangataggcagaagagctattatgatagaaggaggaagccactatatnttcatgaaggagaaccatgtgttttgaaggtttctcccttaaccggagtcggaagggctcttatagctaggaagttgacacccaagtatctaggtccatatcanaatttgaagaagatagngcctgtagcttatcatatcgccttacctccgagtttatcgaatntgcattctgtgttccatgtctctcaactgagacggtacaacccagatccatcacatatacttgcagtgga

SEQ ID NO: 10802 - DNA, 371 bp, Glycine max
  unsure at all n locations
agcacctgcgctgcagcttatagatttattatttgatgtgnattctttgttataaccggttacatatattacagtatgagttacagggttttttcaagttgtattaatattagtctaattaaaattagntttctaaattaagagaacctatttcacaatgagaaatttgtattcanagatattcacagagatagttaatntactttctttttagctagcattatattacatataaagtttccttatatgtaagtcaatatattaaatgactataagaaatctggacttataaatggagtaatggatatatgatatagttgtgcattattatgataagttggaacattaataattgacacaagtgataatga

SEQ ID NO: 10803 - DNA, 495 bp, Glycine max
  unsure at all n locations
atacaagaatgaagctctgataccacttgttagacaagtggcctcagatatcttaagaagggggggttgaattaagatattccaaactgcttccccaattaaaaatctatttcactttntattcaagttatgaattcccttaatgacaatcttcgtaaatattaattcaaataaaacaatttgaatatgaatataaatcaataataaataaaggagattaagggaagagagaatgcaaactcagttttatactggttcggccacacccttgtgcctacgtccagtccccaagcaacccgcttgagagttccactatcttgtaaattccttttacaagttctaaacacacaaggacaatccttcctttgtgtttagaaatcctntacaacaagagactcacagtctcttaatcccttagagaatgagaagaagaagaagagatctctcttanaagagatgggatttacagaatgagcactcaaataattccttatg

SEQ ID NO: 10804 - DNA, 398 bp, Glycine max
  unsure at all n locations
agctnntatgcaagtcaatttcaagaggcatctcggagatgatcntttacgagcatatttgcgcaaaatctcttgaactaagaagatgtcgtccatcatctttctgttcttaatgaatagcagttgagtttccccaattatatgtctaagcacttaggctattgcggtggccagaattttagacacaatcttgtataacanattacagcaagatatgggtctaaaatggttacctgngaggcctggtcatgcttatgaataacgcaatatagcatggttagctgcttagaattgttcaggtgaaagaatcattaccgcacaaagaatcataccaatgtatttaagcctctgaagataaacatgaagcctctgccaggagcttatgtatcatcacaaat

SEQ ID NO: 10805 - DNA, 394 bp, Glycine max
  unsure at all n locations
gctcncagagcctggaacaagagaatagatacttntctcttgcaagttggattcatgaaatgcactactgaatatggtgtgtatgttaaaggagaaagtctttcagacatcctcatagcgtggttatatgtggatgacttgttgatagcaagaaaagatttcaatgctatctcgacattcaagcaagagatgaaatctgaatttgaaatgtcagatcttggagaattatcatattttctgggcatagagttcaagaggacaaaggctaggtattttattcaccanagcaaatacacaactgatgttctaaagaggtttcagaatgttgactgcaactcagtttcaactcctgttgaaactagtgctatgctggatcaatcanggctgaaacaat

SEQ ID NO: 10806 - DNA, 381 bp, Glycine max
  unsure at all n locations
agctagtacanatctttacacttggagtgataacatgcagtcctcttgaacccttaccgcccactctgtcgtcatggtgagactcaggaagcccaacaggtttagccttttgaatgtagtctgaacaaaattcaatggcttattctgcaatgtacctttcaacaatagatgcttccggacgatgtagattctttgtataccctnttaagatcttcatgtatcgctcaaccgggtacatccaccacaaataaacaggaccacaacatttgatttctctgaccagatgaacaattaagtgaatcatgatgtcaaagaaagcatgaggaaaatacatctccaaatggcatagtataattgcggcctcattttccaggtcatcaa

SEQ ID NO: 10807 - DNA, 489 bp, Glycine max
  unsure at all n locations
gcttctgaggacacaatgcaaggaagctattctcgaactaaatgcttcatatgaaaggtacanttttgtaatttctcaattcagttntcaattctggacgatttcctgttaatttatcctttcacttttggttatagatgacttgctccacggttgaactcactgttcaatangtggagaagttgagggaaatgagtccactttatgaaattgtcaaggaaggtatcaacatcaaggacattcaatgggcacagcactgattattatcaagctctcagaatgcaatgcaagtgatgggaagcaattgtgattgaactccagacgtagctgccactcttgcaattgcagattcttcgaacttgctgattatntagtaatttgtatcttgaggttacattacaattaanaatttaccctgtcagagctatttattangtatacaccatctgtttcaatgattggtagttttgcttgtcagcgatgtttatg

SEQ ID NO: 10808 - DNA, 300 bp, Glycine max
tgcggagatgatggtacagcgggtgaaccacaagcggaagtttcttttggtgaggtagccatggaaaagcagagcgtctggaatgatttcgtaaatctcagaaggctattgggaaatgctggtataaacacgaatgccaagcagatataatattgaatgaggaatgtagagggtcgtgtgaagcaacggtcgaattttccttggttcagtagtgaacgtgctattaatgttaagtgattcgtttgggcacgttcagattgctgtagttgctataattcctctagcacacaaatgcccagc

SEQ ID NO: 10809 - DNA, 400 bp, Glycine max
  unsure at all n locations
tgcagctagagacactctacacgagccaacctcactcattctaacctatatcaaattcacaattctggttatggtagtcattggtttttctattcccaccacacacacacttaacactcttagttcacacaccacaccatggttaactaacaatatattatgcattgctagtatgttatacctttattgtaanattgaacttcactagtttattaagagaatcattaataataaaataatactccgtatctagatctctagttggtatatagttgtgcattagaatataggttatatgactatatatttaacaataattagttatgatgaatttcattatataacataaacgacatcgtgtctaaggaaaggaaagataatttattatatatattataaa

SEQ ID NO: 10810 - DNA, 457 bp, Glycine max
  unsure at all n locations
gctaactcgatanatacagctntatcaccgtctacacgcaatgctactgcttgacgtttatctgcatctntatctaccagattcntgaaaacaaatatagacatgcatgtttctttntgtattacttaagcttcagtcagcacatatntatttttctgaaagcaataatgcatcaaagctatcatagggtctgtttggctatatttttttataaaanaattaaaagaataaaataacattaacttctctaataaattaagaataatttatacataagttaaagttaactctntacagaaattaaatgattctatcttatctaanaatgctgngtttgagttttaatttattntatggatgaagtgatttaacttatttatgtggtagaaaatatttcttactatagtgtatgatagtctcttatagatatcgactactcacactaaaaaactattaa

SEQ ID NO: 10811 - DNA, 416 bp, Glycine max
  unsure at all n locations
catggatgtctgattgagtcctgtcatatatcgagacgctcgaaattgaatgttgaatctctgagccaatccaaacgacaataactttntactcggatgtctgattgtgtcccgtaatataacgagactctcaaaatagaatgttgaagctctgagctaattcaaacgacaataacttttaactcggatgtctgattgagtcctgtcatacatcgagacgctcgannatgaatgttgaagctctgagccaattcaaacgacaataactntatactcggatgtctggatgactctcgtcacatatcgagacgctcgaaattgaatgttgaagctctgagccaattcaaacgacaatnaacttttactcggatgtttgattgagtccagcatatatcatacgctcgaaaatgatgttg

SEQ ID NO: 10812 - DNA, 501 bp, Glycine max
agcttgcttctacagatgatgacaaaaagcccaagagaatgatttcaagattgagtcaacaagattcaagaatcaagagaagtttgatttcaagattgaagagaagatgaattcaagattcaagagaagaaatcaagaagacttcacaagggaagtattgaaaagatttttcaaaaaaaacaaacatagcacaattttgtttttcaatagagtttttctcaaaattttctaagttaccagagtttttactctctggtaatcgattaccagtggcaaagcttgatttcaaaagcttttaactgaatctgcaacgttccaattgatttttaaatggtgtaatcgattaccagtgtaacttaacgttgaaattcaaattcaattatgaagagtcacatcttttcataaaatgctttgtgttatcgattacatggttttggtaattgattaccagtgacaagttttgaataaaaagtccagagatgtaactcttctaatggtttt

SEQ ID NO: 10813 - DNA, 513 bp, Glycine max
agcttgtctaagtccatactatgatttgttcaatttgcataccaaggaagttgggaagttccatataaacttcttcaaacaaatctccattcaaaaaagcattattaacatctaataggagaaggcaccagtttctagcagtagcaacacagagcaaaactctcacagtggtaagcttgacaactagagaaaaagtataagagaaatcgattccagcttgttgagtataccctttggcaaccaatcgagctttgtatctatccacagagccatccattttatatttaactttatacacccatctacaacctatacaatgcttatcaagtggtaagggaacaagtcttcaggtggaatttgttggacaagtggcctcaatatcttaaggggaggggggatgaattaagtcttacaaaattgcacttagaaccttattaaatctcaagtgcccaggttgattgcattcatagcattttgggggctaagaggaattttctccttccttctttggat

SEQ ID NO: 10814 - DNA, 482 bp, Glycine max
tccacttgtatattgcaactgatgcaatcctacctttcatgggtattggatagaagactccaaaaggcttgggctagagctactaaagaaggccctaaggttctcatgaaccttaaggtagatttttgagcccatgggtcaaggttggatccactcttctttgtaaatattaaaataggtttttccttcgtttgggtcttgtattttggccattctagtagtatagggttttagccttgtatttcgaggcattttcagtagtctttgtagtagggattttttttggttttttcatgtattttgtcatgggggtgagcttagctattatagggggtgtgtagctaagctctagcttttcatctcaaggaggtgagcctagctattagaaacgtgtgtgtagcttaactcttactttttttaggaatcttctcaaagaagcttcttaaggaggtgagcttaattattaaaagggtgtgtgtaac

SEQ ID NO: 10815 - DNA, 510 bp, Glycine max
agctttattcaagacaaagaaattatagatattcaagatggatgatcaagacagtctctatagtcttagaaagggtatattaaataggaagggaattccaattgaagtagcaaaaggtttggccaagaattttaaattaaaaagtctttttcaacaaatttactctctggtaatcgattaccaaaggatgtaatcgattaccagtggccaaaactgatttacaacagctattaaaatttgaattcaaagtttgcactatgtaatcgattacacatatatagtaatcgattaccagcagtttctgaacgttttaattcaaattttaaagcttgtaatcgattacacatatactgtaatcgattaccagaagagagtttcagaaaacattctcaacagtcacatctttttgtgtgattcttgaatggctatcataggcctatatatatgtgacttgagacacgaatttgataagagtttttcaaaacaaaaaggtcttatcctcttataaag

SEQ ID NO: 10816 - DNA, 397 bp, Glycine max
tgtaatcgattacagagatacagttttctattaccagagcacattttcaaaaaatattctcaacagtcacatctttttatgtggttcttgaatggctatcaaaggcctatatatatatgtgacttgagacacgaatttaagaagagtttttggagaacaaaaaggtcttatcctattaaaaagcaaatcgtgttatcctcttacaaattccttggccaaattacttgtgattcaataaggaattatttgagtgctcaaattgttcagtctatctctttcaagagagatttcttcttttcttcttcttcattctgaaaagggattaagagaccgagggtctcctgttgtgaaagaattctaaacacaaaggaagggttgtcccttgtgtgttaaaact

SEQ ID NO: 10817 - DNA, 487 bp, Glycine max
tattgaaactattgataagcctcccatggttttctcctgatctaagtgatgctgaagcaaccaaggtttttcaaaaatacctagatgagtgtcttactactaagtgcattatcttggaatcaatgagttcagaactccagaggcaacatcaagacatggacccatatgagatcgtcgaatatcttaagaagatgtacggtggtcaaagcgggaaggctatatttcaattatctaaggccctgtttagatcctcacttgttgcaaatgaaaaggttggaccccatgttcttaagatgattgatctcatagaacaacttgagaagttggggtggactcttgggaaagagctttctcaagatttgattctacaatcactttccgatttattttcacaatttattgtgaattttaacatgaataagatgaattgtgacttgcatgaaatgcttaatctgctaatttgattatgagaattaaattgcttttg

SEQ ID NO: 10818 - DNA, 497 bp, Glycine max
tgcaatcatttggtataaaattcacttagtcttgtggctctacacaagggtgtctgcaaccttctaaaatagtatctccttcatcctattaaaatcaaaatgacaatgttaaatgctattcctaaaaagatccctccaaccaaaacaggggataaacagagaaggaaggtaaatgcgagaagaaaagaatgtagtaattgtgaaaacagcaaattaagtaccaatgaagtgatgtcaggccttgtgtagggagtaggacaactagaagccaaatcagcaaatctcaactatagattcctatccatgtaccttagtaacttttttaatttatagattctttaaaaaaaattcatggttagtggggttctactaaatgttgtcatgacaagagtatattcattagacatcaaaatggaagttatagtgccctttaactaacaaaattatttttccctgatatttctctttgatctttctaaattgtcaaatctaaatgt

SEQ ID NO: 10819 - DNA, 469 bp, Glycine max
tatgctgcaaacatctacaacagacctccttaaccttagcagtaaaatcagccacaacagaacaactatgacctctcaagcaacaggtgcaatcccagatagaggaatcatcccaaccttagatggtcgaatccttcacaacagcagcaacaacaacagccttattttcaaaatgttgttggcccaagcagaccatgcgttcctccaccaatctagcaacaacaacaacaacaacaacaacaacaataacaacagccccagaaacagcaaacagttgaggcccctccgcaaccttcccttgaagaacttgtgaggcaaatgactatgcaaaacatgcagtttcaacaagagaccagagcctccattcagagcttaactaatcagatgggacagtgggctacacaattaaatcaacaacagtcccaaaattctgatagattaccttctcaatctgtccaaaatcccaaaa

SEQ ID NO: 10820 - DNA, 497 bp, Glycine max
agcttgtttctaaacactcacttatttccaacagctgatttgcctttggggagttccaaaagcttctagacattgttcttcggaaactggtccagctctacttgcattgctttgacccaatgttcatcaaacatagcatcatctatgtgttttggctcaatctttgatagtagcactgtatgcttgagagagttccttgttttcactttgtccttaggatcaccaatgatttgaggctttggatgatgttttgttagcaagggtcctattggttctctgacttttttaggttgatcatccactggtctgttggacgcaagctcatcttggctagacgcagaagaacacttgacgatattttctattttcatctctggaaaagaattatccagctctaacattgtagtgtcaaacttgttgtcattaaatcttacatgaatagcctcttctacaataaaggttctagagttgtacactctatatgccttggacgattt

SEQ ID NO: 10821 - DNA, 511 bp, Glycine max
agctttccacattgaattcattacctaatgtcatattagatgggaattgggtatcttaacataagaaatttcagatggactttaatcctaatcccacagccgaccttttcacgagatctctacttaaccctttggttaaatgatccaaattatgctgagttctcacaaactccactgatatcacaccatgcatgattaactcccgaaccatgttgtgtctaacacccaagtgtctagacttcccattatacacttgactatatgccttagccaaagtagtctgactatcgcacctgatagacatgggaggtataggtttgggccacaatggaatctcatagatcagatttcttagccactcagcttctttaccagctgctgctaaagctacaaattcagattccattgttgaatttgtaatgcaggtctgtttcttggatgcccaagagatagcacctcctccaaggaggaatacccaaccacttgtggatgaataatcttccatattggt

SEQ ID NO: 10822 - DNA, 523 bp, Glycine max
ttactatgcagagaatatccaaagaaaatatcttcatctgacttagcatcaaattttcctaagttatcttttccattattcaatacaaaacatttacaaccaaagatatgaagatgtgagatgtttggttttctgccattgaacaattcatatggagttttctttaaaatgggtcttattaaagccctatttaaaatgtagcatgcagtgttaatggcttcagcccaaaagtattttggaagaggagtatcatttaataaagttctagcaatctcttccaaagatctatttttcctttcaacaacaccattttgttgaggggttcttggtgcagaaaagttatgctcaatcccatgcttatcacaaaataattcaaattctttattttcaaactcacccctatgatcactcctaatagatataatcttgagatttttcttattttggatgatttttgcaagttttctaaatgcttgaaatgcatcattcttatgagtgataaaaagagtccatgtgtatctag

SEQ ID NO: 10823 - DNA, 505 bp, Glycine max
agcttcacaagcaagcttccatcattaccaaacttttgtacgcacttctactggggcaaccccattctctttggtatatgggatggaagctatgctccattttgaggtggagattcattctttgagaattctagcagagtcaggattggaagaagtagaatgggcccaggcacgttttgactagttaaatgttattgagggaaattggctgccataagtcatgggcgactatatcagagtagaatgaaaagtgcattcgaaaaaaacgtgcgcttgtgtgagttcaccgagggggatcttattttgaagaaaatatcgcatgttcagaaagatcattgagggaaatgggccctgaactatgaaggaccttttatggtaaagaaggctttctcgggtggagcattgttacttatgaatatggatgatgaagagctgcctttgcctgtgaattctgatgttgttaagtgatactatgcatgatattggggacagtttgaaagttcac

SEQ ID NO: 10824 - DNA, 487 bp, Glycine max
agctttgatgatgtctatattgagtcacatgtttgtcatcatcaaaaagggggagattgtgaatgtatgtatacatgattttgatgatgtcaaaagaagaatcaaacaaggctcatttgcttcaagattaatacaagattgttttaacaaacaaagccttgattcaagctttcttcaagatcaagccttgcctcacaaggaaaggtttcaagtcatccaagggacatgtaatcgattaccaatggttcgaaagtgtgtaatcgattacacatcatatgtaattgattaccagagactctgaacgttgggaattcaaattttaaatgaagagttacaattgttcaagaaaaacaactgtgtaatcgattacaccaattctgtaatcgattaccagagaggattttcaaggaatatcgccaacagtcacatcttattatttggattttgaatggccatcaaaagcctatatatatgtgtgacttgggac

SEQ ID NO: 10825 - DNA, 473 bp, Glycine max
agctttgagttttatattttatttgggggaagattatcattttctcacttacttttatttgtaatctttgcttcaattttcaggccttcaacagatgaacgaactgcaatatagaattcttatcagaagaggtacaaatagagctaatacaatggtaagacatcaatcagataagttactccaccacacacactaacatatttgtgaggagaaaaaaaaatgttcccttacctgaaatggcaggcatgagtgcaccaacacaaattatcatgcaagcacccagtaaaacaaaaataagcaaaaccgtttttgtacctcttgtgtttctcaatgaatctttttaaaggcgagggtggtatgcttctatttgaggaaccaggttttgtgatatgtagaaagcttcctcatcacaaacttgatgattaagaagcaaacaaaattttgcatttctgcaaaggtgtgaatacaaaaca

SEQ ID NO: 10826 - DNA, 491 bp, Glycine max
tcagaggttgcttgatgagcttaacgacaatactgtcattgtgtttgttaacaccaagaggaatgcggatcatgttgccaagagtttggataaggaagggtatcgcgtgactactttgcatggagggaagtcgcaggagcagagggagattagtcttgaagggtttaggaccaagagatataatgttcttgttgctactgatgttgctggacgtgggattgacatacctgatgtggctcatgtcatcaactatgatatgcctgggaatattgaaatggacacgcaccggattgggcgtactggtcctgcaagaaagacgggtgtggctaccacgttcttgactcttcaggactctgatgtcttctatgacctcaagcagatgcttattcaaagtaacagtcctgttccacctgaactggcaaggcatgaagcttcaaaattcaaaccaggaactatttcagacagaccacctaaccaaatgacactgtttt

SEQ ID NO: 10827 - DNA, 501 bp, Glycine max
agcttgaaagaagaatatttttaattaatgtaaataaattaaaaattaagtggcgataatgaaggttgattaatggttatctagatttcataaagttagaaaagggttaattaaattataagagtttaaagtggagaacatttttgtaaataactatacaactagtttaaaaatagaattttagtttaattagttggtgactaattaaagtgtttggttatatgatgtagaataattaaaataagttagagttgtaacacagtgaaaaattacaactcagactgacagagaaattgtgttgtgtcatttgtgtatgtatgaatttaatttcaatacttgtatgtttttaattatagaatttgcgtgctatatatgtctatacttagtgtaaataatttgtttagtctaccttgacaaggatatggaaactacttaacaaaaatttcatctgtaacaaaaatacgttgtacactgagtgacagtgtaatttaactctgtgtg

SEQ ID NO: 10828 - DNA, 434 bp, Glycine max
  unsure at all n locations
tgaagcccttaaaattgagagaaatgtagctttttgctgtaaactgtcacatgagatttgaacatctactggatgagagtactattgaagtgaacagtcccagaaatgctttcctgcatctgatcaggaagataaatccggatatttttactcagatcattattaatggatcatatgatgcccctttctttgccacacggtttagggaggcactcttccattattctgctatttatgacatgtttgacactgtcataactagtgaaaatgaatggaggatgacgattgagagtgagcttttgggccgggaggttatgaatgttatagcatgtgaaggntctganagggntcaaaaacctgagacatacaaacaatggcaggtttggaataccaaggctggttttaagcaggtccctctgaatgaagaattaatg

SEQ ID NO: 10829 - DNA, 503 bp, Glycine max
agcttgcaaaccattccattctccacacatattactagctccatcatatccttgacctcatatattttgaatgttgagattatgatgagacaatattgaacatatcccatgcttaagaatggatgatgtagtatcttgcatatgtatcatatccaaaaaatgctccttaacatatccattcttatcaacaaatctaagaactagagttgtttgttctcttttagattcatcatgggcttcatcaacaatgaaacaaaattttgcattaccaatctcttcttgaatttcatcttgcacctttctagcaaagacatatagaatatctttttggatagtgagtgaaatgtatcttacattttgagggacgttttccgagataatttcatctatttccttattataagaagctaagagctttatcatttcaagaaagttaccacggtttccagatcccacactttcatcatgtcccctaaaaatgcaagcttgaaatgtcaaccatt

SEQ ID NO: 10830 - DNA, 511 bp, Glycine max
ttcctatcttaaagatttgtttggtaaatttaacaaaggaaaaagtgatcttaatcacatgcttaatgtgcaaaagcatactacaaataagaccgacttatggtataacaagcaaaccaccttttcaaagaaaacaaagtttgtatcctcaaaagaggtgaacccaaacaaggtctacaagtgaggaacacagtgaattctaggagaaatgcaaagacatgtcattattgcatgaaaagacttctttcaaagcaaaaaacattttttctacttcaaaaccctttaaactacttcacattgatttatttggtccttctagaactatgagtttagatgaaaattactatggcttagtaataatggatgattactcaaggttcacatgactttgtttttgaaaaccaaaaatgaagcttttaatgcttttcgcaaacttgccaaggtgattcaaaatgaaaaagtctgaacattttttcacttagaagtgatcatggaagtgaatttcaaaatg

SEQ ID NO: 10831 - DNA, 508 bp, Glycine max
agcttggtgctctttgcattcagtgtttacaggataaggtttgtgctctacacttccttgctagtgtgggtgcattttgggaactgcatattgcacatgacggtttttgttaaccaccttagttattgtaggttcattcaattcgtgaagcagctgctaacaacttgaaacgccttgctgaagaatttggtcctgagtgggctatgcagcacataattcctcaggttcatctatttacttaatttattattaacgaaatgatacaccaacatatgtcaacattaattcgtctgtgtgggtttttgtgcatgtcttgaaatatatgtttgctatatgctattaccttttctattctcccaagtgtaacttcagaagtatctatatggaatgtgtggaacaggttttggagatgaacaacaacccacactatttgtatcggatgactattcttcgggctatctctttgcttgctcctgggatgggccctgaaatcacttgttcaaacttg

SEQ ID NO: 10832 - DNA, 492 bp, Glycine max
tgttcaagccataaatcgacctctttatttttataccaagtccttattaccacgaatacaaaaacctttaggttgttgcatgtatattgtctcactcaaatcaccattcagaaaagttatctttacatccatttagtgcaactccaaatcgaaatgagctatgagggtcataatgattctaaaggaatcctttgtcgatataggggaaaaagtctctttaaagtcaacaacctcattttgcataaaatcttttgtcactagtctaaccttaaatctttcaatgttaccatttgagtctttctttgtcttaaagacccatttacaaccgattgccttataattctcaggcaacttaactagctcccatacaccattaactgacatagattgcatctctttattcattgcatgccttcacattttttttactaaaggtaagaaacaacttcatgataattcttttggatcaataatgtctccaatgtcgtatgc

SEQ ID NO: 10833 - DNA, 494 bp, Glycine max
agcttcatgatgatgaatcttgttgattcaagtagttttgatgatgacaaaaagcccaaagaatgatttcaagattgagtcaacaagttcaagatcaagattaatttcaagtttcatgagaagaaatcaagaagattcaagaatcaagagaagtttgatttcaagattcaagagaagaaatcaagaagacttcacaagggaagtattgaaaagatttttcaaaaaacaaacatagcacagttttgttttcaaaataatttttctcaaaattttccaagttaccagagtttttactctctagtaatcgattaccaatggcaaagtttgatttcaaaagcttttaactaaatttgcaacgttccaattgttttttaaatggtgtaatcgattacaatatattggtaatcgattaccagtgtatctgaacgttgaaattcaaattcaattgtgaagagtcacattttttcataaaatgctttgtgtaatcgattaca

SEQ ID NO: 10834 - DNA, 500 bp, Glycine max
agcttaggatctactcagttaaaaaatttaaagtgtgcatcaactagccaaaaccattaaaggaattcatagaagacatcacataagccatatgaatatgaccacatccacaaagaaattgagctagttataattacaaagtatgaaatgagacaaggcaataatcatgtgattgattataaggcctaagatgtcagtccgaactatacacaacttcctgctctcactacagagcatagggaccaaaacaagacaaactaatggagaggcaacattaaaggttggccagatagttaatacctcttattaatctctggttcttaaatcataatgttgattgagccttctgattcttaatcataatattgagcaagccttttgtgcctttctcttcttttttctttagctttgggggttgaagaaccactttgatagtgggcgcaaagacaactttcacattctgttattaactggggcacatgaaaacttgtgatataaac

SEQ ID NO: 10835 - DNA, 372 bp, Glycine max
tgtcccatgcttcttgggccgtaggcgcttttgatattttgtcaactgtagcttcatccaccgattgctatatgagaaacagagccttctcgtctctctttcttgactccttccacctttcctttacaccttggctgaactaggcttcatcttgcttcacaaacccattctctacgatatcccacacatctagagctcctagtagcgccttcatgttgatactccaattatcatagatgatctttgtgatcatctgcattcggaaaggaaaacctccattcgccatctttcgaggatcttgaacctttgataccactttgttggaaataaggctctttgtgttttcgaaaagggtttatgaatattggagac

SEQ ID NO: 10836 - DNA, 523 bp, Glycine max
tgggaactacctaatactcagctttggaaaatgatttctatacaaattttatttttataaagcgactaacaaatatggaactgaatctcattttgacattttaactcttccctaaattccaatatagatttgtgatttatccaaaactatttgtgtaaacatatatattatacttagaattatatttttaatagttctgtacacttattagtttttatgcatataataaatatttttgtagaaagtgtctaggtctattttgaatttgtaggttgagttctttgtgaaataaaataaatattaaaagaatgcacttaatgtttggatctattttactcaaaatccatgttgtaaagacactttcttcatcaactgtaagtctaagtaaaaaggtgttatcaatcaatggttttgaactgtcattgaaaagttgtccactttctacgacggtcaattcaatattccatgctaaccttgatgttaaaagtccttccaaacccatggttgaaatcctttttttttc

SEQ ID NO: 10837 - DNA, 511 bp, Glycine max
tccttgaaaagattcctaaaaaagctagagcttagttacacacacctatctaatagctaagctcacctccttgagatgagaagctagaacttagctacacaccccctataatagctaagctcacccccatgaaaaaatacatgaaaatacaaaaaaaaatccctactacaaagactactcaaaatgcctcgaaatacaagactaaaaccctatactactagaatgaccaaaatacaaggcccaaacgaaggaaaaacctattctaatatttacaaagataagcgggctcatacttagcccatgggctcgaaatctaccctaaggctcatgagaaccctagggccttcccttggatctttggcacaatctacctggagtcttctatccaatgcccttgcggggtaggattgcatcacagctgtggtctttgccttaaagatttggaggcactatttatatggtactcggtttgaagttttcagcgatcacaagagcctcaaatacttgttcg

SEQ ID NO: 10838 - DNA, 506 bp, Glycine max
tgtgcatccaataccctgatgaggatgtcccgtatgttcttaaaactggactgattcatttgcttccaaagtttcatggccttgcaggtgaagacccgcacaaacatttgaaggaatttcatattgtctgctccaccatgaaacccccagatttccaagaggatcatatatttctgaaggcttttcctcattctttagagggagtggcaaaggactggctgtattaccttgctccaaggtccatcacgagctgggatgacttgaagagagtattcttagaaaaaattttccctgcttccaggaccacaaccatcaggaaggatatctcaggtattagacaactcagtggagagagcctgtatgaatactgggagagatttaaaaaactatgtgccttggtaacccaactggccttgaaccagaaatatgtacttgttgcaagggtcaatggtttgtgcttctctactgaccaccatacagacctttgcccttccatgcagcaacct

SEQ ID NO: 10839 - DNA, 471 bp, Glycine max
agcttccatcaggagagatttagaggagcacgaaattttgtgctctaaaagagctttgaaatctgaagtttaatattcaaatgatcaaagttgaaaaaatgcacacacattacctctatttatagcctaagtgtcacacaaaattggagggaaatttgaatttcaattcaaatttcacttgaatttgaaattgaatttgtggagccaaactttggagccaaaatttcactaattatgattagtgaattttagttatggttcagcctactaatccaagatcaattccaagattctccactaagtgtgcttaggtgtcatgaggcatgaaaagcatgaaggacatgcccaaagtgtgactatatgatgtgacaatggggtgtagtaagcaaatgctcacctccccctttaaaatttaattggattgggcttctaccaattcaattaaattttatttcccaacacacacatcaa

SEQ ID NO: 10840 - DNA, 503 bp, Glycine max
tggattggctcgactcattttcacctctattgatttttggcacttacgattaggccatccatctaataaagttcttgatcaagtatgtaccaactttacttatgtcaaaataaataaaagtagtgtttgtgatacatgccatttagcaaaacaaagcaagcttactttttcttctagtgttactggtacacgcaagccttttgaattagttcacatggatatttggggaacccttgctaccccctctttgcatggacataaatattttcttactgtggtagatgattttacaaggcacacttggttggtcctcatgaaattaaaatctgaaactagaaacctcattgaaaactttattcattttggttggaatcaatttaatgctatttgttaagactattatttcaaaacatggggcctaattttggctattcccgaactctattaaaaaaatatgggatttttacataataatttaatgtgtttcacaaccacaaacaaaa

SEQ ID NO: 10841 - DNA, 511 bp, Glycine max
tgtgagaggattcttattagagatattggttgatatgcaaatgaaattactcatttctgtgctgctctttattctttaatttagagcacaactcgttcaaatctttaatgctttattactgcagtatattttatatcttaacattatgaaatgctttgataaaatgttagcaactgttaagtgaaaatgttcctctttttgtaatacagaattcatggcctcaaatctggaaagatgttgaaagagttccgtggccatacatcttatgtgaatgatgcaatttttacaaatgatgggagtcgtgttattactgcctcaagtgactgtacaatcaaggtctgttacttggcattgtacttgaagttccttgttcatttggtgttcatatgagatgtctttttcctccgtattgtaagtctgggatgtaaagactacagactgcataccaacttttaagccccctcctcctttaaaggtgtgtcttccaaaaatttactattatggggttttg

SEQ ID NO: 10842 - DNA, 507 bp, Glycine max
agctttggctgattcaaaatggtttaatgcaatgcaacaagaatatgaggcactgatgaataacaagacctgggatttggtttctcttccacccaatagaaaagcagtgggtttcaaatgggtgttcagagtcaaagaaagtgcagatgggactgtcaataaatacaaagctagactagtagcaaaaggatttcatcaagtggctggttctaatttcaatgaaactttttcccctgttatcatacctgttacggtaaggttgattctcaccttggctctaaccaataagtgggaactctttcaacttgatgttaacaatgccttcttaaatggttttctagaggaaaccatctatatgcagcaaccccctggatttgaaaaccccaatacttctcttgtttgtaaattgaataaggctctatatgggcttaagcaagcaccaagacagtggtttgatagactaaaatctacactcttgcatcttgttttttttgcaagcaagtgatc

SEQ ID NO: 10843 - DNA, 489 bp, Glycine max
agctttattcaagacaaataaattaaagatattcaagatggatgatcaagacagtctctagagtcttaggaatggtatattaaataggaagggaattcctaattgaagtagcaaaaggtttggccaagaaatttaagttaaaaagtctttttcaagagatttactctctggtaatcgattaccagaggatgtaattgattaccagtggccaaaaatgatttacaacagctattaaaatttgaattcaaaatttgcactgtgtaatcgattacacatatatggtaatcgattaccagcagttattgaacgttttaattcaaattttaaagcttgtaatcgattacacacatactataatcgattaccagaggagattttcagaaaatattgtcaacagtcacatcttttcatttggttcttgaatggccatcaaaggcctatatatatgtgaattgagacacgaatttgctaagagttttataacaaaaa

SEQ ID NO: 10844 - DNA, 500 bp, Glycine max
taacaaatacccaatcaccttctcagaatctaacatcatgtctattgttattaggaaaatgtttcatagtatgatgagctttgataagtttcttcctaaaatcagcgaatacagcttcgcggtcagcaagaaagtcatcctcggcatcaaggttggatgttcccgtcacataatgcggaatattgggaggtttcttcccaaaggtgatcttgtaaggtgacagccccatgcctgaatgaatggatgtattatacgaccattctgcccatagtaagaattttccccaggttgaaggtcgaggatgaacaaaagctcccaaatactgttctattatgcgatttaacacctcagtctatccatggatcttgccaacaatgtgcatgaagagctgcgccaccattgaagctatgtaatgggtttggagggtaccaaagtgaattccctttgaaaaaccgtctatgacgaccaagatcacagtgtgtcccccgaaaactggcaat

SEQ ID NO: 10845 - DNA, 503 bp, Glycine max
agctttggagtttccaagtgccaattcgtcttcttctttagtccagtcttcttctggcttcaattcttcagtgggctttccttctgtgtccagcatcttgggatgttcccagcctttgatgacagctttccaggttctgctatccagtgatttgaggaaggccaccattcttgctttccaatattcatagttgcttccatcaagaattggtggtctgttcactggtccgccttctttctccatgttcatcagaatttatcaccctagatctcactctgtgatttcgagtgttggctctgataccaaatgaaattctgataccaggggacagatgtcgtaccggatgtcacgacatcacgcttcagaacatgcagattatatgtgtccgtatgaacagattaaacaagtaaataacataagagaattgtttacccagttcggtgcaacctcacctacatctgggggctaccaagccagggaggaaatccactctcaatagtgtt

SEQ ID NO: 10846 - DNA, 497 bp, Glycine max
agcttaacaaaaggcatgctaagtgggtggaattcctagagcaattcccttatgttatcaaacataaaaagggaaaaggtaatattgtagccgatgctctttctcggcgtcatgcattactttctatgcttgaaacaaaattgattggtcttgaatgtttgaaaagcatgtatgaaaatgatgaaacttttggagaaatttttaaaaattgtgaaaaattttcagaaaatggtttctttagacatgaaggctttcttttcaaagaaaacaaattgtgtgtgcctaaatgttctactagaaatttgcttgtttgtgaagcacatgaaggaggtttaatggggcattttggggtccaaaagactctagaaacattacaagaacatttttattggcctcatatgaaaaaggatgtgcagaaattttgtgaacattgcattgtatgtaaaaaggcaaagtctaaggtaaaacctcatggattgtatactccattgccaatt

SEQ ID NO: 10847 - DNA, 458 bp, Glycine max
tataatatatcgatacgctagaaattaaatgtcggaaactctcgggaaattcaaatggtcataacgtttcacacggatgtccgattcgggcacataatatgtcgagaggctcgaaattgaacaacggaagctcttgagaaatttaaatggtcataacttataactcggatgtctaattcaggcgcatcacatatagaggcactcaaaattgaacaacggaagctctcgagaaattcaaatggttataactattcacactgaggttcgattcatgattataatatatcaagacactcgaaactaaacatcggaagctctcgataaattcaattggtcataacttttcacacgaatgtccgattcgggcgcataatatgtccacacgctcggattttgaacaacggaaagcttcgggaaatttaaatggtcataccttttcacacctgaagtccgattca

SEQ ID NO: 10848 - DNA, 424 bp, Glycine max
tataatatatcgatacgctcgaaattaatttttggaaactctcaagaaattcaaatggtcataacttttctcacggatgtccgattcgggcgcataagatgtcgagaggctcgaatttgaacaacggaagctcttgagaaattcaaatggtcataacatttcacacggatgtccgattcaagcttataatatatcgatacgctcgaaattaaacgtcggaaactctcgggaaattcaaatggtcataacgtttcacacggatgtccgattcgggcacataatatgtcgagaggctcgaaattgaacaacggaagctcttgagaaatttaaatggtcataacttatcactcggatgtctaattcaggcgcatcacatatagaggcgctcgaaaatgaacaacggaagctctcgagaaattcaaat

SEQ ID NO: 10849 - DNA, 502 bp, Glycine max
agctttactatgcagagaatatccaaggaaaataccttcatctgacttagcatcaaattttcctaagttatcttttccattattcaatacaaaacatttacaaccaaagatatgaagatgtgagatgtttggttttctgccattgaacaattcatatggagttttctttaaaatgggtcttattaaagccctatttaaaatgtagcacgcagtgttaacggcttcagcccaaaagtattttggaagaggagtatcatttaataaagttctagcaatctcttccaaagatctatttttcctttccacaacaccattttgttgaggggttcttggtgcagaaaagttatgctcaatcccatgcttatcacaaaataattcaaattctttattttcaaactcacccccatgatcactcctaatagatataatctttagatttttcttattttgaatgatttttgcaagttttctaaatgcttgaaatgcatcattcttatgagtg

SEQ ID NO: 10850 - DNA, 404 bp, Glycine max
agcttgaatcggacatccgtgtgaaaagttacgagattttgaatttctcaagagcttccattgttcaatttcgagcattcttcccttttataagcctgaatcggacattcgtgtgaaaagttatgaccatttgaatttctcaagagcttccgttgttcaatttcgagcctctcgacatcttatacgcccgaatcgaacatccgtgtgaaaagttatgaccatttgaatttctcgagagcttccgatgtttaatttcgagcgtatcgatatattataagcttgaatcggacatccgtgtgaaaagttacgagattttgaatttctcaagagcttccattgttcaatttcgagcctctcgacatcttatacgcccgaatcgaacatcccggtgaaaagttatgacc

SEQ ID NO: 10851 - DNA, 493 bp, Glycine max
agcttcatgcttaagtatgtatggcaaaacttcattattattgttcaagacatacaagtgagcttgtaacaaatcttttagacttggagtgatcacatgcagtcctcttgaacccttaccacccactctgtcatcatgccgagactcaggaaggccaataggtttagccttctcaatgtattctgaacaaaattcaatgacttcttttgcaatgtacctctcaacaatagatgcttctagatgataaggattctttgtatacccttttaagatcttcatgtattgctcaaccgggtacatccaccacaaataaacaggaccacaacatttgatttctctgaccagatccataatcaagtgaatcatgatgtcaaagaaagcaggggaaaaatacatctccaactggcatagtataatttcggcctcattttccagctcatcatacttgacaggatcaacgactttgctatatatggcatggaaaaaaaagcac

SEQ ID NO: 10852 - DNA, 427 bp, Glycine max
tcacgatatactacgggacacaatcggacattcgagtaaaaagttattgtcattttaattttcttagagcttccgttttaattacgagcggctcgatatattacgggactgaatcagacatccgaggaaaacgtttttgtcattagaatttgctcagagcttttgttttcaatatcaagcgtctcgttatattacgggacttaattgtacatctgagttaaaatttaatggggtttgaatttgctacgaccttctctttccaattacgagcgcctcgatatactacgggacacaatcggacatccgagatataagttatttttttttgcatttgctcagagcttatgttttcaatttcgagcatctcgatatattacgggacttatatagacatcccagaaataaattattgtcctttggaatttgc

SEQ ID NO: 10853 - DNA, 395 bp, Glycine max
  unsure at all n locations
agcttgtgcctcttcacgtctggaatatgaatatcatatagatccaaagacccttaggtgctttgctgatggcttcttcccgttccaagcttcaattggagtcttgtcttttacagacttagttggacatctgttgagtatgtaaacagcaatgtagactacttcagcccaaaatgtgttaggtagtcccttctccttgagcatcgatctagccatttccataactgtgcgattttttctctcagacactccattttgttgaggagaatatgcgactgtaagttttcgctcaatgccttcatcctcacaaaatctttcaaacttgcgagaggtgtactcttttccgtgatcacttcttagtacttttatccattttccactntgatttttcagca

SEQ ID NO: 10854 - DNA, 343 bp, Glycine max
tcatgaacttggcattactgctcttcatatcaagctccgcgccacgggtgggaaccagaaaaaactccgggtcctggtgctcaaacagctcttcgtgcccttgctcgttcaagaatgaaaattggtcgtataggtatttgccttcactttatttgcccattgtcatgtttttatgtgttggctgcatattttccagggtgtaacatattgtgttgaagcatttattttcttggttaatctgaagagtcagtgtttatctctccctttcgattgcagctttgttttcttattgatttcatttgaatggcatgtactgtgaagtacttattaatggttcttgatt

SEQ ID NO: 10855 - DNA, 312 bp, Glycine max
tactcggatgtctgaatgagtcccttcatatatcgagacgctcgaaattgaatgttgaagctctgagccaaatcaagccgacaatatctttttactccgatgtctgattgaggcccgtcatatatcgagacgctcgaaattgaatgttgaacctctgagccaattccaacgacaataacttttttctcggatgtctgaatgagtcccgtcatatctcgagacgctcgaaattgaatgttgaagctctgagccaattcaaacgacaataactctttactcggatgtctgattgagtcctgtcatatatcgaga

SEQ ID NO: 10856 - DNA, 358 bp, Glycine max
agcttatctccagcatagtcaacatcacagtagcttgtgagtccaaaatctttccttcttttaaagcatagaccaaggttataagttccaataagatatctaaaaatgcatttaataacagataaaaggactttccttggttctttttgaaaccttgcacataagtaaacactaaacattatatcaggcctatacgctataaggtataacaatgatccaatcattgctatttattgggttttgtccaacttttttagattcttcgtccaaccctaagtatctagttggatgtataggtgtctccatttcttttgcattgtccacgttgaacatatttagtaagtctttcatatacttg

SEQ ID NO: 10857 - DNA, 390 bp, Glycine max
ggatcttcttcatcaacggagtcctttgcttcttgaagttcaatggaagcggaatggagaaggaagaaagatgattggagatgccacttcaaggagaagatgagtcaagaacaagctcaccaccataagaagccatggataaaaacttgaaggtaggagaagatgagtggagggagaaggagagaaggagcacgaaatttagttcctcaaatgaggtatgaactttgaagtgtaattctcaaatgatcaaagttcaaaaaatacacacatatggcctttatttatagcctaagtgtcacacaaaattgtagggaaatttgaatttctattcaaatttcacttgaatttgaaattgaatttgtggagccaaaatttcactaattatgatta

SEQ ID NO: 10858 - DNA, 449 bp, Glycine max
  unsure at all n locations
agctntctattctaatatagaaatccatgaatgtaccttaatgtctgaagtttatgggattaagatggtcattgaccaatccctattttatgatttaacaaaattgcctagtgaaggtgtaccttttgagggtgcattgattgatgaatggaaattctatttctctgtgcatgatgcctgccggttggtttgcaccaatcaagcggatatgaccggaagacttcttgtcagttcattggcttttgagagccgcatcctccattaccttattgttcgcatcttactccctagatcttcaaaccttgctcaggtttctgaagaagatctcattgtcatgtgggcctttcataaaggtttacaaattgattgggcacaccttgntagatatcgcatgcataaggcatngcgaatgaatgccccnttgccttatcctcatcttattactcttt

SEQ ID NO: 10859 - DNA, 393 bp, Glycine max
  unsure at all n locations
tgaggatagagacttcccaagctatntatcttctctctcatattgctctttctcactctaagaagtggattcactcttttgtcttggatgataggaatgaaggctcctacccttatttatactactccacctctacaatgaatggtggagattacttgtatcttatggtggagattaattctctagaatgcttcacacattctatgagtctctacactctgctactcccttccatactctntcataaggttctagaaggttccacacatctccagaatattccagaggtttctacattcttccacaagcttctagagagttctacactactctagagttctctaggacgttctagaaaattctacacttttctagaaagctctagaattttct

SEQ ID NO: 10860 - DNA, 446 bp, Glycine max
  unsure at all n locations
tgctcaccactatcagaggagaaacctttttgttgtttcatataaacctcctcctctaaatcaccattaagaaaagttgttttaacatcaatttgttgcaactcaaggtcaaaatgagcaactaatgccaagattatacgaagagaatctttcttagatactggagaaaaagtctctttgtaatctattccttccttttgagtaaatcctttagcaacaagtcttgccttgtatctctcgatgttgcctaatgaatcccttttggtcttaaaggcccatttatatccaatgacctttgccccattatgcaactctacaaggttccaaactttgttactctgcatagaattcatctcatccttcatggcagtcataccataaattgactctttacaactcatggctttgatcaaaagttcaggatcattntcagctncaatattata

SEQ ID NO: 10861 - DNA, 343 bp, Glycine max
tgggcaaatccgaggactggtgtacggaggcagcatcttctctcaattgtagtcaaatggatattccattgtcttaccttggaattcctgtaggggtcaactctaaaaataggtctgtgtggcaccccattattaccaaatgcgaggctcaacttacgaaatggaagcaaagaaatctatcaatggggggtagaataaccctcattaattcagtcttaacagccttacccatatatttgctatccttcttcaagagtcctaagctagcggtgcagaagattacatctatacaaaggatattttgatggggcaacctccaagactccattaagaatccttgggt

SEQ ID NO: 10862 - DNA, 436 bp, Glycine max
agcttatcttgattgaatgtagcattttacttgtctatatttctaaattatcatttctgcaaacgactcattcagctctgacattatagtgtttgtcttattgccattaaatcttacaggaatgtccttttccataatcaaggttttagagttatacactctatatgccttggataattgagagtattcaagtaagaatccataatcacatttggagtcaaactctttaaagttatccttggtgttcaaaatgaaacgttgacatccaaatgggtggaaataaaaaatattacgcttaccttcctttcacaattaatagggagtcttctgtaagattgacctaatatagactcttgtatgtaaaaaacaaacagtgtgatcgacgccgtactcgaatcaaataaacatgataatgcagtaactatgaagtgatcct

SEQ ID NO: 10863 - DNA, 279 bp, Glycine max
gtcattctcaaaccctaagagtaggtctcataaaccttctcttgtattagcctatatatgaatgcactctttatgtccatttgatatagccgtcatttaggatgagcgaaaaaatcataataaaatgcgtattgcctgtagcaagcaacatgagcataagtttcactatagatgatgccttacaactgtgagtaaccttttgcaactaaccttgccttgcttcgtacaaccttacatgcctcggtcaacttgtttcgaatacccatgtagaacctccta

SEQ ID NO: 10864 - DNA, 471 bp, Glycine max
  unsure at all n locations
tctaaactttgtacaagaatgaagctctgataccacttgttatacaagtggcctcagatatcttaagaaggggggggttgaattaagatattcgaaacttttctcctaattaaaaatctatcttactttttacttaaggtatgaattcccttaatgacaatcttcttaaatattaattcaaatgaagcaacttgaattatgaatataaagcaataataaataaaggagattaagggaagagaaaatgcaaactcagttttatactggttcggccacacccttgtgcctacgtccagtccccaagcaacccgcttgagagttccactaacttggtaattccttttacaagttctaaacacacaaggacaacccttcctttgtgttagagattcttacaacaagagactcacagtctcttaatcccttagagaatgagaagaagaagaggaacanatctctctagaaagagat

SEQ ID NO: 10865 - DNA, 420 bp, Glycine max
cacgcttatatctatgctaaaaccctcaatatttctgtcataaccgcatgggtgcgcgacatatacgagactacactctctaatctcccttactatgctgaccatggagtagcggatgactttcttcagatcgcctatgttagtggatagatattgactcacaagaaattacataatctttcttagatgtaacgcaaatacacctggaccgctttcttccttttccgacacacctacacacttttctaaattatgaaaacatacacaaactttcttagatatgatgcagctatgtgagagaagtcatacgcaacaactattgagtatttttcatcaaaaacaacgcggttttgctcctttgactataaaacatgtttattaaaaaaatatttctgcacaaaatgcaaacaagttctcaca

SEQ ID NO: 10866 - DNA, 435 bp, Glycine max
agcttcgtcatcatcatcaatttcatacacttcagtattattattgtcaccatcaccatagacggagctacaaaaattgtgactactgtccatctctaacattatatcgtccaacttctacacaccaacacattagaaaataaataaaaaatacataacctaattgttgcctttgaaacaccgtaatttctctatcattaagtgcctgcaatggtacacaacaatgacactagtatcttccattaacagaagaagaatggcagaattaaaataagttattattataaatagctttttttgttaaaaatataatttttaaaatactctatattgttcattataaattaaaatttattacaaaatatataatcttatagattcaacattttatgcatacattacataatttgttaataacactttattatcaataaa

SEQ ID NO: 10867 - DNA, 381 bp, Glycine max
  unsure at all n locations
agagcatactgcatttgacaacgaacaaacccattgtcttggaagtacttgtcaatgcgagtattccatgccctcggtgcttgctttagaccatacaacgccttgttcaatttcaagacttttccttcttgaccttcgatgacaaaacccattggttgttcaacatagacatcttctttaagatagccatttagaaatgccgattntacatcaagctgaaaaattctccacttcatttgagctgccaaggaaataagaagacgaatggtctccatgcgggcaaccggtgcaaacacttcatcataatcaactccatanttgtgcttgtagcccttagctacaagtcttgctgtgtgtctctcaacctctcattttgcattc

SEQ ID NO: 10868 - DNA, 317 bp, Glycine max
  unsure at all n locations
gctctcgagaanatcgagtggtcataaattttcacacagatgtccgattcggggaaataatatatcgagacgcacgaaattgaacaacggaagctctccagaaatttgaatggtcataacatttcactcggatgttcgatccggggacataatttatcgagacgctcgaaattgaacaaccgaagctctcgacaaattagaatggtcgtaacttttcacgcgaatgttcgattcggggacataactcatctagacgctcgaatatgaacaacgcgagctctcgagagatatgaatggtcataaagtttcacacggat

SEQ ID NO: 10869 - DNA, 468 bp, Glycine max
  unsure at all n locations
ctcagcttaacatcagaccacttccagagtgctggaactacttcacatttacttgatggggcctatgcaagttgaaagccttggaggaaagaggtatgcctatgttgttgtggatgatttctccagatttacctgggtcaactttatcagagaaaaatcagacacctttgaagtattcaaggagttgagtctaagacttcaaagagaaaaagactgtgtcatcaagagaatcaggagtgaccatggcagagagtttgaaaacagcaggtttactgaattctgcacatctgaaggcatcactcatgagttctctgcagccattacaccacaacagaatggcatagttgagaggaaaaacaggactttgcaagaggatgctanggtcatgcttcatgccaaagaacttccctataatctctgtgctgaagccatgaacacagcatgctacattcacaacagagtcacact

SEQ ID NO: 10870 - DNA, 355 bp, Glycine max
  unsure at all n locations
cttgaaactcagctttgctgcnacatttatatagaccctctcagtggccaaaccaacttcaatataataattatgagctttcaagccacagatataatccaggttggaagaatcatccaaatctgagatgggcaagtcttccacaacaacaacagcctgtccctcctttccagaatgctgctgggtcaagcaggccatatgttcctcctccaatgcagcagcaacaacaacaacaaagacaacaagcagctgaggccccttctcaaccttccttataggagttagtgaggcaaatgatcatccagaatatgcaattttagtaagagacaagagcctccattcagactctgacaaa

SEQ ID NO: 10871 - DNA, 262 bp, Glycine max
attgatgaattggagacactacctctgtagagctagatttgagggttttagtgatcataaaagtttgaaatacctatttgaccacaaagaactgaacatgaggcagaaaaggtggatggagttcttgaaggattatgacttagaagtggtatatcaccttagcaaagccaatgtagtggcagatgctttaagctgaaagtcattactcacatctgctatgatgattcaagaatgaaagttgactaaagagttcagagatctg

SEQ ID NO: 10872 - DNA, 332 bp, Glycine max
  unsure at all n locations
aaagattttggctggttatgccataaacacattcctgatcagaaaagaaagaagctggatgataagagtgagtcaatggttttcataagatatagctctagtggtgcatacaagctgtataatcctaccaccaagaaagtagaattcagcagagatgtattgtttgaagaatataatgcttggaaatccgataattgttgttcacgttaagatcaaacagtggctgagatagatttagatctagatcagactgcacctgatntagataatggagaagaacttggagaggaactcaatttaccacttgcaccacctgtggaatctaatgcacc

SEQ ID NO: 10873 - DNA, 426 bp, Glycine max
  unsure at all n locations
ggatgttgaattctggntgttcctggtgcggagatgatggtacagcgggtgaaccaaaagcggaagtttcttttggtgaggtagccatggaaaagcagagcgtttggaatgatttcgtaaatctcagaaggctattgggaaatgctggtataaacacgaatgccaagcagatataaatttgaatgaggaatgtagagggtcgtgtgaagcaacggtcgaattttccttggttcagtagtgaacgtgctattaatgttaagtgattcgtttgggcacgttcagattgctgtagntgctataattcctctagcacacaaatgcccagcttgcccctcagttnttcaaactgatttgcatccaaagcctttgtgaaaatatctgctatttgttcctcagtgtcaacatgcttcagtgtgatcactttat

SEQ ID NO: 10874 - DNA, 423 bp, Glycine max
  unsure at all n locations
tagaagcttcaagaattatggcctcatcaaactacttgtttcccgagggaaattctataaatagacctcttatctttaatggagtgggttaccactactggaaaacctgcatgcaaatctttatagaggcaatagaattaaatatttgggaagccataaaacaaggaccttatgttccctctataatagccggaagtgcaacaatagaaaaacctatagcagactggactgaggaagaaagaagattagtacaatataatttaaaggccaaaaatattattacatctgcccttggaatagatgaatactntatggtttcaaattgtaaaagtgctaaggatatgtgggatacactacaagtaacacatgaaggcacaacagatgttaaaagatctangataaacactttaactcgtgaatatg

SEQ ID NO: 10875 - DNA, 448 bp, Glycine max
  unsure at all n locations
ggagtttccaagtgccaattcgtcttcttcttatgtccagtcttcttctgacttcaattcatcaaggggctttccttctgtgtccagcatcttgggatgttcccagcctttgatgacagcttttcaggttctgctatccagtgatttgaggaaggccaccatccttgctttccagtattcatagttggttccattcagaataggtggtctgttcactggtcctccttctttctccatgttcatcagaatttatctccctagatctcactcagtgatttcgagtgcctgctctgataccaattgaaattctgatactggggacagatgtcgtacaggatgtcacgacatcacgcttcagaacatgcagtatatatntgacagtgtgtacagtgtanacaagaagataacacaagagaattgtaacccagttcgtgcaacctacctacat

SEQ ID NO: 10876 - DNA, 436 bp, Glycine max
  unsure at all n locations
gatactcagctggatttcctcttagagggaatctatccttcctaagatggtttctatcccagtcccccctattaagaactagctcctttcttcctctattgcctttagttgcatacacctttgtttggttctttatttggttcccaaccctctcatgaaacttctttacaaactctgacctaaattctccttctttatgtataaaagaagtgtcaagtaggagggtaattaggtctaatggtgttagaggattgaacccataaacaacctcaaaaggggattgcttggtggttctatggacccccctattgtaggcaaattctacatgaggaagatactcattccatgacttatggttgcttttcagaagagcccttatnagggtgtatagagactattcactacctttatttgcccatcagtttgtggatggaaa

SEQ ID NO: 10877 - DNA, 255 bp, Glycine max
tcttcatatattgtgtttttgttgatacacaattttacttggtttcatatgtgctctataaattgagttttatttgtttgcataacttgtaggcaacaataacgcaaccagttgttaataacatgatgaatgtcttgtactttcagattaccgctggagcaataccattgtaccttgttgcctttacaggaaactgggcttatggatcttccacagaactgtatttgctgaatagagtgaatggtcctagttggg

SEQ ID NO: 10878 - DNA, 393 bp, Glycine max
tctgcgagcattgttctccagattccatattctcatgacctcattcttcagtcccagttgggcataaagagagatgatatgagtgtcaccctggccatctttgttgtccagcctttcctcagatttccttagggcacaaaccgcattccttgtaagtcctgcttatatgtaaaaaatggccgcaatagaataagtattccagtccatgacaatgtgtggctgagtctacatctctttcaatactttttccactccaccaaaatcagacctcacaccataagaatttatacagatcctgtagctgaagttgtctggcaagacttggttctgtttcatctcacgaaacacataccgaaccttctgatgctgtccaatatttgtatatagacacat

SEQ ID NO: 10879 - DNA, 363 bp, Glycine max
  unsure at all n locations
tattgtgaggaaatatggtagtgccatagacactattattaccatgaactgcatcaatcccatagatgagaggtattcccagtcgcgactgaagagctgatttttgaaagccatccaccatatcagcccaatcagacgacagtgcattttcaaatggtgcactgccaccagaactgagtatgctccctatagagtgcacaaataatcaaacgccacccttcaaattcatttcaaattccaacaggttcaaagcttgaacaaaatgtagacacaaatggaccatgtaatacatcgatacaaaaacatcaccaatgttcccattntcaagacacactctcaataggggtccctcaaattcatttc

SEQ ID NO: 10880 - DNA, 474 bp, Glycine max
  unsure at all n locations
tntgcgacanactatgtctgcaacattataactttattattttttgttttgatacctacttttcttttgcatcatcatcaaatttaatttgtacgtgttgatgattcacttttttttcttatattactttntacctcaggcacttgcttttaattttaaaagataacaaatattatataatattatatctacataatctacacctatattataattnttatttttcacctatattataattgttatttttcaacttatttgcgcgaatgcactcaacttaaactagttatacactaaaaaaaactaactaaaaatcattattattatanttttaaataatcttacacgatggtcgaaaatatcacttaggataaattggagtaactntatggatcccataattggtaaggtagtaacaataataatacaccagagcatgagaatgagaagacagtcacatctaaattaaccttc

SEQ ID NO: 10881 - DNA, 339 bp, Glycine max
tactcctcatgcttctcaccatgtctaataaagttttatttcttcgctctaccacaccattctaatccggagaaccacgcatagtgtattgggcaacaatcccatgttcttgaagaaatttcgcaaatgaacctggtgcttgtccatcttctgtgtatctaccatagtactccccacctctatctgatctcgcgagcttaatttgttttccacattgtttctcaacttcagccttcaaaactgtaaaggcatctaaagcttcattcttagaatgaagatagtggagatacatatatcgtgaataatcatctataaaggttatgaagtatcttcaactat

SEQ ID NO: 10882 - DNA, 489 bp, Glycine max
  unsure at all n locations
tcttcagtcacctgcggcatgcaagcttctgacaatggttatgtaaactctcaacaacattaattgctattggtttctctcaatcaaagaatgactattctctntntaccattgacaaaggtgcttccctggttgttctgttggtctatgtagatgacattttgcttgctggcccaagtgctacatgtgttcattctattcaggccaagcttcaagctttgttcatactaaagatccttggttccttacaatattttctgggcctagaagttgcanagtctagaaagggcgttgtcttgactcagtgaanatatgccctttctctgttagaggatactggttttctttgctgcaaaccatcctcccttccaatggatccaaatctatagctcaacatgcttagtggtgatttactgcccgatccctcaatgtacaagcatttacttggtcgcctcatgtacctaactatttcaaggccggatattacat

SEQ ID NO: 10883 - DNA, 214 bp, Glycine max
  unsure at all n locations
ctgcaagcttgggagaccttactacttgcagtggtatctttgggtggattttctgcgtatgcatggtaggtcngctctaactgcaatggtatatcgaaaggtgctaaggatatcaaacttggccatactaagtcacacgaacagggatgttagaaactacatggcacttgatcgtcttagggccagagactactatcggtatgttcatgacatg

SEQ ID NO: 10884 - DNA, 437 bp, Glycine max
  unsure at all n locations
agcttgcagaccanggatntatctgcaacttcaaaactatgaggctgagtcataaatacatatccctcaagcaacccattaagaaaagcattgttgacatcaaactgaaataactcccacccttgagaaagagcaagagtgagaataacacanattgtgacaggctcgaccacaggaaaaaatgtctcatgaaaatcaaatccatgaacctaatgaaacaaaccccttatcaaccagtgtggctttgaacttgttgatagaaccatcaacattttcttttactctgaaaagccatttgcacccaatagcttgcctattaggaggtaggggaaccaagtcccgagttctgttttacagtaaagcatcatactcctcttgcatagctgtagaccaatctgaattttccagggcctctttgacagtcttgggttcaaatg

SEQ ID NO: 10885 - DNA, 413 bp, Glycine max
  unsure at all n locations
tgtcaaagttagcatggatggagcaccttacctccgcanagttgtcttgaagatgtacaagagttaccctgagctctctgatgccttgngcaaaatgtttagctccttcaccattggtaactataattaatccataatttaccatacattaactnttttttatatagaatttaatgactgatcataacttttacgtatcagtatctagtttgttttctctttaatataactaccaaaagatatggatcttaaatntgattttgtagaaagttaactaatggtgtatgtgaatataaaattgaatcgtgcagctgattcgatggtattaattattggtgtgttcttgatatatttaaggaaattgtgaatcccaaggcttcaatggattcatgaatgagagcaagttgatggat

SEQ ID NO: 10886 - DNA, 406 bp, Glycine max
  unsure at all n locations
ggcatcagttgaggctcgggttcttccagcttccatgggtaattgatcataattaattaaattgtntacaaatgttgtttgctttagcagtttttccattatgattacattatattttggctcttcttgtccctaaagttgaaatatcacgacactggaagagagaaagaatacttgccacaagttggtcagtggaatatgatgaacaaggtcagctaagaatgaacaaataatatattagatgtaattatcttaatgaaagaaaataaaagggaaaattacttgtttccaacttactgtaattcctgtaattntaatgcagaaagttataaatggaagtactgtaagatattgngcgtgtatcaacttctctcgaagtgtacaggagagtacagctcgtggattt

SEQ ID NO: 10887 - DNA, 426 bp, Glycine max
  unsure at all n locations
ngaaggcaaactggatgcattggttaactcgcgtacccagctggccttgaatcagaaatttgtacctgttgcaagggttagtggtttgtgctcctctgctgaccaccatacagaccattgcccttccatgcagcaacctggagcaatcgagcagcctgaagcttatgctgtgttagtgcttagctatactgagttttaaaagattggctaaaattttgttataacataagcacttatacaatgaaggaaagctggagttgctgcacatgatgtccaacgttattgtaaggaatcatattgtgctccacaatgcacaatgcaagatataatgtctaatgaagaatgaagctgcaggatcaccatgttgatacaatgccagacattctgccgaaatactgaccataaattgtgtatcttacagataat

SEQ ID NO: 10888 - DNA, 363 bp, Glycine max
  unsure at all n locations
tgtaatcgattacacacatattataatcgattaccagagaagttnttcagaaaacattctcaacagtcacatctttntctctgattcttaagtggccatcaaaggcttatatatatgtgactagagacacgaatttaacaagagttttgaagaacaaaaaggtcttatcctcttaacaagcaaaattgtgttatcctcttacaaattccttggccaaaacactcgtgattcaataagggaattattgagtgctcaaatngttcaatctatctctntcaaaagagatttcttcttctcttcttctttattctgaaaagggattaagagaccgacggtctcttgttgtgaaaggattctaaacac

SEQ ID NO: 10889 - DNA, 431 bp, Glycine max
  unsure at all n locations
agcttcttagtttcagatgatgcagatgggtttgtttctacctcatgcactcctctaatgactatggcatcatttctggcgctaaactgttgggagttggaggccatcttctcaattaaatttctggcttcagcaggagtcatgtctccaatggctccaccactggcaacatctatcatacttctctccatattactgagtccttcataaaaatattggagaagaagctgctctgaaatctgatgatggnggcaactggcacatagtttcttaaatctctccagtactcatacaagctctctccactgagttgtctaatacctgagatatccttcctgatggctgtggtcttggaagcaaggaaaaatttctctaagaatactctcttaatgtcatcccacctcgtgatggaccttggagcaagggaatac

SEQ ID NO: 10890 - DNA, 395 bp, Glycine max
  unsure at all n locations
ggctaattgaagatcttctacttgatattcacccttcgctagtagcattaccaccttggagtcgccctttgccaccagatctttaactcttgtttccctagtgagccacatgctggcatgtaatgccttatatntggctcgggtgtgggtaaggctaaagttgaactttaanggattttcaatgatgactacatcgagaccttcaaacacaattcctgctccattgcttgcactgttcatcgtgttgttgacaaatagtatccatagagataaggataccactatgtaagttccaccatgaaatctatgagggctttccctttgactgcctcttttttccaaggacaatgtcgtacttagataattctattgaccatttcatcatcctttcaact

SEQ ID NO: 10891 - DNA, 284 bp, Glycine max
  unsure at all n locations
gatcttatgcagaatcttctgttatagaagaggttgatgttgtcttanaactcattaagaagacctgngttatgcttggaattaatgagatgctacactaatatttgttctcatgggtcttatttcatcagtatcttgtcactggccaagtggagaatgatcttctgtttgcatccagtaatctattggcagaagttgggaaagatactggaggctcaaaagatcctatttacacacaaatcttgaggaacacattgagtttgatactaagttgggcagagaaa

SEQ ID NO: 10892 - DNA, 482 bp, Glycine max
tatgcgcaagaaccagtccgtctagtggaatgacgactgtcaagtggttttccccccgttcttatgtcgttggtgcccaggagaccccttattctatacatgactgtgttggatgggtcgatggggtgtatgctggggaagcatgtcttgtccggaaagagggaacgggttgtctactacttgagcaagaagttcaacacctgtgagatgaactactctttgcttgaaaagacatgttgtgccttggtgtgggcggcacatcgtcttatgcagtacatgctgagccacaccacttggttggtatccaagatggacccagtcaagtacatttttgaaaagcccgttcttaccggacggttcgtccagtggcaggttctgctatcaaagttcgacatttcttatgtcactcataaggcgataacggtaagcaccctttccgactatctagctcagtagccccttaatgactaccaactcatgca

SEQ ID NO: 10893 - DNA, 442 bp, Glycine max
  unsure at all n locations
attntacttgtttaaaaagtatattntatcatcaaaaactataaatntattaaaaaaaactacttttataactatatttgaaatattcatatttatgacttataatttaagtatttttttaataatgaaaacaactacggttataacgattaatcatcaaaatgaatacttttgaatgcaatacaataatacattggtatgtcaatacaataatacaacaaactattgtacatgcatgattcatcttcaatggttgtagtttcctttgctaatccctcacaatcagagtttgtaagggattagaaagggaaggtttcatccctaacactactactaaaataggattttacaatgttgaaccaacaacaattttagcaaatattttgaaaanaaatagtcacaactttataaataatcgcaaatatttaaagaatggtttttc

SEQ ID NO: 10894 - DNA, 475 bp, Glycine max
  unsure at all n locations
atctctgagtcacctgcggcatgcaagcttattaagttattaaattaaatcactcatgaattttnntctttttaatcttcattntatttatgttttctcatgttaatacaatacttttctctatctaaaataaaaaaatatcgtattaccattgaaatcattaattctattagtcaaatattgtcacaatttgatctcttttgtgtgcatttagtcattatattatatacttataaatttttagggaaaaacaaattattnattctanaaaatatacttttacgaaaagaaatatttgtaaatatttagacctgattaatccaacccaacccatttatgattgggttgggttgggtatgaaaaaaattatacaaacccgactagggatggcaacggngcangtcggngatgagtttgaccttccccgtcgagttttatagggtttgggtatacctgcgagtaacccactacacta

SEQ ID NO: 10895 - DNA, 406 bp, Glycine max
  unsure at all n locations
tctcacagtcacctgcggcatgcaagcttctcctcttgattctcatccttcttcaatcaatctctaagccattgttcctgctactnctcatccctctgattcagactggcccattgccatccgcaaaggtactagatcctctcgtaatcctcatcctatctataactctctaagctatcatcgcttgtctccttcatattcttcttttgggttctctctatcttcgcattctggcccttctaatattcatgaggcactgattcatcctggatggcgacaggctatgattgatgaaatgcacgctcttgaacatagaggtactagggaacttgtatcccttcctcctggcaagaaagctgagggttgcagatgggcttatacagttaaagttgggcctaatggtgag

SEQ ID NO: 10896 - DNA, 442 bp, Glycine max
  unsure at all n locations
atcctctaagcacctgcangctgcagcttggtattaggtaaacaattaattaaaccttgtctttgnggtttgtctccttgaggaatctgccagcacttgtttattgtattgtatatgaaatangactggatgattacttaattgctacttgtagtcatattaagatatgtgacctcgtcttgattttctttatttgtaagaaaaattgcttgttaatatttaattaatagttgggttgcaattaaattttatctgagctatacttgttaaaataaatcatattaattagttcgtgtatagattaaaataaaattagcaagctattagaaatgttgctatatgtgtgagaaaatgaataactggagttaaattatatagctagaggagtgtaagattaaattaattaattaggtgaaggttagattatgttaattaagttagt

SEQ ID NO: 10897 - DNA, 397 bp, Glycine max
tgatgcaacattggagaggttaatgaaacaacgagatgatgcgcttcatgagaggttggatcattatggagaatagagatcataatgaagaagaaaggaggagaagagggaatgatggtgttcctagacaaaaccgaattgatggtattaaactcaacattcctccatttaaaggaaagaatgatccggaggcctacttggagtgggagatgaaaatagagcatgttttctcatgcaacaactatgatgaggaccagaaggtgaagcttgccgccacagagttttccgactatgctcttgtgtggtggaacaagctacaaaaggagagagcaagatatgaagagccaatggttgatacatggacggagatgaaaaagatcatgatgaagcggtatgt

SEQ ID NO: 10898 - DNA, 430 bp, Glycine max
  unsure at all n locations
cagctgcagcttagcttcgtcccaggcttcatgtagacttgtccaanatcgtgaagtaaacctcggatccctgtcagatacaatactggagggaattccatgcaaccttactacttccttgatgtacaactccactagctnttccattctatacttcatattcaccggaataaaatgagcagatttggtgagtcgatctactatgacccacacagcatcatgttcacgactagtctggggtaaactagatacaaaatccatagatatgctctcccatttccattccggaatttccaatggcttcaattctcctgatggtcgctggtgctcaaccttagccttttgacatgtcanacatcttgctacatattcagctacatctttcttcataccatgccaccaaaaacttctcttcatatcttggtacatc

SEQ ID NO: 10899 - DNA, 458 bp, Glycine max
  unsure at all n locations
agctntaccaagggcattggttgctggctttgttaatactgacaaagaatttcagagcagaggtgtgaactttagctnttattcttgtgtttttttggggataaaatattgtgagggtcgaaatacagaactggaggatctggaattntaattttttctcttcgtattactgattatataagtcctcatctggttntgtccaggagaaacttcgggaaccacagctacattcctaatagtggataggtggactgtgactgttgcatctgttggagattcccgttgtatactatatacccagggtggtgctgttacctccttaactgttgatcaccgacttgaggagaatattgaagagtatgtttttatctctaaggccgtagttggtaacttctttgtatgctcttggntacgaagtacactgtatgcacangagggaacgtgtcacttctagtgga

SEQ ID NO: 10900 - DNA, 384 bp, Glycine max
  unsure at all n locations
tcttagtntcagatgatgcagatgggtttgtagctacctcatgcacttctctaatgactatggcatcatatctggcgctaaactgctgtggagtggaggccatcttctcagataaatatctggcttcagcaagaatcatgtctacaagggctccaccactggcagcatctatcatacttctctccatattactgagtccttcataaaaatgttggagaagacgctgttctgaaatctgatggtgagggcaactggcacatatgttcttaaatcgctcccagtactcatacaggctctctccacttgagtgtctaatacctgagatatctttcctgatggctgtggtccctgaagcacggaaaaaaatttctagaatactctctt

SEQ ID NO: 10901 - DNA, 386 bp, Glycine max
  unsure at all n locations
tcattcttagaatgatgtaagtagagatacatatatcgtgaataatcttctattaagggtatgaagtatttcggactatatgcatccatgtctggacaacatatgtctgtatgtatgatttctaataaattagaactcctctttgcaccctttttagacttgttagtttgcttacccttaatgcaatctacacaagtctcaaaatcagcgaaatccanagtactaagtactccttcatttactaatcgcttgattcttcaatagagatatgtcctaatctccggtgccacaacatagaggattcttcattcacaatacatcgttttaacccaacagaaacgtgcatagaagtagcgtcattttgcaattcaatcgaataaagacca

SEQ ID NO: 10902 - DNA, 458 bp, Glycine max
  unsure at all n locations
agcttgtaatcgattactcacatattattatcgattaccagagaangttntcagaaaacattctcaacagtcacatctttttctctgattcttaagtggccatcaaaggcttatatatatgtgactagagacacgaatttaacaagagttttgaagaacaaaaaggtcttatcctcttaacaagcaaaattgttttatcctcttacaaattccttggccaaaacacttgtgattcaataaggaattatttgagtgctcaaattgttcaatctatctctttcanaagagatttcttcttctcttcttctttattctgaanagggattaagagaccgagggtctcttgttgtgaaaggattctaaacacaaaggaaggattgtccttgtgtgtntagaacttgtacaaggaatatacaagatagtggaactctcaagcgggttgcttgtggactggacgt

SEQ ID NO: 10903 - DNA, 434 bp, Glycine max
  unsure at all n locations
agcttctcaatccgctctggatgagcataacctttgtcgtccctctgaaagatagcaatgggcaaaaagaaatcacattnttaattaatctcaggaataaagaaaacaaaaaaaatatttgatggtcaaacaaggaaattatcaacatgccttaagatacagtgtaaggcgagttcctcttggaatcagcttctcgggatctgtctcctcagatattgtatatgagctagcatttgcctccccttcccaaacatattgcttatcggattttggactctttgttgagacaaccaccttcaaacaacaaaaaattatataaataccagattaaacaaaaatatttaagagcatcacatatttacttntacaaanatgcatacccgatcagaaaccagaaaagcagaatataatcccacaccaaattgaccaattaa

SEQ ID NO: 10904 - DNA, 384 bp, Glycine max
gctattcttgtctatttgcgtttgtttttaaactttcccagtgtttgtaagagaattggtttcatttcttgttttaaaattaggagaaaacattattactttttttctaatttattcttcagtctcaatttagttatcttatttttaaaatatttgttttggtcatttagaatgagttcaatttcatcctttacaatgattaatgtttaagattttttttacaaaatataaaaaataaatacttcaaaaaaaattaatatttattagagacagtcttactaaaatattcttattctctctcctaatttcaataaaaattattaaatcttttaaaatatcattatttattacatgataaaattaaaataaatgtttgaatatcta

SEQ ID NO: 10905 - DNA, 463 bp, Glycine max
  unsure at all n locations
agcttgcatacaactcgttagctcctatacatggactatgagtcaantttttaaaattctatacatttcaaatctttaattctctagtagattgtagataacaagattattttaaaaataaaaagacaattgaacttattctattaactttgttgggccacaagatatgacaaaaaatataattataaacaaagctggcataaataaaaactaccccaccttgtatatataatatactaaaaaaccaaataaagaaagccgagctatacataactcaagtctgactaatttatttaacgagctcaattnttagctcaagtttagctcatttgattaatgaactaaattcaacgaattaattatcaaatcaagtgttgactatctgtgagttgtgttgactcattaccactatgaaatgtgactatagagttcaagaccagatctacccatttgcatgtaatcc

SEQ ID NO: 10906 - DNA, 473 bp, Glycine max
  unsure at all n locations
agcttgtagttcctttctctcctcttctccacctccatattcacataaggaataggccaccatatctatttcagacctctagtgcaaagcaagaatattttctgagccccttttagcttcatgatattcattgttgtggatgaacttccccagcaactgagtgtctaacatgctgtgtcgagcaccatattctcttatccttcggatcaataacgagcccatttgtttgaattttggcacgaactctaaagcatggaaaatacatttgcatcttaacctctgcgaatgcaattatctcaaacatatataaatgccttgaaccttttataacatttaagttaactactattatatgaataaatgaagagtgaagatctgatgcanacaacaccaagtgttctgatctgattaccgcatagtgaaaatgaacaatatctgtccacatggtagtgtttggtggaaaatgatttgtg

SEQ ID NO: 10907 - DNA, 377 bp, Glycine max
aacagcagaataattatgatatttcaagcaacagatataatcccaggtggaagaatcatccaactctgagatgggcaagtcctccacaacaacaacaatctgtccctcctttccagaatattgctgatccaagcacgccatatgttcctccttcaatgcagcaacaacaacagcaatctcaacaaagacaacaagcaattgaggctcctcctcaaccttccgtagaagagatagtgaggcatatgaccatccaagatatgctatctcagcaagagacaagagactccattcacagtctgacaaatcagatggtgcagatggctactcagttgaatcaagctcattcccaaaattctgacaaatagccttcacaaact

SEQ ID NO: 10908 - DNA, 468 bp, Glycine max
  unsure at all n locations
tgatcctctcagtcacctgcggcatgcaagcttctanactntgtacaagaatgaagctctgatactcacttgttagacaagtggcctcagatatcttaagaagggggggttgaattaagatatcccaaactgtttcccctaattaaaaatctatttcactttttactcaagttatgaattcccttaatgacaatcttcttaaatattaattcaaatgaagcaacttgaatatgaatataaagcaataataaataaaggagattaagggaagagaaaatgcaaactcagttttatactggttcggccacacccttgtgcctacgtccagtccccaagcaacccgcttgagagttccactatcttgtaaattccttttacaagttctaaacacacaaggacaatccttcctttgtgtttagagatcctttacaacaagagactcacagtctcttaatcccttagagaatg

SEQ ID NO: 10909 - DNA, 434 bp, Glycine max
  unsure at all n locations
atcttcttcataacgggagtccttgcttcttgatgttcaatggaagcggaatgtataaggaagaaagatgatnggagatgccacttcaaggagaagatgagtcaagaacaagctcaccaccataagaagccatggataagagcttgaaggtaggagaagatgagtggagggagaaggagagaacgagcacgaaacttagttcctcaaatgaggtatgaactctgaagtgtaattctcaaatgatcaaagttcaaaaaatacacacatatggcctctatttatagcctaagtgtcacacaaaattgtagggaaatttgaatttctattcaaatntcacttgaatntgaaattgaatctgtggagccaaaatttcactaattatgaatagtgaatnttagttatgggtcagcccactaatccaagatcaagtccaa

SEQ ID NO: 10910 - DNA, 326 bp, Glycine max
caagccttcagcgtcccgacatcgtccatgttcttgtattcttcctgcaattttcaataagaatggatcagtaaccggatggttcttcatcaagaattaattttaaaaagtcccattagttctggaatatatatttacttattcaatactgggcgttaagagatgaacataccaggcagattgcacaagcctcttcttcttgactttgctcagatgaacagtatattgtttctgtcaaatacttggaaatcaaatcctcagacaatcctgtgctcacatggcctattctctctccaagtgcaagtagttcctggtcgagcaaagca

SEQ ID NO: 10911 - DNA, 447 bp, Glycine max
  unsure at all n locations
agcttaagctccttcaactgtacaaggctcttaatatttgaagagtatccttggggaaccttcacccgacaaagacactgacaaaaacttatcttctccttnttggacaaagtatgacaagctgggggcaaataaattttcttcccatctgaccttggatgcaactgtgatcatatccccatctcagctagatcatgacgggtattcaagccatccttcgtcttgccttgaatgttaaggagcgtcccaatgacactgtcacatacatttttctccacatgcataacatcaatacaatgtctaacgtctagattagaccagtacggaagatcaaagaaaatggacttcttcttccatatgcaagtcttacttttatccttcttttgggcctttccaaatacagtattcaggtgttgaacccgctggtatacctgctcatcagtcaac

SEQ ID NO: 10912 - DNA, 453 bp, Glycine max
  unsure at all n locations
atatggacganagtgcacaactcctatntgttggtacgatgatggagaatctttacttcttggacctgaaatgctacaacagattaatgaacaagtgaagttgattcgagagaagataacagcatcccacgataggaaaaagagctattatgatagaaggaggaagccactacattttcaggaaggagagcatgtgtttttgaaggtttctcccgtaacccgggtcggaagagctctcaaatctaggaaggtgacgcccaagtatctaggcccgtatcagattttgaagaagattgggcctgtagcttatcatatcgccttacctccgagtttatcgaatatgcatcctgtgtttcatgtctctcaactgagacggtacaacccatatccatcacatatacttgcagtggatgaggtacaggtgaaagataacctcacctacagagcacaacc

SEQ ID NO: 10913 - DNA, 316 bp, Glycine max
  unsure at all n locations
agcttctagacaatggttttgtanactctcaacaactttatttgctaatgggttctctcaatcaaagaatgactattctctctttaccattgacaaaggtgcttccctcggtgttctggtggtctatgtagatgacattttgcttgctggccccagtgctacatgtgttcattctattcaagccaagcttcaagctttgttcatactaaagatcctttggtccttacaatattgtctgggcctagaaattgaaagtctatatagggcgttgtcttgactcagtgaaaatatgccctttctctgttagaggatactg

SEQ ID NO: 10914 - DNA, 469 bp, Glycine max
  unsure at all n locations
agcttaataagtccatctatggatngaaacaagcctttcgtcagtggtatttaaaatttcatgaggtcatttcttcatttagctttgaagagaatgtcatggatcactgtatataccagaaggtcagtgggagtaagatatgtttccttgtattatacgtagataatattctgcttgcgactaatgataagggtatgctatatgaggtgaaacaatttctctaaaagaactttgatatgaaggatatgggagaggcatcttatgtcataggcataatgatccataaaaaaagatctcgaggcattttaggcttgtctcaagacacctatatcaacaaatctttagagagatttaatatgaaagaatgttcaccaagtgtagctcccatcgtgaagggtgacatacttgctctgagtcatgccccaaaatgatntgagcggaacacatganaatattatatgcttacagt

SEQ ID NO: 10915 - DNA, 448 bp, Glycine max
  unsure at all n locations
agcttcatgcttaactatgtatggaaaaacttcattactgttgttcaagacatacaagtgagcttgtaacaaatcttctacacttggagtgatcgcatgcagtcctcttgaacccttaccacccactctgtcatcatgccgagactcaggaagcccaacaggtttagccttctctaagtattctgaacaaaattcaatggcttcttctgcaatgtacctctcaacaataaatgcttctggacgatatagattctttgtatacccttttaagatcttcatgtatcgctcaaccgggtacatccaccgtagataaacaggaccacaacatntgatttctctgaccagatgcacaatcaagtgaatcatgatgtcaaagaaagcanggggaaaatacatctgcaactggcacagtataattgcggcctcattttccaactcatcaaacatg

SEQ ID NO: 10916 - DNA, 445 bp, Glycine max
  unsure at all n locations
agcttgtgcattcaatatcctgattagggtgttccatatgttctcaagactggactaatacatttgctacccaatgaagccccctaatgtctaagaagatcatatcttaaggagttccatattgtttgttccaccatgaagccccctaatgtctaagaagatcatatctttctaaaggcttttcctcattctctggagggagtggcaaaagattggctatactaccttgctcccaggtccattttcagctgggatgaccttaagagggtgttcttggagaaattcttccctgcatctaggaccactgccatcagaaaagacatttcaggcattaggcaacttagtggagagagcttgtatgaatattgngaaagattcaagaaattgtgtgcaagctgtcctcaccaccagatttctaagcaacttcttcttcaatatttctatg

SEQ ID NO: 10917 - DNA, 466 bp, Glycine max
acctgcggcatgcaagcttcggtagagaacttcattgttgatggaagaggatggaaatctgttgataagataaacacttgaagtgaaggcatggtcccaataatgagaaggcatgttagcttgagagagtaaggtaagaccaagctccactatatttgaatatttgaactgtttaaaaatctccaatgtttctgatttactttttagtatacctagcagattggcttatttcattcattgtgtggaatgaaaacaggggattcaagcttgaatgctattagagtaggtattgtcagatcggagagagtgagagaatgagaggagagagaaacagagggttggagagagtgagaggtagaggtaaggatttcgagagagacaaagtgaaactgagagagaggcaccaatacacacaaaccagactcagggataggactcagctacactacaaccaaacaaactggag

SEQ ID NO: 10918 - DNA, 357 bp, Glycine max
tgcacagcatgctgatactgatcatgcatatttgtttgatgatgaccgaggaacaatttgggatcaacttgaaacttatgtgcttcaagagagaagaaaagctgcttattccactcgtgaagatgatcaaaggctggctatgaagatggttcaaactgagaaacatttggtattaccattggtttataaacttattgagctaactttgatattgccggtgtcgacagcatccgttgaaagagctttttcagcaatgaaaattatcaagtctaaattgcgcaataagatcaacgatgtgtggttcaatgacttgatgggatgttacaccgagcgggagatattcaagacacttgatga

SEQ ID NO: 10919 - DNA, 317 bp, Glycine max
  unsure at all n locations
agctntctagaaatgttttcaaagttntcaaagctgtattcgattaccaaaactacgtaatcgattaccaatgctttaaaatggttaaaaatgattttgtaagtgtgtaatcgattacacatcatatgtaatcgattaccagagcttttgaacgttggacatttgaattttgaataaaaataactgtgtaatcgattatgccaatgttgtaatcgattaccaaagaggattttcgagaaaatctgcgaacagtcacaacttttcattggatttatgaatggccatcaaaggcatttaaataggggtgacttgggcac

SEQ ID NO: 10920 - DNA, 415 bp, Glycine max
agcttcacaagcaatgtatctattgcaacatgtatgaatatttattatacattaagtagattataaatataaaaaattcatatgaggaataagagttaaaattgaacctctccaaattttgaatctgatgaagtacccttttttgaatccctgtgccaagtcaacatttaaacttgaatgatataaaaaagaaaaagtaaaagtcagccacattcagagttgcttttatcatactttgcatcaacgccttttatcaaggtggagaatactcggcatttcccatctgtggatgttgtagcaagaagaatctgcagtttaaagaaaaacaaaataaaaacaaagaagatgagcatagggggttttacatcaaataacaaatatatttcaaaacacaattatctaagatttgattctg

SEQ ID NO: 10921 - DNA, 346 bp, Glycine max
tgccaccatggagttatccaactatgctcttgtgtggtggaacaagctacaaaaggagagagcaagaaatgaagagccaatggttgatacatgggcagagatgaaaaggatcatgaggaagcagtatgtgccagctagttactcaagggatttgaaatttatgctccaaaaactaacccaaggcaacaagggggttaaggagtatttcaaggaaatggatgtgctcatgattcaagcaaagattgaagaagatgaggaggtaactatggatcgatttcttaatggtttgactaatgatacccgtgatattgttaagctgcaagagtttgttgaaatggatgatttg

SEQ ID NO: 10922 - DNA, 309 bp, Glycine max
agcttaccaccataggagaccatggataagagtttgaaggtagaagaagatgagtggaggaagagggagagaaggggggcacgaaatttatgcctcagatgatgtatgaactttgaagtgtaatttctcaaatgatcgaatttgaaaaattgcacacacaagacctctatttatagcctaagtgtcacacaaaattggaggaaaatatgaatttcacttgaatttgaatttgaatttgtggagccaaatttggaaccaaaatttcactaattatgattagtgaatttcagctatggtttagcccactaa

SEQ ID NO: 10923 - DNA, 389 bp, Glycine max
agcttgcatttgtggaagattaaaccccgaaagggtatattagagcacctcactgtgctattaacatcaaaccaagtaaatattatacccttgcaaaggatagtttagtacaccctcggtgaaatagatccaactacaataccacaacattaaacaataataaagaatttaacttggaataagaaaacactcatgaaatgattagatcattatagcccagtaaagggccccaagatcaacggtttcaaaaaaactgtacacgatctcatccacaaaatatttttactcacaaaattttaaaaagaaaatataaacaaaacaaactaaaaatagagagttagggggtatattgaattaggattttaaaaaactattttaacataaaaaaa

SEQ ID NO: 10924 - DNA, 191 bp, Glycine max
tgtggcccttttgatttttctacccaccgctttgcttggactgtcctatcccaaaccatattgaacatcatagcaactcaataatcaagtgtgctgacagcctaacccttcgatcacaaagaccctttgcagtgtaaaccttgctgtgcctatcttttctacctgtggaccgaacaatgtgccctacttgg

SEQ ID NO: 10925 - DNA, 428 bp, Glycine max
  unsure at all n locations
ccggattcctttcttttatcatgtgcacccaaacccaatcttcgggttcgaagacaacctactttctccctttgttggcttgattagcatagctcttattcttcctctcaatttgatctttgactctctcatgaagcttcttcacatagtccgcctttgcttgaccttctttatgcttaaaaacagaaacattaggcataggcaaaagatcaagaggagttagtgggttaaaaccataaacaacttcaaaaggagaacaattagtggtgctatgaacagctctattgtaagcaaattcaacatggggtaaacaagcttcccaagtttntaagttcttcctcaaaactgtcctaagcaaagttcccaaagtcctattaacaacttcccgttgcccatcggtttgtgggtgaccaagtggtgaaaataac

SEQ ID NO: 10926 - DNA, 373 bp, Glycine max
tgcctaattaaagcgcaatggaagacccattttgtctcatacccacacacaatcgcgggccacggattcacaacggcacatcccgatgtaatggcagcgaacccgccaagcaagccgttacacacgtcaatcacgttccagtggccatccaataaccgcttgctgaacaacgtcgtcagagccgcagtgctcccagccaatgtcgtcgtgacagctgtcctccctatagcgctccattgaccataataccctccacttccataccccttggctattgtcagaaacgaaccatggttgaagccgtaccagccgaaccataacaaaaacgaaccaagcacaactaaagacgcgctgtggccacgtaaagcaaccg

SEQ ID NO: 10927 - DNA, 353 bp, Glycine max
tacatcaacatcgattgatcgatcatggaaatgatccaaagctaagttgctgtgaacatagtgtatatggaaaccacaatagagttagcttccattgtgcaactctcacaactcagggtatcctatattatgtacactctgatgtttgggggccaccccaggtactctcattaggaggagcaaaatatttcataactttcattgatgattggtctaagaaagtctggacttatctgtcgaaacataaaaatcacgcttttaagtgtttcaaacaacggaaattgcttggtgagaatcaaactggtaggcatgtgaaactgctcagaactgataatggcctcgaatacttaagt

SEQ ID NO: 10928 - DNA, 391 bp, Glycine max
  unsure at all n locations
agctgcttctttaggtgcatagaatgcggttaaaaaaatagtaagtgtcatgaatctctgacataagcttcaaccaattaacattgtttgaatgacaactgttgtagttggacagcaatgacatagtttgtcctccatggtatgctttatgttcctattggttatagttttggtatgctttatgttcctattggttatagntttggtatgctttatgttcctattggttatagctttggtgctagaatgttcaatttggagtccacaagaggaggatctccatattgtgctggagtttttgttggagatggtacaagacaagcaagtgaaatggagctggagcttgcagagtatcatggcaagtatatatgaaattaacccataaaagcta

SEQ ID NO: 10929 - DNA, 359 bp, Glycine max
tggatcccaacactctgttcaggctctcctaaaatctagaggcaaatctaggatctctatcagacactatgctagatggcacaccatgtaatctgacaatctcactaatatatagggaggtcaacttctccaaggaaaatctgatattaatgggaataaagtgagtagacttggtcagtctgtcaagaataaccagatagaatctaaacctctaggagttctaggtagtcctacaacaaaatccatggaaatactgtccacttccagtggggtatctccaagggttgtaacttccctgaaggtctctgatgttctatcttagccttctgatagactaaacatgcatacataaactcatt

SEQ ID NO: 10930 - DNA, 443 bp, Glycine max
  unsure at all n locations
agctntgcaactnttcatccctggcacaattgtcaggattcaaagtattcctgcactggacgagtccaaccaaccaatcccaaacaaggtcgtattccatcgaattttttggtcatttaaggcatccatagatgtgtttgcattttgtaaacccattgtgcaaatcgatggatcaaggctatatggaagatacaaagggacactgttagttgcagttgcacaagatggcgctaacaacatatttccattggcattttccattgtcgagggtgagacaacatatgggtggcactttttttgcaaaacttgagaacacatgtgacaccacaacatggtatatgcttaatctctgacaggcatgagtcaatcaaaagtgcatacagatgacctgacaaggggtggacagtagacaactcgtcacatgtgttttgtattcgacacat

SEQ ID NO: 10931 - DNA, 369 bp, Glycine max
tagatgcaagttataatattgaaatctacaatagaaataaggttaaacaagatgttccttgaaaaagtttggttggtttgaaaaatttaaggctctagttagacttatttcttataatgagggctaattttatgcttgacctgatcatttttgaaagttcaataatttagtgaataaaatatgttttagattgttaataaattagtaaattttgtatttgtctattaattttttcttttgcattgagttcttaataacataataactttgtttttggtcatggacatttttttgtgtcctataaattagtgaattttgtgtttgttccctcatttttttcttttattatttattccctttgaaaaaaac

SEQ ID NO: 10932 - DNA, 410 bp, Glycine max
  unsure at all n locations
agctntatgttgactcttattgtagtcaacatttgaaatatttntaaaaggtaaataaatgtaagaatttgatactctatcataattttaatattataataatactaaaaaaattattataatttatatttacttaaatatgttgatctattagacattaaaaggttttttaaataacctaaaatccgatatttttaaccaaatatgtttttataaaagttgaaacttgatctatttttgaaagaatctaatataacctgaggttattgtgacttatcaatatataatgaaatatatgntaattgacttaaaatattttgttttttcttaattattctaaacatatgataaaatacattttttaaataattaaaccanatacttccatgcttcaaattatttattttaca

SEQ ID NO: 10933 - DNA, 355 bp, Glycine max
tctgttgttcaatttcgaacgtgtcgatatattatgcgcctgaatcgtacctccgagttaaaagttatgaccatttgaatttctcgagagcttccgttgttcaattacgaccgtctctatatattatgcgccttaatcggacctccgagtgaaaagttatgaccatttgaattggtcaagagcttccattgttcaatttcgagcgtctcgatatattatgcgcccgaatcggacatccgagtgaaaagttatgaccatttcaatttcttgagagcttccgttgttaaatttcgagcgtctcgatatattatgtgcctgaatcggacctccgagttaaaagttatgtccatttgaa

SEQ ID NO: 10934 - DNA, 361 bp, Glycine max
  unsure at all n locations
ntctctgttctgcaactatgtcatcctttttttttaggtgtagaatgaagcttgacaggttcaggtgcaggtgctgctactggtggaggcacatgaatttggttttcagacctcaaggtgatggcactcacattttttggattctgcacagtttgtgaaggcaacttgtaaaattttgggactgagcttgattcatctgagtatccaactaccccatttgatttgtcagactctgaatggaagctcttgtctcttcttgaaattgcatattctggatggtcatttgccttactaattcttctatggaaggttgaggaggagcctcagttgcttgttgtctttgttgtgactgttgctgctg

SEQ ID NO: 10935 - DNA, 197 bp, Glycine max
tgacagaatactgggactgttgttgattttattgggcagccaaatgccccatctgattgggtaagctctgaatggaggctctggtctcttgctgaaactgcatgttccgcatagtcatttgcctcacaagttcttcaagggaaggttgtggaggggcctcaactgttggctgtttctggggttgttgctgttgttgg

SEQ ID NO: 10936 - DNA, 363 bp, Glycine max
tattacgtgttgatgattataagacatatatatgtatatgaattgttaaaataaattaggaattaatagttcaaataataaaattaaattgaagaaaattaatatattaagattcaacaataaatactttcaatgcatttttagtttaattatttattaaatctttttaattgaaaataatatagttcaatttaatatatacatgttttgtgccatgtaaatattaatactgtgtgatgtttatatgattcatgaagtctgataacatgttactttgggattataacattgtgattgagattgagagtatgtgataaattaagtatgtgttgaattataagatacatgtgtattgagattttg

SEQ ID NO: 10937 - DNA, 453 bp, Glycine max
  unsure at all n locations
agctttntcttccttgttttcgtntttaattaattaaaaggaacgcgaaaacattntgggctagttttgaaccctcaccctacaagcatgaaaggactccctttgccgctaagctactgcaatttaattatttattagttgcagttcatgtgtatttataacttctgaaggataaatcatttatacacaaacggtttaaaattgtgtgtctctaagttatgctgaacatgcaatattatgttaaatattggtatgcattggatttgatcctttaaagtttattacatgttgaatggatatacgtacaatgttattttgaattggtatacatgtaatttctatgattcaatattgagcacatttgcattattaagtatgtttatgccaaatattattttgaatgttaagtgattaatataatnttattaaattagagaatagccacagcatctt

SEQ ID NO: 10938 - DNA, 450 bp, Glycine max
  unsure at all n locations
agcttcatggctgntatacttgcttcaagaacttggagtctttattggaatggctattgaatcgttagtaaacagtacatctgctattgatctagcaaggaatcctgtctctcatgaccgaagcaagcacattgagactaaatttcatttcttgagagatcaagtggctaaaggaaaagtttagctaccgcattgcagaactgaggttcaactagctgacataatgactaaggctttgaaggctaacatattcacggagctgagaatgagaatatgaattcagagtttggaggattaagatagtctgttcaataaatgttgttgtaatgttcttgttgttgattcactgtttttgaatcaaagtggggtgttacggataatactaaacacttactaatttgatagtaattgatggtgattagttactttgagatagactatatatataca

SEQ ID NO: 10939 - DNA, 294 bp, Glycine max
  unsure at all n locations
ttgacatttgtcacacctttagacgtaattatgagcatctttgcacaatgtaggccaataaaaacctgattggagaaccttgacaacagttctttctccattataatggcctccataaggtgaactatggaaacgccacaatatgcttcttgcctcctcctaagttacacaccttcacaagagggtgtccgctctaattgtaaacagataaggaccatcccacacaaaatgtntagcatccctgaaaaacttattcttttggtgccaggttagatcatcatggagtgcaccaac

SEQ ID NO: 10940 - DNA, 432 bp, Glycine max
agcttcttagtctcacctgatgaattcgtggctactttatgcactcctctaatgacaatagcatcaattctggcactaaattgctgggagttggaagccatcttctcaattaaatttctggcttcagcaggagtaatgtctctaagggctccaccactggcagcatctatcatacttctctccatgttactgagtccttcataaaaatattggagaagaagctgctctgaaatctggtggtcatctctcccagtattcatataggctctctccactgagttgtctaatacctgaaatatcttttctgatggtcgtggtcctggaagcagggaaatttttttctaagaatactctcttgaggtcatcccagctcgtgatagaccttggagcaaggtaatatagcaagtcctttgctactccctataaagaatg

SEQ ID NO: 10941 - DNA, 364 bp, Glycine max
tcaagcttaacattcaattttgagcgtctcgatatatgacaggactcaaccagacatccgagtaaaaagttattgtcgtttgaattggctcagagcttcaacattcaattttgagcgtctcgatatatgacgggactcaattagacatctgagtaaaaagttattgtcgtttgaattagctcagagcttcaacattcaatttcgagcgtctcgatatatcacgagactatatcagacatccgagtaaaaagttattgtcgtttgaattcgctcagaggttcaacattcaatttcgagcgtctcgatatattacgggcctcaatcagacatccgagtaaaaagatattgtcgtttgaattggctc

SEQ ID NO: 10942 - DNA, 439 bp, Glycine max
agcttagagccaattcaaacgacaataacttcttactctgatgtctgattgagtcccgtcatatatcgagacgctcgaaatttaatgttgaagctcttagccaattcaaacgacaataactttttactcgaatgtctgattgagtcctgtaatataacgagacgctcgaaattgaatgttgaagctctgagccaattcaaacgacaataactttttactcggatgtctgattgagtcccgtcatatatcgagacgctcgaaattgaatgttgaatctctgagccaattcaaacgacaataactttttactcggatgtctgattgagtcccgtaatatatcgagacgctcagaattgaatgttgaagctctgagccaattcaaacgacaataactttttactcggatgtctgattgagtcccgtcatatatcgagacgct

SEQ ID NO: 10943 - DNA, 398 bp, Glycine max
  unsure at all n locations
agcttgcgaatntnggcgatatcacgggacatatgcttgatgactgctgtgagaacaccaaccttccacgccttctttaaggcatgtggtttcttgtaaggtggagggccttgatctttatgtagaccaatttgaggccaccatagttcatttccagtcggtcaccatggaggaggaacacccttctctattgagaacctcctctgacgaggatcacagcgctgcataagtgctgacaagagagaacccaaagctgtgaactgtaactcttgcaatgtgtgtagtgtacgaccaatggaagtgcttccatcattctttccacgaatagcattatcggcttgatacttggctatggcatcatgaccatttctatcaaacctgaacttatccttacacca

SEQ ID NO: 10944 - DNA, 355 bp, Glycine max
ttgagaaaattcaaacgacaataactttttactcggatgtctgattgagtcccgtaatatatcgagacgctcgaaattgaataccgaagcgctgagcaagttcaaacaacaataactttttactcggatgtctgattgagtcccgtaatatatcgaaaagctcgaatgtgaatgtagaagctcagagcaaattcaaacgacaataactttttactcggatgtctgattgagtcccgtaatatatcgagatgctcgaaatggaataccgaagctctgagcaaattcaaacaataataactttttactcggatgtccgattgagtcccgttatatatcggaacgcttgaaattgaat

SEQ ID NO: 10945 - DNA, 382 bp, Glycine max
  unsure at all n locations
agcttctacattcaatttcgagctgttcgatatatcactggactcaatcggacatncgagtaaaaagttattgtagtgtgaattcgctctaggctttggtattccatttcgagcgtctcgatatatcacgggactcaatcggacatcagagtaaaaagttattgttgttagaattcgctcagagcttctgtattccatttcgagcatctcgatatattacgggactcaatcagacatccgagtaaaaagtgattgttgtttcaatttgctcagggcttcggtattccatttcgagcgtgtcgatgtattacgggactcaatcagacatccgagtaataagttattgccgattgaatctgctcacagcttcgacattccattt

SEQ ID NO: 10946 - DNA, 446 bp, Glycine max
  unsure at all n locations
agcttactggtgctcaggtactctctatttcttcactttaccaacaataaacaaactattctacttatctcctcttttcattatatttaggttcttctcagacgtttgaggttgttcctcagtcctggttatccctatgaagaaattttaagcacatttcacaatcagaccggcatagtcatgtgctcctacctcccaatgttcaccagctntaatagaacaaggggtaaacaaaattaaaaattaaaaatttccctatttccgattcttgttcgctatttcttataggattaagtcaacaactattaacgaacgttgtattctgcaccaggtggcttgattcaattgaaccatggcaggcctcagcctctccaatatgtggtcaatgcangccttttggctgctctttacagtgattatctcgatgctgctgatacacctggatg

SEQ ID NO: 10947 - DNA, 371 bp, Glycine max
  unsure at all n locations
ttaattnttttggaatcaaataaaaaatcaaaaattgtctcatattgtaaaaattgttcaaatcgtgtttcaatagaattaattgattaatccaatatgtataaaaaaatactcaatacaaaaagattcttcatgtttataatatcagagattgattaattcaatagaattaattgattgatcttttgtaatactcaattaattgattaattctccaaaattaatctccattgtaatactcaattaattgattaattgaatggagattgattaattcaatagaattaattgattgatctaatatgtataaaaaatactcaatacaaaaagattctttaatagaataaatttcatgtttgttttaatttaaa

SEQ ID NO: 10948 - DNA, 407 bp, Glycine max
  unsure at all n locations
agcttgccaacccatggaagctcctaatatctcccacactttntggggtgggccattcttggatggccttgattttctcagggtccacttggaccccatttctaccaactacaaaccctaagaaaactatattatctacacaaaaagtacacttctctatatttgcatagagggtgtttttcctaaggactaaaagaacttgcctgagatgtcctaatggatcatctaggctcctactgtacactaaaatatcatcaaaataaacaactacaaatctacctatgaaatcccttaagacatgatgcataagcctcataaaggtgcttggtacattagtgagcccaaaaggcatcactagccattcatacaaaccanacttggtcttgaaagcggttntccactcatca

SEQ ID NO: 10949 - DNA, 353 bp, Glycine max
tccatcacttttcacacagaggtcagattcgggcacataatatgtcgagatgctcggaattgaaccacggaagctctcgagtaattcaaatggtcataacttttcacacagatgtccgattcgggcgcataatatgtcgagtagctcgaaattgaacaacggaagctgtcgagaaattcaaatggtcataaattttcacacggaggtcagattcaggcacataatatgtcgagatgctcggaattgaaccacgaaagctctcgagaaattcaaatggtcataacttttcacacggatgaccgattcaggcgtattacatatacagacgctcgaaatggaacaacgaaagctct

SEQ ID NO: 10950 - DNA, 448 bp, Glycine max
  unsure at all n locations
agcttgaatcggacctcagtgtgaaaagttatgaccatttgaatttctcgagagctttcgttgttcaatgtcgagcatctcgacatattatgcgctcgaatcgaacatccgtgtgaaaagttatgaccatttgagtttctcgagagcttccgtggttcaattccgagtatctagacctattatgtgcccgaatctgaccttcgtgtgaaaagttatgaccatttgaatttctcgagagcttccgatgtttaatttcgagcgtctcaatatattgtaagcctgaatcggagctcagtgtgaaaagttatgaccatttgtatttctcgagagcttccttggttcaattccgagcatctcgacatattatgtgcccgaatctgaccttcgtgtgaaaagttatgacctattgaatttctcgagagctnccgatgtttaatttcgagcgtct

SEQ ID NO: 10951 - DNA, 362 bp, Glycine max
taagctccttcaactgcacaagactcttaatatttgaagagtatccatgtggaaccttcacctgacgaagacactgacaaaaacttatcttctcctttttggacaaagtatgacaagctgggggcaagtaaattttattcccatcagaccttggatgcaactgtgatcgtatccccatcttagttagatcttgacgggtattcaagccatccttcatcttgccttgaatgttaaggagcatcccaatcacactgtcacatacatttttctccacatgcataacatcaatacaatgtctaacgtctagatcagaccagtacggaagatcaaagaaaatggacctcttcttccatatgcaagtc

SEQ ID NO: 10952 - DNA, 470 bp, Glycine max
  unsure at all n locations
gatccttaagtcacctgcggcatgcaagcttgcattntaagacaaatcccccccaccctcaaagctgattctcaatccagcagtcccttaccaccttgtggtaatgcttgttattaagccatccatcaaagaccttaaaaggcttaggaccccaatcaatgctcttagatttcatgaggatagggcagtgatcagagtagttcctttcaaggttgagctgcgaactgtctggccacttagaaagccaaccatcagagacaacagctctatccaatttgcttttacaggaaccattaggcctaacccatgtgaactgcttacccacactaggaatatcttccacctccatgatagcaagccaatcattgaaatctgacatgatgctggactctgaatntccatgattgcttcccattctctctgaagggtgcctaatacaattataatcgccaataagacaccagcatata

SEQ ID NO: 10953 - DNA, 386 bp, Glycine max
agcttcagtggcttattgaagatgaagaggtatttgtgactcagcacgttgaggtgtgtctcaccattgagagatataatgacaaggcgctgtgtgatgtggtcccaatggaagcgacccatgtgctgttaggaagatcgtggcagtatgataccactgcagagcatgatggcttcaccaacaacatctttttgcgcaagctgacaagaagattgctttcgcaccgttatctcctgaagaggtttgtgaggatcatatacaactgagaggattgagaaagagtgatactcttgtgacgaaaatgagtgagacacttgataacgaaatgtgaggatagaacaagagtgaaacacttgagacggaaaagagagatcacacgtagagtg

SEQ ID NO: 10954 - DNA, 420 bp, Glycine max
  unsure at all n locations
tagctngtgcctcttcacgtctggaatattaatgtatcttatagatccaaagacccttaagtgctttgttgatggcttcttcccgttccaagcttcaattggagtcttgtcttttacagacttagtcggacatttgatgagtatgtaaacagcagtgtagactactttagcccagaatgtgttaggtagtcccttctccttaggcatcgatctgtccatttccataaatgtgtaattctttctctcggacactccattttgttgaggaaaatatgtgattgtaagttgttgctcaatgccttcatccttacaaaatctttcanactcgcgagaggtgtactctctgccgcgatcacttcttagtacttttatccgttttccactttgattatcagcaagggccttgaactttttgaatac

SEQ ID NO: 10955 - DNA, 422 bp, Glycine max
agcttgagcaatcctttgttaactatgtctcgcacgatatggcagtcgatttcaatgtgtttagttcgttcgtggaaaatagggtttgaggctatctggatggcggactgattatcacaatagagagttgcaggttgaacgaaggggaccggaaaatcatgaaggaggtaggtgagccactgaagttcacacgtagtagaagccaaggctctatactctgcctcagatgaactgcgagagaccgtagattgcttcttggaccaccaggaaattagagactcacccagatagactgagaagccagtgatggagcgtcgtgtgtcgcaacatcctgcccaatcggagtcactgaaagctttgagagtgagtgtaccttgagccacgaagaagatgccagaaccaggagttcctttgaggtacgt

SEQ ID NO: 10956 - DNA, 361 bp, Glycine max
tgttgtttgcgacgccaacggatacaactctttttcatcggattcatattcatgatcttgatcttgatcctcgtacgctggtgatgaggagcgggttgagtggccagtagttttgaaacggagtaatgtggggccagtggagtgcactgttgaagaattaccaatggggcttccatccatgattcgtgcactcgactttcctagcgtcactgctcctccctgcttcttcttcgcagccatgtgccatttcttcagagccttgtttgtgtgctcgtcaaatattgctgttttcatccttgaacccatctgcgtgtatgtatgtgtgcgtttacagcgatacattgtcgtccattagaccaat

SEQ ID NO: 10957 - DNA, 315 bp, Glycine max
  unsure at all n locations
tgcacctgaatcgttcttccgtttganaagttatgaccacttgaatttctcgagagctttcgttgttcaatttcgagcgtctcgatatattatgcgcctgaatcggactttcgtgtgataagttatgaccatatgaatttcttgagagctttcgttgttcaattatgagcttctcaatatactatgcaccttaatcggacttccgtgtgataaggtatgaccatttgaatttcttgagggcttccgtcgtgcaatttcaagcgtctcggtatattatgcgcctgaatcggactgctcggtgataagttatgacca

SEQ ID NO: 10958 - DNA, 589 bp, Glycine max
agcttctgtcagtctgagataagactttggctatatggagattttgctcatccagtatcacatcaacatcaggaatatgaagagcatgataccaagcattagaggagaaagaattgtcccgtagattctcaaaatacccagtttctaaactgtattgatctagccagtataatgagtgaaattcagtagttaaagcatggattaaccagtcaactcttggccagaaattggcataattctccttcaaaagcatggattttaattttaggtgataggattctattgcagcatgtggctcaggagttgtcacagagagtgattttatggcattaatccacatatctgcatgagaagcacagtaatatggttattcaagaaacaatattaatgcagaatactcaaatgactggatagtccactaattatgatgaaaataattagtcaattgtagaaaatgctagtgtgagtgttgcccaagaaaacttaaggcactcatctggaggtgggactaagaatgaaatgaatttgatataaaatctgaatcagaatgtttctgatcaaaactgactatgatgtgaggctacaacag

SEQ ID NO: 10959 - DNA, 562 bp, Glycine max
agcttccctgcatagaaaattataagattgtgaatcttgctaaggagaatgctgtggatcactcactacatgttggaaatggaagtgatggtcaagcgagtgttaacgaaacagttggaactgcagagtcggtcatccaagaatctgctgagtatttgaaggacatgagtgaagaagaattgatggaaatgtgtgacctcaaccatttgttagatgaattgggtccacgtttcaaagattggacaggccgtcaaccattgcctgttgatgcagacttgttgccagctgtggttccaggatataaaaccccattcagacttcttccttatcggataaggccttgtttaaccaacaaggaaatgactaacttccgtaggcttgcaagaacaacagctccacattttgcccttggtaagcaagaaactatctagttaaattcatgtcttgcaatttgcaaatgtctctttctaatagatactatttgtttgctaatgcaggcagaaacagagaattgcaaagtctggctcgtgctatggtgaaactgtgggaaacaagtgctatt

SEQ ID NO: 10960 - DNA, 379 bp, Glycine max
ttactgttttgcagtgttcatcctccaaatcttttaaccatgtattgtttcgtgtcatgaagttgttgcaccctgaatcaaaataccatcattcttctagacatgttggttgtaactcctcgtaagccatcaacaaaatctcttcttcttcatctaattcatcataatttgctttcttttccaaggcaggacactcatatgggaaatttcctagtttgtgacatttgaaacactcaatagtggctttattgaaggattgtctacctctccctctgccacgtcctcctctatacgcacctcgaccccggcctctgatgggtccatcctcttgagtgttttggcgagtgtgttcttcatgaggtgccttcaacacatgctc

SEQ ID NO: 10961 - DNA, 647 bp, Glycine max
agcttagaactaacaatggtggtgaatatgaagacaccaaatttaagaggttttgctatgagaattgaatcaaagtggagaggattgtatcaagtagtcctcaatagaatggtgtagctaagtgtatgaactaaacattgactgaaagagttagaagcttacatgtacagtcaagcctacgaaagcagttttgggcagaagctatgaacacaacaacttacttgattaaccgaggtccactagtaccattggaacatagaatactagaagaggtattgagtgaaaaaaggtcaaacttacgcatctaaagtttttggttgtgtaacttatgtgcatattagtgatcaaggaaaaaataaacttgatcccaaataaaaaaagtgcacttttattggttatggtgaggatgattttgactaccgcttttgggataatgaaaaaaaatgatgatttgtagtagagatgtgatctttaatgaaagaataatgtaaaatgaaaaacataacatagacactaacaactcaaaacagagtgagtcaatgtatgtagaggtggatgatgtcccaaaaactcttgtaattgtgagtcatcaaccagaggaatcaatggaagataacagtgaaccacatttcaacatacgagatcat

SEQ ID NO: 10962 - DNA, 567 bp, Glycine max
  unsure at all n locations
agctttgaaggtgcgtagtccaccattttccctagtagaatactggtaatgtgtctactatcattgtcatcgtttttttcgtcattgaggtgccacttaagctgccaggttctctccacctttgggcgtattcttttgaaagaatcgtgccctctttttgcacatgttctatagttgcatcctatccgaagacattatactgacactgcctaacgaaggcaaccactaggtcattccaagaatggactcgggaaggttccaagttagtgtaccaggtaacagctaccccagtaagactttcttggaaggaatgtatcagcaattccttatcttttgtgtatgcccccatcttccgataatgcatctttagatggttcttggggcaagtagtcctctcgtacttgtcaaagtccagcaccttgaacttgggaggggtgatgatattgggtactangaacaactctcctaggttagcaaaggcataatcttcacctccttcaatggccatgagcctttcctctagatgatcccacttttccatttctgccatagcatgagggtttttac

SEQ ID NO: 10963 - DNA, 653 bp, Glycine max
  unsure at all n locations
agcttaagtttaaagttaattatttctctttattattcaatcaaaattatatcattagtaaatcaaccaagtggttgaacataaatgattagtgtactggatttaagattgaattaatcgagtaatatccgagtttaaccctcagcgaaaataattactagatatttaagtccaaaaaaatatcattagcaaaaacacacaattagattttttttaagatatttagtaagcacatcttatacttgatcaaacaagtaataacttaaggctaagcattgtaagtaacactaaataaaattaaattggatgtgtcttaagaatattaattaattcttaaaaatcacattaaaaaaaaaaaagaaagacatcaataatatatttttaataaaaatttaacttttattcccttccctccttttttatttataagacctaagtttaaaattgtatttgtttctttttatcagatctaatctaatctataatatttttggaattaattattttaaaaatatccttcattaaaagaagataaaaaaatatattaataaataattaaaagaaaaaaatattattaacaatgataatttaaaaaaaatgatgaatttaacataattntattattatcaattaaaattattattttttttaat

SEQ ID NO: 10964 - DNA, 538 bp, Glycine max
gctttcatgctgatgattcattcaagcagtcacaaacaagttatcctaactatatgcagtgatgaataaaattaaaaagggttgggttgcctcccagtaagcgctcgtttaacgtcattagcttgacgcatcttacttcatatgtcttgaaaatacatgagagtggtcatcctcttaatattccctccacgatactgctttaatctctaaccatttactacccatggtctgtctagattttctaattgaggatcaaataattccacaaccccgtagggcttgacatctttgatgatgaaaggcccaaaccatttggatttcatcttgccggaaaataatttcaatcttgaattgaacaaaaaacattttgtgccctagctggaactcctttttaagcagctttttatcatgataggccttcactttttcattgacaattcttgaagactcttaggcattcatcctcattttttctaactctaagagttgaaacttccttttttctcctgctaaggactcatcaaaattaaggaatttc

SEQ ID NO: 10965 - DNA, 380 bp, Glycine max
tggcaggaaaatttgatcaaattttctaggctaatttctttttgttggtctcttgggcaggcatctccaatcttaactgcattcattgcaggacaagctgctacctttaagatgtttgaaacgattaagaggcagccagatattgatgcttatgacactggtggttgactgctagatgatatttctggagatataaagcttaagaaggtctgctttagttatacttctagacctgatgagcaaatattcaatggattttcaatttcaataccaagtgacactactgcagctttggtagggcaaagtggaagtgagaaatcaacaattattagtttaattgagagattttatgatccacaagctggtgaagttctcattga

SEQ ID NO: 10966 - DNA, 622 bp, Glycine max
agctttgatgcaacatttggagatgtttatgatacaacgagatgatgcgctccatgagaggttggatcaaatggagaatagagatcataatgaagaagaaaggaggagaagagggaatgatggtgttcctagacaaaaccgaattgatggtattaaactcaacattcctccatttaaaggaaagaatgatccggaggcctacttggagtgggagatgaaaatagagcatgttttctcatgcaacaactatgaggaggaccaaaaggtgaagcttgccgccacggagttttccggctatgctcttgtgtggtggaacaagctacaaaaggagagagcaagaaatgaagagccaatggttgatacatggacggagatgaaaaagatcatgaggaagcggtatgtgccggctagttactcaagggacttgaaattcaagctccaaaaactaacccaaggcaacaagggggttgaggagtatttcaggaaatggatgtgctcatgattcaagcaaatattgaagaagatgaggaggtaactatggctcgatttcttaatggtttgactaatgatatccgtgatattgttgagctgcaagagtttgttgaaatggatgatttgcttc

SEQ ID NO: 10967 - DNA, 566 bp, Glycine max
agcttgccttgccccttgatatatttgttggactcatggtcactatgaatgacaaattccttgggataaaggtagtgttgccatgttttcaaagcccgtactaaggcatacaactccttatcataagttgaatagttaagggtaggaccacttaacttttcactaaaataagcaattggatggccttcttgcatcaacacagccccaatcccaacatttgaagcatcacactcaatttcaaaagatttttgaaagtttggcaacgcaagtatgggggcattagttagcttttgcttaagaacattgaaagcttcttcttgtttctctccccatttgaaaccaacatttttcttgagcacttcattgagaggtgctgccaatgtgctaaaatccttcacaaatcgtctataaaaacttgctaagccatgaaaacttctcacctcggtcacagacttaggtgtaggccattcttgaataggcctaacctttctctcatcaacttgcactccttttgaactcacaccaaaaccaagaaacacaacatggttagtccaaaagatgcattt

SEQ ID NO: 10968 - DNA, 328 bp, Glycine max
tatcgtgacatgtgaactcgatgtatggcatgtctccatgtggggttagctgaaacatggatgctctggtggcaagcacattagccgtctgatctttctctcttggaatgtggcggaaagagacctcatcaagaactcaattaccttcttgatgtatgcctgatagggcatcaactcgtgatccctagtttgccattctcccctcatctggcgaattaccaaggctgagtctctgctcactttaaccaattcgacatttaagtcaattgccacttggattccgagggcacatgcctcatactcagccatattattcgtgcaatcgaag

SEQ ID NO: 10969 - DNA, 650 bp, Glycine max
agcttctacttcatgttcttcttcacctttatgttcttctttcatatttttctcttttttacattatattaattatcatgtctacatttttgtcatttctttttctcggtgtatattaggagcaggtgtctatatggagtatggataatttttgtatactagaaaagtaatgatatatatcacatacctcagtaacatattttctctctttatctcacgaattctattacattatctcacttatcatatttatatacttttctcttgttggatcaagtggtctcggattaattaagaagggggggttgaattaatttttaatgtgtcttgactaattaaaaattatccttcttaatattactagattcaattaggctttactattaagttatgaggaagtaaagaacaaaaacaataacttagacaaaagtaaagcggaaataaaagtacgtagcggaaaagtaaaaagtgtagggaagaagaagacaaacacaagatttatactggttcggccacaacccatgcctacatccagtccccaagcaaccactggttcttgagatttctaataaccttgtaaaatcctttacaagcaaagatccacaagggatgtaccctcccttgttctctttgaacaaccaagtggatgt

SEQ ID NO: 10970 - DNA, 410 bp, Glycine max
gctctaggaaccttgaacggagaaagatctatatataggcttgctaagggtagagagaggaaaactagagatttggatcacgtaaagtgtgttaaggatgaagaaagcaaaggcttagtgcatgaaaaagatatcaaggaaaggtggaaggtgtatttccacaacttatttaatgatggatatggatatgactctagcagtctagacacaagagaagaggaccggaactataagtattatcgtcggattcagaaacaggaagtaaaggaagcgttgaaaagaatgagtaacggtaaggcggtggggccaaacaacatacctattgaagtgtggaaaactcttggagatagaggtcttgagtggctcaccaaactctttaatgaaattatgaggtcaaaacgcatgcccga

SEQ ID NO: 10971 - DNA, 594 bp, Glycine max
agcttgtcgcattacaccaagttgtttttggccttttgttgtctaagttgctgatccacatagcggagacggggtattccctcttgctccccaaggcttctttgtgtcacttgaatttggccactgatggcatcacgcaaacaccgaaagtggcgagaaattgttcttaaagcaagcgtagtatatggttctgctgctccacacccggcaaccatgtcaaaagatgacaccacaatctgcatctgatggcagtactgtctgtatcttttatctacctataaccagtggaaacaaggaattttttatggagtccgccattggccgacactatcatgaattcataactaactgtcttttcaatagttaaacacaccgttcaaactttggagcaacaaatgaattctacaaacattatagatataactgtagagcaatattatgtcctcttaattaatcttcattcaaatagaattaaaaacgtataaactttgtgaacatcaactatataattaatggctttatggtggtgcaccagttcaatctgacgtgacagctaacatttcaaaaccatttaccttcgttactggtttgggc

SEQ ID NO: 10972 - DNA, 503 bp, Glycine max
agctttaaggtcaagagggctgaaggattatatatcttgcctcgttgtagatattattccttcagatcatcccgtgttgccaacaattccaagaaagaaacgtaacgtgctaacttcccttctctttggaaagaaatctcaaaactctacaaacaaaggcaccaataagctttcttctgttggtgttgtggaggaattatttgaagagggttctgcaatgcttacagagaggtaactgggaccataactgctaaatttatatttgcatgatgtcatttgaagtttaatttgtcaccatcatggtggaaagagagaaaaaatgatccttttttcccaatacatctatctttgattcttaaattttcggacttaaaatgcaggttaggcaaggattttccatctaatacgaatcctgagatgttccgctgtgcggtttgccaagcagatcagccctctgtggacagtttatcaatgaacactgggccttgtttccccccagtatc

SEQ ID NO: 10973 - DNA, 465 bp, Glycine max
ttaaagaagcaatgcattaccccaaatggattaatgcaatggaagaagagttgaattctattgagaagaattcaacatgggaacttgttaatctgcctcttgacaagaaacccatagcactgaagtgggtttataaagtgaaggtgaaatccaaatgaggccagacttgtggcaaaagggttcttatgaaaacctggagttgactatggtgaggtctatgcacctgtggcaagaatagaaacagtgagattggtggtagcaattgcaaatataaaaggttggtctatgcataaactagatgtgaagtctgctttcttaaatggacagctagatgaggaggtttatgtggaccagccactctttgagaaattgggacaagaagaaaaggtatacagattgagaaaggcaatatatggtcttaagcaagctccaaggggctggaacaaaaaaattgacagctttctt

SEQ ID NO: 10974 - DNA, 464 bp, Glycine max
ttctaaactttgtttcaaaactttgtttttctgcaagtggaaattctgcagaaaacaaaatgttggatcaagtggcctccgaataaattaagaaaggggggttgaattaattattaatgtgtccttactaatttaaaatttaacccttttaatgttactagatttccaattagcttttactactaactttagaaagtaaagaacataaataaaaacttatccaaaagtaaaagcgataattaaaagtccatagcagaaattaaagagtgtatggcagaataatacaaacccccgatttatactgggtctgccacataccgtgcctacatccaatcctccagcaacctgctgttcttgagatttcttttaacccttgtaaatcctttacatgccaaagatccacaagggatgtccccttccttgttctctttgaaaaacccagtggatgttttcctcccctttga

SEQ ID NO: 10975 - DNA, 499 bp, Glycine max
acactataaaaactcagctttgagcgaatttaaacgacaataacttttttctctgatgtctgattgagtcccgtaatatatcgagacccgtgaaattgaatgttgaagctctgagccaattcaaacgacaataacgttttactcggatgtctgattgagtcccgtcatataccgagacgctcgaaattgaatgttgaaacttcgagccaattttaaacgacaataaccttttactcggatgtctgattgagtcccgcaatatatcgagaccctcgaaattgaatgtggaagctctgagccaatttgaacgacaataactttttactcggatgtctgattgagtcccgtaatatatcgagacgctcgaaattgaatgttgaagctttgagccaattcaaacgacattaacttttttatctcggatgtctgattgagtcccctaatatatttgagacgctcgaaattgaatgttgaaccttttgagcaattcaaacgacaa

SEQ ID NO: 10976 - DNA, 544 bp, Glycine max
agcttaaacattcactttcgagcctctcgatatattacgggactcaatcaaacatccgagaaaaaagttattgtcttttgaatttgctcagaggttcaacattaaatttcgagcgtctcgatatattacgggactcaatcagatatccgagtaaaactttattgtcgtttgaattggctcagaggttcaacattcaatttcgagcgtctcgatatgttatgggactcaatcagacatcccagtaaaaagttattgtcgtctgaattggctcagagcttcaacattcaatttctagcgtctcgatatatgacgggacaaaatcagacatccgagtaaatacttattgacgtttgaatttgctaagagcttcaacattcaatttcgagcgtctcgttatattacgggactcaatcagatatccgagtaaaaaagtattgtcgtttgaattggctcaaagcttaaacattcactttcgagcgccacgatttattacgggactcaatcaaacatccgaaaaaaaagttattgtcgtttgaatttgctc

SEQ ID NO: 10977 - DNA, 521 bp, Glycine max
agcttccaaatgagcatccaatccccttttcttttattatggctattatctagaatattctcaatggtattgtgataggcagttctaacaatataggtacccgtaggggagaatttccaaattaccttatcattctccatcacgttcaagaggggaagagctagaattttttcagcatcatggtggctaaagattgcttccacgagatatttcttccatgcacacttattatgatctattaaatcatccactcttaagccataattttcatttgaaggaaaagtcgagacataggaattgttatcatttttaagccaaggttgggactaagcatgaatagaattaccatttccaatcctccattgctaaactccttttatcactacccgtgaagtatggatactacgccatacaaagcttgaattatgccccaattgtgcatccaaaaaatccaccgacggaaaataattggctttgaaattctttgctattatagtacttggctggccataaatcttcaa

SEQ ID NO: 10978 - DNA, 506 bp, Glycine max
tgaaagatctcatgaaccaagtcgtgcagtattctggagcagcagtcttacttagccaagctgttaggttacaattatgatatacaatacaagtcaggtaagtccaacgttgttgcagatgcgctttccagggtacctcatcccgaagcaagccagtactggttattatctatccctcacttcatcttcctcgatacactgcgccaacacttcaccaccagcactcctttccaggccatgcttcaccaagttacgagtgaccccagttcacaccccgagtttgcacttcgcgacggcttgttattcttcaataatcgaatttggttggaacccgacaaccctttcgtcgataccttgattgacgaattccactctactcctatcggcggtcacctcgactttgccaagacactccattgcatacaagtcagtttccactggaacaccctcagccgtgacgttaagcgttttattcgacaatgcccgaaatgccaacaagtcaaata

SEQ ID NO: 10979 - DNA, 613 bp, Glycine max
agctttttttccattggtgctatctgaaaatctgtttttattaatattaatcactaaacattcttcagttggttaaaaactcatgtttcatgattgaaaggtataaaagttatgacttcatattaatttcttcttggtctatgacatgatttatagtgtatttatttctcacattctaattgactttttatatgatggtgatgcacttgcagatcagaattggtccctgcatatgttcgtctgctgcgtgataatgaggctgaagtacgtattgctgctgctgggaaagtaactaagttttcccgcatattaaatcccgatcttgcgattcagcatattctaccatgtgtgaaggtacagtcacagtaaaaaaattgggattcttagaggttaacatttatgatactagtatgattacaactgataaagtttgcctactataggagttatcaactgattcttctcaacatgttcgctctgcactggcttctgttataatgggtatggcaccggtgttagggaaggtatataaattactatctaaactcattatttatactgacataaatttaacacatttaaagtcattccaaatgtggcttaagttattatg

SEQ ID NO: 10980 - DNA, 568 bp, Glycine max
agcttctagccaaatggacttaccttgaattaattcctttgatagcccttttgagccttgtttccctttccttgttttgaagctcactacaagccttaagtgaaaaaccatgatatcactgttagtgcttagctctactgagttttaaaagattggctaagattttgttaaaacataagcacttagacaatgaaggaaagctggagttgctgcacatgatgtccaacgttatgtcaaggaataagatcgggctgcacaatgcacaaggcaagataaaatgtcaaatgaagaattgaagttgcaggatccacgatgtcggatacaatgtcctgacatcctgcccgaaaatactggagttgctgcacaatgcataagtcaagataaaatgtcaaatgaagaattgaagctgcagaatccacgatgtcggacacgatgtcctgacatctggcccgaaaatactggacacataaatctgttatatctttaacagattattgtgtagttagcaagagataagatgatctatcttctggaacgaattaaaagataattaaagttcgaatttcaa

SEQ ID NO: 10981 - DNA, 610 bp, Glycine max
agcttagaatacctgctaccaattcagttcccaagactaacaacaatttcatttccattaaatctattttgtcttgtaataaagaagctattgatatctggcattttcatttgggtcatccttcatatgatagaatgcaattgttgaaacaaacttaccctatgttgacttgtgataaaacctttgtttgtgatactttccatagagcaaaacagagaaaactcccatttcccaatagtgactcttatgcttctagtcctttctctttgatacatgtagacatttggggtccttgtgccacaactgctttgaatggacataagtattttcttacaattgtggatgatcatactagatttgtttggatttttataatgacttcaaaagttgagactcaaactcatttacaagcctttgtttcctatgttgagaggcaattcaatacaaaagtgaaagctatccgatcagacaatggtgcagaatttattatgaaacatttttatcataatactggtatcatacaccaaacttcttgtgttgaaaccccccctctcaaatggaaatatggaaagaaagccatcacatttattaaatgttactcgaacccttt

SEQ ID NO: 10982 - DNA, 647 bp, Glycine max
  unsure at all n locations
agcttatcgtaaggattaatctataatatttatatttatacctttatatatgtagtatattctatggattaatctttatacaaatacatgaatcagatcagcttaataaacaacaaaagtcagcattattgtgtttgcccgttaatatttacgtggtttttgcgaggaataaaattttgtattcctctgtttatttatatggcaatgtttcgtaatttgaaaaatacgttgttgcttttaaacgttcacatttgagagatataattattctcgatgttttcttcggtgttttaaaaaaagatagcgcggtaacgcacggtttcatataataaattatgtatcagatttaaaaattaatttaaaattcaagctatagttcatagaatgacaagttgacaataactaagcttgtgaaataatttattttgggcacggaacttcattnttttacaacaaaaaaaaacaaattcactatttattgtatttctttagcaaaaaatttatgccaattgcttaaaccataaggtataactaacttgatctctctttttttccagtaaaaaaaaaaacgtgatctcttcttaaaagatatatgattatttatttttaccacgtattattttcattaaaaattaataaaaatttat

SEQ ID NO: 10983 - DNA, 423 bp, Glycine max
atgggtccaagtggcttcttataccaatgccacgagaagtgtggtggtcagattcataaagagggaactgatttgtcgatacggactccctaggtagatcattactgacaatggcaccaatctgaacaataaaatgatgcaggaaatgtgcggggatttcaagatccagcatcataactctaccccttatcggccaaagatgaatggggctgtagaggctgcaaataaaaatattaagaagattattcagaagatgacggtgtcatacaaagattggcatgagatgctgcctttcgccctgcacggatatagaacctcggtacaaacttctactggggcaacgccatattccttggtttatgggatggaagcggtactcccatttgaggtagaagtcccttcccagaaatactagcggaatca

SEQ ID NO: 10984 - DNA, 484 bp, Glycine max
tcatgagagagtcaaagatcaaattgagaggtttaaataaaagctatgctaaacaagccaacaaagggagaaagaaggttgtcttcgaacccggagattgggtttgggtgcacatgagaaaagaaaggtttccggaacaaaggaaatcaaagcttcaaccaaggggagatggaccatttcaagtgcttgaaagaatcaatgacaatgcttacaaagttgagctgcccggtgagtataatgttagttccaccttcaatgtctctgatttatctctttttgatacagatggagaatccgatttgaggacaaatccttctcaagagggagagaatgatgaggacatgaccaagagcaagggcaaggatccacttgaaggacttggaggacctatgacaagggctagagcaaggaaagccaaagaagctcttcaacaagtgctgtccatactatttgaatacaagcccaagtttcaaggaaaaaagtc

SEQ ID NO: 10985 - DNA, 605 bp, Glycine max
agcttgaaattgaaaaacggaagatgtctattaattcaaatggtcataacttatcacaccgaagtccgattcaggcacataatatatcgagacgctcgaaattgaacaacggaagctctcgagaaattcaaatggtcataacttttcaaatggaagtccgattcaggtgcataatatatcgagaagcttgaaattgaacaaaggaagctctcgagaaattcaaatggtcataacttatcacacggaagtccgattcaagagcatactatgtgaagatgctcgaaattgaacaacgaaagctctcgagaaattcaaatggtcataacttgccacacggaagtccgattcagacgcataatataccgagacgctcgaaattgaacaatgaaagctctcaacaaattcaaatggtcaaaacttgtgacacagaagtccgattcaggcgcataatatatcgagaagcttgaaattgaacaacggaggctctcgagaaattcaaatggtcataaagtgtcacacggaagtccgattccgggggatagtatatcgagaaggtcaaaattgaacaacggaagctctcgagaaattcaaatggtcataacttt

SEQ ID NO: 10986 - DNA, 440 bp, Glycine max
agcttctcggtacatcacgggcttcattcttacacccatgtcaaaagttatggccctgtgaattggtccacagcttccttgttaagtttcgagcgtctcgatatatcatgtgtctgaatcggacatccgagtgaaaagttatgacaattttaatttgtcgagaacttacattattcaatttggagcgtctctatagatcatgggcctaaatcatacactcatgtgaaaagttatggccgattgaattggaccatagctttcttgcttaatatcgagcgttgttgtatattatgtgccagaatgtgacattcgacgccttagacatgaccatgggaatgtttctagaggtacatctttaattctgtgcatcatgatatactatgggcctgagtcggacatacaaggtaaaggtcatgagcatttggattatttgagaactt

SEQ ID NO: 10987 - DNA, 555 bp, Glycine max
agcttccaagaatcaagatcaagattcttgactcaagattcaagaatcaagagaagacttaatcaagataagtattaaaaagtttttcaaaaactgagtagcacatgaatctttctcaaccccccttcttaattattctgaggccacttgatccaacaagtggtatcagagcaattatcttgtagaaagtctaaccacttcaagattcatggcctcttcaaatcctttgtttcctgaaggaaattccattcatagaccacccattttcaatggtgagggttaccattattggaaaacccgtatgcagatttttattgaagccatagatctaaatatttgggaagcaatagaaataagaccatacatacccactgtagtagatgtaagcacaagcactacaacacaaaaacctagagataagtggacaaaagaagatagaagaagaatccagtttgatctcaaagccaaaaacattattacttcagccttaggaatatatgagtattttagagtgtcaaaatgtacaaatgccaaagagatgtgggatactctcca

SEQ ID NO: 10988 - DNA, 598 bp, Glycine max
agcttgttgtcaccatcaacaatctgtttgttcttgaagtaactagccttgccaaaaccctcctcagggaaatggccactccccatttgagtcgaggtgtgttggccgtcggactcagagttcacaacctctcccccccactcaatcattgacgcgctgtcagagaggtacgagaatagaggagccggccagtatcccataacatggtcattcccaaactgcatccaccagttaccctctttggggtcctacatacatattggttttccataatagacaacatcagatggcattgttccatattaataaattcatggaccctaaaaaataatgcagcattcacgtataatgaaatgttagtgtcagagattctcttgatttataattaactagtgtggtctgcacaaaacagtggtgttaatatattaatggtgcattatggtagtgtttgttaagtgctgggcgtatttttatgccagaatgtccaatatcaagagataatatataaaatggaaataaataaataaaaaatgtacctttcagaccaggatgctgatatcatattgggaagagctatacttaaaaaagggggagatgc

SEQ ID NO: 10989 - DNA, 347 bp, Glycine max
atcaactatgcatctggcagaaaacatgaatggccttaccaatattagctgaatggccgtatctacacaaatatgcatcaccactgattctgtcgggaagataaagagtttcactacgaccatgacatctttaatgactaaaataggtatgattatggatgcacctgctacttgcaaagtcatctcttacgggcatgatctgcaactgttccaaacttatacacatggagagcggtattacaggaaagaaggctcctaagtcactaagagcctttttcacagtgacttctgcaattgaacagggagtattgacactgccattgtttttttgctagggtggtaagatc

SEQ ID NO: 10990 - DNA, 339 bp, Glycine max
caacgaactctatgaccatctccttggagagaagcatttttctaatgaacagacattcagtctctatgtgcttatttctcctatgaaagactgaatttgacgcagatctgaatagcagccggattatcagaatccaacttcatttgcaactatacacagaacctcaattcttgccgaaagtgaataccccacatgagtggacaagttaccatagccatagatcgacattcaagtgctgcactagatctatcgacgacaggatgcttcttgcttttgcgagagagacaatttccttccacgaagactcaagcgcctagggtagacctcctattaatggga

SEQ ID NO: 10991 - DNA, 483 bp, Glycine max
ttatataccctgagactaggctcaagcccttttatttacactatatcagaggtgagtgagcctattagcagtgacccctttgttctagtaattattatttgtgttgttgttcatgaagcactatctagtatgaattttaattggttgcaataggatttcaatgtaaaggtgaattttttggagaataattttcctttgatcttacttcgtctgctgaattcctaaggattattgttggtctggttttctatataagcctaaggaatcaatcctggcaaaccctatgatccgcattcccagcggatctagggtgaaccaatttggcgttcctgctttgcacatgagaaggaatgttggcttgagagttaggtccatggttgagatagtggatcacaacacaaatttcagttctcatagaatacatgcatagtgtttttgttacatgtagaaatattatttgggattgttccttcaacatttatg

SEQ ID NO: 10992 - DNA, 506 bp, Glycine max
tcccgacaaacacttggaggagaagaagaatttttgaagaaaaaagttaaaattaacttacgaaccttacaattattagaatctttctcatctaactactccaaaagttgactgcataacgtgattttatcttagtggagaagttttatttattttacctccctatttcttctcctataggtgattgtagaatgtacagaagcttatacaaattgaactattactttgcttatccaataagattagatttatatacttgctagatgcatagtctattaaaaagtaatattacacgaagttttggattattgaatttagtctcgtagcagtttattatttattataaattgaaaatcctttttgaacactttgtttaatcgggttgtactagttattgaactaaccattacttgacctattaatggtagtatacatctcatatcatctcactggataatatttctctctgcgccataatttcaacatggaatcaaagaagtatatca

SEQ ID NO: 10993 - DNA, 642 bp, Glycine max
agcttctcagggaaaaatcttgacggttaggattccaatggatatccattccaccccaaatatctcaagtttttaggtaagaattcaagaccctttggaaggtacactgaattaattctctcagagtctccattgtgagatttgaaagtgagtaatctcaggtttggcatctttctgaatactttggagcttaaatttatatgtgtaatttgagtcatatctaaccatattccttcaactgcagcagttccctgacaaataataattagaattaatgtttacatcttttgtaataatttgcattttttataccaagagtttaggaatgcaagtcaaagtatcattaacatactctattatttgtcaatacatcatagatttccacaggatcccacaatctactgcgttgccctggaaatttaacagattcttcacgaacaacttctctacccatttcttgtatcagatcgtgcatatctatgcaattgctatatgtagtagtgataagagctttgtctaaaagacttcttatccctatatcagcagaaaaatcgcagtcattaatatttttgttacatggtctctgctttgtcctttaagaaaacagctatgtctaaaaaaatgtttttctcatcatcatct

SEQ ID NO: 10994 - DNA, 512 bp, Glycine max
acagtagagccgaccggctggcatgctagcttggcgcgtcaacttacatttgacttccagaggaacctcatgttgaagaaatgatgcccgccacaacgtaaggctccatccccaaatggactgtctctgatctcaagcttctgcagattaggacatcctttcagaacatatcggagtcccagatcaatgtctccagcagaggctactgaccgcgccctaatcgacttcccatacgtgcgattgtaagtcaaagcccgatcagtccttttaccagacacagaatgccgagtgagcttcctgcgttcataacgatggcaccaaaaccctcatccatgggttctagcgactctgggcctggcctataccgtccaaatttgcacaacctaaacacctcaacatccgggcagttgttcgacatggctaccacggcagcattcgccatcctctggcacattaacagaatcgactgcagtttcctacaacctcgagaaaacggcttcaaaccccacctt

SEQ ID NO: 10995 - DNA, 308 bp, Glycine max
ttgagccaattctaacgataataactttttactcggatgttcgattgagtcccgtaatatattgacacgctcgaaattgaatgttgaagctctgagccaattcaaacaacaataaatttttactcggatgtccgattcagtgacgtaatatatcgggacgctcgaaattgaatgttgaacctctcagccaactcaaacgacaataactttttactcggatgtctgattgagtcccgaactatatcgagacgctcgaaatagaatgttgaacctctaagccaattcaaacgacaataacattttattgg

SEQ ID NO: 10996 - DNA, 392 bp, Glycine max
cagcttgtacatctcaacctatcacataatattcttgaaggggagctgaacttgactggattgataggcttgcgcacattagacttgtcaaataacagattttatggggatattgggttgaatttcccttccatttgtgccaatttagtcgttgcgaatgtctcaggtaataaattgactggtgtgattgaaaactgctttgatcaatgtctcaagttgcagtacttggatttgagcaccaacaatctgagtggaagcatatggatgaagttttcgaggctcaaagagttttctgttgcggagaaccatctaaatgggactattcctttggaagctttttctttgaattgtagccttcaaaaactagaccttttacaaaatggattttgctg

SEQ ID NO: 10997 - DNA, 505 bp, Glycine max
agcttgaatcggacatccgtgtgaaaagttatgagcatttgaattactcaagagcttccattgttcaatttcgagcatctcgatatattataagcctgaatcggacattcgtgtgaaaagttatgaccatttgaatttctcaagagcttccgttgttcaatttcgagcctctcgacatattatgcgcttgaatcggatatccgtgtgaaaagttatgaccatttgaatatctcgacagcttctgatgtttaattcgagcgtatcaatatattattagcctgaatcgaacctcagtgtgaaaagttatgaccattttaatttcccgagaacttccgtttttcattttcgagcgtctctatatgtgatgctccttaatataacatccgcgtgaaaagttatgaccatttgaatttcttcaagagcctccgttgttcaatttgagcgtctcgatatgtgatttgcctgaatcggacattccggggaaaagttaagacccttttaaatt

SEQ ID NO: 10998 - DNA, 487 bp, Glycine max
agcttgtagggttaaagtctcacgattgttacatgctgatgcaataattgttaggcgtgactatacgagacatcttgccaaacaaagtcaggttatccataactcacctgtgctttttttaccatgccatatatagcaaagtcattgatcctgtcaagtttgatgagctacaaaatgaggccgcaattatactgtgccagttggagatgtattttccccctgctttctttgacatcatgattcacttgattgtgcatctagtcagagaaatcaaatgtcgtggtcctgtttatttgcggtggatgtacccggttgagtgatacatgaagatcttataagggtatacaaataatctatatcgtccaaaagcatctattgttgagaggtaaattgcatatgaagccattgaattttgtctagaatacattgaaaaggctaaaactattggccttcctgaatctcaacatgatgacaaagtgggtggtta

SEQ ID NO: 10999 - DNA, 615 bp, Glycine max
agcttatcaatctgaattcattggcatggatgggcttcttgaccttaggaattaagactatgaaggttttatttatgtaagttaggtcctttcctttgttcaaaatttgtagtgctagacttgtgatatcaacaccaataatactccaaaatttgtggtaaaaaagagtggaggtgtcatttggactaagggattttgtggggagcatttgagaaatggtgtcttgaattttagtccctatgaattcagcattcaagatattgaggagattcggtgaaattgtgttttgaaataagcttgtaactttctctgttaacaaagtcttggagggggtaaacaagtcagaaaattaattcataagaacttcacctatattctcaaaggcatatacaaatctcccatcatcctttttaagcctctgaatagtatttactttttgcctctaagataccttttggtggaaaaaagttgtgttttggtcatcgggttttagccaatttgcacaagaacattggtctcacttattttcgtcctgcaacaagacatcatcaagagtatttttaccaactattattttaccttccactttgttagtctacataggaagttggaagc

SEQ ID NO: 11000 - DNA, 601 bp, Glycine max
agctttacacaacaaatatttaattgttgtgtgatcagtgtaaattactattttttatcctaccagataagaccaaaatttctcaagtgcaaacacaattgccagtaattctttctcagttgtggcatagttaatctgagcatcattcaaaactttgctagcataatagatggtatggaatattctacctttccactgcccaagtacagcacctactgcataatcacttgcatcacacatcaattcaaactcttgcccccagtctggtgacgtaatcacaggagcagaaaccattttagctttgagagtgttaaaggcttctagacactcttcattaaatacaaacacagcttccttgttcaatagattgcttaagggtttagcaatcttggagaagtctttaatgaatctccgataaaaccctgcatgtcccaaaaagctgcatatgcctttcgcattgactgggggtgggagtttatcaataacatctaatttagctttatccacctttattccttttttagaaatcttgagtcctagcacaatgccttcttgaaccataaagtgacattttttcatactttagcaccatattggattc

SEQ ID NO: 11001 - DNA, 553 bp, Glycine max
agcttcccgctgatggtatttatagtttaatgataccattgcttcctttggatttaagggaatcattgttgatcaatgtatatatttaaaggtcagtgaaaataaggtaatattttttattctgtatgctgatgatatcttgcttgcaactaattatcttggtattttcgtgagattaagaagtttctctttagtaattttgaaatgaaggatatgggtgaggcaagctatgtgataggaatataaatattcagagacaaatcacaaggactattaggcttgttctagaaaacatatatcaataaagtactagagagtttcaagatgaaaaattgctcagcatcacccattccaattcaaaaagagacacatttagtcctgcataatgccataagaatgatttggaacgaaaacaaatagaagcaattttgtatgcatctgttgatgaaagtattatgtatgcttagatttgtacttgactagtcataagctttgcaacttggatgttaagaagatatcaaagtaatctgggaattgaaacattggaaaaact

SEQ ID NO: 11002 - DNA, 610 bp, Glycine max
agcttttctttgagaaaagcaaaggcttgctcttgtttttcaccccaggtaaacgccatattcttcttcaccagctcattgagaggagatgcaattgtagagaaattaggaacgaaccttctatagaagcttgctaacccatggaagctcctaacatctcccacactttttggggtggaccattcttggatggccttgattttctcagggtccacttggaccccatttctaccaactacaaaccctaagaaaactatattatctacacaaaaggtaacttctctatatttgcatagaaggtgtttttcctaaggactgaaagaacttgcctgagatgtcctaagtgatcatctaggctcctattgtacactaaattatcatcaatataagcaactacaaatctacctatgaaatcccttaagatatgatgcataagcctcataaaggtgcttggtgcattagtgagcccaaaaggcatcactagccattcatacaaaccaaacttggtcttgaaagcgggttttcactcatcaccctttttcatcctgaattggtgataaccacttttaagatcaatttttgaaaagatattggcaccatgccactcatc

SEQ ID NO: 11003 - DNA, 488 bp, Glycine max
tataataaatcgatacgctagaaattaattttcgaaaactctcgagaaattcaaatggccatatcttttcacaggatgtctgattcgggcgcataatatgtcgagaggctcgaaattgaacacttgaagctcttgagaaattccaatggtcataagttttcacacggatgtccgattccggcttataatatatcgatacgagcgaaattaaacatcggaaactctcgacaaattcaaatggccataacgtttcacacggatgtccgattcgggcgcataatatgtcgagaggctcgtaattgaacaacggaagctctaaagaaattcaaatggtcataaattttcacacggatgttcgattagggcgtatcacatatagagacgctcgaaaatgaaatattgaagcttttgagaaattaaatgggcataacttttcacaccgaagtccgattcagggctataatatattgatacgctccaaattaaac

SEQ ID NO: 11004 - DNA, 347 bp, Glycine max
aacttaaagtagctgcttgtcatcagtcgtgactttttcgtaaaaatgacatcgtagacatcaaagagacattcctagaacgcacgcggcaggtacatatagcttaaaacctcagaatctgaactcaatgaatggcggtcatattatagatgaatgctgcgccattgactcttgctctctgaaccatagactaaacttcattcctcttcgtccctggaagagacaagcgaaacaggtatgcatcttcacactctccaatgtccacaagccccatggttggcccaatcccccctgtagccacagttccagtcaagccaaaaccattcttggtagcagccacaatatca

SEQ ID NO: 11005 - DNA, 379 bp, Glycine max
  unsure at all n locations
tgtgatgttntccggcgatgctgaatttgttgatggtgctcataatattcttaacaaagacagtgaaataggccgtggaggatttggagttgtttattgcactgtccttagagatggtcattgtgttgcaatcaagaagcttacagtgtccactttgaccaagtctcaagaagactttgagagggaagttaaaatgcttgggaagatcaagcatcaaaatcttgtggcacttgaaggttattattggactccatccttgcagctcctaatttatgagtacctagccagagggagtttgcaaaagcttctacacgatgatgatagcagcaaaaatttgctttcttggagacaaaggttcaagatcattcttggaatggca

SEQ ID NO: 11006 - DNA, 395 bp, Glycine max
tctaaactttatacaagaatgaagctctgataccacttgttagacaagtggcctcagatatcttaagaaggggggtttgaattaagatatcccaaattacttccccaattaaaaatttatttcactttcttttcaagttatagattcctttaacaatgaacttcttaaatattaattcaaataaaacaatttgaatatgaatgtaaagcaataataaacaaaggagattaagggaagagaaagtgcaaactcatatttatactggttcggccacacccttgtgcctacgtccagtccccaagcaacccgcttgagagttccactatcttgtaaattccttttacaagttctaaacacacaaggacaatcattcctttgtatttagaattcattta

SEQ ID NO: 11007 - DNA, 250 bp, Glycine max
tcaacttgtgctacatgcaacattccgcatgaaagatcttggccaactcacatgttttttaggattggaggtacatcatcgatcaaatgacatatttttaaaccagcataagtacattcaagatttgataactttggctggtttggaaggcactacttcagttgatactcctatggaagtaaacgtcaaatacaggaaagatgaaggggatcttttggctgatccaactctctatcggtgtttggtggga

SEQ ID NO: 11008 - DNA, 265 bp, Glycine max
tcaacattcaatttcgagcgtctcgatatattacgggactcaatcaaacatccgtgaaaaaagttattgtcgtttgaatatgctcagaggttcaacattcaatttcgagcgtcttgatatattacgggactcaatcagacatccgagtaaaaagttattgtcgtttgaaatggctcagaggttcaacattcaatttcgagcgtctcgttatattacgggactcaatcagacatccgagtaaaaagtttttgtcgtttgaattggc

SEQ ID NO: 11009 - DNA, 405 bp, Glycine max
  unsure at all n locations
actcggatgtctgattgatgtccngtatcatatcgagacgctcgaaatngaatgttgaacctctgagccaattcaaacgacaataactntnttcacggatgtctgatcgagtcccgtaacatattgagacgctcgaaattgaatgtngaacctctgagccaattcaaatgacaataactttctactcggatgtctgattgagtcccgtaacatatcgagacgctcgatattgaatgttgaagctctgagccaatacagacgaaccataacttttactcggatgtctgattgagtcccgtaacatatcnagacgctcgaaagtgaatgttgaagctctgagccaatactaacgaccataactntttactcggatgtctgattgagtcctgcaacatatcgagacgc

SEQ ID NO: 11010 - DNA, 264 bp, Glycine max
tctgagttaaaagttattgcagtttgcatttgctacaagcttccgctttcaactacgagcgtctcgatatattactggactcaatcgatcatcagagcaaaaagttattgtcgttagaatttgttcagtgcttccgttttcaatttggagcgtctcgatatattacgggactcaatcggacatccgagtaaaaagttattgttgttagattttgctcatagcttctatttgaatttgctacgagcttccgttttcaatttggag

SEQ ID NO: 11011 - DNA, 394 bp, Glycine max
tctcgatatattatgcgcctgaatcagacttccgttacataagttatgaccatatgaatttctcgatatattatgcgccttaatcggactttcgtgtgacaagttatgtccatttgaatttctcgatagcattcgttgttcaatttcgagcgtctcgatatattatgcgcctgaatcggacttccgtgtgacacggtatgaccatctggattgttcaagagcatccgttgttagatttcgagtatctcgatatattatgcgcctgaatcggacatccgtgtgacaagttatggccatatgaatttctcgagagcattcgttgctcatattcgaacgtctcgatatagtctgcgcgttaatcgaactttcgtgtgacaagttatgaccatctgaa

SEQ ID NO: 11012 - DNA, 226 bp, Glycine max
  unsure at all n locations
ctctagaagcttggttgatcaatttcgagcgtgtcgatatgttatgcacctgaatcggacttccgtgtgacaagttatgaccatntgaatntctcgagagcattcgttgttcaatttcgagcatctngatataatatgcgtccgaatcggacttccgagtgacaagttatgaccatctgagattctcgagagctctcggttctcaatttagagcatctcgatacgt

SEQ ID NO: 11013 - DNA, 335 bp, Glycine max
  unsure at all n locations
ntgtgctcaatttccactggaagatgacatgcctttccaaagacaacccgataaggagacattcctatgggtgctttgtaggcagtccgatgcacccagagagcatcatcaagcctggtactccaatctttcctgcttggctgcacaatcttctctaaatttcgcttgatttctcggttagaaatttctgcctgtccattggtctaggggtggtatggtgtggataccctgtgtaccaccccgtactttttaagcagggcatgcattgtcctgttgcaaaaatgggttccttgatcactaacaattgctttaggtactccaaacctgcaaaacaa

SEQ ID NO: 11014 - DNA, 458 bp, Glycine max
  unsure at all n locations
gcttaccgatgtgcatgtgctgctgatcgaactggacatgctntattgttcactctctatggccaagctatgagacataatacccagtnntgtgtggaatatatngcattggatcttgtaatgaatagtgatggtaagttgttgcagacaacatcttgactacacttatattgcaatcaattaaactaattaagtcttagcattcattggccttgatgagtaaatatcccatgtacttcacattacttgatacaaattgtaattgtgttatctcttccaatggtaatggctctattaaacaagcattcaatggtagaaaaanatgtctgtcttggttgatgtgcaagttacctatttcttctatattgatatgantgcacttcgcagagtgattgcttgatatgacgatggacactacatcgttaagctgttcacaatttggccagggtacaatttct

SEQ ID NO: 11015 - DNA, 373 bp, Glycine max
  unsure at all n locations
tagtcctataccattgttcactgaactcttcagaactgatggggaacaggtccttaagtttcccacacctaaagtaattcaaggtagtacattaaaagcatattcctgatcctagcaatatttatattcataaataaacatggtaagctgatacatcttttgaaatgtnttttatttggaacagtgaatctgtctggatggatgactgatgaagagtttgcaagagagatgattgctggagtaaatccacacattattaagaaacttgaggtaaatttactattgaactgttaagtacataaaactataaacnatttatccacttgttaaatttgcagttgataaccttaactcattgcaaattatatttatt

SEQ ID NO: 11016 - DNA, 309 bp, Glycine max
  unsure at all n locations
cgagacacncgacattgactaaaggaagttgtcgagatattcacatggtcacaacttttcactcggatctccgattcacgcgcataatatatcgacacgctcgacattgaacaacggaagctctcaagacatctatatggtgataacattgtactcggatgtncaattccggcatataatatttctagacgctcgaatatgaataactgaagctctcgggacattcaaatggtcataacattctcgacagatgtctgattcatgcgcataatatatcgagacgctcgatattatcatcggaagctcact

SEQ ID NO: 11017 - DNA, 427 bp, Glycine max
tatcaaaatgcgcttaggcccactccaattcttttagcccagacttttccagaatccttaaagaggggacctatacttcaaacggtagtatgacttccattccatacaccaaagaaaacggatttgccccagttgatgtgcgcactaaggttcggtaaccatgcaacgcgaaagggagcatctcgtgccaatctttatatgacaccgtcatcatctgaatgatcttcttgatgttcttattggccgtctcaaccgccccattcatctagggcctgtaaggcatggaattctggtgttggatcttgaaatccttacacatttccatcatcatcttttattcaggttggtggcatcgtccgtgataatcttcatgggcaacccatactgacagattatctccttcttgatgaatctaaccaccacgctc

SEQ ID NO: 11018 - DNA, 390 bp, Glycine max
  unsure at all n locations
ntctcatttccagcctcttttcctgtcccatattttggtgttgatgtacataaagtccttccatcctaaatggtaggagaacataaattttagagttgaagatgcattgttatatatgaccttttacaatgatatggaattagaaaatntattgaacaaaaattcattcacaaaaagtttcacaagattaatacgtagctaataacaaatggtttataagaatggcgaaaaatattgttcatcacctgtccatataaagttgcatttacaacacctgaatgcatatgagcagtgccataaattagataacctcctttttccattgggatgttttctttttggacatgaggagaatcaccaccaccaccagttgctggaatggtatactct

SEQ ID NO: 11019 - DNA, 330 bp, Glycine max
  unsure at all n locations
gtcacacgggatatacataaccaannaatgactacaaattataaaggaggtctattttgttgtcangacaacttacaatgcaagcaaatagagggttntcaaggttcaaggagaatggtttccttaagatacanaattagttgggttgattggaacatataccaaataccagttaaggtttacatacttgattccaccgacaaagtgaggtcaaatggttccaaaatacttcatgattgtctggtagataatgtttccaagacagtactttatgataaaacaatatactcttcaatcttatagagtgagtgaacaanagtaaatctaatt

SEQ ID NO: 11020 - DNA, 399 bp, Glycine max
  unsure at all n locations
tcttctctttcacttcatgtatgctatangatacgaacaatcgtatgaagatgggtatagttgaagagagacatggcctctatcacctcataccagaccanacagacanaagccattgctcgaccattattcaccctanatgcaatattatcccaatagaatctttggcattttgaatgggccatctatcaacagaaagactgcaatgtatgaaaccttattatcccattatgagaaatgataanaactntgtgtgtaatacatgtcactatgcgaaacacaagaagcttnctttttctcgagcatttcacatgcatcacatacttttgattacttcacatggatatatggggtccttggtcanaaccatctatgcacgggcacaagtatttcttaact

SEQ ID NO: 11021 - DNA, 415 bp, Glycine max
  unsure at all n locations
tcatgcttatctatgtatggcaaaacttcattactgttgttcaagacatacaagtgagcttgtaacaaatcttctacacttggagtgatcacctgcagtcctcttgaacccttaccacccactctgtcatcatgctgacactcaggaagcccaacagctttagccttctctaagtattctaaacaaaattcaatggcttcttctgcaatgtacctctcaacaatagatgcttccggacgatatagattttttgtatacccttttaagatcttcatgtatcgctcaaccgggcacatccaccgtagataaacaggaccacaacatttgatttctctgaccagatgcacaatcaagtgaatcatgatgtcaaagaaagcagggggaaaatacatctncaactggcacagtataattg

SEQ ID NO: 11022 - DNA, 362 bp, Glycine max
tgccttcaatgccactctcaccctctccaatacaaggcattggaactttgcttcaacgtttccctcaaccgtttgccagcatccacaccaaaccctcttctgataagtcctccatataattccaccactactactccctcactttccaatgccttggttgcagccttcaaacgtgctcaggctcaccaacgccgtggatccattgatcagaaccagcagcaacccattttgactttaaagattaaggtggagcagctcatagtctctatccttgatgaccctagtattagtagggtcatgcgagaagctggtttctctagctcccttgttaaaacaagggttgaacaagctgtttcaatgga

SEQ ID NO: 11023 - DNA, 394 bp, Glycine max
  unsure at all n locations
gctgcccaagtttcatgatcttgtaggtgaagatcctcataagcatcttaaggagttccatattctntgttctatcatgaagccccctgatgtccaagaagatcatatctctctgaaggcttttcctcattctctggagggagtggcanaagattggctatactaccttgcgccccggtccattttcagctgggatgagcttaagaggggttcttggaaaattcttccctcatctacgaccactccattaganaaacattnaggcatcatacaacttagtnagagagcttgatgagtactggaaagatcaagacatgtggcgagctgcctcacaccgatttngcaaactcctctcatattctatgaggactggcactggaaggagatgattgtg

SEQ ID NO: 11024 - DNA, 332 bp, Glycine max
  unsure at all n locations
gctctcattatatgcgcctgaatcgactccgttgaaagttattccatttttatctctcgagagncttggttcttcaatntcgagcgtctcgatatattaagcacctgaatcggactgccgtgtgacnatgttatgaccattgaatntctcgagagcttccgatgttcaatttccagcttctcgatatattatgcgcctgaatcagacttccgtgtgaaaagttatgtccattggaatttctcgagagctgtcgatgttcgatntcgagcatctcgatatatcatgcgcctgaatcggacattcgtgtgacaagttatgacacattgaattct

SEQ ID NO: 11025 - DNA, 324 bp, Glycine max
gtgacctatcaaactcagctttcagcaaattcaaacgacaataactttttactcggatgtctgattaagtcccgtaatacatcgagacgctcgaaattgaatgttgaagctctcagcaaattcaaacgacaataacttttggctcggatgtctgattgagtcccgtaatctattgagacgctcaaaattgaattctgaacctctgagcttattcaaacgacaataactttttactcggatgtctgaatgagtcccgtaatacatcgagaagctcgaaattgaatgttgaagctcttaggctattctaacgacaataactttttt

SEQ ID NO: 11026 - DNA, 285 bp, Glycine max
  unsure at all n locations
tcgtctcgatatattacgagtctcaatcttacatctgangataaaagttattgttgtnntgaattgctgagagcttcaacattcaatntcgagcgtctcgatgtattacgggagttagtcagacatccgagttaaaagttattattgtttgaatntgctgagagcttcaacattcaatttcgagagtctcgatattgtacgggactcaatcagacatccgagtaaaaagttattggtcgttgaattagctctgaggttcagaatacaatttcgagcgtctcaata

SEQ ID NO: 11027 - DNA, 229 bp, Glycine max
gtgagccaattctaacgacaataactttttactcggatgtccgattgagtctagtaatatatcgacacgctcgaaattgaatgttgaagctctaagcctattcaaacaacaataacgttttactcggatgtccgattcagtgacgtaatatatcgggatgctcgaaattgaatgttgaacctctgagccaactcaaacgacaataatgttttactcggatgtctgattg

SEQ ID NO: 11028 - DNA, 424 bp, Glycine max
  unsure at all n locations
ggctatatagaaacaagtgcnttgattntcatgtggtgtttccaatttctgcaactctattacagatgttctcaaaacaatatgtggttgtcggtacgagtggcatgatataattttaagcttgagataaatgctttaaaaatgtgaccatttgctcaaaaaaaattctgcacacatcatttacttatatgtaatgcgttatacataaaacatgggattgtgacacaggatgactgattctgcattttatataatttattcataaatacataggaaagtaacacaaataggctgagtacttttaaaatcacaacttgtatttaaacaaactctattgaaaatatataaaatgccactatatcaaggcttataaagtattgtagatttttagttaaaatcagtattacagtaccatatgtatgat

SEQ ID NO: 11029 - DNA, 277 bp, Glycine max
  unsure at all n locations
ntagttcattgcttcaagtagtgctaatatgcttctagaggaaaacacgttgccaaaaagttactattaggccaagaagatattgtgcccgatgggtatggagtatcaaaagattcatgctttccctaatgattgcatactttacagacataagtttgaaggaatgcacaaatgccctaggtgtggggtatcacgatacaaagtgaaggatgatgacgagtgtagtagtactgatgaaaactcaaataaggtccccccagcaaaggtgttgtggcat

SEQ ID NO: 11030 - DNA, 357 bp, Glycine max
  unsure at all n locations
ntaaatatctgatgacgggaatcctcatctgggagtggtatataaatcaattggtgcagacgacctgttcgcagaagcgcgggatctataatgtctggtcgattagtggccccaatgatgaacacagctttctttgctgacatcccatgcatctctgtaagcaattgattcacaaccctgtcatcagcgccaccagcatttcttacactgctgcctctctgcaagatgaggcacacatgttttctacacataacaagacattactgtagtcttaagtactaagtcacactaattagctatgttttaaatttttttaaatacatacgaatgcctgagaaacccatacttctatctgat

SEQ ID NO: 11031 - DNA, 374 bp, Glycine max
  unsure at all n locations
atctanngtggaggaatcatccannattgagatgggcaagtcctctacaacaacaatagcctgtcccttatntccaaaatgttgctggtccaagcaagccatatgttcctcctccaatgcatcagtagtagtaacaacaacaacaaagacaacaagcaactgaggccccttcttaaccttccttagaggagttagtgaggcaaatgaccatctagaatatgcaatttcagcaagaaacaagagcctccattcanggtctgacanatcagatgggtcagatggctactcagttgaaccaagcttagttccaaaattctgacaaattgccttcacagactgtgcagaaatctgaaaatgtgagtgccatcaccttg

SEQ ID NO: 11032 - DNA, 345 bp, Glycine max
gagcgtctagatatattacgggacacaatcagacatctctagtaaaaagttattgccatttaaatttggtgagagcctctgtattcaatttcgagcgtcaagaattattaaatgactcaatcggacatccgagttaaaagttattgtcgtttgaatttgcttagagttactattctcaatttcgtgcgtctcgatatactacaggactcaatcggactttccagtaagaagttattgtcatttgaatttgttgagagcttctatattcaatttcgagcgtcttgaattattatgggagtaaattctacattcgaagtaacaattattattcgttcaatttgctga

SEQ ID NO: 11033 - DNA, 270 bp, Glycine max
  unsure at all n locations
ttgagacgctcannattgaatgcaggagctcttaccanattcanatgccaataactntntactcggatgtccgattgagtcccgtaatatatctagatgctcanaattganaacagaagctctgagcaaattcaaacgacaatagctnttgactcggatatccgattgagtcatttaataattcgagacgcctcaaattgaatacagaagctctaagcaaattcaaatgacaataactttngactcgaatgtcncgattgagtcatttat

SEQ ID NO: 11034 - DNA, 418 bp, Glycine max
tgtttcaaaccatagatggatttatttagtttgcaaaccatagactttgagtcacctgatacaaagttttctagttgcatcatataaattgtttcttcaatgtcaccatttagaaacacagtcttaacattcatctgatgtagctctaaatcataatgagctaccaatgccattattgttcaaaaagaatcctttgaagatattggaaaaaaggtttctttatagtcaatgccttccttttgggtaaatcctttagcgactagacgagcaacattgccctttgaatcccttttggttttaaatatccatttgcaaccaataggtttcacacttttaggcaattcgacgagatctcaaacgtcattgtcttgcatagatttcatctcatccttcatggcattcatccacatttgagagt

SEQ ID NO: 11035 - DNA, 348 bp, Glycine max
  unsure at all n locations
ctcagcttgccttgctccttgattattgagggactcatggtcactatgaatgacaaattccttgggataaaggtagtgttgccatgttttcaaagcccgtactaaggcatacaactccttatcataagttgaatagttaagggtaggaccacttaacttttcactaaaataagcaattggatggccttcttgcatcaacacagccccaatcccaacatttgaagcatcacactcaatttcaaaagatttttgaaagtttggcaacgcaagtatgggggcattagttagcttttgcataagaacattgaaagctttttttgtttnttttcccatttgaaaccaactttt

SEQ ID NO: 11036 - DNA, 287 bp, Glycine max
cttggagtttccaagtgccaattcgtcttcttcttttgtccagtcttcttctgacttcaattcatcagtgggctttccttctgtgtccagcatcttgggatgttcccagcctttgatgacagctttccaggttctgctatccagtgatttgaggaaggccaccatccttgctttccagtattcatagttggttccatccataattggtggtctgttcactggtcctccttctttctccatgttcatcagaatttatctccctagatctcactcagtgacttcgagtg

SEQ ID NO: 11037 - DNA, 344 bp, Glycine max
  unsure at all n locations
ctcgtggcttctntgagaagctntctcaagaagcttctntgagaagctagatccttacctatccacacncctctanttaactaaattaacctccttaaaataattatggatgaaaataacgcaacanataatcaaacaccaaacataattactaataatatatagatatatatatcagggtgttatagaacatgcagtttcagcaggagactagagcctcaattcagagtttaacaaatcagatggtgtagatggccacccagctgaaccaagctcaatcacaaaactctgacaagcggtcttctcaatctgtccagaatcccanaaatgtgagtgtcattaca

SEQ ID NO: 11038 - DNA, 401 bp, Glycine max
  unsure at all n locations
ntatcaaatggatgttaaaagtgcttttgtaaatggcttaattcaagaagtatatgttgaacaacctccaggttttgaaatatcagataagccaaatcatgtttatagattgaaaaaagctttacatggtttgaaacaagccccctagggcatggtatcaacgtctaagaaaatttcttttagagaaagatttttctagaggaaaagtggataccacactattcataaagagaaagtatgatgatattctgttggtttaaatatgtgttgatgatataatatttggatccactaatgattcattgtgcaaggagttctctcttgatatgcaaagcgaatttgagatgtcaatggtgggagaactaaattactttctatggttacaaatcaaccaaactaaa

SEQ ID NO: 11039 - DNA, 261 bp, Glycine max
  unsure at all n locations
gaacaccgagactatttagtctcacaaatgcaagaactacgtatgtctgagttcctcatcacaaattgaggatacgtaggagcaaaagccncgcttttgtcgaccacctcgccttttgctatcgtgacctgtgagaacggtggcacgcggaaacacccgatggttattcgcgcacactatatgctatcccatgacctatgagtccggtggcacgcggagacacccgatgggtatccgcgcacactctatgctatccaatga

SEQ ID NO: 11040 - DNA, 299 bp, Glycine max
atggcactcacatttttcggattctgcacagtttgtgaaggaaatttgtcagaattttgggactgagcttggttcaactgagtagccatctgccccatctgatttgtcagactctgaatggaggcttttgtctcttggctgaaatgcatattctggatggtcatttgcctcactaactcttctaaggaaggttgaggaggagcctcagtttcttgttgtcttttgtgtgattgctgctgctgtattggaggaggaacatatggcttgcttggaccagcaacattctggaaaggagggac

SEQ ID NO: 11041 - DNA, 344 bp, Glycine max
  unsure at all n locations
tcacctctaatgagctggtgaagaagaatgtgtgcatttacctgggtgaaaaacaagagcaagcctttgctttgctcaaagaatagcttactaaggcacctgttctagctcttcctgactnttctaaaactattgagctagaatgtgatgcctctggagtgggagttggagctgtattgttacaaggtgggcaccctattgcttatcttagtgaaaaacttcatagtgccaccctcaactaccccacctatgataaagagctntatgccttaataagagccctncaaacttgggaacattaccattgttccaggagattgtcattcatagtgatcatcaatcac

SEQ ID NO: 11042 - DNA, 432 bp, Glycine max
  unsure at all n locations
acagagaaacttttgaagatagttgaaaagntttttcaaccactgagtagcacatgagattttctcanagcctttttaccaaagaagttttactctttggtaatcgattaccagattattgtaatcaattaccagtagcagaatggttntcaaaaagctttcaactaaatttacaacatttcaattgatttcaaaatgttgtaatcgattacaatgttgtggtaatcgattaccagtgtgcttgagcgttgaaattcanattcaaatgtgaagagtcacatcctttcacaaaaaagatttgtgtaatcgattacactgatttggtaatcgactaccaatgatagtttctgaacaaatcagaagatgaacacttacatagttttgactcttcaaatcggttaagttttctaacgcataactttctatggtctc

SEQ ID NO: 11043 - DNA, 346 bp, Glycine max
  unsure at all n locations
atatatagagacgctcgaaattgaacaacagatgctctctagagatgtaaatggtaaaaatttttcactcggatgttagattcaggcacataatatatcgagacgtttgaaattgaacactaaagctctggtccaattcaaacggccataacttttaacatgggtgtatgattgacgcccatgatgtatcgagatgatagaaattgaataacggatgctctcatgatatacacatggtcacaagttntcactcgtatgtcagattcaggaacataatatatagagacactcgaaattgaacacggaagctctggtccaaatcatatggcctaaactattgacatgc

SEQ ID NO: 11044 - DNA, 400 bp, Glycine max
  unsure at all n locations
tctttagactgggctgttcatgcagtcctcttagacccttatctgccactatntcgtcatgccaaggctccagaaccccaacaggttttgcctattagatgtactcggaataaacctcaatagctncttccgcaatgtacctttcaacaatatatacttcaagacagtgtagattctttgtatacccttttaagatctccatgtattgctcaatcgggtacatccaccacaaataaacgggaccgcaacgattaatttctctcaccagatgaacaattaagtgaaccatgatgtcgaanaacgaaggagaaaaatacatctccaattgacacaagataatagcaacctcatnttttacctcatctaacttaagaggatcaatgactatgctacatttgac

SEQ ID NO: 11045 - DNA, 273 bp, Glycine max
ctaccatcctcaactcacggtcaaactgaacggaccattcaatccctggaggaccttttgaggtcatgtgtcttatagcaaaaggggagagctctctttcattgatagagttcacttacaacaacagttttcactctaccattggcatggctccctatgaagctttgtatggtagaaggtgtaggacacctctatgttggctaaagccctgagaagacctcaccttatgacttgaagtggtacatcaaaccaccgagaaggtcatgttgatcc

SEQ ID NO: 11046 - DNA, 356 bp, Glycine max
  unsure at all n locations
cttaatcgtcaccttattcaactggcgggagtctacacacaacctcatggtcctatctttcttctttactaacaacactggtgctcccatgggagatacactgggtctcacaaactgcttctccaaaaactcctctaactatntcttaagctcggctaactctataggagacatcctataaggcgctatggatataggtccagcaccaggtaccaggtctatggaaaactctatctctctcttgggtggtagaccaaatatatccttagggaacacttcangaaactctnctgacatagggagatcacacatggaaacctttgtctctatttccaggntagacaagatcatgtaca

SEQ ID NO: 11047 - DNA, 382 bp, Glycine max
  unsure at all n locations
ataaatagttctcggaggtccgattcaggcgcattatntatcgagacgctcgtaattgaacaacggaagctctcatgaaattcattggtcataacttttaactcggaggtccgattcaagcgcataatatatcgagacgctcgaaattgaacaacggaagctctcaagaaatttaaatggtcaaaacttttaactctgaggtccgattcaggcgcataatatatcgagacactcgaaattgaacaacagaagctcttgagaaattcaaatggtcataacttttaactcggaggtccgattcaggcgcattatatatcgagacgctcgaagatgaacaacggaagctctcgagaaattcaattggtcataacttttaactcag

SEQ ID NO: 11048 - DNA, 429 bp, Glycine max
  unsure at all n locations
tggtagaatatggtgttaaactatcaccttatattgcatgagtgttttctttgtgccaacatctcttaaagaccaactacgaagaataatgaatagcttttggtggggtttgaaatatgcaaattcaagagaataatttggttgaattgtgataaaatgtctatgaaaaaaagagtttggaggaatggaattccgcaacttgcatggatttaatcttgcaatgcttgggaagctagggtggcaatttaccacttataatgatgctaccatgacaaaaattctcaaagcaaaatattgccccaatggcgatttcttggatgcccaactngggcatagtccaagctatgtatgacatagcatccatgcttcacaggtcctcgttagaaaagggtttcaatggagattagatgatggtgataaaatcaacat

SEQ ID NO: 11049 - DNA, 204 bp, Glycine max
  unsure at all n locations
tatcttaagaaggggggggttgaattaagatattccaaacttttctcctaattaaaaatctatcttactntttacttaagttatgaattcccttaatgacaatcttcttaaatgttaattcagatgaagcaaccttgatataaatatatagcaataattatttaaggagatttagggaagagaaaatcaaactcagtttatact

SEQ ID NO: 11050 - DNA, 220 bp, Glycine max
gctgatgcaacaattgttagcccgggctatacgagacatcttgccaaacaaagtcaaggtagcgataactcgcctgtgctttttcttccatgctatatgtagcaaagtcattgattcagtcaagtttgatgagttggaaaatgaggccacaattatactgtgccagttggagatgtattttccccctgctttcttttacatcttgaatcacttgattatg

SEQ ID NO: 11051 - DNA, 338 bp, Glycine max
  unsure at all n locations
tggaatgaacaaggaagaaagatgatctgaggcnccacttcgaggagaatatgagtcaagaagaagctcaccaccatacgaagccatggataaaagcttgaaggtaggagaatatgagtggagagaaatggagagaagaagcacgaaattttgtgcctcacaagaggtctaaactctgaagtataattctcaaatgatcaaagttgaaaaaatacacacacatggcctctatttatagcctaagtgtcacacaaaattggacggaaatttgaatttctattcacatttcacttgaattagaaattgaatctgcggagccaaaatntcactaattatga

SEQ ID NO: 11052 - DNA, 373 bp, Glycine max
  unsure at all n locations
gtcacctgatgcatgcaagcatatacagatcttctagacttgggctgataacatgcagtcctcttaaacccttacctcccactttttcgtcatgccaaggctccagaaccccaacaggttttgcctatttgatgtactcggaataaacctcaatagcttcttccgcaatgtacctttcaacaatagatacttcaggacagtgtagattctttgtatacccttttaagatctccatgtattgctcaatcgggtacatccaccacaaataaacgggaccgcaacatttaatttctctcaccagatgaacaattaagtgaaccatgatgtcgaanaacgaaggagaaaaatacatctccaattgacacaagataat

SEQ ID NO: 11053 - DNA, 335 bp, Glycine max
tagagaaacatttggcgccaccgagctcatccaaaagctcgtcaatggtgggaattggaaagcgatcacgaacggtaatggcattcggggcacggtagtcgacaaaaaaccgccataacccatcacttttcttcactaacaacaccggagaagagaaagggctcatgctgggttgtatgaggcccttttggagcatgaggtccacctgaccttctggaaatgcaggtaacgatacggccgcatgttgatcggagttgattgtggaagaaggtggatatgatgatcaatgttgcgctccggcggtaagcaccatggttgttgaaacaagtgcgtga

SEQ ID NO: 11054 - DNA, 445 bp, Glycine max
  unsure at all n locations
agcttagactaagttcagcctaccatcctcagactgatggtcaaactgaacggaccattcaatccctggaggaccttntgaggtcatgtgtcttagagcaaaaggggagagctttctttcattgatagagttcacttacaacaacagttttcactctaccattggcatggctccctatgaagctntgtatggtagaaggtgtaggacacctctatgttggctaaagccctgagaagacctcaccttangacttgaagtggtacaacaaaccaccgagaaggtcaagttgatccaagaaaggatgaggactgctcagagtangtagaaaagttatcaggataagaggaggaaagacttggaattcgaggttggtgatcatgtattcttgagagtcactctgtggactgnngttggtcgagcattgaaatcccaaaaactaacacct

SEQ ID NO: 11055 - DNA, 373 bp, Glycine max
  unsure at all n locations
agctgcattcctctcttcccttanacttctnttatttattgctatttatctnttgctctaaagaagtctatattgaattgtcttatgagtaattcatgttaagggtgcattgttaatccgaaaagagagactgaaagcttaattgaggaatagtctttgtatcttaattcgacccctttttttcttaatgtaactgaggtcatttgtccaacatcctatttttgacaactcgcttctctaagaagacaaacattccggcatgataaaatgaggccacatgaacgtctgtatatttactcganaacacaatcaatcaaatgccctttttctttatgaacccctttttggtatttgatcttatgagattttttac

SEQ ID NO: 11056 - DNA, 333 bp, Glycine max
tcttcttcttcaccgaaacatgtgaagggcctaataacagaacaaaattctctgcctccatgaacaacatatctttcgcacttccttcggtggcgattcttcagcaacatttctcagggaagggcaataacggtgtttacaccacggacttcccagctgttcctctgagagcctttaactacacggggactccaccgaagaacaccattgtgaaaagaggaaccaaagtggtggtgataccctttaacacgaggatgcagttggtgtcgcaggacactagcattttaagtgcagagagtcatccgttacatcttcatggtgggtcaaggtttt

SEQ ID NO: 11057 - DNA, 342 bp, Glycine max
tatgttgcaaacatctacaatagacctcctctacctcagcagcaaaatcagccacaacagaacaattatgacctctccagcaacaggtacaatcccgggtggaggaatcatcccaaccttagatggtcaaatccttcacaacagcagcaacaacaacaacaaccttattttcaaaatgttgctggcccaagcagaccatacgttcctccaccaatccagcaacaacaacaacaacaacaaccccagaaacaacaaacagttgaggctcctccacaaccttcccttgaagaacttgtgaggcaaatgactatgcaaaacatgcagtttcaaaaagataccata

SEQ ID NO: 11058 - DNA, 398 bp, Glycine max
  unsure at all n locations
gtcacctgcggcatgccaagctttctttgtgggttgatgggttctgtcgcgtataatggcatgatcactggctaacatattctcaattagctcagttgcttcttccggngtcttcagctnntattttccccttgaagaagaatctagcagttgcttggtttgtggtctcagcccaactatgaacatattcaattgaattggctcggaaaactcatgggtaggagttcttctcaatanacctctgaacctctccaatgctntactcagagattcattanggaactgatgaaatgaagagattgtagctntcctttctgcagtcttagactctgggaagtatttctttagaaacttttcaacaacttcttcccaggtttttagaatgttacccttaaatg

SEQ ID NO: 11059 - DNA, 323 bp, Glycine max
tgtaatcgactacacatatacttttatcgattaccaaaacacattttcagaaaatattctcaacagtcacatctttctatgggggacttgaatggctatcaaaggcctatatatatgtgacttgagacacgaatttgcgaagagtttttcagaacaaaaaggtcttatcctcttaaaaagcaaaatcgttttatcctcttacaaattccttggccaaattacttgtgattcaataaggaattatttgagtgctcaaattgttcaatctatctctttcaagagagattgcttcttctcttcttcttcattctgaaaagggatta

SEQ ID NO: 11060 - DNA, 321 bp, Glycine max
tgggcattatcaaaatgaatgttcaacttgttaagattgagccaattatgctgaattcaatgagaaagaaaatgtgttgcttatggcacaagaatgctcgaaagaaaaggtgtatgatgagtcaaatgtggaaatgtggtttcttgactctgggtgcagtaaccatatggttggaagaaaagattggttattcaattttgatgatagtttcagagattttgtaaaattgggtgataactccaagatgcctgtcatgggaaagggaaatctgaagctgtatattggtggattagttcaggtggtaactgaggtttactacct

SEQ ID NO: 11061 - DNA, 330 bp, Glycine max
tcttagtttcagatgacgtagattggtttatggctacctcatgcactcctctaatgactatggcatcatttctggcgctaaactgctgggagttggaagccatcttctcaattaaatttctggcttcaacaggagtcatgtctccaagggctccatcactggcagcatctatcatacttctctccatattactgagtccttcataaaaatattggacaagaagttgttctgaaatctgatggtgggggcaactgggacatagtttcttaaatctttgccaatactcatacaggctctcttcactgagttgtctaatacctgagatatcct

SEQ ID NO: 11062 - DNA, 323 bp, Glycine max
  unsure at all n locations
agcttctcgatatattatgctcctgaatcggacattcgtgtganaagttatgaccattggaatntctcgagagctttcgatgttctatttcgagcgtctcgatatattatacacctgaatcggacttccgtgtgacatgttatgaccattttagtttctcgtgagcttctgttcttcaatttaaggcttctcgatatattatgtggctgaatcggacttccgttgtaaagttggaccatctgaatgtctgagagcttcggtgtcattttgagcgtctcgtatattatgccctgatcggactcttgtgacagtatgacattgaa

SEQ ID NO: 11063 - DNA, 337 bp, Glycine max
tctatagaaggttcgttcctaatttctctacagttgcatcacctctcaatgacctagtgaagaagaatatggcatttacctggggtgaaaaacaagagcaagcctttgctttgctcaaagaaaagcttactaaggcacctgttctagcttttcctgacttttctaaaacttttgagctagaatgtgatgcctctgaagtgggagttggagctgtattgttacaaggtgggcaccctatttcttattttagtgaaaaacttcatagtgccacccttaactaccccacctatgataaagagctttatgccttaataagagccctccaaacttgggaact

SEQ ID NO: 11064 - DNA, 334 bp, Glycine max
tatgctgcaaacatttataatagaccccctcagcagcaaatccaacaacagtagaataattatgatctttcaagcaacagatacaatccaggttggagaaatcatctaaatctgagatgggcaagtcccccacaacaacaacagcctgtccctcctttccagaatgctgctagtccaagcaagccatatgttcctcctccaatacagcagcagcaatagcagtagtcacaacaaagacaacaagcaactgaggctcctcctcaaccttccttataagagttagtgaggcaaatgaccatccagaatatgcaattttagcaagagacaagagcct

SEQ ID NO: 11065 - DNA, 335 bp, Glycine max
tggagtcaatttcattttgaatgtgttgatctgtgatattaaattgtttatttatcagttctttgcactttaaagattttaactttccaacctcaataggtgaaatgaatacatgaaatgatacaatacatttattgtcaactatgcaatgctttacactgaataaaatatttgaattttataaaagatatgcaaggtagagcgctgatttttttgtaactttaataggtatgtgtttattgtctataaaatatatttacactatttttatattgttattataacaataaatttattatacaaaatcaaaatgaatgttacaaataaaaaataaa

SEQ ID NO: 11066 - DNA, 324 bp, Glycine max
tatactatatcgagacgctcgaatttaaacatccgaatctcttgagaaattcaaatggtcgtaactttttacaccgatgtccgattcgggcgcataatatgtcgagaagctgcaaattaaacaacgaaagctcttgagaaattcaaatggtcataagttttgacacggatgtactatttaggcaaatcacatatcgagacgctcaaaattgaacaacggcagctcctgagaaattcaaatgctgataacatttaacgacccttaaaatggccgatgcaggcttatactataccgattctctcgaaatagcacgacacaagatcc

SEQ ID NO: 11067 - DNA, 368 bp, Glycine max
  unsure at all n locations
agctagaatgggacctcggtgtngaaagttatgactcattgaatttctcgagagcttccgttattcaatttcgtacgtctctatatgtgatgctactgaatcggacatctgtgtgaaaagttatgaccatttgaatttctcgagagcttctgttgttcaatttcgagcgtctcgacatattatgctcccgaatcgggcatccgtatgaaaaattaagacccattgaatttctcgagcgcttccgatgtttaatatcgagcatctcgatatattataagcctgaatcggacctcagtgtgagaagttatgaccatttgaatttctcgagagcttccgctgttcaatttcgagcgtgtcgacatattatg

SEQ ID NO: 11068 - DNA, 222 bp, Glycine max
aaagacttgggttggggctgggaagggcattaatctaattttcttgtattgcaagctttgttgtagattgagggtataagacaaaagcttgaacctattttctgagaaaagctaatgtaccctttttgcaaggatgtgcaaaaattgctgtaggttaatgttatagtgctattgattgaactaactgacttttttttgttattgggattgcaggtttggggt

SEQ ID NO: 11069 - DNA, 334 bp, Glycine max
tatcttgttattgcataatactttcttcttgcttatcacgcttatcttgagttcttttggatccctagcttttacctttttttcaaacccccaacaagaaagaactacaacttaggaaccaacatgtgtcatcattcatctagtgttaatggcgagggtactagtcataaggaccctttatcttgaatcttagatgagttgagttccctcaagttatggaaagaaaaaatataaagaaaaaaaaggaaaagagagggtaaaaacaaatcaagatgagagggaacaaataagggaagaagaaagaaggaaaatactaaaagagttaagaaaagaa

SEQ ID NO: 11070 - DNA, 363 bp, Glycine max
gctcgcagtagtctatacacattctgatgcaatcctaccacccaagggcattggatagaatactccaagaagattgcgccagagaatgccctatggttctcatgagccttacggtagattgtgggcccatgggctaagtatgagcccacttatctttgtacatattatatgaaggttgtattatttgtgggccttatattgagcgctccataatgtatgcagggtaccctataaatgtaagatttctcagccctcgtattttacgacatctagactagtatttgtatgaaggtgagttgtgtaattccacatgcattacatgaatatttgatgtgtgagatgagaaataaacttaattgaatt

SEQ ID NO: 11071 - DNA, 459 bp, Glycine max
  unsure at all n locations
tgtatcttatcattagatacgaatgaatgaacttgattagtaatctctatccagctgcaacctgggactcttgcatcacacttgtttcccatcattctacgaactctttccacatcactccaatgtctatgggaagcataaatgttagacatgactgcatagtttacattcttctctggctctatggtgaagagctnctctgcggcccatttagccagtcctatatttgcatggagattgcaagatgcaacaaatgctcctaatgtatttgattcagcttccattggcattgacctcaagaattcaaaagcctcatttataagaccgtatcgtccaagaaagtcaacaaggcaggtatagtgacctgaatcatgaacaatcttatacacactggtcattaagttaaagtagtgaagtctcttagtcacaatgccacaatgagaacaggcagagagaaca

SEQ ID NO: 11072 - DNA, 325 bp, Glycine max
tcagaattcaatttcgagcgtttttatgtatttcgagactcaatcagacatccgagtaaaaagttatctgtcccttgaatctgcttagagcttcaacattcaatttcgagcgtctcgatgtattacgggacttaatcagacatccgagtaaaaagttattgtcgtttgaatttgctgagagcttcaacattcaatttcgagcgcctcgatgtattacgggactcaatcagacatccgagaaaatagttattgtcgcttgaatttgctctgaacttcacaattttatttccatcatctcgatattttacgggactcaatcatacat

SEQ ID NO: 11073 - DNA, 317 bp, Glycine max
tattaagagttataaacagaattaataaatctttttttacttatattgaacatatgagttattattatctgttttgggccccttatctaagaaattttttaaacaatatgcagttcactttctgagtttggtgctcttggaattgaattgggttactcaatggaaaatcccaattcattgataatttgggaggctcagttaggtgattttgctaatggtgctcatgtcatattagacaatttcttggcttctggggaggctaaatggctgcgtcagactggtcttgatgtgctactttctcatggttatgacggcca

SEQ ID NO: 11074 - DNA, 327 bp, Glycine max
  unsure at all n locations
agcttctcttgcantgattccncaatatcatgagcctctngcaagggcatatccgatggcatgacaatatcaacctcaacanagtagtgagatccatatgtgtatgcccgaaccgtatcaatgtgccttacagccttatggtggttccagcataggtatgtaagtntctgaagatactctggtgctgctgatcttcccaccagggagttaacatttttcaacactgtcattgaccatgtgcgaatggtgtacaaagccagctgctgtagatgaattacacataagctaaacaagttaaatttatacaagtgaccacgtataaaatga

SEQ ID NO: 11075 - DNA, 310 bp, Glycine max
  unsure at all n locations
gccccagctcttactccttgattatgcgctaaacttaactcaacccttgtccaagcttgttttgctncggccaccgctatcttcatctcttaaaccttattatatcgatgataactatgtgggacttgtaccacgttctgaccgcggtggtgccgctctacgtggcgatgatcctggcctacgggtccgtgaagaggcggaagaacttcacccctgaccaatgcttcggcatacaccgctgtgtggcactattangaaatacactcctatccttgcacttcatcttcaccaacataccttatgccatgaa

SEQ ID NO: 11076 - DNA, 404 bp, Glycine max
  unsure at all n locations
tgcttaaccaccttntcccggtgaacgatccttcgacttctggcgaggcacctccccaagctgaggagggatgtgatgcttcaacttcaaccagcacaaagagtagtgatgatctgctgatgcctaaggagttagcagcagccaaccatcacattgagagcctttatatgaagagtaccatttcagctttgcatgttntgcagganattcgaaagggaagctcaacagttagcatgttntcattgccaccattgcagataagtggcttggaagaaacatggaacaaaatccctattctggaacaaacagccaagtaatgtgcttgatacattgnggattgaaaactagctagttntagtggcttgggagttcacctttatttattttttttacttttcaaatct

SEQ ID NO: 11077 - DNA, 420 bp, Glycine max
  unsure at all n locations
atcttaagtcacctgcggcatgcagctaggaggatgaagttgagctgaatgctatcttggtgaaattgtgcaaaaagtagaagtcatgaagctagtccaatttacaatgcagtgaataaccctacagttaactatagattntgtagtacttccttgaaaatcacattggttgttttatttagtggttntccttctttatcatgaataagaaatttcaatccagctttgctctgaactcttgataatgccacataaagttgaccatgactaanaactggttgaggaagatataatccaacacattgaagagattagccttgagatntattgattgtcatggcatatgacacaataagtgggaattgtcttctagtcatcttgaaaggccaaggagtntgagattgtgataatgacattcgt

SEQ ID NO: 11078 - DNA, 331 bp, Glycine max
  unsure at all n locations
agcttctgtccctgagatactggttcccagaagacatcagggagtgaagattgctgataaccctagccttgcaacaagtcctagggaagtagacacggagatggacaagaaaatccgcagtattgtgagtagcattntgaaagacgcctctgttcctgatgctgagaaagatgttccaacatcctccaccccggatgttgctattcctgatgctgagaaagatgttccaacatcttccactccaaatgctgaagtcctcccttcacccagtgaagaggaatcatcagaggaagaggatcaagccacagaggagacccctgcaccacgggca

SEQ ID NO: 11079 - DNA, 345 bp, Glycine max
  unsure at all n locations
agcttgtgccgaaacactctatggtggngtgctatgtatgccatagtggctntagttcagtgatagaagcaatggtcaatgactgccaactggtgctgttgcctttcaagggtgaccacgttttcatggccaaagatttggaggcaggggtagaggtgaataggggtgatgaagatgggttctttcacaaagaggatatattggaggcattgaaaactatcattgtgaaggatagcanagaaccagggaagcacacaagagaaaaccacatgatatggtgcaaggttttgtcaaataaggaaattcagaacanattcatcacaggtcttgctgcccagttgaagt

SEQ ID NO: 11080 - DNA, 325 bp, Glycine max
tatccaaacatatcctttatttaagttatgtcttcttattctcgtaggaccgtgaatggaggcaagctataactgctgctggatctggatgcgttgcagctttatcagttgagagatatcttgtgagcaatgatcttcttatagagttccatcaggtatttgacttctaagaactcctattttgttttcgcttatcgttctttaggtatctgacactgtaaattgagcgtacacatcacattaccaatttactgcatctctattatatgtcttaattcttgtacatttgcacagaatcagatgcaactttagcaagatttgcttg

SEQ ID NO: 11081 - DNA, 298 bp, Glycine max
  unsure at all n locations
tgacctctatcaacgatagaaaactctcccaactcctctattgctctaagacacacgccctcaaaaggtgcttcagcgactacatggtccattcaatttggccatcagtccgaggatggtatgctaaacttagtctaagcattggccccaacgctctgttcangctcccccaaaatctagaggtaaacctaggatctctatcagacactatgctagatggcacaccatgtaatctgacagtctcactaatatacaggganggcaactcttccaaagaaaatgtgatattaatgggaat

SEQ ID NO: 11082 - DNA, 363 bp, Glycine max
  unsure at all n locations
gcttctaaactntgtacaagaatgaagctctgatactcacttgttagacaagtggcctcagatatcttaagaagggggggttgaattaagatattccaaacttttctcctaattaaaaatctatcttactttntacttaagttatgaattcccttaatgacaatcttcttaaatattaattcaaatgaagcaacttgaattatgaatataaagcaataataaataaaggagattaagggaagagaaaatgcaaactcagttntatactggttcggccacacccttgtgcctacgtccagtccccaagcaacccgcttgagagttccactaacttgtaaattccttttacaagttctaaacaca

SEQ ID NO: 11083 - DNA, 333 bp, Glycine max
tcatgagagagtcatagatcaaattgagaggtataataatttctatgctaaacaagccatcaaagggagaaagaaggttgtcttcgaacccggagattgggtttgggtgcacatgagaaaagaaaggtttccggaacagaggaaatcaaagcttcaaccagggggagatggaccatttcaagtgcttgaaagaatcaatgacaatgcttacaaagttgagctgcccggtgagtataatgttagttccaccttcaatgtctctgatttatctctttttgatgcatatggagaatccgatttgaggacaaatccttctcaagagggagagaatga

SEQ ID NO: 11084 - DNA, 336 bp, Glycine max
tgaaggtaaactagacgccttggttaacctggtaacccaactggccatgaataagaaatctatacctgtcgcaagactctgtggtttatgctcctctgccgaccaccatacagacctttgcccttttgtgcagcaatctggagcaattgaacagcctgaagcatatgttgcaaacatctacaatagacctcctcaacctcagcagcgaaatcaaccacaatagaacaattatgacctctccaacaacaaatacaatcccagatggaggaatcaccctaatctcagatggtctagccctaaacaacaacaacagcaacctgctccttccttacaaaa

SEQ ID NO: 11085 - DNA, 373 bp, Glycine max
  unsure at all n locations
gagaacaatgacaattgaagaatcaattcatgtttccttntatgagtctaatgctatttctctaataaaggatattttagatgatattacagaatctttagaacaaatgcacattcatggacaagattctaaaggaaaaggagaaggaaacaataaagatccttcagcagaagtcaaagcaaataatgatcttccaagagagtggaaagcttcaagagatcatccccttgacaacattcttggtggcatctcaaaaggggtaacaactagacattctcttaaagatntatgcaataatatggcttttgtgtctatggctgaacctacaaatataaatgaagccataatagatgatcattggatagttgctatg

SEQ ID NO: 11086 - DNA, 414 bp, Glycine max
  unsure at all n locations
tcacctgcggcatgcaagcttctccacaggacatatactnntgtgtttaccatccttgcaatgaggcatttgaggagttgaggaagaagtttaccacctctcctatcttgtagccactagattgggagcttccttttgtgctcatgtgcgatgcctctagccatgcacttggggatattttgtcattgagagttggtagcctctcccacatcatngcttatggttcatgcactntagatgcaacctaagttaactacaccaccactgagaaggagctnttagctattatatttgctttagataaattcatatcttattttctttgctcccatatgatngtctntactgaacatgcagctttgatatacttattgaagatgcctgatgctaaacctatattgatcaagtgaaagc

SEQ ID NO: 11087 - DNA, 400 bp, Glycine max
  unsure at all n locations
ngctctcataacacttacttaaagtagctatgtnattatataagttcaaataagctggacatataaactcttccagtgcatattatcagcaaagactcacttgngggtaacatgcaacatgtaagagggtatgcatataaagcatactacctcagactagaccatcatataaacccatgcatgcataccttgcaatttctgctcgtcttctagcctcttcagccatctgattaagttctgtgtaacttgtacgttcattgaacatcttaggctctggtgggcgaaagccgtgaagcgtcctctgtgcatgtgcccatttaagttcacgttcttcctattcaaaatctatnttccttgtagaagcaatctgacacagaattcatattacagagtaagcaac

SEQ ID NO: 11088 - DNA, 333 bp, Glycine max
tgaaggaaaactggatgcattggttaacttgttaacccatctggccttgaatcagaaatctatacctgttgcaaggtttgtggtttgtgctcctctgctgaccaccatacagacctttgcccttccatgcagcaacctggagcgattgagcagcctgaagcttatgctgcaaatatttacaatagacctcctcaacctcagcagcaaaatcaaccacagcagaaaaattatgacctctccagcaacagatacaaccctggatggaggaatcaccctaacctcagatggtccagccctcagcaacaacaacagcagcctgctccttccttccaa

SEQ ID NO: 11089 - DNA, 386 bp, Glycine max
  unsure at all n locations
agcttatgctgcanacatctacaatagacctcctctacctcagcagcaaaatcagccacaacagaataactatgacctatccagcaacaggtacaatcccggatggaggaatcatcccaaccttggatggtcgaatccttaacaacagtagcaacaacaacaaccttattttcaaaatgttgttggcccaaccagaccatacgttccttcaccaatccaacaacaacaacaaccgcaacagccccagaaatagcaaacagttgagacccctccgcaacccttccttgaagaacttatgaggaaaatgactattgcaaacatgcagtttcaacaagagaccagagcctccattcagagcttaactaatcagatgggacagttggatg

SEQ ID NO: 11090 - DNA, 197 bp, Glycine max
  unsure at all n locations
tgtcacacacaatggagggnaatntgaatctcaattcannattcacttgaatctganattgaatttgtggagccaacacttggagccaanatttcactaattatgattagtggaatttagttatggttcagcccactaatccaagatcaattccaagattctccactaagtgtgcttaggtgtcatgagtaggggtg

SEQ ID NO: 11091 - DNA, 215 bp, Glycine max
  unsure at all n locations
ctaccaactacagaccctaagaaaactatattatctacacagaaagtacacttctctatatttgcatagagggtgttcttcctaaggactganagaacttgcctgagatgtcctaagtgatcatctacgctcctactgtacactaaaatatcatcaaaatatacaactactaatctacctatgaaatccctcaagacatgatgcataagcctcat

SEQ ID NO: 11092 - DNA, 211 bp, Glycine max
  unsure at all n locations
cgatggcctcaataacatctattctccacatggaanaaggccaaggagcggacataacgttcagaggatgtggcggaacatcgacattgtccgcgtatgctngacanttatgacacttccttacatgagcgcagcaatcgctttccatggtgagccaataataaccggccctaanggattntctggtcatagcatgcccattggcatatgt

SEQ ID NO: 11093 - DNA, 174 bp, Glycine max
  unsure at all n locations
atgatctttcaagcaacagatacaatccatgttggagaaatcatccaaatctgagatgggcaagtcctccacaacaacaatagcctgtccctcctttctagaatgctgctggtccaagcaagccatatgttcctccaatacaaaagtagtcacaacanagacaacaagcaactg

SEQ ID NO: 11094 - DNA, 313 bp, Glycine max
  unsure at all n locations
atcgctatgaatactatattgttgacatgatactacgtaagngaacttcatgtcagctaatgaatggcattgtgtccacagtgaccgctcaccagttgtactctccatgctctctagttctgcagccttgtaacctctcattaattctgtgaagtganatgacaatattaagctcagccaataatagataagggaatgatctctctntctctctntcaatgagatttccgcaatataccttcatcctttgccatatcaagaaaagcctgtagctccaatgcttgtcggatatacatcattcctcggacttcac

SEQ ID NO: 11095 - DNA, 399 bp, Glycine max
atacagtattccattataagtactcttatgcaaaccatacagttaatatcttgtatatatattgatacaacataagtgaatgaatgacaatttaaattaataatacatattaaacaataaacgccatatatatatattcacgtaattgtgtaaataattgattacattatatctgtaaaaattttagaaatcatttaacgtgaaggagtatatataaatatacaatatatgtgtatgatatgtacaataaaatgcaaagagattgtgtacttacataatataaagatgatttaaatcctaaaatttttaaatttatatatcagaataaagttctatcactctcttatttaatgtattgaaatcttaaatttatgaatgattattaaaaagttccttatt

SEQ ID NO: 11096 - DNA, 401 bp, Glycine max
  unsure at all n locations
tcaatcaatagacctctaatctttaatggagaggtgtaccactactggaaaacccgaatgcaaatttttattgaggcaatagacttacatttgggaaggcatagaaatatggccttatatacccaccacagtagaaagaaccacaatagatggaagcacaacaagtggaagcaccacaatagagaaacctatagatagatggtctgaagaggatagaagatgagtacgatataatttaaaagccaaaaacataattacatctgccctgngaatggatgaatattttanggtttcaaattgtaagagtgctaaggaaatgtgggacactctacaagtaacacatgaaggcacaacagatgttaaaagatctaggataaagacattaactcatgaatatgaac

SEQ ID NO: 11097 - DNA, 296 bp, Glycine max
agctttactaataaaacatttttcatgatttgatgttttatctaaaattatcatgtatacgttatttgttctatagcctatatgttttatatttttatcatgtttattttcaataacacaattatgagagtcaaatgatactacaaagcctttatcacataattgactaacacttagtagactatgcttaagaccatcaacaagtagaacattttcaatggaagtagatggattcgtacctatttttctgactccaagaattctacctttggtgttgacgccataagtcacatgtt

SEQ ID NO: 11098 - DNA, 315 bp, Glycine max
  unsure at all n locations
tcttcnggattataattgatgttatctcgcaacctttcttctatgaaactcacaatccaatcaacagaagcctgatggtgcccattgtttgcatttctcccacatgtatgtgtaccatcaatactgctaataaaaaatgctggggcattatggagcttgacagcacgaatccgccatggacagccatctgaggcacacttagcaaagtagcgaatcaggtcactcttaatagtacgaagctcaaaatgctgtgcaaaggcagcttctttaattgcattccgaaatgccttcacatcatggaactcttgaccgaca

SEQ ID NO: 11099 - DNA, 293 bp, Glycine max
agctttaaaatgattatggattgattggcagatagtcaagtcaataatatcatatcgaaattgatagctgctcatgaaaaagatggtcatgtatacaatatcccaaatgttcctgaagttgctgcacttattgttgatgattttgatccaagctcaaaaagagatattattgttgaaactcaaaatggagaactacaaagaatccatgaattgcactctagctatctaagcctacagtaccctctactcttcccttatggtgaaaatggatataaagctgacatactttaccg

SEQ ID NO: 11100 - DNA, 287 bp, Glycine max
agcttgtgaatgtatatctttcatttccaacttgcaagtaaggtcttgaagttgctccgtgggaagtccttggtaagggatgtattcggtggctataagaccactgtctaatttttccttaataaaatgtcgattaatctctatgtgctttgttcgatcatgttgaactggattgtgtgcaatgctgatggcaaacttattatcacaaaccagtcccataggaacttcatattttattttgaggtcatcaagtatgatattcatccataacaacttacaaacacctt

SEQ ID NO: 11101 - DNA, 420 bp, Glycine max
  unsure at all n locations
aagaattaaaaagtacatcgtctacaaattcgagattgacaaggaatattggggattttaaaaaataggagaaagaaaattacatcttagtcaaataaactaatgaggttatgctctatattcattnttcataattatcgtaattagattctttaactttctaatgagacttcgagatatttccacaaacttcaattttttaggtcaattatgagactaaatgatctatatattaatattataaataatcttttacatttttatctaataaaaaattaacaagtataataaatatatcaatctttataataatcatttttatgacattctaaaataatactttaaaaaacatgtaaactattgattcttattnggagatntatgtaaaattaactatgtacagaanatanactctttaca

SEQ ID NO: 11102 - DNA, 309 bp, Glycine max
agcttctaaactttgtacatgaatgaagctctgataccacttgttagacaagtggcctcagatatcttaagaaggggggttgaattaagatattccaaactgtttcccctaattaaaaatctatttcactttttactcaagttatgaattcccttaatgacaatcttcttaaatattaattcaaacgaagcaacttgaatatgaatataaagcaataataaataaaggagattaagggaagagaaaatgcaaactcagttttatactggttcggccacacccttgtgcctacgtccagtccccaagcaa

SEQ ID NO: 11103 - DNA, 305 bp, Glycine max
  unsure at all n locations
agctttgatggtgtcgagattaaattacatgtttgncatcgtaaaaaaggggtagaatgtgaatgtatgtatacatgattttgttagtgcttagctttactgagctttaaaagattggctaaaattttgttaaaacataagcacttatacaatgaaggaaagctggagttgctgcacatgatgtccaacgttatgtcaaggaatcagatcgggctgcacaatgcacaaggcaagatataatgtcaaatgaagaattgaagctgcaggatccacgatgtcggatacaatgtccaggacatcctgcc

SEQ ID NO: 11104 - DNA, 414 bp, Glycine max
  unsure at all n locations
tcttagtttcagatgatgcagatgggtntgtagctacctcatgcactcctctaatgactatggcatcatttctggcgctaaactgctgggagttggaggccatcttctcaattaaatttctgacttcagcaagagtcatgtctccaagggctccaccactggcagcatctatcatacttctctccatattactgagtccttcataaaaatattggagaagaagctgttctgaaatctgatggtgggggcaactggcacatagtttcttaaatctctcccagtactcatacaggctctctccactgagttgtctaatacctgagatatccttcctgatggctgtggtcctggaagcagggaaaaatttctctaagaatactctcttaaggtcatcccagcttgtgatggaccttg

SEQ ID NO: 11105 - DNA, 208 bp, Glycine max
agcttgcaacataatctgattgttgattatcttggagtcttggtggttaggccatgaaaacctatttagagagacttccttggagaaaggcattgttgaaatccaattgatgcatttgccaacatttgttcaaagccagtgtgagtataaattttatagtttgcggtcttacaactagtgtaaaggtctatttgaaatctacactaaa

SEQ ID NO: 11106 - DNA, 378 bp, Glycine max
ccagtccctgagaaactggttcccagaagacaacgtgtagtattgattgctcgaaaccctagccttgcagcaagtgctagggaagtacacacggtgatggacgagaaaatccgcggtattgtgagtagcattttgaaagacgcttctgtgcctgatgctgataaagatgtttcaacatctttcaccccaaatgttgctgtgcctgatgttgataaagatgtttcaacatcttccgctccaaatgctgaagcccttccttgacccagtgaagaggaatcaacagaagaagatgatctagcctcagatgagacccctgcaccactggcaccagaacctgctccacgtgatctcattgacttagaagaagtctaatctgat

SEQ ID NO: 11107 - DNA, 464 bp, Glycine max
  unsure at all n locations
ctatgctcttgtgtggtggatctagctacaaaaggagagagcaagaaatgaagagccaatggttgatacatggacagagatgaaaaagatcatgaggaagcgatatgtgccggctagttactcaagggacttgaaattcaagctccaaaaactaacccaaggcaacaagggggttgaggagtatttcaaggaaatggatgtggtcatgattcaagcaaagattgaagaagatgaggaggtaactatggctcgatttcttaatggcttgactaatgatatccgngatattgttgagctacaggagtttattgaaatggatgatttgcttcacaaagcaatccaagtagagcaacaattaanaaggaaaggagtggctaagaggagttntaccaactttgcgttcttctagtggaaagacaaaggtaagaaagatggggctgctacttctagtagttcctcaccta

SEQ ID NO: 11108 - DNA, 480 bp, Glycine max
  unsure at all n locations
atgccttggttaacctggtaacccaactgaccatgaataaaanatctacacctgtcgccatactctgtggtttatgctcatctgtcgaccaccacacagacctttgcccttctgtgcaacaatctgaagcaattgaacaacctgaagcttatgctgcaaacatctacaatagacctcctcgacctcagcagcaaaatcagccacaacagaacaattatgacctctccagcaacaggtacaatcctaggtagaggaatcatcccaaccttagatggtcgaatccttcacaacaggagcaacaacaacaacagccttatnttcagaatgttgctggcccaagcaaaccatacgttcctccaccaatccagcagcaacaacagcaacagccccagaaacaacaaacagtacagggctctccacaaccttcccttgaagaacttgtgaggcanatgactatgcanaacatgcagtntcaacaag

SEQ ID NO: 11109 - DNA, 299 bp, Glycine max
  unsure at all n locations
agcttgaaggtaaactanatgccttggttaaccaggtaacccaactggccatgaataaaaaatctgcacctgtcgccagtctctatggtttatgctcctctgtcgaccaccacacagacctttgcccttttgtgcaacaatctgaagcaattgaacagcctgaagcttatgctgcaaacatctacaacagacctcctcaacctcaacagcaaaatcagccacaacagaataattatgacctctccagcaacaggtacaatctcggatggaggaatcattccaaccttagatggtccaat

SEQ ID NO: 11110 - DNA, 323 bp, Glycine max
  unsure at all n locations
actcgtcaacgagaaaggtaacgtaggtgtggtattatttccacacataaacgcactctggccttagatagagattctgttgggaattcctctgaaagtaaggccttcctcactggtaggaagaagcacagtataaggcatctgaaccggtccattacagattctaaggcttgaatctntgttcctcgaattgattttggcctcaatttccttcagcttggttccaaacttttcaaaggcttgaattgccttttggtcatcactccaatcgtcactgtccctctttccaacgtagatatcatcacaagcatgtcttgacaata

SEQ ID NO: 11111 - DNA, 445 bp, Glycine max
  unsure at all n locations
tactcagctcagcaactctttctttntgtttagtcaagacctctaatgctcttaatctctcctcatctaaatcaaccaactcatctaacatcattgtccaataatggtcgattggaatgtccattagtttttgtaccctggctgattgcaaatgtatttcgaccggaagtacagcatcatgcccataactcagtcgaaatggagtagtattagttgattccttatgagaatttctacatgcccatagaacttgatctaacgttntattccaatttcttggctattgggcaatgtgttttttaatcaagttaattacaatcttattggctgcttcgacctgaccaattgcttgcgcgtaatatggtgttgaggttcataatcgaaagccaatattgtgggcaaatactttcatttttcgtgcagctaatactgaacctagatcagt

SEQ ID NO: 11112 - DNA, 338 bp, Glycine max
  unsure at all n locations
cgccaccacggagttntccaactatgctcttgtgtgtgtggaacaagctacaaaaggagagagcaagaaatgaagagccaatggttgatacatggacagagatgaagaagatcatgaggaagcgatatgtgccggctagttactcaagggacttgaaattcaagctccaaaaactaacccaaggcaacaagggggttgaggagtatttcaaggaaatggatgtggtcatgattcaagcaaagattgaagaagatgacgaggtaactatggctcgattcttaatggttcactaatgatatccgcgatattgttgactacacgagtgtattgaaatggat

SEQ ID NO: 11113 - DNA, 472 bp, Glycine max
  unsure at all n locations
tatgctgcanacatntataatagacctcctcagcagcaaaactctcntcagantaataattatgacctttcaagcaatagatacaatctaggttggaggaatcatccaaatctgagatggacaagtccttcacaacaacaacagcttatccttcctttctagaatgctgctggtccaagcaagccatatgttcctcctccaatacagcaacaacagtcacaaaatagacaacaagcaattgaggctcctcctcaaccttccttagaagagttagtgaggcaaatgaccatccagaatatgcaatttcagcaagagacaagagcctccattcagagtctaacaaatcagatggggcagatggctactcagatgaaccaagctcaatccaaattctgacaaatggccttcataaactgtgaaanatccaaanaaatgtgagtgtcatcaccttgaggtctggcaccaaattcaa

SEQ ID NO: 11114 - DNA, 302 bp, Glycine max
agcttgtaaatcatcagtaaaacaggccacgaactatggttgctgcttaagttaccataaggattcattccatcagaagcaagagcaacccttaggttccttggctcgtccctaaactctggatacaaacaatcaattgtcttccattatggagaatcggtaggatgtcgtagtaagccatcactttttctgtccactgaatgccatgaaaggttttttgaatcatgtctattagcaagcaatcgcttaaaccttggtatgattggaagataccagccaacctttgcaggacgacaattttt

SEQ ID NO: 11115 - DNA, 306 bp, Glycine max
agctttaaaaactttcattttaccctctgatcgcttaacatgcttaatgctttctctaattttgtttacaacaggaccgactactttcaacccctcttgaacaataaggtttaaaatgtgagcacaacatcggatatgaaaaaattcaccgccacttactaaaccattagtatgcaaaagtttttccttcaaatagtcttgcattttatcattggaagaagcatcatctagagttaatgaaaatattttctgctcaatccttcattcttccaaaaaaccatatataactttagccatcccatgccc

SEQ ID NO: 11116 - DNA, 306 bp, Glycine max
  unsure at all n locations
agcttgaaggtaaactanattccttttttaacctggtaacccagctggccttgaatcaaaaatctgcacctgtcgccagactctgtggtttatgctcctctgccgaccaccacacagaccttttcccttttgtgcaacaatctgaagcaattgaacagcctgaagcttatgctgcanacatctacaatagaccttctcaacctcagcagccaaatcagccacaatagaacaactatgacccccccagcaatagggaaaatcccgggtggaagaatcatcccaaccttaaatgggccaatccttcac

SEQ ID NO: 11117 - DNA, 297 bp, Glycine max
agctttcttgagagtgcttctttgagaagttaacgctttaactaccaatacacttctaataactaaactcacctccttgaaaataaaacatggataaaataacacaacaaatataattaaacatcaaatataattactaataatatttcagggtgcaacacccttctctacctctatctccactcatcttctcctacctttaagctcttatccatggcttcctatggtgttgaaaatgttcttggctaatcttcttcttgaagaggcgtcttccaacaccttttctacttcttcaat

SEQ ID NO: 11118 - DNA, 303 bp, Glycine max
agcttatgctgcaaacatctacaatagacctcctcaacctcagcagcaaaatcagccacaatagaacaattatgacctctccagcaacaggtacaatcccgggttgaggaatcatcccaaccttagatggtcgaatccttcacaacagcagcaacaacaacaacagccttattttcaaaatgttgctggcccaagcagaccatatgttcctacaccaatccaacagcaacagccctagaaacagcaaatagttgaggctcctccacaaccttcccttgaagaacttgtgtggcaaatgactat

SEQ ID NO: 11119 - DNA, 281 bp, Glycine max
agctcgggtacactaggatttctctttctatcctgaaacctcaagactccatcagttcccactctaaaactactctctctccctgcgactatggactctaactgggctgacaagaatggggcaaacttttgaccctcacggatctcgctcaagagttcgctggcgactctcaacatacccaacttaatgcctctagaggtgaactcacatgccatactcatgtctctaaactgctctaagaggtccaactctttaaccatcatagcagacatttgaaggga

SEQ ID NO: 11120 - DNA, 294 bp, Glycine max
agcttactaaggcacctgttttatcttttcctgacttttctaaaacttttgagctacaatgtgatgcctctggagtgggagttgcagctgtattgttacaaggtgggcaccctattgcttattttagtgaaaaacttcatagtgccaccctcaactaccccatctatgataaatagctttatgccttaataagagccctccaaacttgggaacattaccttgtttccaaggaatttgtcattcatagtgatcatcaatcacttaagtacattagagggcaaagcaagttaaaca

SEQ ID NO: 11121 - DNA, 310 bp, Glycine max
tcagcttctgtgtcctatgaccataaggctatcattatcaatggacagagaaggatacttctttctggctccattcactaccccagaagcacccctgaggtattacactcaaatgtatttcaggtttctttccattttggcctttttttttttttatcaaatgggcaccttaaagtatcttccttttttcagatgtggccagatcttattcataaggcaaaggaaggaggtttggatgtcattcaaacttatgttttctggaatggacataaaccttcacctggcaaagaaatgaataatgtttgcttgc

SEQ ID NO: 11122 - DNA, 372 bp, Glycine max
ctaagctttgagccattcaaacaacaataactttttactcgttgtttgatatagtcccgtgatataacgatacgctcgaaattgactgttgaagctctgacctgatcctaactatcatatgcaatgactcggatgtctgattgaggcccgttatatatcgagacgctcgaaattgaatgtggaagctctgagccaattcaaacgacaataactttttacacggatgtctgattgagtcccgtcatatatcgagacgctcgaaattgaatgttgaatctctgagccaattcaaacgacaataactttttactcggatgtctgattgaggcccgtcgtatatcgagacgctcgaaattgaatgttgaagctctg

SEQ ID NO: 11123 - DNA, 345 bp, Glycine max
agcttcaacattcaatttcgagcgtctctatatgtgacgagagtcaatcagacatccaagtaaaaagttattgtcgtttgaattggctcagagcttcaacattcaatttcgagcgtcttgatatattacgagactcaatcagacatccgagtaaaaagttattgtcctttgaatttgctcacagcttcaacattcaattttgagcgtctcgatatatgacgggactcaatcagacatccgagtataaagttattgtcgtttgaattagctcagagcttcaacattcaatttcgagcgtctcgatatgtgacgagactcaatcagacatccgagtaaaaagttatt

SEQ ID NO: 11124 - DNA, 281 bp, Glycine max
agctctgtcttctttggatgcttacttgtggcaatatttcattaataatgagatggattctttagaatctaacaaaacccggcatttagtagacttgcctcctggctgcaaaccaattatatgtgaaatcattgttgagaaacaactttgatatgaaagaccttagagaagcatgtgtaatccttggtattaagattactaggtcaaaagaggaaatttatatgaatcaatctcactacattgagaagatcttaaagaaatagattactttgaactgtaaa

SEQ ID NO: 11125 - DNA, 337 bp, Glycine max
agcttgtaatcgattacacaagtatgggattttcagaaaataatttccaagagtcacatctattcaaatggtttatgaatggccatcaaaggtgacttggaaacacgaattaaaagaaaattttcattgcccaaaaagttttatcctctcaaaagaaaaatttttctgaactgaaatgtcttatcctctcaaaaagattccttggtcaaccacttgtatattcaataaggaattttgattgatcttcattgtacaatctatctcttttaagagagatttcttcttttcttcttcttatttctgaaaagggattaagagaccgtgggtctcttgttgt

SEQ ID NO: 11126 - DNA, 337 bp, Glycine max
tgaaattgaacaacagaagctcacgagaaactacatatggtcataacatgtcacacgaaagtccgattcaggtgcataatatatcgagacgctcgaaatagaacatcggaagctctcgagaaattccaatggtcataacttttcacacggaagtcctattcaggcgcataatatatcgagaagctggaaattgaacaacgaaagctctcgagaaactcaaatggtcataacttgtcacacggacatccgattcaggcgcataatatatcgagacgctcgaaattgaacaacgtatggtgtcgagaaattcaaatggtcataacttgtcacacggaag

SEQ ID NO: 11127 - DNA, 331 bp, Glycine max
agcttgaatttgaactacagaagctcttgagaaattcaaatggtcataacttatcacacggaagtccgattcaggtgcataatatatcgagaccctcgaaattgcacaacggaagccctcaagaaagtcaaatggtgataacttttcaaacggaagtccgattcaggtgcataatatatcgagaaacttgaaattgaacaatggaagctctcgagaaattcaaatggtcataacttatgacacagaagtccgattcaggcgcataatatatcgagacgctcgaaattgaacaacgaaagctctcgagaaattcaagtggtcataacttttc

SEQ ID NO: 11128 - DNA, 366 bp, Glycine max
ttactatgcaaagaataaccaaggaaaattctttcatctgacttagcatcaaactttcctaagctttcttttccattgtttaatacaaaacacttgcaaccaaaaacatgaagatgcgagatgtttggtttcctaccattgaatagttcatatggagttttctttaaaattggtattattaaagccctattcatgatatagcatgcagtattagcggcttcagcccaaaaatattttggaagaggagtatcatttaataaggatctagcaatttcttctaaagacctatttttcctttcaacaactccattttgttgaggggttctaagtgcagaaaagttatgttcaatgtcatgcttatcacaa

SEQ ID NO: 11129 - DNA, 374 bp, Glycine max
cttgcgtgcacgactttcttatcttcaaagttattttattagctcatattataaaatgacatacaaacatatgagtccagctagctatcttaaacaatatgaaacttaattttttgtgatagccttcaaactacaacaatgattattatcttcttttttaacaaatctatatttttttattacaacgtagctaatgtggtttatgttgaattcaaatttctaatatcaatttttaggatgttttagattttaaagatactatccaatctttttaagatgtttattttagaaattaatgtgttttttatgttaagtttatgatttgttataaaatagaggttttataaaaaaaattatcaagcatggaatagata

SEQ ID NO: 11130 - DNA, 331 bp, Glycine max
agcttagacaattacatatccttcttctttgatacaactaattcaaaataatctatttcatggtctacccaatgaagacccttatgctcacttggccatctatatagagatatgcaatattatcaggttggtgggtgtgcctgcggatgcaatcaggttgagtctgttctcattttctttatctggagaagctaagagatggcttcattcttttaaaggaaacaatctgaagtcatgggatgaagtagtagaaaagttcttaaagaagtacttccttgaatcgaagactacagaaggcaaagctgccatatcttttttccaccagttacca

SEQ ID NO: 11131 - DNA, 349 bp, Glycine max
actcaagcttcaccatgtaagcagagcataaaatattatgtttctgtaagagaaaaatatatacagaagaatttcttgaactcttaccaatcagtttttcatcactttatgaagaaaatcataactgtacagcaaaaaaaattctattatccctctatcaatcccttgccttctatattctttttattagagattctattgatgcttggattctacttccttctgtttgcctcactgcctgagatgcctcatgcagatgctgaatcccacgacctaaactagcaatggagggggctgcagggagagactcaacagcacactcaatcccatcaccatacaaaagcagctt

SEQ ID NO: 11132 - DNA, 319 bp, Glycine max
agcttatttattcaatttcgagcgtctcgatatattacgagtctcaatcaaacatccgagaaaaaagttattgtcgtttgaatttgctcagaggttcaacattcaatttcgagcgtctcgttatattacaggactcaatcagacatccgagtaaaaagttagtgtcgtttgaattggctcagagcttcaacattcaatttcgagcgtctcgatgtatgacaggactcaatcagacgtccgagtaaaaagttattgtcgtttgaattatctcacaggttctacattcaatttcgagcgtctcgatatatttcaggactca

SEQ ID NO: 11133 - DNA, 340 bp, Glycine max
tcgaagccattgaacccacccaaaagggagcgttgtcgtagaagactcaatcgggtttggaagattcgagaaaacgtttcagcggttcttggagaacgtcgtaggcttctttgaggtgttcaaagacgtcgtaggggatgtcagtgttggcttctgcgttttctggaaggttttggactttaggcagtggaaggttcacgaaattgatatcaagtgtgtttagtgacggttttggaagacgctctatgtttcttgggtggatacgaaactcacgtggtgacccttttgagcaatgagtttggccagctcaaggtttgggatcatgtgaccaaaggctagc

SEQ ID NO: 11134 - DNA, 333 bp, Glycine max
agcttgaaggcaaactggatgcattggttaacttggtaacccaactggccttgaatcagaaatctgtacctgtcgcaagggtttgtggtttgtgctcctctgctgaccaccatacagacctttgcccttccatgcagcaacctggagcaattgagcagcctgaagcttatgctgcaaatatttacaatagacctcctcaacctcagcagcaaaatcaaccacagcagaacaattatgacctctccagcaacagatacaaccctggatggaggaatcaccctaatctcagatggtccagccctcaacaacaacaacaacagcatgctccttcct

SEQ ID NO: 11135 - DNA, 331 bp, Glycine max
agcttatgttgcaatcatttgtaatagactccatcagcagcaaaaccaacaacaacaaaataattatgacctttcaagaaatagatacaatccaggttggaggaatcatccaaatctgagatggacaagtcctccacaacaacaacagcctgtccctccttttcagaatgctgctggtccaagcaagccatatgttcctcctccaatgcagcaacagcagcaacaatcacaacaaagacaacaagcaactgaggctcctcctcaaccttccttagaagagttagtgaggcaaatgaccatccagaatatgcaatttcaacaagagacaaga

SEQ ID NO: 11136 - DNA, 321 bp, Glycine max
agcttaatagagctcattatggtctcaagcaggcccccaggcaatggtttgaaaggcttcagactaccttacttcagtttgggtttgtggcaagtaaatgtgatctctctctgttcatttacaagaccaagtctcacactgtatatctccttgtgtatgttgatgatattataattactggaagttctattcctttaattcaacatcttacctctcagttgaactcaaaattctctctcaaacagcttggtttgttaagattattttcttggaatagaggtgaagactctggccgacaaatcaatactgcttactcaaagc

SEQ ID NO: 11137 - DNA, 366 bp, Glycine max
tctaagctttgagcaaattcaaacgacaataactttttactcggatgtctgattgagtcccgttatatatcgagacgctcgaaatggaataccgaagctctgagcaaattcaaacgacaataactttttactcggatgtcagattgagtcccgtaatatatcgagacgctcgaaatggaataccgaagctctgagcaaattcaaacgacaataactttttactcggatgtctgattgagtcccgtaatatatcgagacgctcgaaattgaataccgaagccctgagcaaattcaaacgacaataactttttactcggatgtctgattgagtcccgtaatatatcgagacgctcgaaattgaatacc

SEQ ID NO: 11138 - DNA, 342 bp, Glycine max
agcttctacattcaatttcgagtcttttcgatatattacgggactcaatcggacatccgagtaaaaagttattgtagtttgaatttgctcagggcttcggtattccatttcgagcgtctcgatatattacgggactcaatcggacatcagagtaaaaagttattgttgtttgaatttgctcagagcttcggtattccatttcgagcatctcgatatattacgggactcaatcagacatccgagtaaaaagttattgtagtttgaatttgctcagggcttcggtattccatttcgagcgtctcgatgtattacgggactcaatcagacatccgagtaaaaagt

SEQ ID NO: 11139 - DNA, 366 bp, Glycine max
tcaacattcaacttcgagcgtctcgttatattatttttctcaattagacatccgagtaaaaagttattgtcgtttgaatttgctcagagcttcaacattcaatttcgagcgtctccatatattacgggactcaatcagacatccgagtaaaacgttattggtgtttgaatttgctcaaagcttcaacattcaatttcgagcgtctagatatattacaggactcaatcaaacatccgagtaaaatgttactgtcgtttaaatttgcttagctctccagctttaaatttcgagcggctcgatatatgacgggactatattatacatccgagtaaaaagttattgtcatttgaatttgcttagagattc

SEQ ID NO: 11140 - DNA, 372 bp, Glycine max
  unsure at all n locations
tcaagaaaaatggcctcagcaaatttcttattttcaaaaggaaattctatcaatagacctccaatctttaatggagagggttaccactactagaaaacccgaatgcaaatttttattgaggcattagacttaagtatttgggaagccatagaaatagggccttatatacccaccacagtagaaagaattacaatagatggaagcacatcaagtgaaagcataacaatagaaaaacctagagatagatgatctgaagaggatagaagacgagtacaatacaatttaaaagccaaaaacatcataacatctgccctgngaatggatgggtttcaaattgtaagagtgctaaggaaatgtgggacactctacaat

SEQ ID NO: 11141 - DNA, 337 bp, Glycine max
agcttgcaaattattttcccttgctagagatcaatcaaaacccctcctacataaaggaagggctttcccaaaataattggaatttcctaatcctcctttatgtccatgatcacaaaatcagcttgaaaaatgaatttaccaactatgataagcaaattctccactattcctttcagataagtaatagttttatctacaagcacaagagaaatgttaatgggttggggttcttgtaactcgaacttcttataaacaaaataaagcatcaaatcaatgcttgcaccaagatcacataaggctctatcgattttcaagctaccaatagtacaagggattg

SEQ ID NO: 11142 - DNA, 371 bp, Glycine max
tcattaaaaggcttcctcctgaagctttcttgtggcttctttgagaagctttctcaagaggcttctttgagaagctagatccttatctatccacacccctcttttaacttaattaacctccgtataaataattacggatgaaaataacgcaacaaataatcaaacatcaaacataattactaataatatatagatatatatatctgggtgttacaactctcccacccttttagaaatttcgtcctcggaatttaccttactcaatcaaggatgggtgagcttctcgcatctgactttctaattgccacgtggcatcttctcctgatgcacctccccagatcaccttgaccagcggaatctctttccctctt

SEQ ID NO: 11143 - DNA, 321 bp, Glycine max
tgacggagtttgtagcatcagggaacaattttattttaaaagtgggtcccaattggcgtcctaattttcggctttcctatttggatgtgacatcatggcagttaagtcccaactttccatcgtggattcagtcacaaaacaaacttcaatatgttggactgtctaacacggggattttagattctattcccacctggttctgggaaacaccttctcagattttgtatttaaacctctcttataatcatatccatggtgagattgagactacattaaagaatccaatatctatccaaactattgatctaagctcaaatcact

SEQ ID NO: 11144 - DNA, 324 bp, Glycine max
agcttccacatacttgatacctattctacattttcagcaatcagagaatttaaataataacttgcgaggtcaagatagaccaaattggagagattcccaatctgagatggaatcttccccatgaatccattaccagagaggtcgaggtgagtcaaggaagtcattgtcccaaggaaagaaggaattgacataccttctccaagaaatctattgccgctcaagtccaagtaattcaaatgctttaaatcagccaaacaaggacttatctctccaccaaactggaatcccctataagcttccctatcaaagtagccatcatagtaa

SEQ ID NO: 11145 - DNA, 361 bp, Glycine max
agctcgtcttttctagaaaacgaggtgccacacgatcacttccacttgagatccccacattgcttctcatgtgtcctcagatcagagagcaccgagaactgcttctggttgcacctcttgcacacgtacattttggggcagtggcttctcttgtaatggttcttggcacaaatcattgacttcagtggctggaacttggcatgcctctggttccacctacacccctcttgaggacacgaatacctctttggcttcacactcatcaaacactctagatctctttggttcttaattgggttactcaaagcagcattggtcttgtactcatccccgtgagccctcatgtgcatcctcaaattcg

SEQ ID NO: 11146 - DNA, 329 bp, Glycine max
agcttgtagggttaaagtctcacgattgtcatgtgctcatgcaacaattgttagtcgtggctatacgagacatcttgccaaacaaagtcaggttcacgataactcgcctgtgctttttcttccatgctatatgtagcaaagtgattgatccagtaatgtttgatgagttggaaaatgaggccgcaattatactgtgccagttggagatgtattttccccctgctttctttgacatcatgattcacttgattgtgcatctggtcagagaaatcaaatgctgtggtcctgtttatctacggtggatgtacccggttgagcgatacatgaag

SEQ ID NO: 11147 - DNA, 334 bp, Glycine max
agctttttatggaatttatgatatgaatccagataaggtaaagtaactgttttttatggacgattttccattaggccatggaaaatctagcatgatattccattcttgattttaaattacttaccaaatgaaacttgtgtactgatgtaggtccttcaatcaatgattcaaatgggtgttcttgtcccaactggagatatgactgctgttaaacgaacagcacagttcttcctcaacaggtagtttatcaaatccatttagtgggaatacataaaacaatcaaaacacctacatagatttagcagtagtatttctatatatcaatatcattaga

SEQ ID NO: 11148 - DNA, 341 bp, Glycine max
tgtcacagttctgccatcactggtggtgacttgaaaagagagggattgtccattgaggtatgagttgctctgccagttttgcccccagtttcttgacatgggctgccacccagttttggaccctttaatggacactgaattcacatcaccagctccagccacattggtgatcaaaactaggttgaagtaagagtggccattgattgtgaaccttattcctccctttttcacacaaggaaccctgccatcatcaccaaaagtttagtttagtactagttaaacatatgagcaattgaaaattaaatatccgagataaattaagtaatctcagtcgttaatga

SEQ ID NO: 11149 - DNA, 336 bp, Glycine max
tcaacattcaatttcgagcatctagatatgtgacagtgttcaatcagacatccgagtaaaaagttattgtcgttcgaatttgctcagagcatcaacattcaatttcgagcgtctcgatatatgacgggactcaatcagacatccgagtaaaaagatattgtcgtctgaattggctcagagcttcaacattcaatttcgagcgtctcgatatgttacgggactgaatcagacatccgagtaaaaagttattgacgtttgaatttgctcagagcatcaacattcaatttcgagcgtctcgatatgtgacgggactcaatcagacatccgagtaaaaag

SEQ ID NO: 11150 - DNA, 339 bp, Glycine max
agctttgagccaattaagacgacaatatttttttactcggatgactgattgagtcccgtcatatatcgagacgctcgaaattgaatgttgatgctctgagcaaattcaaacgacgataactttttactcggatggctgattcaatcccgtcacatatcgagaagctctaaattgaatgttgaagctctctgccacttcaaacgacaacaactttttactcggatgtctgattgagccccgcgacatatcgagacgctcgaaattgaatgttgaagctctgagccaattcaagcgacaataactttttactcggatgcctgattgagtcccgtcatatat

SEQ ID NO: 11151 - DNA, 328 bp, Glycine max
agcttttatccatggcttcctatggtggtgagcttcttcttgactcatattctccttgaagtggtgcctctaatcatctttcttccttcttcattccactgccattaaacttttagaagcaaatgacttcatggatgaagaagatgcaaggcctacaagcttcacatggagctacatcatgtggtatcaagagcatcttcgtctaggtgatgttcttttgcttcctctatttttttgtttggtcaattcactttaattcctttttcttcattttattctccatgtatatcctccattgtcttgtggtttggtgctgtttagagtagat

SEQ ID NO: 11152 - DNA, 316 bp, Glycine max
agctttaaaaggtgttttatctctacaaaaatatatgtttttgcactagtaatcgattaccatatattgtaatcaattaccagagacagattacataattttttttttaaaaaagttttcttttgaaatttgaattttaaatgttctaatcgattaccacttgtatgtaattgattaccagtgatgaaacttcagaagttaactttgaaaagtcatgacccttcaaaacataattgtgtaatcgattaccaagaatttgtaatcgattactagtgagagaatttttgaaaaatattctgaaaagtcacatctcttc

SEQ ID NO: 11153 - DNA, 326 bp, Glycine max
tttatgggataatctcttcattcggggttgatgaaaaccccatggatcaatgcatataccacaaagttagtgtgagcaaaatatgctatcttgcttcatatgtagaagaatatcttacttgcagccaatgatcggggtttgctacatgaagtgaaacaatttctctcttataattttgacatgaaggatattggcgatgcatcttatgtcatcggcattaagattcatagagatagaactccaggtattttgggtctatcacaggaaacccttataaccaaacttcagagagatttcgatgaaagattgtcaccatgtgttgctcc

SEQ ID NO: 11154 - DNA, 346 bp, Glycine max
tatgctgcaaacatctacaatagacctcctttacctcagcagcaaaatcagccacaacagaacaattatgacctctctagcaacaggtacaatctcggttggaggaatcatcccaaccttagatggtcgaatccttcacaatagcagtaacaacaacaacaacaacagcagcaacagcaacagccccagaaacagcaaacagttgaggctcctccgcaaccttcccttgaagaacttgtgaggcaaatgactatgcaaaacatgtagtttcagcaagagaccagagccttcattcagagcttaactaatcagatgggacaattgtctacacagttaaatcaacaac

SEQ ID NO: 11155 - DNA, 371 bp, Glycine max
agcttctcgtcagtggtaccttatgtttcatgggataatttcttcatttggttttgatgaaaaccccatggatcaatgcatataccacaaggttagtgggagtaaaatatgctttcttgttttatatgtagatgatattttacttgcagccaatgatcggggtttgctacatgaggtgaaacaatttctctctaagaattttgacatgaaggatatgggtgatgcatcttatgtcatcggcattaagattcatagagatagatctcgaggtattttgggtctatcacaggaaacctatattaacaaaattctagagagatttcggatgaaagattgttcaccaagtgttgctcccattgtgaaaggtgata

SEQ ID NO: 11156 - DNA, 271 bp, Glycine max
tcttgtttgatcttacattttagagccaaggtttcaaaacatactccctaacaaaacgctcaagtaggtgagtaaattaatgatagggcagtgtatcgagttttgcgccaataagacctatgttgtttgcaccagcaagccatgccttgcatgaagaaagaagttgagtattgcgaaggaaaataaaggtctttttaaccaggggctggagtactcaattctttaacaaggtctttgtttctcctgagacagaaagccgaaaaccattttc

SEQ ID NO: 11157 - DNA, 374 bp, Glycine max
agcttgaaagaaaactggatgcattgtttatcttggtaacccagctggccttgaaccagaaatctgtacctgttgcaagggtttgtggtttgtgctcctctgctgaccaccatacagacctttgcccttccatgcagcaacctggagcaattgagcagcccgaagcttatgttgctaatatttacaatagaccttctcaacctcagcagcaaaatcaaccacaacagaacaattatgacctctccagcaacagatacaaccctggatggaggaatcaccctaatctcagatggtctagccctcagcaacaacaacagcagcctgctccttccttccaaaatgatgctggcccaagcagaccatacattcctcca

SEQ ID NO: 11158 - DNA, 345 bp, Glycine max
tactcaagctttcaatgaaatgctggtcaagggcgtaagatgaaacgtgaagacatattctgcaattatttctggtttatccaaggaggggagagcagatgaagctcttaagttgtatgatgagatgatgagaatgggtctaatacctgatgacagagttttcgaggcacttgttggtagccttcataaacccagttctcatgctgccctgaaacaaaatgagtatggggaactgaaaataaacacttctgatacctcgagcttgccaaacactggtttgtcaatttcacacaggaaggtggtacatacatgataatcttgtccttgaagcccaagtaaaaaacc

SEQ ID NO: 11159 - DNA, 377 bp, Glycine max
agcttccctttctttggccaatgctggacttgcttggcagtgatttccttggcaatttgatgctcagaaacagcaatatccaccactccttcagttggtctgcccaggtatttgttgattacagcaggggagaatttaatacattttcctctgacaaacactttctgatactcatcactctttctgtttgttatgtcagagggaatgttgacaatgaattctctgactagactttcatagcaatctcccaacttggtgacagttttcagcagtccagcagccttgatgaggtccatgatctccttgcaatccaaggcatctcttcccagttctctttctaaggcaagtctgcgttgatatacaaatttccacctttc

SEQ ID NO: 11160 - DNA, 356 bp, Glycine max
agcttgtatggataaagtctcacgattgtcatgtgctcatgcaacaattgttagtcgtggctatacgaaacatcttgccaaacaaagtcaggttcacgataactcgcctgtgctttttcttccatgctatatgtagcaaagtgattgatccagtaatgtttgatgagttggaaaatgaggccgcaattatactgtgccagttggagatgtattttccccctgctttctttgacatcatgaatcacttgattgtgcatctggtcagagaaatcaaatgctgtggtcctgtttatctacggtggatgtaccccgttgagcgatacatgaagatcttataagggtatcaaagaatctat

SEQ ID NO: 11161 - DNA, 329 bp, Glycine max
cttaaaaggagccataccaatactggcttgttttctattgttgtaagtgaactcaatcaatggcaaacaatccatccagctaccttgttgctctataatacacgcccgaagtatatcctctaaagtctgaatagttcgttcagtctgaccatttgtttgaggattattagctgaactaagcttcagctttgtccccaaggcttcatgtagacttgtccaaaatcgcgaagagaaccttggatccctgtcagatacaatactagaaagaattccatgcaaccttactacttacttgatatacaactacactagcttttccattctatacc

SEQ ID NO: 11162 - DNA, 297 bp, Glycine max
tacgctagcttcaaactcgaaggtggaggaccatgaaccaaaaacaattcatggggctccgaaaaaggggttgagaatggataattactctaagcaatcactacgcatagctccaaactctaaggtggaggacacattaacgataacgctattcatggggctccgaaaagagcgagaatggagaattgcactacacaatcactacacatagctccaaacgcgaacgcggaggactcattaatgaaaacgcttttcatggggctctcaacagattgataagtggataattgaactaat

SEQ ID NO: 11163 - DNA, 370 bp, Glycine max
agctttgatattggtaagttaatgcctcaaaacttctattatatttcctgtttctgaagtacgttttttctcactaacatctctttttataacattaatctctttaatcctctcatttgtactaattactttatcttacatttttcttccttttcttctcatctccttttctattaaaaaagttgcccgattttgatttataaatgcaatttctcttttcattttaccaaactttatataaagatattttatttgattcaccaggacatatttgctgctggaactgatacttcagcatcaacactggagtgggctatggcagaaatgatgagaaatccaagagtgagggagaaagcacaagctgaattga

SEQ ID NO: 11164 - DNA, 328 bp, Glycine max
agcttgtagatttctgtcttgtatctgtttaatcgattacaaccctctcgtaatcgattataaagttgtttttgatgtagctccacgtggagcttgtaggccttggatcttcttcatcaatggagtcatttgcttcttgaagatcaatagtagcggaatggagaaggaagaaagatgattggagacgcgacttcaaggagaagatgagtcaagaacaagctcatcaccataggaaactgatggaagcttgcttgtaaggcttctatggaggctggatctttgaacttcaatgaggtcctttaatggtgattttccaccatggagatgc

SEQ ID NO: 11165 - DNA, 346 bp, Glycine max
tttaatcatatgtaacaacattcattcaatatatgatttttctagatgttggtccatgaccatcataattgattatgggaataaaaatgtcaaaattatctacaatttgaaatttaattttattgcttattaatagaaaagacttttgttaatgtcatgtgagaaccgaattaacatgcttaaactatgtcaatagttgttagaggtaaaacttaattaggaaaaaaacagataattttaatgaacattttatgtgtctatgattcaagacaatgaaaaaataataatcatgaaaaatttacatatttaatgatagaaaatgaaatgattaaacaatttataatat

SEQ ID NO: 11166 - DNA, 363 bp, Glycine max
ctttatacaatgggagactgttcatttcaagtgctcgaaagaatcaatgacaatgcttacaaagttgagctgcccggtgagtataatgttagttccaccttcaatgtctctgaattatctctttttgatgcagaaggagaatcccatttgaggacaaatccttctcaagaaggagagaatgatgaggacatgaccaagagcaagggcaaggatccacttgaaggacttggaggacctatgacaagggctagagcaaggaaagccaaagaagctcttcaacaagtgctggccatactatatgaatacaagcccaagttttaaggagaaaagtccaaggttgtgagttgatcatggcccaaatgg

SEQ ID NO: 11167 - DNA, 376 bp, Glycine max
agcttatagttattggagggagaatttaacaatccaaaatcaattgtacctttcaagtaacgaaaaattctttttgcggcttttagatgaggagaggtaggagcctccataaagcgacacacaactcccaccgcatatagaatatcgggccttgtattggttagataccttaaactccccacaagactcttgaagatcgtggagtctaccttctctccttcatcaaactttgataacttcaagccaccttccataggggtgttcacgggattgcaatcaagcatattaaatttcttcaacacttcttttgtgtacctttcttgtgagacaaagataccattctccgtttgcttcacttccattcccaagtaatatg

SEQ ID NO: 11168 - DNA, 373 bp, Glycine max
agcttgtgccttttcacgtctggattattaatgtagcatatagatccaaagacccttatgtgctttgttgatggcttcttctcgttccaagcttcacttggagtcttgtcttttacagacttagttggacatctgttgagtatgtaaacaacagtgtagactgctttagcccaaaatgtgttaggtattcccttctccttgagcatccatctagccatttccataactatgcgattctttctctcggacactccattttgttgaggagaatatgcgactgtaagttgtcgctcaatgccttcatcctcacaaaatctttcacactcgcgagaggtgtactctttgtcatgacacttcttagtacttttatccg

SEQ ID NO: 11169 - DNA, 341 bp, Glycine max
tctgttttcaattacgagcttctcgatatattacgggactcaatcggtcatccgagtaaaaagttattgtcgcttgattattctcagagcttcagtttttaatttcgagcgtctcgatatactacgagacacaatcggacacccgagtaaaaagttattgtcatttgaatttgctcaggcttctgttttcaattaccagcgtttcgatatattacgcgactcaatcggacatcccagtaaaaagttattggcgtttgaatttgctcagggcttctgttttcaatttccagcgtcttgatatactacgggacacaattggacacccgaggtaaaagttattg

SEQ ID NO: 11170 - DNA, 344 bp, Glycine max
ttgagcaaattctaacgacaataacttttttcttggatgttcgataaagtcacgtaatatatcgagtcgctcgaaatagaatccagaaggtgtgagaaaattctaacgtcaataactttttactcggatgtccgattgagtcacgtaatatatcgagacgcccgaaattcaatacaaaaactctgagcaaattctaacgacaataattttttacttggatgtccaattgagtcgcgtaatatttcgagacgctcgaaattgaatacataagctgtgagcaaattctaacgacaataactttttacttggatgttcgataaagtcacgtaatatatccagtcgct

SEQ ID NO: 11171 - DNA, 375 bp, Glycine max
agcttaacaaaaggcatgcgaagtgtgtggtattcctagagcaattcccttatgttatcaaacataaaaagggaaaaggtaatattgtagccgatgctctttctcggcgtcatgcattactttctatgcttgaaacaaaattgaatggtcttgaatgtttgaaaagcatgtatgaaaatgatgaaacttttggagaaatttttaaaaattgtgaaaaattttcagaaaatggtttctttagacatgaaggctttcttttcaaagaaaacaaattgtgtgtgcctaaatgttctactaaaaatttgcttgtttgtgaagcacatgaagaggtttaatggggctatttggggtccaaaagactctagaaacattaca

SEQ ID NO: 11172 - DNA, 344 bp, Glycine max
  unsure at all n locations
tgcttcataccgnatattgatttctttaatttgcacaccatgtgttcctttccttcaactgagaatcccattggttgatccatataaacattctcctctaaatttccattaagaaaggcagttttcacattcatctgatgtaactctaagtcataaagggctactgatgtcatgataatcctaaaagaatccttttgtgagatcggtgaaaatgtctctttataatcaatgacatctttctgagtaaatcccttaacaaagccttgtaacgttcaaagttgtcatgagagtcacgtttaatcatgaagacccacttacaaccaactctcttaataccctttggc

SEQ ID NO: 11173 - DNA, 347 bp, Glycine max
tgcatacaagattctccttgcctggcactttataaccttctggttgggtcatatagatgtcttcctctaaatccccatgcaagaatgcagttgtaacatctaactgctccaagtgaagattctctgcagctactatgctcagaataactctgatggtagtcatctttacaactggagagaagatctctgtgaaatcaatcccttgtttctgctgaaaccctttcaccacaagtctcgccttgtatcttcttctaccgacagattcttcctttagcctatagacccacctattctgtaatgcctgctttccttctggcaatttagttaaagaccacgtcttattcttt

SEQ ID NO: 11174 - DNA, 375 bp, Glycine max
gcttcctcaatcaccttattgagaatttatatgccatgaaggatatgtctgtctttgatgaaagttgtctgtctctcatcaataaggatagatataacatgcctcaatttgtttgctaataacttggctatcaccttgtacatacaaccaatcaaggagattggtctgtaatcatcaaaggactgagggtgttttactttgggaattagagccagaaaggaagcattactacctctagggaagctgccatgcacatggaactcatccacaaatcttctgaagtcaggtttcaccactccccaaaattctttaataaaattgaaattaaaaccatcaggcccaggacatttgtccccaccacagctttcttgatct

SEQ ID NO: 11175 - DNA, 333 bp, Glycine max
tagcttcttctgtcaactaacgaagactgtctctccgttagtcggtaactcatccacaactattacctgagccgatcctatgagatattgagggatgctgggtggtttccggtcaaaggttatttcgaatggagagatactagttgcgaagtgaattgaggtgttgtaggacattccgcccacatcaagaattttccccaagtggttggtttcgagtgaacaaaagcgcacaagtactgctccactacttaattgatgacctcagtttggccatttgtttgaagatggtaagccgaactcatgcgcagtcacatgccactcaaacgaaagagc

SEQ ID NO: 11176 - DNA, 351 bp, Glycine max
ctgcaatcttacatcatgagccatgttttttatcttgatttggaatctgctttggcaagtttatattttatagttgaatggtcagtgtgcacaatgatctttgatcctactataaatgatcataactttttgaaggcctaaaccactggtaacatatccttcttcactactacacagttgatttgggcttcatttagcattttgttggcatagtaaatagcatgaaatattccactccttttttgttctaatactacttttaccacataattattcgcatcacacattaagtcgagttcttgcccccgattgggagccactatagctggagtggttactagcctttttttc

SEQ ID NO: 11177 - DNA, 337 bp, Glycine max
tgttcatatggcttgaaacaagcatcgaggcagtggtacatgaagtttaatgagtttaagagcaactcaggattcaaaagatgtgacatgaaccattgttgatatgttaagaaatatactaatagttatgttatccttgtcgtgtatgttgatgacatgttgattgcaggatctagtatggtagaaattaacaggttgaagcaacagttggcagaaaacttttaaatgaaggatcttggtccaactaaacaaatccttggtatgagaattcttagaaacatatcagaaggaattttgaagctgtctcaggagaaatatatacacaagttgcttgaca

SEQ ID NO: 11178 - DNA, 316 bp, Glycine max
gcttatatatatcgacacgctcgaaattaaacatcgggaactctcgagatattcaattcgtcatcatttttcacacggatgtccgattcgggcgcataatatgtcgagaggctcgaaattgaacaacggaagctcttgagaaattcaactggtataacctttcacacggatgttccaattatgccaattacatattgggacgcttcgaactgaacaacggaagcttctgacaaattcaaatggtcataacttttcactcgaatgttcaaatcaggcggatcacctatagagacgcttggaaatgaacaacggaagc

SEQ ID NO: 11179 - DNA, 377 bp, Glycine max
agcttgaataggacctcagtgtgaatatttatgaccattttaatttcccgagagcttccgttgttcattttcgagcgtttctatatgtgatgcaccttaatctaacatccgtgtgaaaagttatgaccatttgaatttctcaagagctttcgttgttcaatttcgagtgtcttgatatgtgattttccagaatcatacattcgtgtgaaaagttatgaccatttgaatttctcaagagcttccgttgttcaatttcgagcttctcgacatattatgcgcccgaatcgcacatccgtatgaaaagttataactatttgaatttcgcgagagttttcgacgttaatttcgagcgtatcgatatataataagcccgaatc

SEQ ID NO: 11180 - DNA, 368 bp, Glycine max
agcttgcttatgcgggcatcgtattatatcaccataacatgatgggtttggtttaatttcattttggaacacttgccgctatctttgctcttagatccttgcgcaagattttgcctgacggtgacttgggaattgcatcaatgaagaatactcggtttattcttttgtaaaacaccacctgcacaattccacaactcattacattccttattttgtggctaagaaaggtacagtacacatcataaacctgtaaaaaacgcatattatatctgatagtgacccagacatttataattaggtgggaagaagcggtgtgggtcagttataagataaaatgagaaattatatttatacggggtgaatgagat

SEQ ID NO: 11181 - DNA, 369 bp, Glycine max
agctttaaggatggaaggtttctttttatctcttgcaaggatattagtgtcattcagacaaatgttttaagaatcaaaccagtcattaaattgatcgagatgttggattaatgaattaccgatataattatatcagtggatcagtattcaaatctgtttgacttgatatatattagcaaattttttaaaatataatataattatcataatttaatcaagttgatactctaaatttagaaactaatatcaacatatgagatttacactacaagaaaaatgacctatgcctatagacacttttgcctacatgtttaatctagtgtaggtaaaacctaagaaatacttttacctacaaatatttatcgtacg

SEQ ID NO: 11182 - DNA, 372 bp, Glycine max
agcttatgctgcgaaatattactatatacctcctcaacctcagcagcaaaatcaaccacagcagaacaatcatgacctctccagcaacagatacaaccctggatggaggaatcaccctaatctcagatggtctagccctcagcaacaacaacagcaacctgctccttccttacaaaatgctgctggcccaagcagaccatacattcctccaccaatccaacagcagcaacaaccccagaaacagccaatagttaaggcccctccacaaccttccctcgaataacttgtgaggcaaatgactatgcagaacatgcagtttcaacaagagaccagagctgccattcagagcttgactaattagatgggaccatt

SEQ ID NO: 11183 - DNA, 379 bp, Glycine max
gcatgcaagcttgtgaataaaattctgtttctgaagaggactataatgacctgcgaagagctggtttacgcagttgtttgctcggaggcctgccggattggcttgttgcgtatgcggatcgccttgtatgagccttcatctgacaacaatggtttcatgttcatgtggttctttgcggatcaattttccctaacatatatgctatggcgaaggtgagaatcatcaattattgaaagaacaaaacttcctgaagaaattctaaagcataatccataagaaaaaagagaatatttctcaaatataattctcgaagttgaaaggagcgatgcctgaggtcacggtccctctttggccgtggggatacattcctttatacact

SEQ ID NO: 11184 - DNA, 323 bp, Glycine max
  unsure at all n locations
ntacaaaaaatgtcactctactctaagttttttaaggatatgttcacaaggaaacacaagtatattcaccaggaaaacattggtctggaaggaaattgctttgttgtgattcaaaagatccttccacccaagcataaagaccttgggagtgtaaccattccttgttcaattggataaatcactatgggaaaggctcttattgatttgggagccattattaacttaatgttagtctccatgtgcataaggttgggagagttggagatcatgcccacttgaatgattttacaacttgctgaccgctccattaccagaccatattg

SEQ ID NO: 11185 - DNA, 209 bp, Glycine max
  unsure at all n locations
tgaatcggacctccgagtgatatagtatgatccattgaattgctcaagagcttccattgggtcaattcgagcgtctcgatatattatgcgccataatccgacctgcgagtgagaattatgaccacttgaattctcgagagcttccgttgtcaatntcgagcgtctcgatatattatgtgcctgaatcggacctccgagttagaaggatg

SEQ ID NO: 11186 - DNA, 367 bp, Glycine max
  unsure at all n locations
gtagaaattgctattctaagctcacttttgcgattcacatcccacgtggctttaaacaatatttccaataccttttaacgaaacatgttctgtnttataaatttatgaaaaatgggtaataatatatatatagctaatttttacantaatagataagtatatttttagtatcttaattaatatcatatataataatcgatactctataaatggaagctatatctaataatttatgctattaaaaatnaatcttatagactgactactataaaaagggaattgatctaaataattaatttacgtttaaaatatgattatatcatataattgatatctcataaaaattctatataattaaaatgtaaat

SEQ ID NO: 11187 - DNA, 386 bp, Glycine max
  unsure at all n locations
atataagtgatcatgattaataagatatgaacgacagaaagaagaagatttccttaaattgttaactgccattctaacaaattncataataaaaaattaacatcatttgataatacaaacatgcaatcaatggtgaaatatttcaataatagacttaagttaagtctagttacatatatacattaatcttgaagaaatttgtatcataacatctatccaatgacaacaatattcataaaaactataacatttataattaaacctcatcttttatagaaaataccttattatttatatacgtgtctataacaataaagataaattattatttcctgtgttaataattgcaaacttactattatactatagtctacacacactatacc

SEQ ID NO: 11188 - DNA, 294 bp, Glycine max
agcttgagctcggcttgagttgaatacgtaaagcttgagttgacataggctttttttaaggctctgctcgacttacataaaagtctgacttacgagcctatttaaaagcttgcttaaagacgtcttttattaattaattattttaaaacctagtgaaatactaactaaaaaaagaaacttataaaatttcgtataaataatgtacaaatctaaaaataattgataaacaaaattatattgaattcaagtcgttaaagcacaaagtatataaaaaaaataaaaatagcataatat

SEQ ID NO: 11189 - DNA, 283 bp, Glycine max
agcttgtcgccgttcgagacctctttcgggtttaggcctttggttatggggagaaggagcaacggtgctgttgttttcgcttctgaaacctgcgcgcttgacctaattgaagcgacttatgaaagggaggtttaccctggtgaggttcttgtggtggataaaaacggtattcagagtctctgcctcatgtctcatcctcaaccaaaacaatgcatttttgaacatatttactttgcacttcccaattcggttgtttttgggaggtctgtgtatgagtctcgta

SEQ ID NO: 11190 - DNA, 406 bp, Glycine max
tgtacacctctgtttctctacctttcatcacaaaccctgttggttgattgacaaaaacttcttcttctagtgagccattaagaaatgcagattttacatccatttggtgtacttcccagcaattgaagctagccattgctattacaagtttcactgtttccaacctagcaacaggggcaaatacttcatcataaaccagaccttgcttttgcaaaaatccctttgcaaccagtctggctttgaactttgttacttctcctctaggattcaacttagttttgtagacccattttactgctatggctttctttcctattagtagctttgtgagactccatgtcttgtttctctcaataaacctcaactcttcttccattgcttcaacccaatgtgagtgcttcaaagc

SEQ ID NO: 11191 - DNA, 402 bp, Glycine max
tataaatcattaaaattgattagttttgttatctatattataatttgatttcacgtgcatcaaaactttgttttgttttaaaaaattatccattaggaaacaattgtgtgtaatatcgcattatttctacaatatgtcgtttcaaatgatttctttataattataaagctgaagttttccgacccaagaattaaaggtctccctagtgaaatatcattttaacttacgaaataatttgggtcagtttatttgttaaaaagtagagaccattgttatctataaaagatgaattgatgtaaataaaaagactaaattgatcgatttttttattgtttaacaacaaaattggtaattttcattcttccacggaatatcaatcttaaatcttggaagggccaaaac

SEQ ID NO: 11192 - DNA, 421 bp, Glycine max
gatgctattgtcctacaacagatgttgcgcatagggcattgaatgctggactgcagcaatctcaaataaagatttttggtctacctgtccgaccttcctttgttaagcctgtccagccaaaggtatgtaatattcttatagccattacttgaatttattcgcaaatttacttacaattctggaattggaatacaacatgatgtgctatatatattattcccaaacaaatgtcagtggattgtttgaatttatgctgtaggatgaactaaggagagaattaggaatggatgaggatcttcctgctgtattattgatggggggaggtgaaggtatggggcccattgatgctactgctctggcacttggagattcattatatgacgagaatattgtggctcccgtacgtcagatccttgagatc

SEQ ID NO: 11193 - DNA, 424 bp, Glycine max
gtccattctcttggaagttcatcattggattcgacttcttctagagtatcttcattgcgtcctttatcatttcctttggaattttgttcatgaatgttcatatgttctaaagaatctgcaatgtcatctagcatattctttcttgacaatatatcattacattcatcaaaggtaacatgaatggattcctcaatattcatagttctcttattatatatcctatatgctttgctttgtaatgaatatccaagaaaaatgccttcatcagattttgcatcgaattttcctagattatctttaccattattaagtacaaagcacttgcaaccaaaaacatgttgatgagagatattacgttttctatcattaaataactcatatggggttttctttaaaataggtcttatcaaagccctatacatga

SEQ ID NO: 11194 - DNA, 327 bp, Glycine max
ttaatggagtgtggaaccggccactggcgtactggcttctacttggccgccactggttcaactcctttcttggaaaccatgtgcccgatgtactccacttgttgttgtgcgaaagaacatttggataatttgagaacaaaatgattatccaaaaggacctgaaaagcttgttccacatgtgctacatgctcctcaattgttgcgctgtagatcagtatatcgctgaagaagacgatcatgaaacgacgaaggaacggtctgaagatcatgttcatgggtgcctgaaacgatgagggagcattgcataaaccaaaaggcgttaccttg

SEQ ID NO: 11195 - DNA, 211 bp, Glycine max
tgtacgccttggatcttcttcatcaatggaatcctctgtttcttgaattttgatggcagcggaatggagaaggagaaagatgattggagacgccacttcaaggagaagatgagtttataagaagctcaccaccatgggaagccatggataagaacttgaatgtaggataaaattaatgggggaagatggagaaaaagaacaccaaatttat

SEQ ID NO: 11196 - DNA, 412 bp, Glycine max
  unsure at all n locations
ntgaatgcactattcaatggagttgacaagaacatcttctgactgatcaacacttgcacagtggccaaagatgcatgggagatcctgaaaatcactcatgaaggaacctccaaagtgaagatgtccagattgcaactcttggctacaaaattcgaaaatctgaagatgaaggaggaagagtgtattcatgacttccacatgaacattcttgaaattgccaatgcttgcactgccttgggagagaggataacagatgaaaagctggtgagaaagatcctcagatccttgcctaagagatttgacatgaaagtcactgcaatagaggaggcccaagacatttgcaacatgagagtagatgaactcattggttctcttcaaacctttgagctaggactctcggatagggctgaaa

SEQ ID NO: 11197 - DNA, 284 bp, Glycine max
agcttgtagggttaaagtctcacgattgtcacgtgttgatgcaacaattgttagccgtggctatacgagacatcttgccaaacaaagtcaggttagccataactcacccgtgtttttcttccatgccatatctagcaaagtcattgatcttatcaagtttgatgagctgaaaaatgaggccgcaattatactgtgccagttggagatgtatttcccccctgctttctttgacatcatgattcacttgattgtgcatctggtcagagaaatcaaatgttgtggtc

SEQ ID NO: 11198 - DNA, 284 bp, Glycine max
agcttgctaacccatggttttttcctaatatctcccacactttttggggttggccattcttggacggccttgattttctcatggtccacatggacctcatttctaccaactacaaacactaagaaaactatattatctacacaaaaagtacacttctctatattttcatagagggtgtttttcctaagaactgaaaaacttgcctgagatgtcataagtgatcatttaggctcctactgttcagtaaaatatcatcaaaataaacaactacaaatatacctctg

SEQ ID NO: 11199 - DNA, 281 bp, Glycine max
agctttggagtttccaagtgccaattcgtcttcttctttagtccagtcttcttctggcttcaattcttcagtgggctttccttctgtgtccagcatcttgggatgttcccagcctttgatgacagctttccaggttctgctatccagtgatttgaggaaggccaccattcttgctttccaatattcatagctgcttccatcgagaattggtggtatgttcactggtccgccttctttctccatgttcatcagaatttatctccctagatctcactctgtga

SEQ ID NO: 11200 - DNA, 391 bp, Glycine max
  unsure at all n locations
ntacagcagatgcccctttactccatgttcttgaaggatatgttaacttggaaacataagtatattcaccatgaaaaaattgtcgtggaaggaaattgtaatgttgtgattcaaaagatccttccacccaagcataaagaccttgggagtgtaactattccttgttcaattagagaagtcactgtgggaaaagctctgattgacttgggagccagcattaatttaatgtcattctccatgtgcagaaggttgggagagttggagaccatgcccactaatatgactttacaactggttgaccgctccattaccagaccatatggagtaattaaagatgtgctggtcagagtgaaacattttaccttcccgacagactttgtggtaatggata

SEQ ID NO: 11201 - DNA, 286 bp, Glycine max
agcttgctgtttactacatgctttgtaaccttctattgtatccttcttgggcatatgctattccttcgcggattctcaaaattcccgatacaattgtggaggttgctgtttgggtattcctcacctactatggtattggatttgacccaaatgttgggaggtaaagaaactactttaaacatttaggagcatgcgaatgttgttgcttctactaatttgcgtgttacttatgatgtgagctcttgaattttgtgcaggttcttcaagcagtacctcgtgctattaa

SEQ ID NO: 11202 - DNA, 286 bp, Glycine max
agcttgtaaaggagtgtgaatctttgctggaccaccttttccctgtgaatgatcctgctccagtttccactgagacaactccccaagctgaaggttttgatccttcaacttcaaccactaccaagagtgatggtttggtgattccgaaggaattagctgagatcgagtacatggagagcctttatatgaagagtactgtatcagcattgcatgttttgcaggaaattagaagtggaagctcaacagttagcatgttttcattgccaccgttgaagataagtggttc

SEQ ID NO: 11203 - DNA, 405 bp, Glycine max
tgccttacctgcaaaatctttcggtatatgttcttaaattacgaagttgtcgtccaccaccatactcattctctccacttgattcttgtgttgtctatcttatatgtcgcaaggcatgcatagtcaatttcacaattctcactcactaatctttgaataagttaaacataactaattcatttaccaagctactccttacttgtacaactattggccatttttgaggcaagaactttcatgattacaattcatacaatggcctgagtacttcatgcacactctatagttgcatacaataacttactcaactctagaacataggtgctacgatattgatatgctgaaaatgacttgcgatacttttatatcacttacatctaagtctatatgatctacaatctgaca

SEQ ID NO: 11204 - DNA, 410 bp, Glycine max
tgttactactattagatagctactaatactattgcaaactgttattgtttttttaacttaattatattacacttgtttatgtatgtgtttttctcttgacttaaatataattttggtcattttattttactcaatacgtaattttggtctctctattttaaaattaaaatatttgatactcctatttttaaaaatctacaattttggtctctctattttaaaatacaaacattttgtccctatattttagaaaattcataattttgattctcatattatagaaaattcacaattttggtttaatatataattattcctatgttttatttcttttattttttactttgtagttaattaaatcatttcttgatgatatcttaaatgaatatgtagatttaggatttaattag

SEQ ID NO: 11205 - DNA, 428 bp, Glycine max
  unsure at all n locations
ntgcttctacatctcttatagagttattcgagcttaatataacaaatagaagagtttttgggtagtagttcatgagacccaacatgtctccacggggagtgccagtgttgttagtgaagaagaaagatggaaccatgaggttgtgtgtagactatcgccagttgaataaggtgatgatcaagaacaagtaccatttgcctagaatagatgaccatacggaccaggtgataagaacttatgtgtttagcaagatagaccttaggtcaagttaccatcagatccgagtgaagtctgaggatatcctgaagactgcctttaggacctgttatggtcactatgagtatctagtcatgcctttcagtgtgactaatgcccttggtgtgtntatagattacatgaatagaatctttcacccttatcttgatagg

SEQ ID NO: 11206 - DNA, 390 bp, Glycine max
gtaacatcagaccacttcaagggtgctggaacttcttcacatggacttgatggggcctatgcaagttgaaagccttggaggaaagaggtatgcctatgtcgttgtggatgatttctccagatttacctgggtcaactttatcagagaaaaatcagacacccttgaagtattcaaggagttgagtctgagacttcaaagagaaaaagactgtgtcatcaagagaatcatgagtgaccatggcagagagtttgaaaacagcaagtttactgaatactgcacatctgaaggcatcactcatgagttctctgcagccattacaccacaacaaaatggcatagttgaaaggaaaaacaggactttgcaagaagctgctagggtcatgcttcatgc

SEQ ID NO: 11207 - DNA, 235 bp, Glycine max
tagcttgcctcgaaggtttatttctatgatccgctggaggcggcgcatcttcactgcgggtgcggcgcgtggggtgttttcttcacgggattgtttgcgaataaagtgtacgtggaggagatttacggtgttggaaggccgttcggggctttgatgggtggcggagggaggctgttggcggcccacgtgatttaaatattggtggtgtgcgggtgggttactgtgaccatggtcc

SEQ ID NO: 11208 - DNA, 424 bp, Glycine max
aaactacgctttgaaaattaaacacaataacttttactcggatgtttgattgagacccgtaatatatcgagtcgctcgaaattgaataccgaagcgctgagcaaattcaaacgacaataactttttactcggatgtctgattgagtcccgtaatatatcgaaaagctcgaaattgaatgttgaagctctaagcaaattcaaacgacaaaaactttttactcggatgtctgattgagtcccgtaatatatcgaaaagctcgaatgtgaatgtagaagctctgagcaaattcaaacaacaataactttctactcggatgtctgattgagtcccgtaatatatcgagatgctcgaaatggaataccgaagctcggagcaaattcaaacgacaataactgtttactcggatgtctgattgagtcccgt

SEQ ID NO: 11209 - DNA, 281 bp, Glycine max
agcttctacattcaatttcttgcttttcgatatattacgggactcaatcggacatccgagtaaaaagttattgtagtttgaatttgctcagggcttcggtattccatttcgagcgtctcgatatattacgggactcaatcggacatccgagtaaaaagttattgttgtttgaatttgctcagagcttcggtattccatttcgagcatctcgatatattacgggactcaatcagacatccgagtaaaaagttattgtagtttgaatttgctcagggcttcgg

SEQ ID NO: 11210 - DNA, 416 bp, Glycine max
ttagtgtactgctttaagtagtgcacgatatgcttccttaggtaaacacgttgcctaaaagttactatcaggccaaaaagatattgtgtccgatgggtatgaagtatcagaagattcatgcttgcctgaatgattgcatattatacagacatgaatttcaagaaatgcccaaatgccttatgtgtggggtatcacggtacaaagtgaaagatgatgacgagtgtagtagtgatgaaaactcaaaagacctaacatggcatgcaaatgggagaaactgcgatggaatgctccatcatccggctgattcctcccagtggaagaagattgatcgtttgtatccagatttcggcaaagaggcaagaaatcttatgcttggactatccactgatggaatgaatccatataggtagttaagt

SEQ ID NO: 11211 - DNA, 283 bp, Glycine max
agcttgctagctgattctctttttaataatttttcagatatgttctcattcttatgagaccaaagcacagctgcatatttgaccactttagatgtatcacacaatcaaataaaggggcaactcccagattgttggaaatcaataaagcaattagtgattcttgatttaagcagcaataaattgtcagggaagattcctatgtccatgggcgccctaattaatatgaatgccttggttttacgaaacaatgggttaatgggtgagttgccttcttctttgaaga

SEQ ID NO: 11212 - DNA, 285 bp, Glycine max
agcttccctcttagtaatgtcttagtcatcatatcagcaccattatcatcagtatgaattttggccaactccaacagcttagcatccaaagcacctcgtatccaatgatacctcatatcaatatgcttagaccttgaatgaaaagttgagttcttaccaagatgaataacactctgactatccataaataatagatatttatcctgaacaaaaccaagctcctacaagaatatcttcacccatagcaactccttgcatgcttcgataatggcaatgaattctacc

SEQ ID NO: 11213 - DNA, 282 bp, Glycine max
agcttctggtgggacatcttgacttgctttccaatctgacattcaccacagattctgccttcttctattttcagattgggaatgcctctaacagcacttttgtcaaggattttcttcatgcctcttaagtgcagatgtccaaacctttgatgccatattctgacttcatcttctttggaggatagacatgtggaggagtagctggtttcttggggtgtccataggtaacaattgtcctttgatctgctgcccttcattagaacttcactcttctcatttgtc

SEQ ID NO: 11214 - DNA, 371 bp, Glycine max
tttcagtggaatgcttgatagcatcttgcatgcaccaatgtcattctttgacaccactccctctggcagaattttgagtcgtgtgagttttaattaacacccctttttcacattaatttctgctagtaaacaacgtaaactacattctttaaattatattgtttggacttactgtcttatgaaatgtttaggtatctactgatatactttgggttgatatatcaattccaatgttagtaaacttcgtcatgatcacgtacttttcagtaatcagcatcctcattgtaacatgccaaaatgcttgggaaacggtcttcctcttaatacctctgttatggctgaataactggtatacggtatgatatgcctac

SEQ ID NO: 11215 - DNA, 285 bp, Glycine max
agcttgtcaagggaacaattatgcatgaattcatagatgagagctttcttgcgtccttccaaacagaatcaaagaagtatgacaacattaacatgagaagttctactgatacactattagaaaatatgttttctacatcggttatttatgactttcaacatcggtttttcaaccgatgttgaaagtaccgacgttgatagtattatcgttaacatcgggttttgaaaaaccgatgttaacgtaaaattaccaacatcggttatataaataaccgatgttgctaat

SEQ ID NO: 11216 - DNA, 404 bp, Glycine max
  unsure at all n locations
tctcgcaggaactctgtgatatttctagtactcaactttctagccattttcactggtatttacctcctcctctttggctcaacaacttgtgatgaatccacgtcgaggctctactttggtggtgccattttgctcctcatttccccactatgtatccctggaactatatatgctcgagattggtttcaccatgccatccattccagctttcggatggaaggttccggcttcattcttgttcatgttgatgatcttgagcttcataaggaactcctcacatgtcaaaacagcgctctaagtctcagtaatggggacagtcatggcctgctgagtgagaatggatccatttatgtaattagttagagtgcaaaatctagtgatntgtgttgtgacaagatgtttgg

SEQ ID NO: 11217 - DNA, 387 bp, Glycine max
  unsure at all n locations
ngcattctagaatttgaaagattgcacaagtctcatcaagttacaattttttggagaggctctatatcttgaaacgttaaatctagaaggatgtacacaactcaggaagatagatccattcattggtcttctaagaaagcttacaattttaaatttaaaagattgcaaaaatctagtaagcttacccagcagcatactgggtctcaattctcttgaatacctaagtctttctggctgttaaaaaatgtacaatatacagttatttgatgaaccaagggatgatgagatttcggagaagctttgtataggtgaagctcctactcaatcccaatcaacatcctccattttgaaaaggttgttnttcaggcctttacatttggtgtatgc

SEQ ID NO: 11218 - DNA, 265 bp, Glycine max
gaatgctctattcagtgtagtagactagaatatattcatacggatcaacacatgcacagtggtcggagatgcatgggtcatccagagaaccactcacgaaggaacctccaatgcgaagaagtcctgatttcatctgtcgcctacaaaagcctacaatcttaaaatgaaagaagagcgaatgtttaatgactttacacctgaacattcttgagattgcctacgcttgcactgcctagcgacaaagaatgacaaatgaaaagctggt

SEQ ID NO: 11219 - DNA, 285 bp, Glycine max
agctttcattaagatgggggagttcaccgggagtggtgagtatgtgactcacggtgaattaccttcctccaggccaaatcattcaaggaaagttacagatcttcctcttgtgctgctgatcttctatgagggttcaggggggcctttcggggtggaggatactgtgcacgcagcaggtcctctgttagccctcattggattcttgcttttcccattgatatggagtgctcctgaagctttgatcactgctgagatgggtaccatgttccctgaaaacagtggtta

SEQ ID NO: 11220 - DNA, 279 bp, Glycine max
agctttaattcctccggaataataagttgtccagatgaggatacagtagcacaaaatttacggtatgaaaatagtgcattgatgcaaaggtttgtcacttgttcccgaacaagtgggagtggctttgacggaatctcactagcagctgcaagaaaaaaaaaaatggtaaaattcctacacccaaaaattatacctataaacaccatttaaaatattaacagaatgacaccaccatgggaacatttaaaataaataaagccaacaaaatttaatatagag

SEQ ID NO: 11221 - DNA, 322 bp, Glycine max
tgtagttgagcccttatgaccctggttgaaccttgatatttttgcttcattgaatcccatatatttattgtcatgtccctcttgaggattgtttcaaggacttcactatctattgcctgtaaaaggtaattctttacctttaagtccttcaacttctgctcctcgatcaatttgcattgtgcctccgtaagctctattccatctgccaccatcaatatcccattctcaatgagatcccaatattctttggagcagagaaaattctccatcaacattgcccaatgatcataatgaccattaaaccttggaattgcaggctgca

SEQ ID NO: 11222 - DNA, 269 bp, Glycine max
tggagggactcactggacactgtttttgagttttttatattgtgggcttatgcaggacgactcaggctagatgggctatgagaaatgcttcagtaatatgggtgaagatttaccatagaatacgcggagagctgtagatgacctttgctcagagtctagtgaataaagtgcttcttgtgccaatgcaacatttaaggtgtgatgggaacgacagccagactattatttgagacactggagaacatgaatgctttgactaggatgttcaa

SEQ ID NO: 11223 - DNA, 286 bp, Glycine max
agcttcatgttattggaatgtattctattgacttcaagccttccaacttctaatgagcaccattatcaatttcactatcaaagctaccagaccttttcaatgcggggccaatgctatctggtcgatttgaaggcagaggccatgaaatttacctcaactatatatcaaatgatatacacctcatatgccgcttggggctataatctacacataaaggaacaactaaaaatctattgaggaacaggtagagaaactaaagccaccaataagtgtaaaatgctcacat

SEQ ID NO: 11224 - DNA, 315 bp, Glycine max
taacctccttcaactgcttattgtatttaatatttgaagagaatccttgtggagccttcacccgacgactaaactgataaataattatccttggcttctcggacaaagtttggcacgctgggggcaagattaatcttattacaatgagaccttggatgccatcgtgatcttatacccgtgagaggttgatcttgacgggtcgggaagccatccttcgccttgccttgaatgttaaggagcgtcccaatcacactgtcaccaacatttgtgtccacatgcataacattaatacactgtctaacgtcaagatctcac

SEQ ID NO: 11225 - DNA, 382 bp, Glycine max
taaagcatggtaagctttagcctattgagtggtatattaaatgaaaaatatccaataatatctttgattatatttttagaataacttagagtatcttatattttgttaagattattctctatatttcctaatatttcatgatttgtttccatattgactattagtataaataaggattagtgctttatgttttagtcatactataacacatcatatcaaataaagtcaacatcaataatctcactgtattcagtttcttaattcctattcctctctctctatacctaaatccatatagttttaacacacgtaatgtatcagttcacactagcataaatttaaaaacaaaatccaaatgatgatcataagtggcgcacatgga

SEQ ID NO: 11226 - DNA, 373 bp, Glycine max
ttgcctcaaaacaaagtgtttccattacatgcattgctctggtaatcgattactaggcagtgtaatcaattactagaagataagtttgaaaaatagctgtttaaaagggttttgaatttgaaaattgaacctataatcgattgccagatgtgtgtaatcgattaccagcaacgatactctttaaattcaaattcaaaagtcatgacccttcaaaatataactgtgtaatcgattaccagaaacctgtaatcgattactagtgaagaaattcagaaaaagctttttgaaaagacacatctcttcaaaccattttgaaaaggcacgaagggcctatatatatgtgtgtgtctgacttcaaaaagcaagagagaga

SEQ ID NO: 11227 - DNA, 327 bp, Glycine max
agcttatcaacatcaaacttgtagaaagagttcttggggtcaagacatgagaagcaatcaagtataatgttacttccttcactaaagcggtgatccatctccacacatattttatcaatagcaacataaaaaatctctgcacggtaatgatgaagattagtgatagtcctcccttctgctcttgaacgaccccgaactggtatttcgtcatccatatttggtaccagaatacttttagcaacacaaaatccttggacatcggcaaaaaaattattccagccactctctctcattgtgcccaaccgagctttgacaacatcaactaat

SEQ ID NO: 11228 - DNA, 385 bp, Glycine max
tattgaaatcaaacaagataataaattatcctcactttataatagaagcatatgttcataaataacaaataagtcataagtcatcaaaacataaatcatttgtctaagtcacttgcatctagaagtcctaattctcttctaatggtgtagaaagaatctttggttagtggttttgtgaagatgtctgcaagttggtttttagtatctacaaatttttaaaacacaatcacctttttcctaagactaagtgctaattgactatcaacacttaccaagataagtttttattaacatagaaggttttatcatatcaaaataattttatttgaaataaaatataataattttgaaaagcataaaaaatattttaaacaatcaatcaagt

SEQ ID NO: 11229 - DNA, 322 bp, Glycine max
agcttctggtgggacattttgtcttgctttccaatctgacattcaccacagattctgccttcttctattttcagattgggaatgcctctaacagcacctttgtcaatgattttcttcatgcctcttaagtgcagatgtccaaatctttgatgccatattctgacttcatcttctttggaggatagacatgtagaggagtagctggtttcttggggtgtccataggtaacaattgtcctttgatctgctgcccttcattagaacttcactcttctcatttgtcaccaagcattctgactttgtgaagtttacattgaatcctt

SEQ ID NO: 11230 - DNA, 305 bp, Glycine max
agctttggcagaacaacttccttttgccattccctcgaggcttggccaaaatggtaaactggctgagcttgacctctcaacaaacaagctcactggattggtgcctaaatctctatgccttgggaggaggctcacgattttgatcctgctcaacaattttctctttggatctttgcctgctgatcttggacaatgctacacactccaaagagttcgttcgggacagaactacttgacaggatcaattccaaatggttatctttacttgcctgagtaggcccttttggaattgcagaacaattacc

SEQ ID NO: 11231 - DNA, 316 bp, Glycine max
agcttgtttcttggcactacatttagtggggatacaggtaaatgtacacctttaaccttttcttgtatgtgatagtagatgggtctaatgtgtcaataacttcttaattcgggcaaaaatctaatcacgcgaaatttagatgctttattattaattcagctagatctaataccttcttgaccctggctctgcaggtcacgtgtcattgacctgcttgtattaggtgccaagaaatctttttaaggtggtgtactgcaaaattgcttgtctacacattaagagcttgtctaggagcgatttaatgacttgctcgggc

SEQ ID NO: 11232 - DNA, 374 bp, Glycine max
  unsure at all n locations
tgaatcattataaataaatgtgagaattcaatcacatgtttgtattacacctatcaaaggatacaatacacatgtcaatcacacaaaaatttagataacacatgttatatggtgcttcataaatatttggtttgattacaaagcataattaaaatgattagatttatcattttatatacctgaaatattaatttttgtaaccaatctgaacttttatgcaatttatacatgtatttcaacctttgaaagctactctacacgtgtaatccgaacctatgatcgaattatcatatttatttaaaatgatttgcagaataaattttatgttgattagttnttttttccaatgcctatatttatcgattggtttaaat

SEQ ID NO: 11233 - DNA, 319 bp, Glycine max
agcttctgacccctttccatattctgataaggcagcaaggtgtctctataatcatcaaaactctcccaagtactgctggaggcaccatcaagaagcacaaggttgccagtgtcattgaacacaccactagaaactctagcagtgaagccaccagtgttccataacttatcaccatttggggcagtgagaaccaacccatcatcagcagaaagctcaacttttgagccctttggtgcaggcttgttgtccctattggcaaaccaaactatggttctgtcttgaatgttggcataccaaatgcaaagtatgaaatgatcag

SEQ ID NO: 11234 - DNA, 378 bp, Glycine max
  unsure at all n locations
tatcattctatctctcaaaaagtatgaaaggaagttcaagagatgcaggtaaagcatacccctagtagacaaatatttctatcttaccttcatgtagacatctgtatctggatcaggtgtaatatttgcttctttttctcttctgaacacctctgctagcaaatctgcagaatgtgaaataattttagttaaaacttgatttttcatatgaattttggctcgatttccaaattgcagctctgtgggctaaccataaggaggcccaactccttggactcatgctgagaaggccagggtttctctgactgtcatttctccaatatgaagatcattntgacttacaaactcattcatcccatgaccattataagtcacctt

SEQ ID NO: 11235 - DNA, 322 bp, Glycine max
agctttgcagaaaaagactccttttgaagcatggcacgactacaaaccaaagctaacaaatctgaagatatttggctgcctttgtttctcttacatacctcaagtaaagagagacaaacttgacaagaaagcagaacctagaatttttgtaggttatagctcaacttcaaaggcctacagaatctacctaccacaaagcaacaaagtaattgtcagaagggatgtcaaatttcatgagtcagatagttgggactggaaaaatgataagaggtctgagtttcaagaggagaatgaagatgtagatgaagaacccatgagagga

SEQ ID NO: 11236 - DNA, 375 bp, Glycine max
  unsure at all n locations
tggtccccaaggctttatgaagactctcccaaaatctataggtgaatctgggatctctatcagaaactatgctagaaagaacaccgggtaatctaactatctcactgacgtacaagctagtcaacctctctaaagaatatctgatgtttattgggatgaagagagcagatttggtcaacctgtctacaataacccaaatggaatctaaacctttgggggtcctaggtaaccccactacgaaatccatggagatgctatcccacttccactcaagtatctctaaaggttgcaacttccctgaaggcttctggtgttctatcttagctttctgacacactangcatgcaaggacaaactcattaacttctttcttca

SEQ ID NO: 11237 - DNA, 321 bp, Glycine max
agctttagttttgtttaagaagttatattcaatgcatagggagacagagataaagaattccattgccaatgcagttcatggtatggaagttggggagtttgctacatttatggcacttggtttgcacttcgtggtcttgcagcggcgagtaaaacttacactaattgtgctgccattcgcaaaaccattaaatttctactttcaacactgaaagaggatggtaggtggggagaaagctatctttcatgcccaaaacaggtttgtcattgaatggtcatggtaaacaggatactatatggtttattaaactgtattaaatat

SEQ ID NO: 11238 - DNA, 381 bp, Glycine max
ttgaatggaggctctggtctcttgttgaaatagcttgttttgcatattcatttgcctcaaaagttcttcaagggaaggttgtggaggggcctcaactgtttgctatttctgaggatgttgctgttgttgctgctggattggtggaggaacgtatagtctgcttgggccagcagcattttgaaaataaggctgttgttgttgctgctgctgttgtgaaggattcgatcatctaaggttgggatgattcctccatctgggattgtacctattgctggagaggtcataattattctgttgtggctgattttgctattgaagttgaggaggtttgttgtagatgtttgcagcataagcttcaggctattcaattgcttcagattg

SEQ ID NO: 11239 - DNA, 376 bp, Glycine max
tatatgatttcaattccatttcatttcaatgtccgtgtaatccttttgatcataaaggaaaatggaaggcatgtttttttttaagatagccctttaattcgtataacgtgagattaatatgattcttcttcatttaatattgcagtcattgccagtgttcatatttgcaaatcaagctggccttgacatgttggaaacaaccctagttgccttacaagatatcacattggataaaatatttgatgaggctggacgcaaggcattgtgtacagactttgccaagttaatggagcaggtaataataacttctagtgatcacaaaattttcaagttacaactacattgtcattttgaaaattgctgaattgttttctgc

SEQ ID NO: 11240 - DNA, 299 bp, Glycine max
cgacactctagaaactccaagctttcaagaaattcgaatggttataacttttcacattaatgtcctattctgggacataactcatctttacgctcgaaattgagcaacgcaagctctcgagaaattcgaatggtcataacatttcgcacaaatgtccaattctgggacataatatatcaagacgctcgaaattgaatatcggaagctctcgggaaattcaaatgggcataacttttcacatggatgtccgatttgggaaaataatatatttatatgctccagattgaacaacgaaagct

SEQ ID NO: 11241 - DNA, 323 bp, Glycine max
agcttgtttcataaccacctgttttatattatccatttacagtctataaaaacttcaggatttttcctgcacattatgttataatggtctcatgtgtcattttagaggggctattctccattcagcatcatggcacacatagagttgctttcttgtttgctccagttgttgcaacatggcttttgtgtattagcagtattggtatatacaacatattccactggaacccaaaagtataccgtgcactttctccaatctacatggcgaagttcatcaaaacaactgggattgaaggatggttgtcattaggaggagtggtgctt

SEQ ID NO: 11242 - DNA, 321 bp, Glycine max
agcttttgatgctctagtttattcctttttttgaatgaatatgttcaaatacactctaattcctttcacaagctgaagcactataagtttggcttaaaacacgaatagccaatttttgcaattatggaacactacatccataacaatcccaccattgatctaggatacaacatataaagaaataaatcaatataatgaatatattatgactcgctaaaataaatcacaaatcagtaatgttatcaaagtatcaaacactaaatttacctggcatgactatgttccgttcacatattgcagctcgtcatgcaaaatatcctt

SEQ ID NO: 11243 - DNA, 324 bp, Glycine max
agctttagcttaactctgcatgtagatctacatgagcaacattctaaaaaataaatacatgtgaaattttaacgtattataacaaatttaatataataataatactaacaatgaatatttattcctttaaaaaaacattgagtattaatttatgatttattaaataaactagcctcttgaatgacctaagacctaatttgtttaactaaataggttttaataaaaccttttatttggtctaatttgagtctgatgtaaaataatgacgattctgtaaaataaaataaaattactatgcacttttatatagacagcacatccgta

SEQ ID NO: 11244 - DNA, 380 bp, Glycine max
tagtgagacaccagattcagcactttacaaaatcttctttttcacctgaaatagaattgaaatttacattaattacaagtggaacattataatgagtaatgatcaatttattaaccaaaagtatttacaatcctacaaaaagaactgcaacttggaggaattctatataattatcaaaagtttctatacaaaagtttgtcgtataaaatgactaacaccaaaccatagctaaaattcactaatcataattagtgaaattttggctccataaattcaagtgaaatttgaatagaaattcaaatttccctccaattttttgtgacacttaggctataaatagaggtcatgtgtgtgcatttttcaactttgataatttgaga

SEQ ID NO: 11245 - DNA, 375 bp, Glycine max
tcctcttattagtgcatagctcctttaagaattctgcatatcttggaatttgctttattgcatccagcagaggtatgtttacctctacttttctgaatgtttccaagatctttttctctgcctcttccatttttttgttggaaactgctcttggagggaatggaagaggagggatgtgttgcttctgcaaatcagaattaccagtggaagattcacctgcacataaattgttaggtaaatttttgtcattacctttttctgggttagagtgaagttgggcaggttcatttgcagatgaggaaggtgctacgggttgaggtccttgacactgctttcccgacctcaatgaaatggcactgacatttttgggatttt

SEQ ID NO: 11246 - DNA, 360 bp, Glycine max
actcaagcttaacttgattgaattggcactctaaaggactttcttcatttatatcgacgaacccgttcttatcgccaaatgttaaatgttaattgtcagtagtgagatgtgaactcacgacctcatctcactcccttataactcttgttcatattgatattgatatcttaattggtaatgcggtcttgtgtgctggaattgcaactggagaaattcatcactcacacagttccattctcagagattaacaaggcttttgattacatgctgtaaggggagtccatcagatgcatccttcgaatgggggagtaaatctatatcacaccaatgatgacatgaccttgtccctgttgggggact

SEQ ID NO: 11247 - DNA, 319 bp, Glycine max
ctgatttcctttgttccggaaacctttcttttcttatgttctcccaaacccaatctccgggttcgaagacaaccttctttctccctttgttggcttgtttagcatagcttttatttttcctctcaatttgatctttgactctctcatgaagcttcttcacatagtccgcctttgcttgaccttctttatgcttaaaaacagaaacattatgcataggcaaaagatcaagaggagttagtgggttaaaaccataaacatcttccaaaggagaacaattagtggcgctttgaacagctctattgtaagcaaattcaacatg

SEQ ID NO: 11248 - DNA, 374 bp, Glycine max
ctgtcaagctcagagcagagattagttgctgttttaagtgcagagaaattcactacaacccaggtgattgggtgttgctcagattgagaccacgacgtcaaacatcggcgaagggttctctgacgagttctgggaaattagccaaacgatattatgggccattccaggttatagaacgggtcggagaagttgcttaccgtctccagctaccggcagaggaaaaaattcattcagtgttccactgttcttgtcttaaaccatttcacaggtcaccggagcaggttgacacatcgcctttaccacagcaattcgtgggagatcaacccatggttactcctttagctatcctggattatagacgctctccggtagac

SEQ ID NO: 11249 - DNA, 319 bp, Glycine max
agcttaaataggaatctttctttggggggacttattattttaaaaaaatgcataagtatataattgttttacttgttatttcagttttcttgtataaacttctaagctatttttaaaattttaagattataaatgttttaaatttattctgtttcttaatgttaatcatgatcaactattacttaaagtgaaagcattttttaaataaatttaatctttgcctacaatcataagctagaagtttaaaaatgttattaaaaaacatcaaatttactccaaagataattagagaagcaatttgttgcaaaaatcatatatt

SEQ ID NO: 11250 - DNA, 305 bp, Glycine max
actcggtatattatgcacctgaatcagacctccgtttgacaagttatgaccatttgaatttctcgatagcttgcgttgttcaatttcgagcgtctctatattttatgcgcttgaatcggaccttcgagtgaaaagttaggaccctttgaatttctcagaagcatccactatacaatctctaccggctcgatttcttatacgcctgaattggacctacgagtgaaaagttgtgaccatgtgaatttctcgagagatacaggtgttaaactactagcgtgatgatattctatgtgctttgctctgac

SEQ ID NO: 11251 - DNA, 397 bp, Glycine max
ggacatctatgaaactcagctttcaggttctatccctccttccctgtgaaactgtttaatgcttcagtccctggatattagcaacaattccctcagtggtaaaatccctcctagtttagcaagatcttctaggatattcaggatcaatttgagcttcaactcactttccggatccattcctagtagtctcactatgtctccttctctaaccattcttgcacttcaacacaacaatctctctggttttatcccagattcttggggtggaactggaaagaagaaagcttcccagcttcaagttttgacccttgatcacaatcttatttctggaaccattcctgtttctctagggaagcttgctttgcttgaaaatgtttctttgagtcataaccagatt

SEQ ID NO: 11252 - DNA, 315 bp, Glycine max
agcttgtcaaaatgaccttattttattcctccattaactgtacaaactccaataaaccttgtgacacttgtcattttgccaaacaaaagaggctaccttttcctgatagcattattgtttcttctcagaggtttgatttgctgcacatggatatctggggcccttatgcttatccttcattacttgggcacaaatattttcttactattgctgatgataaaagtagatatacatggatcatttttctaaaactaaaatcaaaagttgcaaatcatatcaaacaatttgtatctatgattgaaactcatttttctg

SEQ ID NO: 11253 - DNA, 377 bp, Glycine max
  unsure at all n locations
tcttatccaaggtaattcttggtggtgaagctccttcttccttgtcttattccatagtggatggtgcctcccctctcctcttctcctttgccttccgctgcatctccagggtgtaaaatcaccattaaaggacctcattgaagctcaaagatccagcctccatagaagctctacaagcaagcttccatcacaatatatataaattatcatccgggaaatcatcccgaatgggtaagtcctcatcagacacatgttcgatccgactcaaatgatcagcaactaaattttatgctctgctcctatcacggatctccaagtcaaattcttggagccaaagcatccatcagatcaacctaggctntgaatcagccttctgc

SEQ ID NO: 11254 - DNA, 300 bp, Glycine max
  unsure at all n locations
tctaaactntgtacaagaatgaagctctgatacctcttgttgaacaagtggcctcagatatctcaagaatgggaggttgaattaagatatcacacactattccgccattggaaattctactttgattgtaacccacgtcccacgattccttttaaaatgaattcttatataataattcaaattaaacttattgaatagaaacagtaagcaacatgacataatagagtttaagggaagagaaattgcttacacagtttttatactatgacggcaaagtccgatgcctacggccaatcccca

SEQ ID NO: 11255 - DNA, 297 bp, Glycine max
agcttgcttccttgctttctttttttggttccttgcttcctttgcatctttggttatctgctgcttgcaacttcttggtaagtttattttaattgataataaatccgatgcatgtttaagttataaattctaagtgttatgagttaaatatgtttaggttaactgtgttttatatgttaatgttatatatgtataagtgctatttataaattttaagttgccatttgaaatattgatattatttatattgtatgtatatgttataattttagatagtgggtacagatttgtattata

SEQ ID NO: 11256 - DNA, 318 bp, Glycine max
agcttgaaggtttactatatgtattggttaacctggtaacctaactggccatgaataaaaaatctgcacctgtcgccagacttcgtggtttatgctcctctgtcgaccaccacacagacctttgcccttctatgcaacaatctaaagcaattgaacagcctgaagcttatcctgcaaacatctacaatagacctcctcaacctcagcagcaaaatcagccacaacagaacaattatgacctttctagcaacaggtacaatcccaggtggaggaatcatcccaaccttagatggttgagtcttccacaatagcagcaac

SEQ ID NO: 11257 - DNA, 256 bp, Glycine max
gttgtcatttgtgttcctttatgaatggcacaatattagtggttgtgcagatgtttctcaacgtggaagggaaaatggaaactttgactctagtgctagagtttatcataaagtcactcccaagaaattaggggctttgggttccaatgaaggagctgcttaccatctgggattgcatcacaaacagctatatgtgtactgtctggtacaagtgttctaaatgctagaccacgtagtgctacttcgtctggactac

SEQ ID NO: 11258 - DNA, 443 bp, Glycine max
  unsure at all n locations
tcatgatgaatcaagaatgattcaaagatgtnttgattctattatatatgatgacaaaggtgatgacaaaaagctcaaaggtcaatcaaagaatgagttcaagatgttcaagaaagaatcaagaacacttcaagattcaagaggaaagttgatttcaagaatcaagactcaagattcaagaatcaagagaagacttaatcaagataagtatgaaaaggttttttcaaaaactgagtagcacatggatttttctaaaaaaatgtttaccaaagagtttttactctctagtaatcgattaccagattattgtaatcgattactagtagcaaaatggatttgaaaaagttttcaactgaatttacaacgttccaattgatttcaaaaagctgtaatcgattacaatgttttggtaatcgattaccagtgcctttgaacgttgaaat

SEQ ID NO: 11259 - DNA, 313 bp, Glycine max
gctggtgaagaagaatgtggcatttacctgcggtgaaaaacaagagcaagcctttgctttgctcaaagaaaagcttactaaggcacctgttctagctcttcctgactttttctaaaactttgagctagaatgtgatgcctctggagtgcgagttggagctgtattgttacaaggtgggcaccctattgcttattttagtgaaaaacttcatagtgccaccctcaactaccccacctatgataaagagctttatgccttaataagagccctccaaacttgggaacattacctctgttccaaggaatttgtcatt

SEQ ID NO: 11260 - DNA, 461 bp, Glycine max
  unsure at all n locations
tctggtgggacatcttgacttgctttccaatttgacatcncttcacagattctgccttcttctattttcagattgggaatgcctctaacagcacctttgtcaatgattttcttcatgcctcttaagtgcagatgtccaaacctttgatgccatattctgacttcatcctctttggaggatagacatgtggaggagtaactggtttcttgaggtgtccataggtaacagttgtcctttgatctgctgcccttcaatagaacttcactcttctcatttgtcaccaagcattctgactttgtgaagtttacattgaatccttcatcacacagctgactgatgctgatcaagttggcagtcagtcccttcaccagcagtactttgtccagactaggaagtccatcatggactagctttcccattccagtgatctttcctttagagccatacttcaatgtcacata

SEQ ID NO: 11261 - DNA, 390 bp, Glycine max
  unsure at all n locations
tgcagactaagtgctcactaacacntagaaataatccttctttttgtaccacgnaaacctcttcttctagatcaccattcaggaacgtcgatttcacatctatttgatgcaactcaagatcaaaatgagctactaatgccaaaattactcgaagagagtctttcttagatacaggggaaaaggtctctctgtaatcgactccttctctctgagtgaatcctttagcaacaaatcttgccttatgtctctcaatgatgccttctgagtctntctttgctttgaagacccatctacatccgatggctgttacaccatgaggaaactcaacgagatcccaaacttggttagatgccatggaatccattctattcctcataggcatataccaca

SEQ ID NO: 11262 - DNA, 379 bp, Glycine max
attctaattattccagtatagataattgtactcatctgttatttccaaaatgtattatggcttttgcagacaggaatagagccagcatttgtcttattttttgattgccctgacgaagacatggagacgcgacttcttagtatgaaccagtgtggatgcgtttctctttttaataatctgtatttacttgtgctactcatcacttgagacttttttgtccatcataattaagggttctgaggatgacgctcttgctacagattggaagcggtttaaggttttctcggagactagtcttcccgtgatcaattattatgatgccatgggaaaagttctctagcgtactgatgcatgtgattctaccatgttgatcacatat

SEQ ID NO: 11263 - DNA, 376 bp, Glycine max
  unsure at all n locations
ctgacattcaccacagattctgccttcttctattntcagattgggaatgcctctaacagcacctttgtcaatgattntcttcatgcctcttaagtgcagatgtccaaatctttgatgccatattttgacttcatcttctttggaggatagacatgtggaggagtaactggtttcttgaggtgtccataggtaacagttgtcctttgatctgctgcccttcattagaacttcactcttctcatttgtcaccaagcattctgactntgtgaagtttacattgaatccttcatcacacaactgactgatgctgatcaagtttgcagtcagtcccttcaccagcagtactttgttcagactangaangtcatcatggact

SEQ ID NO: 11264 - DNA, 251 bp, Glycine max
ctatgctgcaaacatctacaacagacctccttattctttgcttgcaaatcagccacaatagaataattatgaccctttcagccacaggtacaatcccgaatggaggaatcattccaaccttagatggttgaatctttcacaacagcagtagcaacaacaacaaccttattttcaaaatgctgctggcccaagcagaccatactttccttcaccaatccagcagcaacaacaacaacagccccagaaacagc

SEQ ID NO: 11265 - DNA, 416 bp, Glycine max
tcaagaaaatgatggcctcagcaaattccttttttttgtgcataaccatagaaaaacctagagatagatggtctgaagaggatagaaaacgagtacaatacaacttaaaagacaaaaacataataacatctgccctaggaatggatgaatatttcagggtttcaaattgtaagagtgctaaggaaatgtgggacactcttcgattaacacatgaaggaactacagatgttaaagatctaggataaatgcactaactcatgagtatgaattatttagaatgaatgcaaatgaaaatattcagagtatgcaaaagagatttacacatatagtaaatcatctagcagccttatgcaaagaatttcaaaatgaggatcttataaacaaggtgttaagatgtttaagtagagaatggcaac

SEQ ID NO: 11266 - DNA, 449 bp, Glycine max
ctcttgagaaaacttccttgagaagcttctttgagtttactttcttgagaagctagagcttagctacacacacccctctcataactaagctcacctccttgagaagcttccttaagaagattcctaaagatgcttgagcttagctacacatacctctctaatagctaagctcacctccttgagatgagaagctagagcttagctacacaccccctataatagctaagctcacccctatgacaaaaaacatgaaaatacaaaaaaaaaaagtccttactacaaagactactcaaaatgccccgaaatacaaggctaaaaccctatactactagaatggccaaaatacaaggcccagacaaaggaaataactattctaatatttacaaagataagcgggctcatacttagtccatgggctagaaatctaccctaaggctcatgagaaccct

SEQ ID NO: 11267 - DNA, 450 bp, Glycine max
  unsure at all n locations
tgtatggtagaaggtgtaggacacctctatgttggttagatcccagagaaaaaacctcatcttaggacctgaagtggtacagcaactgccgagaaggtgaagttgatccaagaaaggatgaggactgctcagagtagacagaanagttatcaggataaaaggaggaaagacttggaattcgaggttgatgatcatgtattcttgagagtcactccgtggactggggttggtcgagcattgaaatcccgaaaactcacacctcgttatatcggtcctttccaaattcttaaaagagtcggtcctgtggcataccaaattgcattacccccatcactttctaatcttcacaatgtctttcatgtgtctcaactccgtaagtatatccatgatccatctcatgntgatcaaatggatgacgtacaagtaaaagagaacttaacatatgaaaca

SEQ ID NO: 11268 - DNA, 454 bp, Glycine max
actaagctttacctgcttacaaaatcagagcctatcagtcttttaaacatggtaccagctggagagttaatcgaaaaattaatgatgcatctttgtttctgatcagtccatgcatcggacataatagtacaaccatacttgacccattgctccctatggcctttcatcaaattttcagtatattcaacttccttcttcaagagtggaactctgatgtcatgatagctaggaatgggcaaatgtggcccatattgaccaatggctgcaaccatgttctcaaagcttttcaatttaatgaggttgaatgaaaaacctgcttggtaccaaaagcgagcaatatgtagatgcaccttcaatacttcattcttatccattgactctcttatgttcatttgcctcagcatctccatttttctccgattgattgcattatctggattcttacaaaatttgt

SEQ ID NO: 11269 - DNA, 323 bp, Glycine max
  unsure at all n locations
cattcttcatctagctngaagacggcttctttattcagcaagttgctcaatggtctagcgattntgaagaagtccttgatgaacctccgatagaagcctgtgtgtccgaggaaactcctgatacccttagcatttactagtggtggtaacttctcaatgacgtctatttcggttttgtccacctcaatcccttggttgaaaccttatggcctaatattatcccttcctggaccatgaattgacacttcttccagttcaacaccaattttgctttaacacatcttcgcaacatgagctttagattggtcgagcatcagtcaaag

SEQ ID NO: 11270 - DNA, 447 bp, Glycine max
  unsure at all n locations
tatatatactctngagctttngaactttgtttcgttagcttggcgcanaaagntaaaaaattcaggagatcctttattctggaatttggacatgacacatggagcgtagttaatactgtttttagtaagctaaataaattatatgataaaatgtgattttcctctcttgaaatattttggaatgttactgtaaatttttttttggaatgttgattttaatccctttaaaaaattaatacatttttaattacctataaacatgtatttcactatccgtgacgaagaactaaaatctattacttttgataaatgcaaagactaaaaatatgttaaatttttataaaaactaaatctaatatcacaaaacaatttgagaggcaatacttatttaattttatcctanaatatattatgaatagttgactaactttactactctactcttta

SEQ ID NO: 11271 - DNA, 402 bp, Glycine max
tctgcttgaagacttttgtcaccatgtctggtctctcatcagatcgtaaatacaagatcttgacatttctttcaatttcaggccaatttggattacatgtaaatgtcaagaacaaatcaggaaatccaagctgtccacaaatagtcattacatcaaagtagagctgctccatatatctacgtgatccaacaaaagattatggcaatataataatctttcctctctgattgccttgagtttgagcatgatctatagattgactcaaattcatatgtttgtcaacccttaaatcttgttgatgatctctcacaatagttagtctttgggattcaatcatggtgtagccatctactacaaattggtggagcaatctccctgatcttagaataggttgagcctcat

SEQ ID NO: 11272 - DNA, 421 bp, Glycine max
  unsure at all n locations
ntcataaaacgtcgatgccaaggggatantgttttctcccttgtntcagnnatacgtagctggtctcttcttcacagataaggcatgcacgatggcccttaacattgtatccactcaaattcccatatgctagaaagtcattaatggtaaaaaaatagcaatgcacacaacttgaatgtctcattttgatacccatcaaacatagcaaccccctcaccccacaactttgttaagtcttcaatcaagggactcagataagcatcaatgtcatttcttggttgtcttgggcctaataccatcacaaacaacatcatgtattttcacttcatgcacaaccaaggaggcaagttgttaattactagtaatataggccacatactgtgctgagtgcttaaactgccatagggattcattccataag

SEQ ID NO: 11273 - DNA, 418 bp, Glycine max
  unsure at all n locations
tgcagctgattgccaatgtgcttttcatttgttccagcgccccagtattggctcgcagatacaaataagtcgccttaaagtacaattgaatttgattgtgaattcaatgtattcatttgaaattcacttagttttaccgacttctttaagcatctctactggatgatatttcattgttgcattcatataaatcaaatttatcattnttctgaatgttggtttttgaaatatttacagttgaaaatcctatntaccttagccatctgtcatgttttcttattgcagagacacttgttcattctacactggaaccctgtgatgatgcggatttcacttttactgtctttttcaatttgaaagagtacacagtatatgtaaaacagaggccttatctccacgcattcttggagagagtatc

SEQ ID NO: 11274 - DNA, 447 bp, Glycine max
  unsure at all n locations
tctctaatgagtttgaagacaacataattgttaagtatctggtgtgaaacttgntagatcaaggccagtgtctaacgctgatgaaagacaaattggcactactagaaagaatggttttaacatcactatgtaaacatcggttttatcaaaaattgatgttaacaaaaaccgatgttaatgtaatcatcttaacattcaaggcaagaaaaaggatggtttgaatactcatcaagatctaactgagatgggtatatgtgaacagttacatccaatgtttgatggtaacaaaatatacttgcctccagcttgtcatactttgtcaagaaaggagaagacaagtttttgtcagtgtatgctttgtgtcaaagtgtcacagggatactcttaaaatattaagaaccatgtgcaactgaaagatctgaaatagttggctaaagtctcatgatg

SEQ ID NO: 11275 - DNA, 351 bp, Glycine max
ttatttggtcatcattcacatcaaccaaaatactagttgtgttcatgaagggtcttcccaaaataagtggcacttcagagtactcttccatgtccatcactacaaagtcgacaggaaaaatgaatttatccaccttgacaagtacatcttcaagaacaccatatggatacttaatggaacagtccactaattagagggttatctgtataggcttaagttcaagatcaccaatttttgctgataaagagataggcataagattgaggctagctccaaggtcaagtaaagctctccccaccttgagttttccaataattattggaatagtgaagctactagtatcttggagtt

SEQ ID NO: 11276 - DNA, 351 bp, Glycine max
ttaaacttgcctcttagtaatgccttagtcatcatatcagcatcattatcattagtatgaatttcggctgactctaacagcttagcatccaaagcatctcgtatccaatgatacctcacatcaatatgcttagaccttgaatgaaaggttgagttcttaccaagatgaataacactccgactatccacaaatagtagatatttatcctaaacaaaaccaagctcctggaagaatttcttcacccatagcaactccttgcatgcttcagtaatggcaatgaattctgcctctgtagtagacaaagctacacacttctacagcttggactgccaagtcacaactccccctgca

SEQ ID NO: 11277 - DNA, 325 bp, Glycine max
tttatccgtggcgttctatggtggtgagctttttcttgactcatcttctccttaaaggggcaaatccaatcatcggacttccttttccattgcgctggcattgatcttcaagaaccaaaggactccattgatgaagaagatccagggcctacaaactccacatggagttacatcaatgtctataggggagatgacatcacaagggtacaaatatgttgcttcacagtggggacgcaaagtgtataaatggaaacacttggtgttgcatggacagataaataaaggctaccttagctattcggatggtcaagtttcgaagaggaac

SEQ ID NO: 11278 - DNA, 339 bp, Glycine max
tctagatgagttatgtctgcgaatcggacattctgtgaaaagttatgaccatttgaatttctcgagtgcttccgttgtttaatttcaagcgtctcgatattttatgtcctcaaatcagacatcggagcgaaatgttatgaccattcgaatttgtcgagagcttccgtttttcaatttcgagcgtctagatgagttatgtcaccgaatcacacatctgagtgaaatgttatgaccattcgaatgtgtcgagagcttccgatgttcaatttcaagcgtctatgatgagttatgtcaccgaatcggacatccgtgtgaaaagttatgacgattcggctttgt

SEQ ID NO: 11279 - DNA, 350 bp, Glycine max
tcaagaattatggcctcatcaaactacttgtttcccgagggaaattttataaatagacctcccatctttaatggagtgggttaccactactgaaaaacccgcatgcaaatctttatagaggcaatagatttaaatatttgggaagccatagaacaaggaccttatgttccctctataatagtcggaagtgaaacaatagaaaaacctagagcagattggactgaggaagaaagaagattactacaatataatttaaaggccaaaaatattattacatctgccttaggaatagatgaatactttagggtttcaaattgtaaaagtgctaaggatatgtgggatacactaca

SEQ ID NO: 11280 - DNA, 334 bp, Glycine max
ttgatgcaacatttttagaggttaatgaaatttcgagatgatgcgctccatgagaggttggatcaaatggagaatagagatcataatgaagaagaaaggaggagaagagagaatgatggtgttcctagacaaaaccgaattgatggtattaaactcaacattcctccatttaaaggaaagaatgatccggaggcctacttggagtgggagatgaaaatagagcatgttttctcatgcaacaactatgaggaggaccaaaaggtgaagcttgccgccacggagttttccgactatgctcttgtgtggtggaacaagctactaaaggagagagcaa

SEQ ID NO: 11281 - DNA, 341 bp, Glycine max
tgcttctacaaggacaatagcatcatttcttgcactgaattgttgggagttggaagccatcttctcaatcaaattcctagcctcagcaggagtcatatcaccaagggctccaccactggtagcatcaatcatactcctctccatgttgctaagtccctcatagaaatattgaagaaggagttgctcagaaatctagtggtgagggcagcttgcacacaatttcttgaatctttcccaatactcatacaagttctctccactaagttgcctgatgcctgaaatgtcttttttgatggcagtggtcctagatgcagggaataatttgtccaagaacaccctct

SEQ ID NO: 11282 - DNA, 330 bp, Glycine max
tatgcagatgtaattttgacaatggaaggaataaaaattgtatattgtatacaaaataaataaataaacaaaataatgcatatgaattatgaaagaccatgggcaaagagcattttatatgcaccttgatgccaagtggattagcaactcctctcaagaattcaacatgagcaccatcaagttggcgggtacgttccccaacccatagcatgtgagctgagcaatcataatgaagcccagtagtagaatcctccctagtaagtgcttgctcataagggagaagcaaacactcatgggaggtccaaaagtctgttgtactcatgatgggat

SEQ ID NO: 11283 - DNA, 353 bp, Glycine max
tgagaagttgttgtgcttgaaatagttgggatgaagatctctagcaaattctgggggcctcctcacaacaaatgtagtttcatcatcaccccaagacacaatgtggtcagtgcgagggtcatcaacaagttggtatgtctttgtcagaaagggagcaggcactgacttgtgagattccatagtgaacaccatgctatcttcacacctgtctagtgtgaaagccatcactgaattaccaaatagtgctagctgcttccaatattattctttgatggtactctccttttcattcactttttgcacaccaccaagttttaaagaacctctctcactctctatcatattataatttg

SEQ ID NO: 11284 - DNA, 338 bp, Glycine max
tcgtaaatgcggctattatgttgacacctgtagcaatgaaatcaggcttcaatacctctggtgttattgggtttgggccccgagagctaaatgctgcaacaactggcgacggctcaattccaacctttgttccctcaaacataagcctagatgttggttttcgagcatcttgtaagtacaacttgatgagtttcccagccttgaaacccactgcagttgttggtaaaagatgggcatctgccaccaattcctctccgtcggattccgaatttgctaacaccatgcccacaccgccggcagatttcaccacaagtcctttctctaccctagaactattt

SEQ ID NO: 11285 - DNA, 350 bp, Glycine max
cctatgaatactcagcttcactcgaccctttcgggtgctggatctacttcatatggatttgatggggcctatgcaggttgaaagtcttggaggaaagaggtatgcctatgttgttgtggatgatttctccagatttacctgggtaaattttatcagagagaaatcagaaacatttgaagtattcaaagagttgagtctaagacttcaaagagagaaagactgtgtcatcaagagaatcacgagtgaccatggcagataatttgaaaacagcaggctcactgaattctgcacatctgaaggcatcactcatgagttctctgcagccattacaccacaacacaatgggatag

SEQ ID NO: 11286 - DNA, 335 bp, Glycine max
tcgcacttgataatggagacacatgaacagtgctaggcaacgacattcatggcgctccgaacaaaggtggagtatggaggattgccttgagggtccgcacttaggcaatcatgaaactaagctccaaactcgaaagtggaggacacatgaacaaccctaagcaataatattcatgtggctccgaaaaaggatgagaatggaggattgccttgagggtcctctcttaggcaatcatggaacacagctccaaactcgaaaacggaggacacatgaatgaaaccgcaattcattcacgtggctccggaacaggatgagaatggaggattgccttgagg

SEQ ID NO: 11287 - DNA, 338 bp, Glycine max
tccattgttcaatttcgagtgtctcgatatattatgcgcctgaatcggacctccgaatgaaaagttatgaccatttgaatttctcgagagctacctttgttcaatttcgtgcgtctcgatatattatgcgcctgaatcggacctccgagtgaaaagatatgaccattggaatttctcgagagcttccgttgttcaattttgagagtctcgatatattatgcgcatgaatctgacctccgagttaaaagttatgaccatttgaatttcttgagagcttccgttgttcaattttgagcgtctcgatatattatgcgcctgaatcggacctccgagtgaaa

SEQ ID NO: 11288 - DNA, 340 bp, Glycine max
ttataagagataactatccataatagaaggtctgtatggaaacgtacatctagtccactcaatataggctctagctaatcatcatgaatggagatatatgttagacaagtggccttagatatcttaagaaggggggagagattgaattaagatattccaaactacttccccaaataaaaatctatttcactttttattcaagttataaattcccttaacaatgaacttcttaaatattgattcaaataaaacaatttgaatatgaatgtaaagcaataataaataaaggagtttaagggaagagaaagtgcaaactcagatttatactggttcggccaca

SEQ ID NO: 11289 - DNA, 339 bp, Glycine max
ttcaatgttcttaatcaaaagctaactaatgtcccccattcttgcgttgccaaactttcaaaaatcttttgaaattgagtgtgatgcttcaaatgttgggattggggctgcgttgatgcaagaaggccatccaattgcttattttagtgaaaagttaagtggtcctacccttaactattcaacttatgataaggagttgtatgccttagtacgggctttgaaaacatggcaacactacctttatcccaaggaatttgtcattcatagtgaccatgagtccctcaaatatatcaaggggcaaggcaagcttaacaaaaggcatgcgaagtgggtggaatt

SEQ ID NO: 11290 - DNA, 336 bp, Glycine max
tctacattcaatttcaagcttttcgatatattacgggactcaatcggacatccgagtaaaaagttattgtagtttgaatttgctcagggcttcggtattccatttcgagcgtctcgatatattacgggactcaatcggacatcagagtaaaaagttattgttgtttgaatttgctcagagcttcggtattccatttcgagcatctcgatatattacgggactcaatcagacatccgagtaaaaagttattgtcgtttgaatttgctcagagcttcggtattccatttcgagcgtctcgatatattaccagactcaatcagacatccgagtaaaaag

SEQ ID NO: 11291 - DNA, 330 bp, Glycine max
tatacgacctaagatgtggttttgtgagtatattcaatttagacacaagtcttgcacttgccacattggtacaactccttccatcaatgatcaccatgcaaactttgccattgatcaaacatctagtgtggaaaatgttttctctttgactttcctccattgacttcaattgatggccaagtaaccgcctaatcatcaacaattctccctccggtgttttctccacttcctcctcactctcttctcccttttcaacttcggactcactaatttactctccatctctaagaatcatggctttcttgttagggcactcatatgcataatgtc

SEQ ID NO: 11292 - DNA, 347 bp, Glycine max
tcaacctagaggagacggaccattccaagtgttggagaagatcaacgacaatgcctacaagattgacttgcctagtgagtataatgtaagtgccactttcaatgtgtctggtctatctctttttgatgcagatggaggagccttggatttgaggacaaatccttttcaagaaggagggagtgatgaggacatttgataaaatttggtgagagtttctctctgggttccttgttgaaccaattatcagacttatcaaggtaatccttgtggcgtctacccagacttatcttccttcattggaagtggcgtctacccggacttatcttccttcaccggaagtggcgtct

SEQ ID NO: 11293 - DNA, 352 bp, Glycine max
ttagaacagttattgagaggtggtccacacatttgagagtttccaacaaaagaagtgtatggataattgttgatggaatttggaattgagccattcaagttgttatagctcaaattcaaatacttgagacttgtaaggtttttaaagtcagggatagctccagagattgaattgttttggagatacaaccaggtgagtctactaagattctgaaaggtagttggaatactgccagagaagttgttagaggaaatatccaatgctatgagttttggtgagatagaggaagggattaggcctgagaagttattctgctgcaggtttacatattggagtgaaggaatggagagaa

SEQ ID NO: 11294 - DNA, 335 bp, Glycine max
taatggccatggtgattgagaaggagacattcattatgggaatgcaaatcatgcttccattttgctttttagacatgactcttgcttcaataacatggtttgctagtcttgtaaccaccaacctagtaccattgcataacccttgtgattgatacatgttccttaaaagcattattggggtacccacctttagttttatcttatgattaggaagaccaaatgttctcaaactattgagaaattcacttgtgaccacttcaagtgcatttcattcaaccatttttgacttgtcaattgaataagaacttagatattccctttgatcacctgaaaac

SEQ ID NO: 11295 - DNA, 348 bp, Glycine max
ttgaagggatgtatttgctggctataagaccactatccaatttctccttaatgaaatgttgatcaatctgtatgtgctttgttcgatcgtgttgaactagattgtgtgcaatgctaatggcagacttattatcacaaaccagtcccataagagcttcatattttattttgaggtcatcgagtatgaccttcatccataacaactcacaaacaccttgagccatagctatgaattctacttttgcacttgatcttgcaaccacattttgcttcttactcatccacgttactaaatttccacccaagaacatgcaatatcttgtggtagatctcctattaacaattgatc

SEQ ID NO: 11296 - DNA, 347 bp, Glycine max
tcaccaccaacagagtgccttggataagaatctgagagcagaagcttcaatagaggaagagaatgagggagagggagaaagagagagagtggcgtggaaattgaaggagaatatgaagtgatgcaatcctatcccccaagaagattggaccaaagatgcaagagaaggccctatgattctcataagccttagggtagattttgggcccatgggctaagcataagcccacttatctttgtacatattaaattaagatttcattatttttgggccttgtatttagggctccataatgtaggtcgggtaccctagaaatgtaggatttttcagcctttgtattttatggc

SEQ ID NO: 11297 - DNA, 435 bp, Glycine max
agctagttataagtcgtgatgttaatttcatgaaagaccaaatcattgaaggcattgataaggtggagaaatctacacccaaggaagacaatggtgtggctgattttgaaccaactcatcagcctattcagaatctgaatattgatgttcaaaatgatgttggtgtccaacaacctaaagatgaagtatatgttcctgttgatgatgaagaagaggagcatgacatgtcacaagatgaaaatcttggtgatgctactgaaccacctcaagttcaactcaggaggtccaacaaggagagacaaccttctatgaagtattcttttaatgagtatgtgatcctaatagatgaaggagaacctgattactttagagaggccatggaaagtgaagaatagaaaaagtagctagatgtaatcaagtttgaagcttgttggg

SEQ ID NO: 11298 - DNA, 540 bp, Glycine max
agcttcttatccaaggctcatcttggtggtaaagctccttcttccatggcttattccctagtggacggcgcctcctctcacctcttctcctttgtcttccgctgcatctccatggtgtaaaatcaccattaaaggacctcattgaagctcaaagatccagcctccatagaagccccacaagcaagcttccataaaaaagcaagagaaaagagtaaagaaatagcttcagatgagggaaaagaagtgtcataccctttggtaccttccaagaaagataaggaacgccacctggcgagattcctagatattttcaggaaactggaaataactatgccatttggagaagctttgcaacaaatggcactctactcaaagtttttaaaagacatgttgacaaggaagcacaagtacattcaccaagaaaatataattgtggagggtaattgcagtgctgtgattcaaaaaattcttccaccaaagcacaaagaccctgtgagtgtgaccattccttgctcaataggtgaaatcacagtgggaaag

SEQ ID NO: 11299 - DNA, 304 bp, Glycine max
actaaattcaatttatacacaagtcttgcactttccatattggtacaactctctccatcaatgatcaccatgaaaactttgccattgatcaaacatctagtgtggaaatttttttctcattgactttcctccatagacttcaatagatggccaagtaaccgccaaatcatcaacaattctccctccagtgttttcttcacttcctcctcataatcctcactctcttctccctttttaacttcagactcactaatgtactctccatctctaagaattatggctttcttgttagggcactcatatg

SEQ ID NO: 11300 - DNA, 446 bp, Glycine max
agcttcattggagcttgtatgcctatgatcttcttcatcaatggattcctttgcttcttggaagatgaatggcaacggaatggagagggaagggagagaggagacgccacttcaaggagaagatgagtttagaaaaagctcagcaccataggaggctatggataagagctttgaggaagaaggaggtgaatgaagggagaggaagagaagagcacaaaattttgtgctctaaaagagctttgaaatctgaagtttaattttcaaatgatcaaagttcaaaaaatgcacacacatggcctctatttatagcctaagtgtcacacaaaattggagggaaatttgaatttctatttcaaatttcacttgaaattgaaattgaatttgtggagccaaattttggagccaaaatttcactaattatgattagtgaattttaactattgttc

SEQ ID NO: 11301 - DNA, 415 bp, Glycine max
aaatttttccaaagatgcagggcataaaatctatgaggtgcaccaggcatgacttcttgcaaagctggaataagtccctgaaaaaataaagtagtccataacttatgtcattaactgcaattaaatccctaacttatgataataattgcaaatcatttcatgtcataccttttgcatgtctgacatgaaattccacccattctgtacataatccccaagatctttatgcaacaaagttaaaaaacatttccaattttctttgttctccacgtctaccacaacataagcaataacaacgatgtggttattagcatcaaccccaacagtaaagagcaagtttcctccaaatgcactttttaggaaacatccatctagacctatgaatggtctacatccagcaacaaaccccttttta

SEQ ID NO: 11302 - DNA, 462 bp, Glycine max
  unsure at all n locations
ctcagcttgtggccttggatcttcttcatcaacggagtcctttgcttcttgaagttcaatggaagcggaatggagaaggaagaaagatgattggagatgccacttcaaggagaagatgagtcaagaacaagctcaccaccataagaagccatggataagagcttgaaggtaggagaagatgagtggagggagaaggagagaaggagcacgaaatttagttcctcaaatgaggtatgaactttgaagtgtaattctcaaatgatcaaagttcaaaaaatacacacatatggcctttatttatagcctaagtgtcacacaaaattgtagggaaatttgaatttctattcaaatttcacttgaatttgaaattgaatttgtggagccaaaatttcactaattatgattagtgaattntagttatggttcagcccactaatccaagatcaagtccaagattctcca

SEQ ID NO: 11303 - DNA, 348 bp, Glycine max
atgcatgggatatcctgaagaccactcatgaatgaacctccatagtgaagatgttcatattgcgactattggccacggattttgaagatacgattatgaaggaggaagaatgtattcatgacttgcacatgaacattgttgaaattgacaatgcttgcactggctagtgagagaggatgacagatgactagctggtgacacatatccttagatacttgcctattagatttggcgtgagagtcactgcgatagatgaggcccaagacatttctacttgagagtggatgaactaattgtttccctactaacctttgagctaagaccctcggatggggctgaacacaagag

SEQ ID NO: 11304 - DNA, 217 bp, Glycine max
tttaatgaaccccttcgcttcccgaacatcaatggcaaccggaatggacaagggggaaaggcgattctagatgccacttcaaggagaagatgaatccagaacatgctcaccactataggagaccatggatcctagcttcaaggtcttgaaagatgaatagactgagagggagagaggggcgcaccttacttgagacttgacatacttaccaactttt

SEQ ID NO: 11305 - DNA, 335 bp, Glycine max
gtttggcggttgttctggagtggcagtgagtgttataattggaattggaagggttcgggcgagttcgagttcttcttcttctgaggaggaggaggaggcagtgagtgtgcagtcaaaagtgactcagaaagtatacttcgacgtgagtattggaaatccagttgggaagtttgtgggacggattgtgattggactgtacggcgacgatgtcccccaaacggctgagaacttccgtgccctttgtactggcgagaagggctttggatataagggttctaccgtccatcgtgtcatcaaggatttcatgattcaaggaggagactttgacaaaggaa

SEQ ID NO: 11306 - DNA, 393 bp, Glycine max
  unsure at all n locations
acaacagtgtagactgcttcagcccagaatgtgttaggtagtcccttctccttgagtattgatctagccatttccataactgtgcgattctttctctcggacactccattttgttgagtagaatatgcgaatgtaagttgtcactcaatgccttcatcctcacaaaatctttcaaactcacgagaggtgtactctttgccgngatcacttcttagtacttttatccgttttccactttgattttcaataagggccttgaactttttgaatactccaaagacttctgatttttcttttagaaaatatacccatgtcattctagagaagtcatcaatgaagagtatgaagtacctgttgttctcatgtgatggcatactcattggtctacatgct

SEQ ID NO: 11307 - DNA, 466 bp, Glycine max
agcttgaaggtaaactagatgccttgtgatgtaagctccattggagcttgtaggcctaagatcttcttcatcaatggatttctttgcttcttggaagataaatggcagtggaatggagaaggaagagagagaggagacgctacttcaaggagaagatgagtctagaagaagctcaccaccataggaggccatggataagagcttggaggaagaaggagatgaatgaagggagagggagagaagagcacgaaattttgtgctctaaaagagctctgaaatctgaagttaatacttaaatgatcaaagttccaaaaaaattcacacacatgacctctatttatagcctaagtgtcacacaaaattagagggaaattcaaatttcacttgaatttgaaattgaatttgtggagccaaaatttcactaattatgattagtgaattttaattatggttcagccccactaat

SEQ ID NO: 11308 - DNA, 556 bp, Glycine max
  unsure at all n locations
tgcttccattttcagtcatcaaagtcacctcccctatgccaacaatcttgcttgtaacatggttgcccatcttcatcataccaaaatcccctttttgacatgacgagaaaaatccttcatgaggagtaacacggaaggatgcttcagagtcgattatccatatacaatcattaaatacaatatttaaataattttcattactgataagaaaaacattctcatcgtctgatgccacagcagtagtggttccaccttcattctttttctttgggtcaatttgattagcatggacagttccagccttctgatctctcttcaagaatctgcagttaaacttcttatggcccaactttgcagtagtagcaactcaagcctttgggacgagacttggatcttcctcgtgatttcccatggccttctttaccatggtgctcgctcctccctttattttcaacaacatttgcttcggagtgactactcaagcctctcttatttcgtctggactcttcatttagaaaactatntgtgacatttatccatgtaacctttccatctg

SEQ ID NO: 11309 - DNA, 468 bp, Glycine max
tggcgggagtgactgacaccctatagaattggcaaaggcccgtgatcaaatctggaaaccccaatgcctgttggagttctctcggtccactgggtgtctatgaggcgtgatccctgcaaactgatatatagcatctgagatcaattgagccacatgggtactcacctaggtcaggatggcgtagaccagctgacaattcggcagggggaggttggaattatggttgctagggagaatgttgctaagcagcaacatcatccaaatctgtgtcatgatccgcacccgtctccctgccacacttcaggcaatgactcctcctgatgcaagctccattggagcttgtaggcctaggatcttcttcatcaatggattcctttgcttcttggaagatgaatggcagcggaatggagaaaggaagagagagaggagacgccacttcaaggagaagatgagtctagaagaagctca

SEQ ID NO: 11310 - DNA, 382 bp, Glycine max
agcttcactaaataggtgttgttattgaagaacatgcttcctgaacataataaattgccaaaaaatcactacgaggcgaaaaagattttatgtcctgtgggaatggagtaccagaagatccatgcatgccctaatgattgcatattgtgcaaaaattagtttgcaaaaatgcggcagcgccccacgtgtagggcatcacaatacaaagtgcaacatgatgaattaagtgatgatgcaactaccacaaattggggtcctgcaaaggtccactgatatcttcgcgtaataccacggtttaagcgattttttgctaatggacatgatgcaaaaaaccttacatgacatgcagatgaccgaaaaagtgatggattgctttatacat

SEQ ID NO: 11311 - DNA, 554 bp, Glycine max
tgtatgtggataacatacttatttttggtacatgcaatgatatagtttttaaaactaaatatttattagcatctaaatttgatatgaaagacatgggtgaagcaagggttaatttcggagttaaaattaaaaggaagggagatagtatattactatcctatgagcattatgttgagaaacttctcaagaagtataaatattatgactttaagtcagtgagtaccccttatgatgctaactctcaattaaagaaaaacatatgaaaactaattgctgaaactcaatatgcccaaatcattaggagcttattgcatttgatgaacttttctagatctgatattgcatacgcaacaggcagattgagtagatatacccataatccaaatcagaaccattgggatgcacttgctagactcatgagatatctgggaggtaccatggattatgctattaatacagtggatttcccacagtactcgaagggtatagcgatgctaactgggtctctgattcagatgagagaagatccattagtgcttatgtgtttactcttg

SEQ ID NO: 11312 - DNA, 558 bp, Glycine max
  unsure at all n locations
gcttgaggcatctacctcttgaagaggcagaggtaagggcatagggataagttttataggtagaggacggggagatcaaacactattagaaaatacactttcaacatcggttatttggggccttctacatcggttgtaaaaccgatgttgaaagcatcgatgttgaatgtattgttgttaacatcggttttaaaaactgatgttaacataaaaatattaacatcagttttataaataaccgatgttataaagaaagaagtacaacaaaataagtgtatgcgtgagggacgttggcatcagttttctgtaaaaaccgatgtgaatatgttatattaacatcagtttttagaggaaaccgatgtgaacgttcatcattcatgcacctattttgctatagtaatttatgtataacattggttatttataaataaccgatgttattgcatacagtttaacatcggttatntataaataatcgatgttaacctatgtacattaacatcggttggttataaataaccgatgttaacctatgtacattaacatcggctgtttata

SEQ ID NO: 11313 - DNA, 416 bp, Glycine max
actaagcttaagaataatggcctcagcaaacttcttattccctgaaggaaattcattaaataggcctcctatttttaatggagagggttaccactactggaaaacccgaatgcaaattttcattaaggcaatagacttaaacattttggaagccatataagttggaccttacatacccaccatggtgactggaaatgcaacaatagagaaacctacagaagagtggactgaagatgaaagaagattattgtagtacaatttaaaggccaaaatcatcattacttctgccctaggaatggatgaatattttatggtttcaaataataggagtgctaaggatatgtgggacactctacaagttacacatgagggaacaactgatgtcaaacgatatacgatagatactttacctcatg

SEQ ID NO: 11314 - DNA, 481 bp, Glycine max
tgtccctcaagtcatcaagttctttccgcacctacacaaaaaacatcttaattcttatctcattaaatacaaaaaaaaaaaaaaaaaaaaccattaaactaaaactcaaaaatgcaatcaaataaatacatacttcaacaagacgggctttgctagccttgtctttctctttctccagagcatgaagttccacttctagctgcattctcttcctttcaaggttatcaatttcctcaggctgactatcaagttgaaccctaacatttgcacaagcctcgtcaaccaaatcaattgccttgtcaggaagatgacgccctgaacaatcacaaaaaatataagcacacatcacactaacaaaaccacaagctttcaaaacaaacgcacacacaccaaaagagtacagattccataccagttatataccggttagacaattgagctgccataaccaaagcacggtcctgaattctaacaccgtgat

SEQ ID NO: 11315 - DNA, 187 bp, Glycine max
agcttgtctgaccttcaacagatgatttgaacacaatacttccatttccagatgctttaagaagaggataagcaagttggctcaaatggtatgcagaatccaagttagttgccattaattttgaatattcttcggctgtatactcaattgttggtttcctcacatttgttccaacattgtttaccta

SEQ ID NO: 11316 - DNA, 661 bp, Glycine max
  unsure at all n locations
gctttggggcagtggaatggactacaacccttatggtgtggactacggtttatgttgtattttgtcatgaccaacatcgaaagctgccactattcagaagggatgtcatcatttttccatggtcgtactggttaccatagtcatgatgaatgtaccaagactatgatcaagtgacagagtctttaagtctttatattaaagtggatatttntactcttttcacttaatngagtagttatacttcagcaagacaaaactagcacccaaacacgagttttgctaagaaaatgcatgcaactggcataaaagctcacaaaatatcactgtaaatgtggtttatcaatcatcattcaaagatcttgtgtctggcattaattgatgatgactgaatcattgcaatggaagaagaacttcaccggttcaccaaaaatgatgcctggacacttgttcccaatcctgagaatanaagcattatntgaacaagatgagtattcaaaaataagctagatgaacangggtaggtagtaagaaacaaagctaggttagtagcttaagtctataaccaaccagaatctatnaagttcacagaaacctttgatccctatactagacttgaagatataagaatcgtgcttccctttgcttgcccataaaatataaa

SEQ ID NO: 11317 - DNA, 443 bp, Glycine max
gaaactctattcacaagacgattaaaatcagattgttcgatgttactcccctaacaagggaatacccaggtaatgtcccacggaagtaacttcagaaaagccactcatttggaccaactgtcttctactactatgactgacattctttgaaaagaatatcctagctttctcttggctaatatgctggcctaacatctctccaaacaaatgcatagtgtccaaagtacatttcatatgcttagtagaagcctgaccacacaataataagtcatccgcaaacatgaagtgcgagatgagggggccctttcttcccatacaaaaaggtttccaagcttccactgctttcaagataatgtgggagagtttgttcatacctaacacaaagaggtaaggtaatagcacatcacctttgcgcaaccccttattaggagcaaacatgggag

SEQ ID NO: 11318 - DNA, 565 bp, Glycine max
agcttgtaaagcaggttatgcgcacgcctaattataagtaatttttataaagacaaatgttataaaaagtgaggctgaattatgattttagaagaagaaagattgaagcctttttttgaggaaaaaaagttaacgtgttaaagaaaaactttgttagaaaaataataaatttttacaaaaacttgtttagacaatgaaaatagatttcgcaaaacataaaggattttcaagatgaaatgaaattcaaacccctatattaatttaaagcaaaagataaatacactaaagacatatgagatataaagaattatactagtttatctttaccactaaggctatgtttaagttttgattaatcactaagtttcactaacttatcacaaatacaaggtttacgtcacagtcatttctcgctctacagatcaagatttaccctaagtttgttacaactcaatattttttgtcccaaaaggttctatttgactctatgcaaatcagaaagatttgttgattggttacacgacgactaactcttatttcggcttaataaatggatctgtatttt

SEQ ID NO: 11319 - DNA, 363 bp, Glycine max
tgcggcacaccagactgcctcaaaacctcaatgtttggaaccaagttcattgtgtcaccatatgtaaaaccaaatcgggaatttgttatagctctaacaacttcctgatcatcaccaagtacacgtctgaggatctcataacgtgggatgaagaattttttcaagctcctgttcaaggtatggttagcaattaaaatcttacgcatatcagtgttggaaagcccaatagaacggaagaacttgagtttaggcaaaagggtattctctgcatccgcaacaagcaccaaagggtgtttctccacaagttttgcaagatgggttttggtgaagccatacttgttgagacgatcaataacagcattt

SEQ ID NO: 11320 - DNA, 543 bp, Glycine max
  unsure at all n locations
tggagacaaaatcatgaaatttgggtggtgccaatgctttggtgagaaaatctgccacttgatcacttgttgaaactggtagtagctttagagtgcccttcaaaagcttctctcgcacaagatggcaatcaatttccaagtgttttgtgcgttcgtgaaaaaccggatttgaggcaatgtggactgcgctttggttgtcacagtaaagagttggagttctggtaagctgaactctcaaatctgcaaaaagatacaacagccattgcaactcacaagcagttgaagacagagccctgtactctgcttctgaagatgatctggacacagttgcttgctttttagcacgccatgacactaaagatttgcctatgaagaaacaatatccagatatggattttctagaatccatacagcctgcccaatcagcatctgaataacctataagttgcatttctgaagttctgctaaagaaaataccttggcctgggttgttcttcaaatacctcaatactctacatgctgcattngaatgaacatttgtgg

SEQ ID NO: 11321 - DNA, 592 bp, Glycine max
tactaagcttataacatcaaacttggagaaagagttcttggggtcaagacatgttaagttgtcaagtataatgttacttccttcactaaagcggtgatccatctccacacatattgtatcaatagcaacataaaaaatctctgcacggtaatgatgaagattagtgatagtcctcccttctgctcttgaacgaccccgaactggtatttcgtcatccatatttggtaccagaatacttttagcaacacaaaatccttggacatcggcaaaaaaattattccagccactctctcattgtgcccaaccgagctttgacaacatcaactaattccatggcattcacaatattaagatcttttctttgcaatatatttgaaagctcgtttgtgataccaaacaactgtaacattaacctcaaaataaaagcaaatttaaagctcttccatttttctatcagacctgctgcttgagatggtccacgttcatcttcatcaaccatactaagcaccttttacacggaggaccacatatgatccagacgaagcaatgtagtatgatgtgaaccccatctagtatccccgggtctagtgag

SEQ ID NO: 11322 - DNA, 545 bp, Glycine max
  unsure at all n locations
tcaagaatcaagtttcaaataatcaagattcaagaataatcaagtctcaagattcaatagagtttcaagaatcaagattcaagaacaatcaagatcaagattcaagaatcaagagaagacttaatcaagataagtactagatttttttttcaaaacattgagtagcacaagaatttttcacaaaatcttttaccaaagagttttactctctggtaatcgattaccaaaaggtagtaatcgattaccagtagccagcattgttttcaaaactgatttacaaagccataattgattaccataatcatgtaatcgattaccaatgttttaaaatgttagatttccaatttcaagagtcacaactagtgataaaacattttcaaatcattttaaacttgtggaatcaattaccaatgtttctaaacattgtgattttcaaatttaaacatgaagagtcacatcttttgatgtgtaattgactacactataatggtaatcgattaccagtgactgatttcgaaaaataaatntccaaaagtcacaattct

SEQ ID NO: 11323 - DNA, 597 bp, Glycine max
  unsure at all n locations
taagcttattgagttttacacactctccactgttggtcctcaatttattgttaattatataatcagaataatgactcatcatatgagtagttggacctgtaaaatttgtgatttttaagaaatttgagccaacaaaaaagagtgttcaagagaatgtgttagagacagtgttgctaccatttctctgtttaggaatggtgtttgtagttattagtgaaaatagaaatagaaaatactttccttatgtcaaacaggcttctgcattactatttttagtttttacaacattatgatagatcattatatattttttctttctctaaaacaaatgatttgtttattgtcttggggtggtgtatataaaaactgatcaacacattttacttttctttttttgcctgttcattccaatgtacaaatgattggcttatgatgcaacaaaatctaaatcaggaactaagtagctcttttaatataaaacatgtnttctttatcttttacttttctacaacattcatgtccctttnctttgatgtctangctgatgtgctcngtgatatattgaagatctatttgagaatngtgatataatgctct

SEQ ID NO: 11324 - DNA, 381 bp, Glycine max
  unsure at all n locations
tctatagaaggttcgttcctaatttctctacaattgcatcacctctcaatgagctagtgaagaagaatgtggcatttaactggggtgaaaaacaagagcaagcctttgctntgcttanagaaaagcttactaaggcacctgttctagctcttcctaacttttctaaaacttttgagctagaatgtgatgcctctggagtgggagttggagctgttttgttgcaaggtgggcaccctattgcttattttagtgaaaaacttcatggtgcgacccttaactaccccacctatgataaagagctntatgccttaataagagcactccgaacttgggaacattaccttgtttccaaggaatttgtcattcatagtgatcaacaat

SEQ ID NO: 11325 - DNA, 473 bp, Glycine max
atttacaacagtcattagaaattctaattaacatcttacaatgtgcaatcggctacacatgtatggtaatcgattaccagcatttacagaacgttttaaatcaaattttaaagcctgtaatcgattacacaaatcgggtaatcgattaccataggagcttttcaaaaaatattttcaagagtcacatctgtccaataggtttatgaatgaccatcaaaggtctatttatatgtgacttgaaacacgaagttgcttagagtttttcagaacaaaaaggtcttatcctctcaaaagtaaaaatatcttatcctcttaaaaattccttggtcaatacacttgcaattcaataaggaattattttgagtgctccatttgtcaatctatctttttcaagagagatttcttcttttctttatcttaatttctgaaaaggtattaagagattgatgatctctttgtgaaagcaatttgac

SEQ ID NO: 11326 - DNA, 526 bp, Glycine max
agcttcacaaaagtttgtatggtttgtttcaagcaccgagatagtggtacaagaagtttaatgagtttatgagcaactcaggattcaacagatgtgacatggaccattgctgctatgttaagaaatatactaatagttatgttatccttatcatgtatgttgatgacatgttgattacaggatctagtatggcagaaattaacaagttgaagtagtagttggcagaaaactttgaaatgaaggatcttggtccatctaaacaaatccttggtatgagaattcttagaaacagatcagaaggaattttgaagctatctcaagagaaatatatacacaagttgcttgacaggttttatcttgaagattctaagaccatgaatacccctttgggatctcatttgaagttttcaaagaagcaatatttgcagacaaatgaagaaaaatgttacatgtcaagagtaccatatgcattaacagttgggagtttgatgtatgctatggtatgtaccatacctaacatagcaca

SEQ ID NO: 11327 - DNA, 581 bp, Glycine max
  unsure at all n locations
aagcttgtcaaatgaatcactgcatattgtgcagtccctatcatccttcagaggaatgtataagagagtaggcttgcaaacaaggttccaatttggacaaaagtgtaaaactacttattaattagaattttatgaatcattgtttggaatattgaagaaaaaagacaacctgacaaccagctgccctgaaggaactaaaatcatggcatccaacaagaactctgcatgcttcctgcatggatatcatcaataacttgaatagctgcaagattgagaatctagtaagtataaggagctgttaactaacttgcatagctggaagactaagctcctcaggtacatgccatgctcgatctttctcgaaggttgacaaatgctctggcccagaaagcaaccgatagaagtatctgaatagtagttccaaataactatcaattactgcatatggtcataaacagaacaaaagaagttccatgacaatgcatggaaatgtagccagattcagaagatctaggatgaaccttactgtgatactctccagtgtcactatttattattantatagagtacaatttcatgga

SEQ ID NO: 11328 - DNA, 384 bp, Glycine max
tagaagcataaatctgcgcatactcacgaatccttcatcttttactatctaaagcgcatgcgaatataacattccctttctgcggctgaaaaacatcctcgttatcgtcgtagtcctctagggtctcgccggtggtggtgccggtgccggtgccggcgaagagggaatccacgtcggtgagatactttgcggatttataagcgctgactattccgttgacctcgtgaacgattcgtaagaggcgcgtgtatgcctcggagggggtaagtttgagctcggtgattaatcgggcgagtttgttgaggacgaggcagggggtgaggcgctcgatccatcactggcggaggacggcgtgtgtctagatgtggactccttctaccgcgt

SEQ ID NO: 11329 - DNA, 546 bp, Glycine max
agcttcctactggttgttgtttttacaatgtatcagctaccacattctcttttccttgcttttactcgacgctaaagtccagtcccatcagcttttcaagtccccaattctgcattaaagttgttggaggtttttctagcaagtgtttgagtgccttttgattagttttgatgataaagtgttgccccagaaaataatgttgccatttcttgactgcaaacaaaatggcattgaacttcttttcatatgcagacaaaagctggtattttggccccattgctttgctgatataagctattggatgaccttgttgaattaagacatccctaatgccaattccagaagcatctgtctccacagtaaagggttgaccaaaatcaagtaaggccagtataggggctgagatcaaggctttcttttgtggaagaaaagccctttttgtgtcccattccacttgaagtcagtattttttctgaagcaactgtgtcaaaggttgagctatcttcccataatttttgataaatctcatctaaaattctgataacc

SEQ ID NO: 11330 - DNA, 317 bp, Glycine max
ttgagccaattcaaacgacaataactttttactcggatgtctgattgagtcccgtcatatatcgagacgctcgaaattgaatgttgaagctctgagccaattcaagcgacaatatctttttactcggatgtctgattgagtcctgtaatatatcgagacgctcgaaattgaatgttgaagctctgagcaaattcaaacgacattaactgttttctcggatgtctgattgagtcctgtcatatatcgagacgctcgaaattgaatgttgaagctctgagccaattcaaacgacaaataacttttactcggatgtctga

SEQ ID NO: 11331 - DNA, 433 bp, Glycine max
gctctttcaactgcacaagcctattgatatttgcagagtattcttgtggaaccttcacccaacgaagacactgacaaaaacttatcttctccttcttggacaaaatatggcaggctggtggcaagtaaattttcttcccatcagaccttggatgcaactgtgatcgtatacccatatcagctagatcttgacgggtattcaagccatccttcgtcttgccttgaatgttaaggagcatcccaatcacactgtcacaaacattcttctccacatgcataacatcaatacaatgtctaacgtcaagatcacaccagtactaaagatcaaagaaaatggacctcttcttccatatgcaactctgactattatgcttcttttgggtctatccaaatacagtattcatgtgttgaacccattgatatacctgctcacc

SEQ ID NO: 11332 - DNA, 263 bp, Glycine max
ttctattggataagattcccttaaaactattacttttacttcctataatctaacgggtaaatttataccttataacatatttataaaatgaaaaaaattacaactattaataaataattaaagaatatttttttaatttatgaatttttctgtttattgtagtttaacacatgattaaaaaattcctaccaatattcattatcattgtataaaacaaatctactctttatcatggaaaagataatagtgtggaaaataaaaaa

SEQ ID NO: 11333 - DNA, 295 bp, Glycine max
atggtgttatcgattacaatatattggtgatcaattaccagtgtatctgaacgttgtaattcaaattcaattgtgaagagtcacatcttttcataaaatgctttgtgtaatggattacatggttttggtaatcgattaccagtgacaagttttgaataaaaagtcaagagatgtaactattccaatgggttttaggttgtctcaaggctataactcttccaatggttctcttgaccagacatgaagagtttataaaagcaagaccttgattttcattttataactttttcataac

SEQ ID NO: 11334 - DNA, 357 bp, Glycine max
agaatggtcataagctttcactcggaggttctattcatgcgcataatatatcgagacacacgaaataaatcaacagaagctctctagaaattcaaatggtcataacttttcactcggaggttcgattcacgcgcataatatatcgagacgcaccgaactcaacaacggaagctctcgagagattcaaatggtcataacctctcactcagatgtccgattcaggcgcataatatatcgagacgcacgaaattgaacaacagaagctctcgagagattcaaatggtcataacctttcactcggaggttcgatacatgcgcataatatatcgagacgcacgagattgatcaacagaagct

SEQ ID NO: 11335 - DNA, 337 bp, Glycine max
cttcttgaaggtggcagtccatgaggaatctccttgggaaagacatctttaaattcctgcaataagggttgaacactatgagaaacataaatagttaactgattagaattatcactctctctctcttgtgtatcactcttttcctcaggtgtatcactcttctttttcgtattccattgtggcgcctcactattttctttctcttgttcaatttcgagcgtctcgatatattatccgcctgaatctgacgtccgtgtgaaaagttatgaccatttgaatttctaaagagctttccgttgtcaatttcgagcgtctcgatatattatgcgcctgaatc

SEQ ID NO: 11336 - DNA, 348 bp, Glycine max
aatgaagatgatcaaaaaagtattagtggatttgtgtttttcatggggaatacgaccttcacttggatgtaaaaaagtactcgatagtcactcttttgacttgggaggcagaatacgtagcagctacttcatgcgtttgtcctgtagtctggcttaggaatttgttaaaagagttggacatgtcacaagacgagcagaccaagacctttgtggataataagtcaaccattgctctagtaaagaacccagtgttccatgatcgaagcaaacatattgacactcgttaccactacataagatagtgcatagcaagaaaggatgtacatccagaatatgtgaagtctcgag

SEQ ID NO: 11337 - DNA, 418 bp, Glycine max
  unsure at all n locations
tgttanaagaatgggttcagaacgctataaacctctttatgttacccttcttgggctactctgggcttgcaatcatgccagtcttgttgatgagggctactcatatttcaatcgggcctggcttgacagccccaggttgctgaagtctgagcattatgcttgtatggttaacttgctcgctcgctctggacggtttgcagaagctgaggattttcttcacagtgtacctcttgaccctggacttggattttggaaggcattgcttgcgaggtgtcaaatccactctaacctgaagttgggagagctggcaacaagaaagattctggctctggatcctgatgatgtatcgtcatatgtgatgttgtcagatgctcattctgcaacaggtaagtggtcagatgtggcaaccgtaatgact

SEQ ID NO: 11338 - DNA, 486 bp, Glycine max
  unsure at all n locations
ctaagcctgccaacagagtgctaggttccttgcactngatggtctatntttatcagcatatactaaggaatcacatctagaaagcttagcaaaaggtgttttaatcgtgttatcaatagatactaaatgcctttcaacaagatttgctcatcattttctgctcaaaatttgtacaaatacacttcattgtcagtctcagataaataaataggtgctattctatgttaaatgttatatcatatataaaaaaatcaatattttctctgtaatattaagttattctgattcactatcctaaagaagcgttgatgacttatagtggtaaacaaaccaaatgaaattattttcacatgatctacagttccttttttaaaacaatatgaaaatctaattcttaaacagataaaggttggtaccttgacataactatggatttcacctctcatttgatggcatagaacttgagaattttataaaagaacttct

SEQ ID NO: 11339 - DNA, 454 bp, Glycine max
ttccaattttgaatgggaccaaagtaatggattgccttctacgtttcttcctaaactattgggattttgattgggtatttctctcacttttagtcaaagttcataaaaaataatttgactttgaaaaaaaaggaaaatatgaataaatatttaatgtgtcaaagatttaaaatatatactggttcaagttttaaccattaaatatttatttactacacatatttgatattattaaaaagtcaatgaagtgaataattcataattacaaataattttcatgaaattaatataactagtattttgacctatggattaaattatactttatatctataaaaaaaaataaattgcaatataatattacttttaattattggtggttttttaaaaatattaaaaattatttatagagaatttaaaggataaggataaaatgatagttgagatatattct

SEQ ID NO: 11340 - DNA, 413 bp, Glycine max
  unsure at all n locations
tagcatccaatatctgctcgggagtatccgctcttactggagctctatgaacccatttcaccaaatctacaccttcaccaaaatcctcatcaactggtagtctagttgtaaggatatgcagcagaacaacaccatagctataaacatttcctggtgctgtgacttgcatagtatatgcatattctgcattacagaagaaatgtcacatgaagcatgctaaacataataaaagttaagagtttaatttttatgcaatgtcagtataattttttttaccctctcaatcaattaaaaatcatcattatggtttttaacgtaatattgtaaaatcaacanactaaccatacatgacgatttgtgattattagatgatagtgtanagactatntactatanagagtaatacgaagaat

SEQ ID NO: 11341 - DNA, 506 bp, Glycine max
  unsure at all n locations
cgtcttctacaaataaatcanaatcgatcctctaatcttcaaagcccatttctagtttctttcttcccatgtcaactacacagcttgcagttaacataaatggtcttcccaagattaagggaatgtcattatcttcacagatatccattacaacaaagtctgctgggaagataaaatgttttactctgaccaaaacatcttcaattactccatatggtatggtaatggagcggtcagccaactgtaaagtcattctagtgggcatgatttccaactctcccagtcttctgcacatggagagtggcatcagattgatactggctcccaagtcaatgagagcttttcccactgtgacttcacctattgaccaaggaatggtcacactcccagggtctttgtgcttcggtggaaagattntctggatcaccgcactagcattacctttcataactatattctnctggtgaatgtacttgtgcttctttgtcaacatgtcttttaaaaac

SEQ ID NO: 11342 - DNA, 442 bp, Glycine max
tgatgttcgttagtcgtcattggatgtcgagagtgtcatcttgttggattctgagaagaagatcaataaaatcttggtcctctaattcagctccatcttcttttgcaattttgttcttttcttgatgctctctgatgatgttttccaggaccttgtcaacctgcttgtgcaacttcttcaatctggtcatctttccagttaggaaatataagaatggaattgaaggaaagacatcaacaaggtcgaatcctcccccggattctacgatttttcggatcaaagacacaacaaactcatcttgctccttgtatatgccaccgaatgctaccctggaaatagaggcacatatcaatgagaaaattctactggtgagaatgataggcgaaccagcagattcgcgaatggagttgataaactttgctgcctcgtcttctctaatgga

SEQ ID NO: 11343 - DNA, 364 bp, Glycine max
acatctctttttataacattaatctctttaatcctctcatttgtactaattactttatcttacatttttcttccttttcttctcatctccttttctattaaaaaagttgcctgattttgttatataaatgcaatttctcttttcattttaccaaactttatataaagatattttatttgtttcaccaggacatatttgctgctggaactgatacttcaacatcaacactaaagtgggctatggccgaaatgatgagaaatccccgagtgagggagaaagcaccagctgaattgagacaagcttttcgagaaaaagaaataattctgaaagtgatctaaagcaacttacttatctgaagttggtg

SEQ ID NO: 11344 - DNA, 315 bp, Glycine max
  unsure at all n locations
aattgagtattgtaatatatcgagacgctcgtaatggaaaagagaagcttcgtataaaatgcaaatcgcaanaacttttaactcggatgaacgattgagtcccgtattatatcgagacactctatattgaaagcagaagctctgagcaaattcaaacgacaataacttttgactctgatcatccgattgagacatttattaattcgagacgctcaaaattgaatacggagagcgtctatggaaactccaatgacaacaacttttgactccgatgtccgaattgagtcctattataatttggaacgctcacaattg

SEQ ID NO: 11345 - DNA, 172 bp, Glycine max
cgcctacattcagtcctcaagcaacccacttgagattttccactctctctataaaactccttttacaaagtctgaaccacacagggacaacccttcccttgtgttcaagaatcctctacaacaagagactctcagtctcttaatcccttttcacgagtacgaagaagagaag

SEQ ID NO: 11346 - DNA, 402 bp, Glycine max
tctatagaacgttcattcctaatttctctgcaatagcatcacctctcaatgagatagtgaagaagaatgtggcatatacctgcggtggataacaagagcaagcctttgctgggctcaaagaaaagcttactaaggcacctattgtagctcttcctgactatgctaaaacttttgagctagaatgtgatgcctctggagtgtgacgtagagctgaaatgttacaatgtgggcaccctattgcttatagaagtgaaaaactacatggtgccacccttaactaccccacctatgataaagagctatatgccttaataagagcacttcgaacttgtgaacattaccttgtttacaggaatttgcattcataatgatcataatacttaagtcattagaggaaaagca

SEQ ID NO: 11347 - DNA, 477 bp, Glycine max
  unsure at all n locations
atttgatgtatcatgttcgtggtatttttgcatagcacctaacatccctccattggtaggtatctggcaccaaagagcaagcggttagcttctatgatcaatcgcaaagtcaataattggaaaaacaggctatcacggatacgactgttacttcctgcacttcccataatttcattttggaacgagctttttgataaagtaatgggaattgtaggaagtcttaccacggaaattaattaataatacttactaaatttccataagcccaataacctccaatggcaaggggaaacaaacacaaggcgatgactatgtaagcaaacataacacctttccacatggccaagcgtgagggttgcttancatccgaaggcatggttccctacaattttgagggggacaatttagcaacaataaatgctcttaactgtgtaaatgcagaacaaatgtttgaccatgcaatacttntacgtacct

SEQ ID NO: 11348 - DNA, 413 bp, Glycine max
gacctataaaactaagctaacattggccaagaaatcactatttataataaaattggttactaaaatttaaaagcactcttggagcttaattatatacacgttaataagtaaaggtacttcaccttgtataatgatctccttgtgtcaattggcgcagactgaatgcacttgtctattacaactggcaaaggggtggtaaagtcactgccatatatctcaggattaaagaaaatctgcagaaatcatatggaaagcatacagatatgttaatatgactgatcctgttaacattatgacccatactgaacccatggattagctccacaattagaccaaggcactactatatgttcattaattcttcagtagtttaaggaacaagatcaagtggaactaatagctatacatagata

SEQ ID NO: 11349 - DNA, 470 bp, Glycine max
  unsure at all n locations
ctaagctttctacaagggccaacatcttctcctttgctcttgngtgaacctagtcctgaaacgcttcttgctggacccgccatgatgagtggcaccactcgttgggtctgacactgcctccatgtcctcccttgaggactgggccccaccactgccccttgatctggaggggagtgccagtgtggcgcattgttgcccttgcacacggtggtagcccacttgctccccattgtacgctgcctacggcaacggcgagtggtggtagtcaggcaccatgtacgtgtcattgggggtctccttacaatggaagtttctgtggcagttgcacacgaggcattatagcgcgtccagggttccctcctcgcccagaggcaagaacttgatgcatccatcaagtgtgtggccgtcaattttgacgatgtggttcttgacgcactcatgatacttctcattgtcattgttttttaaac

SEQ ID NO: 11350 - DNA, 461 bp, Glycine max
tcttccttggtcgggtacatgagcatatgcaatgctcttctttgctctcaagtggtcaactctaggcttcactccacttcatgcttcttgtggtgttcgatctttgacattctttgttggggagcgattggacaaataaactgcacatgcaacagcttctggccaaaataactttggcatatttttagccttcaacatacatctagtcatattatgaatagatctatgttttctcttcggtaccccattttgttgtggagatctaggaaccgctagagggcgacgaatcccatatttttcacaaaattcagtacattctcttgatgtgaattcgtcacctctatcggatcttatagctttgatcacatagccactctcatcttgcactagagctttataattttacaagctacaatgcctcagattttagtgtagaaataaacccaagtcttttactataa

SEQ ID NO: 11351 - DNA, 442 bp, Glycine max
  unsure at all n locations
ctaagctatagttattggagggagaataanacaatccanaatcaattgtacccttatgtaacgaagaattctttttgcggcctatagatgaggagaggtaggagcctctgtaaagcgacacacaactcccaccgcatatagaatatcgggccttgtattggttagataccttaaactccccacaagactcttgaagactgtggagtctaccttctctccttcatcaaactttgataacttcaagccaccttccataggtgtgttcacgggattgcaatcaagcatattaaatttcttcaacacttcttttgtgtagctttcttgtgagacaaagataccattctccgtttgcttcacttccattcccaagtaatatgacatgagtcccatatctgtcatatcaaattcacgagacatggactccttgaagtctttaaacaaa

SEQ ID NO: 11352 - DNA, 251 bp, Glycine max
tcctttaggctgttttgtgtaaaactcttcctctagatgaccattaaggaatgtcattttcacatcatttgatgtaactcaaagtcaaaatgagctactaatgtcataattattcgaaaggaatctttcttagatacaggagaacaattctctgtgtaatcaatttcttctctttgagtgaacccatttggcaacaagttttgccttatgtctctcaatgctgctcacttcccattggcctcccttagttt

SEQ ID NO: 11353 - DNA, 420 bp, Glycine max
  unsure at all n locations
actaagcttctacattcatttcgagcttttcgatatattactgtactctattggacatccgagtaaaaagttattgtagtttgaatttgctcanggcttccgtattccatttcgagcgtctcgatatattacgggactcaatcggacatccgaggaaaaagttattgttgttcgaatttgctcagagcttcagtattccatttcgagcatctcgatatattacaggactcaatcagacatccgagtaaataggtattgtcgtttgaatttgctcagagctacaacattccatttccagcgtttcgatgtattacgggactcaatcagacatccgagtaaaaagttattgtcgtttgaatttgctcagagcttctacaatcacttcgagcttttcgatatattacgggactcaatcagaca

SEQ ID NO: 11354 - DNA, 378 bp, Glycine max
  unsure at all n locations
tgagttaacatgttatctnttcaatcacagacacagatttctctcccttgttatcctcaaaattaaaatggtttatgggcatttagaagatcaaaatagaaaaattgaacaagtatatcataaactccccaacagctagcactagtgtcccatagtattgggaaatcccacatagccggcctcaattattgggatgtgatttatatatctgttgggcaacttcacttaagccatttgattntaagaaggaatctaaaatggtatcaaagcctaaagcccatttctgtcattcccatagtattgggagggtgcaatataaacaaccaattcacatgccaggtgggggcaagaaacagaattgggtagtggggataggat

SEQ ID NO: 11355 - DNA, 384 bp, Glycine max
  unsure at all n locations
ttcgctggcgaaagcggcttccgcggggccgtgcatcttgtgcttgacgatgtagacgcttcccgtgcgcgagttgcggatgccgttggcgcccaaacccttgatgtcatggacggcaatggccgtggtgaccatggcgtccaggatgccctcggggatttccttgccgttgccccagaggatggccgggttggtcatcaggtggccgacattgcgcacgaacatcancgaacggccatgcagcttgacgggcttgccatcggcgcccgtgtactcgcggtcggcgttcaggccgcgcgtcatgctcttgccgcccttgtcgaaggtttcggtgagcgtgcccttgaggatgcccagccagttggcatagccgaccaccttgtc

SEQ ID NO: 11356 - DNA, 460 bp, Glycine max
tatcgcgtggaagctggccagctggtcgtcgcactcaagagcggcggcaccacgggcctgaagaacaccgcccagttcgtcggctaccagggtgatgccgcagcgccctcttccgtgctgctgctcaacaacggcctgcacatcgacatccgcatcgacaagaccacggccatcggccagaccgatgccgccggcgtggccgacgtggtggtcgaagccgccctgtccaccatcctggacctggaagactccgtggccgccgtggatgccgaagacaaggtggtcggctatgccaactggctgggcatcctcaagggcacgctcaccgaaaccttcgacagggcggcaagagcatgacgcgcggcctgaacgccgaccgcgagtacacgggcgccgatgggcagcccgtcaagctgcatggcccgtcgctgatgttcgtgcgcaatgtcggccacctgat

SEQ ID NO: 11357 - DNA, 362 bp, Glycine max
  unsure at all n locations
gtccaggtccacatgttacatttatgatagtgacttctttgctcccatcacctagagatatgcaatcatcaccggtgccaatctttgagttagtaattttcactcgagttgattttccaatgtgaattccatctgtattaggactatatgcaggtgaactaactctgaagtttgtaaatgaaatgttcttgcatccaaaaacattcacatganaatatntgctatcctttgaagtatgtcctgaattactgaattatcgacaaagccaaagccaaaattctgtggaaaatattgccaaaagtacataatagttaattntacgaaaggtaatgaaaatgcattagtacatactaatttcaata

SEQ ID NO: 11358 - DNA, 361 bp, Glycine max
aaaagccaaatgaaatagctgaattcatgcacaattgggatgaaatttaaaattggcatcatccttgaggctgctcatatctctggaaaagtactccaaacaaaacacaaacaaataaggggagagaggattcccttgtctaagaccctgctgccctttgaagtggccataaatggatccattgactgtcacactaaaggaagtggaagaaacacattccatgatccaagtacagaactgggctgggaagccaatggacttaagcatccaatccaagaattcccaggaaatggaatcataagctttatgtaagtcaattttcaagaggcatctcggagaggatcttttccgtgcatatttg

SEQ ID NO: 11359 - DNA, 410 bp, Glycine max
  unsure at all n locations
tcaatacagtgacaccagtgtngcaacatatgagctgactaagtctttnggatgggatacatatgattctttcatgcagcatgatgttcaagaactaaatcgggttctttgtgaaaaacttgaagacaaaatgaaggtatggcaagagttttggaatatttgttcatgattattcttgatgggtgaccatatcaaatggttgctttgtgttatttgtcttcacggaactgttgttgagggaaccatacaaaaattatttgaagggcaccatatgaattacatagaatgcatcaatgtagactacaaatcaactagaaaggagtcattttatggtacttccttatgcattgtgaattcaattatatgttntggtcttccttgntatgtatttctaatttaagtttgcatat

SEQ ID NO: 11360 - DNA, 497 bp, Glycine max
  unsure at all n locations
nnggctagcccaaatctgatatcttggggcagaacttctcatcctaaagaatgttatgtggttntatgtcaaaatgcaaaattcgagtgttgcatcctatatgcaagtattccaagcctctagctataccaattgcaatttcatatataatgtcccaactcaagggtgcaatggttacaggtccttttctataaatgagcttgtcaagggacccattgtgcataaattcatagatgagaactctcttgcggccttccaaactgaacccaagaagagtgacaacattaatatgagaagttctactaatgctagcaacctcgttcataaattcttcaccatcttttgttgatgcattcaatatttntacagccacaggagcgccattgggtagctttcctttgtagacagagccaaaaccaccttgccccagttntactcttgaagtatttgcattntcttgacattgacaattatatcttttagaagtatacaccatg

SEQ ID NO: 11361 - DNA, 275 bp, Glycine max
atagggctcgcgttctaatatttttaaatctagcttccacactccgctttcaatacaaaatcgatgttaaccaagctatgtaaacgttaacatcggttttattccgatgttaacatttgataagttaacatcagtttgtcataaaatcgatgttaacgaactttcattaagatcggttttataaaaatcgatgttaatgaagtcatgttaacatcggtttttaaaaaccgatgttaacgtaagtttgtttacatttgatttttccccaatcgatg

SEQ ID NO: 11362 - DNA, 213 bp, Glycine max
cccttcagataccttaatatttgctctgccactgtccagtgagaatccaaaggagcggccataaataggcaaactttgttgacaacaaaacttatctcgggtctagtaaggagagcatactgtaatgcaccaactacatacctgtataaggctggatcatgaaaagcatcatcaccatgtcgagacaacttgcagttggataccattggagaa

SEQ ID NO: 11363 - DNA, 332 bp, Glycine max
  unsure at all n locations
tataaaactaagcttgaggcaaactggatgcgttggncatctttgtnaccctgctggcctcgaatcagaaatctgtacctgtcgcaagggtttgtggtctgtgctcctctactgaccaccatacagacctttgcccttccatgcagcaacctggagcaattgagcagcctgaagcttatgctgcaaatatttacaatagacctcctcaacctcagcagcaaaatcaaccacaacagaacaattatgacctttccagcaatagatacaaccctggatagaggaatcaccctaacctcagatggtccagccctcagcaacaacaacagcagcct

SEQ ID NO: 11364 - DNA, 283 bp, Glycine max
  unsure at all n locations
actcagcttgaggattttcaaacgacaataactttntactcggaattctgattgtgtcccgtnatanancgagacgctctaaattgaatgttgaagctctgaccaaattcaaacgacgataactttttactcggatgtctgattgagtcccgtaatacatcgagacgctcgaaattgaatgttgaagctctcagccaattcaaacgacaataacattntactcggatgtctgattgagtcccgtaatacatcgagacgctcaaaattgaatgttgaagctctc

SEQ ID NO: 11365 - DNA, 445 bp, Glycine max
  unsure at all n locations
ntgatgcaacattcggagaggttaatgaaacaacgagatgatgcgctctatgagaggttggatcaaatggagaatagagatcataatgaagaagaaaggaggagaagagggaatgatggtgttcctagacaaaaccgaattgatggtattaaactcaacattcctccatttaaaggaaagaatgatctggaggcctacttggagtgggagatgaaaatagaccatgttttctcatgcaacaactatgaggaagaccagaaggtgaagcttgccgccacggagttttccgactatgctcttgtgtggtggaacaagctacaaaacgagagagcaagaaatgaagagccaatggttgatacatggacggagatgaaaaagatcatgaagaagccgtatgtgccggctagttactcaacggacttgaaattcaagctccaaaaactaa

SEQ ID NO: 11366 - DNA, 365 bp, Glycine max
  unsure at all n locations
acctcggatatcttaagaagggggagggggctgaattaaaatatcaaagactattccccaattaaaattttaactctctttctaaattattaatgcactcttaatatgaattactaaaaacacaattcaaaatataacttctttaaagcaaaagatatatgacaataaataaaagaattttaagggaagggagaatacaaactcaantttatactaggttggccacacccctgtgcctacgtacattccccaagcaacccgcttgagagttccactatcttggaatatccctttacaatgtctgaccacacaaggacacccttctttgtgtcagataccttacacaagagacctcgtctttatca

SEQ ID NO: 11367 - DNA, 377 bp, Glycine max
ccaaaaagtcttaatgaggcgatgaacatattgtgtaccatgggtctggagtatcaaaaaattgatgcatgtcttaatgatagcatactgcgtttatatgaatttgaagaaatgcctaaatgccgcatgtgtggggtatcacggtacaaagtgaacgatgatgaccacggtaacaatgatgaaagcacaaagaatcgcacttaacaaaggtgctatagaaacttcctatcattccaacgttaaagcgtctgtttgctaatggagatgacacaaagaaccttacatggcatacatatgggataaactgcgaatggaatgcatcaccatccgactgattattctcaatggaagattaatctgctgtattccaattcaag

SEQ ID NO: 11368 - DNA, 439 bp, Glycine max
  unsure at all n locations
tactntgaatattgtgatttaatatgatttatgcttgtttttatatatagaggtagttatttatattaataatttgtgtaaataatattgtagagtgttatagtatgattccaaaaattattaagtgttggagtttgagaatattatggttaaatttcatgaacatgtgtatgttgtaccttatgaatatcattgggaatgttatgagatggttgatgtgatgttatgagatgttaaagtgtggacatgatattcgattgtgaataagtggatgtgttaacatttgatgttacattaattatatcgtgagctatgaattatacaataacccgaccagtgtttatgcgcagtgttaaagagaaaatgtaggttccaagttaggaaccagtgttaaattgtagcgcaattgtgttaaacatgtttgaaacaagagtgtgag

SEQ ID NO: 11369 - DNA, 410 bp, Glycine max
  unsure at all n locations
tactgggccctcaaactgctaaactntgatgaagctgttgttggagagaagaggaagttacaattgtttgagttagaagaaatgaggatgaacgcctatgaatcattcaagatttataagcagaagataaaggcatatcatgataagaagctacagagacagaacttccaactaggccaacaagtcttgctcttcaatttcggactcaggctatttcctggaaagctaaagtcaaagtggtcaaggtcgttcatgatcaaagaagtaagaccctatgaagctgtggaattggtggaccctacgataagaaccccggagaaaagatggatcgtcaatggacaatgcttaaaaatttaaaatggaggccagttagaaagataacaagtgttgctacctgaacgatcataaat

SEQ ID NO: 11370 - DNA, 346 bp, Glycine max
  unsure at all n locations
gttagaaagatgactcaaagctgtagggattgatccagataaactgttattggccaaattcagaatttacaagatgttattgaagcatgttgtttgatgctgcaaatttttggagctcttcacagccttcaatctgttcaggtatgtggccattaatgctgttcatttgtacatcaagagatattagatgcttcaatttgccaattccanagggtatgcttccatctaagtggcagtagcctagaggcagatagaattcaagctaacccaactctgaagggatggagccagaaagagaatttgagacaaatcaagtgtttgaagagaagtgaacacaacacacagt

SEQ ID NO: 11371 - DNA, 454 bp, Glycine max
agcaatcaatactaaaatttcttcatttatcattatcttcaataggagatagaggcgaatctattttagttggaaactatacctttaatcaagatgttgctaggatggaattgacaaagatgattgcattgcatgaataccctcttgctatggttgatgacattgggtttcgaaggttttgtaatgttgtccaacctttgttcaaagtaatatcccgtaatacattgaagttggatatactaaagttctatgagagtgaaagggccaaaactatgaagctaattcaaaaaaattcaaggcacctagctataacaacagacatgtggactgcaacgaatcaaaacaaaggctatatgactattacaacccatttcattgataacaattgacatttgaaaagtcgacttatgaggtaaataatcattcacttgaaagttctatgattctaatttat

SEQ ID NO: 11372 - DNA, 346 bp, Glycine max
  unsure at all n locations
agcttttctttgtacacctacatttcattcanctacaactntttctggatacacatgcattaaaaactctttctccttatatcaacacggtctatataacaactctagtcctgttcaaagatttttttttcgtttttcaacatacacttngtggttatacaaaaatttctttatatacattcattgctcacacacaagaatttcttttcacacattatttacacacacacacaaaatctttccatacactttttacatataaaaaactcttttcttttctttataaatacgacatttgttcacaatgcctctttctttntcaattcttggtgttatcatgattttt

SEQ ID NO: 11373 - DNA, 380 bp, Glycine max
  unsure at all n locations
tgtngaanatataatcaatgcaagacctcttgagagatttagtgaacatgtcctccagttggtcactagagttgacaaactcaatggtgagttttcctgagagcactttctctctcacaaaatgacagtcttctactgtgtttagtccattcatggaagaccggattagatacaatgtggagaacggcttgattatcgcaaataagattggtggcttgagtgtctccaaattggaactgctggagaagtttccttagccatgtaatttcacttgtagttgcaggcatggcacggtattcagcttcagcactggatctagtgactataatttgtttcttgcttccccatgggatcaaatttccttcaataagaacacaata

SEQ ID NO: 11374 - DNA, 382 bp, Glycine max
  unsure at all n locations
tcaacattcaatttgagcgtctcngaatattacgggtctcaatcagacatccgagtaaaaatttattgtcgtttggattggctcagagatttatatattaatttcgagcgtctcaatatattacgggactcattcagacatccgagtaaaaagttattgtcgtttgaattagcttagagcttcaacaatcaatttcgagcgtctcgatatatcacgagactcaatcagacatccgagtaaaaagttattgtcgtttgaattggctcacagcttcaacattcaatttcgagcgtctcgatatatgacaggactcaatcacacatccgagtaaaaagttaatgtcgtttgaattggctcagaggttcaacattcaatttcgagc

SEQ ID NO: 11375 - DNA, 155 bp, Glycine max
  unsure at all n locations
ccgccagtgcgcgttggtacatctcttgtgtatctatgtggcggtgtctattnattcagcggaatagtgagtgcactttatggccgcgaaaagagccagagaggggcgcatgtcgatatatcgatgtttgatgccacgctgagttttctggagct

SEQ ID NO: 11376 - DNA, 115 bp, Glycine max
cgacatgcgcccctctctggctcttttcgcggccataaagagcactcactattccgctgaataaatagacaccgccgcatagatccgcaagagatgtaccaacgcgcactggcgg

SEQ ID NO: 11377 - DNA, 359 bp, Glycine max
  unsure at all n locations
agcaccgcagctgcagctttctaatcgncggaaggatgattgagttattaaagcggcgacgcctactggagactatttttctcccatgtttcacttgagtgtaacttgtattttcttcacagatagggcatgcatgatgacccttaacactggaaccgctgagattcccatatgctgggaagtcattaatggtacaaaaaagcattgcacgcatttcaaacgtctccttgcgaaacgcatcaaacactacaaccccctcgtcccacaactttctcaaatcttcaccaacggacttagataaacatcaatgtcatttcctggctgtcttgggcccgatatcatcatagacaacatcatgt

SEQ ID NO: 11378 - DNA, 379 bp, Glycine max
  unsure at all n locations
nttgcaagctagaatcatttattctatctcttacagcctttgggtgagtctcgtccaggtagacccgaagaaaactggcctcaccgtgataaaaaatgagaaggaggagctaattcctactcgggtgccgaacagttggagagtctgcattgactataggaggctgaaccaggttaccaaaaaggaccattttccactgcccttcattgaccagatgcttgaacgcctggcatgtaaatctcactactgtttccttgatggtttttctagttatatgcaaatcactattgctcctgaggatcatganaagaccacattcacctaccccttcggcactttttcctatangaggatgcctttctgcctgtgcaatgcccct

SEQ ID NO: 11379 - DNA, 460 bp, Glycine max
  unsure at all n locations
ctaagctatgctgcnacattataatagacctccacagcagcttatccaactttctgcaaaaatnatgacctttcaagcaacagatacaatccaggttggaggaatcatccaaatttgagatggacaagcccttcactacaacaatagtctatccctccttttcagaataccgctagtccaagcaagccatatgttcctcctccaatgcagcaacaacaacagcagcaacaacaaagacaacaagcaactgaggcccctcctcaaccttccttagaagagttagtgaggcaaatgaccatccagaatatgcaattttagcaagagacaagagcctccattcagagtctgacaaatcagatggggcagatggctactcagtcgaaccaagcttagtcccaaaattctgacaacttgcgttcacaaactgtgcagaatccgaaaaatgtgagtgtcatcacct

SEQ ID NO: 11380 - DNA, 343 bp, Glycine max
  unsure at all n locations
gcttatgattccatttcctagggaatctgnattttattcttaagnctattggctttccagcccagttctgtacttggatcatggaatgtgtttcttccacttcctttagtgtgtcagtcaatggatccatttatggtcacttcaaagggcagcggggtcttagacaaggggatcctctctctccttatctatntgtgctctgtttggagtacttttccagagatatgagcagcctcaaagaagatgccaattttaaatatcatcccaactgtgcaagaattcaactatctcacttgtgctttgcagaagatattatgcttctatctagaggagatatcccttc

SEQ ID NO: 11381 - DNA, 448 bp, Glycine max
  unsure at all n locations
tattctctatctagagtagttgatcacaacaactnactactgacatatattcgactttagtagtggacaatgtagttgagccttgcatcttgcatattcatgttactaagttagcaccgataaagtaatagcttccactagtgctttttctttcaactttatcaccaacatagtcaacatcataatagcttgtaagtctgaaactttctcttcttttgaacataagaccaagattagaagttccaattaaatatctacaaatatgtttaattttagttaggtgaacttccctttgttctttttgaaatcttgcacatagataaacattgaacataatatcagaaatggatgcagtgagatagaccagtgagttgcatccactttttttgatccttgtccaatccaaggtatgtcatggtgtgcattggagtcttcatttcttttcatc

SEQ ID NO: 11382 - DNA, 465 bp, Glycine max
  unsure at all n locations
actagcttacttctaatatatnnnnagaaaatgaatntttatttgttgaatngncacccatcatttatcaactacaataacattctaacatagaacccatcatggatatttaaagcgtaaaatttgaaagaaatttcctttctcaatttaatcaaaatatcatttgaagtatcacaacaaatttctgatgaagcctagacggtcaaaccatcaatttgaaatatgattcatcttaataaatatgttcggtaatttccaaacaaatgagaactatgaaaaatctaagctcataagaaaatataaacaagtgtgatcaaaatttatgattttcaataaatttcaatcaatattaaagtgtgttccaaaaaatatattaaagaatgtgttattaacatttttctataacagaaatataatcaccaacaatctncaatagtttgtccccactggctctaagtcctccat

SEQ ID NO: 11383 - DNA, 373 bp, Glycine max
tattctttatctagagtagttgttcacaacaacttactactgacatatattcgactttagtagtggacaatgtagttgagccttgcatcttgcatattcatgttactaagttagcaccgataaagtaatagcttccactagtgctttttctttcaactttatcaccaacatagtcaacatcataatagcttgtaagtctgaaactttctcttcttttgaacataagaccaagattagaagttccaattaaatatctacaaatatgtttaattttagttaggtgaacttccctttgttctttttgaaatcttgcacatagataaacattgaacataatatcagaaatggatgcagtgagatagaccagtgagtt

SEQ ID NO: 11384 - DNA, 398 bp, Glycine max
  unsure at all n locations
agcttaacataaggcatgcgaagttgggtatnntttatagcaatncccttatgnnatcaaacataaaaagggaaaaggtaatattgtagccgatgctctttctcggcgtcatgcattactttctatgctagaaacaaaattgattggtcttgaatgtttgaaaagcatgtatgaaaatgatgaaacttttggagatatttttaaaaattgtgaaaaattttcagaanatggtttctttagacatgaaagctttcttttcaaagaaaacaaattgtgtgtgcctaaatgttctactagaaatntgcttgtttgtgaagcacatgaaggaagtttaatggtgcattttgttgtccaaaagactctaaaaacattacaagaacatttttatttgcctcata

SEQ ID NO: 11385 - DNA, 343 bp, Glycine max
  unsure at all n locations
gacaagnggcctcagatatcttaagaagggggggttgaattaatatattccaaactcttctcctaattaaaaatctatcttactttttacttaagttatgaattcccttaatgacaatcttcttaaatattaattcaaatgaagcaacttgaattatgaatataaagcaataataaataaaggagattaagggaagagaaaatgcaaactcagttttatactggttcggccacacccttgtgcctacgtccagtccccaagcaacccgcttgagagttccactaacttgtaaattccttttacaagttctaaacacacaaggacaacccttcctttgtgttta

SEQ ID NO: 11386 - DNA, 385 bp, Glycine max
  unsure at all n locations
ntggagaaccaagccaatcagaatgctagttgtaatattgatgggaatagaggtaacaatggcggtaatgacggaccgaggcagaaccgggttgagggagtaaagctcaatgttcctcccttcaaaggtagaagtgatccagatgcctacctggactgggaaatgaagactgagcacgtatttgcctgcaatgactacactgatgcgcagaaagtcaagctagcagcagctgaattctccgactatgcccttgtttggtggcataaataccaaagagaaatgttgagagaggaacggcgagaggtagatacatggactgagatgaaaagggtgatgagaaaaaggtatgtgcccactagctataacaaaaccatgcgacagaaac

SEQ ID NO: 11387 - DNA, 415 bp, Glycine max
  unsure at all n locations
agcttctatanaagccaatcctattcacttggatgnnnganncggggacacaatatatcaaggcgctcganattgaacagcggaagctcccgagaaattcgaatggtcataacatttcactcggatgtctgattcgtggacataatatatcgagacgctcaaaattgaacagcggaagctctcgagagatttgaatggtcatacctttacacacggatgtccgattcggggatataatatatcgagactctcgaaatagaacaatggaagcgctcgagaaattcgaatggtcataacatctcacacggatgtctgattcgtggacataatatatcgagacgctcgaacatgaacagcggaagctttcagaaatatgatgggcataccttctacacggaggtgcgactagggatat

SEQ ID NO: 11388 - DNA, 326 bp, Glycine max
  unsure at all n locations
cctatggttggacctcccaaagagtatggagtaacaccacttttaacatttctgatttaattccttttgcaagtggagctgatattgaggaggaggaactaaaaaatttgaggtcaaatcctcttcaagggggaggggatgatgcaatcctcactangaagggaccagtcactagagccatgagcaagaggctccaagaggttgagctagagctgctgaaaaagaccctagggttctcatgaacctcangataaatttctgagcccatgggccaaggttgggtccaattatctttgtacatattagactacgatgtcattatattt

SEQ ID NO: 11389 - DNA, 350 bp, Glycine max
  unsure at all n locations
accatgtcatgcattctagaaccaaacatatagagataagacatcattttcttagagatcatatatcaaagggtgattgttgcattgagtctattggtagtgaacatcaactagctgacatctttactaaacctctagccaaagataggttcttcttcattaggaatgaactgggtatcttagatggatctagtattgaatgatgttatgcttagaacatgtagcttgttatatatactctccatgtctgttaattttcctttaatgtctcagtatctngatatattgatatgtagctgattctttctccaaaaatacatgttttattttgtaatttgaagttttcacta

SEQ ID NO: 11390 - DNA, 375 bp, Glycine max
  unsure at all n locations
agcttcaccgatcctatngaagcaannggtaactttacattctccagatatccagaagaagnataaagatgaggaatttctcaaatccagatctatacttgctacaacaaatgaggttgtagaccaaatcaatgactatgtattaaacattatccgaggagaagaaaaggggtatttcagctatgactcaattgacatgaaaaatgctgcaacaactaaagcttttgaagcaattacactagagtttctacattcattaaagacatcatgaataccgaatcatataattaggctgataagtggcacacctgttatgttgattcaaaaattagatcaagttgatgcctatgcaacgagacaagactaattatctct

SEQ ID NO: 11391 - DNA, 315 bp, Glycine max
agcttgttgcaaatcttctacacttggagggataacatgcagtcctcttgaacccttacctcccactctttcgtcatgccgagactcgggaagcccaacaggtttagctttttcaaaatactctgaacaaaattcaatggcttcttttgcaatgtaccttttcaacaataaatgcttctggatggtgtagattcttggtatacccttttaagatcttcatgtatcgctcaaccgggtacatccatcacaaataaactagaccacaacatttgatttctctgaccaaatgaacaattaagtgaatcatgatgtcaa

SEQ ID NO: 11392 - DNA, 453 bp, Glycine max
  unsure at all n locations
ttccctgttnntatatttgaaaagcttactttgggccatatgataattgttatgttatgtacaaattctaattaatgcatttgcaaattgttgtataccatgtgttactaagccgaattgttcccttgacttttaggttgaaaagctaggaaaagactcactaattaactgtgccaagaccagtatgtccttaaagttgatagctggtgataatgacttctttgccattttgttatgtntgtaattgcattggctatatattgaatgttgagagtttatatcacatgattgattcacaccatgctctgctgcttctgcaaattctagtgcatatccaatcgaatgaagcttatatgcatcatgtatcaatatttcattagtttctactgtgtgttgaatgtgtaaaattgtatattgttgaaccatattgagttggtagtatgagtgaaactg

SEQ ID NO: 11393 - DNA, 474 bp, Glycine max
  unsure at all n locations
atgagatataactaacagaggagataaggataatggaaagcatcaagaattgcatatcaaagataaagtttattcccgcaccactaatctacgtggggtgccaaaagcttgcacttcaccatggtttaacctttgccgttcaagcagttgcagcaataaatctttcagctataataaccagcacagtagaatcaatattgaacaatgaatgagaataatgatagtaattcactaaaaatcataatagaaaataacaataaatatctagcaaatagctgaaaacaatntatatcagttatacttgcttgcttgcatcaacaacatcttgaggtggcatctcttcagtcccaatntcaagaacaaatgctcttgaatgatcatgcacctataaccagagaaaagctggantttacataatatataaatacatntgtgggacataatcaataaagaaactcgtactcaagctaaata

SEQ ID NO: 11394 - DNA, 311 bp, Glycine max
agcttcaacacatttaagggttggctacattctgagtttgcccttaagtttactgaccacccactgtctatttgcttgtttgttgttcacttctctgcagcaattatggttatgcttaaatgtctttatctgaaaagagtttctaacttcattctttgcacagtagatttcccaatcacaaaatgtcttcttgcattttgctctagccctctgtttatcattcttcttccacttgaactccttgcccatcaatatgctatactccctcaaggcagatttaaattcatatagagtaccaaacttcatcccta

SEQ ID NO: 11395 - DNA, 414 bp, Glycine max
  unsure at all n locations
tactcagcttaacattcaatntcgagggtctcgatatattacgggactctttcggacatccgaganaaaagttattgtcgtttgaatttgctccgaccatcaacattcaattccgagcgtctcgatatattacgggactcaatcagacatcctagttaaaagttatgtcggttgaatttgctcagagcttcaacattcaatttccagggtctcgacatatttccggactcaatcagacatccgagtaaaacgttatttgcgtttgaatttgctcagagcttcagcattcaattntgagcgtctcgatatattaccggactcaatcagacatccgagttaaaagttattgtcatttgaatttgctcaaagcttcaacattcaattttgagggtctcgatagattacgggactcaa

SEQ ID NO: 11396 - DNA, 316 bp, Glycine max
tatatatcataggctgctcattttaacttattttaatatgttcccttatactcctgtgtttaatattgatgttgcgaaagacaaataaaaaaagcataatcttactcttagattgatcttgggtgagcaaattgcaaaatcattttttaatgaaattgattttgatcataattgattatgaagtacaatgatatattttttagtgtttttaatctaagaaaaaatagtattaaaacttagtataaaagaaattgatccaatgcaaaagctattaatgttgctttaattcaaatcaatttcttcttaaaattaattt

SEQ ID NO: 11397 - DNA, 472 bp, Glycine max
  unsure at all n locations
cattatctcctttgggttcgcaggttcttccatgcactgaatccagtgatcatctcgattacaatgcacccaagagaccatatatctaacgctggttcaatctgaccaacgaccgattctggtgacatgtaaaaaggtgtccctctaaacttgaccttcccatactcagcatttgcatcttctctagtcttggacaacccaaaatcagcaatcttcagttgataccttgcatgatcatcagatgaaggaaagagaaggatgttgtccggtttgagatcacaatggacgactccttttcgatgaatgcaagaaagccctttgagaagcatacgagtgtagactcttacttcactatccgatattggccccttcttgttactaaaccaagaagagaaccataaggagcacactccatgaaaagattgtatgtcacataatttctctcaacagtgaatnggtcaaaatagcattg

SEQ ID NO: 11398 - DNA, 304 bp, Glycine max
cctgcatgcatgctagcttctgttttcaattacttgcgtctcgatatattacgggactcaatcggacacctgagaaaaaagttattgtcgttagatttttctcagagcttcagttttcaattacgagcgtctagatatattacaggacccaatcggacatcgaagtcaaaagttattgtcgtttaaatttgctcagagcttctgttttcaattacgagcgtctcgatatataacggggctctatgcgacatccgagttaaaagttattgtcgtttgaatttgctcacagcttttgttttaattt

SEQ ID NO: 11399 - DNA, 493 bp, Glycine max
  unsure at all n locations
ctcagctggaatgaaaacggagagtcgaaaattcaatggtcattacttatcacaccgaagtccgattcaggcacataatatatcgagacgctcgaaattgaacaacggaagctctcgagaaattcaaatggtcataacttttcaaatggaagtccgattcaggtgcataatatatcgagaagcttgaaattgaacaaaggaagctctcgagaaattcaaatggtcataacttatcacacggaagtccgattcaagagcatactatgtgaagatgctcgaaattgaacaacgaaagctctcgagaaattcaaatggtcataacttgccacacggaagtccgattcagacgcataatataccgagacgctcgaaatngaacaatgaaagctctcaacanattcaaatggtcaaaacttgtgacacagaagtccgattcaggcgcataatatatcgagaagctttgaaatgaacaacggaggctctcgagaaattc

SEQ ID NO: 11400 - DNA, 305 bp, Glycine max
agcttgccttgcccctttatatatttgagggactcatggtcactatgaatgacaaattccttgggataaaggtagtgttgccatgttttcaaagcccgtactaaggcatacaactccttatcataagttgaatagttaagggtaggaccacttaacttttcactaaaataagcaattggatggccttcttgcatcaacacagccccaatcccaacatttgaagcatcacactcaatttcaaaagatttttgaaagtttggcaacgcaagtatgggggcattagttagcttttgcttaagaacatt

SEQ ID NO: 11401 - DNA, 412 bp, Glycine max
  unsure at all n locations
tgagcacgaacggtgaatggagtgtcacatttatcgtcagcaaaactatgatgtgtatgatcaatgccagtgacaacaaacccaatggtgattccttctccagcagattcaaacccacctgcttgcgaccaagctccctgtggcagacccaataattgtggagtgtgtgtggttgcagtcctcacagaaaaatccaaaaccacattggacacttctcttctccttgacagattttttgccttcaatatatcgaaaatcaagaacttgttggttgaagaagtttatcaaaacagacacaaacaccaaactacgcacaaatggaaacaactcaaacaatgaagcancgtgttcttcacagaataaggacatactcaagatcttgataatngaaaagtaaaaccatactatacct

SEQ ID NO: 11402 - DNA, 462 bp, Glycine max
  unsure at all n locations
attctataaatagacctgcaatcttcaatggagagggttaccactactggaaaacccgaatgcaaattnttattgaggcaataaatctaaatatctgnnaanccatanaaatanggccttatatacccaccacagtaaaaagagtttcaataaatggtagttcatcaagtgaaagcataaccatagaaaaacctagagatagatggtctgaagaagatagaaaacgagtacaacacaacttaaaagccaaaaacataataacatctgccctgggaatggatgaatatttcanggtatcaaattgtaagagtgctaangaaatgtgggacactcttcgattaacacatgaaggaactacagatgttaaaagatctangataaatgcactaactcatgagtatgaattatgtagaatgaatgcanatgaaaatattcanagcatgcanaagagaattacacata

SEQ ID NO: 11403 - DNA, 363 bp, Glycine max
tttccgactatgctcttgtgtggtggaacttgctacaaaaggagagagcaagacatgaagagcccatggttgatacatggatggagatgaaaaagatcatgaggaagcggtatgtgccggctatttactcaagggacttgaaattcaagctccaaaaactaacccaaagcaacaagggggttgaggagtatttcaaggaaatggatgtgctcatgattcaagcaaatattgaagaagatgaggaggtaactatggctcgattcttaatggtctgctaatgatattcgcgatattgttgagctgcaggagtctgttgaaatggatgatttgcttcacaaagcaatccacgtggagcaactatta

SEQ ID NO: 11404 - DNA, 271 bp, Glycine max
agaaattcaaatggtcataacttatcacacggagggccgatttaggtgcataataaatcgagacgctcgaaattggacaatgaaagctcttgagaaacccaaatggtcataaggtatcagtcggggggtccaattcaggcgcacattatatcgagaagctttaaattgaataacggaagctatcgagaaactcaaaatgtaataactagccacacggaagtacgattcaggcgagtaatatatcgagaagcttgaaattgaacaacaaaaa

SEQ ID NO: 11405 - DNA, 312 bp, Glycine max
agcttgtaatcgattacgcattgcttataatcgattaccagaagttttttaaactttttataacatcctttaaaaatttgaatttaaattttaaagcttgcaatcaattacaacttgtgtgtaatcgattaccagacatgaaaattcaaatttcaaatctgaagagtcacaactcttcagaaactaactgtgtaatcgattacaacaattatgtaatcaattaccagtaaggaattttcgaaaataactcccaagagtcacaactgttcaagaagtttttgaatggctatcaaaggtctataaataggtgac

SEQ ID NO: 11406 - DNA, 313 bp, Glycine max
agcttatgctgcaaatatttacatttgacctcctcaacctcagcagcaaaatcaaccacagcagagcaattatgacctttccagcaacagatacaaccctggatggaggaatcaccctaacctcagatggtccagccctcagcaacaacaacagcagcctgctccttccttccaaaatgctgttggcccaagtagaccatacattcctccaccaatccaacaacagcaacaaccccagaaacagccaacagttgaggcccctccacaaccttccctcgaagaacttgtgaggcaaatgactatgcagaacatg

SEQ ID NO: 11407 - DNA, 433 bp, Glycine max
  unsure at all n locations
atgtatntatacatnnatttgattatttcaataaaaaatctaacaaggctgcttcaaatgataaacatttgcttcaagaataattcaagattgcttcaacaaacaaagccttgttgcaagattcactaaagaccaagccttgccttaaaacaaagtgctttcaagacatgcaaggctctggtaatcgattaccaggaagtgtaatcgataaccagaagacatgattgagaaatatcttgtgaaaaaggtgaanttaaattttcaacatgtaatcgattgccatatgtttgtaatcgattaccagcaacaaaactttggatattcanattcnaaagtcataaccccttcaattataactgtgtaatcgattacacacacattgtaatcgattacccagtggaagttttcacaaaatctggcaacagtcacatct

SEQ ID NO: 11408 - DNA, 310 bp, Glycine max
agcttatattcacaatgttgactgattgtcttgtattctcatttcttctatttcttatttttttttttatagatatgtagagcagtagcttatattcacaattgtattggagtgtctcacagggacataaaagatgatgtcatgcttgctttcttcttgaaaataaattgaaattctgatactgaggacagatgtcgtacaggatgtcacgacatcccgcttcagaacatgcagattatatatgacagtatgaacagattaaacaagtaaataacacaagagaattgttaacccagttcggtgcaacgtc

SEQ ID NO: 11409 - DNA, 516 bp, Glycine max
  unsure at all n locations
acactatgatactaagcttctagtttagatgatgcagatgggcttgtagctacctcatgcactcctctaatgactatggcataatttctggcgataaactgttgggagttggaagccatcttctcaattaaatttctggcttcagcaggagtcatgtctccaagggctccaccactggcagcatctatcatacttctctccatattgctgagtccttcataaaaatattggagaagaagctgctctgaaatttgatggtgagggcaactggcacatagtttcttaaatcgctcctagtactcatacaggctctctccactgagttgtctaataccttagatatctttcctgatggttgtggtcctggaagcagggaaaattntttctaggaatactctcttaaggtcatcccagctcgtgatggaccttggagcaaggtaatacagccagtcctttgccactccctctaatgaatgaggaaaagctttcagaaatatgtgatcctctcggacatct

SEQ ID NO: 11410 - DNA, 309 bp, Glycine max
agcttaagctccttcaactgcacttggctcttaatatttgaagagtatccttgtggaaccttcacctgacgaagacactgacaaaaacttatcttctccttcttggacaaagtatggcaggctgggggcaagtaaattttcttcccatcagaccttggatgcaactatgctcttatacccatatcagctagatcttgacgggtattcaagccatccttcgtcttgccttgaatgttaaggagcatcccaatcacactgtcacaaacatttttctccacatgcataacatcaatataatgtctaacgtca

SEQ ID NO: 11411 - DNA, 392 bp, Glycine max
gcttgcttcccagatctgcttgtgattggcagcagtgtataggaaattcaaaggttcaaacagttcatgataactgagtttgaaatgacagatctagggaagttatcacacttccttggattagagattaatcaagttcagaagggggtgtttatgcaccaaagcaggtatgcacaagagatcctcaaaaggtttggcatgatgaattgtaattttgtttcaacaccagctgaagctggactcaagctggaaaatgacccataggaagagctggttgatgcaatagaattcatgaagctaattggatccttgagatacttgtgcaatagcagacctgatatttgtttgcagtagcctaatcacaggttatgagggaaccaaatgtcacacat

SEQ ID NO: 11412 - DNA, 425 bp, Glycine max
  unsure at all n locations
ttctttagtccagtcttcttctggcttcaattcatcagtgggctttccttctgtgtccagcatcttgggatgttcccagcctttgatgacagctttccaggttctgctatccagtgatttgaggaaggccaccattcttgctttccagtattcatagttgcttccatcaagaattggtggtctgttcactggtccgccttctttctccatgttcatcagaatntatctccctagatctcactctgtgatttcgagtgttggctctgataccaattganattctgataccaggggacagatgtcgtaccggatgtcacgacatcacgcttcagaacatgcagattatatgtgtccgtatgaacagattaaacaagtaaataacacaagagaatngtaacccagttcgggcaacctccctacatctg

SEQ ID NO: 11413 - DNA, 430 bp, Glycine max
  unsure at all n locations
gctgagaggacttcacattgattcctatggcatcgaggtgccaaccgtacctgccatggaacccaataatcttgccacctgtcattggcaacgaaaaatatgtcccttgttcaactccaaatggtccatagagtttcttgttgctctcaaaactaagtgaccgaatgaagattggtccccattgatttaagctaccatagtatccatcaactgatgttaggaactcctctgggtaatcaagcttgatctgcagcacaatcataaatatttaatcgatataacacacgagtgtgatgagtaacaaccaaagaagcacanacacttcatgattgtatacacaaatgtttnttttgttattaacaaatgttaattgttagttnttcttggtacatgttagatatgtatctatgtnggacactctacggactac

SEQ ID NO: 11414 - DNA, 503 bp, Glycine max
  unsure at all n locations
tacctcatactccanataacaatgagctaattgtggtgaatttgattcatttaccttatctttcccagggagttagaagaaagaaaaaaattaatgtaaaaattacaagcccttcccttttagcaaattaactctcctaattaagatattgtactatatatcctaaaaatgtaatatgtatgtntttttcagcatcaaaatataatggtaaataaaagtcttgtgagagagtatatatatgctcccaacttgttcctgaaaatgacaaacatgatnttatggaaaacagtcatatntagctgtagttntttataatcaaatttgtcttaaaagtatgtntatataaaaaaatctaaaaacattatctttgaggtgattaacgtgagaatcttaagttntatgtntctcaatataaaaaaaatccaaactttaaatacttncaaattaaatttaataaaataaaatntatatcaacacataagttataataaatgttcatgaaa

SEQ ID NO: 11415 - DNA, 284 bp, Glycine max
gcctgaaatgtcttttttgatggtagtggtcctagatgcagggaagaatttctccaagaacaccctcttaaggtcatcccagctgaaaatagacctgagagcaaggtagtataaccaatcttttgccactccctccagagaatgaggaaaagccttttgaaagatatgatcttcttggacatcagggggcttgatggtgaaacaaacaatatggaactccttaagatgcttataaggatcttcacctgcaagaccatgaaacttgggcagcaaatgtattagtc

SEQ ID NO: 11416 - DNA, 292 bp, Glycine max
agcttataatatatcgaggcgctcgaatttgaacaacggaagctcttgagaaattcaaatggtcataacttttaactcggatgtccaattcatgcgcatcacatatagagacgctaaaaaatgaacaacggaagctctccagaagttaaaatggtattaagtttttacactgaggtccgattcaggcttataatatatcggggcgctcgaaattgaacaacggaagctcttgagaaattcaaatggtcataacgttaaactcggatgtcccattcatgcgcatcacatatta

SEQ ID NO: 11417 - DNA, 410 bp, Glycine max
  unsure at all n locations
tctagtaactcagcttgccatgaattagaaatctgcacctggtgcaagagtctgtggtctatgttcttctgcagatcaccatacagatctttgtccttctttgcagcaatctggagtcaatgagcaacctgaagcttatgctgcaaacatttataatagacctcctcaacagcaaaaccaacaacaacagaataattatgacctttcaagcaataaatacaatccgggttggaggaatcatccaaatctaagatggacaagtcctccacaacaacaacagcctgttgatcgaggccatacccgaatcaaataaacattaaaaatgcagtatctaggaagtgatcctaggtcgtctcccaatgagcaatggtcaaccaaatgttcataacanatagtaataaaatagtaac

SEQ ID NO: 11418 - DNA, 497 bp, Glycine max
  unsure at all n locations
gtctcacgactgtcacgtgctcatgctacatttgttagtcgtggctacacgagacatcttgccaaacaaagtcaggttaacgataacttgcctatgctttttctttcatgctatatgtagcaaagtcattgatccagtcatgtttgatgagttggaaaatgaggccgcaattatactatgccagttagagatgtattttccccttactttctttgacatcatgattcacttgattgtgcatctggtcagagaaatcaaatgttgtggtcctgtttatctacggtggatgaacccggttgagcgatacatgaagatcttaaaagggtatacaaagaatctatatcatccagaagcatctattgttgagaggtacattgcanaagaagccattgatatttgttcagaatactttgagaanggctaaacctgtgggcttnctgagtctcggcatgatgacagagtgggtggtaaggattcaagaggactgcangtgatca

SEQ ID NO: 11419 - DNA, 381 bp, Glycine max
  unsure at all n locations
gacgcttagaattgataatgcaatcccaaggcaaatttcatacgaccgtaactnttgatttgattgttcgattgaggctcataatatatcaaaacactctaaatttaaaacagaagcccaagacaattcaaatggttataacttttgactcggttatctggttgaggcccatagtatatcgagatgctcaaaattaaataagaaagcccctggcaaattcaaatggccataactntatactcagatgtccaattgaggtccataatatatcgagacgctcgatattgaataaggaagctctataaaaatataaacggtcataattgtaggatcagatgtccaattgaggcccacaatatatcgagatgctcaatactgaat

SEQ ID NO: 11420 - DNA, 507 bp, Glycine max
  unsure at all n locations
gcttcttagtctcactctcaacaattgtaaaagcaagtggaaaattattcttattaccatctttctcaatggcagtcaacaaagtaccatgatattttccagttaaaaatgtctcatctacttgtacaagtggcttacaatatttgaagcctttaatgcatgggttaaacgcccaaaatacacgattaagaatcaccctaggagacgcatccccacctttctccattgaagatggagttttgtagtttactatggtatctagtacaaaatgttgagcagctgtcaatcatacaagcaggtagctgtatgattgttcccaacttccaaatgtcatttcaagggctttntgtttgattgtccatgcttttttgtatgaacagtgtaaccaaaccgttgttgcatgtctgcaatcaaggttntgatttcgataccaggaatttgtttcactaaatgaacaacattatgagcaattacagaagagtctaacctagcatgatcttgtgatat

SEQ ID NO: 11421 - DNA, 484 bp, Glycine max
  unsure at all n locations
gtgtngaagggtgaaacttcctgctnttattgttgaccacagagtggtacctggagatatgtcgcggnggtcaggagaccttgnggacgtcaggtggggtgctattgcccaaaaccaagcttgaccaatcccgacccaacccgggcatagtcggtcagtgagaacctgtgatgtacctaagcaggcgagctcctggcaatcaacagataataggaacaaagaccacaaagncaggaggctngtggtggctggccagctgtngaatttgtgtgatatgtggagtatggcctctggtaatcgaataccaagggtgggtaatcgattacaaggcttanaaatgaagacagggggctaagatggtctctgaaattctgataccagnggacagatgtcgtacaggatgtcacgacatcacgcttcagaacatgcagattgtatgtgtccgtatgaacagattannaccagtaataacacaagagaattg

SEQ ID NO: 11422 - DNA, 501 bp, Glycine max
  unsure at all n locations
gcagactagcctactcgataattgcggtctgatgagaacagggactactcagaccaaagtagcatgtgctaccttccttctattcactcaagtgtttaaagatgtaaaaatgtatttgcattattaaaaaagttggttaaatttagatattagtatntaaattgtcaatagttataatatttttttaaaaattatccttaatattattagaatttattcattttttttaatctctataagaaagaaagagacaattcagaaacgttcaattataaattaaaataaataaggatatnttaattcaaaatcaattaatgcacaacataattgaaataaaatcttatgaaaacaatntattttttccaaattatttcttataaatagggacacatgaagtagtttactcccttgaaaatactaaaatngacctgagtggctttttcttacaacaatcttnngttttgaatataatttattttgtaagatgatcgaatattaaat

SEQ ID NO: 11423 - DNA, 455 bp, Glycine max
  unsure at all n locations
agctntgcagcaacanatgcagtagccataacatattcttcatttttaaacttatgttccccattgaggaattgaacaaggatgtcaatatgatatggtccaacataagaggcacatgtgtataggaatgaaaacaaacctgataaaaggatcccttgccatgttgacaagaataacaccttcgccagcttaagagtggtcacaatcctaacactaccacactctgactcaagtttgtttctaaaagttggaaaaaccccataagcactgtcatcagtagcaagaagtgggacgtcctgatgctctaatatcttctccttgcctagacttattaatggaccaatccatgagaaagtaagaatgctgataaaaatccagcattngaataacgggttaaantttcatttagtctactcttactggaatcagaattgtngcatacactagagtcacca

SEQ ID NO: 11424 - DNA, 337 bp, Glycine max
  unsure at all n locations
aggttatgaagtatttcggactatgtgcatccatgtctggacaacatatgtctgtatgtatgatttctaataaattagaactcctctatgcaccctctttagacttggtagtttgcttacccttaatgcaatctacacaagtctcataatcagcgatagtcanagtactaagtactccttcatttactaatcgcttgattctttcaatagagatatgtcctaatctccggtgccacaacatagaggattcttcattcacaatacatcgttttaacccaacagaaacgtgcatagtaagtagcgtcatttgctaatcaatcgaataaagaccatcaac

SEQ ID NO: 11425 - DNA, 372 bp, Glycine max
  unsure at all n locations
agcttccattgttcaatatcgagtgtctcgatatattatgcgcctgaatcggacctccgaatganaagttatgaccatctgaatttctcgagagctaccttcgttcaatttcgagcgtctcgatatattatgcgcctgaatcggacctccgagtgataagttatgaccatttgaatttctcgagagcttccgatgttcatattcgagcgtcttgatatattatgcgactgaatctaacctccgagtgaaaagatatgaccatatgaatttctcgagagcttccgttgttcaattatgagcgtctctatctgtgatgcgcctaaatcagacatccgagtgaacagttatgaccatgtgatattctcgagagct

SEQ ID NO: 11426 - DNA, 228 bp, Glycine max
  unsure at all n locations
gatagcccaaggactacagtacttgcataagggatgcaacacttgagttgtacattttgacatagagccaatacattcttttggatgagaagctctaccccaagatatctgattatgggctagcacagccttgtgctacaaatgatagtattatttccaggtctggtgccagaggaacattanggtatgtagctccagaacaattggcagaatttcacacaaatctga

SEQ ID NO: 11427 - DNA, 380 bp, Glycine max
  unsure at all n locations
tcttcgcgccgcaataaatgcgctagtctctcctttctattcatcccatgtganattattatcaaaaacaccagatcctctaattcaagtctgcaccaagtnttcctgagataatgtctggtcgtggaaagggtggaatgggtttgggaaagggatgtgcctagaggcacatgaagggtcttctcgacaacattcanggcattacgaaacctgcgattcgtacgttagcgagaagaggtggcgtgaagaggatcagtggttcgatctaccaggaaaccagaggggttctgaagatattcttggagaacgtgattcgcgatgctgtgacttataccgagcacgctacgaggacgacggctactgccatggatgttgtttat

SEQ ID NO: 11428 - DNA, 481 bp, Glycine max
  unsure at all n locations
gtaactntatgggatgcagtccatataggtcaaacatattcctagtagacaattatctgtgtctcaccttcatatagacatctatatctgggtcaggtttaatatttgcttctttctctcttctggacacctctgctagcaaatctgcagaatgtaaaataattttggttaaaacttgatattgcatatgaaatttttgcacggtatancaaatgcaatgctgtgggctaaccataacgagctccaactccttggacccgtgcggagaaggccaaggtntctctaactgtcatttctccaatatgaagatcatattgactgacataagcagcagttctgtggggacaaactcattcatcccatgaccattataagtcacctntccagtgaactgatcaataagtcaaaccttaatagctgcatatccanaactgganactacgagccaagcatgataacatcatttaacaattaaatatat

SEQ ID NO: 11429 - DNA, 491 bp, Glycine max
  unsure at all n locations
gctataagagatcatccnctagacaacattcttggttacatctcataaggggtaacttctagacgttctcttaaagatntatgcaataatatgacttctgtgtctatgattgaacctaagaatataaatgaagccataatagatgatcattggatagttgctatgcaagaataactaaatcagtttgaaagaaacaatgtgtgggaactagtagagaaacctgaaaactaccccatcataggaacaaaatgtgtatttatgaataagtcagatgaacatggcataatcattaggaataacgctagattagttgcaaaaggatataatcaagaagagagtaaagattatgaagaaacatatgcgtccagtgcaagattagtagccattagaatgctttagcttgtgcaccataatgacatttaactttatcaatggatgttacagtgctttctaatggctaatcaagagaagatatgtgaacaccccaggtt

SEQ ID NO: 11430 - DNA, 450 bp, Glycine max
  unsure at all n locations
ctgatctcaatcctgagcgtgtcgatatattacgagactcaatcttacatccgagtaataagttattgtcgtttgaatatgatacgaacttccattctcaatttcgagtgcctcgatatattacaggactcagtcgaacatccgagtaaaaagttatatgcgtatgaatttgctacgagcttcctgtttcaattaggagcacctcgatttattatgggactctatagganatctcaggtaaagttatcgtcgtctgaatttggtaagagcttccattctaaattcgcagcatgtcgatatattacgggactctgtcagacatccgagttaaacgttattgtaatttgaatattctacgagcttccgtttcaatttggtcctctcgatatgttactggactcatctgacatctgataagtattgtcgtgatttctacctctcatatcaatt

SEQ ID NO: 11431 - DNA, 481 bp, Glycine max
  unsure at all n locations
tcgatcctcttatcttcaaagcccatttctagtttctttcttcccatgtcaactacacagcttgcagttaacataaatggtcttcccaagattaaaggaatgtcattatcttcacagatatccattacaacaaagtctgctgggaagataaaatgttttactctgaccaaaacatcttcaattactccatatggtatggtaatggagcggtcagccaactgtaaagtcattctagtgggcatgatttccaactctcccagtcttctgcacatggagagtggcatcagattgatactggctcccaagtcaatgagagcttttcccactgtgacttcacctattgaccaaggaatggtcacactcccanggtctttgtgcttcggtggaaggaatttctggatcaccgcactgcaatttacctttcataactatatttcctggtgaatgtacttgtgcttcttttgtcacatgtctttaaaac

SEQ ID NO: 11432 - DNA, 286 bp, Glycine max
gtccaggttcctcagcagatagaaccagaacctcagcggttagtggcttaaggaagaaactgtatgacttgatggatgattttcaagggttgagggccagaatgcagaatgagtacaatgaaaccgtggaacgaaggtacttcaccataacaggagaaaaggctgatgaagacaccatacataacttgatatcaagtggagaaagtgagatttctcttcagagggcgattcatgaacaagggaggggtcatataatggacaccatatcggagattcatgagagaca

SEQ ID NO: 11433 - DNA, 353 bp, Glycine max
  unsure at all n locations
ctctgataaatctgccatatactcagccggtattaagcctcatgagctatctcatatccagcttactggatgtagtttgggtgacttcccttttagatacttaggagttccccttttatcatcgagattaaatgtatgtcattatgctcccttgctttccaagattactggcctgatttatggatggagcaagatgtctttatcttatgcaggtaagttacagttgattagagcagttattcaaggaatcgtgaatatctggatggagattnntcctttgccgcaatctgttctggaccgaatcaacgcttctcgccgtaattttctgtggggaaagcgaatattgcaaaaac

SEQ ID NO: 11434 - DNA, 349 bp, Glycine max
  unsure at all n locations
gctcgctgggagcttcatggaggctggatctgtgagcttcaatgatgtcctttatgttagactagtggcctcagatatcttaagaaggaggtggggttgaattaatatattacaacttatttccccaattaaaaattctacttaactttctattcaagttataaattcccttaataatgaatctcttaaataatgattcataagaagaatctgaataagactataaaacacatataaatcatggagtttatgggaagagaangtgcaaactcagatttatactggttcggccacacccttgtgcctacgtccagtccccaagcatcccgcttgagagttccactatctt

SEQ ID NO: 11435 - DNA, 381 bp, Glycine max
agtcacctgccgcatgcaagctttcacccaacaggcgaatgaagattgcatttattggcacatctgagtttgacagtgcaccgattcctttgtcaggtcatgaagtttttgatcgggtgaagaacatcgttactatatatgggaaaacacaaaaataggatgggtcccacaaccagctttggaagaaaaagtctatatatttttatctgccttactggtcgtcattagatgtgagacattgtttagatgttatacatgttgagataaatgtatgtgatagtctagttgggacactgctaaacattaaaggcaagacaaaagatggtttgaaatgccgctcagatttagtagagatgggcatacgacaacagttgcacccag

SEQ ID NO: 11436 - DNA, 541 bp, Glycine max
  unsure at all n locations
ttgacaggtgataactcataactgaatgtgtangctggcatccctgtgtgataaggtgaaagaccttcacgctaatgtgagtgatgttgaggtgggtgataaggtgaaacaccttggataagattaanatactctctaattattttgttttctgattntaattttagtgagagagaatgggtatagagactaacattattggtcccatcttgcttcgtagtcataccttntcataatcgatcacttatatattntttgatgttaaataactacaaatgtagctaagacttaaaattttaattatttatctatntgatttaatgtctagntctatttttattntctaaattaanaaatactttgatcgattcatatgtgtgtattatatcagtntatcactataccattcatttgtatatacaaactaatttatgntgttgtcttctttttgtactcgaatacactannattagacttcatctatgtactcctctatttacatggtatcatgttttaatatacacatttgttgtaaatacct

SEQ ID NO: 11437 - DNA, 501 bp, Glycine max
  unsure at all n locations
agctntggagtntccaagtgccaattcgtcttcttctttattccagacttcttctggcttcaattcttcagtgggctttccttctgtgtccagcatcttgggatgttcccagcctttgatgacagctttccaggttctgctatccagtgatatgaggaaggccaccattcttgctttccagtattcatagttggttccatctaagattggtggtctgttcactggtcctccttctntctccatgttcatcagaatttatctccctagatctcactctgtgatttcgagtgttggctctgataccaattgaaattctgataccaggggacagatgtcgtaccggatgtcacgacatcacgcttcagaacatgcagattatatgtgtccgtatgaacagattaaacaagtaaataacacacgagaatggtaacccagttcggtgcacctcacctacatctgggggctccaagccgagaggaaaccactctaatagtgtagttc

SEQ ID NO: 11438 - DNA, 403 bp, Glycine max
  unsure at all n locations
tgcctccatactcgcgttgccaaactttcaaatatctgttgaaagtgagtgtgatgcttcaaatgttgtgattgtggctgtgttgatgcaagaaggccatccaattgcttattttagtgaaaatttaagtggtcctacccttaactagttaacttatgantaggagttgtatgtcttattacgagacttgaaaacatggcaacactacctttatcccaaggaatgtgtcattcatagtgaccatgagtccctcaaatatatcaaggggcaaggcatgcttaacaaaaggcatgcgaagtgggtggaattcctatagcaattcccttatgttatcacacatataaagggaagaggtaatattgtagccgatgctctttctcagcgtcatgcattactttctatg

SEQ ID NO: 11439 - DNA, 423 bp, Glycine max
  unsure at all n locations
agctntgggctcagtggccncggtcacgtctattctttacatggagaagggccacgacgcttccaggatgttcgaaggcaagggcggagcgttgacgttgtctgcaaatgtatgacacttatggcactttctcacgtggatgcaatagtcactctccatgatgagccaataatagcccgccctcaggatctttctagccatggcgtgcccgttagcgtgtgttccaaaggaaccctcgtggacttccactagaatccgcttagcctccttagcatccacgcatcggagtaacaccatgtcatggtttctcttgtatactatgtttccacttaagaagaaaccggttgccaatctccttaacattctcttgtcgttggtggaagcctccgatgttcttgagcccgaaagacatctncttataat

SEQ ID NO: 11440 - DNA, 510 bp, Glycine max
  unsure at all n locations
agcttagcttgtcccaaggcttcatgtagacttgtccaatatcgcgaagtgaacctcggatccctgtctgatacaatactagaaggaattccatgcaaccttattacttccttgatgtacaactctactagcttctccattctatacttcatattcaccggaataaaatgagcagatntggtgagtcgatctactatgacccacaccgcatcatgtccacgactagtcttgggcaaactagatacaaaatccatagatatgctctcccatttccattccggaatttccaatggcttcaattctcccgatggtcgttggtgctcagccttagccttttggcatgtcaaacatcttgctacgtattcagctacatctttcttcatgccatgccaccaaaaacttctcttcaaatcttggtacattntagtcattccaggatggaaactaagacgaactttatgagcttcttccaagatcttaactctcanatcatctaaagatggcacacat

SEQ ID NO: 11441 - DNA, 463 bp, Glycine max
  unsure at all n locations
agcttcttagtntcagatgatgcagatagggttgatctacctcatgcactcctctaatgactatggcatcatttctggcactaaactgctgggagttggaggccatcttctcaattaaatttctggcttcagcaggagtcatgtctccaagggctccaccactggcagcatctatcatacttctctccatattactgagtccttcataaaagtattggagaagaagctgttctgaaatctgatggtggnggcaactggcacatagtttcttaaatctctcctagtactcatacaggctctctccactgagttgtctaatacctgagatatccttcctgatggctgtggtcctggaagcagggaaaattntttctaagaatactctcttaaggtcatcccagctcgtgatggaccttggagcaaggtaatacagccagtcctttaccactccctctaatgagtg

SEQ ID NO: 11442 - DNA, 422 bp, Glycine max
  unsure at all n locations
agcttggagaagggtgatttgggactatatacaaggtatgtgtgcaatgtactattgataattaaaaaataataaagcttggaaattattattcactgcatttaacttcctctcccacaaatgttgagtggttagggaacattaccagattgacaagaggtcgcggttaagaggctctgacaaacatctaagcaaggatcaaaagaatttaagaatgtggttatgttatgtgccgaaccccaacatcaaaatcttgtaaaagttcttggatgttgcattcaagaagatgaaaaattgctcatatacgaatatatggcaaataaaagcttagaggtctttctttttggttagtttctctaaatttaactgggtaattaatgtaagatngcattttgttcttacaattggttgcaaattaatta

SEQ ID NO: 11443 - DNA, 442 bp, Glycine max
  unsure at all n locations
agctangagcaccttttcctcacttcttccttcattgatgggttgagccttctctagggttgtatgattggtctatagtctccttccatcattntcttgtgcatgtagttggcagggctgattcctttaagatctaatatgtgccacccaattgcttccatgtgtcccttgaggacctttaccaacctattctcttcctctgctgttagctcactgtgatcaccacaggctnggtctcgctctcctccaagaacacatacttcaggtggttgggtaggatcttcaactccaccttggtcttctcggatggactcccacttnttaattcttcaaagctggtcccccttgcaggaatgttttcttcatgatctaagtcttccaagaaagtcctcagatccttttcctcttcaatagttagataatccacaacattgatcaaagc

SEQ ID NO: 11444 - DNA, 460 bp, Glycine max
  unsure at all n locations
aagattccttaagaagctagagcttagctacacatacctctataatagctaagctcacctccttgagatgagaagctagagcttanctacacaccctctataatagctaagctcaccctcatgacaaaaaacatgataataacaaaaaaaagtccttattacaaagacaactcaacatgccccgaaatacaaggctaaaaccctatactactagaatggccaaaatacaaggcctagacgaaggaataacctattctaatatttacaaagataagcgggctcatacttagcccatgggctcgaaatctaccctaaggctcatgagaaccctagggcctntccttggatctctagcccaatctacttggagtcttctagccaatgcccttgcggggtaggattgcatcanttactttcactcagatgtgcgattcaggcacatcagatatcgagacgctcg

SEQ ID NO: 11445 - DNA, 490 bp, Glycine max
  unsure at all n locations
agcttctaccattcaattaaattatatttctcctcacacatcaaatattcacttagtgtatgtgaattacanaactacccctaatacaaaaactagtctaagtgccctaaaatacaaaggctgaaaaatcctatatttcttgggtcccctacctacattatggagccctaaatacatgacccaaaattaatgaaaccttaatctaatatgtacaaagataagtgggctcatacttagcccatgggcccgaaatctaccctaaggctcatgagaaccctagggccttctcttgcatctttggcccaatcttcttggagtcttctatccaatgcccttgaggggtaggatngaatcacacagtttctatgaattctatcatctaagcaacaccaaanatcttgaaataaacttaaattcactaaattgcttaatgtggaacataactaatataactcgaaccaattcattacaataaataagggtaacttac

SEQ ID NO: 11446 - DNA, 476 bp, Glycine max
agtcacctgcggcatgcaagcttctttggagaaacttccttgagaagctagagcttatctacacacacccctctcataactaagctcacctccttgagaagcttccttaagaagattccttatgaagctagagcttagctacacatacctctctaatagctaagctcacctccttgagatgagaagctagagcttagctacacaccccctataatagctaagctcacccccatgacaaataaacatgagaataacacaaaaaagtccttattacaaagacaactcataatgccccgaaatacaaggctaataccctatactactagaatggccaaaatacaaggcctggacgaaggaataacctattctaatatttacaaagataagcgggctcatacttagcccatgggctcaaaatctaccctaaggctcatgagaaccttaggggccttccttggatctctagcccaatctac

SEQ ID NO: 11447 - DNA, 299 bp, Glycine max
  unsure at all n locations
aagctcctaatatctcccacactntnntgggtgggccattcttggatggccttgattttctcagggtccacttggaccccatntctaccaactataaaccctaagaanactatattatctacacaaaaagtacacttctcttatattgcatagagggtgtntntcctaaggactganagaacttgcctgagatgtcctaagtgatcatctaggctcctactgtacactanaatatcatcaacataaacaactacaaatctacctatgaaatcccttaagacatgatgcataagcctcat

SEQ ID NO: 11448 - DNA, 406 bp, Glycine max
  unsure at all n locations
cctgttcctccctaccttacatgtttcatcanacttgtttctgaacacccactntgctccaacaacagaatattccttggggagttctacaagctcccatacatcattattctgaaactggtctagctcttcttgcattgctgtgacccaatattaatcagacatggtatcatctatgtngttttgctcaatctcatatagtaatgttgtgttcttaagagagatccttctctgtactttgtccataggatcacatatgatctangctctagatgttgtttcctcaacaggcatccagttggttctctggcctcttcaggttggttgtccactggtgagttagacgcaagttggttctgactctacacaacagtagacttaacaatatcctctatcttcatttatg

SEQ ID NO: 11449 - DNA, 521 bp, Glycine max
  unsure at all n locations
agcttgtanggttaaagtctcacgatggtcacgtgctcatgtcttaattgttagccgtggctatacgagacatcttgccaaacaaagtcaggttagcgataactcgcttgtgctgtttcttccatgctatatgtagcaaagtcattgatccagtcatgtttgatgagttggaaaatgaggcagcaattatactgtgccagttggagatgtattctcccnctactttctntgacatcatgattcacttgattgtgcatctggtcagagaaatcaaatgttgtggtcctatttatctacggtggatgtacccggttgagcgatacatgaagatcttanaagggtatacaaagaatctatatcgtccaaaagcatctattggtgagaggtacattgctgaagaagtcattgannatttgtcagaatacttagagaaggctaaacctgtggggcttcctgagtctcggcatgatgacagagtgggtggtaaaggttcaagaagactgcatgtgatcactccaagt

SEQ ID NO: 11450 - DNA, 396 bp, Glycine max
  unsure at all n locations
tctatcctccctaagatggagtcaaacccagtcaccgtcattaagaactagcttttttcttcctctattgcctntagttgaatacacctttgtttggttcttaaccctctcatgcaacttctttacaactctgacctggattccccttctttatgcataaaagaagtgtccagttggaggggaataaggtctaacggtgttaggggattgaacccatagacaacctcaaaaggggattgcttggtggttctataaacccnctattgtacgaaaattctacatgaggaagatattcatcccaagacttatggttgcctctcaaaagagcaccttaaagggtggataaagacctatttactacctctgttcgcccatcagtttgtggatgacaaagtg

SEQ ID NO: 11451 - DNA, 390 bp, Glycine max
  unsure at all n locations
atgcaaacatgcaataaatgaaactccaattcagattggagaatagcataaaaaatactcaattaattaatttggtccaggttttgttcttttaacttaaggtaacaattattgcatanggtttatgttgaaatggaaattgtttgttgacgacatgttgcttgttggtttggtggatcaatcangacgctaangaacaggaagagaagagggccactactcagttgatgtttgatttgggttagaaggcctatgggaagggctcctatggacatgccattgaatttcttgaagttgcactcactatcatnacccaggcctacattattggtggtgaggttggttctttcttgcccaaacaagaatttntgtctgattgtggaacgagga

SEQ ID NO: 11452 - DNA, 128 bp, Glycine max
cgagtgtctcgatatattatgcgcctgaatcggacctccgaatgaaaagttatgaccatttgaatttctcgagagctacctcttgtcaatttcgagcgtctcgatatattatgcgcctgaatcggacc

SEQ ID NO: 11453 - DNA, 405 bp, Glycine max
  unsure at all n locations
agctagccatgaatngtttcatgtgtactattaaagatgctggcataatcctgtcatataacacaaccataaactaaaataagcatatgtgatcagtgtcaaaataaaatgcaaccatttacaaaaccaatcaagaaaataagaatagattattacagctaaccaatcaacaagcctttcaggtagccatgcttgagattgcttgtccacataaaatatttcaattaactcccacgcagctttcaaagatgtaggctcttcacctctctatattatgtgtaatgtgttaaaaagcaagtgattaacttctcggtatcataattcccacaaagcagatctcagctcagctaaacacggtanaacaatntagaacctanaacagtaccttagcaattacatttgggt

SEQ ID NO: 11454 - DNA, 343 bp, Glycine max
  unsure at all n locations
tgtatttctctctaccagaagcanaaatggttttaacagctttcagaatagtgtgaatctgacaattaaaaagttgtaatcgattaccagtaacgaaaaactttgaaattaaaactgagaaggcataactcttcacaattaactgtgtaatcaattaccacacatctgtaatcgattaccagtgagaaatatttaaagataactctgaaaaatcacaactcttcacaagttgttngaaaggccaccaaaggcctataaatatgtgacttgtattcgaaattctntagaacattcattgtcctatcttctcacaagagaatctttggcaatcacttgcaaatca

SEQ ID NO: 11455 - DNA, 244 bp, Glycine max
agctttagtgtgttcttcgagcttctctgcgaaaccaaaagtatgtgatgcaatcctaccccgcaagggcattggatagaaaactccaagtagattgggccagagatgcaagagaaagccctagggttcttatgagccttaaggtaaatttcgggcccatgggctaagtacgagcccacttatctttgtaaatattaaattaaggtttcattatttttgggccttgtatttagggctccataat

SEQ ID NO: 11456 - DNA, 265 bp, Glycine max
  unsure at all n locations
tgagcaactatgcatcaacctaacgaatgataagttgccacaacattntaatcacgcaaggttataacttcataatacaacttgaacatcattattaatgaaaatacataagatagaagagatgcatctgtttcaacagcatgtattccagatggagcaagaagagtacacacaggaggaaatcaataggagctatgtagaatctgtggataatcacgatgttctcgatcttattgagaacgtagntagatacttctgaatcatc

SEQ ID NO: 11457 - DNA, 299 bp, Glycine max
agctttaggcgatagttaaactagaacactttttggccaatatggaactccttcctaagaatcctagagtcatgaatcctcttcactttctctttgtagatcttggatttctcataggcttctaagcgaatctcttcaagttcttgcaattgaagcttcctttccatacccgcttcatcaaatgccatgttacaacccttcaccgcccaataagtgcagtactcaatctccaccggaagatggcatgccttaccaaaaaccaccatatagggagacatccccaaaggtgttaggtaagc

SEQ ID NO: 11458 - DNA, 308 bp, Glycine max
  unsure at all n locations
tgagagatgtcttaatattgtttctattagaagtgatcatggaggtgaattataaaatgattattttgacanagtttgtggagaagatggaattcaccacagacctcaataaaatggtgttgtggaaaggaaagatagatcccttgaagaaggagctagaactcttctaaatgaaacaaagctaccaaagtacttatgagctgatgttatgagtactatctgctatactttaaataaggttcttataagacctattctaaggaaaactccttatgaactntacacaggaagaagaccaaatatatctc

SEQ ID NO: 11459 - DNA, 292 bp, Glycine max
agcttcttttaccacctttattaatctattcacatttttaaaaatctacattatttatgcagattatgttgtcataatctcgtgtgtcattttgatggtccttttcttcattcaacatcatgggacacatagagttgccttcatggttgccccactacttgcaaaatggcttttgtgcattagtggtattggtgtatacaacagattctactggaaccgacacatataccgtgcactttctccactctacatgttgaaattcctcagagccactggcattgaaggatggatg

SEQ ID NO: 11460 - DNA, 314 bp, Glycine max
  unsure at all n locations
ctaagctatgctgcatatattacaatagacctcctcgacctcagcagctaaatcaactacagtatagcaattatgacctttccagcgacagatacaaccctggatggatgaatcaccctaacctcagatggtccagccctcagcaacaacaacagcagcctgctccttacttccaaaatgctgctggcccaagcagaccatacattcctncaccaatccaacaacagcagctacgccagagacagcccacacttgatgcccctccacaaccttccctcgaagaacatgtgaggcanatgactatgcataacatg

SEQ ID NO: 11461 - DNA, 202 bp, Glycine max
tcttttccattattcaatgcaaaaccattacaacccctgatcttaaaaggagagatgttcggttttatgccattgaacaattcatatgtagttttctttgggaggggtcttattaaagccctatttaaaatgtagcatgcagtgttaacggcttcagcccaaaagtattttggaagaggagtatcatttaataaagttctag

SEQ ID NO: 11462 - DNA, 276 bp, Glycine max
  unsure at all n locations
catatattcagatccttgagaatgaccacggaagctctcggcanattcaaacggccatatacgttgactcgaatgtatgatcgatgcccatgatatatcgagacgctcaaaattgaacaacagaagctctcgagagattcatatggctataactnttctctcggatgtgtgattcacgtgcatcatatatcgagacacttgaaattgaccattgaagctctcgacagattcaaacggccataactttagactcgaatgtatgatcgacgcgcatga

SEQ ID NO: 11463 - DNA, 297 bp, Glycine max
  unsure at all n locations
catgtcacactgaagtccgattcaggtgcataatatatcgagacgctcgagatagaacatcggaagctctcgagaaattccaatggtcataacttttcacacgaaactctgaatcaagcgcataatatatcgagaagcttgaaatngaacaacggaagctctcgagaaactcaaatggtcataacttatcacaccgatgttcgattcacgcgcataatatatcgagacgctcgaaattgaacaacgtatggtcgcgagaaattcaaatggtcataacttgtcacacggatgtccgat

SEQ ID NO: 11464 - DNA, 291 bp, Glycine max
agcttgattaatcttgttaatcatgtagctctgcagatgatggagaatgatgtggttgctgttgttggtccactgtcatctggaatagctcatgtcatatctcatgttgttaatgaactccatgttcctcttttatcatttggggcaactgatcccactctatcttctctacaatatccgtatttcgtccgcaccactcagaacgactattttcagatgtatgcaattgcagactttgttgattattacagatggaagaaggtaattgccatttacatagatgatgacaat

SEQ ID NO: 11465 - DNA, 295 bp, Glycine max
agcttgtcagaattctgggactgttgttgattcaattgggtagccaattgtcccatctgattggttaagctctgaatggaggctctggtctcttgctgaaactgcatgttctgcatagtcatttgcctcacaagttcttcgagggaaggttgtggaggggcctcaactgttggctgtttctggggttgttgttgttcttggattggtggaggaatgtatggtctgcttaagccaacagcattttggaaggaaggagcaggctgctgttgttgttgctgagggctggaccatctga

SEQ ID NO: 11466 - DNA, 246 bp, Glycine max
ctggtcttctatggccattagtagtgtgttcttcctcatgtctaccacacagcttgcggaggacataaaatgtctgacaagaatgacgcgaatgtcaccatcttcttcgatctctatcactaccaaatcatcaagaaagatcatatgctcgaccctaaccaaaacgtcttctatcactccatatggtctcgcgatggatctatcaaccaactagacggtcatgtgtgtgggcatgatctctatctc

SEQ ID NO: 11467 - DNA, 192 bp, Glycine max
actcggatgtccgattctagcacatcacatatggagacgcgcgatattgaacaacggaagctcttgagaaattgaaatgtcataacttttcactcggatgtccgattcatgcacatcacatatcgagacgctcaaaattgaacaacggaagctctcgagaaattcaaatggtcataacttatcactcggatg

SEQ ID NO: 11468 - DNA, 293 bp, Glycine max
agctttctaacccatggaagctcctaatatcttccacactttttggggtgggccattcttggatggccttgattttctcagggtccacttggatcccattgttaccaactataaaccctaataagacaatattatctatataaaaagtacacttctctatattttcatagagggtgtttttcttaaggactgaaagaacttgcctaagatgtcctaagcgatcatctaggctcctactgtacactaaaatatcatcaaaataaacaactacaaatctacctatgaaatccctt

SEQ ID NO: 11469 - DNA, 303 bp, Glycine max
tgtgtttaacattcatatattctcattgtaagcatatatggtctgtaaccttcaaccttttctatttgtgaaagcctggagagacttagtactccctctgttcctatctataagacccaagtttggaatggtgtttattcatttttataagaaccaatctataatgcttcttgcattatatattggtataataaaaataatcctcaataaaagaagaaagagaatgtattacaaatcatataagagagaagatattacgacaagatattttgaaaagtacaattaaggcaattatactataac

SEQ ID NO: 11470 - DNA, 224 bp, Glycine max
taaaatattctcaacaggcccatctttttacttgaatcttgaatggctgtcaaaagcctatatatgtgagacttgggacaccaatttgctaagagtttttcacaacaaaaacgtattatactcttaatacgcgaatcgttttatcctctcacacattccttggccaaattacttgtgagtcaataaggcattatttgggcgctcaaagagttcaatctatctct

SEQ ID NO: 11471 - DNA, 302 bp, Glycine max
agcttgccacactcacacgatactaatatacgaatatttataatttttgtgaggtggagcatatatcttagcattattggccataaatgtttattaaacaaatgtacaatatttagagaaaaccttatgtttatgttattattctaatcataagtcacacaatgatcaatttattagctttcataataaatatctcaaaaatgtattggcttttataataaatatcttaaaaattaatttaaactggtatgactatttaactctaatatttatgtatattttttaaataaaaaaacatgctt

SEQ ID NO: 11472 - DNA, 287 bp, Glycine max
agcttctatagaaggttcgtttctaatttctctacaattgcatcacctctcaatgagctggtgaagaaaaatgtggcatttacctggggtgaaaaacaagagcaagcctttgctttgctcaaagaaaagcttactaaggcacctgttctagctctttttgacttttctaaaacttttgagctagaatgtgatgcctctggagtgggagttggagctgtattgttacaaggagggcaccctattgcttattttagtgaaaaacttcatagtgccaccctcaactaccc

SEQ ID NO: 11473 - DNA, 300 bp, Glycine max
agcttgtaatctattacacaaatactgtaatcgattaccagaggagattttcaaaaaatattctcaacagtcacatctttttatttggttcttgaatgggtatcaaaggcctatatatatgtgacttgagacacgaatttgctaagagttttcagaaagaaaaggtcttatcctcttaaaaagcaaaatcgttttatcctcttacaaattccttgcccaaaacacttgtgattcaataaggaattatttgagtgctcacattgttaaatctatctctttcaagagagatttcttcttctc

SEQ ID NO: 11474 - DNA, 393 bp, Glycine max
  unsure at all n locations
atttaataaaataataataattagttgtaggaattattaaatttagtatatacaaattgtttgttgaatgaattaaattgactntacccaaagttacttttaaaataacacaattaaatataaagtatatatataaaagacagtaaaatagaaattttatattatacctacaatgaatatatgaaacanaaaatgaaaatacgactctatgtatataaaanacagaaaataacgcaagaaaagagagcaaaaagaattcgtcaattgtngcaaaataaaaaagggatatttntgttatntaaataacaatagcttcaacatgtatgaaaatgctgtctcgaggcangacatgacaatngaacatgcanacaatccgatcatagaaacattgaa

SEQ ID NO: 11475 - DNA, 295 bp, Glycine max
agctttacaaagttttcaaacattaatgaataaaaaataacatattgaagttgctattaacagacaacgagacttggtgaaaagagaatataggattcgtttgataacaacaattggctgtatttgatttctattgaggcaaggattggcatttcgtggtaatgatgaataagttcattcaaaaaatcaaggtaatttccttgagcttatacattttttggccaatcataatgaaaagattgataaggttctaaaaaatgctcgtggaaatctcaaactagtggcacctaatatt

SEQ ID NO: 11476 - DNA, 284 bp, Glycine max
agctttgagcaaattcaaactacaataacttttgaatcgaatgtctgattgggtctcataagatattgagacgctcgtaattgaaaacagaaggtcttagaaaaatcaaatgacagtgggttctaactcggatgtcctattgagccctgtgatatatcaagacgcgcgaaattgaaaaccgaagctctgagaaaagtcaaacgacaattacttttaactcggatgtccgattgagtcccgcaatatatcgagacgctcgtaattgaaaacagaagctctgagca

SEQ ID NO: 11477 - DNA, 431 bp, Glycine max
  unsure at all n locations
nttatcactccacccaaatcttgccttcaagtttaccaattataacactgctgacaaccgcgtgaaagatgtacacccctcatacaatggtgtgttggaatcacgttctattgtatcatacagaggtgcatgcgcttgctcaaaagtctcttgtccaagatcacagatcatttcctctatacgctctccgctgtcttcgtgtaccgcctgagactgagaaacagttggaatgtcggccgattccccatgccatatccattttgtgtaattcggaatgatgccgtaacatatcagatgtgatcggatttcatcaactgactgtcgtctaccattaagacatttaacacatgggcaaaaataattgcccctcaaactttcggcattaagttgcgtaaattgtagaaattgttccaccccgttctcatactcgt

SEQ ID NO: 11478 - DNA, 433 bp, Glycine max
tcaagaaaaagatggcctcagcaaattccttatttccatattggaattctatcaatagacctccaatctttaatggagagggttaccacaactggaaaacccgaatgcaaatttttattgaggcaatagatctaaatatctgggaagccatagaaatagggccttatatacccaccacagtagaaagagtttcaatagatggtagttcatcaagtgaaagcataaccatagaaaaatctagagatagatggtctgaagaggatagaaaatgagtacaacacaacctaaaagccaaaaacataataacatctgccctaggaatggatgagtatttcagagtttcaaattgtaagagtgctaaggaaatgtgggacactcttcgattaacacatgaaggaactacagatgttaaaagatctaggataaatgcact

SEQ ID NO: 11479 - DNA, 428 bp, Glycine max
tgtatgcaactgggcccatcctcgcgattattctaattggtccatagaaacgccttgaaagcttggattgactcgttcccgacaccgtggtttaccgatacggtctcaacttgactaggacccattcattcacttggaactcatgatctctacgatgcccatccgcgatttccttcatgcgagcctgagccttctgaagtttttgtcgaagtagggcaaacatgtcctccctctgactgagcaattcatccactgccgccaccgtagaagtgcccgtcaagtactgtggaaaacttggtggtttgcggccaaaagtgatctcgaacggcgtcagccctgtggctgaatgtgtggacgtattatacaaccactctgcccacatcagaaaatggccccatgcgcttggccggcgatgcacgaacgctcgt

SEQ ID NO: 11480 - DNA, 405 bp, Glycine max
  unsure at all n locations
cgctggcttctgcagaccaagaaaaannatcttttttcaatatttcatttagnggntnggctatggtgttatatctacacacaaaccttctataatagcctaccaaacccaaaaatcctctcaactgtttgggggtttgagaaagaggccaattcctaactgctgccaccttagcagggtcagtagagactccctctcccatgataaaatgtgctaaatactccactctagtaatatcctaaagtacgcacttatatttcttggccaaccatgcatttgctctcatggtagacaagactgtttgtaaatgatgcaagtgatcctccatgctcttncttgtaataagaatgtcataaaaaagaccaacagaaacctcctcaagtattctcggaacaccgaattcat

SEQ ID NO: 11481 - DNA, 275 bp, Glycine max
  unsure at all n locations
ggggctgcgcgaacgcagccctttttaccaattgataaagangcacngccaaagaggagaccttaggggacacccatcccaatgcaatgaaagtcagcaacatatgccataagccttcttgatcacccatccaccccatccaggaaagtatatattaatcgaagctggttggaccgtatatatactgtcaaccactgaatgcatccatgtttcagtacgacgtgggactaacaattacaacgttgcagaactatcaatactgtggattgacacac

SEQ ID NO: 11482 - DNA, 401 bp, Glycine max
  unsure at all n locations
gcttccttcatcgtagttatccacgaagccgtaatatttattctggtccaaangccaaaagattttaattcttcggttcagtacccaatatgcatttacatcacctaaaaggattttataaaaatggcgcctcttcctggaatcacccttgtttttatattgtttcctaggcctcaaaattctgccagcagtatcagctgacgctgattctgaacctgactgagactttaaaccacggttaacaatactttgactagaggatccaaaaaagggcaaaccatttaaacctttcatagaaaatccagtacagcttggatcaaaccttgaagatagcatcctagctgcattctcctcaagattttcctcttcatcttgcaaatcgccaggtattntacaacttg

SEQ ID NO: 11483 - DNA, 426 bp, Glycine max
tggcttctgcagaccaagaaaaattatcttttttcattatgtcatttagtggttgggctatggtgttatatctacacacaaaccttctataatagcctaccaaacccaaaaatcctctcaactgtttgggggtttgagaaagaggccaattcctaactgctgccaccttagcagggtcagtagagactccctctccaatgataaaatgtcctaagtactccactcgagtaatcctaaagtagcacttagatttcttggccaaccatgcatttgctctcatggtagacaagactgtttgtaaatgatgcaagtgatcctccatgctcttcctgtaaataagaatgtcataaaaaagaccaacagaaacctcctcaagtattctcggaacaccgaattcattaagccttgaaatgtggcaggagcatt

SEQ ID NO: 11484 - DNA, 433 bp, Glycine max
  unsure at all n locations
cttgagtctataggttatgaggtgaagtttgaggctactattgttggatgttgcctctgtttaatgacaagcaattacaataccattggagagtttgatgttaaagaggaagaggtaaaggaaggaagggaaagtggtattgcagtttacagagttgtggagtcatacctgctagagaacccacaagtgtatgcttaatcatctatttatttattgtgtcatgtatcataagatatacaaacatattcaaatttttaatagcagtgtgcaaccaaatatagggttgtttagaatggttgcaaagacttgaattccttaataagtccttattgtatgaacagcaaaaaaatggcgagtggtttggcaaaaatatttgtattttggtagtaacaaagagtccaagagtnagttgttttacctttacttcatgaat

SEQ ID NO: 11485 - DNA, 416 bp, Glycine max
  unsure at all n locations
tctaaactttatacaagtatgaagctctgataccactttttggacaagtggcctcagatatcttaagaagggggggttgaattaagatattaaaacttaattccccaattaaaattctatttcactttctattcaagttataaattcccttaataatgaatttcttaaatattgattcaaataaaacaatttgaatatgaatataaaacaataataaataaatgagtttaagagaagagaaaatgcaaactcagatttatactggttcggccacacccttgtgcctatgtccagtcctcaagctacccgcttgagagttccactatcttgtaaattccttttacaagttctaaacacacaaggacaacccttcctttgtgtttagaattctttcacaacaagagaccctcngtctc

SEQ ID NO: 11486 - DNA, 426 bp, Glycine max
  unsure at all n locations
tgtcttcaacaaacaaatcaaaatcaattttctgatcttcataacctagctccggcttcctcttccccatatcaactatgcagcttgcggtcaacatgaatggccttcccaatattacagggatgtcagtatcttcagagatatccattaccacaaagtctgtcgggaagataaaatgttttactctgaccaacacatcttcaattactccatatggcctggtaatggagtgatcaactaattgtaaagtcatttgagtgagcattatttccaactctcccaatcttttgcacatggagagtgacatcaaattgatactggatcccaggtcaataagagcttttcccacattgacttctccaattgaacaaggaatagttacactcccaggatctttatgcttgggtggaaggatctttnggatca

SEQ ID NO: 11487 - DNA, 420 bp, Glycine max
tgtaggtaaactagatgccttggttaatctggtaacctatctggccatgaataaaaaattttcacctgtcgccagactctatggtttatgctcctctattgaccaccacacagacctttgcccttctgtgcaacaatctgaagcaattgaacaacctgaagcttatgctgcaaacatctacaatagacctcctcaacctcagcagcaaaatcagccacaacaaaacaattatgacctctccagcaacaggtacaatcccgggtggaggaatcatcccaaccttagatggtcgaatccttcacaacaacagcaacaacaacaatagccttattttcaaaatgctgctggcccaagcagacatacgttcctccaccaatccagcagcaacaacaacaacaacaaccccagaaacaacaaaca

SEQ ID NO: 11488 - DNA, 424 bp, Glycine max
  unsure at all n locations
ntactgtgataataaatcatccatagttattgctaacttcctcatccaacatgatcgtacaaaacatgtgaaaattaacaagcatctcatcaaagagaagattgaagatggtattattgtctttccttttgtaaaatcagaacaacaacttgctaatatgttgactaaggcaatatcatctaaggcccttagtagttctcttgataagttgggaatgtgtgacattcatgcaccaacttgagagagagtgttagaatccattaactgaagggattagctatgatttgaatttaaattataattgatctaaatccctgtatattttctcctnttttatttgtgattntattttgatattttgtactaataatcatggaaaaatgatagaaaggattatgtatttattcattgtctcatattaatg

SEQ ID NO: 11489 - DNA, 426 bp, Glycine max
  unsure at all n locations
ctaataacatatatttattttcaagtttttaaaatcattaacattnngataatcaaagaacacgagtaaagaagtctcacattatgtggaactaagaaaactaaagaacataaaaataagaaaattataaatttaatgattaaaattttttccttaattgttgagaaaactcaagtctcatgtcagttaaaaataaaatcaaattaaaatatataagtgaagaacaattctcacactaatttttaggattgaattagacctaaattcatattctaagattctaagattctaagattgtgttaatgataatgtccatactttttagagtcaagttatacttaaactcacattctaagattaatataatctcaaatttaattacgcgtttttttcgtatntattgatagaaatcttaaaaattgaaaa

SEQ ID NO: 11490 - DNA, 396 bp, Glycine max
  unsure at all n locations
tagttcctagcttagctcttagggtgtcnctaagtggttaaggaacttagcatctccatctgacacaatggtcctaggtaaaccatggagtctcacaacttccctgaaaaagagttttgagatgtgagaagcatcatctaccttgtggcatggtataaagtgtgccatcttgctaaacctatccaccactacaaagatagagtctacacctctttgggttctaggaagcccaaggacaaagtccatactaatgtctaccaaaggtgcagatgggatggataagggtgttgatgtagctccatatggagcttgtaggccttggatatactttatcaatggagtcctttgcttcttgaagatcaatggcagccgaatggagatggaagatagatgatt

SEQ ID NO: 11491 - DNA, 432 bp, Glycine max
  unsure at all n locations
ttaatggaagttaagaaaatgaaattgcgttgatactcttaattgattattaggnttttgggctggttgaggacatcaatactatatttggaaagacccaaaagaacttgacaagtaaaaatttcatatggaagaagagatcgatatttttttatattccatactagtatgatctagatgttagacatagtattgatcttatgaatatggagaaaaatgtgtgacagtgtaatcgacatgcttcttaacactaaagggaggacaaaggatggtttaaatactcctcaatatctagctgagatgtgtatacgtgaccagttacgtccaaggtctgatggtaagaaaatatattagcctccagcatgtcatactttgtttataaatgagaagaacaagttttatcagtgtctgtgatgtgttaaagtaccacag

SEQ ID NO: 11492 - DNA, 430 bp, Glycine max
accagctatgactgaactagaatgaggggataaggatagtctttgacctttgtgagttgaattgatccgacgttcaatattttatccactaaatattaatataatttatggcgtaaatacttgagttgagaatcaattatttgagagatgaagtagtcagacaatccaaataattaagagacattatttttctgtcatgagcatctttaatgttaaacattagtatatcttcgctattaaacatcattagaccaatagagttgcctaactttatttttatgagctctattatataacatctttaataaatttaacaacttttttcactttttaataatgtaactcttcatatctaacttaaaatagatctaataaattattgtagatgtttatatttttttaataaggaattattttaatattaaaaaca

SEQ ID NO: 11493 - DNA, 340 bp, Glycine max
  unsure at all n locations
tcaatgttggatgaggtgatagaatatttgaagcagtttcatagcacagttgcagatgataaatagaatcaacatgtcatcgatgatgctgccattgaccatgcagcaacagcttcaaatgtcgatgatgtctccaatgggcatgggattagggatgggtatggggatgggtatgggaatggggatggatatgaactncatgaaccgngctcacatncctggcatccctccagtcctccacccttctgccttcatgcccatggcagcctcgtgggatgccgcggccgcatctggtggcggtgaccgacttctatggactcccgtcaacgtgatgcctgac

SEQ ID NO: 11494 - DNA, 427 bp, Glycine max
tgtatttttctcacatataggacatgtgttatggcctttgacactataaccacttaaatttccatatgctggatagtcattgatggtacaaaaaaccattgcacgcaacctaaaggtctctcgcagattcccatcccacatatctaccctgtgttcccaattttttgtcaagtcttctatcaacagagtcaagtagacgtcaatatcattccctggatgtcttagatccgctatcatcatgcaaagcattatgtacttttgcttcatgcacaacgaaggaggaaggttgtaaatcattagcaaaacaggccatgaactgtgattgctgcttaagttaccaaatggattcattccatcgaaagcaagaccaagccttagatttcttggctcattcctaaaggtctctcgcagattcccatcccacata

SEQ ID NO: 11495 - DNA, 318 bp, Glycine max
  unsure at all n locations
ntagtgagaagaaagaatagtttagttttataggaccatgatcaccacctaggacttgtcatggggaaaaaacctgaaggagacaaaggaaacagccctggcgaaagtggaggctgcggcccggagcctaaaatccccgactgtgcaaagggtgacaaagggaaatggggagtaaaacgagatggaaactgaatgccaggggacaacagtggtggataaccagactgaggggagagaaaattcatgtagccatttggtgaatgcaagagaaactgagaggttggagaaggtaaggtaaatatgacgccatttggttgt

SEQ ID NO: 11496 - DNA, 392 bp, Glycine max
  unsure at all n locations
atgagtatgtctgcgaatcggacatcctgtgaaaagntatgatcntttgaatttctcgagtgcttccgttgtttaatttcaagcgtctcgatattttatgtcctcaaatcagacatcggagcgaaatgttatgaccattcgaatntgtcgagagcttccgtttttcaatttcgagcgtctagatgagttatgtcaccgaatcagacatctgagtgaaatggtatgaccattctaatttgtcgagagcttccgttgttcaatntcgagcgtctagatgagttatgtcaccgaatcggacatccgttgaaaaagttatgaccattcggctttgtcgagagcttccgtggttcaatttcgagcgtctcgatatattatgctcccgaatcggacat

SEQ ID NO: 11497 - DNA, 455 bp, Glycine max
  unsure at all n locations
cactntgattctctggtttgtagtacagtaactacacttctccttcccttngaacttctcttagaagaaaaagctntatcttgaaatgcttagttttgccatgaaacactggatcattagcaattgagattgcagcctggttgtccacaaaaatatgtgtgctctcttcttggttcatatgcanaattgtcataattctcttgatccanagagcttgattcattgcagcaacagcagctacatactctgcttctgcagttgattgagctacaacttcttgctttntagaacaccaagaaaagactccagaaccaaaggaaaaacaataaccagatgtgcttctcatgtcatcaatacaacctgcccagtcactatcagaatatccatggagcttanattatgagaatgagagtacatataccatagtctaaagtgcgtcaacatatctaataact

SEQ ID NO: 11498 - DNA, 366 bp, Glycine max
  unsure at all n locations
atacacggatgtccggttgagtcccgtaacatatcgagacgctcaanatntagatccgaagctctggcaaaatttaattgacaataactttatacacggatgtccggttgagtcctataatatatggagacgctgcaaatngaaaacggaagctcataggaaattcaaacgacaataactctntactcggatgttcgattgaatcgggtaatatatcgagacgctcaaaattgagactagcagctctgagcaacatttaatgacaataactctatacacggatgtccggttgagtcccgtattatatcgagacgctctcaatngagaatggaactcttagaaaattaaaccacaataacttttact

SEQ ID NO: 11499 - DNA, 399 bp, Glycine max
  unsure at all n locations
gctcacctccttgagaagcttgcttaagagaattcctaaagaagctagagcttagcaacacacacatctctaatagctaagctcacctccttgagatgagaagctagagcttagctacacnacccctataatagctaagctcacccccgtgacacaaaaaagatgaaaatacaaaaagaaaagtccttactacagagactactcaaaatgccccgaaatacaaggctaanaccctatactactagaatggccaaaatacaaggcccacacgaaggcaaacctattctaatattacaaagataagcggctcatacttagcccatgggctanaatataccctaaggctcatggagaacctanggccttcctttgatctctagcccaatctacttggagtct

SEQ ID NO: 11500 - DNA, 305 bp, Glycine max
  unsure at all n locations
atctcgacatattatatgcccgaatctgacatccgagtgaaaagctatgaccatttgaatttctcgagagctctcgtngttcaatttcaagcgtcccgacatattatgcgcccgaatcggacatccgtgtgaaaacttatgaccctttgaatatctggagaacttccgctgttcatttcttagcgtctctatatgtgatgcgcctgaatcggacatccgtgtgaaaagttatgaccatatgaatctctcgagagctctcgatgtgtaatttcgagcgtctctatatattataagcctgaatccga

SEQ ID NO: 11501 - DNA, 362 bp, Glycine max
cctcaaggtggagcatataaattgtgctccaagcttggaacatataaagtggatccgaggacctctcaaggacttggtcaggatgtctacaagctggtcgttggagataataaattcggtactgatttctttggaccgtagcttttcccacacaaaatggaatcaatctctatggtgttagctctctcatgaaatacacgattagaagcgatgtgaagagctgtctgattatcacaatacaacttcatctattgaacaccacaattttaattcttgaagaagttgtttaatccacaccaattcactagtaacaagagccatagctctatattctacttctgcactcgatcaggcaacaacac

SEQ ID NO: 11502 - DNA, 445 bp, Glycine max
  unsure at all n locations
acttaattacaagatattcttatgcatagcagttatcagtgttcaaaactaaacctaattattagtaaattgctaaatcaatccaaaaaagattgaataccgcaatacccaaaaatctcataaagtgggcattcttttgctatctcatttgttctttggatcttgctataaaaaattgaaccaaactgaataaaccacataatttaattatattacattttattgtggtaattaataataatttattactcttcctttggttataaccaagatgcatatttcactcttatatgttaaaaaagaatgtactaatattgttaaaaatagtattaaatatcaagtgaagcacatattactataatgttaaacacagagagttggtaatatcattntatattagtgctacactgaagtganataacaatctttactaatatatatttac

SEQ ID NO: 11503 - DNA, 372 bp, Glycine max
  unsure at all n locations
ctaagctaagctccttcaactgcacaaggctcttaatattngaagagtattcttgtggaaccttcacccgacgaagacactggcaaaaacttatcttctctttattggacaaagtatggcaggctggnggcaaagtaaatttcttcccatcagaccttggatgcaactgtgctcttatacccatatcagctagatcttgacgggtattcaagccatccttcgtcttgccttgaatgttaaggagcgtcccaatcacactgtcacanaacattttctccacatgcataacatcaatacaatgtctaacgtcaagatcacaccagtacggaagatcaaagaanatggacctcttcttccatatgcaagtctgac

SEQ ID NO: 11504 - DNA, 382 bp, Glycine max
  unsure at all n locations
taatgtatctatatgtacatttattaatataaattntatatataaaagaaaagttaccataataaataattgtttttattaaatcaaataagagaccaataaaaaatttatccgaaaacacattanagaattaaattattgggtgaataattntttttatttcattgctataataatataaatatatttttatgaataattttatataaataaaattaatgtttaaaataaatntgtttagacaagttattatntaattttntaattatcatcttcctacttatgtaaactggtgatgaatatctcttacctacatanaatttgaatttatntatacattgatatctatatatgtaaagtggttaatatataaagtatatat

SEQ ID NO: 11505 - DNA, 393 bp, Glycine max
  unsure at all n locations
ttaaagatggctagatttgttaaacatatgcacttagtctatgaaggaaagctggagatgctgcacaagatgtccaacgttatgtcaaagaataatatcgggctgcacaatgcacaaagcaagataaaatgtcaaatgaagaattgaagcttgctgattcacgatgtcggatacaatgtccaggacatcctgcctgaaaatactggaattgctaaaagcattgaagctgcaggatccacgatgtcngattcaatgttcatgacatcctgcccgaaaatactggagttgctaaaagcacttgagttgcaggatccacaatgtcggattctatgtccaggacatctngcccgagaatactggacatattaatctgttatatctttacagattatt

SEQ ID NO: 11506 - DNA, 362 bp, Glycine max
  unsure at all n locations
atactctcatgtgatcaactcttggcttcactccactccatgcttcttgtggtggttgatctttgacattctnntgtggggagcgattggacaaataaacggcacatgcaacagcttcngcccanaattcctttggcatanttttagccttcaacatacatctagtcatattaagaatagttctattttttctctccgctaccccattttgntgtggagatctaggaaccgttagagggcgacgaatcccatatntttcacaaaattcattanattcttttgatgtgaattcgccacctctatcggatcttagagctnntgatacataaccactcttcttttcacaagagctcttaaaattt

SEQ ID NO: 11507 - DNA, 406 bp, Glycine max
  unsure at all n locations
tcttaggtgttatagatggaagtctcatggtggtacatctgttcaaaacatatgctgntgtggtggccgcttctccccggtagcaattnggtagtcctttccctttaagcatacacctagccatatctaatagggttctatatttactttctaccaagccattgtgtttaagtgtataaggagctattacctcatgttcaattcctttagtttcacaaaattctttgaactccttagagttatattcacccnctccatctgttctaaggatttntagcttcaattcagattgtctctcaactaatttgagagcgagagaatattgcacctttctctttcaatagatatatcaaaatactcttggttaattcatccacacaagtcaggaaatactgatgaggacatg

SEQ ID NO: 11508 - DNA, 404 bp, Glycine max
  unsure at all n locations
tccattntcattntcaagcatctcgatatattacgggactcaatcgaccatccgagtcaaaacttattgtcgtttgaaattgctcaaagcttctgtattcaatttatggcatctcgatatattaagggactctatcgaacatttgaggaaaaagttattgtcatttgaatttgcttggaacatctgttttcaatatcgagcgtctggatatatgatgggactcaatcggacatccgatgttaaaggaattgtcgtctgaattctctcagagtttcagttttcaatctcatgtatctcgatatacttaagacttaatcggacttccgagtaaacatttattgtcgtttgaattagctcagaacttcagtaattcatattaagccgctctgattaataaatgactg

SEQ ID NO: 11509 - DNA, 401 bp, Glycine max
tggacatcgcttcattttggtcgccatggattacttcaccaaatgggttgaagcggcttcatacgccagtgtgactaggagtgtggtggttaggttcatcaagaaaaagataatttgctggtatggtttgcctacgaagattatcactgataatgccacctatctgaacaataaaatgatgaaggaaatgtgtgaggatttcaagatccaacaccataattctatgccttgcaggcccaagatgaatggggcagatgaggctgctaataagaacatcaagaaaatagttcagaagatgatcgtgtcatacaaggattggcacaagatgctccctcttgcactacatggttattgaacctcgatacgcacatctactgtggcaaccccgttctctttggtgt

SEQ ID NO: 11510 - DNA, 352 bp, Glycine max
  unsure at all n locations
acatacctctctaatagctaagctcacctccttgagatgagaagctagaacttagctacacacccnctataatagctaagctcacccncatgacannaaaacatgaagatacaaaanagagtccttactacaaagactactcaaaatgccccgatatacaaggctaaaaccctatactactagaatggccaanatacaaggcccaaaagaaggaaaaacatattctaatatttacaaagataagcgggctcatacttagcccatgggctcgaaatctaccctaaggctcatgagaaccctatggcctaccctnggatctctagcccaatctacttggagtcttctacccaat

SEQ ID NO: 11511 - DNA, 364 bp, Glycine max
  unsure at all n locations
ttcattacaagatagcagaattcaccaataacaacatggatatgaagttgaatatttcaccaattgttttatacttattgttgactatatctggtacagctcaatcagttggcatcgatataaaaaaatttggcggaataccagatgcagatataacacaggtaacatctggttgaattcacttttaaaaaggttgaagattctattgattattattaattaccactattgtgttcgatttgaatatatatatatatattctcaaggctttcactgatgctctgaatgtagcatgtgcattaacaagngcatgcaaaattgtaattccaaatgggacatacaagatgaaagtcattgatgtaaa

SEQ ID NO: 11512 - DNA, 444 bp, Glycine max
  unsure at all n locations
gacaaagaaattaaagatattcaagatggatgatcatagacagtctctagagtcttaggaatggtatattaaataggaagggaattcctaattgaagtagcaaaaggtttggccaagaaatttaagttaaaaagtctttntcaagagatttactctctggtaatcgattaccagaggatgtaattgattaccagtggccaaaaatgatttacaacagctattaaaatttgaattcaaaattngcactgtgtaatcgattacacatatatggtaatcgattaccagcagttattgaacgttttatattcaaatttaaagcttgtaatcgattacacacatactataatcgattaccagaggagatnttcaganaatattgtcaacagtcacatcttttcatttggttcttgaatggccatcanaggcctatatatatgtgacttg

SEQ ID NO: 11513 - DNA, 346 bp, Glycine max
tctcggtatattatgcacctgaatcagacctccgggtgacatgttatgactcattgaatttctcgagagcttccgttgttcaatttctagcgtctcgatatcttatgcgcttgaatcggacctccgagtgaaaagttatgaccatatgaatcgctcaatagctttcactgttcaatttctagcgtctcgatatgatatacgcctgaatcggacctccaagtgaaaagttgtgaccatttgaagttctcgagagcttccgttgttcaacttagagcgtctttatattttatgcgcgtgaatcagacctccgagtgaaaagttatgaccattcgaatatctcgagagc

SEQ ID NO: 11514 - DNA, 373 bp, Glycine max
  unsure at all n locations
gtcacctgcngcatgcagctcttctggccagcctgaacaagacgttanagggttattatggaatgtgtcacatgccancagaataagaatagtcacaggcgcccagctggtgtactgcaacctttaccgacatcagagggcgtgtgggaagacctctctatggacttcatcacccacttgccaacctccaatgggttcactgtcatcctagttgtggntgatcgtgtntcgaaaggagtgcatctatgtgctctttccaccggattcacggcgttcaaagtcgcaagcctattcctcgatatcatatgccaactacatgggttccgcaagagcatcgtgtctgaccgggaccctatcttcatgagcaagttct

SEQ ID NO: 11515 - DNA, 364 bp, Glycine max
  unsure at all n locations
agatcactgtgtaactcttcaagatgcaattgaagganaaggaagaaagcaaggaaattagagaagtccacgagaccgaggtagaggtcattgtcacagtcgaggacaggttggatgtggcaatagtgaaagaggttcaaatttcatcaacaacagttgcgagataggaagaaattcaacaagagaacgtggaagaggctatgcaagcataaggtatgataaatctcaaactcaatgctataattgtcaaaagattggccactatgcttctaaatgtagattcgccaagaatagagttgaggaggagactaactatgtggagcaaanagacgagaagnttgaaacaatgctcctagcatgtgga

SEQ ID NO: 11516 - DNA, 416 bp, Glycine max
  unsure at all n locations
acatgtatctcgaacactataatctatgattaaaacatataacntctgaatataaattcatacatgcatatatgtcacaacacaaagtttccttgggtaatctgagttgaaatctttagggtgtacaactctaacttattttaattctacatcatataattagagactntaattagtcaccaactaattaaactaaaattctacttgtcaaaccagtatataagttattacaaaaatggtctccactttacactcttatgagttcattacnncctttctaattcaatggaatctagatcaccattaatcaaccttaattagtcctcagtaaattctaagtctacttacattaatttataatgttctttcacgcgtctaaattctatttctagaccaagatccaattattaacatct

SEQ ID NO: 11517 - DNA, 391 bp, Glycine max
  unsure at all n locations
cttctagaattgctngttagcatctcatttttaatgtattgcagagggggtatgatatgatatnttttcatgatatcatatttgaaggatatatatgggaattatctaaagctaattatgtcatgttggataactggattttttaaatgtagttatttttgtgtaaaataagaatgatattggtttgaacgaatgcagtatatgcagcatgatgtgctacatgtggacgattggcatgaacgatttttaaaaatattgtttaagcatattatatatagcagtgcatattatgctaatattcatcttgactcacaattaaattctatattcacaaaaataaaaattgtctgtatgtcaacaatgtagctggataacgtaatattacattata

SEQ ID NO: 11518 - DNA, 424 bp, Glycine max
  unsure at all n locations
aatatttttaaaggcttgaatattattgagtataaaggactatgaaattctatagtttttattgaatggaccttagatgtaacaaatactattgtttgggtgcctgtcaagtactagttacaatgtagtgtcatatcattacttaattgacgataaagattcaacacaaggtttgatatatcaagaaaataatgttacccaatcatttattgaagacccaaaataaanagattgtcatctatcaatgaattcaaacatatttatatctttcttttattaacaagaagttcacgtgtgaattattaataagctcttattaataacattatattgataggngcttattaacctgttacctaatatttttagaatttgaaactctttacccaatttaatttgatctagcacaaaatgtcacacaact

SEQ ID NO: 11519 - DNA, 337 bp, Glycine max
  unsure at all n locations
ctgcagcttacctatcacagctgcttanaagctctgctncctatggttcttaataactcgctattatactgtcctgaacagccatatagactcaaatatataagtgaattgaggcacaatatgctgttgggtaagcttactagactnttacagtcttccaaaatcaaatattcaagctctcttagaagaccgacggatggattgatatgcttgagatgtgtacatccttcaagagttagatgttgaagatttacgtcctctntgaaatgtggtaactcaacaagacttgtgcagtctttcaaattcaaataagccagctttcttagaagaccgatgg

SEQ ID NO: 11520 - DNA, 465 bp, Glycine max
  unsure at all n locations
agctatactgcanacatctacaatagacctcctcaacctcagcagttaaatcatccactacagaacaaatatgacctctccagcaacaggtacaatcctaggtggaggaatcatccaaaccttatatggtcgaatccttcacaacaacaacaacaacaacaacaaccttatttttagaatgttgctggcccaagcagaccatatgttcctccaccaatccaacaacaacaacaacaacaacaacaacaaccctagaaatagcaaatagttgaggctcctccgcaaccttcccttgaagaacttgtgaggcaaatgactatgcaaaacatgcagtttcaacaagagaccagaagcctcattcagagcttaactaatcagatgggacgaattgctacacagttaaatcaacaacaattccaaaattctgacagattaccttctcaatctgtctagaatcccaaaata

SEQ ID NO: 11521 - DNA, 301 bp, Glycine max
gtttcttgagagatcaataaaggaaagggatgtggaagatgaaatgtcatctggaattccaccagaaagactattgttagccaactctaacctttgaagcattccaagcttcccaagacccacaggaaccgtcccagaaagaaaattgttctgaattctaacacgaactagtgaaggacacattgataggcttgatggaattggaccagtgaatgcattgttgaatagtataagcatggtgagaatgccctggctgcaaagagtttctggaatctctccagagagtgaattggatgataca

SEQ ID NO: 11522 - DNA, 452 bp, Glycine max
  unsure at all n locations
tatctactacgcagctngtagttacatgaatggccgaccaagaatgagaggaatatatgcatcctcttctatgtctatcacaacaaaatcagttgggaatataaggtgtttcaccttcactaaaacatcttcaatcactccatacggtcttgtgatggatcgatttgccaactaaagggtcatgcgtgtaggcattatctcaagctctccaagtcgccggcacatgaagagaggcattagattgatactagctcccaaatctatgagagcttttcctatagcaacctcaccaatagaacatgatattgtgacaactccaggatctntgtgcttatgaggaaaaatgcattgaatcacagcactacaattgccttccaccataattcaatcattgtggatgtaccggttcttcttcgttaacatatcttttaaaaatatgcatagagtgacat

SEQ ID NO: 11523 - DNA, 378 bp, Glycine max
  unsure at all n locations
tacctcagctggtntcataagatcatgtntactccgtcgcacgttgagcaagttttgcacagcttgcccctctatggacatcctcacccgactagctcttactctggcctgaactcgaaccaatgcctgcatgcaccttaatgtccccgctgtctgcttcctcacctgtctccccccgaacaagtgcttgaatcctcaccactgccttcaatgccctcaaagcccttcttgcctgcaatcaccacacaagtgatgtcgaaatataaggttggtctagtggtaaaggccgaacgcataatgaaaaggtggagaggccatatgttagaaactaacaatcctagcaattaatatttgtctataaaaaaaaatagtgaatgt

SEQ ID NO: 11524 - DNA, 416 bp, Glycine max
  unsure at all n locations
cttagctcctaaaaatttatattgtttagttttttatttgattccagtttggcctcaattttaaatcagatattttgtctctctattttaaaacataaataattntaattcttgtgtgagttaaccatctcaagacaaatggttgactttgacgtgatatgaaatctatgtacgcaatttacataatacttattgtaaaaaagatttaataataataaatatagaaaaatatcttaatggaaatncaactaataatcctttataaataatgagagcagtcaataagatatgtgtcttagttagttaattacattaatattatctnttatgtattattatgtaagattatttcttttcaaatatcaaaattatattctaacaatattaatatataatatttttatatatgtcatata

SEQ ID NO: 11525 - DNA, 323 bp, Glycine max
  unsure at all n locations
tgacattccattgtgaattgatcactntgcatttctcaaagaaatcagcgattntgttgcttgattcctctccattgagggggtcaatgtggaagccggagaccccatcaacaataatntctgctggacctccttggttggtggcaaaagtgggcaagccacagttcattgcttcaatgacagttaatccaaatgcttcatacanagcangctgcacaaaggctcctcttgtgtcagcgatgcaacggtagagctctccattgcgatacctattcgtctgtgcagcaatccatctaaattgacccttgagttggtacttatca

SEQ ID NO: 11526 - DNA, 288 bp, Glycine max
  unsure at all n locations
actatattatctacacaaaaggtacacttctctatattngcatagagggtgtttttcctaaggactgaaagaacttgtctgagatgtcctaagtgatcatctatgctcctactatacactataatatcatcaaaataaacaactacaaatctacctatganatcccttaaacatgatgcataagctcataaggtgcttggtgcatagtgagccaaaagcatactaccattatacaaccaacttgtctgaacagtttcactctaccttttatctgattgtatacccttt

SEQ ID NO: 11527 - DNA, 371 bp, Glycine max
  unsure at all n locations
ctaatatgcttctcagntcaagaaaaccatggttacattcatcattgactttnggacaaggaatgctaccattactttctgcatgccacccagatcttgaccactcacgaactacagtctcagcaacagcatttggttcattntgttcaacagcatatggttcattgtgttatacacttatattatcctcaccatgcaggtaatcacgaccctgacagacaaactccaacataattggatctgcaccacctacaagctggccagttcgaagctcgcgacaacagatgagacanaggtcgaaagagcattntgtacagcttctgtggtaatcaaatattgacgttttgcagttgtcactacaagagagagcg

SEQ ID NO: 11528 - DNA, 260 bp, Glycine max
  unsure at all n locations
tagtgttgccatgttttcaaagcccgtactaaggcatacaactccttatcataagttgaatagttaagggtaggaccacttaacttttcactaaaataagcaattggatggccttcttgcatcaacacagccccaatcccaacattngaagcatcacactcaatttcaaaagatntttgaaagtttggcaacgcaagtatggnggcattagttagcttttgcttaagaacattgaaagcttcttcttgtttctctcccca

SEQ ID NO: 11529 - DNA, 369 bp, Glycine max
  unsure at all n locations
ctataaatagacctcccatctttaatggagtgggttaccattactagaaaacccgcatgcaaatttttatagagggcaatagatttaaatattttggaagccatagaacaaggaccttatgttccctctataatagctggaagtgcaacaatagaaaaacctagagcagattggactgaggaagaaagaagattagtacaatataatttaaaggccaaaaatattattacatctgccttaagaatagatgaatactntagggtttcanaatgtaaaagtgctaaggatatgagggatacactacaagtaacacatgaaggcacaacagaatgtaaaagatctangataaatactntaactcgtgagtat

SEQ ID NO: 11530 - DNA, 348 bp, Glycine max
  unsure at all n locations
acatatatgaataattaaaaaacaataaaacacaataccaaaagtaagtacataccactagtcatatatcattaaagtaattaagtttaaaacacataatcataaacaaccaagagcaagtcaatataatcatcatgttcagtcatactaagcaagtattaaaagaaatactaagtattcaaatttcataaaaacatagccaaatacaaggcttaanaacaaaatataattataatctaaatctattatcagagaatcaaaacttaattctaagtaacaaanattagttatgaacacatacatggtaactcattacttatctcaattattttagcatatcaatataat

SEQ ID NO: 11531 - DNA, 235 bp, Glycine max
  unsure at all n locations
atctccttgataggggccaaatgggtggactcagaatcgccatgcatagagttgtcaggctctgagtctgaggtgtaatctattcatgcagaactaataggtcatataaatctctacataatgaagtaaaatggaaattctaccacaacaaaattacaaataataaaatgatgctagagaaatntaaggaggttgatacttnttgaatcanaattgatatagattgaccatacta

SEQ ID NO: 11532 - DNA, 337 bp, Glycine max
  unsure at all n locations
gattccaacagtaaccttaatgccgcttcattataaagtgttaataaaacattaaaacacacacacaaaccacaatacaaaaactatattacctgccatgcaaatcgttttccattcatatcaatctcaaaatctgtcaaaaagtgatacaagtaattctagaaactctataagatatagcaaaatatgtcaataacagacaagtgatctcaccagcagggtagaattgaagaataggtgatgaaggatcaatcatcaaatccctatattnttcaggaagtgcacttgaactgtaacaagaacttaaccagcatcagcacaggatgcatgatataat

SEQ ID NO: 11533 - DNA, 428 bp, Glycine max
  unsure at all n locations
actgagatgcagctgtagatgcttaaaaacctggatttgtanatttttcagctcagacgaaagancccaatcagagntggattcagacctaataatgactagcctgacatactttatttttacttctaatatcaaggaaattatattacataatgtataaaacataaccaaattacaaaacatagttttcaaaatatattaaaaataactaccatacgaaaactactttacatgtgttagtttgtacattattttttttgtataggatgttctacttgaggtaattatatttgtgtgggtaaatatattggaccatcttgttaanaaaaattataatatagaataagtgttgtttagaagaatacagtttaataaacagataagatcggtttattaaaatacacaatatattattttttaatagaaac

SEQ ID NO: 11534 - DNA, 515 bp, Glycine max
  unsure at all n locations
atatacctatcaatcattatcccactttttttttcttcttcanaatatctaaatcaatttcccgagttggatatggaatgaatgaataacgtcaacctgcaaatgaagaacttatacaaatgtagcatacatttgaaataattaatatcaaagtattttacattgcatgtaactataattaattaattaattaaattatcatcatgataaaaaaaacatataactggtttttaaaaatatattaaatgaaagctgaaacataataaaaatatagaactcttaattaaaaatctattatttatgatttttcgcttgaaaatactgataccaataanaaagtatagcacacatagctaagaaagatagttgactacaatctccaatgaaaagctagttagttacacgtacacaccatgaagatgcatatatatatacttcattccacgactactactttaccggctaaaatattatctaataataacctaatactctactatagatcttctactgta

SEQ ID NO: 11535 - DNA, 229 bp, Glycine max
  unsure at all n locations
tcaacctaacattgtggaacttaagggtgcatatgangacanacaatcggtgcatttggtcatggaactatgtgcgggtggtgagctttttgatcgtataattgctgagggacattacactgaacgtgccgcggtttcgttgtaacaaccataatgcagantattcacgctttccactccatgggtgtcattcatagagatcttaagcccgaatattcctcatgttgaa

SEQ ID NO: 11536 - DNA, 338 bp, Glycine max
  unsure at all n locations
tttcccacaactctcataaatgggagagaaatgttcatctaaagcatacaagtccctaatattatcaaatccttaaaattgagctcctagggagcaaaacaatgtgtgtctcctagagagggcatcagctaccacatttgtttttccctttttgtatttgataacatatggaaatngctctaggtactctacaccatttgcatgcctcatgtttaacttgctntgccctctaatgtacttaagtgattgatgatcactatgaatgacaaattccttggaaacaaggtaatgttcccaagtttggagggctcttattaaggcataaagctctatatcat

SEQ ID NO: 11537 - DNA, 369 bp, Glycine max
  unsure at all n locations
tgaaagtgagtgagacatccaaaanacaaagaaaacccatcaatttgaagccaaaaattacacatagaatgacattttctcaaagaaaaccaaatgcgatatgcagacagtacctcataacagcgacgaatatgaagtttctttagattcctacagccactagctatgccacacatggcttcatctccaatgcttgaacaatctaccaattgaagtgcttgcaagaaattgcatccctgtccaacctggacaagaccagcatcaccaattctttggcagtaaagcaatgctaactcatagagatgtctgtgcaatatacagctaagattagcatcactaatgaaagtgagctaaatattcaaatacatg

SEQ ID NO: 11538 - DNA, 308 bp, Glycine max
ccttcttttctcatgtgcacccttatcctatctttatgttcgaagacaaccttctttctccctttggtggcttggttagcataacttttatttctactctcaatttgatttttcactctctcatgaaacttcttcacatagtccgcctttgcttgagcttctttatacttaaaaacagaaacattatgcataggcaaaagatcaagaggagttagtgggttaaaaccataaacaacttcaaaaggagaacaattagtggtgctatgaacaactctattgtaagcaaaatcaacatggaggtaaacaac

SEQ ID NO: 11539 - DNA, 316 bp, Glycine max
  unsure at all n locations
tcagaaatattctcaattgtctcatctnttcattnggttcttgaatggctatcanaggcctatatatatgtgacttgagacacgaatntgctaagagttnttcagaacaaaaaggtcttatcctcttaaaaagcaaaatcgttttatcctcttacaaattccttggccaaatcacttgtgattcaataaggaattgtttgagtgctcaaattgttcaatctatctctntcaagagagatntcttcttcttttcttctntattctgaanagggattaagagaccgagggtctcttgttgtgaaagaattctaaacac

SEQ ID NO: 11540 - DNA, 301 bp, Glycine max
  unsure at all n locations
gctctctacaatctantggcataactnttcacacggatgtctaattntgggacctaatatatcgagatgctcgaaattgaacaacggaacctatcgagaaattcaaatgttcaaaacgtttcacacggatttccgattttgggacataatataccgagatgctcgaaattgaacaacggaacctcttgagaaattcaaatgatcataactnttctttcagatgtccgagacggggacataatttatcgagacactcgaaattgaacaacanaagctctcgagaaattcaaatggtcatgac

SEQ ID NO: 11541 - DNA, 337 bp, Glycine max
  unsure at all n locations
atgtatcttaagntgtcgagaagcatatgccactacctgtccccgatgcataagcactccacccaaacccatacttgacgcatcacaatacaccacanaagattcactcggattaggtaacactaagactggtgcagtggtcaacctttccttaatggtacggaaactactctcacattgggcatcccacacaanaacttgacctttacgagtaagcttagtcaaaggtaaggctagcttagaacaaccctctatgaatctacggtagtatcctgctaagccaagaaagctcctaatctcaaacactgacttangactctctcaactcatcactggc

SEQ ID NO: 11542 - DNA, 347 bp, Glycine max
  unsure at all n locations
tcttacagacagcanaagaaagtttatacggataaccactcgggtatttccacccgtcaacgtgactcaaatgtcagtatgacagatcttgtgaaggtggccgacaaaagcgaggctcttgctcctacgtatcctncaatgaggaactcagacctacgtagttcttgataactngtgagacttgaaaaagtctccaccggaagatgctgacatctccggaaagggcgcagatgaccacattggcctctgctcgtcaatcacacttgnngtcactgaatgacgaggtgcggataaccgtaaggtgtcttcgcgaactaccagctctngggtcatggtaacaaaaagcg

SEQ ID NO: 11543 - DNA, 328 bp, Glycine max
  unsure at all n locations
cttctcgtctgtggttctttaagtttcatgggataatttcttcatttggttntgatgaanaccccatggatcaatgcatataccacaaggttagtgggagtaaaatatgctttcttgttttatatgtagatgatattttacttgcagccaatgatcggngtttgctacatgaggtgaaacaatttctctctaagaattttgacatgaaggatatgggtgatgcatcttatgtcatcggcattaagattcatagagatagatctcgaggtattttgggtctatcacagganacctatattaacaaaattctagagagatttcggatgaa

SEQ ID NO: 11544 - DNA, 371 bp, Glycine max
  unsure at all n locations
aatcatagntctactaagacatgtttgagtgttcgggaacaagagagggttttgaaagggcggaaggaacaaccaatttgagagcatgatagagcgtatagacatatggtaaatgtaaaactgacctagtatatctctatttagaactattatactctcaacctattaattactctacttttctttattatattattttataacaataaactatattttactcccaatcaaatgaataaattaaatattcattctattctataagaacatataattagtgtatctaccttangatcattactctaattaataaaattattcttcttatctattaattacgagaatctcattatctcctactcctctattat

SEQ ID NO: 11545 - DNA, 351 bp, Glycine max
  unsure at all n locations
aaccacatcacccttacagatgactgatataagcttttaatggaagtcaagagcacgaaattgtgctgatactattgactggtgagcaggtcttccagcgggttgaacacttgaatattgtatttggaaagacccacaagaaggataaaaataagacttgcatatggaagaagaggtccattttctttgatcttccgtattggtcagatctggatgttagacattgtatcgatgttatgcatatggagaaaaatgtatgtgacagtgtgaatggggtgctctntaacattcaaggcaagacgaaagatggtctgaatacccgtcaagatctagctgacatgggtatatgat

SEQ ID NO: 11546 - DNA, 367 bp, Glycine max
  unsure at all n locations
cagcacaatcaaccacagcagaacaattatgacctctccagcaacagatacaaccctggatggtggaatcaccctaatctcatatggtccagccctcaacaacaacaacagcaacctgctcctttcttccaaaatgctgctggcccaagcagaccatacagttctccaccaatccaacaacagcaacaaccccagaaacagccaacagttgaggcccctacacaaccttccctcgaagaacttgtgaggcaaatgactatgcaaaacatgcagtttcaacaagagaccagagcatccattcagagctngactaatcagatgggacaattagctacacaatggaatcaacaacagtcccagaattctg

SEQ ID NO: 11547 - DNA, 383 bp, Glycine max
  unsure at all n locations
gaatgaagctctgatactcacttgttagtctagtggcctcatatatcttaagaagggggggttgaataagatattccanactacttccccaattaaaaatctatttgactttntattcaagttataaattcccttaacaatgaacttcttaaatattgattcanataaaacaatttgaatatgaatataaagcaataataaataaaggagtttaagggaagagaaagtacaaactcagatntatactggttcggccacacccttgtgcctacgtccagtccccaagcaacccgcttgagagttccactatcttgtaaattccctttacaagttctaaacacacaatgacaatccttcctttgtgttagaattctttacaacaa

SEQ ID NO: 11548 - DNA, 451 bp, Glycine max
  unsure at all n locations
gcttcttagtctcacctgatgaattcgnggctactttatgcactcttctaatgacaataacatcacttctggcacttaaatgctgngagtttgaagccatcttctcaattaaatntctggcttcagcaggggtcatgtctcctaaggctccaccactggcagcatctatcatacttctctccatgttgctgagtccttcataaaaatattggagaanaagctgctctgaaatctggtggtgagggcaactggcacataattntttaaatctctcccagtattcatataggctctctccactgagttgtctaatacctagaaatatccttttgatggtcgtggtcctggaagcagggaaaatgttntctaagaatactctcttgtggtcatcccaactcgtgatggaccttagagcaaggtaatatagccagtcctttgccactccttctaa

SEQ ID NO: 11549 - DNA, 249 bp, Glycine max
  unsure at all n locations
gagaatcatggtcttgaagctcctgcgctgcangagtggtttgaagctgctatataagtaagaaatcctgatgctctgctcctcgctntagaagttagagagaagatttctattgatagctctgtatttggtaaacttctgccaaatccattcagctctagccagactatctctgctgatcacctgtcctccctgagtaatagcttgaagggagactatattcattcatctatgtgtggtcaatactgg

SEQ ID NO: 11550 - DNA, 256 bp, Glycine max
  unsure at all n locations
atctacaccagcctggatagtaggatataatatcttcacagaggcatcaaccgcttccaactcattcaatacagtaaatttaccaccagaanatcttactctactttcctcatttacaagagtctgcaaccttctaaaatctggagcccatgaatgtatgtcggccacattcaagtttgataacttctttgacgagccagagaatggtgcagtaaacaccctgcaaataaatacagtcttcaccttaactncatac

SEQ ID NO: 11551 - DNA, 353 bp, Glycine max
  unsure at all n locations
attctaaagcccgagtgatagntgttggttttcttcacatccaagcccaatgcctgcaaaccatgattgtctaatattttcacggattgggccttctttgagcctttttaacattattatgacctggtcttgtgaggaaaaggcagtgatggttcgaaggttagaaatagcttcaatagctattttgctagtttcatcttgggctctgatagcctttttagacatacccttgaggagtacaagtcttgtgtagaaactcgcaatgccaataggttgaacaacaatcaatataatggcaaatctccatgcaatgattatgcccattgtgcatgctatcaccactgctgaaatag

SEQ ID NO: 11552 - DNA, 275 bp, Glycine max
  unsure at all n locations
tatgcaagctgaaagccttggaggaaagaggtatgcctatgttgttgtggatgatttctccagatttacctgggtcaactntatcagagagaaatcagacacctttgaagtattcaaagagttgagtctaagacttcaaagagaaaaagactgtgtcatcaagagaattaggagtgaccatggcagagagnttgaaaacagccagtttactgaattctgcacatctgaaggcatcactcatgagttctctgcagccatcacaccacaacaaaatg

SEQ ID NO: 11553 - DNA, 187 bp, Glycine max
  unsure at all n locations
agcgactaagatgtaccaggaccttatgcagatngtttggtggccgagtatgaagaaagaaagttatgagtttgtccttgcatgcctagtgtgtcagaaagctaaaatagaacatcagaagccttcagggaagttgcaacctttagagatacctgagtggaagtgggatagcatctccatggatttc

SEQ ID NO: 11554 - DNA, 464 bp, Glycine max
  unsure at all n locations
agtcacctgaggcatgcaagcttcanattcacctctactggagnntctgttggtttacattttccatgnnaaaccttctcaaaacatttgaaatatacttcttttggtgcatganaattccctgtttagtgtatgcaaactccaatcctanaaagtatgataatgttcccaggttcgtcattccttcttcaaattatgttttagtgggtcaatcccagttgagctactctcagtaagtaatagatcatccacatacagacaaatgataagaatgtcagtgtgttttacaattctatgtaaactccctgaaagtcaatattgtgaagaaaagtgtcaattctcttgttccaagccctacgtgcctgttgtaacccatataatgccttcctcaacttcaacactttgtgttcattcccttgcatatgaaaacagaagggtgataataaacacatcttcatcaagtg

SEQ ID NO: 11555 - DNA, 361 bp, Glycine max
  unsure at all n locations
gtctcacgaatgtcacctgctcatgtctcattttttatctcgtggctatatgagacatcttgccaaacaaagtcaggttaacaataactcgcctgtgctntntcttccatgctatatgtagcaaagtcattgatccagtcatgtttgatgagttggaaaatgaggccgcaattatactgtgccagttggagatgtatgttcccctgctgtctttgacatcatgattcacttgattgtgcatctggtcagagaaatcaaatgttgtggtcctgtttatctacggtggatgtacccggttaagcgatacatgaagatcttaacagggtatacaaagaatctatatcattcaaaagcatctatt

SEQ ID NO: 11556 - DNA, 348 bp, Glycine max
  unsure at all n locations
gcttctattatcaatttcgagcatctctatatatctcttggactcaatcgggcatccgagtaaaacgctattgtcaatntaattttctaggatcttgcattttcaatttcgagcgtctcgatatattacaggactcaattggatagccgagtaaaaagttattgtcgtttgaatttgctcagtgcttctgttctcaatttcgagcgtctcgatatattacaggacttaatcagacatctgagttaaaaagttattgtcgtttgaatttgcttggagcttctgtacttaattctgagcatctcgatatatgacgggactcaatcgaacaaactagtaaaaagttattgt

SEQ ID NO: 11557 - DNA, 376 bp, Glycine max
  unsure at all n locations
tatgctnntatattattcanttactttgtctcatactctctatatgttatttcttctaattcaaatatgaattcaattcanattgacatttaagttgtttgtttgctttgatgtaaaaaaaaatagttaatggcatgcatggttatatttntaatcaacaacttatataaaaagaagagtattaaacaaacatctattntatcagtttttcatatgcttcctttcaattagtcttaatttttctctaattataattgatcattaaatatttgtaatagttttcatatgaaatcttcgacatactaatactacatgcaacanaataaagtcatatctcacggtggtgacatggtcgattacacatatgatcgatatc

SEQ ID NO: 11558 - DNA, 394 bp, Glycine max
  unsure at all n locations
agactatgtcaagnnatggaagtacggggactcgctctaccggtgcaagtgtcttaaggatgctgctcttggccgcatgtgcactgagatcaagagggttggcccgagtttggcttatttagaacaggtcagacagcacatggctaggcttccctctattgatccaaatacgaagacctgtttgatctgtggatatcctaatgttggtaagagctcgttcattaacaagattaccagagctgatgtggatgtgcagccctatgctttcactaccaagtctgtctgtgtgggtcatactgattataaatacctgaggtaccaagtaattgatacgccagggattttggacaggccttttgaagatcgtaatattattgagatgtgcagtatcact

SEQ ID NO: 11559 - DNA, 285 bp, Glycine max
tctattggataaactcggctatacatcgtatgatatggttgtcaaagtctctatcatcccttctaatgtccttgtatccatatctgacagtgcacctatacattcgatatggtctcggacaaactcgcccgattaggaaacgttctttggttaatacatgtggaacaggaactgttttcacacaaacaaagaccaacaccatgtgaaatgcatggaggttggatacaaagtgggagaatattgcaggtattcctgttgcaagttctgtgtagatgagaccaatcc

SEQ ID NO: 11560 - DNA, 376 bp, Glycine max
  unsure at all n locations
gacaccgagagggacagtgtataaagcttgtttagggtacaagatggagtaagggacctgatttccaagaacaaatgaaggcatgtagtagatcaggtaataggatgtaataagtgcatcaccccaaaaatgatgtgggacattatagtgaaggataagagtataagttgtttcaactaaatgatgattttcctttcgcaacaccattntgttgtggtatgttggcacataacgtctcatgaagaattccttgcgaggttagaaaagagcgaaattggaagaacaaatattcatgggcattatcagtgcttataatcttaacgaaaacaccaaattgattttgatttcatatgaaaaccttgaaaaaggaaacata

SEQ ID NO: 11561 - DNA, 277 bp, Glycine max
  unsure at all n locations
ttgaggaagaggcttaccacctctcccatcatgcaaccaccagatggggaacttccctttgagctcatatgtgatgcctctaactatgcactnngggtttgtttgtcgtagagagttgatagactataacatgtcattgcttatgcttcatgcactntagatgcaacccaagttagctacaccaccactgagaatgagctnttagctattggttttgctttagataaattcatatcttatttcctttgctcccatatcatagtctntactgaccatg

SEQ ID NO: 11562 - DNA, 285 bp, Glycine max
  unsure at all n locations
cttaaatataatttcaaatggggatntcattttgttagatcaaatgtggtgatgccacaatttattgagggaggactatggacatgngtgaattttggaggggacatagaagattgcaacttatacacctgatcttcagtctttccttgcagaagaaccgctcccgttgtcaggctctttacctcanaatgcaagggaaaaattcaacagacacagagttagtttgacgtaattgagaaacagaaatgagattntgagagacagagggaacatagtatattggaa

SEQ ID NO: 11563 - DNA, 368 bp, Glycine max
  unsure at all n locations
ctgagtntgtagctacctcatgctctctctctaatgactatggcatcatntatggcgctaaactgctgagaattggaagccatcttctcaattaaatttctggcttcagcaggagtcatgtctccaagggctccaccactggcagcatctatcatacttctctccatattactgagtccttcataaaaatattggagaagaagctgctctgaaatctgatggtgggggcaactgacacatnagttttttaaatctctcccagtactcatatatgctctctccactgagttgtctaatacctgagatatccttcttgatggctgtggtcctggaagccagggaaatttttttctaaaaatactctctta

SEQ ID NO: 11564 - DNA, 293 bp, Glycine max
  unsure at all n locations
caatacattnngaannaaattaaacaaacctgtgctacacatagatgacatgtgttggatacctacaaattatattatgtattgaaacaaaggtcatttttatactctgaatccttaatataacctcttatacccttttctttaaaatttacttagcgagtattttttttccagtgatcaagatgattatgaggttgtacaaaaagtgggcagggggaaatatagtgaagtttttgaaagcataaatatcaatagaaatgagcgctgtataatcaagattctgaaacctgtca

SEQ ID NO: 11565 - DNA, 201 bp, Glycine max
  unsure at all n locations
tttcctctgtacttcanaaccttcatgtggagcacgtgatcgagcatctctccacacaataatgtgattatcgggataaagtctctgatccaaagaaatgtgtactcttttaaagaaagctgaaaactttggatacaaaggagacgacttctgaactactcctggctgatcagggtcaacaccatcctccaatatcctccc

SEQ ID NO: 11566 - DNA, 350 bp, Glycine max
ctgcacctgtcgccagactctgtggtttatgctcctctgccgaccaccacacagacctttgcccttctgtgcaacaatctgaaacaattgaacagcttgaagcttatgctgcaaacatctacaacagacctcctcaacctcagcagcaaaatcagccacaacaaaataactatgacctttcctgcaacaggtacaatcctggatggaggaatcatcccaaccttagatggtcgaatctcttcacaacatcaacaacaaccttatttcaaaatgttgctggcccaagcagaccatacgttcctccaccaatccaacaacaacaacaacaacagcctcagaaagaacaaaca

SEQ ID NO: 11567 - DNA, 286 bp, Glycine max
  unsure at all n locations
ataaatagtaaagttggtgatgagaaaataaaatggttgttgtgtaggtcataccatcacataatattccccttgtcttcctttgtagtgtactttaagtattccatggctgccaccaagggtgcttttcacaaaacaaaacanaaaactcaggcaaattcacttatcgaaagcaattgacaacatatatctctngcaacataaacaaagcacctacttgtatacttgccactcgtaaggagggccataattacagcctttgctgttcctatgctcaaatttcaat

SEQ ID NO: 11568 - DNA, 283 bp, Glycine max
  unsure at all n locations
atctgcacctgtcgccagactctgtggtttatgctcctctctcgaccaccacacagaccttngcccttctgtgcaacaatctgaaccaatngaacagcctgaagcttatgctgcanacatctacaacagacctcttcaacctcaatagcaaaatcagccacaacagaataattatgacctctccagcaacaggtacaatcccggatggaggaatcatcctaaccttagatggttgaatccttcacaacagcagcagcaacaacaacatacttatnttcaaaat

SEQ ID NO: 11569 - DNA, 227 bp, Glycine max
  unsure at all n locations
aactgggttcccaccaatcatacttccactgntgccacaggtttgggtaaatttctgtatgctgctggaaccaaatccaaatttaattttggaaactatatctntgatcaaactgttaagcattcagaatcttttgctatcaaattacccattgccttccctactgtattgtgtggcattatgttgagtcancatcccaatatgttaaactacactgactctgtgat

SEQ ID NO: 11570 - DNA, 346 bp, Glycine max
  unsure at all n locations
ctcggatgtccgattcaggcgcacaatatatctttacactttanattgttaacagaagctctcgagagattcgaatggtcataacttatcacacggatgtccgattcgggcgcataatatgtcgagacgctcgatattgaacaacggaagctctcgagagaatccaatggtcataacttttcactcggaggaccgattcaggcgcataatatatcgagacgctcgaaattgaacaacggaagctcccgagagatcaaatggtcataacttttaactcagaggtccgattcaggcgcataatatatcgagactctccaaattagacatcgagagctctctagaaatt

SEQ ID NO: 11571 - DNA, 373 bp, Glycine max
  unsure at all n locations
agcttctcgatacattatgcgcctaaattgtgacanctgagttatttgttatgacaatttgaatggctctagagattccattgttcaatttcgagcgtctcgatatattatgaatatgaatcggacctccgagttaaaagttatgaccatttgaatgtctcgagagcttccgctgttcaatttcgagcgtctcgatatattatacgccagaatcggaactccgtgtgagaagttatgaccatatgaatatctccagagattcgcgtgttcaattacgagcgtctcgatatattatgcgcccgaatcggacctccgtgagaatagttatgactatttaaatatcttgagagcttctgttgttcaattgcgagcg

SEQ ID NO: 11572 - DNA, 420 bp, Glycine max
  unsure at all n locations
acatgtgcctagatgcattaaacctcanctcnatatgatatatatatgaagctgggatgataaaccaattcagtgctggtagatgaaagtttactagagaaagcatggtcattgctcaaggtaagaaggaaggctccttgtacatcatgtatgaaaagatatgcaaaagggagacaaatgttgctcaagatgcaaccaaagaattgtggcacaagagaatgngtcacatgagtgagaaaggtttggagtctctattaaaggatcactttccaaacataaagaggtaaccacttgaatcctgcgaagattgtcttgcaggtaaacaatgtagagtgtctntccaaagatcggatgaagccagaaggagaaagcatatcctgaatcttgtccactcagatgtttgctcaacgtctaaaaagt

SEQ ID NO: 11573 - DNA, 331 bp, Glycine max
  unsure at all n locations
ggtcaaagngacttcttataccaatgtcacgaggagtgtggtggtcagattcataaagaaggaactgatttgtcgatacggactccctaggaagatcattactgacaatggcaccaatctgaacaacaaaatgatgcaggaaatgtgcggngatatcaagatccagcatcataactccatccactatcgaccaaagatgaatggngctgtggaggatgcaaataanaatattaataagattattcagaagatgacggtgtcatacaaagaatggcatgagatgttgccttttgccctgcatggatatcgaacctcggtccgaacttctact

SEQ ID NO: 11574 - DNA, 252 bp, Glycine max
ctacaacacctcaatcttcacgctcacctcatcacctttgtccccatcactgttcctcgagttgatggtcttcctcaagatgctgaaaccacttgagacatacccttctctatggtcccacttctcgccacggctttggaccgcaccgagaaagacatcgaacttctcctaagggaactgaaaccacaatttgttttcttcgagatccaacattggctgcgcaacctgactcgaagcctaggcatcaagagt

SEQ ID NO: 11575 - DNA, 457 bp, Glycine max
  unsure at all n locations
gcttctgaaatatgagcaagaatcaaacctatggttctatctattcttctgctaaagggggatttcttttttaaactatccgcanactagatgaacttaagtaggtttcttgatcagccgtagtaactgcaaaaggtttgattgatgacacgagagattctggaccctttgttgcaatcctcttgcacaaagcatcacagttgctgataacttcagtcaaccttcctttcagttctccaatttccacctacaatgaatgaactacatgcacgttccaacatatagttaacaatttccacatacaatcatagaataccacatgagagtattgtgatttatgacatagatgcaaatgaatcaagatttacaagttagtgatcctttgtaacaatgaaagaggaaattaccattcatttcgtttaatgatacaaaacacatgtatcatgttagtacttgc

SEQ ID NO: 11576 - DNA, 358 bp, Glycine max
  unsure at all n locations
tgagtgctctatcaatggagttgacaagaaatcttcagacttttctcatttgccagtggccaangatgcatgggagatcctgaanaccactcatgaaggaacctccaaagtgaagatgtccagattgcaactattggccacaaaattcgaaaatctgaagatgaaggaggaagagtgtattcatgacttccacatgaacattcttgaaattgccaatgcttgcactgccttgngagaaagaatgacagatganaagctggtgagaaagatcctcagatctttgcctaagagatttgacatganagtcactgcaatagaggaggcccaagacattngcaacatgagagtagatgaactc

SEQ ID NO: 11577 - DNA, 250 bp, Glycine max
cagatgcccctcaagtttcgctctgccatctcaattgaaatcggccgatgttcatccaaagtggtcatgctgtttggaatgttgactactctgttataacgagaaatcttggtgatgaaattgcgcggatcgctcaagtcacatgaaattggcatgcgaaccctgagggtgcacacattgtcatattctatcaagagctcttcgactctgaaaaaaataataacatccaaattataagatattattataa

SEQ ID NO: 11578 - DNA, 253 bp, Glycine max
  unsure at all n locations
atatacataaccaaagatngactacaaattataaaggaggtctctctttgtgtcaggacaacttacaatgcaagcaaatagagggttttcaaggttcaacgagaatggtttccttaagatacaaaattagttgggttgattggaacatataccanataccagttaaggtttacatacttgattccaccgacaaagtgaggtcaaatggttccaaaatacttcatgattgtctggtagtgatgcaatcctaccc

SEQ ID NO: 11579 - DNA, 343 bp, Glycine max
  unsure at all n locations
gctttactcggagatctgattcangcgcataatatatcgagacgcttgtaatgttcttcggaagctctcgagaaattccaatgctcattacctttaactcggaggtctgatttaggcgcctaatatatcaagacgctcgaaattgaacaacggaagctctctagaaattcaaatggtcataacttttcactccgaggttcgattcaagtgcatgatatatccagacgctcgaaattgaacaatagaagctctcgagaaattcanatggtcataaccttaaactcggaggtccgaattaggcgcataatatatcgagacgctcgaaatttaacaatggaagctc

SEQ ID NO: 11580 - DNA, 386 bp, Glycine max
  unsure at all n locations
catgtgaagtggggtggaatcttatatcaattcccttatgttatcaaacataaaaagggaaaaggtaatattgtagccgatgctctttctcggcatcatgcattactttctatgcttgaaacaaaattgattggtcttgaatgtttgaaaagcatgtatgaaagtgatgaaacttttggtgaaatttttaaaaattgtgaaaaactttcaaaaaatggtttctttagacatggaggctttcttttcaaagaaaacaaattgtgtgtgcctaaatgttctacaagaaacttgcttgtttgtgaagcacatgaaggaggtttaatggggccatttgnggtccaaaagactctagaaacattacaagaaccattttattggcctcatat

SEQ ID NO: 11581 - DNA, 387 bp, Glycine max
tgcatcctgaagacaaacttctatgatatatagacttgttgcttatgagtacatggctaatggttcattggataaatggatattcaacaagaacaaagaggaatttcagttggattgggatacaaggtataacatatcacttggaatagcaaaaggacttgcttatctacatgaagattgtgactcaaacattattcattgtgacattaaaccagaaaacgtgctcctagatgataatttcagggttaaggtttctaatttggtttggctaagctcatgaaacgtgaacaaagacatgttttcacaacacttagaggcactatagggtatcttgcacctgagtggatcacaaactgtgccatatcatagaaaaatgatgtttatagc

SEQ ID NO: 11582 - DNA, 270 bp, Glycine max
  unsure at all n locations
gaatgctatcgtgggaaagtgaacaacttttcaacggtttgtcaccaataacatttatgaattttagccgtattgggatacacggcctaacaaatcacttgtaatatcataatgatcccgcttatctacatgaagattgtgactcttacattattcacttgcacattcacccacaaaacgtgctcctagatgataatttcacggttaaggttttgaaattcagtangatccaactcatgaaacgtgaacaaagacatgttttcacatcac

SEQ ID NO: 11583 - DNA, 373 bp, Glycine max
tgcataagtccggtcccaaattccaatatttatacactcatcatcagggctcagagaaaccccagaaatttccccaaagaaatcaatctcttgacgttttctgtagtctgctttcgtgctataaacatgcacaaaatctgcaggctcagcaaccaccatatattgaccatccgaagaaaaccgaatagaccgggttgcccctaggttattcttgagaatggcagtaggagatgataagtgtctaactcccatactctgcaagtcttatcctgattccccgttgcaaaggtacatccatcgggatgccacgcagaagcgaaagagtaatctcgatgaccaaccaaattggcaacagtctaaaaaatcaaacaag

SEQ ID NO: 11584 - DNA, 300 bp, Glycine max
tatcttagctaacgcaacattgttcattaagagtgaaggagttgacattcttatcatctcactctatgtcaaagatctcttgagaacaagaagcaacacatgtcttggggaaaaacttaataaagaaatgatggaggagttcgagatgacagaccttgggttaatgaccttctttcttggcatggagatcaaacaaagagaacatgaaatcttcattttgtaaaaaaagtatgcccaggagaatttaaaaaaatttaaaacttgaagaatgcaaaggaaatgatcacttcaatgaaataa

SEQ ID NO: 11585 - DNA, 390 bp, Glycine max
tactcaagctttgatgactaaaataaaaaaatagtcagatttcttgagagattttcggtgacaagggtgaaattttgagagatttgattagtgctcttgtgttgatgactataataacatgcttttgacattaacagggtgagataggtgatgggcaggacgtacttgtgagagtacattctgaatgtctcattggggacatttttggggcaacatgtcaatgtaaaaaccaattaaaacttgcattgaagcaaattgaagcagcaggtaggggtgtcttggtgtatctccgaggaaatgaaggtagaggtattggcttaagccacatggtccgtgctagcccattggaagatgacaagtatgaagaattgcagttacctgttgagtcta

SEQ ID NO: 11586 - DNA, 381 bp, Glycine max
tttctattggattcgtcatatcttcatctattgttaaatcatctgtgccaacttcagaattatcgtcccgtccaattcttggtgttcctaggtcagatggctcatatgcagtatcactaccataatctgaggcaacagaggaactgccagcaactaatgataagctcgactggagaggtgattgcacagaataaactgtgttgctggaatctgggtctgtttcagaattctgctggtttgcatcttggaatgctaggaaggattaaatgaggtataaaatatcaaaatttgggaaagctaacaatcaattatcataaaacagaccacactgacattgaggaaactaaatacaagttgcaaaagataatcacatacaagatc

SEQ ID NO: 11587 - DNA, 350 bp, Glycine max
agctttatgtctgtgattccttccccagtgatcacatggtattctgaggcgtttgctaccttgtacatctttatgcttaattctgccgcagtgataaaaagctacaccaattagccgcgatatacagatatagatatatgaattcatttatgctcatttcttacaaataaaatataaaatgctactaagtttaagaggcatagacggccagttttgttttcaatttctataaacttgtaaataattttatttatttaattattaaataaatatttttaattttacttgttattggttttatttaagatgttgtatattctttattattttatttaacgtgttatatattt

SEQ ID NO: 11588 - DNA, 265 bp, Glycine max
agcttgttaatgcacccacattgtatgcagaataacgatctttactgaagactttgttgatcaaaggattgacgtaacaattatgaacaaagtcactgctgccagcactcacatatgtagagtgcattattaaaaatcaatgctgcttgttttactgccaactaccttggccagcttgcattgggattccttgtaatatattaactgacgagacaatggaatcgcatgctgcaaaagaaaaacacagtttaaaaaaccattaatt

SEQ ID NO: 11589 - DNA, 342 bp, Glycine max
agctttcatttttctgggcgttgaggcttcagcgtgggccgtgggacccagatgtgttgcggttaccagaagggttcgaggagcggaccaaagcgcttggagttgtgtgcaccacttgggcgccgcagttgaagattttggggcacatggcggttggtggcttcttgactcactcgggttggacctctgtggtggaggctattctgaatgagaagccgttggttctgttaacgtttttgtcagaccaaggaataaatgcgagagtattggaagagaaaaaaatgggctattctgtgcccagaaatgaaagagatggattgttcacgagtgactcggtagctg

SEQ ID NO: 11590 - DNA, 386 bp, Glycine max
tgaagacaagactatacgaggtatcttccttgggtatatcaatatctctaagggctaccatgtttacaacttgcaaactaagaaactcgtcatcagtcaagatgttgaagttgatgagtacgcttcttggaattgggatgaagaaaaattggagaagaacgttcttatacccgcttaactacctcaagaagaagctgaggaagaagaccgaggtgaaccaccttcacctccaccacaacaacaagatcaagaactatcatcaccagagtctactccaagacgagtaagatctttggtggacatatatgaaacctgtaacttggccatacttgaacctggaagctttgaagaagcgtcaaagcaggaagtatgggtcaaggcaatgg

SEQ ID NO: 11591 - DNA, 305 bp, Glycine max
agctttgatgcaacatttggataggttaatgaaacatcgagatgatgcgctccatgagaggttggatcaaatggagaatacagatcataatgaagaagaaaggaggagaagagggaatgatggtgttcctaaacaaaaccgaattgatggcattaaactcaacattcctccatttaaaggaaagaatgatccggatgcctacttggagtgggagatgaaaatagagcatgtcttctcatgcaacaactatgaggaggaccaaaaggtgaagcttgccgcctcggagatctccgactatgctcttg

SEQ ID NO: 11592 - DNA, 385 bp, Glycine max
  unsure at all n locations
tgatgtttgtattgaatgcattaaaggtttacagaccataagcaagaaattaggtacatatagagctacatacgtcttggaattgatacatacgaacatttgtgggccatttcatacaccttcatggaatggtcaacaatattttatatcattcatagacgattactccagatatgcatacttgtttnttatacatgaaaagtcccaatctttggatgtgttcaaaagatttaaagtttaagttgaaaatcaactcaacaaagaataaagtgtgttagatctgattgtgatggtgaatactatggtagatatgacggttcaggtgaataacgtccggggccttttgccaggtacctaaaggaatatggaatttgcccactgtaca

SEQ ID NO: 11593 - DNA, 277 bp, Glycine max
gtgcataccgcaaggatcctttatgaaatttcttgtgaaagagagccacgagggtgggctcatgggccactttgggatagacaagatgcttgtcttactcaaagaaaatttttattggccccatatgaataaagatgtccatatgcattgcactaagtgtgatgcttgttttcaagcgatgtttgaggtgatgcctcatgggctatacacacacttacccattcgctctgcaccttgggtggacattagtatggtaacttccatgggctttctatac

SEQ ID NO: 11594 - DNA, 232 bp, Glycine max
tgtgctaaaggaagtaagacatgtgcctgatatgcatttaaaccttatctcaacaggaaagctagatgaagctaggatgacaaaccagttcagtgccgaaagatggaatcatagtagagaaagcatggtcattgctcgaggtaaaaaggaaggctccttgtacatcatgcagggaaagatatgcaaatgggagatgaatgttgttcaagatacaaccaaggaattgtggcac

SEQ ID NO: 11595 - DNA, 377 bp, Glycine max
cttgatgcaacatttggagaggttaatgaatcaacgagatgatgcgctccatgagaggttggatcaaatggagaatagagatcataatgaagaagaaaggaggagaagatggaatgatggtgttcctagacaaaaccgaattgatggtattaaactcaacattcctccatttaaaggaaagaatgatccggaggcctacttggagtgggagatgaaaatagagcttgttttctcatgcaacaactatgaggagaccagaaggtgaagcttgctgccacggagttttccgactatgctcttgtgtggtggaacaagctacaaaaagagagagcaagaaatgaagagccaatggttgatacatggacggagatgaaaaa

SEQ ID NO: 11596 - DNA, 340 bp, Glycine max
agcttctggtgggacatcttgacttgctttccaatctgacattcaccacagattctgccttcttctattttcagattggggatgcctctaacagcacctttgtcaatgattttcttcatgcctcttaagtgcagatgtccaaatctttgatgccatattctgacttcatcttctttggaggatagacatgtggaggagtagctggtttcttggggtgtccataagtaacaattgtcctttgatctgctgcccttcattagaacttcactcttctcatttgtcaccaagcattctgactttgtgaagtttacattgaatccttcatcacacagctgactga

SEQ ID NO: 11597 - DNA, 358 bp, Glycine max
  unsure at all n locations
tgtgcatccaataccctgatgaggatgttttatatgttcttaaaactggactgattcatttgcttccaaagtttcatggccttgcaggtgaagacccgcacaaacatttgaaggaatttcatattgtctgctccaccatgaaacccccaaatgtccaagaggatcatatatttctgaaggcttttcctcattctttagagggagtggcaaaggactggttgtattaccttgctccacggtccatcacgagctgggatgaccttaagagagtattcttagaaaaanttttccctgcttccaataccacagccatcaggaaggatatctcaagtattaaacaactcggtggagagagcct

SEQ ID NO: 11598 - DNA, 330 bp, Glycine max
agctttttgaaggatcaagatgtgccttatgaatcctcccgtacttatgccaccagtacctggaaggcctctcattttgtacatgacaatcttagacgagtcaatggggtgtatgctggggcaacatgatgaatccggaaagaaagagcgcgctgtttactacctaagtaagaagttcacgacctgtgaaatgaattactccctgctcgaaagaacgtgttatgctctagtatgggcatcccatcgcctaaggcagtacatgctgagccatactacctggttgatatccaagatggacccggttaatacatctttgaaaagccagctctc

SEQ ID NO: 11599 - DNA, 343 bp, Glycine max
agcttatatttattggagggttaataaaacaatccaaaatcatttgttcctttcaagtaacgaagaattctttttgcggcttttagatgaggagaggtaggagccttcataaagcgacacacaactcccaccgtatatagaatatcgggccttgtattggttagataccttagactccccacaagactcttgaagatcgtggagactaccttctctcctttatcaaactttgataacttcaagccaccttccataggtgtgttcacgggattgcaatcaaacatattaaaattctttcacacttcttttgtggaccctttcttgagagacaaaaataccattc

SEQ ID NO: 11600 - DNA, 313 bp, Glycine max
tagcttgtttaccccatgttgtattttcttacaatagagctggtcataacaccactaattgttctccttttgaagttgtttatggttttaacccactaactcctcttgatcttttgcctatgcctaatgtttctgtttttaagcattaagaagggcaagcaaaggcggactatgtgaaaaagcttcatgaaagagtcaaagatcaaattgagaggaaaaataaaagctatgcttaacaagccaacaaagggagaaagaaggttgtcttcgaacccggagattgtgtttgggtgcacatgagataagaaaggtt

SEQ ID NO: 11601 - DNA, 355 bp, Glycine max
agctcggatttccttttagtttggaatctatccttcctaagatagagccaaacctagtcaccctcattaagaactagctcttttcttcctctattgcctttagttgaatacacctttgtttgattctctatttggttcttaaccctctcatgcatcttctttacaaattctgacctagattccccttctttatgtataaaagaagtgtccagtgggaggggaatgaggtctaacggtgttaggggattgaacccatagacaacctcaaaaggggactgcttggtggttctatgaacccccctgttgtaggcaaattctacatgaggaagatactcatcccaagacttatggttgc

SEQ ID NO: 11602 - DNA, 342 bp, Glycine max
agcttctccaaaaaacagtgttatcagcatattgaataacattcacagaaactttgttcttccccaccagaaaacttctgaagctattttgggaaactgcttctctcatcagccctgtcaatccctcagccactaaatcaaagagaaaaggtgccaaagggtcaccttgtctcaatcctctttgggggttaaattctgaagttgggctgccattaacaagaatagaaatggaagccgaattaatgcaggcccttatccacctaatccatctctctcatggaaccccattctcttcatcatataaatgagaaattgccaagatacagaatcataagccttctc

SEQ ID NO: 11603 - DNA, 336 bp, Glycine max
agcttgtcattttttcctatatgtgtttaaaatgggttaaattatttatatggtcctctaatttattttttagatttaattggatcttctaattttttttattcaatttgatcctctaatttttaaatcgatttaattcagtttttaagtctaaacgataagaaatcacactttatgatagttcaaaatcgtcactaaatgattttaaactgtcacaaaatacatagtttttacaaaaaaatgaatcaattctaaaaattggaagatcaaattgaactaaaaaaacactagaggaccaaatcgaattgtttttaaaaattagatgaccaaattaaa

SEQ ID NO: 11604 - DNA, 288 bp, Glycine max
ttgcttgaggaagaactttgtttgtaacggcctaaccaatactttgacttgacctcttgtcacccattaatgtgctacagaattccagggcaagagctgtcatatgcaagtcagaatcactgatacacaagcatcaaaagaaaatagaattaaccattccatatcacctatgccaatgtacagagagtatcttagtaagacaaacctaattagtcccgaccgttctacgataataaccttataagcacacaaacattcttttcaccataagcaactataagtgaattt

SEQ ID NO: 11605 - DNA, 353 bp, Glycine max
agcttgggaagaaaggagaatagctataaagacaaaaatagacagcttgttgaaggctgatttcatttgcgaagtgaattacaccaattggttagccaatgtggtcatggtaaagaaagcaactggaaaatggaagatgtgcatggattacaccaacctcaacaaagtgtgtcccaatgatgcctaccctttgcttagcattgacagactagttgatggggcatgtgggttcagggtgctcagtttcttagatgcctactcaggctataatcaaatcaagatgtatctacccaaccaagaaaagacaacatttgtcattgatagggctaattttttctataaggtaatgactt

SEQ ID NO: 11606 - DNA, 366 bp, Glycine max
  unsure at all n locations
tgccttggttaaccttattacccaactggccctgagtcacaaatctgcacctatcaccagactctgtggtttatgcatcctttgccgaccaccacacaaacctttgacctttagggcaacaaactgaagcaatagaacagcctgaagctgatgttgcaaacatntacaacaaatctcctcaacctgaacagcataaacagcctcaacacaatgactatgacctttcccacaacaggtacactcccggatggaggaatcatcccaaccttagagggacgaatccttcacaacggctgcagcaacaacaatggacttattatcaaaatgctgctggcccatgcagaccatccattcctcagccgatcc

SEQ ID NO: 11607 - DNA, 314 bp, Glycine max
tttcttgaaaatgaacaacggttgctgtcgatatattcaaatggtcataacttatcacaccaaagatcgattcaggcgcatgatatatcgagacgctcgaaattgaacaacgaaagctctcgagaaaatcaaatgggcataacttttcaaaaggaagttccgattcaggcgcataatatattgagaaggtcgaaattgaacaacagaagctctcgaggaattaaatggtcataacttgtaaacggaagtccgacttaggcgcataatatatccagacgctcgaaattgaacaacggaagctctcgtaaaattca

SEQ ID NO: 11608 - DNA, 288 bp, Glycine max
cgctaactgaagatcaatgacagcggaatgcacacggaggaacggtgattggacatgccacttcacggagaagaaagacaagaacaagttcaccaccatatgaagccatggataaaagcacgaaggttggagaatatgagcggagggagagggagagaacgggcacgaaacttatgcctccaatgaggcctacaaatcgaagctgagatcctcacatgatcaacgtagaaataacgcacactaaacgccgctatatatagcctaacggtcacatgaaactggagggaa

SEQ ID NO: 11609 - DNA, 348 bp, Glycine max
agcttctggtgggacatcttgacttgctttccaatctgacattcaccacagattctgccttcttctattttcagattggggatgcctttaacagcacctttgtcaatgattttcttcatgcctctcaagtgcagatgtccaaatctttgatgccatattctgacttcatcttctttggaggatagacatgtggaggagtagctggtttcttgaggtgtccataggtaacagttgtcctttgatctgctgcccttcattagaacttcactcttctcatttgtcaccaagcattctgacttttgtgaagttacattgaatccttcatcacacagctgactgatgctgatc

SEQ ID NO: 11610 - DNA, 439 bp, Glycine max
  unsure at all n locations
gctttcttctccaagctatcttctatctcagttattgagtttctgtgagttattgagagngnttacgtgggtgggtgctacacttccattgttttgcttttgttgtgtggctttcataattcagctttcataattcattcttggtaagtgtttttttaaaataaaatttatatattctgatttataatttctgttcttaaattcttataataggttagttagtattaataggtattataaatatacgttaattaggattaatatatattgtaaggttagattagttactatgatgnttttaatttttatgtattaatagatatttgaagattaggttattcttaatagatatttaaaggttaggttagttagtttggtttgttgtatatacttttagatattatatatgtgatataatattattagtnttagaaatatt

SEQ ID NO: 11611 - DNA, 423 bp, Glycine max
  unsure at all n locations
gagccttgagggtaatgttctcaacaatatttgatttctccaaactgcttattaatatatctccattctgatttataatttattgattcagntctcttgactttcatgtgaacaggtgattgcagagtatttgtccttataagaagctgctggaataaaagagggattccaactgatggatacaagccataaaggcaagattaacgtcgatgaactgcgtgtaaggttgcataaactaagtcaccaaattcctgatggggatatccaaatacttatggatgctgtgagtatttttcactttatctggaaactcttcttttctgtttgttctacacttgatgtgtgaagaaataagtagtttggtctctttgttttcacaactttatgttcattgtaatatatcaaactaattaattgcaaact

SEQ ID NO: 11612 - DNA, 462 bp, Glycine max
  unsure at all n locations
agctntcaagtactgtaagccaatcatacaagttgtctgcacacatttgtacggcaaataccgtgggaccctcttaatggccacatcacaagatggaaatggtggcgtccttcctctagcattcacgatggttgaacgtgagacgttgacagcgtggtcatgatttttggcacacttgcgtgaacacgtcactgataaaaatggtatttgtctcatttctgatcgacacgcgagtataaagtccgctgtcgctaatgaagcacttggttggcaacctcctcacggttatcatgtctattgcgtgcgacacatagcaagcaacttcaatcgaaaattcaataacgccaaacaaaaagaaatgtttgcagaagtgggtaagaattcatatttaatggtcacgtttatttaacttccttatatacttaanatgggtattggataactaatttatgcagcctacac

SEQ ID NO: 11613 - DNA, 208 bp, Glycine max
  unsure at all n locations
tatgttgntgtggatgatttctccagatttacctgggtcaactttatcagagagaaatcagacacctttgaagtattcaaagaagtgagtctaagacttcaaagagaaaaagactgtgtcatcaagagaattaggagtgatcatggcagagagnttgaaaacagcaagtttactgaattctgcacatctgagggcatcactcatgagt

SEQ ID NO: 11614 - DNA, 380 bp, Glycine max
  unsure at all n locations
ctggaatgttaggaagatatcaaagtaatccgggaatggaacattggaaagttgcaaagaaagttctgagatacttacagggaacgaaagatcacatgcttacatataagaggtcaaatcatattaaggtgattgagtattcagactcatactttgttggatgtgtggatataaaaaaatccactctgttctatgtctntcttttagccgaaggagcaatatcatggaagattgcaaagcaatcagttgttgttgcatctaccatggaagatgaatntgtagcctgttttaaggctacaatttaggctaattggctgcggaactttatttcagagcttggaattttcaatagtattgctattgtcataccctaatttcgt

SEQ ID NO: 11615 - DNA, 416 bp, Glycine max
  unsure at all n locations
tcatgtggagaggttaatgaaacaacgagatgatgcgctccatgataggttggatcaaatggagaatagagatcataatgaagaagaaaggaggagaagagggaatgatggtgttcctagacaaaaccgaattgatggtattaaactcaacattcctccatttaaaggaaagaatgatccggaggcctacttggagtgggagatgaaaatagagcatgttttctcatgcaacaactatgaggaggaccagaaggtgaagcttgccgccacagagttttccgactatgctcttgtgtggtggaacaagctacaaaaggagagagcaaganatgaagagccaatggttgatacatggacggagatgaaaaagatcatgaggaagcggtatgtgccggctagttactcaacggacttga

SEQ ID NO: 11616 - DNA, 479 bp, Glycine max
  unsure at all n locations
agcttctaagttctaacagggtgatagagagcagaattgctgaatgtgaaccacaagtataaagttattataatacactgaagctccattaaaaattgaaccatgagtacataattattatactacattgcaactgcattaaacatgttattgttattaaccaatttcaagacctagaggaccccttcccttatttttgagaaaactaccttaatataatctacttctgtaattaactaaggagttgagagaatctatcctagagtcaccatttctccttttaagcagctcttgatgtcaaatgcccaggcttgctagattatattatgtcattntgtattggtttttcttcgaaaatttatgtggaacactctggtataaagtttagttggtttcagtctgagagacctggatttcaattcattacctncatggatngagtcnnnataaacaatttatacattntttctttcatttat

SEQ ID NO: 11617 - DNA, 456 bp, Glycine max
  unsure at all n locations
tactaagctctgcttaggttttacgttttctgtataaggctattgtttttgttcttaatgcaattttctgttttctgcttctaattacaatttcgttcttgcttcttcttctactttcatttacgtttctgtctcatttacgtttctgtttcatttacatttatgtgcatttacgtttctgcttcatgtttcatttgcgttttctgtttgaatctatggaaggctagtttttctggtgttgtttccttttgaggacgaagcccaactctctttgaggtttcgtttgtaatgtggtttcctggcagttntcccttcaccagttatcccaaattcgtgaacattaatcagtgcacccttcgtgttcgattaattgcctctgagcctaacttgcgttcatgcttaatggacgaacggctaactggtgtatgtggtgcctaatcacgtattgacaaccct

SEQ ID NO: 11618 - DNA, 150 bp, Glycine max
  unsure at all n locations
caacagaagctctcgaganattcttatggtctatatcttgtcacacgaagtccgattcaggtgcgtaatataccgagacgctcgaaattgaacaaccgaagctctcgagaaattcaaatgggcataacttatcacacggaagtccgattc

SEQ ID NO: 11619 - DNA, 340 bp, Glycine max
tcacacggaccgtcgattcaggcgcatataatatcgagacgctcgaaattgaacatcggaagctctcgacaaattccaatggtcataacttttcacaaggaaccccgattctagcgcatcacgtatcgagatactctgaattgaaaaccggaagctctcaagaaattcagatggtcataacttgtcacaccggagtcccattcagacgcataatatatcaagatgctcgaaattgaacaacgaatgctctcgagaaattcaaatggtcataacttgtcacacggaaatccgattcaggcgcataacatatccagacgctctaaattgaacaacccaagct

SEQ ID NO: 11620 - DNA, 418 bp, Glycine max
  unsure at all n locations
gctgaggtgtgttgcccaccatctnttcatagtagaatactggttatgtgtctactatcatcgncatcattnttttctccgtcattgaggtgccacttgagctgccaggtctctccacctttgggcgtattcttttgaaagattcgtgccccctttntgcacatgttctgtagttgcatcctatctgaagacattatactgacactgcctaacgaaggcaaccactaggtccttccaagaatggactcgggaaggttccaagttagtgtaccaggtaacaactaccccaataagactttcttggaaggaatgtatcagcaattcctcatcttttgtgtatgcccncatcttccgataatacatctttagatggttcttggggcaagtagtccccttgtacttgtcaaagtccagcacc

SEQ ID NO: 11621 - DNA, 369 bp, Glycine max
  unsure at all n locations
agcttagctacacacacctctctaatagctaagtttacctncttgagatgagaagctagagcttagctacacaccccctataatagctaagctcacccccatgacaaaaaacatgaaaataccaaaaaaaagtccttactacaaagaatactcaaaatgccccgaaatacaaggctaaaaccctatactactagaatggccaaaatacaaggcccaaacgaaggaaaaagctattctaatatttacaaagaagagtagatccaacctttacccatgggctcaaaaatctaccctaaggttcatgagaatcctagggccttctttagtagctctagcccaagcctcttggagtcttctatccaataccct

SEQ ID NO: 11622 - DNA, 312 bp, Glycine max
  unsure at all n locations
attgacaataactntntactgggatgtctgtattgggtcccgtcatatatcgagacgctcgaaattgaatgttgaagccctgtgctaattcaaccgacaataactntttactcggatgtctgattgagtcccgtcatatatcgagacgcttgaaattgaatgttgaagctctgagccaattcaaacgacaataactctttactcggatgtctgattgagtcccgtcatataacgacacgctcgaaattgaatgttgaagctctcagccaattcatacaacaataacttnttactcagatgtctgattgagtc

SEQ ID NO: 11623 - DNA, 251 bp, Glycine max
  unsure at all n locations
cttcaacatttcaatttcgagcgtctcgatatatgacaggactcaatcagacatccgagtaaaaagttatggtcgttnggaatggctcagagcttcaacattcaatttcgagcgtctcgatatatgacgggactcaatgagacatccgagtaaaaagttattgtcgtttgaaatggctcagaggttcaacattcaatttcgagcgtctcgatatgtgacgagagtcaatcagacatccgagtaaaaagcta

SEQ ID NO: 11624 - DNA, 332 bp, Glycine max
  unsure at all n locations
agagaggctcacaggtagcggtgaactgcgatatgaacttctctatataatttaggtgccctaagaaaccttggacttgcttttcggtgcgcagtttgggcatttcaaggatggccttcaccttgtcgagatcaacctctatccctttctggctcacgatgaagccgagcaattttcccgacttgaacaacttccacagtttctcgaacaacttccgaaagttgacgagttgttcctcctcggttctagacttggcaatcatgtcatccatgtagactntaatctctttgtgcatcatatcatggaataatgctaccatagctttgtgatag

SEQ ID NO: 11625 - DNA, 478 bp, Glycine max
  unsure at all n locations
taacagaggcatgcaagcatgcctagttgccaatatatatcatcaaaattgtanatatatattatgacataactntttctcttgtggcaatgctcatatcaatttagattcttcttgctataacaacatactatgatcatgaaatatgaaaaatggatgtggaaaacggctntccttaatggtgagctaaaatatgtttccttaataaagtctacaagtttcaacaatacatttatggatngaaagaagtgtctagaatttggagcattcattntaacaagataattgaatngtttaatcttgttagctatgaagaagaactttgtgagtaaaaaaaggttactgggagcattacatttatatgtagatgacatataaaataatacacaatataatgaagaaagatntgactactaatatattatcaatgaaatatntaggagaaacaatattttaaaaataaagaattattgagata

SEQ ID NO: 11626 - DNA, 470 bp, Glycine max
  unsure at all n locations
agcttgtctagttgccaataaatatcatcaaatgtgtaatatttattatgacataactttttctcttgtggcaatgctcatatcaatttagattcttcttgctataacaacatactatgatcatgaaatatgaaaaatggatgtggaaaacggctntccttaatggtgagctaaaatatgtttccttaataaagtctacaagtttcaacaatacatttatggattgaaagaagtgtctagaatttggagcattcattttaacaagataattgaattgtttaatcttgttagctatgaagaagaactntgtgagtaaaaaaaggttactgggagcattacatttatatgtagatgacatataaaataatacacaatataatgaagaaagatttgactactaatatattatcaatgaaatatntaggagaaaacaatatttaanaataaagaattattgagatagaattaga

SEQ ID NO: 11627 - DNA, 481 bp, Glycine max
  unsure at all n locations
agcttccaagaatcaagatcaagattcaagactctatattcaagaatcaagagaagacttaatcaagataagtatgaaaaagaattttcaaaaaatgagtagcacatggattcttctcaaaatatgtttaccaaagagtttttactctctggtaatcgattaccagattgttgtaattgattaccagtaagcaaaatggttttcaaaaagctttcaactgaatttacaacattccaattgatttcaaaaagctgtaatcgattacaatgttttggtaatcgattaccagtgtgcttgaacgttgaaattcaaatttaaatgtgaagagtcacattctttcacaaaaaagctttgtgtaatcgattacactgatttggtaatcgattaccaatgattgtttctgaataaatcaaaaaatgtaactcttcanatggtttttgacttttttcaaatggttttaagtntttctaaaagtcataac

SEQ ID NO: 11628 - DNA, 487 bp, Glycine max
  unsure at all n locations
agcttaataaatctatatatggtttaaaacaagctttcttgttcttggtaccttaagttttatgggataatttcttcatttggttttgatgaaaaccccatggatcaatgcatataccacaaggtcagttggagtaaaatatttttttttttatatatgtagatgatattttacttgcagccaataacatgaggtgaaacaatttctctctaagaattttgacatgaaggatatgggtgatgcatcttatgtcatcggcattaagattcataaagatagaccttgatgtattttaggtctattacaggaaacctatattaacaaaattttagagattntggatgaaagattgttcaccaagtgttgctcccattgtgaaggggtgataagtttaattgaaccaattctcanagaatgactntgagagggaacaaatgaaaaatattccttatngctttgttgntggaagtctcatgtatactcaagt

SEQ ID NO: 11629 - DNA, 443 bp, Glycine max
  unsure at all n locations
ctcagcttaactcatgaagaagtctcaaatctcctatcatataattagatgctcctatatcaataattcacaccgtgtttttacctatcattctttctatggtgcttcccttatgattgttcagaagattcaccagagtttgccactactcactgctcaaacctgtcagtccgcccttgtgtgtatccatcgcttatagaatcgntcctccattggaatgaccattttggatacccaaccacctgaaaacagtttgtggcatcatgtcttgttcggttgcagtgcccacaaaccgtggacttgtcttttgcatctncacgccctcttgtccttccaccaatttgcacagccagaacaacaacttcccctcgttcctccttggttctggagattgccttcacacgtctntcttgtatgagagtagcatatactctgttaaatga

SEQ ID NO: 11630 - DNA, 416 bp, Glycine max
  unsure at all n locations
gtggtaatcagagcacaagagcttcaagttgccatatagggaattggaaggaggattggtgccatcccttgaagaatttgagtcaagaagcaaggggccaaccaccttatgagctatnggactaagaagcactccaaattgggtgaatcaccaaagagagaaaaaccaccaaaattgaggacctttttgcaattctgtaattgacaatttactttactttcattgcttatcaaatttgtaacaaaaaggcctttcattggaagtaagtagggagcctccaatagggcaccctacttacctctgagtgaataaatttaggcaattttcccttatgattgtgagtgttttgttgggaaccttaaaagtggtcatccaaacactcataggatatccctagattacatatctcgcttact

SEQ ID NO: 11631 - DNA, 468 bp, Glycine max
  unsure at all n locations
ctcataactgaagaacttacagcagattttgtgtattttcgcgcacagttagtaccatttcctttgaacagcccacgaaaaccttcagttctccatatatattttagaccttgaattgttccattgtatttaatgctgtgtggattctgaacctgtaaatggcagaggcacatcacatcgcacatatgatatcgatacacccaaccacaaaagaaccaacaaaaaaggtagcttgtcagatgcactttttttctttataacaagaataaatgatagctaaatccacatttaaaggtaaacaactatatggggattaacctgtagcaaaatcttcaagcgttccagtggagcaactgctgttcgtgatctgcatatatacaaaaaagggtcaaatcaattaaaactcgacataatgcaaaanaggatgttgaaattatcagtaagaaatagtttccaggaaaattggat

SEQ ID NO: 11632 - DNA, 451 bp, Glycine max
  unsure at all n locations
tactaagcttcttagaaaacgtggcattgtgcgcaatacacaatgccctgtttaccacaacaaaatggtatatcagaaaggtgtaatagaactttaatggatatggttgagtatgttaatcaatttgaatttactcgtatctttgtggatgtatgccttgaaaactgtcatgtaattgttgaatagggttcctagtaaggcagttccaaagacacctttgaaactctggacaaataggacacctagtataaggcacttgcatgtttcgggttgtcaggcagaaataaggatttataatccgcaagaaagaaaattggatgcaagaacaatcaatggatattttattggttatccagaanaatcaaaggagtatatgttntattgtcctaatcatagtatgagaattgtcgaaactagaaatccaaggttcattgaaaatggtgaaatcagt

SEQ ID NO: 11633 - DNA, 439 bp, Glycine max
  unsure at all n locations
gcttacaatagagctgttcatatcaccactaattgttctcctnttgaagtatgttatggttttaacccactaactcctcttgatcttttgcctatgcctaatgtttctgtttttaagcataaagaaggtcaagcaaaggcggactatgtgaagaagcttcatgagagagtcaaagatcaaattgagaggaaaaataaaagctatgctaaacaagccaacaaagggcgaaagaaggttgtcttcgaacccggagattgngtttgggtgcacatgagaaaagaaaggtttccggaacaaaggaaatcaaagcttcaaccaaggtgagatggaccatttcaaatgctnganagaatcaatgacaatgcttacaaagttgagctgcccggtgagtataatgttagttccaccttcaatgtctctgattnatctctttttgatg

SEQ ID NO: 11634 - DNA, 475 bp, Glycine max
  unsure at all n locations
tatcagatcctgaaatacccnctcaccactgagtctgcctgattaagattgaggacaacaacactttggttttcattgtcgacctgcgtgccgacaagaagaagatcaaggatgcggtgaagaaaatgtatgacatccaggccaaaaaagtgaacaccttgatcaggtgagcatctatgcaatgattgcagttttgatagtaatgatttcatattgcattattgctgatgaaatttgttgattggtagtgatttccgtattcacttagtggtataaggtattgatgttgttgtgaaattgatgcatgatgtcatgatgtcacatgacgtcacatgtaatttctagttttgatatctttntgaagaccctgttatgttgatgcatgatgtcatgatgtcacatgtaaattctagtcctgtctgtacactctagctnttttntcctacctttaaacataatggaatagtcctgttct

SEQ ID NO: 11635 - DNA, 375 bp, Glycine max
  unsure at all n locations
tgggcttactattctcatccnatctcatcaatacattaaagttatatgattngacttntgcactgatggaagggaataccactatctactcgaatacccctaacaagcttgtaggagctgtcggtaaataaaggtcctcaccatccatttcaattttctccaactccctaccacatatggtaaaaataaacattaacttctatcaaagacacattgaaaatttaacataaaaatccacaataaaaataagccttcagacattnggccagtacctccggataccagctcggcgttcttctttagggagtggaaatagtacaccagagatggatgtaactttgtcaaagaaatcaaactctctnttaaatatgtcaa

SEQ ID NO: 11636 - DNA, 499 bp, Glycine max
  unsure at all n locations
agtcacctgaggcatgcaagcttatcaacatcaaacttggagaaagagttcttgtggtctttacatgagaagcaatcaagtataatgttacttccttcactaaagcggtgatccatctccacacatattntatcaatggcaacataaaaaatctttgcacggaatgatgaaaataatgatagtcctccttctgctcttgacgaccccgaactgtatttcgtcatccatatttggtaccagaatacttttagcaacacaaaatccttggacatcggcaaaaaaattattccagccactctctctcattgtgcccaaccgagctttgacaacatcaactaattccatggcattcacaatattaagatcttttctttgcaatatatttgaaagctcatttgtttctatgacctggacacgcacaatctcatttgggtaaactcattaaccacatttatgtggcggtctaattcggcttcttggtgacaacattcacattctc

SEQ ID NO: 11637 - DNA, 494 bp, Glycine max
  unsure at all n locations
tcagatttactttcagtcatctcattcaagactttgtttgcattctttatcttgccatcttgngacaacctgcacaaaattgaattaaatttaacaactccagggcacaattaatcccttagcctccatcattcctttcattnttagagctttatctagatgatttgtacatgacaaatacatatttgagcaacattagttcactagatgtcattatgtccttccttcatcctgataacatagtccttcaggctggtcatgtcatcaccactcttagtggagtgatacctcagcaattcagctagctntgtcttgttntgagaatccacatcaagaccaagtttaaggttgttagagaaggcttcataaaacttgttatagtcttacaaggctagtaaccttgatggtaacaagtacgtcattggcatgactatagtttttcaacatggtagtatactagtatgtctaatgcctcatggaanttcagtgatatt

SEQ ID NO: 11638 - DNA, 322 bp, Glycine max
  unsure at all n locations
ctgcagcttgaaagcacatgattttgacaaacttttaccaagagtnttactctctggtaatcgattaccatattgttgtaatcgattactagtagcaaaatgagtttgaaaaagttttcaaactgaatttacaacgttccaaatattttcaaaaggctgtaatcgattacaatggtntggtaatcgattaccagtgtccttgaacgttgaaattcaaatttaaaaatgaagagtcacattgtttcactcaaaaactttgtgtaatcgattacacttanttggtaatcgattaccagtgactgtttctaaaagggttttaagt

SEQ ID NO: 11639 - DNA, 317 bp, Glycine max
actcggatgtccgattgtgtcccgtagtatatcgagacgctcgaaattcagaatagaagctctgagcaaaatcaatcgacaataacattttactcggatgtccgattgtgtcccgttgtatattgagacgctcgatattcaaaatagaagctctgagcaaaatctaacgacaataactttttactcggatgtccgattgtgtcccgctgcatatcgagacgctcgaaattcagaacagaagctctgagcaaaatcaatcgacaataactatttactcggatgttcgattgagtcccgatgtatatcgagacgcttga

SEQ ID NO: 11640 - DNA, 429 bp, Glycine max
ttctcataagcttgaaatctcaatttctgaaattcatgaagttggagcttcctgtgttccctagctacattgagatcaaaatttagaaacttcaatgcccagtaagctttgtgctccaactcaacaggtaagtgacaagattttccatagaaccaatggaagggagtgagtcctataggagctctgtatgctatttcatatgcccacagagctccatctaatgaccgagcaactgttttctctaggatcttcttgacttccttgttagaaacttcaacttgcccattggtctgggaatggtaaggtgaggctatcatgcgtctgacactatagtgttggagaactttcttgagttggacattacagaaatgagatccttcgtcatttatcagtacccttggtgtgccaaacattgaaaatatgttttct

SEQ ID NO: 11641 - DNA, 227 bp, Glycine max
agatcaccattcatgaacgccgttttcacatacatttgatgcagctcaagatcaaaatgagctactaatgccagaattactcgaagagagtctttcttagatacagggaataaggtctctctgtaattgattccatctctgtgagtcgaatctttagcaacaagtcttgctttatgtctctcaatggtgccttctgagtctttctttgttgagaagacccatctaca

SEQ ID NO: 11642 - DNA, 373 bp, Glycine max
  unsure at all n locations
tagagaagtactgagcaccgcccaattcgtccaacttttcattaattgtcggaatcggaaaccggtcacgaaccgtgacggcgttaagggctctgtaatcaacgcagaatctccaagagccgtctgtcttgcggacgagaagaacggnggatgaaaaaggacttgtacttggtctgatgagtcctttttgtaacatatcattgacttgctgctcgatctccttcttctggtaatggggatatctatacggatggacattcacgggattggtgtggggaaggaggtggatatggtggtcggtgtcacgggtaggaggtaagccggaggggttctgaaatanggtcgagaaacgtgtaagtaaggcttggatttc

SEQ ID NO: 11643 - DNA, 354 bp, Glycine max
  unsure at all n locations
gaatcagaaatctgtacctgtcgcaagggtttgtggtttgtgctcctctgctgaccaccatacagacctttgcccttccatgcagcaacctggagcaattgagcaacctgaagcttatgctgcaaatatttacaatagacctcctcaacctcagccgcaaaatcaaccacagcagagcaattatgacctctccagcaacagatacaatcctggatggaggaatcaccctaacctcagatggtccagccctcagcaacaacaacagcagcctgctcctttctttcaaaatgctgctggcccaagcagaccatacattcctncaccaatccaacaacagcaacaaccccagaaaca

SEQ ID NO: 11644 - DNA, 450 bp, Glycine max
  unsure at all n locations
agcttatntaacataaatattanaactaccattatctngattataaagttntttttaaaaaaaaactatttgatcaaaagttttgatttaataaattattaattaagtaatatatgacttataagttaggatttatattttttattcattttatcctattaattttntaaaaataacttgtaccttccgataattatgatatctattttaaataaattacatgtacacattttgtttttttttttatcaaatttactttacttaataatgaatttattaaaattttaatcattaaatatacatgcaaacatataaatgttttttacatcagtattttatgtactatatagctaattaatcaaataattttaatcaatgttntgaatttaatcactaattttcaatttatacctccagactttttaactcattntnntttataaaaaaaat

SEQ ID NO: 11645 - DNA, 217 bp, Glycine max
ggaccccatttctaccaactacaagacctaataaaactatattatctacacaagaggtacacttctctatatttgcatagagggagttcttcctaaagactgaaagaacttgcctgagatgtcctaagtgatcatctaggctcctactgtacactaaaatatcatcaaaataaacaactggcaatctacttatgaaatcccttaagacatgatgcat

SEQ ID NO: 11646 - DNA, 324 bp, Glycine max
  unsure at all n locations
acatcatgtatgagattcatttactaccaaatatcaatatgttatccagatacaaacataaaatgacacgttcattattattaaattgtttcacatacacacatttatcactatcattaatttgaaaatcatacaaaagaataacttaatcaaacttttgtgtcaatgctntggagcttgtttcaaaccatacaaagatttaacaatttaatttttaaggaaaaagaatttcacagaaagtcacatctctagactccataatagtaccattagaaattgcagatacttctgaattaataactaagaatctataagtagtattat

SEQ ID NO: 11647 - DNA, 323 bp, Glycine max
  unsure at all n locations
gcgtctcgatatattacgggcctcaatctacatttgattttaanagtatngncgnnnngaattgctcagagcttcaacattcaattccgagcgtctcgatatatgacgggactcaatcagacatccgagtaaaaagtcgttgtcgtttgaattggctcagagcttcaacattcaatttcgagcgtctcgatatgtgacgagagtcaatcagacatccgagtaaaaagttattgtcgtttgaattggctcagagcttccacattcaatttcgagcgtctcgatatattacgggcctcaatcagacatccgagtaataagttatt

SEQ ID NO: 11648 - DNA, 355 bp, Glycine max
  unsure at all n locations
cgaatatatcgagacgctcgaaattgaatgtggaagctctgagccaattcaaacgacaataactgtttactgggatgtctaattgacgcccgtaatatatcgacatgctcgaaattgaatgttgaagctctgagcacaatcaaacgacaatatacttttactcggatgcctgattgagtcctgtcatatatcgacacgctcgaaattgaatgttgaagctctgagccaattcaaacgacaataactctntacatggatgtctgattgagtcctcgcatatatcgagacgctcgaaattgaatggtgaagctctgagccaattcaaacgacaataactttttactcggatgtctga

SEQ ID NO: 11649 - DNA, 218 bp, Glycine max
  unsure at all n locations
ctctgagcaaattcaaacgacaataacattntactcggatgtccaattgaatcccataatatattgagacgctcgaaatttanaacagaagctctaagcaaattcaaacgacaataacattttactcggatgtgctattgagtcccgtaatatatcgagacactcaaaatttaaaacagaagctcatagaaaattctaacgacaataacattntactc

SEQ ID NO: 11650 - DNA, 295 bp, Glycine max
  unsure at all n locations
ataaaggtagtagtgccatgttttcaaagcccgtactaaggcatacaactccttatcataagttgaatagttaagggtaggaccacttaacttttcactaaaataagcaattggatggccttcttgcatcaacacagccccaatcccaacatttgaagcatcacactcaatttcaaaagatttttgaaagtttggcaacgcaagtatggnggcattagttagcttttgcttaagaacattgaaagcttcttcttgtttctcttcccattngaaaccaacatttttcttgagcact

SEQ ID NO: 11651 - DNA, 289 bp, Glycine max
  unsure at all n locations
gatatatcgagacgctcaaaattgagatccgaagctctgagacaatagaaccgacaataactntatacacggatgtccgagagagtcccgtgatatatcgagacgctccaaattgaaaacgggaactcttagaaaattcaaacgacaataactacttactcggatgcgcgacagagagaagcaatatatcgagagatgctccaaattgattacgaaagcgcggagcacatgcaaacgacaataactttttactcaggtgtctgagtgagtcccgaaatatatcgagacg

SEQ ID NO: 11652 - DNA, 419 bp, Glycine max
  unsure at all n locations
ctcccagatagtgaatatgtgatctatggtgttctcttcacaggccacttgatcaacatgcccaacaagtgatatcaaatgataccaacaggtcacttgtctttgattgattacttttgatggttgttttctacttgagtttagattgtccttgatgattgattgattntttttattgatgtgtgtgtttttgcttgattgatgttcaatgtttgttactttgattgattgattatattntatatttgattacttgtctttgataattgcttntgtattggtgtttgctattgattgagcttgattgatgtgttattgtactcgtttatgcttgattaatattgaatgagtgtttaatgccttttggatcacttgattctatacattacaacaagtggaacatttttctctcttatcat

SEQ ID NO: 11653 - DNA, 438 bp, Glycine max
  unsure at all n locations
atcctctgagtcacctgcggctgcaagctacaactntatcttccacaattttgctcttttacttgttatnnatatnnttctaattaatatctaacagaggcctcttctatatagatatctacatgtccatctattatcgaacctacgatagaaacaagaactaaaatgggaatatcccaacgaaatagtcttaaaattagtaggcacaacaatctaactagcatcatggattggagtttgacccccanaagactccaaatcgggccaccgaacaaatagcacagggtggttaaaaagatcccgaatgaaaatagagacttatatctattgtagtaagttccaccttttagtgattgtagtaactctggtttaatagtcgttagaatgtctctntcatattgagggaatttatctaatggcattcaatcacagaatcca

SEQ ID NO: 11654 - DNA, 343 bp, Glycine max
  unsure at all n locations
gatctctgatgttaggataaatatctcctttcattggatganagtatgaaatgttgggtcttattcctctccatagttcataataagtctttctaatcaatggtgccatctatattatgttttgaacatagcaagctatgtttaccgcttctccctagaagtttttaggaagtgagttttcacaaagcatggtcctagccatttcttgcagagttntattnttcctttcaactacccgattttgttgaggtgttctcggtgaagagaagttaaggaagataccattcttttcatagaatgatntanactcaacattctcaaactcaatttcatgatcactcct

SEQ ID NO: 11655 - DNA, 373 bp, Glycine max
  unsure at all n locations
aattacttaaaggatgtttctgaatgtgaaccatatactaagtcatgcaatctatacagacacagattgagatgagtctaagaatatatgaaatatccaagaatggattcaccatattaganacacacctggatttctggatcagcaacaacatactgcttcaggagtctatcaccaaatgcacgtgaaacagcaagaactccaccaactctccaagttcctgtaaacatagtgtttagaatttccatagtgacaaacaagatgaatcttataataaatcaaataacanacagctaactagaagataaccttaccagcccacataacanagccacctgcatcttcaatccttcgcctctcatcagttngatct

SEQ ID NO: 11656 - DNA, 281 bp, Glycine max
  unsure at all n locations
aaaaacaactaacgcatgtgggatggcatgntgcttacaatctgcgataactgtagtaaaaacaatcttctttaaaagaccctttgaccttaaaattcgaagtggaacgtgctgcatcagtggatgcacactgattattatatctggctgatattacattaggccttgggcaacctcgctgtaaaaagagaaaagatattttaactatgacatgtgatgttacattggtattgagaagagatacgcatgcacaataaagtattctctgaaccatggaatgc

SEQ ID NO: 11657 - DNA, 274 bp, Glycine max
  unsure at all n locations
ccttatngctaatgattatgccatgttcatctaacttattcctaagtacccattttattcctatgatgggagagatttcaggtctcgttactagcgcccacacattggttctttcagactaatttaattcttcttgcatagcaactatccaatgatcatctattatggctccatctatgtttgtaggttcacccatagacaccaaattcatactatagcataagtctgtaagagaatggctaatcgttaccccttatgagatatcacaaataat

SEQ ID NO: 11658 - DNA, 299 bp, Glycine max
  unsure at all n locations
gatggcttcttcccattccaagcttcaattggagtcttatcttntacagacttagttggacattctgtgagtatgtaaacagcagtgtagactgcttcagcccagaatgtgttaggtagtcccttttccttgagcatcgatctagccatttccataactatgcgattctttctctcggantaatccatttgttgagaagaatatgcgactgtaagttatcgctcaatgccttcatcctcacaaaatctttcaaacttgcgagaggtgtactctttgtcgcgaacacttcttaagtactt

SEQ ID NO: 11659 - DNA, 263 bp, Glycine max
  unsure at all n locations
tcttcaagaagagagccttccncaacagctaatttcaatcattatgcattgtattaattcagtccaatctaatctattgtggaatggtcataaggttgcccctttcttacctcaatgtggctcgagacaaggagatcccatgtctccgtatatttctgtgacgtgtatggataagccatctcatataatcctttaagctcttcatgcaagtcaatggaagcctatgagagctggtcgaaatggaccattcatttcacacttaa

SEQ ID NO: 11660 - DNA, 282 bp, Glycine max
tgaacctacaacagtcccagaattctgacaatctgccttctaaagctgcccaaaatcccaaaaatgtcagtgccatttcattgaggtccggaaaacagtgtcaaggaccttaatccgtagcaccttccttatctgcaaatgaacctgccaaacttcactctactccagaaaaaggtgatgactaaaatttacctaacaatttctgtgcaagtgaatcttctctcacaggtaatactgatttgcaaaagcagcacattccccctcttccattcccttcaagag

SEQ ID NO: 11661 - DNA, 378 bp, Glycine max
tgcacaccaagtattccatctatggttgttttaccgattcacatcctcagacaatggggaaaggtaactgttattgatgtcaaacacaacctcttggcataagcggttgaaaaggtctgcaacttcagcatcactaccaagccaatgctcaattatgccacgataatgaaggtaccccacatcctctggggagttaatcaagttgtccatgaagataacataggatgtaatgtcattgctgcaatcaagatgacactgctcaaaggcaatcaggttgaggaacaaagacttggtaccgtcgtggatcaagagccgtggtattcgcagtttgccatccttaaatttgatgtcccagaagcgatcggtcttttttttttt

SEQ ID NO: 11662 - DNA, 319 bp, Glycine max
  unsure at all n locations
gcatgggcagttatgtctccgcatngatnggtaaatctgttcctcanattcctgnaaaatgcaaagaaccaggtacattcagcataccttgtattatatggaatagtaagtntgacaatgccatgctagatttangagcctctgntagtgttatgcctctgtcgaattttaattctctatctctaggtcccttgcagtcaactgatgtggtaattcatttagctaatagaagtgttgtctatcctgttggtttcatagaagatgtcttacgtagagttggtgaactgattctccctgttgtttttatatcttgaatatg

SEQ ID NO: 11663 - DNA, 325 bp, Glycine max
  unsure at all n locations
atcttacacgatttccatttctcctgtgtgataagaaaatatattatatagtattccaattggcacttgttattttctacaaaagtaggtgagatctgctagtgctaatgatatattcactatgtatagaactatgttatttatgaattggccacaagctcttaccttacaactgtcaatgtaatgtggctcattggatatttatatgcactttcgtgccactgtcagtctgttatactagattaccttgccagcaagactatntgttcagatgatttggtagttgtctcaccagatgttggcggtgttgccagagcacgtgctt

SEQ ID NO: 11664 - DNA, 372 bp, Glycine max
  unsure at all n locations
aatgtccgattcggngacataactcatctagacgctctaaattgaacaacgcaagctctcgagaaattcgaatggtcataacttttcacacggatgtccgattcggggacataactcatctagacgctcgaaagtgaacaacggaagctctcgagaaattcgaatggtcataatatttcactcggatgtccgattcgaggacataatatatcgagatggtcaaaattgaacaacggaaactgtcgacatattcgaatggtcataacttttcacacagatgtctgattcggggacataactcatctagatgctcgaaattgaacaacggaagctctcgagaaattataatggtcataacttttcacaccgatg

SEQ ID NO: 11665 - DNA, 248 bp, Glycine max
ccttatgatatcaaacataaattgggataaggtcatatcgtaaccgatgctctctctccgcgtcatgcattactttctatgcttgaaacaaaatagactggtcttgattgtctgaaaaacatgtatgaaaatgatgaaacttttggagagatttttaataattgcgaagacaatttacaacatggtttctttagacatgagggcttccttttcacagaaaacaaattgtgtgcgcctaaatgttctac

SEQ ID NO: 11666 - DNA, 265 bp, Glycine max
  unsure at all n locations
gaatatatcgagacgctcgaaatngcataccgaagctctgagacgactcaaacgactataactatttactccgatgtctgatgtgagcccggaatatgtcgagacgctcgaaagtgaataccgaagctttgagcagtatcaaacgacactaacattttactcggatgtctgactgagtcccggaacatatcgagacgctcgaaatggattatcgaagctctgagcagcgttatacgaggataaccttttactctgatgtctgatt

SEQ ID NO: 11667 - DNA, 369 bp, Glycine max
taacaaaaggcatgcgaagtgggtggaattcctagagcaattcccttatgttatcaaacataaaaagggaaaaggtaatattgtagctgatgctctttctcggcgtcatgcattactttctatgcttgaaacaaaattgattggtcttgaatgtttgaaaaacatgtatgaaaatgatgaaacttttggagaaatttttaaaaattgtgaaaaaattttagaaaatggtttctttagacatgaaggcttccttttcaaagaaaacaaattgtgtgtgcctaaatgttctactagaaatttgcttgtttgtgaagcatatgaaggaggtttaatggggcattttggggtccaaaagactctagaaacatt

SEQ ID NO: 11668 - DNA, 284 bp, Glycine max
gttcctctccccatttgaaacctgcatttttcttgagcactcgattgggaggtgctgccaatgagctaacgttgttcacaaactttatatggaaactggctaagccatgaaaactcctcacctgggtcacagacttacgtgtaggccagtcttgaatagccctaaccttgatcttatgaacttgcactccttttgaactcacaccaaagccaagagacacaacatggttagtacataggatgcattggtcaagattggcatacaatggttcttttctaagcaca

SEQ ID NO: 11669 - DNA, 346 bp, Glycine max
  unsure at all n locations
gctctcgagaaatacttatggtcataactnttcactcggattgccgattcaggtgcataacatatcgagacgctcaanattgaacaacagaagctctcgagaaattcaaatggtcataagttttcacatggatatccgattctgtgttataatatatcgagacggtcgaaattgaacaacgactcgagaaattcaaatggtcataacttttcactcggatgttcgattcaggcgcataacatatcgagacactcggaattgaacaatggaagctctcgagaaatacaaatggtcatagactttcactcggatggccgattaaggcgcatcacatatcgagacgctc

SEQ ID NO: 11670 - DNA, 383 bp, Glycine max
ctgatgcaacatttggagaggttaatgaatcttcgagatgatgcgctccatgagaggttggatcaaatggagaatagagatcataatgaagaagaaaggaggagaagagggaatgatggtgttcctagacaaaaccgaattgatggtattaaactcaacattcctccatttaaaggaaagaatgatccagaggcctacttggagtgggagatgaaaatagagcatgttttctcatgcaacaactatgaggaggaccagaaggtgaagcttgccgccacggagttttccgactatgctcttgtgtggtggaacaagctacaaaaggagagagcaagaaatgaagagccaatggttgatacatggacggagatgaaaaagatcat

SEQ ID NO: 11671 - DNA, 445 bp, Glycine max
  unsure at all n locations
gtgtntagtctgaattggggttgagtacttaccctnttctgctctcctaacctcgtatggtatttctcacagactaatttgtccccacactcatcatcaaaatggtgtggttgaaagaaaacacagacatatagttgatctgggccttaccttgntacatcatgcatctttacccttatagttntgggactatgctgttactactgttttctatctaattaatagacttcctaccacttccctcaactntgctattccctttgtcactcttttcaacaaggatcctgatttccaattccttaaaacttttggctgtgccttttttttcttttgttagaccttatcatactcanaaacttaattnntcgtctcaagagtgtctgttnggngtactcctcatctcataaaggtttcaaatgtttgtcttcaactggcagaatttata

SEQ ID NO: 11672 - DNA, 438 bp, Glycine max
  unsure at all n locations
gacccatgtattctgcaacatttccactaccattgngtcctagggaagtagtggaaagtatttctacaagagattgttgcaatgcttccatgccttgatttanagcatcctcagcctgctgggaagactgttgtagattacaaattcccatcaactgctgatcttgtaatggctcaaggtggttcttgatgatctgaaacccanaatacaagaaacgagtcaaaaacaaacaaattatgtacacaagtgaagttaattactatcattntagaatgtggattngacctaactcgaccccaaaaattagattataaggtgagagttacacctcacttatatgctctgtcttgatcttatctcttctcaatataggacttggatttctttcaatatacctcttcacacttagcaccctttggatttgatgcgtgaataaca

SEQ ID NO: 11673 - DNA, 322 bp, Glycine max
  unsure at all n locations
ttgagccaattcaaacgacaataactntttttcggatgtttgattgagtcccgtaatataacgagacgctcgaaattgaatgttgaagctctgagctaattcaaacgacaataacttttttctcggatgtctgattgagtcccttaacatatcgagaccctcgaaattgaatgttgaatctctgagccaattcaaacgacaataactttttacttagatgtttgattgagtgccgtaacatatagagacgctcgaaattgaatgttgaagctctaagccaattcaaactacaataactttttactcggaagttaattgagtt

SEQ ID NO: 11674 - DNA, 369 bp, Glycine max
  unsure at all n locations
cgtgattcttaattatattaaagagttaaaanaatatatgagattaataaaattagagaatattatgatatatatttttagttaccatgtaggtacttaaataaattagaagcttaaggtagttgaacatgttgtgaattattctgaagttaaatntgtgtgttggtggtggttttgtttcgttatgtacgttcattaaaaaatgagaaaattaattagtagtcttagaataaattaaaaacactgtgaataaataattattatatctaagttatataatacacataaattaaaacagtacggtgatggagatgagagacatagagacatacataataaacataacataatttaacaagaaatacgaga

SEQ ID NO: 11675 - DNA, 370 bp, Glycine max
  unsure at all n locations
tcactatgaatgacaaattccttgngataaaggtagtgttgccatgttntcaaagcccgtactaaggcatacaactccttatcataagttgaatagttaagggtaggaccacttaactnttcactaaaataagcaattggatggccttcttgcatcaacacagccccaatcccaacatttgaagcatcacactcaatttcaaaagatttttgaaagtttggcaacgcaagtatggnggcattagttagcttttgcttaagaacattgaaagcttcttcttgtttctctccccatttgannaccaacattttcttgagcacttcattgagaggtgctgccaatgtgctaaaatccttcacaaatcgtctat

SEQ ID NO: 11676 - DNA, 333 bp, Glycine max
  unsure at all n locations
gcgcatattatatcgagacgctcaaattaaccaacggaagctctcgagatattcanatggtcataacttttaactcggaggtccgattcaggcgcataatatatcgagacgctgcgaaatgaacaacggaagctctcgagaaattcacatggtcataacttttcactcggatgtcagatcaggcgcataatatatcgagacgctcagaattaacaacggaagctctcgagaaatccaatggcataactttcactgggatgccgttcacgccataatacatgagacctcatattgacaacggagctctcataaatcaatggcatactttcactc

SEQ ID NO: 11677 - DNA, 359 bp, Glycine max
tcaagctgtgaggacctgtatatccttgtttccttacaagaatgtctgggcttggaagttgcaaagtccagcaagggcgatgaaatgactcaccgaaaatatgccctttgtctattagaggatactggttttcttggctgcaaaccatcctcccttccaatggatccaaatttaaagctcaacatgcccagaggtgatttactgcccaatccctcaatgtacatgcgtatacttggtcagctcatgtacctaactatttcaaggccggatattacatttgttgttaacaagctaagccagtacatgcaacatctcaagacacctcatgtagatgttgcgatcatctgctacaatatatc

SEQ ID NO: 11678 - DNA, 350 bp, Glycine max
  unsure at all n locations
agcttatctcctaatgcacctattccattcctcccatggtcatcatcaccataaacagcaataacctctctccagccaaagtagttaacagagtctgctattgcagtcatttcataaatgtcactaaaagcagctctaataaagaatgggaattgaagtgaagaaagagtatggtcagtggctgtaaatgatagtagaggaactnggagctcgttcgctatatgagatatgacatgagctgttgtagacgtctggggaccgattatagccacagtttgtgtgccatgagctgcaggctatacacacaatttatgtaaccaagagaataatctgcaaactttgagaacttg

SEQ ID NO: 11679 - DNA, 344 bp, Glycine max
  unsure at all n locations
agaatgaagctctgataccacttgttggacaagtggcctcagatatcttaagaagggggggttgaattaagatattacaaattatttccccanttaaaaattctatttaactttctattcaagttataaattcccttaataatgaatntcttaaatattaattcaaatagaacaagttgaatatgaatataaaacaataataaataaagggagttaagggaagagaaagtgcanacctcagattatactggttgggccacacccttgtgcctacgtccagtccccaagcaacccgcttgagagttccactatcttgtaaattccttttataagttctaaacaca

SEQ ID NO: 11680 - DNA, 395 bp, Glycine max
agcttaacaaggctctctatggctaagttctaattctccaaggcagcggattcacaggttaaaatctactatacttgagcatggcttaggaacagacaggtgacatgcttctctgttcatctacacacatcaagagcatactgtctatcttttagtctatgtggatgatatcatcatcacaaacagttttgtctatcttagtcggcagctaactttcaaactaaacattgccttgtctcataagaaactgtgtcatttggactattgtttgggactagagatcaaatatcatgcttataattctatactattgactcatagcgattatattcatgatttacttcacaaaactcatatggctgaagcacattctattttctctcccatggttccta

SEQ ID NO: 11681 - DNA, 413 bp, Glycine max
agcttgaaggtaaactagatgccttggttaacctggtaacctagctggccttgaataaaaaatctgcacttgttgccacactctgtggtttatgctcctctgccgaccaccacacagacctttgcccttctgtgcagcaatctgaagcaattgaacagcctgaagcttatgctgcaaacatctacaatagacctcctcaacctcagcagcaaaatcagccacaacagaacaattatgacctctccagcaacaggtacaatcccgggtggaagaatcatcccaaccttagatggtcgagtcctccacaacagcagcaacaacaacaaccttattttcaaaatgctgctggcccaagcagaccatacgttgctccaccaatccagcagtaacaacaacaacagcaaccgcaatag

SEQ ID NO: 11682 - DNA, 354 bp, Glycine max
gaacaagctacaaatggagagagcaagaaatgaagagccaatggttgatacatggacggagatgaataagatcatgaggaagcggtatgttccggctagttactcaagggacttgaaattcaagctccaaaaactaacccaaggcaacaagggggttgaggagtatttcaaggaaatggatgtgctcatgattcaagcaaatattgaagaagatgaggaggtaactatggctcgatttcttaatggtttgactaatgatatccgtgatattgttgagctgcaggagtttgttgaaatggatgatttgcttcacaaagcaatccaagtggagcaacaattaaaaaggaagggagt

SEQ ID NO: 11683 - DNA, 410 bp, Glycine max
agcttcttagtctcgactgatgaagatgaattcgtggttacttcatgcactcctctaatgacaatagcatcacttccggcactaaattgctgggagtttgaagccatcttctcaattaaatttctggcttcagaaggggtcatgtctccaagggctccaccactggcaacatctatcatacttctctccatgttactgagtccttcataaaaatattggagaagaaggtgctcagaaatctggtggtgaaggcaactggcacataatttcttaaatctctcccagtattcatataagctctctccactgagttgcctaatttttgaaatatcttttctgatggtcgtggtcttggaagtagggaaaaatttttctaagaaatctctcttgaggtcatcccagctcgtgat

SEQ ID NO: 11684 - DNA, 386 bp, Glycine max
  unsure at all n locations
ctgacagccaatgggtgagtccagtttaagtggttcctaagaagacatgcctcacagtgattaagaatgagaagaatgagcttatccccacaagagtgcagaacagctggcgagtctgcattggttataggaggctgaaccaggtgaccagaaaatatcattttcccctgccattcattgatcaaatgcttgagcgcttggcaagtaagtctcattactattttcttgatggtttttctggttatttacaaattcatattgctcctgaggatcaaganaagaccatattcacctgttcctttagcactttttcctataagaggatgccctttggcctatgcaacgcccctgataccttctagtgatgtatgcttagcattttcagt

SEQ ID NO: 11685 - DNA, 387 bp, Glycine max
  unsure at all n locations
tcttctaccccatttctgacagccaatgggtgagtccagtttaagtggttcctaagaagacatgcctcacagtgattaagaatgagaagaatgagcttatccccacaagagtgcagaacagctggcgagtctgcattggttataggaggctgaaccangtgaccagaaaatatcattttcccctgccattcattgatcaaatgcttgagcgctcggcaagtaagtctcattacctatttcttgatggtgtttctggttatttacaaattcatattgctcctgaggatcaagaaaagaccatattcacctgttcctttagcactatttcctataagaggatgccctttggcctatgcaacgcccctgataccttctagtgatgtatgc

SEQ ID NO: 11686 - DNA, 393 bp, Glycine max
agcttgtttgagaagagcgaggtttaacttaatgatatgtctgtgttttctttccacatcagcattttgatgatgtgtgtgagggcaaattatcctgtgaatgatcccatgggtttgaaaaaatgagataagaggtctaaattcacctccccaatctgtttgaacactcttaattttggtatcaaattggagttcagtcatggttttaaattggtaaaaaacagaaaatgtttctgatttatttttaagagaatagatccaagtgaacttagaataggcatcaacaaagctgatataataagagaaaccatttgtggcacaaatcactgtatatagttcaagagagcagatatacagttgaaatcatggtagtctatgtgactttcacataac

SEQ ID NO: 11687 - DNA, 368 bp, Glycine max
  unsure at all n locations
agagagagccttattagagaagnttagttctattgatctntaaanatttgctcagntagaagtgttagagagaagtntagttgaatgcaaaaggtgagggaaagaccttgccgccaacttcagaatcgaagtcgtacttgtcaagagcagcagtgaagtcttcgatggtgaatgaaacaccttccattggagcattgcggcatctctcgtaggcttcttcgaagagtttcttaagcctcgctctctctttgttctgcgcattggctattgctattgagttcgcaatggtaattgaaacgcgcttttgggattgttgggtccaaagagaaggtttggagaagagagaagaagatgagagtggggagcac

SEQ ID NO: 11688 - DNA, 401 bp, Glycine max
cattttaataagtgttagaacaaaaaatgttcttataagtcacatgtatagtaatgttaacaaacttaacatacatattagattgtaattacatgatgatataaaattattttatactattaatatataacctattttttcaaataaaattatcatactttaatgtaatcaaatgattattatgatgagaaaactaatataaaataaccctctttaatatgaaattaaccatttcacttacaagaattgatattataataatatattattatataacagtgaaataaaatacaatattgaaaaggtgataacaaaaaggtgtattcttaaatttgttaaaaaaatataaagtaaatcatattcataaattaattttaggtctagacgatcccatgatcact

SEQ ID NO: 11689 - DNA, 436 bp, Glycine max
  unsure at all n locations
ttgaactcctccaacccttgacctgacttcttggaaagccttttcacagcaaactcttggccatccttcagtcttccctgctaaccaaattgttagaaatatttcgagttatgaaaacaaacatctatagttggttttccatatcaccttgtacacaggtgcaaagccaccttcttccaatatgttactctcagtgaagttntcagtggctctttctatgatggggaaatcaaatgtggacaaatcaatgccttcttttctcagttttcgtttgaaatggttcctataaattattcttgctacctctgataggtttgaagataacaatagagaatcactatgacactcacaatgtgcacgtatgattcataaacctactatcatatattagatgttatcaatatccaagacaaaaattacctggctttctgagtat

SEQ ID NO: 11690 - DNA, 357 bp, Glycine max
  unsure at all n locations
gcttgataacctagccctatgcaaatggagctttaggtgatcatgatttccatgtattatggatttcaggttatatcaaatggatgtgaagagcacttttctcaatggatacattgaagaagagatatatgtagaccaacctctatgttttgtagacttcanacatctaatcatgtgtacaagctgaaaatggctcggtattgtttaaaacaagaacctacatcttggtttgaaagaatgagcagatttctaattaagaaatcatttgtaagaggtcaagttgacacaacatttgttatcaagagatcaaataatgagtggttgattgtgcatatttatgttgaagacataatcttt

SEQ ID NO: 11691 - DNA, 490 bp, Glycine max
  unsure at all n locations
tccatcaagatgagtggagggagagggagagaaatagcatgatattatatgcctcaaatgaggtctgaacattgaagcataattctcaaatgatcaaagttgaaaataatacacacatatgatctctatttatagcctaagtgtcacacaaaattagagggaaatttgaatttctattcaaatnttacttgaattggaaattgaatttgtggagccaaaatttcactaattatgattattaaattttagctatgattcagcccacaaattcaagatcaagtccaagattctccactaagtgtgcttaggtgtcatgaggcatgtatagcatgaaggacatgcacaaagtgtgactatatgatgtggcaatggtgtgtagcaagcaaatgctcacctnctcctctaaaatataattggattgngcttcttccaattaaaataaattaattcccaacacacatcanatttcacttaatgatgcgaattataa

SEQ ID NO: 11692 - DNA, 408 bp, Glycine max
agcttgctttgaaaatttccctcaccctatgccttacaaactacaatggttgagtgagaattgggagttagttgtaaatagacaagttttgatatgcttctccattggaaaatatgttgatgagatattgtttgatgttgtccctatggaagctagccatcttttacttggaagaccttggcaatatgatagggatgttgtccataatggggtcacaaacaatttttcatttgtacataaagggcaaaaggttagccttacacctttgtctccaagtgaggttgtaaggatcaaataaaaatgatagtgaaaagagaacaagagagaaaagaagagaaaaacaaaattgatgaaaagagatagaaacatgaaataagcgaaaagaaagaaaataatggagataaagaa

SEQ ID NO: 11693 - DNA, 363 bp, Glycine max
  unsure at all n locations
gatgatgcactccatgagagggtggatcaaatggagaacagagatcataatgaagaataaagaaggagaagagggaatgatggtgttcctagacaaaactgaattgatggtattaaactcaacattcctccctttaaaggaaagaatgatccagaggcctacttggagtgggagatgaaaatagagcatgtnttctcatgcaacaactatgaggaggaccaaaatgtgaagcttgccgccacagagttttctgactatgctcatgtgtggtggaacaagctacaaaaagagagagcaagaaacgaagagccaattgttgatacatgggcggagatgaaaaggatcatgatgaagcggtatgtg

SEQ ID NO: 11694 - DNA, 391 bp, Glycine max
agctgtgaggattttcaaacgacaatatctttttactcggatgtctgattaagtcccgtaatatatcgagacgctctaaattgaatgttgaagctctgaccaaattcaaacgacgataaatttttactcggatgtctgattgagtcctgttatatatcgagactctcgaaattaaatgttgaagctctaagcaaattcaaacgacaataactttttactcggatgtctgattgagccccgtaatacatcgagacgctcgaaatttattgttgaagctctcagcatattcaaacgacaataacattttactcggatgtctgattgagtcccgtattacatcgagacgctcaaaattgaatgttgatgctctcagcaaattcaaacgacaata

SEQ ID NO: 11695 - DNA, 301 bp, Glycine max
aaacagaagaacactaccaaaagacctggaagaaacagcaatgtgacaccccccaaaacaattgctatctttgctccctcgctcattttcctgtatgatagaacactaggtctctctgagactgttagtggagacaatgtggtattaggggaaactgaagaacattgtttcaaaggtgctccacataacatcaaattacctctaaatgaggaggcatggaacttatggagacctgaaggaatagagccattcaagtagttgaagctcaaatccaaatccttaaggctaggaaggttaacat

SEQ ID NO: 11696 - DNA, 293 bp, Glycine max
  unsure at all n locations
ctaagctntcattactcctcatgcttctcaccatgtctaataaggtttgatttcttcgttctgccacaccattctgatctggagaaccaagcatagtgtattgtgcaacaatcccatgttcttgaagaaatgtcgcaaatgaacctggtgcttgtgcattctctgtgtatctacaatagtacttcccacctctatctgatctcacgatcttaatttggtttccacactgtttctcaacttcagcccttaaaactttaaaggcatctaaagcttctgatgtaatcctatcccac

SEQ ID NO: 11697 - DNA, 409 bp, Glycine max
gagctttaccgagtgtctgaaagcctcatctatggttgagaaccactccctatctccacacatgtgattgctagcaccggagtcaagaaaccaagtctcttcttgttgcaagttgtcagcttcgacaagagacatgaacagcatctcttgttcttcatgaatctcagcataggtagccctctccttccatcttgcgcattcctattggaagcgtcctaatttgtggcacttaaagcactccactgtggctttgattgagactgccttcctctgcctctgcctcgaccccgaccaaagcctctacctctgcctgtacctccattctgttcttcatgcgagaccttcaatgcttgctcataccttgtgtaccaccatgagaatacattctttgttcatgaaccaaaaggct

SEQ ID NO: 11698 - DNA, 323 bp, Glycine max
tgaacaacggaagctctcgagaaaatcgatttggcttttattctcacacagatgtccgattctgggagataatatatcgagacgcacgatattgtacaacggaagctctcgagagatttgaatggtcataacatctcactcggatgtgcgatccggggacatatattatcgagacgctcgatattgaacaacccgagctctcgacaaattataatggtcgtaactttttacacgaatgttcgagttcgggacataacttatctagacgctcgaaattgaacacccgaagctctcgacaaattggaatggtcatacttctcaca

SEQ ID NO: 11699 - DNA, 341 bp, Glycine max
  unsure at all n locations
agcttaataaatctatatatggtttagatcacgcctcccatcagtggtaccttaagtttcatgggataatttcttcatttgggtttgatgaaaaccccatggatcaatgcatataccacacggtcaatgggagtaaaatatgttttcgtattttatatgtagatgatattttacttgcagccaatgatcggagtttgctacatgaagtgaaacaatttctctctaacaantttgacatgaaggatatgggtgatatcttatgtcatcgacattaagattcatagagatagaccttgaggtattttgggtctatcataggaagcctatattaacaaaattct

SEQ ID NO: 11700 - DNA, 409 bp, Glycine max
agcttcattcctttttcactcatgtgtccaagtctttgatgccacaaggttaaattattgacagcctgaataactgctatcatatcctcatctgcaattatgtaaagagatcctcgcttctttccacgagccataacgagattgccttttgttaccttccaagttccatctccaaaagtggtgtaatgcccctcatcatccaactgccctatagatattagatttctctttaagacaggaatatgtctgacattgtgcaatgtccataggaatccattggaggtcttaatgtcaatatcacctcttccaacaatgtcaagagattttccatctgcaaggtaaactttcccaaatcttccagaagtatagttagacaataaatctttagagggagtggtgtgaaacgacc

SEQ ID NO: 11701 - DNA, 387 bp, Glycine max
gcttggagtttcaagtgccaattcgtcttcttcttttgtccagtcttcttctggcttcaattcattagtgggctttccttctgtgtccagcatcttgtgatgttcccagcctttgatgatagctttccaggttctgctatccactgatttgaggaaggccaccatccttgctttccagtattcatagttggttccatccagaattggtggtctgttcactggtcctccttctttctccatgttcatcagaatttatctccctagatctcactcactgagttcgagtgcccgctctgataccaatagaaattctgataccaatgccagatgtcgtacaggatgtcacgacatcacgcttcagaacatgcatattatgtttgagagtat

SEQ ID NO: 11702 - DNA, 338 bp, Glycine max
agcttctaaactttgtacaagaatgaagctctgataccacttgttagacaagtggcctcagatatcttaagaagggggggggttgaattaagatattccatactctttcttctaattaaaaatctatcttactttttacttaagttatgaattcccttaatgacaatcttcttaaatattaattcatatgaaccaacttgaatatgaatataacgcaataataaataaaggagattaacggaagagaacatgcaaactcagttttatactgcttccgccacacccttgtgcctacgtccagtccccaagcaacccgcttgagagttccactaacttgt

SEQ ID NO: 11703 - DNA, 412 bp, Glycine max
agctttagggcatatggaaaacttatttattgtcttgtttggttgtaagaaaggaaagggaagaagtgaaattgaattagagagagaaaataaaagtaggataaatatacaagaatataatgaagtaacggaaaatacttaaataaaattttttggtaaaaaaaaaaggaagagaaattaatattaaagaaatgacttatttattaggattagtatttactatttgctattagtattgttttaaataatcttagtatatatagaattcattttatgtacaagacatttgtttgttccaatacctacacaatagttataccctatcatattaaatttattcattgtcagcctaccattagatgtagactaccatattaaagttataagttcttaaatataacttactaatact

SEQ ID NO: 11704 - DNA, 405 bp, Glycine max
agcttaaaaaaaacaaaactctgacttagtagtgcgtatggtatctttacacacaattaattcagagaaatgaagcagctccaagaccttaccactagaatagaaataatcaggcagctggaaagcctttgcaagccaatccagaacaatcgtctcaagttcagttgcagcaggagaagttatccagctgaaacccacgatgttaagacccgcactgagcatctctcctagaaacccagcaatgctactgttggaaggaaaatacgcaaaataatttgggctttgccagtgcgtcacccctggcagtattttttcctgcacatctacaatatggcaaacactatcaagctagcattgctcaaacaactctacaaactacaagataacgaaactgcaactactaca

SEQ ID NO: 11705 - DNA, 395 bp, Glycine max
agcttggatttccttttagtagggaatctatccttcctaagatggagccaaacccagtcaccctcattaagaactagctcttttcttcctctattgcctttagttgaatacacctttgtttggttctctatttggttcttaaccctctcatgcaacttctttacaaactctgacctagattccccttctttatgtatataagaagtgtccagtgggaggggaatgaggtctaatggtgttaggggattaaacccatagacaacctctaaaggggactgcttcgtggttctatgaaccccctgttgtaggaaaattctacatgagaaagatactcatcccaagacttatggttgcctttcagaagagcccttaaaagggtgcataaagacctattc

SEQ ID NO: 11706 - DNA, 380 bp, Glycine max
agcttgcaaacaagctgcttgttgtaatcttcaaagcccggtggttgagtcatgaagacttcctcctgaaggatgccattgaggaaggcattattcacatcaagctgctggagtttccacttatgagtaatagcaagagtcagaagaattctgacagtaacaagcttgattataggtgagaaggtctcattgtaatcatacccaagtctttgatgaaagcctttgacaacaaacctgactttatatttgttaactggacgatcagggttttcattgaccctgaagacccatttgcaaccaatgggagacctgtatggaggtaaaaagtggcatgaagcttttcccaaagatgccatgtcgttttgtcttctactatatga

SEQ ID NO: 11707 - DNA, 374 bp, Glycine max
gtctggcaacctagtaactcagcttgtcatttatcacaaatctgcatctgcacctgttgcaagagtctgtggtctatgttcttctgcagatcaccatacagatctttgtctttctttgcagctatctggagtcaatgaacaacctgaagtctatgttgcaaacatttataatagaccccatcagcaacaaaaccaacaacaacagactaattatgatctttcaagcgacagatacaatccaagttggaggaatcatccaaatctgagatgggcaagtcctccacaacaacaacagctggtcccttctttccagaatggtgctggtccaagaaagccatatgttgctcctccaatgcagcaacaacaaagacaac

SEQ ID NO: 11708 - DNA, 409 bp, Glycine max
  unsure at all n locations
agctttactatgcaaggtttattctatgaaaattccttcatctaacttagcatcaaactttcctaagttttcttttccattgtttaatacaaagcatttgcaaccaaaaacatgaaggtgtgaaatgttaggttttctaccatgaaacaattcatatggagttttctttaaaatgggtcttattaaagccctattcatgatatagcatgcaatattaacggcttcagcccaaaatttttttgaaagaggagtgtcatttaataaggttctagcaatttcttccaaagatctatttttcctttcaacaactccattttgttgaggggttctaggtgcacaaaagttatgttcaatgccatgtttatcacanaataattcaaattctttattttcaaattcacccccatga

SEQ ID NO: 11709 - DNA, 356 bp, Glycine max
  unsure at all n locations
aacatcagaccacttccatggtgttgtatctacttcacaaggacttgatggggcctatgcatgttgaaagccttggaggaaagaggtacgcctatgtcggtgtggatgagccctccatacttacctgtgtcaacttatatcaaagaaacatccgactcccttgaaggattcaaagagttgagtctaagacttcaaagacaaaaagactgtgttatcaagagaatctggagtgaccatggcagagagtttgaaaacaacaagtttactgaattctgcacatctgaaggcatcactcatgagttctctgtcaccattacaccacaacaaaatggcatagtngaaaggaaaaacaggac

SEQ ID NO: 11710 - DNA, 359 bp, Glycine max
  unsure at all n locations
acactctcatctcatgtatggaatattcatatncattactcactacatgcaatatctgcatgcagcacgcttagttatcacaccttctttccctaggtcttcttaaagtagtacaagttggtaattcttcacatcattactccaacagttcattgnggcttcaatgggcacttcaaatcttaagaatcccttaccaagctgtggtcaaaatctgttccttccaaagcatgttgtgttattgctgagtttcttcctgggggaacattgaaacaatacttgtctaataataggcagaacaaactttcatataaggttgtgattcagctggctttatacctctctagaaggtgagtcacatt

SEQ ID NO: 11711 - DNA, 307 bp, Glycine max
  unsure at all n locations
tgagtcaacggagcggctatctgagcattaattttgacgaaacggcggtagaacccggttaggcccaagaaaccgcgtagggccttagttgttgtcggaggcggccagtggagcatagcttgtatcttataagaatcgggctcgacacctcgacgtgaaacaaaatggcccaagtattcaatccttcgttgaccaaagatacacttggaagctntcaaacggaaatcagcttgttgcagagtacgcaggacgcaatccaaatggttgacgtgggattggaggtcactgctatatactaaaatgtcat

SEQ ID NO: 11712 - DNA, 310 bp, Glycine max
  unsure at all n locations
atattctcaacagtcacatgtttgtacttggttcttgaatggccatcaaaagcttatatatatgtgacttgagacacgaatttgctaagagattntcagaacaaaaaggtcttatcctcttaaaaagcaaaatcgttntatcctcttacaaattccttggctaaaacacttgtgattcagtaaggaattatntgagtgctcaaattgttcaatctatctctttcaagagagatttcttcttttcttcttcttcattctgaanagggattaagagaccgagggtctctttgtgtgaaagaattctaaacac

SEQ ID NO: 11713 - DNA, 328 bp, Glycine max
  unsure at all n locations
cagctcgagaataagcttcttcgcgtngaagaatgngatctgcatgcattatatacacataagtctcattcttcaacgccagaaacacgtaacccacgtgtcttttgcatgggcccacttgtttctaacggtggaggtgaacatgataatgatgatagtggttgcatgagttggctcgactcgcaaccgagtcgaaccgttgtgtttttaagccttggaagctacggaaggttctcgaagagtcagataagggagatagcgttagggttagagaggagtggacaaaggtttttgtgggttatgaggaacccatatgagaagaagtgaa

SEQ ID NO: 11714 - DNA, 334 bp, Glycine max
  unsure at all n locations
tctacttcaaaaacccttgaactacttcacattgatttattntgtccctctagaactataagtttaggtgaaaattactatggctntgtaatagtagatgattactcaatgttcacatgggctntatttttgaaaaccaaaatgaagctttngatgcttttcgcanacttgccaagatgattcanaatgaaaaaggtcttaacattgtttcacttagaagtgatcatagaggtgaatttcanaatgagttctttgaaatctttttgaagaaatgtaattaccataatatttctgaccaaaacacctaacagaatgggtttggaaggaaaataat

SEQ ID NO: 11715 - DNA, 516 bp, Glycine max
  unsure at all n locations
gctgcctgccctgattattgagggactcatggcactatgaattatatatttcttgtgataaaggtagngttgccatgttttcaaagcccgtactaaggcatacaactccttatcataagttgaatagttaagggtaggaccacttaacttttcactaaaataagcaattggatggccttcttgcatcaacacagccccaatcccaacatttgaagcatcacactcaatttcaaaagattnttgaaagtttggcaacgcaagtatgggtgcattagttagctnttccttaagaacattgaaagcttcttcttgtttctctccccatttgaaaccagcatttntcttgagcacttcattgagaggtgctgccaatgtgctaaaatccttcacanattgtctataanaactngctaagccatganaactcctcacctcggtcacggacttangtgtangccattcttgaatagcccctaaccttctctcatcaactngcactccttttgaactcacaac

SEQ ID NO: 11716 - DNA, 393 bp, Glycine max
  unsure at all n locations
gctctcatatgttatgcgtctgaatcggacatgcgagcgacanattttgatcatttttatttgccgagagccttcggtgatcaatatctagcatatcgatacgctatgtgcctgaatcggacatgcgagtgaaaagctatgaccattagaatttctcgagagcttacgttgtacaatntatagcgtgtcgatacgctatgcgcctgcatcgaacatgcgagtgagaagatatgagcattatactttctcgagagagtgccgctggtcaattcctagcgtctcgatatgctatgtgcccgaatcggacatgcgcatganaagtatgaccatgttaatntctcgagagcatctgatgatcatgtctagcgtctcatactctatgcgcctgaatcg

SEQ ID NO: 11717 - DNA, 297 bp, Glycine max
  unsure at all n locations
tagcctgtcgacatattatgcgccagaatagaacatccgtgtgaaaagataagaccatttgaatttctcaagaacttccgttgttcaatttcgagcttcttgacatattatgtgcccgaatcggatatccgtgtgaanaagtatgacactctgaattcgcgatagttccgatgttaattcgagcgttcgatatatataccctgatcggcatccggtgaaagtatgaccttgaattcacagagcttcgtgtgattacgagcgtgtcattgtgatccctgatcgactccggtgaaagta

SEQ ID NO: 11718 - DNA, 351 bp, Glycine max
  unsure at all n locations
aaccattatatttatggcttttgattgtgatgaatgataatataaataagttgagtctttgtttaccaatggttaacaagttggtgcaccccagcatcattggagcaaacatgggccttggcaagctgccacatccaattagtagtagcatcaacaggaggtgtaaccacgcgctntgaccgggaattaggtccagcatgagggaggctaagttctatagccacaggcttgagagtgccacgtggtgtcaagaaaaagatggtgcgtgtggcatatgatttcctaccatcaagggcattgatcccttctaagaaaggtagatatatatcatgataatcaatcataaacagc

SEQ ID NO: 11719 - DNA, 333 bp, Glycine max
  unsure at all n locations
agtgagctgcccagtgagtataatgttagttccaccttcaatgtctctgatttatctctttttgatgcagatggagaatccgatttgaggacaaatccttctcaagagggagagaatgatgaggacatgttcaagaacaanggcaaggatccacttgaaggacttggaggacctatgacaagggctagagcaaggaaagccaaggaagctcttcaacaagtgttgtccatactatttgaatacaagcccaagtttcaaggagaaaagtccaagggtgtgagttgtatcatggcccanatggaggagaactaaatgacaccactctgtctcaat

SEQ ID NO: 11720 - DNA, 288 bp, Glycine max
gacaagaagtttaatgagtgtatgagcaactcaggattcaacagatgtgacatggaccattgctgctatgttaagaaatatactaatagttatgttatccttgtcgtgtatgttgatgacatgttgattgcaggatctagtatggcagaaattaacaagttgaagcagcagttggcagaaaactttgaaatgaaggatcttggtccagctaaacaaatccttggtatgagaattcttagaaacagatcagaaggaattttgaagctgtctcaggagaaatatatacac

SEQ ID NO: 11721 - DNA, 440 bp, Glycine max
  unsure at all n locations
ctttcttgatgataatggttactagacttactctttgctctatctgtcccaagtgagattcgaatacgagaattccatgagagtcttgttttgaagtcatcatctgagtggagtgcatcatacaatgattactgtagtactcatagatntagaagcctttgatcatgctctgaacaatatccaacaagctcaacaacattngcatgccgtattctgtcaatattatntatcaattcaataaattcatcatccttctggtgtgcagaggctctcttgcccaacttgtctgcataacaaataccatcttcaataactaaagctacaaaataactatatattcttcanaatcaaatntctgatgtgatcaagatcagtaaataacaacaatagaagaaacttcanactaggaataaacacttcaattntctcaatagtcacag

SEQ ID NO: 11722 - DNA, 372 bp, Glycine max
  unsure at all n locations
tttttcagggtgtgtttactggtaaatgtgggacaagtttagaccatggtgtagtggttgttggatatggctctgaaaatggtgtggattactggctggtgaggaattcatggngcactggatggngtgaggatggctatttcaagatgcagcgcaacgtgagaacctccacgggcaagtgtggaattacaatggaggcctcctaccctgtgaagaatggtctaaactctgcagttcctaattcagtttatgaaagcactganggtgtatgtagcagtgcttgatataaccttcatcgntatttatgaccttcgaatttggaaagaggaacacgtgctgaagtngcaagaaagtgatgtttctgtatatctt

SEQ ID NO: 11723 - DNA, 437 bp, Glycine max
  unsure at all n locations
atttcgggttcctgtaactntccaaataatgtagcaaaagacatgttagttaaatctcgtgactcggtaatggatgttaccttangttgtcattctctgcttaaacatctcaatactctatttatgtgatcttcanttggaanaaatatccctaaagatgcaagatgaattattatatgtgtaaacctctcttgcatgtcttgtatactttcatttgaattcattctaaataattcatactcatgagttaaagtatntatcctagatcttcttacatttgttgtgccctcatgtgttacttgtagggtatcccacatttcttttgcactnttataatttgataccctanagtacttatccattcctaaggcagaatgtaatatatnntttagctttaagttgtatggactaatctctttcttcttcactcattcttc

SEQ ID NO: 11724 - DNA, 454 bp, Glycine max
  unsure at all n locations
tgaatatgatgtagaagaaagtgaatgtgaaccttttacccctttgaaagacttgtatttaaaaatgttttaaaatacttttaattaatatataaagtattattcctttattagtatatatgtgaggggctgagagtgtcacaataacaagggagctattactaagaattaataaaggaccacaaaatntgaatgataaacaatacagcatgtttaaaaaatttaatatactattattatattcttatctaatatttaagaatattactataatctacacccatgcattaagtataaagtaagtttatattattattcactcatatatcatcattnaatataattttaagataaatattagtagtattatagatgaataaataatattgaatgaagtttaaaattgattacactgtattatatacttatattttattaatacaaacatacttta

SEQ ID NO: 11725 - DNA, 271 bp, Glycine max
  unsure at all n locations
gatcaggagaagacggccttcacatgcccttttggcgtctntgcttacagacgaatgtcattagggttatgtaatgcacttgccacatttcagaggtgcatgttggccattnttgtagatatggtggagaaaattatcaacgtattcatggatgagttcttgatanttgggaaagtgtcatttcatggttcgagaaggcatagtcttgggccacaaactntcagcccgaggaattgaggtagacctggccaagaatgatgtcattgagaaa

SEQ ID NO: 11726 - DNA, 299 bp, Glycine max
  unsure at all n locations
atttttattaaagatctttgaatgttgtaaaanattatgactatgagtgtaagtttttggtacatgtcaattcattagtctttgagttagaaatttattgatttccaccctgtgcgaactcagcatttgttataaaatgtttaaaattcaaagagaaagcatctgtttttattttttattaaatttgcttcacaaccccttgcaaactcagcaggttgcaaaccaanatgcattcatgtgatatagtgcaatccaacaacaacaacatcccgtaaagttcaaaaagctaggcacagtca

SEQ ID NO: 11727 - DNA, 293 bp, Glycine max
  unsure at all n locations
gtcctcggcaagctcatcgtcgctgctcttcgtaagggaatgtacatgtggctncaactngattctcctccttttccttccttccaattcggtcctctctctctccttaaaccctagctagcttcctcgttntctctttctcttttaactccaaatatgcaacttatgagtttctacttctatctgtctcangtatggctggtgctatatacattaaaggagctgcagtaacaaactataaaaggtgaggcatattatgtgctatgaataactaatactatctattatactga

SEQ ID NO: 11728 - DNA, 268 bp, Glycine max
  unsure at all n locations
gcttctgtgggacatcttgacttgctntccaatctgacattcaccatatattctgccttcttctattttcagattgggaatgcctctaacagcacctatgtcaatgatnttcttcatgcctcttaagtgcagatgtcctaatctgtgatgccatattttgacttcatcttctttggagaatagacatgtggaggagtaactggtttcttgaggtgtccataggtagcagttgtcctttgatctgctgcccttcattagaacttcactc

SEQ ID NO: 11729 - DNA, 420 bp, Glycine max
  unsure at all n locations
gtgtggtggtcggcagaggagcataaaccacagagtctggcaacaagtgcaaatttttgattcatggccagttgagttaccaggttaaccaaggcatctagtttacctttaagcttcttagtctcacctgatgaagatgaattcgtggctactttatgcactgctctaatgacaatagcatcactcctggcactaaattgctggtagtttgaagccatcttctcaattaaatttctggcttcagcaggggtcatgtctccaagagctccaccactggcagcatctatcatactcctctccatgttattgagtccttcataaaaatattggaggagaagctgctcanaaatctagtggtgagggcaactggcacatagtttcttatatctcttccagtattcatacaagctctctccactg

SEQ ID NO: 11730 - DNA, 489 bp, Glycine max
  unsure at all n locations
atattcattatgtatcatatatatcaataaaggtgattattattactattgttattggtgtcttatttgtatattatttatattttaaatttaattaatgttgtacgtaacgtaaaaataattatgaaacacacttaagtgaacctgttntatcatctataataaggttttgttatctcaaaccatgatagcanaatgaggaagacatacacctacggccaattgactctaaacctcatgaaagactataccatatataaaagagaggataaagattcatctgcttcatgttgtttatnttttattcttcattnttaattatgataataataatgaggttagttcatattttcaataaacattacaatgttttgagacaagaaatacacaatttacatcaatattatatgttattgataatataaacataaatgtattctcaccttctaacttacaaatgttattaatgtgggtttatatgaactctgc

SEQ ID NO: 11731 - DNA, 432 bp, Glycine max
  unsure at all n locations
cgacaataactntntactcggatgtttgatattgtcccgtgatataacgagacgctcganattgaatgttgaagctctgagctaattcaaacgacaataactntntactcggatgtctgattgagtcctgtcatatatcgagacgctcgaaattgaatgttgaagctctgagccaattcaaacgacaataactttttacacggatgtctgattgagtcccgtcatatatcgagacgctcgaaattgaatgttgaatctctgagccaattcaaacgacaataactntntactcggatgtctgattgagtcccgtaatatatcgagacgctcagaaatgaatgttgaagctctgaggaaattcaaacgacaataactntntactcggatgtctggatgagtcctgtcatatatcgagacgctcganattgaatg

SEQ ID NO: 11732 - DNA, 351 bp, Glycine max
  unsure at all n locations
gcttaacattcaatgtcgagcatctctatatattactggactcaatcagacatccgtgtaaaaagttgttgttgtttgaattagctcagagcttcaacattcaattntgagcgtctcgatgtatgacgggactcaatcatacatccgagtaaaaagttattgtcgtttgaatttgctcagagcttccacatttaattatgagcgtctcgatatattacgagactctatcagacatctgagtaaaaccgttattgccgttcgaatttgctcagaggttcaacattcaatttcgagcgtcttgatatatgactggactcaatcagacattcgagtgataaagtattggcgttt

SEQ ID NO: 11733 - DNA, 513 bp, Glycine max
  unsure at all n locations
atgctgcanacatctacaacagaacaattatgacctctctagcatcaggtacaatcccgggtggaggaatcatcccaaccttagatggtcgaatccttcacaacaacagcaacaacaaccttattttcaaaatgctgttggcccaagcagaccatgcgttcctccactaatctagcagcaacaacagcaacagcaacagccccaaaaataacaaatagttgaggcccctccgcaaccttcccttgaagaacttgtgaggaaaatggctatgcaaaacatgcagtntcaacaagagactagagcctccattcagagcttaaccaatcagatggaacaattggctacacagttaaatcaacaacagtcccagaattctgacagattaccttctcaatctatccagaatcccanaaatgtgagtgacatttcattgaggtcgggaaaatagtgtcaaggacctcaaccagtagcatcttcctcatccacaaatgaacctgcccaacctcactctac

SEQ ID NO: 11734 - DNA, 295 bp, Glycine max
  unsure at all n locations
tacaagacctgatgaactgatattcaatggattntctctttcaataccaagtggcactaccgcagctntggtaggacaaagtgggagtgggaaatccacgggtgttagtttgatagagagaatttatgatccacagtctggtgcagtgcttattgatggtatcaacctcagagaatttcaactgatatggatcagacagaaaattggcctagtcagccaggaaccagttctctttacttgtagcattaaagagaatattgcctatggcaaggatggtgcaactgatgaagaaatc

SEQ ID NO: 11735 - DNA, 262 bp, Glycine max
  unsure at all n locations
tggtcataacgtntcactcggatgtcggattctagcgcataatatatcgagacgctcgaaattgaataatggaagctattgagcaattccaatggtcataactcttaactcggaagtccgattgaggcacataatatattgagacgctcgaaatggaacaacggaagctctcgagaaatncaaatggtcataacttttaactcggaggtcggatagagacgcataatatatcgagacgctcgaaaatgaacaatggaagctc

SEQ ID NO: 11736 - DNA, 494 bp, Glycine max
  unsure at all n locations
tacgagcgtctccatatattatctgtcctcaatccgacatcggagtaaaaagttatggtcgttagaatctgctcagagcttctgttctgaatnntgagagtctcgatatactacggaacacaatcggacatctcagtaaaaagttatggtcgtttggaattgctcagagcttctgttcttaattacgagagtctcgantatatacgggattcattcggacatccaagtaaaaagttattgccgtnntgaattgctcaaagcattcgttgtcaattacgagcgtctagatatattacgggattcattcggacatccgagtaaaaagttattggtcttttattttgctcagagcttctgttttcaatttcgagcatcttgatatattacaggactcaatcggacatccgagtcanaagttattgtcgtttgaatatgctatgagctntcgcgttccattacgagcatctcaatatgctacgggacacaattggaca

SEQ ID NO: 11737 - DNA, 257 bp, Glycine max
  unsure at all n locations
gacaatgcttacaaagtagagctgtccggtgagtataatgttagttccaccttcaatgtctttgatttacctctttctgatgcacatgtagaatccgatttgaggacaaattcttctcaagagggagagaatgatgaggacatgaccaagagcattggcaaggatccacttgaaggactcggaggacctatgacangggctagagcacggaaagccaaggaagctcttcaacaagtgctgtccatactatgtgaata

SEQ ID NO: 11738 - DNA, 374 bp, Glycine max
  unsure at all n locations
aaagcattcaagtgtacaccagaggcagagacaacatttgttcaattgcagaaagtcatgacttcagctccagtgttagctcttcctaatttccagctgcccttcattctggaaactaatgcttccgacactagtattggagcagtattacatcagaatggccatccaatagcataattttccaagaaacttgcacctagagtgcanaagaaaatctgactaattagagagatgttagcaattgttgaagctatagctaagttcagacactacttgctgggacacanaattattatcaaaactgataaaanaagctngagaatcattgatggaacaaccctacagacacctgaacaacagcagtggttacacag

SEQ ID NO: 11739 - DNA, 375 bp, Glycine max
cccaactggccttgaatcagaaaattgtacctgtcgcaaggggttgtggtttgtgctcctctgctgaccaccatacagacctttgcccttccatgcagcaacctggagcaattgagcaacctgaagcttatgctgcaaatatttacaatagacctcctcaacctcagcagcaaaatcaaccacagcagagcaattatgacctctccagcaacagatacaatcctggatggaggaatcaccctaacctcagatggtccagccctcagcaacaacaacagcagcctgctcattccttccaaaatgctgctggcccaagcagaccatacattcctccaccaatccaacaacagcaacaaccccagaaatagccaacag

SEQ ID NO: 11740 - DNA, 324 bp, Glycine max
  unsure at all n locations
ctgcacaagccaaatgagatagttgaatacctgcacagttgngatgaaattntaaattggcatcatccttgaggctgctcatatctctggaaaagtactccaaacaaagtacaaacagatcaggggagagaggatccccttgtctaagacctcgctgccctttgaagtggccataaatggatccattgactgtcacactaaagaaagtgaaagaaacacattccatgatccaagtacagaactgtgcggngaagccaatggacttaagcatccaatccaagaattcccaggaaatggaatcataagctttatgcaagtcaattt

SEQ ID NO: 11741 - DNA, 324 bp, Glycine max
  unsure at all n locations
agatcatgcatacctttctatggctaatataccattatnttcacaattatcatacttcaagtagccaactccctagaatttataagagatcagtccgtgaacaacagtgactccttcgttcacagaacaataaatcaaaatacataccactattctaatcaaaagacttataagagaagttgtttcaaccaaatcaaatcaataacaattcacaactcttctacaacagaatgaaaatgaataaataaaagaatcttatatatcatgctgtgctntcacgctcttcttatcccaacatattaatagagganaacccagaaacat

SEQ ID NO: 11742 - DNA, 470 bp, Glycine max
  unsure at all n locations
agcttaagctccttcaactgcacaaggctcttaatatttgaagagtattcttgtggaaccttcacccgacgaagacactggcaaaaacttatcttctccttcttggacaaagtgtggcaggctgtgggcaagtaaattatcttcccatcagaccttggatgcaactgtgctcttatacccatatcagctagatcttgacgggtattcaagccatcattcgtcttgccttgaatgttaaggagcgtcccaatcacactgtcacaaacanttttctccacatgcataacatcaatacaatgtctaacgtcaagatcacaccagtacggaagatcaaagaaaatggacctcttcttccatatgcaactctgactnttatccttcttttgggtctgtccaaatacagtgttcaggtgttgaacccgctgatatacctgctcaccagtgaacattatcggcgcaatatcatgctc

SEQ ID NO: 11743 - DNA, 473 bp, Glycine max
agcttccttaagaagattactaaagattctagagcttatctacacatacctctctaatagctaagctcacctccttgagatgagaagctagagcttagctacacaccccctatgataggtgagctcacccccatgacaaaaaacatgagaataataaaaaaaaagtgcttattacaaagacaactcataatgccccgaaatacaaggctaaaaccctatactactagaatggccaaaatacaaggtctagacgaaggaaaaacctattctaatatttacaaagataagcgggctcatacttagcccatgggctcgaaatctaccctaaggctcatgagaaccctagggcctttccttggatctctagcccaatctacttggagtcttctagccaatgctattgcggggtaggatagcatcattccctccaccttggaaaggaattgacctcacatcccgaggttcttcatact

SEQ ID NO: 11744 - DNA, 517 bp, Glycine max
  unsure at all n locations
ctaagctccttaaaagatcctaagaagctgagatagctaccatactttttaatagctaagctcatctccttgagatgaaaagctagagcttagctacacacccnctataatagctaagctcacccncatgacaaanaaaaaacatganaatacaaaaaaaatagtccttactacaaagactactcaaaatgccccgaaatacaaggctaaaaccctatactactagaatggccaaaatacaaggcacaaacgaaggaaaaacctattctaatatttacaaagataagcgggctcatacttagcccatggactcaaaatataccctaaggctcatgagaaccctanggccttcccttggatctctagcccaatctacttggagtcttctacccaatgcccttgcgggataggattgcatcattccctccaccttggaaaggatttgacctcaaatcccgaggttcttcatactctggggctcttcctcaacacctgaaaaagaacaaaacatatatat

SEQ ID NO: 11745 - DNA, 441 bp, Glycine max
  unsure at all n locations
agcntgagacttatcatgaccaaatctctggtatatcgcctctaccttaagcaagcattgtattcatttaagatgctagaaaatataacggtagaagaatagtcagatgtctntaataaattgattcttgatcttgaaaacattgatgttactattaaggatgaagatcaggcattactgttattgtgtgctctacctaagaccttngctcatttcanagaaacacttctctatgaaagagattctcttactcttgttgaagtccaatcagccttgaactctaaggaattaaacgaaagaaatgaacaaaggccttctgtacatggngatggactcatagttcgtggaagacagtataagaaggatgataagacaaaagggaaaagatccaagtcacaaactcgatctggatctaatgtaccagacattagatgttatcac

SEQ ID NO: 11746 - DNA, 454 bp, Glycine max
  unsure at all n locations
ctcagctatgctgatacatctacatagacctcctcaacctgagcagcattatcagccacaacagaacaattatgacctctccagcaacaggtacaatcccaagtggaggaatcatcccaaccttagatggttgaatccttcacaacaacagcaacaacaacaacaaccttattnttagaatgttgctggcccaagcagaccatacgttcctccaccaatccagcaacaacaacaacaacaacaacaaccccagatacaacaaacaattgaggctcctcagcaaccttcccttgaagaacttgtgaggcaaatgactatgcacaacatgcagtttcaacaagagaccagagcctccattcagagcttaactaatcatatgggacaattggctacacagctaaatcaacaacagtcccagaattatgacagaataccttctcaatctatctagaat

SEQ ID NO: 11747 - DNA, 492 bp, Glycine max
  unsure at all n locations
gcttataatgttaagctttgtcttatgttgttcatgctgctccccttatctctatcacatttctcttaaactgatttagctcttcatgcattgccatcaaccagtgttcattacacaaagcttcatcaatgtttcttggttcaacctgagaaacaaaatccatgtttttacacaaaatcctgagtctagaacgagtagagacaccctntgatatttctcctattatgttatccaaagagaggtctttctgagttctccattctctaggaaattctttaggcgttctacttgagatctctntgctttcttcaagttctttagaattgatatcatcttcaagagcataatcattntcctgaaaagcttcatcttcttattctannaaaatatcttgaacaatagagttaatttcatcacatactacatgaacatattcttccacacttagagttatcctattaaatactctatatgctntactattcaatgaat

SEQ ID NO: 11748 - DNA, 383 bp, Glycine max
  unsure at all n locations
agcttaatangtccatctatggattgttatatgccttctcgccagtggtattaaaattatcatgaggtcatttcttcattcagctatgaagagaatgtcatggatcactgtatataccacaaggtcagtgggagtaagatttgtttccttgtattatatatagatgatattcttcttgcgactaatgataagggtatgctatatgaggtgaaacaatntatctcaaagaactttgatatgaatgatatgggagaagcatcttatgtcataggcatataaatccatagagaaagatctcgaggcatttacgcttgtctcaagaaacctatatcaacaaaattttatagagaattaatatgaaagatngttcaccaagtgtatct

SEQ ID NO: 11749 - DNA, 421 bp, Glycine max
  unsure at all n locations
gccgtgagaaacatggtgtttcacttgtgaaattgaatgtgaaatgggcctctgatgtgtatgatcctatacctacattattatcacacactgttagaagcaacaagaagcagcagaaatccaggaagaagaagcctgactagaagaatggaaagaagggtcataagggaaattcatctcgagggggcagcaacaaagataagcaggttcgcaagctaggtgggacttctggtttgtgctacaagtcaatggattcttgtgataaagtgcttggagcttctactgaattagatgctcttgaagttcgaagccaggattcatactgtgtgaactagcttcctgaaanatagttactgaagtcactacttcggtgagaacactatgatgaatactctgaatgctttctatttcctgatgacat

SEQ ID NO: 11750 - DNA, 403 bp, Glycine max
  unsure at all n locations
gaccctcctattctaagcagagattcactctaccccttcactgaaaccccattacacatagcctccttgcttggacatttagagttttgtcagattcttcttcagaatagtcccaatttagccactgaattggactcaaaagggcgttgttctcttcatcttggctcagctaaagggcacactgaaatcgtgaaagcgctattgaggacataaccagaaatgagtatggtgcgcgacanagatgcgatgcttccattccatattgctgcaattagagggcgcgtgggagccatcaaagagttgatcgaagagaagccaaactccattcaagagatgataganagtgatgatgggtctgttctgcacttgtgcgntcgctataaccatctccaggctctgaatt

SEQ ID NO: 11751 - DNA, 349 bp, Glycine max
  unsure at all n locations
gtcgtcattgtaagacaaagagactatggtgtgcactngtgtgatcgaaagagatgttggagatgtcacagaagcggttataaaagggcttcctcttgagagaaagaaccttaggttggaggagggaatgtccaaagtgacactgaggtcactgtatgatgagatttcacgggttatgctgattgagtgtgttngagtggaagagattgtgatatctggcacaaaagattggacataagtgctgtggtgaagaggagaagagggtatgacgctgatagtgaagagttcgatgttttgacgaggtaagggtgaatgtactcatctngagacccgtttggaataacaaagt

SEQ ID NO: 11752 - DNA, 424 bp, Glycine max
  unsure at all n locations
taattaatattcgaattttcattcctttattaatatatatgtgaggggtagagggtgtcacatgtggatgcaaagagaaatttgtggaacttgataagaaggtgaaaggaaatgtttcttttggagattcttccaaggtgcaaatccaaggaaaaggtaccattttaatttctttaaaagatggtgctcacaaattaatcacggatgtttactatgttcctaaactaaaaagcaatattttgagtttgggacaacttgttgaaaaggggtatgaaattcatatgaaagattgttgtttatggcttcgagataaaaattctaattngattgccaaggtgtttatgtcaagaaatagaatgttcactttgaacattataaccaatgaagcacaatgtttgaaggctagcataaaagatgaatcatg

SEQ ID NO: 11753 - DNA, 383 bp, Glycine max
  unsure at all n locations
gtatgagaataagttcctgagtggatatttgatgcaatcctcccatggagggngcccatcaccagagtcatggttaagagactccaggaagattgtgccagggatgcaagagaatgccttanggttctcatgagccttagggtagctnttgggcccatgggttaagtatgtgcccacttatctttgttcatattagattatggtttcattatttttttgggccttgatttanggcaccacagtgtagggagggtaccccataagtttagggtaccctagtaatgtaggaattttcagcccttgtattttagggctcacagactaagttttgtatcagggatagtttcgtaattcacatgcattaagtgcactatttgatgtgt

SEQ ID NO: 11754 - DNA, 432 bp, Glycine max
  unsure at all n locations
tagagccaattcagacgacaataacttcttactcggatgtctgattgagtcccgtcatatatcgagacgctcgagatttaatgttgaagctcttagccaattcaaacgacaataactttttactcgaatgtctgattgagtcctgtaatataacgagacgctcgaaattgaatgttgaagctctgagccaattcaaacgacaataactttntactcggatgtctgattgagtcccgtcatatattgagacgctcgaaattgaatgttgaatctctgagccaattcaaacgacaataactttntactcggatgtctgattgagtcccgtaatatatcgagacgctcaaaattgaatgttgaagctctgagccaattcaaacgaacaataacttttactcggatgtctgattgagtcccgtcatatatcgagac

SEQ ID NO: 11755 - DNA, 389 bp, Glycine max
  unsure at all n locations
gcagcttaacattcaatttcgagcgtctctatatgttattagagtcaataagacatccgagtaaaaagttattgtcgtttgaatntgcatagaggttcaacattcaatttcgagcgtctcgatatgtgacgagactcaattatacatccgagtaaaacgttattgtcgttggaatctgctcggagcttcaacattcaatcttgagcgtctcgatatattacgagactatatcagacatctcagtaaaaagttattgtcgtttgaatacgctcagaggttcaacatatcaattcgagcgtctcgatatattacgggcctcaatcagacatccgagtaaaaagttattgtcgtttgaattggctcagagcttcaacattcaattcgagcgt

SEQ ID NO: 11756 - DNA, 452 bp, Glycine max
  unsure at all n locations
ctaagcttctataaggantgtattcaaagcctctctcatgatgccaggaatgttcttatccactatattaaagagcataggagccaaagggtctccatgtctcaatcctctagaggggactatatcctttgtaggactcccattaactaacattgagatagtatctgagtgaagacatgcagagatccactatctccatttaaagcagagacctatcctgtccatcatgttatccaagaatgcccaggatattgaatcatatactttgtctaaatccactttaagaatcatagcaggcttctttctctgagtagcttcatccaccacctcattgagaatgagaattccatggagaatgtgcctatgtcttatgagagttgctacctttcatcaataacccatccgcagagcctcaacaatttggcagagtgtgctatacttatacatgcccc

SEQ ID NO: 11757 - DNA, 362 bp, Glycine max
  unsure at all n locations
ctccaactcaagatcattagaatgcttcanacactaaaactcaaacctgcccaaaacttgcttccttggagagattccgcaaacgatatttcaagcacaataggtggtgcaagataaatgagtaactgagtgagcgcatggcatgaggctacagaaagaaattactttacactcaaaccaccacagcttgaccagtaatttcatcatgaagctgaagcgagccatctttcatcaaatttaggctcanactctngaatctctcccttgaatattgcctagatgctntcctccagtcagttccagttttcatcatcgccacaaactcctcataactgatgcgaccatcctgtgaagtgaaaaca

SEQ ID NO: 11758 - DNA, 429 bp, Glycine max
  unsure at all n locations
tgcagactaagtgctcaccaacactanataagaatccctcaggttgtttcatgtaaacctcttcttctatatcaccattcaggaacaccgttgtgacatccatttgatgcagctcaagatcaaaatgagctactaatgccaaaattactctaagaaagtctttcttatatacaggggaaaaagtctttgtgtaatcgattccttctctgtggtgaatcctttagcaacaagtcttgccttatgtctctcaatgttgccttctgagtctttctttgctttgaagatccatctacatccgatggctnttacaccaataggcaactcaacgagatcccaaactcggttagatgccatagaatccatctcatccctcatagcattataccacagatttgattccttacaactcatggcttgtgacaacgtctc

SEQ ID NO: 11759 - DNA, 403 bp, Glycine max
  unsure at all n locations
gctattgngtgtcgttgggtttataagattaagtatcatgctgatggctccgttgaacgatataatgctcgacttgtagccaaggggtatactcaaatggaaggataggatttccttgatactttatctccagttgcgaagctcacagcagtccgattattgctagcatcggctgctattcatggttggcaccttcgtcagctcgatgtaacaatgcagtccttcatgtgagaataaatgaataagtctatatgcatctgcctccatgaatgcaactctcacaccttaatcaagtttgtcgattacaacgatcactatatggtttgaaacatgctacacgacagcggtatcatcgcttgtcctcatttcttttactcatgggtcactcaagcttaactgatca

SEQ ID NO: 11760 - DNA, 345 bp, Glycine max
  unsure at all n locations
ctcagcttctgtttcaatgtcgagcttcacgatatactacgggtcacattctgacnttcgagtnaaaagttattgtcattatagatttctcggagcttccgttntcaattacgagcggctcgatatattacgggactgaatcagacatccgaggaaaacgtntttgtcgttagaatattctcagagctgttgttttcaatatcaagcgtctcgttatattacgggacttaattgtacatctgagttaaaatttaatggggtttgaatttgctacgagcttctgttttcagatacgagcgcctcgatatactacgggacacagtcggacatccgagatatcagcta

SEQ ID NO: 11761 - DNA, 454 bp, Glycine max
  unsure at all n locations
tctcagctctcagcntgcattccttttcactcatgtgtccaagtctctgatgctacatgtgttgaatattgacagcctcagtaactactaccatatcctcatctgcaatcatgtaaagagatctttgcttctttccacgagccacaacgagatagccttttgttaccttccaagctccatctccatctacaaaagtggtgtgatgtccctcatcatccaactgccttatagatattaaatttctctttaaggtgggaatatttctgacattgtgcaatgtccatanggatccactgaaggtcttgatgttgatatcacctcttccgacaatgtcaaaagattatccatctgcaaggtaaactntcccanatcttctagacatatagttagacaataaatctctagagggagtagtgtggaacgacgcacctgatgtcatgatccatgaatcaac

SEQ ID NO: 11762 - DNA, 190 bp, Glycine max
  unsure at all n locations
tcggacatccgtgtganaagtatgagcatgagagtgtctatgtatctccatcgancaacgnccagcatctctatatattataagcctgaatcggacattcgtgtgaaaagctctgaccatttgaatttctcaagatgttccgttgtccaatttctagcctctcaacatcttatacgcccgaatcgaacat

SEQ ID NO: 11763 - DNA, 243 bp, Glycine max
  unsure at all n locations
ctcagcgagaaaggccataagaaacaatatctntgcaatgtcttcttcggagaggttgtgatgtatctccatgtggagcttgtaggccttggatcttcttcattaatggagtcctttgcttcttgaagatcaatggaagtggaatggagaatgaagaaagatgattgacgtcgccacttgaaggagatgatgagtcaagaagaacctcaccaccataggaagtcatggataatagcttgatgg

SEQ ID NO: 11764 - DNA, 414 bp, Glycine max
  unsure at all n locations
attgcataccaatgatgttgggaagttccatataaacttcttcaaacaaatctccattcanaaaagcattattaacatctaataggagaaggcaccagtttctagcagtagcaacacagagcanaactctcacagtggtaagcttgacaactagagaaaaagtataagagaaatcgattccagcttgttgagtataccctctggcaaccaatcgagctntgtatctatccacagagccatccattttatatttaactgtatacacccatctacaacctatacaatgcttatcaagtggtaagggaacaagtcttcaggtggaatttgttggacaagtggcctcaatatcttaaggggaggggggatgaattaagtcttacaaaattgcactcagaacctcattaaatctcaagt

SEQ ID NO: 11765 - DNA, 315 bp, Glycine max
  unsure at all n locations
tttcgttcatgtgtctccaccttctagtttggagctatgcgtagtgattgcttagtgcaattctccattctcnaaccttttcggagccccatgaattgcgttttcgttcatgtgtcctccaccctcgagttcggagctatgcgtagtgattgcttagtgcaattctccattctcaaacttttttggagccccatgaattatgttttcgttcatgtgtcctccaccttcgagtttggagctatgcgtagtgattgcttagggcaattctccattctcaaccttttacggagcccatgaattgcgttttcgttcatg

SEQ ID NO: 11766 - DNA, 374 bp, Glycine max
  unsure at all n locations
agacatacaaatgacggttaatgatgcatctaacacataattcaatttatcgtttacacatgaagtctttcaccactataacatttcatgtactccatctttaacatgtctagtagaaaatcattccacgtgtctatgggtccaggcaagcaccagtgcacacaatcattataaagtgtgactttctcatgtggccaatgcaccatatctactcgggtgaccatctggtcttaataacattgcttgtgtagtgtcacacaacctagattccaaacccttcgttctaccttacttctttgcaatgtctaactcttccaactggatcatatataanctccaaatactactctctaaacgtatgtcactggtcttaa

SEQ ID NO: 11767 - DNA, 295 bp, Glycine max
ttcaatgcagaaaccatttttgatatagagattaaattgaaattaaaagatggcaagtatagcacgtcttctaagtgtagaaactcagtaaagttgactgttctagagtgtgtggctatgacttgttgaccagtaggctggcgaactactatgggatttatttctctgtatgtagaataacaagtcaatgaggatgcaacatgatctgtagcaccagagtccaagatccatgttacagcttcagacttgtgaatattacaaacaaaggatagtatattacctatggccgatgtat

SEQ ID NO: 11768 - DNA, 339 bp, Glycine max
  unsure at all n locations
cctgatgcctganatgtctnttctgatgtgctttggcctagatgcanggaagtatttctccattaacaccctcttaaggtcatcccagctgaaaacggacctgtgagcaaggtagtatagccaatcttttgtcactccctccagagaatgaggaaaagcctctataaagatatgatcttcttggacatcacggggcttcatggtggaacaaaaaatatggaactccttaagatgcttatgaggatcttcacctgcaagaccatgaaactttggcagcaaatgtattagtccagtcttgagaacatatgaaacaccctcatcatgatattgaatgcacaa

SEQ ID NO: 11769 - DNA, 256 bp, Glycine max
  unsure at all n locations
ctcatatcttcacagngccttatatatggaactagttcacctgtgtcagttcctctcttggccttgcagtcatagaagggaggagcatggaaacacggctccattgacatggcacgtcgacagggaggatctggngctgctcgattctcaggtttgtacagaatccacggttttaaacctccaagcccctgagccacatacctcaaagtagaccatgagctagtaaccaacacatcagttaagcttaagagataca

SEQ ID NO: 11770 - DNA, 454 bp, Glycine max
  unsure at all n locations
tacaagtgagcttgtaacatatcttctactcttggagtgatcacctgtagtcctctngaacccttaccacccactctatcatcatgccgagactcangaagcccaataggtttagccttctctaagtattctaaacaaaattcaatggcttcttctgcaatgtacctctcaacaatagatgcttctggacgatatagattctttgtatacccttttaagatcttcatgtattgctcaaccgggtacatccaccgtagataaacaggaaccacaacattgatttctctgaccagatgcacaatcaagtgaatcatgatgtcaaagaaagcagggggaaaatacatctccaactggcacagtataattgcggcctcatttccaactcataaacattactggatcaatgacttgctacatatgcatggagaaaaacacaggcgagtatcgtaatctg

SEQ ID NO: 11771 - DNA, 305 bp, Glycine max
  unsure at all n locations
gtctacgatgtcacgtgtgatgcaattttgttagtcgtggctatacaagacatcttgccaaacaaagtcaggttagccataactcgcctgtgctttgtcttccatgccatatgtagcaaagtcgttgatcctattcatgttgatgagctggaaaatgaggctgcaattatactgtgccagttggagatgtattttcccctaccttctttgacatcatgaatcacttgattatgcatctcgtcagagaaatcannatgtatggccctgtttattgcagtggatgtacccagttgagcgatacatga

SEQ ID NO: 11772 - DNA, 383 bp, Glycine max
  unsure at all n locations
tatgccatctagtctttcctctcgttgaactnngaacatagggggacttattgcatgttatataatntacaatgtcatcataccaaggaaaagaaaaacaatngctaacaactattcctataaaagacaacatggcccagaaaactcctcaccaccttaacattgttggngggatgaaactattcaatcccttntcattttggcggngtcaaccactatgcctttagaggacattntatgtccaagcacaatgctctcacgcaccatgaatnggcatttctccacattaagaaccagtctagtctccttacaccttttcaagacaacattntaaattttcatataggcatcaaaggatnggaagttatctcatgaggagtact

SEQ ID NO: 11773 - DNA, 336 bp, Glycine max
  unsure at all n locations
cgagctctcaaactanatggtcattcttatacacagacgtccgagtttgctcataatatatcgagacgctcgaaattgaacaacgtgtggtgtctacaaactcaaatggtcataacttgtcacacggaagtccgattcaggcgcataacatatcgagacgctctaaattgaacatcggaagctctcgagaaataccaatggtcataacgtttcacacggaagtccgattcgagcgcattatatatcgagacgctcgaaattgaacaacggaagctctctagatactcatatggtcataacttatcacacggacgtccgagttaggcgcataatata

SEQ ID NO: 11774 - DNA, 374 bp, Glycine max
  unsure at all n locations
tacctcatgctctcctctaatgactatggcatcatttctggcgctaaactgctgggaagtggaggccatcttctcaattaaatttctggcttcagcangagtcatgtctccaagggctccaccactggcagcatctattatacttctctccatattactgagtccttcataaaaatattggagaagaagctgctctgaaatctgatggtgggggcaactggcacatagtttcttaaatctctcccagtactcatacaggctctctccactgagttgtctaatacctgagatatccttcctgatggctgtggtcctggaagcagggaaatattntctaagaatactctcttaaggtcatcccagctcatgatgga

SEQ ID NO: 11775 - DNA, 307 bp, Glycine max
  unsure at all n locations
tatatcgagtcgctcgaaatagaatacagaagctgtgagaaaattctaacgtcaatacacttttactcggatgtccgattgagtcacgtaatatatcgagacgcccgagattcaatacagaaactctgagcaatatctaacgacaataatattttacttggatgtccaattgagtcgcgtaatatttcgagacactcgaaattgagtacagaagctctgaggaaattcaaatatatatacctcttgactcggatattcgattgagtcccgtaatgtatcgagacattcganattgaatacagaagct

SEQ ID NO: 11776 - DNA, 462 bp, Glycine max
  unsure at all n locations
taagctccttcaactgcacaaggctcttaatatttgaagagtattcttgtggaaccttcacccgacgaagacactggcaaaaacttatcttctccttcttggacaaagtatggcaggctgtgggcaagtaaattntcttcccatcagaccttggatgcaactgtgatcgtatacccatatcagctagatcttgacgggtattcaagccatccttcctcttgccttgaatgttaaggagcgtcccaatcacactgtcacaaacanttttctccacatgcataacatcaatacaatgtctaacgtcaagatcacaccagtacggaagatcaaagaaaatggacctcttcttccatatgcaactctgaactttatccttctttggggtcttcccaaatacaatattcaggtgttgaacccgctgatatacctactcaccaatcaacggtatggacgtaatatcat

SEQ ID NO: 11777 - DNA, 375 bp, Glycine max
agctttccatacaaaaaatgttgttttcacatccatttgttctaacacaagatcaaattctgccaccatagccataagtattttgattgacctgtgtttcactacaggagagtaaacttcattgaagtcaattccctccttttgagtgaatcctcgagcaacaagtctagctttaaatctactggtccaactccttggatgccttctttcttcttgaagatccacttgcagctaaccactctagaaccaagttttttttaatcaattcccatgtatggttgtcatggaaagacttaatctcttcattcatggcacttgatcatttttctttctccttactagctaagataggcttaagagtttttggatcttcct

SEQ ID NO: 11778 - DNA, 300 bp, Glycine max
agcttttaactcggaggtcctattcaagcgcataatatatcgagacgctcgaaattaaccaacggaagctctcgagaaattcaaatggtcataacttttaactcggaggtccgattcaggcgcataatatatcgagacgctcgaaattgaacaacggaagctctcgagaaattcaaatgttcataacttttcacacggaggtctgagtcaggcgcataatatatggacgaccctcataatttaccaacggaagctctcgagaaataccaatggtcatagcttttcactgggatgtccgat

SEQ ID NO: 11779 - DNA, 392 bp, Glycine max
ttacacacatgccactctactccatatttttaaaggatctgttgactaggacacacaagtatattcaccaggaaaacattgttgtggaaggaaattgtagcgctgtgattcaaaagatccttccacccaagcataaagaccctgggagtgtaaccattccttgttcaattggagaagtcactgtgggaaaggcacttattgatttgggagccagtattaatttaatgccactctccatgtgcagaaggttgtgagagttggagatcatgcccactaagatgactttacaactttgttaccgctcaattaccagaccatatggagaaattgaagatgtgctggttaaaagaaaacattttatcttcccgatagactttgtggtaatggatatt

SEQ ID NO: 11780 - DNA, 381 bp, Glycine max
cgtcatctgagccagcggctcttggaatgtctttggaggaggccccaatctaagacaaggtctcaatatgcggaaaaaatggctgtaaatattgagaatatccaggccatcactttcaatcccattccttgatgaagagtataagctgtccttacgcaaacatctgcaatactgaggaaatacctcaacccgttatatccttgcattttatctttcttctcgaacagtcgccttatgcactaacaagagaaataagattattccgcagtctcagtcatttactaatcaaaagcatgcatatttactttcttaatcaggggcatgtttggataaacatgatcagaatttaccatataagtgctcttgattccacaaacttat

SEQ ID NO: 11781 - DNA, 380 bp, Glycine max
  unsure at all n locations
agctttgtaatgtgttattttattgtttgatggattggaacattgatacaaagttgtccactatcactttagttaattgtagcacgaatgacaaaatcattgacaaaattaaatataagttgcacttaggaagtttattaagggatgagactttacttcatatgtgttgttgtgcacacatattcaacttgattgtaaaagatgggttgaaatttgtgaaagatgggatagagaagattagggatagtgtagcattttggatagccacaccaaaaaggaaggaaaattttaaggagacagtgaaacaattaaggatcccgtgcactaagactntggttttagattgtccaactaggtggatctcaacttataaaatgctt

SEQ ID NO: 11782 - DNA, 317 bp, Glycine max
tggagaatttcaaacgacaataactttgttatcggatgtactcttgagtcccgtaatatatcgagatgctccaaattgaaaacggaagctcgtaacaaagtcaaacgacaagaactttatacgcggatgtccaattgagtcctgtgatatattgagacgctccaaattgaaaacgaaagtacgtagcaaattcaaacgacaataactgtatacaccgctgtccgaatgagtacagtaatatatcgagacgctacaagttgaaaacggaagctcctattagactcaatggacgataactttttactccaatgagcgat

SEQ ID NO: 11783 - DNA, 374 bp, Glycine max
agcttcaacatcagacttcttccatggtgctggaactacttcacatggacttgatggggcctatgcaagttgaaagccttggaggaaagaggtatgcctatgttgttgtggatgatttctccagatttacctgggtcaactttatcagagagaaatcagacacctttgaagtattcaaggagttgagtctaagacttcaaagagaaaaagactgtgtcatcaagagaatcaggagtgaccatggcagagagtttgaaaacagcaagtttactgaattctgcacatctgaaggcatcactcatgagttctctgcagccattacaccacaacaaaatggcatagttgaaaggaaaaacatgactttgcaagaagct

SEQ ID NO: 11784 - DNA, 295 bp, Glycine max
gtgagaaaattcaaacgacaataacttttttctcggatgtctgattgagtcccgtaatatatcgagacgctcgaaattgaatgccgaagcgctgagcaaattctaacgacaataactttttactcggatgtctgattgagtcccgtaatatatcgaaaagctcgaatgtgaatgttgaagctcagagcaaattcaaacgacaataactttttactcggatgtctgattgagtcccgtaatatatcgagatgctcgaaatggaataccgaaggtctgagcaaattcaagcgacaat

SEQ ID NO: 11785 - DNA, 355 bp, Glycine max
agcttctacattcaatttctatcttttcgatatattacgggactcaatcggacatccgagtaaaaagttattgtagtttgaatttgctcaaggcttccgtattccatttcgagcgtctcgatatattacgggactcaatcggacatcagagtaaaaagttattgttgtttgaattttctcaaagcttcggtattccatttcgagcatctcgatatattacgggactcaatcagacatccgagtaaaaagttattgtagtttcaatttgctcaaggcttcggtattccatttcgagcgtctcgatgtattacgggactcaatcacacattcgagtaaaaagttattgtcgcttgaa

SEQ ID NO: 11786 - DNA, 356 bp, Glycine max
  unsure at all n locations
ttctccactaagttgcctgatgcttgaaatgtctcttctgatggcggnggtcctcgatgcacggaagaatttctccaagaacaccctcttaaggtcatcccagctgaaaatggacctgggagcaacgcagtataaccaatcttttgccactccctccagagaatgaggaaaagcctttataaagatatgatcttcttggacataagggggcttcatggcggaacaaacaatatggaactccttaagatgctcatgaggatcttcacctacaagaccatgaaacttgggcagcaaatgtattagtccagtcttgagtacatatggaacaccctcatcatgatattgaatgtacaagc

SEQ ID NO: 11787 - DNA, 354 bp, Glycine max
  unsure at all n locations
tggtactttacccattttgcatgcctttgtttttactagctttaccttataatgcacttaagtgattcatgatcactatgaatgacaaattccttggaaacaaggtaatgttcccaagtttggagggctcttattaaggcgtcaagtgctttatcataggtggggtagataaggagggcaccatgaattttttcactaaaataagcaataaggtgcccaccttgtaacaatactgctccaactcacactttagaggcatcacattctagctcagatgttttagaatagtcatgaagagctacaacaggtgccttggtgagctnttctttaagaaaacaaagactcgctcttgtc

SEQ ID NO: 11788 - DNA, 384 bp, Glycine max
agcttcatgcgtatgttttgtactattaagtcaatggcaacatcattatctcctccactcgggatgataatatcagcatactttttagttggcaatacaaaatcttcaaaacttggctttacaaatctggaatactgaacaatcattttgtatttagtcaaggaggactttaaacatttttaaacaaaaacaactttgaataagttatatgctgaaaagaaaaagctacaagaatcaataaaaaaatgttcaactaggggatgtttagtacaataaaagttatttttcatgtgtaaaaatgatgattcctaattaataatatatttattttgttcggcatttatataagttccttttcaaggtgtaacgtggtatttttatcac

SEQ ID NO: 11789 - DNA, 374 bp, Glycine max
atccatgcaagacaggagatttttgccttatatctgtccatgacccaaccaaacaaaaaataacagactaaacttctctatggatctatgccacagaccaacaaataacctccttgaactaacatccatataggacacaaactgctcactccaaacactcatgatcttatccccagcagtcaacattgagcaagcttaagcagtgatcaaacttgctctttagaactggctttgtgaacatatcaacaggattgtgcacagtgctgatcttatgaacttcgagtcttctttctgaccgaatgaagtgatatctaacatctatatgcttggttctatcatgatgaacctgatccttggccaagcatatagcacta

SEQ ID NO: 11790 - DNA, 375 bp, Glycine max
agcttcttagtttcaattgttgaagatgaattcgtggctacttcatgcactcctctaatgacaatagcgtcatttctggcactaaattgctgggagttggaaatcatcttctcaattaaattcctggctttcgcaggggtcatgtctccaagggctccaccattggttgcattaatcatacttctctccatgttactcagtccttcataaaaatattggagaagaagttgctcataaatctggtgatgaaggcagctagcgcataattttttgaatctttcccagtattcatataggctttctccactgagttgcttgatgcctgaaatatcctttctgatggcagtggtcctacaagcaaggaaaaatttctct

SEQ ID NO: 11791 - DNA, 352 bp, Glycine max
agcttgtagggttaaagtctcacgattgtcacgtgttgattcaacaattgttagtcgtggctatacgagacatcttggcaaacaaagtcaggttagccataactcgcatgtgctttttcttccatgccatatgtagcaaagttgttgatccagtcaagtttgatgaacttgaaaatgaggccgcaattatactgagccagttggagatgtattttctccctgctttctttgacatcatgattcacttgattgtgcatctagtcaaagaaatcaaatgttgtggtcctggttatttgcggtggacgtacctggttgagcgacacatgaaaatcttaaacatgtgtacaaagaa

SEQ ID NO: 11792 - DNA, 287 bp, Glycine max
agcttcaatggctcaatgagcatggtgaaaatgatagtctatcaacacgtaaaaatactcttttctataggagaatactatgatgaaagtttatgtaatataaatccctatggaagcagggcacattttgttgggtagaccatgacaacttgacaagaaagcaatccacagtgggctcaccaatgaaatagccctcacccatggaagcaaaacattctaacttgctcccttgacaccttcacaagtgggtagggatcaactacaaataaaactcacatgggatgagg

SEQ ID NO: 11793 - DNA, 315 bp, Glycine max
cttgggctaattcaaatgacaataaccttttgctctgatgtctgattgagtcccgtaatatattgagacgctcgaaattgaattctgaaccttagagctaattcaaacgacaataactttttactcggatgtctgattgagtcccgtaatctattgagacgctcgaaattgaattctgaaccttagagctaattcaaacgacaataactttttactcggatgtctgattgagtcccgtaatacatcgagacgctcgaaattgaatgttgaagctctcagcaaattcaaatgacaataactttttactcggatgtc

SEQ ID NO: 11794 - DNA, 361 bp, Glycine max
  unsure at all n locations
agcttcaacaatcaatttcgagcgcctcgatattttacgggactcaatcagacatccgagtaaaatgttattgtcgtttgaatttgctcagtgcttcaacattcaatttcgagcgtctcgatatattacgggtctcaatcagacatccgagtaagaagttatcgtcgtttgaatttggtcagagcttcaacattcaatttatagcgtctcgatatattacaagactcaatcagacattctantaaaaaggtattgtgggttgaatttgcttaaagcttcaacattcaatttcgagcgtctcgatatattacgggactcaatcacacattcgagtaaaaagatattgtcctttgaatttact

SEQ ID NO: 11795 - DNA, 392 bp, Glycine max
  unsure at all n locations
agcttttaaaatatactacttcttagtaaaaaacatgtgtttttggtaattatatttttaatgtctgaaattatattatcttttacttaaagattaaatatttgactaaaaaaaaattaatagcgtggtattaaaagatatcttattacaataaataatttaataatgatggaggcaaggaagaatttgttaaattattgatggtaaaataaataaataaactaaacgctactttattttaccaaacactntgattttaattaattttattagttaagtaaattataaattaggtgaaataatccgtccggcacattataagatataaggaatttgaattttacgtttaatggtgattaaatattacgttgaatgcctgcaaaatgactagt

SEQ ID NO: 11796 - DNA, 314 bp, Glycine max
tctataaccttttcttctatgcagtcatttattgcgaattctgcagtcaaagggtgatttccagcatagccctttaccctctgatccaagaagtgggggcagatcaattagagaaggcttcttgagatttgacagcttggcattttacatctgtattctgtatttttataaccccttaacttccaggcatgattctggtgaatttgcaaagcctgtttctactaaaggaatatgtattgatgatatacatctaagttcagatgacttagaaatgtccattgatcttgctccatttttgaatccctcaccatata

SEQ ID NO: 11797 - DNA, 381 bp, Glycine max
  unsure at all n locations
agctttggaaccaaattagggaaagaaaatgacctcactgtatttgaatatacttattttatttttctttctttttgtatcagttattgtgagtgctttgctgctggtgtctactgcatagaaccctgctcctgtcaggattgcttcaacaaacctattcatgaagacactgttcttcaaactcgcaagcagattgaatctcgtaaccctcttgcatttgctcctaaagtcatcagaaattctgattctgtacctgaaattggggttagaaaataaactcgacttagtttttcccctaagcaattgaaacatcttttataggtattaattattatctttttgtaggatgacccanataaaactccagcttcagcacgacac

SEQ ID NO: 11798 - DNA, 328 bp, Glycine max
ttctgatccaaagagcttgatttacagcattgttgcagcaacatattctgcttctgctgtgggttgagctattacttcctgtttttgtgaataccatgagaaaattccagaaccaaagctaaaaagataacctgaagtacttctcatatcatcagcacattcagcccaatcactatcagaataaccatgaaggctggagtttttaacataatggtatcttattccaaaatcaattgtgcctttaacatatctaagaattctttctgctgcctgaaaatgaattctactagcacagttcatgtgccttgataacaagcttactgcatgc

SEQ ID NO: 11799 - DNA, 341 bp, Glycine max
tgagcaccttttttcacacctctttctttgttgatgggttgagccttctctagggctgtctaactgttctgtaatcttcctccatcattatcttgtgcatatagtaggcagggatgattcctttgaaatctgatatgtgccacccaattgcctccccgtgtctcttaaggacctctaccagcgtgttctcttcctctgctgttaggtcactgctgatcaccataggcttggtctcattctcctccaataacacatactttagatggttgggtaagatctttatctccaccttggtcttctcgaatggacctccgctttcaattcttcaaaactggtccccc

SEQ ID NO: 11800 - DNA, 356 bp, Glycine max
agctttgatcacatttctcattccagacaaacttctcattcttgtgagtcaatttacttaggggcagtgccaatttataaaatccctcaatgaattttctatagtagccagccaaccccaagaaacttcgaacttctgtcggaggtgtcggatattgccactccataaccgactccactttaatcggatccaccgcctccccatctttagaaatgacatgtcccaagaactgggctttctccaaccaagattcacattccgacgatgtggcgaacaatttgctatccgtgagaatatgcaagacaattctcaagtgcttctcatgctcctccttattccttgaatacactaggata

SEQ ID NO: 11801 - DNA, 340 bp, Glycine max
agcttagactatgttcagcctaccatcctcaggctaatggccaaactaaacggaccatacagtcgttggaggaccttttgagggcgtgtgtcttatagcaaaaggggggttgggagagttttcttccgttgatagagttcacttataacaatagttttcactctatgttggcatggctccctatgaagctttgtatggtagaaggtgcaggacacccctatgttggctagagcctggagaagaccttaccttatgacccgaagtggtacaacaaaccaccgagaagctcaagttgatccaagaaaggatgaggactggttagagtaagcagaaaaattat

SEQ ID NO: 11802 - DNA, 325 bp, Glycine max
taccaccataggaggccatggataagagcttatatgaaaaaggagatgaatgaaaggagagggagagaagagcacgaaattttgtgctctaaatgagctttgaaatctgaagtttaatattcagatgatcaaagttaaaaaaaatgcacacacataacctctatttatagcctaagtgtcacacaaaattggagggaaatttgaatttcaattcacatttcacttgaatttgaaagtgaatttgcggagccaaactttggagccaaaatttcactaattatgattagtgaattttagttatggttcagcccactaatcccagatc

SEQ ID NO: 11803 - DNA, 361 bp, Glycine max
cgacactatacaaacgcaagctttggaacaaccacccattagtgcttcttattcctgagcactatgaaggcctgcaagtaatcatacaaatcaacctacaaccacaaaaagctgtcaatccaaagcaacccccctggcctcaaaactctatcccaatcatacaaaataaactcaaggagcacaagatcaatccacccatcaagaaaccttgttgtgtgaatcaaatctagggtgttgtcaaaaaatggaagcctttggtttatagtcaagtagagaggaacaagtcctcttagagcaatcatttcattggagggtgctccaaaaatgatattggctgaaactatactcacattgaattccc

SEQ ID NO: 11804 - DNA, 279 bp, Glycine max
  unsure at all n locations
cgggatacttagaggcgggcggcgggcatgcaagctatgagcaaaantaaattattttaacgtttcacttcgttggctgactgagtcccgcaatatatcgcgacgctcgaaattgaatatcgaagctctgagcaaattcaaacgacaataattctttactcggatttctgatttagtcctgtaatatatcgagtttctcgaaatcgaataccgaagctctgagcaaattcaaacgacaataactttttactcggatgtccgattgagtaccnttatata

SEQ ID NO: 11805 - DNA, 393 bp, Glycine max
  unsure at all n locations
tatctagacctggagacaagttatgaacattacttgtgcatccaaaaatacgtggatcaacatgaaacaatggttctttaggaaataaaatggaatatggtattttatttttaatagaggaagaaggcatccgattaatcaaaaaatatactgtcaaaactgcatcaccccaatgtcggacaagtacattggcatggagtaataatgtccgatgagtctcagcaagatgcatatttttgctttcgcgatgtcattntgttgacgagtatgaggacaagaggattggtggataatgccctacgctgacaaaaaggaagaaatcacatgagaaaagtattttttcacattatcactcctaaggatcttaattgtcttacttaactgagttttaat

SEQ ID NO: 11806 - DNA, 356 bp, Glycine max
tgtagggttaaagtctcacgattgtttcgttctcatgcaacaattgttaggtgtggctatacgagacgtcttgccaaacaaagtcaggttaacgataactcgcctatgctttttcttccattctatatgtagcaaagtcattgatccagtcatgtttgatgagttggaaaatgaggccgcaattatactgtgccagttggagatgtattttccccctgctttctttgacatcatgattcacttgattgtgcatctgatcagagaaatcaaatgttgtggtcctgtttatctacggcggatgtacctggttgagcgatacatgaagatcttaaaagggtatacaaagaatctatatc

SEQ ID NO: 11807 - DNA, 379 bp, Glycine max
agctttagagaccatttcttatttccaccataaaccaaaagattaagagagatatatatactattatttggtaaatctagcttctctatttctccacattggatgcaatgtactacttctcacttgtaatcatctaatctaattagtttagatagttataaatgtagagtatgtaataaagcaaaataagacactacacaaaaaatgtaaatctacttactcttactagaaatttgtttttgaaatcatctaataaaaaaagctatatatatagcttgttatttaatgaatatatgatataaatatgtgaaaatacaattataattattttgagatatcttatctgccccaatgattaaacaattaactcttatgaaaa

SEQ ID NO: 11808 - DNA, 365 bp, Glycine max
tatgctgcagacatatacaatagaccttctttatttagtagcaaaatcagccacaacaaaacaattatgtcctctccagcaacaggtacgatcccgggttgaggaatcatcccaaccttagatggtcaaatacttcacaacagcagcgacaacaacaacaacagccttatttccagaatgttgctagcccaagcagaccatacgttcctccaccaatccagcgacaacaacaacagccacagccccagaaacagcaaatagttgacgctcctccgcaaccttcccttgaagaacttgtgaggcaaatgactatgccaaacatgcagtttcaacaagagaccaaaacctcgatttagagcttaact

SEQ ID NO: 11809 - DNA, 379 bp, Glycine max
  unsure at all n locations
agctagcaaaccaaatgctcatcactattagaggagaaaccttcaggttgttttatataaaccttctcctctaaatcaccattaagaaaagctggtttcacatccatttgttgcaactcaaggtcaaaatgagcaactaatgccaagattatatgaagagaatctttcttagatactggagaaaaagtctctttgtaatctattccttccttttgagtaaatcccttatcaacaagtcttgccttgtatctctcaatgttgcctaatgaatcctttttggtcttaaagacccatntacatccaatagccttcgccccattaggcaactctacaaggttccaactttgttactctgcatggaactcatctcatccttcat

SEQ ID NO: 11810 - DNA, 348 bp, Glycine max
tggcaagagctccagcagctagggaattgatgtttgtgcatggttcagccttaggcgagtgccaacgtttatcgttgaacttgtcgttgaagtcaagtccacccaaaatggcaccagtgagttcatgggggttaggtgcatctttttgaaaccatttggagaagctcgtggcgcataccacctcttcatcctttttcagttttggcaccgaaacacctctatggtgagcctgcgttggtgggttctttccaaatccaaccatgtaagatcttctatcagggtttttccctagtatgtaatccatctgtgcaaattgcaatttctccacccaattaatcaataagtcta

SEQ ID NO: 11811 - DNA, 418 bp, Glycine max
tatacagtagagctgcaggcgtgccagcctagaacagaaacttaattccttaattccttgttaaggctggttgcaggagctgtggcatcctttccaccaccatattttgacacaaattcatctttgacacgctctaaaaaagccatgggtaactgggtttcaattgattcatctgcaacaacacaatatgcttgataatggcagaaggtcgaaatttcataacactaccaaactcaaaaaaaatatacggttcacctctacaaaagcagtatcagcagataaaattataacttaaaagaaaaccaatgaatacttagttatcaagcttaaatagcagcactttgctgcaagcaccataaaagctatagcaagatgatgaatagtggaatgaccaccattctgaagattctagatacaa

SEQ ID NO: 11812 - DNA, 381 bp, Glycine max
agcttttgaattatcaatattcaaacttgcttctacacccataattcttgcacctaattggaaatatggttttgagctcatatgttacgcaagtgattatgtagttggtgttgtcttgggacaaaaaaaagaagacaaaatttttcatgctatacattatgctagtaaagtccttaatgagcatcaagtgaattatgcaacaaccaaaaatgaattactagctataatctatgcattggaaaaatttagatcttatctcatttgctctaaagtggttgtttatacagattatgcaactattaagtatctcctatctaagcccgattccaaaccaaggcttattaggtggatacttatgttgtaagaatttgatcttgaaat

SEQ ID NO: 11813 - DNA, 380 bp, Glycine max
agcttgcctaagcaattttggtcagaggcaattaatattgcatgttatttggtgaacatatctccttctacaactattaattgcaagacactagaggaaatgtggtcaggctctaaaataaattattcaattctgtgtgtatttgggtgtctagcttatactcatgttaataaaggaaaatcggagccaagagccaagaaatgcacatttttgggttatcaagatggtgtaaaagggtacaggctataggaccctaaggaatcaaagctcttgattggtagagatgtgatctttgatgagacaatcatacttaatccaagaccacatgaggaccataataataaatttgaaggtcatggtgttcgcaaaaaggtggagca

SEQ ID NO: 11814 - DNA, 364 bp, Glycine max
tagcttcaaccattgtgttatggaccatttcaagtgctagaaagaatcaatgacaatgcttacatatacgagctgcccggggagtatactgtaagatccaccttcaatgtctatgatttatctctttatgatgcagatggagaatccgatttgaggacccatccttctcaagagggagagaatgatgaggacatgttcaagagcacgggcaaggatccactatgaggacttggaggacctatgacaagggctagagcaaggaaagcccatgaatctcttaaacgagtgctgtccatactatttgaatacaagcccaagattcaaggagaacagtccaatgttgtgagtagtatcatggcccaaa

SEQ ID NO: 11815 - DNA, 384 bp, Glycine max
tagcttatacaacgtgctattatcttttggaaataaaggaatacaatattatttaactgtttcttgttttaaaaaattgttatcattaataattagaggatatcaataaatgatctttgtattaattaagtaaataccccttcagtctatgcattggttaaggctgttgcacaggttaataaatactatttaatttatacaaaagtgatttaactatccttaattatttattacttctttctgactttaatataagacactttgagaataattacacaaaccaataaatagttaattttatgatttttttaaatgttatcaatataccaattttaccttattactaatcattaacttgtcaagtattatgtatccctatcaata

SEQ ID NO: 11816 - DNA, 383 bp, Glycine max
agcttgtgtcactattcactgtgatagtcaaagtgtcattcacttagcaaatcaccaaatgtaccatgagaggacaaagcacatagatgtgaaactacacttcatcagagatgtgattgaatctgagaaggtgaaggtggagaaagtttcaacagaagaaaacccggctgatatgttcacaaagtccctctctagtgtcaagttcaagcactgcttggacttgatcaatttcgaagatgcctaaagcagattggtagaagtgcagccctgaatcacaaggtagacacttgctgatttggagtcaaggttgagatttttggtgtgtgactcaaaatcacaaatggcacaagtgagaaggctttaaagtggtgttgtcataactg

SEQ ID NO: 11817 - DNA, 392 bp, Glycine max
  unsure at all n locations
tcttagtttcagatgatgcagatgggtttgtagctacctcatgcactcctctaatgactatggcatcatttttggcactaaactgctgggagttggaggccatcttctcaattaaatttctggcttcagcaggagtcatgtctccaagggctccaccactggcagcatctatcatacttctctccatattactgagtccttcataaaaatattggagaagaagctgttctgaaatctgatggtgggggcaactggcacatagtttcttaaatctctcccagtactcatacaggctctctccactgagttgtctaatacctgagatatccttcctgatggctgtggtcctggaaacanggaaanatttttctaagaatactctcttaagtcat

SEQ ID NO: 11818 - DNA, 172 bp, Glycine max
tctcgattgcctaagcgtggaccctctatgttcattcctccattcaccacttttttgggagccccacgtatgtgggcgcctatcgcgggtcaagcatcttgcgacgttcacatccgatgccgacaaatgtgaacgcctagctatacactgcaatgatgcatgtccccacttt

SEQ ID NO: 11819 - DNA, 387 bp, Glycine max
catgcaagcttattgttgtttctctccccatttgaaaccaacatttttcttgagcacttcattgagaggtgctgccaatgcgctaaaatccttcacaaatcgtctataaaaacttgctaagccatgaaaactcctcacctcggtcacagacttaggtgtaggccatttttgaatagccctaaccttctcctgatcaacttgcactccttttgaactcacaacaaaaccaagaaacacaacatggttagtacaaaagatgcatttttcaagattggcatacaattgttcttttctaagcacagtcaagacagatattaaatgatcaatatgccaatcaagtgaagtgctatagataagaatatcatcaaagtacaccacaacaaactt

SEQ ID NO: 11820 - DNA, 379 bp, Glycine max
  unsure at all n locations
ntggagtttccaagtgccaattcgtcctcttctttagtccagtcttcttctggcttcaattcatcagtgggctttccttctgtgtccagcatcttgggatgttcccagcctttgatgacagctttccaggttctgctatccagtgatttgaggaaggccaccattattgctttccagtattcatagttgcttccatcaagaattggtggtctgttcactggtcctccttctttctccatgttcatcagaatttatctccccagatctcactctgtgatttcgagtgttggctctgataccaattgaaattctgataccacgggacaaatgtcgtacacgatgtcacgacatcacgcttagaacatgcagattgtatgtg

SEQ ID NO: 11821 - DNA, 289 bp, Glycine max
agcatgaccttctgatcctatgaggctgacccttgcggagcccgtctagagcgaaattgacctctgcaacgtgctccatcatctctccgaactcctgcgcctccatcagcgtggacgtcgccggaatcccctccgccggcgcccgcttcgtcctcttcgactaccttgctccgcctgcgccggtgccgtttccgaagtcgccgatctccgaatacaataaggaccaatgctgtgaggaccagtcctgtgaggaaaacacgaagccgcatagagggtcctttttctcctg

SEQ ID NO: 11822 - DNA, 330 bp, Glycine max
  unsure at all n locations
gatgatnggagacgacacttcaatgagaagatgagtcaagaagaagctcaccatcatangaagccatggataacagcctgaatgcangagaagatgagtggacagagagggagagaacgagcacgannatttatgcctcanatgatgtataaactttgaagtgtaattcttaaatgatcaaagctgataaaatgcacacacatggnctctattatagcctaagtgtcacacaaattgagggaattgaattctttaaattacttgattgtgggccaatttggatcacaatntactaatatgatagtgatttagtatgtcactctatcagac

SEQ ID NO: 11823 - DNA, 523 bp, Glycine max
  unsure at all n locations
ttctaccctctaaccctntagaacacttaatgttgtctcntaatttgtttacaacaggaccaactactttcaacccctcttgaacaataaggtgtaaaatctgagcacaacatcggatatgagaaaattcaccaccacttactaaaccattattatgcacaagaagtctntccttcaaatagtcttgcatcttatcattagaagaagcattatccaaaattaatgaaaaaaaattccactaaatcacccattcttaaaaaaaaaccatatataattttagccatctcatgtctggagtttggagaaggaaaatgagaaaaattaagcattttactattcagcttccaatttacatcaacataatgtgtagttaatgaaaaacaagatgtccatccatcagatgtcaagtctattctactagtgactctagacaacatgcatntcanntttttcttntcaaaatcatacaaatcgttcatatttaatggagcaacacgcccagagggtaccttaacatctggat

SEQ ID NO: 11824 - DNA, 342 bp, Glycine max
  unsure at all n locations
ctcggatgtcngattcaagcgcataatatatcgagacgctcganattgaacaatggaagctctngagcaattccaatggtcataacttttaactcggatgtccgattcaggcgcataatatctcgagacgttcgaaattgaacaatggaagctcttgagcaattcaaatggtcataacttttcactcggaggtccgattcaggcacataatatatcgagacgctcgaaattgaacaatggaagctcttgagcaattcaaatggtcataacttttcactcggaggtccgattcaggcgcataatatatcgagacgctcgaaattgacaatggaagcttttagc

SEQ ID NO: 11825 - DNA, 373 bp, Glycine max
  unsure at all n locations
tcacacatacactcaacactgtgttctactcagctgtctacaatataatactntaacacatgacacatacacaaggacatgaatcttcaattaaagagatatacaacacatggcataaccatgaaatatgagaaggtgaggaataaggggtgaaacagtaaccaccgaatcagaagcataaagtatatatacctttattgcaaaaagatcaccagttgttctcttgttagccaagaaaactcttccatatgccccacgactgatagggtttataatctcaaagtcatcaatagaggtgcgatcccttgaagaatggatggggctnngtctcangctgcgaaccacatcatcttccaagatatcatcatcaaca

SEQ ID NO: 11826 - DNA, 369 bp, Glycine max
  unsure at all n locations
atgtttcctaccacagtccaacctttactccaggacttctcatccatattntatcaatcccaaggcttaccccacccgccttcaatcccataaccaccaaattcctcttttacccaattccaaaccaatgaatgtaaaatcataccgttaccctcacattcaaaaggaggcaatgacaaaaatcatttcggagatgttgaatgaaagattgattgtgcaaagtcacaatcctttntcttccccagtgctgttgaattgctaaaaaagatggaactnnggtgctttgtacgaattatagagctctcaatgccattacaatccgagatcaatttcttattccaacacttgatgaattatnggataagttac

SEQ ID NO: 11827 - DNA, 458 bp, Glycine max
  unsure at all n locations
tcactctactctaatatgatcagcttaatttatatctccaaggtctttatgaactcattntctaatactgatcctacgattagacgtataattaactagaaatactcttaacaacatctctactaaaataacgtcatatttctagtagaaaaattcttcaaaacactgttgattgattcaaacatattttaaagtttaagctctaggcttatcaataaaaaatatgtatctatagtctctattaaacaaaaagatgatatatgttgagctaactctttanaagatacaccaaattgtcataaggaataaagtcaaatgaatatttgagtgtcgagttcacaagatcttttattatatntagattgtgtaacctaattctaagcattaatagagtgaagagatagaaatttatatgagaacaaaaatggactatacgacatgaaataacaatatcgatg

SEQ ID NO: 11828 - DNA, 396 bp, Glycine max
  unsure at all n locations
atcttcaatgtacatgcgaaggtgaaggatactctaatgttcaatacttttgttctctgccaagtcttcaacgagtncaactctagaagtatggagagactcaatgtgtctcaaggcattcacaaanaccacttatttcttcgaattgtgaggattactctggttctttaagtattgatggtggaactcctaaagaagtatgctgatacagagagattgacatgcgagcaatggagaatctgtattgtcattgcagctgcgtcctggcaattgcttgaatacaaagctcgtacctgtcagattaacgtcatcaccaccacgttaagtggtaaattatggtcttaagattaacattgtataatctacctctcacacgttaagaatataattcaacct

SEQ ID NO: 11829 - DNA, 330 bp, Glycine max
  unsure at all n locations
ctgcagcttangaggtattgcataatcgctaaacgcttattctaataaccgtctagaaagcgatttatatggacttgtattaatatntaattattaattcctacttttttcctttatgtnttatgcccttacatataaaataataatataaataagaaatattggattgaatattctattcatgttacanaatgaccttatagcatgtttacaaaatacaataaatgcatgtataaatngctaanaattatgaataagatcttctatccatttctgtggaactagtaatataaatgggtaaanattatgaaaaggaataacatataacct

SEQ ID NO: 11830 - DNA, 374 bp, Glycine max
atatggagagggtaatgaaataacaagatgatgcgctccatgagagggtggatcaaatggagaatagagatcataatgaagaagaaaggaggagaagagggaatgatcgtgttcctagacaaaaccgaattgatggtattaaactcaacattcctccatttaaaggaaagaatgatccggaggcctacttggagtgggagatgaaaatagagcatgttttctcatgcaacaactatgaggaggaccagaaggtgaagcttgccgccacggagttttccgactatgctcttgtgtggtggaacaagctacaaaaggagagagcaagaaatgaagagccaatggttgatacatggacggagatgaaaaagatcatg

SEQ ID NO: 11831 - DNA, 505 bp, Glycine max
  unsure at all n locations
tcatctgcatatngctgaatgttactgtcaccttctgctntcctactaaataactgttgtacagaccttnggatagagttgtcctcatcatgctagtcaagcttgaagccacaatattgaaaaggaaaggggctaaggggtccccttgcctcaaacctctagtgggggcaaattcatttgaggggctgccatttatgagaatggatatagaagatgattgattgcaagcattgatccatttcctccatataggacagaaccccatttgaccatcatataatccagaaagttccatgaaacagagtcataagcctttgcnaagtccaccttaaacaccaaaagctggttcttacttcttttatcttcctctattgcttcattgagaatcaaagttccatgaaggatgtttctatcctttatgaaaagtgntngtctctcatcaatgagtccagngcaataatttcttaacctatntngccagtaattagcaatgatcttatacata

SEQ ID NO: 11832 - DNA, 434 bp, Glycine max
  unsure at all n locations
gccatgaccagaaccacatttatgtgtgacatgaagatgttgtaggtggcatcaccaatggatatgcagtcatcaccagtttgcaaggtacacccattaatggtaaccccagttgagcgttcaacatgaatgccatcggtgttagggctctggtctggtgcaataagcctcacaattttaacaagaacattgtngcaagcgttgatcacaatgtgactttagctggctgtgatagaagttatgccactaaccaccaagttattcacccagttgaatgtcattgactgcaatnnatagcatgtattcagtcgtacataatattcactggataaacataatattctagttccagctaaaatataaagtacagaattctntcaacacattcttagtcagccaacattatagaacttacgattaccacatatacacat

SEQ ID NO: 11833 - DNA, 371 bp, Glycine max
  unsure at all n locations
catcttcagactgatcaacacttgcacagtggccaaagatgcatgggagatcctgataatcactcatgaaggaacctccaaagtgaagatttccagattgcaactcttggctacaaaattcgaaaatctgaagatgaaggaggaagagtgtattcatgacttccacatgaacattcttgaaattgccaatgcctgcactgccttgtgagagaggataacagatgaaaagctggtgagaaagatcctcagatccttgcctaagagatttgacatgaaagtcactgcaatagaggaggcccaagacattcgcaacatgagagtagatgaactcattggttctcttcanacctttgagctangactctcggata

SEQ ID NO: 11834 - DNA, 395 bp, Glycine max
  unsure at all n locations
actcgcatgtctggttgagtcccgtaatatatcaagacgcactcaattgaatgttgaagctgagagcaaattcaaacgacaataactttntactcggatgtctgattgagtcccgtaatatatcgagacgctcgaaattgaatgttgaaggtctgagcaaattcaaacgacaataactgtttacccggatgtctgattgagttccgtcatatatcgagacgctcaaaattgaatgttgaagctctgagccaattcaaacgacaataactttttactcggatgtctgattgagtcccgtaatatatcgagacgctcgaaattgaatgttgaacctctgagccaattcaaacgacaataactttntacttcgatgtctgattgagtcccgtaatata

SEQ ID NO: 11835 - DNA, 262 bp, Glycine max
  unsure at all n locations
catgctatatgtagcaaagtcatcgatcctatgaagtatgatgagctggaatatgacgccgcaattatattgtgccagctggagatgtatgtcctctctgcctactatgacatcatgatntactcgatggtgcatctagtcagagaaatcaaatatggtggtcttggttaattgccatggatgtacccgattgagcgatacatgaagatcttaaaggggatactaagaatctctatcgtgcacaatcatctattggtgagag

SEQ ID NO: 11836 - DNA, 432 bp, Glycine max
  unsure at all n locations
ataacgtntcactcggatgtcggattcaagcgcataatatatcgagacgctcgatattgaacaatggaagctcttgagcaattccaatggtcataactcttaactcggatgtccgattcaggcgcataatatctcgagacgttcgaaattgaacaatggaagctctcgagcaattcaaattgtcataacttttcactcggaggtctgattcaggcacataatatttcgagacgctcgaaattgaacaatggaagctcttgagcaattcatatggtcataacttttcactcggaagtccgattcatgcgcataatatatcgagacgctctgaagttaacaatggaagctctttagcaattcacatggtcataactcttcactcggatgtccgatcacgcacataatatatcgagacgctcgcatttgaacaac

SEQ ID NO: 11837 - DNA, 324 bp, Glycine max
  unsure at all n locations
ttgtgagccctggtgtgantgagtntccctcttcagataaatgtgaggcccttcaccattaggtctcttgtgatgctccgtcaacctttcagcaaaataaagaggactctcccgtccaacataatcttttagaatcccagctagttctgtctgcaattganaacatccatctcagagaatttccattgtttttccttccaggaaactacatttcattgtatggcttctgaatgtagttaacatacaatgaatgagtgacgtgcatgtatgttagagagacagaaagttattcttaatataattgagaaaagaatgacatggagt

SEQ ID NO: 11838 - DNA, 401 bp, Glycine max
  unsure at all n locations
tctgctggtcaattttagtgtctcgatatattattcacctgaatctgacatccgtgagataagttatgaccatttgaatntctcgagaactttcggtgatcaatttcgagcatctcgatatgttatccacctaaatcggacatccgattgaanagttatgaaccattgaatntctcgagagcttccgttgntcaatttcgagcatctcgatatattattcgcctgaatctgacatccgtgtgataagttatgaccgattaaatatgtcaacatcttccggcgttcaatttcgagcgtctggatttattatccacctgaactggacatccgttcgaaaatgtatgaccatttgaattctcgagagcttccgttgttcaatttgagcgtctcgatatattatg

SEQ ID NO: 11839 - DNA, 294 bp, Glycine max
  unsure at all n locations
gtgtctccatggngagcagctagtgtgtagtgaggaaaaaagatggaattatgaggttgtgtgtagactaccgccagttcaataaggtgacgaataagaataagtacctttttcctagaataaatgaccttatggaccagctgataagagcttgtgtgnttagcaagatagaccttangccaggttaccatcagatctaagtgaagtcntgaaatattccgaagactgcctntacgacccgttatagtaactatgagtatctagtatctagtatttttcttcaatgtgactaat

SEQ ID NO: 11840 - DNA, 265 bp, Glycine max
  unsure at all n locations
acaatggtgagttggttgtggataagcaagtgttacttacattctccatagcanagtatgtngatgatgtgaatngtgatatggttcccatggaagctggacatatgtngctnggaagaccttggcaatatgatagaggtgttgtccacaatggngtcacgaatcgatattagttcttgcataaaggtaanaaggtagttctcaccttcgtctccaagtgaggtgtgtgaggatcatataacaatgagattaanaagagaaagag

SEQ ID NO: 11841 - DNA, 464 bp, Glycine max
acatggggtacgaatgaggcccatgatatatcgagaggctcgaaattgaaaaatggaagttctcgagaaattcaaatggtcataacttttaacttggatgtccgattcacgcacataatatatcgagacacacaaaattgaaaaatggaattctcgagaaattcaaatgttcataacttttgcctcgaatgtcagatttaggcacataatatatcgagacgctcgaaattaaacaagaaagctctggtccaattcaaacggccataacttttgacatgagtgtatgattgaggcccatgatatatagagaacgctcgaaatgaataatggaagttctcgagaaattaaaattgtcataacttttcactcggatgtccgattcagacacataatatatcgagacgcttgaacctaacaaggaagctctggtccaattcagagggccataacttttgacatgggtg

SEQ ID NO: 11842 - DNA, 259 bp, Glycine max
  unsure at all n locations
gttgatgcaagaaggtcatccaatggctctatttagtgaannagtaagtggtcctacccttaactattcaacttatgatanagagtngtatgccttagtacgggcttngaaaacatggcaacactacctttatcccaaggaatntgtcattcatagtgaccatgagtncctcanatatatcaaggggcaaggcaagcttaacanaaggcatgcgaagtggggtggaatcctagagcaattcccttatgttatcaaacat

SEQ ID NO: 11843 - DNA, 184 bp, Glycine max
agcagagcaattatgacctctccagcaacagatacaaccctggatggaggaatcaccctaacctcagatggtccagccctcagcaacaacaacagcagcctggctccttcttccagaatgctgctggcccaaacagaccatacattcctccaccaatccaacaacagcaacaaccccagaaaca

SEQ ID NO: 11844 - DNA, 326 bp, Glycine max
gaggacacatgaacgataacacaattcatggcgctccgataaaggggttgagaatggataattacactaagcaatcactactcatagctccaaactcgaaggtggaggacacatgaacgataacgcaattcatggggctccgaaaagattgataatggagaattgctctacgcaatcactacgcatagctccatacgcgaaggtggaggacacatgaatgaaaacgcaattcatggggctccgaaaagattgagaatggagaattgcactaagcaatcactacgcatagctccaaacttgaacgtggaggacacatgaatgaaaat

SEQ ID NO: 11845 - DNA, 259 bp, Glycine max
  unsure at all n locations
tagagtctgaatagttcgtgcagtctgaccatctcgttgaggatgataagctgaactaatcttcagctttgtccccaaggcttcatgtaaacttgtccacaatcgcgaagtgaaccttggatccctgtcatatacaatactacgaaagaattccatgccaccttactacttacttgatatacaactccactagctnttccattctatacctcatattcactgggataacacgagccagattggtgagtcgatctactat

SEQ ID NO: 11846 - DNA, 450 bp, Glycine max
  unsure at all n locations
cgccttatcccactaggtggtgtcggctacatggatcaacttccaccataatgttctatcaagtaccatacttctatccaaatcattaagttcgagatcctttntgataacctctcttatagtctctgtgggtcttcctctgcctcgaattgtttgtcttctctccatctggtctactctcctcactacagagtctaccggtcttctctctacatgcccaaaccacctaagtctattgtccatcatcttctctacaataggcgctactccaaccctctctctaatagcttcgtttctaattctatcctgccgagtcttaccacacatccaccgcaacatgctcatctncgctacacctactttatttctcatgtggctcttgaccgcccaacattctggttcgtacanaatcgccggtctttaccgcagtccgataaacttttcctttaa

SEQ ID NO: 11847 - DNA, 438 bp, Glycine max
  unsure at all n locations
ctctctcatgtaatgatgtagaatctacagccaaagacttcaaaaaagggggtcattccgaaacatctcctgtagttcttcaagaaggtgagaaattagaagatttcagtgcaaatgagtctcatttgactgctaaacctgatcctccacagctcaattctggaatcaatcagagaccaaaaagggtcactaaacctcccgaaagatacggatttgaagacatggctgcctatgcattacatgcagctgaagaaatagattcaaatgaaccagccacttaccaagaagctatcaatcatcctgaagctgannaattggtgtagctttgaaagaggaaatggaatctttgtataagaatcagacctggaaactttgtgaactacctgaaggaagacatgtggtaggtngcaagtggatattcaagaggaaacctggtct

SEQ ID NO: 11848 - DNA, 377 bp, Glycine max
  unsure at all n locations
tgctcaccaacacaagataagaatccctcatgttgtttcatgtaaacctcttcttctagatcaccatttaggaacgccgtgttcacatccatttgatgcagctcaagatcaaaatgagctactaatgccagaattactcgaagagagtctttcttagatacaggggaaaaggtctctctgtaatcgattccttctctttgagtgaatcctttagcaacaagtcttgccttatgtctctcaatgttgccttctgagtctttctttggtttgaagacccatctacatccgatggcttntcaccaacaggcaactcaacgagatcccaaacttggttagatgccatagaatccatctcatccctcatagcattataccac

SEQ ID NO: 11849 - DNA, 376 bp, Glycine max
  unsure at all n locations
acgggactgaattagacatccgagtaaaaagttattgtagtttgaagatgctcagagcnttaccattcaatatcgagcgtntcgatatattacgggactaaatcagacatcagagtaaaaagttaatgtcatttgaattatctcagagcttcggtattccatttcgagcgtctcgatatattacgggagtcaatcagacatccgagtaaaaagttactgtcgtttgaattngctcagagcttcgataatcaatttcgagtgtctcaatatattacgcgactcagtcagacaaccgagtaaaaagtattgtcgttggaatttgctcaaagcttcngtattcaatttcgagtgtctcgacatattatgggactcaatc

SEQ ID NO: 11850 - DNA, 352 bp, Glycine max
tggatttccttttagtagggagtctatccttcctaagatggagccaaacccactcaccctcattaagaattagcttttttcttcctctattgtctttagttgaatacacctttgttggattctctatttggttcttaaccttctcatgcaacttctttacaaactctgacctagattccccttctttatgtataaaaaaagtgtccagtggaatgggaatgaggtctaatggtgttaggggattgaacccacctcaaaaggggattgcttggtggttctatgagtccccctgttgtatgaaaattctacatgaggaagatactcatcccaagacttatggttgtctttcaga

SEQ ID NO: 11851 - DNA, 447 bp, Glycine max
agcttctctgaagtcaaaccacacacatatatatatcatgacatgggacaaaatagttcttataaaaatgttttccccagaacaagtacacgtaaattataacaaatgaacaaacaaaaaagcatactttcattgtctcctatcaaatgtatcctgagaaaacaaacaaaagtgagtcacttacagggaacaaattcttccagaactgaagatcagtcttaggaggctcaactatcttggtggcccaacagaacaacattatgagagagccacatgcaagggagagagttgaggtaagccaagggtatgggaatgcattcatcaccttcttgttataaatgttgaacaccacattcagtgcccaccatgtagcaaagtatattccaatcttcaccttcttagcagcctctgatggagccccagcccctccaacctttgatctatcag

SEQ ID NO: 11852 - DNA, 387 bp, Glycine max
acttgccaggtgattcaaaatgaaaaaggtctctacattgtttcaattagaagatcatggaggtaaatttcacaatgactcttttgaaaacttttgtgaagaaaatgtatttcaccacaatttttcagccccgtcagcacctcaacagaaaggtgttgtggagaggaaaaatatatcccttgaagaaggtgaaagaacacttctaaatgaaacaaggttgcgtaagtatttttgggcagatgttgtacatactatatgttacacctttaacaaagtacttattagacctattctgaataaaaatccttatgaaccgtattaaggaagaaaactgaacatctctcacctaatagtttttttgcaagtattttgtttttacaatggtaa

SEQ ID NO: 11853 - DNA, 378 bp, Glycine max
tgccgccacggagtttttcgactatgctcttgtgtggtggaacaagctacaaaaggagagagcaagaaatgaagagccaatggttgatacatggacggagatgaaaaagatcatgaggaagcggtatgtgccggctagttactcaagggacttgaaattcaagctccaaaaactaacccaaggcaacaagggggttgaggagtatttcaaggaaatggatgtgctcatgattcaagcaaatattgaagaagatgaggaggtaactatggctcgatttcttaatggtttgactaatgatatccgtgatattgttgagttgcacgagtttgttgaaatggatgatttgcttcacaaagcaatccaagtggagcaacaatt

SEQ ID NO: 11854 - DNA, 354 bp, Glycine max
agcttgaaattgaacatcagaagctctcaagatattcaaatggtcataacttgtcacaaggatgtccgattctggcgcatcacatatcaagacgctctaaattgaaaatcggaagctctcgcgaaattcaagtggtcataacccgtcattcggatgtccgattcaggcacataatatatcaagatgctcgaaattgaacaacgaatgctctcgagaaattcaaatggtcataacttgtcacacggatgtccgattcaggcgcataatatatccaaacgctctaaattgaacatcggaagctctcgagaaattaaatggtcatacttgtacaccgaagaccgatctgcgcataca

SEQ ID NO: 11855 - DNA, 338 bp, Glycine max
  unsure at all n locations
tcctctaagncacctgctgcatgcaagcttgcgaattttggcgatatcaggggacatatgcttgatgactgcagtgagaacaccaaccttccacgccttctttaagtcatgtggttactcgtatagaggagggccttgatctttatgtagaccaatttgatgccaccattcttcattcccagttggccaccatggtggaagaacacccttctctattgggaacctcctctgatgaggatcacagtgctgcataagtgctgacaagatagaacccaaggttgtgtccttgtaactcttgcaaggtgtgtggtgtcgaccaatggaactgatccatcatt

SEQ ID NO: 11856 - DNA, 405 bp, Glycine max
tccaatgtataatttcgagcgtcttcatatattatgcgcctgaatcggacctccgagttgaaagttatgaccatttgaatttctcgagagctttcgttgttcaatatcgagcatctcgatatattatgcggctgaatcagacctccgagtgaaaagttatgaccatttgaattgctaaagagcttcaattgctcaatttctagcgtctcgatatattatgcgcttgaatcggacctccgagttaaaagttatgaccattagaattttttgaaagcttccgttgttcaatttctggcgtcttgatatattatgcgcctgaatcggacctctgagtgaaaagttatgaccattcgaattttttcagagcttccgttgttcaatttcaagcgtctcgatatattatgc

SEQ ID NO: 11857 - DNA, 387 bp, Glycine max
tcatggctctgctattgatctatcaaggaatccagtctctcatgaccgaattaagcacattgagactaaatttcattttctgagagatcaagtggctaaaggaaaggttaagctagtgcattgtataattgaggttcagctagctgacataaagactaaggctttgaaagctggcagattcaatgagctgagaaggaaaataggagttcaaagtttggaggattaagaatttttgttcaataaatgttgctgtaatgttcttgttgtggattcactgtttttgaatcaaaggggggtgttagggataattcaaaaaacagctactaatttgttaatagttgatggcggttagttagttgacttagcctatatatagacatatgggta

SEQ ID NO: 11858 - DNA, 470 bp, Glycine max
  unsure at all n locations
agctntacagcaaatgccactctactccaaattcttgatggatatgttaacaaggaaacataagtatattcaccaggaaaacatcgtagtggaaggaaattgtagtgttgtgattcaaaagatccttccacccaaacataaagaccctgggagtgtaactattccttgttcaattggagaagtcaccgtgggaaaggctcttattgacctgngagccagcattaatttaatgccactctccatgtgcaaaaggttgggagagttggagatcatgcccactaggatgactttacaacttgctgaccgctccattaccagaccatatggattaattgaagatgttttggtcagaatgaaacantttatcttcccggtagactttgtggtaatggatatctgtgaagatactaacattcctgtaatattgggaaggccattcatgttaactgcaagctgcatagttgatatgg

SEQ ID NO: 11859 - DNA, 422 bp, Glycine max
atgcaagctggaaggcaaactggatgcattggttgactgggtaacccagctggccttgaatcagaaatctgtacctgtcgcaagggtttgtggtttgtgctgctatgctgaccaccatacagacctttgcccttccatgcagcaacctggagcaattgagcagcctgaagcttatgctgcaaatatttacaatagacctcctcaacctcagcagcaaaatcaaccacggtagagcaattatgacctctccagcaacagatacaaccctggatggaggaatcaccctaacctcagatggtccagccctcagcaacaacagcagcagcctgctccttccttccaaaatgctactggcccaagcagaccatacattcctccaccaatccaacaacagcaacaacctcagaaacaaccaacagttg

SEQ ID NO: 11860 - DNA, 465 bp, Glycine max
  unsure at all n locations
agcttgacaataaaccgacttaggattntaagtattattttgctattggataaaattattttttaatcacaaattttactttacaacatgtagattatgaaaattaaaattacaaataatagaagtgaaaaataagttttagttcatatattacagaaggcaaatttaaaatatatcattcatttttataattataaactttataattataaaagatgtaaaaaattattcatagttaataattaaagtaaatccatgtcaaatgacacatataaagcgtaataattntatttatatttaaaattcaacaaaaaaatcattcatagaagaatatttaaatataaatgaatataatatttaaaattggttcaatcaaattggaaaacttgactgctgagctatagtgagaattttttttttcaattatatnttttctatctataaaatttacatctaagaccttat

SEQ ID NO: 11861 - DNA, 390 bp, Glycine max
tatggttttaatttcgagcatctcgatatattattggactcaattggacatccgagttaaaatttattgtcgtttgcatttgctcagagcgttcgttttccattacgagcgtctcgatatattacgagacttaatcggacatccgagctaaaagtaattgtcgtttgcatttgctcagagctttcgttttccattacgagcgtctcgatatattactggactgaattggatatccgagctaaaaggtattcttggttgcatttgctacgagcttctgtgttcaattttgagcgtctcgatatattacgggacttaatcagacattcttgtaaaatgatattgtcgttagaaatcgctcacagcttttgtattcaatttctagcgtctcga

SEQ ID NO: 11862 - DNA, 375 bp, Glycine max
  unsure at all n locations
agctngaatcagacctcagtgtaaaaagttatgaccatttgaatttctcgagggcttccgtttttcaatttcgagcgtctcgatatattattcgcctgaatctgacatccgtgtgataagttttgaccattttaatttgtcgagagcttccgttgttcaatttcatacctctcgatatattatgcgctcgaatcggacctccgtgtgaaaagttatgacaatttgaatttctcgcgatcttccattgttcaatttcgagcgtctcgatacatgatgcgcctaaatcggacatccgagagaagagttactaccatttgaattcctcgagagcttctcgtgttcaatgtcgagcgtctctatatattatgctcctga

SEQ ID NO: 11863 - DNA, 343 bp, Glycine max
agcttcttagtttcagatgatgcagatgagtttgtagtcacctcatgcactcctctaatgactatagcatcatttttggcgctaaactgctgggagtaggaagccatcttctcaattaaatttttggcttcagcaggagtcatgtctccaagggctccaccagtggcagcatctatcatacttctctccatattactgagtccttcataaaaatattggagaagaagctgctccgaaatctgatggtgagggcagctggcacatagttttttaaatctctcccagtattcatacaggctctctccattgagttgtctaatacctgagatatccttcttgatgg

SEQ ID NO: 11864 - DNA, 364 bp, Glycine max
caagcacagagacatatattccaactgatttatagcagcatatgcttttttgagtgaaaaacaatgcgtctaccggggaaggagagtctgctgatgaaatctcccataaccataaatgagattttggatgttagcattttgtttctaaatgaccatttagaggaaacactgggttcgacaaaaatagaagaaatccactcaaagtgtatcaatctcgcacaggtaagtgtttcatcctaattccgaaccatagatatgtcatgacttgactttgcaaattatttcctatcaaatcaaaaattacatgcgtgatcatggatcaaataggacttcccttgggaatggtttttatattatgggtttt

SEQ ID NO: 11865 - DNA, 420 bp, Glycine max
  unsure at all n locations
tgtgaacaagattcttgaccggtccgggttgggaccgtggacgtatgtcccggagggtctcctggagatccctcccagactaacgttggaggaggcaaggaaggagacggacacggtgctcttcggggccgtcgacgagctcttggagaaaaccggtgttgaagccaaagacattgggattcttgtggtgaattgttgcttgttcaatcccacaccatctctctctgactccattgtcaaccggtacaagcttagagggaacattttggcctataatcttagtggcatggggtgcagtgctggggttcttgctgttgactntgccaaacagctcctacaggttctctctcaccatcatgctaataaattagtattccatgcatttntgtattgttttactgccatcacatatatatcttc

SEQ ID NO: 11866 - DNA, 460 bp, Glycine max
  unsure at all n locations
agcttcattgacttttcatatagtatntttttatataaataagtatcgtttagaaaactgtgtaatttccccccaaaagcaacatttttcaatgctgtgtcatattttttaatatttctttacgtagttatatttaaaacagtattttatagaaacaataaggagatctttttaaaaaaaaagttatatatattggaataaatgcatgtgcatttttttaatatgtattcacacatatgaaaacaactaatggcgatataataaaaaaaaaaagttgtaagtaaagattaaaaaaacaagataattttatagcatgactccggataaatgaaatgagtctcgctaggggtatgaattggattatcaattattaaaagagaatcgcatttacaagtaaaaaataaaatagaattgtatatgggaaacacttacatatatctcttttttatacatatatatt

SEQ ID NO: 11867 - DNA, 405 bp, Glycine max
tgtaatttctgatcctcagataacatatgtggttaaggttgggactggaacgagtcaccaatggctttcttgaggaaagagacatgaaagaccggatgagttttactgtgagatggaagatctaacttataagcaacaacacccaccttatttaacacctggaaaggaccataaaatcgaggggagagtttttcattaatccttttagccaaggatcttctcttgtaaggttgcatcttcaagaacacccaatcaccgactgtgtattctatgtcctgacgacgtttgttggcatttgctcgcatgatatcttgagacttcaacaaatttctcttagagtagccataattatcctaaccattggtagtgtattgacttcttcatgcgggaggaatggggatccct

SEQ ID NO: 11868 - DNA, 385 bp, Glycine max
agcttacaaatctatcttaagtccaagcccatacacgaaataaaataaaatctagacaagataagataagattggatgaaataaaatcgggataaaataaaatctagatgaaataaaatctagataagataagatttgataaaataaaattgtctgctctcttcaagtccaagcccaattctggattcaagctcaattgcttataattctcctgaaattaaattaaaaacacaaaatttgttaagtaggcccaaatgataaaactgcataattaatttgacaattaaggctaatcagtaattaaaatggtgacaaaaaaggttaagaaataggagaaaataatgacacatcaagtgcaaactatggatctttcaccagtggcaat

SEQ ID NO: 11869 - DNA, 417 bp, Glycine max
tgtgactgttagagttatcatctctctcgctatctctcagaagtggcctcttcaacaactatgttaacaatgccttccttaatagcactcatgaagaggaagtatacatgtcacagcacctggttttgtgttttctaacaagcagcaagttttgcaagttacacaaggccatctatggtctaaaacaggccactagagcctggtttgacaaactcaaaactacccttctcagttttaagtgtttccagcaaatctgatccttcactattggtgttttctgataatgctgttgttgtatatattcttgtctatgtagatgatataatcatcactggaaacaacaccaagttgattaattcttctgtacgtctgctaaattttgtatttttctcttaaagaacttggtgacttggacta

SEQ ID NO: 11870 - DNA, 392 bp, Glycine max
  unsure at all n locations
tgaacttttaaagcgtaaagttacgttactgtgttatttattaagattaatcctttagaaagcgtaaacatgttgttgtgcttgaattatttattaaaattaattgtatgtttattttggtatttaagcatacaatattaagctaaactaaataatttatgcatattaaatttaatggttaagagtttatatgtttcaaatattagataatcatatgcatataatatttatttaattttgaagttttgtgtgtatgatttatgattttatacatgcganattatcttgaatattttatacaatattatttgggttatttacattatgtaaaatattatatgaatatttaactcctattaagaatgaatggtaagtgattaatataattttat

SEQ ID NO: 11871 - DNA, 291 bp, Glycine max
agcttagtgccaccggtgatgcttcttttaacgatccaaccaaataccgcagtcttgcaggggctcttcaatatcttactttcactcagactgatatatcttatgccgtgcagcaaaattgtcttcatatgcatgctccgacaaatgagcatatgagtgctctcaagcgtatcatatgctaccttcagggtactttatcccatggtttgcatttgtacaaatccaccattgatagactaatctcttatacagatgctgattggtgtgggtgtcctgacacccatcgttcca

SEQ ID NO: 11872 - DNA, 390 bp, Glycine max
tgctcgcgctaagcgcatagacccttgattggttggcaagatagttcagctgagtgcacatcactgtgctaagccccgcatctttacggtaattgaactttaaccagtgggcttagcatggatgatgcactaagcgccacttcttcttgagaaaaatttatcgtagcaacgctaagcgcactatcctgcgctaagccctagatccattctgtaacttgagtttttaagctgggcttagcgggccagattgaaggtgtagactttgatgaaacgtttgccccggttgctagacttgagtccatcagattgttacttggtgtagcttgcatcctcaaattcaagctgtaccaaatggatgtgaagagcgcgtttctgaatggatacctgaat

SEQ ID NO: 11873 - DNA, 404 bp, Glycine max
tggaggcattacctttatggatctaaattagatgtgtttagtgaccataagagccttagatatttgtttgatcaaaaagagcttaacatgaggcagaggagatggttagagttccttaaggattatgattttgagcttagctatcatccaggtaaagccaatgtagtagctgacgccttaagtagaaaatcccttcaaatgtctgctttgatggttaaagagttggacctcttagagcagtttagagacatgagtttggcatgtgagatcacctctagtagcattaagttgggtatgttgagagtcaccagcgaacttttgagcgagatccgtgagggtcaaaagtttgaccgattcttgtcagcccacgtagaatccatagtcgcagggagagagagtagttt

SEQ ID NO: 11874 - DNA, 416 bp, Glycine max
tgtacaatgtaaccttatacattgtaaaaatcatgttctaatgcaattctaattcctactaaacttatagtatacaataacatacatataattgaaattttaaattaactacttgaattaaattctcattgtaattaattttcaatgtcaattatatttttacaaattgcacaacacaaaactttctataatgagttgtaatttccaaggtattacattagtcattacaaattatgtttattttgccttttgtaacatttttttaactattaagaaaatatggttattatataaaaaaatatagatatttgtatcttttgaatattttatacgtcagacacaaaactgtcctataatttatcgagtaaaaagaaaataagctttattctattgattttttatctcatatatttttt

SEQ ID NO: 11875 - DNA, 411 bp, Glycine max
ttatcacataaaattacatgttattaaatatttaattaattacttaagttaaatgttattgtaattaatttcaatattaattatatttccacatatcacacaagtacaaaactttatataaaataagttataaattttatttatgatgttaccagcaagactatccgatgacctgtgatccattgaattgtcaactaggacaaaaataatacacagacaattatgtgagcaacatatatgacatcttagaatcatcaatatgagatataagttgacatattcaagtgtaaatattatgagtaatattatactagaccaactcactgtgagaagacttcaaaatagttaagtaaatgtcatgataagtgcttcttatgataattatattatgtgataactacatcatatatg

SEQ ID NO: 11876 - DNA, 394 bp, Glycine max
  unsure at all n locations
tctaatatctcccacactttntggggtgggccattcttggatggccttgattttcttagggtccacttggaccccatttctaccaactacaaaacctaagaagactatattatctacacaaaaggtacacttctctatatttgcatagagggtgtttttcctaaggactgaaagaacttgcctgagatgtccgaagtgatcatctaggctcctactctacactaaaatatcatcaaaataaacaactacaaatctacctatgaaatcccttaagacatgatgcataagcctcataaaggtgcttggtgcattagtgagcccaaaaggcatcactagccattcatacaaaccaaacttggtcttgaaagcgggtttccactcatcaccctttttc

SEQ ID NO: 11877 - DNA, 455 bp, Glycine max
  unsure at all n locations
agcttcaattgtgacgggtgtatatccaccactcaattatttcatgaaggttagaaaaaaattacatagttgaatcaacatcattaccaatgtgattagaatgataaaaaaacctaacaaatgaaatccaacacatcacatgataattagaaaaatgcaataacaataaagaataggaatattataaattagatatacataaattaatattatgtacagagcaaaaatgtccaaacaatttaacaacatttttgttgatccataaaatatcataatttgtgcctaaatcggaaccaatctagatccaagtgtgatttaaaaaccataattcttaaaaagaataaattattctacattgtgaaacatattcaatgatctagcacacaaatacattgcaaccataataaaataatgttagctatcaacaataaaaactcaaaacanaaaaatatgtc

SEQ ID NO: 11878 - DNA, 387 bp, Glycine max
tattggagcactaccaatatgctatattggttatgagaatggtggccagctaactgaagttgttctttatcgcccgccttctttatttctctttgacgaggttgaaaaggctcatgaagatgttttcaaagtgtttctttagattttggatcatggtagactgacaaattgcctatgaaaagttgtggacttcaagaaaactattattataataactttaaatattggatttggtaactagtccaatgatatacagagtaagataccacaagtggaaatgacaagcagacccaagaggaaaaatatcaacaccaaagtatttagcatattataattgatttatgtcttgtattaagagtatgaataattaaggtctatggagacata

SEQ ID NO: 11879 - DNA, 355 bp, Glycine max
gcttgaggccttggatcttcttcatcaatggagtcttttgcttcttgaagatcaatggcagcaaaatggagaaggaagaaagatgattggagacgccacttcaaggagaagatgagtcaagaacaagcttaccaccataggaagcaatggataagagcttgaaggtaggagaagataagtggagggagaagaagaaaaagagcacagaattttatgcctcaaatgaggtctaaactttgaagtgtaattctcaaatgatcaaagttgaaaaaatgcatacacaaggcctctatttatagcctaagtgtaatacaaaattagaggaaaatttgaatttctattcaaatttcacttg

SEQ ID NO: 11880 - DNA, 415 bp, Glycine max
  unsure at all n locations
tgtaattatggttgatccagtatttggatataagagtatcagtatatgaattgggtttagcccaggttcataacaaatttaaaaaatttatactcgatttataaaattaacaagagattttaatttcaagttctagttataaaattacattaaatatttaaagaaaaaattaatcacctataatgattatataaaactcgagtatggtctacaaaaacaaaatgaaacattgtctttaaagtctaagtttatatttttttgttaactntgtatttttaacatttgagacatagaactgtacgtactagcaagcagcggcacgttgagtaagtctaggaatacacgtgagatccaataaatagaaattaaaaaatatttggaaaacattaaatttaaaggttatttatatataata

SEQ ID NO: 11881 - DNA, 260 bp, Glycine max
agcttgtctccctgttcttgattattgtagagaaacatagggagccaaatgtcttcagatttgttagctttggtttgtagtcgtgccatgcttcaaatggagtctttttctgcaaagcttttgttggtaacctattcagcaaaaaactgttgtgtgtgcagcctctgcccaaaattcctttggtagccctttgtcatgaagtaagcaccttgtcatctccataattgttcggtttttcctctcgacaacaccattctgtt

SEQ ID NO: 11882 - DNA, 254 bp, Glycine max
  unsure at all n locations
agcttaccacaattcgtacccttctatctgnggctgctattaaggactggcacttagaacaacttgacgtcaacaatgctttccttcatggtgatctgcatgaggaagtatatatggatctgcctcctgggttcttgcggcctggttcttcttctaataaagtctgcaaattacataagtccttatatggactgaaacaagctagcagacagtggttctccaagttatccactgctcttatctcccttggatac

SEQ ID NO: 11883 - DNA, 247 bp, Glycine max
agcttataatatatttatacgctcgaaattaaacatcgaaaactctcgggaaattcaaatagtcataattattcacacggatgtccgattcgggcgcataatatgtcgagaggctcgaaattgaacaacggaagctcttgagaaattcaactggtataacttttcacacggatgtccgattgaggcaaatcacatatcgagacgctcaaaattgaacaacggaagctcctgagaaattcaaatgggc

SEQ ID NO: 11884 - DNA, 261 bp, Glycine max
agcttgaccatgatttttagaataatattctctgatgctgaccaggcactttttgatgaatgcttgaagagattccaagaagaagaaatcaatgatagggagaagcaagagaagcgagaatccatatggaaacaactggaagatgttgctgcagctaatgctgtaagcaatgaggccatccttgtctcaagatttgtgtcctctgttgcaattgctaccagtgctaatcaattggcaactgcaggtggttgagagccatca

SEQ ID NO: 11885 - DNA, 192 bp, Glycine max
agcaccaacctgacagcggtctggatctccctggatgtaatggtcggcttcttgttatacctcgcgagacgcgctgcttcctgcgcaagcttctcgaatatatcgttgatgaagctgttcatgatccccatggccttgctcgaaatgccgatgtcaggatgtacctgcttcagcaccttgaatatgtagatc

SEQ ID NO: 11886 - DNA, 224 bp, Glycine max
acctgacatcacctttgcagtaggtgtttgtgcaagatatcaagccaaccctaagataagtcacttgaatcaagaaaagagaattctgaaatatgtaaatggcaccagagactatgggattatgtactgtcattgatcatattcaatgctggttgggtattgtgatgctgattgggctggaagtgcagatgacagaaaaagcacttctggtggatgtttctatt

SEQ ID NO: 11887 - DNA, 228 bp, Glycine max
acactttttggggtagggcattcttggatggccttgaatttctcaaggtccacttggaccccatttctaccaactacaaaacctaagaagactatattatctacacaaatggtatacttctctatatttgcatagagggtgtttttcctaaggactgaaagaacttgcctgagatgtcctaagtgatcatctaggctcctactgtacactaaaatatcatcaaaataa

SEQ ID NO: 11888 - DNA, 190 bp, Glycine max
  unsure at all n locations
tagatacaatccagtgtggaggaatcatccanatctgagatggacaagtcctccataacaacaatagcttgtccctccttttcagaatgttgctggtccaaccaagccatatgttcctcctccaatacagcagcagcaacaacagcagtcacaacaaagataacaagcaactgaggcnntctctcaccct

SEQ ID NO: 11889 - DNA, 346 bp, Glycine max
  unsure at all n locations
caccctgagtcttaagggagttccaaaaccgagtgacataccctcaagtacaagtatttccccttatgagaaacttcaagtacttactcgcanagtttatactatntccatgcaacatgaagtatgaaacatgggtaccatcaatgcacanactgtggataattaaagattctaagtcatcccccttcatagatgcttanaactctctaaccactctnntcctcaccagggatatccatcatggtaactgaacccnccatgtacatacacaacatacatcatcacaatgacattntcaacatcaacaacatntcatctcaatgtcattatcaacatcaacatcatc

SEQ ID NO: 11890 - DNA, 252 bp, Glycine max
agcttttagctaattcatactacaataatggtttgctcggatgtctgattgagacccgtaatacatcgagacgctcgaaattgaatgttgaagctctcagcaaattcaaacgacaataactttttactcggatgtctgattgagtcccgtaatacatcgagacgctcgaaattgaatgttgaagctctcatcaaattcaaaccacaataacttttttactcagatgtctgattgagtcccgtaatatatgga

SEQ ID NO: 11891 - DNA, 195 bp, Glycine max
  unsure at all n locations
cctctcttagctntgcaatcatagaagggaggagcatggaagcacggctccatcgacatggcacgttgacaaggaggatcangagctgttccattctcgggcttgtacagtatccacggtttcaacccttcaagcccctgagctacgtagccganagtagaccatgagctcgtgaccaacatgtcggtcaagctc

SEQ ID NO: 11892 - DNA, 250 bp, Glycine max
  unsure at all n locations
agcttcttgtgggatattttgactagctntccaatctgacattcaccacagattctgccttcttctattttcagattgggaatgcctctaacagcacctttgtcaatgattttcttcatgcctcttaagtgcagatgtccaaatctttgatgccatatattgacttcatcttctttggagactagacatgtggaggagtaactggtttcttgaggtgtccataggtaacagttgtcctttgatctgctgc

SEQ ID NO: 11893 - DNA, 296 bp, Glycine max
  unsure at all n locations
gatgcatgggagaatcctgaaatcactcatgaaggaacctccacagtgaagatgtccagaatgcaactcttggctacaaaattcgaanatctgaagatgaaggaggaagagtgtattcatgacttccacatgaacattcttgannatgccaatgcttgcactgccttgngagagaggataacagatgaaaagctggtgagaaagatcctcagatccttgcctaagagatntgacatgagagtcactgcaatagaggaggcccaagacattngcaacatgagagtagatgaactcat

SEQ ID NO: 11894 - DNA, 294 bp, Glycine max
  unsure at all n locations
ttctacacttggagtgataacatgcagtcctcttgaactcttaatgcacactctgtcatcatggcgagactcacgaaggccaacacgtttagccttttcaatgtactctggacaaaattcaatggcttcttctgcaatgtacctttcaacaatagatgtttccggatgatgtaaattcttggtataccctgttaagatcttcatgtatcgctcaaccgggtacatccactgcanataaacaggaccacaacatangtattctctgaccacatgaacaattaagtgaatcatgat

SEQ ID NO: 11895 - DNA, 250 bp, Glycine max
agccattctcctttaactgcacaaggctcttaatatttaaagagtatccttgtggaaccttcacccagcgaagacactgaaaaaaaaacttatcttctcctttttggaaaaagtatgacaagctgggggcaagtaaattttcttcccattagaccttggatgcagctgtgatcgtgtccccatctcagctagatcttgacgggtattcaagccatccttcgtcttgccttgaatgttaaggagtgtccca

SEQ ID NO: 11896 - DNA, 212 bp, Glycine max
  unsure at all n locations
atgctcctctgcagaccaccacacagaccttngcccttctgtgcaacaatctgaagcaattgaacagctngaagcttatgctgcanacatctacaatagacctcctcaacctcagcagcataatcagccacaacagaacaattatgacctctccaacaacaggtacaatctctggtggaggaatcatncnaaacagcagcaacaacaatctt

SEQ ID NO: 11897 - DNA, 327 bp, Glycine max
agcttctaaactttatacattattgaagctctgataccacttgttggacaagtggcctcagatatcttaaaaagggggggttgaattaagatatcacaacttatttccccaattaaaaattctagttatctttctattccagttataaattcccttaataatgaatttcttaaatattgattcaaatataacaatttgaatataaatataaaacaataataaataaaggagtttaagggaagagaaaatgcaaactcagatttatactggttcggccacacccttgtgcctacgtccagtccccaagcaacccccttgagagttcca

SEQ ID NO: 11898 - DNA, 351 bp, Glycine max
  unsure at all n locations
tctaatcgattacacacatactgtaatcgattaccagaggagtttttcagaaaacattctcaacagtcacattntnttatctgtttcttaaatggtcatcaaaggcttatatatatgtgacttgagacacgaatttaacaagagttttcaagagcaaaaaggtcttatcctcttaaaaagcagaatagttttatcctcttacaaattccttggccaatacacttgtgattcaataaagaattatttgagtgctcaaattgttcaatctatctctttcaagagagatttcttcctctcttganaagggattaagagaccgagggtctcttgttgtgaaagaattctaaacac

SEQ ID NO: 11899 - DNA, 328 bp, Glycine max
tagcttctacagaaggtttgttcctaatttctctacacttgcctcacctctcaatgagctggagaagaagaatatggcattcacttggggtgaaagacaagagcaagtcttttctttgctcaaagaaaagctcacccttgcccctgatctaactcttcctaacttttctaaaacttttgagctataatgtgatgcctctaaagtgggtgtgtgagttgaattgttgcaaggtggacaccttatttcttattttagtgaaaaaattcatggtgccaccctcaactaccccacttatgataaagagctttatgcctataataagagccct

SEQ ID NO: 11900 - DNA, 322 bp, Glycine max
agctttcactcgcatgttcgattcaagcgcatagcgtatcgagacgctataaatctaacaaaggaagctctcgagaaattcaaatggtcatagcttttcactcgcatgtccgattcaggcgcataacatatcgagacgctctaaattgaacaacatattttttcgagaaattcaaatggtcataacttttcactcggatgtccgattcacgcgcatagcgtattgagacgctcgaaattgaacaacggattttgttgagaaatccaaatggtcgtaacttttcactcgcatgtccgattcacgcgcataacatatgtagacg

SEQ ID NO: 11901 - DNA, 245 bp, Glycine max
  unsure at all n locations
tgccttgcccctngatatatntgagggactcatggtcactatgaatgacaaattcctcgggataaaggtagtgttgccatgttttcaaagcccgtactaatgcatacaactccttatcataagttgaatagttaagggtaggaccacttaacttttcactaaaataagcaattggatggccttcttgcatcaacacagccccaatcccaacatntgaagcatcacactcatattcaaaagatttt

SEQ ID NO: 11902 - DNA, 326 bp, Glycine max
agcttggacttgctgtgtttttggaacctctccttcctcaggtggacccaaacccaatcacctggttcaagcacgactttctttctgcttttgttggcttgccttgcatagctcgcatttttcttttcaatttgaaccttcacttgctcatgcaacttcttcacatactcagctttagcctgtgcatccttatgcttaaacataccaatgttaggcataggcaacaaatcaagaggagtcaaaggattaaatccatacactatctcaaatggtgaacaattagttgtgctatggacagcccgattataagcaaactcaacatgagg

SEQ ID NO: 11903 - DNA, 330 bp, Glycine max
agcttaaacattcaacttcgttcgtttcgatatattatgggactcagtcagacatccgagtaaaaagttattgtggttagaattcgcactgaggttcaacattcaatttcgagcgtctcgatatatgacgggactcaatcatacatccgagtaaaaagttattgtcattcgaattggctcagagctttcaacattcaatttcaaacgtctcgatatatgacgggactcaatcagacatccgagtaaaaagttattgtcgcttgaatttgctcagaggttctacattcaatttcgagcttatcaatatattaccggacttcatcatacatc

SEQ ID NO: 11904 - DNA, 335 bp, Glycine max
agcttgttcttctacaaaacttttatgaaacaatgacaaaacaaatgtggatgtagaagagtgagtgtcttggttagtagcaaaaaaatatgtatcttcttgaaagatgacgtttctagaaactcgaatcctatgtaaatgaggatcatagcatataaaacctttttgatgggttgagtaaccaagaaaaacacatttaacagattgagctgtgggtttggtgtgttctagtggctaaagatgaacatagtagacacaaccaaaggtgcgaagagtggaataattaggtggcttaccaaataaccttaagaaaggggaatcattatttaaggctt

SEQ ID NO: 11905 - DNA, 329 bp, Glycine max
agcttttactcggatgtccttttgagtcccgtcatatatcgagatgctccaaattgaaaatagtagctcctagcaaattcaaaccataataactttttactcggatgtccgattgtgtcccgtagtatatcgtgacgctcgaaattgaaaacataaggtctgagcaaattcaaacgacaataactttttactcagatgtccgattgagtcccgtagatatatcgagatgctccaaattgaaaatagtaggttcttccaaattcaaaccataataacgttttactcggatgtctgattgagtcccgtactatatcgagacgctcgaaatt

SEQ ID NO: 11906 - DNA, 326 bp, Glycine max
agcttgtgggtggaggactcttgaacgaaaacacaattcatggggctccgaaaaagggttgaggatggagaattgcactaagcaatcactacgcacggctccaagctccagggtggaggacgcatgaacgaaaaagcaattcatggggctcccaaaaagggttgaggatggagaattgcactaagcaatcactacaaacggctccaaactcgtgggtgaaggacgcatgaacgaaaacgccattcatggggctccgaaaaagggttgaggatggagaattgcactaagcaatcactacgcatggctccaagctcctgggtggagga

SEQ ID NO: 11907 - DNA, 326 bp, Glycine max
agcttgtgcatccaattctctgttgaggatgtcccatatgttcttaaaactggactgattcatttgcttccaaagtttcatggccttgcaggtgaagacccgaacaaacatttgaaagaatttcacattgtctgctccaccatgaaacccccagatgtccaagaggatcacatatttctgaaggcttttcctcattcattaaagggagtggcaaaggactggctgtattaccttgctccaaagtccatcacgagctgggatgaccttaagagagtattcttagaaaaaaatttccctgcttccaggaccacgagcatcatgaagga

SEQ ID NO: 11908 - DNA, 329 bp, Glycine max
agcttgaggatgatgttagttttattcgtcagtgctttgaccttccgccaccatcctcatagatttagattattattatattttgttttttaagccttgtatttggctatgtttttatgacatttgaacacttagtatttcttttaatatttgcttagtatgattgaacatgatgataatatttacttgctcttggttgtttatggttatggttgttaaacttaattattttgatgatatatatgtctagtggtatgtacttacatttggtattgtgctttatgtatgtattagaattatttatgtatgatttattttacacactttgg

SEQ ID NO: 11909 - DNA, 330 bp, Glycine max
agcttgtaggccttggatcttctttatcaatggattcctttgcttctttgaagatgaatgacagtggaatggataaggaagagagagaggagatgccacttcaaggagaagattagtctagaagaagctcaccaccataggaggccatggataagagcttggaggaagaaggagatgaatgaagggagaggaagagaacagcacaaaattttgtactctaaaagcgctatgaaatctgatgtttaattatcaaatgatcaaagttgaaaaaatgcgcacacaagacttctatttatagcctaagtgtcacacaaaattggaaggaaattt

SEQ ID NO: 11910 - DNA, 335 bp, Glycine max
agcttatgctgcaaacatcttttacagacctcctcaacctcagcagcaaaatcagccacaacagaacaattatgacctctctagcaataggtacaatctcgggtggaggaatcatcccaaccttattttcaaaatgatgctggcccaagcagaccatacgttcctccaccaatccagcagcaacaacaacaacaaccccagaaataccaaacagttgaggcccctccgcaaccttcccttaaagaacttgtgaggcaaatgactatgcaaaacatgcagtttcaacaagagaccagagcctccattcagagcttaactaatcagatgggacaatt

SEQ ID NO: 11911 - DNA, 332 bp, Glycine max
agctttggagttaccaagtgtcatttcgtcttcttcttttgaccagtcttcttctggcttcaattcatcagtgggctttccttctgtgtccagcatcttgggatgttcccagcctttgatgacagctttccaagttctgctatccagtgatttgaggaaggccaccatccttgctttccagtattcatagttggttccatccagaattggtggtctgttcactggtcctccttctttctccatgttcatcagaatttatctccctagatctcactcagtgatttcgagtgcccgctctgataccaattgaaattctgatactggggacagat

SEQ ID NO: 11912 - DNA, 354 bp, Glycine max
atacagtagacccgacctgctggcatgctagcttgataggaaaatttctttgggaaattcactagtatcttggaattacaagaaacaagcttgtgtagcactatccactacaacagcaaaatacattgaaattggaagttgatgtgctaaatgtctctatatgaaacaacaacttggagacattgcggtaacccttgatcccattcctctaaaatgtgacaacataagtgctattaatctgtctaaaaatccggtcatgcattcttgaactaaacatatatagattagacatcattttctaataaatcatgtataaaaaggagattgatgcattgagtgtgctgatagtgaaca

SEQ ID NO: 11913 - DNA, 332 bp, Glycine max
agcttatgcagcaaaagtgcttacatgagtgtgtgtttgtgccatactttttatcagacaacccgtagtagtttgcaccgtactttcatgtcgtactttctgttcgaccccaataacgtgtcaaagttgttgagcaagcttagcgtggcgcagtgctacaacaccatcaagtcgttggcgtatgagacggaggtgcgtttgcgcgaccccatgtatggctgcgtgggcttcatcttgctcttgcaacaatgactatgcgaaatcacaacaaaggtacacaacgcgaaggagttatcaacctacctcaaccctaggccatgcaggttctttta

SEQ ID NO: 11914 - DNA, 227 bp, Glycine max
tcgtctcgatatattacaggtctcaatcttacatctgtttgaaaaaagttattgtccgttggaattgctgagagcttcaacattcaattttgagcgtctcgatgtattacaggacttaatcagacattcgagttaaaagttattgttgtttgaatttgctgagagcttcaacattcaattccaagcgtctcgatattttacgggactcaatcagacatccgagataa

SEQ ID NO: 11915 - DNA, 294 bp, Glycine max
tgattgagtcccgaaatctattgagacgctcgatattgaatattgaagctgagagctaattcaaacgacaataacgttttactcggatgtctgattgagtcccgtaatacatcgagacgctcgaaattgaatgttgaagctctcagcaaattcgaacgacaataactttttacctcagatgtctgattgagacccgtcatatatcgagatgatcgatattgaatgctcgaactctgagcaaattcaaacgacaataatgatttgctcggatgtttgatagagtcccgtaataca

SEQ ID NO: 11916 - DNA, 324 bp, Glycine max
agctttatcaaatgtggcatttgaggtaattaatgatataaacttttattatttgagcagagatttcgatggacaaattacacacagaaaatatgattttgctaattatgttaaatctttaatttgaagggactgctaaccgaaggtttcctttggatcccctctttgggtggtcctactaccattgctgctagacaaagtggagctggaatttcttggctttttccatttgtggtaagaaagatatcttttgcttcatagttgaaataataagttgtagttgggctttttccccctaatcctgtgagtcattatgatctttcg

SEQ ID NO: 11917 - DNA, 325 bp, Glycine max
agcttgaaggcaaactggttttattggttaacttggtaacccagctggccttgaatcacaaatctgtacctgtcgcaagggtttgtggtttgtgctcctctgctgaccaccatacagacctttgcccttccatgcatcaacctggagcaattaagcagcctgaagcttatgctgcaaatatttacaatagacctcctcaacctcagcagcaaaatcaaccacagcagaacaattatgacctttccagcaacatatacaaccctggatggaggaatcaccctaacctcagatggtccagccctcagcaacaacaacagcatcctgc

SEQ ID NO: 11918 - DNA, 322 bp, Glycine max
tagcttgtgcctatacacgtatgttatgtgaatgtagcatataaatcgcgaatacccttatgtgctttgatgatggctatttcccgctcctagcttcaattggagttatgtcttttacagacttagtagtacatctgttgagtatgtaaacagaagtgtatactgcttcaacccagaatgtgttaggtagtcccttatccttgagcatcgatctaaccattcctataactgtgcgattctttttattggacactccattttgttgaggagaataagcgactgtaagtaggcgctcaaaacctttattctcacaaaatctttc

SEQ ID NO: 11919 - DNA, 331 bp, Glycine max
agcttacatgaaacttcctattgttatgtcctcaccgttacctaatattgtttgcaagctaaaacgttctttgtatggattaaaacatgcaccaagagtgtggtttgaaaagtttagcacaacactacttggcttttccttcatccaaagtagctatgatccatctttattcctataaaggacctcaaaaggaattatgaccctccttgtttatgtagatgacattatcgtcactagctcagatcaagaggctatcactacaatcaagcaattgttgcatacaactttcaacatgaaagatcttggacaactcacttatttcttgggatta

SEQ ID NO: 11920 - DNA, 324 bp, Glycine max
agcttggcgacacttttttaagattgaatcctataatgaaggaggaagtaagaaaagaagtgctcaagttattagaggcaggccttatctatccaatttcagacagctcatgggttagtcctgttcaagttgttccaaaaaaaggagggatgacagtaataagaaattattgaaatgaactaattcctaccagaacagtcataggatggagaatgtgcattgattatagaaagcttaatgaagccacaagaaaagatcactacccacttcccttaatggatcaaatgcttgagagacttgcagggcaatctttctactgttttt

SEQ ID NO: 11921 - DNA, 321 bp, Glycine max
agctttgctacgataaccacttggactggactcacccactggctgtcagaaatggggtaaatgattccagcttgtaagagcttggtcacctcctttttcaccacatccagaatgacggggtggagttgccactgaggttgcctcactggcttatctccatcctttaaaagtatcctatgcatgcaggtagatggtctaataccaggaatgtgtgctaaagtccatccaatggctttcttgagaactagccacaacttctcctcttgctcagcatcaagggaggcatagatgatcactggaaatttttccttgtcctccaag

SEQ ID NO: 11922 - DNA, 326 bp, Glycine max
agcttgtacgctataatgattatgattgggctcaaaatgatgatgatcaaagaagtattaatggatttgagtttttaagggggaatccaaccttcctggaatgaaaaaagcctcaatttcctttttactcgtgaggggcaaaacccttaaaagtaacattaggccttcgtcctgtaatccggcttagagaattgtaaaaagagttggacatgtcacaagacgatcagaccatcacctttggggataataagtcaaccattgctctagtaaacaacctcgcgttccgtgatcgaagcaaacatattggcactcgttaccactacata

SEQ ID NO: 11923 - DNA, 330 bp, Glycine max
agctttgatcccaaagaagcttgccatgaccattatcttcaagcccatcacttttcccaacacacaaacaaaagggtatagaagaaccaaaactatggctcttataagcccccctgcctcaaaggccacgagcatgaaatatgggaacaaagaagaggatttcaacaacgcgttttcgacataaaagatcaacgtgtgatcgttgaggtctgatcggtggattaaagaggggaatttcaggtatttgttaaactgtgttggtgcacccgaaaaagaattgctaatggttctgtggaaacggacgaggttcctgagttgcctaaagagaaa

SEQ ID NO: 11924 - DNA, 369 bp, Glycine max
  unsure at all n locations
aagcttcttgaagccgttctcataactggcaaccgaatgaatgatggaactntccgcggtggtgcacaagcatttaaacttgatacacttctgaaattatctgatgtaaaaggaacagatggcaagactacactcttacattntgttgttctagagaatatccgctccgagggcataaaagccatcagaaaggcaaaagagagccagaaatcgtctagtattaaattggatgaccttcacgatagtacccgagaaacagaagatcgctaccatgaaatcggtcttcatgtggtttcacgattgagcagtgaacttgagaatgtaaaaaaagcagcaattatatatgctgacagcttaacaggaactact

SEQ ID NO: 11925 - DNA, 326 bp, Glycine max
agcttctcagatgtcattggtatcattgaccttgtggcagcaagattgcgtcctgtcctcccttgcctccgaacaccatctccatgttcttccccagaaacaagcttattctttcttgttggcaataccatattagacaccttttgaacattttgtccagatttctggtctatctcttctgctttcctacccttttcttttggtttaacatcagccacccctgactcttcactttcagataaggcagctgaagatgaaggatcaccttttagtttaatttgctgaggagaactgccagccaagcgtctggcaaattctaacccaag

SEQ ID NO: 11926 - DNA, 328 bp, Glycine max
agcttatgaccattttaatttttttttagtttccattgttcaataaccaatgtctcgatatattatgcacctgaatcggaaatccaagtgaaaagttatgaccatttgaatttctcgagggattttgttgatcaattttcagacgtctccatatatggtgtgcctgaatcggaccttcgtgtgataacttatgaccatttgaatttcttgagagatttcgttgttcaatttctagcgtctcgataaaggatgcgcctgaatcggacatccaagtgaaaagttatgaccatttgaattgctcgtcagcttccgttgttcaatctccagc

SEQ ID NO: 11927 - DNA, 328 bp, Glycine max
  unsure at all n locations
tagcttcacaaaagtttatattgcttgaaacaagcaccgttgcagtggtgcaagaagtttaatgagttaatgagcaactcgggattcaaaagatgtgacatggaccattgctgctatgttaagaaatatactaatagttatgttatctttgtcgtgtatgttgatgacatgttgactgtgggatctagtatggcnnaaattaacaagtcgaagcatcagttggcagaaaactttgaaatgaaggatcttggtccagctaaacaaatccttggtatgagaattcttagaaacagatcataacgaatcttgtagctgtctcacgagaaat

SEQ ID NO: 11928 - DNA, 255 bp, Glycine max
  unsure at all n locations
tagttcaagtggcactcttgtgcacacaatatctttcgggccacaggcccaaaatgtctgatgttgtacgcatgcttgaaggtgatgggcttgcagagaaatgggaagcctcacaaagtgctgacactaccaagtgcaaaccacaagaactctcttcatcagataggtattctgacctcattgatgactcttctttgttagtccaagccatggaactctcaggccctatgatgtgaaccttacggngcggatcgc

SEQ ID NO: 11929 - DNA, 330 bp, Glycine max
agcttcaacatcaggattcttttaatggctatggcggatatcaccatgaccgttaattaagaaaaaaattatatttaagcatctaattaaagtaattatttttagggatataataagaacatttatctataatgcacctaattaaagtaattatctttagagatcatattataatatatatctataatgtgtctaattaaaataattatctttagagatcatattaaaatatatatctatagtgtgcctaattaaaataattgcatttagaagatctataaatagttggagtttgaactctcgggattcgaaattcattatacattttac

SEQ ID NO: 11930 - DNA, 196 bp, Glycine max
atctcaagactaactatgacaggatttttcttgaagaaatagctcaagcggcactctggtgcacacaatatcttccgggccacaggcccaatatgactgatgttgtacgcatgcttgaaggtgatgggcttgcagagaaatgggaagcctcacaaagtgctgacactaccaagtgcaaaccacaagaactctcttc

SEQ ID NO: 11931 - DNA, 329 bp, Glycine max
agctttccattctcttgggagttcatcattggatttgacttcttctggaggatcttcattgattcctttgtcatttcctttggaatcttgttcatgaatgttcatatgttctaaagaatctgcagtgtcatctagcatattctttcttgacaatatatcattagattcatcaaaggtaacatgaatggattcctcgatatacatagttcttttattatatatcatatatgctttgctttgtaatgaatatccaagaaaaataccttcatcagattttgcatcaaattttcctagattatctttaccattattaagcacaaagcacttgc

SEQ ID NO: 11932 - DNA, 295 bp, Glycine max
  unsure at all n locations
gcgcctgaatcggactgtgctttgagaagatatgaccatttgaatntctccagagctttcgttgttcaatttctagcgtcccaatatattatgcgcctgaatcggactttcgtctgacaagttattaccatttgaatttctcgagagcatatgttgttcaatttcgagcgactcgatatattatacacctgaatcgggcatccgtgtgacaagatatgaccatttgaatttcttcagagctttctatgttaatttcgagcgtgctcaatatattatgcgcctgaatcggactttc

SEQ ID NO: 11933 - DNA, 446 bp, Glycine max
  unsure at all n locations
agcttctcgatatattatgcacctgaatcagacttccgtntgataagttgtgaccatttgaatttctggagagattccgttgtgcaattntgagcgtctcgatatattatgcgcctgaattggacttccgtgtgattagttatgaccatttgaatttctcgagagcttccggtgttcaatttccagcgtctcggtatataatgcgtcagaatcggacttccgtgtgacaagttatgaccatttgaatttctcgagagctttcgttgctaaatttcaagcgtcttgaatataatgctcctgaatcagacttccgtatgagaagtgatgaccatttgaatctctcgagagcttccgtggatcaatttcaagctgctcgaatatgatgccctgtatccgactccctgtgaaagttataacctttaattcccaaagcgcgtttgttaata

SEQ ID NO: 11934 - DNA, 409 bp, Glycine max
agctcggaatgtagtcataccacacaaaatatatatatgtatgttgaggtagaaagataacttagatatgcatgtatgtaaacaaaaacacacttcacaaaatatatatatatgtatgtttaggtagcaagataccttagatatgcatgtatgtagcaaaaagatacctcacaaaatatatatatatatgtatggtagcaagataccttggatatgcatgtatgtagcaaaaagatacctcacaaaatatatatatgtatgtttaggtagcaagataccttggatatgcatgtatatagcagaaatacctcacaaaaatatacacatgtttaggtagcaaaatacctcatgaaaaaaaaaaaaagcaaactagagaaagaaatacacaaatgataatgatcaaaaaaaa

SEQ ID NO: 11935 - DNA, 497 bp, Glycine max
  unsure at all n locations
cttgtacaagaatgaagctctaataccacttgttagacaagtggcctcagatatcttaagaaggtgggggggttgaattaagatattgcaaactatttccccaattaaaattctattttaatttcaatgcaagttccaagttcccttaaaaatgaacttttaaatgatgattcaaactaaacaatctaaatacaaatgtaaagcaataataaataacagagtttaagggaagagaaagtgcaaactaaagcaatctaaatacaaatgtaaagcaataaatccctaagcaacccgcttgagagtttcactatcttgtaaaatccttttacaagttctgaaccacacaaggacaaatcctcctttgtgttcagatttctttacaacaagagaccctcagtctctcaatcccttngagaataagatagaagagaagaataaatctatctcgaaagagatagattgtacaactcgagcactcaattaattccttattgaat

SEQ ID NO: 11936 - DNA, 499 bp, Glycine max
  unsure at all n locations
aagtcacctgcggcatgcaagcttagactgagttcagcctaccatcctcatactgatggccaaactgaacggaccattcagtcattggaggaccttataagagcatgtgtcttatagcagaagggaagctgggagggttttcttccattgatagagttcacttataacaacagttttcattctgccattggcatggctccctatgaagctttgtatggtagaaggtgtagaacacccctatgttggttagagcccggagaaggcctcacattaggaccagaagttgtacaacaaaccactgagaaagttaagttaattcacgagaggatgacaactgctcagagtaggcagaatagttatcatgataagaggaggaaagatctacaattcgaggttggcgatcatgtattcttgagagtcactccatggactggggcttggtgagcattgaaatcccgacnactcacacctcgctttattggtcctttccagattctta

SEQ ID NO: 11937 - DNA, 420 bp, Glycine max
  unsure at all n locations
agcttatgctgcanacatctacagtagacctcctcaatctcaacagcaaaatcagccacaatagaataactatgacctctccagcaacaagtataatcccagatggaggaatcatcctaaccttatatggtcgaatccttcacaacagcaacaacaacaacagccttattttcaaaatgctgttggcccaagcagaccatacgttcctccaccaatccagcaacaacaacaacaacaacagccccagaaacaacaaatagttgaggcccctccacaaccttcccttgaagaacttgtgaggcaaatgactatgcaaaacattcagtttcagcaagagaccagagccttcattcaaagcttaactaatcagatgggacagttggctacacagttaaatcaacaacagtcccacaattctga

SEQ ID NO: 11938 - DNA, 412 bp, Glycine max
  unsure at all n locations
agcttangctgagttctacttaccacccacatactaacgattagaccaagcgcactatcaaatccttagaggacctcttgagagcctgtgtcttatagcagcggtgtagttgggatggtttcttacccttgatagagtttacatataacaatagtttttactccagtataggtatggcaccttacgaggcgttgtatggtagaagatgtacgacacctctatgttgggtagatctaagtgagagcattgccttatgacctgaggtggttcaccagaacactgaaaaggtcaagttgatccaatagaggatgagagtagcccanagtaggtagaagagctaccatgtangaatagataggaccttgaatttgttgcaggtgatcatgtattcctgacagtcactccatggact

SEQ ID NO: 11939 - DNA, 395 bp, Glycine max
atgcttagttaacctggtaacccagctatcgttgaatcagaaatctatacctgtcgcaaaagtctatggtttatgctcctctgccgaccaccacacagatcttttcccttccatgcagcaacctggagcaattgagcagcttgaagcttatgctgcaaacatttacaacagacctcctcaacctcagcagctaaatcaaccacagcagaacaattatgacctctccagcaacagatacaatcccggatggaggaatcaccctaatctcatatggtctagccctcaacaacaacaacagcagcctgctcctttctttcaaaatgatgctggcctaagcaagccatacattcctccaccaatccaacaacagcaacagccccagaaacaacaaacag

SEQ ID NO: 11940 - DNA, 460 bp, Glycine max
  unsure at all n locations
tcttcaactttgtattcaagtttttacatcaattcttttgaatcttactagtcaaaaattaaaataatattaaaatcctcattatttcattaaaaacaacattatagtagaggaattgtaatcattcttaagtcaaaattgactatcaattaaactcaaacttcgcagttatcactcattattttcaaacaacttgagcttgtgagaagttttactgaacttgatatatttctatctacataggctatgccttggtgcatggtcagaccatggtgaaaggactggtggattntatgcttgcaatcgttatgaagcagctaaacaagagggagtggtaagggaattagaaatactctacttcattggttcaggttcatgataccataacctactgcccctgcatatatttgataacgatatttcttctgactaaatgttgtgcatgtagtatgataaactg

SEQ ID NO: 11941 - DNA, 451 bp, Glycine max
  unsure at all n locations
actcggcatgggacctganatgttgttcccactcagatccaacaatgtcaaagatctcaaactagtccaattactaggtatcccaccactgatatcattacctcccaaccttatctcaacaagagaatccaactttgcaacagaaggactcaaagtcccactaatattaaacttttccaaaagaatcatgtccaccttcccatccccattgcaccttatccccaaccatggcccatcacaagggtcattcccactccactcatcaaccaaaatccgaggataccccaaccctccaagaaactccaacaacaccatcacctcaaaaccacacataaccccgggtttggccacacaaaattcattgttctcaaagctcactttactcngctgcgaaatccggatcggacccacganagtggtgtattcanatcaatctatccaacttcattca

SEQ ID NO: 11942 - DNA, 342 bp, Glycine max
  unsure at all n locations
gaactacagagattatattctaattctaaacccacaaatcaaactaatgttatgcaggattacaacgcaaaaatttcatattttggcttggcgaaattagggccttcgggtggagattcacacgtgagtacgaggatcatgggaacatatggctatgctgctccagaatacgttgcaacaggtgaacatgtcatcttatctaaacacatatatatagagatggtttgtgaatatgctatttgaagttgaaactaatcgtnttatgattcaacatgacacgctttcgtgaagagtgatgtttatggatttggtgtggtgctgctagatatgctgacatggatg

SEQ ID NO: 11943 - DNA, 324 bp, Glycine max
ctgcagctggacttctgtgtttgagaacctcttcttcctcaggtgtacccaaacccaatcacctggttcaagcacgactttctttctgcttttgttggcttgccttgcatagcttgcattattcttttcaatctgaaccttcactagctcatgcaacttcttcacatactcagctttagcctgtgcattcttatgcttaaacatatcactgttagacatacgcaacaaatcaagacgagtcaaaggattaaatccatacactatctcagatggtgaacaattatatgtgctgtggacagcccgattataaacaaactcaacatg

SEQ ID NO: 11944 - DNA, 488 bp, Glycine max
  unsure at all n locations
ggatccttaagcacctgaggcatgcaagcttgtttaccacatgttgagttngcttacaatagagttgttcatagcactactaattgttctccttttgaagttggttatggttttaacctactaactcatcttgatcttttgtctatgcctaatgtttctatttctaagcataaaggtcaagcaaaagcggactatgtgaagaagcttcatgagcgagtcatagatcatattgagaggaaaaataaaagctatcttaaacaagccaacaaatggagaaagaaatttgtcttctaacccggagattgtgtttgggagcacatgagataagaaaggtcttcggaacatacgaaatcaaagcttcaaccaaggggagatggaccattttcagtgcttgaaagaatcaatgacgatgcttacaaagttcagctacccagggagtataatgttagtcccaccttcaatgtatctgactcatctctctttgatgc

SEQ ID NO: 11945 - DNA, 342 bp, Glycine max
ttaaatattctcagtcataacagcctcaccccatatatatttgggaactttagtagaaaagagtaatgccctacccacctctataaggtgtgtattaattctctctgcactcccattttggtggcggtgtattaacacaacaactatgatagacaatctcattttcaagaaacaaacttcctagggttgcgtcaaaatattgcatcccattatcactactaactacttgtatattaacacgaaattgactttgcaccatcataaggaaatctctgacatctagtttacctacagatctttcttataatatgtacacccaacaaagcctagtgtggtcatcta

SEQ ID NO: 11946 - DNA, 258 bp, Glycine max
ctcttacaggtgactttgagcgtttgtgtccggaggagtacccaacatttcctgattatctctctcgagtattggccgccctccatccacttatcagagatggtgaagatggcgatgacgtgcatgtgacgtaaaaaatacttcgaactttaaatgcaaggtctgacttcattggtaccaacattgacgaaaacgccgatttaaggaccatgactattgagcaactcatgcgttccttacttgcctacgatgatgctc

SEQ ID NO: 11947 - DNA, 370 bp, Glycine max
  unsure at all n locations
ggatccttaatcacctgcggctgcagctggattcctttagtagganatctattcttcctaagatagagccaaacccagtcaccgtcattaagaactaactcttttcttcctctattgcctttagttgaatacacctttgtttggttctctatttggttcttaaccctttcatgcaacttctttacaaactctgatctagattccccttttttatgtataaaagaagtgtctagtgggaggggaatgaggtctaatggtgctaggggattgaacccatagacaacctcaaaaggggattgcttggtggttctatgaacccccctgttgtaggaaaattctacatgaggaagatacttatcccaagacttat

SEQ ID NO: 11948 - DNA, 465 bp, Glycine max
  unsure at all n locations
agcttgttgtaggtttcataatatgaaatctgaatatatatgtgcacggacgcattgtaatcgattacacacatatggtaatcgattaccatacagcaatgttgtcagacataactgcttgtaatcgattacactattatggtaatcgattaccagaggttatttgagccaaaaaataaaaacaaaaggctttctaggagagaagaagttttgagttactatcacaatactttttcatgagaaatatatataagaatactttatgaataattcttaatcatgtaattcacatatcatattatgcacgaacattaaaacatgtaaataatcaattntatcaaaacaatcaacacaagtatgaagagtattgattntattgaaatatatgaatgaatatttcatgcaaataagatgaaatcaatcaagaacatctactcatgatttcaaacaatcagaacacaaata

SEQ ID NO: 11949 - DNA, 305 bp, Glycine max
  unsure at all n locations
tatagtctgaattctgggtcctcttagggactnatacaatatatccgctggctggtcattagaaccaatgaactcgatgacaatctccttggacagaagcttctctcgaatgatatgacaatcaatctctatatgcttagtcctttcatgagagactgggtttgaggcagtatgaagagcatcctgattatcacaatgcaacttcatttgcaactcttcacaaaacctcaattcttgcacaaattgtcaaatccacatgaggtcacacgttaccatagccatcgatcgatatcaggctttgcact

SEQ ID NO: 11950 - DNA, 455 bp, Glycine max
  unsure at all n locations
agcttatccncataagagtgcagaacagctggttagtcatcattgattataggaggctaatccaggtaaccaaaaaagatcattttcccctgccattcattgatcaaatgcttgagcgcttggcaagtatgtctcattacaatttttttatggtttttctggttatttacaaattcatattgctcctgaggatcaagaaaacaccacattcacctatccctttggcatttttgcctataggaggatgccctttggcctatgcaacgcctctggtaccttccaacggtgtatgcttagcattttcaatgattttttagagagttgcatagatgtgtttatggatgattttactggttatggatcctcttttgatgcatgtttggatagtctagatagagttcttaatagatgcattgaaactaaccctgtgctgaattttgaaaatgtcacttcat

SEQ ID NO: 11951 - DNA, 404 bp, Glycine max
  unsure at all n locations
atgcctggttaacctggtaacccaactggccatgaatcaaanatctgcacctatcgccagactctgtggtttatgctcctctgccgaccaccacactgacctttgcccttntatgcaacaatctgaagcaattgaacaacctgaagcttatgctgcaaacatctacaacagacctcctcaacctcagcagcaaaatcagccacaacagaataattatgacctctccagcaataggtacaatcccagatggaggaatcatcccaaccttagatggtcaaatccttcacaatagcagcagcaacaacaacaaccttattttcaaaatgttgctggcccaagcagaccatacgttcctccaccaatccagcaacaacaataacaatagccccagaaacaacaaacag

SEQ ID NO: 11952 - DNA, 423 bp, Glycine max
  unsure at all n locations
agcttcngcttattagtgcacatctccttcaataatttagcatatcttggaatttgctttattgcatccagtagaggtatgtctacctctacttttctaaatgtttccaagatctccttctttggctcttccatttttttgatggaaattgctcttggagggaatggaagagggatatgttgcttctctttagattcacctgcatagaaattggtaggtatcttactctttaaatttttgtcatcatctttttctggagtagagagaagttgggcaggttcatttgcacatgaggaagatgttgctggttgaggttcttgacactgctttcccgacctcaatgcagtggcactcacatatttgggattctggacagattgagaacgtaatctgtcacaattctgggactgttgttgattaact

SEQ ID NO: 11953 - DNA, 394 bp, Glycine max
  unsure at all n locations
ntggcaacacaaggtgagaggctttattgggaagtgtgttggggaggagcaatctgctttcaccgaagggagatcgattctggacaatgtgctcattgcagtagaaatcattcactatcttaaatccaagaccagagggggaaatggataagtggcctgaagattgatatatgtaaggcctatgacctcgttgactggggtttctagatgcaatccttgtcaagttgtgattttgcaatcaatggaccgagtggatgatgatgtgtgtcaaaactgtttagtatgtagtggtagtgaatcatgacaaggttgatcctatctcccctgagagatctctggcaaggagatcccttctccctcttttatatatataattttagctcaaggtcttaca

SEQ ID NO: 11954 - DNA, 357 bp, Glycine max
agctttttatccaactggtttaaggttcaagaactctagtgatggtaaagctttctccttttcttcttcttttgctttgattatattccctgagtatgaaaagttaggagggcatggtcttgcttttacaattgcatcttctaagaatctcaaggctcttccaagtcagtatcttggtcttctaaactcaactagcacagggaactcctccaaccacctctttgctgttgagtttgacactgcccaagatttttagtttggggacattgatgacaaccatgttggaattgacatcaatagcttggtctccattgcttctgcacctgtatgttactacaccgggggtgatgataattt

SEQ ID NO: 11955 - DNA, 361 bp, Glycine max
tccccgtggcttctttgtgaagctttctcaagaggcttctttgagaagctagatccttatctacccacacccatctatttactaaattaacctccttaaaaataattacggataaaataacacaacaaatacagtcaagcatcaaacataattattaatatatagatatatatatcagggtgttacaactctcccacccttttagaaatttcgtccccgaaatttaccttactcaaacatggatgggtgagcttctcgcatttgactttctaattcccatgtggcatcttctcctgttgcacctccccagatcaccttgaccaacggaatctctttccctctaaggtgttttgttcgccta

SEQ ID NO: 11956 - DNA, 397 bp, Glycine max
tcactctcattcccttctccacgctgaccacatagtagagtctatttcatcaacgaatatgatagaaggtgcactttcgcgtgccatttggaaaagatttgagaccagcttttcactttctcccatccactttgaaaccaggtctgacgaagaaacactggtgaagaattaaaaagttaaaacatgtagcaaaaaaatgcccacctaacctaagcacttacatttgcgaccttatttttcaaacaaaatcactgacaagcagaactattagactcagaaattgaaaatgttaaaaataacaatgttgatgattatgtgaaatcatccatatgcacacacattcatccaccaaactcagtgcgtgtttggattaacattgaatgattcaaaaccacat

SEQ ID NO: 11957 - DNA, 278 bp, Glycine max
agcttattcacatagtcacgactgtttcttatcttctttatgcataaaaacagaaacattacgcatacgcaaaagatcacgaagacgcagtgggttaaaaccataaacaacttctgaaggagaacaattagtggcgctatgaacagctttattgtaagcaaattcaacatggggtaaacaagctacccaagtttttaagttctgtctgacaactgttctaagcaaagttcccaaagggctattaacaacttccgtttgcccattacgctgggggcgac

SEQ ID NO: 11958 - DNA, 311 bp, Glycine max
taagctccttcaactgcacaaggctcttaatatttgaagagtatccttgtggaaccttcacccgacgaagacactggcaaaaactaatcttctctttattggacaaagtttggcaggctgggggcaagtaaattttcttcccatcaaaccttggatgcaactgcgctcttatacccatatcagctaaatcttgacgggtattcaagccatccttcgtcttgccttgaatgttaaggagcgtcccaatcacactgtcacaaacatttttctccacatgcataacatcaatacaatgtctaacgtcaagatca

SEQ ID NO: 11959 - DNA, 339 bp, Glycine max
agcttcatgggagagtcaaagatcaaattgagaggaaaaataaaagctatgctaaacaagccaacaaaggaagaaagaaggttgtcttcgaacccggagattgggtttgggtgcacatgagaaaagaaaggtttccggaacagaggaaatcaaagcttcaaccaaggggagatggaccatttcaagtgcttgaaagaatcaataacaatgcttacaaagttgagctgcccggtgagtataatgttagttccaccttcaatgtctctgatttatctctttttgaagcagatggagaattctatttgaggacaaattcttcttaagagggagagaatgatg

SEQ ID NO: 11960 - DNA, 361 bp, Glycine max
ttgaatgctctattcactggagttgacaagaatatcttcagactaatcaacacttgcacagtggccaaagatgcatgggagatcctgaaaaccactcatgaaggaacctccaaagttaagatgtccagattgcaactcttggctacaaaattcgaaaatctgaagatgaaggaggaagagtgtattcatgacttccacatgaacattcttgaaattgccaatgcttgcactgccttgggagagaggataacagatgaaaagctggtgagaaagatcctcaaatccttgcctaagagatttgacatgaaagtcactgcaatataagaggcgcaagacatttgcaacatgagagtggatgaac

SEQ ID NO: 11961 - DNA, 386 bp, Glycine max
agctttctcacgcacatcagtccacttacaccacattctttttgacaagttcatttaaaggtgcaacaagtaaactgaggttcttcacaaatcttctataaaaagttgctaaaccataaaaaattcttaccttattagcatttttaggtacaagccattccctaattgcctttaccttttcttcatccacacttattccttttgagctaatgataaaactcaagaacaaaacatattcaaggcaaaaagaacatttttataagattggcatacaatttattttctctcaaaacattaaaaacaatgtgttcctctaatgttttgctatagatcaaaatatcatcaaaatacaccacaacaaatttcccaatgaagcacacaaaaca

SEQ ID NO: 11962 - DNA, 297 bp, Glycine max
catgcaagcttactactagaatagattctgttatagtaagttcgtctaattaaaattttattgtatttatattctgataatcattagcaatgagtgctattactttggtatcttagattagtattaactagaaatagttttgtgcaataaatttattcttagtgataaacaatattaggtttaggaaaatatatctattatatttgtattttgataataattaataatgtctgttattacttccctattttaagttagctttacttagaaaaagatatgttccatcaatttattttc

SEQ ID NO: 11963 - DNA, 189 bp, Glycine max
aatccccaagtaggattctgtctcaagacacaccgtaaaattcctgattcagagcgtgcccaaaatggtctaattccacataacaatatgtatgatataaccccaaatctccataagtctacttcaacactgtaagaactaaggagcacttcatgagcaacgctatatgcaactgtcaacaatgtcaat

SEQ ID NO: 11964 - DNA, 375 bp, Glycine max
agcttggcaacaagcaatgaacgctttggtttcctgagtggctcctttgcagagaattatctgacagaggagctcaacattcacagatccaggcttgttcctctcaactcaccatcataatatgaaacggccttgaaagatggtcctgctgatgggggtgtcactgcaataatagatgaacgtgcatacatggagctgctccttgcaaccagatgtgaatacggtcttgttgggcaagagttcaccataatgggttggggctctgcaagagcattatccatctcctctttttgaaattcacaatcagatatatcacatgcattctcccaaatattaaagatccggttttcaataaatctaagaccatcctttcta

SEQ ID NO: 11965 - DNA, 342 bp, Glycine max
  unsure at all n locations
ngcattattttatttatttattttggtgacaaatatatttttgcttgaggtctggttattacgatgaagcaagaaatgttgcccaatcttcacatcaatttgctcctttggtacatactgtggtcactacttatttactaatttatgatttaatctttcttaataatttacttatttatgacagctggcagagtggattaataaaggagggatggtacctgaagagattgcagctgccgcatcagaggaatgtgaaagaatgttgattggcattacccattgacttgtgaaatccaagtacacaaaaaattcccacaaaagatatatgaaataatgtttaag

SEQ ID NO: 11966 - DNA, 331 bp, Glycine max
  unsure at all n locations
ngaagacaagcctgaggaagaaggtgttgatccaactggttacaaacagttggtaggctcactgagatacctctgcaatagcagaccagatatctgttatgccgtatgcgtgctgagtaaattcatgaataggccaaagaaatctcatttcttggctgtcaaaagggttctaatgtatgtgaagggaactatgcagtatggtgtgatgtttccaagtaatgttgatggtgctgagatgaaattgattggttactcacatgctgattggtgtggggacaggacatatatgagaaacacatctggctacttgctcaaatttgtggagctgctg

SEQ ID NO: 11967 - DNA, 384 bp, Glycine max
ttcgagaaattcaaatagtcataacatttaactcggatgtcaaatttcggggcataatatatcgcgacactcgaaattgaacaacgaaagctctcgagaaatttaattggtcataacttttaactcggaggtccgattcaggcgcataatttattaagacgcttgaaattgaactatgaaagctcttgagcaattcaaatggtcataacttttcacacgaaggtcagattcaggtgcataatatatcgagacgctcgaaattgaacaacggaagctctcgagaaattcaaatggtcataacttttaactcggatgtccgatttaggcgcatcacatatagagacgcttgaaatcgaacaacggaagctctcgagaaattcaaat

SEQ ID NO: 11968 - DNA, 397 bp, Glycine max
agctgacgcgtgcgcgcttccttgagaagatgtgtatagaagctagagcttagctacacacacctctctaatagctaagctcacctccttgagatgagaagctagaacttaactacacaccccgtataatagctaagctcacccccatgacaaaatacatgaaaatacaaaaaaagtccctactacaaagactactcaaaatgactcgaaatacaaggctaaagccctatactactagaatggccaaaatacaaggcctaaacgaaggaaaaaaaacctattctaatatttacagagataagcgggctcatacttagcccatgggctcaaaatctaccctaaggctcatgagaaccctagggccttcccttggatctctggcccaatctacttggag

SEQ ID NO: 11969 - DNA, 270 bp, Glycine max
  unsure at all n locations
tgtanaaaattattaaatattataatgttgttggattgtatnaatgtgtttagnttaaatgattaaanatgttgttttaaagtatgaaggtnattaagnttgtgaattaatttaaaaaatttttgtaatanagtatgaaaagtataatttattaaattatnnnttaaaattataattgaaggacaaaanttatagtatnnagtaggtggttttagtgttatnnaattaaatgttagagttatatatnagtaatttttttaataaatgttt

SEQ ID NO: 11970 - DNA, 317 bp, Glycine max
  unsure at all n locations
agcnttgatttcctttgttccggatacctttcttttgtcatgtgcacccaaacccaatctccgggttcgaagacaaccttctttctccctttgttggcttgtttagcatagcttttatttttcctctcaatttgatctttgactctctcatgaagctgctacacatagcgggcctttgcttgaccttctttacgctcaaaaaaagaaacattaggcatatgcaaaagatcaagaggagttagtgggttaaaaccatacacaacttcaaaaggagaacaattagtggtgctatgaacagctctattgtaagcaaattc

SEQ ID NO: 11971 - DNA, 400 bp, Glycine max
cgaggtgttggatgtgtcgaggaatacgctcggtgggcatgtgcctatggagcttgggaattgtactgagttgtctgtgctgcttttgtctaatctttttagttcagttccggatgttaatggtactttgggggactccggggtggagcacatggttgctatgaatattgatgagtttaattacttagaaggcccggttcctgttgagattatgaaccttcctaagctgagactgctgtgggcgcctatggcgaatctggaaggcagttttatgagcagttggggcaagtgtgatagctaggagatgctaaatttggctcaaaatgatgtcactggggattttcctaatcagcttggtggctgcaagaatcttcattttcttgatttgagtgccaataac

SEQ ID NO: 11972 - DNA, 396 bp, Glycine max
tctagcttatacgggcagacatcttattaactaataaagttttgatgtaatccttcattaaccctcctgcatttgtataattatcttcatctttgtaaagcacgtcaatcatgcgcacaaggttgacaacacgcaaaagaaaattcattggcacttcagtaggattaaggcatgcctcattgatgtccttccaagcactcttaaccatctcaagtagtttattaatggcatcttgccttgaggtgttatgttgcttcatatagctttcaatgcttgatgcaacgtgtcttctttcctgctcaaactttggggaaaaaaattaatactaaagaaaccaatgtttaacccgtaaagtaaaagttggtattaccaaaattataaggtaaattaaatgtc

SEQ ID NO: 11973 - DNA, 297 bp, Glycine max
agcttgtgcctcttcacgtctggaatatgaatgtatcatatagatccaaagacccttatgtgctttgctgatggcttcttcccgttccaagcttcaattggagtcttgtcttttacagacttagttggacatctgttgagtatgtaaacagcagtgtagactgcttcagcccaaaatgtgttaggtagtcccttctccttaagcatcgatctagccatcttcataaatgtgctattctttctctcggacactccattttgttgacgagaatatgcaactgtaagttggcgctcaatg

SEQ ID NO: 11974 - DNA, 366 bp, Glycine max
tgtaatctttggatccttgaagatatcttaacactttctttgcaactgactaatgctctattcctgaattactttgatatattccaagcattccaaccacaaatgccatgtcaggtcttgttcacacctgctcatacataatgctttctacaatggaagcatatggaatgtttctcatttgttccctttgaagcttatttttaggacattgattcaaactgaatatatcacctttcacaataggtgtcatgttgggtgaacaatcttcatgcaaaacatctctagaactttgatagtattggccctttgagagaacccgagaataccttgatatcagtttctatggatctctatgccaatgacata

SEQ ID NO: 11975 - DNA, 271 bp, Glycine max
agctttatgcaagtcaattttcaggaggcatctcggagaggatcttttccgggcatatttgcacaaaatctcttgaactaggaagatgttgtccatcatctttctgttcttaatgaaagcagtttgagtttccccaataatagtctcaagcactggggctatgcggttggccagaattttagatacaatcttgtataacaaattacagcaagatatgggtctaaaatggttaacctgggaggcctgatcatgcttaggaataagcgcaata

SEQ ID NO: 11976 - DNA, 269 bp, Glycine max
agctttgttctaattcaaatgacaataatgatttgctcggatgtctgattgagtcccgtaatacatcgagacgctcgaaattgaatgttgaagctctcagcaaattcaaacgacaataactttttactcggatgtctgattgagtcccgtaatacatcgagacgctcgaaattgaattctgaagctctgagctaattcaaacgacaataactttttgctcggatgtctgattgagtctcgtaatctattgagacgctcgaaattgaatt

SEQ ID NO: 11977 - DNA, 256 bp, Glycine max
  unsure at all n locations
agctngtatcaaaatcgaacgacaataacttttcactcggaagtccgattgagtcccgtaatatatctacacgctcgaaatttaaaaccgaagcttgtagcaaattcgaacgacaataacttttcactcggaagtccgattgagtcccgtcatatatcgagacgctcgaaatttaaaaccgaagctcgtagcaaattcgaacaacattaccttttccctcggaggtccaatggaggcccgtactttatcagaaccc

SEQ ID NO: 11978 - DNA, 260 bp, Glycine max
agcttttatcaaattcaaacaggaataactttttactcggatgtccgattgtgtctcgtagtatatcgagcgctcgttattgaaaacagatgctcatagaaaattcaaacaacaataaatttttattcaaatgttcgattgtgtcccgtaatatatcgagatgctcaaaattgaaaacgaaagctcgtagcaaatgcaaaccagaataacttttaactcggatatccgattaagtcccgtaatatatcgtgacgctcgaa

SEQ ID NO: 11979 - DNA, 258 bp, Glycine max
agcttttgtgaaattcaaatggtctaaacttttcacacggaggtccgattcgggcgcataatttatcgagacactcgaaattgaacaatgcaagctctcgagaaattcaaatggtcataacttttcaatcggaggaccgattcaggcgcataatatatcgagacactcgaaattgaacaacggaagctctcgagaatttcaaatggtcataacttttcactcggaggtccgattcaggcgcataatatatcgagacgc

SEQ ID NO: 11980 - DNA, 242 bp, Glycine max
aatccctgggcttctttgcgaccatatgggcatgaggtccatggccatcaaaaacaccacagaaaacggcggccttggttgaagagaaattatcccagagaagcatggcatcctggctgatccctttgcgaccttgcttacagaacaaggaagcaacctgggacgaacagttcaagaataatctgccaggaactctgtggagccgcatttccatgttataatcagaggcagttctggaactg

SEQ ID NO: 11981 - DNA, 262 bp, Glycine max
agctttgagccaactcaaacgataataactttttactcggatgtctgattgagtcccgtaacatatcgagacgctcgaaattgaatgttgaacctctgagccaattcaaacgacaataacttttttctcggatgtctgattgagtcccgtaacatattgagacgctcgaaattgaatgttgaacctctgagccaattcaaacgacaataactttttactcggatgtctgattgagtcccgtaacatatcgagacgctcgaaa

SEQ ID NO: 11982 - DNA, 262 bp, Glycine max
agcttgatttgaaaatgaaattcaacaataataaaatatcatacattgcagccaaaaaaataaaatcccagatttcataattagggttcatgcataattgggagaaaagaaacctttcttggagaatcataattttcataacttatgctctaataccacatgtaaattttaaggatttcttagattaacaattgtaggaaaccaataggatcttgaaacctatgattctcacaaacaatggataaacaatgcgtatttttct

SEQ ID NO: 11983 - DNA, 260 bp, Glycine max
agctttaacattaattaaaagctcattgttgcaggggcaagcactttcggtaattttgatgcatgtgactgaacttgtcccaatttatatgaaataaaataaatgcattctcaggttttgtttgctgaatgctacaggctttgcaaaacttttttgctgctttagtctattctgcaaatactagttttgattctctgctggagtcactacttgcctgtgctaagccttctccacagtctggtggcattgctaaacaagct

SEQ ID NO: 11984 - DNA, 262 bp, Glycine max
agcttttgctgcaaacatttataaaagaccccctcagcagcaaaaccaacaacagcggaataattatgacctttcaagcaacagatataatctaggttggagaaatcatccaaatctgagatgggcaagtcctccacaacaacaacaacctgaccctcctttccagaaggctggtggtccaagcaagccatatgttcctcctccaatatagcagcagcaacaacaacagtcacaacaaagacaacaagcaactgaggctcct

SEQ ID NO: 11985 - DNA, 260 bp, Glycine max
agctttatcttgttcaggtgcaggtgctgctactggtggaggcacttgaatttggttgccagacctcaaggtgatggcactcacatttttcagattttgcacagtttgtgaaggcaatttgtcagaattttgggactgagcttgattcatctgagtagccatctgtcccatctgatttgtcagactctaaatgaaggctcttgtctcttgctgaaattgcatattctggatggtcatttgcctcactaactcttctaagg

SEQ ID NO: 11986 - DNA, 333 bp, Glycine max
actaggagagtctcttatataacagtaacagattcgttggttgaatctgttgtggttgctagagaggatgacaaggagaaactactgagcatgcttctatatgatgatgatgccatgtctaatgatatagaagtgatcacagtattgggcatgggaggtttaggaaaaacaacccttgttcaatccctttacaatgtaagtgaagtgcagaaacattttgatttgacagcttgggcatgggtgtctgatgatcttgatattctcaatggaacaaagaaaattgttgagtctctcacattgaacgagtgtcatttacttatcttggcgttttcg

SEQ ID NO: 11987 - DNA, 433 bp, Glycine max
  unsure at all n locations
taagtttctctacacacgnaacaagctaagtttcttgtttattaaatagcataagtaagggaatcccacttatgaaacatttaccttggattagatccttggattttgaagcttcatcaccgttaagggtaaagactcttcctgtggccttcgaacatccagtttggtcattcaggcccacaccattccgctccttcttgggatataggcaatctctctgaatatgccctttctgcttacagttgaaacaagtcatgcctttattagcacaatttgaggagatatgccctggcttaccacatttgtaacatgtgatctgagttgaggaagtagtgggtttgctaccactaacaccacccatagcaacagtcctttgattgttggggcgaataccatattgcttagagggagttgagtacggtttttccctatg

SEQ ID NO: 11988 - DNA, 373 bp, Glycine max
  unsure at all n locations
tcatcanaatgaaatgaaactacgtgttcattatattttttgaggctcggcaatcttagaaaaatccttgatgaaacacctgtcaaacccgacatgtcctataaagtctttgatgcctctgacattggttggcagatgcaatatttcaatgactgacaccctggcttcatcgacattaatgccatgaacaaagactttgcggcctaatacaatacctttagttactataaagcggcaatctttctaactgagctcaaatatttttgcaacacgctgcttcagtacagagtcaagattacaaattcataaatcacaagaagagccacacacacagacttcatccatgaacactctaatactcttctccacgaga

SEQ ID NO: 11989 - DNA, 381 bp, Glycine max
  unsure at all n locations
tctggctgttcttatatacatccacacagaaagtgtcagtacttcatgtcatgctctctatttttcctatcaattntcttttgctctttcaatatattttttctaagcaattcagcttcaacaatgtcatgagttagtgtgtgacttcatcaatgtgcatgggacaggtacttgacgggtttcctatatttcacgggcattaatttcgttttgacatttgttgctgctattctctgtgtgtgttttgcacccacaccagcaggacctggaattcctgagatcaaagcttatcttaatggtgctgatactcccaacatgtttggtgccacaacattgattgtcaaggtacattaattatttgattgtatgcaacactgtctc

SEQ ID NO: 11990 - DNA, 398 bp, Glycine max
  unsure at all n locations
tatgctcctaccataagtgcctcgtggagtcattaatattcttattngcaccgccatcgacccgtacctcatcggaaacccaaacagtaccccatctgcggccgtcaactacggcattgttatctctggtatggcgtcatccttgggcgacgccctcatctgatatatcacctcaatcggcaatgtctccgagaccctatacagaaccccttccacaccttccactctgtccatgtcgatcttcaacctcttcgacatccccccatgccgtctgagagagacgaccacgacgaccacgctgctttacgtgctggcactggcgtgtagggtcacgcggcaggcattgtctggaggcgacatcagaggcaacatgggggttgtggtgacatcagtgggag

SEQ ID NO: 11991 - DNA, 395 bp, Glycine max
cccatggaagctcctaatatctcccacactttttggtgtgggccattcttggatggccttgattctctcagggtccacttggaccccatttctaccaactacaaaacctaagaaaactatattatctacacaaaaggtacacttctctatatttgcataaagggtgttcttcctaaagactgaaagaacttgtctgagatgtcctaagtgaaaatctatgctcctactatacactaaaatatcatcaaaataaacaactacaaatctacctatgaaatcccttaagacatgatgcataagcctcataaaggtgcttggtgcattagtgaacccaaaaagcatcactagccattcatacaaaccaacactggtcttgaagcagtcttcactcatca

SEQ ID NO: 11992 - DNA, 468 bp, Glycine max
  unsure at all n locations
tcgtatgctcagctacagaatgctcagnctccttatgatcctgatggaattcaagnngctgatcaattgatagtctcagagttcaagaccttgtctgagctaaagcaatgttacttcaaaaaacaatntgatcctttaccagatagagcaattcttgcagctaaattaaaggagctgcaaagtgtcaacaaaacctttgagaatacagggaagaagttagaatcgcaggcagggctcaaggactctgagattatatttctccaagaaaagctagaggaagctaatgtgcacaataagtcaattgagaagagttaaatcaaagtggatcattatcagttcttgataatctccatatgtcaggactaagtcctagccattttgtcaccgctcttcgccacacagttaggtccattcggagctntgtgaaaattgttagtaatgaaatgagatctgcttggtgggatattg

SEQ ID NO: 11993 - DNA, 464 bp, Glycine max
  unsure at all n locations
tctaatcaactctaattcagtatcagcccggcttactatctcatgttaaatgagagaaactgaccttcagatagcatagaaattgcaattcttcaggaatgaggaaaagcaaagcatttcctttcccaccttcaccacgagctgttctaccaaccctgtggatatattcctggtagcagtataaaaaaaatgtgacatagtacatcaaagtataagacttctaagaagcaaatgaaaagggatattgattgataaatagaagaatgaaaagtacctttggttcatcaggtggatcatactgcacaatccagtcctacagcacaaataaggagacaataaacataaatcttatatatgtaatgaatttcaattaacagaacagaatgctgaataaacacggttcattcaagtgttgtaaaatgtntaccattagtattagtatagaaaaccaaattaaacataga

SEQ ID NO: 11994 - DNA, 355 bp, Glycine max
tgaagctccttctttctgtcttattccctagtggatggtgcctcccctatcctcttctcctttgccttccgctgcatctccatggtgaaaaatcaccattgaaggacctcattgaagctcaaagatccagcctccatagaagctccacaagcaagcttccatcacttttcacacagaggtcagattcgggcacataatatgtccagatgctcggaattgaaccacggaagctctcgagtaatacaaatggtcataacatttcacacaaatgtccgattcgggcgcataatatgtcgagttgctctaaattgaacaacagaagctgtctataaattcaattggtcataaattttca

SEQ ID NO: 11995 - DNA, 394 bp, Glycine max
  unsure at all n locations
ggtatatggtcttattcaaaacaggaccactcttatttcttctctngcgttggcataatgttcaattactgtcaaggcttttggagcatctataacttgttcaactatattttcagcgacatttcggttgataagctgcaccaaatctctctttttcctctgtattctttcagcacgaaagtattttttggttttcaattgcttggcaactatagtttgtatctctcctttggtgatcttcttccggatctcatccagagaagcccccttctcaagctctgctaacaattgttttcttgcttcctcaaattccatctaattcaattaagcagtgagtgccaaaaagtatggttagagaaaatgaaatatagttntgacaatctatgtcattaat

SEQ ID NO: 11996 - DNA, 411 bp, Glycine max
  unsure at all n locations
tgtagaatcacttgtatcaacagccatatctntttaatttctattataagcctatctgcttcaaagaaaaaatcgactcatagtcaggggcgtttaacaaaatcttctgggaaagggactcattttttgaaattcaatcttgaaaggtgttcagtacatgtatggngtgagacaggtttggaaaatacaattgttccagaccccaagcgagttaattacggctcacaggggggtagagttatgctaaatgtgtcagcagatggtaccccacgcaatgcaaatataatgtccactatttccgatgaataccagaagctgaagtactctgtctctcttgaaatatttcaatatagtttgtgtgtgaacaaagagaaacagtccacacagatggaacttgaaagagcagatctg

SEQ ID NO: 11997 - DNA, 449 bp, Glycine max
  unsure at all n locations
acaaatntacgtcgttttcctctcataatattagaggtttgtatttgatttcaatattaaaatattatttttacataaaaagtcatctatattttaaaaggtcatgtaaaaattataataacctatatatatatatatatatgatttattgtaaaagacttttataataaatatcttgttatttaaatcttaatagatttatatcataaggataagatttttaaaaaatctataaatttataagatttaaaaaaatcatatagaattttaacaaacattcaaaattcaaatgataaaattaaatatctgctgtgttctattataaacaacctaaataatgaaatgccatttttaatctgttcatatctaattgtcagcttcatcatcatattcagtctatcctctgcctaacatttactaaatctttccgactgtactccaacattatg

SEQ ID NO: 11998 - DNA, 398 bp, Glycine max
  unsure at all n locations
aaacataagcacttagacaatgtttgttagcnggagnngctgcacatgatgtccaacgttatgtcaaagaataagatcgggctgcacaatgcacaaggctagatgaaatgtcaaatgaagaattgaagctgcatgattcacgatgtctgatacaatgtccaggacatcctgctcgaaaatactggaattgctaaaagcattgaagctgcaggatccacgatgtcggatacaatgtccaggacattctgcccgacaatactggagttgctgtacaatgcaagataaaagtcaagttgtgaagctgcaggatccacgatgtcngatacgatgtcctgacttccggcccgataatactggacatataattctgtttatttttacagattattggcagttgc

SEQ ID NO: 11999 - DNA, 270 bp, Glycine max
ctatacgagacatcttgccgaacgaagtcaagctatccataacttgcctgtgctccttcttgcatgccatatgtaacggagacgatgatcctgtcatgatcgacgacttggaaaatgatgtcgtaactatactgtgccagttggagatgtattttacccctgctttctttgacatcatgattcacttgattgcgcatttggtgagagacatcacatgttgaggtcttgatcatttgcggaggatgtacccgggtgagcgaaacatgaaga

SEQ ID NO: 12000 - DNA, 336 bp, Glycine max
  unsure at all n locations
tactaagcttaagagatcatccnctcgataacatcattggtgatattcatttgngtaacaactagacattctctgaaagacttatgcaataatatggattttgtatctatgattgaacctaaaaatatgaaagaagccattatagatgataactggatcattgccatgcgagaagaattgaacccatttgaaggaaacaatgtgtggaaattagtagacaaacctgataattatactgtcataggaacaaaatgggttcttagaaataaattagatgaacatggtgtaattattagaaataaagccaggttagtagcacgagggtataatcgagaa

SEQ ID NO: 12001 - DNA, 412 bp, Glycine max
tcttagtctcacctgatgaaatgaatacgtggttcatcatgcactcctctaatgacaatagcatcacttctggcactaaattgctaagagttggaagccatcttctcaattaaatttctggcttcagcaaaggtcatgtctccaagggctccaccactggcaacatctatcatacttctctccatgttactgagtccttcataaaaatattggagaagaagttgctctaaaatctggtggtgagggcaactggcacataatattttaaatctctcctagtattcatataagttctctccactgagttgcctgatgcctgaaatgtcttttctgatggaagtggtcctagatgcatggaagaatttctccaacaacactctcttaatgtcatcccagctggagatggatctga

SEQ ID NO: 12002 - DNA, 461 bp, Glycine max
  unsure at all n locations
atcttcttcttcactacatcaagaatcaccgggttgagtcttctctggggctgtcttactggtttagctccatcctctaaatttattcgatgcatacatgtggatgggctaataccaggaatgtccgccagggtccagcctatagccttcttatgcttcttgagaactggcaacaacttctcctcttgctcatcagcaagggaggcagatataatcactggaaaactcttgctatcatccaagtaagccgtatttaaattngatggcagaggcttcaattttggtgtggttggttggacagtggtagaaggagatggtttctcagcctttacctcataaagaaagtcagaggtatgtgtacttccctgaacatggttagtcctatctgactctatnaaatcaatcttgagaggtaanacaccaccaccagacattgcatcaatatcactctcagatcactc

SEQ ID NO: 12003 - DNA, 327 bp, Glycine max
cacatgaactaacatcactactttcatatttggctatctctttcttacacttgaacatcattggattccaatcgtttcatgactcaagaagttttgactactcccaagtgtcatttttcttgatgatattaatttcctcctccatggcttgtctccaccttttgtgtttcatagcttcttcaaaggtgaaaaactccttgtctacaaaaagacaaaacacctcattcatgacttcagtttcatcatgtatgtcttgaacgcttcttcattattcttagtctttcacttgaactcccttcggaagacgaacttcctgaattgaatgac

SEQ ID NO: 12004 - DNA, 355 bp, Glycine max
  unsure at all n locations
aaagtgaaattgaagctttctatgatgcttcaatggatcaaactcctcaaaacgtgtgataaaaccagcaacaacacctatgatatcctcttgagttccatgtttgacaagagcttcattccacaggtccctccaccttgtagaaagaaggctggtttctagcgatgattcatttggtagaaatgaaactatgcgacctagaatttcgtctggtaaattactaaacagatcctttcccatatggaatgaatctgttgnttcagtatggtcttgtttggactaagaatacaatgacatctatatatttgtaactntataattcatgtgaactatgcangtcacaacaaggagatat

SEQ ID NO: 12005 - DNA, 206 bp, Glycine max
gatcgatcatgatgagcagcgtttgaagcaagacttatagcagatttattatcacaaaatagcatcacagagggcacatcaacttcaaagtgaataagtaacttgtttaaccacacaatttcactagtaacagaagacaaggcataatattcaacttcagtgcatgattttgaaacagggggttgtttcttataacgccaagaaag

SEQ ID NO: 12006 - DNA, 465 bp, Glycine max
tgtaagaaagcatgaagatgagagcattgtggtggtgatttccctttatgacagcattcagttctgaggttgcaccatgatgttttccttgcacctagatgtttgaatatgcctcataaaatgtatgtatgttgcatataagtaacaaaatgcctcgtgaaatgtatgtatgttgcatgtaagtaacaaatgtctcataaaatgtatctatgttgcatatatgtaaaaaaatgcctcataaaatgtatgtatgttgcatataggtaacatatgcctcataaaataccttgttaatttaggtagcaaaataccttatctatttatgtagcatacataccttatcaaattacgtagcaaaatacttgaatacacattgaaatgtagatttttacgtagcaaaaatactcgaatatgcatgaaatataatttgggtagcaaaaatacttgaatgtgcataaaatatat

SEQ ID NO: 12007 - DNA, 450 bp, Glycine max
  unsure at all n locations
agcttcaacattcaatatcgagcgtntcgatatatttctgtactgaatcagacatccgagtaaaaagttactgtagtttgaagttgctcacagctaaggcattcaagtccgagcgtctcgatatactgcgagactcaatcagacatccgagtaaaaagttattgtcgtttgaatntgctcagagcttcaacattcaatttcaagcgttccgatattttacaggactcaatcggatagccgagcaaaaagttattgtcatttgaatttgctcagagcttcggtattcaatttcgagcgtctcgatatattacgggactcaatcagacatccgagtcaaaagttattgtcgtttgaatatgaacagaacttcggtattccattttgagcaactcgatatattacaggactcaatcagacatccgagtaacaagttattggtcgttgatttgc

SEQ ID NO: 12008 - DNA, 406 bp, Glycine max
  unsure at all n locations
cttctggcttcaattcatcagtgggctntccttctgtgtccagcatcttgggatgttcccagcctttgatgacagctttccaggttctgctatccagtgatttgagaaaggccaccatccttgctttccagtattcatagttggtcccatccagaattggtggtctgttcactggtccgccttctttctccatgttcatcagaatntatctccctagatctcactcagtgatttcgagtgcctgctctgataccaattgaaattctgatactggggacagatgtcgtacaggatgtcacgacatcacgcttcagaacatgcagattgtctttgactgtatgaacagattaaacaagtaaataacacaagagaattgttaacccagttcggtgcaacctcacctaca

SEQ ID NO: 12009 - DNA, 460 bp, Glycine max
  unsure at all n locations
agctntntcgcgcactaatactgagctgtatgtttgtgttaaggtatgtggactccaaaattgatatggtagataatgaagctctaaccaagtcttttgtattagaagaatttaaatatgcccttttccaaatgcacttggataaggcgtccggacctgacagattgagcccgaccctttataaacggttttggaatgtttgtggatttgagattttctaggcttgtgtctcctggctgcatgaagggactatgcctcctcacttgaatgatactaatattgtcttaattccgaagaaggagaatccagcatctatgaaggacctttgtcctatatctttgtgcaacgtggtgtacaagatcatgctaatagtgttagccaatacgttgaagcccgtgttggataatgtatctccgcagagcaatctgtgtttgtggagaacagatctattattgataat

SEQ ID NO: 12010 - DNA, 484 bp, Glycine max
  unsure at all n locations
agcttgtacatggcaacatcaaatccttttcttctttctcaacaccaaacagtatggctgcgtgtctgaccttggcctggcaaccatatcaagctcacttgccttaccaatatcacgagcagccggttaccgtgcaccagaagttacagacaccagaaaggcagcacagccctcagatgtttacagctttggtgtggtgttgctagagcttctgactgggaaatcccctatccacacaactgctggcgatgagattatccaccttgtgaggtgggttcattcagttgtgcgcgaggagtggacagctgaagtgtttgacttatagctgatgagatatcctaacatagaagaagagatggtggaaatgttacagatagccatgtcatgtgtggttaggatgcccgatcagaggcctaagatgtctgaagtagtgaagatgatagataatgtganggcagatgatgcagatactcactcatcatct

SEQ ID NO: 12011 - DNA, 445 bp, Glycine max
  unsure at all n locations
agcttaaccaaagtctatactgttttgtttgttatagctctngactactatccttgccttattcctagtgatcaaaccatgttcattcaatttatttttaaacactcatttagtgtaaatgatgttcatgtttttaaaataaggtattaattcccatatatcatttcttttaaattggntcaactcctcatgcatggacatcatccaaaacttacatttgagtgcctctcctatagacaatggttctacttgtgacacaaatgcagtatgctcacaaaataagttcaaagagtgtctagtagttactcctttttctatgtcttgcatgatgtttgctatagaaatatccattggtgctctccattccttaagaagataatcgtgctgtgatgagagccattcttgatgtttatttctcacaaactcttcactcttcgatgaactt

SEQ ID NO: 12012 - DNA, 477 bp, Glycine max
  unsure at all n locations
agcttggttcccaatgctntgttcaagctctttcaatacctataggtaaatctaggatctctatcagatactatgctagatggcacaccatgtaacctgacaacctcacttatatacaaggtggtcaacttctccaaggaaaatctgatattaatgggaatgaagtgagcagacttagtcaatctgtcaacaataacccagatagaatctaaacctctaggggttctaggtagccctaccacaaaatccatggaaatactttcccacttccactgnggtatctctaagggttgtaacttccctgaagatctctaatgttctatcttagccttctgacagactangcttgcatacacaaactcactaacccctctctttcatgtgggccaccaaaacatcgtctttaaatcctgataccatcttggagcaccaagatggatgctcaaattactccaatgtccttcctctaagatcatc

SEQ ID NO: 12013 - DNA, 314 bp, Glycine max
  unsure at all n locations
ctcacaagctgctcanagaagttcataagttgtaaaagctatttggatgcaagtcaaagacttgcttttatagactcttcatgtctagtcaagagaaccattggaagagttattatcttgagaaaatcttgagaaagccattggaagagttacatctcttgatcttgtattcataacttgccgcttggtatcgattaccataaccatgtaatcaattacacaatgcattgtatgacaagatgtgactcttcacaattgaatttgaatttctacgttcagatacactggtaatcgattaccaatatattgtaatc

SEQ ID NO: 12014 - DNA, 450 bp, Glycine max
ttcagcttcacccacctattgagcacaattaatcatggagaatcttctgaagtcataaccaattaaccattacttaaacatattaacataagaaataaatgagttaaacaaggatactgctagaatatatgaaaaattatccaaaaatatcttgattttaattttaaaataattcagaatatctaggattaggactacctgtttgggattaacttccatattttctaatgtttcatgatttgtaatcatacctagcagtagtttaaataaggattttgtaacacatataacacatcatatcaaatcaattaaaaagtcaaatttccatgtataaattttcttttatttccctttcctccctctatacttaaaaccttataattccgactgatacacagatagagacatacccattttgatgtcaaggaagctgctgtgacattaaaaaat

SEQ ID NO: 12015 - DNA, 458 bp, Glycine max
  unsure at all n locations
tggagtttccaagcgccaattcgtcttcttctntagtccagtcttcttctggcttcaattcatcagtgggctttccttctgtgtccagcatcttgggatgttcccagcctttgatgacagctttccaggttctgctatccagtgatttgaggaaggccaccattcttgctttccagtattcatagttggttccatcaagaaatggtggtctgttcactggtcctccttctttctccatgttcatcagaatttatctccctagatctcactctgtgatttcgagtgtttgctctgataccaattgaaattctgataccacgggacagatgtcgtaccggatgtcacgacatcacgcttcagaacatgcagattagatgcgtccgtntgaacagattanacaagtaaataacacaagaagattgttaacccagttcggtgcaacctcacctacatctggg

SEQ ID NO: 12016 - DNA, 387 bp, Glycine max
  unsure at all n locations
agcttctagtgggacatcttgacttgctctccaatctgacattcaccacagattctgccttcttctattttcagaatgngaatgcctctaacagcacctttgacaatgattntcttcatgcctcttaagtgcagatgtccaaatctttgatgccatattctgacttcatcttctttggaggatagacatgtggaggagtagctggtttcttggggtgtccataggtaacaattgtcctttgatctgctgcccttcattacaacttcactcttctcatttgtcaccaagcattctgactttgtgaagtttacattgaatccttcatcacacagctgactgatgctgatctaagttgcagtcagtcccttcaccagccagactttgttc

SEQ ID NO: 12017 - DNA, 411 bp, Glycine max
ccgctactcccatacatataaaaacaactcttgaatctggcttctcatccagccatagtaatatcctatcatgatgggcttgatccacattttggttatgttgacccttcaaaataatcaatggaccaacagcatacattgggggtgtgtgaatttgaccatcacatattgcattaatagcatactgctctcactctgaaaaagagatatcaaagatccctttggagtccttgtacctctgagcaatgttataattagtagcatatccaccttgtttgtttaaaacagcatcaggcacaacactataatgaactggatcagggagacccggttccaaccactgatgatcagaatcatcgaatgcatcaccaactctacgtctctgaagggataacatgatattcaaaaacc

SEQ ID NO: 12018 - DNA, 452 bp, Glycine max
  unsure at all n locations
tacggacctatgaatactaagcttgtagggagccacagagaatggtgaatcctaccattcttgatatggtgaagaaagaggtgatgaagctactagctgtagggatcatttagcctatgttagataaaacttgggtttcacctatccaagtggtccctaagaagtcaggcatcattgttgtggagacttaggataatgagttgatcccggctagaatgaccaatagttggcaagtttgtattaattataggagactgaaccaagcaactcgcaaggatcactttcctctctcattcgtggatcgggttttggagaggttggtaggtaaatcacactatngatttcttgatggttttataggttacatgcagattcatattgcattggaggactagcataagaccacattcacttgtccattcgacacatttgcctacaccaagatgcttatg

SEQ ID NO: 12019 - DNA, 499 bp, Glycine max
  unsure at all n locations
ttaagcacctgagctgcagctgccttgcccttgatatattgagggacttatggtcactatgaatgacaaattccttgggataaaggtagtgttgccatgttttcaaagcccgtactaaggcatacaactccttatcataagttgaatagttaagggtaggaccacttaacttttcactaaaataagcaattggatggccttcttgcatcaacacagccccaatcccaacatttgaagcatcacactcaatttcaaaagatttttgaaagtttggcaacgcaagtatggggacattagttagcttttgcttaagaacattgaaagcttcttcttgtttctctccccatttgaaaccaacatttntcttgagcacttcattgagaggtgctgccaatgtgctaaaatccttcacaaatcgtctataanaacttgctaagccatgaaaactcctcacctcggtcacagacttangtgtatgccattcttgaatagccctaac

SEQ ID NO: 12020 - DNA, 268 bp, Glycine max
  unsure at all n locations
attcacgcgcataatatatccagacgctcgaaattgaacaacgaatgctctcgataaaataaagtggtcataatttgacacacggaagtccgattcaggcgcatactatatcgacgactctctanattgaacaacgaaagctcttgagaaattcaaacgtgccaaaccttgtcacacggtagtccgattcacgcgcatattatttcgagactctccatatgatatacggaagctctcgagaaattcaaatggtcatatacttatcaca

SEQ ID NO: 12021 - DNA, 442 bp, Glycine max
  unsure at all n locations
tattatannactaattaaaagactagaagccaacttatctggtatgtcaaaaactataaaanaaatgtactgacaattgaaataatatatacttggtgtacttaacatccaatttgtaataatttgttttaatgatctagcaatacatacttggattacaacaaaaaaaaatgtacacaaacaatcaaaatcaaactaatctaaatatgtaatcagtcgtcctgaataaagcagacctgttatttttgtttaatggttttggtatataggtatctgggagacacagatgaagctgttaaatcactgatcaaggccgtggatatactacggattactcatggcacagatacacctttcatgaaggacctcttgatgaagttggaagaagcccgtgccgaagcgtcttacagattgtcnctaaagagtatagaatgtcgaaata

SEQ ID NO: 12022 - DNA, 412 bp, Glycine max
  unsure at all n locations
agcttgtgtggtagcaaaaatacctaggttttttctcttagattcgagtgaagtctgacgatattccgaagactacttttaggacccgttatggtcactacgagtatctagtcatgccctttggtgtgactaatgctccaggtgtgtttatggactacatgaataaagtctttcacccttactttgatagttgtgtggtagtattcatagatgaatatttggtatattcaaagactagagaggaacatgaagagcacttgaggattatgctgcttacccttangaatcgacaacttttatgctagttgtccaagtgtgagttttggttagagaaagttagtttcctagggcatgtgatatctcaagggggtatagtngtagacccctctaagatagaaagtgttcttgagtg

SEQ ID NO: 12023 - DNA, 403 bp, Glycine max
actagatgccttggttaacctggtaatccaactggtcatgaatcaaaaatctacacctgtcgccagactccgtgggttatgctcctctgctgaccacctcataaacctttgcccttctgtgcagcaattgaacagcctgaatcttatgctgcaaataactacaatagacctcctcaacctcagcagcaaaatcagccacaacagaacaattatgacttctccagcaacatgtacaatccctggtggaggaatcatcccaaccttagatggtcgaatccttcacaacaacaacaacaacaacaacaaccttattttcagaatgttgctggcccaagcaaaccatatgttcctccaccaatccagcagcaacaacaacaacaacaacaacagccccagaaatagc

SEQ ID NO: 12024 - DNA, 386 bp, Glycine max
  unsure at all n locations
ggcagcaagcttgttaatccatcttctccaagagctccttgataaagaactntatgtgaatcctgagatttaacacatcaataggaaggatgaaactcaaagaaacagttattatcgcgagtgaatttactaacactaagtaaattcttggtaagggagggaactagcagtaaatttttaagggagagagtagtgtttggaaaatagggggacctaaacagatttgagcctatggaagagattcttgtacctgtgccattagccattatgatatgttcatttcctgcagcttgactgctctgaaggagaatatgtggatcattggttgcatggtgtgaagcacctgaatctggaaaccaagcctgtgaaatgttagcagtatgtgg

SEQ ID NO: 12025 - DNA, 415 bp, Glycine max
  unsure at all n locations
agcttcatgcttaagtatgcatggcaattcttcattattgttgntcaagacatacaagagagcttgtaacaaatcttctagacttggagtcatcacatgcaatcctcttgaacccttaccacccaccctgtcatcatgccgagactaacgaaggccatctagtatatccttcttaatgtattctgaacaaaattcaatggcttcttttgcaaagtacctctcaacaatagatgcttcacgacgatatacattatttgtataccctgttaagatctttatgtatcgctcaaccgggtacatccatctgagataaacaggaccacaccatttgatttctctgaccaaatgctcaatcaagtgaatcactgatgccagagaaagcagggtgaatatacatctccaactggcacaatat

SEQ ID NO: 12026 - DNA, 385 bp, Glycine max
  unsure at all n locations
ccgagcatgctcgacgtatgatatgcccgacatctgacatccgagcgataggttacgaccatttgaatctgtcgagagctttcgatgatcagctaccagcgtcccgacatattatgcgcccgagtcggacatccgtgtgaatacttatgaccctttgaatgtctggagaacatccgatgttcagtttctaacgtctctatatgtgatgcgcccgaatcagacatccgtgtgataagttctgaccatatgaatgtctcgagagcttccgatggttaattacgagcgtctatatatattataagcgtgaatccgacctgagtgtgaaaagttatgaccatttgagtntctcgagagctttcgtcgttcatttctagcgtctctatat

SEQ ID NO: 12027 - DNA, 213 bp, Glycine max
agcttatatatatcgaggcgctcgtaactgacttctgaagctctcgagaaatacaaatggtcgtgatcttctactaggatgtccgattgaggctcattacatatacagacgcgtcgatatgaacaacggactctcttgagataatcaaatggacatatacttacgcgctgacgtccgatacatgcgcatcacattgtcacaccctctgaattg

SEQ ID NO: 12028 - DNA, 352 bp, Glycine max
  unsure at all n locations
atcgtaaccgagcctctanttttcatcaacattaattagcaagcagtgagccttttaatactctctgtgttgcataataatcattatttaatattttaacataaattagaaaataataattcttttaatgtaatattaaatcattttttacttatatttcttatatattaaagataaataccaaaaactaaaaatgaattaatatgataataatgttaattttataaaattcgttattttctatttcttaatggatnttttttatctggacaaaataactaatacacgtgaagacaaagtgagttcatactgaatatgcttatgcaaaaagtgtttacactataacctacat

SEQ ID NO: 12029 - DNA, 463 bp, Glycine max
  unsure at all n locations
agcnttgtgatttcttcaagattatcttcactatattgcatnntgctgcttcaatttggcctgcagatttcacaaataatacatttactatgcttatttggtaggtttaaattttcatttttttaagggaggtataattttttattaaaagtcattgtatttttttagaattntattttatgtgaggtcaacttaagttttttattttacacaaatgtaatttattttattgccatattatccaattcattaatttgatttagcaacacactgaatttctataagtgttaatatttagcaacatattctctagcacatcttttatatcacacattntattatagattaaaatttattaaanactacaaaattaaaagaaaaataactcattaaataagaagtgagactaannaaaaatgtgattttaataaatttaatcatcttaaatatatattaaatgagt

SEQ ID NO: 12030 - DNA, 471 bp, Glycine max
  unsure at all n locations
agctntagctctnntcttattggataatgctttttgaggaagtctctnttcaagtggatcaaatcatttttaatgatgtatgtgtttcctcttctttagcttaataatgtccagtattttgactctaaataaaagatagagctaattattattatttattgttagaggaaattaaatcatttttattgttagagcttaataatgtccagtattagtttttgttatcctcctatatatgacaacttttgatctgactgttgttaaattaaaagattagattaaattacaatattatatacgtgctatatttattgaatcaaccacttgatacatgaaacatagttcttatgtcaggaatcaagatctagaaaaaagaaaacaaatgtacctaanaatatntctcattaactntnntttaataaatatngtattccttaaccacaaatcaataactactccatcatagattct

SEQ ID NO: 12031 - DNA, 413 bp, Glycine max
  unsure at all n locations
cgcacgtgattcactctattcttagtctgaatatttgtaagtttctgttcgaatatgggtttacatgtcttcactctgcagtacgaatgatgtgagaaatttgtaggacattttacttcaatcatttttcctttgactatcttctgaatgcagatcgcacggaatgggttttgagagaggttggggtgatactgctgaacgggtattggaaatgatgcatctgctattggatattcttcaggctcctgatccttctacactagagacttttcttgggagagtaccaatgcgtttcaatgatgctatattatctcctcatggctactttggacaagccaatgtcttgngttcgcctgacactggtgggcaagtatctcctttgtcatataccgataagactatttgagctggat

SEQ ID NO: 12032 - DNA, 276 bp, Glycine max
  unsure at all n locations
agcttctcgatatattatgcgcctgaatcatactctcgtttaaaagttatgaccatatgaatttctccactgtattccgngtgacaagntatgaccatttgaatttctcgatagcattcgttgtcaatttcgagcgtctcgatatattatgtgccagaatccgacttccgtgtgacaagatatgaccattngaatttgttgagagcatcctgtgctagaattcgagtatctcgatatattatgcgcctgaatcggacatccgtgtgacaagttatg

SEQ ID NO: 12033 - DNA, 375 bp, Glycine max
  unsure at all n locations
agcttgcttctacactntcatgtntcactactctgtaaatatatccatgatccttctcacgtggtcaaattagacgacgttcaagtaaaggagaacttgacatatgaaacattgcctttgaggatcaaggatagatggaaaaaaacttaagagggaaaaagatttcgttgatcaaggtggtctggggaggtgcagcangagacgaagcaacatgggaactaaagagtcaaatgcgagaaaccaatccagccttgtttgagtcaagtaaattttggggatgaaatttgtaaaagggtgggagagttgtaacgccctgaaatttcgataactgaaaatagatgcctgatgtatntattgtattagttaattacttaa

SEQ ID NO: 12034 - DNA, 466 bp, Glycine max
  unsure at all n locations
agcttgtaggccttggatcttcttcatcaatgatatcatctgcttcttgaagatcatggaagtggaatggagaaggaagaaagatgattggagacgccacttcaaggagaagataagtgtagaagctcaccaccataggaagccatagataagagcttgaaggttgcagaagatgaattgatggagagggagacaaggagcatgaaattttgtgcctcacaagaggtttgaactttgagggttaattctcaaatgatcaaagttgaaaaaatgcacacacatgacctctatttatagcgtaagtgtcaaacaaaattagaggggaatttgaatttctattcaaatttcacttgaatntgaaatttgaattgtggagccaaaatttcactaattatgattagtgaattntagctatggttcaacccactaatccaagatcaagtccaagattctccactaagtgtgc

SEQ ID NO: 12035 - DNA, 355 bp, Glycine max
  unsure at all n locations
agcttctgttttcaattacgagcgtctcgatattcttcggngctctatccgacatccgagttaaaagttattgtcgtttgatttttctaagagcttcccttttcaattacgagcgtctcgatatattacgggacacaatcggacacccgtgttaaaagttatggtcgttggaatttgctcagagcttctattttcaattacgagcgtctcgatatattacggtactcaatcggacatccgagtaaaaaggttttgtccgttgaattctctcagagcttctgttttcaatcacgagcgttctgatatattacgggactcaatcggacatccgagtaaaagtttggtcgttgaattt

SEQ ID NO: 12036 - DNA, 343 bp, Glycine max
  unsure at all n locations
tcacttaaaaacccnncctagtagtctttgttagatgagtatattagctgggcaacttcacttaaaaaatctaatatagtataatagcctatatcacatctttgtgaatcgtctattctggtacgcatcacctcttctgtcaggcatttgtggagaggggctgatgaaaagtcccacatcaccaatggtctcaatttttggggtgcaacttatatatttgttgggcaacatttcacttaatgccaattggttttaggatgaaatctagcagnagatatgtttatagtgattcattgagtaatcatgccaaattgcattttattatatctcatgttttcttcac

SEQ ID NO: 12037 - DNA, 347 bp, Glycine max
tccattttcaattaccacgtctcgatatattacgggacccaattggacatgcgagcacaaagttattgtcgtttgacttttctcagagcttttattctgaatttcgagcgtctcgatatactacgggacacaatcggacatccgagtaaaaagttattgtcgtttgattttgctcagagcttctgttctgaatttccagggtgtcgatataccacttgccaccatcggacatccgagtaaaaagttattgtcgtttgaatttgctcagagcttttgttttcacatttgagcgtctcgatatataacgagactcaatcggacatccgagtaaaaagttattatcgttt

SEQ ID NO: 12038 - DNA, 378 bp, Glycine max
agcttgccctagttaagattattaattttattcattaaatgacagtacatttgtttcatgttttgctgttttacaaaaagagctaaaactactctgttgcacttcgtctacatatacctcaacattactatgcttaataaaatttggtgatcttagtaaaacataaagcactttctcaaatattaagatcaaataacattcagcgtatccaagagatgcagccaaaataaataatgagaacattaaaaaactgaattacctcacttaaaatgagaacccctttcttggatgcttgacacgcaacaaattcatagctgacaagattcattccatcccttaaagatgtaacaagtgctacatctaaattcgatgtgagtc

SEQ ID NO: 12039 - DNA, 312 bp, Glycine max
ctttccattgctaaatacaaagcatttgtaaccaaaaacatgaacgtgtgaaattttgggtgttctaccattaaacagctcatatggagttttctttaaaatgggtcttattaaagcccttttcatgatatagcatgcagtgttaacagcttcagcccaaaagtattttggaagaagagtgtcatttaataaggctctagcaattttttccttacaacaactccattttgatgaggggttctaggcgcagaaaagttatgttcaatgccatgcttatcacagaataattcagaatctctattttcaaattca

SEQ ID NO: 12040 - DNA, 343 bp, Glycine max
  unsure at all n locations
ttctatgacatgcnnnntttataggcgattcataaaagacatttcaaaaattgccaaaccacttagcaatttactaaacaaggatgttgtgttagcatttgatgaagactgtttggaagcttttaatattctcaagaccaggctagtatctgcccctgtgattatagcactagattgggggcaagagttcgaattgatatgtgatgttagtgactatgttgtaggtgccgtacttgggcagagaaagggcagagttttccatgccatctattatgccagcaaagtcttgaatgatgcacaaatcaattatgctaccaccgagaaagaaatgttaggaattgtc

SEQ ID NO: 12041 - DNA, 330 bp, Glycine max
acattccatcaactatcctgttgatgttggcaagagggtatgcggctttggggcatgccctattcagatcagtgtagtcagtgcacattcgtcatttgccattcatctttttgaccatgacaacattgacgagccaggtagaaaacctgacatctatgataaagtgtgcatgaaggagcttttcgacttcttctttgaaggctttacgtcgttcttctcccatcttctttttcttctgtgatataagtttggcttgggggaagatagcaagtttgtggtagattatgccgaggtggattcccgacatgtcaaatggctgccaagcaaata

SEQ ID NO: 12042 - DNA, 339 bp, Glycine max
cttctatagaaagggagtactaatttctctttattgcctcatctctcaatgagctagtgaagaagaatgtggcatttacttggggtgaaagataagagcaagcctttgctttgctcaaagaaaagcccaccaaggaacttgttctagctcttcccgacttttctaaaacttttgaaatgtgatgcctctggagtgggagttgcagttgtattgttacaaggtgggcacgctattgcttattttagtgcaaaacttcatggtgccaccctcaactaccccacctatgataaaaagctttatgtcttaataagatacctcaaaacttgggatcattacctt

SEQ ID NO: 12043 - DNA, 345 bp, Glycine max
taatactgatggtacgcttttggttatttctgggacaagcaagatttggcggaatcataagggatggtcttgggaattggcacacaagttttatgggatcctgtggctttacaacttcagttcatgcagagttactcgccatctatcatggtttgaagatagctagagacaaaggaattgaaagattgatctgcaaatcatattcgaagcttgattaggacctaatcactggagaaatcaacttgtttcatcaatatttccctaccatcatgctgatccatttgttgaagcacatggattgggaggtgacctttgagcacgtgtaccgtgaagggaacaagtgtg

SEQ ID NO: 12044 - DNA, 395 bp, Glycine max
agctgactagtgaaggaagttctatatatttttcggcgccaagatggtcatatctgtttcctgtgagacaaagttatgagctgacagatagcgctcaacttccgatgcggtagcataatgggaaattcccgcctggcctggttgcatgcctagctcagcgtaatggctaccatctcaagggtagttcacgaaagggattaccttgtgcctatgcagtacatgcgagcaaggacgcgctagcgacggtgtagggatcattggatatagctactatcagcatagcatactgtaagaaggattattttatatcgcaccatatgataattttttacagcagagtatagcatctatccgggcctattttaaattgtggaaggtgtattgtgatataactc

SEQ ID NO: 12045 - DNA, 329 bp, Glycine max
cacaatgagtactttggaatatggatatatttggtgtcaccaactcttggagctgtggctggtacttgagcctataatttcattaggtacacgaataagccagcgcatgaaatcaccaagagtgcctctttcctcaaaggtggtgaagctgagtgattcaacagcaaatgcaagaatgtggttttttcttcttcattttcttatcttcaatttcaccatgcattagggttaaaatttaagaaagaattactggtttagtgtgctgaataaccctataatatagatagaggaaatgaaaaatacagtttctcctaatccatgcaacaatc

SEQ ID NO: 12046 - DNA, 342 bp, Glycine max
  unsure at all n locations
tctatagaangnnagtcctaatttctcttctattgcatcacctctcaatgagctggtgaagaagaatgtggcatttacctggggtgaaaaacaagagcaagcctttgctttgctcaaagaaaagcttactaaggcacctgttctagctcttcctgacttttctaaaacttttgagctagaatgtgatgcctctggagtgggagttggagctgtattgttacaaggtgggcaccctattgcttattttagtgaaaaacttcatagtgccaccctcaactaccccacctatgataaagagctttatgccttaataagagccctccaaacttgggaacattacct

SEQ ID NO: 12047 - DNA, 301 bp, Glycine max
gagacgctctaaattgatctttggaagctctcgagaaattccaatggtcataagttttgacgcggaggtcagattcaggcgcatagtatatcgagatgttcgaaattgaacaatggaagctctcgagaaattcaaatggtcataacttttcactcggaggtccgattcaattgcataatatatcgaaactctcgaaattgaacaacggaagctctcgagaaattcaaatggtcataacttttaactcggatgtcagattcaggcgcataatatatcgagatgctcgaaattgaacaacgga

SEQ ID NO: 12048 - DNA, 370 bp, Glycine max
agctttccctcttttatcatatacccctcagccaaatagaatccatcttgggcctttttcccacaactctcataaatgggagagaaatgttcatctaaagcatacaagtccctaatattatcaaatcctaaaattcgagctcctagggagcaaaacaatgtgtgtctcctagagagggcatcagctaccacatttgtttttccctttttgtatttgataacatatggaaattgctctaggtactctacccattttgcatgcctcttgtttaacttgctttgccctctaatgtacttaagtgatcgatgatcactatgaatgacaaattccttggaaacaaagtaatgttcccaagtttggagggctctta

SEQ ID NO: 12049 - DNA, 359 bp, Glycine max
agctttacacttatgggggttatgtttcttcggctattggaagttgcattttcacctttgccagagcatttcttgctgtgatagctggatacaagacagccactgttctcctcaataaaatgcatttgtgcatttttcaagcaccgatatcattatttgatgccaccccaagtggtcgaatcctttatagagcatgtcataatattgcataatccttcattggactaatttgaagagagaactcctttacctgatatatggcttagcgcattgttttttagaagacgacttctctctttttatttcctcatgaccataatgaatgtaattggtggctaaaacctagatttactttatct

SEQ ID NO: 12050 - DNA, 378 bp, Glycine max
agcttgtaatcgattacaacttgtgtgttattgattaccagacatgaaaattcaaatttcaaatctgaagagtcacaattctttagaaactaactgtgtaatcgattacaacaattatgtgatcgattactagtaaggaattttcaaaaataactcccaatagtcacaactattcaaaaagtttttgaatggttatcaaaggcctataaataggtgacttgggacatgaaattttttaagagagtttttctgaacaaattgtcttatcctctcaatacaaaattgtcttataactctcaaaatattccttggccaaaatacttgcaaattcaacaaggaatcttgattgatcttcaattgtaatatccttctcttaag

SEQ ID NO: 12051 - DNA, 306 bp, Glycine max
ttaggctccaagaggattgggctagagctactgaagaaggccctagggttctcatgaacctgagggtagatttctgagcccatgggccaatgttgggtccaattatgtttgtacatattagactaggatgtcattatatttggtctttgtatttaacactccataatgtaagtagggtaccttaaaaatataggatttttcaactctggtattttagggcacctagactaggtattgtataaggggtagattagaatttcacatgcactaagtgaatatttgatgtgagtgctgggaaataaaaat

SEQ ID NO: 12052 - DNA, 374 bp, Glycine max
  unsure at all n locations
agcttcaagaaaaagatggtctcagcaaattccttatttccagaagggaattctatcaatagacctccaatctttaatggagagggttaccactactggaaaacccgaatgcaaatttttattgaggcaatagatctaaatatctgggaagccatagaaatagggccttatatacccaccacagtagaaagagtttcaatagatggtagttcatcaagtgaaagcataactatagaaaaacctatagatagatggtctgaagaggatagaaaacgagtacaatacaacttaaaagccaaaaacataataacatctgccctgngaatggatgaatatttcagggtttcaaattgtaagagtgctaacgaaatgtg

SEQ ID NO: 12053 - DNA, 346 bp, Glycine max
tctaaactttgttcattatgaagctctgatatttcttgttagacaagtggcctcagatatcttaagaagggggggttgaattaagatattcgaaactttttcccctaattaaaaatctatcttactttttacttaagttatgaattcccttaatgacaatcttcttaaatattaattcaaatgaagcaacttgaatatgaatataaagcaataataaataaaggagattaagggaagagaaaatgcaaactcagttttatactggttcggccacacccttgtgcctacgtccagtccccaagcaacccgcttgagagttccactaacttgtaaattccttttacaa

SEQ ID NO: 12054 - DNA, 331 bp, Glycine max
  unsure at all n locations
agaggcatttgaggagctgaggaggaggcttaccaccttttccatcatgcaaccattagaatgggagcttccatgtgaatatatgtgagaagcctccaaatatgcactcggggaagttctcgacaagagagttgatagactatcacatgtcattggttacgcctcaccactctggatgcaaaccangtcaactacaccacccccgaaaaagagattgtagctattatttttgcattagataaattcagatctgtatttgttcgctcctatattactatttgtactgaccatgcaggcttgagatacttgttgaagaaacctaatgctaaac

SEQ ID NO: 12055 - DNA, 326 bp, Glycine max
tcaaccccatatgtgtattttttagtgttgaggcgcatgttatacttgcgaatctctctgaacacctattccaagactgtgatgtgttgggtcatgctataagacttgacagccatgtcatcaacatagacctcgatatttcatcctattttttgtttggagacccggtccatgagcctttggtacgtggcccctgtgttcttcaatccaaagggcataaccatgtagcagaaattgatgtcttcaattatgaaggcaattttttcctcgtcgggagggtgcatcctgatctggttataccctgagtaggcatctaggaaacttaa

SEQ ID NO: 12056 - DNA, 339 bp, Glycine max
  unsure at all n locations
tgtttacccnataagaatttgctttctatttagctgttcatagcaccactaattgttctccttttgaagttgtttatggttttaacccactaactcctcttgatcttttgcctatgcctaatgtttctgtttttaagcataaagaaggtcaagcaaaggcggactatgtgaagaagcttcatgagagagtcaaagatcaaattgagaggaaaaataaaagctatgctaaacaagccaacaaagggagaaagaaggttgtcttctaacccggagattgggtttgggtgcacatgagaaaagaaaggtttccggaacaaaggaaatcaaagcttcaaccaa

SEQ ID NO: 12057 - DNA, 238 bp, Glycine max
agcttctagatgagttttgtttgtttttctgacatcctgcgaaaagttataatcatttgaatttctccagcgctcccgttgcttaatatcgagcgtctagatattttatgtactcgaatggtacatcggggcgaagcgttatgacccttcgattttgtcgagagcttccgccattcaatttccaacggccaaatgaagtatgtcctccaaccaaacatttgagggaaatgatatgacc

SEQ ID NO: 12058 - DNA, 338 bp, Glycine max
  unsure at all n locations
tgctnnnnagggaagctccttatatcttccacactttttggggtgggccattcttggatggccttgattttctcagggtccacttggaccccatttctaccaactacaaaccctaagaaaactatattatctacacaaaaggtacacttctctatatttgtagagagggtgtttttcctaaggactgaaagaacttgcctgagatgtccttagtgatcatctaggctcctactatacactaaaatatcatcaaaataaacaactacaaatctacctatgaaatcccttaagacatgatgcataagcctcataaaggtgtttggtgcattagtgagccc

SEQ ID NO: 12059 - DNA, 348 bp, Glycine max
tattatcggcgacaacgggagtttttccttgattcaattcaatgctttctttattcttctctaattgttaaatattattactagctgttgttgagaatagggattagtgtttaatttctgattatatatggcattattggttctgttgctctctggtttattttatttgtgacccaaaatcattgtaggtgtggggaagagttgtctacttttgaggttttctgatggctcattcacaacaagttttatcaccaccattgggttagtatattatgtgtagacaccttttttttatcgcttgtgaaaaatgctgcagctgtttcttgtcttgtttcaagattcttacat

SEQ ID NO: 12060 - DNA, 340 bp, Glycine max
tagacctcacgccagctgtccctccgttctcagcgtcatcataaactcatgaagcgatacttcggcccatttcccattctggaacgcattggcagcgttgcttaccgtttgcaactacctgaagggtctcgtatccaccccgtcttccattgttccttactacgccctcatcacagacctcttgacctcccaacctcttcccttccggcggatacttcctccccacaccctatacttgagccactagccatccttgactctcgaatggacttctctgtggaccccccaactcgtttcgttcttgttcaatgggttggtcttcctccggaagactccacgt

SEQ ID NO: 12061 - DNA, 322 bp, Glycine max
gagggtgtttcatatgttctcaagactggactaatacatttgctgcgcaagtttcatggtcttgcaggtgaagatcctcttaagcatcttaaggagttccatattgtttgttccaccatgaagccccctgatgtccaggaagatcatatctttctaaaggcttttcctcattctctggagggagtggcaaaagattggctatactaccttgctcccaggtccatttttagctgggatgaccttaagagggtgttcttggagaaattcttccctgcatctaggaccactgccatcagaaaagacatttcaagcatcaggcaac

SEQ ID NO: 12062 - DNA, 348 bp, Glycine max
tcggacaactaattttacgaacataaacttatatgaattaattattatttctatactaacaagacacatatatttttttagtaatttatcacttaacaattttataatttagtgaacttaacttgaaataattaggggaagagtgatatattaaaaaaaatttccataaaacccgtcagtaagtaaaaatatgctaaaatatctcatattaattggtagatataatcaatgacttgagtaaattacaatataaagcgtgaataatcgaaatgttaactccaaggatcattacaatataaattatgaattatatgtcaacactttaaaaacttaattttattattaaaa

SEQ ID NO: 12063 - DNA, 360 bp, Glycine max
  unsure at all n locations
acactatagaaactcagcttgcctctgtnttggctaggcaggtatcacaaaagaaaaggaagatgggagaagaacgactcaaagctttcagagaagaagtagaaaaactccttaatgctaacttcatcagaaaagttagatactccacatggctcgccaatgacaaatggcgaatgtgcacaaactatactgatctgaatagggtgtgccccaaagatgcaatcctctgcccaacattgacatgctagccgatggagcgtctgggctctaggtgctaagcttcttagacacttgttctggatacaactagattagaatgcacgctagagacgaggagaaaatgagattcatcactgaaga

SEQ ID NO: 12064 - DNA, 344 bp, Glycine max
tggaacatattttcgaattttaggcccccttattgatttagtcaaaatatctgctggctgatcattggaattaatgaattcagtgacaatctctttagacagtagcttctcccgaataaagtgacagtcaatctctatgtgcttggttctctcatggaagactggatttgaagcaatatgaagagcagcctgattatcacaatacaacttcatttgcatcactttgcagaatttcaactcttcaagaatttgtttgacccacataagttcacatgtagctacatccatagatctatattcaacctctgcactagatctagcaacaacagtttgcttcttacttt

SEQ ID NO: 12065 - DNA, 381 bp, Glycine max
agcttttatcatgcaacttacccatgtaaaactccaattcttattaaaaagcaacataaaaaacatataaagaattacatctaagttttatctttatcattattagtagcacaaaacttagatgcagtttcataaatattttgtgtggttctttgatcaaaattagagctttaccctaataacttgtaacttataatgacttttaatgtaaatctttattacaaggaagtgaaactcaaactactattggagaacaacaagttaatcatgatgatgtaaaaatttgtatgtgtatgattatttttttgatattgatatgaatgatttatcagttttattaataactaatatttataagaaaacttaactgatttaccttta

SEQ ID NO: 12066 - DNA, 385 bp, Glycine max
agcttgtgacttgcataaacttcttttcagtggatgacaatagaagctaaaagttaccaagcatacatcaaactgtttcaaaaagtccaactatcattttattcttaataaatgggagttaccagtataaaataaactatggctgcaaaattgtacttcaaaaaaatataaaatataacctgatcaaagacatcaatatagacttgttgcagagaatgagaactgcagaactgattaatctcatgatgaatcttgtcatatatccatgtcttatcataatgtacaccatagttgagcaatgtctcaaagacaaattccttatggagttgattcacaacctaaaagaagaatatgcatcactgctatgaaattattgaagatgtga

SEQ ID NO: 12067 - DNA, 338 bp, Glycine max
  unsure at all n locations
tggnnnnnttgtgttactcttctcttgtatcaagaaattcatattatttattattctttttctcctctaccaattgcatcaaaagaattttttcggttttttttctcaatccttgagcaacatattaataccaagagagaccatttatatgtgtgattttaagagaaagaattgtctactcttatataagaattatgcgcaatttgaaatttatttattgatctatctttatatattatttttattacctgtaattataatcatctttaaccaattnaatatattattatactaacatttttttcaaaataaaaattacaatctattatattaaaata

SEQ ID NO: 12068 - DNA, 341 bp, Glycine max
tggccaaagggttttggtcctgtatatatagtaagtatgcaacatattgccttgtaaattgtaattaatacagtaattaataatatatgacatagcttatcctttccatttaactatgtgaatgtgattttttcgaagggcacattaccagatggacaagatattgcagtcaaaaggctttcacaaacatctacacaaggattaacagaatttaagaatgaagttatattttgttctaaacttcaacatcgaaatcttgttaaagttcttggttgttgcatcaatgagcaggagaaattactcatctatgagtacatgccgaacaaaagcctagacttctt

SEQ ID NO: 12069 - DNA, 367 bp, Glycine max
agcttgtaacatgggatgcttatcatttttactaatcttatatatttcaaatgaaatagtgatcatcaagacaaagggaaaaattattgagagcgaagaaaaagatctagagctacctttgtttgattttgagacaatagcatttgctactagtgacttctcaagtgacaacatgcttgggcaaggtggttttggccctgtatacaaagtacgtatgcaactagtttctttgcaattaaaagctaagaacaaacaaagaacatagcctgaccttttctgtttgtcatttaccttctttgtaaatgtgaatttttaagggcacgttaccagactgacataatattgcagtcaaaggcttttatatcat

SEQ ID NO: 12070 - DNA, 264 bp, Glycine max
tgtaggcctaggatcttcttcatctatggattcctttgcttcttggaagatgaatggcagcggaatggagaaggaagagagagaggagacgccacttcaaggagaagatgagtttagaaaaagctcaccaccataggaggtcatggataagagcctggaggaagaagatgaatgaagggagagggagagaagagcaggaaattttgtgctctaaaagagctctaaaatctgaagtttaatattcaaatgatcaaagttgaaaaa

SEQ ID NO: 12071 - DNA, 266 bp, Glycine max
tctgaaagctggaatcatttatcctatctccgacagccaatgggtgagtcccgtccaggtagtcccgaagaacaccggcctcacagttgtaaaaaatgagaaggaggagctgattcctactcgggtgcacaacagttggagagtctgcattgactataggaagttgaaccaggttaccaaaaaggaccattttcccctacctttcattgaccagatgcttgaacgtctggccggtaaatcacactactggtttcttgatggctttt

SEQ ID NO: 12072 - DNA, 255 bp, Glycine max
catcataggagctgtgcacgtcaaacagagggggattccaactcttataggtgactttgagcagctgtttatggaggagtccgagtcaattgctgattatttttctccagtattggccgtactcaatcaacttaaaataaatggtgaagatgttgatgaggtgaccgtcatggaccatatacttctaactttaaatccccgtattgacttccttgttgccagcattgaacactactgggattttgagaccatgac

SEQ ID NO: 12073 - DNA, 266 bp, Glycine max
ttgagcaaattcaaacgacaataactttttactccgatgtccgattgtgtcccttagtatatcgagactctcgtaattgaaaacagaagctcgtagcaaattcaaacgacaataactttttactcagatgtccgattatgtcccgtagtttatccataccctcgtaattgaaaacagaagctcgtagtaaattcaaacgacaacaacttttaactcagatgtccgattgagtgctctaatatatcgagacgctcgaaattgaaaat

SEQ ID NO: 12074 - DNA, 268 bp, Glycine max
agcttcacgatatactacgggacacaatcggacatccgagtaaaaagttattgtcattttaattttcttagagcttccgttttaactacgagcggctcgatatattacgggactgaatcagacatccgaggaaaacgtttttgtcgttagaatttgctcagagcttttgttttcaatatcaagcgtctcgttatattacgggacttaattgtacatctgagttaaaatttaatggggtttgaatttgctacgaccttctctttgcaat

SEQ ID NO: 12075 - DNA, 265 bp, Glycine max
agcttaaacattctttttcgagcgtctcgatatattacgagtctcaatcagacatccgagtaaaaagttatggtcgtttgaattggctcagagcttcaacattcaatttcgagcgtctcgatatatttcgggactcaatcagacatccgagtaaaaagttgttgtcgtttgaattcactcagaggttcaacattcaattttgagcgtctcgatatatgacgggacttaatcagacatccgagtaaaaagttattgccgtttgaat

SEQ ID NO: 12076 - DNA, 259 bp, Glycine max
agctttgcatatcctttgataaaccttcgatagtgaccagtgaggcctaagaaacctcttagctgcttgatattgagtggtgtaggccactctagaactgcatgcgccttagtagcatccatagcaactccttcacctgaaactatatgtcccaagtactctatctccaatacaccaaaagagcatttatacaacttagcaaacaaaacatttctttcaatactttgaatacaacctttatatggcataagtgttcatg

SEQ ID NO: 12077 - DNA, 259 bp, Glycine max
agcttgaaccctcgttgtagagcaaacaaaccgaaacacattcaccacgatggcgaccaaagcgatggaggtggtgaagggtctggacgtgaaacggtacatgggtcggtggtacgagattgcgtgtttcccgtcgaggtttcagcccagtgacggcgtcaacaccagagccacctacgctctcagagatgacggcaccgtcaacgttctcaatgagacttggagtggcggcaaaagaagcttcattgagggcactgct

SEQ ID NO: 12078 - DNA, 266 bp, Glycine max
agcttggacttcctgtgttttgggaacctctccttcctcaggtgtacccaaacccaatcacctggttcaagcacgactttctttctgcttttgttggcttgccttgcatagctcgcatttttcttttcaatttgaaccttcacttgctcatgcaacttcttcacatactcagctttagcctgtgcatccttatgcttaaacatagcaatgttaggcataggcaacaaatcaagaggagtcaaaggattaaatccatacactatctc

SEQ ID NO: 12079 - DNA, 263 bp, Glycine max
agcttggtgacctttcacactatatccactcaaattcccataagctggaaagtcattaatggtgcaaaatatcatcgcatgcaacctaaaagtctcaccctgatttgcatcatacacatcaaccccgtctacctaaaacttacgcatgtcttcaatcaaaggagtaaggtacatatcaatatcgtttcctggctgtcttggacgtgatatcatcatagacaacataatgtatttgcgcttcatgcataacgaaggaggaaggt

SEQ ID NO: 12080 - DNA, 268 bp, Glycine max
tcttcacatagtccgcctttgcttgactcttctttatgcttaaaaacagaaacattaggcataggcaaaagatcaagaggagttagtgggttaaaaccataaacaacttcaaaaggagaacaattagtggtgctatgaacagctctattgtaagcaaattcaacatggggtaaacaagcttcccaagtttttaagttcttcctcaaaactgtcctaagcaaagttcccaaagtcctattaacaacttccgtttgcccatcggtttgtg

SEQ ID NO: 12081 - DNA, 260 bp, Glycine max
agctttatgagagagtttagatcaaattgagaggaaaaataaaagctatgctaaacaagccaacaaagggagaaagaaggttgtcttcgaacccggagattgggtttgggtgcacatgagaaaagaaaggttttccggaacaaaggaaatcaaagcttcaaccaaggggagatggaccatttcaagtgcttgaaagaatcaatgacaatgtttacaaagttgagctgcccggtgagtataatgttagttccaccttcaat

SEQ ID NO: 12082 - DNA, 265 bp, Glycine max
tttgcaagagttatgactactataggaggcatgtctctctcttttcatttctttcattatttttcttctttcttcctctcttattttctttctttcatcttgacttatttcttccactattttttccctttttcttttctctggtgtttttctttccataacttgagggaactcaactcatctaagattctagataaagggtctttatgactagtacccttgccattaacactagatgaatgatgactcatgttggttcctaagt

SEQ ID NO: 12083 - DNA, 262 bp, Glycine max
ttgagccaattaagacgacaatatctttttactcggatgactgattgagtcccgtcatatatcgagacgctcgaaattgaatgttgatgctctgagcaaattcaaacgacaataatattttactcggatgtttgattgagtcccgtaatatatcgagacgctcgaaattgaatgttgatgctctgagcaaattcaaacgacaataactttttactcggatgtctgattcagtcccgtcacatattgagatgctcgaaattga

SEQ ID NO: 12084 - DNA, 263 bp, Glycine max
agcttagtaaagcttggcactaacaatctccccctttggcaaattttgtctaaaacatacttagacacttcctgagcaggtacgagcagttatgcaagtgggatcagcaactttcattatcagagtaatcaagcacagcggaaattctgcaagttgcaagtcgtttccaggatgtcaagacatctcacatgacatcagctttctgcttctgctccccctgtctccatgctcttactgcagcatcttctatcagctactagtct

SEQ ID NO: 12085 - DNA, 264 bp, Glycine max
tgaatcggacatccgtgtgaaaagttgtgaccatttgaatttctcaagagcttcggttgttcaatttctagactctcgacatattatgcgcccgaatcggacatccgtgtaaaaagttatgaccatttgaatttctcgagagttttcgatgtttaattttgagcgtctcgatatagtataagcttgaatcggacctcagtgtgaaaagttttgaccatttaaatttcacgagagcttccgttgttcaattccgagcctctcgac

SEQ ID NO: 12086 - DNA, 259 bp, Glycine max
agcttcttcttctttgccacaatgcgctgcttctcagcgagaagagccattctcttagcggtcttggcatagggattgagcttcaacatcgcattgaggttggtgagagggttcttcttgagaggagctctcttaacatctttcttaatgggcctgaccacggactggacctcatcggagttaatgatgcgggccaagtccgagttaaccattctgggcctaggaagcaggtagccctttttcttctcagaagccttat

SEQ ID NO: 12087 - DNA, 260 bp, Glycine max
agctttgcaacagatgccactctactcaaagtttttgaaagatatgtggacaaggaagcacaaatacgttcaccaggagaatattgttgtggaaggcaactgtagtgctatgatacagaagatccttccaccaaaacacaaggacactagaagtgtgacttttccttgttcaataggtgaagtcacggtgggaaagactctcattgacttgggagccagtatcaacttaatgccactctccatgtgtagaaggttgggag

SEQ ID NO: 12088 - DNA, 497 bp, Glycine max
  unsure at all n locations
tctagcttacaaagctcattggatactggaacagctaaaggcttaaccaaaggaaaaatattcatcttaccttcaacgttgggtgggagcccacgttatatggatcaactttactttgatggtatgacaatatgcagntatgttggtttcccaaatctttttattactctaaccttgaatccaaattggcttgaaattggtagattacttttacctttgaatctcaaatcaacagacagaccagacattgtatcacgaattttcagattgaaatatgaacaaatgctctcagacttaacaaagggtcaattactgggaaaagtggttgcatgtaagttgactataatttttattcttaaacacaaatataagttgatcatttggccacttttctttattctataatgcagatattaatntcgaanatattacaattngactgatactttttacagatatgaaatacaaaatatacttaccatcgtaacattatcatt

SEQ ID NO: 12089 - DNA, 348 bp, Glycine max
gagcttagtcataaagcccttttctaataattgacctaaggtgagtagattacttttcatacctggaacaaagagtacatcagtgatgcaagactgacctccatcctttgttttgataaggaccttcccaattccttcagcagtcaagattctatcatcagcaaatttgacttggctcttcacagattgatcaaggatgaaaaaccactctcttattcctgtcatatgaatggagcaacctgtgtctatggaccaacaattatcacttgcccatgtaatttgagtagttaccattagcactacctattaagtgacatcatcttcttcctgagccaattttgcatcatc

SEQ ID NO: 12090 - DNA, 341 bp, Glycine max
agcttattgaaagcatgccttttgaagctgatgacgtaatttggagaactttgctcactaattgcaagatgcaagggaatgtagaagttgcagaaaaggcattcaattctttattgcaggtggaccctaaatattcttctgcttacgttcctttagcaaacgtatatgctatcagagggatgtggggtgaggtcacaaaaataacaagtttaatgaagaactgtaagttaaataaggagccaggttgtatctggattgaggtcacacatgaagtacactcattttttgttggagacaacgcacatccaaaatctgaagagatttatgagcaaactcatttg

SEQ ID NO: 12091 - DNA, 367 bp, Glycine max
tctggtgggacatcttgacttgctatccaatctgacattcaccactgattctgccttcctctatcttcagagtgggaatgcctctaacagcacttttgtcacggattatcttcatgcctcttaagagcagatgtccaaacctttgatgccatattctgacttcatcttctttggaggatagacatgtggaggagtagctgcgttcttggggtgtccataagtaacaattgtcctttgatctgctgcccttcattagaacttcactcttctcatttgtcaccacgcattctgactttgtgaaagtgacattgaatccttcatcacacaactgactgatgctgatcaagtttgcagtcagtcccttcac

SEQ ID NO: 12092 - DNA, 354 bp, Glycine max
agctttcatttattttaatttatgttaccattttaagagaaaataaattaccataagaatttgcattaatgttattcacgtttaaaaatagtaatgtagctacatttgggcattaagtataataattgtaaattgattatgattacataatagatgaatatttcaatcaaatcaatttattttgaaaatcttacatgcaattttttttatttcaaaacaaattattttataaaattccagaaagccatgtgacaatgtgctttctttaaaaatattttcgtatgcatatagtatagagtatagattgacagctctatccttattggcttcttcctttatatatttataacttat

SEQ ID NO: 12093 - DNA, 349 bp, Glycine max
agcttatagaatatataattagagaacaatgacaattgaagaatcgattcatgtttcctttgatgagtctaatgctatttctccaagaaaggatattttagataatattgcagaatcttcagaacaaatgcatattcatggagaagattctaaaggaaaaggagaaggaagcaatgaagatcctccagtggaagtcaaagcaaataatgatattccaagagagtggaaaccttcaagagatcatccccttgacaacattattggtgatatctcaaaaggggtaacaactagacactctctcaaagatttatgtaataacatggcttttgtatctatgattgaacctaaa

SEQ ID NO: 12094 - DNA, 346 bp, Glycine max
agcttcaacattcaatttcttgcgtctcgatatatgacgggactcaaccagacatccgagtaaaaagttaatttcgtttgaattggctcacagcttcaacattcaattttgagggtctcgatatattgcgggactcaatcagacatccgagtaaaacgttattgtcgtttgaattggctcagagcttcaacattcaatttcgagcgtcccgatatatgatgggactcaatcagacatccgagtaaaatgttattgtcgtttgaattggctcagagctttaacattcaatttcgagggtctcgatatattacgggactcaatcagacatccgagcaaaaacttattg

SEQ ID NO: 12095 - DNA, 345 bp, Glycine max
ttctagattgcaatcctcttctcgttgcggatgaagtggtatctaatgtcaatatgtttagttctctcatcatggacttaatccttggctagacaaattgcactcgaaaaatgatagctttatcttttggaaactttaggttgctattaagactttttagccaaatgccttcctttgctacttctaccagagccatgtatttttcctctatagtggacaaggcaactgtaggtggaagtgtagccttccaattgacaagagaattaccaattataaatgcataccctgtcacaaatcatcttgcatctagatttgtagcgtagttagaatctaaatattcaaaaa

SEQ ID NO: 12096 - DNA, 314 bp, Glycine max
ttccctctttgaacaaatacccctccgccaattagaatccatcttgggcttttttcccacaactttcataaatgagagagaaatgttcatctaaagcttacaagtccctaatattatcaaatcctaaaatttgagctcctagggagcaaaaccatgtgtgtctcatagagagggcatcaactaccacatttgtttttccctttttgtatttgataacatatggaaatttctctaggtactctacccatttttcatgccttttgtttaacttgctttgccctctaatgtacttaagtgaatgatgatcactatga

SEQ ID NO: 12097 - DNA, 350 bp, Glycine max
gcaagcttgtgtcacgattcactgtgacagtcaaagagtcattcacttagaaaatcaccaaatgtaccatgagaggacagagcacatagatgtgaaactacacttcatcatagatgtgattgaatctgagaaggtgaatgtggagaagggttcaaccaaagaaaacctggctgatatgttcacaaagtccctctctagtgtcaagttcaagcactgcctgtacttgatcaatttggaagatgcctaaagcagattggtagaagtgcagccctgaatcacaaggtaaacacttgctgatttggagtcaaggtggagatttgtggtgtgtgactaaaacatacattggcaca

SEQ ID NO: 12098 - DNA, 345 bp, Glycine max
agcttgtagggttaaagtcttacgattgtcacgtgctcatgcaacaattgttagccgtggctatacgagacatcttgccaaacaaagtcaggttaacgataactcgcctgtgctttttcttccatgctatatgtaacaaagtcattgatccagtcatgtttgatgagttggaaaatgaggctgtaattatactgtgctagttggagatgtattttccccctgctttctttgacatcataattcacttgattgtgcatctggtcagagaaatcaaatgttgtggtcctgtttatctacgatggatgtacccggctgagcgatacatgaagatcttaaaagggtata

SEQ ID NO: 12099 - DNA, 342 bp, Glycine max
agcttatgctgcaaacatcttcaatagacctcctcaacctcaacaacaaaatcaaccacaacagaacaattatgacctctccagcaacaggtacaatctcaggtggaggaatcatcccaaccttagatggtcgaatccttcacaacaacagcagcaacaacaacaacaaccttatttttagaatgctgttggcccaagcagaccatacattcctccaccaatccagcagcaacaacaacaacagcaacaacccagaaacaacaaacagttgaggctcctccacaaccttcccttgaagaacttgtgaggcaaatgactatgcaaaacatgcagtttcaacaa

SEQ ID NO: 12100 - DNA, 354 bp, Glycine max
tcttagtctcatctgatgacaatgaattcgtggctactttatgcactcctctaatgacaatagcatcacttatggcactaaattgttgggtccttcataaaaatattggaggagaagctgctcataaatctggtggtgagggcaactagcacatagttttttaaatctctcccagtattcatataggctttctccactgagttgcccaatgcctaaaatatcctttctgatggtcgtggtcctagaagcagggaaattttttttctgagaatactctcttgaggtcatcccagctcgtgatggaccttggagcaaggtaatatagccagttctttgccactccctctaaagaat

SEQ ID NO: 12101 - DNA, 389 bp, Glycine max
tcatgcttaactatgtatggcaaaacttcattatctgttgttcaagacatacaagtgagcttgtaacaaatcttctacacttggagtgatcacatgcagtcctcttgaacccttaccacccactctgtcatcatgctgagactcaggaagcccaacaggtttagctttctctaattattctgaacaaaattcaatggcttcttctacaatgtacctttcaacaatagatgcatctggatgatatagattctttgtatacccttttaagatcttcatgtatcgcttaaccgggtacatccaccgtagataaacaggaccagaacatttgatttctcttgccagatgccccatcaagggaatcatgatggtcaaaaaagtgggggaaaaaa

SEQ ID NO: 12102 - DNA, 366 bp, Glycine max
aagcttgtccaatcgagtaggagaaatgccttcatattcatatctgcatattgatcaattgcaaggtacatgaaggacacgattatgagcaagagaaatagtgctcaaattatcaccaaaaattcgaggaatagtgtgagaaactttcagcttaaacaacaaggtctgaatttgttggacctctaaagtagctggagcaaggttccagtacttagcttcagtgcttgaacgagcaacaacagtttgctttttggaccaccaagaaaccatgctgggtcctaaaaagaaaaaagcattgaatgtagaccccctgtcatttggatccgaggcctaatctacatcacaataggcttgaaaaataaaaag

SEQ ID NO: 12103 - DNA, 347 bp, Glycine max
agcttctcgtcagtggtactttaagtttcatgggataatttcttcatttggttttgatgaaaaccccatggatcaatgcatataccacaaggttagtgggagtaaaatatgctttcttgttttatatgtagatgatattttacttgcagccaatgatcggggtttgctacatgaggtgaaacaatttctctctaagaattttgacatgaaggatatgggtgatgcatcttatgtcatcggcattaagattcatagagatagatctcgaggtattttgggtctatcacaggaaacctatattaacaaaattctagagagatttcggatgaaagattgttcaccaagtg

SEQ ID NO: 12104 - DNA, 330 bp, Glycine max
tgttggttataacaaactttaaccaactaactactaactaataaaattaactaccatatgaattaactaatttcaacacttcctcttaattcatattggtacaagacattactcctagcctatctctcatttccttaaatttgatacacttcaaaggctttgtcaacatgtttgctagttgatcttaagatctacaaaactcaagctcaaacttctccttattcacatgatctctcaaaaagtgaaacttggtctcaatatgtttacttctcccatgtgtcactgggtgttttgccaagtcaatagttaacctattattaattaacaatc

SEQ ID NO: 12105 - DNA, 365 bp, Glycine max
  unsure at all n locations
ttaagtcaccgcggctgcagcttgatgcacattnggtaggttaatgaaacaacgaaatgatgtgctccatgagaggtttgatcaaatggagaatagagatcataatgaagaagaaaggaggagaagagggaatgatggtgttcctagacaaaaccgaattgatggtataaaactcaacattcctctctttaaaggaaagaatgatccggaggcctacttggagtggaagatgaaaatagagcatgttttctcatgcaacaactataaggaggaccaaaaggtgaagcttgccaccatggagttttccaactatgctcttgtgtggtggaacaagctacaaaaggagagagcaagaaatgaagagc

SEQ ID NO: 12106 - DNA, 354 bp, Glycine max
tgtcccacaagcctctcctacatttggtccatgaaaggcaaaagatagtggtctttcctcatggcttctttgagcttgaggtaatcgatgcatattctccagccagtgaaagtccttgttgggattaggtcattcttttcatcctgaatgattttcgtgccccctttctttggtaccacctggattgggcttacccaagtactatcagaaatggggtagataatccaagcctctaaaagcttgagcacctcttccttcattgatgggttaaggcttctcttgggctgtctgactggtttgtaatcttccgccatcattatggtgggcatattagaaaacggggtgaatcttttg

SEQ ID NO: 12107 - DNA, 344 bp, Glycine max
tgacactataaaactaagcttgtaggtaaagtctcacgattgcacgtgttgatgcatcaattgttagctgtggctatacgagacatcttgccaaacaaagtcaagttatccataacttgcctgtgctttttcttccatgccatatgtaacaaagtcgttgatcctgtcaagtttgatgacttggaaaatgaggtcgtaattatactgtgccaactggagatgtattttccccctgctttctttgacatcatgattcactagattgcgcatttggtgagagaaatcacatgttgaggacttcgttatttgcggaggatgtacccggttgagcgatacatgaaaat

SEQ ID NO: 12108 - DNA, 387 bp, Glycine max
ttaatcgattaccatgagcatataatcgattaccaatgttttaaaacgttagatttcaaatttcaagagtcacaacttgtgataaaacattttcaaatcatttcaaacttgtgtaatcgattacacaatacttgtaatcgattaccagtgtttctaaacgttggttttcaaatttaaacatgaagagtcacatctgttgatgtgtaattgattacactacaatggtaatcgattaccagtgacttattttgaaaaaataaattaccaaaagtcacaattcttaaagtgacttgtttctgaagattttttcaaaagtcacaacctttaagtgactagttttcaaaagagtcacaacttttagagtgactaattttcaaaagagtcaca

SEQ ID NO: 12109 - DNA, 349 bp, Glycine max
agcttctgtattcaatttcgttcatctcaatatattacgggacttaatcggacatccgagttaaaagttattgttgtttgcatttgctacgagcttccgttttcaattacgagcgtctcgatatattacgggactcaatccaacctccgagttaaaagttattgtcgtttgaatttgctacgagcttccgttttcaatttctagtgtattgatatattacgggacttgatcgaacattcgagttaaaagttattggcatttgcatttactcacagctttcgttttcaatgacgagtgtttcgatatattacgggactcatccgagttgaaagttagtgtcatttgaatt

SEQ ID NO: 12110 - DNA, 404 bp, Glycine max
  unsure at all n locations
ttctgccttctgggtatgacaccataatctatggctttttctctctctctcttaatcttgaacctctatctttntgtttcaagcacaagcaacaatttgtgttatcaaggctttgaagtggtggaagaagaccctaaagcctaatatgattgagatccattcagcacaagaactggtccattctttggtcaacgctggcgattcattgcttgtggttgatttctattcacctggttgtggaggctgcaaagcccttcatcctaaggtatgtttgtttttgttgtttggtgttggaaaagtcatattcttataattttctattactaacaaaatgcttcatttttttttctaggtntttcgttttttgttacaatatttgacttgctttcatcatgcgcgactag

SEQ ID NO: 12111 - DNA, 386 bp, Glycine max
  unsure at all n locations
tcattgaattggttgtgttattgaagaagatgcttcctgaacaaaacacattgcccanaaatcactacgaggcgaagaagattttatgtcctgtgggaatggagtaccaaaagatccatgcatgcactaatgattgcatattatacagaaatcagtttgcagaaatgcataagtgccccacatgtggggtatcatggtacaaagtccaggataacaaatttgttgatggtgcaagcaaaagcaatagtcatttagcaaaggtgtgctggtatcttcttataataccaaggtttaagcgattgtttactaatggacatgaagcaaaaaaccttacatggcatgtagatggcagaaaaagtgatgaattgctctgacatccagctgat

SEQ ID NO: 12112 - DNA, 364 bp, Glycine max
cgcttattctggtgcgatatatacttcaccaatgggtcaaagcggcttcttattctaatgtcacgagaagggtgggggttagattcataaagatggagctgatgtgtctatacgaactccctaggaagatcattactgacaatggcaccgatttgaacaacaaaatgatgcacgatatgtgcgaagatttcaagatccagcatcataactccaccccttatcgaccaaagatgaatgggtctatataagctttcaatcagaatattaagaagattgttcagaagataacggtgtcatacaaagattggcatgagatgatgcctttcaccttgcacggatatagaacctcggtgcgaacttctac

SEQ ID NO: 12113 - DNA, 379 bp, Glycine max
tctgtatgcttaactatgtatggcaaaactccattactgttgctcaagacatacaagtgagcttgtaacacatcttctacacttggagtgatcacctgcagtcctcttgaacccttaccaccgactgtgtcatcatgccgagactcatgaaacccaccaggtttagccttctctaagtattctgaacaaaattcaatggcttcttttgcaatgtacctttcatcaatagatgcttgtggacgatatagattctttgtatacccttttaaaatcttcatgtatcgctcaaccgggtacatacaccggagataaacaggaccacaacatttgatttctctgaccagatgcataatcaagtgaatcatgatgcaaacaaagt

SEQ ID NO: 12114 - DNA, 404 bp, Glycine max
  unsure at all n locations
gtgatctatccaccaccgccaccaccatcattntagttnttctcttattttaatattactagtattttgatttccagccgtgtatttggctatattattatgacatttgaacaatatagtatttctttatttgcatggtgtgtttgaaaaattatgaattatgttatatgactatgtgatttttctatatatttgatctagtcatgtttcttgcttcatgattggtttatattttttccatgattgttgtgtgaatgattagttgtatttgtatgtttcatacttgttacgcactttggctttttattggtgccaaagggggagagaaataggggttaaatcaaggtaatgaatntaatttcaagtgaagcatatattcaaaaacaaagggggagaatggaaat

SEQ ID NO: 12115 - DNA, 401 bp, Glycine max
cgcacatatctcctttgatgtttaagaaaattacacatgtctttcttgtatttttaatacctacacaaactccctaaatgtcgtctcaacatttggcagtaacaagtcatatacattaacaattttgattaaaaaatattaaaatatgtttttcttccttataaatatgaaaatgtttgaaattaatcattacaaaactttttgtctatatttcattctcgcaaaatttaaatgttatttttatgtttgagactaagttcaagttactaaaatttacgtgtatgttattatagaatgtgtcaattttttcaacttttttgcatcatttatatgtataaaccatgcagaaacattgtttttgcattatataattgatgtaaaaaagtaaaaaaaaaacatga

SEQ ID NO: 12116 - DNA, 352 bp, Glycine max
  unsure at all n locations
tcttacaaagcatacggctttctggatgtagatgatgatatctatacagatggatcttatatatctatatatctatagatagatatatagatatagatatatagatatagatcatacaatgaagtaccgcacgagtgggtatataggaatccaaatctgccgaatcactcatgttatgatcttctacatcctaggtcttcccgttccttcatctggcttatgttcttcatgtagcattcagactgaatgactctatgaaattacgtcgctacttccacatggtacgggtaacgtaggagacatctctanttttcccgggggaatccttagaattacacaagctagcttcaat

SEQ ID NO: 12117 - DNA, 400 bp, Glycine max
  unsure at all n locations
tactcagctttactttgtttgctctgtttggggtttccaagcgttagagagaaggggaagagattgtagcctccatttcactgtcaacgtgcgagactaatttctctctgcaaaacaattatttcataaatcccaacggcagtgatgtgcgaaaaatgggttttgaaggtggtgtccaaatttcacaatggtcccacggttgacgagtccgggatcgtagttttactgagatagattttaccacggtggtatccaaacatgattgattcaaaaggtgaactatcaaatccattaattactatgtacaataaaagagtttcaggagtttgacaagtttcacaagataaactntgtaaaggcaaatatcataagaatgagagttgaattgtgattntcaaaa

SEQ ID NO: 12118 - DNA, 362 bp, Glycine max
  unsure at all n locations
tgtacaagattattgcaaaggtcttggcaaatatactaggaaggtcttgagcaaggtggtggatgatagacaattggcttttttgggtgaaaggaataatatatttgatgggatcttggttgcaaatgaggttgttcatgaagctaaggttgagaaggaacatgtttcattttcaaggctgatttcaagaaagcatgtgactcggtaagataggaatttctaacctatatgctacataggctaggagtttgtagtaaatggattagatggatgtggtgtttcctacaatcttcatctacctctatccttgtaaacgggatcccaatggaagaattntatgctaaaaaaggacttcgtcaaga

SEQ ID NO: 12119 - DNA, 387 bp, Glycine max
  unsure at all n locations
tcactcatgtgtccaagtcnttgatgccacagggttgaattattgacaacctcagtaattgttatcatatcctcatctgcaattatgtaaagagatcattgcttctttccatgagccacaacgagattgccttttgttaccttccaagctccatctccaaaagcggtgtaatgccccccatcatccaactgccctatagatattagatttctctttaaggcaagaatatgtctgacattatgcaatgtccatagggatccactggaagtcttgatgtcaatatcacctcttccgacaatgtcaagagattttccatctacaaggtaaacttttccaaatcttctagaaatatagttagacaataaatcttacaggactatccaagct

SEQ ID NO: 12120 - DNA, 380 bp, Glycine max
tgcaagcttaaccatggaacggtatgagataattaaagatattgggtcaggaaactttggtgtggcaaagctggtcaaggaaaaatggagtggtgaattatatgctatcaagttcattgagagaggcttcaaggttctattttcaaattccatgtatcttttcttttgtcatatcttaatcttgtcttgtgtacatatgttttttagattgtcctttgttaatggggttctattgggttttgcagattgatgaacacgtgcaaagagagattataaatcataggtccttgaagcatcccaatatcattagatttaaagaggtacggaattggagacgtttttggtttcaatgagtataaactcaaagtgtaattatttgc

SEQ ID NO: 12121 - DNA, 368 bp, Glycine max
tgtgctattccaagttcattaatcatacctttaatccagattgcttccttcacaccttcagctagggccatgtattatgtttcagttgttgaaagagcaacaactgattgttgatttgctttccaactgattgatgtaccaaacaaagtaaacacatatcctgttaaggacttccttgtgtctacatttcttgcaaaatctgcatctgcatagcctgtgactactgcttcatgtgttgtcttcttgtactttaaaccagctttcaaagatccatttagataccttagtgtccacttcacagcttcccaatgtgcgctgccaggatctcccatgaatttgcttataatacttataacatgagccaaatc

SEQ ID NO: 12122 - DNA, 380 bp, Glycine max
  unsure at all n locations
aacagttctctaaccattccaatccattcaaatcatacaactgctcattcaaatcattctcacactcatttcataccaaacaatcaattgcatatcattntcaatcaattcactgttcaaacacactttttgtacaagcaaacaactcaaagtgccatggataagagcttggaggaagaaggagatgaatgaagggagagggagagaagagcacggaattttgtgctctaagagagctctgaaatctgaagtttaatttttaaatgatcaaagttgaaaaaatgcacacacatggcttctatgtatagcctaagtgtcacacaaaattggagggaagattgaatttctattcaaatttttcttgaaattgaaattgaatt

SEQ ID NO: 12123 - DNA, 370 bp, Glycine max
  unsure at all n locations
tttgaattatcaatatccaaacttgcttctacacccataattcttgcacctaattggaaatatggttttgagctcatatgttacgcaagtgattatgtagttggtgttgtcttgggacaaaaaaaagaagacaaaatttttcatgctatacattatgctagtaaagtccttaatgagcatcaagtgaattatgcaacaaccaaaaatgaattactagctataatctatgcattggaaaaatttagatcttatctcatttgctctaaagtggttgtttatacagattatgcaactattaagtatcttctatctaagcccgattccaaaccaaggcttattaggtggatacttatgttgtangaatttgatc

SEQ ID NO: 12124 - DNA, 390 bp, Glycine max
  unsure at all n locations
gagaagctttcttgagaagattcctagagaagctagagcttagctacacacacccctttaatagctaagctcatctcttccttgagatgataagatagagcttagctacacacacaccctataataggtaagctctcccccatgccaaaatacataaaaatacaaaaaagtccctactacaaagactactcaaaatgccttgaaatataagactaaaaccatatactactagaatgaccaaaatacaaggtccaaaagaaggaaaaacctattctaatatttacaaagaagagtggacccaatcttggcccatgggatcagaaatctaccttgaggttcatgagaaccctanggccttctntaacagctctagcctaatcctctttgagg

SEQ ID NO: 12125 - DNA, 398 bp, Glycine max
ttatcggccttgtatggtctgaaacaagctcccatagcttggaacaagagaatagacacctttctcttgcaaattggattcatgaaatgcactactgaatatggtgtgtatgttaaaggagaaagtctttcagatatcctcatagtgtgtttatatgtggatgatttactgataacaggaaaggattgcagtgctatctcgacattcaagcaagagatgaagtctaagttcgaaatgtcagatcttggagaattatcatattttctgggcatatagttcaagaggacaaaggctggaatttttatgcaccaaagcaaatacacaattgatgtcctaaagaggtttcagatgcttgactgcaactcagttttaactcttgttgaaactagtgctgtgct

SEQ ID NO: 12126 - DNA, 381 bp, Glycine max
  unsure at all n locations
agctcttgctacaacctttntctccccctttggcaacatcaaaaagccaaagaactcggaaatcaacacagttataacaatggagtagcaagatataagtatcagagtattaaatacaataagccaaactcataatcaataaaataatcaaaccagaattcaaataacataaaatgtcaacaaccacaaaatatccaagactgaaatttaaaaacacaagataaataagcaaaatacttagcataataatgtaaattctaagaaactaaaaaccaaaatacacggcttataaaagataaataagcagaatctaaaatctaagaagacggaggaggtggtggaagatcgaaactctgacgaatgtatccgacatcctcttca

SEQ ID NO: 12127 - DNA, 333 bp, Glycine max
tgttgatgcggccttatcttgagatacacccattctccctccttaatctttgaaggtaggtgacgattattggcatactttgtcatgtgattctgagctttgtttagatgaaacttcaactgattaagtggttcatctctttccataagatcataagtcactgcctcaactaggacttcccctggaatgaaccttgccaaagatggggtgttagaccataaactatttcaaatggggtacacctagcagctccctggtgacatgtattataccagtattctgacatgggataaactcagtccaatgattccacaaaacctaacaacaaaacat

SEQ ID NO: 12128 - DNA, 294 bp, Glycine max
tgtgacactactcaagcctgactcttatgagaacttcatctggtcagattttttaaaaaggaacccttaccattgccatcaaatgcaccaactcagctaaggaacaaaaagcaaggttttacatcatgaggaggtgtgttgccatgttgggttggtggcacaagcatggggattcatgaaagaagtgcacagatcttgagcttagtttttattgaattatgaccttttattggcctactttgaatactataaattcgattgtaattacaagttgactaacgtgagttataagat

SEQ ID NO: 12129 - DNA, 419 bp, Glycine max
  unsure at all n locations
agcttaaacattcaaatntgagcgtctcgttatattacaggactcaatcagacatccgagtaaaaagttattgttctttgaattggctcagaggttcaacattcaattntgagcgtctcgatatattacgggactcaatcagacatccgagtaaaaagttattgtcgtttgaattggctcagagcttcaacattcnaattcgagcgtctcaatatattacgggactcaatcagacatccgagtaaaaagttattgtcgtttgaattggctcagaggttcaacattcaatttcgagcgtctcgatatattacgggactgaaccagacatccgagntaaaagttattgtcgtttgaattggctcacagcttcaacattcaatttcgagccgctcgatatattttcggactcaatcagacat

SEQ ID NO: 12130 - DNA, 502 bp, Glycine max
  unsure at all n locations
gatcctcttagtcacctgcggcatgcaagcttanggaaattactgaggaggccaaaagttntgcaattgngaacagggctcttgctgcactatntgtacatacaccagcgggtgagctgcagcgtcaaattagatcctggcttgcagagagttntgagtttctatctttaacgggagaagatgcatcaggggggtcaactggtcagttggaacttctttcaactgcaattatggatggttggatggcgggacttggtgctgctcttcctccccacactgatgcccttggccagctattatttgaatattcaaaacgtgtctatacttctcaattacaacacttgaaggtatgcctctagttagttctgtgttgcatgacttataaatgcatacctcacaagttctcgatggaagccttgtttactttaggactttgttgagagatgacactcatacatttcattgcattcaaatattacaatagtctaaacataataccgag

SEQ ID NO: 12131 - DNA, 271 bp, Glycine max
tttgagaaattcaaatggtcatttcttttcactcgaaggtctgatcaggcgcatcagatatagagacgctcgaaattgatcaacggaagctctcgagatattcaaatggtcataacttttagctcggaggtcggatttaggcacataatatatcgagacgcccgaaattgaacaacagaagctcttgagaaattcaaatggtcattacttttcactcggaggtccgattcaggcgcatcacctatagagacgctcaaaattgaacaacgaa

SEQ ID NO: 12132 - DNA, 451 bp, Glycine max
  unsure at all n locations
agcttgagantgaacaactgatagctctcgatatattagaaggtctaccttttgacacgaagtcagattcacgcacataatatatcgagacgctcgaaattaaataacggaagctgtcgagaaattcaaatgctcattacttttcactcggaggtccgagtcaggcgcataatatatcgagacgctcgaaattgaacaacggaagctctcgagaaattcaaatggtcataacttttgacacggaggtcagcttcacgcgcataatatattgagacgctcgatattgaacaacagaagctctcgagaaattcaaatggtcataacttttgacccgaaagtcagattcaggcgcataatatatcgagacgcttgaattgagcaacggaagctctcgagaaattcatatagccataacttttcactcggatgtcagagtcaagcgcataatata

SEQ ID NO: 12133 - DNA, 420 bp, Glycine max
  unsure at all n locations
agctnttgcaagctggaatcatttatcctatctccgacagccaatgggtgagtcccatccaggtagtcccgaagaanaccggcctcaccgtgataaaaaatgagaaggatgagcttattcctactcgagtgcagaacagttggagagtatgcattgactataggaggctgaactatgttaccaaaaaggaccattttccactgccattcattgaccagatgcttgaacgcctggcaggtaaatctcactactgtttccttgatggtttttctggttatatgcaaatcactattgctcctgaggatcagganaagaccacattcacctgccccttcggcacttttgcttataggaggatgcctttcggcctgtgcaatagccctggtaccttcctgcggtgcatgattagtatttttagtg

SEQ ID NO: 12134 - DNA, 458 bp, Glycine max
  unsure at all n locations
agcttcatgatgaatgaagagtgattcaaagatgttntgatgataacaaagatgataacaaaagatgatgacaaaggtgatgacaaaaagctcanaggtcaatcaaagaatgagttcaagatattcaagataaaatcaagaacacatcaagattcaagaggaaagttaatttcaagaatcaagattcaagagatcaagattcaagactcatgactcaagaatcaagagaaggcttaatcaagataagtctganaaggtttatcaaaaattgagtggcacatggatttttctcanaacatgtttacgaaagaagttttactctctggttatcgattaccagagtggtgtaatcgattatcagtagcaaaatggatttgataaagttctcatatgagattacaacgtttcaattgatttcaaaaagctgtnatcgactacaatattttggtaatcgatta

SEQ ID NO: 12135 - DNA, 384 bp, Glycine max
  unsure at all n locations
agcttcttagtttcggattatgcaactgagtttgtagctacctcatgcactcctctaatgactataacatcatttctggcgctaaactgctgggagttggaaaccatcttctcaattaaatttctggcttcagcaggagtcatgtctccaagggctccaccactggaagcatctatcatacttctctccatattattgagtccttcataaaaatattggagaagctactccgaaatctaatggtgagggcaactggcacatagttnttttaaatctctcccagtattcatacaggctctctccactgagttgtctaatacctgagatatcctttctgatggctgtggtcctagaagcagggaaaattttttctaagaatagtct

SEQ ID NO: 12136 - DNA, 279 bp, Glycine max
ttgtttttatacattcagtgtcatattaaaatatttttatatttgtcaaaaggaatgcttgcaatatattctgttttgtaaagaagtaaggaaatttattaaattgtgagtgaaccaaacatttcgtaaaattcacgttaattatatctaatattaaaaaataagttagaaatatattaatatttttcttgtcaaagtatagtagatcttctcggtgctagtgattttgattaatataatttaacaatctatccaaaatatgaatatgtctatatatta

SEQ ID NO: 12137 - DNA, 433 bp, Glycine max
  unsure at all n locations
agcttcacagcggagaggagataacacctgcacttttgaaggcaattaaagattccagaattgccatcactgtgctctctgaagactntgcttcttcctcattntgcttagatgaacttacatccattgttcactgcgcccagtataatgggatgatgattataccagtgttttataaggtgtatccttctgatgtcagacaccagaagggtacttatggagaagcattggctaagcataagataagatttccagaanagttccagaattgggagatggctctgcgtcaagttgctgacttgtctggctntcatttcanatacaggtacccaatgataccaatctttttatgttttaatttttattggaattaattaagttactcgtctcacaanttaatgttcaaatattaataacagagatgaatatgagt

SEQ ID NO: 12138 - DNA, 282 bp, Glycine max
tctggtgggacatcttgacttgctttccaatttgacatgcaccacagattctgccttcttctattttcagattaggaatgcctctaacagcacctttgtcaatgattttcttcatacctcttaagtgcagatgtccaaatctttgatgccatattttgacttcatcttctttggagaatagacatgtggaggaggaactggtttcttgaggcgtccataggtagcaattgtcctttgatctgctgcccttcattagaacttcactcttctcatttgtcacca

SEQ ID NO: 12139 - DNA, 392 bp, Glycine max
  unsure at all n locations
acaatataccttctcaacctcagcagcaaaatcaaccacagcagaacaattatgacctctctagcaacagatataaccctggatggaggaatcaccctaacctcagatggtccagccctcagcaacaacaacagcagcctgctccttccttccaaaatgctgctggcccaagcagaccatacattcctccaccaatccaacaacagcaacaaccccagaaacagacaacagttgaggcccctccacaaccttccctcgaagaacttgtgaggcatatgactatgcaaaacatgcagtntcagcaagagaccagagcctncattcagagcttaaccaatcaaatgggacaattggctacccaattgaatcaacaacagtcccagaattctgac

SEQ ID NO: 12140 - DNA, 446 bp, Glycine max
  unsure at all n locations
agcttaggctgcanacatttataatagaccctctcagcagcataaccaacaacagcaaaataattatgatctttcaagcaacagatacaatccaggttagagaaatcatccaaatctgggatgggcaagtcctccacaacaacaacagcctgttcctcctttccagaatgttgttggtccaagcaagccatatgttcctcctccaatacagcaacaacaacaacaacagtcacaacaaagacaacaagcaactaaggatcctccttaaccttccttagaagagttagtgagacaaatgaccatccagaatatgcnaatttagcaagagacaagagcctctattcagagtttgacaaatcagatggggcagatggctactcacttgaaccaagctcagtcccaaattctgacaaattgcttcaccactgtacataatcnaaaaatgt

SEQ ID NO: 12141 - DNA, 279 bp, Glycine max
tgccgccacggagttttccgactatgctcttgtgtggtggaacaagctacaaaaggagagagcaagaaatgaagagccaatggttgatacatggacagagatgaaaaagatcatgaggaagcggtatgtgccggctagttactcaagggacttgaaattcaagctccaaaaactaacccaaggcaacaagggggttgaggagtatttcaaggaaatggatgtgctcatgattcaagcaaatattgaagaagatgaggaggtaactatggctcgatttct

SEQ ID NO: 12142 - DNA, 396 bp, Glycine max
  unsure at all n locations
agcttctcgatatattatgcaccttaatcggacttccgtttgataagttatgaccatntgaatntctcgagagcttccattgttcaatttcgagcgtctcaatatattatgcgcctgaagcggagcttcgtgtgacaagttatgaccatttgaatatctcgagagattccgttgttcaatttcgagcgtctcaatatattatgcgcctgaatcggacatccgtgtgacaagttatgaccacttgaatntctcgagagcttctattgttcaatttcaagcttctcgatatattatgcgcctgaatcggacttccatgtgataaggtatgaccatntgaattctcgagagcttgcggtgttcaattcgagccgctccatatattatgcgcctgaatcg

SEQ ID NO: 12143 - DNA, 272 bp, Glycine max
tccattgttcaatttcgagtgtctcgatatattatgcgcctgaatcggacctccgaatgaaaagttatgaccatttgaatttctcgagagctacctttgttcaatttcgtgcgtctcgatatattttgcgcctgaatcggacctccgagtgaaaagttatgaccatttgaatttctcgagagcttccgatgttcaatttcgagcgtcttgatatactatgcgactgaatctaacctccgtgtgaaaagttatgaccattttaatttctcaag

SEQ ID NO: 12144 - DNA, 409 bp, Glycine max
  unsure at all n locations
ctgcagactgagaaagagtttgtatggagcttgtatgaaaattcctatgaanagcattgggagattgaagaccggattacagaaatgcagataagggtttgcagctggcaagatgagtttggcattaatacaatgatagaagataacgatgcacgagctttgatggctgcaacagctttatattcttgcaaagagacccttgctaagtngcaagagacacaggcacaatcatctgaagaggctaaagaatcctaccaaagggttaaggaagctcgtgacatgtttgaaaccattagaggccaacttcattctaaacttttatagtcagaagaccaaggaactgaaccataaagcatagaggaagaagacatgtctagcttggaagagaaaggcatgagcctgatgtgga

SEQ ID NO: 12145 - DNA, 267 bp, Glycine max
cgccacggagttttccgactatgctcttgtgtggtggaacaagctacaaaaggagagagcaagaaatgaagagccaatggttgatacatggacggagatgaaaaagatcatgaggaagcggtatgttccggctagttactcaagggacttgaaattcaagctccaaaaactaacccaaggcaacaagggggttgaggagtatttcaaggaaatggatgtgctcatgattcaagcaaatattgaagaagatgaggaggtaactatggc

SEQ ID NO: 12146 - DNA, 271 bp, Glycine max
ttgaacaacggaagctctcgagaaatttgaatggtcataacatttcactcggatgttcgatccggggacataatttatcgagacgctcgaaattgaacaaccgaagctcttcgacaaattagaatgtgcgtaacttttcacgcgaatgttcgattcggggacataactcatctagacgctcgaaattgaacaacggaagctctcgagaaatttgaatggtcataagttttcacacggatgtccgattcggaacatatttatctagacatcg

SEQ ID NO: 12147 - DNA, 276 bp, Glycine max
tgtgtagcgataattctagctgggaaaagattttcgcacctattacccagatgtcggtgcagcttgataatagtttcctcctcttccttggtgtagtttcctcttttgaggtttggccttaggtaattcagccaccttagtctgcaactctttccacatctcgcaagacctaacaaattaataacaacaacaacaaagtaaaaccaattacaatggattcatatatgatttagctataagctgtgcatgtatataattaaatattgaatatatggt

SEQ ID NO: 12148 - DNA, 406 bp, Glycine max
  unsure at all n locations
tgttagctataagaaatatggaaaccaatatttacaatataataagattgttagtttaaggtaatgattgaaattaaattaacaaatatatttaattttttagttataaaaaatatcgaaaccaaaatttaaaatctaagataggataagattgttagtttaaaataatgattgaaataaaatttaaaaatatattagatttggtagttataataaatattgaaaccaaaatttaagatttaaaatttatttattaatccatatgttntaattattttaaattattcttttagaaatattttataaattatatttctagaaattttttacttcttttaatttatctatagaaatctatacattagaagatttgatatttaatngaatgatgtatttagatgtttat

SEQ ID NO: 12149 - DNA, 353 bp, Glycine max
  unsure at all n locations
aaaattgtaggaaaactattgccactaaaacgttnttctattctaagaatatcataaacaagaacatatgccatatatattcattaactgaagaaagtataaatatacataccgtatctgcaaccacatgatcaagagatggaacataaccatgcaatccatcactgcctccatgaccttaaaaataaaacaaatcattccagatccatcacaaaatggtaagtacggaatggaaaaagaaatcttaaactacctatccagtccattgcatagacaccaaagttgcatgatgttaatagccttgcanagtccgcatatcttccactgaaaaatgagtgccaagtcagagaagt

SEQ ID NO: 12150 - DNA, 383 bp, Glycine max
agcttgtactttaccttaggagccacatagttcggactcccacaagttgtcccacaagttgtccgaaggatactcgccccctatcagaatattcaaaagtttgaagcagtttggtattattatatcttacatgagtcgaagtcatatataaaagctaatttggtgacaagctcacctgctcaggaaatgcactcaaaccataatcggaaatctttatatttcctagtgaatcaagtaaaagattttcaggctgcacaaggcaaaaagaaaaaaagaaaattagaagatatcacaataaggacaacaaacaacttctcagatctcactcaatgcaaacctttaaatctcagtgataaactcccttactgtggcaataatctaca

SEQ ID NO: 12151 - DNA, 314 bp, Glycine max
ttctcgagagcttccgttgttcaatttcgagtgcctgtatattgatgcgcctgaatcggacatccgagtgaaaagttatgaccatttgaatttctcgagagcttcctatgtttaatttcgagcgtgtcgatatattatacgcctgaatcgaacctcagtgtaaaaagttatgaccatttgaatttctttagagcatccgttgttcattttcgagcgtctctatatgtgatgcaccttaatcggacctccgcgtgaaaagttaggaccatttgaatttctcgagagcttccgttgttcaatttcgagcgtctcga

SEQ ID NO: 12152 - DNA, 420 bp, Glycine max
  unsure at all n locations
agctntactatgcagagaatatccaaggaaaataccttcatctgacttagcatcaaattttcctaagttatcttttccattattcaatacaaaacatttacaaccaaagatatgaagatgtgagatgtttggttttctgccattgaacaattcatatggagttttctttaaaatgggtcttattaaagccctatttaaaatgtagcacgcagtgttaacggcttcagcccaaaagtattttggaagaggagtatcatttaataaagttctagcaatctcttccaaagatctatttttcctttccacaacaccattttgttgaggggttcttggtgcagaaaagttatgctcaatcccatgcttatcacanaataattcaaattcttttatttcaaactcacccncatgatcactcctaat

SEQ ID NO: 12153 - DNA, 460 bp, Glycine max
  unsure at all n locations
gcttaagaatcattttcggatcaagagaaagattgttggacagttggatctctcattgtggattattgagttgaccttgcggatttaattattattaatatgaatatgccctacctttacattttaattttaattcatggaattgattgtaaggtgtcgaccaatttattttttatatgtttgtttataggtaagaattgaagatatataccaagaaatttacaattcacatacatattcaatcaattgagttagattccttattgatattgaccaatttattaatacttttatataaatgtcattattgccttaaaaaatgtcattattganacaatnggtactttttttttcgagcacgaaacaattggtacttgtttatatccacatgttgtaaatgtctatttccaaatatgtgatatagttggacagtatgtatttaagtatatttttaatttct

SEQ ID NO: 12154 - DNA, 431 bp, Glycine max
  unsure at all n locations
agcctgacaggttcaggtgcatgtgctgctactggnggaggcacttgaatttggttgccatacctcaaggtgatggcactcacattttttggattctgcacagtttgtgaaggcaaattgtcagaattttgggactgagcttggttcaactgagtatccatctgccctatctgatttgtcagactctgaatggaggctcttatctcttgcgtgaaatgcatattctggatggtcatatgcctcactaactcttctaaggaaggttgaggaagagccatagttgcttgttgctttgttgcgactactgttgttgctgctactggataggaggaagaacattggcttacttggaccancaacattctgaaaaggagggacaggctgttgttgtgtggaggactttccatctacatttgatgattcttcacctg

SEQ ID NO: 12155 - DNA, 281 bp, Glycine max
tgtagagcatcgatcgggtgtgggtgtaggggggcacgtaaaactgcacctgctagtcaggggagcatccgttgctacccatcacgtggcggaggtgcttgccggcgtggagggcctgagccaccatgccttgcattgttgattgaatgttatggttgggtgtggtggtgcacgtcaccgtgtcttggtgtccctgcaacttcatgtgttgcattaatattcttctctttggaagcacaccaaccatatgttctcttttctttgcattcattttctttcac

SEQ ID NO: 12156 - DNA, 368 bp, Glycine max
  unsure at all n locations
agcttgttgcaattcttctaggctgggagtcataacatgcaatcctctagaacccttacctcccactctttcgttataccgagactcgggaaccccaataggttttgcctttntaatgtactccgaacaaaacttaatagctntttttgcaacgtaccttttaacaatagatgcttcaggatagtgtaaattctttgtatacccttttatgatcttcatgtattgctcaaccgagtacttccattggtaaataaacaaaaccacaacattaatttccctcaccagatgaacaattaatagaaccatgatgctgaaaaacaaaggaaggaaatacatctccaatggacataagataataacaacctcat

SEQ ID NO: 12157 - DNA, 400 bp, Glycine max
  unsure at all n locations
agcttcatctaagtaccctgctctgccaagtatatccactaaacatgaataatgagttggtctaggctccacactatagtctctagtcattttgtagaanatctctttaccctcgtccactaatccagaatgactacaagccgataaaactgcagtgaaaatgccctcatctggtgtcacacctttacctagcatttcataaaaaatggagatggcctctctccccctcccatgaattccaaatccagtaaccataaccgtacaagcaggcaaatttttctcatgcatctcatcaaacacacgacaagcacanaaccaaacttcacagttagcatacatgccaataagtgcccgtcccacaacaacattcacaacataacccctcttaacaacatatgac

SEQ ID NO: 12158 - DNA, 301 bp, Glycine max
  unsure at all n locations
gcaagcttaagtattgtattcccatttcttttgtacagaactcctcttcctggtggccncttaaggtaatggagaattatataggtatcttgtaagtggatttctcttggacagtgcataaataggctcaccaagctaacaaaaaaagtaatatcagaccttgtgtgagacaagtaaatcaattttccaactagacgatgatacatctccttatccacttctgcactgccatcttcattacccaatttaatgtttgaatccatgggagtacctctcaatcgacccatctaccctatatttt

SEQ ID NO: 12159 - DNA, 278 bp, Glycine max
tcaaaagatcatccccttgacaacattattgcttatatctcaaaaggggtaacaactagacattctcttaaagatttatgcaataatatggcttttgaatctatgattgaacctaaaaatataaaagaagtcatagtagatgataactggattattgccatgcaagaagaactgaatcaatttgaaagaaacaatgtgtgggaacttgtagagaaacctaaaaattatcccatcataggaacaaaatgggtatttagaaataagttagatgaacatgg

SEQ ID NO: 12160 - DNA, 267 bp, Glycine max
tccattttcaattaccagtgtctctatatattacgggattaattcggacatcccagtaaaaagttattgttgtttgattttgctcagagcttctgttctgaatttccaacgtcttgatgtaccactagccacaatcagacatccgagtaaaaagttattgtcgtttcaatttgctcaaagcttttgttttcaattttgagtgtctcgatatattacaagactcaatcggacatccaagtaaaaagttattatcgttagaatttgctc

SEQ ID NO: 12161 - DNA, 277 bp, Glycine max
ttatagagagccatgccaatagtatagtgaatactattgttataagtgaactctatcaacggaagaaaactctcccaacttccttttttctctaagacacatgccatcaaaaggtcctctagcgactgaatggttcgttcagtttgtccatcagtctgaggatggcaggctgaacttagtcaaagcttggttcccaatgctctgttcaggctctcccaaaatctagaggtaaacctaggatctctatcagacactatgctagatggcacaccatgta

SEQ ID NO: 12162 - DNA, 387 bp, Glycine max
  unsure at all n locations
agcttgtcaactcctcataccatatattgctgtctaattcctccttagaatcatcacattcagagtagtatactatagtagagactctttaaattaatactctgtcaatcaataaactctctaaaataataaatntttccggtcccgacatgggccaatgcaaaaaattggaaaactcaataaaataataagataataatctttcgtgagatccctgtattattttcggtcccaagaaaatcataaattaataattcatagaaactagaaacaaatatattacactctattgaaatatgattcaatagttgtctgtttcctttatagtcaagtctatttggagctcatctctaacttttcttattgcatccaatagctcaggtgttg

SEQ ID NO: 12163 - DNA, 317 bp, Glycine max
  unsure at all n locations
agcttgctaaagcactgctntcaactccaacttnttgaaaggtcaatgatgaanaataaagaactccatttatgcctgcaaactgctgaagtacaaaaagagtacctccaataaaggcaactgcaatcatacaaagaaaatccacagcaaattttatgcttcaaactttcaagtgccatgcacaagtaatgattataaatatgtatttgtttataaaaagagaaagttttgttttatggagctaaattcattcccctatccagctgaaactattactntaatgtacttatttttctcctgacatggtaagcaatcta

SEQ ID NO: 12164 - DNA, 455 bp, Glycine max
  unsure at all n locations
agcttaagaaaaagatggccttagcaaatttcttatttccagaagggaattctatcaatagacctccaatctttaatggagagggttaccactactggaaaacccgaatgcaaatttttattgaggcaatagatctaaatatttgggaagccatagaaatagggccttatatacgcaccacagtagaaagagtttcaatagatggtagttcatcaagtgaaagcataactatagaaaaacctanggatagatggtctgaagaggatagaaaacgagtacaatacaacttataagccaaaaacataataacatttgccctgggaatggatgaatattntanggtttcanatngtaagagtgctaaggaaatgtgggacactcttcgattaacacatgaaggaactacaaatgttaaaagatctaggattaatgcactaactcatgaatatgaatta

SEQ ID NO: 12165 - DNA, 278 bp, Glycine max
tattcaagcaaatttacgtatggttgtccatgttgccaaaagttatcaggggcgtggtctcagccttcaggacttattacaggtagccttttagaaattaaagaccttcctttccctgtagcaaaggctgtttagtgtatggttttcctggtttgttatattctaaattgtgaatatcattcaagaattttttggattgcctagtatttcatcaattagttaaccaagattcttgacttttcttaaatgtgaaagagatacactaggataaaaagact

SEQ ID NO: 12166 - DNA, 277 bp, Glycine max
tcaagaataatggcctcatcaaactatttatttcctgaagggaattcaataaataggcctcctatttttaatggagtgggttaccattactggaaaacccatatgcaaatttttatagaggcaatagatttaaatgtttgggatgcaattgaagtagggccttatattcccaccatggttgctgggaatacaacaatataaaagcctagagaagattggagtgaggaagaaagaagactagtacaatacaacttaaaagccaaaaacataattacat

SEQ ID NO: 12167 - DNA, 388 bp, Glycine max
  unsure at all n locations
acccttgatgcaacatttggagaggttaatgaaacaatgagatgatgcgctccatgagaggttggatcaaatggagaatagagatcataatgaagaagaaaggatgagaagagggaatgatggtgttcctagacaaaaccgaattgatggtattaaactcaacatttctccctttaaaggaaagaatgatccggaggcctacttggtgtgggagatgaaaatagagaattttttctcatgcaacaactatgaggaggaccaaaaggtgaagcttgctgccacggagttttcggactatgctcttgtgtggtggaacaagctataaaaggagagagcaagaaatgaanagccaatggttgatacatgggcggagatgaaaaggatcatg

SEQ ID NO: 12168 - DNA, 280 bp, Glycine max
tcggtattcaatttcgagcgtctcaatatattacgggactcaatcagacatccgactaaaaagttattgtcgtttgaattagctcggaggttcaaaattcaatttcgaacgtctcaatagattacgggactcaatcagacatccgagcaaaaagttattgtcgtttgaattaactcagagcttcaaaattcaatttcgatcgtctcgatatattacgggactcaatcaaacatctgagtaaaaaagttattgtcgtttgaatttgctgaaagcttcaact

SEQ ID NO: 12169 - DNA, 377 bp, Glycine max
  unsure at all n locations
caaactaacatgggacctgaaaaaaattacatcaaagacgcgaaacaatggagcgaagaagtctgaagaatggcctcaacactgtacctatggttccacccaattctacgacacatacatcaactggaccgatcattccatctcccgnnntngngcccctctttcaatccaatcttgaatagcatcactgatatgaggcacgacctacagaggaaaacaccatcataagaataagaataatgattctcatgacaataataatattaggaccaacatggaaaatgaaaaccttggcttataaatatcatcacantataaacatantacaaaatnnnttaagccnnncctgaacngttttgctacctantctccttttc

SEQ ID NO: 12170 - DNA, 417 bp, Glycine max
agcttggctaactctataggagacatcttatatgttgctatggatatgggtccagcaccaggtactaggtctatggaaaactctatctctctcgggtggtagactgaatatatcctcaaggaacacttcaggaaactctctaacaatagagaggccacacatggaaacctttgtctgtatttctaagttggacaagatcatgtacacttgagcttcttcttttaaagatgccacaacttggttggcagagatacatcatatccttactcactccagaatcatcaaacaccacagttttatcaaaacagtttaacaagacatggttggaagataaccagcccatacccagaataacatctatttggctcaaagacaaacagatcagatcaatctagaatgttatgccagaaatttcta

SEQ ID NO: 12171 - DNA, 428 bp, Glycine max
  unsure at all n locations
ttcagcacctaatgtcatattatattgtaattgggtatcttaacataagagatttcagatggactttaatcctaatcccacaatcgaccttttcacgagatctctacttaaccctttggttaaatgatcggccaaattatgctgagttctcacaaactccactgatatcacaccatgcatgattaactcccgaatcatgttgtgtctaacacccaagtgtctagacttcccattatacacttgactatatgccttagccaaagttgcctgactatcacacctgatagacatgggaggtataggtttgggccacaatggaatctcatagatcagatttcttagccactcaacttctntaccagctgctgctaaagctacaaattcaaattccattggtgaatttgtaatgcaggtctgtttcttggatg

SEQ ID NO: 12172 - DNA, 428 bp, Glycine max
  unsure at all n locations
agcttgctaaagctgaagaattcttcttttctggattgggacccggagatacttcaaacccactaggatcaaaggtggcagctgtcacagtcaatgaaatattangtctcaattcacttggcatatatatccttggcacgcatagattttgcacctaactcaccctagagggacagagattcttgtagtcttggaaggtaccctctacgttggttttgtcgcgtccaatcaaaacgacaaccgtttattcaccaaagtgctgaacaagggtgatgtgtttgtgttcccaatagggctgattcacttccagcaaaacatangttatggaaatgctttggccattgctggtcttagtagccaaaaccctggagttatttccattgcaaatgctgtgtttggatctanacctcctatctctgatgaagttc

SEQ ID NO: 12173 - DNA, 433 bp, Glycine max
agcttatgctgcaaacatctacaatagtattcttatacctaagcagcaaaatcagccacaacaaaacaattatgacctctccagcaacaggtacaatcctaggtggaggaatcatcccaaccttagatggttgaatccttcacaacagcagcagcaataacaacaacatccttatttccataatgttgctggcccaagcagaccatacgttcctccaccaattcaacaacagcaacaaccccagaaacaacaaacagttgaggctcctccacaaccttctcttaaagaacttgtgaggcaaatgattatgcaaaacatgcagtttcaacaagaaaccagagcctccattcagagcttaactaatcagatgggacaattggctacacaattaaatcaacaacagtcccagaattctgacagattacccttttaa

SEQ ID NO: 12174 - DNA, 358 bp, Glycine max
gctgtgccgaaaggaggattgtattatgtattatttagagccagctggagaccatcaatgctttccacataatttccttgtcggaggggttcaatttgtcgcccttgttcgaggacaagaggagggaggagatgaggttcgccaccgcggggacgcccagcaccgtcatttctcggctggaggaggtggccaaggccgggaagttcgacgtcaggagtagcgagaccaaggtgaggcttcagggtcaggagcgtgggaggaaggggaagctggcgattgccgcggatatctactccgtgactccttcttttatggtgctggacgccaagaaggaccatggggataccttggagtataa

SEQ ID NO: 12175 - DNA, 428 bp, Glycine max
  unsure at all n locations
agcttggatttccttttagtatttaatttatccttcctaagatggagccaaacccagtcaccctcattaagaactagctcttttcttcctctattgcctttagttgaatacacctttgtttggttctctatttggttcttaaccctctcatgcatcttctttacaaattctgacctagattccccttctttatgtattaaagaagtgtccagtgggaggggaatgaggtctaacggtgttaggggattgaacccatagacaacctcaaaaggggactgcttggtggttctatgaacccccctgttgtaggcaaattctacatgaggaagatactcatcccaagacttatggttgcctttcagaagagcccttaaaagggtggataaagacctattcactacctctgtttgcccatcagnttgtggatg

SEQ ID NO: 12176 - DNA, 403 bp, Glycine max
  unsure at all n locations
agcttagtggcactcatcttcgaatgttttctgttaccatccacagagtgatggacagacagaagtcatgaacagagtaattgaaggttatttacgagcttttgttcatcgtaggccaacatcgtgggggaagttcttaccctgngtagaactatctcataatacttcatggaatagcagcacaggctcaaccccttatgagataacatatggacgcaagcctttttcttttccagattatattgcaagatcctctaaaattgatgcagtagatgatcttctcttgtctcgtgatgaagtgttcactactattcgccggaaattactcaaggcacaggtttccatgaagaaaactgcggatgccaaacggagagaggtaattatgagcccggcaggtgggtat

SEQ ID NO: 12177 - DNA, 353 bp, Glycine max
  unsure at all n locations
tttatgtggtcttgaatggctatcacaggcctatatatatgtgacttgagacacgaatttgctaagagagtttttcagaacaaaaaggtcttatcctcttataaagaacaatcgttttatcctcttacaaattccttggccaaattacttgtgattcaataaggaattatttgagtgctcaaattgttcaatctatctctttcaagagagatttcttcttctcttcttcttcattctgaaaagggattaagagaccgagggtctcttgttgcgaaagaattctaaacacanaggaagggttgtccttgtgtgtttagaacttgaanaggaatttacaagatagtggaactctc

SEQ ID NO: 12178 - DNA, 379 bp, Glycine max
  unsure at all n locations
agcttctatgatcagtcaagattataatttggtgccctaaaagatactgcctccattttttaacagcagtggtgatcgcagcgagttcacgaacataagtttaagaagagagtaacctgnggcaaaactgcttgctaaaaaaagctatcgggtgtcttccttgggacagcaccacacccatacccgaacccgaggcgtctgtctccaccgcgaaaggttttgtgtgctaagactagagaatgtgtcatagcatgcttcaatttgttgaaggcaacatcagcttccacggtccagtggaactcttccttggtcaacagacttgtaagtggtgctgccaacattgcgtagctccttataaatcttcaataaaagccaagca

SEQ ID NO: 12179 - DNA, 395 bp, Glycine max
  unsure at all n locations
agcttctcgatatattatgctctctgaattggatttccgngngagaaggtatgaccatnggaatttctcgagagcttacttcgtgcaatatcaagcatgtcgatataatatacgacttaatcggacttccattcgataagctatgaccatttgaattcttcgagagcttccgctgatcaatttcgagcgtctccatatactatgcgccagaatcagactttcgtgatacaaggtatgaccatgggaatatcccgagagcttccgttgatcaattttgagcgtctccatatactatgcgcctgaatcggactcccgtgtgatgagagatgaccattttaattaatagagagctcgcggtgtacaataccaagcgcaactctttattatgcgcctga

SEQ ID NO: 12180 - DNA, 386 bp, Glycine max
  unsure at all n locations
agctntggagtttccaagggtttattcttcttcttcttttgtccagtcttcttctggcttcaattcatcagtgggctttccttctgtgtccagcatcttgggatgttcccagcctttgatgacaactttccaggttctgctatccagtgatttgaggaaggccaccatccttgctttccagtattcatagttggttccatccagaattggtggtctgttcactggtcctccttctttctccatgttcatcagaatttatctccctagatctcactcagtgatttcgagtgcctgctctgataccaattgaaattctgatacagaggtcagatgtcgtaccggatgtcacgacatcacgcttcagaacatggagattatatttgact

SEQ ID NO: 12181 - DNA, 419 bp, Glycine max
  unsure at all n locations
agcttctaaactttgtacaagtatgattctctgataccacttgttagacaagtggcctcagatatcttaagaagggggggttgaattaagatattccaaacttttctcctaattaaaaatctatcttactttttacttaagttatgaattcccttaatgacaatcttcttaaatattaattcaaatgaagcaacttgaattatgaatataaagcaataataaataaaggagattaagggaagagaaaatgcaaactcagttttatactggttcggccacacccttgtgcctacgtccagtccccaagcaacccgcttgagagttccactaacttgtaaattccttttacaagttctaaacacacaaggacaacccttcctttgtgtntagagattctttacaacaagagactcacagtc

SEQ ID NO: 12182 - DNA, 437 bp, Glycine max
  unsure at all n locations
agcttccatgtaagaaggcaattttaacttcaaattgaagcatctcccaactaaagtgcgctgttaaggagatgatgatcctaactgtattcattttttccattggagcgaatgtctcctcataattgattccataggtttgggtgtatccctttgcaaccaaccttgccttatatcggtccaatgtgccattagcctgatatttaacggtatacatccacttataacccattgtctttttgtcttttagtctctctacaatctcccctctcatttctttccaatgcacccatttcttcattcatggctcatacccagttctcatccttcaaggcttcttgtattgatgcagggattttgatagaatcaatagctgaaataaaactatggtgctgtagagaaagatntttagtagacacaaattgngatatatgata

SEQ ID NO: 12183 - DNA, 443 bp, Glycine max
tatagacaactcaagccttttttagtaagaatgtgggctcagtctctcaaaatattaatgtcactagtctccgtgctttcaattaagtccattgcttcctcgggggttttcattttgatcttacccctagctaaagcatccaagagctgcttagattgtagtctcaacccatctatgaatatgttgagctgtattggttttgaaaaaccgtgagtgggattcttccgcaataaacctctaaatctttcaagtgcctcattcaaagattcatctggaaattggtggaaggaagagatggtagctttgccttctgcagtcttcgattcagggaagtacgtctttaagaaattttctactacttcatcccatgacttcagactgtttcctttaaaagaatgaagccatctcttagcttctccaactaaagataatgagaacagact

SEQ ID NO: 12184 - DNA, 448 bp, Glycine max
  unsure at all n locations
attttggttggggctttgctagaatctaattcttacaattttntataaaaatttctatccaatagttgctatgctaacttggtaataaatttgctcagattcaacaagacgcacattattaggttgggctaagcgattcgaaattattggtggaattgctcgaggacttctatatcttcatcaagactctagactaaaaatcattcatagggatctcaagactggtaatgttcttctcgatagtaatatgaacccaaaaatatcagattttggtatggctaggacatttgggctggatcaagatgaagcaaacacaaatagagtgatgggaacatagtaagcttttctatagttggttatttttttatttccccttttacaatggcttctagcttctcatgtggactcctgttttctatgcagtggtatatgcctcctgaatatgctg

SEQ ID NO: 12185 - DNA, 376 bp, Glycine max
agcttatgctgcaaacatttataatagacccccttagcatcaaaatcaacaacaatagaataattatgatctttcaagcaacacatacaatccaggttggaggaatcattcaaatctgagatggacaagtactccacaacaacaacagcctgcccctcccttccagaatgttgctggtccatgcaagccatgtgttcctcctccaatgcagcaacaacaaagacaacaagcaactgaggcccctcctcaaccttccttagaagatttagtgaggcaaatgaccatctagaatatgcaatttcagcaagagacaagacctccattcagagtctaacaaatcagatggggcagatggcaactcagttgaaccaagctc

SEQ ID NO: 12186 - DNA, 443 bp, Glycine max
gacactatgctactcagcttgagcaattcaaacaacaataactttgatatcggtgtccgattctgtcccgtaagatatcgagacactcgtaattttaaacggaagctctgagaaaaatcaaacgacaataacttttaactcggatgtccgactgagccctgtaatatagcgagacgctcgaaattgaaaacggaagctctaagaaaagtcaaacgacaataacttttaactcggaagtccgattgagccttataatatatcgagacgctcgaaattgaaaacggaagctctaagaagagccaaaagacaataacttttaactcggatgtccgattgagtaccgtaatatatggagacgctcgtaattggaaacggatgctctaataataatctaacgacaataactcttaactcggatgtccgattgagtcccatattatatc

SEQ ID NO: 12187 - DNA, 278 bp, Glycine max
  unsure at all n locations
catgcaagcntgacattcatttctgtcgtnctatatattacgggactcaatcggacatccgagtaaaaagttattgttgcttgaattttttcagagcttcaccattcaatttcgagcttttcgatatattacgggactcaatcagacatccgagtaaaaagttattgtcgtttgaatatgctcacagctgcggcattcaatttcgagcgtctcgatatattacgggactcaatcagacatccgagtaaaaagttattgtcgcttgaatttgctcagag

SEQ ID NO: 12188 - DNA, 358 bp, Glycine max
agcttcttagtttcagatgatgcagattggtttttatctacctcatgcactcctctaatgactatggcatcatttctggcgctaaactgctgggagttggaggccatcttctcaattaaatttctggcttcagcaggagtcatgtctccaagggctccaccactggcagcatctatcatacttctctccatattactgagtccttcataaaaatattggagaagaagctgttctgaaatctaatggtgggggtaactggcacatagtttcttaaatctctcccagtactcatacaggctctctccactgagttgtctaatacctgagatatctttcctgatgggtgtggtcctggaag

SEQ ID NO: 12189 - DNA, 432 bp, Glycine max
agcttccttaagaagattccttaagaatctagttcttagctacacatacctctctaatagctaagctcacctccttgagatgagaagctagagcttagctacacaccccctataatagctaagctcacccccatgacaaaaaacatgaaaataacaaaaaaaaaagtccttattacaaagacaactcaaaatgccccgaaatacaaggctaaaaccctatactactagaatggccaaaatacaaggcctagacgaaggaataacctattctaatatttagaaagataagcgggctcatacttagcccatgggctcgaaatctaccctaaggctcatgagaaccctagggcctttccttggatctctagcccaatctacttggagtcttctagccaatgcccttgcggggtaggattgcatcaagttgtagta

SEQ ID NO: 12190 - DNA, 409 bp, Glycine max
  unsure at all n locations
agccatccacatacaagcatataatgaaacaatcatctttcatagacttcttgtacacacatctatcaacatcactagaggaaaaaccatcactaagcaaagtctaattaaacttttcatgccattgtttttgtgcttgtttcaaacgatatggaaattttaaaagttgtcacactttgttttcttgattagtgaatttcagctatggttcaacccnctnngcggaaatcaaatgctagagtctccactaagtgtgcttaagtttcatgaagcatgtaaagcatgaaggacatgccccnnnnntttcaattgggtgtcacatgctaatgctcacctcccccttaagcttggtcaaatttaattggattgaacttgtggcatgtaattaaatttctttccaacacacaca

SEQ ID NO: 12191 - DNA, 458 bp, Glycine max
  unsure at all n locations
tgtaatgcgaaccaagaagaatgaaatgaacttaagatgctgttgggattatcgtctacgggccttaaacagagaaacgaatcaaggacctaaaaagggattattaaagaggttaaaaaaacggaaattgtaaaacaagaataacataataacagtattttacttgagtcataacataatttcttttatatttattatttgataatcgatacacattataagtatttagttttactatttatattgtttactagatataaaacttagacggaatatacgcgttaaccgtaaaaatcataaaaatgtctttcgatagataattatattttcatgctagattttattgacaaatacgatttttttttatcatgaatcataaaatttatattttgattgtaagttttttttatcanatatataattntcaacttaagataatngtttatatgttgacaaaa

SEQ ID NO: 12192 - DNA, 395 bp, Glycine max
ctgcagcttctgtccctgagaaacttttcttgattacaacagggagtgaagattgctgaaaaccctagccttgcaacaagtcctagggaagtagacacggagatggacaagaaaatccgcagtattgtgagtagcattttgaaagacgcctctgttcctgatgctgagaaagatgttccaacatcctccaccccagatgttgctgtccctgaagctgatgaagatgtcccaacatcttccaccccgaatgtttctgtgcctgatgctgagaaagatgttccaacatcttccggcccaaatgctgaagtactctctttccccagcaaagagagatcaacagaggaagatgatcaagccacagaggagacccctgcaccaagggcacaagaacctgc

SEQ ID NO: 12193 - DNA, 435 bp, Glycine max
  unsure at all n locations
tatcctatctgttaaatacagggcatccttgtctttatantgcttggacaaaacagagaaataacagaataaacttccatatggcatttggtcacatcccaacaattcaccaccttgaactaacatccatataggacacaaactgcaccctccaaacacacatgattttaaccccaacaatctacattgagcaagcttaagcagtgatcaaacttgctctttggaactggctttgtgaacatatcagcaagattgtgcagagtgctgatcttatgaactttgattcttctctctgaccgaatgaagtgatatctaacatctatatgtttggttctatcatgatgaacctgatccttggccaagcatatagcactaatgctgtcacagtagatgttagcatattcttgattaattctgagatcatttatcagacct

SEQ ID NO: 12194 - DNA, 422 bp, Glycine max
  unsure at all n locations
agctttaaataggctcngggttcaatttctacttttatgtaagccgagtcgagccttaaaaaaagcctatgacaggtaatgagtcaagctcaagtcatacgtattcaactcaagccgagctcaagcctagtaaagcttggcttggcttggctcatttccacccctaataatgaagaggaaatggacatttgggtgtacaacacaacctaccaaaagtgcagttctagtgaaagatgagggaatgggataaagtaagctagtcggcgcccgtcactttcctctttcattcattcattcattcatttacttttcctcacacaaattacctctgccatcaacctgcactcaccaacccaacttcttcccaaaccccaaacagaacaaaaatacaacacctttaattactctcttgctaaatatat

SEQ ID NO: 12195 - DNA, 400 bp, Glycine max
agcttgcaattgacatatagggtcgttctaaaatgactggaacctcatggtcttcctccagatccatgaccacaaaatcagctggaaagaccttcacttttatcagaacatcctcaattaccccgtaaggtcttgtgatggatcggtcaacaagttgtaaagtcattctcgtgggcatgatttccaactctcacaaccttctacacatggagagcggcattaggttgctactggttcccaaatcaatgagagtctttctgatgtgccatcattttcttctatttcttaaaccctttttgcaccattttaattactgattagtcttaattgtcaaattaattaagcagttttattatttgggcacattgagctaatttgatgtttttaatctaatttcatg

SEQ ID NO: 12196 - DNA, 442 bp, Glycine max
  unsure at all n locations
taacatcagaccacttccagggttctggttctacttttcatggatttgatggggcctatgcaagttgaaagccttggaggaaagaggtatgcctatgttgttgtggatgatttctccagatttacctgngtaaactttatcagagagaaatcagaaacctttgaagtattcaaagagttgagtctaagacttcaaagagagaaagactgtgtcatcaagagaatcaggagtgaccatggcagagaatttgaaaacagcaggttcactgaattctgcacatctgaaggcatcactcatgagttctctgcagccattacaccacaacagaatgggatagttgagaggaaaaacaggaccttgcaagaggctgctcgggtcatgcttcatgccaaagaacttccctataatctctgggctgaagccatgaacacagcatgttaca

SEQ ID NO: 12197 - DNA, 327 bp, Glycine max
agcttaaacattcaatttcgtttctctctatatattacgggacttaatcaagcatccaagaaaaaatttattgtcgtttgaatttgctcagagattcaacattcaatttcgagcgtctcgatatattacgggactcaatcagacatccgagtaaaaagttattgtcgtttgaattggctccgagcttcaacattcaatttcgagcgtctcgatatgttacgagactcaatcagacatccgagtaaaaagctattgtcgtttgaatttgctcagagattcaacattgaatttcgagggtctcgatatattacgggactcaatcagaca

SEQ ID NO: 12198 - DNA, 453 bp, Glycine max
  unsure at all n locations
nttgttagacaagtggcctcagatatcttaagaagggttgttaatataagatattgcaaactatttccccaattaaaattctatttcaatttcaatgcaagttacaagttcccttaaaaatgaattcttaaataatgattcaaatagaacaatctgaatataaattaaagcaataataaataaaagagtttaagggaagataaagtgcaaactcaaatttatactggttcagccacacccttgtgcctacgtccagtccccaagcaacccgcttgagagtttcactatcttgtaatatccctttacaagttctgaacacacaaggacaatccttcctttgtgttcagatntctttacaacaagagaccttcggtctctcaatcccctttgagaatttagaaagaagagaagaataaatctctcttgaaaagatagattggcaatctgacactc

SEQ ID NO: 12199 - DNA, 380 bp, Glycine max
gtttagaggtattagttgactaattatggtttattgcttctgacttattaaggtttagggttatttgaaaagatagggttgcttgactaattgggtttaggggtatttgacaaataaaggtttagggttactcgacgaattcgaatttaagggtatttgactaatgagggtttatgtgtagttgagttaattacggtttagtgttacttggccaattagggtttatgggtatttgacaaattacggttacttgactaattaaggtttatgggtatttgaaaattaaggtttaaggttacttgacaatttggggtttaggtgtatgtgactaattaagatttataggtacttgactaattaaagtttagtggtacttgact

SEQ ID NO: 12200 - DNA, 372 bp, Glycine max
  unsure at all n locations
agctntgataaatctgacaaagaaacgtgttnattgtctctatattaagggggtatctagtgaaggagacactagagacagtggaagcagcaaaatgcagacaatagttgttgtgatcattgtcatagtaacattgcttgtcatttctggtatgctattcgtggcacatagatgcttcaggaaaaaggaagatttgcttgagtctcctcaagaggattcagaagatgacagtttcttggagagtttaactggcatgccaatccgttacagctacactgatctagaaactgcaacaagtaacttctctgtgaggcttggagaagggggtttcggttcagtatataaaggagttctaccagatgggactcaact

SEQ ID NO: 12201 - DNA, 443 bp, Glycine max
  unsure at all n locations
ctcaagctagcttaagacacgatatagattnctttaatttgcactctatgttttcctctccttcaactgagaaccccattggttggtccatataaacatcctcctctaaatctctattcaaaaaggcagttttcacatccacctgatgtagctccaattcataatgggctactaatgccatgataatcctaaataaatcctttcgtgagactggagataacgtctctttataatcaatgtcatctttttgagtaaatcccttagcaacaagtctagccttgtaacgttcaaagttgccatgagagtcacatctagtcttgaagacccacttacaaccaactctgttacaaccctttggtaattctacaaggtcccaaacaccattatgttccatggaatctatctcttctttcatagcattaaccatctctcaaaattatcac

SEQ ID NO: 12202 - DNA, 445 bp, Glycine max
  unsure at all n locations
tagcagttcagtttcatgttgtacagaaggacatgatttcttatttaattttgattcaacacatatttcacatttcttatttttttttatcattcatattaattaaacctagttgttgcaaattcataacatacgttggattaacatgtcctaatctagcatgccatatatcataagaatcaatcaagtaagcaaaagaagatgcattctcattaatcactttagaaacatatagtacaaagagaccccgatcacaataacccatccccataaatacattattcttggccataattatcttattagactcaaacctttcgcaacaatgttatagaaacaaggtcaactctcatagagggaacctgtagcacattattcatagctagtantttcccacatatgagtntgagaagaaatatcccctttccttgaaccagagtagttc

SEQ ID NO: 12203 - DNA, 432 bp, Glycine max
  unsure at all n locations
agcttatgcatgcaagactttcttatttcaaagtcactttaatagctcatattataaaatgacatacaaacatatgagtccagctagctatcttaaacaatatgaaacttaattttttgtgatagccttcaaactacaacaatgattattatcttcttttttaacaaatctatatttttttattacaacgtagctaatgtggtttatgttgaattcaaatttctaatatcaatttttaggatgttttagattttaaagatactatccaatctttttaagatgtttattttagaaattaatgtgttttttatgttaagtttatgatttgttataaaatagaggttttataaaaaaaattatcaagcatggaatagatangaaaattacaaattttacacgaaatattagtaaaaaaataggcttaattaaata

SEQ ID NO: 12204 - DNA, 461 bp, Glycine max
  unsure at all n locations
tggcctagcccacatcacatgttaagtgcaaagcaattgcatacaaatgctgacttttccttttaaaaaaataataaaacaaagatatttgcgggtcccatgttgctcaaaacgtttcgttttcagttttcacatcttctgtaagtacatgaacatgtcctgcaagggcgagagctggcccatntgatactgaacagtgccaaaaaggtaatcatccacggaaaggttattatcgtccaagtaattaaactgaaaatcaaacgcgttttctagctttaggtccagatcatcgttccacttggggtcgctctgcacctccctctcgcacgtgacatcgggcgaaaccacgtgctccgaactgctcgagtccgtgttcaaccttggcaccgaatccgaagtctccatgtacaattgctcatttcctagcttatgaatctctggcttcgtctcgttctcgtgct

SEQ ID NO: 12205 - DNA, 454 bp, Glycine max
  unsure at all n locations
tctaagtcacctgcggcatgcaagctttaaatagaaaagaatatnnaaatattgatttaaagcaaagggtgtttgctttgttgattttttttatttcatttatattaatattttttatatgtcaatttctttttataaatttagaataaaatcagtgaaatcaaatcaaataccaagtacttgagcattctattcaaaactctctcctatgcccatagctactgttcatgttacgcgaatagcaaacattattaatacatatttagcattaagtcaattatatatttaatttagttttttaaatgattgagtgttacgtataatttaagaattaattcaaatatacagattgtgtaaatatttttatgtgactatttaatcataaatcagtatttttttggtattatcttaaatttagagttaggtttttctcattaatcatcggtataaaaat

SEQ ID NO: 12206 - DNA, 309 bp, Glycine max
  unsure at all n locations
actccttcgcatactgttntttatcacccctgtccacgttatgaagaaacacgtgcgtcacacccgatccctttctcccacgcgccatcattgcggcggagtatatcaccgccatcctcccaggcgcggccgcaaaatatcctcgcggcccatcaatcatgatcacatcccaatcacggttgtacacctcattgggcagcgtgccaagtgccagcttacaccaccgatcacctttcagtgggtggtcagaggtgttcttgctgacaccgggacaataatctttataagaggagaggaggttcttggcct

SEQ ID NO: 12207 - DNA, 458 bp, Glycine max
  unsure at all n locations
taatcaagataagtatgaaaaggttnttttttcaaattctgagtagcacatgaatttttctcaaaacatgtttaccaaagagtttttactctctggtaatcgattaccagattattgtaatcgattaccagtaccaaaacggatttgaaaaagttttcaaattgaatttacaatgttccaattaatttcaaaaggctgtaatcgattacaatgttttggtaatcgattactagtgcctttgaacgttgaaattcaaattcaaaagtgaagagtcacatcctttcacataaaagctttgtgtaatcgattacactgatttggtaatcgattaccantgattggttatgagtaaatcaaaagatgtaactcttcaaatggtttttgactttntcaaattgggtttaagttttctaannagtataactcttcaaaatgatcctcttgaccagacatgaaga

SEQ ID NO: 12208 - DNA, 369 bp, Glycine max
  unsure at all n locations
agctngaatggaaacnagatttctnggtttatttggtaacccaacnggccatgaattaaaaatgtgcacctgtcgccagactctgtgctttatgctcctctgccaaccaccacacagacctttgcccttctatgcagcaacttggagcaattgaatagcctgaagcttatgctgcacacatctacaatagacctccggaacctcagtatacaaaatcaaccacaacagaacaattatgacctgtccaccaacaggaacaatcccgggtggaggaatcatcccagccttatatggtcgagtccttcacaacagctaccacaacaacgacagccttatgttcagaaagtggctggcctaagtagaccatat

SEQ ID NO: 12209 - DNA, 343 bp, Glycine max
agcttgatgatgaatgtctagttgcctttcatactttgaaagaaaagcttgtatcagccccaataatgattgcacctgactggagcaaggagttcgagctaatgtgtgatgccaatgattttgttgaggatgaggttctatgatagcggcgagacaagatattccacgccatatattatgctagcaaggttttgaatgaggcacaattgagatatgcgattgttgagaaggatatgttggccatcgtctataccaacttataaccaaacttctctttatcaaatatcactcgagatcgcttcatgggtcaacgccttaacgaatcttcgttctcatattgaat

SEQ ID NO: 12210 - DNA, 420 bp, Glycine max
tgcatcttccttggtcgggtacatgagcatatgcaatgctccttatactctcaagtgatcaactcttggcttcactccactccatgcttcttgtggtgtttgatctttgacattctttgttggggagcgattggacaaataaacggcacatgcaacagcttcggcccaaaattcctttggcatatttttagccttcaacatacatctagtcatattaagaatagttctattttttctctctgctaccccattttgttgtggagatctaggaaccgttagagggcgacgaatcccatatttttcacaaaattcattaaattcttttgatgtgaattcaccacctctatcggatcttatagctttgattacataaccactctccttttccacaaaacttaaaatttttaaaactcaaatgcc

SEQ ID NO: 12211 - DNA, 420 bp, Glycine max
tctaagtcaccgccgctgcagcttgggaagtacccggctctgttggttggtattggttttgctgacaaatagtgtagttgcaaacaaaatctttagtgtcaaagtacatgtgttggatcgagtggcctcagaataattaagaaggaggggtttaattaattattcctaagcctttactaattaaaaatttactcttctaaggcttttactatgttgttaagagaataaggagtagaagagaaacttaaccaaaagtaaaagcggaaattaaaatgcacagcggaaagtaaaagagtagggaagaaggagacaaacatacaagagtttttatactggttcggcaacaactcgtgcctacatccagtccccaagcgacctgcggtccttgagatttctttccaccttgtaaaaatcctttta

SEQ ID NO: 12212 - DNA, 447 bp, Glycine max
  unsure at all n locations
accaaacctgacatacctagcacatggagagcaatgtaggcactctacaattctggcaaggctcaagctataggggtcagcaatttctctgtaaagaagcttcaagatttgttggatgtggcaagtgtgcctccagctgttaaccaagtggaattgcacccttcattacagcagccagaattgcatgctttctgtaaatccaagggagtgcacttatcagtgagtgtgcaaatttaaatccaaacatttatgcatgctacatgaacaatgattttaagatcggaccagtgattgaaactagttcaatggttcgactgtagttgaatcggttttatattttttaaatataatataatatttcaactaataaaataatatataattaanaaattataaattaatataaatgattaaattatatatttcgtaagataaaaattaataata

SEQ ID NO: 12213 - DNA, 391 bp, Glycine max
agctatggagtttccaagtgccaattcttcttcttctttagtccagtcttcttctggcttcaatccatcagtgggctttccttctgtgtccagcatcttgggatgttcccagcctttgatgacagctttccaggttctgctatccagtgatttgaggaaggccaccatccttgctttccagtattcatagttggttccatccagaattggtggtctgttcactggtcctccttctttctccatgttcatcagaatttatctccctaggtctcactcagtgatttcgagtgcctgctctgataccaattgaaattctgataccaatgccagatgtcgtacaggatgtcacgacatcacgcttcagaacatgcatattatctctgagtgtatg

SEQ ID NO: 12214 - DNA, 429 bp, Glycine max
  unsure at all n locations
agctnggtgaccctnanagattttggtttagtgtatncctttccatctttgtgatttgattcaaaacagcttttaacatttttctgtcacaagataaagggtctaagcaataacccaaatttggtgctcctccatatgttgtagttgcatggttgagagggaacttaggctccatagtggtcatgtggttgaaaatggggtttgtttggttctgagagaaaatggagaagcacggcacttgctcaaactcatctgcatgggtttgagtttggtcaaaacttatgtaagagtccattaacgcaggaagagttgaagatcccgtgtcctcataacagctacccatgctatgtttggctaaaacttcactggttttgtagaacaccctacacaaaacccaatctttctgcatgtacacaaggtgcaaacatt

SEQ ID NO: 12215 - DNA, 408 bp, Glycine max
  unsure at all n locations
agctcgaggganaacttgatttcttgttcaacctantaactcagcttgccatcaatcacaaatctgcacctgttgcaagagtctgtggtctatgttcttctgcagatcaccatacagatctctgtctttctttgcaacaatctggagttaatgaacaactggaagcttatgctgcaaacatttataatagacttcctcagcaacaaaaccaacaacagcaaaataattatgacctttcaagcaacagatacaatccaggttggaggaatcatccaaatctgaaatggacaagtgctccacaacaacatcagtctatccctcgtttccataatgctactggtctaagcaagccatatgttccttctccaatgcaacaacagtagcaatagtctcaacaaagaccacaag

SEQ ID NO: 12216 - DNA, 388 bp, Glycine max
  unsure at all n locations
tatggcggcaaaagataagctacttatcctgaagcatgttgaagttggtgtttaaaaacactgtatccttgaatagcagataaaggtcagcttctcaaaggcaagtaagactcctaaaattgaaaagctataattggtgcacacaaatgtttgggggccagccccattgaaatctgttggaaactcacgctattatgtctcttttatcaactagtctaccaaaaaagtatgggtttattttcttaaaaataaatctgatgtgttttctgtgtttaaaaggcgnaaaataaatatttaatatcaaacaagtcttaacggtaaaagactgaaatcttacaatggtaaggagtatgatagtcaggaagttatagacttctgttctgaacat

SEQ ID NO: 12217 - DNA, 290 bp, Glycine max
  unsure at all n locations
tttgggtgcacatgataaaagataggttttcggaacaaaggaaatctaagcttcaaccaaggggagatggaccatttcaagtgcttgaaagaatcaatgacaatgcttacaaagttgagctgcccggtgagtataatgttagttccaccttcaatgtctctgatatacctctttctgatgcagatggagatattcgattgaggacaaatccttctcatgatggagagaatgatgaggacatgaccaatagcatnggcaaggatccacttgaatgacttggaggacctatg

SEQ ID NO: 12218 - DNA, 352 bp, Glycine max
  unsure at all n locations
gacattgagatgctatatattgagaaatggaagttcttgagaaattcaattggtcataacttttcactcggatgtcagattcagagcaaaatatacagagacgctcgaaattgaacaacggatgctctctagaaatttaaatggtaaaatnttttcacatggatgttatattcgacacataatatatcgagacgttcgaaattcaagaattcaaaaattaaagttctcaagaaatatagagatgaaaaattatgaccatgggtgtacgaatgagacccatgatatatcgatatgctcaaaattcacaaattggtccaattcacaaattcacagagccctaacttttgacatg

SEQ ID NO: 12219 - DNA, 133 bp, Glycine max
  unsure at all n locations
agtcctattaacaacttccgttggcccatcggtttgtgggtgacaagtggttgaaaataacatttagtgcccaacttgctccacanagtcctccaaaaatgacttaggaacttagagtccctatcactaacaa

SEQ ID NO: 12220 - DNA, 426 bp, Glycine max
  unsure at all n locations
acaatcagtgtcatactatngatcanaacanagcatgtataaatatgcaatactagactcaaaatatgcaacaaacactagacctaaatcagtgtcacagaaattggaagaaaatattttatccaagcacaaacttcaagccttattccatgtattgtggggaagttatggctggccatatgggtagaggtgtcatanaggagcangtatggaggaagggaccttggactgctgaagaggacaagttgcttgttgagtatgtcangttgcatggtgaaggcagatggaactctgttgctatgcttgcaagtaagaaacaccaaactttnttcacntgtttgtttcttaatatatatgattggattttcacatttataagtgacaatatagcanaaaaacaactgannattgtttcaacttctactg

SEQ ID NO: 12221 - DNA, 314 bp, Glycine max
  unsure at all n locations
ataataagtcanaatgtgtaacacggatatttctgttatatttatttagaaaggaaaattggctgcgtgaattgctaactttcttttgttactaaactaaactatttcacaactatttggggaacttggtgatttgaatgtgatttcatggaaaagtggacgagcttttctgttntctcatgcaatgaacgttactgtaggaccaacagaagacagagaactaatgactggtcttcacactgttgctgatgtctactgttctgactgccatgaagtgcttggctggaagtatgagagagcctactaggaatcac

SEQ ID NO: 12222 - DNA, 285 bp, Glycine max
ccttctcgcttagtcatctgccttggtgtgggcggcccaccgtctaaggcaatacatgctgagccatactacctggttggtgtccaagatggatcagttaagtatatgtttgagaagcctgcccttacgggatagatcgctcgatggcaggtgttgctatccgaatttgacatcgtctatgtcacctgaaagtgataaagggaagcaccttggcagattatctggcccaacaacctctcaatgattatcagcccatgcatcctaagtttccagatgaggacatca

SEQ ID NO: 12223 - DNA, 305 bp, Glycine max
atgacaatctgaattgctctagagattccattgttcaatttcgagcgtctcgatatattatgaatttgaatcggacctccgagttaaaagatatgaccatttgaatttctcgagagcttccgttgttcaatttcgagcgtctcgatatatgatgcgccagaatcggaacttcgagtgaaaagttgtgaccatatgaatttctacagagattcccgtggtcaatttctagcgtatagatatattatgcgcccgaatcggacctccgagtgataagttatgacgatttaaatttctcgagagcctct

SEQ ID NO: 12224 - DNA, 340 bp, Glycine max
  unsure at all n locations
nntgatgcaacattggagaggttaatgaaacaacgagatgatgcgctccatgagagggtggatcaaatggagaatagagatcataatgaagaagaaaggaggagaagagggaatgatggtgttcctatacaaaaccgaattgatggtattaaactcaacattcctccatttaaaggaaagaatgatccggaggcctacttggagtgggagatgaaaatagagcatgttttctcatgcaacaactatgaggaggaccagaaggtgaagcttgccgccacggagttttccgactatgctcttgtgtggtggaacaagctacanaaggagagagcaagaaatg

SEQ ID NO: 12225 - DNA, 134 bp, Glycine max
tatatcgagacgcaagaaattgaacaacggaagctctcgagaaattcaatgctcataacttttaacacggaagtccgattcaggcgcataatatatcgagactcacgaaattgaacaacggatgctctcgagaa

SEQ ID NO: 12226 - DNA, 323 bp, Glycine max
ctatacaagtagccgtttggttccaaaaccgccgagccagatggaaaaccaaacaattggagagagattatggtgtcctcaaagccaattatgatgctcttaagcttaactttggcaccctcaatcaggacaacgaagccttacgaaagcaggtagaataataatacaacatagtataatatttagaagaattgatgttgagtctaattaattttaaattaaaaagtatatgtgaatgttgagtgagaaaacaaacttcatgctgaagtgtcctagtaatttttgttctgggtcgcgcctttcaatctagaaactatgctcga

SEQ ID NO: 12227 - DNA, 375 bp, Glycine max
  unsure at all n locations
acctctccttcctcaggtgtacccaaacccaatcacctggttcaagcacgactttctttctggctttgttggcttgcttgcatagctcgcattnttcttttcaatttgaaccttcacttgctcatgcaacttcttcacatactcagctttagcctgtgcatcctttgcttaaacatagcaatgttaggcataggcaacaaatcaagaggagtcaaaggattaaatccatacactatctcaaatggtgaacaattagttgtgctatggacagcccgattataagcaaactcaacatgaggcaaacagggcttccaagatataagattttctttaaaacagtcctaagcagtgtgcctaaagtcctattgactacct

SEQ ID NO: 12228 - DNA, 453 bp, Glycine max
  unsure at all n locations
tattaaaaaaatttaattntaatatatattcagtataatgtttttacattattaattaatgagaaatcacgttagatataattatgactttttaagtaattataacaaaatttagcaattntttttttacaattttgctattcataacaattatattcttaagtgacaatataaaaaactgttagtacattctattctaattaaatttcattatagaaatgcaaaattagatgtgtaaaattagcaatggtttttgctntatttgcatttgatgtttgatatatgttatgagcatcaatcgataatatttcacaagatgattcctaagttagaaatgtcaccatctctagtgctgcatgacgaanatcccataaaagaatttcacattaaaatattagatgatcacaaaaataattgatcaatcaatgcttgatgacgacattacaaaaagtt

SEQ ID NO: 12229 - DNA, 258 bp, Glycine max
tcgatggtctgtaatgatcacacagtgatgacctataatgtattgccgccacttcttaacggcgttggtgatggctgcaagctcgcgtacatatgttgaggatctcctagcttggtgaaaactgcttgctgaaaaaaacgattgggtgtccttcctgagatagcactgcacccatgccggaacctgatgcatctatctccacggtgaacggtttggtgaagtccggcagtgctaacaccggagtgttagtgacaacat

SEQ ID NO: 12230 - DNA, 327 bp, Glycine max
  unsure at all n locations
cacgttgcctaanagncactatcatgcgaaaaagatactgtgtccgatgggtatggatatcacaagattcatgcttgcctgaatgattgcacattgtacagaatcaatttgaagaattgtccaaatgccctacgtgtggggtatcacgtacaaagtcaagatgataaggattatagtagtgatgaaaactcaaagaagggccccctatagaaagtgttgtggtatctgctgatcattctaaggtttaagcgtgtntgctaataaagacgatgcttangaccttacatggcatgcatatgggagaaaatgcgacacaatggtccgtca

SEQ ID NO: 12231 - DNA, 351 bp, Glycine max
  unsure at all n locations
atattcgacanagtatttcggttatctatcaatattctctcttagttataagtcgaaagttgaaaagttggatactagctaatttaattacaatgattaattagattagttgataatttaataaataaatgtcaagtgacgtaaaatgatatatntaatatttctaatatatttaaatttatttctaagtattaatcatcttanaagtaggataacaatgttntaaattatgtattataaaattntgcatagggtaagttaacaaacaggggaactnttactttccctgattcaatccaaaaaaaaattatgcatggaactaaatangataatattaatttacgaaaaaca

SEQ ID NO: 12232 - DNA, 379 bp, Glycine max
  unsure at all n locations
agctngccgccacggagttntccgactatgctcttgtgtggtggaacaagctacanaaggagagagcaaganatgaagagccaatggttgatacatggacggagatgaataagatcatgggaagcggtatgtgccggctagttactcaagggacttgaaattcaagctccaaaaactaacccaaggcaacaagggggttgaggagtattcaaggaaatggatgtgctcatgattcaagcaaatattgaagaagatgaggaggtaactatggctcgatttcttaatggtttgactaatgatatccgtgatattgttgagctgcacgagtttgttgaaatggatgatatgcttcacaaagcaatccaagtggagcaacaat

SEQ ID NO: 12233 - DNA, 413 bp, Glycine max
  unsure at all n locations
gagagattcctaagtattggcatgttccacttgngcttttcccatatagcttgcatcctacatagttagaatgtgaaaagccaattatatttaacgatgtacctttgggataccacaatccaacattggtggtgtccttaaggtacttaatgatcattttaacaactgctaagtgagattccttaaagttagcttgataccttgcacacaagcaaacactaagcataatatttagttggctttcaattaagtaaaaaagtgagccaatcatacatctatactttgattcatccactaatttacctgtttcatccgaatcaagataagtggatgttgccattggagttcatgtntctttgcactcttccatgttgaatttcataattagatctatacagtatnnttgttgacat

SEQ ID NO: 12234 - DNA, 437 bp, Glycine max
  unsure at all n locations
tggcactggcttgtgttggtntctgttagatatttaaatggctgctccccccatcctaaacaatacattggcaataagcttggacttggtattacctctgtagccatttggggctacagcttccatgctaagaactaaagccagcgaaattttgtgaactctcggcagatctttggccaggcttattggcagcaatatggcgctgcaacccattccactcaggttcacactctttacgttgctccggaatccaaacttgttaatgatcattgatgtaatggatggtgtaggacagaataggctacagtttgacacaaggatgtcaaagctcttggatacactntgtgtttcacaaggaggtctttgacaattctgaatagaaacgattcaccttctgcttgcgcgcgcctcatggaatcgtccggggggagctcatg

SEQ ID NO: 12235 - DNA, 350 bp, Glycine max
  unsure at all n locations
gtttgtggagattcagtttgatcaanaggggagaatntcaggagctgctatcataacatatntgctcgaacgatctcgtgtctgtcaagtctctgatcctgagagaaattatcattgcttttatatgctttgcgctgcaccacaagaggtacattacttccatttcggataactaatttaggcctatatagttaagatttgcttccatggtatgcgaatttgatgtaagattaagatctgcttccaagaaagtaatgattttttctctttcaattaatacaagttagttcatgaataagaatattgcttgcaagaaattaaagattggctgcatactctactattttctg

SEQ ID NO: 12236 - DNA, 417 bp, Glycine max
  unsure at all n locations
tcagcgtctcgatatattataagcatgaatcggacctacgtgtgaaaatntatgaccattgaattatttgagagcttccgttgttcaatttcgagcgtctcgacatattatgcgcctgaatatgacttgcctgtgaaggttatgaccattgaatatctcacagagcttccgttattcaacttcgagcttctctatatgtgatccgcctaaatcagacatccgagttaatagttatgagcaattgaatttctcacaagcttctgtagttcaatttcgagcatctcgatatattatgcgcctgaatctgacatctgtgtanaaagttatgaccattntagtnctatcggagccttccgtttcaatttgagcgtctctatatgtgatgactcgaatcggacatcgagtagaagttatgac

SEQ ID NO: 12237 - DNA, 384 bp, Glycine max
  unsure at all n locations
tcttagtttcagatgatgcacatgggtgtgtagctacctcatgcactcctctaatgactatggcatcatttctggcgctaaactgctgggagttggaagccatcttctcaattaaatttctggcttcagcaagagtcatgtctccaagggctccaccactggcagcatctatcatacttctctccatattacagagtccttcataaaaatattggagaagaagctattctgaaatctgatggtgggggcaactggcacatattctcttaaatctctcccagtactcatacaggctctctccactaagttgtctaatacctgagatatccttcctgatggctgtggtcctggaagcanggaatattttttctaagaatactctct

SEQ ID NO: 12238 - DNA, 349 bp, Glycine max
  unsure at all n locations
taccttgatatacttcagctgaattctgcanagacaactgatagcctggatgaattgaactccactaatcaagttaagatatagacatggatgaaaatgctgattcttttgtggatgaatctgttatggaaaaggttctccacaagaggagtttgaggatgcgtaaatgcaaagagcttggcaggttttgtttgatttcttgaattttccatttggatattgcatntggtatcacatgtgcttggaatggaatagtaatgatcaagagtgtgtgactgttggtttantttttgtannattgttaatttcttttccattccaatttcatatccaaactatgagttagtct

SEQ ID NO: 12239 - DNA, 449 bp, Glycine max
tctctgatagccaatgtgtgagtcccgttcagggtagtttcgatgaataccggcctcgccgtgatcaaaaatgagaaggaggagttgattcctactcgggtgctgaacagttggagagtctgcattgactataggaggcagaaccaggttaccaaagaggaccattttcccctgccattcattgaccagatgcttgaacgcctggtaagtaaatctcactactgtttccttgatggtttttctagttatatgcaaatcactattgctcctaaggatcatgacaagaccacattcacctgccccttcagcacttttgcctataagaagatgccttatggcctgtgcaatgcccctggtaccttacagcggtgcatgatcaatatatttagtgattctttataacatttcctagaggtgtttatggatgatatcactgtatatggatcgtc

SEQ ID NO: 12240 - DNA, 331 bp, Glycine max
  unsure at all n locations
gctctgataccactngctaaacaagtgacctcagatatcttaagaagggggggttgaattaatatattacaaattatttccccaattaaaattctatttaactttctattcaagttataaattcccttaataatgaatatcttagatgttgattcaaatagaacaatctgaatatgaatataaacaataataaataaaggagtttaatggaagagaaagtgcacactcagatttatactgtgtcggccacacccttgtgcctacgtccagtccccaagcaacccgcttgagagttcattatcttgtaattcctttacaagttctaacacac

SEQ ID NO: 12241 - DNA, 468 bp, Glycine max
  unsure at all n locations
tcgtccgaaactacgtgtcgagtctgtggcgatgagattgtatacatggaaaatggngagctgtntgtggcttgtcatgtgtgtagatttcctgtttgtcgaccgtgttatgaatatgagaggagtgaagggaaccagagctgtccacaatgcaacactcgctataagcgccacaaaggttagttcagctctttaagctttgtgttatgtattaatgtattaggacaaaacatagatgcagttccttacatgcatttggtgatgttctcagattataagaattggagttttatcttgataatctgggtaataaatgtttacattaaatgtccaagtggttttgggaccaccgtgtttctgaccaaggataaaatngaaaataaaaaaatccgtcagtttgaagctgaaattctaattctgattagagaataacaaaacacctaaagaaatgcatcttagtatgataac

SEQ ID NO: 12242 - DNA, 404 bp, Glycine max
  unsure at all n locations
agtgttattatgtttataatatatgtatgtcttgagagnattatgataacaaaattaattgaaaatcaattagagaacatcaacccttcaaaattgtgtcctctcatagttgaagaanaaaaagatgtcacatctaattattcattntttaagaaaagtacatgtgattgatataattaatataatttatataattctaattatagaaattgaaaccaattggtgatatcactataagataagagcacatangacaaggaatgctctgatactaaatggagtatttaatttaatgcacattcttttgaataatttcaattattatctttatataagatatatggaatctttgtattataaaacttctataggtgctgtgttcgaggatgtntctttacaatata

SEQ ID NO: 12243 - DNA, 280 bp, Glycine max
ctgagagaaccactccaagtctagatacttgggtattctcacattcttcacaacatatattatcctaaagtcattcttcttactatcatccataaaccttgtatcaagcttggtgagaacagcttgagagcactgaaattctgataccaggggacagatgtcgtacaggatgtcacgacatcacgctttagaacatgcagtttatgtgtgtccgtatgaacagattaaacaagtaataacacaagagaattgttacccagttcggtgcacctcacctaca

SEQ ID NO: 12244 - DNA, 397 bp, Glycine max
  unsure at all n locations
actcggagatctgattcaggcgcataatatatcgagacgctctgaaatgaacaacggaagctctcgagaaattccaatggtcattacctttaactcggagtctgatttaggcgcataatatatcaagacgctcgaaattgaacaacggaagctctctagaaattcaaatggtcataacttntcactccgagttcgattcaagtgcatgatatatccagacgctcgaaattgaacaatagaagctctcgagaaattcaaatggccataacctttaactcggaggtccgatttaggcgcataatatatcgagacgctcgaaatttaacaatggaagctcttgggcaattccaatggtcataactattaactcggacgtccgattcgagtgcaaaatata

SEQ ID NO: 12245 - DNA, 338 bp, Glycine max
tgaatcggatgttcgattgtgtcccataggatatctagacgctcgttatcgaaatcggaagctctaagaaaagacaaacgacaataactttaaactaggatgtccgattgcgccctgcaagatatccagacgctcgaaattgagaaccgaagctctcagataagtcaaacgacaatcactgttaactctgatgtcctattgagccctgtaatatatcgagacgctcgttattgaaaactgaagctctaagataagtctaactacaataacttttgactcggatgttcgattgagtcccgtattatatctagactctcgtaattgataacagaagctct

SEQ ID NO: 12246 - DNA, 430 bp, Glycine max
  unsure at all n locations
ctgctatatttcctcgttgtttctggttcatgcaggagttattaagctgtgacttacttttcctgttatgtgaaattgcagacgggcattctgggacaagaggatttcacacgatgtcaacatatatgctctgggtgaggtatgctctgtaaatcaaaaccttcaaatacttgtttcaatatgcttcgaggagcattgataattattgatcctcgcaactctaaaattatgctactaatatgaacttacaggatatgtcttcaaaatcactggtggttgtgacaaacaaggattgccaatgaagcatggagtgctaacgacctgctgtgttcatcttttgctccacagaggtagaactgtnatgaagcatcgatcttcaaattgtgatcatttatcatattataatgtgacatcatctgccacatttgtt

SEQ ID NO: 12247 - DNA, 440 bp, Glycine max
  unsure at all n locations
ctgcagctagtagacattcacaccatgaatccttattattactacaccanaattcttcatgaatgatgaatttcataacattaataggatacaaactntgtttattcttataactcataaaacaattatatatatgcttggaattgatttaaaaactcttaagaaaacacttagcataataaaacactgaacatcagcagttttgaaataataataatgataaaatctaagtacattttgaaacaaatatattataataataagataaaanaatctaatatattagcaagaattgaatctcanaatggtgagtctataaaataaataagagaggtcatatntatantttcaaataatcataattaagtacgtagttataattgattgaatgtgggggtttttttagtacggataacatatnaaaatagtgttttttttaa

SEQ ID NO: 12248 - DNA, 447 bp, Glycine max
  unsure at all n locations
gctacttcaacatctgcctgcagntatataatattgttatatgtatttatttggatgaacatacactcattaatgcataattaagaattagacctgggctgcagtgattccttttacttcgctataatctcccttctcaagcctttgattgtctatgttaacttctttgcctctgagactgtttaactcttcaacaggccattgcaccaattgtctcccagtaaaatcgagccacacagttcgtggaatcgcctaattattntaccagacacatacatgcatattacaattcctttaatttgtataaggatacaaaaataaaacacttatagctgaatgccanacanaaaacatganagggagttagagattcagaatcgagcanagattgagtaaatctagaaatatctctctcaatccaggaaaaaaaatattgaanacatatgt

SEQ ID NO: 12249 - DNA, 338 bp, Glycine max
  unsure at all n locations
acactngtaacaacactttgcttgtcctanattatgtagattntccccttagatgtacagatgataanacttagtgaagtcacgaacaagatcacggtgaccctcaacttagtgaagcctacactattagaaattacactttcaacatcggttattaggacattctacatcagttctaaaaccgatgttaaaagtgccggtgttgaatgtatcatcgttaagatcggttntgaaaaatcgatgttaacataaatacaataacattggttgtctaaatacccaatgttaaacacaatgaactacaacaaaaaaagtgtatgcgtgatgaaagttgacat

SEQ ID NO: 12250 - DNA, 368 bp, Glycine max
tcacaaagagaatcatcttgatatgataactctggaagttctcttacaaggctatgcttttgaagcgttgagattaacctcaagctagcatgaccaagcttcttatgtcaaacccaataatgctctttgactgagagtaggcatgaaacttttggactagacagatcaccaagtttaatcttatacagatttccttgtctcttagcctagaagagtgaagagttttccttgttctcaatgatacacatatccttgttaaaagtgacattgtatccactatcacataatttacttatgcgtaagcaaatatgcttcaaccctttaacaagcaaaacattatctatgaaggataaggaggaatacatact

SEQ ID NO: 12251 - DNA, 308 bp, Glycine max
  unsure at all n locations
ntngactgttcactaacaccaagaaaaatgcntttttcttctttgtcatctagctntcttctcttgtgatccggaatgtgagcataggcaacacacccaaaaatttggaaatgatctactgctggtctttccccgctccatgcttcctctggtgtcatattttgaacaacaagtgtgggacttctattcaaaatatgaatgctccagttgacagcttcaggctagaaagttttggaaactccactccttgtcaaaatactccgcaccatgttcttaattgtacaatttttcctctcgcacacaccatt

SEQ ID NO: 12252 - DNA, 175 bp, Glycine max
agagattgaagccttcattttgtactgtcttcgtgcgaatcacttttctctcttgataaatagtatttcgtaaatcccaacggtagaagtgtttaccattgaatcgggaaccaggtgtccaaatttcatgacgatccaatggtttatgattccgggatcgtagttttactggaca

SEQ ID NO: 12253 - DNA, 476 bp, Glycine max
  unsure at all n locations
agcttgcaattacaaatgaggggcataacaaaaagtctattatactacaaaggaagcaaaaaccaaacacaatagtgtccgtaaaaaatggttgaatttccaatggcaagtatagaacaatttattctcgtttttttttttccttttgaatacttcaaatttcattttgtctcggttaattgtgggaaagcaatattactatggtgttggcacattttcatcttgcaattgtggaagcacaagtaggatcatctttgtttgaccaactttctttaattcgacaagcctgcattggtctttcaatttggactacttctgcagcttccttctccaattgcctacaatatcttccaaacgtttctacaccaacctgaagtctaaaatctatgccaaatagaaagctcatctcgaacctgtttaattcagatgtgctcactcctccaacttttgcatagtangcattgttgtagaatctg

SEQ ID NO: 12254 - DNA, 426 bp, Glycine max
  unsure at all n locations
agcttgaaatacagaatagaggctctgagcttaatcttacgataataactttttactcggatgtccgattgtgtcccgtagtatatcgagacgctcgaaattcaaaatagaagctctgagcaaaatcaatcgacaataacattttactcgggtgtccgattgtctcccgtagtatatcgagacgcttgatattcaaaatagaagctctgagcaaaatctaacgacaataaccttttactcggatgtccgattgtgtcccgctgtatatcgagacgctcgaaactcagaacagaagctctgagcaaaatcaatcgacaataactttttactcggatgtccgattgtgtcctgatgtatatcgagacgcttganattcagaatagaagctctgagcaatatcaaacgacaataactntttactcggat

SEQ ID NO: 12255 - DNA, 470 bp, Glycine max
  unsure at all n locations
gaattcattaatcttcttttccaactaaaaaccattgtgagggggaagcatatgacgaaagttaagaatctttttatttgacttcccatttaggtaaacaaaatgggtagtcaaagttatgaaacccttagtattaatagatgtccataaatcagaagttaaacagatcctgccaggaatagcacacaacagttctttactgatggttttcttcctctcatatattctcaacatattagtcttaaaagtatttctagaaattggttaattgaggacacaaataacttatcaaagcctgaaactctggatacttaacaaaaatgaagggcaaattacgcctaatcattagattacacaacaattcgcgtgccatcatttgatctatctctttggccttaaactttccttgcatgtctaanatcatttgactcatatcttncaaattttttatctcacatctcccattatga

SEQ ID NO: 12256 - DNA, 445 bp, Glycine max
attcaacgacatactttattttgatgtctgattgagtccgaatatatcgagacgctcgaaattgaatgttgatggtcgttgcaaattgaaacgacaataactttttactctgatgtctgattgagtcccgtaatatatcgagacgctcgaaattgaatcttgatgctctgagcaaattcaaacgacaataactttttactcggatgtctgattgagtcctgtaatatatcgagacgctcgaaatttaatacgaaagctatgagcaaattcaaacgacaataattttttactcggatgtctgattgagtctcgtaatatatcgacacgctcgaaattgaatgttgatgctctggtcgatttcaaacgacaataatttttcggccaacattgcagaattttttacaaacactggtcgataatatttctttatggtagacgaagtttt

SEQ ID NO: 12257 - DNA, 472 bp, Glycine max
  unsure at all n locations
agcttaggctttgaaaaatgtctaagtgagtttattttgatgtcagaagaacgatgctggaatagtcattgtctccttgtatgttgatgacttacttatgacaagaaagtcaaaagagctgattgaagaatttaaaggaggaatgaaagaagcctttgaaatgactaatcttggaaaaatgtcatttttcctttgtatgcaggtgcaacaagatagaggtgaagtctttgtaagtcaagaaaaatatgcaaaggaaattcatagaaagttcaagatggaggaatgcaagccaattgcaacgccaatgaatcaaaagttgaaattcagcaatgaagatggagctganaaggttgatgaaaaattgtacaggagcttaataggatgtctgatgtatttgactgcaaccaggccagacattacctatgcagtangcttgttgtcacgatatatgcactgtgctagtgagattcat

SEQ ID NO: 12258 - DNA, 521 bp, Glycine max
  unsure at all n locations
agcttatgaatgatatgaatcgaactcattttctatattcaatttctaattataattattatccatactttatttatttatttattttatcaagaaacatttaatgtgaatttaattaattaaaacacgtcacttagtaaatcattaaaatttatacattaattatatttttgtattaaattaaataatataataatgaaggaaaaatccctcgagaaaaacataatttatagaaatgaaccactcctctcacattaaagttctaccaacacatgtatggggcgtatacaaatattgtttttatcaggcgtatgagaatggttctatagtacccttttgagatcctatccattgttatccatattgatgatccatttttgtgctcaagagctactcatattttttatactagtaataggtataattnttatttgtaataaaatactcatacaatgttaaattggtttctagaatactttttaatgttattaatataatatntataaataggtacatttgtc

SEQ ID NO: 12259 - DNA, 590 bp, Glycine max
  unsure at all n locations
agcttgcttctacacttaagtgtttggggtgtagttttataaaatgttggggggagttaaaacaaaatgggcttttcaaataaaaatccgacccactttaagtgactcagtacaaaaacattgcatttcattaagcttgcgtttagtgatcacaatccatatgttggatgcatgtgtatagtgcacaagacttactaagctcattggacgataggtcctttggatgcatatcaatgtgttgagaccttccacataaatttgaaacttcattccacaagaagcatgccaagcaaactcttagcgagattaacctatcctcagtaaagggttttgtaaataaataaacaagttgatctcctgtagatacaaaatgtaattccatagtacccttctaagtgtgatcccttatgaaatggtgttttatttctatatgtttggctcatgaatgcatgatangattnttagaaagatcaatagcaacaatattatcacaaaggatagtaatggtactctcanataggttatagtcgtcaagctgatgtttaatccacaggagttgaaaacaaaaacatgcagntgatatatactct

SEQ ID NO: 12260 - DNA, 470 bp, Glycine max
  unsure at all n locations
gctttgaaccattaaatgacaataacttttattctgatgntganngaggnctgtaatataacgagacactcgaaattgaatgttgaacctctgagcaaattcaaacgacaataactttcttctcggatgtttgattgagactcgtaatatatcgagacgctcgaagttgaatgtttaagctttgagctaattcaaacgacaataactttttactcggatgcctgattgagtcccgtgatataacgagacactcgaaattgaatgttgaacctctgagctaattcaaacgacaataacttttttctcagatgtttgattgagactcgtaatatatcgagacgctcgaagttgaatgttgaagctttgaactaattcaaacgacaataactttttactcggatgtcagattgaggcccgcatatatcgagacgctcgaaattgaatgttgaagctctgagccaattcaaacg

SEQ ID NO: 12261 - DNA, 607 bp, Glycine max
  unsure at all n locations
atccttaagtcacctgcggcatgcaagcttcataaccattaccacaccaccctactacatttctacctttagtcttggtcttagagatggcttgtgaaaccaagtcatggttggttatgtttcttgttttcttggttgctaattgcatgcaacattgtgtccacggggtgtctcaagtgccttgcctttttatctttggggactctatgtctgatagtggaaacaacaatgaacttccaaccacttcaaaatctaatttcagaccatatgggatcgactttccattaggaccaactgggagatataccaatggccgaacagaaattgacataatcagtaacatttctttacactaattaagatcctcttgtttttccttaaagtatatatttagcattcagtacagcaattaaagattntaaattcaaacctcattatgaattgttttgagttgtgatggactaccttctgttaattaactcancaattttttagtagtggtgaaagaatannaactatatttatntatagagccaagtgtcctttctcttgctctatacatttttgtcaagctcacactagagttctacaatngcagctcaatttc

SEQ ID NO: 12262 - DNA, 555 bp, Glycine max
ttttgaatcatgaatcataatttatcgaattctaagataaaaaaacatcaaaaatagcttttaatatatatataaatgataatgatgtgaatactcaatgtataatttaaactaaaaaatcgccgtaagtctcacaaaacgaaatcacaactcatactctacttgatatgtgaaacctttaatttaaagataaaagaaaagcaacggacaaccaaatatagtgcataaagagagagtgacagtgtgaaacccaatttagaaaataaaatagatatctgaatatcaagtgtgtgtgtaaaagatgaccttcattccttttattaacagcttagctataaaacatttcatttctttataagtagtaaattaaagaaaaaaaaataaaatcatgaatgttgactgtgcgtctatcgtgatcaaacatgccatcatcatgattcaattctagtatctggatcatcacatcatgatgacagtcaatattgtgattcaatctgaatgaagatccagtatatgttcttgtgactaaacaatttctactaaaaccaaactctg

SEQ ID NO: 12263 - DNA, 550 bp, Glycine max
gtttttgttgtgttactattccacatgttaaaccttttcaaaacatctaaaatatacttcttttggtgcatgaaaattccctgttcactgtatgcaaactccaatcctagaaagtatgataatgttcccaggtctatcatttcaaattccttcttcaaattctgttttagtgagtcaatcccaattgagctactcctagtaagtgatagatcatccacatatagacaagtgatagatcaatcccaattgagctactcctagaaagtatgataatgttcccgctccttcagcttgcataactctattgtctgcaaaccttacattactcttctgcattgcatcaaaattgacaagccaatccctatgtccagtcatatggtttgagcatccagaatctatgtaccaagtttcattattatgagattctgaatcggtaatcatcatcagcatcaagggttgttcttcaaagtctgcttcattctcttctttggccatatgtgcttgataatcattgtgtgattgattccccctgtgatctatgctacttggc

SEQ ID NO: 12264 - DNA, 540 bp, Glycine max
tttcgtgaaattgaaatggtcataacacttcactctgatgtccgattcaggcgcctcatatatcgagacgctcgaaattcaacaacggaagctctcgagaaattaaaattggcataactttccacttggatgtccgattcaagcacatcacatatggagacgctcgaaattgaagcacggaagctcttgagaaattgaaattgtcataacttttcactcggatgtccgattcaggcacatcatttattgagatgctcgaaattgaacaacggaagctctcgagaaattcaaatggtcataagttatcacacggaggtccgattcaggaacatcacatattgagacgctcgaaattgaacaacggaagctctcgagaaattcaaatggtcataagttatcacacggaggtccgattcaggaacatcacatatcgagacgctcgaaattgaacaacggaagctctcgagaaattgaaatggtcataacccttcacacggatgtccgattcaggcgcatatatatcgagacgctcgaaattga

SEQ ID NO: 12265 - DNA, 499 bp, Glycine max
agcttgatgaatctggaatgacacatgcctatcctgttatattatgggtcagccctgtgccctgagacaccatgatatgctgactcactgcgacacaacatacgacccggatacttgattcctacaaggatcatggcctaatgaataatgtgaattgattaccttgcttttaactcagcgaccgcgatatagccctttacctcttcccttcctggagcatatgcgagacaggctacccgaaccagctttctattgctatctagatggatactccgggtataatcaaattcttgttaagataggggatcaagagaaaaaacacttcacttgcctctttggactttgcaatgcaccagccacattccaaaggtgcatgaatgccatcctttttgacctggtagaaaaatgcatagaggtgtttatgcatgatttctctgtattaagagattcattcatgccatgtctcatcagctttgtaagtcctagaaagatgcattga

SEQ ID NO: 12266 - DNA, 524 bp, Glycine max
  unsure at all n locations
agctttaggctcaatggccccacatagagaatggcctaggtgtagccatgacgttcaaaggtatggtggagcattaacattatcagtgaaggcctgacacttatggcatttcctcacatggatgcaacaattgctctccatagtgagctagtaatacccagttctcagaattttctaggccatggcatgtccattggtatgcgttccaaaggatcctttatgcacctctactagaatttgctcagcccctttagcatccatacaccgaagtagtaccatgtcatggttattcttgtataggatattcccactcangaagaagtcggtcgccaaccttcacaacattcttttatcgttgtcagaggcctcccgtgggcattccttgtcttcgatgtatcgnttgatattgaagtaccaaggcttaccatctttctcttcttctattaagcaacaatgtgcaagctcatcacgacatctgaattcaatgtacgacaaatctccatgcgggcttancaggaacatgg

SEQ ID NO: 12267 - DNA, 371 bp, Glycine max
tagctttgagcaaattcaaatgacaataacttttgattctgatgtccgatagagtcccgtattatatcgagatgctcctaattgaaaatagaagctccgagccaattcaaacaacaataactgttgactcggatgtccgattgtgtcccgcaatatatcgagacgctcgaaattgaacactgaagcactgagaaaaatccaacgactatacatatttactcggatgtgcgataagggcccataaaacatcgaaacactcgtaattgaaaacagaagctctgagcgaattcgaacgacaataacctattgaactcgggtgtcgcaagtgagtccccgaataaatatctagacgcctagagattgaaatacag

SEQ ID NO: 12268 - DNA, 515 bp, Glycine max
  unsure at all n locations
agcttgtgttgttgtgtgctgtaaaagatgttccnctaatctaacatcctggaccaccacgtgttatctcacagactttgactgcagttatggtcaaactaatccatggctctctgcttctgggtacagattacagattacacctgtttctgttccttccattaattgctgaagggttatttctactcactaatttcctttgattaagttttataaatttgaattttaacaattaaatttaatgtatttcgaaatgagtacattttaataacaataagaataatgatatattagtaataaaatttcttaacttaatattatttattttcaaatatatatatatatatatatatatatatatatatatatatatatatatatatataaaataaaatatgtcttagctttaatattaccttttaaattatataatttacttatatatggtataatataaaaatgttatgagatagttaattatccctttcatagattataaactctatcaaataact

SEQ ID NO: 12269 - DNA, 363 bp, Glycine max
agcttcaacattcaatttcgagcatctcgatttatttctggactcagtcagacatccgagtaaaaagttattgtcgtttgaattagctcagagcttcaaaattcaatttcgatcgtcttgatatattacgggactcaatcagacatctgagtaaaaagttattgtcgtttgaatttgctgagagcttcaacattccatttcgatcgtcttaatatattacggatctcaatcagacatccgagtaaaaagttattgtcgtttgaattagctcagaggttcagaattcaatttcgagcggctcgatagattacgggactcaattagacatccgagaaaaaattattggggtttgaaatatctcac

SEQ ID NO: 12270 - DNA, 449 bp, Glycine max
gctctgcttctgaaagagattcgattttctcaacttgaatcagtttatcatcattcttgatcctgccaaaggcaaacaatttacatctattgtccctcaaaacattaataaggttattaactgaatatggtaaatttaataaaagaaatactgtagtttaaaaaacacataaaccttcaagtgtggtgtgcagtgcaaaatataagaaatttatgaaattgcaaaaatccttatctaaacaaccagatacaaagaaaattttcaccataaagcataaaatgaaaattaccagagaagaaccaatgagccatgcatatataaaaaaaaaacagagttttgacagaaagggaaaatgaataaatgaatcttactcctgtaatcttttgcggagcatgtaacgcaaatatgcatcagttccatatgggctgatgcccatatatttacacata

SEQ ID NO: 12271 - DNA, 519 bp, Glycine max
  unsure at all n locations
agcttcttagtttcagatgatgcagatgggtttgtatctacctcatgcactcctctaatgactatggcatcatttctggcgctaaactgctgggagttggaggccatcttctcaattaaatttctggcttcagcatgggtcatgaatccaatggctccaccactggcagcatctatcatacttctctccatattattgagtccttcataaaaatattggagaagaagctgttctgaaatctgatggtgggggcaactgacacatattttcttaaatctctcccagtactcatacaagctctctccactgagttgactaatacctgagatatccttcctgatggctgcggtcctggaagcatggaaaattcctcctaagaatactctcttaaggtcatcctagctcgtgatggaccttggagcaaagtattacagccagaccattgccactccctctaatgaatgaagaaaagccttcacaaatatgtgatcctnctggacatctggnggtttcatggtg

SEQ ID NO: 12272 - DNA, 503 bp, Glycine max
agctttgatgcaacatttggagaggtgaattttatttctagatgatgcgctccatgagaggttggatcaaatggagaatacagatcataatgaagaagaaaggaggagaagagggaatgatggtgttcctagacaaaaccgaattgatggtattaaactcaacattcctccatttaaaggaaagaatgatccggaggcctacttggagtgggagatgaaaatagagcatgtattctcatgcaacaactgaggaggacaaaaaggtgaagcttgccgccacggaattttccgactatgctcttgtgtggtggaacaagctacaaaaggagagagcaagaaatgaagagccaatggttgatacatggacggagatgaaaaagatcatgaggaagcggtatgtgccggctagttactcaagggacttgaaattcaagctccagaaactaacccaaggcaacaagggggttgaggagtatttcaaggaaatggatgtgctcatgatt

SEQ ID NO: 12273 - DNA, 518 bp, Glycine max
  unsure at all n locations
gcttggtgggactntttgttctaacttacacagcatcactgttatgttattttccataattcttaagtgctcaatatttaaagttgtcgaaattaattctctgaaaaactggctaagttcaacaaatggcttccaaataagttttggtaatgagtcaaatgcaattggaagcaaccgttgcatgaaaacatgacaatcatgacttttcattccatgaatttttctcttgttaagatccacacaccgacctaaattggaggcatagccatctggtaactttagttctttgacccatttaagaacagcgagtctctgggatttggtcattgcataagctgcctttggtttaaagaacttgtcacgaccaacatctaccagctcaagctctttccaattacatatttctgctaagtccattcgagcattgtgtgtatccttgctttttccattgatgtccatcacaatgttaaagacattcataaacacatttatttctgtgtgcatgacatcaatgttat

SEQ ID NO: 12274 - DNA, 562 bp, Glycine max
  unsure at all n locations
gcttgctaacctatggaagctcctaatatctcccattctttttggggtgggccattctggatggctttgattttcttatggtccacttggacccatttctaccaactacaaaccctaaaaacactatattatctacacaaaaagtacacttctctatatttgcatagagggtgtttttcctaaggactgaaagaacttgcctgagatgttctaagtgatcatctaggctcctactgtacactaaaatatcatcaaaataaacaactacaaaaatctacttatgaaatcccttaagacatgatgcataagcctcataaaggtgcttggtgcattagtgagcccaaaaggcatcactagccattcatacaaatcgaacttggtcttgaaagcggntttccactcatcaccctttttcatcttgatttggtgatacccacttttaagatcaattttgaaaagatattggcccatgcaactcatcaagcgaatcatcaagtctaggaatggggtgcctatactttacaatgatgatgttgatggccctgcaatctgtacacattct

SEQ ID NO: 12275 - DNA, 559 bp, Glycine max
  unsure at all n locations
agcttatatgagcttaaaatgtaatcttttatggttttctanattaacaattataagaaaccaataagatcttgaaatatatgattctcacaaataatagataaatagtgcatctctttgtccatagtatgacttgtctccgatgcactttaattcctaggaagatgagagaaccaagattttgctttcatgattattctttctgtctctccacgtttgtgataggtagggattagagagaacatttttttgtcaagaagaggaccttatttcacgttagtgtgtattagtgccttttataaccactactcacatcaagtagcagttatctttagaaacttgtgctattcaaccaaatacaatttacgccttaattattatttatttatttattagtccctacataagtcacatgtctctcacataagacattaattttaacattctctcacttgacttatgtgacattactaaacattatggactaaataataaattgattaactaacataatgtgcataaaatgactaacccttctatacatggtacatcataattc

SEQ ID NO: 12276 - DNA, 425 bp, Glycine max
agcttccatcacacatagcagggtttatcctcaattgatacctcctaagcctttcgaacaacttcctcaggttgacaaggtgttcctcctcggtcttagatttggcaattatgtcatccacgtagacctcgatctcttagtgcatcatatcgtggaacaaagctaccatagcccgttgataagttgccccggcattcttgagtccaaaggacatcaccttgtaacagaatgttccccacagggtgacgaaggtaatcttttccatatcctccgacgccatctttatctgattgtaactggagaacccgtccatgaaggaaaacaaagcgaaattggccgtattatccacgaggatatcgatatgcggaaaaggaaaattgtctttgggactggctcgattcaaatccttgatatccacacacatt

SEQ ID NO: 12277 - DNA, 439 bp, Glycine max
cttcaacattcaatttgagcgtctcgatatatgacgatactacatcatacatccgagtaaaaagttatagtcgtttgaatttgctcagagcttcaacattcaatttcgagcatctcgctatattacgggactcaatcagacatccgagtaaaaagtttgttgtttgaattggctgagagcctcaacattcaatttcgagcgtctcgatatattaagggactcaatcagacatccgagtaaaaagttattgtcgtttgaatttgctcagagcatcgacattgaattgcgagcgtctcgatatattacgggactcaatcagacatccgagtaaatagttattgtcgtcggaatttgctcagaggttcaacattcaatttcgagcgtctcgatatattacgggactcaatcagacatccgagtaaaaagttattgtcgtctg

SEQ ID NO: 12278 - DNA, 423 bp, Glycine max
  unsure at all n locations
agcttcaacatcagaccacttccagttttctggaactacttcacatggatttgatggggcctatgcaagttgaaagccttggaggaaagaggtatgcctatgttgttgtggatgatttctccagatttacctgngtaaactttatcagagagaaatcagaaacctttgaagtattcaaagagttgagtctaagacttcaaagagagaaagactgtgtcatcaagagaatcaggagtgaccatggcagagaatttgaaaacagcaggttcactgaattctgcacatctgaaggcatcactcatgagttctctgcagccattacaccacaacagaatgggatagttgagaggaaaaacaggaccttgcaagaggctgctcgggtcatgcttcatgccaaagaacttccctataatctctgggctg

SEQ ID NO: 12279 - DNA, 434 bp, Glycine max
  unsure at all n locations
gggcaattntaaggtgtaaattctcgcattgaantgatataagtttaattaaaaacatctaagaaaatgaaggaaaactcttttctaattaagacaaaaataaataaataatcttgcgagacaatatataatatgctaaaattataaatagcttacccagcagccaacaaaaacattaaattcgaacgcaaatttaattaggagaaaataaaatttctcatgtaaaacaataacctttagatggggttaattaatgtccaccaaaaaaaacagtgtatattcatatgaaaatatacttcccgtgttcctatatacaaagtacataaccttcataaaaaaattaatcattaaaattttcaacaattcatttagattttttagatttgtttataaaattattagcacctcatttgcttcatttctttctacctaat

SEQ ID NO: 12280 - DNA, 438 bp, Glycine max
gtcccttttctcgctgtttcgtgttctttgcatttttttcctattattttacttttgatcattgtcagtgtgaaaagtttttacagaagtgccttattaacataataactaaggtttttgatttgctgtgatttgaaaggtttcaagtttcaacagttctttgaactatttctgtgtgttgaagtgatagtttatctataactgcaggatatgaatatccgtgaagcagtaatgagggccgagaaagctttaaagataagcaaacgcaaggactactacaaaattttgggaatttcaaaaacagcttcggctgctgatataaaacgtgcctacaagaaactcgccttacaatggcatccagataagaacgtcgacaagagggaagaagcagaggctaaattccgagaaattgctgctgcttatgaggtctattattat

SEQ ID NO: 12281 - DNA, 436 bp, Glycine max
ctcagcttcacattcaatttcgagcgtctcgatatatgacggtactcaaccagacatccgagtaaaaagttaatttcgtttgaattggctcagagcttcaacattcaattttgagggtctcgatatattgcgggactcaatcagacatccgagtaaaacgttattgtcgtttgaattggctcggagcttcaacattcaatttcgagcgtcccgatatatgacgggactcaatcagacatccgagtaaaatgttattgtcgtttgaattggctcagagcttcaacattcaatttcgagggtctcgatatattacgggactcaatcagacatccgagtaaaaagttattgtcgtttgaattggctcagaggttcaacattcaatttcgagcgtctagatatattacgggactcaatcagacatccgagtaaaacgtta

SEQ ID NO: 12282 - DNA, 439 bp, Glycine max
  unsure at all n locations
tataaaactcaagctgggctagttatggcgttatgctctttactttatttgttgcccttaagttacttgcgcaaccttgttcatcttcatgttgtgaaagaaattggggtacatattcatgtatccattctttaaagagaaacaagatggcactacatagagctgaagatttagtatttgttcatagcaacctacgacttctctcaaggaatactccacaatatcatcaagaggaaactaaaatgtgggatgtaactggagatgattttgaatcacttgatgattgtggtattcttgaaattgctagattgtctttagatgaaccagagttagagggtgtctttttcaatgatgattgctagtttgtgaaattcttgaagacttgaagttgctaattcatcatcttgctnntataattttnntgtaagaaacaaagcgt

SEQ ID NO: 12283 - DNA, 431 bp, Glycine max
tcgaatcacggggatagatttgccacaacctggtttaatgccacgacagagggtgctcgagacagggcgtaagctcgcaaattattgcaagcgtttcaatgttccatttgagttcaatgctatggcacagagatgggacaccatcaaagtggacgacctcaagatacaaaggaatgaatttgtggctgtgaactgcatgtttcagtttgagcatctgctagacgagactgtggtgttgaataatcccagggatgctgttttgagattgattaagaatgcaaatcctgacatatttgtgcatggcattgtcaacggatcctatgatgtaccattctttgtgtcatggttccgggaggctctctttcattacactgcattgtttgacatgcttgacaccaacgttgctcgcaagatcccatgaggttgatgtt

SEQ ID NO: 12284 - DNA, 165 bp, Glycine max
  unsure at all n locations
agctntgcttccacaattggtgtaggaggccgcttcgacccatttggtgaaataatctatcgccacgaggatgaagtgatgaccgttcgaagccttgggtttgatggcccctatgacatctataccccatatggaaaaaggccaaggagcgcgacatgacgttta

SEQ ID NO: 12285 - DNA, 436 bp, Glycine max
  unsure at all n locations
tattttgtttgcaatatttatgttgtgtgtggattgatttctatttagaataaagtttagaccaattggaaataggcatgactgagatcacattgcatgtaactttcatgttgcttatccatattgacctatgtcattgagtgtactaatgtagtagtcattggggtctagttacatttattgatgcaatcctccctaggaagggaccaatcactagaaccatgagcaagaggctccaagaagattgggctagagctgctgaagaaggccctagggttctcatgaaccttagggtagatttctgagcccatgggccaaggttgggtccaattatctttgtacatattagactaggatgtcattatatttggtccttgtatttagggctccatattgtaggtagggtaccctagaaatataggattnttcagccctt

SEQ ID NO: 12286 - DNA, 423 bp, Glycine max
  unsure at all n locations
agcttgaagcatgcaattnttccagcttactctttctccaactcatcaatggcaggggctatcatcctgtatggaccacaccatggtgcaatggggtctcacttgcaatgacaatgttattccagcttgaatctgtcacagctcgcactgcaaaatagggccagccacttactactacctagattgctntatggcaaaataaaaatcataaattcaacacaaggtaaaggatattcaactattcatcactcaaggatataatatttgggtgcaaaatgttaaatgaccgatatgagttttgtacaatgattccccccgcccccctataaagagtttttatattatcatccaataataatctaacatttatgataagtttgttaacttttacattaagtccttagaagttaaactaatttctaa

SEQ ID NO: 12287 - DNA, 421 bp, Glycine max
catttactacagacctcctcaaccatagttgttatttcaaccacagcagaacaattatgacctctccagcaacagatacaatcccggatggaggaatcaccctaatctcagatggtctagccctcaacaacaacaacagcagcctgctccttcctttcaaaatgatgctggcctaagcaagccatacattcctccaccaatccaacaacagcaacagccccagaaacaacaaacagttgaggctcctccgcaaccttccctcgaagaacttgtgaggcaaatgactatgcataacatgtagtttcaacaagagaacatagcctccattcagagcttaactcgccagatgggacaattggctacacaattaaatcaacaacagtcccagaattctgacaagttgccttctcaatttgtcctg

SEQ ID NO: 12288 - DNA, 237 bp, Glycine max
aaaatgatgctagactaagcaagccatacattccttcaccaatccaacaacaacgacagccccataaacaacaaacagttgaagctccttcacaaccttccctcgaagaactagtgaggcaaatgactatgcagaacatgtagtgccaactagagaacaaagcctccattcagagcttaactcgccagatgggacaattggctacacaattaatataacaacagtcccagaattctg

SEQ ID NO: 12289 - DNA, 422 bp, Glycine max
  unsure at all n locations
tatgctgcanacatttacaacagacctcctcaacctttcagcaaaatcaaccacagcagaacaattatgacctctccagcaacagatacaatcccggatggaggaatcaccctaatctcagatggtctagccctcaacaacaacaacagcagcctgctccttcctttcaaaatgatgctggcctaagcaagccatacattcctccaccaatccaacaacagcaacagccccagaaacaacaaacagttgaggctcctccgcaaccttccctcgaagaacttgtgaggcaaatgactatgcagaacatgtagtttcaacaagagaacagagcctccattcagagcttaactcgccagatgggacaattggctacacaattaaatcaacaacagtcccagaattctgacaagttgccttctcaa

SEQ ID NO: 12290 - DNA, 342 bp, Glycine max
  unsure at all n locations
agcttgacaggttcaggcgcaggtgcttctactggtggaggcacttaaatttggttgccaaacctcaaggtgatggcactcacatttttcagattctgcacagtttgtgaaggcaatttgttagaatttttggattgagcttggtttaactgagtagccatttgccccatctgatttgttagactttgaatggaggctcttgtctcttgctgaaattgcatattctggatggtcatttgcctcactaactcttctaangaaggttaaggagaggcctcagttgcttgttgtctttgttgttgttgctgttgtattggaggaggaacatatggcttgcttgga

SEQ ID NO: 12291 - DNA, 406 bp, Glycine max
  unsure at all n locations
agcttctggtgggacttcttgacttgctttccaatctgacattcaccacagattctgccttcttctattttcagattgggaatgcctctaacagcacctttgtcaatgattttcttcatgcctcttaagtgcagatgtccaaatctttgatgccatattctgacttcatcttctttggaggatagacatgtggaggagtaactggtttcttgaggtgtccataggtaacagttgtcctttgatctgctgcccttcattagaacttcactcttctcatttgtcacaaagcattctgactntgtgaagtttacattgaatccttcatcacacaactgactgatgctgatncaagttgcagtcagtcccttcaccaacagtactttgtccagactangaagtccatcat

SEQ ID NO: 12292 - DNA, 431 bp, Glycine max
  unsure at all n locations
tcaacattcaatttcgagcgtctagatatattacattattcaatcaaacatccgagtaaaatgttactgtcgtttaaatttgcttggctctccagcattaaatttcgagcgtctcgatatattacgggactatatcagacatccgagtaaaaagttgttgtcgtttgaatttgcttagagattcaacattcatcttcgagtgtctcgttatattacggngctcaattagacatccgagtaaaaagttattgtcgttggaattggctttgagcttcaatattcaattacgagggtctcgatatattacgggactcaatcagacatccgagtaaaaagttattgtcgtttgaatnttctcatagcttcatcanttcaatttgagcgtctctatatattacangactcaataagatatccgactagaaaagtat

SEQ ID NO: 12293 - DNA, 424 bp, Glycine max
agcttcaagaaaaagatggcctcaacttatttcttatttccagaagggaattctatcaatagacctccaatctttaatggagagggttaccactactggaaaacccgaattcaaatttttatcgaggcaatagatctaaatatctgggaagccatagaaatagggccttatatacccaccacagtagaaagagtttcaatagatggtagttcatcaagtgaaagcataaccatagaaaaacctagagatagatgctctgaagaggatagaaaacgagtacaatacaacctaaaagccaaaaacataataacatctgccctaggaatggatgaatatttcagggtttcaaattgtaagagtgctaatgaaatgtgggacactcttcgattacacatgaaggaactacagatgttaatagatctag

SEQ ID NO: 12294 - DNA, 451 bp, Glycine max
  unsure at all n locations
ggacctataaaactcagcttcacataggagctgcatcatgtgtgatttatagcatcttcatctaagngaggttcttttgcttcctctatctttttattcggtcaattcactttaattccttgttcttcatcttattctccatgtatatccttcattgtcttgtgttttgatgctgtttagagtatattcaaaaaataaaccgattaaatcttagatctacacttgttcttgcatttctatggttcaaattttatatatctactcttgaatcatgtttttgtgttgattttaggttcaatcattttccagtcataatcttcttgtactgaacctttaaatctaaattttattccanaatattgattataaaaaaagcacaaaaatctaagtgtaaatcacttaatctatgttgtcttagagtcatgtntagtcataataattgtcacattat

SEQ ID NO: 12295 - DNA, 437 bp, Glycine max
  unsure at all n locations
ngacattaatagtttgaatatatttattacctaaattgttgtaattntatttattacatttacttgacaaattataattttgtttattattatctaagatataccatttaccgaatttcaattttaaatgggtgactacaagttgtataaaattcaccatttccatcatcaaagatttcattttaaatcttgagtaatctttatgaatataaaattatgttttattacttatttacttcactttctagcttcaaagtatctatcagaaaaataatcaagccataaacaaataaacgaatcaagcccaagcttcatatattttaaccaactcaagttgaagttttaaatttgttcagtttaaataaacgagtgaagcttgagtaacccattttcttcacaaggcaaacctaaactatagctcagctaaacttgtttac

SEQ ID NO: 12296 - DNA, 420 bp, Glycine max
  unsure at all n locations
agcttcctaataatgatgaacgattattaacatgtttcctaatatatattgtcttattttatatatttttaatatcactaataactaatttttaacattctatcattcaaaagtatttttaaagaaataatgaattaactttcaaatattttagtaccatattgtgaaattgtgtctaanatctttatttcatcttctaaatcacaaaattgataataaggttcaaaactaattgttaatcacgataagaatcacccatgagggaaaaaaaacctctataaagttcatttacattaaaataaactcaaagataatacagattatttttaaaagataaattttatattttaaaataaaaaggaggggtctaattaggaatgcaaataagacaagactntacttaaacaaggtctgacttat

SEQ ID NO: 12297 - DNA, 348 bp, Glycine max
  unsure at all n locations
agcttgaccaaccctattctatggatngactcttattaatacataatcaccatccacgatatccaggtctttcctcttcttatcctgataactcttctgcctactctgagcagttctcatcctctcttgaatcaacttaaccttcttagtggtttgttgtaccacttcagatcctaaggtgaggttctctccaagttctagccagcacaagggtgtcctacaccttctaccatacagaacttcataaggagccatgccaatggtagaatgaanactattgttataggtgaactctatcaacgacaaaagctctcccaatttccttttttgtttaatacataagctctc

SEQ ID NO: 12298 - DNA, 331 bp, Glycine max
  unsure at all n locations
gagaggagacaccacttcactgagaagatgagactagaagaagctcaccaccataggaggccatggataagagcttggaagaagaaggagatgaatgaagggagaggaagagaagagcacgtaattntgtgctctaaaagagctctgacatctgaagtttaatattcaaaagatcaaagttgagaaaatgcacacacatggcctttatttatagcctaagtgtcacacaatattggagggaaatttgaatttctattcacatgtcacttgaatttgagattgagtctgttgagccatattttggagccaaaatttcactaattatgattag

SEQ ID NO: 12299 - DNA, 333 bp, Glycine max
  unsure at all n locations
gcctaattcgtctaagagctcgtcaatgttgggtatcgganaccgttcacgcaccgtgagtgcatttaaagctctgtagtccatgcaaaagtgccatgaaccatcctgcttgcgaactangagcacagacaagaagggtcctttctagagcattgattcaacctgcgattcaatctcatgtttctggtaatgtggataacgatagggccgtacgttgactggcgcancttgcggcangaggtggatgtggtggtctgtttcgcgggccggtggcagtgaagaaggtggctgaaataatgcacganaatgatcaattaaagattggatacgtgg

SEQ ID NO: 12300 - DNA, 376 bp, Glycine max
  unsure at all n locations
tcttctccttcacctttcttctctcattattctcccttctctttntcccatgttgttactcccttgatgagcaaggccaagctcttatagcatggaaaaacagtttaaacatcacttcagatgtgttagcatcatggaacccttcagcctcaagcccatgcaactggtttggggtgtattgcaactcacaaggagaagtgatagagataagcctgaagtcagtgaacttgcaaggctcattgccttcaaattttcaacctctaaggtccttgaagattcttgtcctctcatcaaccaacctcacaggaagtataccanaagagaatggagactatgtagagctcatcattgttgatctcagtggcaattctctctt

SEQ ID NO: 12301 - DNA, 442 bp, Glycine max
  unsure at all n locations
gcttgtcatccagtcttctaacctctttgaccatgctactaangagagttttagcttcagaatactccttactttccattagaaatgctgcaagccttgcctcaactcgctgcctcagaaaggtatgctnttcagcacgtgtccattgcaccatttctttgcagagtgtaatttgtagatcagtagtccctggtatttttgcaacagaatcaattatgcccctcactatctttgctgtttttgccttangaatcaaggaaaagaagggcctcaactgagtaagaaggctatgcagatcctctgccctatnttgttccctgagatgctcagtgaggtttgtgatggcctgttctttcatgcgcagagcatctggagaagaagaaggataatcaagtacctgataaagaatggagatggactcngatgggtctttgcatccact

SEQ ID NO: 12302 - DNA, 347 bp, Glycine max
  unsure at all n locations
gtctcacgagtgtctcgtgctcatgcaacttttgttagccgtggctatacgagacatcttgccaaacaaagtcaggttaacgataactcgcctgtgctttttcttccatgctatatgtagcaaagtcattgatccagtcatgtntgatgagttggaaaatgaggccgcaattaaactgtgccagttggagatgtattttccctctgctttctttgacatcatgattcacttgattgtgcatctggtcagagaaatcaaatgttgtggtcctgtttatctacggtggatgtacccggttgagcgatacatgaagatcttaanagggtatacaaagaatctatatcatc

SEQ ID NO: 12303 - DNA, 345 bp, Glycine max
  unsure at all n locations
acaattaaactttgtgcttatcacggtatgatagtgtatcaaatggacataanaagtgtgttcctcaatggacttatcaaggaagaagttgatgtggaacagccccttgggtttgagagttctatatacccttatcatgttntcaaatntaacaaggctttgtatantttanaaatagctccttgagctntgtatganaagctaagttcanttttaattgaaaatggctntataagaggaaaggtagatactactctgtttcacanagattatggtagtcaattcctaatcatccagatatacgtggacgatatcatattcgatgctactaatgactctctgtgt

SEQ ID NO: 12304 - DNA, 257 bp, Glycine max
  unsure at all n locations
ttgtagaacaatatatcccaacacaccanattattggctntctcagcacattgctttgaaaagaggtattccttcttctcccttcttgcatcgtcaataacctcattgaccaccaaggtactatgaagaagatacctatctttcaagaaggtgttgtgcttttgatcaataactccatttaatactttcatcaacctattggcaagtaattttgcaaatattttgtacaagcaactaacaagtgagatgagtctaaa

SEQ ID NO: 12305 - DNA, 337 bp, Glycine max
  unsure at all n locations
gtatgtactacgtgtcactatgcagatcataaacgatcatccttttcatcaagcacttcacatgaattaatcantttttatctcatacatatagatatatggngaccctgttcaaaggtttctatgcatgggcatcgttattttttaaccattgtggacgatcattctcgctntacatggatttacctaatgcaaacaaaagctgaggctcgaanactcattatcaccttcgttacatatgttcaaacgcaatntaataaaaccattanaatcatacgtagtgataatggtgctgaatttcttatgaatgaattttatgctcanaggggaatcatac

SEQ ID NO: 12306 - DNA, 386 bp, Glycine max
  unsure at all n locations
ggaggtgttgctgtatccaatgaatactctgagttctgttcnnttatcaagttggcccttttaacctgtggaacataagagaaacaaacacaaccacagatttttagattttgtaaatctggttcgtaaccaaaccaaccttcaaatggagtttttttgtgcagaactcttgtaggtagtctattcagcaaaaatactgcagtgtttgcagcctccgcctatagctcctttggcaactccttttcatgcagcatacaccttgtcatctccatgatacttctattttttctctcactcacaccattttgttgtggggtgtaaggtacggtgaattggtgctcaatgccaacttcttcacaaaatttatcacaaacatcatttatgta

SEQ ID NO: 12307 - DNA, 450 bp, Glycine max
  unsure at all n locations
gcttctgttggatcgagtggcctcagaataatttatataggggggttgaattaattattcctagacctttactaattaanaaattactcttctaaggcttttacttatgttgttaagagagtatggagtagaagagaaacttaacagaaagtaaaagcggaaattaaatgcacagcgganagtaaaagagtagggatgaaggaaacaaacacacaagagttnttatactggtttggcaacaacccgtgcctacatccagtccccaagcgacctgcggtccttgagatttctttcaaccttgtaaaaatccatttacaagcaaagatccacaagggatgtaccctcccttgttctctntgaacctagtggatgtaccctccactagaactgatccacaagagatgtaccctctcttgttctcagtcaaacccaagtagatgtaccgtctac

SEQ ID NO: 12308 - DNA, 300 bp, Glycine max
tctgtacctggtgcaagggtctgcggattgtgctcctctgctgaccaccatacagacctttgcccttccatgcagcaacctggagcaattgagcagcctgaagcttatgttgcaaatatttacaatagacctcctcaacctcagcagcagaatcaaccacagcagaacaattatgacctctccagcaacagatacaacccttgatggaggaatcaccctaacctcagatggtccagccctcagcaacaacaacagcagcctgctcttaccatcaaatgctgtggccaagcgaacatacat

SEQ ID NO: 12309 - DNA, 393 bp, Glycine max
  unsure at all n locations
ttcgagcgtctcgatatgtgatacgactgtatctgaagtctgagtttaaagttttaaccgttagaatttatcagacagctttcgttgttcaattntgagagtctcgacatattatgtgcccgaactcgacatccgtgtgaaatgttatgaccagttgaatttctcgagagcttccgttgttcaatttctagcgtctcgatatattatgcgctcgaatcagacctcctcgtgaaatgttatgaccattagaatttctcgagagcctgcatatttcaatttcgagcctctcggtatattatattaccgaatccggcatccatgtgtaatgttatgaccatatggaatttctcgtggacttccattgttcaacttcgagcgtctcgatatattatg

SEQ ID NO: 12310 - DNA, 415 bp, Glycine max
  unsure at all n locations
ctttaaagggaagtggtgtcgcctggtntctttcccgctcttctctttcgtaaaatntcttctcttatgtccacaatcttgtccttgtaaccctggtcaagaacatgacgttatgtaaagaactctaactcactcattggttctcaacaaaaattaaaaattactaagtggtaatcatagtttctattaatctttgcatgacataattgaaggatntaattatatgtactgacagaataaaatntattntatatagtgatcggttgataatataaaaaactttgcactnttntaattaaataataataataacaactaacatataanaattagtcaaaccgcgtaattngacaccatacaataatttctcgcanaaatatgtcacgcatactanggttngttattcttaataact

SEQ ID NO: 12311 - DNA, 449 bp, Glycine max
  unsure at all n locations
aaaaatatttgttttagttncttatatacaaaaaaataataagttatatattgacaaaagaacacagtatatttctcatttaaaataaaatatttctcttagaatttactttatgtcttactaatgtgtccgtggtctgtggatagcatgtcattaaccatcactctcgacaacataataattgttattaaaagatacataaataatgtttgattaaaatatttttcaatctataaaattatggagctnttataaaattaataattactttaatttgtttttgttcctgtctctaaaaaatatgagaataatggtatttatttattgaanaaagattanaactatagagtgaatagtctacatatacactcataatataaataatttttacactcttatttaatgataaactntcgttcaatcacatnattgttatcgtgtgtatatat

SEQ ID NO: 12312 - DNA, 367 bp, Glycine max
  unsure at all n locations
gaaaaagaggtattccttcttctcccttcttgcatcgtcaataacctcattgaccaccaaggtactatgaagaagatacctatctttcaagaaggtgttttgcttttgatcaataactccatttaatactttcatcaacctattggcaagtaattntgcaaatattttgtacaagcaactaacaagtgagatgagtctaaattccccaaggctntgtgggtcatctacctttgngacaagagcaatgaaagaagcattgctatcccttagaagcacacaattagagtgaaactcaattacaaacttcaaaatatcatcccttaataattttcaaaaagatttagaanattgaagtgtaaccatttga

SEQ ID NO: 12313 - DNA, 384 bp, Glycine max
  unsure at all n locations
cgttcaattggatacatccaccgcagaataaccggaccacacaaccgaatttccctcacaagatgaacaatgaggtgaaccatgatgtcaaaaaatgatggtgggaaatacatctctaactgacaaatgacaatggcagcctcattctccaagtcatccaattgatgaggattaatgactntactacatatggcattaaaaagaaagcacaaacgggttatggcaactctaactatgtcaggcaagatgccgcgaatcgcaacaggcaataattgttgcattaagacatggcaatcatgagacttcaagccaaccaacttaagatcattgannggcgacaggctcttgatatttgaagagtatccttgtggaactntgacattc

SEQ ID NO: 12314 - DNA, 350 bp, Glycine max
  unsure at all n locations
atatttttattattcaagcgtagttagtaatcgtggtagttagtaatgattntagttagtaatgatntgagttagtaattatattacttaaattttcaatcaggtaatataattagaattgatatttaattatttgtaattattttagttagtaattatatttaacataaaatataagtgaattcaagacaatattagatagtattatatagatgtatgtaattcttctaagtattatatagtgtaaaaataatctaatgttatattagatagtattagatagatgttatataaatgttacttgttatatatgggagtacgtagatgtgtttaaaacaaagtagataata

SEQ ID NO: 12315 - DNA, 430 bp, Glycine max
  unsure at all n locations
ctcagctttctttgagaaataaaggcttgctcttgttnttcacccctggtaaatgtcacattcttcttcaccaactcattgagaggtgatgcaattgtagaanaattangaacgaaccttctatagaagcttgctaacccatggaagctcctaatatctcccacactntttggggtgggccattcttggatggccttgattttctcagggtccaccgggaccccatttctaccaactacaaaccctaagaaaactatattatctacacaaaaggtacacttctctatatttgcatagaaggtgttnttcctaaggactgaaagaactttcctgagatgtcctaagtgatcatctaggctcttattgtacactaaaatatcatcaaaataaacaaccacaaatctacctatgaaatcccttaagacatgat

SEQ ID NO: 12316 - DNA, 400 bp, Glycine max
  unsure at all n locations
gcttgcacattgctgtttgatagaagaagagctttgatggtaaccttggtacttcgatatcaaacggtacatcgaagacaaggaatacccgtaagaggcctctgacaacgacaatggcagccggttttttcctaagtgggaatatcctgtacaagaggaaccatgatatggttntgcttcgatgtgtgaatgctagagaggctgagcaaatgctggtagaagtgtatgagggctcctttggaacacatgccaatggacatgccatggcctggaagattctaagagtagggtattactggctcattatggaaaatgattgttgcatccatgtgaggaagtgccacaagtgccaggcccttcaccgatatgtcaatgctctgctcgtacctttgaacgtctt

SEQ ID NO: 12317 - DNA, 364 bp, Glycine max
cccagctggcctcgaatcagaaatctgtacctgtcgcaagggtttgtggtttgtgctcctctactgaccaccatacagacctttgcccttccatgcagcaacctggagcaattgagcagcctgaagcttatgctgcaaatatttacaatagacctcctcaacctcagcagcaaaatcaaccacagcagaacaattatgacctctccagcaacagatataaccctggatggaggaatcaccctaacctcagatggtccagccctcagcaacaacagcagcctgctcctttcttcaaaatgctgctggcccagcagccatacattcctgcaccaatcacaacaacaacaccccaaaacagccacag

SEQ ID NO: 12318 - DNA, 386 bp, Glycine max
  unsure at all n locations
tattctaaagcccgattatagttgtaangcttctatcacatccaagcctaatgcctgcaaaccatgattgtctaatatnntcacggattgagccttcttgagcctattttaacattattatgacctggtcttgtgaggaaaaggcagtgatggttcnaatgttataaatagcttcaatagctattttgctagtttcatcttgggctttgatagcctttntagacatacccttgaggagtacaagtcttgtgtagaaacttgcaatgccaataggttgaacaacaatcaatataatggcanatctccatgcaatgattangcccattgtgcatgctatcaccactgctganatagtttgtaccaacagagccattctatctcccact

SEQ ID NO: 12319 - DNA, 300 bp, Glycine max
  unsure at all n locations
aagcgtcttgatatattacgggactcattcatacatccgagttattagttattgtcggtngactnttcttagaccttccgttttcaatttcgagcgtctcgatatattacagggatcaataggacatctgagttaaaacttattgtcgtttgatttttctccgagcttccgttatcaattacgagcctctcgatatcctacgggacacaatgggacatccgattcaaaagttattgtcgtctgaattcgctcacagcttcagttttcaattacgagcgtctccatatattactggactca

SEQ ID NO: 12320 - DNA, 301 bp, Glycine max
  unsure at all n locations
agctgaattgaaactaaagctctgagcanattcatacgacataatttgactcggatgtgctattgtgtcccgtaggatatcgagacgctcgtgattgacaacggaagctctgagaataatcaaacgacaataactcttatctcggatgtccgattgagccatgtaatatatcgaaacgctcgaaattgaaaacgaaacctctatgataagacaaacgacaataacttttgattcggatgtccgattaagtctcgtaatatatcgagacgctcgtaattgagaacagaagctctgagtcccg

SEQ ID NO: 12321 - DNA, 324 bp, Glycine max
  unsure at all n locations
gagcatgatattgcgtctataccgttgactgtttatcaggtatatgagcgggttcaacacctgaacactgtatttgggaagacccacacgaaggataaaagtcagagttgcatatggaagaagaggttcattntctttgatcttccgtactggtgtgatcttgacgttagacattgtattgatgttatgcatgtggagaanaatgtttgtgacagtgtgattgngacgctccttaacattcaaggaaagacgaaagatggcttgaatacccgtcaagatctagctgatatgggtataagatcacagctgcatccaaggtctgat

SEQ ID NO: 12322 - DNA, 360 bp, Glycine max
  unsure at all n locations
atcttgtntactctactttctcacacgatgaactttactggactctctgtatacaacatcaatgaataaatcaatattagttctatgatcatcttaggttcttaagcaattagccaagctatctagaggaagctcccttcaacttctttgtaacaggaagctccctctttntatattcaagggtagctagctatgggcaagctttaccttgctgatgggaagctagctaagtgttagtgtttggctctactgagctttaaaagattggctaagattntgttaaaacataagcacttagacaatgaaggaaagctggagttgctgcacatgatgtccaacgttatgtcaaggaataagatc

SEQ ID NO: 12323 - DNA, 370 bp, Glycine max
  unsure at all n locations
tctgcagagtggaatcatttatcgtatctccgatagccaatgtgtgagtctcgtcccggtagtcccgaagaggaccggccttaccttcataaacaatgagaaggaggagttgattcctactcgggtgcagaacagttagagagtctgcatcgattataggaggctgaactaggttaccaaaaaggaccattttcccttgccattcattgaccatatgcttgaacgcctggcaggtaaatctcactattgtttccttgatggttnttctggttatatganaatcactattgctcctgaggatcaggaaaagaccacattcacctgcccctttggcacttttgcctataccgtgcaatgcccctggtacctt

SEQ ID NO: 12324 - DNA, 412 bp, Glycine max
  unsure at all n locations
agtgtgtgntaaatgtctaaaatataaagaaaattatgtaataatgtttctttgaagaatatnttatcagtgaaaataaaatattttgaatattgaatttgtagtatttttttaattagattaggttggtgttaatgatttattagtgtgttaataattcatgaacgtttcaactttcatttaaaaaaattagtagatcatatttatttgaagaaagtattttgagtatgaaatttattntaatatgaagttgtagtatttttttaattagattaggttcattnttttgtgttaaaaattgataagcgttcaagttgaaagtgttatttgatgatgttntnngtgttcttgtatcatatttanattaatatatttggtagtaatttgtaattacctattttcattttgaagt

SEQ ID NO: 12325 - DNA, 321 bp, Glycine max
  unsure at all n locations
taataattcanataatacttttaatatattaagattcaatgataaatactcttaatatatntntagtttaattatttattaactcttttaatcgaaaataatatagttcgatttaatatatacatgttttgtgtcatgtaaatattaatattgtctgatgtgtatatgattcatggggcgtgataacgtgatatattgngattatgagagtgtgatgaactgtgtgtaagagacaagtcgagtatatgttaaattatgagatcacgcgtgtattgagatattgtgtggattaagntatgagttatgaattgtacaatcaca

SEQ ID NO: 12326 - DNA, 451 bp, Glycine max
  unsure at all n locations
ttaagttcttcctcaaaactgtcctaagcaaagntcctttgtcctattagcaacttttgtttgcccatcggtttgtgggtgacaagctggtgaaaataacaatttactgcccaacttgctccacaaagtcctccaaaaatggcttaggaacttagagtccctatcactaacaatgctccttggcaaaccatggagtctcacaatctccttgaaaaacaaatcagccacatgggaagcatcatcaacttttntacatggaataaaatgagtcattttagaaaacctatcaacaaccacaaaaatggaatctctaccatttgcttgttttggcagccacaaaacaaaatccatggataaatcaatccaaggatactccgaaattggcaatggagtatacaatccatgaggctttacttagactntgcctttntacatacaatgcaatgttgac

SEQ ID NO: 12327 - DNA, 300 bp, Glycine max
  unsure at all n locations
cgagacgctctanatngaatgttgaagctctcagcanattcacacgacaataactatntacttgaatgtctgattgagtcccgtaatatatcgagacgctcgaaattgaatgttgaagctctcagcacattcaaacgacaataactattttactcggatgtctgattgagtcccgcaatatattgacacgatccgaaattgaatatctgacttctgagcaaantcaaacgacaataactctgtactcggatgtctgattgagtccgctaatatatcgagacgctctaaattgaatgttga

SEQ ID NO: 12328 - DNA, 217 bp, Glycine max
  unsure at all n locations
gctatatatatcgatacgctcganataaacatcgaattctctcgagatattcatatggtcataactnttcacacgaatgtccgattctggcgcataatatgtcgagaggctcagaatcgaacgatagaagctcttgagaaattcatatggtcataactnttaacacggatgttcgatccaggcttattatatatcgatacgctcgaaattaaacatc

SEQ ID NO: 12329 - DNA, 313 bp, Glycine max
agcgtgccttgtcccttgatatattcgagttttcatggtgactatgaatgacaaaatccttgtgataaacgtagtgatgccatgttatcaaagcccgtactaaggcatacaactccttatcatatgttgaatagttaagggtcggaccacttaactgttcactaatataagcaactggatggccttcttgcatcaacacagccccaatcccaacatatgaagcatcacactcaatttcaaaagatttttgaaagattggcaacgcaagtatggcggcattagttagcttttgcttaagaacatagaaagcttc

SEQ ID NO: 12330 - DNA, 432 bp, Glycine max
  unsure at all n locations
agcnttgcaatattgagaatgtgttctttcattttagttgtcaaagttgataagttcgtttcatttttctaattttattcgtttaattgtttgtattctgataattaaattagttattttagatattataaaatttgtacaaagttttaggtatagtaaattagtagtgtattaattttctatcttaccttagttatagttttaaatggtaaattagatttactttgatgatttaagttttgtacggtaggttcatgtttagttatagttttaaatgatattagttctagttctagtttgaaataatattagttctagttttaattgtaaatgatattagtcttgtacgttaggtttagttntagttaaatatatttaaattttttatggtaggttagttatatgatacattgtattaattntgcgtatata

SEQ ID NO: 12331 - DNA, 443 bp, Glycine max
  unsure at all n locations
tgataaaaaagaatgtattctctattttttatgtacaaggaaaagggagaaaaaaatanannaataataactgcggcgctctagtctcgggcacattaacgtctcttggcccgcagacatttcaattcccacttattcggaatcgacacagaatangttagttcaggtttagagatngcttatatccttggtttggatntagaannatatttaatccanataaatggaataatggtaattgacgtaattggatangggtgtttacttttttgctaatcattaagaattaatgttatatatanaagtgtaaataatatgaaaactatatctataattacacttatttctatattaaacaacaattgatatattggtagttaatctcagtaataataatttatanataaagcggcaacatatatttattaatattatatttatat

SEQ ID NO: 12332 - DNA, 454 bp, Glycine max
  unsure at all n locations
catgcaagcttctggcccagtgngcccgtaaaactcactatgataagcggtattattaaaccagacaaagcatcaagcaataaaaccaaaaacagataaagcacctaaactataagataagtaagcttctccagaccatacaagtgcacgccgagcccatgcaaaaggtttggttaagatatgccagattccaccaagtatacaaatggaacccaaccatacatgccccccaattatatcttccaaatcgtccacactaacaatccacccttctcccccaaaaggtgattttaataaatatccaaatataatacttggactaagggtcaaattggttatttttcttacatctccgccccccggagcccacgtatcatatatacctncaaaataaagagccttgaatactagaagaaacgcacctatacctaacaagattaagtgaatacccaaa

SEQ ID NO: 12333 - DNA, 378 bp, Glycine max
  unsure at all n locations
acttgagcatgcttgtagtatgaatagataaattatcacgtggttctagattactgcggtgtttattaatctatgatacatacataagattattaactctctcaaagatcataacatctaaatgatattttttcacatatatagttgacatngaaatntgttaacaagttatatatacattatcgtaanatatatacaccgcattattttatgagtgtgttgtaactaaaaacataaataagtgtatattaacacatgtctataagatgtgttaattcacacttatntattctttaattagaataagtctatatattatagctaaagatatctcgaatacatccagatgtacttataattacttaactatatcatata

SEQ ID NO: 12334 - DNA, 459 bp, Glycine max
  unsure at all n locations
tcacctgcggcatgcaagcttgctaacccatggaagctcctaatatctctcacactntntggggtgggccattcttggatggctatgattttctctgggtccacttggaccccatttctaccaactacaaaatctaagaaaactatattatctacacaaaaggtacacttctctatatttgcattgagggtgtttttcctaaggactgaaagaacttgcctgagatgtcctaagtgatcatctaggctcctactatacactaaaatatcatgaaaataaacaactacaaatctacctatgaaatcccttaagacatgatgcataagcctcataaaggtgcttggtgcatttgtgagcccaaaaggcatcactaaccattcatacaaaccaaacttggtcttgaaagcggttttccactcatcaccctttttcatcctggattggtgataaccactttta

SEQ ID NO: 12335 - DNA, 434 bp, Glycine max
  unsure at all n locations
agctttatatctttctggcgccgagctatnctcccgcaggacctcccctacagtatcgtcgccgcagtagagtctaaccaccaagttcgggatggattggtgtggttcctctacgcctaggacaccagaatatcgaaccatgaacgaagaaaggcatgagataaaagcaaatatattggctattcattgtgaggccctaattctcgactggaggggacaccanaggcctatgcccttccattccttggatagatagagaggaggggcagagtttttggttatttcatgttgtcaaagagttgaacaatgaaaatggatgactagtgcctgatcgaattgatcggatcatgtatgaacaaggttcacgtctaccggtctgttaggatgcctcagctgcatacatcactgcacttccacttgacacctatcattaa

SEQ ID NO: 12336 - DNA, 444 bp, Glycine max
atgctatcagtcacctgcggcatgcaagcttctatatttgttcgttcctaatttctctacaattgcatcacctctcaatgagctggtgaagaagaatgtggcatttacctgcggtgaaaaacaagagcaagcctttgctttgctcaaagaaaagcttactaaggcacctgttctagctcttcctgacttttctaaaacttttgagctagaatgtgacgcctctggagtgggagttggagctgtattgttacaaggtgggcaccctattgcttattttagtgaaaaacttgatagtgccaccctcaactaccccacctatgataaagagctttatgccttaataagagccctccaaacttgggaacattaccttgtttccaggaatttgtcattcatagtgatcatcaatcacttatgtacattagaggacaaagcaagttaaac

SEQ ID NO: 12337 - DNA, 377 bp, Glycine max
  unsure at all n locations
catgcaagctntaattctgatgagcatgtctgattcattctgaaccacagaaatagcattacactcaactaaacttcctcgagacaatgcatcagccaccatattttcttaaccctgcttctattctatgcaaaaatcaaattctatgagtttaactaaccatttctgctggaatgctgtagctaacctctgatccaaaatatacttgagactcctatgatcggttcttattacaaacttcttaggtaacaaataatgtctccacttctgcactgcaaagacaacaaccagcaattccttcttataagtggatagggactgttgctacacattcaagctcctgctgatgaaggctatgggatgattgtcctgcatca

SEQ ID NO: 12338 - DNA, 431 bp, Glycine max
  unsure at all n locations
agcttttagaatatataataaaagaactatgtctattgaagaataaattcatgttactttntatgagactaactctattagcccaagagaggatatacttgatgatattacaaatactttagaagatacgcttattcatgaagaagtccacaaagacaaagaagacaaaaatagtagagatgctcaatccaaagaaaatcaaataaatgtggatcttccaacggagtggagaacttcaaggtaacaccctcttgataatatcataggtgacatctcanaagggataacaactcgacactctcttaaagatgcatgcaataacatgagatttgtctctttaattgaacctaanaacataaatgaagccataattgatgaacattggattatngctatgncagaaagaataaatcaatttgaaagaaatcaag

SEQ ID NO: 12339 - DNA, 288 bp, Glycine max
  unsure at all n locations
gctatatatatcgggcgctanaattgtattcagaagctcttgagttattcaaagggtcataactnttaactcggatgtccaattcatgcgcatcacatatagagacgctaaaaaatgaacaacagaagctctccagaagttaaaacggccataagtcttcacactgatgtccgaattaagcttatattatatcgagacgctcaaaaattaacatcgtaagctctcgagaaattcaaatggtcataacttttcactcggatgtccgattcaggcgcataacatatacag

SEQ ID NO: 12340 - DNA, 449 bp, Glycine max
  unsure at all n locations
ttcgatagcgggaagaganaaaagattatccatagaaaaactaaactcaagccgagaagcaaagaagcaactcacggtttgcgaataattttgaaaaggagactattagaggccaggagaggtgcaacagagagtacccggtgaaagcgcttaacaacttttgaaagtcagacacgacgtcattctcgccgccaccaccgtgctgtgcagaggcaacatcgactgtgtgcatctcagctcctgcgaaatcctacaacagaccaacgacaacaacgacaaatcgataattctaaggcttatttgcgattaggagcaaaaacgaacatcgtatgacgaagggaaacctggtcaataaggactggtgaatatgagaaaaggaggaagctggtttggagaatgaagaagcgcgaatgtntgaattgatggctgattttatagatgaaattgat

SEQ ID NO: 12341 - DNA, 388 bp, Glycine max
tgctattttcatctccttacttcttcaaaaacatgtaaaatgatactattgcccatccctgtttttctacaggccttcccctttcttgcacaccacttttccttctcttgatatatatatttttatttaatttaattatgatatagtttatcattttaactataactgaatgaactatgacacagattatcatatgatgacacaagctatcctttcttaataataatcaacataattattatacaaattagcatcataatatagcaaatttgcatagtaattaacttgagtatttttataaatgataactcctatcataattaaatctaattggtattcattactattcaaaaaatggaattttaatgtataaaagataatttgatca

SEQ ID NO: 12342 - DNA, 387 bp, Glycine max
agcttccttattatgattcctaaagaagctatagcttagctacacatacctctttaatagctaagctcaccttcttaagatgagaagctagagcttagctacacacccgctataataactacgctcacccccatggcaaaatacatgaaaatacaaaaaaaatccctactacaaagactactcaaaatacctcgaaatacaaggctaaaaccctatactactagaatggcccaaatacaaggcccaaacaaaggaaaaacctattctaatatttacaaagataagcgggctcatgcttagcccatgggctcaaaatctaccctaaggctcatgagaaccctagggccttcccttggatctctagccgaatctacttggagccttcta

SEQ ID NO: 12343 - DNA, 296 bp, Glycine max
  unsure at all n locations
taatcattgaggccttatggatcatntactntangaatcaaagctagaaaagatgcattgcttccttttggaaagactccattggcatgaaattcattcaagaatctaagcacatctgattntatgagatcccataattgtttaataaaattaacattcagtccatctggacagggctttcggactaccacaatcccatatagctgccttaactggatcctctttgaaatgagccaccaacaattcattatgttgcggatcaatggacctgaatctaacctcaatctctcccactc

SEQ ID NO: 12344 - DNA, 437 bp, Glycine max
  unsure at all n locations
tcttgtgaactatagctctgagatactgctctactatcctgttcagcacctctgtttgtccatcgctctgcggatggtacgcagagctcatgcgtaaatgagtgccgctagccttgaacagctcttgccaaaacttgctgataaagagggggtccctatcggaaaccaagcttcgaggaatcccatgtattttaaccaccatgtcgacgaacaaggatgccaccatatgagcagtgtgagacgttggtaacattcccagatgaatccccttcgaaaaacggtccaccaccacgagaattgtggtttttcgtgatacgccggcaggccgacaatgaaatctaacgagaggtcctcccaaggtcgatggngcaccggtaaggggcataatagtcctgcgacgcgttgtgtctggtacttagtgacctgacaatccatgc

SEQ ID NO: 12345 - DNA, 328 bp, Glycine max
  unsure at all n locations
gcagacaatcgcgttccacggtttccaacggcacagcccgatgtaatggcagcgaacccgccaagcaggccgttacacacgtcaatcacgttccagtggccaaccaataaccgcttgctgaacaacgtcgtcagagccgcagtgctcccagccaatgtcgtcgtgacagctgtcctccctatagcgctccattgaccataatacccttcacttntcatacccttgtctattgtcacaaacgaaccagggttgaagccgtaccagccgaaccataacataaacgtaccaagcacaactaaagacgcgctgtggccacgtaaagcaaccg

SEQ ID NO: 12346 - DNA, 347 bp, Glycine max
  unsure at all n locations
aagattactcattgtatagaattctgcanagatattctccattattggcatgaagtcaggatcttggcacatccaaatacaagaatctgataggtacaatactgtcttcactgtacctttcgggcaatatgaatagaacgttatgccatgtggtttgaagaatgccccttcagaattccaaacaatcatgaatgacatctttacatcctattcanaattnttcattatctatatagatgatgctgtaactgtttctcacgatattgatcaatatctttaacatctgtagaccttcattcacattatcaaacaaaatggtcttacgggtctccaatcgaacatcaatc

SEQ ID NO: 12347 - DNA, 280 bp, Glycine max
  unsure at all n locations
ctcaagagcttccgtngctcaatttcgaacgtgtcgatatattatgcgccggaatctgacatccgtgtcaaaagttatgaccattngaatttctcgagagacttccgtgttcaatttcgagcgtctcgatatattatgcgctngaatcggacatccgagtgaaaagttatggctatatgaatttctcgacagcttcccgttgttcaattttgagcgtgtcgatatattatgcgcctgaatctgacgtccgtgtcaaaagtatgaccatttgatttctcga

SEQ ID NO: 12348 - DNA, 304 bp, Glycine max
  unsure at all n locations
tgctntcaagaatttcaaatggtcataattttgacacggaggtcagattcaggcgcctaatatatcgagacactcgaaattgagcaacggacgctctcgagaaattcaaatggtcataacttttaactcggatgtctgattcaggcgcataatatatcgagacgctcgaaattgaacaacggaaactctcgagaaattcaaatgctcataacttttcactcggaggtcagattcaggcgcataatatatcgagacgctcgaaattaaacaacggaagctcacgagaaattcaaaaggtcataac

SEQ ID NO: 12349 - DNA, 423 bp, Glycine max
  unsure at all n locations
agctnttaacattggttatntaggactntcatcatcagttattaaccgatgatgaaagtattatcgttaacatcggttntgttgaaaactgatgttaacgtaaaattacaacatcggttttttaaataaccgatgttgttagtattcgtcaacatcggttttttaaaataccgatgttaactaaaactgatgttaacgttggtagttaacatcggttttttaataaaccagtgttgttagtgtaggttaacatcggttttttaaaaaactgatgttgttagtggatgttaacatcattntttttaaaaccgatgttgcttttaggaatttttttaatatactgtctgctttttcaataaacccaaaaattaagctgcanatttaaattagatcacacaacacaacatatataattttcattct

SEQ ID NO: 12350 - DNA, 310 bp, Glycine max
gaccaccatacagacctttgcccttccatgcagcaacctggagcaatcgagcagcctgaagcttatgatgcaatatattacaatagaccttctcaacctcagcagcaaaatcaaccacagcaaaacaaatatgacctctccagcaacagatacaaccctggatggaggaatcaccctaacctcagatggtccagccctcagcaacaacaacagcagcctgccctttctttcaaatgctgtggcccagcagacatacattctcaccaaccaacacagcacacctagaacaccaacgtgaggccctcacaac

SEQ ID NO: 12351 - DNA, 478 bp, Glycine max
  unsure at all n locations
agctgttatgatctgtgtgcacaataaattctctgcccaataattaatgtctccagggctgaatacaaagcacaagggccatcaattccttctcatagacagattttgccagattcccatcagataaagctttactgaagaaagcaataggtcgtctctgctgcattagaacagcacctatacctctgccagccgcatcacactcaacttcaaaaggtaaatcaaaatttggaagaattagcacagggggggaagtcatgatccccttcatctcctcaaaggccttgacagcctctattccccaagaaaaattgtctttcttaatcaattcggtgagaagggttgctattttaccatacttctggataaaccttctattataccctgcgagactcaaaaaaccacgtacccccttcacattctttggtgtgggccatgccanaatacacttcacctttttatgggccactgcccacct

SEQ ID NO: 12352 - DNA, 459 bp, Glycine max
  unsure at all n locations
tctggtaagctactgggctgagcntttgaatgactnggaaggtgccgtagtatctntatgcaagtttcgtgtatggtgcgcccacgacggtggattggcgtcttggatggagttttaccagaaccatgtctccttcngtgaagtggagttcgcgatggtgcttgtctgcaagttctttcatgtgnttgtgggccttgaacagtttgtgtcgcaagctcttgaacattaagtcgcgatcagttaaccaagtgtcgacaacgtctatatttgaatttctcgccacgtattgaggaaggttgtggtggttcttcccaaaggtaatctcgtaaggagacatgcctgtagcggagtggacagaggtgttgtatgaccactccatccacattangaagcgaccccatgttgagggtttgtcgtgaacgaatgccctgaggtattgttcaacgactctatttatca

SEQ ID NO: 12353 - DNA, 562 bp, Glycine max
agcttaagctccttcaactgcacattgttcttaatatttgaagagtatccttatggaaccttcacccgacgaagacactgacaaaaacttatcttctccttcttggacaaagtatggcaggctggggggaagtaaattttcttcccatcagaccttggatgcaactgtgatcttatacccatatcacctagatcttgacgggtattcaagccatccttcgtcttgccttgaatgttaaagagcgtcccaatcacactgtcacaaacatttttctccacatgcataacatcaatacaatgtctaacgtcaagatcacaccagtacggaagatcaaagaaaatggacctcttttccatatgcaactctgactattatcctctctttgggtcttcccaaatacagtgttcaggtgttgaacccgctgatatacctgctcaccagtcaacggtttcagcgtgttagaaagcggcgatgcctactgtagactggttttcttccatgtttcagttgtatgtaacttgcattttcttcacagatggggcatgcatgatgacccttaaca

SEQ ID NO: 12354 - DNA, 355 bp, Glycine max
  unsure at all n locations
ggatgtctcagtcaactcagtagagtctaagattatctctgctcaacctttagttgcttcaggttcagacgacagtgatgaggcgaagcccaacgatggtccaaaacgatgcagcatctgcaataagcgggttggtttgacaggatttaattgtcgatgcggtgaccttttctgttctgaacatcgctactcagacaagcataattgcccatttgattatcgcactgctgcaagggatgccatagctaaagcaaatccaactgtcaaggctgagaaacttgttaagatctagatttgntgtctctacagttcatgctctangtgctagtatgctcattgtngtcctcatgagatg

SEQ ID NO: 12355 - DNA, 453 bp, Glycine max
  unsure at all n locations
cctgcngctgcaactatttgataacagcggatgatcattcttgtgtcaaagctacatcatcttatctggatcacagacacttagctaagctataaatggtcatgagtgagcaggtgaccacactgagaagagtggggaatacatgctaatgtcattccacatgtggagtatgagaaggagcaaagctaatttcttcagaataaccaaagttctaggagggttgttagcctttggaaagtggtttgatcagatatgcaattggaaaaaccctctcacatccatactcattcatatccgtttcataatactggttctttatccagagctaatacttccaacaatttttctttacctttttttggttggaatttggaattttcgatggaggccaagacactctcctcatatggacacaagactatcacatgctgatgctgctcatcctgatgaact

SEQ ID NO: 12356 - DNA, 403 bp, Glycine max
  unsure at all n locations
atttccaagagtgatatctattcaaatggcnnatgaatgggcatcacaggtctatttatatgtgacttggagacacgaatnnaaagagagttttcattgcccaaaaagttttatcctctcaaaagattaagagaagttttctgaactgaaatgtcttatcctctcaaaaagattccttggtcaaccacttgcatattcaataaggaatattgattgatcttcattgtacaatctatctcttttaagagagatntcttcttctcttcttcttatttctgaaaagggattaagagaccgtgggtctcttggtgtagaggattcctgaacacaagggaagggttgtccctgtgtggctcaaactttgtataaggagttttacacagagagtggcacatctcaagtg

SEQ ID NO: 12357 - DNA, 448 bp, Glycine max
  unsure at all n locations
agacacgttacttggagtaatgtggtgggttcttaaatataatttcaaatggngattttcatttgttagatcatgttggtgaatgccacaatttattgagggaggactatggacatggtgaatntttggaggggacatagaagattgcaacttatacacctgatcttcagtctttccttgcagaagaaccgctcccgttgtcaggctctttacctcaaaatgcaagggaaaaattcaacagacacagagttagtttgacgtaattgagaaacagaaatgagattttgagagacagagggaacatagtatattggaaagacgaagagggatggtaggggtgttcaattcagttgagccatgatgttgaatgaaaagacccttatcattggcaatgtgaagctgatccggaccagtgcagtcattggaaatnagagacaattgatgatgt

SEQ ID NO: 12358 - DNA, 487 bp, Glycine max
  unsure at all n locations
agcttaatgaggcaaccaggaaagatcattttcccttgtctttcatggatcagatgctggagcgattagcaggacagtccttctactgtttcttatacgggtattcaggatacaatcagatagcacttgagcctaaggactatgagaagacaacatttacatgcctttttggtgtttttgcctatataaggatgccatttgggttatgtaatgcacctgccactttccaaaggtgcatgctagccatctttgcggacatcataaagaagtgcatataagtcttgatggacaatttcttagtgcttggtttatcctttgattgctgcctgacgaatttagagatggtgctgcgaagatgtgtcgagaccaatctggtactaaactgggagaagtgtcacttcatggttcgagaggggatagtcttgggccataaaatttcagccccgggcattgaggtggataaagcanaaattgacatcattgaaaa

SEQ ID NO: 12359 - DNA, 669 bp, Glycine max
agcttgctgagcataggctactgcacacgatctcacattgccattatgggggaaatgttgacattttgcagtaacattcatggactgagctaattaaacggatcggcaaatctggcttaccttgccatgtgctttgagtttctctgagtttttgtttcctcattttttgtgtaatatagggcggaacaaaagaaagaaggaaggcttagccaagtcaacagaagattcacttaaaaacatgagttaacatttcacatgtatactctctttcctaatttggttttctttctggtaaaattcgtgaggaagtcacaataacaaatagtttttcactataaagtaattatggtaatatttgttgtataaaatatttaaaatgagaattttatcataaaaatatttgcacttatcttggtaataaatactggtacatgcactaaattatatatctaataagaaattcatatgtgtatatcttgaacattgaatatttagaatgagaatgttgttgaactagctgtactcatcctcctataaatcatattttgggtgtgttgtcatgttaaaagtataaagtacctaattttgttgtacaatttaatcgatgattctaatggttcttcatctaataaaaaatattaatgtttagatattccttgcgaataatac

SEQ ID NO: 12360 - DNA, 504 bp, Glycine max
agcttctggatatattatgcacctgaatcttactttcgtttgaaatgttatgaccatttaaatttctcgagagcttccgttgttcaattccgaccttctcgatatactatccgccagaatcggacctccgggtgacaagtcatgaccatttgaatttctcgagagcttccgttgttcaatttcgagcgtctagatatattatgcgcctgaatcggacttcccggggataagttatgaccatttgaatttctcaggagcttctgttgttcaattccaagcttctcgatatattatgcaccttaatcggactaccgtgtgaaaagttatgaccatttgaatttctcgagagcttccgttgttcaattccgaccttctcgatatactatacaccggaatcggacctccgtgtgacaagttatgaccatttgaatttctcgagagcttccgttgttcaatttcgagcgtctcggtatattatgcccctgaatcggacttccgtgtgat

SEQ ID NO: 12361 - DNA, 489 bp, Glycine max
  unsure at all n locations
agcttgtagctctttgtcattgcaaatcatgcttgcttggcggtagtagtggttcacataagtgcggacccaggtctcaattgcagaccacatcaaaagtccatccgttgcataagggtagtcttcaattaagagctctacaccatttggttgtgttgggtctggtaccgccattcccctgcgcatgagatctgcagggaggccctccatgtcaaagctccacccgtttttgtatgctccacaactgatctccatgcagtagcgcccaggagtaaaacaagactcaatgattccatcagcattgatcagtttctggcgagctaaagcattgatgtctaacgtgtacctcatgtgtggatccaacagcttaaagacacgatgcattgcacttaattgcctatgagcaaacaatattaaatggttccatgcccgcatgtgtgcgttacctgtatacaattaatttaccaaaatttatcccacancatgcat

SEQ ID NO: 12362 - DNA, 583 bp, Glycine max
  unsure at all n locations
agcttgaaggcaaactggatgcattggtttacttgtttacccagctggccttgaatcagaaatctgtacctgtcgcaagggtttgtggtttgtgctcctctactgaccaccattcaggcctttgcccttccatgcagcaacctggagcaattgagcagcctgaagcctatgctacaaatatttacaatagacctcctcaacctcagcagcaaaatcaaccacagcagaacaattatgacctctccagcaacagatacaacccttgttggaccttgtggcctcaataatcttaagagggataggcttagaatacagaagaagcaacaccaatcaatttaacaatgttctttaaacatgcaagacacaattgattgcaacanaataaataagataagggaagagagaatgcaaacacagttttatactggttcggccacaacccgtgcctacgtccaatactcaagcaacccacttgagattccactatctttgtaaaatctttaaaagtctgacnccacagggcaacccattcttttgtcagatgcttacaacaagagactacagtctcttaccaatctcattg

SEQ ID NO: 12363 - DNA, 619 bp, Glycine max
  unsure at all n locations
agcttgtttgaacttataacaatggtttatgagttatgaccttttataagtttttaacaacgtttaataagtttcacaaaatcaaatataatttattttaataaattttacagtgatatttacaaatgagttttactaaataattgcttgattaagttatttatctaaatacatccaaaactaattgtcattcataaaacaccactaatgtgattgaaataatttcaaaatccagtgggtcagaaaataaatgataaggaaaggataaaaaactgccttgaaaatttagagcatgtataacaatgaaatgagactagctttcatgtaatgtcgctaaagaaaaacggatgttgatagtaacaaaattgtttctaaaatgctggttgcaacaagttatctttggttctttcattttcagtatcaagcatgtggtctgtgcttcaacaaggatggatttaaaggttgtgaatttttgtataggagacattatccagacaaacacatggtccgtgaaattgtacactgatactttntaatgtaagaaaggttttcaagttatatctaancgaattagattcgtatagcgacantattctatctatttctttaatttattttt

SEQ ID NO: 12364 - DNA, 550 bp, Glycine max
agcttgatgataaaagtgagaagtacatgtttgtgggttacgactcaagatccaaggggtacaagctctataatccaaatagtagaaagatcgtcataagtcgcgacgtggagttcgaagaagaagattgttgggattggagtgttcaagaagataagtatgattttcttccttattttgaagaagatgatgaaattgaataaccaatcatagaggaacatattacaccacctgcctcaccgacaccaaggctggatgaaacaagttcaagtgagaggacaccgcgactaaggagcattgaagagatttatgaggtaaccaaaaacctaaacgacattaacctcttttgtttttttggtgtttgtgaacctctaagctatcaagaagcagcgaaaaacataaagtggaaagacaccatggacgaagaaatcaagtcaatcacgaagaatgatacgtgggaacttactacacttccacgaggacacaaagcaatcggagtaagatgggtgtacaaggcaaagaagaatgctaaaggagatgtggagagata

SEQ ID NO: 12365 - DNA, 609 bp, Glycine max
  unsure at all n locations
agcttcttgtggttgaagaacttgctccagtcggtgttgaagaggtggcgacatggcgtgccgcggtagatgtggtggaagcgccactcaacgccgtggatgtcggcgacagagaggagctggataggtggatcggcataaaagtcgagtggagggaagcacaagtcggcgcaaaagcacggcacggagaagccaccgctgttgttggcgtcggagggagtgaggatcttcacaaacgaaacgacgccgttggtctcgcggtctttatcatcattgtcatttcgaacctccttggtgttgttttggaaaggttgttgttgtgattgttagaggggagtgaggaggaacttggcggggacaaaggggagagagcggataagagggttgtggtaatgcgagggagaggcatgctccatgtgaccctangcctaggggaagcagtaaaccctattcacacattaattttgggaatgagaacgaagacgagttntaagtaaaacccgtcgtaattttcattccattaaattacaagattgccaacaacatacattctaagacggtnttgtataatcaccttagaatgttagtcataaaaagattttttattta

SEQ ID NO: 12366 - DNA, 505 bp, Glycine max
  unsure at all n locations
agcttggacaatggcagggagtcgcaacctacccttcgacgggagggcgacacaagggctcacgggtgcgtcttccaagggaggaaggcgcgcggagtcgccaccaatgttggttaagttgtttttatctttttttttgcaagatatattttaaccgaacaaaagtcgtttaaggcgttggaccattaaacgatcttttgattcttttgaaaggagagaaacgttaaggcgttggaccattaacgatctctgggtagagaaacgttaaggcgttgaatcattaacgatctcttggggtggtcgacaaaagcggggtttttgctcctacgtatcctcaattgcgatgaggaaatcagacctacgtagttcttgcaaaagcggtaaagttatgtgttgattttatgcttttgaacggtccatgttaactgataaaagcaaagaggaccgtttaaggcgttggactntaaaacggtttcaagtgatttttgcagacaaagcttgattt

SEQ ID NO: 12367 - DNA, 385 bp, Glycine max
  unsure at all n locations
gtataatatatgtatgagcacatatgtaaaatagagtatatcagattcctcttaatctcaagaggatcaaaatacctcacgctcagtaatggggtaacgacaagagtgacaccgaaagcagtctggatgaaaataattatgaccaactcctaaacaattgccatagagtatctcttggttgcaccctccacatgttctattatgcgattgcatactgcacattaccagttgtcaataagaaatgattgagcacggtcatcataatgcattagcatcacaagaatgaaatcaaaattaattacatgtatggagaagtcaacagagaaatcaaaacttattttaannatttgttcaaatttatgctaacaacacaatgacatacata

SEQ ID NO: 12368 - DNA, 333 bp, Glycine max
  unsure at all n locations
ttcacaaatcatctataaaaacttgctaagccaggaaaactcctcacctcagtcacagacttaggtgtaggccattcttgaatagccctaaccttcatctcaccaaactgcactgcctgtgaacttacaacccatcccagaaacacaacatggctagtacaaaagatgcatttttcaacgattggcatacaattgttcttctctacgcacacacaggacaaattntatatgatcaatatgcaaagtctgtgaagcgctgtagacaataatatcatcactgtacaccacaatgaactttcctatgaactctctcaagatatggctcattaatct

SEQ ID NO: 12369 - DNA, 294 bp, Glycine max
  unsure at all n locations
gagtcccgtcatatatcgagacgtctcgaaatgaatgttgatgctctgagcaaactcaaacgacaataatatttacttggatgtctgattgagtcccgtcatatatcgagacgctcgaaaatgaatgttgatgctctgagccaattcaaacgaccataactttttactcggatgtctgattcagtcccgtcacatatcgagatgctcgaaattgaatgttgaagctctgggccaattcanacgacaacaacattttactcggatgtctgattgagtcccgtaacatatcgagac

SEQ ID NO: 12370 - DNA, 313 bp, Glycine max
cttgacgactgcatataactttatctgtccgccatactacatgaaactcacagaatcctgcatgaaagaccgcactatgcgacaacaatgcggcacagtggatgaaaatggcgccacatagggaagagctggtatgatatctgaagtctgtatctggaaagatagcacatgcgtggaatactcatacatccttcttcatcaacatctgctcaaagttatcagccacaaccgcctccgcaatctgggtactacagtcacacaaaagcaggtcatggtactaattcctatgtttgcgcataacatcaagctacgc

SEQ ID NO: 12371 - DNA, 236 bp, Glycine max
atggtgatgtggatgatttctccagaatgacctgggtcaactttatcagagagaaatcagaaacctttgaagtattcaaggagttgagtctaagacttcaaagagaaaaggactgtgtcatcaacagaatcacgagtgaccatggcagagagtttgaaaacagcaggttcactgaattctgcacatctgaaggcatcactcatgagttctctgcagccattacaccacaacagaat

SEQ ID NO: 12372 - DNA, 616 bp, Glycine max
  unsure at all n locations
agcttgagaagtaaatttgtttttgccacataaacttcgaaaatgtttatggattcagaaatttattagacacatataaattgatcaaattaggtgtacaaattaagggccctatcaatgaaatccaaaaatgatttaaaagtatagattaatatacaattagtgatttgagttaatagttattaattaattttntaattttaatttttaatttaaaattaacaacaaattaattgtttataactctagagaatgccacgtgtcaacatttttttttatagaaaatattcttgtatgtatagactatagattatatccgtaacaattgaagacggatatcacaagttttactacaatttatatacattgcttaactaattgagcgagacatatgacaaaatatagaaataattatttttaataaaaatagaaatataacacattttctattgtgttttaattaaaatatagaaaaattataattctttgtataacattatagtttattgtaaacaatatttttagtatatattatgtgtgtgtatcattaaaaacaataatctaaattatgacatattntttggtagaatatggttctcatatatcaatgataact

SEQ ID NO: 12373 - DNA, 388 bp, Glycine max
  unsure at all n locations
ctcttccctattaagatcccttaagaagctagagcttcgctacttatacctctctaatagctaagctcacctccttgatatgagaagctagagcttagctacacaccccctataatagctaagctcacccccatgacaaaaaacatgataataacaaataatagtccttattacatagacaactcanaatgccccgaaatacaaggctaaaaccctctactactagaatggccaaaatacaaggcctggacgaaggaataacctattctaatatttacaaagataagcgggctcatacttagcccatgggctcaaaatctaccctaaggctcatgagaaccctagggcctttccttggatctctagcccaatctacttggagtcttct

SEQ ID NO: 12374 - DNA, 279 bp, Glycine max
  unsure at all n locations
ctccgcttaacatcagaccacttccaggtgctggaactacttctcatggacttgatggggcctatgcaagttgaaagccttggaggaaagaggtatgcctatgttgttgtggatgatttttccagatatacctgngtcaactttatcagagagaaaacagacacctttgaagtattcaaagagttgagtctaagacttcaaagagaaaaagactgtgtcatcaagagaattaagagtgaccatggcagagagtttgaaaacagcaagtttactgaattc

SEQ ID NO: 12375 - DNA, 546 bp, Glycine max
agcttatgctgcaaatatttacaatagacctcctcaacctcagctgcaaaatcaaccatagcagaacaattatgacctctccagcaacagatacaaccctggatggaggaatcaccctaatctcagatggtccagccctcagcaacaacaacagcaacctgctccttccttccaaaatgttgctggcccaagcagaccatacattcctccaccaatccaacaacaacaacagccccagaaacagccaatagttgagacccctccacaaccttccctcaaagaacttgtgaggcaaatgactatgcacaacatgcagtttcaacaagagaccagagcctccattcagagcttaaccaatcagatgggacaattggctacccaattgaatcaacaacagtcccagaattctgacaagctgccttctcaagctgtccaaaatctaaaaaatgtcaatgccatttcattgaggtcgggaaagcagtgtcaaggacctcaacccgtagcaccttccttatctgcaaatgaacctgccaaacttcactctac

SEQ ID NO: 12376 - DNA, 412 bp, Glycine max
  unsure at all n locations
ccctgaacaggcaattatcctctgtgtatgcaaggggtgggatttttgaagaagtacatgccatggacgtgtccgaacatttgtttcagtgtgaagaatagtaaaatctggagtgggcagtacccaagcttttgtcattaattcctttaacttgcaaatactttgtgtgcctctgagtgccacgagagttgatccttgcaaatgagagatgttaaaggttccacgatggcgacatagccctagattaatttttggcaaaaccctatcagacccaagaatccttttaaagtatgaggagaagtaggggaggccaatccaccatgacctgtattttatcanggtacgacgtgacaccctggacaaataccatgtgtctgagatactacagttgggtgtgggtgaanacacactt

SEQ ID NO: 12377 - DNA, 361 bp, Glycine max
  unsure at all n locations
tccatttgtttaatctntcataccacgccctaggtgccttgtttaacccatagatagctctcttgagtttgcagaccatactttntatcagaatcagcaaatccaggtggctgggtcatgtagatttcttccaaatagccattaaggaaagcattgttcacaccaatttactgaatagaccagtgatgagcaagagcaatagtcaacattattttgatngtgacaggtttcacagcaacacgtggaaaggtttctgaataatcctgactagttatttgattaaatcccttggcaaagctactagccaacagattgaagaacgtcatgccgttcatcatagacaaaaggcaatctgcattca

SEQ ID NO: 12378 - DNA, 585 bp, Glycine max
agcttgaaggcaaactggatgcattggttaacttggtaacccagctggccttgaatcagaaatctgtacctgtcacaagggtttgtggtttgtgctcctctgctaaccaccatacagacctttgccctttcatgcagcaacctggagcaattgagcagcctgaagcttatgctgcaaatatttacaatagacctcctcaaccttagcagcaaaatcaaccacagcagagcaattatgacctctccagcaacaaatacaaccctggatggaggaatcaccctaacctcagatggtccagccctcaacaacaacaacaacaagcctgctccttccttccaaaatgctgctggcccaagcagaccatacatttctgcaccaatccaacaacagcaacaaccccagaaacaaccaacaattgaggcccctccacaacctttcctcgaagaacttgtgaggcaaatgactatgcagaacatgcaatttcagctagagaccagagcctccatttatagcttaaccaatcaaatgggacaattggctacccaattgaatcaacaacagttccagaattcttgacagctggct

SEQ ID NO: 12379 - DNA, 443 bp, Glycine max
  unsure at all n locations
agtctccatacanagtcaggttaacgattactcgcctgtgctntttcttccatgctatatgtagcanagtcattgatccagtcatgtttgatgagttggaaaatgaggccgcaattatactgtgccagttggagatgtattttccccctgctttctttgacatcatgattcactttgattgtgcatctggtcagagaaatcaaatgttgtggtcctgtttatctatggtggatgtacccggctgagcgatacatgaagatcttaanagggtatacaaataatctatatcatccagaagcatctattgttgagaggtacattgcagannaagccattgaatntttttcagaatacttagagaaggctaaacctgttggccttcctgagtctcgacatgatgacagagtgggtggtaagggttcaagaggactgcatgtgatcac

SEQ ID NO: 12380 - DNA, 528 bp, Glycine max
  unsure at all n locations
agcttgatacaagattctccttgcctggctcttcattaccttctggntgggtcatatagatgtcttcctctaaatccccatgcaagaatgcagttttaacatctaactgctccaagtgaagattctctgcagctactatgctcagaataactctgatggtagtcatctttacaactggagagaagatctctgtgaaatcaattccttgtttctgctgaaaccctttcaccacaagtctcgccttgtatcttcttctaccgtcagattcttcctttagcctatagacccacctattctgtaatgccttctttccttctggcaatttagttaaagaccacgtcttattcttttgaagggatgtcatctcatctttcatcgctagctcccactcaatagtgtcattcccctgtgtagcctcattgaaacattctggctcaccagcatcagttaacaacaaataatgcaatgaaggggaatacctatctggtggtactgaaattctgctatattttcttggaggagttgatg

SEQ ID NO: 12381 - DNA, 369 bp, Glycine max
agcttgtaagatttgcaagaatttcttccttgtacaactccttgaaaattattgccatcaatataaagatatgacaatttagagagtgatccaagactttcaaatggatttccactgaatttattaaaagagagagagagagattttaaatctatctcccttaagttgcggagattacccaaaaaagtcggaattgttccttcaagttgattacgtgataaatcaagttcaacaagagaagtcaaatttcccgaagaagttggaatggttccttcaagttgattatatgacaaatcaagttcaacaagagaagtcaaattttccggggcatcagaaatagtcccatgcaagttgctggaacttaggtcc

SEQ ID NO: 12382 - DNA, 359 bp, Glycine max
cgcatgcaagcttccacttttaagggataacacatgaacagcgctaggcaatgacattcatggtgctccgaacaaaggtggagtatggaggattgccttgagggtccgcacttatgcaatcatgaaactcagctccaaacttgaaagtggaggacacatgaacaaccctaagcaataacattcatgtggctccgaaaaaggatgagaatggaggattgccttgagggtactctcttaggcaatcatgaaactcatctccaaactcaaaagtggaggacacatgaacagccctaagcaataacattcatgtggctccggaaaaggatgagaatggaggattgccttgagggtcctctttt

SEQ ID NO: 12383 - DNA, 444 bp, Glycine max
aaaatggcctcagcaaacttcttaatctctatggaaattcaatcaataggcctccaatctttaatggagagggttaccactactcgaaaacccgaatgcaaatttttattgaggcaatagacttaattatttgggaagccatagaaatagggtcttatatatccaccacagtagaaagaattacaatagatggaagcacatcaagtgaaagcataacaatagaaaaacctagagatagatggtctgaagaggataaaagacgagtacaatacaatttaaaagccaaaaatataattacatctgccctgcgaatggatgaatatttcagggtttcaaattgtaagagtgctaaggaaatgtgggacactctacacttaacacatgaaggaacaacatatgttaaaagatctaggatatacacattaactcatgaatatgaactat

SEQ ID NO: 12384 - DNA, 440 bp, Glycine max
tgctacaaacatctacaacagacctccttaatttttcagcaaaatcagccacaacagaataattatgacctctccagcaacaggtacaatcccgagtggagaatcatcccaaccttagatggtcgaatccttcacaacaacagcagcaacaacaacaaccttattttcaaaatgctgctggcccaagcagaccatacgttcctccaccaatccagcaacaacaacagcaacagccccaaaaacagcaaacagttgaggctcctccgcaaccttccctagaagaacttgtgaggcaaatgactatgcaaaacatgcagtttcgacaagagaccagagcttccattcagagcttaactaatcagatgggacaattggctacacagttaaatcaacaacagtcccagaattctgacagaataccttctcaatctatctagaat

SEQ ID NO: 12385 - DNA, 229 bp, Glycine max
aaaccgaagctcctagcaaattcgaacgacaataacggtgcactaagaagtccgattgagtcccgcaggatatcgagacgctcgaaagtgaaaaccgaagctcgtagcaaattcgaacgacaataactgttccctcggaagtccgactgagacccgcaatatatcgagacgcgcgaaatttagaaccgaagcttggagcaaaagcgaacaacaataacaattcactcga

SEQ ID NO: 12386 - DNA, 312 bp, Glycine max
cttccgactgaaaacttattgtcgttcgaatttgctacgagcttcgggtttaaatttctagtgtctcatatatattccgggactcaatcggacttccgagtgaaatgttattgtcgttcgaaattgctagtagcttcggttttaaatttcgagcgtctcgatatatttcgggactcaatcggacatccgagtgaaatgttattgtcgatcgaatattgctacaagcttcgattttaaatttcaagcgtctcgatatattacgggactcaatcggacttccgagtgaaaagttattgtcgctcgaatttgcta

SEQ ID NO: 12387 - DNA, 414 bp, Glycine max
gtgcagactaagtgctcaccaacactagataagaatttcttggttgtttcatgaaacctctgatgctagatcaccattcaggaatgccattttcacatccattggatgcagcttatgatcaaaatgagctactaatgccagaattactcgaagagagtctttcttagatacaggggaaaaagtctctctgtaatcgaatccttctctttgagtgaatcctttagcaaccagtattgccttatgtctctcaatggtgccttctgagtattcctttgttgtgaagacccatctacatccgatggcttttacaccaacaggcaactcatcgagatcccaatcttgggtagatgccatagaagccatctcatctctcatagcattataccacaaagttgattccttagaactcatggc

SEQ ID NO: 12388 - DNA, 371 bp, Glycine max
  unsure at all n locations
gcatgcaagcttagaagaaaagcnctgtttctgagatttgtgggattttttgangnngggctaggntacgtagggcaatacagccccaacgtgagatggatgcttcttggttatgtgggagagactgatgcagggcttttggaattctctaagggctgccccagtcttcagaaacttgaaatgagaggatgctcctttttcagtgagtatgcactagctattgctgcaactcaactgaattctctcaggtacctatgggtgcaagggtatagtgcatctgcatctggacgcgatcttctggcaatggctcgcccctattggaacattgagctgattccttctagaagcgtggttgttagcaatcagcaaga

SEQ ID NO: 12389 - DNA, 393 bp, Glycine max
  unsure at all n locations
tggtgatcagtcaggatgatgaaaggatgaccataaagtagtggtgccacttgagtattgcagttgtaattacatgaagctcacaaacataagtagaagcttgttatagcctgnggcacaattgcttggctatggggtgggagttctgtaacaggactgctcctatggcggtgccggaggcgtcggtttcaatggtaaattgaattgtaaagtctggagtggtgagggcaggagcttgggtcatgatggtttttaattgttgaaaagcttcttgagccgtgggactccatgaaaatttgtccttacacaagagcgtagttaacggtgctgctatggcggcataacttctgatgaattttcgatagaatcctatgaggctcatgaaacttctca

SEQ ID NO: 12390 - DNA, 401 bp, Glycine max
  unsure at all n locations
ngaaggcaaactggatgcattggttaacttggtattctatctgaccttgaaccagaaatctgtacctgttgcaagggtctgtagtttgtgctcctctgctgaccaccatacagacctttgcccttccatgcagcaacttggagaaattgagaagcccgaagcttatgctgcaaatatttacaatagacctcctcaacctcagtagcaaaatcaaccacagtagaacaattatgacctctctagaaacagatacaaccctggatggaggaatcaccctaatctcagatggtctagccctcagcaacaacaacagcagcctgctccctccttccaaaatgttgctggcccaagcagaccatacattcctccaccaatccaacaacaacaacagccccagaaac

SEQ ID NO: 12391 - DNA, 422 bp, Glycine max
  unsure at all n locations
nntgacggactatacctagctctaggcaccagggatggataaagatctatatataggctggctaagggtagagagaggaagactagagatttggatcaagtaaagtgtgttaaggatgaagaaggcaaagtcttagtgcatgaaaaagatatcaaggaaaggtggaaggcgtatttccacaacttatttaatgatggatatggatatgactctagcagtctagacacaagagaagaggaccggaactataagtactatcgtcggatttagaaacaggaagtaaaggaagcattgaaaagaatgagtaatggtaaggcggtggggccagacaacatacctattgaagtgtggaaaactcttggagatagaggtcttgagtggctcaccanactctntaatgaaattatgaggtcaaaacgcat

SEQ ID NO: 12392 - DNA, 357 bp, Glycine max
  unsure at all n locations
agctngagagccttccaaagctttcaggnaatcttgccacacaagnggcctccatgaagaagtgacacagagaagccaaagancctatagaagctggaagctcgctgagcattttacatttgttcaatcttaaggtgacaagattttctagccatccaatggactctggcaattccctgatatttccattgaacatgttcagtgtagtaagaaatgctaggcggccaatagattctggtaaatattcaagatttttgcaattcatcatctcaagtttcctcaataatttcatctctccaatctcatctggcaaatctgtgatggttgttccatctaactgaagctcaacaactgaag

SEQ ID NO: 12393 - DNA, 366 bp, Glycine max
  unsure at all n locations
agcttggcaaacatagntgatttataagggttatctcctctagatagaagcataatatcatctgcaaaagccaaatgagatagctgaatacctgcacagttgagatgaaatttaaaattggcatcatccttgaggctgctcatatctctggaaaagtactccaaacagagcacaaacagataaggggagagaggatccccttgtctaagaccccgctgtcctttgaagtgaccataaatggatccattgactgccacactaaaggaagtagaagaaacacattccatgatccaagtacagaaatgagctgggaagccaatggacttaagcatccaatccaagaattcccagaaaatggaatcataa

SEQ ID NO: 12394 - DNA, 363 bp, Glycine max
agcttgaaaggtagtcataccttataaaatatatatatgtttgtttaggtagaaagataccttagatatgcatgtatgtaaacaaaaaaatacttcacaaaatatatatatgtatgtttaggtagaaagataccttagatatgcatgtatgtaacaaaaaaatacttcacaaaatatatatatgtatgtttaggtagaaagataccttatatatgcatgtatgtaaacaaaaaaacacttcacaaaatatatatatgtatgtttaggtagaaagttaccttctatatgcatgtatgtaacaaaaaatacttcacaaaatatatatatgtatgtttaggtggaaagataccttagatatgcatg

SEQ ID NO: 12395 - DNA, 399 bp, Glycine max
  unsure at all n locations
tcatcttacagacagcaaanaagaatgtttatatggataaccactcgagtacttccctcccgtcagcgtgactcaaatgtcagtatgacagatcttgtgagcgcggaagatgacataaatctccgcgtgtcaacgggcttgtcggccgcgattgacgaagggcgcagaagacgacgttagtctctgcgtgctatcaggcttttcgtcttaccgacagcaaaaaagttttgaaagtgcggacaaccacttgggtatctccgcatgtcacgtgactccagtgccagcatgacagaacttgtgagggtggccgacaaaagtgaggctcttgctcctacgtatcctccaatgaggaactcagacttacgtagttcttgataacttgtgagacttgaaaaagtc

SEQ ID NO: 12396 - DNA, 448 bp, Glycine max
  unsure at all n locations
tgcatccggtgcttgttgtcagggtgatgtttccttctcaacagtcttgctcctatcttgatttcccatttgcatcgtaccaaagtcaccgctttggtaggatgagaagaaacttccatgtggagtaacatggaaggaggcaccggaatcgacaatccaagagctatcatcacaagcaatgtttaggatattaccttcaccaacgagatataacaaatcttcttttgaaactacggcagtagtattcttcttttctttcttctttgttgggctgacttggtctggcttaacgttaccgattgtttgatctctcttgaaggattgacattctattttcctgtggcccatccttccacagtagtagcatgtaattntttagcgtgatttggatctacctcgagaatgatgcgaatctcggctcttaatacgtccacgagtctcattcata

SEQ ID NO: 12397 - DNA, 290 bp, Glycine max
atttgcaaaagccaaatgagatagctgtatacctgcacagttgagatgaaatttaaaatcggcatcatccttgaggctgctcatatctctggaaaagtactccaaacagagctcaaacagattaggggagagaggatccccttgtctaagaccccgctgtcctttgaaacgaccatttatggatccattgactgccacactaaaggaagtagaagaaacacattccatgatccaagtactgaaatgatctgggaagccaatggacttaaacatccattccaaaaattccc

SEQ ID NO: 12398 - DNA, 363 bp, Glycine max
cacctgcagctgcagcttctctccccacatttttctgagtctcggagtagcaaaggagatgcacttgccacaattactaacgactccaaattatcatgattcctcaatagttcagttatcaattctacaatccgctgattgattctccacaacttctgacctagattggcatctttggcaatccatggctgcaattccttctcggcctgacaagcaacaagtcaggggatgaaaaatgaaatattgtaaaaaaatctacaaaatggaagctgatttggaacacaggttagatgagctcttctgcataagatatttaaactttctatacattaaaagctatgtctcatgtgggaattaaatatg

SEQ ID NO: 12399 - DNA, 357 bp, Glycine max
agcttgaaagatttctcaagatccggtggttgcttagggactggatgtaggcacgggttgttgccgaaccagtataaaattcttgtgtttttcttcttcttccatacactttttaatttccgttgtgtactttacttttatgctttacttttgtttaagttacataacttagtagtaaagcctaattgaatctagtaacattaagaaggatcagttttaattagtcaaggttacttaataattaattcaacccccctattctcaattactccaaggccacttgatccaacacattgtaccctgagcaactgccagttagttcttcttccttttcttttcttttcttaagagttgaat

SEQ ID NO: 12400 - DNA, 358 bp, Glycine max
agctttgaatgctctattcaatttagttgacaagaacatcttcagactgatcaacacttgcacagtggccaaagatgcatgggagatcctgaaaatcactcatgaaggaacctccaaagtaaagatgtccagattgcaactcctggctacaaaattcgaaaatctgaagatgaaggaggaagagtgtattcatgacttccacatgaacattcttgaaattgccaatgcttgcactgccttgggagagaggataacagatgaaaagctggtgagaaagatcctcagatccttgcctaagagatttgacatgaaagtcactgcaatagaggaggcccaagacatttgcaacatgagagta

SEQ ID NO: 12401 - DNA, 364 bp, Glycine max
  unsure at all n locations
agctttgaatgctctattcaatttagnngtttataatatcttcagactgatcaacacatgtacagtggccaaggatgcttgggagatcctgaaaaccactcatgaaggaacctccaaagtgaagatgtccagattgcaactattggccacaaaatttgaaaatctgaagatgaaggaggaagaatgtattcatgacttccacatgaacattcttgaaattgccaatgcttgcactgccttgggagagaggatgacagatgaaaagctggtgagaaagatcctcagatccttgcctaagagatttgacatgaaagtcactgcaatagaggaggcccaagacatttgcaacatgagagtagatgaa

SEQ ID NO: 12402 - DNA, 382 bp, Glycine max
agaccctaatcgactgagctgcagctttgagcacttggtttgtaatttacaacgagatgatgcgctccatgagaggttggatcaaatggagaatagagatcataatgaagaagaaaggaggagaagagggaatgatggtattcctagacaaaaccgaattgatggtattaaactcaacattcctccatttaaaggaaagaatgatccggaggcctacttggagtgggagatgaaaatagagcatgttttctcatgcaacaactatgaggaggaccaaaaggtgaagcttgccgccacggagttttccgactatgctcttgtgtggtggaacaagctacaaaaggagagagcatgaaatgaagaggcattggttgatacatgg

SEQ ID NO: 12403 - DNA, 358 bp, Glycine max
  unsure at all n locations
agctttgagtgcttgcatctttaatcacgaaaaaattacttttctcagataaaagaagattaaaaaaagtggtttgaataaaaaggtttgtcttctgtagttaaatagaaaaacctgttgatgcaaaacaaaagaagtggccaacaaagaagaagaacatggctaattaataaactaaactcacaaaacacataatataatatccaaaataatatggcacagttctacaaatttaccttgagactcatcttgaccatctttactttgttttggtgccactccaaaatcagctagaagagcctcaagctctgcaagntccttcttcttcctttcctttttagagagctgcctttctgtc

SEQ ID NO: 12404 - DNA, 356 bp, Glycine max
agcttgacaaaattctgagatttcttgccagagatttttcccttctgttttctgcaaaacatgaagtggtgtcaatacttgtaatatcacaatgctctatttgtaaataccacaccctccttttatgtttcatatttcaaagaaaaggaatgttaataatgttaggaagtcccacatgtctagttcttgggatacaacttatatatctcttggataacttcacttagtgtcaattggttttaagttgagatctaacatagtatcaaagtctatagcccatcttagttcttgcctattccagaggcaggcctctgtgtaggggtgttaggaagtcccactcagtgtcattggtttta

SEQ ID NO: 12405 - DNA, 449 bp, Glycine max
  unsure at all n locations
tgagttnnntttaaaatcatatttagctaaatggtgataccatgaactttaaaaaaaacctattaagtctgatgaaccgacctgtttagcaataatattttatattaaagatattattattaatatgatatatagtataattattatatttaaattataaaattattttagtagtttgacaattttaattagtgtttgaaatatcttaattcgtataaatataaatgtgtagcaaaaatatacattcttttcttttggtgagacttaaaagactttagtaatatgtcacccacaatgttttcccatattttattgtttaaaattgtcttattatttttaataaaaatatttggttntgcttaaaagataatactttnttacactttttaatatgaaacaaacctttaaatggattaattggcctaaccaacttatacaaaagctaagtc

SEQ ID NO: 12406 - DNA, 342 bp, Glycine max
  unsure at all n locations
tctcgatatattatgcacatgaatcggacctcnattgacaagnnanggccannngaatnnttcgagagcttccgctgctcaatttcgagcgtctcgatatattatactcctgaatcggacctccgagtgaaaagttaagaccatttgaatttctcgagagcttccgttgttcaattttgagcgtctcgatatattatgcgcctgagtcggacctccgagtggcaagttatgaacatttgaatttctcgagagcttccgttgcttcaattcgaccgtttcgatatattatactcctgaatcggacctccgagtgaaaagttatgaccatttgaatttctcgag

SEQ ID NO: 12407 - DNA, 365 bp, Glycine max
agcttcctcaattcttgtggatttatgctctttagacggctgcgtatatattaaatcgagttccaaccaaggctgtctcaaggacaccttttgagttattcaagggttggaaaccaagtttgtgacatatacgcgtttggggatgcccgtctgaagtaagaatttataatccacaagagaagaaactagaccctaagactattactgggtatttcattggatatgctgaaaggtctaaagggtataggttctattgtccatcccacaacactaggattatggaatcaaggaatacaaagtttcttgaaaatgacttgattagtgggagtgatcaatttcagaacatttcttctgaaagggatcac

SEQ ID NO: 12408 - DNA, 357 bp, Glycine max
  unsure at all n locations
agcttgcttactgtcttcgtttctcaagaacttctcggntttcctgagtagcttatagaaaggcttcgttttttctacgagtttcgaaaggaacctggacaaaaacgcccatctaccattcaacttttgaacttctctgatgttgttaggactctgcatttccaatattgccgtacacttgtttgggttggcttcgatcccttggtgggtgatcatgaaccccaagaatttttcactgccgaccccaaaggtgcattttcagggttgaggcatatgtcatatttacgggtttctccaaatacttccttcaagtctgctacatgttgggccacactataagacttgataaccatgtcg

SEQ ID NO: 12409 - DNA, 347 bp, Glycine max
agcttggatttcctttgctcctgaaacctctcctttctcatgtgaacccaaaaccaatctttgggttggaaaacaacctttttgcgccccttgtttgcatgtttagcatagctctcattcctcttttcaatttgggccttgactctttcatggagctttttcacatagtccactttggcttgtccttccttatgctttaaaactgaaatattaggctttggcaacaaatcaagaggagttagtggattgaaaccataaacaacctcaaaaggagaacaagtagtggtgctatgcacagtcctattataagcaaattcaatgtgaggtaagcaaacttcccaattttt

SEQ ID NO: 12410 - DNA, 370 bp, Glycine max
  unsure at all n locations
nganattgaacaagggaagctctcgacaaactctattgatcataacttatcacacggaggttcgattcaggcacataatatatcgagacgttggaaattgaagaacgaatgctctccagaaattcaaatggtcataacttgtcacacggaggtccggttcaggcgcataatatatcaagatgctcgaaattgaacaacgaatcctctcgagaaattcaaatggtcataacttgtcaaacagatgtccgattcaggcgcataatatatccagacgctcgaagttgaatatcggaagctcttgagaaattcaaatggtcattacttgtcacacggaagtccgattctggcgcatcacatatcgagacactct

SEQ ID NO: 12411 - DNA, 457 bp, Glycine max
  unsure at all n locations
tatgctgcanacatctacaatagacctcctcaacctcatcagcaaaatcaaccacaacaaaacaattatgacctctctagcaacaagtagaaccccgggtcgaggaatcatcccaaccttagatggtcgaatccttcacaacaacagcaacaacaacaacaaccttattttcaaaatgctgctggcccaagcagaccatacgttcctccaccaatccaacaacaacaaaaacagcaacaaccccataaacaacaaacagttgaggctcctccgcaacctttccttgaagaacttgtgaggcaaatgactatgcaaaacatgcaatttcaacaagagaccagagcctccatttagagcttaactaatcagatgggacaattggctacacagttaaatcaacaacagtcccagaattctgacagattatcttctcaatctgtccagaatcccaaaatgt

SEQ ID NO: 12412 - DNA, 354 bp, Glycine max
agcttgaagacaaactggatgtattggttaacttggtaacccaactggccttgaatcagaaatctgtacctgtcgcaagggtttatggtttgtgctcctctgctgaccaccatacagacctttgcccttccatgcagcaacctggagcaattgagtagcctgaagcttatgctgcaaacatttacaatagacctcctcaacctcagcagcaaaatcaaccacagcagaacaattatgacctctccagcaacagatacaaccctggatggaggaatcaccctaatcttagatggtctagccctcaacaacaacaacagcagcctgctccttccttccaaaatgctgctggcccaa

SEQ ID NO: 12413 - DNA, 411 bp, Glycine max
  unsure at all n locations
catggacgaattgcagtggccataatgatctcacagtaagatcttgatgagcctcaaggcataaagaacttagtgaatatcatatacaagcagatcaaagtagaagccttcacagtttatgattactatcacctctatgctaaattcttggatactgttttgccttacattagggaagggaagataacatatgttgaagacataactgagggtcttgagaacggtccaatngcactagaagcaatgttccaaggtcgtagtgctggtaaacaagtcattatacttgctcgtgaataaattagtacaaccttactggttgatctttcannatcattttggttgtgtntgcaactctcactttgagaggttgttgagtaataaacaacgtggatcatgttgaccatctttaat

SEQ ID NO: 12414 - DNA, 417 bp, Glycine max
  unsure at all n locations
aatatatcgagacgctagaaattgaataatggaaactctccagaaattcaaatggtcataacatttcactcggaggtccgattcatgcgcataatatatcgagacgctcgaaattgaacaacggaagctctcgagaaattcaaactgtcataacttttcactcggaggaccgaatcacgcgcataatatatcgagacgctcgaaattgaacaacggaagctctcgagaaattcaaatggtcataacttttcacacggaggtccgattcaggcgccatatatatcgagacactcgaaantgaacaacggaagctctcgagagattcaaatggtcataacttttcactcggaggtccgaatcaggcgcataatatatcgagacgctcgaaattgaacaacggaagctctcgagaaattc

SEQ ID NO: 12415 - DNA, 462 bp, Glycine max
  unsure at all n locations
attctatcaatagacctccaatctttaatggagagggttaccacaactggaaaacccgaatgcaaatttttattgaggcaatagatctaaatatctgggaagccatagaaatagggccttatatacccaccacagtagaaagagtttcaatagatggtagttcatcaagtgaaagcataaccatagaaaaatctagagatagatggtctgaagaggatagaaaatgagtacaacacaacctanaagccaaaaacataataacatctgccctaggaatggatgagtatttcagagtttcaaattgtaagagtgctaaggaaatgtgggacactcttcgattaacacatgaaggaactacagatgttaaaagatctanngataatgcactaactcatgagtatgaattattttagaatgaatgcaaatgaaatattcagagtatgcaaaagagatttacacata

SEQ ID NO: 12416 - DNA, 361 bp, Glycine max
  unsure at all n locations
attactgacatgctagccaagcccaccctgaaccaaattgtgttgcagcagcagccttgaactcatcaaggaattntacaaatgaaccacagtctctttcaatcagttctagaagctccccggatggctttccacctccacactggttcatgcactcccagaagaagtcatggttccatacctgcactatgcattacaagattgattgattaattaagtactaagccatggtgttgaaacatgaattagagattctggttgcaagcatgcatgcctgtgctgcattgttgaaagctggaagaagtcacccttattgtatgatgtgacaataatctcttctagtgacataccatcaagctct

SEQ ID NO: 12417 - DNA, 330 bp, Glycine max
  unsure at all n locations
atatgtaaagagggtggtnttggattcatacccatgaccaatcggtcaccaaggtgcaactttaccgctgcgccatgacttgctttggggggcttttaatcatcttgataaaattagttcttactttttacttataaatttttatcacaggaagaatgattcatagcttaaataaaaatgagcatgctctcgatatggctgctcctgttcatgagagattgggtgatatggatggtcctactgacgacaattcctcattgaagaagagaaccaatgttctcctccatcgtgatcacactggagacttggaatgtcttgatggttgaatat

SEQ ID NO: 12418 - DNA, 381 bp, Glycine max
gcttgattctcattggagaggtaatgattctctagatgatgcgctccatgagaggttggatcaaatggagaatagagatcataatgaagaagaaaggaggagaagagggaatgatggtgttcctagacaaaaccgaattgatggtattaaactcaacattcctccatttaaaggaaagaatgatccggaggcctacttggagagggagatgaaaatagagcatgttttctcatgcaacaactatgaggaggaccaaaaggtgaagcttgccgccacggaagtttccgactatgctcttgtgtggtggaacaagctacaaaaggagagagcaagaaatgaagagccaatggttgatacatggacggagatgaaaaaatcatg

SEQ ID NO: 12419 - DNA, 226 bp, Glycine max
  unsure at all n locations
ttttgagcatctcgatatattatgcacctgaatcgggcatctgagtgaaaaggtatgccatatgagctaaccgagagcttcggtgntctatttcgagcgtctccacatattattggcctgaatcggacatccgagtcataagttatgggcagttagactatccatgtgcttccgtgtttaattntgagcatctgcatatatgatgcacctgaatcggacatctgag

SEQ ID NO: 12420 - DNA, 426 bp, Glycine max
  unsure at all n locations
aattctatttatagacctccaatctttaatgtttagggttaccactactggaaaacccgaatgcaaatttttattgaggcaatagatctaaatatttgggaagccatagaaatagggccttatatacccaccacagtagaaagagtttcaatagatggtagttcatcaagtgaaagcataaccatagaaaaacctatagatagatggtctgaagaggataaaaaacgagtacaatacaacttanaagccaaaaacataataacatctgccctaggaatggatgaatatttcagggtttcaacatgtaagagtgctaagganatgtgggacactcttcgataacacatgaaggaactacagatgttaaaagatctatgataaatgcactaactcatgagtatgaaaatattagaatgaatgcaaatg

SEQ ID NO: 12421 - DNA, 506 bp, Glycine max
  unsure at all n locations
atactcacgagtataaatcaatcttgtacaaatcataactaaattattatnntagtgtctgaaggcacttcaacattntaaaagaagatataactctaatcacacacacacacacaaaaaccaattcaatttatggaagagaactaattctatataattcaaaaatgttgtatataaaagtaaaaaaattataataaaactcagcttatataaaatgtcattttttattattaattatcactaaacaccaaacatttcagctcaactatctcaattgattcatacaacataatcataacacanatcatacattatcatcaacaacatactttcatcaccaataatcatcataaactatcaaatatcatgagtcgcatacaatcataaactatcacaaaacctcatcatactcaatcaccaacaaccatcatcataactgaagtacatcatagaccaagacaacatcaaacatcaaccacttattctanctcatgngagtcaacaca

SEQ ID NO: 12422 - DNA, 479 bp, Glycine max
  unsure at all n locations
acgctcgacattaaacatcagaagctcttatatattcaaatgggcctattttttcatgcggatgtccgattatggcgaatcacatgtcgagacgctcaaaattgaacaacggaagctcttgagaaattctaatggtcataaattttaactcggatgttcgattcaggcgcatcacatatagcggcgctcgaacaggaacaacggaagctctcgagatattcaaatggtcatgaactttcagactgaggtccgattctggattataatatatcaagacgctcgaaattaaacatcggaagctctcgagaaattcaattggtcatcactcttcacacggatgtccgattcgggcgcataatatgttgacacgctcgatactgaacaacggaagctctcgagaaattcanatggtcataacttttcacacggatgtccaattcatgcgcatcacatattgagacgcatcgaaatgaacaacg

SEQ ID NO: 12423 - DNA, 412 bp, Glycine max
  unsure at all n locations
tcccgagagctttttttgntcattntcgagcgtttctatatgtgatgcgccttaatctaacatccgtgcgaagagttatgaccatttgaatttctcaagagcttccgttgttcaatattgagcgtctcgatatgtgattcgcctgaatcgtacattcgtgtgaaaagttatgaccatttgaatttctcaagagcttccgttggtcaatttcgagcctctcgatatattatgcgcccgaatcggacatccgtgtgaaaagttatgaccatttggatttcgcgagagtttacgatgtttaatttcgagcgtatcgatatattattcgcctgaatcagacatccgtgtgatagttatgaccatttgaattttcaagagcttcctgtgttcatattcgaacttctctacatattat

SEQ ID NO: 12424 - DNA, 438 bp, Glycine max
  unsure at all n locations
cttcaatatctttattctagatgactnngncactttttgtgtctctaatccctccattncaaaacttcctatatttaaggtttttacacagattaaaaaactatttatatatacaaacttaaactaaattattctaatttataaatcataaagataaactaatagtccacaatacaaaataattatccaataattgtccaataactcanactcaataataataatcataaacataaactcaagactactcaatgtccaataattatccataaactcacattagcatcaaagccaatgtccacactaattgtccacaaactcatattcaagcatcaaactcaatgtccacactaatngtccacaaagtgaaatttaagattataaatatatatggtagatttacaaatggtaacgcataattccaaaaaccccatattc

SEQ ID NO: 12425 - DNA, 328 bp, Glycine max
  unsure at all n locations
atcttgggcctttttcccacaactctngtaaatgggagagaaatgttcatctaaagcatacaaatctctaatgttatcaaatcctaaaatntgagctcctagtgagcaaaacaatgtgtgtctcctagagagggcatcagctaccacatttgtttttcccttnttgtatttgataacatatggaaattgctctangtactctacnnccatttgcatgcctttgtttaacttgctttgcactctaatgaacttaagtgattgatgatcactatgaatgacanattccttggaaacaaggtaatgttcccaagttcttagtgctcttatt

SEQ ID NO: 12426 - DNA, 405 bp, Glycine max
  unsure at all n locations
tgttagtcttattcgtcagttctttgaccttccaccaccatcttcatagatttagattattattatattntgttttttaagccttgcatttggctatgtntttatgacattcgaacacttagtatttcttttaatatttgcttagtatgattgaacatgatgataatatttacttgctcttggttgtttatggctatggttgttaaacttaattattntgatgatatatatgtctagtggtatgtacttacatttggtattgtgctntatgtatgttttagaattatntatgtatgaattattttacacacttttggccttttgatgttgccaaagggggagagaaaaatgggtattttagaaatcaagatattatattttcaaagtcttaaattaagcataaat

SEQ ID NO: 12427 - DNA, 378 bp, Glycine max
  unsure at all n locations
cgtaccaagcttcaattggagtcttgtcttttacagacttagttggacatctgttgagtatgtaaacaacagtgtagactgcttcagcccaaaatatgttaggtagtcccttttccttgagcatcgatctagccatctccataactgtgcgattctttctctcggacactccattttgttgaggagaatatgcgactgtaagttgtctctcaatgccttcatcctcacaaaatctttcaaactcgcgagaggtgtactctctgctgcgatcacttcttagtgactttatccgtcttccactttgattttcagcaagggccttgaactctatgaatactccaaagacttctgatgattctnttagaaaatatacccatg

SEQ ID NO: 12428 - DNA, 322 bp, Glycine max
gcgtctcgttatattatacgactctattagacatccgagtaaaatgtgattgtcgtttgagttggctcagagcttcaacattcaatttcgagcatctcgatatgttacgggactcaatcagacatccgagtaaaaagttattgtcttatgagttggctcagagcttcaacattcaatttcgagcgtctcgatatatgacgggactcaatcagacatccgagtaaaaagttattgtcgtttgaattggctgagagcttcaacatgtcaattcgagcgtctcgatatgttacgggactcaatcagacatccgagtaaaaagata

SEQ ID NO: 12429 - DNA, 399 bp, Glycine max
  unsure at all n locations
tgtctgcatgaatccttgtttatatcgagacgctcgatattgaatgttgaagctctgagcaaattcaaacgacaataacgttttactcggatgtctgattgagtcccgtaatatatcgagacgctcgaaattgattgttgaagctctgagaaaattcaaacgactataactttttactcggatgtctaattgagtgccgtaatataacgagacactcgaagatgaatggtgaatctctaagcaaattcaaacgacaataactttttactcggatgtctaaatgagtctcgtaatataacgagacactcgaagatgaatgttgaagctctgagcagattcaaacgacnactacattttactcggatgtctgattgagtcccgtaatatatcgacacgctc

SEQ ID NO: 12430 - DNA, 296 bp, Glycine max
  unsure at all n locations
cacagcaagactaacttttctctctctgcttcgtggacgttagataatgggataccaatccatttgctaacaatctctgtgatatcaaggtcagtgacctcttctccaaataaagaatgtccggactttctgaagtcggttaggctcttttcagcttcttctaattggcgctgaagggacatcaaagttccatacttaagctcggcagcacggttcatgtcataatcacgctcagcagctttcatctctaagttgactctatcaatctatacacgtgtntataacaattaagtcgc

SEQ ID NO: 12431 - DNA, 437 bp, Glycine max
  unsure at all n locations
ctggaactacttcacattgtctngatggngcctatgcaagttgaaagccttggaggaaagaggtatgcctatgttgttgtggatgatttctccagatttacctgggtcaactntatcagagagaaatcagacacctttgaagtattcaaggagttgagtctaagacttcaaagagaaaaagactgtgtcatcaagagaatcangagtgaccatggcagagagtttgaaaacagcaagtttactgaattctgcacatccgaaggcatcactcatgagttctctgcaaccattacaccacaacaaaatggcatagttgaaaggaaaaacaagactttgcaagaagctgctanggtcatgcttcatgccaaagaacttccctataatctctgggctgaagccatgaacacagcatgctacatccacaacagagtcacact

SEQ ID NO: 12432 - DNA, 382 bp, Glycine max
  unsure at all n locations
atgcaagcttaatatatctatatatggtttanaacaagttttccgtcagtggtaccttaagtttcatgggataatttcttcattnggttttgatgaanatcccatggatcaatgcatataccacaaggttagtgggagtaaaatatgttttcttgttttatatgtagatgatattntacttgtagccaacgatcggggtttgctacatgaggtgaaacaatttctctctaagaattntgacatgaaggatatgggtgatgcatcttatgtcatcggcattaagattcatagagatagatctcgaggtattttgggtctatcacagganacctatattaacaaaattctagagagatttcggatgaaagattgttcaccaagt

SEQ ID NO: 12433 - DNA, 515 bp, Glycine max
  unsure at all n locations
acatagacagtatcatctgcatattgcagaaagtnaattggcaccttctgctnnccttctaaataactgctgtacagaccttnggatagagctgtcctcatcatgccagtcaagccttcagccacaatattgaaaaggaaaggggctaaggggtccccttgcctcaaacctctagtgggggaaaattcatttgaggggctgccatttatgagaatggatatagaagctgattgattgcaagcattgatccatttcctccatataggacagaaccccattctgaccatcatataatccagaaagttccatgagacagagtcataagcctttgcaaagtccactttaaacaccagagctggtttcttacttcttttagcttactctattgcttcattgagaatcaaagatccatgaaggatgtgtctatcctttatgaaagctgtctgtctctcatcaatgagtccaggcaatatatttcttaacctattggccaggaatntaacaatgatcttata

SEQ ID NO: 12434 - DNA, 462 bp, Glycine max
  unsure at all n locations
gttgtcatcatcaaatagtggagaatgtgaatgtatgtatacatgattntgatgatgtcaaagaagaatctaacaaggctgcttcaaatgataagcatttgcttcaagaataattcaagattgcttcaacaaacaaagccttgtttcaagattcactaaagaccaagccttgccttanaacaaagtgctttcaagacatgcaaggctctggtaatcgattaccaggaagtgtaatcgattaccagaagacagggttgagaaatagctgttgaaaaatgttttgaatttgaattttcaacatgtaatcgattaccatatgtctgtaatcgattaccagcaacgaaactttggaaattcaaattcacaagtcataacccttcacattataactgtgtagatcgatacacaaacattgtaatcgattaccagtggaaagtttcagaagatctgcaacagcacatc

SEQ ID NO: 12435 - DNA, 508 bp, Glycine max
  unsure at all n locations
caagactgtatcatgtgtcctactaatttataaattacaacgcgacttgtatatcagaggcatgactggaatcagtacatgatatttaatattaaatagagtttaatcaacaatctcgttctataattacttaaatcgattaatcacccaagttaattcacatgcatttttaataacactaaaaactaggtacatagaataccaatatttttgttcatttgaatgtgtccatcctgtgagatgactattggaggaaatcttaagcaatttctctgtcaagatattgatgtgtgattattaatttattggcaagtgtattaattcgtctaaatagtattntaaaataataagatcgagtattaagtccacaaaaactntgactgtactcanagtttgtatacgtctaattntaaacaattaatgaattaaattcaatattggtcgaataataatacagaatggtaaattcaacatacataaagataattaagtagagcatattaaagag

SEQ ID NO: 12436 - DNA, 488 bp, Glycine max
  unsure at all n locations
ctacagcagatgccactctattctaagttcttgaaggatatgttaacaatgtaacataagtatattcaccaggaaaacatcgtagtggaaggaaattgtagtgctgtgattcaaaagatccttccaccaaagcataaagaccctgcgagtgtaactatttcttgttcaattggagaagtcattatgggaaaggctcttattgacctgngagccaacattaatttaatgccactctccatgtgcagaatgttgggagagttggagatcatgcccactaaaatgactttacaactggctgaccgctccattaccagaccatatggagtaattaaagatgtgctggtcaaagtgaaacattttatcttcccgacagactntgtggtaatggatatctgtgaagatattgacattcctgtaatattgggaaagccattcatgttaactgcaagtngcatagntgatatgggtagaaagaagctggaaatggg

SEQ ID NO: 12437 - DNA, 299 bp, Glycine max
  unsure at all n locations
gacattcgacttaaatgttatgaccatttgaatttctcaagagcttccgttgttcaattctgagcgtctcgttatgtgatttgcctgaatcggacatccgtgtgacaagttatgaccatttgtatttctcaagagcttccgatgttcaatttcgagcctctcgacatattatgcgcccgaatcggacatccgtgtgaaaagttatgaccatttgaatntctcaagagcttccgatgttcaatttcaagcctctcgatatattatgcgcccgaatcggacatccgtgtgaaacagtatga

SEQ ID NO: 12438 - DNA, 442 bp, Glycine max
  unsure at all n locations
agcttataatatattgatacgctcganattaaatgtctganactctcgggaaattcanatagccataaattttcacacggatgtccgattcgggcgtataatatgtcgagaggctcgaaattgaacaatggaagctcttgagaaatttaaatgggcataacttttcacacggatgtccgattcaggcttataatatatcgatacgctcgaaattaaacatcggaaactctcgagagattcaaatggtcataactcttcacacggatgtccgattcgagcgcataatatgtcgagaggctcgaaattgaacaacggaaactctcgagaaaatcanatggtcataacttttcacacagatgtccgattcaggcttataatatatcgatacgctcgaaataaacatcggaactctcgagaattcaatgtcatactttcacacgat

SEQ ID NO: 12439 - DNA, 298 bp, Glycine max
gaagtagacccggagatggacaagacaatccgcagtattgtgagtagcattctgaaagatgcttctgtgcctgatgctgagaaagatgttccaacatcttccaccccaagtggttccgtgcctgatgctgagaaagatgttccaacatcctccgctccaaatgctgaagccctcccttcacccagtgaagaggaatcaacagaagaagaggatcaagcctcagaggagactcctgcaccacgggcaccagaaactgctccaggtgacctcattgacctggaagaagtcgaatctgatg

SEQ ID NO: 12440 - DNA, 495 bp, Glycine max
  unsure at all n locations
cgtccaatcctctaataggatcatctccataaatataatcactttcatcaccatctccatcatcatcaatgccttcctcagattgtgcatcatcatcaggttccacgaaaattaaattatctagatcaagagcttaaaatagatatcaaagatgttatatcagaaatagttaaaacttaaaataatacacaagcacattntaaatttgagaaagttcataaattataccttctcttggtgttattaaaattgcattntatcttctcttttgcattttccatctcatatatgaaaagtattcagtaacaagattgatccaactccaacattgtagggtcagttggtgtgttttgtaatagactaatataaagtatgaactatgaactatgagtttatcgtcatttgtttggcaaatggtgcattntaaatatatntacttattattcatatnnttttttacgaagtagactcttaagagtctacgagtcgactcgt

SEQ ID NO: 12441 - DNA, 429 bp, Glycine max
  unsure at all n locations
aagagctaattatctgaaaacttatatacctttatttaaactatcttataaatgagncaaaataacttataagctgactaattaaaaagacttaattataagttattgaagtaacttactaaacacatgtgtcgaattagtttatattaagaaatatgatattctgttgatcattctgaagatcattttaagaatattatttataagatngaattttcaaataacgcttctttatggcaataatgaagaagggtgttagatgaattcgagtataatatatctttcccacaaacgtgtgctaagatacatagttcaaaccataatataatgaagaatcagaatgactaatatataaattatagccaactaccatcagataacatttattttgattagacaatcttactataccatcgaagtggtattcat

SEQ ID NO: 12442 - DNA, 402 bp, Glycine max
tgcatgaccaagtttcttatgccataatcaatgattttctttgatagacaacaaatgcgataccttttgatctgatatttcacccaacttgatcttataacagttacctttccttatagcagaaaatagtagagactcatccttgttctggactacacactcattctacttaaaggaaacatcatatccactgtcacataattggctaatgcttagtagattgtgtttaagaccttcaacaaataatgcattatcaatagagggataaggatgtgtacctatcttacccactcttattattttcccttttttattccctttgaaagtgacaattccaccatgatagcgagcaggcattagaacatacacctttctcatgtcatgtgccatgagcaaccactc

SEQ ID NO: 12443 - DNA, 332 bp, Glycine max
ttttaggacatgctggattttataggcgattcataaaatacttttcaaaaattgccaaaccactcagtaatttactgaacaaggatgttgtgtttgcatttaatgaagactgcttggaagcttttaatgttctttagaccaggctagtatctacccctgtgattatagcaccacattggggacaagagtttgaattgatttgtgatgctagtgactatgtcgtatgtgctatacttaggcagagaaaaggcagagttttccgtgccatctattatgccagcgaagtcttgaatgatgcacaaatcaattatgctaccatctagaaagaaatg

SEQ ID NO: 12444 - DNA, 398 bp, Glycine max
tgccttgccccttgatatatttgagggactcatggtcgctatgaatgaaaaattccttgggataaaggtagtgttgccatgttttcaaagcccgtactaagtcatacaactacttatcataagttgaatagttaagtgtaggaccacttaacttttcactaaaataagcaattggatggcctgcttgcatcaacacagccccaatcccaacatttgaagcatcacactcaatttcaaaagatttttgaaaatttggcaacgcaagtatggaggcattagttagcttttgcttaagcatattgaaagcttcttcttgtttctctccccatttgaaaccaacatttttcttgagcacttcattgagaggtgctgccaatgtgctaaaatccttcacaaat

SEQ ID NO: 12445 - DNA, 354 bp, Glycine max
agcttcaaccaagatgggatggtccatttcaagtacttgaaaggataaatgacaatgcgcacaagattgaattgcccgatgagtataatgtgagtactacatttaatgtgtctgacttaacgctttttgatgtagatggagaagtcgatttgaggacaaatccttttgaagagggagagagtgatgaggacaaggcaaggaataagggcaaggaatctttataagaacttggaggacctatggcaagggctagaacaaagaaggccaaggaagctcttcaacaagtattaaccatgctatttgaatttagacccatgttacaagtggagaagcttcggattgttaattgcacca

SEQ ID NO: 12446 - DNA, 395 bp, Glycine max
tgccatgaattgtttcatgtgtactattatagaggctggcataatcctgtcataaaacacaaccataaactaaaataagcatatgtgatcagtgtcaaaataaaatgcaaccatttacaaaaccaatcaagaaaataagaatagattattacagctaaccaatcaacaagcctttcaggtagccatgcttgagattgcttgtccacataaaatatttcaattaactcccacgcagctttcaaagatgtaggctcttcacctctctatattatgtgtaatgtgttaaaaagcaagtgattaacttctcggtatcataattcccacaaagcagatctcagctcagctaaacacgggtaaacaatttagaacctaaaacagtaccttagcaattacat

SEQ ID NO: 12447 - DNA, 371 bp, Glycine max
tcaacattcaacttcgagcgtctcgttatattatacgactcaattagacatccgagtaaaaagttattgtcgtttgaatttgctcagagcttcaacattcaatttcgagcgtctcaatatatgacgggactcaatcagacatccgagtaaaaagatattgtcgtatgaattggctcagagcttctacattcaattttgagcgtctcgatatatgacgggactcaatcaggcatccgtgtaaaaagatattgtcgtttgaattggctgagagcttcaacattcaatgtcgagcgtctcgatatgttacgggactcaatcacacattcgagttaaaagttattgtcgttgaattggctcagactttaacattc

SEQ ID NO: 12448 - DNA, 397 bp, Glycine max
ttcaacatcagggttggggcagcagggacatgaaggtatccattctattccaattctctccttttgtctttttattagtattttttttaaattgaactaacattctatgctcttaagtttggcttcttttcatacttgtatataaatgtaaggtgtccctttcatacccccttttgtgttgcttggacatgcttgtgagttttttgttttccttttctctttttgataatttgattggacatgcttgtgagttttttgttttccttttctctttttgataatttgattgatgtgtgagcaatgatggttaggaggggagaagaagtgtctgaattctgagctatggcatgcatgcacgggccccttggtgtccctaccaactgcagggactcatgtg

SEQ ID NO: 12449 - DNA, 259 bp, Glycine max
agcttttggaaggatcaataagtgccttatgaatcctcccgtgcttatgccaccagtacctggaaggcctctcattttgtacatgacaatcttggacgagtcaatggggtgtatgctggggcaacatgacgaatccggaaagaaagagcgcgttgtttactacctaagtaagaagttcacgacctgtgaaatgaattactccttgctcgaaagaacgtgttgtgctttagtatgggcatcccatcgcctaaggcagtac

SEQ ID NO: 12450 - DNA, 395 bp, Glycine max
tgaaggcaaactggatgcgttggtcaacttggtaacccagctggccttgaatcagaaatctgtacctgtcgcaagggtttgtggcttgtgctcctctgctgaccaccatacagacctttgcccttccatgcagcaacctagagcaattgagcagcctgaagcttatgctgcaaatatttacaatagacctcctcaacctcagcagcaaaatcaaccacagcagagcaattatgacctttccagcaacagatacaaccctggatggaggaatcaccctaacctcagatggtccaaccctcagcaacaacaacaacagcctgctccttccttccaaaatgctgctggcccaagcagaccatacattcctccaccaatccaacaacagcaacaacccc

SEQ ID NO: 12451 - DNA, 371 bp, Glycine max
  unsure at all n locations
agctttggagtnttttgttacaattcgncttcttctttggtccagtcttcttctggcttcaattcatcagtgggctttccttctgtgtccagcatcttgggatgttcccagcctttgatgacagctttccaggttctgctatccagtgatttgaggaaggccaccatccttgctttccagtattcatagttggttccatctaggattggtggtctgttcactggtcctccttctttctccatgttcatcagaatttatctccctagatctcactctgtgatttcgagtgttggctctgataccaattgaaattctgataccaggggacagatgtcgtaccggatgtcacgacatcatgcttcagaacatgc

SEQ ID NO: 12452 - DNA, 278 bp, Glycine max
agctttcgtgaaattgaattggtcataacccttcacaccgatgtccgattcaggcgcataatatatcgagaagctcgaaattgaacaacggaagctctcgagaaattaaaattttcataactttccactcggatgtccgattcaagcacatcacatatggagacgctcgaaattgaagcacggaagctcttgagaaattgaaattgtcataacttttcactcggatgtccgattcaggcacatcatatattgagatgctcgaaattgaacaacggaag

SEQ ID NO: 12453 - DNA, 392 bp, Glycine max
tcagttcactacttcaagtagtgcatgatatgcttccagaggaaaacatgttgccaaaacattactatcaggtgaagaagatactgtgttcgatgggtatagagtatcagaagattcatgcatgtcctaatgattggatactatacatacatgagtttgaagaaaggcacaaatgccctaggtgtgggctatcgaggtacaaagtgaaggatgacgacaagtgtaacagtgacgaaaactcaaagaaatggccccccggcaaaaggtgttgtggtatcttccgatcatgccaaggtttaagcgtatgttttctaatggagatgactcaaaagaccttacatggcatgcagatgggagaaacggtgatggaatgctccaccatttggctgatt

SEQ ID NO: 12454 - DNA, 402 bp, Glycine max
tgccaacccatggaagctcctaatatctcccacactttttggggcgggccattcttggatggccttgattttctcagggtccacttggagcccatttctaccaactacaaaccctaagaaaactatattatctacacaaaaagtacacttctctatatttgcttagagggtgtttttcctaaggactgaaagaacttgcctgagatgtcctaagtgatcatctaggctcctactgtacactaaaatatcatcaaaataaacaactacaaatctacctatgaaatcccttaagacatgatgcataagcctcataaaggtgcttggtgcattagtgagcccaaaaggcatcactagccattcatacaaaccaaacttggtcttgaaagcggttttccactcatc

SEQ ID NO: 12455 - DNA, 394 bp, Glycine max
tcaagaataatggccttagcaaacttcttattcccaaatggaaattcaataaataggcctcctatttttaatggagagggttaccactactggaaaacccgaatgcaaattttcattaaggcaatagacttaaacatttgggaatccatataagttagaccttatgtacccaccatggtggctagaaatgcaacaatagagaaacctatagaatagtcgactgaagatgaaagaagattagtgcagtacaatttaaaggctaaaaacatcattacttctgccctatgaatggatgaatattttatggtttcaaattgtatgagtgctaaggatatgtgggacactctacaaattacacatgagggaacaactgatgttaaacgatctatgataa

SEQ ID NO: 12456 - DNA, 394 bp, Glycine max
tcttggggttggctggctattataggaaattcattgagggattttccaaattggcattgcccctaactaagttgactcgtaagaacgagaagtttgtctggaatgagaagtgtgatcaaagtttccaagagttgaagaggcggttgacgacagctccgatgttaattttacccgaccctaagagaccatttgaagtgtattgcgatgcaagtgggcaaggcctgtggtgtgtgttgatgcaagagggaagagtggtggcttatgcttcatgtcaattacgtcctcatgaagttaactacccgacccatgacttggaactagcagcggtggtctttgccttaaagattaggaggcattatttgtacggtactcgttttgaagttttcagtgatca

SEQ ID NO: 12457 - DNA, 395 bp, Glycine max
taaacattcaatttcgagcgtttcgttatattactagactcaatcagacatccgagtaaaaagttattgtcgtatgaattggcttaaagcttaaacattcaactttgaccgtctcgatataatacgggactcaatcagacatccgagtaaaaagttattgtcgtttgagttggctcagaggttcaacattcaatttcgagcgtgccgatatattacgtcactgaatcagacatccgagtaaaacgttattgttgtttgaattggcctatagcttcaacattcaatttcgagcgtgtcgatatattacgagactcaatcggacatccgagtaaaaagttattgtcgttagaattggctcaaaggttaaacatacaatttcgagcgtttcgttatat

SEQ ID NO: 12458 - DNA, 363 bp, Glycine max
agctttgagccaattctatctactataactttttactcggatgtccgattgagtctagtaatatatcgacacgctcgaaattgaatgttgaagctctaagcctattcaaacaacaataacgttttactcggatgtccgattcagtgacgtaatatatcgggatgctcgaaattgaatgttgaacctctgagccaactcaaacgacaataatgttttactcggatgtctgattgagtcccgaaatatattgagacgctcgaaattgaatgttgaagctctgagccattcaaacgacaataactttttacttcgatgtgtgattgagtcccgaatataattagacgctagaaattgaatgttgaa

SEQ ID NO: 12459 - DNA, 369 bp, Glycine max
tgtcatacttgttccagaaaggagaatatatgtttttgttaatgtttgcgccatgtcaaagtgccacaaggatactcttcaaatgttaagagccttgtgcagttcgaatttctaaaatggcgatacaagacattttacctaacaaagtcaagcatgccataactcgcttgtgctttttcttcaatgccatatgtagcaaagtcattgatcctctcaaatcgtatgagctggaaaacaagactgctattatcttgtgtcagatggagatgtattttcctctttcatttttttgtcatcatggctcacttaattgttcattctatgagggaaataaatgttatggtcccgtttatttgtggtggatgtacc

SEQ ID NO: 12460 - DNA, 367 bp, Glycine max
agcttagaactcctcacttacaagttgctttaaggattttgagacatttgaagggatctccaggcttaggcctattctattatgttgataatgacttgaagatccaagtcttctttgattcagattgggcgatatgtccagttagcagaaaatcaatcactggttattgtatttttcttggaaaatccttgatctcttggaaagctaagaaacaaaccacaatttctaggagttctactgaagttgtgtatagagttcttgcttctcttgcttgtgaattatagtggctgaagtacctttgtgatgatcttcatcttcctattcttgttcctttttgtactttttctgatagtgagtctgcaattta

SEQ ID NO: 12461 - DNA, 388 bp, Glycine max
tggaggaagaaggagatgaatgaagggagatgaagagaagagcacgaaattttgtgcttaaaaaagctcggaaatctgaagtttaattttcaaatgatcaaagttgaaaaaatgcacacacatagtctctatttatagcctaagtgtcacacaaaattggagggaaatttgaatttctattcaaatttcacttgaatttgaaattgaatttgtggagccaaattttggagacaaaatttcactaattatgattagtgaattttagatatggttcagcccactaatccaagatcaagtccaagattctccactaagtgtgcttatgtgtcgtgaggcatgtaaaacatgaaggacatgcacaaagtgtgactatatgatgtggcaatgg

SEQ ID NO: 12462 - DNA, 371 bp, Glycine max
ttgaggattttcaaacgacaataactttttactcggatgtctgattgagtcccctaatatatcgagacgctctaaattgaatgttgaagctctcagcaaattcaaacgacaataactttttacttgaatgtctgattgagtcccgtaatatatcgagacgctcgaaattgaatgttgaagctctcagcaaattcaaacgacaataacttttttactcagatgtctgattgagtcccgaaatatatcgagacgatcgaaattgaattctgaagttctgagctaattcaaacgacaataactttttactcgaatgtctaattgagtaccctaatatatcgagacgctctaaattgaatgttgaagctctcagc

SEQ ID NO: 12463 - DNA, 275 bp, Glycine max
agcttcaactttcaatttctagcgtctcgatatattacaggactcaatcagacatccgagtaaaaagttatcgtcgtttgaatttggtcagagcttcaacattcaatttacagcgtctcgatatattacgggactcaatcagacatccgagtaaaaatttattctcgtttcaatttgctctgaggttcagaattgaatttcgagcgtctagatatattacgggactcaatcaaacgtcttagtaaaaagttattatcgtttgaattagctcagaa

SEQ ID NO: 12464 - DNA, 313 bp, Glycine max
agcttatgctgcaaacatttaatatagacctcctcaacctcagcagcaaaatcaaccacagcagaacaattatgacctctccagcaacagatacaaccctagatggaggaatcaccctaatctcagatggtttagccctcaacaacaacaacaacagcctactccttccttccaaaatgctgctggcccaagcagaccatacattcctccaccaatccaacaatagcagcagccccagaaacagcaaacagttgaggctcctccgcaaccttccctcgaagaacttgtgaggcaaatgactatacagaacatg

SEQ ID NO: 12465 - DNA, 387 bp, Glycine max
tgtatcaaattcaaacgacaataagttttttctcggatgtccaatagagtcccgtaatatatcgagacgctccaaattgaaattggaagctcgtatcaaattcaaacgacattaacttttgacttggatgtccgattgactcccgtaatatatcgtgacgctccaaattgaaaacagaagctctaagacaattcaaacgacaataactttttattcggatgttcgattgagtcccgtaatatatcgagatgctccatattgaaaacggaagctcgtatcaaaagcaaaccacaataactttttactcggatgtccgattgagtcccataatatatcgagacgctcgaaattgaaaacggatgctcgtagcaaattgaaaccgcaata

SEQ ID NO: 12466 - DNA, 382 bp, Glycine max
tcttatccaaggcacattcttggtggtgaagctccttcttccttagcttattccctagtggatggcgcctgctctctcctcttctcctttgtcttctgttgcatctccatggtggaaaatcatcattgaaagacctcattgaagctcaaagatccagcctccatagaagctccagaagcaagcttccattaggaatgatggttcttctctcaatcaatcagcctaaaaatattgatgaagaattgagtgaagattctaaggtgattgctatggaagaggaactaagtcagttcattaataacaaggttggaatctagttcctcctcctcagaatcagacagtgattggaaccaagtggatgttcaaaaacaagcttaatgaa

SEQ ID NO: 12467 - DNA, 372 bp, Glycine max
tataagagcatgtagaagcaaatgacttttatgttttgatgatgatcatgatgatttgatgcaaatgatgcaaatgcgcttttcaagtttaaattcaagacaatgattcaagaatacaagacacaacatcaagatgatcactattattttaggaagggaattcctaattgatatagcaaaaggtttggccaagtaatttaagttaaaaatgtttttcaagagatttactctctggtaatcgattaccagaggatgtaatcgattaccagtggccaaaaatggtttacaatagctattaaaaatttaaattcaaattttagattgtgtgatcgattacataatattggttatcgattaccagcagttaataaa

SEQ ID NO: 12468 - DNA, 178 bp, Glycine max
agcttctatagaaggttctttcctaatttctctaaaattgcctcacctttcaatgagctggtgaagaagaatgtggcatttacctaggttgaaagacaagagcaagcctttgctttgctcaaagaaaatcttactaagggacctgttctaactcttcctagattttctaaaacttttg

SEQ ID NO: 12469 - DNA, 364 bp, Glycine max
tttacgtaaaaaccaaactgatcgctggaatgaggattgccaagaggcttttggaaggatcaagaagtgtcttatgaatccccctgtgcttatgccaccagtacctggaaggcctctcatcttgtacatgacaatcttagacgagtcaatggggtgtatgctggggcaacatgacgaatccggaaagaaagagcgcgctgtttactacctaagtaagaagttcacgacctgtgaaatgaattactccttgctcgaaagaacgtgttgtgctttagtatgggcatcccatcgcctaaggcagtacatgctgagccatactacctggttgatatccaagatggacccggttaagtacatctttgaa

SEQ ID NO: 12470 - DNA, 389 bp, Glycine max
tgctaacccatggaagctcctaatatctctcacactttttggggtgggccattcttggatggccttgattttctcagggtccacttggaccccatttctaccaactacaaaacctaagaaaactatattatctacacaaaaggtacacttctctatatttgcatagagggtgtttttcctaaggactgaaagaacttgtctgagatgtcctaagtgaaaatctaggctcctactatacactaaaatatcatcaaaataaacaactacaaatctacctatgaaatcccttaagacatgatgcataagcctcataaaggtgcttggtgcattagtgagcccaaaaggcatcactagccattcatacaaaccaaacttggtcttgaaagcag

SEQ ID NO: 12471 - DNA, 194 bp, Glycine max
agcttgtaatcgattacactcatactgtaatcgattaccagaggagtttttcagaaaacattctcaacagtcacatctttttatctgattcttaagtggccatcaaaggcttatatatatgtgactagagacacgaattgaacaagagttttgaagaacaaaaaggtcttatcctcttaacaagcaaaatgttt

SEQ ID NO: 12472 - DNA, 230 bp, Glycine max
agcttgtaattgattacacacatactgtaatcgattaccagagaagattttcagaaaatattctcaacagtcacatcttttcattttgttcttaaatggccatcaaaggcttatatatatgtgacatgagacacgaatttgctaagtttttttcagaacaaaaaggtcttatcctcttaacaagcaaaattgttttatcctcttacaaattccttggccaaaacactgtg

SEQ ID NO: 12473 - DNA, 265 bp, Glycine max
  unsure at all n locations
agcttcttcataaatgtgtcatttgtgcgcaatacacaatgctcggtacaccacaacaaaatggtgtatcagaaaggcgtaatagaactttaatggacatggttaggagtatgttaatcaatttgactatacccgtatctttgtggatgtatgctttgaaaactgccatttatttgttgaataggattcctagtaaggcagttccaaagacacttttgaatgtgtgacaataggacactcatataaggcactcnctgtttggggt

SEQ ID NO: 12474 - DNA, 266 bp, Glycine max
  unsure at all n locations
agcttccatcaactggtatcagatcttcaatgaagaacctcaagatttgaggtcaaatcctttccaaggtggagggaatgatgcaatcctaccccacaaggtcattggatagaagactccaagtagattgggtcagagatccaagggaaggccctagggttctcatgagccttagggtagattttgagacccatagctaagtatgaagccttctttgtttngaaaanatcanatntgtttttnctttttttggggctcgtgttttg

SEQ ID NO: 12475 - DNA, 399 bp, Glycine max
tgaaggtaaaatagatgccttggttaacctggtaacccaactggccatgaatcaaaaatttgcacctgtcgccagactctatggtttatgctcctctgtcgaccaccgcacagacctttgcccttctgtgcaacaatctgaagcaattgaacagcctgaagcttatgctgcaaacatctacaacagacctcctcaaccttagcagcaaaatcagccacaacagaacaattatgacctcttcaccaacaggtacaatcccgggtggaggaatcatcccaaccatagatggtcgaatcctttacaacagcagcaacaacaaccttattttcaaaatgttgctggcccaagcagaccatacgttcctccaccaatccagcagcaacatcagcaacagcacca

SEQ ID NO: 12476 - DNA, 371 bp, Glycine max
agcttgtcaacagagttcatcaagttaatatctctattcctttaggatgcttgttgttccactaaaattctgattatgcgtatgaaaaaaaaatttattggaagaatcaaaacttattttggttatttctattcccctagatctagtcttatgattttttattatggacatagtttcttttcgaaaaaaataatatatttaatttttatgtattattaatttagtcaccttaaaaagttaatatgatttaatcaattaaatactataaatctataatagctttgatttttaagaaaataatcatgcaaattaacaaatttattttatatgataatttgtaattaaatattaataatataaaatcccattga

SEQ ID NO: 12477 - DNA, 194 bp, Glycine max
agcttttgagaaactcaaatggtcattacttttcactcggaggtccgattcaggcgcatcacatgtcgagacgctcgaaattgaaaaatggaagctcttgagcaattcaaatggtcataaattttcactcgtacgtccaatacaggcgcataatatatcgagaggctcgaaattgaacaacggaagctctcgag

SEQ ID NO: 12478 - DNA, 387 bp, Glycine max
tgccgccacggagttttccgactattctcttgtgtggtggaagtgattatgcaagttgaagtggacgtttccattgggaaatacaatgataaggtactttgtgatgttgttcctatggaggccagtcacttacttttggggagaccatggcaatttgataaaagagccaatcatgacggttacaccaacaagatctctttcattacttttggtgttgcataaaaaatgtacaatgtaagtcggctaggtttttttgtgcgagctcaaccgacattttgtttcggccgaaactggcatgttcccatttattttggccaggataacattatcccacctcggcagaaaaatatttgctattccacttcatgcatattttattcacggaat

SEQ ID NO: 12479 - DNA, 203 bp, Glycine max
agcttgaaattgatctatgtatgctctcgacaaattcgattggtcataacttttcacacggatgtctaattttgggacctaatatatcgagatgctcgaaattgaacaacggaacctatcgagaaattcaaatgttcaaaacgtttcacacggatttccgattttgggacataatataccgagatgctcgaaattgaacaacg

SEQ ID NO: 12480 - DNA, 366 bp, Glycine max
agcttgtaatcgattacactagtcttgtaattgattacctaaggagattttcagaaaattatttccaagagtcacatctgttcaaatggtttttacatggccatcaaaggtctatttatatgtgactaggaacacaaatttgctgagagtttttttaaagaacaaaaaggtattattctctcaaaaagaaaaatcttcttatcctcttaaaaattccatggccaatacacttgcaattcaataaggaattttttgagtgctcaattgttcaatctatctctttcaagagagatttcttcttctcttcatcttacttctaaaaagggattaagagaccgagggtctcttattgtaaagaaatctgaa

SEQ ID NO: 12481 - DNA, 309 bp, Glycine max
agctagcagggttaaagtctcacgattgtcacgtgctcatgcaacaattgttagttgtggctatacgagacatcttgccaaacaaagtcaggttagccataactcgcttgtgctttttcttccatgctatatgtagcaaagtcattgatcctatgaagtttgatgagctggaaaatgaggccgcaattatactgtgccagttagagatgtattttccccctactttctttgacatcatgattcacttgattgtgcatctggtcagagaaatcaaatgttgtggtcttgtttatctacggtggatgtacc

SEQ ID NO: 12482 - DNA, 449 bp, Glycine max
  unsure at all n locations
cttgatggtgttgagaagaaatcacnngtttgtcatcatcaataagggggagaatgtgaatgtncgtatacatgattntgatgatgtcaaagaaggatctaacaaggctgcttcaaatgatnagcatttgcttcaagaatgattcaaggttgcttcaacaaacaaagccttgtttnaagattcactaaagaccaagccttgccttanaacaaagtgctttcgagacaagcaaggctctggtaatcgattaccaggaagtgtaaacgattaccagaagacagggttgagaaatagctattgaaaaatgttttngaattgaattttcaacacgtaatcgattaccatatgtctgtaatcgattaccagcaacggaactttggaaattcaaattcaaaagtcataacccttcaaanataattgtgaatcgatacacaaacattgaatcgata

SEQ ID NO: 12483 - DNA, 418 bp, Glycine max
agcttccaagaatcaagatcaagactcaagattcaagaatcaagagaagaattaatcaagataagtatgaaaaagttttttcaaaaactgagtagcacatggatttttctcaaaacatgtttaccaaagagtttttactctctggtaagcgattaccagattgttgtaatcgattaccagtagcaaaatgtttttgaaaaagttttcaactgaatttacaacgttccaattgatttcaaaaagctataatcgattacaatgttttggtaatcgattaccaatgtgcttgaacgttgaaattcaaattcaaatgtgaagagtcacattctttcacaagaaaagctttgtgtaatcgattacactgatttggtaatcgattaccagtgatagtttctgaacaaatcataagatgtcactc

SEQ ID NO: 12484 - DNA, 387 bp, Glycine max
gctttgatgaacattcggagaggttaatgtaacaacgagatgatgcgctccatgagaggttggatcaaatggagaatacagaccatatgaattgctcaagagcttccattgttcaatttcgagcgtctagatatataatgcgccttaatccgacctacgagttaaaagttatgaccatttgaaatgctcaagagcttccattgttcaatttccagcgtcacgatatattatgcacctgaatcggacctgcgagtgacaacttatgaccatttgaattgctcaagagcttacattgttcaattttgagcgtcacgatatattatgcacctgaatctgacctgcgagcgacaacttatgaccatttgaattgctcaagagcttccattg

SEQ ID NO: 12485 - DNA, 454 bp, Glycine max
  unsure at all n locations
agctngcaaaccaaatgctcaccatttctatatgagaagccttcaggttgtttcatataaacctcttcctctaaatcaccattaagaaaggttgttttcacatccatttgttgcaactcaaggtcaaaatgagcaactaatgctaagataatacaaagagaatctttcttaaatataggagaaaaagtctctgtgtagtcgattccttttttttttagtaaatcccttagcaacgagtctttccttgtatctctcaatgttgcctaatgaatcccttttagtcttaaatgtaacatcccatttttcgtgaattaaattaaaaaggttttagagttctagaaaaaaaaatgatgaggcttttgttattaaataaataagaagaaataacattattaatataatggttcgaaggaaaataaaaatgatatttgattattcatttgatagaaaataa

SEQ ID NO: 12486 - DNA, 339 bp, Glycine max
gcttcaacattcaatttcgagcgtctcgatatatgacaggactcaatctgacatccgagtaaaaagttattgccgtttgaattggctcagagcttcaacattcaatttcgagcgtctcgatatatgacaggactcaatcagacatccgagtaaaaagttattggtcgttgaatttgctcagagcttcaacattcaatttcgagcgtgtcgatatattacgggcctcaatcagacatccgagtaaaaagttattgtcgtttgaattggctcagagcttccacattcaatttcgagcgtctcgatatattacgggactcaatcagacatccgagtaaaaag

SEQ ID NO: 12487 - DNA, 414 bp, Glycine max
  unsure at all n locations
agctcgctctaaatntacattgatgtttgtatttatgtgaggaggttgtacgccatttttgttttaagagtagtgtcccactggtaaaactaactttccaaatttttgccttcgcaggaaatggccccgaggaagcttgcctcaaagaggtccaggaaggacaaggcagccgaaggaactagttccgctccggagtatgacagtcaccgctttaggagcgctgtacaccagcagcgcttcgaggccatcaagggatggtcgtttctccgggagcgacgcgtccagctcagggacgacgagtatactgatttccaggaggaaatagctctacggagttttaaaagattggctaagattntgttaaaacataagcacttagacaatgaaggaaagctggagttgctgcacatgatg

SEQ ID NO: 12488 - DNA, 439 bp, Glycine max
cgcaagcttcaacattcaatttgagcgtctcgttttattacgggactcaatcagacatccgagtaaaaatttattgtcgtttggattggctcagagattcaacattcaatttcgagcgtctcaatatattacgggactcattcagacttccgagtaaaaagttattgtcgtttgaattagcttagagcttcaacaatcaatttcgagcgtctcgttatatcacgggactcaatcagacatccgagtaaaaagttattgtcgtttgaattggctcagagcttcaacattcaatttcgagcgtctcgatatatgacaggactcaatcagacatccgagaaaaaagttattgtcgtttgaatttgctcagaggttcaacattcaatttcgagcgtctcgatatattacaggactcaatcagacatccgagtaaaaagatatt

SEQ ID NO: 12489 - DNA, 452 bp, Glycine max
  unsure at all n locations
tacgtgaactataaaactaagcttaagctagaggagacggaccattccaagtgttggagaagattnacgacaatgcctacaagattgacttgcctaggtagtataatgtaagtgccactttcaangtgtctgacctctctcttcccgatgnagatggaggagccttggatttgaggaaaaatccttttcaagaaggagggagtgagtaggacacaactaaggacaaggaccatgaagcacttgaagcgcccatgaccagaggcagacttaaacaggcccaacacatattagagacaaggctggccatttgtatagctgccattgatgatggttaaaggcccaagtggagaaagatgaaggcccagaggcagagccactaccaagactattaattgttgctgaaggcccanactaatttataagcccaagttaaatatatttttagttataat

SEQ ID NO: 12490 - DNA, 452 bp, Glycine max
  unsure at all n locations
agcttatgctgcanatatttacaatagaccttctcaacctcagcagcaaaatcaaccacagcagagcaattatgacctttccagcaacagatacaaccctggatggaggaatcaccctaacctcagatggcccagccctcagcaacaacaacagcagcctgctccttccttccaaaatgctgctggcccaagcagaccatacattcctccaccaatccaacaacagcaacaaccccagaaacagccaacagttgaggcccctccataacctttcctcgaagaacttgtgaggcaaatgactatgcagaacatgcagtttcagcaagagaccaaagcctccatttagagcttaaccaatcagatgggacaattagctacctaattgaatcaacaacagtcccagaattctgacaagctgccttctcaagctggtctaaaatccaaaaatgtca

SEQ ID NO: 12491 - DNA, 200 bp, Glycine max
agcttacacacaagaccatactccctctgcgtctcaaacccaggaggttgctccatataaatatcctcctcaagatcaccatggaggaagacatttttaatatcaagctgatggaggggccagtgatgtatggcagccatagcaagaaacagacgaacaatagtgattttggctacaggagaaaaagtatcacaataatc

SEQ ID NO: 12492 - DNA, 411 bp, Glycine max
  unsure at all n locations
agcttcacattctagacaaggtcaagttcattgcgtctgctacaaagtctacaaccaacagaataatgaacaagttctaagtaacagaaacaagtgcatgatgtatagtgttaaacaaatagagacattgacaccgagtctaacctgcatcttctttggtgaaacacaagggaggtgtaattctgaagacatttccatagtaaccacccttaccaataagtactcctagttctatagtaatttagaatgaccggttagtaataatatagaagaaaactatagctaggatcaaaatatgtgtctagactagagggatatggattttacctttcattnggtccattacatgcaatgtttcattttttgctggagttttaagttcacgatcagtgacaagttcaactcctagca

SEQ ID NO: 12493 - DNA, 387 bp, Glycine max
  unsure at all n locations
ttatccatgacttcctatggtggtcagcttgtgcttgactcttcttctccttgaagtgacanctccaatcatctttcttccttctccattccgntaccattgacctccaccacacacccgcctccatcgatgaccaagatccaagggctacaagctccacatggagctacatcaaatcttctaagtgcttgacttgctcttgtgcaagactcttcatgttattttggttttctctttctatcatttgctttttggcatcatcaaaatctacaacattacatataaccacaatcactagcaccgttaccaccacctccatcatcattgccaccaccatcgtaaccaacatcaccactactactgacattggtaccaccaccataacca

SEQ ID NO: 12494 - DNA, 370 bp, Glycine max
caatgtggaaaacaaagtaagatcgcgagatcagatagaggtggggagtactatggtagatacacagaggatggacacacaccaggttcatttgcgagatttcttcatgaacatgggattgttgcccaatacactatgcctggttctccggatcagaatggtgtggcagaacgaagaaatcgaaccttattagacatggtgagaagcatgaggagtaatgtaaagcttcctcacattttgtggattgatgctcttaagacggctgcgtatatattaaaccgagttccaaccaaggctgtctcaaagacaccttttgaattattcaagggatggaaaccaagtttgcgacatatacgcgtttggggatgcc

SEQ ID NO: 12495 - DNA, 471 bp, Glycine max
  unsure at all n locations
gacccgggatacttagagtcacctgccgcatgcaagcttgttcttaactcatcttctccttgaagtggcatctccaaccatctttcttccttctccattccactgtcattgatcttcaagaagcaaaagactccattgatgaagaagatccaaggcctacaagctccatatggagctatgtcaattactaaataaaacttattaaaaacatattcggttcagaacaaggccgtcaaagtttacaaaagaaattttgttaaatcaatgagatgaaataaaataaaataacaacatgcaattaaaagaaaaattcatcctcaatgttgcatcctatcagagcattgtgtcctaacatcctctagcacgaggttctttaaagtcatctacctagtcatctgctcccatgaacacaagattcgagatcatcacaagatccanacacaaataacacacagggagtgaattatcaca

SEQ ID NO: 12496 - DNA, 453 bp, Glycine max
  unsure at all n locations
agcttccgcggatgaatttgtctagagtaaattcttcattntatttatcatgtcgtggggatcgagggaaaaacgctcagaaactaatggcccactaccactaggaaatgaagtacatgctttatcagcattaatatattgttggtgttcattacaaaaaactaaataataaaagggaaattaattntaatcatatctcaaccaaaagagaatcaaataggaatttaggagataatataataaaggtgttttaggtcaaatgctttagatttctataaaataattttttatatattcttaaataaaagatatttctgaaatattaaataaatctgaatccaatataatatttatttaaaaaatgttctatgttgattattttatttacttttaagatttctaactcgtcacaactcataaatcctaataataaaattaagactgaaatataat

SEQ ID NO: 12497 - DNA, 458 bp, Glycine max
  unsure at all n locations
ttaagtcacctgangctgcagctaagctccttcaactgcacaaagctcttaatatttgaagagtatccttgtggaacctttactcgacgaagacactgacaaaaacttatcttctccttcttggacaaagtatggcaggttgggggcaagtaaattttcttcccatcagaccttggatgcaactgtgatcgtatacccatatcagctagatcttgacgggtattcaagccatccttcgtcttgccttgaatgttaaggagcgtcctaatcacactgtcacaaacatttttctccacatgcataacatcaatacaatgtctaatgtcaagatcacaccagtatggaagatcaaagaanatggacctcttcttccatatgcaactctgacttttatccttcttttgggtcttcctaaatacagtattcaggtgctgaacctgctgatatacctactcact

SEQ ID NO: 12498 - DNA, 448 bp, Glycine max
  unsure at all n locations
tggaagaactaaacttgagaaattgcaatcctatgaggttgttgatggataacaaatcancaattgatttagctaagcatcctgtggcacntggcaggagtaaacatattgaaaccacatttcatttcctacgtgatcaagtgcataaggagaaacttgaattggattttttgaggtctgaagatcaagttgcagacataatgatgcaatcctaccccgcaaggcattggatagaaaaactccaagtagattgggccagagatgcaagagaaggccctaggcttcttatgagccttagggtagatttcgggcccataggctaagtacgaacccgcttatctttgtaaatattagattaaggtttcattatttttgggccttgtatttagggctccataatgtangtagcggaccctagaaatatangatttttcagcccttgtatttt

SEQ ID NO: 12499 - DNA, 447 bp, Glycine max
  unsure at all n locations
agctttgtagtcctctntgatcaaaggttcatatattataattctcaggccataatagggatgatagaaatagatctaaaccaaatagtctccctaatttatattgcccctaattacacaatgaatcttaatgatttcatacaaaacataaacctagaagtccaggcaatagggtttggaagaaactttgagggacataacttacacttggatattaccttcattggcagaataagtgatcaaatatcccctagatacatgataaacactaatccattagtgacaaccttatcatctgatggaatccaatttttgccacccgaaatctttgattcctctagaaaccaaaacaatcaatggcaaaaacatatagatgctggatcctctaggatggcaataaccattcgtggatcagctataataacaaacagaagagatagtctttta

SEQ ID NO: 12500 - DNA, 411 bp, Glycine max
  unsure at all n locations
agctntgtagcagatgccactctactctaaattttngaaagatatgttaacaaggaagcataaatatattgatcaggaaaacatcatagtggaaggaaattgcagtgctgtgatccaaaagatccttccacccaagcataaagatcctggaagtgtaactattccttgttcaattggagaagtcaatgttggaaaagctcttattgacctgngagccagcatcaatttgatgccactctccatgtgcagaagattgggagagttggaaataatgcccactcgaatgactttacaattagctgaccgctccattactaggccatatggagtaattgaagatgtgttggtcagagtaaaacattttatcttcccggcagactntgtggtaatggatatctctaaagatactga

SEQ ID NO: 12501 - DNA, 400 bp, Glycine max
  unsure at all n locations
agcttcaacattcaattntgagcgtctcgatatatgacgagactacatcatacatccgagtaaaaagttatagtcgtttgaatttgctcagagcttcaacattcaatttcgagcatctcgctatattacgggactcaatcagacatccgagtaaaaagtttgttgtttgaattggctgagagcctcaacattcaatttcgagcgtctcgatatattaagggactcaatcagacatccgagtaaaaagttatggtcgtttgaatttgctcagagcatctacattgaattgcgagcgtctcgatatattacgggactcaatcagacatccgagtaaatagttattgtcgtcggagtatgctcagaggttcaacattcaatttcgagcgtctcgatatattac

SEQ ID NO: 12502 - DNA, 345 bp, Glycine max
  unsure at all n locations
ntcactcggaggccncattcaggcgcataatatatcgagacgctcgaaantgncaacggaagctatcgagaaattcaaatggtctatacttctaactcggaggtcctatagaggtgcataatatatctagacgctcacaattttacaatggaagctctntggctntacaaatggtcataacttttcactcgagcgtccgattaaggcgcataatatatcgagacgctcaaaagtgaacaatggaagctcttgagcaattcaaatggtcataactngtcactcggaggtccgattcaggcgcataatatatcgtgaccgctgaaattgaacaatggaagctcttga

SEQ ID NO: 12503 - DNA, 443 bp, Glycine max
  unsure at all n locations
tcagctgcttctcaactcnntgcttctcaatgccccaccaagaaaaccatgattatgncgggccaagacatttatagtagccaagatgaggttactacttcacctttctatagtgacagtgaagaagcaaaagggaaagaatntagtgaagaaatctacccccaagaagaagggaaccttttaatggtcagaaggcttctaggaggccaatctagtgacttgaactaatctcaaagagngaatatttttcacacaaggtgtaaaattttttataacatgtgctctctcattgtagatggtggttcatgttgcaattgttgtacnacaagattagtctctaagttaagccttgctatcactccccatccaaagccttacaaacctcaatggctcaatgaacaaggagaaatgatagtcaatcaacaagtgaaagtgtcattctc

SEQ ID NO: 12504 - DNA, 417 bp, Glycine max
agcttataatatattgatatgctcgaaattatacattgtaagctctcgagaaattcaaatggtcataacttttcacacggatgtccgattcgggcaaatcacatatcgagacgctcataactaaacaacggaagctatagagaaattctaatggtcaaaacttttcacacggatgtccgattcaggcgaattacatatcgagacgctcaaaattgaacaacagaagctctcgagaaattcaaatggtcataacatttaactcgaatgtccaatttaggcgcatcacatatagtgacactcgaaattgaacaacggaagctctcgtgaaattcaaatggtcataacttttcacactgaggtccgaatcaggcttataatatatcgatatgcctcgaaataaacatcggaaactctcgc

SEQ ID NO: 12505 - DNA, 454 bp, Glycine max
  unsure at all n locations
agctntaagtaaaaaggaagcatgaaccatgatagcttaagaatcccgaatctaatgtccatgctcantttttaagactccaccaaaacatgaaacacttggatttcccaacggactgccatttttaaggcttgcttttcaaagttcaaattaataaaatggtaaatagtcacttttatatctgaatgtgtagtttactaacaaatgtgtccctganagatgaaaatacaaaatttagttcccaaaatggtaaaaagtgtgaaaaatatatctgactcttaacttccgtccatcaccattaataaaatagtatacgtgacacaaatgaatgaatttatcactgaaatgattgtcaacgtgattatctctactttntgtcttcccactctctangaatatgaatgagtaaatagtcacttttgtccatgaatatgtaattcgctaacaaatgtgt

SEQ ID NO: 12506 - DNA, 393 bp, Glycine max
gacactatagaatctaagcttgacaggaattacttgtatggttggatgtttaattctggttgttcctggtgcggagatgatggtacagcgggtgaaccagaagcggaagtttcttttggtgaggtagccatggaaaagcagagcgtttggaatgatttcgtaaatctcagaaaactattgggaaatgctggtgaaaacacgaatgccaagcagatataaatttgaatgaagaatgtagaggggcgtgtgaagcaacggtcgaatttgctttgtggtgaacgtgctattaatgttaagtgattcgtttgggcacgttcagattgctgtagttgctataattcctctagcaaacaaatgcccagcttgcccctcagttttccaaactgatttgca

SEQ ID NO: 12507 - DNA, 356 bp, Glycine max
ctgcagctcttggatgctacttttatactttcagatcataatgcatcctccaaacaaggagaaaatggcattcatcattgcagatgccaacttttgctataggaacatgccatttgacctcaaaaacataggcgcgacatatcaacgactaatagaccgagtcttcaaagaacagatcagacgaaaaattgaggtatatgtggacgacatggttgtcaagtctcaaagcataccctaacatctggtggacctggaagaagtatttgggaactatgcaaatacgacatgtgcctcaaccctgaaatatacttttggggtaggtggcgacaagttcctcggcttcatgatcacacatc

SEQ ID NO: 12508 - DNA, 384 bp, Glycine max
  unsure at all n locations
tatacggcctangatgtggttttgtgactgttttcaatttaaacacaagtcttttacttgccacattggtacaactccctccatcaatgatcaccatgcaaactttgccattgatcaaacatctagtgtggaaaatgttttctctttgactttcctccatagacttcaattgatgaccaagtaaccgcctaatcatcaacaattctccctccagtgttttctccacttcctcctcatcatcctcactctcttctcccttttcaacttcagactcattaatgtactctccatctctaagaatcatggctttcttgttagggcactcatatgcataatgtcccaagccttggcaccaaaagcacttcacatcctggctcttttttt

SEQ ID NO: 12509 - DNA, 216 bp, Glycine max
cttgtattatacgtagatgatattctgcttgcgactaatgataagggtatactatatgaggtgaaacaatttctctcaaagaactttgatatgaaggatatgggagaggcatcttatgtcataggcataaagatccatatagaaagatctcgatgcattttacgctcgtctcaagaaacctatatcaacaaagtcttagagagaattaatatgaaa

SEQ ID NO: 12510 - DNA, 375 bp, Glycine max
  unsure at all n locations
ataactcggatgtccgantctggcgcacaattgatcgagacacttgatattgaataacagaagctctcgagaaattcgaatggtcctaacttttcacacggatgtccgattcgggcgcataatatgtcgagacgctcgaaattgaacaacggaagctctcgagaaattccaatggacataacttttcactcggaggaccgattcaggcgcataatatatcgagacgctcgaaattgaacaacggaagctcccgagaaattcaaatggtcataacttttaactcagaggtccgattcaggcgcataatatatcgagacgctcgaaattgaacatcgaaagctctctagaaattcaaatggacataacttttcactt

SEQ ID NO: 12511 - DNA, 482 bp, Glycine max
  unsure at all n locations
gatccttgagtcacctgcggcatgcaagcttcccaccaatggtatttaaaattttatgatgtcatttcttcattcagctntgaagagaatatcatggatcactgtatataccagaaggtcagtgggagtaagatttgtttccttgtattatacgtagatgatattctgcttgcgactaatgataagggtatactatatgaggtgaaacaatttctctcaaagaactttgatatgaaggatatgggagaggcatcttatgtcataggcataaagatccatagagaaagatctcgaggcattttaggcttgtctcaagaaacctatatcaacaaagttttagagagatttaatatgaaagattgtttaccaagtgtagctcccattgtgaagggtgacaaacttgctntgagtcaatgccccaaaaatgattntgagcgggaaaacatgaaaaatattccatatgcttcagcagttggaagcct

SEQ ID NO: 12512 - DNA, 368 bp, Glycine max
  unsure at all n locations
ttctttcctagtgtgcaatttaaagaaaatgataatgatcaacagagccttttacacttaatctttattcaatttttatgaaggtcaatcgatacagtaaattggtataccacagccatcagagaactagtttcagaaattctctaaaagctggtgctttaattagatagatgctgccaaacggtgttttattgcccaaatgaaaaattctttattactagtaaagtagaactgatatatcatttctgaatttgttatggcagcttcatacttttccagaaggaaaagtgtatcaagaagatgtgcctataangcggttgaaatggggaactgctagcctaattgttcgagcacctataactccaatt

SEQ ID NO: 12513 - DNA, 344 bp, Glycine max
gcgcttcaacatgatgactgacaagtatggcataaaccctggtatcaatcattattcttgtatggctgatcatcttggtcgtaaaggacatctcaaagaagctttagaaattattaaaagtatgccttctgaacctgattctggaatacggagtgcattgctctctgcttgcaaacttcatggtaagatggagatgggcaagcatgtgtctgaacagctatataaactggagccccaagtggcacgttccatacgcggagatggctaacatatatgcatcagctgaaatgtgggaaggcattgcagctattataagaaatatgatatatcttcaagtcatgaaa

SEQ ID NO: 12514 - DNA, 437 bp, Glycine max
  unsure at all n locations
agcttggatttccttttagtagggaanctantctttctaagatggagccaaacccagtcaccctcattaagaactagctcttttcttcctctattgcctttagttgaatacacctttgtttggttctctattttgttcttaaccctctcatgcaacttctttacaaattttgacctagattccccttctttatgtataaaagaagtgtccagtgggaggggaatgaggtctaacagtgttaggggattgaacccatagacaacctcaaaaggggactgcttggtggttctatgaacccccctgttgtaggcaaattctacatgaggaagatactcatcccaagacttatggttgcctttcagaagagcccttaanagggtggataaaaacctattcactacctctgtttgcccatcagtttgtggatgacaagtggt

SEQ ID NO: 12515 - DNA, 447 bp, Glycine max
agcttctatagaaggtttgttcctaatttctctacaattgcatcacctctcaatgagctggtgaagaagaatgtggcatttaactggggtgaaaaacaagagcaagcatttgatttgctcaaacaaaagcttactaaggcacctgttctagctcttcctgacttttctaaaacttttgagctagaatgtgatgcctctggagtggtagttggagctgtattgttacaaggtgggcaccctattgcttattttagtgaaaaacttcatagtgccaccctcaactaccccacctatgataaagagctttatgccttaataagagccctacaaacttgggaacattaccttgtttccaaggaatttgtcattcatagtgatcatcaatcacttaagtacattagagggcaaagcaagttaaacaagaggcatgcaaaatgggtagagtac

SEQ ID NO: 12516 - DNA, 397 bp, Glycine max
aactcaagcttcatcgacaagcctatcgatgctcttggtagtgtataagcatttttggggcaagccttgttgaggtcggtgtagtctacgcacatcctacatttcttagttgctttcttcaccacgatgacgttggttagccaagttttgtggtccacttctctaatgaatttaacaaccaaaagtttctcggtttccacctcaattgttttcctcctttcgtctctcagtttgcgcttcctctgagctatgggtttatccttagggaagattgccaacttatggaaaatgaagtcagggtcgatgcctgacatgtcagaagcactccattcaaacaagtcggcattgtcaaagagcgcttgagttatctccttttgcacttcgtctcccatctctt

SEQ ID NO: 12517 - DNA, 440 bp, Glycine max
  unsure at all n locations
agcttaatagctcgtatactgatcataatantatagcttataacacactcgagcagggactagtcaacacacttactgaacatacacttactacaatgcataaagtataaaaaataaatacacttgaataagcttgatctcacaattcttaacagcctcacgaacaacatggaaatcactagaatatgctatgtctttccatgctaaacaggattttcagcaatgacaattgcttatttactgtcacaataaatctcagtagcgtccatcttctccactcccaaatcaaacataattttcttcaaccaaatggcttagttagttgctgcagctgctgctacatattcatcttcagcagtagatngagatacaatgtcctgcttatttgagttccaagagaacatgtgtgagcctaacgaaataacatattcagtagtgct

SEQ ID NO: 12518 - DNA, 437 bp, Glycine max
agcttaatagctcgtatactgatcataatctcaaagcttaaaacacactcgagcaagtactagtcaacacacttactgaacatacacttactacaatgcataaagtataaaaaataaatacacttgaataagcttgatctcacaattcttaacagcctcacgaacaacatggaaatcacttgaatatgctttgtctttccatgctaaacaggattttcagcaatgacaattgcttatttactgtcacaataaatctcagtagcgtccatcttctccactcccaaatcaaacataattttcttcaaccaaatggcttagtttgttgctgcagctgctgctacatattcagcttcagcagtagattgagttacaatgtcctgcttatttgagttccaagagaacatgtgtgagcctaaggaaaaaacatattcagtagt

SEQ ID NO: 12519 - DNA, 411 bp, Glycine max
agcttaggaatcaatagcagtttggtgtttttagtttttatgtataataatttcactggtaccctcccaccaaatctttgttttggaaagcacctggtcaggctgaatatgggtggcaatcaatttattggcagcatacctcctgatgtaggaaggtgtacaactcttacaaggttgagacttgaagataataatttaactggggcacttcctgattttgaaactaatccaaacctctcttacatgagcatcaacaacaacaatatcagtggagcaattccatcaagtttgggaaactgcacaaatctctctcttttagatttgtccatgaacagcttgacgggtcttgtaccttcagagctaggaaaccttgtgaatcttcagactttggatctttctcacaataacttg

SEQ ID NO: 12520 - DNA, 423 bp, Glycine max
agctataatatattattacactcgaattatatcatcagaagctctcgagaaattcaaatggtcataacttttcacccggatgtccgattatggcgaatcacatatcgagacgctcaaaattgaacaacggaagctcttgagaaattctaatggtcataacttttaactcggatgtccgattcaggcgcatcacatatagaggcgctcgaaaaggaacaacggaagctctcgagaaattcaaatggtcataactttccacactgaggtccgattaaggattataatatatcaagacgctcgaaattaaacatcgaaagctctcgagaaattcaattggtcatcacttttcacacggatgtccgattcgggcgcataatatgtcgacacgctcgaaattgaacaacggaagctctcgagaaattc

SEQ ID NO: 12521 - DNA, 431 bp, Glycine max
  unsure at all n locations
agcttatttctcattttgttcttttactttaaatttgttaatntgtcgttaaagtgaatttcgtaatagtcgcacgacgtttgatttcaataaatctccttttacatgttttttaaatcttttaatcaatatctattttataaaatcacaatcgtccatttcatgtttagtgcaatttgtgtgaatttactttaataacaaataacatcactatttttggactgaaaaacaaacacacaaacaccttctcataattcactaggtcaggggtaaagatttttagatatcaaaagaatacaggcttatagatggaattgcttggagccaaatatatatatatatatatattattggaaatttctctataattaaggttggttcacattcaagtaaacatgcaagttcaaatacatgagaaattgaagagtaca

SEQ ID NO: 12522 - DNA, 454 bp, Glycine max
  unsure at all n locations
agctntcttcaatcgtcaatacgggtgttatgtttgagaaatcttcaatgcctagtatatattgtattctttccatgtttcaattggatgaagctcgtctctttctcacggataggacatgcatgatgtcctttgacactatatccactcaaattctcatatgctggaaagtcattaatggtacaaatgatcaattgtcttccattggggagaatcagccagatgtcagagcaatccatcacttttttctgccatatgcatcatgttcattagcaaacaatcgcttaaaccttggaattattgaaagatactagcacacctttgctggacgatcattggttgtggttgcatcatcactacatttgtcatccttcattntgtaccacgataccccacatgtatggaacttgcacantttcggcaactaatttctatacaatatgcaatcattatg

SEQ ID NO: 12523 - DNA, 435 bp, Glycine max
  unsure at all n locations
agcttcatgatgttgaatcaatattgattcttgagttttgatgataacaaagatgatgacaaaaagcccaagagaatgagttcaagattgaatcaagaacacttcaagaatcaagagagaatgagtttcaagatttaagttgaagattcaagaatcaagaaaagactcaatcaagataagtactaaaaagtttttcaaaacattgagtagcacatgaatttttcacaaaaccttttaccaaagagtttttactctctggtaatcgattaccagtagcaaaaattgttttcaaaaagctttcaactgaatttacaatgttccaattgatttcaaaatggtgtaatcgaatacaatgatttggtaatcgattaccagtgtggttgaacgttgaaattcaaattcaaatgtgaagagtcacatcctttcacanaaatg

SEQ ID NO: 12524 - DNA, 376 bp, Glycine max
  unsure at all n locations
agcttgaaactgaacaacggcgctctcagaattttatggcttataanncattagatgtccgatgcggggaaataatatatcgagacgcacgaaattgaacaacggaagctctcgagaaattcgaatggtcataacatttcactcggatgttcgatccggggacataatttatcgagacgctcgaaattgaacaaccgaagctctcgacaaattagaatggtcgtaacttttcacgcgaatgttcgattcggggacataactcatctagacgctcgaaattgaacaactgaagctctcgagaaatttgaatggtcataagttttcacacggatgtccgattcgggaacataatatatcaagacaatcgaaattgaac

SEQ ID NO: 12525 - DNA, 383 bp, Glycine max
  unsure at all n locations
tctttccatgcctcaatcggatgaagctcgtctctttctcacggataggacatgcatgatgtcctttgacactatatccactcaaatactcatatgctggaaagtcattaatggtacaaatgatcaattgtcttccatcggggagaatcagccagatgtcagagcaatccatcacttntttctgccatatgcatcatgntcattagcaaacaatcgcttaaaccttggaattattgaaagatactagcacaccnttgctggacgatcattggttgtgggtgcatcatcactacatttgtcacccttcattttgtaccacgataccccacatgtagggaactcgcacatttccgcaaactaattnctatacaatatgcgatcat

SEQ ID NO: 12526 - DNA, 369 bp, Glycine max
  unsure at all n locations
tttacattctggaatcgtttatcctatctctgacagccaatggatgagtcctgtccaggtagtcccgaagaaaaccggtctcaccgtgataaaaaaatgagaaggatgagttgattcctactcgggtgcagaacagttggagagtatgcatcgactataggaggctgaaccaggttaccaaaaaggaccattttccactgccattaattggccagatgcttgaacgcctggtaggtaaatctcactactgtttccttgatggtttttctggttatatgcaaatcactattgctcctgagaatcangaaaagaccacattcacctgccccttcggcacttttgcctataggaggatgcctttcggcctat

SEQ ID NO: 12527 - DNA, 379 bp, Glycine max
  unsure at all n locations
tttagaaaatgtcaatgcctattgtatactatttttcttccatgtttcaattgtacatggcttgtgtcttcttcatatatagagcatgcatgatggcccttaacactatatccactcaaattctcgtatgctggaaagtcattaatggtacgaaatagcattgcacgcaacttaaatgtcttattttgataccatcaaacacagtaacccccttgtcccacaactttgtcaagtcttcaatcaagggactgagataaatatcaatgtcctttcctagttgtcttgggcttgatatcatcatagataacatcatgcatttttgcttcatgcacaaccaaggagacaagttttaaattactagcanaatangccatgaact

SEQ ID NO: 12528 - DNA, 414 bp, Glycine max
  unsure at all n locations
agcttctggttggtattgattcttggttttaccctttaagaccttcatgtaccactcaactggatacatccactgtaaaaaaatgggattacataactgaatctccctcaccaaatgcacaattaagtgaaccataatgtcaaaaaatggtggaggaaaatacatctccaattgacaaaggacaatggcagtctcattctccaaatcatccaattgtcgagggtcaatggctttgttagagatagcattaaaaacaaagtacaaacgatttattgcaaccctaactttgtcaggcaagataccgcgaatcgctacatgcaatagttattgcattaacacatgagaatcatgagacttcaagccaaccaattntagatcattaatggatacaaggctcttgatatttgaagagta

SEQ ID NO: 12529 - DNA, 367 bp, Glycine max
  unsure at all n locations
ttacgtctatggacttagattgtttgccttttctttcattntagaggcacccatgtgatttggatatcaatccctttaaactttgaaatgaccactttttcatttattttaattatgtttatttttggtatacgttttgatgcattggatacatgcctcgaaatacaaggctaaaaccctatactactagaatggccaaaatacaaggcccaaacgaaggaaaaacctattctaatatttacaaagataagcgggctcatacttagcccatgggctcgaaatctaccctaaggctcatgagaaccctagggccttcccttgaatctctggcccaatctacttggagtcttctatccaatgcccttgc

SEQ ID NO: 12530 - DNA, 405 bp, Glycine max
  unsure at all n locations
agcttagcagattatcagcatttttgatanttaaatttccttgttgcggctcagtccaataccacttcaactcattttcaaacacagcccagttaaaatgcttcacaacgaagttaacaaagtcctcattgtcaatgttcattctactgatgcatgttccaattgggaaatcattctgtgtttgtataacttttaccgaggtgttagcatagctgccagagtccagtccagagaatttcaggataacatcacgtttactaatctgcagtgcagcaagtacgtataaattaaaatatatataaaaataatgcaaatcatctcatattctatcaatgaagaatggatcatgtaatattaagataaggcacagaagtctgaaacatacttagcttcatgcaacattta

SEQ ID NO: 12531 - DNA, 443 bp, Glycine max
  unsure at all n locations
agcttcaagaaaaagatggctcttagcaatanttcttatttccagaagggaattctatcaatagacctccaatctttaatggagagggttaccactactggaaaacccgaatgcaaatttttattgaggcaatagatctaaatatctgggaagccatagaaatagggccttatatacccaccatagtagaaagagtttcaatagatggtagttcatcaagtgaaagcataaccatagaaaaacctagagatagatggtctgaagaggatagaaaacgagtacaatacaacttataagccaaaaacataataacatctgccctgngaatggatgaatatttcanggtatcaaattgtaagagtgctaaggagatgtgggacactcttcgattaacacatgaaggaactacagatgttaaaagatctagaatatatgcactaact

SEQ ID NO: 12532 - DNA, 388 bp, Glycine max
tggtggctaattcatggcattaatgctccaatacttcaaaatattgcccttaagctacttgcgcaaccttgttcatcttcttgttgtgaaaggaattggagtacatattcatttatccattctttaaagagaaacaagatggcaccacatagagttgaagatttagtatttgttcatagcaacctacgacttctctcaaggaatactccacaatatcatcaagaggaaactaaaatgtgggatgtagctggagatgattttgggtcacttgatgattgtggtattcttgaaattgttagtttgtctttagatgaaccagagttagagggtgtctttttcaatgatgattgctagtttgtggaattcttgaagacttgaagttgctaat

SEQ ID NO: 12533 - DNA, 441 bp, Glycine max
  unsure at all n locations
agcttgtgcattcaatatcctgataaggttgttccatatgttctcaagactggactaatacatttgcattattgggaatagtaaatttgagaatgccatgctagatctaggagatcagttagtgtcatgcctctgtccattttcaattctttatcccttggacctttgcaatctacagatgtggtgattcatttggcagatagaagtgttgcttaccccgcaggtttcatagaggatgtgctggttcgggttggtgaacttatttttcctgttggattttatgttcttaatatggaaaagggagttttcccatggttcaattccaattattttaggtaggccatntatgaaaacagcccgaaccaagatagatgttatgctagccattgctatagaaattgtgatattgttgtcatttaacattttgatgcatgaacatcc

SEQ ID NO: 12534 - DNA, 439 bp, Glycine max
  unsure at all n locations
agcttgtcccacaagcctctcctacanttggttcatgaaaggcaaaagaaagtggtctttcctcatggcttctttgagcttgtggtaatcgatgcatattctccagccagtgaaagtccttgttgggattaggtcattcttttcatcctgaatgattttcgtgccccctttctttggtaccacctggattgggcttacccaagtactatcagaaatggggtagataatccaagcctctagaagcttgagcacctcttccttcattgatgggttaaggcttctcttgggctgtctgactggtttgtaatcttccgccatcattatgttgtgcatatagtagacagggttgattcttttgagatctgatatgtgccaccttattgctcactgtcaatgtacatccccttcttggtgaagatgtccttcatgaatttggcgt

SEQ ID NO: 12535 - DNA, 363 bp, Glycine max
taaatgtttgtaatcaaatatgttttgctgtggtatatgaaggttgttacctgcggtaatgtgcctcttgagtcatctttccagaaagttcccagatgtgtatatacgtcaacaagtttatatgagtatcgaggatggaactcaaaagctgccaatcctacacaccgtcggcttacttggggccttagactgctggaagtaagttactgactattttttctgggttagttattatggaatttaatactttactctgacatcctttgtacaattttacttctattattgcccccaagagcgtggcagtgaaggacatgcttcttctgattaaatttcaagttgaatttattgttctgaattaat

SEQ ID NO: 12536 - DNA, 396 bp, Glycine max
  unsure at all n locations
tcaaggaacaaagaatttcttattgtttgaccttctttgatgacacanaagaaatgtgtttgttgttggggtctttgggtaaagtgaaagatgcaaaagaagtggtgacaacacctcttctcaaaaaccctttgcaaccttctttttactatctttctcttgaagctatctctgttggggacactcgattgtccattgagaagtccacttttgaagtgngggatgatgggaatggtggtgtgatcatagactctggcaccacaatcacctacgttcaacaaaaggcctatgaggcactcaaaanagagttcatttctcataccanacttgctttgacaaaactagctcaacaggggtggatctatgtttctccttgccatcanggtcaacacaagt

SEQ ID NO: 12537 - DNA, 509 bp, Glycine max
  unsure at all n locations
gatactgatttgaaattatgattctcataaactaggagattgggaaacaaaaacttcctcatcaatatatccatttagggaaacactctttacatccatttggtacaacttaaaattcattattcaagcataagcaagaagtaaccttacaacctctaatctagctaccggtgcatatgtctcatcaaagtctataccatcttgtgggttataacctttggctacaaggtgagccttgaaaacctattttcctagttataacactattttcatcaagcttgttcttaaaaacctatttagttcctatgatgttcaagttattagtacttgttatcaattcccatacatcattccttttaaattgatntaactcatcatgcatagacataatccanaactcatcttttaatgcatcatcaaaaattaagggttcaacttaagacacaaaagccatatgttcacaaaacaaacttaaagagtgtctagtagatactctcttctcaatatca

SEQ ID NO: 12538 - DNA, 475 bp, Glycine max
agcttcgagattttcctcttgcaattatgtatccttaacatgtgcgagaagtttctgttatatcttgagagacttgcgtgggatattaaagataagtcatttggtacagtgtcaatacacgtttcaggaaagaattgttcatgatcttcaacattgttagtcctttccttgttgtaggaaactaattcctttccctagactaaacacaacattcttcttttataatgaatataacataatattctattattgacttatattgtgttaaagatggaaggatctcaagagtaagtctttattatagtaactttcagggaaaactcatacgagttactcaatttcatataatatttcacattgttttataatggaacatcatattttgtactctaaacaatcaattaacttttactctactaagagactatggtctcaatagatccacatatattatataatatttattatattctat

SEQ ID NO: 12539 - DNA, 401 bp, Glycine max
  unsure at all n locations
gtcacctgcggtcatgcacgctntgngatgcttgtccaaaaggcaaacatgtcatagtctctnttaaattaaaaaggtgtaagtttctacatctaaacctttggaacttttacacttggacttgcttggcccctctagaactatgagtttgagagttgactattatgctcttgtcattgttgatgattactcaagatttacgtggactttttttcttgctttaaaaagtgttgcttttaaagctttcaagaaacttgcaaaagttattcaaaatgaaaaagatttgacaattaagaccttgagaagtgatcatagaggtgaattccacaatgaagattttaaaactttttgtgaagaanatgggatttcacgtgattnttctgctactagaacttcacaac

SEQ ID NO: 12540 - DNA, 386 bp, Glycine max
  unsure at all n locations
agcttcttagttcttatgatgcagatgggttttatctacctcatgcactcctctaatgactatggcatcatttctggcgctaaactgctgggagttggaagccatcttctcaattaaatttctggcttcagcaggagtcatgtctccaagggctccaccactggcagcatctatcatacttctctccatattactgagtccttcataaaaatattggagaagaagctgttctgaaatctgatggtgggggcaactggcacatagtttcttaaatctctcccagtactcatacaggctctctccactgagttgtctaatacctgagatatccttcctgatggctgtggtcctggaagcannggaaaattnttctaagaatactctct

SEQ ID NO: 12541 - DNA, 351 bp, Glycine max
  unsure at all n locations
agctagccacaagaatatctaggatgctttgcttcattgaatgaaagcagtgagagcagtgagtgtgtggtggaacatcaacatggtgctagttttcataatgaggtggaaacagttaatgagtccaagaagagcaaggggcatgagtgcccaatttgcctaaaggtttttccatgtggccaagccttgggtggccataagagatctcatatggttggtgggtctaagagtagaagctttcaaacaattgtgcttcangaaccagtggcagaaattagggacttccttgatcttaatcttcttgctgctactaaggaagaaagcaatagccatgctgactctaacagtaac

SEQ ID NO: 12542 - DNA, 196 bp, Glycine max
  unsure at all n locations
tatgacacagtctcatggtcggtcctggacattatgcatgatagacagcgctcctgtcataaatggacaaagcggatctcaccttgtcttcactcagcaaccatctctatccttattaatggcagccctacaaaggagtttaccccatctagaggcttgaggcaaggggatcccctancccctctactctttaaca

SEQ ID NO: 12543 - DNA, 397 bp, Glycine max
  unsure at all n locations
acgcggacaagcatcgcagggatgttttatttgttcctgnggactgngttctggttcgtcttcgcccttaccgacagtcctccgccaaaggggatccctcgaccaatgtgaaattggctcgccgctattatggcccatttcaggtcacggctaagataggaccagtagcatatcgtgtgaactttccggcaggtgtacgcattcacccggtgtttcactgctccaacctcaaaccttttcggggcgagcccggatccactcctgcaattcctttaccacccaatttccatgagaatcagccgcttatatttccccttgccattctgggatctcgtcgcgcaacagctgagcctcacaacccttggcaggttttggtacaatggcaggggctctcacc

SEQ ID NO: 12544 - DNA, 330 bp, Glycine max
  unsure at all n locations
tatcttttgtgtgggatacncaatgtgagcatagtttccagaccctttttgaaagnataacgaccgctccagtgctagttttgcctaacccgagagaaccctttgaggtgtattgtgatgcatcanagatgggtttatgcggagtgttgatgcaaaatgaccaagtggtggcctatgcttctagacaacttaagactcatgagaaggaatatcccacccatgatctaaagttggttgctgagtttttgccttaagaattgaagacatatctgtttggctctaagttcgaagtgtttagtgatcataagagccttaaatacttgtttagtc

SEQ ID NO: 12545 - DNA, 425 bp, Glycine max
  unsure at all n locations
agcttattggagttatcatcacagaatgctntttatgcaatcctaccccgcaagggcattggatagaagactccaagtagattgtgccagagatccaagggaaggccctagggttctcatgagccttanggtagatttcgagcccatgggctaagtatgagcccgcttatctttgtaaatattaggataggtttttcctttgtttgggccttgtattttggccattctagtagtataaggttttagccttgtatttcgaggcattatgagtagtctttgtagtagagaattttttgtattttcatgtattttgtcatgggggtgagcttagctattatagggggtgtgtagctaagctctaccttctcatctcaaggaggtgagcttagctattagagaggtgtgtgtagttaagctctagcttc

SEQ ID NO: 12546 - DNA, 507 bp, Glycine max
  unsure at all n locations
atcctctgagtcacctgccgcatgcaagctngctcgtctttctgatatntatcatgcatattnttctgatgatgaccgattgtcaattagggatcaacttgaaacttatgtgcttcaagtgagaagaaatgcttctttttccacttgtgaagatgttcaaagtttggctatgaagatggttcaaactgagaaacatttggtatttccattggtttataaacttattgagctagctttgatattgtcggtgtcgacagcatccgttgaaagagctctttcagcaatgaagattatcaagtctaaattgcgcaataagatcaacgatgtgtggttcaatgacttgatggtatgttacaccgagcgggagatattcaagtcacttgatgatattgatattattcgaacatttaccgcanagaagtctcgganaggacacttgcctcgtaattttatttaacccgctatggtaagaaatatgttatctctttattttaaactatatttttg

SEQ ID NO: 12547 - DNA, 432 bp, Glycine max
  unsure at all n locations
tctataatattgcatctacatgcgatgattcttagtattgtccaaggtatataattttgttagctcaaaataacctttatcaaactcatataaccataaatgtgactgccaagtaaatttaagcaatggtttaattagatgtattttgattaaccgtaaacaaatacatgttaaaagtcgcgttttatgcactattaaaacatattntgtaaagtatgcgtctgatgtggtagataataaaaaanaataaagtagtgtctatcaattattatttttaaaaaaatactttcttgagtctcttttatttaattatattgttaatttaagaataaatacagtgacagttaanaaaccatccctattcgtaaaattgaccttttgaacttgtaacttaacattgttgtgaactccaatggatgaaaatatataata

SEQ ID NO: 12548 - DNA, 510 bp, Glycine max
  unsure at all n locations
gcatgtcgaacgttannaaattgaatgtttgggtttaagttntcaattataaaaaaaatgcttgaacctttattgtttacgcttgcatttctccttactgagttctctttcttcttgagtgtgagcttctgcttgtgcttgctttgtgctccttggttcaaatttggtgcttccttccttcaagtgtgtgcccttatccttcctttctagtgagtgtttataaaataaataaaatgtatatattctgttaataaatattataagtttaagttacttagtattaacaaatattttaagttagttagtatgtaaatagtacgttagttactattaacaaaaattctaaatttaagttagttagtatcggtaggtattgtgttgatatttcttacgtattaatagatatatcaatgttagattagttactataaaaatattatttggttggttagaatgacaatttattgagttatcgtatgtattgtcagacattatatgtgtgatatatat

SEQ ID NO: 12549 - DNA, 397 bp, Glycine max
  unsure at all n locations
tggactgatccacttgttgcccaagtttcatagtcttgcaggtgaagaccctcataaacatctgaaagaattccatattgtctactccaccatgaaaccttcagatgtccacgaagatcacatctttctaaaggcctttcctcattctttagagggagtggcaaaggactggctatattaccttgctccaaggtccatcacaagctgggatgacctcaagagagtattcttaganaaaattttccctgcttccaagaccacggccatcagaaaggatatntcaggcattaggcaactcagtggagagagcctatatgaatactggggagagattaanaaactatgcgccagttgccctcacccccnnnatttgagtaacttctctctatattttatg

SEQ ID NO: 12550 - DNA, 297 bp, Glycine max
  unsure at all n locations
gcttcaccaccaaaagagtgtcttggataagtatcttacagaggaagcttattgaagganaagaatgagaaagatagagtgatgcaatcctaccccctaagggcattggatagaagactccaagaagattgggccagagatgcnagagaaggccntacgggtctcatgagccttaaggtagatttcatgcccatgacatgggctaagtatgaactcacttatctttggatattagattaagggatcattattattggcccttgcattcagggctccataatatatgtagggtaccct

SEQ ID NO: 12551 - DNA, 333 bp, Glycine max
cttggatatgatggcacacataatattatatgtcatatattctgcgtatcaggtgtgctcttaatgtagaattttaggctactaagctttcaccttatcaattattataattataactgcgtaaccctttctttcgaacttttggcaatgtcaacctgtgctggtagagcaagatcacgacaaaacagagaatcggaaatcatgaaaacgtaatgcacgaactcaggttaatccaaaccctgatccagttggcactgtcgagccttcaacgacaagtactacttcctaatatagcactcaagactaatatgtatctggagttccaacatattg

SEQ ID NO: 12552 - DNA, 322 bp, Glycine max
  unsure at all n locations
agcttcagaatactttttcgagcgtctcaatatattactggactcagtcagacatccgagcaaaacgttattgtcgtttggattaactcagagcttcagaattcaatttcgatcgtctcgatatattacgggtctcaatcagacatctgaggaaataagttattgtcgtttgaatttgctgagagcttcaacattcaatttcgagcgtctcgatgtattacgggacttaatcagacatccgagttaaaagttattgttgtttgaatttgctgagagcttcaacattcaatttcgagcgtctcgatattntacgggactcaat

SEQ ID NO: 12553 - DNA, 406 bp, Glycine max
  unsure at all n locations
agctntntagcaattcatatggtcataacgtttcactcggatgtcggattcaagcgcataatatatcgagacgctcgaaattgaataatggaagctattgagcaattccaatggtcataacttttaactcggaagtccgattgaggcacataatatattgagacgctcgaaattgaacaacggaagctctcgagaaattcaaatggtcataacttttaactcggaggtcggattgagacgcataatatatcgagacgctcgaaattgaacaatggaagctcttgagcaattccaatggtcataactnttaactcggaggtccgattcaggcgcataatatctcgagacgttcgaaattgaacaatggaagctcttgagcaattcaaatggtcataacttttcactc

SEQ ID NO: 12554 - DNA, 315 bp, Glycine max
  unsure at all n locations
ctaccttcaatggtgcaatcatgatgactntgatgaagtcccattggtgtagtggtgtctatatattctgaacaaaactcaatagcttcctcagcaacgtatctttcaacaatgctagcctcttgtcgatatatcaattttttgtatatcctttcaagaccttcatgtaacgttcaactggatacatcaagcgtaaaaacacaggcccacacaaccgaatctcacgtacaagatgaacaattaagtgaaccatgatgtcaaaaaacgatggaggaaaatacatttctaattcacacaggataatggctgcctcat

SEQ ID NO: 12555 - DNA, 421 bp, Glycine max
  unsure at all n locations
agcttaagatatctctntatggacttaaacattctccgatgcaatggtatggtagacttagaaacttccttcttgaacaaaaatttgagagaggaaaagttgataaaacacatttcattaaaaagttctctcataacattntactcatgtaagtttatatggatgacatcatttttggttctactaatcgatctctttgtgaagattttgtacacaagatgcaggaggagtttgaaatgccaataatggggggggggattaaattactttcttggtctctatgtgaagaaaattgaccatggaacatttctctatcaaacatagtattgcaaagaacttctcaagaagnttaagatggacaaaagcaaggaggatgaaactcctatggctactaattgctaccttagtgcagatgaaaatg

SEQ ID NO: 12556 - DNA, 317 bp, Glycine max
  unsure at all n locations
atggtcataacttttcacgtgaatgtccttttcgggcgcataanatgncgagaagcgcgaaattgaacaacagaagctcttgagaaattcatatgggcataagctttcacacggatgtccgactcaggcttataatatatcgacacgctcgaaattgaacatccgaatctctcgcgaaatttatatggtcataacttttcacactgatgtccaattcgcgcgcataatatgtcgagaggctcgagattgaacaacggaagctctcgagaaattcacatggtcataacttttcacatggatgttccaatcgggcgcat

SEQ ID NO: 12557 - DNA, 297 bp, Glycine max
  unsure at all n locations
agttggaagccatcttctcaatcaaattctttatccttagcacgagagacatatcaccaagggctccaccactggcagcatcaatcatactcctctccatgttgctaagtccctcatagaaatattgaagaaggagttgctcataaatctggtggtgagggcaacttgcacacaatttcttgaatctttcccattactcatgcaagctctctccactaagttgtctgatgcctgaaatgtctnttctgatggcagtggtcctagtagcaaggaagaatttctccaagaacaccctct

SEQ ID NO: 12558 - DNA, 115 bp, Glycine max
tagacataactattcacacggatgtccgattcgggcgcataatatgtcgagaggctcgaaattgaacaacggatgctcttgataaattcaactggtataacttttcacacggata

SEQ ID NO: 12559 - DNA, 358 bp, Glycine max
tgtagggttaaagtctcacgattgtcacgtgttgatgcatcaattgttagtcgtggctatacgagacctcttgccaaacaaagtcaggttagccataactcgcctgtgctttttcttccatgccatatgtagcaaagtcattgatcctgtcaagtttgatgagctggaaaataaggccgcaattatactgtgccagttggagatgtattttccccctgccttccttgacatcatcattcacttgattgtgcatctcatcagagaaatcaaatgttgtggtcctgtttatttgtgatatatgtactcggtagagcgatacatgaagatcttaaaaaggtatacgaagaatctatatagt

SEQ ID NO: 12560 - DNA, 361 bp, Glycine max
tcacttaaggtaagggggatttttccacttcttgatccttaacctttttgtctagcaaaatttatgtataaaacaagtttaaggtcttttgtaggattaaagttactttggatatgttggatcaagtggcctctgaataattaagaaggggggttgaattaattattactgaacctttactaattaaaaatgtacccttcttaggcttttactataatgttaagaaagtaaataacagaaatggaaacttaaccaaaagtaaaagcaataattaaagtgcacaacggaaaataaagagtgtagggaagaagaagacaaacacaagagttttatactggttcggcaacaacccgtgcctaca

SEQ ID NO: 12561 - DNA, 372 bp, Glycine max
agcttctggtgggacatcttgacttgctttccaatctgacattcaccacagattctgccttcttctattttcagattgggaatgcctctaacagcacctttgtcaatgattttcttcatgcctcttaagtgcagatgtccaaatctttgatgccatattttgacttcatcttctttggaggatagacatgtggaggagtaactggtttcttgaggtgtccataggtaacagttgtcctttgatctgctgcccttcattagaacttcactcttctcatttgtcaccaagcattctgactttgtgaagtttacattgaatccttcatcacacaactgactgatgctgatcaagtttgcagtcagttccttcacc

SEQ ID NO: 12562 - DNA, 391 bp, Glycine max
agcttgctaacccatggaatctcctaatatctcccacactttttggggtgggccattcttggatggccttgattttctcagggtccacttggaccccatttctaccaactacaaaccctaagaaaactatattatctacacaaaaagtacatttctctatatttacatagagggtgtttttcctaaggactgaaagaacttgcctgagatgtcctaagtgatcatctaggcttctactgtacactaaaatatcatcaaaataaacaactacaaatctacctatgaaatcccttaagacatgatgcataagccttataaaggtgcttggtgcattagtgagcccaaaaggcatcactagccattcatacaaaccaaacttggtcttgaaagg

SEQ ID NO: 12563 - DNA, 384 bp, Glycine max
agcttctagatgagttatgtttgttattcggacatcctgtgaaaagtgatgaccatttgaatttctcgagtgcttccgttgtttaatttcaagcgtctcgatatttatgtcctcaaatcaaacatcggagcgaaatgttatgaccattcgaatttgtcgagagcttccgtttttcaatttcgagcgtctagatgagttatgtcaccgaatcagacatctgagtgaaacgttatgaccattcgaatgtgtcgagagcttccgttgctcaattttcagcgtttagatgagttatgtcaccgaatcggacatctcggtaaaaagttatgaccattcggctttgtcgagagcttccgttgctcattttcgaccgtcttgatatattat

SEQ ID NO: 12564 - DNA, 366 bp, Glycine max
ttcagtaactttcttattttatgtcttttatgcacgataccacattgcctgatcaggctttatgaaggttatatgtcctctaagactgaaaaaagcaggctgcccaaagcaacagaagagacaagttagactagaaactcggatgaaaatccattaaaatttgcaggagttgcaataacatgtctaatgaatgtttatatcaaacaaccacatggaactgtattagcaatgtccaacattcaggaaaattaataaccaaatacctttccatctcccaatgatgggtttgagattatgtcagaaagatgaatacgatcagtgtacactgatctaatcccattgttagatattggacttgaaccagag

SEQ ID NO: 12565 - DNA, 381 bp, Glycine max
agcttcagcctttgatgatgtattaccgaaaagagaaagagagggttgatgagattcgaaggctcaagaagaaaagagaagagcttctttttgctttacaagaggctgagagaagatatgatctggctagagctgcagacctgcgatatggagcaattcaagaggtggaaactgcaatacaacaacttgaagggagcactgaagagaatctgatgttgactgaaactgttggaccggagcaaatagctgaggttgtgagccgctggaccggtataccagttacaaggcttggccaaaatgaaaaagaaagattgattggacttggtgacagattgcacagcagagttgtaggacaagaccaagctggtaatgctgttgctg

SEQ ID NO: 12566 - DNA, 352 bp, Glycine max
agcttctcgatatatttttttgtctgaatcagacatctgagtgaaatttatgaccatttgaatttctcgagagcaattgttgcccaatttcgtgcgtctggatatattattcccctgaatcggacatctgagtgaaaagttatgaccatttgaatttctcgagagcttccgtttatcaatttcgagcatctatatatattatttcccggaatctgacattcgtgtgaaaagttatgaccatttaaatttcttgagagcttccattgttcaatgtcaagcgttctgatatgttatgcgcctaaatcggacatccgagtgaaaagtcaggacaatttgaatttctagagagctt

SEQ ID NO: 12567 - DNA, 382 bp, Glycine max
agcttctggtacacttgagtatcagaccaaacaaaataacctcctggacgcaaaactcgattcaattccaaaagcaacatgccacctggaaaagagtttcacatttctaagtaactatggttaacacaaagctaagccattatgaagattcaatatgaattgaaaaatccaaattcgagagaagtgttagtaagaccaaccatctagatgccaaggtactctacaacgtgcacaatgtacaagatcaaagacactgctgggaaatggtagcctttgagaacccatgacagcagatatggcaggaatccctctttcaagagcaaattgcacttgtgcttcatgttcatctttaggtgcaaaagacattgcaataacatctctt

SEQ ID NO: 12568 - DNA, 372 bp, Glycine max
  unsure at all n locations
tatagtcattacttgttgagaaccataatctaaagnngtttgttcctttgatatagtaaataatttgttttgtggccttgagatgagtagtggttggagtctccatgtattgactgatgagtcgagtaccatatagaatgtctggtcttgtggacgtcaaatatcacaaactacccaccaaactcttgaaatttgtagcacccatcttttttgcttcgtcaaactttgataacttcattttgcactccaccggtattccaattggcttgcatagttttgctatgaaatgaagattcaatcttccttttgctttacctcaataccaagatagtatgacattagtccaatatcggtcatcttgaactccttgac

SEQ ID NO: 12569 - DNA, 377 bp, Glycine max
tcaagcttgctcacccatggaagctcctaatatcttccacactttttggggtgggccattcttggatggccttgattttctcatggtccacttggaccccatttctaccaactacaaaacctaagaaaactatattatctacacaaaaggtacacttctctatatttgcatagagggtgtttttcctaaggactgaaagaacttgtctgacatgtcctaagtgatcatctaggctcctactatacactaaaatatcatcaaaataaacaactacaaatctacctatgaaatcccttaagacatgatgcataagcctcataaaagtgcttggtgcatcactgagcccaaaaggcatcactagccattcatacaaacca

SEQ ID NO: 12570 - DNA, 357 bp, Glycine max
tgcctcaaagaggtccaggaaggacaattttgccgaattatactagttccgctccggagtatgacaatcaccgctttaggagcgctgtacaccagcagcgcttcgaggccatcaagggatggtcgtttctccgggagcgacgcgtccagctcagggacgacgagtatactgatttccaggaggaaatagtgaaattctgatacagaggtcagatgtcgtaccagatgtcacgacatcacgcttcagaacatggagattatatttgactgtatgaacatattaaacaagtaaataacacaagagaattgttaacccagttcggtgcaacgtcacctacatctgggggctaccaagcca

SEQ ID NO: 12571 - DNA, 284 bp, Glycine max
agctttcgtgaaattgttatgtcataacccttcacacggatgtgcgatttaggcgcataatatatcgagacgctcgaaattgaacagcggaagctctcgagaaattaaaatggtcataagttatcacacggaggtccgatacaggaacatcacatatcgagatgctcgaaattgaacaaccgaagctttcgtgaaattgaaatggtcataacccttcacacggatgtccgattcaggcgcataatatattatagaactcttgaactgaaccgaggacttttttt

SEQ ID NO: 12572 - DNA, 350 bp, Glycine max
tatgctgcatacatctacaattgaccactttaacctcagcagcaaaatcagccacaacaaaataattatgacctctccagcaacaggtacaatcctaggtggaggaatcatcccaaccttagatggtcgaatccttcacaacagtagtagcaacaacaacagccttattttcaaaatgctgctggccgaagcaaaccatacgttcctccaccaatccagcagcaacaatagtaacaaccccagaaacaacaaacagttgaggctcctcggcaaccttcccttgaagaacttgtgaggcaaatgactatgcaaaacatgcagtttcaacaagagaccagagcctccattca

SEQ ID NO: 12573 - DNA, 346 bp, Glycine max
tgcactgcccttagtggacaatcttccttaaaacgttgaagccaccattgatgtcccttatgatgtcgttcagtatctcaaaaaagcctacgatgatttggaagaacccttgacctgttttctcaaatcttccaaagttgattggcatttctatgacccatatatgttacagttaccaaaaaggttcaaagagaaaaccaaatggtgtggaatagtaagccccggttgggcaccatagttgaaggtattgagccacaaggcagttggtggggttttgactcactctggttggacctctgtggtggaggttgtttagaatgaaaaacctctattttgttaatgtttc

SEQ ID NO: 12574 - DNA, 387 bp, Glycine max
  unsure at all n locations
agcttgaagactacagngagtaaaattctcatcttttgggacaataaaattgttatcagtctttcaaaaaatccgaaattgcattctggagaaaaatatatagaaattaaacatcattgtataagaaatcatgttcaaaatgggagagtggacttgcagtttgtgcccactgattatcagctttttgacatctttacaaaacgattaactgaggaaaggttgattttgttaagaagtcaacttggaatgatctttattaatgatttatttaatctctatatgtcatccattgttgcatccaaggatatatcgtccactagacttaaacacacactcataacattcaataaatggacaacatatcatgcattaattntttttttttat

SEQ ID NO: 12575 - DNA, 373 bp, Glycine max
  unsure at all n locations
agcttgtaagccttggatcttcttcatcaatggagtcctttgcttcttgaagatgaatgtcagcataatgaagaaggaagaaagatgattggagatgcctcttcaaggagaagatgagtcaaaaagaaactcaccaccatagaaagccatggataagagtttgaaggtaggagaagatgtgtggagggagagggagagaaggagcatgaaattttgtgcctcaaatgagatctgaactttgaagtgtaattctaaaatgatcaaatttgaacaaatgcacacacatggcctttatttatagcttaagtgtcacacaaaattggagggaaatttgaatttctattcaaatttcacttgaatntgaaattgaatt

SEQ ID NO: 12576 - DNA, 384 bp, Glycine max
agcttagatcaaaagataattactttgaaattattatatatacagcaacagctaccaggtctcaacattgcatggcaccaggcaggttcagcatacaaaatatgctgcaaacaccctgatctccacatgaattgaatgttagaacacatatagttgtgtaggagtccagggaactaagcaattctattctagttatctctatccttgtgttgttcattatcttcaaacaagtcctctggggggtcgtagatgatcatacctgggaaaatctctaagaagtcgtcgtcttttattttctctcttaattctggatagggaatgagcccttttaatatcacgcgaaaaggcaatgaaaggggaggctcaagagactgtctcatttct

SEQ ID NO: 12577 - DNA, 374 bp, Glycine max
gaatcctcaagcttgccatcgattacacatatactataatcttttaccagatcagattttcagaaaatattctcaacagtcacatctttttatttggttcttgaatggctatcaaaggcctatatatatgtgacttgagacacgaatttgctaagagtttttcagaacaaaaaggtcttatcctcttaaaaagcaaaatcgttttatcctcttaaaaattccttggccaaaacacttgtgattcaataaggaattatttgagtgctcaaattgttcaatctatctctttcaagagagattacttcttctcttcttctttattctgaaaaaggattaagagaccgagggtttcttgttgtaaagaaatctgaaca

SEQ ID NO: 12578 - DNA, 356 bp, Glycine max
agggctcaattttcttaatcagtttgtataatagcttcacctttttggcatgttttgggaggaacttggacatggatgctagcctgccattcaacttataaacttcttggatgtaatttgggttgcgcatctctagtatggcagtgcatttgtcggggttggcttcaatcccccgatgtgtgatcatgaagtcagggaacttgtctttgcctaccccaaaagtacatttccctgggttgaagcacatgtcatatttgtggagttctccaaagacttcttccaggaccgccacatgttgtggtatgctctgagacttgacaaccaagtcatacacatataccttgacgttatgtcca

SEQ ID NO: 12579 - DNA, 359 bp, Glycine max
  unsure at all n locations
tgcatttctctcccatggttgatataaattctatgatggnatcaaagctcttgctttgaagagccctgctgcgctacttatattcttcctctcgattatcatatccttcattcttacatcatgagtgaacaacaacaagatcaatcacttaatgtacacagtccttattacctttatctgggagaaaatccagcgatagctttggtttcttcggttcttgattcatccaattataattcatggagtcgatctatgcttattgcattaagtgcaaagaacaaatctgagtttgtcgatggttttattcaaagacctgcatcagatcatgcacttcatgcagcttggaagaggtgcaataa

SEQ ID NO: 12580 - DNA, 355 bp, Glycine max
tcaacattcaatttcgagcgtctcgattatttctggactcaatcagacatccgagtaaaaagttattgtcgtttgagttggctcagaggttcaacattcaatttcgagcgtcccgatatattacggcactgaatcggacatccgagtaaaaagttattgtcgtttgaattggctcagagcttcaacattcaatttcgagcgtatccatatattacgggactcaatcagacatccgagtaaaaagttattgtcgtttgaattggctcacaggttcaacattcaatttcgagcgtctcgatatattacgggactcaatcggacatccgagtaaaaagttattgtcgtttgaattggc

SEQ ID NO: 12581 - DNA, 378 bp, Glycine max
  unsure at all n locations
agctttgagccaattctaacgataataactttttactcggatgtccgattgagtctcgtaatatatcgacacgctcgaaattgaatgttgaagctctaggcctattcaaacaacaataacgttttactcggatgtccgattcagtgacgtaatatatcgggacgctcgaaattgaatgttgaacctctgagccaactcaaacgacaataactttttactcggatgtctgattgagtcccgtattatatcgagacggtcaaagttgaatgttgaagctttaagccaattcatacgacaataactttttactcggatgtctgattgagtctcgtaatataacgaaacgctcgaaatngaatgttgaagctttgagccaat

SEQ ID NO: 12582 - DNA, 352 bp, Glycine max
tttcactcggagatctgattcaggcgcataatatatcgagacgcttgaaaatgaacaacggaagctctcgagaaattccaatggtcattacctttaactcggaggtctgatttaggcgcataatatatcaagacgctcgaaattgaacaacggaagctctctagaaattcaaatggtcataacttttcactccgaggttcgattcaagtgcatgatatatccagacgctcgaaattgaacaatagaagctctcgagaaattcaaatggccataacctttaactcggaggtccgatttaggcgcataatatatcgagacgctcgaaatttaacaatggaagctcttgggcaat

SEQ ID NO: 12583 - DNA, 355 bp, Glycine max
tccttaagaagattcctattgaagctagttcttagctacacatacctctctaatagctaagctcacctccttgagatgagaagctagagcttagctacacaccccctataatagctaagctcacccccatgacaaaaaacatgaaaataaaaaaaaagtccttattacaaagacaactctaaatgccccgaaatacaaggctaaaaccctatactactagaatggccaaaatacaaggcctagacgaaggaaaaacctattctaatatttacaaagataagcgggctcatacttagcccatgggctcgaaatctaccctaaggctcatgagaaccctagggccttttcttggatc

SEQ ID NO: 12584 - DNA, 361 bp, Glycine max
tccctcatcatgaaatttttctttcttgtaacatcataagtgagaacaccattccacaactttttcagatcatcaatcaaaggttgtaaataaacatcaataccaattgttggattaaatgggttaggtacgacacaactcacaaacatataagttttagtcatacatatttctagaggaagattgtatggggtaacaatgattggccaataagaataaggtgaagacgatgcttaaatatatgggttaaatacatttgtgcataaaccaagtcgcacattttgcgtatcaatagaaaaatctggatgtacccgttcaaagtgcttccagacttcatagttagagggatgacttaacatgc

SEQ ID NO: 12585 - DNA, 378 bp, Glycine max
agcttctcgatatgttatgtgtctgaatcggacatgcgagtgaaaaattatgaccattttaatttcccgagagcttccgttgttcaatttctagcatctcgatacgctatgtgcctgaatcggacatgcgagtgaaaacttatgaccatttgaatttctcgagagcttccgttgttaaatttctagcgtctcgatacgctatgcgcctacatcgaacatgcgagtgaaaagttaataccattttaatttctcgagagattccgttagtcaatttcgagcgtctcgatatgttatgcgcctgaatcggacatgcgcataaaaagttatgactattttaatttctcgggagcatctgttgttcaatttctagcggttcga

SEQ ID NO: 12586 - DNA, 386 bp, Glycine max
agcttcaagaattatggccttattttactacttgtctcccgagggaaattctataaatagacctctcatctttagtggagtgggttaccactactggaaaacccgcatgcaaatctttatagaggcaataaatttaatatctgggaagccatagaacaaggaccttatgttccctctataatagccggaagtgcaacaatagaaaaacctagagcagattggactgaggaagaaagaagattagcacaatataatttaaaggccaaaaatattattacatctgccttacgaatagatgaatactttagggtttcaaattgtaaaagtgctaaggatatgtgggatactctacaagtaacacatgaaggcacaacatatgttaaaag

SEQ ID NO: 12587 - DNA, 384 bp, Glycine max
agcttatagaatagtgtaccaaactatcgctgctccggccaagctatcttggaaaaagtgtattaatagcttctcatccttagagtgcgcgcccatcttgtgacaatacatcttgagatggtttttgggacaaacggtccctttatacttgtcgaagtctggcaccttggattttgggggaataacaacatccggtactaagcaaagatccatcatgtccgtgaacggatagtcaccaaagccttcaacagccctcaatctcttctcgaggagatcgagtttccttctttcttcggccgctgggggtggtccttccgcggacaaaaatattggctgtgctgtgaggttgtgttgaggcaatgtgtcgagtgtccgcccctctac

SEQ ID NO: 12588 - DNA, 352 bp, Glycine max
tatttatttgttgctttagttatatgttgattcttaactcacaaggctttcatttcttcatgtgctcttgaaactgagttctatttatggtggtaatcttaacaggcgacaatcaggcagccagtattcaagaacatgatgaaagccctgtattttcagtttactgttggagttctgccattatatctggtaacctttgcaggatactgggcttatggatcttcaacagctacctatttgaggagtgatgtcgatggtccagtttgggctaaggctatggccaataatgcagcctttcttcaatcagacattgcattgcatgtagtaacttctaaacttcaatttagagcta

SEQ ID NO: 12589 - DNA, 252 bp, Glycine max
taacgataactcgcctgtgctttttcttccatgctatatgtagcaaagtcattgatccagtcatgtttgatgagttggaaaatgaggctgtaattatactgtgctagttggagatgtattttccccctgctttctttgacatcataattcacttgattgtgcatctggtcagagaaatcaaatgttgtggtcctgtttatctacgatggatgtacccggttgagcgatacatgaagatattaaaagggtata

SEQ ID NO: 12590 - DNA, 381 bp, Glycine max
agcttgtacccaccagtactatgatagcccagcataatcatttgttcaccctttttgtccagttttcttcttaattgatttggaacatgcttgaagcacaagcatccaaacacccttaggtgcttgagacaaggcttacttccactccaagtttcttcaggtgtcacattctctagcctctttgttgaacatctgttgagcagataggctgctgttgacactgcctcaccccaaaactcctttggcaagtgaaaattccttagcatacacctggtcatgttgactatggttctattgagtatctcaaatacaccattgtggtgtggtgcatatggaggtgtgatcttatgaatattaccctcatcctcatagaatttcttg

SEQ ID NO: 12591 - DNA, 388 bp, Glycine max
agctttgagcttacccttattcatcttgcttaagttgaacacaacatgactgaagatgtttgttggacaagtggtctcaataacttaagaggggggtgaattaagtttcaaaattttcccactaacaaattttaacccccttttaaatgatatatgataggctcagaatgcaaaagaagaagaagtaatcaatttaataatgttcttttaactgtgcaaggcaaagtaaactgcaataaaataaccgagataagggaagagagaaatgcaaactcaatttatactggttcgaccacttcccatgcctacatccagttctcaagcaactcacttacgattttccactatctctataaatcctttacagtctttgaacacactgaagtgt

SEQ ID NO: 12592 - DNA, 413 bp, Glycine max
  unsure at all n locations
gatcctntnagtcacctgccgcatgcaagctttggaagcaatcttttattgttgcttccctcatcattcctgtcaagccttcaacaaccaagtcaaacaatagagggccaaaggatccctttgtctcaaacctctttgaggcttaaattcagaggttgagcttccattcactagaatagatatagaggctgatgtgaggcaccccttaatccatccaatccatctgtcatggaacctcattcttctcatcatatgaaaaaggaattgccaagacactaaatcatatgctttttcgaaatccactttaaacaccaagcaggacctcttagacctcctagcctcctcaagtacctcattagcaaccaaaacaccatggagcaactgtctatccttcacaaaggttgtctgccttt

SEQ ID NO: 12593 - DNA, 379 bp, Glycine max
agcttgtagggttaaattcttatgattgtcacgtgctcatgcaacaattgttggtcgtggctatatgagacatcttgccaaacaaagtcaggttagcgataactcgcctatgctttttcttccatgctatatgtagaaagtcattgatcctgtcaagtttgatgagttggaaaatgaggccgcaattatactgtgccagatggagatgtattttccccctgctttctttgacatcatgattcacttgattgtgcatctggtcaaagaagtcaaatgttgtggtcctgtttatctacggtggatgtacccgattgagcgatacatgaagatcttaaaagggtatacaaagaatctatatcgtccagaagcatctattgtt

SEQ ID NO: 12594 - DNA, 350 bp, Glycine max
ttgacaagacattacacactgctgtcttctacaacaagataaaatagggaaatctactctaaagatacatctaataatacccataattataacactccccctcaagctggagcatataaattatatgcaccaagcttggaacatataaactgaattctaggcccccttaaggatttagtcaaaatatctgctggctgatcattggaattaatgaattcagtgacaatctctttagacagtagcttctcccgaataaagtgacagtcaatctctgtgtgcttggttctctcatggaagactggatttgaagcaatatgaagagcagcctgattatcacaatacagcttcat

SEQ ID NO: 12595 - DNA, 361 bp, Glycine max
  unsure at all n locations
ttagtgcccttaattntgaagcaatatttgacattccttgaaattctgatactggggacagatgtcgtaccggatgtcacgacatcacgcttcaaaacatgcagattgtatttgactgtatgaacagattaaacaagtaaataacacacgagaattgttaacccagttcggtgcaacgtcacctacatctgggggctaccaagccagggaggaaatccactaaaatagtgttagttcgaagatctaacagccactgtttacaaccttctcacctaaccactacccgtgcaacctctacctaagagccactcttagatatgagaacccctctcactccctctcaaacactctcccgtgttta

SEQ ID NO: 12596 - DNA, 389 bp, Glycine max
agctttggccaaaccccagcagcttttgtttccttagagacttgccttagcaccttgtctttgagactgaggataattacactgtgtgccttttgcagtagtgctttcttatccccatcagccatcatcttttcaagtttggcttctccatcaagtgcttccaccaggccctgctgaacaagaagagctctcatcttcaatcgccataacccaaaatcattttgccctgtgaatttttcaacctcatacttggccgagtccatttcttgaatcgaactcaaaaatcgctccacgctcaccgcaccaatttgttgtgccaagatcagattttagttcacaaaagaatgagtttcttgtatgaacaagaataagcaaaatgcagaaaagaa

SEQ ID NO: 12597 - DNA, 357 bp, Glycine max
tactgaagctaatagactgtcatcctcattaatgaatatcctttcatccaattcactcttgttgcgaatcatgtaatcataatctttttctaacatacttagactagaaggtagagacgattcttccatcaggtctttaaaataggtcaaaccatctacaaacaaagggataataaacatcagttagagagatcaagtattcctgatgcataaataataataacacaatgaaaatgaacctttatcgatattctctaggttttcggtttcacattcagatgccaagcaaggctgcttcttcaatatatctgctattacattattggctttctccatggttttcctcaactcatcttc

SEQ ID NO: 12598 - DNA, 357 bp, Glycine max
tcacaagagtttatatggctggaaacatttcccgatgcagtggtacaagaagtttaatgattttatgagcaactcaggattcaacagatgtgacatggaccattactgctatgttaagaaatatactaatagttatgttatccttgtcgtgtatgttgatgacatgttgattgcaggatctagtatggcagaaattaatatgttgaagtagcagttggcagaaaactttgaaatgaaggatcttggtccagctaaacaaatcctaggtatgagaattcttagaaacagatcagaaggaattttgaagctgtctcaggagaaatatatactcaagttgcttgacaggttttaccttga

SEQ ID NO: 12599 - DNA, 348 bp, Glycine max
tttaatggaagtcctgatcttgaaactgttcggacttcgttaactggtgagcaggtcttccagcgggttgaacaccttaatattgtatttggaaagacccagaagaaggataaaagtaagagttgcatatggaagaagaggtccattttctttgatcttgcgtactggtctgatctaaatgttagacattgtattgatgttatgcatgtagagaaaaatgtatgtgacagtgtcattgggacactccttaatattcagggcaagacgaaagatggtctaaatacccgtcaagatctatctgacatgggtatacgatcgcagttgcatccaaggtctgatggtaaaaaa

SEQ ID NO: 12600 - DNA, 410 bp, Glycine max
  unsure at all n locations
ttagaaaatccctcaatggaatttctataatagccagccaacctcaagatacgttgaacttctgttggagttgtcggttgttgccactccataaccgactccactttaatcggatccaccgcaaccccatctttagaaatcacatgttccaagaactgcactttttctaaccaaaattcacattttgacaagttggtgaacaatttcctatccctcaggatatgcaacacaattctcaagtccttctcatgctcctgcttattcctctgatacactaggatatcatcaatgaacacaaccatgaactgatctaagtaatcatgggatatacggttcatatagtccatgaagatagccggagcattagtcactccatatggcatgactanatactcataatgcccataccg

SEQ ID NO: 12601 - DNA, 313 bp, Glycine max
  unsure at all n locations
ttcaaaatcttttgaaattgaatgtgatgcttcaacatgtgggattggagctgtattgttacaagaaggtcatccaattggcttatttagtgaanaattaagtggtcctacccttaactattctacttatgataaggagttgtatgccttagttagagcgttgaacacatggcaacactatctttatcccaaggagcttgtgatccatagtgaccatgagtccctaanatacttacaaggacaaggtaagctaaataaaaggcatgccaaatgggtggaatttctcgagcaatntccttatgttattaaacat

SEQ ID NO: 12602 - DNA, 381 bp, Glycine max
tgtcagtcttgttgttcatacttcacttagagcttcagctattgaagattggtacctaaatagcggctgttccatacacatgacaggagttaaagaattcctggtgaacattgagccctgctccactagctatgtgacatttggagatggctctaaaggaaagatcattggaatgggaaagctagttcatgatggacttcctagtctgaacaaagtactgctggtgaagggactgactgcaaacttgatcagcatcagtcagctgtgtgatgaaggattcaatgtaaacttcacaaagtcagaatgcttggtgacatatgagaagagtgaagttctaatgaagggcagcagatcaaaggacaactggtacctatggacacc

SEQ ID NO: 12603 - DNA, 501 bp, Glycine max
agcttgcaatttaatgttcctgtcacaccgaatatattatattgcatgtatgtataatgaaactttagagagaaagcagggggatataaaatgaatatgccactttattataaagctttctcataatgtcacaggcaaagattacttcagcaattaactaagtcaaaaactctttcttttctgttttggttgaagaagaaaaaagtcagttaatgataaaataccatgctgcattatgatcatcagagtctggacacagcggtggctcattctttgaacgttgctcgtaacactcattagaagttggcttcttgatacagctacacctactccatttacttgatccttgctgatcgacacaacttcccaccacatggcttttgtagtgtcttcatggctgccaataaattcataacacatcaggattaaaaacctacattaaaagcacaagagtgccatatataagtctagctataattacccttcctatttaacatcttc

SEQ ID NO: 12604 - DNA, 327 bp, Glycine max
cctgtctcaaaagtctatggagtatgctcctctgccgaccaccacacagatcttttcccttctctgcaacaacctggagcaattgagcatcttgaagctcatgctgcaaacattgaccacagacctcctctagctcagcttcagaataaaccacggcagagcaattatgacctctacagcaacagatgcaagaccggatggatgaatcaccctaatctcacatggtctagccctcaacagcaacaacagcagcctgctccttcctttcagaatgatgctggcctaagcaagccatacattcctacaccaatccgacaacagcaacag

SEQ ID NO: 12605 - DNA, 520 bp, Glycine max
gctttgaatgctctattcaatggagctgagaagattatcttattactgatcaacacatgcacagaggccaaagatgcatgggagatcctgaaaaccactcatgaaggaacctctatagtgaagatgtccagattgcaactattggctacacaattcgaaaatctgaagatgaacgaggaagaatgtattcatgacttccacatgaacattctcgaaatttccaatgcttgcactgccttgggagagaggataacagatgaaaagctggtgagaaagatcctcaaatccttgcctaagagatttgacatgaaagtcactgcaatagaggaagcccaagacatttgcaacatgagagtggatgaactcattggttcccttccaacctttgagctaggactcttcgatggggctgaaaagaagagcaagaacttggcgttcgtgtccaatgatgaaagagaagaagatgagtttgacctggatactgatgaaaggctgaccaaggcatttgtgctcctttgga

SEQ ID NO: 12606 - DNA, 436 bp, Glycine max
  unsure at all n locations
tacttattntacttagttggaattgattctttgtgatccttaatggtttgatgagtctttcaatatagtttgataataatgtgaaattggtttatcattgtggatggtatgattgatttttgtttgctacaacaaagagataatgtagttgacgagttgaatactcgtagtatatatttgtcgtttgctacaacaaagagataatgtagcctatggttcaaatactcatagtatatatttctcgtttgctacaacaaatagataatgtagcctgagtcaaatactcacaatatattatttgtttgctacaatgaatagataatgtatcatatgagtcaaatactcatagtatatatattntccatttgctgcaatgaagagataacanagtctatgagtccaatactcataatatataccatttnnttctctacat

SEQ ID NO: 12607 - DNA, 393 bp, Glycine max
  unsure at all n locations
tctatagaaggtccgttcctaatttctctacaatggcatctcctctcaatgagctggtgaagaagaatatggcatttacctgnggtgaaaaacaagagcaagcctttgctnttctcaaagaaaagcttactaagggcacctattctagctcttcctgaatttctaaaacttttgagctagaatgtgatgcctctggtgtgggagttggagctgtattgttacaaggtgggcaccctattgcttattttagtgaaaaacttcatagtgccaccctcaactaccccacctatgataaagagctntatgccttaataagagccctccaaacttgngaacattaccttgtttccaaggaatntgtcattcatagtgatcatcaatcacttaagtaca

SEQ ID NO: 12608 - DNA, 399 bp, Glycine max
  unsure at all n locations
accatttntcatagtaaaacactggtnatgtgtctactattattgtgataatntctttctccatcattggaggtgccacttgagctgccaggtctctccacctttgggcgtattctttgaaagattcatgcccctttttgcacatgttctgtagttgcatcctatccggagccatatcataattgtactgatactgcctaacgaaggcaatcattatgtccttccaagaatggactcgggaaggttccaagttggtgtaccaggtaacagctaccccagtaagactntcttggaaaaaatgtatcagcagttcctcatcttttgcgtatgcccncatcttccgacaatacatctttagatggttcttggggcaagtagtcccattgacttgtcaagtct

SEQ ID NO: 12609 - DNA, 459 bp, Glycine max
gagtctatggtctatgttcttctacagatctctgttcttctttgcagcaatctggagtcaatgagcaacttgatgcttatgttgtaaacatttataatagatctcctcaacaacaaaaccaacaacaacagaataattatgatctttcaagcaacagatacaatccaggttggaggaatcatccaaatttgagatgggcaagtcctccacaacaacattagcctgtccctcctttccagaatgctgctggtccaaggaagccatatgttcctcctccaatacagcagcaacaacaacaacagtcataacaaagacaacaagtaattgaggctcctcctcaaccttctttagaagaagtagtgaggcatatgaccatccagaatatgcaatttcagcaagagacaagagcctccattcagagtctgaccaatcagatggggcaaatggctactcagttga

SEQ ID NO: 12610 - DNA, 366 bp, Glycine max
  unsure at all n locations
ctctacaatggccccacctctcaatgagctggtgaagaagaatgtggcatttacttgnggtgaaagacaagagcaagccttttctttgctcaaagaanagcttactaagtcacttgttctagctcttccagacttttctaaaacttttgagctagaatgtgatgcctctggagtgggagttggagctgtattgttacaaggtgggcacactattgcttattttagtgaaaaacttcatggtgccaccctcaactaccccacctatgataaagagctttatgccttaataagagccctccaaacttgggaacattaccttgtttccaaggaatttgtcattcatagtgatcatgaatcgcttaagta

SEQ ID NO: 12611 - DNA, 459 bp, Glycine max
cctttctttttcttggcattttcttcatgttgatttagtctcatgagttccattttgtgttcctgaaactttccaaacaaagttgcaagagacatgtgcataagatctcttgattctataattgtcattacctttggttgccattccctgcttaaacatcttataactttgttaataaaatcttcattgggaaatatctttcctaatgatgcaagatgatttactatatgtgtgaatttcttttgcatatcctgtatagtttcattttgattcattctaaacaatttatattcatgggttagggtatttattctagatctttttacatatgttgttccttcatgggttacttgtaaggtatcccacatttcttttgcattcttgcaggttgatactctaaaatattcatccctgcctaatgcagatgaattatatttttggctttaagttatattgacc

SEQ ID NO: 12612 - DNA, 212 bp, Glycine max
aagagctttcgttgttcagtttcgagcgtctcgacataagatgcgcccgaatcggacatccgggtgaagagatatgagcatattaatatctccagagtatccgatgtataacttccagcgtatcgatataatataagcttgaatcggacctccgtgtgaaaagatatgaccattagaatatctcgagagctttcgttgtagaatttccagcg

SEQ ID NO: 12613 - DNA, 476 bp, Glycine max
aaaacatctctctgccgaagttgctgccatgcatcagtgtacagtcgtccaaaaaatccctgagatcaccgttcgtcgtagacacaatctgcatacgacgatcacgtcgtaccgactatggctatccgcttcatcacctataatgaatatcttttacatcatcaactatataaattattacaaattgtccaaactaactattcatagtggatgaattatatctaaaatgtataaggcataatctacgcagagatgcatcctgacttttaattattgataattgctgtaacaagatattcatatgcaagttgaaactaacaatattaacaattatagattgaaagagataaacagcacgttaaagcagcatctctatatctatctatatatatatatagatggcatatgacctctctatatatctatatatatataaatcccaagcgtgcgttcggagcctgacttaatatatgggg

SEQ ID NO: 12614 - DNA, 454 bp, Glycine max
  unsure at all n locations
cctctcaagcattngatccatgaagggaataggaaagtnggtatttgttgttgccttgttgaggaggcagtaatcgatatacattctccaactggtcatggtccttacaggaattagctcattcttgtcattctttatcactattattctacccttgttggggactacttgcatggggattacccatgaactttcaaaaatggcatatatcattccagctccaagaagcttcagtacttcttttcgaacttcctctttcatcaccaggctgagtcttctttgtgggtgtgctactggtttgaagtcctcatcattgtgcatgcaaataaatggacatattcctttgagggtgaagaattgtcatcctaaggcttgtctgtgcttctttagtacctccactagtctcntttcttcctctttgtgcaatgtgctactaatgatggctaagttctca

SEQ ID NO: 12615 - DNA, 441 bp, Glycine max
agcttataatatattattacgctcgaaattaaacatcttaagctctcgagaaattcaaatggtcataacttttcacccggatgtccgattatggcgaatcacatatctagacgctcaaaattgaacaacggaagctcttgagaaattctaatggtcataacttttaactcggatgtccgattcaggcgcatcacatattgaggcgctcgaaaatgaacaacggaagctctcgagaaattcaaatggtcataacttttcacactgaggtccgattcaggattataatatatcaagacgctcgaaattaaaaatcggaagctctcgagaaattcaattggtcatcacttttcacacggatgtccgatttgggtgcataatatgtcgacacgctcgaaattgaacaacggaagctctcgaaaaatcaaatggtcataacttttg

SEQ ID NO: 12616 - DNA, 355 bp, Glycine max
  unsure at all n locations
actcttagtggtgactttgtgcgtatgtttatggaggagtccgagtcaatttctgattattcttttcgagtattggccgtatgcaatcatcttataagatatggtgaagatgttgatgacgtgaaggtcattgaataaatacttctaactttatattcatagtttgacttcattgntaccaacattgaagagaacaaggattttatgaccatgactattgagcaactcatgggtgccttacgagcatactaagataaactaaagagaataatttaacaagatgaggctacggagcaactactacaactcaacgtaaaggaagcagacttatcatattacaagagccaaagatgac

SEQ ID NO: 12617 - DNA, 342 bp, Glycine max
  unsure at all n locations
agattcaaaggatgtaaaagattgtgatcaatgtatttaaaatgcaagttaagttcttgcctttatagactcttcaagtctggtcaagagaaccattagaagagttataacctttagaaaacctttggaagagttacatcttttgattcttattcanaacttatcattggtaatcgattaccaaatcattgtaatcgattagacaaagcatttttgtaaaaggatgtgactcttcacatttgaatttgaatttcaacgttcaaacacactggtaatcgattaccaatatattgtaatcgattacaccattttgaaattgaatggaacattgtaaattcagtt

SEQ ID NO: 12618 - DNA, 438 bp, Glycine max
  unsure at all n locations
ctccccgttaatgggtgccttntcgtctttggtattgtgatgtcatacggattaacatgatccgtattactcattcagatcaacttgatccgtatgagtcataaggatctagttgatccgtatgacttatacggatcaagttgatccgtatgacctttgttaattcaaaaaaataataaataggtatttgtgtttagaaaatgttttaaatacgagtttattcgtagttttgtataaaaaacagattgtttgtgtttaaaaaaaatatgtatgatgcatggtgtatgaaatagtataaatttaatagtaatattgaattttgagttgttgtgttatttatctcatggaaatagcatatttattaatatgagtcgtattattatgaattggtctaatatgatcatatatgctttagaatattataatgatgtttattca

SEQ ID NO: 12619 - DNA, 507 bp, Glycine max
tttcttgaagagggcaggaacccatgcacaaagatagagatcctcacaccattaaacccattgttcgatattgggttgaagaattggctaaactggcttcttttgtacttttcacaagtattggagatctttctacctttcaagaggctatgaatagccaggagaaagacaaatggattggtgctatggtggaggagatagagtctttacagaagaatcaggcatggcagctagttgagcttcctacgagcaagagagtcatagggtgcaaatgggtagacaagaagaaacctctagtatcagaaaaagaaaggaaaaagttaaaggcttgcctagtagcaaagggatatgcatagtagaagaggttgattatgatgatattttcctccctaatcatgagagacacttctatcatggcgatgttagcctttggagccagtcatgacattcacttggagcatatggatgtgaagacaccctttttcaccatgatctaggggaacaaat

SEQ ID NO: 12620 - DNA, 375 bp, Glycine max
  unsure at all n locations
tcagcttcacatcagaccacttccagggtgctggaactacttcatatggacttgatggngcctatgcaagttgaaagccttggaggaaagaggtatgcctatgttgttgtggatgatttctccagatttacctgngtcaactttatcagagagaaatcagatacctttgaagtattcaaggagttgagtctaagacttcaaagagaaaaagactgtgtcatcaagagaatcaggagtgaccatggcagagagtntgaaaacagcaagtttactgaattttgcacatctgaaggcatcactcatgagttctctgcagccattacaccacaacaaaatggcatagttgaaaggaanaacaggactttgcaagaagct

SEQ ID NO: 12621 - DNA, 251 bp, Glycine max
ttccacatatttccttgtcggatggggtcaatttgtcgcccttgttttatgaccagaggagggaggagatgaagttcccctccgcggcgacgccccgcaccgtcatttcccggctggaggaggtggccaacgccgggaagttctacgtcaggagtagccagaccactgtgaggctttagggtcaggaacgtgggaggacagggaagctggccattgccgccgatatctactccgtgacgccctcgtttatg

SEQ ID NO: 12622 - DNA, 398 bp, Glycine max
  unsure at all n locations
tcaacattcaatttcgagcgtctatatatattacaggactcaatcaaacatccgagtaaaatgttactgtcgcttaaatttgcttagctctccagctttaaatttcgagcgtctcgatatatgacgggactatatcagacatccgagtaaaaagttattgtcatttgaatttgcttagagattcaacattcatcttcgagtgtctcgttatattacgggactcaattatacattcgagtaaaaagttattgtcgttcgaattttctcagagcttcaacaatcaatttcgagcgtctcgatatattacgggactcaatcaggcatccgagtanataagtattgtcgtttgaattggctcagagcttcaacattcaatttcgagcgtctcgctatattac

SEQ ID NO: 12623 - DNA, 469 bp, Glycine max
gctttgagcaaattcaaacaacaataactttttactcagatgtctgattgcgtcccgtaatatatcgagacgctcgaaattgaatgttgaagctctgagccaattcacacgacaataactttttactcggatgattgattgagtcccgtaatataacaagacgctcaaaattgaatgttgaagctatgagccaattcaaatgacaataactttttactcggatgtctgattgagtcccgaaatatatcgagacgctcgaaattgaatgttgaacctctgagccaattcaaacgacaataactttttactcggatgtctgattgagtcccgtaatatatcgagacgctcgagattgaatgttgaagctttatgcaaattcaaacgaccataactttttactcggatgtttgattgagtcccggtatatatcaagacgcttcgaaatgaatgttgaacctatgagcccatt

SEQ ID NO: 12624 - DNA, 287 bp, Glycine max
  unsure at all n locations
agatggaccatttcaagtgctnganagaatcaatgacaatgcttacaaagttgagctgcccggtgagtataatgttagttccaccttcaatgtctctgatttatctctttntgatgcagatggagaatccgatttgaggacaaatccttctcaagagggagagaatgatgaggacatgaccaagagcaagggcaatgatccacttgaaggacttggaggacctattgatgaggacatgccaagagcaagggcaaggatccacttgaaggacttggaggacctatgac

SEQ ID NO: 12625 - DNA, 305 bp, Glycine max
caacatagttgacacggaagggatatctcctctatatataagcataacatcatatgcaaaagccaaatgagatagttgaatacctgcacagttgggattgaaattaaaattggcatcatccttgaggctgctcatatctctggaaaagtgctccaaacagagcacaaacagattaagggagagaggaatcccttgtctaagaccccgctatcctttgaagtgaccataaatgaatccattgactgccacactataggaagtggaagaaacacattccatgatcaaagtacagaactgggctggga

SEQ ID NO: 12626 - DNA, 375 bp, Glycine max
  unsure at all n locations
acgacaattacttttaacttggatgtttgattgagttccgtaatatatcgagacgctcgatattgaatgttgatggtcgttgcaaattgagacgacaataactctttactctgatgtctgattgagtcccgtaatatatcgagacgctcgaaattgaatcttgatgctctgagcaaattcaaacgacaataactttttactcggatgtctgattgagtcctgtcatatatcgagacgctcgaaatntaatacgaaagctatgagcatattcaaacgacaataattatttactcggatgtctgattgaatctcgtaatatatcgacacgctcgatattgaatgttgatgctctggtcgatntcaaacgacaataat

SEQ ID NO: 12627 - DNA, 546 bp, Glycine max
  unsure at all n locations
ctgcaagcttatactttcaatatgagttctcccatcgtgtttgtgacaatggtttgagagttagactagaatatgatattggtaaaatttttcattttttattgaagaagaaaatatattatatatgcatcgtagtactcccgaaaaagatgtaattttaggacaagagttagtcatatcacaaaataccaaatttagactatgacaatcacgtggagtataaaatgatcgataattaaagtctaaaattcttttttgcacaccttgatgttatcctttcatatttgattcattatcataaccctgtcctcttaagtaattaatatcaagtgaaatattatttatttcattcataatagcttcaaaaaggcctttntccggttgtatcatctacctttaaaaattataaaaaaaatttcaaaaacttgtatttgaattgaagaaacatctacatatcataatacaaaagtcatttgttctcgatgacttatatcacgaggacaaccaagtatgattgaaaatattgtgcattattgatatttttat

SEQ ID NO: 12628 - DNA, 426 bp, Glycine max
acttttcagatgaaagtcccattcagccgcataatatatctagacgcttgaaattgaacgccggaagatgatgagaaatttaaatggtcataacttatcacgcggatgtctgattcaggccaataatatatcgagatgctcgaaattgaacaatggagctctcgagaaattcaaatggtcataacttttcaattggatgtccgaattaggcgcatcacatatcgagactctcgaaatcgaacaacgaaagctctcgagaaattcaaatgggcataagttttcacacggaagttcgattcaggcgcataatatatctagacgttagatattgatcaccggaagctcttgagaaattcaaatggtcataacttttcactcgcatgttcgattcaggtgcataatatatcgagacgctctaaattgaac

SEQ ID NO: 12629 - DNA, 293 bp, Glycine max
cgcatcacatatcgagacgctctaaattgaaaaccggaagctctcgcaaaattcacatggtcataagctgtcacacggaagtctgattcatgcgcataatatatcgagacgcttgtaattgaaaaaagaatgcgctcgagaaagtcaaatggtcgtaacttgtcaaacagatgtccgatacgtgcgcataatatttcgagacgctggaaattgaacatcgtatgctctcgagatagtcaaatggtcataacttatcacacggaagtccgattctggcgcataacatatcgaga

SEQ ID NO: 12630 - DNA, 428 bp, Glycine max
tgctgcatgctagctttgatgcagcatatggagaggctaatgatataacgttatgatgcgctgcatgacacgctcgctcaatatggctaatcgccatccttatgaggaagaactgacgacaacacgtaatggatcgtgttcctagacaaaacctgattgatcgttttaaacttctcattcctccatttaaaggaaagaatgatcctgaagcctacttggagtgggagattaaaatatagcatgttttctcatgctacgactatgaggacgaccaaagagtgaagcttgccgccacggaggcttcctactatgctcttgtgtggtggaacatgcttctaaatgcgacatccagaaacgaccagccactgggtgatacatggaccgagatgatatacatcatgatgaagcggtatgtgccagctacttac

SEQ ID NO: 12631 - DNA, 460 bp, Glycine max
  unsure at all n locations
atgtgttgtttcttattgattgatgtgtgtatgaagttcaactagtagtaggtactttatttctcacatcaaggaagcattgttaattcaacgagtacacaagctgtgtactcataattaagttgtcagttttcacaactgtaattcttttattattggttatggcgactagaagtctctacacactataggtcagggccatggctcaaaggttaggctatagctcagaagagcactactttctatgaatctagattatttaattntaaagggtaaaataaagatattatagagtatatctgtttgataattntattaatacaaactaattaattaaaaaatataagattaattcgtttgtctgacaatattatagttgataactgtattacaacatgataatgtataatatacatggtattacatctaatatcattttctatcattgacatatagtatt

SEQ ID NO: 12632 - DNA, 437 bp, Glycine max
ctcaagcctctctgtggtattaactcatgcgaagggctgcccttgacaaatactgagattaatactattttaggcatccctccattcattgaatccccttggagtggaaacccatcctccgcagccagtcaagcacatagtcccatgatactgaatcatatgccttctcgtatccactttaaagacaatgcacagcttctgccctctcctatcttcctcgaccacctcatttgcaattaccgcgctatgcaacaaatgccttcctttaatgaatgcaaattgccttttgtctatgaagaacggcatgaccttcttccatctgttggctagtagctttgccaagggatttaatcaaataactacgtccggatatttagaaaccttttcacctgttgctgtgaaacctgccccaatcaaataatagtgactattgctct

SEQ ID NO: 12633 - DNA, 438 bp, Glycine max
  unsure at all n locations
tcgtggcttctttgagaagctctgtcaagatgcttctttgagaatctagatccttatctatccacacccctcttttagctgaattaacctcctctaaaataattacggatgagaataacgcaacatataatcaaacatcagacataattactaataatatatagatatatatatatcagggttgtacaactctcccacccttttagaaatntcgtactcaaaatttaccttactcaaacaaggatgggtgagcttctcgcatctgactatctaattaccacgtggcatcttctcctgatgcacctcctcagatcaccttgaccaacgaaatctctttccctcttaagtgtntnggtcgcctatccttgatcctcaaaggcaatgtttcatatgtcagaatctccttcacttgaccatcatcaattaatcacatgggat

SEQ ID NO: 12634 - DNA, 551 bp, Glycine max
tgccagcttcaaccacaatgttgaatagaaacggtgcttatgggtccccttgcctcaggcctctctgtggtatgaactcatgcgaggggctgccattgacaaatactgagatataagcagattttaggcatccctccattcatcgaatccacttggagtggaaacccatcctccgcaccaagtaaagcacaaagtcccatgatactgaatcatatgccttctcgtaatccactttaaagacaatgcacagcttctgccctctcctagcttcctcgaccacctcatttgcaattaccgcgctatgcaacaaatgccttccttcaatgaatgcagattgccttttgtctatgatgaacggcatgaccttcttcaatctgttggctagtagcttttgcaacggatttaatccaataactagtcaggattattcagaaacctttccacctgttgctgtgaaacctgtcacaatcaaaataatgttgactattgctcttgctcatcactggtctattcaataaattgtgtgaacaatgctctccttaatgggcatt

SEQ ID NO: 12635 - DNA, 425 bp, Glycine max
tcagctttctagaaactgaacaaaggaagttctctagatatttgaatggtcataacttttcacacagatgtccgattcggggacataatatatcaagacgctcgaagttcaacagtggaagctctcaagcaaatcgaatagtcataacttttcacaatgatgttcgattttgggacataatatatcgagatgttcgaaattgaaaaacggaagatttcgagaaattaaaatggtcataacttttaacacggatgtccgattgggggagataatatatcgagacgctcgccattgaacaaccaaagctctcgacaaattcaaatgggtagtaattttcacacatatgtccgattcggagacataactcattcagacgctcaatattgacaatgggaactattgagaaatttgaatggtcatacctt

SEQ ID NO: 12636 - DNA, 523 bp, Glycine max
agcttaacaaaaggcatgtgaagtgggtggaattcctatagcaattcccttatgttatcaaacataaaaagggaaaaggtaatattgtagccgatgctctttctcggcgtcatgcattactttctatgcttgaaacaaaattgattggtcttgaatgtttgaaaagcatgtatgaaaatgatgaaacttttggagaaatttttaaaaattgtgaaaaattttcagaaaatggtttctttagacatgaaggctttcttttcaaagaaaacaaattgtgtgtgcctaaatgttctactagaaatttgcttgtttgtgaagcacatgaaggaggtttaatggggcattttggggtccaaaagactctataaacattacaagaacatttttattggcctcatatgaaagaggatgtgcagaaattttgtgaacattgcattgtatgtagaaaggcaaagtctaagggaaagcctcatggattgtatactccattgcccaattcccgagtattcttggattgatttat

SEQ ID NO: 12637 - DNA, 373 bp, Glycine max
  unsure at all n locations
tgctcaccaacactagataagaatccctcatgttgtttcatgtaaacctcttcttctagatcaccattcaggaacaccattttcacatccatttgatgcaactcaagatcaaaatgagctactaatgccgaaattactcgaagagagtctttcttatatacaggggaaaggtctctctgtaattgattccttctcttttagtgaatcctttagcaacaagatntgccttatgtctctcaatgttgccttctaagtctttctttgttntgaagacccatctacatccgatggcttttacaccaacaggcaactcaacgagatcccaaacttggttagatgccatagaatccatctcatccctcatagcattata

SEQ ID NO: 12638 - DNA, 380 bp, Glycine max
  unsure at all n locations
agcttgtgcattcaatatcctgatgaggatgttccatatgttctcaagactggactaatacatttgctgcccaagtttcatggtcttgcaggtgaagatcctcataatcatcttaaggagttccatcttgtctgttccaccatgaagtccgctgatgtccaggaagatcatatctttctaatggctattcctcattctctggagggagtggcgaaagattggctgtattaccttgctcccaggtccattactagctgggatgaccttaagagggtgttgttggagaaattcttccctgcatctaggaccactgccatcaaaaaagacatttcaggcattangcaacttagtggaaagagcttgtatgagtactgggaaag

SEQ ID NO: 12639 - DNA, 353 bp, Glycine max
  unsure at all n locations
gttatagacagganatcatatattgaatatatcatcaggcttcatatcttccaaagaaaccctttccatgctaattccaagcagaaaattgaatcattcctaacctgtanactaggaaaactatcatcagcctcacccggtcttgaaacatccagtcccctgaccaatcatcanaggagtcagtaaagagtttcaaactttcaatacctcggaaaacaaatatgcaaggacaggtgtatagaaattcctacttccattgaattcggttcttgagtttcttttctataagtccaatcccttcaagaacatntgttatatcatatatcctcctcttttgcacctgcagataccaa

SEQ ID NO: 12640 - DNA, 418 bp, Glycine max
agcttatgctgcaaacatctacaatagtttcttctcatcctcagtttcaaaatcagccacaaaagaacaactatgacctctctagaaataggtacaatcccgggtggaggaatcatcccaaccttagatggtcaaatcattcacaacagcaacagcaacaacaacaacagcaacaaccccagaaacaacaaatagttgaggcttctccgcaaccttcccttgaagaacttgtgaggcaaatgactatgcaaaacatgcagtttcaacaagagaccagagcctccattcaaagcttaactaatcaaatgggacaattggctacacagttaaatcaacagcagccccagaattctgacagattaccttctcaatctgtctagaatcccaaaaatgggagttccattacattgagatcggg

SEQ ID NO: 12641 - DNA, 391 bp, Glycine max
agctcggaatgcatgatttgctcgattatgggaagagaaatcatccgtgtgaaatcaccaaaggaacctgacgagcgtatcacgttatggtttcatgaggatgtgcttgatgtattattaaaagaaagtgtcagacctacaattatttattttggatgtgctatactaaatgccatactttcattttacattattgtcaatatgatttcacagggaacaaaagctgttgagggattgactttgatgcttccacggagtaatacaaaatgtttgagtactacatctttcaagaagatgaagaaactcatgttacttcaatttgctggtgttgaacttgctggagattttaagaatctttcaagagatttgagatggctatattgggatggat

SEQ ID NO: 12642 - DNA, 412 bp, Glycine max
  unsure at all n locations
agcttctatagaagggtcgtacctaatttctctacaattgtctcacctcncaatgagctggtgaggaataatgaggcatttacttggggtgaaagacaagagcaagcctttgctttactcaaagaaaagcttactaaggcacctgttctagctcttcctggactttctaaaacttttgagctagaatgtgatgcctctagagtgagaattggagctgtattgttacatggttggcaccctattgcttattttagtgaaaaacttcatggtgccaccctcaactacactacctatgataaagagttttatgccttaataagagccctccaaacttgggaaaattaacttgtttccaaggaatttgtcattcatagtgatcatgaatcaacttaagtacattagagggcaaaac

SEQ ID NO: 12643 - DNA, 417 bp, Glycine max
agcttattcttcttcattatgcgacggtattcatgttcttctacggcgtggacacccacacctcattctctgatatcgggccactgacatgggctgcggcgggtccaaggtggaggacttccccgcggtggttctgtgtagagagcgaaaggcgttcctcaaagccgcatcagagcaacgctacgctctcgccgctgcacacgtggcgtatttccattcgctgagtgaaatcggcgacgcccttcacaagttcgccgaacaagacctcaccaccaccaccggttcctcctctccggttctcacattaccctcggaaaccaaaagcatcaacaataacaaactctcatcctcttccccttctatagcatctaatgaaaaaaaactatgaaaaacaaaacgaatggcttaattcactgg

SEQ ID NO: 12644 - DNA, 354 bp, Glycine max
tcattgggcgttgttgattggtttacaagcctcgtttaatatttgctcctcacagatcgtaacactttaaagttcaatctccccattgtccatatcatacgctaacaaagcaagaatatatgaaagaagatgaggtcttcaatcatatttctttgcattctggtgtatctgaacgagggagctgcggaatagtcagctgacgacgttcttgagaaatacgatctcccagttgggcttcttccaaaaggtgccacagggtatgaattaaacgaaaagaacgggcacttcacagcgtatttgaatggaacatgctactgcagcatagagtcgtatgagctacagtacgagtccacc

SEQ ID NO: 12645 - DNA, 382 bp, Glycine max
agcttcgcccaaaaccatgttcatttatcttctaggagagccatgttgtagaacacctcaatcccatgcaaacgacaataatcaattttgttcttaatagcctttaacaagtaatgatccccaacgggattttcgcacggtttcggcgacgacccagttacgaaaaacacgcggggcttgttgggtcgaaggaaattcgagaaattgggattctcgcgaagccagcgagatctctgttcgtcccagatcgatattttggggccgagacgatacgcctcgtgtgggttaactttctcgcggttctcgtcttctgtttcgcctaccaagatggtgttgatgtctaacgcgttgtaattggtggtggaagtggaactttcaaacg

SEQ ID NO: 12646 - DNA, 422 bp, Glycine max
  unsure at all n locations
tcaagctataatgagaagaccacaggcatattntttttttcttatgccaaatttatagatgctggtgtaagcaagagtatttcacctgcacagaagagtactcatctacaacagctagcatatgtgaggagttttcctagtggggagagaaactgttacagaataaatgtaacaagtggtactaagtatttgatcagagctactttcttttatggaaactatgatggtctcaatcagcccccacaatttgatcttcatcttggagctaatatatgggacacagtgaacttccccaatgcttcactcagtgaaatcagtgagatcattcacactccatcactagattacatacaaccatgtctggttaacacaggcaaagggactccattcatttcagctatagaattgaggactntgaacaa

SEQ ID NO: 12647 - DNA, 425 bp, Glycine max
gcttgtaatcgattacacacatactgtaatcgtattcctttatgttattttcagaaaatattctcaattgtcacatcttttcatttggttcttgaatggctatcaaaggcctatatatatgtgacttgagacacgaatttgccaagattttttcagaacaaaaaggtcttatcctcttaaaaagcaaaatcgttttatcctcttacaaattccttggccaaaacacttgtgattcaataaggaattatttgagtgctcaaattgttcaatctatctctttcaagagagatttcttcttcttttcttctttattctgaaaagggattaagagaccgagggtctcttgttgtgaaagaattataaacacaaaggaaggattgtccttgtgtgtttagaacttgtaaaaggaatttacaagatagtgg

SEQ ID NO: 12648 - DNA, 400 bp, Glycine max
agcttccttaagaagatttctaaagaatctagagcttagctacacatacgtctctaatagctaagctcacctccttgagatgagaagctacaacttagctacacatcccctataatagctaagctcacccgcatgacaaaatacatgcaaatacaaaaaaaatccctactacaaagactactcagaattcctcaaaatacaaggctaaaaccctatactactagaatggccaaaatacaaggcctaaacgatggaaaaacctattctaatatttacaaagataagcaggctcatacttagcccatgggctcgaaatctaccctaaggctcatgagaaccctagggccttcccttggatttatggcccaatctacttggagtcttctattcaatgcccttg

SEQ ID NO: 12649 - DNA, 392 bp, Glycine max
  unsure at all n locations
ctgcagcttgcttatcatnttatttcctttctaggctttttcgacgactcaccacctgcttcaaaagatgctacaaaccggaagaagcactagtgctatagttatcattgtattaattgtgcttgtgctcttttctttgttctcctttgtactttttaagctgtggctgaagaaaaaaagggaggagcaatatgctcgtctttaatgctaatgtttttggctttgtgttttccagcttccaggggataaaatattaggtctggcaaaaatttcttgggtattggaatcccaggagatgccaaggacttcttcaatcaagtcgagtcattaggttttctagagagcaatatgaaagtgctttactaaaaacaatcttattatagattgcagct

SEQ ID NO: 12650 - DNA, 415 bp, Glycine max
tagtaaagctaggcactaacaatctccctctttgtgttaattttgtctaaaacatacttagacacttcctgagcaggtacgagcagttatgcaagtgggatcagcaactttcattatcagagtaatcaagcacagcggaaattctgcaagttgcaagtcgtttccaggatgtcaagacatctcacatgacatcagctttctgcttctgctccccctgtctccatgctcttactgcagcatcttctatcagctactagtcttttccaggatgtcaagacatctcatgtgacatcagctttcccttgtctccatgctcttactgcagcatcttctatcagctactagtagcttacatcagtcatcatcagcagcagcagtctccccctcaaaatcatgtacatacaactccccctca

SEQ ID NO: 12651 - DNA, 438 bp, Glycine max
  unsure at all n locations
tactcaagcttgcnatcgattacacacatactataatcgattaccttatgagtttgttttaaaacattctcaacagtcacatctttttatctgtttcttaaatagccatcaaaggcatatatatatgtgacttgagatacgaatttgacaagagttttgaagaacaaaaaggtcttatcctcttaacaagcaaaattgttttatcctcttacaaattccatggccaaaacacttgtgattcaataaggaattatttgagtgctcaaattgttcaatctatctctttcaagagagattacttcttctcttcttctttattttgaaaagggattaagagaccgagggtctcttgttgtgaaaggattctaaacacaaaggaaggattgtccttgtgtgtttagaacttgttaaaggaatctacaagatagtggaactctc

SEQ ID NO: 12652 - DNA, 427 bp, Glycine max
  unsure at all n locations
taaggtcagaatgaactttgagcttggaacgtagtttgaattttcgatccttggntaatggttttttgaagatgtcagcaatttgatccacagaagatacatgacagatttggagcaatttggattcaacaagctcatgaatgaaatggaaatccaaagcaatatgtttggacctagtgtgtataacaggattcttggtcagaaaaatggcgctgacattatcacataacaataatggaggacgtctaagaggaacacaaagatcttgaagcagttgtttgatccacaacagctcagcagcagtgtatgcgagtgaacaatacttagcttcggtgctagatcttgcaacaactcgttgttttcgagaagtccagctgataagattggatccatganagatggcataaccatactaagacctgctatc

SEQ ID NO: 12653 - DNA, 408 bp, Glycine max
  unsure at all n locations
agcttaaactaatttcaactaaatcatttatagaggttttaaatttcatattatagtcataccgagccaaatcggactgtatgatttttaagtttgattcaaatggcatgtaatgaaaaaactaaactaaatcgcatcagaatattttttgtaaaattattttatantaatttgtgtgatgaagaagagggaaaaaatgaaatcatttaattaatgtaataatgagtttaaaaaactattttacaaagacttaaatatgtttttggtctctgatatatactcaatttttgtgtttaatccctaataaatttttccttcgaatcggatccctaatattttaaaagttttgtctaaggcccctgccattaactatgattcattaactgcttacgtggtcgttaacttgac

SEQ ID NO: 12654 - DNA, 298 bp, Glycine max
agacagaagtaaccttaagtagtgatttattagaatgaattatgagagtttccagatccactccaggattttttttaacatccagatttcacttttagtgaggaacttattcccatgcagaacactctttcagctattatgctcctatgctaaaaaaaacgtgaaaggaactgcctacctgagatagaatgattggaccaccatgagactgaaatagcttttcattcttcatcatctggactattttctgagtgaaaccttgctttgcggctaaagtaaaaacagtaaaaataagtgt

SEQ ID NO: 12655 - DNA, 424 bp, Glycine max
  unsure at all n locations
agaaactcagcttttaaaatcactttgaaaccatgctttgtgtttttttattnggcttcgctatgacttcattagcaatcatcacaccatggagaatatgccttcctttgagaaaggcagtttgcctttcatcaataatgtgaggcaaaacaagagccaacctattagcaaggactttagacactattttataagcacaccctataagagagatgggtctataatcattaagagattgtgggttaatgatcttggggataagggctatgaaggatgcattgcttcctttggggaatctgccatttatgaagaactcatccatgaacctgataaaatcaggttttagaatttccaaaaactgtttaataaagttgaagtttaacccatccgggccagggcttttatctccaccacaagcccaaac

SEQ ID NO: 12656 - DNA, 342 bp, Glycine max
agcttttccggagcccattatattgcgttttcgttcatgtgtctccaccttcgagtttggagctatgcgtagtgattgcttagtgcaattctccattctcaacctttttcggagccccatgaattgcgttttcgttcatgtgtcctccaccctcgagttcggagctatgcgtagtgattgcttagtgcaattctccattctcaaacttttttggagccccatgaattgtgttttcgttcatgtgtcctccaccttcgagtttggagctatgcgtagtgattgctttgggcaattctccattctcaacctttttcggagcccatgaattgcggtttcgttcat

SEQ ID NO: 12657 - DNA, 397 bp, Glycine max
agcttgaaggtgtgtagcccaccatcttttatagtagaatactggtaatgtgtttactatcattgtcatcattttttttcgtcattgaggtgccacttgagctgccaggtctctccacctttgggcgtattctttggaaagatctgtgccctctttttgcacatgttctgtagttgcatcctatccgaagccattatattgacacaacctaacgaaggcaaccattaggtccttccaagaatggactcgggaaggttcctagttagtgtaccaggcaacagctaccccaataagactttcttggaaggaatgtatcagcaattcctcatttcttatgtatgcccccatcttccgacaatacatctttagatggttcttggggcaagtagtccccttg

SEQ ID NO: 12658 - DNA, 408 bp, Glycine max
agcttccctttcttcggccaatgctggttttgtttggcagtgatttccttggcaatttgatgctcagaaacagcaatatctatcactccatcagtaggtctgcccagatatttgttgatcacagcaggggagaatctaacacactttcctctgacaaatactttttgatactcatcactctttctgtttgttatgtcagagggaatgttgacaatgaattccctgactaggccttcataacagtctcccaatttggtgactgtcttcagtagtccagcagcctcgatgaggtccatgatttccttgcaatccaaggcatttcttcccatttctctttctaaagcaagccttcgttgatatacaaatttccacctttcaacattgccaatggagtggaaagagatgttg

SEQ ID NO: 12659 - DNA, 408 bp, Glycine max
agctttcgaggtgaggacacccgaatgtttttcacatgccatctttacgaagctttgatgcaaaagaaaattaaaacctatatagatgaacaacttgaaaagggagatcaaatcgcactagcactcaccaaagccatcgaagattcttgtatatctattgtcatcttctcagataactatgcttcctcaaagtggtgcttgggtgaactcttcaagatcttggaatgcaagaaagaaaaaggacagattgtgataccagtgttttacaatatagatccatcccatgtgaggaagcaaattgggagctataagcaagcctttgcaaaacttgagggagagcctgaatgcaacaaatggaaagatgctcttactgaagcagcaaatttagttgggttggactctaaaaat

SEQ ID NO: 12660 - DNA, 396 bp, Glycine max
  unsure at all n locations
tctaaactgtgtacaagaacgaagctctgtaccatatgctttacagnggccacagatatcttaagaagggggggttgaactaacatattgcaaactgtttgccctaattaaaaaaaatctatgtgactttttactcttgttatgaaatcccttaatgacaatcttcctaaatattaatccaaatgaagcatcttgaatatgaatatacagctttgataagtaaaggagattactggaagatgaatacgctaacatcagttttatacttggtcggccacacccttgtgcctacgtacagtacccaagcaacccgcttgagagatccactatcttcgcaaatcctttcacaagttctaaacacacctagacaatccttcccttgtgtctatagatcct

SEQ ID NO: 12661 - DNA, 405 bp, Glycine max
agcttgtgaggatcggtgtttgtctttatgtcaaactctctcacggagtgatttgttggagagcaagctgtttatcaaactaaccaactacatgataatatttcaaagattcagacccctgtgataacagaactagatataaacactaattttaatctatatatgatctataaaaaaagggaataccatctgctagttagacatctgaatatcttattaattatgtactatttttcaatgtttataaatttagaaaattacggtcaattgttagtattcaacactttttcaagttttatgaatattaaacttctaaccattttcttaaataatatttaatgcatttttaatttatcaaacaattagttcaatcaaatattttttttgttgactcacgttaaaaag

SEQ ID NO: 12662 - DNA, 366 bp, Glycine max
  unsure at all n locations
gagcttcnggaaggaatatttcggtgtgtttgcaattttgcaatccggcatcccaaatctctggagagtttcaccagcatatttcctttgatgcatgacaatcccatattcagtccacaagaattctaacccaaggaaatatgacaatttccctaagttagtcatttcaaattcactcatcatgagtgaagtgaaattatcaatctctgttgtatgattaccagtcactagtaaatcatcaacgtataggcacaccattaacaccttgttatcctccttcaacatgacataaactccatgttctaccacacaccttttgaagccaagttgagcaagatatgcatcaattctcctattccatgctct

SEQ ID NO: 12663 - DNA, 410 bp, Glycine max
tcgatggagaacaaccttaggatgcagtatttacatgcacagagaagaaaaaagtgcaagcaaaataggtcacgtctaatataatttaaattgtaagttcaacatcggttttcaataaaaaaaaaaaaaaaaaccaatgttaacaacttgatgttaacgttaacatcgattttattaaacaaaccgatgttaacgaactaaggttaacatcggttttctgaaaacccgatgttaactaattaatgttaacatcggtttttccaaaaccgatgttaaagtcacttcattaacatcggttttcttcaaacatgatgttaacgtatacacattattcacaattatgccaccgcgttatcttaacatcggttttttaaaaaaccgatgttaataaagtctcattatttatcatt

SEQ ID NO: 12664 - DNA, 407 bp, Glycine max
agcttcttatttgatccagagaggagtgcatacattttattttactcaagtcacgcccactaaactctggcacaatagacttggtcattgccatcttgaaagaatgctaaacatgaaaaaaagggaaatatgcaaaagaaaatttgaagaagtttcaaatggaggaatgcaaatctgttagcacaccaatgaatcaaaaggagaagttcagtaaggaagaacgtgttgataacaattatgaaggatattatgggaacttgattggatgtctaatgtatctcattacaacaaggccaaacattatattttctcaaaagaacaaaactggaatttttgttgacaatcaagtagtcattgctattgcaaacaatctcgtgtgtcatgggaagactaaacatattaacatc

SEQ ID NO: 12665 - DNA, 423 bp, Glycine max
tggttatctccttcttcactacatcaagaatcacctggttgtgtcttctctgtggctgtcttactggtttagctccatcctctaaatttattcgatgcatacatgtggatgggctagtaccaggaatgtccgccagggtccaacctatagccttcttatgcttcttgagaacagacaacaacttctcctcttgctcatcactaagggaggcagatataatcattggaaaacttttgctatcatccaagtaagcgtattttaaatttgatggcagaggcttcaattctggtgtggttggctgggtagtggtagaaggagatggtttctcagcctgtacctcataaagaaagtcagaggtatgtgtacttcctgaaacatggttagtcctatctgactctataaaatcaatctcaagaggcaaaa

SEQ ID NO: 12666 - DNA, 367 bp, Glycine max
actcgggcaagtgtggccatgtactccgctttacttgccgaaagagcaacaactgattgttgatttgctttccaactgattgttgtaccaaacaaagtaaacacatattctattaaagacttccttgtgtctacatttcctgcaaaatctgcatctacatatcctgtgactgctgcctcgtgtgctgtcttcttgtaccttaaactagctttcaaagatccatttaaataccttagtgtccacttcacagcttcccagtgtgcactgccaggatctaccatgaatctgcttataatacttacaacatgagccaagtcatgtttactgcaaaccatttcatactctattgttccaacaccactggcat

SEQ ID NO: 12667 - DNA, 410 bp, Glycine max
  unsure at all n locations
tactcaagcttggttcccaacgctctgtacaagctctgttttatttacagttttatcnaagatctttggcagatactatgctatatggcacaccatgtaactagacaacctcacttatatacaaggtggtgaacttctccaaggaaaatctgatattaacgggaatgaagcgagtagacttagtcaatctgtcaacaataacccagatagaatctaaacctctacgggttctaggttgtcttaccacaaaatccatggaaatactgtcccacttgcactggggtatctctaacggttgtaacttcccttaaggtctctgatgttatatattatccttctgacagactacgcatgcatacacacactcactaacctctctcttcatgttgggccaccaaaacatcatcttt

SEQ ID NO: 12668 - DNA, 423 bp, Glycine max
  unsure at all n locations
tgtttcttgcaattccaagacacaagagagcttcctttatgtggcatgtaattngcaacctgcacaatcagaatctctatatcttgactcatccactgatttacctttctcatctaagtcaaggtaggttgaagttgtcgttggagtatatggttctttgcattttttatgccaaatttcttaattagttctatagagtatttggtttgacataggaaggttccatgtttcatctactggacttggagtccaaggaagaaatttaactcacccatcatagacatctcaaattccttctacatacaactagaaaattccttacacaaaatttcattactagcaccaaatataatatcatcaacatatatttgaacaattaacaactcactatttactttcttaataaacaatgttttgtcaact

SEQ ID NO: 12669 - DNA, 422 bp, Glycine max
gcttctgttttcaaattcgagattctcaatattttacgttgactttatcggacatctgagttaaaagttattgtcgtttgattttgctgagagcttctgttatcaattacgagcgtctcaatatattacgagacttaatcggacatctgagtaaaaatttattgtcgtttgattatgctcagagcttctattctaaatttcaagcgtctcaatatattacgggacacaatcggacatccgagtaaaaggttatggtcgtttgaatttgcagagagcttttgttttaaatttcgagcgtctcgatatattacgagactcaatcggacatccgagtaaaaatttattgtcgatagaaatttcttagagcttccgttatcaattatgagcatctcgatatattacaagattcattcgttgatccg

SEQ ID NO: 12670 - DNA, 402 bp, Glycine max
  unsure at all n locations
agctntgatgcaacatttgttgaggtttttgaaatatcgagatgatgcgctccatgagaggttggatcaaatggagaatagagatcataatgaagaagaaaggaggagaagagggaatgatggtgttcctagacaaaaccaaattgatggtattaaactcaacattcctccatttaaaggaaagaatgatccggaggcctacttggagtgggagatgaaaatagagcatgttttctcatgcaacaactatgaggaggaccagaaggtgaagcttgccgccacggagttttccgactatgctcttgtgtggtggaacaagctacaaaaggagagagcaagaaatgaagagccaatggttgatacatggacggagatgaaaaagatcatgaggaagcggtatgt

SEQ ID NO: 12671 - DNA, 419 bp, Glycine max
tgtatgagtactgggaaagattcaagaaattgtgttctgtctgtcctcaccaccagatttctgagcaactcattcttcaatatttctatgagggacttaacaacatggagaggagtatgattgatgctgctagtggtggagctcttggtgatatgacccctgctgaagctaggaatttgattgagaagatggcttccaactcccaacaattcagtgcaagaaatgatgctattgtccttagaggagtccatgaggtggccacggattcatcttcatctactgaaaataaaaagcttgaaggaaaacttgatgccttggtcaacctagtaactcagcttcccataaataagaaatctgcacctgttgcaagagtctatggtctatgttcttctgcagatcaccatacagatctctgtcct

SEQ ID NO: 12672 - DNA, 390 bp, Glycine max
  unsure at all n locations
agcttgtgaagcgtngcaatgtagtnattatagtacagngcagggcctgtctctttgtcatagccagcaagaaggatgttcacagagtatgggttctatagaaaaaagaaaattaatggttgaggcttcaaatgaatcattaaccaactattgtatggtctaaggcactgtttggataatatgaattgatctcataaagctaaataggagaagtaagatgaataagagcataaattgattttagcttcttaatttgttttcctataagtgagagccaaaggacatgatatatgagagttagggtttagaagagataccttgcggagagcagtggcaagttcgccacgtgtgaaattggcggcggcggcggtggtgagagggatgccgtta

SEQ ID NO: 12673 - DNA, 424 bp, Glycine max
  unsure at all n locations
tatatggcaacttactgaatgggacaattccttcttggtgtttatctttgncatctttggtggatttagatctatcaggaaaccaattatcaggccatattagtgcaatctcatcatattccatggagagattgtctttatcccacaacaagttacaaggcaatattccagaatcaatttttagccttctaaaccttacttacttagatctatcatcaaacaatctaagtggatctgtcaaatttcatcgtttctccaagcttgaaaatttgggaagacttcacctttcacagaatgatcagttatcactaaatttcaaatccaatgtaaattatagtttttcccatttattcagtttggacttatcttctacgggtttaactgaatttccaaaattattgggaaaagtcccaagtttggaatc

SEQ ID NO: 12674 - DNA, 415 bp, Glycine max
agcttaagctccttaaacacaggctgaatgtgtggattatagataacacagcagatgtatgttctcaagtaaagcaacttcagcagaatctgaatgacttggaaaattcaatgtcatctcagccttcggagcagcaagctaaacagctgaagaaagtccaatctgagctttgggaaaaagctaatcttcatgaatctatcatgagacaaaagtccagaagtaaatggattaaagagggtgatagaaatagctcgtatttccataagctaatcaattacagcagaaggagaaatgctttaaggggtctgatgattgatggagcttgggttgaagacccttccttggttaaggctgaggttttgcagcactttcagaacagattccaagaacctcatgctcatagacctaatctaga

SEQ ID NO: 12675 - DNA, 433 bp, Glycine max
agagatcacctgagtgcatgcgcgctcctacctacaggagacggaccatttttgtgttgtagaatatcaacgaccaggcctacaagattgacttgcctagtgagtataatgtaagtgccactttcaatgtgtctggtctatctctttttgatgcagatggaggagccttggatttgaggacaaatccttttcaagaaggagggagtgatgaggacatttgataaaatttggtgagagtttctctctgggttccttgttgaaccaattatcagacttatcaaggtaatccttgtggcgtctacccagacttatcttccttcattggaagtggcgtctacccggacttatcttccttcaccggaagtggcgtctacccagacttatcttccttcactggaagtggcgtctaccctgacttatcttccttcactgg

SEQ ID NO: 12676 - DNA, 417 bp, Glycine max
  unsure at all n locations
gtgcttccacacaagcaactngnatnntttttatcttcgtaaagcacgaagcaaagttaaaagttccattcaaatatctaaaaatgcatttaacagtagataactaaacttcccttggtgccttttagaatctggcacaaaggtatacactgaacataatgtcaggtctggacgcaatgagatatgaaagagatctcatcattcctctgtatgtcttttcatccacctgctttgattcttcgtccagtccaagtatactggttggatgtatggggtctttattgggcttgcatcgtccatcttgaacttcttcaaaagttccttcacgtacttggtttgatgtatgtatatgccttcatctattttcttgatctgaagtccaaggaagaacttcaattcttccatcatactcatctc

SEQ ID NO: 12677 - DNA, 404 bp, Glycine max
  unsure at all n locations
agctntaagacagnnngttatatcgtttttgtatattcaacaagaacatcctatttcttgacattgacaccttagtgattaggttgtttctcccatctctgatggaaagacttgaatctttcatgtgaatatcatagctttttttgagtaattgtcctaaactcaaaatattgttcttcatatttgggacgtagtaaacatttgatatgaattcatgtcctccatctttcaaacgaattaagatcttacctttgccttttacatgagtcttagaattatcaccaaatgagacattgccacttattgattcgtcaagatccacgaacatgcttcttttttcgcacatatggttgcttgcaccagtgtcaaggtaccatgtgttttcttggctaccttcattgcct

SEQ ID NO: 12678 - DNA, 413 bp, Glycine max
  unsure at all n locations
ttgagccaattcaaacgacaatatctntttatttgtatatctgattgtgtcccgtaatataacgagacgctcgaaattgaatgttgaagctcttagcaaattcaaacgtcaataagtatttactcggatgtctgattttgtcccgtcatatatcgagacactcgaaattgaatgttgaagctctgagccaattcagacgacaataactttttactcggatgtctgattgagtcccgtaatatatcgagacgctcgaaattgaatgttgaacctctgagcaaattccgacgacaataactatttactcggatgtctgattgagtcccgtaatatatcgagacgctcgcaattgaatgtcgaagctctgagcaaattcaaacgacaataactttgtactcggatgtctgattgag

SEQ ID NO: 12679 - DNA, 394 bp, Glycine max
  unsure at all n locations
agctttgatatatattcanattaagatatttttatattcggatgtccgattgagtgccgtaatatatcgagacgctcccaattgaaaacagaagctctgagcaaattcaaatgacaataacttttgactcggatgtccgattgagttccgtaatatatcgagacgcacaaaattgagaacagaagctctaagcaaattcaaacgaagataactttatattcggatgtccgattgagtccggtaatatatcgagacgctacaaatcgaaaacagaagctctgagcaaattcaatcgacaataactttttactcgtatgtccgattgagtcccgtaatatatcgagacgctcgaatttgaaaacggaagctcgtatcaaaagtcaaccgcaataac

SEQ ID NO: 12680 - DNA, 409 bp, Glycine max
agcttccctaagggcagtaatgcatctctttctggctttaatacctaaatcacacaacccccagacgtttaatgactatagatccatctccctcattggttgtatgtaaaaagtaatagccaaattattggcatacagacttagcaaagtgatggttgaccttattgatgaaaggcaatcggcttttataaaggatagacacatccttcatggagctttgattctcaatgaggtagtagaggaagctaaaaggtgtaagaagccaacattggttttcaaagtggactttgaaaaggcctatgactcggtttcatggtcatttctggagtatatgctggataggatgggtttttgccttaaatggagaaattggatcaatgcttgtatgcaatcagccactgtatcagtc

SEQ ID NO: 12681 - DNA, 372 bp, Glycine max
  unsure at all n locations
agctngagaatgcaagaacttatgtgcttttgccacgccaacggcgattttgcagcgccgttgccaacttaaactgttgacaatttcgcttaacttctccccctcctcgtgctcgtacaccaagtaccctctcttcccacacctacacgtcgcaataaggttaatgatattcgggtgacgaacctttctaatttttactgtctcttcccacatactcattggaagtgaattcaagtcgctgatttccttcaccacgaactgcatgtcgttttccatgcacttcccttcgtaccaaacccagtttgttcctttcgacacaacttttccttctttaaccgttttcaaaacatcgtctacattgatcaaccttgc

SEQ ID NO: 12682 - DNA, 420 bp, Glycine max
agaccctgaggcacctgccgctgcgactagccccgacaggtggtgatttattgttttggagaggatcgataactatgcctatatgttggacctcccagaagagtatggagtcaacaccacttttaacatttctgatataattccttttgtacgtggagctgatattgaggaggatgaactaactgacttgaggtcaaatcctcttcaaggggaaggggatgatgcaatcctccctaggaagggaccagtcactatagccatgagcaagaggctccaacaggattgggctagagctgctgaagaacgccctatggttctcatgaacctcacggtagatttctgagcccatgggccaaggttgggtccaattatctttgtacatattagactaggatgtcattatatctgatccttgtattt

SEQ ID NO: 12683 - DNA, 415 bp, Glycine max
tcacctgccacacagttaaggcattatattttccttatatcatctctgacatatttattaagcagttgtcagattaaattatttttaaggatatatggtatatttttccttcaaacaaaggattagtatatttacttgtaagtgtttttttgtgttttaacattttataataaaagtaatattttctgttaaaacattcttttccccccatcggatcctttagtagaaatattttagccactgttttagtaatgaaacccctcttacgatttaataacaaatcaaatatatattattatatccaaaattaaatataaaattgttatatatttgtcataactttgattgttttaattcagattgctttaattcatgttttcattttcactaatttaaacacataacttcatatcag

SEQ ID NO: 12684 - DNA, 402 bp, Glycine max
agcttatagtatcatttatgtttgcattaacaaaatattttgcgcacacagttatatgatcgtacctctatatcacaacaaccacagactatcccgtttccctgtttgtaacctccaagtaatttctgaaacacacattaatcatggaaaagaataaaaatcaagtgcaaatcaacccataagcaccaaatgacaaaaaatatttaaagaaaatattaagacacctgtcctttgacatagtaagccaactcagcaccatctggtagcccatttggcataaaaagcaacctgtgtaaatcattgtccctgataaaagcaaaaaatcaaattcaaactacagtagctaagctattgcaattcacatagagaagctagaggaatggaacaggcatccccaaaaac

SEQ ID NO: 12685 - DNA, 429 bp, Glycine max
  unsure at all n locations
ttcttctagccacgggagtnataaatattatccttgaatgtatgcaaatcttaatcatgtgagtaatatcaactaatcaagaatntagctaagcaaaatgatgacacaaaagggcaaatatgaaagtaaaggggtagtaagacagagcattaccacttttatttgtgaccaacacaagaacatctccatgaagtgatccccttttggaggcctcgtgaatggctctgaagttggatcctccaccagacacgaatactgctagctttttccttcccaccgtgacctgagccgttacctcatggccctcctttggttctgcagcactactactactactactactactactactactactacaccatatcctcctccaagaactagaacacacttctntgtgcacaatgctgataggatggacagctctgc

SEQ ID NO: 12686 - DNA, 422 bp, Glycine max
  unsure at all n locations
atggatgtatccatgcttattgatttcttttctgtgtatgtgacagggggggaaaaggagtgatgggcgaacacctgacggaatacgtccaattaactcgagatgtggcctattacctatagcacatggaagtactctttttacaagaggcgagacacaggtctgagccaactntatatgttttccagtttatgctcttgatgatatctgatggtgtctatatatgcttatgcaagtcacattatctcttttctgtgttcgtagctttattacaacggagatcgaatgatcaaacacaaacgaggaacacaactaataatgctgactccttggaccttaacacacttcttattaaagtctccattgtagtcacctggatatatctaaaactagtgttggagtcagattttgatactcacgta

SEQ ID NO: 12687 - DNA, 444 bp, Glycine max
  unsure at all n locations
gccttgatatgagtagtggttagagtctcgatgtattggctgatgagtactccagtagcatatataatgtttggtcttgtgtgtcaaatatcataaactacccaccacactcttgaaatctatagcatccagttttcttgcttcgtcgaactttgataacttcattntgcactccatcagtgttccaattggcttgcatctatccatcttgaatntattaagcatcttctttgcgtagctntgcagtgaaatgaagatntcatcttctttctgctctacctcaatggcaagatagtatgacattnttccgatatcggtcatctcaaactccttcatcatttctttcttanactctgaataattgtatgccataagtatatttgngattaaatcatataagaattgtaatnttcctctctatntcttctttttggtgaataatat

SEQ ID NO: 12688 - DNA, 400 bp, Glycine max
  unsure at all n locations
attctaccctctgatcccttaacatacttaatgctttccctaattntttntacagcaggaccgactactttcaacccctcttgaacactaaggtttaaaatgtgagcacaacatcagatatgaaaaaattcaccaccacttactaaaccattagtatgcaaaagtctttccttcaaatagtcttgcattttatcattggaagaagcatcatctagaattaatgaaaatattttctgctcaatccaccattcttccaaaaaaaaccatatataactttagccatctcacgccccgagtgtggaggaggaaaatgagaaanattaaccattttaccattcaacttccaatttgcatcaacataatgcgcagntaatgaaatataacctcagaagtacaagat

SEQ ID NO: 12689 - DNA, 359 bp, Glycine max
  unsure at all n locations
atgctagacganatatagatgggaatagaggtaacaatggcggtaatgacggaccgaggcagaaccgggttgagggagtaaagctcaatgttcctcccttcaaaggtagaagtgatccagatgcctacctggactgggaaatgaagactgagcacgtatttgcctgcaatgactacactgatgcgcagaaagtcaagctagcagcagctgaattctccgactatgcccttgtttggtggcataaataccanagagaaatgttgagagaggaacggcgagaggtagatacatggactgagatgannagggtgatgagaaaaaggtatgtgcccactagctataacaaaaccatgcgacag

SEQ ID NO: 12690 - DNA, 422 bp, Glycine max
  unsure at all n locations
ctactggagagaatgtataatatatatcgatcccaacttgttgagtatatcctgtggcaatcaatcgagctttgtatctatctatagagccatccattntgtatttcaccttatacactcatctacatccaatatagtgcttatcaggtggtaatggaacaagtgtccaaatggaatatgcttcaagagcttggatttcctcattcattgctcgacgccattcangataagaagcaacttgatgataaaattgagattcatagacaactganatgtgattaatgaaagctctgtaaagggggctaagaggcaacaaggagcaataatgttggatgggatatgcagcctgagaatgtgaaatgacataatcagacaagtataagggaggcttagagtggcgtgtactccttcttaaagtaaca

SEQ ID NO: 12691 - DNA, 322 bp, Glycine max
  unsure at all n locations
ttgactcattctctccttgaagtgacgtctccaatcacctttcctccttctccattctgctgccattgatcttcaagaagcaaaggatttcattgatgaagaagatccaaggcctacaagctctacatggagctacatcatgtggtatcaagagcatcttcatctaagtgatgttcttttgcttcctctatcttttgtttggtcaattcactntaattccttgttcttcatcatattctccatgtatctcctccattatcttgtggtttggttctggttatagtagattcaaaatataaatcgataaatcttagatctatac

SEQ ID NO: 12692 - DNA, 484 bp, Glycine max
  unsure at all n locations
gctcttgaactggctctgtaaacatatcagccggattgtgcagagtgctgatgttatgaactntgattcttttttctgaccgaatgaagtgatatctaacatctatatgcttggttctatcaagatgaacctgatccttggccaagcatataacactaaggctgtcacaatagatgttagcaaattcttgattaattccgagatcatttatcagacctcttagccaaattccttcttttgcaacttcagtaagagccatatattcagcctcagtagttgagagggaaacagaaggttgaagtgttgccttccaactcaccaagcaaccactaagggtgtaagcataccctgttaatgaccttctcttgaccaaatcagcagcaaaatctacatcagaatagccagtgaggcagcaatctgggtgagatccatagatcaaacctacatctgtagtccctttaagatatctgannaatctcttcac

SEQ ID NO: 12693 - DNA, 437 bp, Glycine max
  unsure at all n locations
tgaacttagagaatgttcaaagtggaaaggtatttgtcgaacaatttgttaccagatattctcttgaatcttcattatatagcctttttattcatatatttgttgtgagtgagagttaattcaatcaaaaccttatgagtcttcattaaatgcatgaagacttctattatgattcctgatgcaatcctccctangaagggattaatcaccagagccatgaataagaggctccaagaggattgggctagagctgctgaagaaggccctanggttctcatgaatcttangatagatttctgagcccatgggccatggttgggtcaacttatctttgtacatattagattangatttcattatntttgggccttgtatttagggctccataatatangtagggtattcctataaattangaattttcagcccttgtattt

SEQ ID NO: 12694 - DNA, 388 bp, Glycine max
  unsure at all n locations
gcttgtcaatcttttgagcaaagacaacctctaatgcgtaattggatgcatcacacataaactcaaatggggctgtccaatcacgtgcctgaatgatatgggtggtagtcaccgcacgcttgaggtaagcaaaagcctctntgcatcggtcatcaaaatcaaactccacctgcttttgcagcatattggatagtggaaaggctattatgctaaaatccttgataaagctcctataaaaccctgcatgacctagaaaataacgaacctctcacatgcaacaggggtaacggaatcgtgaaataacatctaattaagcacgggctacctctatgcacctattcaaaatgatatgccctaaaactataccttcgtctaccatgaagtgaca

SEQ ID NO: 12695 - DNA, 274 bp, Glycine max
  unsure at all n locations
gctgtcaatcttttgagcaaagacaacaccttatgcgtaagtggatgcatcacacataaactcaaatggggctgtccaatcacgcgcctgaatgatacgggtggtagtcaccgcacgcttgaggtaagcaaaagcctctttgcatcggtcatcaaaatcaaactccacctgcttntgcagcagattggatagtggaaaggctattacgcttaaatccttgataaagctcctatgaaaccctgcatgaccaagaaaataacgaacctctcacatg

SEQ ID NO: 12696 - DNA, 414 bp, Glycine max
  unsure at all n locations
gaactttgaagttaattctaaatgatcaaagtgaaaaaatgcacacacatggcctctatttatagcctaagtgtcacacaaaattggagggaaatttgaatttctattcaaatttcacttgaatttgaaattgaatttgtggaaccaaattttggagccaaaatttcactaattatgattagtgaattntagctatggttcaatccactaatccaagatcaagtccaagattctccactacgtgtgcttaggtgtcatgagccatgtaaagcatgaaggacatgcacaaagtgtgactatatgatgtgacagtggggtgtagcaagcaaatgctcacctncccctctaaaaaattaatggatttggattctcccaattcaattaaatttatttcccaacatacacatgacatat

SEQ ID NO: 12697 - DNA, 461 bp, Glycine max
  unsure at all n locations
acattggaaagttagtttacaagaaatataacaatcattacaaacaagggccaaacaacacttctcatggcacgagtgtcaacatgcactntataaaataatcatattgnggtcgtgctattttatgacacatacgtatttgcacacataaaaattttgtgtgaaacattntacaacacctatccatgtacatatttttttgacaaaccttttcaatgctacatcctatatatatacacacattnntttggaaggcttcttttgttacctactcacaaatacacatattttgaanaacacttttacgctacccatccaacactttgtaaggcacttcatgctatatatattcatattatgcaaggcattntcatgctatatgtattcatatnttgcaagggcatttattcaacattntgcaagcatttccatgctatatatatattcacatatatacatac

SEQ ID NO: 12698 - DNA, 377 bp, Glycine max
  unsure at all n locations
ctcagctntccatgaataagaaatctacacctgttgcaagagtctgtggtctatgttctcctacagatcaccatacagatctctatccttctttgcagcaatctggaatcaataagcaacctgaagcttatgctgcaaacatttataatagacatcctcagcagcaaaacaaacaatagtagaataattatgacctttcaagcaatagatacaatccaagttggaggaatcatccaaatctgagatggacaagtcctccacaacaacaagagcctgtccctccttttcagaatgctactagtccaaccaagccatatgttcctcctccaatacagcaacagcaacaacaacagtcacaacaaagacaacaagcaact

SEQ ID NO: 12699 - DNA, 490 bp, Glycine max
  unsure at all n locations
gataattgttgtaactatggctgtggtctttgtctattgatgaagatatttattggagcatttaatacatgtcactaacttgtcaactaatatgataaaacaaattgcttatctttctatttttgcactttcatatcttgtgtaagaggacatataaactgttacgaaccaaattattttaactttttcttcatctttcatcatcttctccatattgtatagagaataaaacattcattctctatacaacaacatatcaaattctcaaagaattaaatatgtataaatgttgagactcaacaatcataaactntctttgttaattctctctaatgcacgttaagacactaaatttatatcttaacattnttntacttacatcaaaatgttgatgggtcttaatttatgttatgactcaatactntatactacttannacatanagaaacacatacacatattaacattttatagttaaatagctcattat

SEQ ID NO: 12700 - DNA, 462 bp, Glycine max
  unsure at all n locations
actatgatgttcttgaactacctttagatccaacggtttctcagatgaagaatcacagagaaaggaagactaataaggctaaggctaaaaattgccttttctctactgtgtcaaaaattatttttacaagaattatgaatttcaagtctgccaaacagatttgggattatctcagatcagaatatcaaggctgtgaaagaaccaaaggcatgcaagtactcaacttgggcagagaattcgagatgcagagcatgaaagagactgaaacaattaaaggctacgctgaccggctgttangcatagcanatagagtgaggcttcttgggaaggactntcctgatgaaagaatagtgcanaaaatcctggtcactatacccgagaagtatgaatcanagatatcagcattggaggagtctaaagacctttcaaccatcaccttgggagaacctcataatgctctac

SEQ ID NO: 12701 - DNA, 477 bp, Glycine max
  unsure at all n locations
ctcttgcctcactcaccgccttagacatcttagaactgatacatatgagcatttgtggtccttttccaacacctttttggaatgagtaacaatattttatctcgttcatagatgactactttagatacggttacctttatttgatacatgagaagtctcaatccctagacgtttttaagagtttcaaggctgaagttgaacttcaacttgaaaagaaaattaaggctgtcaaatctgaccatggtggtgagtactatggtagatatgatggatcaggagaacaacgtccatgaccttttgcgctntttctcanagagtgtagaattgttccgcaatacactatgccagganaacctagcatgaatggtgttgcagaacgatgaaaccgaactcttaaggatatggtgagaagtatgaatagtcattcttctttgccatagtcacttttgggagaagccttanataccgcagcttaca

SEQ ID NO: 12702 - DNA, 421 bp, Glycine max
  unsure at all n locations
ggagacacatgaacagcgctaggcaacgactttcatggcgctccgaacaaaggtggagtatggaggattgccttgagggtccgcacttaggcaatcatgaaactaagctccaaactcgaaagtggaggacacatgaacaaccctaagcaataatattcatgtggctccgaanaaggatgagaatggaggattgccttgagggtcctctcttatgcaatcatggaacacagctccaaactcgaaaacggaggacacatgaatgaaaccgcaattcattcacgtggctccggaacaggatgagaatggaggatngccttgagggtcctctcttangcaatcatggaacacagctccaatcatggaacacagctccatactcganaacggaggacacatgaatgacaacgcaattcattcacgt

SEQ ID NO: 12703 - DNA, 318 bp, Glycine max
  unsure at all n locations
gacagcctcatgcacaacaagccggttcggcgactntttacgttccagaatcgcggtcgagaagtccttcttccccgatntcctgcgtttccaaacaaaaactccaacatcaaacaaacctcacagtccaacaagctccatagtatagtgagcaaagaaaaagaanagaacaaaaagaattgtgattcctgaaatgaaatcaacgaaggtgcagagagttgactcacgggtccgatgattcgccttgctgtgacatccttgctggaattgaagaagatgatgatcaaagtgaagaattcagaaagttcagaacctaag

SEQ ID NO: 12704 - DNA, 441 bp, Glycine max
  unsure at all n locations
cttcttctgattgtaatggtgntttgtgcattcactatggccacttctcgccatgcaactataccatcctctgcatcactcacattacaacaaactgaagcaaatgctttgttgaagtggaaaacaagccttgacaaccaaagtcaggctntgctatcttcatggngtggcaatactccttgcaattggcttggaattgcttgtgaccacaccaaatccgtctccagcataaatcttacacacgttggattaagcggtatgcttcaaactctcaattnttcatcacttccaaacatcctcactctagatatgagtaataactccttgaaaggaagtattcctccncaaattanggtgttgcaaaactcactcatcttgatttaagtgacaatcacttctctggacaaattcatctgaaataactcagtggtcagcttcgtg

SEQ ID NO: 12705 - DNA, 458 bp, Glycine max
  unsure at all n locations
gagcgatctcgaggattcntagcccagaggttgttgcatagacattgtctctgtttatagtccatttaaaaaggcattattaatatccaaatggcacagaggccacctatttgtgggagccaaggtgaggataacctggatggtttctggtttgaccacagtagaaaacatcttagtaaaatcaaagtccaaaaatttgatgaaaaactttggcttcgaggcatgccttgtagtgataaacaaaaccattagcattttcttttattcaataaacccacttgcaacctatagcttgtatatgaggaaatggtacacgcgcccaagttttcttgtgcagcanagaattatactcatgtgttacatggcagcatgccattgaggatcccgcaaggcaagtntgncactcttgggacatgaataaagaatatacgagagatgcgacagggaatgatacccta

SEQ ID NO: 12706 - DNA, 403 bp, Glycine max
  unsure at all n locations
cataagcacttagactatgaaggaaagctggagttgctgcacatgatgtccaacgttatgtcaaagaataagatcgggctgcacaatgcacaaggcaagataaagtgtcaaatgaagaattgaagctgcaggattcacgatgtcggatataatgtccaggacatcctgcctgaaaatactggaattgctaaaagcattgaagctgcaggatccacgatgtcggatacaatgtccaggacatcctgcccgaaaatactggagttgctaacagcattgaagttgcaggatccacgatgtcggatacgatgtccaggacatcttgcccganaatactggacatataaatctgttatatctgtaacagattattgtgcagttagcaagagattagatgatctatctt

SEQ ID NO: 12707 - DNA, 433 bp, Glycine max
atcttcgaactgtcatcgcttcattctcgtggcgatagattatttcaccaaatgggtcgaagcggcttcttataccaatgtcacgaggaatgtggtggtcagattcataaagaaggaactgatttgtcgatacggactccctaggaagatcattactaacaatggcactaatctaaacaacaaaatgatgcaggaaatgtgcagggatttcaagatccagcatcataactccaccccctatcggccaaagatgaacggagctgtagaggcagcaaataaaaatattaagaagattattcagaagatgacagtgtcatacaaagattggcatgagatgctgccttttgccctgcatggatatcgaacctcggtacgaacttctactggggcaacgctgtattccttggtttatgggatggaagtggtactctta

SEQ ID NO: 12708 - DNA, 461 bp, Glycine max
  unsure at all n locations
tcatgaagtgtataatatggatcactntcaattctatatanaagattaatattaattgtgttctaaattaatatacacaatttataaagcaagaatttctctttgtttatcttcttaattatatattttataattttctgttttttctttaaatagacatttatagtagcattagtataaaatttctctctcaactttctcaaactactattatgttactttatctatatatttatattcttaatcaccaatctcttatatcccattntttttatcacaatgtgtgaaatgaactttgataaaaataaataaatatcaataattaanaaattatataaaaatataaattatctactttgatttcaaaatatantttatatattanaaaacgtttatntatcataaatattaattatataacaacaaacatttattacatgtcattcacaagttaaactact

SEQ ID NO: 12709 - DNA, 450 bp, Glycine max
  unsure at all n locations
cactatacaagatntcttntgcctcctagcctcctcatcaacctcactagcaatcaagactccatgtagcagctgtcgacccttaacaaatgctgactgtctttcatcaacaagatgatccagaaccttacttagcctattagataggattntggcaataatcttgtaaacacatcctatgagagatataggtctgaagtgactaatagtttgaggatccttgatcttaggaataagagcaatgaatgaagaattgaggcccttanganaagcagcattcacatgaaattctgctagaaatcttaagaaatcacgtttcagctctttccanaactgcttgataaatctaanattcagcccatcaggccctgngctnttgtcattgccacaagcncacacagcagaatatatctcctcctctntanatggctccaccatcanatccctctg

SEQ ID NO: 12710 - DNA, 501 bp, Glycine max
  unsure at all n locations
aagcttatgaacactaatgtanaaatagaaagcttttttgaaacacgtaattaatatantttttgtattacaattntatgtatattcgatctctttgttatcttctgggtgtnttatcttcctttgggtattgtctgtaagtctctaacgtgctgtttaacttgaatgcatagatctaaacatgctgacgtaactttgagaacacaaatacgaattagttaaaaaattacatattcgtttctagttaaaattattttttatgtatgcgttgaaatgactcgttatactcatttctgtttaaaaaaatatttattttgaacanaataactaaaaatatttaatataaattaaactttaaataatctttgtcacatgaaaagagatgtttcgataaattatttatgccattaatattntagaatatataaatattataattctatatgagattaatacatgaatatttacgaaaaatatctatgtagactaaatatatattta

SEQ ID NO: 12711 - DNA, 513 bp, Glycine max
  unsure at all n locations
ctatcatactcagcttcccattcaatgtcaagcgtctcgatatattatgggactcaatcagacatccgagtaanaagttattgtcgtttgaattggctcggagcttcaacattcaatttcgagggtctcgatatattacgggactcaatccgacatccgagaaaaaaattattgtcgtttgaattggctcagaggttcaacattcaattttgagcgtctcgatatgttacgggactcaatcagacatccgagtaaaaagctattgtcatttgaatttgctcagagattcaacattcaatttcgagggtctcgatatattacgggactcaatcagacatccgagtaaatagttattgtcgtttgaattggctcagaggttcaacattcaatttcgagcgtctcgatatattacgggactcaatcagacatccgagtaaaaagttattgtcgttngaattggctcagagcatcaacattcaatttcgagcgtctcgatatattacgggactcaat

SEQ ID NO: 12712 - DNA, 388 bp, Glycine max
  unsure at all n locations
gatccttaagcacctgctgctgcagctttactcggatgtctgattgcgtcccgtatcatatcgagacgctcgaaattgaatgttaatgctctgagctaattcaaacgacaataactttntactcggatgtctgattgagtcccgtaacatatcgagacgctcgaaattgaatgttgaagctctgagctaattcaaacgacaataactttttactcggatgcctgattgagtcccgtaacatatcgagacgctcgaaattgaatgtngaagctctcagccaattaaaacgacaataactttntactcggatgtctgattgagtctcgaaatataaccagacactcgaaattgaatgttgaacctctgagccaattcatacgacaataac

SEQ ID NO: 12713 - DNA, 513 bp, Glycine max
  unsure at all n locations
cttccttataataggctgccatacaatcctgcttttagagctcacccctactagaattccaagataagagaagggaaattccagttgactacagttaagagaaagagttgcatccctacaccagccttcagatttacccaggcacccgaattggctnttattgtaatttatcttaagaccagaaaccaactcanagcatctcagaatacatcttanaactctaacattatcattagtggcaaccccaaagaacaaggtatcatcttcatattgtagtatattaacttcctctttntgccttcccacttgatagctgttgaagagattcttagctacagctgacctcatcaacccagtaaggccttccactactatattgaagagcanaggtgcaaggggatcaccttgtcttanacctctcttanggacaaattccttagaaggacttccattaattnaaatggatattgttgctgtagacatacacaaccatttatccatnntctccatctt

SEQ ID NO: 12714 - DNA, 440 bp, Glycine max
ttgatgccatctaggacctgatcgagatccactattcatcattagtttctagagagaactattccggttgagtggatccaaactccggatgaacacctcttaccaccctcagacagagatcctcaatcgtaccctagaataatacttgcgtgctttcgttcatgacagaccatctcaatggttcaagtttttatcaatagcggagtgatcatacaacaccgcaacccattcgggcactcggttttccccgtttaaggtcattttcggcaagcccccaccttctatcccacaatacttgcaaggttcttctctggtggatgcagtggacaatcttccatcaactctcgaggccattcatgccactctgcagtgcagattacttatagtgcaggcagccatgaacgccaccattgacagtcaccgtcgcgatgtccaattct

SEQ ID NO: 12715 - DNA, 452 bp, Glycine max
  unsure at all n locations
aggatcatcgatgcgagggattagtcgcaagtntgagaatatgatttaagagactttcaggtgaaagagaggagaaatataaagaatatacgcgaatgttttgaaagattcttctatcaagaagagaatttcaatttctcactttttagaaggaaattgaaattccacattnttagttgtttaaaattatgttttaaaattccaaaatttaaattcttcataacaaaacatccaaacaatgaattgtagattatagaaatttaaattctctgataaataactttccacaattaaaattctttatccaaaggtactctaaggcttactataaaccttcctatgtatgtngaactcactaggcttgtntaccacacttttagaagttcaatattcacttaggatcaaaatttcatacaacaattcaatcaccaatactaatattcacaatagac

SEQ ID NO: 12716 - DNA, 446 bp, Glycine max
  unsure at all n locations
ctgagtagccatctgttctgtccgatntgtcagactctgaatggaggctcttgtctcttgctgaaattgcatattctggatggtcattttcctcattaactcctctaaggaaggttgagaagagttctcagctgcttgttgtctatgttgttgctactgctgctgctgcattgcaggaggaacatatggcctgcttggaccagtagcattctggaagggagggacaggctgttgttgctgttgttgttgttgtagaggatttgcccatctcaaatttggatgattcctccaacctggattgtatctgttgcttgaaagatcattaattattctgctgttgtgttttgctgctgaggnggtctattataaatgtttgcagcatangcttcangttgctcattgactccagattgctgcanagaaggatagagatctgtatggtgatc

SEQ ID NO: 12717 - DNA, 257 bp, Glycine max
gatcacccacctcgaatttcacgtcttttcttcttttgtcctgaatactcttctgcctactctgaataggtcttattctctcttggattaacttgaccttcttaagtggttgttgtaccactttacgtcctaaagtgatgttgtcttcaggttctagccaacacaagaatgttctacatcttctatcatacaaggcttaataaggagccattcccatggtagaatgaaaactattgttatagctaaactctatcaat

SEQ ID NO: 12718 - DNA, 378 bp, Glycine max
  unsure at all n locations
tgagattaacaatggaagcactcgagatattcanatggtcataacttatcacacggaggtctgattcaggcgcataatatatcgagacgctcgaaattgaacaacgaatgctctcgagaaattcaattggtcataacttgtcacacggaagtccaattctggcgcatcacatatcgagacgctgtaaattgaacaccggaagctctcgagaaattcatatggtcataacttatcacacagaggtttgatataggcgcataatatatcgagacgctcgaaattgaacaacgaatgctctcgagaaattcanatggtcataacttatcacacggaggtctgattcatgcgcataatatatcgagacgctcgaaattgaac

SEQ ID NO: 12719 - DNA, 440 bp, Glycine max
  unsure at all n locations
gcttcgcgatattatttgcgccttaatcggtcttncattnngaaagttatgaccatttgaatttctcgagagctttcgttgttcattttcaagcttctcgatatagtatgcgcctgaatcggacttccacttgaaaagttatgaccatttgaatttctcgagagcttccgttgctcaatttcgagcgtctcaatatattatgcgcctgaatcggactttcgtgtgtcaagttatgactatttgaatttcttgagagctttcgttgttcaatttcgagcgtctcggtatattatgcgctggaattggacttccatatgancaagtttgaccatttgaatntctcgagagcttccgtgaccgttccaggtttaaataagaagaatcaccggacgacgccgatcgaacatttcctaatagacatcgtccaaatattatcgggg

SEQ ID NO: 12720 - DNA, 495 bp, Glycine max
  unsure at all n locations
agagagagaaaagatacatgtgaagtctaattaaatagaatctagcaagcaacagataattccaaacacaaaattcaacaaaatgataactattggagtttccagtggtggcaggcgaaaaagaagttaattagtgacgagaatactacgatccatctattccttaccaagtcgagcaagccggttgacccaacgagggattgactttccggtcaatttgagacaaacatcgttacagaaatggttgcaattcttggaaatgagatggtaggtattgccagaataatcttgagctagcttctccatgaatgctcgaacatccttggcacccagatctgttgttccgatgaanattgactntctgaaggtgaacccagggcagtgtttcggttgaacttgganaatccccgttgtgtcgtgctcgttcgcaccanatccatattccagcccatgaactanagaagaaaagaaaaatttaatttaataattatcaac

SEQ ID NO: 12721 - DNA, 433 bp, Glycine max
  unsure at all n locations
atcttgtgtcacgtcctcttcanagctataccctatgtgttaataactcaagaaatagttcatcaaatgcataagaagaagaaagggaacaaagggtttgtcatgttcaaaattgattntgaaaaagcttatgataaagtagattgaaaatgtctgagaatcacctttagtgattntggactcccccaaaagattattgacattatcatgaattgcaccttctccacgactttgtctatgaaatggaatggagaanagcttaatatttttaagccttagaggtgtcttagatagggggaccccgtgtttccttatttgtttgttctttgcatggaanagctgtcattgcttattcaatgaaagtgcangagaaaagttggttgcccattataatttttcaccatggtcctagtatttctcatcttttctatgt

SEQ ID NO: 12722 - DNA, 499 bp, Glycine max
  unsure at all n locations
tcctcgaagccatctcctgcgatgacaacattggaaagttattttacaagaaatataccaatcattacaaacaagagccaaacaacacttcatatggcgcgagtgtcaacatgcactttataaaataatcatattgnggccgtgctattttataacacatatgcatttgcacacataanaatttggtgaaaggcattttacgacacacatccatgtacatattttttgacaaaccttttcatgctacatcctatatatatacacacatttttntttggaaggcttcttttgctacctactcacaaatacatcacaaatacatatgntttgaaaaacacttttacgctacccatccaaacactntgtaaggcacttcatgctatatatattcatattatgcaaggcatnttcatgcgatatatattcatattntgcaagggcatttattcaacatntcgcaaggcgtntcatgctacatatntacatacatacatattat

SEQ ID NO: 12723 - DNA, 466 bp, Glycine max
  unsure at all n locations
tctatagaaggttcgttcctaatttctctacaattgcatcacctctcaatgagctggtgaagaagaatgtggaatttacctgnggtgaanaacaagagcaagcctttgctntgctcaaagaanagcttactaaggcacctgttctagctcttcctgacttttctaaaacttttgagctagaatgtgatgcctctggagtgggagttggagctgtattgttacaaggtgggcaccctattgcttattttagtgaanaacttcatagtgccaccctcaactaccccacctatgataaagagctttatgccttaataagagccctccatacttgtgaacattaccttgtttccaaggaatttgtcattcatagtgatcatcaatcacttaagtacattagagggcaaagcacgttanacaagaggcatgcaaaatgggtagagtacctagagccatntccatatgttat

SEQ ID NO: 12724 - DNA, 410 bp, Glycine max
  unsure at all n locations
ctgaaggagaactngatgccttggtcaacctagtaactcagctttccatgaatcaganatctacacccgttgcaagagtatgtggtctatgttcttctgcagatcaccatacagatctttgtccttcttttgtccttctttgcagcaatctggagtcaatgagcaacctgaagcttatgttgcaaacatttataatagacctccttagcagcaaaaccaacaacagcagaataattatgacctttcaagcaatagatacaatccaggttggaggaatcatccaaatctgagatggataagtcctccataacaacaacagcttgtccctcctttccagaatgatgttggtccaagcaagccatatattcctcctccaatgcagcaacagcagcagcaacaacagtcacaac

SEQ ID NO: 12725 - DNA, 435 bp, Glycine max
taatcttacctccttgagataataagctagagcttagctacacacaccccactaatagttaagctcacctccatgctcaaatacatgaaaataccaaaaagtctctactatatagactactcacaatgcccttaaatacaaggctaaaaccctatactactagaatggccaaaatacaaggcccaaaagaaggaagacctattctaatatttacaaagacaagtggacccaaccttgacccatgggctcacaaatctaccctgaggttcatgagaatcctatggccttcttcaacagctctatcccaatcctcttggagcctcctacttatggctctagtgattggtcccttcctaaggaggattgcatcatcctcttccccttgaagaggatttgacctcaaatctgttggtgtctcctcctcatcatcagctc

SEQ ID NO: 12726 - DNA, 370 bp, Glycine max
tcttatccaaggcacattcttggtggtgattctccttcttccatggcttattccctagtggatggcacctcctctcacatcttctcctttgtcttccgttgcatctccatggtggaaaatcaccattgaaggacctcactgaagctcaaagatccagcctccatagaagctccaaaagcaaacttcattcaagtggtatcacgagcctaccccccaagggcattggatagaagactccaagaagattatgccagagatgcaagagaaggccctaaggttctcatgagccttacggtagatttggggcccatgggctaagtatgagcccacttatctttgtacatattagattaagatttcattatttttg

SEQ ID NO: 12727 - DNA, 261 bp, Glycine max
  unsure at all n locations
atgccttggtttacctggtaacccaactggccatgaataaaaaatctgtacttgtcgccagactctgtggtttatgctcctctgccgaccaccacacgaacctttgcccttctatgcaacaatctgaagcaaatgaacagcctgaagcttatgctgcaaacatctacaacagacctcctcaacctcaacagcaaaatcagccgcaacanaacaattatgacctctccggctacaggtacaatctcgggtggaggaatcatc

SEQ ID NO: 12728 - DNA, 369 bp, Glycine max
agctatactatgcagagaatatccaataattataccttcatctgacttagcatcaaattttcctaagttatcttttccattattcaatacaaaaacatttacaaccaaagatatgaagatgtgagatgtttggttttctgccattgaacaattcatatggagttttctttaaaatgggtcttattaaagccttatttaaaatgtagcatgtagtgttaacggcttcagcccaaaagtattttggaagaggagtatcatttaataaagttctagcaatctcttccaaagatctatttttccttttaacaacaccattttgttgaggggttcttggtgcagaaaagttatgctcaatctcatgcttatcac

SEQ ID NO: 12729 - DNA, 359 bp, Glycine max
ttgttctattgaattgatgttatgtttgttaatttggtatccatgataattgagctatgcaatcttatttgttgctccttttttttggttcattggcatatggcacattgttgttgctcatacttttctgtctctaaatgccattgatgttgtttgcagacccccgtgagtcagagactttccggccattagacatgcatcatgggatggaagttcgccttggtctatctaagggaccagtgtacccaagtattatataattaaatttgactgttattctagtaccagaaaacagtattttgtgatcgaagcttcttgttattcattaaaatggaagtgtccgaggattctccatatgt

SEQ ID NO: 12730 - DNA, 302 bp, Glycine max
tctcgatatattatgcgcctgaatcggacttccgtttgaaaagttattaccatttgaatttctcgagagctttggtttttcaatttcgagcgtctcgatatattaagcacctgaatgggactgcggggggacaggtatgaccctttgaatttctcagaagctcccgtggttcattttccacttttcgtattatatggcccctgattcgaacttccgggggaaaggttatgaccattggaatttctcgagagcttccgatgttcgatttcgagcgtctcgatatattatgcgcctgaatcgga

SEQ ID NO: 12731 - DNA, 323 bp, Glycine max
agcttctcgaatattatgcgcctgattcagacttccgttacaaaagttatgaccatatgaatttctcgagagccttcgttgttcaatttcgagcgtcttgatatagtatgcgcctgaatcggacttccgtgtgataagttatgaccatttgaatttgtcgagagcttccgattttcaatttagagcttctcgatatattatgaacctgaatcggacttccgtgtgacaagttatgaccatttgaatacctagatagcattcgttgttcaatttcgagcgtgtggatatattatgcgcctgaatcagactttcgtgtgacaagt

SEQ ID NO: 12732 - DNA, 381 bp, Glycine max
agcttccctttctttggccaatgctgtacttgtttggcagtgatttccttggcaatttgatgctcaaaaacagcaatatctatcactccatcagtaggtctgcccagatacttgttaatcacagcaggggagaatttaacacactttcctctgacaaacaccttttgatactcatcactttttctgttacatatgtcagagggaatgttgacaatgaattccctgactaagccttcatagcaatctcccaacttgctgacagtcttcagcagtccagcagccttgatgaggtccatgatctccttgcaatccaaggcatctcttcccagttctctctcaaccgcaagtctgcgttgatacacatatttccacttttcaaca

SEQ ID NO: 12733 - DNA, 421 bp, Glycine max
  unsure at all n locations
ttaagtcacctgcngcatgcagcacatgttaagaactagttgttgtattttctctttatcattcattctggggttaagaaatggaagggatttaagaagcatcaaccttttgcttctgggaatttgatgtgctctgaaatcccatcaatattagtgtaatactttatagttagccatttttttctttttaaatttaaatgaaagcgtgattgacttggtactggtttttgatggtgagctgacatttaatgtgcttggcatcatgcagatatattgtatgattcatggtctccggcgatgacagctagttctatctgcatcaatattctctcaatgctttcacgctcaaccacaaagggtgtgaaattttttaccatgaatcatgcattttcctaatacttttgcgctatgatgggatact

SEQ ID NO: 12734 - DNA, 362 bp, Glycine max
tgcacgaaattgatcaaaacctgaatcccagtcctctaatgtgtcatctctcaatagattatccgatgattcgctgcggatatgagcattccaagatgttatatggggttgatttgcacctttactgtggttcttctcttgacgcggtaagaaccgggcaatttcacctgctaaactcttcatagaatccacaacatcctggatgggtaattcaccgagcttttccaaccagatttcacaggtggcatatattggaggaccatacattcttaggagtggacgttggggtctctttttcttgcctggcttttgtttaagagaaacacatttgtgcagccatccatttatggcctccagataga

SEQ ID NO: 12735 - DNA, 344 bp, Glycine max
tatagaccatattgagataaaagagtgccaccttatgtgctgtgtaatggttagggagggcacccaagtgggctcccttggtaaagcgatatactactaccaggatggcaatatatccctatgaagaagggaggccagtaatgaaatccagtgatagatcttgccacagagaagttgtaatgggcaatggttagagtaagcccgcaagtctcttagtctcatattttacttgttggcaagtggtgcacaggcatatgaattgtttgacattcgcacgcatattggcccagtagaatttcttatgcactcgatgaagggttcttggcaaagttaaatgactacca

SEQ ID NO: 12736 - DNA, 396 bp, Glycine max
  unsure at all n locations
cagcttgntaaatggtacaagctttttttattaattatataagatattcttattcaaaagtttgttgaatatctgtgtcatgcgcttaattagcgcttgatatttcaaaggtaaggaaagcattaaaaggcttctatagattgaaaatatttgaatttaatttcttaaaatttcaaaacgaatcgtatatgttgcaagaaaaaattgattaaatctattgtataattgaacgagcacgtcaaatacttaaaaactgttaaataaaatctaaaacgtgctagtcacactcactaacatgaaaaaatatatcctgatcttgagacattcactaaacagaaatttaaaatatatgattctctataatatacttaatcagtatgtacatttttttaatat

SEQ ID NO: 12737 - DNA, 366 bp, Glycine max
tcttatccaaggcaattcttggtggtgattctccttcttccttggcttattccctagtggatggtgcctcccctctcttcttctcctttgccttcaactgcatctccatggtccatagaagcttcacaagaaagcttccatcactaccggggaaggggagtatgctgatgaaatcttctcataaccacaaatgagattttggatgttagcgtttcgtttctaaatgaccatttagaggaaacactgggttcaacaaaaatagaagaaaatcactcaaagtgtattaatctcacacgggtaagtgtttcatcctaattccgaaccatagatatgccatgacttgatcttgcaaatcatttcctatca

SEQ ID NO: 12738 - DNA, 398 bp, Glycine max
ctcgagagctagcgttgttcaattacgagtgcctgtatattgatgcgcctgaatcggacattcgagtgaaaagttatgaccatttgaatttctcgagagcctcctatgtttaatttcgagcgtctcgatatattatacgcctgaatcgaacctcagtgtcaaaagttatgaccatttgaatttctttagagcatccgatgctcattttcgagcgtctctatatgtgatgaaccttaatcggacctccgtgtgaaaagttatgaccatttgaatttctcgagagcttccgttgttcaatttcgagcgtctcgacatattatgcgcccgaatcggacatccgtgggaaaagctatgaccattcgaatttctcgagagcttccgttgttcaatttcgagcg

SEQ ID NO: 12739 - DNA, 362 bp, Glycine max
tgtaacacattacagctcaaattgcggattgatggtgatcagaatcagaatctgcctgatcccaaagatatcaaatgcttggaaaggataggcagtgtaaatgttgaagctgattccatctacgaactttacaaggatcccagccctataatggaacctggttctgtttggaaagacattgttctttcaccttcaaggtataataatgatcagaaggaattgaaggaattcattcagaaaatagaaacatccatcagaaaacggtaaccattgatattgctgcatgatattttcctcccaaagccaagttttggagtatctaacaaagtttgagttaccaagttttgtatctgctattccct

SEQ ID NO: 12740 - DNA, 365 bp, Glycine max
tataacaagaatattttggcctttttcacagcttgatggtcgcgtcaaaactttgcaccctaacatacatgggggtatcctggctcgaagggaccaaaaacatcatatcgaagccctcagtactcatgggattggtaagttatgttattagctgttattacaagtacgttgtgctagaaatttgttgtgttacattagagttgtgatcattcagtttgtgagattgtatttttttgcttttgcttaaagttttccttttcaggtacttttgatgttgtggtggtgaacctgtacccattttacgataaagtcacatcagctgggggcattgaatttgaggatggaattgaaaatgttgacattgg

SEQ ID NO: 12741 - DNA, 365 bp, Glycine max
tgaaattgaacaacggaagctctcgagaataaaaaatggtcataacttatcacacggacgtgcgattcaggcgcataaaatatcgagacgctcgaaattgaacaacgaatgctcttgagaaattcaaatggtcataacttgtcacacggatgtccgattcagctacataatatatccagacggtcgaaattgaacatcggaagctctcgacaaattccaatggtcataacttttcacaaggaagcccgattctagcgcatcacgtatcgagatgctctgaattgaaaaccggaagctctcaagaaattcaaatggtcataacttgtcacacggaagtccgattcagacgcataatatatcaagat

SEQ ID NO: 12742 - DNA, 282 bp, Glycine max
ataacttatgacacagaagtccgattcacgcgcctaatatattcgagacgctcgaaattgaacaacgaaagctctcgagaaaatcaagtggtcataacttttcaaacggaagtccgattcaggtgcataatatatcgagacgctcgagattgaacaacggaagctctcgagaaattcaaatggtcataacttatcacatggaagtccgattaaggcgcataatatatcgagacgctcgaaattgaacaacggacgctctcaagaaattccaatgggcataac

SEQ ID NO: 12743 - DNA, 367 bp, Glycine max
tcttggcaatcctcattccagcgatcagtctagtttttgcgtaagagcttgaacaatggctcacaaatggcggtgagctgcgatatgaatctggcaatataattcaagcgtcccaggaaacctcggacttgcctctctgtacggggttctggcatctcaaggatagccttcaccttttcggggtctacctctatccctttctggcttacaatgaaaccaagtaatttccctgatttgaccccaaaggtacacttagcggggttcaaccttaattgatatttcttaagcctttcgaacaacttccgcaggttgacaaggtgttcttcctcggatttagatttagcaattatgtcgtccacgtagacct

SEQ ID NO: 12744 - DNA, 271 bp, Glycine max
attaacaacttccgtttgcccatcggtttgtgggtgacaagtggttgaaaataacaatttaatggccaacttgctccacaaagtcctacaaaaatggcttatgaacttagagtccctatcactaacaatgctccttggcaaaccatggagtctcacaatctccttgaaaaacagatcagtctcatgggaagcataatcaacttttttacttgggataaaatgagccattatataaaacctatcaacaaccactaaaatggaatctctacca

SEQ ID NO: 12745 - DNA, 402 bp, Glycine max
tacattcaatttcgagcttttctatatattacgggactcaatcggacatccgagtaaaaagttattgtagtttgaatttgctcaaggcttcggtattccatttcgagcgtctcgatatattacgggactcaatcggacatcagagtaaaaagttattgttgtttgaatttgctcagagcttctgtattccatttcgagcatctcgatatattacgggactcaatcagacatccgagtaaaaagttattgtagtttcaatttgctcagggcttcggtattccatttcgagcgtctcgatgtattacgggactcaatcagacatccgagtaaaaagttattgtcgattgaatttgctcagagcttctacattcaatttcgagcttttcgatatattacgggact

SEQ ID NO: 12746 - DNA, 361 bp, Glycine max
tcgcacttgataatggagacacatgaactgcgcttagcaatgacattcatggtgctccgaataaaggtggagtatggaggattgccttgagggtcctctcttatgcaatcatggaacacagctccaaactcgaaagtggaggacacatgaacaaccctaagcaataacattcatgtggctctggaacaggatgagaatggaggattgccttgagggtcctctcttatgcaatcatggaacacagctccaaactcgaaagtggaggacacatgaacagccctaagcaataacattcatgtggctccggaaccggatgagaatggaggattgccttcaaggtcctctcttatgcaatcatgga

SEQ ID NO: 12747 - DNA, 373 bp, Glycine max
  unsure at all n locations
atgttcataaattgtgtaaaaagttgtatgaaaaagttattgaaatgcacgttaaagtcttgcttttatagactcttcatgtctggtcaagaaaaccattggaagagttacatcttctgatttttattcaaaacttgtcactggtaatcgattaccaaaaccatgtaatcgattacacaaagcattttatgaaaggatgtgactcttcacaattgattttgaatttcaacgttcagatacactggtaattgattaccaatatcttgtcatcgattacaccattttgaaatcaattggaacgttgtaaattcagttaanagcttttgaaatcaaactttgccactggtaatagaatacaggaaactggtaatcg

SEQ ID NO: 12748 - DNA, 359 bp, Glycine max
tggcagtaatttgaattctgatatgttctctctcctttgatacagatgagtgaaaggaattcaggatgggaggatttgatttttattccaccaggaaaaagtcgctctcaacacatacaagaacttaatgaatgattcccagggtgcgaatttaagctaaccatgatttcatgtggttttcttgagcaaattggatgttactgttgtgacaatttagtcggctggtgagatgctaggacctctgtcttcaaatagttgtgctcttccttctgaggcgaatactgcactaagattctcagtggatataaggtaaatgtgtatgtgagaggacgtaaacgctaacatacatttcaattaag

SEQ ID NO: 12749 - DNA, 358 bp, Glycine max
tgagaatggagaattgcactaatcaatctctacgcatagctccaaactcgaaggtggaggacacatgaacgaaaacacaattcatggggctccgaaaaaggggttgagaatggagaattacactaagcaatcactacgcatagctccaaactcgaaggtggaggacacatgaaagataacgcaattcatggggctccgaaaagattgagaatggagaattgcactacgcaatcactacgcatagctccaaacgcgaaggtggaggacacatgaatgaaaacgcaattcatggggctccgaaaagattgagaatggagaattgcactaagcaatcactacgcatagctccaaactcaaa

SEQ ID NO: 12750 - DNA, 360 bp, Glycine max
tcaattggagtcttgtcttttacaaacttagttggacatctgttgagtatgtaaacagcagtgtagactgcttcagcccagaatgtgttaggtagtcccttctccttgagcatctctagccatctccataactatgtgattctttctctcggacactccattttgttgaggagaatatacgactgtaagttgtcgcttaatgccttcatccttacaaaatctttcaaactcgcgagaggtgtactctttgtcgcgatcacttcttaatacttttatccgttttccactttgattttcaggaagggccttgaactttttgaatactccaaagacttctgatttttcttttagaaaatatac

SEQ ID NO: 12751 - DNA, 408 bp, Glycine max
agcttcccccttgttcattattttttttaacaaaaacataattgtgttgtgtattttactcaaggaaaatatgttctattgtgttgaaattttaagatttttaattaattatgcacattatctttatattaatcaaattaattgagatataatttattttttaaaattaaaattaaatacattagatctaaggtaccatttataagattaattaccttaattattacatgaattgtctgtattaatagtaatcaaattattttttttgacaaaataatacaattaattatgatactcattattttcataattaatttgagtataattaagaatgataattttcgccatcattaattcaaacataaattacacaaggtgacgtgtgagggtgacgttatttaattaaaa

SEQ ID NO: 12752 - DNA, 367 bp, Glycine max
tagatggagaagaagacagagagaaggagaagacttctcgaaggagacgaaacatacctaggtattgtggcgaaggagaagaagcagagacttgtgacgatgctcgagtgcgacgaagacgatgctcgagcttagacaaaacgatggtcagatggagaacagacagcttcaaggtacatggagaacaaagagagcaagaaagcttagatggagaagaagacatcgagaaggagaagacaacgcaaaggagacgaaacatacctaggtatggtggcgaaggagaagaagcagagacttgtgacgatgctcgagtgcgacaaacacgatgctcatatgcagatagggaccttgaaggtagacggagatt

SEQ ID NO: 12753 - DNA, 398 bp, Glycine max
gcttggatttccttttactatgtaatctatccttcctaagatggatccaaacccagtcaccgtcattaagaactagcttttttcttcctctattgcctttagttgaatacacctttgtttggttctctatttggttcttaaccctctcatgcaaattctttacaacctatgacctaaattgcccttctttatgtataaaagaagggtccagtgggaggggaatgaggtctaacggtgttaggggattgaacccatagacaacctcaaaaggggattgcttggtggttctatgaacccccctgttgtaggcaaattctacatgaggaagatactcatcctcagacttatggttacctttcagaagagcccttaaagggtggataaagacctattcacta

SEQ ID NO: 12754 - DNA, 326 bp, Glycine max
  unsure at all n locations
gcaagcttggatntccttttactatggaatctatccttcctaagatggatccacacccagtcaccgtcattaagaactagcttttttcttcctctattgcctttaggtgaatacacctttgtttggttctctatttggttcttaaccctctcatgcaaattctttacaacctatgacctagattgcccttctttatgtataaaagaagggtccagtgggaggggaatgaggtctaacggtgttaggggattgaacccatatacaacctcaaaaggggattgcttggtggttctatgaacccccctgttgtatgcaaattctacatg

SEQ ID NO: 12755 - DNA, 398 bp, Glycine max
agcttccctttcttcggccaatgctttacttgtttggcagtgatttccttggcaatttgatgctcagaaacatcaatatctatcactccatcagtaggtctgcccaaatatttgttgatcacagcaggggagaatctaacacactttcctctgacaaacactctttgataatcatcactttttctgtttgatatgtcagagggaatgttgacaatgaattccctgactaagccttcatagcaatctcccaacttgctgacagtcttcagcagtcctgcagccttgatgaggtccatgatctccttgcaatccaaggcatctcttcccagttctctttcaaccgcaagtctgcgttgatacacatatttccacttttcaacattgccaatggagtggaa

SEQ ID NO: 12756 - DNA, 334 bp, Glycine max
tatttttcaatttcgagcgtctcaatatgttaatttcccgaatcaaacatcagtgtgaaaagttatgaccatttcaatttttctagagctatcgttgttcaaattcgagcgtctagatatgttatgcacttaaatcggacatccgagtgaaaagttatgaccatttgaatttctcaagagcttctgttgttgaatttcgagcatctcgatatattatgtccccgaatcggacattcgagagaaaagttgtgacaatttgaatttctatagagctgtcgaggttcaataccaagtgtctcgatatattatgcgcctgaatatgacatccgagtga

SEQ ID NO: 12757 - DNA, 349 bp, Glycine max
gatgtgttggatcgagtggcctcataataattaagaaagggggggggatagaattaattattcctaaaaccttaccaattaaaaattactcttttaaggcttttacttatgttgttaagagaatatggagtagaagagaaacttaacagaaagtaaaagcggaaattaaatgcacagtggaaagtaaaagagtagggaagaaggaaacaaacacacaaggatttttatactagttcagcacaaacccgtgcctacctccagtccccaagcgacctgcggtccttgagatttctttcaaccttgtaaaaattcttttacaagcaaagatccacaaggtatgtacccttcc

SEQ ID NO: 12758 - DNA, 368 bp, Glycine max
taacaaatggacctgggtgttgcccagtttcatcatatcttccgtaatacttatcacctctataatatctaataattttcacatttatgtctaattgccattttacttcattgtagtaaatttctaaggcatccattgcctaagaaatctcgggcaataagtagacataaccgtaacgtgaataatcatcaataatggtgataaggtatcattcctttccgaaagaactaacatcaaaaggtccacaaatatcagtatgtacaatttcaagaagctgagtgcttcttgtagctcttttctttgtatgtttttgcttgttttcccttatacaacccacacaaatatttagatccataaaatctagataa

SEQ ID NO: 12759 - DNA, 403 bp, Glycine max
  unsure at all n locations
gtacacctacattcgtatacacgacaaactttntctgtatacacacgcattaaaaactctttctctttatatcaacacggtctataataaaactctattcctgttcaaagatttctttttcgattttcaacatacaactcgtggtttatacaaaaaacttctttatatacactcattgctcacacacaagaatttcttttcacgcattatttacacacacacaaaatctttccatacactttatatatagacacgacatttgttcacaacgcctctttcttttttttttttctttttttttcggcgttatcatgatttttgttcgttttattnttaggacaatgttcctaaaggaaaactctacaaggttccggaatttcaacaaacattatcaacaataacg

SEQ ID NO: 12760 - DNA, 365 bp, Glycine max
agcttcaacatcagaccacttccattgtgctggaactactccacatggatttgatggggcctatgcacgttgaaagccttggaggaaagaggtatgcctatgttgttgtggatgatttctccagatttacctgcgtcaactttttcagagagaaatcagaaacctttgaagtattcaaagagttgagtctaagacttcaaagagaaaaagactgtgtcatcaagagaatcaggagtgaccatggcagagaatttgaaaacagcaggttcactgaattctgcacatctgaaggcatcactcatgagttctctgcagccattacaccacaacagaatgggatagttgagaggaaaaacaggactttg

SEQ ID NO: 12761 - DNA, 423 bp, Glycine max
  unsure at all n locations
tgaaattgaacaacggaagctctcgagaaattcgaatggtcatatacttatcacacggaagtccgattcaggcgcataatatatctagacactcgaaattgaacaacggaagctctcgagatattcaaatggtcataacttatcacacggatgtccgattcaggcgcataatatatcgagacgctcgaaattgaacaacggaagctctcgagaaattcaaatggtcataacttatcacacggaagtccgattcaggcgcataatatatcgagaagctcgaaattgaacaacggaagctctcgataaatncaaatggtcataacttgtcacacggaagttcgattcaggcgcataatatatcgagacgctcgaaattgaacaacggaagccctcgagaaattcaaatggtcataacttgttaca

SEQ ID NO: 12762 - DNA, 580 bp, Glycine max
  unsure at all n locations
tagtaaagctaagcactaacaatctccccctttggcaaattttgtctaaaacatacttagacacttcctgagcaggtacgagcagttatgcaagtgggatcagcaacttccattatcagagtaatcaagcacagcggaatctgtagtctagacaagttgcaagtcgtttccaggatgtcaagacatctcacatgacatctgctttctgcttctgctccccctgtctccatgcttactgcagcatcttctatcagctactagtcttctccaggatgtcaagacgtctcctgtgacatcagctatctgctccccctgtctccatgctcttactgcagcatcttctagtagcttccatcagtcatcatcagcagcagcagtctccccctcaaaatcgtatacatacaactccccctcaaaatcatgaatcatgcatacatcgtatcctactgccatacatcatacatagtatcctactactcanaatcatgcataatagcaagcataatactattactccccctttttagacagaaattgacaaaagtagaatgcatgcaagcattaatgtgcaaatattaca

SEQ ID NO: 12763 - DNA, 435 bp, Glycine max
tcgatgcgccgtcgagcaccctcgacgccacgtcggtggttgccggcagcggcagcctcccctgcacctgcaaaaacaccctgaactcgtcgctcttcctgatcaccggatgcgtcgccagccgccgcaggtacttctccagcgccattctcctctgctccacgaactcctgcttctgcatcacctggctctccaccacgctcttgtccggccgcggcgggatgaaaaacccgcggtacgcctctgcgagccgatcagagagcgtcaccacgtcacggaaccgccgccggaccgcgaaatcagcgccggaggcgccgaattcctgaatgttcgtctcgtggtgaccaagtatgtcacgtaactgttgctaccaggaacaatagaattcgatgattcttgctccttgacagggttcgaaacggttatctttagata

SEQ ID NO: 12764 - DNA, 618 bp, Glycine max
tctgatttagcttattgaaacaaataaataaaaaaagcttatatgtttgttatgagctagtttcataagctcaaataaaccttgtacgatttttattttacaaacctgccctaatgctataaatgatttatggcatgtatgcactgaaaaaatattgtgcttggattcttcatataagttctttatacttctaaattttctttaagctttaatttctgttttttccccctaagcattttgattctgtatttctatatcatttgcaatataaggtgtacataaacttacacatatctaggagtgaaggttatttacttgttagattgggcttttaccaaccatgcctacttatgttaagttataactgatcatgattgagcaagggtgcatgagttgtaagcttcctgatattatctttgattcctacaaataacaatataataattgatcatgatttgaaactattgtttatttagtggtctacttctcccacgatggtagacatttcttaatgggtatgtaatacaatgagtttttgtctataagttggccgaatacacaatcatagtgtcttattgacatgctctgattttctgtgcatacctatgttctcatcct

SEQ ID NO: 12765 - DNA, 614 bp, Glycine max
  unsure at all n locations
tgtggtgcatgtgttgttgttgttgtttgtcaagttgaccttgatgaagtgaatgctctagcagagctaatgacatggaagacagttgtagcggacattccttatggaggagcaaagggtggtattggctgcaacccaaaggagctcagcgtcagtgagttaggaagtctcacttgtgttttcttccaaaagattgatgatcttattggcatttagagagatgttcatgcccctgacatgggaactaatgcacaagttctaatttaattatattccatttccttacataattntttgtttggggcaatttcttatgtaaaccaacatctagaacttttatttattattctatcattttcatttgtttactatttcactgacaaaggcttgcattcttgatgagtattcaaagtgctttatagtttatattatcaataattttaatttaaaactattaatattacttttntttgtagaagttggtatatttacaaaattcatttgttgccaaattgtgttgattaacataaaattttattttaaaaatatgaaattttatacattgttgtcatgaaaatgaaatttttggttaaaaatataagaaaaaatatttt

SEQ ID NO: 12766 - DNA, 521 bp, Glycine max
aacgacaataacttttttctatgatgtccgattgaatcgggtaatatatcaggacgctcaaaattgagacttgaacctctaagaaaattgaaacgataataactttatacacggatttccgacagattgccgtaatatatcgagacgcattaaattgaaaaaagaagctcgtaggaaattcgaacgacaatatgtttttactcatatgtccgattgagtcccgtaataaaaaaagacgctcgaaattgagagcagaagctctgagcaatttcaaacgacaataactttatactcgaatgtcctcttgagacccgtaatatatcgagatgctccaaattgaaaatggaagctcgtagcaaatttaaacgacaataaatatatacatggatgtccgattgagtcccgtcgtatatcgagacgcttcacattgagaacggaaggtcgtatacaattcaaacgacgattactatttactgggatgttcgactgagtctcgtagtatatcgacatgcttcatattg

SEQ ID NO: 12767 - DNA, 545 bp, Glycine max
gtctcacgattgtcacgtgctcatgcaacaattgttagtcgtggctatacgagacatcttgccaaacaaagtcaggttcacgataactcgcctgtgctttttcttccatgctatatgtagcaaagtgattgatccagtaatgtttgatgagttggaaaatgaggccgcaattatactatgccagttggagatgtattttcccctgctttctttgacatcatgattcacttgattgtgcatctggtcagagaaatcaaatgctgtggtcctgtttatctacggtggatgtacccggttgagcgatacatgaagatcttaaaagggtatacaaagaatctatatagtccggaagcatctattgttgagaggtacattgcagaagaagccattgaattttgttcagaatacttagagaaggctaaagttgttgggcttcctgagtgtcggcatgatgacagagtgggtggtaagggttcaagaggactgcatgtgatcactccaagtgtagaagatttgttacaagctcacttgtatgtcttgacaac

SEQ ID NO: 12768 - DNA, 558 bp, Glycine max
ctcagcttcacatcagaccacttccagggtgctggaactacttcacatggatttgatggggcctatgcaggttgaaagccttggaggaaagaggtatgcctatgttgttgtggatgatttctccagatttacctgggtcaactttatcagagagaaatcagaaacctttgaagtattcaaagagttgagtctaagacttcaaagagaaaaggactgtgtcatcaagagaatcatgagtgaccatggcagagagtttgaaaacagcaggttcactgaattctgcacatctgaaggcatcactcatgagttctctgcagccattacaccacaacagaatggcatagttgaaaggaaaaacaggactttgcaagaggctgctagggtcatgcttcatgccaaagaacttccctataatctctgggctgaagccatgaacacagcatgctacatccacaacagagtcacacttagaagagggactcctaccactctgtatgaaatcttgaaagggaggaagccaactgtcaagcacttccacatctttggaagtccatgtta

SEQ ID NO: 12769 - DNA, 534 bp, Glycine max
  unsure at all n locations
ttgagccaattcaaacgacaataactttttactccgatgtctgattgagtcccttcatatatcgagacgctcgaaattgaatgttgaagctctgagccaattcaaacgacaataactttttactcggatgtctgattgagtcccgtaatatatcgagaccctcaaaattgaatgttgaagctctgagccaattcaaacgacaataacgttttactcggatgtctgattgagttccgcaatatatcgagaccctcgaaattgaatgttgaatctccgagccaattcaaacgacaataactttttactcggatgtctgattgagtcccgtaatatatcgagacgctcgaaattgaatgttgaacctctgagccaattcaaacgacaataactatttactcggatgtctgattgagtcccgtaatatatcgagaccctcgaaattgaatgttgaatctctgagccaattcanacgacaataactttttactcggatgtctgattgagtcccgtaatatatcgagacgctcgaaattg

SEQ ID NO: 12770 - DNA, 516 bp, Glycine max
tcctcgtggcttctttgagaagctttctcaagaggcttctttgataatctacatccttatctatccacccctctattaactaaattaacttccttaaaaataattacggatgaaaataacgcaacaaataatcaaacatctaacataattactaataatatatagatatatatatcagggtgttacactacctgcaatttggagccctaaatacaagaaccaaaagtaatgaaaccttaatctaatatgtacaaagataaatgggctcatacttagcccatgagctcgaaatctaccctaaggctcatgagaatccaagtgccttctcttgcatctctagcccaatctactaggagtcttctatccaatgcccttgcagggtagaattgcatcattccctccgccttgaaaaggatttgacctcaaatccagaggttcttgaaactcttggcttttttcctcaacacctagatgaagatgctcttgatactacatgatgtaaactccattggagct

SEQ ID NO: 12771 - DNA, 634 bp, Glycine max
  unsure at all n locations
tgatttatatttaatttccacttgtgtaataggtacatttttaatgttcatattatcatagttttgcattttttgttatttaatttattttattttattaaaaggcatggttagagaagatccatcaataaaagtttctttgattcaagaaaggataaacagtggatttggctataaggtttcgtacaaaaaagcatgatgacgaagcaaaaagctatttcaattgaatatggagattgggaagagtcatatgccaaactttcattgtggctaaaacacatgcaaaataattcttctggaccctattttcaaatattgcatgatgattttattgttgggaatcgggtgagtcgtgaacaccgtcaatttcataanagtatttgggcattcggtcaatgtaaaaagacttttaattattgtaagtcaatcatacaagttgacgacacacatttatacgggaaatatcgtgggacccagttaatggccacatcacaagatagaaatggtggtgttcttcctctagcattcgtcgtagtcgaaggtgaaacgttaacagcgtggtcatgggttttgacacatttacatgaacacgtgacagataanaatggtatttatctcatatttgatcgtcatg

SEQ ID NO: 12772 - DNA, 699 bp, Glycine max
  unsure at all n locations
taggatcagcataaaaaatgggtagggtcgctgcagtgcagaaatatgaaaaatttcgtttggtatatatatattaaaaatgattaatattaatcgatagatttaaaaaaaattaaatatatatcttaaaaattataatttgacatcctaaaatatttcaaatttataattactatatcattattaattattacatccataactatcatcatcatgatggtcaaccgtctttattatcgtgtctatatatatattgaaaaaaagtaaataaaatgaaatgagataatatttattttgttatttgattattttaaaaataaatagaaaatgttgttttatttaaatttaaaaatatgagataaaatagggataattaaataatatcatttactagttatttgtgttatgcctttttccaaataataaattcaaaaatttattctatcttaatantaaaattaaaaccaatatgataattntattaattatccctttatttttttgtttcgttcattattaaatattccaaatattaaatataaaaacttaaagaagataattaaccacaaaaatgacatttgtataaatacatgggacgccaaaaaaataataatacatgatttgctctaaaaagaaaaaataaatacattaatatcaactctaattactaaatctgaatatattattgtattagtaatt

SEQ ID NO: 12773 - DNA, 554 bp, Glycine max
tgttatgaagatgaaaaacctatctcttactagatgtcagtctatttgtagagttgtatccataaactcaatgtcacaatcacctttgtgaatatgatccctaatgaaatgatgcttaatatttatacgctctgtcctagaatgcatgataggattcttagtgatactaatgacactagtgttattacatcttaaaagaatatgttctaaatgcaattataaagtcagatagttatttgttaatacacaagatttgtgcacaacaacttcacacaacaatgtactcatccttatctgtaaacaaggcaacacatgcttgattcttactattccatgaaaccaggccattacctatcaagtggcaaatactactagtggttttcctatctagtgtaaatctggaaaaggttgaatctgagtattcaagtagaaagatctcagcaccttttatggtaccatctaccaacatctacattgccttttaggattttattatccttctttatataaagaagtaagacttcctacgactggattgttagtgtgcacacatg

SEQ ID NO: 12774 - DNA, 499 bp, Glycine max
tgttcagaaacgtgcatttgtgtgcaatacacaattcccggttctctacatcaaaatggtgtatcagaaaggtgtaatagaactttaacagatatggttaagagtatgttcatcaattagactttacccgtatctttgtggatgtatgccttgaaaactgccatgtatttgttaaacagggttcctagcaaggtagttccaaagagaccttttgaactgtggacaaataggatacctagtataaggcacctgcatgtttagggttgccaggcagaaataatgatttataatccgcacgaaagaaaattggatgcaagaacaatcagtgaatatttcattggttatccagaaaagttaaaagggtatatgttttattgttctaatcatagtatgagaattgtcacaactggaaatgcaaggttcattagaaatgatgaaatcagtgggagtacagttccacgagaaatggaattaaagaagttagagtgtaagtcctttt

SEQ ID NO: 12775 - DNA, 658 bp, Glycine max
  unsure at all n locations
tgttcttcactcatcttctccttgaagtggcatctccaatcacctttcctccttctctattctactatcattgatcttcaagaagaaaaggactccattgatgaagaagtttcaaggcgtacaagctccacatggggctacatcagacagcgtcgactgcgtcacgtcaccagaaaccaccaagtcctcggcagcatccaggtggaacctcccattcgtcggcgagaacgagtgtgctagcatccccaagctcccgtcgaacggctccccctggctgtggtcaccactgaagaacccgatcctaatgtcggtgcttgtttataaataagtgcaacaagattttctttcattgtgtctctcttgtgtgccttttccatctgcaacaaagcttgttctatatccatttggtttgattaggttttctctttttctgaaacttggttttcttcttcattggtttattctttttcattttcgcatatggatcatgtgatgagaaaaaatttgcaacaatatgattggattcgttccatgattcatagtatttaagtctctgatgattaactctccttttntagaattaattttgagtccttttgggtttctaaatatcatttttttcctagtgttgatagagtgacaaccagagagacatgat

SEQ ID NO: 12776 - DNA, 477 bp, Glycine max
tggacttggtattacctctgtagccatttggagccacagcctccatgtcttttaactaaagccaatgagtgtttgtgaactctcagcaaaatcttggccaagtttattgacagcaattcagcactgcaacccattccactcaggttgacactctttacgttgctccggaatccgaacttgttaatgatcattgatgtaatggatggtgtaggacaaaataggctacagtttgacacaaggatatcaatgcttttaggatgcactttgtgttttgaaaggaggtctttgacaattctgaatagaaccgattcaacttctgcctgtgcacgcttcatggaatcatccggagggagctcatgaactgattctggcacacaagcctccacgccaataccggatctttccaatactttcaattcaaagcctatgagttcatggtcaaaattgcacaattcaaagtgttctacaatatgagag

SEQ ID NO: 12777 - DNA, 618 bp, Glycine max
  unsure at all n locations
ttttcccaanagcttgatgtaaaaatgtacttattgagttcttatttatcaaacttacggtagggtaaggccacttggaatgtgattgccaccaagctttatgaacagaagttgtgtcaccaggaagtttcccagctcttctcttgcgcaagatttcctctcttatatctacaattttctccttataaccctgtatgataaaaattaaaaaagtaaaaagaggtcaatcatatgggaaaagatttgagaaggggaaatgaacaaccatcaacaattcaacatcccttacctgtttcagttcatgctttaattcttgtcttactcgctccatgagggacctctcgctctctgtaggaacaagagggccaaaccccatgccatctgccccatcgaaactactatcaaagagattggcgtcactatctacttggtcatcttcatcatcagacattgttgcccctgtaccttctccaggtgaaactcctgtntatcatgctgcatgtgagaacatttatatggttacttgctgtggctaattgaaccaagagtttgaagattttcttcaacactagaactatcatcatttatctgttgcanagtgcaatcttgtgggttagt

SEQ ID NO: 12778 - DNA, 728 bp, Glycine max
tcagaagcaagcttccatcataatatgccaccttgtgctgtgaagacacacaaccaaatcattgttgcttgcatggcaatacataacttccttcaaagaaatgacgagagtgacagagaatttgattcacttgatgaagataacgaatatatagatactgatgaggatgaaaataaagttgggcctagtactacaacatgaaagaaccggatgctcaaagtactctacaattggaacgctttagagaatctctaaagaatatgtttccaacacgtatttaatttctatatttgttaataatacaagtttgcatgtttatggtatggatacatttgaataattttatattggaagacattattgatcatattattactaggttaatgatattttatattatgctataaattataattacatagacaataattaaattataaactaaaatgtatgtgataacattactaaaacaataggataattacatgtttaatatgaaaatttattatgtagaaagacatataattatattgttatgagatacatttattttatttttgtagcagaattaattcttaatcaaaatttcttaaaatatatacaatattttaacttaatgatgaagtacatattttataatgaaatagaagagaaagacattttattattttaataatatgtattattaacgaacttataatatttaaaatggtgaggattagtataat

SEQ ID NO: 12779 - DNA, 502 bp, Glycine max
tgaaattgaacaacggaagctctccagaaactcaaatggtgataacttatcacacggaggtccgattgaggcacataatacatcgagacgctcgaaattgaacaacgaatgctctcgggaaattcaaatggtcataacttttcaaacggaagtccgacttaggcgcataatatatcgagaaggttggatttgaaccacgaatgctctcgagaaattcaaatggtcataacatttcacacagaagtccgatttaggcgcataatatatcgagaaggttgaaattgaaccacgaatgctctcgagaaattcaaattgtcataacttgtcacacggaagtccgattcaggcgcatactatatctagacgatcgaaattgaacagcgaatgctctcgagaaattcatatggtcataacttgtcacacgaaagtctgatttaggcgcataatacatcgagacgctcgaaattgaacaacgagtgctctcgagaaattcaaatggtca

SEQ ID NO: 12780 - DNA, 582 bp, Glycine max
tgcacacaatttcttgaatctttcccaatactcatacaatctctcttctctcagttgcctgatgcctaaaatgtcttttctgatggtagtggtcctagatgcagggaaaaatttctccaagaacaccctcctaaggtcatcccagctgaaaatggacttgggagcaaggtagtagagtcaatattttgccactccctccagataatgaggaaaagcctttagaaagatatgatcttcttggacatcagggggcttcatggtggaacaaaaaatatggaactccttaagatgcttatgaggatcttcacctgcaagaccatgaaacttgggcagcaaatgtattagtccagtcttgagaacatatgaaacaccctcatcaggatatttaatgcacaagctttcataagtgaaattaggtgcagccatctccctaaaagtcctctcatgacgaggaggttgagccatgttctcggtatgaatattagtattggaatgctcaaaattagaatattcacaatcactctcaacagaatgcttatatgcacagaatgaccaggatgcatattatgctctacttatcta

SEQ ID NO: 12781 - DNA, 652 bp, Glycine max
  unsure at all n locations
taaaattcattatggatgcatatgctaagagcattctaatggcttctaatatatcaactggagcatatgtttcctcataatctataccttcttcttgattatatccttttgcaactaatctatccttatttctaatgattattccatgttcatctaacttatttctaaatacccattttgttcctatgatgggataatttttaggtttctctacaagttcccacacattgtttctttcaaattgattcagttcttcttgcatggcaataatccagttatcatctactatggcttcttttatatttttaggtgcaatcatagatacaaaagccatattattgcataaatctttaagagaatgtctagttgttaccccttttgagatatcaccaataatgttgtcaaggggatgatctttngaagctttccattcttatggaagttcatcattggatttgacttcttctggaggatcttcattgcttcctttaccttttcctttagaatcttgaccatgaatatacaatctgttctaaagattctgcaatatcatctatcatattctttctttgaaaagatagcattaaattcatcaaacgttacatgaatggattcctacatattcatagatcctttattatatatcctatat

SEQ ID NO: 12782 - DNA, 573 bp, Glycine max
  unsure at all n locations
ctaagcttcataaatcactagtaaaatttaaagatgatatgaagttcaacttattttctcaatccccaccttcccccttttttgttttgctcatgttcttatttacgtttaatgtttttgtagactgtgtgatgcaatcctccctaggaagggaccagtcactagaaccatgagcaagaggctccaagaagattgggctagagctgctaaagaaggccctagggttctcatgaaccttatggtagatttcagaggccatgggccaaggttgggtccaattatctttgtacatattagattaggatgtcattatatttggtccttgtatttanggctccatattgtaggtagggtaccctataaatataggatttttcagcccttgtattttatggcacctagactagtttttgtattagtggtagttttgtaatttcacatgcactaagtgaatatttgatgtgtgtgggtggaataaatttaattgaattgcagaagcccaactcattaaatttagaggtgagggtgagcatgtgcttactacaccccattgtctcatcatatagtcacact

SEQ ID NO: 12783 - DNA, 501 bp, Glycine max
  unsure at all n locations
ntgaaggcatctacctcttgaagaggcagaggtaagggcatatggattattggtagaggtagaggacggggagatcaaacactattagaaaatacactttcaacatcggttatttggggccttctacatcggttgtaaaaccgatgttgaaagcatcgatgttgaatgtattgttgttaacatcggttttaaaaactgatgttaacataaaaatattaacatcagttttataaataaccgatgttataaagaaagaagtacaacaaaataagtgtatgcgtgagggacgttggcatcagttttctgtaaaaaccgatgtgaatatgttatattaacatcagtttttagaggaaaccgatgtgaacgttcatcattcatgcacctatnnttgctatagtaattatgtataacattggttatttataaataaccgatgttattgcatacagtttaacaatcggtattttataaatattcgatgttaacctatgtacattaaca

SEQ ID NO: 12784 - DNA, 415 bp, Glycine max
  unsure at all n locations
agtttccaagtgccaattcgncttcttctttatttcagtctttttctggcttcaatncatcagagggctttccttctgtgtccagcatcttgggatgttcccagcctttgatgacagctttccaggttctgctatccagtgatttgaggaaggccaccatccttgctttccagtattcatagttggttccatccagaataggtggtatgttcactggtcctccttctttctccatgttcatcagaatttatctccctagatctcactcagtgatttcgagtgcccgctctgataccaattgaaattctgatactggggacagatgtcgtacaggatgtcacgacatcacgcttcagaacatgcagattgtatttgacagtgtgcacagtttaagcgagtaaataacacaagagaa

SEQ ID NO: 12785 - DNA, 456 bp, Glycine max
aactcaagcttgtagaccttctcttcttcaccctttcgaacatatttcggtggttgttccacatacacgtcctctgtcaattctccgtgaagaaatgcgcttttgacatctagttgatacacattccatcccttttgtgctgcttgagctaaaaccatccggattgtgtcccaccttgctaccggggcaaacacttcgttgtagtcaatcccttgttgctgagcatagcctttagctactagtcgggctttgagcttatcaacttcaccattctcatttaacttggttctaaaaaccatttcactccaatcttcttagcacctttgggcaaagttgtaagctgccaggtttcattctttttgattgcttcaatctccaaatccattgcctttctccatttctcatctctttcagcttcttcaaatgagcttggatcttcatgagaggtaaacattg

SEQ ID NO: 12786 - DNA, 413 bp, Glycine max
agcttcatatttattaagaggcccattaacattctctttaactctgaaaactcacttgcacccaattgtttttctatttgatggaagaggatccagatcccaggtctagttttgaggtaatgctaaatattcttgttgcatggcttccttctacttaggataagctaaagcctattttacaccttttggttcacaatgagtaagtatagaaggatgaagtctaggttgatagttaccagactttgacctagtctgcataggatgagcattcactattctaggtggtgaagtagtttcaaaattttgaggactggtttttgcagtaggtgcagagtgaacaatggtttgaacatggctagaagaagaaggtggatcaatagaaacataactggacaagggtagtgaggaacaat

SEQ ID NO: 12787 - DNA, 325 bp, Glycine max
acacaccccctataatagctaagctcaccccatgacaaacaacatgaaaatacaaaaaaaaaaagtccttactaccaaaactactcaatagaatggccaaaatacaatgcctaaacgaaggataaacctattctaatatttacaaagataatcgggctcatacttagcccatgggctcgaaatctaccctaaggctcatgagaaccctcgggcctttccttggatctctagcccaatctacttggagtcttctacccaatgctcttgcggggtatgattggcatcagtcagtttctaaaaacgctattatatcaaaaatcgtctt

SEQ ID NO: 12788 - DNA, 435 bp, Glycine max
  unsure at all n locations
ntggagtttccaagtgccaattcgtcttcttcttttttccagtcttcttctggcttcaattcttcagtgggctttccttctgtgtccagcatcttgggatgttcccagcctttgatgacagctttccaggttctgctatccagtgatttgaggaaggccaccattcttgctttccaatattcatagttgcttccatcgagaattggtggtctgttcactggtccgccttctttctccatgttcatcagaatttatctccctagatctcactctgtgatttcgagtgttggctctgataccaattgaaattctgataccaggggacagatgtcgtacaggatgtcacgacatcacgcttcagaacatgcagattatatgtgtccgtatgaacagattaaacaagtaaataacacaagagaattgttacccagttcg

SEQ ID NO: 12789 - DNA, 430 bp, Glycine max
actcagcttgagcaattcaacgacatactttttactcgtagtctgatttttcatgtaatatatcgagatgctagaaattgaatgttgaagctccgagcaaattcaaacgacaataacttttcactcggttgtttgactgagtcccgtaatatatcgagacgctccaaatggaataccgaagctctgagcaaattcaaacgacaataactttttacttggatgtctgattgagtcccgtaatatatcgagagggtcggacttgaatgccgaagctctgagcaaattcaaacgacaacaactttttactaggatgtccgattgagtatcgtaatatatctaaacgctcaaaattgaatgttgaagctatgagcaaattcaaacgacaatcacttttttactcggatgtctgattgagtctcgtaatatgtgg

SEQ ID NO: 12790 - DNA, 382 bp, Glycine max
  unsure at all n locations
tgccgccacggaattntccgactctgctctagngatgtggaacaagctacaaaaggagagagcaaganatgaagagccaatggttgatacatggacggagatgaaaaagatcatgaggaagcggtatgtgccggctagttactcaagggacttgaaattcaagctccaaaaactaacccaaggcaacaagggggttgaggagtatttcaaggaaatggatgtgctcatgattcaagcaaatattgaagaagatgaggaggtaactatggctcgatttcttaatggtttgactaatgatatccgtgatattgttgagctgcangagtttgttgaaatggatgatttgcttcacaaagcaatccaagtggagcaacaattaaaa

SEQ ID NO: 12791 - DNA, 384 bp, Glycine max
aaaaccccttgaactacttcaaaaccccttgaactacttcacatagacttatttggtccctctagaactatgagtttgggtggtaattactatgacttagttatagtagatgattactcaaagttcacatggactttgttgttgaaaaccaaaaatgaagcttttgatgcttttcgcacacttgccaatattattgaaaatgaaaatggtctcaacattgtttcacttggaagtgatcatggaggtgaatttcaaaataagtcttttgaatagtgttgtgaagaacatggaattcaccacaattgtttttgccccaagaacacctcatcagaatggtgttgtggagaggaaaaatagatccctctgagaaagaacaataactct

SEQ ID NO: 12792 - DNA, 410 bp, Glycine max
agctcacgattatttattgtataattttcttacactctcaatttattaaagatgatcatatataataaatttagtaaattttataataattattttaaaaatcattcatgattatgagttatcaaccatcacataaaggaacttgacaccacactttaactcaaagtcttaagattcatgtttatgaatcttctcctcgtgctcaactctttttcacttctacgactccacctcacacttgtactagatttggatcttttaattaagatttcagtttaaatttgtgttgataaaaaaatataattaagagaaaagattctattaaagctcaccaactagattttctaataaattagttatcaataaagttggtgattatatacttcctattaatgttatagtgacaaaaa

SEQ ID NO: 12793 - DNA, 429 bp, Glycine max
agcttcatatggacatcgcttcattttggtcgccattgtttacttcaccaaatgggttgaagcggcttcatacgccagtgtgactaggagtgtggtggttaggttcatcaagaaaaagataatttgctggtatggtttgcctaggaagattatcactgataatgccaccaatctgaacaataaaatgatgaaggaaatgtgtgaggatttcaagatccaacaccataattctatgccttgcaggcccaagatgaatggggcagttgaggctgctaataagaacatcaagaaaatagttcagaagatgatcgtgtcatacaaggattggcacaagatgctcccttttgcactacatggttattgaacctcgatacgcacatcaactggggcaaccccgttctctttggtgtatggaatagaggttgtgct

SEQ ID NO: 12794 - DNA, 409 bp, Glycine max
  unsure at all n locations
agctngccaacctatgtaagctccttatatctcccacactgtttgttgtgggccattcttggatggccttgattttctcagggtccacttggaccccatttctaccaactacaaaccctaagaaaactatattatctacacaaaaaagtacacttctctatatttgcatagagggtgtttttcctaaagactgaaagaacttgcctaagatgtcctaagtgatcatctaggctcctactgtacactaaaatatcatcaaaataaacaactacaaatctacctatgaaatcccttaagacatgatgcataagcctcataaaggtgcttggtgcattagtgagcccgaaaggcatcactagccattcatacaaaccaaacttggtcttgaaagcgggtttncactcatcac

SEQ ID NO: 12795 - DNA, 257 bp, Glycine max
  unsure at all n locations
acactttngtgcgagaaaccgagacgctcgaaattgaacaacggaagctctcgagacataaaatggtcataactgttaaaacggaactccgattcacgggcataatatatcgagacgctcgaaaccgaacaacagaagctctcaagaaatgccaatggacataacatgtcacacggaggtccgataccagtggatagtatatcgagaaggtcgaaattgaacaacggaagctctcgagaaattcaaatgggaataac

SEQ ID NO: 12796 - DNA, 429 bp, Glycine max
ctattagtaagacttcattcttgaattcatttgttccttgcttataacttcttgaaagtctctttactgctatttgttgcccatcaggtaatatcccctgaaattaaaccattattcatgtgaaaaacaaaaatatgaaaataacttttctcacatttactcaccttgtaaacttctccaaatccacctttgccaatacagttctcattggagaagttgttagtcgccgcttcaattacagccaaatcaaattgcaatggctctaaaatggcgctttcatgaccaactagaacaaatatggttagtttgttaaaccaagttttcaaagttttgaggataacaaatacgagtttaaagtacatattttttacatacaattttctttgagaatggtcctaaaactctctcttgcttgtctccttattaaat

SEQ ID NO: 12797 - DNA, 364 bp, Glycine max
gtgcagttcactaaaggagactgggtcctcgttaagcttcgtccatgtcgccagtcaacggcttcaggtggtcaatactccaagttagcaaaaaggttctacgacccatttcaaattgttcaaaggatcggacctgtagcatataaacttgacttaccttcaacctcaagaatccaccctgtcttccattggtccttactcaggccttatcactcttcactgaccacaacagaaacacccattcccttgcccaatgcggatgaagataaccaacccctcctcacccctctcacgatattggataaaagtggcacagttcaagggatgacaagcagttacctcgtttggccaatgggatgttctc

SEQ ID NO: 12798 - DNA, 424 bp, Glycine max
agcttatagttattggagggagaattttcaatccaaaatcaattgtacctttttgtaacgaagaattctttttgcagcttttagatgaggagaggtaggagcctccgtaaagcgacacacaactcccaccgcatatagaatatcgggccttgtattggttagataccttaaactccccacaagactcttgaagatcgtggagtctaccttctctccttcatcaaaatttgataacttcaagccaccttccataggtgtgttcacgggattgcaatcaagcatattaaatttcttcaacacttcttttgtgtagctttcttgtgagacaaagataccattcttcgttttcttcacttccattcccaagtaatatgacatgagtctcgtatctgtcatatcaaattcacgagacatggactccttg

SEQ ID NO: 12799 - DNA, 404 bp, Glycine max
  unsure at all n locations
agcttccacatacttgttacccattttactattntcagctaacagatcataactacctccaaggccaagatagaccaaattggagagattcccaatctgagatggaatcttccccatgaatccagaagagaggtcgaggtgagtcaaggaggtcattgcacaaagaaaagaaggaattgccataccttcaaaataattgtcgctcaagtcaagatatcgaagcttagagagattcccgatctgagagggtactgttccgtcgtcaacaacagaactcaggtcaagatacaccaaatttgagagatttccaatctgaggaggaatcttcccatggaatccactatcagagaggttgaggtgagtcaaggaagtcattgtcccaaggaaagaaggaattgacatac

SEQ ID NO: 12800 - DNA, 396 bp, Glycine max
  unsure at all n locations
tgccgccacggagttntccgactatgctctngtgatgtggaacttgctacaaaaggagagagcaagaaatgaagagccaatggttgatacatggacggagatgaaaaagatcatgaggaagcggtatgtgccggctagttactcaagggacttgaaattcaagctccaaaaactaacccaaggcaacaagggggttgaggagtatttcaaggaaatggatgtgctcatgattcaagcaaatattgaagaagatgaggaggtaactatggctcgatttcttaatggtttgactaatgatatccgtgatattgttgagctgcaggagtttgttgaaatggatgatttgcttcacaaagcaatccaagtggagcaacaattaaaaaggaagggagtggc

SEQ ID NO: 12801 - DNA, 401 bp, Glycine max
agctcttgagaatatccttaataattgtgacattatccatttatggttccccaaagaagatagtatcatcagcaaattgtagtatgttgactgggatctttttctttcccaccataaaattgtggtagtagtttttggaaaatactgccctcatcatgcctgtcaagccttcagcaactaggtcaaacaaaaagggagccaatggatccccttgtctcaagcctatttgaggtttaaattcagaagtaggacttccattcactagtatagatattgatgctaatgaaagacaccccttaatccagccaatccacttttcattaaaccccattcttctcatcatgtaaaagaggaaatgccaagacacagagtcatgctttttcaaaatcaactttgaacac

SEQ ID NO: 12802 - DNA, 341 bp, Glycine max
gtgagccaattcaaactataataactttttacttttatatccgagagagtcccgcaatataacgagacgctcgaaattgaatgttgaagctccgagccaattcaaacgacaataactttttactcggatgtctgattgagtcccgtgatatatcgagacgctcgacattgaatgtgtgaatctctgagcaaatgcaaacgacaataactttttactgggatgtctgattgagtcccataacatatcgagacgctcgaaattgaatgttgaacctctgagccgattcaaacgacaataaatttttactcggatgtctgattgagtcccgtaatatatcgaga

SEQ ID NO: 12803 - DNA, 444 bp, Glycine max
  unsure at all n locations
ctcaagcttggtgcatatgaattatatgttgcagcttaaaggattatgttagattatagattattataccctattgtactaggctaatgttcttcttttatttttctgtatctactatgttctgagttttctgtagaaagctttctttgcaagctaaggttgatatatataagagaagctcattgtccagaaaacactaaagcatttcatccaaaaatatatctcattattttctactaaaatcattatcataatttagatttattaaatttataatagcattcacatatatcatgtaaaaagatttatagttaaaggtagttttttatgatgaatagctattgtaatactatccttcaaaaaagctattataaatctataatactatatctattattggggggaaacagctntcggtgattgtattacaatatgtcaatattc

SEQ ID NO: 12804 - DNA, 430 bp, Glycine max
ctcagcttaaatgcagctccttgctgtacagtgctttgtggcacttttttgcctaagaggaactataaggcggagaaaatctcgtgttcgatgggcatggatcattcgaagactcctgctagctcgagtgaccggatactgcacacacataaactggaagaactgccctcatgccctaggtgtggggtatcacggtacatacacaaggatgatgatgagtgctgaagagaagaagactcatagaagggccccctacctacggtgatgcggactcattcacttgtgccaatgtttatacgtctctatgcttatggatacgatgctatagacatcttacatggcatgcacatgagagcaactgcgatggaatggtcctgcatccggatgatcgctcctagaggacaaggatatatcatttgtattcgaattt

SEQ ID NO: 12805 - DNA, 397 bp, Glycine max
agcttgaatcggacatccgtgtgattatttatgaccattttattttctcaagagctttctttgtgcaatttcgagcttctcgatatgtgatatgcctgaatcggacatccgtgtgaaaagatataccagttgaatttctcaagagcttccgttgttcaattttgagcgccttaatatgtgattggcctgaatcggacatccgtgtgaaaagttatgaccatttgatattttcaagaccttccgttggtcaatttcgagcctctcgactttttatgcgaccgaatccgacattcgtgtgaaaagttatggccatttgaatttctcgagagattccgatgttaaatttctagcgtgtcgatatattataagcacgaatcggacattcgtgtgaaaagtt

SEQ ID NO: 12806 - DNA, 385 bp, Glycine max
acggatgcccgaaagttagaaatatattatacgctccaaattgagcaaccggagctctatagaaaagtcaacggatcgtaactatgtcacacaggaagtcctattcttggacataactcatcgaggacgctcgataattgcacaacacgggcctcatcatgcatgcgaatgctcctaacattacgctaagattagcgagggcgggacgtaacatatcgagacgctctatattgagcaacgaaagctatcgacgactttgaatggccataacttatcacacggatgttggaagacgggacataactcatccagacgctctataatgaacaaccgaaactctctagaagttcgagatgacatgacaatacacacagatgtgctattt

SEQ ID NO: 12807 - DNA, 418 bp, Glycine max
  unsure at all n locations
agcttcaacatctttatcccttccagtttgctggaactacttttcatggacttgatggggcctatgcaagttgaaagccttggaggaaagaggtatgcctatgttgttgtggatgatttctccagatttacctgtgtcaactttatcagagagaaatcagacacctttgaagtattcaaagagttgagtctaagacttcaaagagaaaaagactgtgtcatcaatagaattaggagtgaccatggcagagagtttgaaaacagcaagtttactgaattctgcacatctgaaggcatcactcatgagttctctgcagccatcacaccacaacaaaatggcatagttgaaaggaanaacatgactttgcaagaagctgctagggtcatgcttcatgccaaagaacttccctataatatct

SEQ ID NO: 12808 - DNA, 437 bp, Glycine max
  unsure at all n locations
nttatgtttagacactggggngaattttctaatatatatacattagtgagataagaaaaaaagagaaagagaaaaagtaatttttttaattatctagatcccactcttcatttaatgaatcttaagattaaattgataaaattttcaagaatgtatgtatagtgttgtaggtaggcgggtaccatagttggagactctccccgcatgccaaagttgacaaaagaaaataccccccttttcatgaacagcgctcacaataggtttccaagcttccagctgttctcttgtccagatgccaggtgtattagggtatctttggccaacgtacaaaacggccacacgtataatgaaacaaaatactaaagcattagtacaagataatctttgtgtggacaaaatcagatccaatttctagacgtgttcagattaattacccc

SEQ ID NO: 12809 - DNA, 394 bp, Glycine max
agcttacccttttgggaggatttttaggttctggagaggatcaataacaatgcctatacgttggaccttccagaagagtatggagtcaacaccacttttaacatttctgatttaactccttttgcaggtggagctgatattgaggaggaggaactaatagatttgaggtcaaatcctcttcaaagggaaggggatgatgcaatcctccctatgaagggaccaatcactagaaccatgagccttacggtagatttctgagcccatgggccaaggttgggtccaattatctttgtacatattagactaggatgtcattatatttggtccttgtatttagggctccatattgtaagtagggtaccctagaaatataggatttttcagcccttgtatt

SEQ ID NO: 12810 - DNA, 402 bp, Glycine max
  unsure at all n locations
agctcncagtgttttatatagggctttatgtcttcatacttttctctctagcacaggcttttctgtttatcttggtgatactcctgtctcatggcgttctaagaaataacccattgtttctcgtagttcatctgaagctgaatatcgtgctctcgccaccacaacttgtgagcttcaatggctcacttatctcctcaatgatctgcatgtttctgctaaacaaccagctctcctctattgagataatcagtccgctttgcaaatcgcagccaatcaagtattccatgaacgtacatagcacatagatattgattgccatctagttagagagaaagttcaatctggtctgattaattacttcctgttgctgctccacaatagcttgcccacatctttacgaag

SEQ ID NO: 12811 - DNA, 454 bp, Glycine max
  unsure at all n locations
ctcagcttaggaggaacctgacagggatgctagcctaccattgtagcttcatgacttcttgaatgggaggagggttgcgtatctccagtatgatagtgcatttttcgggattggctccaatcccccgacgtgtgatcattaagctgaggaacttgctgccacctaccacaaaagtacatttttcagggttgaggcccatgttgtatttgcatagttccctgaatacttcctctaggtccaccacatgttggggtatgctttgagacttgacaactatgtcgtccacacatactttgacgtttcatttgatctgttgtttaaagactcggtccattagtcgttggtatgtcgcgcctgcatttttgaggtcgaatggcatgaccttgtagcaaaagttagcatcttcagtgatgaatgtcngtttctcctggtctggagaatgcattctgatctg

SEQ ID NO: 12812 - DNA, 427 bp, Glycine max
agcttgtaatcgattacacaagtatttttatcgattactatatgagattttcaaataataatttccaagagtcacatctgttcaaattgttttttgaatgaccatcaaaggtctatttatatatgacttggaacacgaatttgcttagagtttttctgaacaaaaagtcttatcttctcaaaaacaaaattgtcttatcctctaaaacattccttggccaaaacacttgcaattcaataaggaattatttgagtgcttcattgtacaatctatctctttcaagagagatttcttcttctcttcttcatacttctgaaaagggattaagagaccgaagatctcttgttgtaaagaaatctgaacacaaaggaagggttgtccttgtgtgtttcagaagttgtaaaggatttgcaagatagtggtactc

SEQ ID NO: 12813 - DNA, 461 bp, Glycine max
  unsure at all n locations
actctataatactcacagcttgtttaccccatgttngaattgcttacaatagagcttgttatagcactcactaattgttctccttttgaagttgtttatggttttaacccactaactcctcttgatcttttgcctatgcctaatgtttctgtttttaagcataaagaaggtcaagcaaaggcagactatgtgaagaagcttcatgagagagtcaaagatcaaattgagaggaaaaataaaagctatgctaaacaagccaacaaagggagaaagaaggttgtcttcgaacccggagattgggtttgggtgcacatgagaaaagaaaggtttccggaacaaaggaaatcaaagcttcaaccaaggggagatggaccatttcaagtgcttgaaagaatcaatgacaatgcttacaaagttgagctgcccggtgagtataatgttagttccaccttcaatgtctc

SEQ ID NO: 12814 - DNA, 451 bp, Glycine max
  unsure at all n locations
tgagctcggcttgagttgaatacgtaaagcttgagttgacatatgtttttnttaaggctctgctcgacttacataaaagtctgacttacgagcctatttaaaagcttgcttaaagacgtcttttattaattaattattttaaaacctagtgaaatactaactaaaaaaagaaacttataaaatttcgtataaataatgtacaaatctaaaaataattgataaacaaaattatattgaattcaagtcgttaaagcacaaagtatataaaaaaaataaaaatagcataatattaaaaaatgtatggattagagatgatttacactaatatagccaaacaaaaattattattagttaaattaacaatttttaatccaatttttttaatatataattatattatatattnttaaaaaaaatatatccacaataatttcatcttagtctactcaag

SEQ ID NO: 12815 - DNA, 410 bp, Glycine max
  unsure at all n locations
tgctgattacttcaacattcccggtgtcttcagtgtgtatntactgcaaaactctccctcaaacggtccaggatacataggcacctcagtgttgcaaacttctctccatgattttattgaggttattttccagaacaacgaaaacaccatgcaatcttggcatcttgatggttatgatttttgggtcattgggtatgccagcttcctttatttataaacttttgtttctattatcaatatttttattagtagaagcaatttagaattagcttaagaaagttctaaagatgttcattgacccttgcagtcatggtttcggccagtggacagatgctagcagaaaaacatataatctagtggatgccctgactagacacactgcacaggtaacttaacatgaaagttcccta

SEQ ID NO: 12816 - DNA, 403 bp, Glycine max
gatccttaagcacctgcagcatgcaagctttaaatttaaacgacatactttttactcggatttctgattgagtcccgtaatatatcgacaagctcgaaatagaatcttgatgctctgagcaaattcaaacgacaataactttttactcggatgtctgattgagtcctgtaatatatcgagacgctcgaaattgaatacggaagctctgagcaaattcaaacgacaataactttttactcggatgtctgattgagtcccgtaatatatcgacacgctcgaaatagaatcttgatgctctgagcaaattcaaacgacaataactttttactcggatgtctgattgagtcctgtaatatatcgagacgctcaaaattgaataccgaagctctgagcagattcaaac

SEQ ID NO: 12817 - DNA, 339 bp, Glycine max
  unsure at all n locations
agcttcgataaataatttcgagcgtttctatatattacgggactcagtcagacaaccaagtgaaaagntattgtcgcttgaatatgctcagagcttcgatattccatttcgagcgtctcgatatattacgagactcactcagaccaccgagtgaaaagttattgtcgtttgaatttgctcagagcttccgcattcgagtgcaagcgtctcgatatattacgggactaaatcagacatctgagtaaaaagttattgacgcttgaatttgctcaaagcatcggtattccattttgagcgtctcgatatattacgggactcgatcagacgtctcgagaaaaa

SEQ ID NO: 12818 - DNA, 432 bp, Glycine max
  unsure at all n locations
ntagttcactgcttcaagtagtgtacgatatgttttttatgaaatttcattgcctaagagttactatcaggcgaagaagatattgtgttcaatgggtatggagtatcagaagattcatgcttgctcgaatgattgcatactgtacagacataaatttgaagaaatgtccaaatgccctatgtgtggggtatcacggtacatagtcaaggatgatgatgagtgtagtagtgatgaaaactcaaagaagggccccctagcgaaggtgttgtggtatctttcaattgttccaaggtttaagcgtctttttgctaatggaaacgatgctaaagacatcttacatggcatgcaaatgagagcaactgcgatggaatggtccgtcatccggatgattgctcctagtggaaaaggatagatcatctgttttcgaatttc

SEQ ID NO: 12819 - DNA, 284 bp, Glycine max
  unsure at all n locations
agcttcaactacgacctcattagctatcattacaccatggaggatatgtctgcctttgagaaaagtagtttgcctttcatcaattaagtgaggcagcacaagagccagcctattagccaggactttggacattattttgtagacacaccctatgagagagatgggtctatagtcattaagagattgggggctattggttttggggatgagggctatgaaggatgcattacttcctttggggaatctgccattaatgaagaattcatcanagaatctgataaaat

SEQ ID NO: 12820 - DNA, 495 bp, Glycine max
  unsure at all n locations
cctatgttggtgatatgctaagatggacgtgtggacttgactaccactctaataaagagtacaacagatgttgtgtttgatgatttacgttttctctctttcttttatgttcatatgcaatgttcatttttttctcttatttcgctatattctatctcctatttctatatatttgggatgggtgtatttgactatctcaagttcaaattgagatgagagataacaatttatctaatatctgtgtcttttttatacctgtatataataatcacattnttatactataattaaataataagataaatcgtataaactctagcacaatagatatgcagacgcgataactattactaaaaatacatatagaatttattaatcttgggtaatagttaaaaaacatcaaaagagtgtagtggagatggtgaacttttaanaagttaatagcaaaagagctgtgagttgaaatttaaaattaataaataaccattttaaata

SEQ ID NO: 12821 - DNA, 436 bp, Glycine max
  unsure at all n locations
agacacattcctctgctttcatttactggaagttcaaaggtacttcatctctctcttattttgattaaacattgtaatctttatttttatgtgtttacaacgtacattacattttcatgatagtatttttatgttacaacctctactagttagctaacaagtgtaatatattataatattgttgaattcattgttttgttggttccattggtatttattctaaatacctattcttattctataacatatatggtagtagctgtaacataaaaattagttagaataattattatagcttttcttcttaattcatattataattgtgcgggggacttactttcntttaatacatattatactatgttatattatcatagtgtgataaattatgttaatacaactggttacgtatcttttgtaatggataagtcatgga

SEQ ID NO: 12822 - DNA, 177 bp, Glycine max
gagttatatttgattgtgtaatagaacttgcatgctacgattaaacaaccagttgtcaagaacatgatgaaagccttgtactttcagtttaccgctggagatctaccattgtaccttgttgcctttacaggatactgggcttatgggtcttccacagaagtgtatttgctgaatagt

SEQ ID NO: 12823 - DNA, 425 bp, Glycine max
  unsure at all n locations
gatccttaagtcacctgcngcatgcaagcttcgataatcaatttcgagcgtcttgatatattactagactcagtcagacatccgagtaaaatgttattgtcngtttgaattgctaagagcttcgataatcaatttcgaccgtctccatatattacgggactcagtcagacaaccgagtgaaaagttattgtcgtttgaatttgctaagagcttcgataatcaatttcgaccgtctccatatattacgggactcagtcagacaaccgagtgaaaagttattgtcgtttgaatttgctaagagcttcgataatcaatttcgaccgtctccatatattacgggactcagtcagacatccgagtaaaatgttattgtcgtttgaatttgctaagagcttctataatcaatttcgagcgtctccatatat

SEQ ID NO: 12824 - DNA, 285 bp, Glycine max
atcgtctcgatgtattacgtgactcaatcagacatctgagtgagaacgttattgtcgtttgaatttgctgagagcttcaacattcaatttctagcatctcgatatatttcgggactcaatcagacatccgagtaaaaagttattgtcgtttgaattttctgagagcttcaacattcaatttcgagcgtctcgatgtattatgggactctatcagacatctgagtaaaaaagttattgtcgtttgaaatcgccaaagcttcaacattcaatttcgagcgtcttgat

SEQ ID NO: 12825 - DNA, 422 bp, Glycine max
tcacctgccgcatgcaagcttctacaaaggtgtgttcctaatttctatgagtaaagctagtgaagaagaatgtggcattcacttgtggtgaaagacaagggcaagcctttgctttactcaaagaatagctcaccaaggcacctgttctagctcttccagacttttctaaaacttttgagcttgaatgtgatgcctctggagtgggagttggagctatattgttacaaggttggcaccctattgcttattttacttgaggaataaactcaagcccaagaggtgtggcaatgctaacaagtgtctttttacaaaggagaaaatatggaggttgtctaagaggggaaatttctttaataattgtctttatttcaaaatgtcttcccttcttagctaacctcttggaggagacacttacctcctta

SEQ ID NO: 12826 - DNA, 339 bp, Glycine max
  unsure at all n locations
gacaatatctntttactcgtatgtctgattgagtcccgtcatataacgagacgctcgaaattgaatgttgaagctctgagccaattcatgcgacaatatctttttactcggatgtctgattgaagcccgtaatatatcgagacgctcgaaattgaatgttgaagctctgagccaattcaaacgacaataactttnntactcgatgtctgattgaatcctgtcatatatcgagacgctcgaaattgaatgttgaacctctgagcgaattcaaacgacaataactntttactcagatgtctgatatagtctcgtaatatatcgagacgctcgaaattgatg

SEQ ID NO: 12827 - DNA, 389 bp, Glycine max
  unsure at all n locations
atgtaatactatatttatctgatgtaggctattattgataaataatattggattaatgaagctcaatattcttagaaagataatgaagtgtaaccatacttacctttgaagtgagtgaagttctaccatatgaaaaataagattaattataattaggtatcaagacttaagaacctttatatttaggaattttgtacatttattaaagtttatcacactaatgattatgtgaaaaatcatcataaaatcaaagaattctgaagatcttgatataataaaaaaagtataataacttgaagaacgtatttattgtattgcactacacaataaatgttactatactgtagtagtgtatatattatagtngtataagatactgattttttata

SEQ ID NO: 12828 - DNA, 370 bp, Glycine max
  unsure at all n locations
ngcttaagataatggtacgganataccatatcccgtggtaccttccaagaaagataaggaccgccatctggcgagattcctagacattttcaggaaactggaaataactatgccctttggagaagctttgcagcagatgccactctactcaatgtttttgaaagatatgttgacaaggaagcacaaatacattcactatgagaatatcattgtggaaggcaactgcagtgttgtgatatagaagatccttccaccaaaacacaaggaccctggaagtatgactattccttgttcaatangtgaagtcacagtgggaaaggctctcattgactntgtagccaatatcaacttgatgccactctccatgtgt

SEQ ID NO: 12829 - DNA, 411 bp, Glycine max
  unsure at all n locations
tactaagctatttagtcctatttgattcttaattacacactagaatttcctctcctgtagaaacaaaccctntgagttgattcatataaacttcttcttctaagtcaccattcagaanaggcggtctttagatccatttggtgaagctccaaatcaaatgagccactaaagccaacacaagccacaaagagtccttcttagaaacagaagagatagtctctttgtagttgatgcaatcctatcccgcaagggcattggatagaagaactccagtagattgngccagagatgtaagagaaggccctanggttctcatgagccttangatagatttcggacccatgggctaagtatgtgcccacttatctttatacatatntgattaagatttcattanttttgggccttata

SEQ ID NO: 12830 - DNA, 454 bp, Glycine max
  unsure at all n locations
agcttggcattcccattggtggaaggaccttataagactntataatcagtctgatttccacagtatccagtagaatatggtatggaaggttggttgtggcgacaaaatcaaattttggcaagattcttgactgagtgagggctgtaagcatttcaaaaaaagattcttggcaatatggaaggaacgttagtttattaataatattcaaagaaagattctcatagtataacccgtgcagaccaaccctggatgggattcagttntcttctcttggccaagggcagaacgaaagccttgttgctagattctctgaagtggaaattaagtctgcagtttgcgcttgtagtggagataaaagcactggcccgtatggtttgaacttcaacttttatcaagtagtttgggaaattctaaaacctgatttcatcacgttcttcgatgagttcttcattaa

SEQ ID NO: 12831 - DNA, 298 bp, Glycine max
tcatttatcctatcttctacagccaatgggtgagttccgtgcaggtagtcccttaaacaatcggcctcaccgtgatagaaaatgagaatgaggagcttattcctactccggtgcagaacagttggagagtctgcattgactatacgaagttgaaccaagttaccaaaaacgaccattcttcactgtcattcattgaccagatgcttgaacacctgtcaggcaaatcttactattgtatacttgatggtttttctgggtatatgcaaaacactattgctcttgacgatcatgaaaagac

SEQ ID NO: 12832 - DNA, 288 bp, Glycine max
catgcaagcttgtgttgcacaagttggtggtattcatacaaagatgggtttgagcttatatgtcattacttagtggaattctacttttatgatgcttgagagtgcccttgtatatcgatgtgctttttgtagtcttgaatttgatgataggagctattcaagttgtcttattaatgatgaatggaagagaggacaaaaaatgtgtgaatttttgcgtcccttttttcaaatcacagagttgatatctggttcctcttacccaacgtctaatttgtaatttatgcaagt

SEQ ID NO: 12833 - DNA, 414 bp, Glycine max
  unsure at all n locations
atgacgaggttgagtcgccgctgtggctgcctcactggcttagcttcatcctctaaaagtatcctatgcatgcaggtagatgggctaatactaggaatgtctgctaaagtccatctaatggctttcttgtgcttcttgagaactatcaacaacttctcgtcttgcttagcagcaagggaggcagagatgatcactgngaaattttccttgtcctccaagtaagcatatttgagggttctggtaagggcttcaactctagtgtgggtggtggctaaacagtgggaggaaccatggtaggagaagaaaaaggttcctcagcctatacctcataaagcaagtcagaagtatatgtacctcctgcaacatggntagtgcattctgactctacaaaatcaacatcaagaggtacaacat

SEQ ID NO: 12834 - DNA, 463 bp, Glycine max
  unsure at all n locations
agcttgttcttgactcatcttctccttgaagtggcatctccaatcatctttcttccttctccgttccgctgccattgatcttcaagtagcaaaggactccattgatgaagaagattgaaggcctacaagctccacatggagctacgtcattgatgcctatagatagtctcctccaagtccccatgtagaaaagcagttctgacatgctccaactccatatcatgtcgattcataattgccatcaaactccacaatttcgtaggtgccttgatgttatagttgaagataggcatctattaatcccatanattgtggcacttatagcttcaccccagaaactctttggtagtcctacacccaaacgcatacacctcacacgctctagaatgatcctattcatcctctcagctagaccattttgtcgaggagtctatgccacaatcctatgccttttgataccatg

SEQ ID NO: 12835 - DNA, 278 bp, Glycine max
ttctcctcctcgaagctcttctctagatactgaacctggctcgcagatatacgtcgctgcttctctggttgatgaaagtactcgtccatgcactcatccccattgtcgtgcatgtcaaacgcgcggaagaaggagccgttacaccccttccctccttctgcttcaaaactcatcatggatctcgaacctgaaccagattataacaaaaacaccatccattagtcataggtcaaaaacaaaaattggtgatagagaggttatattaggttctttttttt

SEQ ID NO: 12836 - DNA, 422 bp, Glycine max
  unsure at all n locations
cacctgccgcatgcaagctnggccaaaccaaaatcagcaactttaggacataagtttctgtccaagagaatatttcccggtttaatgtcgtagtggattattctctgttggcactcttcatgtaagtaagcaatgcctctcgcagtaccaactgcgatctcatgaagcttttcgaatgataaggttgtgttttcgtgaaacaggtacttctcgagtgcaccattcaccatgtactcgtaaaccagtgctctcaagtgtctttcgaagcaaaacccatatagacgaactagattaaaatgatggacttttccaatggtacccacttctgccataaactgctcatcaattctcttgtcagaactcccacgtagaactttcacggctacgatggttccgtngctgaaacttcctttataaacaac

SEQ ID NO: 12837 - DNA, 377 bp, Glycine max
  unsure at all n locations
cgccgccacggagttntccgactatgctcttgtgtggtggaacaagctacaaaaggagagagcaaganatgaagagccaatggttgatacatggacggagatgaaaaagatcatgaggaagcggtatgttccggctagttactcaagggacttgaaattcaagctccaaaaactaacccaaggcaacaagggggttgaggagtatttcaaggaaatggatgtgctcatgattcaagcaaatattgaagaagatgaggaggtaactatggctcgatttcttaatggtttgactaatgatatccgtgatattgttgagctgcaggagtttgttgaaatggatgatttgcttcacaaagcaatccaagtggagcaacaat

SEQ ID NO: 12838 - DNA, 275 bp, Glycine max
  unsure at all n locations
agcttgaaattgaacaacggaagctctcgagataatcgagtggtcataatatttcacacagatgtccgattcggggaaataatatatcgagacgcacgaaattgaacaacggaagctctcgagaaatttgaatggtcataacatttcactcggatgttcgatccggggacataatttatcgagacgtctcgaaatgaacaaccgaagctctcgacaaattagaatggtcgtaactttttacgcgaatgttcgantcggggacataactcatctag

SEQ ID NO: 12839 - DNA, 447 bp, Glycine max
  unsure at all n locations
actatgcaaagagtatccaaggaaaatttcttcatctgacttagaatcaaactttcctaagttttcttttccattgtttaatacaaaacacttgcaaccaaaaacatgaagatgcgagatatttggtttcctaccattaaacaattcatatggagttttctttaaaatgagtcttattaaatccctatccatgatataacatatagtattaacgacttcatcccaaaaatattttggaagaggagtatcatataataaggttctagcaatttcttccaaagacctatttttcctttcaacaactccattntgttgaggggttctaggtgcagaaaagttatgttcaatgccatgtttttcacanaataaatcaaattctnntatttcanattcactcccatgatcacttctaatagatataattctgagaattttcttattttgaat

SEQ ID NO: 12840 - DNA, 512 bp, Glycine max
  unsure at all n locations
tgccgcatgcaagcttatccttattgttgtaggtgtggttcatgtctgtgtaaatagacaaataattcatttctagaatagttcattnttctttaaaacgtggtttataaagatcaaaacattttcaaatcttggttttggttcaaaacagatttttttttccctttcatttgttcaccaaaaaatgcacacgtttttaacttcatttaattattattgattaaaacattntcatgttttgatttgattcaacacacgtttgattntatttcttctttcatttactcaccaacaattggaacatatataatcgtattatataagaagggaaacacatttaaatttttgcattaatttttataanatatcntttattagaaatcanataacagtataaattaatatgaaatattgtacatttatgtaagaagatnnntgggttttaatttccatcaagaattctacagatatgctgttattataccagaaattcaggattaattaaacttact

SEQ ID NO: 12841 - DNA, 378 bp, Glycine max
  unsure at all n locations
agcttctagtccttgtggatcttcttccctcttattcttgaactacacttgtaggtttagcttgaacttcacctgtaacgtcatcaagttctggttcactcaatgtttttgtgttgatatgcatcattggcttcttgcttggatcatgtttgtccttcatccatgtgttcagctcatcaaattgcacatccctactgaaaactattcgattcgttcttggatttaagagtttgtatgaccctgtgggattatagccaacaaagatcatgtgttcactcttgtcatccaatatcttccttgtatgatcacgaatatgnttgtaacatgttgagccaaaaactctcatatgcttcacagatggtgttttccctgaccata

SEQ ID NO: 12842 - DNA, 446 bp, Glycine max
  unsure at all n locations
caagtgcttganagaatctatgacaatgcttacattgttgagctgcccggtgagtataatgttagttccaccttcaatgtctctgatctatctctttatgatgcagatggagaatccgatttgaggacaaatccttctcaagagggagagaatgatgaggacatgaccaagagcatgggcaaagatccacttgaaggacttggatgacctatgacaatggctagagcaaggaaagccaatgaagctcttcaacaagtgctgtccatactatttgaatacaagcccaagtttcaaggagaaaagtccaaggatgtgagttgtatcatggcccacatggaggaggactatatgacaccactttgcttcaatnttagagtggttagtttggctaaataatggcccaatccttgtaaaagtggctgaccaaaaatatagtttgtgtaatc

SEQ ID NO: 12843 - DNA, 433 bp, Glycine max
  unsure at all n locations
tcgcacttgataatggagacacatgaacagcgctaggcaacgacattcatggcgctccgaacaaaggtggagtatggaggattgccttgagggtccgcacttangcaatcatgaaactaagctccaaactcgaaagtggaggacacatgaacaaccctaagcaataatattcatgtggctccgaanaaggatgagaatggaggattgccttgagggtcctctcttangcaatcatggaacacagctccaaactcgaaaacggaggacacatgaatgaaaccgcaattcattcacgtggctccggaacaggatgagaatggaggattgccttgagggtcctctcttatgcaatcatggaacacagctccaatcatggaacacagctccatactcgagaacggangacacatgaatgacaacgccattcattcac

SEQ ID NO: 12844 - DNA, 462 bp, Glycine max
  unsure at all n locations
tggacttaccttgaatcaattcctttgatagcccctttgagcctattntcccctttctttgttttgaagttcattacaagccttaagtgaaaaaccatgatatcaccttacccttaaggaattntggagctttggaattgttctgggaataagctgggtgttagtgcttagctntactgagttttaaaagattggctaaaattttgttaaaacataagcacttatacaatgaaggaaagctggagttgctgcacatgatgtccaacgttatgtcaaggaatcagatcgggctgcacaatgcacaaggcaagataaaatgtcaaatgaagaattgaagctgcaggatccacgatgtcggatacaatgtccaggacatcctgcccganaatactggacacataaatctgttatatctttaacagaataatgtgcagttagcaacanaattatgcgatctatctt

SEQ ID NO: 12845 - DNA, 282 bp, Glycine max
tcggatatctgatcgagtcccgtaatctattgagacgctcgaaattgaattctgaagctgtgagctaattcaaacgacaataatgttttgcatggatgtctgattgagtcccgtaatacatcgagacgctcgaaattgaattctgaagctctgagctaattcatacgacaataaacttttgctcggatgtctgattgagtcccgtaatctattgagatgctcgaaattgaattttgaacctctgagctaattcaaacgacaagtaacttttactcggatgtc

SEQ ID NO: 12846 - DNA, 423 bp, Glycine max
ctgccgcatgcaagcttataattcaatttcgatcatctcgatatattacgggactcaatcagacatctgagtaaaaaagttattgtcgtttgaatttgctgagagcttcaacattcaatttcgagcgtctcgatgtattacgggactcaatcagacatccgagtaaaatgttagtcatttgaattagctctcagcttcagaattcaatttcgagcgtctcaatagattatgggactcaatcagacatccgcgcaaaaagttattgtcgtttgaatttgctgagagcttcaacattcaatttcgagcgtctcgatgtattacgggactcaatcagacatccgagtaaaatgttattgtcatttgaattatctctcagcttcagaattcaatatcgagcgtctaaatagattatgggactcaatc

SEQ ID NO: 12847 - DNA, 468 bp, Glycine max
  unsure at all n locations
agcctttatctatggcttcctatggtggtgatcttgttcttgactcatcttctccttgaagtagcgtctccaaccatctttcttccttttccattccactgccattgatcttcaagaagcaaagcactccattgatgaagaagatccaaggcctacaagctntacatggagctatatcatgtggtatcaagagcattttcatctangtgatgttcttttgattcctctatctttttgtttggtcaattcactataattccttgttcttcatcttcttctccatgtatctcctcaattttcttgtagtatggtgttgtttagtgtagatcaaaaaaaataaacccgataaatcttagatctacactcgctctngcatatctatggttgcaaatttatagataaactcttgaatcatgtttgtgttgatttaggtctatcatttttantataatatcttgtttgaacctt

SEQ ID NO: 12848 - DNA, 389 bp, Glycine max
tgtgttctcccttgtagaactactaactgcagtaacagttgcagcccaactattcggtagtgatgacaatagaatcatctcatcctcaaatttaatctgcactgactccaactgggcaagaatagtattaaattcattaatatgatcagttacagagataccttctctcatcttgaggttgaacaaccaacacatcaagtatactttgttggctaccgacaacttctcgtacatatctgataactccttcattaagcctacaatagtcttctcgtttacgatgttgaacgtgacattcttagctaatgtcaatctaatcatgccaagagcttgtcgattagcaagttccattcttcttgcttcatgtcgtctaacttaacccctgatat

SEQ ID NO: 12849 - DNA, 293 bp, Glycine max
tagtttaactattcacacggatgtccgattcgggcgcataatatgtcgacaggctcgaaattgaacaacaaaagctcttgagaaattaactggtaaaactgttccacggatgtccgatatcatgcgaatcacatatcgagacgctctaaattgaacaactgaagcttctgacaaattcaattggcctaacttttcacacggatgtcccatacaggctcataatatatctatacgctctaaattatacatcagaaactctcgcgacatgcaaatagtcataacttttcacactg

SEQ ID NO: 12850 - DNA, 363 bp, Glycine max
  unsure at all n locations
accttggtgttaanagttatgtatctttgaattgctcgagagctttcatgtttcaatttcgaacatctcgatatattatgcgcccgaatcatacattcgtgtgataaattatgaccaatagaatttctcgagagcttccgttgttcattgtcaagagcctctatattggatgcgcctgaatcggacatcttgagtaaaagttatgactatttgtattattaagagcttacgtgcccaattttgagcgtctagatatgtgattctcatgaatcggacatccgtgtgaagaggtatgactatttgaatttctcaagacctttcgttgttcaattttgagcgtctcgatatgtgattcgcccgaat

SEQ ID NO: 12851 - DNA, 365 bp, Glycine max
  unsure at all n locations
cgtgcctcttcacgtctggaatatgaatgtagcatatagatcctaagacccttangtgctctgctgatggctgttttccgttccaagcttcaattggagtcttgtcttttacagacttagttggacatctgttgagtatgtaaacagcaatgtggactgcttcatcccaaaatgtgttaggtagtagtctcttcttcttgagcatcgatctagccatctccataactgtgcgattctttctctcagacactccattntgttgaggagaatatgcgactgtaagttgtcgctcaatgctttcatcctcacaaaatctttcaaactcgcgagaggtgtactctttgccgcgatcacttcttagtact

SEQ ID NO: 12852 - DNA, 369 bp, Glycine max
attctcttaattgccttaagcctcaagcgtagtatcgcttgacgatgtcggcgttcacgggtgaatgtagttcctcgtcatccatgtttgtgagcacaaaggccccttcggagaaagctttctttactacgaagggcccttcatagtttggggcccactttcccctatggcttttaaggcatgagaagactttcttcagcaccaggtccccttcactgaacttgcgagggtgtaccttcttgtcgaaagtgttcttcacccgtctctggtacaaacgcccatggctcataacggctagacgcttgccttctatgagaatgagctgatcaaaatgcgcctggtcccactctgaatcctttaatctggact

SEQ ID NO: 12853 - DNA, 310 bp, Glycine max
agcttcccatagttctaattatttcttctacagtagcttgagagacctaaaaatcctcttaattctttgactgtcttaggtcttgggcactgttggattgccttaattttatcaggatctggatgcacccctttggcaaaaatcaaatgtcccacgtaattgattttggtcgtgccaaagctacattttttgtagttgagtgtcaagccgtgttcttgtagtatttgtagtgtagtgtgcagacattgaatgtgttctgaccatgtattggtatagaccaagatgtcatcaaagaaaatcaaaatgaact

SEQ ID NO: 12854 - DNA, 332 bp, Glycine max
tgccttttggctctttttttctgaacccaaatcataccacaggtttgggatcctaataacttgtgagaaaaaaatccatggggtaaattgattcaaagtaaaactcaagtaactccattttgtatcttggatctaaaacagtagcaactcctatgatcacatgaatgacactccaataagaatcaaatttgtctaacatcttttttgccattttttgaatcacttcattaggggaattgacccattcaaataaagccatcttgatctcacaaatttgaggaaaataaatgttagcagttggatattttgtgcctgaaatcatttatgtaata

SEQ ID NO: 12855 - DNA, 324 bp, Glycine max
agcttgtagcaaatgcatttctttataacttttagctcggatatccgattgagtcccgtaatacatcaagacgctcgaaattgaatacagaagctcttagcaaattaaaacgacaataactttctactcggatgtccgattgggtcacgtaatatatcgagtcgctcgaactgaatacagaaggtgagaactaattcaaacgacaatgacttttaactcggatatcccattgagtcccgtaatatatcaagatgttcgaaatggaatacagaagctgtgagaaaattcaaacgacaataactttttactcggatattcgattga

SEQ ID NO: 12856 - DNA, 403 bp, Glycine max
  unsure at all n locations
ntgagcaaattcaatcgacaataacttttttactctgatgtctgattgagtcccgtaatatatcgagacgctcggacttgaacgccgaagctctgagcaaattcaaacgacaataactttttactcggatgtctgattcactcccgtaatatgtcgagacgctcgaaattgaataccgaagctctgagcaaattcaaacgacaataactttttactcggatgtctgattcagtcccgtaatatatcgaaacgctcgatattgaatgttgaagctctgagcaacttcaaacgacaataactttttactcagatgtctgattgagacccgtcatatatcaagacgctcgaaattgcataccgaagctctgacaatactcaaacgacaattacattttactcggat

SEQ ID NO: 12857 - DNA, 334 bp, Glycine max
agcttcgataatcaatttcatcgtcttgatatattactagactcagtcagacatccgagtaaaatgttattgtcgtttgaatttgctaagagcttcgataatcaatttcgaccgtctccatatattacgggactcagtcagacaaccgagtgaaaagttattgtcgtttgaatttgctaagagcttcgataatcaatttcgaccgtctccatatattacgggactcagtcagacaaccgagtgaaaagttattgtcgtttgaatttgctaagagcttcgataatcaatttcgaccgtctccattatttacgggacttaatcagacatccgagta

SEQ ID NO: 12858 - DNA, 329 bp, Glycine max
agcttattaaaaatatgtatactaaaacaatatacatgtaacacctaaaagtttaaacaaaaaatattgcttcaaaacgctttaatttaatttattttagaaatacacatcactttttttaaccgttacttataaataataaaaacaactttctatactatttttttacaaaacaaaatgtgatagttggaaaatgctaaatagttgcatgaaattaaaataaatgcaaatgtagagtaattcaatttctatacataaataaaatgaaacttgcagtgtcacagagaaatatatggatacaacccataatagtgtgataataaacaaaa

SEQ ID NO: 12859 - DNA, 273 bp, Glycine max
agcttctaaatggatctcttcttgctcacttagtttcaacttcctttcctctccaacccgatcaatagagaagttgtaggtctttacagcccagtaggctttgtgctctatctctacaggaagatgacatgcctttccaaagacaacccaataaggagacattcctatgggtgctttgtaggcaatcttatgcgcccaaagagcatcatcctgcctagtgctccaatctttgctgttgggctgcaccatcttcttcctgatgattattattcg

SEQ ID NO: 12860 - DNA, 333 bp, Glycine max
agcttcttattcttatattagttttaaaaatattcaataattttcattctaatgatagaattcaacttgaatttttaacttatttttattgagtctcattttatcttttcccacacacaacaattcaaattttgacttgggaaaattatttttccaatgattaagcaaccttgcttgtagtcatttatacaagcaacttatgtaagcattttaaagaattcattaatttgttctaatagtattctcaggtcagttaactacaaacaattatgatttcttcaggacacacatattctccttgattctcttgaaattgaactcgttatgtacctt

SEQ ID NO: 12861 - DNA, 335 bp, Glycine max
  unsure at all n locations
ntgaaatggacattgaggtatctaaatggatctttgttaagtggattaaggtataagaagatagcacatgaggtagcaatcacaggctatgtagatgcagattttgcaggaaatgtagacacaagaaagtccttaactggatatgtgtttactttgtttggagcaacaatcagttggaaagcaaatcaacaatcagttgttgctctttcaacaactgaagcagagtacatggccctagctgaaggagtgaaagaagcaatttggctaaaaggaatggtatatgaactcggaatagcacaaccttgtgcacaattactgtgaagtcaaaggccatt

SEQ ID NO: 12862 - DNA, 372 bp, Glycine max
  unsure at all n locations
tggagaaggtggctntggaccagtattctttgtgttatataaaactggtatcctgaacttcttctattttcctttaaaactttctaaatatagcagaagattatttttcagggaacattgatagatgggaaagtgatagctgtgaaaaggctttcaaagaagtccaaacaagggctggatgagttaaaaaatgaggtggcactgattgccaaacttcagcaccgtaatcttgtaaagcttcttggctgctgcattgaaggagaagaaaaaatgttaatttatgaatacatgcccaacctcagcttggactgctttctttttgagtggaccccttacgatgttattctaaacatcttagataatcagcatatt

SEQ ID NO: 12863 - DNA, 328 bp, Glycine max
agcttctaaatttttatttgatgaagctctgataccacttgttggacaagtggccttagatatcttaagaagggagggggttgaattaagataccacaaactatttccccaattaaaaattttactcttctttaatgaaaatttcaatgcactcttattatgaattattgtaagataattcaaactaaacttccttaatgccaaagataaacaacaataaataaagaattttaagagaagagaaagtgcaaactcaggttttttactagttcagccacgccctgtgcctacgtctagtccccaagcaacccgcttgagatttccacta

SEQ ID NO: 12864 - DNA, 373 bp, Glycine max
tgcctacaagattgacttgcctagtgagtattatgtaagtgccactttcaatgtgtctgatctatctctttttgatgcagatggaggagccttggatttgaggacaaatccttttcaaggagggagtgatgaagacataaccaagggcaaggaccatgaagcacttgaaggtcccatgaccagaggcagacttaaacaagcccaacacatcatagagacaaggctggtcatttgtatagctgtcattgatgatgattgaaggcccaagtggagaaagatgaaagcccacacgcagaggctctaccaagactactaattgttgctgaaggcgcatactaacttgaaggcccaagctaaataagtgtttagttat

SEQ ID NO: 12865 - DNA, 328 bp, Glycine max
agctttgagccaactcttacgacaataaccttttactcgaatggctgattgagtcccgtaacatatcgagacgctcgaaattgaatgttgaagctctcatccaattcaaacgacaataactttttactcggatgtctgattgagtctcgtcatatatcgagacgcttgaaattgaatgtcgaagctcttagccaacacaaacgacaataactttttactcggatgtctaattgagtcccgtaacatatcgagacgctcgaaattgaatgttgaagctctcagccaattcaaacgacaataactttttacacggatgcctgattgagtc

SEQ ID NO: 12866 - DNA, 330 bp, Glycine max
agcttcagatatgttccttatgcttcatgtaaactcggccaaaatcgttaagggaacctcggatccctgctatatacaatactataaggaattccatgcaacctagctacttgcttgatgtacaaatccacgagtttttccgttctatacgatatatacaccggaataaaatgagcagatttggtgagtcgaactactatgacccacacagcatcatgtccacaactaggctagcgtcaactaaatacagaatccatacatatgctctcccagcttccattctggaagttacaatggctacatttttgctgatggatactggtgtacaga

SEQ ID NO: 12867 - DNA, 320 bp, Glycine max
acctgttcgaaagagtgtctgcccttcttgaagatgcccactgacgaattaactccttatcttcttcaagataatcactttttactcgttcattgaaattggcccattcatctacagtacattaatgacatacagtaaatgagtgcacatgtactaaagaagggtagaaatgtatggaagcatataaaatactcaccaggatatatctttttcaggtagaataaaattgatattccatcttcattttccttattgagttcctcatcagaatatacaacatcttctttgaaatatggtgtcagaacactgaagcaatactc

SEQ ID NO: 12868 - DNA, 360 bp, Glycine max
tcaaccacagcagaacaattatgacctctccaacaacagatacaaccctggatggaggaatcaccctaatctcagatggtctagcccttaacagcaacaacagcagcctgctccttccttccaaaatgttgttggcccaagtagaccatacattcctccaccaatccaacaacagcaacagccccagaaataaccaacagttgaggcccctccgcaaccttccctcgaagaacttgtgaggcaaatgactatgcaaaacatgcagtttcaacaagagaccatagcctccattcagagcttaactaatcagatgggacaatcggctacataattaaatcaacaacagtgccagaattctga

SEQ ID NO: 12869 - DNA, 459 bp, Glycine max
tataaaactcagcttcttacatagtccgcctttgcttgaccttcttttttcttaaaaacagaaacattaggcataggcaaaagatcaagaggagttagtggattaaaaccataaacaacttcaaaaggagaacaattagtggtgctatgaacagctctattgtaagcaaattcaacatggggtaaacaagcttcccaagtttttaagttcttcctcaaaactgtcctaagcaaagttcccaaagtcctattaacaacttccgtttgcccatcggtttgtgggtgacaagtggttgaaaataacaatttagtgcccaacttgctccacaaagtcctccaaaatttttttaggaacttagagtccctatcactaacaatgctccttggcagaccatggagtctcacaatctccttgaaaaacaaatcagccacatgggaagcatcatcaactgttttacat

SEQ ID NO: 12870 - DNA, 398 bp, Glycine max
  unsure at all n locations
atccaaaaaatgtgagtgccatcaccttgaggtttggcaagcaaattgaagtgcctccaccagtagtcatgatgcaagctccattggagcttgtaggcctaggatcttcttcatcaatggattcctttgcttcttggaagataaatggcagcggaatggagaaggaagagagagaggagacgccacttcaaggagaagatgagtctagaagaagctcaccaccataggaggccatggataagagcttggaggaagaaggagatgaatgaagggagagggagagaagagcacgaaattttgtgctcaaaaagagctctgaaatctgaagttaatattcaaatgatcaaagntcaaaaaaatgcacacacatgacctctatttatagcctaagtgtcaca

SEQ ID NO: 12871 - DNA, 392 bp, Glycine max
tctcgtcattatatctagcagtctttcacttgatcttgaggataagttgttgcttgttttgagaggccaaaagaagttgttgcttctcgtcattataattcttcctttgatgcatgtttggatagcctctctagagttcttgaccgatgcattgagactaaccttgttcttaactttgaaaattgtcattttatggtccatgaatgtatagtcttaggacatttggtctctaatagaggtattgaggtcaataaggccaagatcgatgttattactttttttccttacctcgcttctgtgtaggaagtactttcttttcttggacatgcatgtttttacatgagattcatccaagaatttagcaagattgccctgccattattcaagcttct

SEQ ID NO: 12872 - DNA, 327 bp, Glycine max
agcttagagaagatacattctctcaaataattcgtcaatcaactcatccactgttggaattggaaaactatccttgatagttattgcgttaagagctctataatccgtacatacccgccacgaaccatctttcttcttcacaagaattattggtgaagagaaaggacttttgctgggttgtataattccttcttgcagtatacctgccactaatttttcgatttcctctttttggctatgaggataacgatatggctttactttaactggtactgaatcttccattaatggaataaaatgatcttgtgcttgaggaggtggcaatga

SEQ ID NO: 12873 - DNA, 331 bp, Glycine max
agctttgatctaccaccttcgtctccaccatcattttagtttttctcttattttaatattagtagtactttgatttccagccgtgtatttcgctatattattatgacatttgaacaatttagtaactctttatttgcatggtgtgtttgaacaattatgaattatgttatatgactatgtgatttttctatatatttgatctagtcatgtttcttgcttcatgattagtttatatttctccatgattgttgtgtgaatgattagttgtatttgtatgtttcatacttgttacgcactttggctttttgttgatgccaaagggggagagaaa

SEQ ID NO: 12874 - DNA, 438 bp, Glycine max
  unsure at all n locations
gagtctccttacattaaaagatcttccttttttgttggaagaaaaccatcatcctccacttcactagaggaactatgagaactcttagatgactcactatccacctctccattctccaacataatcatggtccttttgttaggacattgggatgcaatatgacccttttccaaacaattaaagcatttaatggaactagttatattgggaaggggttgagtaggagaagtaggattacatcttgaagacttcctttcaagatgctgtgaagaagaaccctccttcttagaagtgtctttatccttccaatttgaaagggtagtcttcttgtaggtttgtttcctcttcaattgttgctccactttcatagtcctatgtantaagtcatccatgttgttgtagctttgaagctctacaacatcttgaatgtccctattc

SEQ ID NO: 12875 - DNA, 364 bp, Glycine max
ttcttgactcatcttccccttgacatgttttcttcttcacctttcctccttctccattacgctgcctttgatcttcaaaaaataaaggactccattgatgaagatacaaggcctacaagctctacatggagctaaatcatgtggtatcaaagcatcttcatctaagtgattatctttagttatctctatcttttgatcagtcaattcactttaattcctttctttatcgaataatccatgtatctcttccattgaggattgaggctgtttaaagtacataacaaaaataaaccgattaaatcttagatctacacttgttcttgcatttctatggttcaaaatttataaatccactattaaatca

SEQ ID NO: 12876 - DNA, 330 bp, Glycine max
agctttaagatacttcttttacttgcatgtagtgtgttagtgcttagctctaccgagtgtttaaaagattggctaagattttgttaaaacataagcacttagacaatgaaggaaagctggagttgctgcacatgatgtccaacgctatgtcaaggaatcagattgggctgcacaatgcacaaggcaagataaaatgtcaaatgatgaattgaagctgcaggatccacgatgtcggatacaatgtccaggacatcctgctcgaaaatactggtcacataaatctgttatatctttaacagattgtgcaggatccacgatgtcggatacaat

SEQ ID NO: 12877 - DNA, 402 bp, Glycine max
tcatgagagagtcttagatcagattgagagtttattttatagctatgctaaacaagccaactaatggagaaagaatgttgtctttgaacccggagattgtgtttgggtgcacatgacaaaagataggtttgcggatcaaaggaaatcaaagcttcaaccaaggggagatggaccatttcaagtgcttgaaagaatcaatgacaatgcttacaaagttgagctgcccgatgagtataatgttaattccaccttcaatgtctctgatttatctctttatgatgcatatggagaatccgatttgaggacaaatccttctcaagagggagagaatgatgaggacatgaccaagagcaaggtcaaggatccacttgaaggacttggaggacctatgacaagggctag

SEQ ID NO: 12878 - DNA, 420 bp, Glycine max
tttaaataggctcgtgggccaagccaggcttttatgtatgccgagccgagccgttaaaaaaagcctatgacaggtaatgagctcaagccttacgtattcaactcaagccaagctcaagcctagtaaagcttggcctggcttggctcattttcacccctagttgcgacataattcatacaaagcataagaataacaagctaaaagcctaagaataacctactttctcacggaacaaccgctccaattcgtgctggaatctcttttcatatgcatagtagtagtagtagtaataggtttttatacattgacatgggcttggacttgtcgtgacacccttacttaagtggggctccttctttcaatcttggttgcccactgtcttcacttgcttaagtgatgcttaaacgcctaaattggctt

SEQ ID NO: 12879 - DNA, 331 bp, Glycine max
agcttctattctcaatttttagtgtctcgatatattacgggactcaatcggacatccgagtaaaaacttattgtcgtttgaatttgcttagagcatatattctcaatttcgagtgtctcgatgtattacgtgactcaatcgaacatccgagtaaaatgttattgcagtttgcatttgcaacaagcttctgatttcaatttggatcgtctcgatctatgatgggactcaatcggacatccgagttaaaagttattgcggtttgcatttgctacgagcttccgctttcaactacgagcgtcttgatatattactggactcaatcgaacatcag

SEQ ID NO: 12880 - DNA, 345 bp, Glycine max
tgccgcatgccagcttgcgggattcagttttatttattttgccggagatgtcgatgatagaaaaagtactaccggacttgtattttttatgggcgattgaggttttacatggaggtctaagaagcaaggcattgtgacactttctactagtgaagccgagtatgtatgctgcaacttcttgcacatgtcatgccatttggctaagaagattgttggaggaacttcagttgttgcaaaaggaaagcacaaagatctatgctgataatagatctgcccaagagcttgccaagaatccggcgttccatgaacgaagtaagcatatagatacaaggtatcatttcatta

SEQ ID NO: 12881 - DNA, 331 bp, Glycine max
agcttcattaagatttttcctcaagaagcttcctcgtggcttctttgagaagctagatccttatctacccacacccctctattaactaaattaacctccttgaaaataattacgaataaaaataatgcaacaaataatcaaacatcaaacataattactaataatatataaatatatatatcagggtgttacaactctcccacccttttagaaatttcgtcctcgaaatttaccttactcaaacaaggatgggtgagcttatcgcatttaactttctaattcccatgtggcatcttctcctgatgcacctccccagatcaccttgaccaat

SEQ ID NO: 12882 - DNA, 465 bp, Glycine max
ttagaggcattatctttatggatctaaatttgaggtgtttagtgaccataagagccttatttacctgtttgataagaaagaacttaacatgagacagacgagatggttatagttccttaagggttacgattttgagcttagctatcacccaagttaagcctacgtattacctgataccttcaataaaaaatccctttaggtgtttgctttgatggttaaagagttagatatcttatagtgatttagagacatgagtttagcatgtgagatcacctttggtagcattaagttgggtatgttgatagtcactactgagctcttgagcgagatccaggagggttgaactctgactccattcttgttagcccacttagagtctatagctattgggagagagagtatttttatagtgggacttgatggagtcttgagattcaatgatagggtgtgtgttcctagtgtacc

SEQ ID NO: 12883 - DNA, 558 bp, Glycine max
ttagcaactctttctttttgtttagtcaaaacttctaatgctcttaatctctcctcatctaaatcaaccaactcatctgacatcattttccaataatggtcgattggaatgtccatttgcttttgtaccctggctgattgcaaatgtatttcgaccggaagtacagcatcatgtccataagtcagtcaaaatggggtagtattagttgattccttaggagaatttctacatgcccatagaacttgatctaacgttttattccaatttcttggcttttgggcaatgtgttttttaatcaagttaattacaatcttattggctgcttcgacctgaccatttgcttgcgcgtaatatggtgttgaggttaataattgaaagccagttttttgggcaaattcttgcatttttcgtccagtaaaaactgaaccttgatcagtggtaattgtttcaggaataccatacctataaataatatgattttgaatgaaactaattactgcttcctgatcaacatttggcaaagggactgcttccatccattttgtaagtaatcgatac

SEQ ID NO: 12884 - DNA, 522 bp, Glycine max
taacagcaataaaaagcatcaaagtaattcatagatttactcacattaactaccacaagcacgattgacagtgaaaaatcataagatttgatttaatgcctaattgcacacctgacatccagtagatcaactctaactcatgatgataagaaaggaaacatgcacaacaacaatttcattaccttcctctaatgaaagctgaattgatctcttctctaactcaacagcatgcttgctaagttcaactgaggacagggagcgaagcactgccaaaggatgagatatcagctatataaaatatcaagaacttcataagaaagcatttgagggattattttaaggttcctggacatactttggatatattcttcttgatctgattggtccaatttcctcaaaaacatctgcaattgttggtatcgctctttccagtgcaaattttttaatccctttggattaccaatggtagtagggccagaaaaagctgtcacataattggactcaactggtgctaacttcatg

SEQ ID NO: 12885 - DNA, 554 bp, Glycine max
tcacatggagctacatcatgtggtatcatagctcaccatcaaaacttggggtgttacaatcaccaccaccaccaccatcaatgtctctgccaccatcattgtccctgccaccaccatcattattaacaataccacctctgtcattgccaccacaaccactaccaaggtcattgcaaccaccaccacaccgccatcaccaatatcgctacctccaccaccccaccatcgacattgctaccacccccactatcgctgccaccacctaaagtgacaaattaccaagaagaggagttgaattggggttttgaaaactttttgatcctttgaaataaaaggtttatgatgatattttaaaattaaaaactattttgaactcacaatacaaattcaagttgttcaaaatgcacaaatatttgcatactggttcaccttaaccttgggctatgtccaatcctcatccttcaagaggagaatttatctaacacaaccaaattacaactataccggcaaacactaaatttcacatccttaacagttcctcactggactttaaa

SEQ ID NO: 12886 - DNA, 608 bp, Glycine max
  unsure at all n locations
cacagcttgatgagaaataaatgttttgcttggtacatcatctatgctacttaatgagatcattacattatttgtgtcttaataggaagtgaaggacatacattagaggaagccaaatctatcaatctatccttgagtgcattggggaagtgtattaacgcacttgcagagaatagtgcacatgtgccatttcgtgactcagcttactagattgctacgtgattcatttggaggtaagattcagtgagtataataattcatattttgtctttgttcatttatacaaagcagtaagatttggcaaaatactcttcctaactttcaggacgtgagacagatgaagtcgagcccataccggatgctctgcctaatctggaacagtaagctgcctaatgtgtctttgatgcattntagaagtctaatcggctaaaaaataaaagcaatcactccataactgatgtattttattggaaatgttaattaaatttggtttgatataaaggaaactaattaaaatggatatttgaaaaataattatttanattaaaatggatatttgaaaattaattatttaaattaaattcattttgctagtaaatctaaaatta

SEQ ID NO: 12887 - DNA, 336 bp, Glycine max
gagccaaaggatcccctcgtctcaaccctctttgacgtttgaattcagcagaaggactgccattcacaatgacagacatagaagctgaagtgaggcaacccctgatccacctaatccacctctcatgaaatcccattattctgagcatatatagaggaaaatgcccagaaacagaatcgtaagccttctcaaagtacactctgaaaaccatgccgggtctcttagatctcctaacctcctcaaccacttaattaaccaccaagactccatgtagcagttgtttcctttaataaatggtgactgcctttcattaataatctgaagcatgaactttct

SEQ ID NO: 12888 - DNA, 544 bp, Glycine max
tgttaattgcttcccttgattaagactatatcatccgcaaaaagcatgcaatatgggataatcttttgtatgtccttgataagtacatccaagactaggtgaaacaagtaaggacttaaagctgagccttgatgtaatccaatcacaattggaaagtccttatttcacctcaaggagttctcacattagtagtcaccccatcatacatgtcttgtatagcttggatataagccatgtgtacgtcttttttctccaaagtcttccacaacgtatctcttgggacacgatcataagctttttccaagtcaagagaaaccatgcgttaggatataagtagaagggaaagtcaattagcatagttagactattaataagttagttactacagttaggatattgattagttggttaagtggttagttagttagatggaggggtttgttacatataaataggggaagaaagataggaaaatgggagaacttatcattgggagattgaacattatctctttgtgaaaggagaaaatttttgtgaagggaaa

SEQ ID NO: 12889 - DNA, 493 bp, Glycine max
agctttgaaaaatgatttctatacacaagttagtcgttttatgcgactaacagtcaataattcctaattctcttctaatattaaagaagctttctttaggcaggggtttggcaaagatatcggccaattgattctttgtttcaacaaattctagtacacaatcaccctttagaacatgatctctaagaaattgatgcctaatttcaatatgttctgttctagagtgcagaataggatttttggataggttgattgcaccgtattgtcacaacggataggaatatgatcaagcattataccataatcagagagttgttgtctcatccataagatttgtgcacaacaactttcagcagaaatatattccgcttctatagttgatgaggcaacactattttgctttttgttataccaagatactagtgttgaaccaataaagaggcgagttccactagtcattatccttttgacgacacttaagcgggattctttg

SEQ ID NO: 12890 - DNA, 522 bp, Glycine max
ggagtttagagaagggagcacaaatttatgccaaaaaaggaagggtatcaagtttaataaaccaaaaccttgaggggggtcaatgtaatatactcatttttttaaccaaaatacattctcaattattttaacatttattatgatcaacatctcattatatgtagctaggatggccacggttcaaatagtgtgcaatacacttggacaattgtgttttaaacatttattattgtttataacacttgaatataaagttattttgaaaacgtacaatttaatgcgatttgtatattatgcaaaactatttatcacttacttccaaaattcatttaataagggacagttaatataatttgattcaaaattatctcatcaattttcattaattatatttttaactttgaagaaattatggttttgtttaaatattatttcttttgtttttggggattcagattttatttcttttaacgcatcaagtttttattttagtaacaattaaaaattatatttttgtaacat

SEQ ID NO: 12891 - DNA, 578 bp, Glycine max
agcttggtcttaagatatccagcttagactccagagtgtctgcaagttgaagaattcaaaactaaagcagtggtgaatttatatcaagccctagtactctcgacatattccattgctttcctcttcacagattcaatccgttcttgatcaccttgggacttctcataataaagatactttttgaataagaactgtcaatcaagacaacaaaaccctaagtcagtctgactggaaaaatacaaaacaatgtcagtaaaattggtaatatagatatgcccaaaccttcatctttttcggtgggaggctcagactaacagccctttcaaacagtgcacgaattatatctttgtctttatgttgaatttcctgtagagtacacgagagaatgttacgttcaaaataatatacaaacgcaaagaatatgagatggagaaggatatacttgatcaagataaacactccataagtctgttctctttgggtactcccgtaggattttttcaaacatggatcgccctcgatctagaaccccaactttgaattcaagaatagctgtctgagagaaaaaattaatatgc

SEQ ID NO: 12892 - DNA, 528 bp, Glycine max
  unsure at all n locations
agcttgtttaccccatgttgaatttgcttacaatagatctgttcatagcaccactaattgttctccttttgaagttgtttatggttttaacccactaactcctcttgatcttttgcctatgcctaatgtttctgtttttaagcataaagaaggtcaagcaaaggcggactatgtgaagaagcttcatgagagagtcaaagatcaaattgagaggaaaaataaaagctatgctaaacaagccaacaaagggagaaagaaggctgtcttcgaacccggagattgggtttgggtgcacctgagaaaagaaaggtttccggaacaaaggaaatcaaagcttcaaccaaggggagatggaccatttcaagtgcttgaaagaatcaatgacaatgcttacaaagttgagctgcccggtgagtattaatgtagttccaccttcaatgtctctgatttatctctttttgatgcagatggagaatccgatttgaggacaaatccttctcaagagggagagaatgatgangacatgtt

SEQ ID NO: 12893 - DNA, 446 bp, Glycine max
  unsure at all n locations
agctttgatgtttgtgttgaatgcattaaagatttatctaccaaaagcaagaaattaagtgcatatagggctacagacgtcttggaatagatacatacggacatttgtgggtcatttcatacaccttcatggaatggtcaacaatattttatatcattcatagacgattactccatatatgcatacttgtttcttatacatgaaaagtcacaatctctggatgcgttcacaacatttaaagctgaggttgaaaatctactcaccaaaacaataaagtgtgtcacatctgatcgtggtggtgaataatatggcagatatgactgttcacgtgaacaacgcccaaggccttttgctatgtacctagaggaatgtggaatcatcccatagtacaccatgtcngggtcacctatcatgaatggtgtggctgaaagacgaaacacaactct

SEQ ID NO: 12894 - DNA, 481 bp, Glycine max
tgcataacactttaactgtggggcaatctttttggatgtttatcttgaggcttgggaaatactgtccaaaatgctgagccacattgaccaatgctaatgccactttatccattacttgatactgagtttctggatcttgtgatattcaacagacgaagtatattggtcttagctcattattttcctcttggaggaggactgcacttatggcttttgcagagaccgagaagaatactatgagtctcttactagtgcttggtttcaaaagcactacaggggttgcaagcgtaactgtcaactgctgaaacatttcttcacactcatcgttccattgaaagtttttctttctaagatgattcatgattggtttggttatctcgatgatccttggtaagaatctggataatgaggttattcttctaactaacctttgagcttctttcacgtttttaagactcctcatcttcagagtggcttgaca

SEQ ID NO: 12895 - DNA, 458 bp, Glycine max
agcttcttagtctcacctgatgaattcgtggctacttcattctctcctctaatgacaatagcatcacttctggcactaaattgttgggagtttgaagccatattctcaattaaatttctggcttcagtaagggtcatgtctccaagggctccaccactggcagcatctatcatacttctctccatgttgctgagtccttcataaaaatattggagaagaaactgatctaaaatctggcgctgagggcaactggcacataactccataaatctctcccagcattcatataggctctctgcactgagtcgtctaatacctgaaatatcctttctgatggttgtggtcttggaaatacggaaatttttttctaaaaatactctcttgaggtcattccagctcgcgatggaccttggagcaaggtaatatacccagtcctttgccactccctctaaagaatg

SEQ ID NO: 12896 - DNA, 602 bp, Glycine max
  unsure at all n locations
agcttcatagggagccatgccgacggtagaatgaaaactattgttataagtgaactctatcaatggaagaaaactctcccagcttcccttctgctctaagatacatgctcttaaaaggtcctccaatgactgaatggttcgttcagtttggccatcagtctgaagatagtaggctgaactcagtctaagcttggttcccaacactctgttcaagctctcccaaaatctagaggtaaatctaggatctctatcagatactatgctagatggcacaccatgcagcctacaacctcacttatatacaaggtggtcaacttctccaaggaaaatctaatattaatgggaatgaagtgagcaaacttagtgaatctgtcaaccacaacccaaatagaatccaaacctctaggggttctatgtagtcctaccacaaaatccatggaaatattgtcccactttcattgggatatttctaaaagatgtaacttccctgaaggtctctgattgtctatcttagccttctgacagactangccaccaaaacatcatctttaaatcctgatacatcttggtagcactaggatggatgctcanattactcctat

SEQ ID NO: 12897 - DNA, 560 bp, Glycine max
taagctccttcaactgcacaagactcttattatttgaagagtatccttatggaaccttcacccgacaaagacactgacaaaaagttatcttctcctttttggacaaagtatggcaagctgggggtaagtaaattttcttcccatcagaccttggatgcaattgtgatcgtatccccatttcagcttgatcttgatgggtattcaagccatcttttgtcttgccttgaatgttaaggagcgtcccaatcacactgtcataaacatttttctccacatgcataacatcaatacaatgtctaacgtctagatcagaccaatacggaagatcaaagaaaatggacctcttcttccatatgcaactcttacttttatccttcttttgggtctttccaaatacagtattcaggtgttgaacccgctgatatacctgctcaccagtcaatgttatcggctcaatatcgtgctcttgacttccattaaaagcttttttcagtcgtctataaggatgattaggtgttagaaaatggcaatgcctactgtagactatttttcttccatgt

SEQ ID NO: 12898 - DNA, 555 bp, Glycine max
  unsure at all n locations
tcatagggagccatgccaatggtagagtgtaaactgttattataagtgaactctatgaatggaagaaaactctctcagcttcccttctgctctaagacacacgccctcaaaaggtcctccaatgactgaatggtccattcagtttggccatcagtctgaggatggtagactaaacttagtctaagcttggtccccaatgctctgttcaagctctcccaaaatctagatggcacaccatgtaacctgacaatctcacttatatacagggaggtcaacttctccaagaaaaatctgatattaatgggaatgaaatgagaagacttattcagtctatcaacaataacccagatagaatctaaacctctaggggttctaggtagtcctaccacgaaatctatggaaatattgtcccacttccactggggtatctctaagggttgtaacttccctgaaggtctctggcgttctatcttagccttttgacagactangcatgcatagacaaactcactaacctctctcttcatgttgggccaccaaaacatcatttttaac

SEQ ID NO: 12899 - DNA, 530 bp, Glycine max
  unsure at all n locations
agctataagataccccttttacttgcatgtagtgtgttagtgcttanctctaccgagtgtttaaaagattggctaagattttgttaaaacataagcacttatacaatgaaggaaagctggagttgctgcacatgatgttcaacgctatgtcaaagaatcagattgggctgcacaatgcacaaggcaagataaaatgtcaaatgatgaattgaagctgcaggatccacgatgtcggatacaatgtccaggacatcctgctcgaaaatactggtcacataaatctgttatatctttaacagattgtgcaggatccacgatgtcggatacaatgtccaggacatcctgcccgaaaatactggacacataaatctgttatctctctaacagattattgtgcagttagcaacagattagacgatctatctctatgaacgaattaaaagatgattaaagtttgaattacaaacttgaatagttcgttcagggattaaagattaaagataacaactacaagatcaaactttatcttt

SEQ ID NO: 12900 - DNA, 558 bp, Glycine max
tgacacttgtggcatttccatacatgaatacaacagttattctccatcgtgagccaaaaatatccatcttttagaatatttcgggccttggcatgcccattggcatgggtgacaaatgagccttcatgcacctcccttagtatctgctcaacttcacttgcatccatgcatcggagtaaaaccatatcatggtttcttttgtatagcacgtccctattcaaaaataagttagccaccaacctccgtagtgttctcttgtcattctcaaaggccccatgtgggtactctttgtccttaatatatctctggatattgaaataccaaggtttgccatcattttcctcctatatcaaacaacagtgagcaggctcactgtgacatctaatttctatgcatggcaagtccccatgaaggctcacctggaacatagatgacaaagtagcaagggtgttggccatttggttttcctatctggggatgtgatgaaatgatatatcatcaaagtgttccatcaactctctgaagcagccttgataaaggattaacttatggtctctt

SEQ ID NO: 12901 - DNA, 562 bp, Glycine max
agcttctaaactttatacaagaatgaagctttgataccacttgttagacaagtggcctcaaatatcttaagaataggggggttgaattaagatattacaaactattttcccaattaaaattctactttgattttaatgcaagttccaagttcccttaaagatgagtctctaaaagatgattcaaaataaacaatctgaacgtaaatgtaaagcaataataaataaagaagtttaagggaagagaaagtgcaaaactcagttttatactggttcagccacacccttgtgcctacgtccagtccccaagcaacccgcttgagagttccactatctggtaaaaaccctttacaagttctgaaccacaccaggacagtgattcctttgtgttcagattgctttacaacaagagaccctcggtctcttaattccttttcagaagtatgaagatgagaaaaagaaatctttcttgaaagagatagattgcataatgaagcactccaataattccttattgatttgcagtattttgccaacggatgttttacaagattagacatttttt

SEQ ID NO: 12902 - DNA, 561 bp, Glycine max
tgttcttgactcatcttccccttgaaatgacgtctccaatcacctttcctccttctccattacgctgcctttgatcttcaagaagtaaaggactccattgatgaagatacaaggcctacaagctctacatggagctaaatcatgtggtatcaaagcatcttcatctaggtgattttcttttgttttctctatcttttgttcagtcaattcactttaattcctttctttatcgtcttatccatgtatctcttccattgtggattggtgctgtttaaagtagataaaaaaaataaaccgattaaatcttagatctacacttgttcttgcatttctatggttcaaaatttataaatctactattaaatcatgtttttgtgtttattttaggttctatcatttttcagtcataatcttcttgtgttgaatcttagatctcaattttcttgcaaaatattgattagaaaagaaaacacaaaaatctaagtgtaaatcacactactttaaaaagcacattctatgtcggttgtttaccacattctatgtcggttataaaccgtcgtc

SEQ ID NO: 12903 - DNA, 565 bp, Glycine max
tcttagtttcagatgatgcagatgggtttgtagctacctcatgcactcctctaatgactatggcatcatttctggcgctaaactgctgggagttggaagccatcttctcaattaaatttctggcttcagcaggagtcatgtctccaagggttccaccactggcagcatctatcatacatctctccatattactgagtccttcataaaaatattggagaagaagctgttctgaaatctgatggtgggggcaactggcacatagtttcttaaatctctcccagtactcatacaggctctctccactgagttgtctaatacctgagatatccttcctgatggctgtggtcctggaagcagggaaatttttttctaagaatactctcttaaggtcatcccagctcgtgatggaccttggagcaaggtaatacagccagtcctttgccactccctctaatgaatgaggaaaagccttcagaaatatgtgatcctcttggacatctgggggtttcatggtgcagcagacaatgtgaaattcttttcaatgtttgtgcgggtcttcacctac

SEQ ID NO: 12904 - DNA, 621 bp, Glycine max
agcttgatgcctctttgtataaccctttttacttttgtgatctttccaatatcttctagcatcaagtcaagacaatgtgcaacacatggagtccaaaatatttttggtctcgtgacttgtaaaattttacctagaaagaccaaaatcaataaacttgtatgagtagtgtaacaattaaaagttataactataaaaaaaacttcattaagcatgattgaattctcacccgccaacacataattacttccattgtccgtcaccacttgaataacattcttttctccaatctcctcaacaaagctatccaaaagctcaaagatcttctgaccagtcttcatgtattcagaagcatccacactcctcacaaattatgttcccaacgaacaatttaccaaaaagttaatcaaagttctattcttccaatccgtccaaccaactgacataattgaacacccatatttgattcactcctcctcacgacccctcaataagcccttcgtgtattccaactcttttttaaggagtggaactctcaattcatgatagcttggaggctttaaatgaggaaccataggttcaatcgcctcaatcatcaacttgaaactttttgatttagcaaca

SEQ ID NO: 12905 - DNA, 516 bp, Glycine max
gatgatgcgctccctgagaagttggatccaatggggaatagagatcattatggagaagaaaggaggagaacaaggaatgatggtgttcctacaccaaacccaattgatgggattaaactcaacattcctccatttaaaggaaagaatgatccggaggcctacttggagtgggaaatgaaaatagagcatgtattctcatgcaacaactgaggaggacaaaaaggtgaagcttgccgccacggaattttccgactatgctcttgtgtggtggaacaagcctccaaaggagagagcatgaaatgaagagccaatggttgatacatggacggagatgaaaaagatcatgaggaagcggtatgtgccggctaattacttcagggactttgaaattcaagctccaaaaactaacccaaggcaacaagggggttgaagagtatttcaaggaaatggatgtgctcctgattcaagcaaatattgaagaatatgaggaggtaactatggctcgatttcttaatg

SEQ ID NO: 12906 - DNA, 564 bp, Glycine max
agctttgagcaaattcaaacgacaataactttttactctgatgtctgattgagtcccgtaatatatcgacacgctcgaaattgaatgcttatgctctgagcaaattcaaacgacaataactttttactcggatgtctgattgagtcccgtaatatatcgagaccctcgaaattgaatgttgatgctctgagcaaattcaaacgacaataactttttactcggatgtctgattgagtcatgtaatatatcgagacgcttgaaattgaatacggaagctctgagcaaattcaaacgacaataactttttactcggatgtctgattgaatcccataatatatcgacacgctcgaaatagaatgttgatgctctgagcaaattcaaacgaccatacacttttactcggatgtctgattgagtcctgtaatatatcgagacgcttgaaattgaatactgaagctctgagcaaattcaaacgacaataactttttactcggatgtctgattgagtcccgaatatatcgacacgctcgaaattgaatgttgatgcttttagcgaaatcaaa

SEQ ID NO: 12907 - DNA, 432 bp, Glycine max
tctataaaggtttttgtggactgcttgtcttatcataccactaataccttcacctacaatattgaatagtaggggagctatgggatccccttgtctcaaaccccttgtagggagaaattgcttaaaagggctgccattaatcaaaggtcatataaatgctgagtggaggcaagctgatatccaaaccacatatcacttgtttcaatctatttgctaataacttatctatcaccttgtacatacatccaatcaaggagattggtctgtagtcatcaaatgactgggggtggctggttttgggaattagagctatgacagaaacattactgcctatagggaagctgccatgcacatggaattcatctacaaatattctgaagtcagtgttcttcattttccagaattgtttaatgaatttgaagttgaagccat

SEQ ID NO: 12908 - DNA, 490 bp, Glycine max
agcttgattaagaggcatcctcaagaagcttccttgtggcttcattgagaagctagatccttatctacccacacccctctattaactaaattaacctccttgaaaataattactaataaaaataatgcaacaaataatcaaacatcacacataattactaataatatataaatatatatatcagggtgttacaactctcccacccttttagaaatttcgtcctcgaaatttaccttactcaaacaaggatgggtgagcttatcgcatttaactttctaattcccatgtggcatcttctcctgatgcacctccccagatcaccttgaccaatggaatctgtttccctcttacgtgttttgttcgcctatcctcgatcctcaaaggcaatgtttcatatgtcaaattctccttcacttgtacatcatccaattcaatcacatggtgttgcaacctacccttcggtggggcggtgacacaagactcacaggtg

SEQ ID NO: 12909 - DNA, 474 bp, Glycine max
atgatctatattagacctgctgcatgctaccttgttgacatgtagagatttacgtgatcttccgtgctcgcaagatctgtcatactgacttttgagtctcgccgacggtctataatacccgagtggctatccgtataaactttttgttgtctataagacgaaaagcctgatagcacgcacagactaacgtcttcttttgcgccctttgtataacggggccgacactctcccacacttttagaaatttcctgctctaaatttaccttactcgaacagggatggtggagcttatcgcattctactttctaattaccatggggcgtcttctcctgatgcaccttcccagatcacctagaccaatggaagctgtttccctcttatgagtgttgttcgcctatcctccatcctcaaaggcaatgtttcatatgtcacattctacttcacttgtacatcatccaattcaatcacatggtg

SEQ ID NO: 12910 - DNA, 413 bp, Glycine max
agcttgctgttaatcaccttgctgatctgacacttgatgaattcaaggattcacgtaatggattgaggaggacctataaaccgagcgcagcaacatttaagagaaatggatctaagtctgaaaacgtgaccgatgttcctgaagctatagactggagggtagaaggagctgttactgcactcaaagacctaggtgatcaatgtggtcagacaagtaacaccatgtaagaccttcattgtgctccatctttttcattaattccttcatctcgttttactatatgtttggataacacaaaacaatcaattatagcctaaaaaatgatggtcctgaaaaaatagaaatcattatttactagctctaccaagatagcataacttattatttctcactatggatcgtatgtgagcaca

SEQ ID NO: 12911 - DNA, 666 bp, Glycine max
agctgttgtgagaaccataagtgtgtgttgggaattataaaaaaaatctttgaatgtaaatagggtttgtatatagaccgtgtgacgtaaagagaaagagttccagtgcgtgtacagaaaacgtttgtcatgtataagaatatatatgtacaaagaaaggtttgcctcataaatgaccacaggtgtataattttgtgaatgaaacaaacaggaaaaagaaagaaagaccgcgaaggtcgacatgttatagttaagaagtataaatcattcgtaaagagcaaacgtatcttttggaaacaagggactgatgctaagagtttgttttccggaataaccgagataagaatggatgaattcattgaactaataaaagaacataatttggaaacattgggtctgtttgtgtaaattcccaatcgtagtatcagaatgccatatacaggatgcttgagtgcccacctggctgtagccatgactaatattgcacgttgttttaaatcatcattgtcacgcgtgccttgtggagtaatatgggagttcggcccgagaccgacaccttgacacccaaatttgtttttgcccagatatcaagattgggttcccacgataatagaccccattgaaacacaccttagactttttgaaccttgcctatcaaaaaatcct

SEQ ID NO: 12912 - DNA, 505 bp, Glycine max
ggacctataaatatcaactttaaccttgcaacaaaggagttgaccctgtatattaatattcctcttcaaactcttagaggggactttgaacgttgtttatggaggagtccgagtcacatctctgattatttttctcgagtttggtcgtggccatcaacttaaaagaaatggtgaatatgttgatgacgtgaaggtcatggaaaaaatacttcaaactttatatccaagttctgacttcattgttaccaacattgaagaaaacaaggatttaaagaccatgactattgaacaactcatgggctccttacatgctttccaagaaaaacaaataataattattaaacctaaggaggctacagagcaactactacaactcaacgtaaaggaagcaaactttgcaaattacaagagccaaagaggacgatgtcccggccaatatcgtggacgttggacatggacctggaggagaaggaagaagtggttacaacaaccactccaacaaatt

SEQ ID NO: 12913 - DNA, 549 bp, Glycine max
tgtagggttaaagtctctcgattgtcacgtgctcatgcaacaattgttagccgtggctatacgagacatcttgccaaacaaagtcaggttcacgataactcgcctgtgctttttcttccatgctatatgtagcaaagtgattgatccagtaatgtttgatgagttggaaaatgaggccgtaattatactctgccagttggagatgtattttccccctgctttctttgacatcatgattcacttgattgtgcatctggtcagagaaatcaaatgttgtggtcctgtttatctacggtggatgtacccggttgagcgatacatgaagatcttaaaagggtatacaaagaatctatatcgtccggaagcatctattgttgagaggtacattgcagaagaagccattaaattttgttcagaacacttaaagaaggctaaagctgttgggcttccaaagtgtcgacatgaggacagagtgggtggtaagggttcaagaggactgcaggtgatcactccaagtgtagaaaatttgtttgtatgtcttgaacaaca

SEQ ID NO: 12914 - DNA, 465 bp, Glycine max
agcttagcatcaatcacctagctgaccaaactaatgaggaatttatggcttcccataaaggatacaaaggttcacattggcaagggttgagaataacaacacaaacaccattcaagtatgaaaacgttactgatattccttgggcagtggattggaggcagaaaggtgatgctacttcaatcaaggaccaaggccaatgtggtatgtaacacaaaaaaaaaaaaaaaaaaacccatgctagtgacactactatatgttttctttgtgaacaccgccatgaaactaagcaaataggtttgtagctgttgggcattttcagcagttgctgcaacagaaggtatctaccaaataactacaggaaacctagtatccctctcaaagcaagaagtagtggattgtgatagtgtagatcatggatgggatggaggtctcaatgaacatgggttttgatttcttattaaaaat

SEQ ID NO: 12915 - DNA, 539 bp, Glycine max
gccttggttaacctgggaacccaactggccatgaatcaaaaatctgcacctgtcaccagactctgtggtttatgctcctctgccgaccaccacacagacctttgtccttctgtgcaacaatctgaagcaattgaacagcctgaagcttatgctgcaaacatctacaatagacctcctcaacctcaacaggaaaatcagtcacaacagaacaattatgacctctccagcaacaggtacaatcccgggtggaggaatgatcccaaccttagatggttgaatccttcacaacaacagcaacaacaaccttattttcagaatgctgctagcccaagcagaccatatgttcctccaccaatccagcatcaacaacaataacaacaacaaccccagaaacagcaaacaattgaggctcttccgcaatcttcccttgaaaaacttgtgaggcaaatgactatgcaaaacatgcagtttcaacaagaggctagagcctccattcagagcttaactaatcaaatgggacaattggctacacaattaaa

SEQ ID NO: 12916 - DNA, 526 bp, Glycine max
tgcaaagcggttttacggaccctttcgcattcttcaccgtataggaccagtggcatacgagctggaattaccctctacagtgcgcatccaccctgtatttcatgtttcacttctgaaaccctgcatcaaaacaccagacacgcaaatccttcctcttcctgtgacagtcgtcgtcgcaccttctggaaccaaaccccaagcaattattggtcgccgtacgatacctcaggagcacgattcaagggaagaagtcctggtacactgggagggacaaatgccagctgaagctacttgggaatctaaggctgccatcgtgcgttcctttcctgactttgatcttaagggcaagatctattttggagatatgggtaatgatactaataggccagaaattgagcatgaacctatctccaatagtgggccttccattgctgcaaacaggcccaaacgaattgtgaaacctcctgcacatcacaaaaattaagtttagtaataattataattaaatgatgtaatcttttaatat

SEQ ID NO: 12917 - DNA, 580 bp, Glycine max
  unsure at all n locations
agcttgattggttgtctaatgtatctcactgtacaaggccatacattgtatttgttgtaagtctcttgtctcattttatgtgttgtgcaagtgaaatgcatttaaaagtagcaaagagaatattgaggtatgtttagggcactattgattatggtgtcaaatttgagaagtgtcaagaattcaagttgtatggattctctaatagtgattgggctagatccgttgatgacatgaagagcacttcaagatactgtttcagcctaggcacaagagttttctcacgatgcacaaagaagcaagagattgtagcacaatccactgctgaggctgaattcatagcagcagtaaatcaagctttatggttgaagaagattctaagtgatttacttttgcagcagaagaacaaaactggaatttttgttgacaacgtgtgtcatgggaagactaaacatttcaacatcaagctctattttttgagaaagatgcacaaagtggagaaatgaacttaatttactgcaagtcttaagatcaactgactaacatgnttacanagccactgcctatcaacaaatttgaactc

SEQ ID NO: 12918 - DNA, 531 bp, Glycine max
tcaagctgttcaattgcttcaaattgctggacacaagggcaaaggtctgtgtggtggtcggcagaggagcataaaccacagagtctggcgacaggtgttgatttttgattcatggccagttaggttaccaggttaaccaaggcatctagtttaccttcaagcttcttagtctcagctgatgaagatgaattcgtggctacttcatgcactcctctaatgacaataacatcatttctggcactaaattgttgggagtttgaagccatcttctcaattaaatttctggcttcagcaggggtcatgtctccaagggctccaccactggcagcatctatcatacttctctccatgttactgagtccttcataaaaatattggagaagaagttgctcagaaatctggtggtgagggcaactagcacatagttttttaaatctctcccaatattcatataggctctctccactaagttggctaatgcctgaaatatcctttctgatggccgtggtcctggaatagacaatatggaat

SEQ ID NO: 12919 - DNA, 444 bp, Glycine max
agcttgtatggcacttgagaaaattcaaggtgctactataagtcaataccttcacttaagaagtcatggtgatgagttgatccaatcttacaaaaattgtacattactaatcacctatataatgagtaacaagggtgcaattttagagagattctataagtgtcttgaggcatgtaacgctgcttttgtaacaacatgtagacctttgattgggttagatggatgttttctgaaaagttattatggtggccatttgttgacaaccattgggaaagatggaaataaccaaatgattcctattgcatatgtagtagtcgaggctgaaaccatagactcatgattatggtttattgacttgttactaaaagacttggatgggattactgaaaaaaagtgggcttttatctctgaccaacaaaaagtaatatttctaaatacttgtga

SEQ ID NO: 12920 - DNA, 346 bp, Glycine max
agcttgtcaatgcattcaggaacctaacaaacaatacaagatgcatcacttccagtcctgctccaatgaataaatgtttataagtgaaacatgtatgcttattctaactcaccccatcttggagcttgtcctctacagcaggggcaccaagaagaaatacgttcttctcaatcttatctgatactgcctcaatcattatatcctgatcagcactgactacattcatggccctagagaatatactatcaaactccgtgtattcttctgcatcaaggtcacgataggccagtatcagggtactcagacccgcatcagcatactcatgcacatgctccatggctttctc

SEQ ID NO: 12921 - DNA, 523 bp, Glycine max
  unsure at all n locations
tttttctctgtgcacctacgttcctatacacgaaaaaacttttttctctatatacacacccattgaaaaactctttctctctataccgacatgggctatataaaatctctattccttttcaaagatctcttttccccttttcaatatacactcattgtttcatataaaaatttcttttcacacattgtttatatacaaaaatttcttttcttttctttatatacgaatatgacattttgtccacaacatctctttctttctctattcttggcggtatcacgacgtttttttcattttattttaggatgacgttcctacaacagatattatcgacaataatgagataagcactaacacaacgatccaaacaaaatgtatgcacaaaacaaatgacgatcgaaacaacaaaaacaaacgttagtccctcgagtcatagaaatgagataacatacaaatgataaatgatgaaacatgaaaagaatacgaatctggggatcccacngtcatgtggctccgcatgcca

SEQ ID NO: 12922 - DNA, 586 bp, Glycine max
agcttattaaaaacaagcatactaaaacatttttcttgtaacacctaaaagtttaaacaaaaaatattgcttcaaaacgctttaatttaatttattttagaaatacacataactttttttaaccgttacttataaataataaaaacaactctctatactatttttttacaaaacaaaatgtgatagtgggaaaatgctaaatagttgcatgaaattaaaataaatgcaaatgtagaggaattgaatatctatacataaagaaaatgaaacttgcagtgtcacagagaaatatatggatacaacccataatagtgtgataataaacaaaatacattttcatcccttctacaacaaaatacatgatgcaagctccattggagcttgtacgcctaggatcttcttcatcaatggatacctttgctttttcgaagatgaatggcagccgaatggagaatgaagagagagaggagacgccccttcaatgagaagatgagtctagaagaagctcaccaccataagaggtcatggataatagcttggaggatgaagagatcaatgaacggagagggagagaagaccacgaaat

SEQ ID NO: 12923 - DNA, 419 bp, Glycine max
agcttgttgttttttagctagacaactttttattactattttttattttctatatctctcttccatgttattcttttcttgctcgctctctttttgctcctttttttccatgagatatgggtgctacctaaacatacgtatatttttgtgaggtattttgctatatacatgcgtgtccaaggtatcttgctacctaaacatacatatatatgttttgagagatattattgctatatacatgcatatccaaggtatgttgctacctaaacatacatatatatattttgtgaagtatttttcctacatacatgcatatgcgaggtatctttctacctaaacatacatatatattgtgtgaggtatgactaccttacgagcttgtgcttgttttatttaaattcctacgatcatgagcaact

SEQ ID NO: 12924 - DNA, 516 bp, Glycine max
ttacagcagatgccactctactcctagttcttgaaggatatgctaacaaggaaacataagtatattcaccaggaaaacatcgtagtggaaggaaattgttgtgctgtgattcaaaagatccttccaccaaagcataaagaccctgggagtgtaactatttcttgttcaattggagaagtcattatgggaaaggctcttattgacctgggagccaacattaatttaatgccactctccatgtgcaaaaggttgggagagttggagatcatgcccactaaaatgactttacaactggctgaccgctccattaccagaccatatggagtaattaaagatgtgctggtcaaagtgaaacattttatcttcccgacagactttgtggtaatggatatctgtgaagatattgacattcctgtaatattgggaaagccattcatgttaactgcaagttgcatagttgatatgggtagaaagaagctggaaatgggttttgaagaacagaaaattgatttttga

SEQ ID NO: 12925 - DNA, 538 bp, Glycine max
agcttcttattcttatacaagatttaaaaatattcatatgtttctcattctcaagatagaactcaacttgaatttttaacttatttttattgagtctcattttatcttttcccacacacaacaattcaaattttgacttgggaaaattatttttccaatgattaagcaaccttgcttgtagtcatttatacaagcaacttatgtaagcattttaaagaattcattaatttgttctaatagtattctcaggtcagttaactacaaacaattatgatttcttcaggacacacatattctccttgattctcttgaaattgaactcgttatgtaccttaattttactgaatggggtgtgattctgtgtatgtttaggagaaaagaaaggataaaatgtcttcgtctgtggacatgattttgattatattgtcatcttaaattcaggggaagaaggaggccaaggttttcttttttcttttttaagggtatcatgattacggtggggactattcacaatattacttaattatgattattatct

SEQ ID NO: 12926 - DNA, 537 bp, Glycine max
ttgaaatggacattgaggtatctaaatggatctttgaaagttggattaaggtataagaagatagcacatgaggtagcaatcacaggctatgtagatgcagattttgcaggaaatgtatacacaagaaagtccttaactggatatgtgtttactttgtttggagcaacaatcagttggaaagcaaatcaacaatcagttgttgctctttcaacaactgaagcagagtacatggccctagctgaaggagtgaaggaagcaatttggctaaaaggaatggtatatgaacttggaatagcacaaccttgtgtcacaatttactgtgacagtcaaagtgccattagcaaatcaccaaatttaccatgagaggacaaagcacatagatgtgaaactacacttcatcagagatgtgattgaatctgaaaaggtaaaggtggagaatgttttaacagaagaaaaccctgttgatatgttcacaaagttcctatccagtgttaagttcaagcactgccttgacttgattaattttgaagatgccta

SEQ ID NO: 12927 - DNA, 147 bp, Glycine max
agcttgcaatctagtatcttccaagacttggctcgtacgcaagacgagcctagatccccgaatttcgacaaaggcttacaaggtgttctccctaagattctaaatgagataaggttcttcaggaaatatgcacaccatgttgccatt

SEQ ID NO: 12928 - DNA, 344 bp, Glycine max
actcggatgtcttattgagtctcgtaatatatcgacacgctcgagattgaatgttgaagctctaggcctattcaaacaacaataacgttgtactcggaagtgcgattcagtgacgtgatatatcgggacgctcgaaattgaatgttgaacctctgagccaactcaaacgacaataactttttactcggatgtctgattgagtcccgtattatatcgtgacgctcgaaattgaatgttgaacctctgagccaattcaaacgacaataactttttactcggatgtctgattgagtccctaatatatcgagacgctcgaaattgaatgttgaacctatgagccaatt

SEQ ID NO: 12929 - DNA, 407 bp, Glycine max
  unsure at all n locations
tctagcactggagtagatgacttgataatgtattgcttaatctcattattttaaaaattaagaaatcattttgcaattataaaatctaaggtgtctcaagttaagtagttactctaacaaatttaatattaaaatagatttgcgtataaaagtttttaagtctatgtagtattgtagaacttacaaatttaaaatatataactcatttaaacaatcatgaattgtgaatatttttgttccacgaagtcataagactgataagtgataatcatgtaaaaaaatagagtcaattaagtataaactcgtctactattactatcgctttatntatatgattaagaatcgtacccttgtcatagtttctaaaacatgtacgatatataattcgttgaagaagaatcattctc

SEQ ID NO: 12930 - DNA, 385 bp, Glycine max
  unsure at all n locations
agctntaagagtcttgtgtaagggccaccgcataccagcttctatcttttggngatccattgataccccatccttagagataatatgcccaagatatcctatcttagtttttccaaaagtacacttcttctgattggcaaacaaagagtgttctgatagtctggccaacacttgtctcaagtgctttaaatgaccctcctttgttttgttgtaaaccaaaatatcatcaaagaaaaccaagacataccttcgaagaanaggcttaagggtggcattcatagcacattggaaagttgctggagcatntgttaatccaaatggcattactagagaatcgtaatgcccttgatgagttctaaaagctgtttttggaatgtctgcctcg

SEQ ID NO: 12931 - DNA, 389 bp, Glycine max
  unsure at all n locations
gctggaactacttcacatggatntgatggngcctatgcaagttgaaagccttggaggaaagaggtatgcctatgttgttgtggatgatttctccagatttacctgggtaaactttatcagagagaaatcagaaacctttgaagtattcaaagagttgagtctaagacttcaaagagagaaagactgtgtcatcaagagaatcaggagtgaccatggcagagaatttgaaaacagcaggttcactgaattctgcacatctgaaggcatcactcatgagttctctgcagccattacaccacaacagaatgggatagttgagaggaanaacaggaccttgcaagaggctgctcgggtcatgcttcatgccanagaacttccctataatctct

SEQ ID NO: 12932 - DNA, 402 bp, Glycine max
  unsure at all n locations
aacattcatttcgaggctctcgatatattacgggacttaatcaagcatccaagaaaaaaattattgtcgtttgaatttgctcagagattcaacattcaatttcgagcgtctcgatatattacgggactcaatcagacatccgagtaaaaagttattgtcgtttgaattggctccgagcttcaacattcaatttcgagcgtctcgatatgttacgagactcaatcagacatccgagtaaaaagctattgtcgtttgaatttgctcacagattcaacattgaatttcgagggtctcgatatcttacgggactcaatcagacatccgagtgaatagttattggtcgttgaattggctcagagcttcaacattcnatttcgagggtctcgatatattaccggactc

SEQ ID NO: 12933 - DNA, 368 bp, Glycine max
  unsure at all n locations
agtttccgactatgctcttgtgtggtggatcaagctacaaaaggagagagcaaganatgaagagccaatggttgatacatggacagagatgaaaaagatcatgaggaagcggtatgtgccggctagttactcaagggacttgaaattcaagctccaaaaactaacccaaggcaacaagggggtaactatggctcgatttcttaatggatgtgctcatgattcangcaaatattgaagaagatgaggaggtaactatggctcgatttcttaatggtttgactaatgatatccgtgatattgttgagctgcangagtttgttgaaatggatgatttgcttcacaacagcatccaagtggagcaacaatta

SEQ ID NO: 12934 - DNA, 339 bp, Glycine max
  unsure at all n locations
atgcaagcttggctctggccatgagaaccatctcattcttaagatcatccatcttagaaaagatgttcctatcaagtaagttctcttctgcatcaaacaaatcaaatttgatcttctgatcatctacaccaatttccattttacctttccccatatccactacacaattggcggttaacatgaatggatgacccanaatcaatgggatgttagcatcctcttcaatatccatgacaacaaagtccatatggaatgtagattgccgcaccttgaccaaaacatcttcaatcacgccatagagccatgtaatataatgatctgccaactgcaatgtcattc

SEQ ID NO: 12935 - DNA, 442 bp, Glycine max
  unsure at all n locations
agcttctgttnntcaatttgagcatctcgatatgttacgggactccatcagtcttccgagtgaaaagttattgtcgttcgaatttgctacgagcttcggttntaaagttcgagcgtcttgctatattacgcgactcaatggaacttccgagtgaaaagttattgtcgttagaatttgctacgatcttcgattntaaatttcgagcgtctaattatgttacgagactcaatcagactctcgagtgaaaagttattgtcgttcgaatttgctacaagcttcgattntaaatntcgagcttcacgatatattacgcgactcaatcggacttccgagtgagaagtattgtcgtagaatttgctcgatcttcattttaanatcgagcgtntgatatatacggggactcatcgactttcccaaagttggaaaaatgggttattttggt

SEQ ID NO: 12936 - DNA, 304 bp, Glycine max
  unsure at all n locations
gtgacgtgctcatgcaacaattgttagcgcgggctatacgagacatcttgctgaaccaagacctgataatgataactcgcctgtgctttntcttgcatgctatatgtagcacagtcattgatccaaccatgtctgatgagttggaaaatgatgctgcaattatactctgccagccggagatgtattctccctatgctttctttgacatcatgattcactagattgtgcatctggtcagagaaatcaaatgctgtggtcttgtttatctacagtggatgtacccggttgagcgatacatgaagat

SEQ ID NO: 12937 - DNA, 300 bp, Glycine max
  unsure at all n locations
agcttcttggtgttccttttcccatcgaaattcaactgtattctttaatcatagtaaaggtgaaaccactttagttcttcctgacagattagaaatggatgttctaagaaaattcaccttacctaataatgattgaagttggttttctctacttcaattcccttntgatggataatgaaacccaagaaatcacatgcagatacaccaaaagcacattttaattgatccatctttagtctatgtggtcaagatgattatctttcgattttgattntacaacaacatcatctatataaacat

SEQ ID NO: 12938 - DNA, 399 bp, Glycine max
  unsure at all n locations
agctntactatgcagagaatatccaatgaaaatactcttcatctgacttagcatcaaattntcctaagttatcttttccattattcaatacaaaacatttacaaccaaagatatgaaggtgtgagatgtttggttttctgccattgaacaattcatatggagttttctttaaaatgggtcttattaaagccctatttaaaatgtagcatgcagtgttaacgacttcagcccaaaagtattttggaagaggagtatcatttaataaagttctagcaatctcttccaaagatctatttttcctttcaacaacaccatcttgttgaggggttcttggtgcagaaaaagtatgctcaatcccatgcttatcacaaaataattcaaattctttattttcaaact

SEQ ID NO: 12939 - DNA, 404 bp, Glycine max
  unsure at all n locations
tgctgcacaactgcaggagcaaccaataacctttctagctnttccttccgaatcaatcttgcacaactgcacagggagaaagtccgccaaaattaaagcacagaaacaatggcataaattaatccattggaaggcataaatatagaatagtcataatcaatattaaatattatccaacaaaaagtaaatgaaattctccaaaggaatgaaatcaacaaggcttactatcaatgacacttacactagcccattctccaagggtctttgcacccggaactatcagtaggctaacattgtgctntgcacaaagggccttagccagtataacttagtcaggttggtcacaatcttctgctagaacgcagttgcacatcatgcttctcaatcccttttgcaccttcatg

SEQ ID NO: 12940 - DNA, 391 bp, Glycine max
  unsure at all n locations
agctntaacattaattaaaagctcactgttgcaggtgcaagcacttatggtaattnttatgcatgtgactgaacttgagccaatttatatgaaataaaataaatgcattctcagggtttcgttttgctgaatgctacaggctttgcaaaacttttttgctgctttagtctattctgcaaatactagttttgattctctgctggagtcactactagcctgtgctaagccttctccacagtctggtggcattgctaaacaagctntgcattcaatagctcagtgtgttgctgttctatgccttgctgctggtgatcagaagtgttcatctactgtgaaaatgcttactgacattctcaaggatgacagcagttctaactcagtaaagtttttc

SEQ ID NO: 12941 - DNA, 401 bp, Glycine max
  unsure at all n locations
agcttctaaagtagtataatgaagttgactatgatgaggagttaatatctgacctccaatactagaatttgattcanaagctacagtggagatcggaatagctaacgcatcccttgcaattgcttgtagtattggctactttaactcattcaatttccaccacattaagatatcaaaatctgaacttcttggtaaaaattcctcctctaagtaatgatctaactccgttttcatagttgatgttcttgcccttttctttctttgaatgtatctatcataatcacacaatttactctnttcatcacttaaccacattggtgattanaagaactagtagaatcttgatgctctttggcttgatattccgaaaccaaatcataacacaagtttccgatcctatt

SEQ ID NO: 12942 - DNA, 330 bp, Glycine max
  unsure at all n locations
tcccctgaaccacagacttcanagcgcgactagcggtggaactcgacacagaccagatacccagacaaatgagaaaggtgttcactgttgctcgccacgacgataccgaacaccaccggcaacagggcgaggtaaacctccccagtctccttcttgcatgtgatcaaaaacgcaaaaatcgcggtgaagaacggcgtcgttgcgccgatggcctgcttgaaggaaacggcgaggtagcggagggaggtgttgccgcacacgacggagaagcagaagatggcgctgagagcgaagatcttgaggaactgcttcttggagtggatgtgctgg

SEQ ID NO: 12943 - DNA, 412 bp, Glycine max
agcttaagaaaaagatggcctcagcaaattccttatttccggaagtggaattctatcaatagacctccaatctttaatggagagggttaccactactggaaaacccgaatgcaaatttttatcgaggcaatagatctaaatatctgggaagccatagaaatagggccttatatacccaccacagtagaaagagtttcaatagatggtagttcatcaagtgaaagcataaccatagaaaaacctagagatagatggtctgaagaggatagaaaacgagtacaatacaacttataagccaaaaacataataacatctgccctacgaatggatgaatatttcacggtttcatattgtaagagtggctaggaaatgtgggacactcttccattaacacatgaaggaactacaaatg

SEQ ID NO: 12944 - DNA, 343 bp, Glycine max
  unsure at all n locations
ctttccaatctgacattcaccacagatgctgccttcttctattgtcagattggcgatgcctctaacagcacctttgtcaatgattatcttcatgcctcttaagtgcagatgtacaaatctttgatgccatattctgacttcatcttctttggaggatagacatgtggaggagtagctggcttcttgaagtgtccataagtaacagttgtcctttgatctgcttaccttcattagaacttcactcttctcatttgtcaccaagcattctgactttgtgaagcttacattgaatccttcatcacacagctgactgatgctgatcangtttgcagtcagtcccttc

SEQ ID NO: 12945 - DNA, 315 bp, Glycine max
  unsure at all n locations
ctgcagcttgaattgaatatggaagctctcgagatatacaaatggtcataacttttcactcggatggccgattcaagtgcataacatatcgagacgctcanaagtgaacaacagaagctctcgagaaattcaaatggtcataaagtttcacatggatatccgattctgtgctataatatatcgagacggtcgaaattgaacaacgactcgagaaattcatatggtcataacttcccactccgatgttcgatgcacgcgcataacatatcgagacactcggatttgatcactggaagctctcgagatatacaaatg

SEQ ID NO: 12946 - DNA, 374 bp, Glycine max
  unsure at all n locations
agcttctagatatattacgcgtctttatcggacatccgagtgnaaagttctgaccatttgaatttctcgagagctttcattgttcaatttcgagcgtctcgatatattatgtccttgaatcagacattcgtgtgaaaagttatgaccacttgaattctcgagagtgtccatcgatcaattttgagcgtctagatatattatgcgcctgaataggacatccgagtgaaaagntatgaccatttgaatttcttgagaacttccgttgttcaattttgagcgtctcgatatattatgcgccgaaatcggacttccgagtgaaatgttatggccatttgaatttctcgatagcttccgctgttcaattttgagcgtct

SEQ ID NO: 12947 - DNA, 415 bp, Glycine max
  unsure at all n locations
cttgtgtccaggaggatatcgtatgtttttgtaacattcatcaatagtgtgatntgtgaatccataatgtgtacaaaccttgcttcctttcctatcaaaactccctttatcaaagcttcattggctacttcctcctcctctagaagtataatttggaggaaaaccatttttcctataacatttgtccactatgtgattatccttaccacagtaggtacatgatttcgatgaaagtgagcctgttgcattgatgagactagtgtttcccatcagatcactattattgatctgcctttcttgttgaacaacatatgagaagacctttgctatgctaggtaatggatccatcatcactacattggatcagacaatgccaaaatgataatttatacctctaagaaactgcataacttgg

SEQ ID NO: 12948 - DNA, 317 bp, Glycine max
  unsure at all n locations
ttgtagttgtgctcgaatgtatgatctatctccgatgatatatcnacacnctaaaaagggaacaacggaagctcttaagagatgcaaatggctatcacttttcactcggatgtccgattcacgtgcatcatatatcgtgacccttgaaattgaccacagaagctctacgcaaattaaaacgggcataactattgagtctaatgtatgatcgacgcctatcatatattgtgacggtcaatataggacaactgaagctctcgagaaattcaaatcgctataacttttcacttggatgtcagaatcacgtgcatcatata

SEQ ID NO: 12949 - DNA, 354 bp, Glycine max
  unsure at all n locations
aactggatgcattggttaacttggtaacccagctggctntgaatcagaaatctgtacctgttgcaagggtttgtggtttgtgctcctctgttgaccaccatacagacctttgcccttccatgcagcaacctggagcaattgagcagcctgaagcttatgctgcaaatatttacaatagacctcctcaacctcagcagcaaaatcaaccacagcaaaacaattatgacctctccagcaacagatacaaccctggatggaggaatcaccctaacctcagatggtccagccctcagcaacaacaacagcagcctgctccttcctttccaaatgctgctggcccaagcagaccataca

SEQ ID NO: 12950 - DNA, 296 bp, Glycine max
  unsure at all n locations
ctaacccatggaagcttctaatatcttctccatattttgagacgggcgattcttggatggccttgattctcttagggtccactcggaccccacttctacctacaacanagacggagaacactatgttatctacacaaaaaggacacttctctatatctgcatatagagtgtttntcctaaggactgaaagaacttgcctgagatgacctaagtgattatgatngcagctactgtgcgctaaattatcatcaaaacaaacaactacatatctacctatgaaatcgctcacacatgat

SEQ ID NO: 12951 - DNA, 352 bp, Glycine max
  unsure at all n locations
tgtgtatcactatccactacaacagcaaaatacattgtcattggaagatgctgtgccaacactctctatatgaaacaacaacttgaacactttagggcaacccttgatcccattcctctaccatgtgacaacatatgtgctattaatctgtctacgaatgcggtcgtgcattcgatagctatacatatatagattagacatcattgtctaagagatcatgtatcanaaagtgattgttgcattgagtttgctgatagtgaacatcaactagccgacatctatattaaacctctttctggagataggttcttctttattataaatgatctaggtatcctagatggatcgagta

SEQ ID NO: 12952 - DNA, 442 bp, Glycine max
  unsure at all n locations
acttatgtgctcttatgaagtatctattttttntataaaanaaattgatacatagtcatgagttcaaacaagtgtaagatacgtgctcaatacatgtataatacattntgtctttgaactccttaaaccaaattgtggctaatttcctagaccaaatttacgctcctctatttttaaactaaagcacatttgcatttgtagtttgattgttggtatttttatctttntattatatgtgatattgacggtgatataattagattatgtagttntttttaatactttataaataaaaagctataagcttttaaaattaatctaatactaaaattagaaatactacaaaatatatttttatcaagaaaatcacagttaaaattataaaaaaaaatggtacatanatatgttatttatgtaatttacattttaaaagtaattaaca

SEQ ID NO: 12953 - DNA, 371 bp, Glycine max
tgaagcttaagaaggatcttgcttgatcgatggctcttggcgtgatcagatgacattagccaagaatgtctcgttcaacatcgtaaacgagaagactactgcagacttaataaaggcgttatcatatatgtacgagaagccatcgacatccaacaaagtatacttaatgcgtcggttgttcaacctcaagatgggagaaggtatctttgtagctgatcatattaatgagtttaatactattcttgcccaattggagtcagtgaagattaaatttgaggatgaggcgaagacattgattctattgtcatcattaccagatagttgggctgcaactgttactgcagttagtagttcaacaatggagaacacat

SEQ ID NO: 12954 - DNA, 428 bp, Glycine max
  unsure at all n locations
tctgttgttgatgcaaagtgtgtgttaagaaacaagctggaagaaataggtaaggatgtgaggaacaagcctacgcttgtggccaaaggttactcacaacaggaaggtatagattatactaaaacttttgctcttgttgctcatctaagggcgatactcattntactatcctttgctactcatcatggtatgatgttgtatcaaatggatgtaaactgtgtgttcctcaatggacttatcaaggaagaagtctatgtgaaacaaccccctgnngttgagagttctatctatcctcatcatgttttcaaacttaataaagctttgtgtggtttaaagcaagcttcttgagcttggtatgaaaagtaagttcgttttaattgaaatggtttatagaggaaaggaatactatgctattagaagatatggag

SEQ ID NO: 12955 - DNA, 466 bp, Glycine max
  unsure at all n locations
acaagattatgcttatcttaacgcagaaaatgtcatgctaatccccctgatttgagagcgaactcacgtaatctatttatgcacacgcatacatgtggaatatccaaccatttatatcaacatagaggctatccaacacattctaattgtcacacacatatacgcatttgaaaagaacatacattctcacgcccaaggcattgcgtcaaagttcacacttaattatatcctaaacatttactattacaaactacttacacacatttgaaatatatatcatacaaaatttattgtttctctcacatttatttatatgcatttggaatgctaattacatcccgcacacacctgcattcaaaaagaattccatgctatcatacatncatttaagaaaataatcattcacactctggcaggaatttcatgcnncctttatntacctatatatacataccattgaaaagca

SEQ ID NO: 12956 - DNA, 353 bp, Glycine max
  unsure at all n locations
tgcacgcttgagagtgaacaacggaagctctcgnattttaaaatggtcttaacttatcacacggacgtgcgattcaggcgcataaaatatctagacgctccatattgaacaacgaatgctcttgagagattcaaatggtcataacttgtcacacggatgtccgattcatctacataatatatccagacggccgaaattgaacatcggaagctctcgacaaattccaatggtcataacttttacaaggaagcccgattctagcgcatcacatattgagatgctcttaattgaaacctgaagctctcagaaatcaaatggtcatacttgtacacggagtccgattagacgcatat

SEQ ID NO: 12957 - DNA, 345 bp, Glycine max
  unsure at all n locations
catcaactatccatattccttaattcatttaatacatgtgaacttatttcaaggattacctaatgaagacccctatgcacacttggcaacattcattgaaatatgtaacactgttaagattgtcggtgtaccagacgaagctattaggctcagccttttctcattctcattggcaggagaagctaagaggtggatccactcattcaagggcaacagtctgaanacctgtgaagaagttgttgaaaagttcctaaagaaatacttcccagagtccaagactgcagaaaggaaagctgcaatctcttcatttcatctgtttcctgatgaatccttgagtgaagcatt

SEQ ID NO: 12958 - DNA, 344 bp, Glycine max
  unsure at all n locations
gacaaaagcaaggctcttgctcctacgtatcctctaatgaggaactcagacctacgtagttctagataacttgtgagacttgaaaaagtctccaccggaagatgctgacatctccggaaagggtgcagatgaccacattggcctttgctcatcaatcacacttggggtcactgaatgacgaggtgcggataaccgtaaggtgtctccgcgggctaccagctcttgggtcatggtaacaaatagcggtgcggtcgacaaaagcaaggctcttgctcctacgtatcctccaatgaggaactcanacctacgtagttctggataacttgtgagactctgaaaagtct

SEQ ID NO: 12959 - DNA, 398 bp, Glycine max
  unsure at all n locations
agctnggatgtctttctctttggtttgtaccttgcagtctcanaactctcctaaatatgctcctttcaattaaactctcaaaacattggttgttacatcttttaatgcgaaacagatgcaacaaaaagaaggatgctagattggggatcacgagttatgataattgatggaattgcccaaggagtcctttatcttcaccaatattccaggttccggatcattcaccgagatttaaaagctagcaacatattgttagacaccaacatgaatcctaaaatatcataatttggaatggcaagaatatttggtgagaatgaacttcaagcaagtacaaaaagaatagttggaacatagtaagtcagataaaagaatattattaatggtataagtaatcatat

SEQ ID NO: 12960 - DNA, 321 bp, Glycine max
tctcgatatgtgatgtgcctgaatcgaacattcgagttaaatgttatttcgatttgaatttcccgagagcttgcggtatttaattttgagcatcttgacacatgatgcgcatgaataggacatccgtgtgaaaagtttggaccactatatattctcgagagcttggttgatcaatttcgaacgactcgatatgttatgcgcctgaatcgtacatacgagtgaaaagtgatgaccatttgcatatatagagagctttcgttagtcaatttcaatgcgttttatatattatgcgcctgaatttgaccacgctgtgaaagttat

SEQ ID NO: 12961 - DNA, 418 bp, Glycine max
  unsure at all n locations
tgtgctattccaagttcattaatcatacctttaagccagattgattccttcactccttcagctagggccatgtattctgctttagttgttgaaagagcaacaactaattgttgatttgctntcaaactgattgttgtaccaaacaaagtaaacacatatcctgttaaggacttccttgtgtctacatttcctacaaaatctgcatctacatagcctgtgactgctgcctcgtgtgctgtcttcttgtaccttaaaccagctttcaaggatccatttagataccttagtgtccacttcacagcttcctagtgtgcgctgccaggatctcccatgaatctacttataatacttacagcatgagctaagtcaggtctgctgcanaccattccatacattatgcttccaacaccactggcat

SEQ ID NO: 12962 - DNA, 407 bp, Glycine max
tatactataaaagtcatattctattggattcgagggataaacctttataggattttcctagaatctctacctggtcaatcatgtctagtagcctttgagagtgacaagtggctttgacatataagggtatgacacctcaacatgaaaactctatccaaaatttctaaacatgaccttgtgaaaggattacccaagatcaagtatgagaaagatagagcgtgtaaggaatgcatcaaagaaaaacaaaccaaatctagcttttagtctaaaaatgcaataactacttcaaaagtcctagatttactacatgtagatctttctggctctaccaaaaccttaagcctatgttaaaagagatatgaatttgtgatagatgatttctttagattcacatgggttttattcct

SEQ ID NO: 12963 - DNA, 352 bp, Glycine max
  unsure at all n locations
cttgacttggttcattntcacccctacttttccagatacacttggatatctcctatcanatctaaggctgaaactctttatgttnttcaagcttttaaatcaatggttgaactgcaacttaatactaaaatcaaaagtgttcaatctgattggggggtgaattcagacctttctctgctctcctaacatcctatggcatctntcatagacttatctgtccccacactcatcatcaaaatggtgtggttgaaagaaaacatagacatantaattgattangccttacattattgcatcatgcctttntacccttacagttgtgaattatgcctttattactactgtctatcta

SEQ ID NO: 12964 - DNA, 429 bp, Glycine max
  unsure at all n locations
ntgatgcaacatttggagaggttaatgaaacaacgagatgatgctctctatgagaggttggatcaaatggagaatagagatcataatgaagaagaaaggaggagaagagggaatgatggtgttcctagacaaaaccaaattgatggtattaaactcaacattcctccatttaaaggaaagaatgatctggaggcctacttggagtgggagatgaaaatagagcatgtattctcatgcaacaactatgaggaggacaaaaaggtgaagcttgccgccacggaattttccgactatgcccttgtgtggtggaacaagctacaaaaggagagagcaagaaatgaagagccaatggttgatacatggatggagatgaaaaagatcatgaggaagcantatgtgccggctagttactcaagggacttgaaattc

SEQ ID NO: 12965 - DNA, 269 bp, Glycine max
gttcacgagcatgggtggctgctggtggaggcactcgaattcccctgctagacctcggggtgatgacactcacatgtttcagatactgcacatattgtccgaatattggaactgaacctgggtcatctgagtaaccatctgccccatctgaattggcagaccctgaatggaagctctttgctgttggtaacattgcatattctggatggtcatttgcctcactaactcttttaaagaaggttgaggatgggcattagatgctggttgtc

SEQ ID NO: 12966 - DNA, 424 bp, Glycine max
ataactcggatgtccgattcaggcgcataatatatcgagacattttgatattgaataacagaagctctcgagaaattcgaatggtcataacttttcacacggatgtccgattcgggcgcataatatgtcgagacgctcgaaattgaacaacggaagctctcgagaaattctaatggtcataacttttcactcggaggaccgattcaggcgcataatatatcgagacgctcgaaattgaaaaacggaagctctcgagaaattcaaatggtcataacttttaactcagaggtccgattcaggcgcataatatatcgagacgctcgaaattgaacatcgaaagctctctagaaattcaaatggtcataactgttcacttggaggtccgattcaggcgcataatatatcgagacgctcgatattgaac

SEQ ID NO: 12967 - DNA, 183 bp, Glycine max
  unsure at all n locations
cggatgttcgattgagtcacgtaatacatcgaaacgctcgaaattgaaaacagaagctctgtgcaaattcaaacgacaatacattttaactcggatgtccgaatgagtcccgtaatatatcaagacactcgaaattgagaatnaaagctctgaacaaattcaaacgacaattactttttactc

SEQ ID NO: 12968 - DNA, 389 bp, Glycine max
  unsure at all n locations
ntctcttttgtgcaactatctcatcctctttttcaggtgtatgatgaagcttgacaggttcaggtgcaggtgttgctactggtggaggcacttgaattttgttgctagacctcaaggtgatgacactcacatttttcggattctgcacagtttgtcagaattttggaactgagcttggttcatctgagtagccatctgccccatctgatttgtcagactctgaatggaagctcttgtctcttgctaaaattgcatattctggatggtcatttgcctcactaactcttctaaggaaggttgaggaggggcattagttgctggttgtctttgttgtgattgttgctggtgtattggaggaggaacatatggcttgcttgggctagcaacat

SEQ ID NO: 12969 - DNA, 330 bp, Glycine max
tcaccccataggtcagaacgaatattaccgtctatcaatcgttatctaataacttctatacgatgtctatatttgttctcgactactccatcttgctgacgggaattaggacctgatgattgacgacgaataccacctgattgcataaaataagccaactcatttttatagactccctctccattatcataccagactatctttattgcagtatcaaattgtctgcttatcattttgcgaaaatcttgaaaaacattacacacatcacttctgcgtttaagaaggtataatccagtgatacttgtacagactatcacaaatgtcacacac

SEQ ID NO: 12970 - DNA, 424 bp, Glycine max
  unsure at all n locations
ntagttgttggtgctgatgttagtatgattggaccgtttggtgtggggttctactctacatatcttattgtcgaaaaggtcattgttaccaccaagcacaatgatgatgagcaatacatttgggagtcccaagctagaggttcattgatttttacctgcttccatgtgctactcgtgccaaccatattctctatctccctctacttttccttacctctcacatgattcattataatgttatgaatcttgttatctcaattggattccttgattttcattttaatagtcgagaaactaactctgttgtattgtatagatggatattttgagtattngtgctntataataactattctttcttcattacacaactctagcatatnctggattttagcttaccagtggttgatgactctcctaaagg

SEQ ID NO: 12971 - DNA, 404 bp, Glycine max
  unsure at all n locations
tctccttgataaatgtctatccacttcaacatgtntattgctatcatgttgaactggattgtgtgctattgctatggctgctttattatcacaaaacagatccattgtatcttgagctgaacacatgacttcttctactaacctttttaaccagagaagctcacacactcatttagccatacctctaaactccgcttctgcactagatagagcaaccaccttctgttttttactcctccaagagacaagatttcctcccacaaatgtgaggtaacctgatgtgtgatttctatcagtaatactccctgcccaatctgcgtcagtataaccttgaatgtgctgatgcttttttttgcaaacattagtcctctccctggtgaagatttcaggacctttatatcaaa

SEQ ID NO: 12972 - DNA, 373 bp, Glycine max
  unsure at all n locations
gtgggtacttcacataaacttcatttatgaatccatttagaaaggcactntngacatccatctgatacagnttaatgtctttgtgtgctgcatangctaagagtattctaatagcttctagtcttgctactagtgcaaaggtctcttcataatcaatcccttggtgttgattatctccttgagcaaccagtctagctttgtttctaatcgcttctccttcttcattgagcttggttttgaacacccacttggttccaatcactgattgattcttaagaggnggaacaagattccagaactngttcttaatgaattgattagttcttcttccatagtagtcacccaagaatcttcactcagtgctttatcaata

SEQ ID NO: 12973 - DNA, 395 bp, Glycine max
actgatgccttggcacctggtactttctttcctgaaaaaaaatctacacctgttgcaagtgtctgggtcaatgttcttttgcagataccatacagatctctgtccttctttacagcaatctggagtcaatgagcaacctgaagcttatgctgcaaacatttataatagacctcctcagcagggaaaccaacaacagcagaataattatgacttttcgagcaatagatacaatccaggttggaggaatcatcaaaatctgagatggacaagtcctccacaacaacaacagcctgtccctcctttccagaatgctgctggtccaagcaagccatatgttcctcctacgatgcagcagcagtcacaacaaagaccacaagaaactgatgctcctcctc

SEQ ID NO: 12974 - DNA, 427 bp, Glycine max
  unsure at all n locations
ntatctgaagaactcgccaagcgcacttactgttctaagcgagttcatcttttgaggatgaacactcatcctcttgctgaactacctgtggctaagcgaggctgaatcgctaagcccaggtaacttaaccatttttttttgtgatagccacatgttagacaagtggcctcagatatcttaagaaggggggttgaattaagatatcccaaactacttccccaattaaaaatctatttatctttttattcaaattataaattcccttaacaatgaacttcttaaatattgattcaaataaaacaagttgaatatgaatataaagcaataataaataaaggagtttaagggaagagaaagtgcaaactcatatttatactggttcggccacacccttgtgcctacgtccagtccccaagcaacccgcttg

SEQ ID NO: 12975 - DNA, 424 bp, Glycine max
  unsure at all n locations
ggacctataaaactaagctatgctgcnacattataatagacctcctcagcagcaaaacctacaacagcataataattatgatctttcaagcaacagatacaatccaagttggaggaatcatccaaatctgagatagacaagtcctccacaacaacagcagcctgtccctcccttccaaaatgttgctggtccaagcaagccatatgttcctcctctaatgcagcaacaacaaagacaacaagcaaccaaggctcctcctcaaccttccttagaagagttaatgaggcaaatgaccatccaaaatatgcaatttcagcaagagacaagagcctccattcagagtctgacaaatcagatggggcagatgactactcagttgaaccaagctcaatcccaaaattctgacaaattgccttcacagact

SEQ ID NO: 12976 - DNA, 421 bp, Glycine max
ctagaccttgttgaagagacaaaatgatgcaatcctaccccgcatgggcattggctagaagactccaagtagattgggctagagatccaaggaaaggccctagggttctcatgagccttagggtagatttcgagcccatgggctaagtatgagcccgcttatctttgtaaatattagaataggttattccttcgtctaggccttgtattttggccattctagtagtatagggttttagccttgtatttcggggcattttgagctgtgtttgtaataaggacttttttttgttattttcatgttttttgtcatgggggtgagcttagctattatagggggtgtgtagctaagctctagcttctcatctcaaggaggtgagcttagctattatagaggtatatgtagctaagctctagcttct

SEQ ID NO: 12977 - DNA, 303 bp, Glycine max
  unsure at all n locations
ttaagtcacctgcngctgcagctntcactcgcatgtccgattaagcgcatattgtatcgagacgctagaaatctaacaaaggaagctctcgagaaattcaaatggtcataacttttcactcgcatgtccgattcaggcgcataacatatcgagacgctcganattgaacaacagatgttctcgagaaattcaaatggtcataacttttcactcggatgtcccattcacggcatagcgtatcgagacgctcgacattgaacaacgggatttgtcgagaaaatcaaatggtcataacttttcact

SEQ ID NO: 12978 - DNA, 412 bp, Glycine max
  unsure at all n locations
tcttanagaggatgaagggatacaaaaactcaaaagtagcccttttgtcaaagagctaactcaatatctctctcttaagttttagctttgatatcaataaatgaaagacaatacttgtattttcacaagttttccttgttattgcaatttttcaaaagttattctttctgttttgacatgaagcaatagttctgcctccttttgtgtctatagctttgtgtccaagatctgatgtttaggagtatgtttgtgttcctgcatttgaactcaatgtggataatctgagtgttgcagaatatctccgactcaaagaagaacttgtagatggatagtaagggttgtttgacttatctctgttatgtaaattattttctttattactattgaatgttgtatttattgcctacgatat

SEQ ID NO: 12979 - DNA, 198 bp, Glycine max
ttaatatagcgaagaattcattttgcggcgttgagatgagtagtggttggagtctccatgtatcgactaatgagtctaataccatatagaatgcctggtcttgtgcacatcaaatattgcaaactacccatcaaactcttgaaatatgtagcattcaccttttctgcttcgtcgaactttgataacttcattttgcac

SEQ ID NO: 12980 - DNA, 442 bp, Glycine max
tgctcaattgctccaggttgctgcatagaagggcaaatgtctgtatggtggtcgacagaggagcataaaccatagactcttgctataggtacagatttctgattcaaggccagctgggttaccaggttaaccaaggcatctagtttaccttcaagcttcttagtttcagctgatgaagatgaattcgtggttacttcatgcactcctctaatgacaataacatcatttctggcactaaattgttgggagttggaagccatcttctcaattaaattcctggcttcagcaggggtcatgtctccaagggctccaccactggcagcatcaatcatacttctctccatgttactgagtccttcataaaaatattggagaagaagttgctcagaaatttggtggtgagggcaactggcgcatagttttttaaatctctcccagtatt

SEQ ID NO: 12981 - DNA, 420 bp, Glycine max
  unsure at all n locations
tgtgaaatgtctcttaatcaagttcctgtgaaaagaattaaagcagaatggtgtgataagaatactgagattatgttgaaagtgtgcatagaagaggtgaatgctggaaataaacctcacaaccacttcactaagcttggttgggcaaatattgcagaaaagttcaataaggcaacaaatttgagatatgaatataaacaattcagaaataggtgggattctttgaaaaaggaatggcaattatgggctaagcttattgggaaggacacgggtcttggctgggatggggagaagagaaccattgcagctagtgatgaatggtgggaagccaaaattcaggtatttgttattcaacgaaaatagagtttttgtgcatttttggttttattntgcttcatctctgtatatcatcacaacttc

SEQ ID NO: 12982 - DNA, 267 bp, Glycine max
agcttgtgacccaatccaatgcctcttccttcgtgtccacggagatataccagcacacccctaccagcagcctcaatctgttgcatcgcaagtgcaagctgatttccacagtcacatctggcagatccaaatatgtctcctgtcagacactctgagtgtactctcacaagaacatcttgtccgtctccaatgtcaccctgttaaataaaaaatgtcagaaccacaaaatggtttgaagttgaccattgaaccaatcaatcgaagtaa

SEQ ID NO: 12983 - DNA, 434 bp, Glycine max
  unsure at all n locations
ntctgcagggaagctaagtgtgaagtatgcaatcctgcataggattggcgctgcaaactgggtacccaccaatcatacttccactgttgccacaggtttgggtaaatttctgtatgctgttggaaccaagtccaaatttaattttggaaactatatttttgaccaaactgttaagcattcagaatcttttgctgtcaaattacccattgccttcccaactgtattgtgtggcattatgttgagtcaacatcccaatattttaaacaacattgactctgtgatgaagagagaatcggctctgtccctgcattacaaactgtttgaggggacacatgtcccagacattgtctcgacatcagggaaagctgctgcttcatgtgctgtgtccaaggatgctttgattgctgaactcaaggacacatgcaaggtgctgg

SEQ ID NO: 12984 - DNA, 223 bp, Glycine max
atatctgctggctgatcattagaaccaatgaactcagtgaccatctccttggacagaagcttctctcgaatgaaatgacaatcaatctctatgtgcttagtactttcattgaaaactgggtttgaggcaatatgaagagcagcctgattatcacaatacaacttcattggcagctcttcacaagaccttcattcctgcagaaactgttaatccacatgagctc

SEQ ID NO: 12985 - DNA, 379 bp, Glycine max
tgaatcggacatccgtgtgaaaagttatgaccatttgaatttctcaagagcttccatagttcaatttcgagcttctcgacatagtatgcgcccgaatcggacatccgtgtgaaaagttatgaccatttgaatatctcgagagcttccgatgtttaatttcgagcgtatcgatatattataaacctgaatcggacctcagtgtgaaaagttatgactatttgcatttcgcgagagcttccgatgtttaatttcaagcgtatcgatatattataagcctgaatcggacatccgtgtgaaaagttatgaccatttgaatttctcaggagcttccgttgttcaattttgagcgtctcgatatatgatttgcctgaatcggaca

SEQ ID NO: 12986 - DNA, 332 bp, Glycine max
taacccacctggccttgaatcagaaatctgtatctgtcgcaaaggttagtggattgtgctcctctgctgaccaccatacagacctttgcccttccatgcatcaacctgtagcaattgagcagccttaagcttatgctgcacatatttacaataaacctcctcaacctcagcagcataatcaaccacaacagagcaattatgacgctttcggcaacagatacaaccctggatggaggaatcaccctaccctcatatggtacatccctcagcaacaacaacagcgacctgctccttccttgcaaaatgctgctggcccaagcagaccatacatt

SEQ ID NO: 12987 - DNA, 408 bp, Glycine max
  unsure at all n locations
agctntgagaaatatcaattgacaatttctntttactcggatgtccgatagtgtccatagtttatcgagacgctcgaaactcacaagcgaagctgtgagataaatcaatcgacaataactttgtactcggctgtccgattgtctcccgctgtatatcaagacgttcgatattcagaatagaagctttgagcaaaatctaacgacaataactctttactcggatgtccgaatgtggtccgaagtatatctgagacgctctgaactcacaacggaagctctgagaaaaattaaacgacgataaccttttactcggatgtccgattgtgtcccgtagggtatcgagacgctccaaattctaaacagaagctctgagcacaatctaatgacaataactacttactctgatgt

SEQ ID NO: 12988 - DNA, 343 bp, Glycine max
  unsure at all n locations
gagcaaattcaaacgacaataactttttactcgcatgtctggntgagtcccatattatattgagacgctcgaaattgaatgttgaagctctgagcaaattcatacgactataaccttttactcggatgtctgattgagtcccgtaatatatcgagacgctcgaaattgaatgtttaagctctgagcaaattgcaacgacaataactttttactcggatgtgtgattgagtccctgaatatatcgagacgctggaaattgaatgttgaagctctgagctaattctaacgacaataactttttactcagatgtctgattgagtccagtaatatatcgagacgctc

SEQ ID NO: 12989 - DNA, 348 bp, Glycine max
atgcagcttgtgggggacatgttgacatgtttttttatctgacatttatctttaaaattgcctctatctattttcagatggtgaatgcctctaacaacaccttagacaatgattatcttcatgcctcttagaagcagatgtcaaaatctgtgatgccctattctgacttcctctgctttggaggatttacatgtggaggagtgactgtgttcttgagatgaccataagtagcggctgtacttcgaactgctgcccctcattaaaactttactcttcttattagtcaccaagcattctggcttggagaaggatacattgaatccttcgtcacactactgactgatgctg

SEQ ID NO: 12990 - DNA, 198 bp, Glycine max
atttcgagtgtctcgatatattatgcgcctgaatcagacctccgaatgaaaagttatgagcatgtgaatttctcgagagctacctatgttcaatttcgtgcgtctcgagatattatgcgcctgagtctgaccttcgaatgaaaagttatgaccgtctgaatttctcgagagcttgcgatgatcaatttttagcgtctt

SEQ ID NO: 12991 - DNA, 300 bp, Glycine max
  unsure at all n locations
tagcttggaacatattatatcaatccgaggcctctcttaagatntagacaaaatatctgctagttgattatttgagctgacaaactctgtagctatctccttggacagctacttctctctcacaaaatgacaggcaatctctatatgctcgggtctctcatgaaacactggaatagaggcaatacggaaggctgcctgaattcacaatacaacattattggctgaacttcacagaattttagctctagaataaattgcttgatccacactaatttccacgtgactgatgccatagccctg

SEQ ID NO: 12992 - DNA, 292 bp, Glycine max
  unsure at all n locations
acttgtgaaagatagtcatgagggtgggctcatgggccactttgggatagacaagacgcctttcttactcaaagaaaagttctattggccccatatgaagaaagatgtccataagcattgcactacgtgtgtggcttgtttacaagccaagtctanggtgatgcctcatgggctatacacacccttacccatcccctctacaccttgggtagacattagtatggaattnttcttgggcttcctgaacccaaagaggtgagactctatctttgtggggggatagattagcaag

SEQ ID NO: 12993 - DNA, 411 bp, Glycine max
agcttggaacatatgaaatcaatccgaggccttcttatagatttagtcaaaatatctgctagttgattatttgagctgacaaactctgtagcaatctccttggacagctacttctctctcacaaaatgactgtcaatctctatatgcttggttctctcatgaaacactggattagaggcaatacggagggctgcctgattatcacaatacaacttcattggctgaacttcacagaattttaactctataataagttgcttgatccacactaattcacacgtgactgaagccatagccctgtattctgcttctgcacttgatctggcaacatgattctgcctcttgctcttccaagagacaacatttcctccaataaatacacaatattctgtagtagaacgtctatctatg

SEQ ID NO: 12994 - DNA, 395 bp, Glycine max
  unsure at all n locations
tccgaaacaaaacacaaaaccaagcaattcgaaacataatccatcatcaacaccaccgctaccaccatcaatatcttctcatgggtgggtggctttattggtatttgggcattttaattcacacacttcaattctcgtgttcagtcagaaccgtccatggcttgatcccacaatccccaatccaatgcagcagttcaggctgcaccctccgcaactcctacggcgcgtggggcgaccgaaaagactgttctgccctcaacgtgacatacccaacaaccgaagaacagctccgttcggcagtgtcctacgccgtcagaaacaacctcaaagtcaanggttgtaccagattctccacaccattcccaattatcatgcccacatgaaaatacaacaac

SEQ ID NO: 12995 - DNA, 472 bp, Glycine max
  unsure at all n locations
agcttgcatctacatgaatgactcttaagggaaaatggatttgaatgaagatcaaaatactttaaaaaagtatatataacattaaattttttaaagcactttatgaaataaccttaagcaagtaattcacatatcacattcaaaatcatgcataatcatttaaaaaaatagtcattgtatatattcaattatatcaaaataatcaacacaagtattgaagaataaagatcacagacattatctaatttttaaaaaaattcatgctttgagaaagaaaattaactcaatcaaaacatataaacacatactcacaatttcaatcaatcaagacaaacaaataaaatttttgttagtcatcatataacaagttaattgaaaggaaagtttcaaccaaattaattntaaaagagaatggtgttgatgttacctttttcatgatttaagtgcctagatcttcanagatggaagtcat

SEQ ID NO: 12996 - DNA, 359 bp, Glycine max
cttctccattccattctgcgtggaaatagacacctccggcgtaggaatgggtgcagttctatcccagaagaaccacacaatcgccttcttcagcaaacccttctgttctaagctccttcgtgcttccacttatgtcagggagcttgtcgccattaccaccgcctttaaaaagtggagacaatacttattaggcaatcctttcactattctcacagaccaccgtagcctcaaagaattaataggtcaggccattcaaacacctgaacagcaatgctacctggcacgattactaggctatgactatacaattcactatcgtgtcggaagatccaatgcagcagtcgatgccctctcacggt

SEQ ID NO: 12997 - DNA, 471 bp, Glycine max
  unsure at all n locations
gcttcattttggttntcaaaatcatctacaataactaagccatagtaattaccacccaaactcatagttcttgaaggaccaaataagtctatgtgaagtagttcatggggttttgaagtagaaacgttttttcctttgaaaagaatttttaacttgtttccctttttgacacgcttcacacaattttttttttcaaacttgagttttggaataccaattactaagtcctttttaactagatgattgaggtgatgcatgtttatatgtgcagctctacgatgccataaccaagaattatcaatcttacttaccaaacaactaagtttatgaaatgatgcatgttcaatattcaacatgtagatattacctatccttttaccaatgtgagcaacctcaccgaacatagcttcactaataagacaacaattcttggttgaattcaatttgaagcccttgtcacatagttgacta

SEQ ID NO: 12998 - DNA, 334 bp, Glycine max
  unsure at all n locations
acaagtatcatactctgcctgttccagataatttgaagcctaaagaggaatgtggattgcattaactgacaagtatttctaaaaaaagaaagaaaatagcaagattgatccatatatacatgcacagtttgtgaacttagaccatcacaatttatactcactttggttactgctcgtagaacaaagagaaaagtgaaatacaaatntctaacacgatcagggtatcttaggactcggtcatacatcaaagtaacaaagaaatgttgcatagtgaaatgaaattgtgagagcaaattgagaaagaatagataataattattaaccactgggaggg

SEQ ID NO: 12999 - DNA, 502 bp, Glycine max
  unsure at all n locations
tgagttcttcttcatctcttccncagacttatcctatcctatgccacccatgtaacttgttgcaccaggaacttggagcatccactacaagaagcgaaagtaaagggtaaattgatttgatcaaagctactatagattcagagtattactaagtactaacaaggtagatacatacttgagcaaccttgattgaattatgagtggcaccttccagcacacaaacaaaaaaaaaattgtagaagctgtcattatgaaatatgcacttccactgttcattntataaagtttgcttatgatatttaaatattaaagcaattatataaaatccaatactccggatctaatgcaatacctccaacaatgttctccacattataatatttagccaattcttgatacctgagacaattgtgctgatcacataactatagaacgaataagagagatctaaattctatcaaataggagaccgatatcccttcattattgaatgagttgtact

SEQ ID NO: 13000 - DNA, 457 bp, Glycine max
  unsure at all n locations
agcttgtagattaattggcatacgaattcatcttctactgaggtcgcgagtatccaaattcatctcctatagattntgagtataggcccagtacttaaatcttaataatatattttaaaacataatattcatatttcatctctttaaagttagaagtaatatttaaaattaatagatagagcagctatgtatgtgtgtgtttgtttcatgagattagtgtgttatttatccaacattttaatctcttcgatgtttctaaatcataattaattgtctcaactgcatggatgtacttaaaaaacatatttgcttataattataaatatcaaacaatcattatacaatatataaatagaggaattaaaacaatcttatgaaagggcctttaattaacatacttggctagaataaaaatttctcctcacatttataaaggtaaaactgtataattatcata

SEQ ID NO: 13001 - DNA, 299 bp, Glycine max
  unsure at all n locations
agctcgatttcttataatgaaagagaaagaatattttcttgctggccttatagtatctagttgggaccccagcagctgaagtacatgacatttctgaaggactcctctgnatgctttggcttctcatgatttagtgttgtggagagcatagcagaagcagaaagcctgttagcctgagagaatgagccaaaatgggttttgagatggtgttgaactgatcttatagcattggtccacctgcatatgccctgttctttcaaggcctccaccactccatgctctaattcctgatgaactca

SEQ ID NO: 13002 - DNA, 463 bp, Glycine max
  unsure at all n locations
gagaacaatgacaattgaagaatcaattcatgcttcctttgatgagtctaatgctatttctccaagaaaggatattntatatgatattacagaatctttagaacaaatgcacattcatggacaatattctaaaggaaaaggagaaggaagcaatgaagatccaccaatagaagtcaaagcaaataatgattttccaagagagtggaaaacttcaagagatcatccccttgacaacattattggtgacatctcaaaaggggtaacaactagacactctctcaaagatntatgcaataacatgngctttgtatctatgattgaacctaanaatntaaatgaggccataatagatgaaaaatggataatagctatgcaggaagaactaaaccaatttgaaagaaataatgnttgggagttagttgagaaacctganaactacccaatcatttgaacaaaatgggtg

SEQ ID NO: 13003 - DNA, 445 bp, Glycine max
agcttgaacgaatataagatacatcttcttcatctttggtgattcttgactccatctcattgaagcgcatatccacttgtaattccaaagtgtcaaacctttcaccaacaaaggtttgaagaccatcaaacctgtccaaaatctttgaagtgttgaaggaaaagggtaacaagatgaggctaaagcaatggagcattcaatcgcaatgccttatgcatgcgatatctaacaagatgtgcccaatcaatttgtagacctttatgaaaggcccacataacaatgagatcttcttcatatacctgagcaaggtttgaagatctcggaagcaagatgcgaacaattagttaatgaaggatgcgactttcaaaagccaatgaaccggcaagaaagctttcggtcatatccgcttggttggtgcaaaccaaccggtgggcatcatgtacag

SEQ ID NO: 13004 - DNA, 476 bp, Glycine max
  unsure at all n locations
tctctgaggtagaagttacttggaatgctacctgtcatagcattatcatactattaagctcagaaggaatttctccatgtagtttgtttccaaccaaattcaggtatgtcaagttagaaagatgactcaaagctgttgggattgatccagataaactgttattggccaaattcagaattttcaaagatttaagagatcacttagaggaaggtaagtctttttcaagcatgttgtntgatgctgcaaangtttggagctcttcacaaccttcaatctcttcaggtatgtggccattaatgctattcatttgtacatcaagagatattagatgcttcaatttaccaattccaaagggtatgcttccatttaagtggcagtatcctagagccaacacttttaattcactcatgtttcaacactacgtggaattcacctgtcgcatgttgctcctattctagaactcgcactcctcaagt

SEQ ID NO: 13005 - DNA, 439 bp, Glycine max
  unsure at all n locations
atgggagtnttganagcngtcttgtnagcccataaggcgtaatctatcttcacagtccaatctttccttgaggatgcaacaatcttctctagaattctctttagctctctattagacacctttgcctggccatttgtctggggatgatacggtgaagccaccttatgtttgacattataatgccccaatacctaatgtagaaatgtgaagccccatcactaattagcactctgggaacctaaagcgagaganaatgtttttcttcaggaacttgatgacaatcttggcatcattctttggtgcagccacaacttctacccatttggacacataatcaacagctaccaagatgtactcatttccatataaggatggtagagggcccacaatatcaataccccaacagtcanatacttccatttcaattatgttctacaat

SEQ ID NO: 13006 - DNA, 459 bp, Glycine max
  unsure at all n locations
agcttcatgcttaagtatgtatggcaaaacttctttactgttgttcaagacatacaagtgagcttgtaataaatcttctagacttggagtgatcacatgtagtcctcttgaacccttaccacccactctgtcatcatgccgagacttaagaaggccaacaggtttagccttctcaatgtattctgaacaaaattcaatggcttcttctgcaatgtacctctcaacaatagatgcttctggatgatataaattctttgtatacccttttaagatcttcatgtatcgctcaaacgggtacatccaccgcaaataaacaggaccacaacatttgatttgtgtgaccagatgcataatcaagtgaatcatgatgtcaaagaaagcagggggagaatacatctctaactggcacagtataattgcggcctcatttccaactcatcanactgacggatcaacgac

SEQ ID NO: 13007 - DNA, 382 bp, Glycine max
  unsure at all n locations
aagaccttacatcatttatgaaatgcatattattaccaaatatcaatatgtcatccacatacatacattaaatgacacatccactataatcaaattgtntcacatacacacatttatcactattatngagttgaaaatcatatgaaagaacaacttgatcaaactnnttgtgccattgctttggagcttgtttcanatcatataaagaattaacaagtttgcaaactttcttttccatacctggctctacaaagcctttgggctagctcatataaatgttttcttttaattcaccattaaaaanatagcttttacattcatttgatgaatntccaaattanaaatacaagcaagtgcaattaaactctaatatagtaattta

SEQ ID NO: 13008 - DNA, 418 bp, Glycine max
  unsure at all n locations
tattatgctcttgcanaatcctcctcatgttcatttttgggttcatttcagtgagttnntttttttttttgtgagcatcaatgtatggaatcacctctgttgtattgtttaatacatatagatgcgcttgtgagacttcgtgctgagtcattgtgataacgttgaatcctcgtgtacccttaccccccggtgtccgaccatggcgactttcgggcaggccgacgggttgagcacattcagtgtactgggagcaaaactcaatacactcttcagtaacatacctttcgacaattgaagcttcgggtcggtgtagattcttcgtatacccctttaacactttcatgtaacgttcaattggatacatccaacgttaganaacaggcccacacattatgatcttcctcactacatgaacaat

SEQ ID NO: 13009 - DNA, 491 bp, Glycine max
  unsure at all n locations
tcaagaattaatgggctcatcatactacttgttccncgaatgcaattcaattaataggcctcacatntttaatggagtgggttaccactgttggaaaacccacttgcaaatcttcatagaggctatagatttaaacatttgggaagccatagaaatagggccttatattcccaccatggttgctggaaatacaacaatagaaaagcctatggaagattggagtgaggaagaaagaagactagtacaatataacttataagccagaaacataattacatctgccctatgaatgaatgaatactntatggtatcaaactgtataagtgcacaggatatgtgggataccctacaagtaacacatgaaggcacaacagatgttataagatctangatatacacattaactcatgaatatgaactatttatgatgaatgcaaatgaaagtatacaagacatgcaanataggttcacacacatagttaatcatcttg

SEQ ID NO: 13010 - DNA, 368 bp, Glycine max
  unsure at all n locations
cgttcctaatttctctacaattgcatcacctctcaatgagctggtgaagaagaatgtggcatttacctcgggtgaaaaacaagagcaagcctttgctttgctcaaagaanagcttactaaggcacctgttctagctcttcctgacttttctaaaacttttgagctagaatgtgatgcctctggagtgggagttggagctgtattgttacaaggtgggcaccctattgcttattttagtgaaaaacttcatagtgccaccctcaactaccccacctatgataaagagctntatgccttaataagagccctccaaactttgaacattaccttgtttcaaggaattgtcattctagtgatatcaatcactt

SEQ ID NO: 13011 - DNA, 379 bp, Glycine max
  unsure at all n locations
atttccacacatctgagcttcatcaagtggcgtatttcccatctgtctttggtaaaaacactagctcctccttctaatagcaactttgccatgaaatataaatcttcagctgcagcaatctgaagaggaacttggaaatcataatcttttaagttaggatccatgccattggataaaagtcttttaagataatatgaatctccccttgcaactgcaatacacaaaaaactaccaacattntcaatcttcatagaggccccttatccaacaagtaaagaagcaataatagggagcgagagttgtgaacaatgtgttgcatgaccaagaccttgacggccgaacatcactgtccacgaagcgcaaacccgcgctgatcatg

SEQ ID NO: 13012 - DNA, 446 bp, Glycine max
  unsure at all n locations
tgcaagctttganaaattcanatggtcataactnttcacacatatgctagattaaggcgcatcgcatatagagagactcgaaaatgaacaacggaagctctcgagaaattgaaatggtcataacttttcacactgaggtccgattcaagcttataatatattgatatgctcgaaattaaacatcggaagctctcgagatattcaaatggtcataacttttcacatgaatgtccgattcgggcgcataatatgtcgagaagctcgaaattgaacaacggaagctcttgagaaattcaaatggtcataacttttcacacggatgtccgattcaggcttataatatatcgatacgctcgaaattaaacatcggaaactctcgcgaaatttatatggtcataacttttcacacggatgttcgattcgagcgcataatatgtcgagaggct

SEQ ID NO: 13013 - DNA, 466 bp, Glycine max
  unsure at all n locations
tgcctagagtttatttaaaaaatgtntntggatgtaacacctataanagaacattttcgaaaaaaaaatttatgatgagaagaagttcgtattgaagttgggattagaggctaagaggattgattgttgtgtggatggttgcatgttgtaatgatggagcgctaactaaatgcaagtttcgtaacaagcccaagtatcgtgcgaagactattggaacaatcattaaaaaaccagttccagtaaaggcaatgttctattttcttgtaataccaaggttgcagagaatatttgcattgatgcanattgcaagccaaaagacatgacactatgagaatagaagatattcagccatgttacgttatccctcttttggtgaagcctagagacactttgatcaggtacattgcagattntctattgatctgtggaatgtgcgacttagttatacatagatgaatttaaacat

SEQ ID NO: 13014 - DNA, 371 bp, Glycine max
  unsure at all n locations
gctctcgagaagttcanatcgttataacttttcactcggagatccgattcacgcgcataataacgtgacgcttgaaatagaactatgaaagctcttgagcaattcaaatggtcacaacttttcacacgaaggtcagattcacgcgcataatatatcgagacgctctgaaatgaacatcgaaagctctcaagaaattcaaatggtcataactcttaactcggaggtccgattcatgcgcttaatatatcgagacgcttgaaattgaactatggaagctcctgagccattcaaatggtcataactcttcactcggaggttcgattcacgcgcataatatattgagacgctccaaattgaacaacggaagctct

SEQ ID NO: 13015 - DNA, 418 bp, Glycine max
agctagaagaaataagggattaagctttctctattggctgaagcagattacatacctctcgaggcatgagcgtcttgggaataactctgcaagagacaacatgacaaatatctcatcaatggtgaaagagaccaacaaaagcaaacacagtggttactaattgagggtgaggtcctattcctgcctttttcccaacatctgtgtgggaaaaaagagaaaggggaattataaaaagagacaaaagtgaagagtgtttatgttacttacccaatgacatggcgaccgccatcatgaacagcttgtgatactatacccattagacctatgctttctcctccatacaccagatcgatgtggcttgagaccttaattacaacaccattcaaaaaacaatattaatcagccttgaatattaaac

SEQ ID NO: 13016 - DNA, 455 bp, Glycine max
  unsure at all n locations
tcaagaaaaagatggcctcagcaaattccttatttccagaaaggaattctatcaatagacctccaatctttaatggagagggttaccacgactggaaaacccgaatgcaaatttttattgaggcaatagatctaaatatttgggaagccatagaaatagggccttgtatacccaccacagtagaaagaattacaatagatggtagttcatcaagtgaaagcataactatagaaaaacctagagatacatggtctgaagaggatagaaaacgagtacaatacaacttataagccaaaaacataataacatctgccctgngaatggatgaatacttcanggtttcaaattgtaagagtgctaaggaaatgtgggacactcttcgattaacaaatgaaggaactacagatgttaaaagatctangataaatgcactaactcatgagtatgaaaatatt

SEQ ID NO: 13017 - DNA, 406 bp, Glycine max
  unsure at all n locations
atgcctcagcaacagcttttacttctttctctggcacagcaaagcatacagaatgctcactactagcctacataaatactgttaatgattaatgccatttcttatatatcagcgtggacaactagaaaaattgaaaaaagttataagtgcacctgagatatcatgataacattagctccaacatcttttactgcaccaaaaatagcactggcagtacctggaacaccagccattccagttctgcaaaaaagcatcaaagaanaatttattggaatctacaacttggacaattaatattggttaaagaaaaccttatattaaatagaaatcctcgtgcagcaaaaaatgccaactattcatcatgtaacacaactgcaattcatgactcacccctcgacgtttacaa

SEQ ID NO: 13018 - DNA, 331 bp, Glycine max
tagtacaatttcgagcgtctcgacatattatgcgctcgaatcggacatccgtgtgaaaagttatgaccatttgaatatctcgagtgcttacgatgtataatttcgagtgtatcaatacattataaacctgaatcggacctcagtgtgaaaagttatgaccatttgaatttcacgagagcattcgttgttcaatttcgagcgtctctatatgtgatgcgccataattgtgcatccgcgataaaagttatgaccatatgaatatctcaagagcttaccgtgatcaattttgagtgtctctatatgtgatttgcctgaatcggacatccgtgtg

SEQ ID NO: 13019 - DNA, 446 bp, Glycine max
  unsure at all n locations
tttttgtatttatcacaatatgcaaatgagatgatcaaagtctaacttttcccatgcgtaaattattctctaggtctgatactatntgcaaatctttatataagtttttcttcttttatgttntatgatgtgagtgtgatatggcagagcaataaggaaagcaatttgcatccacaaaacaggagatgcagcttcttgcaagtttttgaataatcccttcatgatcggttntgggatcttgcaactnttcttgtcccanattccaaacttccatgagcttacatggctctcaactgctgcctgtatcacctcttttggtatgtattcatggcagtggctgtgtctctggtcgtctctaggtactttttgtctcataaatatcgaatagtgaatataataccgatntactatagagttcaagttctgctgtgctcctcgtttatatt

SEQ ID NO: 13020 - DNA, 464 bp, Glycine max
  unsure at all n locations
gctaacatccncagactggccttcaacggtttctctctctatgccgtctgcgccattgacaagttacagtctaacaatactaactctgaggaatattcctctttcattccgaatcttccgcatcctatcacgttaaacgcaacaccaccgaagatattgaccgagttcatgaagccactgctggaaacagagctcanaagctacggcttaatcgtcaacgactttgcggaactcggaggagaagagtacatcgagcactatgagcaaaccacgggtcacaaggcgtggcatattgngccagcgtctcttatgtgcaaaagaagccttgaagagaaagcggagaggggacagaatagtgtggtgggagcggacgagtgcatgagatggctcaacgggaagagagtgaaatcggtggtgtacatatgctntgggagcatgtgtcatttccaggataaacaactata

SEQ ID NO: 13021 - DNA, 553 bp, Glycine max
  unsure at all n locations
ctaagcttacatggagctacattagtaagtgtcgaggtcacaccttcatgcacaggtaactcccccacatggtgatcaccctgagtcttaagggagttccaaaaccgagtgacatacccccaagtacaagtatttccccttatgagaaacttcaagtacttactcgcaaagtttatactatttccatgcaacatgaagtatgaaacatgggtaccatcaatgcacaaactgtggataattaaagattctaagtcatcccccttcatagatgcttaaaactctctaaccactctttcctccaccagggatatccatcatggtaactgaacccnccatgtacatacacaacatacatcatcacaatgacattntcaacatcaacaacatttcatctcaatgtcattatcaacatcaacatcatctcatctcaatgccattctgaacatcaatatcatctcatctcaatgacattatcaacaacaacatcatcatctcatatcaacataataattaataacaacatcacctcatatcatattatcataacactgac

SEQ ID NO: 13022 - DNA, 358 bp, Glycine max
  unsure at all n locations
tctgggggacatcttgacttgctntccaatctgacattcaccatagattctgccttcttctattttcagattgtgaatgcctctaacagcacctttgtcaatgattntctttatgcctcttaagcgcagatgtccaaatctttgatcccatattctgacttcatcttctttggaggatagacatgtggaggagtagctggtttcttggggtgtccataggtaacaattgtcctttgacctgctgcccttcattagaacttcactcttctcatttgtcaccaagcattctgactttgtgaagtttacattgaatccttcatcacacagctgactgatgctgatcaagtttgcagtcagt

SEQ ID NO: 13023 - DNA, 336 bp, Glycine max
  unsure at all n locations
ctaagcttaaccgatatntaagctgttntgtcacctaataaatgataatatgaatttcaaccgatcatttgtgttgtaatctcgtttaatcactgttaaagtaaaatctaaccgatcgttcacgttgtaacctcggttaaacaaaaaaaagcacaataattataaaataatcaaaatatctttaaataaaataataaaaaataatctatcagacgttnttctttggaagtttccttgaatgaattgactaataaacaaagtgaaactgaaattctgataccaatgccagatgtcgtacaggatgtcacgacatcacgcttcagaacatgcagatta

SEQ ID NO: 13024 - DNA, 422 bp, Glycine max
  unsure at all n locations
cttgtacctatgacctgggttgaaaaaagcactacctctatgttagagtggtgagagccaaggatnttccagggaaagatgttactggtggtgtggatccctatgttgaagagaagctnggaaactacatgggccttaccaagcancttgagaaaaagtccaatcctcactggaatcaggtttttgccttctctaaagaaaggattcaagcttttgttctggaggtagtgatcaaagacaaggatattgttgtggaagactntgcaaggagagtgatgtttgatattaatgaaatcccaaaactatatttcccttttcttatctagttntcattaacaaattcttctatatcttactaatcttagagaagaaaatatgtaggaagagcaaaattaacccctacatatgtagcagtatcacat

SEQ ID NO: 13025 - DNA, 492 bp, Glycine max
  unsure at all n locations
cgtactgcacagttgtgaaattccctgtggttatattggtgtctcttaatttgatcacctttgtactagatntcataattgttgtaaggtgtttggcttggttgggcaccacttgtgctaaattaagtgttattaataaatcatttgccttttaaaaaaaaattaaacttcaccaggaattgaaatcatgcaagtcggtgacaattaaagcatctaaaatatcaatggcgaaaatatttgtactcccttgttttcaaatataaggaaaaaatatattnttttaatctcaaatataaaaaataactaatttcacattatntaatattactatatctctcgaaatatcttgatntaattgatgttctagtttcaataactatnttttatcattatactaaatttcaatgaaagataaattaaanaaatattntaatttaaataatacaataattaactttnttaatactatatcattttttctatatttgaaat

SEQ ID NO: 13026 - DNA, 390 bp, Glycine max
  unsure at all n locations
ctattcaaaccttttccagactatccatacaaacatcaaaagaggatccatatacagtgaaatcatccataaacacctctatgcaattttctaaaaaatcactgaaaatactgatcattcaccgctggaaggtaccangggcattgcacaggccgaaaggcatcctcctataggcaaaagtgccgaaggggtgtggttttttcctgatcctgaggagcaatagtgatttgcatataaccagaanaaccatcaaggaaacaatagtgagatttacctgccaggcgtttaagcatctgttaaatgaatggcaggggaaaatgtgtccttttggtaacctggttcagcctcctatagtcgatgcagactctccaactgttctgcacccgagta

SEQ ID NO: 13027 - DNA, 320 bp, Glycine max
  unsure at all n locations
atgtcttattgagtcccgtcatatatcgagacgctcgaaattgaatgttgaagctctgagccaattcaaacgacaataactatttactcggatgtctgattgagtcccataatatatcgagacgctctaaattgaatgttgaagctctcagctaattcaaacgacaatagacttttactcggatgtctgattgagtcccgtaatatatcgagacactcgaaattgaatgttgaagctctgagccaattcaaacgacaataacgttttactcggatgtctgatngagtcccgtaatatatcgagacgctcgaaattgaatg

SEQ ID NO: 13028 - DNA, 386 bp, Glycine max
  unsure at all n locations
tgtcttgaagtctaaagccgatgaaggacatctgttaatcacataggctattgtgtttgcagcttctccccaaaaggtctttggcagtccagcacttagcggcatgcacctcactctttccaaaatggtcatattcattctttctactaatccattctgctatggtgtgtgagggactattatgtgccttttgatacctgattntctgcaaaactcattgaattgctctgaaacaaactccatgccattttcagtccttaaaactnttagttntgtaccaagttgatttccaataagagtatgtcactctctgaatttttaaaagcttctaatttgtgtttcaaacatacagccatactcttcatgagaatcatctatgatgatga

SEQ ID NO: 13029 - DNA, 447 bp, Glycine max
  unsure at all n locations
cttctccattccattctgcgtggaaatagtctccttcggcgtaggaatgggtgcagttctatcccagaagaaccacacaatcgccttcttcagcaaacccttctgttctaagctccttcgtgcttccacttatgtcagggagcttgtcgccattaccaccgcctttaaaaagtggagacaatacttattaggcaatcctttcactattctcacagaccaccgtagcctcaaagaattaataggtcaggccattcaaacacctgaacagcaatgctacctggcacgattactatgctatgactatacaattcactatcgtgtcggaagatccaatgcagcagtcgatgccctctcacggtagccaaaagaagccccacttggcaatatttcttctaccattcatacttncttttttttgaagaactaaacaacaactctcacaatccc

SEQ ID NO: 13030 - DNA, 338 bp, Glycine max
  unsure at all n locations
ttaagcaattcanatggtcataactntcactcggaggtcgtatttatgcgcataatatatcgagacgctcgaaattgaacaatggaagctcttgagcaattcaaatggtcataacttttcacatggaggttggtttatgcgcataatatatctagacgctcgaaattgaacaatggaagctcttgagcaattcaaatggtcataacttgtcactcggaggtgggattcaggcgcataatatatcgagacgctcgaaattgaacagtggaagctcttgagcaattcaaatggtcattacttttcactcggaggtccgattcaggcacataatatattga

SEQ ID NO: 13031 - DNA, 511 bp, Glycine max
  unsure at all n locations
tttgagcgtctggatatattacgggactcattcatacatccgagtaaaaggttattgtcgtttgaattggctcatangttgaacattcaatttcgagcgtctagatatattacgggactcaattagacatccgagtaaaaagtcattgtcctttgaattggatcagaggttcaacattcaatttcgagcgtctcgatatattacgggactcaaccagacatccgagtaaaacgttattgtcgtttgaatntgctcagaggttcaaaattcaatttcgagcgtcccgatatattacgtcacggaatcggacatccgagtagaaagttattgtcgtttgaattggctcagaggttcaacattcaatttcgagcgtctcgatatattaagggactcaatcagacatccgagtaaaaagttattgtcattcgaatatgctcaaagcttaaaccattcaattcgagcgtctcgatatattatgggactcaatcagacatccgagtanaaaagtatt

SEQ ID NO: 13032 - DNA, 447 bp, Glycine max
tgcttctacataccctgcagaaatagatggtatttcacattagccttacccctcttgcgtgcgagaggttcgttcttttcttgctcatgcaggtttttataggcactttatcaaggaattgtgcaaaatggcccttccactatccaatctgctgcaaaaggaggcggagtttgattttgatgaccgatgcaaagaggcttttgattgactcaagtgtgtggtgactaccacccctatcattcaagaacctgattggatagccccatttgagctaatgtgcgatgcatccaattacacattgggagttgcccttgctcataagattgataagctgccttgggtgatctactatgcttccagaactttggatgctgctcaagaaaattacactagcacagagaatgagctattagcgatagtttttgctcttgagaaatttcgtcatat

SEQ ID NO: 13033 - DNA, 430 bp, Glycine max
  unsure at all n locations
agctngtttcaaattaagatcagtataaattagtatatctcttgcgtcatgtccatacatnttacaaacttaaagtcatgaatcatatcttcgaatgcgtctgtatatatattgaaatattaagtgccattgacaaattttttataaaattctaaattgaaggtctgaattaacccatcaaaattcattccatacaagaatccatctaaatctatttactttcgaataccaaaagacattttaagagtggtcagaaatctcatttgaataccaacagatattgttgcctgaaaaaaaaatctttattgtcgtaatcgaataccacacgatttgtttatattctatataactcttgattgaataccacaagactttttaatcataaaaaagtttttaaaattccttgaaatttaatccatcccaccccctg

SEQ ID NO: 13034 - DNA, 431 bp, Glycine max
  unsure at all n locations
ntntagcaattcaaatggtcataacgtttcactcggatgtcggattcaagcgcataatatatcgagacgctcgaaattgaacaatggaagctcttgagcaattccaatggtcataacttttaactcggaggtccgattcaggcgcataatatctcgagacgctcgaaattgaacaatggaagctcttgagcaattcaaattgtcataacttttcactcggaggtcggattcacgcacataatatttcgagacgctcgaaattgaacaatggaagctctcgagcaattcaaatggtcataacttttcactcggaggtccgattcaggcgcataatatatcgagacgctcgaaattgaacaatggaagctctctagcaattcatatggtcataacttttcactcggatgtccgattcacgcacataatatatc

SEQ ID NO: 13035 - DNA, 377 bp, Glycine max
agcttattgtcgattgaatttgctcaaagcttctgttctgaatttcgagcatctccatatactacgggaaacaatcggacatccgagtaaaaaggttttgttgtttgaattttctaagaggttatgatttcaattttgagcgtctcgatatattacgagactcaatcaggcatccgagtaaaaagttattgtcgttagatttttcttagagcttctatttccgattatgagcgtctcgatatattacgagattcattctgacatccgagtaaaaagttattgtcgtttgattttgctcaaagcttctgttatgaatttcgagtgtctcgatatactacgggacacaatcggacatccgaataaaaagttattgacat

SEQ ID NO: 13036 - DNA, 429 bp, Glycine max
  unsure at all n locations
agcttatatatatatatagatatattttttacttattaaaactaaatacaattntgatatgtgttggtttatgtaattttgaaataaaaatatatagaaagataaaacttgaaaggttatatatagaaagttcataaagtcgtaaaagatgaatatataaaaatgcgtcaaaagtacatgatgaagatagggtgaacagaagttgggttaagtgaatttttgacaacggaaaccaaaataataaaataaaaaaaaaaagaaaaaagctatggaaaacttgcgtgtccccacagctatggtttgtagtctgatgcagagctgctgagataaggatcatcaaatcgaatatctttctccatactgccttcttctctgactatatggattccaattgctttaatgactgagctctctaactctaacacacct

SEQ ID NO: 13037 - DNA, 409 bp, Glycine max
  unsure at all n locations
tcttagtctcacctgatgaagatgaattcgtgtgttactttatgcactcctctaatgacaatggcatcatttctggcactaaattgttgggagttggaagtcattttctcaattaaatttttggcttcagcaggggtcatttctccaagggctccaccactagcaacatctatcatacttctctccatgttgctgagtccttcataaaaatattggagaagaagctgctctgaaatctggtggtgagggcaactggcacataattttttaaatctctcccagtattcatataagccctctccactgagttgtctaatacctganatatcctttctgatggtcgtggtcctggaagcanggaaattttnttccaagaatactctcttgaggtcatcctagctcatgatgg

SEQ ID NO: 13038 - DNA, 450 bp, Glycine max
cggcagcaatatagctcaatacattacatgttatttaaacccttatacctaaaacaccaccagcaacttactacaccaaatccttgcaatttttttccctatctgcctaatagcaagggtctcttacatcccacataaacctccaaaacaaacgaaacctaacaataaaaattaaaaaaaagaaaaaaaaacaaactagcctccaaatccggagagggttcttccttgtctcttgagagcataaaccacatccattgccgtaacggtctttctcctagcgtgctcagtgtaggtaacggcgtcacgaatcacgttctccagaaagatcttgagcacgccacgtgtctcctcgtagatgagaccactgatacgcttcacaccacccctgcgagccaaacgccgaatcgcaggcttggtgattccctgaatgttatcgcgcaacaccttacg

SEQ ID NO: 13039 - DNA, 390 bp, Glycine max
  unsure at all n locations
agcttgcaataccctgagatgtattcttttttaacaactgactcagcttagtcttcatttgtatacatttccttgggtagcttgcattctcttctaaataacagtctgctttatctgttgtcctacaagtgttgttcttggggatcatgcatgaattggcttaccacactcacagcataagcagtgtctggtctactatgggacaagtagatgaactttcccactggtgtctggtactgtgacttctctactgttggccttaatccccacttccaatcttgtggttctgctcaatgggaacattgaatgttttacacccttatttgcttgtttctntgagaagatcaaagtaaaactttctttgggtgataaaggtaccttgtttggaat

SEQ ID NO: 13040 - DNA, 379 bp, Glycine max
agcttcattcacaacatcggtttctatattatctatgtttttggacatacaacatcaatttttacctataaccaatgtcggttatcataaaacaacatcggtttataacaaaaattgatgttgttggctgactactaacatcagttttgttaaaaaccgatgttaatatacagatacaacatcggttgttctgaaaaccgatgttgatatatgaagatatataacatttctataataattattgctatacacattggttctgtgaaaaaccgatgttaacggtattactttcaacatcggttaataaatgatgttgaaagtccttaataaccgatgttaaaaccctattttttagtagtgatgtcaacgatagtcctag

SEQ ID NO: 13041 - DNA, 450 bp, Glycine max
  unsure at all n locations
ntacaggggagtttctcctgccaccattcaaaaattntatatttatccttttccacggagcacaatagaatgatgattttgctgaattaaagtgtgtgaaaaacattttacaatgaaattaagactttattgtaaaatatataattaaatcaatttcgttgttttgtttttttcatcttcactaatatgctggaattgtgattatatattacatcttggtttgtgaaaaaagtaaagaatagaattactattacattatataaggggactaaatataacatgtacaatagaaatacaattttgttgtacaatgtacaacaaaattatatttttattgtgcatgtttttttagcaaaaaaatatataaattnttcactaaataaaattgagattatctgttatacaatagaatcttgatttattgattactgaaaccaaaaaaaaaaaaaa

SEQ ID NO: 13042 - DNA, 390 bp, Glycine max
agcttgaaggaaaactggatgcattggtttatttggtaacccagctggccttgaatcagaaatatgtacctgtcgcaagggtttgtggtttgtgctcctctgctgaccaccatacagacctttgcccttccatgcagcaacctggagcaattgagcagcctgaagcttatgctgcaaatatttacaatagacctcctcaacctcagcagcaaaatcaaccacagcagagcaattatgacctctccagcaacagatacaaccctggatggaggaatcaccctaacctcagatggtccagcccttagcaacaacaacagcagcctgctccttcctttcaaaatgctgctggcccaaacagaccatacattcctccaccaatccaacaacagc

SEQ ID NO: 13043 - DNA, 417 bp, Glycine max
agcttccatcagcagactcacattttactatccgaaagtctcaacctgctctgataccactaatgtaacgacctgcctcatcgctacaatatcaccattctaaatcgcgatcatttcaaattttaaatgaaaaatccattaattttcttatataaaaaaatgaaagtaatttttgtcttgacatacattcaccaaacaacacacattacttttcttatataaaaaaatgaaagtaatttttgtcttgacatacattcaccaaacaacacacattacttaagtggatacgtatatattagtatagtaacttagtacacatcattcacataatggaaataaacttgttatacatataattaaatatgtgattacatctttattcaacaaagaatatgaaccactatggggagtgataac

SEQ ID NO: 13044 - DNA, 404 bp, Glycine max
  unsure at all n locations
tgaaagaaatctcaagaaccggtggttgcttatgtactgtatgtatgcacgggttgttgccgaaccagtataaaattcttgtgtttttcttcttcttccatacactttttaatttccgttgtgtactttacttttatgctttacttttgtttaagttacataacttagtagtaaagcctaattgaatctagtaacattaagaaggatcagttttaattagtcaaggttacttaataattaattcaacccccctattctcaattactccaaggccacttgatccaacacattgtaccctgagcaactgccagntaggtcttcttccttttcttttcttttcttaagagttgaatgaatccatgtaccctttatgggcctctctgatattatgtatggattcatct

SEQ ID NO: 13045 - DNA, 414 bp, Glycine max
  unsure at all n locations
agcttcgtactctggntattgttccactgtttcccaagggacctgctcgcaggatagttgaagatagcatgagaggaagtgatagcagagaagatgaaagtggtgaataggaagaagaatggttagaagatgttgataatttaatgaatgatgatgggtttgatgacattgatgatggtgatgactggagtgatgaagaagatgatgatttgccgccagattttgatgaggatgctgaacttttggagatggggcaaggaaagactattaaacaagactcgagacagaatgatgaaatggtccttcttcctgtactccctgatggtcgtccaagagaacaatggtgatcttcacaaaagaaagcatctggcttcatatttgatattgtactggctgatttgtggatgtgcttta

SEQ ID NO: 13046 - DNA, 380 bp, Glycine max
tcttatgctcacctgacgaatgcgtggctacttcatgctttcctctaatgacagtaacgtcacttctggcactacattgctgggagtttgaagccatcttctcaattaaatttctggctccagcaggggtcatgtgtcctaaggctccaccactggcagcatctatcatacttctatccatgctgctgagtccttcataaaaatattggagaaaaagctgctctgacatctggtggtgagggcaactggcacataattgattaaatctctcccaacattcatataggcgctatccactgagttgactaataccggaaatatccttatagatggtcgaggtcctggaagcagggaaaatgttgtctaagaatactgtcttg

SEQ ID NO: 13047 - DNA, 453 bp, Glycine max
  unsure at all n locations
cgcttgatggtgtcgagaagaaatcacatgtttgtcttcatcttaaagggggagaatgttaatgtatgtatacatgattttgatgatgtcaaagaagaatctaacaaggctgcttcaaatgataagtatttgcttcaagaataattcaagattgcttcaacaaacaaagccttgtttcaagattcactaaagaccaagccttgccttaaaacaaagtgctttcaagacatgcaaggctctggtaatcgattaccaggaagtgtaatcgattaccagaagacagggttgagaaatagctgttgaaaaatgttttgaatttgaattttcaacatgtaatcgattaccatatgtctgtaatcgattaccagcaatggaactttggaaattcaaattcaaaagtcataacctttcanattataactgtgaaattgattacacaaacattgtaatcga

SEQ ID NO: 13048 - DNA, 431 bp, Glycine max
agctaggagctgttattggcaaattactttctgatattagctcctatagaagattgataggaagactcctttatcttaccactacaaggctagatataacttttgcactgaatcaacttagtcaattcctatctgctcagattgtcatcaagcagctgctcacagagtacttcgctatatcaaaggctcacttgcatgtggccttttctacccagcatcaaacgctcacaagctcacagcctacaatgactctaacttggccagttgcattgattttagaaaatccattactggatattgtttatacattggtcttttatcttaccactacaaggctagatataacttgtgcactgaatcaacttagtcaattcctatctgctcagattgtcatcaagcagtttctcacagagtacttcgctatatcaaag

SEQ ID NO: 13049 - DNA, 438 bp, Glycine max
  unsure at all n locations
tcagctcgctttcaatctccccttttgatgatgcaacttctttttcaagaaacacacacacacactttttcctagtcgatcactcacataaatttccattctcccccttagtttttgaatttatgcttctcttaaaattaagttgattactcatgtgagttcttgatttaatccctatttctctccccctttggcatcaacaaaaagccaaagtgtgtaacaagtttaaagcatacaaatacaaataagcatccatacaacattcatggaaaatataaaccaaaccatgaatagatcaaatatataaaaatcacatagtcaaataacataattaatatttgttcaaacataccaagcaaataaagaaatagtanattggtcaaatatcataataatataaattatttggataagtcactaacatctagtagtcctaat

SEQ ID NO: 13050 - DNA, 438 bp, Glycine max
tatagaatatataataagagaactatgattattgttgaatctattcatgtttcctttgatgagtctaatgctattcctccaagaaaggatattctagataatattgcataatctttagaacaaatgcatatttatggacaagattctaaaggaaaagggaaaggaagcaataaagatcctccaaaagaagccaaatcaaattatgaacttccaagagaatggaaagcttcaagagatcatccccttgacaacattattggtgatatctccaaaggggtaacaactagacattatcttaaagatttatgcaataatatggcttttgtgtctatgattgaaccttaaaatttaaataaagccataatagacgatcattgcatagttgctatgcaagaagaactaaatcagtttgagagaaacaatgtgtgggaactagta

SEQ ID NO: 13051 - DNA, 400 bp, Glycine max
agcttataaagaaaaatgatggcttggttttaacccaatcacattatgttgataagctattgaagaagtttaattattttgatgtaaaacctatttctacttcttatgactcatccattaagttaaagaaaaaattgaataaaggaatttcttcacataaatattctcaaattattggttctttgttgcatttgacaaacttctctacgcctaacattgcatatgaaattggtagattaggaaggtatactaataatcatgatcattctcattggattgcattagaaagagtttttagatacttaaaacgaaccattaattatgacattcattatacatgttttcgtgcagtaattgacggggttagtgatgcaaatcgaatttcttgatctaatgaaac

SEQ ID NO: 13052 - DNA, 358 bp, Glycine max
  unsure at all n locations
tcaacatcagaccacttccgggtgctggaactacttcttatggattngatggagcctatgctaggtgaaagccttggaggaaagaggtatgcctatgttgttgtggatgatttctccagatttacctgtgtcaacttcatcagagagaaatcagaaacctttgaagcattcaaagaattgagtctaagacttcaaagagaaaaggactgtgtcatcaagagaatcaggagtgaccatggcagagaatttgaaaacagcaggttcactgaattctgcacatctgaaggcatcactcatgagttctctgcagccattacaccacaacagaatggcatagttgaaaggaaaaacaggactt

SEQ ID NO: 13053 - DNA, 433 bp, Glycine max
ctcaagcttgccattctccattagaaatggaacatatagcatagctgtgctacttttgctcttaaattttgatgagactctatcaggggaaaagagaaagttgcaactgttggagctgatagagatgaggatgaatacttatgagtcttcgagattgtacaaagaaaaagtgaaggcttgtcatgaccagaagctgatatagaaagattatatgccaaaccaacaggctgtgctattcaactcatgattgaagctatttgcaggcaagttaaagtctaaatggtctggaccattcaccatcaaggatgtcacgccttatggagcagtggaattatttgacccttactcagaggctctgaatataagatggatagtgaatggccagatattgaagctataccactgtgtgaacattgagaaattgatcaccatt

SEQ ID NO: 13054 - DNA, 355 bp, Glycine max
ctagagctcgcaaaagagacgccagacgaaccttattctctgatctggagctcattgctcacctcttgaaggaattatggggactcggaaaccgcagacgaagtctccaaaaagttattatagttggaacctcataaagcagacaatcatgtattgctgtcaaacttgtatgctggattaggaaaacgggatgaggtgagaaaggtacggcccagaatgaaagagaatggccttcataaagatgcacgctgctggaggattgaaataggacgaatggcttataaatatcttgctagagacggatcactttcagaatcaaaaaagattcaccagacctggacttaattggagaaaa

SEQ ID NO: 13055 - DNA, 403 bp, Glycine max
  unsure at all n locations
agctantcaccatgttgaaaatgtgttctattatttctctctgagacaccattgtgatgtggtgcatatgcagtagtaagctctcttctaatgccatgttctgcacaaaaaatttcaaattctttggagcaatattcatcacctcgatctgtgcgaagagtctttatagacttttctgcttcattttcaacacttgctttgaagctcttaaatgtacaaaacgcttctgatttttcctgtataaaataacccccacttgttcttgaaaaatcatcaatgaagcaaattaactatcttctacctccattagaatatgggtttattgcaccacaaatattagaatgcaccaaatccaagacatcgtttgcctctcatgacttctctttgggaaattgagatcgat

SEQ ID NO: 13056 - DNA, 431 bp, Glycine max
  unsure at all n locations
agcttcaatacagtgacactagtgttgcatcaaaggagctgacaaagtcttttggatgggatacatatgattctttcatgcagcatgatgttcaagaactaaatcgggttctctgtgaaaaacttgaagacaaaatgaaggtatggcaagagatttggaatgtttgttcatgattcttcttgatgagtgatcataccaaatggttgttgtatgttatttttcttcaggaaactgttgttgagggaactatacaaaagttatttgaaggacaccatatgaattacattgaatgcatcaatgtagactacaaatcaactagaaaggagtcnatttatggtacttccttatngcatttgaattcaattatatgtttagttcttctttgttatgtaattctaatttagttnttgcatatgcatgttagatcttca

SEQ ID NO: 13057 - DNA, 280 bp, Glycine max
agctagaaaacaagatgttgagagtgttttacagttatcacaagctcattttgaagtcccctctttcaaaaaatagaacatttaaaattgagattgatgtgatagaacagaagtgttttactactacagtaaacagtgaagagcggttatggcattacagatttggccatttaaattttagagatctgattaagctaaactcaagagaaatggtgttgggtttgcctcagatcaagcctcctagtgaagtatgtgatggtttgttacaatgtacgcaatc

SEQ ID NO: 13058 - DNA, 448 bp, Glycine max
  unsure at all n locations
tanaaccccttgttcattactaaacaagctgaaattaatcacaatcacaagcaaggtatccaaactacatgcaagagataagaatgaaaaatagaaaagggaaagaaaagatgggttgccttccagtaagcgctcttttaacgtcactagcttgacgcatcatcctattatctaggatcaaagcgtagaacagtgttcaatctttccatagctccaccatgatattccttcaacctttgtctgttcactacccatgtcctgtcaggatctttagattgaggatcacaaagctccactactccatatggtcggactttcttgatggtaaatggtctagaccactttgattttatctttccagggaacaatttaagtcttgagttgaaaagaaacacctgttgtcctggctggatgtccttcttgagncaaattttgtcatgatactttt

SEQ ID NO: 13059 - DNA, 364 bp, Glycine max
  unsure at all n locations
agcttagcctaagtctacatatnttcaaaatattaaganagtcgaagcttagcgcagtatggtgtgcttagctcagtctcatcagaatgacactcatgcttagcgcacagggctgttagacaaatgacctcagttatcttaagaagggggggttgaattaagatacaaagactattccctaattaaaatttcactctctctttttgggttaacaatgcacccttaacatgaattactcaaaagataattcaaaataaacttcttcaaagcaaaagataaatagcaataaataaaagaagtttaagggaagagagaaatgcaaacttgatttatactggttcagccactttccgtgactacgtcc

SEQ ID NO: 13060 - DNA, 449 bp, Glycine max
tgccgcaacatctgaattcgatgtatggaaaatccccgttcggtgtgagttggaacatggacgctagagtggcaagggcatcaaccacctgattctcctctctaggaatgtgatgaaaggatatgtcatcgaagaattctatcaactttctgatgtaggcctgataaggtatcaacttatgatccctagtctcccattctcctctcaactagtggattacacgggctgagtccccatataccttgagcaacttgatcttgaagtcaattgccgcttggttcccaagggcgcacacctcgtagttagctatgtttttggtgcagtcaaaacccaacctagctatgaaagatatatattgctcgtcgggggaaaccaaaatcgccccaagtccatggcctagtgcattagatgcgtcgtcaaaccatataatccatttgtccctatcttca

SEQ ID NO: 13061 - DNA, 369 bp, Glycine max
agcttatgctgcaaatattaacaatagatttcctcaaccttatcagcaaaatcaaccacagcagagcaattatgacctttccagcaacagatacaaccctggatggaggaatcaccctaatcttagatggtccaaccctcagcaacaacaacaacagcttgctccttcctttctaaatgctgctggcccaagcagaccatacattcctccaccaatccaacaacagcaacaaccccagaaacagccaacagttgaggcccctccacaaccttccctcgaagaacttgtgaggcaaatgactatgcagaacatgcagtttcagcaagagaccagagcctccattcagagcttaaaccaatcagatgggac

SEQ ID NO: 13062 - DNA, 279 bp, Glycine max
  unsure at all n locations
agctatganggttaangtttcacttattgttacgtgctcatgcaacaattgttagccgtggctatacgagacatcttgccaaacaaagtcacgttcaccataactcgcgtgtgctttttcttccatgctataagtagcaaagcgattgatccagtaatgtctgatgagatggaaaatgaggccgtaattatactgcgccagttggagatgtattttcccctgctttctatgacatcatgattcacttgaatgcgcatctggtcagagaaatcaaatgct

SEQ ID NO: 13063 - DNA, 454 bp, Glycine max
  unsure at all n locations
tcttagtctcacctgatgaattcgtggctacttcatgcactcctctattgacaataacatcacttctggcactaaattgctgggagtttgaagccatcttctcaattaaatatctggcttcagcaggggtcatgtctcctagggctccaccactggcagcatctatcatacttctctccatgttgctgagcccttcataaaaatattggagaaaaagctgctctgaaatctggtggtgagggcaactggcacataattttttaaatctctcccagtattcatataggctctctccactgagttgtctaatacctgaaatatcctttttgatggtcgtggtcctggaagcatggaaaatgttntttaagaatactctcttgtggtcatcccaactcgtgatggaccttatagcaaggtaatatagccagtcctttgccactccttgtaaagaatg

SEQ ID NO: 13064 - DNA, 415 bp, Glycine max
agcttcaagaataatggcctcatcaaactatttattttctgaagggaattcaataaataggcctcctattttcaatggagtgggttaccattactggaaaacccgtatgcaaatttttatagaggcaatatatttaaatgtttgggatgcaatagaagtagggccctatattcccactatggtggcaggaagtaaaaccatagaaaagcctatggaagaatggagtgaagaagaaaagagattagtgcaatacaacctaaaagccaaaagtataattacatctgccttaggaatggatgagtactttagggtatcaaattgtaaaagtgcaaaagaaatgtgggataccctacaagtaacacgtgagggcacataagatgtgaaaaggtccaggatacatacattaactcatgag

SEQ ID NO: 13065 - DNA, 384 bp, Glycine max
  unsure at all n locations
agctttcttggaagaaatgcatcagcagtttctcgtccctaaagtactcccccattttccagcaatacatattcaagtgatttttggggcaagtggtccccttgtatttatcaaaatctggtaccttgaactttggagggatgacaacatcagctaccaaacacaattctatcatgtcggtgaaagggtaaccaccaaaccctttgacaactattaatctctctccaatgaaatcaagtttctctcttccttccattgccggaggcggcccccctactgagaaatgcagcagttgcagagggcggtgttaaggagctcccaaggtattgggttgaggcatagcattaaatgccagtcccttancagtgaacgtgggatatgggt

SEQ ID NO: 13066 - DNA, 337 bp, Glycine max
agctaaacaaaaggcatgcgaagtgagtgtaatttctagagaaattcccttatgttatcaaacatacaaagggaaaaggtaatattgtagccgatgctctttctcggcgtcatgcattactttctatgcttgaaacaaaattgattggtcttgaaagtttgaaaagcatgtatgaaaatgatcaaacttttggagaaatttttaaaaattgtgaaattttttcagaaaatggtttctttagacatgaaggctttcttttcaaagaaaacaaattgtgtgtgcctaaatgttctacaagaaatttgcttgtttgtgaagcacatgaaggaggtttaat

SEQ ID NO: 13067 - DNA, 394 bp, Glycine max
tcaacattcaatttcgagcgtctcgatatatgacgggactcattcagacatccgagtaaaaagttattgtcgtttgaatttgctcagagcatcaacattcaatttcgagcgtctcgatatattacgggactcaatcaaacatccgagtaaaaagttattgtcgtttgaatttgcatagagggtcaacattcaatttcgagcgtctcgttatattacgggactcaatcagacatccgagtaaaaagatattgtcgtttgaattggctgagagctccaacattcaatttcgagcgtctcgatatatgacgggactcaatcagacatccgagtaaaaagatattgtcgtttgaataggctgagagcttcaacattcaatttcgagcgtctcgatata

SEQ ID NO: 13068 - DNA, 379 bp, Glycine max
  unsure at all n locations
ctttatgatctgtgtgcacaataaattctctgcccaatatataatgtctccagtgctgaatacaaagcacaagggccatcaattccttctcatagacagattttgccagattcccattagataaagctttactgaagaaagcaataggttgtctctgctgcattagaacaacacctatacctctaccagccgcatcacactcaacttcaaaaggtaaatcaaaatttggaagaattagcacagggggagaagtcatgatcctcttcatctcctcaaaggccttgacagcttctattccccaagaaanattgtctttcttagtcaattcggtgagagggtttgctattttaccataatccctgataaactttctataata

SEQ ID NO: 13069 - DNA, 436 bp, Glycine max
  unsure at all n locations
tcgacgaggtactgaggaatgcttggatgtttcttgcctacggttacttcatagggagtgagccctattgctaagtgaacggatgtgttatacgaccactctgcccacacgaggaacttgccccatgatgaaggtcgttgatgaatgaaggacctgaggtattgttagatgaccctgttcagtacttcggtctgtccgtccgattgggggtgatacgctgagctcatgcggagcttcgtgcctgaaagtctaaataactcttgccaaaaacaacttacgaataagggatcatggtccaataccaaactgtgtggcatgccatggattttccccacgatatccataaagaggtgtgctacggtggaagctatgtatttggattgaagcatgtcgaagtggacccctctngaaaaatggtcaacaaccaccaagatga

SEQ ID NO: 13070 - DNA, 336 bp, Glycine max
agctatatttggcttccaagatttaatctacattgtgagaatggggtataagtactaagagacaatgctcctgatgcacaaaaggctagattcaaagaattaaagaagcaggattgcaaagcattggtgattcttcatcagtgtgttgatgatacccactttgagaagatcgcaggtgcaaatattgcgaaagaagcctgtgacacgttgaacaaagcttatgctggtgcagataaagtcaagaaagtgcgcttacaaaccctgaagagacagtttgaactgttgcagatggaagagagtgaacgtattagagatttcttcggtagattacaagtt

SEQ ID NO: 13071 - DNA, 371 bp, Glycine max
  unsure at all n locations
cgctaacccatggaagctcctaatatatcccacactntnntgggtgggccattcttggatagccttgattttctcagggtccacttggnaccccattttaccaactacaaaccctaagaaaactatattatctacacaaaaggtacacttctctatatttgcgtagagggtgtttttcctaaggactaaaagaactagcctgagatgtcctaagtgatcatctaggctcctactgtacactaaaatatcatcaaaataaacaactacaaatctacctatgaaatcccttaagacatgatgcataagcctcataaaggtgcttggtgtattagtgagcccaanagcatcactaaccatcatagaaactaaac

SEQ ID NO: 13072 - DNA, 486 bp, Glycine max
  unsure at all n locations
tgagttcgatggccncaatgacatctattccccacatggaataaggccaaggggcggacataacattcataggatgtggtggaacattgacattgtccgcgtatgcctgacatttatgacatttccttacatgggcacaactatcgctttccatagtaagccagtaataaccgactctaaggatcttcctggccatagcatgcccattggcatgtgtcccacatgaacccacgtggatttcctcaatcatgaagttcgcctctttggcatctacgcatcgtaggagggtcatgtcgtggtttcgtttgtacaggatggtaccactcacaaagaaaccagtagccaatctccttaacgttcttttgtcattgtcagaaatccccggtggatattctttgttctcaacatattgtttgatgtcgaagtaccatggtttcccatcccactcctcctctatcacacaataatgtgctggctggccttgag

SEQ ID NO: 13073 - DNA, 454 bp, Glycine max
  unsure at all n locations
tggcttgcagatctagtgtggaagaaatgtaacccggggagtttttgatggcttcaagttcattatgtgacaaatttgcactataaccattcatgacgttggtgtatgtataaatcagcttagaggaagcagtgttgagaatattatcattggttgtaacatgagtattttctagtgcagaagaaagggttgacagataccaattgtgtttggtggagaatagtttgggcatggatgatgagtccatgtggatgatataattctcagattgagccattctggagacaaggtgatggactatgatggagaagcaaagacatagacgaatcatggtagccatgatttgatgaatgttatatccaatgtggactgctaattggctntatcagacaccaatatataactggtgtttaaatagtggataactactgaatgggaaatgataatcggaaca

SEQ ID NO: 13074 - DNA, 392 bp, Glycine max
  unsure at all n locations
cgatgcacctttcttctgttcttctgtaatgtagntgaatttcttccggaaaggacttaaatcactagaggctgttgagccacatgttatgatgattgctgtgcgacaacatattgattaccaattcatcggcctagaggatgatggtggtgaaagtgataataatgatgatggaaatgattttgacatcattgaaggtggtgagttgagttttgactacagagcaaataatcaagggccatatattgtctcacatcaccgaacacagcagaggttggcaatttgtattactcacaacttgaatggtttttaaagcctgcgtgcatattgaactttattcttaatgcttgtttgcttttttatttaaaatattgcacaagcctgtcacagtt

SEQ ID NO: 13075 - DNA, 338 bp, Glycine max
accctcagctttaatggaagtcaagagcatgatattgcgccgattccgttgactggtgagcaggtatatcagcgggttcaacacctgaatactgtatttgggaagacccacaataatgttatttgtcagacttgcatatggaagaagaggtccattttctctgatcttccgtactggtgtgatcttgatgttagacattgtattgatgttatgcatgtggagaaaaatgtttgtgacagtgtgattgtgacattccttaaaattcaatgcacgaccaatgatggctcgaatacccatcaagatctatctgatatgggtatacgatcacagttgcttcc

SEQ ID NO: 13076 - DNA, 484 bp, Glycine max
  unsure at all n locations
tctccattaatctagtgcttgcaacattggacaacttccgccatcaatgattagagaacaaacctttccatgcaccaaacatctagaatgaaaaatgttttccctttgtgcatcatctctatctttgcgcaagcttcccatgagtctccttaccattaaatgatctccttcttccggtggaagaaaaccatcatcctccacttcactagaggaactatgagaacttttagatggctcactgtccacctcttcattctccaacacaatcatggtccttgttgaaaaaagattacgaaactcaataaaccaagaggggggtgaattggttntcaaacaaaaccgtacttaataaaacaaagttacggaaaaanaaacttttctaaatggatcgtatcacanaaagaatatgaatcgaatgtattcaatacttaatcaatccttccttacacatgagccttcattaacttcctttctttcaaatcat

SEQ ID NO: 13077 - DNA, 437 bp, Glycine max
acagaagctcacgagaaactacaatggtcataacatgtcacacgaaagtccgattcaggtgcataatatatcgagacgctcgaaatagaacatcggaagctctctagaaattccaatggtcataacttttcacacggaagtcctattcaggcgcataatatatcgagaagctggatattgaacaacgaaagctctcgagaaactcaaatggtcataacttgtcacacggacattcgattcatgcgcataatatatcgagacgctcgaaattgaacaacgtatggtgtcgagaaattcaaatggtcataacttgttacacggaagtccgattcttgcgcataatatattcagaagcttgaaatagaacaacggaagctcttgagaaactccaatgtgtataacttgtcacacggaagtccattcaagcgcattatata

SEQ ID NO: 13078 - DNA, 461 bp, Glycine max
  unsure at all n locations
ggatagtataaagaagaaagataatatagaacgtcatccaagaaacaaggttgtggcgagagtagctcctgttgacttggaatggatgactaagattcgggacttcttggagatatgctcactcccaaaaaatccaacaacgacaagaaatatcaagagatatgccatctattatgtgatagagggaggagatctgtacgaaaaaggcttcacggccaccctgttgaagtgtttgacttacgaatatcctaaatacgtaatgaatgaaatgcataaagggatatgtggaatacaattaggatctcgatcaatgacaactcaagttcttagaattgggtactattggccaacaatgagaaaaaactatgtagagtatgtgaaagaaagcagagaatgccaaanatttggcaacacttatcatctgcctattaaagaatngcacaacatagtggcgcatgacc

SEQ ID NO: 13079 - DNA, 484 bp, Glycine max
  unsure at all n locations
cgcttctacaatctcccnncttttgatgatgacaactctgaaatcaagaaacacatacacacactttntcctagtcgatcactcacttaattttccattctccccctttgttttttaatttatgcttcacttgaaattaagttaattacttatgtgagttcttgatttaattcctatttctctccccctttggcatcaacaaaaagcccaagtgcgtaacaagtatatgacaatcatatactattaatcattcacaagacatacattgaagaatataaaccaatcatgaagcaagaaacatgaatagatcaaatataanaaccacatagtcatataacataattcataattgttcaatcaaaccatgcaaataaagaaatactaaattatccaaaatgtcataatatagccaaatacacgactagaaaacaaagtactagtaatattaaaaataatagaaaacttagatgatggtggcagcgat

SEQ ID NO: 13080 - DNA, 388 bp, Glycine max
  unsure at all n locations
tctgtccctgaganactggttcccagaagacaacagggagtgaagattgctgaataccctagccttgcaacaagtcctatggaagtagacacggagatggacaagaaaatccgcagtatggtgagtagcattttgaaagaagcctctgtgcctgaagctgatgaagatgttccaacatcttccaccccgaatgtttctatgcctgatgttgagaaagatgttccaacatcttccggcccanatgatgaagtactctcttcccccagcaaagagagatcaacagaggaagatgatcaagccgcagaggagacccctgcaccaagggcaccagaacctgctccaggtgacctcattgacttagaagaagtcgaatctgatgaagaaccca

SEQ ID NO: 13081 - DNA, 418 bp, Glycine max
  unsure at all n locations
tcngttgttcaatntcgagcatctcgatatgtgatgttcctgtatcggacctccgtgtgataacttatgaccattntaatttctcgagagcttccgttgttgaatttcgagcgtctcgatatattatgcgcctgaatcggacatccgtgtgaagggttatgaccatttcaatttcacgagagcttccgttgttcaatttcgagcgtctcgatatgtgatgttcctgaatcggacctccgtgtgataacttatgaccattngaatttctcgagagcttccgttgtntcaattcgagcatctcaatatatgatgtgcctgaatcggacatccgagtgaaaagttatgacaatttcaatttctcgagagcttccgtggttcaattcgggcgtctccatatgtgatgtgcttgaatctgaca

SEQ ID NO: 13082 - DNA, 395 bp, Glycine max
  unsure at all n locations
agcnttctttcanattattgcgcanaaatcagtctgtccaatgggacgatgattgtcaaatggcatttgaaaggattaaacggtgtttgatgaatcctcctgtgttcatgccaccggtgcccagaagacctcttattcgatacatgacagtattagatgagtcgatggggtatgtgttgggacaacacgacaaatccggaaaaagggaacgagccatctattacttgagcaagaagttcacagcgtgcgagatgaactactctttgctagagaggacgtgtngtgccatggtgtgggcaactcaccgtntgaggcagtatatgctgagttacattacttggttggtgtccanaatgaatcatgtcaagtgcatctttgaaaagcccgctctcact

SEQ ID NO: 13083 - DNA, 408 bp, Glycine max
  unsure at all n locations
gctggaatcatttatcctatctctgacaaccaatgggtgagtcccgtccaggtagtcccgaaaaagactggcctcacagtgatcagaaatgagaaggagcagctgattcctactcgggtgcagaacagttggagagtctgcattgactataggaggctgaaccaggttaccaaaaaggaccattttcccctgccattcattgaccagatgcttgaacgcctggcaggtaaatcccactactgtttccttgatggtttttctggttatatgcaaattactattgctcctgaggatcagganaagaccacattcacctgccccttcagcacttttgcctataggaggatgcctttcggcctgtgcaatgcccctggtaccttccaacggtgcatgattagtattttcagt

SEQ ID NO: 13084 - DNA, 415 bp, Glycine max
ttcaaatgtgggaggatctatttctgaaggccaaacacggaggacttgatgtcatacacacttatgtcttctgggatgtccatgaaccttctcctggcaatgtactactccggatcctcctttctttccatctatctacctcattttaaaagaaaaataataatatttttttggctctttgtgatttttctgatgctgggtcgcagtacaattttgaacgaaggtatgatctagcacggttcattaagacggtgcagaaggtggggctttatgctgatcttcggattggaccttatgtatgcgcttattggaactttgcgtacattttgcttccataatccatatctctctctctgtgtttgtttgagcgcgcgtgtaatatgtgagaatgttggattacaatccattcttaacg

SEQ ID NO: 13085 - DNA, 414 bp, Glycine max
  unsure at all n locations
gagtttcctaatctcttattagcactcgctatgatgatgtcatcctcatacaagagaaggtaaagaacacacactttcctttttttcaggatgtatacatagttgtcatatatgtttctaatgaagccatatctgatcaagaactcatcaaatttcatataccacattcgagggctttactttagtccatacaagaattttcagcaagcacaccttgttctccccttcttcaaaaccttcaggctggttcatgtaaatggtttccttaagatttccatggtgaaaagctgttttaacatccagttgttcaagttccaaattgtactgatttaccacaccaagtatgattctaattgaacaatgcttcataaatgtgaanaaatctcattgtaatcaattccttccacctatgta

SEQ ID NO: 13086 - DNA, 494 bp, Glycine max
  unsure at all n locations
agcttacttgctgagattccattatgggaaagatctcgatccagctgagttgatccattgtgatagtaccgcggctattgcaaaatttgagaaccattattacaatggtaaaaaacgacagatacgttgtaagcacagcactgttagagaattactctcaacaggagctgttagagtggatcacgtacgcactgatgatagtttagcagattctttgacgaaaggattagctagagagaaagtccataacacttctagaagaatgggactattgcccttactgcgatgatcattcatgatggtaacccaacctanatgactggagatcccaagaactaggttcaatgggtaataacaagttatgaagtgatatgagatgaacatgtnngtataagtgaaagcagcatgattcctgaagtaacaagaggatgagttatgaaaaaaaaaatcataattcttaatgagatctatactctatgttgagtggagtacct

SEQ ID NO: 13087 - DNA, 416 bp, Glycine max
  unsure at all n locations
agcttcaacgcagttgggcatgaagtggaactattcttatcattgatctccatgaaggcttcaatcgggtggtgtntagtaatacggaggattataatttcgtgttttttgaaggaccgtggatgtttgtgaaccactacctcattattcanagatggagatcattcttcccaatgcatgcagaagagacgaagaagatagcggtatgggtcaagattcagtgtctccttattgaattatataatgatgtgttctcgtcaagaattaggatgagtttaggcaagtttctcaagtaggataaattaacatcaatccactccaagggaaaatttgcaagaatgtgtgtggacctagattggataaacccttganatcttatatntacgtgagagggtttaagttgaacctggagtatg

SEQ ID NO: 13088 - DNA, 410 bp, Glycine max
  unsure at all n locations
gcttaatggcttctcgacatanactattatatcttacagtgagattntcaatgtcaattggatctgttagtttttcatcagttccaatatcagaatttgcattccttgtccatcgtttcaaaatgtagtgcgatggaagggtaagaacatttgtaacagtgaagacagtcaatatatgtcaacaaagaacgcctgagtattcaaacatctggcagctgcaattcaccttcatttcagagatatttaatgtgaccatgtatgccttgtgatcatgtacatattntgcaaccctgtatntactgatcacaccatcatcctcaacattattngcagtataagcaaaagtttccaccagttcctcctgannatttgcanaaatcttcttagtgtacatatttgctgctttgtgt

SEQ ID NO: 13089 - DNA, 437 bp, Glycine max
  unsure at all n locations
ntagaaggatcactatttctccgtgagagtgtcctacatgccacaaagcctcctaggcctacaccaattattgttggataggtatcatcatatttatgctaagaaaatcatgcacatcagaaagaataagttaaaatagtataccaattggtacaatagcaccatctgagccaccacaaagcatcaagtcctgcaattacttacatttttaatgttttcaataaaataactatataattacactaaacttgttttaagaaataaaagattggtaaaatatgagaaatctaccatctaataagcaaatgctgaagtgagatacttacagcttcacctctaatgatatggtttgcagcattcaatatacaaaaattactagtagcacacgctgtagagattgaataattagggcccatccacccctaaagtttcatatg

SEQ ID NO: 13090 - DNA, 374 bp, Glycine max
  unsure at all n locations
ctgcagccttcccttttttaaatatatgtttagttgtcctttatatataaaagattcattaatgtagtttactactttgttagatatagaattatattgaattaaaagtgaaattaaagagttaaaatgtgtatattactgaataaagttaaaagagaattcagagaataatgaagaaagaagagcgagagaagacataacatgttacatgtgtacatcgatcatagaccacaaaataccaattatatgaatttaaatnntaaattttcttaggtactctgggtganaaatataaatcttagataataatctaaaaacgacatatattntagatatgannaaattaattaagcctaatattagcatagatgata

SEQ ID NO: 13091 - DNA, 396 bp, Glycine max
  unsure at all n locations
agcttctatagaaggttcgttcctaatttctctacaattgcatcacctttcaatgagctggtgaagaagaatgtggcatttacctgnggtgaaaaacaagagcaagcctttgctttgctcanagaanagcttactaaggcacctgttctagctcttcctgacttttctaaaacttttgagctagaatatgatgcctctggagtgngagttggagctgtattgttacaaggtgggcaccctatngcttattntagtgaanaaattcattgtgccaccctcaactaccccacctatgataaagagctntatgccttaataagagccctccanacttgggagcattatccttgtttccaangggaattgtcattcatagtgatcatcantcacttaagt

SEQ ID NO: 13092 - DNA, 462 bp, Glycine max
  unsure at all n locations
accggatccttaagtcaccgcggctgcagcttataaactaaaagcatgaacacttcnttttactcctcttgaagtactntntaagaaagtatatttaaagagatataatttcttatttctgaaaaataaactcaactcaattaaatttaattaaatatcaacttttttaaagaaaataaatattaattaaagaattagattaaattcaatcccattcgaatcacttaagattattggaagatttaaagtattttccattgttatcccaccacgacaaatcaacggtggtcatcacgaatgtgttatcttgttgtggataagtcatcggtacacaaaatctagaacgattcctgatagcatgtattataataatatatacacgacaacaatgttcctaacatgtaaagctttctatataaagatatgattgtcattataataaggaatcttatatcttataat

SEQ ID NO: 13093 - DNA, 407 bp, Glycine max
  unsure at all n locations
ntaccgctacanaagccggggtttatcaattgactgcnttcctcgaaaatggcgattcgatgcaacaaacagtgacctatgtgccgaacgtcgcgaatgctgaaatcacgctggcagcctcgaaggatccggtgattgccgacaataacgatctcacgacactaacagcaacagtcgctgatacagagggcaatgcgatagccaacactgaggtaacatttactctgccggaagatgtgaaggcgaacttcacgctgagcgatggcggtaaagtgattactgatgctgaaggcaaagcgaaagtcacgctgaaaggtacaaaagcaggcgctcatactgttacagcatcgatgactggcggtaagagtgagcagttggtggtgaactttattgcggatacgctcact

SEQ ID NO: 13094 - DNA, 493 bp, Glycine max
  unsure at all n locations
agcttgtgctatcaagctatgacttanatcaatgacaactagatgcagaatggttgctntgaagttgattgcaagaccatggttgacacttttaatagttgtgctaaaggaatctctgatttttatgtcattntaaataaatgtagagcacttatttcatctatcccaaactctagaagatgctntgattaggttgcattggatgtgccgcatcacctaacaaagtcactctcccaattccccaagtgttgatcatgcctctgtcacatatatccctctgcagaatcatgtgctctagtgtttctgatatgagtgcaatcacttcattgcaccaattaccaaagagagatccanaagcctcttcttcccttggctaacatctgaagcaacanagtactggttcaagcccaagaaaacctttgtaccttcagttcaatcaccaaaacagaaactntanatagtggaatagttataagtataacattttctaaca

SEQ ID NO: 13095 - DNA, 437 bp, Glycine max
tggacagttcagcagaccacatgtttgtggttaggattcttccctcaggaacccaatgagcatatacatccttcaatgtttgaatggctttttggccttctggggtctccctgcctccaatgaggacacggtccggattgaaaagatcttggattgcagttccctcagcaaggaattcagggtttgaaaggatttggaacttgattcccttgccattgtgagtcaaaattttctctatggcctcagcagttttcacagggacagtggatttctccaccacaatcttgtcactcttggatacatcagcaatcatgcgtgctgcactctcccagtacgttaaatccgcggccttaccggctccaagaccgcgagtttttgtcggggtgttgacagagacaaacactatgtctgcctcatagacatgtttctcaacatca

SEQ ID NO: 13096 - DNA, 271 bp, Glycine max
  unsure at all n locations
agcttgtgccaattggtccattgttgagaagttatggtgacacaattgcaactgcaaaatcaatcggacaatactgggaagaagatctctcttgtatgagttggctcgaccaacaacctcatggttctgtcttgtatgttgcctttggtagtttcactcattntgatcaaaaccaattcaatgaactagctcttggaattgacctcaccaatagaccttttctttgggttgtgcgtcaagacaataaaagggtataccctaatgaattctt

SEQ ID NO: 13097 - DNA, 397 bp, Glycine max
tgtgctattaactaattagaatcttacctgcaccaattgcatatacatttttcaagccacccatgacctcatgggtgacaaggtcactgttgtcccaaacaataaaatgtggttgtcgtagaaactttgcaagaggttttctccatttctcatctccgcaaattcgggcattggcatactccttgttgtatatttctgaggcaatatttggaccaccaagatacagtatgttctccataggcactccagctgtcaaagtatgcattgtaaagagttgagaatgaggaaagataaaaatagatatactaccaaattaccagcttccattggtcgttatcaaacaaattctagataacaaatagcagtacctagctggtggactatcagtttatatgga

SEQ ID NO: 13098 - DNA, 454 bp, Glycine max
  unsure at all n locations
agcttcaagaaaaagatggcctcagcaaattccttatttccagaagggaattctatcaatagacctccaatctttaatggagagggttaccactactggaaaacccgaatgcaaatttttatcgaggcaatagatctaaatatctgggaagccattgaaatagggccttatatacccaccacagtagaaagagtttcaatagatggtagttcatcaagtgaaagcataaccatagaanaacctagagatagatggtctgaagaggatagaanacgagtacaatacaancctaaagccaaaaacataataacatctgccctaggaatggatgaatattntagagtttcanatngcaagagtgctaaggaaatgtgggacactcttcgattaacacatgaaggaactacagatgttaaaagatctanggataatgcactaactcatgagtatgaat

SEQ ID NO: 13099 - DNA, 466 bp, Glycine max
  unsure at all n locations
agctnntcacacggatttcgattcggngacatatcttatctagacgctcaaaatttaacaacggaagctctcgagaaatttgaatggtcgtaacatttcacacggatgctcgattcgaggacataattcatctagacgctcgaaactgttcaacggaagctctcgagaaattcgaatggccataacatttcactcggatgtttgattcagggacataactcatctagacgctcaaaatttaacaacggaagctgtcgagaaattcgaatggtcataagttttaacacggatgttcgattcgcgacataatatatcaagacgctcgaatatgaacagcggaagctctcgagaaattcgaatggtcataactnttcacacggatgttcgattcggggacataactcatctagacgctcaaaattgaacaacggaagctctcgagaaatctaatgtcataactttcaca

SEQ ID NO: 13100 - DNA, 366 bp, Glycine max
gtctcacgattgtcacgtgctcatgcatcttttgttagtcgtggctatacgagacatcttgccaaacaaagtcaagttagccataactcacctgtgctttttcttccatgctatatgtagcaaagtcattgatccctgtcagtatgatgagttggaaaatgacgccgcaattatatagtgtcagttggagatgtatttcccccctgctttctatgacatcatgattcacttgattgagcatctggtcatacaaatcaaatgctgtggtcctgtttatctatagtggatgtacccggttaagcgatacatgaagattctataaggggttacatagaatctatatcatccagaagcatctattgttga

SEQ ID NO: 13101 - DNA, 386 bp, Glycine max
  unsure at all n locations
agcttctcgatatattatgcacatgaatcggactctttagtgacaagttatgggccattgaatgtttcgagagcttccgctgctcaatttcgagcgtctcgatatattatactcctgaatcggacctccgagtgaaaagttaagaccatttgaatttctcgagagcttccgttgttcaattttgagcgtctcgatatattatgcgcctgagtcggaccttcgagtggcgagttatgaacatctgaatttctcgagagcttccgttgctcaatttcgaccgtttcgatatattatactcctgaatcggacctccgagtgaacagttatgaccatttgaatntctcgagatcttccgttgttcaatttcgagcgtctctatatgtgat

SEQ ID NO: 13102 - DNA, 377 bp, Glycine max
ataactcggatgtccgattcaggcgcataatatattgtttcacttgatattgaataacagaagctctcgagaaattcgaatggtcataacttttcacacggatgtccgattcgggcgcataatatgtcgagacgctcgaaattgaacaacggaagctctcgagaaattctaatggtcataacttttcactcggaggaccgattcaggcgcataatatatcgagacgctcgaaattgaacaacggaagctctcgagaaattcaaatggtcataacttttaactcagaggtccgattcaggcgcataatatatcgagacgctcgaaatggaacatcgaaagctctctagaaattcaaatggtcataacttttcacttgg

SEQ ID NO: 13103 - DNA, 331 bp, Glycine max
  unsure at all n locations
agcttctctatatgtgatgcacctaaatctgttttccgagttanaagttatgaaccatttgatttctcaagcggtatcttttctcaatttcgagcgtctcgatatattatgcacctgaatctgacctccgagagaaaagttatgaccattcgaattgctcaagagcttccattgttcaatttcgagcgtgtcgatatattatgcgcctgaatcggacctccgagttacaagttatgaccttctaatatctcgatagctctctcgtttaaatttcgaacgtctcgacatattatgcgcccgaatcggacatccgtgtgaaaagtatgaccat

SEQ ID NO: 13104 - DNA, 422 bp, Glycine max
  unsure at all n locations
ntganaatataatatcttgatttctaaaatacccattttctctccccctttggcaacataaaaaaggccaaagtgcataaaataaaacatacataaatgattctaaaacatacataaagcataatttgaatatcaccaaatttaaatacataccacttgtcatatatcatcaaaataactaagtctaagcataaaacataaacatataagtgcaaaataaaaaaaaaacatcaagttcagtcataattaactaagtaccaaatacttaaaacataaccaatgttttagagaataatgtcataaaacatagccaaatacatggcttaaacttaaaatataataataatctaaatctatgaagatggtggtggaagggtgaagcaatcaatcaagtaattcaaacatatcaaacaagaatcaca

SEQ ID NO: 13105 - DNA, 452 bp, Glycine max
  unsure at all n locations
nnagcttgttgaaatataatcaatgcaagacctcttgagagtattagtgaacatgtcctccagttggtcactagagttgacaaactcaatggtgattnttcctgagagcactttctctctcacaaaatgacagtcttctactgtgtttagtccattcatggaagaccggattagatacaatgtggagaacggcttgattatcgcanataagattggtggcttgagtgtctccaaattggaactgctggagaagtntccttagccatgtaatttcacttgtagttgcaggcatggcacggtattcagcttcagcactggatctagtgactatattttgtttcttgcttccncatgggatcaaatntcctcaaataagaacacaataaccaatcatggacttcgtggctgatggtgagtctgcctaatcagcatcagagtanaacaaatgatct

SEQ ID NO: 13106 - DNA, 464 bp, Glycine max
  unsure at all n locations
agcttggtcccacactctgttcagctctctctaatctagaggtaaatctaggatctctatcagatactatgctagatggcacaccatgtaacctgacaacctcacttatatacaaggtggtcaacttctccaaggaaaatctgatattaatgggaatgaagtgagcagacttagtcaatctgtcaacaataacccagatagaatctaaacctctaggggttctaggtagtcctaccacaaaatccatggaaatactgtcccacttccactgnggtatctctatgggttgtaacttccttgaaggtctctgatattctatcttagccttctgacagactangcatgcatacacaaactcactaacctctctcttcatgttgggccaccaaaacgtcgtcttaaatcatgatacatcttggtagcaccaggatggatgctcanantactcctatgtccttcctcta

SEQ ID NO: 13107 - DNA, 376 bp, Glycine max
  unsure at all n locations
agctttanattgaataacggaagctatctatatattcatattgtcataactagtcacacggaagtccgattcaggcgagtaatatatcgagaagcttgaaattgaacaacgaatactctcgagaaatgtaaatggtcatcataacttgtcacacggaagtccgattcaggcgcatactatatcgagacgctcgaaatctaaccacggacgctctcgagaaatgcaaatggtcataacttttagcacgagagcccgactcaattgcataatatatcgagacactcgaaattgaacaccgaaagctctcgagaaattcacatgatcataacttcttacacgtgagtcagatgcacacctataatatatcgagatgctc

SEQ ID NO: 13108 - DNA, 371 bp, Glycine max
  unsure at all n locations
ntcactcggaggcccgattcaggcgcataatatatcgatacgctcgaaattgaacaacggaagctatcgagaaattcaaatggtcaatacttcgaactcggaggtcctattaaggtgcataatatatctagacgctcaaaattttacaatggaagctctttggctatacaaatggtcataacttttcactcgaaggtccgattaaggcgcataatatatcgagacgctcaaaattgaacaatggaagctcttgagcaattcaaatggtcataacttgtcactcggaggtgcgattcaggcgcataatatatcgtgacgctcgaaattgaagaatggaagctcttgagcaattaaatgggataacttgtact

SEQ ID NO: 13109 - DNA, 375 bp, Glycine max
agccttgatgtaacatttggagaggttaatgattcaactttatgatgcgctccatgagaggttggatcagatggagaatagagaccatatgaattgctcaagagcttccattgttcaatttcgagcgtctagatatataatgcgcctcaatcggacctccgagataaaagttatgaccatttgaaatgctcaagagcttccattgttcaatttcgagcgtcacgatatattatgcacctgaatcggacctgcgagtgacaacttatgaccatttgaattgctcaagagcttccattgttcaattttgagcgtcacgatatattatgcacctgaatcggacctgcgagtgaacacttatgaccatttgaattgctc

SEQ ID NO: 13110 - DNA, 320 bp, Glycine max
  unsure at all n locations
ntacccttcacttgcaataaccacttctcataacaacagcacacactcttctgctagtgtccacaacaatctccttagtccaaaagaaattcataatactgttgtatctagttcttctaaactttggcatcaaagactatgccatcctaacaaggatgcactatcaattgtactaaataaatgtaatataccctttatcaataaaactagcagtgatttttgtaattcttgctctatagccaaatctcacaaactaccctcttctccctcttctactgtttatactgcacctcttgaattagtattctttgatgtttggg

SEQ ID NO: 13111 - DNA, 354 bp, Glycine max
  unsure at all n locations
agctgaatctgacagctgcatggaatgtcttttgttctcttctatggatggagcaatgcaggatttcacgtgagcatgtatatgccatctggaccagtggagactgttatgccatatctcctaataagggctgaacagaatagaggaatgttggctgcttcgggctatgacaggcaactgatgaggtaacaaaaaaacattttaattatattaaccacttttcattctggcatcatgcacatgaatcacacattgtgatgtgtatgcangaaggagtcgtgaatgagactaacagctgctgtcttttaattttctatactcttatgggacgagttaatgagatgtgataatgtc

SEQ ID NO: 13112 - DNA, 431 bp, Glycine max
  unsure at all n locations
gtttatccatgatatcctatgatggtgagcttcttcttgtttcatcttctcattgttgtggcgtgtccaatcatctttcttccttctccattctgctgccattgaacttcaagaagcaaagaactccattgatgaagaagatccaaggcctacaagctccacatggagttacatcacatgcatatcatactctgagtgtagctagtaacaacacacaacaaatgataatttttgggaggatgatccaaaagtttttgcttcatacacctacaacaactaagtcatagtagagaagaagagtcaaagtctttcaagtatcatgtatttggcagtttttaaggtcaacatagctgaatctttntctgcaacctttatatgtttgattgaagaacgaaatgttgaatactctanatcaactcactttttaattt

SEQ ID NO: 13113 - DNA, 424 bp, Glycine max
  unsure at all n locations
tatcctcctctanagcatggaagcctaatgccgagaaggattttgatgccatgtattatattctttaagctaatagaatgtattttctattttaaagaaaaagcttaaaaatcactaatttattttctttaatgcattaggattgttcattttcatttctttttccaacttttgtttctataattaaaagatgatagcaattcttctatttgcagaaatgacttaaatgtgaaggtgtcaaacatcaaaattcagggtgtggggcataaatatatatgcctaagatcacattattatgtaatcaattctaatttttataataaagtattatgtttctttattatatttacactatttgataagatagctattttgataaagtcctttataattgagattatgaaaatgagaaacaagtctctta

SEQ ID NO: 13114 - DNA, 423 bp, Glycine max
  unsure at all n locations
tttcttctagaggaattcgacaaggagttatgctttctacttacatttttgtattgtgcattgagaggcttttccttcttatttctatagctatggaccaaggagtgtagcgtcatattcatcttagtagacatggccctcctataacatatttagcctttgcatatgatgttattctatttgtgaaggctatcctagagcatgtccatgtgatgaagaatattctaaatctattttgcaagagctccaggtagaaattaagcttagagaaatctcgcatgttatttttaaatattgtgggaagaaatctcaagcaacatttgagtgatgctatatggatgtagtggacagaggacctangcaattaccttgtgtcccaaattttcatagnaggccctcatgaattaccttctagtttattat

SEQ ID NO: 13115 - DNA, 340 bp, Glycine max
  unsure at all n locations
ggatcttaagcaccgctgctgcagctntcactcggtgtccattaggcgtctttatatcgagacgctcgaaattgaacaacggaagctctcgagaaatggaaatgatcatcactcttcactcagatgtccgaatcagacgcataatatatcgagacgctcgaaattgaactacggaagctctcgagaaatttaaatgatcataaattctcactcggatgtccaattgaggaacatcagatatcgagacgctcgaaantgagcaacggaacctctcaggagattcaaatgggcatagactttcagacggaagttcgattcaagcacatcacatatggagacg

SEQ ID NO: 13116 - DNA, 429 bp, Glycine max
  unsure at all n locations
agcttcgaattanatcatgttatatactctctgttctattgatcctaatcctgaaaattgattcttgtttatatcatattcgttgtttattttgcagagcttctacctggaatcagggaagatgcagaagctggaactctgcctgctaatgttgttgcgggaatggaaggattctacaatatataactataaaaatgcagtaagtntatattctatgtcttatattcatatacacacatgcattgtgatatccaaacttttcataatatcggtggtgtgggaacagatattagtttactcataattcactatgaagctgaactcagaaaatcacgtgtttcaagtatgagaagattgcgtctattggcgctgtcatctattcttgttcctttactttnttcatgtgttgattcatagttgggtataata

SEQ ID NO: 13117 - DNA, 387 bp, Glycine max
tcaggtctgcttaatataacactttttagtttactatttcttaatttcttcctgctattagtgcaaaccattttgctatgttttgtgtttttttgttcgtgttgtggttttgagtttgaaagttgaacggttgtgcttagctttttgaactttacggtatgttgttgttgttggatggcactatatcacatgaatgcatttggtttgcaacctgctgcgtttgcaaggggttgtgaagcgaatttaataataaataaaacaatgttttctctctggctctctttgtatatttattgaaaaactatacaatatttatagagtatcttcaataatacttaaaaaattaagtattatgataaaaaaatttttacataagtgacttaatga

SEQ ID NO: 13118 - DNA, 423 bp, Glycine max
  unsure at all n locations
agcttcatggccgaaaattcgaggatattcacgttgagcctcgttcttaaattggtgccccatanaagaatgaaaataagaatcatcaataaacaatatatattagatataacttatgtttgactaccaaatttacttgttaatgatatttaattagacatattatataattatatgtataccttgccttgccaagaactgagatcggtgtggcagattgtggtgaagaggatcttgattcgaacctccattntctgaggaggatgaacaagaacacgttccaccacaaagggctctccatgaccatatgccacggcagcttcatcataataataataataataataataataataatattgagctatgagaatgagaatttgtgcgcattctgtacgatagtatgatctgaatanataatat

SEQ ID NO: 13119 - DNA, 384 bp, Glycine max
  unsure at all n locations
tttcgagcgtctcgaattattactggactcaatcggacttccgagtgaaaagttattgtcgttagaattagctgcgagcttcggttntaaatttcgagcgtctcgatatattacgggactcaatcggacttccgagtgaaatgttattgtcgttcgaatntgctacgagcttcggttntaaatttcgagcgtctcgatatgttacgggactcagtcggacttccgagtgaaatgttattgtcgttagcatttgctgcgagcttcggttttaaaattcgagcgtcacgatatattacgggactcaatcagacttccgagtgaaatgttattgtcgttagcatntgctgcgagcttcggtntataatttgagcgtcttatatatta

SEQ ID NO: 13120 - DNA, 472 bp, Glycine max
  unsure at all n locations
agctatngaattagtattacttgagatcatatatttggtgttaaaaaattctttctctttctggtattatntgtctttttaaaataatgcattatttcataaaaaagttaactacactagctagtatgataaaatcattctccttgactaanatatcctcattaaaatagttaanatctaattgtaaattagtttaaatagtaatatttttgccatagcacagtatacaatataaattgttatttttatataactaaattcataataataaaaaaattaatatgtaaatcatattaaaattaaagttcataataaataaatatttagaacatataaattatagtttagatctacaataaataatttatattgtagtacaagaatactnttaactatttgataatttcttttaaaaattaaaatatgtacaacaataaagatgaaaatgatagattgaaaggtataataacca

SEQ ID NO: 13121 - DNA, 384 bp, Glycine max
  unsure at all n locations
aatgacactaacttgtgactcggatatctgattgagtcatttcatcatgcgaaacgctcgaaattgaatacagaagctctaagcaagtacacatgacaataactcttgactcagatattcgagtgagtcattttataattagagacgctcataattgaatgctcgagctctcaccaaattcaaatgacaataactttatactcagatgtccgattgagtcccgtaatatatcttgacgctcaaaatggaaaacagaagctctgagcaaattcgagcgaaagtaacttttgactcanatgtccgatngagtcatttaataattgaagacgctcggaatatgaatatagaagctctcacaaaaatcatatgacaataactttatac

SEQ ID NO: 13122 - DNA, 406 bp, Glycine max
  unsure at all n locations
gcttcatggtatgcccaagatnttggnctcttactgttacccattgtttattactaaattctggcatgaactattccaattaagtggaacaaaactgcgcataagttctgcgtactacctgcaatccaatggtcagaccaaagttcttaatcgagtcattgagcaataccttcgtgcttttgttcacaacaagccatcttcttggggtaaatcttttatttggtatggatggtcctacaataccttcaaacgctcagctntaggtgcttctccttatgaaatcacttacgggaaaaaagccccttagcattccccaatatcttacaggaacctcaacaaatgatgtagttgacaacttcttaagtaatagggaagccgcttttgcagagctgaaaagaagcttttg

SEQ ID NO: 13123 - DNA, 443 bp, Glycine max
  unsure at all n locations
agctntatgtgacacactttgtcactcagtgtttcttttgaaaaccattgtgaaaatactattttatcaattactagatgacaatgcttttgttttcataaaatatggttttactcattggacaaaactatctataacttggtttttgcaaatttgttagtgaaaaacaacttcttgcgaacagattttattttcatctaacacgttattcaaccctccttctagtgtgatatctattttttcattatcttggacaacataatttagttgcattgatgtatctatgtatttcttttatgtatgttatgatacccacatcttgagggtgaaatgtatttaactatatatggagtgcgttgatttttatatatatatctggtccattcgaatgatattgtcgatgaaggcttctattttaagctacaataattacttattctatt

SEQ ID NO: 13124 - DNA, 470 bp, Glycine max
agctttaagccaaacatgtaatcaattacattatattaccttaaaccatatcaccacagaataaatcatggtaatggattaaatcatggggtaatcgattaaaatagaaggtttcaaaaatcgataaccacacaacaacacagtgtaatcgtttaacacgagagagtaatcgattaaaatagtgaaaaacacaatatgataaagtaaaatatgtatgttttaaaaaaaaaattcaaccacatatcagcatatcaacatactaagatattactgaagataataacaaacatagagagcatatataacaagctacatgtactaaaacataacatcatccaacactagatccatctaagatacctagttcattcctaataaagaagaacttatctctagcaagagggttagtaaagatgtcagctagatgatgttcactatcatcaaactcaatgcaacaatcacactttgat

SEQ ID NO: 13125 - DNA, 476 bp, Glycine max
  unsure at all n locations
gcttccatgcaattcactaaatgggcatctttgtttttgtgcatcgcattctctaacgggagattgtgaggacataacaagtgtctactagtatggtaacttgttattgtacccacttgttaccaaggttgagatcattaccagcttttttgcatatccgactctaaggtataattgagttaaataccttactatanagtctgaccaggacgacattaattggtcaattgtcttaagaattactacatattaggtttttcttatttaaaaagtagttatttatttttaatcccccaaaaaaattgttttagataaaacaaaacttgtaaaactcttattgtgaaaataaactgatacaagtatccatttgataaatatataaaatttgttttttcactataaagcatgttntaatataaaanaagtttaattaanatttaattaaacacacatctcaattatatntaaatctaaaa

SEQ ID NO: 13126 - DNA, 447 bp, Glycine max
  unsure at all n locations
taaatgtttgtcttatttgtacacacgcgcaattgcaattattattgaatatcanattatcaatagtaagtactaagtactaagtacaacgaaattcaataaaatttgatcgattcttttccgctctcccaccaaggaatatcaccaccatccaaatcttagattgttactaattatacaagtctaattatcaaattaatagagcaatatcatcctaagcaagaacctgggaaaaaaacgttctatttntctttataaacattacagtgttttgtttatatatatattctaaatatcaaattatgtttagcaccattaaacaaaacgtgtgtgatcaattcattttaatgtgtttatagctagcacatgaggaaaacagatacgactagattataattgttttacaaaccgaatcaatgaccaatatatctctttctttcttcctaa

SEQ ID NO: 13127 - DNA, 456 bp, Glycine max
  unsure at all n locations
agctaagcactaacattcttcttctttggcaaattttgtctaaaacatacttagacacttcctgagcaggtacgagcagttatgcaagtgggatcagcaactttcattatcagagtaatcaagcacagcggtatctgtagtggcgacagcataattctgcaagttgcaagtcgtttcccggatgtcaagacatctcacgtgaccatcagcttttgctccccctgtctccatgctcttactgctgtgaagcagttcactgcagcatcttctatcagctactagtcttttccaggatgtcaagacatctcatgtgacatncagcttttgctccccctgtctccatgctcgtactgcatcttctatcagctactagttgcagtagcttacatcaatcatcatcagcagcagcagtctccccctcagaatcatatacatacaactccccctcaaatcatg

SEQ ID NO: 13128 - DNA, 287 bp, Glycine max
ctctgtggttatgctcctctgccgacaccacacagatctttgcccttctgtgcaacaatgtgaagcaattgaacaaccagaagcttatgctgaacacatatacaatagacctcctgctcctcagcagcggaagcagccacaatagaacaactatgacctctccagcaacatgtacaatcccgactggaggaatcatcccaaccttagatggtcgaatccttcacaacaatagcagcaacaacaacgaccttattctcaaatgttgttggaccaagaagaccatacgt

SEQ ID NO: 13129 - DNA, 377 bp, Glycine max
  unsure at all n locations
aaaagntattgtcatttgaatntgttcaaagcttctatttccaatttcaagcatcatgatatatgacgggactcaatcggacatccgagtaaaaactaattgtcgtttgaatttcctcagagtttctattttcaattttgcgagagcctctgtattaatctcgaccgtcatatactattaaataagtcaatcggacatccgagtcaaaagttattggcattagaatttgctcacagcgcctgttttcaattctgagcgtctctatatattacgggaatcaatctgacatccgagtataaatttattggcgatagaattagatcaatgtttctattttcaataccgcgcgtctcgatatatgaagggactacatttga

SEQ ID NO: 13130 - DNA, 439 bp, Glycine max
agccttggagtttccaagtgccaattcgtcctcttctttagtccagtcttcttctggcttcaattcatcagtgggctttccttctgtgtccagcatcttgggatgttcccagcctttgatgacagctttccaggttctgctatccagtgatttgaggaaggccaccattcttgctttccagtattcatagttgcttccatcaagaattggtggtctgttcactggtcctccttctttctccatgttcatcagaatttatctccccagatctcactctgtgatttcgagtgttggctctgataccaattgaaattctgataccaggggacagatgtcgtacaggatgtcacgacatcacgcttcagaacatgcagtttatgtgtgtccgtatgaacagattaaacaagtaaataacacaagagaattgttacccagttcg

SEQ ID NO: 13131 - DNA, 355 bp, Glycine max
ccatttgtctacctaggaatacctatatgtgcaaatccgaggcggggtcagctgtgggatcctattctcaaaaagtgtgagagagtattatctcagcggaagcaaagacacctttcgtttggggggagagtgacgcttatccagtcagtcttaacttccattcccatttattttttgtgttctttcgggattcccaagaaggaggtggacaagttagtcagtttgcaatgtatattcctatggggaggaggagcagatcacaacaagattgcttggattaaatgggagacagtatgcctcccacaagataaaggggacttgtgtatcaaggacatatatactttcaatcttgctc

SEQ ID NO: 13132 - DNA, 424 bp, Glycine max
  unsure at all n locations
agctngtatcttctattaatggagattaatcttttcttccacatcgtgtgngctgcaggaaatgatcaaccatatgaagattggtatagtagaagcaaagcatggtctctatcacctgataccaaactagttgaccaccaaagctgtaaactctaccatcacccatcctcnatgcaatgtaattcccataaaccttcggcactttaggttgcgtcacccttcancttgaaagaatacaatgtatgaaaacctattatcctcttctaagaaataacacaaattgtgtctgcaacacatgtcatttatgcacagcacaagaatatgccttttctcctaacagttcacatgcatctcatgttatcgatttacttcacatggatttatggggtccgtgtcaaaactatcaatgcatggacacaaatat

SEQ ID NO: 13133 - DNA, 247 bp, Glycine max
  unsure at all n locations
tatanggttaaagtctcacgattgtcacgtgctcatgcaactattgttagncgnggctatacgagacatcttgcctaacaaagtcaagttcacgataactcgcctgtgctttttctttcatgctatatgtagcaaagtgattgatccactaatgtttgatgagttggaaaatgaggccgcaattatactgtgcctgttggagatgtattttccccctgctattcttgacatcatgattcacttgatc

SEQ ID NO: 13134 - DNA, 317 bp, Glycine max
acaaaataattatgatctttcaagcaacagatacaatccaggttagaggaatcatccaaatctgagatggacaagtcctccacaacaacagcagcttgtccctccatttctgaatgttgctggcccaagcaagccatatgttcctcccccaatgcagcagcagcaacaacaacaaaggcaacaagcaactgagggatcctcctcaccttccttagaagagttagtgaggaaaatgaccatccagaatatgccaatttagcaagagacaagagccttcattcagagtctgacaaataagatggggcagatggctactc

SEQ ID NO: 13135 - DNA, 424 bp, Glycine max
agcttagccaaatgcacgtcattttaattcatatataatgttcattgcatagtcttcatccagggctgggcttgcgtgccattagagtcaatgcaactattagaataagccaatttaagtagtgacattatgttaactacaagattcatttgactattaaaataacattgattaattcttaggtgtttgctcacatgtagtagttgtgcaataatatcttattagaattagtagctaataattagattattgacatgaagaaaatagatcttaattagatgtattgtaagatttggacggtccaatatgatatatctagacgatataaaatactcataattttgatgataatagaaatataaattatcgatggactaatgctttatataaagtgaaatagaacatacttggtacaaactcaaat

SEQ ID NO: 13136 - DNA, 393 bp, Glycine max
agctttatggtttcttggatggctactcattgttaaatcagataagaccaagaaaaaaccacttttacatgcccctttggtgtctttgcttacaaaaggatatcgtttgggttatgtaatgtccctgccacctttcagagatgtatgctagccattttgttgatctggtaaaaaaatgcatcgatgtgttcatggattatttctttgtctttggattttcctttgaccattgtttatccaacttggaattggtgtgaccacaagatctcgtctcgagggattgaagtggacaaggcaaaaattgatattattgagaagttgcctccacttatgaatgtgaaaggcatccaaagttttctcatacatgcccgacttctatcggaggttcataaa

SEQ ID NO: 13137 - DNA, 432 bp, Glycine max
  unsure at all n locations
tcttacatagtccgcctttgctagaccttcttaatgcttattaacataaacattaggcataggcacaaagatcaagaggagttattgggttaaaaccatatacaacttctaaaggagaacaattagtggtgctatgaacagctctattgtaagaaaattcaacatggggtaaacaagcttcccaagtttttaagttcttcctcaaaactgtcctaagcaaagttcccaaagtcctattaacaacttccgtttgcccatcggtttgtgggtgacaagtggttgaaaataacaatttagtgcccaacttgctccacaaagtcctccaaagatggcttaggaacttagagtccctatcactaacaatgctccttggcanaccatggagtctcacaatctccttgaaaacaaatcagccacatgggaagcattatc

SEQ ID NO: 13138 - DNA, 279 bp, Glycine max
tgctgcatgcaagctttgagcatattcaaacgtattattactttgactcggatgtcccgatcgtgtcccgtaatatatcgagacactcttaattggaaacagaagctctgatgcaattcaaacgactataactttttacacggatgtccgattgagttccgtaatatatcgagacgctattaattgaaaacagaagctctgatcatattcatacggaccatactttttactcggtgttctattgtgtactgaaaatatcgagacgctcgcaatcgataa

SEQ ID NO: 13139 - DNA, 411 bp, Glycine max
  unsure at all n locations
ctgcaagcttacaataggaatntcagctgtctacagttattaagaatactaactaaacttcagttaagccaattttaactgtgttttactatttaagtcctagtttacaatttctcttattctttntctttcaattacttgttttgaaagcaatcatctgaattttctctatcttgtataatgataagaaccttgggagatctacaccacaaaagcgagtcattgtagtttggagagctaacagtcttatacatcctanacttcaaatgtgagattcaagtctcataccttgcaattggatcctaacattccatcttgcttcgcagccccatgcccacatgggcaggctgtgcactaaccctttaactagtccctagcanaaactacaatgccagcatcaccacacatgcc

SEQ ID NO: 13140 - DNA, 394 bp, Glycine max
  unsure at all n locations
acgaccataactgttgactcgaatgtatgatcgatgccgattatatatcgagacactcaaaattgaaaaacagaagctcacgagaaattcanatgggtataacttttcactcggatgtctgattcacgcgcataatatatcgagaccctctanattgaacagggaagctctcggcaaatccaaacgaccataacatttgactcgaatgtatcatcgacgcccacgatatttcgagacgctcaaaattgaataacggaagctcttgagaaattcatatggctataacttttcactcgaatgtccgattcacacgcataagatatctagacccttgaattgagcatggaagctcttggcaattcaaacgaatataacttttgacttaatgtatgat

SEQ ID NO: 13141 - DNA, 380 bp, Glycine max
gacactatgaaactcaactatgctgcaatatttacaatagacctcctcaacctcatcatttaaatcaaccacagcagagcaattatgacctctctagcaacagatacaaccctggatggaggaatcaccctaacctcagatggtccagccctcagcaacaacaacagcagcctgctccttccttccaaaatgttgttggcccaagcagaccatacattcctccaccaatccaacaacagcaacaacccctgaaacagccaacagttttaggccacattatttccaataagggtattgaagtagatcctgcaaaaatttctgttatttcacaattgccttacccctcctgtgtgcgagaggtgtgatcatttcttggtcat

SEQ ID NO: 13142 - DNA, 432 bp, Glycine max
  unsure at all n locations
gcttctccaaacaatagtatcgtctgcatattggagaatattatcatgcactttattcttccccactacagagctttggaagcaattatagctgattgctaccctcatcatacctgtcaaaccttcagcaaccaggtcaaaaacgagtggggccaaaaggtccacttgtctcaagcctctctgaggcttaaactctgacgctgggcttacattagcaatgactgacacagaagctgaagtaatgcaccccttgatccagctaatccatctctcattaaagcccattcttctcaacatatagaataggaactgccatgacacatagtcatangccttttcaagacaactttaaagaccatacatgacctgttggacctacttgcctcctccactacctcattagcaaccaaagccccatacaacagctttcta

SEQ ID NO: 13143 - DNA, 268 bp, Glycine max
tttattgacctgtgagccagtatcaatgtgatgtcactctctatgtgcagaagattgggagagttggaaataatgcccacttgaatgactatacaattagctgacagctccattaccaggtcatatagagtaattgaagatgttgtggtcagagtaaaacattttatcttctcgacagactatgtggtaatggatatctctgaagatactgacatccctgtaatattgtgaaggccattcatgctgattggaggctgcatagttgata

SEQ ID NO: 13144 - DNA, 445 bp, Glycine max
  unsure at all n locations
gatgaatgaagggagaggaagagaaagtctcttaatttgtgctntaaaagagctctaaaatctgaagattaattttcaaatgatcaaagntggaaaaatgcacacacatagcctctatttatagcctaagtgtcatataaaattggaggaaaatttgaatatctattcaaatttcactttaatttgaaattgaatttgtggagccgtattttggagccaaaatttcactaattatgattagtgaatttcagatatggttcagcccattaatccaagatcaagtccaagattctccactaagtgtgcttaggtgtcatgaagcatgtaaagcatgaatgacatgcacaaagtgtgactatatgatgtggcaatggggtgtagcaagaaaatggctcacctcccctctaaaattaattggatgggcttcaccattcaattaattatt

SEQ ID NO: 13145 - DNA, 462 bp, Glycine max
  unsure at all n locations
agctntaagaaaatttgcaacatcgttntggttatttaacaagaacattctatttcttgacattggtaccttggtaattatattatttctcccatctctgatggaaagactggaatctttcatgtgaatatcatagccttttttgagtaattgtcccaaactcaaaatattgttcttcatatttgggacgtagtagacatttgatatgaattcatgtcttgcatccttcanatggattatgatcttaccttttntcctttataggaatattggaattattaccaaattaggcattgccacttactgactcatcaagatccacgaacatgcttctttttccacacatatggttgcttgcaccagtctccangtaccatgtngtttcttggttacctatattacctccatgtgctangagaactgtttcannacttccatctttttgctccacatagttagtct

SEQ ID NO: 13146 - DNA, 393 bp, Glycine max
  unsure at all n locations
agctngaaggcaaactggatgcattggttaacttggtaacccagctggccttgaaccagaaattgtacctgtcgcaagggtctgtgttttgtgctcctctgctgaccaccatacagacctttgcccttccatgcagcaacccggagcaatggagtagcccgaagcttatgctgcaaacatttacaatagacctccttaacctcagcagcaaaatcaaccacaacagaacaattatgacctctctagcaaaagatacaaccctggatggaggaatcaccctaatctcagatggtctagccctcagcaacaacaacagcagcctgctccttccttccaaaatgctactggcccaagtagaccatacattcctccaccaatccaacaacaacaaca

SEQ ID NO: 13147 - DNA, 423 bp, Glycine max
  unsure at all n locations
tatactctnncttcatnatatacgatatagatgttaagttgacgtatccgcatcttcataatagagatgtctctaaaataatacaaaattaattttaaaatatataaaattagaaattcccaaattaaattgtagctagaaatagttattatctataaataattgtattatttattaagagtgtgtgaattattataaattataccgcagacgtatatgatttttacgaataaaaaattaagtatatttcttatgatatgatcttatctcttaatttactctcattaatagagtgggatatattgttcttcattaatcttaacatttaaattcaaaacttttaccaacaactatttatgcactccaaaatcctatctatattcaatcggtatatatttactctatgctcattcatttctatat

SEQ ID NO: 13148 - DNA, 473 bp, Glycine max
  unsure at all n locations
tgcaagcttcaagaaaaagatggcctcaacaaacttcttatttccagtaaggaattctattaatagacctccaatctttaatggagagggttaccattactggaaaacccgaatgcaaatttttattgaggcaatagacctaaatatttgggaagccatagaaatagggccttatatacccaccacagtagaaagaattacaatagatggcagttcatcaagtgaaagtataactatagaaaaacctagagatagatgttctgaagaggatagaaaacgagtacaatacaatttaaaagccaaaaacataataacatctgccctgngaatggatgatatattcagggtttcaaattgtaagagtgctaacgaaatgtgggacactcttcgattaacacatgaaggaactacatatgttaaaagatctangataaatgcactaactcatgagtatgaattatntagaatgaatg

SEQ ID NO: 13149 - DNA, 425 bp, Glycine max
agcttccaaccatagagcttgttaggctgctatatcaacaacaatatattctacttcacatgttgacaaagcaactacactctgcttctttgagcaccaagagattggtgatgttccatatttgaaaacataaccagtagtgcttttcctatcatccttatcaccacaccaatctgaatcactataaccaaacacttctccttctatttcttgtgactgaaaggatataaaatgccaacatccaatgttcctatcacatatctcagaatcctctttgctgccaagaaatgaggtgtctttggtttctccataaacctgcttatcaatataacacaatatgcaattatatgtttggtgtacatatgaaccataattgacctacatattggtggacgagggatgatcaatttgtttctcatacccat

SEQ ID NO: 13150 - DNA, 469 bp, Glycine max
tataagcttgcgtcagatttgaatgctgcaatgaagatgatatacatgtattctactttgcctgcccttggaaattgctaaaagtatgaaggcgtgtggagaaagcatgcgagagaacattattgctgcaagaatcttgcgatccatgattctgaaatttaactatgttgtgtgctcgattgaagaatccaataatttggatactatgacaatcgatgaactgcagagtagtcttttagttcataagtaaaggatggtgtgttatgaagaggagtgacaagcaccgtatattacgcatgaagataggggatgaagaggacgaggatgatgaaaaccacgacgaatagggttttccgtcgtagaggaagacggagacagtcaatcaacaaagttgatattgaatgcttcaagtgtcacaaacatggacattgtcaatatgaatgtctacctgggaataaaataaatatgc

SEQ ID NO: 13151 - DNA, 419 bp, Glycine max
  unsure at all n locations
tgtgcattcaatatcctgatgagggtgttccatatgttctctagactggactaatacatttgctgcccaagtttcatggtcttgcaagtgaagatcctcataagcatcttaaggagttccatattgtttgttccaccatgaagccccctgatgtccaagaagatcatgtctntctaaaggcttttcttcattctctagagggagtggcaaaagattggctatactaccttgctcctaggtccatttntagctgggatgaccttaagaaggtgttcttggagaaattcttccctgcaactaggaccactgccatcagaaaagacatttcatgcatcaggcaacttagtggagaaagcttgtatgagtactgggaaagattcaagaaattgtgtgcaagctgtcctcaccaattgatttct

SEQ ID NO: 13152 - DNA, 397 bp, Glycine max
agcttgaaggataacttgatgccttggacaactctggaactcagctttccatgaataaaaaatctacacctgttgcaagtgtctgtggtctatgttcttttgcagatcaccatacagatctctgtccttctttacagcaatctggagtcaatgagcaacctgaagcttatgctgcaaacatttataatagacctcctcagcagggaaaccaacaacagcagaataattatgacttttcgagcaatagatacaatccaggttggaggaatcatcaaaatctgagatggacaagtcctccacaacaacaacagcctgtccctcctttccagaatgctgctggtccaagcaagccatatgttcctcctccgatgcagcagcagtcacaacaaagacaaca

SEQ ID NO: 13153 - DNA, 143 bp, Glycine max
  unsure at all n locations
ttgaaatcgcacagcggaagctctcgagaaagtcaaatggtcttaacttgtctcacggaagtccgattcaggcacatactatatcgagactcccaaatagaacaacgnaagctctcgttatatttaaatagtcataacctttc

SEQ ID NO: 13154 - DNA, 380 bp, Glycine max
  unsure at all n locations
gctcagggcttcggtattccatatcgagcgtctcgatatattacgggactcaatcggacatcatagtaaaaagttataggtgtttgaatttgctcagagcttcngtattccatttcgagcatctcgatatattacgggactcaatcagacatccgagtataaagttattgtatgttgaatttgctcacggcttctatattccatttcgagcgtctcgatgtattaccggactcaatcagacatccgactataaatgtattgtcgtttgaattgctcagagctctacatatcatttagcttctcattatacggactcaatataatccgataaaattattggcttgatttgtagacttcgaatcattttaggttgattatta

SEQ ID NO: 13155 - DNA, 497 bp, Glycine max
  unsure at all n locations
gcttggtgaagtaacccggcttctggtgtgtgcaggtattggttntgctgacaaatagtgtagttgcaaacaaaatctttagtgtcaaagtacatgtgttggatcgagtggcctcagaataattaagaaggaggggtttaattaattattcctaagcctttactaattaaaaatttactcttctaaggcttttactatgttgttaagagaataaggagtagaagagaaacttaaccaaaagtaaaagcggaaattaaaatgcacagcggaaagtaaaagagtagggaagaaggagacaaacatacaagagtttttatactggttcggcaacaactcgtgcctacatccagtccccaagcgacctgcggtccttgagatttctttcaaccttgtaaaaatccttttacaagcaaagatccacaanggatgtaccctccctttgtctctttgaacctagtggatgtaccctccactagaactgatccacaagagatgta

SEQ ID NO: 13156 - DNA, 422 bp, Glycine max
  unsure at all n locations
gcttttgcagttggaatcatttatcctatctccgacagccaacaggtgagtcccatctaggtagttccgaagaaaatcggcctcaccgtgatcaanaatgagaaggaggagctgattcctactcgggtgcagaacagttggagagtctgcattgactataggaggctgaaccaagttaccaaaaaggaccattttcccctgccattcattgaacagatgcttgaacgcctgacaggtaaatctcactactgtttccttgacagtttttctggttatatgcaaatcactattgctcctaaggatcaggaaaataccacattcacctggcctttcggcacttttgcccatagaaggatgactntcggcctgtgcaatgcccctggtactctttttgcggtgcatgaatcaatatttcagtgatt

SEQ ID NO: 13157 - DNA, 389 bp, Glycine max
  unsure at all n locations
gcttaaccttcggtttggctcgaagacatacttaataagagaatccttaatagacaacagctctggaaattccttcttcaatttggctgcgtcaagctaattaattgttgctcctgngagcaacaatcaccttcgcctgttcctcaagagtgaagttcttccaagtgaaattggggtcaacataatccctgtacatctccaagatntcattgtgactaaccactccagggttagtaaagttccagatcccagtcagattcctcttccccatctcaatggagataggaagcagttcatccaatatagtcatcgaattcggaatgtcggtttctttgaagccgattccggatccaagggggtgatcggagtcgtactcnaagatgcagtcg

SEQ ID NO: 13158 - DNA, 263 bp, Glycine max
  unsure at all n locations
actctctagaaattcanatggtcataacttttcacacggatgtccgatcgggcgcataatatgtcgagaggctcgaaattgaacaacggaagctcttgagaaattcaaatggtcataacttttcacacggatgtccgattcaggagcatcacatattgagacgctcgaaattcaaatggggataacttttcaaacagatgatggacttaagcttatactatgatgatacactcgagcgcaaacatcgtagactctctcgaaat

SEQ ID NO: 13159 - DNA, 300 bp, Glycine max
  unsure at all n locations
cgtgctctgcnactattgttagtcgcggctatacgagacatctttgccaacaaagatagttagccataacttgcctttgctttttcttccatgctatatgtagcaaagtcattgatcctgtcaagtttgatgagctggaaaatgaggccgcaattatactgtgccaggtggagatgtattttccccttgctttctttgacatcatgattcacttgattgtgcatctggtcagagaaatcaaatgttatggtcctgcttatctatggaggatatacccggctgagcgatacatgaagatct

SEQ ID NO: 13160 - DNA, 243 bp, Glycine max
gatttgagagctgtgaagaatggtctaggcagattttggaaggccttttatatcttcacagtcacaatccaccggttattcaccgaaaccttaattgcaataacatttttgtcaatgggaatcaaggggaggtgaaaattggtgatttaagattggcggctatccttcaacaggccaattcagctcacagtgtcataggtaacgtttcctgagaaatattacatttattttacccttttttat

SEQ ID NO: 13161 - DNA, 390 bp, Glycine max
  unsure at all n locations
agcttgtaatcgattacacacatactgntatcgattaccagaggagattttcagaagatattctcaacagtcacatctttctgtgtggttcttgaatggctatcaaaggcctatatatatgtgacttgagacacgaatttgaaaagagtgtttcaaaacaaaaaggtcttatcctcttataaagcaaaatcgttttatcctcttacaaattccttggccaaattacttgtgattcaataaggaattatttgagtgctcaaattgttcaatctatctctttcaagagagatttcttcttttcttcttctttattctgaaaagggattaagagaccgatggtctcttgttgtgaaagaattgtcaacacaaaggaagggttgtccttgtgtg

SEQ ID NO: 13162 - DNA, 349 bp, Glycine max
  unsure at all n locations
gctttgagcaaattcaaacgacaataactnttatctcgggtgtccgattgtgtcccgtagtatatcgagacgctcgaaattgacaacagaagctcaaagcacattcgaacggcaataactttttactcagatgtccgattgagtcccagtatatatcgagacgctcgtaattgaaaacagaagctctcagcaaattcacacgacaataactatntactcggatgtccgattgagtcncgtaatatatcgagacgctcgtaattgataacagaagctctgagcaaattcaaacgacaataactctttactcggatgttcgactgagttccgtaatatatctagacgctcg

SEQ ID NO: 13163 - DNA, 427 bp, Glycine max
  unsure at all n locations
atggaagctcctaatatctcccacactnntttgggtgggccattcttggatggccttgattttctcagggtccacttggaccccatttctaccaactacaaaccctaagaaaactatattatctacacaaaaaagtacacttctctatatttgcatagagggtgtttttcctaaggactgaaagaacttgcctaagatgtcctaagtgatcatctaggctcctactgtacactaaaatatcatcaaaataaacaactacaaatctacctatgaaatcccttaagacatgatgcataagcctcataaaggtgcttggtgcattagtgagcccgaaaggcatcactagccattcatacaaaccaaacttggtcttgagagccggtttccactcatcaccctttttcatcctgatgtggtgatacccact

SEQ ID NO: 13164 - DNA, 504 bp, Glycine max
tgcagcatgcaagctgttggtgctcaagcctacttctcttctttgagtgaatctataataatttaaaaaacatgaatgttagttacttagtttcaatttcagcttctaatgtttcataatcaaattaaaaatgttcactttcatataatactatagattaagtgattaacttacatgctcaaaggtactccaattacgctcacatcctgatgagctacaggtcaaacttaaaattttaatggcaatggtttgcaagtgtggtgttttccctccacacaatttccaccactcaactggtaaatgcaattcatatgcattagcatgtacacagattattaattaatcattcaaatttataagtgaactttcccacttactaggagatatctcagtccttgctttcattgctacaatcataccaaacctctctctagctctattatacactagcaattgttgtgaacatcattacaaaatatcatcttactaagccatcatacattg

SEQ ID NO: 13165 - DNA, 433 bp, Glycine max
  unsure at all n locations
acttaatccagataagtatgaaaaagttttttcaaaaactagtagcacatggattnttctcaaaatctatttaccaaagattttttactctctagtaatagattaccagattattgtaatcgattaccaatagaaaaaatggttttcaaaaagctttcaactgaatttacaacgctccaattgatttcaaaatgttgtaatcgattacaatgttttggtaatcgattacctgtgtgcttgaacgttgaaattcaaattcaaatgtgaagagtcacattctttcacaaaaaagctttgtgtaattgattacactattttggtaatcgattactagtgaaagnttctgaacanatcanaatatgtaactcttcaaatagtttttgacttttacacattgctcttaagtttaataaaagtcataactcttctaatg

SEQ ID NO: 13166 - DNA, 459 bp, Glycine max
  unsure at all n locations
gagactaagaaattnctaatgaatatatttgatatgaaagatcttggggaagcctcttttgtattaggaatcaagatctaagagatcgctctcaagatatcctaaggttgtcacaagagagttatgtctataaggtcctagacagattcggcatgaaagatagtaaaccaggagataccccgatagctaaaggagacaaatttagtctcaaacaatgccctaataatgaccttgaaagaatagagatgcaaaagattccttatgcatcagcagtaggaagtctaatgtacactcaagtttgcactcgtctcgatataacatatgtagtaggagtcctgggcaaatatttgagtaatcctggaatgctgcattgaaaagcagcanaacgtgtgatgcgttacctacagagaataaaaggatacatgctcacttatcaaaattctgggaatatggagatca

SEQ ID NO: 13167 - DNA, 347 bp, Glycine max
  unsure at all n locations
cttgagcanattcaaacgacaataacgttttactcttatgtctgattgagtcccgtaatatatcgagacgctcgaaattgaataccaagctctgagcaaattcaaacgacaataactttttactcgaatgtccgattgagtcccgtaatatatcgaaacgctcgaaattgaatgttgaagctctgagcatattcaaacgacaataactgtttactcggatgtctgattgagtcccgtaatgtatcaaaacgctcgatattgaatgttgaagctctgagcacattcaaacgacaacaagtttttactcggatgttcgattgagtcccgtaatatatcgaaacgctcga

SEQ ID NO: 13168 - DNA, 373 bp, Glycine max
  unsure at all n locations
agcaagaaattatgtgcatatatagctacaaacgtcttggaattgatacatacagatattngtgggccatttcatacaccttcatggaatggtcaacaatattttatatcattcatagacgattactccagatatgcatacttgtttcttatacatgacaagtcacaatctttggatgtgttcaaaatatttaaagttgaagttgaaaatcaacttaacaaaaagaataaaatgtgtcagatttgaccgtgatggtgaatattatgacagatatgacggttcaggtgaacaacattcgggaccttgtgccaggtacctagaggaatgtggaatcgtcccacagtacaccatgccanggtcacctagcatgaat

SEQ ID NO: 13169 - DNA, 452 bp, Glycine max
  unsure at all n locations
aaaagcaatgggcaatggttatagaaagattgtgaanaaaaattgtttggaagaatattatacatatatattaacatgtgccaaagtcatgcttttatagactcttcatgtctagtcaaagaaaccattggaagagttgtgactttagagaaaaccatgttaagagttataactcttaactttttcttcaaaattgttcactggtagtcgattaccacaaaggcgtaatcgattacacaatgagttttatgaaaaattgtgactcttcacaattgggattgaattccaacgttcagattcacttgtaatcaattactaatattgtgtaatcgattacactatntgaaaatcattttggaacgttgcaacccatctgaaaaccatttgaaaaccaaactggtaactggtaatccattactgataactagtaatcgattactagagagtaatca

SEQ ID NO: 13170 - DNA, 457 bp, Glycine max
  unsure at all n locations
gcaagctngatcttnntagtttntatctttaatctttaatccctgaacgaactattcaagtggggggagtcgaactttaattatcttttacttcgcgcctaaagagggagcgccaaatatagataatatactgctcgttaatctgggaaagatataacagatttatgtgtccagtattttcgggcaagatgtcctgcacatcgtatccgacatcgtggatcctgcagcttcaattcttcatttgacattttatcttgccttgtgcattgtgcatcccaatctgattccttgacataacgtaggacatcatgtgcagcaactccagctttccttcattatctaagagcttatgttgtaacaanattttagccaatcttttagaactcagtaaagctaagcactaacattccgtgttcaaatacgagcgtctcgctatcctacgggacaccatcggaca

SEQ ID NO: 13171 - DNA, 442 bp, Glycine max
  unsure at all n locations
tctcagcttcacatcagaccacttcaggtgctggaactacttccatggacttgatggggcctatgcaagttgaaagccttgaggaaagaggtatgcctatgttgttgtggatgatttctccaaatttacctgcgtcaactttatcagagagaaatcagacacctttgaagtattcaaggagttgagtctaagacttcaaagagaaaaagactgtgtcatcaagagaatcaggagtgaccatggcagagagtntgaaaacagcaagtttactgaattctgcacatctgaaggcatcactcatgagttctctgcagccattacaccacaacaaaatggcatagttgaaaggaaaaacatgactctgcaagaagctgctanggtcatgcttcatgccaaagaacttccctataatctctgggctgaagccatgaacacagcatgc

SEQ ID NO: 13172 - DNA, 384 bp, Glycine max
  unsure at all n locations
ccaccatctnttcatagtagaatatcggtaatgtgtctactatcattatcattttttctccgccattgaggtgccacttgagctgccaggtctctccacctttgggcgtattctttgaaagatctgtgcccctttatgcacatgttctgtagttgcatcctatccggaaccatatcaaaattgtactgatactgcctaacaaaggcaaccattatgtccttccaagaatggactcgggaaggttccaagttagtgtaccaggttacagctaccctagtaagactttcatggaaggaatgtatcagcaattcctcatcttttgcgtattcccccatcttctgacaatacatctntagatggntcttgtgacaagtagtccccttg

SEQ ID NO: 13173 - DNA, 448 bp, Glycine max
tgagcacattcaaacgacgaataactttgactcgaatgtccgattgtgtcccgtatgatatcgagacgctcgtaattgaaaacggaagctctatgaaaatctaacgacaataacttttaactcgggtgtctgatcgagccctgtaatatatcaagacactcgcaatttaaaacagaagttctgagcatattcaaacgacaataacttttgatactgatgtccgattgagtcccgtaagatatcgagacgctcataattgaaaactaaagctctgagcaaattgaaacgacaataacttttgactcgtatgtccgattgtgtcccgaaggatatcgagacgctcgtaattgaaaacggacgctctgaggaaaatctaacgacaataacttttaactctgatgtccgattgagctcctgaatatatcgagacgctcgtaattgataacag

SEQ ID NO: 13174 - DNA, 465 bp, Glycine max
tatgtctggtcgagtacagatctgagcatacattatactcctagcaactaatgcatacaaaattgcttccatttgttttcattccaattatttctaggacattgtgtgagactaaatttgtctcatttctgaattggaacgagtaatgctgagcacttttccatcctaaatctttctagtactttattgatatatgttttttgagataagcctaacaattcttgtgatctatttcagaatatttctatccctatcacatagcttccctcacccttatccttcatttcaaagttactagaaagaaacttagtctcatgaagaagaccaagatcattagttgcaaggaatgtatcatcaacatataggattacaaaaataaccttactcccactgaacttcagatatatacaccgatcaacaatatttttcttaaatccaaaggaaacaatggtatcattaaactta

SEQ ID NO: 13175 - DNA, 342 bp, Glycine max
cccgagagctatcgttgatcattttcgagggtcgttatatgtgatgcgccttaatctaacatccgtgtgaagagttatgaccatgtgtatctctctagagcttttgttgttcaatttcgagcctctcgacattatttgcgcccgaatcggatattcgcgcgaaaatttatggccatgtgaatttctctagagtttctgatgttctattatgagcgtatctatatattataagccagaatcggacatccgcgtgaaaacgtatgaccatttgaacttctccagagctctccgtgatcaatttcgagcctctcgacatatcattccgcccgaatcgcacattcg

SEQ ID NO: 13176 - DNA, 305 bp, Glycine max
gtctcgaaaacttgataggacctaaagagagttgcttctttggactgatattcgtttgcaactcgtccctatactagttgtaagtcgctataacacctgagcattcttgctcccacttcctttgtcacttttacgcctgctatgactgcttcatattcagccaggttatttgatgctttaaaatcctagggcctgctccgacgaaccttattgggtccttctaggatgatgcctgcctctcttgctttcatattggatgcactatttacattagagcccactagtcaagggtggcttggacatta

SEQ ID NO: 13177 - DNA, 365 bp, Glycine max
  unsure at all n locations
gatgaaccaggtntcacacttgcgcaatctttccctgaactccttctccgttgcaacaacatccttctacctcttcaccgccacactcgcccccatctccatcgtcgccttataagtcgttccaaaggtgcctttccaccaaacttcaactgatgccctcaacaactcatccaaactaaatactctactcacattcccaataaacaccaaactcttattatctccaccaccaccactgctactctgaacctcactcttctccactgaacctgaattcccgccactctcattactcttctcacgagacactacttcaccttccacgacacacttctcaggtggcaagattcattctcatcttcttg

SEQ ID NO: 13178 - DNA, 435 bp, Glycine max
  unsure at all n locations
cttgaatctcagctgtggagtcatacacattctccaccctgtgatagtccgtgtagggatgagttcattcttctcattatggatcattgtcataccgcctttctgggcatcacttggactagactcacccaagcactgtcagagatcggatagataagtcttgcttcaagcaacttgaggacttctttttggacttcctccttcatggatgggttaagtctcctttgtgattgtttccccagtctataatcagctttcatcatgattntatgcatgcagtaggatgggctaatccccttaagatcgaagatatgccatcctattgctaccttatacttcttgagtacctccactaactgtgcttccttagctgaagacaagtcattactgatgactactggcttggcatcatttgcctcaagaaaaacatacttc

SEQ ID NO: 13179 - DNA, 463 bp, Glycine max
actggatgcattggttaacttggtaacccatctggccttgaaccagaaatctgtacctgttgcaagggtctgtggtttgtgctcctctgctgaccaccatacagacctttgcccttccatgcagcaacctggagcaattgagcagcccgaatcttatgctgctaatatttacaatagacctcctcaacctcagcagcaaaatcaaccacagcagaacaattatgacctctccagcaacagatacaaccctagatggaggaatcaccctaatctcagagggtctagccctcagcaacaacaacaacagcctgctccttccttccaaaatgctgctggcccaagcagaccatacattcctccaccaatccaacaacagcaacagccccagaaacagccaacagttgaggctcctccacaaccttccctcaaagaacttgtgaggcaaattactatgcagaacatg

SEQ ID NO: 13180 - DNA, 474 bp, Glycine max
tgttaggctatactcgataaatatgtctggctctactcttttgccaacttgtctcgcttaacctgtggtacatttgtaaacacaaacaaccgaaaacttttagattttttaattgtggcttaaagccataccaagcctcaaaaggagtcttcccatcaactgcttttgtgggaagtctgctcaacaaaaatacaacagtattggttgcctcggcccaatattctttgggaaattccttctcatgaagcagatatctagccctccattatggttctatttttccgctcactgaccccattttgctttggagtgtatggtgttgtaagttgatgctcaattccaacctcctcacagaatttatcaaattcatttaaggtgtattccttgtcgttatatgacctcaaaactcgaattctaaagccactttgattctcaatccagttcttgaatttgaagaacacacctgcaaccgct

SEQ ID NO: 13181 - DNA, 396 bp, Glycine max
  unsure at all n locations
tgcgccacttgaaaagcctctnttgaatggtgactctaatgttatcaacaattatgttcccattaaggctagaggaaatgaaaattaacctggtattcaaatgttggatttttcagcattcttactttctcatggatgattcctttaataactctagggaatgagaagactttagagcatgaggatctcccacatcttgctactgatgacagtgtggatgggaatttgccaacttttacaaacaaacttgagtcagagtgtggtaatgtgataacaaccctactctagtttcataacaaccctacganaatatgatgtnactgctcacatgaacaacactacactagtgtgataacaacccttgctacactatgcaaacaaccctgcttcaatgta

SEQ ID NO: 13182 - DNA, 375 bp, Glycine max
  unsure at all n locations
tggagtccatgccgtcacgtttggactctttgagtgacatgttacaagctgtgaatcccggtgatcatgcagtaagttaactgtactgcttggctttcttgaatcctccgtgctactaagtaaaataattaaatgtttggtttttatgctttgtaggctgtaaaagacgaagttattattgatcttgttgaccgctgtcgcacaaaccagaaaaaattgatgcagatgctaacaactactgggttagttccactcagctattccatctggcacacacccaaatgtacttgtgtgttaccttgtgaaggctatccactgatatgtggaatgatcttattgtcttggttntgtcagatggatgacgagcttcttgga

SEQ ID NO: 13183 - DNA, 430 bp, Glycine max
  unsure at all n locations
ctacttcacatggatttgatggggcctatgcanngtgaaagccttggaggaaagaggtatgctatgttgttgtggatgatttctccagatntacctgggtcaactttatcagagagaaatcagaaacctttgaagtattcaaagagttaagtctaagacttcaaagagaaaaagactgtgtcatcaagagaatcaggagtgaccatggcagagagtttgaaaacagcaggttcactgaattctgcacatctgaaggcatcactcatgagttctctgcagccattacaccacaacagaatggcacagttgaaaggaaaaacaggactttgcaagaggctgctanggtcatgcttcatgccaaagaacttcccttatatctctgggctgaagccatgaacacagcatgctacatccacaacagagtcacact

SEQ ID NO: 13184 - DNA, 382 bp, Glycine max
tactcctcatgcttctcaccatgtctaattaagttctatttcttcgttctgccacactattatgatctggagaactagcatagtgtattggacaacaatcccatgttcttgaagaaatttcgcacatgaacctggtgcttgtccatcctctgtgtatctaccataatactccccacctctatctgatctcacgatcttaatttgttttccacattgtttctcaacttcagccttataaactttaaaggcatctaaagcttcattcttagaatgaagtaagtcaagatacatatatcgtgaataatcatctataaaggttatgaagtatttcggacaatatgcattcatgtctggacaacatatgtctgcatgtatgatatct

SEQ ID NO: 13185 - DNA, 466 bp, Glycine max
  unsure at all n locations
agcttcacacaatggttcatcacttttctgatggaagctcaatatanttgtcttagcctggtttcttttttcctcttggaagaaacagtctaaaaacttgtttccaatgtcactccaagtgataaggctctgagatggatgagtattgagtcacttcaaggcattatctcctatgacggaaaaatggaaaaccatcatatagagattctcctcttcagtttgggtcacccctgttgtaccacattgatcataaaatgtggccagatggttgtatgggtcttcattacctaagctaggaaatgcatgttgggcaaggaaagtgattangcctaactttagcctttgttgtgtggttgttgctccttggtctagcaatgttgaagtatactcgtgaaccattatcagtgtcatggtccgcaagagttctcctaacaagtgatgcttcttctacttcctcatatgtact

SEQ ID NO: 13186 - DNA, 445 bp, Glycine max
  unsure at all n locations
agcttatgagaattattcacaattaaagaatgaggaatgccaatatcaattgcaccattattgtaattaccaactggaccatcacccaaagaaagaattcaatatgaatatattatcttttcactttcatccacatcatttaaaccacttttcaaacgcatgttttgagttaatttcaaagttttacaacatttttcataattgagaagagttaatggtggccaaaataatttcaactttacttgcattangcacaacaaacaaaatttgtttgaaatcaccattgagaatgacaactttttcaccaaaagttttatgcaaactattgtcaatagtaaaacacataatatctcttaatgttctatcaagagcttcaaatgcanatctactaaccatagctgcttcattccatatgatcaaaggtagtgtggttcaacaattctac

SEQ ID NO: 13187 - DNA, 345 bp, Glycine max
  unsure at all n locations
tctgttntcaatttcgagcgtctcgatattntacagagctctatccgacatccgaggtaaacgttattgtcgtttgattttctaagagcttcccttttcaattacaagcgtcttgatatattacgggacacaatcggacacccgagttaaaagttattgtcgtttgaatatgctcagagcttctattttcaattacgagcgtctcgatatattacgggactcaatcggacatccgagcaaaaatatattgtcgtttgagttttctcagagcttcggttttcaattacgagcgtctcgatgtactacgatacacaatcggacatccgagttaaaagttattgtcgt

SEQ ID NO: 13188 - DNA, 431 bp, Glycine max
  unsure at all n locations
agtatttatctactccaattaacaagtcaagtcaaacttgtcaggttccaaacaccaaaataaaggacattctgagaattaatttggaacctttaacatcacaccctaagcaagaatcatattcatacggatagaccaaatgccttattatgaaatttttgttgtttgcttattgtattaataactaataaatcaatttggtgaaattaatttaaggtgaattctgtagttaatacttcgcttcaaacttatacatcctaacttttaccacacatcatcagtattggtagtattctctttttaccacaaattgaaacatcacttgtacttttatgttgttcataagtgcagggggatgctatccatgaccataagcaatggagaagttggttgcttcatgatctcataanaactccaccaacactggtaca

SEQ ID NO: 13189 - DNA, 397 bp, Glycine max
  unsure at all n locations
ntgcttccatttccgtcgagcagaaagcttctgctgaacatggatgctttccttttcattgttgtcactttcgtgttagcttccaaactcattntgctcaaggaagtgaactacctcgtaccacaagcagttcaaaaacatatattatccatgtgaaggggccacaggataagtcactagatcaaacagaagatttggagagctggtaccattcattcatgccacctactattatgagctctgaggaacagcctcgaatgaattattcatacctcaatgtgatgagtggttctgctgcaagactcactgaagaagagtcgatagctgtggaaaaaaatgatggcttcatttctgctcgttccgaaaagatactgcatcgccaaaccacaaatacccc

SEQ ID NO: 13190 - DNA, 347 bp, Glycine max
atgtcaaaacaacctttcccatggataattggaggaagacatcttgatgcaacaacctgaatgttttgaaatggaatggaagaaataatatgtatgtacgttgaaaaggtttatatatgggttgaaacaatctccaaggaagtggtaccagagattcgatgagttcattattactcatgggtacaacagaagtgcctatgattcatgtatctattatagtaaggtgggggatggttttcgcatctatgtgctactctatgtggatgacatgctcatagcatctcaagacaagtctgaaattcataatttgaagtcactacttagtaataaattttagatgatagata

SEQ ID NO: 13191 - DNA, 449 bp, Glycine max
  unsure at all n locations
gcttctcgatatattatgcgccataatcgtacttccatttgagaagttatgaccatgtgaatntctcgagagcttccgctgttcaatttcgagcgtctcgatatattatgcgcctgaatcagactttcgtgtgataagttatgaccatttgaatatctcgagagcttccgttgttcaatttcaagcttctcgatatattatgcacctgaatcggacttccgtttgaaaagttatgaccatttgaatttctcgagagctttcgttgttcaattatgagcttctcgatatactatgcgccagaatcggacctccgtgtgataagttatgacaatatgaatttctcgagagcttccgttgttcaatatctagcttctcgatatattctgcgcctgaatcggacttccgngtgagtagttatgaccatttgaatattcgagagcttcgttgtt

SEQ ID NO: 13192 - DNA, 317 bp, Glycine max
catttgttattgatttgctttaccttgtacgtggctaaacatgttagcctttgtaagtggttaaaccttgggttatgacttctacttaatggttaaatgtaacattccataacataaatacagatatttattataaaaatatatatattcgacaagattagaaaacatgtatatagttcacagaagatagaatatctcgtttatcttctattctaaaatatcagtattagcattatatttattagataaataatataatatatctcgtttatgttatcattatatctaggatgaaatatgataagatgctatcaaaa

SEQ ID NO: 13193 - DNA, 286 bp, Glycine max
atgagatcccgttagaacaattgtgccactagtcaacagagttcagtgaacctcggtttagagagagagctacatagaatagagtgagaaaattgtttacactgtaatgtgcattgagtcattaattttattggtccatagtcttgtttagtgaacgttatactgcgcttaataaccagccgtcactttgaatttaccctaactgataccacgctgtgtttgactcagttactacaggttagtgacagctgttaactgctgtcgataaaatactagtacagatctt

SEQ ID NO: 13194 - DNA, 313 bp, Glycine max
acatatcttttcatcacattcctagagaggaaaatcatatggttcgtgcccttgccacactagcatccctgttctagctaagcccgcatggagatttgctgtatcaaattcaaatgtcgtggaaagccttacacattgctacttaatagaggaagagaaaaatggtaagcctttcgtactctgatatcaaatgatacatcgaagacaaggaatactcgcatgaggcctctgacaacaacaagagaacgttgcgaaagttggcggcagacttctttctgagtggggatatcctatacaagaggaaccatgacat

SEQ ID NO: 13195 - DNA, 465 bp, Glycine max
  unsure at all n locations
ctagatccctcttgtggactaggctcaacttaaatatcttacgattgtttagcctaatntagcctaagctttgtcctcatttggatttcttttgtctcttccagatagcttctatatgttggcttatctggtaaggaagctcttagaatgagatcaatttggtgctctatccctctcaaagcatgcaacccatgaggggtgtctttgaggaagacatccgctaacctcttcaataatttttccacacctagaggcaaagaactagctatataagacaaacaataatcatgaggcattagtaaatacataggttgtctagctagaatcactctcttcaccttctgtattctcatgaacaaactcaatatctgtctctcttgaatttcatccttntttgcagttcactcttattttatcgcattctttctttctttctcttctctcatgttctctctcgtttatcaa

SEQ ID NO: 13196 - DNA, 305 bp, Glycine max
atctatggaaaataaaaaaataattgtgggtcacgcatcgtatttaatgatactttcttttgattttataatttttaatgaattttaacaataataaaaaatagtatgcttgaatgagtgtgttaaagagtgtgatatcaatcttctttaaccttatacaatatttgagattacagattaatttaactaatttagtaatttctggtgtattgggcgtgttagcttaacctcttcttcatttaaaattccctcgagacagttgttcgaaatatattatcaattagtattctagctgttatattatc

SEQ ID NO: 13197 - DNA, 496 bp, Glycine max
  unsure at all n locations
tcagaattcaatttcgcgcgtctcaatagattacgggactctatcagacatccaagcaaaacattattgtcgtttgaattagctcagagcttcagaattcaatttcgatggtctcgatatattacgggtctcaatcagacatctgagtaaaaaagttattatcgtttgaatttgctgagagcttcaacattcaatttcgagcgtctcgatgtattacgggacttaatcagacatccgagtaaaaagttatcgtcgtttgaatttggtcagagcttcaacattcagtttagagcgtctcgatatattacgggactcaatcagacatccgagtaaaaagttattgtcgtttgaaaatcctcagagcttcggtattcaatttcgagcgtcttgatatattacgggactcaatcagacatccgagtaaaaagttattgtcgtntgaatntgctcagagcttcaacattcaatttcgagcgcctcgatatatttcgggact

SEQ ID NO: 13198 - DNA, 406 bp, Glycine max
  unsure at all n locations
agctntaaagaggatcaaatngaacttattgtttctgggttggaacaaagcaagcagaagttcatatgggtgctgagagatgctgataaaggagacatctttgatggaaatgaaacaaaaaggtatgagcttccaaatgggtttgaggagaggattaaaggcatagggcttattgtgagagattgngcaccccaattggaaattctgagccacacttcaacaggggggtttatgagtcattgtggatggaactcctgcttagagagcataaccatggnggtgccaatagcatcatggcctatgcactctgaccagccaagaaacactgttntgataacacatgtgctcaatgttggtttggttgtgaaggattgngcacaaaggaatgcattggtgactgcgtcag

SEQ ID NO: 13199 - DNA, 409 bp, Glycine max
  unsure at all n locations
agcttcgaatggtcatcgcttcattcttgtgtcgatagattatttcaccaaatgggtcgaagcggcttcttataccaatgtcacgaggagtgtggtggtcagattcataaagaagtgtcgtaacctacccttcggcgggagggcgacgcgagactcgcgggatgcgtgttccacgaaaggaatacgcgcggagtcgccaccaacgtttattcgagganaacgtcggataaaccgganaagacgagatctactgaacttttagtgaaaggttcgggagttgtatttacgcacggtgaaggtattagcaccccacacgcccgtcccaagggacggcagcctttaatcgaatgtgcaacatgactctgatnttatgttcctttatgtcttatatctttatacccttttatat

SEQ ID NO: 13200 - DNA, 498 bp, Glycine max
  unsure at all n locations
ntgatgcaacatatggagaggttaatgaaacaacgagatgatgcgctccatgagaggttggatcaaatggagaatagagatcataatgaagaagaaaggaggagaagagggaatgatggtgttcctagacaaaaccgaattgatggtattaaactcaacattcctccatttaaaggaaagaatgatccggaggcctacttggagtgggagatgaacatagagcatgttttctcatgccacaactatgaggaggaccagaaggtgaagcttgccgccacggagttttccgactatgctcttgtgtggtggaacaagctacaaaaggagagagcaagaaatgaagagccaatggttgatacatggacggagatgaaaaagatcatgaggaagcggtatgtgccggctagttactcaagggacttgaaattcaagctccaaaaactaacccaaggcaacaagggggtngaggagtatttcaaggaaatggatgtgctcatg

SEQ ID NO: 13201 - DNA, 494 bp, Glycine max
  unsure at all n locations
agcttcttagtctcagatgatgcagctaagtttgtagctacctcatgcactcctctaatgactatagcatcatttctggcgctaaactgctgggagttagaagccatcttctcaattaaattcctggcttcaacaggagtcatgtctccaagggctccaccactggcagcatctatcatacttctctccatattactgagtccttcataaaaatattggagaagaagctgctccgaaatcagatggtgagggcaactggcacatagttttttaaatcgctcccagtactcatacaggctctctccactgagttgtctaatacctgagatatccttcctgatggttgtggtcctggaagccagggaaaatttttctaagaatactctcttaaggtcatcccagcttgtgatggaccttggagcaaggtaatacagccagtcctttgccactcnctctaatgaatgaggaanagccttcagaaatatgtgatcctc

SEQ ID NO: 13202 - DNA, 440 bp, Glycine max
  unsure at all n locations
ctctaaagttgatttgacaagtgggtatcgtcaaattatgattagagagggggatgaatggaanacaactttcaaaactaaatatgggtggtatgaatggctggttatgccctttgggttgaccaatgctcctagctctttcatgagattaatgaaccatgtgttaagggaatttctangaaaatttattgtggtttatttgatgatatcttgatttacancaaattccatgatgaacatcttgttcatttgaggagagttttaaaggcccttaggcatgagagcttgtatgctaacatggataaatgtgtgttctgtntggaccatgtaagtttccttggttntgttgttagctcatacggagtacaggttgatcaagaaaaggtgaaagtcattcaagaatggccaacccacaactgtatgtgaggttagtaactttc

SEQ ID NO: 13203 - DNA, 250 bp, Glycine max
  unsure at all n locations
cacaacaatccgctctcatatgggatctaacgagcatagtnatcgtctccataatggctacatctactaactgctcaccatttctctttaggtgattggaaacagcaagaattcttggagaataattggaaatggactcttactctctcatatgtaaggagtctcactcacctcttagagtgtggagacacacctgttttactctgtcttctcctttgagagaggttagaagcctatcacatgcctcctt

SEQ ID NO: 13204 - DNA, 470 bp, Glycine max
  unsure at all n locations
agcttgtgcattcaatatcccgatgaaggtgttccatatgttctcaagactggactaatacatttactgcccaagtttcatggtcttgcaggtgaagatcctcataagcatcttaaggagttccatattgtttgttccaccatgaagccccctgatgtccaggaatatcatatctttctaaaggcctttcctcattctctagagggagtggcaaaagattggttgtactaccttgctcccaggtccattttcagctgggatgaccttaagagggtgttcttggagaaattcttccctgcatctaggaccactgccatcaaaaaacacatttcaggcatcagacaacttagtggagaaagcttgtatgagtactgngaaagatntaagaaattgtgtgcaagctgtcctcaccaccagatttctgagcaactccttcttcaatatttctacganggacttanaaacatgga

SEQ ID NO: 13205 - DNA, 400 bp, Glycine max
  unsure at all n locations
attctcttctctagggtccatcaattctactgctccgtgaggtctgacttctttgattatgaacggccctgaccacttggacttcagcttacctgagaatagccttagtctcgagttaaaaagtagtacttgttgccctggctggaattctttcctttgtagcttcttgtcatgatacgccttcatcttttgcttgtagattttggatgactcgtaggcgttcagtcccatttcttctaattccagtaactttagattcctcttttctccgcatgcactgtcatcgaaattaagcaatttgaaagcccaatatgctntgtgctctagctccactggtaagtgacatgcctttccatatactagcagaaatggtgataagccgatgagaatcttgaatact

SEQ ID NO: 13206 - DNA, 480 bp, Glycine max
  unsure at all n locations
acttactaaaatatgctcnacaattaattattataattaaggaattgttgacacgtggttccatgtattttcattcaatttagtgttgattaaaccaacccaaaacatcttttttcaaatgaaaaatcacttattttattgaaaaaataaatntaaataaactcactcatattctattgttattcctatgtactttgttaatctttatttcaatttttagttaagattataaatataagtaaaaaaatgaagagtatattataattataaagattacaatgaaatataattatataataaaatgttagacaattattcaaaatattgttacaactataattttaattttctttctttataaatatatttatttaataaaataatatattttatcataagagtctaattcaattcgttgaataaaatgtgagtngttgcaaaattcttgatgtgattcgtagagatataaaatattaataa

SEQ ID NO: 13207 - DNA, 392 bp, Glycine max
  unsure at all n locations
tcgagcgtctcgatatatttctttactcattcngacatgcgagtgacaatgtactgtcgtttgaatttgctcatagctacaacattcaatttcaagcgtttcgatatattactggacttaatcagacatccgagtaaaaagttattgttggttgaatttgctcagagcttcgatattccatttcgagcatctcgatatattacgggactcaatcagacatccgagtataaagttattgtagcttgaatcttgctcaggcttcngtattccatttcgagcgtctcgatatattacgggactcaatcagacatccgagtaaaaagttattgtcgtttgaatttgctcagagcttcngcattccatttcgagcatctcgatatattacgggactc

SEQ ID NO: 13208 - DNA, 439 bp, Glycine max
aagcacctgcggctgcagctgatcccacaatccaccataatgtgtatttctcccaacggagctcgctctatcaaatgcaatccgatagggcggccatggcccttatctgccaatctatcagcaatagagtagccttctatgagagtatgcgtaattctctaaccaaattctgtcaacccaatcataaagttgcctgataataaccaccatcgggtgattaatgatcacctaagtatctagaataagcttgttcacagtaacataatcactctccaaccatattgtatatctaaaatctatttcccaggccagcttcaacctatatagaattcccatcaattcagctctcaaaacagtacatgatcccagattgaaagtgaagctcgtcatacaaatgtccatactatatctaattgcccctccacatgcagccttgctt

SEQ ID NO: 13209 - DNA, 296 bp, Glycine max
  unsure at all n locations
agcttatgctgcagacatgtatattttacctctttcgcagcaagaaccacaacagcagaataattatgatctntcaagctaccgatccaattcaggatggaggaatcatccaaatctgagaaggacgaattcatcacaactacaacagtctgtccctcctttccagaatgttggtggttcgaacaagcgcatatgttcctcttctaatgcagcagctgcatcaacagcatcatagacttcaagcaactgagaccccttcttaacctttctaagaagagttgatgaagcaaatgaac

SEQ ID NO: 13210 - DNA, 485 bp, Glycine max
  unsure at all n locations
tcaagcttgaccaggaattattgtattggttggttgttgaattctggttgttcctggtgcggagatgatggtacagcgggtgaaccaggagcggcagtttcttttggtgaggaagccatggaaaaacagagcgtttggaatgatttcgtaaatctcagaaaactattgggaaatgctggagaaaacacgaatgccaagcagatataaatttgaatgaagaatgtagaggggcgtgtgaagcaacggtcgaatttgctttgtggtgaacgtgctattaatgttaagtgattcgtttgggcacgttcagattgcagtagctgctataattcctctagcagacaaatgcccagcttgcccctcagtttttcaaactgattngcatccaaagcctttgtgaaaatatctgctatttgttcctcagtgtcaacatgcttcagtgtgatcactntatcatcaacaagatctctgatatagtgatgtctaat

SEQ ID NO: 13211 - DNA, 478 bp, Glycine max
  unsure at all n locations
aaaagttcccaatcaaagaatcggaagaaagcaaaaggagaaaattcccaatcaaagagtgggagaaagcaaaaacacaagagaaagaaaattcccgatcaaggatcgaaagaaaacagaagaaatatgcagaaaggtctttggaccagacaatatctgaacaatacagaattgtcacccaagtaaacagaaaagaaaggaaaccacgacctanagtgatcctctccctttgattgccaaccaaaatcctgtgcgccggtgacttgtccagctcacactaaacaaaaaacagaaaaggaaaaggccaagaacactcaaagccaaatttcccacaaaccattcccaagaaaaaagtcctattgatccatgatcacacatgtaatctttgatntgatagaanatgaattgcaaaaccaagtcatgacatatctatggttcggaattaggatgaaacacttacctatgtgagattggacac

SEQ ID NO: 13212 - DNA, 362 bp, Glycine max
ctatgctcttgtgttgtggaacaagctacaaaaagagagagcaagatatgaagatcccatggttgatacatggacgaagattaaaaatatcatgaggaagcggtatgtgccggctagttactcaatggacttgaaattcaagctccataaactaacccaatgcaacatgggggttgaggagtatttcaaggaaatggatgtgctcatgattcaagcaaatattgaagaagatgacgaggtaactatggctcgatttcttaatggtttgactaatgatatccgtgatattgttgagctgcacgagtttgttgaaatggatgatctgcttcacatagcaatccaagtggagcaactattaaaaa

SEQ ID NO: 13213 - DNA, 455 bp, Glycine max
  unsure at all n locations
ttcaataatctaacttacagagattagcgaatcttaataaatatatagagcttaagataataattaagttcaatagaataaaaaacttccacccccaacaaaactcctgtatggtcctcctacacaaaccaaaacataaaatacacactctcgacagcaaaacatttaaaattataaacatacngggttgtagacacaattgacataatgcanaaccaaaagtgtgcctatcaacaaaactagaaagntttgctcacaattataataagatagaacaaatgggctttactacaagtgtctattactataattttatattgcatgactctattttatatttactatttaaattgtgtggaatggtgtgctacattatattataataattgaaaacatgtacacaaatagaaatttatacaagttctcttagatcataatggcctgatgaataatat

SEQ ID NO: 13214 - DNA, 486 bp, Glycine max
gctacgatagtacttatggataacttaattacttataactactaattaataaaaatcaaattatcttccaatgctattcttttattaattgagttaattatccattactagtcatatattgaaaaaatgtcctttaaatgtaaaaaatgatagacattaagattgtcttcattgatatatagtctttgcctctcttttttaatcctaacatatgatatattaatagtatatttcatttttttaaaattaatataattatatattagtatgaaaaaacattcatgattgaattataattaatatgttcttagttcgaataaaattgatacaattttcttataaaatgtctcacatttggattttatcatataaaaacataaatattttacatcaatatcatgataatctacgaattaagataatataaaagtataatatttctattgtagatttaatgtatattaaacacacaaaccaacttataca

SEQ ID NO: 13215 - DNA, 450 bp, Glycine max
  unsure at all n locations
agcttgagccanaatcctaactcaccatanaccttgacccangatgagaatgtcaatccttaccctcggaagcaaaanagaagagaaggaaaatttccaatcaaagaataaaataagagaaggataatttccaatcaaagagaaagctaaaaaaagagagaaggaaaatttccaatcaaagaaataaaagagaaggataatttccaatcaaagagaaagcacaacaaagagagaaggataatttccaatcaaaggaaaaaagagaggaaaggaaattcccaatcaaagagtgggagaaagcgaaaagaatagaaagataattcccaaccaaagagtgggagaaagtaaaaggaaggaaagaaagctcctgatcaatgatcgaaagaaatcagaagaaatgtgcagaaaggtctctggaccggacaatatctgtacaatatagaattgtca

SEQ ID NO: 13216 - DNA, 451 bp, Glycine max
  unsure at all n locations
ngccttgccccttgatatatatgagggactcatggtcgctatgaatgacaaattccttgcgataaaggtagtgttgccatgttttcaaagcccgtactaaggcatacaactccttatcataagttgaatagttaaaggtaggaccacttaacttttcactaaaataagcaattggatggtcttcttgcaacaacacagccccaatcccgacatttgaagcatcacacttaatttcaaaagatatttgaaagtttggcaatgcaagtatgagggcattagttaccttttgcttaagaatattgaaagcttcttcttgtttctttcctcatttgaaaccaacatttttcttgagcacttcattgagaggtgctgccaatgtgctaaaatccttcacacatcgtctataataacttgctaagccatgataactcctcacctcgatcacagactt

SEQ ID NO: 13217 - DNA, 451 bp, Glycine max
  unsure at all n locations
tgagaatggagaattgcactaagcaatcactacgcatagctctcaactcgaaggtggaggacacatgaacgaaaacacaattcatggggctccgaanaaggggttgagaatggagaattacactaagcaatcactacgcatagctccaaactcgaaggtggaggacacatgaacgataacgcaattcatggggctccgaaaagattgagaatggagaattgcactacgcaatcactacgcatagctccaaacgcgaaggtggaggacacatgaatgaaaacgcaattcatggggctccgaatagattgagaatggagaattgcactaagcaatcactacgcatagctccaaactcgaaggtggaggacacatgaatgaaaatgcaattcatggggctccgaanagattcgaatggagaattgcactaagcaatcactacgcatagctccaa

SEQ ID NO: 13218 - DNA, 403 bp, Glycine max
  unsure at all n locations
tcatgttaacctaataaatcaattcatggttataacttatgcaaaaatagtattcggcacacttacattaatgtctttctaaatgtctttaagcatctgtaattataatcattgtatcactggaattcccctcatntccttgaactangaataaagatacgtgcttcctttatttgtaagtagcttcatctcaaaatggctatctgtttaaaacatgtattggattctattgcagtatcaacaagatgacccacgtaccctttgcgtgaacaaagttggtccttataacaatccacaagatacgtacaattattacagcctaccatgttgccgcccacctgttaattctgcacacagatgtggagtgcttgatgaagtccagtgtggcaatgatctcattgat

SEQ ID NO: 13219 - DNA, 346 bp, Glycine max
tgtgacgattgttatgtctaatgaaatgtaaacatgagcaactatgggctttaagaagttattatctggatttttgttgaacaagatggtatacgggacattaaaatgcacagaagcagtaagcaatctatttatcaagtatactgctctagtgaaggtaaaaaaacttgataagcacggaggcttgtttaaaaacagtgagtcctaattccacaatatgtctgcgcttcctttccactacaccattttggtgatgagtgtgaggactgatccatctatgagtgataccttggcttgctataaaaatagtgataggtctgaactccactctccggtctgtttgaac

SEQ ID NO: 13220 - DNA, 323 bp, Glycine max
  unsure at all n locations
tggtcataactaatcactcagaggtcttattgangcgcataatatatcgacacgctcgaaattgaacaatggaagctcttgaacgattcaaatggtcatatctgtttcacacataggtcagattcatgcgccaaatatatccagacgctccagattgaacaacagaatctctcgagaaaatccgatggtaatgactcattactcggttgcccgattcttgagcgttatatatcacaanctctatattgtacactggaagctattgacctattcaaatggtcataactaatcactcggatgtctgattgtagcgcgtaatatat

SEQ ID NO: 13221 - DNA, 346 bp, Glycine max
  unsure at all n locations
gtggtggaacaagctacagtaggagagagcttgaaatgaatagccaatggttgatacatggacggagatgaaaaatatcatgacgactcggcttgtgccggctatttactcatgggacttgaaattcaagctccaanaactaacccaacgcaacaagggggtagaggattatttcaaggaaatggatgtgctcatgattcaagcaaatattgaagaagatgacgaggtaactatggctcgatatcttaatggtgtgactaatgatatccgtgatattgttgagctgcttgagtttgatgaaacggatgacttgcttcactattcaatcctagtggagcatcatatt

SEQ ID NO: 13222 - DNA, 346 bp, Glycine max
  unsure at all n locations
aatatattttatcaagaaaatcaagttaaaatttataaaaaaaaatgttacataaatatgtttatttatgtaattttacattttanagttaatctaacaagaataatttatcaaacatttataattcaataagatgatgttcaatttttaactattaattatcttttttagctagttgggtaaacataggcttagtctctcatttctttataaagaaattttcatattgattntangataataagatgtttatttattcttattgagaagaaatataaaaaatgttttgttntgaagatgatggattacaaaaaattaaacacccaaaacaaaagtaatctaaatc

SEQ ID NO: 13223 - DNA, 422 bp, Glycine max
  unsure at all n locations
ctcagcttaacatcagaccacttccagggtgctggaactacttcacatgtacttgatggggcctatgcaagttgtaaggaaaaacaggactctgcaagaggctgctagggtcatgcttcatgccaaagaacttccctataatctctgggctgaagccatgaacacagcatgctacatccacaacagagtcatactgagaagagggactccaaccaccctgtatgaaatctggaaagggaggaagccatctgtcaagcacttccacatctttggaagtccatgttacatcttggcagatagagagcaaaggagaaagatggatcccaagagtgatgcangaatattcctgngatactctacaaacagcagagcatatagagtattcaattccagaaccagaacagtgatggaatccatcaatg

SEQ ID NO: 13224 - DNA, 432 bp, Glycine max
  unsure at all n locations
agcttatagttattggagggagaataaaacaatttanaatcaattgtacctttcaagtaacgaagaattctttntgcagctnttagatgaggagaggtaggagcctccgtaaagcgacacacaactcccaccgcatatagaatatcgggccttgtattggttagataccttanactccccacaagactcttgaagatcgtggagtctaccttctctccttcatcaaaatttgataacttcaagccaccttccataggtgtgttcacgggattgcaatcaagcatattaaatntcttcaacacttcttttgtgtagctntcttgtgagacaaagataccattcttcgttntcttcacttccattcccaagtaatatgacatgagtctcgtatctgtcatatcaaattcacgagacatggnactcttgaagtct

SEQ ID NO: 13225 - DNA, 286 bp, Glycine max
  unsure at all n locations
tacatcttatatggataaagcaagcttcccgctagtgtttccttaagtttcatgggataattgcttcatttggtttcgatgaaaaccccatggctcaatgcatataccacatggtcagtgggagtaaaatatagtgtcttgttntatatgtagatgatattttacttgcagccaacgatcggggtttgctacatgaggtgaaacaatttttctctaagaattctgacatgaacgatatgggtgatgcatcttatgtcatcggcattaagattcatagagatagatc

SEQ ID NO: 13226 - DNA, 400 bp, Glycine max
ctaagcttaacattcaattgtgagcgtctcgtaatattacgggactcaatcagacatccgagtaaaaatttattgtcgtttggattggctcagagattcaacattcaatttcgagcgtctcaatatattacgggactcattcagacatccgagtaaaaagttattgtcgtttgaattagctcacagcttcaacaatcaatttcgagcatctcgatatatcacgggactcaatcagacatccgagtcaaaagttattgtcgtttgaattggctcagagcttccacattcaatttcgagcgtctcgatatattacgggactcaatcagacatccgagtaaatagatatcgtacgttgaataggctcagagcttcaacattgaatttcgagcgtctcgatatg

SEQ ID NO: 13227 - DNA, 308 bp, Glycine max
  unsure at all n locations
actcggatgtctgattgagtccggtcatatatcgagacgctcgaaattgaatgttgaagctctgaaccaattcagacgacaataactntatactccgatgtctgattgaggcccgtcatatatcgagacgctcgaaattgaatgttgaagctctgagccaattcaaacgacaataactttttactcggatgtctgattgaggcccgtaatatatcgagacgctcgatattgaatgtggaagctctgagccaattcaaacgacaataactntntactcggatgtctgattgacgcccgtaatatatcga

SEQ ID NO: 13228 - DNA, 497 bp, Glycine max
  unsure at all n locations
cttatactntatgttaatgggtatgaagtgataatatttcgtcaatttatccactattacccatactacatcttggcgagatntggtcctaggcaagccaaagacaaaattcatcaagatacaatcccatttccactcaagaattgtcaaaggttgcaattcatcangaaatttttgaagttccacattcgctttttgacacctcatacactttgccatgtactctgccacatttttcttcaagctataacaccaaaagttcttcttcacatcttggtacatntttgtgaaacctggatgaaaactcaatcgactcttatgcattnttccaagatttcttccttcaacatgctctagtgaggtatgcacanctcattccttgaatggatgagtccattcgcatccttactgaattctaaattttgccttcttctttaacttaatcntgtctatangaatngatctccttgtgaacctctcaacttgttcaaacactc

SEQ ID NO: 13229 - DNA, 288 bp, Glycine max
  unsure at all n locations
taatctactgcctcaattagagtttcttccttgtctatcacattangacttgtagggacatacccatataaagcctcaaaatgtgtcatttgtggtggtgtatgaaacttggtattataccataattctgccattgctaaatgatttgtccattatttgggcatatttccaatagcacatctcaaataagcttctacggatttattgagattcccaatctatccactattttgtgtatggaaaggtgtggatcttaacaatttaacaccatgtgactgcattaaacct

SEQ ID NO: 13230 - DNA, 440 bp, Glycine max
  unsure at all n locations
tgtgttctcccttgtagaactactatctgtattaacagtngcaacccaactatctggtagtgatgacaatagaatcaatgccttcacctcatcctcaaatntaatctgtactgactccaactgggcaagaatagtattaaattcattaatatgatcaattacagagttaccttctcccatcttgaggttgaacaactgacgcatcaagtatactttgttggctacagacggcttctcgtacatatctgataacgccttcattaagcctgcaataatcttctcgtttacaatgttgaacgcgacgttcttggctaatgtcaatctgatcatgccaagagcctgtcgatctagcaagtttcattcttcttgccttatngccgttggcttatcccctgataaaggttgatgcagcttcttctgatatagataatcctctatct

SEQ ID NO: 13231 - DNA, 408 bp, Glycine max
  unsure at all n locations
cgagtcttactgaaagctgtgccgggtgtttcactactattggtgatgtgtattctatgacaagaactattggagttcccatgacaaccattgaagccaggctggaatctgtgccagatatgggatatgatgccctctccaatgtaccccgtggagaaatttgtttgagaggaaataccttgttcttcggctaccacaagcgtgaagatcttaccaaagaagttatggttgatggctggtttcatacacgtaaaaccatgttgtcctgtattctaaattaacatagtgattggtngatcagcacacaattcacatacatgtaaaccattgcaggtgacattggagaatggcaatcaaatagggccatgagaattattgatcggaagaagaatctctactaattgtctc

SEQ ID NO: 13232 - DNA, 418 bp, Glycine max
  unsure at all n locations
ctcaagctntttattntcactcgaatntgaaattgaattttggagacaaattntcactaattatgattagtgaactttagctatggttcagcccaccaatccaagatcaattccaagattctccactaagtgtgcttatgtgtcatgaggcatgtaaagcatgaatgacatgcacaaagtgtgactatatgatgtggcaatggggtgtagcaagcaaatgatcacctccccctctaatatttaattggattggtcttctcccaattcaattaaatntatttctcaacacacacatcanatatggacttaattaacgtganattacaaaactacccctaatacacanactatagtctaggtgccctataataccagggcttgaaaatcctacatntctanggtacnctacctacattat

SEQ ID NO: 13233 - DNA, 359 bp, Glycine max
tgattctgttgagaaagaatattcctcattcctattcccaatgcgtccatttccaccacgaatggcagggaaaagtccggcaaccgcaagactagggcgctacagatgacttccttgagcttgtcaaaagctgcttgggctttcggggaccagcaaaacttgtctctggccaggagctgagttagaggtgctgcaattgaagcataccccttaatgaatcttcgatagaaacctaataaaccgagaaagccccttaaagctctggtcgaggaaggtactggccattgttggattgcttccaccttcgtcgagactggttgaacaccaaactacgagaccaaatggcctagatactccac

SEQ ID NO: 13234 - DNA, 426 bp, Glycine max
  unsure at all n locations
gtggtctatataggctgtcanatgcattattactcaatntcgataaatgttcataganaattttgcatgtggttgttttactttgcataattttcatttattaaaaaatattanatntctgctctttactttatcctccaggttggaattgctgaacttaaaacagctgttgaaagaaccggaggtcttgttgtacttgctgaaagttntggccattcagtgttcaaggattcactanagcgtgttttccaatcgggtgattatgatntgngtctatcttcanagtaagtctttaaagaatttcattnttatntnntgtatctgatatactaatattcctgangtgtgtttcttgttgatgtaataaggataactctactgcataaattattattggctagtgagctactatgttagttaaatact

SEQ ID NO: 13235 - DNA, 303 bp, Glycine max
  unsure at all n locations
gtgactactgcgggtgatttcngcaaccccggttcgcacaccgtggcgaattggttcaagattgagaagtatgaggatgcttacaagttggtgtactgtccaagtgtgtgctacgattgcagttatccatgcagtgatattggaatataccaggatgaatatggcaaacgtcttgctctatgttctgaaccatacaaagtgaagttccagcgggcttgattattgaattgataactaaactcaataaagaataatgaatacgtgtaatgaactactctatgctcntgctgcatatattggaat

SEQ ID NO: 13236 - DNA, 362 bp, Glycine max
gaatcacaaatttgtacctgtcgcaagggtttgtggtttgtgctcctctgctgaccaccatacagacctttgcccttccatgcaacaacctggagcaattgagcagcctgaagcttatgctgcaaatttttacaatagacctcctcaacctcagcagcaaaatcaaccacagcagaacaattatgacctctccagcaacagatacaaccctagatggaggaatcaccctaatctcagatggtccagccctcagcaacaacaacagcagcctgctccttccttccagaatgctgctagcccaagcagaccatacattcctccaccaatccaacaacagcaacaaccgcagaaacagccaacag

SEQ ID NO: 13237 - DNA, 397 bp, Glycine max
  unsure at all n locations
agatggaccatntcaagtgctngaaagaattaatgacaatacttacaaagttgagctgcccggtgagtataatgttagttccaccttcaatgtctctgatttatctcttnttgatgcagatggagaatccaatttgaggacaaatccttctcaagagggagagaatgatgaggacatgaccaagagcaagggcaaggatccacttgaaggaattggagggcctatgacaagggctagagcaaggaaagccaagcaagctcttcaacaagttntgtccatactatttgaatacaagcccaagtttcaaggagaaaagtccaaggttgtgagttgtatcatggcccaaatggaggatggactaaatgacaccactttgtctcaatttagagtggttagt

SEQ ID NO: 13238 - DNA, 333 bp, Glycine max
  unsure at all n locations
gacgcaaggctaagcgataagatactnttcccactaattcgatgatctgataggggccataaaaacgctttcctagttntgaaacttatcagcgatcgaagtttggcggtaaagtcttagcttcacatagacccagtccccaattttgaagttgacttcttgacggtgaggatcagtagagttcttcattcgtgcctgagatcgttcgagtntttgacgaagggcatcaaacatatcttggcgagtggtaaggaggaagtccacagcctcgactgatgatgaaccaggaaggtagtccgggatatcgggtggtggcttcccgtacattacctc

SEQ ID NO: 13239 - DNA, 232 bp, Glycine max
atataaatatatatcacgactctaacttcatgatattgatgcctatctacgccacatatgaatcattgtataatggaacaataatatatggatgtatagagatggaaaagctgaccttctcgtctattattgctttatacatagcgacttgctccttggcagcactggtagtgttttcagcttctccttgaagatgcaactttgacttcttgatgtctctctcctctgtctc

SEQ ID NO: 13240 - DNA, 173 bp, Glycine max
tccgtgtgaaatgttatgaccatctgaatttctcgagagcttccgatgtttaatattgagcgtatccatctatgatacgcctgaatcggacctccgtgcgaaaagctatgaccattcgaatttctcaagagcttccggtgttcagtttcgagcgtctctatatgtcatgcgcc

SEQ ID NO: 13241 - DNA, 447 bp, Glycine max
  unsure at all n locations
actcagcttacacaatntagttttctcacacttgagtcttagaatactaattactaagtcttttctgactcgatgattgaaatgatgcatgtttatgtgtgtatccctacaatgccataatcaagaatcaccaatcttacttactaaaccactaagttcatgaaatgatgcatgtttaatgttttaacatatagatatcacctatccttttgctaatatggacaattgtcacaaagttgactaatgctcaagaggttatgctttagtccatcaacatataaaacattctttatttgtgtcttgtactgattttcaatgtttccttctcccataatattccctttattgttgtcttcaaaagtgatgtatcctctttcttttatacaaagtcagaagtttgaacttgtacccatcatgtgcctagaccaaccactatccaagtaccat

SEQ ID NO: 13242 - DNA, 346 bp, Glycine max
tgtccatatcatggaagaccctcatgacatctcagctgttattcattggatttctgatatggagctccaagagattaatgctgtgggatcaagatatacctggataaggcctaatgggtatgtgaagagtatgcttgacagatttttggtctcggaccaatggttgtctatgtggcctgagagctgccaacatgttttgcaaagggatatatctgatcattgctcaaccattctgcaaactaacatggcggactggggtcctaagccctttatggtttttgattggtggctgcagcacaaagagtatcaaacaatggtgagggagacctggactaatgatcagcat

SEQ ID NO: 13243 - DNA, 431 bp, Glycine max
  unsure at all n locations
tcntagtctcaatttgagcgtctcgatatattacccggttcattctgacatccaagtaaaaagttattgttgtttgaatttcctatgagcttcggttttcaatntggagcgtctcgatatattacaggactcaaccggacatccgtgtataaagttattgtcatttgaattttcttagagcttcggatctaaattttgagcgtctcgatatattacgggactcaatcagacatccgagtcaaaagttattgtcgtttgaatttgatacgagcttccgttgtcaatttggagcatccctcgataaattacgacactctgtcgggcatncgagtaaaaagatattgtcgtttgaatattctaagagtttcctgtttgaatttggagcgtctcgatatattacgggactcaactggacatccgtgtataaagta

SEQ ID NO: 13244 - DNA, 447 bp, Glycine max
  unsure at all n locations
tgaatggtgacctgcgtagaagtgtgagttgattgagaggcaatcatttattcaacttcgcatttctctcgcatccactgaaccaagattcctattccanaatgaccggtaactgttccattttcatttctctcatatctcagattcattcataataatcataacaaccctttctctaatctatggagattgattgctgcagctcctacttcttccagcctgtggctggctccaatacccagcanaagatggtgcgaactcttcttccttctctacacccncttctggctcaccctttgactcggcattgttattcccttcaatctttacgaaggtttactctatccaccttttacattgtnntttgtaagcattctaatatgatctcacagtttgatctatctggccactacggaataatccgttacactaatccactaaattatt

SEQ ID NO: 13245 - DNA, 359 bp, Glycine max
  unsure at all n locations
tcacctggttcaagcacgactntctttctgcttttgttggcttgccttgcatagctcgcatntttcttttcaatttgagccttcacttgctcatgcaacttcttcacatacttagctttagcctgtgcatccttatgcttaaacatagcaatgttaggcataggcaacaaatcaagaggagtcaaaggattaaatccatacactatctcaaatggtgaacaattagttgtgctatggacagcctgattataagcaaactcaacatgaggcaaacaggcttcccacaatataagaattttctttataacattcctaatcantatgcctatagtcctattgactacctcagtttgaccatt

SEQ ID NO: 13246 - DNA, 302 bp, Glycine max
  unsure at all n locations
tgctggaactacttcacatggtcttgttggttcctatgcaagttgaaagccttggagganagacgtatgcctgtgtggttgtggatgatttctccagatttacctgggtcaactctatcagagaaaaatcagacacctttgaagtatctaaagagttgagtctaagactgcaaagagaaaaatattgcgtgatcaacaaaatcacgagtgaccatggcagacagttcgagaacatcgggtttactgaatactgcgcatgtgatggcatcactcatgagtactctgctaccattacaccacaa

SEQ ID NO: 13247 - DNA, 441 bp, Glycine max
  unsure at all n locations
ctgcagcttagctntgtcccaggcttcatgtagacttgtccaanatcgcgaagtaaacctcggatccctgtcggatacaatatcggaaggaattccatgcaacctcactacttccttgatgtacaactccactagcttctccattctatacttcatattcaccggaataaaatgtgcagatntggtaagtcgatctactatgacccacacagcgtcatgtccacgactagtcttgggtaaactagatacaaaatccatagatatgctctcccatttccattccggaatttccaatggcttcaattctcttgatggtcgctggtgctcaaccttatgcctttgacatgtcaaacatcttgctacatattcagctacatctttcttcatgtcatgccaccaaanacttctcttcaaatcttggtacatcttagtcattcctgg

SEQ ID NO: 13248 - DNA, 381 bp, Glycine max
  unsure at all n locations
agtcttgtcttttacatacttatatggacatctggtgagtatgtaaacagcagtgtagactgcttcagcccagaatgtgttaggtagtcccttttccttgagcatcgatctagccatctccataactgtgcgattctttctctcggacactccattntgttgaggagaatatgcgactgtaagttgtctctcaatgccttcatcctcacaaaatctttcaaactcgtgagaggtgtactctctgccgcgatcacttcttaatacttttatccgttttccactttgattttcaacaaggaccttgatacttttgaatactccanagacttctgatttttcttttagaacatatactcatgtcattctagagaagtcatcaat

SEQ ID NO: 13249 - DNA, 430 bp, Glycine max
  unsure at all n locations
catgatatatgacgggtctcattctgacatccgagtaanaactaatcgtcgttggaatttcctcagaggttctattttcaattctgtgagtctcaatatactacacgattcaatcggactttccagtaaaaatgtattatcgtttgaattntctcagagcttctattttcaatttcgagcacctataattattaagggactcaattggacatccgagtcaaaagttattgttctttgaatttcctcagagcttctattttcaattttgagcgtctcgaattattaaaggactcaatccgacatctgtgtcaaagttaattacgttgaatgtcctcgagcttctgtttcaatttgagtgctagatatataccggactcaatcgacatccaacaaaagtattgcatttgattttggagagctcgtatatttc

SEQ ID NO: 13250 - DNA, 439 bp, Glycine max
  unsure at all n locations
tgtaagatttgcaagatcatcttcgttgacaactccttgagtattatggccatctataagaagcgttgacaatttatagagtgatccaagactttcaaatggatttccgctgaatttattaatagagagatagagatattttaaatctatctcccataagttgcggagattacccaaaaaagtcggaattgttccttcaagttgattacgtgataaatcaagttcaacaagagaagtcaaatttcccaaagaagttggaatggttccttcaagttgattatatgacaaatcaagttcaacaagagaagtcaaatttcccagggcatcagaaatagtcccatgcaagttgctggaacttaggtccaaagacttgagacgatganaaccgtataagcaatcacgtatagatgatgagaatgaattgaaagacaagtcaaga

SEQ ID NO: 13251 - DNA, 442 bp, Glycine max
  unsure at all n locations
tgatgcaacatatggagaggttaatgaaacaacgagatgatgcgctccatgagaggttggatcaaatggagaatagagatcataatgaagaagaaaggaggagaagagggaatgatggtgttcctagacaaaaccgaattgatggtattaaactcaacattcctccatttaaaggaaagaatgatccggaggcctacttggagtgggagatgaaaatagagcatgttttctcatgccacaactatgaggaggaccagaaggtgaagcttgccgccacggagttttccgactatgctcttgtgtggtggaacaagctacaaaaggagagagcaagaaatgaagagccaatggttgatacatggacggagatgaaaaagatcatgaggaagcgatatgtgccggctagttactcaagggactngaaattcaagctccaaaaact

SEQ ID NO: 13252 - DNA, 451 bp, Glycine max
  unsure at all n locations
actgtgtgcatgaatactgttgggatgtggcaaattgttatgcagttattgttattccggaaggaatgaattggcaacaaaagataagattcttttaagatgctgatttctatctatggcataacccgtacttattcaagttaaagggtgacaatttgtttaggagatgtcttactaaagaggaagttcaagacatcttatggcattgccataattcccccatatggtggccattataatggggaaaggacaactagtaaagttntgcaatccaaattatttcggccttcaattntcaatgatgcacacaatcatactcaaagttgtgataaatgccaaagatccagtaatacttcatagagacatganatgccattataaaacatcttataggttgaggtctttggttattggggaaattggtgcatggaaccttttcctcatcacattc

SEQ ID NO: 13253 - DNA, 351 bp, Glycine max
  unsure at all n locations
ntgagccaattctaacgagtaataacttttactcggatgtctgtatgagtctcgtaatatatcgacacgctcgaaattgaatgttgaagctctaagcctattcaaacaacaataacgttttactcggatgtccgattcagtgacgtaatatatcgggacgctcgaaattgaaagttgaacctctgagccaactcaaacgacaantaacttttacttggatgtctgattgagtaccgaaatatatcgagacgctcgaaattgaatgttgaacctatgagcctattcaaacgacaataactttttactcggatgtctgattgagtcccataatatatcgagaacgctcgaaat

SEQ ID NO: 13254 - DNA, 320 bp, Glycine max
acattcaactttgagcgtctctatatattacgggactcaatcagacatccgagtaaaaagttatggtcgtttgaattggctcagaggttcaaaattcaatttcgagcgtctcgatatatttcaggacttaatcagacatccgagtaaagagttattgtctgttgagttggcttagaggttcaacattcaatttcgagcgtctcgatatattacgtcactgaatcggacatccgagtgaaaagttattggcgtttgaattggctctgagcttcaacattcaatttcgagcgtctcgatatattacggtactcaatcagaca

SEQ ID NO: 13255 - DNA, 438 bp, Glycine max
gcttggcgcttatatctttgcatgaatatatgctattgggactcaagagtgttatgcaatagttgtggacaataaattacaaattagcttggctaagaatccagttgctcatgggaggaagcaacatattgaaactaaatatcattttcttcgtgatcaagttaataaagggagattatagttgtgtctctgcaagtttgaacaacaagttgtagataccctaactgaagaatgcaagatgtaaagaattgaggagaatgttgaatgtggtgtctttagaaactttgatttaaggaggagtgttgcagagtaattcaaagtgttaacccatgtgtgtgcgtgaactttgtaggtatatagttaaatgtgacaccctctaccctcacacataacgaataagaggaaataaaatcatgtggaaaattttataataaaaaa

SEQ ID NO: 13256 - DNA, 294 bp, Glycine max
gcttatgcatctcttttcgcaccttttttttattgatggggtgagccttctctgtggctgactaactggtctgtagtcttcttccatcattatcttgtgcatacagtaggtagggctgtatcctttcagatctgatatgtgccaccctattgcctccctgtgtctcttgaggacctccaccaacatgttctcttcctctgttggtagctcagtgctgatcaccacaggcttggtctcattctgctctaagaacacatactttaagatgttgggtaggatcttcagctccacctt

SEQ ID NO: 13257 - DNA, 403 bp, Glycine max
  unsure at all n locations
ctcattaagaatcaaagtgccatgaagaatatgtctgtctttaatgaaagctgtttgtctttcatcaattaagacaggtatgacatgtctcaacctgtttgctaaaagcttagctattattttatacatgcagcctatcaaagatattggtctataatcatttagggactgagggtggttaactttagggattaaagccaagaaagaggcattgctgcctctagggaaactaccattgacatggaactcatccacaaatcttctgaactctggtttcagcacaccccagaattccttaataaaattgaaattaaagccgtctggcccaggggacttatctncaccacaactccacacagcttccttgagttcttggtctgagaaagctaaaatcaactcctcc

SEQ ID NO: 13258 - DNA, 452 bp, Glycine max
ttatagaatgcctgacgagagcgtctccacggagaaccctctctacaagcttctgcggcgtgtgaagacactcgcgccgcgcgtggtgacgctggtggagcatgatgccaacgccaacacggcgccgttcgtggctcgagtaaccgagttgtgcgcgtattacggcgcgctgttcgactcgctcgagtcgacgatggcacgggagaacttgaagcgagtcaggatcgaggagggactgagtcggaaggtggtgaactcggtggcgtgcgaaggaatggaccgcgtggaacggtgcgaggtgtttgggaagtggcgcgcgcgtatgagcatggctgggttcatgttgaagccactgagtcagcgagtcgctgattcgatcaaagcgcgactcggtggcgctgggaaccgagtcgcggttaaagtatagaacggtgggatttgctctgctggat

SEQ ID NO: 13259 - DNA, 477 bp, Glycine max
  unsure at all n locations
ngttgtcattgttgcacaattgcaggagcaacgagtaaccttcctagctnttccttccgaatcaatcttgcacaactgcagggagaaagtccaccaaaattaaaacacaaaagcaatggcataaattaatccattggaaggcataaatatagaatagtcatacaacaacaacaacgccttatcccactaggtggggtcggctacatggatcaacttccgccataatgttctatcaagtaccatacttctatccaaatcattaagtttgagatccttttttataacctctcttatagtctttntgggtcttcctctgcctcgaattgtttgccttctctccatctggtctactctccttactacagagtctaccggtcttctctctacatgcccaaaccacctaagtctattttccaccatcttctctacaataagcgctactccaaccctctctctaatagcttcggttctaaattt

SEQ ID NO: 13260 - DNA, 405 bp, Glycine max
  unsure at all n locations
cggagatgatggtacagcgggtgaaccacaagcggaagtttcttttggtgaggtagccatggaaaagcagagcgtttggaatgatntcttaaatctcagaacgctantgggaaatgctggttaaaacactaatgccaagcagatataaatttgaatgaagaatgtagaggggcgtgtgaggcaacggtcgaattctgtttggcttaatagtgaacgtgctattaatggtaagtgattcgttcgggcacgttcagagtgctgtagttgctataattcctctagcanacacatgcccagcttgcccctcaagttttcaaactganttgcatccaaagccttngtgaanatatcttgctatttgtcctcagtgtcaacatgcttcagtgtgatctacttatcatcaac

SEQ ID NO: 13261 - DNA, 439 bp, Glycine max
  unsure at all n locations
tgaagacaagactatacgaggtatcttccttgggtatagcattatctctaagggctaccgtgtctacaacttgcaaactaagaaactcgtcatcagtcgagatgttgaagttgatgaatatgcttcatggaattgggatgaagaaaaagtggagaagaacgttcttatacccgcttaactacctcaagaagaatatgaggaagaagatccaggtgaaccaccttcacctacatcacaacaacaagatcaagaactatcatcaccagagtctactccaaaacgagtaagatctttggtggacatatatgaaacttgtaacttggccatacttgaacctggaagcnttgaagaagcgtcaaagcatgaagtatgggtcaaggcaatggaagaagagatacagatgatcgagaaaagcaacacatgtggagtagtnaatcgt

SEQ ID NO: 13262 - DNA, 358 bp, Glycine max
  unsure at all n locations
catagcaccactaattgttctacttgtgaagttgtttatggtcctaacccactaactcctcttgatcttttgcctatgcctaatgtttctgtttttaagcataaagaacgtcaagctaaggctgactatgtgaagaagcttcatgagagagtctaagatcatattgagaggaataataaaagctatgctatacaagccaacaaagggagagagaaggttatcttctaacccggagattgggtttgggtgcacatgataaaagaaaggttttcggaacacaagaaatcanatcttcaaccaaggggagatggaccatttcatgtgcttgatagaatcaatgacaatgcttacaaagttg

SEQ ID NO: 13263 - DNA, 429 bp, Glycine max
  unsure at all n locations
gcttcttagtttcagatgatgcagatgggtttgtatccacctcatgcactcctctaatgactatggcatcatttctggcgctaaactgctgggagttggaagccatcttctcaattaaatttctggcttcagcaggagtcatgtctccaagggctccaccactggcagcatctatcatacttctctccatattactgagtccttcataaaaatattggagaagaagctgttttgaaatctgatggtgggggcaactggcacatagtttcttaaatctctcccagtactcatacaggctctctccactgagttgtctaatacctgagatatccttcctgatggctgtggtcctggaagcagggaanaatttttctaagaatactctcttaaggtcatcccaactcgtgatggaccttggagcaaggaata

SEQ ID NO: 13264 - DNA, 409 bp, Glycine max
  unsure at all n locations
gcttctgctctagctngagcaagttcagcctttctttngtttttgctcaaactnttcttatagttggtaacaaatctatcaagctcccagagagtctcagcatccacactatcaatgtccacttcaatttcatcgtcatgttgattaagtgctgaatttctcttcttaatgatttgtacaatagcatcaagcttctctgaaggcaagctctgaaggttagtgcttagtttttgcttttcctcaaatgtcatgtctcttttatgaggatcttttgcctttggctnttttggagctggggttctacttgatggagtaatgctcatgagtcttggagtctgtgtcattgattctgatctattcaaaatccttctcatatcaagaggtggtggtgtaatgcagaaacccttct

SEQ ID NO: 13265 - DNA, 443 bp, Glycine max
  unsure at all n locations
tgacaggttcatgcactctgaattgttcgctttacctcaatgtgttggcactcacatntttcagattctgcatagtttgtgaaggcaatttgtcaaaattttgggactgagcttggttcaactgagtagccatttgccccatctgatttgtcagactctgaatagaggctcttgtctcttgctgaaattgcatattctggatggacatttgtctcactaactcttctaaggaaggttgaggaggagcctcagttgcttgttgtcattgttgtgactgttgttgttgttgctgcattggaggaggaacatatggcttgtttggactagcaacattctggaaaggagggacaggatgttgttgttgtggaggacttgcccatcttatatctggatgatatgtccaacctggatcgtatctgtttcttgaaagatcataattattc

SEQ ID NO: 13266 - DNA, 462 bp, Glycine max
ttaaaactaagctgccaagaatgtaacctataacggacgctcttgtgggctcatacgagaaaatctttggtattgtaggcattggatccatgagtaatacatgggatcaaacgttgccatattgttcatttaatccacgcaagaattgcatggctcgatcttcctgctttcgttgagcaatagtggtgaggactgaacaagtgcacttaatagtgcaagaacaaatgggatcaggtgtgaaattctcgatttcgtcccatatgatgcgtagcttcatgaaatattccgtaacagagagagtaccttgcttcatcgatgatgcttcttgtagaagatcagagatccccttgcgcgtatcgagacttcaaatcactctagatttcttctactttgtccattcatataatactttgtctaattgaaatggataccgaatgaacgatccaagacaccaccatgtta

SEQ ID NO: 13267 - DNA, 464 bp, Glycine max
tactcagccctgtatggattacacatatactcgaatcgattaccagagctttttttcactatatattcgcaacagtcacatctgtttatgtggttcttgaatggctatcaaaggcctatatatatgtgacttaagacacgaattcgatgagagtttttcagaacaaaaaggtcttatcctcttataaagcaaaatcgtctaatcctcttacaaataccttggccaaattactcgtgattcaataaggaaatatctgagtgctcacattgttcaatctatctctttcaacagagatcacctcttctcttcttctatattctgaaaagggattaagagacccacggtctctcgttgtgaaacaattcttaacacaaaggaaggaattgtcttgtgtgtttagaacttgttaaaggaattctcaatatagtggaactctcaagcggctgattgggactggactttgc

SEQ ID NO: 13268 - DNA, 435 bp, Glycine max
taaacattcaatttcgagcgtctcgttatattacgggactctatcagacatcttagtaaaaacttattgtcgtatgaattggcttaaagcttaaacattcaactttgagcgtctcgatatattacgggactcaatcagacttccgagtaaaaagctattgccgtttgaattggctcataggttcaacattcaatttcgagcgtctcgatttatttcggtactcaatcagacatccgagtaaaaagttattgtcgtttgagttggctcagaggttcaacattcaatttcgagcgtcccgatatattacgtcactgaatcggacatccgagtgaaaagttattgtcgtttgaattggctcagagcttcaacattcaatttcgagcgtgtcgatatattacgggactcaatcagacatccgagtaaaaagttattgtc

SEQ ID NO: 13269 - DNA, 389 bp, Glycine max
  unsure at all n locations
gatgtccgattgagtctcgtaatatatcgacacgctcgaaattgaatgttgaagctctaagcctattcaaacaacaataacgttttactcggatgtccgattcagtgacgtaatatatcgggacgctcgaaattgaaagttgaacctctgagccaacccanacgacaataactntntacttggatgtctgattgagtaccgaaatatatcaagacgctcgaaattgaaagttgaacctatgagcctattcaaacgacaatagctntttactcggatgtctgatggagtcccataatatatcgagacgctcaaagatgaatgttgaagctctgagccaattcatacgacaataacgttttactcggatgactgattgagtcccgtaatat

SEQ ID NO: 13270 - DNA, 407 bp, Glycine max
  unsure at all n locations
agctntgaatgctctattcaatggagttgacattaatatcttcatacttatcaacacatgcacagtggccaaggatgcatgggagatcctgaaaaccactcatgaatgaacctccaaagtgaagatgtccagattgcaactattggctacaaaattcgaaaatctgaagatgaaggaggaagaatgtattcatgacttccacatgaacattcttgaaattgccaatgcttgcactgccttgggagaaaggatgacagacgaaaagctggtgagaaagatcctcagatccttgcctaagagatttgacatganagtcactgcaatagaggaggcccaagacatttgcaacatgagagtagatgaactcattggttcccttcanacctttgagctangactctcggata

SEQ ID NO: 13271 - DNA, 478 bp, Glycine max
  unsure at all n locations
tactcagcttagactcactagcacctagccacctagagntaggttatctactctcttntatccatgtctcatcaaatcccaatctatgcaacatatgaaaatggaatctccaagaaaaataatcatactccttttcaaagtctaccttgaaccagagacacttcttttttatcctagcttcatccactacctcacatcttctttttcaaaggccaccaatacaataagcaataattgtctcccaccaaagacaacacattgtctattatcaattacatcacctaaagcccttctcattctattggctaacacttgtgccaaagatttatacaaacatcctactatagaaataggtctagattctcccaagctntgaggatttttacatttagcaatccaaataataaaggagggaattatatctctaggtaacaccccatgtgcatggaattgctntaactacttcaataagtctccc

SEQ ID NO: 13272 - DNA, 471 bp, Glycine max
  unsure at all n locations
tcagcttacaaagtctattggctggatacaagcaccgaggcagtttactagaagtttaatgagtttatgagcaactcatgattcaacagatgtgacatggaccattgctgctatgttaagaaatatactaatagttatgttatcgctatcgcgtatgttgatgacatgttgattgcaggatctagtatgacataaattaacattgtgaagcagtagttggtagaaaactttgaaatgaaggatcttggtccagctaaacaaatccttggtataagaattcttagaaacagatcagaaggaattttgaagttgtctcaggagaaatatatacacaatttgcttgacaggttttaccttgaagattctaagaccaggaatacccctttgggatcttatttgaagntttcaaagaagcaatctttgcagatgatgaagaanaatgttacatgtcaagagtaccatatgcatcat

SEQ ID NO: 13273 - DNA, 241 bp, Glycine max
atctgtttctgtcacccaatcccaagtttgcatatcggtcccaaccccatccatacaaattcccatctttagtgatttgtacactatgttcagcaccagccagcaccattttgataggtatttccttgcaaaatacaaagttcatgtctccaagtagttaagggaataataatctgtttgatacatatacttttctgttgtcaattaattatataatgcattgtcatgagcatacattaac

SEQ ID NO: 13274 - DNA, 436 bp, Glycine max
  unsure at all n locations
tcgaacagtcatcacttcattctcatggcgatagattatttcaccaaatgggtcgaagcggcttcttacaccaatgtcacgaagagtgtgatggtcagattcataaagaaggaactgatttgtcgatacggactccctaggaagatcattactgacaatggcaccaatctgaataaaaaaatgatgcatgaaatgtgcggngatttcaagatccagcatcataactccaccccctatcggccaaagataaatggggctgtggaggctgcaaataaaaatattaagaaaattattcagaagatgacggtgtcatacaaagattggcatgagatgttgccttttgccctgcatggatatcgaacctcggtacgaacttctactanggcggcaactctgtattccttggtttatgggatggaagcggtactcccatttg

SEQ ID NO: 13275 - DNA, 468 bp, Glycine max
  unsure at all n locations
actagatgcattggttaacttggtaacccagcttgccttgaatcaganatctgtaccagtcgcaagagtctgtggtttatgctcctctactgaccaccatacagacctctgcccttccatgcagcaacctggagcaattgagcagcctgaagcttatgctgcaaacatttacaatagacctccttaacctcaacaacaaaatcaaccacagcagaacaattatgacctctccagcaatagatacaaccttggatggaggaatcaccctaatctcagatggtctagccctcaacaacaacaacagcaacctgctccttccttccaaaatgttgctggcccaagcagaccatacattcctccaccaatccaacaacagcaacaaccccagaaacaacaaacagttgaggctcctccgcaaccttccctcgaagaacttgtgatgcaaatgactatgcagaacatgcagtt

SEQ ID NO: 13276 - DNA, 453 bp, Glycine max
  unsure at all n locations
gtagcccatcatctttatatcgtacaacactgttgatgtgtctactatcatcgacatcagtgttctctccgtcattgaggtgccacttgagctgccaagtctctccacctttgggcgtattcttttgaaagattcgtgccccctttttgcacatgttctgtagttgcatcctatccgaagacattatactgaaactgcctaacgatggcaaccactatgtccttccaagaatggactcgggaaggttccaaggtactgtaccaggtaacagctaccccagtaagactttcttggaaggaatgtattagcaattcctcatcttttgcatatgcgcccatcttccgataatacatctttagataggacttgatgcaagtagccnccttgtacttgtctaaggccaacaccttgaacttggaaagtgtgatgatattgcgtactaggaacaactct

SEQ ID NO: 13277 - DNA, 335 bp, Glycine max
  unsure at all n locations
ttacgccaaagaaaaacaatgggaagatgtacaaagtttgagaaagatgataaaagatggcaacatgaataagttgccaggttatagttgggttgatattaaaaataaaacccatgtgtttggggttgaagactggtctcatcctcaaaagaaagaaatttatgaaaagcttgataatcttcttgatcagataaagcgaatcggttatgttcctcaaacagaatcagttctgattgacatggatgacaatttgaaggagaagcttcttcattatcacagcgagaggatggccgtggcattntcattactaacctgcccaactggtatgccgatca

SEQ ID NO: 13278 - DNA, 374 bp, Glycine max
  unsure at all n locations
caataataganaatacttttttctcatcgtttatttacgacattctacatcgtttttaaaaccgatgttgaaagtaccaatgttgaatgtattattgttaacatcgattttgaaaatttgatgttaacataaaaatactaacatcagttttctcaataaccgatgttatatacaaagaactaaagaaaataagtgtatgcatgatgaacattgacatctgttttctataaaaactcgatgtaatgtaatttattaacatcggttttctatataaaaccgatgtgaacgtccatcatctatacacttattttgctgtagttagttatatataacatgcggtatctataaataacagattgtaaagtttgtatatt

SEQ ID NO: 13279 - DNA, 217 bp, Glycine max
  unsure at all n locations
ttctttttgctttacaagaggctgagagaagatatgatctggctagagctgcagacctgcgatatggagcaattcaagaggtggaaactgcaatacaacaaccttgagggagcactgaagagaatctgatgttgactgaaacntgtggaccggagcaaatagctgatgttgtgagccgctggaccggtataccagttacaaggctttgccaaaatga

SEQ ID NO: 13280 - DNA, 401 bp, Glycine max
gctttggagacccactgcaggaagctattctcgaactaatatgcttcagatgaaatggttcattttgtaatttctcaattcagttgtcaattctggacgatttcctgttaatttatcctttcacttttggttatagatgacttgctccacggttgaactcactgttcaatatgtggagaagttgagggaaatgattccactttatgaaattgtcaatgaacgtatcaacatcaatgacatttaatgggcacagcactgtattatttcaagctctcatatagcaatgcaagtgatgggaagctattgtgatagatctccagacgtaactgccactctagcaattgcaaattcttcgaactagctgatttattagtgatatgtatcttgaggctacattacaa

SEQ ID NO: 13281 - DNA, 446 bp, Glycine max
acactataatactcagctagagccaattcaacgacaatagctttatactctgatgtctgtatgagtcccgccatatatcgagacgctcgaaatttaatgttgaagctctcagccaattcaaacgacaataactttttactcggatgtctgattgagtcctgtaatataacgagacgctcgacattgaatgttgaagctctgagctcattcaaacgacaataactttttacacggatgtctgattgagtcccgtcatatattgagacgctcgaaattgaatgttgaatctctgagccaatccaaacgacaataacgttttactcggatgtctgattgagtcctcgaatatatcgagacgctcaaacatgaatgttgaagctctgagccatatcaaacgacaataacttcttacacggatgtctgattgagtcccgtcatatatcgag

SEQ ID NO: 13282 - DNA, 296 bp, Glycine max
  unsure at all n locations
gcttgtaagccaccatgcctatcttctgtataacctgcaagggaccataaaaacgtctagccaatttagagtaagattctcttgtggttgaggtttgtctatgagggtgtagtttgactaaaatccaatctctaatcttgaagcttacatctcgtctatgattattcgcaaaatgcttcatggttcctatgcctcgagcaacttcttntctgaagctttgaacataacctcttgattaaccaagaaatcatcaactgcttcgaccttcgatgaccccataatgtattgagggggac

SEQ ID NO: 13283 - DNA, 456 bp, Glycine max
  unsure at all n locations
agcttccatcaagttccctccaccttgganaggatntgacctcaaatcccgaggtttttcatactctgggctccttccctcaacacctgtaaaaagaacaaaaacacatgtattagtggtgtttggtttgttgaagtaaggtaaggtctgaaaattcatttcctgngcatcttcccatgaaggaacatggtttctcatcaactcaatgagtggtgctacaagtatagaaaaatatgggacaaaccttttgtaaaagtttgttaagtcatggaagccccaaattnttcttatacttggtggagtgggccactcangagtgacctttattctcttaaggttcatgggaaccccttgaccactatttaaaaaattaagganattaatgcaatanagcgtacctttttctataattntgtgttgattattcctacaaaataatacgacaaacctaaagtg

SEQ ID NO: 13284 - DNA, 391 bp, Glycine max
  unsure at all n locations
attgagtcttgtaatatatcgagacgctcgtacttganaacaaaagctcgtggcatatgcaaaccgcaataactnttaactcggatgtccgactgattcccgtaacatatcgagacgcttgtaattgaaaacggaagctctgagcaaattctaacgacaataactttttactcggatgtccgattgaatccagtaatatatcaagatgcttgaaattgaaaacagaagctctgagcanattcaaaagacaataacttcttactcggatgtatgattgagtcccgtagtatatcgagacgctcgaaattcagaacagaagctctaagcaaattcaaccgacgataactgtttactcggatgtctgattgagtctcgtataatatggagacac

SEQ ID NO: 13285 - DNA, 407 bp, Glycine max
  unsure at all n locations
ctgcacgcatgcaagcttgctaacccatggaagctcctaatatcttccacattctgngatggccttgattttctcaagatccacttggaccccatttctaccaactacaaaccgtaagaaaactatattatccacacaaaaaagtacacttctctatatatgcatagagggtgtttttcctaaggactgaaataacttgcctgagatgtcctaagtgatcatctaggctcctactatacactaaaatatcatcaaaataagcaactacaaatctacttatgagatcccttaagacatgatgcataagcctcataaaggtgcttggtgcattagtgagcccaaaaggcatcactagccattcataccaaccaaacttggtcttgaaagcgggtntccattcatcaccc

SEQ ID NO: 13286 - DNA, 443 bp, Glycine max
gcatgcaagcttatagaatatataataaaagaactatgactattgaagaatctattcatgtttcctttgatgagtctaatgctatttctccaagaaaggatattttagatgatgttacagaatctttagaacaaatgcacattcatggacaagattctaaaggaagaagtcaaatcaaatgatgaacttccaaaagaatggaaagcttcaaaagatcatccccttgacaacattattggtgatatctcagaaggggtaacaactagacattctcttaaatatttatgcaataatatggcttttgtgtctatgattgaacctaaaaatataaatgaagccataatagatgatcattggatagtagctatgcaagaagaactaaatcagttcgaaagatacaatgtgtgggaattagtaaagaaacctcgaaactaccctatcat

SEQ ID NO: 13287 - DNA, 398 bp, Glycine max
  unsure at all n locations
tgcaagctggtcgaggctctcgtgaaggacatactcgtatacaagaagcttttcgaagccatgggtacaataaccgaacaaactcaccacattacggtgctgtacacgcgccaacgactntgcctcgttaacgaactgcgatcttccttgattcgatctatgcgataacttcttcaccgcattctctctcccatcatatcaatttacccttcacaaatcagtataatattggagagaacacatattagaataagtctcagattgtttgcttaccaagtaaaaccagatattagtaacatctatttatccgtgttgaactttctccaaaattataattccaattcgtcaacctttctgggtatagaaaatngcttccttaatccctaataaaattcatt

SEQ ID NO: 13288 - DNA, 429 bp, Glycine max
  unsure at all n locations
ctgatttggactggcacggtcattatctaacgagcacaatgcanatcttacaaatcgtgtcatcacattatggtacaggtaatntatgtccataataggttttaattttgacctaagttcttttgggagggttgcatcatgaacttatgcccatacacattattgatttatttcattatattattagaccccctgagctgctgcttgggacaacaaggtatgggccacctgtagatatgtggtctgtagggtgcatttttgcagagcttcttcatgggaagcctatctttcctggaaaagatgaggttagtgataatatgtataattcttgtctgatattacgggtaaagctaaagtggttgtgaaattgtattgaggcgaggcatgcttctatccagtatgttatcactactcagtatacaagatgtc

SEQ ID NO: 13289 - DNA, 434 bp, Glycine max
  unsure at all n locations
agctngtcacgaaacagagggttattctttatcaatttcttcagtcagccagcattatgtcttgtgcagaatttgtttctccatacttgccagcaacaatatttttcccaattcaattttaactagcaacaaaataaatgactaagcaataagcaaattggaaaaaaataacacaacagccaaacaccacagataacctacttgtccaatgcttctaagtacttctactttcgtatctcaaagaagatcttcatggagtatttattgtcatccaacttcataaaaccagacaagtacttatccaccttatcccactccctatttctcaccatatcctcaaaatacctcatgttaaagaaaaatcccgattattgctccttcaagttcacaaattcacaaattcacatacataataacaaattagactanatata

SEQ ID NO: 13290 - DNA, 275 bp, Glycine max
aatgaataaaaaatctgcacctatctccagactttgtgtgatatgctcctatgccgaccaccacacagacctatgtccttcatggcaacaatctgaagcaattgaacagcctatatcttatgtcgcaaacatctacaacagacctctcttacctcagcatcaaaatcagccacaacataataactatgacctcttcagcaataggtacaatcccgaatggaggaatcatcccaaccttatatggtcgaatgcttcacaacaacagcaacaacaac

SEQ ID NO: 13291 - DNA, 363 bp, Glycine max
  unsure at all n locations
gcttgatcanattcaacgacaatagtttttctcggatgtccaataaagttccgtaatatatcgagacgctccagattgaaattggaagctcgtatcaaaatcatacgacattaacgtttgactcggatgtccgattgactcccgtaatatatcgtgacgctccaaattgaaaacagaagctctaagacaattcaaacgacaataactctgtattcggatgttcgattgagtcccgtaatatatcgagatgctccatattgaaaacggaagctcgtatcaaaagcaaaccacaataactttttactcggatgtccgattgagtcccataatatatcgagacgctcgaaattgaatacggatgct

SEQ ID NO: 13292 - DNA, 428 bp, Glycine max
  unsure at all n locations
agcttgtcaaaggatggacagttccattagtttctacagtctatgtagcatctttctcaactgattcttcaaaatctccaaaggtctcctgagctgtttgtgcaagttgtattgccaaacccattacaacttctcttattttagtgcaagctcttcctttaaagagtatttcaatctgcaaattatccagagcaaaagttgataataagttacatccattgaaatatgcctcctattttctaattaaccanatgcaaaacagccacaacaacctataatgcatgacctgaacacaatatatcagacatcttgtacttgtgacatcattattgccatggctttggtataattctatcacatgctgactgaaaaattgttgggagtataactagtaagagacctactttaacgaggagaaaagaaagtat

SEQ ID NO: 13293 - DNA, 500 bp, Glycine max
  unsure at all n locations
agtcacctgangcatcaagcttggcccaaacttcttgataattggctgtcacacaacccagctnttagaactcacccctactggaattccaagataagagaaaggaatttccaactggctacaattaagaaatagagctgcatccctacaccaacccactgatttgcccacacaaccgaaatggcttttggcataatttatcttgagcctagaaaccatctgaaaacacctcaggataatttttaggactctaacattatccttggtggcagccccaaaaaatagagtatcatctgcatattagagtatgttaacttcctccttttgacttcccacttggtagctgctgaacaggatcttagatatggctgtgttcatcanacctgtaaggccttccactactatatngaaaagcagaggtggtagggaatcaccctgccttaagcctctcttaggggatcacccttcctagtgngacttccatttaataaaatggatat

SEQ ID NO: 13294 - DNA, 429 bp, Glycine max
  unsure at all n locations
agcttgctcacaagattctccttgcctggcacttcaaaaccttctggttgggtcatatcgatgcaagctccattggagcttgtangcctangatcttcttcatcaatggattcctttgcttcttggaagataaaaggcagcggaatggagaaagaagagagagaggagactccacttcaaggagaagataagtctagaagaagctcaccaccataggaggccatggataagagcttggaggaagaaggagatgaatgaagggagggggagagaagagcacgatattntgtgctcaaaaagagctctganatctgaagttaatattcaaatgatcaatagtngaaaaaatgcacacacatgacctctattatagcctaagtgtacacaaaattggaaggaattcaaattcacttgaattgaaatgaattg

SEQ ID NO: 13295 - DNA, 436 bp, Glycine max
  unsure at all n locations
agcttctcccacanagacagtatcatctgcatattgcagaatgtttactggcaccttctgctntcctactaaataactgctgtacagacctttggatagagctgtcctcatcatgccagtcaagccttcagccacaatattgaaaaggaaaggggctaaggggtccccttgcctcaaacctctagtgggggaaaattcatttgaggggctgccatttatgagaatggatatagaagctgattgattgcaagcattgatccatttcctccatataggacagaaccccattctgaccatcatataatccagaaagttccatganacagagtcataagcctttgcaaagtccactttaaacaccaaagctggtttcttacttcttttagcttcctctattgcttcattgagaatcanagttccatgaaagatgtgtcta

SEQ ID NO: 13296 - DNA, 393 bp, Glycine max
  unsure at all n locations
agctngaatcttganactagattcttganttttgaaatcaaatttcctcttgaaccttgaagtgttcttgattcaatcttgaactgattctttgattcttgagatcatcatctttgttatcattaattgttcttgatctttgagctttntgtcatcacctttgtcatcatcagaacttctttgaatcaatcttgattcatcatgaagcttgcttctacaattatatccttactcactctagaaccatcaaacaccatagttttatcaaagcagcttaacaagacatggttggaagataaccagtccatacccagaataacatcaatttggctcagaggccaacanattagatcaatcactaatggtctaccagaaatttccacaggacaattc

SEQ ID NO: 13297 - DNA, 366 bp, Glycine max
  unsure at all n locations
agcttgcttctacatataatagatatagaaggtgtggngtgtatatgtattatctattgtaagatgttacattgctacttaaaagaaagtcctctaagaccacaccacatgccttgactctcatttggtgtcatgactcctatctcaaactcctccaccaataattctagtaaccaattaatggtttcttacatatccttctatctatatatattcaaaattctcaagagttttcttaaaccactcgcttctcaaatcaataccacaacgggtatttgtttacttggtattagagaggcattattgcagcanatcaagcattttcaaaagctaatgatgcaccanagggctatcttgccatatatg

SEQ ID NO: 13298 - DNA, 463 bp, Glycine max
  unsure at all n locations
agctntatacttcacaaagatgtcagcaacatcagatntaaacttcatagaataaatccaacacattcttgaataatcatcaatgaatgcaatataatacttactgtcattcaatgatggtgttttcatgggtcctcccacatctgtgtgtactaactgcagcttttgtgaagcccttgaagtcttgttttgttaggaagtctggtttgctttccatattggcaagcaacacattntggaggtaaattgtctaattctggcatatctttcactatattgttctttctcatgaaaagtagtgcagcatgatgaaagtgccccaatctcttgtgccaaagcattgtattatcatcctctatgtgtacagctgctngctgctcctcattcatcaagtccaagacaaaactcttgcctttcatttgaactntgatcatttctattagtgttgcatctttaatcacac

SEQ ID NO: 13299 - DNA, 226 bp, Glycine max
  unsure at all n locations
tgcacgctgcagcttaacatcataccactttcagggtgctggaactacttcacatggatttgatggtgcctatgncagttgaaagccttggaggaaagatgtatgcctatgttgctgtggatgatttctccagatttacctgcgtcaactttatcagagagaaatcagaaacctttgaagtattctcagagttgagtctaagacttcttagagagaaagactgtgt

SEQ ID NO: 13300 - DNA, 311 bp, Glycine max
  unsure at all n locations
agcttcgatgatcagttaggatggtgaagtggtgccctagtangtactgccaccacttcttgacggcggcggtgatggctgctaactcacaaacatatgttgacgaatccattaacttgcggcaaaactatntgctaaagaatgagatggggtggcctccccgcgtcaacactgccctcatgccggaccccgacgcgttcgtcaccacaacataaggaactttgaaattatgtaaggcgagaacacgcgttgccgagatagcgtccttgaggttctgattagccattcatactttgaagaccactaaactg

SEQ ID NO: 13301 - DNA, 484 bp, Glycine max
  unsure at all n locations
agcttctagactntatacaagaatgaagttctgataccacttgttaaacaagtggcctcagatatcttaagaaggcgggttgaattaagatattgcaaactatttccccaattaaaaattctatttcaatttcaatgcaagttgcaagttcccttaaaaatgaacttttaaataataattcacatagaaaaatctgaatataaatataaatcaataataaatgaaattctgataccgatgacagatgtcgtaccggatgtcacgacatcacacttcagaacatgcagattatatttgacagtatgaacagattanacaagttaataacacaagagaattgttaacccagttcggtgcaacgtcacctacatctgggggctaccaagccagggaggagatccactaaaatagtgttagttcaaagatctaacagccactgtttacaaccttctcacctaaccactacccatgcaacctctaccta

SEQ ID NO: 13302 - DNA, 402 bp, Glycine max
  unsure at all n locations
agcttgtaagtgtgggatctgctgtttatggaaagctctggtgcagtaagcacacactatacccaaaaggtatgccagtaggatcttttctgggtttatattatattagattatctatttcttggaacttacttgtccagtttttggtatacttttgaaggattcaagactcgagttaatttctctagcattcttgatccaacaagaatctgtacctatattgctgaagtcattgatgctggttgtcttggacctcttttcaaggtatcatgcctaaccatgtttctgtcttacgtctgaaaacgaaacaatattgacaagtcactggttcttgataatactggaatccatgtagtcaacccaccacaatatggtgtntgttgcttgttgtgacattttcag

SEQ ID NO: 13303 - DNA, 332 bp, Glycine max
  unsure at all n locations
ctctatgggaggtgactatttatcagacacaagtctattatgagacattcctatgagagttnttaatgttggtctataagcccaaagtgcattatctagtttaattgcccaatctttcctagatgcactaactggtttttcaagaattatttataactcgctattggacaattctatttggcccctagtttgtgggtgatatggggttgcaagcttttgagtcacccatatttagccaagaggccattaaacaacttattacagaagtcagcgcctttgtcactaatgattgctcgaggtgtgctaaatctggtgaaaaatattttctttga

SEQ ID NO: 13304 - DNA, 294 bp, Glycine max
tggtcataacttatcacacggaggtccatatgaggcgcataatatatcgagacgctcgaaattaaacaacgtatactctcaagagattcatatggtcgtaacttatcacacggaagtccgattcaggtgcataatacaccgagacgctcgaaattgaaccacgaatgttctcgagaaattcaaatggtcataaattttcaaacggcagtccgatttaagcgcattatacatcgagaatcttgaaattgaacaactgaagctatccagaaattcggatggtcgttacttgtcaca

SEQ ID NO: 13305 - DNA, 228 bp, Glycine max
agcttcataattcaatttcgagcgtctcaatatattacgggactcaatcagacatccgagcaaaacgttattgtcgtttggattagttcagagcttcagaattcaatttcgatcgtctcgatatattacgggactcaatcagacatctgaggaaaaaagttattgtcgtttgaatttgctgagagctccacattcaattttgagcgtgctcgaaggattaccggactt

SEQ ID NO: 13306 - DNA, 489 bp, Glycine max
  unsure at all n locations
gcttcctcggggccattcctgcgaaggctatacattggaaagttagtttacaatatatataacaatcattacaaacaagggccaaacaacacttctcatggcacgagtgtcaacatgcactatataaaataatcatattggggtcgtgctattttatgacacatacgtatttgcacacataaaaattttgtgtgaagcattttacgacacctatccatgtacatattntttgacaaaccttttcatgctacatcctatatatatacacacatttnttggaaggcttcttttgttacctactcacaaatacacatatnttgagaaacacttttacgctacccatccaacactttgtaaggcacttcatgctatatatattcatattatgcaaggcattntcatgctatatatattcatatgttgcaaggcatnttattcaacatattgcaaggcatttccatgctatatatattcacatatatacatacc

SEQ ID NO: 13307 - DNA, 427 bp, Glycine max
  unsure at all n locations
cttgacagtgcctgatttattgaccagctattntgcaccctttatatctctacagaaccaaatcaactctaccattntaacatacttcaaacagcaatgccgaacagattttattagcaagatagaatggttgctttcattaaacatccttgtcacctgtggatggttttgttactatgtaagtaagctaatcccgagagaatatgccttgtaaaattgcaaaccacagattctgtcatagctccacaatggtcacgcataaatttactgattgatcccgggtagacatactccatatatatgtacatatgatcgccaacctgaaaatacaaatgcttcaaaacgtcaatctaatttactatgacaaatatccttaacttccattggtgtatcgatatacttgaacaaaactaacaacaaaaataac

SEQ ID NO: 13308 - DNA, 341 bp, Glycine max
atgaagaccttcttaattattatgctatcatggaacatcctggtgtgttctttgtagaacctgacattctcatacactattaggcggatcctcatctaactcactcagtcgctactatctttcctcaccagcttgatccataaagaagttgcaactcttcactgcccaatatgctttggctcatttcaactagaagatgacatgcctttccaaacacaacccgataatgagacattcttatgggtgctttgtatgaagtcctatgacccaaagaacatcttctagcctggtactccaatctttcctgctaggctgcacaattctcgctaaaattctcttta

SEQ ID NO: 13309 - DNA, 275 bp, Glycine max
  unsure at all n locations
gcaatcttgaaattgaacaacggaagctcttgagttactcaaatggtaataacttgttacacggaagtccgattcaagcgcataatatatcgagatgctcganattgaacaacgaatgctctcgtgaaattcaaaatggtcataacttgtcacacggaagttccattcaggtgcataacatattcgagacgctcgaaattgaacaaccacagctctagagaaattcaaatggtcatatcttgtcaaacggaggtccgattcagccacataatata

SEQ ID NO: 13310 - DNA, 449 bp, Glycine max
  unsure at all n locations
agcttaacagttaatntactaattaaatatttctaatctaataagtcagttaacataaaaaataataattntgtaacttttaattaatttttcaattttgatcaaaataatttatcaattattttgatcaanagttactatagaaaatagataaattaaaattaaacacatttaaatactgtcataaaatatatcctatnttttcttcaatttatttttaattacgaggaatttatattgattagttntttccttccatgttcttctttatttcccaaataaggcaacatgacaccacaaagcacgtaaattaaatgataaagaattattatggtttaaccccgataattcannatccgaaaattagctatgactactacaaagttgggtggaataatattatttatccttaaatttactaaatttacttattaaaaaagcattcattt

SEQ ID NO: 13311 - DNA, 430 bp, Glycine max
cattatcttcatgattagataatacacatttcataccagtgcatgacttcaagtcatcaaagtaacgatctttagttaaaatcactaatatgatactcatgcatacgcacaagtaatacaactgcctacgcgtttaagagagaatgtgtgacagggatgaaagaaaagatatagtggatatttaagattttaaaaggaagatggtgtacttatcaaaagggtgatacaattagcaagtttatgtaaaaagactaaacttaccatcttgtaacagctggcaaataaataaagaagcttattgaaataatttttattatatagaatttattatatagaattcacttctaagtcatttaagtccttcagaaatatagacggatacacatgcatatagtatttaacaacatttactattaaaaatcaacaagac

SEQ ID NO: 13312 - DNA, 368 bp, Glycine max
  unsure at all n locations
gtgtatattaaggatgctattgaagttgtcttattgatgattgtaggttcccatatccaatctttttatacaactttatatattttaagttctgattntctgattgtagaatttcatctttaaactattactcttgttggatggttcaactaaatgtgaacgataatttttaacaagaaaatcccgccagggccaatggacatatttntaatgtgggatacccaaacaatgaggttatagntaggcagcttgctgaaatgatgactcacgttataggattaacgttgattgtttgatcctattagaatttcaacatggtatctgggaccattcaacanttattntcgttcaattctgcaagtttattc

SEQ ID NO: 13313 - DNA, 281 bp, Glycine max
  unsure at all n locations
aaatgttatctatataaatnttaaatgtaanaaaagatgttattaacaaaatgtcatctaattctgatcggaattgaaggaaaaaataaattatttgaatttatacttgataatttgattaatttcagattaaattattctcaaaatataattctaaatatatttgcatcatgatatccttccttctacttgaagttattcgaanaatatattatataatttacctgcataattttcatttttagctttattacagctaattctatttaaattaaatttgt

SEQ ID NO: 13314 - DNA, 381 bp, Glycine max
  unsure at all n locations
taccctgatgaggatgttccatatgttcttaaaactggactgattcatttgcttccaaagtttcatggccttgcaggtgaagacccgcacaaacatttgaaagaatttcacattgtctgctccaccatgaaacccccagatgtccaagaggatcacatatttatgaaggcttttcctcactcattagagggagtggcaaaggactggctgtattaccttgctccaaggtccatcacgagctgggatgaccttaagagagtattcttagaaaanattttccctgcttccaggaccacagccatcaggaaggatatctcatgtattagacaacttagtggagagagcttgtatgagtactgggagagatttaagaaactatgt

SEQ ID NO: 13315 - DNA, 384 bp, Glycine max
  unsure at all n locations
ctgtgtgctagtgttgctccatctacttcctgtgtcnaattttaatccccactgagtccagacactgtttgaactttattgttggaagagcttttgtcatcatatcagcaggattatctgaagtagaaatcttttctattaacacatcaccttgtgttaccacatcacgaataaaatgcatccttatatctatgtgctttatcctttcgtggtacatttggtttttggttaagtgaattgtgctttgactatcacaatgcacaacaacttcctttttacttacaccaagatcaccaacaagacctttaagccataaagcttctttcaccgcttcagtagctgccatatattctgcttctgtagtcgacaatgcaacagtggact

SEQ ID NO: 13316 - DNA, 422 bp, Glycine max
  unsure at all n locations
ttgcttctaccaatttaatctccatattctatntgattggatcccattttcatgtggtcacgcatatagcgcatcctactctatcgagaggtcaaaagatataactcctattatgtaggagggatgaatcatatctatatcactcacatctcttaatatgattattgtaagcctagctactacttttatgataactntgttacagatggtgtatgatagcattaaagcctataactctacatgtaggaatgtagtaacttcaaatcaaggacaactattaccttatgattgctatgagaagcgcttatgatagttaaatgactattatgaagcattctcatattggatctatctagtataaatatttactcctaatatttatacttgngtggtgacttgatatctcgtatccatgacctatg

SEQ ID NO: 13317 - DNA, 278 bp, Glycine max
  unsure at all n locations
caacggaagctcttgttatactcanatggtaataacttgtcacacgggagttcgattcaagcgcataatatatctagatgctcgaaattgaacaacgaatgctctcgtgaaagtcaaaatggtcataagcttgtcacacggaagtccgatttaggagcataacatatcgaaacgctcgaaattgaacacccaaagctcttaagaaattcaaatgggcatatctttcctaacggaagtccgattcagccacataatatatcgagaagctcgaattgaac

SEQ ID NO: 13318 - DNA, 287 bp, Glycine max
tcttttactcggatgactgattgagtcccgtcatatatcgagacgctcgaaattgaatgttgatgctctgagccaattcaaacgacaataatattttactcggatgtttgattgagtcccgtaatatatcgagacgctcgaaattgaatgttgatgctctgagcaaattcaaacgacaataactttttactcggatgtctgattcagtcccgtcacatattgagatgctcgaaattgaatgttgaagctctcagccacttcaaacgacaacaacattttactcggat

SEQ ID NO: 13319 - DNA, 421 bp, Glycine max
agcttagtaaagctaggcactaacaatctccctctttggctatatttgtctaaaacatacttagacactttctgagcaggtacgagcagttatgcaagtgggatcagcaactttcattatcagagtaatcaagcacagcggaaattctgcaagttgcaagtcgtttccaggatgtcaagacatctcacatgacatcagctttctgcttctgctccccctgtctccatgctcttactgcagcatcttctatcagctactagtctttttcaggatgtcaagacatctcatgtgacatcagctttcccttgtctccatgctcttactgcagcatcttctatcagctactagtagcttacatcagtcatcatcagcagcagcagtctccccctaaaatcatgtacatacaactccccctcaaaat

SEQ ID NO: 13320 - DNA, 379 bp, Glycine max
  unsure at all n locations
tactcggatgtctgattgagtcctgtaatatatcgacacgctcgaaattgaatgcttatgctctgagcaaattcatacgacaataactttttactcggatgtctgattgagtcccgtaatatatcgagaccctcgaaattgaatgctgatgctctgagcaaattcaaacgacaataactttttacacggatgtctgattgagtcatgtaatatatcgagacgctcgaaattgaatactgaagctctgagcaaattcaaacgacaataactttttactcggatgtctgantgaatcccataatatatcgacacgctcgaaatagaatcttgatgctctgagcaaattcaaacgaccataactctttactcggatgtctga

SEQ ID NO: 13321 - DNA, 389 bp, Glycine max
agcttaacaaaaggcatgcgaagtgggtggaattcctatagcaattcccttatgttatcaaacataaaaagggaaaaggtaatattgtagccgatgctctttctcggcgtcatgcattactttctatgcttgaaacaaaattgattggtcttgaatgtttgaaaagcatgtatgaaaatgatgaaacttttggagaaatttttaaaaattgtgaaaaattttcagaaaatggtttctttagacatgaaggctttcttttcaaagaaaacaaattgtgtgtgcctaaatgttctactagaaattttcttgttcgtgaagcacatgaaggaggtttaatggggcattttggggtccaaaagactctataaacattacaagaacatttttat

SEQ ID NO: 13322 - DNA, 430 bp, Glycine max
gctgaattgaaaatgttattagggactgattgatttggtcttctttcatgtgggcgtcggcatgctaattaatttcaaattcatgaatactcatctgaatttaagttgaaattgaaccaaaaaactagttttggtttagtttagatttaaatttacttcttttgtttatttgtaaaagtggagataagtcgaacttatttgaaaatgcaaagaatattttaatattaaaaaattattatgagaataaatttttcttatatttagtataggagaataaactattttttgaaaataaaataaaaattaatttttatgtactattaatatattattttccatcgtatactaacaaaaagccattttaagtaattttttacagtactataacattaattaacttatcatacatgatcattcttattggataata

SEQ ID NO: 13323 - DNA, 320 bp, Glycine max
agctttgatgcaacatttggagaggttaatgaatcaacgagatgatgcgctccatgagaggttggatcaaatggagaatagagatcataatgaagaagaaaggagtataagagggaatgatggtgttcctagacaaaactgaattgatgatattaaactcaacattcctccatttaaaggaaagaatgatccagaggcctacttggagtgggagatgaatatagagcatgttttctcatgcaacaactatgaggaggaacaaaaggtgaagcttgccgtcacggagttttccgactatgttcttgggtggtggaacaagc

SEQ ID NO: 13324 - DNA, 402 bp, Glycine max
agcttatcaaggacatgtttggataatttatacattccataaaatttaattattgattgaataaaaatatattcttgttataattactttaattattattatatatatcgtgtaatcgagcccgcactattaaggtttgtctacaatttacaaaaattaagtatttttagtgtaaattttctttttttaagtagattttagatagattaaggattatgtagattttatgcaaactcaataaactctcaatttataactgtattatgttttgtcgctttaattattttcaattgatgtgttattcttaaataaaagaaattttattcttaataacatcaaatccttaataataatattattgaaatatttaatcgatacaatatttatatacttgagtctgat

SEQ ID NO: 13325 - DNA, 335 bp, Glycine max
gcgtatcgatatattacgagactcaatttttcattcgtgtaaaaagttattgttgtttgatttttcccagagcttcagttttcaatttcgagcgtctcgatatactactggacacaatcagacatccgagtcaaaagttattgtcgtttgaatttgctcacagcatctgttttcaattacgagcgtatcgatatattacgggactcaatcgtagatccgtgtaaaaaggtattgtcggttgaaatttcttagaagcttcatttttcaattcgagcgtctcgaatactactggacacaatcggacatccgagtagaaagtattgtccttgaatttg

SEQ ID NO: 13326 - DNA, 371 bp, Glycine max
agcttgaacattatctccttttgggttcgcaggttcttccatgcacggaatccagtgatcatctcgattacaatgcacccaagagaccatatatctaacgctggttcaatctgaccaacgaccgattctggtgacatgtaaaaaggtgtccctctaaacttgaccttcccatactcagcatttgcatcttctctagtcttggacaacccaaaatcagcaatcttcagttgataccttgcatgatcatcagatgaaggaaagagaaggatgttgtccggtttgagatcacaatggacgactccttttcgatgaatgcaagaaagccctttgagaagcatacgagtgtagactcttacttcactatccgatat

SEQ ID NO: 13327 - DNA, 201 bp, Glycine max
atcttaacatggtagtcaaagatttcgattctcttcttctgcagtaaattcacccttttttagatctggtctcaaatgatttgcccatcgtagacggcagcttttcccacaacgggcaagtcctgaatatttatgtactgcattccaattgccttgtccgtgttgtttggcatattctaaccaaattgcatcctctgctgc

SEQ ID NO: 13328 - DNA, 389 bp, Glycine max
  unsure at all n locations
ttcatagctatactcgattaccaaaactatgtaatccattaccaatgctntaaaacggttaaaaatgaatttgtaagtgtgcaattgattacacatcatatgtaatcgattacgccaatgctgtaatcgattaccagagaggattttcgagaaaatctgccaacagtcacaacttttcattggatttttgaatggccatcaaaggcatttaaataggtgacttgggcacgaattttcttcagagttttcactgttcacaaaaggcataatcctctcaaacaaaaatctcttatcttcaaaaattccttggccaacacttgtgtattcaataagtaatgaggcttcattgaacatttgctctttaagagatataatnctcttcttctctc

SEQ ID NO: 13329 - DNA, 354 bp, Glycine max
agctttcagcaggaaagctaagtgtgaagtatgttattctgcacaggattggagctgcaaactgggttcccaccaatcatacttccactgttgccacaggtttgggtaaatttctgtatgctgttggaaccaaatccaaatttaattttggaaactatatctttgatcaaactgttaagcattcagaatcatttgctgtcaaattacccattgccttccctactgtattatgtggcattatgttgagtcagcatcccaatatgttaaactacactgactttgtgatgaagagagaatctcctctatccctgcactataaactgtttgaggggacacatgtcccagacattgtct

SEQ ID NO: 13330 - DNA, 311 bp, Glycine max
  unsure at all n locations
gctagcttataggaagcagcaacaccgttggcattcttgtcttatgcaacatnttaggatgcgccttccacaattgcgagatctatggtctttctgatacttggcttgaagtattattcactagtgaccgaagaaaagcatattctgataagttgcaagtatgacttataataggcacttaaaattctctatcactgcatgtgtctccatggaagaaagcaaacttaatactgctattttttctactgaggaaactgaacccacccttttactccttcaccttattatgcataattccttcctctaccatg

SEQ ID NO: 13331 - DNA, 359 bp, Glycine max
agcttgaatgctcatttgagcttatatgcatgttatttacacacaaagggaaagggagagataactgaccaaatcttttcatggctattcttccagaagaacgctcccctgatgtagtttcgtttatagcttggaccatctcatttttgctgacatatccatccttgttcttgtctaagaatacaaatgtatcaaccaaagtctcaaatgtgccctccagctttggcatcccaattcgtgatttctagggaagtcatggaaaaaaatttgaagatgtagccaaacatggaaattcaagggttattgttatcaatgcaagcatgatggaaatctatgcttgcctgaagaaatgcctgaaa

SEQ ID NO: 13332 - DNA, 343 bp, Glycine max
agcttctctattagctgcacttgactactatgtttgcttgcatagagacatcttcatctctgcttccccaggaaatatgcacaatgcattggtgagttgtgctatatgcatttttagatgtctctaattgaaggttaaattattaactaggtctgtactatttgggaattttcaaatagttctttatacttttatttttaattgagtccctaaactaaaaaggtattccctatagttttttggcagtttcaaatcgccagaaaatgacaatttatggcgtcttaaaaagactattgactcaataaaaaaaattcaagatcaagatctaattttaaaaaaaaaa

SEQ ID NO: 13333 - DNA, 371 bp, Glycine max
  unsure at all n locations
agctntgatttccattgttccggaaacctttcttttctcatgtgcacccaaacccaatcttcgggttcgaagacaccttctttctccctttgttggcttgtttagcatagcttttatttttcctctcaatttgatctttgactctctcatgaagcttcttcacatagtccgcctttgcttgaccttctttatgcttaaaaacagaaacattatgcataggcaaaagatcaagaggagttagtgggttaaaaccataaacaacttcaaaaggagaacaattagtggtgctatgaacagctctattgtaagcaaattccacatggggtaaacaagttttccaagtttttaagttcttcctcaaaactgtccta

SEQ ID NO: 13334 - DNA, 301 bp, Glycine max
agcttcttgttacaactagaggaagagaagttggtgcctgcttcacaagcacctttccaacgagagggtactttggacaaacctgtgtcttggaaactgatgtgttcaggccatattcctgtatcaaggactcctatgatcacatctgaggccaagttagaagcactccaaagtccttttccattctgtaagccaagaaaatgggagctgtattgtgtgtgaaggcttattagttcatcatgtatggctgaaaggaaaccatctatttggttcaagtactcaagctgcttatatgaaagtt

SEQ ID NO: 13335 - DNA, 336 bp, Glycine max
gatattataggacttcttcttacatccgagaaaaagttattgacggttgaatttgctcagaacttcaacatttaatttcgagcgtgtcgctatattacgggactatatcagacatccgagtaaaaagttattgtcgtttgaatttgctcagagcttcaacattcaatttcgagcgtgtcgatatattacgggactcaatcagacattcgagtaaaatggtattggtcgtttgaatttgctcagagcttcaacatttaagttcgagcgtctcggtatattatacgactcaattagacattcgagtaaaaggtattgtcgtttgaatttgctctgagc

SEQ ID NO: 13336 - DNA, 332 bp, Glycine max
catatgtactttgtaatgtctacctttttgattttatcatagattattggggctaaaatatgcgcctggtaataggtattttcttaaacgagaataggtatggtagagaatagttcaacatcagcctacacagtatccaacatcagaggagttgagtattgggaggatcaagtctaaagcttgtgatcttcggggtcaccatattgcacgaagagtctggaaagattactatgctaaggtctttctctattgtacctctcctaacacatacacacattagtgctatgttatacctgttggcccccaacattgattctcaatctgtttaacca

SEQ ID NO: 13337 - DNA, 367 bp, Glycine max
agcttcgcatgttcatttaattgtgccaacaaatgaattttagccccatgacttagaacaagatcacgacatctatgcgaatccccagcgacatttcctaatgcccacactgcctgtgagtacccaaaataccaagggtaaaatgttaaagcttttaataaatgatagcatggaacagtacaacaaggtattgttgtcttctgttgtcggctgcaaattaataaatggttaaatacaaccaccccacgcacaaacatacagataccccaccacccccctaccccaaaatttctttcttaacatgcaatacctgctcatacaactttacaccacaataagcaaccccaattctaaaattatacataac

SEQ ID NO: 13338 - DNA, 366 bp, Glycine max
agcttgccttgccccttgatatatttgagggactcatggtcactatgaatgacaaattccttgggataaaggtagtgttgccatgttttcaaagcccgtactaaggcatacaactccttatcataagttgaatagttaagggtaggaccacttaacttttcactaaaataagcaattggatggccttcttgcatcaacacagccccaatcccaacatttgaagcatcacactcaatttcaaaagatttttgaaagtttggcaacgcaagtatgggggcattaattagcttttgcttaagaacattgaaagcttcttcttgtttctctccccatatgaaaccaacatttttcttgaacacttcattg

SEQ ID NO: 13339 - DNA, 375 bp, Glycine max
tagcttgagggggggaaccttgcaatggatatgtttatgctctatgggatcgaggtgagggtcattcgcggagtgcggtatgagggtgctgcctctgctactgggaggttgtatgtgtatgatgggttgtatataattcatgaatgctggtttgatgtggggaaatcgggttttggggtttttaagtataagctgtgtatgattgatgggcattctaatatggggactgtggtgttgaatgaggctcttttgcttaggaacgatcccttgagtttcaaaccctcgttttgttagtcgcttgatgttttaaattaggaagataacgcggctgttccgcttttaattacattgatcctatctttgacctctgtaata

SEQ ID NO: 13340 - DNA, 361 bp, Glycine max
atcggacatccgagtgaaaagttatgaccatttgaatttctcgagagcttcctatgtttaattttgagcgtctcgatatattatacgcctgaatcgaacctcagtgtaaaaagttatgaccatttgaatttctttagagcatccgttgttcattttcgagcgtctctatatgtgatgcaccttaatcggacctccgtgtgaaaagttatgaccatttgaatttctcgagagcttccgttgttcaatttcgagcgtctcgacatattatgcgcccgaatcggacatccatgggaaaagctatgaccatttgaatttctcgagagcttccagtggtcaatttcgagcgtctcgacatattatg

SEQ ID NO: 13341 - DNA, 312 bp, Glycine max
  unsure at all n locations
tgaaggtaactanatgccttggtaacttggtaacccatctgtgccttgaatcataaatctgtacttggtgcaagagtctatggtttattctcctctgctgaccaccatacaatcctttgcccttctatgcagcaacctggagcaattgagcagcctaaagcttatgttgcaaacatttacaatagacctcctcaacctcagcagaaaatcaaccacaacagaacaattatgacctctccagcaacatatacaatcccggatggaggaatcatcctaatctcaaatgggctagccctcaacaacaacaacagc

SEQ ID NO: 13342 - DNA, 379 bp, Glycine max
agcttgagaacaatttatttgtatgtccttaaattttataattagtgtactgagaagtgtaaatatcaatcaatctcttattgcataaaaataaaattctagaattatttatatgatagtctctcataaccttattttttataattatatctttcagtctttttatctcattattcatcttatttcacatttccttttcttattcaaaattgttgcataattatatatgtgatatcttaaaaaatattaaatattaatttgttatggagagaaatttaaatctaagacttctttcttcttttttcttatttcttattttaactattaagtcaacctattaactccttatatatgtgatacttaaatttttctttactta

SEQ ID NO: 13343 - DNA, 393 bp, Glycine max
  unsure at all n locations
agcttgcttgcctctagttgacaaaggtgcggattactattangtatcttcgcatgccacctgactcacgggttggggtgacagaactgtggggtggttgacaaaagcgggacttttgctcctacatatcttcaattgcgagactacatagttcttcaatttttgtgtgagactacaaatagtctcaatgttattttactaaaatgcgaacatgctaacatgctttagcaaagaaacaaaccttcaactgatcaaggcaacatatatttttttgaataaaaacaatgcgtctattggagaaggaaagtatgctaataaaattttctcataaccacaaatgagattttggatggtagcatttcgtttctaaatgaccatttagaagaaacactg

SEQ ID NO: 13344 - DNA, 408 bp, Glycine max
  unsure at all n locations
agctntgaagaaaaaagagtaagattgagaaatgtttctgtttaataatgacactttgcgaaaaaaatctcaaagatattggacaatgttccctacaacaaaaagctcaatcctttgtttaacaaagttatttgttttgtgttgtgattgcttatcctcactccatgagtttgtttctttgtaaatctttcaaacacttttaattgagaaattcaagagtggctttgttactagagaatataagcaggaaacaagaatcaaacccgtatagttaactgggaaagctaaggattataatcgacattgattcatcattttgattttaatttaacatttccaattaaaataaacatgaaacatttgtttcattcagcttctttaataaaaaaataagatttgaaaattaaa

SEQ ID NO: 13345 - DNA, 348 bp, Glycine max
  unsure at all n locations
tctcgatatattatgcgcctgaatcagacttccgtttcaaaagttatgaccatatgaatttctccactgtattccgtgtgacaagttatgaccatttgaatttctcgatagcattcgttgttcaatttcgagcgtctcgatatattatgtgccagaatcggacttccgtgtgacaagttatgaccatttgaatttgttgagagcatccgttgttagatttcgagtatctcgatatattatgcgcctgaatcggacatccgtgtgacaagttatggccatatgaatttctcgagagcattcngttgtcaatttcgagcgtctcgatatagtctgcgcgttaatcggact

SEQ ID NO: 13346 - DNA, 361 bp, Glycine max
agcttgaaattgaacaatagaagctctctagaaattcaaatggtcataacttgtcacacgaagtacgattcaggcgcataatataccgagatgctcaaaattgaacaacggaagctctcgagaaattcaaatggtcataacttatcacacggaagtccgattcaggcgcataatatatcgagacggtcaaaattgaacaacggatgctctcgataaattcaaatggtcataacttttcaaacggacatccgattcaagcgcataatatattcagaagctctaaattgaataacagaagctctcgagaaattcaaatgggcataactattcacacgaagttcgattcaagggcataatatac

SEQ ID NO: 13347 - DNA, 442 bp, Glycine max
agcttatcaagacctggagacaagttatgaactaaacaggtgcatccaaaaatatgtggatcaacatgaagcaatagttctttaagaaaaaaatggaatgtggtattttatttttaatagaggaagaaggcattcgatttaccaaaaaacaggctgtcaaaactgcatcaccccaatgccggacaggtacattggcatgaagtaataatgtccgagcagtctcaacaagattcctattcttcctttcggcaatgccattctgttgaggagtatgaggacaagaagactgatggagaatgccctgcgctgacaaaaaagaagaaatagcagaagaaaagtattctttcgcattatcactcctaaggatcttaattgtcttaccaaacttgagtttaatttcattaacaaaagaagtgagaatcgaagaaaatttagatcattc

SEQ ID NO: 13348 - DNA, 465 bp, Glycine max
  unsure at all n locations
agcttcataaaagtttatatggctngaaacatgcactgaggcagtggtacaagaagtttaatgagtttatgagcaacttatgattcaacagatgtggcatgaaccattgctactacgttaagaaatatactaatagctatgttatccttgccaagtatgttaatgacatgttgattgcaggatctagtatggcagaaattaacaggttgaagcagcagttgacagaaaactttgaaatgaaggatcttggttcagctaaacaaatatttggtatgagaattcttagaaacagatcagaaggaattttgaagttgtctcaggagaaatatatacataagttgtttgacaggttttaccttgaagattctaacaccaggaatacccctttgggatctcatttgaagttntcaaagaagcaatctttgcagatagatgaagaanaatgttacatgtcaagagtaccat

SEQ ID NO: 13349 - DNA, 375 bp, Glycine max
  unsure at all n locations
gcttgtaatcgattaccaaaagttttaaacattntataacagtctttagaaatttgaatntaaatttcaaagcctgtaatcgattatagcttgtgtgtaattgattgccagacattaaaattcaaatttcaagactgaagagtcacaactcttcaaaagctaactgcataatcgattaccacatttatgtaatcgattaccagtagggaattttcgaaaataacttccaagagtcacaattgttcaagaaatttttgaatggtcatcaaaggcctataaataggtgacttaggacacaaaattacctagagagtttttctgaacaaaattgtcttatcctcttcaaacaaaaatgtcttatcactctcaaaatat

SEQ ID NO: 13350 - DNA, 468 bp, Glycine max
  unsure at all n locations
gcttctggtgggacatcttgacttgctttcctttctgacattcaccacagattctgccttcttctattttcagattgggaatgcctctaacagcacctttgtcaatgattttcttcatgcctcttaagtgcagatgtccaaatctttgatgccatattttgacttcatcttctttggaggatagacatgtggaggagtaactggtttcttgaggtgtccataggtaacagttgtcctttgatctgctgcccttcattagaacttcactcttctcatttgtcaccaagcattctgactntgtgaagtttacattgaatccttcatcacacaactgactgatgctgatcaagtttgcagtcagtcccttcaccagcagtactttgttcagactangaagtccatcatggactagctntcccattccagtgatctnttctttagagccatctccaaatgtcacatagctag

SEQ ID NO: 13351 - DNA, 468 bp, Glycine max
  unsure at all n locations
gcttcttggaggttngatggatcctcctctattgtataggccatataatcgggcccatagtctttagcaattcttgctttcttacctcttcgaggctctatttttggttctggtagtgcaagattttcactactaatagtaggaaggcgactggatgaagtaccaccactattccttaatttaaaaggaaatttattttcataaaaatcagcatcatttgactctatgatcacttttgtgtttaggtcataaaacctatacgctttgttattaatagcataactaatgaacacacattcataggctctacttgtgagtttaaccctcttggggtctgggatccttacataggccagacatccncaagttctcaaataggacaaatttggttgtcttttccttaatatctcatagggagatgtcttgctttttgattngnggattctatttatcacataacaaacattt

SEQ ID NO: 13352 - DNA, 383 bp, Glycine max
  unsure at all n locations
agcttaccaagaatgttatacaaagatgatttactttgtgaagcatgtaaggggaaatagattaaaaccttcttttcaagaaaaaactttgtttccacctcaaaaccactcgaactattacatattgatttgtttggtcatatggtctggtagtagttgacgactactcaagatggacatgggttatgttccttgctcacaagaatgagtcttttaaggtcttctttaaattctctaaaagagttcaaattgaaaagggagtatgtattactttaatcagaagtgatcatggtggaaagtttaaaaatgagagctttcatcaattctgtgaaaaaaatggaattcttcataacttctatactactagaacancctaaaaaaat
